United States Patent Application Publication US 2018/0305689 A1 - sequence listing, part 71

SEQ ID NO: 986802 - RNA, 19 nt, Artificial Sequence
  Description of Artificial Sequence: Synthetic oligonucleotide
  Sense strand starting at position 975 of SEQ ID NO: 914214
gcaguaagugaauagauca

SEQ ID NO: 986803 - RNA, 19 nt, Artificial Sequence
  Description of Artificial Sequence: Synthetic oligonucleotide
  Antisense strand to SEQ ID NO: 986802
ugaucuauucacuuacugc

SEQ ID NO: 986804 - RNA, 19 nt, Artificial Sequence
  Description of Artificial Sequence: Synthetic oligonucleotide
  Sense strand starting at position 1536 of SEQ ID NO: 914214
agaggcauccuugaaugua

SEQ ID NO: 986805 - RNA, 19 nt, Artificial Sequence
  Description of Artificial Sequence: Synthetic oligonucleotide
  Antisense strand to SEQ ID NO: 986804
uacauucaaggaugccucu

SEQ ID NO: 986806 - RNA, 19 nt, Artificial Sequence
  Description of Artificial Sequence: Synthetic oligonucleotide
  Sense strand starting at position 399 of SEQ ID NO: 914214
ugccuuagacuagauaucu

SEQ ID NO: 986807 - RNA, 19 nt, Artificial Sequence
  Description of Artificial Sequence: Synthetic oligonucleotide
  Antisense strand to SEQ ID NO: 986806
agauaucuagucuaaggca

SEQ ID NO: 986808 - RNA, 19 nt, Artificial Sequence
  Description of Artificial Sequence: Synthetic oligonucleotide
  Sense strand starting at position 1251 of SEQ ID NO: 914214
ccaccucuggcuuauaaag

SEQ ID NO: 986809 - RNA, 19 nt, Artificial Sequence
  Description of Artificial Sequence: Synthetic oligonucleotide
  Antisense strand to SEQ ID NO: 986808
cuuuauaagccagaggugg

SEQ ID NO: 986810 - RNA, 19 nt, Artificial Sequence
  Description of Artificial Sequence: Synthetic oligonucleotide
  Sense strand starting at position 1342 of SEQ ID NO: 914214
ugcuuagaauagucagaaa

SEQ ID NO: 986811 - RNA, 19 nt, Artificial Sequence
  Description of Artificial Sequence: Synthetic oligonucleotide
  Antisense strand to SEQ ID NO: 986810
uuucugacuauucuaagca

SEQ ID NO: 986812 - RNA, 19 nt, Artificial Sequence
  Description of Artificial Sequence: Synthetic oligonucleotide
  Sense strand starting at position 782 of SEQ ID NO: 914214
auuccugaauguguaagaa

SEQ ID NO: 986813 - RNA, 19 nt, Artificial Sequence
  Description of Artificial Sequence: Synthetic oligonucleotide
  Antisense strand to SEQ ID NO: 986812
uucuuacacauucaggaau

SEQ ID NO: 986814 - RNA, 19 nt, Artificial Sequence
  Description of Artificial Sequence: Synthetic oligonucleotide
  Sense strand starting at position 307 of SEQ ID NO: 914214
uacaucuaguggguaaaua

SEQ ID NO: 986815 - RNA, 19 nt, Artificial Sequence
  Description of Artificial Sequence: Synthetic oligonucleotide
  Antisense strand to SEQ ID NO: 986814
uauuuacccacuagaugua

SEQ ID NO: 986816 - RNA, 19 nt, Artificial Sequence
  Description of Artificial Sequence: Synthetic oligonucleotide
  Sense strand starting at position 306 of SEQ ID NO: 914214
auacaucuaguggguaaau

SEQ ID NO: 986817 - RNA, 19 nt, Artificial Sequence
  Description of Artificial Sequence: Synthetic oligonucleotide
  Antisense strand to SEQ ID NO: 986816
auuuacccacuagauguau

SEQ ID NO: 986818 - RNA, 19 nt, Artificial Sequence
  Description of Artificial Sequence: Synthetic oligonucleotide
  Sense strand starting at position 731 of SEQ ID NO: 914214
gagagugucucaccaugaa

SEQ ID NO: 986819 - RNA, 19 nt, Artificial Sequence
  Description of Artificial Sequence: Synthetic oligonucleotide
  Antisense strand to SEQ ID NO: 986818
uucauggugagacacucuc

SEQ ID NO: 986820 - RNA, 19 nt, Artificial Sequence
  Description of Artificial Sequence: Synthetic oligonucleotide
  Sense strand starting at position 3184 of SEQ ID NO: 914214
uggagcauccuguauauau

SEQ ID NO: 986821 - RNA, 19 nt, Artificial Sequence
  Description of Artificial Sequence: Synthetic oligonucleotide
  Antisense strand to SEQ ID NO: 986820
auauauacaggaugcucca

SEQ ID NO: 986822 - RNA, 19 nt, Artificial Sequence
  Description of Artificial Sequence: Synthetic oligonucleotide
  Sense strand starting at position 3695 of SEQ ID NO: 914214
gcaggagugacaugacuua

SEQ ID NO: 986823 - RNA, 19 nt, Artificial Sequence
  Description of Artificial Sequence: Synthetic oligonucleotide
  Antisense strand to SEQ ID NO: 986822
uaagucaugucacuccugc

SEQ ID NO: 986824 - RNA, 19 nt, Artificial Sequence
  Description of Artificial Sequence: Synthetic oligonucleotide
  Sense strand starting at position 3061 of SEQ ID NO: 914214
gcccuugaacugcaucaaa

SEQ ID NO: 986825 - RNA, 19 nt, Artificial Sequence
  Description of Artificial Sequence: Synthetic oligonucleotide
  Antisense strand to SEQ ID NO: 986824
uuugaugcaguucaagggc

SEQ ID NO: 986826 - RNA, 19 nt, Artificial Sequence
  Description of Artificial Sequence: Synthetic oligonucleotide
  Sense strand starting at position 3407 of SEQ ID NO: 914214
agucaaugucagcaaaucu

SEQ ID NO: 986827 - RNA, 19 nt, Artificial Sequence
  Description of Artificial Sequence: Synthetic oligonucleotide
  Antisense strand to SEQ ID NO: 986826
agauuugcugacauugacu

SEQ ID NO: 986828 - RNA, 19 nt, Artificial Sequence
  Description of Artificial Sequence: Synthetic oligonucleotide
  Sense strand starting at position 1548 of SEQ ID NO: 914214
gaauguaacugguuccuaa

SEQ ID NO: 986829 - RNA, 19 nt, Artificial Sequence
  Description of Artificial Sequence: Synthetic oligonucleotide
  Antisense strand to SEQ ID NO: 986828
uuaggaaccaguuacauuc

SEQ ID NO: 986830 - RNA, 19 nt, Artificial Sequence
  Description of Artificial Sequence: Synthetic oligonucleotide
  Sense strand starting at position 266 of SEQ ID NO: 914214
uucugugauccaugauaau

SEQ ID NO: 986831 - RNA, 19 nt, Artificial Sequence
  Description of Artificial Sequence: Synthetic oligonucleotide
  Antisense strand to SEQ ID NO: 986830
auuaucauggaucacagaa

SEQ ID NO: 986832 - RNA, 19 nt, Artificial Sequence
  Description of Artificial Sequence: Synthetic oligonucleotide
  Sense strand starting at position 1680 of SEQ ID NO: 914214
cagggaucugagugagcua

SEQ ID NO: 986833 - RNA, 19 nt, Artificial Sequence
  Description of Artificial Sequence: Synthetic oligonucleotide
  Antisense strand to SEQ ID NO: 986832
uagcucacucagaucccug

SEQ ID NO: 986834 - RNA, 19 nt, Artificial Sequence
  Description of Artificial Sequence: Synthetic oligonucleotide
  Sense strand starting at position 3464 of SEQ ID NO: 914214
uuaaacuaccuguggugaa

SEQ ID NO: 986835 - RNA, 19 nt, Artificial Sequence
  Description of Artificial Sequence: Synthetic oligonucleotide
  Antisense strand to SEQ ID NO: 986834
uucaccacagguaguuuaa

SEQ ID NO: 986836 - RNA, 19 nt, Artificial Sequence
  Description of Artificial Sequence: Synthetic oligonucleotide
  Sense strand starting at position 779 of SEQ ID NO: 914214
ugaauuccugaauguguaa

SEQ ID NO: 986837 - RNA, 19 nt, Artificial Sequence
  Description of Artificial Sequence: Synthetic oligonucleotide
  Antisense strand to SEQ ID NO: 986836
uuacacauucaggaauuca

SEQ ID NO: 986838 - RNA, 19 nt, Artificial Sequence
  Description of Artificial Sequence: Synthetic oligonucleotide
  Sense strand starting at position 1059 of SEQ ID NO: 914214
cagauaacuccuggaacgu

SEQ ID NO: 986839 - RNA, 19 nt, Artificial Sequence
  Description of Artificial Sequence: Synthetic oligonucleotide
  Antisense strand to SEQ ID NO: 986838
acguuccaggaguuaucug

SEQ ID NO: 986840 - RNA, 19 nt, Artificial Sequence
  Description of Artificial Sequence: Synthetic oligonucleotide
  Sense strand starting at position 1334 of SEQ ID NO: 914214
ucuuuagcugcuuagaaua

SEQ ID NO: 986841 - RNA, 19 nt, Artificial Sequence
  Description of Artificial Sequence: Synthetic oligonucleotide
  Antisense strand to SEQ ID NO: 986840
uauucuaagcagcuaaaga

SEQ ID NO: 986842 - RNA, 19 nt, Artificial Sequence
  Description of Artificial Sequence: Synthetic oligonucleotide
  Sense strand starting at position 1223 of SEQ ID NO: 914214
ggugauugugcagaaagca

SEQ ID NO: 986843 - RNA, 19 nt, Artificial Sequence
  Description of Artificial Sequence: Synthetic oligonucleotide
  Antisense strand to SEQ ID NO: 986842
ugcuuucugcacaaucacc

SEQ ID NO: 986844 - RNA, 19 nt, Artificial Sequence
  Description of Artificial Sequence: Synthetic oligonucleotide
  Sense strand starting at position 724 of SEQ ID NO: 914214
aggguaugagagugucuca

SEQ ID NO: 986845 - RNA, 19 nt, Artificial Sequence
  Description of Artificial Sequence: Synthetic oligonucleotide
  Antisense strand to SEQ ID NO: 986844
ugagacacucucauacccu

SEQ ID NO: 986846 - RNA, 19 nt, Artificial Sequence
  Description of Artificial Sequence: Synthetic oligonucleotide
  Sense strand starting at position 3919 of SEQ ID NO: 914214
aggcaugacccauggcaua

SEQ ID NO: 986847 - RNA, 19 nt, Artificial Sequence
  Description of Artificial Sequence: Synthetic oligonucleotide
  Antisense strand to SEQ ID NO: 986846
uaugccaugggucaugccu

SEQ ID NO: 986848 - RNA, 19 nt, Artificial Sequence
  Description of Artificial Sequence: Synthetic oligonucleotide
  Sense strand starting at position 269 of SEQ ID NO: 914214
ugugauccaugauaauuug

SEQ ID NO: 986849 - RNA, 19 nt, Artificial Sequence
  Description of Artificial Sequence: Synthetic oligonucleotide
  Antisense strand to SEQ ID NO: 986848
caaauuaucauggaucaca

SEQ ID NO: 986850 - RNA, 19 nt, Artificial Sequence
  Description of Artificial Sequence: Synthetic oligonucleotide
  Sense strand starting at position 3435 of SEQ ID NO: 914214
cagggcucugucugaugaa

SEQ ID NO: 986851 - RNA, 19 nt, Artificial Sequence
  Description of Artificial Sequence: Synthetic oligonucleotide
  Antisense strand to SEQ ID NO: 986850
uucaucagacagagcccug

SEQ ID NO: 986852 - RNA, 19 nt, Artificial Sequence
  Description of Artificial Sequence: Synthetic oligonucleotide
  Sense strand starting at position 1101 of SEQ ID NO: 914214
ggauuagccuggcuuauaa

SEQ ID NO: 986853 - RNA, 19 nt, Artificial Sequence
  Description of Artificial Sequence: Synthetic oligonucleotide
  Antisense strand to SEQ ID NO: 986852
uuauaagccaggcuaaucc

SEQ ID NO: 986854 - RNA, 19 nt, Artificial Sequence
  Description of Artificial Sequence: Synthetic oligonucleotide
  Sense strand starting at position 1539 of SEQ ID NO: 914214
ggcauccuugaauguaacu

SEQ ID NO: 986855 - RNA, 19 nt, Artificial Sequence
  Description of Artificial Sequence: Synthetic oligonucleotide
  Antisense strand to SEQ ID NO: 986854
aguuacauucaaggaugcc

SEQ ID NO: 986856 - RNA, 19 nt, Artificial Sequence
  Description of Artificial Sequence: Synthetic oligonucleotide
  Sense strand starting at position 3159 of SEQ ID NO: 914214
gcaugucacugaccaucua

SEQ ID NO: 986857 - RNA, 19 nt, Artificial Sequence
  Description of Artificial Sequence: Synthetic oligonucleotide
  Antisense strand to SEQ ID NO: 986856
uagauggucagugacaugc

SEQ ID NO: 986858 - RNA, 19 nt, Artificial Sequence
  Description of Artificial Sequence: Synthetic oligonucleotide
  Sense strand starting at position 1083 of SEQ ID NO: 914214
aagggauuccucugcugug

SEQ ID NO: 986859 - RNA, 19 nt, Artificial Sequence
  Description of Artificial Sequence: Synthetic oligonucleotide
  Antisense strand to SEQ ID NO: 986858
cacagcagaggaaucccuu

SEQ ID NO: 986860 - RNA, 19 nt, Artificial Sequence
  Description of Artificial Sequence: Synthetic oligonucleotide
  Sense strand starting at position 1710 of SEQ ID NO: 914214
guuggaaagucuuuccuuu

SEQ ID NO: 986861 - RNA, 19 nt, Artificial Sequence
  Description of Artificial Sequence: Synthetic oligonucleotide
  Antisense strand to SEQ ID NO: 986860
aaaggaaagacuuuccaac

SEQ ID NO: 986862 - RNA, 19 nt, Artificial Sequence
  Description of Artificial Sequence: Synthetic oligonucleotide
  Sense strand starting at position 3602 of SEQ ID NO: 914214
agucauaaaggcugucuca

SEQ ID NO: 986863 - RNA, 19 nt, Artificial Sequence
  Description of Artificial Sequence: Synthetic oligonucleotide
  Antisense strand to SEQ ID NO: 986862
ugagacagccuuuaugacu

SEQ ID NO: 986864 - RNA, 19 nt, Artificial Sequence
  Description of Artificial Sequence: Synthetic oligonucleotide
  Sense strand starting at position 1443 of SEQ ID NO: 914214
gaccaaguuucuguaguug

SEQ ID NO: 986865 - RNA, 19 nt, Artificial Sequence
  Description of Artificial Sequence: Synthetic oligonucleotide
  Antisense strand to SEQ ID NO: 986864
caacuacagaaacuugguc

SEQ ID NO: 986866 - RNA, 19 nt, Artificial Sequence
  Description of Artificial Sequence: Synthetic oligonucleotide
  Sense strand starting at position 1112 of SEQ ID NO: 914214
gcuuauaacuugccaugau

SEQ ID NO: 986867 - RNA, 19 nt, Artificial Sequence
  Description of Artificial Sequence: Synthetic oligonucleotide
  Antisense strand to SEQ ID NO: 986866
aucauggcaaguuauaagc

SEQ ID NO: 986868 - RNA, 19 nt, Artificial Sequence
  Description of Artificial Sequence: Synthetic oligonucleotide
  Sense strand starting at position 931 of SEQ ID NO: 914214
gaccauuacugggaaagac

SEQ ID NO: 986869 - RNA, 19 nt, Artificial Sequence
  Description of Artificial Sequence: Synthetic oligonucleotide
  Antisense strand to SEQ ID NO: 986868
gucuuucccaguaaugguc

SEQ ID NO: 986870 - RNA, 19 nt, Artificial Sequence
  Description of Artificial Sequence: Synthetic oligonucleotide
  Sense strand starting at position 2734 of SEQ ID NO: 914214
cuccuuuaccgcuaaagca

SEQ ID NO: 986871 - RNA, 19 nt, Artificial Sequence
  Description of Artificial Sequence: Synthetic oligonucleotide
  Antisense strand to SEQ ID NO: 986870
ugcuuuagcgguaaaggag

SEQ ID NO: 986872 - RNA, 19 nt, Artificial Sequence
  Description of Artificial Sequence: Synthetic oligonucleotide
  Sense strand starting at position 3640 of SEQ ID NO: 914214
cagcuuuggccugaggcua

SEQ ID NO: 986873 - RNA, 19 nt, Artificial Sequence
  Description of Artificial Sequence: Synthetic oligonucleotide
  Antisense strand to SEQ ID NO: 986872
uagccucaggccaaagcug

SEQ ID NO: 986874 - RNA, 19 nt, Artificial Sequence
  Description of Artificial Sequence: Synthetic oligonucleotide
  Sense strand starting at position 2527 of SEQ ID NO: 914214
guugcagugaguugaacaa

SEQ ID NO: 986875 - RNA, 19 nt, Artificial Sequence
  Description of Artificial Sequence: Synthetic oligonucleotide
  Antisense strand to SEQ ID NO: 986874
uuguucaacucacugcaac

SEQ ID NO: 986876 - RNA, 19 nt, Artificial Sequence
  Description of Artificial Sequence: Synthetic oligonucleotide
  Sense strand starting at position 1208 of SEQ ID NO: 914215
guaaauaauuacuugggau

SEQ ID NO: 986877 - RNA, 19 nt, Artificial Sequence
  Description of Artificial Sequence: Synthetic oligonucleotide
  Antisense strand to SEQ ID NO: 986876
aucccaaguaauuauuuac

SEQ ID NO: 986878 - RNA, 19 nt, Artificial Sequence
  Description of Artificial Sequence: Synthetic oligonucleotide
  Sense strand starting at position 2929 of SEQ ID NO: 914215
aacugaacugcagaguuua

SEQ ID NO: 986879 - RNA, 19 nt, Artificial Sequence
  Description of Artificial Sequence: Synthetic oligonucleotide
  Antisense strand to SEQ ID NO: 986878
uaaacucugcaguucaguu

SEQ ID NO: 986880 - RNA, 19 nt, Artificial Sequence
  Description of Artificial Sequence: Synthetic oligonucleotide
  Sense strand starting at position 603 of SEQ ID NO: 914215
augcccugagguuagauaa

SEQ ID NO: 986881 - RNA, 19 nt, Artificial Sequence
  Description of Artificial Sequence: Synthetic oligonucleotide
  Antisense strand to SEQ ID NO: 986880
uuaucuaaccucagggcau

SEQ ID NO: 986882 - RNA, 19 nt, Artificial Sequence
  Description of Artificial Sequence: Synthetic oligonucleotide
  Sense strand starting at position 2993 of SEQ ID NO: 914215
gcaaccaaucaaggauauu

SEQ ID NO: 986883 - RNA, 19 nt, Artificial Sequence
  Description of Artificial Sequence: Synthetic oligonucleotide
  Antisense strand to SEQ ID NO: 986882
aauauccuugauugguugc

SEQ ID NO: 986884 - RNA, 19 nt, Artificial Sequence
  Description of Artificial Sequence: Synthetic oligonucleotide
  Sense strand starting at position 493 of SEQ ID NO: 914215
aguuaacaguaaucugaag

SEQ ID NO: 986885 - RNA, 19 nt, Artificial Sequence
  Description of Artificial Sequence: Synthetic oligonucleotide
  Antisense strand to SEQ ID NO: 986884
cuucagauuacuguuaacu

SEQ ID NO: 986886 - RNA, 19 nt, Artificial Sequence
  Description of Artificial Sequence: Synthetic oligonucleotide
  Sense strand starting at position 1948 of SEQ ID NO: 914215
gagggauuguuucccacaa

SEQ ID NO: 986887 - RNA, 19 nt, Artificial Sequence
  Description of Artificial Sequence: Synthetic oligonucleotide
  Antisense strand to SEQ ID NO: 986886
uugugggaaacaaucccuc

SEQ ID NO: 986888 - RNA, 19 nt, Artificial Sequence
  Description of Artificial Sequence: Synthetic oligonucleotide
  Sense strand starting at position 1949 of SEQ ID NO: 914215
agggauuguuucccacaag

SEQ ID NO: 986889 - RNA, 19 nt, Artificial Sequence
  Description of Artificial Sequence: Synthetic oligonucleotide
  Antisense strand to SEQ ID NO: 986888
cuugugggaaacaaucccu

SEQ ID NO: 986890 - RNA, 19 nt, Artificial Sequence
  Description of Artificial Sequence: Synthetic oligonucleotide
  Sense strand starting at position 1375 of SEQ ID NO: 914215
gcaccuaaacaaugaaagu

SEQ ID NO: 986891 - RNA, 19 nt, Artificial Sequence
  Description of Artificial Sequence: Synthetic oligonucleotide
  Antisense strand to SEQ ID NO: 986890
acuuucauuguuuaggugc

SEQ ID NO: 986892 - RNA, 19 nt, Artificial Sequence
  Description of Artificial Sequence: Synthetic oligonucleotide
  Sense strand starting at position 2869 of SEQ ID NO: 914215
uuuacaugaccaugguaua

SEQ ID NO: 986893 - RNA, 19 nt, Artificial Sequence
  Description of Artificial Sequence: Synthetic oligonucleotide
  Antisense strand to SEQ ID NO: 986892
uauaccauggucauguaaa

SEQ ID NO: 986894 - RNA, 19 nt, Artificial Sequence
  Description of Artificial Sequence: Synthetic oligonucleotide
  Sense strand starting at position 2870 of SEQ ID NO: 914215
uuacaugaccaugguauau

SEQ ID NO: 986895 - RNA, 19 nt, Artificial Sequence
  Description of Artificial Sequence: Synthetic oligonucleotide
  Antisense strand to SEQ ID NO: 986894
auauaccauggucauguaa

SEQ ID NO: 986896 - RNA, 19 nt, Artificial Sequence
  Description of Artificial Sequence: Synthetic oligonucleotide
  Sense strand starting at position 3845 of SEQ ID NO: 914215
augaccuugcuaugaagau

SEQ ID NO: 986897 - RNA, 19 nt, Artificial Sequence
  Description of Artificial Sequence: Synthetic oligonucleotide
  Antisense strand to SEQ ID NO: 986896
aucuucauagcaaggucau

SEQ ID NO: 986898 - RNA, 19 nt, Artificial Sequence
  Description of Artificial Sequence: Synthetic oligonucleotide
  Sense strand starting at position 372 of SEQ ID NO: 914215
auaugcugagcucagacau

SEQ ID NO: 986899 - RNA, 19 nt, Artificial Sequence
  Description of Artificial Sequence: Synthetic oligonucleotide
  Antisense strand to SEQ ID NO: 986898
augucugagcucagcauau

SEQ ID NO: 986900 - RNA, 19 nt, Artificial Sequence
  Description of Artificial Sequence: Synthetic oligonucleotide
  Sense strand starting at position 2499 of SEQ ID NO: 914215
augguuauucucuggaaua

SEQ ID NO: 986901 - RNA, 19 nt, Artificial Sequence
  Description of Artificial Sequence: Synthetic oligonucleotide
  Antisense strand to SEQ ID NO: 986900
uauuccagagaauaaccau

SEQ ID NO: 986902 - RNA, 19 nt, Artificial Sequence
  Description of Artificial Sequence: Synthetic oligonucleotide
  Sense strand starting at position 598 of SEQ ID NO: 914215
cauuaaugcccugagguua

SEQ ID NO: 986903 - RNA, 19 nt, Artificial Sequence
  Description of Artificial Sequence: Synthetic oligonucleotide
  Antisense strand to SEQ ID NO: 986902
uaaccucagggcauuaaug

SEQ ID NO: 986904 - RNA, 19 nt, Artificial Sequence
  Description of Artificial Sequence: Synthetic oligonucleotide
  Sense strand starting at position 789 of SEQ ID NO: 914215
caguucugccucuaaggaa

SEQ ID NO: 986905 - RNA, 19 nt, Artificial Sequence
  Description of Artificial Sequence: Synthetic oligonucleotide
  Antisense strand to SEQ ID NO: 986904
uuccuuagaggcagaacug

SEQ ID NO: 986906 - RNA, 19 nt, Artificial Sequence
  Description of Artificial Sequence: Synthetic oligonucleotide
  Sense strand starting at position 2204 of SEQ ID NO: 914215
cggugucugacacauaaau

SEQ ID NO: 986907 - RNA, 19 nt, Artificial Sequence
  Description of Artificial Sequence: Synthetic oligonucleotide
  Antisense strand to SEQ ID NO: 986906
auuuaugugucagacaccg

SEQ ID NO: 986908 - RNA, 19 nt, Artificial Sequence
  Description of Artificial Sequence: Synthetic oligonucleotide
  Sense strand starting at position 2445 of SEQ ID NO: 914215
caugguaacguuuaacuga

SEQ ID NO: 986909 - RNA, 19 nt, Artificial Sequence
  Description of Artificial Sequence: Synthetic oligonucleotide
  Antisense strand to SEQ ID NO: 986908
ucaguuaaacguuaccaug

SEQ ID NO: 986910 - RNA, 19 nt, Artificial Sequence
  Description of Artificial Sequence: Synthetic oligonucleotide
  Sense strand starting at position 649 of SEQ ID NO: 914215
ggauguuaaaugcaaguuu

SEQ ID NO: 986911 - RNA, 19 nt, Artificial Sequence
  Description of Artificial Sequence: Synthetic oligonucleotide
  Antisense strand to SEQ ID NO: 986910
aaacuugcauuuaacaucc

SEQ ID NO: 986912 - RNA, 19 nt, Artificial Sequence
  Description of Artificial Sequence: Synthetic oligonucleotide
  Sense strand starting at position 2410 of SEQ ID NO: 914215
aaggaaaggugugcuugaa

SEQ ID NO: 986913 - RNA, 19 nt, Artificial Sequence
  Description of Artificial Sequence: Synthetic oligonucleotide
  Antisense strand to SEQ ID NO: 986912
uucaagcacaccuuuccuu

SEQ ID NO: 986914 - RNA, 19 nt, Artificial Sequence
  Description of Artificial Sequence: Synthetic oligonucleotide
  Sense strand starting at position 2845 of SEQ ID NO: 914215
cccagauuccacuaguguu

SEQ ID NO: 986915 - RNA, 19 nt, Artificial Sequence
  Description of Artificial Sequence: Synthetic oligonucleotide
  Antisense strand to SEQ ID NO: 986914
aacacuaguggaaucuggg

SEQ ID NO: 986916 - RNA, 19 nt, Artificial Sequence
  Description of Artificial Sequence: Synthetic oligonucleotide
  Sense strand starting at position 518 of SEQ ID NO: 914215
acacuauggguuugucaaa

SEQ ID NO: 986917 - RNA, 19 nt, Artificial Sequence
  Description of Artificial Sequence: Synthetic oligonucleotide
  Antisense strand to SEQ ID NO: 986916
uuugacaaacccauagugu

SEQ ID NO: 986918 - RNA, 19 nt, Artificial Sequence
  Description of Artificial Sequence: Synthetic oligonucleotide
  Sense strand starting at position 2409 of SEQ ID NO: 914215
gaaggaaaggugugcuuga

SEQ ID NO: 986919 - RNA, 19 nt, Artificial Sequence
  Description of Artificial Sequence: Synthetic oligonucleotide
  Antisense strand to SEQ ID NO: 986918
ucaagcacaccuuuccuuc

SEQ ID NO: 986920 - RNA, 19 nt, Artificial Sequence
  Description of Artificial Sequence: Synthetic oligonucleotide
  Sense strand starting at position 3149 of SEQ ID NO: 914215
aguguuauagcucaauuag

SEQ ID NO: 986921 - RNA, 19 nt, Artificial Sequence
  Description of Artificial Sequence: Synthetic oligonucleotide
  Antisense strand to SEQ ID NO: 986920
cuaauugagcuauaacacu

SEQ ID NO: 986922 - RNA, 19 nt, Artificial Sequence
  Description of Artificial Sequence: Synthetic oligonucleotide
  Sense strand starting at position 2290 of SEQ ID NO: 914215
uguauaguggguugagaga

SEQ ID NO: 986923 - RNA, 19 nt, Artificial Sequence
  Description of Artificial Sequence: Synthetic oligonucleotide
  Antisense strand to SEQ ID NO: 986922
ucucucaacccacuauaca

SEQ ID NO: 986924 - RNA, 19 nt, Artificial Sequence
  Description of Artificial Sequence: Synthetic oligonucleotide
  Sense strand starting at position 1455 of SEQ ID NO: 914215
gagucucccguggauaauu

SEQ ID NO: 986925 - RNA, 19 nt, Artificial Sequence
  Description of Artificial Sequence: Synthetic oligonucleotide
  Antisense strand to SEQ ID NO: 986924
aauuauccacgggagacuc

SEQ ID NO: 986926 - RNA, 19 nt, Artificial Sequence
  Description of Artificial Sequence: Synthetic oligonucleotide
  Sense strand starting at position 369 of SEQ ID NO: 914215
gauauaugcugagcucaga

SEQ ID NO: 986927 - RNA, 19 nt, Artificial Sequence
  Description of Artificial Sequence: Synthetic oligonucleotide
  Antisense strand to SEQ ID NO: 986926
ucugagcucagcauauauc

SEQ ID NO: 986928 - RNA, 19 nt, Artificial Sequence
  Description of Artificial Sequence: Synthetic oligonucleotide
  Sense strand starting at position 3758 of SEQ ID NO: 914215
ccugucucucaguaucaca

SEQ ID NO: 986929 - RNA, 19 nt, Artificial Sequence
  Description of Artificial Sequence: Synthetic oligonucleotide
  Antisense strand to SEQ ID NO: 986928
ugugauacugagagacagg

SEQ ID NO: 986930 - RNA, 19 nt, Artificial Sequence
  Description of Artificial Sequence: Synthetic oligonucleotide
  Sense strand starting at position 2304 of SEQ ID NO: 914215
agagauuacugucucaguu

SEQ ID NO: 986931 - RNA, 19 nt, Artificial Sequence
  Description of Artificial Sequence: Synthetic oligonucleotide
  Antisense strand to SEQ ID NO: 986930
aacugagacaguaaucucu

SEQ ID NO: 986932 - RNA, 19 nt, Artificial Sequence
  Description of Artificial Sequence: Synthetic oligonucleotide
  Sense strand starting at position 1466 of SEQ ID NO: 914215
ggauaauugugucuaauuc

SEQ ID NO: 986933 - RNA, 19 nt, Artificial Sequence
  Description of Artificial Sequence: Synthetic oligonucleotide
  Antisense strand to SEQ ID NO: 986932
gaauuagacacaauuaucc

SEQ ID NO: 986934 - RNA, 19 nt, Artificial Sequence
  Description of Artificial Sequence: Synthetic oligonucleotide
  Sense strand starting at position 2372 of SEQ ID NO: 914215
ggaucaaaucaaugugccu

SEQ ID NO: 986935 - RNA, 19 nt, Artificial Sequence
  Description of Artificial Sequence: Synthetic oligonucleotide
  Antisense strand to SEQ ID NO: 986934
aggcacauugauuugaucc

SEQ ID NO: 986936 - RNA, 19 nt, Artificial Sequence
  Description of Artificial Sequence: Synthetic oligonucleotide
  Sense strand starting at position 1157 of SEQ ID NO: 914215
ucaggauacugugccauga

SEQ ID NO: 986937 - RNA, 19 nt, Artificial Sequence
  Description of Artificial Sequence: Synthetic oligonucleotide
  Antisense strand to SEQ ID NO: 986936
ucauggcacaguauccuga

SEQ ID NO: 986938 - RNA, 19 nt, Artificial Sequence
  Description of Artificial Sequence: Synthetic oligonucleotide
  Sense strand starting at position 2872 of SEQ ID NO: 914215
acaugaccaugguauauuu

SEQ ID NO: 986939 - RNA, 19 nt, Artificial Sequence
  Description of Artificial Sequence: Synthetic oligonucleotide
  Antisense strand to SEQ ID NO: 986938
aaauauaccauggucaugu

SEQ ID NO: 986940 - RNA, 19 nt, Artificial Sequence
  Description of Artificial Sequence: Synthetic oligonucleotide
  Sense strand starting at position 2288 of SEQ ID NO: 914215
cuuguauaguggguugaga

SEQ ID NO: 986941 - RNA, 19 nt, Artificial Sequence
  Description of Artificial Sequence: Synthetic oligonucleotide
  Antisense strand to SEQ ID NO: 986940
ucucaacccacuauacaag

SEQ ID NO: 986942 - RNA, 19 nt, Artificial Sequence
  Description of Artificial Sequence: Synthetic oligonucleotide
  Sense strand starting at position 1161 of SEQ ID NO: 914215
gauacugugccaugauuac

SEQ ID NO: 986943 - RNA, 19 nt, Artificial Sequence
  Description of Artificial Sequence: Synthetic oligonucleotide
  Antisense strand to SEQ ID NO: 986942
guaaucauggcacaguauc

SEQ ID NO: 986944 - RNA, 19 nt, Artificial Sequence
  Description of Artificial Sequence: Synthetic oligonucleotide
  Sense strand starting at position 367 of SEQ ID NO: 914215
ccgauauaugcugagcuca

SEQ ID NO: 986945 - RNA, 19 nt, Artificial Sequence
  Description of Artificial Sequence: Synthetic oligonucleotide
  Antisense strand to SEQ ID NO: 986944
ugagcucagcauauaucgg

SEQ ID NO: 986946 - RNA, 19 nt, Artificial Sequence
  Description of Artificial Sequence: Synthetic oligonucleotide
  Sense strand starting at position 1464 of SEQ ID NO: 914215
guggauaauugugucuaau

SEQ ID NO: 986947 - RNA, 19 nt, Artificial Sequence
  Description of Artificial Sequence: Synthetic oligonucleotide
  Antisense strand to SEQ ID NO: 986946
auuagacacaauuauccac

SEQ ID NO: 986948 - RNA, 19 nt, Artificial Sequence
  Description of Artificial Sequence: Synthetic oligonucleotide
  Sense strand starting at position 2248 of SEQ ID NO: 914215
auaucaugcuggucaucau

SEQ ID NO: 986949 - RNA, 19 nt, Artificial Sequence
  Description of Artificial Sequence: Synthetic oligonucleotide
  Antisense strand to SEQ ID NO: 986948
augaugaccagcaugauau

SEQ ID NO: 986950 - RNA, 19 nt, Artificial Sequence
  Description of Artificial Sequence: Synthetic oligonucleotide
  Sense strand starting at position 3237 of SEQ ID NO: 914215
ggacuuagcugugcaggaa

SEQ ID NO: 986951 - RNA, 19 nt, Artificial Sequence
  Description of Artificial Sequence: Synthetic oligonucleotide
  Antisense strand to SEQ ID NO: 986950
uuccugcacagcuaagucc

SEQ ID NO: 986952 - RNA, 19 nt, Artificial Sequence
  Description of Artificial Sequence: Synthetic oligonucleotide
  Sense strand starting at position 2164 of SEQ ID NO: 914215
augagaauuggaggcgcuu

SEQ ID NO: 986953 - RNA, 19 nt, Artificial Sequence
  Description of Artificial Sequence: Synthetic oligonucleotide
  Antisense strand to SEQ ID NO: 986952
aagcgccuccaauucucau

SEQ ID NO: 986954 - RNA, 19 nt, Artificial Sequence
  Description of Artificial Sequence: Synthetic oligonucleotide
  Sense strand starting at position 2378 of SEQ ID NO: 914215
aaucaaugugccuguuaga

SEQ ID NO: 986955 - RNA, 19 nt, Artificial Sequence
  Description of Artificial Sequence: Synthetic oligonucleotide
  Antisense strand to SEQ ID NO: 986954
ucuaacaggcacauugauu

SEQ ID NO: 986956 - RNA, 19 nt, Artificial Sequence
  Description of Artificial Sequence: Synthetic oligonucleotide
  Sense strand starting at position 1656 of SEQ ID NO: 914216
guaaauaauuacuugggau

SEQ ID NO: 986957 - RNA, 19 nt, Artificial Sequence
  Description of Artificial Sequence: Synthetic oligonucleotide
  Antisense strand to SEQ ID NO: 986956
aucccaaguaauuauuuac

SEQ ID NO: 986958 - RNA, 19 nt, Artificial Sequence
  Description of Artificial Sequence: Synthetic oligonucleotide
  Sense strand starting at position 109 of SEQ ID NO: 914216
gugaguuuaggugagggaa

SEQ ID NO: 986959 - RNA, 19 nt, Artificial Sequence
  Description of Artificial Sequence: Synthetic oligonucleotide
  Antisense strand to SEQ ID NO: 986958
uucccucaccuaaacucac

SEQ ID NO: 986960 - RNA, 19 nt, Artificial Sequence
  Description of Artificial Sequence: Synthetic oligonucleotide
  Sense strand starting at position 3377 of SEQ ID NO: 914216
aacugaacugcagaguuua

SEQ ID NO: 986961 - RNA, 19 nt, Artificial Sequence
  Description of Artificial Sequence: Synthetic oligonucleotide
  Antisense strand to SEQ ID NO: 986960
uaaacucugcaguucaguu

SEQ ID NO: 986962 - RNA, 19 nt, Artificial Sequence
  Description of Artificial Sequence: Synthetic oligonucleotide
  Sense strand starting at position 1051 of SEQ ID NO: 914216
augcccugagguuagauaa

SEQ ID NO: 986963 - RNA, 19 nt, Artificial Sequence
  Description of Artificial Sequence: Synthetic oligonucleotide
  Antisense strand to SEQ ID NO: 986962
uuaucuaaccucagggcau

SEQ ID NO: 986964 - RNA, 19 nt, Artificial Sequence
  Description of Artificial Sequence: Synthetic oligonucleotide
  Sense strand starting at position 422 of SEQ ID NO: 914216
ucagaauuguuacuagaac

SEQ ID NO: 986965 - RNA, 19 nt, Artificial Sequence
  Description of Artificial Sequence: Synthetic oligonucleotide
  Antisense strand to SEQ ID NO: 986964
guucuaguaacaauucuga

SEQ ID NO: 986966 - RNA, 19 nt, Artificial Sequence
  Description of Artificial Sequence: Synthetic oligonucleotide
  Sense strand starting at position 3441 of SEQ ID NO: 914216
gcaaccaaucaaggauauu

SEQ ID NO: 986967 - RNA, 19 nt, Artificial Sequence
  Description of Artificial Sequence: Synthetic oligonucleotide
  Antisense strand to SEQ ID NO: 986966
aauauccuugauugguugc

SEQ ID NO: 986968 - RNA, 19 nt, Artificial Sequence
  Description of Artificial Sequence: Synthetic oligonucleotide
  Sense strand starting at position 74 of SEQ ID NO: 914216
cuaugauuugguggccuuu

SEQ ID NO: 986969 - RNA, 19 nt, Artificial Sequence
  Description of Artificial Sequence: Synthetic oligonucleotide
  Antisense strand to SEQ ID NO: 986968
aaaggccaccaaaucauag

SEQ ID NO: 986970 - RNA, 19 nt, Artificial Sequence
  Description of Artificial Sequence: Synthetic oligonucleotide
  Sense strand starting at position 941 of SEQ ID NO: 914216
aguuaacaguaaucugaag

SEQ ID NO: 986971 - RNA, 19 nt, Artificial Sequence
  Description of Artificial Sequence: Synthetic oligonucleotide
  Antisense strand to SEQ ID NO: 986970
cuucagauuacuguuaacu

SEQ ID NO: 986972 - RNA, 19 nt, Artificial Sequence
  Description of Artificial Sequence: Synthetic oligonucleotide
  Sense strand starting at position 63 of SEQ ID NO: 914216
acuagccuugacuaugauu

SEQ ID NO: 986973 - RNA, 19 nt, Artificial Sequence
  Description of Artificial Sequence: Synthetic oligonucleotide
  Antisense strand to SEQ ID NO: 986972
aaucauagucaaggcuagu

SEQ ID NO: 986974 - RNA, 19 nt, Artificial Sequence
  Description of Artificial Sequence: Synthetic oligonucleotide
  Sense strand starting at position 2396 of SEQ ID NO: 914216
gagggauuguuucccacaa

SEQ ID NO: 986975 - RNA, 19 nt, Artificial Sequence
  Description of Artificial Sequence: Synthetic oligonucleotide
  Antisense strand to SEQ ID NO: 986974
uugugggaaacaaucccuc

SEQ ID NO: 986976 - RNA, 19 nt, Artificial Sequence
  Description of Artificial Sequence: Synthetic oligonucleotide
  Sense strand starting at position 2397 of SEQ ID NO: 914216
agggauuguuucccacaag

SEQ ID NO: 986977 - RNA, 19 nt, Artificial Sequence
  Description of Artificial Sequence: Synthetic oligonucleotide
  Antisense strand to SEQ ID NO: 986976
cuugugggaaacaaucccu

SEQ ID NO: 986978 - RNA, 19 nt, Artificial Sequence
  Description of Artificial Sequence: Synthetic oligonucleotide
  Sense strand starting at position 1823 of SEQ ID NO: 914216
gcaccuaaacaaugaaagu

SEQ ID NO: 986979 - RNA, 19 nt, Artificial Sequence
  Description of Artificial Sequence: Synthetic oligonucleotide
  Antisense strand to SEQ ID NO: 986978
acuuucauuguuuaggugc

SEQ ID NO: 986980 - RNA, 19 nt, Artificial Sequence
  Description of Artificial Sequence: Synthetic oligonucleotide
  Sense strand starting at position 3317 of SEQ ID NO: 914216
uuuacaugaccaugguaua

SEQ ID NO: 986981 - RNA, 19 nt, Artificial Sequence
  Description of Artificial Sequence: Synthetic oligonucleotide
  Antisense strand to SEQ ID NO: 986980
uauaccauggucauguaaa

SEQ ID NO: 986982 - RNA, 19 nt, Artificial Sequence
  Description of Artificial Sequence: Synthetic oligonucleotide
  Sense strand starting at position 3318 of SEQ ID NO: 914216
uuacaugaccaugguauau

SEQ ID NO: 986983 - RNA, 19 nt, Artificial Sequence
  Description of Artificial Sequence: Synthetic oligonucleotide
  Antisense strand to SEQ ID NO: 986982
auauaccauggucauguaa

SEQ ID NO: 986984 - RNA, 19 nt, Artificial Sequence
  Description of Artificial Sequence: Synthetic oligonucleotide
  Sense strand starting at position 820 of SEQ ID NO: 914216
auaugcugagcucagacau

SEQ ID NO: 986985 - RNA, 19 nt, Artificial Sequence
  Description of Artificial Sequence: Synthetic oligonucleotide
  Antisense strand to SEQ ID NO: 986984
augucugagcucagcauau

SEQ ID NO: 986986 - RNA, 19 nt, Artificial Sequence
  Description of Artificial Sequence: Synthetic oligonucleotide
  Sense strand starting at position 2947 of SEQ ID NO: 914216
augguuauucucuggaaua

SEQ ID NO: 986987 - RNA, 19 nt, Artificial Sequence
  Description of Artificial Sequence: Synthetic oligonucleotide
  Antisense strand to SEQ ID NO: 986986
uauuccagagaauaaccau

SEQ ID NO: 986988 - RNA, 19 nt, Artificial Sequence
  Description of Artificial Sequence: Synthetic oligonucleotide
  Sense strand starting at position 1237 of SEQ ID NO: 914216
caguucugccucuaaggaa

SEQ ID NO: 986989 - RNA, 19 nt, Artificial Sequence
  Description of Artificial Sequence: Synthetic oligonucleotide
  Antisense strand to SEQ ID NO: 986988
uuccuuagaggcagaacug

SEQ ID NO: 986990 - RNA, 19 nt, Artificial Sequence
  Description of Artificial Sequence: Synthetic oligonucleotide
  Sense strand starting at position 1046 of SEQ ID NO: 914216
cauuaaugcccugagguua

SEQ ID NO: 986991 - RNA, 19 nt, Artificial Sequence
  Description of Artificial Sequence: Synthetic oligonucleotide
  Antisense strand to SEQ ID NO: 986990
uaaccucagggcauuaaug

SEQ ID NO: 986992 - RNA, 19 nt, Artificial Sequence
  Description of Artificial Sequence: Synthetic oligonucleotide
  Sense strand starting at position 2893 of SEQ ID NO: 914216
caugguaacguuuaacuga

SEQ ID NO: 986993 - RNA, 19 nt, Artificial Sequence
  Description of Artificial Sequence: Synthetic oligonucleotide
  Antisense strand to SEQ ID NO: 986992
ucaguuaaacguuaccaug

SEQ ID NO: 986994 - RNA, 19 nt, Artificial Sequence
  Description of Artificial Sequence: Synthetic oligonucleotide
  Sense strand starting at position 2652 of SEQ ID NO: 914216
cggugucugacacauaaau

SEQ ID NO: 986995 - RNA, 19 nt, Artificial Sequence
  Description of Artificial Sequence: Synthetic oligonucleotide
  Antisense strand to SEQ ID NO: 986994
auuuaugugucagacaccg

SEQ ID NO: 986996 - RNA, 19 nt, Artificial Sequence
  Description of Artificial Sequence: Synthetic oligonucleotide
  Sense strand starting at position 1097 of SEQ ID NO: 914216
ggauguuaaaugcaaguuu

SEQ ID NO: 986997 - RNA, 19 nt, Artificial Sequence
  Description of Artificial Sequence: Synthetic oligonucleotide
  Antisense strand to SEQ ID NO: 986996
aaacuugcauuuaacaucc

SEQ ID NO: 986998 - RNA, 19 nt, Artificial Sequence
  Description of Artificial Sequence: Synthetic oligonucleotide
  Sense strand starting at position 2858 of SEQ ID NO: 914216
aaggaaaggugugcuugaa

SEQ ID NO: 986999 - RNA, 19 nt, Artificial Sequence
  Description of Artificial Sequence: Synthetic oligonucleotide
  Antisense strand to SEQ ID NO: 986998
uucaagcacaccuuuccuu

SEQ ID NO: 987000 - RNA, 19 nt, Artificial Sequence
  Description of Artificial Sequence: Synthetic oligonucleotide
  Sense strand starting at position 3293 of SEQ ID NO: 914216
cccagauuccacuaguguu

SEQ ID NO: 987001 - RNA, 19 nt, Artificial Sequence
  Description of Artificial Sequence: Synthetic oligonucleotide
  Antisense strand to SEQ ID NO: 987000
aacacuaguggaaucuggg

SEQ ID NO: 987002 - RNA, 19 nt, Artificial Sequence
  Description of Artificial Sequence: Synthetic oligonucleotide
  Sense strand starting at position 966 of SEQ ID NO: 914216
acacuauggguuugucaaa

SEQ ID NO: 987003 - RNA, 19 nt, Artificial Sequence
  Description of Artificial Sequence: Synthetic oligonucleotide
  Antisense strand to SEQ ID NO: 987002
uuugacaaacccauagugu

SEQ ID NO: 987004 - RNA, 19 nt, Artificial Sequence
  Description of Artificial Sequence: Synthetic oligonucleotide
  Sense strand starting at position 2857 of SEQ ID NO: 914216
gaaggaaaggugugcuuga

SEQ ID NO: 987005 - RNA, 19 nt, Artificial Sequence
  Description of Artificial Sequence: Synthetic oligonucleotide
  Antisense strand to SEQ ID NO: 987004
ucaagcacaccuuuccuuc

SEQ ID NO: 987006 - RNA, 19 nt, Artificial Sequence
  Description of Artificial Sequence: Synthetic oligonucleotide
  Sense strand starting at position 3597 of SEQ ID NO: 914216
aguguuauagcucaauuag

SEQ ID NO: 987007 - RNA, 19 nt, Artificial Sequence
  Description of Artificial Sequence: Synthetic oligonucleotide
  Antisense strand to SEQ ID NO: 987006
cuaauugagcuauaacacu

SEQ ID NO: 987008 - RNA, 19 nt, Artificial Sequence
  Description of Artificial Sequence: Synthetic oligonucleotide
  Sense strand starting at position 2738 of SEQ ID NO: 914216
uguauaguggguugagaga

SEQ ID NO: 987009 - RNA, 19 nt, Artificial Sequence
  Description of Artificial Sequence: Synthetic oligonucleotide
  Antisense strand to SEQ ID NO: 987008
ucucucaacccacuauaca

SEQ ID NO: 987010 - RNA, 19 nt, Artificial Sequence
  Description of Artificial Sequence: Synthetic oligonucleotide
  Sense strand starting at position 85 of SEQ ID NO: 914216
uggccuuugccagaacuga

SEQ ID NO: 987011 - RNA, 19 nt, Artificial Sequence
  Description of Artificial Sequence: Synthetic oligonucleotide
  Antisense strand to SEQ ID NO: 987010
ucaguucuggcaaaggcca

SEQ ID NO: 987012 - RNA, 19 nt, Artificial Sequence
  Description of Artificial Sequence: Synthetic oligonucleotide
  Sense strand starting at position 1903 of SEQ ID NO: 914216
gagucucccguggauaauu

SEQ ID NO: 987013 - RNA, 19 nt, Artificial Sequence
  Description of Artificial Sequence: Synthetic oligonucleotide
  Antisense strand to SEQ ID NO: 987012
aauuauccacgggagacuc

SEQ ID NO: 987014 - RNA, 19 nt, Artificial Sequence
  Description of Artificial Sequence: Synthetic oligonucleotide
  Sense strand starting at position 817 of SEQ ID NO: 914216
gauauaugcugagcucaga

SEQ ID NO: 987015 - RNA, 19 nt, Artificial Sequence
  Description of Artificial Sequence: Synthetic oligonucleotide
  Antisense strand to SEQ ID NO: 987014
ucugagcucagcauauauc

SEQ ID NO: 987016 - RNA, 19 nt, Artificial Sequence
  Description of Artificial Sequence: Synthetic oligonucleotide
  Sense strand starting at position 1914 of SEQ ID NO: 914216
ggauaauugugucuaauuc

SEQ ID NO: 987017 - RNA, 19 nt, Artificial Sequence
  Description of Artificial Sequence: Synthetic oligonucleotide
  Antisense strand to SEQ ID NO: 987016
gaauuagacacaauuaucc

SEQ ID NO: 987018 - RNA, 19 nt, Artificial Sequence
  Description of Artificial Sequence: Synthetic oligonucleotide
  Sense strand starting at position 2752 of SEQ ID NO: 914216
agagauuacugucucaguu

SEQ ID NO: 987019 - RNA, 19 nt, Artificial Sequence
  Description of Artificial Sequence: Synthetic oligonucleotide
  Antisense strand to SEQ ID NO: 987018
aacugagacaguaaucucu

SEQ ID NO: 987020 - RNA, 19 nt, Artificial Sequence
  Description of Artificial Sequence: Synthetic oligonucleotide
  Sense strand starting at position 2820 of SEQ ID NO: 914216
ggaucaaaucaaugugccu

SEQ ID NO: 987021 - RNA, 19 nt, Artificial Sequence
  Description of Artificial Sequence: Synthetic oligonucleotide
  Antisense strand to SEQ ID NO: 987020
aggcacauugauuugaucc

SEQ ID NO: 987022 - RNA, 19 nt, Artificial Sequence
  Description of Artificial Sequence: Synthetic oligonucleotide
  Sense strand starting at position 1605 of SEQ ID NO: 914216
ucaggauacugugccauga

SEQ ID NO: 987023 - RNA, 19 nt, Artificial Sequence
  Description of Artificial Sequence: Synthetic oligonucleotide
  Antisense strand to SEQ ID NO: 987022
ucauggcacaguauccuga

SEQ ID NO: 987024 - RNA, 19 nt, Artificial Sequence
  Description of Artificial Sequence: Synthetic oligonucleotide
  Sense strand starting at position 3320 of SEQ ID NO: 914216
acaugaccaugguauauuu

SEQ ID NO: 987025 - RNA, 19 nt, Artificial Sequence
  Description of Artificial Sequence: Synthetic oligonucleotide
  Antisense strand to SEQ ID NO: 987024
aaauauaccauggucaugu

SEQ ID NO: 987026 - RNA, 19 nt, Artificial Sequence
  Description of Artificial Sequence: Synthetic oligonucleotide
  Sense strand starting at position 434 of SEQ ID NO: 914216
cuagaacaauuagagauaa

SEQ ID NO: 987027 - RNA, 19 nt, Artificial Sequence
  Description of Artificial Sequence: Synthetic oligonucleotide
  Antisense strand to SEQ ID NO: 987026
uuaucucuaauuguucuag

SEQ ID NO: 987028 - RNA, 19 nt, Artificial Sequence
  Description of Artificial Sequence: Synthetic oligonucleotide
  Sense strand starting at position 2736 of SEQ ID NO: 914216
cuuguauaguggguugaga

SEQ ID NO: 987029 - RNA, 19 nt, Artificial Sequence
  Description of Artificial Sequence: Synthetic oligonucleotide
  Antisense strand to SEQ ID NO: 987028
ucucaacccacuauacaag

SEQ ID NO: 987030 - RNA, 19 nt, Artificial Sequence
  Description of Artificial Sequence: Synthetic oligonucleotide
  Sense strand starting at position 1609 of SEQ ID NO: 914216
gauacugugccaugauuac

SEQ ID NO: 987031 - RNA, 19 nt, Artificial Sequence
  Description of Artificial Sequence: Synthetic oligonucleotide
  Antisense strand to SEQ ID NO: 987030
guaaucauggcacaguauc

SEQ ID NO: 987032 - RNA, 19 nt, Artificial Sequence
  Description of Artificial Sequence: Synthetic oligonucleotide
  Sense strand starting at position 815 of SEQ ID NO: 914216
ccgauauaugcugagcuca

SEQ ID NO: 987033 - RNA, 19 nt, Artificial Sequence
  Description of Artificial Sequence: Synthetic oligonucleotide
  Antisense strand to SEQ ID NO: 987032
ugagcucagcauauaucgg

SEQ ID NO: 987034 - RNA, 19 nt, Artificial Sequence
  Description of Artificial Sequence: Synthetic oligonucleotide
  Sense strand starting at position 1912 of SEQ ID NO: 914216
guggauaauugugucuaau

SEQ ID NO: 987035 - RNA, 19 nt, Artificial Sequence
  Description of Artificial Sequence: Synthetic oligonucleotide
  Antisense strand to SEQ ID NO: 987034
auuagacacaauuauccac

SEQ ID NO: 987036 - RNA, 19 nt, Artificial Sequence
  Description of Artificial Sequence: Synthetic oligonucleotide
  Sense strand starting at position 87 of SEQ ID NO: 914217
auaacaaaugcugggauau

SEQ ID NO: 987037 - RNA, 19 nt, Artificial Sequence
  Description of Artificial Sequence: Synthetic oligonucleotide
  Antisense strand to SEQ ID NO: 987036
auaucccagcauuuguuau

SEQ ID NO: 987038 - RNA, 19 nt, Artificial Sequence
  Description of Artificial Sequence: Synthetic oligonucleotide
  Sense strand starting at position 942 of SEQ ID NO: 914217
gccaaugagaggcauuaua

SEQ ID NO: 987039 - RNA, 19 nt, Artificial Sequence
  Description of Artificial Sequence: Synthetic oligonucleotide
  Antisense strand to SEQ ID NO: 987038
uauaaugccucucauuggc

SEQ ID NO: 987040 - RNA, 19 nt, Artificial Sequence
  Description of Artificial Sequence: Synthetic oligonucleotide
  Sense strand starting at position 3445 of SEQ ID NO: 914217
ugauaauuaggguagccau

SEQ ID NO: 987041 - RNA, 19 nt, Artificial Sequence
  Description of Artificial Sequence: Synthetic oligonucleotide
  Antisense strand to SEQ ID NO: 987040
auggcuacccuaauuauca

SEQ ID NO: 987042 - RNA, 19 nt, Artificial Sequence
  Description of Artificial Sequence: Synthetic oligonucleotide
  Sense strand starting at position 2619 of SEQ ID NO: 914217
agaguaucaugacuaucau

SEQ ID NO: 987043 - RNA, 19 nt, Artificial Sequence
  Description of Artificial Sequence: Synthetic oligonucleotide
  Antisense strand to SEQ ID NO: 987042
augauagucaugauacucu

SEQ ID NO: 987044 - RNA, 19 nt, Artificial Sequence
  Description of Artificial Sequence: Synthetic oligonucleotide
  Sense strand starting at position 3389 of SEQ ID NO: 914217
caaguaagaugacuguaca

SEQ ID NO: 987045 - RNA, 19 nt, Artificial Sequence
  Description of Artificial Sequence: Synthetic oligonucleotide
  Antisense strand to SEQ ID NO: 987044
uguacagucaucuuacuug

SEQ ID NO: 987046 - RNA, 19 nt, Artificial Sequence
  Description of Artificial Sequence: Synthetic oligonucleotide
  Sense strand starting at position 526 of SEQ ID NO: 914217
uaagauaguugaucucaug

SEQ ID NO: 987047 - RNA, 19 nt, Artificial Sequence
  Description of Artificial Sequence: Synthetic oligonucleotide
  Antisense strand to SEQ ID NO: 987046
caugagaucaacuaucuua

SEQ ID NO: 987048 - RNA, 19 nt, Artificial Sequence
  Description of Artificial Sequence: Synthetic oligonucleotide
  Sense strand starting at position 2101 of SEQ ID NO: 914217
acgccaaugccagaaagaa

SEQ ID NO: 987049 - RNA, 19 nt, Artificial Sequence
  Description of Artificial Sequence: Synthetic oligonucleotide
  Antisense strand to SEQ ID NO: 987048
uucuuucuggcauuggcgu

SEQ ID NO: 987050 - RNA, 19 nt, Artificial Sequence
  Description of Artificial Sequence: Synthetic oligonucleotide
  Sense strand starting at position 260 of SEQ ID NO: 914217
ccguauauugaagauaucu

SEQ ID NO: 987051 - RNA, 19 nt, Artificial Sequence
  Description of Artificial Sequence: Synthetic oligonucleotide
  Antisense strand to SEQ ID NO: 987050
agauaucuucaauauacgg

SEQ ID NO: 987052 - RNA, 19 nt, Artificial Sequence
  Description of Artificial Sequence: Synthetic oligonucleotide
  Sense strand starting at position 2403 of SEQ ID NO: 914217
gaguacguggaguaaugaa

SEQ ID NO: 987053 - RNA, 19 nt, Artificial Sequence
  Description of Artificial Sequence: Synthetic oligonucleotide
  Antisense strand to SEQ ID NO: 987052
uucauuacuccacguacuc

SEQ ID NO: 987054 - RNA, 19 nt, Artificial Sequence
  Description of Artificial Sequence: Synthetic oligonucleotide
  Sense strand starting at position 1459 of SEQ ID NO: 914217
agagaugguuaagucgaaa

SEQ ID NO: 987055 - RNA, 19 nt, Artificial Sequence
  Description of Artificial Sequence: Synthetic oligonucleotide
  Antisense strand to SEQ ID NO: 987054
uuucgacuuaaccaucucu

SEQ ID NO: 987056 - RNA, 19 nt, Artificial Sequence
  Description of Artificial Sequence: Synthetic oligonucleotide
  Sense strand starting at position 2419 of SEQ ID NO: 914217
gaaggauaaugcccuguaa

SEQ ID NO: 987057 - RNA, 19 nt, Artificial Sequence
  Description of Artificial Sequence: Synthetic oligonucleotide
  Antisense strand to SEQ ID NO: 987056
uuacagggcauuauccuuc

SEQ ID NO: 987058 - RNA, 19 nt, Artificial Sequence
  Description of Artificial Sequence: Synthetic oligonucleotide
  Sense strand starting at position 2924 of SEQ ID NO: 914217
uugaguaauccagggaggu

SEQ ID NO: 987059 - RNA, 19 nt, Artificial Sequence
  Description of Artificial Sequence: Synthetic oligonucleotide
  Antisense strand to SEQ ID NO: 987058
accucccuggauuacucaa

SEQ ID NO: 987060 - RNA, 19 nt, Artificial Sequence
  Description of Artificial Sequence: Synthetic oligonucleotide
  Sense strand starting at position 2925 of SEQ ID NO: 914217
ugaguaauccagggagguc

SEQ ID NO: 987061 - RNA, 19 nt, Artificial Sequence
  Description of Artificial Sequence: Synthetic oligonucleotide
  Antisense strand to SEQ ID NO: 987060
gaccucccuggauuacuca

SEQ ID NO: 987062 - RNA, 19 nt, Artificial Sequence
  Description of Artificial Sequence: Synthetic oligonucleotide
  Sense strand starting at position 1250 of SEQ ID NO: 914217
gguugagacuggguucaag

SEQ ID NO: 987063 - RNA, 19 nt, Artificial Sequence
  Description of Artificial Sequence: Synthetic oligonucleotide
  Antisense strand to SEQ ID NO: 987062
cuugaacccagucucaacc

SEQ ID NO: 987064 - RNA, 19 nt, Artificial Sequence
  Description of Artificial Sequence: Synthetic oligonucleotide
  Sense strand starting at position 1481 of SEQ ID NO: 914217
ugguuacgaugauuaaaug

SEQ ID NO: 987065 - RNA, 19 nt, Artificial Sequence
  Description of Artificial Sequence: Synthetic oligonucleotide
  Antisense strand to SEQ ID NO: 987064
cauuuaaucaucguaacca

SEQ ID NO: 987066 - RNA, 19 nt, Artificial Sequence
  Description of Artificial Sequence: Synthetic oligonucleotide
  Sense strand starting at position 2858 of SEQ ID NO: 914217
ggaggagguguguagguua

SEQ ID NO: 987067 - RNA, 19 nt, Artificial Sequence
  Description of Artificial Sequence: Synthetic oligonucleotide
  Antisense strand to SEQ ID NO: 987066
uaaccuacacaccuccucc

SEQ ID NO: 987068 - RNA, 19 nt, Artificial Sequence
  Description of Artificial Sequence: Synthetic oligonucleotide
  Sense strand starting at position 1241 of SEQ ID NO: 914217
acacuaccugguugagacu

SEQ ID NO: 987069 - RNA, 19 nt, Artificial Sequence
  Description of Artificial Sequence: Synthetic oligonucleotide
  Antisense strand to SEQ ID NO: 987068
agucucaaccagguagugu

SEQ ID NO: 987070 - RNA, 19 nt, Artificial Sequence
  Description of Artificial Sequence: Synthetic oligonucleotide
  Sense strand starting at position 2969 of SEQ ID NO: 914217
gagagaggacuuggcugua

SEQ ID NO: 987071 - RNA, 19 nt, Artificial Sequence
  Description of Artificial Sequence: Synthetic oligonucleotide
  Antisense strand to SEQ ID NO: 987070
uacagccaaguccucucuc

SEQ ID NO: 987072 - RNA, 19 nt, Artificial Sequence
  Description of Artificial Sequence: Synthetic oligonucleotide
  Sense strand starting at position 1353 of SEQ ID NO: 914217
ggcgcauuaacucagagga

SEQ ID NO: 987073 - RNA, 19 nt, Artificial Sequence
  Description of Artificial Sequence: Synthetic oligonucleotide
  Antisense strand to SEQ ID NO: 987072
uccucugaguuaaugcgcc

SEQ ID NO: 987074 - RNA, 19 nt, Artificial Sequence
  Description of Artificial Sequence: Synthetic oligonucleotide
  Sense strand starting at position 2372 of SEQ ID NO: 914217
uuguuaaagugauugaacu

SEQ ID NO: 987075 - RNA, 19 nt, Artificial Sequence
  Description of Artificial Sequence: Synthetic oligonucleotide
  Antisense strand to SEQ ID NO: 987074
aguucaaucacuuuaacaa

SEQ ID NO: 987076 - RNA, 19 nt, Artificial Sequence
  Description of Artificial Sequence: Synthetic oligonucleotide
  Sense strand starting at position 522 of SEQ ID NO: 914217
gagcuaagauaguugaucu

SEQ ID NO: 987077 - RNA, 19 nt, Artificial Sequence
  Description of Artificial Sequence: Synthetic oligonucleotide
  Antisense strand to SEQ ID NO: 987076
agaucaacuaucuuagcuc

SEQ ID NO: 987078 - RNA, 19 nt, Artificial Sequence
  Description of Artificial Sequence: Synthetic oligonucleotide
  Sense strand starting at position 3071 of SEQ ID NO: 914217
uugucauguguauaaacac

SEQ ID NO: 987079 - RNA, 19 nt, Artificial Sequence
  Description of Artificial Sequence: Synthetic oligonucleotide
  Antisense strand to SEQ ID NO: 987078
guguuuauacacaugacaa

SEQ ID NO: 987080 - RNA, 19 nt, Artificial Sequence
  Description of Artificial Sequence: Synthetic oligonucleotide
  Sense strand starting at position 2934 of SEQ ID NO: 914217
cagggagguccugguacua

SEQ ID NO: 987081 - RNA, 19 nt, Artificial Sequence
  Description of Artificial Sequence: Synthetic oligonucleotide
  Antisense strand to SEQ ID NO: 987080
uaguaccaggaccucccug

SEQ ID NO: 987082 - RNA, 19 nt, Artificial Sequence
  Description of Artificial Sequence: Synthetic oligonucleotide
  Sense strand starting at position 722 of SEQ ID NO: 914217
cuagaagauuucgaauauu

SEQ ID NO: 987083 - RNA, 19 nt, Artificial Sequence
  Description of Artificial Sequence: Synthetic oligonucleotide
  Antisense strand to SEQ ID NO: 987082
aauauucgaaaucuucuag

SEQ ID NO: 987084 - RNA, 19 nt, Artificial Sequence
  Description of Artificial Sequence: Synthetic oligonucleotide
  Sense strand starting at position 2373 of SEQ ID NO: 914217
uguuaaagugauugaacuc

SEQ ID NO: 987085 - RNA, 19 nt, Artificial Sequence
  Description of Artificial Sequence: Synthetic oligonucleotide
  Antisense strand to SEQ ID NO: 987084
gaguucaaucacuuuaaca

SEQ ID NO: 987086 - RNA, 19 nt, Artificial Sequence
  Description of Artificial Sequence: Synthetic oligonucleotide
  Sense strand starting at position 757 of SEQ ID NO: 914217
gauaaaugaggcgguggau

SEQ ID NO: 987087 - RNA, 19 nt, Artificial Sequence
  Description of Artificial Sequence: Synthetic oligonucleotide
  Antisense strand to SEQ ID NO: 987086
auccaccgccucauuuauc

SEQ ID NO: 987088 - RNA, 19 nt, Artificial Sequence
  Description of Artificial Sequence: Synthetic oligonucleotide
  Sense strand starting at position 1472 of SEQ ID NO: 914217
ucgaaaggaugguuacgau

SEQ ID NO: 987089 - RNA, 19 nt, Artificial Sequence
  Description of Artificial Sequence: Synthetic oligonucleotide
  Antisense strand to SEQ ID NO: 987088
aucguaaccauccuuucga

SEQ ID NO: 987090 - RNA, 19 nt, Artificial Sequence
  Description of Artificial Sequence: Synthetic oligonucleotide
  Sense strand starting at position 2972 of SEQ ID NO: 914217
agaggacuuggcuguauau

SEQ ID NO: 987091 - RNA, 19 nt, Artificial Sequence
  Description of Artificial Sequence: Synthetic oligonucleotide
  Antisense strand to SEQ ID NO: 987090
auauacagccaaguccucu

SEQ ID NO: 987092 - RNA, 19 nt, Artificial Sequence
  Description of Artificial Sequence: Synthetic oligonucleotide
  Sense strand starting at position 2815 of SEQ ID NO: 914217
guguuagguguacaauuaa

SEQ ID NO: 987093 - RNA, 19 nt, Artificial Sequence
  Description of Artificial Sequence: Synthetic oligonucleotide
  Antisense strand to SEQ ID NO: 987092
uuaauuguacaccuaacac

SEQ ID NO: 987094 - RNA, 19 nt, Artificial Sequence
  Description of Artificial Sequence: Synthetic oligonucleotide
  Sense strand starting at position 424 of SEQ ID NO: 914217
uugucauugcagcaacaaa

SEQ ID NO: 987095 - RNA, 19 nt, Artificial Sequence
  Description of Artificial Sequence: Synthetic oligonucleotide
  Antisense strand to SEQ ID NO: 987094
uuuguugcugcaaugacaa

SEQ ID NO: 987096 - RNA, 19 nt, Artificial Sequence
  Description of Artificial Sequence: Synthetic oligonucleotide
  Sense strand starting at position 268 of SEQ ID NO: 914217
ugaagauaucucugcacuc

SEQ ID NO: 987097 - RNA, 19 nt, Artificial Sequence
  Description of Artificial Sequence: Synthetic oligonucleotide
  Antisense strand to SEQ ID NO: 987096
gagugcagagauaucuuca

SEQ ID NO: 987098 - RNA, 19 nt, Artificial Sequence
  Description of Artificial Sequence: Synthetic oligonucleotide
  Sense strand starting at position 3495 of SEQ ID NO: 914217
aaaguaaaguuucugguau

SEQ ID NO: 987099 - RNA, 19 nt, Artificial Sequence
  Description of Artificial Sequence: Synthetic oligonucleotide
  Antisense strand to SEQ ID NO: 987098
auaccagaaacuuuacuuu

SEQ ID NO: 987100 - RNA, 19 nt, Artificial Sequence
  Description of Artificial Sequence: Synthetic oligonucleotide
  Sense strand starting at position 2974 of SEQ ID NO: 914217
aggacuuggcuguauaugu

SEQ ID NO: 987101 - RNA, 19 nt, Artificial Sequence
  Description of Artificial Sequence: Synthetic oligonucleotide
  Antisense strand to SEQ ID NO: 987100
acauauacagccaaguccu

SEQ ID NO: 987102 - RNA, 19 nt, Artificial Sequence
  Description of Artificial Sequence: Synthetic oligonucleotide
  Sense strand starting at position 760 of SEQ ID NO: 914217
aaaugaggcgguggauauu

SEQ ID NO: 987103 - RNA, 19 nt, Artificial Sequence
  Description of Artificial Sequence: Synthetic oligonucleotide
  Antisense strand to SEQ ID NO: 987102
aauauccaccgccucauuu

SEQ ID NO: 987104 - RNA, 19 nt, Artificial Sequence
  Description of Artificial Sequence: Synthetic oligonucleotide
  Sense strand starting at position 1198 of SEQ ID NO: 914217
acucaagugcucugaagau

SEQ ID NO: 987105 - RNA, 19 nt, Artificial Sequence
  Description of Artificial Sequence: Synthetic oligonucleotide
  Antisense strand to SEQ ID NO: 987104
aucuucagagcacuugagu

SEQ ID NO: 987106 - RNA, 19 nt, Artificial Sequence
  Description of Artificial Sequence: Synthetic oligonucleotide
  Sense strand starting at position 683 of SEQ ID NO: 914217
uuacaaguguuagcaauaa

SEQ ID NO: 987107 - RNA, 19 nt, Artificial Sequence
  Description of Artificial Sequence: Synthetic oligonucleotide
  Antisense strand to SEQ ID NO: 987106
uuauugcuaacacuuguaa

SEQ ID NO: 987108 - RNA, 19 nt, Artificial Sequence
  Description of Artificial Sequence: Synthetic oligonucleotide
  Sense strand starting at position 2914 of SEQ ID NO: 914217
aucccuggauuugaguaau

SEQ ID NO: 987109 - RNA, 19 nt, Artificial Sequence
  Description of Artificial Sequence: Synthetic oligonucleotide
  Antisense strand to SEQ ID NO: 987108
auuacucaaauccagggau

SEQ ID NO: 987110 - RNA, 19 nt, Artificial Sequence
  Description of Artificial Sequence: Synthetic oligonucleotide
  Sense strand starting at position 800 of SEQ ID NO: 914217
ugacacauuguaugcauau

SEQ ID NO: 987111 - RNA, 19 nt, Artificial Sequence
  Description of Artificial Sequence: Synthetic oligonucleotide
  Antisense strand to SEQ ID NO: 987110
auaugcauacaauguguca

SEQ ID NO: 987112 - RNA, 19 nt, Artificial Sequence
  Description of Artificial Sequence: Synthetic oligonucleotide
  Sense strand starting at position 3472 of SEQ ID NO: 914217
guuaauugccauuaugcaa

SEQ ID NO: 987113 - RNA, 19 nt, Artificial Sequence
  Description of Artificial Sequence: Synthetic oligonucleotide
  Antisense strand to SEQ ID NO: 987112
uugcauaauggcaauuaac

SEQ ID NO: 987114 - RNA, 19 nt, Artificial Sequence
  Description of Artificial Sequence: Synthetic oligonucleotide
  Sense strand starting at position 2560 of SEQ ID NO: 914217
gcuuaauguuaggugaaca

SEQ ID NO: 987115 - RNA, 19 nt, Artificial Sequence
  Description of Artificial Sequence: Synthetic oligonucleotide
  Antisense strand to SEQ ID NO: 987114
uguucaccuaacauuaagc

SEQ ID NO: 987116 - RNA, 19 nt, Artificial Sequence
  Description of Artificial Sequence: Synthetic oligonucleotide
  Sense strand starting at position 14 of SEQ ID NO: 914218
cuugcucuugaagauacaa

SEQ ID NO: 987117 - RNA, 19 nt, Artificial Sequence
  Description of Artificial Sequence: Synthetic oligonucleotide
  Antisense strand to SEQ ID NO: 987116
uuguaucuucaagagcaag

SEQ ID NO: 987118 - RNA, 19 nt, Artificial Sequence
  Description of Artificial Sequence: Synthetic oligonucleotide
  Sense strand starting at position 3276 of SEQ ID NO: 914218
uacgaaugugagcaagaca

SEQ ID NO: 987119 - RNA, 19 nt, Artificial Sequence
  Description of Artificial Sequence: Synthetic oligonucleotide
  Antisense strand to SEQ ID NO: 987118
ugucuugcucacauucgua

SEQ ID NO: 987120 - RNA, 19 nt, Artificial Sequence
  Description of Artificial Sequence: Synthetic oligonucleotide
  Sense strand starting at position 3175 of SEQ ID NO: 914218
auaaguugauuccuaaaug

SEQ ID NO: 987121 - RNA, 19 nt, Artificial Sequence
  Description of Artificial Sequence: Synthetic oligonucleotide
  Antisense strand to SEQ ID NO: 987120
cauuuaggaaucaacuuau

SEQ ID NO: 987122 - RNA, 19 nt, Artificial Sequence
  Description of Artificial Sequence: Synthetic oligonucleotide
  Sense strand starting at position 1462 of SEQ ID NO: 914218
uguccuaucagguaggaca

SEQ ID NO: 987123 - RNA, 19 nt, Artificial Sequence
  Description of Artificial Sequence: Synthetic oligonucleotide
  Antisense strand to SEQ ID NO: 987122
uguccuaccugauaggaca

SEQ ID NO: 987124 - RNA, 19 nt, Artificial Sequence
  Description of Artificial Sequence: Synthetic oligonucleotide
  Sense strand starting at position 2513 of SEQ ID NO: 914218
gagaaauccguuugauaaa

SEQ ID NO: 987125 - RNA, 19 nt, Artificial Sequence
  Description of Artificial Sequence: Synthetic oligonucleotide
  Antisense strand to SEQ ID NO: 987124
uuuaucaaacggauuucuc

SEQ ID NO: 987126 - RNA, 19 nt, Artificial Sequence
  Description of Artificial Sequence: Synthetic oligonucleotide
  Sense strand starting at position 2409 of SEQ ID NO: 914218
auuagcaggaucugauuga

SEQ ID NO: 987127 - RNA, 19 nt, Artificial Sequence
  Description of Artificial Sequence: Synthetic oligonucleotide
  Antisense strand to SEQ ID NO: 987126
ucaaucagauccugcuaau

SEQ ID NO: 987128 - RNA, 19 nt, Artificial Sequence
  Description of Artificial Sequence: Synthetic oligonucleotide
  Sense strand starting at position 3051 of SEQ ID NO: 914218
ucuuucgugaaggacuaau

SEQ ID NO: 987129 - RNA, 19 nt, Artificial Sequence
  Description of Artificial Sequence: Synthetic oligonucleotide
  Antisense strand to SEQ ID NO: 987128
auuaguccuucacgaaaga

SEQ ID NO: 987130 - RNA, 19 nt, Artificial Sequence
  Description of Artificial Sequence: Synthetic oligonucleotide
  Sense strand starting at position 2673 of SEQ ID NO: 914218
uuugaacacguaggagaua

SEQ ID NO: 987131 - RNA, 19 nt, Artificial Sequence
  Description of Artificial Sequence: Synthetic oligonucleotide
  Antisense strand to SEQ ID NO: 987130
uaucuccuacguguucaaa

SEQ ID NO: 987132 - RNA, 19 nt, Artificial Sequence
  Description of Artificial Sequence: Synthetic oligonucleotide
  Sense strand starting at position 60 of SEQ ID NO: 914218
acuugucaauucuuggaaa

SEQ ID NO: 987133 - RNA, 19 nt, Artificial Sequence
  Description of Artificial Sequence: Synthetic oligonucleotide
  Antisense strand to SEQ ID NO: 987132
uuuccaagaauugacaagu

SEQ ID NO: 987134 - RNA, 19 nt, Artificial Sequence
  Description of Artificial Sequence: Synthetic oligonucleotide
  Sense strand starting at position 820 of SEQ ID NO: 914218
gaaauaauaguaugaugcu

SEQ ID NO: 987135 - RNA, 19 nt, Artificial Sequence
  Description of Artificial Sequence: Synthetic oligonucleotide
  Antisense strand to SEQ ID NO: 987134
agcaucauacuauuauuuc

SEQ ID NO: 987136 - RNA, 19 nt, Artificial Sequence
  Description of Artificial Sequence: Synthetic oligonucleotide
  Sense strand starting at position 11 of SEQ ID NO: 914218
ucucuugcucuugaagaua

SEQ ID NO: 987137 - RNA, 19 nt, Artificial Sequence
  Description of Artificial Sequence: Synthetic oligonucleotide
  Antisense strand to SEQ ID NO: 987136
uaucuucaagagcaagaga

SEQ ID NO: 987138 - RNA, 19 nt, Artificial Sequence
  Description of Artificial Sequence: Synthetic oligonucleotide
  Sense strand starting at position 246 of SEQ ID NO: 914218
cacuaaagagcuggucaga

SEQ ID NO: 987139 - RNA, 19 nt, Artificial Sequence
  Description of Artificial Sequence: Synthetic oligonucleotide
  Antisense strand to SEQ ID NO: 987138
ucugaccagcucuuuagug

SEQ ID NO: 987140 - RNA, 19 nt, Artificial Sequence
  Description of Artificial Sequence: Synthetic oligonucleotide
  Sense strand starting at position 3612 of SEQ ID NO: 914218
cgugaagguacaugacaaa

SEQ ID NO: 987141 - RNA, 19 nt, Artificial Sequence
  Description of Artificial Sequence: Synthetic oligonucleotide
  Antisense strand to SEQ ID NO: 987140
uuugucauguaccuucacg

SEQ ID NO: 987142 - RNA, 19 nt, Artificial Sequence
  Description of Artificial Sequence: Synthetic oligonucleotide
  Sense strand starting at position 3172 of SEQ ID NO: 914218
guaauaaguugauuccuaa

SEQ ID NO: 987143 - RNA, 19 nt, Artificial Sequence
  Description of Artificial Sequence: Synthetic oligonucleotide
  Antisense strand to SEQ ID NO: 987142
uuaggaaucaacuuauuac

SEQ ID NO: 987144 - RNA, 19 nt, Artificial Sequence
  Description of Artificial Sequence: Synthetic oligonucleotide
  Sense strand starting at position 2241 of SEQ ID NO: 914218
ccaagagcucugugggaaa

SEQ ID NO: 987145 - RNA, 19 nt, Artificial Sequence
  Description of Artificial Sequence: Synthetic oligonucleotide
  Antisense strand to SEQ ID NO: 987144
uuucccacagagcucuugg

SEQ ID NO: 987146 - RNA, 19 nt, Artificial Sequence
  Description of Artificial Sequence: Synthetic oligonucleotide
  Sense strand starting at position 257 of SEQ ID NO: 914218
uggucagaaugcuuauaaa

SEQ ID NO: 987147 - RNA, 19 nt, Artificial Sequence
  Description of Artificial Sequence: Synthetic oligonucleotide
  Antisense strand to SEQ ID NO: 987146
uuuauaagcauucugacca

SEQ ID NO: 987148 - RNA, 19 nt, Artificial Sequence
  Description of Artificial Sequence: Synthetic oligonucleotide
  Sense strand starting at position 2509 of SEQ ID NO: 914218
uugggagaaauccguuuga

SEQ ID NO: 987149 - RNA, 19 nt, Artificial Sequence
  Description of Artificial Sequence: Synthetic oligonucleotide
  Antisense strand to SEQ ID NO: 987148
ucaaacggauuucucccaa

SEQ ID NO: 987150 - RNA, 19 nt, Artificial Sequence
  Description of Artificial Sequence: Synthetic oligonucleotide
  Sense strand starting at position 3272 of SEQ ID NO: 914218
gggauacgaaugugagcaa

SEQ ID NO: 987151 - RNA, 19 nt, Artificial Sequence
  Description of Artificial Sequence: Synthetic oligonucleotide
  Antisense strand to SEQ ID NO: 987150
uugcucacauucguauccc

SEQ ID NO: 987152 - RNA, 19 nt, Artificial Sequence
  Description of Artificial Sequence: Synthetic oligonucleotide
  Sense strand starting at position 3161 of SEQ ID NO: 914218
ggugucuguaaguaauaag

SEQ ID NO: 987153 - RNA, 19 nt, Artificial Sequence
  Description of Artificial Sequence: Synthetic oligonucleotide
  Antisense strand to SEQ ID NO: 987152
cuuauuacuuacagacacc

SEQ ID NO: 987154 - RNA, 19 nt, Artificial Sequence
  Description of Artificial Sequence: Synthetic oligonucleotide
  Sense strand starting at position 2597 of SEQ ID NO: 914218
cauggagcuucugugaaga

SEQ ID NO: 987155 - RNA, 19 nt, Artificial Sequence
  Description of Artificial Sequence: Synthetic oligonucleotide
  Antisense strand to SEQ ID NO: 987154
ucuucacagaagcuccaug

SEQ ID NO: 987156 - RNA, 19 nt, Artificial Sequence
  Description of Artificial Sequence: Synthetic oligonucleotide
  Sense strand starting at position 124 of SEQ ID NO: 914218
uuaaguaacuugcccagaa

SEQ ID NO: 987157 - RNA, 19 nt, Artificial Sequence
  Description of Artificial Sequence: Synthetic oligonucleotide
  Antisense strand to SEQ ID NO: 987156
uucugggcaaguuacuuaa

SEQ ID NO: 987158 - RNA, 19 nt, Artificial Sequence
  Description of Artificial Sequence: Synthetic oligonucleotide
  Sense strand starting at position 37 of SEQ ID NO: 914218
accaguucugaccaagugu

SEQ ID NO: 987159 - RNA, 19 nt, Artificial Sequence
  Description of Artificial Sequence: Synthetic oligonucleotide
  Antisense strand to SEQ ID NO: 987158
acacuuggucagaacuggu

SEQ ID NO: 987160 - RNA, 19 nt, Artificial Sequence
  Description of Artificial Sequence: Synthetic oligonucleotide
  Sense strand starting at position 1321 of SEQ ID NO: 914218
gcuacuauauccuuuggaa

SEQ ID NO: 987161 - RNA, 19 nt, Artificial Sequence
  Description of Artificial Sequence: Synthetic oligonucleotide
  Antisense strand to SEQ ID NO: 987160
uuccaaaggauauaguagc

SEQ ID NO: 987162 - RNA, 19 nt, Artificial Sequence
  Description of Artificial Sequence: Synthetic oligonucleotide
  Sense strand starting at position 3050 of SEQ ID NO: 914218
cucuuucgugaaggacuaa

SEQ ID NO: 987163 - RNA, 19 nt, Artificial Sequence
  Description of Artificial Sequence: Synthetic oligonucleotide
  Antisense strand to SEQ ID NO: 987162
uuaguccuucacgaaagag

SEQ ID NO: 987164 - RNA, 19 nt, Artificial Sequence
  Description of Artificial Sequence: Synthetic oligonucleotide
  Sense strand starting at position 53 of SEQ ID NO: 914218
uguaaacacuugucaauuc

SEQ ID NO: 987165 - RNA, 19 nt, Artificial Sequence
  Description of Artificial Sequence: Synthetic oligonucleotide
  Antisense strand to SEQ ID NO: 987164
gaauugacaaguguuuaca

SEQ ID NO: 987166 - RNA, 19 nt, Artificial Sequence
  Description of Artificial Sequence: Synthetic oligonucleotide
  Sense strand starting at position 2635 of SEQ ID NO: 914218
uccagucguccugagauac

SEQ ID NO: 987167 - RNA, 19 nt, Artificial Sequence
  Description of Artificial Sequence: Synthetic oligonucleotide
  Antisense strand to SEQ ID NO: 987166
guaucucaggacgacugga

SEQ ID NO: 987168 - RNA, 19 nt, Artificial Sequence
  Description of Artificial Sequence: Synthetic oligonucleotide
  Sense strand starting at position 3890 of SEQ ID NO: 914218
ggaaaucauccgcagugua

SEQ ID NO: 987169 - RNA, 19 nt, Artificial Sequence
  Description of Artificial Sequence: Synthetic oligonucleotide
  Antisense strand to SEQ ID NO: 987168
uacacugcggaugauuucc

SEQ ID NO: 987170 - RNA, 19 nt, Artificial Sequence
  Description of Artificial Sequence: Synthetic oligonucleotide
  Sense strand starting at position 2916 of SEQ ID NO: 914218
ucugauaugccuuaagccu

SEQ ID NO: 987171 - RNA, 19 nt, Artificial Sequence
  Description of Artificial Sequence: Synthetic oligonucleotide
  Antisense strand to SEQ ID NO: 987170
aggcuuaaggcauaucaga

SEQ ID NO: 987172 - RNA, 19 nt, Artificial Sequence
  Description of Artificial Sequence: Synthetic oligonucleotide
  Sense strand starting at position 3603 of SEQ ID NO: 914218
agauccugccgugaaggua

SEQ ID NO: 987173 - RNA, 19 nt, Artificial Sequence
  Description of Artificial Sequence: Synthetic oligonucleotide
  Antisense strand to SEQ ID NO: 987172
uaccuucacggcaggaucu

SEQ ID NO: 987174 - RNA, 19 nt, Artificial Sequence
  Description of Artificial Sequence: Synthetic oligonucleotide
  Sense strand starting at position 1450 of SEQ ID NO: 914218
gguuacuaacacuguccua

SEQ ID NO: 987175 - RNA, 19 nt, Artificial Sequence
  Description of Artificial Sequence: Synthetic oligonucleotide
  Antisense strand to SEQ ID NO: 987174
uaggacaguguuaguaacc

SEQ ID NO: 987176 - RNA, 19 nt, Artificial Sequence
  Description of Artificial Sequence: Synthetic oligonucleotide
  Sense strand starting at position 339 of SEQ ID NO: 914218
uuguaugugcucuaaauua

SEQ ID NO: 987177 - RNA, 19 nt, Artificial Sequence
  Description of Artificial Sequence: Synthetic oligonucleotide
  Antisense strand to SEQ ID NO: 987176
uaauuuagagcacauacaa

SEQ ID NO: 987178 - RNA, 19 nt, Artificial Sequence
  Description of Artificial Sequence: Synthetic oligonucleotide
  Sense strand starting at position 3160 of SEQ ID NO: 914218
aggugucuguaaguaauaa

SEQ ID NO: 987179 - RNA, 19 nt, Artificial Sequence
  Description of Artificial Sequence: Synthetic oligonucleotide
  Antisense strand to SEQ ID NO: 987178
uuauuacuuacagacaccu

SEQ ID NO: 987180 - RNA, 19 nt, Artificial Sequence
  Description of Artificial Sequence: Synthetic oligonucleotide
  Sense strand starting at position 3399 of SEQ ID NO: 914218
ggugcaaacuguccugaag

SEQ ID NO: 987181 - RNA, 19 nt, Artificial Sequence
  Description of Artificial Sequence: Synthetic oligonucleotide
  Antisense strand to SEQ ID NO: 987180
cuucaggacaguuugcacc

SEQ ID NO: 987182 - RNA, 19 nt, Artificial Sequence
  Description of Artificial Sequence: Synthetic oligonucleotide
  Sense strand starting at position 1392 of SEQ ID NO: 914218
auaugaucuugggcgagua

SEQ ID NO: 987183 - RNA, 19 nt, Artificial Sequence
  Description of Artificial Sequence: Synthetic oligonucleotide
  Antisense strand to SEQ ID NO: 987182
uacucgcccaagaucauau

SEQ ID NO: 987184 - RNA, 19 nt, Artificial Sequence
  Description of Artificial Sequence: Synthetic oligonucleotide
  Sense strand starting at position 1393 of SEQ ID NO: 914218
uaugaucuugggcgaguaa

SEQ ID NO: 987185 - RNA, 19 nt, Artificial Sequence
  Description of Artificial Sequence: Synthetic oligonucleotide
  Antisense strand to SEQ ID NO: 987184
uuacucgcccaagaucaua

SEQ ID NO: 987186 - RNA, 19 nt, Artificial Sequence
  Description of Artificial Sequence: Synthetic oligonucleotide
  Sense strand starting at position 2248 of SEQ ID NO: 914218
cucugugggaaauguaguu

SEQ ID NO: 987187 - RNA, 19 nt, Artificial Sequence
  Description of Artificial Sequence: Synthetic oligonucleotide
  Antisense strand to SEQ ID NO: 987186
aacuacauuucccacagag

SEQ ID NO: 987188 - RNA, 19 nt, Artificial Sequence
  Description of Artificial Sequence: Synthetic oligonucleotide
  Sense strand starting at position 221 of SEQ ID NO: 914218
auuagacaguugucuaguu

SEQ ID NO: 987189 - RNA, 19 nt, Artificial Sequence
  Description of Artificial Sequence: Synthetic oligonucleotide
  Antisense strand to SEQ ID NO: 987188
aacuagacaacugucuaau

SEQ ID NO: 987190 - RNA, 19 nt, Artificial Sequence
  Description of Artificial Sequence: Synthetic oligonucleotide
  Sense strand starting at position 226 of SEQ ID NO: 914218
acaguugucuaguuccuaa

SEQ ID NO: 987191 - RNA, 19 nt, Artificial Sequence
  Description of Artificial Sequence: Synthetic oligonucleotide
  Antisense strand to SEQ ID NO: 987190
uuaggaacuagacaacugu

SEQ ID NO: 987192 - RNA, 19 nt, Artificial Sequence
  Description of Artificial Sequence: Synthetic oligonucleotide
  Sense strand starting at position 288 of SEQ ID NO: 914218
ggaagagaguuugaccaga

SEQ ID NO: 987193 - RNA, 19 nt, Artificial Sequence
  Description of Artificial Sequence: Synthetic oligonucleotide
  Antisense strand to SEQ ID NO: 987192
ucuggucaaacucucuucc

SEQ ID NO: 987194 - RNA, 19 nt, Artificial Sequence
  Description of Artificial Sequence: Synthetic oligonucleotide
  Sense strand starting at position 1348 of SEQ ID NO: 914218
gaaguaguccgugagucuu

SEQ ID NO: 987195 - RNA, 19 nt, Artificial Sequence
  Description of Artificial Sequence: Synthetic oligonucleotide
  Antisense strand to SEQ ID NO: 987194
aagacucacggacuacuuc

SEQ ID NO: 987196 - RNA, 19 nt, Artificial Sequence
  Description of Artificial Sequence: Synthetic oligonucleotide
  Sense strand starting at position 3102 of SEQ ID NO: 914219
uacgaaugugagcaagaca

SEQ ID NO: 987197 - RNA, 19 nt, Artificial Sequence
  Description of Artificial Sequence: Synthetic oligonucleotide
  Antisense strand to SEQ ID NO: 987196
ugucuugcucacauucgua

SEQ ID NO: 987198 - RNA, 19 nt, Artificial Sequence
  Description of Artificial Sequence: Synthetic oligonucleotide
  Sense strand starting at position 3001 of SEQ ID NO: 914219
auaaguugauuccuaaaug

SEQ ID NO: 987199 - RNA, 19 nt, Artificial Sequence
  Description of Artificial Sequence: Synthetic oligonucleotide
  Antisense strand to SEQ ID NO: 987198
cauuuaggaaucaacuuau

SEQ ID NO: 987200 - RNA, 19 nt, Artificial Sequence
  Description of Artificial Sequence: Synthetic oligonucleotide
  Sense strand starting at position 1288 of SEQ ID NO: 914219
uguccuaucagguaggaca

SEQ ID NO: 987201 - RNA, 19 nt, Artificial Sequence
  Description of Artificial Sequence: Synthetic oligonucleotide
  Antisense strand to SEQ ID NO: 987200
uguccuaccugauaggaca

SEQ ID NO: 987202 - RNA, 19 nt, Artificial Sequence
  Description of Artificial Sequence: Synthetic oligonucleotide
  Sense strand starting at position 2339 of SEQ ID NO: 914219
gagaaauccguuugauaaa

SEQ ID NO: 987203 - RNA, 19 nt, Artificial Sequence
  Description of Artificial Sequence: Synthetic oligonucleotide
  Antisense strand to SEQ ID NO: 987202
uuuaucaaacggauuucuc

SEQ ID NO: 987204 - RNA, 19 nt, Artificial Sequence
  Description of Artificial Sequence: Synthetic oligonucleotide
  Sense strand starting at position 2235 of SEQ ID NO: 914219
auuagcaggaucugauuga

SEQ ID NO: 987205 - RNA, 19 nt, Artificial Sequence
  Description of Artificial Sequence: Synthetic oligonucleotide
  Antisense strand to SEQ ID NO: 987204
ucaaucagauccugcuaau

SEQ ID NO: 987206 - RNA, 19 nt, Artificial Sequence
  Description of Artificial Sequence: Synthetic oligonucleotide
  Sense strand starting at position 2877 of SEQ ID NO: 914219
ucuuucgugaaggacuaau

SEQ ID NO: 987207 - RNA, 19 nt, Artificial Sequence
  Description of Artificial Sequence: Synthetic oligonucleotide
  Antisense strand to SEQ ID NO: 987206
auuaguccuucacgaaaga

SEQ ID NO: 987208 - RNA, 19 nt, Artificial Sequence
  Description of Artificial Sequence: Synthetic oligonucleotide
  Sense strand starting at position 2499 of SEQ ID NO: 914219
uuugaacacguaggagaua

SEQ ID NO: 987209 - RNA, 19 nt, Artificial Sequence
  Description of Artificial Sequence: Synthetic oligonucleotide
  Antisense strand to SEQ ID NO: 987208
uaucuccuacguguucaaa

SEQ ID NO: 987210 - RNA, 19 nt, Artificial Sequence
  Description of Artificial Sequence: Synthetic oligonucleotide
  Sense strand starting at position 646 of SEQ ID NO: 914219
gaaauaauaguaugaugcu

SEQ ID NO: 987211 - RNA, 19 nt, Artificial Sequence
  Description of Artificial Sequence: Synthetic oligonucleotide
  Antisense strand to SEQ ID NO: 987210
agcaucauacuauuauuuc

SEQ ID NO: 987212 - RNA, 19 nt, Artificial Sequence
  Description of Artificial Sequence: Synthetic oligonucleotide
  Sense strand starting at position 72 of SEQ ID NO: 914219
cacuaaagagcuggucaga

SEQ ID NO: 987213 - RNA, 19 nt, Artificial Sequence
  Description of Artificial Sequence: Synthetic oligonucleotide
  Antisense strand to SEQ ID NO: 987212
ucugaccagcucuuuagug

SEQ ID NO: 987214 - RNA, 19 nt, Artificial Sequence
  Description of Artificial Sequence: Synthetic oligonucleotide
  Sense strand starting at position 3438 of SEQ ID NO: 914219
cgugaagguacaugacaaa

SEQ ID NO: 987215 - RNA, 19 nt, Artificial Sequence
  Description of Artificial Sequence: Synthetic oligonucleotide
  Antisense strand to SEQ ID NO: 987214
uuugucauguaccuucacg

SEQ ID NO: 987216 - RNA, 19 nt, Artificial Sequence
  Description of Artificial Sequence: Synthetic oligonucleotide
  Sense strand starting at position 2998 of SEQ ID NO: 914219
guaauaaguugauuccuaa

SEQ ID NO: 987217 - RNA, 19 nt, Artificial Sequence
  Description of Artificial Sequence: Synthetic oligonucleotide
  Antisense strand to SEQ ID NO: 987216
uuaggaaucaacuuauuac

SEQ ID NO: 987218 - RNA, 19 nt, Artificial Sequence
  Description of Artificial Sequence: Synthetic oligonucleotide
  Sense strand starting at position 3820 of SEQ ID NO: 914219
uguuaugacaagggcuaga

SEQ ID NO: 987219 - RNA, 19 nt, Artificial Sequence
  Description of Artificial Sequence: Synthetic oligonucleotide
  Antisense strand to SEQ ID NO: 987218
ucuagcccuugucauaaca

SEQ ID NO: 987220 - RNA, 19 nt, Artificial Sequence
  Description of Artificial Sequence: Synthetic oligonucleotide
  Sense strand starting at position 2067 of SEQ ID NO: 914219
ccaagagcucugugggaaa

SEQ ID NO: 987221 - RNA, 19 nt, Artificial Sequence
  Description of Artificial Sequence: Synthetic oligonucleotide
  Antisense strand to SEQ ID NO: 987220
uuucccacagagcucuugg

SEQ ID NO: 987222 - RNA, 19 nt, Artificial Sequence
  Description of Artificial Sequence: Synthetic oligonucleotide
  Sense strand starting at position 3963 of SEQ ID NO: 914219
cuuauaaucuugucauagg

SEQ ID NO: 987223 - RNA, 19 nt, Artificial Sequence
  Description of Artificial Sequence: Synthetic oligonucleotide
  Antisense strand to SEQ ID NO: 987222
ccuaugacaagauuauaag

SEQ ID NO: 987224 - RNA, 19 nt, Artificial Sequence
  Description of Artificial Sequence: Synthetic oligonucleotide
  Sense strand starting at position 83 of SEQ ID NO: 914219
uggucagaaugcuuauaaa

SEQ ID NO: 987225 - RNA, 19 nt, Artificial Sequence
  Description of Artificial Sequence: Synthetic oligonucleotide
  Antisense strand to SEQ ID NO: 987224
uuuauaagcauucugacca

SEQ ID NO: 987226 - RNA, 19 nt, Artificial Sequence
  Description of Artificial Sequence: Synthetic oligonucleotide
  Sense strand starting at position 2335 of SEQ ID NO: 914219
uugggagaaauccguuuga

SEQ ID NO: 987227 - RNA, 19 nt, Artificial Sequence
  Description of Artificial Sequence: Synthetic oligonucleotide
  Antisense strand to SEQ ID NO: 987226
ucaaacggauuucucccaa

SEQ ID NO: 987228 - RNA, 19 nt, Artificial Sequence
  Description of Artificial Sequence: Synthetic oligonucleotide
  Sense strand starting at position 3098 of SEQ ID NO: 914219
gggauacgaaugugagcaa

SEQ ID NO: 987229 - RNA, 19 nt, Artificial Sequence
  Description of Artificial Sequence: Synthetic oligonucleotide
  Antisense strand to SEQ ID NO: 987228
uugcucacauucguauccc

SEQ ID NO: 987230 - RNA, 19 nt, Artificial Sequence
  Description of Artificial Sequence: Synthetic oligonucleotide
  Sense strand starting at position 2987 of SEQ ID NO: 914219
ggugucuguaaguaauaag

SEQ ID NO: 987231 - RNA, 19 nt, Artificial Sequence
  Description of Artificial Sequence: Synthetic oligonucleotide
  Antisense strand to SEQ ID NO: 987230
cuuauuacuuacagacacc

SEQ ID NO: 987232 - RNA, 19 nt, Artificial Sequence
  Description of Artificial Sequence: Synthetic oligonucleotide
  Sense strand starting at position 3854 of SEQ ID NO: 914219
ggaguugaauguuuaccua

SEQ ID NO: 987233 - RNA, 19 nt, Artificial Sequence
  Description of Artificial Sequence: Synthetic oligonucleotide
  Antisense strand to SEQ ID NO: 987232
uagguaaacauucaacucc

SEQ ID NO: 987234 - RNA, 19 nt, Artificial Sequence
  Description of Artificial Sequence: Synthetic oligonucleotide
  Sense strand starting at position 2423 of SEQ ID NO: 914219
cauggagcuucugugaaga

SEQ ID NO: 987235 - RNA, 19 nt, Artificial Sequence
  Description of Artificial Sequence: Synthetic oligonucleotide
  Antisense strand to SEQ ID NO: 987234
ucuucacagaagcuccaug

SEQ ID NO: 987236 - RNA, 19 nt, Artificial Sequence
  Description of Artificial Sequence: Synthetic oligonucleotide
  Sense strand starting at position 1147 of SEQ ID NO: 914219
gcuacuauauccuuuggaa

SEQ ID NO: 987237 - RNA, 19 nt, Artificial Sequence
  Description of Artificial Sequence: Synthetic oligonucleotide
  Antisense strand to SEQ ID NO: 987236
uuccaaaggauauaguagc

SEQ ID NO: 987238 - RNA, 19 nt, Artificial Sequence
  Description of Artificial Sequence: Synthetic oligonucleotide
  Sense strand starting at position 2876 of SEQ ID NO: 914219
cucuuucgugaaggacuaa

SEQ ID NO: 987239 - RNA, 19 nt, Artificial Sequence
  Description of Artificial Sequence: Synthetic oligonucleotide
  Antisense strand to SEQ ID NO: 987238
uuaguccuucacgaaagag

SEQ ID NO: 987240 - RNA, 19 nt, Artificial Sequence
  Description of Artificial Sequence: Synthetic oligonucleotide
  Sense strand starting at position 2461 of SEQ ID NO: 914219
uccagucguccugagauac

SEQ ID NO: 987241 - RNA, 19 nt, Artificial Sequence
  Description of Artificial Sequence: Synthetic oligonucleotide
  Antisense strand to SEQ ID NO: 987240
guaucucaggacgacugga

SEQ ID NO: 987242 - RNA, 19 nt, Artificial Sequence
  Description of Artificial Sequence: Synthetic oligonucleotide
  Sense strand starting at position 3716 of SEQ ID NO: 914219
ggaaaucauccgcagugua

SEQ ID NO: 987243 - RNA, 19 nt, Artificial Sequence
  Description of Artificial Sequence: Synthetic oligonucleotide
  Antisense strand to SEQ ID NO: 987242
uacacugcggaugauuucc

SEQ ID NO: 987244 - RNA, 19 nt, Artificial Sequence
  Description of Artificial Sequence: Synthetic oligonucleotide
  Sense strand starting at position 3857 of SEQ ID NO: 914219
guugaauguuuaccuaacu

SEQ ID NO: 987245 - RNA, 19 nt, Artificial Sequence
  Description of Artificial Sequence: Synthetic oligonucleotide
  Antisense strand to SEQ ID NO: 987244
aguuagguaaacauucaac

SEQ ID NO: 987246 - RNA, 19 nt, Artificial Sequence
  Description of Artificial Sequence: Synthetic oligonucleotide
  Sense strand starting at position 2742 of SEQ ID NO: 914219
ucugauaugccuuaagccu

SEQ ID NO: 987247 - RNA, 19 nt, Artificial Sequence
  Description of Artificial Sequence: Synthetic oligonucleotide
  Antisense strand to SEQ ID NO: 987246
aggcuuaaggcauaucaga

SEQ ID NO: 987248 - RNA, 19 nt, Artificial Sequence
  Description of Artificial Sequence: Synthetic oligonucleotide
  Sense strand starting at position 3429 of SEQ ID NO: 914219
agauccugccgugaaggua

SEQ ID NO: 987249 - RNA, 19 nt, Artificial Sequence
  Description of Artificial Sequence: Synthetic oligonucleotide
  Antisense strand to SEQ ID NO: 987248
uaccuucacggcaggaucu

SEQ ID NO: 987250 - RNA, 19 nt, Artificial Sequence
  Description of Artificial Sequence: Synthetic oligonucleotide
  Sense strand starting at position 1276 of SEQ ID NO: 914219
gguuacuaacacuguccua

SEQ ID NO: 987251 - RNA, 19 nt, Artificial Sequence
  Description of Artificial Sequence: Synthetic oligonucleotide
  Antisense strand to SEQ ID NO: 987250
uaggacaguguuaguaacc

SEQ ID NO: 987252 - RNA, 19 nt, Artificial Sequence
  Description of Artificial Sequence: Synthetic oligonucleotide
  Sense strand starting at position 165 of SEQ ID NO: 914219
uuguaugugcucuaaauua

SEQ ID NO: 987253 - RNA, 19 nt, Artificial Sequence
  Description of Artificial Sequence: Synthetic oligonucleotide
  Antisense strand to SEQ ID NO: 987252
uaauuuagagcacauacaa

SEQ ID NO: 987254 - RNA, 19 nt, Artificial Sequence
  Description of Artificial Sequence: Synthetic oligonucleotide
  Sense strand starting at position 2986 of SEQ ID NO: 914219
aggugucuguaaguaauaa

SEQ ID NO: 987255 - RNA, 19 nt, Artificial Sequence
  Description of Artificial Sequence: Synthetic oligonucleotide
  Antisense strand to SEQ ID NO: 987254
uuauuacuuacagacaccu

SEQ ID NO: 987256 - RNA, 19 nt, Artificial Sequence
  Description of Artificial Sequence: Synthetic oligonucleotide
  Sense strand starting at position 3225 of SEQ ID NO: 914219
ggugcaaacuguccugaag

SEQ ID NO: 987257 - RNA, 19 nt, Artificial Sequence
  Description of Artificial Sequence: Synthetic oligonucleotide
  Antisense strand to SEQ ID NO: 987256
cuucaggacaguuugcacc

SEQ ID NO: 987258 - RNA, 19 nt, Artificial Sequence
  Description of Artificial Sequence: Synthetic oligonucleotide
  Sense strand starting at position 1218 of SEQ ID NO: 914219
auaugaucuugggcgagua

SEQ ID NO: 987259 - RNA, 19 nt, Artificial Sequence
  Description of Artificial Sequence: Synthetic oligonucleotide
  Antisense strand to SEQ ID NO: 987258
uacucgcccaagaucauau

SEQ ID NO: 987260 - RNA, 19 nt, Artificial Sequence
  Description of Artificial Sequence: Synthetic oligonucleotide
  Sense strand starting at position 1219 of SEQ ID NO: 914219
uaugaucuugggcgaguaa

SEQ ID NO: 987261 - RNA, 19 nt, Artificial Sequence
  Description of Artificial Sequence: Synthetic oligonucleotide
  Antisense strand to SEQ ID NO: 987260
uuacucgcccaagaucaua

SEQ ID NO: 987262 - RNA, 19 nt, Artificial Sequence
  Description of Artificial Sequence: Synthetic oligonucleotide
  Sense strand starting at position 2074 of SEQ ID NO: 914219
cucugugggaaauguaguu

SEQ ID NO: 987263 - RNA, 19 nt, Artificial Sequence
  Description of Artificial Sequence: Synthetic oligonucleotide
  Antisense strand to SEQ ID NO: 987262
aacuacauuucccacagag

SEQ ID NO: 987264 - RNA, 19 nt, Artificial Sequence
  Description of Artificial Sequence: Synthetic oligonucleotide
  Sense strand starting at position 47 of SEQ ID NO: 914219
auuagacaguugucuaguu

SEQ ID NO: 987265 - RNA, 19 nt, Artificial Sequence
  Description of Artificial Sequence: Synthetic oligonucleotide
  Antisense strand to SEQ ID NO: 987264
aacuagacaacugucuaau

SEQ ID NO: 987266 - RNA, 19 nt, Artificial Sequence
  Description of Artificial Sequence: Synthetic oligonucleotide
  Sense strand starting at position 52 of SEQ ID NO: 914219
acaguugucuaguuccuaa

SEQ ID NO: 987267 - RNA, 19 nt, Artificial Sequence
  Description of Artificial Sequence: Synthetic oligonucleotide
  Antisense strand to SEQ ID NO: 987266
uuaggaacuagacaacugu

SEQ ID NO: 987268 - RNA, 19 nt, Artificial Sequence
  Description of Artificial Sequence: Synthetic oligonucleotide
  Sense strand starting at position 114 of SEQ ID NO: 914219
ggaagagaguuugaccaga

SEQ ID NO: 987269 - RNA, 19 nt, Artificial Sequence
  Description of Artificial Sequence: Synthetic oligonucleotide
  Antisense strand to SEQ ID NO: 987268
ucuggucaaacucucuucc

SEQ ID NO: 987270 - RNA, 19 nt, Artificial Sequence
  Description of Artificial Sequence: Synthetic oligonucleotide
  Sense strand starting at position 1174 of SEQ ID NO: 914219
gaaguaguccgugagucuu

SEQ ID NO: 987271 - RNA, 19 nt, Artificial Sequence
  Description of Artificial Sequence: Synthetic oligonucleotide
  Antisense strand to SEQ ID NO: 987270
aagacucacggacuacuuc

SEQ ID NO: 987272 - RNA, 19 nt, Artificial Sequence
  Description of Artificial Sequence: Synthetic oligonucleotide
  Sense strand starting at position 3715 of SEQ ID NO: 914219
gggaaaucauccgcagugu

SEQ ID NO: 987273 - RNA, 19 nt, Artificial Sequence
  Description of Artificial Sequence: Synthetic oligonucleotide
  Antisense strand to SEQ ID NO: 987272
acacugcggaugauuuccc

SEQ ID NO: 987274 - RNA, 19 nt, Artificial Sequence
  Description of Artificial Sequence: Synthetic oligonucleotide
  Sense strand starting at position 2152 of SEQ ID NO: 914219
ucccguuuggacugguaau

SEQ ID NO: 987275 - RNA, 19 nt, Artificial Sequence
  Description of Artificial Sequence: Synthetic oligonucleotide
  Antisense strand to SEQ ID NO: 987274
auuaccaguccaaacggga

SEQ ID NO: 987276 - RNA, 19 nt, Artificial Sequence
  Description of Artificial Sequence: Synthetic oligonucleotide
  Sense strand starting at position 2656 of SEQ ID NO: 914220
augaacagccaguauacau

SEQ ID NO: 987277 - RNA, 19 nt, Artificial Sequence
  Description of Artificial Sequence: Synthetic oligonucleotide
  Antisense strand to SEQ ID NO: 987276
auguauacuggcuguucau

SEQ ID NO: 987278 - RNA, 19 nt, Artificial Sequence
  Description of Artificial Sequence: Synthetic oligonucleotide
  Sense strand starting at position 1357 of SEQ ID NO: 914220
guaauucuugaagaucuuu

SEQ ID NO: 987279 - RNA, 19 nt, Artificial Sequence
  Description of Artificial Sequence: Synthetic oligonucleotide
  Antisense strand to SEQ ID NO: 987278
aaagaucuucaagaauuac

SEQ ID NO: 987280 - RNA, 19 nt, Artificial Sequence
  Description of Artificial Sequence: Synthetic oligonucleotide
  Sense strand starting at position 2175 of SEQ ID NO: 914220
ggcacuccaaagggauaua

SEQ ID NO: 987281 - RNA, 19 nt, Artificial Sequence
  Description of Artificial Sequence: Synthetic oligonucleotide
  Antisense strand to SEQ ID NO: 987280
uauaucccuuuggagugcc

SEQ ID NO: 987282 - RNA, 19 nt, Artificial Sequence
  Description of Artificial Sequence: Synthetic oligonucleotide
  Sense strand starting at position 669 of SEQ ID NO: 914220
ugacaauauuggccaaaca

SEQ ID NO: 987283 - RNA, 19 nt, Artificial Sequence
  Description of Artificial Sequence: Synthetic oligonucleotide
  Antisense strand to SEQ ID NO: 987282
uguuuggccaauauuguca

SEQ ID NO: 987284 - RNA, 19 nt, Artificial Sequence
  Description of Artificial Sequence: Synthetic oligonucleotide
  Sense strand starting at position 2790 of SEQ ID NO: 914220
aagaguauucuuuaaugug

SEQ ID NO: 987285 - RNA, 19 nt, Artificial Sequence
  Description of Artificial Sequence: Synthetic oligonucleotide
  Antisense strand to SEQ ID NO: 987284
cacauuaaagaauacucuu

SEQ ID NO: 987286 - RNA, 19 nt, Artificial Sequence
  Description of Artificial Sequence: Synthetic oligonucleotide
  Sense strand starting at position 2174 of SEQ ID NO: 914220
gggcacuccaaagggauau

SEQ ID NO: 987287 - RNA, 19 nt, Artificial Sequence
  Description of Artificial Sequence: Synthetic oligonucleotide
  Antisense strand to SEQ ID NO: 987286
auaucccuuuggagugccc

SEQ ID NO: 987288 - RNA, 19 nt, Artificial Sequence
  Description of Artificial Sequence: Synthetic oligonucleotide
  Sense strand starting at position 346 of SEQ ID NO: 914220
agauacagcugaguuagaa

SEQ ID NO: 987289 - RNA, 19 nt, Artificial Sequence
  Description of Artificial Sequence: Synthetic oligonucleotide
  Antisense strand to SEQ ID NO: 987288
uucuaacucagcuguaucu

SEQ ID NO: 987290 - RNA, 19 nt, Artificial Sequence
  Description of Artificial Sequence: Synthetic oligonucleotide
  Sense strand starting at position 939 of SEQ ID NO: 914220
ggagaugugacuuagucuu

SEQ ID NO: 987291 - RNA, 19 nt, Artificial Sequence
  Description of Artificial Sequence: Synthetic oligonucleotide
  Antisense strand to SEQ ID NO: 987290
aagacuaagucacaucucc

SEQ ID NO: 987292 - RNA, 19 nt, Artificial Sequence
  Description of Artificial Sequence: Synthetic oligonucleotide
  Sense strand starting at position 2085 of SEQ ID NO: 914220
uucggauugguagagaagu

SEQ ID NO: 987293 - RNA, 19 nt, Artificial Sequence
  Description of Artificial Sequence: Synthetic oligonucleotide
  Antisense strand to SEQ ID NO: 987292
acuucucuaccaauccgaa

SEQ ID NO: 987294 - RNA, 19 nt, Artificial Sequence
  Description of Artificial Sequence: Synthetic oligonucleotide
  Sense strand starting at position 2074 of SEQ ID NO: 914220
gcgagcagcccuucggauu

SEQ ID NO: 987295 - RNA, 19 nt, Artificial Sequence
  Description of Artificial Sequence: Synthetic oligonucleotide
  Antisense strand to SEQ ID NO: 987294
aauccgaagggcugcucgc

SEQ ID NO: 987296 - RNA, 19 nt, Artificial Sequence
  Description of Artificial Sequence: Synthetic oligonucleotide
  Sense strand starting at position 2401 of SEQ ID NO: 914220
gaaauuguagcucaguaag

SEQ ID NO: 987297 - RNA, 19 nt, Artificial Sequence
  Description of Artificial Sequence: Synthetic oligonucleotide
  Antisense strand to SEQ ID NO: 987296
cuuacugagcuacaauuuc

SEQ ID NO: 987298 - RNA, 19 nt, Artificial Sequence
  Description of Artificial Sequence: Synthetic oligonucleotide
  Sense strand starting at position 2404 of SEQ ID NO: 914220
auuguagcucaguaaggaa

SEQ ID NO: 987299 - RNA, 19 nt, Artificial Sequence
  Description of Artificial Sequence: Synthetic oligonucleotide
  Antisense strand to SEQ ID NO: 987298
uuccuuacugagcuacaau

SEQ ID NO: 987300 - RNA, 19 nt, Artificial Sequence
  Description of Artificial Sequence: Synthetic oligonucleotide
  Sense strand starting at position 1362 of SEQ ID NO: 914220
ucuugaagaucuuuccuga

SEQ ID NO: 987301 - RNA, 19 nt, Artificial Sequence
  Description of Artificial Sequence: Synthetic oligonucleotide
  Antisense strand to SEQ ID NO: 987300
ucaggaaagaucuucaaga

SEQ ID NO: 987302 - RNA, 19 nt, Artificial Sequence
  Description of Artificial Sequence: Synthetic oligonucleotide
  Sense strand starting at position 2783 of SEQ ID NO: 914220
acagcuuaagaguauucuu

SEQ ID NO: 987303 - RNA, 19 nt, Artificial Sequence
  Description of Artificial Sequence: Synthetic oligonucleotide
  Antisense strand to SEQ ID NO: 987302
aagaauacucuuaagcugu

SEQ ID NO: 987304 - RNA, 19 nt, Artificial Sequence
  Description of Artificial Sequence: Synthetic oligonucleotide
  Sense strand starting at position 527 of SEQ ID NO: 914220
cggaauaggcgguagaaau

SEQ ID NO: 987305 - RNA, 19 nt, Artificial Sequence
  Description of Artificial Sequence: Synthetic oligonucleotide
  Antisense strand to SEQ ID NO: 987304
auuucuaccgccuauuccg

SEQ ID NO: 987306 - RNA, 19 nt, Artificial Sequence
  Description of Artificial Sequence: Synthetic oligonucleotide
  Sense strand starting at position 1367 of SEQ ID NO: 914220
aagaucuuuccugagugca

SEQ ID NO: 987307 - RNA, 19 nt, Artificial Sequence
  Description of Artificial Sequence: Synthetic oligonucleotide
  Antisense strand to SEQ ID NO: 987306
ugcacucaggaaagaucuu

SEQ ID NO: 987308 - RNA, 19 nt, Artificial Sequence
  Description of Artificial Sequence: Synthetic oligonucleotide
  Sense strand starting at position 1365 of SEQ ID NO: 914220
ugaagaucuuuccugagug

SEQ ID NO: 987309 - RNA, 19 nt, Artificial Sequence
  Description of Artificial Sequence: Synthetic oligonucleotide
  Antisense strand to SEQ ID NO: 987308
cacucaggaaagaucuuca

SEQ ID NO: 987310 - RNA, 19 nt, Artificial Sequence
  Description of Artificial Sequence: Synthetic oligonucleotide
  Sense strand starting at position 343 of SEQ ID NO: 914220
ugaagauacagcugaguua

SEQ ID NO: 987311 - RNA, 19 nt, Artificial Sequence
  Description of Artificial Sequence: Synthetic oligonucleotide
  Antisense strand to SEQ ID NO: 987310
uaacucagcuguaucuuca

SEQ ID NO: 987312 - RNA, 19 nt, Artificial Sequence
  Description of Artificial Sequence: Synthetic oligonucleotide
  Sense strand starting at position 400 of SEQ ID NO: 914220
uggcaacuccuggauucuu

SEQ ID NO: 987313 - RNA, 19 nt, Artificial Sequence
  Description of Artificial Sequence: Synthetic oligonucleotide
  Antisense strand to SEQ ID NO: 987312
aagaauccaggaguugcca

SEQ ID NO: 987314 - RNA, 19 nt, Artificial Sequence
  Description of Artificial Sequence: Synthetic oligonucleotide
  Sense strand starting at position 452 of SEQ ID NO: 914220
aaaugcuuccucugggaga

SEQ ID NO: 987315 - RNA, 19 nt, Artificial Sequence
  Description of Artificial Sequence: Synthetic oligonucleotide
  Antisense strand to SEQ ID NO: 987314
ucucccagaggaagcauuu

SEQ ID NO: 987316 - RNA, 19 nt, Artificial Sequence
  Description of Artificial Sequence: Synthetic oligonucleotide
  Sense strand starting at position 576 of SEQ ID NO: 914220
agcucuugggcacaagauu

SEQ ID NO: 987317 - RNA, 19 nt, Artificial Sequence
  Description of Artificial Sequence: Synthetic oligonucleotide
  Antisense strand to SEQ ID NO: 987316
aaucuugugcccaagagcu

SEQ ID NO: 987318 - RNA, 19 nt, Artificial Sequence
  Description of Artificial Sequence: Synthetic oligonucleotide
  Sense strand starting at position 413 of SEQ ID NO: 914220
auucuuccgcccuaagaag

SEQ ID NO: 987319 - RNA, 19 nt, Artificial Sequence
  Description of Artificial Sequence: Synthetic oligonucleotide
  Antisense strand to SEQ ID NO: 987318
cuucuuagggcggaagaau

SEQ ID NO: 987320 - RNA, 19 nt, Artificial Sequence
  Description of Artificial Sequence: Synthetic oligonucleotide
  Sense strand starting at position 3049 of SEQ ID NO: 914220
accacuugauccuuggagu

SEQ ID NO: 987321 - RNA, 19 nt, Artificial Sequence
  Description of Artificial Sequence: Synthetic oligonucleotide
  Antisense strand to SEQ ID NO: 987320
acuccaaggaucaaguggu

SEQ ID NO: 987322 - RNA, 19 nt, Artificial Sequence
  Description of Artificial Sequence: Synthetic oligonucleotide
  Sense strand starting at position 976 of SEQ ID NO: 914220
ugaacaagucagugaccuu

SEQ ID NO: 987323 - RNA, 19 nt, Artificial Sequence
  Description of Artificial Sequence: Synthetic oligonucleotide
  Antisense strand to SEQ ID NO: 987322
aaggucacugacuuguuca

SEQ ID NO: 987324 - RNA, 19 nt, Artificial Sequence
  Description of Artificial Sequence: Synthetic oligonucleotide
  Sense strand starting at position 2797 of SEQ ID NO: 914220
uucuuuaauguguaguaga

SEQ ID NO: 987325 - RNA, 19 nt, Artificial Sequence
  Description of Artificial Sequence: Synthetic oligonucleotide
  Antisense strand to SEQ ID NO: 987324
ucuacuacacauuaaagaa

SEQ ID NO: 987326 - RNA, 19 nt, Artificial Sequence
  Description of Artificial Sequence: Synthetic oligonucleotide
  Sense strand starting at position 574 of SEQ ID NO: 914220
guagcucuugggcacaaga

SEQ ID NO: 987327 - RNA, 19 nt, Artificial Sequence
  Description of Artificial Sequence: Synthetic oligonucleotide
  Antisense strand to SEQ ID NO: 987326
ucuugugcccaagagcuac

SEQ ID NO: 987328 - RNA, 19 nt, Artificial Sequence
  Description of Artificial Sequence: Synthetic oligonucleotide
  Sense strand starting at position 2516 of SEQ ID NO: 914220
ucuguaccuuucuuaggaa

SEQ ID NO: 987329 - RNA, 19 nt, Artificial Sequence
  Description of Artificial Sequence: Synthetic oligonucleotide
  Antisense strand to SEQ ID NO: 987328
uuccuaagaaagguacaga

SEQ ID NO: 987330 - RNA, 19 nt, Artificial Sequence
  Description of Artificial Sequence: Synthetic oligonucleotide
  Sense strand starting at position 2515 of SEQ ID NO: 914220
aucuguaccuuucuuagga

SEQ ID NO: 987331 - RNA, 19 nt, Artificial Sequence
  Description of Artificial Sequence: Synthetic oligonucleotide
  Antisense strand to SEQ ID NO: 987330
uccuaagaaagguacagau

SEQ ID NO: 987332 - RNA, 19 nt, Artificial Sequence
  Description of Artificial Sequence: Synthetic oligonucleotide
  Sense strand starting at position 469 of SEQ ID NO: 914220
gaguaucaauguccucuga

SEQ ID NO: 987333 - RNA, 19 nt, Artificial Sequence
  Description of Artificial Sequence: Synthetic oligonucleotide
  Antisense strand to SEQ ID NO: 987332
ucagaggacauugauacuc

SEQ ID NO: 987334 - RNA, 19 nt, Artificial Sequence
  Description of Artificial Sequence: Synthetic oligonucleotide
  Sense strand starting at position 2403 of SEQ ID NO: 914220
aauuguagcucaguaagga

SEQ ID NO: 987335 - RNA, 19 nt, Artificial Sequence
  Description of Artificial Sequence: Synthetic oligonucleotide
  Antisense strand to SEQ ID NO: 987334
uccuuacugagcuacaauu

SEQ ID NO: 987336 - RNA, 19 nt, Artificial Sequence
  Description of Artificial Sequence: Synthetic oligonucleotide
  Sense strand starting at position 2281 of SEQ ID NO: 914220
agaucucguccauacaguu

SEQ ID NO: 987337 - RNA, 19 nt, Artificial Sequence
  Description of Artificial Sequence: Synthetic oligonucleotide
  Antisense strand to SEQ ID NO: 987336
aacuguauggacgagaucu

SEQ ID NO: 987338 - RNA, 19 nt, Artificial Sequence
  Description of Artificial Sequence: Synthetic oligonucleotide
  Sense strand starting at position 534 of SEQ ID NO: 914220
ggcgguagaaauggugaaa

SEQ ID NO: 987339 - RNA, 19 nt, Artificial Sequence
  Description of Artificial Sequence: Synthetic oligonucleotide
  Antisense strand to SEQ ID NO: 987338
uuucaccauuucuaccgcc

SEQ ID NO: 987340 - RNA, 19 nt, Artificial Sequence
  Description of Artificial Sequence: Synthetic oligonucleotide
  Sense strand starting at position 2583 of SEQ ID NO: 914220
cucuuugaucuuuagugua

SEQ ID NO: 987341 - RNA, 19 nt, Artificial Sequence
  Description of Artificial Sequence: Synthetic oligonucleotide
  Antisense strand to SEQ ID NO: 987340
uacacuaaagaucaaagag

SEQ ID NO: 987342 - RNA, 19 nt, Artificial Sequence
  Description of Artificial Sequence: Synthetic oligonucleotide
  Sense strand starting at position 3050 of SEQ ID NO: 914220
ccacuugauccuuggaguu

SEQ ID NO: 987343 - RNA, 19 nt, Artificial Sequence
  Description of Artificial Sequence: Synthetic oligonucleotide
  Antisense strand to SEQ ID NO: 987342
aacuccaaggaucaagugg

SEQ ID NO: 987344 - RNA, 19 nt, Artificial Sequence
  Description of Artificial Sequence: Synthetic oligonucleotide
  Sense strand starting at position 2786 of SEQ ID NO: 914220
gcuuaagaguauucuuuaa

SEQ ID NO: 987345 - RNA, 19 nt, Artificial Sequence
  Description of Artificial Sequence: Synthetic oligonucleotide
  Antisense strand to SEQ ID NO: 987344
uuaaagaauacucuuaagc

SEQ ID NO: 987346 - RNA, 19 nt, Artificial Sequence
  Description of Artificial Sequence: Synthetic oligonucleotide
  Sense strand starting at position 471 of SEQ ID NO: 914220
guaucaauguccucugaca

SEQ ID NO: 987347 - RNA, 19 nt, Artificial Sequence
  Description of Artificial Sequence: Synthetic oligonucleotide
  Antisense strand to SEQ ID NO: 987346
ugucagaggacauugauac

SEQ ID NO: 987348 - RNA, 19 nt, Artificial Sequence
  Description of Artificial Sequence: Synthetic oligonucleotide
  Sense strand starting at position 2853 of SEQ ID NO: 914220
uuccaaagagcaugucauu

SEQ ID NO: 987349 - RNA, 19 nt, Artificial Sequence
  Description of Artificial Sequence: Synthetic oligonucleotide
  Antisense strand to SEQ ID NO: 987348
aaugacaugcucuuuggaa

SEQ ID NO: 987350 - RNA, 19 nt, Artificial Sequence
  Description of Artificial Sequence: Synthetic oligonucleotide
  Sense strand starting at position 1370 of SEQ ID NO: 914220
aucuuuccugagugcaaga

SEQ ID NO: 987351 - RNA, 19 nt, Artificial Sequence
  Description of Artificial Sequence: Synthetic oligonucleotide
  Antisense strand to SEQ ID NO: 987350
ucuugcacucaggaaagau

SEQ ID NO: 987352 - RNA, 19 nt, Artificial Sequence
  Description of Artificial Sequence: Synthetic oligonucleotide
  Sense strand starting at position 1369 of SEQ ID NO: 914220
gaucuuuccugagugcaag

SEQ ID NO: 987353 - RNA, 19 nt, Artificial Sequence
  Description of Artificial Sequence: Synthetic oligonucleotide
  Antisense strand to SEQ ID NO: 987352
cuugcacucaggaaagauc

SEQ ID NO: 987354 - RNA, 19 nt, Artificial Sequence
  Description of Artificial Sequence: Synthetic oligonucleotide
  Sense strand starting at position 2202 of SEQ ID NO: 914220
gaggucugugggcaguuua

SEQ ID NO: 987355 - RNA, 19 nt, Artificial Sequence
  Description of Artificial Sequence: Synthetic oligonucleotide
  Antisense strand to SEQ ID NO: 987354
uaaacugcccacagaccuc

SEQ ID NO: 987356 - RNA, 19 nt, Artificial Sequence
  Description of Artificial Sequence: Synthetic oligonucleotide
  Sense strand starting at position 2709 of SEQ ID NO: 914221
cuuuauccagaguaaguaa

SEQ ID NO: 987357 - RNA, 19 nt, Artificial Sequence
  Description of Artificial Sequence: Synthetic oligonucleotide
  Antisense strand to SEQ ID NO: 987356
uuacuuacucuggauaaag

SEQ ID NO: 987358 - RNA, 19 nt, Artificial Sequence
  Description of Artificial Sequence: Synthetic oligonucleotide
  Sense strand starting at position 1028 of SEQ ID NO: 914221
ugaacaagucaguaaccuu

SEQ ID NO: 987359 - RNA, 19 nt, Artificial Sequence
  Description of Artificial Sequence: Synthetic oligonucleotide
  Antisense strand to SEQ ID NO: 987358
aagguuacugacuuguuca

SEQ ID NO: 987360 - RNA, 19 nt, Artificial Sequence
  Description of Artificial Sequence: Synthetic oligonucleotide
  Sense strand starting at position 1035 of SEQ ID NO: 914221
gucaguaaccuugacaaac

SEQ ID NO: 987361 - RNA, 19 nt, Artificial Sequence
  Description of Artificial Sequence: Synthetic oligonucleotide
  Antisense strand to SEQ ID NO: 987360
guuugucaagguuacugac

SEQ ID NO: 987362 - RNA, 19 nt, Artificial Sequence
  Description of Artificial Sequence: Synthetic oligonucleotide
  Sense strand starting at position 1416 of SEQ ID NO: 914221
guaauucuugaagauccuu

SEQ ID NO: 987363 - RNA, 19 nt, Artificial Sequence
  Description of Artificial Sequence: Synthetic oligonucleotide
  Antisense strand to SEQ ID NO: 987362
aaggaucuucaagaauuac

SEQ ID NO: 987364 - RNA, 19 nt, Artificial Sequence
  Description of Artificial Sequence: Synthetic oligonucleotide
  Sense strand starting at position 719 of SEQ ID NO: 914221
ugacaauauuggccaaaca

SEQ ID NO: 987365 - RNA, 19 nt, Artificial Sequence
  Description of Artificial Sequence: Synthetic oligonucleotide
  Antisense strand to SEQ ID NO: 987364
uguuuggccaauauuguca

SEQ ID NO: 987366 - RNA, 19 nt, Artificial Sequence
  Description of Artificial Sequence: Synthetic oligonucleotide
  Sense strand starting at position 2867 of SEQ ID NO: 914221
gagaguauucuuuaaugug

SEQ ID NO: 987367 - RNA, 19 nt, Artificial Sequence
  Description of Artificial Sequence: Synthetic oligonucleotide
  Antisense strand to SEQ ID NO: 987366
cacauuaaagaauacucuc

SEQ ID NO: 987368 - RNA, 19 nt, Artificial Sequence
  Description of Artificial Sequence: Synthetic oligonucleotide
  Sense strand starting at position 2863 of SEQ ID NO: 914221
gauugagaguauucuuuaa

SEQ ID NO: 987369 - RNA, 19 nt, Artificial Sequence
  Description of Artificial Sequence: Synthetic oligonucleotide
  Antisense strand to SEQ ID NO: 987368
uuaaagaauacucucaauc

SEQ ID NO: 987370 - RNA, 19 nt, Artificial Sequence
  Description of Artificial Sequence: Synthetic oligonucleotide
  Sense strand starting at position 822 of SEQ ID NO: 914221
uuacuuaaccucugaugag

SEQ ID NO: 987371 - RNA, 19 nt, Artificial Sequence
  Description of Artificial Sequence: Synthetic oligonucleotide
  Antisense strand to SEQ ID NO: 987370
cucaucagagguuaaguaa

SEQ ID NO: 987372 - RNA, 19 nt, Artificial Sequence
  Description of Artificial Sequence: Synthetic oligonucleotide
  Sense strand starting at position 488 of SEQ ID NO: 914221
auucuucugcccuaagaag

SEQ ID NO: 987373 - RNA, 19 nt, Artificial Sequence
  Description of Artificial Sequence: Synthetic oligonucleotide
  Antisense strand to SEQ ID NO: 987372
cuucuuagggcagaagaau

SEQ ID NO: 987374 - RNA, 19 nt, Artificial Sequence
  Description of Artificial Sequence: Synthetic oligonucleotide
  Sense strand starting at position 541 of SEQ ID NO: 914221
ggagaauaucaauguccuc

SEQ ID NO: 987375 - RNA, 19 nt, Artificial Sequence
  Description of Artificial Sequence: Synthetic oligonucleotide
  Antisense strand to SEQ ID NO: 987374
gaggacauugauauucucc

SEQ ID NO: 987376 - RNA, 19 nt, Artificial Sequence
  Description of Artificial Sequence: Synthetic oligonucleotide
  Sense strand starting at position 1421 of SEQ ID NO: 914221
ucuugaagauccuuccuga

SEQ ID NO: 987377 - RNA, 19 nt, Artificial Sequence
  Description of Artificial Sequence: Synthetic oligonucleotide
  Antisense strand to SEQ ID NO: 987376
ucaggaaggaucuucaaga

SEQ ID NO: 987378 - RNA, 19 nt, Artificial Sequence
  Description of Artificial Sequence: Synthetic oligonucleotide
  Sense strand starting at position 2865 of SEQ ID NO: 914221
uugagaguauucuuuaaug

SEQ ID NO: 987379 - RNA, 19 nt, Artificial Sequence
  Description of Artificial Sequence: Synthetic oligonucleotide
  Antisense strand to SEQ ID NO: 987378
cauuaaagaauacucucaa

SEQ ID NO: 987380 - RNA, 19 nt, Artificial Sequence
  Description of Artificial Sequence: Synthetic oligonucleotide
  Sense strand starting at position 1424 of SEQ ID NO: 914221
ugaagauccuuccugagug

SEQ ID NO: 987381 - RNA, 19 nt, Artificial Sequence
  Description of Artificial Sequence: Synthetic oligonucleotide
  Antisense strand to SEQ ID NO: 987380
cacucaggaaggaucuuca

SEQ ID NO: 987382 - RNA, 19 nt, Artificial Sequence
  Description of Artificial Sequence: Synthetic oligonucleotide
  Sense strand starting at position 627 of SEQ ID NO: 914221
agcucuugggcacaagauu

SEQ ID NO: 987383 - RNA, 19 nt, Artificial Sequence
  Description of Artificial Sequence: Synthetic oligonucleotide
  Antisense strand to SEQ ID NO: 987382
aaucuugugcccaagagcu

SEQ ID NO: 987384 - RNA, 19 nt, Artificial Sequence
  Description of Artificial Sequence: Synthetic oligonucleotide
  Sense strand starting at position 3117 of SEQ ID NO: 914221
accacuugauccuuagagu

SEQ ID NO: 987385 - RNA, 19 nt, Artificial Sequence
  Description of Artificial Sequence: Synthetic oligonucleotide
  Antisense strand to SEQ ID NO: 987384
acucuaaggaucaaguggu

SEQ ID NO: 987386 - RNA, 19 nt, Artificial Sequence
  Description of Artificial Sequence: Synthetic oligonucleotide
  Sense strand starting at position 2049 of SEQ ID NO: 914221
agagguagccaguggauga

SEQ ID NO: 987387 - RNA, 19 nt, Artificial Sequence
  Description of Artificial Sequence: Synthetic oligonucleotide
  Antisense strand to SEQ ID NO: 987386
ucauccacuggcuaccucu

SEQ ID NO: 987388 - RNA, 19 nt, Artificial Sequence
  Description of Artificial Sequence: Synthetic oligonucleotide
  Sense strand starting at position 625 of SEQ ID NO: 914221
guagcucuugggcacaaga

SEQ ID NO: 987389 - RNA, 19 nt, Artificial Sequence
  Description of Artificial Sequence: Synthetic oligonucleotide
  Antisense strand to SEQ ID NO: 987388
ucuugugcccaagagcuac

SEQ ID NO: 987390 - RNA, 19 nt, Artificial Sequence
  Description of Artificial Sequence: Synthetic oligonucleotide
  Sense strand starting at position 2597 of SEQ ID NO: 914221
ucuguaccuuucuuaggaa

SEQ ID NO: 987391 - RNA, 19 nt, Artificial Sequence
  Description of Artificial Sequence: Synthetic oligonucleotide
  Antisense strand to SEQ ID NO: 987390
uuccuaagaaagguacaga

SEQ ID NO: 987392 - RNA, 19 nt, Artificial Sequence
  Description of Artificial Sequence: Synthetic oligonucleotide
  Sense strand starting at position 2596 of SEQ ID NO: 914221
aucuguaccuuucuuagga

SEQ ID NO: 987393 - RNA, 19 nt, Artificial Sequence
  Description of Artificial Sequence: Synthetic oligonucleotide
  Antisense strand to SEQ ID NO: 987392
uccuaagaaagguacagau

SEQ ID NO: 987394 - RNA, 19 nt, Artificial Sequence
  Description of Artificial Sequence: Synthetic oligonucleotide
  Sense strand starting at position 1220 of SEQ ID NO: 914221
gcauuucucugccucagua

SEQ ID NO: 987395 - RNA, 19 nt, Artificial Sequence
  Description of Artificial Sequence: Synthetic oligonucleotide
  Antisense strand to SEQ ID NO: 987394
uacugaggcagagaaaugc

SEQ ID NO: 987396 - RNA, 19 nt, Artificial Sequence
  Description of Artificial Sequence: Synthetic oligonucleotide
  Sense strand starting at position 486 of SEQ ID NO: 914221
ggauucuucugcccuaaga

SEQ ID NO: 987397 - RNA, 19 nt, Artificial Sequence
  Description of Artificial Sequence: Synthetic oligonucleotide
  Antisense strand to SEQ ID NO: 987396
ucuuagggcagaagaaucc

SEQ ID NO: 987398 - RNA, 19 nt, Artificial Sequence
  Description of Artificial Sequence: Synthetic oligonucleotide
  Sense strand starting at position 832 of SEQ ID NO: 914221
ucugaugaguuaguccaca

SEQ ID NO: 987399 - RNA, 19 nt, Artificial Sequence
  Description of Artificial Sequence: Synthetic oligonucleotide
  Antisense strand to SEQ ID NO: 987398
uguggacuaacucaucaga

SEQ ID NO: 987400 - RNA, 19 nt, Artificial Sequence
  Description of Artificial Sequence: Synthetic oligonucleotide
  Sense strand starting at position 1947 of SEQ ID NO: 914221
uugcauucgccauaagaga

SEQ ID NO: 987401 - RNA, 19 nt, Artificial Sequence
  Description of Artificial Sequence: Synthetic oligonucleotide
  Antisense strand to SEQ ID NO: 987400
ucucuuauggcgaaugcaa

SEQ ID NO: 987402 - RNA, 19 nt, Artificial Sequence
  Description of Artificial Sequence: Synthetic oligonucleotide
  Sense strand starting at position 2663 of SEQ ID NO: 914221
cucuuugaucuuuagugua

SEQ ID NO: 987403 - RNA, 19 nt, Artificial Sequence
  Description of Artificial Sequence: Synthetic oligonucleotide
  Antisense strand to SEQ ID NO: 987402
uacacuaaagaucaaagag

SEQ ID NO: 987404 - RNA, 19 nt, Artificial Sequence
  Description of Artificial Sequence: Synthetic oligonucleotide
  Sense strand starting at position 475 of SEQ ID NO: 914221
uggcaacucccggauucuu

SEQ ID NO: 987405 - RNA, 19 nt, Artificial Sequence
  Description of Artificial Sequence: Synthetic oligonucleotide
  Antisense strand to SEQ ID NO: 987404
aagaauccgggaguugcca

SEQ ID NO: 987406 - RNA, 19 nt, Artificial Sequence
  Description of Artificial Sequence: Synthetic oligonucleotide
  Sense strand starting at position 387 of SEQ ID NO: 914221
uguucuguucuuggaaaga

SEQ ID NO: 987407 - RNA, 19 nt, Artificial Sequence
  Description of Artificial Sequence: Synthetic oligonucleotide
  Antisense strand to SEQ ID NO: 987406
ucuuuccaagaacagaaca

SEQ ID NO: 987408 - RNA, 19 nt, Artificial Sequence
  Description of Artificial Sequence: Synthetic oligonucleotide
  Sense strand starting at position 2703 of SEQ ID NO: 914221
ugucaacuuuauccagagu

SEQ ID NO: 987409 - RNA, 19 nt, Artificial Sequence
  Description of Artificial Sequence: Synthetic oligonucleotide
  Antisense strand to SEQ ID NO: 987408
acucuggauaaaguugaca

SEQ ID NO: 987410 - RNA, 19 nt, Artificial Sequence
  Description of Artificial Sequence: Synthetic oligonucleotide
  Sense strand starting at position 407 of SEQ ID NO: 914221
ggagacaacucugaagaua

SEQ ID NO: 987411 - RNA, 19 nt, Artificial Sequence
  Description of Artificial Sequence: Synthetic oligonucleotide
  Antisense strand to SEQ ID NO: 987410
uaucuucagaguugucucc

SEQ ID NO: 987412 - RNA, 19 nt, Artificial Sequence
  Description of Artificial Sequence: Synthetic oligonucleotide
  Sense strand starting at position 527 of SEQ ID NO: 914221
aaaugcuccgucugggaga

SEQ ID NO: 987413 - RNA, 19 nt, Artificial Sequence
  Description of Artificial Sequence: Synthetic oligonucleotide
  Antisense strand to SEQ ID NO: 987412
ucucccagacggagcauuu

SEQ ID NO: 987414 - RNA, 19 nt, Artificial Sequence
  Description of Artificial Sequence: Synthetic oligonucleotide
  Sense strand starting at position 3193 of SEQ ID NO: 914221
acaauuagcugggcaugua

SEQ ID NO: 987415 - RNA, 19 nt, Artificial Sequence
  Description of Artificial Sequence: Synthetic oligonucleotide
  Antisense strand to SEQ ID NO: 987414
uacaugcccagcuaauugu

SEQ ID NO: 987416 - RNA, 19 nt, Artificial Sequence
  Description of Artificial Sequence: Synthetic oligonucleotide
  Sense strand starting at position 2834 of SEQ ID NO: 914221
gcaccugcuccauggaaau

SEQ ID NO: 987417 - RNA, 19 nt, Artificial Sequence
  Description of Artificial Sequence: Synthetic oligonucleotide
  Antisense strand to SEQ ID NO: 987416
auuuccauggagcaggugc

SEQ ID NO: 987418 - RNA, 19 nt, Artificial Sequence
  Description of Artificial Sequence: Synthetic oligonucleotide
  Sense strand starting at position 665 of SEQ ID NO: 914221
auauuugcuuccuaaggau

SEQ ID NO: 987419 - RNA, 19 nt, Artificial Sequence
  Description of Artificial Sequence: Synthetic oligonucleotide
  Antisense strand to SEQ ID NO: 987418
auccuuaggaagcaaauau

SEQ ID NO: 987420 - RNA, 19 nt, Artificial Sequence
  Description of Artificial Sequence: Synthetic oligonucleotide
  Sense strand starting at position 3277 of SEQ ID NO: 914221
gcaguaagccaucauggca

SEQ ID NO: 987421 - RNA, 19 nt, Artificial Sequence
  Description of Artificial Sequence: Synthetic oligonucleotide
  Antisense strand to SEQ ID NO: 987420
ugccaugauggcuuacugc

SEQ ID NO: 987422 - RNA, 19 nt, Artificial Sequence
  Description of Artificial Sequence: Synthetic oligonucleotide
  Sense strand starting at position 2123 of SEQ ID NO: 914221
cuaccuuucccgugaggac

SEQ ID NO: 987423 - RNA, 19 nt, Artificial Sequence
  Description of Artificial Sequence: Synthetic oligonucleotide
  Antisense strand to SEQ ID NO: 987422
guccucacgggaaagguag

SEQ ID NO: 987424 - RNA, 19 nt, Artificial Sequence
  Description of Artificial Sequence: Synthetic oligonucleotide
  Sense strand starting at position 1945 of SEQ ID NO: 914221
gguugcauucgccauaaga

SEQ ID NO: 987425 - RNA, 19 nt, Artificial Sequence
  Description of Artificial Sequence: Synthetic oligonucleotide
  Antisense strand to SEQ ID NO: 987424
ucuuauggcgaaugcaacc

SEQ ID NO: 987426 - RNA, 19 nt, Artificial Sequence
  Description of Artificial Sequence: Synthetic oligonucleotide
  Sense strand starting at position 2675 of SEQ ID NO: 914221
uaguguauuguguacuuua

SEQ ID NO: 987427 - RNA, 19 nt, Artificial Sequence
  Description of Artificial Sequence: Synthetic oligonucleotide
  Antisense strand to SEQ ID NO: 987426
uaaaguacacaauacacua

SEQ ID NO: 987428 - RNA, 19 nt, Artificial Sequence
  Description of Artificial Sequence: Synthetic oligonucleotide
  Sense strand starting at position 529 of SEQ ID NO: 914221
augcuccgucugggagaau

SEQ ID NO: 987429 - RNA, 19 nt, Artificial Sequence
  Description of Artificial Sequence: Synthetic oligonucleotide
  Antisense strand to SEQ ID NO: 987428
auucucccagacggagcau

SEQ ID NO: 987430 - RNA, 19 nt, Artificial Sequence
  Description of Artificial Sequence: Synthetic oligonucleotide
  Sense strand starting at position 2665 of SEQ ID NO: 914221
cuuugaucuuuaguguauu

SEQ ID NO: 987431 - RNA, 19 nt, Artificial Sequence
  Description of Artificial Sequence: Synthetic oligonucleotide
  Antisense strand to SEQ ID NO: 987430
aauacacuaaagaucaaag

SEQ ID NO: 987432 - RNA, 19 nt, Artificial Sequence
  Description of Artificial Sequence: Synthetic oligonucleotide
  Sense strand starting at position 862 of SEQ ID NO: 914221
gcgucagugcuucaaagaa

SEQ ID NO: 987433 - RNA, 19 nt, Artificial Sequence
  Description of Artificial Sequence: Synthetic oligonucleotide
  Antisense strand to SEQ ID NO: 987432
uucuuugaagcacugacgc

SEQ ID NO: 987434 - RNA, 19 nt, Artificial Sequence
  Description of Artificial Sequence: Synthetic oligonucleotide
  Sense strand starting at position 2921 of SEQ ID NO: 914221
aauggaguauuccaaagag

SEQ ID NO: 987435 - RNA, 19 nt, Artificial Sequence
  Description of Artificial Sequence: Synthetic oligonucleotide
  Antisense strand to SEQ ID NO: 987434
cucuuuggaauacuccauu

SEQ ID NO: 987436 - RNA, 19 nt, Artificial Sequence
  Description of Artificial Sequence: Synthetic oligonucleotide
  Sense strand starting at position 3347 of SEQ ID NO: 914222
aagauacacucauuggagu

SEQ ID NO: 987437 - RNA, 19 nt, Artificial Sequence
  Description of Artificial Sequence: Synthetic oligonucleotide
  Antisense strand to SEQ ID NO: 987436
acuccaaugaguguaucuu

SEQ ID NO: 987438 - RNA, 19 nt, Artificial Sequence
  Description of Artificial Sequence: Synthetic oligonucleotide
  Sense strand starting at position 2037 of SEQ ID NO: 914222
ucaggauuacacugacauc

SEQ ID NO: 987439 - RNA, 19 nt, Artificial Sequence
  Description of Artificial Sequence: Synthetic oligonucleotide
  Antisense strand to SEQ ID NO: 987438
gaugucaguguaauccuga

SEQ ID NO: 987440 - RNA, 19 nt, Artificial Sequence
  Description of Artificial Sequence: Synthetic oligonucleotide
  Sense strand starting at position 486 of SEQ ID NO: 914222
gcgugaacacaagaacaua

SEQ ID NO: 987441 - RNA, 19 nt, Artificial Sequence
  Description of Artificial Sequence: Synthetic oligonucleotide
  Antisense strand to SEQ ID NO: 987440
uauguucuuguguucacgc

SEQ ID NO: 987442 - RNA, 19 nt, Artificial Sequence
  Description of Artificial Sequence: Synthetic oligonucleotide
  Sense strand starting at position 1004 of SEQ ID NO: 914222
cuauuccuccaugaaaggu

SEQ ID NO: 987443 - RNA, 19 nt, Artificial Sequence
  Description of Artificial Sequence: Synthetic oligonucleotide
  Antisense strand to SEQ ID NO: 987442
accuuucauggaggaauag

SEQ ID NO: 987444 - RNA, 19 nt, Artificial Sequence
  Description of Artificial Sequence: Synthetic oligonucleotide
  Sense strand starting at position 364 of SEQ ID NO: 914222
ccauuaauccaaggucaga

SEQ ID NO: 987445 - RNA, 19 nt, Artificial Sequence
  Description of Artificial Sequence: Synthetic oligonucleotide
  Antisense strand to SEQ ID NO: 987444
ucugaccuuggauuaaugg

SEQ ID NO: 987446 - RNA, 19 nt, Artificial Sequence
  Description of Artificial Sequence: Synthetic oligonucleotide
  Sense strand starting at position 1003 of SEQ ID NO: 914222
ucuauuccuccaugaaagg

SEQ ID NO: 987447 - RNA, 19 nt, Artificial Sequence
  Description of Artificial Sequence: Synthetic oligonucleotide
  Antisense strand to SEQ ID NO: 987446
ccuuucauggaggaauaga

SEQ ID NO: 987448 - RNA, 19 nt, Artificial Sequence
  Description of Artificial Sequence: Synthetic oligonucleotide
  Sense strand starting at position 2611 of SEQ ID NO: 914222
acuguaacuccugaaaugu

SEQ ID NO: 987449 - RNA, 19 nt, Artificial Sequence
  Description of Artificial Sequence: Synthetic oligonucleotide
  Antisense strand to SEQ ID NO: 987448
acauuucaggaguuacagu

SEQ ID NO: 987450 - RNA, 19 nt, Artificial Sequence
  Description of Artificial Sequence: Synthetic oligonucleotide
  Sense strand starting at position 664 of SEQ ID NO: 914222
uauugcugugaugacauaa

SEQ ID NO: 987451 - RNA, 19 nt, Artificial Sequence
  Description of Artificial Sequence: Synthetic oligonucleotide
  Antisense strand to SEQ ID NO: 987450
uuaugucaucacagcaaua

SEQ ID NO: 987452 - RNA, 19 nt, Artificial Sequence
  Description of Artificial Sequence: Synthetic oligonucleotide
  Sense strand starting at position 171 of SEQ ID NO: 914222
ccguaucaauuucuguauu

SEQ ID NO: 987453 - RNA, 19 nt, Artificial Sequence
  Description of Artificial Sequence: Synthetic oligonucleotide
  Antisense strand to SEQ ID NO: 987452
aauacagaaauugauacgg

SEQ ID NO: 987454 - RNA, 19 nt, Artificial Sequence
  Description of Artificial Sequence: Synthetic oligonucleotide
  Sense strand starting at position 799 of SEQ ID NO: 914222
auaauagaguguucuggac

SEQ ID NO: 987455 - RNA, 19 nt, Artificial Sequence
  Description of Artificial Sequence: Synthetic oligonucleotide
  Antisense strand to SEQ ID NO: 987454
guccagaacacucuauuau

SEQ ID NO: 987456 - RNA, 19 nt, Artificial Sequence
  Description of Artificial Sequence: Synthetic oligonucleotide
  Sense strand starting at position 931 of SEQ ID NO: 914222
guaggaaugcauuaucuuc

SEQ ID NO: 987457 - RNA, 19 nt, Artificial Sequence
  Description of Artificial Sequence: Synthetic oligonucleotide
  Antisense strand to SEQ ID NO: 987456
gaagauaaugcauuccuac

SEQ ID NO: 987458 - RNA, 19 nt, Artificial Sequence
  Description of Artificial Sequence: Synthetic oligonucleotide
  Sense strand starting at position 803 of SEQ ID NO: 914222
uagaguguucuggacggau

SEQ ID NO: 987459 - RNA, 19 nt, Artificial Sequence
  Description of Artificial Sequence: Synthetic oligonucleotide
  Antisense strand to SEQ ID NO: 987458
auccguccagaacacucua

SEQ ID NO: 987460 - RNA, 19 nt, Artificial Sequence
  Description of Artificial Sequence: Synthetic oligonucleotide
  Sense strand starting at position 2374 of SEQ ID NO: 914222
aguaaagugcagggauuaa

SEQ ID NO: 987461 - RNA, 19 nt, Artificial Sequence
  Description of Artificial Sequence: Synthetic oligonucleotide
  Antisense strand to SEQ ID NO: 987460
uuaaucccugcacuuuacu

SEQ ID NO: 987462 - RNA, 19 nt, Artificial Sequence
  Description of Artificial Sequence: Synthetic oligonucleotide
  Sense strand starting at position 2797 of SEQ ID NO: 914222
acaguuaucuuaguugaaa

SEQ ID NO: 987463 - RNA, 19 nt, Artificial Sequence
  Description of Artificial Sequence: Synthetic oligonucleotide
  Antisense strand to SEQ ID NO: 987462
uuucaacuaagauaacugu

SEQ ID NO: 987464 - RNA, 19 nt, Artificial Sequence
  Description of Artificial Sequence: Synthetic oligonucleotide
  Sense strand starting at position 3939 of SEQ ID NO: 914222
cugaguauugugggaaauu

SEQ ID NO: 987465 - RNA, 19 nt, Artificial Sequence
  Description of Artificial Sequence: Synthetic oligonucleotide
  Antisense strand to SEQ ID NO: 987464
aauuucccacaauacucag

SEQ ID NO: 987466 - RNA, 19 nt, Artificial Sequence
  Description of Artificial Sequence: Synthetic oligonucleotide
  Sense strand starting at position 3042 of SEQ ID NO: 914222
ugcuaugaugauggaggua

SEQ ID NO: 987467 - RNA, 19 nt, Artificial Sequence
  Description of Artificial Sequence: Synthetic oligonucleotide
  Antisense strand to SEQ ID NO: 987466
uaccuccaucaucauagca

SEQ ID NO: 987468 - RNA, 19 nt, Artificial Sequence
  Description of Artificial Sequence: Synthetic oligonucleotide
  Sense strand starting at position 3202 of SEQ ID NO: 914222
acuaacuucuacguaaaug

SEQ ID NO: 987469 - RNA, 19 nt, Artificial Sequence
  Description of Artificial Sequence: Synthetic oligonucleotide
  Antisense strand to SEQ ID NO: 987468
cauuuacguagaaguuagu

SEQ ID NO: 987470 - RNA, 19 nt, Artificial Sequence
  Description of Artificial Sequence: Synthetic oligonucleotide
  Sense strand starting at position 873 of SEQ ID NO: 914222
gugugaaccagguagguau

SEQ ID NO: 987471 - RNA, 19 nt, Artificial Sequence
  Description of Artificial Sequence: Synthetic oligonucleotide
  Antisense strand to SEQ ID NO: 987470
auaccuaccugguucacac

SEQ ID NO: 987472 - RNA, 19 nt, Artificial Sequence
  Description of Artificial Sequence: Synthetic oligonucleotide
  Sense strand starting at position 2048 of SEQ ID NO: 914222
cugacaucacugcgagaga

SEQ ID NO: 987473 - RNA, 19 nt, Artificial Sequence
  Description of Artificial Sequence: Synthetic oligonucleotide
  Antisense strand to SEQ ID NO: 987472
ucucucgcagugaugucag

SEQ ID NO: 987474 - RNA, 19 nt, Artificial Sequence
  Description of Artificial Sequence: Synthetic oligonucleotide
  Sense strand starting at position 209 of SEQ ID NO: 914222
ggcaguggugaguaacuga

SEQ ID NO: 987475 - RNA, 19 nt, Artificial Sequence
  Description of Artificial Sequence: Synthetic oligonucleotide
  Antisense strand to SEQ ID NO: 987474
ucaguuacucaccacugcc

SEQ ID NO: 987476 - RNA, 19 nt, Artificial Sequence
  Description of Artificial Sequence: Synthetic oligonucleotide
  Sense strand starting at position 2783 of SEQ ID NO: 914222
cgguaaagagcucaacagu

SEQ ID NO: 987477 - RNA, 19 nt, Artificial Sequence
  Description of Artificial Sequence: Synthetic oligonucleotide
  Antisense strand to SEQ ID NO: 987476
acuguugagcucuuuaccg

SEQ ID NO: 987478 - RNA, 19 nt, Artificial Sequence
  Description of Artificial Sequence: Synthetic oligonucleotide
  Sense strand starting at position 2511 of SEQ ID NO: 914222
ggcaaaucauuccuucuga

SEQ ID NO: 987479 - RNA, 19 nt, Artificial Sequence
  Description of Artificial Sequence: Synthetic oligonucleotide
  Antisense strand to SEQ ID NO: 987478
ucagaaggaaugauuugcc

SEQ ID NO: 987480 - RNA, 19 nt, Artificial Sequence
  Description of Artificial Sequence: Synthetic oligonucleotide
  Sense strand starting at position 2373 of SEQ ID NO: 914222
uaguaaagugcagggauua

SEQ ID NO: 987481 - RNA, 19 nt, Artificial Sequence
  Description of Artificial Sequence: Synthetic oligonucleotide
  Antisense strand to SEQ ID NO: 987480
uaaucccugcacuuuacua

SEQ ID NO: 987482 - RNA, 19 nt, Artificial Sequence
  Description of Artificial Sequence: Synthetic oligonucleotide
  Sense strand starting at position 3929 of SEQ ID NO: 914222
gggccuaaagcugaguauu

SEQ ID NO: 987483 - RNA, 19 nt, Artificial Sequence
  Description of Artificial Sequence: Synthetic oligonucleotide
  Antisense strand to SEQ ID NO: 987482
aauacucagcuuuaggccc

SEQ ID NO: 987484 - RNA, 19 nt, Artificial Sequence
  Description of Artificial Sequence: Synthetic oligonucleotide
  Sense strand starting at position 3288 of SEQ ID NO: 914222
acucgcucucaagacuauu

SEQ ID NO: 987485 - RNA, 19 nt, Artificial Sequence
  Description of Artificial Sequence: Synthetic oligonucleotide
  Antisense strand to SEQ ID NO: 987484
aauagucuugagagcgagu

SEQ ID NO: 987486 - RNA, 19 nt, Artificial Sequence
  Description of Artificial Sequence: Synthetic oligonucleotide
  Sense strand starting at position 2204 of SEQ ID NO: 914222
cugggcaucuucuuugaaa

SEQ ID NO: 987487 - RNA, 19 nt, Artificial Sequence
  Description of Artificial Sequence: Synthetic oligonucleotide
  Antisense strand to SEQ ID NO: 987486
uuucaaagaagaugcccag

SEQ ID NO: 987488 - RNA, 19 nt, Artificial Sequence
  Description of Artificial Sequence: Synthetic oligonucleotide
  Sense strand starting at position 3981 of SEQ ID NO: 914222
gaccuuaagugguucucaa

SEQ ID NO: 987489 - RNA, 19 nt, Artificial Sequence
  Description of Artificial Sequence: Synthetic oligonucleotide
  Antisense strand to SEQ ID NO: 987488
uugagaaccacuuaagguc

SEQ ID NO: 987490 - RNA, 19 nt, Artificial Sequence
  Description of Artificial Sequence: Synthetic oligonucleotide
  Sense strand starting at position 3530 of SEQ ID NO: 914222
ggcuguaguggcgcgauau

SEQ ID NO: 987491 - RNA, 19 nt, Artificial Sequence
  Description of Artificial Sequence: Synthetic oligonucleotide
  Antisense strand to SEQ ID NO: 987490
auaucgcgccacuacagcc

SEQ ID NO: 987492 - RNA, 19 nt, Artificial Sequence
  Description of Artificial Sequence: Synthetic oligonucleotide
  Sense strand starting at position 2046 of SEQ ID NO: 914222
cacugacaucacugcgaga

SEQ ID NO: 987493 - RNA, 19 nt, Artificial Sequence
  Description of Artificial Sequence: Synthetic oligonucleotide
  Antisense strand to SEQ ID NO: 987492
ucucgcagugaugucagug

SEQ ID NO: 987494 - RNA, 19 nt, Artificial Sequence
  Description of Artificial Sequence: Synthetic oligonucleotide
  Sense strand starting at position 3099 of SEQ ID NO: 914222
gcuguuaucguuguugcua

SEQ ID NO: 987495 - RNA, 19 nt, Artificial Sequence
  Description of Artificial Sequence: Synthetic oligonucleotide
  Antisense strand to SEQ ID NO: 987494
uagcaacaacgauaacagc

SEQ ID NO: 987496 - RNA, 19 nt, Artificial Sequence
  Description of Artificial Sequence: Synthetic oligonucleotide
  Sense strand starting at position 471 of SEQ ID NO: 914222
gauacaauccgagaugcgu

SEQ ID NO: 987497 - RNA, 19 nt, Artificial Sequence
  Description of Artificial Sequence: Synthetic oligonucleotide
  Antisense strand to SEQ ID NO: 987496
acgcaucucggauuguauc

SEQ ID NO: 987498 - RNA, 19 nt, Artificial Sequence
  Description of Artificial Sequence: Synthetic oligonucleotide
  Sense strand starting at position 1203 of SEQ ID NO: 914222
gguacaccgggauguuuaa

SEQ ID NO: 987499 - RNA, 19 nt, Artificial Sequence
  Description of Artificial Sequence: Synthetic oligonucleotide
  Antisense strand to SEQ ID NO: 987498
uuaaacaucccgguguacc

SEQ ID NO: 987500 - RNA, 19 nt, Artificial Sequence
  Description of Artificial Sequence: Synthetic oligonucleotide
  Sense strand starting at position 38 of SEQ ID NO: 914222
gcugcucaucuccaugaca

SEQ ID NO: 987501 - RNA, 19 nt, Artificial Sequence
  Description of Artificial Sequence: Synthetic oligonucleotide
  Antisense strand to SEQ ID NO: 987500
ugucauggagaugagcagc

SEQ ID NO: 987502 - RNA, 19 nt, Artificial Sequence
  Description of Artificial Sequence: Synthetic oligonucleotide
  Sense strand starting at position 600 of SEQ ID NO: 914222
gcauuaagccugcaaucag

SEQ ID NO: 987503 - RNA, 19 nt, Artificial Sequence
  Description of Artificial Sequence: Synthetic oligonucleotide
  Antisense strand to SEQ ID NO: 987502
cugauugcaggcuuaaugc

SEQ ID NO: 987504 - RNA, 19 nt, Artificial Sequence
  Description of Artificial Sequence: Synthetic oligonucleotide
  Sense strand starting at position 2059 of SEQ ID NO: 914222
gcgagagaugcugggauca

SEQ ID NO: 987505 - RNA, 19 nt, Artificial Sequence
  Description of Artificial Sequence: Synthetic oligonucleotide
  Antisense strand to SEQ ID NO: 987504
ugaucccagcaucucucgc

SEQ ID NO: 987506 - RNA, 19 nt, Artificial Sequence
  Description of Artificial Sequence: Synthetic oligonucleotide
  Sense strand starting at position 2793 of SEQ ID NO: 914222
cucaacaguuaucuuaguu

SEQ ID NO: 987507 - RNA, 19 nt, Artificial Sequence
  Description of Artificial Sequence: Synthetic oligonucleotide
  Antisense strand to SEQ ID NO: 987506
aacuaagauaacuguugag

SEQ ID NO: 987508 - RNA, 19 nt, Artificial Sequence
  Description of Artificial Sequence: Synthetic oligonucleotide
  Sense strand starting at position 860 of SEQ ID NO: 914222
agggauggucaguguguga

SEQ ID NO: 987509 - RNA, 19 nt, Artificial Sequence
  Description of Artificial Sequence: Synthetic oligonucleotide
  Antisense strand to SEQ ID NO: 987508
ucacacacugaccaucccu

SEQ ID NO: 987510 - RNA, 19 nt, Artificial Sequence
  Description of Artificial Sequence: Synthetic oligonucleotide
  Sense strand starting at position 3087 of SEQ ID NO: 914222
cugauaaagucagcuguua

SEQ ID NO: 987511 - RNA, 19 nt, Artificial Sequence
  Description of Artificial Sequence: Synthetic oligonucleotide
  Antisense strand to SEQ ID NO: 987510
uaacagcugacuuuaucag

SEQ ID NO: 987512 - RNA, 19 nt, Artificial Sequence
  Description of Artificial Sequence: Synthetic oligonucleotide
  Sense strand starting at position 1537 of SEQ ID NO: 914222
uggauucgugugcacauga

SEQ ID NO: 987513 - RNA, 19 nt, Artificial Sequence
  Description of Artificial Sequence: Synthetic oligonucleotide
  Antisense strand to SEQ ID NO: 987512
ucaugugcacacgaaucca

SEQ ID NO: 987514 - RNA, 19 nt, Artificial Sequence
  Description of Artificial Sequence: Synthetic oligonucleotide
  Sense strand starting at position 426 of SEQ ID NO: 914222
uccugaauuuggcacacua

SEQ ID NO: 987515 - RNA, 19 nt, Artificial Sequence
  Description of Artificial Sequence: Synthetic oligonucleotide
  Antisense strand to SEQ ID NO: 987514
uagugugccaaauucagga

SEQ ID NO: 987516 - RNA, 19 nt, Artificial Sequence
  Description of Artificial Sequence: Synthetic oligonucleotide
  Sense strand starting at position 2228 of SEQ ID NO: 914223
cacuuauaggcaggagaua

SEQ ID NO: 987517 - RNA, 19 nt, Artificial Sequence
  Description of Artificial Sequence: Synthetic oligonucleotide
  Antisense strand to SEQ ID NO: 987516
uaucuccugccuauaagug

SEQ ID NO: 987518 - RNA, 19 nt, Artificial Sequence
  Description of Artificial Sequence: Synthetic oligonucleotide
  Sense strand starting at position 3776 of SEQ ID NO: 914223
gacuaaggagcuugaauca

SEQ ID NO: 987519 - RNA, 19 nt, Artificial Sequence
  Description of Artificial Sequence: Synthetic oligonucleotide
  Antisense strand to SEQ ID NO: 987518
ugauucaagcuccuuaguc

SEQ ID NO: 987520 - RNA, 19 nt, Artificial Sequence
  Description of Artificial Sequence: Synthetic oligonucleotide
  Sense strand starting at position 3668 of SEQ ID NO: 914223
ucacuugacaacgaugagu

SEQ ID NO: 987521 - RNA, 19 nt, Artificial Sequence
  Description of Artificial Sequence: Synthetic oligonucleotide
  Antisense strand to SEQ ID NO: 987520
acucaucguugucaaguga

SEQ ID NO: 987522 - RNA, 19 nt, Artificial Sequence
  Description of Artificial Sequence: Synthetic oligonucleotide
  Sense strand starting at position 2796 of SEQ ID NO: 914223
aguuaaagauuugagauga

SEQ ID NO: 987523 - RNA, 19 nt, Artificial Sequence
  Description of Artificial Sequence: Synthetic oligonucleotide
  Antisense strand to SEQ ID NO: 987522
ucaucucaaaucuuuaacu

SEQ ID NO: 987524 - RNA, 19 nt, Artificial Sequence
  Description of Artificial Sequence: Synthetic oligonucleotide
  Sense strand starting at position 2892 of SEQ ID NO: 914223
cugagaaggaaguguaacu

SEQ ID NO: 987525 - RNA, 19 nt, Artificial Sequence
  Description of Artificial Sequence: Synthetic oligonucleotide
  Antisense strand to SEQ ID NO: 987524
aguuacacuuccuucucag

SEQ ID NO: 987526 - RNA, 19 nt, Artificial Sequence
  Description of Artificial Sequence: Synthetic oligonucleotide
  Sense strand starting at position 3679 of SEQ ID NO: 914223
cgaugagugaggcaaauca

SEQ ID NO: 987527 - RNA, 19 nt, Artificial Sequence
  Description of Artificial Sequence: Synthetic oligonucleotide
  Antisense strand to SEQ ID NO: 987526
ugauuugccucacucaucg

SEQ ID NO: 987528 - RNA, 19 nt, Artificial Sequence
  Description of Artificial Sequence: Synthetic oligonucleotide
  Sense strand starting at position 2897 of SEQ ID NO: 914223
aaggaaguguaacuacuua

SEQ ID NO: 987529 - RNA, 19 nt, Artificial Sequence
  Description of Artificial Sequence: Synthetic oligonucleotide
  Antisense strand to SEQ ID NO: 987528
uaaguaguuacacuuccuu

SEQ ID NO: 987530 - RNA, 19 nt, Artificial Sequence
  Description of Artificial Sequence: Synthetic oligonucleotide
  Sense strand starting at position 3592 of SEQ ID NO: 914223
ucaaauaugcuuuagugaa

SEQ ID NO: 987531 - RNA, 19 nt, Artificial Sequence
  Description of Artificial Sequence: Synthetic oligonucleotide
  Antisense strand to SEQ ID NO: 987530
uucacuaaagcauauuuga

SEQ ID NO: 987532 - RNA, 19 nt, Artificial Sequence
  Description of Artificial Sequence: Synthetic oligonucleotide
  Sense strand starting at position 3456 of SEQ ID NO: 914223
uugaaccacguguaauaaa

SEQ ID NO: 987533 - RNA, 19 nt, Artificial Sequence
  Description of Artificial Sequence: Synthetic oligonucleotide
  Antisense strand to SEQ ID NO: 987532
uuuauuacacgugguucaa

SEQ ID NO: 987534 - RNA, 19 nt, Artificial Sequence
  Description of Artificial Sequence: Synthetic oligonucleotide
  Sense strand starting at position 2939 of SEQ ID NO: 914223
augcuacugguuuaaagau

SEQ ID NO: 987535 - RNA, 19 nt, Artificial Sequence
  Description of Artificial Sequence: Synthetic oligonucleotide
  Antisense strand to SEQ ID NO: 987534
aucuuuaaaccaguagcau

SEQ ID NO: 987536 - RNA, 19 nt, Artificial Sequence
  Description of Artificial Sequence: Synthetic oligonucleotide
  Sense strand starting at position 3159 of SEQ ID NO: 914223
gaaggagauugugauuuag

SEQ ID NO: 987537 - RNA, 19 nt, Artificial Sequence
  Description of Artificial Sequence: Synthetic oligonucleotide
  Antisense strand to SEQ ID NO: 987536
cuaaaucacaaucuccuuc

SEQ ID NO: 987538 - RNA, 19 nt, Artificial Sequence
  Description of Artificial Sequence: Synthetic oligonucleotide
  Sense strand starting at position 3621 of SEQ ID NO: 914223
aggcauucuuaaucaugaa

SEQ ID NO: 987539 - RNA, 19 nt, Artificial Sequence
  Description of Artificial Sequence: Synthetic oligonucleotide
  Antisense strand to SEQ ID NO: 987538
uucaugauuaagaaugccu

SEQ ID NO: 987540 - RNA, 19 nt, Artificial Sequence
  Description of Artificial Sequence: Synthetic oligonucleotide
  Sense strand starting at position 3670 of SEQ ID NO: 914223
acuugacaacgaugaguga

SEQ ID NO: 987541 - RNA, 19 nt, Artificial Sequence
  Description of Artificial Sequence: Synthetic oligonucleotide
  Antisense strand to SEQ ID NO: 987540
ucacucaucguugucaagu

SEQ ID NO: 987542 - RNA, 19 nt, Artificial Sequence
  Description of Artificial Sequence: Synthetic oligonucleotide
  Sense strand starting at position 1490 of SEQ ID NO: 914223
ggaauuguaggccacuauu

SEQ ID NO: 987543 - RNA, 19 nt, Artificial Sequence
  Description of Artificial Sequence: Synthetic oligonucleotide
  Antisense strand to SEQ ID NO: 987542
aauaguggccuacaauucc

SEQ ID NO: 987544 - RNA, 19 nt, Artificial Sequence
  Description of Artificial Sequence: Synthetic oligonucleotide
  Sense strand starting at position 509 of SEQ ID NO: 914223
caaagagugcugggauaau

SEQ ID NO: 987545 - RNA, 19 nt, Artificial Sequence
  Description of Artificial Sequence: Synthetic oligonucleotide
  Antisense strand to SEQ ID NO: 987544
auuaucccagcacucuuug

SEQ ID NO: 987546 - RNA, 19 nt, Artificial Sequence
  Description of Artificial Sequence: Synthetic oligonucleotide
  Sense strand starting at position 3218 of SEQ ID NO: 914223
aaugguauagggugaguaa

SEQ ID NO: 987547 - RNA, 19 nt, Artificial Sequence
  Description of Artificial Sequence: Synthetic oligonucleotide
  Antisense strand to SEQ ID NO: 987546
uuacucacccuauaccauu

SEQ ID NO: 987548 - RNA, 19 nt, Artificial Sequence
  Description of Artificial Sequence: Synthetic oligonucleotide
  Sense strand starting at position 2774 of SEQ ID NO: 914223
guuaccuuugcagauauga

SEQ ID NO: 987549 - RNA, 19 nt, Artificial Sequence
  Description of Artificial Sequence: Synthetic oligonucleotide
  Antisense strand to SEQ ID NO: 987548
ucauaucugcaaagguaac

SEQ ID NO: 987550 - RNA, 19 nt, Artificial Sequence
  Description of Artificial Sequence: Synthetic oligonucleotide
  Sense strand starting at position 2828 of SEQ ID NO: 914223
gauuaucugugagucaaau

SEQ ID NO: 987551 - RNA, 19 nt, Artificial Sequence
  Description of Artificial Sequence: Synthetic oligonucleotide
  Antisense strand to SEQ ID NO: 987550
auuugacucacagauaauc

SEQ ID NO: 987552 - RNA, 19 nt, Artificial Sequence
  Description of Artificial Sequence: Synthetic oligonucleotide
  Sense strand starting at position 2327 of SEQ ID NO: 914223
ggguacuuauaaucaaguu

SEQ ID NO: 987553 - RNA, 19 nt, Artificial Sequence
  Description of Artificial Sequence: Synthetic oligonucleotide
  Antisense strand to SEQ ID NO: 987552
aacuugauuauaaguaccc

SEQ ID NO: 987554 - RNA, 19 nt, Artificial Sequence
  Description of Artificial Sequence: Synthetic oligonucleotide
  Sense strand starting at position 3743 of SEQ ID NO: 914223
acaaucauguuuguuggaa

SEQ ID NO: 987555 - RNA, 19 nt, Artificial Sequence
  Description of Artificial Sequence: Synthetic oligonucleotide
  Antisense strand to SEQ ID NO: 987554
uuccaacaaacaugauugu

SEQ ID NO: 987556 - RNA, 19 nt, Artificial Sequence
  Description of Artificial Sequence: Synthetic oligonucleotide
  Sense strand starting at position 2937 of SEQ ID NO: 914223
agaugcuacugguuuaaag

SEQ ID NO: 987557 - RNA, 19 nt, Artificial Sequence
  Description of Artificial Sequence: Synthetic oligonucleotide
  Antisense strand to SEQ ID NO: 987556
cuuuaaaccaguagcaucu

SEQ ID NO: 987558 - RNA, 19 nt, Artificial Sequence
  Description of Artificial Sequence: Synthetic oligonucleotide
  Sense strand starting at position 3744 of SEQ ID NO: 914223
caaucauguuuguuggaag

SEQ ID NO: 987559 - RNA, 19 nt, Artificial Sequence
  Description of Artificial Sequence: Synthetic oligonucleotide
  Antisense strand to SEQ ID NO: 987558
cuuccaacaaacaugauug

SEQ ID NO: 987560 - RNA, 19 nt, Artificial Sequence
  Description of Artificial Sequence: Synthetic oligonucleotide
  Sense strand starting at position 3659 of SEQ ID NO: 914223
uugcuaugaucacuugaca

SEQ ID NO: 987561 - RNA, 19 nt, Artificial Sequence
  Description of Artificial Sequence: Synthetic oligonucleotide
  Antisense strand to SEQ ID NO: 987560
ugucaagugaucauagcaa

SEQ ID NO: 987562 - RNA, 19 nt, Artificial Sequence
  Description of Artificial Sequence: Synthetic oligonucleotide
  Sense strand starting at position 3132 of SEQ ID NO: 914223
uagacuuaggguugucuaa

SEQ ID NO: 987563 - RNA, 19 nt, Artificial Sequence
  Description of Artificial Sequence: Synthetic oligonucleotide
  Antisense strand to SEQ ID NO: 987562
uuagacaacccuaagucua

SEQ ID NO: 987564 - RNA, 19 nt, Artificial Sequence
  Description of Artificial Sequence: Synthetic oligonucleotide
  Sense strand starting at position 2384 of SEQ ID NO: 914223
gauacugauguuugugaca

SEQ ID NO: 987565 - RNA, 19 nt, Artificial Sequence
  Description of Artificial Sequence: Synthetic oligonucleotide
  Antisense strand to SEQ ID NO: 987564
ugucacaaacaucaguauc

SEQ ID NO: 987566 - RNA, 19 nt, Artificial Sequence
  Description of Artificial Sequence: Synthetic oligonucleotide
  Sense strand starting at position 2695 of SEQ ID NO: 914223
gagcucacaugacuaguau

SEQ ID NO: 987567 - RNA, 19 nt, Artificial Sequence
  Description of Artificial Sequence: Synthetic oligonucleotide
  Antisense strand to SEQ ID NO: 987566
auacuagucaugugagcuc

SEQ ID NO: 987568 - RNA, 19 nt, Artificial Sequence
  Description of Artificial Sequence: Synthetic oligonucleotide
  Sense strand starting at position 2321 of SEQ ID NO: 914223
uuuaguggguacuuauaau

SEQ ID NO: 987569 - RNA, 19 nt, Artificial Sequence
  Description of Artificial Sequence: Synthetic oligonucleotide
  Antisense strand to SEQ ID NO: 987568
auuauaaguacccacuaaa

SEQ ID NO: 987570 - RNA, 19 nt, Artificial Sequence
  Description of Artificial Sequence: Synthetic oligonucleotide
  Sense strand starting at position 3742 of SEQ ID NO: 914223
cacaaucauguuuguugga

SEQ ID NO: 987571 - RNA, 19 nt, Artificial Sequence
  Description of Artificial Sequence: Synthetic oligonucleotide
  Antisense strand to SEQ ID NO: 987570
uccaacaaacaugauugug

SEQ ID NO: 987572 - RNA, 19 nt, Artificial Sequence
  Description of Artificial Sequence: Synthetic oligonucleotide
  Sense strand starting at position 3573 of SEQ ID NO: 914223
aguaauguuccugacuguc

SEQ ID NO: 987573 - RNA, 19 nt, Artificial Sequence
  Description of Artificial Sequence: Synthetic oligonucleotide
  Antisense strand to SEQ ID NO: 987572
gacagucaggaacauuacu

SEQ ID NO: 987574 - RNA, 19 nt, Artificial Sequence
  Description of Artificial Sequence: Synthetic oligonucleotide
  Sense strand starting at position 2825 of SEQ ID NO: 914223
cuggauuaucugugaguca

SEQ ID NO: 987575 - RNA, 19 nt, Artificial Sequence
  Description of Artificial Sequence: Synthetic oligonucleotide
  Antisense strand to SEQ ID NO: 987574
ugacucacagauaauccag

SEQ ID NO: 987576 - RNA, 19 nt, Artificial Sequence
  Description of Artificial Sequence: Synthetic oligonucleotide
  Sense strand starting at position 2468 of SEQ ID NO: 914223
guggaaguugccuaaguca

SEQ ID NO: 987577 - RNA, 19 nt, Artificial Sequence
  Description of Artificial Sequence: Synthetic oligonucleotide
  Antisense strand to SEQ ID NO: 987576
ugacuuaggcaacuuccac

SEQ ID NO: 987578 - RNA, 19 nt, Artificial Sequence
  Description of Artificial Sequence: Synthetic oligonucleotide
  Sense strand starting at position 3571 of SEQ ID NO: 914223
ucaguaauguuccugacug

SEQ ID NO: 987579 - RNA, 19 nt, Artificial Sequence
  Description of Artificial Sequence: Synthetic oligonucleotide
  Antisense strand to SEQ ID NO: 987578
cagucaggaacauuacuga

SEQ ID NO: 987580 - RNA, 19 nt, Artificial Sequence
  Description of Artificial Sequence: Synthetic oligonucleotide
  Sense strand starting at position 2707 of SEQ ID NO: 914223
cuaguaugguuagcagaau

SEQ ID NO: 987581 - RNA, 19 nt, Artificial Sequence
  Description of Artificial Sequence: Synthetic oligonucleotide
  Antisense strand to SEQ ID NO: 987580
auucugcuaaccauacuag

SEQ ID NO: 987582 - RNA, 19 nt, Artificial Sequence
  Description of Artificial Sequence: Synthetic oligonucleotide
  Sense strand starting at position 3287 of SEQ ID NO: 914223
guauuagacccuuggccaa

SEQ ID NO: 987583 - RNA, 19 nt, Artificial Sequence
  Description of Artificial Sequence: Synthetic oligonucleotide
  Antisense strand to SEQ ID NO: 987582
uuggccaagggucuaauac

SEQ ID NO: 987584 - RNA, 19 nt, Artificial Sequence
  Description of Artificial Sequence: Synthetic oligonucleotide
  Sense strand starting at position 3452 of SEQ ID NO: 914223
ugacuugaaccacguguaa

SEQ ID NO: 987585 - RNA, 19 nt, Artificial Sequence
  Description of Artificial Sequence: Synthetic oligonucleotide
  Antisense strand to SEQ ID NO: 987584
uuacacgugguucaaguca

SEQ ID NO: 987586 - RNA, 19 nt, Artificial Sequence
  Description of Artificial Sequence: Synthetic oligonucleotide
  Sense strand starting at position 2824 of SEQ ID NO: 914223
ucuggauuaucugugaguc

SEQ ID NO: 987587 - RNA, 19 nt, Artificial Sequence
  Description of Artificial Sequence: Synthetic oligonucleotide
  Antisense strand to SEQ ID NO: 987586
gacucacagauaauccaga

SEQ ID NO: 987588 - RNA, 19 nt, Artificial Sequence
  Description of Artificial Sequence: Synthetic oligonucleotide
  Sense strand starting at position 1837 of SEQ ID NO: 914223
gcauuuauuucuuacgguu

SEQ ID NO: 987589 - RNA, 19 nt, Artificial Sequence
  Description of Artificial Sequence: Synthetic oligonucleotide
  Antisense strand to SEQ ID NO: 987588
aaccguaagaaauaaaugc

SEQ ID NO: 987590 - RNA, 19 nt, Artificial Sequence
  Description of Artificial Sequence: Synthetic oligonucleotide
  Sense strand starting at position 3579 of SEQ ID NO: 914223
guuccugacugucucaaau

SEQ ID NO: 987591 - RNA, 19 nt, Artificial Sequence
  Description of Artificial Sequence: Synthetic oligonucleotide
  Antisense strand to SEQ ID NO: 987590
auuugagacagucaggaac

SEQ ID NO: 987592 - RNA, 19 nt, Artificial Sequence
  Description of Artificial Sequence: Synthetic oligonucleotide
  Sense strand starting at position 3120 of SEQ ID NO: 914223
guacuaaauuuguagacuu

SEQ ID NO: 987593 - RNA, 19 nt, Artificial Sequence
  Description of Artificial Sequence: Synthetic oligonucleotide
  Antisense strand to SEQ ID NO: 987592
aagucuacaaauuuaguac

SEQ ID NO: 987594 - RNA, 19 nt, Artificial Sequence
  Description of Artificial Sequence: Synthetic oligonucleotide
  Sense strand starting at position 2597 of SEQ ID NO: 914223
cucuauaugcguuaucuua

SEQ ID NO: 987595 - RNA, 19 nt, Artificial Sequence
  Description of Artificial Sequence: Synthetic oligonucleotide
  Antisense strand to SEQ ID NO: 987594
uaagauaacgcauauagag

SEQ ID NO: 987596 - RNA, 19 nt, Artificial Sequence
  Description of Artificial Sequence: Synthetic oligonucleotide
  Sense strand starting at position 3337 of SEQ ID NO: 914224
uuauucaaggguugagaug

SEQ ID NO: 987597 - RNA, 19 nt, Artificial Sequence
  Description of Artificial Sequence: Synthetic oligonucleotide
  Antisense strand to SEQ ID NO: 987596
caucucaacccuugaauaa

SEQ ID NO: 987598 - RNA, 19 nt, Artificial Sequence
  Description of Artificial Sequence: Synthetic oligonucleotide
  Sense strand starting at position 2572 of SEQ ID NO: 914224
ucucuugaucacgauaacu

SEQ ID NO: 987599 - RNA, 19 nt, Artificial Sequence
  Description of Artificial Sequence: Synthetic oligonucleotide
  Antisense strand to SEQ ID NO: 987598
aguuaucgugaucaagaga

SEQ ID NO: 987600 - RNA, 19 nt, Artificial Sequence
  Description of Artificial Sequence: Synthetic oligonucleotide
  Sense strand starting at position 2574 of SEQ ID NO: 914224
ucuugaucacgauaacuuu

SEQ ID NO: 987601 - RNA, 19 nt, Artificial Sequence
  Description of Artificial Sequence: Synthetic oligonucleotide
  Antisense strand to SEQ ID NO: 987600
aaaguuaucgugaucaaga

SEQ ID NO: 987602 - RNA, 19 nt, Artificial Sequence
  Description of Artificial Sequence: Synthetic oligonucleotide
  Sense strand starting at position 2289 of SEQ ID NO: 914224
ggcagaauucacgagugga

SEQ ID NO: 987603 - RNA, 19 nt, Artificial Sequence
  Description of Artificial Sequence: Synthetic oligonucleotide
  Antisense strand to SEQ ID NO: 987602
uccacucgugaauucugcc

SEQ ID NO: 987604 - RNA, 19 nt, Artificial Sequence
  Description of Artificial Sequence: Synthetic oligonucleotide
  Sense strand starting at position 2455 of SEQ ID NO: 914224
gccuguaagcugucguaaa

SEQ ID NO: 987605 - RNA, 19 nt, Artificial Sequence
  Description of Artificial Sequence: Synthetic oligonucleotide
  Antisense strand to SEQ ID NO: 987604
uuuacgacagcuuacaggc

SEQ ID NO: 987606 - RNA, 19 nt, Artificial Sequence
  Description of Artificial Sequence: Synthetic oligonucleotide
  Sense strand starting at position 3389 of SEQ ID NO: 914224
ugauuaucacuucgagaca

SEQ ID NO: 987607 - RNA, 19 nt, Artificial Sequence
  Description of Artificial Sequence: Synthetic oligonucleotide
  Antisense strand to SEQ ID NO: 987606
ugucucgaagugauaauca

SEQ ID NO: 987608 - RNA, 19 nt, Artificial Sequence
  Description of Artificial Sequence: Synthetic oligonucleotide
  Sense strand starting at position 2568 of SEQ ID NO: 914224
aggaucucuugaucacgau

SEQ ID NO: 987609 - RNA, 19 nt, Artificial Sequence
  Description of Artificial Sequence: Synthetic oligonucleotide
  Antisense strand to SEQ ID NO: 987608
aucgugaucaagagauccu

SEQ ID NO: 987610 - RNA, 19 nt, Artificial Sequence
  Description of Artificial Sequence: Synthetic oligonucleotide
  Sense strand starting at position 1021 of SEQ ID NO: 914224
gcucuagaucucuagugag

SEQ ID NO: 987611 - RNA, 19 nt, Artificial Sequence
  Description of Artificial Sequence: Synthetic oligonucleotide
  Antisense strand to SEQ ID NO: 987610
cucacuagagaucuagagc

SEQ ID NO: 987612 - RNA, 19 nt, Artificial Sequence
  Description of Artificial Sequence: Synthetic oligonucleotide
  Sense strand starting at position 3363 of SEQ ID NO: 914224
gaagacagucaugguaagu

SEQ ID NO: 987613 - RNA, 19 nt, Artificial Sequence
  Description of Artificial Sequence: Synthetic oligonucleotide
  Antisense strand to SEQ ID NO: 987612
acuuaccaugacugucuuc

SEQ ID NO: 987614 - RNA, 19 nt, Artificial Sequence
  Description of Artificial Sequence: Synthetic oligonucleotide
  Sense strand starting at position 610 of SEQ ID NO: 914224
ugucaaugucaucaguaac

SEQ ID NO: 987615 - RNA, 19 nt, Artificial Sequence
  Description of Artificial Sequence: Synthetic oligonucleotide
  Antisense strand to SEQ ID NO: 987614
guuacugaugacauugaca

SEQ ID NO: 987616 - RNA, 19 nt, Artificial Sequence
  Description of Artificial Sequence: Synthetic oligonucleotide
  Sense strand starting at position 3173 of SEQ ID NO: 914224
gcuauugaaguuuaaguua

SEQ ID NO: 987617 - RNA, 19 nt, Artificial Sequence
  Description of Artificial Sequence: Synthetic oligonucleotide
  Antisense strand to SEQ ID NO: 987616
uaacuuaaacuucaauagc

SEQ ID NO: 987618 - RNA, 19 nt, Artificial Sequence
  Description of Artificial Sequence: Synthetic oligonucleotide
  Sense strand starting at position 616 of SEQ ID NO: 914224
ugucaucaguaacuuaaca

SEQ ID NO: 987619 - RNA, 19 nt, Artificial Sequence
  Description of Artificial Sequence: Synthetic oligonucleotide
  Antisense strand to SEQ ID NO: 987618
uguuaaguuacugaugaca

SEQ ID NO: 987620 - RNA, 19 nt, Artificial Sequence
  Description of Artificial Sequence: Synthetic oligonucleotide
  Sense strand starting at position 2462 of SEQ ID NO: 914224
agcugucguaaagauaacu

SEQ ID NO: 987621 - RNA, 19 nt, Artificial Sequence
  Description of Artificial Sequence: Synthetic oligonucleotide
  Antisense strand to SEQ ID NO: 987620
aguuaucuuuacgacagcu

SEQ ID NO: 987622 - RNA, 19 nt, Artificial Sequence
  Description of Artificial Sequence: Synthetic oligonucleotide
  Sense strand starting at position 1557 of SEQ ID NO: 914224
uugugaggacagcgagauu

SEQ ID NO: 987623 - RNA, 19 nt, Artificial Sequence
  Description of Artificial Sequence: Synthetic oligonucleotide
  Antisense strand to SEQ ID NO: 987622
aaucucgcuguccucacaa

SEQ ID NO: 987624 - RNA, 19 nt, Artificial Sequence
  Description of Artificial Sequence: Synthetic oligonucleotide
  Sense strand starting at position 2503 of SEQ ID NO: 914224
uuuguuaaaccacguaaua

SEQ ID NO: 987625 - RNA, 19 nt, Artificial Sequence
  Description of Artificial Sequence: Synthetic oligonucleotide
  Antisense strand to SEQ ID NO: 987624
uauuacgugguuuaacaaa

SEQ ID NO: 987626 - RNA, 19 nt, Artificial Sequence
  Description of Artificial Sequence: Synthetic oligonucleotide
  Sense strand starting at position 2412 of SEQ ID NO: 914224
ggacgcuaaccgugagaaa

SEQ ID NO: 987627 - RNA, 19 nt, Artificial Sequence
  Description of Artificial Sequence: Synthetic oligonucleotide
  Antisense strand to SEQ ID NO: 987626
uuucucacgguuagcgucc

SEQ ID NO: 987628 - RNA, 19 nt, Artificial Sequence
  Description of Artificial Sequence: Synthetic oligonucleotide
  Sense strand starting at position 1020 of SEQ ID NO: 914224
ugcucuagaucucuaguga

SEQ ID NO: 987629 - RNA, 19 nt, Artificial Sequence
  Description of Artificial Sequence: Synthetic oligonucleotide
  Antisense strand to SEQ ID NO: 987628
ucacuagagaucuagagca

SEQ ID NO: 987630 - RNA, 19 nt, Artificial Sequence
  Description of Artificial Sequence: Synthetic oligonucleotide
  Sense strand starting at position 2138 of SEQ ID NO: 914224
gccgcauugggcaguuagu

SEQ ID NO: 987631 - RNA, 19 nt, Artificial Sequence
  Description of Artificial Sequence: Synthetic oligonucleotide
  Antisense strand to SEQ ID NO: 987630
acuaacugcccaaugcggc

SEQ ID NO: 987632 - RNA, 19 nt, Artificial Sequence
  Description of Artificial Sequence: Synthetic oligonucleotide
  Sense strand starting at position 584 of SEQ ID NO: 914224
guucuugacucugccacaa

SEQ ID NO: 987633 - RNA, 19 nt, Artificial Sequence
  Description of Artificial Sequence: Synthetic oligonucleotide
  Antisense strand to SEQ ID NO: 987632
uuguggcagagucaagaac

SEQ ID NO: 987634 - RNA, 19 nt, Artificial Sequence
  Description of Artificial Sequence: Synthetic oligonucleotide
  Sense strand starting at position 2636 of SEQ ID NO: 914224
aaccguagguucucacuua

SEQ ID NO: 987635 - RNA, 19 nt, Artificial Sequence
  Description of Artificial Sequence: Synthetic oligonucleotide
  Antisense strand to SEQ ID NO: 987634
uaagugagaaccuacgguu

SEQ ID NO: 987636 - RNA, 19 nt, Artificial Sequence
  Description of Artificial Sequence: Synthetic oligonucleotide
  Sense strand starting at position 609 of SEQ ID NO: 914224
gugucaaugucaucaguaa

SEQ ID NO: 987637 - RNA, 19 nt, Artificial Sequence
  Description of Artificial Sequence: Synthetic oligonucleotide
  Antisense strand to SEQ ID NO: 987636
uuacugaugacauugacac

SEQ ID NO: 987638 - RNA, 19 nt, Artificial Sequence
  Description of Artificial Sequence: Synthetic oligonucleotide
  Sense strand starting at position 2279 of SEQ ID NO: 914224
uuccucauuuggcagaauu

SEQ ID NO: 987639 - RNA, 19 nt, Artificial Sequence
  Description of Artificial Sequence: Synthetic oligonucleotide
  Antisense strand to SEQ ID NO: 987638
aauucugccaaaugaggaa

SEQ ID NO: 987640 - RNA, 19 nt, Artificial Sequence
  Description of Artificial Sequence: Synthetic oligonucleotide
  Sense strand starting at position 524 of SEQ ID NO: 914224
uuuacuuacucuguuguca

SEQ ID NO: 987641 - RNA, 19 nt, Artificial Sequence
  Description of Artificial Sequence: Synthetic oligonucleotide
  Antisense strand to SEQ ID NO: 987640
ugacaacagaguaaguaaa

SEQ ID NO: 987642 - RNA, 19 nt, Artificial Sequence
  Description of Artificial Sequence: Synthetic oligonucleotide
  Sense strand starting at position 1591 of SEQ ID NO: 914224
gagagaagcgcgcaucuau

SEQ ID NO: 987643 - RNA, 19 nt, Artificial Sequence
  Description of Artificial Sequence: Synthetic oligonucleotide
  Antisense strand to SEQ ID NO: 987642
auagaugcgcgcuucucuc

SEQ ID NO: 987644 - RNA, 19 nt, Artificial Sequence
  Description of Artificial Sequence: Synthetic oligonucleotide
  Sense strand starting at position 2187 of SEQ ID NO: 914224
uuuauucguuagcugaaau

SEQ ID NO: 987645 - RNA, 19 nt, Artificial Sequence
  Description of Artificial Sequence: Synthetic oligonucleotide
  Antisense strand to SEQ ID NO: 987644
auuucagcuaacgaauaaa

SEQ ID NO: 987646 - RNA, 19 nt, Artificial Sequence
  Description of Artificial Sequence: Synthetic oligonucleotide
  Sense strand starting at position 3390 of SEQ ID NO: 914224
gauuaucacuucgagacac

SEQ ID NO: 987647 - RNA, 19 nt, Artificial Sequence
  Description of Artificial Sequence: Synthetic oligonucleotide
  Antisense strand to SEQ ID NO: 987646
gugucucgaagugauaauc

SEQ ID NO: 987648 - RNA, 19 nt, Artificial Sequence
  Description of Artificial Sequence: Synthetic oligonucleotide
  Sense strand starting at position 3362 of SEQ ID NO: 914224
agaagacagucaugguaag

SEQ ID NO: 987649 - RNA, 19 nt, Artificial Sequence
  Description of Artificial Sequence: Synthetic oligonucleotide
  Antisense strand to SEQ ID NO: 987648
cuuaccaugacugucuucu

SEQ ID NO: 987650 - RNA, 19 nt, Artificial Sequence
  Description of Artificial Sequence: Synthetic oligonucleotide
  Sense strand starting at position 3763 of SEQ ID NO: 914224
cuugacacuugugaauauu

SEQ ID NO: 987651 - RNA, 19 nt, Artificial Sequence
  Description of Artificial Sequence: Synthetic oligonucleotide
  Antisense strand to SEQ ID NO: 987650
aauauucacaagugucaag

SEQ ID NO: 987652 - RNA, 19 nt, Artificial Sequence
  Description of Artificial Sequence: Synthetic oligonucleotide
  Sense strand starting at position 3271 of SEQ ID NO: 914224
ugaugauaaucccacuugu

SEQ ID NO: 987653 - RNA, 19 nt, Artificial Sequence
  Description of Artificial Sequence: Synthetic oligonucleotide
  Antisense strand to SEQ ID NO: 987652
acaagugggauuaucauca

SEQ ID NO: 987654 - RNA, 19 nt, Artificial Sequence
  Description of Artificial Sequence: Synthetic oligonucleotide
  Sense strand starting at position 2571 of SEQ ID NO: 914224
aucucuugaucacgauaac

SEQ ID NO: 987655 - RNA, 19 nt, Artificial Sequence
  Description of Artificial Sequence: Synthetic oligonucleotide
  Antisense strand to SEQ ID NO: 987654
guuaucgugaucaagagau

SEQ ID NO: 987656 - RNA, 19 nt, Artificial Sequence
  Description of Artificial Sequence: Synthetic oligonucleotide
  Sense strand starting at position 3762 of SEQ ID NO: 914224
ucuugacacuugugaauau

SEQ ID NO: 987657 - RNA, 19 nt, Artificial Sequence
  Description of Artificial Sequence: Synthetic oligonucleotide
  Antisense strand to SEQ ID NO: 987656
auauucacaagugucaaga

SEQ ID NO: 987658 - RNA, 19 nt, Artificial Sequence
  Description of Artificial Sequence: Synthetic oligonucleotide
  Sense strand starting at position 1024 of SEQ ID NO: 914224
cuagaucucuagugaggug

SEQ ID NO: 987659 - RNA, 19 nt, Artificial Sequence
  Description of Artificial Sequence: Synthetic oligonucleotide
  Antisense strand to SEQ ID NO: 987658
caccucacuagagaucuag

SEQ ID NO: 987660 - RNA, 19 nt, Artificial Sequence
  Description of Artificial Sequence: Synthetic oligonucleotide
  Sense strand starting at position 2637 of SEQ ID NO: 914224
accguagguucucacuuau

SEQ ID NO: 987661 - RNA, 19 nt, Artificial Sequence
  Description of Artificial Sequence: Synthetic oligonucleotide
  Antisense strand to SEQ ID NO: 987660
auaagugagaaccuacggu

SEQ ID NO: 987662 - RNA, 19 nt, Artificial Sequence
  Description of Artificial Sequence: Synthetic oligonucleotide
  Sense strand starting at position 607 of SEQ ID NO: 914224
augugucaaugucaucagu

SEQ ID NO: 987663 - RNA, 19 nt, Artificial Sequence
  Description of Artificial Sequence: Synthetic oligonucleotide
  Antisense strand to SEQ ID NO: 987662
acugaugacauugacacau

SEQ ID NO: 987664 - RNA, 19 nt, Artificial Sequence
  Description of Artificial Sequence: Synthetic oligonucleotide
  Sense strand starting at position 1027 of SEQ ID NO: 914224
gaucucuagugagguguca

SEQ ID NO: 987665 - RNA, 19 nt, Artificial Sequence
  Description of Artificial Sequence: Synthetic oligonucleotide
  Antisense strand to SEQ ID NO: 987664
ugacaccucacuagagauc

SEQ ID NO: 987666 - RNA, 19 nt, Artificial Sequence
  Description of Artificial Sequence: Synthetic oligonucleotide
  Sense strand starting at position 1600 of SEQ ID NO: 914224
gcgcaucuauugggcagaa

SEQ ID NO: 987667 - RNA, 19 nt, Artificial Sequence
  Description of Artificial Sequence: Synthetic oligonucleotide
  Antisense strand to SEQ ID NO: 987666
uucugcccaauagaugcgc

SEQ ID NO: 987668 - RNA, 19 nt, Artificial Sequence
  Description of Artificial Sequence: Synthetic oligonucleotide
  Sense strand starting at position 2456 of SEQ ID NO: 914224
ccuguaagcugucguaaag

SEQ ID NO: 987669 - RNA, 19 nt, Artificial Sequence
  Description of Artificial Sequence: Synthetic oligonucleotide
  Antisense strand to SEQ ID NO: 987668
cuuuacgacagcuuacagg

SEQ ID NO: 987670 - RNA, 19 nt, Artificial Sequence
  Description of Artificial Sequence: Synthetic oligonucleotide
  Sense strand starting at position 447 of SEQ ID NO: 914225
gcugcucuauuuccagaga

SEQ ID NO: 987671 - RNA, 19 nt, Artificial Sequence
  Description of Artificial Sequence: Synthetic oligonucleotide
  Antisense strand to SEQ ID NO: 987670
ucucuggaaauagagcagc

SEQ ID NO: 987672 - RNA, 19 nt, Artificial Sequence
  Description of Artificial Sequence: Synthetic oligonucleotide
  Sense strand starting at position 2722 of SEQ ID NO: 914225
aacggugauccggauaaac

SEQ ID NO: 987673 - RNA, 19 nt, Artificial Sequence
  Description of Artificial Sequence: Synthetic oligonucleotide
  Antisense strand to SEQ ID NO: 987672
guuuauccggaucaccguu

SEQ ID NO: 987674 - RNA, 19 nt, Artificial Sequence
  Description of Artificial Sequence: Synthetic oligonucleotide
  Sense strand starting at position 349 of SEQ ID NO: 914225
ugcacuuaugacuaccuga

SEQ ID NO: 987675 - RNA, 19 nt, Artificial Sequence
  Description of Artificial Sequence: Synthetic oligonucleotide
  Antisense strand to SEQ ID NO: 987674
ucagguagucauaagugca

SEQ ID NO: 987676 - RNA, 19 nt, Artificial Sequence
  Description of Artificial Sequence: Synthetic oligonucleotide
  Sense strand starting at position 1485 of SEQ ID NO: 914225
ggauuccuauucucugaga

SEQ ID NO: 987677 - RNA, 19 nt, Artificial Sequence
  Description of Artificial Sequence: Synthetic oligonucleotide
  Antisense strand to SEQ ID NO: 987676
ucucagagaauaggaaucc

SEQ ID NO: 987678 - RNA, 19 nt, Artificial Sequence
  Description of Artificial Sequence: Synthetic oligonucleotide
  Sense strand starting at position 1486 of SEQ ID NO: 914225
gauuccuauucucugagag

SEQ ID NO: 987679 - RNA, 19 nt, Artificial Sequence
  Description of Artificial Sequence: Synthetic oligonucleotide
  Antisense strand to SEQ ID NO: 987678
cucucagagaauaggaauc

SEQ ID NO: 987680 - RNA, 19 nt, Artificial Sequence
  Description of Artificial Sequence: Synthetic oligonucleotide
  Sense strand starting at position 3552 of SEQ ID NO: 914225
ugggaauauuaggcuuuaa

SEQ ID NO: 987681 - RNA, 19 nt, Artificial Sequence
  Description of Artificial Sequence: Synthetic oligonucleotide
  Antisense strand to SEQ ID NO: 987680
uuaaagccuaauauuccca

SEQ ID NO: 987682 - RNA, 19 nt, Artificial Sequence
  Description of Artificial Sequence: Synthetic oligonucleotide
  Sense strand starting at position 2724 of SEQ ID NO: 914225
cggugauccggauaaacau

SEQ ID NO: 987683 - RNA, 19 nt, Artificial Sequence
  Description of Artificial Sequence: Synthetic oligonucleotide
  Antisense strand to SEQ ID NO: 987682
auguuuauccggaucaccg

SEQ ID NO: 987684 - RNA, 19 nt, Artificial Sequence
  Description of Artificial Sequence: Synthetic oligonucleotide
  Sense strand starting at position 1572 of SEQ ID NO: 914225
ucccuuuaucacggaagaa

SEQ ID NO: 987685 - RNA, 19 nt, Artificial Sequence
  Description of Artificial Sequence: Synthetic oligonucleotide
  Antisense strand to SEQ ID NO: 987684
uucuuccgugauaaaggga

SEQ ID NO: 987686 - RNA, 19 nt, Artificial Sequence
  Description of Artificial Sequence: Synthetic oligonucleotide
  Sense strand starting at position 2323 of SEQ ID NO: 914225
cuuccucacguguucguua

SEQ ID NO: 987687 - RNA, 19 nt, Artificial Sequence
  Description of Artificial Sequence: Synthetic oligonucleotide
  Antisense strand to SEQ ID NO: 987686
uaacgaacacgugaggaag

SEQ ID NO: 987688 - RNA, 19 nt, Artificial Sequence
  Description of Artificial Sequence: Synthetic oligonucleotide
  Sense strand starting at position 3930 of SEQ ID NO: 914225
aguuucuagguauaccuua

SEQ ID NO: 987689 - RNA, 19 nt, Artificial Sequence
  Description of Artificial Sequence: Synthetic oligonucleotide
  Antisense strand to SEQ ID NO: 987688
uaagguauaccuagaaacu

SEQ ID NO: 987690 - RNA, 19 nt, Artificial Sequence
  Description of Artificial Sequence: Synthetic oligonucleotide
  Sense strand starting at position 3564 of SEQ ID NO: 914225
gcuuuaauucgagaucuga

SEQ ID NO: 987691 - RNA, 19 nt, Artificial Sequence
  Description of Artificial Sequence: Synthetic oligonucleotide
  Antisense strand to SEQ ID NO: 987690
ucagaucucgaauuaaagc

SEQ ID NO: 987692 - RNA, 19 nt, Artificial Sequence
  Description of Artificial Sequence: Synthetic oligonucleotide
  Sense strand starting at position 1432 of SEQ ID NO: 914225
aaauguguccacgaugacu

SEQ ID NO: 987693 - RNA, 19 nt, Artificial Sequence
  Description of Artificial Sequence: Synthetic oligonucleotide
  Antisense strand to SEQ ID NO: 987692
agucaucguggacacauuu

SEQ ID NO: 987694 - RNA, 19 nt, Artificial Sequence
  Description of Artificial Sequence: Synthetic oligonucleotide
  Sense strand starting at position 1429 of SEQ ID NO: 914225
uauaaauguguccacgaug

SEQ ID NO: 987695 - RNA, 19 nt, Artificial Sequence
  Description of Artificial Sequence: Synthetic oligonucleotide
  Antisense strand to SEQ ID NO: 987694
caucguggacacauuuaua

SEQ ID NO: 987696 - RNA, 19 nt, Artificial Sequence
  Description of Artificial Sequence: Synthetic oligonucleotide
  Sense strand starting at position 1112 of SEQ ID NO: 914225
cuaucaaguuuagugacaa

SEQ ID NO: 987697 - RNA, 19 nt, Artificial Sequence
  Description of Artificial Sequence: Synthetic oligonucleotide
  Antisense strand to SEQ ID NO: 987696
uugucacuaaacuugauag

SEQ ID NO: 987698 - RNA, 19 nt, Artificial Sequence
  Description of Artificial Sequence: Synthetic oligonucleotide
  Sense strand starting at position 3574 of SEQ ID NO: 914225
gagaucugagcugguuaaa

SEQ ID NO: 987699 - RNA, 19 nt, Artificial Sequence
  Description of Artificial Sequence: Synthetic oligonucleotide
  Antisense strand to SEQ ID NO: 987698
uuuaaccagcucagaucuc

SEQ ID NO: 987700 - RNA, 19 nt, Artificial Sequence
  Description of Artificial Sequence: Synthetic oligonucleotide
  Sense strand starting at position 1152 of SEQ ID NO: 914225
uccagugugguauagaauc

SEQ ID NO: 987701 - RNA, 19 nt, Artificial Sequence
  Description of Artificial Sequence: Synthetic oligonucleotide
  Antisense strand to SEQ ID NO: 987700
gauucuauaccacacugga

SEQ ID NO: 987702 - RNA, 19 nt, Artificial Sequence
  Description of Artificial Sequence: Synthetic oligonucleotide
  Sense strand starting at position 3712 of SEQ ID NO: 914225
uuguaaaggcuguaccaua

SEQ ID NO: 987703 - RNA, 19 nt, Artificial Sequence
  Description of Artificial Sequence: Synthetic oligonucleotide
  Antisense strand to SEQ ID NO: 987702
uaugguacagccuuuacaa

SEQ ID NO: 987704 - RNA, 19 nt, Artificial Sequence
  Description of Artificial Sequence: Synthetic oligonucleotide
  Sense strand starting at position 862 of SEQ ID NO: 914225
ggcauuauagucuaguaau

SEQ ID NO: 987705 - RNA, 19 nt, Artificial Sequence
  Description of Artificial Sequence: Synthetic oligonucleotide
  Antisense strand to SEQ ID NO: 987704
auuacuagacuauaaugcc

SEQ ID NO: 987706 - RNA, 19 nt, Artificial Sequence
  Description of Artificial Sequence: Synthetic oligonucleotide
  Sense strand starting at position 776 of SEQ ID NO: 914225
cgagcuccuguauaaauac

SEQ ID NO: 987707 - RNA, 19 nt, Artificial Sequence
  Description of Artificial Sequence: Synthetic oligonucleotide
  Antisense strand to SEQ ID NO: 987706
guauuuauacaggagcucg

SEQ ID NO: 987708 - RNA, 19 nt, Artificial Sequence
  Description of Artificial Sequence: Synthetic oligonucleotide
  Sense strand starting at position 921 of SEQ ID NO: 914225
agcagucagauacgaugau

SEQ ID NO: 987709 - RNA, 19 nt, Artificial Sequence
  Description of Artificial Sequence: Synthetic oligonucleotide
  Antisense strand to SEQ ID NO: 987708
aucaucguaucugacugcu

SEQ ID NO: 987710 - RNA, 19 nt, Artificial Sequence
  Description of Artificial Sequence: Synthetic oligonucleotide
  Sense strand starting at position 3258 of SEQ ID NO: 914225
acacucucguaagcagaaa

SEQ ID NO: 987711 - RNA, 19 nt, Artificial Sequence
  Description of Artificial Sequence: Synthetic oligonucleotide
  Antisense strand to SEQ ID NO: 987710
uuucugcuuacgagagugu

SEQ ID NO: 987712 - RNA, 19 nt, Artificial Sequence
  Description of Artificial Sequence: Synthetic oligonucleotide
  Sense strand starting at position 1415 of SEQ ID NO: 914225
gcaacugguuaucuuauaa

SEQ ID NO: 987713 - RNA, 19 nt, Artificial Sequence
  Description of Artificial Sequence: Synthetic oligonucleotide
  Antisense strand to SEQ ID NO: 987712
uuauaagauaaccaguugc

SEQ ID NO: 987714 - RNA, 19 nt, Artificial Sequence
  Description of Artificial Sequence: Synthetic oligonucleotide
  Sense strand starting at position 1414 of SEQ ID NO: 914225
agcaacugguuaucuuaua

SEQ ID NO: 987715 - RNA, 19 nt, Artificial Sequence
  Description of Artificial Sequence: Synthetic oligonucleotide
  Antisense strand to SEQ ID NO: 987714
uauaagauaaccaguugcu

SEQ ID NO: 987716 - RNA, 19 nt, Artificial Sequence
  Description of Artificial Sequence: Synthetic oligonucleotide
  Sense strand starting at position 1443 of SEQ ID NO: 914225
cgaugacuuggucacuugu

SEQ ID NO: 987717 - RNA, 19 nt, Artificial Sequence
  Description of Artificial Sequence: Synthetic oligonucleotide
  Antisense strand to SEQ ID NO: 987716
acaagugaccaagucaucg

SEQ ID NO: 987718 - RNA, 19 nt, Artificial Sequence
  Description of Artificial Sequence: Synthetic oligonucleotide
  Sense strand starting at position 850 of SEQ ID NO: 914225
cggaguuugagaggcauua

SEQ ID NO: 987719 - RNA, 19 nt, Artificial Sequence
  Description of Artificial Sequence: Synthetic oligonucleotide
  Antisense strand to SEQ ID NO: 987718
uaaugccucucaaacuccg

SEQ ID NO: 987720 - RNA, 19 nt, Artificial Sequence
  Description of Artificial Sequence: Synthetic oligonucleotide
  Sense strand starting at position 860 of SEQ ID NO: 914225
gaggcauuauagucuagua

SEQ ID NO: 987721 - RNA, 19 nt, Artificial Sequence
  Description of Artificial Sequence: Synthetic oligonucleotide
  Antisense strand to SEQ ID NO: 987720
uacuagacuauaaugccuc

SEQ ID NO: 987722 - RNA, 19 nt, Artificial Sequence
  Description of Artificial Sequence: Synthetic oligonucleotide
  Sense strand starting at position 384 of SEQ ID NO: 914225
uauuguucguugucuauuu

SEQ ID NO: 987723 - RNA, 19 nt, Artificial Sequence
  Description of Artificial Sequence: Synthetic oligonucleotide
  Antisense strand to SEQ ID NO: 987722
aaauagacaacgaacaaua

SEQ ID NO: 987724 - RNA, 19 nt, Artificial Sequence
  Description of Artificial Sequence: Synthetic oligonucleotide
  Sense strand starting at position 1412 of SEQ ID NO: 914225
gcagcaacugguuaucuua

SEQ ID NO: 987725 - RNA, 19 nt, Artificial Sequence
  Description of Artificial Sequence: Synthetic oligonucleotide
  Antisense strand to SEQ ID NO: 987724
uaagauaaccaguugcugc

SEQ ID NO: 987726 - RNA, 19 nt, Artificial Sequence
  Description of Artificial Sequence: Synthetic oligonucleotide
  Sense strand starting at position 3923 of SEQ ID NO: 914225
uuaagugaguuucuaggua

SEQ ID NO: 987727 - RNA, 19 nt, Artificial Sequence
  Description of Artificial Sequence: Synthetic oligonucleotide
  Antisense strand to SEQ ID NO: 987726
uaccuagaaacucacuuaa

SEQ ID NO: 987728 - RNA, 19 nt, Artificial Sequence
  Description of Artificial Sequence: Synthetic oligonucleotide
  Sense strand starting at position 1440 of SEQ ID NO: 914225
ccacgaugacuuggucacu

SEQ ID NO: 987729 - RNA, 19 nt, Artificial Sequence
  Description of Artificial Sequence: Synthetic oligonucleotide
  Antisense strand to SEQ ID NO: 987728
agugaccaagucaucgugg

SEQ ID NO: 987730 - RNA, 19 nt, Artificial Sequence
  Description of Artificial Sequence: Synthetic oligonucleotide
  Sense strand starting at position 796 of SEQ ID NO: 914225
cccugaagugugcacagua

SEQ ID NO: 987731 - RNA, 19 nt, Artificial Sequence
  Description of Artificial Sequence: Synthetic oligonucleotide
  Antisense strand to SEQ ID NO: 987730
uacugugcacacuucaggg

SEQ ID NO: 987732 - RNA, 19 nt, Artificial Sequence
  Description of Artificial Sequence: Synthetic oligonucleotide
  Sense strand starting at position 639 of SEQ ID NO: 914225
gugacuuguccuuggacac

SEQ ID NO: 987733 - RNA, 19 nt, Artificial Sequence
  Description of Artificial Sequence: Synthetic oligonucleotide
  Antisense strand to SEQ ID NO: 987732
guguccaaggacaagucac

SEQ ID NO: 987734 - RNA, 19 nt, Artificial Sequence
  Description of Artificial Sequence: Synthetic oligonucleotide
  Sense strand starting at position 1428 of SEQ ID NO: 914225
uuauaaauguguccacgau

SEQ ID NO: 987735 - RNA, 19 nt, Artificial Sequence
  Description of Artificial Sequence: Synthetic oligonucleotide
  Antisense strand to SEQ ID NO: 987734
aucguggacacauuuauaa

SEQ ID NO: 987736 - RNA, 19 nt, Artificial Sequence
  Description of Artificial Sequence: Synthetic oligonucleotide
  Sense strand starting at position 1336 of SEQ ID NO: 914225
ccuagugcugugggaacaa

SEQ ID NO: 987737 - RNA, 19 nt, Artificial Sequence
  Description of Artificial Sequence: Synthetic oligonucleotide
  Antisense strand to SEQ ID NO: 987736
uuguucccacagcacuagg

SEQ ID NO: 987738 - RNA, 19 nt, Artificial Sequence
  Description of Artificial Sequence: Synthetic oligonucleotide
  Sense strand starting at position 3573 of SEQ ID NO: 914225
cgagaucugagcugguuaa

SEQ ID NO: 987739 - RNA, 19 nt, Artificial Sequence
  Description of Artificial Sequence: Synthetic oligonucleotide
  Antisense strand to SEQ ID NO: 987738
uuaaccagcucagaucucg

SEQ ID NO: 987740 - RNA, 19 nt, Artificial Sequence
  Description of Artificial Sequence: Synthetic oligonucleotide
  Sense strand starting at position 3963 of SEQ ID NO: 914225
agguacaugucaucuguua

SEQ ID NO: 987741 - RNA, 19 nt, Artificial Sequence
  Description of Artificial Sequence: Synthetic oligonucleotide
  Antisense strand to SEQ ID NO: 987740
uaacagaugacauguaccu

SEQ ID NO: 987742 - RNA, 19 nt, Artificial Sequence
  Description of Artificial Sequence: Synthetic oligonucleotide
  Sense strand starting at position 458 of SEQ ID NO: 914225
uccagagauuucugacuca

SEQ ID NO: 987743 - RNA, 19 nt, Artificial Sequence
  Description of Artificial Sequence: Synthetic oligonucleotide
  Antisense strand to SEQ ID NO: 987742
ugagucagaaaucucugga

SEQ ID NO: 987744 - RNA, 19 nt, Artificial Sequence
  Description of Artificial Sequence: Synthetic oligonucleotide
  Sense strand starting at position 3927 of SEQ ID NO: 914225
gugaguuucuagguauacc

SEQ ID NO: 987745 - RNA, 19 nt, Artificial Sequence
  Description of Artificial Sequence: Synthetic oligonucleotide
  Antisense strand to SEQ ID NO: 987744
gguauaccuagaaacucac

SEQ ID NO: 987746 - RNA, 19 nt, Artificial Sequence
  Description of Artificial Sequence: Synthetic oligonucleotide
  Sense strand starting at position 1017 of SEQ ID NO: 914225
cugaaagcuuccucugcaa

SEQ ID NO: 987747 - RNA, 19 nt, Artificial Sequence
  Description of Artificial Sequence: Synthetic oligonucleotide
  Antisense strand to SEQ ID NO: 987746
uugcagaggaagcuuucag

SEQ ID NO: 987748 - RNA, 19 nt, Artificial Sequence
  Description of Artificial Sequence: Synthetic oligonucleotide
  Sense strand starting at position 154 of SEQ ID NO: 914225
gugccuuacauaugguaag

SEQ ID NO: 987749 - RNA, 19 nt, Artificial Sequence
  Description of Artificial Sequence: Synthetic oligonucleotide
  Antisense strand to SEQ ID NO: 987748
cuuaccauauguaaggcac

SEQ ID NO: 987750 - RNA, 19 nt, Artificial Sequence
  Description of Artificial Sequence: Synthetic oligonucleotide
  Sense strand starting at position 3477 of SEQ ID NO: 914226
agaguuaucuuaccagaga

SEQ ID NO: 987751 - RNA, 19 nt, Artificial Sequence
  Description of Artificial Sequence: Synthetic oligonucleotide
  Antisense strand to SEQ ID NO: 987750
ucucugguaagauaacucu

SEQ ID NO: 987752 - RNA, 19 nt, Artificial Sequence
  Description of Artificial Sequence: Synthetic oligonucleotide
  Sense strand starting at position 3959 of SEQ ID NO: 914226
cagagagguuaauucugau

SEQ ID NO: 987753 - RNA, 19 nt, Artificial Sequence
  Description of Artificial Sequence: Synthetic oligonucleotide
  Antisense strand to SEQ ID NO: 987752
aucagaauuaaccucucug

SEQ ID NO: 987754 - RNA, 19 nt, Artificial Sequence
  Description of Artificial Sequence: Synthetic oligonucleotide
  Sense strand starting at position 3491 of SEQ ID NO: 914226
agagaacagucaucucauc

SEQ ID NO: 987755 - RNA, 19 nt, Artificial Sequence
  Description of Artificial Sequence: Synthetic oligonucleotide
  Antisense strand to SEQ ID NO: 987754
gaugagaugacuguucucu

SEQ ID NO: 987756 - RNA, 19 nt, Artificial Sequence
  Description of Artificial Sequence: Synthetic oligonucleotide
  Sense strand starting at position 2446 of SEQ ID NO: 914226
agaugaggccuuugaauga

SEQ ID NO: 987757 - RNA, 19 nt, Artificial Sequence
  Description of Artificial Sequence: Synthetic oligonucleotide
  Antisense strand to SEQ ID NO: 987756
ucauucaaaggccucaucu

SEQ ID NO: 987758 - RNA, 19 nt, Artificial Sequence
  Description of Artificial Sequence: Synthetic oligonucleotide
  Sense strand starting at position 2450 of SEQ ID NO: 914226
gaggccuuugaaugaugaa

SEQ ID NO: 987759 - RNA, 19 nt, Artificial Sequence
  Description of Artificial Sequence: Synthetic oligonucleotide
  Antisense strand to SEQ ID NO: 987758
uucaucauucaaaggccuc

SEQ ID NO: 987760 - RNA, 19 nt, Artificial Sequence
  Description of Artificial Sequence: Synthetic oligonucleotide
  Sense strand starting at position 589 of SEQ ID NO: 914226
ggaugaaauuaacuuugca

SEQ ID NO: 987761 - RNA, 19 nt, Artificial Sequence
  Description of Artificial Sequence: Synthetic oligonucleotide
  Antisense strand to SEQ ID NO: 987760
ugcaaaguuaauuucaucc

SEQ ID NO: 987762 - RNA, 19 nt, Artificial Sequence
  Description of Artificial Sequence: Synthetic oligonucleotide
  Sense strand starting at position 1661 of SEQ ID NO: 914226
gagucaugucauuacuagg

SEQ ID NO: 987763 - RNA, 19 nt, Artificial Sequence
  Description of Artificial Sequence: Synthetic oligonucleotide
  Antisense strand to SEQ ID NO: 987762
ccuaguaaugacaugacuc

SEQ ID NO: 987764 - RNA, 19 nt, Artificial Sequence
  Description of Artificial Sequence: Synthetic oligonucleotide
  Sense strand starting at position 1394 of SEQ ID NO: 914226
uucugaaucuggucaagaa

SEQ ID NO: 987765 - RNA, 19 nt, Artificial Sequence
  Description of Artificial Sequence: Synthetic oligonucleotide
  Antisense strand to SEQ ID NO: 987764
uucuugaccagauucagaa

SEQ ID NO: 987766 - RNA, 19 nt, Artificial Sequence
  Description of Artificial Sequence: Synthetic oligonucleotide
  Sense strand starting at position 3749 of SEQ ID NO: 914226
gaacucaucgcugauaaug

SEQ ID NO: 987767 - RNA, 19 nt, Artificial Sequence
  Description of Artificial Sequence: Synthetic oligonucleotide
  Antisense strand to SEQ ID NO: 987766
cauuaucagcgaugaguuc

SEQ ID NO: 987768 - RNA, 19 nt, Artificial Sequence
  Description of Artificial Sequence: Synthetic oligonucleotide
  Sense strand starting at position 1085 of SEQ ID NO: 914226
ugauaacaauagcuaguaa

SEQ ID NO: 987769 - RNA, 19 nt, Artificial Sequence
  Description of Artificial Sequence: Synthetic oligonucleotide
  Antisense strand to SEQ ID NO: 987768
uuacuagcuauuguuauca

SEQ ID NO: 987770 - RNA, 19 nt, Artificial Sequence
  Description of Artificial Sequence: Synthetic oligonucleotide
  Sense strand starting at position 284 of SEQ ID NO: 914226
cuuugauaugaguauguca

SEQ ID NO: 987771 - RNA, 19 nt, Artificial Sequence
  Description of Artificial Sequence: Synthetic oligonucleotide
  Antisense strand to SEQ ID NO: 987770
ugacauacucauaucaaag

SEQ ID NO: 987772 - RNA, 19 nt, Artificial Sequence
  Description of Artificial Sequence: Synthetic oligonucleotide
  Sense strand starting at position 1096 of SEQ ID NO: 914226
gcuaguaaugaagacgauu

SEQ ID NO: 987773 - RNA, 19 nt, Artificial Sequence
  Description of Artificial Sequence: Synthetic oligonucleotide
  Antisense strand to SEQ ID NO: 987772
aaucgucuucauuacuagc

SEQ ID NO: 987774 - RNA, 19 nt, Artificial Sequence
  Description of Artificial Sequence: Synthetic oligonucleotide
  Sense strand starting at position 3364 of SEQ ID NO: 914226
guggcuucugaagacauca

SEQ ID NO: 987775 - RNA, 19 nt, Artificial Sequence
  Description of Artificial Sequence: Synthetic oligonucleotide
  Antisense strand to SEQ ID NO: 987774
ugaugucuucagaagccac

SEQ ID NO: 987776 - RNA, 19 nt, Artificial Sequence
  Description of Artificial Sequence: Synthetic oligonucleotide
  Sense strand starting at position 2762 of SEQ ID NO: 914226
cguuaucucguccuuguua

SEQ ID NO: 987777 - RNA, 19 nt, Artificial Sequence
  Description of Artificial Sequence: Synthetic oligonucleotide
  Antisense strand to SEQ ID NO: 987776
uaacaaggacgagauaacg

SEQ ID NO: 987778 - RNA, 19 nt, Artificial Sequence
  Description of Artificial Sequence: Synthetic oligonucleotide
  Sense strand starting at position 2761 of SEQ ID NO: 914226
acguuaucucguccuuguu

SEQ ID NO: 987779 - RNA, 19 nt, Artificial Sequence
  Description of Artificial Sequence: Synthetic oligonucleotide
  Antisense strand to SEQ ID NO: 987778
aacaaggacgagauaacgu

SEQ ID NO: 987780 - RNA, 19 nt, Artificial Sequence
  Description of Artificial Sequence: Synthetic oligonucleotide
  Sense strand starting at position 3168 of SEQ ID NO: 914226
cagaacugugcauaaugua

SEQ ID NO: 987781 - RNA, 19 nt, Artificial Sequence
  Description of Artificial Sequence: Synthetic oligonucleotide
  Antisense strand to SEQ ID NO: 987780
uacauuaugcacaguucug

SEQ ID NO: 987782 - RNA, 19 nt, Artificial Sequence
  Description of Artificial Sequence: Synthetic oligonucleotide
  Sense strand starting at position 1116 of SEQ ID NO: 914226
ugaucauaagcucaugguu

SEQ ID NO: 987783 - RNA, 19 nt, Artificial Sequence
  Description of Artificial Sequence: Synthetic oligonucleotide
  Antisense strand to SEQ ID NO: 987782
aaccaugagcuuaugauca

SEQ ID NO: 987784 - RNA, 19 nt, Artificial Sequence
  Description of Artificial Sequence: Synthetic oligonucleotide
  Sense strand starting at position 316 of SEQ ID NO: 914226
agcugccaucuugagauga

SEQ ID NO: 987785 - RNA, 19 nt, Artificial Sequence
  Description of Artificial Sequence: Synthetic oligonucleotide
  Antisense strand to SEQ ID NO: 987784
ucaucucaagauggcagcu

SEQ ID NO: 987786 - RNA, 19 nt, Artificial Sequence
  Description of Artificial Sequence: Synthetic oligonucleotide
  Sense strand starting at position 3137 of SEQ ID NO: 914226
acagcuaugagagggcaua

SEQ ID NO: 987787 - RNA, 19 nt, Artificial Sequence
  Description of Artificial Sequence: Synthetic oligonucleotide
  Antisense strand to SEQ ID NO: 987786
uaugcccucucauagcugu

SEQ ID NO: 987788 - RNA, 19 nt, Artificial Sequence
  Description of Artificial Sequence: Synthetic oligonucleotide
  Sense strand starting at position 86 of SEQ ID NO: 914226
agugaagggccaugaaucu

SEQ ID NO: 987789 - RNA, 19 nt, Artificial Sequence
  Description of Artificial Sequence: Synthetic oligonucleotide
  Antisense strand to SEQ ID NO: 987788
agauucauggcccuucacu

SEQ ID NO: 987790 - RNA, 19 nt, Artificial Sequence
  Description of Artificial Sequence: Synthetic oligonucleotide
  Sense strand starting at position 3667 of SEQ ID NO: 914226
cagucauuggcagauggua

SEQ ID NO: 987791 - RNA, 19 nt, Artificial Sequence
  Description of Artificial Sequence: Synthetic oligonucleotide
  Antisense strand to SEQ ID NO: 987790
uaccaucugccaaugacug

SEQ ID NO: 987792 - RNA, 19 nt, Artificial Sequence
  Description of Artificial Sequence: Synthetic oligonucleotide
  Sense strand starting at position 1712 of SEQ ID NO: 914226
auaagacuguuguuugaac

SEQ ID NO: 987793 - RNA, 19 nt, Artificial Sequence
  Description of Artificial Sequence: Synthetic oligonucleotide
  Antisense strand to SEQ ID NO: 987792
guucaaacaacagucuuau

SEQ ID NO: 987794 - RNA, 19 nt, Artificial Sequence
  Description of Artificial Sequence: Synthetic oligonucleotide
  Sense strand starting at position 1714 of SEQ ID NO: 914226
aagacuguuguuugaacua

SEQ ID NO: 987795 - RNA, 19 nt, Artificial Sequence
  Description of Artificial Sequence: Synthetic oligonucleotide
  Antisense strand to SEQ ID NO: 987794
uaguucaaacaacagucuu

SEQ ID NO: 987796 - RNA, 19 nt, Artificial Sequence
  Description of Artificial Sequence: Synthetic oligonucleotide
  Sense strand starting at position 2573 of SEQ ID NO: 914226
gugucucuaugcuugauuu

SEQ ID NO: 987797 - RNA, 19 nt, Artificial Sequence
  Description of Artificial Sequence: Synthetic oligonucleotide
  Antisense strand to SEQ ID NO: 987796
aaaucaagcauagagacac

SEQ ID NO: 987798 - RNA, 19 nt, Artificial Sequence
  Description of Artificial Sequence: Synthetic oligonucleotide
  Sense strand starting at position 3166 of SEQ ID NO: 914226
gccagaacugugcauaaug

SEQ ID NO: 987799 - RNA, 19 nt, Artificial Sequence
  Description of Artificial Sequence: Synthetic oligonucleotide
  Antisense strand to SEQ ID NO: 987798
cauuaugcacaguucuggc

SEQ ID NO: 987800 - RNA, 19 nt, Artificial Sequence
  Description of Artificial Sequence: Synthetic oligonucleotide
  Sense strand starting at position 2183 of SEQ ID NO: 914226
uuugacgauucuuuacaca

SEQ ID NO: 987801 - RNA, 19 nt, Artificial Sequence
  Description of Artificial Sequence: Synthetic oligonucleotide
  Antisense strand to SEQ ID NO: 987800
uguguaaagaaucgucaaa

SEQ ID NO: 987802 - RNA, 19 nt, Artificial Sequence
  Description of Artificial Sequence: Synthetic oligonucleotide
  Sense strand starting at position 1121 of SEQ ID NO: 914226
auaagcucaugguuauuaa

SEQ ID NO: 987803 - RNA, 19 nt, Artificial Sequence
  Description of Artificial Sequence: Synthetic oligonucleotide
  Antisense strand to SEQ ID NO: 987802
uuaauaaccaugagcuuau

SEQ ID NO: 987804 - RNA, 19 nt, Artificial Sequence
  Description of Artificial Sequence: Synthetic oligonucleotide
  Sense strand starting at position 105 of SEQ ID NO: 914226
ugacuagucuaagccaaac

SEQ ID NO: 987805 - RNA, 19 nt, Artificial Sequence
  Description of Artificial Sequence: Synthetic oligonucleotide
  Antisense strand to SEQ ID NO: 987804
guuuggcuuagacuaguca

SEQ ID NO: 987806 - RNA, 19 nt, Artificial Sequence
  Description of Artificial Sequence: Synthetic oligonucleotide
  Sense strand starting at position 3138 of SEQ ID NO: 914226
cagcuaugagagggcauau

SEQ ID NO: 987807 - RNA, 19 nt, Artificial Sequence
  Description of Artificial Sequence: Synthetic oligonucleotide
  Antisense strand to SEQ ID NO: 987806
auaugcccucucauagcug

SEQ ID NO: 987808 - RNA, 19 nt, Artificial Sequence
  Description of Artificial Sequence: Synthetic oligonucleotide
  Sense strand starting at position 460 of SEQ ID NO: 914226
gauuucuaguuauaugaga

SEQ ID NO: 987809 - RNA, 19 nt, Artificial Sequence
  Description of Artificial Sequence: Synthetic oligonucleotide
  Antisense strand to SEQ ID NO: 987808
ucucauauaacuagaaauc

SEQ ID NO: 987810 - RNA, 19 nt, Artificial Sequence
  Description of Artificial Sequence: Synthetic oligonucleotide
  Sense strand starting at position 184 of SEQ ID NO: 914226
agcuaaugaggucauguuu

SEQ ID NO: 987811 - RNA, 19 nt, Artificial Sequence
  Description of Artificial Sequence: Synthetic oligonucleotide
  Antisense strand to SEQ ID NO: 987810
aaacaugaccucauuagcu

SEQ ID NO: 987812 - RNA, 19 nt, Artificial Sequence
  Description of Artificial Sequence: Synthetic oligonucleotide
  Sense strand starting at position 2375 of SEQ ID NO: 914226
gguuuauagucacuuaaau

SEQ ID NO: 987813 - RNA, 19 nt, Artificial Sequence
  Description of Artificial Sequence: Synthetic oligonucleotide
  Antisense strand to SEQ ID NO: 987812
auuuaagugacuauaaacc

SEQ ID NO: 987814 - RNA, 19 nt, Artificial Sequence
  Description of Artificial Sequence: Synthetic oligonucleotide
  Sense strand starting at position 1651 of SEQ ID NO: 914226
acauuacuaugagucaugu

SEQ ID NO: 987815 - RNA, 19 nt, Artificial Sequence
  Description of Artificial Sequence: Synthetic oligonucleotide
  Antisense strand to SEQ ID NO: 987814
acaugacucauaguaaugu

SEQ ID NO: 987816 - RNA, 19 nt, Artificial Sequence
  Description of Artificial Sequence: Synthetic oligonucleotide
  Sense strand starting at position 2251 of SEQ ID NO: 914226
cuugaucuauggucauuac

SEQ ID NO: 987817 - RNA, 19 nt, Artificial Sequence
  Description of Artificial Sequence: Synthetic oligonucleotide
  Antisense strand to SEQ ID NO: 987816
guaaugaccauagaucaag

SEQ ID NO: 987818 - RNA, 19 nt, Artificial Sequence
  Description of Artificial Sequence: Synthetic oligonucleotide
  Sense strand starting at position 3748 of SEQ ID NO: 914226
agaacucaucgcugauaau

SEQ ID NO: 987819 - RNA, 19 nt, Artificial Sequence
  Description of Artificial Sequence: Synthetic oligonucleotide
  Antisense strand to SEQ ID NO: 987818
auuaucagcgaugaguucu

SEQ ID NO: 987820 - RNA, 19 nt, Artificial Sequence
  Description of Artificial Sequence: Synthetic oligonucleotide
  Sense strand starting at position 3013 of SEQ ID NO: 914226
uuaucauggcccugauuaa

SEQ ID NO: 987821 - RNA, 19 nt, Artificial Sequence
  Description of Artificial Sequence: Synthetic oligonucleotide
  Antisense strand to SEQ ID NO: 987820
uuaaucagggccaugauaa

SEQ ID NO: 987822 - RNA, 19 nt, Artificial Sequence
  Description of Artificial Sequence: Synthetic oligonucleotide
  Sense strand starting at position 1660 of SEQ ID NO: 914226
ugagucaugucauuacuag

SEQ ID NO: 987823 - RNA, 19 nt, Artificial Sequence
  Description of Artificial Sequence: Synthetic oligonucleotide
  Antisense strand to SEQ ID NO: 987822
cuaguaaugacaugacuca

SEQ ID NO: 987824 - RNA, 19 nt, Artificial Sequence
  Description of Artificial Sequence: Synthetic oligonucleotide
  Sense strand starting at position 1713 of SEQ ID NO: 914226
uaagacuguuguuugaacu

SEQ ID NO: 987825 - RNA, 19 nt, Artificial Sequence
  Description of Artificial Sequence: Synthetic oligonucleotide
  Antisense strand to SEQ ID NO: 987824
aguucaaacaacagucuua

SEQ ID NO: 987826 - RNA, 19 nt, Artificial Sequence
  Description of Artificial Sequence: Synthetic oligonucleotide
  Sense strand starting at position 2551 of SEQ ID NO: 914226
cgaaaugcuuauucccaaa

SEQ ID NO: 987827 - RNA, 19 nt, Artificial Sequence
  Description of Artificial Sequence: Synthetic oligonucleotide
  Antisense strand to SEQ ID NO: 987826
uuugggaauaagcauuucg

SEQ ID NO: 987828 - RNA, 19 nt, Artificial Sequence
  Description of Artificial Sequence: Synthetic oligonucleotide
  Sense strand starting at position 2550 of SEQ ID NO: 914226
acgaaaugcuuauucccaa

SEQ ID NO: 987829 - RNA, 19 nt, Artificial Sequence
  Description of Artificial Sequence: Synthetic oligonucleotide
  Antisense strand to SEQ ID NO: 987828
uugggaauaagcauuucgu

SEQ ID NO: 987830 - RNA, 19 nt, Artificial Sequence
  Description of Artificial Sequence: Synthetic oligonucleotide
  Sense strand starting at position 3605 of SEQ ID NO: 914227
ugggauaaaucuguaucaa

SEQ ID NO: 987831 - RNA, 19 nt, Artificial Sequence
  Description of Artificial Sequence: Synthetic oligonucleotide
  Antisense strand to SEQ ID NO: 987830
uugauacagauuuauccca

SEQ ID NO: 987832 - RNA, 19 nt, Artificial Sequence
  Description of Artificial Sequence: Synthetic oligonucleotide
  Sense strand starting at position 3331 of SEQ ID NO: 914227
aguucaggugaugaguaaa

SEQ ID NO: 987833 - RNA, 19 nt, Artificial Sequence
  Description of Artificial Sequence: Synthetic oligonucleotide
  Antisense strand to SEQ ID NO: 987832
uuuacucaucaccugaacu

SEQ ID NO: 987834 - RNA, 19 nt, Artificial Sequence
  Description of Artificial Sequence: Synthetic oligonucleotide
  Sense strand starting at position 1300 of SEQ ID NO: 914227
gugguuucucaagaaaugg

SEQ ID NO: 987835 - RNA, 19 nt, Artificial Sequence
  Description of Artificial Sequence: Synthetic oligonucleotide
  Antisense strand to SEQ ID NO: 987834
ccauuucuugagaaaccac

SEQ ID NO: 987836 - RNA, 19 nt, Artificial Sequence
  Description of Artificial Sequence: Synthetic oligonucleotide
  Sense strand starting at position 3295 of SEQ ID NO: 914227
gggcauuguggagauaauc

SEQ ID NO: 987837 - RNA, 19 nt, Artificial Sequence
  Description of Artificial Sequence: Synthetic oligonucleotide
  Antisense strand to SEQ ID NO: 987836
gauuaucuccacaaugccc

SEQ ID NO: 987838 - RNA, 19 nt, Artificial Sequence
  Description of Artificial Sequence: Synthetic oligonucleotide
  Sense strand starting at position 3517 of SEQ ID NO: 914227
cuggaaugggcagaaguuu

SEQ ID NO: 987839 - RNA, 19 nt, Artificial Sequence
  Description of Artificial Sequence: Synthetic oligonucleotide
  Antisense strand to SEQ ID NO: 987838
aaacuucugcccauuccag

SEQ ID NO: 987840 - RNA, 19 nt, Artificial Sequence
  Description of Artificial Sequence: Synthetic oligonucleotide
  Sense strand starting at position 594 of SEQ ID NO: 914227
uuggaauggcuaugaaaua

SEQ ID NO: 987841 - RNA, 19 nt, Artificial Sequence
  Description of Artificial Sequence: Synthetic oligonucleotide
  Antisense strand to SEQ ID NO: 987840
uauuucauagccauuccaa

SEQ ID NO: 987842 - RNA, 19 nt, Artificial Sequence
  Description of Artificial Sequence: Synthetic oligonucleotide
  Sense strand starting at position 3148 of SEQ ID NO: 914227
uuccaaucuggugauugau

SEQ ID NO: 987843 - RNA, 19 nt, Artificial Sequence
  Description of Artificial Sequence: Synthetic oligonucleotide
  Antisense strand to SEQ ID NO: 987842
aucaaucaccagauuggaa

SEQ ID NO: 987844 - RNA, 19 nt, Artificial Sequence
  Description of Artificial Sequence: Synthetic oligonucleotide
  Sense strand starting at position 282 of SEQ ID NO: 914227
auggaaagugauuagcuuu

SEQ ID NO: 987845 - RNA, 19 nt, Artificial Sequence
  Description of Artificial Sequence: Synthetic oligonucleotide
  Antisense strand to SEQ ID NO: 987844
aaagcuaaucacuuuccau

SEQ ID NO: 987846 - RNA, 19 nt, Artificial Sequence
  Description of Artificial Sequence: Synthetic oligonucleotide
  Sense strand starting at position 510 of SEQ ID NO: 914227
gaagaacuugcucaagguc

SEQ ID NO: 987847 - RNA, 19 nt, Artificial Sequence
  Description of Artificial Sequence: Synthetic oligonucleotide
  Antisense strand to SEQ ID NO: 987846
gaccuugagcaaguucuuc

SEQ ID NO: 987848 - RNA, 19 nt, Artificial Sequence
  Description of Artificial Sequence: Synthetic oligonucleotide
  Sense strand starting at position 314 of SEQ ID NO: 914227
cagggaguaugaucugacu

SEQ ID NO: 987849 - RNA, 19 nt, Artificial Sequence
  Description of Artificial Sequence: Synthetic oligonucleotide
  Antisense strand to SEQ ID NO: 987848
agucagaucauacucccug

SEQ ID NO: 987850 - RNA, 19 nt, Artificial Sequence
  Description of Artificial Sequence: Synthetic oligonucleotide
  Sense strand starting at position 1064 of SEQ ID NO: 914227
cgucuuuacaugcuaacgu

SEQ ID NO: 987851 - RNA, 19 nt, Artificial Sequence
  Description of Artificial Sequence: Synthetic oligonucleotide
  Antisense strand to SEQ ID NO: 987850
acguuagcauguaaagacg

SEQ ID NO: 987852 - RNA, 19 nt, Artificial Sequence
  Description of Artificial Sequence: Synthetic oligonucleotide
  Sense strand starting at position 2361 of SEQ ID NO: 914227
ugcagaaagauguggagau

SEQ ID NO: 987853 - RNA, 19 nt, Artificial Sequence
  Description of Artificial Sequence: Synthetic oligonucleotide
  Antisense strand to SEQ ID NO: 987852
aucuccacaucuuucugca

SEQ ID NO: 987854 - RNA, 19 nt, Artificial Sequence
  Description of Artificial Sequence: Synthetic oligonucleotide
  Sense strand starting at position 1095 of SEQ ID NO: 914227
ucgucugccaguuugcaaa

SEQ ID NO: 987855 - RNA, 19 nt, Artificial Sequence
  Description of Artificial Sequence: Synthetic oligonucleotide
  Antisense strand to SEQ ID NO: 987854
uuugcaaacuggcagacga

SEQ ID NO: 987856 - RNA, 19 nt, Artificial Sequence
  Description of Artificial Sequence: Synthetic oligonucleotide
  Sense strand starting at position 3397 of SEQ ID NO: 914227
gagcaagaauucccuggau

SEQ ID NO: 987857 - RNA, 19 nt, Artificial Sequence
  Description of Artificial Sequence: Synthetic oligonucleotide
  Antisense strand to SEQ ID NO: 987856
auccagggaauucuugcuc

SEQ ID NO: 987858 - RNA, 19 nt, Artificial Sequence
  Description of Artificial Sequence: Synthetic oligonucleotide
  Sense strand starting at position 841 of SEQ ID NO: 914227
gauucuagaccaugaaugu

SEQ ID NO: 987859 - RNA, 19 nt, Artificial Sequence
  Description of Artificial Sequence: Synthetic oligonucleotide
  Antisense strand to SEQ ID NO: 987858
acauucauggucuagaauc

SEQ ID NO: 987860 - RNA, 19 nt, Artificial Sequence
  Description of Artificial Sequence: Synthetic oligonucleotide
  Sense strand starting at position 3404 of SEQ ID NO: 914227
aauucccuggauugugaaa

SEQ ID NO: 987861 - RNA, 19 nt, Artificial Sequence
  Description of Artificial Sequence: Synthetic oligonucleotide
  Antisense strand to SEQ ID NO: 987860
uuucacaauccagggaauu

SEQ ID NO: 987862 - RNA, 19 nt, Artificial Sequence
  Description of Artificial Sequence: Synthetic oligonucleotide
  Sense strand starting at position 409 of SEQ ID NO: 914227
gugcuaaacccugagauac

SEQ ID NO: 987863 - RNA, 19 nt, Artificial Sequence
  Description of Artificial Sequence: Synthetic oligonucleotide
  Antisense strand to SEQ ID NO: 987862
guaucucaggguuuagcac

SEQ ID NO: 987864 - RNA, 19 nt, Artificial Sequence
  Description of Artificial Sequence: Synthetic oligonucleotide
  Sense strand starting at position 3150 of SEQ ID NO: 914227
ccaaucuggugauugauga

SEQ ID NO: 987865 - RNA, 19 nt, Artificial Sequence
  Description of Artificial Sequence: Synthetic oligonucleotide
  Antisense strand to SEQ ID NO: 987864
ucaucaaucaccagauugg

SEQ ID NO: 987866 - RNA, 19 nt, Artificial Sequence
  Description of Artificial Sequence: Synthetic oligonucleotide
  Sense strand starting at position 3293 of SEQ ID NO: 914227
gugggcauuguggagauaa

SEQ ID NO: 987867 - RNA, 19 nt, Artificial Sequence
  Description of Artificial Sequence: Synthetic oligonucleotide
  Antisense strand to SEQ ID NO: 987866
uuaucuccacaaugcccac

SEQ ID NO: 987868 - RNA, 19 nt, Artificial Sequence
  Description of Artificial Sequence: Synthetic oligonucleotide
  Sense strand starting at position 437 of SEQ ID NO: 914227
cucuaaauuucugccguaa

SEQ ID NO: 987869 - RNA, 19 nt, Artificial Sequence
  Description of Artificial Sequence: Synthetic oligonucleotide
  Antisense strand to SEQ ID NO: 987868
uuacggcagaaauuuagag

SEQ ID NO: 987870 - RNA, 19 nt, Artificial Sequence
  Description of Artificial Sequence: Synthetic oligonucleotide
  Sense strand starting at position 3551 of SEQ ID NO: 914227
gaaauugcuggauaagcga

SEQ ID NO: 987871 - RNA, 19 nt, Artificial Sequence
  Description of Artificial Sequence: Synthetic oligonucleotide
  Antisense strand to SEQ ID NO: 987870
ucgcuuauccagcaauuuc

SEQ ID NO: 987872 - RNA, 19 nt, Artificial Sequence
  Description of Artificial Sequence: Synthetic oligonucleotide
  Sense strand starting at position 316 of SEQ ID NO: 914227
gggaguaugaucugacucu

SEQ ID NO: 987873 - RNA, 19 nt, Artificial Sequence
  Description of Artificial Sequence: Synthetic oligonucleotide
  Antisense strand to SEQ ID NO: 987872
agagucagaucauacuccc

SEQ ID NO: 987874 - RNA, 19 nt, Artificial Sequence
  Description of Artificial Sequence: Synthetic oligonucleotide
  Sense strand starting at position 689 of SEQ ID NO: 914227
aaauguaggugaucuuuaa

SEQ ID NO: 987875 - RNA, 19 nt, Artificial Sequence
  Description of Artificial Sequence: Synthetic oligonucleotide
  Antisense strand to SEQ ID NO: 987874
uuaaagaucaccuacauuu

SEQ ID NO: 987876 - RNA, 19 nt, Artificial Sequence
  Description of Artificial Sequence: Synthetic oligonucleotide
  Sense strand starting at position 1204 of SEQ ID NO: 914227
gcgggacccauccaggauu

SEQ ID NO: 987877 - RNA, 19 nt, Artificial Sequence
  Description of Artificial Sequence: Synthetic oligonucleotide
  Antisense strand to SEQ ID NO: 987876
aauccuggaugggucccgc

SEQ ID NO: 987878 - RNA, 19 nt, Artificial Sequence
  Description of Artificial Sequence: Synthetic oligonucleotide
  Sense strand starting at position 3442 of SEQ ID NO: 914227
ugagaugaauguccucauu

SEQ ID NO: 987879 - RNA, 19 nt, Artificial Sequence
  Description of Artificial Sequence: Synthetic oligonucleotide
  Antisense strand to SEQ ID NO: 987878
aaugaggacauucaucuca

SEQ ID NO: 987880 - RNA, 19 nt, Artificial Sequence
  Description of Artificial Sequence: Synthetic oligonucleotide
  Sense strand starting at position 682 of SEQ ID NO: 914227
gcaguagaaauguagguga

SEQ ID NO: 987881 - RNA, 19 nt, Artificial Sequence
  Description of Artificial Sequence: Synthetic oligonucleotide
  Antisense strand to SEQ ID NO: 987880
ucaccuacauuucuacugc

SEQ ID NO: 987882 - RNA, 19 nt, Artificial Sequence
  Description of Artificial Sequence: Synthetic oligonucleotide
  Sense strand starting at position 3388 of SEQ ID NO: 914227
ugcuuaccugagcaagaau

SEQ ID NO: 987883 - RNA, 19 nt, Artificial Sequence
  Description of Artificial Sequence: Synthetic oligonucleotide
  Antisense strand to SEQ ID NO: 987882
auucuugcucagguaagca

SEQ ID NO: 987884 - RNA, 19 nt, Artificial Sequence
  Description of Artificial Sequence: Synthetic oligonucleotide
  Sense strand starting at position 3262 of SEQ ID NO: 914227
uaagaaacuuggucuggua

SEQ ID NO: 987885 - RNA, 19 nt, Artificial Sequence
  Description of Artificial Sequence: Synthetic oligonucleotide
  Antisense strand to SEQ ID NO: 987884
uaccagaccaaguuucuua

SEQ ID NO: 987886 - RNA, 19 nt, Artificial Sequence
  Description of Artificial Sequence: Synthetic oligonucleotide
  Sense strand starting at position 3400 of SEQ ID NO: 914227
caagaauucccuggauugu

SEQ ID NO: 987887 - RNA, 19 nt, Artificial Sequence
  Description of Artificial Sequence: Synthetic oligonucleotide
  Antisense strand to SEQ ID NO: 987886
acaauccagggaauucuug

SEQ ID NO: 987888 - RNA, 19 nt, Artificial Sequence
  Description of Artificial Sequence: Synthetic oligonucleotide
  Sense strand starting at position 381 of SEQ ID NO: 914227
aguaacaacuuacuaugua

SEQ ID NO: 987889 - RNA, 19 nt, Artificial Sequence
  Description of Artificial Sequence: Synthetic oligonucleotide
  Antisense strand to SEQ ID NO: 987888
uacauaguaaguuguuacu

SEQ ID NO: 987890 - RNA, 19 nt, Artificial Sequence
  Description of Artificial Sequence: Synthetic oligonucleotide
  Sense strand starting at position 509 of SEQ ID NO: 914227
ggaagaacuugcucaaggu

SEQ ID NO: 987891 - RNA, 19 nt, Artificial Sequence
  Description of Artificial Sequence: Synthetic oligonucleotide
  Antisense strand to SEQ ID NO: 987890
accuugagcaaguucuucc

SEQ ID NO: 987892 - RNA, 19 nt, Artificial Sequence
  Description of Artificial Sequence: Synthetic oligonucleotide
  Sense strand starting at position 3399 of SEQ ID NO: 914227
gcaagaauucccuggauug

SEQ ID NO: 987893 - RNA, 19 nt, Artificial Sequence
  Description of Artificial Sequence: Synthetic oligonucleotide
  Antisense strand to SEQ ID NO: 987892
caauccagggaauucuugc

SEQ ID NO: 987894 - RNA, 19 nt, Artificial Sequence
  Description of Artificial Sequence: Synthetic oligonucleotide
  Sense strand starting at position 1532 of SEQ ID NO: 914227
ggguacgcucgggaagaaa

SEQ ID NO: 987895 - RNA, 19 nt, Artificial Sequence
  Description of Artificial Sequence: Synthetic oligonucleotide
  Antisense strand to SEQ ID NO: 987894
uuucuucccgagcguaccc

SEQ ID NO: 987896 - RNA, 19 nt, Artificial Sequence
  Description of Artificial Sequence: Synthetic oligonucleotide
  Sense strand starting at position 2971 of SEQ ID NO: 914227
cguguaucugaugacauga

SEQ ID NO: 987897 - RNA, 19 nt, Artificial Sequence
  Description of Artificial Sequence: Synthetic oligonucleotide
  Antisense strand to SEQ ID NO: 987896
ucaugucaucagauacacg

SEQ ID NO: 987898 - RNA, 19 nt, Artificial Sequence
  Description of Artificial Sequence: Synthetic oligonucleotide
  Sense strand starting at position 684 of SEQ ID NO: 914227
aguagaaauguaggugauc

SEQ ID NO: 987899 - RNA, 19 nt, Artificial Sequence
  Description of Artificial Sequence: Synthetic oligonucleotide
  Antisense strand to SEQ ID NO: 987898
gaucaccuacauuucuacu

SEQ ID NO: 987900 - RNA, 19 nt, Artificial Sequence
  Description of Artificial Sequence: Synthetic oligonucleotide
  Sense strand starting at position 281 of SEQ ID NO: 914227
cauggaaagugauuagcuu

SEQ ID NO: 987901 - RNA, 19 nt, Artificial Sequence
  Description of Artificial Sequence: Synthetic oligonucleotide
  Antisense strand to SEQ ID NO: 987900
aagcuaaucacuuuccaug

SEQ ID NO: 987902 - RNA, 19 nt, Artificial Sequence
  Description of Artificial Sequence: Synthetic oligonucleotide
  Sense strand starting at position 408 of SEQ ID NO: 914227
ggugcuaaacccugagaua

SEQ ID NO: 987903 - RNA, 19 nt, Artificial Sequence
  Description of Artificial Sequence: Synthetic oligonucleotide
  Antisense strand to SEQ ID NO: 987902
uaucucaggguuuagcacc

SEQ ID NO: 987904 - RNA, 19 nt, Artificial Sequence
  Description of Artificial Sequence: Synthetic oligonucleotide
  Sense strand starting at position 506 of SEQ ID NO: 914227
guuggaagaacuugcucaa

SEQ ID NO: 987905 - RNA, 19 nt, Artificial Sequence
  Description of Artificial Sequence: Synthetic oligonucleotide
  Antisense strand to SEQ ID NO: 987904
uugagcaaguucuuccaac

SEQ ID NO: 987906 - RNA, 19 nt, Artificial Sequence
  Description of Artificial Sequence: Synthetic oligonucleotide
  Sense strand starting at position 3450 of SEQ ID NO: 914227
auguccucauuccuacaga

SEQ ID NO: 987907 - RNA, 19 nt, Artificial Sequence
  Description of Artificial Sequence: Synthetic oligonucleotide
  Antisense strand to SEQ ID NO: 987906
ucuguaggaaugaggacau

SEQ ID NO: 987908 - RNA, 19 nt, Artificial Sequence
  Description of Artificial Sequence: Synthetic oligonucleotide
  Sense strand starting at position 2963 of SEQ ID NO: 914227
cccugaaacguguaucuga

SEQ ID NO: 987909 - RNA, 19 nt, Artificial Sequence
  Description of Artificial Sequence: Synthetic oligonucleotide
  Antisense strand to SEQ ID NO: 987908
ucagauacacguuucaggg

SEQ ID NO: 987910 - RNA, 19 nt, Artificial Sequence
  Description of Artificial Sequence: Synthetic oligonucleotide
  Sense strand starting at position 3503 of SEQ ID NO: 914228
ccuacauaugggcauuaca

SEQ ID NO: 987911 - RNA, 19 nt, Artificial Sequence
  Description of Artificial Sequence: Synthetic oligonucleotide
  Antisense strand to SEQ ID NO: 987910
uguaaugcccauauguagg

SEQ ID NO: 987912 - RNA, 19 nt, Artificial Sequence
  Description of Artificial Sequence: Synthetic oligonucleotide
  Sense strand starting at position 247 of SEQ ID NO: 914228
agcagacacgaugauucua

SEQ ID NO: 987913 - RNA, 19 nt, Artificial Sequence
  Description of Artificial Sequence: Synthetic oligonucleotide
  Antisense strand to SEQ ID NO: 987912
uagaaucaucgugucugcu

SEQ ID NO: 987914 - RNA, 19 nt, Artificial Sequence
  Description of Artificial Sequence: Synthetic oligonucleotide
  Sense strand starting at position 2931 of SEQ ID NO: 914228
ggagauguuuaaucauuag

SEQ ID NO: 987915 - RNA, 19 nt, Artificial Sequence
  Description of Artificial Sequence: Synthetic oligonucleotide
  Antisense strand to SEQ ID NO: 987914
cuaaugauuaaacaucucc

SEQ ID NO: 987916 - RNA, 19 nt, Artificial Sequence
  Description of Artificial Sequence: Synthetic oligonucleotide
  Sense strand starting at position 491 of SEQ ID NO: 914228
gugauuuaucuacggccaa

SEQ ID NO: 987917 - RNA, 19 nt, Artificial Sequence
  Description of Artificial Sequence: Synthetic oligonucleotide
  Antisense strand to SEQ ID NO: 987916
uuggccguagauaaaucac

SEQ ID NO: 987918 - RNA, 19 nt, Artificial Sequence
  Description of Artificial Sequence: Synthetic oligonucleotide
  Sense strand starting at position 1411 of SEQ ID NO: 914228
uggauauaaucuguuggag

SEQ ID NO: 987919 - RNA, 19 nt, Artificial Sequence
  Description of Artificial Sequence: Synthetic oligonucleotide
  Antisense strand to SEQ ID NO: 987918
cuccaacagauuauaucca

SEQ ID NO: 987920 - RNA, 19 nt, Artificial Sequence
  Description of Artificial Sequence: Synthetic oligonucleotide
  Sense strand starting at position 90 of SEQ ID NO: 914228
agacaaugauguucuuaua

SEQ ID NO: 987921 - RNA, 19 nt, Artificial Sequence
  Description of Artificial Sequence: Synthetic oligonucleotide
  Antisense strand to SEQ ID NO: 987920
uauaagaacaucauugucu

SEQ ID NO: 987922 - RNA, 19 nt, Artificial Sequence
  Description of Artificial Sequence: Synthetic oligonucleotide
  Sense strand starting at position 1346 of SEQ ID NO: 914228
ugugaucauuugguauugu

SEQ ID NO: 987923 - RNA, 19 nt, Artificial Sequence
  Description of Artificial Sequence: Synthetic oligonucleotide
  Antisense strand to SEQ ID NO: 987922
acaauaccaaaugaucaca

SEQ ID NO: 987924 - RNA, 19 nt, Artificial Sequence
  Description of Artificial Sequence: Synthetic oligonucleotide
  Sense strand starting at position 2885 of SEQ ID NO: 914228
ggacgaagucucuagagua

SEQ ID NO: 987925 - RNA, 19 nt, Artificial Sequence
  Description of Artificial Sequence: Synthetic oligonucleotide
  Antisense strand to SEQ ID NO: 987924
uacucuagagacuucgucc

SEQ ID NO: 987926 - RNA, 19 nt, Artificial Sequence
  Description of Artificial Sequence: Synthetic oligonucleotide
  Sense strand starting at position 2733 of SEQ ID NO: 914228
agauacuugcagcaauuga

SEQ ID NO: 987927 - RNA, 19 nt, Artificial Sequence
  Description of Artificial Sequence: Synthetic oligonucleotide
  Antisense strand to SEQ ID NO: 987926
ucaauugcugcaaguaucu

SEQ ID NO: 987928 - RNA, 19 nt, Artificial Sequence
  Description of Artificial Sequence: Synthetic oligonucleotide
  Sense strand starting at position 479 of SEQ ID NO: 914228
guuuaauucugugugauuu

SEQ ID NO: 987929 - RNA, 19 nt, Artificial Sequence
  Description of Artificial Sequence: Synthetic oligonucleotide
  Antisense strand to SEQ ID NO: 987928
aaaucacacagaauuaaac

SEQ ID NO: 987930 - RNA, 19 nt, Artificial Sequence
  Description of Artificial Sequence: Synthetic oligonucleotide
  Sense strand starting at position 3562 of SEQ ID NO: 914228
agaggcaggccauauuauu

SEQ ID NO: 987931 - RNA, 19 nt, Artificial Sequence
  Description of Artificial Sequence: Synthetic oligonucleotide
  Antisense strand to SEQ ID NO: 987930
aauaauauggccugccucu

SEQ ID NO: 987932 - RNA, 19 nt, Artificial Sequence
  Description of Artificial Sequence: Synthetic oligonucleotide
  Sense strand starting at position 1410 of SEQ ID NO: 914228
uuggauauaaucuguugga

SEQ ID NO: 987933 - RNA, 19 nt, Artificial Sequence
  Description of Artificial Sequence: Synthetic oligonucleotide
  Antisense strand to SEQ ID NO: 987932
uccaacagauuauauccaa

SEQ ID NO: 987934 - RNA, 19 nt, Artificial Sequence
  Description of Artificial Sequence: Synthetic oligonucleotide
  Sense strand starting at position 3411 of SEQ ID NO: 914228
ccauuagauugccugagaa

SEQ ID NO: 987935 - RNA, 19 nt, Artificial Sequence
  Description of Artificial Sequence: Synthetic oligonucleotide
  Antisense strand to SEQ ID NO: 987934
uucucaggcaaucuaaugg

SEQ ID NO: 987936 - RNA, 19 nt, Artificial Sequence
  Description of Artificial Sequence: Synthetic oligonucleotide
  Sense strand starting at position 2935 of SEQ ID NO: 914228
auguuuaaucauuaggcau

SEQ ID NO: 987937 - RNA, 19 nt, Artificial Sequence
  Description of Artificial Sequence: Synthetic oligonucleotide
  Antisense strand to SEQ ID NO: 987936
augccuaaugauuaaacau

SEQ ID NO: 987938 - RNA, 19 nt, Artificial Sequence
  Description of Artificial Sequence: Synthetic oligonucleotide
  Sense strand starting at position 1398 of SEQ ID NO: 914228
auguccagaucuuuggaua

SEQ ID NO: 987939 - RNA, 19 nt, Artificial Sequence
  Description of Artificial Sequence: Synthetic oligonucleotide
  Antisense strand to SEQ ID NO: 987938
uauccaaagaucuggacau

SEQ ID NO: 987940 - RNA, 19 nt, Artificial Sequence
  Description of Artificial Sequence: Synthetic oligonucleotide
  Sense strand starting at position 866 of SEQ ID NO: 914228
cuacgacaaucuuugauac

SEQ ID NO: 987941 - RNA, 19 nt, Artificial Sequence
  Description of Artificial Sequence: Synthetic oligonucleotide
  Antisense strand to SEQ ID NO: 987940
guaucaaagauugucguag

SEQ ID NO: 987942 - RNA, 19 nt, Artificial Sequence
  Description of Artificial Sequence: Synthetic oligonucleotide
  Sense strand starting at position 976 of SEQ ID NO: 914228
ugucucccucaggaguaau

SEQ ID NO: 987943 - RNA, 19 nt, Artificial Sequence
  Description of Artificial Sequence: Synthetic oligonucleotide
  Antisense strand to SEQ ID NO: 987942
auuacuccugagggagaca

SEQ ID NO: 987944 - RNA, 19 nt, Artificial Sequence
  Description of Artificial Sequence: Synthetic oligonucleotide
  Sense strand starting at position 973 of SEQ ID NO: 914228
uaaugucucccucaggagu

SEQ ID NO: 987945 - RNA, 19 nt, Artificial Sequence
  Description of Artificial Sequence: Synthetic oligonucleotide
  Antisense strand to SEQ ID NO: 987944
acuccugagggagacauua

SEQ ID NO: 987946 - RNA, 19 nt, Artificial Sequence
  Description of Artificial Sequence: Synthetic oligonucleotide
  Sense strand starting at position 3410 of SEQ ID NO: 914228
cccauuagauugccugaga

SEQ ID NO: 987947 - RNA, 19 nt, Artificial Sequence
  Description of Artificial Sequence: Synthetic oligonucleotide
  Antisense strand to SEQ ID NO: 987946
ucucaggcaaucuaauggg

SEQ ID NO: 987948 - RNA, 19 nt, Artificial Sequence
  Description of Artificial Sequence: Synthetic oligonucleotide
  Sense strand starting at position 1399 of SEQ ID NO: 914228
uguccagaucuuuggauau

SEQ ID NO: 987949 - RNA, 19 nt, Artificial Sequence
  Description of Artificial Sequence: Synthetic oligonucleotide
  Antisense strand to SEQ ID NO: 987948
auauccaaagaucuggaca

SEQ ID NO: 987950 - RNA, 19 nt, Artificial Sequence
  Description of Artificial Sequence: Synthetic oligonucleotide
  Sense strand starting at position 1585 of SEQ ID NO: 914228
agaauucuugagugcugaa

SEQ ID NO: 987951 - RNA, 19 nt, Artificial Sequence
  Description of Artificial Sequence: Synthetic oligonucleotide
  Antisense strand to SEQ ID NO: 987950
uucagcacucaagaauucu

SEQ ID NO: 987952 - RNA, 19 nt, Artificial Sequence
  Description of Artificial Sequence: Synthetic oligonucleotide
  Sense strand starting at position 971 of SEQ ID NO: 914228
ucuaaugucucccucagga

SEQ ID NO: 987953 - RNA, 19 nt, Artificial Sequence
  Description of Artificial Sequence: Synthetic oligonucleotide
  Antisense strand to SEQ ID NO: 987952
uccugagggagacauuaga

SEQ ID NO: 987954 - RNA, 19 nt, Artificial Sequence
  Description of Artificial Sequence: Synthetic oligonucleotide
  Sense strand starting at position 2934 of SEQ ID NO: 914228
gauguuuaaucauuaggca

SEQ ID NO: 987955 - RNA, 19 nt, Artificial Sequence
  Description of Artificial Sequence: Synthetic oligonucleotide
  Antisense strand to SEQ ID NO: 987954
ugccuaaugauuaaacauc

SEQ ID NO: 987956 - RNA, 19 nt, Artificial Sequence
  Description of Artificial Sequence: Synthetic oligonucleotide
  Sense strand starting at position 1584 of SEQ ID NO: 914228
cagaauucuugagugcuga

SEQ ID NO: 987957 - RNA, 19 nt, Artificial Sequence
  Description of Artificial Sequence: Synthetic oligonucleotide
  Antisense strand to SEQ ID NO: 987956
ucagcacucaagaauucug

SEQ ID NO: 987958 - RNA, 19 nt, Artificial Sequence
  Description of Artificial Sequence: Synthetic oligonucleotide
  Sense strand starting at position 296 of SEQ ID NO: 914228
ccagaauccgcauauguug

SEQ ID NO: 987959 - RNA, 19 nt, Artificial Sequence
  Description of Artificial Sequence: Synthetic oligonucleotide
  Antisense strand to SEQ ID NO: 987958
caacauaugcggauucugg

SEQ ID NO: 987960 - RNA, 19 nt, Artificial Sequence
  Description of Artificial Sequence: Synthetic oligonucleotide
  Sense strand starting at position 1582 of SEQ ID NO: 914228
ggcagaauucuugagugcu

SEQ ID NO: 987961 - RNA, 19 nt, Artificial Sequence
  Description of Artificial Sequence: Synthetic oligonucleotide
  Antisense strand to SEQ ID NO: 987960
agcacucaagaauucugcc

SEQ ID NO: 987962 - RNA, 19 nt, Artificial Sequence
  Description of Artificial Sequence: Synthetic oligonucleotide
  Sense strand starting at position 375 of SEQ ID NO: 914228
aucacaguuccaugcacau

SEQ ID NO: 987963 - RNA, 19 nt, Artificial Sequence
  Description of Artificial Sequence: Synthetic oligonucleotide
  Antisense strand to SEQ ID NO: 987962
augugcauggaacugugau

SEQ ID NO: 987964 - RNA, 19 nt, Artificial Sequence
  Description of Artificial Sequence: Synthetic oligonucleotide
  Sense strand starting at position 3778 of SEQ ID NO: 914228
aaguacaggcauuguguaa

SEQ ID NO: 987965 - RNA, 19 nt, Artificial Sequence
  Description of Artificial Sequence: Synthetic oligonucleotide
  Antisense strand to SEQ ID NO: 987964
uuacacaaugccuguacuu

SEQ ID NO: 987966 - RNA, 19 nt, Artificial Sequence
  Description of Artificial Sequence: Synthetic oligonucleotide
  Sense strand starting at position 876 of SEQ ID NO: 914228
cuuugauacuaacaggaaa

SEQ ID NO: 987967 - RNA, 19 nt, Artificial Sequence
  Description of Artificial Sequence: Synthetic oligonucleotide
  Antisense strand to SEQ ID NO: 987966
uuuccuguuaguaucaaag

SEQ ID NO: 987968 - RNA, 19 nt, Artificial Sequence
  Description of Artificial Sequence: Synthetic oligonucleotide
  Sense strand starting at position 2647 of SEQ ID NO: 914228
acaguuaaagugcguuaaa

SEQ ID NO: 987969 - RNA, 19 nt, Artificial Sequence
  Description of Artificial Sequence: Synthetic oligonucleotide
  Antisense strand to SEQ ID NO: 987968
uuuaacgcacuuuaacugu

SEQ ID NO: 987970 - RNA, 19 nt, Artificial Sequence
  Description of Artificial Sequence: Synthetic oligonucleotide
  Sense strand starting at position 477 of SEQ ID NO: 914228
cuguuuaauucugugugau

SEQ ID NO: 987971 - RNA, 19 nt, Artificial Sequence
  Description of Artificial Sequence: Synthetic oligonucleotide
  Antisense strand to SEQ ID NO: 987970
aucacacagaauuaaacag

SEQ ID NO: 987972 - RNA, 19 nt, Artificial Sequence
  Description of Artificial Sequence: Synthetic oligonucleotide
  Sense strand starting at position 1005 of SEQ ID NO: 914228
ucuguacaucaguggcauu

SEQ ID NO: 987973 - RNA, 19 nt, Artificial Sequence
  Description of Artificial Sequence: Synthetic oligonucleotide
  Antisense strand to SEQ ID NO: 987972
aaugccacugauguacaga

SEQ ID NO: 987974 - RNA, 19 nt, Artificial Sequence
  Description of Artificial Sequence: Synthetic oligonucleotide
  Sense strand starting at position 478 of SEQ ID NO: 914228
uguuuaauucugugugauu

SEQ ID NO: 987975 - RNA, 19 nt, Artificial Sequence
  Description of Artificial Sequence: Synthetic oligonucleotide
  Antisense strand to SEQ ID NO: 987974
aaucacacagaauuaaaca

SEQ ID NO: 987976 - RNA, 19 nt, Artificial Sequence
  Description of Artificial Sequence: Synthetic oligonucleotide
  Sense strand starting at position 847 of SEQ ID NO: 914228
gaguucgucccuuaugcau

SEQ ID NO: 987977 - RNA, 19 nt, Artificial Sequence
  Description of Artificial Sequence: Synthetic oligonucleotide
  Antisense strand to SEQ ID NO: 987976
augcauaagggacgaacuc

SEQ ID NO: 987978 - RNA, 19 nt, Artificial Sequence
  Description of Artificial Sequence: Synthetic oligonucleotide
  Sense strand starting at position 1415 of SEQ ID NO: 914228
uauaaucuguuggagaaag

SEQ ID NO: 987979 - RNA, 19 nt, Artificial Sequence
  Description of Artificial Sequence: Synthetic oligonucleotide
  Antisense strand to SEQ ID NO: 987978
cuuucuccaacagauuaua

SEQ ID NO: 987980 - RNA, 19 nt, Artificial Sequence
  Description of Artificial Sequence: Synthetic oligonucleotide
  Sense strand starting at position 2784 of SEQ ID NO: 914228
augaauuagugugaaagag

SEQ ID NO: 987981 - RNA, 19 nt, Artificial Sequence
  Description of Artificial Sequence: Synthetic oligonucleotide
  Antisense strand to SEQ ID NO: 987980
cucuuucacacuaauucau

SEQ ID NO: 987982 - RNA, 19 nt, Artificial Sequence
  Description of Artificial Sequence: Synthetic oligonucleotide
  Sense strand starting at position 252 of SEQ ID NO: 914228
acacgaugauucuaaauca

SEQ ID NO: 987983 - RNA, 19 nt, Artificial Sequence
  Description of Artificial Sequence: Synthetic oligonucleotide
  Antisense strand to SEQ ID NO: 987982
ugauuuagaaucaucgugu

SEQ ID NO: 987984 - RNA, 19 nt, Artificial Sequence
  Description of Artificial Sequence: Synthetic oligonucleotide
  Sense strand starting at position 1345 of SEQ ID NO: 914228
augugaucauuugguauug

SEQ ID NO: 987985 - RNA, 19 nt, Artificial Sequence
  Description of Artificial Sequence: Synthetic oligonucleotide
  Antisense strand to SEQ ID NO: 987984
caauaccaaaugaucacau

SEQ ID NO: 987986 - RNA, 19 nt, Artificial Sequence
  Description of Artificial Sequence: Synthetic oligonucleotide
  Sense strand starting at position 757 of SEQ ID NO: 914228
cugauaagauuacauugua

SEQ ID NO: 987987 - RNA, 19 nt, Artificial Sequence
  Description of Artificial Sequence: Synthetic oligonucleotide
  Antisense strand to SEQ ID NO: 987986
uacaauguaaucuuaucag

SEQ ID NO: 987988 - RNA, 19 nt, Artificial Sequence
  Description of Artificial Sequence: Synthetic oligonucleotide
  Sense strand starting at position 492 of SEQ ID NO: 914228
ugauuuaucuacggccaaa

SEQ ID NO: 987989 - RNA, 19 nt, Artificial Sequence
  Description of Artificial Sequence: Synthetic oligonucleotide
  Antisense strand to SEQ ID NO: 987988
uuuggccguagauaaauca

SEQ ID NO: 987990 - RNA, 19 nt, Artificial Sequence
  Description of Artificial Sequence: Synthetic oligonucleotide
  Sense strand starting at position 3833 of SEQ ID NO: 914229
cuuagaagacuuugaaucu

SEQ ID NO: 987991 - RNA, 19 nt, Artificial Sequence
  Description of Artificial Sequence: Synthetic oligonucleotide
  Antisense strand to SEQ ID NO: 987990
agauucaaagucuucuaag

SEQ ID NO: 987992 - RNA, 19 nt, Artificial Sequence
  Description of Artificial Sequence: Synthetic oligonucleotide
  Sense strand starting at position 2729 of SEQ ID NO: 914229
ucaauccucccgugauuua

SEQ ID NO: 987993 - RNA, 19 nt, Artificial Sequence
  Description of Artificial Sequence: Synthetic oligonucleotide
  Antisense strand to SEQ ID NO: 987992
uaaaucacgggaggauuga

SEQ ID NO: 987994 - RNA, 19 nt, Artificial Sequence
  Description of Artificial Sequence: Synthetic oligonucleotide
  Sense strand starting at position 2699 of SEQ ID NO: 914229
cgcaaucaaucaguuauuu

SEQ ID NO: 987995 - RNA, 19 nt, Artificial Sequence
  Description of Artificial Sequence: Synthetic oligonucleotide
  Antisense strand to SEQ ID NO: 987994
aaauaacugauugauugcg

SEQ ID NO: 987996 - RNA, 19 nt, Artificial Sequence
  Description of Artificial Sequence: Synthetic oligonucleotide
  Sense strand starting at position 3467 of SEQ ID NO: 914229
ggcugcucucucgaauuua

SEQ ID NO: 987997 - RNA, 19 nt, Artificial Sequence
  Description of Artificial Sequence: Synthetic oligonucleotide
  Antisense strand to SEQ ID NO: 987996
uaaauucgagagagcagcc

SEQ ID NO: 987998 - RNA, 19 nt, Artificial Sequence
  Description of Artificial Sequence: Synthetic oligonucleotide
  Sense strand starting at position 2414 of SEQ ID NO: 914229
ccgcucuaauuuccucaga

SEQ ID NO: 987999 - RNA, 19 nt, Artificial Sequence
  Description of Artificial Sequence: Synthetic oligonucleotide
  Antisense strand to SEQ ID NO: 987998
ucugaggaaauuagagcgg

SEQ ID NO: 988000 - RNA, 19 nt, Artificial Sequence
  Description of Artificial Sequence: Synthetic oligonucleotide
  Sense strand starting at position 2415 of SEQ ID NO: 914229
cgcucuaauuuccucagau

SEQ ID NO: 988001 - RNA, 19 nt, Artificial Sequence
  Description of Artificial Sequence: Synthetic oligonucleotide
  Antisense strand to SEQ ID NO: 988000
aucugaggaaauuagagcg

SEQ ID NO: 988002 - RNA, 19 nt, Artificial Sequence
  Description of Artificial Sequence: Synthetic oligonucleotide
  Sense strand starting at position 899 of SEQ ID NO: 914229
cgacuuuggaaccguauuu

SEQ ID NO: 988003 - RNA, 19 nt, Artificial Sequence
  Description of Artificial Sequence: Synthetic oligonucleotide
  Antisense strand to SEQ ID NO: 988002
aaauacgguuccaaagucg

SEQ ID NO: 988004 - RNA, 19 nt, Artificial Sequence
  Description of Artificial Sequence: Synthetic oligonucleotide
  Sense strand starting at position 1172 of SEQ ID NO: 914229
gguaguggucccagugcga

SEQ ID NO: 988005 - RNA, 19 nt, Artificial Sequence
  Description of Artificial Sequence: Synthetic oligonucleotide
  Antisense strand to SEQ ID NO: 988004
ucgcacugggaccacuacc

SEQ ID NO: 988006 - RNA, 19 nt, Artificial Sequence
  Description of Artificial Sequence: Synthetic oligonucleotide
  Sense strand starting at position 258 of SEQ ID NO: 914229
uggaguacggcuugaaacu

SEQ ID NO: 988007 - RNA, 19 nt, Artificial Sequence
  Description of Artificial Sequence: Synthetic oligonucleotide
  Antisense strand to SEQ ID NO: 988006
aguuucaagccguacucca

SEQ ID NO: 988008 - RNA, 19 nt, Artificial Sequence
  Description of Artificial Sequence: Synthetic oligonucleotide
  Sense strand starting at position 166 of SEQ ID NO: 914229
cgacuucuccgacgaaaca

SEQ ID NO: 988009 - RNA, 19 nt, Artificial Sequence
  Description of Artificial Sequence: Synthetic oligonucleotide
  Antisense strand to SEQ ID NO: 988008
uguuucgucggagaagucg

SEQ ID NO: 988010 - RNA, 19 nt, Artificial Sequence
  Description of Artificial Sequence: Synthetic oligonucleotide
  Sense strand starting at position 163 of SEQ ID NO: 914229
ucccgacuucuccgacgaa

SEQ ID NO: 988011 - RNA, 19 nt, Artificial Sequence
  Description of Artificial Sequence: Synthetic oligonucleotide
  Antisense strand to SEQ ID NO: 988010
uucgucggagaagucggga

SEQ ID NO: 988012 - RNA, 19 nt, Artificial Sequence
  Description of Artificial Sequence: Synthetic oligonucleotide
  Sense strand starting at position 2568 of SEQ ID NO: 914229
ucacauguuuccucuguuu

SEQ ID NO: 988013 - RNA, 19 nt, Artificial Sequence
  Description of Artificial Sequence: Synthetic oligonucleotide
  Antisense strand to SEQ ID NO: 988012
aaacagaggaaacauguga

SEQ ID NO: 988014 - RNA, 19 nt, Artificial Sequence
  Description of Artificial Sequence: Synthetic oligonucleotide
  Sense strand starting at position 434 of SEQ ID NO: 914229
gaacauguuugcgccaaca

SEQ ID NO: 988015 - RNA, 19 nt, Artificial Sequence
  Description of Artificial Sequence: Synthetic oligonucleotide
  Antisense strand to SEQ ID NO: 988014
uguuggcgcaaacauguuc

SEQ ID NO: 988016 - RNA, 19 nt, Artificial Sequence
  Description of Artificial Sequence: Synthetic oligonucleotide
  Sense strand starting at position 650 of SEQ ID NO: 914229
cauucucgccguugggaaa

SEQ ID NO: 988017 - RNA, 19 nt, Artificial Sequence
  Description of Artificial Sequence: Synthetic oligonucleotide
  Antisense strand to SEQ ID NO: 988016
uuucccaacggcgagaaug

SEQ ID NO: 988018 - RNA, 19 nt, Artificial Sequence
  Description of Artificial Sequence: Synthetic oligonucleotide
  Sense strand starting at position 2567 of SEQ ID NO: 914229
gucacauguuuccucuguu

SEQ ID NO: 988019 - RNA, 19 nt, Artificial Sequence
  Description of Artificial Sequence: Synthetic oligonucleotide
  Antisense strand to SEQ ID NO: 988018
aacagaggaaacaugugac

SEQ ID NO: 988020 - RNA, 19 nt, Artificial Sequence
  Description of Artificial Sequence: Synthetic oligonucleotide
  Sense strand starting at position 3569 of SEQ ID NO: 914229
gcggguucuuccagggaag

SEQ ID NO: 988021 - RNA, 19 nt, Artificial Sequence
  Description of Artificial Sequence: Synthetic oligonucleotide
  Antisense strand to SEQ ID NO: 988020
cuucccuggaagaacccgc

SEQ ID NO: 988022 - RNA, 19 nt, Artificial Sequence
  Description of Artificial Sequence: Synthetic oligonucleotide
  Sense strand starting at position 2708 of SEQ ID NO: 914229
ucaguuauuugucagcucu

SEQ ID NO: 988023 - RNA, 19 nt, Artificial Sequence
  Description of Artificial Sequence: Synthetic oligonucleotide
  Antisense strand to SEQ ID NO: 988022
agagcugacaaauaacuga

SEQ ID NO: 988024 - RNA, 19 nt, Artificial Sequence
  Description of Artificial Sequence: Synthetic oligonucleotide
  Sense strand starting at position 3630 of SEQ ID NO: 914229
cggguuguuugggaagaaa

SEQ ID NO: 988025 - RNA, 19 nt, Artificial Sequence
  Description of Artificial Sequence: Synthetic oligonucleotide
  Antisense strand to SEQ ID NO: 988024
uuucuucccaaacaacccg

SEQ ID NO: 988026 - RNA, 19 nt, Artificial Sequence
  Description of Artificial Sequence: Synthetic oligonucleotide
  Sense strand starting at position 115 of SEQ ID NO: 914229
gccuguccugggcgugaau

SEQ ID NO: 988027 - RNA, 19 nt, Artificial Sequence
  Description of Artificial Sequence: Synthetic oligonucleotide
  Antisense strand to SEQ ID NO: 988026
auucacgcccaggacaggc

SEQ ID NO: 988028 - RNA, 19 nt, Artificial Sequence
  Description of Artificial Sequence: Synthetic oligonucleotide
  Sense strand starting at position 2739 of SEQ ID NO: 914229
cgugauuuaugucagcuuu

SEQ ID NO: 988029 - RNA, 19 nt, Artificial Sequence
  Description of Artificial Sequence: Synthetic oligonucleotide
  Antisense strand to SEQ ID NO: 988028
aaagcugacauaaaucacg

SEQ ID NO: 988030 - RNA, 19 nt, Artificial Sequence
  Description of Artificial Sequence: Synthetic oligonucleotide
  Sense strand starting at position 2673 of SEQ ID NO: 914229
uccaucaauugucaauguu

SEQ ID NO: 988031 - RNA, 19 nt, Artificial Sequence
  Description of Artificial Sequence: Synthetic oligonucleotide
  Antisense strand to SEQ ID NO: 988030
aacauugacaauugaugga

SEQ ID NO: 988032 - RNA, 19 nt, Artificial Sequence
  Description of Artificial Sequence: Synthetic oligonucleotide
  Sense strand starting at position 969 of SEQ ID NO: 914229
gggcuuucauaucgaaagg

SEQ ID NO: 988033 - RNA, 19 nt, Artificial Sequence
  Description of Artificial Sequence: Synthetic oligonucleotide
  Antisense strand to SEQ ID NO: 988032
ccuuucgauaugaaagccc

SEQ ID NO: 988034 - RNA, 19 nt, Artificial Sequence
  Description of Artificial Sequence: Synthetic oligonucleotide
  Sense strand starting at position 164 of SEQ ID NO: 914229
cccgacuucuccgacgaaa

SEQ ID NO: 988035 - RNA, 19 nt, Artificial Sequence
  Description of Artificial Sequence: Synthetic oligonucleotide
  Antisense strand to SEQ ID NO: 988034
uuucgucggagaagucggg

SEQ ID NO: 988036 - RNA, 19 nt, Artificial Sequence
  Description of Artificial Sequence: Synthetic oligonucleotide
  Sense strand starting at position 3629 of SEQ ID NO: 914229
ucggguuguuugggaagaa

SEQ ID NO: 988037 - RNA, 19 nt, Artificial Sequence
  Description of Artificial Sequence: Synthetic oligonucleotide
  Antisense strand to SEQ ID NO: 988036
uucuucccaaacaacccga

SEQ ID NO: 988038 - RNA, 19 nt, Artificial Sequence
  Description of Artificial Sequence: Synthetic oligonucleotide
  Sense strand starting at position 1487 of SEQ ID NO: 914229
acugcuucuuagggcagaa

SEQ ID NO: 988039 - RNA, 19 nt, Artificial Sequence
  Description of Artificial Sequence: Synthetic oligonucleotide
  Antisense strand to SEQ ID NO: 988038
uucugcccuaagaagcagu

SEQ ID NO: 988040 - RNA, 19 nt, Artificial Sequence
  Description of Artificial Sequence: Synthetic oligonucleotide
  Sense strand starting at position 3628 of SEQ ID NO: 914229
cucggguuguuugggaaga

SEQ ID NO: 988041 - RNA, 19 nt, Artificial Sequence
  Description of Artificial Sequence: Synthetic oligonucleotide
  Antisense strand to SEQ ID NO: 988040
ucuucccaaacaacccgag

SEQ ID NO: 988042 - RNA, 19 nt, Artificial Sequence
  Description of Artificial Sequence: Synthetic oligonucleotide
  Sense strand starting at position 2727 of SEQ ID NO: 914229
ugucaauccucccgugauu

SEQ ID NO: 988043 - RNA, 19 nt, Artificial Sequence
  Description of Artificial Sequence: Synthetic oligonucleotide
  Antisense strand to SEQ ID NO: 988042
aaucacgggaggauugaca

SEQ ID NO: 988044 - RNA, 19 nt, Artificial Sequence
  Description of Artificial Sequence: Synthetic oligonucleotide
  Sense strand starting at position 2715 of SEQ ID NO: 914229
uuugucagcucuugucaau

SEQ ID NO: 988045 - RNA, 19 nt, Artificial Sequence
  Description of Artificial Sequence: Synthetic oligonucleotide
  Antisense strand to SEQ ID NO: 988044
auugacaagagcugacaaa

SEQ ID NO: 988046 - RNA, 19 nt, Artificial Sequence
  Description of Artificial Sequence: Synthetic oligonucleotide
  Sense strand starting at position 557 of SEQ ID NO: 914230
cuaugcauuccggcuaguu

SEQ ID NO: 988047 - RNA, 19 nt, Artificial Sequence
  Description of Artificial Sequence: Synthetic oligonucleotide
  Antisense strand to SEQ ID NO: 988046
aacuagccggaaugcauag

SEQ ID NO: 988048 - RNA, 19 nt, Artificial Sequence
  Description of Artificial Sequence: Synthetic oligonucleotide
  Sense strand starting at position 1218 of SEQ ID NO: 914230
cuuugagacguccaauaaa

SEQ ID NO: 988049 - RNA, 19 nt, Artificial Sequence
  Description of Artificial Sequence: Synthetic oligonucleotide
  Antisense strand to SEQ ID NO: 988048
uuuauuggacgucucaaag

SEQ ID NO: 988050 - RNA, 19 nt, Artificial Sequence
  Description of Artificial Sequence: Synthetic oligonucleotide
  Sense strand starting at position 3867 of SEQ ID NO: 914230
cgcccuugcccucuaagua

SEQ ID NO: 988051 - RNA, 19 nt, Artificial Sequence
  Description of Artificial Sequence: Synthetic oligonucleotide
  Antisense strand to SEQ ID NO: 988050
uacuuagagggcaagggcg

SEQ ID NO: 988052 - RNA, 19 nt, Artificial Sequence
  Description of Artificial Sequence: Synthetic oligonucleotide
  Sense strand starting at position 2703 of SEQ ID NO: 914230
aguaaagagucaccuaauu

SEQ ID NO: 988053 - RNA, 19 nt, Artificial Sequence
  Description of Artificial Sequence: Synthetic oligonucleotide
  Antisense strand to SEQ ID NO: 988052
aauuaggugacucuuuacu

SEQ ID NO: 988054 - RNA, 19 nt, Artificial Sequence
  Description of Artificial Sequence: Synthetic oligonucleotide
  Sense strand starting at position 2901 of SEQ ID NO: 914230
gcugccucagcguuccaaa

SEQ ID NO: 988055 - RNA, 19 nt, Artificial Sequence
  Description of Artificial Sequence: Synthetic oligonucleotide
  Antisense strand to SEQ ID NO: 988054
uuuggaacgcugaggcagc

SEQ ID NO: 988056 - RNA, 19 nt, Artificial Sequence
  Description of Artificial Sequence: Synthetic oligonucleotide
  Sense strand starting at position 2863 of SEQ ID NO: 914230
aucgcugcggccucaaauu

SEQ ID NO: 988057 - RNA, 19 nt, Artificial Sequence
  Description of Artificial Sequence: Synthetic oligonucleotide
  Antisense strand to SEQ ID NO: 988056
aauuugaggccgcagcgau

SEQ ID NO: 988058 - RNA, 19 nt, Artificial Sequence
  Description of Artificial Sequence: Synthetic oligonucleotide
  Sense strand starting at position 112 of SEQ ID NO: 914230
aagauuguuccuggaagua

SEQ ID NO: 988059 - RNA, 19 nt, Artificial Sequence
  Description of Artificial Sequence: Synthetic oligonucleotide
  Antisense strand to SEQ ID NO: 988058
uacuuccaggaacaaucuu

SEQ ID NO: 988060 - RNA, 19 nt, Artificial Sequence
  Description of Artificial Sequence: Synthetic oligonucleotide
  Sense strand starting at position 3839 of SEQ ID NO: 914230
gacagcucuguugaugauu

SEQ ID NO: 988061 - RNA, 19 nt, Artificial Sequence
  Description of Artificial Sequence: Synthetic oligonucleotide
  Antisense strand to SEQ ID NO: 988060
aaucaucaacagagcuguc

SEQ ID NO: 988062 - RNA, 19 nt, Artificial Sequence
  Description of Artificial Sequence: Synthetic oligonucleotide
  Sense strand starting at position 3786 of SEQ ID NO: 914230
cuagauguuccucagagcu

SEQ ID NO: 988063 - RNA, 19 nt, Artificial Sequence
  Description of Artificial Sequence: Synthetic oligonucleotide
  Antisense strand to SEQ ID NO: 988062
agcucugaggaacaucuag

SEQ ID NO: 988064 - RNA, 19 nt, Artificial Sequence
  Description of Artificial Sequence: Synthetic oligonucleotide
  Sense strand starting at position 2846 of SEQ ID NO: 914230
gcgaucauagcugauagau

SEQ ID NO: 988065 - RNA, 19 nt, Artificial Sequence
  Description of Artificial Sequence: Synthetic oligonucleotide
  Antisense strand to SEQ ID NO: 988064
aucuaucagcuaugaucgc

SEQ ID NO: 988066 - RNA, 19 nt, Artificial Sequence
  Description of Artificial Sequence: Synthetic oligonucleotide
  Sense strand starting at position 2444 of SEQ ID NO: 914230
ggaucuuguucccucuaaa

SEQ ID NO: 988067 - RNA, 19 nt, Artificial Sequence
  Description of Artificial Sequence: Synthetic oligonucleotide
  Antisense strand to SEQ ID NO: 988066
uuuagagggaacaagaucc

SEQ ID NO: 988068 - RNA, 19 nt, Artificial Sequence
  Description of Artificial Sequence: Synthetic oligonucleotide
  Sense strand starting at position 2980 of SEQ ID NO: 914230
acacaaauaucucuguguu

SEQ ID NO: 988069 - RNA, 19 nt, Artificial Sequence
  Description of Artificial Sequence: Synthetic oligonucleotide
  Antisense strand to SEQ ID NO: 988068
aacacagagauauuugugu

SEQ ID NO: 988070 - RNA, 19 nt, Artificial Sequence
  Description of Artificial Sequence: Synthetic oligonucleotide
  Sense strand starting at position 2982 of SEQ ID NO: 914230
acaaauaucucuguguuac

SEQ ID NO: 988071 - RNA, 19 nt, Artificial Sequence
  Description of Artificial Sequence: Synthetic oligonucleotide
  Antisense strand to SEQ ID NO: 988070
guaacacagagauauuugu

SEQ ID NO: 988072 - RNA, 19 nt, Artificial Sequence
  Description of Artificial Sequence: Synthetic oligonucleotide
  Sense strand starting at position 2443 of SEQ ID NO: 914230
uggaucuuguucccucuaa

SEQ ID NO: 988073 - RNA, 19 nt, Artificial Sequence
  Description of Artificial Sequence: Synthetic oligonucleotide
  Antisense strand to SEQ ID NO: 988072
uuagagggaacaagaucca

SEQ ID NO: 988074 - RNA, 19 nt, Artificial Sequence
  Description of Artificial Sequence: Synthetic oligonucleotide
  Sense strand starting at position 124 of SEQ ID NO: 914230
ggaaguauuucccagagug

SEQ ID NO: 988075 - RNA, 19 nt, Artificial Sequence
  Description of Artificial Sequence: Synthetic oligonucleotide
  Antisense strand to SEQ ID NO: 988074
cacucugggaaauacuucc

SEQ ID NO: 988076 - RNA, 19 nt, Artificial Sequence
  Description of Artificial Sequence: Synthetic oligonucleotide
  Sense strand starting at position 3695 of SEQ ID NO: 914230
caguuugugugauuaauag

SEQ ID NO: 988077 - RNA, 19 nt, Artificial Sequence
  Description of Artificial Sequence: Synthetic oligonucleotide
  Antisense strand to SEQ ID NO: 988076
cuauuaaucacacaaacug

SEQ ID NO: 988078 - RNA, 19 nt, Artificial Sequence
  Description of Artificial Sequence: Synthetic oligonucleotide
  Sense strand starting at position 3365 of SEQ ID NO: 914230
ccaggcauuucucagaaug

SEQ ID NO: 988079 - RNA, 19 nt, Artificial Sequence
  Description of Artificial Sequence: Synthetic oligonucleotide
  Antisense strand to SEQ ID NO: 988078
cauucugagaaaugccugg

SEQ ID NO: 988080 - RNA, 19 nt, Artificial Sequence
  Description of Artificial Sequence: Synthetic oligonucleotide
  Sense strand starting at position 3918 of SEQ ID NO: 914230
agaguugcccuaggacuuu

SEQ ID NO: 988081 - RNA, 19 nt, Artificial Sequence
  Description of Artificial Sequence: Synthetic oligonucleotide
  Antisense strand to SEQ ID NO: 988080
aaaguccuagggcaacucu

SEQ ID NO: 988082 - RNA, 19 nt, Artificial Sequence
  Description of Artificial Sequence: Synthetic oligonucleotide
  Sense strand starting at position 541 of SEQ ID NO: 914230
uaauaagucugaccgucua

SEQ ID NO: 988083 - RNA, 19 nt, Artificial Sequence
  Description of Artificial Sequence: Synthetic oligonucleotide
  Antisense strand to SEQ ID NO: 988082
uagacggucagacuuauua

SEQ ID NO: 988084 - RNA, 19 nt, Artificial Sequence
  Description of Artificial Sequence: Synthetic oligonucleotide
  Sense strand starting at position 3844 of SEQ ID NO: 914230
cucuguugaugauuagcau

SEQ ID NO: 988085 - RNA, 19 nt, Artificial Sequence
  Description of Artificial Sequence: Synthetic oligonucleotide
  Antisense strand to SEQ ID NO: 988084
augcuaaucaucaacagag

SEQ ID NO: 988086 - RNA, 19 nt, Artificial Sequence
  Description of Artificial Sequence: Synthetic oligonucleotide
  Sense strand starting at position 2845 of SEQ ID NO: 914230
ugcgaucauagcugauaga

SEQ ID NO: 988087 - RNA, 19 nt, Artificial Sequence
  Description of Artificial Sequence: Synthetic oligonucleotide
  Antisense strand to SEQ ID NO: 988086
ucuaucagcuaugaucgca

SEQ ID NO: 988088 - RNA, 19 nt, Artificial Sequence
  Description of Artificial Sequence: Synthetic oligonucleotide
  Sense strand starting at position 2530 of SEQ ID NO: 914230
gugacuucccguuacuuua

SEQ ID NO: 988089 - RNA, 19 nt, Artificial Sequence
  Description of Artificial Sequence: Synthetic oligonucleotide
  Antisense strand to SEQ ID NO: 988088
uaaaguaacgggaagucac

SEQ ID NO: 988090 - RNA, 19 nt, Artificial Sequence
  Description of Artificial Sequence: Synthetic oligonucleotide
  Sense strand starting at position 3756 of SEQ ID NO: 914230
gcuagacguuccuccaaga

SEQ ID NO: 988091 - RNA, 19 nt, Artificial Sequence
  Description of Artificial Sequence: Synthetic oligonucleotide
  Antisense strand to SEQ ID NO: 988090
ucuuggaggaacgucuagc

SEQ ID NO: 988092 - RNA, 19 nt, Artificial Sequence
  Description of Artificial Sequence: Synthetic oligonucleotide
  Sense strand starting at position 3956 of SEQ ID NO: 914230
gagggacucugugcgagua

SEQ ID NO: 988093 - RNA, 19 nt, Artificial Sequence
  Description of Artificial Sequence: Synthetic oligonucleotide
  Antisense strand to SEQ ID NO: 988092
uacucgcacagagucccuc

SEQ ID NO: 988094 - RNA, 19 nt, Artificial Sequence
  Description of Artificial Sequence: Synthetic oligonucleotide
  Sense strand starting at position 169 of SEQ ID NO: 914230
acagcuuugucaucaaguu

SEQ ID NO: 988095 - RNA, 19 nt, Artificial Sequence
  Description of Artificial Sequence: Synthetic oligonucleotide
  Antisense strand to SEQ ID NO: 988094
aacuugaugacaaagcugu

SEQ ID NO: 988096 - RNA, 19 nt, Artificial Sequence
  Description of Artificial Sequence: Synthetic oligonucleotide
  Sense strand starting at position 3785 of SEQ ID NO: 914230
gcuagauguuccucagagc

SEQ ID NO: 988097 - RNA, 19 nt, Artificial Sequence
  Description of Artificial Sequence: Synthetic oligonucleotide
  Antisense strand to SEQ ID NO: 988096
gcucugaggaacaucuagc

SEQ ID NO: 988098 - RNA, 19 nt, Artificial Sequence
  Description of Artificial Sequence: Synthetic oligonucleotide
  Sense strand starting at position 2844 of SEQ ID NO: 914230
gugcgaucauagcugauag

SEQ ID NO: 988099 - RNA, 19 nt, Artificial Sequence
  Description of Artificial Sequence: Synthetic oligonucleotide
  Antisense strand to SEQ ID NO: 988098
cuaucagcuaugaucgcac

SEQ ID NO: 988100 - RNA, 19 nt, Artificial Sequence
  Description of Artificial Sequence: Synthetic oligonucleotide
  Sense strand starting at position 3070 of SEQ ID NO: 914230
gugguuuaggugcauugua

SEQ ID NO: 988101 - RNA, 19 nt, Artificial Sequence
  Description of Artificial Sequence: Synthetic oligonucleotide
  Antisense strand to SEQ ID NO: 988100
uacaaugcaccuaaaccac

SEQ ID NO: 988102 - RNA, 19 nt, Artificial Sequence
  Description of Artificial Sequence: Synthetic oligonucleotide
  Sense strand starting at position 3547 of SEQ ID NO: 914230
gugugugcucacuaggagu

SEQ ID NO: 988103 - RNA, 19 nt, Artificial Sequence
  Description of Artificial Sequence: Synthetic oligonucleotide
  Antisense strand to SEQ ID NO: 988102
acuccuagugagcacacac

SEQ ID NO: 988104 - RNA, 19 nt, Artificial Sequence
  Description of Artificial Sequence: Synthetic oligonucleotide
  Sense strand starting at position 2996 of SEQ ID NO: 914230
guuacaguugucuaguguu

SEQ ID NO: 988105 - RNA, 19 nt, Artificial Sequence
  Description of Artificial Sequence: Synthetic oligonucleotide
  Antisense strand to SEQ ID NO: 988104
aacacuagacaacuguaac

SEQ ID NO: 988106 - RNA, 19 nt, Artificial Sequence
  Description of Artificial Sequence: Synthetic oligonucleotide
  Sense strand starting at position 1195 of SEQ ID NO: 914230
gcuggacuuucugcacagu

SEQ ID NO: 988107 - RNA, 19 nt, Artificial Sequence
  Description of Artificial Sequence: Synthetic oligonucleotide
  Antisense strand to SEQ ID NO: 988106
acugugcagaaaguccagc

SEQ ID NO: 988108 - RNA, 19 nt, Artificial Sequence
  Description of Artificial Sequence: Synthetic oligonucleotide
  Sense strand starting at position 538 of SEQ ID NO: 914230
gcuuaauaagucugaccgu

SEQ ID NO: 988109 - RNA, 19 nt, Artificial Sequence
  Description of Artificial Sequence: Synthetic oligonucleotide
  Antisense strand to SEQ ID NO: 988108
acggucagacuuauuaagc

SEQ ID NO: 988110 - RNA, 19 nt, Artificial Sequence
  Description of Artificial Sequence: Synthetic oligonucleotide
  Sense strand starting at position 3691 of SEQ ID NO: 914230
cugucaguuugugugauua

SEQ ID NO: 988111 - RNA, 19 nt, Artificial Sequence
  Description of Artificial Sequence: Synthetic oligonucleotide
  Antisense strand to SEQ ID NO: 988110
uaaucacacaaacugacag

SEQ ID NO: 988112 - RNA, 19 nt, Artificial Sequence
  Description of Artificial Sequence: Synthetic oligonucleotide
  Sense strand starting at position 2992 of SEQ ID NO: 914230
cuguguuacaguugucuag

SEQ ID NO: 988113 - RNA, 19 nt, Artificial Sequence
  Description of Artificial Sequence: Synthetic oligonucleotide
  Antisense strand to SEQ ID NO: 988112
cuagacaacuguaacacag

SEQ ID NO: 988114 - RNA, 19 nt, Artificial Sequence
  Description of Artificial Sequence: Synthetic oligonucleotide
  Sense strand starting at position 3835 of SEQ ID NO: 914230
gcgggacagcucuguugau

SEQ ID NO: 988115 - RNA, 19 nt, Artificial Sequence
  Description of Artificial Sequence: Synthetic oligonucleotide
  Antisense strand to SEQ ID NO: 988114
aucaacagagcugucccgc

SEQ ID NO: 988116 - RNA, 19 nt, Artificial Sequence
  Description of Artificial Sequence: Synthetic oligonucleotide
  Sense strand starting at position 2994 of SEQ ID NO: 914230
guguuacaguugucuagug

SEQ ID NO: 988117 - RNA, 19 nt, Artificial Sequence
  Description of Artificial Sequence: Synthetic oligonucleotide
  Antisense strand to SEQ ID NO: 988116
cacuagacaacuguaacac

SEQ ID NO: 988118 - RNA, 19 nt, Artificial Sequence
  Description of Artificial Sequence: Synthetic oligonucleotide
  Sense strand starting at position 151 of SEQ ID NO: 914230
gcaggaacauguuaaucaa

SEQ ID NO: 988119 - RNA, 19 nt, Artificial Sequence
  Description of Artificial Sequence: Synthetic oligonucleotide
  Antisense strand to SEQ ID NO: 988118
uugauuaacauguuccugc

SEQ ID NO: 988120 - RNA, 19 nt, Artificial Sequence
  Description of Artificial Sequence: Synthetic oligonucleotide
  Sense strand starting at position 3792 of SEQ ID NO: 914230
guuccucagagcuguguuu

SEQ ID NO: 988121 - RNA, 19 nt, Artificial Sequence
  Description of Artificial Sequence: Synthetic oligonucleotide
  Antisense strand to SEQ ID NO: 988120
aaacacagcucugaggaac

SEQ ID NO: 988122 - RNA, 19 nt, Artificial Sequence
  Description of Artificial Sequence: Synthetic oligonucleotide
  Sense strand starting at position 3689 of SEQ ID NO: 914230
gccugucaguuugugugau

SEQ ID NO: 988123 - RNA, 19 nt, Artificial Sequence
  Description of Artificial Sequence: Synthetic oligonucleotide
  Antisense strand to SEQ ID NO: 988122
aucacacaaacugacaggc

SEQ ID NO: 988124 - RNA, 19 nt, Artificial Sequence
  Description of Artificial Sequence: Synthetic oligonucleotide
  Sense strand starting at position 2806 of SEQ ID NO: 914230
uuagcuuucucgucuguca

SEQ ID NO: 988125 - RNA, 19 nt, Artificial Sequence
  Description of Artificial Sequence: Synthetic oligonucleotide
  Antisense strand to SEQ ID NO: 988124
ugacagacgagaaagcuaa

SEQ ID NO: 988126 - RNA, 19 nt, Artificial Sequence
  Description of Artificial Sequence: Synthetic oligonucleotide
  Sense strand starting at position 2454 of SEQ ID NO: 914231
gugaaacuaugaucagauu

SEQ ID NO: 988127 - RNA, 19 nt, Artificial Sequence
  Description of Artificial Sequence: Synthetic oligonucleotide
  Antisense strand to SEQ ID NO: 988126
aaucugaucauaguuucac

SEQ ID NO: 988128 - RNA, 19 nt, Artificial Sequence
  Description of Artificial Sequence: Synthetic oligonucleotide
  Sense strand starting at position 2659 of SEQ ID NO: 914231
ucacuuugucuuuaggaag

SEQ ID NO: 988129 - RNA, 19 nt, Artificial Sequence
  Description of Artificial Sequence: Synthetic oligonucleotide
  Antisense strand to SEQ ID NO: 988128
cuuccuaaagacaaaguga

SEQ ID NO: 988130 - RNA, 19 nt, Artificial Sequence
  Description of Artificial Sequence: Synthetic oligonucleotide
  Sense strand starting at position 3480 of SEQ ID NO: 914231
uuuacuugagaaggauagu

SEQ ID NO: 988131 - RNA, 19 nt, Artificial Sequence
  Description of Artificial Sequence: Synthetic oligonucleotide
  Antisense strand to SEQ ID NO: 988130
acuauccuucucaaguaaa

SEQ ID NO: 988132 - RNA, 19 nt, Artificial Sequence
  Description of Artificial Sequence: Synthetic oligonucleotide
  Sense strand starting at position 830 of SEQ ID NO: 914231
ggaagagacugucuacuug

SEQ ID NO: 988133 - RNA, 19 nt, Artificial Sequence
  Description of Artificial Sequence: Synthetic oligonucleotide
  Antisense strand to SEQ ID NO: 988132
caaguagacagucucuucc

SEQ ID NO: 988134 - RNA, 19 nt, Artificial Sequence
  Description of Artificial Sequence: Synthetic oligonucleotide
  Sense strand starting at position 3700 of SEQ ID NO: 914231
gaugaugguggugauagua

SEQ ID NO: 988135 - RNA, 19 nt, Artificial Sequence
  Description of Artificial Sequence: Synthetic oligonucleotide
  Antisense strand to SEQ ID NO: 988134
uacuaucaccaccaucauc

SEQ ID NO: 988136 - RNA, 19 nt, Artificial Sequence
  Description of Artificial Sequence: Synthetic oligonucleotide
  Sense strand starting at position 3669 of SEQ ID NO: 914231
gcaccaagaguguaaugga

SEQ ID NO: 988137 - RNA, 19 nt, Artificial Sequence
  Description of Artificial Sequence: Synthetic oligonucleotide
  Antisense strand to SEQ ID NO: 988136
uccauuacacucuuggugc

SEQ ID NO: 988138 - RNA, 19 nt, Artificial Sequence
  Description of Artificial Sequence: Synthetic oligonucleotide
  Sense strand starting at position 834 of SEQ ID NO: 914231
gagacugucuacuugacaa

SEQ ID NO: 988139 - RNA, 19 nt, Artificial Sequence
  Description of Artificial Sequence: Synthetic oligonucleotide
  Antisense strand to SEQ ID NO: 988138
uugucaaguagacagucuc

SEQ ID NO: 988140 - RNA, 19 nt, Artificial Sequence
  Description of Artificial Sequence: Synthetic oligonucleotide
  Sense strand starting at position 3709 of SEQ ID NO: 914231
ggugauaguaaugaaguuu

SEQ ID NO: 988141 - RNA, 19 nt, Artificial Sequence
  Description of Artificial Sequence: Synthetic oligonucleotide
  Antisense strand to SEQ ID NO: 988140
aaacuucauuacuaucacc

SEQ ID NO: 988142 - RNA, 19 nt, Artificial Sequence
  Description of Artificial Sequence: Synthetic oligonucleotide
  Sense strand starting at position 3577 of SEQ ID NO: 914231
gcauuuaaccucugagcuu

SEQ ID NO: 988143 - RNA, 19 nt, Artificial Sequence
  Description of Artificial Sequence: Synthetic oligonucleotide
  Antisense strand to SEQ ID NO: 988142
aagcucagagguuaaaugc

SEQ ID NO: 988144 - RNA, 19 nt, Artificial Sequence
  Description of Artificial Sequence: Synthetic oligonucleotide
  Sense strand starting at position 152 of SEQ ID NO: 914231
uguaucuagggaugaucua

SEQ ID NO: 988145 - RNA, 19 nt, Artificial Sequence
  Description of Artificial Sequence: Synthetic oligonucleotide
  Antisense strand to SEQ ID NO: 988144
uagaucaucccuagauaca

SEQ ID NO: 988146 - RNA, 19 nt, Artificial Sequence
  Description of Artificial Sequence: Synthetic oligonucleotide
  Sense strand starting at position 3875 of SEQ ID NO: 914231
agcagcucacuuuaagaca

SEQ ID NO: 988147 - RNA, 19 nt, Artificial Sequence
  Description of Artificial Sequence: Synthetic oligonucleotide
  Antisense strand to SEQ ID NO: 988146
ugucuuaaagugagcugcu

SEQ ID NO: 988148 - RNA, 19 nt, Artificial Sequence
  Description of Artificial Sequence: Synthetic oligonucleotide
  Sense strand starting at position 2752 of SEQ ID NO: 914231
ucauauuuaugcuugugua

SEQ ID NO: 988149 - RNA, 19 nt, Artificial Sequence
  Description of Artificial Sequence: Synthetic oligonucleotide
  Antisense strand to SEQ ID NO: 988148
uacacaagcauaaauauga

SEQ ID NO: 988150 - RNA, 19 nt, Artificial Sequence
  Description of Artificial Sequence: Synthetic oligonucleotide
  Sense strand starting at position 1431 of SEQ ID NO: 914231
cugaauggccgggacuauu

SEQ ID NO: 988151 - RNA, 19 nt, Artificial Sequence
  Description of Artificial Sequence: Synthetic oligonucleotide
  Antisense strand to SEQ ID NO: 988150
aauagucccggccauucag

SEQ ID NO: 988152 - RNA, 19 nt, Artificial Sequence
  Description of Artificial Sequence: Synthetic oligonucleotide
  Sense strand starting at position 3599 of SEQ ID NO: 914231
agagcugugcaacauauaa

SEQ ID NO: 988153 - RNA, 19 nt, Artificial Sequence
  Description of Artificial Sequence: Synthetic oligonucleotide
  Antisense strand to SEQ ID NO: 988152
uuauauguugcacagcucu

SEQ ID NO: 988154 - RNA, 19 nt, Artificial Sequence
  Description of Artificial Sequence: Synthetic oligonucleotide
  Sense strand starting at position 2673 of SEQ ID NO: 914231
ggaagccuucuuuauuauu

SEQ ID NO: 988155 - RNA, 19 nt, Artificial Sequence
  Description of Artificial Sequence: Synthetic oligonucleotide
  Antisense strand to SEQ ID NO: 988154
aauaauaaagaaggcuucc

SEQ ID NO: 988156 - RNA, 19 nt, Artificial Sequence
  Description of Artificial Sequence: Synthetic oligonucleotide
  Sense strand starting at position 3534 of SEQ ID NO: 914231
aguugaucccucugaagac

SEQ ID NO: 988157 - RNA, 19 nt, Artificial Sequence
  Description of Artificial Sequence: Synthetic oligonucleotide
  Antisense strand to SEQ ID NO: 988156
gucuucagagggaucaacu

SEQ ID NO: 988158 - RNA, 19 nt, Artificial Sequence
  Description of Artificial Sequence: Synthetic oligonucleotide
  Sense strand starting at position 3314 of SEQ ID NO: 914231
ugaacauauugguuagcaa

SEQ ID NO: 988159 - RNA, 19 nt, Artificial Sequence
  Description of Artificial Sequence: Synthetic oligonucleotide
  Antisense strand to SEQ ID NO: 988158
uugcuaaccaauauguuca

SEQ ID NO: 988160 - RNA, 19 nt, Artificial Sequence
  Description of Artificial Sequence: Synthetic oligonucleotide
  Sense strand starting at position 541 of SEQ ID NO: 914231
cugcgacaacuguacaaau

SEQ ID NO: 988161 - RNA, 19 nt, Artificial Sequence
  Description of Artificial Sequence: Synthetic oligonucleotide
  Antisense strand to SEQ ID NO: 988160
auuuguacaguugucgcag

SEQ ID NO: 988162 - RNA, 19 nt, Artificial Sequence
  Description of Artificial Sequence: Synthetic oligonucleotide
  Sense strand starting at position 3280 of SEQ ID NO: 914231
ccugaaagguuucucuuga

SEQ ID NO: 988163 - RNA, 19 nt, Artificial Sequence
  Description of Artificial Sequence: Synthetic oligonucleotide
  Antisense strand to SEQ ID NO: 988162
ucaagagaaaccuuucagg

SEQ ID NO: 988164 - RNA, 19 nt, Artificial Sequence
  Description of Artificial Sequence: Synthetic oligonucleotide
  Sense strand starting at position 3281 of SEQ ID NO: 914231
cugaaagguuucucuugau

SEQ ID NO: 988165 - RNA, 19 nt, Artificial Sequence
  Description of Artificial Sequence: Synthetic oligonucleotide
  Antisense strand to SEQ ID NO: 988164
aucaagagaaaccuuucag

SEQ ID NO: 988166 - RNA, 19 nt, Artificial Sequence
  Description of Artificial Sequence: Synthetic oligonucleotide
  Sense strand starting at position 2966 of SEQ ID NO: 914231
aaacgauguuaguuuggaa

SEQ ID NO: 988167 - RNA, 19 nt, Artificial Sequence
  Description of Artificial Sequence: Synthetic oligonucleotide
  Antisense strand to SEQ ID NO: 988166
uuccaaacuaacaucguuu

SEQ ID NO: 988168 - RNA, 19 nt, Artificial Sequence
  Description of Artificial Sequence: Synthetic oligonucleotide
  Sense strand starting at position 3442 of SEQ ID NO: 914231
gcuaaaucauagcuuagga

SEQ ID NO: 988169 - RNA, 19 nt, Artificial Sequence
  Description of Artificial Sequence: Synthetic oligonucleotide
  Antisense strand to SEQ ID NO: 988168
uccuaagcuaugauuuagc

SEQ ID NO: 988170 - RNA, 19 nt, Artificial Sequence
  Description of Artificial Sequence: Synthetic oligonucleotide
  Sense strand starting at position 2658 of SEQ ID NO: 914231
cucacuuugucuuuaggaa

SEQ ID NO: 988171 - RNA, 19 nt, Artificial Sequence
  Description of Artificial Sequence: Synthetic oligonucleotide
  Antisense strand to SEQ ID NO: 988170
uuccuaaagacaaagugag

SEQ ID NO: 988172 - RNA, 19 nt, Artificial Sequence
  Description of Artificial Sequence: Synthetic oligonucleotide
  Sense strand starting at position 3856 of SEQ ID NO: 914231
cauggacucugugucauaa

SEQ ID NO: 988173 - RNA, 19 nt, Artificial Sequence
  Description of Artificial Sequence: Synthetic oligonucleotide
  Antisense strand to SEQ ID NO: 988172
uuaugacacagaguccaug

SEQ ID NO: 988174 - RNA, 19 nt, Artificial Sequence
  Description of Artificial Sequence: Synthetic oligonucleotide
  Sense strand starting at position 3596 of SEQ ID NO: 914231
cucagagcugugcaacaua

SEQ ID NO: 988175 - RNA, 19 nt, Artificial Sequence
  Description of Artificial Sequence: Synthetic oligonucleotide
  Antisense strand to SEQ ID NO: 988174
uauguugcacagcucugag

SEQ ID NO: 988176 - RNA, 19 nt, Artificial Sequence
  Description of Artificial Sequence: Synthetic oligonucleotide
  Sense strand starting at position 1994 of SEQ ID NO: 914231
uggucuccacccugagauu

SEQ ID NO: 988177 - RNA, 19 nt, Artificial Sequence
  Description of Artificial Sequence: Synthetic oligonucleotide
  Antisense strand to SEQ ID NO: 988176
aaucucaggguggagacca

SEQ ID NO: 988178 - RNA, 19 nt, Artificial Sequence
  Description of Artificial Sequence: Synthetic oligonucleotide
  Sense strand starting at position 105 of SEQ ID NO: 914231
uguguaacauaccuacauu

SEQ ID NO: 988179 - RNA, 19 nt, Artificial Sequence
  Description of Artificial Sequence: Synthetic oligonucleotide
  Antisense strand to SEQ ID NO: 988178
aauguagguauguuacaca

SEQ ID NO: 988180 - RNA, 19 nt, Artificial Sequence
  Description of Artificial Sequence: Synthetic oligonucleotide
  Sense strand starting at position 746 of SEQ ID NO: 914231
guuugaucgguccacuuaa

SEQ ID NO: 988181 - RNA, 19 nt, Artificial Sequence
  Description of Artificial Sequence: Synthetic oligonucleotide
  Antisense strand to SEQ ID NO: 988180
uuaaguggaccgaucaaac

SEQ ID NO: 988182 - RNA, 19 nt, Artificial Sequence
  Description of Artificial Sequence: Synthetic oligonucleotide
  Sense strand starting at position 1343 of SEQ ID NO: 914231
aaggguaagcucuagcagu

SEQ ID NO: 988183 - RNA, 19 nt, Artificial Sequence
  Description of Artificial Sequence: Synthetic oligonucleotide
  Antisense strand to SEQ ID NO: 988182
acugcuagagcuuacccuu

SEQ ID NO: 988184 - RNA, 19 nt, Artificial Sequence
  Description of Artificial Sequence: Synthetic oligonucleotide
  Sense strand starting at position 1714 of SEQ ID NO: 914231
ugcgcuuuaccugagacaa

SEQ ID NO: 988185 - RNA, 19 nt, Artificial Sequence
  Description of Artificial Sequence: Synthetic oligonucleotide
  Antisense strand to SEQ ID NO: 988184
uugucucagguaaagcgca

SEQ ID NO: 988186 - RNA, 19 nt, Artificial Sequence
  Description of Artificial Sequence: Synthetic oligonucleotide
  Sense strand starting at position 2725 of SEQ ID NO: 914231
aggcgaaugagcggaaauu

SEQ ID NO: 988187 - RNA, 19 nt, Artificial Sequence
  Description of Artificial Sequence: Synthetic oligonucleotide
  Antisense strand to SEQ ID NO: 988186
aauuuccgcucauucgccu

SEQ ID NO: 988188 - RNA, 19 nt, Artificial Sequence
  Description of Artificial Sequence: Synthetic oligonucleotide
  Sense strand starting at position 2498 of SEQ ID NO: 914231
ucuuaaguagcauguauga

SEQ ID NO: 988189 - RNA, 19 nt, Artificial Sequence
  Description of Artificial Sequence: Synthetic oligonucleotide
  Antisense strand to SEQ ID NO: 988188
ucauacaugcuacuuaaga

SEQ ID NO: 988190 - RNA, 19 nt, Artificial Sequence
  Description of Artificial Sequence: Synthetic oligonucleotide
  Sense strand starting at position 3650 of SEQ ID NO: 914231
gagaguacucaacgccauu

SEQ ID NO: 988191 - RNA, 19 nt, Artificial Sequence
  Description of Artificial Sequence: Synthetic oligonucleotide
  Antisense strand to SEQ ID NO: 988190
aauggcguugaguacucuc

SEQ ID NO: 988192 - RNA, 19 nt, Artificial Sequence
  Description of Artificial Sequence: Synthetic oligonucleotide
  Sense strand starting at position 3661 of SEQ ID NO: 914231
acgccauugcaccaagagu

SEQ ID NO: 988193 - RNA, 19 nt, Artificial Sequence
  Description of Artificial Sequence: Synthetic oligonucleotide
  Antisense strand to SEQ ID NO: 988192
acucuuggugcaauggcgu

SEQ ID NO: 988194 - RNA, 19 nt, Artificial Sequence
  Description of Artificial Sequence: Synthetic oligonucleotide
  Sense strand starting at position 2017 of SEQ ID NO: 914231
ccaguuccgguuuagcaaa

SEQ ID NO: 988195 - RNA, 19 nt, Artificial Sequence
  Description of Artificial Sequence: Synthetic oligonucleotide
  Antisense strand to SEQ ID NO: 988194
uuugcuaaaccggaacugg

SEQ ID NO: 988196 - RNA, 19 nt, Artificial Sequence
  Description of Artificial Sequence: Synthetic oligonucleotide
  Sense strand starting at position 1430 of SEQ ID NO: 914231
gcugaauggccgggacuau

SEQ ID NO: 988197 - RNA, 19 nt, Artificial Sequence
  Description of Artificial Sequence: Synthetic oligonucleotide
  Antisense strand to SEQ ID NO: 988196
auagucccggccauucagc

SEQ ID NO: 988198 - RNA, 19 nt, Artificial Sequence
  Description of Artificial Sequence: Synthetic oligonucleotide
  Sense strand starting at position 3125 of SEQ ID NO: 914231
cugcauuuauguuauagaa

SEQ ID NO: 988199 - RNA, 19 nt, Artificial Sequence
  Description of Artificial Sequence: Synthetic oligonucleotide
  Antisense strand to SEQ ID NO: 988198
uucuauaacauaaaugcag

SEQ ID NO: 988200 - RNA, 19 nt, Artificial Sequence
  Description of Artificial Sequence: Synthetic oligonucleotide
  Sense strand starting at position 2452 of SEQ ID NO: 914231
aagugaaacuaugaucaga

SEQ ID NO: 988201 - RNA, 19 nt, Artificial Sequence
  Description of Artificial Sequence: Synthetic oligonucleotide
  Antisense strand to SEQ ID NO: 988200
ucugaucauaguuucacuu

SEQ ID NO: 988202 - RNA, 19 nt, Artificial Sequence
  Description of Artificial Sequence: Synthetic oligonucleotide
  Sense strand starting at position 258 of SEQ ID NO: 914231
cgcaaugucucuuuauaaa

SEQ ID NO: 988203 - RNA, 19 nt, Artificial Sequence
  Description of Artificial Sequence: Synthetic oligonucleotide
  Antisense strand to SEQ ID NO: 988202
uuuauaaagagacauugcg

SEQ ID NO: 988204 - RNA, 19 nt, Artificial Sequence
  Description of Artificial Sequence: Synthetic oligonucleotide
  Sense strand starting at position 704 of SEQ ID NO: 914231
cugagucuuaacuguugua

SEQ ID NO: 988205 - RNA, 19 nt, Artificial Sequence
  Description of Artificial Sequence: Synthetic oligonucleotide
  Antisense strand to SEQ ID NO: 988204
uacaacaguuaagacucag

SEQ ID NO: 988206 - RNA, 19 nt, Artificial Sequence
  Description of Artificial Sequence: Synthetic oligonucleotide
  Sense strand starting at position 2795 of SEQ ID NO: 914232
gugaaacuaugaucagauu

SEQ ID NO: 988207 - RNA, 19 nt, Artificial Sequence
  Description of Artificial Sequence: Synthetic oligonucleotide
  Antisense strand to SEQ ID NO: 988206
aaucugaucauaguuucac

SEQ ID NO: 988208 - RNA, 19 nt, Artificial Sequence
  Description of Artificial Sequence: Synthetic oligonucleotide
  Sense strand starting at position 241 of SEQ ID NO: 914232
agcauacuauuaccagaga

SEQ ID NO: 988209 - RNA, 19 nt, Artificial Sequence
  Description of Artificial Sequence: Synthetic oligonucleotide
  Antisense strand to SEQ ID NO: 988208
ucucugguaauaguaugcu

SEQ ID NO: 988210 - RNA, 19 nt, Artificial Sequence
  Description of Artificial Sequence: Synthetic oligonucleotide
  Sense strand starting at position 3000 of SEQ ID NO: 914232
ucacuuugucuuuaggaag

SEQ ID NO: 988211 - RNA, 19 nt, Artificial Sequence
  Description of Artificial Sequence: Synthetic oligonucleotide
  Antisense strand to SEQ ID NO: 988210
cuuccuaaagacaaaguga

SEQ ID NO: 988212 - RNA, 19 nt, Artificial Sequence
  Description of Artificial Sequence: Synthetic oligonucleotide
  Sense strand starting at position 3821 of SEQ ID NO: 914232
uuuacuugagaaggauagu

SEQ ID NO: 988213 - RNA, 19 nt, Artificial Sequence
  Description of Artificial Sequence: Synthetic oligonucleotide
  Antisense strand to SEQ ID NO: 988212
acuauccuucucaaguaaa

SEQ ID NO: 988214 - RNA, 19 nt, Artificial Sequence
  Description of Artificial Sequence: Synthetic oligonucleotide
  Sense strand starting at position 1171 of SEQ ID NO: 914232
ggaagagacugucuacuug

SEQ ID NO: 988215 - RNA, 19 nt, Artificial Sequence
  Description of Artificial Sequence: Synthetic oligonucleotide
  Antisense strand to SEQ ID NO: 988214
caaguagacagucucuucc

SEQ ID NO: 988216 - RNA, 19 nt, Artificial Sequence
  Description of Artificial Sequence: Synthetic oligonucleotide
  Sense strand starting at position 174 of SEQ ID NO: 914232
auuauagaucuaggcuaaa

SEQ ID NO: 988217 - RNA, 19 nt, Artificial Sequence
  Description of Artificial Sequence: Synthetic oligonucleotide
  Antisense strand to SEQ ID NO: 988216
uuuagccuagaucuauaau

SEQ ID NO: 988218 - RNA, 19 nt, Artificial Sequence
  Description of Artificial Sequence: Synthetic oligonucleotide
  Sense strand starting at position 1175 of SEQ ID NO: 914232
gagacugucuacuugacaa

SEQ ID NO: 988219 - RNA, 19 nt, Artificial Sequence
  Description of Artificial Sequence: Synthetic oligonucleotide
  Antisense strand to SEQ ID NO: 988218
uugucaaguagacagucuc

SEQ ID NO: 988220 - RNA, 19 nt, Artificial Sequence
  Description of Artificial Sequence: Synthetic oligonucleotide
  Sense strand starting at position 3918 of SEQ ID NO: 914232
gcauuuaaccucugagcuu

SEQ ID NO: 988221 - RNA, 19 nt, Artificial Sequence
  Description of Artificial Sequence: Synthetic oligonucleotide
  Antisense strand to SEQ ID NO: 988220
aagcucagagguuaaaugc

SEQ ID NO: 988222 - RNA, 19 nt, Artificial Sequence
  Description of Artificial Sequence: Synthetic oligonucleotide
  Sense strand starting at position 493 of SEQ ID NO: 914232
uguaucuagggaugaucua

SEQ ID NO: 988223 - RNA, 19 nt, Artificial Sequence
  Description of Artificial Sequence: Synthetic oligonucleotide
  Antisense strand to SEQ ID NO: 988222
uagaucaucccuagauaca

SEQ ID NO: 988224 - RNA, 19 nt, Artificial Sequence
  Description of Artificial Sequence: Synthetic oligonucleotide
  Sense strand starting at position 3093 of SEQ ID NO: 914232
ucauauuuaugcuugugua

SEQ ID NO: 988225 - RNA, 19 nt, Artificial Sequence
  Description of Artificial Sequence: Synthetic oligonucleotide
  Antisense strand to SEQ ID NO: 988224
uacacaagcauaaauauga

SEQ ID NO: 988226 - RNA, 19 nt, Artificial Sequence
  Description of Artificial Sequence: Synthetic oligonucleotide
  Sense strand starting at position 1772 of SEQ ID NO: 914232
cugaauggccgggacuauu

SEQ ID NO: 988227 - RNA, 19 nt, Artificial Sequence
  Description of Artificial Sequence: Synthetic oligonucleotide
  Antisense strand to SEQ ID NO: 988226
aauagucccggccauucag

SEQ ID NO: 988228 - RNA, 19 nt, Artificial Sequence
  Description of Artificial Sequence: Synthetic oligonucleotide
  Sense strand starting at position 3940 of SEQ ID NO: 914232
agagcugugcaacauauaa

SEQ ID NO: 988229 - RNA, 19 nt, Artificial Sequence
  Description of Artificial Sequence: Synthetic oligonucleotide
  Antisense strand to SEQ ID NO: 988228
uuauauguugcacagcucu

SEQ ID NO: 988230 - RNA, 19 nt, Artificial Sequence
  Description of Artificial Sequence: Synthetic oligonucleotide
  Sense strand starting at position 3014 of SEQ ID NO: 914232
ggaagccuucuuuauuauu

SEQ ID NO: 988231 - RNA, 19 nt, Artificial Sequence
  Description of Artificial Sequence: Synthetic oligonucleotide
  Antisense strand to SEQ ID NO: 988230
aauaauaaagaaggcuucc

SEQ ID NO: 988232 - RNA, 19 nt, Artificial Sequence
  Description of Artificial Sequence: Synthetic oligonucleotide
  Sense strand starting at position 3875 of SEQ ID NO: 914232
aguugaucccucugaagac

SEQ ID NO: 988233 - RNA, 19 nt, Artificial Sequence
  Description of Artificial Sequence: Synthetic oligonucleotide
  Antisense strand to SEQ ID NO: 988232
gucuucagagggaucaacu

SEQ ID NO: 988234 - RNA, 19 nt, Artificial Sequence
  Description of Artificial Sequence: Synthetic oligonucleotide
  Sense strand starting at position 3655 of SEQ ID NO: 914232
ugaacauauugguuagcaa

SEQ ID NO: 988235 - RNA, 19 nt, Artificial Sequence
  Description of Artificial Sequence: Synthetic oligonucleotide
  Antisense strand to SEQ ID NO: 988234
uugcuaaccaauauguuca

SEQ ID NO: 988236 - RNA, 19 nt, Artificial Sequence
  Description of Artificial Sequence: Synthetic oligonucleotide
  Sense strand starting at position 195 of SEQ ID NO: 914232
auagucccucuguaauauu

SEQ ID NO: 988237 - RNA, 19 nt, Artificial Sequence
  Description of Artificial Sequence: Synthetic oligonucleotide
  Antisense strand to SEQ ID NO: 988236
aauauuacagagggacuau

SEQ ID NO: 988238 - RNA, 19 nt, Artificial Sequence
  Description of Artificial Sequence: Synthetic oligonucleotide
  Sense strand starting at position 882 of SEQ ID NO: 914232
cugcgacaacuguacaaau

SEQ ID NO: 988239 - RNA, 19 nt, Artificial Sequence
  Description of Artificial Sequence: Synthetic oligonucleotide
  Antisense strand to SEQ ID NO: 988238
auuuguacaguugucgcag

SEQ ID NO: 988240 - RNA, 19 nt, Artificial Sequence
  Description of Artificial Sequence: Synthetic oligonucleotide
  Sense strand starting at position 3621 of SEQ ID NO: 914232
ccugaaagguuucucuuga

SEQ ID NO: 988241 - RNA, 19 nt, Artificial Sequence
  Description of Artificial Sequence: Synthetic oligonucleotide
  Antisense strand to SEQ ID NO: 988240
ucaagagaaaccuuucagg

SEQ ID NO: 988242 - RNA, 19 nt, Artificial Sequence
  Description of Artificial Sequence: Synthetic oligonucleotide
  Sense strand starting at position 3622 of SEQ ID NO: 914232
cugaaagguuucucuugau

SEQ ID NO: 988243 - RNA, 19 nt, Artificial Sequence
  Description of Artificial Sequence: Synthetic oligonucleotide
  Antisense strand to SEQ ID NO: 988242
aucaagagaaaccuuucag

SEQ ID NO: 988244 - RNA, 19 nt, Artificial Sequence
  Description of Artificial Sequence: Synthetic oligonucleotide
  Sense strand starting at position 3307 of SEQ ID NO: 914232
aaacgauguuaguuuggaa

SEQ ID NO: 988245 - RNA, 19 nt, Artificial Sequence
  Description of Artificial Sequence: Synthetic oligonucleotide
  Antisense strand to SEQ ID NO: 988244
uuccaaacuaacaucguuu

SEQ ID NO: 988246 - RNA, 19 nt, Artificial Sequence
  Description of Artificial Sequence: Synthetic oligonucleotide
  Sense strand starting at position 3783 of SEQ ID NO: 914232
gcuaaaucauagcuuagga

SEQ ID NO: 988247 - RNA, 19 nt, Artificial Sequence
  Description of Artificial Sequence: Synthetic oligonucleotide
  Antisense strand to SEQ ID NO: 988246
uccuaagcuaugauuuagc

SEQ ID NO: 988248 - RNA, 19 nt, Artificial Sequence
  Description of Artificial Sequence: Synthetic oligonucleotide
  Sense strand starting at position 2999 of SEQ ID NO: 914232
cucacuuugucuuuaggaa

SEQ ID NO: 988249 - RNA, 19 nt, Artificial Sequence
  Description of Artificial Sequence: Synthetic oligonucleotide
  Antisense strand to SEQ ID NO: 988248
uuccuaaagacaaagugag

SEQ ID NO: 988250 - RNA, 19 nt, Artificial Sequence
  Description of Artificial Sequence: Synthetic oligonucleotide
  Sense strand starting at position 3937 of SEQ ID NO: 914232
cucagagcugugcaacaua

SEQ ID NO: 988251 - RNA, 19 nt, Artificial Sequence
  Description of Artificial Sequence: Synthetic oligonucleotide
  Antisense strand to SEQ ID NO: 988250
uauguugcacagcucugag

SEQ ID NO: 988252 - RNA, 19 nt, Artificial Sequence
  Description of Artificial Sequence: Synthetic oligonucleotide
  Sense strand starting at position 2335 of SEQ ID NO: 914232
uggucuccacccugagauu

SEQ ID NO: 988253 - RNA, 19 nt, Artificial Sequence
  Description of Artificial Sequence: Synthetic oligonucleotide
  Antisense strand to SEQ ID NO: 988252
aaucucaggguggagacca

SEQ ID NO: 988254 - RNA, 19 nt, Artificial Sequence
  Description of Artificial Sequence: Synthetic oligonucleotide
  Sense strand starting at position 446 of SEQ ID NO: 914232
uguguaacauaccuacauu

SEQ ID NO: 988255 - RNA, 19 nt, Artificial Sequence
  Description of Artificial Sequence: Synthetic oligonucleotide
  Antisense strand to SEQ ID NO: 988254
aauguagguauguuacaca

SEQ ID NO: 988256 - RNA, 19 nt, Artificial Sequence
  Description of Artificial Sequence: Synthetic oligonucleotide
  Sense strand starting at position 1087 of SEQ ID NO: 914232
guuugaucgguccacuuaa

SEQ ID NO: 988257 - RNA, 19 nt, Artificial Sequence
  Description of Artificial Sequence: Synthetic oligonucleotide
  Antisense strand to SEQ ID NO: 988256
uuaaguggaccgaucaaac

SEQ ID NO: 988258 - RNA, 19 nt, Artificial Sequence
  Description of Artificial Sequence: Synthetic oligonucleotide
  Sense strand starting at position 1684 of SEQ ID NO: 914232
aaggguaagcucuagcagu

SEQ ID NO: 988259 - RNA, 19 nt, Artificial Sequence
  Description of Artificial Sequence: Synthetic oligonucleotide
  Antisense strand to SEQ ID NO: 988258
acugcuagagcuuacccuu

SEQ ID NO: 988260 - RNA, 19 nt, Artificial Sequence
  Description of Artificial Sequence: Synthetic oligonucleotide
  Sense strand starting at position 2055 of SEQ ID NO: 914232
ugcgcuuuaccugagacaa

SEQ ID NO: 988261 - RNA, 19 nt, Artificial Sequence
  Description of Artificial Sequence: Synthetic oligonucleotide
  Antisense strand to SEQ ID NO: 988260
uugucucagguaaagcgca

SEQ ID NO: 988262 - RNA, 19 nt, Artificial Sequence
  Description of Artificial Sequence: Synthetic oligonucleotide
  Sense strand starting at position 3066 of SEQ ID NO: 914232
aggcgaaugagcggaaauu

SEQ ID NO: 988263 - RNA, 19 nt, Artificial Sequence
  Description of Artificial Sequence: Synthetic oligonucleotide
  Antisense strand to SEQ ID NO: 988262
aauuuccgcucauucgccu

SEQ ID NO: 988264 - RNA, 19 nt, Artificial Sequence
  Description of Artificial Sequence: Synthetic oligonucleotide
  Sense strand starting at position 2839 of SEQ ID NO: 914232
ucuuaaguagcauguauga

SEQ ID NO: 988265 - RNA, 19 nt, Artificial Sequence
  Description of Artificial Sequence: Synthetic oligonucleotide
  Antisense strand to SEQ ID NO: 988264
ucauacaugcuacuuaaga

SEQ ID NO: 988266 - RNA, 19 nt, Artificial Sequence
  Description of Artificial Sequence: Synthetic oligonucleotide
  Sense strand starting at position 2358 of SEQ ID NO: 914232
ccaguuccgguuuagcaaa

SEQ ID NO: 988267 - RNA, 19 nt, Artificial Sequence
  Description of Artificial Sequence: Synthetic oligonucleotide
  Antisense strand to SEQ ID NO: 988266
uuugcuaaaccggaacugg

SEQ ID NO: 988268 - RNA, 19 nt, Artificial Sequence
  Description of Artificial Sequence: Synthetic oligonucleotide
  Sense strand starting at position 1771 of SEQ ID NO: 914232
gcugaauggccgggacuau

SEQ ID NO: 988269 - RNA, 19 nt, Artificial Sequence
  Description of Artificial Sequence: Synthetic oligonucleotide
  Antisense strand to SEQ ID NO: 988268
auagucccggccauucagc

SEQ ID NO: 988270 - RNA, 19 nt, Artificial Sequence
  Description of Artificial Sequence: Synthetic oligonucleotide
  Sense strand starting at position 3466 of SEQ ID NO: 914232
cugcauuuauguuauagaa

SEQ ID NO: 988271 - RNA, 19 nt, Artificial Sequence
  Description of Artificial Sequence: Synthetic oligonucleotide
  Antisense strand to SEQ ID NO: 988270
uucuauaacauaaaugcag

SEQ ID NO: 988272 - RNA, 19 nt, Artificial Sequence
  Description of Artificial Sequence: Synthetic oligonucleotide
  Sense strand starting at position 2793 of SEQ ID NO: 914232
aagugaaacuaugaucaga

SEQ ID NO: 988273 - RNA, 19 nt, Artificial Sequence
  Description of Artificial Sequence: Synthetic oligonucleotide
  Antisense strand to SEQ ID NO: 988272
ucugaucauaguuucacuu

SEQ ID NO: 988274 - RNA, 19 nt, Artificial Sequence
  Description of Artificial Sequence: Synthetic oligonucleotide
  Sense strand starting at position 223 of SEQ ID NO: 914232
agaaacuucugggauuaca

SEQ ID NO: 988275 - RNA, 19 nt, Artificial Sequence
  Description of Artificial Sequence: Synthetic oligonucleotide
  Antisense strand to SEQ ID NO: 988274
uguaaucccagaaguuucu

SEQ ID NO: 988276 - RNA, 19 nt, Artificial Sequence
  Description of Artificial Sequence: Synthetic oligonucleotide
  Sense strand starting at position 599 of SEQ ID NO: 914232
cgcaaugucucuuuauaaa

SEQ ID NO: 988277 - RNA, 19 nt, Artificial Sequence
  Description of Artificial Sequence: Synthetic oligonucleotide
  Antisense strand to SEQ ID NO: 988276
uuuauaaagagacauugcg

SEQ ID NO: 988278 - RNA, 19 nt, Artificial Sequence
  Description of Artificial Sequence: Synthetic oligonucleotide
  Sense strand starting at position 1045 of SEQ ID NO: 914232
cugagucuuaacuguugua

SEQ ID NO: 988279 - RNA, 19 nt, Artificial Sequence
  Description of Artificial Sequence: Synthetic oligonucleotide
  Antisense strand to SEQ ID NO: 988278
uacaacaguuaagacucag

SEQ ID NO: 988280 - RNA, 19 nt, Artificial Sequence
  Description of Artificial Sequence: Synthetic oligonucleotide
  Sense strand starting at position 2590 of SEQ ID NO: 914232
guuaauaugguuggcuuua

SEQ ID NO: 988281 - RNA, 19 nt, Artificial Sequence
  Description of Artificial Sequence: Synthetic oligonucleotide
  Antisense strand to SEQ ID NO: 988280
uaaagccaaccauauuaac

SEQ ID NO: 988282 - RNA, 19 nt, Artificial Sequence
  Description of Artificial Sequence: Synthetic oligonucleotide
  Sense strand starting at position 2589 of SEQ ID NO: 914232
aguuaauaugguuggcuuu

SEQ ID NO: 988283 - RNA, 19 nt, Artificial Sequence
  Description of Artificial Sequence: Synthetic oligonucleotide
  Antisense strand to SEQ ID NO: 988282
aaagccaaccauauuaacu

SEQ ID NO: 988284 - RNA, 19 nt, Artificial Sequence
  Description of Artificial Sequence: Synthetic oligonucleotide
  Sense strand starting at position 3798 of SEQ ID NO: 914232
aggaaaggauucuggaaua

SEQ ID NO: 988285 - RNA, 19 nt, Artificial Sequence
  Description of Artificial Sequence: Synthetic oligonucleotide
  Antisense strand to SEQ ID NO: 988284
uauuccagaauccuuuccu

SEQ ID NO: 988286 - RNA, 19 nt, Artificial Sequence
  Description of Artificial Sequence: Synthetic oligonucleotide
  Sense strand starting at position 2309 of SEQ ID NO: 914233
uaguucuaucuggaguaaa

SEQ ID NO: 988287 - RNA, 19 nt, Artificial Sequence
  Description of Artificial Sequence: Synthetic oligonucleotide
  Antisense strand to SEQ ID NO: 988286
uuuacuccagauagaacua

SEQ ID NO: 988288 - RNA, 19 nt, Artificial Sequence
  Description of Artificial Sequence: Synthetic oligonucleotide
  Sense strand starting at position 3446 of SEQ ID NO: 914233
ugaaguauacuguauuaug

SEQ ID NO: 988289 - RNA, 19 nt, Artificial Sequence
  Description of Artificial Sequence: Synthetic oligonucleotide
  Antisense strand to SEQ ID NO: 988288
cauaauacaguauacuuca

SEQ ID NO: 988290 - RNA, 19 nt, Artificial Sequence
  Description of Artificial Sequence: Synthetic oligonucleotide
  Sense strand starting at position 2361 of SEQ ID NO: 914233
guggaaggucacugaaaua

SEQ ID NO: 988291 - RNA, 19 nt, Artificial Sequence
  Description of Artificial Sequence: Synthetic oligonucleotide
  Antisense strand to SEQ ID NO: 988290
uauuucagugaccuuccac

SEQ ID NO: 988292 - RNA, 19 nt, Artificial Sequence
  Description of Artificial Sequence: Synthetic oligonucleotide
  Sense strand starting at position 3016 of SEQ ID NO: 914233
aagaaauccuaggcagagu

SEQ ID NO: 988293 - RNA, 19 nt, Artificial Sequence
  Description of Artificial Sequence: Synthetic oligonucleotide
  Antisense strand to SEQ ID NO: 988292
acucugccuaggauuucuu

SEQ ID NO: 988294 - RNA, 19 nt, Artificial Sequence
  Description of Artificial Sequence: Synthetic oligonucleotide
  Sense strand starting at position 3742 of SEQ ID NO: 914233
uagcuauuccuguaaagga

SEQ ID NO: 988295 - RNA, 19 nt, Artificial Sequence
  Description of Artificial Sequence: Synthetic oligonucleotide
  Antisense strand to SEQ ID NO: 988294
uccuuuacaggaauagcua

SEQ ID NO: 988296 - RNA, 19 nt, Artificial Sequence
  Description of Artificial Sequence: Synthetic oligonucleotide
  Sense strand starting at position 2360 of SEQ ID NO: 914233
uguggaaggucacugaaau

SEQ ID NO: 988297 - RNA, 19 nt, Artificial Sequence
  Description of Artificial Sequence: Synthetic oligonucleotide
  Antisense strand to SEQ ID NO: 988296
auuucagugaccuuccaca

SEQ ID NO: 988298 - RNA, 19 nt, Artificial Sequence
  Description of Artificial Sequence: Synthetic oligonucleotide
  Sense strand starting at position 507 of SEQ ID NO: 914233
guaugcauacuugaaagua

SEQ ID NO: 988299 - RNA, 19 nt, Artificial Sequence
  Description of Artificial Sequence: Synthetic oligonucleotide
  Antisense strand to SEQ ID NO: 988298
uacuuucaaguaugcauac

SEQ ID NO: 988300 - RNA, 19 nt, Artificial Sequence
  Description of Artificial Sequence: Synthetic oligonucleotide
  Sense strand starting at position 2149 of SEQ ID NO: 914233
uaucauucucgcuaaggga

SEQ ID NO: 988301 - RNA, 19 nt, Artificial Sequence
  Description of Artificial Sequence: Synthetic oligonucleotide
  Antisense strand to SEQ ID NO: 988300
ucccuuagcgagaaugaua

SEQ ID NO: 988302 - RNA, 19 nt, Artificial Sequence
  Description of Artificial Sequence: Synthetic oligonucleotide
  Sense strand starting at position 2232 of SEQ ID NO: 914233
uugagaaguaauggcuaca

SEQ ID NO: 988303 - RNA, 19 nt, Artificial Sequence
  Description of Artificial Sequence: Synthetic oligonucleotide
  Antisense strand to SEQ ID NO: 988302
uguagccauuacuucucaa

SEQ ID NO: 988304 - RNA, 19 nt, Artificial Sequence
  Description of Artificial Sequence: Synthetic oligonucleotide
  Sense strand starting at position 3608 of SEQ ID NO: 914233
ccuugcacaugauuagaau

SEQ ID NO: 988305 - RNA, 19 nt, Artificial Sequence
  Description of Artificial Sequence: Synthetic oligonucleotide
  Antisense strand to SEQ ID NO: 988304
auucuaaucaugugcaagg

SEQ ID NO: 988306 - RNA, 19 nt, Artificial Sequence
  Description of Artificial Sequence: Synthetic oligonucleotide
  Sense strand starting at position 505 of SEQ ID NO: 914233
auguaugcauacuugaaag

SEQ ID NO: 988307 - RNA, 19 nt, Artificial Sequence
  Description of Artificial Sequence: Synthetic oligonucleotide
  Antisense strand to SEQ ID NO: 988306
cuuucaaguaugcauacau

SEQ ID NO: 988308 - RNA, 19 nt, Artificial Sequence
  Description of Artificial Sequence: Synthetic oligonucleotide
  Sense strand starting at position 2273 of SEQ ID NO: 914233
auagguaguuccuugauaa

SEQ ID NO: 988309 - RNA, 19 nt, Artificial Sequence
  Description of Artificial Sequence: Synthetic oligonucleotide
  Antisense strand to SEQ ID NO: 988308
uuaucaaggaacuaccuau

SEQ ID NO: 988310 - RNA, 19 nt, Artificial Sequence
  Description of Artificial Sequence: Synthetic oligonucleotide
  Sense strand starting at position 3338 of SEQ ID NO: 914233
cgggcuucucuugaugaac

SEQ ID NO: 988311 - RNA, 19 nt, Artificial Sequence
  Description of Artificial Sequence: Synthetic oligonucleotide
  Antisense strand to SEQ ID NO: 988310
guucaucaagagaagcccg

SEQ ID NO: 988312 - RNA, 19 nt, Artificial Sequence
  Description of Artificial Sequence: Synthetic oligonucleotide
  Sense strand starting at position 2274 of SEQ ID NO: 914233
uagguaguuccuugauaau

SEQ ID NO: 988313 - RNA, 19 nt, Artificial Sequence
  Description of Artificial Sequence: Synthetic oligonucleotide
  Antisense strand to SEQ ID NO: 988312
auuaucaaggaacuaccua

SEQ ID NO: 988314 - RNA, 19 nt, Artificial Sequence
  Description of Artificial Sequence: Synthetic oligonucleotide
  Sense strand starting at position 3725 of SEQ ID NO: 914233
gguucugucugacugaaua

SEQ ID NO: 988315 - RNA, 19 nt, Artificial Sequence
  Description of Artificial Sequence: Synthetic oligonucleotide
  Antisense strand to SEQ ID NO: 988314
uauucagucagacagaacc

SEQ ID NO: 988316 - RNA, 19 nt, Artificial Sequence
  Description of Artificial Sequence: Synthetic oligonucleotide
  Sense strand starting at position 316 of SEQ ID NO: 914233
aguuacaucuuguuacaau

SEQ ID NO: 988317 - RNA, 19 nt, Artificial Sequence
  Description of Artificial Sequence: Synthetic oligonucleotide
  Antisense strand to SEQ ID NO: 988316
auuguaacaagauguaacu

SEQ ID NO: 988318 - RNA, 19 nt, Artificial Sequence
  Description of Artificial Sequence: Synthetic oligonucleotide
  Sense strand starting at position 527 of SEQ ID NO: 914233
agcuaucgugcugaaugaa

SEQ ID NO: 988319 - RNA, 19 nt, Artificial Sequence
  Description of Artificial Sequence: Synthetic oligonucleotide
  Antisense strand to SEQ ID NO: 988318
uucauucagcacgauagcu

SEQ ID NO: 988320 - RNA, 19 nt, Artificial Sequence
  Description of Artificial Sequence: Synthetic oligonucleotide
  Sense strand starting at position 3737 of SEQ ID NO: 914233
cugaauagcuauuccugua

SEQ ID NO: 988321 - RNA, 19 nt, Artificial Sequence
  Description of Artificial Sequence: Synthetic oligonucleotide
  Antisense strand to SEQ ID NO: 988320
uacaggaauagcuauucag

SEQ ID NO: 988322 - RNA, 19 nt, Artificial Sequence
  Description of Artificial Sequence: Synthetic oligonucleotide
  Sense strand starting at position 530 of SEQ ID NO: 914233
uaucgugcugaaugaauca

SEQ ID NO: 988323 - RNA, 19 nt, Artificial Sequence
  Description of Artificial Sequence: Synthetic oligonucleotide
  Antisense strand to SEQ ID NO: 988322
ugauucauucagcacgaua

SEQ ID NO: 988324 - RNA, 19 nt, Artificial Sequence
  Description of Artificial Sequence: Synthetic oligonucleotide
  Sense strand starting at position 3495 of SEQ ID NO: 914233
uagugugaacucugcuaag

SEQ ID NO: 988325 - RNA, 19 nt, Artificial Sequence
  Description of Artificial Sequence: Synthetic oligonucleotide
  Antisense strand to SEQ ID NO: 988324
cuuagcagaguucacacua

SEQ ID NO: 988326 - RNA, 19 nt, Artificial Sequence
  Description of Artificial Sequence: Synthetic oligonucleotide
  Sense strand starting at position 2283 of SEQ ID NO: 914233
ccuugauaaucuguagccu

SEQ ID NO: 988327 - RNA, 19 nt, Artificial Sequence
  Description of Artificial Sequence: Synthetic oligonucleotide
  Antisense strand to SEQ ID NO: 988326
aggcuacagauuaucaagg

SEQ ID NO: 988328 - RNA, 19 nt, Artificial Sequence
  Description of Artificial Sequence: Synthetic oligonucleotide
  Sense strand starting at position 3722 of SEQ ID NO: 914233
agugguucugucugacuga

SEQ ID NO: 988329 - RNA, 19 nt, Artificial Sequence
  Description of Artificial Sequence: Synthetic oligonucleotide
  Antisense strand to SEQ ID NO: 988328
ucagucagacagaaccacu

SEQ ID NO: 988330 - RNA, 19 nt, Artificial Sequence
  Description of Artificial Sequence: Synthetic oligonucleotide
  Sense strand starting at position 555 of SEQ ID NO: 914233
agugacuuugcgcauauau

SEQ ID NO: 988331 - RNA, 19 nt, Artificial Sequence
  Description of Artificial Sequence: Synthetic oligonucleotide
  Antisense strand to SEQ ID NO: 988330
auauaugcgcaaagucacu

SEQ ID NO: 988332 - RNA, 19 nt, Artificial Sequence
  Description of Artificial Sequence: Synthetic oligonucleotide
  Sense strand starting at position 305 of SEQ ID NO: 914233
ugguguuccucaguuacau

SEQ ID NO: 988333 - RNA, 19 nt, Artificial Sequence
  Description of Artificial Sequence: Synthetic oligonucleotide
  Antisense strand to SEQ ID NO: 988332
auguaacugaggaacacca

SEQ ID NO: 988334 - RNA, 19 nt, Artificial Sequence
  Description of Artificial Sequence: Synthetic oligonucleotide
  Sense strand starting at position 2221 of SEQ ID NO: 914233
aaagaaacauguugagaag

SEQ ID NO: 988335 - RNA, 19 nt, Artificial Sequence
  Description of Artificial Sequence: Synthetic oligonucleotide
  Antisense strand to SEQ ID NO: 988334
cuucucaacauguuucuuu

SEQ ID NO: 988336 - RNA, 19 nt, Artificial Sequence
  Description of Artificial Sequence: Synthetic oligonucleotide
  Sense strand starting at position 2224 of SEQ ID NO: 914233
gaaacauguugagaaguaa

SEQ ID NO: 988337 - RNA, 19 nt, Artificial Sequence
  Description of Artificial Sequence: Synthetic oligonucleotide
  Antisense strand to SEQ ID NO: 988336
uuacuucucaacauguuuc

SEQ ID NO: 988338 - RNA, 19 nt, Artificial Sequence
  Description of Artificial Sequence: Synthetic oligonucleotide
  Sense strand starting at position 3611 of SEQ ID NO: 914233
ugcacaugauuagaauaaa

SEQ ID NO: 988339 - RNA, 19 nt, Artificial Sequence
  Description of Artificial Sequence: Synthetic oligonucleotide
  Antisense strand to SEQ ID NO: 988338
uuuauucuaaucaugugca

SEQ ID NO: 988340 - RNA, 19 nt, Artificial Sequence
  Description of Artificial Sequence: Synthetic oligonucleotide
  Sense strand starting at position 303 of SEQ ID NO: 914233
gcugguguuccucaguuac

SEQ ID NO: 988341 - RNA, 19 nt, Artificial Sequence
  Description of Artificial Sequence: Synthetic oligonucleotide
  Antisense strand to SEQ ID NO: 988340
guaacugaggaacaccagc

SEQ ID NO: 988342 - RNA, 19 nt, Artificial Sequence
  Description of Artificial Sequence: Synthetic oligonucleotide
  Sense strand starting at position 3049 of SEQ ID NO: 914233
cucucuuucucagggauuu

SEQ ID NO: 988343 - RNA, 19 nt, Artificial Sequence
  Description of Artificial Sequence: Synthetic oligonucleotide
  Antisense strand to SEQ ID NO: 988342
aaaucccugagaaagagag

SEQ ID NO: 988344 - RNA, 19 nt, Artificial Sequence
  Description of Artificial Sequence: Synthetic oligonucleotide
  Sense strand starting at position 554 of SEQ ID NO: 914233
uagugacuuugcgcauaua

SEQ ID NO: 988345 - RNA, 19 nt, Artificial Sequence
  Description of Artificial Sequence: Synthetic oligonucleotide
  Antisense strand to SEQ ID NO: 988344
uauaugcgcaaagucacua

SEQ ID NO: 988346 - RNA, 19 nt, Artificial Sequence
  Description of Artificial Sequence: Synthetic oligonucleotide
  Sense strand starting at position 3460 of SEQ ID NO: 914233
uuauguuccugccugccaa

SEQ ID NO: 988347 - RNA, 19 nt, Artificial Sequence
  Description of Artificial Sequence: Synthetic oligonucleotide
  Antisense strand to SEQ ID NO: 988346
uuggcaggcaggaacauaa

SEQ ID NO: 988348 - RNA, 19 nt, Artificial Sequence
  Description of Artificial Sequence: Synthetic oligonucleotide
  Sense strand starting at position 466 of SEQ ID NO: 914233
guacaaaguuacgacaaga

SEQ ID NO: 988349 - RNA, 19 nt, Artificial Sequence
  Description of Artificial Sequence: Synthetic oligonucleotide
  Antisense strand to SEQ ID NO: 988348
ucuugucguaacuuuguac

SEQ ID NO: 988350 - RNA, 19 nt, Artificial Sequence
  Description of Artificial Sequence: Synthetic oligonucleotide
  Sense strand starting at position 3636 of SEQ ID NO: 914233
guuugcaaaucagaucaaa

SEQ ID NO: 988351 - RNA, 19 nt, Artificial Sequence
  Description of Artificial Sequence: Synthetic oligonucleotide
  Antisense strand to SEQ ID NO: 988350
uuugaucugauuugcaaac

SEQ ID NO: 988352 - RNA, 19 nt, Artificial Sequence
  Description of Artificial Sequence: Synthetic oligonucleotide
  Sense strand starting at position 112 of SEQ ID NO: 914233
uguaaucaguuccauaaag

SEQ ID NO: 988353 - RNA, 19 nt, Artificial Sequence
  Description of Artificial Sequence: Synthetic oligonucleotide
  Antisense strand to SEQ ID NO: 988352
cuuuauggaacugauuaca

SEQ ID NO: 988354 - RNA, 19 nt, Artificial Sequence
  Description of Artificial Sequence: Synthetic oligonucleotide
  Sense strand starting at position 3688 of SEQ ID NO: 914233
cugacuuccucaggagaua

SEQ ID NO: 988355 - RNA, 19 nt, Artificial Sequence
  Description of Artificial Sequence: Synthetic oligonucleotide
  Antisense strand to SEQ ID NO: 988354
uaucuccugaggaagucag

SEQ ID NO: 988356 - RNA, 19 nt, Artificial Sequence
  Description of Artificial Sequence: Synthetic oligonucleotide
  Sense strand starting at position 3498 of SEQ ID NO: 914233
ugugaacucugcuaagaag

SEQ ID NO: 988357 - RNA, 19 nt, Artificial Sequence
  Description of Artificial Sequence: Synthetic oligonucleotide
  Antisense strand to SEQ ID NO: 988356
cuucuuagcagaguucaca

SEQ ID NO: 988358 - RNA, 19 nt, Artificial Sequence
  Description of Artificial Sequence: Synthetic oligonucleotide
  Sense strand starting at position 552 of SEQ ID NO: 914233
gcuagugacuuugcgcaua

SEQ ID NO: 988359 - RNA, 19 nt, Artificial Sequence
  Description of Artificial Sequence: Synthetic oligonucleotide
  Antisense strand to SEQ ID NO: 988358
uaugcgcaaagucacuagc

SEQ ID NO: 988360 - RNA, 19 nt, Artificial Sequence
  Description of Artificial Sequence: Synthetic oligonucleotide
  Sense strand starting at position 668 of SEQ ID NO: 914233
gaccgaucauggcauacua

SEQ ID NO: 988361 - RNA, 19 nt, Artificial Sequence
  Description of Artificial Sequence: Synthetic oligonucleotide
  Antisense strand to SEQ ID NO: 988360
uaguaugccaugaucgguc

SEQ ID NO: 988362 - RNA, 19 nt, Artificial Sequence
  Description of Artificial Sequence: Synthetic oligonucleotide
  Sense strand starting at position 2351 of SEQ ID NO: 914233
aauuaaaucuguggaaggu

SEQ ID NO: 988363 - RNA, 19 nt, Artificial Sequence
  Description of Artificial Sequence: Synthetic oligonucleotide
  Antisense strand to SEQ ID NO: 988362
accuuccacagauuuaauu

SEQ ID NO: 988364 - RNA, 19 nt, Artificial Sequence
  Description of Artificial Sequence: Synthetic oligonucleotide
  Sense strand starting at position 317 of SEQ ID NO: 914233
guuacaucuuguuacaaua

SEQ ID NO: 988365 - RNA, 19 nt, Artificial Sequence
  Description of Artificial Sequence: Synthetic oligonucleotide
  Antisense strand to SEQ ID NO: 988364
uauuguaacaagauguaac

SEQ ID NO: 988366 - RNA, 19 nt, Artificial Sequence
  Description of Artificial Sequence: Synthetic oligonucleotide
  Sense strand starting at position 1000 of SEQ ID NO: 914234
ugcuucugggaucagagau

SEQ ID NO: 988367 - RNA, 19 nt, Artificial Sequence
  Description of Artificial Sequence: Synthetic oligonucleotide
  Antisense strand to SEQ ID NO: 988366
aucucugaucccagaagca

SEQ ID NO: 988368 - RNA, 19 nt, Artificial Sequence
  Description of Artificial Sequence: Synthetic oligonucleotide
  Sense strand starting at position 2656 of SEQ ID NO: 914234
agaacaaaucuguaacgua

SEQ ID NO: 988369 - RNA, 19 nt, Artificial Sequence
  Description of Artificial Sequence: Synthetic oligonucleotide
  Antisense strand to SEQ ID NO: 988368
uacguuacagauuuguucu

SEQ ID NO: 988370 - RNA, 19 nt, Artificial Sequence
  Description of Artificial Sequence: Synthetic oligonucleotide
  Sense strand starting at position 2320 of SEQ ID NO: 914234
caacuauuggauggaguua

SEQ ID NO: 988371 - RNA, 19 nt, Artificial Sequence
  Description of Artificial Sequence: Synthetic oligonucleotide
  Antisense strand to SEQ ID NO: 988370
uaacuccauccaauaguug

SEQ ID NO: 988372 - RNA, 19 nt, Artificial Sequence
  Description of Artificial Sequence: Synthetic oligonucleotide
  Sense strand starting at position 3265 of SEQ ID NO: 914234
acugaauuaugccugaaag

SEQ ID NO: 988373 - RNA, 19 nt, Artificial Sequence
  Description of Artificial Sequence: Synthetic oligonucleotide
  Antisense strand to SEQ ID NO: 988372
cuuucaggcauaauucagu

SEQ ID NO: 988374 - RNA, 19 nt, Artificial Sequence
  Description of Artificial Sequence: Synthetic oligonucleotide
  Sense strand starting at position 2743 of SEQ ID NO: 914234
gaagcuagugaugaguaua

SEQ ID NO: 988375 - RNA, 19 nt, Artificial Sequence
  Description of Artificial Sequence: Synthetic oligonucleotide
  Antisense strand to SEQ ID NO: 988374
uauacucaucacuagcuuc

SEQ ID NO: 988376 - RNA, 19 nt, Artificial Sequence
  Description of Artificial Sequence: Synthetic oligonucleotide
  Sense strand starting at position 3266 of SEQ ID NO: 914234
cugaauuaugccugaaagg

SEQ ID NO: 988377 - RNA, 19 nt, Artificial Sequence
  Description of Artificial Sequence: Synthetic oligonucleotide
  Antisense strand to SEQ ID NO: 988376
ccuuucaggcauaauucag

SEQ ID NO: 988378 - RNA, 19 nt, Artificial Sequence
  Description of Artificial Sequence: Synthetic oligonucleotide
  Sense strand starting at position 2746 of SEQ ID NO: 914234
gcuagugaugaguauaaau

SEQ ID NO: 988379 - RNA, 19 nt, Artificial Sequence
  Description of Artificial Sequence: Synthetic oligonucleotide
  Antisense strand to SEQ ID NO: 988378
auuuauacucaucacuagc

SEQ ID NO: 988380 - RNA, 19 nt, Artificial Sequence
  Description of Artificial Sequence: Synthetic oligonucleotide
  Sense strand starting at position 2617 of SEQ ID NO: 914234
ggaaaccaguuguuuaaau

SEQ ID NO: 988381 - RNA, 19 nt, Artificial Sequence
  Description of Artificial Sequence: Synthetic oligonucleotide
  Antisense strand to SEQ ID NO: 988380
auuuaaacaacugguuucc

SEQ ID NO: 988382 - RNA, 19 nt, Artificial Sequence
  Description of Artificial Sequence: Synthetic oligonucleotide
  Sense strand starting at position 2392 of SEQ ID NO: 914234
uccagaagucugcaaucca

SEQ ID NO: 988383 - RNA, 19 nt, Artificial Sequence
  Description of Artificial Sequence: Synthetic oligonucleotide
  Antisense strand to SEQ ID NO: 988382
uggauugcagacuucugga

SEQ ID NO: 988384 - RNA, 19 nt, Artificial Sequence
  Description of Artificial Sequence: Synthetic oligonucleotide
  Sense strand starting at position 2939 of SEQ ID NO: 914234
ucuauugaccuagguuaag

SEQ ID NO: 988385 - RNA, 19 nt, Artificial Sequence
  Description of Artificial Sequence: Synthetic oligonucleotide
  Antisense strand to SEQ ID NO: 988384
cuuaaccuaggucaauaga

SEQ ID NO: 988386 - RNA, 19 nt, Artificial Sequence
  Description of Artificial Sequence: Synthetic oligonucleotide
  Sense strand starting at position 2497 of SEQ ID NO: 914234
ggccuuuggaucuaguaac

SEQ ID NO: 988387 - RNA, 19 nt, Artificial Sequence
  Description of Artificial Sequence: Synthetic oligonucleotide
  Antisense strand to SEQ ID NO: 988386
guuacuagauccaaaggcc

SEQ ID NO: 988388 - RNA, 19 nt, Artificial Sequence
  Description of Artificial Sequence: Synthetic oligonucleotide
  Sense strand starting at position 1239 of SEQ ID NO: 914234
acaggaucucccugucaca

SEQ ID NO: 988389 - RNA, 19 nt, Artificial Sequence
  Description of Artificial Sequence: Synthetic oligonucleotide
  Antisense strand to SEQ ID NO: 988388
ugugacagggagauccugu

SEQ ID NO: 988390 - RNA, 19 nt, Artificial Sequence
  Description of Artificial Sequence: Synthetic oligonucleotide
  Sense strand starting at position 2382 of SEQ ID NO: 914234
ggaaucguaguccagaagu

SEQ ID NO: 988391 - RNA, 19 nt, Artificial Sequence
  Description of Artificial Sequence: Synthetic oligonucleotide
  Antisense strand to SEQ ID NO: 988390
acuucuggacuacgauucc

SEQ ID NO: 988392 - RNA, 19 nt, Artificial Sequence
  Description of Artificial Sequence: Synthetic oligonucleotide
  Sense strand starting at position 2770 of SEQ ID NO: 914234
uugagauauuuguaaccaa

SEQ ID NO: 988393 - RNA, 19 nt, Artificial Sequence
  Description of Artificial Sequence: Synthetic oligonucleotide
  Antisense strand to SEQ ID NO: 988392
uugguuacaaauaucucaa

SEQ ID NO: 988394 - RNA, 19 nt, Artificial Sequence
  Description of Artificial Sequence: Synthetic oligonucleotide
  Sense strand starting at position 67 of SEQ ID NO: 914234
uuuacaagucagugacuga

SEQ ID NO: 988395 - RNA, 19 nt, Artificial Sequence
  Description of Artificial Sequence: Synthetic oligonucleotide
  Antisense strand to SEQ ID NO: 988394
ucagucacugacuuguaaa

SEQ ID NO: 988396 - RNA, 19 nt, Artificial Sequence
  Description of Artificial Sequence: Synthetic oligonucleotide
  Sense strand starting at position 3932 of SEQ ID NO: 914234
uuuaacugcguggaucaaa

SEQ ID NO: 988397 - RNA, 19 nt, Artificial Sequence
  Description of Artificial Sequence: Synthetic oligonucleotide
  Antisense strand to SEQ ID NO: 988396
uuugauccacgcaguuaaa

SEQ ID NO: 988398 - RNA, 19 nt, Artificial Sequence
  Description of Artificial Sequence: Synthetic oligonucleotide
  Sense strand starting at position 2339 of SEQ ID NO: 914234
uugucuuaacucuggauag

SEQ ID NO: 988399 - RNA, 19 nt, Artificial Sequence
  Description of Artificial Sequence: Synthetic oligonucleotide
  Antisense strand to SEQ ID NO: 988398
cuauccagaguuaagacaa

SEQ ID NO: 988400 - RNA, 19 nt, Artificial Sequence
  Description of Artificial Sequence: Synthetic oligonucleotide
  Sense strand starting at position 3489 of SEQ ID NO: 914234
uaauuacugccagguggaa

SEQ ID NO: 988401 - RNA, 19 nt, Artificial Sequence
  Description of Artificial Sequence: Synthetic oligonucleotide
  Antisense strand to SEQ ID NO: 988400
uuccaccuggcaguaauua

SEQ ID NO: 988402 - RNA, 19 nt, Artificial Sequence
  Description of Artificial Sequence: Synthetic oligonucleotide
  Sense strand starting at position 3491 of SEQ ID NO: 914234
auuacugccagguggaaau

SEQ ID NO: 988403 - RNA, 19 nt, Artificial Sequence
  Description of Artificial Sequence: Synthetic oligonucleotide
  Antisense strand to SEQ ID NO: 988402
auuuccaccuggcaguaau

SEQ ID NO: 988404 - RNA, 19 nt, Artificial Sequence
  Description of Artificial Sequence: Synthetic oligonucleotide
  Sense strand starting at position 2924 of SEQ ID NO: 914234
acgucuuaacuggagucua

SEQ ID NO: 988405 - RNA, 19 nt, Artificial Sequence
  Description of Artificial Sequence: Synthetic oligonucleotide
  Antisense strand to SEQ ID NO: 988404
uagacuccaguuaagacgu

SEQ ID NO: 988406 - RNA, 19 nt, Artificial Sequence
  Description of Artificial Sequence: Synthetic oligonucleotide
  Sense strand starting at position 2380 of SEQ ID NO: 914234
ugggaaucguaguccagaa

SEQ ID NO: 988407 - RNA, 19 nt, Artificial Sequence
  Description of Artificial Sequence: Synthetic oligonucleotide
  Antisense strand to SEQ ID NO: 988406
uucuggacuacgauuccca

SEQ ID NO: 988408 - RNA, 19 nt, Artificial Sequence
  Description of Artificial Sequence: Synthetic oligonucleotide
  Sense strand starting at position 2319 of SEQ ID NO: 914234
gcaacuauuggauggaguu

SEQ ID NO: 988409 - RNA, 19 nt, Artificial Sequence
  Description of Artificial Sequence: Synthetic oligonucleotide
  Antisense strand to SEQ ID NO: 988408
aacuccauccaauaguugc

SEQ ID NO: 988410 - RNA, 19 nt, Artificial Sequence
  Description of Artificial Sequence: Synthetic oligonucleotide
  Sense strand starting at position 2384 of SEQ ID NO: 914234
aaucguaguccagaagucu

SEQ ID NO: 988411 - RNA, 19 nt, Artificial Sequence
  Description of Artificial Sequence: Synthetic oligonucleotide
  Antisense strand to SEQ ID NO: 988410
agacuucuggacuacgauu

SEQ ID NO: 988412 - RNA, 19 nt, Artificial Sequence
  Description of Artificial Sequence: Synthetic oligonucleotide
  Sense strand starting at position 2852 of SEQ ID NO: 914234
uuuccauagcccugacuga

SEQ ID NO: 988413 - RNA, 19 nt, Artificial Sequence
  Description of Artificial Sequence: Synthetic oligonucleotide
  Antisense strand to SEQ ID NO: 988412
ucagucagggcuauggaaa

SEQ ID NO: 988414 - RNA, 19 nt, Artificial Sequence
  Description of Artificial Sequence: Synthetic oligonucleotide
  Sense strand starting at position 2331 of SEQ ID NO: 914234
uggaguuauugucuuaacu

SEQ ID NO: 988415 - RNA, 19 nt, Artificial Sequence
  Description of Artificial Sequence: Synthetic oligonucleotide
  Antisense strand to SEQ ID NO: 988414
aguuaagacaauaacucca

SEQ ID NO: 988416 - RNA, 19 nt, Artificial Sequence
  Description of Artificial Sequence: Synthetic oligonucleotide
  Sense strand starting at position 2572 of SEQ ID NO: 914234
cuucucagaucguuuacaa

SEQ ID NO: 988417 - RNA, 19 nt, Artificial Sequence
  Description of Artificial Sequence: Synthetic oligonucleotide
  Antisense strand to SEQ ID NO: 988416
uuguaaacgaucugagaag

SEQ ID NO: 988418 - RNA, 19 nt, Artificial Sequence
  Description of Artificial Sequence: Synthetic oligonucleotide
  Sense strand starting at position 1364 of SEQ ID NO: 914234
cuguucuaagcuugggaca

SEQ ID NO: 988419 - RNA, 19 nt, Artificial Sequence
  Description of Artificial Sequence: Synthetic oligonucleotide
  Antisense strand to SEQ ID NO: 988418
ugucccaagcuuagaacag

SEQ ID NO: 988420 - RNA, 19 nt, Artificial Sequence
  Description of Artificial Sequence: Synthetic oligonucleotide
  Sense strand starting at position 2290 of SEQ ID NO: 914234
ugggaauuguaggcuguca

SEQ ID NO: 988421 - RNA, 19 nt, Artificial Sequence
  Description of Artificial Sequence: Synthetic oligonucleotide
  Antisense strand to SEQ ID NO: 988420
ugacagccuacaauuccca

SEQ ID NO: 988422 - RNA, 19 nt, Artificial Sequence
  Description of Artificial Sequence: Synthetic oligonucleotide
  Sense strand starting at position 3400 of SEQ ID NO: 914234
guagacauuuguuaauucu

SEQ ID NO: 988423 - RNA, 19 nt, Artificial Sequence
  Description of Artificial Sequence: Synthetic oligonucleotide
  Antisense strand to SEQ ID NO: 988422
agaauuaacaaaugucuac

SEQ ID NO: 988424 - RNA, 19 nt, Artificial Sequence
  Description of Artificial Sequence: Synthetic oligonucleotide
  Sense strand starting at position 1353 of SEQ ID NO: 914234
aguucugaagucuguucua

SEQ ID NO: 988425 - RNA, 19 nt, Artificial Sequence
  Description of Artificial Sequence: Synthetic oligonucleotide
  Antisense strand to SEQ ID NO: 988424
uagaacagacuucagaacu

SEQ ID NO: 988426 - RNA, 19 nt, Artificial Sequence
  Description of Artificial Sequence: Synthetic oligonucleotide
  Sense strand starting at position 2197 of SEQ ID NO: 914234
gccaacucccaacguuaua

SEQ ID NO: 988427 - RNA, 19 nt, Artificial Sequence
  Description of Artificial Sequence: Synthetic oligonucleotide
  Antisense strand to SEQ ID NO: 988426
uauaacguugggaguuggc

SEQ ID NO: 988428 - RNA, 19 nt, Artificial Sequence
  Description of Artificial Sequence: Synthetic oligonucleotide
  Sense strand starting at position 3976 of SEQ ID NO: 914234
gucaccaguuuguuaacuu

SEQ ID NO: 988429 - RNA, 19 nt, Artificial Sequence
  Description of Artificial Sequence: Synthetic oligonucleotide
  Antisense strand to SEQ ID NO: 988428
aaguuaacaaacuggugac

SEQ ID NO: 988430 - RNA, 19 nt, Artificial Sequence
  Description of Artificial Sequence: Synthetic oligonucleotide
  Sense strand starting at position 768 of SEQ ID NO: 914234
ugaguagaaucacacaaau

SEQ ID NO: 988431 - RNA, 19 nt, Artificial Sequence
  Description of Artificial Sequence: Synthetic oligonucleotide
  Antisense strand to SEQ ID NO: 988430
auuugugugauucuacuca

SEQ ID NO: 988432 - RNA, 19 nt, Artificial Sequence
  Description of Artificial Sequence: Synthetic oligonucleotide
  Sense strand starting at position 2543 of SEQ ID NO: 914234
uuagcagucuagguagguu

SEQ ID NO: 988433 - RNA, 19 nt, Artificial Sequence
  Description of Artificial Sequence: Synthetic oligonucleotide
  Antisense strand to SEQ ID NO: 988432
aaccuaccuagacugcuaa

SEQ ID NO: 988434 - RNA, 19 nt, Artificial Sequence
  Description of Artificial Sequence: Synthetic oligonucleotide
  Sense strand starting at position 2670 of SEQ ID NO: 914234
acguaauagugcuccuuua

SEQ ID NO: 988435 - RNA, 19 nt, Artificial Sequence
  Description of Artificial Sequence: Synthetic oligonucleotide
  Antisense strand to SEQ ID NO: 988434
uaaaggagcacuauuacgu

SEQ ID NO: 988436 - RNA, 19 nt, Artificial Sequence
  Description of Artificial Sequence: Synthetic oligonucleotide
  Sense strand starting at position 2477 of SEQ ID NO: 914234
guuguacuguuuguccaua

SEQ ID NO: 988437 - RNA, 19 nt, Artificial Sequence
  Description of Artificial Sequence: Synthetic oligonucleotide
  Antisense strand to SEQ ID NO: 988436
uauggacaaacaguacaac

SEQ ID NO: 988438 - RNA, 19 nt, Artificial Sequence
  Description of Artificial Sequence: Synthetic oligonucleotide
  Sense strand starting at position 2788 of SEQ ID NO: 914234
acuguaacaugguaugaaa

SEQ ID NO: 988439 - RNA, 19 nt, Artificial Sequence
  Description of Artificial Sequence: Synthetic oligonucleotide
  Antisense strand to SEQ ID NO: 988438
uuucauaccauguuacagu

SEQ ID NO: 988440 - RNA, 19 nt, Artificial Sequence
  Description of Artificial Sequence: Synthetic oligonucleotide
  Sense strand starting at position 2476 of SEQ ID NO: 914234
gguuguacuguuuguccau

SEQ ID NO: 988441 - RNA, 19 nt, Artificial Sequence
  Description of Artificial Sequence: Synthetic oligonucleotide
  Antisense strand to SEQ ID NO: 988440
auggacaaacaguacaacc

SEQ ID NO: 988442 - RNA, 19 nt, Artificial Sequence
  Description of Artificial Sequence: Synthetic oligonucleotide
  Sense strand starting at position 278 of SEQ ID NO: 914234
cugccuaugaucugugugu

SEQ ID NO: 988443 - RNA, 19 nt, Artificial Sequence
  Description of Artificial Sequence: Synthetic oligonucleotide
  Antisense strand to SEQ ID NO: 988442
acacacagaucauaggcag

SEQ ID NO: 988444 - RNA, 19 nt, Artificial Sequence
  Description of Artificial Sequence: Synthetic oligonucleotide
  Sense strand starting at position 911 of SEQ ID NO: 914234
agcaaagucuaugaucuaa

SEQ ID NO: 988445 - RNA, 19 nt, Artificial Sequence
  Description of Artificial Sequence: Synthetic oligonucleotide
  Antisense strand to SEQ ID NO: 988444
uuagaucauagacuuugcu

SEQ ID NO: 988446 - RNA, 19 nt, Artificial Sequence
  Description of Artificial Sequence: Synthetic oligonucleotide
  Sense strand starting at position 3407 of SEQ ID NO: 914235
ucaauugcugaucagaacu

SEQ ID NO: 988447 - RNA, 19 nt, Artificial Sequence
  Description of Artificial Sequence: Synthetic oligonucleotide
  Antisense strand to SEQ ID NO: 988446
aguucugaucagcaauuga

SEQ ID NO: 988448 - RNA, 19 nt, Artificial Sequence
  Description of Artificial Sequence: Synthetic oligonucleotide
  Sense strand starting at position 2416 of SEQ ID NO: 914235
agaauagugauccgggaga

SEQ ID NO: 988449 - RNA, 19 nt, Artificial Sequence
  Description of Artificial Sequence: Synthetic oligonucleotide
  Antisense strand to SEQ ID NO: 988448
ucucccggaucacuauucu

SEQ ID NO: 988450 - RNA, 19 nt, Artificial Sequence
  Description of Artificial Sequence: Synthetic oligonucleotide
  Sense strand starting at position 95 of SEQ ID NO: 914235
auuauagugccucaaagga

SEQ ID NO: 988451 - RNA, 19 nt, Artificial Sequence
  Description of Artificial Sequence: Synthetic oligonucleotide
  Antisense strand to SEQ ID NO: 988450
uccuuugaggcacuauaau

SEQ ID NO: 988452 - RNA, 19 nt, Artificial Sequence
  Description of Artificial Sequence: Synthetic oligonucleotide
  Sense strand starting at position 949 of SEQ ID NO: 914235
ccuguaucucaguaagagg

SEQ ID NO: 988453 - RNA, 19 nt, Artificial Sequence
  Description of Artificial Sequence: Synthetic oligonucleotide
  Antisense strand to SEQ ID NO: 988452
ccucuuacugagauacagg

SEQ ID NO: 988454 - RNA, 19 nt, Artificial Sequence
  Description of Artificial Sequence: Synthetic oligonucleotide
  Sense strand starting at position 2418 of SEQ ID NO: 914235
aauagugauccgggagaua

SEQ ID NO: 988455 - RNA, 19 nt, Artificial Sequence
  Description of Artificial Sequence: Synthetic oligonucleotide
  Antisense strand to SEQ ID NO: 988454
uaucucccggaucacuauu

SEQ ID NO: 988456 - RNA, 19 nt, Artificial Sequence
  Description of Artificial Sequence: Synthetic oligonucleotide
  Sense strand starting at position 2398 of SEQ ID NO: 914235
gacgcugggaaucaguaaa

SEQ ID NO: 988457 - RNA, 19 nt, Artificial Sequence
  Description of Artificial Sequence: Synthetic oligonucleotide
  Antisense strand to SEQ ID NO: 988456
uuuacugauucccagcguc

SEQ ID NO: 988458 - RNA, 19 nt, Artificial Sequence
  Description of Artificial Sequence: Synthetic oligonucleotide
  Sense strand starting at position 2577 of SEQ ID NO: 914235
gaccaagguagguaauguu

SEQ ID NO: 988459 - RNA, 19 nt, Artificial Sequence
  Description of Artificial Sequence: Synthetic oligonucleotide
  Antisense strand to SEQ ID NO: 988458
aacauuaccuaccuugguc

SEQ ID NO: 988460 - RNA, 19 nt, Artificial Sequence
  Description of Artificial Sequence: Synthetic oligonucleotide
  Sense strand starting at position 812 of SEQ ID NO: 914235
caggaaauccgcuaccuga

SEQ ID NO: 988461 - RNA, 19 nt, Artificial Sequence
  Description of Artificial Sequence: Synthetic oligonucleotide
  Antisense strand to SEQ ID NO: 988460
ucagguagcggauuuccug

SEQ ID NO: 988462 - RNA, 19 nt, Artificial Sequence
  Description of Artificial Sequence: Synthetic oligonucleotide
  Sense strand starting at position 1400 of SEQ ID NO: 914235
gagaaaucauuugagucaa

SEQ ID NO: 988463 - RNA, 19 nt, Artificial Sequence
  Description of Artificial Sequence: Synthetic oligonucleotide
  Antisense strand to SEQ ID NO: 988462
uugacucaaaugauuucuc

SEQ ID NO: 988464 - RNA, 19 nt, Artificial Sequence
  Description of Artificial Sequence: Synthetic oligonucleotide
  Sense strand starting at position 3406 of SEQ ID NO: 914235
aucaauugcugaucagaac

SEQ ID NO: 988465 - RNA, 19 nt, Artificial Sequence
  Description of Artificial Sequence: Synthetic oligonucleotide
  Antisense strand to SEQ ID NO: 988464
guucugaucagcaauugau

SEQ ID NO: 988466 - RNA, 19 nt, Artificial Sequence
  Description of Artificial Sequence: Synthetic oligonucleotide
  Sense strand starting at position 3555 of SEQ ID NO: 914235
ucucauguugauggaaaug

SEQ ID NO: 988467 - RNA, 19 nt, Artificial Sequence
  Description of Artificial Sequence: Synthetic oligonucleotide
  Antisense strand to SEQ ID NO: 988466
cauuuccaucaacaugaga

SEQ ID NO: 988468 - RNA, 19 nt, Artificial Sequence
  Description of Artificial Sequence: Synthetic oligonucleotide
  Sense strand starting at position 1383 of SEQ ID NO: 914235
gggagugucucacugaaga

SEQ ID NO: 988469 - RNA, 19 nt, Artificial Sequence
  Description of Artificial Sequence: Synthetic oligonucleotide
  Antisense strand to SEQ ID NO: 988468
ucuucagugagacacuccc

SEQ ID NO: 988470 - RNA, 19 nt, Artificial Sequence
  Description of Artificial Sequence: Synthetic oligonucleotide
  Sense strand starting at position 2002 of SEQ ID NO: 914235
cuaagauuacuuugaaguc

SEQ ID NO: 988471 - RNA, 19 nt, Artificial Sequence
  Description of Artificial Sequence: Synthetic oligonucleotide
  Antisense strand to SEQ ID NO: 988470
gacuucaaaguaaucuuag

SEQ ID NO: 988472 - RNA, 19 nt, Artificial Sequence
  Description of Artificial Sequence: Synthetic oligonucleotide
  Sense strand starting at position 3413 of SEQ ID NO: 914235
gcugaucagaacugaagua

SEQ ID NO: 988473 - RNA, 19 nt, Artificial Sequence
  Description of Artificial Sequence: Synthetic oligonucleotide
  Antisense strand to SEQ ID NO: 988472
uacuucaguucugaucagc

SEQ ID NO: 988474 - RNA, 19 nt, Artificial Sequence
  Description of Artificial Sequence: Synthetic oligonucleotide
  Sense strand starting at position 3600 of SEQ ID NO: 914235
aggguuaccauaugaguca

SEQ ID NO: 988475 - RNA, 19 nt, Artificial Sequence
  Description of Artificial Sequence: Synthetic oligonucleotide
  Antisense strand to SEQ ID NO: 988474
ugacucauaugguaacccu

SEQ ID NO: 988476 - RNA, 19 nt, Artificial Sequence
  Description of Artificial Sequence: Synthetic oligonucleotide
  Sense strand starting at position 1222 of SEQ ID NO: 914235
gagucuugccuugaccaga

SEQ ID NO: 988477 - RNA, 19 nt, Artificial Sequence
  Description of Artificial Sequence: Synthetic oligonucleotide
  Antisense strand to SEQ ID NO: 988476
ucuggucaaggcaagacuc

SEQ ID NO: 988478 - RNA, 19 nt, Artificial Sequence
  Description of Artificial Sequence: Synthetic oligonucleotide
  Sense strand starting at position 3735 of SEQ ID NO: 914235
ccauuagcuggugagugaa

SEQ ID NO: 988479 - RNA, 19 nt, Artificial Sequence
  Description of Artificial Sequence: Synthetic oligonucleotide
  Antisense strand to SEQ ID NO: 988478
uucacucaccagcuaaugg

SEQ ID NO: 988480 - RNA, 19 nt, Artificial Sequence
  Description of Artificial Sequence: Synthetic oligonucleotide
  Sense strand starting at position 440 of SEQ ID NO: 914235
cccggaguuguguccguuu

SEQ ID NO: 988481 - RNA, 19 nt, Artificial Sequence
  Description of Artificial Sequence: Synthetic oligonucleotide
  Antisense strand to SEQ ID NO: 988480
aaacggacacaacuccggg

SEQ ID NO: 988482 - RNA, 19 nt, Artificial Sequence
  Description of Artificial Sequence: Synthetic oligonucleotide
  Sense strand starting at position 3916 of SEQ ID NO: 914235
augucuagauuugacaaau

SEQ ID NO: 988483 - RNA, 19 nt, Artificial Sequence
  Description of Artificial Sequence: Synthetic oligonucleotide
  Antisense strand to SEQ ID NO: 988482
auuugucaaaucuagacau

SEQ ID NO: 988484 - RNA, 19 nt, Artificial Sequence
  Description of Artificial Sequence: Synthetic oligonucleotide
  Sense strand starting at position 1227 of SEQ ID NO: 914235
uugccuugaccagaguuua

SEQ ID NO: 988485 - RNA, 19 nt, Artificial Sequence
  Description of Artificial Sequence: Synthetic oligonucleotide
  Antisense strand to SEQ ID NO: 988484
uaaacucuggucaaggcaa

SEQ ID NO: 988486 - RNA, 19 nt, Artificial Sequence
  Description of Artificial Sequence: Synthetic oligonucleotide
  Sense strand starting at position 799 of SEQ ID NO: 914235
ccaggauguucugcaggaa

SEQ ID NO: 988487 - RNA, 19 nt, Artificial Sequence
  Description of Artificial Sequence: Synthetic oligonucleotide
  Antisense strand to SEQ ID NO: 988486
uuccugcagaacauccugg

SEQ ID NO: 988488 - RNA, 19 nt, Artificial Sequence
  Description of Artificial Sequence: Synthetic oligonucleotide
  Sense strand starting at position 93 of SEQ ID NO: 914235
auauuauagugccucaaag

SEQ ID NO: 988489 - RNA, 19 nt, Artificial Sequence
  Description of Artificial Sequence: Synthetic oligonucleotide
  Antisense strand to SEQ ID NO: 988488
cuuugaggcacuauaauau

SEQ ID NO: 988490 - RNA, 19 nt, Artificial Sequence
  Description of Artificial Sequence: Synthetic oligonucleotide
  Sense strand starting at position 3811 of SEQ ID NO: 914235
gcuaaauaaugguuacuac

SEQ ID NO: 988491 - RNA, 19 nt, Artificial Sequence
  Description of Artificial Sequence: Synthetic oligonucleotide
  Antisense strand to SEQ ID NO: 988490
guaguaaccauuauuuagc

SEQ ID NO: 988492 - RNA, 19 nt, Artificial Sequence
  Description of Artificial Sequence: Synthetic oligonucleotide
  Sense strand starting at position 1183 of SEQ ID NO: 914235
aacaaauguggauguguau

SEQ ID NO: 988493 - RNA, 19 nt, Artificial Sequence
  Description of Artificial Sequence: Synthetic oligonucleotide
  Antisense strand to SEQ ID NO: 988492
auacacauccacauuuguu

SEQ ID NO: 988494 - RNA, 19 nt, Artificial Sequence
  Description of Artificial Sequence: Synthetic oligonucleotide
  Sense strand starting at position 571 of SEQ ID NO: 914235
gccuucuguccugagauga

SEQ ID NO: 988495 - RNA, 19 nt, Artificial Sequence
  Description of Artificial Sequence: Synthetic oligonucleotide
  Antisense strand to SEQ ID NO: 988494
ucaucucaggacagaaggc

SEQ ID NO: 988496 - RNA, 19 nt, Artificial Sequence
  Description of Artificial Sequence: Synthetic oligonucleotide
  Sense strand starting at position 802 of SEQ ID NO: 914235
ggauguucugcaggaaauc

SEQ ID NO: 988497 - RNA, 19 nt, Artificial Sequence
  Description of Artificial Sequence: Synthetic oligonucleotide
  Antisense strand to SEQ ID NO: 988496
gauuuccugcagaacaucc

SEQ ID NO: 988498 - RNA, 19 nt, Artificial Sequence
  Description of Artificial Sequence: Synthetic oligonucleotide
  Sense strand starting at position 948 of SEQ ID NO: 914235
cccuguaucucaguaagag

SEQ ID NO: 988499 - RNA, 19 nt, Artificial Sequence
  Description of Artificial Sequence: Synthetic oligonucleotide
  Antisense strand to SEQ ID NO: 988498
cucuuacugagauacaggg

SEQ ID NO: 988500 - RNA, 19 nt, Artificial Sequence
  Description of Artificial Sequence: Synthetic oligonucleotide
  Sense strand starting at position 2591 of SEQ ID NO: 914235
auguucuuugcagaguaca

SEQ ID NO: 988501 - RNA, 19 nt, Artificial Sequence
  Description of Artificial Sequence: Synthetic oligonucleotide
  Antisense strand to SEQ ID NO: 988500
uguacucugcaaagaacau

SEQ ID NO: 988502 - RNA, 19 nt, Artificial Sequence
  Description of Artificial Sequence: Synthetic oligonucleotide
  Sense strand starting at position 1684 of SEQ ID NO: 914235
gagcacauccuguggauua

SEQ ID NO: 988503 - RNA, 19 nt, Artificial Sequence
  Description of Artificial Sequence: Synthetic oligonucleotide
  Antisense strand to SEQ ID NO: 988502
uaauccacaggaugugcuc

SEQ ID NO: 988504 - RNA, 19 nt, Artificial Sequence
  Description of Artificial Sequence: Synthetic oligonucleotide
  Sense strand starting at position 2391 of SEQ ID NO: 914235
uuucuaagacgcugggaau

SEQ ID NO: 988505 - RNA, 19 nt, Artificial Sequence
  Description of Artificial Sequence: Synthetic oligonucleotide
  Antisense strand to SEQ ID NO: 988504
auucccagcgucuuagaaa

SEQ ID NO: 988506 - RNA, 19 nt, Artificial Sequence
  Description of Artificial Sequence: Synthetic oligonucleotide
  Sense strand starting at position 2247 of SEQ ID NO: 914235
ggaaguucuuucucuacuc

SEQ ID NO: 988507 - RNA, 19 nt, Artificial Sequence
  Description of Artificial Sequence: Synthetic oligonucleotide
  Antisense strand to SEQ ID NO: 988506
gaguagagaaagaacuucc

SEQ ID NO: 988508 - RNA, 19 nt, Artificial Sequence
  Description of Artificial Sequence: Synthetic oligonucleotide
  Sense strand starting at position 1189 of SEQ ID NO: 914235
uguggauguguauaucagu

SEQ ID NO: 988509 - RNA, 19 nt, Artificial Sequence
  Description of Artificial Sequence: Synthetic oligonucleotide
  Antisense strand to SEQ ID NO: 988508
acugauauacacauccaca

SEQ ID NO: 988510 - RNA, 19 nt, Artificial Sequence
  Description of Artificial Sequence: Synthetic oligonucleotide
  Sense strand starting at position 1668 of SEQ ID NO: 914235
gugaaaccgucuccuagag

SEQ ID NO: 988511 - RNA, 19 nt, Artificial Sequence
  Description of Artificial Sequence: Synthetic oligonucleotide
  Antisense strand to SEQ ID NO: 988510
cucuaggagacgguuucac

SEQ ID NO: 988512 - RNA, 19 nt, Artificial Sequence
  Description of Artificial Sequence: Synthetic oligonucleotide
  Sense strand starting at position 910 of SEQ ID NO: 914235
cuuacagguuuccuuaagu

SEQ ID NO: 988513 - RNA, 19 nt, Artificial Sequence
  Description of Artificial Sequence: Synthetic oligonucleotide
  Antisense strand to SEQ ID NO: 988512
acuuaaggaaaccuguaag

SEQ ID NO: 988514 - RNA, 19 nt, Artificial Sequence
  Description of Artificial Sequence: Synthetic oligonucleotide
  Sense strand starting at position 769 of SEQ ID NO: 914235
ggucgagacccuuagcagu

SEQ ID NO: 988515 - RNA, 19 nt, Artificial Sequence
  Description of Artificial Sequence: Synthetic oligonucleotide
  Antisense strand to SEQ ID NO: 988514
acugcuaagggucucgacc

SEQ ID NO: 988516 - RNA, 19 nt, Artificial Sequence
  Description of Artificial Sequence: Synthetic oligonucleotide
  Sense strand starting at position 2244 of SEQ ID NO: 914235
uguggaaguucuuucucua

SEQ ID NO: 988517 - RNA, 19 nt, Artificial Sequence
  Description of Artificial Sequence: Synthetic oligonucleotide
  Antisense strand to SEQ ID NO: 988516
uagagaaagaacuuccaca

SEQ ID NO: 988518 - RNA, 19 nt, Artificial Sequence
  Description of Artificial Sequence: Synthetic oligonucleotide
  Sense strand starting at position 2586 of SEQ ID NO: 914235
agguaauguucuuugcaga

SEQ ID NO: 988519 - RNA, 19 nt, Artificial Sequence
  Description of Artificial Sequence: Synthetic oligonucleotide
  Antisense strand to SEQ ID NO: 988518
ucugcaaagaacauuaccu

SEQ ID NO: 988520 - RNA, 19 nt, Artificial Sequence
  Description of Artificial Sequence: Synthetic oligonucleotide
  Sense strand starting at position 1218 of SEQ ID NO: 914235
uugagagucuugccuugac

SEQ ID NO: 988521 - RNA, 19 nt, Artificial Sequence
  Description of Artificial Sequence: Synthetic oligonucleotide
  Antisense strand to SEQ ID NO: 988520
gucaaggcaagacucucaa

SEQ ID NO: 988522 - RNA, 19 nt, Artificial Sequence
  Description of Artificial Sequence: Synthetic oligonucleotide
  Sense strand starting at position 3142 of SEQ ID NO: 914235
aagucuugauuugauaguu

SEQ ID NO: 988523 - RNA, 19 nt, Artificial Sequence
  Description of Artificial Sequence: Synthetic oligonucleotide
  Antisense strand to SEQ ID NO: 988522
aacuaucaaaucaagacuu

SEQ ID NO: 988524 - RNA, 19 nt, Artificial Sequence
  Description of Artificial Sequence: Synthetic oligonucleotide
  Sense strand starting at position 40 of SEQ ID NO: 914235
agaucaugcagugguaagu

SEQ ID NO: 988525 - RNA, 19 nt, Artificial Sequence
  Description of Artificial Sequence: Synthetic oligonucleotide
  Antisense strand to SEQ ID NO: 988524
acuuaccacugcaugaucu

SEQ ID NO: 988526 - RNA, 19 nt, Artificial Sequence
  Description of Artificial Sequence: Synthetic oligonucleotide
  Sense strand starting at position 297 of SEQ ID NO: 914236
ccacuuuaaguguauacuu

SEQ ID NO: 988527 - RNA, 19 nt, Artificial Sequence
  Description of Artificial Sequence: Synthetic oligonucleotide
  Antisense strand to SEQ ID NO: 988526
aaguauacacuuaaagugg

SEQ ID NO: 988528 - RNA, 19 nt, Artificial Sequence
  Description of Artificial Sequence: Synthetic oligonucleotide
  Sense strand starting at position 328 of SEQ ID NO: 914236
guacauuuacaguguucuu

SEQ ID NO: 988529 - RNA, 19 nt, Artificial Sequence
  Description of Artificial Sequence: Synthetic oligonucleotide
  Antisense strand to SEQ ID NO: 988528
aagaacacuguaaauguac

SEQ ID NO: 988530 - RNA, 19 nt, Artificial Sequence
  Description of Artificial Sequence: Synthetic oligonucleotide
  Sense strand starting at position 333 of SEQ ID NO: 914236
uuuacaguguucuuuagac

SEQ ID NO: 988531 - RNA, 19 nt, Artificial Sequence
  Description of Artificial Sequence: Synthetic oligonucleotide
  Antisense strand to SEQ ID NO: 988530
gucuaaagaacacuguaaa

SEQ ID NO: 988532 - RNA, 19 nt, Artificial Sequence
  Description of Artificial Sequence: Synthetic oligonucleotide
  Sense strand starting at position 352 of SEQ ID NO: 914236
uuugauuucuuacaucagu

SEQ ID NO: 988533 - RNA, 19 nt, Artificial Sequence
  Description of Artificial Sequence: Synthetic oligonucleotide
  Antisense strand to SEQ ID NO: 988532
acugauguaagaaaucaaa

SEQ ID NO: 988534 - RNA, 19 nt, Artificial Sequence
  Description of Artificial Sequence: Synthetic oligonucleotide
  Sense strand starting at position 530 of SEQ ID NO: 914236
uucuuuagauaaugggaau

SEQ ID NO: 988535 - RNA, 19 nt, Artificial Sequence
  Description of Artificial Sequence: Synthetic oligonucleotide
  Antisense strand to SEQ ID NO: 988534
auucccauuaucuaaagaa

SEQ ID NO: 988536 - RNA, 19 nt, Artificial Sequence
  Description of Artificial Sequence: Synthetic oligonucleotide
  Sense strand starting at position 1023 of SEQ ID NO: 914236
uagguacuacauugaguuu

SEQ ID NO: 988537 - RNA, 19 nt, Artificial Sequence
  Description of Artificial Sequence: Synthetic oligonucleotide
  Antisense strand to SEQ ID NO: 988536
aaacucaauguaguaccua

SEQ ID NO: 988538 - RNA, 19 nt, Artificial Sequence
  Description of Artificial Sequence: Synthetic oligonucleotide
  Sense strand starting at position 1181 of SEQ ID NO: 914236
ucacuuuacugugauuuau

SEQ ID NO: 988539 - RNA, 19 nt, Artificial Sequence
  Description of Artificial Sequence: Synthetic oligonucleotide
  Antisense strand to SEQ ID NO: 988538
auaaaucacaguaaaguga

SEQ ID NO: 988540 - RNA, 19 nt, Artificial Sequence
  Description of Artificial Sequence: Synthetic oligonucleotide
  Sense strand starting at position 1200 of SEQ ID NO: 914236
cuaguaauaccguaugaug

SEQ ID NO: 988541 - RNA, 19 nt, Artificial Sequence
  Description of Artificial Sequence: Synthetic oligonucleotide
  Antisense strand to SEQ ID NO: 988540
caucauacgguauuacuag

SEQ ID NO: 988542 - RNA, 19 nt, Artificial Sequence
  Description of Artificial Sequence: Synthetic oligonucleotide
  Sense strand starting at position 1202 of SEQ ID NO: 914236
aguaauaccguaugaugua

SEQ ID NO: 988543 - RNA, 19 nt, Artificial Sequence
  Description of Artificial Sequence: Synthetic oligonucleotide
  Antisense strand to SEQ ID NO: 988542
uacaucauacgguauuacu

SEQ ID NO: 988544 - RNA, 19 nt, Artificial Sequence
  Description of Artificial Sequence: Synthetic oligonucleotide
  Sense strand starting at position 1209 of SEQ ID NO: 914236
ccguaugauguagguacua

SEQ ID NO: 988545 - RNA, 19 nt, Artificial Sequence
  Description of Artificial Sequence: Synthetic oligonucleotide
  Antisense strand to SEQ ID NO: 988544
uaguaccuacaucauacgg

SEQ ID NO: 988546 - RNA, 19 nt, Artificial Sequence
  Description of Artificial Sequence: Synthetic oligonucleotide
  Sense strand starting at position 1211 of SEQ ID NO: 914236
guaugauguagguacuauu

SEQ ID NO: 988547 - RNA, 19 nt, Artificial Sequence
  Description of Artificial Sequence: Synthetic oligonucleotide
  Antisense strand to SEQ ID NO: 988546
aauaguaccuacaucauac

SEQ ID NO: 988548 - RNA, 19 nt, Artificial Sequence
  Description of Artificial Sequence: Synthetic oligonucleotide
  Sense strand starting at position 1445 of SEQ ID NO: 914236
guggaacccugucuucuaa

SEQ ID NO: 988549 - RNA, 19 nt, Artificial Sequence
  Description of Artificial Sequence: Synthetic oligonucleotide
  Antisense strand to SEQ ID NO: 988548
uuagaagacaggguuccac

SEQ ID NO: 988550 - RNA, 19 nt, Artificial Sequence
  Description of Artificial Sequence: Synthetic oligonucleotide
  Sense strand starting at position 1447 of SEQ ID NO: 914236
ggaacccugucuucuaaca

SEQ ID NO: 988551 - RNA, 19 nt, Artificial Sequence
  Description of Artificial Sequence: Synthetic oligonucleotide
  Antisense strand to SEQ ID NO: 988550
uguuagaagacaggguucc

SEQ ID NO: 988552 - RNA, 19 nt, Artificial Sequence
  Description of Artificial Sequence: Synthetic oligonucleotide
  Sense strand starting at position 1481 of SEQ ID NO: 914236
caccgucuccugucauguu

SEQ ID NO: 988553 - RNA, 19 nt, Artificial Sequence
  Description of Artificial Sequence: Synthetic oligonucleotide
  Antisense strand to SEQ ID NO: 988552
aacaugacaggagacggug

SEQ ID NO: 988554 - RNA, 19 nt, Artificial Sequence
  Description of Artificial Sequence: Synthetic oligonucleotide
  Sense strand starting at position 1491 of SEQ ID NO: 914236
ugucauguuccgccucuca

SEQ ID NO: 988555 - RNA, 19 nt, Artificial Sequence
  Description of Artificial Sequence: Synthetic oligonucleotide
  Antisense strand to SEQ ID NO: 988554
ugagaggcggaacaugaca

SEQ ID NO: 988556 - RNA, 19 nt, Artificial Sequence
  Description of Artificial Sequence: Synthetic oligonucleotide
  Sense strand starting at position 1528 of SEQ ID NO: 914236
cuccgauucuggucccuga

SEQ ID NO: 988557 - RNA, 19 nt, Artificial Sequence
  Description of Artificial Sequence: Synthetic oligonucleotide
  Antisense strand to SEQ ID NO: 988556
ucagggaccagaaucggag

SEQ ID NO: 988558 - RNA, 19 nt, Artificial Sequence
  Description of Artificial Sequence: Synthetic oligonucleotide
  Sense strand starting at position 1531 of SEQ ID NO: 914236
cgauucuggucccugaaca

SEQ ID NO: 988559 - RNA, 19 nt, Artificial Sequence
  Description of Artificial Sequence: Synthetic oligonucleotide
  Antisense strand to SEQ ID NO: 988558
uguucagggaccagaaucg

SEQ ID NO: 988560 - RNA, 19 nt, Artificial Sequence
  Description of Artificial Sequence: Synthetic oligonucleotide
  Sense strand starting at position 1532 of SEQ ID NO: 914236
gauucuggucccugaacag

SEQ ID NO: 988561 - RNA, 19 nt, Artificial Sequence
  Description of Artificial Sequence: Synthetic oligonucleotide
  Antisense strand to SEQ ID NO: 988560
cuguucagggaccagaauc

SEQ ID NO: 988562 - RNA, 19 nt, Artificial Sequence
  Description of Artificial Sequence: Synthetic oligonucleotide
  Sense strand starting at position 1650 of SEQ ID NO: 914236
agaguuccguucccucaga

SEQ ID NO: 988563 - RNA, 19 nt, Artificial Sequence
  Description of Artificial Sequence: Synthetic oligonucleotide
  Antisense strand to SEQ ID NO: 988562
ucugagggaacggaacucu

SEQ ID NO: 988564 - RNA, 19 nt, Artificial Sequence
  Description of Artificial Sequence: Synthetic oligonucleotide
  Sense strand starting at position 1651 of SEQ ID NO: 914236
gaguuccguucccucagau

SEQ ID NO: 988565 - RNA, 19 nt, Artificial Sequence
  Description of Artificial Sequence: Synthetic oligonucleotide
  Antisense strand to SEQ ID NO: 988564
aucugagggaacggaacuc

SEQ ID NO: 988566 - RNA, 19 nt, Artificial Sequence
  Description of Artificial Sequence: Synthetic oligonucleotide
  Sense strand starting at position 2027 of SEQ ID NO: 914236
gggaauacgcccugcaguu

SEQ ID NO: 988567 - RNA, 19 nt, Artificial Sequence
  Description of Artificial Sequence: Synthetic oligonucleotide
  Antisense strand to SEQ ID NO: 988566
aacugcagggcguauuccc

SEQ ID NO: 988568 - RNA, 19 nt, Artificial Sequence
  Description of Artificial Sequence: Synthetic oligonucleotide
  Sense strand starting at position 2082 of SEQ ID NO: 914236
uggccauuguucucgagaa

SEQ ID NO: 988569 - RNA, 19 nt, Artificial Sequence
  Description of Artificial Sequence: Synthetic oligonucleotide
  Antisense strand to SEQ ID NO: 988568
uucucgagaacaauggcca

SEQ ID NO: 988570 - RNA, 19 nt, Artificial Sequence
  Description of Artificial Sequence: Synthetic oligonucleotide
  Sense strand starting at position 2084 of SEQ ID NO: 914236
gccauuguucucgagaagu

SEQ ID NO: 988571 - RNA, 19 nt, Artificial Sequence
  Description of Artificial Sequence: Synthetic oligonucleotide
  Antisense strand to SEQ ID NO: 988570
acuucucgagaacaauggc

SEQ ID NO: 988572 - RNA, 19 nt, Artificial Sequence
  Description of Artificial Sequence: Synthetic oligonucleotide
  Sense strand starting at position 2359 of SEQ ID NO: 914236
uccugucgucuguaagguu

SEQ ID NO: 988573 - RNA, 19 nt, Artificial Sequence
  Description of Artificial Sequence: Synthetic oligonucleotide
  Antisense strand to SEQ ID NO: 988572
aaccuuacagacgacagga

SEQ ID NO: 988574 - RNA, 19 nt, Artificial Sequence
  Description of Artificial Sequence: Synthetic oligonucleotide
  Sense strand starting at position 3349 of SEQ ID NO: 914236
aggguuaauuccuccucca

SEQ ID NO: 988575 - RNA, 19 nt, Artificial Sequence
  Description of Artificial Sequence: Synthetic oligonucleotide
  Antisense strand to SEQ ID NO: 988574
uggaggaggaauuaacccu

SEQ ID NO: 988576 - RNA, 19 nt, Artificial Sequence
  Description of Artificial Sequence: Synthetic oligonucleotide
  Sense strand starting at position 3564 of SEQ ID NO: 914236
gugcuuguugcucauguuu

SEQ ID NO: 988577 - RNA, 19 nt, Artificial Sequence
  Description of Artificial Sequence: Synthetic oligonucleotide
  Antisense strand to SEQ ID NO: 988576
aaacaugagcaacaagcac

SEQ ID NO: 988578 - RNA, 19 nt, Artificial Sequence
  Description of Artificial Sequence: Synthetic oligonucleotide
  Sense strand starting at position 3604 of SEQ ID NO: 914236
uauuauugguguucgcaag

SEQ ID NO: 988579 - RNA, 19 nt, Artificial Sequence
  Description of Artificial Sequence: Synthetic oligonucleotide
  Antisense strand to SEQ ID NO: 988578
cuugcgaacaccaauaaua

SEQ ID NO: 988580 - RNA, 19 nt, Artificial Sequence
  Description of Artificial Sequence: Synthetic oligonucleotide
  Sense strand starting at position 3605 of SEQ ID NO: 914236
auuauugguguucgcaagu

SEQ ID NO: 988581 - RNA, 19 nt, Artificial Sequence
  Description of Artificial Sequence: Synthetic oligonucleotide
  Antisense strand to SEQ ID NO: 988580
acuugcgaacaccaauaau

SEQ ID NO: 988582 - RNA, 19 nt, Artificial Sequence
  Description of Artificial Sequence: Synthetic oligonucleotide
  Sense strand starting at position 3608 of SEQ ID NO: 914236
auugguguucgcaaguggu

SEQ ID NO: 988583 - RNA, 19 nt, Artificial Sequence
  Description of Artificial Sequence: Synthetic oligonucleotide
  Antisense strand to SEQ ID NO: 988582
accacuugcgaacaccaau

SEQ ID NO: 988584 - RNA, 19 nt, Artificial Sequence
  Description of Artificial Sequence: Synthetic oligonucleotide
  Sense strand starting at position 3820 of SEQ ID NO: 914236
uuucuuuccucagagaagg

SEQ ID NO: 988585 - RNA, 19 nt, Artificial Sequence
  Description of Artificial Sequence: Synthetic oligonucleotide
  Antisense strand to SEQ ID NO: 988584
ccuucucugaggaaagaaa

SEQ ID NO: 988586 - RNA, 19 nt, Artificial Sequence
  Description of Artificial Sequence: Synthetic oligonucleotide
  Sense strand starting at position 3843 of SEQ ID NO: 914236
uuuguuauacucugagcau

SEQ ID NO: 988587 - RNA, 19 nt, Artificial Sequence
  Description of Artificial Sequence: Synthetic oligonucleotide
  Antisense strand to SEQ ID NO: 988586
augcucagaguauaacaaa

SEQ ID NO: 988588 - RNA, 19 nt, Artificial Sequence
  Description of Artificial Sequence: Synthetic oligonucleotide
  Sense strand starting at position 3852 of SEQ ID NO: 914236
cucugagcauugccuuuau

SEQ ID NO: 988589 - RNA, 19 nt, Artificial Sequence
  Description of Artificial Sequence: Synthetic oligonucleotide
  Antisense strand to SEQ ID NO: 988588
auaaaggcaaugcucagag

SEQ ID NO: 988590 - RNA, 19 nt, Artificial Sequence
  Description of Artificial Sequence: Synthetic oligonucleotide
  Sense strand starting at position 3879 of SEQ ID NO: 914236
agcccuuggcuggagaaga

SEQ ID NO: 988591 - RNA, 19 nt, Artificial Sequence
  Description of Artificial Sequence: Synthetic oligonucleotide
  Antisense strand to SEQ ID NO: 988590
ucuucuccagccaagggcu

SEQ ID NO: 988592 - RNA, 19 nt, Artificial Sequence
  Description of Artificial Sequence: Synthetic oligonucleotide
  Sense strand starting at position 3927 of SEQ ID NO: 914236
uccauauuagcuggccaaa

SEQ ID NO: 988593 - RNA, 19 nt, Artificial Sequence
  Description of Artificial Sequence: Synthetic oligonucleotide
  Antisense strand to SEQ ID NO: 988592
uuuggccagcuaauaugga

SEQ ID NO: 988594 - RNA, 19 nt, Artificial Sequence
  Description of Artificial Sequence: Synthetic oligonucleotide
  Sense strand starting at position 3929 of SEQ ID NO: 914236
cauauuagcuggccaaagu

SEQ ID NO: 988595 - RNA, 19 nt, Artificial Sequence
  Description of Artificial Sequence: Synthetic oligonucleotide
  Antisense strand to SEQ ID NO: 988594
acuuuggccagcuaauaug

SEQ ID NO: 988596 - RNA, 19 nt, Artificial Sequence
  Description of Artificial Sequence: Synthetic oligonucleotide
  Sense strand starting at position 3940 of SEQ ID NO: 914236
gccaaaguggauugguuau

SEQ ID NO: 988597 - RNA, 19 nt, Artificial Sequence
  Description of Artificial Sequence: Synthetic oligonucleotide
  Antisense strand to SEQ ID NO: 988596
auaaccaauccacuuuggc

SEQ ID NO: 988598 - RNA, 19 nt, Artificial Sequence
  Description of Artificial Sequence: Synthetic oligonucleotide
  Sense strand starting at position 3946 of SEQ ID NO: 914236
guggauugguuauuguaca

SEQ ID NO: 988599 - RNA, 19 nt, Artificial Sequence
  Description of Artificial Sequence: Synthetic oligonucleotide
  Antisense strand to SEQ ID NO: 988598
uguacaauaaccaauccac

SEQ ID NO: 988600 - RNA, 19 nt, Artificial Sequence
  Description of Artificial Sequence: Synthetic oligonucleotide
  Sense strand starting at position 3951 of SEQ ID NO: 914236
uugguuauuguacaagaca

SEQ ID NO: 988601 - RNA, 19 nt, Artificial Sequence
  Description of Artificial Sequence: Synthetic oligonucleotide
  Antisense strand to SEQ ID NO: 988600
ugucuuguacaauaaccaa

SEQ ID NO: 988602 - RNA, 19 nt, Artificial Sequence
  Description of Artificial Sequence: Synthetic oligonucleotide
  Sense strand starting at position 3967 of SEQ ID NO: 914236
acagauagcuguuuccuuu

SEQ ID NO: 988603 - RNA, 19 nt, Artificial Sequence
  Description of Artificial Sequence: Synthetic oligonucleotide
  Antisense strand to SEQ ID NO: 988602
aaaggaaacagcuaucugu

SEQ ID NO: 988604 - RNA, 19 nt, Artificial Sequence
  Description of Artificial Sequence: Synthetic oligonucleotide
  Sense strand starting at position 3974 of SEQ ID NO: 914236
gcuguuuccuuuccaagaa

SEQ ID NO: 988605 - RNA, 19 nt, Artificial Sequence
  Description of Artificial Sequence: Synthetic oligonucleotide
  Antisense strand to SEQ ID NO: 988604
uucuuggaaaggaaacagc

SEQ ID NO: 988606 - RNA, 19 nt, Artificial Sequence
  Description of Artificial Sequence: Synthetic oligonucleotide
  Sense strand starting at position 125 of SEQ ID NO: 914237
auguacugaugucuacuaa

SEQ ID NO: 988607 - RNA, 19 nt, Artificial Sequence
  Description of Artificial Sequence: Synthetic oligonucleotide
  Antisense strand to SEQ ID NO: 988606
uuaguagacaucaguacau

SEQ ID NO: 988608 - RNA, 19 nt, Artificial Sequence
  Description of Artificial Sequence: Synthetic oligonucleotide
  Sense strand starting at position 126 of SEQ ID NO: 914237
uguacugaugucuacuaaa

SEQ ID NO: 988609 - RNA, 19 nt, Artificial Sequence
  Description of Artificial Sequence: Synthetic oligonucleotide
  Antisense strand to SEQ ID NO: 988608
uuuaguagacaucaguaca

SEQ ID NO: 988610 - RNA, 19 nt, Artificial Sequence
  Description of Artificial Sequence: Synthetic oligonucleotide
  Sense strand starting at position 245 of SEQ ID NO: 914237
agacuuaagcaaugcuuaa

SEQ ID NO: 988611 - RNA, 19 nt, Artificial Sequence
  Description of Artificial Sequence: Synthetic oligonucleotide
  Antisense strand to SEQ ID NO: 988610
uuaagcauugcuuaagucu

SEQ ID NO: 988612 - RNA, 19 nt, Artificial Sequence
  Description of Artificial Sequence: Synthetic oligonucleotide
  Sense strand starting at position 409 of SEQ ID NO: 914237
augagauuauacuuaugca

SEQ ID NO: 988613 - RNA, 19 nt, Artificial Sequence
  Description of Artificial Sequence: Synthetic oligonucleotide
  Antisense strand to SEQ ID NO: 988612
ugcauaaguauaaucucau

SEQ ID NO: 988614 - RNA, 19 nt, Artificial Sequence
  Description of Artificial Sequence: Synthetic oligonucleotide
  Sense strand starting at position 417 of SEQ ID NO: 914237
auacuuaugcaguauucua

SEQ ID NO: 988615 - RNA, 19 nt, Artificial Sequence
  Description of Artificial Sequence: Synthetic oligonucleotide
  Antisense strand to SEQ ID NO: 988614
uagaauacugcauaaguau

SEQ ID NO: 988616 - RNA, 19 nt, Artificial Sequence
  Description of Artificial Sequence: Synthetic oligonucleotide
  Sense strand starting at position 454 of SEQ ID NO: 914237
uuuauaaguauugggaagu

SEQ ID NO: 988617 - RNA, 19 nt, Artificial Sequence
  Description of Artificial Sequence: Synthetic oligonucleotide
  Antisense strand to SEQ ID NO: 988616
acuucccaauacuuauaaa

SEQ ID NO: 988618 - RNA, 19 nt, Artificial Sequence
  Description of Artificial Sequence: Synthetic oligonucleotide
  Sense strand starting at position 625 of SEQ ID NO: 914237
gugcauauguauuucuaga

SEQ ID NO: 988619 - RNA, 19 nt, Artificial Sequence
  Description of Artificial Sequence: Synthetic oligonucleotide
  Antisense strand to SEQ ID NO: 988618
ucuagaaauacauaugcac

SEQ ID NO: 988620 - RNA, 19 nt, Artificial Sequence
  Description of Artificial Sequence: Synthetic oligonucleotide
  Sense strand starting at position 762 of SEQ ID NO: 914237
acaagaauauaagaugaca

SEQ ID NO: 988621 - RNA, 19 nt, Artificial Sequence
  Description of Artificial Sequence: Synthetic oligonucleotide
  Antisense strand to SEQ ID NO: 988620
ugucaucuuauauucuugu

SEQ ID NO: 988622 - RNA, 19 nt, Artificial Sequence
  Description of Artificial Sequence: Synthetic oligonucleotide
  Sense strand starting at position 977 of SEQ ID NO: 914237
uuaagaaaggacugucuuu

SEQ ID NO: 988623 - RNA, 19 nt, Artificial Sequence
  Description of Artificial Sequence: Synthetic oligonucleotide
  Antisense strand to SEQ ID NO: 988622
aaagacaguccuuucuuaa

SEQ ID NO: 988624 - RNA, 19 nt, Artificial Sequence
  Description of Artificial Sequence: Synthetic oligonucleotide
  Sense strand starting at position 1133 of SEQ ID NO: 914237
gcaucuagugaggaaggua

SEQ ID NO: 988625 - RNA, 19 nt, Artificial Sequence
  Description of Artificial Sequence: Synthetic oligonucleotide
  Antisense strand to SEQ ID NO: 988624
uaccuuccucacuagaugc

SEQ ID NO: 988626 - RNA, 19 nt, Artificial Sequence
  Description of Artificial Sequence: Synthetic oligonucleotide
  Sense strand starting at position 1247 of SEQ ID NO: 914237
cagggaguccuuggagaau

SEQ ID NO: 988627 - RNA, 19 nt, Artificial Sequence
  Description of Artificial Sequence: Synthetic oligonucleotide
  Antisense strand to SEQ ID NO: 988626
auucuccaaggacucccug

SEQ ID NO: 988628 - RNA, 19 nt, Artificial Sequence
  Description of Artificial Sequence: Synthetic oligonucleotide
  Sense strand starting at position 1249 of SEQ ID NO: 914237
gggaguccuuggagaauga

SEQ ID NO: 988629 - RNA, 19 nt, Artificial Sequence
  Description of Artificial Sequence: Synthetic oligonucleotide
  Antisense strand to SEQ ID NO: 988628
ucauucuccaaggacuccc

SEQ ID NO: 988630 - RNA, 19 nt, Artificial Sequence
  Description of Artificial Sequence: Synthetic oligonucleotide
  Sense strand starting at position 1283 of SEQ ID NO: 914237
gcagaauaagcauaggcua

SEQ ID NO: 988631 - RNA, 19 nt, Artificial Sequence
  Description of Artificial Sequence: Synthetic oligonucleotide
  Antisense strand to SEQ ID NO: 988630
uagccuaugcuuauucugc

SEQ ID NO: 988632 - RNA, 19 nt, Artificial Sequence
  Description of Artificial Sequence: Synthetic oligonucleotide
  Sense strand starting at position 1414 of SEQ ID NO: 914237
gggucuccauuugaaauaa

SEQ ID NO: 988633 - RNA, 19 nt, Artificial Sequence
  Description of Artificial Sequence: Synthetic oligonucleotide
  Antisense strand to SEQ ID NO: 988632
uuauuucaaauggagaccc

SEQ ID NO: 988634 - RNA, 19 nt, Artificial Sequence
  Description of Artificial Sequence: Synthetic oligonucleotide
  Sense strand starting at position 2009 of SEQ ID NO: 914237
ccaccuccucucggagaaa

SEQ ID NO: 988635 - RNA, 19 nt, Artificial Sequence
  Description of Artificial Sequence: Synthetic oligonucleotide
  Antisense strand to SEQ ID NO: 988634
uuucuccgagaggaggugg

SEQ ID NO: 988636 - RNA, 19 nt, Artificial Sequence
  Description of Artificial Sequence: Synthetic oligonucleotide
  Sense strand starting at position 2071 of SEQ ID NO: 914237
auuguaugacgucaaguag

SEQ ID NO: 988637 - RNA, 19 nt, Artificial Sequence
  Description of Artificial Sequence: Synthetic oligonucleotide
  Antisense strand to SEQ ID NO: 988636
cuacuugacgucauacaau

SEQ ID NO: 988638 - RNA, 19 nt, Artificial Sequence
  Description of Artificial Sequence: Synthetic oligonucleotide
  Sense strand starting at position 2153 of SEQ ID NO: 914237
acacuugcggaagaguuaa

SEQ ID NO: 988639 - RNA, 19 nt, Artificial Sequence
  Description of Artificial Sequence: Synthetic oligonucleotide
  Antisense strand to SEQ ID NO: 988638
uuaacucuuccgcaagugu

SEQ ID NO: 988640 - RNA, 19 nt, Artificial Sequence
  Description of Artificial Sequence: Synthetic oligonucleotide
  Sense strand starting at position 2715 of SEQ ID NO: 914237
acaggauuccauuguugag

SEQ ID NO: 988641 - RNA, 19 nt, Artificial Sequence
  Description of Artificial Sequence: Synthetic oligonucleotide
  Antisense strand to SEQ ID NO: 988640
cucaacaauggaauccugu

SEQ ID NO: 988642 - RNA, 19 nt, Artificial Sequence
  Description of Artificial Sequence: Synthetic oligonucleotide
  Sense strand starting at position 2719 of SEQ ID NO: 914237
gauuccauuguugagguau

SEQ ID NO: 988643 - RNA, 19 nt, Artificial Sequence
  Description of Artificial Sequence: Synthetic oligonucleotide
  Antisense strand to SEQ ID NO: 988642
auaccucaacaauggaauc

SEQ ID NO: 988644 - RNA, 19 nt, Artificial Sequence
  Description of Artificial Sequence: Synthetic oligonucleotide
  Sense strand starting at position 2852 of SEQ ID NO: 914237
uccuuaguuguuccgugua

SEQ ID NO: 988645 - RNA, 19 nt, Artificial Sequence
  Description of Artificial Sequence: Synthetic oligonucleotide
  Antisense strand to SEQ ID NO: 988644
uacacggaacaacuaagga

SEQ ID NO: 988646 - RNA, 19 nt, Artificial Sequence
  Description of Artificial Sequence: Synthetic oligonucleotide
  Sense strand starting at position 2872 of SEQ ID NO: 914237
gcuguuguugacucucgua

SEQ ID NO: 988647 - RNA, 19 nt, Artificial Sequence
  Description of Artificial Sequence: Synthetic oligonucleotide
  Antisense strand to SEQ ID NO: 988646
uacgagagucaacaacagc

SEQ ID NO: 988648 - RNA, 19 nt, Artificial Sequence
  Description of Artificial Sequence: Synthetic oligonucleotide
  Sense strand starting at position 2947 of SEQ ID NO: 914237
ucugcagaugacuguaaau

SEQ ID NO: 988649 - RNA, 19 nt, Artificial Sequence
  Description of Artificial Sequence: Synthetic oligonucleotide
  Antisense strand to SEQ ID NO: 988648
auuuacagucaucugcaga

SEQ ID NO: 988650 - RNA, 19 nt, Artificial Sequence
  Description of Artificial Sequence: Synthetic oligonucleotide
  Sense strand starting at position 3025 of SEQ ID NO: 914237
ucugacugcccggaaauau

SEQ ID NO: 988651 - RNA, 19 nt, Artificial Sequence
  Description of Artificial Sequence: Synthetic oligonucleotide
  Antisense strand to SEQ ID NO: 988650
auauuuccgggcagucaga

SEQ ID NO: 988652 - RNA, 19 nt, Artificial Sequence
  Description of Artificial Sequence: Synthetic oligonucleotide
  Sense strand starting at position 3034 of SEQ ID NO: 914237
ccggaaauaucagccaaag

SEQ ID NO: 988653 - RNA, 19 nt, Artificial Sequence
  Description of Artificial Sequence: Synthetic oligonucleotide
  Antisense strand to SEQ ID NO: 988652
cuuuggcugauauuuccgg

SEQ ID NO: 988654 - RNA, 19 nt, Artificial Sequence
  Description of Artificial Sequence: Synthetic oligonucleotide
  Sense strand starting at position 3056 of SEQ ID NO: 914237
agcgguaguaauuaacaca

SEQ ID NO: 988655 - RNA, 19 nt, Artificial Sequence
  Description of Artificial Sequence: Synthetic oligonucleotide
  Antisense strand to SEQ ID NO: 988654
uguguuaauuacuaccgcu

SEQ ID NO: 988656 - RNA, 19 nt, Artificial Sequence
  Description of Artificial Sequence: Synthetic oligonucleotide
  Sense strand starting at position 3170 of SEQ ID NO: 914237
cccgaaucccucgaaagua

SEQ ID NO: 988657 - RNA, 19 nt, Artificial Sequence
  Description of Artificial Sequence: Synthetic oligonucleotide
  Antisense strand to SEQ ID NO: 988656
uacuuucgagggauucggg

SEQ ID NO: 988658 - RNA, 19 nt, Artificial Sequence
  Description of Artificial Sequence: Synthetic oligonucleotide
  Sense strand starting at position 3179 of SEQ ID NO: 914237
cucgaaaguagaugggauu

SEQ ID NO: 988659 - RNA, 19 nt, Artificial Sequence
  Description of Artificial Sequence: Synthetic oligonucleotide
  Antisense strand to SEQ ID NO: 988658
aaucccaucuacuuucgag

SEQ ID NO: 988660 - RNA, 19 nt, Artificial Sequence
  Description of Artificial Sequence: Synthetic oligonucleotide
  Sense strand starting at position 3190 of SEQ ID NO: 914237
augggauucugagcacaca

SEQ ID NO: 988661 - RNA, 19 nt, Artificial Sequence
  Description of Artificial Sequence: Synthetic oligonucleotide
  Antisense strand to SEQ ID NO: 988660
ugugugcucagaaucccau

SEQ ID NO: 988662 - RNA, 19 nt, Artificial Sequence
  Description of Artificial Sequence: Synthetic oligonucleotide
  Sense strand starting at position 3243 of SEQ ID NO: 914237
acgaauuauuggcuuaaua

SEQ ID NO: 988663 - RNA, 19 nt, Artificial Sequence
  Description of Artificial Sequence: Synthetic oligonucleotide
  Antisense strand to SEQ ID NO: 988662
uauuaagccaauaauucgu

SEQ ID NO: 988664 - RNA, 19 nt, Artificial Sequence
  Description of Artificial Sequence: Synthetic oligonucleotide
  Sense strand starting at position 3387 of SEQ ID NO: 914237
uguaaagauacguaaguga

SEQ ID NO: 988665 - RNA, 19 nt, Artificial Sequence
  Description of Artificial Sequence: Synthetic oligonucleotide
  Antisense strand to SEQ ID NO: 988664
ucacuuacguaucuuuaca

SEQ ID NO: 988666 - RNA, 19 nt, Artificial Sequence
  Description of Artificial Sequence: Synthetic oligonucleotide
  Sense strand starting at position 3392 of SEQ ID NO: 914237
agauacguaagugauacua

SEQ ID NO: 988667 - RNA, 19 nt, Artificial Sequence
  Description of Artificial Sequence: Synthetic oligonucleotide
  Antisense strand to SEQ ID NO: 988666
uaguaucacuuacguaucu

SEQ ID NO: 988668 - RNA, 19 nt, Artificial Sequence
  Description of Artificial Sequence: Synthetic oligonucleotide
  Sense strand starting at position 3574 of SEQ ID NO: 914237
guuauuacugauggagaca

SEQ ID NO: 988669 - RNA, 19 nt, Artificial Sequence
  Description of Artificial Sequence: Synthetic oligonucleotide
  Antisense strand to SEQ ID NO: 988668
ugucuccaucaguaauaac

SEQ ID NO: 988670 - RNA, 19 nt, Artificial Sequence
  Description of Artificial Sequence: Synthetic oligonucleotide
  Sense strand starting at position 3656 of SEQ ID NO: 914237
caagaucucuguguauuag

SEQ ID NO: 988671 - RNA, 19 nt, Artificial Sequence
  Description of Artificial Sequence: Synthetic oligonucleotide
  Antisense strand to SEQ ID NO: 988670
cuaauacacagagaucuug

SEQ ID NO: 988672 - RNA, 19 nt, Artificial Sequence
  Description of Artificial Sequence: Synthetic oligonucleotide
  Sense strand starting at position 3657 of SEQ ID NO: 914237
aagaucucuguguauuaga

SEQ ID NO: 988673 - RNA, 19 nt, Artificial Sequence
  Description of Artificial Sequence: Synthetic oligonucleotide
  Antisense strand to SEQ ID NO: 988672
ucuaauacacagagaucuu

SEQ ID NO: 988674 - RNA, 19 nt, Artificial Sequence
  Description of Artificial Sequence: Synthetic oligonucleotide
  Sense strand starting at position 3666 of SEQ ID NO: 914237
guguauuagaucuauggag

SEQ ID NO: 988675 - RNA, 19 nt, Artificial Sequence
  Description of Artificial Sequence: Synthetic oligonucleotide
  Antisense strand to SEQ ID NO: 988674
cuccauagaucuaauacac

SEQ ID NO: 988676 - RNA, 19 nt, Artificial Sequence
  Description of Artificial Sequence: Synthetic oligonucleotide
  Sense strand starting at position 3694 of SEQ ID NO: 914237
cagacaguaacguagggau

SEQ ID NO: 988677 - RNA, 19 nt, Artificial Sequence
  Description of Artificial Sequence: Synthetic oligonucleotide
  Antisense strand to SEQ ID NO: 988676
aucccuacguuacugucug

SEQ ID NO: 988678 - RNA, 19 nt, Artificial Sequence
  Description of Artificial Sequence: Synthetic oligonucleotide
  Sense strand starting at position 3696 of SEQ ID NO: 914237
gacaguaacguagggauua

SEQ ID NO: 988679 - RNA, 19 nt, Artificial Sequence
  Description of Artificial Sequence: Synthetic oligonucleotide
  Antisense strand to SEQ ID NO: 988678
uaaucccuacguuacuguc

SEQ ID NO: 988680 - RNA, 19 nt, Artificial Sequence
  Description of Artificial Sequence: Synthetic oligonucleotide
  Sense strand starting at position 3698 of SEQ ID NO: 914237
caguaacguagggauuauu

SEQ ID NO: 988681 - RNA, 19 nt, Artificial Sequence
  Description of Artificial Sequence: Synthetic oligonucleotide
  Antisense strand to SEQ ID NO: 988680
aauaaucccuacguuacug

SEQ ID NO: 988682 - RNA, 19 nt, Artificial Sequence
  Description of Artificial Sequence: Synthetic oligonucleotide
  Sense strand starting at position 3716 of SEQ ID NO: 914237
uuguacuuggucuagaauc

SEQ ID NO: 988683 - RNA, 19 nt, Artificial Sequence
  Description of Artificial Sequence: Synthetic oligonucleotide
  Antisense strand to SEQ ID NO: 988682
gauucuagaccaaguacaa

SEQ ID NO: 988684 - RNA, 19 nt, Artificial Sequence
  Description of Artificial Sequence: Synthetic oligonucleotide
  Sense strand starting at position 3718 of SEQ ID NO: 914237
guacuuggucuagaaucua

SEQ ID NO: 988685 - RNA, 19 nt, Artificial Sequence
  Description of Artificial Sequence: Synthetic oligonucleotide
  Antisense strand to SEQ ID NO: 988684
uagauucuagaccaaguac

SEQ ID NO: 988686 - RNA, 19 nt, Artificial Sequence
  Description of Artificial Sequence: Synthetic oligonucleotide
  Sense strand starting at position 9 of SEQ ID NO: 914238
ucacuuuccugaguccuca

SEQ ID NO: 988687 - RNA, 19 nt, Artificial Sequence
  Description of Artificial Sequence: Synthetic oligonucleotide
  Antisense strand to SEQ ID NO: 988686
ugaggacucaggaaaguga

SEQ ID NO: 988688 - RNA, 19 nt, Artificial Sequence
  Description of Artificial Sequence: Synthetic oligonucleotide
  Sense strand starting at position 111 of SEQ ID NO: 914238
gcagguugugcccagggaa

SEQ ID NO: 988689 - RNA, 19 nt, Artificial Sequence
  Description of Artificial Sequence: Synthetic oligonucleotide
  Antisense strand to SEQ ID NO: 988688
uucccugggcacaaccugc

SEQ ID NO: 988690 - RNA, 19 nt, Artificial Sequence
  Description of Artificial Sequence: Synthetic oligonucleotide
  Sense strand starting at position 250 of SEQ ID NO: 914238
cagaaaggugcuugggcau

SEQ ID NO: 988691 - RNA, 19 nt, Artificial Sequence
  Description of Artificial Sequence: Synthetic oligonucleotide
  Antisense strand to SEQ ID NO: 988690
augcccaagcaccuuucug

SEQ ID NO: 988692 - RNA, 19 nt, Artificial Sequence
  Description of Artificial Sequence: Synthetic oligonucleotide
  Sense strand starting at position 699 of SEQ ID NO: 914238
cuaacuucuugugugacaa

SEQ ID NO: 988693 - RNA, 19 nt, Artificial Sequence
  Description of Artificial Sequence: Synthetic oligonucleotide
  Antisense strand to SEQ ID NO: 988692
uugucacacaagaaguuag

SEQ ID NO: 988694 - RNA, 19 nt, Artificial Sequence
  Description of Artificial Sequence: Synthetic oligonucleotide
  Sense strand starting at position 700 of SEQ ID NO: 914238
uaacuucuugugugacaag

SEQ ID NO: 988695 - RNA, 19 nt, Artificial Sequence
  Description of Artificial Sequence: Synthetic oligonucleotide
  Antisense strand to SEQ ID NO: 988694
cuugucacacaagaaguua

SEQ ID NO: 988696 - RNA, 19 nt, Artificial Sequence
  Description of Artificial Sequence: Synthetic oligonucleotide
  Sense strand starting at position 710 of SEQ ID NO: 914238
ugugacaagucaucagguu

SEQ ID NO: 988697 - RNA, 19 nt, Artificial Sequence
  Description of Artificial Sequence: Synthetic oligonucleotide
  Antisense strand to SEQ ID NO: 988696
aaccugaugacuugucaca

SEQ ID NO: 988698 - RNA, 19 nt, Artificial Sequence
  Description of Artificial Sequence: Synthetic oligonucleotide
  Sense strand starting at position 711 of SEQ ID NO: 914238
gugacaagucaucagguua

SEQ ID NO: 988699 - RNA, 19 nt, Artificial Sequence
  Description of Artificial Sequence: Synthetic oligonucleotide
  Antisense strand to SEQ ID NO: 988698
uaaccugaugacuugucac

SEQ ID NO: 988700 - RNA, 19 nt, Artificial Sequence
  Description of Artificial Sequence: Synthetic oligonucleotide
  Sense strand starting at position 728 of SEQ ID NO: 914238
uaauaaaccguuuggcuga

SEQ ID NO: 988701 - RNA, 19 nt, Artificial Sequence
  Description of Artificial Sequence: Synthetic oligonucleotide
  Antisense strand to SEQ ID NO: 988700
ucagccaaacgguuuauua

SEQ ID NO: 988702 - RNA, 19 nt, Artificial Sequence
  Description of Artificial Sequence: Synthetic oligonucleotide
  Sense strand starting at position 733 of SEQ ID NO: 914238
aaccguuuggcugagaaca

SEQ ID NO: 988703 - RNA, 19 nt, Artificial Sequence
  Description of Artificial Sequence: Synthetic oligonucleotide
  Antisense strand to SEQ ID NO: 988702
uguucucagccaaacgguu

SEQ ID NO: 988704 - RNA, 19 nt, Artificial Sequence
  Description of Artificial Sequence: Synthetic oligonucleotide
  Sense strand starting at position 828 of SEQ ID NO: 914238
aucuaacugucuuuguuaa

SEQ ID NO: 988705 - RNA, 19 nt, Artificial Sequence
  Description of Artificial Sequence: Synthetic oligonucleotide
  Antisense strand to SEQ ID NO: 988704
uuaacaaagacaguuagau

SEQ ID NO: 988706 - RNA, 19 nt, Artificial Sequence
  Description of Artificial Sequence: Synthetic oligonucleotide
  Sense strand starting at position 830 of SEQ ID NO: 914238
cuaacugucuuuguuaaua

SEQ ID NO: 988707 - RNA, 19 nt, Artificial Sequence
  Description of Artificial Sequence: Synthetic oligonucleotide
  Antisense strand to SEQ ID NO: 988706
uauuaacaaagacaguuag

SEQ ID NO: 988708 - RNA, 19 nt, Artificial Sequence
  Description of Artificial Sequence: Synthetic oligonucleotide
  Sense strand starting at position 915 of SEQ ID NO: 914238
cccaaagcuguauaugaau

SEQ ID NO: 988709 - RNA, 19 nt, Artificial Sequence
  Description of Artificial Sequence: Synthetic oligonucleotide
  Antisense strand to SEQ ID NO: 988708
auucauauacagcuuuggg

SEQ ID NO: 988710 - RNA, 19 nt, Artificial Sequence
  Description of Artificial Sequence: Synthetic oligonucleotide
  Sense strand starting at position 988 of SEQ ID NO: 914238
gacacccuaugaguugaua

SEQ ID NO: 988711 - RNA, 19 nt, Artificial Sequence
  Description of Artificial Sequence: Synthetic oligonucleotide
  Antisense strand to SEQ ID NO: 988710
uaucaacucauaggguguc

SEQ ID NO: 988712 - RNA, 19 nt, Artificial Sequence
  Description of Artificial Sequence: Synthetic oligonucleotide
  Sense strand starting at position 1006 of SEQ ID NO: 914238
agacuugacuggucuggaa

SEQ ID NO: 988713 - RNA, 19 nt, Artificial Sequence
  Description of Artificial Sequence: Synthetic oligonucleotide
  Antisense strand to SEQ ID NO: 988712
uuccagaccagucaagucu

SEQ ID NO: 988714 - RNA, 19 nt, Artificial Sequence
  Description of Artificial Sequence: Synthetic oligonucleotide
  Sense strand starting at position 1008 of SEQ ID NO: 914238
acuugacuggucuggaaga

SEQ ID NO: 988715 - RNA, 19 nt, Artificial Sequence
  Description of Artificial Sequence: Synthetic oligonucleotide
  Antisense strand to SEQ ID NO: 988714
ucuuccagaccagucaagu

SEQ ID NO: 988716 - RNA, 19 nt, Artificial Sequence
  Description of Artificial Sequence: Synthetic oligonucleotide
  Sense strand starting at position 1010 of SEQ ID NO: 914238
uugacuggucuggaagagu

SEQ ID NO: 988717 - RNA, 19 nt, Artificial Sequence
  Description of Artificial Sequence: Synthetic oligonucleotide
  Antisense strand to SEQ ID NO: 988716
acucuuccagaccagucaa

SEQ ID NO: 988718 - RNA, 19 nt, Artificial Sequence
  Description of Artificial Sequence: Synthetic oligonucleotide
  Sense strand starting at position 1026 of SEQ ID NO: 914238
agucaaggucuuggagaga

SEQ ID NO: 988719 - RNA, 19 nt, Artificial Sequence
  Description of Artificial Sequence: Synthetic oligonucleotide
  Antisense strand to SEQ ID NO: 988718
ucucuccaagaccuugacu

SEQ ID NO: 988720 - RNA, 19 nt, Artificial Sequence
  Description of Artificial Sequence: Synthetic oligonucleotide
  Sense strand starting at position 1538 of SEQ ID NO: 914238
ggugaucccaugggucaca

SEQ ID NO: 988721 - RNA, 19 nt, Artificial Sequence
  Description of Artificial Sequence: Synthetic oligonucleotide
  Antisense strand to SEQ ID NO: 988720
ugugacccaugggaucacc

SEQ ID NO: 988722 - RNA, 19 nt, Artificial Sequence
  Description of Artificial Sequence: Synthetic oligonucleotide
  Sense strand starting at position 1835 of SEQ ID NO: 914238
cguugagcgcguccacaaa

SEQ ID NO: 988723 - RNA, 19 nt, Artificial Sequence
  Description of Artificial Sequence: Synthetic oligonucleotide
  Antisense strand to SEQ ID NO: 988722
uuuguggacgcgcucaacg

SEQ ID NO: 988724 - RNA, 19 nt, Artificial Sequence
  Description of Artificial Sequence: Synthetic oligonucleotide
  Sense strand starting at position 2286 of SEQ ID NO: 914238
cuggagucugggugggaaa

SEQ ID NO: 988725 - RNA, 19 nt, Artificial Sequence
  Description of Artificial Sequence: Synthetic oligonucleotide
  Antisense strand to SEQ ID NO: 988724
uuucccacccagacuccag

SEQ ID NO: 988726 - RNA, 19 nt, Artificial Sequence
  Description of Artificial Sequence: Synthetic oligonucleotide
  Sense strand starting at position 2590 of SEQ ID NO: 914238
ccagaacucuugcuaagua

SEQ ID NO: 988727 - RNA, 19 nt, Artificial Sequence
  Description of Artificial Sequence: Synthetic oligonucleotide
  Antisense strand to SEQ ID NO: 988726
uacuuagcaagaguucugg

SEQ ID NO: 988728 - RNA, 19 nt, Artificial Sequence
  Description of Artificial Sequence: Synthetic oligonucleotide
  Sense strand starting at position 2844 of SEQ ID NO: 914238
ggcugauaaagaggaguuu

SEQ ID NO: 988729 - RNA, 19 nt, Artificial Sequence
  Description of Artificial Sequence: Synthetic oligonucleotide
  Antisense strand to SEQ ID NO: 988728
aaacuccucuuuaucagcc

SEQ ID NO: 988730 - RNA, 19 nt, Artificial Sequence
  Description of Artificial Sequence: Synthetic oligonucleotide
  Sense strand starting at position 2933 of SEQ ID NO: 914238
aggcuuaacaguuggagga

SEQ ID NO: 988731 - RNA, 19 nt, Artificial Sequence
  Description of Artificial Sequence: Synthetic oligonucleotide
  Antisense strand to SEQ ID NO: 988730
uccuccaacuguuaagccu

SEQ ID NO: 988732 - RNA, 19 nt, Artificial Sequence
  Description of Artificial Sequence: Synthetic oligonucleotide
  Sense strand starting at position 2996 of SEQ ID NO: 914238
uggagagauucucacaaga

SEQ ID NO: 988733 - RNA, 19 nt, Artificial Sequence
  Description of Artificial Sequence: Synthetic oligonucleotide
  Antisense strand to SEQ ID NO: 988732
ucuugugagaaucucucca

SEQ ID NO: 988734 - RNA, 19 nt, Artificial Sequence
  Description of Artificial Sequence: Synthetic oligonucleotide
  Sense strand starting at position 3082 of SEQ ID NO: 914238
aggagaacuuuccuaguua

SEQ ID NO: 988735 - RNA, 19 nt, Artificial Sequence
  Description of Artificial Sequence: Synthetic oligonucleotide
  Antisense strand to SEQ ID NO: 988734
uaacuaggaaaguucuccu

SEQ ID NO: 988736 - RNA, 19 nt, Artificial Sequence
  Description of Artificial Sequence: Synthetic oligonucleotide
  Sense strand starting at position 3086 of SEQ ID NO: 914238
gaacuuuccuaguuagggu

SEQ ID NO: 988737 - RNA, 19 nt, Artificial Sequence
  Description of Artificial Sequence: Synthetic oligonucleotide
  Antisense strand to SEQ ID NO: 988736
acccuaacuaggaaaguuc

SEQ ID NO: 988738 - RNA, 19 nt, Artificial Sequence
  Description of Artificial Sequence: Synthetic oligonucleotide
  Sense strand starting at position 3116 of SEQ ID NO: 914238
augcacauguucuuaggaa

SEQ ID NO: 988739 - RNA, 19 nt, Artificial Sequence
  Description of Artificial Sequence: Synthetic oligonucleotide
  Antisense strand to SEQ ID NO: 988738
uuccuaagaacaugugcau

SEQ ID NO: 988740 - RNA, 19 nt, Artificial Sequence
  Description of Artificial Sequence: Synthetic oligonucleotide
  Sense strand starting at position 3312 of SEQ ID NO: 914238
gcaggaguucagggucuga

SEQ ID NO: 988741 - RNA, 19 nt, Artificial Sequence
  Description of Artificial Sequence: Synthetic oligonucleotide
  Antisense strand to SEQ ID NO: 988740
ucagacccugaacuccugc

SEQ ID NO: 988742 - RNA, 19 nt, Artificial Sequence
  Description of Artificial Sequence: Synthetic oligonucleotide
  Sense strand starting at position 3338 of SEQ ID NO: 914238
agucucugacuuuggagaa

SEQ ID NO: 988743 - RNA, 19 nt, Artificial Sequence
  Description of Artificial Sequence: Synthetic oligonucleotide
  Antisense strand to SEQ ID NO: 988742
uucuccaaagucagagacu

SEQ ID NO: 988744 - RNA, 19 nt, Artificial Sequence
  Description of Artificial Sequence: Synthetic oligonucleotide
  Sense strand starting at position 3350 of SEQ ID NO: 914238
uggagaauuucucagaagc

SEQ ID NO: 988745 - RNA, 19 nt, Artificial Sequence
  Description of Artificial Sequence: Synthetic oligonucleotide
  Antisense strand to SEQ ID NO: 988744
gcuucugagaaauucucca

SEQ ID NO: 988746 - RNA, 19 nt, Artificial Sequence
  Description of Artificial Sequence: Synthetic oligonucleotide
  Sense strand starting at position 3489 of SEQ ID NO: 914238
gagucuguguagucaauag

SEQ ID NO: 988747 - RNA, 19 nt, Artificial Sequence
  Description of Artificial Sequence: Synthetic oligonucleotide
  Antisense strand to SEQ ID NO: 988746
cuauugacuacacagacuc

SEQ ID NO: 988748 - RNA, 19 nt, Artificial Sequence
  Description of Artificial Sequence: Synthetic oligonucleotide
  Sense strand starting at position 3553 of SEQ ID NO: 914238
ugugcuucccaugauuaua

SEQ ID NO: 988749 - RNA, 19 nt, Artificial Sequence
  Description of Artificial Sequence: Synthetic oligonucleotide
  Antisense strand to SEQ ID NO: 988748
uauaaucaugggaagcaca

SEQ ID NO: 988750 - RNA, 19 nt, Artificial Sequence
  Description of Artificial Sequence: Synthetic oligonucleotide
  Sense strand starting at position 3564 of SEQ ID NO: 914238
ugauuauagccguacgaaa

SEQ ID NO: 988751 - RNA, 19 nt, Artificial Sequence
  Description of Artificial Sequence: Synthetic oligonucleotide
  Antisense strand to SEQ ID NO: 988750
uuucguacggcuauaauca

SEQ ID NO: 988752 - RNA, 19 nt, Artificial Sequence
  Description of Artificial Sequence: Synthetic oligonucleotide
  Sense strand starting at position 3566 of SEQ ID NO: 914238
auuauagccguacgaaaua

SEQ ID NO: 988753 - RNA, 19 nt, Artificial Sequence
  Description of Artificial Sequence: Synthetic oligonucleotide
  Antisense strand to SEQ ID NO: 988752
uauuucguacggcuauaau

SEQ ID NO: 988754 - RNA, 19 nt, Artificial Sequence
  Description of Artificial Sequence: Synthetic oligonucleotide
  Sense strand starting at position 3571 of SEQ ID NO: 914238
agccguacgaaauauguau

SEQ ID NO: 988755 - RNA, 19 nt, Artificial Sequence
  Description of Artificial Sequence: Synthetic oligonucleotide
  Antisense strand to SEQ ID NO: 988754
auacauauuucguacggcu

SEQ ID NO: 988756 - RNA, 19 nt, Artificial Sequence
  Description of Artificial Sequence: Synthetic oligonucleotide
  Sense strand starting at position 3613 of SEQ ID NO: 914238
aggucagacuuggaaauuu

SEQ ID NO: 988757 - RNA, 19 nt, Artificial Sequence
  Description of Artificial Sequence: Synthetic oligonucleotide
  Antisense strand to SEQ ID NO: 988756
aaauuuccaagucugaccu

SEQ ID NO: 988758 - RNA, 19 nt, Artificial Sequence
  Description of Artificial Sequence: Synthetic oligonucleotide
  Sense strand starting at position 3739 of SEQ ID NO: 914238
auggucacccaguaagauu

SEQ ID NO: 988759 - RNA, 19 nt, Artificial Sequence
  Description of Artificial Sequence: Synthetic oligonucleotide
  Antisense strand to SEQ ID NO: 988758
aaucuuacugggugaccau

SEQ ID NO: 988760 - RNA, 19 nt, Artificial Sequence
  Description of Artificial Sequence: Synthetic oligonucleotide
  Sense strand starting at position 3937 of SEQ ID NO: 914238
acuacuacuaguuguguga

SEQ ID NO: 988761 - RNA, 19 nt, Artificial Sequence
  Description of Artificial Sequence: Synthetic oligonucleotide
  Antisense strand to SEQ ID NO: 988760
ucacacaacuaguaguagu

SEQ ID NO: 988762 - RNA, 19 nt, Artificial Sequence
  Description of Artificial Sequence: Synthetic oligonucleotide
  Sense strand starting at position 3940 of SEQ ID NO: 914238
acuacuaguugugugauuu

SEQ ID NO: 988763 - RNA, 19 nt, Artificial Sequence
  Description of Artificial Sequence: Synthetic oligonucleotide
  Antisense strand to SEQ ID NO: 988762
aaaucacacaacuaguagu

SEQ ID NO: 988764 - RNA, 19 nt, Artificial Sequence
  Description of Artificial Sequence: Synthetic oligonucleotide
  Sense strand starting at position 3941 of SEQ ID NO: 914238
cuacuaguugugugauuug

SEQ ID NO: 988765 - RNA, 19 nt, Artificial Sequence
  Description of Artificial Sequence: Synthetic oligonucleotide
  Antisense strand to SEQ ID NO: 988764
caaaucacacaacuaguag

SEQ ID NO: 988766 - RNA, 19 nt, Artificial Sequence
  Description of Artificial Sequence: Synthetic oligonucleotide
  Sense strand starting at position 25 of SEQ ID NO: 914239
auccuuacuugggaaaggu

SEQ ID NO: 988767 - RNA, 19 nt, Artificial Sequence
  Description of Artificial Sequence: Synthetic oligonucleotide
  Antisense strand to SEQ ID NO: 988766
accuuucccaaguaaggau

SEQ ID NO: 988768 - RNA, 19 nt, Artificial Sequence
  Description of Artificial Sequence: Synthetic oligonucleotide
  Sense strand starting at position 102 of SEQ ID NO: 914239
cuuucuguccucuggagaa

SEQ ID NO: 988769 - RNA, 19 nt, Artificial Sequence
  Description of Artificial Sequence: Synthetic oligonucleotide
  Antisense strand to SEQ ID NO: 988768
uucuccagaggacagaaag

SEQ ID NO: 988770 - RNA, 19 nt, Artificial Sequence
  Description of Artificial Sequence: Synthetic oligonucleotide
  Sense strand starting at position 264 of SEQ ID NO: 914239
gggauaucaaucuguggcu

SEQ ID NO: 988771 - RNA, 19 nt, Artificial Sequence
  Description of Artificial Sequence: Synthetic oligonucleotide
  Antisense strand to SEQ ID NO: 988770
agccacagauugauauccc

SEQ ID NO: 988772 - RNA, 19 nt, Artificial Sequence
  Description of Artificial Sequence: Synthetic oligonucleotide
  Sense strand starting at position 424 of SEQ ID NO: 914239
gaaagagguugcuuaggga

SEQ ID NO: 988773 - RNA, 19 nt, Artificial Sequence
  Description of Artificial Sequence: Synthetic oligonucleotide
  Antisense strand to SEQ ID NO: 988772
ucccuaagcaaccucuuuc

SEQ ID NO: 988774 - RNA, 19 nt, Artificial Sequence
  Description of Artificial Sequence: Synthetic oligonucleotide
  Sense strand starting at position 504 of SEQ ID NO: 914239
uuuggucacucaugggagu

SEQ ID NO: 988775 - RNA, 19 nt, Artificial Sequence
  Description of Artificial Sequence: Synthetic oligonucleotide
  Antisense strand to SEQ ID NO: 988774
acucccaugagugaccaaa

SEQ ID NO: 988776 - RNA, 19 nt, Artificial Sequence
  Description of Artificial Sequence: Synthetic oligonucleotide
  Sense strand starting at position 506 of SEQ ID NO: 914239
uggucacucaugggaguga

SEQ ID NO: 988777 - RNA, 19 nt, Artificial Sequence
  Description of Artificial Sequence: Synthetic oligonucleotide
  Antisense strand to SEQ ID NO: 988776
ucacucccaugagugacca

SEQ ID NO: 988778 - RNA, 19 nt, Artificial Sequence
  Description of Artificial Sequence: Synthetic oligonucleotide
  Sense strand starting at position 519 of SEQ ID NO: 914239
gagugaggguuuggagagu

SEQ ID NO: 988779 - RNA, 19 nt, Artificial Sequence
  Description of Artificial Sequence: Synthetic oligonucleotide
  Antisense strand to SEQ ID NO: 988778
acucuccaaacccucacuc

SEQ ID NO: 988780 - RNA, 19 nt, Artificial Sequence
  Description of Artificial Sequence: Synthetic oligonucleotide
  Sense strand starting at position 587 of SEQ ID NO: 914239
uguugaaccucagagaaca

SEQ ID NO: 988781 - RNA, 19 nt, Artificial Sequence
  Description of Artificial Sequence: Synthetic oligonucleotide
  Antisense strand to SEQ ID NO: 988780
uguucucugagguucaaca

SEQ ID NO: 988782 - RNA, 19 nt, Artificial Sequence
  Description of Artificial Sequence: Synthetic oligonucleotide
  Sense strand starting at position 749 of SEQ ID NO: 914239
aagugaugggacugcugua

SEQ ID NO: 988783 - RNA, 19 nt, Artificial Sequence
  Description of Artificial Sequence: Synthetic oligonucleotide
  Antisense strand to SEQ ID NO: 988782
uacagcagucccaucacuu

SEQ ID NO: 988784 - RNA, 19 nt, Artificial Sequence
  Description of Artificial Sequence: Synthetic oligonucleotide
  Sense strand starting at position 845 of SEQ ID NO: 914239
cugugugacauuggucaag

SEQ ID NO: 988785 - RNA, 19 nt, Artificial Sequence
  Description of Artificial Sequence: Synthetic oligonucleotide
  Antisense strand to SEQ ID NO: 988784
cuugaccaaugucacacag

SEQ ID NO: 988786 - RNA, 19 nt, Artificial Sequence
  Description of Artificial Sequence: Synthetic oligonucleotide
  Sense strand starting at position 887 of SEQ ID NO: 914239
guuuccuuauuaguaacau

SEQ ID NO: 988787 - RNA, 19 nt, Artificial Sequence
  Description of Artificial Sequence: Synthetic oligonucleotide
  Antisense strand to SEQ ID NO: 988786
auguuacuaauaaggaaac

SEQ ID NO: 988788 - RNA, 19 nt, Artificial Sequence
  Description of Artificial Sequence: Synthetic oligonucleotide
  Sense strand starting at position 944 of SEQ ID NO: 914239
gcuucugagcacuguggua

SEQ ID NO: 988789 - RNA, 19 nt, Artificial Sequence
  Description of Artificial Sequence: Synthetic oligonucleotide
  Antisense strand to SEQ ID NO: 988788
uaccacagugcucagaagc

SEQ ID NO: 988790 - RNA, 19 nt, Artificial Sequence
  Description of Artificial Sequence: Synthetic oligonucleotide
  Sense strand starting at position 949 of SEQ ID NO: 914239
ugagcacugugguaagaau

SEQ ID NO: 988791 - RNA, 19 nt, Artificial Sequence
  Description of Artificial Sequence: Synthetic oligonucleotide
  Antisense strand to SEQ ID NO: 988790
auucuuaccacagugcuca

SEQ ID NO: 988792 - RNA, 19 nt, Artificial Sequence
  Description of Artificial Sequence: Synthetic oligonucleotide
  Sense strand starting at position 968 of SEQ ID NO: 914239
ggaauaagaugacaggaau

SEQ ID NO: 988793 - RNA, 19 nt, Artificial Sequence
  Description of Artificial Sequence: Synthetic oligonucleotide
  Antisense strand to SEQ ID NO: 988792
auuccugucaucuuauucc

SEQ ID NO: 988794 - RNA, 19 nt, Artificial Sequence
  Description of Artificial Sequence: Synthetic oligonucleotide
  Sense strand starting at position 980 of SEQ ID NO: 914239
caggaaugagaacgucuuu

SEQ ID NO: 988795 - RNA, 19 nt, Artificial Sequence
  Description of Artificial Sequence: Synthetic oligonucleotide
  Antisense strand to SEQ ID NO: 988794
aaagacguucucauuccug

SEQ ID NO: 988796 - RNA, 19 nt, Artificial Sequence
  Description of Artificial Sequence: Synthetic oligonucleotide
  Sense strand starting at position 985 of SEQ ID NO: 914239
augagaacgucuuuauaau

SEQ ID NO: 988797 - RNA, 19 nt, Artificial Sequence
  Description of Artificial Sequence: Synthetic oligonucleotide
  Antisense strand to SEQ ID NO: 988796
auuauaaagacguucucau

SEQ ID NO: 988798 - RNA, 19 nt, Artificial Sequence
  Description of Artificial Sequence: Synthetic oligonucleotide
  Sense strand starting at position 986 of SEQ ID NO: 914239
ugagaacgucuuuauaauu

SEQ ID NO: 988799 - RNA, 19 nt, Artificial Sequence
  Description of Artificial Sequence: Synthetic oligonucleotide
  Antisense strand to SEQ ID NO: 988798
aauuauaaagacguucuca

SEQ ID NO: 988800 - RNA, 19 nt, Artificial Sequence
  Description of Artificial Sequence: Synthetic oligonucleotide
  Sense strand starting at position 1007 of SEQ ID NO: 914239
guccaaggguauugcucaa

SEQ ID NO: 988801 - RNA, 19 nt, Artificial Sequence
  Description of Artificial Sequence: Synthetic oligonucleotide
  Antisense strand to SEQ ID NO: 988800
uugagcaauacccuuggac

SEQ ID NO: 988802 - RNA, 19 nt, Artificial Sequence
  Description of Artificial Sequence: Synthetic oligonucleotide
  Sense strand starting at position 1135 of SEQ ID NO: 914239
gggaucucuuuagaagaua

SEQ ID NO: 988803 - RNA, 19 nt, Artificial Sequence
  Description of Artificial Sequence: Synthetic oligonucleotide
  Antisense strand to SEQ ID NO: 988802
uaucuucuaaagagauccc

SEQ ID NO: 988804 - RNA, 19 nt, Artificial Sequence
  Description of Artificial Sequence: Synthetic oligonucleotide
  Sense strand starting at position 1291 of SEQ ID NO: 914239
gcaggacuuuccgaacaug

SEQ ID NO: 988805 - RNA, 19 nt, Artificial Sequence
  Description of Artificial Sequence: Synthetic oligonucleotide
  Antisense strand to SEQ ID NO: 988804
cauguucggaaaguccugc

SEQ ID NO: 988806 - RNA, 19 nt, Artificial Sequence
  Description of Artificial Sequence: Synthetic oligonucleotide
  Sense strand starting at position 1320 of SEQ ID NO: 914239
gccucaugcuucuggagag

SEQ ID NO: 988807 - RNA, 19 nt, Artificial Sequence
  Description of Artificial Sequence: Synthetic oligonucleotide
  Antisense strand to SEQ ID NO: 988806
cucuccagaagcaugaggc

SEQ ID NO: 988808 - RNA, 19 nt, Artificial Sequence
  Description of Artificial Sequence: Synthetic oligonucleotide
  Sense strand starting at position 2805 of SEQ ID NO: 914239
agggauuguaaagguguca

SEQ ID NO: 988809 - RNA, 19 nt, Artificial Sequence
  Description of Artificial Sequence: Synthetic oligonucleotide
  Antisense strand to SEQ ID NO: 988808
ugacaccuuuacaaucccu

SEQ ID NO: 988810 - RNA, 19 nt, Artificial Sequence
  Description of Artificial Sequence: Synthetic oligonucleotide
  Sense strand starting at position 2865 of SEQ ID NO: 914239
ucaguuccagcccaugaau

SEQ ID NO: 988811 - RNA, 19 nt, Artificial Sequence
  Description of Artificial Sequence: Synthetic oligonucleotide
  Antisense strand to SEQ ID NO: 988810
auucaugggcuggaacuga

SEQ ID NO: 988812 - RNA, 19 nt, Artificial Sequence
  Description of Artificial Sequence: Synthetic oligonucleotide
  Sense strand starting at position 2867 of SEQ ID NO: 914239
aguuccagcccaugaauga

SEQ ID NO: 988813 - RNA, 19 nt, Artificial Sequence
  Description of Artificial Sequence: Synthetic oligonucleotide
  Antisense strand to SEQ ID NO: 988812
ucauucaugggcuggaacu

SEQ ID NO: 988814 - RNA, 19 nt, Artificial Sequence
  Description of Artificial Sequence: Synthetic oligonucleotide
  Sense strand starting at position 2939 of SEQ ID NO: 914239
gcaggagccuugggacauu

SEQ ID NO: 988815 - RNA, 19 nt, Artificial Sequence
  Description of Artificial Sequence: Synthetic oligonucleotide
  Antisense strand to SEQ ID NO: 988814
aaugucccaaggcuccugc

SEQ ID NO: 988816 - RNA, 19 nt, Artificial Sequence
  Description of Artificial Sequence: Synthetic oligonucleotide
  Sense strand starting at position 2984 of SEQ ID NO: 914239
cacuuucucugaguuagga

SEQ ID NO: 988817 - RNA, 19 nt, Artificial Sequence
  Description of Artificial Sequence: Synthetic oligonucleotide
  Antisense strand to SEQ ID NO: 988816
uccuaacucagagaaagug

SEQ ID NO: 988818 - RNA, 19 nt, Artificial Sequence
  Description of Artificial Sequence: Synthetic oligonucleotide
  Sense strand starting at position 2997 of SEQ ID NO: 914239
uuaggacacuaauaaagaa

SEQ ID NO: 988819 - RNA, 19 nt, Artificial Sequence
  Description of Artificial Sequence: Synthetic oligonucleotide
  Antisense strand to SEQ ID NO: 988818
uucuuuauuaguguccuaa

SEQ ID NO: 988820 - RNA, 19 nt, Artificial Sequence
  Description of Artificial Sequence: Synthetic oligonucleotide
  Sense strand starting at position 3046 of SEQ ID NO: 914239
gcaguagcuccagaguuaa

SEQ ID NO: 988821 - RNA, 19 nt, Artificial Sequence
  Description of Artificial Sequence: Synthetic oligonucleotide
  Antisense strand to SEQ ID NO: 988820
uuaacucuggagcuacugc

SEQ ID NO: 988822 - RNA, 19 nt, Artificial Sequence
  Description of Artificial Sequence: Synthetic oligonucleotide
  Sense strand starting at position 3096 of SEQ ID NO: 914239
guagucaccuagccagaua

SEQ ID NO: 988823 - RNA, 19 nt, Artificial Sequence
  Description of Artificial Sequence: Synthetic oligonucleotide
  Antisense strand to SEQ ID NO: 988822
uaucuggcuaggugacuac

SEQ ID NO: 988824 - RNA, 19 nt, Artificial Sequence
  Description of Artificial Sequence: Synthetic oligonucleotide
  Sense strand starting at position 3135 of SEQ ID NO: 914239
augccauauccuggaggga

SEQ ID NO: 988825 - RNA, 19 nt, Artificial Sequence
  Description of Artificial Sequence: Synthetic oligonucleotide
  Antisense strand to SEQ ID NO: 988824
ucccuccaggauauggcau

SEQ ID NO: 988826 - RNA, 19 nt, Artificial Sequence
  Description of Artificial Sequence: Synthetic oligonucleotide
  Sense strand starting at position 3367 of SEQ ID NO: 914239
agacacgugaucugagcuu

SEQ ID NO: 988827 - RNA, 19 nt, Artificial Sequence
  Description of Artificial Sequence: Synthetic oligonucleotide
  Antisense strand to SEQ ID NO: 988826
aagcucagaucacgugucu

SEQ ID NO: 988828 - RNA, 19 nt, Artificial Sequence
  Description of Artificial Sequence: Synthetic oligonucleotide
  Sense strand starting at position 3462 of SEQ ID NO: 914239
gaggcuucuccuuacugca

SEQ ID NO: 988829 - RNA, 19 nt, Artificial Sequence
  Description of Artificial Sequence: Synthetic oligonucleotide
  Antisense strand to SEQ ID NO: 988828
ugcaguaaggagaagccuc

SEQ ID NO: 988830 - RNA, 19 nt, Artificial Sequence
  Description of Artificial Sequence: Synthetic oligonucleotide
  Sense strand starting at position 3487 of SEQ ID NO: 914239
gaggguuacuagcagucaa

SEQ ID NO: 988831 - RNA, 19 nt, Artificial Sequence
  Description of Artificial Sequence: Synthetic oligonucleotide
  Antisense strand to SEQ ID NO: 988830
uugacugcuaguaacccuc

SEQ ID NO: 988832 - RNA, 19 nt, Artificial Sequence
  Description of Artificial Sequence: Synthetic oligonucleotide
  Sense strand starting at position 3558 of SEQ ID NO: 914239
uggcgaucccuggaggauu

SEQ ID NO: 988833 - RNA, 19 nt, Artificial Sequence
  Description of Artificial Sequence: Synthetic oligonucleotide
  Antisense strand to SEQ ID NO: 988832
aauccuccagggaucgcca

SEQ ID NO: 988834 - RNA, 19 nt, Artificial Sequence
  Description of Artificial Sequence: Synthetic oligonucleotide
  Sense strand starting at position 3590 of SEQ ID NO: 914239
cccuguuacucugagguuu

SEQ ID NO: 988835 - RNA, 19 nt, Artificial Sequence
  Description of Artificial Sequence: Synthetic oligonucleotide
  Antisense strand to SEQ ID NO: 988834
aaaccucagaguaacaggg

SEQ ID NO: 988836 - RNA, 19 nt, Artificial Sequence
  Description of Artificial Sequence: Synthetic oligonucleotide
  Sense strand starting at position 3592 of SEQ ID NO: 914239
cuguuacucugagguuugu

SEQ ID NO: 988837 - RNA, 19 nt, Artificial Sequence
  Description of Artificial Sequence: Synthetic oligonucleotide
  Antisense strand to SEQ ID NO: 988836
acaaaccucagaguaacag

SEQ ID NO: 988838 - RNA, 19 nt, Artificial Sequence
  Description of Artificial Sequence: Synthetic oligonucleotide
  Sense strand starting at position 3811 of SEQ ID NO: 914239
ucacaauaucccuaugcga

SEQ ID NO: 988839 - RNA, 19 nt, Artificial Sequence
  Description of Artificial Sequence: Synthetic oligonucleotide
  Antisense strand to SEQ ID NO: 988838
ucgcauagggauauuguga

SEQ ID NO: 988840 - RNA, 19 nt, Artificial Sequence
  Description of Artificial Sequence: Synthetic oligonucleotide
  Sense strand starting at position 3813 of SEQ ID NO: 914239
acaauaucccuaugcgaca

SEQ ID NO: 988841 - RNA, 19 nt, Artificial Sequence
  Description of Artificial Sequence: Synthetic oligonucleotide
  Antisense strand to SEQ ID NO: 988840
ugucgcauagggauauugu

SEQ ID NO: 988842 - RNA, 19 nt, Artificial Sequence
  Description of Artificial Sequence: Synthetic oligonucleotide
  Sense strand starting at position 3882 of SEQ ID NO: 914239
agcaauaguugguggcaaa

SEQ ID NO: 988843 - RNA, 19 nt, Artificial Sequence
  Description of Artificial Sequence: Synthetic oligonucleotide
  Antisense strand to SEQ ID NO: 988842
uuugccaccaacuauugcu

SEQ ID NO: 988844 - RNA, 19 nt, Artificial Sequence
  Description of Artificial Sequence: Synthetic oligonucleotide
  Sense strand starting at position 3970 of SEQ ID NO: 914239
uggacugucucccucuauu

SEQ ID NO: 988845 - RNA, 19 nt, Artificial Sequence
  Description of Artificial Sequence: Synthetic oligonucleotide
  Antisense strand to SEQ ID NO: 988844
aauagagggagacagucca

SEQ ID NO: 988846 - RNA, 19 nt, Artificial Sequence
  Description of Artificial Sequence: Synthetic oligonucleotide
  Sense strand starting at position 38 of SEQ ID NO: 914240
uguugaaccucagagaaca

SEQ ID NO: 988847 - RNA, 19 nt, Artificial Sequence
  Description of Artificial Sequence: Synthetic oligonucleotide
  Antisense strand to SEQ ID NO: 988846
uguucucugagguucaaca

SEQ ID NO: 988848 - RNA, 19 nt, Artificial Sequence
  Description of Artificial Sequence: Synthetic oligonucleotide
  Sense strand starting at position 200 of SEQ ID NO: 914240
aagugaugggacugcugua

SEQ ID NO: 988849 - RNA, 19 nt, Artificial Sequence
  Description of Artificial Sequence: Synthetic oligonucleotide
  Antisense strand to SEQ ID NO: 988848
uacagcagucccaucacuu

SEQ ID NO: 988850 - RNA, 19 nt, Artificial Sequence
  Description of Artificial Sequence: Synthetic oligonucleotide
  Sense strand starting at position 296 of SEQ ID NO: 914240
cugugugacauuggucaag

SEQ ID NO: 988851 - RNA, 19 nt, Artificial Sequence
  Description of Artificial Sequence: Synthetic oligonucleotide
  Antisense strand to SEQ ID NO: 988850
cuugaccaaugucacacag

SEQ ID NO: 988852 - RNA, 19 nt, Artificial Sequence
  Description of Artificial Sequence: Synthetic oligonucleotide
  Sense strand starting at position 338 of SEQ ID NO: 914240
guuuccuuauuaguaacau

SEQ ID NO: 988853 - RNA, 19 nt, Artificial Sequence
  Description of Artificial Sequence: Synthetic oligonucleotide
  Antisense strand to SEQ ID NO: 988852
auguuacuaauaaggaaac

SEQ ID NO: 988854 - RNA, 19 nt, Artificial Sequence
  Description of Artificial Sequence: Synthetic oligonucleotide
  Sense strand starting at position 395 of SEQ ID NO: 914240
gcuucugagcacuguggua

SEQ ID NO: 988855 - RNA, 19 nt, Artificial Sequence
  Description of Artificial Sequence: Synthetic oligonucleotide
  Antisense strand to SEQ ID NO: 988854
uaccacagugcucagaagc

SEQ ID NO: 988856 - RNA, 19 nt, Artificial Sequence
  Description of Artificial Sequence: Synthetic oligonucleotide
  Sense strand starting at position 400 of SEQ ID NO: 914240
ugagcacugugguaagaau

SEQ ID NO: 988857 - RNA, 19 nt, Artificial Sequence
  Description of Artificial Sequence: Synthetic oligonucleotide
  Antisense strand to SEQ ID NO: 988856
auucuuaccacagugcuca

SEQ ID NO: 988858 - RNA, 19 nt, Artificial Sequence
  Description of Artificial Sequence: Synthetic oligonucleotide
  Sense strand starting at position 419 of SEQ ID NO: 914240
ggaauaagaugacaggaau

SEQ ID NO: 988859 - RNA, 19 nt, Artificial Sequence
  Description of Artificial Sequence: Synthetic oligonucleotide
  Antisense strand to SEQ ID NO: 988858
auuccugucaucuuauucc

SEQ ID NO: 988860 - RNA, 19 nt, Artificial Sequence
  Description of Artificial Sequence: Synthetic oligonucleotide
  Sense strand starting at position 431 of SEQ ID NO: 914240
caggaaugagaacgucuuu

SEQ ID NO: 988861 - RNA, 19 nt, Artificial Sequence
  Description of Artificial Sequence: Synthetic oligonucleotide
  Antisense strand to SEQ ID NO: 988860
aaagacguucucauuccug

SEQ ID NO: 988862 - RNA, 19 nt, Artificial Sequence
  Description of Artificial Sequence: Synthetic oligonucleotide
  Sense strand starting at position 436 of SEQ ID NO: 914240
augagaacgucuuuauaau

SEQ ID NO: 988863 - RNA, 19 nt, Artificial Sequence
  Description of Artificial Sequence: Synthetic oligonucleotide
  Antisense strand to SEQ ID NO: 988862
auuauaaagacguucucau

SEQ ID NO: 988864 - RNA, 19 nt, Artificial Sequence
  Description of Artificial Sequence: Synthetic oligonucleotide
  Sense strand starting at position 437 of SEQ ID NO: 914240
ugagaacgucuuuauaauu

SEQ ID NO: 988865 - RNA, 19 nt, Artificial Sequence
  Description of Artificial Sequence: Synthetic oligonucleotide
  Antisense strand to SEQ ID NO: 988864
aauuauaaagacguucuca

SEQ ID NO: 988866 - RNA, 19 nt, Artificial Sequence
  Description of Artificial Sequence: Synthetic oligonucleotide
  Sense strand starting at position 458 of SEQ ID NO: 914240
guccaaggguauugcucaa

SEQ ID NO: 988867 - RNA, 19 nt, Artificial Sequence
  Description of Artificial Sequence: Synthetic oligonucleotide
  Antisense strand to SEQ ID NO: 988866
uugagcaauacccuuggac

SEQ ID NO: 988868 - RNA, 19 nt, Artificial Sequence
  Description of Artificial Sequence: Synthetic oligonucleotide
  Sense strand starting at position 586 of SEQ ID NO: 914240
gggaucucuuuagaagaua

SEQ ID NO: 988869 - RNA, 19 nt, Artificial Sequence
  Description of Artificial Sequence: Synthetic oligonucleotide
  Antisense strand to SEQ ID NO: 988868
uaucuucuaaagagauccc

SEQ ID NO: 988870 - RNA, 19 nt, Artificial Sequence
  Description of Artificial Sequence: Synthetic oligonucleotide
  Sense strand starting at position 742 of SEQ ID NO: 914240
gcaggacuuuccgaacaug

SEQ ID NO: 988871 - RNA, 19 nt, Artificial Sequence
  Description of Artificial Sequence: Synthetic oligonucleotide
  Antisense strand to SEQ ID NO: 988870
cauguucggaaaguccugc

SEQ ID NO: 988872 - RNA, 19 nt, Artificial Sequence
  Description of Artificial Sequence: Synthetic oligonucleotide
  Sense strand starting at position 771 of SEQ ID NO: 914240
gccucaugcuucuggagag

SEQ ID NO: 988873 - RNA, 19 nt, Artificial Sequence
  Description of Artificial Sequence: Synthetic oligonucleotide
  Antisense strand to SEQ ID NO: 988872
cucuccagaagcaugaggc

SEQ ID NO: 988874 - RNA, 19 nt, Artificial Sequence
  Description of Artificial Sequence: Synthetic oligonucleotide
  Sense strand starting at position 2256 of SEQ ID NO: 914240
agggauuguaaagguguca

SEQ ID NO: 988875 - RNA, 19 nt, Artificial Sequence
  Description of Artificial Sequence: Synthetic oligonucleotide
  Antisense strand to SEQ ID NO: 988874
ugacaccuuuacaaucccu

SEQ ID NO: 988876 - RNA, 19 nt, Artificial Sequence
  Description of Artificial Sequence: Synthetic oligonucleotide
  Sense strand starting at position 2316 of SEQ ID NO: 914240
ucaguuccagcccaugaau

SEQ ID NO: 988877 - RNA, 19 nt, Artificial Sequence
  Description of Artificial Sequence: Synthetic oligonucleotide
  Antisense strand to SEQ ID NO: 988876
auucaugggcuggaacuga

SEQ ID NO: 988878 - RNA, 19 nt, Artificial Sequence
  Description of Artificial Sequence: Synthetic oligonucleotide
  Sense strand starting at position 2318 of SEQ ID NO: 914240
aguuccagcccaugaauga

SEQ ID NO: 988879 - RNA, 19 nt, Artificial Sequence
  Description of Artificial Sequence: Synthetic oligonucleotide
  Antisense strand to SEQ ID NO: 988878
ucauucaugggcuggaacu

SEQ ID NO: 988880 - RNA, 19 nt, Artificial Sequence
  Description of Artificial Sequence: Synthetic oligonucleotide
  Sense strand starting at position 2390 of SEQ ID NO: 914240
gcaggagccuugggacauu

SEQ ID NO: 988881 - RNA, 19 nt, Artificial Sequence
  Description of Artificial Sequence: Synthetic oligonucleotide
  Antisense strand to SEQ ID NO: 988880
aaugucccaaggcuccugc

SEQ ID NO: 988882 - RNA, 19 nt, Artificial Sequence
  Description of Artificial Sequence: Synthetic oligonucleotide
  Sense strand starting at position 2435 of SEQ ID NO: 914240
cacuuucucugaguuagga

SEQ ID NO: 988883 - RNA, 19 nt, Artificial Sequence
  Description of Artificial Sequence: Synthetic oligonucleotide
  Antisense strand to SEQ ID NO: 988882
uccuaacucagagaaagug

SEQ ID NO: 988884 - RNA, 19 nt, Artificial Sequence
  Description of Artificial Sequence: Synthetic oligonucleotide
  Sense strand starting at position 2448 of SEQ ID NO: 914240
uuaggacacuaauaaagaa

SEQ ID NO: 988885 - RNA, 19 nt, Artificial Sequence
  Description of Artificial Sequence: Synthetic oligonucleotide
  Antisense strand to SEQ ID NO: 988884
uucuuuauuaguguccuaa

SEQ ID NO: 988886 - RNA, 19 nt, Artificial Sequence
  Description of Artificial Sequence: Synthetic oligonucleotide
  Sense strand starting at position 2497 of SEQ ID NO: 914240
gcaguagcuccagaguuaa

SEQ ID NO: 988887 - RNA, 19 nt, Artificial Sequence
  Description of Artificial Sequence: Synthetic oligonucleotide
  Antisense strand to SEQ ID NO: 988886
uuaacucuggagcuacugc

SEQ ID NO: 988888 - RNA, 19 nt, Artificial Sequence
  Description of Artificial Sequence: Synthetic oligonucleotide
  Sense strand starting at position 2547 of SEQ ID NO: 914240
guagucaccuagccagaua

SEQ ID NO: 988889 - RNA, 19 nt, Artificial Sequence
  Description of Artificial Sequence: Synthetic oligonucleotide
  Antisense strand to SEQ ID NO: 988888
uaucuggcuaggugacuac

SEQ ID NO: 988890 - RNA, 19 nt, Artificial Sequence
  Description of Artificial Sequence: Synthetic oligonucleotide
  Sense strand starting at position 2586 of SEQ ID NO: 914240
augccauauccuggaggga

SEQ ID NO: 988891 - RNA, 19 nt, Artificial Sequence
  Description of Artificial Sequence: Synthetic oligonucleotide
  Antisense strand to SEQ ID NO: 988890
ucccuccaggauauggcau

SEQ ID NO: 988892 - RNA, 19 nt, Artificial Sequence
  Description of Artificial Sequence: Synthetic oligonucleotide
  Sense strand starting at position 2818 of SEQ ID NO: 914240
agacacgugaucugagcuu

SEQ ID NO: 988893 - RNA, 19 nt, Artificial Sequence
  Description of Artificial Sequence: Synthetic oligonucleotide
  Antisense strand to SEQ ID NO: 988892
aagcucagaucacgugucu

SEQ ID NO: 988894 - RNA, 19 nt, Artificial Sequence
  Description of Artificial Sequence: Synthetic oligonucleotide
  Sense strand starting at position 2913 of SEQ ID NO: 914240
gaggcuucuccuuacugca

SEQ ID NO: 988895 - RNA, 19 nt, Artificial Sequence
  Description of Artificial Sequence: Synthetic oligonucleotide
  Antisense strand to SEQ ID NO: 988894
ugcaguaaggagaagccuc

SEQ ID NO: 988896 - RNA, 19 nt, Artificial Sequence
  Description of Artificial Sequence: Synthetic oligonucleotide
  Sense strand starting at position 2938 of SEQ ID NO: 914240
gaggguuacuagcagucaa

SEQ ID NO: 988897 - RNA, 19 nt, Artificial Sequence
  Description of Artificial Sequence: Synthetic oligonucleotide
  Antisense strand to SEQ ID NO: 988896
uugacugcuaguaacccuc

SEQ ID NO: 988898 - RNA, 19 nt, Artificial Sequence
  Description of Artificial Sequence: Synthetic oligonucleotide
  Sense strand starting at position 3009 of SEQ ID NO: 914240
uggcgaucccuggaggauu

SEQ ID NO: 988899 - RNA, 19 nt, Artificial Sequence
  Description of Artificial Sequence: Synthetic oligonucleotide
  Antisense strand to SEQ ID NO: 988898
aauccuccagggaucgcca

SEQ ID NO: 988900 - RNA, 19 nt, Artificial Sequence
  Description of Artificial Sequence: Synthetic oligonucleotide
  Sense strand starting at position 3041 of SEQ ID NO: 914240
cccuguuacucugagguuu

SEQ ID NO: 988901 - RNA, 19 nt, Artificial Sequence
  Description of Artificial Sequence: Synthetic oligonucleotide
  Antisense strand to SEQ ID NO: 988900
aaaccucagaguaacaggg

SEQ ID NO: 988902 - RNA, 19 nt, Artificial Sequence
  Description of Artificial Sequence: Synthetic oligonucleotide
  Sense strand starting at position 3043 of SEQ ID NO: 914240
cuguuacucugagguuugu

SEQ ID NO: 988903 - RNA, 19 nt, Artificial Sequence
  Description of Artificial Sequence: Synthetic oligonucleotide
  Antisense strand to SEQ ID NO: 988902
acaaaccucagaguaacag

SEQ ID NO: 988904 - RNA, 19 nt, Artificial Sequence
  Description of Artificial Sequence: Synthetic oligonucleotide
  Sense strand starting at position 3262 of SEQ ID NO: 914240
ucacaauaucccuaugcga

SEQ ID NO: 988905 - RNA, 19 nt, Artificial Sequence
  Description of Artificial Sequence: Synthetic oligonucleotide
  Antisense strand to SEQ ID NO: 988904
ucgcauagggauauuguga

SEQ ID NO: 988906 - RNA, 19 nt, Artificial Sequence
  Description of Artificial Sequence: Synthetic oligonucleotide
  Sense strand starting at position 3264 of SEQ ID NO: 914240
acaauaucccuaugcgaca

SEQ ID NO: 988907 - RNA, 19 nt, Artificial Sequence
  Description of Artificial Sequence: Synthetic oligonucleotide
  Antisense strand to SEQ ID NO: 988906
ugucgcauagggauauugu

SEQ ID NO: 988908 - RNA, 19 nt, Artificial Sequence
  Description of Artificial Sequence: Synthetic oligonucleotide
  Sense strand starting at position 3333 of SEQ ID NO: 914240
agcaauaguugguggcaaa

SEQ ID NO: 988909 - RNA, 19 nt, Artificial Sequence
  Description of Artificial Sequence: Synthetic oligonucleotide
  Antisense strand to SEQ ID NO: 988908
uuugccaccaacuauugcu

SEQ ID NO: 988910 - RNA, 19 nt, Artificial Sequence
  Description of Artificial Sequence: Synthetic oligonucleotide
  Sense strand starting at position 3421 of SEQ ID NO: 914240
uggacugucucccucuauu

SEQ ID NO: 988911 - RNA, 19 nt, Artificial Sequence
  Description of Artificial Sequence: Synthetic oligonucleotide
  Antisense strand to SEQ ID NO: 988910
aauagagggagacagucca

SEQ ID NO: 988912 - RNA, 19 nt, Artificial Sequence
  Description of Artificial Sequence: Synthetic oligonucleotide
  Sense strand starting at position 3464 of SEQ ID NO: 914240
ugagauaaccuccaugucu

SEQ ID NO: 988913 - RNA, 19 nt, Artificial Sequence
  Description of Artificial Sequence: Synthetic oligonucleotide
  Antisense strand to SEQ ID NO: 988912
agacauggagguuaucuca

SEQ ID NO: 988914 - RNA, 19 nt, Artificial Sequence
  Description of Artificial Sequence: Synthetic oligonucleotide
  Sense strand starting at position 3494 of SEQ ID NO: 914240
agcuuuauucuuuggcaca

SEQ ID NO: 988915 - RNA, 19 nt, Artificial Sequence
  Description of Artificial Sequence: Synthetic oligonucleotide
  Antisense strand to SEQ ID NO: 988914
ugugccaaagaauaaagcu

SEQ ID NO: 988916 - RNA, 19 nt, Artificial Sequence
  Description of Artificial Sequence: Synthetic oligonucleotide
  Sense strand starting at position 3495 of SEQ ID NO: 914240
gcuuuauucuuuggcacac

SEQ ID NO: 988917 - RNA, 19 nt, Artificial Sequence
  Description of Artificial Sequence: Synthetic oligonucleotide
  Antisense strand to SEQ ID NO: 988916
gugugccaaagaauaaagc

SEQ ID NO: 988918 - RNA, 19 nt, Artificial Sequence
  Description of Artificial Sequence: Synthetic oligonucleotide
  Sense strand starting at position 3637 of SEQ ID NO: 914240
cuuucuuucugauauaguc

SEQ ID NO: 988919 - RNA, 19 nt, Artificial Sequence
  Description of Artificial Sequence: Synthetic oligonucleotide
  Antisense strand to SEQ ID NO: 988918
gacuauaucagaaagaaag

SEQ ID NO: 988920 - RNA, 19 nt, Artificial Sequence
  Description of Artificial Sequence: Synthetic oligonucleotide
  Sense strand starting at position 25 of SEQ ID NO: 914241
aggagacaaucugugguua

SEQ ID NO: 988921 - RNA, 19 nt, Artificial Sequence
  Description of Artificial Sequence: Synthetic oligonucleotide
  Antisense strand to SEQ ID NO: 988920
uaaccacagauugucuccu

SEQ ID NO: 988922 - RNA, 19 nt, Artificial Sequence
  Description of Artificial Sequence: Synthetic oligonucleotide
  Sense strand starting at position 26 of SEQ ID NO: 914241
ggagacaaucugugguuac

SEQ ID NO: 988923 - RNA, 19 nt, Artificial Sequence
  Description of Artificial Sequence: Synthetic oligonucleotide
  Antisense strand to SEQ ID NO: 988922
guaaccacagauugucucc

SEQ ID NO: 988924 - RNA, 19 nt, Artificial Sequence
  Description of Artificial Sequence: Synthetic oligonucleotide
  Sense strand starting at position 29 of SEQ ID NO: 914241
gacaaucugugguuacuuu

SEQ ID NO: 988925 - RNA, 19 nt, Artificial Sequence
  Description of Artificial Sequence: Synthetic oligonucleotide
  Antisense strand to SEQ ID NO: 988924
aaaguaaccacagauuguc

SEQ ID NO: 988926 - RNA, 19 nt, Artificial Sequence
  Description of Artificial Sequence: Synthetic oligonucleotide
  Sense strand starting at position 78 of SEQ ID NO: 914241
ucaucauuccugggcacau

SEQ ID NO: 988927 - RNA, 19 nt, Artificial Sequence
  Description of Artificial Sequence: Synthetic oligonucleotide
  Antisense strand to SEQ ID NO: 988926
augugcccaggaaugauga

SEQ ID NO: 988928 - RNA, 19 nt, Artificial Sequence
  Description of Artificial Sequence: Synthetic oligonucleotide
  Sense strand starting at position 80 of SEQ ID NO: 914241
aucauuccugggcacauau

SEQ ID NO: 988929 - RNA, 19 nt, Artificial Sequence
  Description of Artificial Sequence: Synthetic oligonucleotide
  Antisense strand to SEQ ID NO: 988928
auaugugcccaggaaugau

SEQ ID NO: 988930 - RNA, 19 nt, Artificial Sequence
  Description of Artificial Sequence: Synthetic oligonucleotide
  Sense strand starting at position 230 of SEQ ID NO: 914241
gguucaggucuuuaaguug

SEQ ID NO: 988931 - RNA, 19 nt, Artificial Sequence
  Description of Artificial Sequence: Synthetic oligonucleotide
  Antisense strand to SEQ ID NO: 988930
caacuuaaagaccugaacc

SEQ ID NO: 988932 - RNA, 19 nt, Artificial Sequence
  Description of Artificial Sequence: Synthetic oligonucleotide
  Sense strand starting at position 396 of SEQ ID NO: 914241
ucaggaauggcuuggucaa

SEQ ID NO: 988933 - RNA, 19 nt, Artificial Sequence
  Description of Artificial Sequence: Synthetic oligonucleotide
  Antisense strand to SEQ ID NO: 988932
uugaccaagccauuccuga

SEQ ID NO: 988934 - RNA, 19 nt, Artificial Sequence
  Description of Artificial Sequence: Synthetic oligonucleotide
  Sense strand starting at position 397 of SEQ ID NO: 914241
caggaauggcuuggucaag

SEQ ID NO: 988935 - RNA, 19 nt, Artificial Sequence
  Description of Artificial Sequence: Synthetic oligonucleotide
  Antisense strand to SEQ ID NO: 988934
cuugaccaagccauuccug

SEQ ID NO: 988936 - RNA, 19 nt, Artificial Sequence
  Description of Artificial Sequence: Synthetic oligonucleotide
  Sense strand starting at position 398 of SEQ ID NO: 914241
aggaauggcuuggucaaga

SEQ ID NO: 988937 - RNA, 19 nt, Artificial Sequence
  Description of Artificial Sequence: Synthetic oligonucleotide
  Antisense strand to SEQ ID NO: 988936
ucuugaccaagccauuccu

SEQ ID NO: 988938 - RNA, 19 nt, Artificial Sequence
  Description of Artificial Sequence: Synthetic oligonucleotide
  Sense strand starting at position 403 of SEQ ID NO: 914241
uggcuuggucaagagauuc

SEQ ID NO: 988939 - RNA, 19 nt, Artificial Sequence
  Description of Artificial Sequence: Synthetic oligonucleotide
  Antisense strand to SEQ ID NO: 988938
gaaucucuugaccaagcca

SEQ ID NO: 988940 - RNA, 19 nt, Artificial Sequence
  Description of Artificial Sequence: Synthetic oligonucleotide
  Sense strand starting at position 455 of SEQ ID NO: 914241
guaacaaugccacgcagaa

SEQ ID NO: 988941 - RNA, 19 nt, Artificial Sequence
  Description of Artificial Sequence: Synthetic oligonucleotide
  Antisense strand to SEQ ID NO: 988940
uucugcguggcauuguuac

SEQ ID NO: 988942 - RNA, 19 nt, Artificial Sequence
  Description of Artificial Sequence: Synthetic oligonucleotide
  Sense strand starting at position 521 of SEQ ID NO: 914241
uuagaacaaucucuggcaa

SEQ ID NO: 988943 - RNA, 19 nt, Artificial Sequence
  Description of Artificial Sequence: Synthetic oligonucleotide
  Antisense strand to SEQ ID NO: 988942
uugccagagauuguucuaa

SEQ ID NO: 988944 - RNA, 19 nt, Artificial Sequence
  Description of Artificial Sequence: Synthetic oligonucleotide
  Sense strand starting at position 536 of SEQ ID NO: 914241
gcaagugccauguaaugaa

SEQ ID NO: 988945 - RNA, 19 nt, Artificial Sequence
  Description of Artificial Sequence: Synthetic oligonucleotide
  Antisense strand to SEQ ID NO: 988944
uucauuacauggcacuugc

SEQ ID NO: 988946 - RNA, 19 nt, Artificial Sequence
  Description of Artificial Sequence: Synthetic oligonucleotide
  Sense strand starting at position 700 of SEQ ID NO: 914241
guucuugccgcagaugaga

SEQ ID NO: 988947 - RNA, 19 nt, Artificial Sequence
  Description of Artificial Sequence: Synthetic oligonucleotide
  Antisense strand to SEQ ID NO: 988946
ucucaucugcggcaagaac

SEQ ID NO: 988948 - RNA, 19 nt, Artificial Sequence
  Description of Artificial Sequence: Synthetic oligonucleotide
  Sense strand starting at position 1458 of SEQ ID NO: 914241
gcgaguuggacuuggagga

SEQ ID NO: 988949 - RNA, 19 nt, Artificial Sequence
  Description of Artificial Sequence: Synthetic oligonucleotide
  Antisense strand to SEQ ID NO: 988948
uccuccaaguccaacucgc

SEQ ID NO: 988950 - RNA, 19 nt, Artificial Sequence
  Description of Artificial Sequence: Synthetic oligonucleotide
  Sense strand starting at position 1868 of SEQ ID NO: 914241
gagucaguccuccacagag

SEQ ID NO: 988951 - RNA, 19 nt, Artificial Sequence
  Description of Artificial Sequence: Synthetic oligonucleotide
  Antisense strand to SEQ ID NO: 988950
cucuguggaggacugacuc

SEQ ID NO: 988952 - RNA, 19 nt, Artificial Sequence
  Description of Artificial Sequence: Synthetic oligonucleotide
  Sense strand starting at position 1870 of SEQ ID NO: 914241
gucaguccuccacagagaa

SEQ ID NO: 988953 - RNA, 19 nt, Artificial Sequence
  Description of Artificial Sequence: Synthetic oligonucleotide
  Antisense strand to SEQ ID NO: 988952
uucucuguggaggacugac

SEQ ID NO: 988954 - RNA, 19 nt, Artificial Sequence
  Description of Artificial Sequence: Synthetic oligonucleotide
  Sense strand starting at position 1976 of SEQ ID NO: 914241
gcgagaaagcgcucugcaa

SEQ ID NO: 988955 - RNA, 19 nt, Artificial Sequence
  Description of Artificial Sequence: Synthetic oligonucleotide
  Antisense strand to SEQ ID NO: 988954
uugcagagcgcuuucucgc

SEQ ID NO: 988956 - RNA, 19 nt, Artificial Sequence
  Description of Artificial Sequence: Synthetic oligonucleotide
  Sense strand starting at position 1980 of SEQ ID NO: 914241
gaaagcgcucugcaaacuu

SEQ ID NO: 988957 - RNA, 19 nt, Artificial Sequence
  Description of Artificial Sequence: Synthetic oligonucleotide
  Antisense strand to SEQ ID NO: 988956
aaguuugcagagcgcuuuc

SEQ ID NO: 988958 - RNA, 19 nt, Artificial Sequence
  Description of Artificial Sequence: Synthetic oligonucleotide
  Sense strand starting at position 2121 of SEQ ID NO: 914241
gcggucacuaugcagauuu

SEQ ID NO: 988959 - RNA, 19 nt, Artificial Sequence
  Description of Artificial Sequence: Synthetic oligonucleotide
  Antisense strand to SEQ ID NO: 988958
aaaucugcauagugaccgc

SEQ ID NO: 988960 - RNA, 19 nt, Artificial Sequence
  Description of Artificial Sequence: Synthetic oligonucleotide
  Sense strand starting at position 2517 of SEQ ID NO: 914241
cccgcaauccgagaugaaa

SEQ ID NO: 988961 - RNA, 19 nt, Artificial Sequence
  Description of Artificial Sequence: Synthetic oligonucleotide
  Antisense strand to SEQ ID NO: 988960
uuucaucucggauugcggg

SEQ ID NO: 988962 - RNA, 19 nt, Artificial Sequence
  Description of Artificial Sequence: Synthetic oligonucleotide
  Sense strand starting at position 2835 of SEQ ID NO: 914241
cgagauagacaguguucuu

SEQ ID NO: 988963 - RNA, 19 nt, Artificial Sequence
  Description of Artificial Sequence: Synthetic oligonucleotide
  Antisense strand to SEQ ID NO: 988962
aagaacacugucuaucucg

SEQ ID NO: 988964 - RNA, 19 nt, Artificial Sequence
  Description of Artificial Sequence: Synthetic oligonucleotide
  Sense strand starting at position 2838 of SEQ ID NO: 914241
gauagacaguguucuuaca

SEQ ID NO: 988965 - RNA, 19 nt, Artificial Sequence
  Description of Artificial Sequence: Synthetic oligonucleotide
  Antisense strand to SEQ ID NO: 988964
uguaagaacacugucuauc

SEQ ID NO: 988966 - RNA, 19 nt, Artificial Sequence
  Description of Artificial Sequence: Synthetic oligonucleotide
  Sense strand starting at position 2845 of SEQ ID NO: 914241
aguguucuuacaggaagaa

SEQ ID NO: 988967 - RNA, 19 nt, Artificial Sequence
  Description of Artificial Sequence: Synthetic oligonucleotide
  Antisense strand to SEQ ID NO: 988966
uucuuccuguaagaacacu

SEQ ID NO: 988968 - RNA, 19 nt, Artificial Sequence
  Description of Artificial Sequence: Synthetic oligonucleotide
  Sense strand starting at position 2925 of SEQ ID NO: 914241
gcagguguucgccuccuaa

SEQ ID NO: 988969 - RNA, 19 nt, Artificial Sequence
  Description of Artificial Sequence: Synthetic oligonucleotide
  Antisense strand to SEQ ID NO: 988968
uuaggaggcgaacaccugc

SEQ ID NO: 988970 - RNA, 19 nt, Artificial Sequence
  Description of Artificial Sequence: Synthetic oligonucleotide
  Sense strand starting at position 3283 of SEQ ID NO: 914241
ccgugaguuggauaugaac

SEQ ID NO: 988971 - RNA, 19 nt, Artificial Sequence
  Description of Artificial Sequence: Synthetic oligonucleotide
  Antisense strand to SEQ ID NO: 988970
guucauauccaacucacgg

SEQ ID NO: 988972 - RNA, 19 nt, Artificial Sequence
  Description of Artificial Sequence: Synthetic oligonucleotide
  Sense strand starting at position 3285 of SEQ ID NO: 914241
gugaguuggauaugaacua

SEQ ID NO: 988973 - RNA, 19 nt, Artificial Sequence
  Description of Artificial Sequence: Synthetic oligonucleotide
  Antisense strand to SEQ ID NO: 988972
uaguucauauccaacucac

SEQ ID NO: 988974 - RNA, 19 nt, Artificial Sequence
  Description of Artificial Sequence: Synthetic oligonucleotide
  Sense strand starting at position 3300 of SEQ ID NO: 914241
acuagaaaugucugguuug

SEQ ID NO: 988975 - RNA, 19 nt, Artificial Sequence
  Description of Artificial Sequence: Synthetic oligonucleotide
  Antisense strand to SEQ ID NO: 988974
caaaccagacauuucuagu

SEQ ID NO: 988976 - RNA, 19 nt, Artificial Sequence
  Description of Artificial Sequence: Synthetic oligonucleotide
  Sense strand starting at position 3397 of SEQ ID NO: 914241
uuccgcgggucuuuauuua

SEQ ID NO: 988977 - RNA, 19 nt, Artificial Sequence
  Description of Artificial Sequence: Synthetic oligonucleotide
  Antisense strand to SEQ ID NO: 988976
uaaauaaagacccgcggaa

SEQ ID NO: 988978 - RNA, 19 nt, Artificial Sequence
  Description of Artificial Sequence: Synthetic oligonucleotide
  Sense strand starting at position 3401 of SEQ ID NO: 914241
gcgggucuuuauuuaugca

SEQ ID NO: 988979 - RNA, 19 nt, Artificial Sequence
  Description of Artificial Sequence: Synthetic oligonucleotide
  Antisense strand to SEQ ID NO: 988978
ugcauaaauaaagacccgc

SEQ ID NO: 988980 - RNA, 19 nt, Artificial Sequence
  Description of Artificial Sequence: Synthetic oligonucleotide
  Sense strand starting at position 3426 of SEQ ID NO: 914241
ccgcccgaugguuagaauu

SEQ ID NO: 988981 - RNA, 19 nt, Artificial Sequence
  Description of Artificial Sequence: Synthetic oligonucleotide
  Antisense strand to SEQ ID NO: 988980
aauucuaaccaucgggcgg

SEQ ID NO: 988982 - RNA, 19 nt, Artificial Sequence
  Description of Artificial Sequence: Synthetic oligonucleotide
  Sense strand starting at position 3483 of SEQ ID NO: 914241
gacgcaagucagcagagau

SEQ ID NO: 988983 - RNA, 19 nt, Artificial Sequence
  Description of Artificial Sequence: Synthetic oligonucleotide
  Antisense strand to SEQ ID NO: 988982
aucucugcugacuugcguc

SEQ ID NO: 988984 - RNA, 19 nt, Artificial Sequence
  Description of Artificial Sequence: Synthetic oligonucleotide
  Sense strand starting at position 3514 of SEQ ID NO: 914241
ggagaaugcagucacacuu

SEQ ID NO: 988985 - RNA, 19 nt, Artificial Sequence
  Description of Artificial Sequence: Synthetic oligonucleotide
  Antisense strand to SEQ ID NO: 988984
aagugugacugcauucucc

SEQ ID NO: 988986 - RNA, 19 nt, Artificial Sequence
  Description of Artificial Sequence: Synthetic oligonucleotide
  Sense strand starting at position 3527 of SEQ ID NO: 914241
acacuuuacagacgugaga

SEQ ID NO: 988987 - RNA, 19 nt, Artificial Sequence
  Description of Artificial Sequence: Synthetic oligonucleotide
  Antisense strand to SEQ ID NO: 988986
ucucacgucuguaaagugu

SEQ ID NO: 988988 - RNA, 19 nt, Artificial Sequence
  Description of Artificial Sequence: Synthetic oligonucleotide
  Sense strand starting at position 3529 of SEQ ID NO: 914241
acuuuacagacgugagauu

SEQ ID NO: 988989 - RNA, 19 nt, Artificial Sequence
  Description of Artificial Sequence: Synthetic oligonucleotide
  Antisense strand to SEQ ID NO: 988988
aaucucacgucuguaaagu

SEQ ID NO: 988990 - RNA, 19 nt, Artificial Sequence
  Description of Artificial Sequence: Synthetic oligonucleotide
  Sense strand starting at position 3530 of SEQ ID NO: 914241
cuuuacagacgugagauua

SEQ ID NO: 988991 - RNA, 19 nt, Artificial Sequence
  Description of Artificial Sequence: Synthetic oligonucleotide
  Antisense strand to SEQ ID NO: 988990
uaaucucacgucuguaaag

SEQ ID NO: 988992 - RNA, 19 nt, Artificial Sequence
  Description of Artificial Sequence: Synthetic oligonucleotide
  Sense strand starting at position 3800 of SEQ ID NO: 914241
ggaaucaucuggaguggga

SEQ ID NO: 988993 - RNA, 19 nt, Artificial Sequence
  Description of Artificial Sequence: Synthetic oligonucleotide
  Antisense strand to SEQ ID NO: 988992
ucccacuccagaugauucc

SEQ ID NO: 988994 - RNA, 19 nt, Artificial Sequence
  Description of Artificial Sequence: Synthetic oligonucleotide
  Sense strand starting at position 3894 of SEQ ID NO: 914241
ccaacugaaucugagaauc

SEQ ID NO: 988995 - RNA, 19 nt, Artificial Sequence
  Description of Artificial Sequence: Synthetic oligonucleotide
  Antisense strand to SEQ ID NO: 988994
gauucucagauucaguugg

SEQ ID NO: 988996 - RNA, 19 nt, Artificial Sequence
  Description of Artificial Sequence: Synthetic oligonucleotide
  Sense strand starting at position 3904 of SEQ ID NO: 914241
cugagaauccugugaaugu

SEQ ID NO: 988997 - RNA, 19 nt, Artificial Sequence
  Description of Artificial Sequence: Synthetic oligonucleotide
  Antisense strand to SEQ ID NO: 988996
acauucacaggauucucag

SEQ ID NO: 988998 - RNA, 19 nt, Artificial Sequence
  Description of Artificial Sequence: Synthetic oligonucleotide
  Sense strand starting at position 3914 of SEQ ID NO: 914241
ugugaauguugaccugcaa

SEQ ID NO: 988999 - RNA, 19 nt, Artificial Sequence
  Description of Artificial Sequence: Synthetic oligonucleotide
  Antisense strand to SEQ ID NO: 988998
uugcaggucaacauucaca

SEQ ID NO: 989000 - RNA, 19 nt, Artificial Sequence
  Description of Artificial Sequence: Synthetic oligonucleotide
  Sense strand starting at position 438 of SEQ ID NO: 914242
cuagcaagagcucauuaaa

SEQ ID NO: 989001 - RNA, 19 nt, Artificial Sequence
  Description of Artificial Sequence: Synthetic oligonucleotide
  Antisense strand to SEQ ID NO: 989000
uuuaaugagcucuugcuag

SEQ ID NO: 989002 - RNA, 19 nt, Artificial Sequence
  Description of Artificial Sequence: Synthetic oligonucleotide
  Sense strand starting at position 441 of SEQ ID NO: 914242
gcaagagcucauuaaaugu

SEQ ID NO: 989003 - RNA, 19 nt, Artificial Sequence
  Description of Artificial Sequence: Synthetic oligonucleotide
  Antisense strand to SEQ ID NO: 989002
acauuuaaugagcucuugc

SEQ ID NO: 989004 - RNA, 19 nt, Artificial Sequence
  Description of Artificial Sequence: Synthetic oligonucleotide
  Sense strand starting at position 795 of SEQ ID NO: 914242
acucaaguguaagcaagau

SEQ ID NO: 989005 - RNA, 19 nt, Artificial Sequence
  Description of Artificial Sequence: Synthetic oligonucleotide
  Antisense strand to SEQ ID NO: 989004
aucuugcuuacacuugagu

SEQ ID NO: 989006 - RNA, 19 nt, Artificial Sequence
  Description of Artificial Sequence: Synthetic oligonucleotide
  Sense strand starting at position 799 of SEQ ID NO: 914242
aaguguaagcaagaugcaa

SEQ ID NO: 989007 - RNA, 19 nt, Artificial Sequence
  Description of Artificial Sequence: Synthetic oligonucleotide
  Antisense strand to SEQ ID NO: 989006
uugcaucuugcuuacacuu

SEQ ID NO: 989008 - RNA, 19 nt, Artificial Sequence
  Description of Artificial Sequence: Synthetic oligonucleotide
  Sense strand starting at position 857 of SEQ ID NO: 914242
uucgguaucaaccagggua

SEQ ID NO: 989009 - RNA, 19 nt, Artificial Sequence
  Description of Artificial Sequence: Synthetic oligonucleotide
  Antisense strand to SEQ ID NO: 989008
uacccugguugauaccgaa

SEQ ID NO: 989010 - RNA, 19 nt, Artificial Sequence
  Description of Artificial Sequence: Synthetic oligonucleotide
  Sense strand starting at position 860 of SEQ ID NO: 914242
gguaucaaccaggguaauc

SEQ ID NO: 989011 - RNA, 19 nt, Artificial Sequence
  Description of Artificial Sequence: Synthetic oligonucleotide
  Antisense strand to SEQ ID NO: 989010
gauuacccugguugauacc

SEQ ID NO: 989012 - RNA, 19 nt, Artificial Sequence
  Description of Artificial Sequence: Synthetic oligonucleotide
  Sense strand starting at position 869 of SEQ ID NO: 914242
caggguaaucuggguuauc

SEQ ID NO: 989013 - RNA, 19 nt, Artificial Sequence
  Description of Artificial Sequence: Synthetic oligonucleotide
  Antisense strand to SEQ ID NO: 989012
gauaacccagauuacccug

SEQ ID NO: 989014 - RNA, 19 nt, Artificial Sequence
  Description of Artificial Sequence: Synthetic oligonucleotide
  Sense strand starting at position 870 of SEQ ID NO: 914242
aggguaaucuggguuauca

SEQ ID NO: 989015 - RNA, 19 nt, Artificial Sequence
  Description of Artificial Sequence: Synthetic oligonucleotide
  Antisense strand to SEQ ID NO: 989014
ugauaacccagauuacccu

SEQ ID NO: 989016 - RNA, 19 nt, Artificial Sequence
  Description of Artificial Sequence: Synthetic oligonucleotide
  Sense strand starting at position 964 of SEQ ID NO: 914242
cuuacuguacuuuauagau

SEQ ID NO: 989017 - RNA, 19 nt, Artificial Sequence
  Description of Artificial Sequence: Synthetic oligonucleotide
  Antisense strand to SEQ ID NO: 989016
aucuauaaaguacaguaag

SEQ ID NO: 989018 - RNA, 19 nt, Artificial Sequence
  Description of Artificial Sequence: Synthetic oligonucleotide
  Sense strand starting at position 1075 of SEQ ID NO: 914242
acauucuuggcagagaagu

SEQ ID NO: 989019 - RNA, 19 nt, Artificial Sequence
  Description of Artificial Sequence: Synthetic oligonucleotide
  Antisense strand to SEQ ID NO: 989018
acuucucugccaagaaugu

SEQ ID NO: 989020 - RNA, 19 nt, Artificial Sequence
  Description of Artificial Sequence: Synthetic oligonucleotide
  Sense strand starting at position 1289 of SEQ ID NO: 914242
uuguaugaccuggaguucu

SEQ ID NO: 989021 - RNA, 19 nt, Artificial Sequence
  Description of Artificial Sequence: Synthetic oligonucleotide
  Antisense strand to SEQ ID NO: 989020
agaacuccaggucauacaa

SEQ ID NO: 989022 - RNA, 19 nt, Artificial Sequence
  Description of Artificial Sequence: Synthetic oligonucleotide
  Sense strand starting at position 1302 of SEQ ID NO: 914242
aguucuugugcaguuguca

SEQ ID NO: 989023 - RNA, 19 nt, Artificial Sequence
  Description of Artificial Sequence: Synthetic oligonucleotide
  Antisense strand to SEQ ID NO: 989022
ugacaacugcacaagaacu

SEQ ID NO: 989024 - RNA, 19 nt, Artificial Sequence
  Description of Artificial Sequence: Synthetic oligonucleotide
  Sense strand starting at position 2286 of SEQ ID NO: 914242
aguugauccuaauuagcaa

SEQ ID NO: 989025 - RNA, 19 nt, Artificial Sequence
  Description of Artificial Sequence: Synthetic oligonucleotide
  Antisense strand to SEQ ID NO: 989024
uugcuaauuaggaucaacu

SEQ ID NO: 989026 - RNA, 19 nt, Artificial Sequence
  Description of Artificial Sequence: Synthetic oligonucleotide
  Sense strand starting at position 2293 of SEQ ID NO: 914242
ccuaauuagcaaggauaac

SEQ ID NO: 989027 - RNA, 19 nt, Artificial Sequence
  Description of Artificial Sequence: Synthetic oligonucleotide
  Antisense strand to SEQ ID NO: 989026
guuauccuugcuaauuagg

SEQ ID NO: 989028 - RNA, 19 nt, Artificial Sequence
  Description of Artificial Sequence: Synthetic oligonucleotide
  Sense strand starting at position 2445 of SEQ ID NO: 914242
cagguuaugcgagauggaa

SEQ ID NO: 989029 - RNA, 19 nt, Artificial Sequence
  Description of Artificial Sequence: Synthetic oligonucleotide
  Antisense strand to SEQ ID NO: 989028
uuccaucucgcauaaccug

SEQ ID NO: 989030 - RNA, 19 nt, Artificial Sequence
  Description of Artificial Sequence: Synthetic oligonucleotide
  Sense strand starting at position 2447 of SEQ ID NO: 914242
gguuaugcgagauggaaau

SEQ ID NO: 989031 - RNA, 19 nt, Artificial Sequence
  Description of Artificial Sequence: Synthetic oligonucleotide
  Antisense strand to SEQ ID NO: 989030
auuuccaucucgcauaacc

SEQ ID NO: 989032 - RNA, 19 nt, Artificial Sequence
  Description of Artificial Sequence: Synthetic oligonucleotide
  Sense strand starting at position 2458 of SEQ ID NO: 914242
auggaaauggcgcagauaa

SEQ ID NO: 989033 - RNA, 19 nt, Artificial Sequence
  Description of Artificial Sequence: Synthetic oligonucleotide
  Antisense strand to SEQ ID NO: 989032
uuaucugcgccauuuccau

SEQ ID NO: 989034 - RNA, 19 nt, Artificial Sequence
  Description of Artificial Sequence: Synthetic oligonucleotide
  Sense strand starting at position 2687 of SEQ ID NO: 914242
ggacuucugguucagguga

SEQ ID NO: 989035 - RNA, 19 nt, Artificial Sequence
  Description of Artificial Sequence: Synthetic oligonucleotide
  Antisense strand to SEQ ID NO: 989034
ucaccugaaccagaagucc

SEQ ID NO: 989036 - RNA, 19 nt, Artificial Sequence
  Description of Artificial Sequence: Synthetic oligonucleotide
  Sense strand starting at position 2791 of SEQ ID NO: 914242
uugagaacccuuugugaua

SEQ ID NO: 989037 - RNA, 19 nt, Artificial Sequence
  Description of Artificial Sequence: Synthetic oligonucleotide
  Antisense strand to SEQ ID NO: 989036
uaucacaaaggguucucaa

SEQ ID NO: 989038 - RNA, 19 nt, Artificial Sequence
  Description of Artificial Sequence: Synthetic oligonucleotide
  Sense strand starting at position 2792 of SEQ ID NO: 914242
ugagaacccuuugugauau

SEQ ID NO: 989039 - RNA, 19 nt, Artificial Sequence
  Description of Artificial Sequence: Synthetic oligonucleotide
  Antisense strand to SEQ ID NO: 989038
auaucacaaaggguucuca

SEQ ID NO: 989040 - RNA, 19 nt, Artificial Sequence
  Description of Artificial Sequence: Synthetic oligonucleotide
  Sense strand starting at position 2942 of SEQ ID NO: 914242
cgugcuaaagaauauaaag

SEQ ID NO: 989041 - RNA, 19 nt, Artificial Sequence
  Description of Artificial Sequence: Synthetic oligonucleotide
  Antisense strand to SEQ ID NO: 989040
cuuuauauucuuuagcacg

SEQ ID NO: 989042 - RNA, 19 nt, Artificial Sequence
  Description of Artificial Sequence: Synthetic oligonucleotide
  Sense strand starting at position 3050 of SEQ ID NO: 914242
ccucgagaaggauguggaa

SEQ ID NO: 989043 - RNA, 19 nt, Artificial Sequence
  Description of Artificial Sequence: Synthetic oligonucleotide
  Antisense strand to SEQ ID NO: 989042
uuccacauccuucucgagg

SEQ ID NO: 989044 - RNA, 19 nt, Artificial Sequence
  Description of Artificial Sequence: Synthetic oligonucleotide
  Sense strand starting at position 3052 of SEQ ID NO: 914242
ucgagaaggauguggaauu

SEQ ID NO: 989045 - RNA, 19 nt, Artificial Sequence
  Description of Artificial Sequence: Synthetic oligonucleotide
  Antisense strand to SEQ ID NO: 989044
aauuccacauccuucucga

SEQ ID NO: 989046 - RNA, 19 nt, Artificial Sequence
  Description of Artificial Sequence: Synthetic oligonucleotide
  Sense strand starting at position 3072 of SEQ ID NO: 914242
gagcccagccuugaagaau

SEQ ID NO: 989047 - RNA, 19 nt, Artificial Sequence
  Description of Artificial Sequence: Synthetic oligonucleotide
  Antisense strand to SEQ ID NO: 989046
auucuucaaggcugggcuc

SEQ ID NO: 989048 - RNA, 19 nt, Artificial Sequence
  Description of Artificial Sequence: Synthetic oligonucleotide
  Sense strand starting at position 3092 of SEQ ID NO: 914242
ggagacuuuccacgggcaa

SEQ ID NO: 989049 - RNA, 19 nt, Artificial Sequence
  Description of Artificial Sequence: Synthetic oligonucleotide
  Antisense strand to SEQ ID NO: 989048
uugcccguggaaagucucc

SEQ ID NO: 989050 - RNA, 19 nt, Artificial Sequence
  Description of Artificial Sequence: Synthetic oligonucleotide
  Sense strand starting at position 3340 of SEQ ID NO: 914242
cuggguucagagcauuaga

SEQ ID NO: 989051 - RNA, 19 nt, Artificial Sequence
  Description of Artificial Sequence: Synthetic oligonucleotide
  Antisense strand to SEQ ID NO: 989050
ucuaaugcucugaacccag

SEQ ID NO: 989052 - RNA, 19 nt, Artificial Sequence
  Description of Artificial Sequence: Synthetic oligonucleotide
  Sense strand starting at position 3370 of SEQ ID NO: 914242
gguauuuaaugacaauuga

SEQ ID NO: 989053 - RNA, 19 nt, Artificial Sequence
  Description of Artificial Sequence: Synthetic oligonucleotide
  Antisense strand to SEQ ID NO: 989052
ucaauugucauuaaauacc

SEQ ID NO: 989054 - RNA, 19 nt, Artificial Sequence
  Description of Artificial Sequence: Synthetic oligonucleotide
  Sense strand starting at position 3381 of SEQ ID NO: 914242
acaauugauguagggacuu

SEQ ID NO: 989055 - RNA, 19 nt, Artificial Sequence
  Description of Artificial Sequence: Synthetic oligonucleotide
  Antisense strand to SEQ ID NO: 989054
aagucccuacaucaauugu

SEQ ID NO: 989056 - RNA, 19 nt, Artificial Sequence
  Description of Artificial Sequence: Synthetic oligonucleotide
  Sense strand starting at position 3416 of SEQ ID NO: 914242
caguauagucauuaaguag

SEQ ID NO: 989057 - RNA, 19 nt, Artificial Sequence
  Description of Artificial Sequence: Synthetic oligonucleotide
  Antisense strand to SEQ ID NO: 989056
cuacuuaaugacuauacug

SEQ ID NO: 989058 - RNA, 19 nt, Artificial Sequence
  Description of Artificial Sequence: Synthetic oligonucleotide
  Sense strand starting at position 3493 of SEQ ID NO: 914242
augugugaucuggagcaug

SEQ ID NO: 989059 - RNA, 19 nt, Artificial Sequence
  Description of Artificial Sequence: Synthetic oligonucleotide
  Antisense strand to SEQ ID NO: 989058
caugcuccagaucacacau

SEQ ID NO: 989060 - RNA, 19 nt, Artificial Sequence
  Description of Artificial Sequence: Synthetic oligonucleotide
  Sense strand starting at position 3507 of SEQ ID NO: 914242
gcaugcuucccagaugaag

SEQ ID NO: 989061 - RNA, 19 nt, Artificial Sequence
  Description of Artificial Sequence: Synthetic oligonucleotide
  Antisense strand to SEQ ID NO: 989060
cuucaucugggaagcaugc

SEQ ID NO: 989062 - RNA, 19 nt, Artificial Sequence
  Description of Artificial Sequence: Synthetic oligonucleotide
  Sense strand starting at position 3509 of SEQ ID NO: 914242
augcuucccagaugaagag

SEQ ID NO: 989063 - RNA, 19 nt, Artificial Sequence
  Description of Artificial Sequence: Synthetic oligonucleotide
  Antisense strand to SEQ ID NO: 989062
cucuucaucugggaagcau

SEQ ID NO: 989064 - RNA, 19 nt, Artificial Sequence
  Description of Artificial Sequence: Synthetic oligonucleotide
  Sense strand starting at position 3536 of SEQ ID NO: 914242
cucacagguuauguagauu

SEQ ID NO: 989065 - RNA, 19 nt, Artificial Sequence
  Description of Artificial Sequence: Synthetic oligonucleotide
  Antisense strand to SEQ ID NO: 989064
aaucuacauaaccugugag

SEQ ID NO: 989066 - RNA, 19 nt, Artificial Sequence
  Description of Artificial Sequence: Synthetic oligonucleotide
  Sense strand starting at position 3542 of SEQ ID NO: 914242
gguuauguagauuaaccga

SEQ ID NO: 989067 - RNA, 19 nt, Artificial Sequence
  Description of Artificial Sequence: Synthetic oligonucleotide
  Antisense strand to SEQ ID NO: 989066
ucgguuaaucuacauaacc

SEQ ID NO: 989068 - RNA, 19 nt, Artificial Sequence
  Description of Artificial Sequence: Synthetic oligonucleotide
  Sense strand starting at position 3547 of SEQ ID NO: 914242
uguagauuaaccgaguuag

SEQ ID NO: 989069 - RNA, 19 nt, Artificial Sequence
  Description of Artificial Sequence: Synthetic oligonucleotide
  Antisense strand to SEQ ID NO: 989068
cuaacucgguuaaucuaca

SEQ ID NO: 989070 - RNA, 19 nt, Artificial Sequence
  Description of Artificial Sequence: Synthetic oligonucleotide
  Sense strand starting at position 3551 of SEQ ID NO: 914242
gauuaaccgaguuaggguu

SEQ ID NO: 989071 - RNA, 19 nt, Artificial Sequence
  Description of Artificial Sequence: Synthetic oligonucleotide
  Antisense strand to SEQ ID NO: 989070
aacccuaacucgguuaauc

SEQ ID NO: 989072 - RNA, 19 nt, Artificial Sequence
  Description of Artificial Sequence: Synthetic oligonucleotide
  Sense strand starting at position 3557 of SEQ ID NO: 914242
ccgaguuaggguuagggua

SEQ ID NO: 989073 - RNA, 19 nt, Artificial Sequence
  Description of Artificial Sequence: Synthetic oligonucleotide
  Antisense strand to SEQ ID NO: 989072
uacccuaacccuaacucgg

SEQ ID NO: 989074 - RNA, 19 nt, Artificial Sequence
  Description of Artificial Sequence: Synthetic oligonucleotide
  Sense strand starting at position 3649 of SEQ ID NO: 914242
cauucugauugucuuggga

SEQ ID NO: 989075 - RNA, 19 nt, Artificial Sequence
  Description of Artificial Sequence: Synthetic oligonucleotide
  Antisense strand to SEQ ID NO: 989074
ucccaagacaaucagaaug

SEQ ID NO: 989076 - RNA, 19 nt, Artificial Sequence
  Description of Artificial Sequence: Synthetic oligonucleotide
  Sense strand starting at position 3652 of SEQ ID NO: 914242
ucugauugucuugggauga

SEQ ID NO: 989077 - RNA, 19 nt, Artificial Sequence
  Description of Artificial Sequence: Synthetic oligonucleotide
  Antisense strand to SEQ ID NO: 989076
ucaucccaagacaaucaga

SEQ ID NO: 989078 - RNA, 19 nt, Artificial Sequence
  Description of Artificial Sequence: Synthetic oligonucleotide
  Sense strand starting at position 3656 of SEQ ID NO: 914242
auugucuugggaugaaauc

SEQ ID NO: 989079 - RNA, 19 nt, Artificial Sequence
  Description of Artificial Sequence: Synthetic oligonucleotide
  Antisense strand to SEQ ID NO: 989078
gauuucaucccaagacaau

SEQ ID NO: 989080 - RNA, 19 nt, Artificial Sequence
  Description of Artificial Sequence: Synthetic oligonucleotide
  Sense strand starting at position 6 of SEQ ID NO: 914243
ggcaaugugcuccaauaaa

SEQ ID NO: 989081 - RNA, 19 nt, Artificial Sequence
  Description of Artificial Sequence: Synthetic oligonucleotide
  Antisense strand to SEQ ID NO: 989080
uuuauuggagcacauugcc

SEQ ID NO: 989082 - RNA, 19 nt, Artificial Sequence
  Description of Artificial Sequence: Synthetic oligonucleotide
  Sense strand starting at position 128 of SEQ ID NO: 914243
uggaaauccuguuuauagu

SEQ ID NO: 989083 - RNA, 19 nt, Artificial Sequence
  Description of Artificial Sequence: Synthetic oligonucleotide
  Antisense strand to SEQ ID NO: 989082
acuauaaacaggauuucca

SEQ ID NO: 989084 - RNA, 19 nt, Artificial Sequence
  Description of Artificial Sequence: Synthetic oligonucleotide
  Sense strand starting at position 129 of SEQ ID NO: 914243
ggaaauccuguuuauaguu

SEQ ID NO: 989085 - RNA, 19 nt, Artificial Sequence
  Description of Artificial Sequence: Synthetic oligonucleotide
  Antisense strand to SEQ ID NO: 989084
aacuauaaacaggauuucc

SEQ ID NO: 989086 - RNA, 19 nt, Artificial Sequence
  Description of Artificial Sequence: Synthetic oligonucleotide
  Sense strand starting at position 256 of SEQ ID NO: 914243
ugaggaguauuuguguuuc

SEQ ID NO: 989087 - RNA, 19 nt, Artificial Sequence
  Description of Artificial Sequence: Synthetic oligonucleotide
  Antisense strand to SEQ ID NO: 989086
gaaacacaaauacuccuca

SEQ ID NO: 989088 - RNA, 19 nt, Artificial Sequence
  Description of Artificial Sequence: Synthetic oligonucleotide
  Sense strand starting at position 611 of SEQ ID NO: 914243
accauaaauuaagaagguu

SEQ ID NO: 989089 - RNA, 19 nt, Artificial Sequence
  Description of Artificial Sequence: Synthetic oligonucleotide
  Antisense strand to SEQ ID NO: 989088
aaccuucuuaauuuauggu

SEQ ID NO: 989090 - RNA, 19 nt, Artificial Sequence
  Description of Artificial Sequence: Synthetic oligonucleotide
  Sense strand starting at position 743 of SEQ ID NO: 914243
ccaugagacuaacaaauag

SEQ ID NO: 989091 - RNA, 19 nt, Artificial Sequence
  Description of Artificial Sequence: Synthetic oligonucleotide
  Antisense strand to SEQ ID NO: 989090
cuauuuguuagucucaugg

SEQ ID NO: 989092 - RNA, 19 nt, Artificial Sequence
  Description of Artificial Sequence: Synthetic oligonucleotide
  Sense strand starting at position 949 of SEQ ID NO: 914243
auguuauucuacgcccaga

SEQ ID NO: 989093 - RNA, 19 nt, Artificial Sequence
  Description of Artificial Sequence: Synthetic oligonucleotide
  Antisense strand to SEQ ID NO: 989092
ucugggcguagaauaacau

SEQ ID NO: 989094 - RNA, 19 nt, Artificial Sequence
  Description of Artificial Sequence: Synthetic oligonucleotide
  Sense strand starting at position 981 of SEQ ID NO: 914243
gugaccuaccauugcaaca

SEQ ID NO: 989095 - RNA, 19 nt, Artificial Sequence
  Description of Artificial Sequence: Synthetic oligonucleotide
  Antisense strand to SEQ ID NO: 989094
uguugcaaugguaggucac

SEQ ID NO: 989096 - RNA, 19 nt, Artificial Sequence
  Description of Artificial Sequence: Synthetic oligonucleotide
  Sense strand starting at position 1118 of SEQ ID NO: 914243
cccugaaggucucuaccua

SEQ ID NO: 989097 - RNA, 19 nt, Artificial Sequence
  Description of Artificial Sequence: Synthetic oligonucleotide
  Antisense strand to SEQ ID NO: 989096
uagguagagaccuucaggg

SEQ ID NO: 989098 - RNA, 19 nt, Artificial Sequence
  Description of Artificial Sequence: Synthetic oligonucleotide
  Sense strand starting at position 1119 of SEQ ID NO: 914243
ccugaaggucucuaccuau

SEQ ID NO: 989099 - RNA, 19 nt, Artificial Sequence
  Description of Artificial Sequence: Synthetic oligonucleotide
  Antisense strand to SEQ ID NO: 989098
auagguagagaccuucagg

SEQ ID NO: 989100 - RNA, 19 nt, Artificial Sequence
  Description of Artificial Sequence: Synthetic oligonucleotide
  Sense strand starting at position 1130 of SEQ ID NO: 914243
cuaccuauuccugaggcuu

SEQ ID NO: 989101 - RNA, 19 nt, Artificial Sequence
  Description of Artificial Sequence: Synthetic oligonucleotide
  Antisense strand to SEQ ID NO: 989100
aagccucaggaauagguag

SEQ ID NO: 989102 - RNA, 19 nt, Artificial Sequence
  Description of Artificial Sequence: Synthetic oligonucleotide
  Sense strand starting at position 1141 of SEQ ID NO: 914243
ugaggcuuugccugacaau

SEQ ID NO: 989103 - RNA, 19 nt, Artificial Sequence
  Description of Artificial Sequence: Synthetic oligonucleotide
  Antisense strand to SEQ ID NO: 989102
auugucaggcaaagccuca

SEQ ID NO: 989104 - RNA, 19 nt, Artificial Sequence
  Description of Artificial Sequence: Synthetic oligonucleotide
  Sense strand starting at position 1142 of SEQ ID NO: 914243
gaggcuuugccugacaauc

SEQ ID NO: 989105 - RNA, 19 nt, Artificial Sequence
  Description of Artificial Sequence: Synthetic oligonucleotide
  Antisense strand to SEQ ID NO: 989104
gauugucaggcaaagccuc

SEQ ID NO: 989106 - RNA, 19 nt, Artificial Sequence
  Description of Artificial Sequence: Synthetic oligonucleotide
  Sense strand starting at position 1165 of SEQ ID NO: 914243
gugcguacucccuugcuua

SEQ ID NO: 989107 - RNA, 19 nt, Artificial Sequence
  Description of Artificial Sequence: Synthetic oligonucleotide
  Antisense strand to SEQ ID NO: 989106
uaagcaagggaguacgcac

SEQ ID NO: 989108 - RNA, 19 nt, Artificial Sequence
  Description of Artificial Sequence: Synthetic oligonucleotide
  Sense strand starting at position 1182 of SEQ ID NO: 914243
uacgcauguggagaauaaa

SEQ ID NO: 989109 - RNA, 19 nt, Artificial Sequence
  Description of Artificial Sequence: Synthetic oligonucleotide
  Antisense strand to SEQ ID NO: 989108
uuuauucuccacaugcgua

SEQ ID NO: 989110 - RNA, 19 nt, Artificial Sequence
  Description of Artificial Sequence: Synthetic oligonucleotide
  Sense strand starting at position 1220 of SEQ ID NO: 914243
ugcuguguucccuaaacac

SEQ ID NO: 989111 - RNA, 19 nt, Artificial Sequence
  Description of Artificial Sequence: Synthetic oligonucleotide
  Antisense strand to SEQ ID NO: 989110
guguuuagggaacacagca

SEQ ID NO: 989112 - RNA, 19 nt, Artificial Sequence
  Description of Artificial Sequence: Synthetic oligonucleotide
  Sense strand starting at position 1313 of SEQ ID NO: 914243
uguauuaucugaguaguca

SEQ ID NO: 989113 - RNA, 19 nt, Artificial Sequence
  Description of Artificial Sequence: Synthetic oligonucleotide
  Antisense strand to SEQ ID NO: 989112
ugacuacucagauaauaca

SEQ ID NO: 989114 - RNA, 19 nt, Artificial Sequence
  Description of Artificial Sequence: Synthetic oligonucleotide
  Sense strand starting at position 1314 of SEQ ID NO: 914243
guauuaucugaguagucau

SEQ ID NO: 989115 - RNA, 19 nt, Artificial Sequence
  Description of Artificial Sequence: Synthetic oligonucleotide
  Antisense strand to SEQ ID NO: 989114
augacuacucagauaauac

SEQ ID NO: 989116 - RNA, 19 nt, Artificial Sequence
  Description of Artificial Sequence: Synthetic oligonucleotide
  Sense strand starting at position 1402 of SEQ ID NO: 914243
uuguaugcccaaugauuau

SEQ ID NO: 989117 - RNA, 19 nt, Artificial Sequence
  Description of Artificial Sequence: Synthetic oligonucleotide
  Antisense strand to SEQ ID NO: 989116
auaaucauugggcauacaa

SEQ ID NO: 989118 - RNA, 19 nt, Artificial Sequence
  Description of Artificial Sequence: Synthetic oligonucleotide
  Sense strand starting at position 1408 of SEQ ID NO: 914243
gcccaaugauuaucuauug

SEQ ID NO: 989119 - RNA, 19 nt, Artificial Sequence
  Description of Artificial Sequence: Synthetic oligonucleotide
  Antisense strand to SEQ ID NO: 989118
caauagauaaucauugggc

SEQ ID NO: 989120 - RNA, 19 nt, Artificial Sequence
  Description of Artificial Sequence: Synthetic oligonucleotide
  Sense strand starting at position 1604 of SEQ ID NO: 914243
accaguaacgcucauuaag

SEQ ID NO: 989121 - RNA, 19 nt, Artificial Sequence
  Description of Artificial Sequence: Synthetic oligonucleotide
  Antisense strand to SEQ ID NO: 989120
cuuaaugagcguuacuggu

SEQ ID NO: 989122 - RNA, 19 nt, Artificial Sequence
  Description of Artificial Sequence: Synthetic oligonucleotide
  Sense strand starting at position 1606 of SEQ ID NO: 914243
caguaacgcucauuaagau

SEQ ID NO: 989123 - RNA, 19 nt, Artificial Sequence
  Description of Artificial Sequence: Synthetic oligonucleotide
  Antisense strand to SEQ ID NO: 989122
aucuuaaugagcguuacug

SEQ ID NO: 989124 - RNA, 19 nt, Artificial Sequence
  Description of Artificial Sequence: Synthetic oligonucleotide
  Sense strand starting at position 1622 of SEQ ID NO: 914243
gaugauuacgccgagaccu

SEQ ID NO: 989125 - RNA, 19 nt, Artificial Sequence
  Description of Artificial Sequence: Synthetic oligonucleotide
  Antisense strand to SEQ ID NO: 989124
aggucucggcguaaucauc

SEQ ID NO: 989126 - RNA, 19 nt, Artificial Sequence
  Description of Artificial Sequence: Synthetic oligonucleotide
  Sense strand starting at position 1630 of SEQ ID NO: 914243
cgccgagaccuuggaagua

SEQ ID NO: 989127 - RNA, 19 nt, Artificial Sequence
  Description of Artificial Sequence: Synthetic oligonucleotide
  Antisense strand to SEQ ID NO: 989126
uacuuccaaggucucggcg

SEQ ID NO: 989128 - RNA, 19 nt, Artificial Sequence
  Description of Artificial Sequence: Synthetic oligonucleotide
  Sense strand starting at position 1679 of SEQ ID NO: 914243
ggguguuaucggagcacuu

SEQ ID NO: 989129 - RNA, 19 nt, Artificial Sequence
  Description of Artificial Sequence: Synthetic oligonucleotide
  Antisense strand to SEQ ID NO: 989128
aagugcuccgauaacaccc

SEQ ID NO: 989130 - RNA, 19 nt, Artificial Sequence
  Description of Artificial Sequence: Synthetic oligonucleotide
  Sense strand starting at position 1681 of SEQ ID NO: 914243
guguuaucggagcacuuag

SEQ ID NO: 989131 - RNA, 19 nt, Artificial Sequence
  Description of Artificial Sequence: Synthetic oligonucleotide
  Antisense strand to SEQ ID NO: 989130
cuaagugcuccgauaacac

SEQ ID NO: 989132 - RNA, 19 nt, Artificial Sequence
  Description of Artificial Sequence: Synthetic oligonucleotide
  Sense strand starting at position 2120 of SEQ ID NO: 914243
aagguugacgagugaagga

SEQ ID NO: 989133 - RNA, 19 nt, Artificial Sequence
  Description of Artificial Sequence: Synthetic oligonucleotide
  Antisense strand to SEQ ID NO: 989132
uccuucacucgucaaccuu

SEQ ID NO: 989134 - RNA, 19 nt, Artificial Sequence
  Description of Artificial Sequence: Synthetic oligonucleotide
  Sense strand starting at position 2229 of SEQ ID NO: 914243
guuuauguguaauccgaga

SEQ ID NO: 989135 - RNA, 19 nt, Artificial Sequence
  Description of Artificial Sequence: Synthetic oligonucleotide
  Antisense strand to SEQ ID NO: 989134
ucucggauuacacauaaac

SEQ ID NO: 989136 - RNA, 19 nt, Artificial Sequence
  Description of Artificial Sequence: Synthetic oligonucleotide
  Sense strand starting at position 2231 of SEQ ID NO: 914243
uuauguguaauccgagauu

SEQ ID NO: 989137 - RNA, 19 nt, Artificial Sequence
  Description of Artificial Sequence: Synthetic oligonucleotide
  Antisense strand to SEQ ID NO: 989136
aaucucggauuacacauaa

SEQ ID NO: 989138 - RNA, 19 nt, Artificial Sequence
  Description of Artificial Sequence: Synthetic oligonucleotide
  Sense strand starting at position 2252 of SEQ ID NO: 914243
ucgauuuacugagcauguu

SEQ ID NO: 989139 - RNA, 19 nt, Artificial Sequence
  Description of Artificial Sequence: Synthetic oligonucleotide
  Antisense strand to SEQ ID NO: 989138
aacaugcucaguaaaucga

SEQ ID NO: 989140 - RNA, 19 nt, Artificial Sequence
  Description of Artificial Sequence: Synthetic oligonucleotide
  Sense strand starting at position 2785 of SEQ ID NO: 914243
aggcucaguccagauacaa

SEQ ID NO: 989141 - RNA, 19 nt, Artificial Sequence
  Description of Artificial Sequence: Synthetic oligonucleotide
  Antisense strand to SEQ ID NO: 989140
uuguaucuggacugagccu

SEQ ID NO: 989142 - RNA, 19 nt, Artificial Sequence
  Description of Artificial Sequence: Synthetic oligonucleotide
  Sense strand starting at position 2897 of SEQ ID NO: 914243
ccaccaugcugucugaauu

SEQ ID NO: 989143 - RNA, 19 nt, Artificial Sequence
  Description of Artificial Sequence: Synthetic oligonucleotide
  Antisense strand to SEQ ID NO: 989142
aauucagacagcauggugg

SEQ ID NO: 989144 - RNA, 19 nt, Artificial Sequence
  Description of Artificial Sequence: Synthetic oligonucleotide
  Sense strand starting at position 3502 of SEQ ID NO: 914243
cccagaggcuggucucaaa

SEQ ID NO: 989145 - RNA, 19 nt, Artificial Sequence
  Description of Artificial Sequence: Synthetic oligonucleotide
  Antisense strand to SEQ ID NO: 989144
uuugagaccagccucuggg

SEQ ID NO: 989146 - RNA, 19 nt, Artificial Sequence
  Description of Artificial Sequence: Synthetic oligonucleotide
  Sense strand starting at position 3646 of SEQ ID NO: 914243
ccagguuugucccuuaaag

SEQ ID NO: 989147 - RNA, 19 nt, Artificial Sequence
  Description of Artificial Sequence: Synthetic oligonucleotide
  Antisense strand to SEQ ID NO: 989146
cuuuaagggacaaaccugg

SEQ ID NO: 989148 - RNA, 19 nt, Artificial Sequence
  Description of Artificial Sequence: Synthetic oligonucleotide
  Sense strand starting at position 3648 of SEQ ID NO: 914243
agguuugucccuuaaaguc

SEQ ID NO: 989149 - RNA, 19 nt, Artificial Sequence
  Description of Artificial Sequence: Synthetic oligonucleotide
  Antisense strand to SEQ ID NO: 989148
gacuuuaagggacaaaccu

SEQ ID NO: 989150 - RNA, 19 nt, Artificial Sequence
  Description of Artificial Sequence: Synthetic oligonucleotide
  Sense strand starting at position 3669 of SEQ ID NO: 914243
cugugauuccugcaccgaa

SEQ ID NO: 989151 - RNA, 19 nt, Artificial Sequence
  Description of Artificial Sequence: Synthetic oligonucleotide
  Antisense strand to SEQ ID NO: 989150
uucggugcaggaaucacag

SEQ ID NO: 989152 - RNA, 19 nt, Artificial Sequence
  Description of Artificial Sequence: Synthetic oligonucleotide
  Sense strand starting at position 3672 of SEQ ID NO: 914243
ugauuccugcaccgaagaa

SEQ ID NO: 989153 - RNA, 19 nt, Artificial Sequence
  Description of Artificial Sequence: Synthetic oligonucleotide
  Antisense strand to SEQ ID NO: 989152
uucuucggugcaggaauca

SEQ ID NO: 989154 - RNA, 19 nt, Artificial Sequence
  Description of Artificial Sequence: Synthetic oligonucleotide
  Sense strand starting at position 3799 of SEQ ID NO: 914243
cuucgagaauuauugaaag

SEQ ID NO: 989155 - RNA, 19 nt, Artificial Sequence
  Description of Artificial Sequence: Synthetic oligonucleotide
  Antisense strand to SEQ ID NO: 989154
cuuucaauaauucucgaag

SEQ ID NO: 989156 - RNA, 19 nt, Artificial Sequence
  Description of Artificial Sequence: Synthetic oligonucleotide
  Sense strand starting at position 3963 of SEQ ID NO: 914243
gagauuaccaguugugaga

SEQ ID NO: 989157 - RNA, 19 nt, Artificial Sequence
  Description of Artificial Sequence: Synthetic oligonucleotide
  Antisense strand to SEQ ID NO: 989156
ucucacaacugguaaucuc

SEQ ID NO: 989158 - RNA, 19 nt, Artificial Sequence
  Description of Artificial Sequence: Synthetic oligonucleotide
  Sense strand starting at position 3970 of SEQ ID NO: 914243
ccaguugugagaggccaaa

SEQ ID NO: 989159 - RNA, 19 nt, Artificial Sequence
  Description of Artificial Sequence: Synthetic oligonucleotide
  Antisense strand to SEQ ID NO: 989158
uuuggccucucacaacugg

SEQ ID NO: 989160 - RNA, 19 nt, Artificial Sequence
  Description of Artificial Sequence: Synthetic oligonucleotide
  Sense strand starting at position 24 of SEQ ID NO: 914244
aucauaugguucuugaauu

SEQ ID NO: 989161 - RNA, 19 nt, Artificial Sequence
  Description of Artificial Sequence: Synthetic oligonucleotide
  Antisense strand to SEQ ID NO: 989160
aauucaagaaccauaugau

SEQ ID NO: 989162 - RNA, 19 nt, Artificial Sequence
  Description of Artificial Sequence: Synthetic oligonucleotide
  Sense strand starting at position 78 of SEQ ID NO: 914244
uggaccauuuccugaucca

SEQ ID NO: 989163 - RNA, 19 nt, Artificial Sequence
  Description of Artificial Sequence: Synthetic oligonucleotide
  Antisense strand to SEQ ID NO: 989162
uggaucaggaaauggucca

SEQ ID NO: 989164 - RNA, 19 nt, Artificial Sequence
  Description of Artificial Sequence: Synthetic oligonucleotide
  Sense strand starting at position 85 of SEQ ID NO: 914244
uuuccugauccaggcagua

SEQ ID NO: 989165 - RNA, 19 nt, Artificial Sequence
  Description of Artificial Sequence: Synthetic oligonucleotide
  Antisense strand to SEQ ID NO: 989164
uacugccuggaucaggaaa

SEQ ID NO: 989166 - RNA, 19 nt, Artificial Sequence
  Description of Artificial Sequence: Synthetic oligonucleotide
  Sense strand starting at position 135 of SEQ ID NO: 914244
ccucuuggaggucagagua

SEQ ID NO: 989167 - RNA, 19 nt, Artificial Sequence
  Description of Artificial Sequence: Synthetic oligonucleotide
  Antisense strand to SEQ ID NO: 989166
uacucugaccuccaagagg

SEQ ID NO: 989168 - RNA, 19 nt, Artificial Sequence
  Description of Artificial Sequence: Synthetic oligonucleotide
  Sense strand starting at position 189 of SEQ ID NO: 914244
ugccuuauuggucaaggua

SEQ ID NO: 989169 - RNA, 19 nt, Artificial Sequence
  Description of Artificial Sequence: Synthetic oligonucleotide
  Antisense strand to SEQ ID NO: 989168
uaccuugaccaauaaggca

SEQ ID NO: 989170 - RNA, 19 nt, Artificial Sequence
  Description of Artificial Sequence: Synthetic oligonucleotide
  Sense strand starting at position 689 of SEQ ID NO: 914244
gucccuuagcuguaaccau

SEQ ID NO: 989171 - RNA, 19 nt, Artificial Sequence
  Description of Artificial Sequence: Synthetic oligonucleotide
  Antisense strand to SEQ ID NO: 989170
augguuacagcuaagggac

SEQ ID NO: 989172 - RNA, 19 nt, Artificial Sequence
  Description of Artificial Sequence: Synthetic oligonucleotide
  Sense strand starting at position 771 of SEQ ID NO: 914244
gccacauugacgugacuuu

SEQ ID NO: 989173 - RNA, 19 nt, Artificial Sequence
  Description of Artificial Sequence: Synthetic oligonucleotide
  Antisense strand to SEQ ID NO: 989172
aaagucacgucaauguggc

SEQ ID NO: 989174 - RNA, 19 nt, Artificial Sequence
  Description of Artificial Sequence: Synthetic oligonucleotide
  Sense strand starting at position 772 of SEQ ID NO: 914244
ccacauugacgugacuuua

SEQ ID NO: 989175 - RNA, 19 nt, Artificial Sequence
  Description of Artificial Sequence: Synthetic oligonucleotide
  Antisense strand to SEQ ID NO: 989174
uaaagucacgucaaugugg

SEQ ID NO: 989176 - RNA, 19 nt, Artificial Sequence
  Description of Artificial Sequence: Synthetic oligonucleotide
  Sense strand starting at position 800 of SEQ ID NO: 914244
ugcuuuagcguguucuacu

SEQ ID NO: 989177 - RNA, 19 nt, Artificial Sequence
  Description of Artificial Sequence: Synthetic oligonucleotide
  Antisense strand to SEQ ID NO: 989176
aguagaacacgcuaaagca

SEQ ID NO: 989178 - RNA, 19 nt, Artificial Sequence
  Description of Artificial Sequence: Synthetic oligonucleotide
  Sense strand starting at position 807 of SEQ ID NO: 914244
gcguguucuacuucugcaa

SEQ ID NO: 989179 - RNA, 19 nt, Artificial Sequence
  Description of Artificial Sequence: Synthetic oligonucleotide
  Antisense strand to SEQ ID NO: 989178
uugcagaaguagaacacgc

SEQ ID NO: 989180 - RNA, 19 nt, Artificial Sequence
  Description of Artificial Sequence: Synthetic oligonucleotide
  Sense strand starting at position 915 of SEQ ID NO: 914244
ugaguuaaagcagaguauu

SEQ ID NO: 989181 - RNA, 19 nt, Artificial Sequence
  Description of Artificial Sequence: Synthetic oligonucleotide
  Antisense strand to SEQ ID NO: 989180
aauacucugcuuuaacuca

SEQ ID NO: 989182 - RNA, 19 nt, Artificial Sequence
  Description of Artificial Sequence: Synthetic oligonucleotide
  Sense strand starting at position 925 of SEQ ID NO: 914244
cagaguauugccugggagu

SEQ ID NO: 989183 - RNA, 19 nt, Artificial Sequence
  Description of Artificial Sequence: Synthetic oligonucleotide
  Antisense strand to SEQ ID NO: 989182
acucccaggcaauacucug

SEQ ID NO: 989184 - RNA, 19 nt, Artificial Sequence
  Description of Artificial Sequence: Synthetic oligonucleotide
  Sense strand starting at position 926 of SEQ ID NO: 914244
agaguauugccugggaguc

SEQ ID NO: 989185 - RNA, 19 nt, Artificial Sequence
  Description of Artificial Sequence: Synthetic oligonucleotide
  Antisense strand to SEQ ID NO: 989184
gacucccaggcaauacucu

SEQ ID NO: 989186 - RNA, 19 nt, Artificial Sequence
  Description of Artificial Sequence: Synthetic oligonucleotide
  Sense strand starting at position 971 of SEQ ID NO: 914244
ggaugagauuauguggugu

SEQ ID NO: 989187 - RNA, 19 nt, Artificial Sequence
  Description of Artificial Sequence: Synthetic oligonucleotide
  Antisense strand to SEQ ID NO: 989186
acaccacauaaucucaucc

SEQ ID NO: 989188 - RNA, 19 nt, Artificial Sequence
  Description of Artificial Sequence: Synthetic oligonucleotide
  Sense strand starting at position 982 of SEQ ID NO: 914244
ugugguguucugaggcaga

SEQ ID NO: 989189 - RNA, 19 nt, Artificial Sequence
  Description of Artificial Sequence: Synthetic oligonucleotide
  Antisense strand to SEQ ID NO: 989188
ucugccucagaacaccaca

SEQ ID NO: 989190 - RNA, 19 nt, Artificial Sequence
  Description of Artificial Sequence: Synthetic oligonucleotide
  Sense strand starting at position 1267 of SEQ ID NO: 914244
agaacaaauccuggcugau

SEQ ID NO: 989191 - RNA, 19 nt, Artificial Sequence
  Description of Artificial Sequence: Synthetic oligonucleotide
  Antisense strand to SEQ ID NO: 989190
aucagccaggauuuguucu

SEQ ID NO: 989192 - RNA, 19 nt, Artificial Sequence
  Description of Artificial Sequence: Synthetic oligonucleotide
  Sense strand starting at position 1319 of SEQ ID NO: 914244
cguaacuccuugccaauuu

SEQ ID NO: 989193 - RNA, 19 nt, Artificial Sequence
  Description of Artificial Sequence: Synthetic oligonucleotide
  Antisense strand to SEQ ID NO: 989192
aaauuggcaaggaguuacg

SEQ ID NO: 989194 - RNA, 19 nt, Artificial Sequence
  Description of Artificial Sequence: Synthetic oligonucleotide
  Sense strand starting at position 1394 of SEQ ID NO: 914244
gcggguacccgcaguuaaa

SEQ ID NO: 989195 - RNA, 19 nt, Artificial Sequence
  Description of Artificial Sequence: Synthetic oligonucleotide
  Antisense strand to SEQ ID NO: 989194
uuuaacugcggguacccgc

SEQ ID NO: 989196 - RNA, 19 nt, Artificial Sequence
  Description of Artificial Sequence: Synthetic oligonucleotide
  Sense strand starting at position 2148 of SEQ ID NO: 914244
ggcguaaugccguuuccca

SEQ ID NO: 989197 - RNA, 19 nt, Artificial Sequence
  Description of Artificial Sequence: Synthetic oligonucleotide
  Antisense strand to SEQ ID NO: 989196
ugggaaacggcauuacgcc

SEQ ID NO: 989198 - RNA, 19 nt, Artificial Sequence
  Description of Artificial Sequence: Synthetic oligonucleotide
  Sense strand starting at position 2475 of SEQ ID NO: 914244
acagaaauuuacugacaug

SEQ ID NO: 989199 - RNA, 19 nt, Artificial Sequence
  Description of Artificial Sequence: Synthetic oligonucleotide
  Antisense strand to SEQ ID NO: 989198
caugucaguaaauuucugu

SEQ ID NO: 989200 - RNA, 19 nt, Artificial Sequence
  Description of Artificial Sequence: Synthetic oligonucleotide
  Sense strand starting at position 2478 of SEQ ID NO: 914244
gaaauuuacugacaugugu

SEQ ID NO: 989201 - RNA, 19 nt, Artificial Sequence
  Description of Artificial Sequence: Synthetic oligonucleotide
  Antisense strand to SEQ ID NO: 989200
acacaugucaguaaauuuc

SEQ ID NO: 989202 - RNA, 19 nt, Artificial Sequence
  Description of Artificial Sequence: Synthetic oligonucleotide
  Sense strand starting at position 2522 of SEQ ID NO: 914244
gagggaaugagucguucug

SEQ ID NO: 989203 - RNA, 19 nt, Artificial Sequence
  Description of Artificial Sequence: Synthetic oligonucleotide
  Antisense strand to SEQ ID NO: 989202
cagaacgacucauucccuc

SEQ ID NO: 989204 - RNA, 19 nt, Artificial Sequence
  Description of Artificial Sequence: Synthetic oligonucleotide
  Sense strand starting at position 2524 of SEQ ID NO: 914244
gggaaugagucguucugga

SEQ ID NO: 989205 - RNA, 19 nt, Artificial Sequence
  Description of Artificial Sequence: Synthetic oligonucleotide
  Antisense strand to SEQ ID NO: 989204
uccagaacgacucauuccc

SEQ ID NO: 989206 - RNA, 19 nt, Artificial Sequence
  Description of Artificial Sequence: Synthetic oligonucleotide
  Sense strand starting at position 2617 of SEQ ID NO: 914244
gaaauagggcuuugagucu

SEQ ID NO: 989207 - RNA, 19 nt, Artificial Sequence
  Description of Artificial Sequence: Synthetic oligonucleotide
  Antisense strand to SEQ ID NO: 989206
agacucaaagcccuauuuc

SEQ ID NO: 989208 - RNA, 19 nt, Artificial Sequence
  Description of Artificial Sequence: Synthetic oligonucleotide
  Sense strand starting at position 2689 of SEQ ID NO: 914244
aggccaguuagucaagcuu

SEQ ID NO: 989209 - RNA, 19 nt, Artificial Sequence
  Description of Artificial Sequence: Synthetic oligonucleotide
  Antisense strand to SEQ ID NO: 989208
aagcuugacuaacuggccu

SEQ ID NO: 989210 - RNA, 19 nt, Artificial Sequence
  Description of Artificial Sequence: Synthetic oligonucleotide
  Sense strand starting at position 2727 of SEQ ID NO: 914244
guaccaucuccaggccaua

SEQ ID NO: 989211 - RNA, 19 nt, Artificial Sequence
  Description of Artificial Sequence: Synthetic oligonucleotide
  Antisense strand to SEQ ID NO: 989210
uauggccuggagaugguac

SEQ ID NO: 989212 - RNA, 19 nt, Artificial Sequence
  Description of Artificial Sequence: Synthetic oligonucleotide
  Sense strand starting at position 2763 of SEQ ID NO: 914244
uuguucuccuagguagaca

SEQ ID NO: 989213 - RNA, 19 nt, Artificial Sequence
  Description of Artificial Sequence: Synthetic oligonucleotide
  Antisense strand to SEQ ID NO: 989212
ugucuaccuaggagaacaa

SEQ ID NO: 989214 - RNA, 19 nt, Artificial Sequence
  Description of Artificial Sequence: Synthetic oligonucleotide
  Sense strand starting at position 2804 of SEQ ID NO: 914244
uuuguaaaccuguguccua

SEQ ID NO: 989215 - RNA, 19 nt, Artificial Sequence
  Description of Artificial Sequence: Synthetic oligonucleotide
  Antisense strand to SEQ ID NO: 989214
uaggacacagguuuacaaa

SEQ ID NO: 989216 - RNA, 19 nt, Artificial Sequence
  Description of Artificial Sequence: Synthetic oligonucleotide
  Sense strand starting at position 2846 of SEQ ID NO: 914244
uagagagcuuuccugaaug

SEQ ID NO: 989217 - RNA, 19 nt, Artificial Sequence
  Description of Artificial Sequence: Synthetic oligonucleotide
  Antisense strand to SEQ ID NO: 989216
cauucaggaaagcucucua

SEQ ID NO: 989218 - RNA, 19 nt, Artificial Sequence
  Description of Artificial Sequence: Synthetic oligonucleotide
  Sense strand starting at position 2848 of SEQ ID NO: 914244
gagagcuuuccugaaugug

SEQ ID NO: 989219 - RNA, 19 nt, Artificial Sequence
  Description of Artificial Sequence: Synthetic oligonucleotide
  Antisense strand to SEQ ID NO: 989218
cacauucaggaaagcucuc

SEQ ID NO: 989220 - RNA, 19 nt, Artificial Sequence
  Description of Artificial Sequence: Synthetic oligonucleotide
  Sense strand starting at position 3286 of SEQ ID NO: 914244
ccauauugucccgacuggu

SEQ ID NO: 989221 - RNA, 19 nt, Artificial Sequence
  Description of Artificial Sequence: Synthetic oligonucleotide
  Antisense strand to SEQ ID NO: 989220
accagucgggacaauaugg

SEQ ID NO: 989222 - RNA, 19 nt, Artificial Sequence
  Description of Artificial Sequence: Synthetic oligonucleotide
  Sense strand starting at position 3393 of SEQ ID NO: 914244
uuuguaaauuagccagacu

SEQ ID NO: 989223 - RNA, 19 nt, Artificial Sequence
  Description of Artificial Sequence: Synthetic oligonucleotide
  Antisense strand to SEQ ID NO: 989222
agucuggcuaauuuacaaa

SEQ ID NO: 989224 - RNA, 19 nt, Artificial Sequence
  Description of Artificial Sequence: Synthetic oligonucleotide
  Sense strand starting at position 3396 of SEQ ID NO: 914244
guaaauuagccagacuuga

SEQ ID NO: 989225 - RNA, 19 nt, Artificial Sequence
  Description of Artificial Sequence: Synthetic oligonucleotide
  Antisense strand to SEQ ID NO: 989224
ucaagucuggcuaauuuac

SEQ ID NO: 989226 - RNA, 19 nt, Artificial Sequence
  Description of Artificial Sequence: Synthetic oligonucleotide
  Sense strand starting at position 3404 of SEQ ID NO: 914244
gccagacuugaugacaugu

SEQ ID NO: 989227 - RNA, 19 nt, Artificial Sequence
  Description of Artificial Sequence: Synthetic oligonucleotide
  Antisense strand to SEQ ID NO: 989226
acaugucaucaagucuggc

SEQ ID NO: 989228 - RNA, 19 nt, Artificial Sequence
  Description of Artificial Sequence: Synthetic oligonucleotide
  Sense strand starting at position 3491 of SEQ ID NO: 914244
agugaauuugaucgugcca

SEQ ID NO: 989229 - RNA, 19 nt, Artificial Sequence
  Description of Artificial Sequence: Synthetic oligonucleotide
  Antisense strand to SEQ ID NO: 989228
uggcacgaucaaauucacu

SEQ ID NO: 989230 - RNA, 19 nt, Artificial Sequence
  Description of Artificial Sequence: Synthetic oligonucleotide
  Sense strand starting at position 3524 of SEQ ID NO: 914244
ggguguuugcgagacucua

SEQ ID NO: 989231 - RNA, 19 nt, Artificial Sequence
  Description of Artificial Sequence: Synthetic oligonucleotide
  Antisense strand to SEQ ID NO: 989230
uagagucucgcaaacaccc

SEQ ID NO: 989232 - RNA, 19 nt, Artificial Sequence
  Description of Artificial Sequence: Synthetic oligonucleotide
  Sense strand starting at position 3716 of SEQ ID NO: 914244
aggugccuugaaugggaaa

SEQ ID NO: 989233 - RNA, 19 nt, Artificial Sequence
  Description of Artificial Sequence: Synthetic oligonucleotide
  Antisense strand to SEQ ID NO: 989232
uuucccauucaaggcaccu

SEQ ID NO: 989234 - RNA, 19 nt, Artificial Sequence
  Description of Artificial Sequence: Synthetic oligonucleotide
  Sense strand starting at position 3718 of SEQ ID NO: 914244
gugccuugaaugggaaagu

SEQ ID NO: 989235 - RNA, 19 nt, Artificial Sequence
  Description of Artificial Sequence: Synthetic oligonucleotide
  Antisense strand to SEQ ID NO: 989234
acuuucccauucaaggcac

SEQ ID NO: 989236 - RNA, 19 nt, Artificial Sequence
  Description of Artificial Sequence: Synthetic oligonucleotide
  Sense strand starting at position 3777 of SEQ ID NO: 914244
acagguauggcugggaaga

SEQ ID NO: 989237 - RNA, 19 nt, Artificial Sequence
  Description of Artificial Sequence: Synthetic oligonucleotide
  Antisense strand to SEQ ID NO: 989236
ucuucccagccauaccugu

SEQ ID NO: 989238 - RNA, 19 nt, Artificial Sequence
  Description of Artificial Sequence: Synthetic oligonucleotide
  Sense strand starting at position 3967 of SEQ ID NO: 914244
cucagugaaugccuguuau

SEQ ID NO: 989239 - RNA, 19 nt, Artificial Sequence
  Description of Artificial Sequence: Synthetic oligonucleotide
  Antisense strand to SEQ ID NO: 989238
auaacaggcauucacugag

SEQ ID NO: 989240 - RNA, 19 nt, Artificial Sequence
  Description of Artificial Sequence: Synthetic oligonucleotide
  Sense strand starting at position 51 of SEQ ID NO: 914245
cugcccuagcucuaaaguu

SEQ ID NO: 989241 - RNA, 19 nt, Artificial Sequence
  Description of Artificial Sequence: Synthetic oligonucleotide
  Antisense strand to SEQ ID NO: 989240
aacuuuagagcuagggcag

SEQ ID NO: 989242 - RNA, 19 nt, Artificial Sequence
  Description of Artificial Sequence: Synthetic oligonucleotide
  Sense strand starting at position 58 of SEQ ID NO: 914245
agcucuaaaguuggauagu

SEQ ID NO: 989243 - RNA, 19 nt, Artificial Sequence
  Description of Artificial Sequence: Synthetic oligonucleotide
  Antisense strand to SEQ ID NO: 989242
acuauccaacuuuagagcu

SEQ ID NO: 989244 - RNA, 19 nt, Artificial Sequence
  Description of Artificial Sequence: Synthetic oligonucleotide
  Sense strand starting at position 107 of SEQ ID NO: 914245
aucauaugguucuugaauu

SEQ ID NO: 989245 - RNA, 19 nt, Artificial Sequence
  Description of Artificial Sequence: Synthetic oligonucleotide
  Antisense strand to SEQ ID NO: 989244
aauucaagaaccauaugau

SEQ ID NO: 989246 - RNA, 19 nt, Artificial Sequence
  Description of Artificial Sequence: Synthetic oligonucleotide
  Sense strand starting at position 161 of SEQ ID NO: 914245
uggaccauuuccugaucca

SEQ ID NO: 989247 - RNA, 19 nt, Artificial Sequence
  Description of Artificial Sequence: Synthetic oligonucleotide
  Antisense strand to SEQ ID NO: 989246
uggaucaggaaauggucca

SEQ ID NO: 989248 - RNA, 19 nt, Artificial Sequence
  Description of Artificial Sequence: Synthetic oligonucleotide
  Sense strand starting at position 168 of SEQ ID NO: 914245
uuuccugauccaggcagua

SEQ ID NO: 989249 - RNA, 19 nt, Artificial Sequence
  Description of Artificial Sequence: Synthetic oligonucleotide
  Antisense strand to SEQ ID NO: 989248
uacugccuggaucaggaaa

SEQ ID NO: 989250 - RNA, 19 nt, Artificial Sequence
  Description of Artificial Sequence: Synthetic oligonucleotide
  Sense strand starting at position 218 of SEQ ID NO: 914245
ccucuuggaggucagagua

SEQ ID NO: 989251 - RNA, 19 nt, Artificial Sequence
  Description of Artificial Sequence: Synthetic oligonucleotide
  Antisense strand to SEQ ID NO: 989250
uacucugaccuccaagagg

SEQ ID NO: 989252 - RNA, 19 nt, Artificial Sequence
  Description of Artificial Sequence: Synthetic oligonucleotide
  Sense strand starting at position 272 of SEQ ID NO: 914245
ugccuuauuggucaaggua

SEQ ID NO: 989253 - RNA, 19 nt, Artificial Sequence
  Description of Artificial Sequence: Synthetic oligonucleotide
  Antisense strand to SEQ ID NO: 989252
uaccuugaccaauaaggca

SEQ ID NO: 989254 - RNA, 19 nt, Artificial Sequence
  Description of Artificial Sequence: Synthetic oligonucleotide
  Sense strand starting at position 772 of SEQ ID NO: 914245
gucccuuagcuguaaccau

SEQ ID NO: 989255 - RNA, 19 nt, Artificial Sequence
  Description of Artificial Sequence: Synthetic oligonucleotide
  Antisense strand to SEQ ID NO: 989254
augguuacagcuaagggac

SEQ ID NO: 989256 - RNA, 19 nt, Artificial Sequence
  Description of Artificial Sequence: Synthetic oligonucleotide
  Sense strand starting at position 855 of SEQ ID NO: 914245
ccacauugacgugacuuua

SEQ ID NO: 989257 - RNA, 19 nt, Artificial Sequence
  Description of Artificial Sequence: Synthetic oligonucleotide
  Antisense strand to SEQ ID NO: 989256
uaaagucacgucaaugugg

SEQ ID NO: 989258 - RNA, 19 nt, Artificial Sequence
  Description of Artificial Sequence: Synthetic oligonucleotide
  Sense strand starting at position 883 of SEQ ID NO: 914245
ugcuuuagcguguucuacu

SEQ ID NO: 989259 - RNA, 19 nt, Artificial Sequence
  Description of Artificial Sequence: Synthetic oligonucleotide
  Antisense strand to SEQ ID NO: 989258
aguagaacacgcuaaagca

SEQ ID NO: 989260 - RNA, 19 nt, Artificial Sequence
  Description of Artificial Sequence: Synthetic oligonucleotide
  Sense strand starting at position 890 of SEQ ID NO: 914245
gcguguucuacuucugcaa

SEQ ID NO: 989261 - RNA, 19 nt, Artificial Sequence
  Description of Artificial Sequence: Synthetic oligonucleotide
  Antisense strand to SEQ ID NO: 989260
uugcagaaguagaacacgc

SEQ ID NO: 989262 - RNA, 19 nt, Artificial Sequence
  Description of Artificial Sequence: Synthetic oligonucleotide
  Sense strand starting at position 998 of SEQ ID NO: 914245
ugaguuaaagcagaguauu

SEQ ID NO: 989263 - RNA, 19 nt, Artificial Sequence
  Description of Artificial Sequence: Synthetic oligonucleotide
  Antisense strand to SEQ ID NO: 989262
aauacucugcuuuaacuca

SEQ ID NO: 989264 - RNA, 19 nt, Artificial Sequence
  Description of Artificial Sequence: Synthetic oligonucleotide
  Sense strand starting at position 1008 of SEQ ID NO: 914245
cagaguauugccugggagu

SEQ ID NO: 989265 - RNA, 19 nt, Artificial Sequence
  Description of Artificial Sequence: Synthetic oligonucleotide
  Antisense strand to SEQ ID NO: 989264
acucccaggcaauacucug

SEQ ID NO: 989266 - RNA, 19 nt, Artificial Sequence
  Description of Artificial Sequence: Synthetic oligonucleotide
  Sense strand starting at position 1009 of SEQ ID NO: 914245
agaguauugccugggaguc

SEQ ID NO: 989267 - RNA, 19 nt, Artificial Sequence
  Description of Artificial Sequence: Synthetic oligonucleotide
  Antisense strand to SEQ ID NO: 989266
gacucccaggcaauacucu

SEQ ID NO: 989268 - RNA, 19 nt, Artificial Sequence
  Description of Artificial Sequence: Synthetic oligonucleotide
  Sense strand starting at position 1054 of SEQ ID NO: 914245
ggaugagauuauguggugu

SEQ ID NO: 989269 - RNA, 19 nt, Artificial Sequence
  Description of Artificial Sequence: Synthetic oligonucleotide
  Antisense strand to SEQ ID NO: 989268
acaccacauaaucucaucc

SEQ ID NO: 989270 - RNA, 19 nt, Artificial Sequence
  Description of Artificial Sequence: Synthetic oligonucleotide
  Sense strand starting at position 1065 of SEQ ID NO: 914245
ugugguguucugaggcaga

SEQ ID NO: 989271 - RNA, 19 nt, Artificial Sequence
  Description of Artificial Sequence: Synthetic oligonucleotide
  Antisense strand to SEQ ID NO: 989270
ucugccucagaacaccaca

SEQ ID NO: 989272 - RNA, 19 nt, Artificial Sequence
  Description of Artificial Sequence: Synthetic oligonucleotide
  Sense strand starting at position 1350 of SEQ ID NO: 914245
agaacaaauccuggcugau

SEQ ID NO: 989273 - RNA, 19 nt, Artificial Sequence
  Description of Artificial Sequence: Synthetic oligonucleotide
  Antisense strand to SEQ ID NO: 989272
aucagccaggauuuguucu

SEQ ID NO: 989274 - RNA, 19 nt, Artificial Sequence
  Description of Artificial Sequence: Synthetic oligonucleotide
  Sense strand starting at position 1402 of SEQ ID NO: 914245
cguaacuccuugccaauuu

SEQ ID NO: 989275 - RNA, 19 nt, Artificial Sequence
  Description of Artificial Sequence: Synthetic oligonucleotide
  Antisense strand to SEQ ID NO: 989274
aaauuggcaaggaguuacg

SEQ ID NO: 989276 - RNA, 19 nt, Artificial Sequence
  Description of Artificial Sequence: Synthetic oligonucleotide
  Sense strand starting at position 1477 of SEQ ID NO: 914245
gcggguacccgcaguuaaa

SEQ ID NO: 989277 - RNA, 19 nt, Artificial Sequence
  Description of Artificial Sequence: Synthetic oligonucleotide
  Antisense strand to SEQ ID NO: 989276
uuuaacugcggguacccgc

SEQ ID NO: 989278 - RNA, 19 nt, Artificial Sequence
  Description of Artificial Sequence: Synthetic oligonucleotide
  Sense strand starting at position 2231 of SEQ ID NO: 914245
ggcguaaugccguuuccca

SEQ ID NO: 989279 - RNA, 19 nt, Artificial Sequence
  Description of Artificial Sequence: Synthetic oligonucleotide
  Antisense strand to SEQ ID NO: 989278
ugggaaacggcauuacgcc

SEQ ID NO: 989280 - RNA, 19 nt, Artificial Sequence
  Description of Artificial Sequence: Synthetic oligonucleotide
  Sense strand starting at position 2558 of SEQ ID NO: 914245
acagaaauuuacugacaug

SEQ ID NO: 989281 - RNA, 19 nt, Artificial Sequence
  Description of Artificial Sequence: Synthetic oligonucleotide
  Antisense strand to SEQ ID NO: 989280
caugucaguaaauuucugu

SEQ ID NO: 989282 - RNA, 19 nt, Artificial Sequence
  Description of Artificial Sequence: Synthetic oligonucleotide
  Sense strand starting at position 2561 of SEQ ID NO: 914245
gaaauuuacugacaugugu

SEQ ID NO: 989283 - RNA, 19 nt, Artificial Sequence
  Description of Artificial Sequence: Synthetic oligonucleotide
  Antisense strand to SEQ ID NO: 989282
acacaugucaguaaauuuc

SEQ ID NO: 989284 - RNA, 19 nt, Artificial Sequence
  Description of Artificial Sequence: Synthetic oligonucleotide
  Sense strand starting at position 2605 of SEQ ID NO: 914245
gagggaaugagucguucug

SEQ ID NO: 989285 - RNA, 19 nt, Artificial Sequence
  Description of Artificial Sequence: Synthetic oligonucleotide
  Antisense strand to SEQ ID NO: 989284
cagaacgacucauucccuc

SEQ ID NO: 989286 - RNA, 19 nt, Artificial Sequence
  Description of Artificial Sequence: Synthetic oligonucleotide
  Sense strand starting at position 2607 of SEQ ID NO: 914245
gggaaugagucguucugga

SEQ ID NO: 989287 - RNA, 19 nt, Artificial Sequence
  Description of Artificial Sequence: Synthetic oligonucleotide
  Antisense strand to SEQ ID NO: 989286
uccagaacgacucauuccc

SEQ ID NO: 989288 - RNA, 19 nt, Artificial Sequence
  Description of Artificial Sequence: Synthetic oligonucleotide
  Sense strand starting at position 2700 of SEQ ID NO: 914245
gaaauagggcuuugagucu

SEQ ID NO: 989289 - RNA, 19 nt, Artificial Sequence
  Description of Artificial Sequence: Synthetic oligonucleotide
  Antisense strand to SEQ ID NO: 989288
agacucaaagcccuauuuc

SEQ ID NO: 989290 - RNA, 19 nt, Artificial Sequence
  Description of Artificial Sequence: Synthetic oligonucleotide
  Sense strand starting at position 2772 of SEQ ID NO: 914245
aggccaguuagucaagcuu

SEQ ID NO: 989291 - RNA, 19 nt, Artificial Sequence
  Description of Artificial Sequence: Synthetic oligonucleotide
  Antisense strand to SEQ ID NO: 989290
aagcuugacuaacuggccu

SEQ ID NO: 989292 - RNA, 19 nt, Artificial Sequence
  Description of Artificial Sequence: Synthetic oligonucleotide
  Sense strand starting at position 2810 of SEQ ID NO: 914245
guaccaucuccaggccaua

SEQ ID NO: 989293 - RNA, 19 nt, Artificial Sequence
  Description of Artificial Sequence: Synthetic oligonucleotide
  Antisense strand to SEQ ID NO: 989292
uauggccuggagaugguac

SEQ ID NO: 989294 - RNA, 19 nt, Artificial Sequence
  Description of Artificial Sequence: Synthetic oligonucleotide
  Sense strand starting at position 2846 of SEQ ID NO: 914245
uuguucuccuagguagaca

SEQ ID NO: 989295 - RNA, 19 nt, Artificial Sequence
  Description of Artificial Sequence: Synthetic oligonucleotide
  Antisense strand to SEQ ID NO: 989294
ugucuaccuaggagaacaa

SEQ ID NO: 989296 - RNA, 19 nt, Artificial Sequence
  Description of Artificial Sequence: Synthetic oligonucleotide
  Sense strand starting at position 2887 of SEQ ID NO: 914245
uuuguaaaccuguguccua

SEQ ID NO: 989297 - RNA, 19 nt, Artificial Sequence
  Description of Artificial Sequence: Synthetic oligonucleotide
  Antisense strand to SEQ ID NO: 989296
uaggacacagguuuacaaa

SEQ ID NO: 989298 - RNA, 19 nt, Artificial Sequence
  Description of Artificial Sequence: Synthetic oligonucleotide
  Sense strand starting at position 2929 of SEQ ID NO: 914245
uagagagcuuuccugaaug

SEQ ID NO: 989299 - RNA, 19 nt, Artificial Sequence
  Description of Artificial Sequence: Synthetic oligonucleotide
  Antisense strand to SEQ ID NO: 989298
cauucaggaaagcucucua

SEQ ID NO: 989300 - RNA, 19 nt, Artificial Sequence
  Description of Artificial Sequence: Synthetic oligonucleotide
  Sense strand starting at position 2931 of SEQ ID NO: 914245
gagagcuuuccugaaugug

SEQ ID NO: 989301 - RNA, 19 nt, Artificial Sequence
  Description of Artificial Sequence: Synthetic oligonucleotide
  Antisense strand to SEQ ID NO: 989300
cacauucaggaaagcucuc

SEQ ID NO: 989302 - RNA, 19 nt, Artificial Sequence
  Description of Artificial Sequence: Synthetic oligonucleotide
  Sense strand starting at position 3369 of SEQ ID NO: 914245
ccauauugucccgacuggu

SEQ ID NO: 989303 - RNA, 19 nt, Artificial Sequence
  Description of Artificial Sequence: Synthetic oligonucleotide
  Antisense strand to SEQ ID NO: 989302
accagucgggacaauaugg

SEQ ID NO: 989304 - RNA, 19 nt, Artificial Sequence
  Description of Artificial Sequence: Synthetic oligonucleotide
  Sense strand starting at position 3476 of SEQ ID NO: 914245
uuuguaaauuagccagacu

SEQ ID NO: 989305 - RNA, 19 nt, Artificial Sequence
  Description of Artificial Sequence: Synthetic oligonucleotide
  Antisense strand to SEQ ID NO: 989304
agucuggcuaauuuacaaa

SEQ ID NO: 989306 - RNA, 19 nt, Artificial Sequence
  Description of Artificial Sequence: Synthetic oligonucleotide
  Sense strand starting at position 3479 of SEQ ID NO: 914245
guaaauuagccagacuuga

SEQ ID NO: 989307 - RNA, 19 nt, Artificial Sequence
  Description of Artificial Sequence: Synthetic oligonucleotide
  Antisense strand to SEQ ID NO: 989306
ucaagucuggcuaauuuac

SEQ ID NO: 989308 - RNA, 19 nt, Artificial Sequence
  Description of Artificial Sequence: Synthetic oligonucleotide
  Sense strand starting at position 3487 of SEQ ID NO: 914245
gccagacuugaugacaugu

SEQ ID NO: 989309 - RNA, 19 nt, Artificial Sequence
  Description of Artificial Sequence: Synthetic oligonucleotide
  Antisense strand to SEQ ID NO: 989308
acaugucaucaagucuggc

SEQ ID NO: 989310 - RNA, 19 nt, Artificial Sequence
  Description of Artificial Sequence: Synthetic oligonucleotide
  Sense strand starting at position 3574 of SEQ ID NO: 914245
agugaauuugaucgugcca

SEQ ID NO: 989311 - RNA, 19 nt, Artificial Sequence
  Description of Artificial Sequence: Synthetic oligonucleotide
  Antisense strand to SEQ ID NO: 989310
uggcacgaucaaauucacu

SEQ ID NO: 989312 - RNA, 19 nt, Artificial Sequence
  Description of Artificial Sequence: Synthetic oligonucleotide
  Sense strand starting at position 3607 of SEQ ID NO: 914245
ggguguuugcgagacucua

SEQ ID NO: 989313 - RNA, 19 nt, Artificial Sequence
  Description of Artificial Sequence: Synthetic oligonucleotide
  Antisense strand to SEQ ID NO: 989312
uagagucucgcaaacaccc

SEQ ID NO: 989314 - RNA, 19 nt, Artificial Sequence
  Description of Artificial Sequence: Synthetic oligonucleotide
  Sense strand starting at position 3799 of SEQ ID NO: 914245
aggugccuugaaugggaaa

SEQ ID NO: 989315 - RNA, 19 nt, Artificial Sequence
  Description of Artificial Sequence: Synthetic oligonucleotide
  Antisense strand to SEQ ID NO: 989314
uuucccauucaaggcaccu

SEQ ID NO: 989316 - RNA, 19 nt, Artificial Sequence
  Description of Artificial Sequence: Synthetic oligonucleotide
  Sense strand starting at position 3801 of SEQ ID NO: 914245
gugccuugaaugggaaagu

SEQ ID NO: 989317 - RNA, 19 nt, Artificial Sequence
  Description of Artificial Sequence: Synthetic oligonucleotide
  Antisense strand to SEQ ID NO: 989316
acuuucccauucaaggcac

SEQ ID NO: 989318 - RNA, 19 nt, Artificial Sequence
  Description of Artificial Sequence: Synthetic oligonucleotide
  Sense strand starting at position 3860 of SEQ ID NO: 914245
acagguauggcugggaaga

SEQ ID NO: 989319 - RNA, 19 nt, Artificial Sequence
  Description of Artificial Sequence: Synthetic oligonucleotide
  Antisense strand to SEQ ID NO: 989318
ucuucccagccauaccugu

SEQ ID NO: 989320 - RNA, 19 nt, Artificial Sequence
  Description of Artificial Sequence: Synthetic oligonucleotide
  Sense strand starting at position 126 of SEQ ID NO: 914246
uguccuaucgaccagucau

SEQ ID NO: 989321 - RNA, 19 nt, Artificial Sequence
  Description of Artificial Sequence: Synthetic oligonucleotide
  Antisense strand to SEQ ID NO: 989320
augacuggucgauaggaca

SEQ ID NO: 989322 - RNA, 19 nt, Artificial Sequence
  Description of Artificial Sequence: Synthetic oligonucleotide
  Sense strand starting at position 134 of SEQ ID NO: 914246
cgaccagucauugaguucu

SEQ ID NO: 989323 - RNA, 19 nt, Artificial Sequence
  Description of Artificial Sequence: Synthetic oligonucleotide
  Antisense strand to SEQ ID NO: 989322
agaacucaaugacuggucg

SEQ ID NO: 989324 - RNA, 19 nt, Artificial Sequence
  Description of Artificial Sequence: Synthetic oligonucleotide
  Sense strand starting at position 136 of SEQ ID NO: 914246
accagucauugaguucuua

SEQ ID NO: 989325 - RNA, 19 nt, Artificial Sequence
  Description of Artificial Sequence: Synthetic oligonucleotide
  Antisense strand to SEQ ID NO: 989324
uaagaacucaaugacuggu

SEQ ID NO: 989326 - RNA, 19 nt, Artificial Sequence
  Description of Artificial Sequence: Synthetic oligonucleotide
  Sense strand starting at position 180 of SEQ ID NO: 914246
gcuucuugugaguugucuu

SEQ ID NO: 989327 - RNA, 19 nt, Artificial Sequence
  Description of Artificial Sequence: Synthetic oligonucleotide
  Antisense strand to SEQ ID NO: 989326
aagacaacucacaagaagc

SEQ ID NO: 989328 - RNA, 19 nt, Artificial Sequence
  Description of Artificial Sequence: Synthetic oligonucleotide
  Sense strand starting at position 214 of SEQ ID NO: 914246
gguucuauauaauccaguu

SEQ ID NO: 989329 - RNA, 19 nt, Artificial Sequence
  Description of Artificial Sequence: Synthetic oligonucleotide
  Antisense strand to SEQ ID NO: 989328
aacuggauuauauagaacc

SEQ ID NO: 989330 - RNA, 19 nt, Artificial Sequence
  Description of Artificial Sequence: Synthetic oligonucleotide
  Sense strand starting at position 228 of SEQ ID NO: 914246
caguuuaaagagugaaguu

SEQ ID NO: 989331 - RNA, 19 nt, Artificial Sequence
  Description of Artificial Sequence: Synthetic oligonucleotide
  Antisense strand to SEQ ID NO: 989330
aacuucacucuuuaaacug

SEQ ID NO: 989332 - RNA, 19 nt, Artificial Sequence
  Description of Artificial Sequence: Synthetic oligonucleotide
  Sense strand starting at position 229 of SEQ ID NO: 914246
aguuuaaagagugaaguuu

SEQ ID NO: 989333 - RNA, 19 nt, Artificial Sequence
  Description of Artificial Sequence: Synthetic oligonucleotide
  Antisense strand to SEQ ID NO: 989332
aaacuucacucuuuaaacu

SEQ ID NO: 989334 - RNA, 19 nt, Artificial Sequence
  Description of Artificial Sequence: Synthetic oligonucleotide
  Sense strand starting at position 271 of SEQ ID NO: 914246
ccaugugaccuugggugaa

SEQ ID NO: 989335 - RNA, 19 nt, Artificial Sequence
  Description of Artificial Sequence: Synthetic oligonucleotide
  Antisense strand to SEQ ID NO: 989334
uucacccaaggucacaugg

SEQ ID NO: 989336 - RNA, 19 nt, Artificial Sequence
  Description of Artificial Sequence: Synthetic oligonucleotide
  Sense strand starting at position 516 of SEQ ID NO: 914246
ucgcccuuaggguaacauu

SEQ ID NO: 989337 - RNA, 19 nt, Artificial Sequence
  Description of Artificial Sequence: Synthetic oligonucleotide
  Antisense strand to SEQ ID NO: 989336
aauguuacccuaagggcga

SEQ ID NO: 989338 - RNA, 19 nt, Artificial Sequence
  Description of Artificial Sequence: Synthetic oligonucleotide
  Sense strand starting at position 659 of SEQ ID NO: 914246
cuuagcuucccagauaguu

SEQ ID NO: 989339 - RNA, 19 nt, Artificial Sequence
  Description of Artificial Sequence: Synthetic oligonucleotide
  Antisense strand to SEQ ID NO: 989338
aacuaucugggaagcuaag

SEQ ID NO: 989340 - RNA, 19 nt, Artificial Sequence
  Description of Artificial Sequence: Synthetic oligonucleotide
  Sense strand starting at position 1089 of SEQ ID NO: 914246
cguucuugggaagauuauu

SEQ ID NO: 989341 - RNA, 19 nt, Artificial Sequence
  Description of Artificial Sequence: Synthetic oligonucleotide
  Antisense strand to SEQ ID NO: 989340
aauaaucuucccaagaacg

SEQ ID NO: 989342 - RNA, 19 nt, Artificial Sequence
  Description of Artificial Sequence: Synthetic oligonucleotide
  Sense strand starting at position 1167 of SEQ ID NO: 914246
gcucauuugucccugugac

SEQ ID NO: 989343 - RNA, 19 nt, Artificial Sequence
  Description of Artificial Sequence: Synthetic oligonucleotide
  Antisense strand to SEQ ID NO: 989342
gucacagggacaaaugagc

SEQ ID NO: 989344 - RNA, 19 nt, Artificial Sequence
  Description of Artificial Sequence: Synthetic oligonucleotide
  Sense strand starting at position 1205 of SEQ ID NO: 914246
uaauuaagagcugggauua

SEQ ID NO: 989345 - RNA, 19 nt, Artificial Sequence
  Description of Artificial Sequence: Synthetic oligonucleotide
  Antisense strand to SEQ ID NO: 989344
uaaucccagcucuuaauua

SEQ ID NO: 989346 - RNA, 19 nt, Artificial Sequence
  Description of Artificial Sequence: Synthetic oligonucleotide
  Sense strand starting at position 1248 of SEQ ID NO: 914246
gauggaguucucuaacuuu

SEQ ID NO: 989347 - RNA, 19 nt, Artificial Sequence
  Description of Artificial Sequence: Synthetic oligonucleotide
  Antisense strand to SEQ ID NO: 989346
aaaguuagagaacuccauc

SEQ ID NO: 989348 - RNA, 19 nt, Artificial Sequence
  Description of Artificial Sequence: Synthetic oligonucleotide
  Sense strand starting at position 1297 of SEQ ID NO: 914246
uucccuuaucugcaagaug

SEQ ID NO: 989349 - RNA, 19 nt, Artificial Sequence
  Description of Artificial Sequence: Synthetic oligonucleotide
  Antisense strand to SEQ ID NO: 989348
caucuugcagauaagggaa

SEQ ID NO: 989350 - RNA, 19 nt, Artificial Sequence
  Description of Artificial Sequence: Synthetic oligonucleotide
  Sense strand starting at position 1300 of SEQ ID NO: 914246
ccuuaucugcaagaugaca

SEQ ID NO: 989351 - RNA, 19 nt, Artificial Sequence
  Description of Artificial Sequence: Synthetic oligonucleotide
  Antisense strand to SEQ ID NO: 989350
ugucaucuugcagauaagg

SEQ ID NO: 989352 - RNA, 19 nt, Artificial Sequence
  Description of Artificial Sequence: Synthetic oligonucleotide
  Sense strand starting at position 2021 of SEQ ID NO: 914246
ggaggaucuccuggacccu

SEQ ID NO: 989353 - RNA, 19 nt, Artificial Sequence
  Description of Artificial Sequence: Synthetic oligonucleotide
  Antisense strand to SEQ ID NO: 989352
aggguccaggagauccucc

SEQ ID NO: 989354 - RNA, 19 nt, Artificial Sequence
  Description of Artificial Sequence: Synthetic oligonucleotide
  Sense strand starting at position 2094 of SEQ ID NO: 914246
ccaugccuugguuauauga

SEQ ID NO: 989355 - RNA, 19 nt, Artificial Sequence
  Description of Artificial Sequence: Synthetic oligonucleotide
  Antisense strand to SEQ ID NO: 989354
ucauauaaccaaggcaugg

SEQ ID NO: 989356 - RNA, 19 nt, Artificial Sequence
  Description of Artificial Sequence: Synthetic oligonucleotide
  Sense strand starting at position 2101 of SEQ ID NO: 914246
uugguuauaugaccagauu

SEQ ID NO: 989357 - RNA, 19 nt, Artificial Sequence
  Description of Artificial Sequence: Synthetic oligonucleotide
  Antisense strand to SEQ ID NO: 989356
aaucuggucauauaaccaa

SEQ ID NO: 989358 - RNA, 19 nt, Artificial Sequence
  Description of Artificial Sequence: Synthetic oligonucleotide
  Sense strand starting at position 2104 of SEQ ID NO: 914246
guuauaugaccagauuggu

SEQ ID NO: 989359 - RNA, 19 nt, Artificial Sequence
  Description of Artificial Sequence: Synthetic oligonucleotide
  Antisense strand to SEQ ID NO: 989358
accaaucuggucauauaac

SEQ ID NO: 989360 - RNA, 19 nt, Artificial Sequence
  Description of Artificial Sequence: Synthetic oligonucleotide
  Sense strand starting at position 2129 of SEQ ID NO: 914246
agaguuaccuacucuuuag

SEQ ID NO: 989361 - RNA, 19 nt, Artificial Sequence
  Description of Artificial Sequence: Synthetic oligonucleotide
  Antisense strand to SEQ ID NO: 989360
cuaaagaguagguaacucu

SEQ ID NO: 989362 - RNA, 19 nt, Artificial Sequence
  Description of Artificial Sequence: Synthetic oligonucleotide
  Sense strand starting at position 2485 of SEQ ID NO: 914246
guuacaauggcagaguuua

SEQ ID NO: 989363 - RNA, 19 nt, Artificial Sequence
  Description of Artificial Sequence: Synthetic oligonucleotide
  Antisense strand to SEQ ID NO: 989362
uaaacucugccauuguaac

SEQ ID NO: 989364 - RNA, 19 nt, Artificial Sequence
  Description of Artificial Sequence: Synthetic oligonucleotide
  Sense strand starting at position 2490 of SEQ ID NO: 914246
aauggcagaguuuaauagu

SEQ ID NO: 989365 - RNA, 19 nt, Artificial Sequence
  Description of Artificial Sequence: Synthetic oligonucleotide
  Antisense strand to SEQ ID NO: 989364
acuauuaaacucugccauu

SEQ ID NO: 989366 - RNA, 19 nt, Artificial Sequence
  Description of Artificial Sequence: Synthetic oligonucleotide
  Sense strand starting at position 2496 of SEQ ID NO: 914246
agaguuuaauagucaugac

SEQ ID NO: 989367 - RNA, 19 nt, Artificial Sequence
  Description of Artificial Sequence: Synthetic oligonucleotide
  Antisense strand to SEQ ID NO: 989366
gucaugacuauuaaacucu

SEQ ID NO: 989368 - RNA, 19 nt, Artificial Sequence
  Description of Artificial Sequence: Synthetic oligonucleotide
  Sense strand starting at position 2667 of SEQ ID NO: 914246
ccuuuagauuccucaguuc

SEQ ID NO: 989369 - RNA, 19 nt, Artificial Sequence
  Description of Artificial Sequence: Synthetic oligonucleotide
  Antisense strand to SEQ ID NO: 989368
gaacugaggaaucuaaagg

SEQ ID NO: 989370 - RNA, 19 nt, Artificial Sequence
  Description of Artificial Sequence: Synthetic oligonucleotide
  Sense strand starting at position 2719 of SEQ ID NO: 914246
ccaccuacucacugugaca

SEQ ID NO: 989371 - RNA, 19 nt, Artificial Sequence
  Description of Artificial Sequence: Synthetic oligonucleotide
  Antisense strand to SEQ ID NO: 989370
ugucacagugaguaggugg

SEQ ID NO: 989372 - RNA, 19 nt, Artificial Sequence
  Description of Artificial Sequence: Synthetic oligonucleotide
  Sense strand starting at position 2904 of SEQ ID NO: 914246
uagcaaguuccugggacua

SEQ ID NO: 989373 - RNA, 19 nt, Artificial Sequence
  Description of Artificial Sequence: Synthetic oligonucleotide
  Antisense strand to SEQ ID NO: 989372
uagucccaggaacuugcua

SEQ ID NO: 989374 - RNA, 19 nt, Artificial Sequence
  Description of Artificial Sequence: Synthetic oligonucleotide
  Sense strand starting at position 2914 of SEQ ID NO: 914246
cugggacuauacuuagcaa

SEQ ID NO: 989375 - RNA, 19 nt, Artificial Sequence
  Description of Artificial Sequence: Synthetic oligonucleotide
  Antisense strand to SEQ ID NO: 989374
uugcuaaguauagucccag

SEQ ID NO: 989376 - RNA, 19 nt, Artificial Sequence
  Description of Artificial Sequence: Synthetic oligonucleotide
  Sense strand starting at position 3017 of SEQ ID NO: 914246
ggcuuacugcaacaaacuu

SEQ ID NO: 989377 - RNA, 19 nt, Artificial Sequence
  Description of Artificial Sequence: Synthetic oligonucleotide
  Antisense strand to SEQ ID NO: 989376
aaguuuguugcaguaagcc

SEQ ID NO: 989378 - RNA, 19 nt, Artificial Sequence
  Description of Artificial Sequence: Synthetic oligonucleotide
  Sense strand starting at position 3503 of SEQ ID NO: 914246
auuacauucuuagcacagu

SEQ ID NO: 989379 - RNA, 19 nt, Artificial Sequence
  Description of Artificial Sequence: Synthetic oligonucleotide
  Antisense strand to SEQ ID NO: 989378
acugugcuaagaauguaau

SEQ ID NO: 989380 - RNA, 19 nt, Artificial Sequence
  Description of Artificial Sequence: Synthetic oligonucleotide
  Sense strand starting at position 3613 of SEQ ID NO: 914246
ugaagacuuuggccaugga

SEQ ID NO: 989381 - RNA, 19 nt, Artificial Sequence
  Description of Artificial Sequence: Synthetic oligonucleotide
  Antisense strand to SEQ ID NO: 989380
uccauggccaaagucuuca

SEQ ID NO: 989382 - RNA, 19 nt, Artificial Sequence
  Description of Artificial Sequence: Synthetic oligonucleotide
  Sense strand starting at position 3616 of SEQ ID NO: 914246
agacuuuggccauggaaga

SEQ ID NO: 989383 - RNA, 19 nt, Artificial Sequence
  Description of Artificial Sequence: Synthetic oligonucleotide
  Antisense strand to SEQ ID NO: 989382
ucuuccauggccaaagucu

SEQ ID NO: 989384 - RNA, 19 nt, Artificial Sequence
  Description of Artificial Sequence: Synthetic oligonucleotide
  Sense strand starting at position 3617 of SEQ ID NO: 914246
gacuuuggccauggaagau

SEQ ID NO: 989385 - RNA, 19 nt, Artificial Sequence
  Description of Artificial Sequence: Synthetic oligonucleotide
  Antisense strand to SEQ ID NO: 989384
aucuuccauggccaaaguc

SEQ ID NO: 989386 - RNA, 19 nt, Artificial Sequence
  Description of Artificial Sequence: Synthetic oligonucleotide
  Sense strand starting at position 3671 of SEQ ID NO: 914246
guaucaagucuugacuuac

SEQ ID NO: 989387 - RNA, 19 nt, Artificial Sequence
  Description of Artificial Sequence: Synthetic oligonucleotide
  Antisense strand to SEQ ID NO: 989386
guaagucaagacuugauac

SEQ ID NO: 989388 - RNA, 19 nt, Artificial Sequence
  Description of Artificial Sequence: Synthetic oligonucleotide
  Sense strand starting at position 3737 of SEQ ID NO: 914246
acauacugaugagaaagaa

SEQ ID NO: 989389 - RNA, 19 nt, Artificial Sequence
  Description of Artificial Sequence: Synthetic oligonucleotide
  Antisense strand to SEQ ID NO: 989388
uucuuucucaucaguaugu

SEQ ID NO: 989390 - RNA, 19 nt, Artificial Sequence
  Description of Artificial Sequence: Synthetic oligonucleotide
  Sense strand starting at position 3769 of SEQ ID NO: 914246
aaguguuuaugccuagaga

SEQ ID NO: 989391 - RNA, 19 nt, Artificial Sequence
  Description of Artificial Sequence: Synthetic oligonucleotide
  Antisense strand to SEQ ID NO: 989390
ucucuaggcauaaacacuu

SEQ ID NO: 989392 - RNA, 19 nt, Artificial Sequence
  Description of Artificial Sequence: Synthetic oligonucleotide
  Sense strand starting at position 3770 of SEQ ID NO: 914246
aguguuuaugccuagagaa

SEQ ID NO: 989393 - RNA, 19 nt, Artificial Sequence
  Description of Artificial Sequence: Synthetic oligonucleotide
  Antisense strand to SEQ ID NO: 989392
uucucuaggcauaaacacu

SEQ ID NO: 989394 - RNA, 19 nt, Artificial Sequence
  Description of Artificial Sequence: Synthetic oligonucleotide
  Sense strand starting at position 3772 of SEQ ID NO: 914246
uguuuaugccuagagaaac

SEQ ID NO: 989395 - RNA, 19 nt, Artificial Sequence
  Description of Artificial Sequence: Synthetic oligonucleotide
  Antisense strand to SEQ ID NO: 989394
guuucucuaggcauaaaca

SEQ ID NO: 989396 - RNA, 19 nt, Artificial Sequence
  Description of Artificial Sequence: Synthetic oligonucleotide
  Sense strand starting at position 3863 of SEQ ID NO: 914246
cucucaacucuguagguaa

SEQ ID NO: 989397 - RNA, 19 nt, Artificial Sequence
  Description of Artificial Sequence: Synthetic oligonucleotide
  Antisense strand to SEQ ID NO: 989396
uuaccuacagaguugagag

SEQ ID NO: 989398 - RNA, 19 nt, Artificial Sequence
  Description of Artificial Sequence: Synthetic oligonucleotide
  Sense strand starting at position 3932 of SEQ ID NO: 914246
aggugagauuccuuugguu

SEQ ID NO: 989399 - RNA, 19 nt, Artificial Sequence
  Description of Artificial Sequence: Synthetic oligonucleotide
  Antisense strand to SEQ ID NO: 989398
aaccaaaggaaucucaccu

SEQ ID NO: 989400 - RNA, 19 nt, Artificial Sequence
  Description of Artificial Sequence: Synthetic oligonucleotide
  Sense strand starting at position 52 of SEQ ID NO: 914247
ugaacaaugucugauuuaa

SEQ ID NO: 989401 - RNA, 19 nt, Artificial Sequence
  Description of Artificial Sequence: Synthetic oligonucleotide
  Antisense strand to SEQ ID NO: 989400
uuaaaucagacauuguuca

SEQ ID NO: 989402 - RNA, 19 nt, Artificial Sequence
  Description of Artificial Sequence: Synthetic oligonucleotide
  Sense strand starting at position 112 of SEQ ID NO: 914247
uuucccauaucauugguga

SEQ ID NO: 989403 - RNA, 19 nt, Artificial Sequence
  Description of Artificial Sequence: Synthetic oligonucleotide
  Antisense strand to SEQ ID NO: 989402
ucaccaaugauaugggaaa

SEQ ID NO: 989404 - RNA, 19 nt, Artificial Sequence
  Description of Artificial Sequence: Synthetic oligonucleotide
  Sense strand starting at position 115 of SEQ ID NO: 914247
cccauaucauuggugagaa

SEQ ID NO: 989405 - RNA, 19 nt, Artificial Sequence
  Description of Artificial Sequence: Synthetic oligonucleotide
  Antisense strand to SEQ ID NO: 989404
uucucaccaaugauauggg

SEQ ID NO: 989406 - RNA, 19 nt, Artificial Sequence
  Description of Artificial Sequence: Synthetic oligonucleotide
  Sense strand starting at position 362 of SEQ ID NO: 914247
uugccaaagugaucuaaca

SEQ ID NO: 989407 - RNA, 19 nt, Artificial Sequence
  Description of Artificial Sequence: Synthetic oligonucleotide
  Antisense strand to SEQ ID NO: 989406
uguuagaucacuuuggcaa

SEQ ID NO: 989408 - RNA, 19 nt, Artificial Sequence
  Description of Artificial Sequence: Synthetic oligonucleotide
  Sense strand starting at position 386 of SEQ ID NO: 914247
cugguaaagcgcuuccuuu

SEQ ID NO: 989409 - RNA, 19 nt, Artificial Sequence
  Description of Artificial Sequence: Synthetic oligonucleotide
  Antisense strand to SEQ ID NO: 989408
aaaggaagcgcuuuaccag

SEQ ID NO: 989410 - RNA, 19 nt, Artificial Sequence
  Description of Artificial Sequence: Synthetic oligonucleotide
  Sense strand starting at position 409 of SEQ ID NO: 914247
acauguggguucccaagua

SEQ ID NO: 989411 - RNA, 19 nt, Artificial Sequence
  Description of Artificial Sequence: Synthetic oligonucleotide
  Antisense strand to SEQ ID NO: 989410
uacuugggaacccacaugu

SEQ ID NO: 989412 - RNA, 19 nt, Artificial Sequence
  Description of Artificial Sequence: Synthetic oligonucleotide
  Sense strand starting at position 414 of SEQ ID NO: 914247
uggguucccaaguaauugu

SEQ ID NO: 989413 - RNA, 19 nt, Artificial Sequence
  Description of Artificial Sequence: Synthetic oligonucleotide
  Antisense strand to SEQ ID NO: 989412
acaauuacuugggaaccca

SEQ ID NO: 989414 - RNA, 19 nt, Artificial Sequence
  Description of Artificial Sequence: Synthetic oligonucleotide
  Sense strand starting at position 504 of SEQ ID NO: 914247
agugacucuuagccuaaau

SEQ ID NO: 989415 - RNA, 19 nt, Artificial Sequence
  Description of Artificial Sequence: Synthetic oligonucleotide
  Antisense strand to SEQ ID NO: 989414
auuuaggcuaagagucacu

SEQ ID NO: 989416 - RNA, 19 nt, Artificial Sequence
  Description of Artificial Sequence: Synthetic oligonucleotide
  Sense strand starting at position 514 of SEQ ID NO: 914247
agccuaaaucauggucaua

SEQ ID NO: 989417 - RNA, 19 nt, Artificial Sequence
  Description of Artificial Sequence: Synthetic oligonucleotide
  Antisense strand to SEQ ID NO: 989416
uaugaccaugauuuaggcu

SEQ ID NO: 989418 - RNA, 19 nt, Artificial Sequence
  Description of Artificial Sequence: Synthetic oligonucleotide
  Sense strand starting at position 516 of SEQ ID NO: 914247
ccuaaaucauggucauaag

SEQ ID NO: 989419 - RNA, 19 nt, Artificial Sequence
  Description of Artificial Sequence: Synthetic oligonucleotide
  Antisense strand to SEQ ID NO: 989418
cuuaugaccaugauuuagg

SEQ ID NO: 989420 - RNA, 19 nt, Artificial Sequence
  Description of Artificial Sequence: Synthetic oligonucleotide
  Sense strand starting at position 622 of SEQ ID NO: 914247
gggaccauuugucaugaua

SEQ ID NO: 989421 - RNA, 19 nt, Artificial Sequence
  Description of Artificial Sequence: Synthetic oligonucleotide
  Antisense strand to SEQ ID NO: 989420
uaucaugacaaaugguccc

SEQ ID NO: 989422 - RNA, 19 nt, Artificial Sequence
  Description of Artificial Sequence: Synthetic oligonucleotide
  Sense strand starting at position 666 of SEQ ID NO: 914247
ugcacagaugccugagaac

SEQ ID NO: 989423 - RNA, 19 nt, Artificial Sequence
  Description of Artificial Sequence: Synthetic oligonucleotide
  Antisense strand to SEQ ID NO: 989422
guucucaggcaucugugca

SEQ ID NO: 989424 - RNA, 19 nt, Artificial Sequence
  Description of Artificial Sequence: Synthetic oligonucleotide
  Sense strand starting at position 696 of SEQ ID NO: 914247
augagaagguuagcuaaga

SEQ ID NO: 989425 - RNA, 19 nt, Artificial Sequence
  Description of Artificial Sequence: Synthetic oligonucleotide
  Antisense strand to SEQ ID NO: 989424
ucuuagcuaaccuucucau

SEQ ID NO: 989426 - RNA, 19 nt, Artificial Sequence
  Description of Artificial Sequence: Synthetic oligonucleotide
  Sense strand starting at position 697 of SEQ ID NO: 914247
ugagaagguuagcuaagaa

SEQ ID NO: 989427 - RNA, 19 nt, Artificial Sequence
  Description of Artificial Sequence: Synthetic oligonucleotide
  Antisense strand to SEQ ID NO: 989426
uucuuagcuaaccuucuca

SEQ ID NO: 989428 - RNA, 19 nt, Artificial Sequence
  Description of Artificial Sequence: Synthetic oligonucleotide
  Sense strand starting at position 759 of SEQ ID NO: 914247
ggcaguaaucauuagccaa

SEQ ID NO: 989429 - RNA, 19 nt, Artificial Sequence
  Description of Artificial Sequence: Synthetic oligonucleotide
  Antisense strand to SEQ ID NO: 989428
uuggcuaaugauuacugcc

SEQ ID NO: 989430 - RNA, 19 nt, Artificial Sequence
  Description of Artificial Sequence: Synthetic oligonucleotide
  Sense strand starting at position 981 of SEQ ID NO: 914247
gcuaaagaagaaugcuuaa

SEQ ID NO: 989431 - RNA, 19 nt, Artificial Sequence
  Description of Artificial Sequence: Synthetic oligonucleotide
  Antisense strand to SEQ ID NO: 989430
uuaagcauucuucuuuagc

SEQ ID NO: 989432 - RNA, 19 nt, Artificial Sequence
  Description of Artificial Sequence: Synthetic oligonucleotide
  Sense strand starting at position 992 of SEQ ID NO: 914247
augcuuaaauccucagaag

SEQ ID NO: 989433 - RNA, 19 nt, Artificial Sequence
  Description of Artificial Sequence: Synthetic oligonucleotide
  Antisense strand to SEQ ID NO: 989432
cuucugaggauuuaagcau

SEQ ID NO: 989434 - RNA, 19 nt, Artificial Sequence
  Description of Artificial Sequence: Synthetic oligonucleotide
  Sense strand starting at position 1023 of SEQ ID NO: 914247
gaaguaguguccucagaug

SEQ ID NO: 989435 - RNA, 19 nt, Artificial Sequence
  Description of Artificial Sequence: Synthetic oligonucleotide
  Antisense strand to SEQ ID NO: 989434
caucugaggacacuacuuc

SEQ ID NO: 989436 - RNA, 19 nt, Artificial Sequence
  Description of Artificial Sequence: Synthetic oligonucleotide
  Sense strand starting at position 1049 of SEQ ID NO: 914247
acuccuagauaguuggaua

SEQ ID NO: 989437 - RNA, 19 nt, Artificial Sequence
  Description of Artificial Sequence: Synthetic oligonucleotide
  Antisense strand to SEQ ID NO: 989436
uauccaacuaucuaggagu

SEQ ID NO: 989438 - RNA, 19 nt, Artificial Sequence
  Description of Artificial Sequence: Synthetic oligonucleotide
  Sense strand starting at position 1197 of SEQ ID NO: 914247
gcagaugaccucugguacu

SEQ ID NO: 989439 - RNA, 19 nt, Artificial Sequence
  Description of Artificial Sequence: Synthetic oligonucleotide
  Antisense strand to SEQ ID NO: 989438
aguaccagaggucaucugc

SEQ ID NO: 989440 - RNA, 19 nt, Artificial Sequence
  Description of Artificial Sequence: Synthetic oligonucleotide
  Sense strand starting at position 1203 of SEQ ID NO: 914247
gaccucugguacuugaaga

SEQ ID NO: 989441 - RNA, 19 nt, Artificial Sequence
  Description of Artificial Sequence: Synthetic oligonucleotide
  Antisense strand to SEQ ID NO: 989440
ucuucaaguaccagagguc

SEQ ID NO: 989442 - RNA, 19 nt, Artificial Sequence
  Description of Artificial Sequence: Synthetic oligonucleotide
  Sense strand starting at position 1266 of SEQ ID NO: 914247
gaaacuguucccuggaggu

SEQ ID NO: 989443 - RNA, 19 nt, Artificial Sequence
  Description of Artificial Sequence: Synthetic oligonucleotide
  Antisense strand to SEQ ID NO: 989442
accuccagggaacaguuuc

SEQ ID NO: 989444 - RNA, 19 nt, Artificial Sequence
  Description of Artificial Sequence: Synthetic oligonucleotide
  Sense strand starting at position 1268 of SEQ ID NO: 914247
aacuguucccuggagguga

SEQ ID NO: 989445 - RNA, 19 nt, Artificial Sequence
  Description of Artificial Sequence: Synthetic oligonucleotide
  Antisense strand to SEQ ID NO: 989444
ucaccuccagggaacaguu

SEQ ID NO: 989446 - RNA, 19 nt, Artificial Sequence
  Description of Artificial Sequence: Synthetic oligonucleotide
  Sense strand starting at position 1327 of SEQ ID NO: 914247
acgguagaauucucacgga

SEQ ID NO: 989447 - RNA, 19 nt, Artificial Sequence
  Description of Artificial Sequence: Synthetic oligonucleotide
  Antisense strand to SEQ ID NO: 989446
uccgugagaauucuaccgu

SEQ ID NO: 989448 - RNA, 19 nt, Artificial Sequence
  Description of Artificial Sequence: Synthetic oligonucleotide
  Sense strand starting at position 2173 of SEQ ID NO: 914247
gggcgugauccaggaagga

SEQ ID NO: 989449 - RNA, 19 nt, Artificial Sequence
  Description of Artificial Sequence: Synthetic oligonucleotide
  Antisense strand to SEQ ID NO: 989448
uccuuccuggaucacgccc

SEQ ID NO: 989450 - RNA, 19 nt, Artificial Sequence
  Description of Artificial Sequence: Synthetic oligonucleotide
  Sense strand starting at position 2264 of SEQ ID NO: 914247
aggcuauauucugucagga

SEQ ID NO: 989451 - RNA, 19 nt, Artificial Sequence
  Description of Artificial Sequence: Synthetic oligonucleotide
  Antisense strand to SEQ ID NO: 989450
uccugacagaauauagccu

SEQ ID NO: 989452 - RNA, 19 nt, Artificial Sequence
  Description of Artificial Sequence: Synthetic oligonucleotide
  Sense strand starting at position 2487 of SEQ ID NO: 914247
uucugauaaagguguaagu

SEQ ID NO: 989453 - RNA, 19 nt, Artificial Sequence
  Description of Artificial Sequence: Synthetic oligonucleotide
  Antisense strand to SEQ ID NO: 989452
acuuacaccuuuaucagaa

SEQ ID NO: 989454 - RNA, 19 nt, Artificial Sequence
  Description of Artificial Sequence: Synthetic oligonucleotide
  Sense strand starting at position 2489 of SEQ ID NO: 914247
cugauaaagguguaagugu

SEQ ID NO: 989455 - RNA, 19 nt, Artificial Sequence
  Description of Artificial Sequence: Synthetic oligonucleotide
  Antisense strand to SEQ ID NO: 989454
acacuuacaccuuuaucag

SEQ ID NO: 989456 - RNA, 19 nt, Artificial Sequence
  Description of Artificial Sequence: Synthetic oligonucleotide
  Sense strand starting at position 2504 of SEQ ID NO: 914247
gugucucuucgguacaaag

SEQ ID NO: 989457 - RNA, 19 nt, Artificial Sequence
  Description of Artificial Sequence: Synthetic oligonucleotide
  Antisense strand to SEQ ID NO: 989456
cuuuguaccgaagagacac

SEQ ID NO: 989458 - RNA, 19 nt, Artificial Sequence
  Description of Artificial Sequence: Synthetic oligonucleotide
  Sense strand starting at position 2656 of SEQ ID NO: 914247
acguucuaacuauaauugu

SEQ ID NO: 989459 - RNA, 19 nt, Artificial Sequence
  Description of Artificial Sequence: Synthetic oligonucleotide
  Antisense strand to SEQ ID NO: 989458
acaauuauaguuagaacgu

SEQ ID NO: 989460 - RNA, 19 nt, Artificial Sequence
  Description of Artificial Sequence: Synthetic oligonucleotide
  Sense strand starting at position 3196 of SEQ ID NO: 914247
gaagccaucccagauguuu

SEQ ID NO: 989461 - RNA, 19 nt, Artificial Sequence
  Description of Artificial Sequence: Synthetic oligonucleotide
  Antisense strand to SEQ ID NO: 989460
aaacaucugggauggcuuc

SEQ ID NO: 989462 - RNA, 19 nt, Artificial Sequence
  Description of Artificial Sequence: Synthetic oligonucleotide
  Sense strand starting at position 3254 of SEQ ID NO: 914247
gugcuacauccugaucaga

SEQ ID NO: 989463 - RNA, 19 nt, Artificial Sequence
  Description of Artificial Sequence: Synthetic oligonucleotide
  Antisense strand to SEQ ID NO: 989462
ucugaucaggauguagcac

SEQ ID NO: 989464 - RNA, 19 nt, Artificial Sequence
  Description of Artificial Sequence: Synthetic oligonucleotide
  Sense strand starting at position 3256 of SEQ ID NO: 914247
gcuacauccugaucagaga

SEQ ID NO: 989465 - RNA, 19 nt, Artificial Sequence
  Description of Artificial Sequence: Synthetic oligonucleotide
  Antisense strand to SEQ ID NO: 989464
ucucugaucaggauguagc

SEQ ID NO: 989466 - RNA, 19 nt, Artificial Sequence
  Description of Artificial Sequence: Synthetic oligonucleotide
  Sense strand starting at position 3302 of SEQ ID NO: 914247
guauuaggacucugccuga

SEQ ID NO: 989467 - RNA, 19 nt, Artificial Sequence
  Description of Artificial Sequence: Synthetic oligonucleotide
  Antisense strand to SEQ ID NO: 989466
ucaggcagaguccuaauac

SEQ ID NO: 989468 - RNA, 19 nt, Artificial Sequence
  Description of Artificial Sequence: Synthetic oligonucleotide
  Sense strand starting at position 3305 of SEQ ID NO: 914247
uuaggacucugccugaaua

SEQ ID NO: 989469 - RNA, 19 nt, Artificial Sequence
  Description of Artificial Sequence: Synthetic oligonucleotide
  Antisense strand to SEQ ID NO: 989468
uauucaggcagaguccuaa

SEQ ID NO: 989470 - RNA, 19 nt, Artificial Sequence
  Description of Artificial Sequence: Synthetic oligonucleotide
  Sense strand starting at position 3466 of SEQ ID NO: 914247
agccaauuagcaggaaaua

SEQ ID NO: 989471 - RNA, 19 nt, Artificial Sequence
  Description of Artificial Sequence: Synthetic oligonucleotide
  Antisense strand to SEQ ID NO: 989470
uauuuccugcuaauuggcu

SEQ ID NO: 989472 - RNA, 19 nt, Artificial Sequence
  Description of Artificial Sequence: Synthetic oligonucleotide
  Sense strand starting at position 3475 of SEQ ID NO: 914247
gcaggaaauagaugcagaa

SEQ ID NO: 989473 - RNA, 19 nt, Artificial Sequence
  Description of Artificial Sequence: Synthetic oligonucleotide
  Antisense strand to SEQ ID NO: 989472
uucugcaucuauuuccugc

SEQ ID NO: 989474 - RNA, 19 nt, Artificial Sequence
  Description of Artificial Sequence: Synthetic oligonucleotide
  Sense strand starting at position 3496 of SEQ ID NO: 914247
uuuauuugcuaggugcaaa

SEQ ID NO: 989475 - RNA, 19 nt, Artificial Sequence
  Description of Artificial Sequence: Synthetic oligonucleotide
  Antisense strand to SEQ ID NO: 989474
uuugcaccuagcaaauaaa

SEQ ID NO: 989476 - RNA, 19 nt, Artificial Sequence
  Description of Artificial Sequence: Synthetic oligonucleotide
  Sense strand starting at position 3519 of SEQ ID NO: 914247
agggaagcaguguaucuuu

SEQ ID NO: 989477 - RNA, 19 nt, Artificial Sequence
  Description of Artificial Sequence: Synthetic oligonucleotide
  Antisense strand to SEQ ID NO: 989476
aaagauacacugcuucccu

SEQ ID NO: 989478 - RNA, 19 nt, Artificial Sequence
  Description of Artificial Sequence: Synthetic oligonucleotide
  Sense strand starting at position 3861 of SEQ ID NO: 914247
auaguagccucucugaaau

SEQ ID NO: 989479 - RNA, 19 nt, Artificial Sequence
  Description of Artificial Sequence: Synthetic oligonucleotide
  Antisense strand to SEQ ID NO: 989478
auuucagagaggcuacuau

SEQ ID NO: 989480 - RNA, 19 nt, Artificial Sequence
  Description of Artificial Sequence: Synthetic oligonucleotide
  Sense strand starting at position 279 of SEQ ID NO: 914248
cagagauaguggcucauga

SEQ ID NO: 989481 - RNA, 19 nt, Artificial Sequence
  Description of Artificial Sequence: Synthetic oligonucleotide
  Antisense strand to SEQ ID NO: 989480
ucaugagccacuaucucug

SEQ ID NO: 989482 - RNA, 19 nt, Artificial Sequence
  Description of Artificial Sequence: Synthetic oligonucleotide
  Sense strand starting at position 336 of SEQ ID NO: 914248
agagcugggccuuaagaga

SEQ ID NO: 989483 - RNA, 19 nt, Artificial Sequence
  Description of Artificial Sequence: Synthetic oligonucleotide
  Antisense strand to SEQ ID NO: 989482
ucucuuaaggcccagcucu

SEQ ID NO: 989484 - RNA, 19 nt, Artificial Sequence
  Description of Artificial Sequence: Synthetic oligonucleotide
  Sense strand starting at position 366 of SEQ ID NO: 914248
gucuauggauucuugauac

SEQ ID NO: 989485 - RNA, 19 nt, Artificial Sequence
  Description of Artificial Sequence: Synthetic oligonucleotide
  Antisense strand to SEQ ID NO: 989484
guaucaagaauccauagac

SEQ ID NO: 989486 - RNA, 19 nt, Artificial Sequence
  Description of Artificial Sequence: Synthetic oligonucleotide
  Sense strand starting at position 399 of SEQ ID NO: 914248
gugguaaucagaggaacag

SEQ ID NO: 989487 - RNA, 19 nt, Artificial Sequence
  Description of Artificial Sequence: Synthetic oligonucleotide
  Antisense strand to SEQ ID NO: 989486
cuguuccucugauuaccac

SEQ ID NO: 989488 - RNA, 19 nt, Artificial Sequence
  Description of Artificial Sequence: Synthetic oligonucleotide
  Sense strand starting at position 477 of SEQ ID NO: 914248
ccugaugugcccuaggaau

SEQ ID NO: 989489 - RNA, 19 nt, Artificial Sequence
  Description of Artificial Sequence: Synthetic oligonucleotide
  Antisense strand to SEQ ID NO: 989488
auuccuagggcacaucagg

SEQ ID NO: 989490 - RNA, 19 nt, Artificial Sequence
  Description of Artificial Sequence: Synthetic oligonucleotide
  Sense strand starting at position 604 of SEQ ID NO: 914248
cugguuuaucauuagauac

SEQ ID NO: 989491 - RNA, 19 nt, Artificial Sequence
  Description of Artificial Sequence: Synthetic oligonucleotide
  Antisense strand to SEQ ID NO: 989490
guaucuaaugauaaaccag

SEQ ID NO: 989492 - RNA, 19 nt, Artificial Sequence
  Description of Artificial Sequence: Synthetic oligonucleotide
  Sense strand starting at position 651 of SEQ ID NO: 914248
cagagaucauaucuguaug

SEQ ID NO: 989493 - RNA, 19 nt, Artificial Sequence
  Description of Artificial Sequence: Synthetic oligonucleotide
  Antisense strand to SEQ ID NO: 989492
cauacagauaugaucucug

SEQ ID NO: 989494 - RNA, 19 nt, Artificial Sequence
  Description of Artificial Sequence: Synthetic oligonucleotide
  Sense strand starting at position 653 of SEQ ID NO: 914248
gagaucauaucuguauggu

SEQ ID NO: 989495 - RNA, 19 nt, Artificial Sequence
  Description of Artificial Sequence: Synthetic oligonucleotide
  Antisense strand to SEQ ID NO: 989494
accauacagauaugaucuc

SEQ ID NO: 989496 - RNA, 19 nt, Artificial Sequence
  Description of Artificial Sequence: Synthetic oligonucleotide
  Sense strand starting at position 654 of SEQ ID NO: 914248
agaucauaucuguauggug

SEQ ID NO: 989497 - RNA, 19 nt, Artificial Sequence
  Description of Artificial Sequence: Synthetic oligonucleotide
  Antisense strand to SEQ ID NO: 989496
caccauacagauaugaucu

SEQ ID NO: 989498 - RNA, 19 nt, Artificial Sequence
  Description of Artificial Sequence: Synthetic oligonucleotide
  Sense strand starting at position 720 of SEQ ID NO: 914248
acucaaugucuuggaugga

SEQ ID NO: 989499 - RNA, 19 nt, Artificial Sequence
  Description of Artificial Sequence: Synthetic oligonucleotide
  Antisense strand to SEQ ID NO: 989498
uccauccaagacauugagu

SEQ ID NO: 989500 - RNA, 19 nt, Artificial Sequence
  Description of Artificial Sequence: Synthetic oligonucleotide
  Sense strand starting at position 796 of SEQ ID NO: 914248
uuggaugcuuaaucaaauu

SEQ ID NO: 989501 - RNA, 19 nt, Artificial Sequence
  Description of Artificial Sequence: Synthetic oligonucleotide
  Antisense strand to SEQ ID NO: 989500
aauuugauuaagcauccaa

SEQ ID NO: 989502 - RNA, 19 nt, Artificial Sequence
  Description of Artificial Sequence: Synthetic oligonucleotide
  Sense strand starting at position 1021 of SEQ ID NO: 914248
ggugauaagagguguuuag

SEQ ID NO: 989503 - RNA, 19 nt, Artificial Sequence
  Description of Artificial Sequence: Synthetic oligonucleotide
  Antisense strand to SEQ ID NO: 989502
cuaaacaccucuuaucacc

SEQ ID NO: 989504 - RNA, 19 nt, Artificial Sequence
  Description of Artificial Sequence: Synthetic oligonucleotide
  Sense strand starting at position 1196 of SEQ ID NO: 914248
gcuggagucaauuaaucug

SEQ ID NO: 989505 - RNA, 19 nt, Artificial Sequence
  Description of Artificial Sequence: Synthetic oligonucleotide
  Antisense strand to SEQ ID NO: 989504
cagauuaauugacuccagc

SEQ ID NO: 989506 - RNA, 19 nt, Artificial Sequence
  Description of Artificial Sequence: Synthetic oligonucleotide
  Sense strand starting at position 1199 of SEQ ID NO: 914248
ggagucaauuaaucugauc

SEQ ID NO: 989507 - RNA, 19 nt, Artificial Sequence
  Description of Artificial Sequence: Synthetic oligonucleotide
  Antisense strand to SEQ ID NO: 989506
gaucagauuaauugacucc

SEQ ID NO: 989508 - RNA, 19 nt, Artificial Sequence
  Description of Artificial Sequence: Synthetic oligonucleotide
  Sense strand starting at position 1253 of SEQ ID NO: 914248
gcaauaucaugggcacaga

SEQ ID NO: 989509 - RNA, 19 nt, Artificial Sequence
  Description of Artificial Sequence: Synthetic oligonucleotide
  Antisense strand to SEQ ID NO: 989508
ucugugcccaugauauugc

SEQ ID NO: 989510 - RNA, 19 nt, Artificial Sequence
  Description of Artificial Sequence: Synthetic oligonucleotide
  Sense strand starting at position 1278 of SEQ ID NO: 914248
gguuaugaaaucuggucaa

SEQ ID NO: 989511 - RNA, 19 nt, Artificial Sequence
  Description of Artificial Sequence: Synthetic oligonucleotide
  Antisense strand to SEQ ID NO: 989510
uugaccagauuucauaacc

SEQ ID NO: 989512 - RNA, 19 nt, Artificial Sequence
  Description of Artificial Sequence: Synthetic oligonucleotide
  Sense strand starting at position 1281 of SEQ ID NO: 914248
uaugaaaucuggucaaagu

SEQ ID NO: 989513 - RNA, 19 nt, Artificial Sequence
  Description of Artificial Sequence: Synthetic oligonucleotide
  Antisense strand to SEQ ID NO: 989512
acuuugaccagauuucaua

SEQ ID NO: 989514 - RNA, 19 nt, Artificial Sequence
  Description of Artificial Sequence: Synthetic oligonucleotide
  Sense strand starting at position 1352 of SEQ ID NO: 914248
gcucuagacgucgcucauu

SEQ ID NO: 989515 - RNA, 19 nt, Artificial Sequence
  Description of Artificial Sequence: Synthetic oligonucleotide
  Antisense strand to SEQ ID NO: 989514
aaugagcgacgucuagagc

SEQ ID NO: 989516 - RNA, 19 nt, Artificial Sequence
  Description of Artificial Sequence: Synthetic oligonucleotide
  Sense strand starting at position 1456 of SEQ ID NO: 914248
ggguccuugggauaugucu

SEQ ID NO: 989517 - RNA, 19 nt, Artificial Sequence
  Description of Artificial Sequence: Synthetic oligonucleotide
  Antisense strand to SEQ ID NO: 989516
agacauaucccaaggaccc

SEQ ID NO: 989518 - RNA, 19 nt, Artificial Sequence
  Description of Artificial Sequence: Synthetic oligonucleotide
  Sense strand starting at position 1464 of SEQ ID NO: 914248
gggauaugucuucacuggu

SEQ ID NO: 989519 - RNA, 19 nt, Artificial Sequence
  Description of Artificial Sequence: Synthetic oligonucleotide
  Antisense strand to SEQ ID NO: 989518
accagugaagacauauccc

SEQ ID NO: 989520 - RNA, 19 nt, Artificial Sequence
  Description of Artificial Sequence: Synthetic oligonucleotide
  Sense strand starting at position 1597 of SEQ ID NO: 914248
ucucauucccucugggaag

SEQ ID NO: 989521 - RNA, 19 nt, Artificial Sequence
  Description of Artificial Sequence: Synthetic oligonucleotide
  Antisense strand to SEQ ID NO: 989520
cuucccagagggaaugaga

SEQ ID NO: 989522 - RNA, 19 nt, Artificial Sequence
  Description of Artificial Sequence: Synthetic oligonucleotide
  Sense strand starting at position 1797 of SEQ ID NO: 914248
ggcuucuuuagggaugagu

SEQ ID NO: 989523 - RNA, 19 nt, Artificial Sequence
  Description of Artificial Sequence: Synthetic oligonucleotide
  Antisense strand to SEQ ID NO: 989522
acucaucccuaaagaagcc

SEQ ID NO: 989524 - RNA, 19 nt, Artificial Sequence
  Description of Artificial Sequence: Synthetic oligonucleotide
  Sense strand starting at position 1799 of SEQ ID NO: 914248
cuucuuuagggaugagucu

SEQ ID NO: 989525 - RNA, 19 nt, Artificial Sequence
  Description of Artificial Sequence: Synthetic oligonucleotide
  Antisense strand to SEQ ID NO: 989524
agacucaucccuaaagaag

SEQ ID NO: 989526 - RNA, 19 nt, Artificial Sequence
  Description of Artificial Sequence: Synthetic oligonucleotide
  Sense strand starting at position 1859 of SEQ ID NO: 914248
cgacguauucggucauccu

SEQ ID NO: 989527 - RNA, 19 nt, Artificial Sequence
  Description of Artificial Sequence: Synthetic oligonucleotide
  Antisense strand to SEQ ID NO: 989526
aggaugaccgaauacgucg

SEQ ID NO: 989528 - RNA, 19 nt, Artificial Sequence
  Description of Artificial Sequence: Synthetic oligonucleotide
  Sense strand starting at position 2429 of SEQ ID NO: 914248
cacaaauucgcguuugccu

SEQ ID NO: 989529 - RNA, 19 nt, Artificial Sequence
  Description of Artificial Sequence: Synthetic oligonucleotide
  Antisense strand to SEQ ID NO: 989528
aggcaaacgcgaauuugug

SEQ ID NO: 989530 - RNA, 19 nt, Artificial Sequence
  Description of Artificial Sequence: Synthetic oligonucleotide
  Sense strand starting at position 2539 of SEQ ID NO: 914248
cuagaucgggugcagaauu

SEQ ID NO: 989531 - RNA, 19 nt, Artificial Sequence
  Description of Artificial Sequence: Synthetic oligonucleotide
  Antisense strand to SEQ ID NO: 989530
aauucugcacccgaucuag

SEQ ID NO: 989532 - RNA, 19 nt, Artificial Sequence
  Description of Artificial Sequence: Synthetic oligonucleotide
  Sense strand starting at position 2627 of SEQ ID NO: 914248
ggcccuguucuccaggaga

SEQ ID NO: 989533 - RNA, 19 nt, Artificial Sequence
  Description of Artificial Sequence: Synthetic oligonucleotide
  Antisense strand to SEQ ID NO: 989532
ucuccuggagaacagggcc

SEQ ID NO: 989534 - RNA, 19 nt, Artificial Sequence
  Description of Artificial Sequence: Synthetic oligonucleotide
  Sense strand starting at position 2629 of SEQ ID NO: 914248
cccuguucuccaggagaug

SEQ ID NO: 989535 - RNA, 19 nt, Artificial Sequence
  Description of Artificial Sequence: Synthetic oligonucleotide
  Antisense strand to SEQ ID NO: 989534
caucuccuggagaacaggg

SEQ ID NO: 989536 - RNA, 19 nt, Artificial Sequence
  Description of Artificial Sequence: Synthetic oligonucleotide
  Sense strand starting at position 2630 of SEQ ID NO: 914248
ccuguucuccaggagaugu

SEQ ID NO: 989537 - RNA, 19 nt, Artificial Sequence
  Description of Artificial Sequence: Synthetic oligonucleotide
  Antisense strand to SEQ ID NO: 989536
acaucuccuggagaacagg

SEQ ID NO: 989538 - RNA, 19 nt, Artificial Sequence
  Description of Artificial Sequence: Synthetic oligonucleotide
  Sense strand starting at position 2827 of SEQ ID NO: 914248
gagucaagacgucauguca

SEQ ID NO: 989539 - RNA, 19 nt, Artificial Sequence
  Description of Artificial Sequence: Synthetic oligonucleotide
  Antisense strand to SEQ ID NO: 989538
ugacaugacgucuugacuc

SEQ ID NO: 989540 - RNA, 19 nt, Artificial Sequence
  Description of Artificial Sequence: Synthetic oligonucleotide
  Sense strand starting at position 2918 of SEQ ID NO: 914248
ggaggaauuucagaccagu

SEQ ID NO: 989541 - RNA, 19 nt, Artificial Sequence
  Description of Artificial Sequence: Synthetic oligonucleotide
  Antisense strand to SEQ ID NO: 989540
acuggucugaaauuccucc

SEQ ID NO: 989542 - RNA, 19 nt, Artificial Sequence
  Description of Artificial Sequence: Synthetic oligonucleotide
  Sense strand starting at position 2957 of SEQ ID NO: 914248
gggacaggcgcauaucaua

SEQ ID NO: 989543 - RNA, 19 nt, Artificial Sequence
  Description of Artificial Sequence: Synthetic oligonucleotide
  Antisense strand to SEQ ID NO: 989542
uaugauaugcgccuguccc

SEQ ID NO: 989544 - RNA, 19 nt, Artificial Sequence
  Description of Artificial Sequence: Synthetic oligonucleotide
  Sense strand starting at position 2968 of SEQ ID NO: 914248
auaucauaaagugggagua

SEQ ID NO: 989545 - RNA, 19 nt, Artificial Sequence
  Description of Artificial Sequence: Synthetic oligonucleotide
  Antisense strand to SEQ ID NO: 989544
uacucccacuuuaugauau

SEQ ID NO: 989546 - RNA, 19 nt, Artificial Sequence
  Description of Artificial Sequence: Synthetic oligonucleotide
  Sense strand starting at position 3047 of SEQ ID NO: 914248
ccaguuuggccucaggacu

SEQ ID NO: 989547 - RNA, 19 nt, Artificial Sequence
  Description of Artificial Sequence: Synthetic oligonucleotide
  Antisense strand to SEQ ID NO: 989546
aguccugaggccaaacugg

SEQ ID NO: 989548 - RNA, 19 nt, Artificial Sequence
  Description of Artificial Sequence: Synthetic oligonucleotide
  Sense strand starting at position 3136 of SEQ ID NO: 914248
ggaagcaaaucuccucaga

SEQ ID NO: 989549 - RNA, 19 nt, Artificial Sequence
  Description of Artificial Sequence: Synthetic oligonucleotide
  Antisense strand to SEQ ID NO: 989548
ucugaggagauuugcuucc

SEQ ID NO: 989550 - RNA, 19 nt, Artificial Sequence
  Description of Artificial Sequence: Synthetic oligonucleotide
  Sense strand starting at position 3146 of SEQ ID NO: 914248
cuccucagaucuuugggaa

SEQ ID NO: 989551 - RNA, 19 nt, Artificial Sequence
  Description of Artificial Sequence: Synthetic oligonucleotide
  Antisense strand to SEQ ID NO: 989550
uucccaaagaucugaggag

SEQ ID NO: 989552 - RNA, 19 nt, Artificial Sequence
  Description of Artificial Sequence: Synthetic oligonucleotide
  Sense strand starting at position 3147 of SEQ ID NO: 914248
uccucagaucuuugggaaa

SEQ ID NO: 989553 - RNA, 19 nt, Artificial Sequence
  Description of Artificial Sequence: Synthetic oligonucleotide
  Antisense strand to SEQ ID NO: 989552
uuucccaaagaucugagga

SEQ ID NO: 989554 - RNA, 19 nt, Artificial Sequence
  Description of Artificial Sequence: Synthetic oligonucleotide
  Sense strand starting at position 3808 of SEQ ID NO: 914248
ucaggauuaucugucuuua

SEQ ID NO: 989555 - RNA, 19 nt, Artificial Sequence
  Description of Artificial Sequence: Synthetic oligonucleotide
  Antisense strand to SEQ ID NO: 989554
uaaagacagauaauccuga

SEQ ID NO: 989556 - RNA, 19 nt, Artificial Sequence
  Description of Artificial Sequence: Synthetic oligonucleotide
  Sense strand starting at position 3810 of SEQ ID NO: 914248
aggauuaucugucuuuauu

SEQ ID NO: 989557 - RNA, 19 nt, Artificial Sequence
  Description of Artificial Sequence: Synthetic oligonucleotide
  Antisense strand to SEQ ID NO: 989556
aauaaagacagauaauccu

SEQ ID NO: 989558 - RNA, 19 nt, Artificial Sequence
  Description of Artificial Sequence: Synthetic oligonucleotide
  Sense strand starting at position 3888 of SEQ ID NO: 914248
cagaguugucauggaggag

SEQ ID NO: 989559 - RNA, 19 nt, Artificial Sequence
  Description of Artificial Sequence: Synthetic oligonucleotide
  Antisense strand to SEQ ID NO: 989558
cuccuccaugacaacucug

SEQ ID NO: 989560 - RNA, 19 nt, Artificial Sequence
  Description of Artificial Sequence: Synthetic oligonucleotide
  Sense strand starting at position 60 of SEQ ID NO: 914249
cagagauaguggcucauga

SEQ ID NO: 989561 - RNA, 19 nt, Artificial Sequence
  Description of Artificial Sequence: Synthetic oligonucleotide
  Antisense strand to SEQ ID NO: 989560
ucaugagccacuaucucug

SEQ ID NO: 989562 - RNA, 19 nt, Artificial Sequence
  Description of Artificial Sequence: Synthetic oligonucleotide
  Sense strand starting at position 117 of SEQ ID NO: 914249
agagcugggccuuaagaga

SEQ ID NO: 989563 - RNA, 19 nt, Artificial Sequence
  Description of Artificial Sequence: Synthetic oligonucleotide
  Antisense strand to SEQ ID NO: 989562
ucucuuaaggcccagcucu

SEQ ID NO: 989564 - RNA, 19 nt, Artificial Sequence
  Description of Artificial Sequence: Synthetic oligonucleotide
  Sense strand starting at position 147 of SEQ ID NO: 914249
gucuauggauucuugauac

SEQ ID NO: 989565 - RNA, 19 nt, Artificial Sequence
  Description of Artificial Sequence: Synthetic oligonucleotide
  Antisense strand to SEQ ID NO: 989564
guaucaagaauccauagac

SEQ ID NO: 989566 - RNA, 19 nt, Artificial Sequence
  Description of Artificial Sequence: Synthetic oligonucleotide
  Sense strand starting at position 180 of SEQ ID NO: 914249
gugguaaucagaggaacag

SEQ ID NO: 989567 - RNA, 19 nt, Artificial Sequence
  Description of Artificial Sequence: Synthetic oligonucleotide
  Antisense strand to SEQ ID NO: 989566
cuguuccucugauuaccac

SEQ ID NO: 989568 - RNA, 19 nt, Artificial Sequence
  Description of Artificial Sequence: Synthetic oligonucleotide
  Sense strand starting at position 258 of SEQ ID NO: 914249
ccugaugugcccuaggaau

SEQ ID NO: 989569 - RNA, 19 nt, Artificial Sequence
  Description of Artificial Sequence: Synthetic oligonucleotide
  Antisense strand to SEQ ID NO: 989568
auuccuagggcacaucagg

SEQ ID NO: 989570 - RNA, 19 nt, Artificial Sequence
  Description of Artificial Sequence: Synthetic oligonucleotide
  Sense strand starting at position 385 of SEQ ID NO: 914249
cugguuuaucauuagauac

SEQ ID NO: 989571 - RNA, 19 nt, Artificial Sequence
  Description of Artificial Sequence: Synthetic oligonucleotide
  Antisense strand to SEQ ID NO: 989570
guaucuaaugauaaaccag

SEQ ID NO: 989572 - RNA, 19 nt, Artificial Sequence
  Description of Artificial Sequence: Synthetic oligonucleotide
  Sense strand starting at position 432 of SEQ ID NO: 914249
cagagaucauaucuguaug

SEQ ID NO: 989573 - RNA, 19 nt, Artificial Sequence
  Description of Artificial Sequence: Synthetic oligonucleotide
  Antisense strand to SEQ ID NO: 989572
cauacagauaugaucucug

SEQ ID NO: 989574 - RNA, 19 nt, Artificial Sequence
  Description of Artificial Sequence: Synthetic oligonucleotide
  Sense strand starting at position 434 of SEQ ID NO: 914249
gagaucauaucuguauggu

SEQ ID NO: 989575 - RNA, 19 nt, Artificial Sequence
  Description of Artificial Sequence: Synthetic oligonucleotide
  Antisense strand to SEQ ID NO: 989574
accauacagauaugaucuc

SEQ ID NO: 989576 - RNA, 19 nt, Artificial Sequence
  Description of Artificial Sequence: Synthetic oligonucleotide
  Sense strand starting at position 435 of SEQ ID NO: 914249
agaucauaucuguauggug

SEQ ID NO: 989577 - RNA, 19 nt, Artificial Sequence
  Description of Artificial Sequence: Synthetic oligonucleotide
  Antisense strand to SEQ ID NO: 989576
caccauacagauaugaucu

SEQ ID NO: 989578 - RNA, 19 nt, Artificial Sequence
  Description of Artificial Sequence: Synthetic oligonucleotide
  Sense strand starting at position 501 of SEQ ID NO: 914249
acucaaugucuuggaugga

SEQ ID NO: 989579 - RNA, 19 nt, Artificial Sequence
  Description of Artificial Sequence: Synthetic oligonucleotide
  Antisense strand to SEQ ID NO: 989578
uccauccaagacauugagu

SEQ ID NO: 989580 - RNA, 19 nt, Artificial Sequence
  Description of Artificial Sequence: Synthetic oligonucleotide
  Sense strand starting at position 577 of SEQ ID NO: 914249
uuggaugcuuaaucaaauu

SEQ ID NO: 989581 - RNA, 19 nt, Artificial Sequence
  Description of Artificial Sequence: Synthetic oligonucleotide
  Antisense strand to SEQ ID NO: 989580
aauuugauuaagcauccaa

SEQ ID NO: 989582 - RNA, 19 nt, Artificial Sequence
  Description of Artificial Sequence: Synthetic oligonucleotide
  Sense strand starting at position 802 of SEQ ID NO: 914249
ggugauaagagguguuuag

SEQ ID NO: 989583 - RNA, 19 nt, Artificial Sequence
  Description of Artificial Sequence: Synthetic oligonucleotide
  Antisense strand to SEQ ID NO: 989582
cuaaacaccucuuaucacc

SEQ ID NO: 989584 - RNA, 19 nt, Artificial Sequence
  Description of Artificial Sequence: Synthetic oligonucleotide
  Sense strand starting at position 977 of SEQ ID NO: 914249
gcuggagucaauuaaucug

SEQ ID NO: 989585 - RNA, 19 nt, Artificial Sequence
  Description of Artificial Sequence: Synthetic oligonucleotide
  Antisense strand to SEQ ID NO: 989584
cagauuaauugacuccagc

SEQ ID NO: 989586 - RNA, 19 nt, Artificial Sequence
  Description of Artificial Sequence: Synthetic oligonucleotide
  Sense strand starting at position 980 of SEQ ID NO: 914249
ggagucaauuaaucugauc

SEQ ID NO: 989587 - RNA, 19 nt, Artificial Sequence
  Description of Artificial Sequence: Synthetic oligonucleotide
  Antisense strand to SEQ ID NO: 989586
gaucagauuaauugacucc

SEQ ID NO: 989588 - RNA, 19 nt, Artificial Sequence
  Description of Artificial Sequence: Synthetic oligonucleotide
  Sense strand starting at position 1034 of SEQ ID NO: 914249
gcaauaucaugggcacaga

SEQ ID NO: 989589 - RNA, 19 nt, Artificial Sequence
  Description of Artificial Sequence: Synthetic oligonucleotide
  Antisense strand to SEQ ID NO: 989588
ucugugcccaugauauugc

SEQ ID NO: 989590 - RNA, 19 nt, Artificial Sequence
  Description of Artificial Sequence: Synthetic oligonucleotide
  Sense strand starting at position 1059 of SEQ ID NO: 914249
gguuaugaaaucuggucaa

SEQ ID NO: 989591 - RNA, 19 nt, Artificial Sequence
  Description of Artificial Sequence: Synthetic oligonucleotide
  Antisense strand to SEQ ID NO: 989590
uugaccagauuucauaacc

SEQ ID NO: 989592 - RNA, 19 nt, Artificial Sequence
  Description of Artificial Sequence: Synthetic oligonucleotide
  Sense strand starting at position 1062 of SEQ ID NO: 914249
uaugaaaucuggucaaagu

SEQ ID NO: 989593 - RNA, 19 nt, Artificial Sequence
  Description of Artificial Sequence: Synthetic oligonucleotide
  Antisense strand to SEQ ID NO: 989592
acuuugaccagauuucaua

SEQ ID NO: 989594 - RNA, 19 nt, Artificial Sequence
  Description of Artificial Sequence: Synthetic oligonucleotide
  Sense strand starting at position 1133 of SEQ ID NO: 914249
gcucuagacgucgcucauu

SEQ ID NO: 989595 - RNA, 19 nt, Artificial Sequence
  Description of Artificial Sequence: Synthetic oligonucleotide
  Antisense strand to SEQ ID NO: 989594
aaugagcgacgucuagagc

SEQ ID NO: 989596 - RNA, 19 nt, Artificial Sequence
  Description of Artificial Sequence: Synthetic oligonucleotide
  Sense strand starting at position 1237 of SEQ ID NO: 914249
ggguccuugggauaugucu

SEQ ID NO: 989597 - RNA, 19 nt, Artificial Sequence
  Description of Artificial Sequence: Synthetic oligonucleotide
  Antisense strand to SEQ ID NO: 989596
agacauaucccaaggaccc

SEQ ID NO: 989598 - RNA, 19 nt, Artificial Sequence
  Description of Artificial Sequence: Synthetic oligonucleotide
  Sense strand starting at position 1245 of SEQ ID NO: 914249
gggauaugucuucacuggu

SEQ ID NO: 989599 - RNA, 19 nt, Artificial Sequence
  Description of Artificial Sequence: Synthetic oligonucleotide
  Antisense strand to SEQ ID NO: 989598
accagugaagacauauccc

SEQ ID NO: 989600 - RNA, 19 nt, Artificial Sequence
  Description of Artificial Sequence: Synthetic oligonucleotide
  Sense strand starting at position 1378 of SEQ ID NO: 914249
ucucauucccucugggaag

SEQ ID NO: 989601 - RNA, 19 nt, Artificial Sequence
  Description of Artificial Sequence: Synthetic oligonucleotide
  Antisense strand to SEQ ID NO: 989600
cuucccagagggaaugaga

SEQ ID NO: 989602 - RNA, 19 nt, Artificial Sequence
  Description of Artificial Sequence: Synthetic oligonucleotide
  Sense strand starting at position 1578 of SEQ ID NO: 914249
ggcuucuuuagggaugagu

SEQ ID NO: 989603 - RNA, 19 nt, Artificial Sequence
  Description of Artificial Sequence: Synthetic oligonucleotide
  Antisense strand to SEQ ID NO: 989602
acucaucccuaaagaagcc

SEQ ID NO: 989604 - RNA, 19 nt, Artificial Sequence
  Description of Artificial Sequence: Synthetic oligonucleotide
  Sense strand starting at position 1580 of SEQ ID NO: 914249
cuucuuuagggaugagucu

SEQ ID NO: 989605 - RNA, 19 nt, Artificial Sequence
  Description of Artificial Sequence: Synthetic oligonucleotide
  Antisense strand to SEQ ID NO: 989604
agacucaucccuaaagaag

SEQ ID NO: 989606 - RNA, 19 nt, Artificial Sequence
  Description of Artificial Sequence: Synthetic oligonucleotide
  Sense strand starting at position 1640 of SEQ ID NO: 914249
cgacguauucggucauccu

SEQ ID NO: 989607 - RNA, 19 nt, Artificial Sequence
  Description of Artificial Sequence: Synthetic oligonucleotide
  Antisense strand to SEQ ID NO: 989606
aggaugaccgaauacgucg

SEQ ID NO: 989608 - RNA, 19 nt, Artificial Sequence
  Description of Artificial Sequence: Synthetic oligonucleotide
  Sense strand starting at position 2210 of SEQ ID NO: 914249
cacaaauucgcguuugccu

SEQ ID NO: 989609 - RNA, 19 nt, Artificial Sequence
  Description of Artificial Sequence: Synthetic oligonucleotide
  Antisense strand to SEQ ID NO: 989608
aggcaaacgcgaauuugug

SEQ ID NO: 989610 - RNA, 19 nt, Artificial Sequence
  Description of Artificial Sequence: Synthetic oligonucleotide
  Sense strand starting at position 2320 of SEQ ID NO: 914249
cuagaucgggugcagaauu

SEQ ID NO: 989611 - RNA, 19 nt, Artificial Sequence
  Description of Artificial Sequence: Synthetic oligonucleotide
  Antisense strand to SEQ ID NO: 989610
aauucugcacccgaucuag

SEQ ID NO: 989612 - RNA, 19 nt, Artificial Sequence
  Description of Artificial Sequence: Synthetic oligonucleotide
  Sense strand starting at position 2408 of SEQ ID NO: 914249
ggcccuguucuccaggaga

SEQ ID NO: 989613 - RNA, 19 nt, Artificial Sequence
  Description of Artificial Sequence: Synthetic oligonucleotide
  Antisense strand to SEQ ID NO: 989612
ucuccuggagaacagggcc

SEQ ID NO: 989614 - RNA, 19 nt, Artificial Sequence
  Description of Artificial Sequence: Synthetic oligonucleotide
  Sense strand starting at position 2410 of SEQ ID NO: 914249
cccuguucuccaggagaug

SEQ ID NO: 989615 - RNA, 19 nt, Artificial Sequence
  Description of Artificial Sequence: Synthetic oligonucleotide
  Antisense strand to SEQ ID NO: 989614
caucuccuggagaacaggg

SEQ ID NO: 989616 - RNA, 19 nt, Artificial Sequence
  Description of Artificial Sequence: Synthetic oligonucleotide
  Sense strand starting at position 2411 of SEQ ID NO: 914249
ccuguucuccaggagaugu

SEQ ID NO: 989617 - RNA, 19 nt, Artificial Sequence
  Description of Artificial Sequence: Synthetic oligonucleotide
  Antisense strand to SEQ ID NO: 989616
acaucuccuggagaacagg

SEQ ID NO: 989618 - RNA, 19 nt, Artificial Sequence
  Description of Artificial Sequence: Synthetic oligonucleotide
  Sense strand starting at position 2608 of SEQ ID NO: 914249
gagucaagacgucauguca

SEQ ID NO: 989619 - RNA, 19 nt, Artificial Sequence
  Description of Artificial Sequence: Synthetic oligonucleotide
  Antisense strand to SEQ ID NO: 989618
ugacaugacgucuugacuc

SEQ ID NO: 989620 - RNA, 19 nt, Artificial Sequence
  Description of Artificial Sequence: Synthetic oligonucleotide
  Sense strand starting at position 2699 of SEQ ID NO: 914249
ggaggaauuucagaccagu

SEQ ID NO: 989621 - RNA, 19 nt, Artificial Sequence
  Description of Artificial Sequence: Synthetic oligonucleotide
  Antisense strand to SEQ ID NO: 989620
acuggucugaaauuccucc

SEQ ID NO: 989622 - RNA, 19 nt, Artificial Sequence
  Description of Artificial Sequence: Synthetic oligonucleotide
  Sense strand starting at position 2738 of SEQ ID NO: 914249
gggacaggcgcauaucaua

SEQ ID NO: 989623 - RNA, 19 nt, Artificial Sequence
  Description of Artificial Sequence: Synthetic oligonucleotide
  Antisense strand to SEQ ID NO: 989622
uaugauaugcgccuguccc

SEQ ID NO: 989624 - RNA, 19 nt, Artificial Sequence
  Description of Artificial Sequence: Synthetic oligonucleotide
  Sense strand starting at position 2749 of SEQ ID NO: 914249
auaucauaaagugggagua

SEQ ID NO: 989625 - RNA, 19 nt, Artificial Sequence
  Description of Artificial Sequence: Synthetic oligonucleotide
  Antisense strand to SEQ ID NO: 989624
uacucccacuuuaugauau

SEQ ID NO: 989626 - RNA, 19 nt, Artificial Sequence
  Description of Artificial Sequence: Synthetic oligonucleotide
  Sense strand starting at position 2828 of SEQ ID NO: 914249
ccaguuuggccucaggacu

SEQ ID NO: 989627 - RNA, 19 nt, Artificial Sequence
  Description of Artificial Sequence: Synthetic oligonucleotide
  Antisense strand to SEQ ID NO: 989626
aguccugaggccaaacugg

SEQ ID NO: 989628 - RNA, 19 nt, Artificial Sequence
  Description of Artificial Sequence: Synthetic oligonucleotide
  Sense strand starting at position 2917 of SEQ ID NO: 914249
ggaagcaaaucuccucaga

SEQ ID NO: 989629 - RNA, 19 nt, Artificial Sequence
  Description of Artificial Sequence: Synthetic oligonucleotide
  Antisense strand to SEQ ID NO: 989628
ucugaggagauuugcuucc

SEQ ID NO: 989630 - RNA, 19 nt, Artificial Sequence
  Description of Artificial Sequence: Synthetic oligonucleotide
  Sense strand starting at position 2927 of SEQ ID NO: 914249
cuccucagaucuuugggaa

SEQ ID NO: 989631 - RNA, 19 nt, Artificial Sequence
  Description of Artificial Sequence: Synthetic oligonucleotide
  Antisense strand to SEQ ID NO: 989630
uucccaaagaucugaggag

SEQ ID NO: 989632 - RNA, 19 nt, Artificial Sequence
  Description of Artificial Sequence: Synthetic oligonucleotide
  Sense strand starting at position 2928 of SEQ ID NO: 914249
uccucagaucuuugggaaa

SEQ ID NO: 989633 - RNA, 19 nt, Artificial Sequence
  Description of Artificial Sequence: Synthetic oligonucleotide
  Antisense strand to SEQ ID NO: 989632
uuucccaaagaucugagga

SEQ ID NO: 989634 - RNA, 19 nt, Artificial Sequence
  Description of Artificial Sequence: Synthetic oligonucleotide
  Sense strand starting at position 3589 of SEQ ID NO: 914249
ucaggauuaucugucuuua

SEQ ID NO: 989635 - RNA, 19 nt, Artificial Sequence
  Description of Artificial Sequence: Synthetic oligonucleotide
  Antisense strand to SEQ ID NO: 989634
uaaagacagauaauccuga

SEQ ID NO: 989636 - RNA, 19 nt, Artificial Sequence
  Description of Artificial Sequence: Synthetic oligonucleotide
  Sense strand starting at position 3669 of SEQ ID NO: 914249
cagaguugucauggaggag

SEQ ID NO: 989637 - RNA, 19 nt, Artificial Sequence
  Description of Artificial Sequence: Synthetic oligonucleotide
  Antisense strand to SEQ ID NO: 989636
cuccuccaugacaacucug

SEQ ID NO: 989638 - RNA, 19 nt, Artificial Sequence
  Description of Artificial Sequence: Synthetic oligonucleotide
  Sense strand starting at position 3963 of SEQ ID NO: 914249
ggaagugacuugcccaaau

SEQ ID NO: 989639 - RNA, 19 nt, Artificial Sequence
  Description of Artificial Sequence: Synthetic oligonucleotide
  Antisense strand to SEQ ID NO: 989638
auuugggcaagucacuucc

SEQ ID NO: 989640 - RNA, 19 nt, Artificial Sequence
  Description of Artificial Sequence: Synthetic oligonucleotide
  Sense strand starting at position 157 of SEQ ID NO: 914250
uggaguuguccugaguacu

SEQ ID NO: 989641 - RNA, 19 nt, Artificial Sequence
  Description of Artificial Sequence: Synthetic oligonucleotide
  Antisense strand to SEQ ID NO: 989640
aguacucaggacaacucca

SEQ ID NO: 989642 - RNA, 19 nt, Artificial Sequence
  Description of Artificial Sequence: Synthetic oligonucleotide
  Sense strand starting at position 160 of SEQ ID NO: 914250
aguuguccugaguacuuaa

SEQ ID NO: 989643 - RNA, 19 nt, Artificial Sequence
  Description of Artificial Sequence: Synthetic oligonucleotide
  Antisense strand to SEQ ID NO: 989642
uuaaguacucaggacaacu

SEQ ID NO: 989644 - RNA, 19 nt, Artificial Sequence
  Description of Artificial Sequence: Synthetic oligonucleotide
  Sense strand starting at position 163 of SEQ ID NO: 914250
uguccugaguacuuaauaa

SEQ ID NO: 989645 - RNA, 19 nt, Artificial Sequence
  Description of Artificial Sequence: Synthetic oligonucleotide
  Antisense strand to SEQ ID NO: 989644
uuauuaaguacucaggaca

SEQ ID NO: 989646 - RNA, 19 nt, Artificial Sequence
  Description of Artificial Sequence: Synthetic oligonucleotide
  Sense strand starting at position 627 of SEQ ID NO: 914250
cucaucauugacugucaga

SEQ ID NO: 989647 - RNA, 19 nt, Artificial Sequence
  Description of Artificial Sequence: Synthetic oligonucleotide
  Antisense strand to SEQ ID NO: 989646
ucugacagucaaugaugag

SEQ ID NO: 989648 - RNA, 19 nt, Artificial Sequence
  Description of Artificial Sequence: Synthetic oligonucleotide
  Sense strand starting at position 799 of SEQ ID NO: 914250
gaucuuugaggcugaggua

SEQ ID NO: 989649 - RNA, 19 nt, Artificial Sequence
  Description of Artificial Sequence: Synthetic oligonucleotide
  Antisense strand to SEQ ID NO: 989648
uaccucagccucaaagauc

SEQ ID NO: 989650 - RNA, 19 nt, Artificial Sequence
  Description of Artificial Sequence: Synthetic oligonucleotide
  Sense strand starting at position 848 of SEQ ID NO: 914250
agaaucuugcgauagauau

SEQ ID NO: 989651 - RNA, 19 nt, Artificial Sequence
  Description of Artificial Sequence: Synthetic oligonucleotide
  Antisense strand to SEQ ID NO: 989650
auaucuaucgcaagauucu

SEQ ID NO: 989652 - RNA, 19 nt, Artificial Sequence
  Description of Artificial Sequence: Synthetic oligonucleotide
  Sense strand starting at position 895 of SEQ ID NO: 914250
aucagugacuuucuaaaug

SEQ ID NO: 989653 - RNA, 19 nt, Artificial Sequence
  Description of Artificial Sequence: Synthetic oligonucleotide
  Antisense strand to SEQ ID NO: 989652
cauuuagaaagucacugau

SEQ ID NO: 989654 - RNA, 19 nt, Artificial Sequence
  Description of Artificial Sequence: Synthetic oligonucleotide
  Sense strand starting at position 918 of SEQ ID NO: 914250
gggugagaauauguugaua

SEQ ID NO: 989655 - RNA, 19 nt, Artificial Sequence
  Description of Artificial Sequence: Synthetic oligonucleotide
  Antisense strand to SEQ ID NO: 989654
uaucaacauauucucaccc

SEQ ID NO: 989656 - RNA, 19 nt, Artificial Sequence
  Description of Artificial Sequence: Synthetic oligonucleotide
  Sense strand starting at position 1126 of SEQ ID NO: 914250
augugacuggcacauacua

SEQ ID NO: 989657 - RNA, 19 nt, Artificial Sequence
  Description of Artificial Sequence: Synthetic oligonucleotide
  Antisense strand to SEQ ID NO: 989656
uaguaugugccagucacau

SEQ ID NO: 989658 - RNA, 19 nt, Artificial Sequence
  Description of Artificial Sequence: Synthetic oligonucleotide
  Sense strand starting at position 1215 of SEQ ID NO: 914250
ucugacagucgacauuaua

SEQ ID NO: 989659 - RNA, 19 nt, Artificial Sequence
  Description of Artificial Sequence: Synthetic oligonucleotide
  Antisense strand to SEQ ID NO: 989658
uauaaugucgacugucaga

SEQ ID NO: 989660 - RNA, 19 nt, Artificial Sequence
  Description of Artificial Sequence: Synthetic oligonucleotide
  Sense strand starting at position 1404 of SEQ ID NO: 914250
ccuauagcucugucguguu

SEQ ID NO: 989661 - RNA, 19 nt, Artificial Sequence
  Description of Artificial Sequence: Synthetic oligonucleotide
  Antisense strand to SEQ ID NO: 989660
aacacgacagagcuauagg

SEQ ID NO: 989662 - RNA, 19 nt, Artificial Sequence
  Description of Artificial Sequence: Synthetic oligonucleotide
  Sense strand starting at position 1408 of SEQ ID NO: 914250
uagcucugucguguucuga

SEQ ID NO: 989663 - RNA, 19 nt, Artificial Sequence
  Description of Artificial Sequence: Synthetic oligonucleotide
  Antisense strand to SEQ ID NO: 989662
ucagaacacgacagagcua

SEQ ID NO: 989664 - RNA, 19 nt, Artificial Sequence
  Description of Artificial Sequence: Synthetic oligonucleotide
  Sense strand starting at position 1416 of SEQ ID NO: 914250
ucguguucugagguuguuu

SEQ ID NO: 989665 - RNA, 19 nt, Artificial Sequence
  Description of Artificial Sequence: Synthetic oligonucleotide
  Antisense strand to SEQ ID NO: 989664
aaacaaccucagaacacga

SEQ ID NO: 989666 - RNA, 19 nt, Artificial Sequence
  Description of Artificial Sequence: Synthetic oligonucleotide
  Sense strand starting at position 1581 of SEQ ID NO: 914250
uauaaauguugaguggcua

SEQ ID NO: 989667 - RNA, 19 nt, Artificial Sequence
  Description of Artificial Sequence: Synthetic oligonucleotide
  Antisense strand to SEQ ID NO: 989666
uagccacucaacauuuaua

SEQ ID NO: 989668 - RNA, 19 nt, Artificial Sequence
  Description of Artificial Sequence: Synthetic oligonucleotide
  Sense strand starting at position 1582 of SEQ ID NO: 914250
auaaauguugaguggcuaa

SEQ ID NO: 989669 - RNA, 19 nt, Artificial Sequence
  Description of Artificial Sequence: Synthetic oligonucleotide
  Antisense strand to SEQ ID NO: 989668
uuagccacucaacauuuau

SEQ ID NO: 989670 - RNA, 19 nt, Artificial Sequence
  Description of Artificial Sequence: Synthetic oligonucleotide
  Sense strand starting at position 1633 of SEQ ID NO: 914250
gggacccucugacuguaaa

SEQ ID NO: 989671 - RNA, 19 nt, Artificial Sequence
  Description of Artificial Sequence: Synthetic oligonucleotide
  Antisense strand to SEQ ID NO: 989670
uuuacagucagaggguccc

SEQ ID NO: 989672 - RNA, 19 nt, Artificial Sequence
  Description of Artificial Sequence: Synthetic oligonucleotide
  Sense strand starting at position 1644 of SEQ ID NO: 914250
acuguaaagcuaugacuag

SEQ ID NO: 989673 - RNA, 19 nt, Artificial Sequence
  Description of Artificial Sequence: Synthetic oligonucleotide
  Antisense strand to SEQ ID NO: 989672
cuagucauagcuuuacagu

SEQ ID NO: 989674 - RNA, 19 nt, Artificial Sequence
  Description of Artificial Sequence: Synthetic oligonucleotide
  Sense strand starting at position 1711 of SEQ ID NO: 914250
ucuugauucugacucagau

SEQ ID NO: 989675 - RNA, 19 nt, Artificial Sequence
  Description of Artificial Sequence: Synthetic oligonucleotide
  Antisense strand to SEQ ID NO: 989674
aucugagucagaaucaaga

SEQ ID NO: 989676 - RNA, 19 nt, Artificial Sequence
  Description of Artificial Sequence: Synthetic oligonucleotide
  Sense strand starting at position 1721 of SEQ ID NO: 914250
gacucagauugguuugggu

SEQ ID NO: 989677 - RNA, 19 nt, Artificial Sequence
  Description of Artificial Sequence: Synthetic oligonucleotide
  Antisense strand to SEQ ID NO: 989676
acccaaaccaaucugaguc

SEQ ID NO: 989678 - RNA, 19 nt, Artificial Sequence
  Description of Artificial Sequence: Synthetic oligonucleotide
  Sense strand starting at position 1723 of SEQ ID NO: 914250
cucagauugguuuggguga

SEQ ID NO: 989679 - RNA, 19 nt, Artificial Sequence
  Description of Artificial Sequence: Synthetic oligonucleotide
  Antisense strand to SEQ ID NO: 989678
ucacccaaaccaaucugag

SEQ ID NO: 989680 - RNA, 19 nt, Artificial Sequence
  Description of Artificial Sequence: Synthetic oligonucleotide
  Sense strand starting at position 1731 of SEQ ID NO: 914250
gguuugggugacugagaga

SEQ ID NO: 989681 - RNA, 19 nt, Artificial Sequence
  Description of Artificial Sequence: Synthetic oligonucleotide
  Antisense strand to SEQ ID NO: 989680
ucucucagucacccaaacc

SEQ ID NO: 989682 - RNA, 19 nt, Artificial Sequence
  Description of Artificial Sequence: Synthetic oligonucleotide
  Sense strand starting at position 2003 of SEQ ID NO: 914250
agaaguaacccauguuucu

SEQ ID NO: 989683 - RNA, 19 nt, Artificial Sequence
  Description of Artificial Sequence: Synthetic oligonucleotide
  Antisense strand to SEQ ID NO: 989682
agaaacauggguuacuucu

SEQ ID NO: 989684 - RNA, 19 nt, Artificial Sequence
  Description of Artificial Sequence: Synthetic oligonucleotide
  Sense strand starting at position 2256 of SEQ ID NO: 914250
augagauguaauuguugau

SEQ ID NO: 989685 - RNA, 19 nt, Artificial Sequence
  Description of Artificial Sequence: Synthetic oligonucleotide
  Antisense strand to SEQ ID NO: 989684
aucaacaauuacaucucau

SEQ ID NO: 989686 - RNA, 19 nt, Artificial Sequence
  Description of Artificial Sequence: Synthetic oligonucleotide
  Sense strand starting at position 2260 of SEQ ID NO: 914250
gauguaauuguugauuguu

SEQ ID NO: 989687 - RNA, 19 nt, Artificial Sequence
  Description of Artificial Sequence: Synthetic oligonucleotide
  Antisense strand to SEQ ID NO: 989686
aacaaucaacaauuacauc

SEQ ID NO: 989688 - RNA, 19 nt, Artificial Sequence
  Description of Artificial Sequence: Synthetic oligonucleotide
  Sense strand starting at position 2313 of SEQ ID NO: 914250
ucugaucuguacccuggaa

SEQ ID NO: 989689 - RNA, 19 nt, Artificial Sequence
  Description of Artificial Sequence: Synthetic oligonucleotide
  Antisense strand to SEQ ID NO: 989688
uuccaggguacagaucaga

SEQ ID NO: 989690 - RNA, 19 nt, Artificial Sequence
  Description of Artificial Sequence: Synthetic oligonucleotide
  Sense strand starting at position 2317 of SEQ ID NO: 914250
aucuguacccuggaagguu

SEQ ID NO: 989691 - RNA, 19 nt, Artificial Sequence
  Description of Artificial Sequence: Synthetic oligonucleotide
  Antisense strand to SEQ ID NO: 989690
aaccuuccaggguacagau

SEQ ID NO: 989692 - RNA, 19 nt, Artificial Sequence
  Description of Artificial Sequence: Synthetic oligonucleotide
  Sense strand starting at position 2357 of SEQ ID NO: 914250
cugaaugcuggcuggauuu

SEQ ID NO: 989693 - RNA, 19 nt, Artificial Sequence
  Description of Artificial Sequence: Synthetic oligonucleotide
  Antisense strand to SEQ ID NO: 989692
aaauccagccagcauucag

SEQ ID NO: 989694 - RNA, 19 nt, Artificial Sequence
  Description of Artificial Sequence: Synthetic oligonucleotide
  Sense strand starting at position 2609 of SEQ ID NO: 914250
cccucuuaggccuagggau

SEQ ID NO: 989695 - RNA, 19 nt, Artificial Sequence
  Description of Artificial Sequence: Synthetic oligonucleotide
  Antisense strand to SEQ ID NO: 989694
aucccuaggccuaagaggg

SEQ ID NO: 989696 - RNA, 19 nt, Artificial Sequence
  Description of Artificial Sequence: Synthetic oligonucleotide
  Sense strand starting at position 2615 of SEQ ID NO: 914250
uaggccuagggaugauaau

SEQ ID NO: 989697 - RNA, 19 nt, Artificial Sequence
  Description of Artificial Sequence: Synthetic oligonucleotide
  Antisense strand to SEQ ID NO: 989696
auuaucaucccuaggccua

SEQ ID NO: 989698 - RNA, 19 nt, Artificial Sequence
  Description of Artificial Sequence: Synthetic oligonucleotide
  Sense strand starting at position 2624 of SEQ ID NO: 914250
ggaugauaaugguuuccug

SEQ ID NO: 989699 - RNA, 19 nt, Artificial Sequence
  Description of Artificial Sequence: Synthetic oligonucleotide
  Antisense strand to SEQ ID NO: 989698
caggaaaccauuaucaucc

SEQ ID NO: 989700 - RNA, 19 nt, Artificial Sequence
  Description of Artificial Sequence: Synthetic oligonucleotide
  Sense strand starting at position 2771 of SEQ ID NO: 914250
ggcaaacucaaauggguaa

SEQ ID NO: 989701 - RNA, 19 nt, Artificial Sequence
  Description of Artificial Sequence: Synthetic oligonucleotide
  Antisense strand to SEQ ID NO: 989700
uuacccauuugaguuugcc

SEQ ID NO: 989702 - RNA, 19 nt, Artificial Sequence
  Description of Artificial Sequence: Synthetic oligonucleotide
  Sense strand starting at position 2941 of SEQ ID NO: 914250
ggaggauugaguggcaaag

SEQ ID NO: 989703 - RNA, 19 nt, Artificial Sequence
  Description of Artificial Sequence: Synthetic oligonucleotide
  Antisense strand to SEQ ID NO: 989702
cuuugccacucaauccucc

SEQ ID NO: 989704 - RNA, 19 nt, Artificial Sequence
  Description of Artificial Sequence: Synthetic oligonucleotide
  Sense strand starting at position 3251 of SEQ ID NO: 914250
cugggaagauguucccaua

SEQ ID NO: 989705 - RNA, 19 nt, Artificial Sequence
  Description of Artificial Sequence: Synthetic oligonucleotide
  Antisense strand to SEQ ID NO: 989704
uaugggaacaucuucccag

SEQ ID NO: 989706 - RNA, 19 nt, Artificial Sequence
  Description of Artificial Sequence: Synthetic oligonucleotide
  Sense strand starting at position 3329 of SEQ ID NO: 914250
cccagcagagugugauaaa

SEQ ID NO: 989707 - RNA, 19 nt, Artificial Sequence
  Description of Artificial Sequence: Synthetic oligonucleotide
  Antisense strand to SEQ ID NO: 989706
uuuaucacacucugcuggg

SEQ ID NO: 989708 - RNA, 19 nt, Artificial Sequence
  Description of Artificial Sequence: Synthetic oligonucleotide
  Sense strand starting at position 3518 of SEQ ID NO: 914250
guuggacucuaagcuugaa

SEQ ID NO: 989709 - RNA, 19 nt, Artificial Sequence
  Description of Artificial Sequence: Synthetic oligonucleotide
  Antisense strand to SEQ ID NO: 989708
uucaagcuuagaguccaac

SEQ ID NO: 989710 - RNA, 19 nt, Artificial Sequence
  Description of Artificial Sequence: Synthetic oligonucleotide
  Sense strand starting at position 3542 of SEQ ID NO: 914250
agacccugucuugacuauu

SEQ ID NO: 989711 - RNA, 19 nt, Artificial Sequence
  Description of Artificial Sequence: Synthetic oligonucleotide
  Antisense strand to SEQ ID NO: 989710
aauagucaagacagggucu

SEQ ID NO: 989712 - RNA, 19 nt, Artificial Sequence
  Description of Artificial Sequence: Synthetic oligonucleotide
  Sense strand starting at position 3641 of SEQ ID NO: 914250
cugccucauagaggagaau

SEQ ID NO: 989713 - RNA, 19 nt, Artificial Sequence
  Description of Artificial Sequence: Synthetic oligonucleotide
  Antisense strand to SEQ ID NO: 989712
auucuccucuaugaggcag

SEQ ID NO: 989714 - RNA, 19 nt, Artificial Sequence
  Description of Artificial Sequence: Synthetic oligonucleotide
  Sense strand starting at position 3748 of SEQ ID NO: 914250
aaaguuacuugacuugagu

SEQ ID NO: 989715 - RNA, 19 nt, Artificial Sequence
  Description of Artificial Sequence: Synthetic oligonucleotide
  Antisense strand to SEQ ID NO: 989714
acucaagucaaguaacuuu

SEQ ID NO: 989716 - RNA, 19 nt, Artificial Sequence
  Description of Artificial Sequence: Synthetic oligonucleotide
  Sense strand starting at position 3771 of SEQ ID NO: 914250
ggauaaagcuaggauuucu

SEQ ID NO: 989717 - RNA, 19 nt, Artificial Sequence
  Description of Artificial Sequence: Synthetic oligonucleotide
  Antisense strand to SEQ ID NO: 989716
agaaauccuagcuuuaucc

SEQ ID NO: 989718 - RNA, 19 nt, Artificial Sequence
  Description of Artificial Sequence: Synthetic oligonucleotide
  Sense strand starting at position 3803 of SEQ ID NO: 914250
guuccuuuacaguagagaa

SEQ ID NO: 989719 - RNA, 19 nt, Artificial Sequence
  Description of Artificial Sequence: Synthetic oligonucleotide
  Antisense strand to SEQ ID NO: 989718
uucucuacuguaaaggaac

SEQ ID NO: 989720 - RNA, 19 nt, Artificial Sequence
  Description of Artificial Sequence: Synthetic oligonucleotide
  Sense strand starting at position 116 of SEQ ID NO: 914251
gcuccaagacugugugaag

SEQ ID NO: 989721 - RNA, 19 nt, Artificial Sequence
  Description of Artificial Sequence: Synthetic oligonucleotide
  Antisense strand to SEQ ID NO: 989720
cuucacacagucuuggagc

SEQ ID NO: 989722 - RNA, 19 nt, Artificial Sequence
  Description of Artificial Sequence: Synthetic oligonucleotide
  Sense strand starting at position 216 of SEQ ID NO: 914251
ggauguuuauuaccaccuu

SEQ ID NO: 989723 - RNA, 19 nt, Artificial Sequence
  Description of Artificial Sequence: Synthetic oligonucleotide
  Antisense strand to SEQ ID NO: 989722
aaggugguaauaaacaucc

SEQ ID NO: 989724 - RNA, 19 nt, Artificial Sequence
  Description of Artificial Sequence: Synthetic oligonucleotide
  Sense strand starting at position 315 of SEQ ID NO: 914251
ugcugugccagccauugaa

SEQ ID NO: 989725 - RNA, 19 nt, Artificial Sequence
  Description of Artificial Sequence: Synthetic oligonucleotide
  Antisense strand to SEQ ID NO: 989724
uucaauggcuggcacagca

SEQ ID NO: 989726 - RNA, 19 nt, Artificial Sequence
  Description of Artificial Sequence: Synthetic oligonucleotide
  Sense strand starting at position 374 of SEQ ID NO: 914251
agauguuccugauaauuug

SEQ ID NO: 989727 - RNA, 19 nt, Artificial Sequence
  Description of Artificial Sequence: Synthetic oligonucleotide
  Antisense strand to SEQ ID NO: 989726
caaauuaucaggaacaucu

SEQ ID NO: 989728 - RNA, 19 nt, Artificial Sequence
  Description of Artificial Sequence: Synthetic oligonucleotide
  Sense strand starting at position 382 of SEQ ID NO: 914251
cugauaauuuguuagguga

SEQ ID NO: 989729 - RNA, 19 nt, Artificial Sequence
  Description of Artificial Sequence: Synthetic oligonucleotide
  Antisense strand to SEQ ID NO: 989728
ucaccuaacaaauuaucag

SEQ ID NO: 989730 - RNA, 19 nt, Artificial Sequence
  Description of Artificial Sequence: Synthetic oligonucleotide
  Sense strand starting at position 384 of SEQ ID NO: 914251
gauaauuuguuaggugaca

SEQ ID NO: 989731 - RNA, 19 nt, Artificial Sequence
  Description of Artificial Sequence: Synthetic oligonucleotide
  Antisense strand to SEQ ID NO: 989730
ugucaccuaacaaauuauc

SEQ ID NO: 989732 - RNA, 19 nt, Artificial Sequence
  Description of Artificial Sequence: Synthetic oligonucleotide
  Sense strand starting at position 414 of SEQ ID NO: 914251
cagacuggcacgugucaua

SEQ ID NO: 989733 - RNA, 19 nt, Artificial Sequence
  Description of Artificial Sequence: Synthetic oligonucleotide
  Antisense strand to SEQ ID NO: 989732
uaugacacgugccagucug

SEQ ID NO: 989734 - RNA, 19 nt, Artificial Sequence
  Description of Artificial Sequence: Synthetic oligonucleotide
  Sense strand starting at position 685 of SEQ ID NO: 914251
gcagaaguacucugauucu

SEQ ID NO: 989735 - RNA, 19 nt, Artificial Sequence
  Description of Artificial Sequence: Synthetic oligonucleotide
  Antisense strand to SEQ ID NO: 989734
agaaucagaguacuucugc

SEQ ID NO: 989736 - RNA, 19 nt, Artificial Sequence
  Description of Artificial Sequence: Synthetic oligonucleotide
  Sense strand starting at position 700 of SEQ ID NO: 914251
uucuaaauucugggacucu

SEQ ID NO: 989737 - RNA, 19 nt, Artificial Sequence
  Description of Artificial Sequence: Synthetic oligonucleotide
  Antisense strand to SEQ ID NO: 989736
agagucccagaauuuagaa

SEQ ID NO: 989738 - RNA, 19 nt, Artificial Sequence
  Description of Artificial Sequence: Synthetic oligonucleotide
  Sense strand starting at position 755 of SEQ ID NO: 914251
ugcccucuccuggagucau

SEQ ID NO: 989739 - RNA, 19 nt, Artificial Sequence
  Description of Artificial Sequence: Synthetic oligonucleotide
  Antisense strand to SEQ ID NO: 989738
augacuccaggagagggca

SEQ ID NO: 989740 - RNA, 19 nt, Artificial Sequence
  Description of Artificial Sequence: Synthetic oligonucleotide
  Sense strand starting at position 763 of SEQ ID NO: 914251
ccuggagucauacaguguu

SEQ ID NO: 989741 - RNA, 19 nt, Artificial Sequence
  Description of Artificial Sequence: Synthetic oligonucleotide
  Antisense strand to SEQ ID NO: 989740
aacacuguaugacuccagg

SEQ ID NO: 989742 - RNA, 19 nt, Artificial Sequence
  Description of Artificial Sequence: Synthetic oligonucleotide
  Sense strand starting at position 860 of SEQ ID NO: 914251
cccucuggccuggaucauu

SEQ ID NO: 989743 - RNA, 19 nt, Artificial Sequence
  Description of Artificial Sequence: Synthetic oligonucleotide
  Antisense strand to SEQ ID NO: 989742
aaugauccaggccagaggg

SEQ ID NO: 989744 - RNA, 19 nt, Artificial Sequence
  Description of Artificial Sequence: Synthetic oligonucleotide
  Sense strand starting at position 916 of SEQ ID NO: 914251
ugggaaagucugggaguga

SEQ ID NO: 989745 - RNA, 19 nt, Artificial Sequence
  Description of Artificial Sequence: Synthetic oligonucleotide
  Antisense strand to SEQ ID NO: 989744
ucacucccagacuuuccca

SEQ ID NO: 989746 - RNA, 19 nt, Artificial Sequence
  Description of Artificial Sequence: Synthetic oligonucleotide
  Sense strand starting at position 1177 of SEQ ID NO: 914251
ggguaaagauccucagguu

SEQ ID NO: 989747 - RNA, 19 nt, Artificial Sequence
  Description of Artificial Sequence: Synthetic oligonucleotide
  Antisense strand to SEQ ID NO: 989746
aaccugaggaucuuuaccc

SEQ ID NO: 989748 - RNA, 19 nt, Artificial Sequence
  Description of Artificial Sequence: Synthetic oligonucleotide
  Sense strand starting at position 1178 of SEQ ID NO: 914251
gguaaagauccucagguug

SEQ ID NO: 989749 - RNA, 19 nt, Artificial Sequence
  Description of Artificial Sequence: Synthetic oligonucleotide
  Antisense strand to SEQ ID NO: 989748
caaccugaggaucuuuacc

SEQ ID NO: 989750 - RNA, 19 nt, Artificial Sequence
  Description of Artificial Sequence: Synthetic oligonucleotide
  Sense strand starting at position 1201 of SEQ ID NO: 914251
gguccugaugucugacagu

SEQ ID NO: 989751 - RNA, 19 nt, Artificial Sequence
  Description of Artificial Sequence: Synthetic oligonucleotide
  Antisense strand to SEQ ID NO: 989750
acugucagacaucaggacc

SEQ ID NO: 989752 - RNA, 19 nt, Artificial Sequence
  Description of Artificial Sequence: Synthetic oligonucleotide
  Sense strand starting at position 1210 of SEQ ID NO: 914251
gucugacagucugugaugu

SEQ ID NO: 989753 - RNA, 19 nt, Artificial Sequence
  Description of Artificial Sequence: Synthetic oligonucleotide
  Antisense strand to SEQ ID NO: 989752
acaucacagacugucagac

SEQ ID NO: 989754 - RNA, 19 nt, Artificial Sequence
  Description of Artificial Sequence: Synthetic oligonucleotide
  Sense strand starting at position 1421 of SEQ ID NO: 914251
agaagauucuucuuucuga

SEQ ID NO: 989755 - RNA, 19 nt, Artificial Sequence
  Description of Artificial Sequence: Synthetic oligonucleotide
  Antisense strand to SEQ ID NO: 989754
ucagaaagaagaaucuucu

SEQ ID NO: 989756 - RNA, 19 nt, Artificial Sequence
  Description of Artificial Sequence: Synthetic oligonucleotide
  Sense strand starting at position 1642 of SEQ ID NO: 914251
ggauuagcacucuagguua

SEQ ID NO: 989757 - RNA, 19 nt, Artificial Sequence
  Description of Artificial Sequence: Synthetic oligonucleotide
  Antisense strand to SEQ ID NO: 989756
uaaccuagagugcuaaucc

SEQ ID NO: 989758 - RNA, 19 nt, Artificial Sequence
  Description of Artificial Sequence: Synthetic oligonucleotide
  Sense strand starting at position 1644 of SEQ ID NO: 914251
auuagcacucuagguuaaa

SEQ ID NO: 989759 - RNA, 19 nt, Artificial Sequence
  Description of Artificial Sequence: Synthetic oligonucleotide
  Antisense strand to SEQ ID NO: 989758
uuuaaccuagagugcuaau

SEQ ID NO: 989760 - RNA, 19 nt, Artificial Sequence
  Description of Artificial Sequence: Synthetic oligonucleotide
  Sense strand starting at position 1645 of SEQ ID NO: 914251
uuagcacucuagguuaaag

SEQ ID NO: 989761 - RNA, 19 nt, Artificial Sequence
  Description of Artificial Sequence: Synthetic oligonucleotide
  Antisense strand to SEQ ID NO: 989760
cuuuaaccuagagugcuaa

SEQ ID NO: 989762 - RNA, 19 nt, Artificial Sequence
  Description of Artificial Sequence: Synthetic oligonucleotide
  Sense strand starting at position 1685 of SEQ ID NO: 914251
cugagaugcccaggacaaa

SEQ ID NO: 989763 - RNA, 19 nt, Artificial Sequence
  Description of Artificial Sequence: Synthetic oligonucleotide
  Antisense strand to SEQ ID NO: 989762
uuuguccugggcaucucag

SEQ ID NO: 989764 - RNA, 19 nt, Artificial Sequence
  Description of Artificial Sequence: Synthetic oligonucleotide
  Sense strand starting at position 1989 of SEQ ID NO: 914251
ucgaauucgcacuaaauau

SEQ ID NO: 989765 - RNA, 19 nt, Artificial Sequence
  Description of Artificial Sequence: Synthetic oligonucleotide
  Antisense strand to SEQ ID NO: 989764
auauuuagugcgaauucga

SEQ ID NO: 989766 - RNA, 19 nt, Artificial Sequence
  Description of Artificial Sequence: Synthetic oligonucleotide
  Sense strand starting at position 2665 of SEQ ID NO: 914251
guccguuggccagaucaac

SEQ ID NO: 989767 - RNA, 19 nt, Artificial Sequence
  Description of Artificial Sequence: Synthetic oligonucleotide
  Antisense strand to SEQ ID NO: 989766
guugaucuggccaacggac

SEQ ID NO: 989768 - RNA, 19 nt, Artificial Sequence
  Description of Artificial Sequence: Synthetic oligonucleotide
  Sense strand starting at position 2744 of SEQ ID NO: 914251
uucuauuggccguagcaga

SEQ ID NO: 989769 - RNA, 19 nt, Artificial Sequence
  Description of Artificial Sequence: Synthetic oligonucleotide
  Antisense strand to SEQ ID NO: 989768
ucugcuacggccaauagaa

SEQ ID NO: 989770 - RNA, 19 nt, Artificial Sequence
  Description of Artificial Sequence: Synthetic oligonucleotide
  Sense strand starting at position 3190 of SEQ ID NO: 914251
agauguuagaaccggguua

SEQ ID NO: 989771 - RNA, 19 nt, Artificial Sequence
  Description of Artificial Sequence: Synthetic oligonucleotide
  Antisense strand to SEQ ID NO: 989770
uaacccgguucuaacaucu

SEQ ID NO: 989772 - RNA, 19 nt, Artificial Sequence
  Description of Artificial Sequence: Synthetic oligonucleotide
  Sense strand starting at position 3192 of SEQ ID NO: 914251
auguuagaaccggguuaca

SEQ ID NO: 989773 - RNA, 19 nt, Artificial Sequence
  Description of Artificial Sequence: Synthetic oligonucleotide
  Antisense strand to SEQ ID NO: 989772
uguaacccgguucuaacau

SEQ ID NO: 989774 - RNA, 19 nt, Artificial Sequence
  Description of Artificial Sequence: Synthetic oligonucleotide
  Sense strand starting at position 3195 of SEQ ID NO: 914251
uuagaaccggguuacauua

SEQ ID NO: 989775 - RNA, 19 nt, Artificial Sequence
  Description of Artificial Sequence: Synthetic oligonucleotide
  Antisense strand to SEQ ID NO: 989774
uaauguaacccgguucuaa

SEQ ID NO: 989776 - RNA, 19 nt, Artificial Sequence
  Description of Artificial Sequence: Synthetic oligonucleotide
  Sense strand starting at position 3212 of SEQ ID NO: 914251
uaggauccagguuguuaga

SEQ ID NO: 989777 - RNA, 19 nt, Artificial Sequence
  Description of Artificial Sequence: Synthetic oligonucleotide
  Antisense strand to SEQ ID NO: 989776
ucuaacaaccuggauccua

SEQ ID NO: 989778 - RNA, 19 nt, Artificial Sequence
  Description of Artificial Sequence: Synthetic oligonucleotide
  Sense strand starting at position 3214 of SEQ ID NO: 914251
ggauccagguuguuagaau

SEQ ID NO: 989779 - RNA, 19 nt, Artificial Sequence
  Description of Artificial Sequence: Synthetic oligonucleotide
  Antisense strand to SEQ ID NO: 989778
auucuaacaaccuggaucc

SEQ ID NO: 989780 - RNA, 19 nt, Artificial Sequence
  Description of Artificial Sequence: Synthetic oligonucleotide
  Sense strand starting at position 3223 of SEQ ID NO: 914251
uuguuagaaucagacauuu

SEQ ID NO: 989781 - RNA, 19 nt, Artificial Sequence
  Description of Artificial Sequence: Synthetic oligonucleotide
  Antisense strand to SEQ ID NO: 989780
aaaugucugauucuaacaa

SEQ ID NO: 989782 - RNA, 19 nt, Artificial Sequence
  Description of Artificial Sequence: Synthetic oligonucleotide
  Sense strand starting at position 3264 of SEQ ID NO: 914251
gcuagaauugaguguuauu

SEQ ID NO: 989783 - RNA, 19 nt, Artificial Sequence
  Description of Artificial Sequence: Synthetic oligonucleotide
  Antisense strand to SEQ ID NO: 989782
aauaacacucaauucuagc

SEQ ID NO: 989784 - RNA, 19 nt, Artificial Sequence
  Description of Artificial Sequence: Synthetic oligonucleotide
  Sense strand starting at position 3353 of SEQ ID NO: 914251
agaacaaauuccugauuug

SEQ ID NO: 989785 - RNA, 19 nt, Artificial Sequence
  Description of Artificial Sequence: Synthetic oligonucleotide
  Antisense strand to SEQ ID NO: 989784
caaaucaggaauuuguucu

SEQ ID NO: 989786 - RNA, 19 nt, Artificial Sequence
  Description of Artificial Sequence: Synthetic oligonucleotide
  Sense strand starting at position 3421 of SEQ ID NO: 914251
augcuagaaggugauagua

SEQ ID NO: 989787 - RNA, 19 nt, Artificial Sequence
  Description of Artificial Sequence: Synthetic oligonucleotide
  Antisense strand to SEQ ID NO: 989786
uacuaucaccuucuagcau

SEQ ID NO: 989788 - RNA, 19 nt, Artificial Sequence
  Description of Artificial Sequence: Synthetic oligonucleotide
  Sense strand starting at position 3429 of SEQ ID NO: 914251
aggugauaguaguuuggaa

SEQ ID NO: 989789 - RNA, 19 nt, Artificial Sequence
  Description of Artificial Sequence: Synthetic oligonucleotide
  Antisense strand to SEQ ID NO: 989788
uuccaaacuacuaucaccu

SEQ ID NO: 989790 - RNA, 19 nt, Artificial Sequence
  Description of Artificial Sequence: Synthetic oligonucleotide
  Sense strand starting at position 3431 of SEQ ID NO: 914251
gugauaguaguuuggaaac

SEQ ID NO: 989791 - RNA, 19 nt, Artificial Sequence
  Description of Artificial Sequence: Synthetic oligonucleotide
  Antisense strand to SEQ ID NO: 989790
guuuccaaacuacuaucac

SEQ ID NO: 989792 - RNA, 19 nt, Artificial Sequence
  Description of Artificial Sequence: Synthetic oligonucleotide
  Sense strand starting at position 3814 of SEQ ID NO: 914251
ggugguaaauucucaucac

SEQ ID NO: 989793 - RNA, 19 nt, Artificial Sequence
  Description of Artificial Sequence: Synthetic oligonucleotide
  Antisense strand to SEQ ID NO: 989792
gugaugagaauuuaccacc

SEQ ID NO: 989794 - RNA, 19 nt, Artificial Sequence
  Description of Artificial Sequence: Synthetic oligonucleotide
  Sense strand starting at position 3835 of SEQ ID NO: 914251
aaauaugaguguuugaggu

SEQ ID NO: 989795 - RNA, 19 nt, Artificial Sequence
  Description of Artificial Sequence: Synthetic oligonucleotide
  Antisense strand to SEQ ID NO: 989794
accucaaacacucauauuu

SEQ ID NO: 989796 - RNA, 19 nt, Artificial Sequence
  Description of Artificial Sequence: Synthetic oligonucleotide
  Sense strand starting at position 3856 of SEQ ID NO: 914251
uggcuauccuaauuagcuu

SEQ ID NO: 989797 - RNA, 19 nt, Artificial Sequence
  Description of Artificial Sequence: Synthetic oligonucleotide
  Antisense strand to SEQ ID NO: 989796
aagcuaauuaggauagcca

SEQ ID NO: 989798 - RNA, 19 nt, Artificial Sequence
  Description of Artificial Sequence: Synthetic oligonucleotide
  Sense strand starting at position 3912 of SEQ ID NO: 914251
cuugguaucccauaaguau

SEQ ID NO: 989799 - RNA, 19 nt, Artificial Sequence
  Description of Artificial Sequence: Synthetic oligonucleotide
  Antisense strand to SEQ ID NO: 989798
auacuuaugggauaccaag

SEQ ID NO: 989800 - RNA, 19 nt, Artificial Sequence
  Description of Artificial Sequence: Synthetic oligonucleotide
  Sense strand starting at position 239 of SEQ ID NO: 914252
gcagaaguacucugauucu

SEQ ID NO: 989801 - RNA, 19 nt, Artificial Sequence
  Description of Artificial Sequence: Synthetic oligonucleotide
  Antisense strand to SEQ ID NO: 989800
agaaucagaguacuucugc

SEQ ID NO: 989802 - RNA, 19 nt, Artificial Sequence
  Description of Artificial Sequence: Synthetic oligonucleotide
  Sense strand starting at position 254 of SEQ ID NO: 914252
uucuaaauucugggacucu

SEQ ID NO: 989803 - RNA, 19 nt, Artificial Sequence
  Description of Artificial Sequence: Synthetic oligonucleotide
  Antisense strand to SEQ ID NO: 989802
agagucccagaauuuagaa

SEQ ID NO: 989804 - RNA, 19 nt, Artificial Sequence
  Description of Artificial Sequence: Synthetic oligonucleotide
  Sense strand starting at position 309 of SEQ ID NO: 914252
ugcccucuccuggagucau

SEQ ID NO: 989805 - RNA, 19 nt, Artificial Sequence
  Description of Artificial Sequence: Synthetic oligonucleotide
  Antisense strand to SEQ ID NO: 989804
augacuccaggagagggca

SEQ ID NO: 989806 - RNA, 19 nt, Artificial Sequence
  Description of Artificial Sequence: Synthetic oligonucleotide
  Sense strand starting at position 317 of SEQ ID NO: 914252
ccuggagucauacaguguu

SEQ ID NO: 989807 - RNA, 19 nt, Artificial Sequence
  Description of Artificial Sequence: Synthetic oligonucleotide
  Antisense strand to SEQ ID NO: 989806
aacacuguaugacuccagg

SEQ ID NO: 989808 - RNA, 19 nt, Artificial Sequence
  Description of Artificial Sequence: Synthetic oligonucleotide
  Sense strand starting at position 414 of SEQ ID NO: 914252
cccucuggccuggaucauu

SEQ ID NO: 989809 - RNA, 19 nt, Artificial Sequence
  Description of Artificial Sequence: Synthetic oligonucleotide
  Antisense strand to SEQ ID NO: 989808
aaugauccaggccagaggg

SEQ ID NO: 989810 - RNA, 19 nt, Artificial Sequence
  Description of Artificial Sequence: Synthetic oligonucleotide
  Sense strand starting at position 470 of SEQ ID NO: 914252
ugggaaagucugggaguga

SEQ ID NO: 989811 - RNA, 19 nt, Artificial Sequence
  Description of Artificial Sequence: Synthetic oligonucleotide
  Antisense strand to SEQ ID NO: 989810
ucacucccagacuuuccca

SEQ ID NO: 989812 - RNA, 19 nt, Artificial Sequence
  Description of Artificial Sequence: Synthetic oligonucleotide
  Sense strand starting at position 471 of SEQ ID NO: 914252
gggaaagucugggagugaa

SEQ ID NO: 989813 - RNA, 19 nt, Artificial Sequence
  Description of Artificial Sequence: Synthetic oligonucleotide
  Antisense strand to SEQ ID NO: 989812
uucacucccagacuuuccc

SEQ ID NO: 989814 - RNA, 19 nt, Artificial Sequence
  Description of Artificial Sequence: Synthetic oligonucleotide
  Sense strand starting at position 731 of SEQ ID NO: 914252
ggguaaagauccucagguu

SEQ ID NO: 989815 - RNA, 19 nt, Artificial Sequence
  Description of Artificial Sequence: Synthetic oligonucleotide
  Antisense strand to SEQ ID NO: 989814
aaccugaggaucuuuaccc

SEQ ID NO: 989816 - RNA, 19 nt, Artificial Sequence
  Description of Artificial Sequence: Synthetic oligonucleotide
  Sense strand starting at position 732 of SEQ ID NO: 914252
gguaaagauccucagguug

SEQ ID NO: 989817 - RNA, 19 nt, Artificial Sequence
  Description of Artificial Sequence: Synthetic oligonucleotide
  Antisense strand to SEQ ID NO: 989816
caaccugaggaucuuuacc

SEQ ID NO: 989818 - RNA, 19 nt, Artificial Sequence
  Description of Artificial Sequence: Synthetic oligonucleotide
  Sense strand starting at position 755 of SEQ ID NO: 914252
gguccugaugucugacagu

SEQ ID NO: 989819 - RNA, 19 nt, Artificial Sequence
  Description of Artificial Sequence: Synthetic oligonucleotide
  Antisense strand to SEQ ID NO: 989818
acugucagacaucaggacc

SEQ ID NO: 989820 - RNA, 19 nt, Artificial Sequence
  Description of Artificial Sequence: Synthetic oligonucleotide
  Sense strand starting at position 764 of SEQ ID NO: 914252
gucugacagucugugaugu

SEQ ID NO: 989821 - RNA, 19 nt, Artificial Sequence
  Description of Artificial Sequence: Synthetic oligonucleotide
  Antisense strand to SEQ ID NO: 989820
acaucacagacugucagac

SEQ ID NO: 989822 - RNA, 19 nt, Artificial Sequence
  Description of Artificial Sequence: Synthetic oligonucleotide
  Sense strand starting at position 975 of SEQ ID NO: 914252
agaagauucuucuuucuga

SEQ ID NO: 989823 - RNA, 19 nt, Artificial Sequence
  Description of Artificial Sequence: Synthetic oligonucleotide
  Antisense strand to SEQ ID NO: 989822
ucagaaagaagaaucuucu

SEQ ID NO: 989824 - RNA, 19 nt, Artificial Sequence
  Description of Artificial Sequence: Synthetic oligonucleotide
  Sense strand starting at position 1196 of SEQ ID NO: 914252
ggauuagcacucuagguua

SEQ ID NO: 989825 - RNA, 19 nt, Artificial Sequence
  Description of Artificial Sequence: Synthetic oligonucleotide
  Antisense strand to SEQ ID NO: 989824
uaaccuagagugcuaaucc

SEQ ID NO: 989826 - RNA, 19 nt, Artificial Sequence
  Description of Artificial Sequence: Synthetic oligonucleotide
  Sense strand starting at position 1198 of SEQ ID NO: 914252
auuagcacucuagguuaaa

SEQ ID NO: 989827 - RNA, 19 nt, Artificial Sequence
  Description of Artificial Sequence: Synthetic oligonucleotide
  Antisense strand to SEQ ID NO: 989826
uuuaaccuagagugcuaau

SEQ ID NO: 989828 - RNA, 19 nt, Artificial Sequence
  Description of Artificial Sequence: Synthetic oligonucleotide
  Sense strand starting at position 1199 of SEQ ID NO: 914252
uuagcacucuagguuaaag

SEQ ID NO: 989829 - RNA, 19 nt, Artificial Sequence
  Description of Artificial Sequence: Synthetic oligonucleotide
  Antisense strand to SEQ ID NO: 989828
cuuuaaccuagagugcuaa

SEQ ID NO: 989830 - RNA, 19 nt, Artificial Sequence
  Description of Artificial Sequence: Synthetic oligonucleotide
  Sense strand starting at position 1239 of SEQ ID NO: 914252
cugagaugcccaggacaaa

SEQ ID NO: 989831 - RNA, 19 nt, Artificial Sequence
  Description of Artificial Sequence: Synthetic oligonucleotide
  Antisense strand to SEQ ID NO: 989830
uuuguccugggcaucucag

SEQ ID NO: 989832 - RNA, 19 nt, Artificial Sequence
  Description of Artificial Sequence: Synthetic oligonucleotide
  Sense strand starting at position 1543 of SEQ ID NO: 914252
ucgaauucgcacuaaauau

SEQ ID NO: 989833 - RNA, 19 nt, Artificial Sequence
  Description of Artificial Sequence: Synthetic oligonucleotide
  Antisense strand to SEQ ID NO: 989832
auauuuagugcgaauucga

SEQ ID NO: 989834 - RNA, 19 nt, Artificial Sequence
  Description of Artificial Sequence: Synthetic oligonucleotide
  Sense strand starting at position 2219 of SEQ ID NO: 914252
guccguuggccagaucaac

SEQ ID NO: 989835 - RNA, 19 nt, Artificial Sequence
  Description of Artificial Sequence: Synthetic oligonucleotide
  Antisense strand to SEQ ID NO: 989834
guugaucuggccaacggac

SEQ ID NO: 989836 - RNA, 19 nt, Artificial Sequence
  Description of Artificial Sequence: Synthetic oligonucleotide
  Sense strand starting at position 2298 of SEQ ID NO: 914252
uucuauuggccguagcaga

SEQ ID NO: 989837 - RNA, 19 nt, Artificial Sequence
  Description of Artificial Sequence: Synthetic oligonucleotide
  Antisense strand to SEQ ID NO: 989836
ucugcuacggccaauagaa

SEQ ID NO: 989838 - RNA, 19 nt, Artificial Sequence
  Description of Artificial Sequence: Synthetic oligonucleotide
  Sense strand starting at position 2744 of SEQ ID NO: 914252
agauguuagaaccggguua

SEQ ID NO: 989839 - RNA, 19 nt, Artificial Sequence
  Description of Artificial Sequence: Synthetic oligonucleotide
  Antisense strand to SEQ ID NO: 989838
uaacccgguucuaacaucu

SEQ ID NO: 989840 - RNA, 19 nt, Artificial Sequence
  Description of Artificial Sequence: Synthetic oligonucleotide
  Sense strand starting at position 2746 of SEQ ID NO: 914252
auguuagaaccggguuaca

SEQ ID NO: 989841 - RNA, 19 nt, Artificial Sequence
  Description of Artificial Sequence: Synthetic oligonucleotide
  Antisense strand to SEQ ID NO: 989840
uguaacccgguucuaacau

SEQ ID NO: 989842 - RNA, 19 nt, Artificial Sequence
  Description of Artificial Sequence: Synthetic oligonucleotide
  Sense strand starting at position 2749 of SEQ ID NO: 914252
uuagaaccggguuacauua

SEQ ID NO: 989843 - RNA, 19 nt, Artificial Sequence
  Description of Artificial Sequence: Synthetic oligonucleotide
  Antisense strand to SEQ ID NO: 989842
uaauguaacccgguucuaa

SEQ ID NO: 989844 - RNA, 19 nt, Artificial Sequence
  Description of Artificial Sequence: Synthetic oligonucleotide
  Sense strand starting at position 2766 of SEQ ID NO: 914252
uaggauccagguuguuaga

SEQ ID NO: 989845 - RNA, 19 nt, Artificial Sequence
  Description of Artificial Sequence: Synthetic oligonucleotide
  Antisense strand to SEQ ID NO: 989844
ucuaacaaccuggauccua

SEQ ID NO: 989846 - RNA, 19 nt, Artificial Sequence
  Description of Artificial Sequence: Synthetic oligonucleotide
  Sense strand starting at position 2768 of SEQ ID NO: 914252
ggauccagguuguuagaau

SEQ ID NO: 989847 - RNA, 19 nt, Artificial Sequence
  Description of Artificial Sequence: Synthetic oligonucleotide
  Antisense strand to SEQ ID NO: 989846
auucuaacaaccuggaucc

SEQ ID NO: 989848 - RNA, 19 nt, Artificial Sequence
  Description of Artificial Sequence: Synthetic oligonucleotide
  Sense strand starting at position 2777 of SEQ ID NO: 914252
uuguuagaaucagacauuu

SEQ ID NO: 989849 - RNA, 19 nt, Artificial Sequence
  Description of Artificial Sequence: Synthetic oligonucleotide
  Antisense strand to SEQ ID NO: 989848
aaaugucugauucuaacaa

SEQ ID NO: 989850 - RNA, 19 nt, Artificial Sequence
  Description of Artificial Sequence: Synthetic oligonucleotide
  Sense strand starting at position 2818 of SEQ ID NO: 914252
gcuagaauugaguguuauu

SEQ ID NO: 989851 - RNA, 19 nt, Artificial Sequence
  Description of Artificial Sequence: Synthetic oligonucleotide
  Antisense strand to SEQ ID NO: 989850
aauaacacucaauucuagc

SEQ ID NO: 989852 - RNA, 19 nt, Artificial Sequence
  Description of Artificial Sequence: Synthetic oligonucleotide
  Sense strand starting at position 2907 of SEQ ID NO: 914252
agaacaaauuccugauuug

SEQ ID NO: 989853 - RNA, 19 nt, Artificial Sequence
  Description of Artificial Sequence: Synthetic oligonucleotide
  Antisense strand to SEQ ID NO: 989852
caaaucaggaauuuguucu

SEQ ID NO: 989854 - RNA, 19 nt, Artificial Sequence
  Description of Artificial Sequence: Synthetic oligonucleotide
  Sense strand starting at position 2975 of SEQ ID NO: 914252
augcuagaaggugauagua

SEQ ID NO: 989855 - RNA, 19 nt, Artificial Sequence
  Description of Artificial Sequence: Synthetic oligonucleotide
  Antisense strand to SEQ ID NO: 989854
uacuaucaccuucuagcau

SEQ ID NO: 989856 - RNA, 19 nt, Artificial Sequence
  Description of Artificial Sequence: Synthetic oligonucleotide
  Sense strand starting at position 2983 of SEQ ID NO: 914252
aggugauaguaguuuggaa

SEQ ID NO: 989857 - RNA, 19 nt, Artificial Sequence
  Description of Artificial Sequence: Synthetic oligonucleotide
  Antisense strand to SEQ ID NO: 989856
uuccaaacuacuaucaccu

SEQ ID NO: 989858 - RNA, 19 nt, Artificial Sequence
  Description of Artificial Sequence: Synthetic oligonucleotide
  Sense strand starting at position 2985 of SEQ ID NO: 914252
gugauaguaguuuggaaac

SEQ ID NO: 989859 - RNA, 19 nt, Artificial Sequence
  Description of Artificial Sequence: Synthetic oligonucleotide
  Antisense strand to SEQ ID NO: 989858
guuuccaaacuacuaucac

SEQ ID NO: 989860 - RNA, 19 nt, Artificial Sequence
  Description of Artificial Sequence: Synthetic oligonucleotide
  Sense strand starting at position 3368 of SEQ ID NO: 914252
ggugguaaauucucaucac

SEQ ID NO: 989861 - RNA, 19 nt, Artificial Sequence
  Description of Artificial Sequence: Synthetic oligonucleotide
  Antisense strand to SEQ ID NO: 989860
gugaugagaauuuaccacc

SEQ ID NO: 989862 - RNA, 19 nt, Artificial Sequence
  Description of Artificial Sequence: Synthetic oligonucleotide
  Sense strand starting at position 3389 of SEQ ID NO: 914252
aaauaugaguguuugaggu

SEQ ID NO: 989863 - RNA, 19 nt, Artificial Sequence
  Description of Artificial Sequence: Synthetic oligonucleotide
  Antisense strand to SEQ ID NO: 989862
accucaaacacucauauuu

SEQ ID NO: 989864 - RNA, 19 nt, Artificial Sequence
  Description of Artificial Sequence: Synthetic oligonucleotide
  Sense strand starting at position 3410 of SEQ ID NO: 914252
uggcuauccuaauuagcuu

SEQ ID NO: 989865 - RNA, 19 nt, Artificial Sequence
  Description of Artificial Sequence: Synthetic oligonucleotide
  Antisense strand to SEQ ID NO: 989864
aagcuaauuaggauagcca

SEQ ID NO: 989866 - RNA, 19 nt, Artificial Sequence
  Description of Artificial Sequence: Synthetic oligonucleotide
  Sense strand starting at position 3466 of SEQ ID NO: 914252
cuugguaucccauaaguau

SEQ ID NO: 989867 - RNA, 19 nt, Artificial Sequence
  Description of Artificial Sequence: Synthetic oligonucleotide
  Antisense strand to SEQ ID NO: 989866
auacuuaugggauaccaag

SEQ ID NO: 989868 - RNA, 19 nt, Artificial Sequence
  Description of Artificial Sequence: Synthetic oligonucleotide
  Sense strand starting at position 3603 of SEQ ID NO: 914252
ugaucacaccugugaacaa

SEQ ID NO: 989869 - RNA, 19 nt, Artificial Sequence
  Description of Artificial Sequence: Synthetic oligonucleotide
  Antisense strand to SEQ ID NO: 989868
uuguucacaggugugauca

SEQ ID NO: 989870 - RNA, 19 nt, Artificial Sequence
  Description of Artificial Sequence: Synthetic oligonucleotide
  Sense strand starting at position 3698 of SEQ ID NO: 914252
uacauaaauguguggucaa

SEQ ID NO: 989871 - RNA, 19 nt, Artificial Sequence
  Description of Artificial Sequence: Synthetic oligonucleotide
  Antisense strand to SEQ ID NO: 989870
uugaccacacauuuaugua

SEQ ID NO: 989872 - RNA, 19 nt, Artificial Sequence
  Description of Artificial Sequence: Synthetic oligonucleotide
  Sense strand starting at position 3773 of SEQ ID NO: 914252
cgguuagccaugugggaau

SEQ ID NO: 989873 - RNA, 19 nt, Artificial Sequence
  Description of Artificial Sequence: Synthetic oligonucleotide
  Antisense strand to SEQ ID NO: 989872
auucccacauggcuaaccg

SEQ ID NO: 989874 - RNA, 19 nt, Artificial Sequence
  Description of Artificial Sequence: Synthetic oligonucleotide
  Sense strand starting at position 3857 of SEQ ID NO: 914252
cagcauguauguucccaga

SEQ ID NO: 989875 - RNA, 19 nt, Artificial Sequence
  Description of Artificial Sequence: Synthetic oligonucleotide
  Antisense strand to SEQ ID NO: 989874
ucugggaacauacaugcug

SEQ ID NO: 989876 - RNA, 19 nt, Artificial Sequence
  Description of Artificial Sequence: Synthetic oligonucleotide
  Sense strand starting at position 3859 of SEQ ID NO: 914252
gcauguauguucccagaac

SEQ ID NO: 989877 - RNA, 19 nt, Artificial Sequence
  Description of Artificial Sequence: Synthetic oligonucleotide
  Antisense strand to SEQ ID NO: 989876
guucugggaacauacaugc

SEQ ID NO: 989878 - RNA, 19 nt, Artificial Sequence
  Description of Artificial Sequence: Synthetic oligonucleotide
  Sense strand starting at position 3930 of SEQ ID NO: 914252
cagauagaaggauguugua

SEQ ID NO: 989879 - RNA, 19 nt, Artificial Sequence
  Description of Artificial Sequence: Synthetic oligonucleotide
  Antisense strand to SEQ ID NO: 989878
uacaacauccuucuaucug

SEQ ID NO: 989880 - RNA, 19 nt, Artificial Sequence
  Description of Artificial Sequence: Synthetic oligonucleotide
  Sense strand starting at position 116 of SEQ ID NO: 914253
aaggcuucgugagcucaga

SEQ ID NO: 989881 - RNA, 19 nt, Artificial Sequence
  Description of Artificial Sequence: Synthetic oligonucleotide
  Antisense strand to SEQ ID NO: 989880
ucugagcucacgaagccuu

SEQ ID NO: 989882 - RNA, 19 nt, Artificial Sequence
  Description of Artificial Sequence: Synthetic oligonucleotide
  Sense strand starting at position 441 of SEQ ID NO: 914253
gacugaguccuuggcaggu

SEQ ID NO: 989883 - RNA, 19 nt, Artificial Sequence
  Description of Artificial Sequence: Synthetic oligonucleotide
  Antisense strand to SEQ ID NO: 989882
accugccaaggacucaguc

SEQ ID NO: 989884 - RNA, 19 nt, Artificial Sequence
  Description of Artificial Sequence: Synthetic oligonucleotide
  Sense strand starting at position 562 of SEQ ID NO: 914253
ggccauggucuuuguugga

SEQ ID NO: 989885 - RNA, 19 nt, Artificial Sequence
  Description of Artificial Sequence: Synthetic oligonucleotide
  Antisense strand to SEQ ID NO: 989884
uccaacaaagaccauggcc

SEQ ID NO: 989886 - RNA, 19 nt, Artificial Sequence
  Description of Artificial Sequence: Synthetic oligonucleotide
  Sense strand starting at position 796 of SEQ ID NO: 914253
uucagugaguguuuaugga

SEQ ID NO: 989887 - RNA, 19 nt, Artificial Sequence
  Description of Artificial Sequence: Synthetic oligonucleotide
  Antisense strand to SEQ ID NO: 989886
uccauaaacacucacugaa

SEQ ID NO: 989888 - RNA, 19 nt, Artificial Sequence
  Description of Artificial Sequence: Synthetic oligonucleotide
  Sense strand starting at position 895 of SEQ ID NO: 914253
gcaugugugcaucuguaca

SEQ ID NO: 989889 - RNA, 19 nt, Artificial Sequence
  Description of Artificial Sequence: Synthetic oligonucleotide
  Antisense strand to SEQ ID NO: 989888
uguacagaugcacacaugc

SEQ ID NO: 989890 - RNA, 19 nt, Artificial Sequence
  Description of Artificial Sequence: Synthetic oligonucleotide
  Sense strand starting at position 954 of SEQ ID NO: 914253
cucacauguguacgugaca

SEQ ID NO: 989891 - RNA, 19 nt, Artificial Sequence
  Description of Artificial Sequence: Synthetic oligonucleotide
  Antisense strand to SEQ ID NO: 989890
ugucacguacacaugugag

SEQ ID NO: 989892 - RNA, 19 nt, Artificial Sequence
  Description of Artificial Sequence: Synthetic oligonucleotide
  Sense strand starting at position 1005 of SEQ ID NO: 914253
gugcaugugcaugaguauu

SEQ ID NO: 989893 - RNA, 19 nt, Artificial Sequence
  Description of Artificial Sequence: Synthetic oligonucleotide
  Antisense strand to SEQ ID NO: 989892
aauacucaugcacaugcac

SEQ ID NO: 989894 - RNA, 19 nt, Artificial Sequence
  Description of Artificial Sequence: Synthetic oligonucleotide
  Sense strand starting at position 1128 of SEQ ID NO: 914253
gugcaugugcaugagagua

SEQ ID NO: 989895 - RNA, 19 nt, Artificial Sequence
  Description of Artificial Sequence: Synthetic oligonucleotide
  Antisense strand to SEQ ID NO: 989894
uacucucaugcacaugcac

SEQ ID NO: 989896 - RNA, 19 nt, Artificial Sequence
  Description of Artificial Sequence: Synthetic oligonucleotide
  Sense strand starting at position 1333 of SEQ ID NO: 914253
cugugugaccuggagagau

SEQ ID NO: 989897 - RNA, 19 nt, Artificial Sequence
  Description of Artificial Sequence: Synthetic oligonucleotide
  Antisense strand to SEQ ID NO: 989896
aucucuccaggucacacag

SEQ ID NO: 989898 - RNA, 19 nt, Artificial Sequence
  Description of Artificial Sequence: Synthetic oligonucleotide
  Sense strand starting at position 1371 of SEQ ID NO: 914253
uuggcuccacccugugaaa

SEQ ID NO: 989899 - RNA, 19 nt, Artificial Sequence
  Description of Artificial Sequence: Synthetic oligonucleotide
  Antisense strand to SEQ ID NO: 989898
uuucacaggguggagccaa

SEQ ID NO: 989900 - RNA, 19 nt, Artificial Sequence
  Description of Artificial Sequence: Synthetic oligonucleotide
  Sense strand starting at position 1373 of SEQ ID NO: 914253
ggcuccacccugugaaagu

SEQ ID NO: 989901 - RNA, 19 nt, Artificial Sequence
  Description of Artificial Sequence: Synthetic oligonucleotide
  Antisense strand to SEQ ID NO: 989900
acuuucacaggguggagcc

SEQ ID NO: 989902 - RNA, 19 nt, Artificial Sequence
  Description of Artificial Sequence: Synthetic oligonucleotide
  Sense strand starting at position 1488 of SEQ ID NO: 914253
uggugaugucaugggcauc

SEQ ID NO: 989903 - RNA, 19 nt, Artificial Sequence
  Description of Artificial Sequence: Synthetic oligonucleotide
  Antisense strand to SEQ ID NO: 989902
gaugcccaugacaucacca

SEQ ID NO: 989904 - RNA, 19 nt, Artificial Sequence
  Description of Artificial Sequence: Synthetic oligonucleotide
  Sense strand starting at position 1489 of SEQ ID NO: 914253
ggugaugucaugggcauca

SEQ ID NO: 989905 - RNA, 19 nt, Artificial Sequence
  Description of Artificial Sequence: Synthetic oligonucleotide
  Antisense strand to SEQ ID NO: 989904
ugaugcccaugacaucacc

SEQ ID NO: 989906 - RNA, 19 nt, Artificial Sequence
  Description of Artificial Sequence: Synthetic oligonucleotide
  Sense strand starting at position 1719 of SEQ ID NO: 914253
agguguucuccuuacuugu

SEQ ID NO: 989907 - RNA, 19 nt, Artificial Sequence
  Description of Artificial Sequence: Synthetic oligonucleotide
  Antisense strand to SEQ ID NO: 989906
acaaguaaggagaacaccu

SEQ ID NO: 989908 - RNA, 19 nt, Artificial Sequence
  Description of Artificial Sequence: Synthetic oligonucleotide
  Sense strand starting at position 1846 of SEQ ID NO: 914253
cugggauucugauccuaac

SEQ ID NO: 989909 - RNA, 19 nt, Artificial Sequence
  Description of Artificial Sequence: Synthetic oligonucleotide
  Antisense strand to SEQ ID NO: 989908
guuaggaucagaaucccag

SEQ ID NO: 989910 - RNA, 19 nt, Artificial Sequence
  Description of Artificial Sequence: Synthetic oligonucleotide
  Sense strand starting at position 2085 of SEQ ID NO: 914253
uggguugacugaaagggua

SEQ ID NO: 989911 - RNA, 19 nt, Artificial Sequence
  Description of Artificial Sequence: Synthetic oligonucleotide
  Antisense strand to SEQ ID NO: 989910
uacccuuucagucaaccca

SEQ ID NO: 989912 - RNA, 19 nt, Artificial Sequence
  Description of Artificial Sequence: Synthetic oligonucleotide
  Sense strand starting at position 2087 of SEQ ID NO: 914253
gguugacugaaaggguaaa

SEQ ID NO: 989913 - RNA, 19 nt, Artificial Sequence
  Description of Artificial Sequence: Synthetic oligonucleotide
  Antisense strand to SEQ ID NO: 989912
uuuacccuuucagucaacc

SEQ ID NO: 989914 - RNA, 19 nt, Artificial Sequence
  Description of Artificial Sequence: Synthetic oligonucleotide
  Sense strand starting at position 2088 of SEQ ID NO: 914253
guugacugaaaggguaaau

SEQ ID NO: 989915 - RNA, 19 nt, Artificial Sequence
  Description of Artificial Sequence: Synthetic oligonucleotide
  Antisense strand to SEQ ID NO: 989914
auuuacccuuucagucaac

SEQ ID NO: 989916 - RNA, 19 nt, Artificial Sequence
  Description of Artificial Sequence: Synthetic oligonucleotide
  Sense strand starting at position 2099 of SEQ ID NO: 914253
ggguaaauucuuuggaccu

SEQ ID NO: 989917 - RNA, 19 nt, Artificial Sequence
  Description of Artificial Sequence: Synthetic oligonucleotide
  Antisense strand to SEQ ID NO: 989916
agguccaaagaauuuaccc

SEQ ID NO: 989918 - RNA, 19 nt, Artificial Sequence
  Description of Artificial Sequence: Synthetic oligonucleotide
  Sense strand starting at position 2233 of SEQ ID NO: 914253
cccggaucuggguagacaa

SEQ ID NO: 989919 - RNA, 19 nt, Artificial Sequence
  Description of Artificial Sequence: Synthetic oligonucleotide
  Antisense strand to SEQ ID NO: 989918
uugucuacccagauccggg

SEQ ID NO: 989920 - RNA, 19 nt, Artificial Sequence
  Description of Artificial Sequence: Synthetic oligonucleotide
  Sense strand starting at position 2734 of SEQ ID NO: 914253
acacaaagcggguaaaguu

SEQ ID NO: 989921 - RNA, 19 nt, Artificial Sequence
  Description of Artificial Sequence: Synthetic oligonucleotide
  Antisense strand to SEQ ID NO: 989920
aacuuuacccgcuuugugu

SEQ ID NO: 989922 - RNA, 19 nt, Artificial Sequence
  Description of Artificial Sequence: Synthetic oligonucleotide
  Sense strand starting at position 2783 of SEQ ID NO: 914253
augugaucauauguacaaa

SEQ ID NO: 989923 - RNA, 19 nt, Artificial Sequence
  Description of Artificial Sequence: Synthetic oligonucleotide
  Antisense strand to SEQ ID NO: 989922
uuuguacauaugaucacau

SEQ ID NO: 989924 - RNA, 19 nt, Artificial Sequence
  Description of Artificial Sequence: Synthetic oligonucleotide
  Sense strand starting at position 3154 of SEQ ID NO: 914253
accugaugucaggagugua

SEQ ID NO: 989925 - RNA, 19 nt, Artificial Sequence
  Description of Artificial Sequence: Synthetic oligonucleotide
  Antisense strand to SEQ ID NO: 989924
uacacuccugacaucaggu

SEQ ID NO: 989926 - RNA, 19 nt, Artificial Sequence
  Description of Artificial Sequence: Synthetic oligonucleotide
  Sense strand starting at position 3452 of SEQ ID NO: 914253
gggaguuggagguaaucgu

SEQ ID NO: 989927 - RNA, 19 nt, Artificial Sequence
  Description of Artificial Sequence: Synthetic oligonucleotide
  Antisense strand to SEQ ID NO: 989926
acgauuaccuccaacuccc

SEQ ID NO: 989928 - RNA, 19 nt, Artificial Sequence
  Description of Artificial Sequence: Synthetic oligonucleotide
  Sense strand starting at position 3500 of SEQ ID NO: 914253
ggcugcauuccaggcuaga

SEQ ID NO: 989929 - RNA, 19 nt, Artificial Sequence
  Description of Artificial Sequence: Synthetic oligonucleotide
  Antisense strand to SEQ ID NO: 989928
ucuagccuggaaugcagcc

SEQ ID NO: 989930 - RNA, 19 nt, Artificial Sequence
  Description of Artificial Sequence: Synthetic oligonucleotide
  Sense strand starting at position 3593 of SEQ ID NO: 914253
agagcuucuuugucaauau

SEQ ID NO: 989931 - RNA, 19 nt, Artificial Sequence
  Description of Artificial Sequence: Synthetic oligonucleotide
  Antisense strand to SEQ ID NO: 989930
auauugacaaagaagcucu

SEQ ID NO: 989932 - RNA, 19 nt, Artificial Sequence
  Description of Artificial Sequence: Synthetic oligonucleotide
  Sense strand starting at position 3656 of SEQ ID NO: 914253
cagggagauaaauguguau

SEQ ID NO: 989933 - RNA, 19 nt, Artificial Sequence
  Description of Artificial Sequence: Synthetic oligonucleotide
  Antisense strand to SEQ ID NO: 989932
auacacauuuaucucccug

SEQ ID NO: 989934 - RNA, 19 nt, Artificial Sequence
  Description of Artificial Sequence: Synthetic oligonucleotide
  Sense strand starting at position 3658 of SEQ ID NO: 914253
gggagauaaauguguauua

SEQ ID NO: 989935 - RNA, 19 nt, Artificial Sequence
  Description of Artificial Sequence: Synthetic oligonucleotide
  Antisense strand to SEQ ID NO: 989934
uaauacacauuuaucuccc

SEQ ID NO: 989936 - RNA, 19 nt, Artificial Sequence
  Description of Artificial Sequence: Synthetic oligonucleotide
  Sense strand starting at position 3659 of SEQ ID NO: 914253
ggagauaaauguguauuag

SEQ ID NO: 989937 - RNA, 19 nt, Artificial Sequence
  Description of Artificial Sequence: Synthetic oligonucleotide
  Antisense strand to SEQ ID NO: 989936
cuaauacacauuuaucucc

SEQ ID NO: 989938 - RNA, 19 nt, Artificial Sequence
  Description of Artificial Sequence: Synthetic oligonucleotide
  Sense strand starting at position 3660 of SEQ ID NO: 914253
gagauaaauguguauuagu

SEQ ID NO: 989939 - RNA, 19 nt, Artificial Sequence
  Description of Artificial Sequence: Synthetic oligonucleotide
  Antisense strand to SEQ ID NO: 989938
acuaauacacauuuaucuc

SEQ ID NO: 989940 - RNA, 19 nt, Artificial Sequence
  Description of Artificial Sequence: Synthetic oligonucleotide
  Sense strand starting at position 3665 of SEQ ID NO: 914253
aaauguguauuagucugaa

SEQ ID NO: 989941 - RNA, 19 nt, Artificial Sequence
  Description of Artificial Sequence: Synthetic oligonucleotide
  Antisense strand to SEQ ID NO: 989940
uucagacuaauacacauuu

SEQ ID NO: 989942 - RNA, 19 nt, Artificial Sequence
  Description of Artificial Sequence: Synthetic oligonucleotide
  Sense strand starting at position 3668 of SEQ ID NO: 914253
uguguauuagucugaagac

SEQ ID NO: 989943 - RNA, 19 nt, Artificial Sequence
  Description of Artificial Sequence: Synthetic oligonucleotide
  Antisense strand to SEQ ID NO: 989942
gucuucagacuaauacaca

SEQ ID NO: 989944 - RNA, 19 nt, Artificial Sequence
  Description of Artificial Sequence: Synthetic oligonucleotide
  Sense strand starting at position 3703 of SEQ ID NO: 914253
aagacuuggcacugucacu

SEQ ID NO: 989945 - RNA, 19 nt, Artificial Sequence
  Description of Artificial Sequence: Synthetic oligonucleotide
  Antisense strand to SEQ ID NO: 989944
agugacagugccaagucuu

SEQ ID NO: 989946 - RNA, 19 nt, Artificial Sequence
  Description of Artificial Sequence: Synthetic oligonucleotide
  Sense strand starting at position 3709 of SEQ ID NO: 914253
uggcacugucacugaugau

SEQ ID NO: 989947 - RNA, 19 nt, Artificial Sequence
  Description of Artificial Sequence: Synthetic oligonucleotide
  Antisense strand to SEQ ID NO: 989946
aucaucagugacagugcca

SEQ ID NO: 989948 - RNA, 19 nt, Artificial Sequence
  Description of Artificial Sequence: Synthetic oligonucleotide
  Sense strand starting at position 3710 of SEQ ID NO: 914253
ggcacugucacugaugaug

SEQ ID NO: 989949 - RNA, 19 nt, Artificial Sequence
  Description of Artificial Sequence: Synthetic oligonucleotide
  Antisense strand to SEQ ID NO: 989948
caucaucagugacagugcc

SEQ ID NO: 989950 - RNA, 19 nt, Artificial Sequence
  Description of Artificial Sequence: Synthetic oligonucleotide
  Sense strand starting at position 3768 of SEQ ID NO: 914253
cggcuuguucugccucauu

SEQ ID NO: 989951 - RNA, 19 nt, Artificial Sequence
  Description of Artificial Sequence: Synthetic oligonucleotide
  Antisense strand to SEQ ID NO: 989950
aaugaggcagaacaagccg

SEQ ID NO: 989952 - RNA, 19 nt, Artificial Sequence
  Description of Artificial Sequence: Synthetic oligonucleotide
  Sense strand starting at position 3771 of SEQ ID NO: 914253
cuuguucugccucauuaag

SEQ ID NO: 989953 - RNA, 19 nt, Artificial Sequence
  Description of Artificial Sequence: Synthetic oligonucleotide
  Antisense strand to SEQ ID NO: 989952
cuuaaugaggcagaacaag

SEQ ID NO: 989954 - RNA, 19 nt, Artificial Sequence
  Description of Artificial Sequence: Synthetic oligonucleotide
  Sense strand starting at position 3773 of SEQ ID NO: 914253
uguucugccucauuaagag

SEQ ID NO: 989955 - RNA, 19 nt, Artificial Sequence
  Description of Artificial Sequence: Synthetic oligonucleotide
  Antisense strand to SEQ ID NO: 989954
cucuuaaugaggcagaaca

SEQ ID NO: 989956 - RNA, 19 nt, Artificial Sequence
  Description of Artificial Sequence: Synthetic oligonucleotide
  Sense strand starting at position 3849 of SEQ ID NO: 914253
gggacagaugucugcauga

SEQ ID NO: 989957 - RNA, 19 nt, Artificial Sequence
  Description of Artificial Sequence: Synthetic oligonucleotide
  Antisense strand to SEQ ID NO: 989956
ucaugcagacaucuguccc

SEQ ID NO: 989958 - RNA, 19 nt, Artificial Sequence
  Description of Artificial Sequence: Synthetic oligonucleotide
  Sense strand starting at position 3961 of SEQ ID NO: 914253
acugcuaagcuauaagauc

SEQ ID NO: 989959 - RNA, 19 nt, Artificial Sequence
  Description of Artificial Sequence: Synthetic oligonucleotide
  Antisense strand to SEQ ID NO: 989958
gaucuuauagcuuagcagu

SEQ ID NO: 989960 - RNA, 19 nt, Artificial Sequence
  Description of Artificial Sequence: Synthetic oligonucleotide
  Sense strand starting at position 27 of SEQ ID NO: 914254
cuggguccaucuuucuaau

SEQ ID NO: 989961 - RNA, 19 nt, Artificial Sequence
  Description of Artificial Sequence: Synthetic oligonucleotide
  Antisense strand to SEQ ID NO: 989960
auuagaaagauggacccag

SEQ ID NO: 989962 - RNA, 19 nt, Artificial Sequence
  Description of Artificial Sequence: Synthetic oligonucleotide
  Sense strand starting at position 147 of SEQ ID NO: 914254
ugaagucaaguguggucau

SEQ ID NO: 989963 - RNA, 19 nt, Artificial Sequence
  Description of Artificial Sequence: Synthetic oligonucleotide
  Antisense strand to SEQ ID NO: 989962
augaccacacuugacuuca

SEQ ID NO: 989964 - RNA, 19 nt, Artificial Sequence
  Description of Artificial Sequence: Synthetic oligonucleotide
  Sense strand starting at position 204 of SEQ ID NO: 914254
cgcucugcucuguaguaua

SEQ ID NO: 989965 - RNA, 19 nt, Artificial Sequence
  Description of Artificial Sequence: Synthetic oligonucleotide
  Antisense strand to SEQ ID NO: 989964
uauacuacagagcagagcg

SEQ ID NO: 989966 - RNA, 19 nt, Artificial Sequence
  Description of Artificial Sequence: Synthetic oligonucleotide
  Sense strand starting at position 215 of SEQ ID NO: 914254
guaguauacaucugggcaa

SEQ ID NO: 989967 - RNA, 19 nt, Artificial Sequence
  Description of Artificial Sequence: Synthetic oligonucleotide
  Antisense strand to SEQ ID NO: 989966
uugcccagauguauacuac

SEQ ID NO: 989968 - RNA, 19 nt, Artificial Sequence
  Description of Artificial Sequence: Synthetic oligonucleotide
  Sense strand starting at position 364 of SEQ ID NO: 914254
gccugcucagaauggucua

SEQ ID NO: 989969 - RNA, 19 nt, Artificial Sequence
  Description of Artificial Sequence: Synthetic oligonucleotide
  Antisense strand to SEQ ID NO: 989968
uagaccauucugagcaggc

SEQ ID NO: 989970 - RNA, 19 nt, Artificial Sequence
  Description of Artificial Sequence: Synthetic oligonucleotide
  Sense strand starting at position 367 of SEQ ID NO: 914254
ugcucagaauggucuagaa

SEQ ID NO: 989971 - RNA, 19 nt, Artificial Sequence
  Description of Artificial Sequence: Synthetic oligonucleotide
  Antisense strand to SEQ ID NO: 989970
uucuagaccauucugagca

SEQ ID NO: 989972 - RNA, 19 nt, Artificial Sequence
  Description of Artificial Sequence: Synthetic oligonucleotide
  Sense strand starting at position 404 of SEQ ID NO: 914254
agcagagaagucuguagga

SEQ ID NO: 989973 - RNA, 19 nt, Artificial Sequence
  Description of Artificial Sequence: Synthetic oligonucleotide
  Antisense strand to SEQ ID NO: 989972
uccuacagacuucucugcu

SEQ ID NO: 989974 - RNA, 19 nt, Artificial Sequence
  Description of Artificial Sequence: Synthetic oligonucleotide
  Sense strand starting at position 441 of SEQ ID NO: 914254
ggaugcucgcaguacuuga

SEQ ID NO: 989975 - RNA, 19 nt, Artificial Sequence
  Description of Artificial Sequence: Synthetic oligonucleotide
  Antisense strand to SEQ ID NO: 989974
ucaaguacugcgagcaucc

SEQ ID NO: 989976 - RNA, 19 nt, Artificial Sequence
  Description of Artificial Sequence: Synthetic oligonucleotide
  Sense strand starting at position 547 of SEQ ID NO: 914254
caacguguuacccgagaga

SEQ ID NO: 989977 - RNA, 19 nt, Artificial Sequence
  Description of Artificial Sequence: Synthetic oligonucleotide
  Antisense strand to SEQ ID NO: 989976
ucucucggguaacacguug

SEQ ID NO: 989978 - RNA, 19 nt, Artificial Sequence
  Description of Artificial Sequence: Synthetic oligonucleotide
  Sense strand starting at position 550 of SEQ ID NO: 914254
cguguuacccgagagaaau

SEQ ID NO: 989979 - RNA, 19 nt, Artificial Sequence
  Description of Artificial Sequence: Synthetic oligonucleotide
  Antisense strand to SEQ ID NO: 989978
auuucucucggguaacacg

SEQ ID NO: 989980 - RNA, 19 nt, Artificial Sequence
  Description of Artificial Sequence: Synthetic oligonucleotide
  Sense strand starting at position 624 of SEQ ID NO: 914254
ucaggagguguccgagaag

SEQ ID NO: 989981 - RNA, 19 nt, Artificial Sequence
  Description of Artificial Sequence: Synthetic oligonucleotide
  Antisense strand to SEQ ID NO: 989980
cuucucggacaccuccuga

SEQ ID NO: 989982 - RNA, 19 nt, Artificial Sequence
  Description of Artificial Sequence: Synthetic oligonucleotide
  Sense strand starting at position 627 of SEQ ID NO: 914254
ggagguguccgagaagacu

SEQ ID NO: 989983 - RNA, 19 nt, Artificial Sequence
  Description of Artificial Sequence: Synthetic oligonucleotide
  Antisense strand to SEQ ID NO: 989982
agucuucucggacaccucc

SEQ ID NO: 989984 - RNA, 19 nt, Artificial Sequence
  Description of Artificial Sequence: Synthetic oligonucleotide
  Sense strand starting at position 885 of SEQ ID NO: 914254
gagggcucucccuggaaac

SEQ ID NO: 989985 - RNA, 19 nt, Artificial Sequence
  Description of Artificial Sequence: Synthetic oligonucleotide
  Antisense strand to SEQ ID NO: 989984
guuuccagggagagcccuc

SEQ ID NO: 989986 - RNA, 19 nt, Artificial Sequence
  Description of Artificial Sequence: Synthetic oligonucleotide
  Sense strand starting at position 908 of SEQ ID NO: 914254
cagaguuggagucggaaga

SEQ ID NO: 989987 - RNA, 19 nt, Artificial Sequence
  Description of Artificial Sequence: Synthetic oligonucleotide
  Antisense strand to SEQ ID NO: 989986
ucuuccgacuccaacucug

SEQ ID NO: 989988 - RNA, 19 nt, Artificial Sequence
  Description of Artificial Sequence: Synthetic oligonucleotide
  Sense strand starting at position 921 of SEQ ID NO: 914254
ggaagagaucaacgagguu

SEQ ID NO: 989989 - RNA, 19 nt, Artificial Sequence
  Description of Artificial Sequence: Synthetic oligonucleotide
  Antisense strand to SEQ ID NO: 989988
aaccucguugaucucuucc

SEQ ID NO: 989990 - RNA, 19 nt, Artificial Sequence
  Description of Artificial Sequence: Synthetic oligonucleotide
  Sense strand starting at position 924 of SEQ ID NO: 914254
agagaucaacgagguuuaa

SEQ ID NO: 989991 - RNA, 19 nt, Artificial Sequence
  Description of Artificial Sequence: Synthetic oligonucleotide
  Antisense strand to SEQ ID NO: 989990
uuaaaccucguugaucucu

SEQ ID NO: 989992 - RNA, 19 nt, Artificial Sequence
  Description of Artificial Sequence: Synthetic oligonucleotide
  Sense strand starting at position 935 of SEQ ID NO: 914254
agguuuaaacucggaggca

SEQ ID NO: 989993 - RNA, 19 nt, Artificial Sequence
  Description of Artificial Sequence: Synthetic oligonucleotide
  Antisense strand to SEQ ID NO: 989992
ugccuccgaguuuaaaccu

SEQ ID NO: 989994 - RNA, 19 nt, Artificial Sequence
  Description of Artificial Sequence: Synthetic oligonucleotide
  Sense strand starting at position 936 of SEQ ID NO: 914254
gguuuaaacucggaggcau

SEQ ID NO: 989995 - RNA, 19 nt, Artificial Sequence
  Description of Artificial Sequence: Synthetic oligonucleotide
  Antisense strand to SEQ ID NO: 989994
augccuccgaguuuaaacc

SEQ ID NO: 989996 - RNA, 19 nt, Artificial Sequence
  Description of Artificial Sequence: Synthetic oligonucleotide
  Sense strand starting at position 947 of SEQ ID NO: 914254
ggaggcauugcacgauaca

SEQ ID NO: 989997 - RNA, 19 nt, Artificial Sequence
  Description of Artificial Sequence: Synthetic oligonucleotide
  Antisense strand to SEQ ID NO: 989996
uguaucgugcaaugccucc

SEQ ID NO: 989998 - RNA, 19 nt, Artificial Sequence
  Description of Artificial Sequence: Synthetic oligonucleotide
  Sense strand starting at position 948 of SEQ ID NO: 914254
gaggcauugcacgauacaa

SEQ ID NO: 989999 - RNA, 19 nt, Artificial Sequence
  Description of Artificial Sequence: Synthetic oligonucleotide
  Antisense strand to SEQ ID NO: 989998
uuguaucgugcaaugccuc

SEQ ID NO: 990000 - RNA, 19 nt, Artificial Sequence
  Description of Artificial Sequence: Synthetic oligonucleotide
  Sense strand starting at position 950 of SEQ ID NO: 914254
ggcauugcacgauacaaag

SEQ ID NO: 990001 - RNA, 19 nt, Artificial Sequence
  Description of Artificial Sequence: Synthetic oligonucleotide
  Antisense strand to SEQ ID NO: 990000
cuuuguaucgugcaaugcc

SEQ ID NO: 990002 - RNA, 19 nt, Artificial Sequence
  Description of Artificial Sequence: Synthetic oligonucleotide
  Sense strand starting at position 1005 of SEQ ID NO: 914254
cgggacuaucugggugcaa

SEQ ID NO: 990003 - RNA, 19 nt, Artificial Sequence
  Description of Artificial Sequence: Synthetic oligonucleotide
  Antisense strand to SEQ ID NO: 990002
uugcacccagauagucccg

SEQ ID NO: 990004 - RNA, 19 nt, Artificial Sequence
  Description of Artificial Sequence: Synthetic oligonucleotide
  Sense strand starting at position 1006 of SEQ ID NO: 914254
gggacuaucugggugcaaa

SEQ ID NO: 990005 - RNA, 19 nt, Artificial Sequence
  Description of Artificial Sequence: Synthetic oligonucleotide
  Antisense strand to SEQ ID NO: 990004
uuugcacccagauaguccc

SEQ ID NO: 990006 - RNA, 19 nt, Artificial Sequence
  Description of Artificial Sequence: Synthetic oligonucleotide
  Sense strand starting at position 1007 of SEQ ID NO: 914254
ggacuaucugggugcaaag

SEQ ID NO: 990007 - RNA, 19 nt, Artificial Sequence
  Description of Artificial Sequence: Synthetic oligonucleotide
  Antisense strand to SEQ ID NO: 990006
cuuugcacccagauagucc

SEQ ID NO: 990008 - RNA, 19 nt, Artificial Sequence
  Description of Artificial Sequence: Synthetic oligonucleotide
  Sense strand starting at position 2224 of SEQ ID NO: 914254
cugggagcuuaaguacaau

SEQ ID NO: 990009 - RNA, 19 nt, Artificial Sequence
  Description of Artificial Sequence: Synthetic oligonucleotide
  Antisense strand to SEQ ID NO: 990008
auuguacuuaagcucccag

SEQ ID NO: 990010 - RNA, 19 nt, Artificial Sequence
  Description of Artificial Sequence: Synthetic oligonucleotide
  Sense strand starting at position 2233 of SEQ ID NO: 914254
uaaguacaaucgcugucaa

SEQ ID NO: 990011 - RNA, 19 nt, Artificial Sequence
  Description of Artificial Sequence: Synthetic oligonucleotide
  Antisense strand to SEQ ID NO: 990010
uugacagcgauuguacuua

SEQ ID NO: 990012 - RNA, 19 nt, Artificial Sequence
  Description of Artificial Sequence: Synthetic oligonucleotide
  Sense strand starting at position 2556 of SEQ ID NO: 914254
ugaagucucaguuugcguu

SEQ ID NO: 990013 - RNA, 19 nt, Artificial Sequence
  Description of Artificial Sequence: Synthetic oligonucleotide
  Antisense strand to SEQ ID NO: 990012
aacgcaaacugagacuuca

SEQ ID NO: 990014 - RNA, 19 nt, Artificial Sequence
  Description of Artificial Sequence: Synthetic oligonucleotide
  Sense strand starting at position 2753 of SEQ ID NO: 914254
gcuguuucuuaaucacaga

SEQ ID NO: 990015 - RNA, 19 nt, Artificial Sequence
  Description of Artificial Sequence: Synthetic oligonucleotide
  Antisense strand to SEQ ID NO: 990014
ucugugauuaagaaacagc

SEQ ID NO: 990016 - RNA, 19 nt, Artificial Sequence
  Description of Artificial Sequence: Synthetic oligonucleotide
  Sense strand starting at position 2819 of SEQ ID NO: 914254
auguccuauugccagaaga

SEQ ID NO: 990017 - RNA, 19 nt, Artificial Sequence
  Description of Artificial Sequence: Synthetic oligonucleotide
  Antisense strand to SEQ ID NO: 990016
ucuucuggcaauaggacau

SEQ ID NO: 990018 - RNA, 19 nt, Artificial Sequence
  Description of Artificial Sequence: Synthetic oligonucleotide
  Sense strand starting at position 2821 of SEQ ID NO: 914254
guccuauugccagaagagc

SEQ ID NO: 990019 - RNA, 19 nt, Artificial Sequence
  Description of Artificial Sequence: Synthetic oligonucleotide
  Antisense strand to SEQ ID NO: 990018
gcucuucuggcaauaggac

SEQ ID NO: 990020 - RNA, 19 nt, Artificial Sequence
  Description of Artificial Sequence: Synthetic oligonucleotide
  Sense strand starting at position 2946 of SEQ ID NO: 914254
ucaggaaucuugccagcca

SEQ ID NO: 990021 - RNA, 19 nt, Artificial Sequence
  Description of Artificial Sequence: Synthetic oligonucleotide
  Antisense strand to SEQ ID NO: 990020
uggcuggcaagauuccuga

SEQ ID NO: 990022 - RNA, 19 nt, Artificial Sequence
  Description of Artificial Sequence: Synthetic oligonucleotide
  Sense strand starting at position 2965 of SEQ ID NO: 914254
gcuguuaaucacggacauu

SEQ ID NO: 990023 - RNA, 19 nt, Artificial Sequence
  Description of Artificial Sequence: Synthetic oligonucleotide
  Antisense strand to SEQ ID NO: 990022
aauguccgugauuaacagc

SEQ ID NO: 990024 - RNA, 19 nt, Artificial Sequence
  Description of Artificial Sequence: Synthetic oligonucleotide
  Sense strand starting at position 2968 of SEQ ID NO: 914254
guuaaucacggacauuauu

SEQ ID NO: 990025 - RNA, 19 nt, Artificial Sequence
  Description of Artificial Sequence: Synthetic oligonucleotide
  Antisense strand to SEQ ID NO: 990024
aauaauguccgugauuaac

SEQ ID NO: 990026 - RNA, 19 nt, Artificial Sequence
  Description of Artificial Sequence: Synthetic oligonucleotide
  Sense strand starting at position 3354 of SEQ ID NO: 914254
gggugauccuccuaccuug

SEQ ID NO: 990027 - RNA, 19 nt, Artificial Sequence
  Description of Artificial Sequence: Synthetic oligonucleotide
  Antisense strand to SEQ ID NO: 990026
caagguaggaggaucaccc

SEQ ID NO: 990028 - RNA, 19 nt, Artificial Sequence
  Description of Artificial Sequence: Synthetic oligonucleotide
  Sense strand starting at position 3704 of SEQ ID NO: 914254
ccgccaacccucugagaca

SEQ ID NO: 990029 - RNA, 19 nt, Artificial Sequence
  Description of Artificial Sequence: Synthetic oligonucleotide
  Antisense strand to SEQ ID NO: 990028
ugucucagaggguuggcgg

SEQ ID NO: 990030 - RNA, 19 nt, Artificial Sequence
  Description of Artificial Sequence: Synthetic oligonucleotide
  Sense strand starting at position 3752 of SEQ ID NO: 914254
guggaaaugugagggaaau

SEQ ID NO: 990031 - RNA, 19 nt, Artificial Sequence
  Description of Artificial Sequence: Synthetic oligonucleotide
  Antisense strand to SEQ ID NO: 990030
auuucccucacauuuccac

SEQ ID NO: 990032 - RNA, 19 nt, Artificial Sequence
  Description of Artificial Sequence: Synthetic oligonucleotide
  Sense strand starting at position 3809 of SEQ ID NO: 914254
acaucacaauggcuugaaa

SEQ ID NO: 990033 - RNA, 19 nt, Artificial Sequence
  Description of Artificial Sequence: Synthetic oligonucleotide
  Antisense strand to SEQ ID NO: 990032
uuucaagccauugugaugu

SEQ ID NO: 990034 - RNA, 19 nt, Artificial Sequence
  Description of Artificial Sequence: Synthetic oligonucleotide
  Sense strand starting at position 3811 of SEQ ID NO: 914254
aucacaauggcuugaaaua

SEQ ID NO: 990035 - RNA, 19 nt, Artificial Sequence
  Description of Artificial Sequence: Synthetic oligonucleotide
  Antisense strand to SEQ ID NO: 990034
uauuucaagccauugugau

SEQ ID NO: 990036 - RNA, 19 nt, Artificial Sequence
  Description of Artificial Sequence: Synthetic oligonucleotide
  Sense strand starting at position 3823 of SEQ ID NO: 914254
ugaaauagguccugguaga

SEQ ID NO: 990037 - RNA, 19 nt, Artificial Sequence
  Description of Artificial Sequence: Synthetic oligonucleotide
  Antisense strand to SEQ ID NO: 990036
ucuaccaggaccuauuuca

SEQ ID NO: 990038 - RNA, 19 nt, Artificial Sequence
  Description of Artificial Sequence: Synthetic oligonucleotide
  Sense strand starting at position 3824 of SEQ ID NO: 914254
gaaauagguccugguagaa

SEQ ID NO: 990039 - RNA, 19 nt, Artificial Sequence
  Description of Artificial Sequence: Synthetic oligonucleotide
  Antisense strand to SEQ ID NO: 990038
uucuaccaggaccuauuuc

SEQ ID NO: 990040 - RNA, 19 nt, Artificial Sequence
  Description of Artificial Sequence: Synthetic oligonucleotide
  Sense strand starting at position 31 of SEQ ID NO: 914255
cuuugcaucuaguuagaaa

SEQ ID NO: 990041 - RNA, 19 nt, Artificial Sequence
  Description of Artificial Sequence: Synthetic oligonucleotide
  Antisense strand to SEQ ID NO: 990040
uuucuaacuagaugcaaag

SEQ ID NO: 990042 - RNA, 19 nt, Artificial Sequence
  Description of Artificial Sequence: Synthetic oligonucleotide
  Sense strand starting at position 43 of SEQ ID NO: 914255
uuagaaauggucugguuag

SEQ ID NO: 990043 - RNA, 19 nt, Artificial Sequence
  Description of Artificial Sequence: Synthetic oligonucleotide
  Antisense strand to SEQ ID NO: 990042
cuaaccagaccauuucuaa

SEQ ID NO: 990044 - RNA, 19 nt, Artificial Sequence
  Description of Artificial Sequence: Synthetic oligonucleotide
  Sense strand starting at position 44 of SEQ ID NO: 914255
uagaaauggucugguuagg

SEQ ID NO: 990045 - RNA, 19 nt, Artificial Sequence
  Description of Artificial Sequence: Synthetic oligonucleotide
  Antisense strand to SEQ ID NO: 990044
ccuaaccagaccauuucua

SEQ ID NO: 990046 - RNA, 19 nt, Artificial Sequence
  Description of Artificial Sequence: Synthetic oligonucleotide
  Sense strand starting at position 145 of SEQ ID NO: 914255
ugggucuggcuuuacuaga

SEQ ID NO: 990047 - RNA, 19 nt, Artificial Sequence
  Description of Artificial Sequence: Synthetic oligonucleotide
  Antisense strand to SEQ ID NO: 990046
ucuaguaaagccagaccca

SEQ ID NO: 990048 - RNA, 19 nt, Artificial Sequence
  Description of Artificial Sequence: Synthetic oligonucleotide
  Sense strand starting at position 150 of SEQ ID NO: 914255
cuggcuuuacuagagacau

SEQ ID NO: 990049 - RNA, 19 nt, Artificial Sequence
  Description of Artificial Sequence: Synthetic oligonucleotide
  Antisense strand to SEQ ID NO: 990048
augucucuaguaaagccag

SEQ ID NO: 990050 - RNA, 19 nt, Artificial Sequence
  Description of Artificial Sequence: Synthetic oligonucleotide
  Sense strand starting at position 203 of SEQ ID NO: 914255
ucgcguuuccaccaaagcu

SEQ ID NO: 990051 - RNA, 19 nt, Artificial Sequence
  Description of Artificial Sequence: Synthetic oligonucleotide
  Antisense strand to SEQ ID NO: 990050
agcuuugguggaaacgcga

SEQ ID NO: 990052 - RNA, 19 nt, Artificial Sequence
  Description of Artificial Sequence: Synthetic oligonucleotide
  Sense strand starting at position 494 of SEQ ID NO: 914255
cucagaucuggaggcagua

SEQ ID NO: 990053 - RNA, 19 nt, Artificial Sequence
  Description of Artificial Sequence: Synthetic oligonucleotide
  Antisense strand to SEQ ID NO: 990052
uacugccuccagaucugag

SEQ ID NO: 990054 - RNA, 19 nt, Artificial Sequence
  Description of Artificial Sequence: Synthetic oligonucleotide
  Sense strand starting at position 531 of SEQ ID NO: 914255
gugggagcuauucguaaac

SEQ ID NO: 990055 - RNA, 19 nt, Artificial Sequence
  Description of Artificial Sequence: Synthetic oligonucleotide
  Antisense strand to SEQ ID NO: 990054
guuuacgaauagcucccac

SEQ ID NO: 990056 - RNA, 19 nt, Artificial Sequence
  Description of Artificial Sequence: Synthetic oligonucleotide
  Sense strand starting at position 537 of SEQ ID NO: 914255
gcuauucguaaacgcucaa

SEQ ID NO: 990057 - RNA, 19 nt, Artificial Sequence
  Description of Artificial Sequence: Synthetic oligonucleotide
  Antisense strand to SEQ ID NO: 990056
uugagcguuuacgaauagc

SEQ ID NO: 990058 - RNA, 19 nt, Artificial Sequence
  Description of Artificial Sequence: Synthetic oligonucleotide
  Sense strand starting at position 631 of SEQ ID NO: 914255
gcgggagauucggaugaga

SEQ ID NO: 990059 - RNA, 19 nt, Artificial Sequence
  Description of Artificial Sequence: Synthetic oligonucleotide
  Antisense strand to SEQ ID NO: 990058
ucucauccgaaucucccgc

SEQ ID NO: 990060 - RNA, 19 nt, Artificial Sequence
  Description of Artificial Sequence: Synthetic oligonucleotide
  Sense strand starting at position 743 of SEQ ID NO: 914255
ugcucuuucucagacagga

SEQ ID NO: 990061 - RNA, 19 nt, Artificial Sequence
  Description of Artificial Sequence: Synthetic oligonucleotide
  Antisense strand to SEQ ID NO: 990060
uccugucugagaaagagca

SEQ ID NO: 990062 - RNA, 19 nt, Artificial Sequence
  Description of Artificial Sequence: Synthetic oligonucleotide
  Sense strand starting at position 776 of SEQ ID NO: 914255
ggguaaggcuggagaagau

SEQ ID NO: 990063 - RNA, 19 nt, Artificial Sequence
  Description of Artificial Sequence: Synthetic oligonucleotide
  Antisense strand to SEQ ID NO: 990062
aucuucuccagccuuaccc

SEQ ID NO: 990064 - RNA, 19 nt, Artificial Sequence
  Description of Artificial Sequence: Synthetic oligonucleotide
  Sense strand starting at position 1725 of SEQ ID NO: 914255
ggccgcucucuccaggaaa

SEQ ID NO: 990065 - RNA, 19 nt, Artificial Sequence
  Description of Artificial Sequence: Synthetic oligonucleotide
  Antisense strand to SEQ ID NO: 990064
uuuccuggagagagcggcc

SEQ ID NO: 990066 - RNA, 19 nt, Artificial Sequence
  Description of Artificial Sequence: Synthetic oligonucleotide
  Sense strand starting at position 1976 of SEQ ID NO: 914255
ccgagcccuucuuauuuau

SEQ ID NO: 990067 - RNA, 19 nt, Artificial Sequence
  Description of Artificial Sequence: Synthetic oligonucleotide
  Antisense strand to SEQ ID NO: 990066
auaaauaagaagggcucgg

SEQ ID NO: 990068 - RNA, 19 nt, Artificial Sequence
  Description of Artificial Sequence: Synthetic oligonucleotide
  Sense strand starting at position 1998 of SEQ ID NO: 914255
uccuucccggcuugacaua

SEQ ID NO: 990069 - RNA, 19 nt, Artificial Sequence
  Description of Artificial Sequence: Synthetic oligonucleotide
  Antisense strand to SEQ ID NO: 990068
uaugucaagccgggaagga

SEQ ID NO: 990070 - RNA, 19 nt, Artificial Sequence
  Description of Artificial Sequence: Synthetic oligonucleotide
  Sense strand starting at position 2292 of SEQ ID NO: 914255
ccaagaguccaggaugcau

SEQ ID NO: 990071 - RNA, 19 nt, Artificial Sequence
  Description of Artificial Sequence: Synthetic oligonucleotide
  Antisense strand to SEQ ID NO: 990070
augcauccuggacucuugg

SEQ ID NO: 990072 - RNA, 19 nt, Artificial Sequence
  Description of Artificial Sequence: Synthetic oligonucleotide
  Sense strand starting at position 2399 of SEQ ID NO: 914255
ugcagaugccuccggagau

SEQ ID NO: 990073 - RNA, 19 nt, Artificial Sequence
  Description of Artificial Sequence: Synthetic oligonucleotide
  Antisense strand to SEQ ID NO: 990072
aucuccggaggcaucugca

SEQ ID NO: 990074 - RNA, 19 nt, Artificial Sequence
  Description of Artificial Sequence: Synthetic oligonucleotide
  Sense strand starting at position 2429 of SEQ ID NO: 914255
gggagaagguuccugagcu

SEQ ID NO: 990075 - RNA, 19 nt, Artificial Sequence
  Description of Artificial Sequence: Synthetic oligonucleotide
  Antisense strand to SEQ ID NO: 990074
agcucaggaaccuucuccc

SEQ ID NO: 990076 - RNA, 19 nt, Artificial Sequence
  Description of Artificial Sequence: Synthetic oligonucleotide
  Sense strand starting at position 2673 of SEQ ID NO: 914255
gagguuggaaguuagcauu

SEQ ID NO: 990077 - RNA, 19 nt, Artificial Sequence
  Description of Artificial Sequence: Synthetic oligonucleotide
  Antisense strand to SEQ ID NO: 990076
aaugcuaacuuccaaccuc

SEQ ID NO: 990078 - RNA, 19 nt, Artificial Sequence
  Description of Artificial Sequence: Synthetic oligonucleotide
  Sense strand starting at position 2727 of SEQ ID NO: 914255
aaggucuucucuucuggau

SEQ ID NO: 990079 - RNA, 19 nt, Artificial Sequence
  Description of Artificial Sequence: Synthetic oligonucleotide
  Antisense strand to SEQ ID NO: 990078
auccagaagagaagaccuu

SEQ ID NO: 990080 - RNA, 19 nt, Artificial Sequence
  Description of Artificial Sequence: Synthetic oligonucleotide
  Sense strand starting at position 2828 of SEQ ID NO: 914255
gugaauuuauucuguccca

SEQ ID NO: 990081 - RNA, 19 nt, Artificial Sequence
  Description of Artificial Sequence: Synthetic oligonucleotide
  Antisense strand to SEQ ID NO: 990080
ugggacagaauaaauucac

SEQ ID NO: 990082 - RNA, 19 nt, Artificial Sequence
  Description of Artificial Sequence: Synthetic oligonucleotide
  Sense strand starting at position 2890 of SEQ ID NO: 914255
gagggaugacauggucuca

SEQ ID NO: 990083 - RNA, 19 nt, Artificial Sequence
  Description of Artificial Sequence: Synthetic oligonucleotide
  Antisense strand to SEQ ID NO: 990082
ugagaccaugucaucccuc

SEQ ID NO: 990084 - RNA, 19 nt, Artificial Sequence
  Description of Artificial Sequence: Synthetic oligonucleotide
  Sense strand starting at position 2966 of SEQ ID NO: 914255
gggcccuguucucuaccua

SEQ ID NO: 990085 - RNA, 19 nt, Artificial Sequence
  Description of Artificial Sequence: Synthetic oligonucleotide
  Antisense strand to SEQ ID NO: 990084
uagguagagaacagggccc

SEQ ID NO: 990086 - RNA, 19 nt, Artificial Sequence
  Description of Artificial Sequence: Synthetic oligonucleotide
  Sense strand starting at position 3012 of SEQ ID NO: 914255
gccuuucucugaguuguca

SEQ ID NO: 990087 - RNA, 19 nt, Artificial Sequence
  Description of Artificial Sequence: Synthetic oligonucleotide
  Antisense strand to SEQ ID NO: 990086
ugacaacucagagaaaggc

SEQ ID NO: 990088 - RNA, 19 nt, Artificial Sequence
  Description of Artificial Sequence: Synthetic oligonucleotide
  Sense strand starting at position 3016 of SEQ ID NO: 914255
uucucugaguugucaaugu

SEQ ID NO: 990089 - RNA, 19 nt, Artificial Sequence
  Description of Artificial Sequence: Synthetic oligonucleotide
  Antisense strand to SEQ ID NO: 990088
acauugacaacucagagaa

SEQ ID NO: 990090 - RNA, 19 nt, Artificial Sequence
  Description of Artificial Sequence: Synthetic oligonucleotide
  Sense strand starting at position 3020 of SEQ ID NO: 914255
cugaguugucaaugugggu

SEQ ID NO: 990091 - RNA, 19 nt, Artificial Sequence
  Description of Artificial Sequence: Synthetic oligonucleotide
  Antisense strand to SEQ ID NO: 990090
acccacauugacaacucag

SEQ ID NO: 990092 - RNA, 19 nt, Artificial Sequence
  Description of Artificial Sequence: Synthetic oligonucleotide
  Sense strand starting at position 3026 of SEQ ID NO: 914255
ugucaaugugggugaugca

SEQ ID NO: 990093 - RNA, 19 nt, Artificial Sequence
  Description of Artificial Sequence: Synthetic oligonucleotide
  Antisense strand to SEQ ID NO: 990092
ugcaucacccacauugaca

SEQ ID NO: 990094 - RNA, 19 nt, Artificial Sequence
  Description of Artificial Sequence: Synthetic oligonucleotide
  Sense strand starting at position 3027 of SEQ ID NO: 914255
gucaaugugggugaugcau

SEQ ID NO: 990095 - RNA, 19 nt, Artificial Sequence
  Description of Artificial Sequence: Synthetic oligonucleotide
  Antisense strand to SEQ ID NO: 990094
augcaucacccacauugac

SEQ ID NO: 990096 - RNA, 19 nt, Artificial Sequence
  Description of Artificial Sequence: Synthetic oligonucleotide
  Sense strand starting at position 3136 of SEQ ID NO: 914255
agucgaggucaucgcugau

SEQ ID NO: 990097 - RNA, 19 nt, Artificial Sequence
  Description of Artificial Sequence: Synthetic oligonucleotide
  Antisense strand to SEQ ID NO: 990096
aucagcgaugaccucgacu

SEQ ID NO: 990098 - RNA, 19 nt, Artificial Sequence
  Description of Artificial Sequence: Synthetic oligonucleotide
  Sense strand starting at position 3139 of SEQ ID NO: 914255
cgaggucaucgcugauucu

SEQ ID NO: 990099 - RNA, 19 nt, Artificial Sequence
  Description of Artificial Sequence: Synthetic oligonucleotide
  Antisense strand to SEQ ID NO: 990098
agaaucagcgaugaccucg

SEQ ID NO: 990100 - RNA, 19 nt, Artificial Sequence
  Description of Artificial Sequence: Synthetic oligonucleotide
  Sense strand starting at position 3140 of SEQ ID NO: 914255
gaggucaucgcugauucuu

SEQ ID NO: 990101 - RNA, 19 nt, Artificial Sequence
  Description of Artificial Sequence: Synthetic oligonucleotide
  Antisense strand to SEQ ID NO: 990100
aagaaucagcgaugaccuc

SEQ ID NO: 990102 - RNA, 19 nt, Artificial Sequence
  Description of Artificial Sequence: Synthetic oligonucleotide
  Sense strand starting at position 3217 of SEQ ID NO: 914255
agggcuuguuaccuccaaa

SEQ ID NO: 990103 - RNA, 19 nt, Artificial Sequence
  Description of Artificial Sequence: Synthetic oligonucleotide
  Antisense strand to SEQ ID NO: 990102
uuuggagguaacaagcccu

SEQ ID NO: 990104 - RNA, 19 nt, Artificial Sequence
  Description of Artificial Sequence: Synthetic oligonucleotide
  Sense strand starting at position 3220 of SEQ ID NO: 914255
gcuuguuaccuccaaagag

SEQ ID NO: 990105 - RNA, 19 nt, Artificial Sequence
  Description of Artificial Sequence: Synthetic oligonucleotide
  Antisense strand to SEQ ID NO: 990104
cucuuuggagguaacaagc

SEQ ID NO: 990106 - RNA, 19 nt, Artificial Sequence
  Description of Artificial Sequence: Synthetic oligonucleotide
  Sense strand starting at position 3315 of SEQ ID NO: 914255
gagggacagcugugaauua

SEQ ID NO: 990107 - RNA, 19 nt, Artificial Sequence
  Description of Artificial Sequence: Synthetic oligonucleotide
  Antisense strand to SEQ ID NO: 990106
uaauucacagcugucccuc

SEQ ID NO: 990108 - RNA, 19 nt, Artificial Sequence
  Description of Artificial Sequence: Synthetic oligonucleotide
  Sense strand starting at position 3322 of SEQ ID NO: 914255
agcugugaauuagaugaaa

SEQ ID NO: 990109 - RNA, 19 nt, Artificial Sequence
  Description of Artificial Sequence: Synthetic oligonucleotide
  Antisense strand to SEQ ID NO: 990108
uuucaucuaauucacagcu

SEQ ID NO: 990110 - RNA, 19 nt, Artificial Sequence
  Description of Artificial Sequence: Synthetic oligonucleotide
  Sense strand starting at position 3341 of SEQ ID NO: 914255
ggaugaacuucccaaccua

SEQ ID NO: 990111 - RNA, 19 nt, Artificial Sequence
  Description of Artificial Sequence: Synthetic oligonucleotide
  Antisense strand to SEQ ID NO: 990110
uagguugggaaguucaucc

SEQ ID NO: 990112 - RNA, 19 nt, Artificial Sequence
  Description of Artificial Sequence: Synthetic oligonucleotide
  Sense strand starting at position 3382 of SEQ ID NO: 914255
cugcauaauuuauaggaua

SEQ ID NO: 990113 - RNA, 19 nt, Artificial Sequence
  Description of Artificial Sequence: Synthetic oligonucleotide
  Antisense strand to SEQ ID NO: 990112
uauccuauaaauuaugcag

SEQ ID NO: 990114 - RNA, 19 nt, Artificial Sequence
  Description of Artificial Sequence: Synthetic oligonucleotide
  Sense strand starting at position 3426 of SEQ ID NO: 914255
gggaaacacuucuagagga

SEQ ID NO: 990115 - RNA, 19 nt, Artificial Sequence
  Description of Artificial Sequence: Synthetic oligonucleotide
  Antisense strand to SEQ ID NO: 990114
uccucuagaaguguuuccc

SEQ ID NO: 990116 - RNA, 19 nt, Artificial Sequence
  Description of Artificial Sequence: Synthetic oligonucleotide
  Sense strand starting at position 3513 of SEQ ID NO: 914255
guguacagugcuugggaca

SEQ ID NO: 990117 - RNA, 19 nt, Artificial Sequence
  Description of Artificial Sequence: Synthetic oligonucleotide
  Antisense strand to SEQ ID NO: 990116
ugucccaagcacuguacac

SEQ ID NO: 990118 - RNA, 19 nt, Artificial Sequence
  Description of Artificial Sequence: Synthetic oligonucleotide
  Sense strand starting at position 3649 of SEQ ID NO: 914255
ugcuguuucccagaguaca

SEQ ID NO: 990119 - RNA, 19 nt, Artificial Sequence
  Description of Artificial Sequence: Synthetic oligonucleotide
  Antisense strand to SEQ ID NO: 990118
uguacucugggaaacagca

SEQ ID NO: 990120 - RNA, 19 nt, Artificial Sequence
  Description of Artificial Sequence: Synthetic oligonucleotide
  Sense strand starting at position 872 of SEQ ID NO: 914256
ggcguaguuaccugucuuc

SEQ ID NO: 990121 - RNA, 19 nt, Artificial Sequence
  Description of Artificial Sequence: Synthetic oligonucleotide
  Antisense strand to SEQ ID NO: 990120
gaagacagguaacuacgcc

SEQ ID NO: 990122 - RNA, 19 nt, Artificial Sequence
  Description of Artificial Sequence: Synthetic oligonucleotide
  Sense strand starting at position 1174 of SEQ ID NO: 914256
cggacucacuucuuucgaa

SEQ ID NO: 990123 - RNA, 19 nt, Artificial Sequence
  Description of Artificial Sequence: Synthetic oligonucleotide
  Antisense strand to SEQ ID NO: 990122
uucgaaagaagugaguccg

SEQ ID NO: 990124 - RNA, 19 nt, Artificial Sequence
  Description of Artificial Sequence: Synthetic oligonucleotide
  Sense strand starting at position 1175 of SEQ ID NO: 914256
ggacucacuucuuucgaaa

SEQ ID NO: 990125 - RNA, 19 nt, Artificial Sequence
  Description of Artificial Sequence: Synthetic oligonucleotide
  Antisense strand to SEQ ID NO: 990124
uuucgaaagaagugagucc

SEQ ID NO: 990126 - RNA, 19 nt, Artificial Sequence
  Description of Artificial Sequence: Synthetic oligonucleotide
  Sense strand starting at position 1406 of SEQ ID NO: 914256
gcgcuuucccuggcucaga

SEQ ID NO: 990127 - RNA, 19 nt, Artificial Sequence
  Description of Artificial Sequence: Synthetic oligonucleotide
  Antisense strand to SEQ ID NO: 990126
ucugagccagggaaagcgc

SEQ ID NO: 990128 - RNA, 19 nt, Artificial Sequence
  Description of Artificial Sequence: Synthetic oligonucleotide
  Sense strand starting at position 1526 of SEQ ID NO: 914256
gagggucucugcucaacuu

SEQ ID NO: 990129 - RNA, 19 nt, Artificial Sequence
  Description of Artificial Sequence: Synthetic oligonucleotide
  Antisense strand to SEQ ID NO: 990128
aaguugagcagagacccuc

SEQ ID NO: 990130 - RNA, 19 nt, Artificial Sequence
  Description of Artificial Sequence: Synthetic oligonucleotide
  Sense strand starting at position 1535 of SEQ ID NO: 914256
ugcucaacuucuuggaacu

SEQ ID NO: 990131 - RNA, 19 nt, Artificial Sequence
  Description of Artificial Sequence: Synthetic oligonucleotide
  Antisense strand to SEQ ID NO: 990130
aguuccaagaaguugagca

SEQ ID NO: 990132 - RNA, 19 nt, Artificial Sequence
  Description of Artificial Sequence: Synthetic oligonucleotide
  Sense strand starting at position 1536 of SEQ ID NO: 914256
gcucaacuucuuggaacuu

SEQ ID NO: 990133 - RNA, 19 nt, Artificial Sequence
  Description of Artificial Sequence: Synthetic oligonucleotide
  Antisense strand to SEQ ID NO: 990132
aaguuccaagaaguugagc

SEQ ID NO: 990134 - RNA, 19 nt, Artificial Sequence
  Description of Artificial Sequence: Synthetic oligonucleotide
  Sense strand starting at position 1628 of SEQ ID NO: 914256
guaucuaucucucagagaa

SEQ ID NO: 990135 - RNA, 19 nt, Artificial Sequence
  Description of Artificial Sequence: Synthetic oligonucleotide
  Antisense strand to SEQ ID NO: 990134
uucucugagagauagauac

SEQ ID NO: 990136 - RNA, 19 nt, Artificial Sequence
  Description of Artificial Sequence: Synthetic oligonucleotide
  Sense strand starting at position 1744 of SEQ ID NO: 914256
gcaccuaccugcuaagaga

SEQ ID NO: 990137 - RNA, 19 nt, Artificial Sequence
  Description of Artificial Sequence: Synthetic oligonucleotide
  Antisense strand to SEQ ID NO: 990136
ucucuuagcagguaggugc

SEQ ID NO: 990138 - RNA, 19 nt, Artificial Sequence
  Description of Artificial Sequence: Synthetic oligonucleotide
  Sense strand starting at position 1916 of SEQ ID NO: 914256
ucugguuccugugcuuuau

SEQ ID NO: 990139 - RNA, 19 nt, Artificial Sequence
  Description of Artificial Sequence: Synthetic oligonucleotide
  Antisense strand to SEQ ID NO: 990138
auaaagcacaggaaccaga

SEQ ID NO: 990140 - RNA, 19 nt, Artificial Sequence
  Description of Artificial Sequence: Synthetic oligonucleotide
  Sense strand starting at position 1918 of SEQ ID NO: 914256
ugguuccugugcuuuauaa

SEQ ID NO: 990141 - RNA, 19 nt, Artificial Sequence
  Description of Artificial Sequence: Synthetic oligonucleotide
  Antisense strand to SEQ ID NO: 990140
uuauaaagcacaggaacca

SEQ ID NO: 990142 - RNA, 19 nt, Artificial Sequence
  Description of Artificial Sequence: Synthetic oligonucleotide
  Sense strand starting at position 2218 of SEQ ID NO: 914256
guccuuauccaggacccau

SEQ ID NO: 990143 - RNA, 19 nt, Artificial Sequence
  Description of Artificial Sequence: Synthetic oligonucleotide
  Antisense strand to SEQ ID NO: 990142
auggguccuggauaaggac

SEQ ID NO: 990144 - RNA, 19 nt, Artificial Sequence
  Description of Artificial Sequence: Synthetic oligonucleotide
  Sense strand starting at position 2652 of SEQ ID NO: 914256
ccuauuaugccuuauaagg

SEQ ID NO: 990145 - RNA, 19 nt, Artificial Sequence
  Description of Artificial Sequence: Synthetic oligonucleotide
  Antisense strand to SEQ ID NO: 990144
ccuuauaaggcauaauagg

SEQ ID NO: 990146 - RNA, 19 nt, Artificial Sequence
  Description of Artificial Sequence: Synthetic oligonucleotide
  Sense strand starting at position 2670 of SEQ ID NO: 914256
gucauaaccugagauugug

SEQ ID NO: 990147 - RNA, 19 nt, Artificial Sequence
  Description of Artificial Sequence: Synthetic oligonucleotide
  Antisense strand to SEQ ID NO: 990146
cacaaucucagguuaugac

SEQ ID NO: 990148 - RNA, 19 nt, Artificial Sequence
  Description of Artificial Sequence: Synthetic oligonucleotide
  Sense strand starting at position 2702 of SEQ ID NO: 914256
auuaauccaucguaaacgu

SEQ ID NO: 990149 - RNA, 19 nt, Artificial Sequence
  Description of Artificial Sequence: Synthetic oligonucleotide
  Antisense strand to SEQ ID NO: 990148
acguuuacgauggauuaau

SEQ ID NO: 990150 - RNA, 19 nt, Artificial Sequence
  Description of Artificial Sequence: Synthetic oligonucleotide
  Sense strand starting at position 2991 of SEQ ID NO: 914256
cguggauuccucuaggcug

SEQ ID NO: 990151 - RNA, 19 nt, Artificial Sequence
  Description of Artificial Sequence: Synthetic oligonucleotide
  Antisense strand to SEQ ID NO: 990150
cagccuagaggaauccacg

SEQ ID NO: 990152 - RNA, 19 nt, Artificial Sequence
  Description of Artificial Sequence: Synthetic oligonucleotide
  Sense strand starting at position 3075 of SEQ ID NO: 914256
caugaugaaucacgcuaga

SEQ ID NO: 990153 - RNA, 19 nt, Artificial Sequence
  Description of Artificial Sequence: Synthetic oligonucleotide
  Antisense strand to SEQ ID NO: 990152
ucuagcgugauucaucaug

SEQ ID NO: 990154 - RNA, 19 nt, Artificial Sequence
  Description of Artificial Sequence: Synthetic oligonucleotide
  Sense strand starting at position 3078 of SEQ ID NO: 914256
gaugaaucacgcuagacac

SEQ ID NO: 990155 - RNA, 19 nt, Artificial Sequence
  Description of Artificial Sequence: Synthetic oligonucleotide
  Antisense strand to SEQ ID NO: 990154
gugucuagcgugauucauc

SEQ ID NO: 990156 - RNA, 19 nt, Artificial Sequence
  Description of Artificial Sequence: Synthetic oligonucleotide
  Sense strand starting at position 3327 of SEQ ID NO: 914256
ccggcaauucgcuguguga

SEQ ID NO: 990157 - RNA, 19 nt, Artificial Sequence
  Description of Artificial Sequence: Synthetic oligonucleotide
  Antisense strand to SEQ ID NO: 990156
ucacacagcgaauugccgg

SEQ ID NO: 990158 - RNA, 19 nt, Artificial Sequence
  Description of Artificial Sequence: Synthetic oligonucleotide
  Sense strand starting at position 3328 of SEQ ID NO: 914256
cggcaauucgcugugugaa

SEQ ID NO: 990159 - RNA, 19 nt, Artificial Sequence
  Description of Artificial Sequence: Synthetic oligonucleotide
  Antisense strand to SEQ ID NO: 990158
uucacacagcgaauugccg

SEQ ID NO: 990160 - RNA, 19 nt, Artificial Sequence
  Description of Artificial Sequence: Synthetic oligonucleotide
  Sense strand starting at position 3329 of SEQ ID NO: 914256
ggcaauucgcugugugaag

SEQ ID NO: 990161 - RNA, 19 nt, Artificial Sequence
  Description of Artificial Sequence: Synthetic oligonucleotide
  Antisense strand to SEQ ID NO: 990160
cuucacacagcgaauugcc

SEQ ID NO: 990162 - RNA, 19 nt, Artificial Sequence
  Description of Artificial Sequence: Synthetic oligonucleotide
  Sense strand starting at position 3353 of SEQ ID NO: 914256
cgagucaugucccaucucu

SEQ ID NO: 990163 - RNA, 19 nt, Artificial Sequence
  Description of Artificial Sequence: Synthetic oligonucleotide
  Antisense strand to SEQ ID NO: 990162
agagaugggacaugacucg

SEQ ID NO: 990164 - RNA, 19 nt, Artificial Sequence
  Description of Artificial Sequence: Synthetic oligonucleotide
  Sense strand starting at position 3397 of SEQ ID NO: 914256
ccagcagaccuuuaagcuu

SEQ ID NO: 990165 - RNA, 19 nt, Artificial Sequence
  Description of Artificial Sequence: Synthetic oligonucleotide
  Antisense strand to SEQ ID NO: 990164
aagcuuaaaggucugcugg

SEQ ID NO: 990166 - RNA, 19 nt, Artificial Sequence
  Description of Artificial Sequence: Synthetic oligonucleotide
  Sense strand starting at position 3428 of SEQ ID NO: 914256
gccauauggcucugagcuc

SEQ ID NO: 990167 - RNA, 19 nt, Artificial Sequence
  Description of Artificial Sequence: Synthetic oligonucleotide
  Antisense strand to SEQ ID NO: 990166
gagcucagagccauauggc

SEQ ID NO: 990168 - RNA, 19 nt, Artificial Sequence
  Description of Artificial Sequence: Synthetic oligonucleotide
  Sense strand starting at position 3543 of SEQ ID NO: 914256
ggacucaacaguggacauu

SEQ ID NO: 990169 - RNA, 19 nt, Artificial Sequence
  Description of Artificial Sequence: Synthetic oligonucleotide
  Antisense strand to SEQ ID NO: 990168
aauguccacuguugagucc

SEQ ID NO: 990170 - RNA, 19 nt, Artificial Sequence
  Description of Artificial Sequence: Synthetic oligonucleotide
  Sense strand starting at position 3588 of SEQ ID NO: 914256
gaaguuauuuaaggacucu

SEQ ID NO: 990171 - RNA, 19 nt, Artificial Sequence
  Description of Artificial Sequence: Synthetic oligonucleotide
  Antisense strand to SEQ ID NO: 990170
agaguccuuaaauaacuuc

SEQ ID NO: 990172 - RNA, 19 nt, Artificial Sequence
  Description of Artificial Sequence: Synthetic oligonucleotide
  Sense strand starting at position 3629 of SEQ ID NO: 914256
ggaccugaauuccaucuga

SEQ ID NO: 990173 - RNA, 19 nt, Artificial Sequence
  Description of Artificial Sequence: Synthetic oligonucleotide
  Antisense strand to SEQ ID NO: 990172
ucagauggaauucaggucc

SEQ ID NO: 990174 - RNA, 19 nt, Artificial Sequence
  Description of Artificial Sequence: Synthetic oligonucleotide
  Sense strand starting at position 3908 of SEQ ID NO: 914256
cacuuuauccucugcgagu

SEQ ID NO: 990175 - RNA, 19 nt, Artificial Sequence
  Description of Artificial Sequence: Synthetic oligonucleotide
  Antisense strand to SEQ ID NO: 990174
acucgcagaggauaaagug

SEQ ID NO: 990176 - RNA, 19 nt, Artificial Sequence
  Description of Artificial Sequence: Synthetic oligonucleotide
  Sense strand starting at position 3910 of SEQ ID NO: 914256
cuuuauccucugcgaguca

SEQ ID NO: 990177 - RNA, 19 nt, Artificial Sequence
  Description of Artificial Sequence: Synthetic oligonucleotide
  Antisense strand to SEQ ID NO: 990176
ugacucgcagaggauaaag

SEQ ID NO: 990178 - RNA, 19 nt, Artificial Sequence
  Description of Artificial Sequence: Synthetic oligonucleotide
  Sense strand starting at position 3911 of SEQ ID NO: 914256
uuuauccucugcgagucaa

SEQ ID NO: 990179 - RNA, 19 nt, Artificial Sequence
  Description of Artificial Sequence: Synthetic oligonucleotide
  Antisense strand to SEQ ID NO: 990178
uugacucgcagaggauaaa

SEQ ID NO: 990180 - RNA, 19 nt, Artificial Sequence
  Description of Artificial Sequence: Synthetic oligonucleotide
  Sense strand starting at position 3926 of SEQ ID NO: 914256
ucaagcucuucgcgcagau

SEQ ID NO: 990181 - RNA, 19 nt, Artificial Sequence
  Description of Artificial Sequence: Synthetic oligonucleotide
  Antisense strand to SEQ ID NO: 990180
aucugcgcgaagagcuuga

SEQ ID NO: 990182 - RNA, 19 nt, Artificial Sequence
  Description of Artificial Sequence: Synthetic oligonucleotide
  Sense strand starting at position 45 of SEQ ID NO: 914257
gaaaucugauugcaaaugu

SEQ ID NO: 990183 - RNA, 19 nt, Artificial Sequence
  Description of Artificial Sequence: Synthetic oligonucleotide
  Antisense strand to SEQ ID NO: 990182
acauuugcaaucagauuuc

SEQ ID NO: 990184 - RNA, 19 nt, Artificial Sequence
  Description of Artificial Sequence: Synthetic oligonucleotide
  Sense strand starting at position 52 of SEQ ID NO: 914257
gauugcaaaugucuuagaa

SEQ ID NO: 990185 - RNA, 19 nt, Artificial Sequence
  Description of Artificial Sequence: Synthetic oligonucleotide
  Antisense strand to SEQ ID NO: 990184
uucuaagacauuugcaauc

SEQ ID NO: 990186 - RNA, 19 nt, Artificial Sequence
  Description of Artificial Sequence: Synthetic oligonucleotide
  Sense strand starting at position 209 of SEQ ID NO: 914257
cagcgucagccagagcuua

SEQ ID NO: 990187 - RNA, 19 nt, Artificial Sequence
  Description of Artificial Sequence: Synthetic oligonucleotide
  Antisense strand to SEQ ID NO: 990186
uaagcucuggcugacgcug

SEQ ID NO: 990188 - RNA, 19 nt, Artificial Sequence
  Description of Artificial Sequence: Synthetic oligonucleotide
  Sense strand starting at position 487 of SEQ ID NO: 914257
caggguagcugaugaaaug

SEQ ID NO: 990189 - RNA, 19 nt, Artificial Sequence
  Description of Artificial Sequence: Synthetic oligonucleotide
  Antisense strand to SEQ ID NO: 990188
cauuucaucagcuacccug

SEQ ID NO: 990190 - RNA, 19 nt, Artificial Sequence
  Description of Artificial Sequence: Synthetic oligonucleotide
  Sense strand starting at position 517 of SEQ ID NO: 914257
gucugaagcccugaucugu

SEQ ID NO: 990191 - RNA, 19 nt, Artificial Sequence
  Description of Artificial Sequence: Synthetic oligonucleotide
  Antisense strand to SEQ ID NO: 990190
acagaucagggcuucagac

SEQ ID NO: 990192 - RNA, 19 nt, Artificial Sequence
  Description of Artificial Sequence: Synthetic oligonucleotide
  Sense strand starting at position 551 of SEQ ID NO: 914257
ugggacuaccugugugacu

SEQ ID NO: 990193 - RNA, 19 nt, Artificial Sequence
  Description of Artificial Sequence: Synthetic oligonucleotide
  Antisense strand to SEQ ID NO: 990192
agucacacagguaguccca

SEQ ID NO: 990194 - RNA, 19 nt, Artificial Sequence
  Description of Artificial Sequence: Synthetic oligonucleotide
  Sense strand starting at position 609 of SEQ ID NO: 914257
ucuguuccacagggacaaa

SEQ ID NO: 990195 - RNA, 19 nt, Artificial Sequence
  Description of Artificial Sequence: Synthetic oligonucleotide
  Antisense strand to SEQ ID NO: 990194
uuugucccuguggaacaga

SEQ ID NO: 990196 - RNA, 19 nt, Artificial Sequence
  Description of Artificial Sequence: Synthetic oligonucleotide
  Sense strand starting at position 725 of SEQ ID NO: 914257
guccacauccuguguacuu

SEQ ID NO: 990197 - RNA, 19 nt, Artificial Sequence
  Description of Artificial Sequence: Synthetic oligonucleotide
  Antisense strand to SEQ ID NO: 990196
aaguacacaggauguggac

SEQ ID NO: 990198 - RNA, 19 nt, Artificial Sequence
  Description of Artificial Sequence: Synthetic oligonucleotide
  Sense strand starting at position 726 of SEQ ID NO: 914257
uccacauccuguguacuuu

SEQ ID NO: 990199 - RNA, 19 nt, Artificial Sequence
  Description of Artificial Sequence: Synthetic oligonucleotide
  Antisense strand to SEQ ID NO: 990198
aaaguacacaggaugugga

SEQ ID NO: 990200 - RNA, 19 nt, Artificial Sequence
  Description of Artificial Sequence: Synthetic oligonucleotide
  Sense strand starting at position 772 of SEQ ID NO: 914257
uuugauaccaggugugaug

SEQ ID NO: 990201 - RNA, 19 nt, Artificial Sequence
  Description of Artificial Sequence: Synthetic oligonucleotide
  Antisense strand to SEQ ID NO: 990200
caucacaccugguaucaaa

SEQ ID NO: 990202 - RNA, 19 nt, Artificial Sequence
  Description of Artificial Sequence: Synthetic oligonucleotide
  Sense strand starting at position 783 of SEQ ID NO: 914257
gugugaugucaguugucuu

SEQ ID NO: 990203 - RNA, 19 nt, Artificial Sequence
  Description of Artificial Sequence: Synthetic oligonucleotide
  Antisense strand to SEQ ID NO: 990202
aagacaacugacaucacac

SEQ ID NO: 990204 - RNA, 19 nt, Artificial Sequence
  Description of Artificial Sequence: Synthetic oligonucleotide
  Sense strand starting at position 784 of SEQ ID NO: 914257
ugugaugucaguugucuua

SEQ ID NO: 990205 - RNA, 19 nt, Artificial Sequence
  Description of Artificial Sequence: Synthetic oligonucleotide
  Antisense strand to SEQ ID NO: 990204
uaagacaacugacaucaca

SEQ ID NO: 990206 - RNA, 19 nt, Artificial Sequence
  Description of Artificial Sequence: Synthetic oligonucleotide
  Sense strand starting at position 786 of SEQ ID NO: 914257
ugaugucaguugucuuaca

SEQ ID NO: 990207 - RNA, 19 nt, Artificial Sequence
  Description of Artificial Sequence: Synthetic oligonucleotide
  Antisense strand to SEQ ID NO: 990206
uguaagacaacugacauca

SEQ ID NO: 990208 - RNA, 19 nt, Artificial Sequence
  Description of Artificial Sequence: Synthetic oligonucleotide
  Sense strand starting at position 1180 of SEQ ID NO: 914257
aucgucaggcgagguaaau

SEQ ID NO: 990209 - RNA, 19 nt, Artificial Sequence
  Description of Artificial Sequence: Synthetic oligonucleotide
  Antisense strand to SEQ ID NO: 990208
auuuaccucgccugacgau

SEQ ID NO: 990210 - RNA, 19 nt, Artificial Sequence
  Description of Artificial Sequence: Synthetic oligonucleotide
  Sense strand starting at position 2382 of SEQ ID NO: 914257
aucucagacccuggcuaua

SEQ ID NO: 990211 - RNA, 19 nt, Artificial Sequence
  Description of Artificial Sequence: Synthetic oligonucleotide
  Antisense strand to SEQ ID NO: 990210
uauagccagggucugagau

SEQ ID NO: 990212 - RNA, 19 nt, Artificial Sequence
  Description of Artificial Sequence: Synthetic oligonucleotide
  Sense strand starting at position 2696 of SEQ ID NO: 914257
ccuagauuggacugucaac

SEQ ID NO: 990213 - RNA, 19 nt, Artificial Sequence
  Description of Artificial Sequence: Synthetic oligonucleotide
  Antisense strand to SEQ ID NO: 990212
guugacaguccaaucuagg

SEQ ID NO: 990214 - RNA, 19 nt, Artificial Sequence
  Description of Artificial Sequence: Synthetic oligonucleotide
  Sense strand starting at position 2713 of SEQ ID NO: 914257
acuccagaucacuguccua

SEQ ID NO: 990215 - RNA, 19 nt, Artificial Sequence
  Description of Artificial Sequence: Synthetic oligonucleotide
  Antisense strand to SEQ ID NO: 990214
uaggacagugaucuggagu

SEQ ID NO: 990216 - RNA, 19 nt, Artificial Sequence
  Description of Artificial Sequence: Synthetic oligonucleotide
  Sense strand starting at position 2797 of SEQ ID NO: 914257
gacccagaauccuuaguag

SEQ ID NO: 990217 - RNA, 19 nt, Artificial Sequence
  Description of Artificial Sequence: Synthetic oligonucleotide
  Antisense strand to SEQ ID NO: 990216
cuacuaaggauucuggguc

SEQ ID NO: 990218 - RNA, 19 nt, Artificial Sequence
  Description of Artificial Sequence: Synthetic oligonucleotide
  Sense strand starting at position 2808 of SEQ ID NO: 914257
cuuaguaggucacccagaa

SEQ ID NO: 990219 - RNA, 19 nt, Artificial Sequence
  Description of Artificial Sequence: Synthetic oligonucleotide
  Antisense strand to SEQ ID NO: 990218
uucugggugaccuacuaag

SEQ ID NO: 990220 - RNA, 19 nt, Artificial Sequence
  Description of Artificial Sequence: Synthetic oligonucleotide
  Sense strand starting at position 3039 of SEQ ID NO: 914257
ucaggaugguuccacaugu

SEQ ID NO: 990221 - RNA, 19 nt, Artificial Sequence
  Description of Artificial Sequence: Synthetic oligonucleotide
  Antisense strand to SEQ ID NO: 990220
acauguggaaccauccuga

SEQ ID NO: 990222 - RNA, 19 nt, Artificial Sequence
  Description of Artificial Sequence: Synthetic oligonucleotide
  Sense strand starting at position 3397 of SEQ ID NO: 914257
uugugagguucuccucuca

SEQ ID NO: 990223 - RNA, 19 nt, Artificial Sequence
  Description of Artificial Sequence: Synthetic oligonucleotide
  Antisense strand to SEQ ID NO: 990222
ugagaggagaaccucacaa

SEQ ID NO: 990224 - RNA, 19 nt, Artificial Sequence
  Description of Artificial Sequence: Synthetic oligonucleotide
  Sense strand starting at position 3438 of SEQ ID NO: 914257
cccauauacccaugucaga

SEQ ID NO: 990225 - RNA, 19 nt, Artificial Sequence
  Description of Artificial Sequence: Synthetic oligonucleotide
  Antisense strand to SEQ ID NO: 990224
ucugacauggguauauggg

SEQ ID NO: 990226 - RNA, 19 nt, Artificial Sequence
  Description of Artificial Sequence: Synthetic oligonucleotide
  Sense strand starting at position 3540 of SEQ ID NO: 914257
uccugagaaucuccgugaa

SEQ ID NO: 990227 - RNA, 19 nt, Artificial Sequence
  Description of Artificial Sequence: Synthetic oligonucleotide
  Antisense strand to SEQ ID NO: 990226
uucacggagauucucagga

SEQ ID NO: 990228 - RNA, 19 nt, Artificial Sequence
  Description of Artificial Sequence: Synthetic oligonucleotide
  Sense strand starting at position 3542 of SEQ ID NO: 914257
cugagaaucuccgugaauc

SEQ ID NO: 990229 - RNA, 19 nt, Artificial Sequence
  Description of Artificial Sequence: Synthetic oligonucleotide
  Antisense strand to SEQ ID NO: 990228
gauucacggagauucucag

SEQ ID NO: 990230 - RNA, 19 nt, Artificial Sequence
  Description of Artificial Sequence: Synthetic oligonucleotide
  Sense strand starting at position 3543 of SEQ ID NO: 914257
ugagaaucuccgugaaucu

SEQ ID NO: 990231 - RNA, 19 nt, Artificial Sequence
  Description of Artificial Sequence: Synthetic oligonucleotide
  Antisense strand to SEQ ID NO: 990230
agauucacggagauucuca

SEQ ID NO: 990232 - RNA, 19 nt, Artificial Sequence
  Description of Artificial Sequence: Synthetic oligonucleotide
  Sense strand starting at position 3544 of SEQ ID NO: 914257
gagaaucuccgugaaucug

SEQ ID NO: 990233 - RNA, 19 nt, Artificial Sequence
  Description of Artificial Sequence: Synthetic oligonucleotide
  Antisense strand to SEQ ID NO: 990232
cagauucacggagauucuc

SEQ ID NO: 990234 - RNA, 19 nt, Artificial Sequence
  Description of Artificial Sequence: Synthetic oligonucleotide
  Sense strand starting at position 3550 of SEQ ID NO: 914257
cuccgugaaucugucuacu

SEQ ID NO: 990235 - RNA, 19 nt, Artificial Sequence
  Description of Artificial Sequence: Synthetic oligonucleotide
  Antisense strand to SEQ ID NO: 990234
aguagacagauucacggag

SEQ ID NO: 990236 - RNA, 19 nt, Artificial Sequence
  Description of Artificial Sequence: Synthetic oligonucleotide
  Sense strand starting at position 3552 of SEQ ID NO: 914257
ccgugaaucugucuacuuc

SEQ ID NO: 990237 - RNA, 19 nt, Artificial Sequence
  Description of Artificial Sequence: Synthetic oligonucleotide
  Antisense strand to SEQ ID NO: 990236
gaaguagacagauucacgg

SEQ ID NO: 990238 - RNA, 19 nt, Artificial Sequence
  Description of Artificial Sequence: Synthetic oligonucleotide
  Sense strand starting at position 3553 of SEQ ID NO: 914257
cgugaaucugucuacuucu

SEQ ID NO: 990239 - RNA, 19 nt, Artificial Sequence
  Description of Artificial Sequence: Synthetic oligonucleotide
  Antisense strand to SEQ ID NO: 990238
agaaguagacagauucacg

SEQ ID NO: 990240 - RNA, 19 nt, Artificial Sequence
  Description of Artificial Sequence: Synthetic oligonucleotide
  Sense strand starting at position 3634 of SEQ ID NO: 914257
ucuagaucugauggaguca

SEQ ID NO: 990241 - RNA, 19 nt, Artificial Sequence
  Description of Artificial Sequence: Synthetic oligonucleotide
  Antisense strand to SEQ ID NO: 990240
ugacuccaucagaucuaga

SEQ ID NO: 990242 - RNA, 19 nt, Artificial Sequence
  Description of Artificial Sequence: Synthetic oligonucleotide
  Sense strand starting at position 3784 of SEQ ID NO: 914257
aagucaagaucuuggagga

SEQ ID NO: 990243 - RNA, 19 nt, Artificial Sequence
  Description of Artificial Sequence: Synthetic oligonucleotide
  Antisense strand to SEQ ID NO: 990242
uccuccaagaucuugacuu

SEQ ID NO: 990244 - RNA, 19 nt, Artificial Sequence
  Description of Artificial Sequence: Synthetic oligonucleotide
  Sense strand starting at position 3809 of SEQ ID NO: 914257
ccuugaaugcuccaguuug

SEQ ID NO: 990245 - RNA, 19 nt, Artificial Sequence
  Description of Artificial Sequence: Synthetic oligonucleotide
  Antisense strand to SEQ ID NO: 990244
caaacuggagcauucaagg

SEQ ID NO: 990246 - RNA, 19 nt, Artificial Sequence
  Description of Artificial Sequence: Synthetic oligonucleotide
  Sense strand starting at position 3817 of SEQ ID NO: 914257
gcuccaguuuguuucgcua

SEQ ID NO: 990247 - RNA, 19 nt, Artificial Sequence
  Description of Artificial Sequence: Synthetic oligonucleotide
  Antisense strand to SEQ ID NO: 990246
uagcgaaacaaacuggagc

SEQ ID NO: 990248 - RNA, 19 nt, Artificial Sequence
  Description of Artificial Sequence: Synthetic oligonucleotide
  Sense strand starting at position 3821 of SEQ ID NO: 914257
caguuuguuucgcuaccau

SEQ ID NO: 990249 - RNA, 19 nt, Artificial Sequence
  Description of Artificial Sequence: Synthetic oligonucleotide
  Antisense strand to SEQ ID NO: 990248
augguagcgaaacaaacug

SEQ ID NO: 990250 - RNA, 19 nt, Artificial Sequence
  Description of Artificial Sequence: Synthetic oligonucleotide
  Sense strand starting at position 3928 of SEQ ID NO: 914257
guaccuuccuccguggaca

SEQ ID NO: 990251 - RNA, 19 nt, Artificial Sequence
  Description of Artificial Sequence: Synthetic oligonucleotide
  Antisense strand to SEQ ID NO: 990250
uguccacggaggaagguac

SEQ ID NO: 990252 - RNA, 19 nt, Artificial Sequence
  Description of Artificial Sequence: Synthetic oligonucleotide
  Sense strand starting at position 3929 of SEQ ID NO: 914257
uaccuuccuccguggacaa

SEQ ID NO: 990253 - RNA, 19 nt, Artificial Sequence
  Description of Artificial Sequence: Synthetic oligonucleotide
  Antisense strand to SEQ ID NO: 990252
uuguccacggaggaaggua

SEQ ID NO: 990254 - RNA, 19 nt, Artificial Sequence
  Description of Artificial Sequence: Synthetic oligonucleotide
  Sense strand starting at position 3940 of SEQ ID NO: 914257
guggacaacuccuacucau

SEQ ID NO: 990255 - RNA, 19 nt, Artificial Sequence
  Description of Artificial Sequence: Synthetic oligonucleotide
  Antisense strand to SEQ ID NO: 990254
augaguaggaguuguccac

SEQ ID NO: 990256 - RNA, 19 nt, Artificial Sequence
  Description of Artificial Sequence: Synthetic oligonucleotide
  Sense strand starting at position 3949 of SEQ ID NO: 914257
uccuacucauccgcuaaga

SEQ ID NO: 990257 - RNA, 19 nt, Artificial Sequence
  Description of Artificial Sequence: Synthetic oligonucleotide
  Antisense strand to SEQ ID NO: 990256
ucuuagcggaugaguagga

SEQ ID NO: 990258 - RNA, 19 nt, Artificial Sequence
  Description of Artificial Sequence: Synthetic oligonucleotide
  Sense strand starting at position 3951 of SEQ ID NO: 914257
cuacucauccgcuaagacu

SEQ ID NO: 990259 - RNA, 19 nt, Artificial Sequence
  Description of Artificial Sequence: Synthetic oligonucleotide
  Antisense strand to SEQ ID NO: 990258
agucuuagcggaugaguag

SEQ ID NO: 990260 - RNA, 19 nt, Artificial Sequence
  Description of Artificial Sequence: Synthetic oligonucleotide
  Sense strand starting at position 584 of SEQ ID NO: 914258
gaagacaugucuuuccaga

SEQ ID NO: 990261 - RNA, 19 nt, Artificial Sequence
  Description of Artificial Sequence: Synthetic oligonucleotide
  Antisense strand to SEQ ID NO: 990260
ucuggaaagacaugucuuc

SEQ ID NO: 990262 - RNA, 19 nt, Artificial Sequence
  Description of Artificial Sequence: Synthetic oligonucleotide
  Sense strand starting at position 586 of SEQ ID NO: 914258
agacaugucuuuccagaua

SEQ ID NO: 990263 - RNA, 19 nt, Artificial Sequence
  Description of Artificial Sequence: Synthetic oligonucleotide
  Antisense strand to SEQ ID NO: 990262
uaucuggaaagacaugucu

SEQ ID NO: 990264 - RNA, 19 nt, Artificial Sequence
  Description of Artificial Sequence: Synthetic oligonucleotide
  Sense strand starting at position 619 of SEQ ID NO: 914258
gccauauaguaauuaagag

SEQ ID NO: 990265 - RNA, 19 nt, Artificial Sequence
  Description of Artificial Sequence: Synthetic oligonucleotide
  Antisense strand to SEQ ID NO: 990264
cucuuaauuacuauauggc

SEQ ID NO: 990266 - RNA, 19 nt, Artificial Sequence
  Description of Artificial Sequence: Synthetic oligonucleotide
  Sense strand starting at position 637 of SEQ ID NO: 914258
gacagugauacugguaaag

SEQ ID NO: 990267 - RNA, 19 nt, Artificial Sequence
  Description of Artificial Sequence: Synthetic oligonucleotide
  Antisense strand to SEQ ID NO: 990266
cuuuaccaguaucacuguc

SEQ ID NO: 990268 - RNA, 19 nt, Artificial Sequence
  Description of Artificial Sequence: Synthetic oligonucleotide
  Sense strand starting at position 709 of SEQ ID NO: 914258
agugaugcugucuacuuga

SEQ ID NO: 990269 - RNA, 19 nt, Artificial Sequence
  Description of Artificial Sequence: Synthetic oligonucleotide
  Antisense strand to SEQ ID NO: 990268
ucaaguagacagcaucacu

SEQ ID NO: 990270 - RNA, 19 nt, Artificial Sequence
  Description of Artificial Sequence: Synthetic oligonucleotide
  Sense strand starting at position 718 of SEQ ID NO: 914258
gucuacuugacagagguga

SEQ ID NO: 990271 - RNA, 19 nt, Artificial Sequence
  Description of Artificial Sequence: Synthetic oligonucleotide
  Antisense strand to SEQ ID NO: 990270
ucaccucugucaaguagac

SEQ ID NO: 990272 - RNA, 19 nt, Artificial Sequence
  Description of Artificial Sequence: Synthetic oligonucleotide
  Sense strand starting at position 731 of SEQ ID NO: 914258
aggugacccgcagaucaau

SEQ ID NO: 990273 - RNA, 19 nt, Artificial Sequence
  Description of Artificial Sequence: Synthetic oligonucleotide
  Antisense strand to SEQ ID NO: 990272
auugaucugcgggucaccu

SEQ ID NO: 990274 - RNA, 19 nt, Artificial Sequence
  Description of Artificial Sequence: Synthetic oligonucleotide
  Sense strand starting at position 789 of SEQ ID NO: 914258
guauuuauuugucaaugca

SEQ ID NO: 990275 - RNA, 19 nt, Artificial Sequence
  Description of Artificial Sequence: Synthetic oligonucleotide
  Antisense strand to SEQ ID NO: 990274
ugcauugacaaauaaauac

SEQ ID NO: 990276 - RNA, 19 nt, Artificial Sequence
  Description of Artificial Sequence: Synthetic oligonucleotide
  Sense strand starting at position 814 of SEQ ID NO: 914258
uuauuagucuacccaagug

SEQ ID NO: 990277 - RNA, 19 nt, Artificial Sequence
  Description of Artificial Sequence: Synthetic oligonucleotide
  Antisense strand to SEQ ID NO: 990276
cacuuggguagacuaauaa

SEQ ID NO: 990278 - RNA, 19 nt, Artificial Sequence
  Description of Artificial Sequence: Synthetic oligonucleotide
  Sense strand starting at position 863 of SEQ ID NO: 914258
ucuugaguccaggaaaggu

SEQ ID NO: 990279 - RNA, 19 nt, Artificial Sequence
  Description of Artificial Sequence: Synthetic oligonucleotide
  Antisense strand to SEQ ID NO: 990278
accuuuccuggacucaaga

SEQ ID NO: 990280 - RNA, 19 nt, Artificial Sequence
  Description of Artificial Sequence: Synthetic oligonucleotide
  Sense strand starting at position 867 of SEQ ID NO: 914258
gaguccaggaaaggugaua

SEQ ID NO: 990281 - RNA, 19 nt, Artificial Sequence
  Description of Artificial Sequence: Synthetic oligonucleotide
  Antisense strand to SEQ ID NO: 990280
uaucaccuuuccuggacuc

SEQ ID NO: 990282 - RNA, 19 nt, Artificial Sequence
  Description of Artificial Sequence: Synthetic oligonucleotide
  Sense strand starting at position 899 of SEQ ID NO: 914258
ugguauuaccuuuaaagua

SEQ ID NO: 990283 - RNA, 19 nt, Artificial Sequence
  Description of Artificial Sequence: Synthetic oligonucleotide
  Antisense strand to SEQ ID NO: 990282
uacuuuaaagguaauacca

SEQ ID NO: 990284 - RNA, 19 nt, Artificial Sequence
  Description of Artificial Sequence: Synthetic oligonucleotide
  Sense strand starting at position 961 of SEQ ID NO: 914258
ucaggaauagucugugaaa

SEQ ID NO: 990285 - RNA, 19 nt, Artificial Sequence
  Description of Artificial Sequence: Synthetic oligonucleotide
  Antisense strand to SEQ ID NO: 990284
uuucacagacuauuccuga

SEQ ID NO: 990286 - RNA, 19 nt, Artificial Sequence
  Description of Artificial Sequence: Synthetic oligonucleotide
  Sense strand starting at position 962 of SEQ ID NO: 914258
caggaauagucugugaaag

SEQ ID NO: 990287 - RNA, 19 nt, Artificial Sequence
  Description of Artificial Sequence: Synthetic oligonucleotide
  Antisense strand to SEQ ID NO: 990286
cuuucacagacuauuccug

SEQ ID NO: 990288 - RNA, 19 nt, Artificial Sequence
  Description of Artificial Sequence: Synthetic oligonucleotide
  Sense strand starting at position 963 of SEQ ID NO: 914258
aggaauagucugugaaagg

SEQ ID NO: 990289 - RNA, 19 nt, Artificial Sequence
  Description of Artificial Sequence: Synthetic oligonucleotide
  Antisense strand to SEQ ID NO: 990288
ccuuucacagacuauuccu

SEQ ID NO: 990290 - RNA, 19 nt, Artificial Sequence
  Description of Artificial Sequence: Synthetic oligonucleotide
  Sense strand starting at position 1049 of SEQ ID NO: 914258
guugcauaggacuagacua

SEQ ID NO: 990291 - RNA, 19 nt, Artificial Sequence
  Description of Artificial Sequence: Synthetic oligonucleotide
  Antisense strand to SEQ ID NO: 990290
uagucuaguccuaugcaac

SEQ ID NO: 990292 - RNA, 19 nt, Artificial Sequence
  Description of Artificial Sequence: Synthetic oligonucleotide
  Sense strand starting at position 1165 of SEQ ID NO: 914258
agcagauuucuguggaguu

SEQ ID NO: 990293 - RNA, 19 nt, Artificial Sequence
  Description of Artificial Sequence: Synthetic oligonucleotide
  Antisense strand to SEQ ID NO: 990292
aacuccacagaaaucugcu

SEQ ID NO: 990294 - RNA, 19 nt, Artificial Sequence
  Description of Artificial Sequence: Synthetic oligonucleotide
  Sense strand starting at position 1175 of SEQ ID NO: 914258
uguggaguucccgaagaaa

SEQ ID NO: 990295 - RNA, 19 nt, Artificial Sequence
  Description of Artificial Sequence: Synthetic oligonucleotide
  Antisense strand to SEQ ID NO: 990294
uuucuucgggaacuccaca

SEQ ID NO: 990296 - RNA, 19 nt, Artificial Sequence
  Description of Artificial Sequence: Synthetic oligonucleotide
  Sense strand starting at position 1218 of SEQ ID NO: 914258
uggcuuuccguguugugua

SEQ ID NO: 990297 - RNA, 19 nt, Artificial Sequence
  Description of Artificial Sequence: Synthetic oligonucleotide
  Antisense strand to SEQ ID NO: 990296
uacacaacacggaaagcca

SEQ ID NO: 990298 - RNA, 19 nt, Artificial Sequence
  Description of Artificial Sequence: Synthetic oligonucleotide
  Sense strand starting at position 1244 of SEQ ID NO: 914258
gcuuuaggugcguuuccaa

SEQ ID NO: 990299 - RNA, 19 nt, Artificial Sequence
  Description of Artificial Sequence: Synthetic oligonucleotide
  Antisense strand to SEQ ID NO: 990298
uuggaaacgcaccuaaagc

SEQ ID NO: 990300 - RNA, 19 nt, Artificial Sequence
  Description of Artificial Sequence: Synthetic oligonucleotide
  Sense strand starting at position 1268 of SEQ ID NO: 914258
ggaacauguuacuucugga

SEQ ID NO: 990301 - RNA, 19 nt, Artificial Sequence
  Description of Artificial Sequence: Synthetic oligonucleotide
  Antisense strand to SEQ ID NO: 990300
uccagaaguaacauguucc

SEQ ID NO: 990302 - RNA, 19 nt, Artificial Sequence
  Description of Artificial Sequence: Synthetic oligonucleotide
  Sense strand starting at position 1273 of SEQ ID NO: 914258
auguuacuucuggauggua

SEQ ID NO: 990303 - RNA, 19 nt, Artificial Sequence
  Description of Artificial Sequence: Synthetic oligonucleotide
  Antisense strand to SEQ ID NO: 990302
uaccauccagaaguaacau

SEQ ID NO: 990304 - RNA, 19 nt, Artificial Sequence
  Description of Artificial Sequence: Synthetic oligonucleotide
  Sense strand starting at position 1597 of SEQ ID NO: 914258
agaugcucgccacaggaaa

SEQ ID NO: 990305 - RNA, 19 nt, Artificial Sequence
  Description of Artificial Sequence: Synthetic oligonucleotide
  Antisense strand to SEQ ID NO: 990304
uuuccuguggcgagcaucu

SEQ ID NO: 990306 - RNA, 19 nt, Artificial Sequence
  Description of Artificial Sequence: Synthetic oligonucleotide
  Sense strand starting at position 1642 of SEQ ID NO: 914258
cgacgaagucgucucggua

SEQ ID NO: 990307 - RNA, 19 nt, Artificial Sequence
  Description of Artificial Sequence: Synthetic oligonucleotide
  Antisense strand to SEQ ID NO: 990306
uaccgagacgacuucgucg

SEQ ID NO: 990308 - RNA, 19 nt, Artificial Sequence
  Description of Artificial Sequence: Synthetic oligonucleotide
  Sense strand starting at position 1755 of SEQ ID NO: 914258
ggguuuccuaaggguagga

SEQ ID NO: 990309 - RNA, 19 nt, Artificial Sequence
  Description of Artificial Sequence: Synthetic oligonucleotide
  Antisense strand to SEQ ID NO: 990308
uccuacccuuaggaaaccc

SEQ ID NO: 990310 - RNA, 19 nt, Artificial Sequence
  Description of Artificial Sequence: Synthetic oligonucleotide
  Sense strand starting at position 2087 of SEQ ID NO: 914258
gaaggucugcaacauguau

SEQ ID NO: 990311 - RNA, 19 nt, Artificial Sequence
  Description of Artificial Sequence: Synthetic oligonucleotide
  Antisense strand to SEQ ID NO: 990310
auacauguugcagaccuuc

SEQ ID NO: 990312 - RNA, 19 nt, Artificial Sequence
  Description of Artificial Sequence: Synthetic oligonucleotide
  Sense strand starting at position 2218 of SEQ ID NO: 914258
guuggcuuuagauaacugu

SEQ ID NO: 990313 - RNA, 19 nt, Artificial Sequence
  Description of Artificial Sequence: Synthetic oligonucleotide
  Antisense strand to SEQ ID NO: 990312
acaguuaucuaaagccaac

SEQ ID NO: 990314 - RNA, 19 nt, Artificial Sequence
  Description of Artificial Sequence: Synthetic oligonucleotide
  Sense strand starting at position 2749 of SEQ ID NO: 914258
gucuuugguuaacuauaua

SEQ ID NO: 990315 - RNA, 19 nt, Artificial Sequence
  Description of Artificial Sequence: Synthetic oligonucleotide
  Antisense strand to SEQ ID NO: 990314
uauauaguuaaccaaagac

SEQ ID NO: 990316 - RNA, 19 nt, Artificial Sequence
  Description of Artificial Sequence: Synthetic oligonucleotide
  Sense strand starting at position 2768 of SEQ ID NO: 914258
ugaauauaaccguaucugu

SEQ ID NO: 990317 - RNA, 19 nt, Artificial Sequence
  Description of Artificial Sequence: Synthetic oligonucleotide
  Antisense strand to SEQ ID NO: 990316
acagauacgguuauauuca

SEQ ID NO: 990318 - RNA, 19 nt, Artificial Sequence
  Description of Artificial Sequence: Synthetic oligonucleotide
  Sense strand starting at position 2848 of SEQ ID NO: 914258
auuacaucauugccaggaa

SEQ ID NO: 990319 - RNA, 19 nt, Artificial Sequence
  Description of Artificial Sequence: Synthetic oligonucleotide
  Antisense strand to SEQ ID NO: 990318
uuccuggcaaugauguaau

SEQ ID NO: 990320 - RNA, 19 nt, Artificial Sequence
  Description of Artificial Sequence: Synthetic oligonucleotide
  Sense strand starting at position 2851 of SEQ ID NO: 914258
acaucauugccaggaauua

SEQ ID NO: 990321 - RNA, 19 nt, Artificial Sequence
  Description of Artificial Sequence: Synthetic oligonucleotide
  Antisense strand to SEQ ID NO: 990320
uaauuccuggcaaugaugu

SEQ ID NO: 990322 - RNA, 19 nt, Artificial Sequence
  Description of Artificial Sequence: Synthetic oligonucleotide
  Sense strand starting at position 3084 of SEQ ID NO: 914258
acaaguccugguuacauaa

SEQ ID NO: 990323 - RNA, 19 nt, Artificial Sequence
  Description of Artificial Sequence: Synthetic oligonucleotide
  Antisense strand to SEQ ID NO: 990322
uuauguaaccaggacuugu

SEQ ID NO: 990324 - RNA, 19 nt, Artificial Sequence
  Description of Artificial Sequence: Synthetic oligonucleotide
  Sense strand starting at position 3091 of SEQ ID NO: 914258
cugguuacauaaucagaau

SEQ ID NO: 990325 - RNA, 19 nt, Artificial Sequence
  Description of Artificial Sequence: Synthetic oligonucleotide
  Antisense strand to SEQ ID NO: 990324
auucugauuauguaaccag

SEQ ID NO: 990326 - RNA, 19 nt, Artificial Sequence
  Description of Artificial Sequence: Synthetic oligonucleotide
  Sense strand starting at position 3541 of SEQ ID NO: 914258
uaaagaguguggccaucua

SEQ ID NO: 990327 - RNA, 19 nt, Artificial Sequence
  Description of Artificial Sequence: Synthetic oligonucleotide
  Antisense strand to SEQ ID NO: 990326
uagauggccacacucuuua

SEQ ID NO: 990328 - RNA, 19 nt, Artificial Sequence
  Description of Artificial Sequence: Synthetic oligonucleotide
  Sense strand starting at position 3555 of SEQ ID NO: 914258
aucuaucagcacgagguaa

SEQ ID NO: 990329 - RNA, 19 nt, Artificial Sequence
  Description of Artificial Sequence: Synthetic oligonucleotide
  Antisense strand to SEQ ID NO: 990328
uuaccucgugcugauagau

SEQ ID NO: 990330 - RNA, 19 nt, Artificial Sequence
  Description of Artificial Sequence: Synthetic oligonucleotide
  Sense strand starting at position 3684 of SEQ ID NO: 914258
gcacuuguucuggaggaga

SEQ ID NO: 990331 - RNA, 19 nt, Artificial Sequence
  Description of Artificial Sequence: Synthetic oligonucleotide
  Antisense strand to SEQ ID NO: 990330
ucuccuccagaacaagugc

SEQ ID NO: 990332 - RNA, 19 nt, Artificial Sequence
  Description of Artificial Sequence: Synthetic oligonucleotide
  Sense strand starting at position 3687 of SEQ ID NO: 914258
cuuguucuggaggagaagu

SEQ ID NO: 990333 - RNA, 19 nt, Artificial Sequence
  Description of Artificial Sequence: Synthetic oligonucleotide
  Antisense strand to SEQ ID NO: 990332
acuucuccuccagaacaag

SEQ ID NO: 990334 - RNA, 19 nt, Artificial Sequence
  Description of Artificial Sequence: Synthetic oligonucleotide
  Sense strand starting at position 3725 of SEQ ID NO: 914258
gggaguccucuacagaagu

SEQ ID NO: 990335 - RNA, 19 nt, Artificial Sequence
  Description of Artificial Sequence: Synthetic oligonucleotide
  Antisense strand to SEQ ID NO: 990334
acuucuguagaggacuccc

SEQ ID NO: 990336 - RNA, 19 nt, Artificial Sequence
  Description of Artificial Sequence: Synthetic oligonucleotide
  Sense strand starting at position 3925 of SEQ ID NO: 914258
ccaggaaauuuauaagauc

SEQ ID NO: 990337 - RNA, 19 nt, Artificial Sequence
  Description of Artificial Sequence: Synthetic oligonucleotide
  Antisense strand to SEQ ID NO: 990336
gaucuuauaaauuuccugg

SEQ ID NO: 990338 - RNA, 19 nt, Artificial Sequence
  Description of Artificial Sequence: Synthetic oligonucleotide
  Sense strand starting at position 3981 of SEQ ID NO: 914258
ugguuaagacuuugaacug

SEQ ID NO: 990339 - RNA, 19 nt, Artificial Sequence
  Description of Artificial Sequence: Synthetic oligonucleotide
  Antisense strand to SEQ ID NO: 990338
caguucaaagucuuaacca

SEQ ID NO: 990340 - RNA, 19 nt, Artificial Sequence
  Description of Artificial Sequence: Synthetic oligonucleotide
  Sense strand starting at position 111 of SEQ ID NO: 914259
gagguuggauucuaaugaa

SEQ ID NO: 990341 - RNA, 19 nt, Artificial Sequence
  Description of Artificial Sequence: Synthetic oligonucleotide
  Antisense strand to SEQ ID NO: 990340
uucauuagaauccaaccuc

SEQ ID NO: 990342 - RNA, 19 nt, Artificial Sequence
  Description of Artificial Sequence: Synthetic oligonucleotide
  Sense strand starting at position 114 of SEQ ID NO: 914259
guuggauucuaaugaagac

SEQ ID NO: 990343 - RNA, 19 nt, Artificial Sequence
  Description of Artificial Sequence: Synthetic oligonucleotide
  Antisense strand to SEQ ID NO: 990342
gucuucauuagaauccaac

SEQ ID NO: 990344 - RNA, 19 nt, Artificial Sequence
  Description of Artificial Sequence: Synthetic oligonucleotide
  Sense strand starting at position 132 of SEQ ID NO: 914259
cggguucgaaaccaguauu

SEQ ID NO: 990345 - RNA, 19 nt, Artificial Sequence
  Description of Artificial Sequence: Synthetic oligonucleotide
  Antisense strand to SEQ ID NO: 990344
aauacugguuucgaacccg

SEQ ID NO: 990346 - RNA, 19 nt, Artificial Sequence
  Description of Artificial Sequence: Synthetic oligonucleotide
  Sense strand starting at position 185 of SEQ ID NO: 914259
gguagauaucucggucccu

SEQ ID NO: 990347 - RNA, 19 nt, Artificial Sequence
  Description of Artificial Sequence: Synthetic oligonucleotide
  Antisense strand to SEQ ID NO: 990346
agggaccgagauaucuacc

SEQ ID NO: 990348 - RNA, 19 nt, Artificial Sequence
  Description of Artificial Sequence: Synthetic oligonucleotide
  Sense strand starting at position 186 of SEQ ID NO: 914259
guagauaucucggucccuu

SEQ ID NO: 990349 - RNA, 19 nt, Artificial Sequence
  Description of Artificial Sequence: Synthetic oligonucleotide
  Antisense strand to SEQ ID NO: 990348
aagggaccgagauaucuac

SEQ ID NO: 990350 - RNA, 19 nt, Artificial Sequence
  Description of Artificial Sequence: Synthetic oligonucleotide
  Sense strand starting at position 212 of SEQ ID NO: 914259
ggagacuccggaggucuaa

SEQ ID NO: 990351 - RNA, 19 nt, Artificial Sequence
  Description of Artificial Sequence: Synthetic oligonucleotide
  Antisense strand to SEQ ID NO: 990350
uuagaccuccggagucucc

SEQ ID NO: 990352 - RNA, 19 nt, Artificial Sequence
  Description of Artificial Sequence: Synthetic oligonucleotide
  Sense strand starting at position 224 of SEQ ID NO: 914259
ggucuaaggaccugacuga

SEQ ID NO: 990353 - RNA, 19 nt, Artificial Sequence
  Description of Artificial Sequence: Synthetic oligonucleotide
  Antisense strand to SEQ ID NO: 990352
ucagucagguccuuagacc

SEQ ID NO: 990354 - RNA, 19 nt, Artificial Sequence
  Description of Artificial Sequence: Synthetic oligonucleotide
  Sense strand starting at position 672 of SEQ ID NO: 914259
gggaaagccuuacauaaca

SEQ ID NO: 990355 - RNA, 19 nt, Artificial Sequence
  Description of Artificial Sequence: Synthetic oligonucleotide
  Antisense strand to SEQ ID NO: 990354
uguuauguaaggcuuuccc

SEQ ID NO: 990356 - RNA, 19 nt, Artificial Sequence
  Description of Artificial Sequence: Synthetic oligonucleotide
  Sense strand starting at position 894 of SEQ ID NO: 914259
ugaguucugguuugaauua

SEQ ID NO: 990357 - RNA, 19 nt, Artificial Sequence
  Description of Artificial Sequence: Synthetic oligonucleotide
  Antisense strand to SEQ ID NO: 990356
uaauucaaaccagaacuca

SEQ ID NO: 990358 - RNA, 19 nt, Artificial Sequence
  Description of Artificial Sequence: Synthetic oligonucleotide
  Sense strand starting at position 895 of SEQ ID NO: 914259
gaguucugguuugaauuag

SEQ ID NO: 990359 - RNA, 19 nt, Artificial Sequence
  Description of Artificial Sequence: Synthetic oligonucleotide
  Antisense strand to SEQ ID NO: 990358
cuaauucaaaccagaacuc

SEQ ID NO: 990360 - RNA, 19 nt, Artificial Sequence
  Description of Artificial Sequence: Synthetic oligonucleotide
  Sense strand starting at position 1381 of SEQ ID NO: 914259
cgguggcgaucucggaaau

SEQ ID NO: 990361 - RNA, 19 nt, Artificial Sequence
  Description of Artificial Sequence: Synthetic oligonucleotide
  Antisense strand to SEQ ID NO: 990360
auuuccgagaucgccaccg

SEQ ID NO: 990362 - RNA, 19 nt, Artificial Sequence
  Description of Artificial Sequence: Synthetic oligonucleotide
  Sense strand starting at position 1382 of SEQ ID NO: 914259
gguggcgaucucggaaauu

SEQ ID NO: 990363 - RNA, 19 nt, Artificial Sequence
  Description of Artificial Sequence: Synthetic oligonucleotide
  Antisense strand to SEQ ID NO: 990362
aauuuccgagaucgccacc

SEQ ID NO: 990364 - RNA, 19 nt, Artificial Sequence
  Description of Artificial Sequence: Synthetic oligonucleotide
  Sense strand starting at position 1527 of SEQ ID NO: 914259
guccgcccuccggagaaau

SEQ ID NO: 990365 - RNA, 19 nt, Artificial Sequence
  Description of Artificial Sequence: Synthetic oligonucleotide
  Antisense strand to SEQ ID NO: 990364
auuucuccggagggcggac

SEQ ID NO: 990366 - RNA, 19 nt, Artificial Sequence
  Description of Artificial Sequence: Synthetic oligonucleotide
  Sense strand starting at position 1529 of SEQ ID NO: 914259
ccgcccuccggagaaauaa

SEQ ID NO: 990367 - RNA, 19 nt, Artificial Sequence
  Description of Artificial Sequence: Synthetic oligonucleotide
  Antisense strand to SEQ ID NO: 990366
uuauuucuccggagggcgg

SEQ ID NO: 990368 - RNA, 19 nt, Artificial Sequence
  Description of Artificial Sequence: Synthetic oligonucleotide
  Sense strand starting at position 1666 of SEQ ID NO: 914259
gcuccaaacugcuugaauc

SEQ ID NO: 990369 - RNA, 19 nt, Artificial Sequence
  Description of Artificial Sequence: Synthetic oligonucleotide
  Antisense strand to SEQ ID NO: 990368
gauucaagcaguuuggagc

SEQ ID NO: 990370 - RNA, 19 nt, Artificial Sequence
  Description of Artificial Sequence: Synthetic oligonucleotide
  Sense strand starting at position 1674 of SEQ ID NO: 914259
cugcuugaauccucacagu

SEQ ID NO: 990371 - RNA, 19 nt, Artificial Sequence
  Description of Artificial Sequence: Synthetic oligonucleotide
  Antisense strand to SEQ ID NO: 990370
acugugaggauucaagcag

SEQ ID NO: 990372 - RNA, 19 nt, Artificial Sequence
  Description of Artificial Sequence: Synthetic oligonucleotide
  Sense strand starting at position 2478 of SEQ ID NO: 914259
cguccauauccgcacagaa

SEQ ID NO: 990373 - RNA, 19 nt, Artificial Sequence
  Description of Artificial Sequence: Synthetic oligonucleotide
  Antisense strand to SEQ ID NO: 990372
uucugugcggauauggacg

SEQ ID NO: 990374 - RNA, 19 nt, Artificial Sequence
  Description of Artificial Sequence: Synthetic oligonucleotide
  Sense strand starting at position 2480 of SEQ ID NO: 914259
uccauauccgcacagaacu

SEQ ID NO: 990375 - RNA, 19 nt, Artificial Sequence
  Description of Artificial Sequence: Synthetic oligonucleotide
  Antisense strand to SEQ ID NO: 990374
aguucugugcggauaugga

SEQ ID NO: 990376 - RNA, 19 nt, Artificial Sequence
  Description of Artificial Sequence: Synthetic oligonucleotide
  Sense strand starting at position 2719 of SEQ ID NO: 914259
gacgcugagucuccuaauu

SEQ ID NO: 990377 - RNA, 19 nt, Artificial Sequence
  Description of Artificial Sequence: Synthetic oligonucleotide
  Antisense strand to SEQ ID NO: 990376
aauuaggagacucagcguc

SEQ ID NO: 990378 - RNA, 19 nt, Artificial Sequence
  Description of Artificial Sequence: Synthetic oligonucleotide
  Sense strand starting at position 2721 of SEQ ID NO: 914259
cgcugagucuccuaauuua

SEQ ID NO: 990379 - RNA, 19 nt, Artificial Sequence
  Description of Artificial Sequence: Synthetic oligonucleotide
  Antisense strand to SEQ ID NO: 990378
uaaauuaggagacucagcg

SEQ ID NO: 990380 - RNA, 19 nt, Artificial Sequence
  Description of Artificial Sequence: Synthetic oligonucleotide
  Sense strand starting at position 2760 of SEQ ID NO: 914259
uucuaacuacaucgagauu

SEQ ID NO: 990381 - RNA, 19 nt, Artificial Sequence
  Description of Artificial Sequence: Synthetic oligonucleotide
  Antisense strand to SEQ ID NO: 990380
aaucucgauguaguuagaa

SEQ ID NO: 990382 - RNA, 19 nt, Artificial Sequence
  Description of Artificial Sequence: Synthetic oligonucleotide
  Sense strand starting at position 2844 of SEQ ID NO: 914259
ucucuucucccucaugagu

SEQ ID NO: 990383 - RNA, 19 nt, Artificial Sequence
  Description of Artificial Sequence: Synthetic oligonucleotide
  Antisense strand to SEQ ID NO: 990382
acucaugagggagaagaga

SEQ ID NO: 990384 - RNA, 19 nt, Artificial Sequence
  Description of Artificial Sequence: Synthetic oligonucleotide
  Sense strand starting at position 2924 of SEQ ID NO: 914259
cccaaaugcuaaggaaaga

SEQ ID NO: 990385 - RNA, 19 nt, Artificial Sequence
  Description of Artificial Sequence: Synthetic oligonucleotide
  Antisense strand to SEQ ID NO: 990384
ucuuuccuuagcauuuggg

SEQ ID NO: 990386 - RNA, 19 nt, Artificial Sequence
  Description of Artificial Sequence: Synthetic oligonucleotide
  Sense strand starting at position 3035 of SEQ ID NO: 914259
ucggcccuguccucugaaa

SEQ ID NO: 990387 - RNA, 19 nt, Artificial Sequence
  Description of Artificial Sequence: Synthetic oligonucleotide
  Antisense strand to SEQ ID NO: 990386
uuucagaggacagggccga

SEQ ID NO: 990388 - RNA, 19 nt, Artificial Sequence
  Description of Artificial Sequence: Synthetic oligonucleotide
  Sense strand starting at position 3037 of SEQ ID NO: 914259
ggcccuguccucugaaaug

SEQ ID NO: 990389 - RNA, 19 nt, Artificial Sequence
  Description of Artificial Sequence: Synthetic oligonucleotide
  Antisense strand to SEQ ID NO: 990388
cauuucagaggacagggcc

SEQ ID NO: 990390 - RNA, 19 nt, Artificial Sequence
  Description of Artificial Sequence: Synthetic oligonucleotide
  Sense strand starting at position 3884 of SEQ ID NO: 914259
uuguuaacaguuuaccaaa

SEQ ID NO: 990391 - RNA, 19 nt, Artificial Sequence
  Description of Artificial Sequence: Synthetic oligonucleotide
  Antisense strand to SEQ ID NO: 990390
uuugguaaacuguuaacaa

SEQ ID NO: 990392 - RNA, 19 nt, Artificial Sequence
  Description of Artificial Sequence: Synthetic oligonucleotide
  Sense strand starting at position 3887 of SEQ ID NO: 914259
uuaacaguuuaccaaagga

SEQ ID NO: 990393 - RNA, 19 nt, Artificial Sequence
  Description of Artificial Sequence: Synthetic oligonucleotide
  Antisense strand to SEQ ID NO: 990392
uccuuugguaaacuguuaa

SEQ ID NO: 990394 - RNA, 19 nt, Artificial Sequence
  Description of Artificial Sequence: Synthetic oligonucleotide
  Sense strand starting at position 3929 of SEQ ID NO: 914259
aucaucucguuccuugaaa

SEQ ID NO: 990395 - RNA, 19 nt, Artificial Sequence
  Description of Artificial Sequence: Synthetic oligonucleotide
  Antisense strand to SEQ ID NO: 990394
uuucaaggaacgagaugau

SEQ ID NO: 990396 - RNA, 19 nt, Artificial Sequence
  Description of Artificial Sequence: Synthetic oligonucleotide
  Sense strand starting at position 3930 of SEQ ID NO: 914259
ucaucucguuccuugaaag

SEQ ID NO: 990397 - RNA, 19 nt, Artificial Sequence
  Description of Artificial Sequence: Synthetic oligonucleotide
  Antisense strand to SEQ ID NO: 990396
cuuucaaggaacgagauga

SEQ ID NO: 990398 - RNA, 19 nt, Artificial Sequence
  Description of Artificial Sequence: Synthetic oligonucleotide
  Sense strand starting at position 3931 of SEQ ID NO: 914259
caucucguuccuugaaaga

SEQ ID NO: 990399 - RNA, 19 nt, Artificial Sequence
  Description of Artificial Sequence: Synthetic oligonucleotide
  Antisense strand to SEQ ID NO: 990398
ucuuucaaggaacgagaug

SEQ ID NO: 990400 - RNA, 19 nt, Artificial Sequence
  Description of Artificial Sequence: Synthetic oligonucleotide
  Sense strand starting at position 3940 of SEQ ID NO: 914259
ccuugaaagagcgaauguu

SEQ ID NO: 990401 - RNA, 19 nt, Artificial Sequence
  Description of Artificial Sequence: Synthetic oligonucleotide
  Antisense strand to SEQ ID NO: 990400
aacauucgcucuuucaagg

SEQ ID NO: 990402 - RNA, 19 nt, Artificial Sequence
  Description of Artificial Sequence: Synthetic oligonucleotide
  Sense strand starting at position 3949 of SEQ ID NO: 914259
agcgaauguucccagugca

SEQ ID NO: 990403 - RNA, 19 nt, Artificial Sequence
  Description of Artificial Sequence: Synthetic oligonucleotide
  Antisense strand to SEQ ID NO: 990402
ugcacugggaacauucgcu

SEQ ID NO: 990404 - RNA, 19 nt, Artificial Sequence
  Description of Artificial Sequence: Synthetic oligonucleotide
  Sense strand starting at position 3952 of SEQ ID NO: 914259
gaauguucccagugcauau

SEQ ID NO: 990405 - RNA, 19 nt, Artificial Sequence
  Description of Artificial Sequence: Synthetic oligonucleotide
  Antisense strand to SEQ ID NO: 990404
auaugcacugggaacauuc

SEQ ID NO: 990406 - RNA, 19 nt, Artificial Sequence
  Description of Artificial Sequence: Synthetic oligonucleotide
  Sense strand starting at position 44 of SEQ ID NO: 914260
gcccacaagugaucuaauu

SEQ ID NO: 990407 - RNA, 19 nt, Artificial Sequence
  Description of Artificial Sequence: Synthetic oligonucleotide
  Antisense strand to SEQ ID NO: 990406
aauuagaucacuugugggc

SEQ ID NO: 990408 - RNA, 19 nt, Artificial Sequence
  Description of Artificial Sequence: Synthetic oligonucleotide
  Sense strand starting at position 52 of SEQ ID NO: 914260
gugaucuaauucuccagua

SEQ ID NO: 990409 - RNA, 19 nt, Artificial Sequence
  Description of Artificial Sequence: Synthetic oligonucleotide
  Antisense strand to SEQ ID NO: 990408
uacuggagaauuagaucac

SEQ ID NO: 990410 - RNA, 19 nt, Artificial Sequence
  Description of Artificial Sequence: Synthetic oligonucleotide
  Sense strand starting at position 65 of SEQ ID NO: 914260
ccaguacuccaguacauca

SEQ ID NO: 990411 - RNA, 19 nt, Artificial Sequence
  Description of Artificial Sequence: Synthetic oligonucleotide
  Antisense strand to SEQ ID NO: 990410
ugauguacuggaguacugg

SEQ ID NO: 990412 - RNA, 19 nt, Artificial Sequence
  Description of Artificial Sequence: Synthetic oligonucleotide
  Sense strand starting at position 366 of SEQ ID NO: 914260
gcaugauguguucaagagc

SEQ ID NO: 990413 - RNA, 19 nt, Artificial Sequence
  Description of Artificial Sequence: Synthetic oligonucleotide
  Antisense strand to SEQ ID NO: 990412
gcucuugaacacaucaugc

SEQ ID NO: 990414 - RNA, 19 nt, Artificial Sequence
  Description of Artificial Sequence: Synthetic oligonucleotide
  Sense strand starting at position 689 of SEQ ID NO: 914260
ggcagaaguggugagaacu

SEQ ID NO: 990415 - RNA, 19 nt, Artificial Sequence
  Description of Artificial Sequence: Synthetic oligonucleotide
  Antisense strand to SEQ ID NO: 990414
aguucucaccacuucugcc

SEQ ID NO: 990416 - RNA, 19 nt, Artificial Sequence
  Description of Artificial Sequence: Synthetic oligonucleotide
  Sense strand starting at position 706 of SEQ ID NO: 914260
cucagauccuggcuggaua

SEQ ID NO: 990417 - RNA, 19 nt, Artificial Sequence
  Description of Artificial Sequence: Synthetic oligonucleotide
  Antisense strand to SEQ ID NO: 990416
uauccagccaggaucugag

SEQ ID NO: 990418 - RNA, 19 nt, Artificial Sequence
  Description of Artificial Sequence: Synthetic oligonucleotide
  Sense strand starting at position 707 of SEQ ID NO: 914260
ucagauccuggcuggauau

SEQ ID NO: 990419 - RNA, 19 nt, Artificial Sequence
  Description of Artificial Sequence: Synthetic oligonucleotide
  Antisense strand to SEQ ID NO: 990418
auauccagccaggaucuga

SEQ ID NO: 990420 - RNA, 19 nt, Artificial Sequence
  Description of Artificial Sequence: Synthetic oligonucleotide
  Sense strand starting at position 708 of SEQ ID NO: 914260
cagauccuggcuggauauu

SEQ ID NO: 990421 - RNA, 19 nt, Artificial Sequence
  Description of Artificial Sequence: Synthetic oligonucleotide
  Antisense strand to SEQ ID NO: 990420
aauauccagccaggaucug

SEQ ID NO: 990422 - RNA, 19 nt, Artificial Sequence
  Description of Artificial Sequence: Synthetic oligonucleotide
  Sense strand starting at position 734 of SEQ ID NO: 914260
ugauguuggaugugagacu

SEQ ID NO: 990423 - RNA, 19 nt, Artificial Sequence
  Description of Artificial Sequence: Synthetic oligonucleotide
  Antisense strand to SEQ ID NO: 990422
agucucacauccaacauca

SEQ ID NO: 990424 - RNA, 19 nt, Artificial Sequence
  Description of Artificial Sequence: Synthetic oligonucleotide
  Sense strand starting at position 1126 of SEQ ID NO: 914260
ucucacauuguaggaaaua

SEQ ID NO: 990425 - RNA, 19 nt, Artificial Sequence
  Description of Artificial Sequence: Synthetic oligonucleotide
  Antisense strand to SEQ ID NO: 990424
uauuuccuacaaugugaga

SEQ ID NO: 990426 - RNA, 19 nt, Artificial Sequence
  Description of Artificial Sequence: Synthetic oligonucleotide
  Sense strand starting at position 1135 of SEQ ID NO: 914260
guaggaaauaaacguguga

SEQ ID NO: 990427 - RNA, 19 nt, Artificial Sequence
  Description of Artificial Sequence: Synthetic oligonucleotide
  Antisense strand to SEQ ID NO: 990426
ucacacguuuauuuccuac

SEQ ID NO: 990428 - RNA, 19 nt, Artificial Sequence
  Description of Artificial Sequence: Synthetic oligonucleotide
  Sense strand starting at position 1137 of SEQ ID NO: 914260
aggaaauaaacgugugaag

SEQ ID NO: 990429 - RNA, 19 nt, Artificial Sequence
  Description of Artificial Sequence: Synthetic oligonucleotide
  Antisense strand to SEQ ID NO: 990428
cuucacacguuuauuuccu

SEQ ID NO: 990430 - RNA, 19 nt, Artificial Sequence
  Description of Artificial Sequence: Synthetic oligonucleotide
  Sense strand starting at position 1139 of SEQ ID NO: 914260
gaaauaaacgugugaagca

SEQ ID NO: 990431 - RNA, 19 nt, Artificial Sequence
  Description of Artificial Sequence: Synthetic oligonucleotide
  Antisense strand to SEQ ID NO: 990430
ugcuucacacguuuauuuc

SEQ ID NO: 990432 - RNA, 19 nt, Artificial Sequence
  Description of Artificial Sequence: Synthetic oligonucleotide
  Sense strand starting at position 1148 of SEQ ID NO: 914260
gugugaagcauguagcaca

SEQ ID NO: 990433 - RNA, 19 nt, Artificial Sequence
  Description of Artificial Sequence: Synthetic oligonucleotide
  Antisense strand to SEQ ID NO: 990432
ugugcuacaugcuucacac

SEQ ID NO: 990434 - RNA, 19 nt, Artificial Sequence
  Description of Artificial Sequence: Synthetic oligonucleotide
  Sense strand starting at position 1159 of SEQ ID NO: 914260
guagcacaauguucgaaua

SEQ ID NO: 990435 - RNA, 19 nt, Artificial Sequence
  Description of Artificial Sequence: Synthetic oligonucleotide
  Antisense strand to SEQ ID NO: 990434
uauucgaacauugugcuac

SEQ ID NO: 990436 - RNA, 19 nt, Artificial Sequence
  Description of Artificial Sequence: Synthetic oligonucleotide
  Sense strand starting at position 1171 of SEQ ID NO: 914260
ucgaauagugagcacucaa

SEQ ID NO: 990437 - RNA, 19 nt, Artificial Sequence
  Description of Artificial Sequence: Synthetic oligonucleotide
  Antisense strand to SEQ ID NO: 990436
uugagugcucacuauucga

SEQ ID NO: 990438 - RNA, 19 nt, Artificial Sequence
  Description of Artificial Sequence: Synthetic oligonucleotide
  Sense strand starting at position 1195 of SEQ ID NO: 914260
gcuggcgauugguuauuua

SEQ ID NO: 990439 - RNA, 19 nt, Artificial Sequence
  Description of Artificial Sequence: Synthetic oligonucleotide
  Antisense strand to SEQ ID NO: 990438
uaaauaaccaaucgccagc

SEQ ID NO: 990440 - RNA, 19 nt, Artificial Sequence
  Description of Artificial Sequence: Synthetic oligonucleotide
  Sense strand starting at position 1199 of SEQ ID NO: 914260
gcgauugguuauuuaacac

SEQ ID NO: 990441 - RNA, 19 nt, Artificial Sequence
  Description of Artificial Sequence: Synthetic oligonucleotide
  Antisense strand to SEQ ID NO: 990440
guguuaaauaaccaaucgc

SEQ ID NO: 990442 - RNA, 19 nt, Artificial Sequence
  Description of Artificial Sequence: Synthetic oligonucleotide
  Sense strand starting at position 1356 of SEQ ID NO: 914260
uccugucucuucuuagaga

SEQ ID NO: 990443 - RNA, 19 nt, Artificial Sequence
  Description of Artificial Sequence: Synthetic oligonucleotide
  Antisense strand to SEQ ID NO: 990442
ucucuaagaagagacagga

SEQ ID NO: 990444 - RNA, 19 nt, Artificial Sequence
  Description of Artificial Sequence: Synthetic oligonucleotide
  Sense strand starting at position 1455 of SEQ ID NO: 914260
gaugcuuagcugcccgauu

SEQ ID NO: 990445 - RNA, 19 nt, Artificial Sequence
  Description of Artificial Sequence: Synthetic oligonucleotide
  Antisense strand to SEQ ID NO: 990444
aaucgggcagcuaagcauc

SEQ ID NO: 990446 - RNA, 19 nt, Artificial Sequence
  Description of Artificial Sequence: Synthetic oligonucleotide
  Sense strand starting at position 1499 of SEQ ID NO: 914260
gugcucauuugcucaaugu

SEQ ID NO: 990447 - RNA, 19 nt, Artificial Sequence
  Description of Artificial Sequence: Synthetic oligonucleotide
  Antisense strand to SEQ ID NO: 990446
acauugagcaaaugagcac

SEQ ID NO: 990448 - RNA, 19 nt, Artificial Sequence
  Description of Artificial Sequence: Synthetic oligonucleotide
  Sense strand starting at position 1503 of SEQ ID NO: 914260
ucauuugcucaaugugcau

SEQ ID NO: 990449 - RNA, 19 nt, Artificial Sequence
  Description of Artificial Sequence: Synthetic oligonucleotide
  Antisense strand to SEQ ID NO: 990448
augcacauugagcaaauga

SEQ ID NO: 990450 - RNA, 19 nt, Artificial Sequence
  Description of Artificial Sequence: Synthetic oligonucleotide
  Sense strand starting at position 1564 of SEQ ID NO: 914260
gagguucccuacucugcaa

SEQ ID NO: 990451 - RNA, 19 nt, Artificial Sequence
  Description of Artificial Sequence: Synthetic oligonucleotide
  Antisense strand to SEQ ID NO: 990450
uugcagaguagggaaccuc

SEQ ID NO: 990452 - RNA, 19 nt, Artificial Sequence
  Description of Artificial Sequence: Synthetic oligonucleotide
  Sense strand starting at position 1635 of SEQ ID NO: 914260
agggaagccuggaguugua

SEQ ID NO: 990453 - RNA, 19 nt, Artificial Sequence
  Description of Artificial Sequence: Synthetic oligonucleotide
  Antisense strand to SEQ ID NO: 990452
uacaacuccaggcuucccu

SEQ ID NO: 990454 - RNA, 19 nt, Artificial Sequence
  Description of Artificial Sequence: Synthetic oligonucleotide
  Sense strand starting at position 1712 of SEQ ID NO: 914260
gugggagguucuuuacuuc

SEQ ID NO: 990455 - RNA, 19 nt, Artificial Sequence
  Description of Artificial Sequence: Synthetic oligonucleotide
  Antisense strand to SEQ ID NO: 990454
gaaguaaagaaccucccac

SEQ ID NO: 990456 - RNA, 19 nt, Artificial Sequence
  Description of Artificial Sequence: Synthetic oligonucleotide
  Sense strand starting at position 2114 of SEQ ID NO: 914260
gcccaaucagcgucgaguu

SEQ ID NO: 990457 - RNA, 19 nt, Artificial Sequence
  Description of Artificial Sequence: Synthetic oligonucleotide
  Antisense strand to SEQ ID NO: 990456
aacucgacgcugauugggc

SEQ ID NO: 990458 - RNA, 19 nt, Artificial Sequence
  Description of Artificial Sequence: Synthetic oligonucleotide
  Sense strand starting at position 2499 of SEQ ID NO: 914260
guggaaacggauggugauu

SEQ ID NO: 990459 - RNA, 19 nt, Artificial Sequence
  Description of Artificial Sequence: Synthetic oligonucleotide
  Antisense strand to SEQ ID NO: 990458
aaucaccauccguuuccac

SEQ ID NO: 990460 - RNA, 19 nt, Artificial Sequence
  Description of Artificial Sequence: Synthetic oligonucleotide
  Sense strand starting at position 2636 of SEQ ID NO: 914260
cgaggacgucccuaacaau

SEQ ID NO: 990461 - RNA, 19 nt, Artificial Sequence
  Description of Artificial Sequence: Synthetic oligonucleotide
  Antisense strand to SEQ ID NO: 990460
auuguuagggacguccucg

SEQ ID NO: 990462 - RNA, 19 nt, Artificial Sequence
  Description of Artificial Sequence: Synthetic oligonucleotide
  Sense strand starting at position 2692 of SEQ ID NO: 914260
uuuguuugaaguuguggau

SEQ ID NO: 990463 - RNA, 19 nt, Artificial Sequence
  Description of Artificial Sequence: Synthetic oligonucleotide
  Antisense strand to SEQ ID NO: 990462
auccacaacuucaaacaaa

SEQ ID NO: 990464 - RNA, 19 nt, Artificial Sequence
  Description of Artificial Sequence: Synthetic oligonucleotide
  Sense strand starting at position 2698 of SEQ ID NO: 914260
ugaaguuguggauggaaua

SEQ ID NO: 990465 - RNA, 19 nt, Artificial Sequence
  Description of Artificial Sequence: Synthetic oligonucleotide
  Antisense strand to SEQ ID NO: 990464
uauuccauccacaacuuca

SEQ ID NO: 990466 - RNA, 19 nt, Artificial Sequence
  Description of Artificial Sequence: Synthetic oligonucleotide
  Sense strand starting at position 2699 of SEQ ID NO: 914260
gaaguuguggauggaauau

SEQ ID NO: 990467 - RNA, 19 nt, Artificial Sequence
  Description of Artificial Sequence: Synthetic oligonucleotide
  Antisense strand to SEQ ID NO: 990466
auauuccauccacaacuuc

SEQ ID NO: 990468 - RNA, 19 nt, Artificial Sequence
  Description of Artificial Sequence: Synthetic oligonucleotide
  Sense strand starting at position 2824 of SEQ ID NO: 914260
gcauaucuaguaugauugu

SEQ ID NO: 990469 - RNA, 19 nt, Artificial Sequence
  Description of Artificial Sequence: Synthetic oligonucleotide
  Antisense strand to SEQ ID NO: 990468
acaaucauacuagauaugc

SEQ ID NO: 990470 - RNA, 19 nt, Artificial Sequence
  Description of Artificial Sequence: Synthetic oligonucleotide
  Sense strand starting at position 2830 of SEQ ID NO: 914260
cuaguaugauugucgggac

SEQ ID NO: 990471 - RNA, 19 nt, Artificial Sequence
  Description of Artificial Sequence: Synthetic oligonucleotide
  Antisense strand to SEQ ID NO: 990470
gucccgacaaucauacuag

SEQ ID NO: 990472 - RNA, 19 nt, Artificial Sequence
  Description of Artificial Sequence: Synthetic oligonucleotide
  Sense strand starting at position 2834 of SEQ ID NO: 914260
uaugauugucgggacucuu

SEQ ID NO: 990473 - RNA, 19 nt, Artificial Sequence
  Description of Artificial Sequence: Synthetic oligonucleotide
  Antisense strand to SEQ ID NO: 990472
aagagucccgacaaucaua

SEQ ID NO: 990474 - RNA, 19 nt, Artificial Sequence
  Description of Artificial Sequence: Synthetic oligonucleotide
  Sense strand starting at position 2940 of SEQ ID NO: 914260
ucggaaaugagucauaguu

SEQ ID NO: 990475 - RNA, 19 nt, Artificial Sequence
  Description of Artificial Sequence: Synthetic oligonucleotide
  Antisense strand to SEQ ID NO: 990474
aacuaugacucauuuccga

SEQ ID NO: 990476 - RNA, 19 nt, Artificial Sequence
  Description of Artificial Sequence: Synthetic oligonucleotide
  Sense strand starting at position 2962 of SEQ ID NO: 914260
cccaauuaauauuagggaa

SEQ ID NO: 990477 - RNA, 19 nt, Artificial Sequence
  Description of Artificial Sequence: Synthetic oligonucleotide
  Antisense strand to SEQ ID NO: 990476
uucccuaauauuaauuggg

SEQ ID NO: 990478 - RNA, 19 nt, Artificial Sequence
  Description of Artificial Sequence: Synthetic oligonucleotide
  Sense strand starting at position 2983 of SEQ ID NO: 914260
aucgaugaaugauagaaau

SEQ ID NO: 990479 - RNA, 19 nt, Artificial Sequence
  Description of Artificial Sequence: Synthetic oligonucleotide
  Antisense strand to SEQ ID NO: 990478
auuucuaucauucaucgau

SEQ ID NO: 990480 - RNA, 19 nt, Artificial Sequence
  Description of Artificial Sequence: Synthetic oligonucleotide
  Sense strand starting at position 3546 of SEQ ID NO: 914260
auacuaggcuaauugaauu

SEQ ID NO: 990481 - RNA, 19 nt, Artificial Sequence
  Description of Artificial Sequence: Synthetic oligonucleotide
  Antisense strand to SEQ ID NO: 990480
aauucaauuagccuaguau

SEQ ID NO: 990482 - RNA, 19 nt, Artificial Sequence
  Description of Artificial Sequence: Synthetic oligonucleotide
  Sense strand starting at position 3647 of SEQ ID NO: 914260
gcaaguggaucuccuggau

SEQ ID NO: 990483 - RNA, 19 nt, Artificial Sequence
  Description of Artificial Sequence: Synthetic oligonucleotide
  Antisense strand to SEQ ID NO: 990482
auccaggagauccacuugc

SEQ ID NO: 990484 - RNA, 19 nt, Artificial Sequence
  Description of Artificial Sequence: Synthetic oligonucleotide
  Sense strand starting at position 3918 of SEQ ID NO: 914260
gugaaauaacaguaccagu

SEQ ID NO: 990485 - RNA, 19 nt, Artificial Sequence
  Description of Artificial Sequence: Synthetic oligonucleotide
  Antisense strand to SEQ ID NO: 990484
acugguacuguuauuucac

SEQ ID NO: 990486 - RNA, 19 nt, Artificial Sequence
  Description of Artificial Sequence: Synthetic oligonucleotide
  Sense strand starting at position 202 of SEQ ID NO: 914261
ggcagaaguggugagaacu

SEQ ID NO: 990487 - RNA, 19 nt, Artificial Sequence
  Description of Artificial Sequence: Synthetic oligonucleotide
  Antisense strand to SEQ ID NO: 990486
aguucucaccacuucugcc

SEQ ID NO: 990488 - RNA, 19 nt, Artificial Sequence
  Description of Artificial Sequence: Synthetic oligonucleotide
  Sense strand starting at position 219 of SEQ ID NO: 914261
cucagauccuggcuggaua

SEQ ID NO: 990489 - RNA, 19 nt, Artificial Sequence
  Description of Artificial Sequence: Synthetic oligonucleotide
  Antisense strand to SEQ ID NO: 990488
uauccagccaggaucugag

SEQ ID NO: 990490 - RNA, 19 nt, Artificial Sequence
  Description of Artificial Sequence: Synthetic oligonucleotide
  Sense strand starting at position 220 of SEQ ID NO: 914261
ucagauccuggcuggauau

SEQ ID NO: 990491 - RNA, 19 nt, Artificial Sequence
  Description of Artificial Sequence: Synthetic oligonucleotide
  Antisense strand to SEQ ID NO: 990490
auauccagccaggaucuga

SEQ ID NO: 990492 - RNA, 19 nt, Artificial Sequence
  Description of Artificial Sequence: Synthetic oligonucleotide
  Sense strand starting at position 221 of SEQ ID NO: 914261
cagauccuggcuggauauu

SEQ ID NO: 990493 - RNA, 19 nt, Artificial Sequence
  Description of Artificial Sequence: Synthetic oligonucleotide
  Antisense strand to SEQ ID NO: 990492
aauauccagccaggaucug

SEQ ID NO: 990494 - RNA, 19 nt, Artificial Sequence
  Description of Artificial Sequence: Synthetic oligonucleotide
  Sense strand starting at position 247 of SEQ ID NO: 914261
ugauguuggaugugagacu

SEQ ID NO: 990495 - RNA, 19 nt, Artificial Sequence
  Description of Artificial Sequence: Synthetic oligonucleotide
  Antisense strand to SEQ ID NO: 990494
agucucacauccaacauca

SEQ ID NO: 990496 - RNA, 19 nt, Artificial Sequence
  Description of Artificial Sequence: Synthetic oligonucleotide
  Sense strand starting at position 639 of SEQ ID NO: 914261
ucucacauuguaggaaaua

SEQ ID NO: 990497 - RNA, 19 nt, Artificial Sequence
  Description of Artificial Sequence: Synthetic oligonucleotide
  Antisense strand to SEQ ID NO: 990496
uauuuccuacaaugugaga

SEQ ID NO: 990498 - RNA, 19 nt, Artificial Sequence
  Description of Artificial Sequence: Synthetic oligonucleotide
  Sense strand starting at position 648 of SEQ ID NO: 914261
guaggaaauaaacguguga

SEQ ID NO: 990499 - RNA, 19 nt, Artificial Sequence
  Description of Artificial Sequence: Synthetic oligonucleotide
  Antisense strand to SEQ ID NO: 990498
ucacacguuuauuuccuac

SEQ ID NO: 990500 - RNA, 19 nt, Artificial Sequence
  Description of Artificial Sequence: Synthetic oligonucleotide
  Sense strand starting at position 650 of SEQ ID NO: 914261
aggaaauaaacgugugaag

SEQ ID NO: 990501 - RNA, 19 nt, Artificial Sequence
  Description of Artificial Sequence: Synthetic oligonucleotide
  Antisense strand to SEQ ID NO: 990500
cuucacacguuuauuuccu

SEQ ID NO: 990502 - RNA, 19 nt, Artificial Sequence
  Description of Artificial Sequence: Synthetic oligonucleotide
  Sense strand starting at position 652 of SEQ ID NO: 914261
gaaauaaacgugugaagca

SEQ ID NO: 990503 - RNA, 19 nt, Artificial Sequence
  Description of Artificial Sequence: Synthetic oligonucleotide
  Antisense strand to SEQ ID NO: 990502
ugcuucacacguuuauuuc

SEQ ID NO: 990504 - RNA, 19 nt, Artificial Sequence
  Description of Artificial Sequence: Synthetic oligonucleotide
  Sense strand starting at position 684 of SEQ ID NO: 914261
ucgaauagugagcacucaa

SEQ ID NO: 990505 - RNA, 19 nt, Artificial Sequence
  Description of Artificial Sequence: Synthetic oligonucleotide
  Antisense strand to SEQ ID NO: 990504
uugagugcucacuauucga

SEQ ID NO: 990506 - RNA, 19 nt, Artificial Sequence
  Description of Artificial Sequence: Synthetic oligonucleotide
  Sense strand starting at position 708 of SEQ ID NO: 914261
gcuggcgauugguuauuua

SEQ ID NO: 990507 - RNA, 19 nt, Artificial Sequence
  Description of Artificial Sequence: Synthetic oligonucleotide
  Antisense strand to SEQ ID NO: 990506
uaaauaaccaaucgccagc

SEQ ID NO: 990508 - RNA, 19 nt, Artificial Sequence
  Description of Artificial Sequence: Synthetic oligonucleotide
  Sense strand starting at position 712 of SEQ ID NO: 914261
gcgauugguuauuuaacac

SEQ ID NO: 990509 - RNA, 19 nt, Artificial Sequence
  Description of Artificial Sequence: Synthetic oligonucleotide
  Antisense strand to SEQ ID NO: 990508
guguuaaauaaccaaucgc

SEQ ID NO: 990510 - RNA, 19 nt, Artificial Sequence
  Description of Artificial Sequence: Synthetic oligonucleotide
  Sense strand starting at position 869 of SEQ ID NO: 914261
uccugucucuucuuagaga

SEQ ID NO: 990511 - RNA, 19 nt, Artificial Sequence
  Description of Artificial Sequence: Synthetic oligonucleotide
  Antisense strand to SEQ ID NO: 990510
ucucuaagaagagacagga

SEQ ID NO: 990512 - RNA, 19 nt, Artificial Sequence
  Description of Artificial Sequence: Synthetic oligonucleotide
  Sense strand starting at position 968 of SEQ ID NO: 914261
gaugcuuagcugcccgauu

SEQ ID NO: 990513 - RNA, 19 nt, Artificial Sequence
  Description of Artificial Sequence: Synthetic oligonucleotide
  Antisense strand to SEQ ID NO: 990512
aaucgggcagcuaagcauc

SEQ ID NO: 990514 - RNA, 19 nt, Artificial Sequence
  Description of Artificial Sequence: Synthetic oligonucleotide
  Sense strand starting at position 1012 of SEQ ID NO: 914261
gugcucauuugcucaaugu

SEQ ID NO: 990515 - RNA, 19 nt, Artificial Sequence
  Description of Artificial Sequence: Synthetic oligonucleotide
  Antisense strand to SEQ ID NO: 990514
acauugagcaaaugagcac

SEQ ID NO: 990516 - RNA, 19 nt, Artificial Sequence
  Description of Artificial Sequence: Synthetic oligonucleotide
  Sense strand starting at position 1016 of SEQ ID NO: 914261
ucauuugcucaaugugcau

SEQ ID NO: 990517 - RNA, 19 nt, Artificial Sequence
  Description of Artificial Sequence: Synthetic oligonucleotide
  Antisense strand to SEQ ID NO: 990516
augcacauugagcaaauga

SEQ ID NO: 990518 - RNA, 19 nt, Artificial Sequence
  Description of Artificial Sequence: Synthetic oligonucleotide
  Sense strand starting at position 1077 of SEQ ID NO: 914261
gagguucccuacucugcaa

SEQ ID NO: 990519 - RNA, 19 nt, Artificial Sequence
  Description of Artificial Sequence: Synthetic oligonucleotide
  Antisense strand to SEQ ID NO: 990518
uugcagaguagggaaccuc

SEQ ID NO: 990520 - RNA, 19 nt, Artificial Sequence
  Description of Artificial Sequence: Synthetic oligonucleotide
  Sense strand starting at position 1225 of SEQ ID NO: 914261
gugggagguucuuuacuuc

SEQ ID NO: 990521 - RNA, 19 nt, Artificial Sequence
  Description of Artificial Sequence: Synthetic oligonucleotide
  Antisense strand to SEQ ID NO: 990520
gaaguaaagaaccucccac

SEQ ID NO: 990522 - RNA, 19 nt, Artificial Sequence
  Description of Artificial Sequence: Synthetic oligonucleotide
  Sense strand starting at position 1627 of SEQ ID NO: 914261
gcccaaucagcgucgaguu

SEQ ID NO: 990523 - RNA, 19 nt, Artificial Sequence
  Description of Artificial Sequence: Synthetic oligonucleotide
  Antisense strand to SEQ ID NO: 990522
aacucgacgcugauugggc

SEQ ID NO: 990524 - RNA, 19 nt, Artificial Sequence
  Description of Artificial Sequence: Synthetic oligonucleotide
  Sense strand starting at position 2012 of SEQ ID NO: 914261
guggaaacggauggugauu

SEQ ID NO: 990525 - RNA, 19 nt, Artificial Sequence
  Description of Artificial Sequence: Synthetic oligonucleotide
  Antisense strand to SEQ ID NO: 990524
aaucaccauccguuuccac

SEQ ID NO: 990526 - RNA, 19 nt, Artificial Sequence
  Description of Artificial Sequence: Synthetic oligonucleotide
  Sense strand starting at position 2149 of SEQ ID NO: 914261
cgaggacgucccuaacaau

SEQ ID NO: 990527 - RNA, 19 nt, Artificial Sequence
  Description of Artificial Sequence: Synthetic oligonucleotide
  Antisense strand to SEQ ID NO: 990526
auuguuagggacguccucg

SEQ ID NO: 990528 - RNA, 19 nt, Artificial Sequence
  Description of Artificial Sequence: Synthetic oligonucleotide
  Sense strand starting at position 2211 of SEQ ID NO: 914261
ugaaguuguggauggaaua

SEQ ID NO: 990529 - RNA, 19 nt, Artificial Sequence
  Description of Artificial Sequence: Synthetic oligonucleotide
  Antisense strand to SEQ ID NO: 990528
uauuccauccacaacuuca

SEQ ID NO: 990530 - RNA, 19 nt, Artificial Sequence
  Description of Artificial Sequence: Synthetic oligonucleotide
  Sense strand starting at position 2212 of SEQ ID NO: 914261
gaaguuguggauggaauau

SEQ ID NO: 990531 - RNA, 19 nt, Artificial Sequence
  Description of Artificial Sequence: Synthetic oligonucleotide
  Antisense strand to SEQ ID NO: 990530
auauuccauccacaacuuc

SEQ ID NO: 990532 - RNA, 19 nt, Artificial Sequence
  Description of Artificial Sequence: Synthetic oligonucleotide
  Sense strand starting at position 2343 of SEQ ID NO: 914261
cuaguaugauugucgggac

SEQ ID NO: 990533 - RNA, 19 nt, Artificial Sequence
  Description of Artificial Sequence: Synthetic oligonucleotide
  Antisense strand to SEQ ID NO: 990532
gucccgacaaucauacuag

SEQ ID NO: 990534 - RNA, 19 nt, Artificial Sequence
  Description of Artificial Sequence: Synthetic oligonucleotide
  Sense strand starting at position 2347 of SEQ ID NO: 914261
uaugauugucgggacucuu

SEQ ID NO: 990535 - RNA, 19 nt, Artificial Sequence
  Description of Artificial Sequence: Synthetic oligonucleotide
  Antisense strand to SEQ ID NO: 990534
aagagucccgacaaucaua

SEQ ID NO: 990536 - RNA, 19 nt, Artificial Sequence
  Description of Artificial Sequence: Synthetic oligonucleotide
  Sense strand starting at position 2453 of SEQ ID NO: 914261
ucggaaaugagucauaguu

SEQ ID NO: 990537 - RNA, 19 nt, Artificial Sequence
  Description of Artificial Sequence: Synthetic oligonucleotide
  Antisense strand to SEQ ID NO: 990536
aacuaugacucauuuccga

SEQ ID NO: 990538 - RNA, 19 nt, Artificial Sequence
  Description of Artificial Sequence: Synthetic oligonucleotide
  Sense strand starting at position 3059 of SEQ ID NO: 914261
auacuaggcuaauugaauu

SEQ ID NO: 990539 - RNA, 19 nt, Artificial Sequence
  Description of Artificial Sequence: Synthetic oligonucleotide
  Antisense strand to SEQ ID NO: 990538
aauucaauuagccuaguau

SEQ ID NO: 990540 - RNA, 19 nt, Artificial Sequence
  Description of Artificial Sequence: Synthetic oligonucleotide
  Sense strand starting at position 3160 of SEQ ID NO: 914261
gcaaguggaucuccuggau

SEQ ID NO: 990541 - RNA, 19 nt, Artificial Sequence
  Description of Artificial Sequence: Synthetic oligonucleotide
  Antisense strand to SEQ ID NO: 990540
auccaggagauccacuugc

SEQ ID NO: 990542 - RNA, 19 nt, Artificial Sequence
  Description of Artificial Sequence: Synthetic oligonucleotide
  Sense strand starting at position 3431 of SEQ ID NO: 914261
gugaaauaacaguaccagu

SEQ ID NO: 990543 - RNA, 19 nt, Artificial Sequence
  Description of Artificial Sequence: Synthetic oligonucleotide
  Antisense strand to SEQ ID NO: 990542
acugguacuguuauuucac

SEQ ID NO: 990544 - RNA, 19 nt, Artificial Sequence
  Description of Artificial Sequence: Synthetic oligonucleotide
  Sense strand starting at position 3829 of SEQ ID NO: 914261
gcagaauggugauugccaa

SEQ ID NO: 990545 - RNA, 19 nt, Artificial Sequence
  Description of Artificial Sequence: Synthetic oligonucleotide
  Antisense strand to SEQ ID NO: 990544
uuggcaaucaccauucugc

SEQ ID NO: 990546 - RNA, 19 nt, Artificial Sequence
  Description of Artificial Sequence: Synthetic oligonucleotide
  Sense strand starting at position 3874 of SEQ ID NO: 914261
ggagacuuguucuuugaug

SEQ ID NO: 990547 - RNA, 19 nt, Artificial Sequence
  Description of Artificial Sequence: Synthetic oligonucleotide
  Antisense strand to SEQ ID NO: 990546
caucaaagaacaagucucc

SEQ ID NO: 990548 - RNA, 19 nt, Artificial Sequence
  Description of Artificial Sequence: Synthetic oligonucleotide
  Sense strand starting at position 3875 of SEQ ID NO: 914261
gagacuuguucuuugauga

SEQ ID NO: 990549 - RNA, 19 nt, Artificial Sequence
  Description of Artificial Sequence: Synthetic oligonucleotide
  Antisense strand to SEQ ID NO: 990548
ucaucaaagaacaagucuc

SEQ ID NO: 990550 - RNA, 19 nt, Artificial Sequence
  Description of Artificial Sequence: Synthetic oligonucleotide
  Sense strand starting at position 3876 of SEQ ID NO: 914261
agacuuguucuuugaugag

SEQ ID NO: 990551 - RNA, 19 nt, Artificial Sequence
  Description of Artificial Sequence: Synthetic oligonucleotide
  Antisense strand to SEQ ID NO: 990550
cucaucaaagaacaagucu

SEQ ID NO: 990552 - RNA, 19 nt, Artificial Sequence
  Description of Artificial Sequence: Synthetic oligonucleotide
  Sense strand starting at position 3880 of SEQ ID NO: 914261
uuguucuuugaugagugua

SEQ ID NO: 990553 - RNA, 19 nt, Artificial Sequence
  Description of Artificial Sequence: Synthetic oligonucleotide
  Antisense strand to SEQ ID NO: 990552
uacacucaucaaagaacaa

SEQ ID NO: 990554 - RNA, 19 nt, Artificial Sequence
  Description of Artificial Sequence: Synthetic oligonucleotide
  Sense strand starting at position 3882 of SEQ ID NO: 914261
guucuuugaugaguguaga

SEQ ID NO: 990555 - RNA, 19 nt, Artificial Sequence
  Description of Artificial Sequence: Synthetic oligonucleotide
  Antisense strand to SEQ ID NO: 990554
ucuacacucaucaaagaac

SEQ ID NO: 990556 - RNA, 19 nt, Artificial Sequence
  Description of Artificial Sequence: Synthetic oligonucleotide
  Sense strand starting at position 3883 of SEQ ID NO: 914261
uucuuugaugaguguagaa

SEQ ID NO: 990557 - RNA, 19 nt, Artificial Sequence
  Description of Artificial Sequence: Synthetic oligonucleotide
  Antisense strand to SEQ ID NO: 990556
uucuacacucaucaaagaa

SEQ ID NO: 990558 - RNA, 19 nt, Artificial Sequence
  Description of Artificial Sequence: Synthetic oligonucleotide
  Sense strand starting at position 3885 of SEQ ID NO: 914261
cuuugaugaguguagaauu

SEQ ID NO: 990559 - RNA, 19 nt, Artificial Sequence
  Description of Artificial Sequence: Synthetic oligonucleotide
  Antisense strand to SEQ ID NO: 990558
aauucuacacucaucaaag

SEQ ID NO: 990560 - RNA, 19 nt, Artificial Sequence
  Description of Artificial Sequence: Synthetic oligonucleotide
  Sense strand starting at position 3915 of SEQ ID NO: 914261
agacgaaacuguucuggaa

SEQ ID NO: 990561 - RNA, 19 nt, Artificial Sequence
  Description of Artificial Sequence: Synthetic oligonucleotide
  Antisense strand to SEQ ID NO: 990560
uuccagaacaguuucgucu

SEQ ID NO: 990562 - RNA, 19 nt, Artificial Sequence
  Description of Artificial Sequence: Synthetic oligonucleotide
  Sense strand starting at position 3927 of SEQ ID NO: 914261
ucuggaaauugguugcaua

SEQ ID NO: 990563 - RNA, 19 nt, Artificial Sequence
  Description of Artificial Sequence: Synthetic oligonucleotide
  Antisense strand to SEQ ID NO: 990562
uaugcaaccaauuuccaga

SEQ ID NO: 990564 - RNA, 19 nt, Artificial Sequence
  Description of Artificial Sequence: Synthetic oligonucleotide
  Sense strand starting at position 3928 of SEQ ID NO: 914261
cuggaaauugguugcauaa

SEQ ID NO: 990565 - RNA, 19 nt, Artificial Sequence
  Description of Artificial Sequence: Synthetic oligonucleotide
  Antisense strand to SEQ ID NO: 990564
uuaugcaaccaauuuccag

SEQ ID NO: 990566 - RNA, 19 nt, Artificial Sequence
  Description of Artificial Sequence: Synthetic oligonucleotide
  Sense strand starting at position 317 of SEQ ID NO: 914262
cuaugaaauucggcaaaua

SEQ ID NO: 990567 - RNA, 19 nt, Artificial Sequence
  Description of Artificial Sequence: Synthetic oligonucleotide
  Antisense strand to SEQ ID NO: 990566
uauuugccgaauuucauag

SEQ ID NO: 990568 - RNA, 19 nt, Artificial Sequence
  Description of Artificial Sequence: Synthetic oligonucleotide
  Sense strand starting at position 401 of SEQ ID NO: 914262
gcuauauugucagcuacag

SEQ ID NO: 990569 - RNA, 19 nt, Artificial Sequence
  Description of Artificial Sequence: Synthetic oligonucleotide
  Antisense strand to SEQ ID NO: 990568
cuguagcugacaauauagc

SEQ ID NO: 990570 - RNA, 19 nt, Artificial Sequence
  Description of Artificial Sequence: Synthetic oligonucleotide
  Sense strand starting at position 447 of SEQ ID NO: 914262
ggugaauucuaacuuggau

SEQ ID NO: 990571 - RNA, 19 nt, Artificial Sequence
  Description of Artificial Sequence: Synthetic oligonucleotide
  Antisense strand to SEQ ID NO: 990570
auccaaguuagaauucacc

SEQ ID NO: 990572 - RNA, 19 nt, Artificial Sequence
  Description of Artificial Sequence: Synthetic oligonucleotide
  Sense strand starting at position 474 of SEQ ID NO: 914262
ugguuuaaguccuugacug

SEQ ID NO: 990573 - RNA, 19 nt, Artificial Sequence
  Description of Artificial Sequence: Synthetic oligonucleotide
  Antisense strand to SEQ ID NO: 990572
cagucaaggacuuaaacca

SEQ ID NO: 990574 - RNA, 19 nt, Artificial Sequence
  Description of Artificial Sequence: Synthetic oligonucleotide
  Sense strand starting at position 475 of SEQ ID NO: 914262
gguuuaaguccuugacuga

SEQ ID NO: 990575 - RNA, 19 nt, Artificial Sequence
  Description of Artificial Sequence: Synthetic oligonucleotide
  Antisense strand to SEQ ID NO: 990574
ucagucaaggacuuaaacc

SEQ ID NO: 990576 - RNA, 19 nt, Artificial Sequence
  Description of Artificial Sequence: Synthetic oligonucleotide
  Sense strand starting at position 476 of SEQ ID NO: 914262
guuuaaguccuugacugau

SEQ ID NO: 990577 - RNA, 19 nt, Artificial Sequence
  Description of Artificial Sequence: Synthetic oligonucleotide
  Antisense strand to SEQ ID NO: 990576
aucagucaaggacuuaaac

SEQ ID NO: 990578 - RNA, 19 nt, Artificial Sequence
  Description of Artificial Sequence: Synthetic oligonucleotide
  Sense strand starting at position 478 of SEQ ID NO: 914262
uuaaguccuugacugauua

SEQ ID NO: 990579 - RNA, 19 nt, Artificial Sequence
  Description of Artificial Sequence: Synthetic oligonucleotide
  Antisense strand to SEQ ID NO: 990578
uaaucagucaaggacuuaa

SEQ ID NO: 990580 - RNA, 19 nt, Artificial Sequence
  Description of Artificial Sequence: Synthetic oligonucleotide
  Sense strand starting at position 493 of SEQ ID NO: 914262
auuacaaucugaccgugaa

SEQ ID NO: 990581 - RNA, 19 nt, Artificial Sequence
  Description of Artificial Sequence: Synthetic oligonucleotide
  Antisense strand to SEQ ID NO: 990580
uucacggucagauuguaau

SEQ ID NO: 990582 - RNA, 19 nt, Artificial Sequence
  Description of Artificial Sequence: Synthetic oligonucleotide
  Sense strand starting at position 494 of SEQ ID NO: 914262
uuacaaucugaccgugaag

SEQ ID NO: 990583 - RNA, 19 nt, Artificial Sequence
  Description of Artificial Sequence: Synthetic oligonucleotide
  Antisense strand to SEQ ID NO: 990582
cuucacggucagauuguaa

SEQ ID NO: 990584 - RNA, 19 nt, Artificial Sequence
  Description of Artificial Sequence: Synthetic oligonucleotide
  Sense strand starting at position 535 of SEQ ID NO: 914262
uguccagauucuccguaaa

SEQ ID NO: 990585 - RNA, 19 nt, Artificial Sequence
  Description of Artificial Sequence: Synthetic oligonucleotide
  Antisense strand to SEQ ID NO: 990584
uuuacggagaaucuggaca

SEQ ID NO: 990586 - RNA, 19 nt, Artificial Sequence
  Description of Artificial Sequence: Synthetic oligonucleotide
  Sense strand starting at position 537 of SEQ ID NO: 914262
uccagauucuccguaaauu

SEQ ID NO: 990587 - RNA, 19 nt, Artificial Sequence
  Description of Artificial Sequence: Synthetic oligonucleotide
  Antisense strand to SEQ ID NO: 990586
aauuuacggagaaucugga

SEQ ID NO: 990588 - RNA, 19 nt, Artificial Sequence
  Description of Artificial Sequence: Synthetic oligonucleotide
  Sense strand starting at position 538 of SEQ ID NO: 914262
ccagauucuccguaaauuc

SEQ ID NO: 990589 - RNA, 19 nt, Artificial Sequence
  Description of Artificial Sequence: Synthetic oligonucleotide
  Antisense strand to SEQ ID NO: 990588
gaauuuacggagaaucugg

SEQ ID NO: 990590 - RNA, 19 nt, Artificial Sequence
  Description of Artificial Sequence: Synthetic oligonucleotide
  Sense strand starting at position 709 of SEQ ID NO: 914262
gaauaaauggcacgucaca

SEQ ID NO: 990591 - RNA, 19 nt, Artificial Sequence
  Description of Artificial Sequence: Synthetic oligonucleotide
  Antisense strand to SEQ ID NO: 990590
ugugacgugccauuuauuc

SEQ ID NO: 990592 - RNA, 19 nt, Artificial Sequence
  Description of Artificial Sequence: Synthetic oligonucleotide
  Sense strand starting at position 725 of SEQ ID NO: 914262
acagguuagcucuaggauu

SEQ ID NO: 990593 - RNA, 19 nt, Artificial Sequence
  Description of Artificial Sequence: Synthetic oligonucleotide
  Antisense strand to SEQ ID NO: 990592
aauccuagagcuaaccugu

SEQ ID NO: 990594 - RNA, 19 nt, Artificial Sequence
  Description of Artificial Sequence: Synthetic oligonucleotide
  Sense strand starting at position 791 of SEQ ID NO: 914262
uuggaaaggcucugcaagu

SEQ ID NO: 990595 - RNA, 19 nt, Artificial Sequence
  Description of Artificial Sequence: Synthetic oligonucleotide
  Antisense strand to SEQ ID NO: 990594
acuugcagagccuuuccaa

SEQ ID NO: 990596 - RNA, 19 nt, Artificial Sequence
  Description of Artificial Sequence: Synthetic oligonucleotide
  Sense strand starting at position 792 of SEQ ID NO: 914262
uggaaaggcucugcaaguu

SEQ ID NO: 990597 - RNA, 19 nt, Artificial Sequence
  Description of Artificial Sequence: Synthetic oligonucleotide
  Antisense strand to SEQ ID NO: 990596
aacuugcagagccuuucca

SEQ ID NO: 990598 - RNA, 19 nt, Artificial Sequence
  Description of Artificial Sequence: Synthetic oligonucleotide
  Sense strand starting at position 816 of SEQ ID NO: 914262
cagaaagaacgauguuauu

SEQ ID NO: 990599 - RNA, 19 nt, Artificial Sequence
  Description of Artificial Sequence: Synthetic oligonucleotide
  Antisense strand to SEQ ID NO: 990598
aauaacaucguucuuucug

SEQ ID NO: 990600 - RNA, 19 nt, Artificial Sequence
  Description of Artificial Sequence: Synthetic oligonucleotide
  Sense strand starting at position 916 of SEQ ID NO: 914262
ucagaugauagcuguaaga

SEQ ID NO: 990601 - RNA, 19 nt, Artificial Sequence
  Description of Artificial Sequence: Synthetic oligonucleotide
  Antisense strand to SEQ ID NO: 990600
ucuuacagcuaucaucuga

SEQ ID NO: 990602 - RNA, 19 nt, Artificial Sequence
  Description of Artificial Sequence: Synthetic oligonucleotide
  Sense strand starting at position 2126 of SEQ ID NO: 914262
gcgaguugccugguuaacu

SEQ ID NO: 990603 - RNA, 19 nt, Artificial Sequence
  Description of Artificial Sequence: Synthetic oligonucleotide
  Antisense strand to SEQ ID NO: 990602
aguuaaccaggcaacucgc

SEQ ID NO: 990604 - RNA, 19 nt, Artificial Sequence
  Description of Artificial Sequence: Synthetic oligonucleotide
  Sense strand starting at position 2325 of SEQ ID NO: 914262
gcuuaacuugguggguaua

SEQ ID NO: 990605 - RNA, 19 nt, Artificial Sequence
  Description of Artificial Sequence: Synthetic oligonucleotide
  Antisense strand to SEQ ID NO: 990604
uauacccaccaaguuaagc

SEQ ID NO: 990606 - RNA, 19 nt, Artificial Sequence
  Description of Artificial Sequence: Synthetic oligonucleotide
  Sense strand starting at position 2326 of SEQ ID NO: 914262
cuuaacuugguggguauaa

SEQ ID NO: 990607 - RNA, 19 nt, Artificial Sequence
  Description of Artificial Sequence: Synthetic oligonucleotide
  Antisense strand to SEQ ID NO: 990606
uuauacccaccaaguuaag

SEQ ID NO: 990608 - RNA, 19 nt, Artificial Sequence
  Description of Artificial Sequence: Synthetic oligonucleotide
  Sense strand starting at position 2327 of SEQ ID NO: 914262
uuaacuugguggguauaaa

SEQ ID NO: 990609 - RNA, 19 nt, Artificial Sequence
  Description of Artificial Sequence: Synthetic oligonucleotide
  Antisense strand to SEQ ID NO: 990608
uuuauacccaccaaguuaa

SEQ ID NO: 990610 - RNA, 19 nt, Artificial Sequence
  Description of Artificial Sequence: Synthetic oligonucleotide
  Sense strand starting at position 2825 of SEQ ID NO: 914262
cuuguuugaggaggugauu

SEQ ID NO: 990611 - RNA, 19 nt, Artificial Sequence
  Description of Artificial Sequence: Synthetic oligonucleotide
  Antisense strand to SEQ ID NO: 990610
aaucaccuccucaaacaag

SEQ ID NO: 990612 - RNA, 19 nt, Artificial Sequence
  Description of Artificial Sequence: Synthetic oligonucleotide
  Sense strand starting at position 2864 of SEQ ID NO: 914262
caagguggccuuuggagaa

SEQ ID NO: 990613 - RNA, 19 nt, Artificial Sequence
  Description of Artificial Sequence: Synthetic oligonucleotide
  Antisense strand to SEQ ID NO: 990612
uucuccaaaggccaccuug

SEQ ID NO: 990614 - RNA, 19 nt, Artificial Sequence
  Description of Artificial Sequence: Synthetic oligonucleotide
  Sense strand starting at position 2881 of SEQ ID NO: 914262
aagggaacagcucgggauu

SEQ ID NO: 990615 - RNA, 19 nt, Artificial Sequence
  Description of Artificial Sequence: Synthetic oligonucleotide
  Antisense strand to SEQ ID NO: 990614
aaucccgagcuguucccuu

SEQ ID NO: 990616 - RNA, 19 nt, Artificial Sequence
  Description of Artificial Sequence: Synthetic oligonucleotide
  Sense strand starting at position 2966 of SEQ ID NO: 914262
guuguagggucucucauaa

SEQ ID NO: 990617 - RNA, 19 nt, Artificial Sequence
  Description of Artificial Sequence: Synthetic oligonucleotide
  Antisense strand to SEQ ID NO: 990616
uuaugagagacccuacaac

SEQ ID NO: 990618 - RNA, 19 nt, Artificial Sequence
  Description of Artificial Sequence: Synthetic oligonucleotide
  Sense strand starting at position 3078 of SEQ ID NO: 914262
ggaagacugcaccauguuu

SEQ ID NO: 990619 - RNA, 19 nt, Artificial Sequence
  Description of Artificial Sequence: Synthetic oligonucleotide
  Antisense strand to SEQ ID NO: 990618
aaacauggugcagucuucc

SEQ ID NO: 990620 - RNA, 19 nt, Artificial Sequence
  Description of Artificial Sequence: Synthetic oligonucleotide
  Sense strand starting at position 3087 of SEQ ID NO: 914262
caccauguuuaaguaagga

SEQ ID NO: 990621 - RNA, 19 nt, Artificial Sequence
  Description of Artificial Sequence: Synthetic oligonucleotide
  Antisense strand to SEQ ID NO: 990620
uccuuacuuaaacauggug

SEQ ID NO: 990622 - RNA, 19 nt, Artificial Sequence
  Description of Artificial Sequence: Synthetic oligonucleotide
  Sense strand starting at position 3108 of SEQ ID NO: 914262
ugugaaugcuuacuuaaac

SEQ ID NO: 990623 - RNA, 19 nt, Artificial Sequence
  Description of Artificial Sequence: Synthetic oligonucleotide
  Antisense strand to SEQ ID NO: 990622
guuuaaguaagcauucaca

SEQ ID NO: 990624 - RNA, 19 nt, Artificial Sequence
  Description of Artificial Sequence: Synthetic oligonucleotide
  Sense strand starting at position 3120 of SEQ ID NO: 914262
cuuaaaccauguuuaagua

SEQ ID NO: 990625 - RNA, 19 nt, Artificial Sequence
  Description of Artificial Sequence: Synthetic oligonucleotide
  Antisense strand to SEQ ID NO: 990624
uacuuaaacaugguuuaag

SEQ ID NO: 990626 - RNA, 19 nt, Artificial Sequence
  Description of Artificial Sequence: Synthetic oligonucleotide
  Sense strand starting at position 3124 of SEQ ID NO: 914262
aaccauguuuaaguaagga

SEQ ID NO: 990627 - RNA, 19 nt, Artificial Sequence
  Description of Artificial Sequence: Synthetic oligonucleotide
  Antisense strand to SEQ ID NO: 990626
uccuuacuuaaacaugguu

SEQ ID NO: 990628 - RNA, 19 nt, Artificial Sequence
  Description of Artificial Sequence: Synthetic oligonucleotide
  Sense strand starting at position 3160 of SEQ ID NO: 914262
cugguuauuugguaggaga

SEQ ID NO: 990629 - RNA, 19 nt, Artificial Sequence
  Description of Artificial Sequence: Synthetic oligonucleotide
  Antisense strand to SEQ ID NO: 990628
ucuccuaccaaauaaccag

SEQ ID NO: 990630 - RNA, 19 nt, Artificial Sequence
  Description of Artificial Sequence: Synthetic oligonucleotide
  Sense strand starting at position 3163 of SEQ ID NO: 914262
guuauuugguaggagauac

SEQ ID NO: 990631 - RNA, 19 nt, Artificial Sequence
  Description of Artificial Sequence: Synthetic oligonucleotide
  Antisense strand to SEQ ID NO: 990630
guaucuccuaccaaauaac

SEQ ID NO: 990632 - RNA, 19 nt, Artificial Sequence
  Description of Artificial Sequence: Synthetic oligonucleotide
  Sense strand starting at position 3185 of SEQ ID NO: 914262
ccaggcucucacugcuaau

SEQ ID NO: 990633 - RNA, 19 nt, Artificial Sequence
  Description of Artificial Sequence: Synthetic oligonucleotide
  Antisense strand to SEQ ID NO: 990632
auuagcagugagagccugg

SEQ ID NO: 990634 - RNA, 19 nt, Artificial Sequence
  Description of Artificial Sequence: Synthetic oligonucleotide
  Sense strand starting at position 3379 of SEQ ID NO: 914262
auggcuugaugagcaauua

SEQ ID NO: 990635 - RNA, 19 nt, Artificial Sequence
  Description of Artificial Sequence: Synthetic oligonucleotide
  Antisense strand to SEQ ID NO: 990634
uaauugcucaucaagccau

SEQ ID NO: 990636 - RNA, 19 nt, Artificial Sequence
  Description of Artificial Sequence: Synthetic oligonucleotide
  Sense strand starting at position 3380 of SEQ ID NO: 914262
uggcuugaugagcaauuau

SEQ ID NO: 990637 - RNA, 19 nt, Artificial Sequence
  Description of Artificial Sequence: Synthetic oligonucleotide
  Antisense strand to SEQ ID NO: 990636
auaauugcucaucaagcca

SEQ ID NO: 990638 - RNA, 19 nt, Artificial Sequence
  Description of Artificial Sequence: Synthetic oligonucleotide
  Sense strand starting at position 3410 of SEQ ID NO: 914262
ugaguaguagccgaccaau

SEQ ID NO: 990639 - RNA, 19 nt, Artificial Sequence
  Description of Artificial Sequence: Synthetic oligonucleotide
  Antisense strand to SEQ ID NO: 990638
auuggucggcuacuacuca

SEQ ID NO: 990640 - RNA, 19 nt, Artificial Sequence
  Description of Artificial Sequence: Synthetic oligonucleotide
  Sense strand starting at position 3580 of SEQ ID NO: 914262
ucaagugccuccuuuagaa

SEQ ID NO: 990641 - RNA, 19 nt, Artificial Sequence
  Description of Artificial Sequence: Synthetic oligonucleotide
  Antisense strand to SEQ ID NO: 990640
uucuaaaggaggcacuuga

SEQ ID NO: 990642 - RNA, 19 nt, Artificial Sequence
  Description of Artificial Sequence: Synthetic oligonucleotide
  Sense strand starting at position 3626 of SEQ ID NO: 914262
uguauauccacucgggaga

SEQ ID NO: 990643 - RNA, 19 nt, Artificial Sequence
  Description of Artificial Sequence: Synthetic oligonucleotide
  Antisense strand to SEQ ID NO: 990642
ucucccgaguggauauaca

SEQ ID NO: 990644 - RNA, 19 nt, Artificial Sequence
  Description of Artificial Sequence: Synthetic oligonucleotide
  Sense strand starting at position 3976 of SEQ ID NO: 914262
ugugguucugggcaaacau

SEQ ID NO: 990645 - RNA, 19 nt, Artificial Sequence
  Description of Artificial Sequence: Synthetic oligonucleotide
  Antisense strand to SEQ ID NO: 990644
auguuugcccagaaccaca

SEQ ID NO: 990646 - RNA, 19 nt, Artificial Sequence
  Description of Artificial Sequence: Synthetic oligonucleotide
  Sense strand starting at position 170 of SEQ ID NO: 914263
guuggauuccagggaaacg

SEQ ID NO: 990647 - RNA, 19 nt, Artificial Sequence
  Description of Artificial Sequence: Synthetic oligonucleotide
  Antisense strand to SEQ ID NO: 990646
cguuucccuggaauccaac

SEQ ID NO: 990648 - RNA, 19 nt, Artificial Sequence
  Description of Artificial Sequence: Synthetic oligonucleotide
  Sense strand starting at position 284 of SEQ ID NO: 914263
ggcccaaugaccuggguuu

SEQ ID NO: 990649 - RNA, 19 nt, Artificial Sequence
  Description of Artificial Sequence: Synthetic oligonucleotide
  Antisense strand to SEQ ID NO: 990648
aaacccaggucauugggcc

SEQ ID NO: 990650 - RNA, 19 nt, Artificial Sequence
  Description of Artificial Sequence: Synthetic oligonucleotide
  Sense strand starting at position 285 of SEQ ID NO: 914263
gcccaaugaccuggguuua

SEQ ID NO: 990651 - RNA, 19 nt, Artificial Sequence
  Description of Artificial Sequence: Synthetic oligonucleotide
  Antisense strand to SEQ ID NO: 990650
uaaacccaggucauugggc

SEQ ID NO: 990652 - RNA, 19 nt, Artificial Sequence
  Description of Artificial Sequence: Synthetic oligonucleotide
  Sense strand starting at position 286 of SEQ ID NO: 914263
cccaaugaccuggguuuaa

SEQ ID NO: 990653 - RNA, 19 nt, Artificial Sequence
  Description of Artificial Sequence: Synthetic oligonucleotide
  Antisense strand to SEQ ID NO: 990652
uuaaacccaggucauuggg

SEQ ID NO: 990654 - RNA, 19 nt, Artificial Sequence
  Description of Artificial Sequence: Synthetic oligonucleotide
  Sense strand starting at position 349 of SEQ ID NO: 914263
gcuugaccucuuuguauuc

SEQ ID NO: 990655 - RNA, 19 nt, Artificial Sequence
  Description of Artificial Sequence: Synthetic oligonucleotide
  Antisense strand to SEQ ID NO: 990654
gaauacaaagaggucaagc

SEQ ID NO: 990656 - RNA, 19 nt, Artificial Sequence
  Description of Artificial Sequence: Synthetic oligonucleotide
  Sense strand starting at position 409 of SEQ ID NO: 914263
auaccacugucgggagaau

SEQ ID NO: 990657 - RNA, 19 nt, Artificial Sequence
  Description of Artificial Sequence: Synthetic oligonucleotide
  Antisense strand to SEQ ID NO: 990656
auucucccgacagugguau

SEQ ID NO: 990658 - RNA, 19 nt, Artificial Sequence
  Description of Artificial Sequence: Synthetic oligonucleotide
  Sense strand starting at position 410 of SEQ ID NO: 914263
uaccacugucgggagaauu

SEQ ID NO: 990659 - RNA, 19 nt, Artificial Sequence
  Description of Artificial Sequence: Synthetic oligonucleotide
  Antisense strand to SEQ ID NO: 990658
aauucucccgacaguggua

SEQ ID NO: 990660 - RNA, 19 nt, Artificial Sequence
  Description of Artificial Sequence: Synthetic oligonucleotide
  Sense strand starting at position 443 of SEQ ID NO: 914263
ccgggaagugcucaguauc

SEQ ID NO: 990661 - RNA, 19 nt, Artificial Sequence
  Description of Artificial Sequence: Synthetic oligonucleotide
  Antisense strand to SEQ ID NO: 990660
gauacugagcacuucccgg

SEQ ID NO: 990662 - RNA, 19 nt, Artificial Sequence
  Description of Artificial Sequence: Synthetic oligonucleotide
  Sense strand starting at position 446 of SEQ ID NO: 914263
ggaagugcucaguauccau

SEQ ID NO: 990663 - RNA, 19 nt, Artificial Sequence
  Description of Artificial Sequence: Synthetic oligonucleotide
  Antisense strand to SEQ ID NO: 990662
auggauacugagcacuucc

SEQ ID NO: 990664 - RNA, 19 nt, Artificial Sequence
  Description of Artificial Sequence: Synthetic oligonucleotide
  Sense strand starting at position 721 of SEQ ID NO: 914263
ucugaucuccugcagugua

SEQ ID NO: 990665 - RNA, 19 nt, Artificial Sequence
  Description of Artificial Sequence: Synthetic oligonucleotide
  Antisense strand to SEQ ID NO: 990664
uacacugcaggagaucaga

SEQ ID NO: 990666 - RNA, 19 nt, Artificial Sequence
  Description of Artificial Sequence: Synthetic oligonucleotide
  Sense strand starting at position 895 of SEQ ID NO: 914263
agaccaguuucuccgggaa

SEQ ID NO: 990667 - RNA, 19 nt, Artificial Sequence
  Description of Artificial Sequence: Synthetic oligonucleotide
  Antisense strand to SEQ ID NO: 990666
uucccggagaaacuggucu

SEQ ID NO: 990668 - RNA, 19 nt, Artificial Sequence
  Description of Artificial Sequence: Synthetic oligonucleotide
  Sense strand starting at position 898 of SEQ ID NO: 914263
ccaguuucuccgggaagca

SEQ ID NO: 990669 - RNA, 19 nt, Artificial Sequence
  Description of Artificial Sequence: Synthetic oligonucleotide
  Antisense strand to SEQ ID NO: 990668
ugcuucccggagaaacugg

SEQ ID NO: 990670 - RNA, 19 nt, Artificial Sequence
  Description of Artificial Sequence: Synthetic oligonucleotide
  Sense strand starting at position 1003 of SEQ ID NO: 914263
ucugcagcgauccgguauu

SEQ ID NO: 990671 - RNA, 19 nt, Artificial Sequence
  Description of Artificial Sequence: Synthetic oligonucleotide
  Antisense strand to SEQ ID NO: 990670
aauaccggaucgcugcaga

SEQ ID NO: 990672 - RNA, 19 nt, Artificial Sequence
  Description of Artificial Sequence: Synthetic oligonucleotide
  Sense strand starting at position 1023 of SEQ ID NO: 914263
ggcgguuugguguuuccua

SEQ ID NO: 990673 - RNA, 19 nt, Artificial Sequence
  Description of Artificial Sequence: Synthetic oligonucleotide
  Antisense strand to SEQ ID NO: 990672
uaggaaacaccaaaccgcc

SEQ ID NO: 990674 - RNA, 19 nt, Artificial Sequence
  Description of Artificial Sequence: Synthetic oligonucleotide
  Sense strand starting at position 1024 of SEQ ID NO: 914263
gcgguuugguguuuccuau

SEQ ID NO: 990675 - RNA, 19 nt, Artificial Sequence
  Description of Artificial Sequence: Synthetic oligonucleotide
  Antisense strand to SEQ ID NO: 990674
auaggaaacaccaaaccgc

SEQ ID NO: 990676 - RNA, 19 nt, Artificial Sequence
  Description of Artificial Sequence: Synthetic oligonucleotide
  Sense strand starting at position 1171 of SEQ ID NO: 914263
auaacuaaauguguuguca

SEQ ID NO: 990677 - RNA, 19 nt, Artificial Sequence
  Description of Artificial Sequence: Synthetic oligonucleotide
  Antisense strand to SEQ ID NO: 990676
ugacaacacauuuaguuau

SEQ ID NO: 990678 - RNA, 19 nt, Artificial Sequence
  Description of Artificial Sequence: Synthetic oligonucleotide
  Sense strand starting at position 1351 of SEQ ID NO: 914263
ggcacaguucccgggauga

SEQ ID NO: 990679 - RNA, 19 nt, Artificial Sequence
  Description of Artificial Sequence: Synthetic oligonucleotide
  Antisense strand to SEQ ID NO: 990678
ucaucccgggaacugugcc

SEQ ID NO: 990680 - RNA, 19 nt, Artificial Sequence
  Description of Artificial Sequence: Synthetic oligonucleotide
  Sense strand starting at position 1353 of SEQ ID NO: 914263
cacaguucccgggaugaga

SEQ ID NO: 990681 - RNA, 19 nt, Artificial Sequence
  Description of Artificial Sequence: Synthetic oligonucleotide
  Antisense strand to SEQ ID NO: 990680
ucucaucccgggaacugug

SEQ ID NO: 990682 - RNA, 19 nt, Artificial Sequence
  Description of Artificial Sequence: Synthetic oligonucleotide
  Sense strand starting at position 1425 of SEQ ID NO: 914263
gacaaaguccauugcuaag

SEQ ID NO: 990683 - RNA, 19 nt, Artificial Sequence
  Description of Artificial Sequence: Synthetic oligonucleotide
  Antisense strand to SEQ ID NO: 990682
cuuagcaauggacuuuguc

SEQ ID NO: 990684 - RNA, 19 nt, Artificial Sequence
  Description of Artificial Sequence: Synthetic oligonucleotide
  Sense strand starting at position 1431 of SEQ ID NO: 914263
guccauugcuaagaaugau

SEQ ID NO: 990685 - RNA, 19 nt, Artificial Sequence
  Description of Artificial Sequence: Synthetic oligonucleotide
  Antisense strand to SEQ ID NO: 990684
aucauucuuagcaauggac

SEQ ID NO: 990686 - RNA, 19 nt, Artificial Sequence
  Description of Artificial Sequence: Synthetic oligonucleotide
  Sense strand starting at position 1445 of SEQ ID NO: 914263
augauucuuucccagaguc

SEQ ID NO: 990687 - RNA, 19 nt, Artificial Sequence
  Description of Artificial Sequence: Synthetic oligonucleotide
  Antisense strand to SEQ ID NO: 990686
gacucugggaaagaaucau

SEQ ID NO: 990688 - RNA, 19 nt, Artificial Sequence
  Description of Artificial Sequence: Synthetic oligonucleotide
  Sense strand starting at position 2314 of SEQ ID NO: 914263
gggaacuauuauuguauua

SEQ ID NO: 990689 - RNA, 19 nt, Artificial Sequence
  Description of Artificial Sequence: Synthetic oligonucleotide
  Antisense strand to SEQ ID NO: 990688
uaauacaauaauaguuccc

SEQ ID NO: 990690 - RNA, 19 nt, Artificial Sequence
  Description of Artificial Sequence: Synthetic oligonucleotide
  Sense strand starting at position 2718 of SEQ ID NO: 914263
ccgagcuugcucgauuuau

SEQ ID NO: 990691 - RNA, 19 nt, Artificial Sequence
  Description of Artificial Sequence: Synthetic oligonucleotide
  Antisense strand to SEQ ID NO: 990690
auaaaucgagcaagcucgg

SEQ ID NO: 990692 - RNA, 19 nt, Artificial Sequence
  Description of Artificial Sequence: Synthetic oligonucleotide
  Sense strand starting at position 2868 of SEQ ID NO: 914263
uccagugucugagguguuu

SEQ ID NO: 990693 - RNA, 19 nt, Artificial Sequence
  Description of Artificial Sequence: Synthetic oligonucleotide
  Antisense strand to SEQ ID NO: 990692
aaacaccucagacacugga

SEQ ID NO: 990694 - RNA, 19 nt, Artificial Sequence
  Description of Artificial Sequence: Synthetic oligonucleotide
  Sense strand starting at position 2964 of SEQ ID NO: 914263
guggcuggagucuagaaau

SEQ ID NO: 990695 - RNA, 19 nt, Artificial Sequence
  Description of Artificial Sequence: Synthetic oligonucleotide
  Antisense strand to SEQ ID NO: 990694
auuucuagacuccagccac

SEQ ID NO: 990696 - RNA, 19 nt, Artificial Sequence
  Description of Artificial Sequence: Synthetic oligonucleotide
  Sense strand starting at position 3077 of SEQ ID NO: 914263
gagccugucuuucugcaga

SEQ ID NO: 990697 - RNA, 19 nt, Artificial Sequence
  Description of Artificial Sequence: Synthetic oligonucleotide
  Antisense strand to SEQ ID NO: 990696
ucugcagaaagacaggcuc

SEQ ID NO: 990698 - RNA, 19 nt, Artificial Sequence
  Description of Artificial Sequence: Synthetic oligonucleotide
  Sense strand starting at position 3079 of SEQ ID NO: 914263
gccugucuuucugcagauc

SEQ ID NO: 990699 - RNA, 19 nt, Artificial Sequence
  Description of Artificial Sequence: Synthetic oligonucleotide
  Antisense strand to SEQ ID NO: 990698
gaucugcagaaagacaggc

SEQ ID NO: 990700 - RNA, 19 nt, Artificial Sequence
  Description of Artificial Sequence: Synthetic oligonucleotide
  Sense strand starting at position 3082 of SEQ ID NO: 914263
ugucuuucugcagaucuaa

SEQ ID NO: 990701 - RNA, 19 nt, Artificial Sequence
  Description of Artificial Sequence: Synthetic oligonucleotide
  Antisense strand to SEQ ID NO: 990700
uuagaucugcagaaagaca

SEQ ID NO: 990702 - RNA, 19 nt, Artificial Sequence
  Description of Artificial Sequence: Synthetic oligonucleotide
  Sense strand starting at position 3166 of SEQ ID NO: 914263
cagagcuucuugcuccaga

SEQ ID NO: 990703 - RNA, 19 nt, Artificial Sequence
  Description of Artificial Sequence: Synthetic oligonucleotide
  Antisense strand to SEQ ID NO: 990702
ucuggagcaagaagcucug

SEQ ID NO: 990704 - RNA, 19 nt, Artificial Sequence
  Description of Artificial Sequence: Synthetic oligonucleotide
  Sense strand starting at position 3296 of SEQ ID NO: 914263
ucccgaucuuccucaaguu

SEQ ID NO: 990705 - RNA, 19 nt, Artificial Sequence
  Description of Artificial Sequence: Synthetic oligonucleotide
  Antisense strand to SEQ ID NO: 990704
aacuugaggaagaucggga

SEQ ID NO: 990706 - RNA, 19 nt, Artificial Sequence
  Description of Artificial Sequence: Synthetic oligonucleotide
  Sense strand starting at position 3364 of SEQ ID NO: 914263
cccggauacaccugucaga

SEQ ID NO: 990707 - RNA, 19 nt, Artificial Sequence
  Description of Artificial Sequence: Synthetic oligonucleotide
  Antisense strand to SEQ ID NO: 990706
ucugacagguguauccggg

SEQ ID NO: 990708 - RNA, 19 nt, Artificial Sequence
  Description of Artificial Sequence: Synthetic oligonucleotide
  Sense strand starting at position 556 of SEQ ID NO: 914264
gggaacuauuauuguauua

SEQ ID NO: 990709 - RNA, 19 nt, Artificial Sequence
  Description of Artificial Sequence: Synthetic oligonucleotide
  Antisense strand to SEQ ID NO: 990708
uaauacaauaauaguuccc

SEQ ID NO: 990710 - RNA, 19 nt, Artificial Sequence
  Description of Artificial Sequence: Synthetic oligonucleotide
  Sense strand starting at position 960 of SEQ ID NO: 914264
ccgagcuugcucgauuuau

SEQ ID NO: 990711 - RNA, 19 nt, Artificial Sequence
  Description of Artificial Sequence: Synthetic oligonucleotide
  Antisense strand to SEQ ID NO: 990710
auaaaucgagcaagcucgg

SEQ ID NO: 990712 - RNA, 19 nt, Artificial Sequence
  Description of Artificial Sequence: Synthetic oligonucleotide
  Sense strand starting at position 1110 of SEQ ID NO: 914264
uccagugucugagguguuu

SEQ ID NO: 990713 - RNA, 19 nt, Artificial Sequence
  Description of Artificial Sequence: Synthetic oligonucleotide
  Antisense strand to SEQ ID NO: 990712
aaacaccucagacacugga

SEQ ID NO: 990714 - RNA, 19 nt, Artificial Sequence
  Description of Artificial Sequence: Synthetic oligonucleotide
  Sense strand starting at position 1206 of SEQ ID NO: 914264
guggcuggagucuagaaau

SEQ ID NO: 990715 - RNA, 19 nt, Artificial Sequence
  Description of Artificial Sequence: Synthetic oligonucleotide
  Antisense strand to SEQ ID NO: 990714
auuucuagacuccagccac

SEQ ID NO: 990716 - RNA, 19 nt, Artificial Sequence
  Description of Artificial Sequence: Synthetic oligonucleotide
  Sense strand starting at position 1319 of SEQ ID NO: 914264
gagccugucuuucugcaga

SEQ ID NO: 990717 - RNA, 19 nt, Artificial Sequence
  Description of Artificial Sequence: Synthetic oligonucleotide
  Antisense strand to SEQ ID NO: 990716
ucugcagaaagacaggcuc

SEQ ID NO: 990718 - RNA, 19 nt, Artificial Sequence
  Description of Artificial Sequence: Synthetic oligonucleotide
  Sense strand starting at position 1321 of SEQ ID NO: 914264
gccugucuuucugcagauc

SEQ ID NO: 990719 - RNA, 19 nt, Artificial Sequence
  Description of Artificial Sequence: Synthetic oligonucleotide
  Antisense strand to SEQ ID NO: 990718
gaucugcagaaagacaggc

SEQ ID NO: 990720 - RNA, 19 nt, Artificial Sequence
  Description of Artificial Sequence: Synthetic oligonucleotide
  Sense strand starting at position 1324 of SEQ ID NO: 914264
ugucuuucugcagaucuaa

SEQ ID NO: 990721 - RNA, 19 nt, Artificial Sequence
  Description of Artificial Sequence: Synthetic oligonucleotide
  Antisense strand to SEQ ID NO: 990720
uuagaucugcagaaagaca

SEQ ID NO: 990722 - RNA, 19 nt, Artificial Sequence
  Description of Artificial Sequence: Synthetic oligonucleotide
  Sense strand starting at position 1408 of SEQ ID NO: 914264
cagagcuucuugcuccaga

SEQ ID NO: 990723 - RNA, 19 nt, Artificial Sequence
  Description of Artificial Sequence: Synthetic oligonucleotide
  Antisense strand to SEQ ID NO: 990722
ucuggagcaagaagcucug

SEQ ID NO: 990724 - RNA, 19 nt, Artificial Sequence
  Description of Artificial Sequence: Synthetic oligonucleotide
  Sense strand starting at position 1538 of SEQ ID NO: 914264
ucccgaucuuccucaaguu

SEQ ID NO: 990725 - RNA, 19 nt, Artificial Sequence
  Description of Artificial Sequence: Synthetic oligonucleotide
  Antisense strand to SEQ ID NO: 990724
aacuugaggaagaucggga

SEQ ID NO: 990726 - RNA, 19 nt, Artificial Sequence
  Description of Artificial Sequence: Synthetic oligonucleotide
  Sense strand starting at position 1606 of SEQ ID NO: 914264
cccggauacaccugucaga

SEQ ID NO: 990727 - RNA, 19 nt, Artificial Sequence
  Description of Artificial Sequence: Synthetic oligonucleotide
  Antisense strand to SEQ ID NO: 990726
ucugacagguguauccggg

SEQ ID NO: 990728 - RNA, 19 nt, Artificial Sequence
  Description of Artificial Sequence: Synthetic oligonucleotide
  Sense strand starting at position 2251 of SEQ ID NO: 914264
ggccgaacuugucaugaau

SEQ ID NO: 990729 - RNA, 19 nt, Artificial Sequence
  Description of Artificial Sequence: Synthetic oligonucleotide
  Antisense strand to SEQ ID NO: 990728
auucaugacaaguucggcc

SEQ ID NO: 990730 - RNA, 19 nt, Artificial Sequence
  Description of Artificial Sequence: Synthetic oligonucleotide
  Sense strand starting at position 2254 of SEQ ID NO: 914264
cgaacuugucaugaaugca

SEQ ID NO: 990731 - RNA, 19 nt, Artificial Sequence
  Description of Artificial Sequence: Synthetic oligonucleotide
  Antisense strand to SEQ ID NO: 990730
ugcauucaugacaaguucg

SEQ ID NO: 990732 - RNA, 19 nt, Artificial Sequence
  Description of Artificial Sequence: Synthetic oligonucleotide
  Sense strand starting at position 2328 of SEQ ID NO: 914264
uagccuucccugggaguga

SEQ ID NO: 990733 - RNA, 19 nt, Artificial Sequence
  Description of Artificial Sequence: Synthetic oligonucleotide
  Antisense strand to SEQ ID NO: 990732
ucacucccagggaaggcua

SEQ ID NO: 990734 - RNA, 19 nt, Artificial Sequence
  Description of Artificial Sequence: Synthetic oligonucleotide
  Sense strand starting at position 2459 of SEQ ID NO: 914264
gucccaucuuuguugagga

SEQ ID NO: 990735 - RNA, 19 nt, Artificial Sequence
  Description of Artificial Sequence: Synthetic oligonucleotide
  Antisense strand to SEQ ID NO: 990734
uccucaacaaagaugggac

SEQ ID NO: 990736 - RNA, 19 nt, Artificial Sequence
  Description of Artificial Sequence: Synthetic oligonucleotide
  Sense strand starting at position 2472 of SEQ ID NO: 914264
ugaggagcccaggguaaau

SEQ ID NO: 990737 - RNA, 19 nt, Artificial Sequence
  Description of Artificial Sequence: Synthetic oligonucleotide
  Antisense strand to SEQ ID NO: 990736
auuuacccugggcuccuca

SEQ ID NO: 990738 - RNA, 19 nt, Artificial Sequence
  Description of Artificial Sequence: Synthetic oligonucleotide
  Sense strand starting at position 2680 of SEQ ID NO: 914264
aguguucccaugugagaau

SEQ ID NO: 990739 - RNA, 19 nt, Artificial Sequence
  Description of Artificial Sequence: Synthetic oligonucleotide
  Antisense strand to SEQ ID NO: 990738
auucucacaugggaacacu

SEQ ID NO: 990740 - RNA, 19 nt, Artificial Sequence
  Description of Artificial Sequence: Synthetic oligonucleotide
  Sense strand starting at position 2787 of SEQ ID NO: 914264
gugugaggucugggcucaa

SEQ ID NO: 990741 - RNA, 19 nt, Artificial Sequence
  Description of Artificial Sequence: Synthetic oligonucleotide
  Antisense strand to SEQ ID NO: 990740
uugagcccagaccucacac

SEQ ID NO: 990742 - RNA, 19 nt, Artificial Sequence
  Description of Artificial Sequence: Synthetic oligonucleotide
  Sense strand starting at position 2824 of SEQ ID NO: 914264
accugugugaccuagguua

SEQ ID NO: 990743 - RNA, 19 nt, Artificial Sequence
  Description of Artificial Sequence: Synthetic oligonucleotide
  Antisense strand to SEQ ID NO: 990742
uaaccuaggucacacaggu

SEQ ID NO: 990744 - RNA, 19 nt, Artificial Sequence
  Description of Artificial Sequence: Synthetic oligonucleotide
  Sense strand starting at position 2826 of SEQ ID NO: 914264
cugugugaccuagguuagu

SEQ ID NO: 990745 - RNA, 19 nt, Artificial Sequence
  Description of Artificial Sequence: Synthetic oligonucleotide
  Antisense strand to SEQ ID NO: 990744
acuaaccuaggucacacag

SEQ ID NO: 990746 - RNA, 19 nt, Artificial Sequence
  Description of Artificial Sequence: Synthetic oligonucleotide
  Sense strand starting at position 2832 of SEQ ID NO: 914264
gaccuagguuagugucuua

SEQ ID NO: 990747 - RNA, 19 nt, Artificial Sequence
  Description of Artificial Sequence: Synthetic oligonucleotide
  Antisense strand to SEQ ID NO: 990746
uaagacacuaaccuagguc

SEQ ID NO: 990748 - RNA, 19 nt, Artificial Sequence
  Description of Artificial Sequence: Synthetic oligonucleotide
  Sense strand starting at position 2886 of SEQ ID NO: 914264
ggacauaagugauugugag

SEQ ID NO: 990749 - RNA, 19 nt, Artificial Sequence
  Description of Artificial Sequence: Synthetic oligonucleotide
  Antisense strand to SEQ ID NO: 990748
cucacaaucacuuaugucc

SEQ ID NO: 990750 - RNA, 19 nt, Artificial Sequence
  Description of Artificial Sequence: Synthetic oligonucleotide
  Sense strand starting at position 2892 of SEQ ID NO: 914264
aagugauugugaggcugaa

SEQ ID NO: 990751 - RNA, 19 nt, Artificial Sequence
  Description of Artificial Sequence: Synthetic oligonucleotide
  Antisense strand to SEQ ID NO: 990750
uucagccucacaaucacuu

SEQ ID NO: 990752 - RNA, 19 nt, Artificial Sequence
  Description of Artificial Sequence: Synthetic oligonucleotide
  Sense strand starting at position 2912 of SEQ ID NO: 914264
caaguuauuccaugcacgu

SEQ ID NO: 990753 - RNA, 19 nt, Artificial Sequence
  Description of Artificial Sequence: Synthetic oligonucleotide
  Antisense strand to SEQ ID NO: 990752
acgugcauggaauaacuug

SEQ ID NO: 990754 - RNA, 19 nt, Artificial Sequence
  Description of Artificial Sequence: Synthetic oligonucleotide
  Sense strand starting at position 3150 of SEQ ID NO: 914264
gccucaucugcccacgagu

SEQ ID NO: 990755 - RNA, 19 nt, Artificial Sequence
  Description of Artificial Sequence: Synthetic oligonucleotide
  Antisense strand to SEQ ID NO: 990754
acucgugggcagaugaggc

SEQ ID NO: 990756 - RNA, 19 nt, Artificial Sequence
  Description of Artificial Sequence: Synthetic oligonucleotide
  Sense strand starting at position 3314 of SEQ ID NO: 914264
gcgcucagagcaugugaau

SEQ ID NO: 990757 - RNA, 19 nt, Artificial Sequence
  Description of Artificial Sequence: Synthetic oligonucleotide
  Antisense strand to SEQ ID NO: 990756
auucacaugcucugagcgc

SEQ ID NO: 990758 - RNA, 19 nt, Artificial Sequence
  Description of Artificial Sequence: Synthetic oligonucleotide
  Sense strand starting at position 3463 of SEQ ID NO: 914264
ggcaaaguuagaggcugua

SEQ ID NO: 990759 - RNA, 19 nt, Artificial Sequence
  Description of Artificial Sequence: Synthetic oligonucleotide
  Antisense strand to SEQ ID NO: 990758
uacagccucuaacuuugcc

SEQ ID NO: 990760 - RNA, 19 nt, Artificial Sequence
  Description of Artificial Sequence: Synthetic oligonucleotide
  Sense strand starting at position 3530 of SEQ ID NO: 914264
gcgggucacuuguucauuu

SEQ ID NO: 990761 - RNA, 19 nt, Artificial Sequence
  Description of Artificial Sequence: Synthetic oligonucleotide
  Antisense strand to SEQ ID NO: 990760
aaaugaacaagugacccgc

SEQ ID NO: 990762 - RNA, 19 nt, Artificial Sequence
  Description of Artificial Sequence: Synthetic oligonucleotide
  Sense strand starting at position 3796 of SEQ ID NO: 914264
ccucaagucucaguggaaa

SEQ ID NO: 990763 - RNA, 19 nt, Artificial Sequence
  Description of Artificial Sequence: Synthetic oligonucleotide
  Antisense strand to SEQ ID NO: 990762
uuuccacugagacuugagg

SEQ ID NO: 990764 - RNA, 19 nt, Artificial Sequence
  Description of Artificial Sequence: Synthetic oligonucleotide
  Sense strand starting at position 3900 of SEQ ID NO: 914264
gagccagacucagugauca

SEQ ID NO: 990765 - RNA, 19 nt, Artificial Sequence
  Description of Artificial Sequence: Synthetic oligonucleotide
  Antisense strand to SEQ ID NO: 990764
ugaucacugagucuggcuc

SEQ ID NO: 990766 - RNA, 19 nt, Artificial Sequence
  Description of Artificial Sequence: Synthetic oligonucleotide
  Sense strand starting at position 750 of SEQ ID NO: 914265
cggaaacaauaucauuaca

SEQ ID NO: 990767 - RNA, 19 nt, Artificial Sequence
  Description of Artificial Sequence: Synthetic oligonucleotide
  Antisense strand to SEQ ID NO: 990766
uguaaugauauuguuuccg

SEQ ID NO: 990768 - RNA, 19 nt, Artificial Sequence
  Description of Artificial Sequence: Synthetic oligonucleotide
  Sense strand starting at position 915 of SEQ ID NO: 914265
ggcagaugcugagaaauaa

SEQ ID NO: 990769 - RNA, 19 nt, Artificial Sequence
  Description of Artificial Sequence: Synthetic oligonucleotide
  Antisense strand to SEQ ID NO: 990768
uuauuucucagcaucugcc

SEQ ID NO: 990770 - RNA, 19 nt, Artificial Sequence
  Description of Artificial Sequence: Synthetic oligonucleotide
  Sense strand starting at position 954 of SEQ ID NO: 914265
ccugaugggaccugucaua

SEQ ID NO: 990771 - RNA, 19 nt, Artificial Sequence
  Description of Artificial Sequence: Synthetic oligonucleotide
  Antisense strand to SEQ ID NO: 990770
uaugacaggucccaucagg

SEQ ID NO: 990772 - RNA, 19 nt, Artificial Sequence
  Description of Artificial Sequence: Synthetic oligonucleotide
  Sense strand starting at position 961 of SEQ ID NO: 914265
ggaccugucauauggagag

SEQ ID NO: 990773 - RNA, 19 nt, Artificial Sequence
  Description of Artificial Sequence: Synthetic oligonucleotide
  Antisense strand to SEQ ID NO: 990772
cucuccauaugacaggucc

SEQ ID NO: 990774 - RNA, 19 nt, Artificial Sequence
  Description of Artificial Sequence: Synthetic oligonucleotide
  Sense strand starting at position 980 of SEQ ID NO: 914265
gggacucauucccuuggca

SEQ ID NO: 990775 - RNA, 19 nt, Artificial Sequence
  Description of Artificial Sequence: Synthetic oligonucleotide
  Antisense strand to SEQ ID NO: 990774
ugccaagggaaugaguccc

SEQ ID NO: 990776 - RNA, 19 nt, Artificial Sequence
  Description of Artificial Sequence: Synthetic oligonucleotide
  Sense strand starting at position 982 of SEQ ID NO: 914265
gacucauucccuuggcagu

SEQ ID NO: 990777 - RNA, 19 nt, Artificial Sequence
  Description of Artificial Sequence: Synthetic oligonucleotide
  Antisense strand to SEQ ID NO: 990776
acugccaagggaaugaguc

SEQ ID NO: 990778 - RNA, 19 nt, Artificial Sequence
  Description of Artificial Sequence: Synthetic oligonucleotide
  Sense strand starting at position 1287 of SEQ ID NO: 914265
ucuaaaugcgaauguagua

SEQ ID NO: 990779 - RNA, 19 nt, Artificial Sequence
  Description of Artificial Sequence: Synthetic oligonucleotide
  Antisense strand to SEQ ID NO: 990778
uacuacauucgcauuuaga

SEQ ID NO: 990780 - RNA, 19 nt, Artificial Sequence
  Description of Artificial Sequence: Synthetic oligonucleotide
  Sense strand starting at position 1453 of SEQ ID NO: 914265
auccuugucuguccacaga

SEQ ID NO: 990781 - RNA, 19 nt, Artificial Sequence
  Description of Artificial Sequence: Synthetic oligonucleotide
  Antisense strand to SEQ ID NO: 990780
ucuguggacagacaaggau

SEQ ID NO: 990782 - RNA, 19 nt, Artificial Sequence
  Description of Artificial Sequence: Synthetic oligonucleotide
  Sense strand starting at position 1594 of SEQ ID NO: 914265
aagugaggcucagaagaca

SEQ ID NO: 990783 - RNA, 19 nt, Artificial Sequence
  Description of Artificial Sequence: Synthetic oligonucleotide
  Antisense strand to SEQ ID NO: 990782
ugucuucugagccucacuu

SEQ ID NO: 990784 - RNA, 19 nt, Artificial Sequence
  Description of Artificial Sequence: Synthetic oligonucleotide
  Sense strand starting at position 1997 of SEQ ID NO: 914265
gggugaugcucaguguuac

SEQ ID NO: 990785 - RNA, 19 nt, Artificial Sequence
  Description of Artificial Sequence: Synthetic oligonucleotide
  Antisense strand to SEQ ID NO: 990784
guaacacugagcaucaccc

SEQ ID NO: 990786 - RNA, 19 nt, Artificial Sequence
  Description of Artificial Sequence: Synthetic oligonucleotide
  Sense strand starting at position 2182 of SEQ ID NO: 914265
ugaggcuuugcucuguguu

SEQ ID NO: 990787 - RNA, 19 nt, Artificial Sequence
  Description of Artificial Sequence: Synthetic oligonucleotide
  Antisense strand to SEQ ID NO: 990786
aacacagagcaaagccuca

SEQ ID NO: 990788 - RNA, 19 nt, Artificial Sequence
  Description of Artificial Sequence: Synthetic oligonucleotide
  Sense strand starting at position 2190 of SEQ ID NO: 914265
ugcucuguguuuccuggaa

SEQ ID NO: 990789 - RNA, 19 nt, Artificial Sequence
  Description of Artificial Sequence: Synthetic oligonucleotide
  Antisense strand to SEQ ID NO: 990788
uuccaggaaacacagagca

SEQ ID NO: 990790 - RNA, 19 nt, Artificial Sequence
  Description of Artificial Sequence: Synthetic oligonucleotide
  Sense strand starting at position 2365 of SEQ ID NO: 914265
uagggucucuaugcuaaau

SEQ ID NO: 990791 - RNA, 19 nt, Artificial Sequence
  Description of Artificial Sequence: Synthetic oligonucleotide
  Antisense strand to SEQ ID NO: 990790
auuuagcauagagacccua

SEQ ID NO: 990792 - RNA, 19 nt, Artificial Sequence
  Description of Artificial Sequence: Synthetic oligonucleotide
  Sense strand starting at position 2500 of SEQ ID NO: 914265
ggcucagaucuuugcagag

SEQ ID NO: 990793 - RNA, 19 nt, Artificial Sequence
  Description of Artificial Sequence: Synthetic oligonucleotide
  Antisense strand to SEQ ID NO: 990792
cucugcaaagaucugagcc

SEQ ID NO: 990794 - RNA, 19 nt, Artificial Sequence
  Description of Artificial Sequence: Synthetic oligonucleotide
  Sense strand starting at position 2622 of SEQ ID NO: 914265
gccuuucggaaguaacaau

SEQ ID NO: 990795 - RNA, 19 nt, Artificial Sequence
  Description of Artificial Sequence: Synthetic oligonucleotide
  Antisense strand to SEQ ID NO: 990794
auuguuacuuccgaaaggc

SEQ ID NO: 990796 - RNA, 19 nt, Artificial Sequence
  Description of Artificial Sequence: Synthetic oligonucleotide
  Sense strand starting at position 2657 of SEQ ID NO: 914265
gguucuugagagggucaca

SEQ ID NO: 990797 - RNA, 19 nt, Artificial Sequence
  Description of Artificial Sequence: Synthetic oligonucleotide
  Antisense strand to SEQ ID NO: 990796
ugugacccucucaagaacc

SEQ ID NO: 990798 - RNA, 19 nt, Artificial Sequence
  Description of Artificial Sequence: Synthetic oligonucleotide
  Sense strand starting at position 2736 of SEQ ID NO: 914265
caauguugcccgcuaaugu

SEQ ID NO: 990799 - RNA, 19 nt, Artificial Sequence
  Description of Artificial Sequence: Synthetic oligonucleotide
  Antisense strand to SEQ ID NO: 990798
acauuagcgggcaacauug

SEQ ID NO: 990800 - RNA, 19 nt, Artificial Sequence
  Description of Artificial Sequence: Synthetic oligonucleotide
  Sense strand starting at position 2737 of SEQ ID NO: 914265
aauguugcccgcuaauguu

SEQ ID NO: 990801 - RNA, 19 nt, Artificial Sequence
  Description of Artificial Sequence: Synthetic oligonucleotide
  Antisense strand to SEQ ID NO: 990800
aacauuagcgggcaacauu

SEQ ID NO: 990802 - RNA, 19 nt, Artificial Sequence
  Description of Artificial Sequence: Synthetic oligonucleotide
  Sense strand starting at position 2745 of SEQ ID NO: 914265
ccgcuaauguuuccacaag

SEQ ID NO: 990803 - RNA, 19 nt, Artificial Sequence
  Description of Artificial Sequence: Synthetic oligonucleotide
  Antisense strand to SEQ ID NO: 990802
cuuguggaaacauuagcgg

SEQ ID NO: 990804 - RNA, 19 nt, Artificial Sequence
  Description of Artificial Sequence: Synthetic oligonucleotide
  Sense strand starting at position 2904 of SEQ ID NO: 914265
gagagucucuuggcagagu

SEQ ID NO: 990805 - RNA, 19 nt, Artificial Sequence
  Description of Artificial Sequence: Synthetic oligonucleotide
  Antisense strand to SEQ ID NO: 990804
acucugccaagagacucuc

SEQ ID NO: 990806 - RNA, 19 nt, Artificial Sequence
  Description of Artificial Sequence: Synthetic oligonucleotide
  Sense strand starting at position 2951 of SEQ ID NO: 914265
ugagauaacccuugguugu

SEQ ID NO: 990807 - RNA, 19 nt, Artificial Sequence
  Description of Artificial Sequence: Synthetic oligonucleotide
  Antisense strand to SEQ ID NO: 990806
acaaccaaggguuaucuca

SEQ ID NO: 990808 - RNA, 19 nt, Artificial Sequence
  Description of Artificial Sequence: Synthetic oligonucleotide
  Sense strand starting at position 2952 of SEQ ID NO: 914265
gagauaacccuugguugug

SEQ ID NO: 990809 - RNA, 19 nt, Artificial Sequence
  Description of Artificial Sequence: Synthetic oligonucleotide
  Antisense strand to SEQ ID NO: 990808
cacaaccaaggguuaucuc

SEQ ID NO: 990810 - RNA, 19 nt, Artificial Sequence
  Description of Artificial Sequence: Synthetic oligonucleotide
  Sense strand starting at position 2953 of SEQ ID NO: 914265
agauaacccuugguuguga

SEQ ID NO: 990811 - RNA, 19 nt, Artificial Sequence
  Description of Artificial Sequence: Synthetic oligonucleotide
  Antisense strand to SEQ ID NO: 990810
ucacaaccaaggguuaucu

SEQ ID NO: 990812 - RNA, 19 nt, Artificial Sequence
  Description of Artificial Sequence: Synthetic oligonucleotide
  Sense strand starting at position 2962 of SEQ ID NO: 914265
uugguugugacuggagaca

SEQ ID NO: 990813 - RNA, 19 nt, Artificial Sequence
  Description of Artificial Sequence: Synthetic oligonucleotide
  Antisense strand to SEQ ID NO: 990812
ugucuccagucacaaccaa

SEQ ID NO: 990814 - RNA, 19 nt, Artificial Sequence
  Description of Artificial Sequence: Synthetic oligonucleotide
  Sense strand starting at position 3019 of SEQ ID NO: 914265
cuggaaucuucgguagcua

SEQ ID NO: 990815 - RNA, 19 nt, Artificial Sequence
  Description of Artificial Sequence: Synthetic oligonucleotide
  Antisense strand to SEQ ID NO: 990814
uagcuaccgaagauuccag

SEQ ID NO: 990816 - RNA, 19 nt, Artificial Sequence
  Description of Artificial Sequence: Synthetic oligonucleotide
  Sense strand starting at position 3020 of SEQ ID NO: 914265
uggaaucuucgguagcuaa

SEQ ID NO: 990817 - RNA, 19 nt, Artificial Sequence
  Description of Artificial Sequence: Synthetic oligonucleotide
  Antisense strand to SEQ ID NO: 990816
uuagcuaccgaagauucca

SEQ ID NO: 990818 - RNA, 19 nt, Artificial Sequence
  Description of Artificial Sequence: Synthetic oligonucleotide
  Sense strand starting at position 3023 of SEQ ID NO: 914265
aaucuucgguagcuaaaga

SEQ ID NO: 990819 - RNA, 19 nt, Artificial Sequence
  Description of Artificial Sequence: Synthetic oligonucleotide
  Antisense strand to SEQ ID NO: 990818
ucuuuagcuaccgaagauu

SEQ ID NO: 990820 - RNA, 19 nt, Artificial Sequence
  Description of Artificial Sequence: Synthetic oligonucleotide
  Sense strand starting at position 3024 of SEQ ID NO: 914265
aucuucgguagcuaaagau

SEQ ID NO: 990821 - RNA, 19 nt, Artificial Sequence
  Description of Artificial Sequence: Synthetic oligonucleotide
  Antisense strand to SEQ ID NO: 990820
aucuuuagcuaccgaagau

SEQ ID NO: 990822 - RNA, 19 nt, Artificial Sequence
  Description of Artificial Sequence: Synthetic oligonucleotide
  Sense strand starting at position 3028 of SEQ ID NO: 914265
ucgguagcuaaagauguaa

SEQ ID NO: 990823 - RNA, 19 nt, Artificial Sequence
  Description of Artificial Sequence: Synthetic oligonucleotide
  Antisense strand to SEQ ID NO: 990822
uuacaucuuuagcuaccga

SEQ ID NO: 990824 - RNA, 19 nt, Artificial Sequence
  Description of Artificial Sequence: Synthetic oligonucleotide
  Sense strand starting at position 3030 of SEQ ID NO: 914265
gguagcuaaagauguaaau

SEQ ID NO: 990825 - RNA, 19 nt, Artificial Sequence
  Description of Artificial Sequence: Synthetic oligonucleotide
  Antisense strand to SEQ ID NO: 990824
auuuacaucuuuagcuacc

SEQ ID NO: 990826 - RNA, 19 nt, Artificial Sequence
  Description of Artificial Sequence: Synthetic oligonucleotide
  Sense strand starting at position 3042 of SEQ ID NO: 914265
uguaaaugccaaugugaca

SEQ ID NO: 990827 - RNA, 19 nt, Artificial Sequence
  Description of Artificial Sequence: Synthetic oligonucleotide
  Antisense strand to SEQ ID NO: 990826
ugucacauuggcauuuaca

SEQ ID NO: 990828 - RNA, 19 nt, Artificial Sequence
  Description of Artificial Sequence: Synthetic oligonucleotide
  Sense strand starting at position 3191 of SEQ ID NO: 914265
gggugaguuguaugggaug

SEQ ID NO: 990829 - RNA, 19 nt, Artificial Sequence
  Description of Artificial Sequence: Synthetic oligonucleotide
  Antisense strand to SEQ ID NO: 990828
caucccauacaacucaccc

SEQ ID NO: 990830 - RNA, 19 nt, Artificial Sequence
  Description of Artificial Sequence: Synthetic oligonucleotide
  Sense strand starting at position 3196 of SEQ ID NO: 914265
aguuguaugggaugugaau

SEQ ID NO: 990831 - RNA, 19 nt, Artificial Sequence
  Description of Artificial Sequence: Synthetic oligonucleotide
  Antisense strand to SEQ ID NO: 990830
auucacaucccauacaacu

SEQ ID NO: 990832 - RNA, 19 nt, Artificial Sequence
  Description of Artificial Sequence: Synthetic oligonucleotide
  Sense strand starting at position 3202 of SEQ ID NO: 914265
augggaugugaaugcuauc

SEQ ID NO: 990833 - RNA, 19 nt, Artificial Sequence
  Description of Artificial Sequence: Synthetic oligonucleotide
  Antisense strand to SEQ ID NO: 990832
gauagcauucacaucccau

SEQ ID NO: 990834 - RNA, 19 nt, Artificial Sequence
  Description of Artificial Sequence: Synthetic oligonucleotide
  Sense strand starting at position 3208 of SEQ ID NO: 914265
ugugaaugcuaucucaaua

SEQ ID NO: 990835 - RNA, 19 nt, Artificial Sequence
  Description of Artificial Sequence: Synthetic oligonucleotide
  Antisense strand to SEQ ID NO: 990834
uauugagauagcauucaca

SEQ ID NO: 990836 - RNA, 19 nt, Artificial Sequence
  Description of Artificial Sequence: Synthetic oligonucleotide
  Sense strand starting at position 3213 of SEQ ID NO: 914265
augcuaucucaauaagcug

SEQ ID NO: 990837 - RNA, 19 nt, Artificial Sequence
  Description of Artificial Sequence: Synthetic oligonucleotide
  Antisense strand to SEQ ID NO: 990836
cagcuuauugagauagcau

SEQ ID NO: 990838 - RNA, 19 nt, Artificial Sequence
  Description of Artificial Sequence: Synthetic oligonucleotide
  Sense strand starting at position 3297 of SEQ ID NO: 914265
gcucaaccucaguagcaau

SEQ ID NO: 990839 - RNA, 19 nt, Artificial Sequence
  Description of Artificial Sequence: Synthetic oligonucleotide
  Antisense strand to SEQ ID NO: 990838
auugcuacugagguugagc

SEQ ID NO: 990840 - RNA, 19 nt, Artificial Sequence
  Description of Artificial Sequence: Synthetic oligonucleotide
  Sense strand starting at position 3607 of SEQ ID NO: 914265
augaaauuauaucaggcau

SEQ ID NO: 990841 - RNA, 19 nt, Artificial Sequence
  Description of Artificial Sequence: Synthetic oligonucleotide
  Antisense strand to SEQ ID NO: 990840
augccugauauaauuucau

SEQ ID NO: 990842 - RNA, 19 nt, Artificial Sequence
  Description of Artificial Sequence: Synthetic oligonucleotide
  Sense strand starting at position 3613 of SEQ ID NO: 914265
uuauaucaggcauguucuu

SEQ ID NO: 990843 - RNA, 19 nt, Artificial Sequence
  Description of Artificial Sequence: Synthetic oligonucleotide
  Antisense strand to SEQ ID NO: 990842
aagaacaugccugauauaa

SEQ ID NO: 990844 - RNA, 19 nt, Artificial Sequence
  Description of Artificial Sequence: Synthetic oligonucleotide
  Sense strand starting at position 3629 of SEQ ID NO: 914265
cuuagaccacgguggaaua

SEQ ID NO: 990845 - RNA, 19 nt, Artificial Sequence
  Description of Artificial Sequence: Synthetic oligonucleotide
  Antisense strand to SEQ ID NO: 990844
uauuccaccguggucuaag

SEQ ID NO: 990846 - RNA, 19 nt, Artificial Sequence
  Description of Artificial Sequence: Synthetic oligonucleotide
  Sense strand starting at position 204 of SEQ ID NO: 914266
cugagaucucaccguagca

SEQ ID NO: 990847 - RNA, 19 nt, Artificial Sequence
  Description of Artificial Sequence: Synthetic oligonucleotide
  Antisense strand to SEQ ID NO: 990846
ugcuacggugagaucucag

SEQ ID NO: 990848 - RNA, 19 nt, Artificial Sequence
  Description of Artificial Sequence: Synthetic oligonucleotide
  Sense strand starting at position 206 of SEQ ID NO: 914266
gagaucucaccguagcacu

SEQ ID NO: 990849 - RNA, 19 nt, Artificial Sequence
  Description of Artificial Sequence: Synthetic oligonucleotide
  Antisense strand to SEQ ID NO: 990848
agugcuacggugagaucuc

SEQ ID NO: 990850 - RNA, 19 nt, Artificial Sequence
  Description of Artificial Sequence: Synthetic oligonucleotide
  Sense strand starting at position 1157 of SEQ ID NO: 914266
ggaauagauuccuuugucu

SEQ ID NO: 990851 - RNA, 19 nt, Artificial Sequence
  Description of Artificial Sequence: Synthetic oligonucleotide
  Antisense strand to SEQ ID NO: 990850
agacaaaggaaucuauucc

SEQ ID NO: 990852 - RNA, 19 nt, Artificial Sequence
  Description of Artificial Sequence: Synthetic oligonucleotide
  Sense strand starting at position 1160 of SEQ ID NO: 914266
auagauuccuuugucuguu

SEQ ID NO: 990853 - RNA, 19 nt, Artificial Sequence
  Description of Artificial Sequence: Synthetic oligonucleotide
  Antisense strand to SEQ ID NO: 990852
aacagacaaaggaaucuau

SEQ ID NO: 990854 - RNA, 19 nt, Artificial Sequence
  Description of Artificial Sequence: Synthetic oligonucleotide
  Sense strand starting at position 1164 of SEQ ID NO: 914266
auuccuuugucuguucuga

SEQ ID NO: 990855 - RNA, 19 nt, Artificial Sequence
  Description of Artificial Sequence: Synthetic oligonucleotide
  Antisense strand to SEQ ID NO: 990854
ucagaacagacaaaggaau

SEQ ID NO: 990856 - RNA, 19 nt, Artificial Sequence
  Description of Artificial Sequence: Synthetic oligonucleotide
  Sense strand starting at position 1166 of SEQ ID NO: 914266
uccuuugucuguucugaca

SEQ ID NO: 990857 - RNA, 19 nt, Artificial Sequence
  Description of Artificial Sequence: Synthetic oligonucleotide
  Antisense strand to SEQ ID NO: 990856
ugucagaacagacaaagga

SEQ ID NO: 990858 - RNA, 19 nt, Artificial Sequence
  Description of Artificial Sequence: Synthetic oligonucleotide
  Sense strand starting at position 1496 of SEQ ID NO: 914266
ccuggccaauugucaaauu

SEQ ID NO: 990859 - RNA, 19 nt, Artificial Sequence
  Description of Artificial Sequence: Synthetic oligonucleotide
  Antisense strand to SEQ ID NO: 990858
aauuugacaauuggccagg

SEQ ID NO: 990860 - RNA, 19 nt, Artificial Sequence
  Description of Artificial Sequence: Synthetic oligonucleotide
  Sense strand starting at position 1683 of SEQ ID NO: 914266
cagggacuguuguggaaga

SEQ ID NO: 990861 - RNA, 19 nt, Artificial Sequence
  Description of Artificial Sequence: Synthetic oligonucleotide
  Antisense strand to SEQ ID NO: 990860
ucuuccacaacagucccug

SEQ ID NO: 990862 - RNA, 19 nt, Artificial Sequence
  Description of Artificial Sequence: Synthetic oligonucleotide
  Sense strand starting at position 1728 of SEQ ID NO: 914266
ggguuugagggauauuguu

SEQ ID NO: 990863 - RNA, 19 nt, Artificial Sequence
  Description of Artificial Sequence: Synthetic oligonucleotide
  Antisense strand to SEQ ID NO: 990862
aacaauaucccucaaaccc

SEQ ID NO: 990864 - RNA, 19 nt, Artificial Sequence
  Description of Artificial Sequence: Synthetic oligonucleotide
  Sense strand starting at position 1734 of SEQ ID NO: 914266
gagggauauuguuagcuca

SEQ ID NO: 990865 - RNA, 19 nt, Artificial Sequence
  Description of Artificial Sequence: Synthetic oligonucleotide
  Antisense strand to SEQ ID NO: 990864
ugagcuaacaauaucccuc

SEQ ID NO: 990866 - RNA, 19 nt, Artificial Sequence
  Description of Artificial Sequence: Synthetic oligonucleotide
  Sense strand starting at position 1736 of SEQ ID NO: 914266
gggauauuguuagcucaga

SEQ ID NO: 990867 - RNA, 19 nt, Artificial Sequence
  Description of Artificial Sequence: Synthetic oligonucleotide
  Antisense strand to SEQ ID NO: 990866
ucugagcuaacaauauccc

SEQ ID NO: 990868 - RNA, 19 nt, Artificial Sequence
  Description of Artificial Sequence: Synthetic oligonucleotide
  Sense strand starting at position 1737 of SEQ ID NO: 914266
ggauauuguuagcucagau

SEQ ID NO: 990869 - RNA, 19 nt, Artificial Sequence
  Description of Artificial Sequence: Synthetic oligonucleotide
  Antisense strand to SEQ ID NO: 990868
aucugagcuaacaauaucc

SEQ ID NO: 990870 - RNA, 19 nt, Artificial Sequence
  Description of Artificial Sequence: Synthetic oligonucleotide
  Sense strand starting at position 1816 of SEQ ID NO: 914266
uuugacuucugagccaaug

SEQ ID NO: 990871 - RNA, 19 nt, Artificial Sequence
  Description of Artificial Sequence: Synthetic oligonucleotide
  Antisense strand to SEQ ID NO: 990870
cauuggcucagaagucaaa

SEQ ID NO: 990872 - RNA, 19 nt, Artificial Sequence
  Description of Artificial Sequence: Synthetic oligonucleotide
  Sense strand starting at position 2254 of SEQ ID NO: 914266
uucugcuuccuguagaauu

SEQ ID NO: 990873 - RNA, 19 nt, Artificial Sequence
  Description of Artificial Sequence: Synthetic oligonucleotide
  Antisense strand to SEQ ID NO: 990872
aauucuacaggaagcagaa

SEQ ID NO: 990874 - RNA, 19 nt, Artificial Sequence
  Description of Artificial Sequence: Synthetic oligonucleotide
  Sense strand starting at position 2328 of SEQ ID NO: 914266
gcauaauacuccuaguuag

SEQ ID NO: 990875 - RNA, 19 nt, Artificial Sequence
  Description of Artificial Sequence: Synthetic oligonucleotide
  Antisense strand to SEQ ID NO: 990874
cuaacuaggaguauuaugc

SEQ ID NO: 990876 - RNA, 19 nt, Artificial Sequence
  Description of Artificial Sequence: Synthetic oligonucleotide
  Sense strand starting at position 2335 of SEQ ID NO: 914266
acuccuaguuaggagauuu

SEQ ID NO: 990877 - RNA, 19 nt, Artificial Sequence
  Description of Artificial Sequence: Synthetic oligonucleotide
  Antisense strand to SEQ ID NO: 990876
aaaucuccuaacuaggagu

SEQ ID NO: 990878 - RNA, 19 nt, Artificial Sequence
  Description of Artificial Sequence: Synthetic oligonucleotide
  Sense strand starting at position 2343 of SEQ ID NO: 914266
uuaggagauuuaugcagau

SEQ ID NO: 990879 - RNA, 19 nt, Artificial Sequence
  Description of Artificial Sequence: Synthetic oligonucleotide
  Antisense strand to SEQ ID NO: 990878
aucugcauaaaucuccuaa

SEQ ID NO: 990880 - RNA, 19 nt, Artificial Sequence
  Description of Artificial Sequence: Synthetic oligonucleotide
  Sense strand starting at position 2491 of SEQ ID NO: 914266
gcuauaaguuaauugcuau

SEQ ID NO: 990881 - RNA, 19 nt, Artificial Sequence
  Description of Artificial Sequence: Synthetic oligonucleotide
  Antisense strand to SEQ ID NO: 990880
auagcaauuaacuuauagc

SEQ ID NO: 990882 - RNA, 19 nt, Artificial Sequence
  Description of Artificial Sequence: Synthetic oligonucleotide
  Sense strand starting at position 2568 of SEQ ID NO: 914266
aaaguuauugcgggaucug

SEQ ID NO: 990883 - RNA, 19 nt, Artificial Sequence
  Description of Artificial Sequence: Synthetic oligonucleotide
  Antisense strand to SEQ ID NO: 990882
cagaucccgcaauaacuuu

SEQ ID NO: 990884 - RNA, 19 nt, Artificial Sequence
  Description of Artificial Sequence: Synthetic oligonucleotide
  Sense strand starting at position 2629 of SEQ ID NO: 914266
ggcagauuggcaggucgaa

SEQ ID NO: 990885 - RNA, 19 nt, Artificial Sequence
  Description of Artificial Sequence: Synthetic oligonucleotide
  Antisense strand to SEQ ID NO: 990884
uucgaccugccaaucugcc

SEQ ID NO: 990886 - RNA, 19 nt, Artificial Sequence
  Description of Artificial Sequence: Synthetic oligonucleotide
  Sense strand starting at position 2770 of SEQ ID NO: 914266
gguagguuagugcgggauu

SEQ ID NO: 990887 - RNA, 19 nt, Artificial Sequence
  Description of Artificial Sequence: Synthetic oligonucleotide
  Antisense strand to SEQ ID NO: 990886
aaucccgcacuaaccuacc

SEQ ID NO: 990888 - RNA, 19 nt, Artificial Sequence
  Description of Artificial Sequence: Synthetic oligonucleotide
  Sense strand starting at position 2772 of SEQ ID NO: 914266
uagguuagugcgggauuua

SEQ ID NO: 990889 - RNA, 19 nt, Artificial Sequence
  Description of Artificial Sequence: Synthetic oligonucleotide
  Antisense strand to SEQ ID NO: 990888
uaaaucccgcacuaaccua

SEQ ID NO: 990890 - RNA, 19 nt, Artificial Sequence
  Description of Artificial Sequence: Synthetic oligonucleotide
  Sense strand starting at position 2889 of SEQ ID NO: 914266
uauaauauagcgugugcau

SEQ ID NO: 990891 - RNA, 19 nt, Artificial Sequence
  Description of Artificial Sequence: Synthetic oligonucleotide
  Antisense strand to SEQ ID NO: 990890
augcacacgcuauauuaua

SEQ ID NO: 990892 - RNA, 19 nt, Artificial Sequence
  Description of Artificial Sequence: Synthetic oligonucleotide
  Sense strand starting at position 2891 of SEQ ID NO: 914266
uaauauagcgugugcauca

SEQ ID NO: 990893 - RNA, 19 nt, Artificial Sequence
  Description of Artificial Sequence: Synthetic oligonucleotide
  Antisense strand to SEQ ID NO: 990892
ugaugcacacgcuauauua

SEQ ID NO: 990894 - RNA, 19 nt, Artificial Sequence
  Description of Artificial Sequence: Synthetic oligonucleotide
  Sense strand starting at position 2969 of SEQ ID NO: 914266
agauauuaaucagcgguaa

SEQ ID NO: 990895 - RNA, 19 nt, Artificial Sequence
  Description of Artificial Sequence: Synthetic oligonucleotide
  Antisense strand to SEQ ID NO: 990894
uuaccgcugauuaauaucu

SEQ ID NO: 990896 - RNA, 19 nt, Artificial Sequence
  Description of Artificial Sequence: Synthetic oligonucleotide
  Sense strand starting at position 2970 of SEQ ID NO: 914266
gauauuaaucagcgguaac

SEQ ID NO: 990897 - RNA, 19 nt, Artificial Sequence
  Description of Artificial Sequence: Synthetic oligonucleotide
  Antisense strand to SEQ ID NO: 990896
guuaccgcugauuaauauc

SEQ ID NO: 990898 - RNA, 19 nt, Artificial Sequence
  Description of Artificial Sequence: Synthetic oligonucleotide
  Sense strand starting at position 2973 of SEQ ID NO: 914266
auuaaucagcgguaacagu

SEQ ID NO: 990899 - RNA, 19 nt, Artificial Sequence
  Description of Artificial Sequence: Synthetic oligonucleotide
  Antisense strand to SEQ ID NO: 990898
acuguuaccgcugauuaau

SEQ ID NO: 990900 - RNA, 19 nt, Artificial Sequence
  Description of Artificial Sequence: Synthetic oligonucleotide
  Sense strand starting at position 3367 of SEQ ID NO: 914266
gcaugcaacuuuguguuua

SEQ ID NO: 990901 - RNA, 19 nt, Artificial Sequence
  Description of Artificial Sequence: Synthetic oligonucleotide
  Antisense strand to SEQ ID NO: 990900
uaaacacaaaguugcaugc

SEQ ID NO: 990902 - RNA, 19 nt, Artificial Sequence
  Description of Artificial Sequence: Synthetic oligonucleotide
  Sense strand starting at position 3369 of SEQ ID NO: 914266
augcaacuuuguguuuaca

SEQ ID NO: 990903 - RNA, 19 nt, Artificial Sequence
  Description of Artificial Sequence: Synthetic oligonucleotide
  Antisense strand to SEQ ID NO: 990902
uguaaacacaaaguugcau

SEQ ID NO: 990904 - RNA, 19 nt, Artificial Sequence
  Description of Artificial Sequence: Synthetic oligonucleotide
  Sense strand starting at position 3527 of SEQ ID NO: 914266
uugcaugacuaauuguuga

SEQ ID NO: 990905 - RNA, 19 nt, Artificial Sequence
  Description of Artificial Sequence: Synthetic oligonucleotide
  Antisense strand to SEQ ID NO: 990904
ucaacaauuagucaugcaa

SEQ ID NO: 990906 - RNA, 19 nt, Artificial Sequence
  Description of Artificial Sequence: Synthetic oligonucleotide
  Sense strand starting at position 3531 of SEQ ID NO: 914266
augacuaauuguugacauu

SEQ ID NO: 990907 - RNA, 19 nt, Artificial Sequence
  Description of Artificial Sequence: Synthetic oligonucleotide
  Antisense strand to SEQ ID NO: 990906
aaugucaacaauuagucau

SEQ ID NO: 990908 - RNA, 19 nt, Artificial Sequence
  Description of Artificial Sequence: Synthetic oligonucleotide
  Sense strand starting at position 3532 of SEQ ID NO: 914266
ugacuaauuguugacauuc

SEQ ID NO: 990909 - RNA, 19 nt, Artificial Sequence
  Description of Artificial Sequence: Synthetic oligonucleotide
  Antisense strand to SEQ ID NO: 990908
gaaugucaacaauuaguca

SEQ ID NO: 990910 - RNA, 19 nt, Artificial Sequence
  Description of Artificial Sequence: Synthetic oligonucleotide
  Sense strand starting at position 3540 of SEQ ID NO: 914266
uguugacauucuuaagaug

SEQ ID NO: 990911 - RNA, 19 nt, Artificial Sequence
  Description of Artificial Sequence: Synthetic oligonucleotide
  Antisense strand to SEQ ID NO: 990910
caucuuaagaaugucaaca

SEQ ID NO: 990912 - RNA, 19 nt, Artificial Sequence
  Description of Artificial Sequence: Synthetic oligonucleotide
  Sense strand starting at position 3610 of SEQ ID NO: 914266
ggaauccaugccugaaucu

SEQ ID NO: 990913 - RNA, 19 nt, Artificial Sequence
  Description of Artificial Sequence: Synthetic oligonucleotide
  Antisense strand to SEQ ID NO: 990912
agauucaggcauggauucc

SEQ ID NO: 990914 - RNA, 19 nt, Artificial Sequence
  Description of Artificial Sequence: Synthetic oligonucleotide
  Sense strand starting at position 3617 of SEQ ID NO: 914266
augccugaaucuguguuau

SEQ ID NO: 990915 - RNA, 19 nt, Artificial Sequence
  Description of Artificial Sequence: Synthetic oligonucleotide
  Antisense strand to SEQ ID NO: 990914
auaacacagauucaggcau

SEQ ID NO: 990916 - RNA, 19 nt, Artificial Sequence
  Description of Artificial Sequence: Synthetic oligonucleotide
  Sense strand starting at position 3619 of SEQ ID NO: 914266
gccugaaucuguguuauac

SEQ ID NO: 990917 - RNA, 19 nt, Artificial Sequence
  Description of Artificial Sequence: Synthetic oligonucleotide
  Antisense strand to SEQ ID NO: 990916
guauaacacagauucaggc

SEQ ID NO: 990918 - RNA, 19 nt, Artificial Sequence
  Description of Artificial Sequence: Synthetic oligonucleotide
  Sense strand starting at position 3621 of SEQ ID NO: 914266
cugaaucuguguuauacaa

SEQ ID NO: 990919 - RNA, 19 nt, Artificial Sequence
  Description of Artificial Sequence: Synthetic oligonucleotide
  Antisense strand to SEQ ID NO: 990918
uuguauaacacagauucag

SEQ ID NO: 990920 - RNA, 19 nt, Artificial Sequence
  Description of Artificial Sequence: Synthetic oligonucleotide
  Sense strand starting at position 3649 of SEQ ID NO: 914266
gccucauucgaccaguucu

SEQ ID NO: 990921 - RNA, 19 nt, Artificial Sequence
  Description of Artificial Sequence: Synthetic oligonucleotide
  Antisense strand to SEQ ID NO: 990920
agaacuggucgaaugaggc

SEQ ID NO: 990922 - RNA, 19 nt, Artificial Sequence
  Description of Artificial Sequence: Synthetic oligonucleotide
  Sense strand starting at position 3709 of SEQ ID NO: 914266
uucucuugcgcuuggcaga

SEQ ID NO: 990923 - RNA, 19 nt, Artificial Sequence
  Description of Artificial Sequence: Synthetic oligonucleotide
  Antisense strand to SEQ ID NO: 990922
ucugccaagcgcaagagaa

SEQ ID NO: 990924 - RNA, 19 nt, Artificial Sequence
  Description of Artificial Sequence: Synthetic oligonucleotide
  Sense strand starting at position 3801 of SEQ ID NO: 914266
gucuuauugcgaugcuuuc

SEQ ID NO: 990925 - RNA, 19 nt, Artificial Sequence
  Description of Artificial Sequence: Synthetic oligonucleotide
  Antisense strand to SEQ ID NO: 990924
gaaagcaucgcaauaagac

SEQ ID NO: 990926 - RNA, 19 nt, Artificial Sequence
  Description of Artificial Sequence: Synthetic oligonucleotide
  Sense strand starting at position 16 of SEQ ID NO: 914267
ggaacagcugguugauaga

SEQ ID NO: 990927 - RNA, 19 nt, Artificial Sequence
  Description of Artificial Sequence: Synthetic oligonucleotide
  Antisense strand to SEQ ID NO: 990926
ucuaucaaccagcuguucc

SEQ ID NO: 990928 - RNA, 19 nt, Artificial Sequence
  Description of Artificial Sequence: Synthetic oligonucleotide
  Sense strand starting at position 225 of SEQ ID NO: 914267
uugauagaguugcucaaug

SEQ ID NO: 990929 - RNA, 19 nt, Artificial Sequence
  Description of Artificial Sequence: Synthetic oligonucleotide
  Antisense strand to SEQ ID NO: 990928
cauugagcaacucuaucaa

SEQ ID NO: 990930 - RNA, 19 nt, Artificial Sequence
  Description of Artificial Sequence: Synthetic oligonucleotide
  Sense strand starting at position 230 of SEQ ID NO: 914267
agaguugcucaauggagag

SEQ ID NO: 990931 - RNA, 19 nt, Artificial Sequence
  Description of Artificial Sequence: Synthetic oligonucleotide
  Antisense strand to SEQ ID NO: 990930
cucuccauugagcaacucu

SEQ ID NO: 990932 - RNA, 19 nt, Artificial Sequence
  Description of Artificial Sequence: Synthetic oligonucleotide
  Sense strand starting at position 325 of SEQ ID NO: 914267
gagguauuccuguacaugu

SEQ ID NO: 990933 - RNA, 19 nt, Artificial Sequence
  Description of Artificial Sequence: Synthetic oligonucleotide
  Antisense strand to SEQ ID NO: 990932
acauguacaggaauaccuc

SEQ ID NO: 990934 - RNA, 19 nt, Artificial Sequence
  Description of Artificial Sequence: Synthetic oligonucleotide
  Sense strand starting at position 349 of SEQ ID NO: 914267
caaagugagcgcuauauac

SEQ ID NO: 990935 - RNA, 19 nt, Artificial Sequence
  Description of Artificial Sequence: Synthetic oligonucleotide
  Antisense strand to SEQ ID NO: 990934
guauauagcgcucacuuug

SEQ ID NO: 990936 - RNA, 19 nt, Artificial Sequence
  Description of Artificial Sequence: Synthetic oligonucleotide
  Sense strand starting at position 351 of SEQ ID NO: 914267
aagugagcgcuauauacau

SEQ ID NO: 990937 - RNA, 19 nt, Artificial Sequence
  Description of Artificial Sequence: Synthetic oligonucleotide
  Antisense strand to SEQ ID NO: 990936
auguauauagcgcucacuu

SEQ ID NO: 990938 - RNA, 19 nt, Artificial Sequence
  Description of Artificial Sequence: Synthetic oligonucleotide
  Sense strand starting at position 502 of SEQ ID NO: 914267
cuccgccaucauggugaaa

SEQ ID NO: 990939 - RNA, 19 nt, Artificial Sequence
  Description of Artificial Sequence: Synthetic oligonucleotide
  Antisense strand to SEQ ID NO: 990938
uuucaccaugauggcggag

SEQ ID NO: 990940 - RNA, 19 nt, Artificial Sequence
  Description of Artificial Sequence: Synthetic oligonucleotide
  Sense strand starting at position 1021 of SEQ ID NO: 914267
ggcggaagccaauauuaau

SEQ ID NO: 990941 - RNA, 19 nt, Artificial Sequence
  Description of Artificial Sequence: Synthetic oligonucleotide
  Antisense strand to SEQ ID NO: 990940
auuaauauuggcuuccgcc

SEQ ID NO: 990942 - RNA, 19 nt, Artificial Sequence
  Description of Artificial Sequence: Synthetic oligonucleotide
  Sense strand starting at position 1024 of SEQ ID NO: 914267
ggaagccaauauuaauaaa

SEQ ID NO: 990943 - RNA, 19 nt, Artificial Sequence
  Description of Artificial Sequence: Synthetic oligonucleotide
  Antisense strand to SEQ ID NO: 990942
uuuauuaauauuggcuucc

SEQ ID NO: 990944 - RNA, 19 nt, Artificial Sequence
  Description of Artificial Sequence: Synthetic oligonucleotide
  Sense strand starting at position 1152 of SEQ ID NO: 914267
uucgaaacccuguguuauc

SEQ ID NO: 990945 - RNA, 19 nt, Artificial Sequence
  Description of Artificial Sequence: Synthetic oligonucleotide
  Antisense strand to SEQ ID NO: 990944
gauaacacaggguuucgaa

SEQ ID NO: 990946 - RNA, 19 nt, Artificial Sequence
  Description of Artificial Sequence: Synthetic oligonucleotide
  Sense strand starting at position 1153 of SEQ ID NO: 914267
ucgaaacccuguguuaucu

SEQ ID NO: 990947 - RNA, 19 nt, Artificial Sequence
  Description of Artificial Sequence: Synthetic oligonucleotide
  Antisense strand to SEQ ID NO: 990946
agauaacacaggguuucga

SEQ ID NO: 990948 - RNA, 19 nt, Artificial Sequence
  Description of Artificial Sequence: Synthetic oligonucleotide
  Sense strand starting at position 1231 of SEQ ID NO: 914267
ggcacuuucuguuccuaga

SEQ ID NO: 990949 - RNA, 19 nt, Artificial Sequence
  Description of Artificial Sequence: Synthetic oligonucleotide
  Antisense strand to SEQ ID NO: 990948
ucuaggaacagaaagugcc

SEQ ID NO: 990950 - RNA, 19 nt, Artificial Sequence
  Description of Artificial Sequence: Synthetic oligonucleotide
  Sense strand starting at position 1242 of SEQ ID NO: 914267
uuccuagaaugcucugacu

SEQ ID NO: 990951 - RNA, 19 nt, Artificial Sequence
  Description of Artificial Sequence: Synthetic oligonucleotide
  Antisense strand to SEQ ID NO: 990950
agucagagcauucuaggaa

SEQ ID NO: 990952 - RNA, 19 nt, Artificial Sequence
  Description of Artificial Sequence: Synthetic oligonucleotide
  Sense strand starting at position 1244 of SEQ ID NO: 914267
ccuagaaugcucugacuuc

SEQ ID NO: 990953 - RNA, 19 nt, Artificial Sequence
  Description of Artificial Sequence: Synthetic oligonucleotide
  Antisense strand to SEQ ID NO: 990952
gaagucagagcauucuagg

SEQ ID NO: 990954 - RNA, 19 nt, Artificial Sequence
  Description of Artificial Sequence: Synthetic oligonucleotide
  Sense strand starting at position 1537 of SEQ ID NO: 914267
ugauaauacuggcugaaug

SEQ ID NO: 990955 - RNA, 19 nt, Artificial Sequence
  Description of Artificial Sequence: Synthetic oligonucleotide
  Antisense strand to SEQ ID NO: 990954
cauucagccaguauuauca

SEQ ID NO: 990956 - RNA, 19 nt, Artificial Sequence
  Description of Artificial Sequence: Synthetic oligonucleotide
  Sense strand starting at position 1591 of SEQ ID NO: 914267
ggaugaggacccugagguu

SEQ ID NO: 990957 - RNA, 19 nt, Artificial Sequence
  Description of Artificial Sequence: Synthetic oligonucleotide
  Antisense strand to SEQ ID NO: 990956
aaccucaggguccucaucc

SEQ ID NO: 990958 - RNA, 19 nt, Artificial Sequence
  Description of Artificial Sequence: Synthetic oligonucleotide
  Sense strand starting at position 1615 of SEQ ID NO: 914267
acguuaaagugauuuguuc

SEQ ID NO: 990959 - RNA, 19 nt, Artificial Sequence
  Description of Artificial Sequence: Synthetic oligonucleotide
  Antisense strand to SEQ ID NO: 990958
gaacaaaucacuuuaacgu

SEQ ID NO: 990960 - RNA, 19 nt, Artificial Sequence
  Description of Artificial Sequence: Synthetic oligonucleotide
  Sense strand starting at position 1826 of SEQ ID NO: 914267
gugcgagucccuuacuaug

SEQ ID NO: 990961 - RNA, 19 nt, Artificial Sequence
  Description of Artificial Sequence: Synthetic oligonucleotide
  Antisense strand to SEQ ID NO: 990960
cauaguaagggacucgcac

SEQ ID NO: 990962 - RNA, 19 nt, Artificial Sequence
  Description of Artificial Sequence: Synthetic oligonucleotide
  Sense strand starting at position 1854 of SEQ ID NO: 914267
gaaggcauuugagaagagu

SEQ ID NO: 990963 - RNA, 19 nt, Artificial Sequence
  Description of Artificial Sequence: Synthetic oligonucleotide
  Antisense strand to SEQ ID NO: 990962
acucuucucaaaugccuuc

SEQ ID NO: 990964 - RNA, 19 nt, Artificial Sequence
  Description of Artificial Sequence: Synthetic oligonucleotide
  Sense strand starting at position 2511 of SEQ ID NO: 914267
aguccuaacgcuuagugua

SEQ ID NO: 990965 - RNA, 19 nt, Artificial Sequence
  Description of Artificial Sequence: Synthetic oligonucleotide
  Antisense strand to SEQ ID NO: 990964
uacacuaagcguuaggacu

SEQ ID NO: 990966 - RNA, 19 nt, Artificial Sequence
  Description of Artificial Sequence: Synthetic oligonucleotide
  Sense strand starting at position 2516 of SEQ ID NO: 914267
uaacgcuuaguguacaaau

SEQ ID NO: 990967 - RNA, 19 nt, Artificial Sequence
  Description of Artificial Sequence: Synthetic oligonucleotide
  Antisense strand to SEQ ID NO: 990966
auuuguacacuaagcguua

SEQ ID NO: 990968 - RNA, 19 nt, Artificial Sequence
  Description of Artificial Sequence: Synthetic oligonucleotide
  Sense strand starting at position 2597 of SEQ ID NO: 914267
uugcguaaugacugaggca

SEQ ID NO: 990969 - RNA, 19 nt, Artificial Sequence
  Description of Artificial Sequence: Synthetic oligonucleotide
  Antisense strand to SEQ ID NO: 990968
ugccucagucauuacgcaa

SEQ ID NO: 990970 - RNA, 19 nt, Artificial Sequence
  Description of Artificial Sequence: Synthetic oligonucleotide
  Sense strand starting at position 2623 of SEQ ID NO: 914267
uuuaauuaggcuugucuca

SEQ ID NO: 990971 - RNA, 19 nt, Artificial Sequence
  Description of Artificial Sequence: Synthetic oligonucleotide
  Antisense strand to SEQ ID NO: 990970
ugagacaagccuaauuaaa

SEQ ID NO: 990972 - RNA, 19 nt, Artificial Sequence
  Description of Artificial Sequence: Synthetic oligonucleotide
  Sense strand starting at position 3019 of SEQ ID NO: 914267
caggccuguuuauccaaga

SEQ ID NO: 990973 - RNA, 19 nt, Artificial Sequence
  Description of Artificial Sequence: Synthetic oligonucleotide
  Antisense strand to SEQ ID NO: 990972
ucuuggauaaacaggccug

SEQ ID NO: 990974 - RNA, 19 nt, Artificial Sequence
  Description of Artificial Sequence: Synthetic oligonucleotide
  Sense strand starting at position 3020 of SEQ ID NO: 914267
aggccuguuuauccaagau

SEQ ID NO: 990975 - RNA, 19 nt, Artificial Sequence
  Description of Artificial Sequence: Synthetic oligonucleotide
  Antisense strand to SEQ ID NO: 990974
aucuuggauaaacaggccu

SEQ ID NO: 990976 - RNA, 19 nt, Artificial Sequence
  Description of Artificial Sequence: Synthetic oligonucleotide
  Sense strand starting at position 3024 of SEQ ID NO: 914267
cuguuuauccaagaugcuu

SEQ ID NO: 990977 - RNA, 19 nt, Artificial Sequence
  Description of Artificial Sequence: Synthetic oligonucleotide
  Antisense strand to SEQ ID NO: 990976
aagcaucuuggauaaacag

SEQ ID NO: 990978 - RNA, 19 nt, Artificial Sequence
  Description of Artificial Sequence: Synthetic oligonucleotide
  Sense strand starting at position 3116 of SEQ ID NO: 914267
uugauaugauuccaggaca

SEQ ID NO: 990979 - RNA, 19 nt, Artificial Sequence
  Description of Artificial Sequence: Synthetic oligonucleotide
  Antisense strand to SEQ ID NO: 990978
uguccuggaaucauaucaa

SEQ ID NO: 990980 - RNA, 19 nt, Artificial Sequence
  Description of Artificial Sequence: Synthetic oligonucleotide
  Sense strand starting at position 3143 of SEQ ID NO: 914267
gcucaauaaugugucagau

SEQ ID NO: 990981 - RNA, 19 nt, Artificial Sequence
  Description of Artificial Sequence: Synthetic oligonucleotide
  Antisense strand to SEQ ID NO: 990980
aucugacacauuauugagc

SEQ ID NO: 990982 - RNA, 19 nt, Artificial Sequence
  Description of Artificial Sequence: Synthetic oligonucleotide
  Sense strand starting at position 3152 of SEQ ID NO: 914267
ugugucagaucaguuaauu

SEQ ID NO: 990983 - RNA, 19 nt, Artificial Sequence
  Description of Artificial Sequence: Synthetic oligonucleotide
  Antisense strand to SEQ ID NO: 990982
aauuaacugaucugacaca

SEQ ID NO: 990984 - RNA, 19 nt, Artificial Sequence
  Description of Artificial Sequence: Synthetic oligonucleotide
  Sense strand starting at position 3165 of SEQ ID NO: 914267
uuaauuaucuugcugaaag

SEQ ID NO: 990985 - RNA, 19 nt, Artificial Sequence
  Description of Artificial Sequence: Synthetic oligonucleotide
  Antisense strand to SEQ ID NO: 990984
cuuucagcaagauaauuaa

SEQ ID NO: 990986 - RNA, 19 nt, Artificial Sequence
  Description of Artificial Sequence: Synthetic oligonucleotide
  Sense strand starting at position 3204 of SEQ ID NO: 914267
agugucaccucccuaauau

SEQ ID NO: 990987 - RNA, 19 nt, Artificial Sequence
  Description of Artificial Sequence: Synthetic oligonucleotide
  Antisense strand to SEQ ID NO: 990986
auauuagggaggugacacu

SEQ ID NO: 990988 - RNA, 19 nt, Artificial Sequence
  Description of Artificial Sequence: Synthetic oligonucleotide
  Sense strand starting at position 3205 of SEQ ID NO: 914267
gugucaccucccuaauaug

SEQ ID NO: 990989 - RNA, 19 nt, Artificial Sequence
  Description of Artificial Sequence: Synthetic oligonucleotide
  Antisense strand to SEQ ID NO: 990988
cauauuagggaggugacac

SEQ ID NO: 990990 - RNA, 19 nt, Artificial Sequence
  Description of Artificial Sequence: Synthetic oligonucleotide
  Sense strand starting at position 3213 of SEQ ID NO: 914267
ucccuaauaugaguuuaug

SEQ ID NO: 990991 - RNA, 19 nt, Artificial Sequence
  Description of Artificial Sequence: Synthetic oligonucleotide
  Antisense strand to SEQ ID NO: 990990
cauaaacucauauuaggga

SEQ ID NO: 990992 - RNA, 19 nt, Artificial Sequence
  Description of Artificial Sequence: Synthetic oligonucleotide
  Sense strand starting at position 3736 of SEQ ID NO: 914267
cuuacaguucuguaaacca

SEQ ID NO: 990993 - RNA, 19 nt, Artificial Sequence
  Description of Artificial Sequence: Synthetic oligonucleotide
  Antisense strand to SEQ ID NO: 990992
ugguuuacagaacuguaag

SEQ ID NO: 990994 - RNA, 19 nt, Artificial Sequence
  Description of Artificial Sequence: Synthetic oligonucleotide
  Sense strand starting at position 3776 of SEQ ID NO: 914267
gaguaaagucaagguguca

SEQ ID NO: 990995 - RNA, 19 nt, Artificial Sequence
  Description of Artificial Sequence: Synthetic oligonucleotide
  Antisense strand to SEQ ID NO: 990994
ugacaccuugacuuuacuc

SEQ ID NO: 990996 - RNA, 19 nt, Artificial Sequence
  Description of Artificial Sequence: Synthetic oligonucleotide
  Sense strand starting at position 3797 of SEQ ID NO: 914267
uggauugguugcuuccaga

SEQ ID NO: 990997 - RNA, 19 nt, Artificial Sequence
  Description of Artificial Sequence: Synthetic oligonucleotide
  Antisense strand to SEQ ID NO: 990996
ucuggaagcaaccaaucca

SEQ ID NO: 990998 - RNA, 19 nt, Artificial Sequence
  Description of Artificial Sequence: Synthetic oligonucleotide
  Sense strand starting at position 3814 of SEQ ID NO: 914267
gaggcucugcagggagauu

SEQ ID NO: 990999 - RNA, 19 nt, Artificial Sequence
  Description of Artificial Sequence: Synthetic oligonucleotide
  Antisense strand to SEQ ID NO: 990998
aaucucccugcagagccuc

SEQ ID NO: 991000 - RNA, 19 nt, Artificial Sequence
  Description of Artificial Sequence: Synthetic oligonucleotide
  Sense strand starting at position 3920 of SEQ ID NO: 914267
aucgauuacuuuccuguaa

SEQ ID NO: 991001 - RNA, 19 nt, Artificial Sequence
  Description of Artificial Sequence: Synthetic oligonucleotide
  Antisense strand to SEQ ID NO: 991000
uuacaggaaaguaaucgau

SEQ ID NO: 991002 - RNA, 19 nt, Artificial Sequence
  Description of Artificial Sequence: Synthetic oligonucleotide
  Sense strand starting at position 3921 of SEQ ID NO: 914267
ucgauuacuuuccuguaau

SEQ ID NO: 991003 - RNA, 19 nt, Artificial Sequence
  Description of Artificial Sequence: Synthetic oligonucleotide
  Antisense strand to SEQ ID NO: 991002
auuacaggaaaguaaucga

SEQ ID NO: 991004 - RNA, 19 nt, Artificial Sequence
  Description of Artificial Sequence: Synthetic oligonucleotide
  Sense strand starting at position 3933 of SEQ ID NO: 914267
cuguaauagcuacagucaa

SEQ ID NO: 991005 - RNA, 19 nt, Artificial Sequence
  Description of Artificial Sequence: Synthetic oligonucleotide
  Antisense strand to SEQ ID NO: 991004
uugacuguagcuauuacag

SEQ ID NO: 991006 - RNA, 19 nt, Artificial Sequence
  Description of Artificial Sequence: Synthetic oligonucleotide
  Sense strand starting at position 82 of SEQ ID NO: 914268
agguaaaucauccgcuuag

SEQ ID NO: 991007 - RNA, 19 nt, Artificial Sequence
  Description of Artificial Sequence: Synthetic oligonucleotide
  Antisense strand to SEQ ID NO: 991006
cuaagcggaugauuuaccu

SEQ ID NO: 991008 - RNA, 19 nt, Artificial Sequence
  Description of Artificial Sequence: Synthetic oligonucleotide
  Sense strand starting at position 83 of SEQ ID NO: 914268
gguaaaucauccgcuuaga

SEQ ID NO: 991009 - RNA, 19 nt, Artificial Sequence
  Description of Artificial Sequence: Synthetic oligonucleotide
  Antisense strand to SEQ ID NO: 991008
ucuaagcggaugauuuacc

SEQ ID NO: 991010 - RNA, 19 nt, Artificial Sequence
  Description of Artificial Sequence: Synthetic oligonucleotide
  Sense strand starting at position 559 of SEQ ID NO: 914268
gucacacuuguauauuauu

SEQ ID NO: 991011 - RNA, 19 nt, Artificial Sequence
  Description of Artificial Sequence: Synthetic oligonucleotide
  Antisense strand to SEQ ID NO: 991010
aauaauauacaagugugac

SEQ ID NO: 991012 - RNA, 19 nt, Artificial Sequence
  Description of Artificial Sequence: Synthetic oligonucleotide
  Sense strand starting at position 578 of SEQ ID NO: 914268
ugucucucgauugguaaua

SEQ ID NO: 991013 - RNA, 19 nt, Artificial Sequence
  Description of Artificial Sequence: Synthetic oligonucleotide
  Antisense strand to SEQ ID NO: 991012
uauuaccaaucgagagaca

SEQ ID NO: 991014 - RNA, 19 nt, Artificial Sequence
  Description of Artificial Sequence: Synthetic oligonucleotide
  Sense strand starting at position 579 of SEQ ID NO: 914268
gucucucgauugguaauaa

SEQ ID NO: 991015 - RNA, 19 nt, Artificial Sequence
  Description of Artificial Sequence: Synthetic oligonucleotide
  Antisense strand to SEQ ID NO: 991014
uuauuaccaaucgagagac

SEQ ID NO: 991016 - RNA, 19 nt, Artificial Sequence
  Description of Artificial Sequence: Synthetic oligonucleotide
  Sense strand starting at position 683 of SEQ ID NO: 914268
cagagauguugcucaggag

SEQ ID NO: 991017 - RNA, 19 nt, Artificial Sequence
  Description of Artificial Sequence: Synthetic oligonucleotide
  Antisense strand to SEQ ID NO: 991016
cuccugagcaacaucucug

SEQ ID NO: 991018 - RNA, 19 nt, Artificial Sequence
  Description of Artificial Sequence: Synthetic oligonucleotide
  Sense strand starting at position 705 of SEQ ID NO: 914268
agcacauaaccuugcugaa

SEQ ID NO: 991019 - RNA, 19 nt, Artificial Sequence
  Description of Artificial Sequence: Synthetic oligonucleotide
  Antisense strand to SEQ ID NO: 991018
uucagcaagguuaugugcu

SEQ ID NO: 991020 - RNA, 19 nt, Artificial Sequence
  Description of Artificial Sequence: Synthetic oligonucleotide
  Sense strand starting at position 769 of SEQ ID NO: 914268
ccugcuuuguucccagaua

SEQ ID NO: 991021 - RNA, 19 nt, Artificial Sequence
  Description of Artificial Sequence: Synthetic oligonucleotide
  Antisense strand to SEQ ID NO: 991020
uaucugggaacaaagcagg

SEQ ID NO: 991022 - RNA, 19 nt, Artificial Sequence
  Description of Artificial Sequence: Synthetic oligonucleotide
  Sense strand starting at position 1150 of SEQ ID NO: 914268
gcauuuaugucacuccauu

SEQ ID NO: 991023 - RNA, 19 nt, Artificial Sequence
  Description of Artificial Sequence: Synthetic oligonucleotide
  Antisense strand to SEQ ID NO: 991022
aauggagugacauaaaugc

SEQ ID NO: 991024 - RNA, 19 nt, Artificial Sequence
  Description of Artificial Sequence: Synthetic oligonucleotide
  Sense strand starting at position 1235 of SEQ ID NO: 914268
uuaacaaggucauugcuuu

SEQ ID NO: 991025 - RNA, 19 nt, Artificial Sequence
  Description of Artificial Sequence: Synthetic oligonucleotide
  Antisense strand to SEQ ID NO: 991024
aaagcaaugaccuuguuaa

SEQ ID NO: 991026 - RNA, 19 nt, Artificial Sequence
  Description of Artificial Sequence: Synthetic oligonucleotide
  Sense strand starting at position 1285 of SEQ ID NO: 914268
gauagaagccuaggugcaa

SEQ ID NO: 991027 - RNA, 19 nt, Artificial Sequence
  Description of Artificial Sequence: Synthetic oligonucleotide
  Antisense strand to SEQ ID NO: 991026
uugcaccuaggcuucuauc

SEQ ID NO: 991028 - RNA, 19 nt, Artificial Sequence
  Description of Artificial Sequence: Synthetic oligonucleotide
  Sense strand starting at position 1331 of SEQ ID NO: 914268
guugacagcucccuuaaug

SEQ ID NO: 991029 - RNA, 19 nt, Artificial Sequence
  Description of Artificial Sequence: Synthetic oligonucleotide
  Antisense strand to SEQ ID NO: 991028
cauuaagggagcugucaac

SEQ ID NO: 991030 - RNA, 19 nt, Artificial Sequence
  Description of Artificial Sequence: Synthetic oligonucleotide
  Sense strand starting at position 1396 of SEQ ID NO: 914268
guuggaugggcccaguaaa

SEQ ID NO: 991031 - RNA, 19 nt, Artificial Sequence
  Description of Artificial Sequence: Synthetic oligonucleotide
  Antisense strand to SEQ ID NO: 991030
uuuacugggcccauccaac

SEQ ID NO: 991032 - RNA, 19 nt, Artificial Sequence
  Description of Artificial Sequence: Synthetic oligonucleotide
  Sense strand starting at position 1465 of SEQ ID NO: 914268
agguauacucuuugauccu

SEQ ID NO: 991033 - RNA, 19 nt, Artificial Sequence
  Description of Artificial Sequence: Synthetic oligonucleotide
  Antisense strand to SEQ ID NO: 991032
aggaucaaagaguauaccu

SEQ ID NO: 991034 - RNA, 19 nt, Artificial Sequence
  Description of Artificial Sequence: Synthetic oligonucleotide
  Sense strand starting at position 1474 of SEQ ID NO: 914268
cuuugauccugucuacauc

SEQ ID NO: 991035 - RNA, 19 nt, Artificial Sequence
  Description of Artificial Sequence: Synthetic oligonucleotide
  Antisense strand to SEQ ID NO: 991034
gauguagacaggaucaaag

SEQ ID NO: 991036 - RNA, 19 nt, Artificial Sequence
  Description of Artificial Sequence: Synthetic oligonucleotide
  Sense strand starting at position 1942 of SEQ ID NO: 914268
cggugagcgcgcagacaua

SEQ ID NO: 991037 - RNA, 19 nt, Artificial Sequence
  Description of Artificial Sequence: Synthetic oligonucleotide
  Antisense strand to SEQ ID NO: 991036
uaugucugcgcgcucaccg

SEQ ID NO: 991038 - RNA, 19 nt, Artificial Sequence
  Description of Artificial Sequence: Synthetic oligonucleotide
  Sense strand starting at position 1957 of SEQ ID NO: 914268
cauagcuuuggcuggcaaa

SEQ ID NO: 991039 - RNA, 19 nt, Artificial Sequence
  Description of Artificial Sequence: Synthetic oligonucleotide
  Antisense strand to SEQ ID NO: 991038
uuugccagccaaagcuaug

SEQ ID NO: 991040 - RNA, 19 nt, Artificial Sequence
  Description of Artificial Sequence: Synthetic oligonucleotide
  Sense strand starting at position 2261 of SEQ ID NO: 914268
uacauagugagaugugaag

SEQ ID NO: 991041 - RNA, 19 nt, Artificial Sequence
  Description of Artificial Sequence: Synthetic oligonucleotide
  Antisense strand to SEQ ID NO: 991040
cuucacaucucacuaugua

SEQ ID NO: 991042 - RNA, 19 nt, Artificial Sequence
  Description of Artificial Sequence: Synthetic oligonucleotide
  Sense strand starting at position 2263 of SEQ ID NO: 914268
cauagugagaugugaagua

SEQ ID NO: 991043 - RNA, 19 nt, Artificial Sequence
  Description of Artificial Sequence: Synthetic oligonucleotide
  Antisense strand to SEQ ID NO: 991042
uacuucacaucucacuaug

SEQ ID NO: 991044 - RNA, 19 nt, Artificial Sequence
  Description of Artificial Sequence: Synthetic oligonucleotide
  Sense strand starting at position 2415 of SEQ ID NO: 914268
ccgguaauggcagagugua

SEQ ID NO: 991045 - RNA, 19 nt, Artificial Sequence
  Description of Artificial Sequence: Synthetic oligonucleotide
  Antisense strand to SEQ ID NO: 991044
uacacucugccauuaccgg

SEQ ID NO: 991046 - RNA, 19 nt, Artificial Sequence
  Description of Artificial Sequence: Synthetic oligonucleotide
  Sense strand starting at position 2425 of SEQ ID NO: 914268
cagaguguagacugaugaa

SEQ ID NO: 991047 - RNA, 19 nt, Artificial Sequence
  Description of Artificial Sequence: Synthetic oligonucleotide
  Antisense strand to SEQ ID NO: 991046
uucaucagucuacacucug

SEQ ID NO: 991048 - RNA, 19 nt, Artificial Sequence
  Description of Artificial Sequence: Synthetic oligonucleotide
  Sense strand starting at position 2439 of SEQ ID NO: 914268
augaaauucugugcggcaa

SEQ ID NO: 991049 - RNA, 19 nt, Artificial Sequence
  Description of Artificial Sequence: Synthetic oligonucleotide
  Antisense strand to SEQ ID NO: 991048
uugccgcacagaauuucau

SEQ ID NO: 991050 - RNA, 19 nt, Artificial Sequence
  Description of Artificial Sequence: Synthetic oligonucleotide
  Sense strand starting at position 2440 of SEQ ID NO: 914268
ugaaauucugugcggcaaa

SEQ ID NO: 991051 - RNA, 19 nt, Artificial Sequence
  Description of Artificial Sequence: Synthetic oligonucleotide
  Antisense strand to SEQ ID NO: 991050
uuugccgcacagaauuuca

SEQ ID NO: 991052 - RNA, 19 nt, Artificial Sequence
  Description of Artificial Sequence: Synthetic oligonucleotide
  Sense strand starting at position 2493 of SEQ ID NO: 914268
cggcauugugguaggcauu

SEQ ID NO: 991053 - RNA, 19 nt, Artificial Sequence
  Description of Artificial Sequence: Synthetic oligonucleotide
  Antisense strand to SEQ ID NO: 991052
aaugccuaccacaaugccg

SEQ ID NO: 991054 - RNA, 19 nt, Artificial Sequence
  Description of Artificial Sequence: Synthetic oligonucleotide
  Sense strand starting at position 2494 of SEQ ID NO: 914268
ggcauugugguaggcauuu

SEQ ID NO: 991055 - RNA, 19 nt, Artificial Sequence
  Description of Artificial Sequence: Synthetic oligonucleotide
  Antisense strand to SEQ ID NO: 991054
aaaugccuaccacaaugcc

SEQ ID NO: 991056 - RNA, 19 nt, Artificial Sequence
  Description of Artificial Sequence: Synthetic oligonucleotide
  Sense strand starting at position 2570 of SEQ ID NO: 914268
cuaaauaaacuuggagcua

SEQ ID NO: 991057 - RNA, 19 nt, Artificial Sequence
  Description of Artificial Sequence: Synthetic oligonucleotide
  Antisense strand to SEQ ID NO: 991056
uagcuccaaguuuauuuag

SEQ ID NO: 991058 - RNA, 19 nt, Artificial Sequence
  Description of Artificial Sequence: Synthetic oligonucleotide
  Sense strand starting at position 2586 of SEQ ID NO: 914268
cuaguaaaugguggagcua

SEQ ID NO: 991059 - RNA, 19 nt, Artificial Sequence
  Description of Artificial Sequence: Synthetic oligonucleotide
  Antisense strand to SEQ ID NO: 991058
uagcuccaccauuuacuag

SEQ ID NO: 991060 - RNA, 19 nt, Artificial Sequence
  Description of Artificial Sequence: Synthetic oligonucleotide
  Sense strand starting at position 2587 of SEQ ID NO: 914268
uaguaaaugguggagcuau

SEQ ID NO: 991061 - RNA, 19 nt, Artificial Sequence
  Description of Artificial Sequence: Synthetic oligonucleotide
  Antisense strand to SEQ ID NO: 991060
auagcuccaccauuuacua

SEQ ID NO: 991062 - RNA, 19 nt, Artificial Sequence
  Description of Artificial Sequence: Synthetic oligonucleotide
  Sense strand starting at position 2616 of SEQ ID NO: 914268
aggacuaucuuaccggaaa

SEQ ID NO: 991063 - RNA, 19 nt, Artificial Sequence
  Description of Artificial Sequence: Synthetic oligonucleotide
  Antisense strand to SEQ ID NO: 991062
uuuccgguaagauaguccu

SEQ ID NO: 991064 - RNA, 19 nt, Artificial Sequence
  Description of Artificial Sequence: Synthetic oligonucleotide
  Sense strand starting at position 2693 of SEQ ID NO: 914268
uuuauacuggcacauugau

SEQ ID NO: 991065 - RNA, 19 nt, Artificial Sequence
  Description of Artificial Sequence: Synthetic oligonucleotide
  Antisense strand to SEQ ID NO: 991064
aucaaugugccaguauaaa

SEQ ID NO: 991066 - RNA, 19 nt, Artificial Sequence
  Description of Artificial Sequence: Synthetic oligonucleotide
  Sense strand starting at position 2866 of SEQ ID NO: 914268
gucucagaagguugugauu

SEQ ID NO: 991067 - RNA, 19 nt, Artificial Sequence
  Description of Artificial Sequence: Synthetic oligonucleotide
  Antisense strand to SEQ ID NO: 991066
aaucacaaccuucugagac

SEQ ID NO: 991068 - RNA, 19 nt, Artificial Sequence
  Description of Artificial Sequence: Synthetic oligonucleotide
  Sense strand starting at position 2948 of SEQ ID NO: 914268
agucauuaguuaccaaguu

SEQ ID NO: 991069 - RNA, 19 nt, Artificial Sequence
  Description of Artificial Sequence: Synthetic oligonucleotide
  Antisense strand to SEQ ID NO: 991068
aacuugguaacuaaugacu

SEQ ID NO: 991070 - RNA, 19 nt, Artificial Sequence
  Description of Artificial Sequence: Synthetic oligonucleotide
  Sense strand starting at position 3104 of SEQ ID NO: 914268
gguucaagagauugucuug

SEQ ID NO: 991071 - RNA, 19 nt, Artificial Sequence
  Description of Artificial Sequence: Synthetic oligonucleotide
  Antisense strand to SEQ ID NO: 991070
caagacaaucucuugaacc

SEQ ID NO: 991072 - RNA, 19 nt, Artificial Sequence
  Description of Artificial Sequence: Synthetic oligonucleotide
  Sense strand starting at position 3187 of SEQ ID NO: 914268
agauuagguuucgucaugu

SEQ ID NO: 991073 - RNA, 19 nt, Artificial Sequence
  Description of Artificial Sequence: Synthetic oligonucleotide
  Antisense strand to SEQ ID NO: 991072
acaugacgaaaccuaaucu

SEQ ID NO: 991074 - RNA, 19 nt, Artificial Sequence
  Description of Artificial Sequence: Synthetic oligonucleotide
  Sense strand starting at position 3423 of SEQ ID NO: 914268
gugcaacauuaaccaguua

SEQ ID NO: 991075 - RNA, 19 nt, Artificial Sequence
  Description of Artificial Sequence: Synthetic oligonucleotide
  Antisense strand to SEQ ID NO: 991074
uaacugguuaauguugcac

SEQ ID NO: 991076 - RNA, 19 nt, Artificial Sequence
  Description of Artificial Sequence: Synthetic oligonucleotide
  Sense strand starting at position 3660 of SEQ ID NO: 914268
cuauaucucuguuuaugga

SEQ ID NO: 991077 - RNA, 19 nt, Artificial Sequence
  Description of Artificial Sequence: Synthetic oligonucleotide
  Antisense strand to SEQ ID NO: 991076
uccauaaacagagauauag

SEQ ID NO: 991078 - RNA, 19 nt, Artificial Sequence
  Description of Artificial Sequence: Synthetic oligonucleotide
  Sense strand starting at position 3674 of SEQ ID NO: 914268
auggauguccucugcccaa

SEQ ID NO: 991079 - RNA, 19 nt, Artificial Sequence
  Description of Artificial Sequence: Synthetic oligonucleotide
  Antisense strand to SEQ ID NO: 991078
uugggcagaggacauccau

SEQ ID NO: 991080 - RNA, 19 nt, Artificial Sequence
  Description of Artificial Sequence: Synthetic oligonucleotide
  Sense strand starting at position 3863 of SEQ ID NO: 914268
agcaauagaugugucugua

SEQ ID NO: 991081 - RNA, 19 nt, Artificial Sequence
  Description of Artificial Sequence: Synthetic oligonucleotide
  Antisense strand to SEQ ID NO: 991080
uacagacacaucuauugcu

SEQ ID NO: 991082 - RNA, 19 nt, Artificial Sequence
  Description of Artificial Sequence: Synthetic oligonucleotide
  Sense strand starting at position 3866 of SEQ ID NO: 914268
aauagaugugucuguaaga

SEQ ID NO: 991083 - RNA, 19 nt, Artificial Sequence
  Description of Artificial Sequence: Synthetic oligonucleotide
  Antisense strand to SEQ ID NO: 991082
ucuuacagacacaucuauu

SEQ ID NO: 991084 - RNA, 19 nt, Artificial Sequence
  Description of Artificial Sequence: Synthetic oligonucleotide
  Sense strand starting at position 3867 of SEQ ID NO: 914268
auagaugugucuguaagag

SEQ ID NO: 991085 - RNA, 19 nt, Artificial Sequence
  Description of Artificial Sequence: Synthetic oligonucleotide
  Antisense strand to SEQ ID NO: 991084
cucuuacagacacaucuau

SEQ ID NO: 991086 - RNA, 19 nt, Artificial Sequence
  Description of Artificial Sequence: Synthetic oligonucleotide
  Sense strand starting at position 92 of SEQ ID NO: 914269
acagguaauguguaaauca

SEQ ID NO: 991087 - RNA, 19 nt, Artificial Sequence
  Description of Artificial Sequence: Synthetic oligonucleotide
  Antisense strand to SEQ ID NO: 991086
ugauuuacacauuaccugu

SEQ ID NO: 991088 - RNA, 19 nt, Artificial Sequence
  Description of Artificial Sequence: Synthetic oligonucleotide
  Sense strand starting at position 149 of SEQ ID NO: 914269
uuugguaaccgucagaaga

SEQ ID NO: 991089 - RNA, 19 nt, Artificial Sequence
  Description of Artificial Sequence: Synthetic oligonucleotide
  Antisense strand to SEQ ID NO: 991088
ucuucugacgguuaccaaa

SEQ ID NO: 991090 - RNA, 19 nt, Artificial Sequence
  Description of Artificial Sequence: Synthetic oligonucleotide
  Sense strand starting at position 197 of SEQ ID NO: 914269
gcuucuggaaaguaggauu

SEQ ID NO: 991091 - RNA, 19 nt, Artificial Sequence
  Description of Artificial Sequence: Synthetic oligonucleotide
  Antisense strand to SEQ ID NO: 991090
aauccuacuuuccagaagc

SEQ ID NO: 991092 - RNA, 19 nt, Artificial Sequence
  Description of Artificial Sequence: Synthetic oligonucleotide
  Sense strand starting at position 382 of SEQ ID NO: 914269
agguaaaucauccgcuuag

SEQ ID NO: 991093 - RNA, 19 nt, Artificial Sequence
  Description of Artificial Sequence: Synthetic oligonucleotide
  Antisense strand to SEQ ID NO: 991092
cuaagcggaugauuuaccu

SEQ ID NO: 991094 - RNA, 19 nt, Artificial Sequence
  Description of Artificial Sequence: Synthetic oligonucleotide
  Sense strand starting at position 383 of SEQ ID NO: 914269
gguaaaucauccgcuuaga

SEQ ID NO: 991095 - RNA, 19 nt, Artificial Sequence
  Description of Artificial Sequence: Synthetic oligonucleotide
  Antisense strand to SEQ ID NO: 991094
ucuaagcggaugauuuacc

SEQ ID NO: 991096 - RNA, 19 nt, Artificial Sequence
  Description of Artificial Sequence: Synthetic oligonucleotide
  Sense strand starting at position 859 of SEQ ID NO: 914269
gucacacuuguauauuauu

SEQ ID NO: 991097 - RNA, 19 nt, Artificial Sequence
  Description of Artificial Sequence: Synthetic oligonucleotide
  Antisense strand to SEQ ID NO: 991096
aauaauauacaagugugac

SEQ ID NO: 991098 - RNA, 19 nt, Artificial Sequence
  Description of Artificial Sequence: Synthetic oligonucleotide
  Sense strand starting at position 878 of SEQ ID NO: 914269
ugucucucgauugguaaua

SEQ ID NO: 991099 - RNA, 19 nt, Artificial Sequence
  Description of Artificial Sequence: Synthetic oligonucleotide
  Antisense strand to SEQ ID NO: 991098
uauuaccaaucgagagaca

SEQ ID NO: 991100 - RNA, 19 nt, Artificial Sequence
  Description of Artificial Sequence: Synthetic oligonucleotide
  Sense strand starting at position 879 of SEQ ID NO: 914269
gucucucgauugguaauaa

SEQ ID NO: 991101 - RNA, 19 nt, Artificial Sequence
  Description of Artificial Sequence: Synthetic oligonucleotide
  Antisense strand to SEQ ID NO: 991100
uuauuaccaaucgagagac

SEQ ID NO: 991102 - RNA, 19 nt, Artificial Sequence
  Description of Artificial Sequence: Synthetic oligonucleotide
  Sense strand starting at position 983 of SEQ ID NO: 914269
cagagauguugcucaggag

SEQ ID NO: 991103 - RNA, 19 nt, Artificial Sequence
  Description of Artificial Sequence: Synthetic oligonucleotide
  Antisense strand to SEQ ID NO: 991102
cuccugagcaacaucucug

SEQ ID NO: 991104 - RNA, 19 nt, Artificial Sequence
  Description of Artificial Sequence: Synthetic oligonucleotide
  Sense strand starting at position 1005 of SEQ ID NO: 914269
agcacauaaccuugcugaa

SEQ ID NO: 991105 - RNA, 19 nt, Artificial Sequence
  Description of Artificial Sequence: Synthetic oligonucleotide
  Antisense strand to SEQ ID NO: 991104
uucagcaagguuaugugcu

SEQ ID NO: 991106 - RNA, 19 nt, Artificial Sequence
  Description of Artificial Sequence: Synthetic oligonucleotide
  Sense strand starting at position 1069 of SEQ ID NO: 914269
ccugcuuuguucccagaua

SEQ ID NO: 991107 - RNA, 19 nt, Artificial Sequence
  Description of Artificial Sequence: Synthetic oligonucleotide
  Antisense strand to SEQ ID NO: 991106
uaucugggaacaaagcagg

SEQ ID NO: 991108 - RNA, 19 nt, Artificial Sequence
  Description of Artificial Sequence: Synthetic oligonucleotide
  Sense strand starting at position 1450 of SEQ ID NO: 914269
gcauuuaugucacuccauu

SEQ ID NO: 991109 - RNA, 19 nt, Artificial Sequence
  Description of Artificial Sequence: Synthetic oligonucleotide
  Antisense strand to SEQ ID NO: 991108
aauggagugacauaaaugc

SEQ ID NO: 991110 - RNA, 19 nt, Artificial Sequence
  Description of Artificial Sequence: Synthetic oligonucleotide
  Sense strand starting at position 1535 of SEQ ID NO: 914269
uuaacaaggucauugcuuu

SEQ ID NO: 991111 - RNA, 19 nt, Artificial Sequence
  Description of Artificial Sequence: Synthetic oligonucleotide
  Antisense strand to SEQ ID NO: 991110
aaagcaaugaccuuguuaa

SEQ ID NO: 991112 - RNA, 19 nt, Artificial Sequence
  Description of Artificial Sequence: Synthetic oligonucleotide
  Sense strand starting at position 1585 of SEQ ID NO: 914269
gauagaagccuaggugcaa

SEQ ID NO: 991113 - RNA, 19 nt, Artificial Sequence
  Description of Artificial Sequence: Synthetic oligonucleotide
  Antisense strand to SEQ ID NO: 991112
uugcaccuaggcuucuauc

SEQ ID NO: 991114 - RNA, 19 nt, Artificial Sequence
  Description of Artificial Sequence: Synthetic oligonucleotide
  Sense strand starting at position 1631 of SEQ ID NO: 914269
guugacagcucccuuaaug

SEQ ID NO: 991115 - RNA, 19 nt, Artificial Sequence
  Description of Artificial Sequence: Synthetic oligonucleotide
  Antisense strand to SEQ ID NO: 991114
cauuaagggagcugucaac

SEQ ID NO: 991116 - RNA, 19 nt, Artificial Sequence
  Description of Artificial Sequence: Synthetic oligonucleotide
  Sense strand starting at position 1696 of SEQ ID NO: 914269
guuggaugggcccaguaaa

SEQ ID NO: 991117 - RNA, 19 nt, Artificial Sequence
  Description of Artificial Sequence: Synthetic oligonucleotide
  Antisense strand to SEQ ID NO: 991116
uuuacugggcccauccaac

SEQ ID NO: 991118 - RNA, 19 nt, Artificial Sequence
  Description of Artificial Sequence: Synthetic oligonucleotide
  Sense strand starting at position 1765 of SEQ ID NO: 914269
agguauacucuuugauccu

SEQ ID NO: 991119 - RNA, 19 nt, Artificial Sequence
  Description of Artificial Sequence: Synthetic oligonucleotide
  Antisense strand to SEQ ID NO: 991118
aggaucaaagaguauaccu

SEQ ID NO: 991120 - RNA, 19 nt, Artificial Sequence
  Description of Artificial Sequence: Synthetic oligonucleotide
  Sense strand starting at position 1774 of SEQ ID NO: 914269
cuuugauccugucuacauc

SEQ ID NO: 991121 - RNA, 19 nt, Artificial Sequence
  Description of Artificial Sequence: Synthetic oligonucleotide
  Antisense strand to SEQ ID NO: 991120
gauguagacaggaucaaag

SEQ ID NO: 991122 - RNA, 19 nt, Artificial Sequence
  Description of Artificial Sequence: Synthetic oligonucleotide
  Sense strand starting at position 2242 of SEQ ID NO: 914269
cggugagcgcgcagacaua

SEQ ID NO: 991123 - RNA, 19 nt, Artificial Sequence
  Description of Artificial Sequence: Synthetic oligonucleotide
  Antisense strand to SEQ ID NO: 991122
uaugucugcgcgcucaccg

SEQ ID NO: 991124 - RNA, 19 nt, Artificial Sequence
  Description of Artificial Sequence: Synthetic oligonucleotide
  Sense strand starting at position 2257 of SEQ ID NO: 914269
cauagcuuuggcuggcaaa

SEQ ID NO: 991125 - RNA, 19 nt, Artificial Sequence
  Description of Artificial Sequence: Synthetic oligonucleotide
  Antisense strand to SEQ ID NO: 991124
uuugccagccaaagcuaug

SEQ ID NO: 991126 - RNA, 19 nt, Artificial Sequence
  Description of Artificial Sequence: Synthetic oligonucleotide
  Sense strand starting at position 2561 of SEQ ID NO: 914269
uacauagugagaugugaag

SEQ ID NO: 991127 - RNA, 19 nt, Artificial Sequence
  Description of Artificial Sequence: Synthetic oligonucleotide
  Antisense strand to SEQ ID NO: 991126
cuucacaucucacuaugua

SEQ ID NO: 991128 - RNA, 19 nt, Artificial Sequence
  Description of Artificial Sequence: Synthetic oligonucleotide
  Sense strand starting at position 2563 of SEQ ID NO: 914269
cauagugagaugugaagua

SEQ ID NO: 991129 - RNA, 19 nt, Artificial Sequence
  Description of Artificial Sequence: Synthetic oligonucleotide
  Antisense strand to SEQ ID NO: 991128
uacuucacaucucacuaug

SEQ ID NO: 991130 - RNA, 19 nt, Artificial Sequence
  Description of Artificial Sequence: Synthetic oligonucleotide
  Sense strand starting at position 2715 of SEQ ID NO: 914269
ccgguaauggcagagugua

SEQ ID NO: 991131 - RNA, 19 nt, Artificial Sequence
  Description of Artificial Sequence: Synthetic oligonucleotide
  Antisense strand to SEQ ID NO: 991130
uacacucugccauuaccgg

SEQ ID NO: 991132 - RNA, 19 nt, Artificial Sequence
  Description of Artificial Sequence: Synthetic oligonucleotide
  Sense strand starting at position 2725 of SEQ ID NO: 914269
cagaguguagacugaugaa

SEQ ID NO: 991133 - RNA, 19 nt, Artificial Sequence
  Description of Artificial Sequence: Synthetic oligonucleotide
  Antisense strand to SEQ ID NO: 991132
uucaucagucuacacucug

SEQ ID NO: 991134 - RNA, 19 nt, Artificial Sequence
  Description of Artificial Sequence: Synthetic oligonucleotide
  Sense strand starting at position 2739 of SEQ ID NO: 914269
augaaauucugugcggcaa

SEQ ID NO: 991135 - RNA, 19 nt, Artificial Sequence
  Description of Artificial Sequence: Synthetic oligonucleotide
  Antisense strand to SEQ ID NO: 991134
uugccgcacagaauuucau

SEQ ID NO: 991136 - RNA, 19 nt, Artificial Sequence
  Description of Artificial Sequence: Synthetic oligonucleotide
  Sense strand starting at position 2740 of SEQ ID NO: 914269
ugaaauucugugcggcaaa

SEQ ID NO: 991137 - RNA, 19 nt, Artificial Sequence
  Description of Artificial Sequence: Synthetic oligonucleotide
  Antisense strand to SEQ ID NO: 991136
uuugccgcacagaauuuca

SEQ ID NO: 991138 - RNA, 19 nt, Artificial Sequence
  Description of Artificial Sequence: Synthetic oligonucleotide
  Sense strand starting at position 2793 of SEQ ID NO: 914269
cggcauugugguaggcauu

SEQ ID NO: 991139 - RNA, 19 nt, Artificial Sequence
  Description of Artificial Sequence: Synthetic oligonucleotide
  Antisense strand to SEQ ID NO: 991138
aaugccuaccacaaugccg

SEQ ID NO: 991140 - RNA, 19 nt, Artificial Sequence
  Description of Artificial Sequence: Synthetic oligonucleotide
  Sense strand starting at position 2794 of SEQ ID NO: 914269
ggcauugugguaggcauuu

SEQ ID NO: 991141 - RNA, 19 nt, Artificial Sequence
  Description of Artificial Sequence: Synthetic oligonucleotide
  Antisense strand to SEQ ID NO: 991140
aaaugccuaccacaaugcc

SEQ ID NO: 991142 - RNA, 19 nt, Artificial Sequence
  Description of Artificial Sequence: Synthetic oligonucleotide
  Sense strand starting at position 2870 of SEQ ID NO: 914269
cuaaauaaacuuggagcua

SEQ ID NO: 991143 - RNA, 19 nt, Artificial Sequence
  Description of Artificial Sequence: Synthetic oligonucleotide
  Antisense strand to SEQ ID NO: 991142
uagcuccaaguuuauuuag

SEQ ID NO: 991144 - RNA, 19 nt, Artificial Sequence
  Description of Artificial Sequence: Synthetic oligonucleotide
  Sense strand starting at position 2886 of SEQ ID NO: 914269
cuaguaaaugguggagcua

SEQ ID NO: 991145 - RNA, 19 nt, Artificial Sequence
  Description of Artificial Sequence: Synthetic oligonucleotide
  Antisense strand to SEQ ID NO: 991144
uagcuccaccauuuacuag

SEQ ID NO: 991146 - RNA, 19 nt, Artificial Sequence
  Description of Artificial Sequence: Synthetic oligonucleotide
  Sense strand starting at position 2887 of SEQ ID NO: 914269
uaguaaaugguggagcuau

SEQ ID NO: 991147 - RNA, 19 nt, Artificial Sequence
  Description of Artificial Sequence: Synthetic oligonucleotide
  Antisense strand to SEQ ID NO: 991146
auagcuccaccauuuacua

SEQ ID NO: 991148 - RNA, 19 nt, Artificial Sequence
  Description of Artificial Sequence: Synthetic oligonucleotide
  Sense strand starting at position 2916 of SEQ ID NO: 914269
aggacuaucuuaccggaaa

SEQ ID NO: 991149 - RNA, 19 nt, Artificial Sequence
  Description of Artificial Sequence: Synthetic oligonucleotide
  Antisense strand to SEQ ID NO: 991148
uuuccgguaagauaguccu

SEQ ID NO: 991150 - RNA, 19 nt, Artificial Sequence
  Description of Artificial Sequence: Synthetic oligonucleotide
  Sense strand starting at position 2993 of SEQ ID NO: 914269
uuuauacuggcacauugau

SEQ ID NO: 991151 - RNA, 19 nt, Artificial Sequence
  Description of Artificial Sequence: Synthetic oligonucleotide
  Antisense strand to SEQ ID NO: 991150
aucaaugugccaguauaaa

SEQ ID NO: 991152 - RNA, 19 nt, Artificial Sequence
  Description of Artificial Sequence: Synthetic oligonucleotide
  Sense strand starting at position 3166 of SEQ ID NO: 914269
gucucagaagguugugauu

SEQ ID NO: 991153 - RNA, 19 nt, Artificial Sequence
  Description of Artificial Sequence: Synthetic oligonucleotide
  Antisense strand to SEQ ID NO: 991152
aaucacaaccuucugagac

SEQ ID NO: 991154 - RNA, 19 nt, Artificial Sequence
  Description of Artificial Sequence: Synthetic oligonucleotide
  Sense strand starting at position 3248 of SEQ ID NO: 914269
agucauuaguuaccaaguu

SEQ ID NO: 991155 - RNA, 19 nt, Artificial Sequence
  Description of Artificial Sequence: Synthetic oligonucleotide
  Antisense strand to SEQ ID NO: 991154
aacuugguaacuaaugacu

SEQ ID NO: 991156 - RNA, 19 nt, Artificial Sequence
  Description of Artificial Sequence: Synthetic oligonucleotide
  Sense strand starting at position 3404 of SEQ ID NO: 914269
gguucaagagauugucuug

SEQ ID NO: 991157 - RNA, 19 nt, Artificial Sequence
  Description of Artificial Sequence: Synthetic oligonucleotide
  Antisense strand to SEQ ID NO: 991156
caagacaaucucuugaacc

SEQ ID NO: 991158 - RNA, 19 nt, Artificial Sequence
  Description of Artificial Sequence: Synthetic oligonucleotide
  Sense strand starting at position 3487 of SEQ ID NO: 914269
agauuagguuucgucaugu

SEQ ID NO: 991159 - RNA, 19 nt, Artificial Sequence
  Description of Artificial Sequence: Synthetic oligonucleotide
  Antisense strand to SEQ ID NO: 991158
acaugacgaaaccuaaucu

SEQ ID NO: 991160 - RNA, 19 nt, Artificial Sequence
  Description of Artificial Sequence: Synthetic oligonucleotide
  Sense strand starting at position 3723 of SEQ ID NO: 914269
gugcaacauuaaccaguua

SEQ ID NO: 991161 - RNA, 19 nt, Artificial Sequence
  Description of Artificial Sequence: Synthetic oligonucleotide
  Antisense strand to SEQ ID NO: 991160
uaacugguuaauguugcac

SEQ ID NO: 991162 - RNA, 19 nt, Artificial Sequence
  Description of Artificial Sequence: Synthetic oligonucleotide
  Sense strand starting at position 3960 of SEQ ID NO: 914269
cuauaucucuguuuaugga

SEQ ID NO: 991163 - RNA, 19 nt, Artificial Sequence
  Description of Artificial Sequence: Synthetic oligonucleotide
  Antisense strand to SEQ ID NO: 991162
uccauaaacagagauauag

SEQ ID NO: 991164 - RNA, 19 nt, Artificial Sequence
  Description of Artificial Sequence: Synthetic oligonucleotide
  Sense strand starting at position 3974 of SEQ ID NO: 914269
auggauguccucugcccaa

SEQ ID NO: 991165 - RNA, 19 nt, Artificial Sequence
  Description of Artificial Sequence: Synthetic oligonucleotide
  Antisense strand to SEQ ID NO: 991164
uugggcagaggacauccau

SEQ ID NO: 991166 - RNA, 19 nt, Artificial Sequence
  Description of Artificial Sequence: Synthetic oligonucleotide
  Sense strand starting at position 23 of SEQ ID NO: 914270
gagaaugagaguuguccau

SEQ ID NO: 991167 - RNA, 19 nt, Artificial Sequence
  Description of Artificial Sequence: Synthetic oligonucleotide
  Antisense strand to SEQ ID NO: 991166
auggacaacucucauucuc

SEQ ID NO: 991168 - RNA, 19 nt, Artificial Sequence
  Description of Artificial Sequence: Synthetic oligonucleotide
  Sense strand starting at position 25 of SEQ ID NO: 914270
gaaugagaguuguccauau

SEQ ID NO: 991169 - RNA, 19 nt, Artificial Sequence
  Description of Artificial Sequence: Synthetic oligonucleotide
  Antisense strand to SEQ ID NO: 991168
auauggacaacucucauuc

SEQ ID NO: 991170 - RNA, 19 nt, Artificial Sequence
  Description of Artificial Sequence: Synthetic oligonucleotide
  Sense strand starting at position 29 of SEQ ID NO: 914270
gagaguuguccauauccac

SEQ ID NO: 991171 - RNA, 19 nt, Artificial Sequence
  Description of Artificial Sequence: Synthetic oligonucleotide
  Antisense strand to SEQ ID NO: 991170
guggauauggacaacucuc

SEQ ID NO: 991172 - RNA, 19 nt, Artificial Sequence
  Description of Artificial Sequence: Synthetic oligonucleotide
  Sense strand starting at position 256 of SEQ ID NO: 914270
uuuaguuaggauugugaac

SEQ ID NO: 991173 - RNA, 19 nt, Artificial Sequence
  Description of Artificial Sequence: Synthetic oligonucleotide
  Antisense strand to SEQ ID NO: 991172
guucacaauccuaacuaaa

SEQ ID NO: 991174 - RNA, 19 nt, Artificial Sequence
  Description of Artificial Sequence: Synthetic oligonucleotide
  Sense strand starting at position 418 of SEQ ID NO: 914270
guaaucuuaccauaguacu

SEQ ID NO: 991175 - RNA, 19 nt, Artificial Sequence
  Description of Artificial Sequence: Synthetic oligonucleotide
  Antisense strand to SEQ ID NO: 991174
aguacuaugguaagauuac

SEQ ID NO: 991176 - RNA, 19 nt, Artificial Sequence
  Description of Artificial Sequence: Synthetic oligonucleotide
  Sense strand starting at position 582 of SEQ ID NO: 914270
ggcuaagacuguuuccaag

SEQ ID NO: 991177 - RNA, 19 nt, Artificial Sequence
  Description of Artificial Sequence: Synthetic oligonucleotide
  Antisense strand to SEQ ID NO: 991176
cuuggaaacagucuuagcc

SEQ ID NO: 991178 - RNA, 19 nt, Artificial Sequence
  Description of Artificial Sequence: Synthetic oligonucleotide
  Sense strand starting at position 626 of SEQ ID NO: 914270
aucaaacuucccuggaagu

SEQ ID NO: 991179 - RNA, 19 nt, Artificial Sequence
  Description of Artificial Sequence: Synthetic oligonucleotide
  Antisense strand to SEQ ID NO: 991178
acuuccagggaaguuugau

SEQ ID NO: 991180 - RNA, 19 nt, Artificial Sequence
  Description of Artificial Sequence: Synthetic oligonucleotide
  Sense strand starting at position 627 of SEQ ID NO: 914270
ucaaacuucccuggaaguu

SEQ ID NO: 991181 - RNA, 19 nt, Artificial Sequence
  Description of Artificial Sequence: Synthetic oligonucleotide
  Antisense strand to SEQ ID NO: 991180
aacuuccagggaaguuuga

SEQ ID NO: 991182 - RNA, 19 nt, Artificial Sequence
  Description of Artificial Sequence: Synthetic oligonucleotide
  Sense strand starting at position 676 of SEQ ID NO: 914270
aaaucugauuuaggaugga

SEQ ID NO: 991183 - RNA, 19 nt, Artificial Sequence
  Description of Artificial Sequence: Synthetic oligonucleotide
  Antisense strand to SEQ ID NO: 991182
uccauccuaaaucagauuu

SEQ ID NO: 991184 - RNA, 19 nt, Artificial Sequence
  Description of Artificial Sequence: Synthetic oligonucleotide
  Sense strand starting at position 711 of SEQ ID NO: 914270
uauaacaagcaguguaaga

SEQ ID NO: 991185 - RNA, 19 nt, Artificial Sequence
  Description of Artificial Sequence: Synthetic oligonucleotide
  Antisense strand to SEQ ID NO: 991184
ucuuacacugcuuguuaua

SEQ ID NO: 991186 - RNA, 19 nt, Artificial Sequence
  Description of Artificial Sequence: Synthetic oligonucleotide
  Sense strand starting at position 713 of SEQ ID NO: 914270
uaacaagcaguguaagauu

SEQ ID NO: 991187 - RNA, 19 nt, Artificial Sequence
  Description of Artificial Sequence: Synthetic oligonucleotide
  Antisense strand to SEQ ID NO: 991186
aaucuuacacugcuuguua

SEQ ID NO: 991188 - RNA, 19 nt, Artificial Sequence
  Description of Artificial Sequence: Synthetic oligonucleotide
  Sense strand starting at position 721 of SEQ ID NO: 914270
aguguaagauuugacacaa

SEQ ID NO: 991189 - RNA, 19 nt, Artificial Sequence
  Description of Artificial Sequence: Synthetic oligonucleotide
  Antisense strand to SEQ ID NO: 991188
uugugucaaaucuuacacu

SEQ ID NO: 991190 - RNA, 19 nt, Artificial Sequence
  Description of Artificial Sequence: Synthetic oligonucleotide
  Sense strand starting at position 975 of SEQ ID NO: 914270
guuccacaucuguaaucua

SEQ ID NO: 991191 - RNA, 19 nt, Artificial Sequence
  Description of Artificial Sequence: Synthetic oligonucleotide
  Antisense strand to SEQ ID NO: 991190
uagauuacagauguggaac

SEQ ID NO: 991192 - RNA, 19 nt, Artificial Sequence
  Description of Artificial Sequence: Synthetic oligonucleotide
  Sense strand starting at position 1067 of SEQ ID NO: 914270
gcuugcuuagacuauagau

SEQ ID NO: 991193 - RNA, 19 nt, Artificial Sequence
  Description of Artificial Sequence: Synthetic oligonucleotide
  Antisense strand to SEQ ID NO: 991192
aucuauagucuaagcaagc

SEQ ID NO: 991194 - RNA, 19 nt, Artificial Sequence
  Description of Artificial Sequence: Synthetic oligonucleotide
  Sense strand starting at position 1069 of SEQ ID NO: 914270
uugcuuagacuauagauuc

SEQ ID NO: 991195 - RNA, 19 nt, Artificial Sequence
  Description of Artificial Sequence: Synthetic oligonucleotide
  Antisense strand to SEQ ID NO: 991194
gaaucuauagucuaagcaa

SEQ ID NO: 991196 - RNA, 19 nt, Artificial Sequence
  Description of Artificial Sequence: Synthetic oligonucleotide
  Sense strand starting at position 1167 of SEQ ID NO: 914270
agaugauaagcauguaauu

SEQ ID NO: 991197 - RNA, 19 nt, Artificial Sequence
  Description of Artificial Sequence: Synthetic oligonucleotide
  Antisense strand to SEQ ID NO: 991196
aauuacaugcuuaucaucu

SEQ ID NO: 991198 - RNA, 19 nt, Artificial Sequence
  Description of Artificial Sequence: Synthetic oligonucleotide
  Sense strand starting at position 1218 of SEQ ID NO: 914270
cugccaucugcccagaaga

SEQ ID NO: 991199 - RNA, 19 nt, Artificial Sequence
  Description of Artificial Sequence: Synthetic oligonucleotide
  Antisense strand to SEQ ID NO: 991198
ucuucugggcagauggcag

SEQ ID NO: 991200 - RNA, 19 nt, Artificial Sequence
  Description of Artificial Sequence: Synthetic oligonucleotide
  Sense strand starting at position 1384 of SEQ ID NO: 914270
agccauauguuauuugcca

SEQ ID NO: 991201 - RNA, 19 nt, Artificial Sequence
  Description of Artificial Sequence: Synthetic oligonucleotide
  Antisense strand to SEQ ID NO: 991200
uggcaaauaacauauggcu

SEQ ID NO: 991202 - RNA, 19 nt, Artificial Sequence
  Description of Artificial Sequence: Synthetic oligonucleotide
  Sense strand starting at position 1511 of SEQ ID NO: 914270
gcacauaaagcuugagaac

SEQ ID NO: 991203 - RNA, 19 nt, Artificial Sequence
  Description of Artificial Sequence: Synthetic oligonucleotide
  Antisense strand to SEQ ID NO: 991202
guucucaagcuuuaugugc

SEQ ID NO: 991204 - RNA, 19 nt, Artificial Sequence
  Description of Artificial Sequence: Synthetic oligonucleotide
  Sense strand starting at position 2249 of SEQ ID NO: 914270
acuggagauguccaagcau

SEQ ID NO: 991205 - RNA, 19 nt, Artificial Sequence
  Description of Artificial Sequence: Synthetic oligonucleotide
  Antisense strand to SEQ ID NO: 991204
augcuuggacaucuccagu

SEQ ID NO: 991206 - RNA, 19 nt, Artificial Sequence
  Description of Artificial Sequence: Synthetic oligonucleotide
  Sense strand starting at position 2508 of SEQ ID NO: 914270
uaagcaaauuugcuugagu

SEQ ID NO: 991207 - RNA, 19 nt, Artificial Sequence
  Description of Artificial Sequence: Synthetic oligonucleotide
  Antisense strand to SEQ ID NO: 991206
acucaagcaaauuugcuua

SEQ ID NO: 991208 - RNA, 19 nt, Artificial Sequence
  Description of Artificial Sequence: Synthetic oligonucleotide
  Sense strand starting at position 2556 of SEQ ID NO: 914270
accacuuacuaguuguaua

SEQ ID NO: 991209 - RNA, 19 nt, Artificial Sequence
  Description of Artificial Sequence: Synthetic oligonucleotide
  Antisense strand to SEQ ID NO: 991208
uauacaacuaguaaguggu

SEQ ID NO: 991210 - RNA, 19 nt, Artificial Sequence
  Description of Artificial Sequence: Synthetic oligonucleotide
  Sense strand starting at position 2566 of SEQ ID NO: 914270
aguuguauaaucuagggca

SEQ ID NO: 991211 - RNA, 19 nt, Artificial Sequence
  Description of Artificial Sequence: Synthetic oligonucleotide
  Antisense strand to SEQ ID NO: 991210
ugcccuagauuauacaacu

SEQ ID NO: 991212 - RNA, 19 nt, Artificial Sequence
  Description of Artificial Sequence: Synthetic oligonucleotide
  Sense strand starting at position 2568 of SEQ ID NO: 914270
uuguauaaucuagggcaag

SEQ ID NO: 991213 - RNA, 19 nt, Artificial Sequence
  Description of Artificial Sequence: Synthetic oligonucleotide
  Antisense strand to SEQ ID NO: 991212
cuugcccuagauuauacaa

SEQ ID NO: 991214 - RNA, 19 nt, Artificial Sequence
  Description of Artificial Sequence: Synthetic oligonucleotide
  Sense strand starting at position 2759 of SEQ ID NO: 914270
uguacuuuacaguaugaaa

SEQ ID NO: 991215 - RNA, 19 nt, Artificial Sequence
  Description of Artificial Sequence: Synthetic oligonucleotide
  Antisense strand to SEQ ID NO: 991214
uuucauacuguaaaguaca

SEQ ID NO: 991216 - RNA, 19 nt, Artificial Sequence
  Description of Artificial Sequence: Synthetic oligonucleotide
  Sense strand starting at position 2835 of SEQ ID NO: 914270
aaaguauagucacugugga

SEQ ID NO: 991217 - RNA, 19 nt, Artificial Sequence
  Description of Artificial Sequence: Synthetic oligonucleotide
  Antisense strand to SEQ ID NO: 991216
uccacagugacuauacuuu

SEQ ID NO: 991218 - RNA, 19 nt, Artificial Sequence
  Description of Artificial Sequence: Synthetic oligonucleotide
  Sense strand starting at position 2836 of SEQ ID NO: 914270
aaguauagucacuguggaa

SEQ ID NO: 991219 - RNA, 19 nt, Artificial Sequence
  Description of Artificial Sequence: Synthetic oligonucleotide
  Antisense strand to SEQ ID NO: 991218
uuccacagugacuauacuu

SEQ ID NO: 991220 - RNA, 19 nt, Artificial Sequence
  Description of Artificial Sequence: Synthetic oligonucleotide
  Sense strand starting at position 2890 of SEQ ID NO: 914270
caggaagcucauuauaggu

SEQ ID NO: 991221 - RNA, 19 nt, Artificial Sequence
  Description of Artificial Sequence: Synthetic oligonucleotide
  Antisense strand to SEQ ID NO: 991220
accuauaaugagcuuccug

SEQ ID NO: 991222 - RNA, 19 nt, Artificial Sequence
  Description of Artificial Sequence: Synthetic oligonucleotide
  Sense strand starting at position 2905 of SEQ ID NO: 914270
agguacaccucaucaaugu

SEQ ID NO: 991223 - RNA, 19 nt, Artificial Sequence
  Description of Artificial Sequence: Synthetic oligonucleotide
  Antisense strand to SEQ ID NO: 991222
acauugaugagguguaccu

SEQ ID NO: 991224 - RNA, 19 nt, Artificial Sequence
  Description of Artificial Sequence: Synthetic oligonucleotide
  Sense strand starting at position 2916 of SEQ ID NO: 914270
aucaauguguaccuauauu

SEQ ID NO: 991225 - RNA, 19 nt, Artificial Sequence
  Description of Artificial Sequence: Synthetic oligonucleotide
  Antisense strand to SEQ ID NO: 991224
aauauagguacacauugau

SEQ ID NO: 991226 - RNA, 19 nt, Artificial Sequence
  Description of Artificial Sequence: Synthetic oligonucleotide
  Sense strand starting at position 3231 of SEQ ID NO: 914270
uacguaguguauuucucaa

SEQ ID NO: 991227 - RNA, 19 nt, Artificial Sequence
  Description of Artificial Sequence: Synthetic oligonucleotide
  Antisense strand to SEQ ID NO: 991226
uugagaaauacacuacgua

SEQ ID NO: 991228 - RNA, 19 nt, Artificial Sequence
  Description of Artificial Sequence: Synthetic oligonucleotide
  Sense strand starting at position 3233 of SEQ ID NO: 914270
cguaguguauuucucaaag

SEQ ID NO: 991229 - RNA, 19 nt, Artificial Sequence
  Description of Artificial Sequence: Synthetic oligonucleotide
  Antisense strand to SEQ ID NO: 991228
cuuugagaaauacacuacg

SEQ ID NO: 991230 - RNA, 19 nt, Artificial Sequence
  Description of Artificial Sequence: Synthetic oligonucleotide
  Sense strand starting at position 3383 of SEQ ID NO: 914270
augacaaauuguucugguu

SEQ ID NO: 991231 - RNA, 19 nt, Artificial Sequence
  Description of Artificial Sequence: Synthetic oligonucleotide
  Antisense strand to SEQ ID NO: 991230
aaccagaacaauuugucau

SEQ ID NO: 991232 - RNA, 19 nt, Artificial Sequence
  Description of Artificial Sequence: Synthetic oligonucleotide
  Sense strand starting at position 3430 of SEQ ID NO: 914270
acaggacuuuaagugcuaa

SEQ ID NO: 991233 - RNA, 19 nt, Artificial Sequence
  Description of Artificial Sequence: Synthetic oligonucleotide
  Antisense strand to SEQ ID NO: 991232
uuagcacuuaaaguccugu

SEQ ID NO: 991234 - RNA, 19 nt, Artificial Sequence
  Description of Artificial Sequence: Synthetic oligonucleotide
  Sense strand starting at position 3491 of SEQ ID NO: 914270
agacgaugcgaguauauag

SEQ ID NO: 991235 - RNA, 19 nt, Artificial Sequence
  Description of Artificial Sequence: Synthetic oligonucleotide
  Antisense strand to SEQ ID NO: 991234
cuauauacucgcaucgucu

SEQ ID NO: 991236 - RNA, 19 nt, Artificial Sequence
  Description of Artificial Sequence: Synthetic oligonucleotide
  Sense strand starting at position 3568 of SEQ ID NO: 914270
auuugaaguguuugaguuu

SEQ ID NO: 991237 - RNA, 19 nt, Artificial Sequence
  Description of Artificial Sequence: Synthetic oligonucleotide
  Antisense strand to SEQ ID NO: 991236
aaacucaaacacuucaaau

SEQ ID NO: 991238 - RNA, 19 nt, Artificial Sequence
  Description of Artificial Sequence: Synthetic oligonucleotide
  Sense strand starting at position 3690 of SEQ ID NO: 914270
cccuguuugcaauauugga

SEQ ID NO: 991239 - RNA, 19 nt, Artificial Sequence
  Description of Artificial Sequence: Synthetic oligonucleotide
  Antisense strand to SEQ ID NO: 991238
uccaauauugcaaacaggg

SEQ ID NO: 991240 - RNA, 19 nt, Artificial Sequence
  Description of Artificial Sequence: Synthetic oligonucleotide
  Sense strand starting at position 3698 of SEQ ID NO: 914270
gcaauauuggaagguuucu

SEQ ID NO: 991241 - RNA, 19 nt, Artificial Sequence
  Description of Artificial Sequence: Synthetic oligonucleotide
  Antisense strand to SEQ ID NO: 991240
agaaaccuuccaauauugc

SEQ ID NO: 991242 - RNA, 19 nt, Artificial Sequence
  Description of Artificial Sequence: Synthetic oligonucleotide
  Sense strand starting at position 3746 of SEQ ID NO: 914270
gcuucaucaguggagggua

SEQ ID NO: 991243 - RNA, 19 nt, Artificial Sequence
  Description of Artificial Sequence: Synthetic oligonucleotide
  Antisense strand to SEQ ID NO: 991242
uacccuccacugaugaagc

SEQ ID NO: 991244 - RNA, 19 nt, Artificial Sequence
  Description of Artificial Sequence: Synthetic oligonucleotide
  Sense strand starting at position 3959 of SEQ ID NO: 914270
ugcuuagacccagauaacu

SEQ ID NO: 991245 - RNA, 19 nt, Artificial Sequence
  Description of Artificial Sequence: Synthetic oligonucleotide
  Antisense strand to SEQ ID NO: 991244
aguuaucugggucuaagca

SEQ ID NO: 991246 - RNA, 19 nt, Artificial Sequence
  Description of Artificial Sequence: Synthetic oligonucleotide
  Sense strand starting at position 50 of SEQ ID NO: 914271
aaugucugccacuaagagu

SEQ ID NO: 991247 - RNA, 19 nt, Artificial Sequence
  Description of Artificial Sequence: Synthetic oligonucleotide
  Antisense strand to SEQ ID NO: 991246
acucuuaguggcagacauu

SEQ ID NO: 991248 - RNA, 19 nt, Artificial Sequence
  Description of Artificial Sequence: Synthetic oligonucleotide
  Sense strand starting at position 144 of SEQ ID NO: 914271
auuauugcacgugaagaaa

SEQ ID NO: 991249 - RNA, 19 nt, Artificial Sequence
  Description of Artificial Sequence: Synthetic oligonucleotide
  Antisense strand to SEQ ID NO: 991248
uuucuucacgugcaauaau

SEQ ID NO: 991250 - RNA, 19 nt, Artificial Sequence
  Description of Artificial Sequence: Synthetic oligonucleotide
  Sense strand starting at position 354 of SEQ ID NO: 914271
ugugacauuacuggaguga

SEQ ID NO: 991251 - RNA, 19 nt, Artificial Sequence
  Description of Artificial Sequence: Synthetic oligonucleotide
  Antisense strand to SEQ ID NO: 991250
ucacuccaguaaugucaca

SEQ ID NO: 991252 - RNA, 19 nt, Artificial Sequence
  Description of Artificial Sequence: Synthetic oligonucleotide
  Sense strand starting at position 358 of SEQ ID NO: 914271
acauuacuggagugaaguc

SEQ ID NO: 991253 - RNA, 19 nt, Artificial Sequence
  Description of Artificial Sequence: Synthetic oligonucleotide
  Antisense strand to SEQ ID NO: 991252
gacuucacuccaguaaugu

SEQ ID NO: 991254 - RNA, 19 nt, Artificial Sequence
  Description of Artificial Sequence: Synthetic oligonucleotide
  Sense strand starting at position 455 of SEQ ID NO: 914271
aaguuuggagauuaugcau

SEQ ID NO: 991255 - RNA, 19 nt, Artificial Sequence
  Description of Artificial Sequence: Synthetic oligonucleotide
  Antisense strand to SEQ ID NO: 991254
augcauaaucuccaaacuu

SEQ ID NO: 991256 - RNA, 19 nt, Artificial Sequence
  Description of Artificial Sequence: Synthetic oligonucleotide
  Sense strand starting at position 560 of SEQ ID NO: 914271
gcccuccuugaauaauaga

SEQ ID NO: 991257 - RNA, 19 nt, Artificial Sequence
  Description of Artificial Sequence: Synthetic oligonucleotide
  Antisense strand to SEQ ID NO: 991256
ucuauuauucaaggagggc

SEQ ID NO: 991258 - RNA, 19 nt, Artificial Sequence
  Description of Artificial Sequence: Synthetic oligonucleotide
  Sense strand starting at position 743 of SEQ ID NO: 914271
guauacagaguuuacauau

SEQ ID NO: 991259 - RNA, 19 nt, Artificial Sequence
  Description of Artificial Sequence: Synthetic oligonucleotide
  Antisense strand to SEQ ID NO: 991258
auauguaaacucuguauac

SEQ ID NO: 991260 - RNA, 19 nt, Artificial Sequence
  Description of Artificial Sequence: Synthetic oligonucleotide
  Sense strand starting at position 793 of SEQ ID NO: 914271
auggguugccuccagggaa

SEQ ID NO: 991261 - RNA, 19 nt, Artificial Sequence
  Description of Artificial Sequence: Synthetic oligonucleotide
  Antisense strand to SEQ ID NO: 991260
uucccuggaggcaacccau

SEQ ID NO: 991262 - RNA, 19 nt, Artificial Sequence
  Description of Artificial Sequence: Synthetic oligonucleotide
  Sense strand starting at position 1212 of SEQ ID NO: 914271
ccagaauucugaguuuggu

SEQ ID NO: 991263 - RNA, 19 nt, Artificial Sequence
  Description of Artificial Sequence: Synthetic oligonucleotide
  Antisense strand to SEQ ID NO: 991262
accaaacucagaauucugg

SEQ ID NO: 991264 - RNA, 19 nt, Artificial Sequence
  Description of Artificial Sequence: Synthetic oligonucleotide
  Sense strand starting at position 1265 of SEQ ID NO: 914271
ggaccucuaucucuagagu

SEQ ID NO: 991265 - RNA, 19 nt, Artificial Sequence
  Description of Artificial Sequence: Synthetic oligonucleotide
  Antisense strand to SEQ ID NO: 991264
acucuagagauagaggucc

SEQ ID NO: 991266 - RNA, 19 nt, Artificial Sequence
  Description of Artificial Sequence: Synthetic oligonucleotide
  Sense strand starting at position 1268 of SEQ ID NO: 914271
ccucuaucucuagaguucu

SEQ ID NO: 991267 - RNA, 19 nt, Artificial Sequence
  Description of Artificial Sequence: Synthetic oligonucleotide
  Antisense strand to SEQ ID NO: 991266
agaacucuagagauagagg

SEQ ID NO: 991268 - RNA, 19 nt, Artificial Sequence
  Description of Artificial Sequence: Synthetic oligonucleotide
  Sense strand starting at position 1274 of SEQ ID NO: 914271
ucucuagaguucucacaug

SEQ ID NO: 991269 - RNA, 19 nt, Artificial Sequence
  Description of Artificial Sequence: Synthetic oligonucleotide
  Antisense strand to SEQ ID NO: 991268
caugugagaacucuagaga

SEQ ID NO: 991270 - RNA, 19 nt, Artificial Sequence
  Description of Artificial Sequence: Synthetic oligonucleotide
  Sense strand starting at position 1280 of SEQ ID NO: 914271
gaguucucacaugguauua

SEQ ID NO: 991271 - RNA, 19 nt, Artificial Sequence
  Description of Artificial Sequence: Synthetic oligonucleotide
  Antisense strand to SEQ ID NO: 991270
uaauaccaugugagaacuc

SEQ ID NO: 991272 - RNA, 19 nt, Artificial Sequence
  Description of Artificial Sequence: Synthetic oligonucleotide
  Sense strand starting at position 1833 of SEQ ID NO: 914271
cccguaugcccgccaguaa

SEQ ID NO: 991273 - RNA, 19 nt, Artificial Sequence
  Description of Artificial Sequence: Synthetic oligonucleotide
  Antisense strand to SEQ ID NO: 991272
uuacuggcgggcauacggg

SEQ ID NO: 991274 - RNA, 19 nt, Artificial Sequence
  Description of Artificial Sequence: Synthetic oligonucleotide
  Sense strand starting at position 2101 of SEQ ID NO: 914271
uuguaaagugcugucuguu

SEQ ID NO: 991275 - RNA, 19 nt, Artificial Sequence
  Description of Artificial Sequence: Synthetic oligonucleotide
  Antisense strand to SEQ ID NO: 991274
aacagacagcacuuuacaa

SEQ ID NO: 991276 - RNA, 19 nt, Artificial Sequence
  Description of Artificial Sequence: Synthetic oligonucleotide
  Sense strand starting at position 2260 of SEQ ID NO: 914271
cuauucuucgugcauauuu

SEQ ID NO: 991277 - RNA, 19 nt, Artificial Sequence
  Description of Artificial Sequence: Synthetic oligonucleotide
  Antisense strand to SEQ ID NO: 991276
aaauaugcacgaagaauag

SEQ ID NO: 991278 - RNA, 19 nt, Artificial Sequence
  Description of Artificial Sequence: Synthetic oligonucleotide
  Sense strand starting at position 2268 of SEQ ID NO: 914271
cgugcauauuuccuccuga

SEQ ID NO: 991279 - RNA, 19 nt, Artificial Sequence
  Description of Artificial Sequence: Synthetic oligonucleotide
  Antisense strand to SEQ ID NO: 991278
ucaggaggaaauaugcacg

SEQ ID NO: 991280 - RNA, 19 nt, Artificial Sequence
  Description of Artificial Sequence: Synthetic oligonucleotide
  Sense strand starting at position 2269 of SEQ ID NO: 914271
gugcauauuuccuccugaa

SEQ ID NO: 991281 - RNA, 19 nt, Artificial Sequence
  Description of Artificial Sequence: Synthetic oligonucleotide
  Antisense strand to SEQ ID NO: 991280
uucaggaggaaauaugcac

SEQ ID NO: 991282 - RNA, 19 nt, Artificial Sequence
  Description of Artificial Sequence: Synthetic oligonucleotide
  Sense strand starting at position 2281 of SEQ ID NO: 914271
uccugaaucuuauuagagg

SEQ ID NO: 991283 - RNA, 19 nt, Artificial Sequence
  Description of Artificial Sequence: Synthetic oligonucleotide
  Antisense strand to SEQ ID NO: 991282
ccucuaauaagauucagga

SEQ ID NO: 991284 - RNA, 19 nt, Artificial Sequence
  Description of Artificial Sequence: Synthetic oligonucleotide
  Sense strand starting at position 2497 of SEQ ID NO: 914271
auuugucucucagcuguaa

SEQ ID NO: 991285 - RNA, 19 nt, Artificial Sequence
  Description of Artificial Sequence: Synthetic oligonucleotide
  Antisense strand to SEQ ID NO: 991284
uuacagcugagagacaaau

SEQ ID NO: 991286 - RNA, 19 nt, Artificial Sequence
  Description of Artificial Sequence: Synthetic oligonucleotide
  Sense strand starting at position 2745 of SEQ ID NO: 914271
uuccuaaauugucugagac

SEQ ID NO: 991287 - RNA, 19 nt, Artificial Sequence
  Description of Artificial Sequence: Synthetic oligonucleotide
  Antisense strand to SEQ ID NO: 991286
gucucagacaauuuaggaa

SEQ ID NO: 991288 - RNA, 19 nt, Artificial Sequence
  Description of Artificial Sequence: Synthetic oligonucleotide
  Sense strand starting at position 2810 of SEQ ID NO: 914271
gggucugaaagauggcauu

SEQ ID NO: 991289 - RNA, 19 nt, Artificial Sequence
  Description of Artificial Sequence: Synthetic oligonucleotide
  Antisense strand to SEQ ID NO: 991288
aaugccaucuuucagaccc

SEQ ID NO: 991290 - RNA, 19 nt, Artificial Sequence
  Description of Artificial Sequence: Synthetic oligonucleotide
  Sense strand starting at position 2846 of SEQ ID NO: 914271
ggaagugaauaugcaugaa

SEQ ID NO: 991291 - RNA, 19 nt, Artificial Sequence
  Description of Artificial Sequence: Synthetic oligonucleotide
  Antisense strand to SEQ ID NO: 991290
uucaugcauauucacuucc

SEQ ID NO: 991292 - RNA, 19 nt, Artificial Sequence
  Description of Artificial Sequence: Synthetic oligonucleotide
  Sense strand starting at position 2878 of SEQ ID NO: 914271
uggugaguaccacagagua

SEQ ID NO: 991293 - RNA, 19 nt, Artificial Sequence
  Description of Artificial Sequence: Synthetic oligonucleotide
  Antisense strand to SEQ ID NO: 991292
uacucugugguacucacca

SEQ ID NO: 991294 - RNA, 19 nt, Artificial Sequence
  Description of Artificial Sequence: Synthetic oligonucleotide
  Sense strand starting at position 2880 of SEQ ID NO: 914271
gugaguaccacagaguaau

SEQ ID NO: 991295 - RNA, 19 nt, Artificial Sequence
  Description of Artificial Sequence: Synthetic oligonucleotide
  Antisense strand to SEQ ID NO: 991294
auuacucugugguacucac

SEQ ID NO: 991296 - RNA, 19 nt, Artificial Sequence
  Description of Artificial Sequence: Synthetic oligonucleotide
  Sense strand starting at position 2933 of SEQ ID NO: 914271
gacagaauucuguaggccu

SEQ ID NO: 991297 - RNA, 19 nt, Artificial Sequence
  Description of Artificial Sequence: Synthetic oligonucleotide
  Antisense strand to SEQ ID NO: 991296
aggccuacagaauucuguc

SEQ ID NO: 991298 - RNA, 19 nt, Artificial Sequence
  Description of Artificial Sequence: Synthetic oligonucleotide
  Sense strand starting at position 3141 of SEQ ID NO: 914271
gagggugaugauuagcagu

SEQ ID NO: 991299 - RNA, 19 nt, Artificial Sequence
  Description of Artificial Sequence: Synthetic oligonucleotide
  Antisense strand to SEQ ID NO: 991298
acugcuaaucaucacccuc

SEQ ID NO: 991300 - RNA, 19 nt, Artificial Sequence
  Description of Artificial Sequence: Synthetic oligonucleotide
  Sense strand starting at position 3158 of SEQ ID NO: 914271
guuguuccugcucuguuau

SEQ ID NO: 991301 - RNA, 19 nt, Artificial Sequence
  Description of Artificial Sequence: Synthetic oligonucleotide
  Antisense strand to SEQ ID NO: 991300
auaacagagcaggaacaac

SEQ ID NO: 991302 - RNA, 19 nt, Artificial Sequence
  Description of Artificial Sequence: Synthetic oligonucleotide
  Sense strand starting at position 3164 of SEQ ID NO: 914271
ccugcucuguuauuuguua

SEQ ID NO: 991303 - RNA, 19 nt, Artificial Sequence
  Description of Artificial Sequence: Synthetic oligonucleotide
  Antisense strand to SEQ ID NO: 991302
uaacaaauaacagagcagg

SEQ ID NO: 991304 - RNA, 19 nt, Artificial Sequence
  Description of Artificial Sequence: Synthetic oligonucleotide
  Sense strand starting at position 3214 of SEQ ID NO: 914271
ugguuuaugagcuauguga

SEQ ID NO: 991305 - RNA, 19 nt, Artificial Sequence
  Description of Artificial Sequence: Synthetic oligonucleotide
  Antisense strand to SEQ ID NO: 991304
ucacauagcucauaaacca

SEQ ID NO: 991306 - RNA, 19 nt, Artificial Sequence
  Description of Artificial Sequence: Synthetic oligonucleotide
  Sense strand starting at position 3262 of SEQ ID NO: 914271
ggaaucaccuucccauguu

SEQ ID NO: 991307 - RNA, 19 nt, Artificial Sequence
  Description of Artificial Sequence: Synthetic oligonucleotide
  Antisense strand to SEQ ID NO: 991306
aacaugggaaggugauucc

SEQ ID NO: 991308 - RNA, 19 nt, Artificial Sequence
  Description of Artificial Sequence: Synthetic oligonucleotide
  Sense strand starting at position 3272 of SEQ ID NO: 914271
ucccauguuguugauacaa

SEQ ID NO: 991309 - RNA, 19 nt, Artificial Sequence
  Description of Artificial Sequence: Synthetic oligonucleotide
  Antisense strand to SEQ ID NO: 991308
uuguaucaacaacauggga

SEQ ID NO: 991310 - RNA, 19 nt, Artificial Sequence
  Description of Artificial Sequence: Synthetic oligonucleotide
  Sense strand starting at position 3383 of SEQ ID NO: 914271
gcggaaugauuugugugga

SEQ ID NO: 991311 - RNA, 19 nt, Artificial Sequence
  Description of Artificial Sequence: Synthetic oligonucleotide
  Antisense strand to SEQ ID NO: 991310
uccacacaaaucauuccgc

SEQ ID NO: 991312 - RNA, 19 nt, Artificial Sequence
  Description of Artificial Sequence: Synthetic oligonucleotide
  Sense strand starting at position 3393 of SEQ ID NO: 914271
uuguguggagaauagguua

SEQ ID NO: 991313 - RNA, 19 nt, Artificial Sequence
  Description of Artificial Sequence: Synthetic oligonucleotide
  Antisense strand to SEQ ID NO: 991312
uaaccuauucuccacacaa

SEQ ID NO: 991314 - RNA, 19 nt, Artificial Sequence
  Description of Artificial Sequence: Synthetic oligonucleotide
  Sense strand starting at position 3396 of SEQ ID NO: 914271
uguggagaauagguuacaa

SEQ ID NO: 991315 - RNA, 19 nt, Artificial Sequence
  Description of Artificial Sequence: Synthetic oligonucleotide
  Antisense strand to SEQ ID NO: 991314
uuguaaccuauucuccaca

SEQ ID NO: 991316 - RNA, 19 nt, Artificial Sequence
  Description of Artificial Sequence: Synthetic oligonucleotide
  Sense strand starting at position 3450 of SEQ ID NO: 914271
ugcaauagucuaggaaaga

SEQ ID NO: 991317 - RNA, 19 nt, Artificial Sequence
  Description of Artificial Sequence: Synthetic oligonucleotide
  Antisense strand to SEQ ID NO: 991316
ucuuuccuagacuauugca

SEQ ID NO: 991318 - RNA, 19 nt, Artificial Sequence
  Description of Artificial Sequence: Synthetic oligonucleotide
  Sense strand starting at position 3669 of SEQ ID NO: 914271
guuugagcuguccaacaua

SEQ ID NO: 991319 - RNA, 19 nt, Artificial Sequence
  Description of Artificial Sequence: Synthetic oligonucleotide
  Antisense strand to SEQ ID NO: 991318
uauguuggacagcucaaac

SEQ ID NO: 991320 - RNA, 19 nt, Artificial Sequence
  Description of Artificial Sequence: Synthetic oligonucleotide
  Sense strand starting at position 3672 of SEQ ID NO: 914271
ugagcuguccaacauaaua

SEQ ID NO: 991321 - RNA, 19 nt, Artificial Sequence
  Description of Artificial Sequence: Synthetic oligonucleotide
  Antisense strand to SEQ ID NO: 991320
uauuauguuggacagcuca

SEQ ID NO: 991322 - RNA, 19 nt, Artificial Sequence
  Description of Artificial Sequence: Synthetic oligonucleotide
  Sense strand starting at position 3878 of SEQ ID NO: 914271
cucaguauuuguccugcuu

SEQ ID NO: 991323 - RNA, 19 nt, Artificial Sequence
  Description of Artificial Sequence: Synthetic oligonucleotide
  Antisense strand to SEQ ID NO: 991322
aagcaggacaaauacugag

SEQ ID NO: 991324 - RNA, 19 nt, Artificial Sequence
  Description of Artificial Sequence: Synthetic oligonucleotide
  Sense strand starting at position 3954 of SEQ ID NO: 914271
acgaucugaucacuuacuu

SEQ ID NO: 991325 - RNA, 19 nt, Artificial Sequence
  Description of Artificial Sequence: Synthetic oligonucleotide
  Antisense strand to SEQ ID NO: 991324
aaguaagugaucagaucgu

SEQ ID NO: 991326 - RNA, 19 nt, Artificial Sequence
  Description of Artificial Sequence: Synthetic oligonucleotide
  Sense strand starting at position 62 of SEQ ID NO: 914272
caagcauaugacugugaau

SEQ ID NO: 991327 - RNA, 19 nt, Artificial Sequence
  Description of Artificial Sequence: Synthetic oligonucleotide
  Antisense strand to SEQ ID NO: 991326
auucacagucauaugcuug

SEQ ID NO: 991328 - RNA, 19 nt, Artificial Sequence
  Description of Artificial Sequence: Synthetic oligonucleotide
  Sense strand starting at position 64 of SEQ ID NO: 914272
agcauaugacugugaaugu

SEQ ID NO: 991329 - RNA, 19 nt, Artificial Sequence
  Description of Artificial Sequence: Synthetic oligonucleotide
  Antisense strand to SEQ ID NO: 991328
acauucacagucauaugcu

SEQ ID NO: 991330 - RNA, 19 nt, Artificial Sequence
  Description of Artificial Sequence: Synthetic oligonucleotide
  Sense strand starting at position 73 of SEQ ID NO: 914272
cugugaauguuugucagca

SEQ ID NO: 991331 - RNA, 19 nt, Artificial Sequence
  Description of Artificial Sequence: Synthetic oligonucleotide
  Antisense strand to SEQ ID NO: 991330
ugcugacaaacauucacag

SEQ ID NO: 991332 - RNA, 19 nt, Artificial Sequence
  Description of Artificial Sequence: Synthetic oligonucleotide
  Sense strand starting at position 74 of SEQ ID NO: 914272
ugugaauguuugucagcag

SEQ ID NO: 991333 - RNA, 19 nt, Artificial Sequence
  Description of Artificial Sequence: Synthetic oligonucleotide
  Antisense strand to SEQ ID NO: 991332
cugcugacaaacauucaca

SEQ ID NO: 991334 - RNA, 19 nt, Artificial Sequence
  Description of Artificial Sequence: Synthetic oligonucleotide
  Sense strand starting at position 77 of SEQ ID NO: 914272
gaauguuugucagcagcca

SEQ ID NO: 991335 - RNA, 19 nt, Artificial Sequence
  Description of Artificial Sequence: Synthetic oligonucleotide
  Antisense strand to SEQ ID NO: 991334
uggcugcugacaaacauuc

SEQ ID NO: 991336 - RNA, 19 nt, Artificial Sequence
  Description of Artificial Sequence: Synthetic oligonucleotide
  Sense strand starting at position 78 of SEQ ID NO: 914272
aauguuugucagcagccau

SEQ ID NO: 991337 - RNA, 19 nt, Artificial Sequence
  Description of Artificial Sequence: Synthetic oligonucleotide
  Antisense strand to SEQ ID NO: 991336
auggcugcugacaaacauu

SEQ ID NO: 991338 - RNA, 19 nt, Artificial Sequence
  Description of Artificial Sequence: Synthetic oligonucleotide
  Sense strand starting at position 88 of SEQ ID NO: 914272
agcagccaucuaugaacua

SEQ ID NO: 991339 - RNA, 19 nt, Artificial Sequence
  Description of Artificial Sequence: Synthetic oligonucleotide
  Antisense strand to SEQ ID NO: 991338
uaguucauagauggcugcu

SEQ ID NO: 991340 - RNA, 19 nt, Artificial Sequence
  Description of Artificial Sequence: Synthetic oligonucleotide
  Sense strand starting at position 103 of SEQ ID NO: 914272
acuaguucugcgccuguga

SEQ ID NO: 991341 - RNA, 19 nt, Artificial Sequence
  Description of Artificial Sequence: Synthetic oligonucleotide
  Antisense strand to SEQ ID NO: 991340
ucacaggcgcagaacuagu

SEQ ID NO: 991342 - RNA, 19 nt, Artificial Sequence
  Description of Artificial Sequence: Synthetic oligonucleotide
  Sense strand starting at position 104 of SEQ ID NO: 914272
cuaguucugcgccugugaa

SEQ ID NO: 991343 - RNA, 19 nt, Artificial Sequence
  Description of Artificial Sequence: Synthetic oligonucleotide
  Antisense strand to SEQ ID NO: 991342
uucacaggcgcagaacuag

SEQ ID NO: 991344 - RNA, 19 nt, Artificial Sequence
  Description of Artificial Sequence: Synthetic oligonucleotide
  Sense strand starting at position 105 of SEQ ID NO: 914272
uaguucugcgccugugaaa

SEQ ID NO: 991345 - RNA, 19 nt, Artificial Sequence
  Description of Artificial Sequence: Synthetic oligonucleotide
  Antisense strand to SEQ ID NO: 991344
uuucacaggcgcagaacua

SEQ ID NO: 991346 - RNA, 19 nt, Artificial Sequence
  Description of Artificial Sequence: Synthetic oligonucleotide
  Sense strand starting at position 310 of SEQ ID NO: 914272
cggguaugugcucaggacu

SEQ ID NO: 991347 - RNA, 19 nt, Artificial Sequence
  Description of Artificial Sequence: Synthetic oligonucleotide
  Antisense strand to SEQ ID NO: 991346
aguccugagcacauacccg

SEQ ID NO: 991348 - RNA, 19 nt, Artificial Sequence
  Description of Artificial Sequence: Synthetic oligonucleotide
  Sense strand starting at position 445 of SEQ ID NO: 914272
uagagacguccuugagugu

SEQ ID NO: 991349 - RNA, 19 nt, Artificial Sequence
  Description of Artificial Sequence: Synthetic oligonucleotide
  Antisense strand to SEQ ID NO: 991348
acacucaaggacgucucua

SEQ ID NO: 991350 - RNA, 19 nt, Artificial Sequence
  Description of Artificial Sequence: Synthetic oligonucleotide
  Sense strand starting at position 697 of SEQ ID NO: 914272
aagaaucgccgagggagaa

SEQ ID NO: 991351 - RNA, 19 nt, Artificial Sequence
  Description of Artificial Sequence: Synthetic oligonucleotide
  Antisense strand to SEQ ID NO: 991350
uucucccucggcgauucuu

SEQ ID NO: 991352 - RNA, 19 nt, Artificial Sequence
  Description of Artificial Sequence: Synthetic oligonucleotide
  Sense strand starting at position 850 of SEQ ID NO: 914272
cuggauuucccgugagcuu

SEQ ID NO: 991353 - RNA, 19 nt, Artificial Sequence
  Description of Artificial Sequence: Synthetic oligonucleotide
  Antisense strand to SEQ ID NO: 991352
aagcucacgggaaauccag

SEQ ID NO: 991354 - RNA, 19 nt, Artificial Sequence
  Description of Artificial Sequence: Synthetic oligonucleotide
  Sense strand starting at position 851 of SEQ ID NO: 914272
uggauuucccgugagcuuu

SEQ ID NO: 991355 - RNA, 19 nt, Artificial Sequence
  Description of Artificial Sequence: Synthetic oligonucleotide
  Antisense strand to SEQ ID NO: 991354
aaagcucacgggaaaucca

SEQ ID NO: 991356 - RNA, 19 nt, Artificial Sequence
  Description of Artificial Sequence: Synthetic oligonucleotide
  Sense strand starting at position 1285 of SEQ ID NO: 914272
cagcgaucgaucccguuua

SEQ ID NO: 991357 - RNA, 19 nt, Artificial Sequence
  Description of Artificial Sequence: Synthetic oligonucleotide
  Antisense strand to SEQ ID NO: 991356
uaaacgggaucgaucgcug

SEQ ID NO: 991358 - RNA, 19 nt, Artificial Sequence
  Description of Artificial Sequence: Synthetic oligonucleotide
  Sense strand starting at position 1517 of SEQ ID NO: 914272
ccucgcugcaaguaaagau

SEQ ID NO: 991359 - RNA, 19 nt, Artificial Sequence
  Description of Artificial Sequence: Synthetic oligonucleotide
  Antisense strand to SEQ ID NO: 991358
aucuuuacuugcagcgagg

SEQ ID NO: 991360 - RNA, 19 nt, Artificial Sequence
  Description of Artificial Sequence: Synthetic oligonucleotide
  Sense strand starting at position 1623 of SEQ ID NO: 914272
gcuggaacuuguuaaagga

SEQ ID NO: 991361 - RNA, 19 nt, Artificial Sequence
  Description of Artificial Sequence: Synthetic oligonucleotide
  Antisense strand to SEQ ID NO: 991360
uccuuuaacaaguuccagc

SEQ ID NO: 991362 - RNA, 19 nt, Artificial Sequence
  Description of Artificial Sequence: Synthetic oligonucleotide
  Sense strand starting at position 1756 of SEQ ID NO: 914272
gaaaguugugccgaacuug

SEQ ID NO: 991363 - RNA, 19 nt, Artificial Sequence
  Description of Artificial Sequence: Synthetic oligonucleotide
  Antisense strand to SEQ ID NO: 991362
caaguucggcacaacuuuc

SEQ ID NO: 991364 - RNA, 19 nt, Artificial Sequence
  Description of Artificial Sequence: Synthetic oligonucleotide
  Sense strand starting at position 1770 of SEQ ID NO: 914272
acuugucgccuccgggaaa

SEQ ID NO: 991365 - RNA, 19 nt, Artificial Sequence
  Description of Artificial Sequence: Synthetic oligonucleotide
  Antisense strand to SEQ ID NO: 991364
uuucccggaggcgacaagu

SEQ ID NO: 991366 - RNA, 19 nt, Artificial Sequence
  Description of Artificial Sequence: Synthetic oligonucleotide
  Sense strand starting at position 1859 of SEQ ID NO: 914272
ggcgacucgcaguaagaga

SEQ ID NO: 991367 - RNA, 19 nt, Artificial Sequence
  Description of Artificial Sequence: Synthetic oligonucleotide
  Antisense strand to SEQ ID NO: 991366
ucucuuacugcgagucgcc

SEQ ID NO: 991368 - RNA, 19 nt, Artificial Sequence
  Description of Artificial Sequence: Synthetic oligonucleotide
  Sense strand starting at position 2204 of SEQ ID NO: 914272
agauucagauguuucggaa

SEQ ID NO: 991369 - RNA, 19 nt, Artificial Sequence
  Description of Artificial Sequence: Synthetic oligonucleotide
  Antisense strand to SEQ ID NO: 991368
uuccgaaacaucugaaucu

SEQ ID NO: 991370 - RNA, 19 nt, Artificial Sequence
  Description of Artificial Sequence: Synthetic oligonucleotide
  Sense strand starting at position 2208 of SEQ ID NO: 914272
ucagauguuucggaaaguu

SEQ ID NO: 991371 - RNA, 19 nt, Artificial Sequence
  Description of Artificial Sequence: Synthetic oligonucleotide
  Antisense strand to SEQ ID NO: 991370
aacuuuccgaaacaucuga

SEQ ID NO: 991372 - RNA, 19 nt, Artificial Sequence
  Description of Artificial Sequence: Synthetic oligonucleotide
  Sense strand starting at position 2479 of SEQ ID NO: 914272
cgaggcuaggcugagaauu

SEQ ID NO: 991373 - RNA, 19 nt, Artificial Sequence
  Description of Artificial Sequence: Synthetic oligonucleotide
  Antisense strand to SEQ ID NO: 991372
aauucucagccuagccucg

SEQ ID NO: 991374 - RNA, 19 nt, Artificial Sequence
  Description of Artificial Sequence: Synthetic oligonucleotide
  Sense strand starting at position 2509 of SEQ ID NO: 914272
ggagcuuugccuuagggca

SEQ ID NO: 991375 - RNA, 19 nt, Artificial Sequence
  Description of Artificial Sequence: Synthetic oligonucleotide
  Antisense strand to SEQ ID NO: 991374
ugcccuaaggcaaagcucc

SEQ ID NO: 991376 - RNA, 19 nt, Artificial Sequence
  Description of Artificial Sequence: Synthetic oligonucleotide
  Sense strand starting at position 2728 of SEQ ID NO: 914272
cccguuccuacgggagauu

SEQ ID NO: 991377 - RNA, 19 nt, Artificial Sequence
  Description of Artificial Sequence: Synthetic oligonucleotide
  Antisense strand to SEQ ID NO: 991376
aaucucccguaggaacggg

SEQ ID NO: 991378 - RNA, 19 nt, Artificial Sequence
  Description of Artificial Sequence: Synthetic oligonucleotide
  Sense strand starting at position 2729 of SEQ ID NO: 914272
ccguuccuacgggagauua

SEQ ID NO: 991379 - RNA, 19 nt, Artificial Sequence
  Description of Artificial Sequence: Synthetic oligonucleotide
  Antisense strand to SEQ ID NO: 991378
uaaucucccguaggaacgg

SEQ ID NO: 991380 - RNA, 19 nt, Artificial Sequence
  Description of Artificial Sequence: Synthetic oligonucleotide
  Sense strand starting at position 2786 of SEQ ID NO: 914272
uugcacgucuuguuaacua

SEQ ID NO: 991381 - RNA, 19 nt, Artificial Sequence
  Description of Artificial Sequence: Synthetic oligonucleotide
  Antisense strand to SEQ ID NO: 991380
uaguuaacaagacgugcaa

SEQ ID NO: 991382 - RNA, 19 nt, Artificial Sequence
  Description of Artificial Sequence: Synthetic oligonucleotide
  Sense strand starting at position 2801 of SEQ ID NO: 914272
acuauuucccucugcugua

SEQ ID NO: 991383 - RNA, 19 nt, Artificial Sequence
  Description of Artificial Sequence: Synthetic oligonucleotide
  Antisense strand to SEQ ID NO: 991382
uacagcagagggaaauagu

SEQ ID NO: 991384 - RNA, 19 nt, Artificial Sequence
  Description of Artificial Sequence: Synthetic oligonucleotide
  Sense strand starting at position 2973 of SEQ ID NO: 914272
gggauuuccugccaggcga

SEQ ID NO: 991385 - RNA, 19 nt, Artificial Sequence
  Description of Artificial Sequence: Synthetic oligonucleotide
  Antisense strand to SEQ ID NO: 991384
ucgccuggcaggaaauccc

SEQ ID NO: 991386 - RNA, 19 nt, Artificial Sequence
  Description of Artificial Sequence: Synthetic oligonucleotide
  Sense strand starting at position 3246 of SEQ ID NO: 914272
ucaugacaaccgugcuaga

SEQ ID NO: 991387 - RNA, 19 nt, Artificial Sequence
  Description of Artificial Sequence: Synthetic oligonucleotide
  Antisense strand to SEQ ID NO: 991386
ucuagcacgguugucauga

SEQ ID NO: 991388 - RNA, 19 nt, Artificial Sequence
  Description of Artificial Sequence: Synthetic oligonucleotide
  Sense strand starting at position 3249 of SEQ ID NO: 914272
ugacaaccgugcuagagau

SEQ ID NO: 991389 - RNA, 19 nt, Artificial Sequence
  Description of Artificial Sequence: Synthetic oligonucleotide
  Antisense strand to SEQ ID NO: 991388
aucucuagcacgguuguca

SEQ ID NO: 991390 - RNA, 19 nt, Artificial Sequence
  Description of Artificial Sequence: Synthetic oligonucleotide
  Sense strand starting at position 3488 of SEQ ID NO: 914272
uccuuaaaccgcugagaaa

SEQ ID NO: 991391 - RNA, 19 nt, Artificial Sequence
  Description of Artificial Sequence: Synthetic oligonucleotide
  Antisense strand to SEQ ID NO: 991390
uuucucagcgguuuaagga

SEQ ID NO: 991392 - RNA, 19 nt, Artificial Sequence
  Description of Artificial Sequence: Synthetic oligonucleotide
  Sense strand starting at position 3507 of SEQ ID NO: 914272
aucguuaagcgagaacgua

SEQ ID NO: 991393 - RNA, 19 nt, Artificial Sequence
  Description of Artificial Sequence: Synthetic oligonucleotide
  Antisense strand to SEQ ID NO: 991392
uacguucucgcuuaacgau

SEQ ID NO: 991394 - RNA, 19 nt, Artificial Sequence
  Description of Artificial Sequence: Synthetic oligonucleotide
  Sense strand starting at position 3601 of SEQ ID NO: 914272
caaggaaugugggucagau

SEQ ID NO: 991395 - RNA, 19 nt, Artificial Sequence
  Description of Artificial Sequence: Synthetic oligonucleotide
  Antisense strand to SEQ ID NO: 991394
aucugacccacauuccuug

SEQ ID NO: 991396 - RNA, 19 nt, Artificial Sequence
  Description of Artificial Sequence: Synthetic oligonucleotide
  Sense strand starting at position 3605 of SEQ ID NO: 914272
gaaugugggucagauguca

SEQ ID NO: 991397 - RNA, 19 nt, Artificial Sequence
  Description of Artificial Sequence: Synthetic oligonucleotide
  Antisense strand to SEQ ID NO: 991396
ugacaucugacccacauuc

SEQ ID NO: 991398 - RNA, 19 nt, Artificial Sequence
  Description of Artificial Sequence: Synthetic oligonucleotide
  Sense strand starting at position 3610 of SEQ ID NO: 914272
ugggucagaugucaacuuu

SEQ ID NO: 991399 - RNA, 19 nt, Artificial Sequence
  Description of Artificial Sequence: Synthetic oligonucleotide
  Antisense strand to SEQ ID NO: 991398
aaaguugacaucugaccca

SEQ ID NO: 991400 - RNA, 19 nt, Artificial Sequence
  Description of Artificial Sequence: Synthetic oligonucleotide
  Sense strand starting at position 3764 of SEQ ID NO: 914272
ucccacaucugguuuccau

SEQ ID NO: 991401 - RNA, 19 nt, Artificial Sequence
  Description of Artificial Sequence: Synthetic oligonucleotide
  Antisense strand to SEQ ID NO: 991400
auggaaaccagauguggga

SEQ ID NO: 991402 - RNA, 19 nt, Artificial Sequence
  Description of Artificial Sequence: Synthetic oligonucleotide
  Sense strand starting at position 3793 of SEQ ID NO: 914272
ccuugaagugcucguuaau

SEQ ID NO: 991403 - RNA, 19 nt, Artificial Sequence
  Description of Artificial Sequence: Synthetic oligonucleotide
  Antisense strand to SEQ ID NO: 991402
auuaacgagcacuucaagg

SEQ ID NO: 991404 - RNA, 19 nt, Artificial Sequence
  Description of Artificial Sequence: Synthetic oligonucleotide
  Sense strand starting at position 3796 of SEQ ID NO: 914272
ugaagugcucguuaauaaa

SEQ ID NO: 991405 - RNA, 19 nt, Artificial Sequence
  Description of Artificial Sequence: Synthetic oligonucleotide
  Antisense strand to SEQ ID NO: 991404
uuuauuaacgagcacuuca

SEQ ID NO: 991406 - RNA, 19 nt, Artificial Sequence
  Description of Artificial Sequence: Synthetic oligonucleotide
  Sense strand starting at position 205 of SEQ ID NO: 914273
uuaggaucaugguacugaa

SEQ ID NO: 991407 - RNA, 19 nt, Artificial Sequence
  Description of Artificial Sequence: Synthetic oligonucleotide
  Antisense strand to SEQ ID NO: 991406
uucaguaccaugauccuaa

SEQ ID NO: 991408 - RNA, 19 nt, Artificial Sequence
  Description of Artificial Sequence: Synthetic oligonucleotide
  Sense strand starting at position 366 of SEQ ID NO: 914273
uuguaugugcagugaccaa

SEQ ID NO: 991409 - RNA, 19 nt, Artificial Sequence
  Description of Artificial Sequence: Synthetic oligonucleotide
  Antisense strand to SEQ ID NO: 991408
uuggucacugcacauacaa

SEQ ID NO: 991410 - RNA, 19 nt, Artificial Sequence
  Description of Artificial Sequence: Synthetic oligonucleotide
  Sense strand starting at position 708 of SEQ ID NO: 914273
gagacagacuccuuggguu

SEQ ID NO: 991411 - RNA, 19 nt, Artificial Sequence
  Description of Artificial Sequence: Synthetic oligonucleotide
  Antisense strand to SEQ ID NO: 991410
aacccaaggagucugucuc

SEQ ID NO: 991412 - RNA, 19 nt, Artificial Sequence
  Description of Artificial Sequence: Synthetic oligonucleotide
  Sense strand starting at position 720 of SEQ ID NO: 914273
uuggguuuccauuggauac

SEQ ID NO: 991413 - RNA, 19 nt, Artificial Sequence
  Description of Artificial Sequence: Synthetic oligonucleotide
  Antisense strand to SEQ ID NO: 991412
guauccaauggaaacccaa

SEQ ID NO: 991414 - RNA, 19 nt, Artificial Sequence
  Description of Artificial Sequence: Synthetic oligonucleotide
  Sense strand starting at position 721 of SEQ ID NO: 914273
uggguuuccauuggauacu

SEQ ID NO: 991415 - RNA, 19 nt, Artificial Sequence
  Description of Artificial Sequence: Synthetic oligonucleotide
  Antisense strand to SEQ ID NO: 991414
aguauccaauggaaaccca

SEQ ID NO: 991416 - RNA, 19 nt, Artificial Sequence
  Description of Artificial Sequence: Synthetic oligonucleotide
  Sense strand starting at position 833 of SEQ ID NO: 914273
uuauaagauuuccaaagag

SEQ ID NO: 991417 - RNA, 19 nt, Artificial Sequence
  Description of Artificial Sequence: Synthetic oligonucleotide
  Antisense strand to SEQ ID NO: 991416
cucuuuggaaaucuuauaa

SEQ ID NO: 991418 - RNA, 19 nt, Artificial Sequence
  Description of Artificial Sequence: Synthetic oligonucleotide
  Sense strand starting at position 979 of SEQ ID NO: 914273
cugucauugcuacacuagu

SEQ ID NO: 991419 - RNA, 19 nt, Artificial Sequence
  Description of Artificial Sequence: Synthetic oligonucleotide
  Antisense strand to SEQ ID NO: 991418
acuaguguagcaaugacag

SEQ ID NO: 991420 - RNA, 19 nt, Artificial Sequence
  Description of Artificial Sequence: Synthetic oligonucleotide
  Sense strand starting at position 1038 of SEQ ID NO: 914273
ccacaugguuccuuuacuu

SEQ ID NO: 991421 - RNA, 19 nt, Artificial Sequence
  Description of Artificial Sequence: Synthetic oligonucleotide
  Antisense strand to SEQ ID NO: 991420
aaguaaaggaaccaugugg

SEQ ID NO: 991422 - RNA, 19 nt, Artificial Sequence
  Description of Artificial Sequence: Synthetic oligonucleotide
  Sense strand starting at position 1092 of SEQ ID NO: 914273
agucuauauuccuaggaaa

SEQ ID NO: 991423 - RNA, 19 nt, Artificial Sequence
  Description of Artificial Sequence: Synthetic oligonucleotide
  Antisense strand to SEQ ID NO: 991422
uuuccuaggaauauagacu

SEQ ID NO: 991424 - RNA, 19 nt, Artificial Sequence
  Description of Artificial Sequence: Synthetic oligonucleotide
  Sense strand starting at position 1149 of SEQ ID NO: 914273
ucauaacuugacugguaag

SEQ ID NO: 991425 - RNA, 19 nt, Artificial Sequence
  Description of Artificial Sequence: Synthetic oligonucleotide
  Antisense strand to SEQ ID NO: 991424
cuuaccagucaaguuauga

SEQ ID NO: 991426 - RNA, 19 nt, Artificial Sequence
  Description of Artificial Sequence: Synthetic oligonucleotide
  Sense strand starting at position 1207 of SEQ ID NO: 914273
cagugaauuuaaugaucug

SEQ ID NO: 991427 - RNA, 19 nt, Artificial Sequence
  Description of Artificial Sequence: Synthetic oligonucleotide
  Antisense strand to SEQ ID NO: 991426
cagaucauuaaauucacug

SEQ ID NO: 991428 - RNA, 19 nt, Artificial Sequence
  Description of Artificial Sequence: Synthetic oligonucleotide
  Sense strand starting at position 1254 of SEQ ID NO: 914273
agacaucagccucaguuua

SEQ ID NO: 991429 - RNA, 19 nt, Artificial Sequence
  Description of Artificial Sequence: Synthetic oligonucleotide
  Antisense strand to SEQ ID NO: 991428
uaaacugaggcugaugucu

SEQ ID NO: 991430 - RNA, 19 nt, Artificial Sequence
  Description of Artificial Sequence: Synthetic oligonucleotide
  Sense strand starting at position 1294 of SEQ ID NO: 914273
acauaacacuucgcucaga

SEQ ID NO: 991431 - RNA, 19 nt, Artificial Sequence
  Description of Artificial Sequence: Synthetic oligonucleotide
  Antisense strand to SEQ ID NO: 991430
ucugagcgaaguguuaugu

SEQ ID NO: 991432 - RNA, 19 nt, Artificial Sequence
  Description of Artificial Sequence: Synthetic oligonucleotide
  Sense strand starting at position 1323 of SEQ ID NO: 914273
ggccuuguuccauaagccu

SEQ ID NO: 991433 - RNA, 19 nt, Artificial Sequence
  Description of Artificial Sequence: Synthetic oligonucleotide
  Antisense strand to SEQ ID NO: 991432
aggcuuauggaacaaggcc

SEQ ID NO: 991434 - RNA, 19 nt, Artificial Sequence
  Description of Artificial Sequence: Synthetic oligonucleotide
  Sense strand starting at position 1391 of SEQ ID NO: 914273
gugcaauugaggcaugaca

SEQ ID NO: 991435 - RNA, 19 nt, Artificial Sequence
  Description of Artificial Sequence: Synthetic oligonucleotide
  Antisense strand to SEQ ID NO: 991434
ugucaugccucaauugcac

SEQ ID NO: 991436 - RNA, 19 nt, Artificial Sequence
  Description of Artificial Sequence: Synthetic oligonucleotide
  Sense strand starting at position 1402 of SEQ ID NO: 914273
gcaugacacccggagacuu

SEQ ID NO: 991437 - RNA, 19 nt, Artificial Sequence
  Description of Artificial Sequence: Synthetic oligonucleotide
  Antisense strand to SEQ ID NO: 991436
aagucuccgggugucaugc

SEQ ID NO: 991438 - RNA, 19 nt, Artificial Sequence
  Description of Artificial Sequence: Synthetic oligonucleotide
  Sense strand starting at position 1469 of SEQ ID NO: 914273
cucuaucgguuccuggaaa

SEQ ID NO: 991439 - RNA, 19 nt, Artificial Sequence
  Description of Artificial Sequence: Synthetic oligonucleotide
  Antisense strand to SEQ ID NO: 991438
uuuccaggaaccgauagag

SEQ ID NO: 991440 - RNA, 19 nt, Artificial Sequence
  Description of Artificial Sequence: Synthetic oligonucleotide
  Sense strand starting at position 2078 of SEQ ID NO: 914273
uccugucugaggcguaaau

SEQ ID NO: 991441 - RNA, 19 nt, Artificial Sequence
  Description of Artificial Sequence: Synthetic oligonucleotide
  Antisense strand to SEQ ID NO: 991440
auuuacgccucagacagga

SEQ ID NO: 991442 - RNA, 19 nt, Artificial Sequence
  Description of Artificial Sequence: Synthetic oligonucleotide
  Sense strand starting at position 2080 of SEQ ID NO: 914273
cugucugaggcguaaauaa

SEQ ID NO: 991443 - RNA, 19 nt, Artificial Sequence
  Description of Artificial Sequence: Synthetic oligonucleotide
  Antisense strand to SEQ ID NO: 991442
uuauuuacgccucagacag

SEQ ID NO: 991444 - RNA, 19 nt, Artificial Sequence
  Description of Artificial Sequence: Synthetic oligonucleotide
  Sense strand starting at position 2108 of SEQ ID NO: 914273
gaucauaagccacggguua

SEQ ID NO: 991445 - RNA, 19 nt, Artificial Sequence
  Description of Artificial Sequence: Synthetic oligonucleotide
  Antisense strand to SEQ ID NO: 991444
uaacccguggcuuaugauc

SEQ ID NO: 991446 - RNA, 19 nt, Artificial Sequence
  Description of Artificial Sequence: Synthetic oligonucleotide
  Sense strand starting at position 2110 of SEQ ID NO: 914273
ucauaagccacggguuaaa

SEQ ID NO: 991447 - RNA, 19 nt, Artificial Sequence
  Description of Artificial Sequence: Synthetic oligonucleotide
  Antisense strand to SEQ ID NO: 991446
uuuaacccguggcuuauga

SEQ ID NO: 991448 - RNA, 19 nt, Artificial Sequence
  Description of Artificial Sequence: Synthetic oligonucleotide
  Sense strand starting at position 2168 of SEQ ID NO: 914273
cuguuaaaguucuuuagag

SEQ ID NO: 991449 - RNA, 19 nt, Artificial Sequence
  Description of Artificial Sequence: Synthetic oligonucleotide
  Antisense strand to SEQ ID NO: 991448
cucuaaagaacuuuaacag

SEQ ID NO: 991450 - RNA, 19 nt, Artificial Sequence
  Description of Artificial Sequence: Synthetic oligonucleotide
  Sense strand starting at position 2169 of SEQ ID NO: 914273
uguuaaaguucuuuagaga

SEQ ID NO: 991451 - RNA, 19 nt, Artificial Sequence
  Description of Artificial Sequence: Synthetic oligonucleotide
  Antisense strand to SEQ ID NO: 991450
ucucuaaagaacuuuaaca

SEQ ID NO: 991452 - RNA, 19 nt, Artificial Sequence
  Description of Artificial Sequence: Synthetic oligonucleotide
  Sense strand starting at position 2178 of SEQ ID NO: 914273
ucuuuagagaacuggaguu

SEQ ID NO: 991453 - RNA, 19 nt, Artificial Sequence
  Description of Artificial Sequence: Synthetic oligonucleotide
  Antisense strand to SEQ ID NO: 991452
aacuccaguucucuaaaga

SEQ ID NO: 991454 - RNA, 19 nt, Artificial Sequence
  Description of Artificial Sequence: Synthetic oligonucleotide
  Sense strand starting at position 2191 of SEQ ID NO: 914273
ggaguuucucgugaaugug

SEQ ID NO: 991455 - RNA, 19 nt, Artificial Sequence
  Description of Artificial Sequence: Synthetic oligonucleotide
  Antisense strand to SEQ ID NO: 991454
cacauucacgagaaacucc

SEQ ID NO: 991456 - RNA, 19 nt, Artificial Sequence
  Description of Artificial Sequence: Synthetic oligonucleotide
  Sense strand starting at position 2200 of SEQ ID NO: 914273
cgugaauguguugaagauc

SEQ ID NO: 991457 - RNA, 19 nt, Artificial Sequence
  Description of Artificial Sequence: Synthetic oligonucleotide
  Antisense strand to SEQ ID NO: 991456
gaucuucaacacauucacg

SEQ ID NO: 991458 - RNA, 19 nt, Artificial Sequence
  Description of Artificial Sequence: Synthetic oligonucleotide
  Sense strand starting at position 2227 of SEQ ID NO: 914273
gcgcaauaacacuuguugu

SEQ ID NO: 991459 - RNA, 19 nt, Artificial Sequence
  Description of Artificial Sequence: Synthetic oligonucleotide
  Antisense strand to SEQ ID NO: 991458
acaacaaguguuauugcgc

SEQ ID NO: 991460 - RNA, 19 nt, Artificial Sequence
  Description of Artificial Sequence: Synthetic oligonucleotide
  Sense strand starting at position 2235 of SEQ ID NO: 914273
acacuuguuguguaacuau

SEQ ID NO: 991461 - RNA, 19 nt, Artificial Sequence
  Description of Artificial Sequence: Synthetic oligonucleotide
  Antisense strand to SEQ ID NO: 991460
auaguuacacaacaagugu

SEQ ID NO: 991462 - RNA, 19 nt, Artificial Sequence
  Description of Artificial Sequence: Synthetic oligonucleotide
  Sense strand starting at position 2238 of SEQ ID NO: 914273
cuuguuguguaacuauagu

SEQ ID NO: 991463 - RNA, 19 nt, Artificial Sequence
  Description of Artificial Sequence: Synthetic oligonucleotide
  Antisense strand to SEQ ID NO: 991462
acuauaguuacacaacaag

SEQ ID NO: 991464 - RNA, 19 nt, Artificial Sequence
  Description of Artificial Sequence: Synthetic oligonucleotide
  Sense strand starting at position 2406 of SEQ ID NO: 914273
aaaugaacagucuacguaa

SEQ ID NO: 991465 - RNA, 19 nt, Artificial Sequence
  Description of Artificial Sequence: Synthetic oligonucleotide
  Antisense strand to SEQ ID NO: 991464
uuacguagacuguucauuu

SEQ ID NO: 991466 - RNA, 19 nt, Artificial Sequence
  Description of Artificial Sequence: Synthetic oligonucleotide
  Sense strand starting at position 2659 of SEQ ID NO: 914273
uguagucucuuaguugaua

SEQ ID NO: 991467 - RNA, 19 nt, Artificial Sequence
  Description of Artificial Sequence: Synthetic oligonucleotide
  Antisense strand to SEQ ID NO: 991466
uaucaacuaagagacuaca

SEQ ID NO: 991468 - RNA, 19 nt, Artificial Sequence
  Description of Artificial Sequence: Synthetic oligonucleotide
  Sense strand starting at position 2660 of SEQ ID NO: 914273
guagucucuuaguugauaa

SEQ ID NO: 991469 - RNA, 19 nt, Artificial Sequence
  Description of Artificial Sequence: Synthetic oligonucleotide
  Antisense strand to SEQ ID NO: 991468
uuaucaacuaagagacuac

SEQ ID NO: 991470 - RNA, 19 nt, Artificial Sequence
  Description of Artificial Sequence: Synthetic oligonucleotide
  Sense strand starting at position 2680 of SEQ ID NO: 914273
ugaauaugcucagcacaaa

SEQ ID NO: 991471 - RNA, 19 nt, Artificial Sequence
  Description of Artificial Sequence: Synthetic oligonucleotide
  Antisense strand to SEQ ID NO: 991470
uuugugcugagcauauuca

SEQ ID NO: 991472 - RNA, 19 nt, Artificial Sequence
  Description of Artificial Sequence: Synthetic oligonucleotide
  Sense strand starting at position 2710 of SEQ ID NO: 914273
auguacauccuagauguga

SEQ ID NO: 991473 - RNA, 19 nt, Artificial Sequence
  Description of Artificial Sequence: Synthetic oligonucleotide
  Antisense strand to SEQ ID NO: 991472
ucacaucuaggauguacau

SEQ ID NO: 991474 - RNA, 19 nt, Artificial Sequence
  Description of Artificial Sequence: Synthetic oligonucleotide
  Sense strand starting at position 2753 of SEQ ID NO: 914273
caaguaugguuaccaauug

SEQ ID NO: 991475 - RNA, 19 nt, Artificial Sequence
  Description of Artificial Sequence: Synthetic oligonucleotide
  Antisense strand to SEQ ID NO: 991474
caauugguaaccauacuug

SEQ ID NO: 991476 - RNA, 19 nt, Artificial Sequence
  Description of Artificial Sequence: Synthetic oligonucleotide
  Sense strand starting at position 3060 of SEQ ID NO: 914273
ucgggaagcuaagaugaaa

SEQ ID NO: 991477 - RNA, 19 nt, Artificial Sequence
  Description of Artificial Sequence: Synthetic oligonucleotide
  Antisense strand to SEQ ID NO: 991476
uuucaucuuagcuucccga

SEQ ID NO: 991478 - RNA, 19 nt, Artificial Sequence
  Description of Artificial Sequence: Synthetic oligonucleotide
  Sense strand starting at position 3132 of SEQ ID NO: 914273
gcacuccagccugaucuau

SEQ ID NO: 991479 - RNA, 19 nt, Artificial Sequence
  Description of Artificial Sequence: Synthetic oligonucleotide
  Antisense strand to SEQ ID NO: 991478
auagaucaggcuggagugc

SEQ ID NO: 991480 - RNA, 19 nt, Artificial Sequence
  Description of Artificial Sequence: Synthetic oligonucleotide
  Sense strand starting at position 3138 of SEQ ID NO: 914273
cagccugaucuauggagca

SEQ ID NO: 991481 - RNA, 19 nt, Artificial Sequence
  Description of Artificial Sequence: Synthetic oligonucleotide
  Antisense strand to SEQ ID NO: 991480
ugcuccauagaucaggcug

SEQ ID NO: 991482 - RNA, 19 nt, Artificial Sequence
  Description of Artificial Sequence: Synthetic oligonucleotide
  Sense strand starting at position 3140 of SEQ ID NO: 914273
gccugaucuauggagcaag

SEQ ID NO: 991483 - RNA, 19 nt, Artificial Sequence
  Description of Artificial Sequence: Synthetic oligonucleotide
  Antisense strand to SEQ ID NO: 991482
cuugcuccauagaucaggc

SEQ ID NO: 991484 - RNA, 19 nt, Artificial Sequence
  Description of Artificial Sequence: Synthetic oligonucleotide
  Sense strand starting at position 3548 of SEQ ID NO: 914273
agagcacauccuuacagua

SEQ ID NO: 991485 - RNA, 19 nt, Artificial Sequence
  Description of Artificial Sequence: Synthetic oligonucleotide
  Antisense strand to SEQ ID NO: 991484
uacuguaaggaugugcucu

SEQ ID NO: 991486 - RNA, 19 nt, Artificial Sequence
  Description of Artificial Sequence: Synthetic oligonucleotide
  Sense strand starting at position 24 of SEQ ID NO: 914274
cucugaguuuaugaggaac

SEQ ID NO: 991487 - RNA, 19 nt, Artificial Sequence
  Description of Artificial Sequence: Synthetic oligonucleotide
  Antisense strand to SEQ ID NO: 991486
guuccucauaaacucagag

SEQ ID NO: 991488 - RNA, 19 nt, Artificial Sequence
  Description of Artificial Sequence: Synthetic oligonucleotide
  Sense strand starting at position 26 of SEQ ID NO: 914274
cugaguuuaugaggaacaa

SEQ ID NO: 991489 - RNA, 19 nt, Artificial Sequence
  Description of Artificial Sequence: Synthetic oligonucleotide
  Antisense strand to SEQ ID NO: 991488
uuguuccucauaaacucag

SEQ ID NO: 991490 - RNA, 19 nt, Artificial Sequence
  Description of Artificial Sequence: Synthetic oligonucleotide
  Sense strand starting at position 153 of SEQ ID NO: 914274
aaggcugaggcauaucuua

SEQ ID NO: 991491 - RNA, 19 nt, Artificial Sequence
  Description of Artificial Sequence: Synthetic oligonucleotide
  Antisense strand to SEQ ID NO: 991490
uaagauaugccucagccuu

SEQ ID NO: 991492 - RNA, 19 nt, Artificial Sequence
  Description of Artificial Sequence: Synthetic oligonucleotide
  Sense strand starting at position 177 of SEQ ID NO: 914274
agacaccucucugugcuaa

SEQ ID NO: 991493 - RNA, 19 nt, Artificial Sequence
  Description of Artificial Sequence: Synthetic oligonucleotide
  Antisense strand to SEQ ID NO: 991492
uuagcacagagaggugucu

SEQ ID NO: 991494 - RNA, 19 nt, Artificial Sequence
  Description of Artificial Sequence: Synthetic oligonucleotide
  Sense strand starting at position 216 of SEQ ID NO: 914274
uuccuuuaagagugagaua

SEQ ID NO: 991495 - RNA, 19 nt, Artificial Sequence
  Description of Artificial Sequence: Synthetic oligonucleotide
  Antisense strand to SEQ ID NO: 991494
uaucucacucuuaaaggaa

SEQ ID NO: 991496 - RNA, 19 nt, Artificial Sequence
  Description of Artificial Sequence: Synthetic oligonucleotide
  Sense strand starting at position 219 of SEQ ID NO: 914274
cuuuaagagugagauaaau

SEQ ID NO: 991497 - RNA, 19 nt, Artificial Sequence
  Description of Artificial Sequence: Synthetic oligonucleotide
  Antisense strand to SEQ ID NO: 991496
auuuaucucacucuuaaag

SEQ ID NO: 991498 - RNA, 19 nt, Artificial Sequence
  Description of Artificial Sequence: Synthetic oligonucleotide
  Sense strand starting at position 228 of SEQ ID NO: 914274
ugagauaaauuggaagugu

SEQ ID NO: 991499 - RNA, 19 nt, Artificial Sequence
  Description of Artificial Sequence: Synthetic oligonucleotide
  Antisense strand to SEQ ID NO: 991498
acacuuccaauuuaucuca

SEQ ID NO: 991500 - RNA, 19 nt, Artificial Sequence
  Description of Artificial Sequence: Synthetic oligonucleotide
  Sense strand starting at position 237 of SEQ ID NO: 914274
uuggaagugugagagaaau

SEQ ID NO: 991501 - RNA, 19 nt, Artificial Sequence
  Description of Artificial Sequence: Synthetic oligonucleotide
  Antisense strand to SEQ ID NO: 991500
auuucucucacacuuccaa

SEQ ID NO: 991502 - RNA, 19 nt, Artificial Sequence
  Description of Artificial Sequence: Synthetic oligonucleotide
  Sense strand starting at position 314 of SEQ ID NO: 914274
ggugcuaacucggcuaacu

SEQ ID NO: 991503 - RNA, 19 nt, Artificial Sequence
  Description of Artificial Sequence: Synthetic oligonucleotide
  Antisense strand to SEQ ID NO: 991502
aguuagccgaguuagcacc

SEQ ID NO: 991504 - RNA, 19 nt, Artificial Sequence
  Description of Artificial Sequence: Synthetic oligonucleotide
  Sense strand starting at position 587 of SEQ ID NO: 914274
ucaccaauaugcuugagga

SEQ ID NO: 991505 - RNA, 19 nt, Artificial Sequence
  Description of Artificial Sequence: Synthetic oligonucleotide
  Antisense strand to SEQ ID NO: 991504
uccucaagcauauugguga

SEQ ID NO: 991506 - RNA, 19 nt, Artificial Sequence
  Description of Artificial Sequence: Synthetic oligonucleotide
  Sense strand starting at position 1007 of SEQ ID NO: 914274
ggugcaugcaccuguaguu

SEQ ID NO: 991507 - RNA, 19 nt, Artificial Sequence
  Description of Artificial Sequence: Synthetic oligonucleotide
  Antisense strand to SEQ ID NO: 991506
aacuacaggugcaugcacc

SEQ ID NO: 991508 - RNA, 19 nt, Artificial Sequence
  Description of Artificial Sequence: Synthetic oligonucleotide
  Sense strand starting at position 1211 of SEQ ID NO: 914274
gcuuaaguucuagaaguuc

SEQ ID NO: 991509 - RNA, 19 nt, Artificial Sequence
  Description of Artificial Sequence: Synthetic oligonucleotide
  Antisense strand to SEQ ID NO: 991508
gaacuucuagaacuuaagc

SEQ ID NO: 991510 - RNA, 19 nt, Artificial Sequence
  Description of Artificial Sequence: Synthetic oligonucleotide
  Sense strand starting at position 1601 of SEQ ID NO: 914274
cacaaagcaugagauaagu

SEQ ID NO: 991511 - RNA, 19 nt, Artificial Sequence
  Description of Artificial Sequence: Synthetic oligonucleotide
  Antisense strand to SEQ ID NO: 991510
acuuaucucaugcuuugug

SEQ ID NO: 991512 - RNA, 19 nt, Artificial Sequence
  Description of Artificial Sequence: Synthetic oligonucleotide
  Sense strand starting at position 1611 of SEQ ID NO: 914274
gagauaaguugauuaaguu

SEQ ID NO: 991513 - RNA, 19 nt, Artificial Sequence
  Description of Artificial Sequence: Synthetic oligonucleotide
  Antisense strand to SEQ ID NO: 991512
aacuuaaucaacuuaucuc

SEQ ID NO: 991514 - RNA, 19 nt, Artificial Sequence
  Description of Artificial Sequence: Synthetic oligonucleotide
  Sense strand starting at position 1627 of SEQ ID NO: 914274
guugauaagcucuaucccu

SEQ ID NO: 991515 - RNA, 19 nt, Artificial Sequence
  Description of Artificial Sequence: Synthetic oligonucleotide
  Antisense strand to SEQ ID NO: 991514
agggauagagcuuaucaac

SEQ ID NO: 991516 - RNA, 19 nt, Artificial Sequence
  Description of Artificial Sequence: Synthetic oligonucleotide
  Sense strand starting at position 1800 of SEQ ID NO: 914274
augagauaguccuuauaac

SEQ ID NO: 991517 - RNA, 19 nt, Artificial Sequence
  Description of Artificial Sequence: Synthetic oligonucleotide
  Antisense strand to SEQ ID NO: 991516
guuauaaggacuaucucau

SEQ ID NO: 991518 - RNA, 19 nt, Artificial Sequence
  Description of Artificial Sequence: Synthetic oligonucleotide
  Sense strand starting at position 1818 of SEQ ID NO: 914274
cucuaaauucuacgcagaa

SEQ ID NO: 991519 - RNA, 19 nt, Artificial Sequence
  Description of Artificial Sequence: Synthetic oligonucleotide
  Antisense strand to SEQ ID NO: 991518
uucugcguagaauuuagag

SEQ ID NO: 991520 - RNA, 19 nt, Artificial Sequence
  Description of Artificial Sequence: Synthetic oligonucleotide
  Sense strand starting at position 1819 of SEQ ID NO: 914274
ucuaaauucuacgcagaac

SEQ ID NO: 991521 - RNA, 19 nt, Artificial Sequence
  Description of Artificial Sequence: Synthetic oligonucleotide
  Antisense strand to SEQ ID NO: 991520
guucugcguagaauuuaga

SEQ ID NO: 991522 - RNA, 19 nt, Artificial Sequence
  Description of Artificial Sequence: Synthetic oligonucleotide
  Sense strand starting at position 1837 of SEQ ID NO: 914274
cuuaucaauucccagugga

SEQ ID NO: 991523 - RNA, 19 nt, Artificial Sequence
  Description of Artificial Sequence: Synthetic oligonucleotide
  Antisense strand to SEQ ID NO: 991522
uccacugggaauugauaag

SEQ ID NO: 991524 - RNA, 19 nt, Artificial Sequence
  Description of Artificial Sequence: Synthetic oligonucleotide
  Sense strand starting at position 1840 of SEQ ID NO: 914274
aucaauucccaguggacaa

SEQ ID NO: 991525 - RNA, 19 nt, Artificial Sequence
  Description of Artificial Sequence: Synthetic oligonucleotide
  Antisense strand to SEQ ID NO: 991524
uuguccacugggaauugau

SEQ ID NO: 991526 - RNA, 19 nt, Artificial Sequence
  Description of Artificial Sequence: Synthetic oligonucleotide
  Sense strand starting at position 1853 of SEQ ID NO: 914274
ggacaauguugcuuucuuc

SEQ ID NO: 991527 - RNA, 19 nt, Artificial Sequence
  Description of Artificial Sequence: Synthetic oligonucleotide
  Antisense strand to SEQ ID NO: 991526
gaagaaagcaacauugucc

SEQ ID NO: 991528 - RNA, 19 nt, Artificial Sequence
  Description of Artificial Sequence: Synthetic oligonucleotide
  Sense strand starting at position 1860 of SEQ ID NO: 914274
guugcuuucuucucuacau

SEQ ID NO: 991529 - RNA, 19 nt, Artificial Sequence
  Description of Artificial Sequence: Synthetic oligonucleotide
  Antisense strand to SEQ ID NO: 991528
auguagagaagaaagcaac

SEQ ID NO: 991530 - RNA, 19 nt, Artificial Sequence
  Description of Artificial Sequence: Synthetic oligonucleotide
  Sense strand starting at position 2006 of SEQ ID NO: 914274
gagcacugaggucguguaa

SEQ ID NO: 991531 - RNA, 19 nt, Artificial Sequence
  Description of Artificial Sequence: Synthetic oligonucleotide
  Antisense strand to SEQ ID NO: 991530
uuacacgaccucagugcuc

SEQ ID NO: 991532 - RNA, 19 nt, Artificial Sequence
  Description of Artificial Sequence: Synthetic oligonucleotide
  Sense strand starting at position 2017 of SEQ ID NO: 914274
ucguguaacuaggaaauug

SEQ ID NO: 991533 - RNA, 19 nt, Artificial Sequence
  Description of Artificial Sequence: Synthetic oligonucleotide
  Antisense strand to SEQ ID NO: 991532
caauuuccuaguuacacga

SEQ ID NO: 991534 - RNA, 19 nt, Artificial Sequence
  Description of Artificial Sequence: Synthetic oligonucleotide
  Sense strand starting at position 2760 of SEQ ID NO: 914274
uagguuucuccacguuagu

SEQ ID NO: 991535 - RNA, 19 nt, Artificial Sequence
  Description of Artificial Sequence: Synthetic oligonucleotide
  Antisense strand to SEQ ID NO: 991534
acuaacguggagaaaccua

SEQ ID NO: 991536 - RNA, 19 nt, Artificial Sequence
  Description of Artificial Sequence: Synthetic oligonucleotide
  Sense strand starting at position 2907 of SEQ ID NO: 914274
aaauuaggaucaugguacu

SEQ ID NO: 991537 - RNA, 19 nt, Artificial Sequence
  Description of Artificial Sequence: Synthetic oligonucleotide
  Antisense strand to SEQ ID NO: 991536
aguaccaugauccuaauuu

SEQ ID NO: 991538 - RNA, 19 nt, Artificial Sequence
  Description of Artificial Sequence: Synthetic oligonucleotide
  Sense strand starting at position 2910 of SEQ ID NO: 914274
uuaggaucaugguacugaa

SEQ ID NO: 991539 - RNA, 19 nt, Artificial Sequence
  Description of Artificial Sequence: Synthetic oligonucleotide
  Antisense strand to SEQ ID NO: 991538
uucaguaccaugauccuaa

SEQ ID NO: 991540 - RNA, 19 nt, Artificial Sequence
  Description of Artificial Sequence: Synthetic oligonucleotide
  Sense strand starting at position 2920 of SEQ ID NO: 914274
gguacugaauccgaugaaa

SEQ ID NO: 991541 - RNA, 19 nt, Artificial Sequence
  Description of Artificial Sequence: Synthetic oligonucleotide
  Antisense strand to SEQ ID NO: 991540
uuucaucggauucaguacc

SEQ ID NO: 991542 - RNA, 19 nt, Artificial Sequence
  Description of Artificial Sequence: Synthetic oligonucleotide
  Sense strand starting at position 3071 of SEQ ID NO: 914274
uuguaugugcagugaccaa

SEQ ID NO: 991543 - RNA, 19 nt, Artificial Sequence
  Description of Artificial Sequence: Synthetic oligonucleotide
  Antisense strand to SEQ ID NO: 991542
uuggucacugcacauacaa

SEQ ID NO: 991544 - RNA, 19 nt, Artificial Sequence
  Description of Artificial Sequence: Synthetic oligonucleotide
  Sense strand starting at position 3122 of SEQ ID NO: 914274
cgcgguggaugccuguaau

SEQ ID NO: 991545 - RNA, 19 nt, Artificial Sequence
  Description of Artificial Sequence: Synthetic oligonucleotide
  Antisense strand to SEQ ID NO: 991544
auuacaggcauccaccgcg

SEQ ID NO: 991546 - RNA, 19 nt, Artificial Sequence
  Description of Artificial Sequence: Synthetic oligonucleotide
  Sense strand starting at position 3413 of SEQ ID NO: 914274
gagacagacuccuuggguu

SEQ ID NO: 991547 - RNA, 19 nt, Artificial Sequence
  Description of Artificial Sequence: Synthetic oligonucleotide
  Antisense strand to SEQ ID NO: 991546
aacccaaggagucugucuc

SEQ ID NO: 991548 - RNA, 19 nt, Artificial Sequence
  Description of Artificial Sequence: Synthetic oligonucleotide
  Sense strand starting at position 3425 of SEQ ID NO: 914274
uuggguuuccauuggauac

SEQ ID NO: 991549 - RNA, 19 nt, Artificial Sequence
  Description of Artificial Sequence: Synthetic oligonucleotide
  Antisense strand to SEQ ID NO: 991548
guauccaauggaaacccaa

SEQ ID NO: 991550 - RNA, 19 nt, Artificial Sequence
  Description of Artificial Sequence: Synthetic oligonucleotide
  Sense strand starting at position 3426 of SEQ ID NO: 914274
uggguuuccauuggauacu

SEQ ID NO: 991551 - RNA, 19 nt, Artificial Sequence
  Description of Artificial Sequence: Synthetic oligonucleotide
  Antisense strand to SEQ ID NO: 991550
aguauccaauggaaaccca

SEQ ID NO: 991552 - RNA, 19 nt, Artificial Sequence
  Description of Artificial Sequence: Synthetic oligonucleotide
  Sense strand starting at position 3538 of SEQ ID NO: 914274
uuauaagauuuccaaagag

SEQ ID NO: 991553 - RNA, 19 nt, Artificial Sequence
  Description of Artificial Sequence: Synthetic oligonucleotide
  Antisense strand to SEQ ID NO: 991552
cucuuuggaaaucuuauaa

SEQ ID NO: 991554 - RNA, 19 nt, Artificial Sequence
  Description of Artificial Sequence: Synthetic oligonucleotide
  Sense strand starting at position 3684 of SEQ ID NO: 914274
cugucauugcuacacuagu

SEQ ID NO: 991555 - RNA, 19 nt, Artificial Sequence
  Description of Artificial Sequence: Synthetic oligonucleotide
  Antisense strand to SEQ ID NO: 991554
acuaguguagcaaugacag

SEQ ID NO: 991556 - RNA, 19 nt, Artificial Sequence
  Description of Artificial Sequence: Synthetic oligonucleotide
  Sense strand starting at position 3743 of SEQ ID NO: 914274
ccacaugguuccuuuacuu

SEQ ID NO: 991557 - RNA, 19 nt, Artificial Sequence
  Description of Artificial Sequence: Synthetic oligonucleotide
  Antisense strand to SEQ ID NO: 991556
aaguaaaggaaccaugugg

SEQ ID NO: 991558 - RNA, 19 nt, Artificial Sequence
  Description of Artificial Sequence: Synthetic oligonucleotide
  Sense strand starting at position 3797 of SEQ ID NO: 914274
agucuauauuccuaggaaa

SEQ ID NO: 991559 - RNA, 19 nt, Artificial Sequence
  Description of Artificial Sequence: Synthetic oligonucleotide
  Antisense strand to SEQ ID NO: 991558
uuuccuaggaauauagacu

SEQ ID NO: 991560 - RNA, 19 nt, Artificial Sequence
  Description of Artificial Sequence: Synthetic oligonucleotide
  Sense strand starting at position 3854 of SEQ ID NO: 914274
ucauaacuugacugguaag

SEQ ID NO: 991561 - RNA, 19 nt, Artificial Sequence
  Description of Artificial Sequence: Synthetic oligonucleotide
  Antisense strand to SEQ ID NO: 991560
cuuaccagucaaguuauga

SEQ ID NO: 991562 - RNA, 19 nt, Artificial Sequence
  Description of Artificial Sequence: Synthetic oligonucleotide
  Sense strand starting at position 3912 of SEQ ID NO: 914274
cagugaauuuaaugaucug

SEQ ID NO: 991563 - RNA, 19 nt, Artificial Sequence
  Description of Artificial Sequence: Synthetic oligonucleotide
  Antisense strand to SEQ ID NO: 991562
cagaucauuaaauucacug

SEQ ID NO: 991564 - RNA, 19 nt, Artificial Sequence
  Description of Artificial Sequence: Synthetic oligonucleotide
  Sense strand starting at position 3959 of SEQ ID NO: 914274
agacaucagccucaguuua

SEQ ID NO: 991565 - RNA, 19 nt, Artificial Sequence
  Description of Artificial Sequence: Synthetic oligonucleotide
  Antisense strand to SEQ ID NO: 991564
uaaacugaggcugaugucu

SEQ ID NO: 991566 - RNA, 19 nt, Artificial Sequence
  Description of Artificial Sequence: Synthetic oligonucleotide
  Sense strand starting at position 88 of SEQ ID NO: 914275
aaaguucuguggguauaag

SEQ ID NO: 991567 - RNA, 19 nt, Artificial Sequence
  Description of Artificial Sequence: Synthetic oligonucleotide
  Antisense strand to SEQ ID NO: 991566
cuuauacccacagaacuuu

SEQ ID NO: 991568 - RNA, 19 nt, Artificial Sequence
  Description of Artificial Sequence: Synthetic oligonucleotide
  Sense strand starting at position 107 of SEQ ID NO: 914275
cagguuggcuaagauuuaa

SEQ ID NO: 991569 - RNA, 19 nt, Artificial Sequence
  Description of Artificial Sequence: Synthetic oligonucleotide
  Antisense strand to SEQ ID NO: 991568
uuaaaucuuagccaaccug

SEQ ID NO: 991570 - RNA, 19 nt, Artificial Sequence
  Description of Artificial Sequence: Synthetic oligonucleotide
  Sense strand starting at position 148 of SEQ ID NO: 914275
uaggucgaacacugaaaua

SEQ ID NO: 991571 - RNA, 19 nt, Artificial Sequence
  Description of Artificial Sequence: Synthetic oligonucleotide
  Antisense strand to SEQ ID NO: 991570
uauuucaguguucgaccua

SEQ ID NO: 991572 - RNA, 19 nt, Artificial Sequence
  Description of Artificial Sequence: Synthetic oligonucleotide
  Sense strand starting at position 256 of SEQ ID NO: 914275
agaauuaugagagguuugu

SEQ ID NO: 991573 - RNA, 19 nt, Artificial Sequence
  Description of Artificial Sequence: Synthetic oligonucleotide
  Antisense strand to SEQ ID NO: 991572
acaaaccucucauaauucu

SEQ ID NO: 991574 - RNA, 19 nt, Artificial Sequence
  Description of Artificial Sequence: Synthetic oligonucleotide
  Sense strand starting at position 292 of SEQ ID NO: 914275
gucaaacuaugauuguaua

SEQ ID NO: 991575 - RNA, 19 nt, Artificial Sequence
  Description of Artificial Sequence: Synthetic oligonucleotide
  Antisense strand to SEQ ID NO: 991574
uauacaaucauaguuugac

SEQ ID NO: 991576 - RNA, 19 nt, Artificial Sequence
  Description of Artificial Sequence: Synthetic oligonucleotide
  Sense strand starting at position 475 of SEQ ID NO: 914275
gaaauagauucgguuggca

SEQ ID NO: 991577 - RNA, 19 nt, Artificial Sequence
  Description of Artificial Sequence: Synthetic oligonucleotide
  Antisense strand to SEQ ID NO: 991576
ugccaaccgaaucuauuuc

SEQ ID NO: 991578 - RNA, 19 nt, Artificial Sequence
  Description of Artificial Sequence: Synthetic oligonucleotide
  Sense strand starting at position 648 of SEQ ID NO: 914275
ccauauccuguuggguaau

SEQ ID NO: 991579 - RNA, 19 nt, Artificial Sequence
  Description of Artificial Sequence: Synthetic oligonucleotide
  Antisense strand to SEQ ID NO: 991578
auuacccaacaggauaugg

SEQ ID NO: 991580 - RNA, 19 nt, Artificial Sequence
  Description of Artificial Sequence: Synthetic oligonucleotide
  Sense strand starting at position 650 of SEQ ID NO: 914275
auauccuguuggguaauga

SEQ ID NO: 991581 - RNA, 19 nt, Artificial Sequence
  Description of Artificial Sequence: Synthetic oligonucleotide
  Antisense strand to SEQ ID NO: 991580
ucauuacccaacaggauau

SEQ ID NO: 991582 - RNA, 19 nt, Artificial Sequence
  Description of Artificial Sequence: Synthetic oligonucleotide
  Sense strand starting at position 923 of SEQ ID NO: 914275
agagccaaguccucucaau

SEQ ID NO: 991583 - RNA, 19 nt, Artificial Sequence
  Description of Artificial Sequence: Synthetic oligonucleotide
  Antisense strand to SEQ ID NO: 991582
auugagaggacuuggcucu

SEQ ID NO: 991584 - RNA, 19 nt, Artificial Sequence
  Description of Artificial Sequence: Synthetic oligonucleotide
  Sense strand starting at position 987 of SEQ ID NO: 914275
ggucuacaaguccauauaa

SEQ ID NO: 991585 - RNA, 19 nt, Artificial Sequence
  Description of Artificial Sequence: Synthetic oligonucleotide
  Antisense strand to SEQ ID NO: 991584
uuauauggacuuguagacc

SEQ ID NO: 991586 - RNA, 19 nt, Artificial Sequence
  Description of Artificial Sequence: Synthetic oligonucleotide
  Sense strand starting at position 1048 of SEQ ID NO: 914275
uuguuaagccauugaauac

SEQ ID NO: 991587 - RNA, 19 nt, Artificial Sequence
  Description of Artificial Sequence: Synthetic oligonucleotide
  Antisense strand to SEQ ID NO: 991586
guauucaauggcuuaacaa

SEQ ID NO: 991588 - RNA, 19 nt, Artificial Sequence
  Description of Artificial Sequence: Synthetic oligonucleotide
  Sense strand starting at position 1156 of SEQ ID NO: 914275
ugcucucuucuccagagua

SEQ ID NO: 991589 - RNA, 19 nt, Artificial Sequence
  Description of Artificial Sequence: Synthetic oligonucleotide
  Antisense strand to SEQ ID NO: 991588
uacucuggagaagagagca

SEQ ID NO: 991590 - RNA, 19 nt, Artificial Sequence
  Description of Artificial Sequence: Synthetic oligonucleotide
  Sense strand starting at position 1253 of SEQ ID NO: 914275
ccuagcuuucuugggagau

SEQ ID NO: 991591 - RNA, 19 nt, Artificial Sequence
  Description of Artificial Sequence: Synthetic oligonucleotide
  Antisense strand to SEQ ID NO: 991590
aucucccaagaaagcuagg

SEQ ID NO: 991592 - RNA, 19 nt, Artificial Sequence
  Description of Artificial Sequence: Synthetic oligonucleotide
  Sense strand starting at position 1280 of SEQ ID NO: 914275
cgggcuucuaaagguuaaa

SEQ ID NO: 991593 - RNA, 19 nt, Artificial Sequence
  Description of Artificial Sequence: Synthetic oligonucleotide
  Antisense strand to SEQ ID NO: 991592
uuuaaccuuuagaagcccg

SEQ ID NO: 991594 - RNA, 19 nt, Artificial Sequence
  Description of Artificial Sequence: Synthetic oligonucleotide
  Sense strand starting at position 1283 of SEQ ID NO: 914275
gcuucuaaagguuaaauau

SEQ ID NO: 991595 - RNA, 19 nt, Artificial Sequence
  Description of Artificial Sequence: Synthetic oligonucleotide
  Antisense strand to SEQ ID NO: 991594
auauuuaaccuuuagaagc

SEQ ID NO: 991596 - RNA, 19 nt, Artificial Sequence
  Description of Artificial Sequence: Synthetic oligonucleotide
  Sense strand starting at position 1291 of SEQ ID NO: 914275
agguuaaauauugguuugu

SEQ ID NO: 991597 - RNA, 19 nt, Artificial Sequence
  Description of Artificial Sequence: Synthetic oligonucleotide
  Antisense strand to SEQ ID NO: 991596
acaaaccaauauuuaaccu

SEQ ID NO: 991598 - RNA, 19 nt, Artificial Sequence
  Description of Artificial Sequence: Synthetic oligonucleotide
  Sense strand starting at position 1355 of SEQ ID NO: 914275
uggauauauuaaucugcuu

SEQ ID NO: 991599 - RNA, 19 nt, Artificial Sequence
  Description of Artificial Sequence: Synthetic oligonucleotide
  Antisense strand to SEQ ID NO: 991598
aagcagauuaauauaucca

SEQ ID NO: 991600 - RNA, 19 nt, Artificial Sequence
  Description of Artificial Sequence: Synthetic oligonucleotide
  Sense strand starting at position 1711 of SEQ ID NO: 914275
ugcagagaucaagaguucu

SEQ ID NO: 991601 - RNA, 19 nt, Artificial Sequence
  Description of Artificial Sequence: Synthetic oligonucleotide
  Antisense strand to SEQ ID NO: 991600
agaacucuugaucucugca

SEQ ID NO: 991602 - RNA, 19 nt, Artificial Sequence
  Description of Artificial Sequence: Synthetic oligonucleotide
  Sense strand starting at position 1787 of SEQ ID NO: 914275
cacacuucugugugagaaa

SEQ ID NO: 991603 - RNA, 19 nt, Artificial Sequence
  Description of Artificial Sequence: Synthetic oligonucleotide
  Antisense strand to SEQ ID NO: 991602
uuucucacacagaagugug

SEQ ID NO: 991604 - RNA, 19 nt, Artificial Sequence
  Description of Artificial Sequence: Synthetic oligonucleotide
  Sense strand starting at position 1835 of SEQ ID NO: 914275
gcaacugcuuacccaagau

SEQ ID NO: 991605 - RNA, 19 nt, Artificial Sequence
  Description of Artificial Sequence: Synthetic oligonucleotide
  Antisense strand to SEQ ID NO: 991604
aucuuggguaagcaguugc

SEQ ID NO: 991606 - RNA, 19 nt, Artificial Sequence
  Description of Artificial Sequence: Synthetic oligonucleotide
  Sense strand starting at position 1869 of SEQ ID NO: 914275
gaggcaaugcacugaaauc

SEQ ID NO: 991607 - RNA, 19 nt, Artificial Sequence
  Description of Artificial Sequence: Synthetic oligonucleotide
  Antisense strand to SEQ ID NO: 991606
gauuucagugcauugccuc

SEQ ID NO: 991608 - RNA, 19 nt, Artificial Sequence
  Description of Artificial Sequence: Synthetic oligonucleotide
  Sense strand starting at position 1978 of SEQ ID NO: 914275
agugguugcagagaugcaa

SEQ ID NO: 991609 - RNA, 19 nt, Artificial Sequence
  Description of Artificial Sequence: Synthetic oligonucleotide
  Antisense strand to SEQ ID NO: 991608
uugcaucucugcaaccacu

SEQ ID NO: 991610 - RNA, 19 nt, Artificial Sequence
  Description of Artificial Sequence: Synthetic oligonucleotide
  Sense strand starting at position 2045 of SEQ ID NO: 914275
cccaauuguuauguauacu

SEQ ID NO: 991611 - RNA, 19 nt, Artificial Sequence
  Description of Artificial Sequence: Synthetic oligonucleotide
  Antisense strand to SEQ ID NO: 991610
aguauacauaacaauuggg

SEQ ID NO: 991612 - RNA, 19 nt, Artificial Sequence
  Description of Artificial Sequence: Synthetic oligonucleotide
  Sense strand starting at position 2438 of SEQ ID NO: 914275
agccauugauucccauaga

SEQ ID NO: 991613 - RNA, 19 nt, Artificial Sequence
  Description of Artificial Sequence: Synthetic oligonucleotide
  Antisense strand to SEQ ID NO: 991612
ucuaugggaaucaauggcu

SEQ ID NO: 991614 - RNA, 19 nt, Artificial Sequence
  Description of Artificial Sequence: Synthetic oligonucleotide
  Sense strand starting at position 2621 of SEQ ID NO: 914275
uguccuguaucaucugaaa

SEQ ID NO: 991615 - RNA, 19 nt, Artificial Sequence
  Description of Artificial Sequence: Synthetic oligonucleotide
  Antisense strand to SEQ ID NO: 991614
uuucagaugauacaggaca

SEQ ID NO: 991616 - RNA, 19 nt, Artificial Sequence
  Description of Artificial Sequence: Synthetic oligonucleotide
  Sense strand starting at position 2671 of SEQ ID NO: 914275
cugcaugguccuugagaag

SEQ ID NO: 991617 - RNA, 19 nt, Artificial Sequence
  Description of Artificial Sequence: Synthetic oligonucleotide
  Antisense strand to SEQ ID NO: 991616
cuucucaaggaccaugcag

SEQ ID NO: 991618 - RNA, 19 nt, Artificial Sequence
  Description of Artificial Sequence: Synthetic oligonucleotide
  Sense strand starting at position 2683 of SEQ ID NO: 914275
ugagaagugaugugcuaga

SEQ ID NO: 991619 - RNA, 19 nt, Artificial Sequence
  Description of Artificial Sequence: Synthetic oligonucleotide
  Antisense strand to SEQ ID NO: 991618
ucuagcacaucacuucuca

SEQ ID NO: 991620 - RNA, 19 nt, Artificial Sequence
  Description of Artificial Sequence: Synthetic oligonucleotide
  Sense strand starting at position 2694 of SEQ ID NO: 914275
gugcuagagagccagcaau

SEQ ID NO: 991621 - RNA, 19 nt, Artificial Sequence
  Description of Artificial Sequence: Synthetic oligonucleotide
  Antisense strand to SEQ ID NO: 991620
auugcuggcucucuagcac

SEQ ID NO: 991622 - RNA, 19 nt, Artificial Sequence
  Description of Artificial Sequence: Synthetic oligonucleotide
  Sense strand starting at position 2900 of SEQ ID NO: 914275
gaacgucccuagucugaaa

SEQ ID NO: 991623 - RNA, 19 nt, Artificial Sequence
  Description of Artificial Sequence: Synthetic oligonucleotide
  Antisense strand to SEQ ID NO: 991622
uuucagacuagggacguuc

SEQ ID NO: 991624 - RNA, 19 nt, Artificial Sequence
  Description of Artificial Sequence: Synthetic oligonucleotide
  Sense strand starting at position 3350 of SEQ ID NO: 914275
cggcuauuucuguaccuca

SEQ ID NO: 991625 - RNA, 19 nt, Artificial Sequence
  Description of Artificial Sequence: Synthetic oligonucleotide
  Antisense strand to SEQ ID NO: 991624
ugagguacagaaauagccg

SEQ ID NO: 991626 - RNA, 19 nt, Artificial Sequence
  Description of Artificial Sequence: Synthetic oligonucleotide
  Sense strand starting at position 3370 of SEQ ID NO: 914275
uucuguuuccuguacauga

SEQ ID NO: 991627 - RNA, 19 nt, Artificial Sequence
  Description of Artificial Sequence: Synthetic oligonucleotide
  Antisense strand to SEQ ID NO: 991626
ucauguacaggaaacagaa

SEQ ID NO: 991628 - RNA, 19 nt, Artificial Sequence
  Description of Artificial Sequence: Synthetic oligonucleotide
  Sense strand starting at position 3475 of SEQ ID NO: 914275
augaaucauucugugcuca

SEQ ID NO: 991629 - RNA, 19 nt, Artificial Sequence
  Description of Artificial Sequence: Synthetic oligonucleotide
  Antisense strand to SEQ ID NO: 991628
ugagcacagaaugauucau

SEQ ID NO: 991630 - RNA, 19 nt, Artificial Sequence
  Description of Artificial Sequence: Synthetic oligonucleotide
  Sense strand starting at position 3613 of SEQ ID NO: 914275
gaaguuuauugacuaugau

SEQ ID NO: 991631 - RNA, 19 nt, Artificial Sequence
  Description of Artificial Sequence: Synthetic oligonucleotide
  Antisense strand to SEQ ID NO: 991630
aucauagucaauaaacuuc

SEQ ID NO: 991632 - RNA, 19 nt, Artificial Sequence
  Description of Artificial Sequence: Synthetic oligonucleotide
  Sense strand starting at position 3616 of SEQ ID NO: 914275
guuuauugacuaugaugca

SEQ ID NO: 991633 - RNA, 19 nt, Artificial Sequence
  Description of Artificial Sequence: Synthetic oligonucleotide
  Antisense strand to SEQ ID NO: 991632
ugcaucauagucaauaaac

SEQ ID NO: 991634 - RNA, 19 nt, Artificial Sequence
  Description of Artificial Sequence: Synthetic oligonucleotide
  Sense strand starting at position 3811 of SEQ ID NO: 914275
auaauagucuugguccacu

SEQ ID NO: 991635 - RNA, 19 nt, Artificial Sequence
  Description of Artificial Sequence: Synthetic oligonucleotide
  Antisense strand to SEQ ID NO: 991634
aguggaccaagacuauuau

SEQ ID NO: 991636 - RNA, 19 nt, Artificial Sequence
  Description of Artificial Sequence: Synthetic oligonucleotide
  Sense strand starting at position 3843 of SEQ ID NO: 914275
cuuacaguuucccuuuaga

SEQ ID NO: 991637 - RNA, 19 nt, Artificial Sequence
  Description of Artificial Sequence: Synthetic oligonucleotide
  Antisense strand to SEQ ID NO: 991636
ucuaaagggaaacuguaag

SEQ ID NO: 991638 - RNA, 19 nt, Artificial Sequence
  Description of Artificial Sequence: Synthetic oligonucleotide
  Sense strand starting at position 3862 of SEQ ID NO: 914275
accauaacugagugacuua

SEQ ID NO: 991639 - RNA, 19 nt, Artificial Sequence
  Description of Artificial Sequence: Synthetic oligonucleotide
  Antisense strand to SEQ ID NO: 991638
uaagucacucaguuauggu

SEQ ID NO: 991640 - RNA, 19 nt, Artificial Sequence
  Description of Artificial Sequence: Synthetic oligonucleotide
  Sense strand starting at position 3865 of SEQ ID NO: 914275
auaacugagugacuuagua

SEQ ID NO: 991641 - RNA, 19 nt, Artificial Sequence
  Description of Artificial Sequence: Synthetic oligonucleotide
  Antisense strand to SEQ ID NO: 991640
uacuaagucacucaguuau

SEQ ID NO: 991642 - RNA, 19 nt, Artificial Sequence
  Description of Artificial Sequence: Synthetic oligonucleotide
  Sense strand starting at position 3869 of SEQ ID NO: 914275
cugagugacuuaguagaac

SEQ ID NO: 991643 - RNA, 19 nt, Artificial Sequence
  Description of Artificial Sequence: Synthetic oligonucleotide
  Antisense strand to SEQ ID NO: 991642
guucuacuaagucacucag

SEQ ID NO: 991644 - RNA, 19 nt, Artificial Sequence
  Description of Artificial Sequence: Synthetic oligonucleotide
  Sense strand starting at position 3899 of SEQ ID NO: 914275
ggauguggccuccagaagu

SEQ ID NO: 991645 - RNA, 19 nt, Artificial Sequence
  Description of Artificial Sequence: Synthetic oligonucleotide
  Antisense strand to SEQ ID NO: 991644
acuucuggaggccacaucc

SEQ ID NO: 991646 - RNA, 19 nt, Artificial Sequence
  Description of Artificial Sequence: Synthetic oligonucleotide
  Sense strand starting at position 253 of SEQ ID NO: 914276
uuugaaugagaguagcauu

SEQ ID NO: 991647 - RNA, 19 nt, Artificial Sequence
  Description of Artificial Sequence: Synthetic oligonucleotide
  Antisense strand to SEQ ID NO: 991646
aaugcuacucucauucaaa

SEQ ID NO: 991648 - RNA, 19 nt, Artificial Sequence
  Description of Artificial Sequence: Synthetic oligonucleotide
  Sense strand starting at position 326 of SEQ ID NO: 914276
acauuaggacuuuauuguu

SEQ ID NO: 991649 - RNA, 19 nt, Artificial Sequence
  Description of Artificial Sequence: Synthetic oligonucleotide
  Antisense strand to SEQ ID NO: 991648
aacaauaaaguccuaaugu

SEQ ID NO: 991650 - RNA, 19 nt, Artificial Sequence
  Description of Artificial Sequence: Synthetic oligonucleotide
  Sense strand starting at position 346 of SEQ ID NO: 914276
guaacaaacuacuugggau

SEQ ID NO: 991651 - RNA, 19 nt, Artificial Sequence
  Description of Artificial Sequence: Synthetic oligonucleotide
  Antisense strand to SEQ ID NO: 991650
aucccaaguaguuuguuac

SEQ ID NO: 991652 - RNA, 19 nt, Artificial Sequence
  Description of Artificial Sequence: Synthetic oligonucleotide
  Sense strand starting at position 382 of SEQ ID NO: 914276
cugauauacgaguaucuau

SEQ ID NO: 991653 - RNA, 19 nt, Artificial Sequence
  Description of Artificial Sequence: Synthetic oligonucleotide
  Antisense strand to SEQ ID NO: 991652
auagauacucguauaucag

SEQ ID NO: 991654 - RNA, 19 nt, Artificial Sequence
  Description of Artificial Sequence: Synthetic oligonucleotide
  Sense strand starting at position 385 of SEQ ID NO: 914276
auauacgaguaucuauaca

SEQ ID NO: 991655 - RNA, 19 nt, Artificial Sequence
  Description of Artificial Sequence: Synthetic oligonucleotide
  Antisense strand to SEQ ID NO: 991654
uguauagauacucguauau

SEQ ID NO: 991656 - RNA, 19 nt, Artificial Sequence
  Description of Artificial Sequence: Synthetic oligonucleotide
  Sense strand starting at position 635 of SEQ ID NO: 914276
uuucuagaaccucggaauu

SEQ ID NO: 991657 - RNA, 19 nt, Artificial Sequence
  Description of Artificial Sequence: Synthetic oligonucleotide
  Antisense strand to SEQ ID NO: 991656
aauuccgagguucuagaaa

SEQ ID NO: 991658 - RNA, 19 nt, Artificial Sequence
  Description of Artificial Sequence: Synthetic oligonucleotide
  Sense strand starting at position 637 of SEQ ID NO: 914276
ucuagaaccucggaauuua

SEQ ID NO: 991659 - RNA, 19 nt, Artificial Sequence
  Description of Artificial Sequence: Synthetic oligonucleotide
  Antisense strand to SEQ ID NO: 991658
uaaauuccgagguucuaga

SEQ ID NO: 991660 - RNA, 19 nt, Artificial Sequence
  Description of Artificial Sequence: Synthetic oligonucleotide
  Sense strand starting at position 788 of SEQ ID NO: 914276
agguaagcauuaccauuau

SEQ ID NO: 991661 - RNA, 19 nt, Artificial Sequence
  Description of Artificial Sequence: Synthetic oligonucleotide
  Antisense strand to SEQ ID NO: 991660
auaaugguaaugcuuaccu

SEQ ID NO: 991662 - RNA, 19 nt, Artificial Sequence
  Description of Artificial Sequence: Synthetic oligonucleotide
  Sense strand starting at position 837 of SEQ ID NO: 914276
agcuaagaucagcaagguu

SEQ ID NO: 991663 - RNA, 19 nt, Artificial Sequence
  Description of Artificial Sequence: Synthetic oligonucleotide
  Antisense strand to SEQ ID NO: 991662
aaccuugcugaucuuagcu

SEQ ID NO: 991664 - RNA, 19 nt, Artificial Sequence
  Description of Artificial Sequence: Synthetic oligonucleotide
  Sense strand starting at position 887 of SEQ ID NO: 914276
ccaaauuccugagcuagga

SEQ ID NO: 991665 - RNA, 19 nt, Artificial Sequence
  Description of Artificial Sequence: Synthetic oligonucleotide
  Antisense strand to SEQ ID NO: 991664
uccuagcucaggaauuugg

SEQ ID NO: 991666 - RNA, 19 nt, Artificial Sequence
  Description of Artificial Sequence: Synthetic oligonucleotide
  Sense strand starting at position 1072 of SEQ ID NO: 914276
aguccagucuaucuugaau

SEQ ID NO: 991667 - RNA, 19 nt, Artificial Sequence
  Description of Artificial Sequence: Synthetic oligonucleotide
  Antisense strand to SEQ ID NO: 991666
auucaagauagacuggacu

SEQ ID NO: 991668 - RNA, 19 nt, Artificial Sequence
  Description of Artificial Sequence: Synthetic oligonucleotide
  Sense strand starting at position 1370 of SEQ ID NO: 914276
accuauauggcucaucaga

SEQ ID NO: 991669 - RNA, 19 nt, Artificial Sequence
  Description of Artificial Sequence: Synthetic oligonucleotide
  Antisense strand to SEQ ID NO: 991668
ucugaugagccauauaggu

SEQ ID NO: 991670 - RNA, 19 nt, Artificial Sequence
  Description of Artificial Sequence: Synthetic oligonucleotide
  Sense strand starting at position 1372 of SEQ ID NO: 914276
cuauauggcucaucagaag

SEQ ID NO: 991671 - RNA, 19 nt, Artificial Sequence
  Description of Artificial Sequence: Synthetic oligonucleotide
  Antisense strand to SEQ ID NO: 991670
cuucugaugagccauauag

SEQ ID NO: 991672 - RNA, 19 nt, Artificial Sequence
  Description of Artificial Sequence: Synthetic oligonucleotide
  Sense strand starting at position 1378 of SEQ ID NO: 914276
ggcucaucagaaggauucu

SEQ ID NO: 991673 - RNA, 19 nt, Artificial Sequence
  Description of Artificial Sequence: Synthetic oligonucleotide
  Antisense strand to SEQ ID NO: 991672
agaauccuucugaugagcc

SEQ ID NO: 991674 - RNA, 19 nt, Artificial Sequence
  Description of Artificial Sequence: Synthetic oligonucleotide
  Sense strand starting at position 1507 of SEQ ID NO: 914276
agaagucucuccuuucuga

SEQ ID NO: 991675 - RNA, 19 nt, Artificial Sequence
  Description of Artificial Sequence: Synthetic oligonucleotide
  Antisense strand to SEQ ID NO: 991674
ucagaaaggagagacuucu

SEQ ID NO: 991676 - RNA, 19 nt, Artificial Sequence
  Description of Artificial Sequence: Synthetic oligonucleotide
  Sense strand starting at position 1666 of SEQ ID NO: 914276
aaagcauuugcuggcugau

SEQ ID NO: 991677 - RNA, 19 nt, Artificial Sequence
  Description of Artificial Sequence: Synthetic oligonucleotide
  Antisense strand to SEQ ID NO: 991676
aucagccagcaaaugcuuu

SEQ ID NO: 991678 - RNA, 19 nt, Artificial Sequence
  Description of Artificial Sequence: Synthetic oligonucleotide
  Sense strand starting at position 1740 of SEQ ID NO: 914276
cugcauuuccacuguguuu

SEQ ID NO: 991679 - RNA, 19 nt, Artificial Sequence
  Description of Artificial Sequence: Synthetic oligonucleotide
  Antisense strand to SEQ ID NO: 991678
aaacacaguggaaaugcag

SEQ ID NO: 991680 - RNA, 19 nt, Artificial Sequence
  Description of Artificial Sequence: Synthetic oligonucleotide
  Sense strand starting at position 1742 of SEQ ID NO: 914276
gcauuuccacuguguuuau

SEQ ID NO: 991681 - RNA, 19 nt, Artificial Sequence
  Description of Artificial Sequence: Synthetic oligonucleotide
  Antisense strand to SEQ ID NO: 991680
auaaacacaguggaaaugc

SEQ ID NO: 991682 - RNA, 19 nt, Artificial Sequence
  Description of Artificial Sequence: Synthetic oligonucleotide
  Sense strand starting at position 1863 of SEQ ID NO: 914276
ucgagcggucacuacaaga

SEQ ID NO: 991683 - RNA, 19 nt, Artificial Sequence
  Description of Artificial Sequence: Synthetic oligonucleotide
  Antisense strand to SEQ ID NO: 991682
ucuuguagugaccgcucga

SEQ ID NO: 991684 - RNA, 19 nt, Artificial Sequence
  Description of Artificial Sequence: Synthetic oligonucleotide
  Sense strand starting at position 1915 of SEQ ID NO: 914276
agauaugcucuaugcaaag

SEQ ID NO: 991685 - RNA, 19 nt, Artificial Sequence
  Description of Artificial Sequence: Synthetic oligonucleotide
  Antisense strand to SEQ ID NO: 991684
cuuugcauagagcauaucu

SEQ ID NO: 991686 - RNA, 19 nt, Artificial Sequence
  Description of Artificial Sequence: Synthetic oligonucleotide
  Sense strand starting at position 2037 of SEQ ID NO: 914276
agcuguuucccugagagaa

SEQ ID NO: 991687 - RNA, 19 nt, Artificial Sequence
  Description of Artificial Sequence: Synthetic oligonucleotide
  Antisense strand to SEQ ID NO: 991686
uucucucagggaaacagcu

SEQ ID NO: 991688 - RNA, 19 nt, Artificial Sequence
  Description of Artificial Sequence: Synthetic oligonucleotide
  Sense strand starting at position 2212 of SEQ ID NO: 914276
cuccaugugugauugaaag

SEQ ID NO: 991689 - RNA, 19 nt, Artificial Sequence
  Description of Artificial Sequence: Synthetic oligonucleotide
  Antisense strand to SEQ ID NO: 991688
cuuucaaucacacauggag

SEQ ID NO: 991690 - RNA, 19 nt, Artificial Sequence
  Description of Artificial Sequence: Synthetic oligonucleotide
  Sense strand starting at position 2214 of SEQ ID NO: 914276
ccaugugugauugaaagug

SEQ ID NO: 991691 - RNA, 19 nt, Artificial Sequence
  Description of Artificial Sequence: Synthetic oligonucleotide
  Antisense strand to SEQ ID NO: 991690
cacuuucaaucacacaugg

SEQ ID NO: 991692 - RNA, 19 nt, Artificial Sequence
  Description of Artificial Sequence: Synthetic oligonucleotide
  Sense strand starting at position 2219 of SEQ ID NO: 914276
ugugauugaaaguguaaua

SEQ ID NO: 991693 - RNA, 19 nt, Artificial Sequence
  Description of Artificial Sequence: Synthetic oligonucleotide
  Antisense strand to SEQ ID NO: 991692
uauuacacuuucaaucaca

SEQ ID NO: 991694 - RNA, 19 nt, Artificial Sequence
  Description of Artificial Sequence: Synthetic oligonucleotide
  Sense strand starting at position 2253 of SEQ ID NO: 914276
aagaacacuguguguagaa

SEQ ID NO: 991695 - RNA, 19 nt, Artificial Sequence
  Description of Artificial Sequence: Synthetic oligonucleotide
  Antisense strand to SEQ ID NO: 991694
uucuacacacaguguucuu

SEQ ID NO: 991696 - RNA, 19 nt, Artificial Sequence
  Description of Artificial Sequence: Synthetic oligonucleotide
  Sense strand starting at position 2254 of SEQ ID NO: 914276
agaacacuguguguagaau

SEQ ID NO: 991697 - RNA, 19 nt, Artificial Sequence
  Description of Artificial Sequence: Synthetic oligonucleotide
  Antisense strand to SEQ ID NO: 991696
auucuacacacaguguucu

SEQ ID NO: 991698 - RNA, 19 nt, Artificial Sequence
  Description of Artificial Sequence: Synthetic oligonucleotide
  Sense strand starting at position 2255 of SEQ ID NO: 914276
gaacacuguguguagaauu

SEQ ID NO: 991699 - RNA, 19 nt, Artificial Sequence
  Description of Artificial Sequence: Synthetic oligonucleotide
  Antisense strand to SEQ ID NO: 991698
aauucuacacacaguguuc

SEQ ID NO: 991700 - RNA, 19 nt, Artificial Sequence
  Description of Artificial Sequence: Synthetic oligonucleotide
  Sense strand starting at position 2334 of SEQ ID NO: 914276
agggcaaucuugguagaga

SEQ ID NO: 991701 - RNA, 19 nt, Artificial Sequence
  Description of Artificial Sequence: Synthetic oligonucleotide
  Antisense strand to SEQ ID NO: 991700
ucucuaccaagauugcccu

SEQ ID NO: 991702 - RNA, 19 nt, Artificial Sequence
  Description of Artificial Sequence: Synthetic oligonucleotide
  Sense strand starting at position 2595 of SEQ ID NO: 914276
gccugugugcauguuugua

SEQ ID NO: 991703 - RNA, 19 nt, Artificial Sequence
  Description of Artificial Sequence: Synthetic oligonucleotide
  Antisense strand to SEQ ID NO: 991702
uacaaacaugcacacaggc

SEQ ID NO: 991704 - RNA, 19 nt, Artificial Sequence
  Description of Artificial Sequence: Synthetic oligonucleotide
  Sense strand starting at position 2619 of SEQ ID NO: 914276
ucuggauugccuggaauag

SEQ ID NO: 991705 - RNA, 19 nt, Artificial Sequence
  Description of Artificial Sequence: Synthetic oligonucleotide
  Antisense strand to SEQ ID NO: 991704
cuauuccaggcaauccaga

SEQ ID NO: 991706 - RNA, 19 nt, Artificial Sequence
  Description of Artificial Sequence: Synthetic oligonucleotide
  Sense strand starting at position 2679 of SEQ ID NO: 914276
uuaaauuacuguccaaagu

SEQ ID NO: 991707 - RNA, 19 nt, Artificial Sequence
  Description of Artificial Sequence: Synthetic oligonucleotide
  Antisense strand to SEQ ID NO: 991706
acuuuggacaguaauuuaa

SEQ ID NO: 991708 - RNA, 19 nt, Artificial Sequence
  Description of Artificial Sequence: Synthetic oligonucleotide
  Sense strand starting at position 2738 of SEQ ID NO: 914276
agcaaagcaccugauuaau

SEQ ID NO: 991709 - RNA, 19 nt, Artificial Sequence
  Description of Artificial Sequence: Synthetic oligonucleotide
  Antisense strand to SEQ ID NO: 991708
auuaaucaggugcuuugcu

SEQ ID NO: 991710 - RNA, 19 nt, Artificial Sequence
  Description of Artificial Sequence: Synthetic oligonucleotide
  Sense strand starting at position 2985 of SEQ ID NO: 914276
guugaagugcugggaggaa

SEQ ID NO: 991711 - RNA, 19 nt, Artificial Sequence
  Description of Artificial Sequence: Synthetic oligonucleotide
  Antisense strand to SEQ ID NO: 991710
uuccucccagcacuucaac

SEQ ID NO: 991712 - RNA, 19 nt, Artificial Sequence
  Description of Artificial Sequence: Synthetic oligonucleotide
  Sense strand starting at position 3104 of SEQ ID NO: 914276
ggucucucuuugguaauuu

SEQ ID NO: 991713 - RNA, 19 nt, Artificial Sequence
  Description of Artificial Sequence: Synthetic oligonucleotide
  Antisense strand to SEQ ID NO: 991712
aaauuaccaaagagagacc

SEQ ID NO: 991714 - RNA, 19 nt, Artificial Sequence
  Description of Artificial Sequence: Synthetic oligonucleotide
  Sense strand starting at position 3186 of SEQ ID NO: 914276
agagaaacuuucccuuugu

SEQ ID NO: 991715 - RNA, 19 nt, Artificial Sequence
  Description of Artificial Sequence: Synthetic oligonucleotide
  Antisense strand to SEQ ID NO: 991714
acaaagggaaaguuucucu

SEQ ID NO: 991716 - RNA, 19 nt, Artificial Sequence
  Description of Artificial Sequence: Synthetic oligonucleotide
  Sense strand starting at position 3630 of SEQ ID NO: 914276
acugguaugcagcauugaa

SEQ ID NO: 991717 - RNA, 19 nt, Artificial Sequence
  Description of Artificial Sequence: Synthetic oligonucleotide
  Antisense strand to SEQ ID NO: 991716
uucaaugcugcauaccagu

SEQ ID NO: 991718 - RNA, 19 nt, Artificial Sequence
  Description of Artificial Sequence: Synthetic oligonucleotide
  Sense strand starting at position 3780 of SEQ ID NO: 914276
cagaguaguguuugaagag

SEQ ID NO: 991719 - RNA, 19 nt, Artificial Sequence
  Description of Artificial Sequence: Synthetic oligonucleotide
  Antisense strand to SEQ ID NO: 991718
cucuucaaacacuacucug

SEQ ID NO: 991720 - RNA, 19 nt, Artificial Sequence
  Description of Artificial Sequence: Synthetic oligonucleotide
  Sense strand starting at position 3812 of SEQ ID NO: 914276
gcuuuagauuggccauaag

SEQ ID NO: 991721 - RNA, 19 nt, Artificial Sequence
  Description of Artificial Sequence: Synthetic oligonucleotide
  Antisense strand to SEQ ID NO: 991720
cuuauggccaaucuaaagc

SEQ ID NO: 991722 - RNA, 19 nt, Artificial Sequence
  Description of Artificial Sequence: Synthetic oligonucleotide
  Sense strand starting at position 3879 of SEQ ID NO: 914276
gcaggaugcccuugagaug

SEQ ID NO: 991723 - RNA, 19 nt, Artificial Sequence
  Description of Artificial Sequence: Synthetic oligonucleotide
  Antisense strand to SEQ ID NO: 991722
caucucaagggcauccugc

SEQ ID NO: 991724 - RNA, 19 nt, Artificial Sequence
  Description of Artificial Sequence: Synthetic oligonucleotide
  Sense strand starting at position 3950 of SEQ ID NO: 914276
ggauauccagccugaaauu

SEQ ID NO: 991725 - RNA, 19 nt, Artificial Sequence
  Description of Artificial Sequence: Synthetic oligonucleotide
  Antisense strand to SEQ ID NO: 991724
aauuucaggcuggauaucc

SEQ ID NO: 991726 - RNA, 19 nt, Artificial Sequence
  Description of Artificial Sequence: Synthetic oligonucleotide
  Sense strand starting at position 106 of SEQ ID NO: 914277
cuaggaaguaaaugucagu

SEQ ID NO: 991727 - RNA, 19 nt, Artificial Sequence
  Description of Artificial Sequence: Synthetic oligonucleotide
  Antisense strand to SEQ ID NO: 991726
acugacauuuacuuccuag

SEQ ID NO: 991728 - RNA, 19 nt, Artificial Sequence
  Description of Artificial Sequence: Synthetic oligonucleotide
  Sense strand starting at position 125 of SEQ ID NO: 914277
ugcucuagauucuuuaaga

SEQ ID NO: 991729 - RNA, 19 nt, Artificial Sequence
  Description of Artificial Sequence: Synthetic oligonucleotide
  Antisense strand to SEQ ID NO: 991728
ucuuaaagaaucuagagca

SEQ ID NO: 991730 - RNA, 19 nt, Artificial Sequence
  Description of Artificial Sequence: Synthetic oligonucleotide
  Sense strand starting at position 126 of SEQ ID NO: 914277
gcucuagauucuuuaagac

SEQ ID NO: 991731 - RNA, 19 nt, Artificial Sequence
  Description of Artificial Sequence: Synthetic oligonucleotide
  Antisense strand to SEQ ID NO: 991730
gucuuaaagaaucuagagc

SEQ ID NO: 991732 - RNA, 19 nt, Artificial Sequence
  Description of Artificial Sequence: Synthetic oligonucleotide
  Sense strand starting at position 154 of SEQ ID NO: 914277
uagagagcuccuuaaucgu

SEQ ID NO: 991733 - RNA, 19 nt, Artificial Sequence
  Description of Artificial Sequence: Synthetic oligonucleotide
  Antisense strand to SEQ ID NO: 991732
acgauuaaggagcucucua

SEQ ID NO: 991734 - RNA, 19 nt, Artificial Sequence
  Description of Artificial Sequence: Synthetic oligonucleotide
  Sense strand starting at position 227 of SEQ ID NO: 914277
gggaaaucuuagccaguuu

SEQ ID NO: 991735 - RNA, 19 nt, Artificial Sequence
  Description of Artificial Sequence: Synthetic oligonucleotide
  Antisense strand to SEQ ID NO: 991734
aaacuggcuaagauuuccc

SEQ ID NO: 991736 - RNA, 19 nt, Artificial Sequence
  Description of Artificial Sequence: Synthetic oligonucleotide
  Sense strand starting at position 228 of SEQ ID NO: 914277
ggaaaucuuagccaguuug

SEQ ID NO: 991737 - RNA, 19 nt, Artificial Sequence
  Description of Artificial Sequence: Synthetic oligonucleotide
  Antisense strand to SEQ ID NO: 991736
caaacuggcuaagauuucc

SEQ ID NO: 991738 - RNA, 19 nt, Artificial Sequence
  Description of Artificial Sequence: Synthetic oligonucleotide
  Sense strand starting at position 271 of SEQ ID NO: 914277
gaagcagggagccaugauu

SEQ ID NO: 991739 - RNA, 19 nt, Artificial Sequence
  Description of Artificial Sequence: Synthetic oligonucleotide
  Antisense strand to SEQ ID NO: 991738
aaucauggcucccugcuuc

SEQ ID NO: 991740 - RNA, 19 nt, Artificial Sequence
  Description of Artificial Sequence: Synthetic oligonucleotide
  Sense strand starting at position 277 of SEQ ID NO: 914277
gggagccaugauuguuuaa

SEQ ID NO: 991741 - RNA, 19 nt, Artificial Sequence
  Description of Artificial Sequence: Synthetic oligonucleotide
  Antisense strand to SEQ ID NO: 991740
uuaaacaaucauggcuccc

SEQ ID NO: 991742 - RNA, 19 nt, Artificial Sequence
  Description of Artificial Sequence: Synthetic oligonucleotide
  Sense strand starting at position 279 of SEQ ID NO: 914277
gagccaugauuguuuaaua

SEQ ID NO: 991743 - RNA, 19 nt, Artificial Sequence
  Description of Artificial Sequence: Synthetic oligonucleotide
  Antisense strand to SEQ ID NO: 991742
uauuaaacaaucauggcuc

SEQ ID NO: 991744 - RNA, 19 nt, Artificial Sequence
  Description of Artificial Sequence: Synthetic oligonucleotide
  Sense strand starting at position 342 of SEQ ID NO: 914277
cuggaacuguagcuauuaa

SEQ ID NO: 991745 - RNA, 19 nt, Artificial Sequence
  Description of Artificial Sequence: Synthetic oligonucleotide
  Antisense strand to SEQ ID NO: 991744
uuaauagcuacaguuccag

SEQ ID NO: 991746 - RNA, 19 nt, Artificial Sequence
  Description of Artificial Sequence: Synthetic oligonucleotide
  Sense strand starting at position 431 of SEQ ID NO: 914277
gcaucuucgagguaucaca

SEQ ID NO: 991747 - RNA, 19 nt, Artificial Sequence
  Description of Artificial Sequence: Synthetic oligonucleotide
  Antisense strand to SEQ ID NO: 991746
ugugauaccucgaagaugc

SEQ ID NO: 991748 - RNA, 19 nt, Artificial Sequence
  Description of Artificial Sequence: Synthetic oligonucleotide
  Sense strand starting at position 662 of SEQ ID NO: 914277
ccaggugauccacacgcua

SEQ ID NO: 991749 - RNA, 19 nt, Artificial Sequence
  Description of Artificial Sequence: Synthetic oligonucleotide
  Antisense strand to SEQ ID NO: 991748
uagcguguggaucaccugg

SEQ ID NO: 991750 - RNA, 19 nt, Artificial Sequence
  Description of Artificial Sequence: Synthetic oligonucleotide
  Sense strand starting at position 764 of SEQ ID NO: 914277
aaaggaaagucuuccuagu

SEQ ID NO: 991751 - RNA, 19 nt, Artificial Sequence
  Description of Artificial Sequence: Synthetic oligonucleotide
  Antisense strand to SEQ ID NO: 991750
acuaggaagacuuuccuuu

SEQ ID NO: 991752 - RNA, 19 nt, Artificial Sequence
  Description of Artificial Sequence: Synthetic oligonucleotide
  Sense strand starting at position 766 of SEQ ID NO: 914277
aggaaagucuuccuaguca

SEQ ID NO: 991753 - RNA, 19 nt, Artificial Sequence
  Description of Artificial Sequence: Synthetic oligonucleotide
  Antisense strand to SEQ ID NO: 991752
ugacuaggaagacuuuccu

SEQ ID NO: 991754 - RNA, 19 nt, Artificial Sequence
  Description of Artificial Sequence: Synthetic oligonucleotide
  Sense strand starting at position 774 of SEQ ID NO: 914277
cuuccuagucaucaguaaa

SEQ ID NO: 991755 - RNA, 19 nt, Artificial Sequence
  Description of Artificial Sequence: Synthetic oligonucleotide
  Antisense strand to SEQ ID NO: 991754
uuuacugaugacuaggaag

SEQ ID NO: 991756 - RNA, 19 nt, Artificial Sequence
  Description of Artificial Sequence: Synthetic oligonucleotide
  Sense strand starting at position 777 of SEQ ID NO: 914277
ccuagucaucaguaaagau

SEQ ID NO: 991757 - RNA, 19 nt, Artificial Sequence
  Description of Artificial Sequence: Synthetic oligonucleotide
  Antisense strand to SEQ ID NO: 991756
aucuuuacugaugacuagg

SEQ ID NO: 991758 - RNA, 19 nt, Artificial Sequence
  Description of Artificial Sequence: Synthetic oligonucleotide
  Sense strand starting at position 1119 of SEQ ID NO: 914277
gcgaaagcagauuauugua

SEQ ID NO: 991759 - RNA, 19 nt, Artificial Sequence
  Description of Artificial Sequence: Synthetic oligonucleotide
  Antisense strand to SEQ ID NO: 991758
uacaauaaucugcuuucgc

SEQ ID NO: 991760 - RNA, 19 nt, Artificial Sequence
  Description of Artificial Sequence: Synthetic oligonucleotide
  Sense strand starting at position 1121 of SEQ ID NO: 914277
gaaagcagauuauuguaaa

SEQ ID NO: 991761 - RNA, 19 nt, Artificial Sequence
  Description of Artificial Sequence: Synthetic oligonucleotide
  Antisense strand to SEQ ID NO: 991760
uuuacaauaaucugcuuuc

SEQ ID NO: 991762 - RNA, 19 nt, Artificial Sequence
  Description of Artificial Sequence: Synthetic oligonucleotide
  Sense strand starting at position 1168 of SEQ ID NO: 914277
gauguaacucuccaguuug

SEQ ID NO: 991763 - RNA, 19 nt, Artificial Sequence
  Description of Artificial Sequence: Synthetic oligonucleotide
  Antisense strand to SEQ ID NO: 991762
caaacuggagaguuacauc

SEQ ID NO: 991764 - RNA, 19 nt, Artificial Sequence
  Description of Artificial Sequence: Synthetic oligonucleotide
  Sense strand starting at position 2155 of SEQ ID NO: 914277
ugaaauugcccagagcuca

SEQ ID NO: 991765 - RNA, 19 nt, Artificial Sequence
  Description of Artificial Sequence: Synthetic oligonucleotide
  Antisense strand to SEQ ID NO: 991764
ugagcucugggcaauuuca

SEQ ID NO: 991766 - RNA, 19 nt, Artificial Sequence
  Description of Artificial Sequence: Synthetic oligonucleotide
  Sense strand starting at position 2335 of SEQ ID NO: 914277
agucuagauuugcuuaggu

SEQ ID NO: 991767 - RNA, 19 nt, Artificial Sequence
  Description of Artificial Sequence: Synthetic oligonucleotide
  Antisense strand to SEQ ID NO: 991766
accuaagcaaaucuagacu

SEQ ID NO: 991768 - RNA, 19 nt, Artificial Sequence
  Description of Artificial Sequence: Synthetic oligonucleotide
  Sense strand starting at position 2443 of SEQ ID NO: 914277
acuugagauugggcgauaa

SEQ ID NO: 991769 - RNA, 19 nt, Artificial Sequence
  Description of Artificial Sequence: Synthetic oligonucleotide
  Antisense strand to SEQ ID NO: 991768
uuaucgcccaaucucaagu

SEQ ID NO: 991770 - RNA, 19 nt, Artificial Sequence
  Description of Artificial Sequence: Synthetic oligonucleotide
  Sense strand starting at position 2510 of SEQ ID NO: 914277
gacagccucggauauuaaa

SEQ ID NO: 991771 - RNA, 19 nt, Artificial Sequence
  Description of Artificial Sequence: Synthetic oligonucleotide
  Antisense strand to SEQ ID NO: 991770
uuuaauauccgaggcuguc

SEQ ID NO: 991772 - RNA, 19 nt, Artificial Sequence
  Description of Artificial Sequence: Synthetic oligonucleotide
  Sense strand starting at position 2781 of SEQ ID NO: 914277
aagagaaagcuagguaacu

SEQ ID NO: 991773 - RNA, 19 nt, Artificial Sequence
  Description of Artificial Sequence: Synthetic oligonucleotide
  Antisense strand to SEQ ID NO: 991772
aguuaccuagcuuucucuu

SEQ ID NO: 991774 - RNA, 19 nt, Artificial Sequence
  Description of Artificial Sequence: Synthetic oligonucleotide
  Sense strand starting at position 2815 of SEQ ID NO: 914277
aggauguuagugggagagu

SEQ ID NO: 991775 - RNA, 19 nt, Artificial Sequence
  Description of Artificial Sequence: Synthetic oligonucleotide
  Antisense strand to SEQ ID NO: 991774
acucucccacuaacauccu

SEQ ID NO: 991776 - RNA, 19 nt, Artificial Sequence
  Description of Artificial Sequence: Synthetic oligonucleotide
  Sense strand starting at position 2904 of SEQ ID NO: 914277
agggacuccucccuggauu

SEQ ID NO: 991777 - RNA, 19 nt, Artificial Sequence
  Description of Artificial Sequence: Synthetic oligonucleotide
  Antisense strand to SEQ ID NO: 991776
aauccagggaggagucccu

SEQ ID NO: 991778 - RNA, 19 nt, Artificial Sequence
  Description of Artificial Sequence: Synthetic oligonucleotide
  Sense strand starting at position 3022 of SEQ ID NO: 914277
aguaaacucugcucucaag

SEQ ID NO: 991779 - RNA, 19 nt, Artificial Sequence
  Description of Artificial Sequence: Synthetic oligonucleotide
  Antisense strand to SEQ ID NO: 991778
cuugagagcagaguuuacu

SEQ ID NO: 991780 - RNA, 19 nt, Artificial Sequence
  Description of Artificial Sequence: Synthetic oligonucleotide
  Sense strand starting at position 3028 of SEQ ID NO: 914277
cucugcucucaagauaaag

SEQ ID NO: 991781 - RNA, 19 nt, Artificial Sequence
  Description of Artificial Sequence: Synthetic oligonucleotide
  Antisense strand to SEQ ID NO: 991780
cuuuaucuugagagcagag

SEQ ID NO: 991782 - RNA, 19 nt, Artificial Sequence
  Description of Artificial Sequence: Synthetic oligonucleotide
  Sense strand starting at position 3175 of SEQ ID NO: 914277
cuguuaucugucuaagaag

SEQ ID NO: 991783 - RNA, 19 nt, Artificial Sequence
  Description of Artificial Sequence: Synthetic oligonucleotide
  Antisense strand to SEQ ID NO: 991782
cuucuuagacagauaacag

SEQ ID NO: 991784 - RNA, 19 nt, Artificial Sequence
  Description of Artificial Sequence: Synthetic oligonucleotide
  Sense strand starting at position 3458 of SEQ ID NO: 914277
gcagaauaacaacgucaca

SEQ ID NO: 991785 - RNA, 19 nt, Artificial Sequence
  Description of Artificial Sequence: Synthetic oligonucleotide
  Antisense strand to SEQ ID NO: 991784
ugugacguuguuauucugc

SEQ ID NO: 991786 - RNA, 19 nt, Artificial Sequence
  Description of Artificial Sequence: Synthetic oligonucleotide
  Sense strand starting at position 3478 of SEQ ID NO: 914277
aaauguaggccuggaaaga

SEQ ID NO: 991787 - RNA, 19 nt, Artificial Sequence
  Description of Artificial Sequence: Synthetic oligonucleotide
  Antisense strand to SEQ ID NO: 991786
ucuuuccaggccuacauuu

SEQ ID NO: 991788 - RNA, 19 nt, Artificial Sequence
  Description of Artificial Sequence: Synthetic oligonucleotide
  Sense strand starting at position 3523 of SEQ ID NO: 914277
ucacuugccggaugaagaa

SEQ ID NO: 991789 - RNA, 19 nt, Artificial Sequence
  Description of Artificial Sequence: Synthetic oligonucleotide
  Antisense strand to SEQ ID NO: 991788
uucuucauccggcaaguga

SEQ ID NO: 991790 - RNA, 19 nt, Artificial Sequence
  Description of Artificial Sequence: Synthetic oligonucleotide
  Sense strand starting at position 3557 of SEQ ID NO: 914277
uugaaugacuuguccaaug

SEQ ID NO: 991791 - RNA, 19 nt, Artificial Sequence
  Description of Artificial Sequence: Synthetic oligonucleotide
  Antisense strand to SEQ ID NO: 991790
cauuggacaagucauucaa

SEQ ID NO: 991792 - RNA, 19 nt, Artificial Sequence
  Description of Artificial Sequence: Synthetic oligonucleotide
  Sense strand starting at position 3559 of SEQ ID NO: 914277
gaaugacuuguccaauguu

SEQ ID NO: 991793 - RNA, 19 nt, Artificial Sequence
  Description of Artificial Sequence: Synthetic oligonucleotide
  Antisense strand to SEQ ID NO: 991792
aacauuggacaagucauuc

SEQ ID NO: 991794 - RNA, 19 nt, Artificial Sequence
  Description of Artificial Sequence: Synthetic oligonucleotide
  Sense strand starting at position 3594 of SEQ ID NO: 914277
agcaaagccagguauagaa

SEQ ID NO: 991795 - RNA, 19 nt, Artificial Sequence
  Description of Artificial Sequence: Synthetic oligonucleotide
  Antisense strand to SEQ ID NO: 991794
uucuauaccuggcuuugcu

SEQ ID NO: 991796 - RNA, 19 nt, Artificial Sequence
  Description of Artificial Sequence: Synthetic oligonucleotide
  Sense strand starting at position 3636 of SEQ ID NO: 914277
uguauuacacauugugaac

SEQ ID NO: 991797 - RNA, 19 nt, Artificial Sequence
  Description of Artificial Sequence: Synthetic oligonucleotide
  Antisense strand to SEQ ID NO: 991796
guucacaauguguaauaca

SEQ ID NO: 991798 - RNA, 19 nt, Artificial Sequence
  Description of Artificial Sequence: Synthetic oligonucleotide
  Sense strand starting at position 3673 of SEQ ID NO: 914277
agcugaagugguuaucuua

SEQ ID NO: 991799 - RNA, 19 nt, Artificial Sequence
  Description of Artificial Sequence: Synthetic oligonucleotide
  Antisense strand to SEQ ID NO: 991798
uaagauaaccacuucagcu

SEQ ID NO: 991800 - RNA, 19 nt, Artificial Sequence
  Description of Artificial Sequence: Synthetic oligonucleotide
  Sense strand starting at position 3718 of SEQ ID NO: 914277
ccuaacauuugcgcgaauu

SEQ ID NO: 991801 - RNA, 19 nt, Artificial Sequence
  Description of Artificial Sequence: Synthetic oligonucleotide
  Antisense strand to SEQ ID NO: 991800
aauucgcgcaaauguuagg

SEQ ID NO: 991802 - RNA, 19 nt, Artificial Sequence
  Description of Artificial Sequence: Synthetic oligonucleotide
  Sense strand starting at position 3819 of SEQ ID NO: 914277
uccuauagucuaggaagca

SEQ ID NO: 991803 - RNA, 19 nt, Artificial Sequence
  Description of Artificial Sequence: Synthetic oligonucleotide
  Antisense strand to SEQ ID NO: 991802
ugcuuccuagacuauagga

SEQ ID NO: 991804 - RNA, 19 nt, Artificial Sequence
  Description of Artificial Sequence: Synthetic oligonucleotide
  Sense strand starting at position 3850 of SEQ ID NO: 914277
aguuacaaccaucaaguuu

SEQ ID NO: 991805 - RNA, 19 nt, Artificial Sequence
  Description of Artificial Sequence: Synthetic oligonucleotide
  Antisense strand to SEQ ID NO: 991804
aaacuugaugguuguaacu

SEQ ID NO: 991806 - RNA, 19 nt, Artificial Sequence
  Description of Artificial Sequence: Synthetic oligonucleotide
  Sense strand starting at position 236 of SEQ ID NO: 914278
cccagucaguuccuuacaa

SEQ ID NO: 991807 - RNA, 19 nt, Artificial Sequence
  Description of Artificial Sequence: Synthetic oligonucleotide
  Antisense strand to SEQ ID NO: 991806
uuguaaggaacugacuggg

SEQ ID NO: 991808 - RNA, 19 nt, Artificial Sequence
  Description of Artificial Sequence: Synthetic oligonucleotide
  Sense strand starting at position 237 of SEQ ID NO: 914278
ccagucaguuccuuacaaa

SEQ ID NO: 991809 - RNA, 19 nt, Artificial Sequence
  Description of Artificial Sequence: Synthetic oligonucleotide
  Antisense strand to SEQ ID NO: 991808
uuuguaaggaacugacugg

SEQ ID NO: 991810 - RNA, 19 nt, Artificial Sequence
  Description of Artificial Sequence: Synthetic oligonucleotide
  Sense strand starting at position 320 of SEQ ID NO: 914278
auuauuauacuugguggaa

SEQ ID NO: 991811 - RNA, 19 nt, Artificial Sequence
  Description of Artificial Sequence: Synthetic oligonucleotide
  Antisense strand to SEQ ID NO: 991810
uuccaccaaguauaauaau

SEQ ID NO: 991812 - RNA, 19 nt, Artificial Sequence
  Description of Artificial Sequence: Synthetic oligonucleotide
  Sense strand starting at position 321 of SEQ ID NO: 914278
uuauuauacuugguggaag

SEQ ID NO: 991813 - RNA, 19 nt, Artificial Sequence
  Description of Artificial Sequence: Synthetic oligonucleotide
  Antisense strand to SEQ ID NO: 991812
cuuccaccaaguauaauaa

SEQ ID NO: 991814 - RNA, 19 nt, Artificial Sequence
  Description of Artificial Sequence: Synthetic oligonucleotide
  Sense strand starting at position 374 of SEQ ID NO: 914278
aaggguaucucccuguuaa

SEQ ID NO: 991815 - RNA, 19 nt, Artificial Sequence
  Description of Artificial Sequence: Synthetic oligonucleotide
  Antisense strand to SEQ ID NO: 991814
uuaacagggagauacccuu

SEQ ID NO: 991816 - RNA, 19 nt, Artificial Sequence
  Description of Artificial Sequence: Synthetic oligonucleotide
  Sense strand starting at position 375 of SEQ ID NO: 914278
aggguaucucccuguuaac

SEQ ID NO: 991817 - RNA, 19 nt, Artificial Sequence
  Description of Artificial Sequence: Synthetic oligonucleotide
  Antisense strand to SEQ ID NO: 991816
guuaacagggagauacccu

SEQ ID NO: 991818 - RNA, 19 nt, Artificial Sequence
  Description of Artificial Sequence: Synthetic oligonucleotide
  Sense strand starting at position 392 of SEQ ID NO: 914278
acccgaaggcuacauguua

SEQ ID NO: 991819 - RNA, 19 nt, Artificial Sequence
  Description of Artificial Sequence: Synthetic oligonucleotide
  Antisense strand to SEQ ID NO: 991818
uaacauguagccuucgggu

SEQ ID NO: 991820 - RNA, 19 nt, Artificial Sequence
  Description of Artificial Sequence: Synthetic oligonucleotide
  Sense strand starting at position 405 of SEQ ID NO: 914278
auguuaucugcccaugaca

SEQ ID NO: 991821 - RNA, 19 nt, Artificial Sequence
  Description of Artificial Sequence: Synthetic oligonucleotide
  Antisense strand to SEQ ID NO: 991820
ugucaugggcagauaacau

SEQ ID NO: 991822 - RNA, 19 nt, Artificial Sequence
  Description of Artificial Sequence: Synthetic oligonucleotide
  Sense strand starting at position 461 of SEQ ID NO: 914278
gagugauccagucagugua

SEQ ID NO: 991823 - RNA, 19 nt, Artificial Sequence
  Description of Artificial Sequence: Synthetic oligonucleotide
  Antisense strand to SEQ ID NO: 991822
uacacugacuggaucacuc

SEQ ID NO: 991824 - RNA, 19 nt, Artificial Sequence
  Description of Artificial Sequence: Synthetic oligonucleotide
  Sense strand starting at position 546 of SEQ ID NO: 914278
aggagaaccuuagaagaca

SEQ ID NO: 991825 - RNA, 19 nt, Artificial Sequence
  Description of Artificial Sequence: Synthetic oligonucleotide
  Antisense strand to SEQ ID NO: 991824
ugucuucuaagguucuccu

SEQ ID NO: 991826 - RNA, 19 nt, Artificial Sequence
  Description of Artificial Sequence: Synthetic oligonucleotide
  Sense strand starting at position 623 of SEQ ID NO: 914278
aggugucauuauuccuaga

SEQ ID NO: 991827 - RNA, 19 nt, Artificial Sequence
  Description of Artificial Sequence: Synthetic oligonucleotide
  Antisense strand to SEQ ID NO: 991826
ucuaggaauaaugacaccu

SEQ ID NO: 991828 - RNA, 19 nt, Artificial Sequence
  Description of Artificial Sequence: Synthetic oligonucleotide
  Sense strand starting at position 625 of SEQ ID NO: 914278
gugucauuauuccuagaga

SEQ ID NO: 991829 - RNA, 19 nt, Artificial Sequence
  Description of Artificial Sequence: Synthetic oligonucleotide
  Antisense strand to SEQ ID NO: 991828
ucucuaggaauaaugacac

SEQ ID NO: 991830 - RNA, 19 nt, Artificial Sequence
  Description of Artificial Sequence: Synthetic oligonucleotide
  Sense strand starting at position 739 of SEQ ID NO: 914278
agaggugugaagugacaga

SEQ ID NO: 991831 - RNA, 19 nt, Artificial Sequence
  Description of Artificial Sequence: Synthetic oligonucleotide
  Antisense strand to SEQ ID NO: 991830
ucugucacuucacaccucu

SEQ ID NO: 991832 - RNA, 19 nt, Artificial Sequence
  Description of Artificial Sequence: Synthetic oligonucleotide
  Sense strand starting at position 823 of SEQ ID NO: 914278
gaauuucuccucugcaggu

SEQ ID NO: 991833 - RNA, 19 nt, Artificial Sequence
  Description of Artificial Sequence: Synthetic oligonucleotide
  Antisense strand to SEQ ID NO: 991832
accugcagaggagaaauuc

SEQ ID NO: 991834 - RNA, 19 nt, Artificial Sequence
  Description of Artificial Sequence: Synthetic oligonucleotide
  Sense strand starting at position 914 of SEQ ID NO: 914278
ggcucaagaccaugcuaaa

SEQ ID NO: 991835 - RNA, 19 nt, Artificial Sequence
  Description of Artificial Sequence: Synthetic oligonucleotide
  Antisense strand to SEQ ID NO: 991834
uuuagcauggucuugagcc

SEQ ID NO: 991836 - RNA, 19 nt, Artificial Sequence
  Description of Artificial Sequence: Synthetic oligonucleotide
  Sense strand starting at position 970 of SEQ ID NO: 914278
ugcugaugugucgccauca

SEQ ID NO: 991837 - RNA, 19 nt, Artificial Sequence
  Description of Artificial Sequence: Synthetic oligonucleotide
  Antisense strand to SEQ ID NO: 991836
ugauggcgacacaucagca

SEQ ID NO: 991838 - RNA, 19 nt, Artificial Sequence
  Description of Artificial Sequence: Synthetic oligonucleotide
  Sense strand starting at position 1012 of SEQ ID NO: 914278
gggaaaugauacccuaguu

SEQ ID NO: 991839 - RNA, 19 nt, Artificial Sequence
  Description of Artificial Sequence: Synthetic oligonucleotide
  Antisense strand to SEQ ID NO: 991838
aacuaggguaucauuuccc

SEQ ID NO: 991840 - RNA, 19 nt, Artificial Sequence
  Description of Artificial Sequence: Synthetic oligonucleotide
  Sense strand starting at position 1017 of SEQ ID NO: 914278
augauacccuaguuagcaa

SEQ ID NO: 991841 - RNA, 19 nt, Artificial Sequence
  Description of Artificial Sequence: Synthetic oligonucleotide
  Antisense strand to SEQ ID NO: 991840
uugcuaacuaggguaucau

SEQ ID NO: 991842 - RNA, 19 nt, Artificial Sequence
  Description of Artificial Sequence: Synthetic oligonucleotide
  Sense strand starting at position 2867 of SEQ ID NO: 914278
uggugaaucuaacugccua

SEQ ID NO: 991843 - RNA, 19 nt, Artificial Sequence
  Description of Artificial Sequence: Synthetic oligonucleotide
  Antisense strand to SEQ ID NO: 991842
uaggcaguuagauucacca

SEQ ID NO: 991844 - RNA, 19 nt, Artificial Sequence
  Description of Artificial Sequence: Synthetic oligonucleotide
  Sense strand starting at position 2871 of SEQ ID NO: 914278
gaaucuaacugccuaggga

SEQ ID NO: 991845 - RNA, 19 nt, Artificial Sequence
  Description of Artificial Sequence: Synthetic oligonucleotide
  Antisense strand to SEQ ID NO: 991844
ucccuaggcaguuagauuc

SEQ ID NO: 991846 - RNA, 19 nt, Artificial Sequence
  Description of Artificial Sequence: Synthetic oligonucleotide
  Sense strand starting at position 2886 of SEQ ID NO: 914278
gggaacaucuccucuagau

SEQ ID NO: 991847 - RNA, 19 nt, Artificial Sequence
  Description of Artificial Sequence: Synthetic oligonucleotide
  Antisense strand to SEQ ID NO: 991846
aucuagaggagauguuccc

SEQ ID NO: 991848 - RNA, 19 nt, Artificial Sequence
  Description of Artificial Sequence: Synthetic oligonucleotide
  Sense strand starting at position 2983 of SEQ ID NO: 914278
uuuccagucucagugaaug

SEQ ID NO: 991849 - RNA, 19 nt, Artificial Sequence
  Description of Artificial Sequence: Synthetic oligonucleotide
  Antisense strand to SEQ ID NO: 991848
cauucacugagacuggaaa

SEQ ID NO: 991850 - RNA, 19 nt, Artificial Sequence
  Description of Artificial Sequence: Synthetic oligonucleotide
  Sense strand starting at position 3063 of SEQ ID NO: 914278
uuccucucucaacgaguaa

SEQ ID NO: 991851 - RNA, 19 nt, Artificial Sequence
  Description of Artificial Sequence: Synthetic oligonucleotide
  Antisense strand to SEQ ID NO: 991850
uuacucguugagagaggaa

SEQ ID NO: 991852 - RNA, 19 nt, Artificial Sequence
  Description of Artificial Sequence: Synthetic oligonucleotide
  Sense strand starting at position 3067 of SEQ ID NO: 914278
ucucucaacgaguaaguca

SEQ ID NO: 991853 - RNA, 19 nt, Artificial Sequence
  Description of Artificial Sequence: Synthetic oligonucleotide
  Antisense strand to SEQ ID NO: 991852
ugacuuacucguugagaga

SEQ ID NO: 991854 - RNA, 19 nt, Artificial Sequence
  Description of Artificial Sequence: Synthetic oligonucleotide
  Sense strand starting at position 3199 of SEQ ID NO: 914278
uagucugauuggucugaua

SEQ ID NO: 991855 - RNA, 19 nt, Artificial Sequence
  Description of Artificial Sequence: Synthetic oligonucleotide
  Antisense strand to SEQ ID NO: 991854
uaucagaccaaucagacua

SEQ ID NO: 991856 - RNA, 19 nt, Artificial Sequence
  Description of Artificial Sequence: Synthetic oligonucleotide
  Sense strand starting at position 3201 of SEQ ID NO: 914278
gucugauuggucugauacu

SEQ ID NO: 991857 - RNA, 19 nt, Artificial Sequence
  Description of Artificial Sequence: Synthetic oligonucleotide
  Antisense strand to SEQ ID NO: 991856
aguaucagaccaaucagac

SEQ ID NO: 991858 - RNA, 19 nt, Artificial Sequence
  Description of Artificial Sequence: Synthetic oligonucleotide
  Sense strand starting at position 3249 of SEQ ID NO: 914278
acaugagacugcguuaaug

SEQ ID NO: 991859 - RNA, 19 nt, Artificial Sequence
  Description of Artificial Sequence: Synthetic oligonucleotide
  Antisense strand to SEQ ID NO: 991858
cauuaacgcagucucaugu

SEQ ID NO: 991860 - RNA, 19 nt, Artificial Sequence
  Description of Artificial Sequence: Synthetic oligonucleotide
  Sense strand starting at position 3251 of SEQ ID NO: 914278
augagacugcguuaaugag

SEQ ID NO: 991861 - RNA, 19 nt, Artificial Sequence
  Description of Artificial Sequence: Synthetic oligonucleotide
  Antisense strand to SEQ ID NO: 991860
cucauuaacgcagucucau

SEQ ID NO: 991862 - RNA, 19 nt, Artificial Sequence
  Description of Artificial Sequence: Synthetic oligonucleotide
  Sense strand starting at position 3259 of SEQ ID NO: 914278
gcguuaaugaguuacauau

SEQ ID NO: 991863 - RNA, 19 nt, Artificial Sequence
  Description of Artificial Sequence: Synthetic oligonucleotide
  Antisense strand to SEQ ID NO: 991862
auauguaacucauuaacgc

SEQ ID NO: 991864 - RNA, 19 nt, Artificial Sequence
  Description of Artificial Sequence: Synthetic oligonucleotide
  Sense strand starting at position 3385 of SEQ ID NO: 914278
aguuauuagcaauaaucug

SEQ ID NO: 991865 - RNA, 19 nt, Artificial Sequence
  Description of Artificial Sequence: Synthetic oligonucleotide
  Antisense strand to SEQ ID NO: 991864
cagauuauugcuaauaacu

SEQ ID NO: 991866 - RNA, 19 nt, Artificial Sequence
  Description of Artificial Sequence: Synthetic oligonucleotide
  Sense strand starting at position 3492 of SEQ ID NO: 914278
cagaaaguguacuuguaag

SEQ ID NO: 991867 - RNA, 19 nt, Artificial Sequence
  Description of Artificial Sequence: Synthetic oligonucleotide
  Antisense strand to SEQ ID NO: 991866
cuuacaaguacacuuucug

SEQ ID NO: 991868 - RNA, 19 nt, Artificial Sequence
  Description of Artificial Sequence: Synthetic oligonucleotide
  Sense strand starting at position 3512 of SEQ ID NO: 914278
ucaguuaauguccauacuu

SEQ ID NO: 991869 - RNA, 19 nt, Artificial Sequence
  Description of Artificial Sequence: Synthetic oligonucleotide
  Antisense strand to SEQ ID NO: 991868
aaguauggacauuaacuga

SEQ ID NO: 991870 - RNA, 19 nt, Artificial Sequence
  Description of Artificial Sequence: Synthetic oligonucleotide
  Sense strand starting at position 3520 of SEQ ID NO: 914278
uguccauacuuggucuuaa

SEQ ID NO: 991871 - RNA, 19 nt, Artificial Sequence
  Description of Artificial Sequence: Synthetic oligonucleotide
  Antisense strand to SEQ ID NO: 991870
uuaagaccaaguauggaca

SEQ ID NO: 991872 - RNA, 19 nt, Artificial Sequence
  Description of Artificial Sequence: Synthetic oligonucleotide
  Sense strand starting at position 3521 of SEQ ID NO: 914278
guccauacuuggucuuaau

SEQ ID NO: 991873 - RNA, 19 nt, Artificial Sequence
  Description of Artificial Sequence: Synthetic oligonucleotide
  Antisense strand to SEQ ID NO: 991872
auuaagaccaaguauggac

SEQ ID NO: 991874 - RNA, 19 nt, Artificial Sequence
  Description of Artificial Sequence: Synthetic oligonucleotide
  Sense strand starting at position 3531 of SEQ ID NO: 914278
ggucuuaauggcuauucuu

SEQ ID NO: 991875 - RNA, 19 nt, Artificial Sequence
  Description of Artificial Sequence: Synthetic oligonucleotide
  Antisense strand to SEQ ID NO: 991874
aagaauagccauuaagacc

SEQ ID NO: 991876 - RNA, 19 nt, Artificial Sequence
  Description of Artificial Sequence: Synthetic oligonucleotide
  Sense strand starting at position 3599 of SEQ ID NO: 914278
gaagaacuguaucuuugca

SEQ ID NO: 991877 - RNA, 19 nt, Artificial Sequence
  Description of Artificial Sequence: Synthetic oligonucleotide
  Antisense strand to SEQ ID NO: 991876
ugcaaagauacaguucuuc

SEQ ID NO: 991878 - RNA, 19 nt, Artificial Sequence
  Description of Artificial Sequence: Synthetic oligonucleotide
  Sense strand starting at position 3803 of SEQ ID NO: 914278
uuagaaguaugcuucuaca

SEQ ID NO: 991879 - RNA, 19 nt, Artificial Sequence
  Description of Artificial Sequence: Synthetic oligonucleotide
  Antisense strand to SEQ ID NO: 991878
uguagaagcauacuucuaa

SEQ ID NO: 991880 - RNA, 19 nt, Artificial Sequence
  Description of Artificial Sequence: Synthetic oligonucleotide
  Sense strand starting at position 3826 of SEQ ID NO: 914278
gcagauuguggcuaugaga

SEQ ID NO: 991881 - RNA, 19 nt, Artificial Sequence
  Description of Artificial Sequence: Synthetic oligonucleotide
  Antisense strand to SEQ ID NO: 991880
ucucauagccacaaucugc

SEQ ID NO: 991882 - RNA, 19 nt, Artificial Sequence
  Description of Artificial Sequence: Synthetic oligonucleotide
  Sense strand starting at position 3834 of SEQ ID NO: 914278
uggcuaugagaguauaggu

SEQ ID NO: 991883 - RNA, 19 nt, Artificial Sequence
  Description of Artificial Sequence: Synthetic oligonucleotide
  Antisense strand to SEQ ID NO: 991882
accuauacucucauagcca

SEQ ID NO: 991884 - RNA, 19 nt, Artificial Sequence
  Description of Artificial Sequence: Synthetic oligonucleotide
  Sense strand starting at position 3956 of SEQ ID NO: 914278
cacauuuguuacgucaguu

SEQ ID NO: 991885 - RNA, 19 nt, Artificial Sequence
  Description of Artificial Sequence: Synthetic oligonucleotide
  Antisense strand to SEQ ID NO: 991884
aacugacguaacaaaugug

SEQ ID NO: 991886 - RNA, 19 nt, Artificial Sequence
  Description of Artificial Sequence: Synthetic oligonucleotide
  Sense strand starting at position 29 of SEQ ID NO: 914279
uugggagaauugcucgagu

SEQ ID NO: 991887 - RNA, 19 nt, Artificial Sequence
  Description of Artificial Sequence: Synthetic oligonucleotide
  Antisense strand to SEQ ID NO: 991886
acucgagcaauucucccaa

SEQ ID NO: 991888 - RNA, 19 nt, Artificial Sequence
  Description of Artificial Sequence: Synthetic oligonucleotide
  Sense strand starting at position 32 of SEQ ID NO: 914279
ggagaauugcucgaguccu

SEQ ID NO: 991889 - RNA, 19 nt, Artificial Sequence
  Description of Artificial Sequence: Synthetic oligonucleotide
  Antisense strand to SEQ ID NO: 991888
aggacucgagcaauucucc

SEQ ID NO: 991890 - RNA, 19 nt, Artificial Sequence
  Description of Artificial Sequence: Synthetic oligonucleotide
  Sense strand starting at position 178 of SEQ ID NO: 914279
uuccauaucuuaguaugga

SEQ ID NO: 991891 - RNA, 19 nt, Artificial Sequence
  Description of Artificial Sequence: Synthetic oligonucleotide
  Antisense strand to SEQ ID NO: 991890
uccauacuaagauauggaa

SEQ ID NO: 991892 - RNA, 19 nt, Artificial Sequence
  Description of Artificial Sequence: Synthetic oligonucleotide
  Sense strand starting at position 255 of SEQ ID NO: 914279
ucuggauguccuuggcaga

SEQ ID NO: 991893 - RNA, 19 nt, Artificial Sequence
  Description of Artificial Sequence: Synthetic oligonucleotide
  Antisense strand to SEQ ID NO: 991892
ucugccaaggacauccaga

SEQ ID NO: 991894 - RNA, 19 nt, Artificial Sequence
  Description of Artificial Sequence: Synthetic oligonucleotide
  Sense strand starting at position 303 of SEQ ID NO: 914279
gagugucucuccucucaga

SEQ ID NO: 991895 - RNA, 19 nt, Artificial Sequence
  Description of Artificial Sequence: Synthetic oligonucleotide
  Antisense strand to SEQ ID NO: 991894
ucugagaggagagacacuc

SEQ ID NO: 991896 - RNA, 19 nt, Artificial Sequence
  Description of Artificial Sequence: Synthetic oligonucleotide
  Sense strand starting at position 453 of SEQ ID NO: 914279
gaggcuuagcugugaauuc

SEQ ID NO: 991897 - RNA, 19 nt, Artificial Sequence
  Description of Artificial Sequence: Synthetic oligonucleotide
  Antisense strand to SEQ ID NO: 991896
gaauucacagcuaagccuc

SEQ ID NO: 991898 - RNA, 19 nt, Artificial Sequence
  Description of Artificial Sequence: Synthetic oligonucleotide
  Sense strand starting at position 479 of SEQ ID NO: 914279
ucagucagccaaugauaca

SEQ ID NO: 991899 - RNA, 19 nt, Artificial Sequence
  Description of Artificial Sequence: Synthetic oligonucleotide
  Antisense strand to SEQ ID NO: 991898
uguaucauuggcugacuga

SEQ ID NO: 991900 - RNA, 19 nt, Artificial Sequence
  Description of Artificial Sequence: Synthetic oligonucleotide
  Sense strand starting at position 497 of SEQ ID NO: 914279
agcuuaucucacuguuaca

SEQ ID NO: 991901 - RNA, 19 nt, Artificial Sequence
  Description of Artificial Sequence: Synthetic oligonucleotide
  Antisense strand to SEQ ID NO: 991900
uguaacagugagauaagcu

SEQ ID NO: 991902 - RNA, 19 nt, Artificial Sequence
  Description of Artificial Sequence: Synthetic oligonucleotide
  Sense strand starting at position 652 of SEQ ID NO: 914279
ucguuauacgaaggaagcu

SEQ ID NO: 991903 - RNA, 19 nt, Artificial Sequence
  Description of Artificial Sequence: Synthetic oligonucleotide
  Antisense strand to SEQ ID NO: 991902
agcuuccuucguauaacga

SEQ ID NO: 991904 - RNA, 19 nt, Artificial Sequence
  Description of Artificial Sequence: Synthetic oligonucleotide
  Sense strand starting at position 1170 of SEQ ID NO: 914279
guagcaacgagcgauauca

SEQ ID NO: 991905 - RNA, 19 nt, Artificial Sequence
  Description of Artificial Sequence: Synthetic oligonucleotide
  Antisense strand to SEQ ID NO: 991904
ugauaucgcucguugcuac

SEQ ID NO: 991906 - RNA, 19 nt, Artificial Sequence
  Description of Artificial Sequence: Synthetic oligonucleotide
  Sense strand starting at position 1178 of SEQ ID NO: 914279
gagcgauaucaucaccuuu

SEQ ID NO: 991907 - RNA, 19 nt, Artificial Sequence
  Description of Artificial Sequence: Synthetic oligonucleotide
  Antisense strand to SEQ ID NO: 991906
aaaggugaugauaucgcuc

SEQ ID NO: 991908 - RNA, 19 nt, Artificial Sequence
  Description of Artificial Sequence: Synthetic oligonucleotide
  Sense strand starting at position 1267 of SEQ ID NO: 914279
cgaccugccucuucucaga

SEQ ID NO: 991909 - RNA, 19 nt, Artificial Sequence
  Description of Artificial Sequence: Synthetic oligonucleotide
  Antisense strand to SEQ ID NO: 991908
ucugagaagaggcaggucg

SEQ ID NO: 991910 - RNA, 19 nt, Artificial Sequence
  Description of Artificial Sequence: Synthetic oligonucleotide
  Sense strand starting at position 1569 of SEQ ID NO: 914279
ccugauaagcuuuaccaga

SEQ ID NO: 991911 - RNA, 19 nt, Artificial Sequence
  Description of Artificial Sequence: Synthetic oligonucleotide
  Antisense strand to SEQ ID NO: 991910
ucugguaaagcuuaucagg

SEQ ID NO: 991912 - RNA, 19 nt, Artificial Sequence
  Description of Artificial Sequence: Synthetic oligonucleotide
  Sense strand starting at position 1571 of SEQ ID NO: 914279
ugauaagcuuuaccagaac

SEQ ID NO: 991913 - RNA, 19 nt, Artificial Sequence
  Description of Artificial Sequence: Synthetic oligonucleotide
  Antisense strand to SEQ ID NO: 991912
guucugguaaagcuuauca

SEQ ID NO: 991914 - RNA, 19 nt, Artificial Sequence
  Description of Artificial Sequence: Synthetic oligonucleotide
  Sense strand starting at position 1995 of SEQ ID NO: 914279
guuguuuaccgggaggcua

SEQ ID NO: 991915 - RNA, 19 nt, Artificial Sequence
  Description of Artificial Sequence: Synthetic oligonucleotide
  Antisense strand to SEQ ID NO: 991914
uagccucccgguaaacaac

SEQ ID NO: 991916 - RNA, 19 nt, Artificial Sequence
  Description of Artificial Sequence: Synthetic oligonucleotide
  Sense strand starting at position 2023 of SEQ ID NO: 914279
cugacuugggccugaguca

SEQ ID NO: 991917 - RNA, 19 nt, Artificial Sequence
  Description of Artificial Sequence: Synthetic oligonucleotide
  Antisense strand to SEQ ID NO: 991916
ugacucaggcccaagucag

SEQ ID NO: 991918 - RNA, 19 nt, Artificial Sequence
  Description of Artificial Sequence: Synthetic oligonucleotide
  Sense strand starting at position 2032 of SEQ ID NO: 914279
gccugagucaccuccgcau

SEQ ID NO: 991919 - RNA, 19 nt, Artificial Sequence
  Description of Artificial Sequence: Synthetic oligonucleotide
  Antisense strand to SEQ ID NO: 991918
augcggaggugacucaggc

SEQ ID NO: 991920 - RNA, 19 nt, Artificial Sequence
  Description of Artificial Sequence: Synthetic oligonucleotide
  Sense strand starting at position 2050 of SEQ ID NO: 914279
uguccaaucgugagguugu

SEQ ID NO: 991921 - RNA, 19 nt, Artificial Sequence
  Description of Artificial Sequence: Synthetic oligonucleotide
  Antisense strand to SEQ ID NO: 991920
acaaccucacgauuggaca

SEQ ID NO: 991922 - RNA, 19 nt, Artificial Sequence
  Description of Artificial Sequence: Synthetic oligonucleotide
  Sense strand starting at position 2067 of SEQ ID NO: 914279
gugucuuacugagcucaca

SEQ ID NO: 991923 - RNA, 19 nt, Artificial Sequence
  Description of Artificial Sequence: Synthetic oligonucleotide
  Antisense strand to SEQ ID NO: 991922
ugugagcucaguaagacac

SEQ ID NO: 991924 - RNA, 19 nt, Artificial Sequence
  Description of Artificial Sequence: Synthetic oligonucleotide
  Sense strand starting at position 2100 of SEQ ID NO: 914279
ugcacagagcaguauuaca

SEQ ID NO: 991925 - RNA, 19 nt, Artificial Sequence
  Description of Artificial Sequence: Synthetic oligonucleotide
  Antisense strand to SEQ ID NO: 991924
uguaauacugcucugugca

SEQ ID NO: 991926 - RNA, 19 nt, Artificial Sequence
  Description of Artificial Sequence: Synthetic oligonucleotide
  Sense strand starting at position 2107 of SEQ ID NO: 914279
agcaguauuacaggguuga

SEQ ID NO: 991927 - RNA, 19 nt, Artificial Sequence
  Description of Artificial Sequence: Synthetic oligonucleotide
  Antisense strand to SEQ ID NO: 991926
ucaacccuguaauacugcu

SEQ ID NO: 991928 - RNA, 19 nt, Artificial Sequence
  Description of Artificial Sequence: Synthetic oligonucleotide
  Sense strand starting at position 2108 of SEQ ID NO: 914279
gcaguauuacaggguugac

SEQ ID NO: 991929 - RNA, 19 nt, Artificial Sequence
  Description of Artificial Sequence: Synthetic oligonucleotide
  Antisense strand to SEQ ID NO: 991928
gucaacccuguaauacugc

SEQ ID NO: 991930 - RNA, 19 nt, Artificial Sequence
  Description of Artificial Sequence: Synthetic oligonucleotide
  Sense strand starting at position 2111 of SEQ ID NO: 914279
guauuacaggguugacaca

SEQ ID NO: 991931 - RNA, 19 nt, Artificial Sequence
  Description of Artificial Sequence: Synthetic oligonucleotide
  Antisense strand to SEQ ID NO: 991930
ugugucaacccuguaauac

SEQ ID NO: 991932 - RNA, 19 nt, Artificial Sequence
  Description of Artificial Sequence: Synthetic oligonucleotide
  Sense strand starting at position 2150 of SEQ ID NO: 914279
ggcuuuagcuacccagaga

SEQ ID NO: 991933 - RNA, 19 nt, Artificial Sequence
  Description of Artificial Sequence: Synthetic oligonucleotide
  Antisense strand to SEQ ID NO: 991932
ucucuggguagcuaaagcc

SEQ ID NO: 991934 - RNA, 19 nt, Artificial Sequence
  Description of Artificial Sequence: Synthetic oligonucleotide
  Sense strand starting at position 2153 of SEQ ID NO: 914279
uuuagcuacccagagauua

SEQ ID NO: 991935 - RNA, 19 nt, Artificial Sequence
  Description of Artificial Sequence: Synthetic oligonucleotide
  Antisense strand to SEQ ID NO: 991934
uaaucucuggguagcuaaa

SEQ ID NO: 991936 - RNA, 19 nt, Artificial Sequence
  Description of Artificial Sequence: Synthetic oligonucleotide
  Sense strand starting at position 2234 of SEQ ID NO: 914279
gagggaggguaauauuuau

SEQ ID NO: 991937 - RNA, 19 nt, Artificial Sequence
  Description of Artificial Sequence: Synthetic oligonucleotide
  Antisense strand to SEQ ID NO: 991936
auaaauauuacccucccuc

SEQ ID NO: 991938 - RNA, 19 nt, Artificial Sequence
  Description of Artificial Sequence: Synthetic oligonucleotide
  Sense strand starting at position 2460 of SEQ ID NO: 914279
cccagcuagccuuagucua

SEQ ID NO: 991939 - RNA, 19 nt, Artificial Sequence
  Description of Artificial Sequence: Synthetic oligonucleotide
  Antisense strand to SEQ ID NO: 991938
uagacuaaggcuagcuggg

SEQ ID NO: 991940 - RNA, 19 nt, Artificial Sequence
  Description of Artificial Sequence: Synthetic oligonucleotide
  Sense strand starting at position 2707 of SEQ ID NO: 914279
ugguaucggcuuugggaaa

SEQ ID NO: 991941 - RNA, 19 nt, Artificial Sequence
  Description of Artificial Sequence: Synthetic oligonucleotide
  Antisense strand to SEQ ID NO: 991940
uuucccaaagccgauacca

SEQ ID NO: 991942 - RNA, 19 nt, Artificial Sequence
  Description of Artificial Sequence: Synthetic oligonucleotide
  Sense strand starting at position 2791 of SEQ ID NO: 914279
agguaugagacccauugca

SEQ ID NO: 991943 - RNA, 19 nt, Artificial Sequence
  Description of Artificial Sequence: Synthetic oligonucleotide
  Antisense strand to SEQ ID NO: 991942
ugcaaugggucucauaccu

SEQ ID NO: 991944 - RNA, 19 nt, Artificial Sequence
  Description of Artificial Sequence: Synthetic oligonucleotide
  Sense strand starting at position 3017 of SEQ ID NO: 914279
ccaagaugucucuguggac

SEQ ID NO: 991945 - RNA, 19 nt, Artificial Sequence
  Description of Artificial Sequence: Synthetic oligonucleotide
  Antisense strand to SEQ ID NO: 991944
guccacagagacaucuugg

SEQ ID NO: 991946 - RNA, 19 nt, Artificial Sequence
  Description of Artificial Sequence: Synthetic oligonucleotide
  Sense strand starting at position 3018 of SEQ ID NO: 914279
caagaugucucuguggacu

SEQ ID NO: 991947 - RNA, 19 nt, Artificial Sequence
  Description of Artificial Sequence: Synthetic oligonucleotide
  Antisense strand to SEQ ID NO: 991946
aguccacagagacaucuug

SEQ ID NO: 991948 - RNA, 19 nt, Artificial Sequence
  Description of Artificial Sequence: Synthetic oligonucleotide
  Sense strand starting at position 3021 of SEQ ID NO: 914279
gaugucucuguggacugaa

SEQ ID NO: 991949 - RNA, 19 nt, Artificial Sequence
  Description of Artificial Sequence: Synthetic oligonucleotide
  Antisense strand to SEQ ID NO: 991948
uucaguccacagagacauc

SEQ ID NO: 991950 - RNA, 19 nt, Artificial Sequence
  Description of Artificial Sequence: Synthetic oligonucleotide
  Sense strand starting at position 3061 of SEQ ID NO: 914279
agccuuauuucccuuucga

SEQ ID NO: 991951 - RNA, 19 nt, Artificial Sequence
  Description of Artificial Sequence: Synthetic oligonucleotide
  Antisense strand to SEQ ID NO: 991950
ucgaaagggaaauaaggcu

SEQ ID NO: 991952 - RNA, 19 nt, Artificial Sequence
  Description of Artificial Sequence: Synthetic oligonucleotide
  Sense strand starting at position 3225 of SEQ ID NO: 914279
aaagauaucggccgggcau

SEQ ID NO: 991953 - RNA, 19 nt, Artificial Sequence
  Description of Artificial Sequence: Synthetic oligonucleotide
  Antisense strand to SEQ ID NO: 991952
augcccggccgauaucuuu

SEQ ID NO: 991954 - RNA, 19 nt, Artificial Sequence
  Description of Artificial Sequence: Synthetic oligonucleotide
  Sense strand starting at position 3681 of SEQ ID NO: 914279
ugacaaaucucgccugucu

SEQ ID NO: 991955 - RNA, 19 nt, Artificial Sequence
  Description of Artificial Sequence: Synthetic oligonucleotide
  Antisense strand to SEQ ID NO: 991954
agacaggcgagauuuguca

SEQ ID NO: 991956 - RNA, 19 nt, Artificial Sequence
  Description of Artificial Sequence: Synthetic oligonucleotide
  Sense strand starting at position 3683 of SEQ ID NO: 914279
acaaaucucgccugucuca

SEQ ID NO: 991957 - RNA, 19 nt, Artificial Sequence
  Description of Artificial Sequence: Synthetic oligonucleotide
  Antisense strand to SEQ ID NO: 991956
ugagacaggcgagauuugu

SEQ ID NO: 991958 - RNA, 19 nt, Artificial Sequence
  Description of Artificial Sequence: Synthetic oligonucleotide
  Sense strand starting at position 3722 of SEQ ID NO: 914279
ccugaaauauggucgacau

SEQ ID NO: 991959 - RNA, 19 nt, Artificial Sequence
  Description of Artificial Sequence: Synthetic oligonucleotide
  Antisense strand to SEQ ID NO: 991958
augucgaccauauuucagg

SEQ ID NO: 991960 - RNA, 19 nt, Artificial Sequence
  Description of Artificial Sequence: Synthetic oligonucleotide
  Sense strand starting at position 3723 of SEQ ID NO: 914279
cugaaauauggucgacauu

SEQ ID NO: 991961 - RNA, 19 nt, Artificial Sequence
  Description of Artificial Sequence: Synthetic oligonucleotide
  Antisense strand to SEQ ID NO: 991960
aaugucgaccauauuucag

SEQ ID NO: 991962 - RNA, 19 nt, Artificial Sequence
  Description of Artificial Sequence: Synthetic oligonucleotide
  Sense strand starting at position 3724 of SEQ ID NO: 914279
ugaaauauggucgacauuc

SEQ ID NO: 991963 - RNA, 19 nt, Artificial Sequence
  Description of Artificial Sequence: Synthetic oligonucleotide
  Antisense strand to SEQ ID NO: 991962
gaaugucgaccauauuuca

SEQ ID NO: 991964 - RNA, 19 nt, Artificial Sequence
  Description of Artificial Sequence: Synthetic oligonucleotide
  Sense strand starting at position 3732 of SEQ ID NO: 914279
ggucgacauucagcaagua

SEQ ID NO: 991965 - RNA, 19 nt, Artificial Sequence
  Description of Artificial Sequence: Synthetic oligonucleotide
  Antisense strand to SEQ ID NO: 991964
uacuugcugaaugucgacc

SEQ ID NO: 991966 - RNA, 19 nt, Artificial Sequence
  Description of Artificial Sequence: Synthetic oligonucleotide
  Sense strand starting at position 3 of SEQ ID NO: 914280
auguuugcucaugaagcau

SEQ ID NO: 991967 - RNA, 19 nt, Artificial Sequence
  Description of Artificial Sequence: Synthetic oligonucleotide
  Antisense strand to SEQ ID NO: 991966
augcuucaugagcaaacau

SEQ ID NO: 991968 - RNA, 19 nt, Artificial Sequence
  Description of Artificial Sequence: Synthetic oligonucleotide
  Sense strand starting at position 9 of SEQ ID NO: 914280
gcucaugaagcaugcauuu

SEQ ID NO: 991969 - RNA, 19 nt, Artificial Sequence
  Description of Artificial Sequence: Synthetic oligonucleotide
  Antisense strand to SEQ ID NO: 991968
aaaugcaugcuucaugagc

SEQ ID NO: 991970 - RNA, 19 nt, Artificial Sequence
  Description of Artificial Sequence: Synthetic oligonucleotide
  Sense strand starting at position 367 of SEQ ID NO: 914280
ggacacagcuuucuauaac

SEQ ID NO: 991971 - RNA, 19 nt, Artificial Sequence
  Description of Artificial Sequence: Synthetic oligonucleotide
  Antisense strand to SEQ ID NO: 991970
guuauagaaagcugugucc

SEQ ID NO: 991972 - RNA, 19 nt, Artificial Sequence
  Description of Artificial Sequence: Synthetic oligonucleotide
  Sense strand starting at position 467 of SEQ ID NO: 914280
agguccuguggucaguuau

SEQ ID NO: 991973 - RNA, 19 nt, Artificial Sequence
  Description of Artificial Sequence: Synthetic oligonucleotide
  Antisense strand to SEQ ID NO: 991972
auaacugaccacaggaccu

SEQ ID NO: 991974 - RNA, 19 nt, Artificial Sequence
  Description of Artificial Sequence: Synthetic oligonucleotide
  Sense strand starting at position 475 of SEQ ID NO: 914280
uggucaguuauugggagau

SEQ ID NO: 991975 - RNA, 19 nt, Artificial Sequence
  Description of Artificial Sequence: Synthetic oligonucleotide
  Antisense strand to SEQ ID NO: 991974
aucucccaauaacugacca

SEQ ID NO: 991976 - RNA, 19 nt, Artificial Sequence
  Description of Artificial Sequence: Synthetic oligonucleotide
  Sense strand starting at position 479 of SEQ ID NO: 914280
caguuauugggagauguug

SEQ ID NO: 991977 - RNA, 19 nt, Artificial Sequence
  Description of Artificial Sequence: Synthetic oligonucleotide
  Antisense strand to SEQ ID NO: 991976
caacaucucccaauaacug

SEQ ID NO: 991978 - RNA, 19 nt, Artificial Sequence
  Description of Artificial Sequence: Synthetic oligonucleotide
  Sense strand starting at position 481 of SEQ ID NO: 914280
guuauugggagauguugca

SEQ ID NO: 991979 - RNA, 19 nt, Artificial Sequence
  Description of Artificial Sequence: Synthetic oligonucleotide
  Antisense strand to SEQ ID NO: 991978
ugcaacaucucccaauaac

SEQ ID NO: 991980 - RNA, 19 nt, Artificial Sequence
  Description of Artificial Sequence: Synthetic oligonucleotide
  Sense strand starting at position 626 of SEQ ID NO: 914280
gucuuaaauaguugguaga

SEQ ID NO: 991981 - RNA, 19 nt, Artificial Sequence
  Description of Artificial Sequence: Synthetic oligonucleotide
  Antisense strand to SEQ ID NO: 991980
ucuaccaacuauuuaagac

SEQ ID NO: 991982 - RNA, 19 nt, Artificial Sequence
  Description of Artificial Sequence: Synthetic oligonucleotide
  Sense strand starting at position 627 of SEQ ID NO: 914280
ucuuaaauaguugguagau

SEQ ID NO: 991983 - RNA, 19 nt, Artificial Sequence
  Description of Artificial Sequence: Synthetic oligonucleotide
  Antisense strand to SEQ ID NO: 991982
aucuaccaacuauuuaaga

SEQ ID NO: 991984 - RNA, 19 nt, Artificial Sequence
  Description of Artificial Sequence: Synthetic oligonucleotide
  Sense strand starting at position 628 of SEQ ID NO: 914280
cuuaaauaguugguagaua

SEQ ID NO: 991985 - RNA, 19 nt, Artificial Sequence
  Description of Artificial Sequence: Synthetic oligonucleotide
  Antisense strand to SEQ ID NO: 991984
uaucuaccaacuauuuaag

SEQ ID NO: 991986 - RNA, 19 nt, Artificial Sequence
  Description of Artificial Sequence: Synthetic oligonucleotide
  Sense strand starting at position 742 of SEQ ID NO: 914280
ccuggugcaauaugucaga

SEQ ID NO: 991987 - RNA, 19 nt, Artificial Sequence
  Description of Artificial Sequence: Synthetic oligonucleotide
  Antisense strand to SEQ ID NO: 991986
ucugacauauugcaccagg

SEQ ID NO: 991988 - RNA, 19 nt, Artificial Sequence
  Description of Artificial Sequence: Synthetic oligonucleotide
  Sense strand starting at position 844 of SEQ ID NO: 914280
uugggagaauugcucgagu

SEQ ID NO: 991989 - RNA, 19 nt, Artificial Sequence
  Description of Artificial Sequence: Synthetic oligonucleotide
  Antisense strand to SEQ ID NO: 991988
acucgagcaauucucccaa

SEQ ID NO: 991990 - RNA, 19 nt, Artificial Sequence
  Description of Artificial Sequence: Synthetic oligonucleotide
  Sense strand starting at position 847 of SEQ ID NO: 914280
ggagaauugcucgaguccu

SEQ ID NO: 991991 - RNA, 19 nt, Artificial Sequence
  Description of Artificial Sequence: Synthetic oligonucleotide
  Antisense strand to SEQ ID NO: 991990
aggacucgagcaauucucc

SEQ ID NO: 991992 - RNA, 19 nt, Artificial Sequence
  Description of Artificial Sequence: Synthetic oligonucleotide
  Sense strand starting at position 993 of SEQ ID NO: 914280
uuccauaucuuaguaugga

SEQ ID NO: 991993 - RNA, 19 nt, Artificial Sequence
  Description of Artificial Sequence: Synthetic oligonucleotide
  Antisense strand to SEQ ID NO: 991992
uccauacuaagauauggaa

SEQ ID NO: 991994 - RNA, 19 nt, Artificial Sequence
  Description of Artificial Sequence: Synthetic oligonucleotide
  Sense strand starting at position 1070 of SEQ ID NO: 914280
ucuggauguccuuggcaga

SEQ ID NO: 991995 - RNA, 19 nt, Artificial Sequence
  Description of Artificial Sequence: Synthetic oligonucleotide
  Antisense strand to SEQ ID NO: 991994
ucugccaaggacauccaga

SEQ ID NO: 991996 - RNA, 19 nt, Artificial Sequence
  Description of Artificial Sequence: Synthetic oligonucleotide
  Sense strand starting at position 1118 of SEQ ID NO: 914280
gagugucucuccucucaga

SEQ ID NO: 991997 - RNA, 19 nt, Artificial Sequence
  Description of Artificial Sequence: Synthetic oligonucleotide
  Antisense strand to SEQ ID NO: 991996
ucugagaggagagacacuc

SEQ ID NO: 991998 - RNA, 19 nt, Artificial Sequence
  Description of Artificial Sequence: Synthetic oligonucleotide
  Sense strand starting at position 1294 of SEQ ID NO: 914280
ucagucagccaaugauaca

SEQ ID NO: 991999 - RNA, 19 nt, Artificial Sequence
  Description of Artificial Sequence: Synthetic oligonucleotide
  Antisense strand to SEQ ID NO: 991998
uguaucauuggcugacuga

SEQ ID NO: 992000 - RNA, 19 nt, Artificial Sequence
  Description of Artificial Sequence: Synthetic oligonucleotide
  Sense strand starting at position 1312 of SEQ ID NO: 914280
agcuuaucucacuguuaca

SEQ ID NO: 992001 - RNA, 19 nt, Artificial Sequence
  Description of Artificial Sequence: Synthetic oligonucleotide
  Antisense strand to SEQ ID NO: 992000
uguaacagugagauaagcu

SEQ ID NO: 992002 - RNA, 19 nt, Artificial Sequence
  Description of Artificial Sequence: Synthetic oligonucleotide
  Sense strand starting at position 1985 of SEQ ID NO: 914280
guagcaacgagcgauauca

SEQ ID NO: 992003 - RNA, 19 nt, Artificial Sequence
  Description of Artificial Sequence: Synthetic oligonucleotide
  Antisense strand to SEQ ID NO: 992002
ugauaucgcucguugcuac

SEQ ID NO: 992004 - RNA, 19 nt, Artificial Sequence
  Description of Artificial Sequence: Synthetic oligonucleotide
  Sense strand starting at position 1993 of SEQ ID NO: 914280
gagcgauaucaucaccuuu

SEQ ID NO: 992005 - RNA, 19 nt, Artificial Sequence
  Description of Artificial Sequence: Synthetic oligonucleotide
  Antisense strand to SEQ ID NO: 992004
aaaggugaugauaucgcuc

SEQ ID NO: 992006 - RNA, 19 nt, Artificial Sequence
  Description of Artificial Sequence: Synthetic oligonucleotide
  Sense strand starting at position 2384 of SEQ ID NO: 914280
ccugauaagcuuuaccaga

SEQ ID NO: 992007 - RNA, 19 nt, Artificial Sequence
  Description of Artificial Sequence: Synthetic oligonucleotide
  Antisense strand to SEQ ID NO: 992006
ucugguaaagcuuaucagg

SEQ ID NO: 992008 - RNA, 19 nt, Artificial Sequence
  Description of Artificial Sequence: Synthetic oligonucleotide
  Sense strand starting at position 2386 of SEQ ID NO: 914280
ugauaagcuuuaccagaac

SEQ ID NO: 992009 - RNA, 19 nt, Artificial Sequence
  Description of Artificial Sequence: Synthetic oligonucleotide
  Antisense strand to SEQ ID NO: 992008
guucugguaaagcuuauca

SEQ ID NO: 992010 - RNA, 19 nt, Artificial Sequence
  Description of Artificial Sequence: Synthetic oligonucleotide
  Sense strand starting at position 2810 of SEQ ID NO: 914280
guuguuuaccgggaggcua

SEQ ID NO: 992011 - RNA, 19 nt, Artificial Sequence
  Description of Artificial Sequence: Synthetic oligonucleotide
  Antisense strand to SEQ ID NO: 992010
uagccucccgguaaacaac

SEQ ID NO: 992012 - RNA, 19 nt, Artificial Sequence
  Description of Artificial Sequence: Synthetic oligonucleotide
  Sense strand starting at position 2838 of SEQ ID NO: 914280
cugacuugggccugaguca

SEQ ID NO: 992013 - RNA, 19 nt, Artificial Sequence
  Description of Artificial Sequence: Synthetic oligonucleotide
  Antisense strand to SEQ ID NO: 992012
ugacucaggcccaagucag

SEQ ID NO: 992014 - RNA, 19 nt, Artificial Sequence
  Description of Artificial Sequence: Synthetic oligonucleotide
  Sense strand starting at position 2847 of SEQ ID NO: 914280
gccugagucaccuccgcau

SEQ ID NO: 992015 - RNA, 19 nt, Artificial Sequence
  Description of Artificial Sequence: Synthetic oligonucleotide
  Antisense strand to SEQ ID NO: 992014
augcggaggugacucaggc

SEQ ID NO: 992016 - RNA, 19 nt, Artificial Sequence
  Description of Artificial Sequence: Synthetic oligonucleotide
  Sense strand starting at position 2865 of SEQ ID NO: 914280
uguccaaucgugagguugu

SEQ ID NO: 992017 - RNA, 19 nt, Artificial Sequence
  Description of Artificial Sequence: Synthetic oligonucleotide
  Antisense strand to SEQ ID NO: 992016
acaaccucacgauuggaca

SEQ ID NO: 992018 - RNA, 19 nt, Artificial Sequence
  Description of Artificial Sequence: Synthetic oligonucleotide
  Sense strand starting at position 2915 of SEQ ID NO: 914280
ugcacagagcaguauuaca

SEQ ID NO: 992019 - RNA, 19 nt, Artificial Sequence
  Description of Artificial Sequence: Synthetic oligonucleotide
  Antisense strand to SEQ ID NO: 992018
uguaauacugcucugugca

SEQ ID NO: 992020 - RNA, 19 nt, Artificial Sequence
  Description of Artificial Sequence: Synthetic oligonucleotide
  Sense strand starting at position 2922 of SEQ ID NO: 914280
agcaguauuacaggguuga

SEQ ID NO: 992021 - RNA, 19 nt, Artificial Sequence
  Description of Artificial Sequence: Synthetic oligonucleotide
  Antisense strand to SEQ ID NO: 992020
ucaacccuguaauacugcu

SEQ ID NO: 992022 - RNA, 19 nt, Artificial Sequence
  Description of Artificial Sequence: Synthetic oligonucleotide
  Sense strand starting at position 2923 of SEQ ID NO: 914280
gcaguauuacaggguugac

SEQ ID NO: 992023 - RNA, 19 nt, Artificial Sequence
  Description of Artificial Sequence: Synthetic oligonucleotide
  Antisense strand to SEQ ID NO: 992022
gucaacccuguaauacugc

SEQ ID NO: 992024 - RNA, 19 nt, Artificial Sequence
  Description of Artificial Sequence: Synthetic oligonucleotide
  Sense strand starting at position 2926 of SEQ ID NO: 914280
guauuacaggguugacaca

SEQ ID NO: 992025 - RNA, 19 nt, Artificial Sequence
  Description of Artificial Sequence: Synthetic oligonucleotide
  Antisense strand to SEQ ID NO: 992024
ugugucaacccuguaauac

SEQ ID NO: 992026 - RNA, 19 nt, Artificial Sequence
  Description of Artificial Sequence: Synthetic oligonucleotide
  Sense strand starting at position 2965 of SEQ ID NO: 914280
ggcuuuagcuacccagaga

SEQ ID NO: 992027 - RNA, 19 nt, Artificial Sequence
  Description of Artificial Sequence: Synthetic oligonucleotide
  Antisense strand to SEQ ID NO: 992026
ucucuggguagcuaaagcc

SEQ ID NO: 992028 - RNA, 19 nt, Artificial Sequence
  Description of Artificial Sequence: Synthetic oligonucleotide
  Sense strand starting at position 2968 of SEQ ID NO: 914280
uuuagcuacccagagauua

SEQ ID NO: 992029 - RNA, 19 nt, Artificial Sequence
  Description of Artificial Sequence: Synthetic oligonucleotide
  Antisense strand to SEQ ID NO: 992028
uaaucucuggguagcuaaa

SEQ ID NO: 992030 - RNA, 19 nt, Artificial Sequence
  Description of Artificial Sequence: Synthetic oligonucleotide
  Sense strand starting at position 3049 of SEQ ID NO: 914280
gagggaggguaauauuuau

SEQ ID NO: 992031 - RNA, 19 nt, Artificial Sequence
  Description of Artificial Sequence: Synthetic oligonucleotide
  Antisense strand to SEQ ID NO: 992030
auaaauauuacccucccuc

SEQ ID NO: 992032 - RNA, 19 nt, Artificial Sequence
  Description of Artificial Sequence: Synthetic oligonucleotide
  Sense strand starting at position 3275 of SEQ ID NO: 914280
cccagcuagccuuagucua

SEQ ID NO: 992033 - RNA, 19 nt, Artificial Sequence
  Description of Artificial Sequence: Synthetic oligonucleotide
  Antisense strand to SEQ ID NO: 992032
uagacuaaggcuagcuggg

SEQ ID NO: 992034 - RNA, 19 nt, Artificial Sequence
  Description of Artificial Sequence: Synthetic oligonucleotide
  Sense strand starting at position 3522 of SEQ ID NO: 914280
ugguaucggcuuugggaaa

SEQ ID NO: 992035 - RNA, 19 nt, Artificial Sequence
  Description of Artificial Sequence: Synthetic oligonucleotide
  Antisense strand to SEQ ID NO: 992034
uuucccaaagccgauacca

SEQ ID NO: 992036 - RNA, 19 nt, Artificial Sequence
  Description of Artificial Sequence: Synthetic oligonucleotide
  Sense strand starting at position 3606 of SEQ ID NO: 914280
agguaugagacccauugca

SEQ ID NO: 992037 - RNA, 19 nt, Artificial Sequence
  Description of Artificial Sequence: Synthetic oligonucleotide
  Antisense strand to SEQ ID NO: 992036
ugcaaugggucucauaccu

SEQ ID NO: 992038 - RNA, 19 nt, Artificial Sequence
  Description of Artificial Sequence: Synthetic oligonucleotide
  Sense strand starting at position 3832 of SEQ ID NO: 914280
ccaagaugucucuguggac

SEQ ID NO: 992039 - RNA, 19 nt, Artificial Sequence
  Description of Artificial Sequence: Synthetic oligonucleotide
  Antisense strand to SEQ ID NO: 992038
guccacagagacaucuugg

SEQ ID NO: 992040 - RNA, 19 nt, Artificial Sequence
  Description of Artificial Sequence: Synthetic oligonucleotide
  Sense strand starting at position 3833 of SEQ ID NO: 914280
caagaugucucuguggacu

SEQ ID NO: 992041 - RNA, 19 nt, Artificial Sequence
  Description of Artificial Sequence: Synthetic oligonucleotide
  Antisense strand to SEQ ID NO: 992040
aguccacagagacaucuug

SEQ ID NO: 992042 - RNA, 19 nt, Artificial Sequence
  Description of Artificial Sequence: Synthetic oligonucleotide
  Sense strand starting at position 3836 of SEQ ID NO: 914280
gaugucucuguggacugaa

SEQ ID NO: 992043 - RNA, 19 nt, Artificial Sequence
  Description of Artificial Sequence: Synthetic oligonucleotide
  Antisense strand to SEQ ID NO: 992042
uucaguccacagagacauc

SEQ ID NO: 992044 - RNA, 19 nt, Artificial Sequence
  Description of Artificial Sequence: Synthetic oligonucleotide
  Sense strand starting at position 3876 of SEQ ID NO: 914280
agccuuauuucccuuucga

SEQ ID NO: 992045 - RNA, 19 nt, Artificial Sequence
  Description of Artificial Sequence: Synthetic oligonucleotide
  Antisense strand to SEQ ID NO: 992044
ucgaaagggaaauaaggcu

SEQ ID NO: 992046 - RNA, 19 nt, Artificial Sequence
  Description of Artificial Sequence: Synthetic oligonucleotide
  Sense strand starting at position 309 of SEQ ID NO: 914281
ccugaagcauccgcuaaga

SEQ ID NO: 992047 - RNA, 19 nt, Artificial Sequence
  Description of Artificial Sequence: Synthetic oligonucleotide
  Antisense strand to SEQ ID NO: 992046
ucuuagcggaugcuucagg

SEQ ID NO: 992048 - RNA, 19 nt, Artificial Sequence
  Description of Artificial Sequence: Synthetic oligonucleotide
  Sense strand starting at position 311 of SEQ ID NO: 914281
ugaagcauccgcuaagaug

SEQ ID NO: 992049 - RNA, 19 nt, Artificial Sequence
  Description of Artificial Sequence: Synthetic oligonucleotide
  Antisense strand to SEQ ID NO: 992048
caucuuagcggaugcuuca

SEQ ID NO: 992050 - RNA, 19 nt, Artificial Sequence
  Description of Artificial Sequence: Synthetic oligonucleotide
  Sense strand starting at position 520 of SEQ ID NO: 914281
gcaggauucuggcuagguu

SEQ ID NO: 992051 - RNA, 19 nt, Artificial Sequence
  Description of Artificial Sequence: Synthetic oligonucleotide
  Antisense strand to SEQ ID NO: 992050
aaccuagccagaauccugc

SEQ ID NO: 992052 - RNA, 19 nt, Artificial Sequence
  Description of Artificial Sequence: Synthetic oligonucleotide
  Sense strand starting at position 521 of SEQ ID NO: 914281
caggauucuggcuagguuu

SEQ ID NO: 992053 - RNA, 19 nt, Artificial Sequence
  Description of Artificial Sequence: Synthetic oligonucleotide
  Antisense strand to SEQ ID NO: 992052
aaaccuagccagaauccug

SEQ ID NO: 992054 - RNA, 19 nt, Artificial Sequence
  Description of Artificial Sequence: Synthetic oligonucleotide
  Sense strand starting at position 657 of SEQ ID NO: 914281
uccaguuuccacuggaaag

SEQ ID NO: 992055 - RNA, 19 nt, Artificial Sequence
  Description of Artificial Sequence: Synthetic oligonucleotide
  Antisense strand to SEQ ID NO: 992054
cuuuccaguggaaacugga

SEQ ID NO: 992056 - RNA, 19 nt, Artificial Sequence
  Description of Artificial Sequence: Synthetic oligonucleotide
  Sense strand starting at position 669 of SEQ ID NO: 914281
uggaaaguccaccacaguu

SEQ ID NO: 992057 - RNA, 19 nt, Artificial Sequence
  Description of Artificial Sequence: Synthetic oligonucleotide
  Antisense strand to SEQ ID NO: 992056
aacugugguggacuuucca

SEQ ID NO: 992058 - RNA, 19 nt, Artificial Sequence
  Description of Artificial Sequence: Synthetic oligonucleotide
  Sense strand starting at position 745 of SEQ ID NO: 914281
acuccuguccuggguagua

SEQ ID NO: 992059 - RNA, 19 nt, Artificial Sequence
  Description of Artificial Sequence: Synthetic oligonucleotide
  Antisense strand to SEQ ID NO: 992058
uacuacccaggacaggagu

SEQ ID NO: 992060 - RNA, 19 nt, Artificial Sequence
  Description of Artificial Sequence: Synthetic oligonucleotide
  Sense strand starting at position 769 of SEQ ID NO: 914281
uccuuacugugucuaaucu

SEQ ID NO: 992061 - RNA, 19 nt, Artificial Sequence
  Description of Artificial Sequence: Synthetic oligonucleotide
  Antisense strand to SEQ ID NO: 992060
agauuagacacaguaagga

SEQ ID NO: 992062 - RNA, 19 nt, Artificial Sequence
  Description of Artificial Sequence: Synthetic oligonucleotide
  Sense strand starting at position 874 of SEQ ID NO: 914281
auugguuucugaucuucua

SEQ ID NO: 992063 - RNA, 19 nt, Artificial Sequence
  Description of Artificial Sequence: Synthetic oligonucleotide
  Antisense strand to SEQ ID NO: 992062
uagaagaucagaaaccaau

SEQ ID NO: 992064 - RNA, 19 nt, Artificial Sequence
  Description of Artificial Sequence: Synthetic oligonucleotide
  Sense strand starting at position 877 of SEQ ID NO: 914281
gguuucugaucuucuaguu

SEQ ID NO: 992065 - RNA, 19 nt, Artificial Sequence
  Description of Artificial Sequence: Synthetic oligonucleotide
  Antisense strand to SEQ ID NO: 992064
aacuagaagaucagaaacc

SEQ ID NO: 992066 - RNA, 19 nt, Artificial Sequence
  Description of Artificial Sequence: Synthetic oligonucleotide
  Sense strand starting at position 936 of SEQ ID NO: 914281
uuaaguuaauuuguccagu

SEQ ID NO: 992067 - RNA, 19 nt, Artificial Sequence
  Description of Artificial Sequence: Synthetic oligonucleotide
  Antisense strand to SEQ ID NO: 992066
acuggacaaauuaacuuaa

SEQ ID NO: 992068 - RNA, 19 nt, Artificial Sequence
  Description of Artificial Sequence: Synthetic oligonucleotide
  Sense strand starting at position 946 of SEQ ID NO: 914281
uuguccaguuacuuaauua

SEQ ID NO: 992069 - RNA, 19 nt, Artificial Sequence
  Description of Artificial Sequence: Synthetic oligonucleotide
  Antisense strand to SEQ ID NO: 992068
uaauuaaguaacuggacaa

SEQ ID NO: 992070 - RNA, 19 nt, Artificial Sequence
  Description of Artificial Sequence: Synthetic oligonucleotide
  Sense strand starting at position 1039 of SEQ ID NO: 914281
guaagcuguguucauuagu

SEQ ID NO: 992071 - RNA, 19 nt, Artificial Sequence
  Description of Artificial Sequence: Synthetic oligonucleotide
  Antisense strand to SEQ ID NO: 992070
acuaaugaacacagcuuac

SEQ ID NO: 992072 - RNA, 19 nt, Artificial Sequence
  Description of Artificial Sequence: Synthetic oligonucleotide
  Sense strand starting at position 1066 of SEQ ID NO: 914281
augcuugucaagugaugag

SEQ ID NO: 992073 - RNA, 19 nt, Artificial Sequence
  Description of Artificial Sequence: Synthetic oligonucleotide
  Antisense strand to SEQ ID NO: 992072
cucaucacuugacaagcau

SEQ ID NO: 992074 - RNA, 19 nt, Artificial Sequence
  Description of Artificial Sequence: Synthetic oligonucleotide
  Sense strand starting at position 1243 of SEQ ID NO: 914281
aggugaguuaaguggucuu

SEQ ID NO: 992075 - RNA, 19 nt, Artificial Sequence
  Description of Artificial Sequence: Synthetic oligonucleotide
  Antisense strand to SEQ ID NO: 992074
aagaccacuuaacucaccu

SEQ ID NO: 992076 - RNA, 19 nt, Artificial Sequence
  Description of Artificial Sequence: Synthetic oligonucleotide
  Sense strand starting at position 1246 of SEQ ID NO: 914281
ugaguuaaguggucuuggu

SEQ ID NO: 992077 - RNA, 19 nt, Artificial Sequence
  Description of Artificial Sequence: Synthetic oligonucleotide
  Antisense strand to SEQ ID NO: 992076
accaagaccacuuaacuca

SEQ ID NO: 992078 - RNA, 19 nt, Artificial Sequence
  Description of Artificial Sequence: Synthetic oligonucleotide
  Sense strand starting at position 1250 of SEQ ID NO: 914281
uuaaguggucuugguuaag

SEQ ID NO: 992079 - RNA, 19 nt, Artificial Sequence
  Description of Artificial Sequence: Synthetic oligonucleotide
  Antisense strand to SEQ ID NO: 992078
cuuaaccaagaccacuuaa

SEQ ID NO: 992080 - RNA, 19 nt, Artificial Sequence
  Description of Artificial Sequence: Synthetic oligonucleotide
  Sense strand starting at position 1253 of SEQ ID NO: 914281
aguggucuugguuaaggaa

SEQ ID NO: 992081 - RNA, 19 nt, Artificial Sequence
  Description of Artificial Sequence: Synthetic oligonucleotide
  Antisense strand to SEQ ID NO: 992080
uuccuuaaccaagaccacu

SEQ ID NO: 992082 - RNA, 19 nt, Artificial Sequence
  Description of Artificial Sequence: Synthetic oligonucleotide
  Sense strand starting at position 1353 of SEQ ID NO: 914281
ugacucuauguacacgaaa

SEQ ID NO: 992083 - RNA, 19 nt, Artificial Sequence
  Description of Artificial Sequence: Synthetic oligonucleotide
  Antisense strand to SEQ ID NO: 992082
uuucguguacauagaguca

SEQ ID NO: 992084 - RNA, 19 nt, Artificial Sequence
  Description of Artificial Sequence: Synthetic oligonucleotide
  Sense strand starting at position 1606 of SEQ ID NO: 914281
gcggcaucucagcuagcaa

SEQ ID NO: 992085 - RNA, 19 nt, Artificial Sequence
  Description of Artificial Sequence: Synthetic oligonucleotide
  Antisense strand to SEQ ID NO: 992084
uugcuagcugagaugccgc

SEQ ID NO: 992086 - RNA, 19 nt, Artificial Sequence
  Description of Artificial Sequence: Synthetic oligonucleotide
  Sense strand starting at position 1607 of SEQ ID NO: 914281
cggcaucucagcuagcaaa

SEQ ID NO: 992087 - RNA, 19 nt, Artificial Sequence
  Description of Artificial Sequence: Synthetic oligonucleotide
  Antisense strand to SEQ ID NO: 992086
uuugcuagcugagaugccg

SEQ ID NO: 992088 - RNA, 19 nt, Artificial Sequence
  Description of Artificial Sequence: Synthetic oligonucleotide
  Sense strand starting at position 2000 of SEQ ID NO: 914281
cuguuauagcugcaacaau

SEQ ID NO: 992089 - RNA, 19 nt, Artificial Sequence
  Description of Artificial Sequence: Synthetic oligonucleotide
  Antisense strand to SEQ ID NO: 992088
auuguugcagcuauaacag

SEQ ID NO: 992090 - RNA, 19 nt, Artificial Sequence
  Description of Artificial Sequence: Synthetic oligonucleotide
  Sense strand starting at position 2077 of SEQ ID NO: 914281
acagcagagcccugggaaa

SEQ ID NO: 992091 - RNA, 19 nt, Artificial Sequence
  Description of Artificial Sequence: Synthetic oligonucleotide
  Antisense strand to SEQ ID NO: 992090
uuucccagggcucugcugu

SEQ ID NO: 992092 - RNA, 19 nt, Artificial Sequence
  Description of Artificial Sequence: Synthetic oligonucleotide
  Sense strand starting at position 2142 of SEQ ID NO: 914281
gagaaagaaucugcuauug

SEQ ID NO: 992093 - RNA, 19 nt, Artificial Sequence
  Description of Artificial Sequence: Synthetic oligonucleotide
  Antisense strand to SEQ ID NO: 992092
caauagcagauucuuucuc

SEQ ID NO: 992094 - RNA, 19 nt, Artificial Sequence
  Description of Artificial Sequence: Synthetic oligonucleotide
  Sense strand starting at position 2278 of SEQ ID NO: 914281
cucgcauacugauuccuua

SEQ ID NO: 992095 - RNA, 19 nt, Artificial Sequence
  Description of Artificial Sequence: Synthetic oligonucleotide
  Antisense strand to SEQ ID NO: 992094
uaaggaaucaguaugcgag

SEQ ID NO: 992096 - RNA, 19 nt, Artificial Sequence
  Description of Artificial Sequence: Synthetic oligonucleotide
  Sense strand starting at position 2959 of SEQ ID NO: 914281
gugaguuaugaucguacua

SEQ ID NO: 992097 - RNA, 19 nt, Artificial Sequence
  Description of Artificial Sequence: Synthetic oligonucleotide
  Antisense strand to SEQ ID NO: 992096
uaguacgaucauaacucac

SEQ ID NO: 992098 - RNA, 19 nt, Artificial Sequence
  Description of Artificial Sequence: Synthetic oligonucleotide
  Sense strand starting at position 3223 of SEQ ID NO: 914281
uuuaauaagucagcagaga

SEQ ID NO: 992099 - RNA, 19 nt, Artificial Sequence
  Description of Artificial Sequence: Synthetic oligonucleotide
  Antisense strand to SEQ ID NO: 992098
ucucugcugacuuauuaaa

SEQ ID NO: 992100 - RNA, 19 nt, Artificial Sequence
  Description of Artificial Sequence: Synthetic oligonucleotide
  Sense strand starting at position 3413 of SEQ ID NO: 914281
acacuuguggaauggauua

SEQ ID NO: 992101 - RNA, 19 nt, Artificial Sequence
  Description of Artificial Sequence: Synthetic oligonucleotide
  Antisense strand to SEQ ID NO: 992100
uaauccauuccacaagugu

SEQ ID NO: 992102 - RNA, 19 nt, Artificial Sequence
  Description of Artificial Sequence: Synthetic oligonucleotide
  Sense strand starting at position 3426 of SEQ ID NO: 914281
ggauuaauacugcacccuu

SEQ ID NO: 992103 - RNA, 19 nt, Artificial Sequence
  Description of Artificial Sequence: Synthetic oligonucleotide
  Antisense strand to SEQ ID NO: 992102
aagggugcaguauuaaucc

SEQ ID NO: 992104 - RNA, 19 nt, Artificial Sequence
  Description of Artificial Sequence: Synthetic oligonucleotide
  Sense strand starting at position 3504 of SEQ ID NO: 914281
accacaguuucuuuaaagu

SEQ ID NO: 992105 - RNA, 19 nt, Artificial Sequence
  Description of Artificial Sequence: Synthetic oligonucleotide
  Antisense strand to SEQ ID NO: 992104
acuuuaaagaaacuguggu

SEQ ID NO: 992106 - RNA, 19 nt, Artificial Sequence
  Description of Artificial Sequence: Synthetic oligonucleotide
  Sense strand starting at position 3514 of SEQ ID NO: 914281
cuuuaaaguugguuuaaag

SEQ ID NO: 992107 - RNA, 19 nt, Artificial Sequence
  Description of Artificial Sequence: Synthetic oligonucleotide
  Antisense strand to SEQ ID NO: 992106
cuuuaaaccaacuuuaaag

SEQ ID NO: 992108 - RNA, 19 nt, Artificial Sequence
  Description of Artificial Sequence: Synthetic oligonucleotide
  Sense strand starting at position 3638 of SEQ ID NO: 914281
gccaucuugggacagucau

SEQ ID NO: 992109 - RNA, 19 nt, Artificial Sequence
  Description of Artificial Sequence: Synthetic oligonucleotide
  Antisense strand to SEQ ID NO: 992108
augacugucccaagauggc

SEQ ID NO: 992110 - RNA, 19 nt, Artificial Sequence
  Description of Artificial Sequence: Synthetic oligonucleotide
  Sense strand starting at position 3671 of SEQ ID NO: 914281
auguucucaucugugagau

SEQ ID NO: 992111 - RNA, 19 nt, Artificial Sequence
  Description of Artificial Sequence: Synthetic oligonucleotide
  Antisense strand to SEQ ID NO: 992110
aucucacagaugagaacau

SEQ ID NO: 992112 - RNA, 19 nt, Artificial Sequence
  Description of Artificial Sequence: Synthetic oligonucleotide
  Sense strand starting at position 3672 of SEQ ID NO: 914281
uguucucaucugugagaua

SEQ ID NO: 992113 - RNA, 19 nt, Artificial Sequence
  Description of Artificial Sequence: Synthetic oligonucleotide
  Antisense strand to SEQ ID NO: 992112
uaucucacagaugagaaca

SEQ ID NO: 992114 - RNA, 19 nt, Artificial Sequence
  Description of Artificial Sequence: Synthetic oligonucleotide
  Sense strand starting at position 3698 of SEQ ID NO: 914281
ugaacuaaguggucucuaa

SEQ ID NO: 992115 - RNA, 19 nt, Artificial Sequence
  Description of Artificial Sequence: Synthetic oligonucleotide
  Antisense strand to SEQ ID NO: 992114
uuagagaccacuuaguuca

SEQ ID NO: 992116 - RNA, 19 nt, Artificial Sequence
  Description of Artificial Sequence: Synthetic oligonucleotide
  Sense strand starting at position 3728 of SEQ ID NO: 914281
cucuaaguggcauaauucu

SEQ ID NO: 992117 - RNA, 19 nt, Artificial Sequence
  Description of Artificial Sequence: Synthetic oligonucleotide
  Antisense strand to SEQ ID NO: 992116
agaauuaugccacuuagag

SEQ ID NO: 992118 - RNA, 19 nt, Artificial Sequence
  Description of Artificial Sequence: Synthetic oligonucleotide
  Sense strand starting at position 3736 of SEQ ID NO: 914281
ggcauaauucuagguacca

SEQ ID NO: 992119 - RNA, 19 nt, Artificial Sequence
  Description of Artificial Sequence: Synthetic oligonucleotide
  Antisense strand to SEQ ID NO: 992118
ugguaccuagaauuaugcc

SEQ ID NO: 992120 - RNA, 19 nt, Artificial Sequence
  Description of Artificial Sequence: Synthetic oligonucleotide
  Sense strand starting at position 3737 of SEQ ID NO: 914281
gcauaauucuagguaccag

SEQ ID NO: 992121 - RNA, 19 nt, Artificial Sequence
  Description of Artificial Sequence: Synthetic oligonucleotide
  Antisense strand to SEQ ID NO: 992120
cugguaccuagaauuaugc

SEQ ID NO: 992122 - RNA, 19 nt, Artificial Sequence
  Description of Artificial Sequence: Synthetic oligonucleotide
  Sense strand starting at position 3756 of SEQ ID NO: 914281
agagauuuccggugccuga

SEQ ID NO: 992123 - RNA, 19 nt, Artificial Sequence
  Description of Artificial Sequence: Synthetic oligonucleotide
  Antisense strand to SEQ ID NO: 992122
ucaggcaccggaaaucucu

SEQ ID NO: 992124 - RNA, 19 nt, Artificial Sequence
  Description of Artificial Sequence: Synthetic oligonucleotide
  Sense strand starting at position 3907 of SEQ ID NO: 914281
cugccacucccugaugaga

SEQ ID NO: 992125 - RNA, 19 nt, Artificial Sequence
  Description of Artificial Sequence: Synthetic oligonucleotide
  Antisense strand to SEQ ID NO: 992124
ucucaucagggaguggcag

SEQ ID NO: 992126 - RNA, 19 nt, Artificial Sequence
  Description of Artificial Sequence: Synthetic oligonucleotide
  Sense strand starting at position 18 of SEQ ID NO: 914282
aaggguaucucccuguuaa

SEQ ID NO: 992127 - RNA, 19 nt, Artificial Sequence
  Description of Artificial Sequence: Synthetic oligonucleotide
  Antisense strand to SEQ ID NO: 992126
uuaacagggagauacccuu

SEQ ID NO: 992128 - RNA, 19 nt, Artificial Sequence
  Description of Artificial Sequence: Synthetic oligonucleotide
  Sense strand starting at position 19 of SEQ ID NO: 914282
aggguaucucccuguuaac

SEQ ID NO: 992129 - RNA, 19 nt, Artificial Sequence
  Description of Artificial Sequence: Synthetic oligonucleotide
  Antisense strand to SEQ ID NO: 992128
guuaacagggagauacccu

SEQ ID NO: 992130 - RNA, 19 nt, Artificial Sequence
  Description of Artificial Sequence: Synthetic oligonucleotide
  Sense strand starting at position 36 of SEQ ID NO: 914282
acccgaaggcuacauguua

SEQ ID NO: 992131 - RNA, 19 nt, Artificial Sequence
  Description of Artificial Sequence: Synthetic oligonucleotide
  Antisense strand to SEQ ID NO: 992130
uaacauguagccuucgggu

SEQ ID NO: 992132 - RNA, 19 nt, Artificial Sequence
  Description of Artificial Sequence: Synthetic oligonucleotide
  Sense strand starting at position 49 of SEQ ID NO: 914282
auguuaucugcccaugaca

SEQ ID NO: 992133 - RNA, 19 nt, Artificial Sequence
  Description of Artificial Sequence: Synthetic oligonucleotide
  Antisense strand to SEQ ID NO: 992132
ugucaugggcagauaacau

SEQ ID NO: 992134 - RNA, 19 nt, Artificial Sequence
  Description of Artificial Sequence: Synthetic oligonucleotide
  Sense strand starting at position 105 of SEQ ID NO: 914282
gagugauccagucagugua

SEQ ID NO: 992135 - RNA, 19 nt, Artificial Sequence
  Description of Artificial Sequence: Synthetic oligonucleotide
  Antisense strand to SEQ ID NO: 992134
uacacugacuggaucacuc

SEQ ID NO: 992136 - RNA, 19 nt, Artificial Sequence
  Description of Artificial Sequence: Synthetic oligonucleotide
  Sense strand starting at position 190 of SEQ ID NO: 914282
aggagaaccuuagaagaca

SEQ ID NO: 992137 - RNA, 19 nt, Artificial Sequence
  Description of Artificial Sequence: Synthetic oligonucleotide
  Antisense strand to SEQ ID NO: 992136
ugucuucuaagguucuccu

SEQ ID NO: 992138 - RNA, 19 nt, Artificial Sequence
  Description of Artificial Sequence: Synthetic oligonucleotide
  Sense strand starting at position 267 of SEQ ID NO: 914282
aggugucauuauuccuaga

SEQ ID NO: 992139 - RNA, 19 nt, Artificial Sequence
  Description of Artificial Sequence: Synthetic oligonucleotide
  Antisense strand to SEQ ID NO: 992138
ucuaggaauaaugacaccu

SEQ ID NO: 992140 - RNA, 19 nt, Artificial Sequence
  Description of Artificial Sequence: Synthetic oligonucleotide
  Sense strand starting at position 269 of SEQ ID NO: 914282
gugucauuauuccuagaga

SEQ ID NO: 992141 - RNA, 19 nt, Artificial Sequence
  Description of Artificial Sequence: Synthetic oligonucleotide
  Antisense strand to SEQ ID NO: 992140
ucucuaggaauaaugacac

SEQ ID NO: 992142 - RNA, 19 nt, Artificial Sequence
  Description of Artificial Sequence: Synthetic oligonucleotide
  Sense strand starting at position 383 of SEQ ID NO: 914282
agaggugugaagugacaga

SEQ ID NO: 992143 - RNA, 19 nt, Artificial Sequence
  Description of Artificial Sequence: Synthetic oligonucleotide
  Antisense strand to SEQ ID NO: 992142
ucugucacuucacaccucu

SEQ ID NO: 992144 - RNA, 19 nt, Artificial Sequence
  Description of Artificial Sequence: Synthetic oligonucleotide
  Sense strand starting at position 467 of SEQ ID NO: 914282
gaauuucuccucugcaggu

SEQ ID NO: 992145 - RNA, 19 nt, Artificial Sequence
  Description of Artificial Sequence: Synthetic oligonucleotide
  Antisense strand to SEQ ID NO: 992144
accugcagaggagaaauuc

SEQ ID NO: 992146 - RNA, 19 nt, Artificial Sequence
  Description of Artificial Sequence: Synthetic oligonucleotide
  Sense strand starting at position 558 of SEQ ID NO: 914282
ggcucaagaccaugcuaaa

SEQ ID NO: 992147 - RNA, 19 nt, Artificial Sequence
  Description of Artificial Sequence: Synthetic oligonucleotide
  Antisense strand to SEQ ID NO: 992146
uuuagcauggucuugagcc

SEQ ID NO: 992148 - RNA, 19 nt, Artificial Sequence
  Description of Artificial Sequence: Synthetic oligonucleotide
  Sense strand starting at position 614 of SEQ ID NO: 914282
ugcugaugugucgccauca

SEQ ID NO: 992149 - RNA, 19 nt, Artificial Sequence
  Description of Artificial Sequence: Synthetic oligonucleotide
  Antisense strand to SEQ ID NO: 992148
ugauggcgacacaucagca

SEQ ID NO: 992150 - RNA, 19 nt, Artificial Sequence
  Description of Artificial Sequence: Synthetic oligonucleotide
  Sense strand starting at position 656 of SEQ ID NO: 914282
gggaaaugauacccuaguu

SEQ ID NO: 992151 - RNA, 19 nt, Artificial Sequence
  Description of Artificial Sequence: Synthetic oligonucleotide
  Antisense strand to SEQ ID NO: 992150
aacuaggguaucauuuccc

SEQ ID NO: 992152 - RNA, 19 nt, Artificial Sequence
  Description of Artificial Sequence: Synthetic oligonucleotide
  Sense strand starting at position 661 of SEQ ID NO: 914282
augauacccuaguuagcaa

SEQ ID NO: 992153 - RNA, 19 nt, Artificial Sequence
  Description of Artificial Sequence: Synthetic oligonucleotide
  Antisense strand to SEQ ID NO: 992152
uugcuaacuaggguaucau

SEQ ID NO: 992154 - RNA, 19 nt, Artificial Sequence
  Description of Artificial Sequence: Synthetic oligonucleotide
  Sense strand starting at position 2511 of SEQ ID NO: 914282
uggugaaucuaacugccua

SEQ ID NO: 992155 - RNA, 19 nt, Artificial Sequence
  Description of Artificial Sequence: Synthetic oligonucleotide
  Antisense strand to SEQ ID NO: 992154
uaggcaguuagauucacca

SEQ ID NO: 992156 - RNA, 19 nt, Artificial Sequence
  Description of Artificial Sequence: Synthetic oligonucleotide
  Sense strand starting at position 2515 of SEQ ID NO: 914282
gaaucuaacugccuaggga

SEQ ID NO: 992157 - RNA, 19 nt, Artificial Sequence
  Description of Artificial Sequence: Synthetic oligonucleotide
  Antisense strand to SEQ ID NO: 992156
ucccuaggcaguuagauuc

SEQ ID NO: 992158 - RNA, 19 nt, Artificial Sequence
  Description of Artificial Sequence: Synthetic oligonucleotide
  Sense strand starting at position 2530 of SEQ ID NO: 914282
gggaacaucuccucuagau

SEQ ID NO: 992159 - RNA, 19 nt, Artificial Sequence
  Description of Artificial Sequence: Synthetic oligonucleotide
  Antisense strand to SEQ ID NO: 992158
aucuagaggagauguuccc

SEQ ID NO: 992160 - RNA, 19 nt, Artificial Sequence
  Description of Artificial Sequence: Synthetic oligonucleotide
  Sense strand starting at position 2627 of SEQ ID NO: 914282
uuuccagucucagugaaug

SEQ ID NO: 992161 - RNA, 19 nt, Artificial Sequence
  Description of Artificial Sequence: Synthetic oligonucleotide
  Antisense strand to SEQ ID NO: 992160
cauucacugagacuggaaa

SEQ ID NO: 992162 - RNA, 19 nt, Artificial Sequence
  Description of Artificial Sequence: Synthetic oligonucleotide
  Sense strand starting at position 2707 of SEQ ID NO: 914282
uuccucucucaacgaguaa

SEQ ID NO: 992163 - RNA, 19 nt, Artificial Sequence
  Description of Artificial Sequence: Synthetic oligonucleotide
  Antisense strand to SEQ ID NO: 992162
uuacucguugagagaggaa

SEQ ID NO: 992164 - RNA, 19 nt, Artificial Sequence
  Description of Artificial Sequence: Synthetic oligonucleotide
  Sense strand starting at position 2711 of SEQ ID NO: 914282
ucucucaacgaguaaguca

SEQ ID NO: 992165 - RNA, 19 nt, Artificial Sequence
  Description of Artificial Sequence: Synthetic oligonucleotide
  Antisense strand to SEQ ID NO: 992164
ugacuuacucguugagaga

SEQ ID NO: 992166 - RNA, 19 nt, Artificial Sequence
  Description of Artificial Sequence: Synthetic oligonucleotide
  Sense strand starting at position 2843 of SEQ ID NO: 914282
uagucugauuggucugaua

SEQ ID NO: 992167 - RNA, 19 nt, Artificial Sequence
  Description of Artificial Sequence: Synthetic oligonucleotide
  Antisense strand to SEQ ID NO: 992166
uaucagaccaaucagacua

SEQ ID NO: 992168 - RNA, 19 nt, Artificial Sequence
  Description of Artificial Sequence: Synthetic oligonucleotide
  Sense strand starting at position 2845 of SEQ ID NO: 914282
gucugauuggucugauacu

SEQ ID NO: 992169 - RNA, 19 nt, Artificial Sequence
  Description of Artificial Sequence: Synthetic oligonucleotide
  Antisense strand to SEQ ID NO: 992168
aguaucagaccaaucagac

SEQ ID NO: 992170 - RNA, 19 nt, Artificial Sequence
  Description of Artificial Sequence: Synthetic oligonucleotide
  Sense strand starting at position 2893 of SEQ ID NO: 914282
acaugagacugcguuaaug

SEQ ID NO: 992171 - RNA, 19 nt, Artificial Sequence
  Description of Artificial Sequence: Synthetic oligonucleotide
  Antisense strand to SEQ ID NO: 992170
cauuaacgcagucucaugu

SEQ ID NO: 992172 - RNA, 19 nt, Artificial Sequence
  Description of Artificial Sequence: Synthetic oligonucleotide
  Sense strand starting at position 2895 of SEQ ID NO: 914282
augagacugcguuaaugag

SEQ ID NO: 992173 - RNA, 19 nt, Artificial Sequence
  Description of Artificial Sequence: Synthetic oligonucleotide
  Antisense strand to SEQ ID NO: 992172
cucauuaacgcagucucau

SEQ ID NO: 992174 - RNA, 19 nt, Artificial Sequence
  Description of Artificial Sequence: Synthetic oligonucleotide
  Sense strand starting at position 2903 of SEQ ID NO: 914282
gcguuaaugaguuacauau

SEQ ID NO: 992175 - RNA, 19 nt, Artificial Sequence
  Description of Artificial Sequence: Synthetic oligonucleotide
  Antisense strand to SEQ ID NO: 992174
auauguaacucauuaacgc

SEQ ID NO: 992176 - RNA, 19 nt, Artificial Sequence
  Description of Artificial Sequence: Synthetic oligonucleotide
  Sense strand starting at position 3029 of SEQ ID NO: 914282
aguuauuagcaauaaucug

SEQ ID NO: 992177 - RNA, 19 nt, Artificial Sequence
  Description of Artificial Sequence: Synthetic oligonucleotide
  Antisense strand to SEQ ID NO: 992176
cagauuauugcuaauaacu

SEQ ID NO: 992178 - RNA, 19 nt, Artificial Sequence
  Description of Artificial Sequence: Synthetic oligonucleotide
  Sense strand starting at position 3136 of SEQ ID NO: 914282
cagaaaguguacuuguaag

SEQ ID NO: 992179 - RNA, 19 nt, Artificial Sequence
  Description of Artificial Sequence: Synthetic oligonucleotide
  Antisense strand to SEQ ID NO: 992178
cuuacaaguacacuuucug

SEQ ID NO: 992180 - RNA, 19 nt, Artificial Sequence
  Description of Artificial Sequence: Synthetic oligonucleotide
  Sense strand starting at position 3156 of SEQ ID NO: 914282
ucaguuaauguccauacuu

SEQ ID NO: 992181 - RNA, 19 nt, Artificial Sequence
  Description of Artificial Sequence: Synthetic oligonucleotide
  Antisense strand to SEQ ID NO: 992180
aaguauggacauuaacuga

SEQ ID NO: 992182 - RNA, 19 nt, Artificial Sequence
  Description of Artificial Sequence: Synthetic oligonucleotide
  Sense strand starting at position 3165 of SEQ ID NO: 914282
guccauacuuggucuuaau

SEQ ID NO: 992183 - RNA, 19 nt, Artificial Sequence
  Description of Artificial Sequence: Synthetic oligonucleotide
  Antisense strand to SEQ ID NO: 992182
auuaagaccaaguauggac

SEQ ID NO: 992184 - RNA, 19 nt, Artificial Sequence
  Description of Artificial Sequence: Synthetic oligonucleotide
  Sense strand starting at position 3175 of SEQ ID NO: 914282
ggucuuaauggcuauucuu

SEQ ID NO: 992185 - RNA, 19 nt, Artificial Sequence
  Description of Artificial Sequence: Synthetic oligonucleotide
  Antisense strand to SEQ ID NO: 992184
aagaauagccauuaagacc

SEQ ID NO: 992186 - RNA, 19 nt, Artificial Sequence
  Description of Artificial Sequence: Synthetic oligonucleotide
  Sense strand starting at position 3243 of SEQ ID NO: 914282
gaagaacuguaucuuugca

SEQ ID NO: 992187 - RNA, 19 nt, Artificial Sequence
  Description of Artificial Sequence: Synthetic oligonucleotide
  Antisense strand to SEQ ID NO: 992186
ugcaaagauacaguucuuc

SEQ ID NO: 992188 - RNA, 19 nt, Artificial Sequence
  Description of Artificial Sequence: Synthetic oligonucleotide
  Sense strand starting at position 3447 of SEQ ID NO: 914282
uuagaaguaugcuucuaca

SEQ ID NO: 992189 - RNA, 19 nt, Artificial Sequence
  Description of Artificial Sequence: Synthetic oligonucleotide
  Antisense strand to SEQ ID NO: 992188
uguagaagcauacuucuaa

SEQ ID NO: 992190 - RNA, 19 nt, Artificial Sequence
  Description of Artificial Sequence: Synthetic oligonucleotide
  Sense strand starting at position 3470 of SEQ ID NO: 914282
gcagauuguggcuaugaga

SEQ ID NO: 992191 - RNA, 19 nt, Artificial Sequence
  Description of Artificial Sequence: Synthetic oligonucleotide
  Antisense strand to SEQ ID NO: 992190
ucucauagccacaaucugc

SEQ ID NO: 992192 - RNA, 19 nt, Artificial Sequence
  Description of Artificial Sequence: Synthetic oligonucleotide
  Sense strand starting at position 3478 of SEQ ID NO: 914282
uggcuaugagaguauaggu

SEQ ID NO: 992193 - RNA, 19 nt, Artificial Sequence
  Description of Artificial Sequence: Synthetic oligonucleotide
  Antisense strand to SEQ ID NO: 992192
accuauacucucauagcca

SEQ ID NO: 992194 - RNA, 19 nt, Artificial Sequence
  Description of Artificial Sequence: Synthetic oligonucleotide
  Sense strand starting at position 3600 of SEQ ID NO: 914282
cacauuuguuacgucaguu

SEQ ID NO: 992195 - RNA, 19 nt, Artificial Sequence
  Description of Artificial Sequence: Synthetic oligonucleotide
  Antisense strand to SEQ ID NO: 992194
aacugacguaacaaaugug

SEQ ID NO: 992196 - RNA, 19 nt, Artificial Sequence
  Description of Artificial Sequence: Synthetic oligonucleotide
  Sense strand starting at position 3776 of SEQ ID NO: 914282
acuuguucuuuguuaagga

SEQ ID NO: 992197 - RNA, 19 nt, Artificial Sequence
  Description of Artificial Sequence: Synthetic oligonucleotide
  Antisense strand to SEQ ID NO: 992196
uccuuaacaaagaacaagu

SEQ ID NO: 992198 - RNA, 19 nt, Artificial Sequence
  Description of Artificial Sequence: Synthetic oligonucleotide
  Sense strand starting at position 3823 of SEQ ID NO: 914282
guuguuugccuugagauaa

SEQ ID NO: 992199 - RNA, 19 nt, Artificial Sequence
  Description of Artificial Sequence: Synthetic oligonucleotide
  Antisense strand to SEQ ID NO: 992198
uuaucucaaggcaaacaac

SEQ ID NO: 992200 - RNA, 19 nt, Artificial Sequence
  Description of Artificial Sequence: Synthetic oligonucleotide
  Sense strand starting at position 3841 of SEQ ID NO: 914282
aucaguaaaccuuggaauc

SEQ ID NO: 992201 - RNA, 19 nt, Artificial Sequence
  Description of Artificial Sequence: Synthetic oligonucleotide
  Antisense strand to SEQ ID NO: 992200
gauuccaagguuuacugau

SEQ ID NO: 992202 - RNA, 19 nt, Artificial Sequence
  Description of Artificial Sequence: Synthetic oligonucleotide
  Sense strand starting at position 3842 of SEQ ID NO: 914282
ucaguaaaccuuggaauca

SEQ ID NO: 992203 - RNA, 19 nt, Artificial Sequence
  Description of Artificial Sequence: Synthetic oligonucleotide
  Antisense strand to SEQ ID NO: 992202
ugauuccaagguuuacuga

SEQ ID NO: 992204 - RNA, 19 nt, Artificial Sequence
  Description of Artificial Sequence: Synthetic oligonucleotide
  Sense strand starting at position 3852 of SEQ ID NO: 914282
uuggaaucauaagaaagau

SEQ ID NO: 992205 - RNA, 19 nt, Artificial Sequence
  Description of Artificial Sequence: Synthetic oligonucleotide
  Antisense strand to SEQ ID NO: 992204
aucuuucuuaugauuccaa

SEQ ID NO: 992206 - RNA, 19 nt, Artificial Sequence
  Description of Artificial Sequence: Synthetic oligonucleotide
  Sense strand starting at position 57 of SEQ ID NO: 914283
gugagagacuuaucagccu

SEQ ID NO: 992207 - RNA, 19 nt, Artificial Sequence
  Description of Artificial Sequence: Synthetic oligonucleotide
  Antisense strand to SEQ ID NO: 992206
aggcugauaagucucucac

SEQ ID NO: 992208 - RNA, 19 nt, Artificial Sequence
  Description of Artificial Sequence: Synthetic oligonucleotide
  Sense strand starting at position 60 of SEQ ID NO: 914283
agagacuuaucagccuaga

SEQ ID NO: 992209 - RNA, 19 nt, Artificial Sequence
  Description of Artificial Sequence: Synthetic oligonucleotide
  Antisense strand to SEQ ID NO: 992208
ucuaggcugauaagucucu

SEQ ID NO: 992210 - RNA, 19 nt, Artificial Sequence
  Description of Artificial Sequence: Synthetic oligonucleotide
  Sense strand starting at position 119 of SEQ ID NO: 914283
uuuccugugcuuuagggaa

SEQ ID NO: 992211 - RNA, 19 nt, Artificial Sequence
  Description of Artificial Sequence: Synthetic oligonucleotide
  Antisense strand to SEQ ID NO: 992210
uucccuaaagcacaggaaa

SEQ ID NO: 992212 - RNA, 19 nt, Artificial Sequence
  Description of Artificial Sequence: Synthetic oligonucleotide
  Sense strand starting at position 170 of SEQ ID NO: 914283
ucuaaucuggcccagaagu

SEQ ID NO: 992213 - RNA, 19 nt, Artificial Sequence
  Description of Artificial Sequence: Synthetic oligonucleotide
  Antisense strand to SEQ ID NO: 992212
acuucugggccagauuaga

SEQ ID NO: 992214 - RNA, 19 nt, Artificial Sequence
  Description of Artificial Sequence: Synthetic oligonucleotide
  Sense strand starting at position 276 of SEQ ID NO: 914283
aaagcucuuccuggguaga

SEQ ID NO: 992215 - RNA, 19 nt, Artificial Sequence
  Description of Artificial Sequence: Synthetic oligonucleotide
  Antisense strand to SEQ ID NO: 992214
ucuacccaggaagagcuuu

SEQ ID NO: 992216 - RNA, 19 nt, Artificial Sequence
  Description of Artificial Sequence: Synthetic oligonucleotide
  Sense strand starting at position 515 of SEQ ID NO: 914283
gggaaagggucaagugaau

SEQ ID NO: 992217 - RNA, 19 nt, Artificial Sequence
  Description of Artificial Sequence: Synthetic oligonucleotide
  Antisense strand to SEQ ID NO: 992216
auucacuugacccuuuccc

SEQ ID NO: 992218 - RNA, 19 nt, Artificial Sequence
  Description of Artificial Sequence: Synthetic oligonucleotide
  Sense strand starting at position 831 of SEQ ID NO: 914283
gggagucaaguguagggau

SEQ ID NO: 992219 - RNA, 19 nt, Artificial Sequence
  Description of Artificial Sequence: Synthetic oligonucleotide
  Antisense strand to SEQ ID NO: 992218
aucccuacacuugacuccc

SEQ ID NO: 992220 - RNA, 19 nt, Artificial Sequence
  Description of Artificial Sequence: Synthetic oligonucleotide
  Sense strand starting at position 993 of SEQ ID NO: 914283
ucagaaauuuaggacacua

SEQ ID NO: 992221 - RNA, 19 nt, Artificial Sequence
  Description of Artificial Sequence: Synthetic oligonucleotide
  Antisense strand to SEQ ID NO: 992220
uaguguccuaaauuucuga

SEQ ID NO: 992222 - RNA, 19 nt, Artificial Sequence
  Description of Artificial Sequence: Synthetic oligonucleotide
  Sense strand starting at position 1050 of SEQ ID NO: 914283
gggauuguagcauaugcaa

SEQ ID NO: 992223 - RNA, 19 nt, Artificial Sequence
  Description of Artificial Sequence: Synthetic oligonucleotide
  Antisense strand to SEQ ID NO: 992222
uugcauaugcuacaauccc

SEQ ID NO: 992224 - RNA, 19 nt, Artificial Sequence
  Description of Artificial Sequence: Synthetic oligonucleotide
  Sense strand starting at position 1096 of SEQ ID NO: 914283
gcaugaauaaguggauaaa

SEQ ID NO: 992225 - RNA, 19 nt, Artificial Sequence
  Description of Artificial Sequence: Synthetic oligonucleotide
  Antisense strand to SEQ ID NO: 992224
uuuauccacuuauucaugc

SEQ ID NO: 992226 - RNA, 19 nt, Artificial Sequence
  Description of Artificial Sequence: Synthetic oligonucleotide
  Sense strand starting at position 1190 of SEQ ID NO: 914283
ccaggagugccagauaauc

SEQ ID NO: 992227 - RNA, 19 nt, Artificial Sequence
  Description of Artificial Sequence: Synthetic oligonucleotide
  Antisense strand to SEQ ID NO: 992226
gauuaucuggcacuccugg

SEQ ID NO: 992228 - RNA, 19 nt, Artificial Sequence
  Description of Artificial Sequence: Synthetic oligonucleotide
  Sense strand starting at position 1195 of SEQ ID NO: 914283
agugccagauaaucugaau

SEQ ID NO: 992229 - RNA, 19 nt, Artificial Sequence
  Description of Artificial Sequence: Synthetic oligonucleotide
  Antisense strand to SEQ ID NO: 992228
auucagauuaucuggcacu

SEQ ID NO: 992230 - RNA, 19 nt, Artificial Sequence
  Description of Artificial Sequence: Synthetic oligonucleotide
  Sense strand starting at position 1287 of SEQ ID NO: 914283
uuagaauuccuccgugaaa

SEQ ID NO: 992231 - RNA, 19 nt, Artificial Sequence
  Description of Artificial Sequence: Synthetic oligonucleotide
  Antisense strand to SEQ ID NO: 992230
uuucacggaggaauucuaa

SEQ ID NO: 992232 - RNA, 19 nt, Artificial Sequence
  Description of Artificial Sequence: Synthetic oligonucleotide
  Sense strand starting at position 1288 of SEQ ID NO: 914283
uagaauuccuccgugaaag

SEQ ID NO: 992233 - RNA, 19 nt, Artificial Sequence
  Description of Artificial Sequence: Synthetic oligonucleotide
  Antisense strand to SEQ ID NO: 992232
cuuucacggaggaauucua

SEQ ID NO: 992234 - RNA, 19 nt, Artificial Sequence
  Description of Artificial Sequence: Synthetic oligonucleotide
  Sense strand starting at position 1289 of SEQ ID NO: 914283
agaauuccuccgugaaagg

SEQ ID NO: 992235 - RNA, 19 nt, Artificial Sequence
  Description of Artificial Sequence: Synthetic oligonucleotide
  Antisense strand to SEQ ID NO: 992234
ccuuucacggaggaauucu

SEQ ID NO: 992236 - RNA, 19 nt, Artificial Sequence
  Description of Artificial Sequence: Synthetic oligonucleotide
  Sense strand starting at position 1467 of SEQ ID NO: 914283
cagcgaucucggcuccgaa

SEQ ID NO: 992237 - RNA, 19 nt, Artificial Sequence
  Description of Artificial Sequence: Synthetic oligonucleotide
  Antisense strand to SEQ ID NO: 992236
uucggagccgagaucgcug

SEQ ID NO: 992238 - RNA, 19 nt, Artificial Sequence
  Description of Artificial Sequence: Synthetic oligonucleotide
  Sense strand starting at position 1523 of SEQ ID NO: 914283
ugcucauuacgauaaugac

SEQ ID NO: 992239 - RNA, 19 nt, Artificial Sequence
  Description of Artificial Sequence: Synthetic oligonucleotide
  Antisense strand to SEQ ID NO: 992238
gucauuaucguaaugagca

SEQ ID NO: 992240 - RNA, 19 nt, Artificial Sequence
  Description of Artificial Sequence: Synthetic oligonucleotide
  Sense strand starting at position 1572 of SEQ ID NO: 914283
gcgggucucagacagaaau

SEQ ID NO: 992241 - RNA, 19 nt, Artificial Sequence
  Description of Artificial Sequence: Synthetic oligonucleotide
  Antisense strand to SEQ ID NO: 992240
auuucugucugagacccgc

SEQ ID NO: 992242 - RNA, 19 nt, Artificial Sequence
  Description of Artificial Sequence: Synthetic oligonucleotide
  Sense strand starting at position 1651 of SEQ ID NO: 914283
aaagaaaugcugggugaca

SEQ ID NO: 992243 - RNA, 19 nt, Artificial Sequence
  Description of Artificial Sequence: Synthetic oligonucleotide
  Antisense strand to SEQ ID NO: 992242
ugucacccagcauuucuuu

SEQ ID NO: 992244 - RNA, 19 nt, Artificial Sequence
  Description of Artificial Sequence: Synthetic oligonucleotide
  Sense strand starting at position 1712 of SEQ ID NO: 914283
gggcuuagucucgaggaag

SEQ ID NO: 992245 - RNA, 19 nt, Artificial Sequence
  Description of Artificial Sequence: Synthetic oligonucleotide
  Antisense strand to SEQ ID NO: 992244
cuuccucgagacuaagccc

SEQ ID NO: 992246 - RNA, 19 nt, Artificial Sequence
  Description of Artificial Sequence: Synthetic oligonucleotide
  Sense strand starting at position 1787 of SEQ ID NO: 914283
ggagucgggucaaaggaaa

SEQ ID NO: 992247 - RNA, 19 nt, Artificial Sequence
  Description of Artificial Sequence: Synthetic oligonucleotide
  Antisense strand to SEQ ID NO: 992246
uuuccuuugacccgacucc

SEQ ID NO: 992248 - RNA, 19 nt, Artificial Sequence
  Description of Artificial Sequence: Synthetic oligonucleotide
  Sense strand starting at position 2179 of SEQ ID NO: 914283
gucaccauuugcuuguuaa

SEQ ID NO: 992249 - RNA, 19 nt, Artificial Sequence
  Description of Artificial Sequence: Synthetic oligonucleotide
  Antisense strand to SEQ ID NO: 992248
uuaacaagcaaauggugac

SEQ ID NO: 992250 - RNA, 19 nt, Artificial Sequence
  Description of Artificial Sequence: Synthetic oligonucleotide
  Sense strand starting at position 2498 of SEQ ID NO: 914283
gcagacaugcaguagacuu

SEQ ID NO: 992251 - RNA, 19 nt, Artificial Sequence
  Description of Artificial Sequence: Synthetic oligonucleotide
  Antisense strand to SEQ ID NO: 992250
aagucuacugcaugucugc

SEQ ID NO: 992252 - RNA, 19 nt, Artificial Sequence
  Description of Artificial Sequence: Synthetic oligonucleotide
  Sense strand starting at position 2569 of SEQ ID NO: 914283
agacuugaaugacuaguua

SEQ ID NO: 992253 - RNA, 19 nt, Artificial Sequence
  Description of Artificial Sequence: Synthetic oligonucleotide
  Antisense strand to SEQ ID NO: 992252
uaacuagucauucaagucu

SEQ ID NO: 992254 - RNA, 19 nt, Artificial Sequence
  Description of Artificial Sequence: Synthetic oligonucleotide
  Sense strand starting at position 3006 of SEQ ID NO: 914283
gugauuauauugccaaaua

SEQ ID NO: 992255 - RNA, 19 nt, Artificial Sequence
  Description of Artificial Sequence: Synthetic oligonucleotide
  Antisense strand to SEQ ID NO: 992254
uauuuggcaauauaaucac

SEQ ID NO: 992256 - RNA, 19 nt, Artificial Sequence
  Description of Artificial Sequence: Synthetic oligonucleotide
  Sense strand starting at position 3108 of SEQ ID NO: 914283
uacugagugccuuaguaua

SEQ ID NO: 992257 - RNA, 19 nt, Artificial Sequence
  Description of Artificial Sequence: Synthetic oligonucleotide
  Antisense strand to SEQ ID NO: 992256
uauacuaaggcacucagua

SEQ ID NO: 992258 - RNA, 19 nt, Artificial Sequence
  Description of Artificial Sequence: Synthetic oligonucleotide
  Sense strand starting at position 3119 of SEQ ID NO: 914283
uuaguauauguccaucacu

SEQ ID NO: 992259 - RNA, 19 nt, Artificial Sequence
  Description of Artificial Sequence: Synthetic oligonucleotide
  Antisense strand to SEQ ID NO: 992258
agugauggacauauacuaa

SEQ ID NO: 992260 - RNA, 19 nt, Artificial Sequence
  Description of Artificial Sequence: Synthetic oligonucleotide
  Sense strand starting at position 3122 of SEQ ID NO: 914283
guauauguccaucacuauu

SEQ ID NO: 992261 - RNA, 19 nt, Artificial Sequence
  Description of Artificial Sequence: Synthetic oligonucleotide
  Antisense strand to SEQ ID NO: 992260
aauagugauggacauauac

SEQ ID NO: 992262 - RNA, 19 nt, Artificial Sequence
  Description of Artificial Sequence: Synthetic oligonucleotide
  Sense strand starting at position 3141 of SEQ ID NO: 914283
cuuaguaguggguauacaa

SEQ ID NO: 992263 - RNA, 19 nt, Artificial Sequence
  Description of Artificial Sequence: Synthetic oligonucleotide
  Antisense strand to SEQ ID NO: 992262
uuguauacccacuacuaag

SEQ ID NO: 992264 - RNA, 19 nt, Artificial Sequence
  Description of Artificial Sequence: Synthetic oligonucleotide
  Sense strand starting at position 3258 of SEQ ID NO: 914283
guaagauugcaguaaauaa

SEQ ID NO: 992265 - RNA, 19 nt, Artificial Sequence
  Description of Artificial Sequence: Synthetic oligonucleotide
  Antisense strand to SEQ ID NO: 992264
uuauuuacugcaaucuuac

SEQ ID NO: 992266 - RNA, 19 nt, Artificial Sequence
  Description of Artificial Sequence: Synthetic oligonucleotide
  Sense strand starting at position 3474 of SEQ ID NO: 914283
guguccucuagggagagua

SEQ ID NO: 992267 - RNA, 19 nt, Artificial Sequence
  Description of Artificial Sequence: Synthetic oligonucleotide
  Antisense strand to SEQ ID NO: 992266
uacucucccuagaggacac

SEQ ID NO: 992268 - RNA, 19 nt, Artificial Sequence
  Description of Artificial Sequence: Synthetic oligonucleotide
  Sense strand starting at position 3476 of SEQ ID NO: 914283
guccucuagggagaguaau

SEQ ID NO: 992269 - RNA, 19 nt, Artificial Sequence
  Description of Artificial Sequence: Synthetic oligonucleotide
  Antisense strand to SEQ ID NO: 992268
auuacucucccuagaggac

SEQ ID NO: 992270 - RNA, 19 nt, Artificial Sequence
  Description of Artificial Sequence: Synthetic oligonucleotide
  Sense strand starting at position 3654 of SEQ ID NO: 914283
ugauaaucuagagguagug

SEQ ID NO: 992271 - RNA, 19 nt, Artificial Sequence
  Description of Artificial Sequence: Synthetic oligonucleotide
  Antisense strand to SEQ ID NO: 992270
cacuaccucuagauuauca

SEQ ID NO: 992272 - RNA, 19 nt, Artificial Sequence
  Description of Artificial Sequence: Synthetic oligonucleotide
  Sense strand starting at position 3670 of SEQ ID NO: 914283
guggaugagaagugguuga

SEQ ID NO: 992273 - RNA, 19 nt, Artificial Sequence
  Description of Artificial Sequence: Synthetic oligonucleotide
  Antisense strand to SEQ ID NO: 992272
ucaaccacuucucauccac

SEQ ID NO: 992274 - RNA, 19 nt, Artificial Sequence
  Description of Artificial Sequence: Synthetic oligonucleotide
  Sense strand starting at position 3674 of SEQ ID NO: 914283
augagaagugguugaauuc

SEQ ID NO: 992275 - RNA, 19 nt, Artificial Sequence
  Description of Artificial Sequence: Synthetic oligonucleotide
  Antisense strand to SEQ ID NO: 992274
gaauucaaccacuucucau

SEQ ID NO: 992276 - RNA, 19 nt, Artificial Sequence
  Description of Artificial Sequence: Synthetic oligonucleotide
  Sense strand starting at position 3725 of SEQ ID NO: 914283
uugcuaacagauggacaau

SEQ ID NO: 992277 - RNA, 19 nt, Artificial Sequence
  Description of Artificial Sequence: Synthetic oligonucleotide
  Antisense strand to SEQ ID NO: 992276
auuguccaucuguuagcaa

SEQ ID NO: 992278 - RNA, 19 nt, Artificial Sequence
  Description of Artificial Sequence: Synthetic oligonucleotide
  Sense strand starting at position 3886 of SEQ ID NO: 914283
gucugagaugcccauuaga

SEQ ID NO: 992279 - RNA, 19 nt, Artificial Sequence
  Description of Artificial Sequence: Synthetic oligonucleotide
  Antisense strand to SEQ ID NO: 992278
ucuaaugggcaucucagac

SEQ ID NO: 992280 - RNA, 19 nt, Artificial Sequence
  Description of Artificial Sequence: Synthetic oligonucleotide
  Sense strand starting at position 3889 of SEQ ID NO: 914283
ugagaugcccauuagagua

SEQ ID NO: 992281 - RNA, 19 nt, Artificial Sequence
  Description of Artificial Sequence: Synthetic oligonucleotide
  Antisense strand to SEQ ID NO: 992280
uacucuaaugggcaucuca

SEQ ID NO: 992282 - RNA, 19 nt, Artificial Sequence
  Description of Artificial Sequence: Synthetic oligonucleotide
  Sense strand starting at position 3894 of SEQ ID NO: 914283
ugcccauuagaguagagau

SEQ ID NO: 992283 - RNA, 19 nt, Artificial Sequence
  Description of Artificial Sequence: Synthetic oligonucleotide
  Antisense strand to SEQ ID NO: 992282
aucucuacucuaaugggca

SEQ ID NO: 992284 - RNA, 19 nt, Artificial Sequence
  Description of Artificial Sequence: Synthetic oligonucleotide
  Sense strand starting at position 3970 of SEQ ID NO: 914283
uagaucauuugggagucau

SEQ ID NO: 992285 - RNA, 19 nt, Artificial Sequence
  Description of Artificial Sequence: Synthetic oligonucleotide
  Antisense strand to SEQ ID NO: 992284
augacucccaaaugaucua

SEQ ID NO: 992286 - RNA, 19 nt, Artificial Sequence
  Description of Artificial Sequence: Synthetic oligonucleotide
  Sense strand starting at position 535 of SEQ ID NO: 914284
gugagagacuuaucagccu

SEQ ID NO: 992287 - RNA, 19 nt, Artificial Sequence
  Description of Artificial Sequence: Synthetic oligonucleotide
  Antisense strand to SEQ ID NO: 992286
aggcugauaagucucucac

SEQ ID NO: 992288 - RNA, 19 nt, Artificial Sequence
  Description of Artificial Sequence: Synthetic oligonucleotide
  Sense strand starting at position 538 of SEQ ID NO: 914284
agagacuuaucagccuaga

SEQ ID NO: 992289 - RNA, 19 nt, Artificial Sequence
  Description of Artificial Sequence: Synthetic oligonucleotide
  Antisense strand to SEQ ID NO: 992288
ucuaggcugauaagucucu

SEQ ID NO: 992290 - RNA, 19 nt, Artificial Sequence
  Description of Artificial Sequence: Synthetic oligonucleotide
  Sense strand starting at position 597 of SEQ ID NO: 914284
uuuccugugcuuuagggaa

SEQ ID NO: 992291 - RNA, 19 nt, Artificial Sequence
  Description of Artificial Sequence: Synthetic oligonucleotide
  Antisense strand to SEQ ID NO: 992290
uucccuaaagcacaggaaa

SEQ ID NO: 992292 - RNA, 19 nt, Artificial Sequence
  Description of Artificial Sequence: Synthetic oligonucleotide
  Sense strand starting at position 648 of SEQ ID NO: 914284
ucuaaucuggcccagaagu

SEQ ID NO: 992293 - RNA, 19 nt, Artificial Sequence
  Description of Artificial Sequence: Synthetic oligonucleotide
  Antisense strand to SEQ ID NO: 992292
acuucugggccagauuaga

SEQ ID NO: 992294 - RNA, 19 nt, Artificial Sequence
  Description of Artificial Sequence: Synthetic oligonucleotide
  Sense strand starting at position 754 of SEQ ID NO: 914284
aaagcucuuccuggguaga

SEQ ID NO: 992295 - RNA, 19 nt, Artificial Sequence
  Description of Artificial Sequence: Synthetic oligonucleotide
  Antisense strand to SEQ ID NO: 992294
ucuacccaggaagagcuuu

SEQ ID NO: 992296 - RNA, 19 nt, Artificial Sequence
  Description of Artificial Sequence: Synthetic oligonucleotide
  Sense strand starting at position 755 of SEQ ID NO: 914284
aagcucuuccuggguagau

SEQ ID NO: 992297 - RNA, 19 nt, Artificial Sequence
  Description of Artificial Sequence: Synthetic oligonucleotide
  Antisense strand to SEQ ID NO: 992296
aucuacccaggaagagcuu

SEQ ID NO: 992298 - RNA, 19 nt, Artificial Sequence
  Description of Artificial Sequence: Synthetic oligonucleotide
  Sense strand starting at position 777 of SEQ ID NO: 914284
uggaguaaggcugggucau

SEQ ID NO: 992299 - RNA, 19 nt, Artificial Sequence
  Description of Artificial Sequence: Synthetic oligonucleotide
  Antisense strand to SEQ ID NO: 992298
augacccagccuuacucca

SEQ ID NO: 992300 - RNA, 19 nt, Artificial Sequence
  Description of Artificial Sequence: Synthetic oligonucleotide
  Sense strand starting at position 993 of SEQ ID NO: 914284
gggaaagggucaagugaau

SEQ ID NO: 992301 - RNA, 19 nt, Artificial Sequence
  Description of Artificial Sequence: Synthetic oligonucleotide
  Antisense strand to SEQ ID NO: 992300
auucacuugacccuuuccc

SEQ ID NO: 992302 - RNA, 19 nt, Artificial Sequence
  Description of Artificial Sequence: Synthetic oligonucleotide
  Sense strand starting at position 1230 of SEQ ID NO: 914284
cugucaaaguuauucugau

SEQ ID NO: 992303 - RNA, 19 nt, Artificial Sequence
  Description of Artificial Sequence: Synthetic oligonucleotide
  Antisense strand to SEQ ID NO: 992302
aucagaauaacuuugacag

SEQ ID NO: 992304 - RNA, 19 nt, Artificial Sequence
  Description of Artificial Sequence: Synthetic oligonucleotide
  Sense strand starting at position 1309 of SEQ ID NO: 914284
gggagucaaguguagggau

SEQ ID NO: 992305 - RNA, 19 nt, Artificial Sequence
  Description of Artificial Sequence: Synthetic oligonucleotide
  Antisense strand to SEQ ID NO: 992304
aucccuacacuugacuccc

SEQ ID NO: 992306 - RNA, 19 nt, Artificial Sequence
  Description of Artificial Sequence: Synthetic oligonucleotide
  Sense strand starting at position 1470 of SEQ ID NO: 914284
gucagaaauuuaggacacu

SEQ ID NO: 992307 - RNA, 19 nt, Artificial Sequence
  Description of Artificial Sequence: Synthetic oligonucleotide
  Antisense strand to SEQ ID NO: 992306
aguguccuaaauuucugac

SEQ ID NO: 992308 - RNA, 19 nt, Artificial Sequence
  Description of Artificial Sequence: Synthetic oligonucleotide
  Sense strand starting at position 1471 of SEQ ID NO: 914284
ucagaaauuuaggacacua

SEQ ID NO: 992309 - RNA, 19 nt, Artificial Sequence
  Description of Artificial Sequence: Synthetic oligonucleotide
  Antisense strand to SEQ ID NO: 992308
uaguguccuaaauuucuga

SEQ ID NO: 992310 - RNA, 19 nt, Artificial Sequence
  Description of Artificial Sequence: Synthetic oligonucleotide
  Sense strand starting at position 1528 of SEQ ID NO: 914284
gggauuguagcauaugcaa

SEQ ID NO: 992311 - RNA, 19 nt, Artificial Sequence
  Description of Artificial Sequence: Synthetic oligonucleotide
  Antisense strand to SEQ ID NO: 992310
uugcauaugcuacaauccc

SEQ ID NO: 992312 - RNA, 19 nt, Artificial Sequence
  Description of Artificial Sequence: Synthetic oligonucleotide
  Sense strand starting at position 1574 of SEQ ID NO: 914284
gcaugaauaaguggauaaa

SEQ ID NO: 992313 - RNA, 19 nt, Artificial Sequence
  Description of Artificial Sequence: Synthetic oligonucleotide
  Antisense strand to SEQ ID NO: 992312
uuuauccacuuauucaugc

SEQ ID NO: 992314 - RNA, 19 nt, Artificial Sequence
  Description of Artificial Sequence: Synthetic oligonucleotide
  Sense strand starting at position 1668 of SEQ ID NO: 914284
ccaggagugccagauaauc

SEQ ID NO: 992315 - RNA, 19 nt, Artificial Sequence
  Description of Artificial Sequence: Synthetic oligonucleotide
  Antisense strand to SEQ ID NO: 992314
gauuaucuggcacuccugg

SEQ ID NO: 992316 - RNA, 19 nt, Artificial Sequence
  Description of Artificial Sequence: Synthetic oligonucleotide
  Sense strand starting at position 1673 of SEQ ID NO: 914284
agugccagauaaucugaau

SEQ ID NO: 992317 - RNA, 19 nt, Artificial Sequence
  Description of Artificial Sequence: Synthetic oligonucleotide
  Antisense strand to SEQ ID NO: 992316
auucagauuaucuggcacu

SEQ ID NO: 992318 - RNA, 19 nt, Artificial Sequence
  Description of Artificial Sequence: Synthetic oligonucleotide
  Sense strand starting at position 1765 of SEQ ID NO: 914284
uuagaauuccuccgugaaa

SEQ ID NO: 992319 - RNA, 19 nt, Artificial Sequence
  Description of Artificial Sequence: Synthetic oligonucleotide
  Antisense strand to SEQ ID NO: 992318
uuucacggaggaauucuaa

SEQ ID NO: 992320 - RNA, 19 nt, Artificial Sequence
  Description of Artificial Sequence: Synthetic oligonucleotide
  Sense strand starting at position 1766 of SEQ ID NO: 914284
uagaauuccuccgugaaag

SEQ ID NO: 992321 - RNA, 19 nt, Artificial Sequence
  Description of Artificial Sequence: Synthetic oligonucleotide
  Antisense strand to SEQ ID NO: 992320
cuuucacggaggaauucua

SEQ ID NO: 992322 - RNA, 19 nt, Artificial Sequence
  Description of Artificial Sequence: Synthetic oligonucleotide
  Sense strand starting at position 1767 of SEQ ID NO: 914284
agaauuccuccgugaaagg

SEQ ID NO: 992323 - RNA, 19 nt, Artificial Sequence
  Description of Artificial Sequence: Synthetic oligonucleotide
  Antisense strand to SEQ ID NO: 992322
ccuuucacggaggaauucu

SEQ ID NO: 992324 - RNA, 19 nt, Artificial Sequence
  Description of Artificial Sequence: Synthetic oligonucleotide
  Sense strand starting at position 1945 of SEQ ID NO: 914284
cagcgaucucggcuccgaa

SEQ ID NO: 992325 - RNA, 19 nt, Artificial Sequence
  Description of Artificial Sequence: Synthetic oligonucleotide
  Antisense strand to SEQ ID NO: 992324
uucggagccgagaucgcug

SEQ ID NO: 992326 - RNA, 19 nt, Artificial Sequence
  Description of Artificial Sequence: Synthetic oligonucleotide
  Sense strand starting at position 1996 of SEQ ID NO: 914284
uucuuugcucauuacgaua

SEQ ID NO: 992327 - RNA, 19 nt, Artificial Sequence
  Description of Artificial Sequence: Synthetic oligonucleotide
  Antisense strand to SEQ ID NO: 992326
uaucguaaugagcaaagaa

SEQ ID NO: 992328 - RNA, 19 nt, Artificial Sequence
  Description of Artificial Sequence: Synthetic oligonucleotide
  Sense strand starting at position 2001 of SEQ ID NO: 914284
ugcucauuacgauaaugac

SEQ ID NO: 992329 - RNA, 19 nt, Artificial Sequence
  Description of Artificial Sequence: Synthetic oligonucleotide
  Antisense strand to SEQ ID NO: 992328
gucauuaucguaaugagca

SEQ ID NO: 992330 - RNA, 19 nt, Artificial Sequence
  Description of Artificial Sequence: Synthetic oligonucleotide
  Sense strand starting at position 2050 of SEQ ID NO: 914284
gcgggucucagacagaaau

SEQ ID NO: 992331 - RNA, 19 nt, Artificial Sequence
  Description of Artificial Sequence: Synthetic oligonucleotide
  Antisense strand to SEQ ID NO: 992330
auuucugucugagacccgc

SEQ ID NO: 992332 - RNA, 19 nt, Artificial Sequence
  Description of Artificial Sequence: Synthetic oligonucleotide
  Sense strand starting at position 2129 of SEQ ID NO: 914284
aaagaaaugcugggugaca

SEQ ID NO: 992333 - RNA, 19 nt, Artificial Sequence
  Description of Artificial Sequence: Synthetic oligonucleotide
  Antisense strand to SEQ ID NO: 992332
ugucacccagcauuucuuu

SEQ ID NO: 992334 - RNA, 19 nt, Artificial Sequence
  Description of Artificial Sequence: Synthetic oligonucleotide
  Sense strand starting at position 2190 of SEQ ID NO: 914284
gggcuuagucucgaggaag

SEQ ID NO: 992335 - RNA, 19 nt, Artificial Sequence
  Description of Artificial Sequence: Synthetic oligonucleotide
  Antisense strand to SEQ ID NO: 992334
cuuccucgagacuaagccc

SEQ ID NO: 992336 - RNA, 19 nt, Artificial Sequence
  Description of Artificial Sequence: Synthetic oligonucleotide
  Sense strand starting at position 2219 of SEQ ID NO: 914284
gcuggagcucuuuaagggu

SEQ ID NO: 992337 - RNA, 19 nt, Artificial Sequence
  Description of Artificial Sequence: Synthetic oligonucleotide
  Antisense strand to SEQ ID NO: 992336
acccuuaaagagcuccagc

SEQ ID NO: 992338 - RNA, 19 nt, Artificial Sequence
  Description of Artificial Sequence: Synthetic oligonucleotide
  Sense strand starting at position 2265 of SEQ ID NO: 914284
ggagucgggucaaaggaaa

SEQ ID NO: 992339 - RNA, 19 nt, Artificial Sequence
  Description of Artificial Sequence: Synthetic oligonucleotide
  Antisense strand to SEQ ID NO: 992338
uuuccuuugacccgacucc

SEQ ID NO: 992340 - RNA, 19 nt, Artificial Sequence
  Description of Artificial Sequence: Synthetic oligonucleotide
  Sense strand starting at position 2657 of SEQ ID NO: 914284
gucaccauuugcuuguuaa

SEQ ID NO: 992341 - RNA, 19 nt, Artificial Sequence
  Description of Artificial Sequence: Synthetic oligonucleotide
  Antisense strand to SEQ ID NO: 992340
uuaacaagcaaauggugac

SEQ ID NO: 992342 - RNA, 19 nt, Artificial Sequence
  Description of Artificial Sequence: Synthetic oligonucleotide
  Sense strand starting at position 2913 of SEQ ID NO: 914284
ggauaaaucuaggaauaug

SEQ ID NO: 992343 - RNA, 19 nt, Artificial Sequence
  Description of Artificial Sequence: Synthetic oligonucleotide
  Antisense strand to SEQ ID NO: 992342
cauauuccuagauuuaucc

SEQ ID NO: 992344 - RNA, 19 nt, Artificial Sequence
  Description of Artificial Sequence: Synthetic oligonucleotide
  Sense strand starting at position 2976 of SEQ ID NO: 914284
gcagacaugcaguagacuu

SEQ ID NO: 992345 - RNA, 19 nt, Artificial Sequence
  Description of Artificial Sequence: Synthetic oligonucleotide
  Antisense strand to SEQ ID NO: 992344
aagucuacugcaugucugc

SEQ ID NO: 992346 - RNA, 19 nt, Artificial Sequence
  Description of Artificial Sequence: Synthetic oligonucleotide
  Sense strand starting at position 3047 of SEQ ID NO: 914284
agacuugaaugacuaguua

SEQ ID NO: 992347 - RNA, 19 nt, Artificial Sequence
  Description of Artificial Sequence: Synthetic oligonucleotide
  Antisense strand to SEQ ID NO: 992346
uaacuagucauucaagucu

SEQ ID NO: 992348 - RNA, 19 nt, Artificial Sequence
  Description of Artificial Sequence: Synthetic oligonucleotide
  Sense strand starting at position 3484 of SEQ ID NO: 914284
gugauuauauugccaaaua

SEQ ID NO: 992349 - RNA, 19 nt, Artificial Sequence
  Description of Artificial Sequence: Synthetic oligonucleotide
  Antisense strand to SEQ ID NO: 992348
uauuuggcaauauaaucac

SEQ ID NO: 992350 - RNA, 19 nt, Artificial Sequence
  Description of Artificial Sequence: Synthetic oligonucleotide
  Sense strand starting at position 3586 of SEQ ID NO: 914284
uacugagugccuuaguaua

SEQ ID NO: 992351 - RNA, 19 nt, Artificial Sequence
  Description of Artificial Sequence: Synthetic oligonucleotide
  Antisense strand to SEQ ID NO: 992350
uauacuaaggcacucagua

SEQ ID NO: 992352 - RNA, 19 nt, Artificial Sequence
  Description of Artificial Sequence: Synthetic oligonucleotide
  Sense strand starting at position 3597 of SEQ ID NO: 914284
uuaguauauguccaucacu

SEQ ID NO: 992353 - RNA, 19 nt, Artificial Sequence
  Description of Artificial Sequence: Synthetic oligonucleotide
  Antisense strand to SEQ ID NO: 992352
agugauggacauauacuaa

SEQ ID NO: 992354 - RNA, 19 nt, Artificial Sequence
  Description of Artificial Sequence: Synthetic oligonucleotide
  Sense strand starting at position 3600 of SEQ ID NO: 914284
guauauguccaucacuauu

SEQ ID NO: 992355 - RNA, 19 nt, Artificial Sequence
  Description of Artificial Sequence: Synthetic oligonucleotide
  Antisense strand to SEQ ID NO: 992354
aauagugauggacauauac

SEQ ID NO: 992356 - RNA, 19 nt, Artificial Sequence
  Description of Artificial Sequence: Synthetic oligonucleotide
  Sense strand starting at position 3619 of SEQ ID NO: 914284
cuuaguaguggguauacaa

SEQ ID NO: 992357 - RNA, 19 nt, Artificial Sequence
  Description of Artificial Sequence: Synthetic oligonucleotide
  Antisense strand to SEQ ID NO: 992356
uuguauacccacuacuaag

SEQ ID NO: 992358 - RNA, 19 nt, Artificial Sequence
  Description of Artificial Sequence: Synthetic oligonucleotide
  Sense strand starting at position 3736 of SEQ ID NO: 914284
guaagauugcaguaaauaa

SEQ ID NO: 992359 - RNA, 19 nt, Artificial Sequence
  Description of Artificial Sequence: Synthetic oligonucleotide
  Antisense strand to SEQ ID NO: 992358
uuauuuacugcaaucuuac

SEQ ID NO: 992360 - RNA, 19 nt, Artificial Sequence
  Description of Artificial Sequence: Synthetic oligonucleotide
  Sense strand starting at position 3933 of SEQ ID NO: 914284
cuagaauggcuugggcaua

SEQ ID NO: 992361 - RNA, 19 nt, Artificial Sequence
  Description of Artificial Sequence: Synthetic oligonucleotide
  Antisense strand to SEQ ID NO: 992360
uaugcccaagccauucuag

SEQ ID NO: 992362 - RNA, 19 nt, Artificial Sequence
  Description of Artificial Sequence: Synthetic oligonucleotide
  Sense strand starting at position 3952 of SEQ ID NO: 914284
guguccucuagggagagua

SEQ ID NO: 992363 - RNA, 19 nt, Artificial Sequence
  Description of Artificial Sequence: Synthetic oligonucleotide
  Antisense strand to SEQ ID NO: 992362
uacucucccuagaggacac

SEQ ID NO: 992364 - RNA, 19 nt, Artificial Sequence
  Description of Artificial Sequence: Synthetic oligonucleotide
  Sense strand starting at position 3954 of SEQ ID NO: 914284
guccucuagggagaguaau

SEQ ID NO: 992365 - RNA, 19 nt, Artificial Sequence
  Description of Artificial Sequence: Synthetic oligonucleotide
  Antisense strand to SEQ ID NO: 992364
auuacucucccuagaggac

SEQ ID NO: 992366 - RNA, 19 nt, Artificial Sequence
  Description of Artificial Sequence: Synthetic oligonucleotide
  Sense strand starting at position 561 of SEQ ID NO: 914285
gugagagacuuaucagccu

SEQ ID NO: 992367 - RNA, 19 nt, Artificial Sequence
  Description of Artificial Sequence: Synthetic oligonucleotide
  Antisense strand to SEQ ID NO: 992366
aggcugauaagucucucac

SEQ ID NO: 992368 - RNA, 19 nt, Artificial Sequence
  Description of Artificial Sequence: Synthetic oligonucleotide
  Sense strand starting at position 564 of SEQ ID NO: 914285
agagacuuaucagccuaga

SEQ ID NO: 992369 - RNA, 19 nt, Artificial Sequence
  Description of Artificial Sequence: Synthetic oligonucleotide
  Antisense strand to SEQ ID NO: 992368
ucuaggcugauaagucucu

SEQ ID NO: 992370 - RNA, 19 nt, Artificial Sequence
  Description of Artificial Sequence: Synthetic oligonucleotide
  Sense strand starting at position 623 of SEQ ID NO: 914285
uuuccugugcuuuagggaa

SEQ ID NO: 992371 - RNA, 19 nt, Artificial Sequence
  Description of Artificial Sequence: Synthetic oligonucleotide
  Antisense strand to SEQ ID NO: 992370
uucccuaaagcacaggaaa

SEQ ID NO: 992372 - RNA, 19 nt, Artificial Sequence
  Description of Artificial Sequence: Synthetic oligonucleotide
  Sense strand starting at position 674 of SEQ ID NO: 914285
ucuaaucuggcccagaagu

SEQ ID NO: 992373 - RNA, 19 nt, Artificial Sequence
  Description of Artificial Sequence: Synthetic oligonucleotide
  Antisense strand to SEQ ID NO: 992372
acuucugggccagauuaga

SEQ ID NO: 992374 - RNA, 19 nt, Artificial Sequence
  Description of Artificial Sequence: Synthetic oligonucleotide
  Sense strand starting at position 780 of SEQ ID NO: 914285
aaagcucuuccuggguaga

SEQ ID NO: 992375 - RNA, 19 nt, Artificial Sequence
  Description of Artificial Sequence: Synthetic oligonucleotide
  Antisense strand to SEQ ID NO: 992374
ucuacccaggaagagcuuu

SEQ ID NO: 992376 - RNA, 19 nt, Artificial Sequence
  Description of Artificial Sequence: Synthetic oligonucleotide
  Sense strand starting at position 781 of SEQ ID NO: 914285
aagcucuuccuggguagau

SEQ ID NO: 992377 - RNA, 19 nt, Artificial Sequence
  Description of Artificial Sequence: Synthetic oligonucleotide
  Antisense strand to SEQ ID NO: 992376
aucuacccaggaagagcuu

SEQ ID NO: 992378 - RNA, 19 nt, Artificial Sequence
  Description of Artificial Sequence: Synthetic oligonucleotide
  Sense strand starting at position 803 of SEQ ID NO: 914285
uggaguaaggcugggucau

SEQ ID NO: 992379 - RNA, 19 nt, Artificial Sequence
  Description of Artificial Sequence: Synthetic oligonucleotide
  Antisense strand to SEQ ID NO: 992378
augacccagccuuacucca

SEQ ID NO: 992380 - RNA, 19 nt, Artificial Sequence
  Description of Artificial Sequence: Synthetic oligonucleotide
  Sense strand starting at position 1019 of SEQ ID NO: 914285
gggaaagggucaagugaau

SEQ ID NO: 992381 - RNA, 19 nt, Artificial Sequence
  Description of Artificial Sequence: Synthetic oligonucleotide
  Antisense strand to SEQ ID NO: 992380
auucacuugacccuuuccc

SEQ ID NO: 992382 - RNA, 19 nt, Artificial Sequence
  Description of Artificial Sequence: Synthetic oligonucleotide
  Sense strand starting at position 1256 of SEQ ID NO: 914285
cugucaaaguuauucugau

SEQ ID NO: 992383 - RNA, 19 nt, Artificial Sequence
  Description of Artificial Sequence: Synthetic oligonucleotide
  Antisense strand to SEQ ID NO: 992382
aucagaauaacuuugacag

SEQ ID NO: 992384 - RNA, 19 nt, Artificial Sequence
  Description of Artificial Sequence: Synthetic oligonucleotide
  Sense strand starting at position 1335 of SEQ ID NO: 914285
gggagucaaguguagggau

SEQ ID NO: 992385 - RNA, 19 nt, Artificial Sequence
  Description of Artificial Sequence: Synthetic oligonucleotide
  Antisense strand to SEQ ID NO: 992384
aucccuacacuugacuccc

SEQ ID NO: 992386 - RNA, 19 nt, Artificial Sequence
  Description of Artificial Sequence: Synthetic oligonucleotide
  Sense strand starting at position 1496 of SEQ ID NO: 914285
gucagaaauuuaggacacu

SEQ ID NO: 992387 - RNA, 19 nt, Artificial Sequence
  Description of Artificial Sequence: Synthetic oligonucleotide
  Antisense strand to SEQ ID NO: 992386
aguguccuaaauuucugac

SEQ ID NO: 992388 - RNA, 19 nt, Artificial Sequence
  Description of Artificial Sequence: Synthetic oligonucleotide
  Sense strand starting at position 1497 of SEQ ID NO: 914285
ucagaaauuuaggacacua

SEQ ID NO: 992389 - RNA, 19 nt, Artificial Sequence
  Description of Artificial Sequence: Synthetic oligonucleotide
  Antisense strand to SEQ ID NO: 992388
uaguguccuaaauuucuga

SEQ ID NO: 992390 - RNA, 19 nt, Artificial Sequence
  Description of Artificial Sequence: Synthetic oligonucleotide
  Sense strand starting at position 1554 of SEQ ID NO: 914285
gggauuguagcauaugcaa

SEQ ID NO: 992391 - RNA, 19 nt, Artificial Sequence
  Description of Artificial Sequence: Synthetic oligonucleotide
  Antisense strand to SEQ ID NO: 992390
uugcauaugcuacaauccc

SEQ ID NO: 992392 - RNA, 19 nt, Artificial Sequence
  Description of Artificial Sequence: Synthetic oligonucleotide
  Sense strand starting at position 1600 of SEQ ID NO: 914285
gcaugaauaaguggauaaa

SEQ ID NO: 992393 - RNA, 19 nt, Artificial Sequence
  Description of Artificial Sequence: Synthetic oligonucleotide
  Antisense strand to SEQ ID NO: 992392
uuuauccacuuauucaugc

SEQ ID NO: 992394 - RNA, 19 nt, Artificial Sequence
  Description of Artificial Sequence: Synthetic oligonucleotide
  Sense strand starting at position 1694 of SEQ ID NO: 914285
ccaggagugccagauaauc

SEQ ID NO: 992395 - RNA, 19 nt, Artificial Sequence
  Description of Artificial Sequence: Synthetic oligonucleotide
  Antisense strand to SEQ ID NO: 992394
gauuaucuggcacuccugg

SEQ ID NO: 992396 - RNA, 19 nt, Artificial Sequence
  Description of Artificial Sequence: Synthetic oligonucleotide
  Sense strand starting at position 1699 of SEQ ID NO: 914285
agugccagauaaucugaau

SEQ ID NO: 992397 - RNA, 19 nt, Artificial Sequence
  Description of Artificial Sequence: Synthetic oligonucleotide
  Antisense strand to SEQ ID NO: 992396
auucagauuaucuggcacu

SEQ ID NO: 992398 - RNA, 19 nt, Artificial Sequence
  Description of Artificial Sequence: Synthetic oligonucleotide
  Sense strand starting at position 1791 of SEQ ID NO: 914285
uuagaauuccuccgugaaa

SEQ ID NO: 992399 - RNA, 19 nt, Artificial Sequence
  Description of Artificial Sequence: Synthetic oligonucleotide
  Antisense strand to SEQ ID NO: 992398
uuucacggaggaauucuaa

SEQ ID NO: 992400 - RNA, 19 nt, Artificial Sequence
  Description of Artificial Sequence: Synthetic oligonucleotide
  Sense strand starting at position 1792 of SEQ ID NO: 914285
uagaauuccuccgugaaag

SEQ ID NO: 992401 - RNA, 19 nt, Artificial Sequence
  Description of Artificial Sequence: Synthetic oligonucleotide
  Antisense strand to SEQ ID NO: 992400
cuuucacggaggaauucua

SEQ ID NO: 992402 - RNA, 19 nt, Artificial Sequence
  Description of Artificial Sequence: Synthetic oligonucleotide
  Sense strand starting at position 1793 of SEQ ID NO: 914285
agaauuccuccgugaaagg

SEQ ID NO: 992403 - RNA, 19 nt, Artificial Sequence
  Description of Artificial Sequence: Synthetic oligonucleotide
  Antisense strand to SEQ ID NO: 992402
ccuuucacggaggaauucu

SEQ ID NO: 992404 - RNA, 19 nt, Artificial Sequence
  Description of Artificial Sequence: Synthetic oligonucleotide
  Sense strand starting at position 1971 of SEQ ID NO: 914285
cagcgaucucggcuccgaa

SEQ ID NO: 992405 - RNA, 19 nt, Artificial Sequence
  Description of Artificial Sequence: Synthetic oligonucleotide
  Antisense strand to SEQ ID NO: 992404
uucggagccgagaucgcug

SEQ ID NO: 992406 - RNA, 19 nt, Artificial Sequence
  Description of Artificial Sequence: Synthetic oligonucleotide
  Sense strand starting at position 2022 of SEQ ID NO: 914285
uucuuugcucauuacgaua

SEQ ID NO: 992407 - RNA, 19 nt, Artificial Sequence
  Description of Artificial Sequence: Synthetic oligonucleotide
  Antisense strand to SEQ ID NO: 992406
uaucguaaugagcaaagaa

SEQ ID NO: 992408 - RNA, 19 nt, Artificial Sequence
  Description of Artificial Sequence: Synthetic oligonucleotide
  Sense strand starting at position 2027 of SEQ ID NO: 914285
ugcucauuacgauaaugac

SEQ ID NO: 992409 - RNA, 19 nt, Artificial Sequence
  Description of Artificial Sequence: Synthetic oligonucleotide
  Antisense strand to SEQ ID NO: 992408
gucauuaucguaaugagca

SEQ ID NO: 992410 - RNA, 19 nt, Artificial Sequence
  Description of Artificial Sequence: Synthetic oligonucleotide
  Sense strand starting at position 2076 of SEQ ID NO: 914285
gcgggucucagacagaaau

SEQ ID NO: 992411 - RNA, 19 nt, Artificial Sequence
  Description of Artificial Sequence: Synthetic oligonucleotide
  Antisense strand to SEQ ID NO: 992410
auuucugucugagacccgc

SEQ ID NO: 992412 - RNA, 19 nt, Artificial Sequence
  Description of Artificial Sequence: Synthetic oligonucleotide
  Sense strand starting at position 2155 of SEQ ID NO: 914285
aaagaaaugcugggugaca

SEQ ID NO: 992413 - RNA, 19 nt, Artificial Sequence
  Description of Artificial Sequence: Synthetic oligonucleotide
  Antisense strand to SEQ ID NO: 992412
ugucacccagcauuucuuu

SEQ ID NO: 992414 - RNA, 19 nt, Artificial Sequence
  Description of Artificial Sequence: Synthetic oligonucleotide
  Sense strand starting at position 2216 of SEQ ID NO: 914285
gggcuuagucucgaggaag

SEQ ID NO: 992415 - RNA, 19 nt, Artificial Sequence
  Description of Artificial Sequence: Synthetic oligonucleotide
  Antisense strand to SEQ ID NO: 992414
cuuccucgagacuaagccc

SEQ ID NO: 992416 - RNA, 19 nt, Artificial Sequence
  Description of Artificial Sequence: Synthetic oligonucleotide
  Sense strand starting at position 2245 of SEQ ID NO: 914285
gcuggagcucuuuaagggu

SEQ ID NO: 992417 - RNA, 19 nt, Artificial Sequence
  Description of Artificial Sequence: Synthetic oligonucleotide
  Antisense strand to SEQ ID NO: 992416
acccuuaaagagcuccagc

SEQ ID NO: 992418 - RNA, 19 nt, Artificial Sequence
  Description of Artificial Sequence: Synthetic oligonucleotide
  Sense strand starting at position 2291 of SEQ ID NO: 914285
ggagucgggucaaaggaaa

SEQ ID NO: 992419 - RNA, 19 nt, Artificial Sequence
  Description of Artificial Sequence: Synthetic oligonucleotide
  Antisense strand to SEQ ID NO: 992418
uuuccuuugacccgacucc

SEQ ID NO: 992420 - RNA, 19 nt, Artificial Sequence
  Description of Artificial Sequence: Synthetic oligonucleotide
  Sense strand starting at position 2683 of SEQ ID NO: 914285
gucaccauuugcuuguuaa

SEQ ID NO: 992421 - RNA, 19 nt, Artificial Sequence
  Description of Artificial Sequence: Synthetic oligonucleotide
  Antisense strand to SEQ ID NO: 992420
uuaacaagcaaauggugac

SEQ ID NO: 992422 - RNA, 19 nt, Artificial Sequence
  Description of Artificial Sequence: Synthetic oligonucleotide
  Sense strand starting at position 2939 of SEQ ID NO: 914285
ggauaaaucuaggaauaug

SEQ ID NO: 992423 - RNA, 19 nt, Artificial Sequence
  Description of Artificial Sequence: Synthetic oligonucleotide
  Antisense strand to SEQ ID NO: 992422
cauauuccuagauuuaucc

SEQ ID NO: 992424 - RNA, 19 nt, Artificial Sequence
  Description of Artificial Sequence: Synthetic oligonucleotide
  Sense strand starting at position 3002 of SEQ ID NO: 914285
gcagacaugcaguagacuu

SEQ ID NO: 992425 - RNA, 19 nt, Artificial Sequence
  Description of Artificial Sequence: Synthetic oligonucleotide
  Antisense strand to SEQ ID NO: 992424
aagucuacugcaugucugc

SEQ ID NO: 992426 - RNA, 19 nt, Artificial Sequence
  Description of Artificial Sequence: Synthetic oligonucleotide
  Sense strand starting at position 3073 of SEQ ID NO: 914285
agacuugaaugacuaguua

SEQ ID NO: 992427 - RNA, 19 nt, Artificial Sequence
  Description of Artificial Sequence: Synthetic oligonucleotide
  Antisense strand to SEQ ID NO: 992426
uaacuagucauucaagucu

SEQ ID NO: 992428 - RNA, 19 nt, Artificial Sequence
  Description of Artificial Sequence: Synthetic oligonucleotide
  Sense strand starting at position 3510 of SEQ ID NO: 914285
gugauuauauugccaaaua

SEQ ID NO: 992429 - RNA, 19 nt, Artificial Sequence
  Description of Artificial Sequence: Synthetic oligonucleotide
  Antisense strand to SEQ ID NO: 992428
uauuuggcaauauaaucac

SEQ ID NO: 992430 - RNA, 19 nt, Artificial Sequence
  Description of Artificial Sequence: Synthetic oligonucleotide
  Sense strand starting at position 3612 of SEQ ID NO: 914285
uacugagugccuuaguaua

SEQ ID NO: 992431 - RNA, 19 nt, Artificial Sequence
  Description of Artificial Sequence: Synthetic oligonucleotide
  Antisense strand to SEQ ID NO: 992430
uauacuaaggcacucagua

SEQ ID NO: 992432 - RNA, 19 nt, Artificial Sequence
  Description of Artificial Sequence: Synthetic oligonucleotide
  Sense strand starting at position 3623 of SEQ ID NO: 914285
uuaguauauguccaucacu

SEQ ID NO: 992433 - RNA, 19 nt, Artificial Sequence
  Description of Artificial Sequence: Synthetic oligonucleotide
  Antisense strand to SEQ ID NO: 992432
agugauggacauauacuaa

SEQ ID NO: 992434 - RNA, 19 nt, Artificial Sequence
  Description of Artificial Sequence: Synthetic oligonucleotide
  Sense strand starting at position 3626 of SEQ ID NO: 914285
guauauguccaucacuauu

SEQ ID NO: 992435 - RNA, 19 nt, Artificial Sequence
  Description of Artificial Sequence: Synthetic oligonucleotide
  Antisense strand to SEQ ID NO: 992434
aauagugauggacauauac

SEQ ID NO: 992436 - RNA, 19 nt, Artificial Sequence
  Description of Artificial Sequence: Synthetic oligonucleotide
  Sense strand starting at position 3645 of SEQ ID NO: 914285
cuuaguaguggguauacaa

SEQ ID NO: 992437 - RNA, 19 nt, Artificial Sequence
  Description of Artificial Sequence: Synthetic oligonucleotide
  Antisense strand to SEQ ID NO: 992436
uuguauacccacuacuaag

SEQ ID NO: 992438 - RNA, 19 nt, Artificial Sequence
  Description of Artificial Sequence: Synthetic oligonucleotide
  Sense strand starting at position 3762 of SEQ ID NO: 914285
guaagauugcaguaaauaa

SEQ ID NO: 992439 - RNA, 19 nt, Artificial Sequence
  Description of Artificial Sequence: Synthetic oligonucleotide
  Antisense strand to SEQ ID NO: 992438
uuauuuacugcaaucuuac

SEQ ID NO: 992440 - RNA, 19 nt, Artificial Sequence
  Description of Artificial Sequence: Synthetic oligonucleotide
  Sense strand starting at position 3959 of SEQ ID NO: 914285
cuagaauggcuugggcaua

SEQ ID NO: 992441 - RNA, 19 nt, Artificial Sequence
  Description of Artificial Sequence: Synthetic oligonucleotide
  Antisense strand to SEQ ID NO: 992440
uaugcccaagccauucuag

SEQ ID NO: 992442 - RNA, 19 nt, Artificial Sequence
  Description of Artificial Sequence: Synthetic oligonucleotide
  Sense strand starting at position 3978 of SEQ ID NO: 914285
guguccucuagggagagua

SEQ ID NO: 992443 - RNA, 19 nt, Artificial Sequence
  Description of Artificial Sequence: Synthetic oligonucleotide
  Antisense strand to SEQ ID NO: 992442
uacucucccuagaggacac

SEQ ID NO: 992444 - RNA, 19 nt, Artificial Sequence
  Description of Artificial Sequence: Synthetic oligonucleotide
  Sense strand starting at position 3980 of SEQ ID NO: 914285
guccucuagggagaguaau

SEQ ID NO: 992445 - RNA, 19 nt, Artificial Sequence
  Description of Artificial Sequence: Synthetic oligonucleotide
  Antisense strand to SEQ ID NO: 992444
auuacucucccuagaggac

SEQ ID NO: 992446 - RNA, 19 nt, Artificial Sequence
  Description of Artificial Sequence: Synthetic oligonucleotide
  Sense strand starting at position 601 of SEQ ID NO: 914286
gugagagacuuaucagccu

SEQ ID NO: 992447 - RNA, 19 nt, Artificial Sequence
  Description of Artificial Sequence: Synthetic oligonucleotide
  Antisense strand to SEQ ID NO: 992446
aggcugauaagucucucac

SEQ ID NO: 992448 - RNA, 19 nt, Artificial Sequence
  Description of Artificial Sequence: Synthetic oligonucleotide
  Sense strand starting at position 604 of SEQ ID NO: 914286
agagacuuaucagccuaga

SEQ ID NO: 992449 - RNA, 19 nt, Artificial Sequence
  Description of Artificial Sequence: Synthetic oligonucleotide
  Antisense strand to SEQ ID NO: 992448
ucuaggcugauaagucucu

SEQ ID NO: 992450 - RNA, 19 nt, Artificial Sequence
  Description of Artificial Sequence: Synthetic oligonucleotide
  Sense strand starting at position 663 of SEQ ID NO: 914286
uuuccugugcuuuagggaa

SEQ ID NO: 992451 - RNA, 19 nt, Artificial Sequence
  Description of Artificial Sequence: Synthetic oligonucleotide
  Antisense strand to SEQ ID NO: 992450
uucccuaaagcacaggaaa

SEQ ID NO: 992452 - RNA, 19 nt, Artificial Sequence
  Description of Artificial Sequence: Synthetic oligonucleotide
  Sense strand starting at position 714 of SEQ ID NO: 914286
ucuaaucuggcccagaagu

SEQ ID NO: 992453 - RNA, 19 nt, Artificial Sequence
  Description of Artificial Sequence: Synthetic oligonucleotide
  Antisense strand to SEQ ID NO: 992452
acuucugggccagauuaga

SEQ ID NO: 992454 - RNA, 19 nt, Artificial Sequence
  Description of Artificial Sequence: Synthetic oligonucleotide
  Sense strand starting at position 820 of SEQ ID NO: 914286
aaagcucuuccuggguaga

SEQ ID NO: 992455 - RNA, 19 nt, Artificial Sequence
  Description of Artificial Sequence: Synthetic oligonucleotide
  Antisense strand to SEQ ID NO: 992454
ucuacccaggaagagcuuu

SEQ ID NO: 992456 - RNA, 19 nt, Artificial Sequence
  Description of Artificial Sequence: Synthetic oligonucleotide
  Sense strand starting at position 821 of SEQ ID NO: 914286
aagcucuuccuggguagau

SEQ ID NO: 992457 - RNA, 19 nt, Artificial Sequence
  Description of Artificial Sequence: Synthetic oligonucleotide
  Antisense strand to SEQ ID NO: 992456
aucuacccaggaagagcuu

SEQ ID NO: 992458 - RNA, 19 nt, Artificial Sequence
  Description of Artificial Sequence: Synthetic oligonucleotide
  Sense strand starting at position 843 of SEQ ID NO: 914286
uggaguaaggcugggucau

SEQ ID NO: 992459 - RNA, 19 nt, Artificial Sequence
  Description of Artificial Sequence: Synthetic oligonucleotide
  Antisense strand to SEQ ID NO: 992458
augacccagccuuacucca

SEQ ID NO: 992460 - RNA, 19 nt, Artificial Sequence
  Description of Artificial Sequence: Synthetic oligonucleotide
  Sense strand starting at position 1059 of SEQ ID NO: 914286
gggaaagggucaagugaau

SEQ ID NO: 992461 - RNA, 19 nt, Artificial Sequence
  Description of Artificial Sequence: Synthetic oligonucleotide
  Antisense strand to SEQ ID NO: 992460
auucacuugacccuuuccc

SEQ ID NO: 992462 - RNA, 19 nt, Artificial Sequence
  Description of Artificial Sequence: Synthetic oligonucleotide
  Sense strand starting at position 1296 of SEQ ID NO: 914286
cugucaaaguuauucugau

SEQ ID NO: 992463 - RNA, 19 nt, Artificial Sequence
  Description of Artificial Sequence: Synthetic oligonucleotide
  Antisense strand to SEQ ID NO: 992462
aucagaauaacuuugacag

SEQ ID NO: 992464 - RNA, 19 nt, Artificial Sequence
  Description of Artificial Sequence: Synthetic oligonucleotide
  Sense strand starting at position 1375 of SEQ ID NO: 914286
gggagucaaguguagggau

SEQ ID NO: 992465 - RNA, 19 nt, Artificial Sequence
  Description of Artificial Sequence: Synthetic oligonucleotide
  Antisense strand to SEQ ID NO: 992464
aucccuacacuugacuccc

SEQ ID NO: 992466 - RNA, 19 nt, Artificial Sequence
  Description of Artificial Sequence: Synthetic oligonucleotide
  Sense strand starting at position 1536 of SEQ ID NO: 914286
gucagaaauuuaggacacu

SEQ ID NO: 992467 - RNA, 19 nt, Artificial Sequence
  Description of Artificial Sequence: Synthetic oligonucleotide
  Antisense strand to SEQ ID NO: 992466
aguguccuaaauuucugac

SEQ ID NO: 992468 - RNA, 19 nt, Artificial Sequence
  Description of Artificial Sequence: Synthetic oligonucleotide
  Sense strand starting at position 1537 of SEQ ID NO: 914286
ucagaaauuuaggacacua

SEQ ID NO: 992469 - RNA, 19 nt, Artificial Sequence
  Description of Artificial Sequence: Synthetic oligonucleotide
  Antisense strand to SEQ ID NO: 992468
uaguguccuaaauuucuga

SEQ ID NO: 992470 - RNA, 19 nt, Artificial Sequence
  Description of Artificial Sequence: Synthetic oligonucleotide
  Sense strand starting at position 1594 of SEQ ID NO: 914286
gggauuguagcauaugcaa

SEQ ID NO: 992471 - RNA, 19 nt, Artificial Sequence
  Description of Artificial Sequence: Synthetic oligonucleotide
  Antisense strand to SEQ ID NO: 992470
uugcauaugcuacaauccc

SEQ ID NO: 992472 - RNA, 19 nt, Artificial Sequence
  Description of Artificial Sequence: Synthetic oligonucleotide
  Sense strand starting at position 1640 of SEQ ID NO: 914286
gcaugaauaaguggauaaa

SEQ ID NO: 992473 - RNA, 19 nt, Artificial Sequence
  Description of Artificial Sequence: Synthetic oligonucleotide
  Antisense strand to SEQ ID NO: 992472
uuuauccacuuauucaugc

SEQ ID NO: 992474 - RNA, 19 nt, Artificial Sequence
  Description of Artificial Sequence: Synthetic oligonucleotide
  Sense strand starting at position 1734 of SEQ ID NO: 914286
ccaggagugccagauaauc

SEQ ID NO: 992475 - RNA, 19 nt, Artificial Sequence
  Description of Artificial Sequence: Synthetic oligonucleotide
  Antisense strand to SEQ ID NO: 992474
gauuaucuggcacuccugg

SEQ ID NO: 992476 - RNA, 19 nt, Artificial Sequence
  Description of Artificial Sequence: Synthetic oligonucleotide
  Sense strand starting at position 1739 of SEQ ID NO: 914286
agugccagauaaucugaau

SEQ ID NO: 992477 - RNA, 19 nt, Artificial Sequence
  Description of Artificial Sequence: Synthetic oligonucleotide
  Antisense strand to SEQ ID NO: 992476
auucagauuaucuggcacu

SEQ ID NO: 992478 - RNA, 19 nt, Artificial Sequence
  Description of Artificial Sequence: Synthetic oligonucleotide
  Sense strand starting at position 1831 of SEQ ID NO: 914286
uuagaauuccuccgugaaa

SEQ ID NO: 992479 - RNA, 19 nt, Artificial Sequence
  Description of Artificial Sequence: Synthetic oligonucleotide
  Antisense strand to SEQ ID NO: 992478
uuucacggaggaauucuaa

SEQ ID NO: 992480 - RNA, 19 nt, Artificial Sequence
  Description of Artificial Sequence: Synthetic oligonucleotide
  Sense strand starting at position 1832 of SEQ ID NO: 914286
uagaauuccuccgugaaag

SEQ ID NO: 992481 - RNA, 19 nt, Artificial Sequence
  Description of Artificial Sequence: Synthetic oligonucleotide
  Antisense strand to SEQ ID NO: 992480
cuuucacggaggaauucua

SEQ ID NO: 992482 - RNA, 19 nt, Artificial Sequence
  Description of Artificial Sequence: Synthetic oligonucleotide
  Sense strand starting at position 1833 of SEQ ID NO: 914286
agaauuccuccgugaaagg

SEQ ID NO: 992483 - RNA, 19 nt, Artificial Sequence
  Description of Artificial Sequence: Synthetic oligonucleotide
  Antisense strand to SEQ ID NO: 992482
ccuuucacggaggaauucu

SEQ ID NO: 992484 - RNA, 19 nt, Artificial Sequence
  Description of Artificial Sequence: Synthetic oligonucleotide
  Sense strand starting at position 2011 of SEQ ID NO: 914286
cagcgaucucggcuccgaa

SEQ ID NO: 992485 - RNA, 19 nt, Artificial Sequence
  Description of Artificial Sequence: Synthetic oligonucleotide
  Antisense strand to SEQ ID NO: 992484
uucggagccgagaucgcug

SEQ ID NO: 992486 - RNA, 19 nt, Artificial Sequence
  Description of Artificial Sequence: Synthetic oligonucleotide
  Sense strand starting at position 2062 of SEQ ID NO: 914286
uucuuugcucauuacgaua

SEQ ID NO: 992487 - RNA, 19 nt, Artificial Sequence
  Description of Artificial Sequence: Synthetic oligonucleotide
  Antisense strand to SEQ ID NO: 992486
uaucguaaugagcaaagaa

SEQ ID NO: 992488 - RNA, 19 nt, Artificial Sequence
  Description of Artificial Sequence: Synthetic oligonucleotide
  Sense strand starting at position 2067 of SEQ ID NO: 914286
ugcucauuacgauaaugac

SEQ ID NO: 992489 - RNA, 19 nt, Artificial Sequence
  Description of Artificial Sequence: Synthetic oligonucleotide
  Antisense strand to SEQ ID NO: 992488
gucauuaucguaaugagca

SEQ ID NO: 992490 - RNA, 19 nt, Artificial Sequence
  Description of Artificial Sequence: Synthetic oligonucleotide
  Sense strand starting at position 2116 of SEQ ID NO: 914286
gcgggucucagacagaaau

SEQ ID NO: 992491 - RNA, 19 nt, Artificial Sequence
  Description of Artificial Sequence: Synthetic oligonucleotide
  Antisense strand to SEQ ID NO: 992490
auuucugucugagacccgc

SEQ ID NO: 992492 - RNA, 19 nt, Artificial Sequence
  Description of Artificial Sequence: Synthetic oligonucleotide
  Sense strand starting at position 2195 of SEQ ID NO: 914286
aaagaaaugcugggugaca

SEQ ID NO: 992493 - RNA, 19 nt, Artificial Sequence
  Description of Artificial Sequence: Synthetic oligonucleotide
  Antisense strand to SEQ ID NO: 992492
ugucacccagcauuucuuu

SEQ ID NO: 992494 - RNA, 19 nt, Artificial Sequence
  Description of Artificial Sequence: Synthetic oligonucleotide
  Sense strand starting at position 2256 of SEQ ID NO: 914286
gggcuuagucucgaggaag

SEQ ID NO: 992495 - RNA, 19 nt, Artificial Sequence
  Description of Artificial Sequence: Synthetic oligonucleotide
  Antisense strand to SEQ ID NO: 992494
cuuccucgagacuaagccc

SEQ ID NO: 992496 - RNA, 19 nt, Artificial Sequence
  Description of Artificial Sequence: Synthetic oligonucleotide
  Sense strand starting at position 2285 of SEQ ID NO: 914286
gcuggagcucuuuaagggu

SEQ ID NO: 992497 - RNA, 19 nt, Artificial Sequence
  Description of Artificial Sequence: Synthetic oligonucleotide
  Antisense strand to SEQ ID NO: 992496
acccuuaaagagcuccagc

SEQ ID NO: 992498 - RNA, 19 nt, Artificial Sequence
  Description of Artificial Sequence: Synthetic oligonucleotide
  Sense strand starting at position 2331 of SEQ ID NO: 914286
ggagucgggucaaaggaaa

SEQ ID NO: 992499 - RNA, 19 nt, Artificial Sequence
  Description of Artificial Sequence: Synthetic oligonucleotide
  Antisense strand to SEQ ID NO: 992498
uuuccuuugacccgacucc

SEQ ID NO: 992500 - RNA, 19 nt, Artificial Sequence
  Description of Artificial Sequence: Synthetic oligonucleotide
  Sense strand starting at position 2723 of SEQ ID NO: 914286
gucaccauuugcuuguuaa

SEQ ID NO: 992501 - RNA, 19 nt, Artificial Sequence
  Description of Artificial Sequence: Synthetic oligonucleotide
  Antisense strand to SEQ ID NO: 992500
uuaacaagcaaauggugac

SEQ ID NO: 992502 - RNA, 19 nt, Artificial Sequence
  Description of Artificial Sequence: Synthetic oligonucleotide
  Sense strand starting at position 2979 of SEQ ID NO: 914286
ggauaaaucuaggaauaug

SEQ ID NO: 992503 - RNA, 19 nt, Artificial Sequence
  Description of Artificial Sequence: Synthetic oligonucleotide
  Antisense strand to SEQ ID NO: 992502
cauauuccuagauuuaucc

SEQ ID NO: 992504 - RNA, 19 nt, Artificial Sequence
  Description of Artificial Sequence: Synthetic oligonucleotide
  Sense strand starting at position 3042 of SEQ ID NO: 914286
gcagacaugcaguagacuu

SEQ ID NO: 992505 - RNA, 19 nt, Artificial Sequence
  Description of Artificial Sequence: Synthetic oligonucleotide
  Antisense strand to SEQ ID NO: 992504
aagucuacugcaugucugc

SEQ ID NO: 992506 - RNA, 19 nt, Artificial Sequence
  Description of Artificial Sequence: Synthetic oligonucleotide
  Sense strand starting at position 3113 of SEQ ID NO: 914286
agacuugaaugacuaguua

SEQ ID NO: 992507 - RNA, 19 nt, Artificial Sequence
  Description of Artificial Sequence: Synthetic oligonucleotide
  Antisense strand to SEQ ID NO: 992506
uaacuagucauucaagucu

SEQ ID NO: 992508 - RNA, 19 nt, Artificial Sequence
  Description of Artificial Sequence: Synthetic oligonucleotide
  Sense strand starting at position 3530 of SEQ ID NO: 914286
guguacugugcauauugaa

SEQ ID NO: 992509 - RNA, 19 nt, Artificial Sequence
  Description of Artificial Sequence: Synthetic oligonucleotide
  Antisense strand to SEQ ID NO: 992508
uucaauaugcacaguacac

SEQ ID NO: 992510 - RNA, 19 nt, Artificial Sequence
  Description of Artificial Sequence: Synthetic oligonucleotide
  Sense strand starting at position 3550 of SEQ ID NO: 914286
gugauuauauugccaaaua

SEQ ID NO: 992511 - RNA, 19 nt, Artificial Sequence
  Description of Artificial Sequence: Synthetic oligonucleotide
  Antisense strand to SEQ ID NO: 992510
uauuuggcaauauaaucac

SEQ ID NO: 992512 - RNA, 19 nt, Artificial Sequence
  Description of Artificial Sequence: Synthetic oligonucleotide
  Sense strand starting at position 3596 of SEQ ID NO: 914286
agaguaaacuuugccucuu

SEQ ID NO: 992513 - RNA, 19 nt, Artificial Sequence
  Description of Artificial Sequence: Synthetic oligonucleotide
  Antisense strand to SEQ ID NO: 992512
aagaggcaaaguuuacucu

SEQ ID NO: 992514 - RNA, 19 nt, Artificial Sequence
  Description of Artificial Sequence: Synthetic oligonucleotide
  Sense strand starting at position 3652 of SEQ ID NO: 914286
uacugagugccuuaguaua

SEQ ID NO: 992515 - RNA, 19 nt, Artificial Sequence
  Description of Artificial Sequence: Synthetic oligonucleotide
  Antisense strand to SEQ ID NO: 992514
uauacuaaggcacucagua

SEQ ID NO: 992516 - RNA, 19 nt, Artificial Sequence
  Description of Artificial Sequence: Synthetic oligonucleotide
  Sense strand starting at position 3663 of SEQ ID NO: 914286
uuaguauauguccaucacu

SEQ ID NO: 992517 - RNA, 19 nt, Artificial Sequence
  Description of Artificial Sequence: Synthetic oligonucleotide
  Antisense strand to SEQ ID NO: 992516
agugauggacauauacuaa

SEQ ID NO: 992518 - RNA, 19 nt, Artificial Sequence
  Description of Artificial Sequence: Synthetic oligonucleotide
  Sense strand starting at position 3666 of SEQ ID NO: 914286
guauauguccaucacuauu

SEQ ID NO: 992519 - RNA, 19 nt, Artificial Sequence
  Description of Artificial Sequence: Synthetic oligonucleotide
  Antisense strand to SEQ ID NO: 992518
aauagugauggacauauac

SEQ ID NO: 992520 - RNA, 19 nt, Artificial Sequence
  Description of Artificial Sequence: Synthetic oligonucleotide
  Sense strand starting at position 3682 of SEQ ID NO: 914286
auucuuaguaguggguaua

SEQ ID NO: 992521 - RNA, 19 nt, Artificial Sequence
  Description of Artificial Sequence: Synthetic oligonucleotide
  Antisense strand to SEQ ID NO: 992520
uauacccacuacuaagaau

SEQ ID NO: 992522 - RNA, 19 nt, Artificial Sequence
  Description of Artificial Sequence: Synthetic oligonucleotide
  Sense strand starting at position 3685 of SEQ ID NO: 914286
cuuaguaguggguauacaa

SEQ ID NO: 992523 - RNA, 19 nt, Artificial Sequence
  Description of Artificial Sequence: Synthetic oligonucleotide
  Antisense strand to SEQ ID NO: 992522
uuguauacccacuacuaag

SEQ ID NO: 992524 - RNA, 19 nt, Artificial Sequence
  Description of Artificial Sequence: Synthetic oligonucleotide
  Sense strand starting at position 3802 of SEQ ID NO: 914286
guaagauugcaguaaauaa

SEQ ID NO: 992525 - RNA, 19 nt, Artificial Sequence
  Description of Artificial Sequence: Synthetic oligonucleotide
  Antisense strand to SEQ ID NO: 992524
uuauuuacugcaaucuuac

SEQ ID NO: 992526 - RNA, 19 nt, Artificial Sequence
  Description of Artificial Sequence: Synthetic oligonucleotide
  Sense strand starting at position 20 of SEQ ID NO: 914287
agaagcauuaccgagugga

SEQ ID NO: 992527 - RNA, 19 nt, Artificial Sequence
  Description of Artificial Sequence: Synthetic oligonucleotide
  Antisense strand to SEQ ID NO: 992526
uccacucgguaaugcuucu

SEQ ID NO: 992528 - RNA, 19 nt, Artificial Sequence
  Description of Artificial Sequence: Synthetic oligonucleotide
  Sense strand starting at position 23 of SEQ ID NO: 914287
agcauuaccgaguggauga

SEQ ID NO: 992529 - RNA, 19 nt, Artificial Sequence
  Description of Artificial Sequence: Synthetic oligonucleotide
  Antisense strand to SEQ ID NO: 992528
ucauccacucgguaaugcu

SEQ ID NO: 992530 - RNA, 19 nt, Artificial Sequence
  Description of Artificial Sequence: Synthetic oligonucleotide
  Sense strand starting at position 216 of SEQ ID NO: 914287
ggcaauugccuguaucuga

SEQ ID NO: 992531 - RNA, 19 nt, Artificial Sequence
  Description of Artificial Sequence: Synthetic oligonucleotide
  Antisense strand to SEQ ID NO: 992530
ucagauacaggcaauugcc

SEQ ID NO: 992532 - RNA, 19 nt, Artificial Sequence
  Description of Artificial Sequence: Synthetic oligonucleotide
  Sense strand starting at position 220 of SEQ ID NO: 914287
auugccuguaucugaggau

SEQ ID NO: 992533 - RNA, 19 nt, Artificial Sequence
  Description of Artificial Sequence: Synthetic oligonucleotide
  Antisense strand to SEQ ID NO: 992532
auccucagauacaggcaau

SEQ ID NO: 992534 - RNA, 19 nt, Artificial Sequence
  Description of Artificial Sequence: Synthetic oligonucleotide
  Sense strand starting at position 996 of SEQ ID NO: 914287
caagucaucuuagugcaga

SEQ ID NO: 992535 - RNA, 19 nt, Artificial Sequence
  Description of Artificial Sequence: Synthetic oligonucleotide
  Antisense strand to SEQ ID NO: 992534
ucugcacuaagaugacuug

SEQ ID NO: 992536 - RNA, 19 nt, Artificial Sequence
  Description of Artificial Sequence: Synthetic oligonucleotide
  Sense strand starting at position 999 of SEQ ID NO: 914287
gucaucuuagugcagauau

SEQ ID NO: 992537 - RNA, 19 nt, Artificial Sequence
  Description of Artificial Sequence: Synthetic oligonucleotide
  Antisense strand to SEQ ID NO: 992536
auaucugcacuaagaugac

SEQ ID NO: 992538 - RNA, 19 nt, Artificial Sequence
  Description of Artificial Sequence: Synthetic oligonucleotide
  Sense strand starting at position 1220 of SEQ ID NO: 914287
cuuccugauuuaucguacu

SEQ ID NO: 992539 - RNA, 19 nt, Artificial Sequence
  Description of Artificial Sequence: Synthetic oligonucleotide
  Antisense strand to SEQ ID NO: 992538
aguacgauaaaucaggaag

SEQ ID NO: 992540 - RNA, 19 nt, Artificial Sequence
  Description of Artificial Sequence: Synthetic oligonucleotide
  Sense strand starting at position 1231 of SEQ ID NO: 914287
aucguacuacuuggagaga

SEQ ID NO: 992541 - RNA, 19 nt, Artificial Sequence
  Description of Artificial Sequence: Synthetic oligonucleotide
  Antisense strand to SEQ ID NO: 992540
ucucuccaaguaguacgau

SEQ ID NO: 992542 - RNA, 19 nt, Artificial Sequence
  Description of Artificial Sequence: Synthetic oligonucleotide
  Sense strand starting at position 1395 of SEQ ID NO: 914287
uguugucagagcgacagaa

SEQ ID NO: 992543 - RNA, 19 nt, Artificial Sequence
  Description of Artificial Sequence: Synthetic oligonucleotide
  Antisense strand to SEQ ID NO: 992542
uucugucgcucugacaaca

SEQ ID NO: 992544 - RNA, 19 nt, Artificial Sequence
  Description of Artificial Sequence: Synthetic oligonucleotide
  Sense strand starting at position 1454 of SEQ ID NO: 914287
cuggauuaacucugacuuu

SEQ ID NO: 992545 - RNA, 19 nt, Artificial Sequence
  Description of Artificial Sequence: Synthetic oligonucleotide
  Antisense strand to SEQ ID NO: 992544
aaagucagaguuaauccag

SEQ ID NO: 992546 - RNA, 19 nt, Artificial Sequence
  Description of Artificial Sequence: Synthetic oligonucleotide
  Sense strand starting at position 1473 of SEQ ID NO: 914287
ucucgaagaguugguuaag

SEQ ID NO: 992547 - RNA, 19 nt, Artificial Sequence
  Description of Artificial Sequence: Synthetic oligonucleotide
  Antisense strand to SEQ ID NO: 992546
cuuaaccaacucuucgaga

SEQ ID NO: 992548 - RNA, 19 nt, Artificial Sequence
  Description of Artificial Sequence: Synthetic oligonucleotide
  Sense strand starting at position 1476 of SEQ ID NO: 914287
cgaagaguugguuaagccu

SEQ ID NO: 992549 - RNA, 19 nt, Artificial Sequence
  Description of Artificial Sequence: Synthetic oligonucleotide
  Antisense strand to SEQ ID NO: 992548
aggcuuaaccaacucuucg

SEQ ID NO: 992550 - RNA, 19 nt, Artificial Sequence
  Description of Artificial Sequence: Synthetic oligonucleotide
  Sense strand starting at position 1485 of SEQ ID NO: 914287
gguuaagccuaccuuugau

SEQ ID NO: 992551 - RNA, 19 nt, Artificial Sequence
  Description of Artificial Sequence: Synthetic oligonucleotide
  Antisense strand to SEQ ID NO: 992550
aucaaagguaggcuuaacc

SEQ ID NO: 992552 - RNA, 19 nt, Artificial Sequence
  Description of Artificial Sequence: Synthetic oligonucleotide
  Sense strand starting at position 1569 of SEQ ID NO: 914287
ucagguuuauuccuuuaga

SEQ ID NO: 992553 - RNA, 19 nt, Artificial Sequence
  Description of Artificial Sequence: Synthetic oligonucleotide
  Antisense strand to SEQ ID NO: 992552
ucuaaaggaauaaaccuga

SEQ ID NO: 992554 - RNA, 19 nt, Artificial Sequence
  Description of Artificial Sequence: Synthetic oligonucleotide
  Sense strand starting at position 1570 of SEQ ID NO: 914287
cagguuuauuccuuuagag

SEQ ID NO: 992555 - RNA, 19 nt, Artificial Sequence
  Description of Artificial Sequence: Synthetic oligonucleotide
  Antisense strand to SEQ ID NO: 992554
cucuaaaggaauaaaccug

SEQ ID NO: 992556 - RNA, 19 nt, Artificial Sequence
  Description of Artificial Sequence: Synthetic oligonucleotide
  Sense strand starting at position 1572 of SEQ ID NO: 914287
gguuuauuccuuuagagac

SEQ ID NO: 992557 - RNA, 19 nt, Artificial Sequence
  Description of Artificial Sequence: Synthetic oligonucleotide
  Antisense strand to SEQ ID NO: 992556
gucucuaaaggaauaaacc

SEQ ID NO: 992558 - RNA, 19 nt, Artificial Sequence
  Description of Artificial Sequence: Synthetic oligonucleotide
  Sense strand starting at position 1591 of SEQ ID NO: 914287
uguugugaugauuaggauu

SEQ ID NO: 992559 - RNA, 19 nt, Artificial Sequence
  Description of Artificial Sequence: Synthetic oligonucleotide
  Antisense strand to SEQ ID NO: 992558
aauccuaaucaucacaaca

SEQ ID NO: 992560 - RNA, 19 nt, Artificial Sequence
  Description of Artificial Sequence: Synthetic oligonucleotide
  Sense strand starting at position 1594 of SEQ ID NO: 914287
ugugaugauuaggauuuaa

SEQ ID NO: 992561 - RNA, 19 nt, Artificial Sequence
  Description of Artificial Sequence: Synthetic oligonucleotide
  Antisense strand to SEQ ID NO: 992560
uuaaauccuaaucaucaca

SEQ ID NO: 992562 - RNA, 19 nt, Artificial Sequence
  Description of Artificial Sequence: Synthetic oligonucleotide
  Sense strand starting at position 1626 of SEQ ID NO: 914287
aaaggacuugguuggcaau

SEQ ID NO: 992563 - RNA, 19 nt, Artificial Sequence
  Description of Artificial Sequence: Synthetic oligonucleotide
  Antisense strand to SEQ ID NO: 992562
auugccaaccaaguccuuu

SEQ ID NO: 992564 - RNA, 19 nt, Artificial Sequence
  Description of Artificial Sequence: Synthetic oligonucleotide
  Sense strand starting at position 1628 of SEQ ID NO: 914287
aggacuugguuggcaauga

SEQ ID NO: 992565 - RNA, 19 nt, Artificial Sequence
  Description of Artificial Sequence: Synthetic oligonucleotide
  Antisense strand to SEQ ID NO: 992564
ucauugccaaccaaguccu

SEQ ID NO: 992566 - RNA, 19 nt, Artificial Sequence
  Description of Artificial Sequence: Synthetic oligonucleotide
  Sense strand starting at position 1645 of SEQ ID NO: 914287
gaugguguuguguaaucau

SEQ ID NO: 992567 - RNA, 19 nt, Artificial Sequence
  Description of Artificial Sequence: Synthetic oligonucleotide
  Antisense strand to SEQ ID NO: 992566
augauuacacaacaccauc

SEQ ID NO: 992568 - RNA, 19 nt, Artificial Sequence
  Description of Artificial Sequence: Synthetic oligonucleotide
  Sense strand starting at position 1668 of SEQ ID NO: 914287
agucuugucagagaugagu

SEQ ID NO: 992569 - RNA, 19 nt, Artificial Sequence
  Description of Artificial Sequence: Synthetic oligonucleotide
  Antisense strand to SEQ ID NO: 992568
acucaucucugacaagacu

SEQ ID NO: 992570 - RNA, 19 nt, Artificial Sequence
  Description of Artificial Sequence: Synthetic oligonucleotide
  Sense strand starting at position 1674 of SEQ ID NO: 914287
gucagagaugagugucuuc

SEQ ID NO: 992571 - RNA, 19 nt, Artificial Sequence
  Description of Artificial Sequence: Synthetic oligonucleotide
  Antisense strand to SEQ ID NO: 992570
gaagacacucaucucugac

SEQ ID NO: 992572 - RNA, 19 nt, Artificial Sequence
  Description of Artificial Sequence: Synthetic oligonucleotide
  Sense strand starting at position 1677 of SEQ ID NO: 914287
agagaugagugucuucucu

SEQ ID NO: 992573 - RNA, 19 nt, Artificial Sequence
  Description of Artificial Sequence: Synthetic oligonucleotide
  Antisense strand to SEQ ID NO: 992572
agagaagacacucaucucu

SEQ ID NO: 992574 - RNA, 19 nt, Artificial Sequence
  Description of Artificial Sequence: Synthetic oligonucleotide
  Sense strand starting at position 1679 of SEQ ID NO: 914287
agaugagugucuucucuuu

SEQ ID NO: 992575 - RNA, 19 nt, Artificial Sequence
  Description of Artificial Sequence: Synthetic oligonucleotide
  Antisense strand to SEQ ID NO: 992574
aaagagaagacacucaucu

SEQ ID NO: 992576 - RNA, 19 nt, Artificial Sequence
  Description of Artificial Sequence: Synthetic oligonucleotide
  Sense strand starting at position 1739 of SEQ ID NO: 914287
cuaggauguucuuuguacu

SEQ ID NO: 992577 - RNA, 19 nt, Artificial Sequence
  Description of Artificial Sequence: Synthetic oligonucleotide
  Antisense strand to SEQ ID NO: 992576
aguacaaagaacauccuag

SEQ ID NO: 992578 - RNA, 19 nt, Artificial Sequence
  Description of Artificial Sequence: Synthetic oligonucleotide
  Sense strand starting at position 1855 of SEQ ID NO: 914287
gacaaauguguauagagcu

SEQ ID NO: 992579 - RNA, 19 nt, Artificial Sequence
  Description of Artificial Sequence: Synthetic oligonucleotide
  Antisense strand to SEQ ID NO: 992578
agcucuauacacauuuguc

SEQ ID NO: 992580 - RNA, 19 nt, Artificial Sequence
  Description of Artificial Sequence: Synthetic oligonucleotide
  Sense strand starting at position 2060 of SEQ ID NO: 914287
ucuuaaagguuacucugaa

SEQ ID NO: 992581 - RNA, 19 nt, Artificial Sequence
  Description of Artificial Sequence: Synthetic oligonucleotide
  Antisense strand to SEQ ID NO: 992580
uucagaguaaccuuuaaga

SEQ ID NO: 992582 - RNA, 19 nt, Artificial Sequence
  Description of Artificial Sequence: Synthetic oligonucleotide
  Sense strand starting at position 2061 of SEQ ID NO: 914287
cuuaaagguuacucugaaa

SEQ ID NO: 992583 - RNA, 19 nt, Artificial Sequence
  Description of Artificial Sequence: Synthetic oligonucleotide
  Antisense strand to SEQ ID NO: 992582
uuucagaguaaccuuuaag

SEQ ID NO: 992584 - RNA, 19 nt, Artificial Sequence
  Description of Artificial Sequence: Synthetic oligonucleotide
  Sense strand starting at position 2198 of SEQ ID NO: 914287
guaaauggcucauugagag

SEQ ID NO: 992585 - RNA, 19 nt, Artificial Sequence
  Description of Artificial Sequence: Synthetic oligonucleotide
  Antisense strand to SEQ ID NO: 992584
cucucaaugagccauuuac

SEQ ID NO: 992586 - RNA, 19 nt, Artificial Sequence
  Description of Artificial Sequence: Synthetic oligonucleotide
  Sense strand starting at position 2205 of SEQ ID NO: 914287
gcucauugagaguguauuu

SEQ ID NO: 992587 - RNA, 19 nt, Artificial Sequence
  Description of Artificial Sequence: Synthetic oligonucleotide
  Antisense strand to SEQ ID NO: 992586
aaauacacucucaaugagc

SEQ ID NO: 992588 - RNA, 19 nt, Artificial Sequence
  Description of Artificial Sequence: Synthetic oligonucleotide
  Sense strand starting at position 2327 of SEQ ID NO: 914287
ccagcaauacuuugaauga

SEQ ID NO: 992589 - RNA, 19 nt, Artificial Sequence
  Description of Artificial Sequence: Synthetic oligonucleotide
  Antisense strand to SEQ ID NO: 992588
ucauucaaaguauugcugg

SEQ ID NO: 992590 - RNA, 19 nt, Artificial Sequence
  Description of Artificial Sequence: Synthetic oligonucleotide
  Sense strand starting at position 2726 of SEQ ID NO: 914287
guuuaauuggaauguucuu

SEQ ID NO: 992591 - RNA, 19 nt, Artificial Sequence
  Description of Artificial Sequence: Synthetic oligonucleotide
  Antisense strand to SEQ ID NO: 992590
aagaacauuccaauuaaac

SEQ ID NO: 992592 - RNA, 19 nt, Artificial Sequence
  Description of Artificial Sequence: Synthetic oligonucleotide
  Sense strand starting at position 2739 of SEQ ID NO: 914287
guucuuugugucuauaaug

SEQ ID NO: 992593 - RNA, 19 nt, Artificial Sequence
  Description of Artificial Sequence: Synthetic oligonucleotide
  Antisense strand to SEQ ID NO: 992592
cauuauagacacaaagaac

SEQ ID NO: 992594 - RNA, 19 nt, Artificial Sequence
  Description of Artificial Sequence: Synthetic oligonucleotide
  Sense strand starting at position 3019 of SEQ ID NO: 914287
agcuaaaguucugucauuu

SEQ ID NO: 992595 - RNA, 19 nt, Artificial Sequence
  Description of Artificial Sequence: Synthetic oligonucleotide
  Antisense strand to SEQ ID NO: 992594
aaaugacagaacuuuagcu

SEQ ID NO: 992596 - RNA, 19 nt, Artificial Sequence
  Description of Artificial Sequence: Synthetic oligonucleotide
  Sense strand starting at position 3095 of SEQ ID NO: 914287
aaaggaaggucucucaugu

SEQ ID NO: 992597 - RNA, 19 nt, Artificial Sequence
  Description of Artificial Sequence: Synthetic oligonucleotide
  Antisense strand to SEQ ID NO: 992596
acaugagagaccuuccuuu

SEQ ID NO: 992598 - RNA, 19 nt, Artificial Sequence
  Description of Artificial Sequence: Synthetic oligonucleotide
  Sense strand starting at position 3420 of SEQ ID NO: 914287
ggaacaggguucuuucuuu

SEQ ID NO: 992599 - RNA, 19 nt, Artificial Sequence
  Description of Artificial Sequence: Synthetic oligonucleotide
  Antisense strand to SEQ ID NO: 992598
aaagaaagaacccuguucc

SEQ ID NO: 992600 - RNA, 19 nt, Artificial Sequence
  Description of Artificial Sequence: Synthetic oligonucleotide
  Sense strand starting at position 3484 of SEQ ID NO: 914287
ucgauagacugucuuacca

SEQ ID NO: 992601 - RNA, 19 nt, Artificial Sequence
  Description of Artificial Sequence: Synthetic oligonucleotide
  Antisense strand to SEQ ID NO: 992600
ugguaagacagucuaucga

SEQ ID NO: 992602 - RNA, 19 nt, Artificial Sequence
  Description of Artificial Sequence: Synthetic oligonucleotide
  Sense strand starting at position 3522 of SEQ ID NO: 914287
ccugacaggucuguuccaa

SEQ ID NO: 992603 - RNA, 19 nt, Artificial Sequence
  Description of Artificial Sequence: Synthetic oligonucleotide
  Antisense strand to SEQ ID NO: 992602
uuggaacagaccugucagg

SEQ ID NO: 992604 - RNA, 19 nt, Artificial Sequence
  Description of Artificial Sequence: Synthetic oligonucleotide
  Sense strand starting at position 3592 of SEQ ID NO: 914287
ggcucacugaugggaucuu

SEQ ID NO: 992605 - RNA, 19 nt, Artificial Sequence
  Description of Artificial Sequence: Synthetic oligonucleotide
  Antisense strand to SEQ ID NO: 992604
aagaucccaucagugagcc

SEQ ID NO: 992606 - RNA, 19 nt, Artificial Sequence
  Description of Artificial Sequence: Synthetic oligonucleotide
  Sense strand starting at position 166 of SEQ ID NO: 914288
gucaaacuuucuguuaaug

SEQ ID NO: 992607 - RNA, 19 nt, Artificial Sequence
  Description of Artificial Sequence: Synthetic oligonucleotide
  Antisense strand to SEQ ID NO: 992606
cauuaacagaaaguuugac

SEQ ID NO: 992608 - RNA, 19 nt, Artificial Sequence
  Description of Artificial Sequence: Synthetic oligonucleotide
  Sense strand starting at position 253 of SEQ ID NO: 914288
ggguuaucugguuaauguc

SEQ ID NO: 992609 - RNA, 19 nt, Artificial Sequence
  Description of Artificial Sequence: Synthetic oligonucleotide
  Antisense strand to SEQ ID NO: 992608
gacauuaaccagauaaccc

SEQ ID NO: 992610 - RNA, 19 nt, Artificial Sequence
  Description of Artificial Sequence: Synthetic oligonucleotide
  Sense strand starting at position 286 of SEQ ID NO: 914288
cugcaaucucccggagaga

SEQ ID NO: 992611 - RNA, 19 nt, Artificial Sequence
  Description of Artificial Sequence: Synthetic oligonucleotide
  Antisense strand to SEQ ID NO: 992610
ucucuccgggagauugcag

SEQ ID NO: 992612 - RNA, 19 nt, Artificial Sequence
  Description of Artificial Sequence: Synthetic oligonucleotide
  Sense strand starting at position 287 of SEQ ID NO: 914288
ugcaaucucccggagagaa

SEQ ID NO: 992613 - RNA, 19 nt, Artificial Sequence
  Description of Artificial Sequence: Synthetic oligonucleotide
  Antisense strand to SEQ ID NO: 992612
uucucuccgggagauugca

SEQ ID NO: 992614 - RNA, 19 nt, Artificial Sequence
  Description of Artificial Sequence: Synthetic oligonucleotide
  Sense strand starting at position 365 of SEQ ID NO: 914288
guagaagagcaguaagcau

SEQ ID NO: 992615 - RNA, 19 nt, Artificial Sequence
  Description of Artificial Sequence: Synthetic oligonucleotide
  Antisense strand to SEQ ID NO: 992614
augcuuacugcucuucuac

SEQ ID NO: 992616 - RNA, 19 nt, Artificial Sequence
  Description of Artificial Sequence: Synthetic oligonucleotide
  Sense strand starting at position 373 of SEQ ID NO: 914288
gcaguaagcauuugucaag

SEQ ID NO: 992617 - RNA, 19 nt, Artificial Sequence
  Description of Artificial Sequence: Synthetic oligonucleotide
  Antisense strand to SEQ ID NO: 992616
cuugacaaaugcuuacugc

SEQ ID NO: 992618 - RNA, 19 nt, Artificial Sequence
  Description of Artificial Sequence: Synthetic oligonucleotide
  Sense strand starting at position 374 of SEQ ID NO: 914288
caguaagcauuugucaagu

SEQ ID NO: 992619 - RNA, 19 nt, Artificial Sequence
  Description of Artificial Sequence: Synthetic oligonucleotide
  Antisense strand to SEQ ID NO: 992618
acuugacaaaugcuuacug

SEQ ID NO: 992620 - RNA, 19 nt, Artificial Sequence
  Description of Artificial Sequence: Synthetic oligonucleotide
  Sense strand starting at position 384 of SEQ ID NO: 914288
uugucaaguggaugaauga

SEQ ID NO: 992621 - RNA, 19 nt, Artificial Sequence
  Description of Artificial Sequence: Synthetic oligonucleotide
  Antisense strand to SEQ ID NO: 992620
ucauucauccacuugacaa

SEQ ID NO: 992622 - RNA, 19 nt, Artificial Sequence
  Description of Artificial Sequence: Synthetic oligonucleotide
  Sense strand starting at position 426 of SEQ ID NO: 914288
aguaaaguaaugcacguaa

SEQ ID NO: 992623 - RNA, 19 nt, Artificial Sequence
  Description of Artificial Sequence: Synthetic oligonucleotide
  Antisense strand to SEQ ID NO: 992622
uuacgugcauuacuuuacu

SEQ ID NO: 992624 - RNA, 19 nt, Artificial Sequence
  Description of Artificial Sequence: Synthetic oligonucleotide
  Sense strand starting at position 428 of SEQ ID NO: 914288
uaaaguaaugcacguaaag

SEQ ID NO: 992625 - RNA, 19 nt, Artificial Sequence
  Description of Artificial Sequence: Synthetic oligonucleotide
  Antisense strand to SEQ ID NO: 992624
cuuuacgugcauuacuuua

SEQ ID NO: 992626 - RNA, 19 nt, Artificial Sequence
  Description of Artificial Sequence: Synthetic oligonucleotide
  Sense strand starting at position 450 of SEQ ID NO: 914288
cuaguauaguaauccauac

SEQ ID NO: 992627 - RNA, 19 nt, Artificial Sequence
  Description of Artificial Sequence: Synthetic oligonucleotide
  Antisense strand to SEQ ID NO: 992626
guauggauuacuauacuag

SEQ ID NO: 992628 - RNA, 19 nt, Artificial Sequence
  Description of Artificial Sequence: Synthetic oligonucleotide
  Sense strand starting at position 536 of SEQ ID NO: 914288
gggaaaguggcaggaguua

SEQ ID NO: 992629 - RNA, 19 nt, Artificial Sequence
  Description of Artificial Sequence: Synthetic oligonucleotide
  Antisense strand to SEQ ID NO: 992628
uaacuccugccacuuuccc

SEQ ID NO: 992630 - RNA, 19 nt, Artificial Sequence
  Description of Artificial Sequence: Synthetic oligonucleotide
  Sense strand starting at position 547 of SEQ ID NO: 914288
aggaguuagcaucaauguc

SEQ ID NO: 992631 - RNA, 19 nt, Artificial Sequence
  Description of Artificial Sequence: Synthetic oligonucleotide
  Antisense strand to SEQ ID NO: 992630
gacauugaugcuaacuccu

SEQ ID NO: 992632 - RNA, 19 nt, Artificial Sequence
  Description of Artificial Sequence: Synthetic oligonucleotide
  Sense strand starting at position 562 of SEQ ID NO: 914288
ugucucacaguguaaucau

SEQ ID NO: 992633 - RNA, 19 nt, Artificial Sequence
  Description of Artificial Sequence: Synthetic oligonucleotide
  Antisense strand to SEQ ID NO: 992632
augauuacacugugagaca

SEQ ID NO: 992634 - RNA, 19 nt, Artificial Sequence
  Description of Artificial Sequence: Synthetic oligonucleotide
  Sense strand starting at position 677 of SEQ ID NO: 914288
gcagauguugagggaggaa

SEQ ID NO: 992635 - RNA, 19 nt, Artificial Sequence
  Description of Artificial Sequence: Synthetic oligonucleotide
  Antisense strand to SEQ ID NO: 992634
uuccucccucaacaucugc

SEQ ID NO: 992636 - RNA, 19 nt, Artificial Sequence
  Description of Artificial Sequence: Synthetic oligonucleotide
  Sense strand starting at position 794 of SEQ ID NO: 914288
uuugcaugguaauccuaga

SEQ ID NO: 992637 - RNA, 19 nt, Artificial Sequence
  Description of Artificial Sequence: Synthetic oligonucleotide
  Antisense strand to SEQ ID NO: 992636
ucuaggauuaccaugcaaa

SEQ ID NO: 992638 - RNA, 19 nt, Artificial Sequence
  Description of Artificial Sequence: Synthetic oligonucleotide
  Sense strand starting at position 874 of SEQ ID NO: 914288
auugaugucccagagccuu

SEQ ID NO: 992639 - RNA, 19 nt, Artificial Sequence
  Description of Artificial Sequence: Synthetic oligonucleotide
  Antisense strand to SEQ ID NO: 992638
aaggcucugggacaucaau

SEQ ID NO: 992640 - RNA, 19 nt, Artificial Sequence
  Description of Artificial Sequence: Synthetic oligonucleotide
  Sense strand starting at position 978 of SEQ ID NO: 914288
augcaacuccagugggaau

SEQ ID NO: 992641 - RNA, 19 nt, Artificial Sequence
  Description of Artificial Sequence: Synthetic oligonucleotide
  Antisense strand to SEQ ID NO: 992640
auucccacuggaguugcau

SEQ ID NO: 992642 - RNA, 19 nt, Artificial Sequence
  Description of Artificial Sequence: Synthetic oligonucleotide
  Sense strand starting at position 1369 of SEQ ID NO: 914288
caguuauugccacaggaca

SEQ ID NO: 992643 - RNA, 19 nt, Artificial Sequence
  Description of Artificial Sequence: Synthetic oligonucleotide
  Antisense strand to SEQ ID NO: 992642
uguccuguggcaauaacug

SEQ ID NO: 992644 - RNA, 19 nt, Artificial Sequence
  Description of Artificial Sequence: Synthetic oligonucleotide
  Sense strand starting at position 1495 of SEQ ID NO: 914288
cucuguugagucuacaaac

SEQ ID NO: 992645 - RNA, 19 nt, Artificial Sequence
  Description of Artificial Sequence: Synthetic oligonucleotide
  Antisense strand to SEQ ID NO: 992644
guuuguagacucaacagag

SEQ ID NO: 992646 - RNA, 19 nt, Artificial Sequence
  Description of Artificial Sequence: Synthetic oligonucleotide
  Sense strand starting at position 2680 of SEQ ID NO: 914288
uuuguugccagggaugaga

SEQ ID NO: 992647 - RNA, 19 nt, Artificial Sequence
  Description of Artificial Sequence: Synthetic oligonucleotide
  Antisense strand to SEQ ID NO: 992646
ucucaucccuggcaacaaa

SEQ ID NO: 992648 - RNA, 19 nt, Artificial Sequence
  Description of Artificial Sequence: Synthetic oligonucleotide
  Sense strand starting at position 2803 of SEQ ID NO: 914288
augacaagugcuugaacag

SEQ ID NO: 992649 - RNA, 19 nt, Artificial Sequence
  Description of Artificial Sequence: Synthetic oligonucleotide
  Antisense strand to SEQ ID NO: 992648
cuguucaagcacuugucau

SEQ ID NO: 992650 - RNA, 19 nt, Artificial Sequence
  Description of Artificial Sequence: Synthetic oligonucleotide
  Sense strand starting at position 2952 of SEQ ID NO: 914288
cagagugaucacuguuagg

SEQ ID NO: 992651 - RNA, 19 nt, Artificial Sequence
  Description of Artificial Sequence: Synthetic oligonucleotide
  Antisense strand to SEQ ID NO: 992650
ccuaacagugaucacucug

SEQ ID NO: 992652 - RNA, 19 nt, Artificial Sequence
  Description of Artificial Sequence: Synthetic oligonucleotide
  Sense strand starting at position 3066 of SEQ ID NO: 914288
ggaacaguguaggcaugau

SEQ ID NO: 992653 - RNA, 19 nt, Artificial Sequence
  Description of Artificial Sequence: Synthetic oligonucleotide
  Antisense strand to SEQ ID NO: 992652
aucaugccuacacuguucc

SEQ ID NO: 992654 - RNA, 19 nt, Artificial Sequence
  Description of Artificial Sequence: Synthetic oligonucleotide
  Sense strand starting at position 3143 of SEQ ID NO: 914288
cugcaacuuccaggaugaa

SEQ ID NO: 992655 - RNA, 19 nt, Artificial Sequence
  Description of Artificial Sequence: Synthetic oligonucleotide
  Antisense strand to SEQ ID NO: 992654
uucauccuggaaguugcag

SEQ ID NO: 992656 - RNA, 19 nt, Artificial Sequence
  Description of Artificial Sequence: Synthetic oligonucleotide
  Sense strand starting at position 3186 of SEQ ID NO: 914288
aagauugggccuggagaca

SEQ ID NO: 992657 - RNA, 19 nt, Artificial Sequence
  Description of Artificial Sequence: Synthetic oligonucleotide
  Antisense strand to SEQ ID NO: 992656
ugucuccaggcccaaucuu

SEQ ID NO: 992658 - RNA, 19 nt, Artificial Sequence
  Description of Artificial Sequence: Synthetic oligonucleotide
  Sense strand starting at position 3195 of SEQ ID NO: 914288
ccuggagacaguugucaua

SEQ ID NO: 992659 - RNA, 19 nt, Artificial Sequence
  Description of Artificial Sequence: Synthetic oligonucleotide
  Antisense strand to SEQ ID NO: 992658
uaugacaacugucuccagg

SEQ ID NO: 992660 - RNA, 19 nt, Artificial Sequence
  Description of Artificial Sequence: Synthetic oligonucleotide
  Sense strand starting at position 3197 of SEQ ID NO: 914288
uggagacaguugucauaga

SEQ ID NO: 992661 - RNA, 19 nt, Artificial Sequence
  Description of Artificial Sequence: Synthetic oligonucleotide
  Antisense strand to SEQ ID NO: 992660
ucuaugacaacugucucca

SEQ ID NO: 992662 - RNA, 19 nt, Artificial Sequence
  Description of Artificial Sequence: Synthetic oligonucleotide
  Sense strand starting at position 3220 of SEQ ID NO: 914288
agugauagccacuacuaau

SEQ ID NO: 992663 - RNA, 19 nt, Artificial Sequence
  Description of Artificial Sequence: Synthetic oligonucleotide
  Antisense strand to SEQ ID NO: 992662
auuaguaguggcuaucacu

SEQ ID NO: 992664 - RNA, 19 nt, Artificial Sequence
  Description of Artificial Sequence: Synthetic oligonucleotide
  Sense strand starting at position 3253 of SEQ ID NO: 914288
guuccaggaucagugacua

SEQ ID NO: 992665 - RNA, 19 nt, Artificial Sequence
  Description of Artificial Sequence: Synthetic oligonucleotide
  Antisense strand to SEQ ID NO: 992664
uagucacugauccuggaac

SEQ ID NO: 992666 - RNA, 19 nt, Artificial Sequence
  Description of Artificial Sequence: Synthetic oligonucleotide
  Sense strand starting at position 3322 of SEQ ID NO: 914288
auguuaugaggucaacauc

SEQ ID NO: 992667 - RNA, 19 nt, Artificial Sequence
  Description of Artificial Sequence: Synthetic oligonucleotide
  Antisense strand to SEQ ID NO: 992666
gauguugaccucauaacau

SEQ ID NO: 992668 - RNA, 19 nt, Artificial Sequence
  Description of Artificial Sequence: Synthetic oligonucleotide
  Sense strand starting at position 3510 of SEQ ID NO: 914288
gagucaugcucccuggaag

SEQ ID NO: 992669 - RNA, 19 nt, Artificial Sequence
  Description of Artificial Sequence: Synthetic oligonucleotide
  Antisense strand to SEQ ID NO: 992668
cuuccagggagcaugacuc

SEQ ID NO: 992670 - RNA, 19 nt, Artificial Sequence
  Description of Artificial Sequence: Synthetic oligonucleotide
  Sense strand starting at position 3511 of SEQ ID NO: 914288
agucaugcucccuggaaga

SEQ ID NO: 992671 - RNA, 19 nt, Artificial Sequence
  Description of Artificial Sequence: Synthetic oligonucleotide
  Antisense strand to SEQ ID NO: 992670
ucuuccagggagcaugacu

SEQ ID NO: 992672 - RNA, 19 nt, Artificial Sequence
  Description of Artificial Sequence: Synthetic oligonucleotide
  Sense strand starting at position 3676 of SEQ ID NO: 914288
aagccucugccagagaagu

SEQ ID NO: 992673 - RNA, 19 nt, Artificial Sequence
  Description of Artificial Sequence: Synthetic oligonucleotide
  Antisense strand to SEQ ID NO: 992672
acuucucuggcagaggcuu

SEQ ID NO: 992674 - RNA, 19 nt, Artificial Sequence
  Description of Artificial Sequence: Synthetic oligonucleotide
  Sense strand starting at position 3687 of SEQ ID NO: 914288
agagaaguuuggaagguga

SEQ ID NO: 992675 - RNA, 19 nt, Artificial Sequence
  Description of Artificial Sequence: Synthetic oligonucleotide
  Antisense strand to SEQ ID NO: 992674
ucaccuuccaaacuucucu

SEQ ID NO: 992676 - RNA, 19 nt, Artificial Sequence
  Description of Artificial Sequence: Synthetic oligonucleotide
  Sense strand starting at position 3689 of SEQ ID NO: 914288
agaaguuuggaaggugaua

SEQ ID NO: 992677 - RNA, 19 nt, Artificial Sequence
  Description of Artificial Sequence: Synthetic oligonucleotide
  Antisense strand to SEQ ID NO: 992676
uaucaccuuccaaacuucu

SEQ ID NO: 992678 - RNA, 19 nt, Artificial Sequence
  Description of Artificial Sequence: Synthetic oligonucleotide
  Sense strand starting at position 3704 of SEQ ID NO: 914288
gauaaaggacauugucauc

SEQ ID NO: 992679 - RNA, 19 nt, Artificial Sequence
  Description of Artificial Sequence: Synthetic oligonucleotide
  Antisense strand to SEQ ID NO: 992678
gaugacaauguccuuuauc

SEQ ID NO: 992680 - RNA, 19 nt, Artificial Sequence
  Description of Artificial Sequence: Synthetic oligonucleotide
  Sense strand starting at position 3735 of SEQ ID NO: 914288
aggucaagaggauguuuca

SEQ ID NO: 992681 - RNA, 19 nt, Artificial Sequence
  Description of Artificial Sequence: Synthetic oligonucleotide
  Antisense strand to SEQ ID NO: 992680
ugaaacauccucuugaccu

SEQ ID NO: 992682 - RNA, 19 nt, Artificial Sequence
  Description of Artificial Sequence: Synthetic oligonucleotide
  Sense strand starting at position 3860 of SEQ ID NO: 914288
ucagcuccuggaggaaaua

SEQ ID NO: 992683 - RNA, 19 nt, Artificial Sequence
  Description of Artificial Sequence: Synthetic oligonucleotide
  Antisense strand to SEQ ID NO: 992682
uauuuccuccaggagcuga

SEQ ID NO: 992684 - RNA, 19 nt, Artificial Sequence
  Description of Artificial Sequence: Synthetic oligonucleotide
  Sense strand starting at position 3884 of SEQ ID NO: 914288
ggugaauggccugagucau

SEQ ID NO: 992685 - RNA, 19 nt, Artificial Sequence
  Description of Artificial Sequence: Synthetic oligonucleotide
  Antisense strand to SEQ ID NO: 992684
augacucaggccauucacc

SEQ ID NO: 992686 - RNA, 19 nt, Artificial Sequence
  Description of Artificial Sequence: Synthetic oligonucleotide
  Sense strand starting at position 411 of SEQ ID NO: 914289
agaguccuacucuguaaag

SEQ ID NO: 992687 - RNA, 19 nt, Artificial Sequence
  Description of Artificial Sequence: Synthetic oligonucleotide
  Antisense strand to SEQ ID NO: 992686
cuuuacagaguaggacucu

SEQ ID NO: 992688 - RNA, 19 nt, Artificial Sequence
  Description of Artificial Sequence: Synthetic oligonucleotide
  Sense strand starting at position 476 of SEQ ID NO: 914289
gagauaguaugcucugcca

SEQ ID NO: 992689 - RNA, 19 nt, Artificial Sequence
  Description of Artificial Sequence: Synthetic oligonucleotide
  Antisense strand to SEQ ID NO: 992688
uggcagagcauacuaucuc

SEQ ID NO: 992690 - RNA, 19 nt, Artificial Sequence
  Description of Artificial Sequence: Synthetic oligonucleotide
  Sense strand starting at position 527 of SEQ ID NO: 914289
cguaguagcaaguauucca

SEQ ID NO: 992691 - RNA, 19 nt, Artificial Sequence
  Description of Artificial Sequence: Synthetic oligonucleotide
  Antisense strand to SEQ ID NO: 992690
uggaauacuugcuacuacg

SEQ ID NO: 992692 - RNA, 19 nt, Artificial Sequence
  Description of Artificial Sequence: Synthetic oligonucleotide
  Sense strand starting at position 532 of SEQ ID NO: 914289
uagcaaguauuccaggguu

SEQ ID NO: 992693 - RNA, 19 nt, Artificial Sequence
  Description of Artificial Sequence: Synthetic oligonucleotide
  Antisense strand to SEQ ID NO: 992692
aacccuggaauacuugcua

SEQ ID NO: 992694 - RNA, 19 nt, Artificial Sequence
  Description of Artificial Sequence: Synthetic oligonucleotide
  Sense strand starting at position 534 of SEQ ID NO: 914289
gcaaguauuccaggguuuc

SEQ ID NO: 992695 - RNA, 19 nt, Artificial Sequence
  Description of Artificial Sequence: Synthetic oligonucleotide
  Antisense strand to SEQ ID NO: 992694
gaaacccuggaauacuugc

SEQ ID NO: 992696 - RNA, 19 nt, Artificial Sequence
  Description of Artificial Sequence: Synthetic oligonucleotide
  Sense strand starting at position 555 of SEQ ID NO: 914289
gccauaauccaccgaguca

SEQ ID NO: 992697 - RNA, 19 nt, Artificial Sequence
  Description of Artificial Sequence: Synthetic oligonucleotide
  Antisense strand to SEQ ID NO: 992696
ugacucgguggauuauggc

SEQ ID NO: 992698 - RNA, 19 nt, Artificial Sequence
  Description of Artificial Sequence: Synthetic oligonucleotide
  Sense strand starting at position 590 of SEQ ID NO: 914289
ccagguaaucugcauucuu

SEQ ID NO: 992699 - RNA, 19 nt, Artificial Sequence
  Description of Artificial Sequence: Synthetic oligonucleotide
  Antisense strand to SEQ ID NO: 992698
aagaaugcagauuaccugg

SEQ ID NO: 992700 - RNA, 19 nt, Artificial Sequence
  Description of Artificial Sequence: Synthetic oligonucleotide
  Sense strand starting at position 675 of SEQ ID NO: 914289
gucucucuuuccuacguga

SEQ ID NO: 992701 - RNA, 19 nt, Artificial Sequence
  Description of Artificial Sequence: Synthetic oligonucleotide
  Antisense strand to SEQ ID NO: 992700
ucacguaggaaagagagac

SEQ ID NO: 992702 - RNA, 19 nt, Artificial Sequence
  Description of Artificial Sequence: Synthetic oligonucleotide
  Sense strand starting at position 838 of SEQ ID NO: 914289
ugcuguaccuggcgaaguu

SEQ ID NO: 992703 - RNA, 19 nt, Artificial Sequence
  Description of Artificial Sequence: Synthetic oligonucleotide
  Antisense strand to SEQ ID NO: 992702
aacuucgccagguacagca

SEQ ID NO: 992704 - RNA, 19 nt, Artificial Sequence
  Description of Artificial Sequence: Synthetic oligonucleotide
  Sense strand starting at position 839 of SEQ ID NO: 914289
gcuguaccuggcgaaguuu

SEQ ID NO: 992705 - RNA, 19 nt, Artificial Sequence
  Description of Artificial Sequence: Synthetic oligonucleotide
  Antisense strand to SEQ ID NO: 992704
aaacuucgccagguacagc

SEQ ID NO: 992706 - RNA, 19 nt, Artificial Sequence
  Description of Artificial Sequence: Synthetic oligonucleotide
  Sense strand starting at position 1288 of SEQ ID NO: 914289
guugggaaucgcuguggga

SEQ ID NO: 992707 - RNA, 19 nt, Artificial Sequence
  Description of Artificial Sequence: Synthetic oligonucleotide
  Antisense strand to SEQ ID NO: 992706
ucccacagcgauucccaac

SEQ ID NO: 992708 - RNA, 19 nt, Artificial Sequence
  Description of Artificial Sequence: Synthetic oligonucleotide
  Sense strand starting at position 1290 of SEQ ID NO: 914289
ugggaaucgcugugggaaa

SEQ ID NO: 992709 - RNA, 19 nt, Artificial Sequence
  Description of Artificial Sequence: Synthetic oligonucleotide
  Antisense strand to SEQ ID NO: 992708
uuucccacagcgauuccca

SEQ ID NO: 992710 - RNA, 19 nt, Artificial Sequence
  Description of Artificial Sequence: Synthetic oligonucleotide
  Sense strand starting at position 1291 of SEQ ID NO: 914289
gggaaucgcugugggaaau

SEQ ID NO: 992711 - RNA, 19 nt, Artificial Sequence
  Description of Artificial Sequence: Synthetic oligonucleotide
  Antisense strand to SEQ ID NO: 992710
auuucccacagcgauuccc

SEQ ID NO: 992712 - RNA, 19 nt, Artificial Sequence
  Description of Artificial Sequence: Synthetic oligonucleotide
  Sense strand starting at position 1292 of SEQ ID NO: 914289
ggaaucgcugugggaaaua

SEQ ID NO: 992713 - RNA, 19 nt, Artificial Sequence
  Description of Artificial Sequence: Synthetic oligonucleotide
  Antisense strand to SEQ ID NO: 992712
uauuucccacagcgauucc

SEQ ID NO: 992714 - RNA, 19 nt, Artificial Sequence
  Description of Artificial Sequence: Synthetic oligonucleotide
  Sense strand starting at position 1474 of SEQ ID NO: 914289
ggaccagaguucuuguucu

SEQ ID NO: 992715 - RNA, 19 nt, Artificial Sequence
  Description of Artificial Sequence: Synthetic oligonucleotide
  Antisense strand to SEQ ID NO: 992714
agaacaagaacucuggucc

SEQ ID NO: 992716 - RNA, 19 nt, Artificial Sequence
  Description of Artificial Sequence: Synthetic oligonucleotide
  Sense strand starting at position 1480 of SEQ ID NO: 914289
gaguucuuguucucagcuu

SEQ ID NO: 992717 - RNA, 19 nt, Artificial Sequence
  Description of Artificial Sequence: Synthetic oligonucleotide
  Antisense strand to SEQ ID NO: 992716
aagcugagaacaagaacuc

SEQ ID NO: 992718 - RNA, 19 nt, Artificial Sequence
  Description of Artificial Sequence: Synthetic oligonucleotide
  Sense strand starting at position 2755 of SEQ ID NO: 914289
aggcgaguuucgaaaucag

SEQ ID NO: 992719 - RNA, 19 nt, Artificial Sequence
  Description of Artificial Sequence: Synthetic oligonucleotide
  Antisense strand to SEQ ID NO: 992718
cugauuucgaaacucgccu

SEQ ID NO: 992720 - RNA, 19 nt, Artificial Sequence
  Description of Artificial Sequence: Synthetic oligonucleotide
  Sense strand starting at position 2920 of SEQ ID NO: 914289
cguggaacaugauugagga

SEQ ID NO: 992721 - RNA, 19 nt, Artificial Sequence
  Description of Artificial Sequence: Synthetic oligonucleotide
  Antisense strand to SEQ ID NO: 992720
uccucaaucauguuccacg

SEQ ID NO: 992722 - RNA, 19 nt, Artificial Sequence
  Description of Artificial Sequence: Synthetic oligonucleotide
  Sense strand starting at position 2976 of SEQ ID NO: 914289
cguccucaguucugagacu

SEQ ID NO: 992723 - RNA, 19 nt, Artificial Sequence
  Description of Artificial Sequence: Synthetic oligonucleotide
  Antisense strand to SEQ ID NO: 992722
agucucagaacugaggacg

SEQ ID NO: 992724 - RNA, 19 nt, Artificial Sequence
  Description of Artificial Sequence: Synthetic oligonucleotide
  Sense strand starting at position 3256 of SEQ ID NO: 914289
guuccagccucuccugauu

SEQ ID NO: 992725 - RNA, 19 nt, Artificial Sequence
  Description of Artificial Sequence: Synthetic oligonucleotide
  Antisense strand to SEQ ID NO: 992724
aaucaggagaggcuggaac

SEQ ID NO: 992726 - RNA, 19 nt, Artificial Sequence
  Description of Artificial Sequence: Synthetic oligonucleotide
  Sense strand starting at position 3268 of SEQ ID NO: 914289
ccugauuucugccaucuug

SEQ ID NO: 992727 - RNA, 19 nt, Artificial Sequence
  Description of Artificial Sequence: Synthetic oligonucleotide
  Antisense strand to SEQ ID NO: 992726
caagauggcagaaaucagg

SEQ ID NO: 992728 - RNA, 19 nt, Artificial Sequence
  Description of Artificial Sequence: Synthetic oligonucleotide
  Sense strand starting at position 3303 of SEQ ID NO: 914289
ggcacuuaauuccaugaca

SEQ ID NO: 992729 - RNA, 19 nt, Artificial Sequence
  Description of Artificial Sequence: Synthetic oligonucleotide
  Antisense strand to SEQ ID NO: 992728
ugucauggaauuaagugcc

SEQ ID NO: 992730 - RNA, 19 nt, Artificial Sequence
  Description of Artificial Sequence: Synthetic oligonucleotide
  Sense strand starting at position 3395 of SEQ ID NO: 914289
uucccauugucacccugau

SEQ ID NO: 992731 - RNA, 19 nt, Artificial Sequence
  Description of Artificial Sequence: Synthetic oligonucleotide
  Antisense strand to SEQ ID NO: 992730
aucagggugacaaugggaa

SEQ ID NO: 992732 - RNA, 19 nt, Artificial Sequence
  Description of Artificial Sequence: Synthetic oligonucleotide
  Sense strand starting at position 3472 of SEQ ID NO: 914289
augcuaucccaucaguaug

SEQ ID NO: 992733 - RNA, 19 nt, Artificial Sequence
  Description of Artificial Sequence: Synthetic oligonucleotide
  Antisense strand to SEQ ID NO: 992732
cauacugaugggauagcau

SEQ ID NO: 992734 - RNA, 19 nt, Artificial Sequence
  Description of Artificial Sequence: Synthetic oligonucleotide
  Sense strand starting at position 3482 of SEQ ID NO: 914289
aucaguauguccgaagcca

SEQ ID NO: 992735 - RNA, 19 nt, Artificial Sequence
  Description of Artificial Sequence: Synthetic oligonucleotide
  Antisense strand to SEQ ID NO: 992734
uggcuucggacauacugau

SEQ ID NO: 992736 - RNA, 19 nt, Artificial Sequence
  Description of Artificial Sequence: Synthetic oligonucleotide
  Sense strand starting at position 3557 of SEQ ID NO: 914289
gccuguuucugcuggacca

SEQ ID NO: 992737 - RNA, 19 nt, Artificial Sequence
  Description of Artificial Sequence: Synthetic oligonucleotide
  Antisense strand to SEQ ID NO: 992736
ugguccagcagaaacaggc

SEQ ID NO: 992738 - RNA, 19 nt, Artificial Sequence
  Description of Artificial Sequence: Synthetic oligonucleotide
  Sense strand starting at position 3764 of SEQ ID NO: 914289
gacuccaugucguuuguau

SEQ ID NO: 992739 - RNA, 19 nt, Artificial Sequence
  Description of Artificial Sequence: Synthetic oligonucleotide
  Antisense strand to SEQ ID NO: 992738
auacaaacgacauggaguc

SEQ ID NO: 992740 - RNA, 19 nt, Artificial Sequence
  Description of Artificial Sequence: Synthetic oligonucleotide
  Sense strand starting at position 3822 of SEQ ID NO: 914289
auagguuaagccuggcauu

SEQ ID NO: 992741 - RNA, 19 nt, Artificial Sequence
  Description of Artificial Sequence: Synthetic oligonucleotide
  Antisense strand to SEQ ID NO: 992740
aaugccaggcuuaaccuau

SEQ ID NO: 992742 - RNA, 19 nt, Artificial Sequence
  Description of Artificial Sequence: Synthetic oligonucleotide
  Sense strand starting at position 3894 of SEQ ID NO: 914289
ucaugagucccuggcucuu

SEQ ID NO: 992743 - RNA, 19 nt, Artificial Sequence
  Description of Artificial Sequence: Synthetic oligonucleotide
  Antisense strand to SEQ ID NO: 992742
aagagccagggacucauga

SEQ ID NO: 992744 - RNA, 19 nt, Artificial Sequence
  Description of Artificial Sequence: Synthetic oligonucleotide
  Sense strand starting at position 3907 of SEQ ID NO: 914289
gcucuucccugccucagaa

SEQ ID NO: 992745 - RNA, 19 nt, Artificial Sequence
  Description of Artificial Sequence: Synthetic oligonucleotide
  Antisense strand to SEQ ID NO: 992744
uucugaggcagggaagagc

SEQ ID NO: 992746 - RNA, 19 nt, Artificial Sequence
  Description of Artificial Sequence: Synthetic oligonucleotide
  Sense strand starting at position 3911 of SEQ ID NO: 914289
uucccugccucagaaaugu

SEQ ID NO: 992747 - RNA, 19 nt, Artificial Sequence
  Description of Artificial Sequence: Synthetic oligonucleotide
  Antisense strand to SEQ ID NO: 992746
acauuucugaggcagggaa

SEQ ID NO: 992748 - RNA, 19 nt, Artificial Sequence
  Description of Artificial Sequence: Synthetic oligonucleotide
  Sense strand starting at position 72 of SEQ ID NO: 914290
agauaacuccaaggugugu

SEQ ID NO: 992749 - RNA, 19 nt, Artificial Sequence
  Description of Artificial Sequence: Synthetic oligonucleotide
  Antisense strand to SEQ ID NO: 992748
acacaccuuggaguuaucu

SEQ ID NO: 992750 - RNA, 19 nt, Artificial Sequence
  Description of Artificial Sequence: Synthetic oligonucleotide
  Sense strand starting at position 113 of SEQ ID NO: 914290
ggugccauuaguugagaca

SEQ ID NO: 992751 - RNA, 19 nt, Artificial Sequence
  Description of Artificial Sequence: Synthetic oligonucleotide
  Antisense strand to SEQ ID NO: 992750
ugucucaacuaauggcacc

SEQ ID NO: 992752 - RNA, 19 nt, Artificial Sequence
  Description of Artificial Sequence: Synthetic oligonucleotide
  Sense strand starting at position 251 of SEQ ID NO: 914290
cgaggagagauacggaauu

SEQ ID NO: 992753 - RNA, 19 nt, Artificial Sequence
  Description of Artificial Sequence: Synthetic oligonucleotide
  Antisense strand to SEQ ID NO: 992752
aauuccguaucucuccucg

SEQ ID NO: 992754 - RNA, 19 nt, Artificial Sequence
  Description of Artificial Sequence: Synthetic oligonucleotide
  Sense strand starting at position 372 of SEQ ID NO: 914290
ugaucucacuugucauuau

SEQ ID NO: 992755 - RNA, 19 nt, Artificial Sequence
  Description of Artificial Sequence: Synthetic oligonucleotide
  Antisense strand to SEQ ID NO: 992754
auaaugacaagugagauca

SEQ ID NO: 992756 - RNA, 19 nt, Artificial Sequence
  Description of Artificial Sequence: Synthetic oligonucleotide
  Sense strand starting at position 382 of SEQ ID NO: 914290
ugucauuauuugcucagca

SEQ ID NO: 992757 - RNA, 19 nt, Artificial Sequence
  Description of Artificial Sequence: Synthetic oligonucleotide
  Antisense strand to SEQ ID NO: 992756
ugcugagcaaauaaugaca

SEQ ID NO: 992758 - RNA, 19 nt, Artificial Sequence
  Description of Artificial Sequence: Synthetic oligonucleotide
  Sense strand starting at position 383 of SEQ ID NO: 914290
gucauuauuugcucagcau

SEQ ID NO: 992759 - RNA, 19 nt, Artificial Sequence
  Description of Artificial Sequence: Synthetic oligonucleotide
  Antisense strand to SEQ ID NO: 992758
augcugagcaaauaaugac

SEQ ID NO: 992760 - RNA, 19 nt, Artificial Sequence
  Description of Artificial Sequence: Synthetic oligonucleotide
  Sense strand starting at position 470 of SEQ ID NO: 914290
aggcauaugcaguaaauau

SEQ ID NO: 992761 - RNA, 19 nt, Artificial Sequence
  Description of Artificial Sequence: Synthetic oligonucleotide
  Antisense strand to SEQ ID NO: 992760
auauuuacugcauaugccu

SEQ ID NO: 992762 - RNA, 19 nt, Artificial Sequence
  Description of Artificial Sequence: Synthetic oligonucleotide
  Sense strand starting at position 703 of SEQ ID NO: 914290
ggucaaaugcugcagggaa

SEQ ID NO: 992763 - RNA, 19 nt, Artificial Sequence
  Description of Artificial Sequence: Synthetic oligonucleotide
  Antisense strand to SEQ ID NO: 992762
uucccugcagcauuugacc

SEQ ID NO: 992764 - RNA, 19 nt, Artificial Sequence
  Description of Artificial Sequence: Synthetic oligonucleotide
  Sense strand starting at position 741 of SEQ ID NO: 914290
ggguccguccauuaagacu

SEQ ID NO: 992765 - RNA, 19 nt, Artificial Sequence
  Description of Artificial Sequence: Synthetic oligonucleotide
  Antisense strand to SEQ ID NO: 992764
agucuuaauggacggaccc

SEQ ID NO: 992766 - RNA, 19 nt, Artificial Sequence
  Description of Artificial Sequence: Synthetic oligonucleotide
  Sense strand starting at position 904 of SEQ ID NO: 914290
gggagugacggcugagaaa

SEQ ID NO: 992767 - RNA, 19 nt, Artificial Sequence
  Description of Artificial Sequence: Synthetic oligonucleotide
  Antisense strand to SEQ ID NO: 992766
uuucucagccgucacuccc

SEQ ID NO: 992768 - RNA, 19 nt, Artificial Sequence
  Description of Artificial Sequence: Synthetic oligonucleotide
  Sense strand starting at position 945 of SEQ ID NO: 914290
ggcuguugcgggcuuaagu

SEQ ID NO: 992769 - RNA, 19 nt, Artificial Sequence
  Description of Artificial Sequence: Synthetic oligonucleotide
  Antisense strand to SEQ ID NO: 992768
acuuaagcccgcaacagcc

SEQ ID NO: 992770 - RNA, 19 nt, Artificial Sequence
  Description of Artificial Sequence: Synthetic oligonucleotide
  Sense strand starting at position 2343 of SEQ ID NO: 914290
aguggugguuggaaggaaa

SEQ ID NO: 992771 - RNA, 19 nt, Artificial Sequence
  Description of Artificial Sequence: Synthetic oligonucleotide
  Antisense strand to SEQ ID NO: 992770
uuuccuuccaaccaccacu

SEQ ID NO: 992772 - RNA, 19 nt, Artificial Sequence
  Description of Artificial Sequence: Synthetic oligonucleotide
  Sense strand starting at position 2358 of SEQ ID NO: 914290
gaaauuuguugcccuguca

SEQ ID NO: 992773 - RNA, 19 nt, Artificial Sequence
  Description of Artificial Sequence: Synthetic oligonucleotide
  Antisense strand to SEQ ID NO: 992772
ugacagggcaacaaauuuc

SEQ ID NO: 992774 - RNA, 19 nt, Artificial Sequence
  Description of Artificial Sequence: Synthetic oligonucleotide
  Sense strand starting at position 2369 of SEQ ID NO: 914290
cccugucauuucgcaagua

SEQ ID NO: 992775 - RNA, 19 nt, Artificial Sequence
  Description of Artificial Sequence: Synthetic oligonucleotide
  Antisense strand to SEQ ID NO: 992774
uacuugcgaaaugacaggg

SEQ ID NO: 992776 - RNA, 19 nt, Artificial Sequence
  Description of Artificial Sequence: Synthetic oligonucleotide
  Sense strand starting at position 2451 of SEQ ID NO: 914290
gcgccaacucuuuaauaau

SEQ ID NO: 992777 - RNA, 19 nt, Artificial Sequence
  Description of Artificial Sequence: Synthetic oligonucleotide
  Antisense strand to SEQ ID NO: 992776
auuauuaaagaguuggcgc

SEQ ID NO: 992778 - RNA, 19 nt, Artificial Sequence
  Description of Artificial Sequence: Synthetic oligonucleotide
  Sense strand starting at position 2513 of SEQ ID NO: 914290
auauaucaguacuuuggua

SEQ ID NO: 992779 - RNA, 19 nt, Artificial Sequence
  Description of Artificial Sequence: Synthetic oligonucleotide
  Antisense strand to SEQ ID NO: 992778
uaccaaaguacugauauau

SEQ ID NO: 992780 - RNA, 19 nt, Artificial Sequence
  Description of Artificial Sequence: Synthetic oligonucleotide
  Sense strand starting at position 2515 of SEQ ID NO: 914290
auaucaguacuuugguaag

SEQ ID NO: 992781 - RNA, 19 nt, Artificial Sequence
  Description of Artificial Sequence: Synthetic oligonucleotide
  Antisense strand to SEQ ID NO: 992780
cuuaccaaaguacugauau

SEQ ID NO: 992782 - RNA, 19 nt, Artificial Sequence
  Description of Artificial Sequence: Synthetic oligonucleotide
  Sense strand starting at position 2911 of SEQ ID NO: 914290
uucgucuuaccaggaaacu

SEQ ID NO: 992783 - RNA, 19 nt, Artificial Sequence
  Description of Artificial Sequence: Synthetic oligonucleotide
  Antisense strand to SEQ ID NO: 992782
aguuuccugguaagacgaa

SEQ ID NO: 992784 - RNA, 19 nt, Artificial Sequence
  Description of Artificial Sequence: Synthetic oligonucleotide
  Sense strand starting at position 2912 of SEQ ID NO: 914290
ucgucuuaccaggaaacua

SEQ ID NO: 992785 - RNA, 19 nt, Artificial Sequence
  Description of Artificial Sequence: Synthetic oligonucleotide
  Antisense strand to SEQ ID NO: 992784
uaguuuccugguaagacga

SEQ ID NO: 992786 - RNA, 19 nt, Artificial Sequence
  Description of Artificial Sequence: Synthetic oligonucleotide
  Sense strand starting at position 2957 of SEQ ID NO: 914290
gugaacacauuugggaaau

SEQ ID NO: 992787 - RNA, 19 nt, Artificial Sequence
  Description of Artificial Sequence: Synthetic oligonucleotide
  Antisense strand to SEQ ID NO: 992786
auuucccaaauguguucac

SEQ ID NO: 992788 - RNA, 19 nt, Artificial Sequence
  Description of Artificial Sequence: Synthetic oligonucleotide
  Sense strand starting at position 2958 of SEQ ID NO: 914290
ugaacacauuugggaaauu

SEQ ID NO: 992789 - RNA, 19 nt, Artificial Sequence
  Description of Artificial Sequence: Synthetic oligonucleotide
  Antisense strand to SEQ ID NO: 992788
aauuucccaaauguguuca

SEQ ID NO: 992790 - RNA, 19 nt, Artificial Sequence
  Description of Artificial Sequence: Synthetic oligonucleotide
  Sense strand starting at position 2967 of SEQ ID NO: 914290
uugggaaauucuucugauc

SEQ ID NO: 992791 - RNA, 19 nt, Artificial Sequence
  Description of Artificial Sequence: Synthetic oligonucleotide
  Antisense strand to SEQ ID NO: 992790
gaucagaagaauuucccaa

SEQ ID NO: 992792 - RNA, 19 nt, Artificial Sequence
  Description of Artificial Sequence: Synthetic oligonucleotide
  Sense strand starting at position 2996 of SEQ ID NO: 914290
ucucuugagguacaguaaa

SEQ ID NO: 992793 - RNA, 19 nt, Artificial Sequence
  Description of Artificial Sequence: Synthetic oligonucleotide
  Antisense strand to SEQ ID NO: 992792
uuuacuguaccucaagaga

SEQ ID NO: 992794 - RNA, 19 nt, Artificial Sequence
  Description of Artificial Sequence: Synthetic oligonucleotide
  Sense strand starting at position 3004 of SEQ ID NO: 914290
gguacaguaaauugucuuu

SEQ ID NO: 992795 - RNA, 19 nt, Artificial Sequence
  Description of Artificial Sequence: Synthetic oligonucleotide
  Antisense strand to SEQ ID NO: 992794
aaagacaauuuacuguacc

SEQ ID NO: 992796 - RNA, 19 nt, Artificial Sequence
  Description of Artificial Sequence: Synthetic oligonucleotide
  Sense strand starting at position 3007 of SEQ ID NO: 914290
acaguaaauugucuuugac

SEQ ID NO: 992797 - RNA, 19 nt, Artificial Sequence
  Description of Artificial Sequence: Synthetic oligonucleotide
  Antisense strand to SEQ ID NO: 992796
gucaaagacaauuuacugu

SEQ ID NO: 992798 - RNA, 19 nt, Artificial Sequence
  Description of Artificial Sequence: Synthetic oligonucleotide
  Sense strand starting at position 3009 of SEQ ID NO: 914290
aguaaauugucuuugacuu

SEQ ID NO: 992799 - RNA, 19 nt, Artificial Sequence
  Description of Artificial Sequence: Synthetic oligonucleotide
  Antisense strand to SEQ ID NO: 992798
aagucaaagacaauuuacu

SEQ ID NO: 992800 - RNA, 19 nt, Artificial Sequence
  Description of Artificial Sequence: Synthetic oligonucleotide
  Sense strand starting at position 3010 of SEQ ID NO: 914290
guaaauugucuuugacuuc

SEQ ID NO: 992801 - RNA, 19 nt, Artificial Sequence
  Description of Artificial Sequence: Synthetic oligonucleotide
  Antisense strand to SEQ ID NO: 992800
gaagucaaagacaauuuac

SEQ ID NO: 992802 - RNA, 19 nt, Artificial Sequence
  Description of Artificial Sequence: Synthetic oligonucleotide
  Sense strand starting at position 3058 of SEQ ID NO: 914290
ucuacugaguuccuaugau

SEQ ID NO: 992803 - RNA, 19 nt, Artificial Sequence
  Description of Artificial Sequence: Synthetic oligonucleotide
  Antisense strand to SEQ ID NO: 992802
aucauaggaacucaguaga

SEQ ID NO: 992804 - RNA, 19 nt, Artificial Sequence
  Description of Artificial Sequence: Synthetic oligonucleotide
  Sense strand starting at position 3219 of SEQ ID NO: 914290
aaaguuaauugccugagga

SEQ ID NO: 992805 - RNA, 19 nt, Artificial Sequence
  Description of Artificial Sequence: Synthetic oligonucleotide
  Antisense strand to SEQ ID NO: 992804
uccucaggcaauuaacuuu

SEQ ID NO: 992806 - RNA, 19 nt, Artificial Sequence
  Description of Artificial Sequence: Synthetic oligonucleotide
  Sense strand starting at position 3220 of SEQ ID NO: 914290
aaguuaauugccugaggau

SEQ ID NO: 992807 - RNA, 19 nt, Artificial Sequence
  Description of Artificial Sequence: Synthetic oligonucleotide
  Antisense strand to SEQ ID NO: 992806
auccucaggcaauuaacuu

SEQ ID NO: 992808 - RNA, 19 nt, Artificial Sequence
  Description of Artificial Sequence: Synthetic oligonucleotide
  Sense strand starting at position 3221 of SEQ ID NO: 914290
aguuaauugccugaggaua

SEQ ID NO: 992809 - RNA, 19 nt, Artificial Sequence
  Description of Artificial Sequence: Synthetic oligonucleotide
  Antisense strand to SEQ ID NO: 992808
uauccucaggcaauuaacu

SEQ ID NO: 992810 - RNA, 19 nt, Artificial Sequence
  Description of Artificial Sequence: Synthetic oligonucleotide
  Sense strand starting at position 3346 of SEQ ID NO: 914290
aagucugagcccggaacaa

SEQ ID NO: 992811 - RNA, 19 nt, Artificial Sequence
  Description of Artificial Sequence: Synthetic oligonucleotide
  Antisense strand to SEQ ID NO: 992810
uuguuccgggcucagacuu

SEQ ID NO: 992812 - RNA, 19 nt, Artificial Sequence
  Description of Artificial Sequence: Synthetic oligonucleotide
  Sense strand starting at position 3385 of SEQ ID NO: 914290
gcaauuuguggcgggaguu

SEQ ID NO: 992813 - RNA, 19 nt, Artificial Sequence
  Description of Artificial Sequence: Synthetic oligonucleotide
  Antisense strand to SEQ ID NO: 992812
aacucccgccacaaauugc

SEQ ID NO: 992814 - RNA, 19 nt, Artificial Sequence
  Description of Artificial Sequence: Synthetic oligonucleotide
  Sense strand starting at position 3386 of SEQ ID NO: 914290
caauuuguggcgggaguuu

SEQ ID NO: 992815 - RNA, 19 nt, Artificial Sequence
  Description of Artificial Sequence: Synthetic oligonucleotide
  Antisense strand to SEQ ID NO: 992814
aaacucccgccacaaauug

SEQ ID NO: 992816 - RNA, 19 nt, Artificial Sequence
  Description of Artificial Sequence: Synthetic oligonucleotide
  Sense strand starting at position 3481 of SEQ ID NO: 914290
ucuuacauccuugggaaug

SEQ ID NO: 992817 - RNA, 19 nt, Artificial Sequence
  Description of Artificial Sequence: Synthetic oligonucleotide
  Antisense strand to SEQ ID NO: 992816
cauucccaaggauguaaga

SEQ ID NO: 992818 - RNA, 19 nt, Artificial Sequence
  Description of Artificial Sequence: Synthetic oligonucleotide
  Sense strand starting at position 3617 of SEQ ID NO: 914290
gugcguagaggagaaauaa

SEQ ID NO: 992819 - RNA, 19 nt, Artificial Sequence
  Description of Artificial Sequence: Synthetic oligonucleotide
  Antisense strand to SEQ ID NO: 992818
uuauuucuccucuacgcac

SEQ ID NO: 992820 - RNA, 19 nt, Artificial Sequence
  Description of Artificial Sequence: Synthetic oligonucleotide
  Sense strand starting at position 3625 of SEQ ID NO: 914290
aggagaaauaagcgguuaa

SEQ ID NO: 992821 - RNA, 19 nt, Artificial Sequence
  Description of Artificial Sequence: Synthetic oligonucleotide
  Antisense strand to SEQ ID NO: 992820
uuaaccgcuuauuucuccu

SEQ ID NO: 992822 - RNA, 19 nt, Artificial Sequence
  Description of Artificial Sequence: Synthetic oligonucleotide
  Sense strand starting at position 3626 of SEQ ID NO: 914290
ggagaaauaagcgguuaau

SEQ ID NO: 992823 - RNA, 19 nt, Artificial Sequence
  Description of Artificial Sequence: Synthetic oligonucleotide
  Antisense strand to SEQ ID NO: 992822
auuaaccgcuuauuucucc

SEQ ID NO: 992824 - RNA, 19 nt, Artificial Sequence
  Description of Artificial Sequence: Synthetic oligonucleotide
  Sense strand starting at position 3629 of SEQ ID NO: 914290
gaaauaagcgguuaauauu

SEQ ID NO: 992825 - RNA, 19 nt, Artificial Sequence
  Description of Artificial Sequence: Synthetic oligonucleotide
  Antisense strand to SEQ ID NO: 992824
aauauuaaccgcuuauuuc

SEQ ID NO: 992826 - RNA, 19 nt, Artificial Sequence
  Description of Artificial Sequence: Synthetic oligonucleotide
  Sense strand starting at position 3966 of SEQ ID NO: 914290
uucugaugucuagaauauu

SEQ ID NO: 992827 - RNA, 19 nt, Artificial Sequence
  Description of Artificial Sequence: Synthetic oligonucleotide
  Antisense strand to SEQ ID NO: 992826
aauauucuagacaucagaa

SEQ ID NO: 992828 - RNA, 19 nt, Artificial Sequence
  Description of Artificial Sequence: Synthetic oligonucleotide
  Sense strand starting at position 49 of SEQ ID NO: 914291
ugaauagaaugucugguau

SEQ ID NO: 992829 - RNA, 19 nt, Artificial Sequence
  Description of Artificial Sequence: Synthetic oligonucleotide
  Antisense strand to SEQ ID NO: 992828
auaccagacauucuauuca

SEQ ID NO: 992830 - RNA, 19 nt, Artificial Sequence
  Description of Artificial Sequence: Synthetic oligonucleotide
  Sense strand starting at position 122 of SEQ ID NO: 914291
ucaggaagcuuacucuagu

SEQ ID NO: 992831 - RNA, 19 nt, Artificial Sequence
  Description of Artificial Sequence: Synthetic oligonucleotide
  Antisense strand to SEQ ID NO: 992830
acuagaguaagcuuccuga

SEQ ID NO: 992832 - RNA, 19 nt, Artificial Sequence
  Description of Artificial Sequence: Synthetic oligonucleotide
  Sense strand starting at position 125 of SEQ ID NO: 914291
ggaagcuuacucuagugua

SEQ ID NO: 992833 - RNA, 19 nt, Artificial Sequence
  Description of Artificial Sequence: Synthetic oligonucleotide
  Antisense strand to SEQ ID NO: 992832
uacacuagaguaagcuucc

SEQ ID NO: 992834 - RNA, 19 nt, Artificial Sequence
  Description of Artificial Sequence: Synthetic oligonucleotide
  Sense strand starting at position 273 of SEQ ID NO: 914291
uccugaaggaacugauguu

SEQ ID NO: 992835 - RNA, 19 nt, Artificial Sequence
  Description of Artificial Sequence: Synthetic oligonucleotide
  Antisense strand to SEQ ID NO: 992834
aacaucaguuccuucagga

SEQ ID NO: 992836 - RNA, 19 nt, Artificial Sequence
  Description of Artificial Sequence: Synthetic oligonucleotide
  Sense strand starting at position 436 of SEQ ID NO: 914291
guugaaauauaaucagucu

SEQ ID NO: 992837 - RNA, 19 nt, Artificial Sequence
  Description of Artificial Sequence: Synthetic oligonucleotide
  Antisense strand to SEQ ID NO: 992836
agacugauuauauuucaac

SEQ ID NO: 992838 - RNA, 19 nt, Artificial Sequence
  Description of Artificial Sequence: Synthetic oligonucleotide
  Sense strand starting at position 628 of SEQ ID NO: 914291
ucuccuacuugucuauaga

SEQ ID NO: 992839 - RNA, 19 nt, Artificial Sequence
  Description of Artificial Sequence: Synthetic oligonucleotide
  Antisense strand to SEQ ID NO: 992838
ucuauagacaaguaggaga

SEQ ID NO: 992840 - RNA, 19 nt, Artificial Sequence
  Description of Artificial Sequence: Synthetic oligonucleotide
  Sense strand starting at position 636 of SEQ ID NO: 914291
uugucuauagaaggcauua

SEQ ID NO: 992841 - RNA, 19 nt, Artificial Sequence
  Description of Artificial Sequence: Synthetic oligonucleotide
  Antisense strand to SEQ ID NO: 992840
uaaugccuucuauagacaa

SEQ ID NO: 992842 - RNA, 19 nt, Artificial Sequence
  Description of Artificial Sequence: Synthetic oligonucleotide
  Sense strand starting at position 648 of SEQ ID NO: 914291
ggcauuaagaaguaugugu

SEQ ID NO: 992843 - RNA, 19 nt, Artificial Sequence
  Description of Artificial Sequence: Synthetic oligonucleotide
  Antisense strand to SEQ ID NO: 992842
acacauacuucuuaaugcc

SEQ ID NO: 992844 - RNA, 19 nt, Artificial Sequence
  Description of Artificial Sequence: Synthetic oligonucleotide
  Sense strand starting at position 680 of SEQ ID NO: 914291
auuaaagucuugucacuug

SEQ ID NO: 992845 - RNA, 19 nt, Artificial Sequence
  Description of Artificial Sequence: Synthetic oligonucleotide
  Antisense strand to SEQ ID NO: 992844
caagugacaagacuuuaau

SEQ ID NO: 992846 - RNA, 19 nt, Artificial Sequence
  Description of Artificial Sequence: Synthetic oligonucleotide
  Sense strand starting at position 861 of SEQ ID NO: 914291
acucauguccaguaacuuu

SEQ ID NO: 992847 - RNA, 19 nt, Artificial Sequence
  Description of Artificial Sequence: Synthetic oligonucleotide
  Antisense strand to SEQ ID NO: 992846
aaaguuacuggacaugagu

SEQ ID NO: 992848 - RNA, 19 nt, Artificial Sequence
  Description of Artificial Sequence: Synthetic oligonucleotide
  Sense strand starting at position 886 of SEQ ID NO: 914291
ccuguuacuuuauuguaaa

SEQ ID NO: 992849 - RNA, 19 nt, Artificial Sequence
  Description of Artificial Sequence: Synthetic oligonucleotide
  Antisense strand to SEQ ID NO: 992848
uuuacaauaaaguaacagg

SEQ ID NO: 992850 - RNA, 19 nt, Artificial Sequence
  Description of Artificial Sequence: Synthetic oligonucleotide
  Sense strand starting at position 1013 of SEQ ID NO: 914291
auuaauucuccuggagcuu

SEQ ID NO: 992851 - RNA, 19 nt, Artificial Sequence
  Description of Artificial Sequence: Synthetic oligonucleotide
  Antisense strand to SEQ ID NO: 992850
aagcuccaggagaauuaau

SEQ ID NO: 992852 - RNA, 19 nt, Artificial Sequence
  Description of Artificial Sequence: Synthetic oligonucleotide
  Sense strand starting at position 1354 of SEQ ID NO: 914291
ugaugaugauauuccugau

SEQ ID NO: 992853 - RNA, 19 nt, Artificial Sequence
  Description of Artificial Sequence: Synthetic oligonucleotide
  Antisense strand to SEQ ID NO: 992852
aucaggaauaucaucauca

SEQ ID NO: 992854 - RNA, 19 nt, Artificial Sequence
  Description of Artificial Sequence: Synthetic oligonucleotide
  Sense strand starting at position 1380 of SEQ ID NO: 914291
caggaaugucaggguaugu

SEQ ID NO: 992855 - RNA, 19 nt, Artificial Sequence
  Description of Artificial Sequence: Synthetic oligonucleotide
  Antisense strand to SEQ ID NO: 992854
acauacccugacauuccug

SEQ ID NO: 992856 - RNA, 19 nt, Artificial Sequence
  Description of Artificial Sequence: Synthetic oligonucleotide
  Sense strand starting at position 1389 of SEQ ID NO: 914291
caggguauguuuccuaacu

SEQ ID NO: 992857 - RNA, 19 nt, Artificial Sequence
  Description of Artificial Sequence: Synthetic oligonucleotide
  Antisense strand to SEQ ID NO: 992856
aguuaggaaacauacccug

SEQ ID NO: 992858 - RNA, 19 nt, Artificial Sequence
  Description of Artificial Sequence: Synthetic oligonucleotide
  Sense strand starting at position 1390 of SEQ ID NO: 914291
aggguauguuuccuaacuu

SEQ ID NO: 992859 - RNA, 19 nt, Artificial Sequence
  Description of Artificial Sequence: Synthetic oligonucleotide
  Antisense strand to SEQ ID NO: 992858
aaguuaggaaacauacccu

SEQ ID NO: 992860 - RNA, 19 nt, Artificial Sequence
  Description of Artificial Sequence: Synthetic oligonucleotide
  Sense strand starting at position 1482 of SEQ ID NO: 914291
cuauaaaccuuacugguga

SEQ ID NO: 992861 - RNA, 19 nt, Artificial Sequence
  Description of Artificial Sequence: Synthetic oligonucleotide
  Antisense strand to SEQ ID NO: 992860
ucaccaguaagguuuauag

SEQ ID NO: 992862 - RNA, 19 nt, Artificial Sequence
  Description of Artificial Sequence: Synthetic oligonucleotide
  Sense strand starting at position 1640 of SEQ ID NO: 914291
ugcagaugugcugaacuca

SEQ ID NO: 992863 - RNA, 19 nt, Artificial Sequence
  Description of Artificial Sequence: Synthetic oligonucleotide
  Antisense strand to SEQ ID NO: 992862
ugaguucagcacaucugca

SEQ ID NO: 992864 - RNA, 19 nt, Artificial Sequence
  Description of Artificial Sequence: Synthetic oligonucleotide
  Sense strand starting at position 2113 of SEQ ID NO: 914291
uacguuauccaugaagugu

SEQ ID NO: 992865 - RNA, 19 nt, Artificial Sequence
  Description of Artificial Sequence: Synthetic oligonucleotide
  Antisense strand to SEQ ID NO: 992864
acacuucauggauaacgua

SEQ ID NO: 992866 - RNA, 19 nt, Artificial Sequence
  Description of Artificial Sequence: Synthetic oligonucleotide
  Sense strand starting at position 2149 of SEQ ID NO: 914291
ccguucucucccgcggaau

SEQ ID NO: 992867 - RNA, 19 nt, Artificial Sequence
  Description of Artificial Sequence: Synthetic oligonucleotide
  Antisense strand to SEQ ID NO: 992866
auuccgcgggagagaacgg

SEQ ID NO: 992868 - RNA, 19 nt, Artificial Sequence
  Description of Artificial Sequence: Synthetic oligonucleotide
  Sense strand starting at position 2349 of SEQ ID NO: 914291
ggcggaagcccagaguuaa

SEQ ID NO: 992869 - RNA, 19 nt, Artificial Sequence
  Description of Artificial Sequence: Synthetic oligonucleotide
  Antisense strand to SEQ ID NO: 992868
uuaacucugggcuuccgcc

SEQ ID NO: 992870 - RNA, 19 nt, Artificial Sequence
  Description of Artificial Sequence: Synthetic oligonucleotide
  Sense strand starting at position 2416 of SEQ ID NO: 914291
cgggcucagcguucugauu

SEQ ID NO: 992871 - RNA, 19 nt, Artificial Sequence
  Description of Artificial Sequence: Synthetic oligonucleotide
  Antisense strand to SEQ ID NO: 992870
aaucagaacgcugagcccg

SEQ ID NO: 992872 - RNA, 19 nt, Artificial Sequence
  Description of Artificial Sequence: Synthetic oligonucleotide
  Sense strand starting at position 2593 of SEQ ID NO: 914291
ccacguguuuguuuauuua

SEQ ID NO: 992873 - RNA, 19 nt, Artificial Sequence
  Description of Artificial Sequence: Synthetic oligonucleotide
  Antisense strand to SEQ ID NO: 992872
uaaauaaacaaacacgugg

SEQ ID NO: 992874 - RNA, 19 nt, Artificial Sequence
  Description of Artificial Sequence: Synthetic oligonucleotide
  Sense strand starting at position 2704 of SEQ ID NO: 914291
cucuguucuccagaguaac

SEQ ID NO: 992875 - RNA, 19 nt, Artificial Sequence
  Description of Artificial Sequence: Synthetic oligonucleotide
  Antisense strand to SEQ ID NO: 992874
guuacucuggagaacagag

SEQ ID NO: 992876 - RNA, 19 nt, Artificial Sequence
  Description of Artificial Sequence: Synthetic oligonucleotide
  Sense strand starting at position 2707 of SEQ ID NO: 914291
uguucuccagaguaaccua

SEQ ID NO: 992877 - RNA, 19 nt, Artificial Sequence
  Description of Artificial Sequence: Synthetic oligonucleotide
  Antisense strand to SEQ ID NO: 992876
uagguuacucuggagaaca

SEQ ID NO: 992878 - RNA, 19 nt, Artificial Sequence
  Description of Artificial Sequence: Synthetic oligonucleotide
  Sense strand starting at position 2773 of SEQ ID NO: 914291
gaaccagaaccguauguga

SEQ ID NO: 992879 - RNA, 19 nt, Artificial Sequence
  Description of Artificial Sequence: Synthetic oligonucleotide
  Antisense strand to SEQ ID NO: 992878
ucacauacgguucugguuc

SEQ ID NO: 992880 - RNA, 19 nt, Artificial Sequence
  Description of Artificial Sequence: Synthetic oligonucleotide
  Sense strand starting at position 2851 of SEQ ID NO: 914291
auaggaguuuaaucaucuu

SEQ ID NO: 992881 - RNA, 19 nt, Artificial Sequence
  Description of Artificial Sequence: Synthetic oligonucleotide
  Antisense strand to SEQ ID NO: 992880
aagaugauuaaacuccuau

SEQ ID NO: 992882 - RNA, 19 nt, Artificial Sequence
  Description of Artificial Sequence: Synthetic oligonucleotide
  Sense strand starting at position 2854 of SEQ ID NO: 914291
ggaguuuaaucaucuuggu

SEQ ID NO: 992883 - RNA, 19 nt, Artificial Sequence
  Description of Artificial Sequence: Synthetic oligonucleotide
  Antisense strand to SEQ ID NO: 992882
accaagaugauuaaacucc

SEQ ID NO: 992884 - RNA, 19 nt, Artificial Sequence
  Description of Artificial Sequence: Synthetic oligonucleotide
  Sense strand starting at position 2858 of SEQ ID NO: 914291
uuuaaucaucuuggugaaa

SEQ ID NO: 992885 - RNA, 19 nt, Artificial Sequence
  Description of Artificial Sequence: Synthetic oligonucleotide
  Antisense strand to SEQ ID NO: 992884
uuucaccaagaugauuaaa

SEQ ID NO: 992886 - RNA, 19 nt, Artificial Sequence
  Description of Artificial Sequence: Synthetic oligonucleotide
  Sense strand starting at position 2859 of SEQ ID NO: 914291
uuaaucaucuuggugaaac

SEQ ID NO: 992887 - RNA, 19 nt, Artificial Sequence
  Description of Artificial Sequence: Synthetic oligonucleotide
  Antisense strand to SEQ ID NO: 992886
guuucaccaagaugauuaa

SEQ ID NO: 992888 - RNA, 19 nt, Artificial Sequence
  Description of Artificial Sequence: Synthetic oligonucleotide
  Sense strand starting at position 2976 of SEQ ID NO: 914291
uugccagucuaauuaagac

SEQ ID NO: 992889 - RNA, 19 nt, Artificial Sequence
  Description of Artificial Sequence: Synthetic oligonucleotide
  Antisense strand to SEQ ID NO: 992888
gucuuaauuagacuggcaa

SEQ ID NO: 992890 - RNA, 19 nt, Artificial Sequence
  Description of Artificial Sequence: Synthetic oligonucleotide
  Sense strand starting at position 2999 of SEQ ID NO: 914291
guaccuugugcagcguaaa

SEQ ID NO: 992891 - RNA, 19 nt, Artificial Sequence
  Description of Artificial Sequence: Synthetic oligonucleotide
  Antisense strand to SEQ ID NO: 992890
uuuacgcugcacaagguac

SEQ ID NO: 992892 - RNA, 19 nt, Artificial Sequence
  Description of Artificial Sequence: Synthetic oligonucleotide
  Sense strand starting at position 3013 of SEQ ID NO: 914291
guaaaucauguugguuaaa

SEQ ID NO: 992893 - RNA, 19 nt, Artificial Sequence
  Description of Artificial Sequence: Synthetic oligonucleotide
  Antisense strand to SEQ ID NO: 992892
uuuaaccaacaugauuuac

SEQ ID NO: 992894 - RNA, 19 nt, Artificial Sequence
  Description of Artificial Sequence: Synthetic oligonucleotide
  Sense strand starting at position 3093 of SEQ ID NO: 914291
uuuggaaucgagugcauuu

SEQ ID NO: 992895 - RNA, 19 nt, Artificial Sequence
  Description of Artificial Sequence: Synthetic oligonucleotide
  Antisense strand to SEQ ID NO: 992894
aaaugcacucgauuccaaa

SEQ ID NO: 992896 - RNA, 19 nt, Artificial Sequence
  Description of Artificial Sequence: Synthetic oligonucleotide
  Sense strand starting at position 3221 of SEQ ID NO: 914291
ucuggaaucccuuguuauu

SEQ ID NO: 992897 - RNA, 19 nt, Artificial Sequence
  Description of Artificial Sequence: Synthetic oligonucleotide
  Antisense strand to SEQ ID NO: 992896
aauaacaagggauuccaga

SEQ ID NO: 992898 - RNA, 19 nt, Artificial Sequence
  Description of Artificial Sequence: Synthetic oligonucleotide
  Sense strand starting at position 3257 of SEQ ID NO: 914291
gucaacugugaucacagua

SEQ ID NO: 992899 - RNA, 19 nt, Artificial Sequence
  Description of Artificial Sequence: Synthetic oligonucleotide
  Antisense strand to SEQ ID NO: 992898
uacugugaucacaguugac

SEQ ID NO: 992900 - RNA, 19 nt, Artificial Sequence
  Description of Artificial Sequence: Synthetic oligonucleotide
  Sense strand starting at position 3375 of SEQ ID NO: 914291
guuuguuaacuggaagcua

SEQ ID NO: 992901 - RNA, 19 nt, Artificial Sequence
  Description of Artificial Sequence: Synthetic oligonucleotide
  Antisense strand to SEQ ID NO: 992900
uagcuuccaguuaacaaac

SEQ ID NO: 992902 - RNA, 19 nt, Artificial Sequence
  Description of Artificial Sequence: Synthetic oligonucleotide
  Sense strand starting at position 3550 of SEQ ID NO: 914291
agaguaaauuccucuagua

SEQ ID NO: 992903 - RNA, 19 nt, Artificial Sequence
  Description of Artificial Sequence: Synthetic oligonucleotide
  Antisense strand to SEQ ID NO: 992902
uacuagaggaauuuacucu

SEQ ID NO: 992904 - RNA, 19 nt, Artificial Sequence
  Description of Artificial Sequence: Synthetic oligonucleotide
  Sense strand starting at position 3552 of SEQ ID NO: 914291
aguaaauuccucuaguauu

SEQ ID NO: 992905 - RNA, 19 nt, Artificial Sequence
  Description of Artificial Sequence: Synthetic oligonucleotide
  Antisense strand to SEQ ID NO: 992904
aauacuagaggaauuuacu

SEQ ID NO: 992906 - RNA, 19 nt, Artificial Sequence
  Description of Artificial Sequence: Synthetic oligonucleotide
  Sense strand starting at position 3863 of SEQ ID NO: 914291
gacuuuagacuuggagucu

SEQ ID NO: 992907 - RNA, 19 nt, Artificial Sequence
  Description of Artificial Sequence: Synthetic oligonucleotide
  Antisense strand to SEQ ID NO: 992906
agacuccaagucuaaaguc

SEQ ID NO: 992908 - RNA, 19 nt, Artificial Sequence
  Description of Artificial Sequence: Synthetic oligonucleotide
  Sense strand starting at position 64 of SEQ ID NO: 914292
ucuccuugccuguagcaau

SEQ ID NO: 992909 - RNA, 19 nt, Artificial Sequence
  Description of Artificial Sequence: Synthetic oligonucleotide
  Antisense strand to SEQ ID NO: 992908
auugcuacaggcaaggaga

SEQ ID NO: 992910 - RNA, 19 nt, Artificial Sequence
  Description of Artificial Sequence: Synthetic oligonucleotide
  Sense strand starting at position 89 of SEQ ID NO: 914292
uaccucacacguugugaga

SEQ ID NO: 992911 - RNA, 19 nt, Artificial Sequence
  Description of Artificial Sequence: Synthetic oligonucleotide
  Antisense strand to SEQ ID NO: 992910
ucucacaacgugugaggua

SEQ ID NO: 992912 - RNA, 19 nt, Artificial Sequence
  Description of Artificial Sequence: Synthetic oligonucleotide
  Sense strand starting at position 133 of SEQ ID NO: 914292
ggcccagcacuauggaaua

SEQ ID NO: 992913 - RNA, 19 nt, Artificial Sequence
  Description of Artificial Sequence: Synthetic oligonucleotide
  Antisense strand to SEQ ID NO: 992912
uauuccauagugcugggcc

SEQ ID NO: 992914 - RNA, 19 nt, Artificial Sequence
  Description of Artificial Sequence: Synthetic oligonucleotide
  Sense strand starting at position 145 of SEQ ID NO: 914292
uggaauagucccugucacu

SEQ ID NO: 992915 - RNA, 19 nt, Artificial Sequence
  Description of Artificial Sequence: Synthetic oligonucleotide
  Antisense strand to SEQ ID NO: 992914
agugacagggacuauucca

SEQ ID NO: 992916 - RNA, 19 nt, Artificial Sequence
  Description of Artificial Sequence: Synthetic oligonucleotide
  Sense strand starting at position 156 of SEQ ID NO: 914292
cugucacugccguggauaa

SEQ ID NO: 992917 - RNA, 19 nt, Artificial Sequence
  Description of Artificial Sequence: Synthetic oligonucleotide
  Antisense strand to SEQ ID NO: 992916
uuauccacggcagugacag

SEQ ID NO: 992918 - RNA, 19 nt, Artificial Sequence
  Description of Artificial Sequence: Synthetic oligonucleotide
  Sense strand starting at position 167 of SEQ ID NO: 914292
guggauaacggguaacguu

SEQ ID NO: 992919 - RNA, 19 nt, Artificial Sequence
  Description of Artificial Sequence: Synthetic oligonucleotide
  Antisense strand to SEQ ID NO: 992918
aacguuacccguuauccac

SEQ ID NO: 992920 - RNA, 19 nt, Artificial Sequence
  Description of Artificial Sequence: Synthetic oligonucleotide
  Sense strand starting at position 231 of SEQ ID NO: 914292
ugucucauucuuugagggu

SEQ ID NO: 992921 - RNA, 19 nt, Artificial Sequence
  Description of Artificial Sequence: Synthetic oligonucleotide
  Antisense strand to SEQ ID NO: 992920
acccucaaagaaugagaca

SEQ ID NO: 992922 - RNA, 19 nt, Artificial Sequence
  Description of Artificial Sequence: Synthetic oligonucleotide
  Sense strand starting at position 271 of SEQ ID NO: 914292
ggcacauggcuuugaucaa

SEQ ID NO: 992923 - RNA, 19 nt, Artificial Sequence
  Description of Artificial Sequence: Synthetic oligonucleotide
  Antisense strand to SEQ ID NO: 992922
uugaucaaagccaugugcc

SEQ ID NO: 992924 - RNA, 19 nt, Artificial Sequence
  Description of Artificial Sequence: Synthetic oligonucleotide
  Sense strand starting at position 311 of SEQ ID NO: 914292
cggccaguccugugaguca

SEQ ID NO: 992925 - RNA, 19 nt, Artificial Sequence
  Description of Artificial Sequence: Synthetic oligonucleotide
  Antisense strand to SEQ ID NO: 992924
ugacucacaggacuggccg

SEQ ID NO: 992926 - RNA, 19 nt, Artificial Sequence
  Description of Artificial Sequence: Synthetic oligonucleotide
  Sense strand starting at position 533 of SEQ ID NO: 914292
cugugagcuccagagacua

SEQ ID NO: 992927 - RNA, 19 nt, Artificial Sequence
  Description of Artificial Sequence: Synthetic oligonucleotide
  Antisense strand to SEQ ID NO: 992926
uagucucuggagcucacag

SEQ ID NO: 992928 - RNA, 19 nt, Artificial Sequence
  Description of Artificial Sequence: Synthetic oligonucleotide
  Sense strand starting at position 652 of SEQ ID NO: 914292
aagggagcuucuguccuua

SEQ ID NO: 992929 - RNA, 19 nt, Artificial Sequence
  Description of Artificial Sequence: Synthetic oligonucleotide
  Antisense strand to SEQ ID NO: 992928
uaaggacagaagcucccuu

SEQ ID NO: 992930 - RNA, 19 nt, Artificial Sequence
  Description of Artificial Sequence: Synthetic oligonucleotide
  Sense strand starting at position 739 of SEQ ID NO: 914292
auccucuuccggcaaacuu

SEQ ID NO: 992931 - RNA, 19 nt, Artificial Sequence
  Description of Artificial Sequence: Synthetic oligonucleotide
  Antisense strand to SEQ ID NO: 992930
aaguuugccggaagaggau

SEQ ID NO: 992932 - RNA, 19 nt, Artificial Sequence
  Description of Artificial Sequence: Synthetic oligonucleotide
  Sense strand starting at position 889 of SEQ ID NO: 914292
uuacaugacuggcuuccaa

SEQ ID NO: 992933 - RNA, 19 nt, Artificial Sequence
  Description of Artificial Sequence: Synthetic oligonucleotide
  Antisense strand to SEQ ID NO: 992932
uuggaagccagucauguaa

SEQ ID NO: 992934 - RNA, 19 nt, Artificial Sequence
  Description of Artificial Sequence: Synthetic oligonucleotide
  Sense strand starting at position 967 of SEQ ID NO: 914292
agcaaucuccaaugauuga

SEQ ID NO: 992935 - RNA, 19 nt, Artificial Sequence
  Description of Artificial Sequence: Synthetic oligonucleotide
  Antisense strand to SEQ ID NO: 992934
ucaaucauuggagauugcu

SEQ ID NO: 992936 - RNA, 19 nt, Artificial Sequence
  Description of Artificial Sequence: Synthetic oligonucleotide
  Sense strand starting at position 997 of SEQ ID NO: 914292
uugagaguuucggugccaa

SEQ ID NO: 992937 - RNA, 19 nt, Artificial Sequence
  Description of Artificial Sequence: Synthetic oligonucleotide
  Antisense strand to SEQ ID NO: 992936
uuggcaccgaaacucucaa

SEQ ID NO: 992938 - RNA, 19 nt, Artificial Sequence
  Description of Artificial Sequence: Synthetic oligonucleotide
  Sense strand starting at position 1047 of SEQ ID NO: 914292
caauaugcguuucuggcaa

SEQ ID NO: 992939 - RNA, 19 nt, Artificial Sequence
  Description of Artificial Sequence: Synthetic oligonucleotide
  Antisense strand to SEQ ID NO: 992938
uugccagaaacgcauauug

SEQ ID NO: 992940 - RNA, 19 nt, Artificial Sequence
  Description of Artificial Sequence: Synthetic oligonucleotide
  Sense strand starting at position 1994 of SEQ ID NO: 914292
ccgccuuugccuuaaagau

SEQ ID NO: 992941 - RNA, 19 nt, Artificial Sequence
  Description of Artificial Sequence: Synthetic oligonucleotide
  Antisense strand to SEQ ID NO: 992940
aucuuuaaggcaaaggcgg

SEQ ID NO: 992942 - RNA, 19 nt, Artificial Sequence
  Description of Artificial Sequence: Synthetic oligonucleotide
  Sense strand starting at position 2170 of SEQ ID NO: 914292
uuucauaccgggugugaaa

SEQ ID NO: 992943 - RNA, 19 nt, Artificial Sequence
  Description of Artificial Sequence: Synthetic oligonucleotide
  Antisense strand to SEQ ID NO: 992942
uuucacacccgguaugaaa

SEQ ID NO: 992944 - RNA, 19 nt, Artificial Sequence
  Description of Artificial Sequence: Synthetic oligonucleotide
  Sense strand starting at position 2274 of SEQ ID NO: 914292
agugaagcuucugagauug

SEQ ID NO: 992945 - RNA, 19 nt, Artificial Sequence
  Description of Artificial Sequence: Synthetic oligonucleotide
  Antisense strand to SEQ ID NO: 992944
caaucucagaagcuucacu

SEQ ID NO: 992946 - RNA, 19 nt, Artificial Sequence
  Description of Artificial Sequence: Synthetic oligonucleotide
  Sense strand starting at position 2474 of SEQ ID NO: 914292
ccgaguuuacggagugcuu

SEQ ID NO: 992947 - RNA, 19 nt, Artificial Sequence
  Description of Artificial Sequence: Synthetic oligonucleotide
  Antisense strand to SEQ ID NO: 992946
aagcacuccguaaacucgg

SEQ ID NO: 992948 - RNA, 19 nt, Artificial Sequence
  Description of Artificial Sequence: Synthetic oligonucleotide
  Sense strand starting at position 2532 of SEQ ID NO: 914292
gggcgugaguguguaucau

SEQ ID NO: 992949 - RNA, 19 nt, Artificial Sequence
  Description of Artificial Sequence: Synthetic oligonucleotide
  Antisense strand to SEQ ID NO: 992948
augauacacacucacgccc

SEQ ID NO: 992950 - RNA, 19 nt, Artificial Sequence
  Description of Artificial Sequence: Synthetic oligonucleotide
  Sense strand starting at position 2534 of SEQ ID NO: 914292
gcgugaguguguaucaucu

SEQ ID NO: 992951 - RNA, 19 nt, Artificial Sequence
  Description of Artificial Sequence: Synthetic oligonucleotide
  Antisense strand to SEQ ID NO: 992950
agaugauacacacucacgc

SEQ ID NO: 992952 - RNA, 19 nt, Artificial Sequence
  Description of Artificial Sequence: Synthetic oligonucleotide
  Sense strand starting at position 2538 of SEQ ID NO: 914292
gaguguguaucaucucauu

SEQ ID NO: 992953 - RNA, 19 nt, Artificial Sequence
  Description of Artificial Sequence: Synthetic oligonucleotide
  Antisense strand to SEQ ID NO: 992952
aaugagaugauacacacuc

SEQ ID NO: 992954 - RNA, 19 nt, Artificial Sequence
  Description of Artificial Sequence: Synthetic oligonucleotide
  Sense strand starting at position 2904 of SEQ ID NO: 914292
ccucucacauccuaugagu

SEQ ID NO: 992955 - RNA, 19 nt, Artificial Sequence
  Description of Artificial Sequence: Synthetic oligonucleotide
  Antisense strand to SEQ ID NO: 992954
acucauaggaugugagagg

SEQ ID NO: 992956 - RNA, 19 nt, Artificial Sequence
  Description of Artificial Sequence: Synthetic oligonucleotide
  Sense strand starting at position 2915 of SEQ ID NO: 914292
cuaugaguucuucacggug

SEQ ID NO: 992957 - RNA, 19 nt, Artificial Sequence
  Description of Artificial Sequence: Synthetic oligonucleotide
  Antisense strand to SEQ ID NO: 992956
caccgugaagaacucauag

SEQ ID NO: 992958 - RNA, 19 nt, Artificial Sequence
  Description of Artificial Sequence: Synthetic oligonucleotide
  Sense strand starting at position 2920 of SEQ ID NO: 914292
aguucuucacggugugcau

SEQ ID NO: 992959 - RNA, 19 nt, Artificial Sequence
  Description of Artificial Sequence: Synthetic oligonucleotide
  Antisense strand to SEQ ID NO: 992958
augcacaccgugaagaacu

SEQ ID NO: 992960 - RNA, 19 nt, Artificial Sequence
  Description of Artificial Sequence: Synthetic oligonucleotide
  Sense strand starting at position 3008 of SEQ ID NO: 914292
ggccuuccugucuauccaa

SEQ ID NO: 992961 - RNA, 19 nt, Artificial Sequence
  Description of Artificial Sequence: Synthetic oligonucleotide
  Antisense strand to SEQ ID NO: 992960
uuggauagacaggaaggcc

SEQ ID NO: 992962 - RNA, 19 nt, Artificial Sequence
  Description of Artificial Sequence: Synthetic oligonucleotide
  Sense strand starting at position 3101 of SEQ ID NO: 914292
acagccgaugcucaauaau

SEQ ID NO: 992963 - RNA, 19 nt, Artificial Sequence
  Description of Artificial Sequence: Synthetic oligonucleotide
  Antisense strand to SEQ ID NO: 992962
auuauugagcaucggcugu

SEQ ID NO: 992964 - RNA, 19 nt, Artificial Sequence
  Description of Artificial Sequence: Synthetic oligonucleotide
  Sense strand starting at position 3352 of SEQ ID NO: 914292
ugccuucucaugggaguuu

SEQ ID NO: 992965 - RNA, 19 nt, Artificial Sequence
  Description of Artificial Sequence: Synthetic oligonucleotide
  Antisense strand to SEQ ID NO: 992964
aaacucccaugagaaggca

SEQ ID NO: 992966 - RNA, 19 nt, Artificial Sequence
  Description of Artificial Sequence: Synthetic oligonucleotide
  Sense strand starting at position 3417 of SEQ ID NO: 914292
cuacuaaugucaucuuguc

SEQ ID NO: 992967 - RNA, 19 nt, Artificial Sequence
  Description of Artificial Sequence: Synthetic oligonucleotide
  Antisense strand to SEQ ID NO: 992966
gacaagaugacauuaguag

SEQ ID NO: 992968 - RNA, 19 nt, Artificial Sequence
  Description of Artificial Sequence: Synthetic oligonucleotide
  Sense strand starting at position 3480 of SEQ ID NO: 914292
ggcacaagucugugacuuc

SEQ ID NO: 992969 - RNA, 19 nt, Artificial Sequence
  Description of Artificial Sequence: Synthetic oligonucleotide
  Antisense strand to SEQ ID NO: 992968
gaagucacagacuugugcc

SEQ ID NO: 992970 - RNA, 19 nt, Artificial Sequence
  Description of Artificial Sequence: Synthetic oligonucleotide
  Sense strand starting at position 3487 of SEQ ID NO: 914292
gucugugacuuccuugaac

SEQ ID NO: 992971 - RNA, 19 nt, Artificial Sequence
  Description of Artificial Sequence: Synthetic oligonucleotide
  Antisense strand to SEQ ID NO: 992970
guucaaggaagucacagac

SEQ ID NO: 992972 - RNA, 19 nt, Artificial Sequence
  Description of Artificial Sequence: Synthetic oligonucleotide
  Sense strand starting at position 3489 of SEQ ID NO: 914292
cugugacuuccuugaacuu

SEQ ID NO: 992973 - RNA, 19 nt, Artificial Sequence
  Description of Artificial Sequence: Synthetic oligonucleotide
  Antisense strand to SEQ ID NO: 992972
aaguucaaggaagucacag

SEQ ID NO: 992974 - RNA, 19 nt, Artificial Sequence
  Description of Artificial Sequence: Synthetic oligonucleotide
  Sense strand starting at position 3699 of SEQ ID NO: 914292
gggagaaucccacacgcau

SEQ ID NO: 992975 - RNA, 19 nt, Artificial Sequence
  Description of Artificial Sequence: Synthetic oligonucleotide
  Antisense strand to SEQ ID NO: 992974
augcgugugggauucuccc

SEQ ID NO: 992976 - RNA, 19 nt, Artificial Sequence
  Description of Artificial Sequence: Synthetic oligonucleotide
  Sense strand starting at position 3742 of SEQ ID NO: 914292
ccacuuaucuuuguuggua

SEQ ID NO: 992977 - RNA, 19 nt, Artificial Sequence
  Description of Artificial Sequence: Synthetic oligonucleotide
  Antisense strand to SEQ ID NO: 992976
uaccaacaaagauaagugg

SEQ ID NO: 992978 - RNA, 19 nt, Artificial Sequence
  Description of Artificial Sequence: Synthetic oligonucleotide
  Sense strand starting at position 3746 of SEQ ID NO: 914292
uuaucuuuguugguaaaca

SEQ ID NO: 992979 - RNA, 19 nt, Artificial Sequence
  Description of Artificial Sequence: Synthetic oligonucleotide
  Antisense strand to SEQ ID NO: 992978
uguuuaccaacaaagauaa

SEQ ID NO: 992980 - RNA, 19 nt, Artificial Sequence
  Description of Artificial Sequence: Synthetic oligonucleotide
  Sense strand starting at position 3765 of SEQ ID NO: 914292
accaacauuguguaauacu

SEQ ID NO: 992981 - RNA, 19 nt, Artificial Sequence
  Description of Artificial Sequence: Synthetic oligonucleotide
  Antisense strand to SEQ ID NO: 992980
aguauuacacaauguuggu

SEQ ID NO: 992982 - RNA, 19 nt, Artificial Sequence
  Description of Artificial Sequence: Synthetic oligonucleotide
  Sense strand starting at position 3798 of SEQ ID NO: 914292
ucaaauuuguguucgagug

SEQ ID NO: 992983 - RNA, 19 nt, Artificial Sequence
  Description of Artificial Sequence: Synthetic oligonucleotide
  Antisense strand to SEQ ID NO: 992982
cacucgaacacaaauuuga

SEQ ID NO: 992984 - RNA, 19 nt, Artificial Sequence
  Description of Artificial Sequence: Synthetic oligonucleotide
  Sense strand starting at position 3916 of SEQ ID NO: 914292
agguuugggaagugacauu

SEQ ID NO: 992985 - RNA, 19 nt, Artificial Sequence
  Description of Artificial Sequence: Synthetic oligonucleotide
  Antisense strand to SEQ ID NO: 992984
aaugucacuucccaaaccu

SEQ ID NO: 992986 - RNA, 19 nt, Artificial Sequence
  Description of Artificial Sequence: Synthetic oligonucleotide
  Sense strand starting at position 3926 of SEQ ID NO: 914292
agugacauuucuggccuga

SEQ ID NO: 992987 - RNA, 19 nt, Artificial Sequence
  Description of Artificial Sequence: Synthetic oligonucleotide
  Antisense strand to SEQ ID NO: 992986
ucaggccagaaaugucacu

SEQ ID NO: 992988 - RNA, 19 nt, Artificial Sequence
  Description of Artificial Sequence: Synthetic oligonucleotide
  Sense strand starting at position 150 of SEQ ID NO: 914293
augagucacccauagccaa

SEQ ID NO: 992989 - RNA, 19 nt, Artificial Sequence
  Description of Artificial Sequence: Synthetic oligonucleotide
  Antisense strand to SEQ ID NO: 992988
uuggcuaugggugacucau

SEQ ID NO: 992990 - RNA, 19 nt, Artificial Sequence
  Description of Artificial Sequence: Synthetic oligonucleotide
  Sense strand starting at position 169 of SEQ ID NO: 914293
ugcaucaguggagguauuu

SEQ ID NO: 992991 - RNA, 19 nt, Artificial Sequence
  Description of Artificial Sequence: Synthetic oligonucleotide
  Antisense strand to SEQ ID NO: 992990
aaauaccuccacugaugca

SEQ ID NO: 992992 - RNA, 19 nt, Artificial Sequence
  Description of Artificial Sequence: Synthetic oligonucleotide
  Sense strand starting at position 182 of SEQ ID NO: 914293
guauuuauucugugaggcu

SEQ ID NO: 992993 - RNA, 19 nt, Artificial Sequence
  Description of Artificial Sequence: Synthetic oligonucleotide
  Antisense strand to SEQ ID NO: 992992
agccucacagaauaaauac

SEQ ID NO: 992994 - RNA, 19 nt, Artificial Sequence
  Description of Artificial Sequence: Synthetic oligonucleotide
  Sense strand starting at position 319 of SEQ ID NO: 914293
gaaguagaagugcauacua

SEQ ID NO: 992995 - RNA, 19 nt, Artificial Sequence
  Description of Artificial Sequence: Synthetic oligonucleotide
  Antisense strand to SEQ ID NO: 992994
uaguaugcacuucuacuuc

SEQ ID NO: 992996 - RNA, 19 nt, Artificial Sequence
  Description of Artificial Sequence: Synthetic oligonucleotide
  Sense strand starting at position 326 of SEQ ID NO: 914293
aagugcauacuaggugaaa

SEQ ID NO: 992997 - RNA, 19 nt, Artificial Sequence
  Description of Artificial Sequence: Synthetic oligonucleotide
  Antisense strand to SEQ ID NO: 992996
uuucaccuaguaugcacuu

SEQ ID NO: 992998 - RNA, 19 nt, Artificial Sequence
  Description of Artificial Sequence: Synthetic oligonucleotide
  Sense strand starting at position 327 of SEQ ID NO: 914293
agugcauacuaggugaaau

SEQ ID NO: 992999 - RNA, 19 nt, Artificial Sequence
  Description of Artificial Sequence: Synthetic oligonucleotide
  Antisense strand to SEQ ID NO: 992998
auuucaccuaguaugcacu

SEQ ID NO: 993000 - RNA, 19 nt, Artificial Sequence
  Description of Artificial Sequence: Synthetic oligonucleotide
  Sense strand starting at position 407 of SEQ ID NO: 914293
uagagaacuugggcuugaa

SEQ ID NO: 993001 - RNA, 19 nt, Artificial Sequence
  Description of Artificial Sequence: Synthetic oligonucleotide
  Antisense strand to SEQ ID NO: 993000
uucaagcccaaguucucua

SEQ ID NO: 993002 - RNA, 19 nt, Artificial Sequence
  Description of Artificial Sequence: Synthetic oligonucleotide
  Sense strand starting at position 977 of SEQ ID NO: 914293
uaaggcacucuaugguuaa

SEQ ID NO: 993003 - RNA, 19 nt, Artificial Sequence
  Description of Artificial Sequence: Synthetic oligonucleotide
  Antisense strand to SEQ ID NO: 993002
uuaaccauagagugccuua

SEQ ID NO: 993004 - RNA, 19 nt, Artificial Sequence
  Description of Artificial Sequence: Synthetic oligonucleotide
  Sense strand starting at position 1377 of SEQ ID NO: 914293
ucuuaugauuguguaaaug

SEQ ID NO: 993005 - RNA, 19 nt, Artificial Sequence
  Description of Artificial Sequence: Synthetic oligonucleotide
  Antisense strand to SEQ ID NO: 993004
cauuuacacaaucauaaga

SEQ ID NO: 993006 - RNA, 19 nt, Artificial Sequence
  Description of Artificial Sequence: Synthetic oligonucleotide
  Sense strand starting at position 1393 of SEQ ID NO: 914293
augcgucucaaggaguaga

SEQ ID NO: 993007 - RNA, 19 nt, Artificial Sequence
  Description of Artificial Sequence: Synthetic oligonucleotide
  Antisense strand to SEQ ID NO: 993006
ucuacuccuugagacgcau

SEQ ID NO: 993008 - RNA, 19 nt, Artificial Sequence
  Description of Artificial Sequence: Synthetic oligonucleotide
  Sense strand starting at position 1419 of SEQ ID NO: 914293
uugugaagauuacucaaca

SEQ ID NO: 993009 - RNA, 19 nt, Artificial Sequence
  Description of Artificial Sequence: Synthetic oligonucleotide
  Antisense strand to SEQ ID NO: 993008
uguugaguaaucuucacaa

SEQ ID NO: 993010 - RNA, 19 nt, Artificial Sequence
  Description of Artificial Sequence: Synthetic oligonucleotide
  Sense strand starting at position 1420 of SEQ ID NO: 914293
ugugaagauuacucaacau

SEQ ID NO: 993011 - RNA, 19 nt, Artificial Sequence
  Description of Artificial Sequence: Synthetic oligonucleotide
  Antisense strand to SEQ ID NO: 993010
auguugaguaaucuucaca

SEQ ID NO: 993012 - RNA, 19 nt, Artificial Sequence
  Description of Artificial Sequence: Synthetic oligonucleotide
  Sense strand starting at position 1456 of SEQ ID NO: 914293
gcagauauuguugaacauu

SEQ ID NO: 993013 - RNA, 19 nt, Artificial Sequence
  Description of Artificial Sequence: Synthetic oligonucleotide
  Antisense strand to SEQ ID NO: 993012
aauguucaacaauaucugc

SEQ ID NO: 993014 - RNA, 19 nt, Artificial Sequence
  Description of Artificial Sequence: Synthetic oligonucleotide
  Sense strand starting at position 2182 of SEQ ID NO: 914293
ggagauauaaaucggagca

SEQ ID NO: 993015 - RNA, 19 nt, Artificial Sequence
  Description of Artificial Sequence: Synthetic oligonucleotide
  Antisense strand to SEQ ID NO: 993014
ugcuccgauuuauaucucc

SEQ ID NO: 993016 - RNA, 19 nt, Artificial Sequence
  Description of Artificial Sequence: Synthetic oligonucleotide
  Sense strand starting at position 2195 of SEQ ID NO: 914293
ggagcaaaccucuagagcu

SEQ ID NO: 993017 - RNA, 19 nt, Artificial Sequence
  Description of Artificial Sequence: Synthetic oligonucleotide
  Antisense strand to SEQ ID NO: 993016
agcucuagagguuugcucc

SEQ ID NO: 993018 - RNA, 19 nt, Artificial Sequence
  Description of Artificial Sequence: Synthetic oligonucleotide
  Sense strand starting at position 2271 of SEQ ID NO: 914293
guagguaaacccugggacu

SEQ ID NO: 993019 - RNA, 19 nt, Artificial Sequence
  Description of Artificial Sequence: Synthetic oligonucleotide
  Antisense strand to SEQ ID NO: 993018
agucccaggguuuaccuac

SEQ ID NO: 993020 - RNA, 19 nt, Artificial Sequence
  Description of Artificial Sequence: Synthetic oligonucleotide
  Sense strand starting at position 2272 of SEQ ID NO: 914293
uagguaaacccugggacuu

SEQ ID NO: 993021 - RNA, 19 nt, Artificial Sequence
  Description of Artificial Sequence: Synthetic oligonucleotide
  Antisense strand to SEQ ID NO: 993020
aagucccaggguuuaccua

SEQ ID NO: 993022 - RNA, 19 nt, Artificial Sequence
  Description of Artificial Sequence: Synthetic oligonucleotide
  Sense strand starting at position 2273 of SEQ ID NO: 914293
agguaaacccugggacuuu

SEQ ID NO: 993023 - RNA, 19 nt, Artificial Sequence
  Description of Artificial Sequence: Synthetic oligonucleotide
  Antisense strand to SEQ ID NO: 993022
aaagucccaggguuuaccu

SEQ ID NO: 993024 - RNA, 19 nt, Artificial Sequence
  Description of Artificial Sequence: Synthetic oligonucleotide
  Sense strand starting at position 2310 of SEQ ID NO: 914293
gucugugcucugagagggu

SEQ ID NO: 993025 - RNA, 19 nt, Artificial Sequence
  Description of Artificial Sequence: Synthetic oligonucleotide
  Antisense strand to SEQ ID NO: 993024
acccucucagagcacagac

SEQ ID NO: 993026 - RNA, 19 nt, Artificial Sequence
  Description of Artificial Sequence: Synthetic oligonucleotide
  Sense strand starting at position 2602 of SEQ ID NO: 914293
agcccuguaauguagguaa

SEQ ID NO: 993027 - RNA, 19 nt, Artificial Sequence
  Description of Artificial Sequence: Synthetic oligonucleotide
  Antisense strand to SEQ ID NO: 993026
uuaccuacauuacagggcu

SEQ ID NO: 993028 - RNA, 19 nt, Artificial Sequence
  Description of Artificial Sequence: Synthetic oligonucleotide
  Sense strand starting at position 2613 of SEQ ID NO: 914293
guagguaaacuaugauucu

SEQ ID NO: 993029 - RNA, 19 nt, Artificial Sequence
  Description of Artificial Sequence: Synthetic oligonucleotide
  Antisense strand to SEQ ID NO: 993028
agaaucauaguuuaccuac

SEQ ID NO: 993030 - RNA, 19 nt, Artificial Sequence
  Description of Artificial Sequence: Synthetic oligonucleotide
  Sense strand starting at position 2616 of SEQ ID NO: 914293
gguaaacuaugauucuaau

SEQ ID NO: 993031 - RNA, 19 nt, Artificial Sequence
  Description of Artificial Sequence: Synthetic oligonucleotide
  Antisense strand to SEQ ID NO: 993030
auuagaaucauaguuuacc

SEQ ID NO: 993032 - RNA, 19 nt, Artificial Sequence
  Description of Artificial Sequence: Synthetic oligonucleotide
  Sense strand starting at position 3135 of SEQ ID NO: 914293
uaaguucuuccuggaagau

SEQ ID NO: 993033 - RNA, 19 nt, Artificial Sequence
  Description of Artificial Sequence: Synthetic oligonucleotide
  Antisense strand to SEQ ID NO: 993032
aucuuccaggaagaacuua

SEQ ID NO: 993034 - RNA, 19 nt, Artificial Sequence
  Description of Artificial Sequence: Synthetic oligonucleotide
  Sense strand starting at position 3141 of SEQ ID NO: 914293
cuuccuggaagauguaaga

SEQ ID NO: 993035 - RNA, 19 nt, Artificial Sequence
  Description of Artificial Sequence: Synthetic oligonucleotide
  Antisense strand to SEQ ID NO: 993034
ucuuacaucuuccaggaag

SEQ ID NO: 993036 - RNA, 19 nt, Artificial Sequence
  Description of Artificial Sequence: Synthetic oligonucleotide
  Sense strand starting at position 3332 of SEQ ID NO: 914293
ucaucuguggugcaugaua

SEQ ID NO: 993037 - RNA, 19 nt, Artificial Sequence
  Description of Artificial Sequence: Synthetic oligonucleotide
  Antisense strand to SEQ ID NO: 993036
uaucaugcaccacagauga

SEQ ID NO: 993038 - RNA, 19 nt, Artificial Sequence
  Description of Artificial Sequence: Synthetic oligonucleotide
  Sense strand starting at position 3364 of SEQ ID NO: 914293
ggaauauagcuuugaacaa

SEQ ID NO: 993039 - RNA, 19 nt, Artificial Sequence
  Description of Artificial Sequence: Synthetic oligonucleotide
  Antisense strand to SEQ ID NO: 993038
uuguucaaagcuauauucc

SEQ ID NO: 993040 - RNA, 19 nt, Artificial Sequence
  Description of Artificial Sequence: Synthetic oligonucleotide
  Sense strand starting at position 3421 of SEQ ID NO: 914293
cccugaaacuaagcuguaa

SEQ ID NO: 993041 - RNA, 19 nt, Artificial Sequence
  Description of Artificial Sequence: Synthetic oligonucleotide
  Antisense strand to SEQ ID NO: 993040
uuacagcuuaguuucaggg

SEQ ID NO: 993042 - RNA, 19 nt, Artificial Sequence
  Description of Artificial Sequence: Synthetic oligonucleotide
  Sense strand starting at position 3508 of SEQ ID NO: 914293
agagucucucuugauuguu

SEQ ID NO: 993043 - RNA, 19 nt, Artificial Sequence
  Description of Artificial Sequence: Synthetic oligonucleotide
  Antisense strand to SEQ ID NO: 993042
aacaaucaagagagacucu

SEQ ID NO: 993044 - RNA, 19 nt, Artificial Sequence
  Description of Artificial Sequence: Synthetic oligonucleotide
  Sense strand starting at position 3536 of SEQ ID NO: 914293
gucuuaaagucaucugaag

SEQ ID NO: 993045 - RNA, 19 nt, Artificial Sequence
  Description of Artificial Sequence: Synthetic oligonucleotide
  Antisense strand to SEQ ID NO: 993044
cuucagaugacuuuaagac

SEQ ID NO: 993046 - RNA, 19 nt, Artificial Sequence
  Description of Artificial Sequence: Synthetic oligonucleotide
  Sense strand starting at position 3566 of SEQ ID NO: 914293
auuggauucuacucucagu

SEQ ID NO: 993047 - RNA, 19 nt, Artificial Sequence
  Description of Artificial Sequence: Synthetic oligonucleotide
  Antisense strand to SEQ ID NO: 993046
acugagaguagaauccaau

SEQ ID NO: 993048 - RNA, 19 nt, Artificial Sequence
  Description of Artificial Sequence: Synthetic oligonucleotide
  Sense strand starting at position 3624 of SEQ ID NO: 914293
ucauaauggucuuuccaga

SEQ ID NO: 993049 - RNA, 19 nt, Artificial Sequence
  Description of Artificial Sequence: Synthetic oligonucleotide
  Antisense strand to SEQ ID NO: 993048
ucuggaaagaccauuauga

SEQ ID NO: 993050 - RNA, 19 nt, Artificial Sequence
  Description of Artificial Sequence: Synthetic oligonucleotide
  Sense strand starting at position 3659 of SEQ ID NO: 914293
ucaauaagagcucaguaug

SEQ ID NO: 993051 - RNA, 19 nt, Artificial Sequence
  Description of Artificial Sequence: Synthetic oligonucleotide
  Antisense strand to SEQ ID NO: 993050
cauacugagcucuuauuga

SEQ ID NO: 993052 - RNA, 19 nt, Artificial Sequence
  Description of Artificial Sequence: Synthetic oligonucleotide
  Sense strand starting at position 3670 of SEQ ID NO: 914293
ucaguaugcaggcauugaa

SEQ ID NO: 993053 - RNA, 19 nt, Artificial Sequence
  Description of Artificial Sequence: Synthetic oligonucleotide
  Antisense strand to SEQ ID NO: 993052
uucaaugccugcauacuga

SEQ ID NO: 993054 - RNA, 19 nt, Artificial Sequence
  Description of Artificial Sequence: Synthetic oligonucleotide
  Sense strand starting at position 3673 of SEQ ID NO: 914293
guaugcaggcauugaagaa

SEQ ID NO: 993055 - RNA, 19 nt, Artificial Sequence
  Description of Artificial Sequence: Synthetic oligonucleotide
  Antisense strand to SEQ ID NO: 993054
uucuucaaugccugcauac

SEQ ID NO: 993056 - RNA, 19 nt, Artificial Sequence
  Description of Artificial Sequence: Synthetic oligonucleotide
  Sense strand starting at position 3707 of SEQ ID NO: 914293
caaugaacucagugugagu

SEQ ID NO: 993057 - RNA, 19 nt, Artificial Sequence
  Description of Artificial Sequence: Synthetic oligonucleotide
  Antisense strand to SEQ ID NO: 993056
acucacacugaguucauug

SEQ ID NO: 993058 - RNA, 19 nt, Artificial Sequence
  Description of Artificial Sequence: Synthetic oligonucleotide
  Sense strand starting at position 3827 of SEQ ID NO: 914293
aaaugacuugcucgaggau

SEQ ID NO: 993059 - RNA, 19 nt, Artificial Sequence
  Description of Artificial Sequence: Synthetic oligonucleotide
  Antisense strand to SEQ ID NO: 993058
auccucgagcaagucauuu

SEQ ID NO: 993060 - RNA, 19 nt, Artificial Sequence
  Description of Artificial Sequence: Synthetic oligonucleotide
  Sense strand starting at position 3895 of SEQ ID NO: 914293
gcuuacagaucauucugau

SEQ ID NO: 993061 - RNA, 19 nt, Artificial Sequence
  Description of Artificial Sequence: Synthetic oligonucleotide
  Antisense strand to SEQ ID NO: 993060
aucagaaugaucuguaagc

SEQ ID NO: 993062 - RNA, 19 nt, Artificial Sequence
  Description of Artificial Sequence: Synthetic oligonucleotide
  Sense strand starting at position 3944 of SEQ ID NO: 914293
caauucuccuacgugagga

SEQ ID NO: 993063 - RNA, 19 nt, Artificial Sequence
  Description of Artificial Sequence: Synthetic oligonucleotide
  Antisense strand to SEQ ID NO: 993062
uccucacguaggagaauug

SEQ ID NO: 993064 - RNA, 19 nt, Artificial Sequence
  Description of Artificial Sequence: Synthetic oligonucleotide
  Sense strand starting at position 3946 of SEQ ID NO: 914293
auucuccuacgugaggauu

SEQ ID NO: 993065 - RNA, 19 nt, Artificial Sequence
  Description of Artificial Sequence: Synthetic oligonucleotide
  Antisense strand to SEQ ID NO: 993064
aauccucacguaggagaau

SEQ ID NO: 993066 - RNA, 19 nt, Artificial Sequence
  Description of Artificial Sequence: Synthetic oligonucleotide
  Sense strand starting at position 3949 of SEQ ID NO: 914293
cuccuacgugaggauuaga

SEQ ID NO: 993067 - RNA, 19 nt, Artificial Sequence
  Description of Artificial Sequence: Synthetic oligonucleotide
  Antisense strand to SEQ ID NO: 993066
ucuaauccucacguaggag

SEQ ID NO: 993068 - RNA, 19 nt, Artificial Sequence
  Description of Artificial Sequence: Synthetic oligonucleotide
  Sense strand starting at position 80 of SEQ ID NO: 914294
uaacaaguguuagugagua

SEQ ID NO: 993069 - RNA, 19 nt, Artificial Sequence
  Description of Artificial Sequence: Synthetic oligonucleotide
  Antisense strand to SEQ ID NO: 993068
uacucacuaacacuuguua

SEQ ID NO: 993070 - RNA, 19 nt, Artificial Sequence
  Description of Artificial Sequence: Synthetic oligonucleotide
  Sense strand starting at position 82 of SEQ ID NO: 914294
acaaguguuagugaguaug

SEQ ID NO: 993071 - RNA, 19 nt, Artificial Sequence
  Description of Artificial Sequence: Synthetic oligonucleotide
  Antisense strand to SEQ ID NO: 993070
cauacucacuaacacuugu

SEQ ID NO: 993072 - RNA, 19 nt, Artificial Sequence
  Description of Artificial Sequence: Synthetic oligonucleotide
  Sense strand starting at position 84 of SEQ ID NO: 914294
aaguguuagugaguaugua

SEQ ID NO: 993073 - RNA, 19 nt, Artificial Sequence
  Description of Artificial Sequence: Synthetic oligonucleotide
  Antisense strand to SEQ ID NO: 993072
uacauacucacuaacacuu

SEQ ID NO: 993074 - RNA, 19 nt, Artificial Sequence
  Description of Artificial Sequence: Synthetic oligonucleotide
  Sense strand starting at position 85 of SEQ ID NO: 914294
aguguuagugaguauguac

SEQ ID NO: 993075 - RNA, 19 nt, Artificial Sequence
  Description of Artificial Sequence: Synthetic oligonucleotide
  Antisense strand to SEQ ID NO: 993074
guacauacucacuaacacu

SEQ ID NO: 993076 - RNA, 19 nt, Artificial Sequence
  Description of Artificial Sequence: Synthetic oligonucleotide
  Sense strand starting at position 88 of SEQ ID NO: 914294
guuagugaguauguacaga

SEQ ID NO: 993077 - RNA, 19 nt, Artificial Sequence
  Description of Artificial Sequence: Synthetic oligonucleotide
  Antisense strand to SEQ ID NO: 993076
ucuguacauacucacuaac

SEQ ID NO: 993078 - RNA, 19 nt, Artificial Sequence
  Description of Artificial Sequence: Synthetic oligonucleotide
  Sense strand starting at position 224 of SEQ ID NO: 914294
cuagauauauacccgagga

SEQ ID NO: 993079 - RNA, 19 nt, Artificial Sequence
  Description of Artificial Sequence: Synthetic oligonucleotide
  Antisense strand to SEQ ID NO: 993078
uccucggguauauaucuag

SEQ ID NO: 993080 - RNA, 19 nt, Artificial Sequence
  Description of Artificial Sequence: Synthetic oligonucleotide
  Sense strand starting at position 348 of SEQ ID NO: 914294
aauggauagguaugcuaua

SEQ ID NO: 993081 - RNA, 19 nt, Artificial Sequence
  Description of Artificial Sequence: Synthetic oligonucleotide
  Antisense strand to SEQ ID NO: 993080
uauagcauaccuauccauu

SEQ ID NO: 993082 - RNA, 19 nt, Artificial Sequence
  Description of Artificial Sequence: Synthetic oligonucleotide
  Sense strand starting at position 349 of SEQ ID NO: 914294
auggauagguaugcuauau

SEQ ID NO: 993083 - RNA, 19 nt, Artificial Sequence
  Description of Artificial Sequence: Synthetic oligonucleotide
  Antisense strand to SEQ ID NO: 993082
auauagcauaccuauccau

SEQ ID NO: 993084 - RNA, 19 nt, Artificial Sequence
  Description of Artificial Sequence: Synthetic oligonucleotide
  Sense strand starting at position 353 of SEQ ID NO: 914294
auagguaugcuauaucucu

SEQ ID NO: 993085 - RNA, 19 nt, Artificial Sequence
  Description of Artificial Sequence: Synthetic oligonucleotide
  Antisense strand to SEQ ID NO: 993084
agagauauagcauaccuau

SEQ ID NO: 993086 - RNA, 19 nt, Artificial Sequence
  Description of Artificial Sequence: Synthetic oligonucleotide
  Sense strand starting at position 361 of SEQ ID NO: 914294
gcuauaucucuacaacgga

SEQ ID NO: 993087 - RNA, 19 nt, Artificial Sequence
  Description of Artificial Sequence: Synthetic oligonucleotide
  Antisense strand to SEQ ID NO: 993086
uccguuguagagauauagc

SEQ ID NO: 993088 - RNA, 19 nt, Artificial Sequence
  Description of Artificial Sequence: Synthetic oligonucleotide
  Sense strand starting at position 364 of SEQ ID NO: 914294
auaucucuacaacggaaua

SEQ ID NO: 993089 - RNA, 19 nt, Artificial Sequence
  Description of Artificial Sequence: Synthetic oligonucleotide
  Antisense strand to SEQ ID NO: 993088
uauuccguuguagagauau

SEQ ID NO: 993090 - RNA, 19 nt, Artificial Sequence
  Description of Artificial Sequence: Synthetic oligonucleotide
  Sense strand starting at position 444 of SEQ ID NO: 914294
aacguuaaucuacgagaaa

SEQ ID NO: 993091 - RNA, 19 nt, Artificial Sequence
  Description of Artificial Sequence: Synthetic oligonucleotide
  Antisense strand to SEQ ID NO: 993090
uuucucguagauuaacguu

SEQ ID NO: 993092 - RNA, 19 nt, Artificial Sequence
  Description of Artificial Sequence: Synthetic oligonucleotide
  Sense strand starting at position 502 of SEQ ID NO: 914294
uuauucgaauggucuugaa

SEQ ID NO: 993093 - RNA, 19 nt, Artificial Sequence
  Description of Artificial Sequence: Synthetic oligonucleotide
  Antisense strand to SEQ ID NO: 993092
uucaagaccauucgaauaa

SEQ ID NO: 993094 - RNA, 19 nt, Artificial Sequence
  Description of Artificial Sequence: Synthetic oligonucleotide
  Sense strand starting at position 545 of SEQ ID NO: 914294
agagauuacugguaggaag

SEQ ID NO: 993095 - RNA, 19 nt, Artificial Sequence
  Description of Artificial Sequence: Synthetic oligonucleotide
  Antisense strand to SEQ ID NO: 993094
cuuccuaccaguaaucucu

SEQ ID NO: 993096 - RNA, 19 nt, Artificial Sequence
  Description of Artificial Sequence: Synthetic oligonucleotide
  Sense strand starting at position 572 of SEQ ID NO: 914294
augggaagugacugccuaa

SEQ ID NO: 993097 - RNA, 19 nt, Artificial Sequence
  Description of Artificial Sequence: Synthetic oligonucleotide
  Antisense strand to SEQ ID NO: 993096
uuaggcagucacuucccau

SEQ ID NO: 993098 - RNA, 19 nt, Artificial Sequence
  Description of Artificial Sequence: Synthetic oligonucleotide
  Sense strand starting at position 684 of SEQ ID NO: 914294
acacgucaaauaggugaau

SEQ ID NO: 993099 - RNA, 19 nt, Artificial Sequence
  Description of Artificial Sequence: Synthetic oligonucleotide
  Antisense strand to SEQ ID NO: 993098
auucaccuauuugacgugu

SEQ ID NO: 993100 - RNA, 19 nt, Artificial Sequence
  Description of Artificial Sequence: Synthetic oligonucleotide
  Sense strand starting at position 685 of SEQ ID NO: 914294
cacgucaaauaggugaauu

SEQ ID NO: 993101 - RNA, 19 nt, Artificial Sequence
  Description of Artificial Sequence: Synthetic oligonucleotide
  Antisense strand to SEQ ID NO: 993100
aauucaccuauuugacgug

SEQ ID NO: 993102 - RNA, 19 nt, Artificial Sequence
  Description of Artificial Sequence: Synthetic oligonucleotide
  Sense strand starting at position 783 of SEQ ID NO: 914294
ggugccuuugaagacugaa

SEQ ID NO: 993103 - RNA, 19 nt, Artificial Sequence
  Description of Artificial Sequence: Synthetic oligonucleotide
  Antisense strand to SEQ ID NO: 993102
uucagucuucaaaggcacc

SEQ ID NO: 993104 - RNA, 19 nt, Artificial Sequence
  Description of Artificial Sequence: Synthetic oligonucleotide
  Sense strand starting at position 786 of SEQ ID NO: 914294
gccuuugaagacugaauag

SEQ ID NO: 993105 - RNA, 19 nt, Artificial Sequence
  Description of Artificial Sequence: Synthetic oligonucleotide
  Antisense strand to SEQ ID NO: 993104
cuauucagucuucaaaggc

SEQ ID NO: 993106 - RNA, 19 nt, Artificial Sequence
  Description of Artificial Sequence: Synthetic oligonucleotide
  Sense strand starting at position 967 of SEQ ID NO: 914294
acggaauacagguggugua

SEQ ID NO: 993107 - RNA, 19 nt, Artificial Sequence
  Description of Artificial Sequence: Synthetic oligonucleotide
  Antisense strand to SEQ ID NO: 993106
uacaccaccuguauuccgu

SEQ ID NO: 993108 - RNA, 19 nt, Artificial Sequence
  Description of Artificial Sequence: Synthetic oligonucleotide
  Sense strand starting at position 968 of SEQ ID NO: 914294
cggaauacaggugguguaa

SEQ ID NO: 993109 - RNA, 19 nt, Artificial Sequence
  Description of Artificial Sequence: Synthetic oligonucleotide
  Antisense strand to SEQ ID NO: 993108
uuacaccaccuguauuccg

SEQ ID NO: 993110 - RNA, 19 nt, Artificial Sequence
  Description of Artificial Sequence: Synthetic oligonucleotide
  Sense strand starting at position 981 of SEQ ID NO: 914294
guguaaaggcuuuggcaaa

SEQ ID NO: 993111 - RNA, 19 nt, Artificial Sequence
  Description of Artificial Sequence: Synthetic oligonucleotide
  Antisense strand to SEQ ID NO: 993110
uuugccaaagccuuuacac

SEQ ID NO: 993112 - RNA, 19 nt, Artificial Sequence
  Description of Artificial Sequence: Synthetic oligonucleotide
  Sense strand starting at position 1006 of SEQ ID NO: 914294
auaaauauuucucaacgga

SEQ ID NO: 993113 - RNA, 19 nt, Artificial Sequence
  Description of Artificial Sequence: Synthetic oligonucleotide
  Antisense strand to SEQ ID NO: 993112
uccguugagaaauauuuau

SEQ ID NO: 993114 - RNA, 19 nt, Artificial Sequence
  Description of Artificial Sequence: Synthetic oligonucleotide
  Sense strand starting at position 1156 of SEQ ID NO: 914294
aucucaaagcaugauaagu

SEQ ID NO: 993115 - RNA, 19 nt, Artificial Sequence
  Description of Artificial Sequence: Synthetic oligonucleotide
  Antisense strand to SEQ ID NO: 993114
acuuaucaugcuuugagau

SEQ ID NO: 993116 - RNA, 19 nt, Artificial Sequence
  Description of Artificial Sequence: Synthetic oligonucleotide
  Sense strand starting at position 1214 of SEQ ID NO: 914294
gcuccuuacacgugggaua

SEQ ID NO: 993117 - RNA, 19 nt, Artificial Sequence
  Description of Artificial Sequence: Synthetic oligonucleotide
  Antisense strand to SEQ ID NO: 993116
uaucccacguguaaggagc

SEQ ID NO: 993118 - RNA, 19 nt, Artificial Sequence
  Description of Artificial Sequence: Synthetic oligonucleotide
  Sense strand starting at position 1265 of SEQ ID NO: 914294
gggaaagccuucguuucca

SEQ ID NO: 993119 - RNA, 19 nt, Artificial Sequence
  Description of Artificial Sequence: Synthetic oligonucleotide
  Antisense strand to SEQ ID NO: 993118
uggaaacgaaggcuuuccc

SEQ ID NO: 993120 - RNA, 19 nt, Artificial Sequence
  Description of Artificial Sequence: Synthetic oligonucleotide
  Sense strand starting at position 1371 of SEQ ID NO: 914294
gaggguguuccggaaccau

SEQ ID NO: 993121 - RNA, 19 nt, Artificial Sequence
  Description of Artificial Sequence: Synthetic oligonucleotide
  Antisense strand to SEQ ID NO: 993120
augguuccggaacacccuc

SEQ ID NO: 993122 - RNA, 19 nt, Artificial Sequence
  Description of Artificial Sequence: Synthetic oligonucleotide
  Sense strand starting at position 2601 of SEQ ID NO: 914294
gucccucucccuuaaagga

SEQ ID NO: 993123 - RNA, 19 nt, Artificial Sequence
  Description of Artificial Sequence: Synthetic oligonucleotide
  Antisense strand to SEQ ID NO: 993122
uccuuuaagggagagggac

SEQ ID NO: 993124 - RNA, 19 nt, Artificial Sequence
  Description of Artificial Sequence: Synthetic oligonucleotide
  Sense strand starting at position 2813 of SEQ ID NO: 914294
cccuuaagaguuggauagu

SEQ ID NO: 993125 - RNA, 19 nt, Artificial Sequence
  Description of Artificial Sequence: Synthetic oligonucleotide
  Antisense strand to SEQ ID NO: 993124
acuauccaacucuuaaggg

SEQ ID NO: 993126 - RNA, 19 nt, Artificial Sequence
  Description of Artificial Sequence: Synthetic oligonucleotide
  Sense strand starting at position 2835 of SEQ ID NO: 914294
gggcaaguuucucuaaguu

SEQ ID NO: 993127 - RNA, 19 nt, Artificial Sequence
  Description of Artificial Sequence: Synthetic oligonucleotide
  Antisense strand to SEQ ID NO: 993126
aacuuagagaaacuugccc

SEQ ID NO: 993128 - RNA, 19 nt, Artificial Sequence
  Description of Artificial Sequence: Synthetic oligonucleotide
  Sense strand starting at position 2871 of SEQ ID NO: 914294
aaaggagaaugauaauagu

SEQ ID NO: 993129 - RNA, 19 nt, Artificial Sequence
  Description of Artificial Sequence: Synthetic oligonucleotide
  Antisense strand to SEQ ID NO: 993128
acuauuaucauucuccuuu

SEQ ID NO: 993130 - RNA, 19 nt, Artificial Sequence
  Description of Artificial Sequence: Synthetic oligonucleotide
  Sense strand starting at position 2934 of SEQ ID NO: 914294
gccacagaauguguuaaac

SEQ ID NO: 993131 - RNA, 19 nt, Artificial Sequence
  Description of Artificial Sequence: Synthetic oligonucleotide
  Antisense strand to SEQ ID NO: 993130
guuuaacacauucuguggc

SEQ ID NO: 993132 - RNA, 19 nt, Artificial Sequence
  Description of Artificial Sequence: Synthetic oligonucleotide
  Sense strand starting at position 3010 of SEQ ID NO: 914294
ucaucucagcuggacgaua

SEQ ID NO: 993133 - RNA, 19 nt, Artificial Sequence
  Description of Artificial Sequence: Synthetic oligonucleotide
  Antisense strand to SEQ ID NO: 993132
uaucguccagcugagauga

SEQ ID NO: 993134 - RNA, 19 nt, Artificial Sequence
  Description of Artificial Sequence: Synthetic oligonucleotide
  Sense strand starting at position 3023 of SEQ ID NO: 914294
acgauaucgcuugaaagcu

SEQ ID NO: 993135 - RNA, 19 nt, Artificial Sequence
  Description of Artificial Sequence: Synthetic oligonucleotide
  Antisense strand to SEQ ID NO: 993134
agcuuucaagcgauaucgu

SEQ ID NO: 993136 - RNA, 19 nt, Artificial Sequence
  Description of Artificial Sequence: Synthetic oligonucleotide
  Sense strand starting at position 3176 of SEQ ID NO: 914294
ccagaagauugagacuaca

SEQ ID NO: 993137 - RNA, 19 nt, Artificial Sequence
  Description of Artificial Sequence: Synthetic oligonucleotide
  Antisense strand to SEQ ID NO: 993136
uguagucucaaucuucugg

SEQ ID NO: 993138 - RNA, 19 nt, Artificial Sequence
  Description of Artificial Sequence: Synthetic oligonucleotide
  Sense strand starting at position 3419 of SEQ ID NO: 914294
agcagaaugggucguucua

SEQ ID NO: 993139 - RNA, 19 nt, Artificial Sequence
  Description of Artificial Sequence: Synthetic oligonucleotide
  Antisense strand to SEQ ID NO: 993138
uagaacgacccauucugcu

SEQ ID NO: 993140 - RNA, 19 nt, Artificial Sequence
  Description of Artificial Sequence: Synthetic oligonucleotide
  Sense strand starting at position 3421 of SEQ ID NO: 914294
cagaaugggucguucuacu

SEQ ID NO: 993141 - RNA, 19 nt, Artificial Sequence
  Description of Artificial Sequence: Synthetic oligonucleotide
  Antisense strand to SEQ ID NO: 993140
aguagaacgacccauucug

SEQ ID NO: 993142 - RNA, 19 nt, Artificial Sequence
  Description of Artificial Sequence: Synthetic oligonucleotide
  Sense strand starting at position 3553 of SEQ ID NO: 914294
augaacuaacagugaggua

SEQ ID NO: 993143 - RNA, 19 nt, Artificial Sequence
  Description of Artificial Sequence: Synthetic oligonucleotide
  Antisense strand to SEQ ID NO: 993142
uaccucacuguuaguucau

SEQ ID NO: 993144 - RNA, 19 nt, Artificial Sequence
  Description of Artificial Sequence: Synthetic oligonucleotide
  Sense strand starting at position 3580 of SEQ ID NO: 914294
agcugagagccuugaguga

SEQ ID NO: 993145 - RNA, 19 nt, Artificial Sequence
  Description of Artificial Sequence: Synthetic oligonucleotide
  Antisense strand to SEQ ID NO: 993144
ucacucaaggcucucagcu

SEQ ID NO: 993146 - RNA, 19 nt, Artificial Sequence
  Description of Artificial Sequence: Synthetic oligonucleotide
  Sense strand starting at position 3937 of SEQ ID NO: 914294
auuacaauucccugggcau

SEQ ID NO: 993147 - RNA, 19 nt, Artificial Sequence
  Description of Artificial Sequence: Synthetic oligonucleotide
  Antisense strand to SEQ ID NO: 993146
augcccagggaauuguaau

SEQ ID NO: 993148 - RNA, 19 nt, Artificial Sequence
  Description of Artificial Sequence: Synthetic oligonucleotide
  Sense strand starting at position 31 of SEQ ID NO: 914295
ggcagcauucccgggagaa

SEQ ID NO: 993149 - RNA, 19 nt, Artificial Sequence
  Description of Artificial Sequence: Synthetic oligonucleotide
  Antisense strand to SEQ ID NO: 993148
uucucccgggaaugcugcc

SEQ ID NO: 993150 - RNA, 19 nt, Artificial Sequence
  Description of Artificial Sequence: Synthetic oligonucleotide
  Sense strand starting at position 32 of SEQ ID NO: 914295
gcagcauucccgggagaaa

SEQ ID NO: 993151 - RNA, 19 nt, Artificial Sequence
  Description of Artificial Sequence: Synthetic oligonucleotide
  Antisense strand to SEQ ID NO: 993150
uuucucccgggaaugcugc

SEQ ID NO: 993152 - RNA, 19 nt, Artificial Sequence
  Description of Artificial Sequence: Synthetic oligonucleotide
  Sense strand starting at position 59 of SEQ ID NO: 914295
gugggcacgcccugagaau

SEQ ID NO: 993153 - RNA, 19 nt, Artificial Sequence
  Description of Artificial Sequence: Synthetic oligonucleotide
  Antisense strand to SEQ ID NO: 993152
auucucagggcgugcccac

SEQ ID NO: 993154 - RNA, 19 nt, Artificial Sequence
  Description of Artificial Sequence: Synthetic oligonucleotide
  Sense strand starting at position 71 of SEQ ID NO: 914295
ugagaaucagggugcaguu

SEQ ID NO: 993155 - RNA, 19 nt, Artificial Sequence
  Description of Artificial Sequence: Synthetic oligonucleotide
  Antisense strand to SEQ ID NO: 993154
aacugcacccugauucuca

SEQ ID NO: 993156 - RNA, 19 nt, Artificial Sequence
  Description of Artificial Sequence: Synthetic oligonucleotide
  Sense strand starting at position 160 of SEQ ID NO: 914295
gcuacuacuccuggugacu

SEQ ID NO: 993157 - RNA, 19 nt, Artificial Sequence
  Description of Artificial Sequence: Synthetic oligonucleotide
  Antisense strand to SEQ ID NO: 993156
agucaccaggaguaguagc

SEQ ID NO: 993158 - RNA, 19 nt, Artificial Sequence
  Description of Artificial Sequence: Synthetic oligonucleotide
  Sense strand starting at position 211 of SEQ ID NO: 914295
ggacucaguccuugguacu

SEQ ID NO: 993159 - RNA, 19 nt, Artificial Sequence
  Description of Artificial Sequence: Synthetic oligonucleotide
  Antisense strand to SEQ ID NO: 993158
aguaccaaggacugagucc

SEQ ID NO: 993160 - RNA, 19 nt, Artificial Sequence
  Description of Artificial Sequence: Synthetic oligonucleotide
  Sense strand starting at position 212 of SEQ ID NO: 914295
gacucaguccuugguacuu

SEQ ID NO: 993161 - RNA, 19 nt, Artificial Sequence
  Description of Artificial Sequence: Synthetic oligonucleotide
  Antisense strand to SEQ ID NO: 993160
aaguaccaaggacugaguc

SEQ ID NO: 993162 - RNA, 19 nt, Artificial Sequence
  Description of Artificial Sequence: Synthetic oligonucleotide
  Sense strand starting at position 315 of SEQ ID NO: 914295
cuaggcuucuuggccaaau

SEQ ID NO: 993163 - RNA, 19 nt, Artificial Sequence
  Description of Artificial Sequence: Synthetic oligonucleotide
  Antisense strand to SEQ ID NO: 993162
auuuggccaagaagccuag

SEQ ID NO: 993164 - RNA, 19 nt, Artificial Sequence
  Description of Artificial Sequence: Synthetic oligonucleotide
  Sense strand starting at position 316 of SEQ ID NO: 914295
uaggcuucuuggccaaaug

SEQ ID NO: 993165 - RNA, 19 nt, Artificial Sequence
  Description of Artificial Sequence: Synthetic oligonucleotide
  Antisense strand to SEQ ID NO: 993164
cauuuggccaagaagccua

SEQ ID NO: 993166 - RNA, 19 nt, Artificial Sequence
  Description of Artificial Sequence: Synthetic oligonucleotide
  Sense strand starting at position 1068 of SEQ ID NO: 914295
gggugucagaccuggaugu

SEQ ID NO: 993167 - RNA, 19 nt, Artificial Sequence
  Description of Artificial Sequence: Synthetic oligonucleotide
  Antisense strand to SEQ ID NO: 993166
acauccaggucugacaccc

SEQ ID NO: 993168 - RNA, 19 nt, Artificial Sequence
  Description of Artificial Sequence: Synthetic oligonucleotide
  Sense strand starting at position 1168 of SEQ ID NO: 914295
gagggaggcugguuucacu

SEQ ID NO: 993169 - RNA, 19 nt, Artificial Sequence
  Description of Artificial Sequence: Synthetic oligonucleotide
  Antisense strand to SEQ ID NO: 993168
agugaaaccagccucccuc

SEQ ID NO: 993170 - RNA, 19 nt, Artificial Sequence
  Description of Artificial Sequence: Synthetic oligonucleotide
  Sense strand starting at position 1282 of SEQ ID NO: 914295
gagaaaggaugucuuucua

SEQ ID NO: 993171 - RNA, 19 nt, Artificial Sequence
  Description of Artificial Sequence: Synthetic oligonucleotide
  Antisense strand to SEQ ID NO: 993170
uagaaagacauccuuucuc

SEQ ID NO: 993172 - RNA, 19 nt, Artificial Sequence
  Description of Artificial Sequence: Synthetic oligonucleotide
  Sense strand starting at position 1592 of SEQ ID NO: 914295
uguucaggacucugguaga

SEQ ID NO: 993173 - RNA, 19 nt, Artificial Sequence
  Description of Artificial Sequence: Synthetic oligonucleotide
  Antisense strand to SEQ ID NO: 993172
ucuaccagaguccugaaca

SEQ ID NO: 993174 - RNA, 19 nt, Artificial Sequence
  Description of Artificial Sequence: Synthetic oligonucleotide
  Sense strand starting at position 2186 of SEQ ID NO: 914295
ggguuuccacugugagaug

SEQ ID NO: 993175 - RNA, 19 nt, Artificial Sequence
  Description of Artificial Sequence: Synthetic oligonucleotide
  Antisense strand to SEQ ID NO: 993174
caucucacaguggaaaccc

SEQ ID NO: 993176 - RNA, 19 nt, Artificial Sequence
  Description of Artificial Sequence: Synthetic oligonucleotide
  Sense strand starting at position 2198 of SEQ ID NO: 914295
ugagaugggucucaugaca

SEQ ID NO: 993177 - RNA, 19 nt, Artificial Sequence
  Description of Artificial Sequence: Synthetic oligonucleotide
  Antisense strand to SEQ ID NO: 993176
ugucaugagacccaucuca

SEQ ID NO: 993178 - RNA, 19 nt, Artificial Sequence
  Description of Artificial Sequence: Synthetic oligonucleotide
  Sense strand starting at position 2474 of SEQ ID NO: 914295
cagugcugauucccuuaga

SEQ ID NO: 993179 - RNA, 19 nt, Artificial Sequence
  Description of Artificial Sequence: Synthetic oligonucleotide
  Antisense strand to SEQ ID NO: 993178
ucuaagggaaucagcacug

SEQ ID NO: 993180 - RNA, 19 nt, Artificial Sequence
  Description of Artificial Sequence: Synthetic oligonucleotide
  Sense strand starting at position 2477 of SEQ ID NO: 914295
ugcugauucccuuagagga

SEQ ID NO: 993181 - RNA, 19 nt, Artificial Sequence
  Description of Artificial Sequence: Synthetic oligonucleotide
  Antisense strand to SEQ ID NO: 993180
uccucuaagggaaucagca

SEQ ID NO: 993182 - RNA, 19 nt, Artificial Sequence
  Description of Artificial Sequence: Synthetic oligonucleotide
  Sense strand starting at position 2479 of SEQ ID NO: 914295
cugauucccuuagaggaga

SEQ ID NO: 993183 - RNA, 19 nt, Artificial Sequence
  Description of Artificial Sequence: Synthetic oligonucleotide
  Antisense strand to SEQ ID NO: 993182
ucuccucuaagggaaucag

SEQ ID NO: 993184 - RNA, 19 nt, Artificial Sequence
  Description of Artificial Sequence: Synthetic oligonucleotide
  Sense strand starting at position 2831 of SEQ ID NO: 914295
cgaggagucugcuucugaa

SEQ ID NO: 993185 - RNA, 19 nt, Artificial Sequence
  Description of Artificial Sequence: Synthetic oligonucleotide
  Antisense strand to SEQ ID NO: 993184
uucagaagcagacuccucg

SEQ ID NO: 993186 - RNA, 19 nt, Artificial Sequence
  Description of Artificial Sequence: Synthetic oligonucleotide
  Sense strand starting at position 2834 of SEQ ID NO: 914295
ggagucugcuucugaaagc

SEQ ID NO: 993187 - RNA, 19 nt, Artificial Sequence
  Description of Artificial Sequence: Synthetic oligonucleotide
  Antisense strand to SEQ ID NO: 993186
gcuuucagaagcagacucc

SEQ ID NO: 993188 - RNA, 19 nt, Artificial Sequence
  Description of Artificial Sequence: Synthetic oligonucleotide
  Sense strand starting at position 2835 of SEQ ID NO: 914295
gagucugcuucugaaagcu

SEQ ID NO: 993189 - RNA, 19 nt, Artificial Sequence
  Description of Artificial Sequence: Synthetic oligonucleotide
  Antisense strand to SEQ ID NO: 993188
agcuuucagaagcagacuc

SEQ ID NO: 993190 - RNA, 19 nt, Artificial Sequence
  Description of Artificial Sequence: Synthetic oligonucleotide
  Sense strand starting at position 3014 of SEQ ID NO: 914295
guaacauggucccacccau

SEQ ID NO: 993191 - RNA, 19 nt, Artificial Sequence
  Description of Artificial Sequence: Synthetic oligonucleotide
  Antisense strand to SEQ ID NO: 993190
augggugggaccauguuac

SEQ ID NO: 993192 - RNA, 19 nt, Artificial Sequence
  Description of Artificial Sequence: Synthetic oligonucleotide
  Sense strand starting at position 3205 of SEQ ID NO: 914295
agcuguguauuucuccuau

SEQ ID NO: 993193 - RNA, 19 nt, Artificial Sequence
  Description of Artificial Sequence: Synthetic oligonucleotide
  Antisense strand to SEQ ID NO: 993192
auaggagaaauacacagcu

SEQ ID NO: 993194 - RNA, 19 nt, Artificial Sequence
  Description of Artificial Sequence: Synthetic oligonucleotide
  Sense strand starting at position 3209 of SEQ ID NO: 914295
guguauuucuccuauaagu

SEQ ID NO: 993195 - RNA, 19 nt, Artificial Sequence
  Description of Artificial Sequence: Synthetic oligonucleotide
  Antisense strand to SEQ ID NO: 993194
acuuauaggagaaauacac

SEQ ID NO: 993196 - RNA, 19 nt, Artificial Sequence
  Description of Artificial Sequence: Synthetic oligonucleotide
  Sense strand starting at position 3222 of SEQ ID NO: 914295
auaagugaaaucuggaguu

SEQ ID NO: 993197 - RNA, 19 nt, Artificial Sequence
  Description of Artificial Sequence: Synthetic oligonucleotide
  Antisense strand to SEQ ID NO: 993196
aacuccagauuucacuuau

SEQ ID NO: 993198 - RNA, 19 nt, Artificial Sequence
  Description of Artificial Sequence: Synthetic oligonucleotide
  Sense strand starting at position 3547 of SEQ ID NO: 914295
ggaguuggcuaguccugga

SEQ ID NO: 993199 - RNA, 19 nt, Artificial Sequence
  Description of Artificial Sequence: Synthetic oligonucleotide
  Antisense strand to SEQ ID NO: 993198
uccaggacuagccaacucc

SEQ ID NO: 993200 - RNA, 19 nt, Artificial Sequence
  Description of Artificial Sequence: Synthetic oligonucleotide
  Sense strand starting at position 3550 of SEQ ID NO: 914295
guuggcuaguccuggacua

SEQ ID NO: 993201 - RNA, 19 nt, Artificial Sequence
  Description of Artificial Sequence: Synthetic oligonucleotide
  Antisense strand to SEQ ID NO: 993200
uaguccaggacuagccaac

SEQ ID NO: 993202 - RNA, 19 nt, Artificial Sequence
  Description of Artificial Sequence: Synthetic oligonucleotide
  Sense strand starting at position 3552 of SEQ ID NO: 914295
uggcuaguccuggacuagu

SEQ ID NO: 993203 - RNA, 19 nt, Artificial Sequence
  Description of Artificial Sequence: Synthetic oligonucleotide
  Antisense strand to SEQ ID NO: 993202
acuaguccaggacuagcca

SEQ ID NO: 993204 - RNA, 19 nt, Artificial Sequence
  Description of Artificial Sequence: Synthetic oligonucleotide
  Sense strand starting at position 3563 of SEQ ID NO: 914295
ggacuaguauggccgaacu

SEQ ID NO: 993205 - RNA, 19 nt, Artificial Sequence
  Description of Artificial Sequence: Synthetic oligonucleotide
  Antisense strand to SEQ ID NO: 993204
aguucggccauacuagucc

SEQ ID NO: 993206 - RNA, 19 nt, Artificial Sequence
  Description of Artificial Sequence: Synthetic oligonucleotide
  Sense strand starting at position 3565 of SEQ ID NO: 914295
acuaguauggccgaacuau

SEQ ID NO: 993207 - RNA, 19 nt, Artificial Sequence
  Description of Artificial Sequence: Synthetic oligonucleotide
  Antisense strand to SEQ ID NO: 993206
auaguucggccauacuagu

SEQ ID NO: 993208 - RNA, 19 nt, Artificial Sequence
  Description of Artificial Sequence: Synthetic oligonucleotide
  Sense strand starting at position 3745 of SEQ ID NO: 914295
ugguuagucacgugaccac

SEQ ID NO: 993209 - RNA, 19 nt, Artificial Sequence
  Description of Artificial Sequence: Synthetic oligonucleotide
  Antisense strand to SEQ ID NO: 993208
guggucacgugacuaacca

SEQ ID NO: 993210 - RNA, 19 nt, Artificial Sequence
  Description of Artificial Sequence: Synthetic oligonucleotide
  Sense strand starting at position 3899 of SEQ ID NO: 914295
gugcaaggcuuguugagua

SEQ ID NO: 993211 - RNA, 19 nt, Artificial Sequence
  Description of Artificial Sequence: Synthetic oligonucleotide
  Antisense strand to SEQ ID NO: 993210
uacucaacaagccuugcac

SEQ ID NO: 993212 - RNA, 19 nt, Artificial Sequence
  Description of Artificial Sequence: Synthetic oligonucleotide
  Sense strand starting at position 3904 of SEQ ID NO: 914295
aggcuuguugaguauggga

SEQ ID NO: 993213 - RNA, 19 nt, Artificial Sequence
  Description of Artificial Sequence: Synthetic oligonucleotide
  Antisense strand to SEQ ID NO: 993212
ucccauacucaacaagccu

SEQ ID NO: 993214 - RNA, 19 nt, Artificial Sequence
  Description of Artificial Sequence: Synthetic oligonucleotide
  Sense strand starting at position 25 of SEQ ID NO: 914296
ggaguauggcgcgaucuca

SEQ ID NO: 993215 - RNA, 19 nt, Artificial Sequence
  Description of Artificial Sequence: Synthetic oligonucleotide
  Antisense strand to SEQ ID NO: 993214
ugagaucgcgccauacucc

SEQ ID NO: 993216 - RNA, 19 nt, Artificial Sequence
  Description of Artificial Sequence: Synthetic oligonucleotide
  Sense strand starting at position 108 of SEQ ID NO: 914296
ggacuauagauguguacac

SEQ ID NO: 993217 - RNA, 19 nt, Artificial Sequence
  Description of Artificial Sequence: Synthetic oligonucleotide
  Antisense strand to SEQ ID NO: 993216
guguacacaucuauagucc

SEQ ID NO: 993218 - RNA, 19 nt, Artificial Sequence
  Description of Artificial Sequence: Synthetic oligonucleotide
  Sense strand starting at position 314 of SEQ ID NO: 914296
aggguuagaugguccucua

SEQ ID NO: 993219 - RNA, 19 nt, Artificial Sequence
  Description of Artificial Sequence: Synthetic oligonucleotide
  Antisense strand to SEQ ID NO: 993218
uagaggaccaucuaacccu

SEQ ID NO: 993220 - RNA, 19 nt, Artificial Sequence
  Description of Artificial Sequence: Synthetic oligonucleotide
  Sense strand starting at position 664 of SEQ ID NO: 914296
uugagugcgccgugaugga

SEQ ID NO: 993221 - RNA, 19 nt, Artificial Sequence
  Description of Artificial Sequence: Synthetic oligonucleotide
  Antisense strand to SEQ ID NO: 993220
uccaucacggcgcacucaa

SEQ ID NO: 993222 - RNA, 19 nt, Artificial Sequence
  Description of Artificial Sequence: Synthetic oligonucleotide
  Sense strand starting at position 754 of SEQ ID NO: 914296
ucaacuauuugcuggauaa

SEQ ID NO: 993223 - RNA, 19 nt, Artificial Sequence
  Description of Artificial Sequence: Synthetic oligonucleotide
  Antisense strand to SEQ ID NO: 993222
uuauccagcaaauaguuga

SEQ ID NO: 993224 - RNA, 19 nt, Artificial Sequence
  Description of Artificial Sequence: Synthetic oligonucleotide
  Sense strand starting at position 807 of SEQ ID NO: 914296
ggcuuuguuucucccucaa

SEQ ID NO: 993225 - RNA, 19 nt, Artificial Sequence
  Description of Artificial Sequence: Synthetic oligonucleotide
  Antisense strand to SEQ ID NO: 993224
uugagggagaaacaaagcc

SEQ ID NO: 993226 - RNA, 19 nt, Artificial Sequence
  Description of Artificial Sequence: Synthetic oligonucleotide
  Sense strand starting at position 859 of SEQ ID NO: 914296
ggagguucugcacaccaaa

SEQ ID NO: 993227 - RNA, 19 nt, Artificial Sequence
  Description of Artificial Sequence: Synthetic oligonucleotide
  Antisense strand to SEQ ID NO: 993226
uuuggugugcagaaccucc

SEQ ID NO: 993228 - RNA, 19 nt, Artificial Sequence
  Description of Artificial Sequence: Synthetic oligonucleotide
  Sense strand starting at position 877 of SEQ ID NO: 914296
agucaaauuaauuggugga

SEQ ID NO: 993229 - RNA, 19 nt, Artificial Sequence
  Description of Artificial Sequence: Synthetic oligonucleotide
  Antisense strand to SEQ ID NO: 993228
uccaccaauuaauuugacu

SEQ ID NO: 993230 - RNA, 19 nt, Artificial Sequence
  Description of Artificial Sequence: Synthetic oligonucleotide
  Sense strand starting at position 942 of SEQ ID NO: 914296
gccuuccuggcuuguuuaa

SEQ ID NO: 993231 - RNA, 19 nt, Artificial Sequence
  Description of Artificial Sequence: Synthetic oligonucleotide
  Antisense strand to SEQ ID NO: 993230
uuaaacaagccaggaaggc

SEQ ID NO: 993232 - RNA, 19 nt, Artificial Sequence
  Description of Artificial Sequence: Synthetic oligonucleotide
  Sense strand starting at position 959 of SEQ ID NO: 914296
aacgguuugguguggauuu

SEQ ID NO: 993233 - RNA, 19 nt, Artificial Sequence
  Description of Artificial Sequence: Synthetic oligonucleotide
  Antisense strand to SEQ ID NO: 993232
aaauccacaccaaaccguu

SEQ ID NO: 993234 - RNA, 19 nt, Artificial Sequence
  Description of Artificial Sequence: Synthetic oligonucleotide
  Sense strand starting at position 1008 of SEQ ID NO: 914296
gagaacgaggucugugauu

SEQ ID NO: 993235 - RNA, 19 nt, Artificial Sequence
  Description of Artificial Sequence: Synthetic oligonucleotide
  Antisense strand to SEQ ID NO: 993234
aaucacagaccucguucuc

SEQ ID NO: 993236 - RNA, 19 nt, Artificial Sequence
  Description of Artificial Sequence: Synthetic oligonucleotide
  Sense strand starting at position 1014 of SEQ ID NO: 914296
gaggucugugauuggagca

SEQ ID NO: 993237 - RNA, 19 nt, Artificial Sequence
  Description of Artificial Sequence: Synthetic oligonucleotide
  Antisense strand to SEQ ID NO: 993236
ugcuccaaucacagaccuc

SEQ ID NO: 993238 - RNA, 19 nt, Artificial Sequence
  Description of Artificial Sequence: Synthetic oligonucleotide
  Sense strand starting at position 1063 of SEQ ID NO: 914296
ugcugcucguguccagauu

SEQ ID NO: 993239 - RNA, 19 nt, Artificial Sequence
  Description of Artificial Sequence: Synthetic oligonucleotide
  Antisense strand to SEQ ID NO: 993238
aaucuggacacgagcagca

SEQ ID NO: 993240 - RNA, 19 nt, Artificial Sequence
  Description of Artificial Sequence: Synthetic oligonucleotide
  Sense strand starting at position 1075 of SEQ ID NO: 914296
ccagauucccuccgggaau

SEQ ID NO: 993241 - RNA, 19 nt, Artificial Sequence
  Description of Artificial Sequence: Synthetic oligonucleotide
  Antisense strand to SEQ ID NO: 993240
auucccggagggaaucugg

SEQ ID NO: 993242 - RNA, 19 nt, Artificial Sequence
  Description of Artificial Sequence: Synthetic oligonucleotide
  Sense strand starting at position 1077 of SEQ ID NO: 914296
agauucccuccgggaauga

SEQ ID NO: 993243 - RNA, 19 nt, Artificial Sequence
  Description of Artificial Sequence: Synthetic oligonucleotide
  Antisense strand to SEQ ID NO: 993242
ucauucccggagggaaucu

SEQ ID NO: 993244 - RNA, 19 nt, Artificial Sequence
  Description of Artificial Sequence: Synthetic oligonucleotide
  Sense strand starting at position 1102 of SEQ ID NO: 914296
uuaaucgucguaggugaga

SEQ ID NO: 993245 - RNA, 19 nt, Artificial Sequence
  Description of Artificial Sequence: Synthetic oligonucleotide
  Antisense strand to SEQ ID NO: 993244
ucucaccuacgacgauuaa

SEQ ID NO: 993246 - RNA, 19 nt, Artificial Sequence
  Description of Artificial Sequence: Synthetic oligonucleotide
  Sense strand starting at position 1107 of SEQ ID NO: 914296
cgucguaggugagaucuaa

SEQ ID NO: 993247 - RNA, 19 nt, Artificial Sequence
  Description of Artificial Sequence: Synthetic oligonucleotide
  Antisense strand to SEQ ID NO: 993246
uuagaucucaccuacgacg

SEQ ID NO: 993248 - RNA, 19 nt, Artificial Sequence
  Description of Artificial Sequence: Synthetic oligonucleotide
  Sense strand starting at position 1159 of SEQ ID NO: 914296
caaagcuguuuccugggaa

SEQ ID NO: 993249 - RNA, 19 nt, Artificial Sequence
  Description of Artificial Sequence: Synthetic oligonucleotide
  Antisense strand to SEQ ID NO: 993248
uucccaggaaacagcuuug

SEQ ID NO: 993250 - RNA, 19 nt, Artificial Sequence
  Description of Artificial Sequence: Synthetic oligonucleotide
  Sense strand starting at position 1160 of SEQ ID NO: 914296
aaagcuguuuccugggaag

SEQ ID NO: 993251 - RNA, 19 nt, Artificial Sequence
  Description of Artificial Sequence: Synthetic oligonucleotide
  Antisense strand to SEQ ID NO: 993250
cuucccaggaaacagcuuu

SEQ ID NO: 993252 - RNA, 19 nt, Artificial Sequence
  Description of Artificial Sequence: Synthetic oligonucleotide
  Sense strand starting at position 1162 of SEQ ID NO: 914296
agcuguuuccugggaagac

SEQ ID NO: 993253 - RNA, 19 nt, Artificial Sequence
  Description of Artificial Sequence: Synthetic oligonucleotide
  Antisense strand to SEQ ID NO: 993252
gucuucccaggaaacagcu

SEQ ID NO: 993254 - RNA, 19 nt, Artificial Sequence
  Description of Artificial Sequence: Synthetic oligonucleotide
  Sense strand starting at position 1239 of SEQ ID NO: 914296
gguuaaacgcuccaguacu

SEQ ID NO: 993255 - RNA, 19 nt, Artificial Sequence
  Description of Artificial Sequence: Synthetic oligonucleotide
  Antisense strand to SEQ ID NO: 993254
aguacuggagcguuuaacc

SEQ ID NO: 993256 - RNA, 19 nt, Artificial Sequence
  Description of Artificial Sequence: Synthetic oligonucleotide
  Sense strand starting at position 3490 of SEQ ID NO: 914296
ggcugcucuccaggacagu

SEQ ID NO: 993257 - RNA, 19 nt, Artificial Sequence
  Description of Artificial Sequence: Synthetic oligonucleotide
  Antisense strand to SEQ ID NO: 993256
acuguccuggagagcagcc

SEQ ID NO: 993258 - RNA, 19 nt, Artificial Sequence
  Description of Artificial Sequence: Synthetic oligonucleotide
  Sense strand starting at position 364 of SEQ ID NO: 914297
gaguccaccugauccaaga

SEQ ID NO: 993259 - RNA, 19 nt, Artificial Sequence
  Description of Artificial Sequence: Synthetic oligonucleotide
  Antisense strand to SEQ ID NO: 993258
ucuuggaucagguggacuc

SEQ ID NO: 993260 - RNA, 19 nt, Artificial Sequence
  Description of Artificial Sequence: Synthetic oligonucleotide
  Sense strand starting at position 428 of SEQ ID NO: 914297
gggccaguccguggaucaa

SEQ ID NO: 993261 - RNA, 19 nt, Artificial Sequence
  Description of Artificial Sequence: Synthetic oligonucleotide
  Antisense strand to SEQ ID NO: 993260
uugauccacggacuggccc

SEQ ID NO: 993262 - RNA, 19 nt, Artificial Sequence
  Description of Artificial Sequence: Synthetic oligonucleotide
  Sense strand starting at position 761 of SEQ ID NO: 914297
gcggccaguucucagggaa

SEQ ID NO: 993263 - RNA, 19 nt, Artificial Sequence
  Description of Artificial Sequence: Synthetic oligonucleotide
  Antisense strand to SEQ ID NO: 993262
uucccugagaacuggccgc

SEQ ID NO: 993264 - RNA, 19 nt, Artificial Sequence
  Description of Artificial Sequence: Synthetic oligonucleotide
  Sense strand starting at position 764 of SEQ ID NO: 914297
gccaguucucagggaagcu

SEQ ID NO: 993265 - RNA, 19 nt, Artificial Sequence
  Description of Artificial Sequence: Synthetic oligonucleotide
  Antisense strand to SEQ ID NO: 993264
agcuucccugagaacuggc

SEQ ID NO: 993266 - RNA, 19 nt, Artificial Sequence
  Description of Artificial Sequence: Synthetic oligonucleotide
  Sense strand starting at position 868 of SEQ ID NO: 914297
gcuucauccugggcuguga

SEQ ID NO: 993267 - RNA, 19 nt, Artificial Sequence
  Description of Artificial Sequence: Synthetic oligonucleotide
  Antisense strand to SEQ ID NO: 993266
ucacagcccaggaugaagc

SEQ ID NO: 993268 - RNA, 19 nt, Artificial Sequence
  Description of Artificial Sequence: Synthetic oligonucleotide
  Sense strand starting at position 1123 of SEQ ID NO: 914297
cugugcucucgugcuguaa

SEQ ID NO: 993269 - RNA, 19 nt, Artificial Sequence
  Description of Artificial Sequence: Synthetic oligonucleotide
  Antisense strand to SEQ ID NO: 993268
uuacagcacgagagcacag

SEQ ID NO: 993270 - RNA, 19 nt, Artificial Sequence
  Description of Artificial Sequence: Synthetic oligonucleotide
  Sense strand starting at position 1255 of SEQ ID NO: 914297
gagaccuuauccgugagca

SEQ ID NO: 993271 - RNA, 19 nt, Artificial Sequence
  Description of Artificial Sequence: Synthetic oligonucleotide
  Antisense strand to SEQ ID NO: 993270
ugcucacggauaaggucuc

SEQ ID NO: 993272 - RNA, 19 nt, Artificial Sequence
  Description of Artificial Sequence: Synthetic oligonucleotide
  Sense strand starting at position 1256 of SEQ ID NO: 914297
agaccuuauccgugagcag

SEQ ID NO: 993273 - RNA, 19 nt, Artificial Sequence
  Description of Artificial Sequence: Synthetic oligonucleotide
  Antisense strand to SEQ ID NO: 993272
cugcucacggauaaggucu

SEQ ID NO: 993274 - RNA, 19 nt, Artificial Sequence
  Description of Artificial Sequence: Synthetic oligonucleotide
  Sense strand starting at position 1257 of SEQ ID NO: 914297
gaccuuauccgugagcagu

SEQ ID NO: 993275 - RNA, 19 nt, Artificial Sequence
  Description of Artificial Sequence: Synthetic oligonucleotide
  Antisense strand to SEQ ID NO: 993274
acugcucacggauaagguc

SEQ ID NO: 993276 - RNA, 19 nt, Artificial Sequence
  Description of Artificial Sequence: Synthetic oligonucleotide
  Sense strand starting at position 3067 of SEQ ID NO: 914297
ggauccauacucgggaagu

SEQ ID NO: 993277 - RNA, 19 nt, Artificial Sequence
  Description of Artificial Sequence: Synthetic oligonucleotide
  Antisense strand to SEQ ID NO: 993276
acuucccgaguauggaucc

SEQ ID NO: 993278 - RNA, 19 nt, Artificial Sequence
  Description of Artificial Sequence: Synthetic oligonucleotide
  Sense strand starting at position 3068 of SEQ ID NO: 914297
gauccauacucgggaagug

SEQ ID NO: 993279 - RNA, 19 nt, Artificial Sequence
  Description of Artificial Sequence: Synthetic oligonucleotide
  Antisense strand to SEQ ID NO: 993278
cacuucccgaguauggauc

SEQ ID NO: 993280 - RNA, 19 nt, Artificial Sequence
  Description of Artificial Sequence: Synthetic oligonucleotide
  Sense strand starting at position 3376 of SEQ ID NO: 914297
agccgcuuugaagaugaaa

SEQ ID NO: 993281 - RNA, 19 nt, Artificial Sequence
  Description of Artificial Sequence: Synthetic oligonucleotide
  Antisense strand to SEQ ID NO: 993280
uuucaucuucaaagcggcu

SEQ ID NO: 993282 - RNA, 19 nt, Artificial Sequence
  Description of Artificial Sequence: Synthetic oligonucleotide
  Sense strand starting at position 3706 of SEQ ID NO: 914297
gaggcagccuggcuaauua

SEQ ID NO: 993283 - RNA, 19 nt, Artificial Sequence
  Description of Artificial Sequence: Synthetic oligonucleotide
  Antisense strand to SEQ ID NO: 993282
uaauuagccaggcugccuc

SEQ ID NO: 993284 - RNA, 19 nt, Artificial Sequence
  Description of Artificial Sequence: Synthetic oligonucleotide
  Sense strand starting at position 3879 of SEQ ID NO: 914297
uuaaacuucuugcagaguu

SEQ ID NO: 993285 - RNA, 19 nt, Artificial Sequence
  Description of Artificial Sequence: Synthetic oligonucleotide
  Antisense strand to SEQ ID NO: 993284
aacucugcaagaaguuuaa

SEQ ID NO: 993286 - RNA, 19 nt, Artificial Sequence
  Description of Artificial Sequence: Synthetic oligonucleotide
  Sense strand starting at position 3881 of SEQ ID NO: 914297
aaacuucuugcagaguuga

SEQ ID NO: 993287 - RNA, 19 nt, Artificial Sequence
  Description of Artificial Sequence: Synthetic oligonucleotide
  Antisense strand to SEQ ID NO: 993286
ucaacucugcaagaaguuu

SEQ ID NO: 993288 - RNA, 19 nt, Artificial Sequence
  Description of Artificial Sequence: Synthetic oligonucleotide
  Sense strand starting at position 3901 of SEQ ID NO: 914297
aagacagguuuccaaggau

SEQ ID NO: 993289 - RNA, 19 nt, Artificial Sequence
  Description of Artificial Sequence: Synthetic oligonucleotide
  Antisense strand to SEQ ID NO: 993288
auccuuggaaaccugucuu

SEQ ID NO: 993290 - RNA, 19 nt, Artificial Sequence
  Description of Artificial Sequence: Synthetic oligonucleotide
  Sense strand starting at position 42 of SEQ ID NO: 914298
ucuucugauuccucgaaga

SEQ ID NO: 993291 - RNA, 19 nt, Artificial Sequence
  Description of Artificial Sequence: Synthetic oligonucleotide
  Antisense strand to SEQ ID NO: 993290
ucuucgaggaaucagaaga

SEQ ID NO: 993292 - RNA, 19 nt, Artificial Sequence
  Description of Artificial Sequence: Synthetic oligonucleotide
  Sense strand starting at position 44 of SEQ ID NO: 914298
uucugauuccucgaagaca

SEQ ID NO: 993293 - RNA, 19 nt, Artificial Sequence
  Description of Artificial Sequence: Synthetic oligonucleotide
  Antisense strand to SEQ ID NO: 993292
ugucuucgaggaaucagaa

SEQ ID NO: 993294 - RNA, 19 nt, Artificial Sequence
  Description of Artificial Sequence: Synthetic oligonucleotide
  Sense strand starting at position 47 of SEQ ID NO: 914298
ugauuccucgaagacaugu

SEQ ID NO: 993295 - RNA, 19 nt, Artificial Sequence
  Description of Artificial Sequence: Synthetic oligonucleotide
  Antisense strand to SEQ ID NO: 993294
acaugucuucgaggaauca

SEQ ID NO: 993296 - RNA, 19 nt, Artificial Sequence
  Description of Artificial Sequence: Synthetic oligonucleotide
  Sense strand starting at position 240 of SEQ ID NO: 914298
ugcucuugugcguucucaa

SEQ ID NO: 993297 - RNA, 19 nt, Artificial Sequence
  Description of Artificial Sequence: Synthetic oligonucleotide
  Antisense strand to SEQ ID NO: 993296
uugagaacgcacaagagca

SEQ ID NO: 993298 - RNA, 19 nt, Artificial Sequence
  Description of Artificial Sequence: Synthetic oligonucleotide
  Sense strand starting at position 241 of SEQ ID NO: 914298
gcucuugugcguucucaag

SEQ ID NO: 993299 - RNA, 19 nt, Artificial Sequence
  Description of Artificial Sequence: Synthetic oligonucleotide
  Antisense strand to SEQ ID NO: 993298
cuugagaacgcacaagagc

SEQ ID NO: 993300 - RNA, 19 nt, Artificial Sequence
  Description of Artificial Sequence: Synthetic oligonucleotide
  Sense strand starting at position 402 of SEQ ID NO: 914298
auauuaggugcugaaauca

SEQ ID NO: 993301 - RNA, 19 nt, Artificial Sequence
  Description of Artificial Sequence: Synthetic oligonucleotide
  Antisense strand to SEQ ID NO: 993300
ugauuucagcaccuaauau

SEQ ID NO: 993302 - RNA, 19 nt, Artificial Sequence
  Description of Artificial Sequence: Synthetic oligonucleotide
  Sense strand starting at position 458 of SEQ ID NO: 914298
aaaggauuacucuggguac

SEQ ID NO: 993303 - RNA, 19 nt, Artificial Sequence
  Description of Artificial Sequence: Synthetic oligonucleotide
  Antisense strand to SEQ ID NO: 993302
guacccagaguaauccuuu

SEQ ID NO: 993304 - RNA, 19 nt, Artificial Sequence
  Description of Artificial Sequence: Synthetic oligonucleotide
  Sense strand starting at position 461 of SEQ ID NO: 914298
ggauuacucuggguacugu

SEQ ID NO: 993305 - RNA, 19 nt, Artificial Sequence
  Description of Artificial Sequence: Synthetic oligonucleotide
  Antisense strand to SEQ ID NO: 993304
acaguacccagaguaaucc

SEQ ID NO: 993306 - RNA, 19 nt, Artificial Sequence
  Description of Artificial Sequence: Synthetic oligonucleotide
  Sense strand starting at position 471 of SEQ ID NO: 914298
ggguacuguguugagaaca

SEQ ID NO: 993307 - RNA, 19 nt, Artificial Sequence
  Description of Artificial Sequence: Synthetic oligonucleotide
  Antisense strand to SEQ ID NO: 993306
uguucucaacacaguaccc

SEQ ID NO: 993308 - RNA, 19 nt, Artificial Sequence
  Description of Artificial Sequence: Synthetic oligonucleotide
  Sense strand starting at position 518 of SEQ ID NO: 914298
cuauuaaaguagucaagga

SEQ ID NO: 993309 - RNA, 19 nt, Artificial Sequence
  Description of Artificial Sequence: Synthetic oligonucleotide
  Antisense strand to SEQ ID NO: 993308
uccuugacuacuuuaauag

SEQ ID NO: 993310 - RNA, 19 nt, Artificial Sequence
  Description of Artificial Sequence: Synthetic oligonucleotide
  Sense strand starting at position 545 of SEQ ID NO: 914298
ggugguggcccagauuaac

SEQ ID NO: 993311 - RNA, 19 nt, Artificial Sequence
  Description of Artificial Sequence: Synthetic oligonucleotide
  Antisense strand to SEQ ID NO: 993310
guuaaucugggccaccacc

SEQ ID NO: 993312 - RNA, 19 nt, Artificial Sequence
  Description of Artificial Sequence: Synthetic oligonucleotide
  Sense strand starting at position 623 of SEQ ID NO: 914298
ugugacagaacuuggugaa

SEQ ID NO: 993313 - RNA, 19 nt, Artificial Sequence
  Description of Artificial Sequence: Synthetic oligonucleotide
  Antisense strand to SEQ ID NO: 993312
uucaccaaguucugucaca

SEQ ID NO: 993314 - RNA, 19 nt, Artificial Sequence
  Description of Artificial Sequence: Synthetic oligonucleotide
  Sense strand starting at position 624 of SEQ ID NO: 914298
gugacagaacuuggugaaa

SEQ ID NO: 993315 - RNA, 19 nt, Artificial Sequence
  Description of Artificial Sequence: Synthetic oligonucleotide
  Antisense strand to SEQ ID NO: 993314
uuucaccaaguucugucac

SEQ ID NO: 993316 - RNA, 19 nt, Artificial Sequence
  Description of Artificial Sequence: Synthetic oligonucleotide
  Sense strand starting at position 674 of SEQ ID NO: 914298
ucaagucuugcucaugacu

SEQ ID NO: 993317 - RNA, 19 nt, Artificial Sequence
  Description of Artificial Sequence: Synthetic oligonucleotide
  Antisense strand to SEQ ID NO: 993316
agucaugagcaagacuuga

SEQ ID NO: 993318 - RNA, 19 nt, Artificial Sequence
  Description of Artificial Sequence: Synthetic oligonucleotide
  Sense strand starting at position 785 of SEQ ID NO: 914298
aaucuauagguuuggaacu

SEQ ID NO: 993319 - RNA, 19 nt, Artificial Sequence
  Description of Artificial Sequence: Synthetic oligonucleotide
  Antisense strand to SEQ ID NO: 993318
aguuccaaaccuauagauu

SEQ ID NO: 993320 - RNA, 19 nt, Artificial Sequence
  Description of Artificial Sequence: Synthetic oligonucleotide
  Sense strand starting at position 865 of SEQ ID NO: 914298
aaagaagucugggcuggau

SEQ ID NO: 993321 - RNA, 19 nt, Artificial Sequence
  Description of Artificial Sequence: Synthetic oligonucleotide
  Antisense strand to SEQ ID NO: 993320
auccagcccagacuucuuu

SEQ ID NO: 993322 - RNA, 19 nt, Artificial Sequence
  Description of Artificial Sequence: Synthetic oligonucleotide
  Sense strand starting at position 867 of SEQ ID NO: 914298
agaagucugggcuggauau

SEQ ID NO: 993323 - RNA, 19 nt, Artificial Sequence
  Description of Artificial Sequence: Synthetic oligonucleotide
  Antisense strand to SEQ ID NO: 993322
auauccagcccagacuucu

SEQ ID NO: 993324 - RNA, 19 nt, Artificial Sequence
  Description of Artificial Sequence: Synthetic oligonucleotide
  Sense strand starting at position 868 of SEQ ID NO: 914298
gaagucugggcuggauaua

SEQ ID NO: 993325 - RNA, 19 nt, Artificial Sequence
  Description of Artificial Sequence: Synthetic oligonucleotide
  Antisense strand to SEQ ID NO: 993324
uauauccagcccagacuuc

SEQ ID NO: 993326 - RNA, 19 nt, Artificial Sequence
  Description of Artificial Sequence: Synthetic oligonucleotide
  Sense strand starting at position 959 of SEQ ID NO: 914298
aacagauacugagagaaga

SEQ ID NO: 993327 - RNA, 19 nt, Artificial Sequence
  Description of Artificial Sequence: Synthetic oligonucleotide
  Antisense strand to SEQ ID NO: 993326
ucuucucucaguaucuguu

SEQ ID NO: 993328 - RNA, 19 nt, Artificial Sequence
  Description of Artificial Sequence: Synthetic oligonucleotide
  Sense strand starting at position 1092 of SEQ ID NO: 914298
aggagagugaguugacaua

SEQ ID NO: 993329 - RNA, 19 nt, Artificial Sequence
  Description of Artificial Sequence: Synthetic oligonucleotide
  Antisense strand to SEQ ID NO: 993328
uaugucaacucacucuccu

SEQ ID NO: 993330 - RNA, 19 nt, Artificial Sequence
  Description of Artificial Sequence: Synthetic oligonucleotide
  Sense strand starting at position 1239 of SEQ ID NO: 914298
aagaaugaaugggaaguaa

SEQ ID NO: 993331 - RNA, 19 nt, Artificial Sequence
  Description of Artificial Sequence: Synthetic oligonucleotide
  Antisense strand to SEQ ID NO: 993330
uuacuucccauucauucuu

SEQ ID NO: 993332 - RNA, 19 nt, Artificial Sequence
  Description of Artificial Sequence: Synthetic oligonucleotide
  Sense strand starting at position 1363 of SEQ ID NO: 914298
aggaauuggcagugggaaa

SEQ ID NO: 993333 - RNA, 19 nt, Artificial Sequence
  Description of Artificial Sequence: Synthetic oligonucleotide
  Antisense strand to SEQ ID NO: 993332
uuucccacugccaauuccu

SEQ ID NO: 993334 - RNA, 19 nt, Artificial Sequence
  Description of Artificial Sequence: Synthetic oligonucleotide
  Sense strand starting at position 1695 of SEQ ID NO: 914298
ugcgaugguggguaugaga

SEQ ID NO: 993335 - RNA, 19 nt, Artificial Sequence
  Description of Artificial Sequence: Synthetic oligonucleotide
  Antisense strand to SEQ ID NO: 993334
ucucauacccaccaucgca

SEQ ID NO: 993336 - RNA, 19 nt, Artificial Sequence
  Description of Artificial Sequence: Synthetic oligonucleotide
  Sense strand starting at position 1940 of SEQ ID NO: 914298
cggcuucuccaucacaaca

SEQ ID NO: 993337 - RNA, 19 nt, Artificial Sequence
  Description of Artificial Sequence: Synthetic oligonucleotide
  Antisense strand to SEQ ID NO: 993336
uguugugauggagaagccg

SEQ ID NO: 993338 - RNA, 19 nt, Artificial Sequence
  Description of Artificial Sequence: Synthetic oligonucleotide
  Sense strand starting at position 2339 of SEQ ID NO: 914298
gaaggauucccgggaggca

SEQ ID NO: 993339 - RNA, 19 nt, Artificial Sequence
  Description of Artificial Sequence: Synthetic oligonucleotide
  Antisense strand to SEQ ID NO: 993338
ugccucccgggaauccuuc

SEQ ID NO: 993340 - RNA, 19 nt, Artificial Sequence
  Description of Artificial Sequence: Synthetic oligonucleotide
  Sense strand starting at position 2481 of SEQ ID NO: 914298
aaccguuaacgcgcauuaa

SEQ ID NO: 993341 - RNA, 19 nt, Artificial Sequence
  Description of Artificial Sequence: Synthetic oligonucleotide
  Antisense strand to SEQ ID NO: 993340
uuaaugcgcguuaacgguu

SEQ ID NO: 993342 - RNA, 19 nt, Artificial Sequence
  Description of Artificial Sequence: Synthetic oligonucleotide
  Sense strand starting at position 2484 of SEQ ID NO: 914298
cguuaacgcgcauuaaucu

SEQ ID NO: 993343 - RNA, 19 nt, Artificial Sequence
  Description of Artificial Sequence: Synthetic oligonucleotide
  Antisense strand to SEQ ID NO: 993342
agauuaaugcgcguuaacg

SEQ ID NO: 993344 - RNA, 19 nt, Artificial Sequence
  Description of Artificial Sequence: Synthetic oligonucleotide
  Sense strand starting at position 2549 of SEQ ID NO: 914298
agaggcugaggcuaagauu

SEQ ID NO: 993345 - RNA, 19 nt, Artificial Sequence
  Description of Artificial Sequence: Synthetic oligonucleotide
  Antisense strand to SEQ ID NO: 993344
aaucuuagccucagccucu

SEQ ID NO: 993346 - RNA, 19 nt, Artificial Sequence
  Description of Artificial Sequence: Synthetic oligonucleotide
  Sense strand starting at position 2594 of SEQ ID NO: 914298
gucacaguuagugaugaau

SEQ ID NO: 993347 - RNA, 19 nt, Artificial Sequence
  Description of Artificial Sequence: Synthetic oligonucleotide
  Antisense strand to SEQ ID NO: 993346
auucaucacuaacugugac

SEQ ID NO: 993348 - RNA, 19 nt, Artificial Sequence
  Description of Artificial Sequence: Synthetic oligonucleotide
  Sense strand starting at position 2631 of SEQ ID NO: 914298
guuucuugacacugaaaua

SEQ ID NO: 993349 - RNA, 19 nt, Artificial Sequence
  Description of Artificial Sequence: Synthetic oligonucleotide
  Antisense strand to SEQ ID NO: 993348
uauuucagugucaagaaac

SEQ ID NO: 993350 - RNA, 19 nt, Artificial Sequence
  Description of Artificial Sequence: Synthetic oligonucleotide
  Sense strand starting at position 2780 of SEQ ID NO: 914298
gugcaauacuuacuacaga

SEQ ID NO: 993351 - RNA, 19 nt, Artificial Sequence
  Description of Artificial Sequence: Synthetic oligonucleotide
  Antisense strand to SEQ ID NO: 993350
ucuguaguaaguauugcac

SEQ ID NO: 993352 - RNA, 19 nt, Artificial Sequence
  Description of Artificial Sequence: Synthetic oligonucleotide
  Sense strand starting at position 2828 of SEQ ID NO: 914298
uggucagaucagugaccca

SEQ ID NO: 993353 - RNA, 19 nt, Artificial Sequence
  Description of Artificial Sequence: Synthetic oligonucleotide
  Antisense strand to SEQ ID NO: 993352
ugggucacugaucugacca

SEQ ID NO: 993354 - RNA, 19 nt, Artificial Sequence
  Description of Artificial Sequence: Synthetic oligonucleotide
  Sense strand starting at position 3191 of SEQ ID NO: 914298
ugagauuacaggcgucaga

SEQ ID NO: 993355 - RNA, 19 nt, Artificial Sequence
  Description of Artificial Sequence: Synthetic oligonucleotide
  Antisense strand to SEQ ID NO: 993354
ucugacgccuguaaucuca

SEQ ID NO: 993356 - RNA, 19 nt, Artificial Sequence
  Description of Artificial Sequence: Synthetic oligonucleotide
  Sense strand starting at position 3677 of SEQ ID NO: 914298
ugaccuggguucuugaaag

SEQ ID NO: 993357 - RNA, 19 nt, Artificial Sequence
  Description of Artificial Sequence: Synthetic oligonucleotide
  Antisense strand to SEQ ID NO: 993356
cuuucaagaacccagguca

SEQ ID NO: 993358 - RNA, 19 nt, Artificial Sequence
  Description of Artificial Sequence: Synthetic oligonucleotide
  Sense strand starting at position 3766 of SEQ ID NO: 914298
aauuacuauguaugaggua

SEQ ID NO: 993359 - RNA, 19 nt, Artificial Sequence
  Description of Artificial Sequence: Synthetic oligonucleotide
  Antisense strand to SEQ ID NO: 993358
uaccucauacauaguaauu

SEQ ID NO: 993360 - RNA, 19 nt, Artificial Sequence
  Description of Artificial Sequence: Synthetic oligonucleotide
  Sense strand starting at position 3877 of SEQ ID NO: 914298
uguaauuaggaaugugaug

SEQ ID NO: 993361 - RNA, 19 nt, Artificial Sequence
  Description of Artificial Sequence: Synthetic oligonucleotide
  Antisense strand to SEQ ID NO: 993360
caucacauuccuaauuaca

SEQ ID NO: 993362 - RNA, 19 nt, Artificial Sequence
  Description of Artificial Sequence: Synthetic oligonucleotide
  Sense strand starting at position 3889 of SEQ ID NO: 914298
ugugaugagugucuugaag

SEQ ID NO: 993363 - RNA, 19 nt, Artificial Sequence
  Description of Artificial Sequence: Synthetic oligonucleotide
  Antisense strand to SEQ ID NO: 993362
cuucaagacacucaucaca

SEQ ID NO: 993364 - RNA, 19 nt, Artificial Sequence
  Description of Artificial Sequence: Synthetic oligonucleotide
  Sense strand starting at position 3895 of SEQ ID NO: 914298
gagugucuugaaggagaug

SEQ ID NO: 993365 - RNA, 19 nt, Artificial Sequence
  Description of Artificial Sequence: Synthetic oligonucleotide
  Antisense strand to SEQ ID NO: 993364
caucuccuucaagacacuc

SEQ ID NO: 993366 - RNA, 19 nt, Artificial Sequence
  Description of Artificial Sequence: Synthetic oligonucleotide
  Sense strand starting at position 3907 of SEQ ID NO: 914298
ggagauguaccgggagcua

SEQ ID NO: 993367 - RNA, 19 nt, Artificial Sequence
  Description of Artificial Sequence: Synthetic oligonucleotide
  Antisense strand to SEQ ID NO: 993366
uagcucccgguacaucucc

SEQ ID NO: 993368 - RNA, 19 nt, Artificial Sequence
  Description of Artificial Sequence: Synthetic oligonucleotide
  Sense strand starting at position 3976 of SEQ ID NO: 914298
gugacaauucagugaggga

SEQ ID NO: 993369 - RNA, 19 nt, Artificial Sequence
  Description of Artificial Sequence: Synthetic oligonucleotide
  Antisense strand to SEQ ID NO: 993368
ucccucacugaauugucac

SEQ ID NO: 993370 - RNA, 19 nt, Artificial Sequence
  Description of Artificial Sequence: Synthetic oligonucleotide
  Sense strand starting at position 79 of SEQ ID NO: 914299
ugugcugagacuggaagaa

SEQ ID NO: 993371 - RNA, 19 nt, Artificial Sequence
  Description of Artificial Sequence: Synthetic oligonucleotide
  Antisense strand to SEQ ID NO: 993370
uucuuccagucucagcaca

SEQ ID NO: 993372 - RNA, 19 nt, Artificial Sequence
  Description of Artificial Sequence: Synthetic oligonucleotide
  Sense strand starting at position 191 of SEQ ID NO: 914299
gggugucagucuugaacaa

SEQ ID NO: 993373 - RNA, 19 nt, Artificial Sequence
  Description of Artificial Sequence: Synthetic oligonucleotide
  Antisense strand to SEQ ID NO: 993372
uuguucaagacugacaccc

SEQ ID NO: 993374 - RNA, 19 nt, Artificial Sequence
  Description of Artificial Sequence: Synthetic oligonucleotide
  Sense strand starting at position 192 of SEQ ID NO: 914299
ggugucagucuugaacaaa

SEQ ID NO: 993375 - RNA, 19 nt, Artificial Sequence
  Description of Artificial Sequence: Synthetic oligonucleotide
  Antisense strand to SEQ ID NO: 993374
uuuguucaagacugacacc

SEQ ID NO: 993376 - RNA, 19 nt, Artificial Sequence
  Description of Artificial Sequence: Synthetic oligonucleotide
  Sense strand starting at position 275 of SEQ ID NO: 914299
gcugaaggcagaugguaau

SEQ ID NO: 993377 - RNA, 19 nt, Artificial Sequence
  Description of Artificial Sequence: Synthetic oligonucleotide
  Antisense strand to SEQ ID NO: 993376
auuaccaucugccuucagc

SEQ ID NO: 993378 - RNA, 19 nt, Artificial Sequence
  Description of Artificial Sequence: Synthetic oligonucleotide
  Sense strand starting at position 461 of SEQ ID NO: 914299
cuggguucauccuugggaa

SEQ ID NO: 993379 - RNA, 19 nt, Artificial Sequence
  Description of Artificial Sequence: Synthetic oligonucleotide
  Antisense strand to SEQ ID NO: 993378
uucccaaggaugaacccag

SEQ ID NO: 993380 - RNA, 19 nt, Artificial Sequence
  Description of Artificial Sequence: Synthetic oligonucleotide
  Sense strand starting at position 462 of SEQ ID NO: 914299
uggguucauccuugggaag

SEQ ID NO: 993381 - RNA, 19 nt, Artificial Sequence
  Description of Artificial Sequence: Synthetic oligonucleotide
  Antisense strand to SEQ ID NO: 993380
cuucccaaggaugaaccca

SEQ ID NO: 993382 - RNA, 19 nt, Artificial Sequence
  Description of Artificial Sequence: Synthetic oligonucleotide
  Sense strand starting at position 518 of SEQ ID NO: 914299
ccagcuaucccgugguaaa

SEQ ID NO: 993383 - RNA, 19 nt, Artificial Sequence
  Description of Artificial Sequence: Synthetic oligonucleotide
  Antisense strand to SEQ ID NO: 993382
uuuaccacgggauagcugg

SEQ ID NO: 993384 - RNA, 19 nt, Artificial Sequence
  Description of Artificial Sequence: Synthetic oligonucleotide
  Sense strand starting at position 519 of SEQ ID NO: 914299
cagcuaucccgugguaaag

SEQ ID NO: 993385 - RNA, 19 nt, Artificial Sequence
  Description of Artificial Sequence: Synthetic oligonucleotide
  Antisense strand to SEQ ID NO: 993384
cuuuaccacgggauagcug

SEQ ID NO: 993386 - RNA, 19 nt, Artificial Sequence
  Description of Artificial Sequence: Synthetic oligonucleotide
  Sense strand starting at position 578 of SEQ ID NO: 914299
agccuucuccaugagcaaa

SEQ ID NO: 993387 - RNA, 19 nt, Artificial Sequence
  Description of Artificial Sequence: Synthetic oligonucleotide
  Antisense strand to SEQ ID NO: 993386
uuugcucauggagaaggcu

SEQ ID NO: 993388 - RNA, 19 nt, Artificial Sequence
  Description of Artificial Sequence: Synthetic oligonucleotide
  Sense strand starting at position 635 of SEQ ID NO: 914299
gagugaguguccuauccua

SEQ ID NO: 993389 - RNA, 19 nt, Artificial Sequence
  Description of Artificial Sequence: Synthetic oligonucleotide
  Antisense strand to SEQ ID NO: 993388
uaggauaggacacucacuc

SEQ ID NO: 993390 - RNA, 19 nt, Artificial Sequence
  Description of Artificial Sequence: Synthetic oligonucleotide
  Sense strand starting at position 800 of SEQ ID NO: 914299
aguaauaggucccugaggu

SEQ ID NO: 993391 - RNA, 19 nt, Artificial Sequence
  Description of Artificial Sequence: Synthetic oligonucleotide
  Antisense strand to SEQ ID NO: 993390
accucagggaccuauuacu

SEQ ID NO: 993392 - RNA, 19 nt, Artificial Sequence
  Description of Artificial Sequence: Synthetic oligonucleotide
  Sense strand starting at position 1583 of SEQ ID NO: 914299
ugccaaaugugugcagaca

SEQ ID NO: 993393 - RNA, 19 nt, Artificial Sequence
  Description of Artificial Sequence: Synthetic oligonucleotide
  Antisense strand to SEQ ID NO: 993392
ugucugcacacauuuggca

SEQ ID NO: 993394 - RNA, 19 nt, Artificial Sequence
  Description of Artificial Sequence: Synthetic oligonucleotide
  Sense strand starting at position 1735 of SEQ ID NO: 914299
ccgcucaugcguccucuaa

SEQ ID NO: 993395 - RNA, 19 nt, Artificial Sequence
  Description of Artificial Sequence: Synthetic oligonucleotide
  Antisense strand to SEQ ID NO: 993394
uuagaggacgcaugagcgg

SEQ ID NO: 993396 - RNA, 19 nt, Artificial Sequence
  Description of Artificial Sequence: Synthetic oligonucleotide
  Sense strand starting at position 1737 of SEQ ID NO: 914299
gcucaugcguccucuaacu

SEQ ID NO: 993397 - RNA, 19 nt, Artificial Sequence
  Description of Artificial Sequence: Synthetic oligonucleotide
  Antisense strand to SEQ ID NO: 993396
aguuagaggacgcaugagc

SEQ ID NO: 993398 - RNA, 19 nt, Artificial Sequence
  Description of Artificial Sequence: Synthetic oligonucleotide
  Sense strand starting at position 1816 of SEQ ID NO: 914299
gcugcuguccugcaggaua

SEQ ID NO: 993399 - RNA, 19 nt, Artificial Sequence
  Description of Artificial Sequence: Synthetic oligonucleotide
  Antisense strand to SEQ ID NO: 993398
uauccugcaggacagcagc

SEQ ID NO: 993400 - RNA, 19 nt, Artificial Sequence
  Description of Artificial Sequence: Synthetic oligonucleotide
  Sense strand starting at position 1818 of SEQ ID NO: 914299
ugcuguccugcaggauaau

SEQ ID NO: 993401 - RNA, 19 nt, Artificial Sequence
  Description of Artificial Sequence: Synthetic oligonucleotide
  Antisense strand to SEQ ID NO: 993400
auuauccugcaggacagca

SEQ ID NO: 993402 - RNA, 19 nt, Artificial Sequence
  Description of Artificial Sequence: Synthetic oligonucleotide
  Sense strand starting at position 2192 of SEQ ID NO: 914299
gugguuaccucagugccua

SEQ ID NO: 993403 - RNA, 19 nt, Artificial Sequence
  Description of Artificial Sequence: Synthetic oligonucleotide
  Antisense strand to SEQ ID NO: 993402
uaggcacugagguaaccac

SEQ ID NO: 993404 - RNA, 19 nt, Artificial Sequence
  Description of Artificial Sequence: Synthetic oligonucleotide
  Sense strand starting at position 2193 of SEQ ID NO: 914299
ugguuaccucagugccuaa

SEQ ID NO: 993405 - RNA, 19 nt, Artificial Sequence
  Description of Artificial Sequence: Synthetic oligonucleotide
  Antisense strand to SEQ ID NO: 993404
uuaggcacugagguaacca

SEQ ID NO: 993406 - RNA, 19 nt, Artificial Sequence
  Description of Artificial Sequence: Synthetic oligonucleotide
  Sense strand starting at position 2299 of SEQ ID NO: 914299
gcauaaauagggugugguu

SEQ ID NO: 993407 - RNA, 19 nt, Artificial Sequence
  Description of Artificial Sequence: Synthetic oligonucleotide
  Antisense strand to SEQ ID NO: 993406
aaccacacccuauuuaugc

SEQ ID NO: 993408 - RNA, 19 nt, Artificial Sequence
  Description of Artificial Sequence: Synthetic oligonucleotide
  Sense strand starting at position 2559 of SEQ ID NO: 914299
ggaauccugacugguccaa

SEQ ID NO: 993409 - RNA, 19 nt, Artificial Sequence
  Description of Artificial Sequence: Synthetic oligonucleotide
  Antisense strand to SEQ ID NO: 993408
uuggaccagucaggauucc

SEQ ID NO: 993410 - RNA, 19 nt, Artificial Sequence
  Description of Artificial Sequence: Synthetic oligonucleotide
  Sense strand starting at position 2561 of SEQ ID NO: 914299
aauccugacugguccaaga

SEQ ID NO: 993411 - RNA, 19 nt, Artificial Sequence
  Description of Artificial Sequence: Synthetic oligonucleotide
  Antisense strand to SEQ ID NO: 993410
ucuuggaccagucaggauu

SEQ ID NO: 993412 - RNA, 19 nt, Artificial Sequence
  Description of Artificial Sequence: Synthetic oligonucleotide
  Sense strand starting at position 2886 of SEQ ID NO: 914299
accugcuguucccuagaga

SEQ ID NO: 993413 - RNA, 19 nt, Artificial Sequence
  Description of Artificial Sequence: Synthetic oligonucleotide
  Antisense strand to SEQ ID NO: 993412
ucucuagggaacagcaggu

SEQ ID NO: 993414 - RNA, 19 nt, Artificial Sequence
  Description of Artificial Sequence: Synthetic oligonucleotide
  Sense strand starting at position 2887 of SEQ ID NO: 914299
ccugcuguucccuagagac

SEQ ID NO: 993415 - RNA, 19 nt, Artificial Sequence
  Description of Artificial Sequence: Synthetic oligonucleotide
  Antisense strand to SEQ ID NO: 993414
gucucuagggaacagcagg

SEQ ID NO: 993416 - RNA, 19 nt, Artificial Sequence
  Description of Artificial Sequence: Synthetic oligonucleotide
  Sense strand starting at position 2917 of SEQ ID NO: 914299
ucaggacucuccugcuaaa

SEQ ID NO: 993417 - RNA, 19 nt, Artificial Sequence
  Description of Artificial Sequence: Synthetic oligonucleotide
  Antisense strand to SEQ ID NO: 993416
uuuagcaggagaguccuga

SEQ ID NO: 993418 - RNA, 19 nt, Artificial Sequence
  Description of Artificial Sequence: Synthetic oligonucleotide
  Sense strand starting at position 3003 of SEQ ID NO: 914299
gcuggacacuucuggaauc

SEQ ID NO: 993419 - RNA, 19 nt, Artificial Sequence
  Description of Artificial Sequence: Synthetic oligonucleotide
  Antisense strand to SEQ ID NO: 993418
gauuccagaaguguccagc

SEQ ID NO: 993420 - RNA, 19 nt, Artificial Sequence
  Description of Artificial Sequence: Synthetic oligonucleotide
  Sense strand starting at position 3277 of SEQ ID NO: 914299
augcgacacuuacauauaa

SEQ ID NO: 993421 - RNA, 19 nt, Artificial Sequence
  Description of Artificial Sequence: Synthetic oligonucleotide
  Antisense strand to SEQ ID NO: 993420
uuauauguaagugucgcau

SEQ ID NO: 993422 - RNA, 19 nt, Artificial Sequence
  Description of Artificial Sequence: Synthetic oligonucleotide
  Sense strand starting at position 3345 of SEQ ID NO: 914299
ccacaaaugccuuaguggu

SEQ ID NO: 993423 - RNA, 19 nt, Artificial Sequence
  Description of Artificial Sequence: Synthetic oligonucleotide
  Antisense strand to SEQ ID NO: 993422
accacuaaggcauuugugg

SEQ ID NO: 993424 - RNA, 19 nt, Artificial Sequence
  Description of Artificial Sequence: Synthetic oligonucleotide
  Sense strand starting at position 3374 of SEQ ID NO: 914299
guacucacuugcucaggaa

SEQ ID NO: 993425 - RNA, 19 nt, Artificial Sequence
  Description of Artificial Sequence: Synthetic oligonucleotide
  Antisense strand to SEQ ID NO: 993424
uuccugagcaagugaguac

SEQ ID NO: 993426 - RNA, 19 nt, Artificial Sequence
  Description of Artificial Sequence: Synthetic oligonucleotide
  Sense strand starting at position 3377 of SEQ ID NO: 914299
cucacuugcucaggaauca

SEQ ID NO: 993427 - RNA, 19 nt, Artificial Sequence
  Description of Artificial Sequence: Synthetic oligonucleotide
  Antisense strand to SEQ ID NO: 993426
ugauuccugagcaagugag

SEQ ID NO: 993428 - RNA, 19 nt, Artificial Sequence
  Description of Artificial Sequence: Synthetic oligonucleotide
  Sense strand starting at position 3388 of SEQ ID NO: 914299
aggaaucagugauugacuu

SEQ ID NO: 993429 - RNA, 19 nt, Artificial Sequence
  Description of Artificial Sequence: Synthetic oligonucleotide
  Antisense strand to SEQ ID NO: 993428
aagucaaucacugauuccu

SEQ ID NO: 993430 - RNA, 19 nt, Artificial Sequence
  Description of Artificial Sequence: Synthetic oligonucleotide
  Sense strand starting at position 3389 of SEQ ID NO: 914299
ggaaucagugauugacuua

SEQ ID NO: 993431 - RNA, 19 nt, Artificial Sequence
  Description of Artificial Sequence: Synthetic oligonucleotide
  Antisense strand to SEQ ID NO: 993430
uaagucaaucacugauucc

SEQ ID NO: 993432 - RNA, 19 nt, Artificial Sequence
  Description of Artificial Sequence: Synthetic oligonucleotide
  Sense strand starting at position 3392 of SEQ ID NO: 914299
aucagugauugacuuaaag

SEQ ID NO: 993433 - RNA, 19 nt, Artificial Sequence
  Description of Artificial Sequence: Synthetic oligonucleotide
  Antisense strand to SEQ ID NO: 993432
cuuuaagucaaucacugau

SEQ ID NO: 993434 - RNA, 19 nt, Artificial Sequence
  Description of Artificial Sequence: Synthetic oligonucleotide
  Sense strand starting at position 3559 of SEQ ID NO: 914299
ugauucuucugagaugcua

SEQ ID NO: 993435 - RNA, 19 nt, Artificial Sequence
  Description of Artificial Sequence: Synthetic oligonucleotide
  Antisense strand to SEQ ID NO: 993434
uagcaucucagaagaauca

SEQ ID NO: 993436 - RNA, 19 nt, Artificial Sequence
  Description of Artificial Sequence: Synthetic oligonucleotide
  Sense strand starting at position 3599 of SEQ ID NO: 914299
acggaauccucuuaauugu

SEQ ID NO: 993437 - RNA, 19 nt, Artificial Sequence
  Description of Artificial Sequence: Synthetic oligonucleotide
  Antisense strand to SEQ ID NO: 993436
acaauuaagaggauuccgu

SEQ ID NO: 993438 - RNA, 19 nt, Artificial Sequence
  Description of Artificial Sequence: Synthetic oligonucleotide
  Sense strand starting at position 3620 of SEQ ID NO: 914299
ugucacugcccucaggaua

SEQ ID NO: 993439 - RNA, 19 nt, Artificial Sequence
  Description of Artificial Sequence: Synthetic oligonucleotide
  Antisense strand to SEQ ID NO: 993438
uauccugagggcagugaca

SEQ ID NO: 993440 - RNA, 19 nt, Artificial Sequence
  Description of Artificial Sequence: Synthetic oligonucleotide
  Sense strand starting at position 3721 of SEQ ID NO: 914299
ucucucuuugcuugggaca

SEQ ID NO: 993441 - RNA, 19 nt, Artificial Sequence
  Description of Artificial Sequence: Synthetic oligonucleotide
  Antisense strand to SEQ ID NO: 993440
ugucccaagcaaagagaga

SEQ ID NO: 993442 - RNA, 19 nt, Artificial Sequence
  Description of Artificial Sequence: Synthetic oligonucleotide
  Sense strand starting at position 3722 of SEQ ID NO: 914299
cucucuuugcuugggacau

SEQ ID NO: 993443 - RNA, 19 nt, Artificial Sequence
  Description of Artificial Sequence: Synthetic oligonucleotide
  Antisense strand to SEQ ID NO: 993442
augucccaagcaaagagag

SEQ ID NO: 993444 - RNA, 19 nt, Artificial Sequence
  Description of Artificial Sequence: Synthetic oligonucleotide
  Sense strand starting at position 3820 of SEQ ID NO: 914299
guauacaggucccuucuua

SEQ ID NO: 993445 - RNA, 19 nt, Artificial Sequence
  Description of Artificial Sequence: Synthetic oligonucleotide
  Antisense strand to SEQ ID NO: 993444
uaagaagggaccuguauac

SEQ ID NO: 993446 - RNA, 19 nt, Artificial Sequence
  Description of Artificial Sequence: Synthetic oligonucleotide
  Sense strand starting at position 3915 of SEQ ID NO: 914299
gagagcucaucgcacugau

SEQ ID NO: 993447 - RNA, 19 nt, Artificial Sequence
  Description of Artificial Sequence: Synthetic oligonucleotide
  Antisense strand to SEQ ID NO: 993446
aucagugcgaugagcucuc

SEQ ID NO: 993448 - RNA, 19 nt, Artificial Sequence
  Description of Artificial Sequence: Synthetic oligonucleotide
  Sense strand starting at position 3918 of SEQ ID NO: 914299
agcucaucgcacugaucau

SEQ ID NO: 993449 - RNA, 19 nt, Artificial Sequence
  Description of Artificial Sequence: Synthetic oligonucleotide
  Antisense strand to SEQ ID NO: 993448
augaucagugcgaugagcu

SEQ ID NO: 993450 - RNA, 19 nt, Artificial Sequence
  Description of Artificial Sequence: Synthetic oligonucleotide
  Sense strand starting at position 70 of SEQ ID NO: 914300
aguaauaggucccugaggu

SEQ ID NO: 993451 - RNA, 19 nt, Artificial Sequence
  Description of Artificial Sequence: Synthetic oligonucleotide
  Antisense strand to SEQ ID NO: 993450
accucagggaccuauuacu

SEQ ID NO: 993452 - RNA, 19 nt, Artificial Sequence
  Description of Artificial Sequence: Synthetic oligonucleotide
  Sense strand starting at position 853 of SEQ ID NO: 914300
ugccaaaugugugcagaca

SEQ ID NO: 993453 - RNA, 19 nt, Artificial Sequence
  Description of Artificial Sequence: Synthetic oligonucleotide
  Antisense strand to SEQ ID NO: 993452
ugucugcacacauuuggca

SEQ ID NO: 993454 - RNA, 19 nt, Artificial Sequence
  Description of Artificial Sequence: Synthetic oligonucleotide
  Sense strand starting at position 1005 of SEQ ID NO: 914300
ccgcucaugcguccucuaa

SEQ ID NO: 993455 - RNA, 19 nt, Artificial Sequence
  Description of Artificial Sequence: Synthetic oligonucleotide
  Antisense strand to SEQ ID NO: 993454
uuagaggacgcaugagcgg

SEQ ID NO: 993456 - RNA, 19 nt, Artificial Sequence
  Description of Artificial Sequence: Synthetic oligonucleotide
  Sense strand starting at position 1007 of SEQ ID NO: 914300
gcucaugcguccucuaacu

SEQ ID NO: 993457 - RNA, 19 nt, Artificial Sequence
  Description of Artificial Sequence: Synthetic oligonucleotide
  Antisense strand to SEQ ID NO: 993456
aguuagaggacgcaugagc

SEQ ID NO: 993458 - RNA, 19 nt, Artificial Sequence
  Description of Artificial Sequence: Synthetic oligonucleotide
  Sense strand starting at position 1086 of SEQ ID NO: 914300
gcugcuguccugcaggaua

SEQ ID NO: 993459 - RNA, 19 nt, Artificial Sequence
  Description of Artificial Sequence: Synthetic oligonucleotide
  Antisense strand to SEQ ID NO: 993458
uauccugcaggacagcagc

SEQ ID NO: 993460 - RNA, 19 nt, Artificial Sequence
  Description of Artificial Sequence: Synthetic oligonucleotide
  Sense strand starting at position 1088 of SEQ ID NO: 914300
ugcuguccugcaggauaau

SEQ ID NO: 993461 - RNA, 19 nt, Artificial Sequence
  Description of Artificial Sequence: Synthetic oligonucleotide
  Antisense strand to SEQ ID NO: 993460
auuauccugcaggacagca

SEQ ID NO: 993462 - RNA, 19 nt, Artificial Sequence
  Description of Artificial Sequence: Synthetic oligonucleotide
  Sense strand starting at position 1462 of SEQ ID NO: 914300
gugguuaccucagugccua

SEQ ID NO: 993463 - RNA, 19 nt, Artificial Sequence
  Description of Artificial Sequence: Synthetic oligonucleotide
  Antisense strand to SEQ ID NO: 993462
uaggcacugagguaaccac

SEQ ID NO: 993464 - RNA, 19 nt, Artificial Sequence
  Description of Artificial Sequence: Synthetic oligonucleotide
  Sense strand starting at position 1463 of SEQ ID NO: 914300
ugguuaccucagugccuaa

SEQ ID NO: 993465 - RNA, 19 nt, Artificial Sequence
  Description of Artificial Sequence: Synthetic oligonucleotide
  Antisense strand to SEQ ID NO: 993464
uuaggcacugagguaacca

SEQ ID NO: 993466 - RNA, 19 nt, Artificial Sequence
  Description of Artificial Sequence: Synthetic oligonucleotide
  Sense strand starting at position 1569 of SEQ ID NO: 914300
gcauaaauagggugugguu

SEQ ID NO: 993467 - RNA, 19 nt, Artificial Sequence
  Description of Artificial Sequence: Synthetic oligonucleotide
  Antisense strand to SEQ ID NO: 993466
aaccacacccuauuuaugc

SEQ ID NO: 993468 - RNA, 19 nt, Artificial Sequence
  Description of Artificial Sequence: Synthetic oligonucleotide
  Sense strand starting at position 1829 of SEQ ID NO: 914300
ggaauccugacugguccaa

SEQ ID NO: 993469 - RNA, 19 nt, Artificial Sequence
  Description of Artificial Sequence: Synthetic oligonucleotide
  Antisense strand to SEQ ID NO: 993468
uuggaccagucaggauucc

SEQ ID NO: 993470 - RNA, 19 nt, Artificial Sequence
  Description of Artificial Sequence: Synthetic oligonucleotide
  Sense strand starting at position 1831 of SEQ ID NO: 914300
aauccugacugguccaaga

SEQ ID NO: 993471 - RNA, 19 nt, Artificial Sequence
  Description of Artificial Sequence: Synthetic oligonucleotide
  Antisense strand to SEQ ID NO: 993470
ucuuggaccagucaggauu

SEQ ID NO: 993472 - RNA, 19 nt, Artificial Sequence
  Description of Artificial Sequence: Synthetic oligonucleotide
  Sense strand starting at position 2156 of SEQ ID NO: 914300
accugcuguucccuagaga

SEQ ID NO: 993473 - RNA, 19 nt, Artificial Sequence
  Description of Artificial Sequence: Synthetic oligonucleotide
  Antisense strand to SEQ ID NO: 993472
ucucuagggaacagcaggu

SEQ ID NO: 993474 - RNA, 19 nt, Artificial Sequence
  Description of Artificial Sequence: Synthetic oligonucleotide
  Sense strand starting at position 2157 of SEQ ID NO: 914300
ccugcuguucccuagagac

SEQ ID NO: 993475 - RNA, 19 nt, Artificial Sequence
  Description of Artificial Sequence: Synthetic oligonucleotide
  Antisense strand to SEQ ID NO: 993474
gucucuagggaacagcagg

SEQ ID NO: 993476 - RNA, 19 nt, Artificial Sequence
  Description of Artificial Sequence: Synthetic oligonucleotide
  Sense strand starting at position 2187 of SEQ ID NO: 914300
ucaggacucuccugcuaaa

SEQ ID NO: 993477 - RNA, 19 nt, Artificial Sequence
  Description of Artificial Sequence: Synthetic oligonucleotide
  Antisense strand to SEQ ID NO: 993476
uuuagcaggagaguccuga

SEQ ID NO: 993478 - RNA, 19 nt, Artificial Sequence
  Description of Artificial Sequence: Synthetic oligonucleotide
  Sense strand starting at position 2273 of SEQ ID NO: 914300
gcuggacacuucuggaauc

SEQ ID NO: 993479 - RNA, 19 nt, Artificial Sequence
  Description of Artificial Sequence: Synthetic oligonucleotide
  Antisense strand to SEQ ID NO: 993478
gauuccagaaguguccagc

SEQ ID NO: 993480 - RNA, 19 nt, Artificial Sequence
  Description of Artificial Sequence: Synthetic oligonucleotide
  Sense strand starting at position 2547 of SEQ ID NO: 914300
augcgacacuuacauauaa

SEQ ID NO: 993481 - RNA, 19 nt, Artificial Sequence
  Description of Artificial Sequence: Synthetic oligonucleotide
  Antisense strand to SEQ ID NO: 993480
uuauauguaagugucgcau

SEQ ID NO: 993482 - RNA, 19 nt, Artificial Sequence
  Description of Artificial Sequence: Synthetic oligonucleotide
  Sense strand starting at position 2615 of SEQ ID NO: 914300
ccacaaaugccuuaguggu

SEQ ID NO: 993483 - RNA, 19 nt, Artificial Sequence
  Description of Artificial Sequence: Synthetic oligonucleotide
  Antisense strand to SEQ ID NO: 993482
accacuaaggcauuugugg

SEQ ID NO: 993484 - RNA, 19 nt, Artificial Sequence
  Description of Artificial Sequence: Synthetic oligonucleotide
  Sense strand starting at position 2644 of SEQ ID NO: 914300
guacucacuugcucaggaa

SEQ ID NO: 993485 - RNA, 19 nt, Artificial Sequence
  Description of Artificial Sequence: Synthetic oligonucleotide
  Antisense strand to SEQ ID NO: 993484
uuccugagcaagugaguac

SEQ ID NO: 993486 - RNA, 19 nt, Artificial Sequence
  Description of Artificial Sequence: Synthetic oligonucleotide
  Sense strand starting at position 2647 of SEQ ID NO: 914300
cucacuugcucaggaauca

SEQ ID NO: 993487 - RNA, 19 nt, Artificial Sequence
  Description of Artificial Sequence: Synthetic oligonucleotide
  Antisense strand to SEQ ID NO: 993486
ugauuccugagcaagugag

SEQ ID NO: 993488 - RNA, 19 nt, Artificial Sequence
  Description of Artificial Sequence: Synthetic oligonucleotide
  Sense strand starting at position 2658 of SEQ ID NO: 914300
aggaaucagugauugacuu

SEQ ID NO: 993489 - RNA, 19 nt, Artificial Sequence
  Description of Artificial Sequence: Synthetic oligonucleotide
  Antisense strand to SEQ ID NO: 993488
aagucaaucacugauuccu

SEQ ID NO: 993490 - RNA, 19 nt, Artificial Sequence
  Description of Artificial Sequence: Synthetic oligonucleotide
  Sense strand starting at position 2659 of SEQ ID NO: 914300
ggaaucagugauugacuua

SEQ ID NO: 993491 - RNA, 19 nt, Artificial Sequence
  Description of Artificial Sequence: Synthetic oligonucleotide
  Antisense strand to SEQ ID NO: 993490
uaagucaaucacugauucc

SEQ ID NO: 993492 - RNA, 19 nt, Artificial Sequence
  Description of Artificial Sequence: Synthetic oligonucleotide
  Sense strand starting at position 2662 of SEQ ID NO: 914300
aucagugauugacuuaaag

SEQ ID NO: 993493 - RNA, 19 nt, Artificial Sequence
  Description of Artificial Sequence: Synthetic oligonucleotide
  Antisense strand to SEQ ID NO: 993492
cuuuaagucaaucacugau

SEQ ID NO: 993494 - RNA, 19 nt, Artificial Sequence
  Description of Artificial Sequence: Synthetic oligonucleotide
  Sense strand starting at position 2829 of SEQ ID NO: 914300
ugauucuucugagaugcua

SEQ ID NO: 993495 - RNA, 19 nt, Artificial Sequence
  Description of Artificial Sequence: Synthetic oligonucleotide
  Antisense strand to SEQ ID NO: 993494
uagcaucucagaagaauca

SEQ ID NO: 993496 - RNA, 19 nt, Artificial Sequence
  Description of Artificial Sequence: Synthetic oligonucleotide
  Sense strand starting at position 2869 of SEQ ID NO: 914300
acggaauccucuuaauugu

SEQ ID NO: 993497 - RNA, 19 nt, Artificial Sequence
  Description of Artificial Sequence: Synthetic oligonucleotide
  Antisense strand to SEQ ID NO: 993496
acaauuaagaggauuccgu

SEQ ID NO: 993498 - RNA, 19 nt, Artificial Sequence
  Description of Artificial Sequence: Synthetic oligonucleotide
  Sense strand starting at position 2890 of SEQ ID NO: 914300
ugucacugcccucaggaua

SEQ ID NO: 993499 - RNA, 19 nt, Artificial Sequence
  Description of Artificial Sequence: Synthetic oligonucleotide
  Antisense strand to SEQ ID NO: 993498
uauccugagggcagugaca

SEQ ID NO: 993500 - RNA, 19 nt, Artificial Sequence
  Description of Artificial Sequence: Synthetic oligonucleotide
  Sense strand starting at position 2991 of SEQ ID NO: 914300
ucucucuuugcuugggaca

SEQ ID NO: 993501 - RNA, 19 nt, Artificial Sequence
  Description of Artificial Sequence: Synthetic oligonucleotide
  Antisense strand to SEQ ID NO: 993500
ugucccaagcaaagagaga

SEQ ID NO: 993502 - RNA, 19 nt, Artificial Sequence
  Description of Artificial Sequence: Synthetic oligonucleotide
  Sense strand starting at position 2992 of SEQ ID NO: 914300
cucucuuugcuugggacau

SEQ ID NO: 993503 - RNA, 19 nt, Artificial Sequence
  Description of Artificial Sequence: Synthetic oligonucleotide
  Antisense strand to SEQ ID NO: 993502
augucccaagcaaagagag

SEQ ID NO: 993504 - RNA, 19 nt, Artificial Sequence
  Description of Artificial Sequence: Synthetic oligonucleotide
  Sense strand starting at position 3090 of SEQ ID NO: 914300
guauacaggucccuucuua

SEQ ID NO: 993505 - RNA, 19 nt, Artificial Sequence
  Description of Artificial Sequence: Synthetic oligonucleotide
  Antisense strand to SEQ ID NO: 993504
uaagaagggaccuguauac

SEQ ID NO: 993506 - RNA, 19 nt, Artificial Sequence
  Description of Artificial Sequence: Synthetic oligonucleotide
  Sense strand starting at position 3188 of SEQ ID NO: 914300
agcucaucgcacugaucau

SEQ ID NO: 993507 - RNA, 19 nt, Artificial Sequence
  Description of Artificial Sequence: Synthetic oligonucleotide
  Antisense strand to SEQ ID NO: 993506
augaucagugcgaugagcu

SEQ ID NO: 993508 - RNA, 19 nt, Artificial Sequence
  Description of Artificial Sequence: Synthetic oligonucleotide
  Sense strand starting at position 3278 of SEQ ID NO: 914300
aguauacauuuccagcauu

SEQ ID NO: 993509 - RNA, 19 nt, Artificial Sequence
  Description of Artificial Sequence: Synthetic oligonucleotide
  Antisense strand to SEQ ID NO: 993508
aaugcuggaaauguauacu

SEQ ID NO: 993510 - RNA, 19 nt, Artificial Sequence
  Description of Artificial Sequence: Synthetic oligonucleotide
  Sense strand starting at position 3571 of SEQ ID NO: 914300
ucacaaugucuccaccagu

SEQ ID NO: 993511 - RNA, 19 nt, Artificial Sequence
  Description of Artificial Sequence: Synthetic oligonucleotide
  Antisense strand to SEQ ID NO: 993510
acugguggagacauuguga

SEQ ID NO: 993512 - RNA, 19 nt, Artificial Sequence
  Description of Artificial Sequence: Synthetic oligonucleotide
  Sense strand starting at position 3587 of SEQ ID NO: 914300
agugcaugauccuugagaa

SEQ ID NO: 993513 - RNA, 19 nt, Artificial Sequence
  Description of Artificial Sequence: Synthetic oligonucleotide
  Antisense strand to SEQ ID NO: 993512
uucucaaggaucaugcacu

SEQ ID NO: 993514 - RNA, 19 nt, Artificial Sequence
  Description of Artificial Sequence: Synthetic oligonucleotide
  Sense strand starting at position 3588 of SEQ ID NO: 914300
gugcaugauccuugagaau

SEQ ID NO: 993515 - RNA, 19 nt, Artificial Sequence
  Description of Artificial Sequence: Synthetic oligonucleotide
  Antisense strand to SEQ ID NO: 993514
auucucaaggaucaugcac

SEQ ID NO: 993516 - RNA, 19 nt, Artificial Sequence
  Description of Artificial Sequence: Synthetic oligonucleotide
  Sense strand starting at position 3760 of SEQ ID NO: 914300
gccucuauuuggucacuga

SEQ ID NO: 993517 - RNA, 19 nt, Artificial Sequence
  Description of Artificial Sequence: Synthetic oligonucleotide
  Antisense strand to SEQ ID NO: 993516
ucagugaccaaauagaggc

SEQ ID NO: 993518 - RNA, 19 nt, Artificial Sequence
  Description of Artificial Sequence: Synthetic oligonucleotide
  Sense strand starting at position 3827 of SEQ ID NO: 914300
augcaagccucagauagau

SEQ ID NO: 993519 - RNA, 19 nt, Artificial Sequence
  Description of Artificial Sequence: Synthetic oligonucleotide
  Antisense strand to SEQ ID NO: 993518
aucuaucugaggcuugcau

SEQ ID NO: 993520 - RNA, 19 nt, Artificial Sequence
  Description of Artificial Sequence: Synthetic oligonucleotide
  Sense strand starting at position 3878 of SEQ ID NO: 914300
uagaauuuguuguuaacgu

SEQ ID NO: 993521 - RNA, 19 nt, Artificial Sequence
  Description of Artificial Sequence: Synthetic oligonucleotide
  Antisense strand to SEQ ID NO: 993520
acguuaacaacaaauucua

SEQ ID NO: 993522 - RNA, 19 nt, Artificial Sequence
  Description of Artificial Sequence: Synthetic oligonucleotide
  Sense strand starting at position 3879 of SEQ ID NO: 914300
agaauuuguuguuaacguu

SEQ ID NO: 993523 - RNA, 19 nt, Artificial Sequence
  Description of Artificial Sequence: Synthetic oligonucleotide
  Antisense strand to SEQ ID NO: 993522
aacguuaacaacaaauucu

SEQ ID NO: 993524 - RNA, 19 nt, Artificial Sequence
  Description of Artificial Sequence: Synthetic oligonucleotide
  Sense strand starting at position 3886 of SEQ ID NO: 914300
guuguuaacguuuagaaau

SEQ ID NO: 993525 - RNA, 19 nt, Artificial Sequence
  Description of Artificial Sequence: Synthetic oligonucleotide
  Antisense strand to SEQ ID NO: 993524
auuucuaaacguuaacaac

SEQ ID NO: 993526 - RNA, 19 nt, Artificial Sequence
  Description of Artificial Sequence: Synthetic oligonucleotide
  Sense strand starting at position 3893 of SEQ ID NO: 914300
acguuuagaaauugggcua

SEQ ID NO: 993527 - RNA, 19 nt, Artificial Sequence
  Description of Artificial Sequence: Synthetic oligonucleotide
  Antisense strand to SEQ ID NO: 993526
uagcccaauuucuaaacgu

SEQ ID NO: 993528 - RNA, 19 nt, Artificial Sequence
  Description of Artificial Sequence: Synthetic oligonucleotide
  Sense strand starting at position 3894 of SEQ ID NO: 914300
cguuuagaaauugggcuau

SEQ ID NO: 993529 - RNA, 19 nt, Artificial Sequence
  Description of Artificial Sequence: Synthetic oligonucleotide
  Antisense strand to SEQ ID NO: 993528
auagcccaauuucuaaacg

SEQ ID NO: 993530 - RNA, 19 nt, Artificial Sequence
  Description of Artificial Sequence: Synthetic oligonucleotide
  Sense strand starting at position 34 of SEQ ID NO: 914301
ccagcuaucccgugguaaa

SEQ ID NO: 993531 - RNA, 19 nt, Artificial Sequence
  Description of Artificial Sequence: Synthetic oligonucleotide
  Antisense strand to SEQ ID NO: 993530
uuuaccacgggauagcugg

SEQ ID NO: 993532 - RNA, 19 nt, Artificial Sequence
  Description of Artificial Sequence: Synthetic oligonucleotide
  Sense strand starting at position 35 of SEQ ID NO: 914301
cagcuaucccgugguaaag

SEQ ID NO: 993533 - RNA, 19 nt, Artificial Sequence
  Description of Artificial Sequence: Synthetic oligonucleotide
  Antisense strand to SEQ ID NO: 993532
cuuuaccacgggauagcug

SEQ ID NO: 993534 - RNA, 19 nt, Artificial Sequence
  Description of Artificial Sequence: Synthetic oligonucleotide
  Sense strand starting at position 94 of SEQ ID NO: 914301
agccuucuccaugagcaaa

SEQ ID NO: 993535 - RNA, 19 nt, Artificial Sequence
  Description of Artificial Sequence: Synthetic oligonucleotide
  Antisense strand to SEQ ID NO: 993534
uuugcucauggagaaggcu

SEQ ID NO: 993536 - RNA, 19 nt, Artificial Sequence
  Description of Artificial Sequence: Synthetic oligonucleotide
  Sense strand starting at position 151 of SEQ ID NO: 914301
gagugaguguccuauccua

SEQ ID NO: 993537 - RNA, 19 nt, Artificial Sequence
  Description of Artificial Sequence: Synthetic oligonucleotide
  Antisense strand to SEQ ID NO: 993536
uaggauaggacacucacuc

SEQ ID NO: 993538 - RNA, 19 nt, Artificial Sequence
  Description of Artificial Sequence: Synthetic oligonucleotide
  Sense strand starting at position 316 of SEQ ID NO: 914301
aguaauaggucccugaggu

SEQ ID NO: 993539 - RNA, 19 nt, Artificial Sequence
  Description of Artificial Sequence: Synthetic oligonucleotide
  Antisense strand to SEQ ID NO: 993538
accucagggaccuauuacu

SEQ ID NO: 993540 - RNA, 19 nt, Artificial Sequence
  Description of Artificial Sequence: Synthetic oligonucleotide
  Sense strand starting at position 548 of SEQ ID NO: 914301
agccuauagucuggaguca

SEQ ID NO: 993541 - RNA, 19 nt, Artificial Sequence
  Description of Artificial Sequence: Synthetic oligonucleotide
  Antisense strand to SEQ ID NO: 993540
ugacuccagacuauaggcu

SEQ ID NO: 993542 - RNA, 19 nt, Artificial Sequence
  Description of Artificial Sequence: Synthetic oligonucleotide
  Sense strand starting at position 1099 of SEQ ID NO: 914301
ugccaaaugugugcagaca

SEQ ID NO: 993543 - RNA, 19 nt, Artificial Sequence
  Description of Artificial Sequence: Synthetic oligonucleotide
  Antisense strand to SEQ ID NO: 993542
ugucugcacacauuuggca

SEQ ID NO: 993544 - RNA, 19 nt, Artificial Sequence
  Description of Artificial Sequence: Synthetic oligonucleotide
  Sense strand starting at position 1251 of SEQ ID NO: 914301
ccgcucaugcguccucuaa

SEQ ID NO: 993545 - RNA, 19 nt, Artificial Sequence
  Description of Artificial Sequence: Synthetic oligonucleotide
  Antisense strand to SEQ ID NO: 993544
uuagaggacgcaugagcgg

SEQ ID NO: 993546 - RNA, 19 nt, Artificial Sequence
  Description of Artificial Sequence: Synthetic oligonucleotide
  Sense strand starting at position 1253 of SEQ ID NO: 914301
gcucaugcguccucuaacu

SEQ ID NO: 993547 - RNA, 19 nt, Artificial Sequence
  Description of Artificial Sequence: Synthetic oligonucleotide
  Antisense strand to SEQ ID NO: 993546
aguuagaggacgcaugagc

SEQ ID NO: 993548 - RNA, 19 nt, Artificial Sequence
  Description of Artificial Sequence: Synthetic oligonucleotide
  Sense strand starting at position 1332 of SEQ ID NO: 914301
gcugcuguccugcaggaua

SEQ ID NO: 993549 - RNA, 19 nt, Artificial Sequence
  Description of Artificial Sequence: Synthetic oligonucleotide
  Antisense strand to SEQ ID NO: 993548
uauccugcaggacagcagc

SEQ ID NO: 993550 - RNA, 19 nt, Artificial Sequence
  Description of Artificial Sequence: Synthetic oligonucleotide
  Sense strand starting at position 1334 of SEQ ID NO: 914301
ugcuguccugcaggauaau

SEQ ID NO: 993551 - RNA, 19 nt, Artificial Sequence
  Description of Artificial Sequence: Synthetic oligonucleotide
  Antisense strand to SEQ ID NO: 993550
auuauccugcaggacagca

SEQ ID NO: 993552 - RNA, 19 nt, Artificial Sequence
  Description of Artificial Sequence: Synthetic oligonucleotide
  Sense strand starting at position 1708 of SEQ ID NO: 914301
gugguuaccucagugccua

SEQ ID NO: 993553 - RNA, 19 nt, Artificial Sequence
  Description of Artificial Sequence: Synthetic oligonucleotide
  Antisense strand to SEQ ID NO: 993552
uaggcacugagguaaccac

SEQ ID NO: 993554 - RNA, 19 nt, Artificial Sequence
  Description of Artificial Sequence: Synthetic oligonucleotide
  Sense strand starting at position 1709 of SEQ ID NO: 914301
ugguuaccucagugccuaa

SEQ ID NO: 993555 - RNA, 19 nt, Artificial Sequence
  Description of Artificial Sequence: Synthetic oligonucleotide
  Antisense strand to SEQ ID NO: 993554
uuaggcacugagguaacca

SEQ ID NO: 993556 - RNA, 19 nt, Artificial Sequence
  Description of Artificial Sequence: Synthetic oligonucleotide
  Sense strand starting at position 1815 of SEQ ID NO: 914301
gcauaaauagggugugguu

SEQ ID NO: 993557 - RNA, 19 nt, Artificial Sequence
  Description of Artificial Sequence: Synthetic oligonucleotide
  Antisense strand to SEQ ID NO: 993556
aaccacacccuauuuaugc

SEQ ID NO: 993558 - RNA, 19 nt, Artificial Sequence
  Description of Artificial Sequence: Synthetic oligonucleotide
  Sense strand starting at position 2075 of SEQ ID NO: 914301
ggaauccugacugguccaa

SEQ ID NO: 993559 - RNA, 19 nt, Artificial Sequence
  Description of Artificial Sequence: Synthetic oligonucleotide
  Antisense strand to SEQ ID NO: 993558
uuggaccagucaggauucc

SEQ ID NO: 993560 - RNA, 19 nt, Artificial Sequence
  Description of Artificial Sequence: Synthetic oligonucleotide
  Sense strand starting at position 2077 of SEQ ID NO: 914301
aauccugacugguccaaga

SEQ ID NO: 993561 - RNA, 19 nt, Artificial Sequence
  Description of Artificial Sequence: Synthetic oligonucleotide
  Antisense strand to SEQ ID NO: 993560
ucuuggaccagucaggauu

SEQ ID NO: 993562 - RNA, 19 nt, Artificial Sequence
  Description of Artificial Sequence: Synthetic oligonucleotide
  Sense strand starting at position 2402 of SEQ ID NO: 914301
accugcuguucccuagaga

SEQ ID NO: 993563 - RNA, 19 nt, Artificial Sequence
  Description of Artificial Sequence: Synthetic oligonucleotide
  Antisense strand to SEQ ID NO: 993562
ucucuagggaacagcaggu

SEQ ID NO: 993564 - RNA, 19 nt, Artificial Sequence
  Description of Artificial Sequence: Synthetic oligonucleotide
  Sense strand starting at position 2403 of SEQ ID NO: 914301
ccugcuguucccuagagac

SEQ ID NO: 993565 - RNA, 19 nt, Artificial Sequence
  Description of Artificial Sequence: Synthetic oligonucleotide
  Antisense strand to SEQ ID NO: 993564
gucucuagggaacagcagg

SEQ ID NO: 993566 - RNA, 19 nt, Artificial Sequence
  Description of Artificial Sequence: Synthetic oligonucleotide
  Sense strand starting at position 2433 of SEQ ID NO: 914301
ucaggacucuccugcuaaa

SEQ ID NO: 993567 - RNA, 19 nt, Artificial Sequence
  Description of Artificial Sequence: Synthetic oligonucleotide
  Antisense strand to SEQ ID NO: 993566
uuuagcaggagaguccuga

SEQ ID NO: 993568 - RNA, 19 nt, Artificial Sequence
  Description of Artificial Sequence: Synthetic oligonucleotide
  Sense strand starting at position 2519 of SEQ ID NO: 914301
gcuggacacuucuggaauc

SEQ ID NO: 993569 - RNA, 19 nt, Artificial Sequence
  Description of Artificial Sequence: Synthetic oligonucleotide
  Antisense strand to SEQ ID NO: 993568
gauuccagaaguguccagc

SEQ ID NO: 993570 - RNA, 19 nt, Artificial Sequence
  Description of Artificial Sequence: Synthetic oligonucleotide
  Sense strand starting at position 2793 of SEQ ID NO: 914301
augcgacacuuacauauaa

SEQ ID NO: 993571 - RNA, 19 nt, Artificial Sequence
  Description of Artificial Sequence: Synthetic oligonucleotide
  Antisense strand to SEQ ID NO: 993570
uuauauguaagugucgcau

SEQ ID NO: 993572 - RNA, 19 nt, Artificial Sequence
  Description of Artificial Sequence: Synthetic oligonucleotide
  Sense strand starting at position 2861 of SEQ ID NO: 914301
ccacaaaugccuuaguggu

SEQ ID NO: 993573 - RNA, 19 nt, Artificial Sequence
  Description of Artificial Sequence: Synthetic oligonucleotide
  Antisense strand to SEQ ID NO: 993572
accacuaaggcauuugugg

SEQ ID NO: 993574 - RNA, 19 nt, Artificial Sequence
  Description of Artificial Sequence: Synthetic oligonucleotide
  Sense strand starting at position 2890 of SEQ ID NO: 914301
guacucacuugcucaggaa

SEQ ID NO: 993575 - RNA, 19 nt, Artificial Sequence
  Description of Artificial Sequence: Synthetic oligonucleotide
  Antisense strand to SEQ ID NO: 993574
uuccugagcaagugaguac

SEQ ID NO: 993576 - RNA, 19 nt, Artificial Sequence
  Description of Artificial Sequence: Synthetic oligonucleotide
  Sense strand starting at position 2893 of SEQ ID NO: 914301
cucacuugcucaggaauca

SEQ ID NO: 993577 - RNA, 19 nt, Artificial Sequence
  Description of Artificial Sequence: Synthetic oligonucleotide
  Antisense strand to SEQ ID NO: 993576
ugauuccugagcaagugag

SEQ ID NO: 993578 - RNA, 19 nt, Artificial Sequence
  Description of Artificial Sequence: Synthetic oligonucleotide
  Sense strand starting at position 2904 of SEQ ID NO: 914301
aggaaucagugauugacuu

SEQ ID NO: 993579 - RNA, 19 nt, Artificial Sequence
  Description of Artificial Sequence: Synthetic oligonucleotide
  Antisense strand to SEQ ID NO: 993578
aagucaaucacugauuccu

SEQ ID NO: 993580 - RNA, 19 nt, Artificial Sequence
  Description of Artificial Sequence: Synthetic oligonucleotide
  Sense strand starting at position 2905 of SEQ ID NO: 914301
ggaaucagugauugacuua

SEQ ID NO: 993581 - RNA, 19 nt, Artificial Sequence
  Description of Artificial Sequence: Synthetic oligonucleotide
  Antisense strand to SEQ ID NO: 993580
uaagucaaucacugauucc

SEQ ID NO: 993582 - RNA, 19 nt, Artificial Sequence
  Description of Artificial Sequence: Synthetic oligonucleotide
  Sense strand starting at position 2908 of SEQ ID NO: 914301
aucagugauugacuuaaag

SEQ ID NO: 993583 - RNA, 19 nt, Artificial Sequence
  Description of Artificial Sequence: Synthetic oligonucleotide
  Antisense strand to SEQ ID NO: 993582
cuuuaagucaaucacugau

SEQ ID NO: 993584 - RNA, 19 nt, Artificial Sequence
  Description of Artificial Sequence: Synthetic oligonucleotide
  Sense strand starting at position 3075 of SEQ ID NO: 914301
ugauucuucugagaugcua

SEQ ID NO: 993585 - RNA, 19 nt, Artificial Sequence
  Description of Artificial Sequence: Synthetic oligonucleotide
  Antisense strand to SEQ ID NO: 993584
uagcaucucagaagaauca

SEQ ID NO: 993586 - RNA, 19 nt, Artificial Sequence
  Description of Artificial Sequence: Synthetic oligonucleotide
  Sense strand starting at position 3115 of SEQ ID NO: 914301
acggaauccucuuaauugu

SEQ ID NO: 993587 - RNA, 19 nt, Artificial Sequence
  Description of Artificial Sequence: Synthetic oligonucleotide
  Antisense strand to SEQ ID NO: 993586
acaauuaagaggauuccgu

SEQ ID NO: 993588 - RNA, 19 nt, Artificial Sequence
  Description of Artificial Sequence: Synthetic oligonucleotide
  Sense strand starting at position 3136 of SEQ ID NO: 914301
ugucacugcccucaggaua

SEQ ID NO: 993589 - RNA, 19 nt, Artificial Sequence
  Description of Artificial Sequence: Synthetic oligonucleotide
  Antisense strand to SEQ ID NO: 993588
uauccugagggcagugaca

SEQ ID NO: 993590 - RNA, 19 nt, Artificial Sequence
  Description of Artificial Sequence: Synthetic oligonucleotide
  Sense strand starting at position 3237 of SEQ ID NO: 914301
ucucucuuugcuugggaca

SEQ ID NO: 993591 - RNA, 19 nt, Artificial Sequence
  Description of Artificial Sequence: Synthetic oligonucleotide
  Antisense strand to SEQ ID NO: 993590
ugucccaagcaaagagaga

SEQ ID NO: 993592 - RNA, 19 nt, Artificial Sequence
  Description of Artificial Sequence: Synthetic oligonucleotide
  Sense strand starting at position 3238 of SEQ ID NO: 914301
cucucuuugcuugggacau

SEQ ID NO: 993593 - RNA, 19 nt, Artificial Sequence
  Description of Artificial Sequence: Synthetic oligonucleotide
  Antisense strand to SEQ ID NO: 993592
augucccaagcaaagagag

SEQ ID NO: 993594 - RNA, 19 nt, Artificial Sequence
  Description of Artificial Sequence: Synthetic oligonucleotide
  Sense strand starting at position 3336 of SEQ ID NO: 914301
guauacaggucccuucuua

SEQ ID NO: 993595 - RNA, 19 nt, Artificial Sequence
  Description of Artificial Sequence: Synthetic oligonucleotide
  Antisense strand to SEQ ID NO: 993594
uaagaagggaccuguauac

SEQ ID NO: 993596 - RNA, 19 nt, Artificial Sequence
  Description of Artificial Sequence: Synthetic oligonucleotide
  Sense strand starting at position 3431 of SEQ ID NO: 914301
gagagcucaucgcacugau

SEQ ID NO: 993597 - RNA, 19 nt, Artificial Sequence
  Description of Artificial Sequence: Synthetic oligonucleotide
  Antisense strand to SEQ ID NO: 993596
aucagugcgaugagcucuc

SEQ ID NO: 993598 - RNA, 19 nt, Artificial Sequence
  Description of Artificial Sequence: Synthetic oligonucleotide
  Sense strand starting at position 3434 of SEQ ID NO: 914301
agcucaucgcacugaucau

SEQ ID NO: 993599 - RNA, 19 nt, Artificial Sequence
  Description of Artificial Sequence: Synthetic oligonucleotide
  Antisense strand to SEQ ID NO: 993598
augaucagugcgaugagcu

SEQ ID NO: 993600 - RNA, 19 nt, Artificial Sequence
  Description of Artificial Sequence: Synthetic oligonucleotide
  Sense strand starting at position 3524 of SEQ ID NO: 914301
aguauacauuuccagcauu

SEQ ID NO: 993601 - RNA, 19 nt, Artificial Sequence
  Description of Artificial Sequence: Synthetic oligonucleotide
  Antisense strand to SEQ ID NO: 993600
aaugcuggaaauguauacu

SEQ ID NO: 993602 - RNA, 19 nt, Artificial Sequence
  Description of Artificial Sequence: Synthetic oligonucleotide
  Sense strand starting at position 3817 of SEQ ID NO: 914301
ucacaaugucuccaccagu

SEQ ID NO: 993603 - RNA, 19 nt, Artificial Sequence
  Description of Artificial Sequence: Synthetic oligonucleotide
  Antisense strand to SEQ ID NO: 993602
acugguggagacauuguga

SEQ ID NO: 993604 - RNA, 19 nt, Artificial Sequence
  Description of Artificial Sequence: Synthetic oligonucleotide
  Sense strand starting at position 3833 of SEQ ID NO: 914301
agugcaugauccuugagaa

SEQ ID NO: 993605 - RNA, 19 nt, Artificial Sequence
  Description of Artificial Sequence: Synthetic oligonucleotide
  Antisense strand to SEQ ID NO: 993604
uucucaaggaucaugcacu

SEQ ID NO: 993606 - RNA, 19 nt, Artificial Sequence
  Description of Artificial Sequence: Synthetic oligonucleotide
  Sense strand starting at position 3834 of SEQ ID NO: 914301
gugcaugauccuugagaau

SEQ ID NO: 993607 - RNA, 19 nt, Artificial Sequence
  Description of Artificial Sequence: Synthetic oligonucleotide
  Antisense strand to SEQ ID NO: 993606
auucucaaggaucaugcac

SEQ ID NO: 993608 - RNA, 19 nt, Artificial Sequence
  Description of Artificial Sequence: Synthetic oligonucleotide
  Sense strand starting at position 3846 of SEQ ID NO: 914301
ugagaauccucuugccacu

SEQ ID NO: 993609 - RNA, 19 nt, Artificial Sequence
  Description of Artificial Sequence: Synthetic oligonucleotide
  Antisense strand to SEQ ID NO: 993608
aguggcaagaggauucuca

SEQ ID NO: 993610 - RNA, 19 nt, Artificial Sequence
  Description of Artificial Sequence: Synthetic oligonucleotide
  Sense strand starting at position 61 of SEQ ID NO: 914302
gguagaggaucugagucaa

SEQ ID NO: 993611 - RNA, 19 nt, Artificial Sequence
  Description of Artificial Sequence: Synthetic oligonucleotide
  Antisense strand to SEQ ID NO: 993610
uugacucagauccucuacc

SEQ ID NO: 993612 - RNA, 19 nt, Artificial Sequence
  Description of Artificial Sequence: Synthetic oligonucleotide
  Sense strand starting at position 81 of SEQ ID NO: 914302
acuggagaguuccugacua

SEQ ID NO: 993613 - RNA, 19 nt, Artificial Sequence
  Description of Artificial Sequence: Synthetic oligonucleotide
  Antisense strand to SEQ ID NO: 993612
uagucaggaacucuccagu

SEQ ID NO: 993614 - RNA, 19 nt, Artificial Sequence
  Description of Artificial Sequence: Synthetic oligonucleotide
  Sense strand starting at position 85 of SEQ ID NO: 914302
gagaguuccugacuacaga

SEQ ID NO: 993615 - RNA, 19 nt, Artificial Sequence
  Description of Artificial Sequence: Synthetic oligonucleotide
  Antisense strand to SEQ ID NO: 993614
ucuguagucaggaacucuc

SEQ ID NO: 993616 - RNA, 19 nt, Artificial Sequence
  Description of Artificial Sequence: Synthetic oligonucleotide
  Sense strand starting at position 187 of SEQ ID NO: 914302
gggugagggagaugucaga

SEQ ID NO: 993617 - RNA, 19 nt, Artificial Sequence
  Description of Artificial Sequence: Synthetic oligonucleotide
  Antisense strand to SEQ ID NO: 993616
ucugacaucucccucaccc

SEQ ID NO: 993618 - RNA, 19 nt, Artificial Sequence
  Description of Artificial Sequence: Synthetic oligonucleotide
  Sense strand starting at position 321 of SEQ ID NO: 914302
ugugcugagacuggaagaa

SEQ ID NO: 993619 - RNA, 19 nt, Artificial Sequence
  Description of Artificial Sequence: Synthetic oligonucleotide
  Antisense strand to SEQ ID NO: 993618
uucuuccagucucagcaca

SEQ ID NO: 993620 - RNA, 19 nt, Artificial Sequence
  Description of Artificial Sequence: Synthetic oligonucleotide
  Sense strand starting at position 434 of SEQ ID NO: 914302
ggugucagucuugaacaaa

SEQ ID NO: 993621 - RNA, 19 nt, Artificial Sequence
  Description of Artificial Sequence: Synthetic oligonucleotide
  Antisense strand to SEQ ID NO: 993620
uuuguucaagacugacacc

SEQ ID NO: 993622 - RNA, 19 nt, Artificial Sequence
  Description of Artificial Sequence: Synthetic oligonucleotide
  Sense strand starting at position 517 of SEQ ID NO: 914302
gcugaaggcagaugguaau

SEQ ID NO: 993623 - RNA, 19 nt, Artificial Sequence
  Description of Artificial Sequence: Synthetic oligonucleotide
  Antisense strand to SEQ ID NO: 993622
auuaccaucugccuucagc

SEQ ID NO: 993624 - RNA, 19 nt, Artificial Sequence
  Description of Artificial Sequence: Synthetic oligonucleotide
  Sense strand starting at position 703 of SEQ ID NO: 914302
cuggguucauccuugggaa

SEQ ID NO: 993625 - RNA, 19 nt, Artificial Sequence
  Description of Artificial Sequence: Synthetic oligonucleotide
  Antisense strand to SEQ ID NO: 993624
uucccaaggaugaacccag

SEQ ID NO: 993626 - RNA, 19 nt, Artificial Sequence
  Description of Artificial Sequence: Synthetic oligonucleotide
  Sense strand starting at position 704 of SEQ ID NO: 914302
uggguucauccuugggaag

SEQ ID NO: 993627 - RNA, 19 nt, Artificial Sequence
  Description of Artificial Sequence: Synthetic oligonucleotide
  Antisense strand to SEQ ID NO: 993626
cuucccaaggaugaaccca

SEQ ID NO: 993628 - RNA, 19 nt, Artificial Sequence
  Description of Artificial Sequence: Synthetic oligonucleotide
  Sense strand starting at position 760 of SEQ ID NO: 914302
ccagcuaucccgugguaaa

SEQ ID NO: 993629 - RNA, 19 nt, Artificial Sequence
  Description of Artificial Sequence: Synthetic oligonucleotide
  Antisense strand to SEQ ID NO: 993628
uuuaccacgggauagcugg

SEQ ID NO: 993630 - RNA, 19 nt, Artificial Sequence
  Description of Artificial Sequence: Synthetic oligonucleotide
  Sense strand starting at position 761 of SEQ ID NO: 914302
cagcuaucccgugguaaag

SEQ ID NO: 993631 - RNA, 19 nt, Artificial Sequence
  Description of Artificial Sequence: Synthetic oligonucleotide
  Antisense strand to SEQ ID NO: 993630
cuuuaccacgggauagcug

SEQ ID NO: 993632 - RNA, 19 nt, Artificial Sequence
  Description of Artificial Sequence: Synthetic oligonucleotide
  Sense strand starting at position 820 of SEQ ID NO: 914302
agccuucuccaugagcaaa

SEQ ID NO: 993633 - RNA, 19 nt, Artificial Sequence
  Description of Artificial Sequence: Synthetic oligonucleotide
  Antisense strand to SEQ ID NO: 993632
uuugcucauggagaaggcu

SEQ ID NO: 993634 - RNA, 19 nt, Artificial Sequence
  Description of Artificial Sequence: Synthetic oligonucleotide
  Sense strand starting at position 877 of SEQ ID NO: 914302
gagugaguguccuauccua

SEQ ID NO: 993635 - RNA, 19 nt, Artificial Sequence
  Description of Artificial Sequence: Synthetic oligonucleotide
  Antisense strand to SEQ ID NO: 993634
uaggauaggacacucacuc

SEQ ID NO: 993636 - RNA, 19 nt, Artificial Sequence
  Description of Artificial Sequence: Synthetic oligonucleotide
  Sense strand starting at position 1042 of SEQ ID NO: 914302
aguaauaggucccugaggu

SEQ ID NO: 993637 - RNA, 19 nt, Artificial Sequence
  Description of Artificial Sequence: Synthetic oligonucleotide
  Antisense strand to SEQ ID NO: 993636
accucagggaccuauuacu

SEQ ID NO: 993638 - RNA, 19 nt, Artificial Sequence
  Description of Artificial Sequence: Synthetic oligonucleotide
  Sense strand starting at position 1825 of SEQ ID NO: 914302
ugccaaaugugugcagaca

SEQ ID NO: 993639 - RNA, 19 nt, Artificial Sequence
  Description of Artificial Sequence: Synthetic oligonucleotide
  Antisense strand to SEQ ID NO: 993638
ugucugcacacauuuggca

SEQ ID NO: 993640 - RNA, 19 nt, Artificial Sequence
  Description of Artificial Sequence: Synthetic oligonucleotide
  Sense strand starting at position 1977 of SEQ ID NO: 914302
ccgcucaugcguccucuaa

SEQ ID NO: 993641 - RNA, 19 nt, Artificial Sequence
  Description of Artificial Sequence: Synthetic oligonucleotide
  Antisense strand to SEQ ID NO: 993640
uuagaggacgcaugagcgg

SEQ ID NO: 993642 - RNA, 19 nt, Artificial Sequence
  Description of Artificial Sequence: Synthetic oligonucleotide
  Sense strand starting at position 1979 of SEQ ID NO: 914302
gcucaugcguccucuaacu

SEQ ID NO: 993643 - RNA, 19 nt, Artificial Sequence
  Description of Artificial Sequence: Synthetic oligonucleotide
  Antisense strand to SEQ ID NO: 993642
aguuagaggacgcaugagc

SEQ ID NO: 993644 - RNA, 19 nt, Artificial Sequence
  Description of Artificial Sequence: Synthetic oligonucleotide
  Sense strand starting at position 2058 of SEQ ID NO: 914302
gcugcuguccugcaggaua

SEQ ID NO: 993645 - RNA, 19 nt, Artificial Sequence
  Description of Artificial Sequence: Synthetic oligonucleotide
  Antisense strand to SEQ ID NO: 993644
uauccugcaggacagcagc

SEQ ID NO: 993646 - RNA, 19 nt, Artificial Sequence
  Description of Artificial Sequence: Synthetic oligonucleotide
  Sense strand starting at position 2060 of SEQ ID NO: 914302
ugcuguccugcaggauaau

SEQ ID NO: 993647 - RNA, 19 nt, Artificial Sequence
  Description of Artificial Sequence: Synthetic oligonucleotide
  Antisense strand to SEQ ID NO: 993646
auuauccugcaggacagca

SEQ ID NO: 993648 - RNA, 19 nt, Artificial Sequence
  Description of Artificial Sequence: Synthetic oligonucleotide
  Sense strand starting at position 2434 of SEQ ID NO: 914302
gugguuaccucagugccua

SEQ ID NO: 993649 - RNA, 19 nt, Artificial Sequence
  Description of Artificial Sequence: Synthetic oligonucleotide
  Antisense strand to SEQ ID NO: 993648
uaggcacugagguaaccac

SEQ ID NO: 993650 - RNA, 19 nt, Artificial Sequence
  Description of Artificial Sequence: Synthetic oligonucleotide
  Sense strand starting at position 2435 of SEQ ID NO: 914302
ugguuaccucagugccuaa

SEQ ID NO: 993651 - RNA, 19 nt, Artificial Sequence
  Description of Artificial Sequence: Synthetic oligonucleotide
  Antisense strand to SEQ ID NO: 993650
uuaggcacugagguaacca

SEQ ID NO: 993652 - RNA, 19 nt, Artificial Sequence
  Description of Artificial Sequence: Synthetic oligonucleotide
  Sense strand starting at position 2541 of SEQ ID NO: 914302
gcauaaauagggugugguu

SEQ ID NO: 993653 - RNA, 19 nt, Artificial Sequence
  Description of Artificial Sequence: Synthetic oligonucleotide
  Antisense strand to SEQ ID NO: 993652
aaccacacccuauuuaugc

SEQ ID NO: 993654 - RNA, 19 nt, Artificial Sequence
  Description of Artificial Sequence: Synthetic oligonucleotide
  Sense strand starting at position 2801 of SEQ ID NO: 914302
ggaauccugacugguccaa

SEQ ID NO: 993655 - RNA, 19 nt, Artificial Sequence
  Description of Artificial Sequence: Synthetic oligonucleotide
  Antisense strand to SEQ ID NO: 993654
uuggaccagucaggauucc

SEQ ID NO: 993656 - RNA, 19 nt, Artificial Sequence
  Description of Artificial Sequence: Synthetic oligonucleotide
  Sense strand starting at position 2803 of SEQ ID NO: 914302
aauccugacugguccaaga

SEQ ID NO: 993657 - RNA, 19 nt, Artificial Sequence
  Description of Artificial Sequence: Synthetic oligonucleotide
  Antisense strand to SEQ ID NO: 993656
ucuuggaccagucaggauu

SEQ ID NO: 993658 - RNA, 19 nt, Artificial Sequence
  Description of Artificial Sequence: Synthetic oligonucleotide
  Sense strand starting at position 3128 of SEQ ID NO: 914302
accugcuguucccuagaga

SEQ ID NO: 993659 - RNA, 19 nt, Artificial Sequence
  Description of Artificial Sequence: Synthetic oligonucleotide
  Antisense strand to SEQ ID NO: 993658
ucucuagggaacagcaggu

SEQ ID NO: 993660 - RNA, 19 nt, Artificial Sequence
  Description of Artificial Sequence: Synthetic oligonucleotide
  Sense strand starting at position 3129 of SEQ ID NO: 914302
ccugcuguucccuagagac

SEQ ID NO: 993661 - RNA, 19 nt, Artificial Sequence
  Description of Artificial Sequence: Synthetic oligonucleotide
  Antisense strand to SEQ ID NO: 993660
gucucuagggaacagcagg

SEQ ID NO: 993662 - RNA, 19 nt, Artificial Sequence
  Description of Artificial Sequence: Synthetic oligonucleotide
  Sense strand starting at position 3159 of SEQ ID NO: 914302
ucaggacucuccugcuaaa

SEQ ID NO: 993663 - RNA, 19 nt, Artificial Sequence
  Description of Artificial Sequence: Synthetic oligonucleotide
  Antisense strand to SEQ ID NO: 993662
uuuagcaggagaguccuga

SEQ ID NO: 993664 - RNA, 19 nt, Artificial Sequence
  Description of Artificial Sequence: Synthetic oligonucleotide
  Sense strand starting at position 3245 of SEQ ID NO: 914302
gcuggacacuucuggaauc

SEQ ID NO: 993665 - RNA, 19 nt, Artificial Sequence
  Description of Artificial Sequence: Synthetic oligonucleotide
  Antisense strand to SEQ ID NO: 993664
gauuccagaaguguccagc

SEQ ID NO: 993666 - RNA, 19 nt, Artificial Sequence
  Description of Artificial Sequence: Synthetic oligonucleotide
  Sense strand starting at position 3519 of SEQ ID NO: 914302
augcgacacuuacauauaa

SEQ ID NO: 993667 - RNA, 19 nt, Artificial Sequence
  Description of Artificial Sequence: Synthetic oligonucleotide
  Antisense strand to SEQ ID NO: 993666
uuauauguaagugucgcau

SEQ ID NO: 993668 - RNA, 19 nt, Artificial Sequence
  Description of Artificial Sequence: Synthetic oligonucleotide
  Sense strand starting at position 3587 of SEQ ID NO: 914302
ccacaaaugccuuaguggu

SEQ ID NO: 993669 - RNA, 19 nt, Artificial Sequence
  Description of Artificial Sequence: Synthetic oligonucleotide
  Antisense strand to SEQ ID NO: 993668
accacuaaggcauuugugg

SEQ ID NO: 993670 - RNA, 19 nt, Artificial Sequence
  Description of Artificial Sequence: Synthetic oligonucleotide
  Sense strand starting at position 3616 of SEQ ID NO: 914302
guacucacuugcucaggaa

SEQ ID NO: 993671 - RNA, 19 nt, Artificial Sequence
  Description of Artificial Sequence: Synthetic oligonucleotide
  Antisense strand to SEQ ID NO: 993670
uuccugagcaagugaguac

SEQ ID NO: 993672 - RNA, 19 nt, Artificial Sequence
  Description of Artificial Sequence: Synthetic oligonucleotide
  Sense strand starting at position 3619 of SEQ ID NO: 914302
cucacuugcucaggaauca

SEQ ID NO: 993673 - RNA, 19 nt, Artificial Sequence
  Description of Artificial Sequence: Synthetic oligonucleotide
  Antisense strand to SEQ ID NO: 993672
ugauuccugagcaagugag

SEQ ID NO: 993674 - RNA, 19 nt, Artificial Sequence
  Description of Artificial Sequence: Synthetic oligonucleotide
  Sense strand starting at position 3630 of SEQ ID NO: 914302
aggaaucagugauugacuu

SEQ ID NO: 993675 - RNA, 19 nt, Artificial Sequence
  Description of Artificial Sequence: Synthetic oligonucleotide
  Antisense strand to SEQ ID NO: 993674
aagucaaucacugauuccu

SEQ ID NO: 993676 - RNA, 19 nt, Artificial Sequence
  Description of Artificial Sequence: Synthetic oligonucleotide
  Sense strand starting at position 3631 of SEQ ID NO: 914302
ggaaucagugauugacuua

SEQ ID NO: 993677 - RNA, 19 nt, Artificial Sequence
  Description of Artificial Sequence: Synthetic oligonucleotide
  Antisense strand to SEQ ID NO: 993676
uaagucaaucacugauucc

SEQ ID NO: 993678 - RNA, 19 nt, Artificial Sequence
  Description of Artificial Sequence: Synthetic oligonucleotide
  Sense strand starting at position 3634 of SEQ ID NO: 914302
aucagugauugacuuaaag

SEQ ID NO: 993679 - RNA, 19 nt, Artificial Sequence
  Description of Artificial Sequence: Synthetic oligonucleotide
  Antisense strand to SEQ ID NO: 993678
cuuuaagucaaucacugau

SEQ ID NO: 993680 - RNA, 19 nt, Artificial Sequence
  Description of Artificial Sequence: Synthetic oligonucleotide
  Sense strand starting at position 3801 of SEQ ID NO: 914302
ugauucuucugagaugcua

SEQ ID NO: 993681 - RNA, 19 nt, Artificial Sequence
  Description of Artificial Sequence: Synthetic oligonucleotide
  Antisense strand to SEQ ID NO: 993680
uagcaucucagaagaauca

SEQ ID NO: 993682 - RNA, 19 nt, Artificial Sequence
  Description of Artificial Sequence: Synthetic oligonucleotide
  Sense strand starting at position 3841 of SEQ ID NO: 914302
acggaauccucuuaauugu

SEQ ID NO: 993683 - RNA, 19 nt, Artificial Sequence
  Description of Artificial Sequence: Synthetic oligonucleotide
  Antisense strand to SEQ ID NO: 993682
acaauuaagaggauuccgu

SEQ ID NO: 993684 - RNA, 19 nt, Artificial Sequence
  Description of Artificial Sequence: Synthetic oligonucleotide
  Sense strand starting at position 3862 of SEQ ID NO: 914302
ugucacugcccucaggaua

SEQ ID NO: 993685 - RNA, 19 nt, Artificial Sequence
  Description of Artificial Sequence: Synthetic oligonucleotide
  Antisense strand to SEQ ID NO: 993684
uauccugagggcagugaca

SEQ ID NO: 993686 - RNA, 19 nt, Artificial Sequence
  Description of Artificial Sequence: Synthetic oligonucleotide
  Sense strand starting at position 3963 of SEQ ID NO: 914302
ucucucuuugcuugggaca

SEQ ID NO: 993687 - RNA, 19 nt, Artificial Sequence
  Description of Artificial Sequence: Synthetic oligonucleotide
  Antisense strand to SEQ ID NO: 993686
ugucccaagcaaagagaga

SEQ ID NO: 993688 - RNA, 19 nt, Artificial Sequence
  Description of Artificial Sequence: Synthetic oligonucleotide
  Sense strand starting at position 3964 of SEQ ID NO: 914302
cucucuuugcuugggacau

SEQ ID NO: 993689 - RNA, 19 nt, Artificial Sequence
  Description of Artificial Sequence: Synthetic oligonucleotide
  Antisense strand to SEQ ID NO: 993688
augucccaagcaaagagag

SEQ ID NO: 993690 - RNA, 19 nt, Artificial Sequence
  Description of Artificial Sequence: Synthetic oligonucleotide
  Sense strand starting at position 37 of SEQ ID NO: 914303
gcauauauuaggugcugaa

SEQ ID NO: 993691 - RNA, 19 nt, Artificial Sequence
  Description of Artificial Sequence: Synthetic oligonucleotide
  Antisense strand to SEQ ID NO: 993690
uucagcaccuaauauaugc

SEQ ID NO: 993692 - RNA, 19 nt, Artificial Sequence
  Description of Artificial Sequence: Synthetic oligonucleotide
  Sense strand starting at position 41 of SEQ ID NO: 914303
auauuaggugcugaaauca

SEQ ID NO: 993693 - RNA, 19 nt, Artificial Sequence
  Description of Artificial Sequence: Synthetic oligonucleotide
  Antisense strand to SEQ ID NO: 993692
ugauuucagcaccuaauau

SEQ ID NO: 993694 - RNA, 19 nt, Artificial Sequence
  Description of Artificial Sequence: Synthetic oligonucleotide
  Sense strand starting at position 97 of SEQ ID NO: 914303
aaaggauuacucuggguac

SEQ ID NO: 993695 - RNA, 19 nt, Artificial Sequence
  Description of Artificial Sequence: Synthetic oligonucleotide
  Antisense strand to SEQ ID NO: 993694
guacccagaguaauccuuu

SEQ ID NO: 993696 - RNA, 19 nt, Artificial Sequence
  Description of Artificial Sequence: Synthetic oligonucleotide
  Sense strand starting at position 100 of SEQ ID NO: 914303
ggauuacucuggguacugu

SEQ ID NO: 993697 - RNA, 19 nt, Artificial Sequence
  Description of Artificial Sequence: Synthetic oligonucleotide
  Antisense strand to SEQ ID NO: 993696
acaguacccagaguaaucc

SEQ ID NO: 993698 - RNA, 19 nt, Artificial Sequence
  Description of Artificial Sequence: Synthetic oligonucleotide
  Sense strand starting at position 110 of SEQ ID NO: 914303
ggguacuguguugagaaca

SEQ ID NO: 993699 - RNA, 19 nt, Artificial Sequence
  Description of Artificial Sequence: Synthetic oligonucleotide
  Antisense strand to SEQ ID NO: 993698
uguucucaacacaguaccc

SEQ ID NO: 993700 - RNA, 19 nt, Artificial Sequence
  Description of Artificial Sequence: Synthetic oligonucleotide
  Sense strand starting at position 144 of SEQ ID NO: 914303
gcaagaggguaugcuauua

SEQ ID NO: 993701 - RNA, 19 nt, Artificial Sequence
  Description of Artificial Sequence: Synthetic oligonucleotide
  Antisense strand to SEQ ID NO: 993700
uaauagcauacccucuugc

SEQ ID NO: 993702 - RNA, 19 nt, Artificial Sequence
  Description of Artificial Sequence: Synthetic oligonucleotide
  Sense strand starting at position 157 of SEQ ID NO: 914303
cuauuaaaguagucaagga

SEQ ID NO: 993703 - RNA, 19 nt, Artificial Sequence
  Description of Artificial Sequence: Synthetic oligonucleotide
  Antisense strand to SEQ ID NO: 993702
uccuugacuacuuuaauag

SEQ ID NO: 993704 - RNA, 19 nt, Artificial Sequence
  Description of Artificial Sequence: Synthetic oligonucleotide
  Sense strand starting at position 184 of SEQ ID NO: 914303
ggugguggcccagauuaac

SEQ ID NO: 993705 - RNA, 19 nt, Artificial Sequence
  Description of Artificial Sequence: Synthetic oligonucleotide
  Antisense strand to SEQ ID NO: 993704
guuaaucugggccaccacc

SEQ ID NO: 993706 - RNA, 19 nt, Artificial Sequence
  Description of Artificial Sequence: Synthetic oligonucleotide
  Sense strand starting at position 262 of SEQ ID NO: 914303
ugugacagaacuuggugaa

SEQ ID NO: 993707 - RNA, 19 nt, Artificial Sequence
  Description of Artificial Sequence: Synthetic oligonucleotide
  Antisense strand to SEQ ID NO: 993706
uucaccaaguucugucaca

SEQ ID NO: 993708 - RNA, 19 nt, Artificial Sequence
  Description of Artificial Sequence: Synthetic oligonucleotide
  Sense strand starting at position 263 of SEQ ID NO: 914303
gugacagaacuuggugaaa

SEQ ID NO: 993709 - RNA, 19 nt, Artificial Sequence
  Description of Artificial Sequence: Synthetic oligonucleotide
  Antisense strand to SEQ ID NO: 993708
uuucaccaaguucugucac

SEQ ID NO: 993710 - RNA, 19 nt, Artificial Sequence
  Description of Artificial Sequence: Synthetic oligonucleotide
  Sense strand starting at position 313 of SEQ ID NO: 914303
ucaagucuugcucaugacu

SEQ ID NO: 993711 - RNA, 19 nt, Artificial Sequence
  Description of Artificial Sequence: Synthetic oligonucleotide
  Antisense strand to SEQ ID NO: 993710
agucaugagcaagacuuga

SEQ ID NO: 993712 - RNA, 19 nt, Artificial Sequence
  Description of Artificial Sequence: Synthetic oligonucleotide
  Sense strand starting at position 424 of SEQ ID NO: 914303
aaucuauagguuuggaacu

SEQ ID NO: 993713 - RNA, 19 nt, Artificial Sequence
  Description of Artificial Sequence: Synthetic oligonucleotide
  Antisense strand to SEQ ID NO: 993712
aguuccaaaccuauagauu

SEQ ID NO: 993714 - RNA, 19 nt, Artificial Sequence
  Description of Artificial Sequence: Synthetic oligonucleotide
  Sense strand starting at position 504 of SEQ ID NO: 914303
aaagaagucugggcuggau

SEQ ID NO: 993715 - RNA, 19 nt, Artificial Sequence
  Description of Artificial Sequence: Synthetic oligonucleotide
  Antisense strand to SEQ ID NO: 993714
auccagcccagacuucuuu

SEQ ID NO: 993716 - RNA, 19 nt, Artificial Sequence
  Description of Artificial Sequence: Synthetic oligonucleotide
  Sense strand starting at position 506 of SEQ ID NO: 914303
agaagucugggcuggauau

SEQ ID NO: 993717 - RNA, 19 nt, Artificial Sequence
  Description of Artificial Sequence: Synthetic oligonucleotide
  Antisense strand to SEQ ID NO: 993716
auauccagcccagacuucu

SEQ ID NO: 993718 - RNA, 19 nt, Artificial Sequence
  Description of Artificial Sequence: Synthetic oligonucleotide
  Sense strand starting at position 507 of SEQ ID NO: 914303
gaagucugggcuggauaua

SEQ ID NO: 993719 - RNA, 19 nt, Artificial Sequence
  Description of Artificial Sequence: Synthetic oligonucleotide
  Antisense strand to SEQ ID NO: 993718
uauauccagcccagacuuc

SEQ ID NO: 993720 - RNA, 19 nt, Artificial Sequence
  Description of Artificial Sequence: Synthetic oligonucleotide
  Sense strand starting at position 598 of SEQ ID NO: 914303
aacagauacugagagaaga

SEQ ID NO: 993721 - RNA, 19 nt, Artificial Sequence
  Description of Artificial Sequence: Synthetic oligonucleotide
  Antisense strand to SEQ ID NO: 993720
ucuucucucaguaucuguu

SEQ ID NO: 993722 - RNA, 19 nt, Artificial Sequence
  Description of Artificial Sequence: Synthetic oligonucleotide
  Sense strand starting at position 731 of SEQ ID NO: 914303
aggagagugaguugacaua

SEQ ID NO: 993723 - RNA, 19 nt, Artificial Sequence
  Description of Artificial Sequence: Synthetic oligonucleotide
  Antisense strand to SEQ ID NO: 993722
uaugucaacucacucuccu

SEQ ID NO: 993724 - RNA, 19 nt, Artificial Sequence
  Description of Artificial Sequence: Synthetic oligonucleotide
  Sense strand starting at position 783 of SEQ ID NO: 914303
aacaguguccacuggaguu

SEQ ID NO: 993725 - RNA, 19 nt, Artificial Sequence
  Description of Artificial Sequence: Synthetic oligonucleotide
  Antisense strand to SEQ ID NO: 993724
aacuccaguggacacuguu

SEQ ID NO: 993726 - RNA, 19 nt, Artificial Sequence
  Description of Artificial Sequence: Synthetic oligonucleotide
  Sense strand starting at position 878 of SEQ ID NO: 914303
aagaaugaaugggaaguaa

SEQ ID NO: 993727 - RNA, 19 nt, Artificial Sequence
  Description of Artificial Sequence: Synthetic oligonucleotide
  Antisense strand to SEQ ID NO: 993726
uuacuucccauucauucuu

SEQ ID NO: 993728 - RNA, 19 nt, Artificial Sequence
  Description of Artificial Sequence: Synthetic oligonucleotide
  Sense strand starting at position 1002 of SEQ ID NO: 914303
aggaauuggcagugggaaa

SEQ ID NO: 993729 - RNA, 19 nt, Artificial Sequence
  Description of Artificial Sequence: Synthetic oligonucleotide
  Antisense strand to SEQ ID NO: 993728
uuucccacugccaauuccu

SEQ ID NO: 993730 - RNA, 19 nt, Artificial Sequence
  Description of Artificial Sequence: Synthetic oligonucleotide
  Sense strand starting at position 1116 of SEQ ID NO: 914303
cagaaugcggcuugacaga

SEQ ID NO: 993731 - RNA, 19 nt, Artificial Sequence
  Description of Artificial Sequence: Synthetic oligonucleotide
  Antisense strand to SEQ ID NO: 993730
ucugucaagccgcauucug

SEQ ID NO: 993732 - RNA, 19 nt, Artificial Sequence
  Description of Artificial Sequence: Synthetic oligonucleotide
  Sense strand starting at position 1334 of SEQ ID NO: 914303
ugcgaugguggguaugaga

SEQ ID NO: 993733 - RNA, 19 nt, Artificial Sequence
  Description of Artificial Sequence: Synthetic oligonucleotide
  Antisense strand to SEQ ID NO: 993732
ucucauacccaccaucgca

SEQ ID NO: 993734 - RNA, 19 nt, Artificial Sequence
  Description of Artificial Sequence: Synthetic oligonucleotide
  Sense strand starting at position 1579 of SEQ ID NO: 914303
cggcuucuccaucacaaca

SEQ ID NO: 993735 - RNA, 19 nt, Artificial Sequence
  Description of Artificial Sequence: Synthetic oligonucleotide
  Antisense strand to SEQ ID NO: 993734
uguugugauggagaagccg

SEQ ID NO: 993736 - RNA, 19 nt, Artificial Sequence
  Description of Artificial Sequence: Synthetic oligonucleotide
  Sense strand starting at position 1978 of SEQ ID NO: 914303
gaaggauucccgggaggca

SEQ ID NO: 993737 - RNA, 19 nt, Artificial Sequence
  Description of Artificial Sequence: Synthetic oligonucleotide
  Antisense strand to SEQ ID NO: 993736
ugccucccgggaauccuuc

SEQ ID NO: 993738 - RNA, 19 nt, Artificial Sequence
  Description of Artificial Sequence: Synthetic oligonucleotide
  Sense strand starting at position 2065 of SEQ ID NO: 914303
ucauaauaauagcucguau

SEQ ID NO: 993739 - RNA, 19 nt, Artificial Sequence
  Description of Artificial Sequence: Synthetic oligonucleotide
  Antisense strand to SEQ ID NO: 993738
auacgagcuauuauuauga

SEQ ID NO: 993740 - RNA, 19 nt, Artificial Sequence
  Description of Artificial Sequence: Synthetic oligonucleotide
  Sense strand starting at position 2120 of SEQ ID NO: 914303
aaccguuaacgcgcauuaa

SEQ ID NO: 993741 - RNA, 19 nt, Artificial Sequence
  Description of Artificial Sequence: Synthetic oligonucleotide
  Antisense strand to SEQ ID NO: 993740
uuaaugcgcguuaacgguu

SEQ ID NO: 993742 - RNA, 19 nt, Artificial Sequence
  Description of Artificial Sequence: Synthetic oligonucleotide
  Sense strand starting at position 2123 of SEQ ID NO: 914303
cguuaacgcgcauuaaucu

SEQ ID NO: 993743 - RNA, 19 nt, Artificial Sequence
  Description of Artificial Sequence: Synthetic oligonucleotide
  Antisense strand to SEQ ID NO: 993742
agauuaaugcgcguuaacg

SEQ ID NO: 993744 - RNA, 19 nt, Artificial Sequence
  Description of Artificial Sequence: Synthetic oligonucleotide
  Sense strand starting at position 2188 of SEQ ID NO: 914303
agaggcugaggcuaagauu

SEQ ID NO: 993745 - RNA, 19 nt, Artificial Sequence
  Description of Artificial Sequence: Synthetic oligonucleotide
  Antisense strand to SEQ ID NO: 993744
aaucuuagccucagccucu

SEQ ID NO: 993746 - RNA, 19 nt, Artificial Sequence
  Description of Artificial Sequence: Synthetic oligonucleotide
  Sense strand starting at position 2233 of SEQ ID NO: 914303
gucacaguuagugaugaau

SEQ ID NO: 993747 - RNA, 19 nt, Artificial Sequence
  Description of Artificial Sequence: Synthetic oligonucleotide
  Antisense strand to SEQ ID NO: 993746
auucaucacuaacugugac

SEQ ID NO: 993748 - RNA, 19 nt, Artificial Sequence
  Description of Artificial Sequence: Synthetic oligonucleotide
  Sense strand starting at position 2270 of SEQ ID NO: 914303
guuucuugacacugaaaua

SEQ ID NO: 993749 - RNA, 19 nt, Artificial Sequence
  Description of Artificial Sequence: Synthetic oligonucleotide
  Antisense strand to SEQ ID NO: 993748
uauuucagugucaagaaac

SEQ ID NO: 993750 - RNA, 19 nt, Artificial Sequence
  Description of Artificial Sequence: Synthetic oligonucleotide
  Sense strand starting at position 2419 of SEQ ID NO: 914303
gugcaauacuuacuacaga

SEQ ID NO: 993751 - RNA, 19 nt, Artificial Sequence
  Description of Artificial Sequence: Synthetic oligonucleotide
  Antisense strand to SEQ ID NO: 993750
ucuguaguaaguauugcac

SEQ ID NO: 993752 - RNA, 19 nt, Artificial Sequence
  Description of Artificial Sequence: Synthetic oligonucleotide
  Sense strand starting at position 2467 of SEQ ID NO: 914303
uggucagaucagugaccca

SEQ ID NO: 993753 - RNA, 19 nt, Artificial Sequence
  Description of Artificial Sequence: Synthetic oligonucleotide
  Antisense strand to SEQ ID NO: 993752
ugggucacugaucugacca

SEQ ID NO: 993754 - RNA, 19 nt, Artificial Sequence
  Description of Artificial Sequence: Synthetic oligonucleotide
  Sense strand starting at position 2830 of SEQ ID NO: 914303
ugagauuacaggcgucaga

SEQ ID NO: 993755 - RNA, 19 nt, Artificial Sequence
  Description of Artificial Sequence: Synthetic oligonucleotide
  Antisense strand to SEQ ID NO: 993754
ucugacgccuguaaucuca

SEQ ID NO: 993756 - RNA, 19 nt, Artificial Sequence
  Description of Artificial Sequence: Synthetic oligonucleotide
  Sense strand starting at position 3316 of SEQ ID NO: 914303
ugaccuggguucuugaaag

SEQ ID NO: 993757 - RNA, 19 nt, Artificial Sequence
  Description of Artificial Sequence: Synthetic oligonucleotide
  Antisense strand to SEQ ID NO: 993756
cuuucaagaacccagguca

SEQ ID NO: 993758 - RNA, 19 nt, Artificial Sequence
  Description of Artificial Sequence: Synthetic oligonucleotide
  Sense strand starting at position 3405 of SEQ ID NO: 914303
aauuacuauguaugaggua

SEQ ID NO: 993759 - RNA, 19 nt, Artificial Sequence
  Description of Artificial Sequence: Synthetic oligonucleotide
  Antisense strand to SEQ ID NO: 993758
uaccucauacauaguaauu

SEQ ID NO: 993760 - RNA, 19 nt, Artificial Sequence
  Description of Artificial Sequence: Synthetic oligonucleotide
  Sense strand starting at position 3516 of SEQ ID NO: 914303
uguaauuaggaaugugaug

SEQ ID NO: 993761 - RNA, 19 nt, Artificial Sequence
  Description of Artificial Sequence: Synthetic oligonucleotide
  Antisense strand to SEQ ID NO: 993760
caucacauuccuaauuaca

SEQ ID NO: 993762 - RNA, 19 nt, Artificial Sequence
  Description of Artificial Sequence: Synthetic oligonucleotide
  Sense strand starting at position 3528 of SEQ ID NO: 914303
ugugaugagugucuugaag

SEQ ID NO: 993763 - RNA, 19 nt, Artificial Sequence
  Description of Artificial Sequence: Synthetic oligonucleotide
  Antisense strand to SEQ ID NO: 993762
cuucaagacacucaucaca

SEQ ID NO: 993764 - RNA, 19 nt, Artificial Sequence
  Description of Artificial Sequence: Synthetic oligonucleotide
  Sense strand starting at position 3534 of SEQ ID NO: 914303
gagugucuugaaggagaug

SEQ ID NO: 993765 - RNA, 19 nt, Artificial Sequence
  Description of Artificial Sequence: Synthetic oligonucleotide
  Antisense strand to SEQ ID NO: 993764
caucuccuucaagacacuc

SEQ ID NO: 993766 - RNA, 19 nt, Artificial Sequence
  Description of Artificial Sequence: Synthetic oligonucleotide
  Sense strand starting at position 3546 of SEQ ID NO: 914303
ggagauguaccgggagcua

SEQ ID NO: 993767 - RNA, 19 nt, Artificial Sequence
  Description of Artificial Sequence: Synthetic oligonucleotide
  Antisense strand to SEQ ID NO: 993766
uagcucccgguacaucucc

SEQ ID NO: 993768 - RNA, 19 nt, Artificial Sequence
  Description of Artificial Sequence: Synthetic oligonucleotide
  Sense strand starting at position 3615 of SEQ ID NO: 914303
gugacaauucagugaggga

SEQ ID NO: 993769 - RNA, 19 nt, Artificial Sequence
  Description of Artificial Sequence: Synthetic oligonucleotide
  Antisense strand to SEQ ID NO: 993768
ucccucacugaauugucac

SEQ ID NO: 993770 - RNA, 19 nt, Artificial Sequence
  Description of Artificial Sequence: Synthetic oligonucleotide
  Sense strand starting at position 219 of SEQ ID NO: 914304
agcagaacauccguauaca

SEQ ID NO: 993771 - RNA, 19 nt, Artificial Sequence
  Description of Artificial Sequence: Synthetic oligonucleotide
  Antisense strand to SEQ ID NO: 993770
uguauacggauguucugcu

SEQ ID NO: 993772 - RNA, 19 nt, Artificial Sequence
  Description of Artificial Sequence: Synthetic oligonucleotide
  Sense strand starting at position 220 of SEQ ID NO: 914304
gcagaacauccguauacau

SEQ ID NO: 993773 - RNA, 19 nt, Artificial Sequence
  Description of Artificial Sequence: Synthetic oligonucleotide
  Antisense strand to SEQ ID NO: 993772
auguauacggauguucugc

SEQ ID NO: 993774 - RNA, 19 nt, Artificial Sequence
  Description of Artificial Sequence: Synthetic oligonucleotide
  Sense strand starting at position 434 of SEQ ID NO: 914304
cacgacuguuaauagacua

SEQ ID NO: 993775 - RNA, 19 nt, Artificial Sequence
  Description of Artificial Sequence: Synthetic oligonucleotide
  Antisense strand to SEQ ID NO: 993774
uagucuauuaacagucgug

SEQ ID NO: 993776 - RNA, 19 nt, Artificial Sequence
  Description of Artificial Sequence: Synthetic oligonucleotide
  Sense strand starting at position 517 of SEQ ID NO: 914304
aaagcuauggugugggauu

SEQ ID NO: 993777 - RNA, 19 nt, Artificial Sequence
  Description of Artificial Sequence: Synthetic oligonucleotide
  Antisense strand to SEQ ID NO: 993776
aaucccacaccauagcuuu

SEQ ID NO: 993778 - RNA, 19 nt, Artificial Sequence
  Description of Artificial Sequence: Synthetic oligonucleotide
  Sense strand starting at position 518 of SEQ ID NO: 914304
aagcuauggugugggauuu

SEQ ID NO: 993779 - RNA, 19 nt, Artificial Sequence
  Description of Artificial Sequence: Synthetic oligonucleotide
  Antisense strand to SEQ ID NO: 993778
aaaucccacaccauagcuu

SEQ ID NO: 993780 - RNA, 19 nt, Artificial Sequence
  Description of Artificial Sequence: Synthetic oligonucleotide
  Sense strand starting at position 561 of SEQ ID NO: 914304
ccaggagagccugguucuu

SEQ ID NO: 993781 - RNA, 19 nt, Artificial Sequence
  Description of Artificial Sequence: Synthetic oligonucleotide
  Antisense strand to SEQ ID NO: 993780
aagaaccaggcucuccugg

SEQ ID NO: 993782 - RNA, 19 nt, Artificial Sequence
  Description of Artificial Sequence: Synthetic oligonucleotide
  Sense strand starting at position 652 of SEQ ID NO: 914304
acaaaugacuuguauggau

SEQ ID NO: 993783 - RNA, 19 nt, Artificial Sequence
  Description of Artificial Sequence: Synthetic oligonucleotide
  Antisense strand to SEQ ID NO: 993782
auccauacaagucauuugu

SEQ ID NO: 993784 - RNA, 19 nt, Artificial Sequence
  Description of Artificial Sequence: Synthetic oligonucleotide
  Sense strand starting at position 655 of SEQ ID NO: 914304
aaugacuuguauggauaau

SEQ ID NO: 993785 - RNA, 19 nt, Artificial Sequence
  Description of Artificial Sequence: Synthetic oligonucleotide
  Antisense strand to SEQ ID NO: 993784
auuauccauacaagucauu

SEQ ID NO: 993786 - RNA, 19 nt, Artificial Sequence
  Description of Artificial Sequence: Synthetic oligonucleotide
  Sense strand starting at position 702 of SEQ ID NO: 914304
gggcaagcaucguuaagag

SEQ ID NO: 993787 - RNA, 19 nt, Artificial Sequence
  Description of Artificial Sequence: Synthetic oligonucleotide
  Antisense strand to SEQ ID NO: 993786
cucuuaacgaugcuugccc

SEQ ID NO: 993788 - RNA, 19 nt, Artificial Sequence
  Description of Artificial Sequence: Synthetic oligonucleotide
  Sense strand starting at position 719 of SEQ ID NO: 914304
agagcucuuccagacaacu

SEQ ID NO: 993789 - RNA, 19 nt, Artificial Sequence
  Description of Artificial Sequence: Synthetic oligonucleotide
  Antisense strand to SEQ ID NO: 993788
aguugucuggaagagcucu

SEQ ID NO: 993790 - RNA, 19 nt, Artificial Sequence
  Description of Artificial Sequence: Synthetic oligonucleotide
  Sense strand starting at position 1241 of SEQ ID NO: 914304
aaaugaaaccgugagcucu

SEQ ID NO: 993791 - RNA, 19 nt, Artificial Sequence
  Description of Artificial Sequence: Synthetic oligonucleotide
  Antisense strand to SEQ ID NO: 993790
agagcucacgguuucauuu

SEQ ID NO: 993792 - RNA, 19 nt, Artificial Sequence
  Description of Artificial Sequence: Synthetic oligonucleotide
  Sense strand starting at position 1251 of SEQ ID NO: 914304
gugagcucucaucaaaguc

SEQ ID NO: 993793 - RNA, 19 nt, Artificial Sequence
  Description of Artificial Sequence: Synthetic oligonucleotide
  Antisense strand to SEQ ID NO: 993792
gacuuugaugagagcucac

SEQ ID NO: 993794 - RNA, 19 nt, Artificial Sequence
  Description of Artificial Sequence: Synthetic oligonucleotide
  Sense strand starting at position 1395 of SEQ ID NO: 914304
cgaucuaaucuuggaagca

SEQ ID NO: 993795 - RNA, 19 nt, Artificial Sequence
  Description of Artificial Sequence: Synthetic oligonucleotide
  Antisense strand to SEQ ID NO: 993794
ugcuuccaagauuagaucg

SEQ ID NO: 993796 - RNA, 19 nt, Artificial Sequence
  Description of Artificial Sequence: Synthetic oligonucleotide
  Sense strand starting at position 1441 of SEQ ID NO: 914304
uuaagagaauccuguagag

SEQ ID NO: 993797 - RNA, 19 nt, Artificial Sequence
  Description of Artificial Sequence: Synthetic oligonucleotide
  Antisense strand to SEQ ID NO: 993796
cucuacaggauucucuuaa

SEQ ID NO: 993798 - RNA, 19 nt, Artificial Sequence
  Description of Artificial Sequence: Synthetic oligonucleotide
  Sense strand starting at position 1476 of SEQ ID NO: 914304
gaauuaacgugagccugaa

SEQ ID NO: 993799 - RNA, 19 nt, Artificial Sequence
  Description of Artificial Sequence: Synthetic oligonucleotide
  Antisense strand to SEQ ID NO: 993798
uucaggcucacguuaauuc

SEQ ID NO: 993800 - RNA, 19 nt, Artificial Sequence
  Description of Artificial Sequence: Synthetic oligonucleotide
  Sense strand starting at position 1569 of SEQ ID NO: 914304
cgcggucucccuggugaaa

SEQ ID NO: 993801 - RNA, 19 nt, Artificial Sequence
  Description of Artificial Sequence: Synthetic oligonucleotide
  Antisense strand to SEQ ID NO: 993800
uuucaccagggagaccgcg

SEQ ID NO: 993802 - RNA, 19 nt, Artificial Sequence
  Description of Artificial Sequence: Synthetic oligonucleotide
  Sense strand starting at position 1693 of SEQ ID NO: 914304
ggcgggaagcgcuuucgaa

SEQ ID NO: 993803 - RNA, 19 nt, Artificial Sequence
  Description of Artificial Sequence: Synthetic oligonucleotide
  Antisense strand to SEQ ID NO: 993802
uucgaaagcgcuucccgcc

SEQ ID NO: 993804 - RNA, 19 nt, Artificial Sequence
  Description of Artificial Sequence: Synthetic oligonucleotide
  Sense strand starting at position 1694 of SEQ ID NO: 914304
gcgggaagcgcuuucgaaa

SEQ ID NO: 993805 - RNA, 19 nt, Artificial Sequence
  Description of Artificial Sequence: Synthetic oligonucleotide
  Antisense strand to SEQ ID NO: 993804
uuucgaaagcgcuucccgc

SEQ ID NO: 993806 - RNA, 19 nt, Artificial Sequence
  Description of Artificial Sequence: Synthetic oligonucleotide
  Sense strand starting at position 2095 of SEQ ID NO: 914304
cggcaaggaugauugaauu

SEQ ID NO: 993807 - RNA, 19 nt, Artificial Sequence
  Description of Artificial Sequence: Synthetic oligonucleotide
  Antisense strand to SEQ ID NO: 993806
aauucaaucauccuugccg

SEQ ID NO: 993808 - RNA, 19 nt, Artificial Sequence
  Description of Artificial Sequence: Synthetic oligonucleotide
  Sense strand starting at position 2202 of SEQ ID NO: 914304
ugcguuucugcccuuagaa

SEQ ID NO: 993809 - RNA, 19 nt, Artificial Sequence
  Description of Artificial Sequence: Synthetic oligonucleotide
  Antisense strand to SEQ ID NO: 993808
uucuaagggcagaaacgca

SEQ ID NO: 993810 - RNA, 19 nt, Artificial Sequence
  Description of Artificial Sequence: Synthetic oligonucleotide
  Sense strand starting at position 2204 of SEQ ID NO: 914304
cguuucugcccuuagaaga

SEQ ID NO: 993811 - RNA, 19 nt, Artificial Sequence
  Description of Artificial Sequence: Synthetic oligonucleotide
  Antisense strand to SEQ ID NO: 993810
ucuucuaagggcagaaacg

SEQ ID NO: 993812 - RNA, 19 nt, Artificial Sequence
  Description of Artificial Sequence: Synthetic oligonucleotide
  Sense strand starting at position 2221 of SEQ ID NO: 914304
gaucuuacauaugagaagu

SEQ ID NO: 993813 - RNA, 19 nt, Artificial Sequence
  Description of Artificial Sequence: Synthetic oligonucleotide
  Antisense strand to SEQ ID NO: 993812
acuucucauauguaagauc

SEQ ID NO: 993814 - RNA, 19 nt, Artificial Sequence
  Description of Artificial Sequence: Synthetic oligonucleotide
  Sense strand starting at position 2223 of SEQ ID NO: 914304
ucuuacauaugagaaguca

SEQ ID NO: 993815 - RNA, 19 nt, Artificial Sequence
  Description of Artificial Sequence: Synthetic oligonucleotide
  Antisense strand to SEQ ID NO: 993814
ugacuucucauauguaaga

SEQ ID NO: 993816 - RNA, 19 nt, Artificial Sequence
  Description of Artificial Sequence: Synthetic oligonucleotide
  Sense strand starting at position 2270 of SEQ ID NO: 914304
guaauauuaaucgguggca

SEQ ID NO: 993817 - RNA, 19 nt, Artificial Sequence
  Description of Artificial Sequence: Synthetic oligonucleotide
  Antisense strand to SEQ ID NO: 993816
ugccaccgauuaauauuac

SEQ ID NO: 993818 - RNA, 19 nt, Artificial Sequence
  Description of Artificial Sequence: Synthetic oligonucleotide
  Sense strand starting at position 2272 of SEQ ID NO: 914304
aauauuaaucgguggcacu

SEQ ID NO: 993819 - RNA, 19 nt, Artificial Sequence
  Description of Artificial Sequence: Synthetic oligonucleotide
  Antisense strand to SEQ ID NO: 993818
agugccaccgauuaauauu

SEQ ID NO: 993820 - RNA, 19 nt, Artificial Sequence
  Description of Artificial Sequence: Synthetic oligonucleotide
  Sense strand starting at position 2273 of SEQ ID NO: 914304
auauuaaucgguggcacua

SEQ ID NO: 993821 - RNA, 19 nt, Artificial Sequence
  Description of Artificial Sequence: Synthetic oligonucleotide
  Antisense strand to SEQ ID NO: 993820
uagugccaccgauuaauau

SEQ ID NO: 993822 - RNA, 19 nt, Artificial Sequence
  Description of Artificial Sequence: Synthetic oligonucleotide
  Sense strand starting at position 2439 of SEQ ID NO: 914304
accugauuauguccaguau

SEQ ID NO: 993823 - RNA, 19 nt, Artificial Sequence
  Description of Artificial Sequence: Synthetic oligonucleotide
  Antisense strand to SEQ ID NO: 993822
auacuggacauaaucaggu

SEQ ID NO: 993824 - RNA, 19 nt, Artificial Sequence
  Description of Artificial Sequence: Synthetic oligonucleotide
  Sense strand starting at position 2440 of SEQ ID NO: 914304
ccugauuauguccaguauc

SEQ ID NO: 993825 - RNA, 19 nt, Artificial Sequence
  Description of Artificial Sequence: Synthetic oligonucleotide
  Antisense strand to SEQ ID NO: 993824
gauacuggacauaaucagg

SEQ ID NO: 993826 - RNA, 19 nt, Artificial Sequence
  Description of Artificial Sequence: Synthetic oligonucleotide
  Sense strand starting at position 2484 of SEQ ID NO: 914304
cacguacgcuuacugauaa

SEQ ID NO: 993827 - RNA, 19 nt, Artificial Sequence
  Description of Artificial Sequence: Synthetic oligonucleotide
  Antisense strand to SEQ ID NO: 993826
uuaucaguaagcguacgug

SEQ ID NO: 993828 - RNA, 19 nt, Artificial Sequence
  Description of Artificial Sequence: Synthetic oligonucleotide
  Sense strand starting at position 3580 of SEQ ID NO: 914304
gguauaagaugaucccauu

SEQ ID NO: 993829 - RNA, 19 nt, Artificial Sequence
  Description of Artificial Sequence: Synthetic oligonucleotide
  Antisense strand to SEQ ID NO: 993828
aaugggaucaucuuauacc

SEQ ID NO: 993830 - RNA, 19 nt, Artificial Sequence
  Description of Artificial Sequence: Synthetic oligonucleotide
  Sense strand starting at position 3583 of SEQ ID NO: 914304
auaagaugaucccauuaug

SEQ ID NO: 993831 - RNA, 19 nt, Artificial Sequence
  Description of Artificial Sequence: Synthetic oligonucleotide
  Antisense strand to SEQ ID NO: 993830
cauaaugggaucaucuuau

SEQ ID NO: 993832 - RNA, 19 nt, Artificial Sequence
  Description of Artificial Sequence: Synthetic oligonucleotide
  Sense strand starting at position 3622 of SEQ ID NO: 914304
aaacaaaguuaugugugua

SEQ ID NO: 993833 - RNA, 19 nt, Artificial Sequence
  Description of Artificial Sequence: Synthetic oligonucleotide
  Antisense strand to SEQ ID NO: 993832
uacacacauaacuuuguuu

SEQ ID NO: 993834 - RNA, 19 nt, Artificial Sequence
  Description of Artificial Sequence: Synthetic oligonucleotide
  Sense strand starting at position 3625 of SEQ ID NO: 914304
caaaguuauguguguaugu

SEQ ID NO: 993835 - RNA, 19 nt, Artificial Sequence
  Description of Artificial Sequence: Synthetic oligonucleotide
  Antisense strand to SEQ ID NO: 993834
acauacacacauaacuuug

SEQ ID NO: 993836 - RNA, 19 nt, Artificial Sequence
  Description of Artificial Sequence: Synthetic oligonucleotide
  Sense strand starting at position 3627 of SEQ ID NO: 914304
aaguuauguguguaugugu

SEQ ID NO: 993837 - RNA, 19 nt, Artificial Sequence
  Description of Artificial Sequence: Synthetic oligonucleotide
  Antisense strand to SEQ ID NO: 993836
acacauacacacauaacuu

SEQ ID NO: 993838 - RNA, 19 nt, Artificial Sequence
  Description of Artificial Sequence: Synthetic oligonucleotide
  Sense strand starting at position 3651 of SEQ ID NO: 914304
gauguuaaaggauguuaac

SEQ ID NO: 993839 - RNA, 19 nt, Artificial Sequence
  Description of Artificial Sequence: Synthetic oligonucleotide
  Antisense strand to SEQ ID NO: 993838
guuaacauccuuuaacauc

SEQ ID NO: 993840 - RNA, 19 nt, Artificial Sequence
  Description of Artificial Sequence: Synthetic oligonucleotide
  Sense strand starting at position 3654 of SEQ ID NO: 914304
guuaaaggauguuaacauu

SEQ ID NO: 993841 - RNA, 19 nt, Artificial Sequence
  Description of Artificial Sequence: Synthetic oligonucleotide
  Antisense strand to SEQ ID NO: 993840
aauguuaacauccuuuaac

SEQ ID NO: 993842 - RNA, 19 nt, Artificial Sequence
  Description of Artificial Sequence: Synthetic oligonucleotide
  Sense strand starting at position 3775 of SEQ ID NO: 914304
uuguacuucucaguuagau

SEQ ID NO: 993843 - RNA, 19 nt, Artificial Sequence
  Description of Artificial Sequence: Synthetic oligonucleotide
  Antisense strand to SEQ ID NO: 993842
aucuaacugagaaguacaa

SEQ ID NO: 993844 - RNA, 19 nt, Artificial Sequence
  Description of Artificial Sequence: Synthetic oligonucleotide
  Sense strand starting at position 3785 of SEQ ID NO: 914304
caguuagauugaggauaaa

SEQ ID NO: 993845 - RNA, 19 nt, Artificial Sequence
  Description of Artificial Sequence: Synthetic oligonucleotide
  Antisense strand to SEQ ID NO: 993844
uuuauccucaaucuaacug

SEQ ID NO: 993846 - RNA, 19 nt, Artificial Sequence
  Description of Artificial Sequence: Synthetic oligonucleotide
  Sense strand starting at position 3822 of SEQ ID NO: 914304
auuagagcugagcgugaua

SEQ ID NO: 993847 - RNA, 19 nt, Artificial Sequence
  Description of Artificial Sequence: Synthetic oligonucleotide
  Antisense strand to SEQ ID NO: 993846
uaucacgcucagcucuaau

SEQ ID NO: 993848 - RNA, 19 nt, Artificial Sequence
  Description of Artificial Sequence: Synthetic oligonucleotide
  Sense strand starting at position 3831 of SEQ ID NO: 914304
gagcgugauagccaacagu

SEQ ID NO: 993849 - RNA, 19 nt, Artificial Sequence
  Description of Artificial Sequence: Synthetic oligonucleotide
  Antisense strand to SEQ ID NO: 993848
acuguuggcuaucacgcuc

SEQ ID NO: 993850 - RNA, 19 nt, Artificial Sequence
  Description of Artificial Sequence: Synthetic oligonucleotide
  Sense strand starting at position 192 of SEQ ID NO: 914305
ggugguguucacuaguaac

SEQ ID NO: 993851 - RNA, 19 nt, Artificial Sequence
  Description of Artificial Sequence: Synthetic oligonucleotide
  Antisense strand to SEQ ID NO: 993850
guuacuagugaacaccacc

SEQ ID NO: 993852 - RNA, 19 nt, Artificial Sequence
  Description of Artificial Sequence: Synthetic oligonucleotide
  Sense strand starting at position 702 of SEQ ID NO: 914305
ugagaauccuaguuuauuc

SEQ ID NO: 993853 - RNA, 19 nt, Artificial Sequence
  Description of Artificial Sequence: Synthetic oligonucleotide
  Antisense strand to SEQ ID NO: 993852
gaauaaacuaggauucuca

SEQ ID NO: 993854 - RNA, 19 nt, Artificial Sequence
  Description of Artificial Sequence: Synthetic oligonucleotide
  Sense strand starting at position 747 of SEQ ID NO: 914305
gcucauucugaugacauua

SEQ ID NO: 993855 - RNA, 19 nt, Artificial Sequence
  Description of Artificial Sequence: Synthetic oligonucleotide
  Antisense strand to SEQ ID NO: 993854
uaaugucaucagaaugagc

SEQ ID NO: 993856 - RNA, 19 nt, Artificial Sequence
  Description of Artificial Sequence: Synthetic oligonucleotide
  Sense strand starting at position 790 of SEQ ID NO: 914305
acggacacuucuccauaca

SEQ ID NO: 993857 - RNA, 19 nt, Artificial Sequence
  Description of Artificial Sequence: Synthetic oligonucleotide
  Antisense strand to SEQ ID NO: 993856
uguauggagaaguguccgu

SEQ ID NO: 993858 - RNA, 19 nt, Artificial Sequence
  Description of Artificial Sequence: Synthetic oligonucleotide
  Sense strand starting at position 817 of SEQ ID NO: 914305
caggaacgaucuccaguua

SEQ ID NO: 993859 - RNA, 19 nt, Artificial Sequence
  Description of Artificial Sequence: Synthetic oligonucleotide
  Antisense strand to SEQ ID NO: 993858
uaacuggagaucguuccug

SEQ ID NO: 993860 - RNA, 19 nt, Artificial Sequence
  Description of Artificial Sequence: Synthetic oligonucleotide
  Sense strand starting at position 946 of SEQ ID NO: 914305
gugguugacaaauguuuag

SEQ ID NO: 993861 - RNA, 19 nt, Artificial Sequence
  Description of Artificial Sequence: Synthetic oligonucleotide
  Antisense strand to SEQ ID NO: 993860
cuaaacauuugucaaccac

SEQ ID NO: 993862 - RNA, 19 nt, Artificial Sequence
  Description of Artificial Sequence: Synthetic oligonucleotide
  Sense strand starting at position 949 of SEQ ID NO: 914305
guugacaaauguuuagcaa

SEQ ID NO: 993863 - RNA, 19 nt, Artificial Sequence
  Description of Artificial Sequence: Synthetic oligonucleotide
  Antisense strand to SEQ ID NO: 993862
uugcuaaacauuugucaac

SEQ ID NO: 993864 - RNA, 19 nt, Artificial Sequence
  Description of Artificial Sequence: Synthetic oligonucleotide
  Sense strand starting at position 950 of SEQ ID NO: 914305
uugacaaauguuuagcaau

SEQ ID NO: 993865 - RNA, 19 nt, Artificial Sequence
  Description of Artificial Sequence: Synthetic oligonucleotide
  Antisense strand to SEQ ID NO: 993864
auugcuaaacauuugucaa

SEQ ID NO: 993866 - RNA, 19 nt, Artificial Sequence
  Description of Artificial Sequence: Synthetic oligonucleotide
  Sense strand starting at position 952 of SEQ ID NO: 914305
gacaaauguuuagcaauga

SEQ ID NO: 993867 - RNA, 19 nt, Artificial Sequence
  Description of Artificial Sequence: Synthetic oligonucleotide
  Antisense strand to SEQ ID NO: 993866
ucauugcuaaacauuuguc

SEQ ID NO: 993868 - RNA, 19 nt, Artificial Sequence
  Description of Artificial Sequence: Synthetic oligonucleotide
  Sense strand starting at position 1020 of SEQ ID NO: 914305
agauauagauaggaggaau

SEQ ID NO: 993869 - RNA, 19 nt, Artificial Sequence
  Description of Artificial Sequence: Synthetic oligonucleotide
  Antisense strand to SEQ ID NO: 993868
auuccuccuaucuauaucu

SEQ ID NO: 993870 - RNA, 19 nt, Artificial Sequence
  Description of Artificial Sequence: Synthetic oligonucleotide
  Sense strand starting at position 1097 of SEQ ID NO: 914305
uuaucauauugugcugaaa

SEQ ID NO: 993871 - RNA, 19 nt, Artificial Sequence
  Description of Artificial Sequence: Synthetic oligonucleotide
  Antisense strand to SEQ ID NO: 993870
uuucagcacaauaugauaa

SEQ ID NO: 993872 - RNA, 19 nt, Artificial Sequence
  Description of Artificial Sequence: Synthetic oligonucleotide
  Sense strand starting at position 1207 of SEQ ID NO: 914305
guuuguguaaaugaccgaa

SEQ ID NO: 993873 - RNA, 19 nt, Artificial Sequence
  Description of Artificial Sequence: Synthetic oligonucleotide
  Antisense strand to SEQ ID NO: 993872
uucggucauuuacacaaac

SEQ ID NO: 993874 - RNA, 19 nt, Artificial Sequence
  Description of Artificial Sequence: Synthetic oligonucleotide
  Sense strand starting at position 1257 of SEQ ID NO: 914305
uugacuucggcuuaaggaa

SEQ ID NO: 993875 - RNA, 19 nt, Artificial Sequence
  Description of Artificial Sequence: Synthetic oligonucleotide
  Antisense strand to SEQ ID NO: 993874
uuccuuaagccgaagucaa

SEQ ID NO: 993876 - RNA, 19 nt, Artificial Sequence
  Description of Artificial Sequence: Synthetic oligonucleotide
  Sense strand starting at position 1270 of SEQ ID NO: 914305
aaggaagaaucguucccau

SEQ ID NO: 993877 - RNA, 19 nt, Artificial Sequence
  Description of Artificial Sequence: Synthetic oligonucleotide
  Antisense strand to SEQ ID NO: 993876
augggaacgauucuuccuu

SEQ ID NO: 993878 - RNA, 19 nt, Artificial Sequence
  Description of Artificial Sequence: Synthetic oligonucleotide
  Sense strand starting at position 1273 of SEQ ID NO: 914305
gaagaaucguucccaugau

SEQ ID NO: 993879 - RNA, 19 nt, Artificial Sequence
  Description of Artificial Sequence: Synthetic oligonucleotide
  Antisense strand to SEQ ID NO: 993878
aucaugggaacgauucuuc

SEQ ID NO: 993880 - RNA, 19 nt, Artificial Sequence
  Description of Artificial Sequence: Synthetic oligonucleotide
  Sense strand starting at position 1504 of SEQ ID NO: 914305
gccugccuuccugauaaau

SEQ ID NO: 993881 - RNA, 19 nt, Artificial Sequence
  Description of Artificial Sequence: Synthetic oligonucleotide
  Antisense strand to SEQ ID NO: 993880
auuuaucaggaaggcaggc

SEQ ID NO: 993882 - RNA, 19 nt, Artificial Sequence
  Description of Artificial Sequence: Synthetic oligonucleotide
  Sense strand starting at position 1554 of SEQ ID NO: 914305
cucaguuauuugcuucuuu

SEQ ID NO: 993883 - RNA, 19 nt, Artificial Sequence
  Description of Artificial Sequence: Synthetic oligonucleotide
  Antisense strand to SEQ ID NO: 993882
aaagaagcaaauaacugag

SEQ ID NO: 993884 - RNA, 19 nt, Artificial Sequence
  Description of Artificial Sequence: Synthetic oligonucleotide
  Sense strand starting at position 2443 of SEQ ID NO: 914305
gagugaugggccugggaca

SEQ ID NO: 993885 - RNA, 19 nt, Artificial Sequence
  Description of Artificial Sequence: Synthetic oligonucleotide
  Antisense strand to SEQ ID NO: 993884
ugucccaggcccaucacuc

SEQ ID NO: 993886 - RNA, 19 nt, Artificial Sequence
  Description of Artificial Sequence: Synthetic oligonucleotide
  Sense strand starting at position 2674 of SEQ ID NO: 914305
cagagaggguucccaaacu

SEQ ID NO: 993887 - RNA, 19 nt, Artificial Sequence
  Description of Artificial Sequence: Synthetic oligonucleotide
  Antisense strand to SEQ ID NO: 993886
aguuugggaacccucucug

SEQ ID NO: 993888 - RNA, 19 nt, Artificial Sequence
  Description of Artificial Sequence: Synthetic oligonucleotide
  Sense strand starting at position 2729 of SEQ ID NO: 914305
uuucuuuaggguugucaaa

SEQ ID NO: 993889 - RNA, 19 nt, Artificial Sequence
  Description of Artificial Sequence: Synthetic oligonucleotide
  Antisense strand to SEQ ID NO: 993888
uuugacaacccuaaagaaa

SEQ ID NO: 993890 - RNA, 19 nt, Artificial Sequence
  Description of Artificial Sequence: Synthetic oligonucleotide
  Sense strand starting at position 2745 of SEQ ID NO: 914305
aaacgucucggacgagaaa

SEQ ID NO: 993891 - RNA, 19 nt, Artificial Sequence
  Description of Artificial Sequence: Synthetic oligonucleotide
  Antisense strand to SEQ ID NO: 993890
uuucucguccgagacguuu

SEQ ID NO: 993892 - RNA, 19 nt, Artificial Sequence
  Description of Artificial Sequence: Synthetic oligonucleotide
  Sense strand starting at position 2772 of SEQ ID NO: 914305
caagguugccgagauugaa

SEQ ID NO: 993893 - RNA, 19 nt, Artificial Sequence
  Description of Artificial Sequence: Synthetic oligonucleotide
  Antisense strand to SEQ ID NO: 993892
uucaaucucggcaaccuug

SEQ ID NO: 993894 - RNA, 19 nt, Artificial Sequence
  Description of Artificial Sequence: Synthetic oligonucleotide
  Sense strand starting at position 2802 of SEQ ID NO: 914305
gggaguucuuacuuauucu

SEQ ID NO: 993895 - RNA, 19 nt, Artificial Sequence
  Description of Artificial Sequence: Synthetic oligonucleotide
  Antisense strand to SEQ ID NO: 993894
agaauaaguaagaacuccc

SEQ ID NO: 993896 - RNA, 19 nt, Artificial Sequence
  Description of Artificial Sequence: Synthetic oligonucleotide
  Sense strand starting at position 2879 of SEQ ID NO: 914305
ccaugacucguggaagacu

SEQ ID NO: 993897 - RNA, 19 nt, Artificial Sequence
  Description of Artificial Sequence: Synthetic oligonucleotide
  Antisense strand to SEQ ID NO: 993896
agucuuccacgagucaugg

SEQ ID NO: 993898 - RNA, 19 nt, Artificial Sequence
  Description of Artificial Sequence: Synthetic oligonucleotide
  Sense strand starting at position 2915 of SEQ ID NO: 914305
acggcaucacgauagacaa

SEQ ID NO: 993899 - RNA, 19 nt, Artificial Sequence
  Description of Artificial Sequence: Synthetic oligonucleotide
  Antisense strand to SEQ ID NO: 993898
uugucuaucgugaugccgu

SEQ ID NO: 993900 - RNA, 19 nt, Artificial Sequence
  Description of Artificial Sequence: Synthetic oligonucleotide
  Sense strand starting at position 2954 of SEQ ID NO: 914305
agcaaauauucgcuugaaa

SEQ ID NO: 993901 - RNA, 19 nt, Artificial Sequence
  Description of Artificial Sequence: Synthetic oligonucleotide
  Antisense strand to SEQ ID NO: 993900
uuucaagcgaauauuugcu

SEQ ID NO: 993902 - RNA, 19 nt, Artificial Sequence
  Description of Artificial Sequence: Synthetic oligonucleotide
  Sense strand starting at position 2974 of SEQ ID NO: 914305
agcaaacauuuaggagaua

SEQ ID NO: 993903 - RNA, 19 nt, Artificial Sequence
  Description of Artificial Sequence: Synthetic oligonucleotide
  Antisense strand to SEQ ID NO: 993902
uaucuccuaaauguuugcu

SEQ ID NO: 993904 - RNA, 19 nt, Artificial Sequence
  Description of Artificial Sequence: Synthetic oligonucleotide
  Sense strand starting at position 2975 of SEQ ID NO: 914305
gcaaacauuuaggagauaa

SEQ ID NO: 993905 - RNA, 19 nt, Artificial Sequence
  Description of Artificial Sequence: Synthetic oligonucleotide
  Antisense strand to SEQ ID NO: 993904
uuaucuccuaaauguuugc

SEQ ID NO: 993906 - RNA, 19 nt, Artificial Sequence
  Description of Artificial Sequence: Synthetic oligonucleotide
  Sense strand starting at position 2986 of SEQ ID NO: 914305
ggagauaaaucauaccaaa

SEQ ID NO: 993907 - RNA, 19 nt, Artificial Sequence
  Description of Artificial Sequence: Synthetic oligonucleotide
  Antisense strand to SEQ ID NO: 993906
uuugguaugauuuaucucc

SEQ ID NO: 993908 - RNA, 19 nt, Artificial Sequence
  Description of Artificial Sequence: Synthetic oligonucleotide
  Sense strand starting at position 3144 of SEQ ID NO: 914305
ggagaauaggacugacguu

SEQ ID NO: 993909 - RNA, 19 nt, Artificial Sequence
  Description of Artificial Sequence: Synthetic oligonucleotide
  Antisense strand to SEQ ID NO: 993908
aacgucaguccuauucucc

SEQ ID NO: 993910 - RNA, 19 nt, Artificial Sequence
  Description of Artificial Sequence: Synthetic oligonucleotide
  Sense strand starting at position 3302 of SEQ ID NO: 914305
augguaagaugaguguauu

SEQ ID NO: 993911 - RNA, 19 nt, Artificial Sequence
  Description of Artificial Sequence: Synthetic oligonucleotide
  Antisense strand to SEQ ID NO: 993910
aauacacucaucuuaccau

SEQ ID NO: 993912 - RNA, 19 nt, Artificial Sequence
  Description of Artificial Sequence: Synthetic oligonucleotide
  Sense strand starting at position 3303 of SEQ ID NO: 914305
ugguaagaugaguguauug

SEQ ID NO: 993913 - RNA, 19 nt, Artificial Sequence
  Description of Artificial Sequence: Synthetic oligonucleotide
  Antisense strand to SEQ ID NO: 993912
caauacacucaucuuacca

SEQ ID NO: 993914 - RNA, 19 nt, Artificial Sequence
  Description of Artificial Sequence: Synthetic oligonucleotide
  Sense strand starting at position 3326 of SEQ ID NO: 914305
uccuaaagguuccuuaaug

SEQ ID NO: 993915 - RNA, 19 nt, Artificial Sequence
  Description of Artificial Sequence: Synthetic oligonucleotide
  Antisense strand to SEQ ID NO: 993914
cauuaaggaaccuuuagga

SEQ ID NO: 993916 - RNA, 19 nt, Artificial Sequence
  Description of Artificial Sequence: Synthetic oligonucleotide
  Sense strand starting at position 3333 of SEQ ID NO: 914305
gguuccuuaaugggaacaa

SEQ ID NO: 993917 - RNA, 19 nt, Artificial Sequence
  Description of Artificial Sequence: Synthetic oligonucleotide
  Antisense strand to SEQ ID NO: 993916
uuguucccauuaaggaacc

SEQ ID NO: 993918 - RNA, 19 nt, Artificial Sequence
  Description of Artificial Sequence: Synthetic oligonucleotide
  Sense strand starting at position 3439 of SEQ ID NO: 914305
uccuccaaguuuguugaaa

SEQ ID NO: 993919 - RNA, 19 nt, Artificial Sequence
  Description of Artificial Sequence: Synthetic oligonucleotide
  Antisense strand to SEQ ID NO: 993918
uuucaacaaacuuggagga

SEQ ID NO: 993920 - RNA, 19 nt, Artificial Sequence
  Description of Artificial Sequence: Synthetic oligonucleotide
  Sense strand starting at position 3440 of SEQ ID NO: 914305
ccuccaaguuuguugaaau

SEQ ID NO: 993921 - RNA, 19 nt, Artificial Sequence
  Description of Artificial Sequence: Synthetic oligonucleotide
  Antisense strand to SEQ ID NO: 993920
auuucaacaaacuuggagg

SEQ ID NO: 993922 - RNA, 19 nt, Artificial Sequence
  Description of Artificial Sequence: Synthetic oligonucleotide
  Sense strand starting at position 3524 of SEQ ID NO: 914305
acaaauguuggaugaguuu

SEQ ID NO: 993923 - RNA, 19 nt, Artificial Sequence
  Description of Artificial Sequence: Synthetic oligonucleotide
  Antisense strand to SEQ ID NO: 993922
aaacucauccaacauuugu

SEQ ID NO: 993924 - RNA, 19 nt, Artificial Sequence
  Description of Artificial Sequence: Synthetic oligonucleotide
  Sense strand starting at position 3566 of SEQ ID NO: 914305
uggaaugagcuuugagacu

SEQ ID NO: 993925 - RNA, 19 nt, Artificial Sequence
  Description of Artificial Sequence: Synthetic oligonucleotide
  Antisense strand to SEQ ID NO: 993924
agucucaaagcucauucca

SEQ ID NO: 993926 - RNA, 19 nt, Artificial Sequence
  Description of Artificial Sequence: Synthetic oligonucleotide
  Sense strand starting at position 3636 of SEQ ID NO: 914305
uaggaagagugcucuuaau

SEQ ID NO: 993927 - RNA, 19 nt, Artificial Sequence
  Description of Artificial Sequence: Synthetic oligonucleotide
  Antisense strand to SEQ ID NO: 993926
auuaagagcacucuuccua

SEQ ID NO: 993928 - RNA, 19 nt, Artificial Sequence
  Description of Artificial Sequence: Synthetic oligonucleotide
  Sense strand starting at position 3695 of SEQ ID NO: 914305
guuacagacucucuguaca

SEQ ID NO: 993929 - RNA, 19 nt, Artificial Sequence
  Description of Artificial Sequence: Synthetic oligonucleotide
  Antisense strand to SEQ ID NO: 993928
uguacagagagucuguaac

SEQ ID NO: 993930 - RNA, 19 nt, Artificial Sequence
  Description of Artificial Sequence: Synthetic oligonucleotide
  Sense strand starting at position 45 of SEQ ID NO: 914306
aggaaagacgauugcagau

SEQ ID NO: 993931 - RNA, 19 nt, Artificial Sequence
  Description of Artificial Sequence: Synthetic oligonucleotide
  Antisense strand to SEQ ID NO: 993930
aucugcaaucgucuuuccu

SEQ ID NO: 993932 - RNA, 19 nt, Artificial Sequence
  Description of Artificial Sequence: Synthetic oligonucleotide
  Sense strand starting at position 177 of SEQ ID NO: 914306
gugagauuaaauggcuugu

SEQ ID NO: 993933 - RNA, 19 nt, Artificial Sequence
  Description of Artificial Sequence: Synthetic oligonucleotide
  Antisense strand to SEQ ID NO: 993932
acaagccauuuaaucucac

SEQ ID NO: 993934 - RNA, 19 nt, Artificial Sequence
  Description of Artificial Sequence: Synthetic oligonucleotide
  Sense strand starting at position 181 of SEQ ID NO: 914306
gauuaaauggcuugugcag

SEQ ID NO: 993935 - RNA, 19 nt, Artificial Sequence
  Description of Artificial Sequence: Synthetic oligonucleotide
  Antisense strand to SEQ ID NO: 993934
cugcacaagccauuuaauc

SEQ ID NO: 993936 - RNA, 19 nt, Artificial Sequence
  Description of Artificial Sequence: Synthetic oligonucleotide
  Sense strand starting at position 236 of SEQ ID NO: 914306
ccacaaaccucugagaaag

SEQ ID NO: 993937 - RNA, 19 nt, Artificial Sequence
  Description of Artificial Sequence: Synthetic oligonucleotide
  Antisense strand to SEQ ID NO: 993936
cuuucucagagguuugugg

SEQ ID NO: 993938 - RNA, 19 nt, Artificial Sequence
  Description of Artificial Sequence: Synthetic oligonucleotide
  Sense strand starting at position 238 of SEQ ID NO: 914306
acaaaccucugagaaagaa

SEQ ID NO: 993939 - RNA, 19 nt, Artificial Sequence
  Description of Artificial Sequence: Synthetic oligonucleotide
  Antisense strand to SEQ ID NO: 993938
uucuuucucagagguuugu

SEQ ID NO: 993940 - RNA, 19 nt, Artificial Sequence
  Description of Artificial Sequence: Synthetic oligonucleotide
  Sense strand starting at position 297 of SEQ ID NO: 914306
acaguuaaaggaugugcau

SEQ ID NO: 993941 - RNA, 19 nt, Artificial Sequence
  Description of Artificial Sequence: Synthetic oligonucleotide
  Antisense strand to SEQ ID NO: 993940
augcacauccuuuaacugu

SEQ ID NO: 993942 - RNA, 19 nt, Artificial Sequence
  Description of Artificial Sequence: Synthetic oligonucleotide
  Sense strand starting at position 445 of SEQ ID NO: 914306
ggauuucucgugcaucugu

SEQ ID NO: 993943 - RNA, 19 nt, Artificial Sequence
  Description of Artificial Sequence: Synthetic oligonucleotide
  Antisense strand to SEQ ID NO: 993942
acagaugcacgagaaaucc

SEQ ID NO: 993944 - RNA, 19 nt, Artificial Sequence
  Description of Artificial Sequence: Synthetic oligonucleotide
  Sense strand starting at position 867 of SEQ ID NO: 914306
cgaugguuugggcgaugaa

SEQ ID NO: 993945 - RNA, 19 nt, Artificial Sequence
  Description of Artificial Sequence: Synthetic oligonucleotide
  Antisense strand to SEQ ID NO: 993944
uucaucgcccaaaccaucg

SEQ ID NO: 993946 - RNA, 19 nt, Artificial Sequence
  Description of Artificial Sequence: Synthetic oligonucleotide
  Sense strand starting at position 868 of SEQ ID NO: 914306
gaugguuugggcgaugaag

SEQ ID NO: 993947 - RNA, 19 nt, Artificial Sequence
  Description of Artificial Sequence: Synthetic oligonucleotide
  Antisense strand to SEQ ID NO: 993946
cuucaucgcccaaaccauc

SEQ ID NO: 993948 - RNA, 19 nt, Artificial Sequence
  Description of Artificial Sequence: Synthetic oligonucleotide
  Sense strand starting at position 870 of SEQ ID NO: 914306
ugguuugggcgaugaagaa

SEQ ID NO: 993949 - RNA, 19 nt, Artificial Sequence
  Description of Artificial Sequence: Synthetic oligonucleotide
  Antisense strand to SEQ ID NO: 993948
uucuucaucgcccaaacca

SEQ ID NO: 993950 - RNA, 19 nt, Artificial Sequence
  Description of Artificial Sequence: Synthetic oligonucleotide
  Sense strand starting at position 1208 of SEQ ID NO: 914306
gcguacauguugacgaaga

SEQ ID NO: 993951 - RNA, 19 nt, Artificial Sequence
  Description of Artificial Sequence: Synthetic oligonucleotide
  Antisense strand to SEQ ID NO: 993950
ucuucgucaacauguacgc

SEQ ID NO: 993952 - RNA, 19 nt, Artificial Sequence
  Description of Artificial Sequence: Synthetic oligonucleotide
  Sense strand starting at position 1210 of SEQ ID NO: 914306
guacauguugacgaagaug

SEQ ID NO: 993953 - RNA, 19 nt, Artificial Sequence
  Description of Artificial Sequence: Synthetic oligonucleotide
  Antisense strand to SEQ ID NO: 993952
caucuucgucaacauguac

SEQ ID NO: 993954 - RNA, 19 nt, Artificial Sequence
  Description of Artificial Sequence: Synthetic oligonucleotide
  Sense strand starting at position 1338 of SEQ ID NO: 914306
ccaggcuagcaaugaagau

SEQ ID NO: 993955 - RNA, 19 nt, Artificial Sequence
  Description of Artificial Sequence: Synthetic oligonucleotide
  Antisense strand to SEQ ID NO: 993954
aucuucauugcuagccugg

SEQ ID NO: 993956 - RNA, 19 nt, Artificial Sequence
  Description of Artificial Sequence: Synthetic oligonucleotide
  Sense strand starting at position 1342 of SEQ ID NO: 914306
gcuagcaaugaagauauca

SEQ ID NO: 993957 - RNA, 19 nt, Artificial Sequence
  Description of Artificial Sequence: Synthetic oligonucleotide
  Antisense strand to SEQ ID NO: 993956
ugauaucuucauugcuagc

SEQ ID NO: 993958 - RNA, 19 nt, Artificial Sequence
  Description of Artificial Sequence: Synthetic oligonucleotide
  Sense strand starting at position 1620 of SEQ ID NO: 914306
cugcaagcagccugaauuu

SEQ ID NO: 993959 - RNA, 19 nt, Artificial Sequence
  Description of Artificial Sequence: Synthetic oligonucleotide
  Antisense strand to SEQ ID NO: 993958
aaauucaggcugcuugcag

SEQ ID NO: 993960 - RNA, 19 nt, Artificial Sequence
  Description of Artificial Sequence: Synthetic oligonucleotide
  Sense strand starting at position 1633 of SEQ ID NO: 914306
gaauuucuggcuugagccu

SEQ ID NO: 993961 - RNA, 19 nt, Artificial Sequence
  Description of Artificial Sequence: Synthetic oligonucleotide
  Antisense strand to SEQ ID NO: 993960
aggcucaagccagaaauuc

SEQ ID NO: 993962 - RNA, 19 nt, Artificial Sequence
  Description of Artificial Sequence: Synthetic oligonucleotide
  Sense strand starting at position 1738 of SEQ ID NO: 914306
gccugucuccugcagaauu

SEQ ID NO: 993963 - RNA, 19 nt, Artificial Sequence
  Description of Artificial Sequence: Synthetic oligonucleotide
  Antisense strand to SEQ ID NO: 993962
aauucugcaggagacaggc

SEQ ID NO: 993964 - RNA, 19 nt, Artificial Sequence
  Description of Artificial Sequence: Synthetic oligonucleotide
  Sense strand starting at position 1966 of SEQ ID NO: 914306
ugaacauuaucugugguuu

SEQ ID NO: 993965 - RNA, 19 nt, Artificial Sequence
  Description of Artificial Sequence: Synthetic oligonucleotide
  Antisense strand to SEQ ID NO: 993964
aaaccacagauaauguuca

SEQ ID NO: 993966 - RNA, 19 nt, Artificial Sequence
  Description of Artificial Sequence: Synthetic oligonucleotide
  Sense strand starting at position 2156 of SEQ ID NO: 914306
gggacacauuaugcagauu

SEQ ID NO: 993967 - RNA, 19 nt, Artificial Sequence
  Description of Artificial Sequence: Synthetic oligonucleotide
  Antisense strand to SEQ ID NO: 993966
aaucugcauaauguguccc

SEQ ID NO: 993968 - RNA, 19 nt, Artificial Sequence
  Description of Artificial Sequence: Synthetic oligonucleotide
  Sense strand starting at position 2159 of SEQ ID NO: 914306
acacauuaugcagauugca

SEQ ID NO: 993969 - RNA, 19 nt, Artificial Sequence
  Description of Artificial Sequence: Synthetic oligonucleotide
  Antisense strand to SEQ ID NO: 993968
ugcaaucugcauaaugugu

SEQ ID NO: 993970 - RNA, 19 nt, Artificial Sequence
  Description of Artificial Sequence: Synthetic oligonucleotide
  Sense strand starting at position 2221 of SEQ ID NO: 914306
guguaagauuucgcaggau

SEQ ID NO: 993971 - RNA, 19 nt, Artificial Sequence
  Description of Artificial Sequence: Synthetic oligonucleotide
  Antisense strand to SEQ ID NO: 993970
auccugcgaaaucuuacac

SEQ ID NO: 993972 - RNA, 19 nt, Artificial Sequence
  Description of Artificial Sequence: Synthetic oligonucleotide
  Sense strand starting at position 2469 of SEQ ID NO: 914306
ggcacaggaugcuuuagaa

SEQ ID NO: 993973 - RNA, 19 nt, Artificial Sequence
  Description of Artificial Sequence: Synthetic oligonucleotide
  Antisense strand to SEQ ID NO: 993972
uucuaaagcauccugugcc

SEQ ID NO: 993974 - RNA, 19 nt, Artificial Sequence
  Description of Artificial Sequence: Synthetic oligonucleotide
  Sense strand starting at position 2543 of SEQ ID NO: 914306
gucauuaaaucuguaggaa

SEQ ID NO: 993975 - RNA, 19 nt, Artificial Sequence
  Description of Artificial Sequence: Synthetic oligonucleotide
  Antisense strand to SEQ ID NO: 993974
uuccuacagauuuaaugac

SEQ ID NO: 993976 - RNA, 19 nt, Artificial Sequence
  Description of Artificial Sequence: Synthetic oligonucleotide
  Sense strand starting at position 2605 of SEQ ID NO: 914306
ugaauuaugcuacaguuga

SEQ ID NO: 993977 - RNA, 19 nt, Artificial Sequence
  Description of Artificial Sequence: Synthetic oligonucleotide
  Antisense strand to SEQ ID NO: 993976
ucaacuguagcauaauuca

SEQ ID NO: 993978 - RNA, 19 nt, Artificial Sequence
  Description of Artificial Sequence: Synthetic oligonucleotide
  Sense strand starting at position 2668 of SEQ ID NO: 914306
cuggcaugucguaggugaa

SEQ ID NO: 993979 - RNA, 19 nt, Artificial Sequence
  Description of Artificial Sequence: Synthetic oligonucleotide
  Antisense strand to SEQ ID NO: 993978
uucaccuacgacaugccag

SEQ ID NO: 993980 - RNA, 19 nt, Artificial Sequence
  Description of Artificial Sequence: Synthetic oligonucleotide
  Sense strand starting at position 2964 of SEQ ID NO: 914306
auggcuguugagugaguaa

SEQ ID NO: 993981 - RNA, 19 nt, Artificial Sequence
  Description of Artificial Sequence: Synthetic oligonucleotide
  Antisense strand to SEQ ID NO: 993980
uuacucacucaacagccau

SEQ ID NO: 993982 - RNA, 19 nt, Artificial Sequence
  Description of Artificial Sequence: Synthetic oligonucleotide
  Sense strand starting at position 2966 of SEQ ID NO: 914306
ggcuguugagugaguaagu

SEQ ID NO: 993983 - RNA, 19 nt, Artificial Sequence
  Description of Artificial Sequence: Synthetic oligonucleotide
  Antisense strand to SEQ ID NO: 993982
acuuacucacucaacagcc

SEQ ID NO: 993984 - RNA, 19 nt, Artificial Sequence
  Description of Artificial Sequence: Synthetic oligonucleotide
  Sense strand starting at position 2977 of SEQ ID NO: 914306
gaguaaguggauggaugau

SEQ ID NO: 993985 - RNA, 19 nt, Artificial Sequence
  Description of Artificial Sequence: Synthetic oligonucleotide
  Antisense strand to SEQ ID NO: 993984
aucauccauccacuuacuc

SEQ ID NO: 993986 - RNA, 19 nt, Artificial Sequence
  Description of Artificial Sequence: Synthetic oligonucleotide
  Sense strand starting at position 3043 of SEQ ID NO: 914306
aagaauuacuacgugguga

SEQ ID NO: 993987 - RNA, 19 nt, Artificial Sequence
  Description of Artificial Sequence: Synthetic oligonucleotide
  Antisense strand to SEQ ID NO: 993986
ucaccacguaguaauucuu

SEQ ID NO: 993988 - RNA, 19 nt, Artificial Sequence
  Description of Artificial Sequence: Synthetic oligonucleotide
  Sense strand starting at position 3045 of SEQ ID NO: 914306
gaauuacuacguggugaga

SEQ ID NO: 993989 - RNA, 19 nt, Artificial Sequence
  Description of Artificial Sequence: Synthetic oligonucleotide
  Antisense strand to SEQ ID NO: 993988
ucucaccacguaguaauuc

SEQ ID NO: 993990 - RNA, 19 nt, Artificial Sequence
  Description of Artificial Sequence: Synthetic oligonucleotide
  Sense strand starting at position 3270 of SEQ ID NO: 914306
agaugcacgacguaagauu

SEQ ID NO: 993991 - RNA, 19 nt, Artificial Sequence
  Description of Artificial Sequence: Synthetic oligonucleotide
  Antisense strand to SEQ ID NO: 993990
aaucuuacgucgugcaucu

SEQ ID NO: 993992 - RNA, 19 nt, Artificial Sequence
  Description of Artificial Sequence: Synthetic oligonucleotide
  Sense strand starting at position 3338 of SEQ ID NO: 914306
ccaccugacguuggguaau

SEQ ID NO: 993993 - RNA, 19 nt, Artificial Sequence
  Description of Artificial Sequence: Synthetic oligonucleotide
  Antisense strand to SEQ ID NO: 993992
auuacccaacgucaggugg

SEQ ID NO: 993994 - RNA, 19 nt, Artificial Sequence
  Description of Artificial Sequence: Synthetic oligonucleotide
  Sense strand starting at position 3341 of SEQ ID NO: 914306
ccugacguuggguaauagu

SEQ ID NO: 993995 - RNA, 19 nt, Artificial Sequence
  Description of Artificial Sequence: Synthetic oligonucleotide
  Antisense strand to SEQ ID NO: 993994
acuauuacccaacgucagg

SEQ ID NO: 993996 - RNA, 19 nt, Artificial Sequence
  Description of Artificial Sequence: Synthetic oligonucleotide
  Sense strand starting at position 3507 of SEQ ID NO: 914306
ucaagacuagccugaauaa

SEQ ID NO: 993997 - RNA, 19 nt, Artificial Sequence
  Description of Artificial Sequence: Synthetic oligonucleotide
  Antisense strand to SEQ ID NO: 993996
uuauucaggcuagucuuga

SEQ ID NO: 993998 - RNA, 19 nt, Artificial Sequence
  Description of Artificial Sequence: Synthetic oligonucleotide
  Sense strand starting at position 3558 of SEQ ID NO: 914306
ugucuuaaguuacuacaaa

SEQ ID NO: 993999 - RNA, 19 nt, Artificial Sequence
  Description of Artificial Sequence: Synthetic oligonucleotide
  Antisense strand to SEQ ID NO: 993998
uuuguaguaacuuaagaca

SEQ ID NO: 994000 - RNA, 19 nt, Artificial Sequence
  Description of Artificial Sequence: Synthetic oligonucleotide
  Sense strand starting at position 3679 of SEQ ID NO: 914306
ccaagaguguaguuugaga

SEQ ID NO: 994001 - RNA, 19 nt, Artificial Sequence
  Description of Artificial Sequence: Synthetic oligonucleotide
  Antisense strand to SEQ ID NO: 994000
ucucaaacuacacucuugg

SEQ ID NO: 994002 - RNA, 19 nt, Artificial Sequence
  Description of Artificial Sequence: Synthetic oligonucleotide
  Sense strand starting at position 3681 of SEQ ID NO: 914306
aagaguguaguuugagaca

SEQ ID NO: 994003 - RNA, 19 nt, Artificial Sequence
  Description of Artificial Sequence: Synthetic oligonucleotide
  Antisense strand to SEQ ID NO: 994002
ugucucaaacuacacucuu

SEQ ID NO: 994004 - RNA, 19 nt, Artificial Sequence
  Description of Artificial Sequence: Synthetic oligonucleotide
  Sense strand starting at position 3804 of SEQ ID NO: 914306
gcaugacugugucuuagga

SEQ ID NO: 994005 - RNA, 19 nt, Artificial Sequence
  Description of Artificial Sequence: Synthetic oligonucleotide
  Antisense strand to SEQ ID NO: 994004
uccuaagacacagucaugc

SEQ ID NO: 994006 - RNA, 19 nt, Artificial Sequence
  Description of Artificial Sequence: Synthetic oligonucleotide
  Sense strand starting at position 3949 of SEQ ID NO: 914306
gaguuuguguucuuuaaac

SEQ ID NO: 994007 - RNA, 19 nt, Artificial Sequence
  Description of Artificial Sequence: Synthetic oligonucleotide
  Antisense strand to SEQ ID NO: 994006
guuuaaagaacacaaacuc

SEQ ID NO: 994008 - RNA, 19 nt, Artificial Sequence
  Description of Artificial Sequence: Synthetic oligonucleotide
  Sense strand starting at position 3951 of SEQ ID NO: 914306
guuuguguucuuuaaacag

SEQ ID NO: 994009 - RNA, 19 nt, Artificial Sequence
  Description of Artificial Sequence: Synthetic oligonucleotide
  Antisense strand to SEQ ID NO: 994008
cuguuuaaagaacacaaac

SEQ ID NO: 994010 - RNA, 19 nt, Artificial Sequence
  Description of Artificial Sequence: Synthetic oligonucleotide
  Sense strand starting at position 80 of SEQ ID NO: 914307
caacgcuguggcuaacaau

SEQ ID NO: 994011 - RNA, 19 nt, Artificial Sequence
  Description of Artificial Sequence: Synthetic oligonucleotide
  Antisense strand to SEQ ID NO: 994010
auuguuagccacagcguug

SEQ ID NO: 994012 - RNA, 19 nt, Artificial Sequence
  Description of Artificial Sequence: Synthetic oligonucleotide
  Sense strand starting at position 178 of SEQ ID NO: 914307
agucuucuacugugaauuc

SEQ ID NO: 994013 - RNA, 19 nt, Artificial Sequence
  Description of Artificial Sequence: Synthetic oligonucleotide
  Antisense strand to SEQ ID NO: 994012
gaauucacaguagaagacu

SEQ ID NO: 994014 - RNA, 19 nt, Artificial Sequence
  Description of Artificial Sequence: Synthetic oligonucleotide
  Sense strand starting at position 212 of SEQ ID NO: 914307
uagucauagcagugggaag

SEQ ID NO: 994015 - RNA, 19 nt, Artificial Sequence
  Description of Artificial Sequence: Synthetic oligonucleotide
  Antisense strand to SEQ ID NO: 994014
cuucccacugcuaugacua

SEQ ID NO: 994016 - RNA, 19 nt, Artificial Sequence
  Description of Artificial Sequence: Synthetic oligonucleotide
  Sense strand starting at position 213 of SEQ ID NO: 914307
agucauagcagugggaagu

SEQ ID NO: 994017 - RNA, 19 nt, Artificial Sequence
  Description of Artificial Sequence: Synthetic oligonucleotide
  Antisense strand to SEQ ID NO: 994016
acuucccacugcuaugacu

SEQ ID NO: 994018 - RNA, 19 nt, Artificial Sequence
  Description of Artificial Sequence: Synthetic oligonucleotide
  Sense strand starting at position 237 of SEQ ID NO: 914307
gcgagugugaacgaugguu

SEQ ID NO: 994019 - RNA, 19 nt, Artificial Sequence
  Description of Artificial Sequence: Synthetic oligonucleotide
  Antisense strand to SEQ ID NO: 994018
aaccaucguucacacucgc

SEQ ID NO: 994020 - RNA, 19 nt, Artificial Sequence
  Description of Artificial Sequence: Synthetic oligonucleotide
  Sense strand starting at position 242 of SEQ ID NO: 914307
ugugaacgaugguuucuga

SEQ ID NO: 994021 - RNA, 19 nt, Artificial Sequence
  Description of Artificial Sequence: Synthetic oligonucleotide
  Antisense strand to SEQ ID NO: 994020
ucagaaaccaucguucaca

SEQ ID NO: 994022 - RNA, 19 nt, Artificial Sequence
  Description of Artificial Sequence: Synthetic oligonucleotide
  Sense strand starting at position 245 of SEQ ID NO: 914307
gaacgaugguuucugacac

SEQ ID NO: 994023 - RNA, 19 nt, Artificial Sequence
  Description of Artificial Sequence: Synthetic oligonucleotide
  Antisense strand to SEQ ID NO: 994022
gugucagaaaccaucguuc

SEQ ID NO: 994024 - RNA, 19 nt, Artificial Sequence
  Description of Artificial Sequence: Synthetic oligonucleotide
  Sense strand starting at position 344 of SEQ ID NO: 914307
gcgacauaucagggaucac

SEQ ID NO: 994025 - RNA, 19 nt, Artificial Sequence
  Description of Artificial Sequence: Synthetic oligonucleotide
  Antisense strand to SEQ ID NO: 994024
gugaucccugauaugucgc

SEQ ID NO: 994026 - RNA, 19 nt, Artificial Sequence
  Description of Artificial Sequence: Synthetic oligonucleotide
  Sense strand starting at position 421 of SEQ ID NO: 914307
guagauaaacguuaacuau

SEQ ID NO: 994027 - RNA, 19 nt, Artificial Sequence
  Description of Artificial Sequence: Synthetic oligonucleotide
  Antisense strand to SEQ ID NO: 994026
auaguuaacguuuaucuac

SEQ ID NO: 994028 - RNA, 19 nt, Artificial Sequence
  Description of Artificial Sequence: Synthetic oligonucleotide
  Sense strand starting at position 507 of SEQ ID NO: 914307
gguguuaagccguuccauc

SEQ ID NO: 994029 - RNA, 19 nt, Artificial Sequence
  Description of Artificial Sequence: Synthetic oligonucleotide
  Antisense strand to SEQ ID NO: 994028
gauggaacggcuuaacacc

SEQ ID NO: 994030 - RNA, 19 nt, Artificial Sequence
  Description of Artificial Sequence: Synthetic oligonucleotide
  Sense strand starting at position 508 of SEQ ID NO: 914307
guguuaagccguuccauca

SEQ ID NO: 994031 - RNA, 19 nt, Artificial Sequence
  Description of Artificial Sequence: Synthetic oligonucleotide
  Antisense strand to SEQ ID NO: 994030
ugauggaacggcuuaacac

SEQ ID NO: 994032 - RNA, 19 nt, Artificial Sequence
  Description of Artificial Sequence: Synthetic oligonucleotide
  Sense strand starting at position 557 of SEQ ID NO: 914307
cguggaaauacuugaacau

SEQ ID NO: 994033 - RNA, 19 nt, Artificial Sequence
  Description of Artificial Sequence: Synthetic oligonucleotide
  Antisense strand to SEQ ID NO: 994032
auguucaaguauuuccacg

SEQ ID NO: 994034 - RNA, 19 nt, Artificial Sequence
  Description of Artificial Sequence: Synthetic oligonucleotide
  Sense strand starting at position 567 of SEQ ID NO: 914307
cuugaacauucuguagaag

SEQ ID NO: 994035 - RNA, 19 nt, Artificial Sequence
  Description of Artificial Sequence: Synthetic oligonucleotide
  Antisense strand to SEQ ID NO: 994034
cuucuacagaauguucaag

SEQ ID NO: 994036 - RNA, 19 nt, Artificial Sequence
  Description of Artificial Sequence: Synthetic oligonucleotide
  Sense strand starting at position 661 of SEQ ID NO: 914307
cucugaaauuagcuaagua

SEQ ID NO: 994037 - RNA, 19 nt, Artificial Sequence
  Description of Artificial Sequence: Synthetic oligonucleotide
  Antisense strand to SEQ ID NO: 994036
uacuuagcuaauuucagag

SEQ ID NO: 994038 - RNA, 19 nt, Artificial Sequence
  Description of Artificial Sequence: Synthetic oligonucleotide
  Sense strand starting at position 665 of SEQ ID NO: 914307
gaaauuagcuaaguaugca

SEQ ID NO: 994039 - RNA, 19 nt, Artificial Sequence
  Description of Artificial Sequence: Synthetic oligonucleotide
  Antisense strand to SEQ ID NO: 994038
ugcauacuuagcuaauuuc

SEQ ID NO: 994040 - RNA, 19 nt, Artificial Sequence
  Description of Artificial Sequence: Synthetic oligonucleotide
  Sense strand starting at position 669 of SEQ ID NO: 914307
uuagcuaaguaugcagaaa

SEQ ID NO: 994041 - RNA, 19 nt, Artificial Sequence
  Description of Artificial Sequence: Synthetic oligonucleotide
  Antisense strand to SEQ ID NO: 994040
uuucugcauacuuagcuaa

SEQ ID NO: 994042 - RNA, 19 nt, Artificial Sequence
  Description of Artificial Sequence: Synthetic oligonucleotide
  Sense strand starting at position 2778 of SEQ ID NO: 914307
gcggcauugccacuucagu

SEQ ID NO: 994043 - RNA, 19 nt, Artificial Sequence
  Description of Artificial Sequence: Synthetic oligonucleotide
  Antisense strand to SEQ ID NO: 994042
acugaaguggcaaugccgc

SEQ ID NO: 994044 - RNA, 19 nt, Artificial Sequence
  Description of Artificial Sequence: Synthetic oligonucleotide
  Sense strand starting at position 2879 of SEQ ID NO: 914307
gucgccugugaguuaggua

SEQ ID NO: 994045 - RNA, 19 nt, Artificial Sequence
  Description of Artificial Sequence: Synthetic oligonucleotide
  Antisense strand to SEQ ID NO: 994044
uaccuaacucacaggcgac

SEQ ID NO: 994046 - RNA, 19 nt, Artificial Sequence
  Description of Artificial Sequence: Synthetic oligonucleotide
  Sense strand starting at position 2987 of SEQ ID NO: 914307
agagacuguccgcggagua

SEQ ID NO: 994047 - RNA, 19 nt, Artificial Sequence
  Description of Artificial Sequence: Synthetic oligonucleotide
  Antisense strand to SEQ ID NO: 994046
uacuccgcggacagucucu

SEQ ID NO: 994048 - RNA, 19 nt, Artificial Sequence
  Description of Artificial Sequence: Synthetic oligonucleotide
  Sense strand starting at position 2989 of SEQ ID NO: 914307
agacuguccgcggaguaga

SEQ ID NO: 994049 - RNA, 19 nt, Artificial Sequence
  Description of Artificial Sequence: Synthetic oligonucleotide
  Antisense strand to SEQ ID NO: 994048
ucuacuccgcggacagucu

SEQ ID NO: 994050 - RNA, 19 nt, Artificial Sequence
  Description of Artificial Sequence: Synthetic oligonucleotide
  Sense strand starting at position 3016 of SEQ ID NO: 914307
ccuguaagaacucgggauu

SEQ ID NO: 994051 - RNA, 19 nt, Artificial Sequence
  Description of Artificial Sequence: Synthetic oligonucleotide
  Antisense strand to SEQ ID NO: 994050
aaucccgaguucuuacagg

SEQ ID NO: 994052 - RNA, 19 nt, Artificial Sequence
  Description of Artificial Sequence: Synthetic oligonucleotide
  Sense strand starting at position 3096 of SEQ ID NO: 914307
cugcccgauuccuccaaga

SEQ ID NO: 994053 - RNA, 19 nt, Artificial Sequence
  Description of Artificial Sequence: Synthetic oligonucleotide
  Antisense strand to SEQ ID NO: 994052
ucuuggaggaaucgggcag

SEQ ID NO: 994054 - RNA, 19 nt, Artificial Sequence
  Description of Artificial Sequence: Synthetic oligonucleotide
  Sense strand starting at position 3175 of SEQ ID NO: 914307
ccaacaucugccuguugga

SEQ ID NO: 994055 - RNA, 19 nt, Artificial Sequence
  Description of Artificial Sequence: Synthetic oligonucleotide
  Antisense strand to SEQ ID NO: 994054
uccaacaggcagauguugg

SEQ ID NO: 994056 - RNA, 19 nt, Artificial Sequence
  Description of Artificial Sequence: Synthetic oligonucleotide
  Sense strand starting at position 3213 of SEQ ID NO: 914307
ggcucagucggcugaaaua

SEQ ID NO: 994057 - RNA, 19 nt, Artificial Sequence
  Description of Artificial Sequence: Synthetic oligonucleotide
  Antisense strand to SEQ ID NO: 994056
uauuucagccgacugagcc

SEQ ID NO: 994058 - RNA, 19 nt, Artificial Sequence
  Description of Artificial Sequence: Synthetic oligonucleotide
  Sense strand starting at position 3223 of SEQ ID NO: 914307
gcugaaauaucgcuucuga

SEQ ID NO: 994059 - RNA, 19 nt, Artificial Sequence
  Description of Artificial Sequence: Synthetic oligonucleotide
  Antisense strand to SEQ ID NO: 994058
ucagaagcgauauuucagc

SEQ ID NO: 994060 - RNA, 19 nt, Artificial Sequence
  Description of Artificial Sequence: Synthetic oligonucleotide
  Sense strand starting at position 3240 of SEQ ID NO: 914307
gauugcucagagggauguu

SEQ ID NO: 994061 - RNA, 19 nt, Artificial Sequence
  Description of Artificial Sequence: Synthetic oligonucleotide
  Antisense strand to SEQ ID NO: 994060
aacaucccucugagcaauc

SEQ ID NO: 994062 - RNA, 19 nt, Artificial Sequence
  Description of Artificial Sequence: Synthetic oligonucleotide
  Sense strand starting at position 3249 of SEQ ID NO: 914307
gagggauguuucccacugu

SEQ ID NO: 994063 - RNA, 19 nt, Artificial Sequence
  Description of Artificial Sequence: Synthetic oligonucleotide
  Antisense strand to SEQ ID NO: 994062
acagugggaaacaucccuc

SEQ ID NO: 994064 - RNA, 19 nt, Artificial Sequence
  Description of Artificial Sequence: Synthetic oligonucleotide
  Sense strand starting at position 3253 of SEQ ID NO: 914307
gauguuucccacuguggca

SEQ ID NO: 994065 - RNA, 19 nt, Artificial Sequence
  Description of Artificial Sequence: Synthetic oligonucleotide
  Antisense strand to SEQ ID NO: 994064
ugccacagugggaaacauc

SEQ ID NO: 994066 - RNA, 19 nt, Artificial Sequence
  Description of Artificial Sequence: Synthetic oligonucleotide
  Sense strand starting at position 3275 of SEQ ID NO: 914307
gcucccuaguuauuccaua

SEQ ID NO: 994067 - RNA, 19 nt, Artificial Sequence
  Description of Artificial Sequence: Synthetic oligonucleotide
  Antisense strand to SEQ ID NO: 994066
uauggaauaacuagggagc

SEQ ID NO: 994068 - RNA, 19 nt, Artificial Sequence
  Description of Artificial Sequence: Synthetic oligonucleotide
  Sense strand starting at position 3313 of SEQ ID NO: 914307
aagacuugggucugucaug

SEQ ID NO: 994069 - RNA, 19 nt, Artificial Sequence
  Description of Artificial Sequence: Synthetic oligonucleotide
  Antisense strand to SEQ ID NO: 994068
caugacagacccaagucuu

SEQ ID NO: 994070 - RNA, 19 nt, Artificial Sequence
  Description of Artificial Sequence: Synthetic oligonucleotide
  Sense strand starting at position 3347 of SEQ ID NO: 914307
cagugcaguccucgauaaa

SEQ ID NO: 994071 - RNA, 19 nt, Artificial Sequence
  Description of Artificial Sequence: Synthetic oligonucleotide
  Antisense strand to SEQ ID NO: 994070
uuuaucgaggacugcacug

SEQ ID NO: 994072 - RNA, 19 nt, Artificial Sequence
  Description of Artificial Sequence: Synthetic oligonucleotide
  Sense strand starting at position 3348 of SEQ ID NO: 914307
agugcaguccucgauaaau

SEQ ID NO: 994073 - RNA, 19 nt, Artificial Sequence
  Description of Artificial Sequence: Synthetic oligonucleotide
  Antisense strand to SEQ ID NO: 994072
auuuaucgaggacugcacu

SEQ ID NO: 994074 - RNA, 19 nt, Artificial Sequence
  Description of Artificial Sequence: Synthetic oligonucleotide
  Sense strand starting at position 3350 of SEQ ID NO: 914307
ugcaguccucgauaaaugu

SEQ ID NO: 994075 - RNA, 19 nt, Artificial Sequence
  Description of Artificial Sequence: Synthetic oligonucleotide
  Antisense strand to SEQ ID NO: 994074
acauuuaucgaggacugca

SEQ ID NO: 994076 - RNA, 19 nt, Artificial Sequence
  Description of Artificial Sequence: Synthetic oligonucleotide
  Sense strand starting at position 3359 of SEQ ID NO: 914307
cgauaaauguuugcccagu

SEQ ID NO: 994077 - RNA, 19 nt, Artificial Sequence
  Description of Artificial Sequence: Synthetic oligonucleotide
  Antisense strand to SEQ ID NO: 994076
acugggcaaacauuuaucg

SEQ ID NO: 994078 - RNA, 19 nt, Artificial Sequence
  Description of Artificial Sequence: Synthetic oligonucleotide
  Sense strand starting at position 3389 of SEQ ID NO: 914307
caguuaucuugggugcuga

SEQ ID NO: 994079 - RNA, 19 nt, Artificial Sequence
  Description of Artificial Sequence: Synthetic oligonucleotide
  Antisense strand to SEQ ID NO: 994078
ucagcacccaagauaacug

SEQ ID NO: 994080 - RNA, 19 nt, Artificial Sequence
  Description of Artificial Sequence: Synthetic oligonucleotide
  Sense strand starting at position 3390 of SEQ ID NO: 914307
aguuaucuugggugcugau

SEQ ID NO: 994081 - RNA, 19 nt, Artificial Sequence
  Description of Artificial Sequence: Synthetic oligonucleotide
  Antisense strand to SEQ ID NO: 994080
aucagcacccaagauaacu

SEQ ID NO: 994082 - RNA, 19 nt, Artificial Sequence
  Description of Artificial Sequence: Synthetic oligonucleotide
  Sense strand starting at position 3402 of SEQ ID NO: 914307
ugcugauacuaguucugga

SEQ ID NO: 994083 - RNA, 19 nt, Artificial Sequence
  Description of Artificial Sequence: Synthetic oligonucleotide
  Antisense strand to SEQ ID NO: 994082
uccagaacuaguaucagca

SEQ ID NO: 994084 - RNA, 19 nt, Artificial Sequence
  Description of Artificial Sequence: Synthetic oligonucleotide
  Sense strand starting at position 3499 of SEQ ID NO: 914307
gugugaugguuauuuguaa

SEQ ID NO: 994085 - RNA, 19 nt, Artificial Sequence
  Description of Artificial Sequence: Synthetic oligonucleotide
  Antisense strand to SEQ ID NO: 994084
uuacaaauaaccaucacac

SEQ ID NO: 994086 - RNA, 19 nt, Artificial Sequence
  Description of Artificial Sequence: Synthetic oligonucleotide
  Sense strand starting at position 3546 of SEQ ID NO: 914307
ggaugaggucauggaggua

SEQ ID NO: 994087 - RNA, 19 nt, Artificial Sequence
  Description of Artificial Sequence: Synthetic oligonucleotide
  Antisense strand to SEQ ID NO: 994086
uaccuccaugaccucaucc

SEQ ID NO: 994088 - RNA, 19 nt, Artificial Sequence
  Description of Artificial Sequence: Synthetic oligonucleotide
  Sense strand starting at position 3576 of SEQ ID NO: 914307
ugggaugagugccuuuauu

SEQ ID NO: 994089 - RNA, 19 nt, Artificial Sequence
  Description of Artificial Sequence: Synthetic oligonucleotide
  Antisense strand to SEQ ID NO: 994088
aauaaaggcacucauccca

SEQ ID NO: 994090 - RNA, 19 nt, Artificial Sequence
  Description of Artificial Sequence: Synthetic oligonucleotide
  Sense strand starting at position 94 of SEQ ID NO: 914308
agacgauauuccuaucaga

SEQ ID NO: 994091 - RNA, 19 nt, Artificial Sequence
  Description of Artificial Sequence: Synthetic oligonucleotide
  Antisense strand to SEQ ID NO: 994090
ucugauaggaauaucgucu

SEQ ID NO: 994092 - RNA, 19 nt, Artificial Sequence
  Description of Artificial Sequence: Synthetic oligonucleotide
  Sense strand starting at position 120 of SEQ ID NO: 914308
caagguuucucuccaaggu

SEQ ID NO: 994093 - RNA, 19 nt, Artificial Sequence
  Description of Artificial Sequence: Synthetic oligonucleotide
  Antisense strand to SEQ ID NO: 994092
accuuggagagaaaccuug

SEQ ID NO: 994094 - RNA, 19 nt, Artificial Sequence
  Description of Artificial Sequence: Synthetic oligonucleotide
  Sense strand starting at position 124 of SEQ ID NO: 914308
guuucucuccaagguacaa

SEQ ID NO: 994095 - RNA, 19 nt, Artificial Sequence
  Description of Artificial Sequence: Synthetic oligonucleotide
  Antisense strand to SEQ ID NO: 994094
uuguaccuuggagagaaac

SEQ ID NO: 994096 - RNA, 19 nt, Artificial Sequence
  Description of Artificial Sequence: Synthetic oligonucleotide
  Sense strand starting at position 212 of SEQ ID NO: 914308
uccuuuaauuuggguuuga

SEQ ID NO: 994097 - RNA, 19 nt, Artificial Sequence
  Description of Artificial Sequence: Synthetic oligonucleotide
  Antisense strand to SEQ ID NO: 994096
ucaaacccaaauuaaagga

SEQ ID NO: 994098 - RNA, 19 nt, Artificial Sequence
  Description of Artificial Sequence: Synthetic oligonucleotide
  Sense strand starting at position 223 of SEQ ID NO: 914308
ggguuugaguuuccagaaa

SEQ ID NO: 994099 - RNA, 19 nt, Artificial Sequence
  Description of Artificial Sequence: Synthetic oligonucleotide
  Antisense strand to SEQ ID NO: 994098
uuucuggaaacucaaaccc

SEQ ID NO: 994100 - RNA, 19 nt, Artificial Sequence
  Description of Artificial Sequence: Synthetic oligonucleotide
  Sense strand starting at position 383 of SEQ ID NO: 914308
aggagaacuugucucggau

SEQ ID NO: 994101 - RNA, 19 nt, Artificial Sequence
  Description of Artificial Sequence: Synthetic oligonucleotide
  Antisense strand to SEQ ID NO: 994100
auccgagacaaguucuccu

SEQ ID NO: 994102 - RNA, 19 nt, Artificial Sequence
  Description of Artificial Sequence: Synthetic oligonucleotide
  Sense strand starting at position 385 of SEQ ID NO: 914308
gagaacuugucucggauuu

SEQ ID NO: 994103 - RNA, 19 nt, Artificial Sequence
  Description of Artificial Sequence: Synthetic oligonucleotide
  Antisense strand to SEQ ID NO: 994102
aaauccgagacaaguucuc

SEQ ID NO: 994104 - RNA, 19 nt, Artificial Sequence
  Description of Artificial Sequence: Synthetic oligonucleotide
  Sense strand starting at position 387 of SEQ ID NO: 914308
gaacuugucucggauuuaa

SEQ ID NO: 994105 - RNA, 19 nt, Artificial Sequence
  Description of Artificial Sequence: Synthetic oligonucleotide
  Antisense strand to SEQ ID NO: 994104
uuaaauccgagacaaguuc

SEQ ID NO: 994106 - RNA, 19 nt, Artificial Sequence
  Description of Artificial Sequence: Synthetic oligonucleotide
  Sense strand starting at position 410 of SEQ ID NO: 914308
ggaagugacccugagucca

SEQ ID NO: 994107 - RNA, 19 nt, Artificial Sequence
  Description of Artificial Sequence: Synthetic oligonucleotide
  Antisense strand to SEQ ID NO: 994106
uggacucagggucacuucc

SEQ ID NO: 994108 - RNA, 19 nt, Artificial Sequence
  Description of Artificial Sequence: Synthetic oligonucleotide
  Sense strand starting at position 505 of SEQ ID NO: 914308
ucaauaauucugugccaag

SEQ ID NO: 994109 - RNA, 19 nt, Artificial Sequence
  Description of Artificial Sequence: Synthetic oligonucleotide
  Antisense strand to SEQ ID NO: 994108
cuuggcacagaauuauuga

SEQ ID NO: 994110 - RNA, 19 nt, Artificial Sequence
  Description of Artificial Sequence: Synthetic oligonucleotide
  Sense strand starting at position 523 of SEQ ID NO: 914308
gcaacuugaucagggauuu

SEQ ID NO: 994111 - RNA, 19 nt, Artificial Sequence
  Description of Artificial Sequence: Synthetic oligonucleotide
  Antisense strand to SEQ ID NO: 994110
aaaucccugaucaaguugc

SEQ ID NO: 994112 - RNA, 19 nt, Artificial Sequence
  Description of Artificial Sequence: Synthetic oligonucleotide
  Sense strand starting at position 612 of SEQ ID NO: 914308
uaaauuaagcuucgacagu

SEQ ID NO: 994113 - RNA, 19 nt, Artificial Sequence
  Description of Artificial Sequence: Synthetic oligonucleotide
  Antisense strand to SEQ ID NO: 994112
acugucgaagcuuaauuua

SEQ ID NO: 994114 - RNA, 19 nt, Artificial Sequence
  Description of Artificial Sequence: Synthetic oligonucleotide
  Sense strand starting at position 712 of SEQ ID NO: 914308
aagaucauuuaguaagugu

SEQ ID NO: 994115 - RNA, 19 nt, Artificial Sequence
  Description of Artificial Sequence: Synthetic oligonucleotide
  Antisense strand to SEQ ID NO: 994114
acacuuacuaaaugaucuu

SEQ ID NO: 994116 - RNA, 19 nt, Artificial Sequence
  Description of Artificial Sequence: Synthetic oligonucleotide
  Sense strand starting at position 827 of SEQ ID NO: 914308
caacgcuguggcuaacaau

SEQ ID NO: 994117 - RNA, 19 nt, Artificial Sequence
  Description of Artificial Sequence: Synthetic oligonucleotide
  Antisense strand to SEQ ID NO: 994116
auuguuagccacagcguug

SEQ ID NO: 994118 - RNA, 19 nt, Artificial Sequence
  Description of Artificial Sequence: Synthetic oligonucleotide
  Sense strand starting at position 890 of SEQ ID NO: 914308
cuacacaaguauuaacgaa

SEQ ID NO: 994119 - RNA, 19 nt, Artificial Sequence
  Description of Artificial Sequence: Synthetic oligonucleotide
  Antisense strand to SEQ ID NO: 994118
uucguuaauacuuguguag

SEQ ID NO: 994120 - RNA, 19 nt, Artificial Sequence
  Description of Artificial Sequence: Synthetic oligonucleotide
  Sense strand starting at position 925 of SEQ ID NO: 914308
agucuucuacugugaauuc

SEQ ID NO: 994121 - RNA, 19 nt, Artificial Sequence
  Description of Artificial Sequence: Synthetic oligonucleotide
  Antisense strand to SEQ ID NO: 994120
gaauucacaguagaagacu

SEQ ID NO: 994122 - RNA, 19 nt, Artificial Sequence
  Description of Artificial Sequence: Synthetic oligonucleotide
  Sense strand starting at position 959 of SEQ ID NO: 914308
uagucauagcagugggaag

SEQ ID NO: 994123 - RNA, 19 nt, Artificial Sequence
  Description of Artificial Sequence: Synthetic oligonucleotide
  Antisense strand to SEQ ID NO: 994122
cuucccacugcuaugacua

SEQ ID NO: 994124 - RNA, 19 nt, Artificial Sequence
  Description of Artificial Sequence: Synthetic oligonucleotide
  Sense strand starting at position 960 of SEQ ID NO: 914308
agucauagcagugggaagu

SEQ ID NO: 994125 - RNA, 19 nt, Artificial Sequence
  Description of Artificial Sequence: Synthetic oligonucleotide
  Antisense strand to SEQ ID NO: 994124
acuucccacugcuaugacu

SEQ ID NO: 994126 - RNA, 19 nt, Artificial Sequence
  Description of Artificial Sequence: Synthetic oligonucleotide
  Sense strand starting at position 984 of SEQ ID NO: 914308
gcgagugugaacgaugguu

SEQ ID NO: 994127 - RNA, 19 nt, Artificial Sequence
  Description of Artificial Sequence: Synthetic oligonucleotide
  Antisense strand to SEQ ID NO: 994126
aaccaucguucacacucgc

SEQ ID NO: 994128 - RNA, 19 nt, Artificial Sequence
  Description of Artificial Sequence: Synthetic oligonucleotide
  Sense strand starting at position 989 of SEQ ID NO: 914308
ugugaacgaugguuucuga

SEQ ID NO: 994129 - RNA, 19 nt, Artificial Sequence
  Description of Artificial Sequence: Synthetic oligonucleotide
  Antisense strand to SEQ ID NO: 994128
ucagaaaccaucguucaca

SEQ ID NO: 994130 - RNA, 19 nt, Artificial Sequence
  Description of Artificial Sequence: Synthetic oligonucleotide
  Sense strand starting at position 992 of SEQ ID NO: 914308
gaacgaugguuucugacac

SEQ ID NO: 994131 - RNA, 19 nt, Artificial Sequence
  Description of Artificial Sequence: Synthetic oligonucleotide
  Antisense strand to SEQ ID NO: 994130
gugucagaaaccaucguuc

SEQ ID NO: 994132 - RNA, 19 nt, Artificial Sequence
  Description of Artificial Sequence: Synthetic oligonucleotide
  Sense strand starting at position 1091 of SEQ ID NO: 914308
gcgacauaucagggaucac

SEQ ID NO: 994133 - RNA, 19 nt, Artificial Sequence
  Description of Artificial Sequence: Synthetic oligonucleotide
  Antisense strand to SEQ ID NO: 994132
gugaucccugauaugucgc

SEQ ID NO: 994134 - RNA, 19 nt, Artificial Sequence
  Description of Artificial Sequence: Synthetic oligonucleotide
  Sense strand starting at position 1168 of SEQ ID NO: 914308
guagauaaacguuaacuau

SEQ ID NO: 994135 - RNA, 19 nt, Artificial Sequence
  Description of Artificial Sequence: Synthetic oligonucleotide
  Antisense strand to SEQ ID NO: 994134
auaguuaacguuuaucuac

SEQ ID NO: 994136 - RNA, 19 nt, Artificial Sequence
  Description of Artificial Sequence: Synthetic oligonucleotide
  Sense strand starting at position 1254 of SEQ ID NO: 914308
gguguuaagccguuccauc

SEQ ID NO: 994137 - RNA, 19 nt, Artificial Sequence
  Description of Artificial Sequence: Synthetic oligonucleotide
  Antisense strand to SEQ ID NO: 994136
gauggaacggcuuaacacc

SEQ ID NO: 994138 - RNA, 19 nt, Artificial Sequence
  Description of Artificial Sequence: Synthetic oligonucleotide
  Sense strand starting at position 1255 of SEQ ID NO: 914308
guguuaagccguuccauca

SEQ ID NO: 994139 - RNA, 19 nt, Artificial Sequence
  Description of Artificial Sequence: Synthetic oligonucleotide
  Antisense strand to SEQ ID NO: 994138
ugauggaacggcuuaacac

SEQ ID NO: 994140 - RNA, 19 nt, Artificial Sequence
  Description of Artificial Sequence: Synthetic oligonucleotide
  Sense strand starting at position 1304 of SEQ ID NO: 914308
cguggaaauacuugaacau

SEQ ID NO: 994141 - RNA, 19 nt, Artificial Sequence
  Description of Artificial Sequence: Synthetic oligonucleotide
  Antisense strand to SEQ ID NO: 994140
auguucaaguauuuccacg

SEQ ID NO: 994142 - RNA, 19 nt, Artificial Sequence
  Description of Artificial Sequence: Synthetic oligonucleotide
  Sense strand starting at position 1314 of SEQ ID NO: 914308
cuugaacauucuguagaag

SEQ ID NO: 994143 - RNA, 19 nt, Artificial Sequence
  Description of Artificial Sequence: Synthetic oligonucleotide
  Antisense strand to SEQ ID NO: 994142
cuucuacagaauguucaag

SEQ ID NO: 994144 - RNA, 19 nt, Artificial Sequence
  Description of Artificial Sequence: Synthetic oligonucleotide
  Sense strand starting at position 1408 of SEQ ID NO: 914308
cucugaaauuagcuaagua

SEQ ID NO: 994145 - RNA, 19 nt, Artificial Sequence
  Description of Artificial Sequence: Synthetic oligonucleotide
  Antisense strand to SEQ ID NO: 994144
uacuuagcuaauuucagag

SEQ ID NO: 994146 - RNA, 19 nt, Artificial Sequence
  Description of Artificial Sequence: Synthetic oligonucleotide
  Sense strand starting at position 1412 of SEQ ID NO: 914308
gaaauuagcuaaguaugca

SEQ ID NO: 994147 - RNA, 19 nt, Artificial Sequence
  Description of Artificial Sequence: Synthetic oligonucleotide
  Antisense strand to SEQ ID NO: 994146
ugcauacuuagcuaauuuc

SEQ ID NO: 994148 - RNA, 19 nt, Artificial Sequence
  Description of Artificial Sequence: Synthetic oligonucleotide
  Sense strand starting at position 1416 of SEQ ID NO: 914308
uuagcuaaguaugcagaaa

SEQ ID NO: 994149 - RNA, 19 nt, Artificial Sequence
  Description of Artificial Sequence: Synthetic oligonucleotide
  Antisense strand to SEQ ID NO: 994148
uuucugcauacuuagcuaa

SEQ ID NO: 994150 - RNA, 19 nt, Artificial Sequence
  Description of Artificial Sequence: Synthetic oligonucleotide
  Sense strand starting at position 1719 of SEQ ID NO: 914308
auggaauucugacacccga

SEQ ID NO: 994151 - RNA, 19 nt, Artificial Sequence
  Description of Artificial Sequence: Synthetic oligonucleotide
  Antisense strand to SEQ ID NO: 994150
ucgggugucagaauuccau

SEQ ID NO: 994152 - RNA, 19 nt, Artificial Sequence
  Description of Artificial Sequence: Synthetic oligonucleotide
  Sense strand starting at position 3525 of SEQ ID NO: 914308
gcggcauugccacuucagu

SEQ ID NO: 994153 - RNA, 19 nt, Artificial Sequence
  Description of Artificial Sequence: Synthetic oligonucleotide
  Antisense strand to SEQ ID NO: 994152
acugaaguggcaaugccgc

SEQ ID NO: 994154 - RNA, 19 nt, Artificial Sequence
  Description of Artificial Sequence: Synthetic oligonucleotide
  Sense strand starting at position 3626 of SEQ ID NO: 914308
gucgccugugaguuaggua

SEQ ID NO: 994155 - RNA, 19 nt, Artificial Sequence
  Description of Artificial Sequence: Synthetic oligonucleotide
  Antisense strand to SEQ ID NO: 994154
uaccuaacucacaggcgac

SEQ ID NO: 994156 - RNA, 19 nt, Artificial Sequence
  Description of Artificial Sequence: Synthetic oligonucleotide
  Sense strand starting at position 3734 of SEQ ID NO: 914308
agagacuguccgcggagua

SEQ ID NO: 994157 - RNA, 19 nt, Artificial Sequence
  Description of Artificial Sequence: Synthetic oligonucleotide
  Antisense strand to SEQ ID NO: 994156
uacuccgcggacagucucu

SEQ ID NO: 994158 - RNA, 19 nt, Artificial Sequence
  Description of Artificial Sequence: Synthetic oligonucleotide
  Sense strand starting at position 3736 of SEQ ID NO: 914308
agacuguccgcggaguaga

SEQ ID NO: 994159 - RNA, 19 nt, Artificial Sequence
  Description of Artificial Sequence: Synthetic oligonucleotide
  Antisense strand to SEQ ID NO: 994158
ucuacuccgcggacagucu

SEQ ID NO: 994160 - RNA, 19 nt, Artificial Sequence
  Description of Artificial Sequence: Synthetic oligonucleotide
  Sense strand starting at position 3763 of SEQ ID NO: 914308
ccuguaagaacucgggauu

SEQ ID NO: 994161 - RNA, 19 nt, Artificial Sequence
  Description of Artificial Sequence: Synthetic oligonucleotide
  Antisense strand to SEQ ID NO: 994160
aaucccgaguucuuacagg

SEQ ID NO: 994162 - RNA, 19 nt, Artificial Sequence
  Description of Artificial Sequence: Synthetic oligonucleotide
  Sense strand starting at position 3843 of SEQ ID NO: 914308
cugcccgauuccuccaaga

SEQ ID NO: 994163 - RNA, 19 nt, Artificial Sequence
  Description of Artificial Sequence: Synthetic oligonucleotide
  Antisense strand to SEQ ID NO: 994162
ucuuggaggaaucgggcag

SEQ ID NO: 994164 - RNA, 19 nt, Artificial Sequence
  Description of Artificial Sequence: Synthetic oligonucleotide
  Sense strand starting at position 3922 of SEQ ID NO: 914308
ccaacaucugccuguugga

SEQ ID NO: 994165 - RNA, 19 nt, Artificial Sequence
  Description of Artificial Sequence: Synthetic oligonucleotide
  Antisense strand to SEQ ID NO: 994164
uccaacaggcagauguugg

SEQ ID NO: 994166 - RNA, 19 nt, Artificial Sequence
  Description of Artificial Sequence: Synthetic oligonucleotide
  Sense strand starting at position 3960 of SEQ ID NO: 914308
ggcucagucggcugaaaua

SEQ ID NO: 994167 - RNA, 19 nt, Artificial Sequence
  Description of Artificial Sequence: Synthetic oligonucleotide
  Antisense strand to SEQ ID NO: 994166
uauuucagccgacugagcc

SEQ ID NO: 994168 - RNA, 19 nt, Artificial Sequence
  Description of Artificial Sequence: Synthetic oligonucleotide
  Sense strand starting at position 3970 of SEQ ID NO: 914308
gcugaaauaucgcuucuga

SEQ ID NO: 994169 - RNA, 19 nt, Artificial Sequence
  Description of Artificial Sequence: Synthetic oligonucleotide
  Antisense strand to SEQ ID NO: 994168
ucagaagcgauauuucagc

SEQ ID NO: 994170 - RNA, 19 nt, Artificial Sequence
  Description of Artificial Sequence: Synthetic oligonucleotide
  Sense strand starting at position 14 of SEQ ID NO: 914309
ggcacggaguuguugagau

SEQ ID NO: 994171 - RNA, 19 nt, Artificial Sequence
  Description of Artificial Sequence: Synthetic oligonucleotide
  Antisense strand to SEQ ID NO: 994170
aucucaacaacuccgugcc

SEQ ID NO: 994172 - RNA, 19 nt, Artificial Sequence
  Description of Artificial Sequence: Synthetic oligonucleotide
  Sense strand starting at position 767 of SEQ ID NO: 914309
cccaguugucaaggagcuu

SEQ ID NO: 994173 - RNA, 19 nt, Artificial Sequence
  Description of Artificial Sequence: Synthetic oligonucleotide
  Antisense strand to SEQ ID NO: 994172
aagcuccuugacaacuggg

SEQ ID NO: 994174 - RNA, 19 nt, Artificial Sequence
  Description of Artificial Sequence: Synthetic oligonucleotide
  Sense strand starting at position 768 of SEQ ID NO: 914309
ccaguugucaaggagcuuu

SEQ ID NO: 994175 - RNA, 19 nt, Artificial Sequence
  Description of Artificial Sequence: Synthetic oligonucleotide
  Antisense strand to SEQ ID NO: 994174
aaagcuccuugacaacugg

SEQ ID NO: 994176 - RNA, 19 nt, Artificial Sequence
  Description of Artificial Sequence: Synthetic oligonucleotide
  Sense strand starting at position 877 of SEQ ID NO: 914309
ggugcaguggccuagcauu

SEQ ID NO: 994177 - RNA, 19 nt, Artificial Sequence
  Description of Artificial Sequence: Synthetic oligonucleotide
  Antisense strand to SEQ ID NO: 994176
aaugcuaggccacugcacc

SEQ ID NO: 994178 - RNA, 19 nt, Artificial Sequence
  Description of Artificial Sequence: Synthetic oligonucleotide
  Sense strand starting at position 993 of SEQ ID NO: 914309
ugggacuagugcccaguua

SEQ ID NO: 994179 - RNA, 19 nt, Artificial Sequence
  Description of Artificial Sequence: Synthetic oligonucleotide
  Antisense strand to SEQ ID NO: 994178
uaacugggcacuaguccca

SEQ ID NO: 994180 - RNA, 19 nt, Artificial Sequence
  Description of Artificial Sequence: Synthetic oligonucleotide
  Sense strand starting at position 1006 of SEQ ID NO: 914309
caguuacguuggucuccaa

SEQ ID NO: 994181 - RNA, 19 nt, Artificial Sequence
  Description of Artificial Sequence: Synthetic oligonucleotide
  Antisense strand to SEQ ID NO: 994180
uuggagaccaacguaacug

SEQ ID NO: 994182 - RNA, 19 nt, Artificial Sequence
  Description of Artificial Sequence: Synthetic oligonucleotide
  Sense strand starting at position 1009 of SEQ ID NO: 914309
uuacguuggucuccaaagu

SEQ ID NO: 994183 - RNA, 19 nt, Artificial Sequence
  Description of Artificial Sequence: Synthetic oligonucleotide
  Antisense strand to SEQ ID NO: 994182
acuuuggagaccaacguaa

SEQ ID NO: 994184 - RNA, 19 nt, Artificial Sequence
  Description of Artificial Sequence: Synthetic oligonucleotide
  Sense strand starting at position 1061 of SEQ ID NO: 914309
gcgcauucuccucuccgaa

SEQ ID NO: 994185 - RNA, 19 nt, Artificial Sequence
  Description of Artificial Sequence: Synthetic oligonucleotide
  Antisense strand to SEQ ID NO: 994184
uucggagaggagaaugcgc

SEQ ID NO: 994186 - RNA, 19 nt, Artificial Sequence
  Description of Artificial Sequence: Synthetic oligonucleotide
  Sense strand starting at position 1063 of SEQ ID NO: 914309
gcauucuccucuccgaaga

SEQ ID NO: 994187 - RNA, 19 nt, Artificial Sequence
  Description of Artificial Sequence: Synthetic oligonucleotide
  Antisense strand to SEQ ID NO: 994186
ucuucggagaggagaaugc

SEQ ID NO: 994188 - RNA, 19 nt, Artificial Sequence
  Description of Artificial Sequence: Synthetic oligonucleotide
  Sense strand starting at position 1156 of SEQ ID NO: 914309
caauguggcucugugauca

SEQ ID NO: 994189 - RNA, 19 nt, Artificial Sequence
  Description of Artificial Sequence: Synthetic oligonucleotide
  Antisense strand to SEQ ID NO: 994188
ugaucacagagccacauug

SEQ ID NO: 994190 - RNA, 19 nt, Artificial Sequence
  Description of Artificial Sequence: Synthetic oligonucleotide
  Sense strand starting at position 1270 of SEQ ID NO: 914309
gggcccagcucaucagaua

SEQ ID NO: 994191 - RNA, 19 nt, Artificial Sequence
  Description of Artificial Sequence: Synthetic oligonucleotide
  Antisense strand to SEQ ID NO: 994190
uaucugaugagcugggccc

SEQ ID NO: 994192 - RNA, 19 nt, Artificial Sequence
  Description of Artificial Sequence: Synthetic oligonucleotide
  Sense strand starting at position 1271 of SEQ ID NO: 914309
ggcccagcucaucagauau

SEQ ID NO: 994193 - RNA, 19 nt, Artificial Sequence
  Description of Artificial Sequence: Synthetic oligonucleotide
  Antisense strand to SEQ ID NO: 994192
auaucugaugagcugggcc

SEQ ID NO: 994194 - RNA, 19 nt, Artificial Sequence
  Description of Artificial Sequence: Synthetic oligonucleotide
  Sense strand starting at position 2023 of SEQ ID NO: 914309
cuauuuaugucugcagcca

SEQ ID NO: 994195 - RNA, 19 nt, Artificial Sequence
  Description of Artificial Sequence: Synthetic oligonucleotide
  Antisense strand to SEQ ID NO: 994194
uggcugcagacauaaauag

SEQ ID NO: 994196 - RNA, 19 nt, Artificial Sequence
  Description of Artificial Sequence: Synthetic oligonucleotide
  Sense strand starting at position 2312 of SEQ ID NO: 914309
ugccauuguccauuguguu

SEQ ID NO: 994197 - RNA, 19 nt, Artificial Sequence
  Description of Artificial Sequence: Synthetic oligonucleotide
  Antisense strand to SEQ ID NO: 994196
aacacaauggacaauggca

SEQ ID NO: 994198 - RNA, 19 nt, Artificial Sequence
  Description of Artificial Sequence: Synthetic oligonucleotide
  Sense strand starting at position 2394 of SEQ ID NO: 914309
ccagcauuccagggagacu

SEQ ID NO: 994199 - RNA, 19 nt, Artificial Sequence
  Description of Artificial Sequence: Synthetic oligonucleotide
  Antisense strand to SEQ ID NO: 994198
agucucccuggaaugcugg

SEQ ID NO: 994200 - RNA, 19 nt, Artificial Sequence
  Description of Artificial Sequence: Synthetic oligonucleotide
  Sense strand starting at position 2634 of SEQ ID NO: 914309
aagauauuguccgccucca

SEQ ID NO: 994201 - RNA, 19 nt, Artificial Sequence
  Description of Artificial Sequence: Synthetic oligonucleotide
  Antisense strand to SEQ ID NO: 994200
uggaggcggacaauaucuu

SEQ ID NO: 994202 - RNA, 19 nt, Artificial Sequence
  Description of Artificial Sequence: Synthetic oligonucleotide
  Sense strand starting at position 2711 of SEQ ID NO: 914309
agggcauaaucucagaauu

SEQ ID NO: 994203 - RNA, 19 nt, Artificial Sequence
  Description of Artificial Sequence: Synthetic oligonucleotide
  Antisense strand to SEQ ID NO: 994202
aauucugagauuaugcccu

SEQ ID NO: 994204 - RNA, 19 nt, Artificial Sequence
  Description of Artificial Sequence: Synthetic oligonucleotide
  Sense strand starting at position 2713 of SEQ ID NO: 914309
ggcauaaucucagaauuac

SEQ ID NO: 994205 - RNA, 19 nt, Artificial Sequence
  Description of Artificial Sequence: Synthetic oligonucleotide
  Antisense strand to SEQ ID NO: 994204
guaauucugagauuaugcc

SEQ ID NO: 994206 - RNA, 19 nt, Artificial Sequence
  Description of Artificial Sequence: Synthetic oligonucleotide
  Sense strand starting at position 2846 of SEQ ID NO: 914309
ggagaagaccucugggcaa

SEQ ID NO: 994207 - RNA, 19 nt, Artificial Sequence
  Description of Artificial Sequence: Synthetic oligonucleotide
  Antisense strand to SEQ ID NO: 994206
uugcccagaggucuucucc

SEQ ID NO: 994208 - RNA, 19 nt, Artificial Sequence
  Description of Artificial Sequence: Synthetic oligonucleotide
  Sense strand starting at position 2904 of SEQ ID NO: 914309
cuccaucuugcuggaggaa

SEQ ID NO: 994209 - RNA, 19 nt, Artificial Sequence
  Description of Artificial Sequence: Synthetic oligonucleotide
  Antisense strand to SEQ ID NO: 994208
uuccuccagcaagauggag

SEQ ID NO: 994210 - RNA, 19 nt, Artificial Sequence
  Description of Artificial Sequence: Synthetic oligonucleotide
  Sense strand starting at position 2907 of SEQ ID NO: 914309
caucuugcuggaggaagau

SEQ ID NO: 994211 - RNA, 19 nt, Artificial Sequence
  Description of Artificial Sequence: Synthetic oligonucleotide
  Antisense strand to SEQ ID NO: 994210
aucuuccuccagcaagaug

SEQ ID NO: 994212 - RNA, 19 nt, Artificial Sequence
  Description of Artificial Sequence: Synthetic oligonucleotide
  Sense strand starting at position 2919 of SEQ ID NO: 914309
ggaagaucgugggcaaguu

SEQ ID NO: 994213 - RNA, 19 nt, Artificial Sequence
  Description of Artificial Sequence: Synthetic oligonucleotide
  Antisense strand to SEQ ID NO: 994212
aacuugcccacgaucuucc

SEQ ID NO: 994214 - RNA, 19 nt, Artificial Sequence
  Description of Artificial Sequence: Synthetic oligonucleotide
  Sense strand starting at position 2920 of SEQ ID NO: 914309
gaagaucgugggcaaguua

SEQ ID NO: 994215 - RNA, 19 nt, Artificial Sequence
  Description of Artificial Sequence: Synthetic oligonucleotide
  Antisense strand to SEQ ID NO: 994214
uaacuugcccacgaucuuc

SEQ ID NO: 994216 - RNA, 19 nt, Artificial Sequence
  Description of Artificial Sequence: Synthetic oligonucleotide
  Sense strand starting at position 2982 of SEQ ID NO: 914309
aagaauggucaggguuguu

SEQ ID NO: 994217 - RNA, 19 nt, Artificial Sequence
  Description of Artificial Sequence: Synthetic oligonucleotide
  Antisense strand to SEQ ID NO: 994216
aacaacccugaccauucuu

SEQ ID NO: 994218 - RNA, 19 nt, Artificial Sequence
  Description of Artificial Sequence: Synthetic oligonucleotide
  Sense strand starting at position 3010 of SEQ ID NO: 914309
ugagacagccugugaaugu

SEQ ID NO: 994219 - RNA, 19 nt, Artificial Sequence
  Description of Artificial Sequence: Synthetic oligonucleotide
  Antisense strand to SEQ ID NO: 994218
acauucacaggcugucuca

SEQ ID NO: 994220 - RNA, 19 nt, Artificial Sequence
  Description of Artificial Sequence: Synthetic oligonucleotide
  Sense strand starting at position 3151 of SEQ ID NO: 914309
gaggaacugugacaucacu

SEQ ID NO: 994221 - RNA, 19 nt, Artificial Sequence
  Description of Artificial Sequence: Synthetic oligonucleotide
  Antisense strand to SEQ ID NO: 994220
agugaugucacaguuccuc

SEQ ID NO: 994222 - RNA, 19 nt, Artificial Sequence
  Description of Artificial Sequence: Synthetic oligonucleotide
  Sense strand starting at position 3242 of SEQ ID NO: 914309
gucaucucucagggaguua

SEQ ID NO: 994223 - RNA, 19 nt, Artificial Sequence
  Description of Artificial Sequence: Synthetic oligonucleotide
  Antisense strand to SEQ ID NO: 994222
uaacucccugagagaugac

SEQ ID NO: 994224 - RNA, 19 nt, Artificial Sequence
  Description of Artificial Sequence: Synthetic oligonucleotide
  Sense strand starting at position 3308 of SEQ ID NO: 914309
gcagaaauguacccuguac

SEQ ID NO: 994225 - RNA, 19 nt, Artificial Sequence
  Description of Artificial Sequence: Synthetic oligonucleotide
  Antisense strand to SEQ ID NO: 994224
guacaggguacauuucugc

SEQ ID NO: 994226 - RNA, 19 nt, Artificial Sequence
  Description of Artificial Sequence: Synthetic oligonucleotide
  Sense strand starting at position 3310 of SEQ ID NO: 914309
agaaauguacccuguacca

SEQ ID NO: 994227 - RNA, 19 nt, Artificial Sequence
  Description of Artificial Sequence: Synthetic oligonucleotide
  Antisense strand to SEQ ID NO: 994226
ugguacaggguacauuucu

SEQ ID NO: 994228 - RNA, 19 nt, Artificial Sequence
  Description of Artificial Sequence: Synthetic oligonucleotide
  Sense strand starting at position 3362 of SEQ ID NO: 914309
ggcugacaucucuguuuac

SEQ ID NO: 994229 - RNA, 19 nt, Artificial Sequence
  Description of Artificial Sequence: Synthetic oligonucleotide
  Antisense strand to SEQ ID NO: 994228
guaaacagagaugucagcc

SEQ ID NO: 994230 - RNA, 19 nt, Artificial Sequence
  Description of Artificial Sequence: Synthetic oligonucleotide
  Sense strand starting at position 3518 of SEQ ID NO: 914309
acaucaguuucugauugaa

SEQ ID NO: 994231 - RNA, 19 nt, Artificial Sequence
  Description of Artificial Sequence: Synthetic oligonucleotide
  Antisense strand to SEQ ID NO: 994230
uucaaucagaaacugaugu

SEQ ID NO: 994232 - RNA, 19 nt, Artificial Sequence
  Description of Artificial Sequence: Synthetic oligonucleotide
  Sense strand starting at position 3530 of SEQ ID NO: 914309
gauugaagauaaugauaga

SEQ ID NO: 994233 - RNA, 19 nt, Artificial Sequence
  Description of Artificial Sequence: Synthetic oligonucleotide
  Antisense strand to SEQ ID NO: 994232
ucuaucauuaucuucaauc

SEQ ID NO: 994234 - RNA, 19 nt, Artificial Sequence
  Description of Artificial Sequence: Synthetic oligonucleotide
  Sense strand starting at position 3551 of SEQ ID NO: 914309
augccaucgcccugaguua

SEQ ID NO: 994235 - RNA, 19 nt, Artificial Sequence
  Description of Artificial Sequence: Synthetic oligonucleotide
  Antisense strand to SEQ ID NO: 994234
uaacucagggcgauggcau

SEQ ID NO: 994236 - RNA, 19 nt, Artificial Sequence
  Description of Artificial Sequence: Synthetic oligonucleotide
  Sense strand starting at position 3552 of SEQ ID NO: 914309
ugccaucgcccugaguuau

SEQ ID NO: 994237 - RNA, 19 nt, Artificial Sequence
  Description of Artificial Sequence: Synthetic oligonucleotide
  Antisense strand to SEQ ID NO: 994236
auaacucagggcgauggca

SEQ ID NO: 994238 - RNA, 19 nt, Artificial Sequence
  Description of Artificial Sequence: Synthetic oligonucleotide
  Sense strand starting at position 3582 of SEQ ID NO: 914309
cuguguggcaagcagaaua

SEQ ID NO: 994239 - RNA, 19 nt, Artificial Sequence
  Description of Artificial Sequence: Synthetic oligonucleotide
  Antisense strand to SEQ ID NO: 994238
uauucugcuugccacacag

SEQ ID NO: 994240 - RNA, 19 nt, Artificial Sequence
  Description of Artificial Sequence: Synthetic oligonucleotide
  Sense strand starting at position 3675 of SEQ ID NO: 914309
uugcuagugugauuaagga

SEQ ID NO: 994241 - RNA, 19 nt, Artificial Sequence
  Description of Artificial Sequence: Synthetic oligonucleotide
  Antisense strand to SEQ ID NO: 994240
uccuuaaucacacuagcaa

SEQ ID NO: 994242 - RNA, 19 nt, Artificial Sequence
  Description of Artificial Sequence: Synthetic oligonucleotide
  Sense strand starting at position 3750 of SEQ ID NO: 914309
gguccuuaauuauacaaga

SEQ ID NO: 994243 - RNA, 19 nt, Artificial Sequence
  Description of Artificial Sequence: Synthetic oligonucleotide
  Antisense strand to SEQ ID NO: 994242
ucuuguauaauuaaggacc

SEQ ID NO: 994244 - RNA, 19 nt, Artificial Sequence
  Description of Artificial Sequence: Synthetic oligonucleotide
  Sense strand starting at position 3817 of SEQ ID NO: 914309
ggagaucagacucgugacu

SEQ ID NO: 994245 - RNA, 19 nt, Artificial Sequence
  Description of Artificial Sequence: Synthetic oligonucleotide
  Antisense strand to SEQ ID NO: 994244
agucacgagucugaucucc

SEQ ID NO: 994246 - RNA, 19 nt, Artificial Sequence
  Description of Artificial Sequence: Synthetic oligonucleotide
  Sense strand starting at position 3972 of SEQ ID NO: 914309
ggacuucuguccuccauaa

SEQ ID NO: 994247 - RNA, 19 nt, Artificial Sequence
  Description of Artificial Sequence: Synthetic oligonucleotide
  Antisense strand to SEQ ID NO: 994246
uuauggaggacagaagucc

SEQ ID NO: 994248 - RNA, 19 nt, Artificial Sequence
  Description of Artificial Sequence: Synthetic oligonucleotide
  Sense strand starting at position 3976 of SEQ ID NO: 914309
uucuguccuccauaacugu

SEQ ID NO: 994249 - RNA, 19 nt, Artificial Sequence
  Description of Artificial Sequence: Synthetic oligonucleotide
  Antisense strand to SEQ ID NO: 994248
acaguuauggaggacagaa

SEQ ID NO: 994250 - RNA, 19 nt, Artificial Sequence
  Description of Artificial Sequence: Synthetic oligonucleotide
  Sense strand starting at position 123 of SEQ ID NO: 914310
ggucaaucuugacuuugaa

SEQ ID NO: 994251 - RNA, 19 nt, Artificial Sequence
  Description of Artificial Sequence: Synthetic oligonucleotide
  Antisense strand to SEQ ID NO: 994250
uucaaagucaagauugacc

SEQ ID NO: 994252 - RNA, 19 nt, Artificial Sequence
  Description of Artificial Sequence: Synthetic oligonucleotide
  Sense strand starting at position 564 of SEQ ID NO: 914310
caaguuuguccuggaagag

SEQ ID NO: 994253 - RNA, 19 nt, Artificial Sequence
  Description of Artificial Sequence: Synthetic oligonucleotide
  Antisense strand to SEQ ID NO: 994252
cucuuccaggacaaacuug

SEQ ID NO: 994254 - RNA, 19 nt, Artificial Sequence
  Description of Artificial Sequence: Synthetic oligonucleotide
  Sense strand starting at position 738 of SEQ ID NO: 914310
ggagaggaugggugucaca

SEQ ID NO: 994255 - RNA, 19 nt, Artificial Sequence
  Description of Artificial Sequence: Synthetic oligonucleotide
  Antisense strand to SEQ ID NO: 994254
ugugacacccauccucucc

SEQ ID NO: 994256 - RNA, 19 nt, Artificial Sequence
  Description of Artificial Sequence: Synthetic oligonucleotide
  Sense strand starting at position 748 of SEQ ID NO: 914310
ggugucacagacuaaguua

SEQ ID NO: 994257 - RNA, 19 nt, Artificial Sequence
  Description of Artificial Sequence: Synthetic oligonucleotide
  Antisense strand to SEQ ID NO: 994256
uaacuuagucugugacacc

SEQ ID NO: 994258 - RNA, 19 nt, Artificial Sequence
  Description of Artificial Sequence: Synthetic oligonucleotide
  Sense strand starting at position 795 of SEQ ID NO: 914310
ccacauaguuugucucaga

SEQ ID NO: 994259 - RNA, 19 nt, Artificial Sequence
  Description of Artificial Sequence: Synthetic oligonucleotide
  Antisense strand to SEQ ID NO: 994258
ucugagacaaacuaugugg

SEQ ID NO: 994260 - RNA, 19 nt, Artificial Sequence
  Description of Artificial Sequence: Synthetic oligonucleotide
  Sense strand starting at position 894 of SEQ ID NO: 914310
gggaguguucugggccaua

SEQ ID NO: 994261 - RNA, 19 nt, Artificial Sequence
  Description of Artificial Sequence: Synthetic oligonucleotide
  Antisense strand to SEQ ID NO: 994260
uauggcccagaacacuccc

SEQ ID NO: 994262 - RNA, 19 nt, Artificial Sequence
  Description of Artificial Sequence: Synthetic oligonucleotide
  Sense strand starting at position 897 of SEQ ID NO: 914310
aguguucugggccauagga

SEQ ID NO: 994263 - RNA, 19 nt, Artificial Sequence
  Description of Artificial Sequence: Synthetic oligonucleotide
  Antisense strand to SEQ ID NO: 994262
uccuauggcccagaacacu

SEQ ID NO: 994264 - RNA, 19 nt, Artificial Sequence
  Description of Artificial Sequence: Synthetic oligonucleotide
  Sense strand starting at position 910 of SEQ ID NO: 914310
auaggaucacauuguguaa

SEQ ID NO: 994265 - RNA, 19 nt, Artificial Sequence
  Description of Artificial Sequence: Synthetic oligonucleotide
  Antisense strand to SEQ ID NO: 994264
uuacacaaugugauccuau

SEQ ID NO: 994266 - RNA, 19 nt, Artificial Sequence
  Description of Artificial Sequence: Synthetic oligonucleotide
  Sense strand starting at position 957 of SEQ ID NO: 914310
gggucuuccaguggcacaa

SEQ ID NO: 994267 - RNA, 19 nt, Artificial Sequence
  Description of Artificial Sequence: Synthetic oligonucleotide
  Antisense strand to SEQ ID NO: 994266
uugugccacuggaagaccc

SEQ ID NO: 994268 - RNA, 19 nt, Artificial Sequence
  Description of Artificial Sequence: Synthetic oligonucleotide
  Sense strand starting at position 1046 of SEQ ID NO: 914310
gggccugucuuucugaaac

SEQ ID NO: 994269 - RNA, 19 nt, Artificial Sequence
  Description of Artificial Sequence: Synthetic oligonucleotide
  Antisense strand to SEQ ID NO: 994268
guuucagaaagacaggccc

SEQ ID NO: 994270 - RNA, 19 nt, Artificial Sequence
  Description of Artificial Sequence: Synthetic oligonucleotide
  Sense strand starting at position 1069 of SEQ ID NO: 914310
uagaaaucagcucacguga

SEQ ID NO: 994271 - RNA, 19 nt, Artificial Sequence
  Description of Artificial Sequence: Synthetic oligonucleotide
  Antisense strand to SEQ ID NO: 994270
ucacgugagcugauuucua

SEQ ID NO: 994272 - RNA, 19 nt, Artificial Sequence
  Description of Artificial Sequence: Synthetic oligonucleotide
  Sense strand starting at position 1107 of SEQ ID NO: 914310
cuuccaugagccugaauga

SEQ ID NO: 994273 - RNA, 19 nt, Artificial Sequence
  Description of Artificial Sequence: Synthetic oligonucleotide
  Antisense strand to SEQ ID NO: 994272
ucauucaggcucauggaag

SEQ ID NO: 994274 - RNA, 19 nt, Artificial Sequence
  Description of Artificial Sequence: Synthetic oligonucleotide
  Sense strand starting at position 1108 of SEQ ID NO: 914310
uuccaugagccugaaugau

SEQ ID NO: 994275 - RNA, 19 nt, Artificial Sequence
  Description of Artificial Sequence: Synthetic oligonucleotide
  Antisense strand to SEQ ID NO: 994274
aucauucaggcucauggaa

SEQ ID NO: 994276 - RNA, 19 nt, Artificial Sequence
  Description of Artificial Sequence: Synthetic oligonucleotide
  Sense strand starting at position 1131 of SEQ ID NO: 914310
uguggccauuugucaaacu

SEQ ID NO: 994277 - RNA, 19 nt, Artificial Sequence
  Description of Artificial Sequence: Synthetic oligonucleotide
  Antisense strand to SEQ ID NO: 994276
aguuugacaaauggccaca

SEQ ID NO: 994278 - RNA, 19 nt, Artificial Sequence
  Description of Artificial Sequence: Synthetic oligonucleotide
  Sense strand starting at position 1168 of SEQ ID NO: 914310
aggacauggcagggauuau

SEQ ID NO: 994279 - RNA, 19 nt, Artificial Sequence
  Description of Artificial Sequence: Synthetic oligonucleotide
  Antisense strand to SEQ ID NO: 994278
auaaucccugccauguccu

SEQ ID NO: 994280 - RNA, 19 nt, Artificial Sequence
  Description of Artificial Sequence: Synthetic oligonucleotide
  Sense strand starting at position 1178 of SEQ ID NO: 914310
agggauuauucgguccaaa

SEQ ID NO: 994281 - RNA, 19 nt, Artificial Sequence
  Description of Artificial Sequence: Synthetic oligonucleotide
  Antisense strand to SEQ ID NO: 994280
uuuggaccgaauaaucccu

SEQ ID NO: 994282 - RNA, 19 nt, Artificial Sequence
  Description of Artificial Sequence: Synthetic oligonucleotide
  Sense strand starting at position 1181 of SEQ ID NO: 914310
gauuauucgguccaaacuu

SEQ ID NO: 994283 - RNA, 19 nt, Artificial Sequence
  Description of Artificial Sequence: Synthetic oligonucleotide
  Antisense strand to SEQ ID NO: 994282
aaguuuggaccgaauaauc

SEQ ID NO: 994284 - RNA, 19 nt, Artificial Sequence
  Description of Artificial Sequence: Synthetic oligonucleotide
  Sense strand starting at position 1200 of SEQ ID NO: 914310
ccgguuuacauauguggau

SEQ ID NO: 994285 - RNA, 19 nt, Artificial Sequence
  Description of Artificial Sequence: Synthetic oligonucleotide
  Antisense strand to SEQ ID NO: 994284
auccacauauguaaaccgg

SEQ ID NO: 994286 - RNA, 19 nt, Artificial Sequence
  Description of Artificial Sequence: Synthetic oligonucleotide
  Sense strand starting at position 1212 of SEQ ID NO: 914310
uguggauccuagguucaga

SEQ ID NO: 994287 - RNA, 19 nt, Artificial Sequence
  Description of Artificial Sequence: Synthetic oligonucleotide
  Antisense strand to SEQ ID NO: 994286
ucugaaccuaggauccaca

SEQ ID NO: 994288 - RNA, 19 nt, Artificial Sequence
  Description of Artificial Sequence: Synthetic oligonucleotide
  Sense strand starting at position 1310 of SEQ ID NO: 914310
uugcauggccuuuaagaau

SEQ ID NO: 994289 - RNA, 19 nt, Artificial Sequence
  Description of Artificial Sequence: Synthetic oligonucleotide
  Antisense strand to SEQ ID NO: 994288
auucuuaaaggccaugcaa

SEQ ID NO: 994290 - RNA, 19 nt, Artificial Sequence
  Description of Artificial Sequence: Synthetic oligonucleotide
  Sense strand starting at position 1494 of SEQ ID NO: 914310
ggugguaacagagagcaau

SEQ ID NO: 994291 - RNA, 19 nt, Artificial Sequence
  Description of Artificial Sequence: Synthetic oligonucleotide
  Antisense strand to SEQ ID NO: 994290
auugcucucuguuaccacc

SEQ ID NO: 994292 - RNA, 19 nt, Artificial Sequence
  Description of Artificial Sequence: Synthetic oligonucleotide
  Sense strand starting at position 1628 of SEQ ID NO: 914310
gccacagggauaugugaaa

SEQ ID NO: 994293 - RNA, 19 nt, Artificial Sequence
  Description of Artificial Sequence: Synthetic oligonucleotide
  Antisense strand to SEQ ID NO: 994292
uuucacauaucccuguggc

SEQ ID NO: 994294 - RNA, 19 nt, Artificial Sequence
  Description of Artificial Sequence: Synthetic oligonucleotide
  Sense strand starting at position 1637 of SEQ ID NO: 914310
auaugugaaacugguauag

SEQ ID NO: 994295 - RNA, 19 nt, Artificial Sequence
  Description of Artificial Sequence: Synthetic oligonucleotide
  Antisense strand to SEQ ID NO: 994294
cuauaccaguuucacauau

SEQ ID NO: 994296 - RNA, 19 nt, Artificial Sequence
  Description of Artificial Sequence: Synthetic oligonucleotide
  Sense strand starting at position 1919 of SEQ ID NO: 914310
aggaguuucuugccacacu

SEQ ID NO: 994297 - RNA, 19 nt, Artificial Sequence
  Description of Artificial Sequence: Synthetic oligonucleotide
  Antisense strand to SEQ ID NO: 994296
aguguggcaagaaacuccu

SEQ ID NO: 994298 - RNA, 19 nt, Artificial Sequence
  Description of Artificial Sequence: Synthetic oligonucleotide
  Sense strand starting at position 2186 of SEQ ID NO: 914310
ucaggcgauaguuagaagu

SEQ ID NO: 994299 - RNA, 19 nt, Artificial Sequence
  Description of Artificial Sequence: Synthetic oligonucleotide
  Antisense strand to SEQ ID NO: 994298
acuucuaacuaucgccuga

SEQ ID NO: 994300 - RNA, 19 nt, Artificial Sequence
  Description of Artificial Sequence: Synthetic oligonucleotide
  Sense strand starting at position 2519 of SEQ ID NO: 914310
cuaggucucuugucaaggu

SEQ ID NO: 994301 - RNA, 19 nt, Artificial Sequence
  Description of Artificial Sequence: Synthetic oligonucleotide
  Antisense strand to SEQ ID NO: 994300
accuugacaagagaccuag

SEQ ID NO: 994302 - RNA, 19 nt, Artificial Sequence
  Description of Artificial Sequence: Synthetic oligonucleotide
  Sense strand starting at position 2597 of SEQ ID NO: 914310
cuuguccugaaaggguuaa

SEQ ID NO: 994303 - RNA, 19 nt, Artificial Sequence
  Description of Artificial Sequence: Synthetic oligonucleotide
  Antisense strand to SEQ ID NO: 994302
uuaacccuuucaggacaag

SEQ ID NO: 994304 - RNA, 19 nt, Artificial Sequence
  Description of Artificial Sequence: Synthetic oligonucleotide
  Sense strand starting at position 2598 of SEQ ID NO: 914310
uuguccugaaaggguuaau

SEQ ID NO: 994305 - RNA, 19 nt, Artificial Sequence
  Description of Artificial Sequence: Synthetic oligonucleotide
  Antisense strand to SEQ ID NO: 994304
auuaacccuuucaggacaa

SEQ ID NO: 994306 - RNA, 19 nt, Artificial Sequence
  Description of Artificial Sequence: Synthetic oligonucleotide
  Sense strand starting at position 2601 of SEQ ID NO: 914310
uccugaaaggguuaauugu

SEQ ID NO: 994307 - RNA, 19 nt, Artificial Sequence
  Description of Artificial Sequence: Synthetic oligonucleotide
  Antisense strand to SEQ ID NO: 994306
acaauuaacccuuucagga

SEQ ID NO: 994308 - RNA, 19 nt, Artificial Sequence
  Description of Artificial Sequence: Synthetic oligonucleotide
  Sense strand starting at position 2609 of SEQ ID NO: 914310
ggguuaauuguagagugcu

SEQ ID NO: 994309 - RNA, 19 nt, Artificial Sequence
  Description of Artificial Sequence: Synthetic oligonucleotide
  Antisense strand to SEQ ID NO: 994308
agcacucuacaauuaaccc

SEQ ID NO: 994310 - RNA, 19 nt, Artificial Sequence
  Description of Artificial Sequence: Synthetic oligonucleotide
  Sense strand starting at position 2704 of SEQ ID NO: 914310
ugggaugguucaguacauu

SEQ ID NO: 994311 - RNA, 19 nt, Artificial Sequence
  Description of Artificial Sequence: Synthetic oligonucleotide
  Antisense strand to SEQ ID NO: 994310
aauguacugaaccauccca

SEQ ID NO: 994312 - RNA, 19 nt, Artificial Sequence
  Description of Artificial Sequence: Synthetic oligonucleotide
  Sense strand starting at position 2725 of SEQ ID NO: 914310
agaagacauugcuugcgaa

SEQ ID NO: 994313 - RNA, 19 nt, Artificial Sequence
  Description of Artificial Sequence: Synthetic oligonucleotide
  Antisense strand to SEQ ID NO: 994312
uucgcaagcaaugucuucu

SEQ ID NO: 994314 - RNA, 19 nt, Artificial Sequence
  Description of Artificial Sequence: Synthetic oligonucleotide
  Sense strand starting at position 2726 of SEQ ID NO: 914310
gaagacauugcuugcgaag

SEQ ID NO: 994315 - RNA, 19 nt, Artificial Sequence
  Description of Artificial Sequence: Synthetic oligonucleotide
  Antisense strand to SEQ ID NO: 994314
cuucgcaagcaaugucuuc

SEQ ID NO: 994316 - RNA, 19 nt, Artificial Sequence
  Description of Artificial Sequence: Synthetic oligonucleotide
  Sense strand starting at position 2763 of SEQ ID NO: 914310
cucagucuccaugggaaau

SEQ ID NO: 994317 - RNA, 19 nt, Artificial Sequence
  Description of Artificial Sequence: Synthetic oligonucleotide
  Antisense strand to SEQ ID NO: 994316
auuucccauggagacugag

SEQ ID NO: 994318 - RNA, 19 nt, Artificial Sequence
  Description of Artificial Sequence: Synthetic oligonucleotide
  Sense strand starting at position 2910 of SEQ ID NO: 914310
uaccuaauacgacggaaau

SEQ ID NO: 994319 - RNA, 19 nt, Artificial Sequence
  Description of Artificial Sequence: Synthetic oligonucleotide
  Antisense strand to SEQ ID NO: 994318
auuuccgucguauuaggua

SEQ ID NO: 994320 - RNA, 19 nt, Artificial Sequence
  Description of Artificial Sequence: Synthetic oligonucleotide
  Sense strand starting at position 2921 of SEQ ID NO: 914310
acggaaaugcugugugaau

SEQ ID NO: 994321 - RNA, 19 nt, Artificial Sequence
  Description of Artificial Sequence: Synthetic oligonucleotide
  Antisense strand to SEQ ID NO: 994320
auucacacagcauuuccgu

SEQ ID NO: 994322 - RNA, 19 nt, Artificial Sequence
  Description of Artificial Sequence: Synthetic oligonucleotide
  Sense strand starting at position 2922 of SEQ ID NO: 914310
cggaaaugcugugugaaug

SEQ ID NO: 994323 - RNA, 19 nt, Artificial Sequence
  Description of Artificial Sequence: Synthetic oligonucleotide
  Antisense strand to SEQ ID NO: 994322
cauucacacagcauuuccg

SEQ ID NO: 994324 - RNA, 19 nt, Artificial Sequence
  Description of Artificial Sequence: Synthetic oligonucleotide
  Sense strand starting at position 2953 of SEQ ID NO: 914310
uauuguuuaggagguaauc

SEQ ID NO: 994325 - RNA, 19 nt, Artificial Sequence
  Description of Artificial Sequence: Synthetic oligonucleotide
  Antisense strand to SEQ ID NO: 994324
gauuaccuccuaaacaaua

SEQ ID NO: 994326 - RNA, 19 nt, Artificial Sequence
  Description of Artificial Sequence: Synthetic oligonucleotide
  Sense strand starting at position 3957 of SEQ ID NO: 914310
aucauacuguguuccugau

SEQ ID NO: 994327 - RNA, 19 nt, Artificial Sequence
  Description of Artificial Sequence: Synthetic oligonucleotide
  Antisense strand to SEQ ID NO: 994326
aucaggaacacaguaugau

SEQ ID NO: 994328 - RNA, 19 nt, Artificial Sequence
  Description of Artificial Sequence: Synthetic oligonucleotide
  Sense strand starting at position 3967 of SEQ ID NO: 914310
guuccugauuuggagcaaa

SEQ ID NO: 994329 - RNA, 19 nt, Artificial Sequence
  Description of Artificial Sequence: Synthetic oligonucleotide
  Antisense strand to SEQ ID NO: 994328
uuugcuccaaaucaggaac

SEQ ID NO: 994330 - RNA, 19 nt, Artificial Sequence
  Description of Artificial Sequence: Synthetic oligonucleotide
  Sense strand starting at position 910 of SEQ ID NO: 914311
gggcguccucccgauugau

SEQ ID NO: 994331 - RNA, 19 nt, Artificial Sequence
  Description of Artificial Sequence: Synthetic oligonucleotide
  Antisense strand to SEQ ID NO: 994330
aucaaucgggaggacgccc

SEQ ID NO: 994332 - RNA, 19 nt, Artificial Sequence
  Description of Artificial Sequence: Synthetic oligonucleotide
  Sense strand starting at position 1176 of SEQ ID NO: 914311
gagccaucuucugcugaug

SEQ ID NO: 994333 - RNA, 19 nt, Artificial Sequence
  Description of Artificial Sequence: Synthetic oligonucleotide
  Antisense strand to SEQ ID NO: 994332
caucagcagaagauggcuc

SEQ ID NO: 994334 - RNA, 19 nt, Artificial Sequence
  Description of Artificial Sequence: Synthetic oligonucleotide
  Sense strand starting at position 1234 of SEQ ID NO: 914311
gaaguagucccagaagccu

SEQ ID NO: 994335 - RNA, 19 nt, Artificial Sequence
  Description of Artificial Sequence: Synthetic oligonucleotide
  Antisense strand to SEQ ID NO: 994334
aggcuucugggacuacuuc

SEQ ID NO: 994336 - RNA, 19 nt, Artificial Sequence
  Description of Artificial Sequence: Synthetic oligonucleotide
  Sense strand starting at position 1436 of SEQ ID NO: 914311
gccauuaccugcucugaga

SEQ ID NO: 994337 - RNA, 19 nt, Artificial Sequence
  Description of Artificial Sequence: Synthetic oligonucleotide
  Antisense strand to SEQ ID NO: 994336
ucucagagcagguaauggc

SEQ ID NO: 994338 - RNA, 19 nt, Artificial Sequence
  Description of Artificial Sequence: Synthetic oligonucleotide
  Sense strand starting at position 1635 of SEQ ID NO: 914311
gggugucuuccucagacau

SEQ ID NO: 994339 - RNA, 19 nt, Artificial Sequence
  Description of Artificial Sequence: Synthetic oligonucleotide
  Antisense strand to SEQ ID NO: 994338
augucugaggaagacaccc

SEQ ID NO: 994340 - RNA, 19 nt, Artificial Sequence
  Description of Artificial Sequence: Synthetic oligonucleotide
  Sense strand starting at position 1670 of SEQ ID NO: 914311
cuugcuaccucagucacau

SEQ ID NO: 994341 - RNA, 19 nt, Artificial Sequence
  Description of Artificial Sequence: Synthetic oligonucleotide
  Antisense strand to SEQ ID NO: 994340
augugacugagguagcaag

SEQ ID NO: 994342 - RNA, 19 nt, Artificial Sequence
  Description of Artificial Sequence: Synthetic oligonucleotide
  Sense strand starting at position 1737 of SEQ ID NO: 914311
ggaacaguucucuaggcca

SEQ ID NO: 994343 - RNA, 19 nt, Artificial Sequence
  Description of Artificial Sequence: Synthetic oligonucleotide
  Antisense strand to SEQ ID NO: 994342
uggccuagagaacuguucc

SEQ ID NO: 994344 - RNA, 19 nt, Artificial Sequence
  Description of Artificial Sequence: Synthetic oligonucleotide
  Sense strand starting at position 1855 of SEQ ID NO: 914311
guuccaagaggacgucuua

SEQ ID NO: 994345 - RNA, 19 nt, Artificial Sequence
  Description of Artificial Sequence: Synthetic oligonucleotide
  Antisense strand to SEQ ID NO: 994344
uaagacguccucuuggaac

SEQ ID NO: 994346 - RNA, 19 nt, Artificial Sequence
  Description of Artificial Sequence: Synthetic oligonucleotide
  Sense strand starting at position 1982 of SEQ ID NO: 914311
agcagacauucugcuuuau

SEQ ID NO: 994347 - RNA, 19 nt, Artificial Sequence
  Description of Artificial Sequence: Synthetic oligonucleotide
  Antisense strand to SEQ ID NO: 994346
auaaagcagaaugucugcu

SEQ ID NO: 994348 - RNA, 19 nt, Artificial Sequence
  Description of Artificial Sequence: Synthetic oligonucleotide
  Sense strand starting at position 2022 of SEQ ID NO: 914311
ggcaccaauugcucugagu

SEQ ID NO: 994349 - RNA, 19 nt, Artificial Sequence
  Description of Artificial Sequence: Synthetic oligonucleotide
  Antisense strand to SEQ ID NO: 994348
acucagagcaauuggugcc

SEQ ID NO: 994350 - RNA, 19 nt, Artificial Sequence
  Description of Artificial Sequence: Synthetic oligonucleotide
  Sense strand starting at position 2037 of SEQ ID NO: 914311
gaguaaauaccacguggaa

SEQ ID NO: 994351 - RNA, 19 nt, Artificial Sequence
  Description of Artificial Sequence: Synthetic oligonucleotide
  Antisense strand to SEQ ID NO: 994350
uuccacgugguauuuacuc

SEQ ID NO: 994352 - RNA, 19 nt, Artificial Sequence
  Description of Artificial Sequence: Synthetic oligonucleotide
  Sense strand starting at position 2039 of SEQ ID NO: 914311
guaaauaccacguggaagu

SEQ ID NO: 994353 - RNA, 19 nt, Artificial Sequence
  Description of Artificial Sequence: Synthetic oligonucleotide
  Antisense strand to SEQ ID NO: 994352
acuuccacgugguauuuac

SEQ ID NO: 994354 - RNA, 19 nt, Artificial Sequence
  Description of Artificial Sequence: Synthetic oligonucleotide
  Sense strand starting at position 2126 of SEQ ID NO: 914311
uaaugagugcccugguauc

SEQ ID NO: 994355 - RNA, 19 nt, Artificial Sequence
  Description of Artificial Sequence: Synthetic oligonucleotide
  Antisense strand to SEQ ID NO: 994354
gauaccagggcacucauua

SEQ ID NO: 994356 - RNA, 19 nt, Artificial Sequence
  Description of Artificial Sequence: Synthetic oligonucleotide
  Sense strand starting at position 2279 of SEQ ID NO: 914311
gaaccuguuugucugccaa

SEQ ID NO: 994357 - RNA, 19 nt, Artificial Sequence
  Description of Artificial Sequence: Synthetic oligonucleotide
  Antisense strand to SEQ ID NO: 994356
uuggcagacaaacagguuc

SEQ ID NO: 994358 - RNA, 19 nt, Artificial Sequence
  Description of Artificial Sequence: Synthetic oligonucleotide
  Sense strand starting at position 2635 of SEQ ID NO: 914311
augcucagaucuucucuga

SEQ ID NO: 994359 - RNA, 19 nt, Artificial Sequence
  Description of Artificial Sequence: Synthetic oligonucleotide
  Antisense strand to SEQ ID NO: 994358
ucagagaagaucugagcau

SEQ ID NO: 994360 - RNA, 19 nt, Artificial Sequence
  Description of Artificial Sequence: Synthetic oligonucleotide
  Sense strand starting at position 2639 of SEQ ID NO: 914311
ucagaucuucucugaugac

SEQ ID NO: 994361 - RNA, 19 nt, Artificial Sequence
  Description of Artificial Sequence: Synthetic oligonucleotide
  Antisense strand to SEQ ID NO: 994360
gucaucagagaagaucuga

SEQ ID NO: 994362 - RNA, 19 nt, Artificial Sequence
  Description of Artificial Sequence: Synthetic oligonucleotide
  Sense strand starting at position 2668 of SEQ ID NO: 914311
cgucuacaguacucauaca

SEQ ID NO: 994363 - RNA, 19 nt, Artificial Sequence
  Description of Artificial Sequence: Synthetic oligonucleotide
  Antisense strand to SEQ ID NO: 994362
uguaugaguacuguagacg

SEQ ID NO: 994364 - RNA, 19 nt, Artificial Sequence
  Description of Artificial Sequence: Synthetic oligonucleotide
  Sense strand starting at position 2692 of SEQ ID NO: 914311
ucacaagcucccgauucuu

SEQ ID NO: 994365 - RNA, 19 nt, Artificial Sequence
  Description of Artificial Sequence: Synthetic oligonucleotide
  Antisense strand to SEQ ID NO: 994364
aagaaucgggagcuuguga

SEQ ID NO: 994366 - RNA, 19 nt, Artificial Sequence
  Description of Artificial Sequence: Synthetic oligonucleotide
  Sense strand starting at position 2700 of SEQ ID NO: 914311
ucccgauucuugguccuaa

SEQ ID NO: 994367 - RNA, 19 nt, Artificial Sequence
  Description of Artificial Sequence: Synthetic oligonucleotide
  Antisense strand to SEQ ID NO: 994366
uuaggaccaagaaucggga

SEQ ID NO: 994368 - RNA, 19 nt, Artificial Sequence
  Description of Artificial Sequence: Synthetic oligonucleotide
  Sense strand starting at position 2701 of SEQ ID NO: 914311
cccgauucuugguccuaaa

SEQ ID NO: 994369 - RNA, 19 nt, Artificial Sequence
  Description of Artificial Sequence: Synthetic oligonucleotide
  Antisense strand to SEQ ID NO: 994368
uuuaggaccaagaaucggg

SEQ ID NO: 994370 - RNA, 19 nt, Artificial Sequence
  Description of Artificial Sequence: Synthetic oligonucleotide
  Sense strand starting at position 2771 of SEQ ID NO: 914311
aguugucugucaccuugau

SEQ ID NO: 994371 - RNA, 19 nt, Artificial Sequence
  Description of Artificial Sequence: Synthetic oligonucleotide
  Antisense strand to SEQ ID NO: 994370
aucaaggugacagacaacu

SEQ ID NO: 994372 - RNA, 19 nt, Artificial Sequence
  Description of Artificial Sequence: Synthetic oligonucleotide
  Sense strand starting at position 2775 of SEQ ID NO: 914311
gucugucaccuugauugca

SEQ ID NO: 994373 - RNA, 19 nt, Artificial Sequence
  Description of Artificial Sequence: Synthetic oligonucleotide
  Antisense strand to SEQ ID NO: 994372
ugcaaucaaggugacagac

SEQ ID NO: 994374 - RNA, 19 nt, Artificial Sequence
  Description of Artificial Sequence: Synthetic oligonucleotide
  Sense strand starting at position 2777 of SEQ ID NO: 914311
cugucaccuugauugcauu

SEQ ID NO: 994375 - RNA, 19 nt, Artificial Sequence
  Description of Artificial Sequence: Synthetic oligonucleotide
  Antisense strand to SEQ ID NO: 994374
aaugcaaucaaggugacag

SEQ ID NO: 994376 - RNA, 19 nt, Artificial Sequence
  Description of Artificial Sequence: Synthetic oligonucleotide
  Sense strand starting at position 2853 of SEQ ID NO: 914311
guggcucauccugacucau

SEQ ID NO: 994377 - RNA, 19 nt, Artificial Sequence
  Description of Artificial Sequence: Synthetic oligonucleotide
  Antisense strand to SEQ ID NO: 994376
augagucaggaugagccac

SEQ ID NO: 994378 - RNA, 19 nt, Artificial Sequence
  Description of Artificial Sequence: Synthetic oligonucleotide
  Sense strand starting at position 2904 of SEQ ID NO: 914311
ggcauucccugagccuuua

SEQ ID NO: 994379 - RNA, 19 nt, Artificial Sequence
  Description of Artificial Sequence: Synthetic oligonucleotide
  Antisense strand to SEQ ID NO: 994378
uaaaggcucagggaaugcc

SEQ ID NO: 994380 - RNA, 19 nt, Artificial Sequence
  Description of Artificial Sequence: Synthetic oligonucleotide
  Sense strand starting at position 2926 of SEQ ID NO: 914311
aggcuucccucugcuugaa

SEQ ID NO: 994381 - RNA, 19 nt, Artificial Sequence
  Description of Artificial Sequence: Synthetic oligonucleotide
  Antisense strand to SEQ ID NO: 994380
uucaagcagagggaagccu

SEQ ID NO: 994382 - RNA, 19 nt, Artificial Sequence
  Description of Artificial Sequence: Synthetic oligonucleotide
  Sense strand starting at position 2980 of SEQ ID NO: 914311
uagaguuaguuuguauuag

SEQ ID NO: 994383 - RNA, 19 nt, Artificial Sequence
  Description of Artificial Sequence: Synthetic oligonucleotide
  Antisense strand to SEQ ID NO: 994382
cuaauacaaacuaacucua

SEQ ID NO: 994384 - RNA, 19 nt, Artificial Sequence
  Description of Artificial Sequence: Synthetic oligonucleotide
  Sense strand starting at position 3161 of SEQ ID NO: 914311
ucccauuggccacaaguua

SEQ ID NO: 994385 - RNA, 19 nt, Artificial Sequence
  Description of Artificial Sequence: Synthetic oligonucleotide
  Antisense strand to SEQ ID NO: 994384
uaacuuguggccaauggga

SEQ ID NO: 994386 - RNA, 19 nt, Artificial Sequence
  Description of Artificial Sequence: Synthetic oligonucleotide
  Sense strand starting at position 3186 of SEQ ID NO: 914311
uggcuacacuuagcugaua

SEQ ID NO: 994387 - RNA, 19 nt, Artificial Sequence
  Description of Artificial Sequence: Synthetic oligonucleotide
  Antisense strand to SEQ ID NO: 994386
uaucagcuaaguguagcca

SEQ ID NO: 994388 - RNA, 19 nt, Artificial Sequence
  Description of Artificial Sequence: Synthetic oligonucleotide
  Sense strand starting at position 3187 of SEQ ID NO: 914311
ggcuacacuuagcugauau

SEQ ID NO: 994389 - RNA, 19 nt, Artificial Sequence
  Description of Artificial Sequence: Synthetic oligonucleotide
  Antisense strand to SEQ ID NO: 994388
auaucagcuaaguguagcc

SEQ ID NO: 994390 - RNA, 19 nt, Artificial Sequence
  Description of Artificial Sequence: Synthetic oligonucleotide
  Sense strand starting at position 3406 of SEQ ID NO: 914311
aggacauguuccuuccuuu

SEQ ID NO: 994391 - RNA, 19 nt, Artificial Sequence
  Description of Artificial Sequence: Synthetic oligonucleotide
  Antisense strand to SEQ ID NO: 994390
aaaggaaggaacauguccu

SEQ ID NO: 994392 - RNA, 19 nt, Artificial Sequence
  Description of Artificial Sequence: Synthetic oligonucleotide
  Sense strand starting at position 3493 of SEQ ID NO: 914311
uggcuacacuuagcugaaa

SEQ ID NO: 994393 - RNA, 19 nt, Artificial Sequence
  Description of Artificial Sequence: Synthetic oligonucleotide
  Antisense strand to SEQ ID NO: 994392
uuucagcuaaguguagcca

SEQ ID NO: 994394 - RNA, 19 nt, Artificial Sequence
  Description of Artificial Sequence: Synthetic oligonucleotide
  Sense strand starting at position 3633 of SEQ ID NO: 914311
gcuccaguaucacucugaa

SEQ ID NO: 994395 - RNA, 19 nt, Artificial Sequence
  Description of Artificial Sequence: Synthetic oligonucleotide
  Antisense strand to SEQ ID NO: 994394
uucagagugauacuggagc

SEQ ID NO: 994396 - RNA, 19 nt, Artificial Sequence
  Description of Artificial Sequence: Synthetic oligonucleotide
  Sense strand starting at position 3718 of SEQ ID NO: 914311
cuguauauuccuggauuau

SEQ ID NO: 994397 - RNA, 19 nt, Artificial Sequence
  Description of Artificial Sequence: Synthetic oligonucleotide
  Antisense strand to SEQ ID NO: 994396
auaauccaggaauauacag

SEQ ID NO: 994398 - RNA, 19 nt, Artificial Sequence
  Description of Artificial Sequence: Synthetic oligonucleotide
  Sense strand starting at position 3719 of SEQ ID NO: 914311
uguauauuccuggauuaua

SEQ ID NO: 994399 - RNA, 19 nt, Artificial Sequence
  Description of Artificial Sequence: Synthetic oligonucleotide
  Antisense strand to SEQ ID NO: 994398
uauaauccaggaauauaca

SEQ ID NO: 994400 - RNA, 19 nt, Artificial Sequence
  Description of Artificial Sequence: Synthetic oligonucleotide
  Sense strand starting at position 3769 of SEQ ID NO: 914311
ugaugaauccgagagcucu

SEQ ID NO: 994401 - RNA, 19 nt, Artificial Sequence
  Description of Artificial Sequence: Synthetic oligonucleotide
  Antisense strand to SEQ ID NO: 994400
agagcucucggauucauca

SEQ ID NO: 994402 - RNA, 19 nt, Artificial Sequence
  Description of Artificial Sequence: Synthetic oligonucleotide
  Sense strand starting at position 3816 of SEQ ID NO: 914311
cucuauauccacuaguaug

SEQ ID NO: 994403 - RNA, 19 nt, Artificial Sequence
  Description of Artificial Sequence: Synthetic oligonucleotide
  Antisense strand to SEQ ID NO: 994402
cauacuaguggauauagag

SEQ ID NO: 994404 - RNA, 19 nt, Artificial Sequence
  Description of Artificial Sequence: Synthetic oligonucleotide
  Sense strand starting at position 3919 of SEQ ID NO: 914311
gaucaaguggccuguccau

SEQ ID NO: 994405 - RNA, 19 nt, Artificial Sequence
  Description of Artificial Sequence: Synthetic oligonucleotide
  Antisense strand to SEQ ID NO: 994404
auggacaggccacuugauc

SEQ ID NO: 994406 - RNA, 19 nt, Artificial Sequence
  Description of Artificial Sequence: Synthetic oligonucleotide
  Sense strand starting at position 3936 of SEQ ID NO: 914311
aucaucacgcaguaagagu

SEQ ID NO: 994407 - RNA, 19 nt, Artificial Sequence
  Description of Artificial Sequence: Synthetic oligonucleotide
  Antisense strand to SEQ ID NO: 994406
acucuuacugcgugaugau

SEQ ID NO: 994408 - RNA, 19 nt, Artificial Sequence
  Description of Artificial Sequence: Synthetic oligonucleotide
  Sense strand starting at position 3982 of SEQ ID NO: 914311
uggcucuggugguucaaga

SEQ ID NO: 994409 - RNA, 19 nt, Artificial Sequence
  Description of Artificial Sequence: Synthetic oligonucleotide
  Antisense strand to SEQ ID NO: 994408
ucuugaaccaccagagcca

SEQ ID NO: 994410 - RNA, 19 nt, Artificial Sequence
  Description of Artificial Sequence: Synthetic oligonucleotide
  Sense strand starting at position 3 of SEQ ID NO: 914312
gucagaucaaguggccuua

SEQ ID NO: 994411 - RNA, 19 nt, Artificial Sequence
  Description of Artificial Sequence: Synthetic oligonucleotide
  Antisense strand to SEQ ID NO: 994410
uaaggccacuugaucugac

SEQ ID NO: 994412 - RNA, 19 nt, Artificial Sequence
  Description of Artificial Sequence: Synthetic oligonucleotide
  Sense strand starting at position 16 of SEQ ID NO: 914312
gccuuacauucucauagga

SEQ ID NO: 994413 - RNA, 19 nt, Artificial Sequence
  Description of Artificial Sequence: Synthetic oligonucleotide
  Antisense strand to SEQ ID NO: 994412
uccuaugagaauguaaggc

SEQ ID NO: 994414 - RNA, 19 nt, Artificial Sequence
  Description of Artificial Sequence: Synthetic oligonucleotide
  Sense strand starting at position 18 of SEQ ID NO: 914312
cuuacauucucauaggagu

SEQ ID NO: 994415 - RNA, 19 nt, Artificial Sequence
  Description of Artificial Sequence: Synthetic oligonucleotide
  Antisense strand to SEQ ID NO: 994414
acuccuaugagaauguaag

SEQ ID NO: 994416 - RNA, 19 nt, Artificial Sequence
  Description of Artificial Sequence: Synthetic oligonucleotide
  Sense strand starting at position 925 of SEQ ID NO: 914312
uuccauuguugggaucuca

SEQ ID NO: 994417 - RNA, 19 nt, Artificial Sequence
  Description of Artificial Sequence: Synthetic oligonucleotide
  Antisense strand to SEQ ID NO: 994416
ugagaucccaacaauggaa

SEQ ID NO: 994418 - RNA, 19 nt, Artificial Sequence
  Description of Artificial Sequence: Synthetic oligonucleotide
  Sense strand starting at position 1126 of SEQ ID NO: 914312
cucugaagcuccugaggaa

SEQ ID NO: 994419 - RNA, 19 nt, Artificial Sequence
  Description of Artificial Sequence: Synthetic oligonucleotide
  Antisense strand to SEQ ID NO: 994418
uuccucaggagcuucagag

SEQ ID NO: 994420 - RNA, 19 nt, Artificial Sequence
  Description of Artificial Sequence: Synthetic oligonucleotide
  Sense strand starting at position 1129 of SEQ ID NO: 914312
ugaagcuccugaggaaaga

SEQ ID NO: 994421 - RNA, 19 nt, Artificial Sequence
  Description of Artificial Sequence: Synthetic oligonucleotide
  Antisense strand to SEQ ID NO: 994420
ucuuuccucaggagcuuca

SEQ ID NO: 994422 - RNA, 19 nt, Artificial Sequence
  Description of Artificial Sequence: Synthetic oligonucleotide
  Sense strand starting at position 1617 of SEQ ID NO: 914312
cugugugucuuugggugau

SEQ ID NO: 994423 - RNA, 19 nt, Artificial Sequence
  Description of Artificial Sequence: Synthetic oligonucleotide
  Antisense strand to SEQ ID NO: 994422
aucacccaaagacacacag

SEQ ID NO: 994424 - RNA, 19 nt, Artificial Sequence
  Description of Artificial Sequence: Synthetic oligonucleotide
  Sense strand starting at position 1673 of SEQ ID NO: 914312
guaggacugggcugucuaa

SEQ ID NO: 994425 - RNA, 19 nt, Artificial Sequence
  Description of Artificial Sequence: Synthetic oligonucleotide
  Antisense strand to SEQ ID NO: 994424
uuagacagcccaguccuac

SEQ ID NO: 994426 - RNA, 19 nt, Artificial Sequence
  Description of Artificial Sequence: Synthetic oligonucleotide
  Sense strand starting at position 1702 of SEQ ID NO: 914312
agcccuaagccugaagaau

SEQ ID NO: 994427 - RNA, 19 nt, Artificial Sequence
  Description of Artificial Sequence: Synthetic oligonucleotide
  Antisense strand to SEQ ID NO: 994426
auucuucaggcuuagggcu

SEQ ID NO: 994428 - RNA, 19 nt, Artificial Sequence
  Description of Artificial Sequence: Synthetic oligonucleotide
  Sense strand starting at position 2084 of SEQ ID NO: 914312
ccugcugaccaguggagau

SEQ ID NO: 994429 - RNA, 19 nt, Artificial Sequence
  Description of Artificial Sequence: Synthetic oligonucleotide
  Antisense strand to SEQ ID NO: 994428
aucuccacuggucagcagg

SEQ ID NO: 994430 - RNA, 19 nt, Artificial Sequence
  Description of Artificial Sequence: Synthetic oligonucleotide
  Sense strand starting at position 2290 of SEQ ID NO: 914312
gggaaauggcuuggacaua

SEQ ID NO: 994431 - RNA, 19 nt, Artificial Sequence
  Description of Artificial Sequence: Synthetic oligonucleotide
  Antisense strand to SEQ ID NO: 994430
uauguccaagccauuuccc

SEQ ID NO: 994432 - RNA, 19 nt, Artificial Sequence
  Description of Artificial Sequence: Synthetic oligonucleotide
  Sense strand starting at position 3032 of SEQ ID NO: 914312
gggcgccugucuuccagau

SEQ ID NO: 994433 - RNA, 19 nt, Artificial Sequence
  Description of Artificial Sequence: Synthetic oligonucleotide
  Antisense strand to SEQ ID NO: 994432
aucuggaagacaggcgccc

SEQ ID NO: 994434 - RNA, 19 nt, Artificial Sequence
  Description of Artificial Sequence: Synthetic oligonucleotide
  Sense strand starting at position 3068 of SEQ ID NO: 914312
aggacaucuuaggcuuaaa

SEQ ID NO: 994435 - RNA, 19 nt, Artificial Sequence
  Description of Artificial Sequence: Synthetic oligonucleotide
  Antisense strand to SEQ ID NO: 994434
uuuaagccuaagauguccu

SEQ ID NO: 994436 - RNA, 19 nt, Artificial Sequence
  Description of Artificial Sequence: Synthetic oligonucleotide
  Sense strand starting at position 3089 of SEQ ID NO: 914312
augccuuuggcacguaaua

SEQ ID NO: 994437 - RNA, 19 nt, Artificial Sequence
  Description of Artificial Sequence: Synthetic oligonucleotide
  Antisense strand to SEQ ID NO: 994436
uauuacgugccaaaggcau

SEQ ID NO: 994438 - RNA, 19 nt, Artificial Sequence
  Description of Artificial Sequence: Synthetic oligonucleotide
  Sense strand starting at position 3170 of SEQ ID NO: 914312
aauacugauugcccagagu

SEQ ID NO: 994439 - RNA, 19 nt, Artificial Sequence
  Description of Artificial Sequence: Synthetic oligonucleotide
  Antisense strand to SEQ ID NO: 994438
acucugggcaaucaguauu

SEQ ID NO: 994440 - RNA, 19 nt, Artificial Sequence
  Description of Artificial Sequence: Synthetic oligonucleotide
  Sense strand starting at position 3344 of SEQ ID NO: 914312
gcuguccucucagaaguaa

SEQ ID NO: 994441 - RNA, 19 nt, Artificial Sequence
  Description of Artificial Sequence: Synthetic oligonucleotide
  Antisense strand to SEQ ID NO: 994440
uuacuucugagaggacagc

SEQ ID NO: 994442 - RNA, 19 nt, Artificial Sequence
  Description of Artificial Sequence: Synthetic oligonucleotide
  Sense strand starting at position 3404 of SEQ ID NO: 914312
cggcucugcccucagaauu

SEQ ID NO: 994443 - RNA, 19 nt, Artificial Sequence
  Description of Artificial Sequence: Synthetic oligonucleotide
  Antisense strand to SEQ ID NO: 994442
aauucugagggcagagccg

SEQ ID NO: 994444 - RNA, 19 nt, Artificial Sequence
  Description of Artificial Sequence: Synthetic oligonucleotide
  Sense strand starting at position 3414 of SEQ ID NO: 914312
cucagaauucuuuaucggu

SEQ ID NO: 994445 - RNA, 19 nt, Artificial Sequence
  Description of Artificial Sequence: Synthetic oligonucleotide
  Antisense strand to SEQ ID NO: 994444
accgauaaagaauucugag

SEQ ID NO: 994446 - RNA, 19 nt, Artificial Sequence
  Description of Artificial Sequence: Synthetic oligonucleotide
  Sense strand starting at position 3420 of SEQ ID NO: 914312
auucuuuaucgguggguga

SEQ ID NO: 994447 - RNA, 19 nt, Artificial Sequence
  Description of Artificial Sequence: Synthetic oligonucleotide
  Antisense strand to SEQ ID NO: 994446
ucacccaccgauaaagaau

SEQ ID NO: 994448 - RNA, 19 nt, Artificial Sequence
  Description of Artificial Sequence: Synthetic oligonucleotide
  Sense strand starting at position 3422 of SEQ ID NO: 914312
ucuuuaucggugggugaga

SEQ ID NO: 994449 - RNA, 19 nt, Artificial Sequence
  Description of Artificial Sequence: Synthetic oligonucleotide
  Antisense strand to SEQ ID NO: 994448
ucucacccaccgauaaaga

SEQ ID NO: 994450 - RNA, 19 nt, Artificial Sequence
  Description of Artificial Sequence: Synthetic oligonucleotide
  Sense strand starting at position 3431 of SEQ ID NO: 914312
gugggugagacuuggaauu

SEQ ID NO: 994451 - RNA, 19 nt, Artificial Sequence
  Description of Artificial Sequence: Synthetic oligonucleotide
  Antisense strand to SEQ ID NO: 994450
aauuccaagucucacccac

SEQ ID NO: 994452 - RNA, 19 nt, Artificial Sequence
  Description of Artificial Sequence: Synthetic oligonucleotide
  Sense strand starting at position 3442 of SEQ ID NO: 914312
uuggaauuccucuauuagc

SEQ ID NO: 994453 - RNA, 19 nt, Artificial Sequence
  Description of Artificial Sequence: Synthetic oligonucleotide
  Antisense strand to SEQ ID NO: 994452
gcuaauagaggaauuccaa

SEQ ID NO: 994454 - RNA, 19 nt, Artificial Sequence
  Description of Artificial Sequence: Synthetic oligonucleotide
  Sense strand starting at position 3730 of SEQ ID NO: 914312
agagcuagacuuggucuaa

SEQ ID NO: 994455 - RNA, 19 nt, Artificial Sequence
  Description of Artificial Sequence: Synthetic oligonucleotide
  Antisense strand to SEQ ID NO: 994454
uuagaccaagucuagcucu

SEQ ID NO: 994456 - RNA, 19 nt, Artificial Sequence
  Description of Artificial Sequence: Synthetic oligonucleotide
  Sense strand starting at position 3731 of SEQ ID NO: 914312
gagcuagacuuggucuaaa

SEQ ID NO: 994457 - RNA, 19 nt, Artificial Sequence
  Description of Artificial Sequence: Synthetic oligonucleotide
  Antisense strand to SEQ ID NO: 994456
uuuagaccaagucuagcuc

SEQ ID NO: 994458 - RNA, 19 nt, Artificial Sequence
  Description of Artificial Sequence: Synthetic oligonucleotide
  Sense strand starting at position 3819 of SEQ ID NO: 914312
aauagaacccugugaagua

SEQ ID NO: 994459 - RNA, 19 nt, Artificial Sequence
  Description of Artificial Sequence: Synthetic oligonucleotide
  Antisense strand to SEQ ID NO: 994458
uacuucacaggguucuauu

SEQ ID NO: 994460 - RNA, 19 nt, Artificial Sequence
  Description of Artificial Sequence: Synthetic oligonucleotide
  Sense strand starting at position 3826 of SEQ ID NO: 914312
cccugugaaguagacguua

SEQ ID NO: 994461 - RNA, 19 nt, Artificial Sequence
  Description of Artificial Sequence: Synthetic oligonucleotide
  Antisense strand to SEQ ID NO: 994460
uaacgucuacuucacaggg

SEQ ID NO: 994462 - RNA, 19 nt, Artificial Sequence
  Description of Artificial Sequence: Synthetic oligonucleotide
  Sense strand starting at position 3828 of SEQ ID NO: 914312
cugugaaguagacguuaag

SEQ ID NO: 994463 - RNA, 19 nt, Artificial Sequence
  Description of Artificial Sequence: Synthetic oligonucleotide
  Antisense strand to SEQ ID NO: 994462
cuuaacgucuacuucacag

SEQ ID NO: 994464 - RNA, 19 nt, Artificial Sequence
  Description of Artificial Sequence: Synthetic oligonucleotide
  Sense strand starting at position 3948 of SEQ ID NO: 914312
gcaaauaccagacggcuua

SEQ ID NO: 994465 - RNA, 19 nt, Artificial Sequence
  Description of Artificial Sequence: Synthetic oligonucleotide
  Antisense strand to SEQ ID NO: 994464
uaagccgucugguauuugc

SEQ ID NO: 994466 - RNA, 19 nt, Artificial Sequence
  Description of Artificial Sequence: Synthetic oligonucleotide
  Sense strand starting at position 77 of SEQ ID NO: 914313
caaguacguguuuaggagu

SEQ ID NO: 994467 - RNA, 19 nt, Artificial Sequence
  Description of Artificial Sequence: Synthetic oligonucleotide
  Antisense strand to SEQ ID NO: 994466
acuccuaaacacguacuug

SEQ ID NO: 994468 - RNA, 19 nt, Artificial Sequence
  Description of Artificial Sequence: Synthetic oligonucleotide
  Sense strand starting at position 90 of SEQ ID NO: 914313
aggaguccuuaucuugaag

SEQ ID NO: 994469 - RNA, 19 nt, Artificial Sequence
  Description of Artificial Sequence: Synthetic oligonucleotide
  Antisense strand to SEQ ID NO: 994468
cuucaagauaaggacuccu

SEQ ID NO: 994470 - RNA, 19 nt, Artificial Sequence
  Description of Artificial Sequence: Synthetic oligonucleotide
  Sense strand starting at position 93 of SEQ ID NO: 914313
aguccuuaucuugaaguuu

SEQ ID NO: 994471 - RNA, 19 nt, Artificial Sequence
  Description of Artificial Sequence: Synthetic oligonucleotide
  Antisense strand to SEQ ID NO: 994470
aaacuucaagauaaggacu

SEQ ID NO: 994472 - RNA, 19 nt, Artificial Sequence
  Description of Artificial Sequence: Synthetic oligonucleotide
  Sense strand starting at position 157 of SEQ ID NO: 914313
acaaauuuccuuuguuguu

SEQ ID NO: 994473 - RNA, 19 nt, Artificial Sequence
  Description of Artificial Sequence: Synthetic oligonucleotide
  Antisense strand to SEQ ID NO: 994472
aacaacaaaggaaauuugu

SEQ ID NO: 994474 - RNA, 19 nt, Artificial Sequence
  Description of Artificial Sequence: Synthetic oligonucleotide
  Sense strand starting at position 170 of SEQ ID NO: 914313
guuguuauuucugccucca

SEQ ID NO: 994475 - RNA, 19 nt, Artificial Sequence
  Description of Artificial Sequence: Synthetic oligonucleotide
  Antisense strand to SEQ ID NO: 994474
uggaggcagaaauaacaac

SEQ ID NO: 994476 - RNA, 19 nt, Artificial Sequence
  Description of Artificial Sequence: Synthetic oligonucleotide
  Sense strand starting at position 605 of SEQ ID NO: 914313
gugccuugugcuuuaaauc

SEQ ID NO: 994477 - RNA, 19 nt, Artificial Sequence
  Description of Artificial Sequence: Synthetic oligonucleotide
  Antisense strand to SEQ ID NO: 994476
gauuuaaagcacaaggcac

SEQ ID NO: 994478 - RNA, 19 nt, Artificial Sequence
  Description of Artificial Sequence: Synthetic oligonucleotide
  Sense strand starting at position 612 of SEQ ID NO: 914313
gugcuuuaaaucgaaagga

SEQ ID NO: 994479 - RNA, 19 nt, Artificial Sequence
  Description of Artificial Sequence: Synthetic oligonucleotide
  Antisense strand to SEQ ID NO: 994478
uccuuucgauuuaaagcac

SEQ ID NO: 994480 - RNA, 19 nt, Artificial Sequence
  Description of Artificial Sequence: Synthetic oligonucleotide
  Sense strand starting at position 633 of SEQ ID NO: 914313
uuuguaaagccaggaucau

SEQ ID NO: 994481 - RNA, 19 nt, Artificial Sequence
  Description of Artificial Sequence: Synthetic oligonucleotide
  Antisense strand to SEQ ID NO: 994480
augauccuggcuuuacaaa

SEQ ID NO: 994482 - RNA, 19 nt, Artificial Sequence
  Description of Artificial Sequence: Synthetic oligonucleotide
  Sense strand starting at position 634 of SEQ ID NO: 914313
uuguaaagccaggaucauu

SEQ ID NO: 994483 - RNA, 19 nt, Artificial Sequence
  Description of Artificial Sequence: Synthetic oligonucleotide
  Antisense strand to SEQ ID NO: 994482
aaugauccuggcuuuacaa

SEQ ID NO: 994484 - RNA, 19 nt, Artificial Sequence
  Description of Artificial Sequence: Synthetic oligonucleotide
  Sense strand starting at position 656 of SEQ ID NO: 914313
caguaagaguauccgaaac

SEQ ID NO: 994485 - RNA, 19 nt, Artificial Sequence
  Description of Artificial Sequence: Synthetic oligonucleotide
  Antisense strand to SEQ ID NO: 994484
guuucggauacucuuacug

SEQ ID NO: 994486 - RNA, 19 nt, Artificial Sequence
  Description of Artificial Sequence: Synthetic oligonucleotide
  Sense strand starting at position 682 of SEQ ID NO: 914313
accaccuuggcaugaagaa

SEQ ID NO: 994487 - RNA, 19 nt, Artificial Sequence
  Description of Artificial Sequence: Synthetic oligonucleotide
  Antisense strand to SEQ ID NO: 994486
uucuucaugccaagguggu

SEQ ID NO: 994488 - RNA, 19 nt, Artificial Sequence
  Description of Artificial Sequence: Synthetic oligonucleotide
  Sense strand starting at position 704 of SEQ ID NO: 914313
ggcaguuaauaaguuaucu

SEQ ID NO: 994489 - RNA, 19 nt, Artificial Sequence
  Description of Artificial Sequence: Synthetic oligonucleotide
  Antisense strand to SEQ ID NO: 994488
agauaacuuauuaacugcc

SEQ ID NO: 994490 - RNA, 19 nt, Artificial Sequence
  Description of Artificial Sequence: Synthetic oligonucleotide
  Sense strand starting at position 746 of SEQ ID NO: 914313
cccuuuguaggauaucuga

SEQ ID NO: 994491 - RNA, 19 nt, Artificial Sequence
  Description of Artificial Sequence: Synthetic oligonucleotide
  Antisense strand to SEQ ID NO: 994490
ucagauauccuacaaaggg

SEQ ID NO: 994492 - RNA, 19 nt, Artificial Sequence
  Description of Artificial Sequence: Synthetic oligonucleotide
  Sense strand starting at position 759 of SEQ ID NO: 914313
aucugaacccuuggcaaua

SEQ ID NO: 994493 - RNA, 19 nt, Artificial Sequence
  Description of Artificial Sequence: Synthetic oligonucleotide
  Antisense strand to SEQ ID NO: 994492
uauugccaaggguucagau

SEQ ID NO: 994494 - RNA, 19 nt, Artificial Sequence
  Description of Artificial Sequence: Synthetic oligonucleotide
  Sense strand starting at position 760 of SEQ ID NO: 914313
ucugaacccuuggcaauau

SEQ ID NO: 994495 - RNA, 19 nt, Artificial Sequence
  Description of Artificial Sequence: Synthetic oligonucleotide
  Antisense strand to SEQ ID NO: 994494
auauugccaaggguucaga

SEQ ID NO: 994496 - RNA, 19 nt, Artificial Sequence
  Description of Artificial Sequence: Synthetic oligonucleotide
  Sense strand starting at position 860 of SEQ ID NO: 914313
cggcccuacugguuaagaa

SEQ ID NO: 994497 - RNA, 19 nt, Artificial Sequence
  Description of Artificial Sequence: Synthetic oligonucleotide
  Antisense strand to SEQ ID NO: 994496
uucuuaaccaguagggccg

SEQ ID NO: 994498 - RNA, 19 nt, Artificial Sequence
  Description of Artificial Sequence: Synthetic oligonucleotide
  Sense strand starting at position 861 of SEQ ID NO: 914313
ggcccuacugguuaagaac

SEQ ID NO: 994499 - RNA, 19 nt, Artificial Sequence
  Description of Artificial Sequence: Synthetic oligonucleotide
  Antisense strand to SEQ ID NO: 994498
guucuuaaccaguagggcc

SEQ ID NO: 994500 - RNA, 19 nt, Artificial Sequence
  Description of Artificial Sequence: Synthetic oligonucleotide
  Sense strand starting at position 919 of SEQ ID NO: 914313
uacaucauagcgggauaga

SEQ ID NO: 994501 - RNA, 19 nt, Artificial Sequence
  Description of Artificial Sequence: Synthetic oligonucleotide
  Antisense strand to SEQ ID NO: 994500
ucuaucccgcuaugaugua

SEQ ID NO: 994502 - RNA, 19 nt, Artificial Sequence
  Description of Artificial Sequence: Synthetic oligonucleotide
  Sense strand starting at position 999 of SEQ ID NO: 914313
ccaaguauuuggugagaau

SEQ ID NO: 994503 - RNA, 19 nt, Artificial Sequence
  Description of Artificial Sequence: Synthetic oligonucleotide
  Antisense strand to SEQ ID NO: 994502
auucucaccaaauacuugg

SEQ ID NO: 994504 - RNA, 19 nt, Artificial Sequence
  Description of Artificial Sequence: Synthetic oligonucleotide
  Sense strand starting at position 1002 of SEQ ID NO: 914313
aguauuuggugagaaugac

SEQ ID NO: 994505 - RNA, 19 nt, Artificial Sequence
  Description of Artificial Sequence: Synthetic oligonucleotide
  Antisense strand to SEQ ID NO: 994504
gucauucucaccaaauacu

SEQ ID NO: 994506 - RNA, 19 nt, Artificial Sequence
  Description of Artificial Sequence: Synthetic oligonucleotide
  Sense strand starting at position 2147 of SEQ ID NO: 914313
cagcgaggaccuuagaguu

SEQ ID NO: 994507 - RNA, 19 nt, Artificial Sequence
  Description of Artificial Sequence: Synthetic oligonucleotide
  Antisense strand to SEQ ID NO: 994506
aacucuaagguccucgcug

SEQ ID NO: 994508 - RNA, 19 nt, Artificial Sequence
  Description of Artificial Sequence: Synthetic oligonucleotide
  Sense strand starting at position 2244 of SEQ ID NO: 914313
uuaucaaugggcgacugaa

SEQ ID NO: 994509 - RNA, 19 nt, Artificial Sequence
  Description of Artificial Sequence: Synthetic oligonucleotide
  Antisense strand to SEQ ID NO: 994508
uucagucgcccauugauaa

SEQ ID NO: 994510 - RNA, 19 nt, Artificial Sequence
  Description of Artificial Sequence: Synthetic oligonucleotide
  Sense strand starting at position 2376 of SEQ ID NO: 914313
ggugguaauauaugccaga

SEQ ID NO: 994511 - RNA, 19 nt, Artificial Sequence
  Description of Artificial Sequence: Synthetic oligonucleotide
  Antisense strand to SEQ ID NO: 994510
ucuggcauauauuaccacc

SEQ ID NO: 994512 - RNA, 19 nt, Artificial Sequence
  Description of Artificial Sequence: Synthetic oligonucleotide
  Sense strand starting at position 2377 of SEQ ID NO: 914313
gugguaauauaugccagau

SEQ ID NO: 994513 - RNA, 19 nt, Artificial Sequence
  Description of Artificial Sequence: Synthetic oligonucleotide
  Antisense strand to SEQ ID NO: 994512
aucuggcauauauuaccac

SEQ ID NO: 994514 - RNA, 19 nt, Artificial Sequence
  Description of Artificial Sequence: Synthetic oligonucleotide
  Sense strand starting at position 2482 of SEQ ID NO: 914313
ccagaacuugagcggugau

SEQ ID NO: 994515 - RNA, 19 nt, Artificial Sequence
  Description of Artificial Sequence: Synthetic oligonucleotide
  Antisense strand to SEQ ID NO: 994514
aucaccgcucaaguucugg

SEQ ID NO: 994516 - RNA, 19 nt, Artificial Sequence
  Description of Artificial Sequence: Synthetic oligonucleotide
  Sense strand starting at position 2483 of SEQ ID NO: 914313
cagaacuugagcggugauu

SEQ ID NO: 994517 - RNA, 19 nt, Artificial Sequence
  Description of Artificial Sequence: Synthetic oligonucleotide
  Antisense strand to SEQ ID NO: 994516
aaucaccgcucaaguucug

SEQ ID NO: 994518 - RNA, 19 nt, Artificial Sequence
  Description of Artificial Sequence: Synthetic oligonucleotide
  Sense strand starting at position 2485 of SEQ ID NO: 914313
gaacuugagcggugauucu

SEQ ID NO: 994519 - RNA, 19 nt, Artificial Sequence
  Description of Artificial Sequence: Synthetic oligonucleotide
  Antisense strand to SEQ ID NO: 994518
agaaucaccgcucaaguuc

SEQ ID NO: 994520 - RNA, 19 nt, Artificial Sequence
  Description of Artificial Sequence: Synthetic oligonucleotide
  Sense strand starting at position 2492 of SEQ ID NO: 914313
agcggugauucuucaaagu

SEQ ID NO: 994521 - RNA, 19 nt, Artificial Sequence
  Description of Artificial Sequence: Synthetic oligonucleotide
  Antisense strand to SEQ ID NO: 994520
acuuugaagaaucaccgcu

SEQ ID NO: 994522 - RNA, 19 nt, Artificial Sequence
  Description of Artificial Sequence: Synthetic oligonucleotide
  Sense strand starting at position 2525 of SEQ ID NO: 914313
gcaugugacugucuauaac

SEQ ID NO: 994523 - RNA, 19 nt, Artificial Sequence
  Description of Artificial Sequence: Synthetic oligonucleotide
  Antisense strand to SEQ ID NO: 994522
guuauagacagucacaugc

SEQ ID NO: 994524 - RNA, 19 nt, Artificial Sequence
  Description of Artificial Sequence: Synthetic oligonucleotide
  Sense strand starting at position 2528 of SEQ ID NO: 914313
ugugacugucuauaaccuu

SEQ ID NO: 994525 - RNA, 19 nt, Artificial Sequence
  Description of Artificial Sequence: Synthetic oligonucleotide
  Antisense strand to SEQ ID NO: 994524
aagguuauagacagucaca

SEQ ID NO: 994526 - RNA, 19 nt, Artificial Sequence
  Description of Artificial Sequence: Synthetic oligonucleotide
  Sense strand starting at position 2535 of SEQ ID NO: 914313
gucuauaaccuuuggcaug

SEQ ID NO: 994527 - RNA, 19 nt, Artificial Sequence
  Description of Artificial Sequence: Synthetic oligonucleotide
  Antisense strand to SEQ ID NO: 994526
caugccaaagguuauagac

SEQ ID NO: 994528 - RNA, 19 nt, Artificial Sequence
  Description of Artificial Sequence: Synthetic oligonucleotide
  Sense strand starting at position 2537 of SEQ ID NO: 914313
cuauaaccuuuggcaugaa

SEQ ID NO: 994529 - RNA, 19 nt, Artificial Sequence
  Description of Artificial Sequence: Synthetic oligonucleotide
  Antisense strand to SEQ ID NO: 994528
uucaugccaaagguuauag

SEQ ID NO: 994530 - RNA, 19 nt, Artificial Sequence
  Description of Artificial Sequence: Synthetic oligonucleotide
  Sense strand starting at position 2549 of SEQ ID NO: 914313
gcaugaacucuuuacguau

SEQ ID NO: 994531 - RNA, 19 nt, Artificial Sequence
  Description of Artificial Sequence: Synthetic oligonucleotide
  Antisense strand to SEQ ID NO: 994530
auacguaaagaguucaugc

SEQ ID NO: 994532 - RNA, 19 nt, Artificial Sequence
  Description of Artificial Sequence: Synthetic oligonucleotide
  Sense strand starting at position 2552 of SEQ ID NO: 914313
ugaacucuuuacguauaau

SEQ ID NO: 994533 - RNA, 19 nt, Artificial Sequence
  Description of Artificial Sequence: Synthetic oligonucleotide
  Antisense strand to SEQ ID NO: 994532
auuauacguaaagaguuca

SEQ ID NO: 994534 - RNA, 19 nt, Artificial Sequence
  Description of Artificial Sequence: Synthetic oligonucleotide
  Sense strand starting at position 2555 of SEQ ID NO: 914313
acucuuuacguauaauaug

SEQ ID NO: 994535 - RNA, 19 nt, Artificial Sequence
  Description of Artificial Sequence: Synthetic oligonucleotide
  Antisense strand to SEQ ID NO: 994534
cauauuauacguaaagagu

SEQ ID NO: 994536 - RNA, 19 nt, Artificial Sequence
  Description of Artificial Sequence: Synthetic oligonucleotide
  Sense strand starting at position 2569 of SEQ ID NO: 914313
auaugaaacaguugugucu

SEQ ID NO: 994537 - RNA, 19 nt, Artificial Sequence
  Description of Artificial Sequence: Synthetic oligonucleotide
  Antisense strand to SEQ ID NO: 994536
agacacaacuguuucauau

SEQ ID NO: 994538 - RNA, 19 nt, Artificial Sequence
  Description of Artificial Sequence: Synthetic oligonucleotide
  Sense strand starting at position 2596 of SEQ ID NO: 914313
caugcacucuucgugaaga

SEQ ID NO: 994539 - RNA, 19 nt, Artificial Sequence
  Description of Artificial Sequence: Synthetic oligonucleotide
  Antisense strand to SEQ ID NO: 994538
ucuucacgaagagugcaug

SEQ ID NO: 994540 - RNA, 19 nt, Artificial Sequence
  Description of Artificial Sequence: Synthetic oligonucleotide
  Sense strand starting at position 2634 of SEQ ID NO: 914313
agaggucuguuuccaagaa

SEQ ID NO: 994541 - RNA, 19 nt, Artificial Sequence
  Description of Artificial Sequence: Synthetic oligonucleotide
  Antisense strand to SEQ ID NO: 994540
uucuuggaaacagaccucu

SEQ ID NO: 994542 - RNA, 19 nt, Artificial Sequence
  Description of Artificial Sequence: Synthetic oligonucleotide
  Sense strand starting at position 3273 of SEQ ID NO: 914313
guagcuuacaguggaaaca

SEQ ID NO: 994543 - RNA, 19 nt, Artificial Sequence
  Description of Artificial Sequence: Synthetic oligonucleotide
  Antisense strand to SEQ ID NO: 994542
uguuuccacuguaagcuac

SEQ ID NO: 994544 - RNA, 19 nt, Artificial Sequence
  Description of Artificial Sequence: Synthetic oligonucleotide
  Sense strand starting at position 3694 of SEQ ID NO: 914313
uugauugccuggccagaaa

SEQ ID NO: 994545 - RNA, 19 nt, Artificial Sequence
  Description of Artificial Sequence: Synthetic oligonucleotide
  Antisense strand to SEQ ID NO: 994544
uuucuggccaggcaaucaa

SEQ ID NO: 994546 - RNA, 19 nt, Artificial Sequence
  Description of Artificial Sequence: Synthetic oligonucleotide
  Sense strand starting at position 157 of SEQ ID NO: 914314
acucucaaugcuggagaca

SEQ ID NO: 994547 - RNA, 19 nt, Artificial Sequence
  Description of Artificial Sequence: Synthetic oligonucleotide
  Antisense strand to SEQ ID NO: 994546
ugucuccagcauugagagu

SEQ ID NO: 994548 - RNA, 19 nt, Artificial Sequence
  Description of Artificial Sequence: Synthetic oligonucleotide
  Sense strand starting at position 200 of SEQ ID NO: 914314
cccagcaucuuagcagaua

SEQ ID NO: 994549 - RNA, 19 nt, Artificial Sequence
  Description of Artificial Sequence: Synthetic oligonucleotide
  Antisense strand to SEQ ID NO: 994548
uaucugcuaagaugcuggg

SEQ ID NO: 994550 - RNA, 19 nt, Artificial Sequence
  Description of Artificial Sequence: Synthetic oligonucleotide
  Sense strand starting at position 211 of SEQ ID NO: 914314
agcagauaggccugacuau

SEQ ID NO: 994551 - RNA, 19 nt, Artificial Sequence
  Description of Artificial Sequence: Synthetic oligonucleotide
  Antisense strand to SEQ ID NO: 994550
auagucaggccuaucugcu

SEQ ID NO: 994552 - RNA, 19 nt, Artificial Sequence
  Description of Artificial Sequence: Synthetic oligonucleotide
  Sense strand starting at position 212 of SEQ ID NO: 914314
gcagauaggccugacuauu

SEQ ID NO: 994553 - RNA, 19 nt, Artificial Sequence
  Description of Artificial Sequence: Synthetic oligonucleotide
  Antisense strand to SEQ ID NO: 994552
aauagucaggccuaucugc

SEQ ID NO: 994554 - RNA, 19 nt, Artificial Sequence
  Description of Artificial Sequence: Synthetic oligonucleotide
  Sense strand starting at position 296 of SEQ ID NO: 914314
aauggaggcucugaggaau

SEQ ID NO: 994555 - RNA, 19 nt, Artificial Sequence
  Description of Artificial Sequence: Synthetic oligonucleotide
  Antisense strand to SEQ ID NO: 994554
auuccucagagccuccauu

SEQ ID NO: 994556 - RNA, 19 nt, Artificial Sequence
  Description of Artificial Sequence: Synthetic oligonucleotide
  Sense strand starting at position 324 of SEQ ID NO: 914314
uguagagucacauagugau

SEQ ID NO: 994557 - RNA, 19 nt, Artificial Sequence
  Description of Artificial Sequence: Synthetic oligonucleotide
  Antisense strand to SEQ ID NO: 994556
aucacuaugugacucuaca

SEQ ID NO: 994558 - RNA, 19 nt, Artificial Sequence
  Description of Artificial Sequence: Synthetic oligonucleotide
  Sense strand starting at position 337 of SEQ ID NO: 914314
agugauugguggcugcaca

SEQ ID NO: 994559 - RNA, 19 nt, Artificial Sequence
  Description of Artificial Sequence: Synthetic oligonucleotide
  Antisense strand to SEQ ID NO: 994558
ugugcagccaccaaucacu

SEQ ID NO: 994560 - RNA, 19 nt, Artificial Sequence
  Description of Artificial Sequence: Synthetic oligonucleotide
  Sense strand starting at position 338 of SEQ ID NO: 914314
gugauugguggcugcacaa

SEQ ID NO: 994561 - RNA, 19 nt, Artificial Sequence
  Description of Artificial Sequence: Synthetic oligonucleotide
  Antisense strand to SEQ ID NO: 994560
uugugcagccaccaaucac

SEQ ID NO: 994562 - RNA, 19 nt, Artificial Sequence
  Description of Artificial Sequence: Synthetic oligonucleotide
  Sense strand starting at position 430 of SEQ ID NO: 914314
uuccuaagcugugccauua

SEQ ID NO: 994563 - RNA, 19 nt, Artificial Sequence
  Description of Artificial Sequence: Synthetic oligonucleotide
  Antisense strand to SEQ ID NO: 994562
uaauggcacagcuuaggaa

SEQ ID NO: 994564 - RNA, 19 nt, Artificial Sequence
  Description of Artificial Sequence: Synthetic oligonucleotide
  Sense strand starting at position 731 of SEQ ID NO: 914314
cgguacucugccugggaca

SEQ ID NO: 994565 - RNA, 19 nt, Artificial Sequence
  Description of Artificial Sequence: Synthetic oligonucleotide
  Antisense strand to SEQ ID NO: 994564
ugucccaggcagaguaccg

SEQ ID NO: 994566 - RNA, 19 nt, Artificial Sequence
  Description of Artificial Sequence: Synthetic oligonucleotide
  Sense strand starting at position 843 of SEQ ID NO: 914314
caggaugaguucucucuac

SEQ ID NO: 994567 - RNA, 19 nt, Artificial Sequence
  Description of Artificial Sequence: Synthetic oligonucleotide
  Antisense strand to SEQ ID NO: 994566
guagagagaacucauccug

SEQ ID NO: 994568 - RNA, 19 nt, Artificial Sequence
  Description of Artificial Sequence: Synthetic oligonucleotide
  Sense strand starting at position 847 of SEQ ID NO: 914314
augaguucucucuacaccu

SEQ ID NO: 994569 - RNA, 19 nt, Artificial Sequence
  Description of Artificial Sequence: Synthetic oligonucleotide
  Antisense strand to SEQ ID NO: 994568
agguguagagagaacucau

SEQ ID NO: 994570 - RNA, 19 nt, Artificial Sequence
  Description of Artificial Sequence: Synthetic oligonucleotide
  Sense strand starting at position 950 of SEQ ID NO: 914314
gaggguccuuauccuugua

SEQ ID NO: 994571 - RNA, 19 nt, Artificial Sequence
  Description of Artificial Sequence: Synthetic oligonucleotide
  Antisense strand to SEQ ID NO: 994570
uacaaggauaaggacccuc

SEQ ID NO: 994572 - RNA, 19 nt, Artificial Sequence
  Description of Artificial Sequence: Synthetic oligonucleotide
  Sense strand starting at position 952 of SEQ ID NO: 914314
ggguccuuauccuuguaaa

SEQ ID NO: 994573 - RNA, 19 nt, Artificial Sequence
  Description of Artificial Sequence: Synthetic oligonucleotide
  Antisense strand to SEQ ID NO: 994572
uuuacaaggauaaggaccc

SEQ ID NO: 994574 - RNA, 19 nt, Artificial Sequence
  Description of Artificial Sequence: Synthetic oligonucleotide
  Sense strand starting at position 953 of SEQ ID NO: 914314
gguccuuauccuuguaaau

SEQ ID NO: 994575 - RNA, 19 nt, Artificial Sequence
  Description of Artificial Sequence: Synthetic oligonucleotide
  Antisense strand to SEQ ID NO: 994574
auuuacaaggauaaggacc

SEQ ID NO: 994576 - RNA, 19 nt, Artificial Sequence
  Description of Artificial Sequence: Synthetic oligonucleotide
  Sense strand starting at position 1059 of SEQ ID NO: 914314
ccuucuacccugugaugau

SEQ ID NO: 994577 - RNA, 19 nt, Artificial Sequence
  Description of Artificial Sequence: Synthetic oligonucleotide
  Antisense strand to SEQ ID NO: 994576
aucaucacaggguagaagg

SEQ ID NO: 994578 - RNA, 19 nt, Artificial Sequence
  Description of Artificial Sequence: Synthetic oligonucleotide
  Sense strand starting at position 1121 of SEQ ID NO: 914314
gcgaacagguaucaugagu

SEQ ID NO: 994579 - RNA, 19 nt, Artificial Sequence
  Description of Artificial Sequence: Synthetic oligonucleotide
  Antisense strand to SEQ ID NO: 994578
acucaugauaccuguucgc

SEQ ID NO: 994580 - RNA, 19 nt, Artificial Sequence
  Description of Artificial Sequence: Synthetic oligonucleotide
  Sense strand starting at position 1197 of SEQ ID NO: 914314
gguaucuggcccugaagca

SEQ ID NO: 994581 - RNA, 19 nt, Artificial Sequence
  Description of Artificial Sequence: Synthetic oligonucleotide
  Antisense strand to SEQ ID NO: 994580
ugcuucagggccagauacc

SEQ ID NO: 994582 - RNA, 19 nt, Artificial Sequence
  Description of Artificial Sequence: Synthetic oligonucleotide
  Sense strand starting at position 1300 of SEQ ID NO: 914314
gcgugauggcuucuggcca

SEQ ID NO: 994583 - RNA, 19 nt, Artificial Sequence
  Description of Artificial Sequence: Synthetic oligonucleotide
  Antisense strand to SEQ ID NO: 994582
uggccagaagccaucacgc

SEQ ID NO: 994584 - RNA, 19 nt, Artificial Sequence
  Description of Artificial Sequence: Synthetic oligonucleotide
  Sense strand starting at position 1304 of SEQ ID NO: 914314
gauggcuucuggccagauu

SEQ ID NO: 994585 - RNA, 19 nt, Artificial Sequence
  Description of Artificial Sequence: Synthetic oligonucleotide
  Antisense strand to SEQ ID NO: 994584
aaucuggccagaagccauc

SEQ ID NO: 994586 - RNA, 19 nt, Artificial Sequence
  Description of Artificial Sequence: Synthetic oligonucleotide
  Sense strand starting at position 1570 of SEQ ID NO: 914314
ggcauagggucguacagau

SEQ ID NO: 994587 - RNA, 19 nt, Artificial Sequence
  Description of Artificial Sequence: Synthetic oligonucleotide
  Antisense strand to SEQ ID NO: 994586
aucuguacgacccuaugcc

SEQ ID NO: 994588 - RNA, 19 nt, Artificial Sequence
  Description of Artificial Sequence: Synthetic oligonucleotide
  Sense strand starting at position 1579 of SEQ ID NO: 914314
ucguacagaucuccagaaa

SEQ ID NO: 994589 - RNA, 19 nt, Artificial Sequence
  Description of Artificial Sequence: Synthetic oligonucleotide
  Antisense strand to SEQ ID NO: 994588
uuucuggagaucuguacga

SEQ ID NO: 994590 - RNA, 19 nt, Artificial Sequence
  Description of Artificial Sequence: Synthetic oligonucleotide
  Sense strand starting at position 1580 of SEQ ID NO: 914314
cguacagaucuccagaaau

SEQ ID NO: 994591 - RNA, 19 nt, Artificial Sequence
  Description of Artificial Sequence: Synthetic oligonucleotide
  Antisense strand to SEQ ID NO: 994590
auuucuggagaucuguacg

SEQ ID NO: 994592 - RNA, 19 nt, Artificial Sequence
  Description of Artificial Sequence: Synthetic oligonucleotide
  Sense strand starting at position 1762 of SEQ ID NO: 914314
gcuggcuuauccucaagag

SEQ ID NO: 994593 - RNA, 19 nt, Artificial Sequence
  Description of Artificial Sequence: Synthetic oligonucleotide
  Antisense strand to SEQ ID NO: 994592
cucuugaggauaagccagc

SEQ ID NO: 994594 - RNA, 19 nt, Artificial Sequence
  Description of Artificial Sequence: Synthetic oligonucleotide
  Sense strand starting at position 1853 of SEQ ID NO: 914314
cggcguuccuuucugcaga

SEQ ID NO: 994595 - RNA, 19 nt, Artificial Sequence
  Description of Artificial Sequence: Synthetic oligonucleotide
  Antisense strand to SEQ ID NO: 994594
ucugcagaaaggaacgccg

SEQ ID NO: 994596 - RNA, 19 nt, Artificial Sequence
  Description of Artificial Sequence: Synthetic oligonucleotide
  Sense strand starting at position 1855 of SEQ ID NO: 914314
gcguuccuuucugcagaau

SEQ ID NO: 994597 - RNA, 19 nt, Artificial Sequence
  Description of Artificial Sequence: Synthetic oligonucleotide
  Antisense strand to SEQ ID NO: 994596
auucugcagaaaggaacgc

SEQ ID NO: 994598 - RNA, 19 nt, Artificial Sequence
  Description of Artificial Sequence: Synthetic oligonucleotide
  Sense strand starting at position 2331 of SEQ ID NO: 914314
uggugagucugcccugaca

SEQ ID NO: 994599 - RNA, 19 nt, Artificial Sequence
  Description of Artificial Sequence: Synthetic oligonucleotide
  Antisense strand to SEQ ID NO: 994598
ugucagggcagacucacca

SEQ ID NO: 994600 - RNA, 19 nt, Artificial Sequence
  Description of Artificial Sequence: Synthetic oligonucleotide
  Sense strand starting at position 2333 of SEQ ID NO: 914314
gugagucugcccugacaua

SEQ ID NO: 994601 - RNA, 19 nt, Artificial Sequence
  Description of Artificial Sequence: Synthetic oligonucleotide
  Antisense strand to SEQ ID NO: 994600
uaugucagggcagacucac

SEQ ID NO: 994602 - RNA, 19 nt, Artificial Sequence
  Description of Artificial Sequence: Synthetic oligonucleotide
  Sense strand starting at position 2591 of SEQ ID NO: 914314
acaggagauucccacccau

SEQ ID NO: 994603 - RNA, 19 nt, Artificial Sequence
  Description of Artificial Sequence: Synthetic oligonucleotide
  Antisense strand to SEQ ID NO: 994602
augggugggaaucuccugu

SEQ ID NO: 994604 - RNA, 19 nt, Artificial Sequence
  Description of Artificial Sequence: Synthetic oligonucleotide
  Sense strand starting at position 2659 of SEQ ID NO: 914314
ggguccuguguccagaaca

SEQ ID NO: 994605 - RNA, 19 nt, Artificial Sequence
  Description of Artificial Sequence: Synthetic oligonucleotide
  Antisense strand to SEQ ID NO: 994604
uguucuggacacaggaccc

SEQ ID NO: 994606 - RNA, 19 nt, Artificial Sequence
  Description of Artificial Sequence: Synthetic oligonucleotide
  Sense strand starting at position 2737 of SEQ ID NO: 914314
aggguauauuuggaagaac

SEQ ID NO: 994607 - RNA, 19 nt, Artificial Sequence
  Description of Artificial Sequence: Synthetic oligonucleotide
  Antisense strand to SEQ ID NO: 994606
guucuuccaaauauacccu

SEQ ID NO: 994608 - RNA, 19 nt, Artificial Sequence
  Description of Artificial Sequence: Synthetic oligonucleotide
  Sense strand starting at position 2803 of SEQ ID NO: 914314
agugucauuaauuggagca

SEQ ID NO: 994609 - RNA, 19 nt, Artificial Sequence
  Description of Artificial Sequence: Synthetic oligonucleotide
  Antisense strand to SEQ ID NO: 994608
ugcuccaauuaaugacacu

SEQ ID NO: 994610 - RNA, 19 nt, Artificial Sequence
  Description of Artificial Sequence: Synthetic oligonucleotide
  Sense strand starting at position 2836 of SEQ ID NO: 914314
gucccagugcugggcaauu

SEQ ID NO: 994611 - RNA, 19 nt, Artificial Sequence
  Description of Artificial Sequence: Synthetic oligonucleotide
  Antisense strand to SEQ ID NO: 994610
aauugcccagcacugggac

SEQ ID NO: 994612 - RNA, 19 nt, Artificial Sequence
  Description of Artificial Sequence: Synthetic oligonucleotide
  Sense strand starting at position 2898 of SEQ ID NO: 914314
auuaucaucccagguuaug

SEQ ID NO: 994613 - RNA, 19 nt, Artificial Sequence
  Description of Artificial Sequence: Synthetic oligonucleotide
  Antisense strand to SEQ ID NO: 994612
cauaaccugggaugauaau

SEQ ID NO: 994614 - RNA, 19 nt, Artificial Sequence
  Description of Artificial Sequence: Synthetic oligonucleotide
  Sense strand starting at position 2910 of SEQ ID NO: 914314
gguuauggguuaggaaaua

SEQ ID NO: 994615 - RNA, 19 nt, Artificial Sequence
  Description of Artificial Sequence: Synthetic oligonucleotide
  Antisense strand to SEQ ID NO: 994614
uauuuccuaacccauaacc

SEQ ID NO: 994616 - RNA, 19 nt, Artificial Sequence
  Description of Artificial Sequence: Synthetic oligonucleotide
  Sense strand starting at position 3003 of SEQ ID NO: 914314
uuaugaguucuagaaucuc

SEQ ID NO: 994617 - RNA, 19 nt, Artificial Sequence
  Description of Artificial Sequence: Synthetic oligonucleotide
  Antisense strand to SEQ ID NO: 994616
gagauucuagaacucauaa

SEQ ID NO: 994618 - RNA, 19 nt, Artificial Sequence
  Description of Artificial Sequence: Synthetic oligonucleotide
  Sense strand starting at position 3061 of SEQ ID NO: 914314
gaaagaguugacugaguag

SEQ ID NO: 994619 - RNA, 19 nt, Artificial Sequence
  Description of Artificial Sequence: Synthetic oligonucleotide
  Antisense strand to SEQ ID NO: 994618
cuacucagucaacucuuuc

SEQ ID NO: 994620 - RNA, 19 nt, Artificial Sequence
  Description of Artificial Sequence: Synthetic oligonucleotide
  Sense strand starting at position 3584 of SEQ ID NO: 914314
ccucccuucugggaugaca

SEQ ID NO: 994621 - RNA, 19 nt, Artificial Sequence
  Description of Artificial Sequence: Synthetic oligonucleotide
  Antisense strand to SEQ ID NO: 994620
ugucaucccagaagggagg

SEQ ID NO: 994622 - RNA, 19 nt, Artificial Sequence
  Description of Artificial Sequence: Synthetic oligonucleotide
  Sense strand starting at position 3595 of SEQ ID NO: 914314
ggaugacaggagugucaga

SEQ ID NO: 994623 - RNA, 19 nt, Artificial Sequence
  Description of Artificial Sequence: Synthetic oligonucleotide
  Antisense strand to SEQ ID NO: 994622
ucugacacuccugucaucc

SEQ ID NO: 994624 - RNA, 19 nt, Artificial Sequence
  Description of Artificial Sequence: Synthetic oligonucleotide
  Sense strand starting at position 3916 of SEQ ID NO: 914314
uugugcgcuccuuaucaaa

SEQ ID NO: 994625 - RNA, 19 nt, Artificial Sequence
  Description of Artificial Sequence: Synthetic oligonucleotide
  Antisense strand to SEQ ID NO: 994624
uuugauaaggagcgcacaa

SEQ ID NO: 994626 - RNA, 19 nt, Artificial Sequence
  Description of Artificial Sequence: Synthetic oligonucleotide
  Sense strand starting at position 68 of SEQ ID NO: 914315
gggucucacuugcuagaau

SEQ ID NO: 994627 - RNA, 19 nt, Artificial Sequence
  Description of Artificial Sequence: Synthetic oligonucleotide
  Antisense strand to SEQ ID NO: 994626
auucuagcaagugagaccc

SEQ ID NO: 994628 - RNA, 19 nt, Artificial Sequence
  Description of Artificial Sequence: Synthetic oligonucleotide
  Sense strand starting at position 162 of SEQ ID NO: 914315
agcaguucccagcacagaa

SEQ ID NO: 994629 - RNA, 19 nt, Artificial Sequence
  Description of Artificial Sequence: Synthetic oligonucleotide
  Antisense strand to SEQ ID NO: 994628
uucugugcugggaacugcu

SEQ ID NO: 994630 - RNA, 19 nt, Artificial Sequence
  Description of Artificial Sequence: Synthetic oligonucleotide
  Sense strand starting at position 182 of SEQ ID NO: 914315
gggcuuuaguaagugggua

SEQ ID NO: 994631 - RNA, 19 nt, Artificial Sequence
  Description of Artificial Sequence: Synthetic oligonucleotide
  Antisense strand to SEQ ID NO: 994630
uacccacuuacuaaagccc

SEQ ID NO: 994632 - RNA, 19 nt, Artificial Sequence
  Description of Artificial Sequence: Synthetic oligonucleotide
  Sense strand starting at position 328 of SEQ ID NO: 914315
agcacuucucccugggaca

SEQ ID NO: 994633 - RNA, 19 nt, Artificial Sequence
  Description of Artificial Sequence: Synthetic oligonucleotide
  Antisense strand to SEQ ID NO: 994632
ugucccagggagaagugcu

SEQ ID NO: 994634 - RNA, 19 nt, Artificial Sequence
  Description of Artificial Sequence: Synthetic oligonucleotide
  Sense strand starting at position 357 of SEQ ID NO: 914315
cuugcuaagcgcucacuau

SEQ ID NO: 994635 - RNA, 19 nt, Artificial Sequence
  Description of Artificial Sequence: Synthetic oligonucleotide
  Antisense strand to SEQ ID NO: 994634
auagugagcgcuuagcaag

SEQ ID NO: 994636 - RNA, 19 nt, Artificial Sequence
  Description of Artificial Sequence: Synthetic oligonucleotide
  Sense strand starting at position 418 of SEQ ID NO: 914315
ugggauuauuaacuccauu

SEQ ID NO: 994637 - RNA, 19 nt, Artificial Sequence
  Description of Artificial Sequence: Synthetic oligonucleotide
  Antisense strand to SEQ ID NO: 994636
aauggaguuaauaauccca

SEQ ID NO: 994638 - RNA, 19 nt, Artificial Sequence
  Description of Artificial Sequence: Synthetic oligonucleotide
  Sense strand starting at position 660 of SEQ ID NO: 914315
ggaaguucauccucaggga

SEQ ID NO: 994639 - RNA, 19 nt, Artificial Sequence
  Description of Artificial Sequence: Synthetic oligonucleotide
  Antisense strand to SEQ ID NO: 994638
ucccugaggaugaacuucc

SEQ ID NO: 994640 - RNA, 19 nt, Artificial Sequence
  Description of Artificial Sequence: Synthetic oligonucleotide
  Sense strand starting at position 861 of SEQ ID NO: 914315
agcacaggauuguugaauu

SEQ ID NO: 994641 - RNA, 19 nt, Artificial Sequence
  Description of Artificial Sequence: Synthetic oligonucleotide
  Antisense strand to SEQ ID NO: 994640
aauucaacaauccugugcu

SEQ ID NO: 994642 - RNA, 19 nt, Artificial Sequence
  Description of Artificial Sequence: Synthetic oligonucleotide
  Sense strand starting at position 879 of SEQ ID NO: 914315
ucauuagggauccacggua

SEQ ID NO: 994643 - RNA, 19 nt, Artificial Sequence
  Description of Artificial Sequence: Synthetic oligonucleotide
  Antisense strand to SEQ ID NO: 994642
uaccguggaucccuaauga

SEQ ID NO: 994644 - RNA, 19 nt, Artificial Sequence
  Description of Artificial Sequence: Synthetic oligonucleotide
  Sense strand starting at position 1708 of SEQ ID NO: 914315
gucuuuaaguguuugugaa

SEQ ID NO: 994645 - RNA, 19 nt, Artificial Sequence
  Description of Artificial Sequence: Synthetic oligonucleotide
  Antisense strand to SEQ ID NO: 994644
uucacaaacacuuaaagac

SEQ ID NO: 994646 - RNA, 19 nt, Artificial Sequence
  Description of Artificial Sequence: Synthetic oligonucleotide
  Sense strand starting at position 1709 of SEQ ID NO: 914315
ucuuuaaguguuugugaau

SEQ ID NO: 994647 - RNA, 19 nt, Artificial Sequence
  Description of Artificial Sequence: Synthetic oligonucleotide
  Antisense strand to SEQ ID NO: 994646
auucacaaacacuuaaaga

SEQ ID NO: 994648 - RNA, 19 nt, Artificial Sequence
  Description of Artificial Sequence: Synthetic oligonucleotide
  Sense strand starting at position 1710 of SEQ ID NO: 914315
cuuuaaguguuugugaauc

SEQ ID NO: 994649 - RNA, 19 nt, Artificial Sequence
  Description of Artificial Sequence: Synthetic oligonucleotide
  Antisense strand to SEQ ID NO: 994648
gauucacaaacacuuaaag

SEQ ID NO: 994650 - RNA, 19 nt, Artificial Sequence
  Description of Artificial Sequence: Synthetic oligonucleotide
  Sense strand starting at position 1718 of SEQ ID NO: 914315
guuugugaaucacuucucu

SEQ ID NO: 994651 - RNA, 19 nt, Artificial Sequence
  Description of Artificial Sequence: Synthetic oligonucleotide
  Antisense strand to SEQ ID NO: 994650
agagaagugauucacaaac

SEQ ID NO: 994652 - RNA, 19 nt, Artificial Sequence
  Description of Artificial Sequence: Synthetic oligonucleotide
  Sense strand starting at position 1722 of SEQ ID NO: 914315
gugaaucacuucucuacgu

SEQ ID NO: 994653 - RNA, 19 nt, Artificial Sequence
  Description of Artificial Sequence: Synthetic oligonucleotide
  Antisense strand to SEQ ID NO: 994652
acguagagaagugauucac

SEQ ID NO: 994654 - RNA, 19 nt, Artificial Sequence
  Description of Artificial Sequence: Synthetic oligonucleotide
  Sense strand starting at position 1749 of SEQ ID NO: 914315
guuuguuucuguguauaac

SEQ ID NO: 994655 - RNA, 19 nt, Artificial Sequence
  Description of Artificial Sequence: Synthetic oligonucleotide
  Antisense strand to SEQ ID NO: 994654
guuauacacagaaacaaac

SEQ ID NO: 994656 - RNA, 19 nt, Artificial Sequence
  Description of Artificial Sequence: Synthetic oligonucleotide
  Sense strand starting at position 1750 of SEQ ID NO: 914315
uuuguuucuguguauaacu

SEQ ID NO: 994657 - RNA, 19 nt, Artificial Sequence
  Description of Artificial Sequence: Synthetic oligonucleotide
  Antisense strand to SEQ ID NO: 994656
aguuauacacagaaacaaa

SEQ ID NO: 994658 - RNA, 19 nt, Artificial Sequence
  Description of Artificial Sequence: Synthetic oligonucleotide
  Sense strand starting at position 1758 of SEQ ID NO: 914315
uguguauaacuguggaucu

SEQ ID NO: 994659 - RNA, 19 nt, Artificial Sequence
  Description of Artificial Sequence: Synthetic oligonucleotide
  Antisense strand to SEQ ID NO: 994658
agauccacaguuauacaca

SEQ ID NO: 994660 - RNA, 19 nt, Artificial Sequence
  Description of Artificial Sequence: Synthetic oligonucleotide
  Sense strand starting at position 1769 of SEQ ID NO: 914315
guggaucuguccaggagga

SEQ ID NO: 994661 - RNA, 19 nt, Artificial Sequence
  Description of Artificial Sequence: Synthetic oligonucleotide
  Antisense strand to SEQ ID NO: 994660
uccuccuggacagauccac

SEQ ID NO: 994662 - RNA, 19 nt, Artificial Sequence
  Description of Artificial Sequence: Synthetic oligonucleotide
  Sense strand starting at position 1770 of SEQ ID NO: 914315
uggaucuguccaggaggaa

SEQ ID NO: 994663 - RNA, 19 nt, Artificial Sequence
  Description of Artificial Sequence: Synthetic oligonucleotide
  Antisense strand to SEQ ID NO: 994662
uuccuccuggacagaucca

SEQ ID NO: 994664 - RNA, 19 nt, Artificial Sequence
  Description of Artificial Sequence: Synthetic oligonucleotide
  Sense strand starting at position 2219 of SEQ ID NO: 914315
aaguucugcccuggcaaca

SEQ ID NO: 994665 - RNA, 19 nt, Artificial Sequence
  Description of Artificial Sequence: Synthetic oligonucleotide
  Antisense strand to SEQ ID NO: 994664
uguugccagggcagaacuu

SEQ ID NO: 994666 - RNA, 19 nt, Artificial Sequence
  Description of Artificial Sequence: Synthetic oligonucleotide
  Sense strand starting at position 2503 of SEQ ID NO: 914315
ucaugucugcggcauuuaa

SEQ ID NO: 994667 - RNA, 19 nt, Artificial Sequence
  Description of Artificial Sequence: Synthetic oligonucleotide
  Antisense strand to SEQ ID NO: 994666
uuaaaugccgcagacauga

SEQ ID NO: 994668 - RNA, 19 nt, Artificial Sequence
  Description of Artificial Sequence: Synthetic oligonucleotide
  Sense strand starting at position 2598 of SEQ ID NO: 914315
ugggcaaguuucucagcau

SEQ ID NO: 994669 - RNA, 19 nt, Artificial Sequence
  Description of Artificial Sequence: Synthetic oligonucleotide
  Antisense strand to SEQ ID NO: 994668
augcugagaaacuugccca

SEQ ID NO: 994670 - RNA, 19 nt, Artificial Sequence
  Description of Artificial Sequence: Synthetic oligonucleotide
  Sense strand starting at position 2640 of SEQ ID NO: 914315
ccaccacgaguuuaaauua

SEQ ID NO: 994671 - RNA, 19 nt, Artificial Sequence
  Description of Artificial Sequence: Synthetic oligonucleotide
  Antisense strand to SEQ ID NO: 994670
uaauuuaaacucguggugg

SEQ ID NO: 994672 - RNA, 19 nt, Artificial Sequence
  Description of Artificial Sequence: Synthetic oligonucleotide
  Sense strand starting at position 2645 of SEQ ID NO: 914315
acgaguuuaaauuaauggu

SEQ ID NO: 994673 - RNA, 19 nt, Artificial Sequence
  Description of Artificial Sequence: Synthetic oligonucleotide
  Antisense strand to SEQ ID NO: 994672
accauuaauuuaaacucgu

SEQ ID NO: 994674 - RNA, 19 nt, Artificial Sequence
  Description of Artificial Sequence: Synthetic oligonucleotide
  Sense strand starting at position 2766 of SEQ ID NO: 914315
aaaggaauaccucgucuuu

SEQ ID NO: 994675 - RNA, 19 nt, Artificial Sequence
  Description of Artificial Sequence: Synthetic oligonucleotide
  Antisense strand to SEQ ID NO: 994674
aaagacgagguauuccuuu

SEQ ID NO: 994676 - RNA, 19 nt, Artificial Sequence
  Description of Artificial Sequence: Synthetic oligonucleotide
  Sense strand starting at position 2768 of SEQ ID NO: 914315
aggaauaccucgucuuuac

SEQ ID NO: 994677 - RNA, 19 nt, Artificial Sequence
  Description of Artificial Sequence: Synthetic oligonucleotide
  Antisense strand to SEQ ID NO: 994676
guaaagacgagguauuccu

SEQ ID NO: 994678 - RNA, 19 nt, Artificial Sequence
  Description of Artificial Sequence: Synthetic oligonucleotide
  Sense strand starting at position 3035 of SEQ ID NO: 914315
gaaucaugagccugguucu

SEQ ID NO: 994679 - RNA, 19 nt, Artificial Sequence
  Description of Artificial Sequence: Synthetic oligonucleotide
  Antisense strand to SEQ ID NO: 994678
agaaccaggcucaugauuc

SEQ ID NO: 994680 - RNA, 19 nt, Artificial Sequence
  Description of Artificial Sequence: Synthetic oligonucleotide
  Sense strand starting at position 3168 of SEQ ID NO: 914315
accugucuccucugaagac

SEQ ID NO: 994681 - RNA, 19 nt, Artificial Sequence
  Description of Artificial Sequence: Synthetic oligonucleotide
  Antisense strand to SEQ ID NO: 994680
gucuucagaggagacaggu

SEQ ID NO: 994682 - RNA, 19 nt, Artificial Sequence
  Description of Artificial Sequence: Synthetic oligonucleotide
  Sense strand starting at position 3200 of SEQ ID NO: 914315
aaauaucugggaugacgua

SEQ ID NO: 994683 - RNA, 19 nt, Artificial Sequence
  Description of Artificial Sequence: Synthetic oligonucleotide
  Antisense strand to SEQ ID NO: 994682
uacgucaucccagauauuu

SEQ ID NO: 994684 - RNA, 19 nt, Artificial Sequence
  Description of Artificial Sequence: Synthetic oligonucleotide
  Sense strand starting at position 3447 of SEQ ID NO: 914315
gggauucugcagcaaacaa

SEQ ID NO: 994685 - RNA, 19 nt, Artificial Sequence
  Description of Artificial Sequence: Synthetic oligonucleotide
  Antisense strand to SEQ ID NO: 994684
uuguuugcugcagaauccc

SEQ ID NO: 994686 - RNA, 19 nt, Artificial Sequence
  Description of Artificial Sequence: Synthetic oligonucleotide
  Sense strand starting at position 3585 of SEQ ID NO: 914315
augucauguucugcucaaa

SEQ ID NO: 994687 - RNA, 19 nt, Artificial Sequence
  Description of Artificial Sequence: Synthetic oligonucleotide
  Antisense strand to SEQ ID NO: 994686
uuugagcagaacaugacau

SEQ ID NO: 994688 - RNA, 19 nt, Artificial Sequence
  Description of Artificial Sequence: Synthetic oligonucleotide
  Sense strand starting at position 3656 of SEQ ID NO: 914315
agcaguaauugagcacaaa

SEQ ID NO: 994689 - RNA, 19 nt, Artificial Sequence
  Description of Artificial Sequence: Synthetic oligonucleotide
  Antisense strand to SEQ ID NO: 994688
uuugugcucaauuacugcu

SEQ ID NO: 994690 - RNA, 19 nt, Artificial Sequence
  Description of Artificial Sequence: Synthetic oligonucleotide
  Sense strand starting at position 3657 of SEQ ID NO: 914315
gcaguaauugagcacaaag

SEQ ID NO: 994691 - RNA, 19 nt, Artificial Sequence
  Description of Artificial Sequence: Synthetic oligonucleotide
  Antisense strand to SEQ ID NO: 994690
cuuugugcucaauuacugc

SEQ ID NO: 994692 - RNA, 19 nt, Artificial Sequence
  Description of Artificial Sequence: Synthetic oligonucleotide
  Sense strand starting at position 3659 of SEQ ID NO: 914315
aguaauugagcacaaaggu

SEQ ID NO: 994693 - RNA, 19 nt, Artificial Sequence
  Description of Artificial Sequence: Synthetic oligonucleotide
  Antisense strand to SEQ ID NO: 994692
accuuugugcucaauuacu

SEQ ID NO: 994694 - RNA, 19 nt, Artificial Sequence
  Description of Artificial Sequence: Synthetic oligonucleotide
  Sense strand starting at position 3765 of SEQ ID NO: 914315
cucagaaccugucugaaug

SEQ ID NO: 994695 - RNA, 19 nt, Artificial Sequence
  Description of Artificial Sequence: Synthetic oligonucleotide
  Antisense strand to SEQ ID NO: 994694
cauucagacagguucugag

SEQ ID NO: 994696 - RNA, 19 nt, Artificial Sequence
  Description of Artificial Sequence: Synthetic oligonucleotide
  Sense strand starting at position 3766 of SEQ ID NO: 914315
ucagaaccugucugaaugu

SEQ ID NO: 994697 - RNA, 19 nt, Artificial Sequence
  Description of Artificial Sequence: Synthetic oligonucleotide
  Antisense strand to SEQ ID NO: 994696
acauucagacagguucuga

SEQ ID NO: 994698 - RNA, 19 nt, Artificial Sequence
  Description of Artificial Sequence: Synthetic oligonucleotide
  Sense strand starting at position 3782 of SEQ ID NO: 914315
uguguaaaugcacagacau

SEQ ID NO: 994699 - RNA, 19 nt, Artificial Sequence
  Description of Artificial Sequence: Synthetic oligonucleotide
  Antisense strand to SEQ ID NO: 994698
augucugugcauuuacaca

SEQ ID NO: 994700 - RNA, 19 nt, Artificial Sequence
  Description of Artificial Sequence: Synthetic oligonucleotide
  Sense strand starting at position 3968 of SEQ ID NO: 914315
accacaugaccuuguguga

SEQ ID NO: 994701 - RNA, 19 nt, Artificial Sequence
  Description of Artificial Sequence: Synthetic oligonucleotide
  Antisense strand to SEQ ID NO: 994700
ucacacaaggucauguggu

SEQ ID NO: 994702 - RNA, 19 nt, Artificial Sequence
  Description of Artificial Sequence: Synthetic oligonucleotide
  Sense strand starting at position 3971 of SEQ ID NO: 914315
acaugaccuugugugaaag

SEQ ID NO: 994703 - RNA, 19 nt, Artificial Sequence
  Description of Artificial Sequence: Synthetic oligonucleotide
  Antisense strand to SEQ ID NO: 994702
cuuucacacaaggucaugu

SEQ ID NO: 994704 - RNA, 19 nt, Artificial Sequence
  Description of Artificial Sequence: Synthetic oligonucleotide
  Sense strand starting at position 3982 of SEQ ID NO: 914315
ugugaaaggcccuaagguu

SEQ ID NO: 994705 - RNA, 19 nt, Artificial Sequence
  Description of Artificial Sequence: Synthetic oligonucleotide
  Antisense strand to SEQ ID NO: 994704
aaccuuagggccuuucaca

SEQ ID NO: 994706 - RNA, 19 nt, Artificial Sequence
  Description of Artificial Sequence: Synthetic oligonucleotide
  Sense strand starting at position 63 of SEQ ID NO: 914316
cagggaucuguuuguaaag

SEQ ID NO: 994707 - RNA, 19 nt, Artificial Sequence
  Description of Artificial Sequence: Synthetic oligonucleotide
  Antisense strand to SEQ ID NO: 994706
cuuuacaaacagaucccug

SEQ ID NO: 994708 - RNA, 19 nt, Artificial Sequence
  Description of Artificial Sequence: Synthetic oligonucleotide
  Sense strand starting at position 150 of SEQ ID NO: 914316
ugagauaaauuguucucca

SEQ ID NO: 994709 - RNA, 19 nt, Artificial Sequence
  Description of Artificial Sequence: Synthetic oligonucleotide
  Antisense strand to SEQ ID NO: 994708
uggagaacaauuuaucuca

SEQ ID NO: 994710 - RNA, 19 nt, Artificial Sequence
  Description of Artificial Sequence: Synthetic oligonucleotide
  Sense strand starting at position 151 of SEQ ID NO: 914316
gagauaaauuguucuccag

SEQ ID NO: 994711 - RNA, 19 nt, Artificial Sequence
  Description of Artificial Sequence: Synthetic oligonucleotide
  Antisense strand to SEQ ID NO: 994710
cuggagaacaauuuaucuc

SEQ ID NO: 994712 - RNA, 19 nt, Artificial Sequence
  Description of Artificial Sequence: Synthetic oligonucleotide
  Sense strand starting at position 153 of SEQ ID NO: 914316
gauaaauuguucuccagag

SEQ ID NO: 994713 - RNA, 19 nt, Artificial Sequence
  Description of Artificial Sequence: Synthetic oligonucleotide
  Antisense strand to SEQ ID NO: 994712
cucuggagaacaauuuauc

SEQ ID NO: 994714 - RNA, 19 nt, Artificial Sequence
  Description of Artificial Sequence: Synthetic oligonucleotide
  Sense strand starting at position 154 of SEQ ID NO: 914316
auaaauuguucuccagagu

SEQ ID NO: 994715 - RNA, 19 nt, Artificial Sequence
  Description of Artificial Sequence: Synthetic oligonucleotide
  Antisense strand to SEQ ID NO: 994714
acucuggagaacaauuuau

SEQ ID NO: 994716 - RNA, 19 nt, Artificial Sequence
  Description of Artificial Sequence: Synthetic oligonucleotide
  Sense strand starting at position 171 of SEQ ID NO: 914316
guacacaaaucugugggua

SEQ ID NO: 994717 - RNA, 19 nt, Artificial Sequence
  Description of Artificial Sequence: Synthetic oligonucleotide
  Antisense strand to SEQ ID NO: 994716
uacccacagauuuguguac

SEQ ID NO: 994718 - RNA, 19 nt, Artificial Sequence
  Description of Artificial Sequence: Synthetic oligonucleotide
  Sense strand starting at position 172 of SEQ ID NO: 914316
uacacaaaucuguggguau

SEQ ID NO: 994719 - RNA, 19 nt, Artificial Sequence
  Description of Artificial Sequence: Synthetic oligonucleotide
  Antisense strand to SEQ ID NO: 994718
auacccacagauuugugua

SEQ ID NO: 994720 - RNA, 19 nt, Artificial Sequence
  Description of Artificial Sequence: Synthetic oligonucleotide
  Sense strand starting at position 174 of SEQ ID NO: 914316
cacaaaucuguggguaucu

SEQ ID NO: 994721 - RNA, 19 nt, Artificial Sequence
  Description of Artificial Sequence: Synthetic oligonucleotide
  Antisense strand to SEQ ID NO: 994720
agauacccacagauuugug

SEQ ID NO: 994722 - RNA, 19 nt, Artificial Sequence
  Description of Artificial Sequence: Synthetic oligonucleotide
  Sense strand starting at position 185 of SEQ ID NO: 914316
ggguaucuggaucauguua

SEQ ID NO: 994723 - RNA, 19 nt, Artificial Sequence
  Description of Artificial Sequence: Synthetic oligonucleotide
  Antisense strand to SEQ ID NO: 994722
uaacaugauccagauaccc

SEQ ID NO: 994724 - RNA, 19 nt, Artificial Sequence
  Description of Artificial Sequence: Synthetic oligonucleotide
  Sense strand starting at position 193 of SEQ ID NO: 914316
ggaucauguuaagucccaa

SEQ ID NO: 994725 - RNA, 19 nt, Artificial Sequence
  Description of Artificial Sequence: Synthetic oligonucleotide
  Antisense strand to SEQ ID NO: 994724
uugggacuuaacaugaucc

SEQ ID NO: 994726 - RNA, 19 nt, Artificial Sequence
  Description of Artificial Sequence: Synthetic oligonucleotide
  Sense strand starting at position 227 of SEQ ID NO: 914316
gugacacaacucuauguau

SEQ ID NO: 994727 - RNA, 19 nt, Artificial Sequence
  Description of Artificial Sequence: Synthetic oligonucleotide
  Antisense strand to SEQ ID NO: 994726
auacauagaguugugucac

SEQ ID NO: 994728 - RNA, 19 nt, Artificial Sequence
  Description of Artificial Sequence: Synthetic oligonucleotide
  Sense strand starting at position 378 of SEQ ID NO: 914316
agauuaccuuuaucugguu

SEQ ID NO: 994729 - RNA, 19 nt, Artificial Sequence
  Description of Artificial Sequence: Synthetic oligonucleotide
  Antisense strand to SEQ ID NO: 994728
aaccagauaaagguaaucu

SEQ ID NO: 994730 - RNA, 19 nt, Artificial Sequence
  Description of Artificial Sequence: Synthetic oligonucleotide
  Sense strand starting at position 383 of SEQ ID NO: 914316
accuuuaucugguuuauau

SEQ ID NO: 994731 - RNA, 19 nt, Artificial Sequence
  Description of Artificial Sequence: Synthetic oligonucleotide
  Antisense strand to SEQ ID NO: 994730
auauaaaccagauaaaggu

SEQ ID NO: 994732 - RNA, 19 nt, Artificial Sequence
  Description of Artificial Sequence: Synthetic oligonucleotide
  Sense strand starting at position 453 of SEQ ID NO: 914316
uuauuaauuccagggugua

SEQ ID NO: 994733 - RNA, 19 nt, Artificial Sequence
  Description of Artificial Sequence: Synthetic oligonucleotide
  Antisense strand to SEQ ID NO: 994732
uacacccuggaauuaauaa

SEQ ID NO: 994734 - RNA, 19 nt, Artificial Sequence
  Description of Artificial Sequence: Synthetic oligonucleotide
  Sense strand starting at position 454 of SEQ ID NO: 914316
uauuaauuccaggguguaa

SEQ ID NO: 994735 - RNA, 19 nt, Artificial Sequence
  Description of Artificial Sequence: Synthetic oligonucleotide
  Antisense strand to SEQ ID NO: 994734
uuacacccuggaauuaaua

SEQ ID NO: 994736 - RNA, 19 nt, Artificial Sequence
  Description of Artificial Sequence: Synthetic oligonucleotide
  Sense strand starting at position 456 of SEQ ID NO: 914316
uuaauuccaggguguaaac

SEQ ID NO: 994737 - RNA, 19 nt, Artificial Sequence
  Description of Artificial Sequence: Synthetic oligonucleotide
  Antisense strand to SEQ ID NO: 994736
guuuacacccuggaauuaa

SEQ ID NO: 994738 - RNA, 19 nt, Artificial Sequence
  Description of Artificial Sequence: Synthetic oligonucleotide
  Sense strand starting at position 576 of SEQ ID NO: 914316
ggcaaaccuguuugaugca

SEQ ID NO: 994739 - RNA, 19 nt, Artificial Sequence
  Description of Artificial Sequence: Synthetic oligonucleotide
  Antisense strand to SEQ ID NO: 994738
ugcaucaaacagguuugcc

SEQ ID NO: 994740 - RNA, 19 nt, Artificial Sequence
  Description of Artificial Sequence: Synthetic oligonucleotide
  Sense strand starting at position 600 of SEQ ID NO: 914316
uauaccugaggcugagaaa

SEQ ID NO: 994741 - RNA, 19 nt, Artificial Sequence
  Description of Artificial Sequence: Synthetic oligonucleotide
  Antisense strand to SEQ ID NO: 994740
uuucucagccucagguaua

SEQ ID NO: 994742 - RNA, 19 nt, Artificial Sequence
  Description of Artificial Sequence: Synthetic oligonucleotide
  Sense strand starting at position 673 of SEQ ID NO: 914316
uaucuaaaggguugucaau

SEQ ID NO: 994743 - RNA, 19 nt, Artificial Sequence
  Description of Artificial Sequence: Synthetic oligonucleotide
  Antisense strand to SEQ ID NO: 994742
auugacaacccuuuagaua

SEQ ID NO: 994744 - RNA, 19 nt, Artificial Sequence
  Description of Artificial Sequence: Synthetic oligonucleotide
  Sense strand starting at position 675 of SEQ ID NO: 914316
ucuaaaggguugucaauag

SEQ ID NO: 994745 - RNA, 19 nt, Artificial Sequence
  Description of Artificial Sequence: Synthetic oligonucleotide
  Antisense strand to SEQ ID NO: 994744
cuauugacaacccuuuaga

SEQ ID NO: 994746 - RNA, 19 nt, Artificial Sequence
  Description of Artificial Sequence: Synthetic oligonucleotide
  Sense strand starting at position 924 of SEQ ID NO: 914316
gagugaugucagcaguucu

SEQ ID NO: 994747 - RNA, 19 nt, Artificial Sequence
  Description of Artificial Sequence: Synthetic oligonucleotide
  Antisense strand to SEQ ID NO: 994746
agaacugcugacaucacuc

SEQ ID NO: 994748 - RNA, 19 nt, Artificial Sequence
  Description of Artificial Sequence: Synthetic oligonucleotide
  Sense strand starting at position 1020 of SEQ ID NO: 914316
gcaaguaacuggucucgga

SEQ ID NO: 994749 - RNA, 19 nt, Artificial Sequence
  Description of Artificial Sequence: Synthetic oligonucleotide
  Antisense strand to SEQ ID NO: 994748
uccgagaccaguuacuugc

SEQ ID NO: 994750 - RNA, 19 nt, Artificial Sequence
  Description of Artificial Sequence: Synthetic oligonucleotide
  Sense strand starting at position 1151 of SEQ ID NO: 914316
ucuggaaccugcucacauu

SEQ ID NO: 994751 - RNA, 19 nt, Artificial Sequence
  Description of Artificial Sequence: Synthetic oligonucleotide
  Antisense strand to SEQ ID NO: 994750
aaugugagcagguuccaga

SEQ ID NO: 994752 - RNA, 19 nt, Artificial Sequence
  Description of Artificial Sequence: Synthetic oligonucleotide
  Sense strand starting at position 1226 of SEQ ID NO: 914316
gugaguucugcggaaguag

SEQ ID NO: 994753 - RNA, 19 nt, Artificial Sequence
  Description of Artificial Sequence: Synthetic oligonucleotide
  Antisense strand to SEQ ID NO: 994752
cuacuuccgcagaacucac

SEQ ID NO: 994754 - RNA, 19 nt, Artificial Sequence
  Description of Artificial Sequence: Synthetic oligonucleotide
  Sense strand starting at position 1267 of SEQ ID NO: 914316
gguccuauacauuaguguu

SEQ ID NO: 994755 - RNA, 19 nt, Artificial Sequence
  Description of Artificial Sequence: Synthetic oligonucleotide
  Antisense strand to SEQ ID NO: 994754
aacacuaauguauaggacc

SEQ ID NO: 994756 - RNA, 19 nt, Artificial Sequence
  Description of Artificial Sequence: Synthetic oligonucleotide
  Sense strand starting at position 1405 of SEQ ID NO: 914316
ggagacaagcucugauuaa

SEQ ID NO: 994757 - RNA, 19 nt, Artificial Sequence
  Description of Artificial Sequence: Synthetic oligonucleotide
  Antisense strand to SEQ ID NO: 994756
uuaaucagagcuugucucc

SEQ ID NO: 994758 - RNA, 19 nt, Artificial Sequence
  Description of Artificial Sequence: Synthetic oligonucleotide
  Sense strand starting at position 1538 of SEQ ID NO: 914316
gaaguucucgcagagcaaa

SEQ ID NO: 994759 - RNA, 19 nt, Artificial Sequence
  Description of Artificial Sequence: Synthetic oligonucleotide
  Antisense strand to SEQ ID NO: 994758
uuugcucugcgagaacuuc

SEQ ID NO: 994760 - RNA, 19 nt, Artificial Sequence
  Description of Artificial Sequence: Synthetic oligonucleotide
  Sense strand starting at position 2206 of SEQ ID NO: 914316
uggcacagccacuauuauu

SEQ ID NO: 994761 - RNA, 19 nt, Artificial Sequence
  Description of Artificial Sequence: Synthetic oligonucleotide
  Antisense strand to SEQ ID NO: 994760
aauaauaguggcugugcca

SEQ ID NO: 994762 - RNA, 19 nt, Artificial Sequence
  Description of Artificial Sequence: Synthetic oligonucleotide
  Sense strand starting at position 2233 of SEQ ID NO: 914316
aggauaaccugugugccua

SEQ ID NO: 994763 - RNA, 19 nt, Artificial Sequence
  Description of Artificial Sequence: Synthetic oligonucleotide
  Antisense strand to SEQ ID NO: 994762
uaggcacacagguuauccu

SEQ ID NO: 994764 - RNA, 19 nt, Artificial Sequence
  Description of Artificial Sequence: Synthetic oligonucleotide
  Sense strand starting at position 2234 of SEQ ID NO: 914316
ggauaaccugugugccuaa

SEQ ID NO: 994765 - RNA, 19 nt, Artificial Sequence
  Description of Artificial Sequence: Synthetic oligonucleotide
  Antisense strand to SEQ ID NO: 994764
uuaggcacacagguuaucc

SEQ ID NO: 994766 - RNA, 19 nt, Artificial Sequence
  Description of Artificial Sequence: Synthetic oligonucleotide
  Sense strand starting at position 2731 of SEQ ID NO: 914316
ggcuaauaugcacauuaag

SEQ ID NO: 994767 - RNA, 19 nt, Artificial Sequence
  Description of Artificial Sequence: Synthetic oligonucleotide
  Antisense strand to SEQ ID NO: 994766
cuuaaugugcauauuagcc

SEQ ID NO: 994768 - RNA, 19 nt, Artificial Sequence
  Description of Artificial Sequence: Synthetic oligonucleotide
  Sense strand starting at position 2753 of SEQ ID NO: 914316
uguugaauauccuuaggga

SEQ ID NO: 994769 - RNA, 19 nt, Artificial Sequence
  Description of Artificial Sequence: Synthetic oligonucleotide
  Antisense strand to SEQ ID NO: 994768
ucccuaaggauauucaaca

SEQ ID NO: 994770 - RNA, 19 nt, Artificial Sequence
  Description of Artificial Sequence: Synthetic oligonucleotide
  Sense strand starting at position 2825 of SEQ ID NO: 914316
ucauaauaauuguugguga

SEQ ID NO: 994771 - RNA, 19 nt, Artificial Sequence
  Description of Artificial Sequence: Synthetic oligonucleotide
  Antisense strand to SEQ ID NO: 994770
ucaccaacaauuauuauga

SEQ ID NO: 994772 - RNA, 19 nt, Artificial Sequence
  Description of Artificial Sequence: Synthetic oligonucleotide
  Sense strand starting at position 2836 of SEQ ID NO: 914316
guuggugaggaugaaugua

SEQ ID NO: 994773 - RNA, 19 nt, Artificial Sequence
  Description of Artificial Sequence: Synthetic oligonucleotide
  Antisense strand to SEQ ID NO: 994772
uacauucauccucaccaac

SEQ ID NO: 994774 - RNA, 19 nt, Artificial Sequence
  Description of Artificial Sequence: Synthetic oligonucleotide
  Sense strand starting at position 3240 of SEQ ID NO: 914316
cagaaacuagcuuagugau

SEQ ID NO: 994775 - RNA, 19 nt, Artificial Sequence
  Description of Artificial Sequence: Synthetic oligonucleotide
  Antisense strand to SEQ ID NO: 994774
aucacuaagcuaguuucug

SEQ ID NO: 994776 - RNA, 19 nt, Artificial Sequence
  Description of Artificial Sequence: Synthetic oligonucleotide
  Sense strand starting at position 3291 of SEQ ID NO: 914316
gugacaguuaauuagugua

SEQ ID NO: 994777 - RNA, 19 nt, Artificial Sequence
  Description of Artificial Sequence: Synthetic oligonucleotide
  Antisense strand to SEQ ID NO: 994776
uacacuaauuaacugucac

SEQ ID NO: 994778 - RNA, 19 nt, Artificial Sequence
  Description of Artificial Sequence: Synthetic oligonucleotide
  Sense strand starting at position 3713 of SEQ ID NO: 914316
ucauguuauuucuuguaug

SEQ ID NO: 994779 - RNA, 19 nt, Artificial Sequence
  Description of Artificial Sequence: Synthetic oligonucleotide
  Antisense strand to SEQ ID NO: 994778
cauacaagaaauaacauga

SEQ ID NO: 994780 - RNA, 19 nt, Artificial Sequence
  Description of Artificial Sequence: Synthetic oligonucleotide
  Sense strand starting at position 3766 of SEQ ID NO: 914316
aguaguucuuccuuaaauc

SEQ ID NO: 994781 - RNA, 19 nt, Artificial Sequence
  Description of Artificial Sequence: Synthetic oligonucleotide
  Antisense strand to SEQ ID NO: 994780
gauuuaaggaagaacuacu

SEQ ID NO: 994782 - RNA, 19 nt, Artificial Sequence
  Description of Artificial Sequence: Synthetic oligonucleotide
  Sense strand starting at position 3767 of SEQ ID NO: 914316
guaguucuuccuuaaauca

SEQ ID NO: 994783 - RNA, 19 nt, Artificial Sequence
  Description of Artificial Sequence: Synthetic oligonucleotide
  Antisense strand to SEQ ID NO: 994782
ugauuuaaggaagaacuac

SEQ ID NO: 994784 - RNA, 19 nt, Artificial Sequence
  Description of Artificial Sequence: Synthetic oligonucleotide
  Sense strand starting at position 3835 of SEQ ID NO: 914316
ccuguauguccacaauuaa

SEQ ID NO: 994785 - RNA, 19 nt, Artificial Sequence
  Description of Artificial Sequence: Synthetic oligonucleotide
  Antisense strand to SEQ ID NO: 994784
uuaauuguggacauacagg

SEQ ID NO: 994786 - RNA, 19 nt, Artificial Sequence
  Description of Artificial Sequence: Synthetic oligonucleotide
  Sense strand starting at position 98 of SEQ ID NO: 914317
ggaucuucucccgguacau

SEQ ID NO: 994787 - RNA, 19 nt, Artificial Sequence
  Description of Artificial Sequence: Synthetic oligonucleotide
  Antisense strand to SEQ ID NO: 994786
auguaccgggagaagaucc

SEQ ID NO: 994788 - RNA, 19 nt, Artificial Sequence
  Description of Artificial Sequence: Synthetic oligonucleotide
  Sense strand starting at position 128 of SEQ ID NO: 914317
ggcuauuauauuugguguu

SEQ ID NO: 994789 - RNA, 19 nt, Artificial Sequence
  Description of Artificial Sequence: Synthetic oligonucleotide
  Antisense strand to SEQ ID NO: 994788
aacaccaaauauaauagcc

SEQ ID NO: 994790 - RNA, 19 nt, Artificial Sequence
  Description of Artificial Sequence: Synthetic oligonucleotide
  Sense strand starting at position 237 of SEQ ID NO: 914317
aggaaacguguuggcugua

SEQ ID NO: 994791 - RNA, 19 nt, Artificial Sequence
  Description of Artificial Sequence: Synthetic oligonucleotide
  Antisense strand to SEQ ID NO: 994790
uacagccaacacguuuccu

SEQ ID NO: 994792 - RNA, 19 nt, Artificial Sequence
  Description of Artificial Sequence: Synthetic oligonucleotide
  Sense strand starting at position 240 of SEQ ID NO: 914317
aaacguguuggcuguagga

SEQ ID NO: 994793 - RNA, 19 nt, Artificial Sequence
  Description of Artificial Sequence: Synthetic oligonucleotide
  Antisense strand to SEQ ID NO: 994792
uccuacagccaacacguuu

SEQ ID NO: 994794 - RNA, 19 nt, Artificial Sequence
  Description of Artificial Sequence: Synthetic oligonucleotide
  Sense strand starting at position 242 of SEQ ID NO: 914317
acguguuggcuguaggaga

SEQ ID NO: 994795 - RNA, 19 nt, Artificial Sequence
  Description of Artificial Sequence: Synthetic oligonucleotide
  Antisense strand to SEQ ID NO: 994794
ucuccuacagccaacacgu

SEQ ID NO: 994796 - RNA, 19 nt, Artificial Sequence
  Description of Artificial Sequence: Synthetic oligonucleotide
  Sense strand starting at position 256 of SEQ ID NO: 914317
ggagacaucuccuuaugac

SEQ ID NO: 994797 - RNA, 19 nt, Artificial Sequence
  Description of Artificial Sequence: Synthetic oligonucleotide
  Antisense strand to SEQ ID NO: 994796
gucauaaggagaugucucc

SEQ ID NO: 994798 - RNA, 19 nt, Artificial Sequence
  Description of Artificial Sequence: Synthetic oligonucleotide
  Sense strand starting at position 265 of SEQ ID NO: 914317
uccuuaugacagcgaaguu

SEQ ID NO: 994799 - RNA, 19 nt, Artificial Sequence
  Description of Artificial Sequence: Synthetic oligonucleotide
  Antisense strand to SEQ ID NO: 994798
aacuucgcugucauaagga

SEQ ID NO: 994800 - RNA, 19 nt, Artificial Sequence
  Description of Artificial Sequence: Synthetic oligonucleotide
  Sense strand starting at position 266 of SEQ ID NO: 914317
ccuuaugacagcgaaguua

SEQ ID NO: 994801 - RNA, 19 nt, Artificial Sequence
  Description of Artificial Sequence: Synthetic oligonucleotide
  Antisense strand to SEQ ID NO: 994800
uaacuucgcugucauaagg

SEQ ID NO: 994802 - RNA, 19 nt, Artificial Sequence
  Description of Artificial Sequence: Synthetic oligonucleotide
  Sense strand starting at position 277 of SEQ ID NO: 914317
cgaaguuauuaucuauaca

SEQ ID NO: 994803 - RNA, 19 nt, Artificial Sequence
  Description of Artificial Sequence: Synthetic oligonucleotide
  Antisense strand to SEQ ID NO: 994802
uguauagauaauaacuucg

SEQ ID NO: 994804 - RNA, 19 nt, Artificial Sequence
  Description of Artificial Sequence: Synthetic oligonucleotide
  Sense strand starting at position 328 of SEQ ID NO: 914317
gagauaaaguuucucgaaa

SEQ ID NO: 994805 - RNA, 19 nt, Artificial Sequence
  Description of Artificial Sequence: Synthetic oligonucleotide
  Antisense strand to SEQ ID NO: 994804
uuucgagaaacuuuaucuc

SEQ ID NO: 994806 - RNA, 19 nt, Artificial Sequence
  Description of Artificial Sequence: Synthetic oligonucleotide
  Sense strand starting at position 329 of SEQ ID NO: 914317
agauaaaguuucucgaaau

SEQ ID NO: 994807 - RNA, 19 nt, Artificial Sequence
  Description of Artificial Sequence: Synthetic oligonucleotide
  Antisense strand to SEQ ID NO: 994806
auuucgagaaacuuuaucu

SEQ ID NO: 994808 - RNA, 19 nt, Artificial Sequence
  Description of Artificial Sequence: Synthetic oligonucleotide
  Sense strand starting at position 370 of SEQ ID NO: 914317
cgggccauccucugauaug

SEQ ID NO: 994809 - RNA, 19 nt, Artificial Sequence
  Description of Artificial Sequence: Synthetic oligonucleotide
  Antisense strand to SEQ ID NO: 994808
cauaucagaggauggcccg

SEQ ID NO: 994810 - RNA, 19 nt, Artificial Sequence
  Description of Artificial Sequence: Synthetic oligonucleotide
  Sense strand starting at position 379 of SEQ ID NO: 914317
cucugauaugacugaaguc

SEQ ID NO: 994811 - RNA, 19 nt, Artificial Sequence
  Description of Artificial Sequence: Synthetic oligonucleotide
  Antisense strand to SEQ ID NO: 994810
gacuucagucauaucagag

SEQ ID NO: 994812 - RNA, 19 nt, Artificial Sequence
  Description of Artificial Sequence: Synthetic oligonucleotide
  Sense strand starting at position 528 of SEQ ID NO: 914317
ugcccaguuuaauuggaau

SEQ ID NO: 994813 - RNA, 19 nt, Artificial Sequence
  Description of Artificial Sequence: Synthetic oligonucleotide
  Antisense strand to SEQ ID NO: 994812
auuccaauuaaacugggca

SEQ ID NO: 994814 - RNA, 19 nt, Artificial Sequence
  Description of Artificial Sequence: Synthetic oligonucleotide
  Sense strand starting at position 596 of SEQ ID NO: 914317
auagcuuauggugguguua

SEQ ID NO: 994815 - RNA, 19 nt, Artificial Sequence
  Description of Artificial Sequence: Synthetic oligonucleotide
  Antisense strand to SEQ ID NO: 994814
uaacaccaccauaagcuau

SEQ ID NO: 994816 - RNA, 19 nt, Artificial Sequence
  Description of Artificial Sequence: Synthetic oligonucleotide
  Sense strand starting at position 605 of SEQ ID NO: 914317
ggugguguuauagaacaga

SEQ ID NO: 994817 - RNA, 19 nt, Artificial Sequence
  Description of Artificial Sequence: Synthetic oligonucleotide
  Antisense strand to SEQ ID NO: 994816
ucuguucuauaacaccacc

SEQ ID NO: 994818 - RNA, 19 nt, Artificial Sequence
  Description of Artificial Sequence: Synthetic oligonucleotide
  Sense strand starting at position 654 of SEQ ID NO: 914317
cucuuagggagucgugcaa

SEQ ID NO: 994819 - RNA, 19 nt, Artificial Sequence
  Description of Artificial Sequence: Synthetic oligonucleotide
  Antisense strand to SEQ ID NO: 994818
uugcacgacucccuaagag

SEQ ID NO: 994820 - RNA, 19 nt, Artificial Sequence
  Description of Artificial Sequence: Synthetic oligonucleotide
  Sense strand starting at position 658 of SEQ ID NO: 914317
uagggagucgugcaaaguu

SEQ ID NO: 994821 - RNA, 19 nt, Artificial Sequence
  Description of Artificial Sequence: Synthetic oligonucleotide
  Antisense strand to SEQ ID NO: 994820
aacuuugcacgacucccua

SEQ ID NO: 994822 - RNA, 19 nt, Artificial Sequence
  Description of Artificial Sequence: Synthetic oligonucleotide
  Sense strand starting at position 661 of SEQ ID NO: 914317
ggagucgugcaaaguuagu

SEQ ID NO: 994823 - RNA, 19 nt, Artificial Sequence
  Description of Artificial Sequence: Synthetic oligonucleotide
  Antisense strand to SEQ ID NO: 994822
acuaacuuugcacgacucc

SEQ ID NO: 994824 - RNA, 19 nt, Artificial Sequence
  Description of Artificial Sequence: Synthetic oligonucleotide
  Sense strand starting at position 713 of SEQ ID NO: 914317
gaaggagcuuuaccgcauu

SEQ ID NO: 994825 - RNA, 19 nt, Artificial Sequence
  Description of Artificial Sequence: Synthetic oligonucleotide
  Antisense strand to SEQ ID NO: 994824
aaugcgguaaagcuccuuc

SEQ ID NO: 994826 - RNA, 19 nt, Artificial Sequence
  Description of Artificial Sequence: Synthetic oligonucleotide
  Sense strand starting at position 828 of SEQ ID NO: 914317
agcagauaccagcaggauu

SEQ ID NO: 994827 - RNA, 19 nt, Artificial Sequence
  Description of Artificial Sequence: Synthetic oligonucleotide
  Antisense strand to SEQ ID NO: 994826
aauccugcugguaucugcu

SEQ ID NO: 994828 - RNA, 19 nt, Artificial Sequence
  Description of Artificial Sequence: Synthetic oligonucleotide
  Sense strand starting at position 1065 of SEQ ID NO: 914317
gucacagucucacuagaga

SEQ ID NO: 994829 - RNA, 19 nt, Artificial Sequence
  Description of Artificial Sequence: Synthetic oligonucleotide
  Antisense strand to SEQ ID NO: 994828
ucucuagugagacugugac

SEQ ID NO: 994830 - RNA, 19 nt, Artificial Sequence
  Description of Artificial Sequence: Synthetic oligonucleotide
  Sense strand starting at position 1080 of SEQ ID NO: 914317
gagacauacuggucuaaca

SEQ ID NO: 994831 - RNA, 19 nt, Artificial Sequence
  Description of Artificial Sequence: Synthetic oligonucleotide
  Antisense strand to SEQ ID NO: 994830
uguuagaccaguaugucuc

SEQ ID NO: 994832 - RNA, 19 nt, Artificial Sequence
  Description of Artificial Sequence: Synthetic oligonucleotide
  Sense strand starting at position 1671 of SEQ ID NO: 914317
cugcgcgaagccucuuaaa

SEQ ID NO: 994833 - RNA, 19 nt, Artificial Sequence
  Description of Artificial Sequence: Synthetic oligonucleotide
  Antisense strand to SEQ ID NO: 994832
uuuaagaggcuucgcgcag

SEQ ID NO: 994834 - RNA, 19 nt, Artificial Sequence
  Description of Artificial Sequence: Synthetic oligonucleotide
  Sense strand starting at position 1854 of SEQ ID NO: 914317
gaguccgaucuggaccaau

SEQ ID NO: 994835 - RNA, 19 nt, Artificial Sequence
  Description of Artificial Sequence: Synthetic oligonucleotide
  Antisense strand to SEQ ID NO: 994834
auugguccagaucggacuc

SEQ ID NO: 994836 - RNA, 19 nt, Artificial Sequence
  Description of Artificial Sequence: Synthetic oligonucleotide
  Sense strand starting at position 2118 of SEQ ID NO: 914317
uaaggauuaggcugcccaa

SEQ ID NO: 994837 - RNA, 19 nt, Artificial Sequence
  Description of Artificial Sequence: Synthetic oligonucleotide
  Antisense strand to SEQ ID NO: 994836
uugggcagccuaauccuua

SEQ ID NO: 994838 - RNA, 19 nt, Artificial Sequence
  Description of Artificial Sequence: Synthetic oligonucleotide
  Sense strand starting at position 2121 of SEQ ID NO: 914317
ggauuaggcugcccaaaca

SEQ ID NO: 994839 - RNA, 19 nt, Artificial Sequence
  Description of Artificial Sequence: Synthetic oligonucleotide
  Antisense strand to SEQ ID NO: 994838
uguuugggcagccuaaucc

SEQ ID NO: 994840 - RNA, 19 nt, Artificial Sequence
  Description of Artificial Sequence: Synthetic oligonucleotide
  Sense strand starting at position 2245 of SEQ ID NO: 914317
ccagauuaguaucucgaag

SEQ ID NO: 994841 - RNA, 19 nt, Artificial Sequence
  Description of Artificial Sequence: Synthetic oligonucleotide
  Antisense strand to SEQ ID NO: 994840
cuucgagauacuaaucugg

SEQ ID NO: 994842 - RNA, 19 nt, Artificial Sequence
  Description of Artificial Sequence: Synthetic oligonucleotide
  Sense strand starting at position 2434 of SEQ ID NO: 914317
uuuaauacacgcuagaaca

SEQ ID NO: 994843 - RNA, 19 nt, Artificial Sequence
  Description of Artificial Sequence: Synthetic oligonucleotide
  Antisense strand to SEQ ID NO: 994842
uguucuagcguguauuaaa

SEQ ID NO: 994844 - RNA, 19 nt, Artificial Sequence
  Description of Artificial Sequence: Synthetic oligonucleotide
  Sense strand starting at position 2772 of SEQ ID NO: 914317
guggguaaacguugcagaa

SEQ ID NO: 994845 - RNA, 19 nt, Artificial Sequence
  Description of Artificial Sequence: Synthetic oligonucleotide
  Antisense strand to SEQ ID NO: 994844
uucugcaacguuuacccac

SEQ ID NO: 994846 - RNA, 19 nt, Artificial Sequence
  Description of Artificial Sequence: Synthetic oligonucleotide
  Sense strand starting at position 2933 of SEQ ID NO: 914317
gggauuggucacugccagu

SEQ ID NO: 994847 - RNA, 19 nt, Artificial Sequence
  Description of Artificial Sequence: Synthetic oligonucleotide
  Antisense strand to SEQ ID NO: 994846
acuggcagugaccaauccc

SEQ ID NO: 994848 - RNA, 19 nt, Artificial Sequence
  Description of Artificial Sequence: Synthetic oligonucleotide
  Sense strand starting at position 2998 of SEQ ID NO: 914317
gggaugguguggucccaga

SEQ ID NO: 994849 - RNA, 19 nt, Artificial Sequence
  Description of Artificial Sequence: Synthetic oligonucleotide
  Antisense strand to SEQ ID NO: 994848
ucugggaccacaccauccc

SEQ ID NO: 994850 - RNA, 19 nt, Artificial Sequence
  Description of Artificial Sequence: Synthetic oligonucleotide
  Sense strand starting at position 3108 of SEQ ID NO: 914317
gcuaucuggaccuggaaca

SEQ ID NO: 994851 - RNA, 19 nt, Artificial Sequence
  Description of Artificial Sequence: Synthetic oligonucleotide
  Antisense strand to SEQ ID NO: 994850
uguuccagguccagauagc

SEQ ID NO: 994852 - RNA, 19 nt, Artificial Sequence
  Description of Artificial Sequence: Synthetic oligonucleotide
  Sense strand starting at position 3147 of SEQ ID NO: 914317
gcccuuaagaaguggguau

SEQ ID NO: 994853 - RNA, 19 nt, Artificial Sequence
  Description of Artificial Sequence: Synthetic oligonucleotide
  Antisense strand to SEQ ID NO: 994852
auacccacuucuuaagggc

SEQ ID NO: 994854 - RNA, 19 nt, Artificial Sequence
  Description of Artificial Sequence: Synthetic oligonucleotide
  Sense strand starting at position 3148 of SEQ ID NO: 914317
cccuuaagaaguggguauu

SEQ ID NO: 994855 - RNA, 19 nt, Artificial Sequence
  Description of Artificial Sequence: Synthetic oligonucleotide
  Antisense strand to SEQ ID NO: 994854
aauacccacuucuuaaggg

SEQ ID NO: 994856 - RNA, 19 nt, Artificial Sequence
  Description of Artificial Sequence: Synthetic oligonucleotide
  Sense strand starting at position 3270 of SEQ ID NO: 914317
uggccagcguagucauaga

SEQ ID NO: 994857 - RNA, 19 nt, Artificial Sequence
  Description of Artificial Sequence: Synthetic oligonucleotide
  Antisense strand to SEQ ID NO: 994856
ucuaugacuacgcuggcca

SEQ ID NO: 994858 - RNA, 19 nt, Artificial Sequence
  Description of Artificial Sequence: Synthetic oligonucleotide
  Sense strand starting at position 3466 of SEQ ID NO: 914317
gggagagucaggugaggua

SEQ ID NO: 994859 - RNA, 19 nt, Artificial Sequence
  Description of Artificial Sequence: Synthetic oligonucleotide
  Antisense strand to SEQ ID NO: 994858
uaccucaccugacucuccc

SEQ ID NO: 994860 - RNA, 19 nt, Artificial Sequence
  Description of Artificial Sequence: Synthetic oligonucleotide
  Sense strand starting at position 3580 of SEQ ID NO: 914317
gugggaaaugcccagcaaa

SEQ ID NO: 994861 - RNA, 19 nt, Artificial Sequence
  Description of Artificial Sequence: Synthetic oligonucleotide
  Antisense strand to SEQ ID NO: 994860
uuugcugggcauuucccac

SEQ ID NO: 994862 - RNA, 19 nt, Artificial Sequence
  Description of Artificial Sequence: Synthetic oligonucleotide
  Sense strand starting at position 3583 of SEQ ID NO: 914317
ggaaaugcccagcaaaucu

SEQ ID NO: 994863 - RNA, 19 nt, Artificial Sequence
  Description of Artificial Sequence: Synthetic oligonucleotide
  Antisense strand to SEQ ID NO: 994862
agauuugcugggcauuucc

SEQ ID NO: 994864 - RNA, 19 nt, Artificial Sequence
  Description of Artificial Sequence: Synthetic oligonucleotide
  Sense strand starting at position 3798 of SEQ ID NO: 914317
ugcggugccaucucuugua

SEQ ID NO: 994865 - RNA, 19 nt, Artificial Sequence
  Description of Artificial Sequence: Synthetic oligonucleotide
  Antisense strand to SEQ ID NO: 994864
uacaagagauggcaccgca

SEQ ID NO: 994866 - RNA, 19 nt, Artificial Sequence
  Description of Artificial Sequence: Synthetic oligonucleotide
  Sense strand starting at position 80 of SEQ ID NO: 914318
gggucaugauaacaagaaa

SEQ ID NO: 994867 - RNA, 19 nt, Artificial Sequence
  Description of Artificial Sequence: Synthetic oligonucleotide
  Antisense strand to SEQ ID NO: 994866
uuucuuguuaucaugaccc

SEQ ID NO: 994868 - RNA, 19 nt, Artificial Sequence
  Description of Artificial Sequence: Synthetic oligonucleotide
  Sense strand starting at position 92 of SEQ ID NO: 914318
caagaaaccugguugcauu

SEQ ID NO: 994869 - RNA, 19 nt, Artificial Sequence
  Description of Artificial Sequence: Synthetic oligonucleotide
  Antisense strand to SEQ ID NO: 994868
aaugcaaccagguuucuug

SEQ ID NO: 994870 - RNA, 19 nt, Artificial Sequence
  Description of Artificial Sequence: Synthetic oligonucleotide
  Sense strand starting at position 103 of SEQ ID NO: 914318
guugcauucccauguggaa

SEQ ID NO: 994871 - RNA, 19 nt, Artificial Sequence
  Description of Artificial Sequence: Synthetic oligonucleotide
  Antisense strand to SEQ ID NO: 994870
uuccacaugggaaugcaac

SEQ ID NO: 994872 - RNA, 19 nt, Artificial Sequence
  Description of Artificial Sequence: Synthetic oligonucleotide
  Sense strand starting at position 115 of SEQ ID NO: 914318
uguggaaucuuagugugag

SEQ ID NO: 994873 - RNA, 19 nt, Artificial Sequence
  Description of Artificial Sequence: Synthetic oligonucleotide
  Antisense strand to SEQ ID NO: 994872
cucacacuaagauuccaca

SEQ ID NO: 994874 - RNA, 19 nt, Artificial Sequence
  Description of Artificial Sequence: Synthetic oligonucleotide
  Sense strand starting at position 118 of SEQ ID NO: 914318
ggaaucuuagugugagauu

SEQ ID NO: 994875 - RNA, 19 nt, Artificial Sequence
  Description of Artificial Sequence: Synthetic oligonucleotide
  Antisense strand to SEQ ID NO: 994874
aaucucacacuaagauucc

SEQ ID NO: 994876 - RNA, 19 nt, Artificial Sequence
  Description of Artificial Sequence: Synthetic oligonucleotide
  Sense strand starting at position 140 of SEQ ID NO: 914318
ggcuguuuguuccucuaaa

SEQ ID NO: 994877 - RNA, 19 nt, Artificial Sequence
  Description of Artificial Sequence: Synthetic oligonucleotide
  Antisense strand to SEQ ID NO: 994876
uuuagaggaacaaacagcc

SEQ ID NO: 994878 - RNA, 19 nt, Artificial Sequence
  Description of Artificial Sequence: Synthetic oligonucleotide
  Sense strand starting at position 141 of SEQ ID NO: 914318
gcuguuuguuccucuaaac

SEQ ID NO: 994879 - RNA, 19 nt, Artificial Sequence
  Description of Artificial Sequence: Synthetic oligonucleotide
  Antisense strand to SEQ ID NO: 994878
guuuagaggaacaaacagc

SEQ ID NO: 994880 - RNA, 19 nt, Artificial Sequence
  Description of Artificial Sequence: Synthetic oligonucleotide
  Sense strand starting at position 467 of SEQ ID NO: 914318
agauuccuguuucugaaca

SEQ ID NO: 994881 - RNA, 19 nt, Artificial Sequence
  Description of Artificial Sequence: Synthetic oligonucleotide
  Antisense strand to SEQ ID NO: 994880
uguucagaaacaggaaucu

SEQ ID NO: 994882 - RNA, 19 nt, Artificial Sequence
  Description of Artificial Sequence: Synthetic oligonucleotide
  Sense strand starting at position 777 of SEQ ID NO: 914318
gugagaaccuaggauuuau

SEQ ID NO: 994883 - RNA, 19 nt, Artificial Sequence
  Description of Artificial Sequence: Synthetic oligonucleotide
  Antisense strand to SEQ ID NO: 994882
auaaauccuagguucucac

SEQ ID NO: 994884 - RNA, 19 nt, Artificial Sequence
  Description of Artificial Sequence: Synthetic oligonucleotide
  Sense strand starting at position 934 of SEQ ID NO: 914318
guccgucauggcuaggaaa

SEQ ID NO: 994885 - RNA, 19 nt, Artificial Sequence
  Description of Artificial Sequence: Synthetic oligonucleotide
  Antisense strand to SEQ ID NO: 994884
uuuccuagccaugacggac

SEQ ID NO: 994886 - RNA, 19 nt, Artificial Sequence
  Description of Artificial Sequence: Synthetic oligonucleotide
  Sense strand starting at position 946 of SEQ ID NO: 914318
uaggaaagguauuggagua

SEQ ID NO: 994887 - RNA, 19 nt, Artificial Sequence
  Description of Artificial Sequence: Synthetic oligonucleotide
  Antisense strand to SEQ ID NO: 994886
uacuccaauaccuuuccua

SEQ ID NO: 994888 - RNA, 19 nt, Artificial Sequence
  Description of Artificial Sequence: Synthetic oligonucleotide
  Sense strand starting at position 1016 of SEQ ID NO: 914318
uggccagcacucuagaaga

SEQ ID NO: 994889 - RNA, 19 nt, Artificial Sequence
  Description of Artificial Sequence: Synthetic oligonucleotide
  Antisense strand to SEQ ID NO: 994888
ucuucuagagugcuggcca

SEQ ID NO: 994890 - RNA, 19 nt, Artificial Sequence
  Description of Artificial Sequence: Synthetic oligonucleotide
  Sense strand starting at position 1036 of SEQ ID NO: 914318
ggaggccuccucugucauu

SEQ ID NO: 994891 - RNA, 19 nt, Artificial Sequence
  Description of Artificial Sequence: Synthetic oligonucleotide
  Antisense strand to SEQ ID NO: 994890
aaugacagaggaggccucc

SEQ ID NO: 994892 - RNA, 19 nt, Artificial Sequence
  Description of Artificial Sequence: Synthetic oligonucleotide
  Sense strand starting at position 1037 of SEQ ID NO: 914318
gaggccuccucugucauuu

SEQ ID NO: 994893 - RNA, 19 nt, Artificial Sequence
  Description of Artificial Sequence: Synthetic oligonucleotide
  Antisense strand to SEQ ID NO: 994892
aaaugacagaggaggccuc

SEQ ID NO: 994894 - RNA, 19 nt, Artificial Sequence
  Description of Artificial Sequence: Synthetic oligonucleotide
  Sense strand starting at position 1168 of SEQ ID NO: 914318
cacggugucuucucacaag

SEQ ID NO: 994895 - RNA, 19 nt, Artificial Sequence
  Description of Artificial Sequence: Synthetic oligonucleotide
  Antisense strand to SEQ ID NO: 994894
cuugugagaagacaccgug

SEQ ID NO: 994896 - RNA, 19 nt, Artificial Sequence
  Description of Artificial Sequence: Synthetic oligonucleotide
  Sense strand starting at position 1209 of SEQ ID NO: 914318
ggugauuauuucuacacuc

SEQ ID NO: 994897 - RNA, 19 nt, Artificial Sequence
  Description of Artificial Sequence: Synthetic oligonucleotide
  Antisense strand to SEQ ID NO: 994896
gaguguagaaauaaucacc

SEQ ID NO: 994898 - RNA, 19 nt, Artificial Sequence
  Description of Artificial Sequence: Synthetic oligonucleotide
  Sense strand starting at position 1264 of SEQ ID NO: 914318
aggcacuauuugugacaau

SEQ ID NO: 994899 - RNA, 19 nt, Artificial Sequence
  Description of Artificial Sequence: Synthetic oligonucleotide
  Antisense strand to SEQ ID NO: 994898
auugucacaaauagugccu

SEQ ID NO: 994900 - RNA, 19 nt, Artificial Sequence
  Description of Artificial Sequence: Synthetic oligonucleotide
  Sense strand starting at position 1265 of SEQ ID NO: 914318
ggcacuauuugugacaaug

SEQ ID NO: 994901 - RNA, 19 nt, Artificial Sequence
  Description of Artificial Sequence: Synthetic oligonucleotide
  Antisense strand to SEQ ID NO: 994900
cauugucacaaauagugcc

SEQ ID NO: 994902 - RNA, 19 nt, Artificial Sequence
  Description of Artificial Sequence: Synthetic oligonucleotide
  Sense strand starting at position 1300 of SEQ ID NO: 914318
gagggaaagucugcucucu

SEQ ID NO: 994903 - RNA, 19 nt, Artificial Sequence
  Description of Artificial Sequence: Synthetic oligonucleotide
  Antisense strand to SEQ ID NO: 994902
agagagcagacuuucccuc

SEQ ID NO: 994904 - RNA, 19 nt, Artificial Sequence
  Description of Artificial Sequence: Synthetic oligonucleotide
  Sense strand starting at position 1302 of SEQ ID NO: 914318
gggaaagucugcucucuua

SEQ ID NO: 994905 - RNA, 19 nt, Artificial Sequence
  Description of Artificial Sequence: Synthetic oligonucleotide
  Antisense strand to SEQ ID NO: 994904
uaagagagcagacuuuccc

SEQ ID NO: 994906 - RNA, 19 nt, Artificial Sequence
  Description of Artificial Sequence: Synthetic oligonucleotide
  Sense strand starting at position 1340 of SEQ ID NO: 914318
cguguuuaugcugaggaga

SEQ ID NO: 994907 - RNA, 19 nt, Artificial Sequence
  Description of Artificial Sequence: Synthetic oligonucleotide
  Antisense strand to SEQ ID NO: 994906
ucuccucagcauaaacacg

SEQ ID NO: 994908 - RNA, 19 nt, Artificial Sequence
  Description of Artificial Sequence: Synthetic oligonucleotide
  Sense strand starting at position 1343 of SEQ ID NO: 914318
guuuaugcugaggagauga

SEQ ID NO: 994909 - RNA, 19 nt, Artificial Sequence
  Description of Artificial Sequence: Synthetic oligonucleotide
  Antisense strand to SEQ ID NO: 994908
ucaucuccucagcauaaac

SEQ ID NO: 994910 - RNA, 19 nt, Artificial Sequence
  Description of Artificial Sequence: Synthetic oligonucleotide
  Sense strand starting at position 1520 of SEQ ID NO: 914318
uaguuagaucagugggugu

SEQ ID NO: 994911 - RNA, 19 nt, Artificial Sequence
  Description of Artificial Sequence: Synthetic oligonucleotide
  Antisense strand to SEQ ID NO: 994910
acacccacugaucuaacua

SEQ ID NO: 994912 - RNA, 19 nt, Artificial Sequence
  Description of Artificial Sequence: Synthetic oligonucleotide
  Sense strand starting at position 1522 of SEQ ID NO: 914318
guuagaucaguggguguau

SEQ ID NO: 994913 - RNA, 19 nt, Artificial Sequence
  Description of Artificial Sequence: Synthetic oligonucleotide
  Antisense strand to SEQ ID NO: 994912
auacacccacugaucuaac

SEQ ID NO: 994914 - RNA, 19 nt, Artificial Sequence
  Description of Artificial Sequence: Synthetic oligonucleotide
  Sense strand starting at position 1531 of SEQ ID NO: 914318
guggguguauguucccagu

SEQ ID NO: 994915 - RNA, 19 nt, Artificial Sequence
  Description of Artificial Sequence: Synthetic oligonucleotide
  Antisense strand to SEQ ID NO: 994914
acugggaacauacacccac

SEQ ID NO: 994916 - RNA, 19 nt, Artificial Sequence
  Description of Artificial Sequence: Synthetic oligonucleotide
  Sense strand starting at position 1533 of SEQ ID NO: 914318
ggguguauguucccagucu

SEQ ID NO: 994917 - RNA, 19 nt, Artificial Sequence
  Description of Artificial Sequence: Synthetic oligonucleotide
  Antisense strand to SEQ ID NO: 994916
agacugggaacauacaccc

SEQ ID NO: 994918 - RNA, 19 nt, Artificial Sequence
  Description of Artificial Sequence: Synthetic oligonucleotide
  Sense strand starting at position 1541 of SEQ ID NO: 914318
guucccagucucugguaaa

SEQ ID NO: 994919 - RNA, 19 nt, Artificial Sequence
  Description of Artificial Sequence: Synthetic oligonucleotide
  Antisense strand to SEQ ID NO: 994918
uuuaccagagacugggaac

SEQ ID NO: 994920 - RNA, 19 nt, Artificial Sequence
  Description of Artificial Sequence: Synthetic oligonucleotide
  Sense strand starting at position 1572 of SEQ ID NO: 914318
ccaggauaucggugacccu

SEQ ID NO: 994921 - RNA, 19 nt, Artificial Sequence
  Description of Artificial Sequence: Synthetic oligonucleotide
  Antisense strand to SEQ ID NO: 994920
agggucaccgauauccugg

SEQ ID NO: 994922 - RNA, 19 nt, Artificial Sequence
  Description of Artificial Sequence: Synthetic oligonucleotide
  Sense strand starting at position 1704 of SEQ ID NO: 914318
acagguuugugcguucaac

SEQ ID NO: 994923 - RNA, 19 nt, Artificial Sequence
  Description of Artificial Sequence: Synthetic oligonucleotide
  Antisense strand to SEQ ID NO: 994922
guugaacgcacaaaccugu

SEQ ID NO: 994924 - RNA, 19 nt, Artificial Sequence
  Description of Artificial Sequence: Synthetic oligonucleotide
  Sense strand starting at position 1706 of SEQ ID NO: 914318
agguuugugcguucaacuu

SEQ ID NO: 994925 - RNA, 19 nt, Artificial Sequence
  Description of Artificial Sequence: Synthetic oligonucleotide
  Antisense strand to SEQ ID NO: 994924
aaguugaacgcacaaaccu

SEQ ID NO: 994926 - RNA, 19 nt, Artificial Sequence
  Description of Artificial Sequence: Synthetic oligonucleotide
  Sense strand starting at position 1887 of SEQ ID NO: 914318
cggccacgucgcagauuau

SEQ ID NO: 994927 - RNA, 19 nt, Artificial Sequence
  Description of Artificial Sequence: Synthetic oligonucleotide
  Antisense strand to SEQ ID NO: 994926
auaaucugcgacguggccg

SEQ ID NO: 994928 - RNA, 19 nt, Artificial Sequence
  Description of Artificial Sequence: Synthetic oligonucleotide
  Sense strand starting at position 1888 of SEQ ID NO: 914318
ggccacgucgcagauuaua

SEQ ID NO: 994929 - RNA, 19 nt, Artificial Sequence
  Description of Artificial Sequence: Synthetic oligonucleotide
  Antisense strand to SEQ ID NO: 994928
uauaaucugcgacguggcc

SEQ ID NO: 994930 - RNA, 19 nt, Artificial Sequence
  Description of Artificial Sequence: Synthetic oligonucleotide
  Sense strand starting at position 1947 of SEQ ID NO: 914318
gagcuagcucucgagauca

SEQ ID NO: 994931 - RNA, 19 nt, Artificial Sequence
  Description of Artificial Sequence: Synthetic oligonucleotide
  Antisense strand to SEQ ID NO: 994930
ugaucucgagagcuagcuc

SEQ ID NO: 994932 - RNA, 19 nt, Artificial Sequence
  Description of Artificial Sequence: Synthetic oligonucleotide
  Sense strand starting at position 1958 of SEQ ID NO: 914318
cgagaucagcgagagguua

SEQ ID NO: 994933 - RNA, 19 nt, Artificial Sequence
  Description of Artificial Sequence: Synthetic oligonucleotide
  Antisense strand to SEQ ID NO: 994932
uaaccucucgcugaucucg

SEQ ID NO: 994934 - RNA, 19 nt, Artificial Sequence
  Description of Artificial Sequence: Synthetic oligonucleotide
  Sense strand starting at position 2073 of SEQ ID NO: 914318
aaacguaagugagaacuaa

SEQ ID NO: 994935 - RNA, 19 nt, Artificial Sequence
  Description of Artificial Sequence: Synthetic oligonucleotide
  Antisense strand to SEQ ID NO: 994934
uuaguucucacuuacguuu

SEQ ID NO: 994936 - RNA, 19 nt, Artificial Sequence
  Description of Artificial Sequence: Synthetic oligonucleotide
  Sense strand starting at position 2115 of SEQ ID NO: 914318
gcucgcauuccugcacaca

SEQ ID NO: 994937 - RNA, 19 nt, Artificial Sequence
  Description of Artificial Sequence: Synthetic oligonucleotide
  Antisense strand to SEQ ID NO: 994936
ugugugcaggaaugcgagc

SEQ ID NO: 994938 - RNA, 19 nt, Artificial Sequence
  Description of Artificial Sequence: Synthetic oligonucleotide
  Sense strand starting at position 2116 of SEQ ID NO: 914318
cucgcauuccugcacacau

SEQ ID NO: 994939 - RNA, 19 nt, Artificial Sequence
  Description of Artificial Sequence: Synthetic oligonucleotide
  Antisense strand to SEQ ID NO: 994938
augugugcaggaaugcgag

SEQ ID NO: 994940 - RNA, 19 nt, Artificial Sequence
  Description of Artificial Sequence: Synthetic oligonucleotide
  Sense strand starting at position 2237 of SEQ ID NO: 914318
gggcccuuaucgcugaguu

SEQ ID NO: 994941 - RNA, 19 nt, Artificial Sequence
  Description of Artificial Sequence: Synthetic oligonucleotide
  Antisense strand to SEQ ID NO: 994940
aacucagcgauaagggccc

SEQ ID NO: 994942 - RNA, 19 nt, Artificial Sequence
  Description of Artificial Sequence: Synthetic oligonucleotide
  Sense strand starting at position 2239 of SEQ ID NO: 914318
gcccuuaucgcugaguuug

SEQ ID NO: 994943 - RNA, 19 nt, Artificial Sequence
  Description of Artificial Sequence: Synthetic oligonucleotide
  Antisense strand to SEQ ID NO: 994942
caaacucagcgauaagggc

SEQ ID NO: 994944 - RNA, 19 nt, Artificial Sequence
  Description of Artificial Sequence: Synthetic oligonucleotide
  Sense strand starting at position 2408 of SEQ ID NO: 914318
agaguuuagcgguagacug

SEQ ID NO: 994945 - RNA, 19 nt, Artificial Sequence
  Description of Artificial Sequence: Synthetic oligonucleotide
  Antisense strand to SEQ ID NO: 994944
cagucuaccgcuaaacucu

SEQ ID NO: 994946 - RNA, 19 nt, Artificial Sequence
  Description of Artificial Sequence: Synthetic oligonucleotide
  Sense strand starting at position 14 of SEQ ID NO: 914319
gggagcugaacuugaacuu

SEQ ID NO: 994947 - RNA, 19 nt, Artificial Sequence
  Description of Artificial Sequence: Synthetic oligonucleotide
  Antisense strand to SEQ ID NO: 994946
aaguucaaguucagcuccc

SEQ ID NO: 994948 - RNA, 19 nt, Artificial Sequence
  Description of Artificial Sequence: Synthetic oligonucleotide
  Sense strand starting at position 42 of SEQ ID NO: 914319
uccagugacugcucuucua

SEQ ID NO: 994949 - RNA, 19 nt, Artificial Sequence
  Description of Artificial Sequence: Synthetic oligonucleotide
  Antisense strand to SEQ ID NO: 994948
uagaagagcagucacugga

SEQ ID NO: 994950 - RNA, 19 nt, Artificial Sequence
  Description of Artificial Sequence: Synthetic oligonucleotide
  Sense strand starting at position 66 of SEQ ID NO: 914319
ucaguucuuccagacauga

SEQ ID NO: 994951 - RNA, 19 nt, Artificial Sequence
  Description of Artificial Sequence: Synthetic oligonucleotide
  Antisense strand to SEQ ID NO: 994950
ucaugucuggaagaacuga

SEQ ID NO: 994952 - RNA, 19 nt, Artificial Sequence
  Description of Artificial Sequence: Synthetic oligonucleotide
  Sense strand starting at position 191 of SEQ ID NO: 914319
aacuucugagccuggaagu

SEQ ID NO: 994953 - RNA, 19 nt, Artificial Sequence
  Description of Artificial Sequence: Synthetic oligonucleotide
  Antisense strand to SEQ ID NO: 994952
acuuccaggcucagaaguu

SEQ ID NO: 994954 - RNA, 19 nt, Artificial Sequence
  Description of Artificial Sequence: Synthetic oligonucleotide
  Sense strand starting at position 192 of SEQ ID NO: 914319
acuucugagccuggaaguu

SEQ ID NO: 994955 - RNA, 19 nt, Artificial Sequence
  Description of Artificial Sequence: Synthetic oligonucleotide
  Antisense strand to SEQ ID NO: 994954
aacuuccaggcucagaagu

SEQ ID NO: 994956 - RNA, 19 nt, Artificial Sequence
  Description of Artificial Sequence: Synthetic oligonucleotide
  Sense strand starting at position 238 of SEQ ID NO: 914319
aagcuagcacagggaaauu

SEQ ID NO: 994957 - RNA, 19 nt, Artificial Sequence
  Description of Artificial Sequence: Synthetic oligonucleotide
  Antisense strand to SEQ ID NO: 994956
aauuucccugugcuagcuu

SEQ ID NO: 994958 - RNA, 19 nt, Artificial Sequence
  Description of Artificial Sequence: Synthetic oligonucleotide
  Sense strand starting at position 249 of SEQ ID NO: 914319
gggaaauucuaacaucaag

SEQ ID NO: 994959 - RNA, 19 nt, Artificial Sequence
  Description of Artificial Sequence: Synthetic oligonucleotide
  Antisense strand to SEQ ID NO: 994958
cuugauguuagaauuuccc

SEQ ID NO: 994960 - RNA, 19 nt, Artificial Sequence
  Description of Artificial Sequence: Synthetic oligonucleotide
  Sense strand starting at position 278 of SEQ ID NO: 914319
gaaguauccugccuguuua

SEQ ID NO: 994961 - RNA, 19 nt, Artificial Sequence
  Description of Artificial Sequence: Synthetic oligonucleotide
  Antisense strand to SEQ ID NO: 994960
uaaacaggcaggauacuuc

SEQ ID NO: 994962 - RNA, 19 nt, Artificial Sequence
  Description of Artificial Sequence: Synthetic oligonucleotide
  Sense strand starting at position 361 of SEQ ID NO: 914319
uuuccauucucagcaggua

SEQ ID NO: 994963 - RNA, 19 nt, Artificial Sequence
  Description of Artificial Sequence: Synthetic oligonucleotide
  Antisense strand to SEQ ID NO: 994962
uaccugcugagaauggaaa

SEQ ID NO: 994964 - RNA, 19 nt, Artificial Sequence
  Description of Artificial Sequence: Synthetic oligonucleotide
  Sense strand starting at position 362 of SEQ ID NO: 914319
uuccauucucagcagguaa

SEQ ID NO: 994965 - RNA, 19 nt, Artificial Sequence
  Description of Artificial Sequence: Synthetic oligonucleotide
  Antisense strand to SEQ ID NO: 994964
uuaccugcugagaauggaa

SEQ ID NO: 994966 - RNA, 19 nt, Artificial Sequence
  Description of Artificial Sequence: Synthetic oligonucleotide
  Sense strand starting at position 449 of SEQ ID NO: 914319
ugguaacauguguggacuu

SEQ ID NO: 994967 - RNA, 19 nt, Artificial Sequence
  Description of Artificial Sequence: Synthetic oligonucleotide
  Antisense strand to SEQ ID NO: 994966
aaguccacacauguuacca

SEQ ID NO: 994968 - RNA, 19 nt, Artificial Sequence
  Description of Artificial Sequence: Synthetic oligonucleotide
  Sense strand starting at position 483 of SEQ ID NO: 914319
uuaggagauguaugcaauu

SEQ ID NO: 994969 - RNA, 19 nt, Artificial Sequence
  Description of Artificial Sequence: Synthetic oligonucleotide
  Antisense strand to SEQ ID NO: 994968
aauugcauacaucuccuaa

SEQ ID NO: 994970 - RNA, 19 nt, Artificial Sequence
  Description of Artificial Sequence: Synthetic oligonucleotide
  Sense strand starting at position 520 of SEQ ID NO: 914319
uucugagaaucacuguuua

SEQ ID NO: 994971 - RNA, 19 nt, Artificial Sequence
  Description of Artificial Sequence: Synthetic oligonucleotide
  Antisense strand to SEQ ID NO: 994970
uaaacagugauucucagaa

SEQ ID NO: 994972 - RNA, 19 nt, Artificial Sequence
  Description of Artificial Sequence: Synthetic oligonucleotide
  Sense strand starting at position 568 of SEQ ID NO: 914319
ugauauauaguagaugcua

SEQ ID NO: 994973 - RNA, 19 nt, Artificial Sequence
  Description of Artificial Sequence: Synthetic oligonucleotide
  Antisense strand to SEQ ID NO: 994972
uagcaucuacuauauauca

SEQ ID NO: 994974 - RNA, 19 nt, Artificial Sequence
  Description of Artificial Sequence: Synthetic oligonucleotide
  Sense strand starting at position 705 of SEQ ID NO: 914319
acugaugaggcauguucua

SEQ ID NO: 994975 - RNA, 19 nt, Artificial Sequence
  Description of Artificial Sequence: Synthetic oligonucleotide
  Antisense strand to SEQ ID NO: 994974
uagaacaugccucaucagu

SEQ ID NO: 994976 - RNA, 19 nt, Artificial Sequence
  Description of Artificial Sequence: Synthetic oligonucleotide
  Sense strand starting at position 1059 of SEQ ID NO: 914319
ucauauucucaacguugga

SEQ ID NO: 994977 - RNA, 19 nt, Artificial Sequence
  Description of Artificial Sequence: Synthetic oligonucleotide
  Antisense strand to SEQ ID NO: 994976
uccaacguugagaauauga

SEQ ID NO: 994978 - RNA, 19 nt, Artificial Sequence
  Description of Artificial Sequence: Synthetic oligonucleotide
  Sense strand starting at position 1515 of SEQ ID NO: 914319
gaaagcguggccuaauaag

SEQ ID NO: 994979 - RNA, 19 nt, Artificial Sequence
  Description of Artificial Sequence: Synthetic oligonucleotide
  Antisense strand to SEQ ID NO: 994978
cuuauuaggccacgcuuuc

SEQ ID NO: 994980 - RNA, 19 nt, Artificial Sequence
  Description of Artificial Sequence: Synthetic oligonucleotide
  Sense strand starting at position 1572 of SEQ ID NO: 914319
agugcuuugccagaucaga

SEQ ID NO: 994981 - RNA, 19 nt, Artificial Sequence
  Description of Artificial Sequence: Synthetic oligonucleotide
  Antisense strand to SEQ ID NO: 994980
ucugaucuggcaaagcacu

SEQ ID NO: 994982 - RNA, 19 nt, Artificial Sequence
  Description of Artificial Sequence: Synthetic oligonucleotide
  Sense strand starting at position 2091 of SEQ ID NO: 914319
gagguaacagcauaacugu

SEQ ID NO: 994983 - RNA, 19 nt, Artificial Sequence
  Description of Artificial Sequence: Synthetic oligonucleotide
  Antisense strand to SEQ ID NO: 994982
acaguuaugcuguuaccuc

SEQ ID NO: 994984 - RNA, 19 nt, Artificial Sequence
  Description of Artificial Sequence: Synthetic oligonucleotide
  Sense strand starting at position 2511 of SEQ ID NO: 914319
agucuucucuccuccggau

SEQ ID NO: 994985 - RNA, 19 nt, Artificial Sequence
  Description of Artificial Sequence: Synthetic oligonucleotide
  Antisense strand to SEQ ID NO: 994984
auccggaggagagaagacu

SEQ ID NO: 994986 - RNA, 19 nt, Artificial Sequence
  Description of Artificial Sequence: Synthetic oligonucleotide
  Sense strand starting at position 3059 of SEQ ID NO: 914319
agguuuggacauugcuaga

SEQ ID NO: 994987 - RNA, 19 nt, Artificial Sequence
  Description of Artificial Sequence: Synthetic oligonucleotide
  Antisense strand to SEQ ID NO: 994986
ucuagcaauguccaaaccu

SEQ ID NO: 994988 - RNA, 19 nt, Artificial Sequence
  Description of Artificial Sequence: Synthetic oligonucleotide
  Sense strand starting at position 3119 of SEQ ID NO: 914319
gagauagucuugucccuuc

SEQ ID NO: 994989 - RNA, 19 nt, Artificial Sequence
  Description of Artificial Sequence: Synthetic oligonucleotide
  Antisense strand to SEQ ID NO: 994988
gaagggacaagacuaucuc

SEQ ID NO: 994990 - RNA, 19 nt, Artificial Sequence
  Description of Artificial Sequence: Synthetic oligonucleotide
  Sense strand starting at position 3159 of SEQ ID NO: 914319
agcagcaguaguuaaagaa

SEQ ID NO: 994991 - RNA, 19 nt, Artificial Sequence
  Description of Artificial Sequence: Synthetic oligonucleotide
  Antisense strand to SEQ ID NO: 994990
uucuuuaacuacugcugcu

SEQ ID NO: 994992 - RNA, 19 nt, Artificial Sequence
  Description of Artificial Sequence: Synthetic oligonucleotide
  Sense strand starting at position 3163 of SEQ ID NO: 914319
gcaguaguuaaagaaucga

SEQ ID NO: 994993 - RNA, 19 nt, Artificial Sequence
  Description of Artificial Sequence: Synthetic oligonucleotide
  Antisense strand to SEQ ID NO: 994992
ucgauucuuuaacuacugc

SEQ ID NO: 994994 - RNA, 19 nt, Artificial Sequence
  Description of Artificial Sequence: Synthetic oligonucleotide
  Sense strand starting at position 3168 of SEQ ID NO: 914319
aguuaaagaaucgagguuu

SEQ ID NO: 994995 - RNA, 19 nt, Artificial Sequence
  Description of Artificial Sequence: Synthetic oligonucleotide
  Antisense strand to SEQ ID NO: 994994
aaaccucgauucuuuaacu

SEQ ID NO: 994996 - RNA, 19 nt, Artificial Sequence
  Description of Artificial Sequence: Synthetic oligonucleotide
  Sense strand starting at position 3192 of SEQ ID NO: 914319
guuguugaaagcuggaauc

SEQ ID NO: 994997 - RNA, 19 nt, Artificial Sequence
  Description of Artificial Sequence: Synthetic oligonucleotide
  Antisense strand to SEQ ID NO: 994996
gauuccagcuuucaacaac

SEQ ID NO: 994998 - RNA, 19 nt, Artificial Sequence
  Description of Artificial Sequence: Synthetic oligonucleotide
  Sense strand starting at position 3194 of SEQ ID NO: 914319
uguugaaagcuggaaucau

SEQ ID NO: 994999 - RNA, 19 nt, Artificial Sequence
  Description of Artificial Sequence: Synthetic oligonucleotide
  Antisense strand to SEQ ID NO: 994998
augauuccagcuuucaaca

SEQ ID NO: 995000 - RNA, 19 nt, Artificial Sequence
  Description of Artificial Sequence: Synthetic oligonucleotide
  Sense strand starting at position 3263 of SEQ ID NO: 914319
aagaaagcaugggaucaaa

SEQ ID NO: 995001 - RNA, 19 nt, Artificial Sequence
  Description of Artificial Sequence: Synthetic oligonucleotide
  Antisense strand to SEQ ID NO: 995000
uuugaucccaugcuuucuu

SEQ ID NO: 995002 - RNA, 19 nt, Artificial Sequence
  Description of Artificial Sequence: Synthetic oligonucleotide
  Sense strand starting at position 3291 of SEQ ID NO: 914319
ugucaccuagcugguuaaa

SEQ ID NO: 995003 - RNA, 19 nt, Artificial Sequence
  Description of Artificial Sequence: Synthetic oligonucleotide
  Antisense strand to SEQ ID NO: 995002
uuuaaccagcuaggugaca

SEQ ID NO: 995004 - RNA, 19 nt, Artificial Sequence
  Description of Artificial Sequence: Synthetic oligonucleotide
  Sense strand starting at position 3293 of SEQ ID NO: 914319
ucaccuagcugguuaaauu

SEQ ID NO: 995005 - RNA, 19 nt, Artificial Sequence
  Description of Artificial Sequence: Synthetic oligonucleotide
  Antisense strand to SEQ ID NO: 995004
aauuuaaccagcuagguga

SEQ ID NO: 995006 - RNA, 19 nt, Artificial Sequence
  Description of Artificial Sequence: Synthetic oligonucleotide
  Sense strand starting at position 3304 of SEQ ID NO: 914319
guuaaauuacgugccgcau

SEQ ID NO: 995007 - RNA, 19 nt, Artificial Sequence
  Description of Artificial Sequence: Synthetic oligonucleotide
  Antisense strand to SEQ ID NO: 995006
augcggcacguaauuuaac

SEQ ID NO: 995008 - RNA, 19 nt, Artificial Sequence
  Description of Artificial Sequence: Synthetic oligonucleotide
  Sense strand starting at position 3308 of SEQ ID NO: 914319
aauuacgugccgcauuuaa

SEQ ID NO: 995009 - RNA, 19 nt, Artificial Sequence
  Description of Artificial Sequence: Synthetic oligonucleotide
  Antisense strand to SEQ ID NO: 995008
uuaaaugcggcacguaauu

SEQ ID NO: 995010 - RNA, 19 nt, Artificial Sequence
  Description of Artificial Sequence: Synthetic oligonucleotide
  Sense strand starting at position 3346 of SEQ ID NO: 914319
aguggcucucuugggauua

SEQ ID NO: 995011 - RNA, 19 nt, Artificial Sequence
  Description of Artificial Sequence: Synthetic oligonucleotide
  Antisense strand to SEQ ID NO: 995010
uaaucccaagagagccacu

SEQ ID NO: 995012 - RNA, 19 nt, Artificial Sequence
  Description of Artificial Sequence: Synthetic oligonucleotide
  Sense strand starting at position 3489 of SEQ ID NO: 914319
gcacgaucucgccuuauug

SEQ ID NO: 995013 - RNA, 19 nt, Artificial Sequence
  Description of Artificial Sequence: Synthetic oligonucleotide
  Antisense strand to SEQ ID NO: 995012
caauaaggcgagaucgugc

SEQ ID NO: 995014 - RNA, 19 nt, Artificial Sequence
  Description of Artificial Sequence: Synthetic oligonucleotide
  Sense strand starting at position 3751 of SEQ ID NO: 914319
gcugguguuccuuauuacu

SEQ ID NO: 995015 - RNA, 19 nt, Artificial Sequence
  Description of Artificial Sequence: Synthetic oligonucleotide
  Antisense strand to SEQ ID NO: 995014
aguaauaaggaacaccagc

SEQ ID NO: 995016 - RNA, 19 nt, Artificial Sequence
  Description of Artificial Sequence: Synthetic oligonucleotide
  Sense strand starting at position 3753 of SEQ ID NO: 914319
ugguguuccuuauuacuuu

SEQ ID NO: 995017 - RNA, 19 nt, Artificial Sequence
  Description of Artificial Sequence: Synthetic oligonucleotide
  Antisense strand to SEQ ID NO: 995016
aaaguaauaaggaacacca

SEQ ID NO: 995018 - RNA, 19 nt, Artificial Sequence
  Description of Artificial Sequence: Synthetic oligonucleotide
  Sense strand starting at position 3777 of SEQ ID NO: 914319
uuuaguacucacuggaaga

SEQ ID NO: 995019 - RNA, 19 nt, Artificial Sequence
  Description of Artificial Sequence: Synthetic oligonucleotide
  Antisense strand to SEQ ID NO: 995018
ucuuccagugaguacuaaa

SEQ ID NO: 995020 - RNA, 19 nt, Artificial Sequence
  Description of Artificial Sequence: Synthetic oligonucleotide
  Sense strand starting at position 3862 of SEQ ID NO: 914319
guccuuacugaaugaagaa

SEQ ID NO: 995021 - RNA, 19 nt, Artificial Sequence
  Description of Artificial Sequence: Synthetic oligonucleotide
  Antisense strand to SEQ ID NO: 995020
uucuucauucaguaaggac

SEQ ID NO: 995022 - RNA, 19 nt, Artificial Sequence
  Description of Artificial Sequence: Synthetic oligonucleotide
  Sense strand starting at position 3919 of SEQ ID NO: 914319
ucuaaccuuccaggaguuu

SEQ ID NO: 995023 - RNA, 19 nt, Artificial Sequence
  Description of Artificial Sequence: Synthetic oligonucleotide
  Antisense strand to SEQ ID NO: 995022
aaacuccuggaagguuaga

SEQ ID NO: 995024 - RNA, 19 nt, Artificial Sequence
  Description of Artificial Sequence: Synthetic oligonucleotide
  Sense strand starting at position 3942 of SEQ ID NO: 914319
uuaaauuugucccaggaaa

SEQ ID NO: 995025 - RNA, 19 nt, Artificial Sequence
  Description of Artificial Sequence: Synthetic oligonucleotide
  Antisense strand to SEQ ID NO: 995024
uuuccugggacaaauuuaa

SEQ ID NO: 995026 - RNA, 19 nt, Artificial Sequence
  Description of Artificial Sequence: Synthetic oligonucleotide
  Sense strand starting at position 78 of SEQ ID NO: 914320
cagauauagggauguugca

SEQ ID NO: 995027 - RNA, 19 nt, Artificial Sequence
  Description of Artificial Sequence: Synthetic oligonucleotide
  Antisense strand to SEQ ID NO: 995026
ugcaacaucccuauaucug

SEQ ID NO: 995028 - RNA, 19 nt, Artificial Sequence
  Description of Artificial Sequence: Synthetic oligonucleotide
  Sense strand starting at position 186 of SEQ ID NO: 914320
uagguacugguuuguuaau

SEQ ID NO: 995029 - RNA, 19 nt, Artificial Sequence
  Description of Artificial Sequence: Synthetic oligonucleotide
  Antisense strand to SEQ ID NO: 995028
auuaacaaaccaguaccua

SEQ ID NO: 995030 - RNA, 19 nt, Artificial Sequence
  Description of Artificial Sequence: Synthetic oligonucleotide
  Sense strand starting at position 196 of SEQ ID NO: 914320
uuuguuaaugugugaaccu

SEQ ID NO: 995031 - RNA, 19 nt, Artificial Sequence
  Description of Artificial Sequence: Synthetic oligonucleotide
  Antisense strand to SEQ ID NO: 995030
agguucacacauuaacaaa

SEQ ID NO: 995032 - RNA, 19 nt, Artificial Sequence
  Description of Artificial Sequence: Synthetic oligonucleotide
  Sense strand starting at position 245 of SEQ ID NO: 914320
aaggacgguggcuaugaua

SEQ ID NO: 995033 - RNA, 19 nt, Artificial Sequence
  Description of Artificial Sequence: Synthetic oligonucleotide
  Antisense strand to SEQ ID NO: 995032
uaucauagccaccguccuu

SEQ ID NO: 995034 - RNA, 19 nt, Artificial Sequence
  Description of Artificial Sequence: Synthetic oligonucleotide
  Sense strand starting at position 309 of SEQ ID NO: 914320
ggacaaguauuacuugaua

SEQ ID NO: 995035 - RNA, 19 nt, Artificial Sequence
  Description of Artificial Sequence: Synthetic oligonucleotide
  Antisense strand to SEQ ID NO: 995034
uaucaaguaauacuugucc

SEQ ID NO: 995036 - RNA, 19 nt, Artificial Sequence
  Description of Artificial Sequence: Synthetic oligonucleotide
  Sense strand starting at position 370 of SEQ ID NO: 914320
guguuauacccuuaguaaa

SEQ ID NO: 995037 - RNA, 19 nt, Artificial Sequence
  Description of Artificial Sequence: Synthetic oligonucleotide
  Antisense strand to SEQ ID NO: 995036
uuuacuaaggguauaacac

SEQ ID NO: 995038 - RNA, 19 nt, Artificial Sequence
  Description of Artificial Sequence: Synthetic oligonucleotide
  Sense strand starting at position 503 of SEQ ID NO: 914320
uagggcuagccugauaaau

SEQ ID NO: 995039 - RNA, 19 nt, Artificial Sequence
  Description of Artificial Sequence: Synthetic oligonucleotide
  Antisense strand to SEQ ID NO: 995038
auuuaucaggcuagcccua

SEQ ID NO: 995040 - RNA, 19 nt, Artificial Sequence
  Description of Artificial Sequence: Synthetic oligonucleotide
  Sense strand starting at position 669 of SEQ ID NO: 914320
ccuagauggcuccgugaca

SEQ ID NO: 995041 - RNA, 19 nt, Artificial Sequence
  Description of Artificial Sequence: Synthetic oligonucleotide
  Antisense strand to SEQ ID NO: 995040
ugucacggagccaucuagg

SEQ ID NO: 995042 - RNA, 19 nt, Artificial Sequence
  Description of Artificial Sequence: Synthetic oligonucleotide
  Sense strand starting at position 688 of SEQ ID NO: 914320
cggucaagguccuugggaa

SEQ ID NO: 995043 - RNA, 19 nt, Artificial Sequence
  Description of Artificial Sequence: Synthetic oligonucleotide
  Antisense strand to SEQ ID NO: 995042
uucccaaggaccuugaccg

SEQ ID NO: 995044 - RNA, 19 nt, Artificial Sequence
  Description of Artificial Sequence: Synthetic oligonucleotide
  Sense strand starting at position 890 of SEQ ID NO: 914320
gcuagaagaugccucuaau

SEQ ID NO: 995045 - RNA, 19 nt, Artificial Sequence
  Description of Artificial Sequence: Synthetic oligonucleotide
  Antisense strand to SEQ ID NO: 995044
auuagaggcaucuucuagc

SEQ ID NO: 995046 - RNA, 19 nt, Artificial Sequence
  Description of Artificial Sequence: Synthetic oligonucleotide
  Sense strand starting at position 907 of SEQ ID NO: 914320
aucgcaacuuguuuccaga

SEQ ID NO: 995047 - RNA, 19 nt, Artificial Sequence
  Description of Artificial Sequence: Synthetic oligonucleotide
  Antisense strand to SEQ ID NO: 995046
ucuggaaacaaguugcgau

SEQ ID NO: 995048 - RNA, 19 nt, Artificial Sequence
  Description of Artificial Sequence: Synthetic oligonucleotide
  Sense strand starting at position 909 of SEQ ID NO: 914320
cgcaacuuguuuccagaaa

SEQ ID NO: 995049 - RNA, 19 nt, Artificial Sequence
  Description of Artificial Sequence: Synthetic oligonucleotide
  Antisense strand to SEQ ID NO: 995048
uuucuggaaacaaguugcg

SEQ ID NO: 995050 - RNA, 19 nt, Artificial Sequence
  Description of Artificial Sequence: Synthetic oligonucleotide
  Sense strand starting at position 1099 of SEQ ID NO: 914320
cgugcacuugcucagggaa

SEQ ID NO: 995051 - RNA, 19 nt, Artificial Sequence
  Description of Artificial Sequence: Synthetic oligonucleotide
  Antisense strand to SEQ ID NO: 995050
uucccugagcaagugcacg

SEQ ID NO: 995052 - RNA, 19 nt, Artificial Sequence
  Description of Artificial Sequence: Synthetic oligonucleotide
  Sense strand starting at position 1217 of SEQ ID NO: 914320
ccagcuuugacagggaaca

SEQ ID NO: 995053 - RNA, 19 nt, Artificial Sequence
  Description of Artificial Sequence: Synthetic oligonucleotide
  Antisense strand to SEQ ID NO: 995052
uguucccugucaaagcugg

SEQ ID NO: 995054 - RNA, 19 nt, Artificial Sequence
  Description of Artificial Sequence: Synthetic oligonucleotide
  Sense strand starting at position 1411 of SEQ ID NO: 914320
ccguagugucgagcguuau

SEQ ID NO: 995055 - RNA, 19 nt, Artificial Sequence
  Description of Artificial Sequence: Synthetic oligonucleotide
  Antisense strand to SEQ ID NO: 995054
auaacgcucgacacuacgg

SEQ ID NO: 995056 - RNA, 19 nt, Artificial Sequence
  Description of Artificial Sequence: Synthetic oligonucleotide
  Sense strand starting at position 1414 of SEQ ID NO: 914320
uagugucgagcguuaucau

SEQ ID NO: 995057 - RNA, 19 nt, Artificial Sequence
  Description of Artificial Sequence: Synthetic oligonucleotide
  Antisense strand to SEQ ID NO: 995056
augauaacgcucgacacua

SEQ ID NO: 995058 - RNA, 19 nt, Artificial Sequence
  Description of Artificial Sequence: Synthetic oligonucleotide
  Sense strand starting at position 1917 of SEQ ID NO: 914320
ggcgggaaguguucuggga

SEQ ID NO: 995059 - RNA, 19 nt, Artificial Sequence
  Description of Artificial Sequence: Synthetic oligonucleotide
  Antisense strand to SEQ ID NO: 995058
ucccagaacacuucccgcc

SEQ ID NO: 995060 - RNA, 19 nt, Artificial Sequence
  Description of Artificial Sequence: Synthetic oligonucleotide
  Sense strand starting at position 1921 of SEQ ID NO: 914320
ggaaguguucugggacucu

SEQ ID NO: 995061 - RNA, 19 nt, Artificial Sequence
  Description of Artificial Sequence: Synthetic oligonucleotide
  Antisense strand to SEQ ID NO: 995060
agagucccagaacacuucc

SEQ ID NO: 995062 - RNA, 19 nt, Artificial Sequence
  Description of Artificial Sequence: Synthetic oligonucleotide
  Sense strand starting at position 2802 of SEQ ID NO: 914320
cagugauuccugccucgcu

SEQ ID NO: 995063 - RNA, 19 nt, Artificial Sequence
  Description of Artificial Sequence: Synthetic oligonucleotide
  Antisense strand to SEQ ID NO: 995062
agcgaggcaggaaucacug

SEQ ID NO: 995064 - RNA, 19 nt, Artificial Sequence
  Description of Artificial Sequence: Synthetic oligonucleotide
  Sense strand starting at position 2804 of SEQ ID NO: 914320
gugauuccugccucgcuuu

SEQ ID NO: 995065 - RNA, 19 nt, Artificial Sequence
  Description of Artificial Sequence: Synthetic oligonucleotide
  Antisense strand to SEQ ID NO: 995064
aaagcgaggcaggaaucac

SEQ ID NO: 995066 - RNA, 19 nt, Artificial Sequence
  Description of Artificial Sequence: Synthetic oligonucleotide
  Sense strand starting at position 3054 of SEQ ID NO: 914320
gggcauuccaaacgugaaa

SEQ ID NO: 995067 - RNA, 19 nt, Artificial Sequence
  Description of Artificial Sequence: Synthetic oligonucleotide
  Antisense strand to SEQ ID NO: 995066
uuucacguuuggaaugccc

SEQ ID NO: 995068 - RNA, 19 nt, Artificial Sequence
  Description of Artificial Sequence: Synthetic oligonucleotide
  Sense strand starting at position 3056 of SEQ ID NO: 914320
gcauuccaaacgugaaaga

SEQ ID NO: 995069 - RNA, 19 nt, Artificial Sequence
  Description of Artificial Sequence: Synthetic oligonucleotide
  Antisense strand to SEQ ID NO: 995068
ucuuucacguuuggaaugc

SEQ ID NO: 995070 - RNA, 19 nt, Artificial Sequence
  Description of Artificial Sequence: Synthetic oligonucleotide
  Sense strand starting at position 3107 of SEQ ID NO: 914320
gccgaaauuuggcuaagcu

SEQ ID NO: 995071 - RNA, 19 nt, Artificial Sequence
  Description of Artificial Sequence: Synthetic oligonucleotide
  Antisense strand to SEQ ID NO: 995070
agcuuagccaaauuucggc

SEQ ID NO: 995072 - RNA, 19 nt, Artificial Sequence
  Description of Artificial Sequence: Synthetic oligonucleotide
  Sense strand starting at position 3122 of SEQ ID NO: 914320
agcuauugagaaggcuaca

SEQ ID NO: 995073 - RNA, 19 nt, Artificial Sequence
  Description of Artificial Sequence: Synthetic oligonucleotide
  Antisense strand to SEQ ID NO: 995072
uguagccuucucaauagcu

SEQ ID NO: 995074 - RNA, 19 nt, Artificial Sequence
  Description of Artificial Sequence: Synthetic oligonucleotide
  Sense strand starting at position 3136 of SEQ ID NO: 914320
cuacaauauguggaagugu

SEQ ID NO: 995075 - RNA, 19 nt, Artificial Sequence
  Description of Artificial Sequence: Synthetic oligonucleotide
  Antisense strand to SEQ ID NO: 995074
acacuuccacauauuguag

SEQ ID NO: 995076 - RNA, 19 nt, Artificial Sequence
  Description of Artificial Sequence: Synthetic oligonucleotide
  Sense strand starting at position 3144 of SEQ ID NO: 914320
uguggaaguguuuaucaga

SEQ ID NO: 995077 - RNA, 19 nt, Artificial Sequence
  Description of Artificial Sequence: Synthetic oligonucleotide
  Antisense strand to SEQ ID NO: 995076
ucugauaaacacuuccaca

SEQ ID NO: 995078 - RNA, 19 nt, Artificial Sequence
  Description of Artificial Sequence: Synthetic oligonucleotide
  Sense strand starting at position 3270 of SEQ ID NO: 914320
cugaguguugcugcacuuu

SEQ ID NO: 995079 - RNA, 19 nt, Artificial Sequence
  Description of Artificial Sequence: Synthetic oligonucleotide
  Antisense strand to SEQ ID NO: 995078
aaagugcagcaacacucag

SEQ ID NO: 995080 - RNA, 19 nt, Artificial Sequence
  Description of Artificial Sequence: Synthetic oligonucleotide
  Sense strand starting at position 3299 of SEQ ID NO: 914320
uugacugguacggaugauu

SEQ ID NO: 995081 - RNA, 19 nt, Artificial Sequence
  Description of Artificial Sequence: Synthetic oligonucleotide
  Antisense strand to SEQ ID NO: 995080
aaucauccguaccagucaa

SEQ ID NO: 995082 - RNA, 19 nt, Artificial Sequence
  Description of Artificial Sequence: Synthetic oligonucleotide
  Sense strand starting at position 3308 of SEQ ID NO: 914320
acggaugauucgguagaug

SEQ ID NO: 995083 - RNA, 19 nt, Artificial Sequence
  Description of Artificial Sequence: Synthetic oligonucleotide
  Antisense strand to SEQ ID NO: 995082
caucuaccgaaucauccgu

SEQ ID NO: 995084 - RNA, 19 nt, Artificial Sequence
  Description of Artificial Sequence: Synthetic oligonucleotide
  Sense strand starting at position 3311 of SEQ ID NO: 914320
gaugauucgguagauggca

SEQ ID NO: 995085 - RNA, 19 nt, Artificial Sequence
  Description of Artificial Sequence: Synthetic oligonucleotide
  Antisense strand to SEQ ID NO: 995084
ugccaucuaccgaaucauc

SEQ ID NO: 995086 - RNA, 19 nt, Artificial Sequence
  Description of Artificial Sequence: Synthetic oligonucleotide
  Sense strand starting at position 3379 of SEQ ID NO: 914320
aggacaccacgcuaugaua

SEQ ID NO: 995087 - RNA, 19 nt, Artificial Sequence
  Description of Artificial Sequence: Synthetic oligonucleotide
  Antisense strand to SEQ ID NO: 995086
uaucauagcgugguguccu

SEQ ID NO: 995088 - RNA, 19 nt, Artificial Sequence
  Description of Artificial Sequence: Synthetic oligonucleotide
  Sense strand starting at position 3381 of SEQ ID NO: 914320
gacaccacgcuaugauauu

SEQ ID NO: 995089 - RNA, 19 nt, Artificial Sequence
  Description of Artificial Sequence: Synthetic oligonucleotide
  Antisense strand to SEQ ID NO: 995088
aauaucauagcgugguguc

SEQ ID NO: 995090 - RNA, 19 nt, Artificial Sequence
  Description of Artificial Sequence: Synthetic oligonucleotide
  Sense strand starting at position 3392 of SEQ ID NO: 914320
augauauuagguuguggaa

SEQ ID NO: 995091 - RNA, 19 nt, Artificial Sequence
  Description of Artificial Sequence: Synthetic oligonucleotide
  Antisense strand to SEQ ID NO: 995090
uuccacaaccuaauaucau

SEQ ID NO: 995092 - RNA, 19 nt, Artificial Sequence
  Description of Artificial Sequence: Synthetic oligonucleotide
  Sense strand starting at position 3525 of SEQ ID NO: 914320
agggaugcuguccaacaca

SEQ ID NO: 995093 - RNA, 19 nt, Artificial Sequence
  Description of Artificial Sequence: Synthetic oligonucleotide
  Antisense strand to SEQ ID NO: 995092
uguguuggacagcaucccu

SEQ ID NO: 995094 - RNA, 19 nt, Artificial Sequence
  Description of Artificial Sequence: Synthetic oligonucleotide
  Sense strand starting at position 3638 of SEQ ID NO: 914320
accucacacuguuuaaagu

SEQ ID NO: 995095 - RNA, 19 nt, Artificial Sequence
  Description of Artificial Sequence: Synthetic oligonucleotide
  Antisense strand to SEQ ID NO: 995094
acuuuaaacagugugaggu

SEQ ID NO: 995096 - RNA, 19 nt, Artificial Sequence
  Description of Artificial Sequence: Synthetic oligonucleotide
  Sense strand starting at position 3639 of SEQ ID NO: 914320
ccucacacuguuuaaagua

SEQ ID NO: 995097 - RNA, 19 nt, Artificial Sequence
  Description of Artificial Sequence: Synthetic oligonucleotide
  Antisense strand to SEQ ID NO: 995096
uacuuuaaacagugugagg

SEQ ID NO: 995098 - RNA, 19 nt, Artificial Sequence
  Description of Artificial Sequence: Synthetic oligonucleotide
  Sense strand starting at position 3647 of SEQ ID NO: 914320
uguuuaaaguaggcuuaca

SEQ ID NO: 995099 - RNA, 19 nt, Artificial Sequence
  Description of Artificial Sequence: Synthetic oligonucleotide
  Antisense strand to SEQ ID NO: 995098
uguaagccuacuuuaaaca

SEQ ID NO: 995100 - RNA, 19 nt, Artificial Sequence
  Description of Artificial Sequence: Synthetic oligonucleotide
  Sense strand starting at position 3838 of SEQ ID NO: 914320
caccauagaguuugucaug

SEQ ID NO: 995101 - RNA, 19 nt, Artificial Sequence
  Description of Artificial Sequence: Synthetic oligonucleotide
  Antisense strand to SEQ ID NO: 995100
caugacaaacucuauggug

SEQ ID NO: 995102 - RNA, 19 nt, Artificial Sequence
  Description of Artificial Sequence: Synthetic oligonucleotide
  Sense strand starting at position 3839 of SEQ ID NO: 914320
accauagaguuugucauga

SEQ ID NO: 995103 - RNA, 19 nt, Artificial Sequence
  Description of Artificial Sequence: Synthetic oligonucleotide
  Antisense strand to SEQ ID NO: 995102
ucaugacaaacucuauggu

SEQ ID NO: 995104 - RNA, 19 nt, Artificial Sequence
  Description of Artificial Sequence: Synthetic oligonucleotide
  Sense strand starting at position 3844 of SEQ ID NO: 914320
agaguuugucaugaauucu

SEQ ID NO: 995105 - RNA, 19 nt, Artificial Sequence
  Description of Artificial Sequence: Synthetic oligonucleotide
  Antisense strand to SEQ ID NO: 995104
agaauucaugacaaacucu

SEQ ID NO: 995106 - RNA, 19 nt, Artificial Sequence
  Description of Artificial Sequence: Synthetic oligonucleotide
  Sense strand starting at position 78 of SEQ ID NO: 914321
ccagcuuugacagggaaca

SEQ ID NO: 995107 - RNA, 19 nt, Artificial Sequence
  Description of Artificial Sequence: Synthetic oligonucleotide
  Antisense strand to SEQ ID NO: 995106
uguucccugucaaagcugg

SEQ ID NO: 995108 - RNA, 19 nt, Artificial Sequence
  Description of Artificial Sequence: Synthetic oligonucleotide
  Sense strand starting at position 275 of SEQ ID NO: 914321
uagugucgagcguuaucau

SEQ ID NO: 995109 - RNA, 19 nt, Artificial Sequence
  Description of Artificial Sequence: Synthetic oligonucleotide
  Antisense strand to SEQ ID NO: 995108
augauaacgcucgacacua

SEQ ID NO: 995110 - RNA, 19 nt, Artificial Sequence
  Description of Artificial Sequence: Synthetic oligonucleotide
  Sense strand starting at position 782 of SEQ ID NO: 914321
ggaaguguucugggacucu

SEQ ID NO: 995111 - RNA, 19 nt, Artificial Sequence
  Description of Artificial Sequence: Synthetic oligonucleotide
  Antisense strand to SEQ ID NO: 995110
agagucccagaacacuucc

SEQ ID NO: 995112 - RNA, 19 nt, Artificial Sequence
  Description of Artificial Sequence: Synthetic oligonucleotide
  Sense strand starting at position 1663 of SEQ ID NO: 914321
cagugauuccugccucgcu

SEQ ID NO: 995113 - RNA, 19 nt, Artificial Sequence
  Description of Artificial Sequence: Synthetic oligonucleotide
  Antisense strand to SEQ ID NO: 995112
agcgaggcaggaaucacug

SEQ ID NO: 995114 - RNA, 19 nt, Artificial Sequence
  Description of Artificial Sequence: Synthetic oligonucleotide
  Sense strand starting at position 1665 of SEQ ID NO: 914321
gugauuccugccucgcuuu

SEQ ID NO: 995115 - RNA, 19 nt, Artificial Sequence
  Description of Artificial Sequence: Synthetic oligonucleotide
  Antisense strand to SEQ ID NO: 995114
aaagcgaggcaggaaucac

SEQ ID NO: 995116 - RNA, 19 nt, Artificial Sequence
  Description of Artificial Sequence: Synthetic oligonucleotide
  Sense strand starting at position 1915 of SEQ ID NO: 914321
gggcauuccaaacgugaaa

SEQ ID NO: 995117 - RNA, 19 nt, Artificial Sequence
  Description of Artificial Sequence: Synthetic oligonucleotide
  Antisense strand to SEQ ID NO: 995116
uuucacguuuggaaugccc

SEQ ID NO: 995118 - RNA, 19 nt, Artificial Sequence
  Description of Artificial Sequence: Synthetic oligonucleotide
  Sense strand starting at position 1917 of SEQ ID NO: 914321
gcauuccaaacgugaaaga

SEQ ID NO: 995119 - RNA, 19 nt, Artificial Sequence
  Description of Artificial Sequence: Synthetic oligonucleotide
  Antisense strand to SEQ ID NO: 995118
ucuuucacguuuggaaugc

SEQ ID NO: 995120 - RNA, 19 nt, Artificial Sequence
  Description of Artificial Sequence: Synthetic oligonucleotide
  Sense strand starting at position 1968 of SEQ ID NO: 914321
gccgaaauuuggcuaagcu

SEQ ID NO: 995121 - RNA, 19 nt, Artificial Sequence
  Description of Artificial Sequence: Synthetic oligonucleotide
  Antisense strand to SEQ ID NO: 995120
agcuuagccaaauuucggc

SEQ ID NO: 995122 - RNA, 19 nt, Artificial Sequence
  Description of Artificial Sequence: Synthetic oligonucleotide
  Sense strand starting at position 1983 of SEQ ID NO: 914321
agcuauugagaaggcuaca

SEQ ID NO: 995123 - RNA, 19 nt, Artificial Sequence
  Description of Artificial Sequence: Synthetic oligonucleotide
  Antisense strand to SEQ ID NO: 995122
uguagccuucucaauagcu

SEQ ID NO: 995124 - RNA, 19 nt, Artificial Sequence
  Description of Artificial Sequence: Synthetic oligonucleotide
  Sense strand starting at position 1997 of SEQ ID NO: 914321
cuacaauauguggaagugu

SEQ ID NO: 995125 - RNA, 19 nt, Artificial Sequence
  Description of Artificial Sequence: Synthetic oligonucleotide
  Antisense strand to SEQ ID NO: 995124
acacuuccacauauuguag

SEQ ID NO: 995126 - RNA, 19 nt, Artificial Sequence
  Description of Artificial Sequence: Synthetic oligonucleotide
  Sense strand starting at position 2005 of SEQ ID NO: 914321
uguggaaguguuuaucaga

SEQ ID NO: 995127 - RNA, 19 nt, Artificial Sequence
  Description of Artificial Sequence: Synthetic oligonucleotide
  Antisense strand to SEQ ID NO: 995126
ucugauaaacacuuccaca

SEQ ID NO: 995128 - RNA, 19 nt, Artificial Sequence
  Description of Artificial Sequence: Synthetic oligonucleotide
  Sense strand starting at position 2131 of SEQ ID NO: 914321
cugaguguugcugcacuuu

SEQ ID NO: 995129 - RNA, 19 nt, Artificial Sequence
  Description of Artificial Sequence: Synthetic oligonucleotide
  Antisense strand to SEQ ID NO: 995128
aaagugcagcaacacucag

SEQ ID NO: 995130 - RNA, 19 nt, Artificial Sequence
  Description of Artificial Sequence: Synthetic oligonucleotide
  Sense strand starting at position 2160 of SEQ ID NO: 914321
uugacugguacggaugauu

SEQ ID NO: 995131 - RNA, 19 nt, Artificial Sequence
  Description of Artificial Sequence: Synthetic oligonucleotide
  Antisense strand to SEQ ID NO: 995130
aaucauccguaccagucaa

SEQ ID NO: 995132 - RNA, 19 nt, Artificial Sequence
  Description of Artificial Sequence: Synthetic oligonucleotide
  Sense strand starting at position 2169 of SEQ ID NO: 914321
acggaugauucgguagaug

SEQ ID NO: 995133 - RNA, 19 nt, Artificial Sequence
  Description of Artificial Sequence: Synthetic oligonucleotide
  Antisense strand to SEQ ID NO: 995132
caucuaccgaaucauccgu

SEQ ID NO: 995134 - RNA, 19 nt, Artificial Sequence
  Description of Artificial Sequence: Synthetic oligonucleotide
  Sense strand starting at position 2172 of SEQ ID NO: 914321
gaugauucgguagauggca

SEQ ID NO: 995135 - RNA, 19 nt, Artificial Sequence
  Description of Artificial Sequence: Synthetic oligonucleotide
  Antisense strand to SEQ ID NO: 995134
ugccaucuaccgaaucauc

SEQ ID NO: 995136 - RNA, 19 nt, Artificial Sequence
  Description of Artificial Sequence: Synthetic oligonucleotide
  Sense strand starting at position 2240 of SEQ ID NO: 914321
aggacaccacgcuaugaua

SEQ ID NO: 995137 - RNA, 19 nt, Artificial Sequence
  Description of Artificial Sequence: Synthetic oligonucleotide
  Antisense strand to SEQ ID NO: 995136
uaucauagcgugguguccu

SEQ ID NO: 995138 - RNA, 19 nt, Artificial Sequence
  Description of Artificial Sequence: Synthetic oligonucleotide
  Sense strand starting at position 2253 of SEQ ID NO: 914321
augauauuagguuguggaa

SEQ ID NO: 995139 - RNA, 19 nt, Artificial Sequence
  Description of Artificial Sequence: Synthetic oligonucleotide
  Antisense strand to SEQ ID NO: 995138
uuccacaaccuaauaucau

SEQ ID NO: 995140 - RNA, 19 nt, Artificial Sequence
  Description of Artificial Sequence: Synthetic oligonucleotide
  Sense strand starting at position 2386 of SEQ ID NO: 914321
agggaugcuguccaacaca

SEQ ID NO: 995141 - RNA, 19 nt, Artificial Sequence
  Description of Artificial Sequence: Synthetic oligonucleotide
  Antisense strand to SEQ ID NO: 995140
uguguuggacagcaucccu

SEQ ID NO: 995142 - RNA, 19 nt, Artificial Sequence
  Description of Artificial Sequence: Synthetic oligonucleotide
  Sense strand starting at position 2499 of SEQ ID NO: 914321
accucacacuguuuaaagu

SEQ ID NO: 995143 - RNA, 19 nt, Artificial Sequence
  Description of Artificial Sequence: Synthetic oligonucleotide
  Antisense strand to SEQ ID NO: 995142
acuuuaaacagugugaggu

SEQ ID NO: 995144 - RNA, 19 nt, Artificial Sequence
  Description of Artificial Sequence: Synthetic oligonucleotide
  Sense strand starting at position 2500 of SEQ ID NO: 914321
ccucacacuguuuaaagua

SEQ ID NO: 995145 - RNA, 19 nt, Artificial Sequence
  Description of Artificial Sequence: Synthetic oligonucleotide
  Antisense strand to SEQ ID NO: 995144
uacuuuaaacagugugagg

SEQ ID NO: 995146 - RNA, 19 nt, Artificial Sequence
  Description of Artificial Sequence: Synthetic oligonucleotide
  Sense strand starting at position 2699 of SEQ ID NO: 914321
caccauagaguuugucaug

SEQ ID NO: 995147 - RNA, 19 nt, Artificial Sequence
  Description of Artificial Sequence: Synthetic oligonucleotide
  Antisense strand to SEQ ID NO: 995146
caugacaaacucuauggug

SEQ ID NO: 995148 - RNA, 19 nt, Artificial Sequence
  Description of Artificial Sequence: Synthetic oligonucleotide
  Sense strand starting at position 2700 of SEQ ID NO: 914321
accauagaguuugucauga

SEQ ID NO: 995149 - RNA, 19 nt, Artificial Sequence
  Description of Artificial Sequence: Synthetic oligonucleotide
  Antisense strand to SEQ ID NO: 995148
ucaugacaaacucuauggu

SEQ ID NO: 995150 - RNA, 19 nt, Artificial Sequence
  Description of Artificial Sequence: Synthetic oligonucleotide
  Sense strand starting at position 2705 of SEQ ID NO: 914321
agaguuugucaugaauucu

SEQ ID NO: 995151 - RNA, 19 nt, Artificial Sequence
  Description of Artificial Sequence: Synthetic oligonucleotide
  Antisense strand to SEQ ID NO: 995150
agaauucaugacaaacucu

SEQ ID NO: 995152 - RNA, 19 nt, Artificial Sequence
  Description of Artificial Sequence: Synthetic oligonucleotide
  Sense strand starting at position 3014 of SEQ ID NO: 914321
cagugucuggugcaauaaa

SEQ ID NO: 995153 - RNA, 19 nt, Artificial Sequence
  Description of Artificial Sequence: Synthetic oligonucleotide
  Antisense strand to SEQ ID NO: 995152
uuuauugcaccagacacug

SEQ ID NO: 995154 - RNA, 19 nt, Artificial Sequence
  Description of Artificial Sequence: Synthetic oligonucleotide
  Sense strand starting at position 3162 of SEQ ID NO: 914321
acagguuugaucugugauc

SEQ ID NO: 995155 - RNA, 19 nt, Artificial Sequence
  Description of Artificial Sequence: Synthetic oligonucleotide
  Antisense strand to SEQ ID NO: 995154
gaucacagaucaaaccugu

SEQ ID NO: 995156 - RNA, 19 nt, Artificial Sequence
  Description of Artificial Sequence: Synthetic oligonucleotide
  Sense strand starting at position 3163 of SEQ ID NO: 914321
cagguuugaucugugauca

SEQ ID NO: 995157 - RNA, 19 nt, Artificial Sequence
  Description of Artificial Sequence: Synthetic oligonucleotide
  Antisense strand to SEQ ID NO: 995156
ugaucacagaucaaaccug

SEQ ID NO: 995158 - RNA, 19 nt, Artificial Sequence
  Description of Artificial Sequence: Synthetic oligonucleotide
  Sense strand starting at position 3164 of SEQ ID NO: 914321
agguuugaucugugaucaa

SEQ ID NO: 995159 - RNA, 19 nt, Artificial Sequence
  Description of Artificial Sequence: Synthetic oligonucleotide
  Antisense strand to SEQ ID NO: 995158
uugaucacagaucaaaccu

SEQ ID NO: 995160 - RNA, 19 nt, Artificial Sequence
  Description of Artificial Sequence: Synthetic oligonucleotide
  Sense strand starting at position 3167 of SEQ ID NO: 914321
uuugaucugugaucaauac

SEQ ID NO: 995161 - RNA, 19 nt, Artificial Sequence
  Description of Artificial Sequence: Synthetic oligonucleotide
  Antisense strand to SEQ ID NO: 995160
guauugaucacagaucaaa

SEQ ID NO: 995162 - RNA, 19 nt, Artificial Sequence
  Description of Artificial Sequence: Synthetic oligonucleotide
  Sense strand starting at position 3320 of SEQ ID NO: 914321
acugacuuugcucagauua

SEQ ID NO: 995163 - RNA, 19 nt, Artificial Sequence
  Description of Artificial Sequence: Synthetic oligonucleotide
  Antisense strand to SEQ ID NO: 995162
uaaucugagcaaagucagu

SEQ ID NO: 995164 - RNA, 19 nt, Artificial Sequence
  Description of Artificial Sequence: Synthetic oligonucleotide
  Sense strand starting at position 3339 of SEQ ID NO: 914321
augcuaucaccagaaucgu

SEQ ID NO: 995165 - RNA, 19 nt, Artificial Sequence
  Description of Artificial Sequence: Synthetic oligonucleotide
  Antisense strand to SEQ ID NO: 995164
acgauucuggugauagcau

SEQ ID NO: 995166 - RNA, 19 nt, Artificial Sequence
  Description of Artificial Sequence: Synthetic oligonucleotide
  Sense strand starting at position 3455 of SEQ ID NO: 914321
augcaagacugccuauaaa

SEQ ID NO: 995167 - RNA, 19 nt, Artificial Sequence
  Description of Artificial Sequence: Synthetic oligonucleotide
  Antisense strand to SEQ ID NO: 995166
uuuauaggcagucuugcau

SEQ ID NO: 995168 - RNA, 19 nt, Artificial Sequence
  Description of Artificial Sequence: Synthetic oligonucleotide
  Sense strand starting at position 3504 of SEQ ID NO: 914321
gucauuuauugcuccucuu

SEQ ID NO: 995169 - RNA, 19 nt, Artificial Sequence
  Description of Artificial Sequence: Synthetic oligonucleotide
  Antisense strand to SEQ ID NO: 995168
aagaggagcaauaaaugac

SEQ ID NO: 995170 - RNA, 19 nt, Artificial Sequence
  Description of Artificial Sequence: Synthetic oligonucleotide
  Sense strand starting at position 3547 of SEQ ID NO: 914321
cauugaauucgccaagaag

SEQ ID NO: 995171 - RNA, 19 nt, Artificial Sequence
  Description of Artificial Sequence: Synthetic oligonucleotide
  Antisense strand to SEQ ID NO: 995170
cuucuuggcgaauucaaug

SEQ ID NO: 995172 - RNA, 19 nt, Artificial Sequence
  Description of Artificial Sequence: Synthetic oligonucleotide
  Sense strand starting at position 3550 of SEQ ID NO: 914321
ugaauucgccaagaaguca

SEQ ID NO: 995173 - RNA, 19 nt, Artificial Sequence
  Description of Artificial Sequence: Synthetic oligonucleotide
  Antisense strand to SEQ ID NO: 995172
ugacuucuuggcgaauuca

SEQ ID NO: 995174 - RNA, 19 nt, Artificial Sequence
  Description of Artificial Sequence: Synthetic oligonucleotide
  Sense strand starting at position 3683 of SEQ ID NO: 914321
aucuaauacuuggugcaua

SEQ ID NO: 995175 - RNA, 19 nt, Artificial Sequence
  Description of Artificial Sequence: Synthetic oligonucleotide
  Antisense strand to SEQ ID NO: 995174
uaugcaccaaguauuagau

SEQ ID NO: 995176 - RNA, 19 nt, Artificial Sequence
  Description of Artificial Sequence: Synthetic oligonucleotide
  Sense strand starting at position 3686 of SEQ ID NO: 914321
uaauacuuggugcauagua

SEQ ID NO: 995177 - RNA, 19 nt, Artificial Sequence
  Description of Artificial Sequence: Synthetic oligonucleotide
  Antisense strand to SEQ ID NO: 995176
uacuaugcaccaaguauua

SEQ ID NO: 995178 - RNA, 19 nt, Artificial Sequence
  Description of Artificial Sequence: Synthetic oligonucleotide
  Sense strand starting at position 3688 of SEQ ID NO: 914321
auacuuggugcauaguaaa

SEQ ID NO: 995179 - RNA, 19 nt, Artificial Sequence
  Description of Artificial Sequence: Synthetic oligonucleotide
  Antisense strand to SEQ ID NO: 995178
uuuacuaugcaccaaguau

SEQ ID NO: 995180 - RNA, 19 nt, Artificial Sequence
  Description of Artificial Sequence: Synthetic oligonucleotide
  Sense strand starting at position 3854 of SEQ ID NO: 914321
auugauugcuuacuuaaug

SEQ ID NO: 995181 - RNA, 19 nt, Artificial Sequence
  Description of Artificial Sequence: Synthetic oligonucleotide
  Antisense strand to SEQ ID NO: 995180
cauuaaguaagcaaucaau

SEQ ID NO: 995182 - RNA, 19 nt, Artificial Sequence
  Description of Artificial Sequence: Synthetic oligonucleotide
  Sense strand starting at position 3886 of SEQ ID NO: 914321
guggguaacagguaacauu

SEQ ID NO: 995183 - RNA, 19 nt, Artificial Sequence
  Description of Artificial Sequence: Synthetic oligonucleotide
  Antisense strand to SEQ ID NO: 995182
aauguuaccuguuacccac

SEQ ID NO: 995184 - RNA, 19 nt, Artificial Sequence
  Description of Artificial Sequence: Synthetic oligonucleotide
  Sense strand starting at position 3970 of SEQ ID NO: 914321
cuuuauaaucuaugaggua

SEQ ID NO: 995185 - RNA, 19 nt, Artificial Sequence
  Description of Artificial Sequence: Synthetic oligonucleotide
  Antisense strand to SEQ ID NO: 995184
uaccucauagauuauaaag

SEQ ID NO: 995186 - RNA, 19 nt, Artificial Sequence
  Description of Artificial Sequence: Synthetic oligonucleotide
  Sense strand starting at position 10 of SEQ ID NO: 914322
cggucaagguccuugggaa

SEQ ID NO: 995187 - RNA, 19 nt, Artificial Sequence
  Description of Artificial Sequence: Synthetic oligonucleotide
  Antisense strand to SEQ ID NO: 995186
uucccaaggaccuugaccg

SEQ ID NO: 995188 - RNA, 19 nt, Artificial Sequence
  Description of Artificial Sequence: Synthetic oligonucleotide
  Sense strand starting at position 212 of SEQ ID NO: 914322
gcuagaagaugccucuaau

SEQ ID NO: 995189 - RNA, 19 nt, Artificial Sequence
  Description of Artificial Sequence: Synthetic oligonucleotide
  Antisense strand to SEQ ID NO: 995188
auuagaggcaucuucuagc

SEQ ID NO: 995190 - RNA, 19 nt, Artificial Sequence
  Description of Artificial Sequence: Synthetic oligonucleotide
  Sense strand starting at position 539 of SEQ ID NO: 914322
ccagcuuugacagggaaca

SEQ ID NO: 995191 - RNA, 19 nt, Artificial Sequence
  Description of Artificial Sequence: Synthetic oligonucleotide
  Antisense strand to SEQ ID NO: 995190
uguucccugucaaagcugg

SEQ ID NO: 995192 - RNA, 19 nt, Artificial Sequence
  Description of Artificial Sequence: Synthetic oligonucleotide
  Sense strand starting at position 733 of SEQ ID NO: 914322
ccguagugucgagcguuau

SEQ ID NO: 995193 - RNA, 19 nt, Artificial Sequence
  Description of Artificial Sequence: Synthetic oligonucleotide
  Antisense strand to SEQ ID NO: 995192
auaacgcucgacacuacgg

SEQ ID NO: 995194 - RNA, 19 nt, Artificial Sequence
  Description of Artificial Sequence: Synthetic oligonucleotide
  Sense strand starting at position 736 of SEQ ID NO: 914322
uagugucgagcguuaucau

SEQ ID NO: 995195 - RNA, 19 nt, Artificial Sequence
  Description of Artificial Sequence: Synthetic oligonucleotide
  Antisense strand to SEQ ID NO: 995194
augauaacgcucgacacua

SEQ ID NO: 995196 - RNA, 19 nt, Artificial Sequence
  Description of Artificial Sequence: Synthetic oligonucleotide
  Sense strand starting at position 1243 of SEQ ID NO: 914322
ggaaguguucugggacucu

SEQ ID NO: 995197 - RNA, 19 nt, Artificial Sequence
  Description of Artificial Sequence: Synthetic oligonucleotide
  Antisense strand to SEQ ID NO: 995196
agagucccagaacacuucc

SEQ ID NO: 995198 - RNA, 19 nt, Artificial Sequence
  Description of Artificial Sequence: Synthetic oligonucleotide
  Sense strand starting at position 2124 of SEQ ID NO: 914322
cagugauuccugccucgcu

SEQ ID NO: 995199 - RNA, 19 nt, Artificial Sequence
  Description of Artificial Sequence: Synthetic oligonucleotide
  Antisense strand to SEQ ID NO: 995198
agcgaggcaggaaucacug

SEQ ID NO: 995200 - RNA, 19 nt, Artificial Sequence
  Description of Artificial Sequence: Synthetic oligonucleotide
  Sense strand starting at position 2126 of SEQ ID NO: 914322
gugauuccugccucgcuuu

SEQ ID NO: 995201 - RNA, 19 nt, Artificial Sequence
  Description of Artificial Sequence: Synthetic oligonucleotide
  Antisense strand to SEQ ID NO: 995200
aaagcgaggcaggaaucac

SEQ ID NO: 995202 - RNA, 19 nt, Artificial Sequence
  Description of Artificial Sequence: Synthetic oligonucleotide
  Sense strand starting at position 2376 of SEQ ID NO: 914322
gggcauuccaaacgugaaa

SEQ ID NO: 995203 - RNA, 19 nt, Artificial Sequence
  Description of Artificial Sequence: Synthetic oligonucleotide
  Antisense strand to SEQ ID NO: 995202
uuucacguuuggaaugccc

SEQ ID NO: 995204 - RNA, 19 nt, Artificial Sequence
  Description of Artificial Sequence: Synthetic oligonucleotide
  Sense strand starting at position 2378 of SEQ ID NO: 914322
gcauuccaaacgugaaaga

SEQ ID NO: 995205 - RNA, 19 nt, Artificial Sequence
  Description of Artificial Sequence: Synthetic oligonucleotide
  Antisense strand to SEQ ID NO: 995204
ucuuucacguuuggaaugc

SEQ ID NO: 995206 - RNA, 19 nt, Artificial Sequence
  Description of Artificial Sequence: Synthetic oligonucleotide
  Sense strand starting at position 2429 of SEQ ID NO: 914322
gccgaaauuuggcuaagcu

SEQ ID NO: 995207 - RNA, 19 nt, Artificial Sequence
  Description of Artificial Sequence: Synthetic oligonucleotide
  Antisense strand to SEQ ID NO: 995206
agcuuagccaaauuucggc

SEQ ID NO: 995208 - RNA, 19 nt, Artificial Sequence
  Description of Artificial Sequence: Synthetic oligonucleotide
  Sense strand starting at position 2444 of SEQ ID NO: 914322
agcuauugagaaggcuaca

SEQ ID NO: 995209 - RNA, 19 nt, Artificial Sequence
  Description of Artificial Sequence: Synthetic oligonucleotide
  Antisense strand to SEQ ID NO: 995208
uguagccuucucaauagcu

SEQ ID NO: 995210 - RNA, 19 nt, Artificial Sequence
  Description of Artificial Sequence: Synthetic oligonucleotide
  Sense strand starting at position 2458 of SEQ ID NO: 914322
cuacaauauguggaagugu

SEQ ID NO: 995211 - RNA, 19 nt, Artificial Sequence
  Description of Artificial Sequence: Synthetic oligonucleotide
  Antisense strand to SEQ ID NO: 995210
acacuuccacauauuguag

SEQ ID NO: 995212 - RNA, 19 nt, Artificial Sequence
  Description of Artificial Sequence: Synthetic oligonucleotide
  Sense strand starting at position 2466 of SEQ ID NO: 914322
uguggaaguguuuaucaga

SEQ ID NO: 995213 - RNA, 19 nt, Artificial Sequence
  Description of Artificial Sequence: Synthetic oligonucleotide
  Antisense strand to SEQ ID NO: 995212
ucugauaaacacuuccaca

SEQ ID NO: 995214 - RNA, 19 nt, Artificial Sequence
  Description of Artificial Sequence: Synthetic oligonucleotide
  Sense strand starting at position 2592 of SEQ ID NO: 914322
cugaguguugcugcacuuu

SEQ ID NO: 995215 - RNA, 19 nt, Artificial Sequence
  Description of Artificial Sequence: Synthetic oligonucleotide
  Antisense strand to SEQ ID NO: 995214
aaagugcagcaacacucag

SEQ ID NO: 995216 - RNA, 19 nt, Artificial Sequence
  Description of Artificial Sequence: Synthetic oligonucleotide
  Sense strand starting at position 2621 of SEQ ID NO: 914322
uugacugguacggaugauu

SEQ ID NO: 995217 - RNA, 19 nt, Artificial Sequence
  Description of Artificial Sequence: Synthetic oligonucleotide
  Antisense strand to SEQ ID NO: 995216
aaucauccguaccagucaa

SEQ ID NO: 995218 - RNA, 19 nt, Artificial Sequence
  Description of Artificial Sequence: Synthetic oligonucleotide
  Sense strand starting at position 2630 of SEQ ID NO: 914322
acggaugauucgguagaug

SEQ ID NO: 995219 - RNA, 19 nt, Artificial Sequence
  Description of Artificial Sequence: Synthetic oligonucleotide
  Antisense strand to SEQ ID NO: 995218
caucuaccgaaucauccgu

SEQ ID NO: 995220 - RNA, 19 nt, Artificial Sequence
  Description of Artificial Sequence: Synthetic oligonucleotide
  Sense strand starting at position 2633 of SEQ ID NO: 914322
gaugauucgguagauggca

SEQ ID NO: 995221 - RNA, 19 nt, Artificial Sequence
  Description of Artificial Sequence: Synthetic oligonucleotide
  Antisense strand to SEQ ID NO: 995220
ugccaucuaccgaaucauc

SEQ ID NO: 995222 - RNA, 19 nt, Artificial Sequence
  Description of Artificial Sequence: Synthetic oligonucleotide
  Sense strand starting at position 2701 of SEQ ID NO: 914322
aggacaccacgcuaugaua

SEQ ID NO: 995223 - RNA, 19 nt, Artificial Sequence
  Description of Artificial Sequence: Synthetic oligonucleotide
  Antisense strand to SEQ ID NO: 995222
uaucauagcgugguguccu

SEQ ID NO: 995224 - RNA, 19 nt, Artificial Sequence
  Description of Artificial Sequence: Synthetic oligonucleotide
  Sense strand starting at position 2703 of SEQ ID NO: 914322
gacaccacgcuaugauauu

SEQ ID NO: 995225 - RNA, 19 nt, Artificial Sequence
  Description of Artificial Sequence: Synthetic oligonucleotide
  Antisense strand to SEQ ID NO: 995224
aauaucauagcgugguguc

SEQ ID NO: 995226 - RNA, 19 nt, Artificial Sequence
  Description of Artificial Sequence: Synthetic oligonucleotide
  Sense strand starting at position 2714 of SEQ ID NO: 914322
augauauuagguuguggaa

SEQ ID NO: 995227 - RNA, 19 nt, Artificial Sequence
  Description of Artificial Sequence: Synthetic oligonucleotide
  Antisense strand to SEQ ID NO: 995226
uuccacaaccuaauaucau

SEQ ID NO: 995228 - RNA, 19 nt, Artificial Sequence
  Description of Artificial Sequence: Synthetic oligonucleotide
  Sense strand starting at position 2847 of SEQ ID NO: 914322
agggaugcuguccaacaca

SEQ ID NO: 995229 - RNA, 19 nt, Artificial Sequence
  Description of Artificial Sequence: Synthetic oligonucleotide
  Antisense strand to SEQ ID NO: 995228
uguguuggacagcaucccu

SEQ ID NO: 995230 - RNA, 19 nt, Artificial Sequence
  Description of Artificial Sequence: Synthetic oligonucleotide
  Sense strand starting at position 2960 of SEQ ID NO: 914322
accucacacuguuuaaagu

SEQ ID NO: 995231 - RNA, 19 nt, Artificial Sequence
  Description of Artificial Sequence: Synthetic oligonucleotide
  Antisense strand to SEQ ID NO: 995230
acuuuaaacagugugaggu

SEQ ID NO: 995232 - RNA, 19 nt, Artificial Sequence
  Description of Artificial Sequence: Synthetic oligonucleotide
  Sense strand starting at position 2961 of SEQ ID NO: 914322
ccucacacuguuuaaagua

SEQ ID NO: 995233 - RNA, 19 nt, Artificial Sequence
  Description of Artificial Sequence: Synthetic oligonucleotide
  Antisense strand to SEQ ID NO: 995232
uacuuuaaacagugugagg

SEQ ID NO: 995234 - RNA, 19 nt, Artificial Sequence
  Description of Artificial Sequence: Synthetic oligonucleotide
  Sense strand starting at position 2969 of SEQ ID NO: 914322
uguuuaaaguaggcuuaca

SEQ ID NO: 995235 - RNA, 19 nt, Artificial Sequence
  Description of Artificial Sequence: Synthetic oligonucleotide
  Antisense strand to SEQ ID NO: 995234
uguaagccuacuuuaaaca

SEQ ID NO: 995236 - RNA, 19 nt, Artificial Sequence
  Description of Artificial Sequence: Synthetic oligonucleotide
  Sense strand starting at position 3160 of SEQ ID NO: 914322
caccauagaguuugucaug

SEQ ID NO: 995237 - RNA, 19 nt, Artificial Sequence
  Description of Artificial Sequence: Synthetic oligonucleotide
  Antisense strand to SEQ ID NO: 995236
caugacaaacucuauggug

SEQ ID NO: 995238 - RNA, 19 nt, Artificial Sequence
  Description of Artificial Sequence: Synthetic oligonucleotide
  Sense strand starting at position 3161 of SEQ ID NO: 914322
accauagaguuugucauga

SEQ ID NO: 995239 - RNA, 19 nt, Artificial Sequence
  Description of Artificial Sequence: Synthetic oligonucleotide
  Antisense strand to SEQ ID NO: 995238
ucaugacaaacucuauggu

SEQ ID NO: 995240 - RNA, 19 nt, Artificial Sequence
  Description of Artificial Sequence: Synthetic oligonucleotide
  Sense strand starting at position 3166 of SEQ ID NO: 914322
agaguuugucaugaauucu

SEQ ID NO: 995241 - RNA, 19 nt, Artificial Sequence
  Description of Artificial Sequence: Synthetic oligonucleotide
  Antisense strand to SEQ ID NO: 995240
agaauucaugacaaacucu

SEQ ID NO: 995242 - RNA, 19 nt, Artificial Sequence
  Description of Artificial Sequence: Synthetic oligonucleotide
  Sense strand starting at position 3458 of SEQ ID NO: 914322
auaccaagugcuugaagca

SEQ ID NO: 995243 - RNA, 19 nt, Artificial Sequence
  Description of Artificial Sequence: Synthetic oligonucleotide
  Antisense strand to SEQ ID NO: 995242
ugcuucaagcacuugguau

SEQ ID NO: 995244 - RNA, 19 nt, Artificial Sequence
  Description of Artificial Sequence: Synthetic oligonucleotide
  Sense strand starting at position 3475 of SEQ ID NO: 914322
cagugucuggugcaauaaa

SEQ ID NO: 995245 - RNA, 19 nt, Artificial Sequence
  Description of Artificial Sequence: Synthetic oligonucleotide
  Antisense strand to SEQ ID NO: 995244
uuuauugcaccagacacug

SEQ ID NO: 995246 - RNA, 19 nt, Artificial Sequence
  Description of Artificial Sequence: Synthetic oligonucleotide
  Sense strand starting at position 3535 of SEQ ID NO: 914322
ugagauagaucuuagaagg

SEQ ID NO: 995247 - RNA, 19 nt, Artificial Sequence
  Description of Artificial Sequence: Synthetic oligonucleotide
  Antisense strand to SEQ ID NO: 995246
ccuucuaagaucuaucuca

SEQ ID NO: 995248 - RNA, 19 nt, Artificial Sequence
  Description of Artificial Sequence: Synthetic oligonucleotide
  Sense strand starting at position 3623 of SEQ ID NO: 914322
acagguuugaucugugauc

SEQ ID NO: 995249 - RNA, 19 nt, Artificial Sequence
  Description of Artificial Sequence: Synthetic oligonucleotide
  Antisense strand to SEQ ID NO: 995248
gaucacagaucaaaccugu

SEQ ID NO: 995250 - RNA, 19 nt, Artificial Sequence
  Description of Artificial Sequence: Synthetic oligonucleotide
  Sense strand starting at position 3624 of SEQ ID NO: 914322
cagguuugaucugugauca

SEQ ID NO: 995251 - RNA, 19 nt, Artificial Sequence
  Description of Artificial Sequence: Synthetic oligonucleotide
  Antisense strand to SEQ ID NO: 995250
ugaucacagaucaaaccug

SEQ ID NO: 995252 - RNA, 19 nt, Artificial Sequence
  Description of Artificial Sequence: Synthetic oligonucleotide
  Sense strand starting at position 3625 of SEQ ID NO: 914322
agguuugaucugugaucaa

SEQ ID NO: 995253 - RNA, 19 nt, Artificial Sequence
  Description of Artificial Sequence: Synthetic oligonucleotide
  Antisense strand to SEQ ID NO: 995252
uugaucacagaucaaaccu

SEQ ID NO: 995254 - RNA, 19 nt, Artificial Sequence
  Description of Artificial Sequence: Synthetic oligonucleotide
  Sense strand starting at position 3628 of SEQ ID NO: 914322
uuugaucugugaucaauac

SEQ ID NO: 995255 - RNA, 19 nt, Artificial Sequence
  Description of Artificial Sequence: Synthetic oligonucleotide
  Antisense strand to SEQ ID NO: 995254
guauugaucacagaucaaa

SEQ ID NO: 995256 - RNA, 19 nt, Artificial Sequence
  Description of Artificial Sequence: Synthetic oligonucleotide
  Sense strand starting at position 3781 of SEQ ID NO: 914322
acugacuuugcucagauua

SEQ ID NO: 995257 - RNA, 19 nt, Artificial Sequence
  Description of Artificial Sequence: Synthetic oligonucleotide
  Antisense strand to SEQ ID NO: 995256
uaaucugagcaaagucagu

SEQ ID NO: 995258 - RNA, 19 nt, Artificial Sequence
  Description of Artificial Sequence: Synthetic oligonucleotide
  Sense strand starting at position 3800 of SEQ ID NO: 914322
augcuaucaccagaaucgu

SEQ ID NO: 995259 - RNA, 19 nt, Artificial Sequence
  Description of Artificial Sequence: Synthetic oligonucleotide
  Antisense strand to SEQ ID NO: 995258
acgauucuggugauagcau

SEQ ID NO: 995260 - RNA, 19 nt, Artificial Sequence
  Description of Artificial Sequence: Synthetic oligonucleotide
  Sense strand starting at position 3872 of SEQ ID NO: 914322
gcuccuuguguuuacagaa

SEQ ID NO: 995261 - RNA, 19 nt, Artificial Sequence
  Description of Artificial Sequence: Synthetic oligonucleotide
  Antisense strand to SEQ ID NO: 995260
uucuguaaacacaaggagc

SEQ ID NO: 995262 - RNA, 19 nt, Artificial Sequence
  Description of Artificial Sequence: Synthetic oligonucleotide
  Sense strand starting at position 3916 of SEQ ID NO: 914322
augcaagacugccuauaaa

SEQ ID NO: 995263 - RNA, 19 nt, Artificial Sequence
  Description of Artificial Sequence: Synthetic oligonucleotide
  Antisense strand to SEQ ID NO: 995262
uuuauaggcagucuugcau

SEQ ID NO: 995264 - RNA, 19 nt, Artificial Sequence
  Description of Artificial Sequence: Synthetic oligonucleotide
  Sense strand starting at position 3965 of SEQ ID NO: 914322
gucauuuauugcuccucuu

SEQ ID NO: 995265 - RNA, 19 nt, Artificial Sequence
  Description of Artificial Sequence: Synthetic oligonucleotide
  Antisense strand to SEQ ID NO: 995264
aagaggagcaauaaaugac

SEQ ID NO: 995266 - RNA, 19 nt, Artificial Sequence
  Description of Artificial Sequence: Synthetic oligonucleotide
  Sense strand starting at position 153 of SEQ ID NO: 914323
cccagaccucuuuguuaca

SEQ ID NO: 995267 - RNA, 19 nt, Artificial Sequence
  Description of Artificial Sequence: Synthetic oligonucleotide
  Antisense strand to SEQ ID NO: 995266
uguaacaaagaggucuggg

SEQ ID NO: 995268 - RNA, 19 nt, Artificial Sequence
  Description of Artificial Sequence: Synthetic oligonucleotide
  Sense strand starting at position 154 of SEQ ID NO: 914323
ccagaccucuuuguuacau

SEQ ID NO: 995269 - RNA, 19 nt, Artificial Sequence
  Description of Artificial Sequence: Synthetic oligonucleotide
  Antisense strand to SEQ ID NO: 995268
auguaacaaagaggucugg

SEQ ID NO: 995270 - RNA, 19 nt, Artificial Sequence
  Description of Artificial Sequence: Synthetic oligonucleotide
  Sense strand starting at position 259 of SEQ ID NO: 914323
agaaaugcccuaugguauc

SEQ ID NO: 995271 - RNA, 19 nt, Artificial Sequence
  Description of Artificial Sequence: Synthetic oligonucleotide
  Antisense strand to SEQ ID NO: 995270
gauaccauagggcauuucu

SEQ ID NO: 995272 - RNA, 19 nt, Artificial Sequence
  Description of Artificial Sequence: Synthetic oligonucleotide
  Sense strand starting at position 273 of SEQ ID NO: 914323
guaucauaguuuccuuaaa

SEQ ID NO: 995273 - RNA, 19 nt, Artificial Sequence
  Description of Artificial Sequence: Synthetic oligonucleotide
  Antisense strand to SEQ ID NO: 995272
uuuaaggaaacuaugauac

SEQ ID NO: 995274 - RNA, 19 nt, Artificial Sequence
  Description of Artificial Sequence: Synthetic oligonucleotide
  Sense strand starting at position 443 of SEQ ID NO: 914323
aguaccaaaucuguuauaa

SEQ ID NO: 995275 - RNA, 19 nt, Artificial Sequence
  Description of Artificial Sequence: Synthetic oligonucleotide
  Antisense strand to SEQ ID NO: 995274
uuauaacagauuugguacu

SEQ ID NO: 995276 - RNA, 19 nt, Artificial Sequence
  Description of Artificial Sequence: Synthetic oligonucleotide
  Sense strand starting at position 820 of SEQ ID NO: 914323
uuuagugaggguuaucaag

SEQ ID NO: 995277 - RNA, 19 nt, Artificial Sequence
  Description of Artificial Sequence: Synthetic oligonucleotide
  Antisense strand to SEQ ID NO: 995276
cuugauaacccucacuaaa

SEQ ID NO: 995278 - RNA, 19 nt, Artificial Sequence
  Description of Artificial Sequence: Synthetic oligonucleotide
  Sense strand starting at position 822 of SEQ ID NO: 914323
uagugaggguuaucaagag

SEQ ID NO: 995279 - RNA, 19 nt, Artificial Sequence
  Description of Artificial Sequence: Synthetic oligonucleotide
  Antisense strand to SEQ ID NO: 995278
cucuugauaacccucacua

SEQ ID NO: 995280 - RNA, 19 nt, Artificial Sequence
  Description of Artificial Sequence: Synthetic oligonucleotide
  Sense strand starting at position 905 of SEQ ID NO: 914323
gaaauccuuugacucgaga

SEQ ID NO: 995281 - RNA, 19 nt, Artificial Sequence
  Description of Artificial Sequence: Synthetic oligonucleotide
  Antisense strand to SEQ ID NO: 995280
ucucgagucaaaggauuuc

SEQ ID NO: 995282 - RNA, 19 nt, Artificial Sequence
  Description of Artificial Sequence: Synthetic oligonucleotide
  Sense strand starting at position 1022 of SEQ ID NO: 914323
uguuuaauugcacauguga

SEQ ID NO: 995283 - RNA, 19 nt, Artificial Sequence
  Description of Artificial Sequence: Synthetic oligonucleotide
  Antisense strand to SEQ ID NO: 995282
ucacaugugcaauuaaaca

SEQ ID NO: 995284 - RNA, 19 nt, Artificial Sequence
  Description of Artificial Sequence: Synthetic oligonucleotide
  Sense strand starting at position 1037 of SEQ ID NO: 914323
gugaguggcagugauaaua

SEQ ID NO: 995285 - RNA, 19 nt, Artificial Sequence
  Description of Artificial Sequence: Synthetic oligonucleotide
  Antisense strand to SEQ ID NO: 995284
uauuaucacugccacucac

SEQ ID NO: 995286 - RNA, 19 nt, Artificial Sequence
  Description of Artificial Sequence: Synthetic oligonucleotide
  Sense strand starting at position 1045 of SEQ ID NO: 914323
cagugauaauaugcagcaa

SEQ ID NO: 995287 - RNA, 19 nt, Artificial Sequence
  Description of Artificial Sequence: Synthetic oligonucleotide
  Antisense strand to SEQ ID NO: 995286
uugcugcauauuaucacug

SEQ ID NO: 995288 - RNA, 19 nt, Artificial Sequence
  Description of Artificial Sequence: Synthetic oligonucleotide
  Sense strand starting at position 1103 of SEQ ID NO: 914323
aagguauuacaucgcuaac

SEQ ID NO: 995289 - RNA, 19 nt, Artificial Sequence
  Description of Artificial Sequence: Synthetic oligonucleotide
  Antisense strand to SEQ ID NO: 995288
guuagcgauguaauaccuu

SEQ ID NO: 995290 - RNA, 19 nt, Artificial Sequence
  Description of Artificial Sequence: Synthetic oligonucleotide
  Sense strand starting at position 1106 of SEQ ID NO: 914323
guauuacaucgcuaacucu

SEQ ID NO: 995291 - RNA, 19 nt, Artificial Sequence
  Description of Artificial Sequence: Synthetic oligonucleotide
  Antisense strand to SEQ ID NO: 995290
agaguuagcgauguaauac

SEQ ID NO: 995292 - RNA, 19 nt, Artificial Sequence
  Description of Artificial Sequence: Synthetic oligonucleotide
  Sense strand starting at position 1185 of SEQ ID NO: 914323
augaaacauugguucuguu

SEQ ID NO: 995293 - RNA, 19 nt, Artificial Sequence
  Description of Artificial Sequence: Synthetic oligonucleotide
  Antisense strand to SEQ ID NO: 995292
aacagaaccaauguuucau

SEQ ID NO: 995294 - RNA, 19 nt, Artificial Sequence
  Description of Artificial Sequence: Synthetic oligonucleotide
  Sense strand starting at position 1404 of SEQ ID NO: 914323
aucuguacuuaaucggaau

SEQ ID NO: 995295 - RNA, 19 nt, Artificial Sequence
  Description of Artificial Sequence: Synthetic oligonucleotide
  Antisense strand to SEQ ID NO: 995294
auuccgauuaaguacagau

SEQ ID NO: 995296 - RNA, 19 nt, Artificial Sequence
  Description of Artificial Sequence: Synthetic oligonucleotide
  Sense strand starting at position 1586 of SEQ ID NO: 914323
gguaguaguucauuaugag

SEQ ID NO: 995297 - RNA, 19 nt, Artificial Sequence
  Description of Artificial Sequence: Synthetic oligonucleotide
  Antisense strand to SEQ ID NO: 995296
cucauaaugaacuacuacc

SEQ ID NO: 995298 - RNA, 19 nt, Artificial Sequence
  Description of Artificial Sequence: Synthetic oligonucleotide
  Sense strand starting at position 1587 of SEQ ID NO: 914323
guaguaguucauuaugagu

SEQ ID NO: 995299 - RNA, 19 nt, Artificial Sequence
  Description of Artificial Sequence: Synthetic oligonucleotide
  Antisense strand to SEQ ID NO: 995298
acucauaaugaacuacuac

SEQ ID NO: 995300 - RNA, 19 nt, Artificial Sequence
  Description of Artificial Sequence: Synthetic oligonucleotide
  Sense strand starting at position 1600 of SEQ ID NO: 914323
augagugucuacuugaaau

SEQ ID NO: 995301 - RNA, 19 nt, Artificial Sequence
  Description of Artificial Sequence: Synthetic oligonucleotide
  Antisense strand to SEQ ID NO: 995300
auuucaaguagacacucau

SEQ ID NO: 995302 - RNA, 19 nt, Artificial Sequence
  Description of Artificial Sequence: Synthetic oligonucleotide
  Sense strand starting at position 1602 of SEQ ID NO: 914323
gagugucuacuugaaauuc

SEQ ID NO: 995303 - RNA, 19 nt, Artificial Sequence
  Description of Artificial Sequence: Synthetic oligonucleotide
  Antisense strand to SEQ ID NO: 995302
gaauuucaaguagacacuc

SEQ ID NO: 995304 - RNA, 19 nt, Artificial Sequence
  Description of Artificial Sequence: Synthetic oligonucleotide
  Sense strand starting at position 1714 of SEQ ID NO: 914323
uggaaugaggagugcuaua

SEQ ID NO: 995305 - RNA, 19 nt, Artificial Sequence
  Description of Artificial Sequence: Synthetic oligonucleotide
  Antisense strand to SEQ ID NO: 995304
uauagcacuccucauucca

SEQ ID NO: 995306 - RNA, 19 nt, Artificial Sequence
  Description of Artificial Sequence: Synthetic oligonucleotide
  Sense strand starting at position 1917 of SEQ ID NO: 914323
gucagucaccuggauuaua

SEQ ID NO: 995307 - RNA, 19 nt, Artificial Sequence
  Description of Artificial Sequence: Synthetic oligonucleotide
  Antisense strand to SEQ ID NO: 995306
uauaauccaggugacugac

SEQ ID NO: 995308 - RNA, 19 nt, Artificial Sequence
  Description of Artificial Sequence: Synthetic oligonucleotide
  Sense strand starting at position 2078 of SEQ ID NO: 914323
acucauguauacucagaug

SEQ ID NO: 995309 - RNA, 19 nt, Artificial Sequence
  Description of Artificial Sequence: Synthetic oligonucleotide
  Antisense strand to SEQ ID NO: 995308
caucugaguauacaugagu

SEQ ID NO: 995310 - RNA, 19 nt, Artificial Sequence
  Description of Artificial Sequence: Synthetic oligonucleotide
  Sense strand starting at position 2255 of SEQ ID NO: 914323
gcagaaucuaaaugaaggu

SEQ ID NO: 995311 - RNA, 19 nt, Artificial Sequence
  Description of Artificial Sequence: Synthetic oligonucleotide
  Antisense strand to SEQ ID NO: 995310
accuucauuuagauucugc

SEQ ID NO: 995312 - RNA, 19 nt, Artificial Sequence
  Description of Artificial Sequence: Synthetic oligonucleotide
  Sense strand starting at position 2495 of SEQ ID NO: 914323
agaagauaaguaugcucua

SEQ ID NO: 995313 - RNA, 19 nt, Artificial Sequence
  Description of Artificial Sequence: Synthetic oligonucleotide
  Antisense strand to SEQ ID NO: 995312
uagagcauacuuaucuucu

SEQ ID NO: 995314 - RNA, 19 nt, Artificial Sequence
  Description of Artificial Sequence: Synthetic oligonucleotide
  Sense strand starting at position 2500 of SEQ ID NO: 914323
auaaguaugcucuagggac

SEQ ID NO: 995315 - RNA, 19 nt, Artificial Sequence
  Description of Artificial Sequence: Synthetic oligonucleotide
  Antisense strand to SEQ ID NO: 995314
gucccuagagcauacuuau

SEQ ID NO: 995316 - RNA, 19 nt, Artificial Sequence
  Description of Artificial Sequence: Synthetic oligonucleotide
  Sense strand starting at position 2565 of SEQ ID NO: 914323
cucaguaaggacugccaua

SEQ ID NO: 995317 - RNA, 19 nt, Artificial Sequence
  Description of Artificial Sequence: Synthetic oligonucleotide
  Antisense strand to SEQ ID NO: 995316
uauggcaguccuuacugag

SEQ ID NO: 995318 - RNA, 19 nt, Artificial Sequence
  Description of Artificial Sequence: Synthetic oligonucleotide
  Sense strand starting at position 2597 of SEQ ID NO: 914323
aaguauccagagugagaca

SEQ ID NO: 995319 - RNA, 19 nt, Artificial Sequence
  Description of Artificial Sequence: Synthetic oligonucleotide
  Antisense strand to SEQ ID NO: 995318
ugucucacucuggauacuu

SEQ ID NO: 995320 - RNA, 19 nt, Artificial Sequence
  Description of Artificial Sequence: Synthetic oligonucleotide
  Sense strand starting at position 2630 of SEQ ID NO: 914323
guccacaguccuugaaaga

SEQ ID NO: 995321 - RNA, 19 nt, Artificial Sequence
  Description of Artificial Sequence: Synthetic oligonucleotide
  Antisense strand to SEQ ID NO: 995320
ucuuucaaggacuguggac

SEQ ID NO: 995322 - RNA, 19 nt, Artificial Sequence
  Description of Artificial Sequence: Synthetic oligonucleotide
  Sense strand starting at position 2732 of SEQ ID NO: 914323
aacagucaugguggcaaua

SEQ ID NO: 995323 - RNA, 19 nt, Artificial Sequence
  Description of Artificial Sequence: Synthetic oligonucleotide
  Antisense strand to SEQ ID NO: 995322
uauugccaccaugacuguu

SEQ ID NO: 995324 - RNA, 19 nt, Artificial Sequence
  Description of Artificial Sequence: Synthetic oligonucleotide
  Sense strand starting at position 2751 of SEQ ID NO: 914323
aaaugacuugcugggaaau

SEQ ID NO: 995325 - RNA, 19 nt, Artificial Sequence
  Description of Artificial Sequence: Synthetic oligonucleotide
  Antisense strand to SEQ ID NO: 995324
auuucccagcaagucauuu

SEQ ID NO: 995326 - RNA, 19 nt, Artificial Sequence
  Description of Artificial Sequence: Synthetic oligonucleotide
  Sense strand starting at position 2752 of SEQ ID NO: 914323
aaugacuugcugggaaaug

SEQ ID NO: 995327 - RNA, 19 nt, Artificial Sequence
  Description of Artificial Sequence: Synthetic oligonucleotide
  Antisense strand to SEQ ID NO: 995326
cauuucccagcaagucauu

SEQ ID NO: 995328 - RNA, 19 nt, Artificial Sequence
  Description of Artificial Sequence: Synthetic oligonucleotide
  Sense strand starting at position 2770 of SEQ ID NO: 914323
gagugaaagguauagcauc

SEQ ID NO: 995329 - RNA, 19 nt, Artificial Sequence
  Description of Artificial Sequence: Synthetic oligonucleotide
  Antisense strand to SEQ ID NO: 995328
gaugcuauaccuuucacuc

SEQ ID NO: 995330 - RNA, 19 nt, Artificial Sequence
  Description of Artificial Sequence: Synthetic oligonucleotide
  Sense strand starting at position 2843 of SEQ ID NO: 914323
uacugaccugcuggauauu

SEQ ID NO: 995331 - RNA, 19 nt, Artificial Sequence
  Description of Artificial Sequence: Synthetic oligonucleotide
  Antisense strand to SEQ ID NO: 995330
aauauccagcaggucagua

SEQ ID NO: 995332 - RNA, 19 nt, Artificial Sequence
  Description of Artificial Sequence: Synthetic oligonucleotide
  Sense strand starting at position 2906 of SEQ ID NO: 914323
cugacuuuccacuguaucu

SEQ ID NO: 995333 - RNA, 19 nt, Artificial Sequence
  Description of Artificial Sequence: Synthetic oligonucleotide
  Antisense strand to SEQ ID NO: 995332
agauacaguggaaagucag

SEQ ID NO: 995334 - RNA, 19 nt, Artificial Sequence
  Description of Artificial Sequence: Synthetic oligonucleotide
  Sense strand starting at position 2953 of SEQ ID NO: 914323
acugaagucuucuugaauu

SEQ ID NO: 995335 - RNA, 19 nt, Artificial Sequence
  Description of Artificial Sequence: Synthetic oligonucleotide
  Antisense strand to SEQ ID NO: 995334
aauucaagaagacuucagu

SEQ ID NO: 995336 - RNA, 19 nt, Artificial Sequence
  Description of Artificial Sequence: Synthetic oligonucleotide
  Sense strand starting at position 3222 of SEQ ID NO: 914323
uguugugagccauaaucac

SEQ ID NO: 995337 - RNA, 19 nt, Artificial Sequence
  Description of Artificial Sequence: Synthetic oligonucleotide
  Antisense strand to SEQ ID NO: 995336
gugauuauggcucacaaca

SEQ ID NO: 995338 - RNA, 19 nt, Artificial Sequence
  Description of Artificial Sequence: Synthetic oligonucleotide
  Sense strand starting at position 3318 of SEQ ID NO: 914323
gucccuagagcauauaaua

SEQ ID NO: 995339 - RNA, 19 nt, Artificial Sequence
  Description of Artificial Sequence: Synthetic oligonucleotide
  Antisense strand to SEQ ID NO: 995338
uauuauaugcucuagggac

SEQ ID NO: 995340 - RNA, 19 nt, Artificial Sequence
  Description of Artificial Sequence: Synthetic oligonucleotide
  Sense strand starting at position 3930 of SEQ ID NO: 914323
aagaaacaugccugucagu

SEQ ID NO: 995341 - RNA, 19 nt, Artificial Sequence
  Description of Artificial Sequence: Synthetic oligonucleotide
  Antisense strand to SEQ ID NO: 995340
acugacaggcauguuucuu

SEQ ID NO: 995342 - RNA, 19 nt, Artificial Sequence
  Description of Artificial Sequence: Synthetic oligonucleotide
  Sense strand starting at position 3949 of SEQ ID NO: 914323
gggaguuuaaacugguaca

SEQ ID NO: 995343 - RNA, 19 nt, Artificial Sequence
  Description of Artificial Sequence: Synthetic oligonucleotide
  Antisense strand to SEQ ID NO: 995342
uguaccaguuuaaacuccc

SEQ ID NO: 995344 - RNA, 19 nt, Artificial Sequence
  Description of Artificial Sequence: Synthetic oligonucleotide
  Sense strand starting at position 3950 of SEQ ID NO: 914323
ggaguuuaaacugguacaa

SEQ ID NO: 995345 - RNA, 19 nt, Artificial Sequence
  Description of Artificial Sequence: Synthetic oligonucleotide
  Antisense strand to SEQ ID NO: 995344
uuguaccaguuuaaacucc

SEQ ID NO: 995346 - RNA, 19 nt, Artificial Sequence
  Description of Artificial Sequence: Synthetic oligonucleotide
  Sense strand starting at position 110 of SEQ ID NO: 914324
gcacuuuauuaagcuauga

SEQ ID NO: 995347 - RNA, 19 nt, Artificial Sequence
  Description of Artificial Sequence: Synthetic oligonucleotide
  Antisense strand to SEQ ID NO: 995346
ucauagcuuaauaaagugc

SEQ ID NO: 995348 - RNA, 19 nt, Artificial Sequence
  Description of Artificial Sequence: Synthetic oligonucleotide
  Sense strand starting at position 126 of SEQ ID NO: 914324
ugaaguuugguguggaacu

SEQ ID NO: 995349 - RNA, 19 nt, Artificial Sequence
  Description of Artificial Sequence: Synthetic oligonucleotide
  Antisense strand to SEQ ID NO: 995348
aguuccacaccaaacuuca

SEQ ID NO: 995350 - RNA, 19 nt, Artificial Sequence
  Description of Artificial Sequence: Synthetic oligonucleotide
  Sense strand starting at position 147 of SEQ ID NO: 914324
gauacuaucagaggugguu

SEQ ID NO: 995351 - RNA, 19 nt, Artificial Sequence
  Description of Artificial Sequence: Synthetic oligonucleotide
  Antisense strand to SEQ ID NO: 995350
aaccaccucugauaguauc

SEQ ID NO: 995352 - RNA, 19 nt, Artificial Sequence
  Description of Artificial Sequence: Synthetic oligonucleotide
  Sense strand starting at position 240 of SEQ ID NO: 914324
gacaaugaguucuuguuaa

SEQ ID NO: 995353 - RNA, 19 nt, Artificial Sequence
  Description of Artificial Sequence: Synthetic oligonucleotide
  Antisense strand to SEQ ID NO: 995352
uuaacaagaacucauuguc

SEQ ID NO: 995354 - RNA, 19 nt, Artificial Sequence
  Description of Artificial Sequence: Synthetic oligonucleotide
  Sense strand starting at position 259 of SEQ ID NO: 914324
agaaauaggcuuuggaauc

SEQ ID NO: 995355 - RNA, 19 nt, Artificial Sequence
  Description of Artificial Sequence: Synthetic oligonucleotide
  Antisense strand to SEQ ID NO: 995354
gauuccaaagccuauuucu

SEQ ID NO: 995356 - RNA, 19 nt, Artificial Sequence
  Description of Artificial Sequence: Synthetic oligonucleotide
  Sense strand starting at position 318 of SEQ ID NO: 914324
uugcaagaucuugagcaaa

SEQ ID NO: 995357 - RNA, 19 nt, Artificial Sequence
  Description of Artificial Sequence: Synthetic oligonucleotide
  Antisense strand to SEQ ID NO: 995356
uuugcucaagaucuugcaa

SEQ ID NO: 995358 - RNA, 19 nt, Artificial Sequence
  Description of Artificial Sequence: Synthetic oligonucleotide
  Sense strand starting at position 320 of SEQ ID NO: 914324
gcaagaucuugagcaaauu

SEQ ID NO: 995359 - RNA, 19 nt, Artificial Sequence
  Description of Artificial Sequence: Synthetic oligonucleotide
  Antisense strand to SEQ ID NO: 995358
aauuugcucaagaucuugc

SEQ ID NO: 995360 - RNA, 19 nt, Artificial Sequence
  Description of Artificial Sequence: Synthetic oligonucleotide
  Sense strand starting at position 395 of SEQ ID NO: 914324
ucacuaagguuacuaugau

SEQ ID NO: 995361 - RNA, 19 nt, Artificial Sequence
  Description of Artificial Sequence: Synthetic oligonucleotide
  Antisense strand to SEQ ID NO: 995360
aucauaguaaccuuaguga

SEQ ID NO: 995362 - RNA, 19 nt, Artificial Sequence
  Description of Artificial Sequence: Synthetic oligonucleotide
  Sense strand starting at position 404 of SEQ ID NO: 914324
uuacuaugaugcuuacaug

SEQ ID NO: 995363 - RNA, 19 nt, Artificial Sequence
  Description of Artificial Sequence: Synthetic oligonucleotide
  Antisense strand to SEQ ID NO: 995362
cauguaagcaucauaguaa

SEQ ID NO: 995364 - RNA, 19 nt, Artificial Sequence
  Description of Artificial Sequence: Synthetic oligonucleotide
  Sense strand starting at position 410 of SEQ ID NO: 914324
ugaugcuuacaugaagugu

SEQ ID NO: 995365 - RNA, 19 nt, Artificial Sequence
  Description of Artificial Sequence: Synthetic oligonucleotide
  Antisense strand to SEQ ID NO: 995364
acacuucauguaagcauca

SEQ ID NO: 995366 - RNA, 19 nt, Artificial Sequence
  Description of Artificial Sequence: Synthetic oligonucleotide
  Sense strand starting at position 438 of SEQ ID NO: 914324
acauuaaauucugugucaa

SEQ ID NO: 995367 - RNA, 19 nt, Artificial Sequence
  Description of Artificial Sequence: Synthetic oligonucleotide
  Antisense strand to SEQ ID NO: 995366
uugacacagaauuuaaugu

SEQ ID NO: 995368 - RNA, 19 nt, Artificial Sequence
  Description of Artificial Sequence: Synthetic oligonucleotide
  Sense strand starting at position 440 of SEQ ID NO: 914324
auuaaauucugugucaauc

SEQ ID NO: 995369 - RNA, 19 nt, Artificial Sequence
  Description of Artificial Sequence: Synthetic oligonucleotide
  Antisense strand to SEQ ID NO: 995368
gauugacacagaauuuaau

SEQ ID NO: 995370 - RNA, 19 nt, Artificial Sequence
  Description of Artificial Sequence: Synthetic oligonucleotide
  Sense strand starting at position 510 of SEQ ID NO: 914324
cuuugagaaucccugaggu

SEQ ID NO: 995371 - RNA, 19 nt, Artificial Sequence
  Description of Artificial Sequence: Synthetic oligonucleotide
  Antisense strand to SEQ ID NO: 995370
accucagggauucucaaag

SEQ ID NO: 995372 - RNA, 19 nt, Artificial Sequence
  Description of Artificial Sequence: Synthetic oligonucleotide
  Sense strand starting at position 566 of SEQ ID NO: 914324
ccuggaaucuggcuaucua

SEQ ID NO: 995373 - RNA, 19 nt, Artificial Sequence
  Description of Artificial Sequence: Synthetic oligonucleotide
  Antisense strand to SEQ ID NO: 995372
uagauagccagauuccagg

SEQ ID NO: 995374 - RNA, 19 nt, Artificial Sequence
  Description of Artificial Sequence: Synthetic oligonucleotide
  Sense strand starting at position 567 of SEQ ID NO: 914324
cuggaaucuggcuaucuau

SEQ ID NO: 995375 - RNA, 19 nt, Artificial Sequence
  Description of Artificial Sequence: Synthetic oligonucleotide
  Antisense strand to SEQ ID NO: 995374
auagauagccagauuccag

SEQ ID NO: 995376 - RNA, 19 nt, Artificial Sequence
  Description of Artificial Sequence: Synthetic oligonucleotide
  Sense strand starting at position 574 of SEQ ID NO: 914324
cuggcuaucuauccuggaa

SEQ ID NO: 995377 - RNA, 19 nt, Artificial Sequence
  Description of Artificial Sequence: Synthetic oligonucleotide
  Antisense strand to SEQ ID NO: 995376
uuccaggauagauagccag

SEQ ID NO: 995378 - RNA, 19 nt, Artificial Sequence
  Description of Artificial Sequence: Synthetic oligonucleotide
  Sense strand starting at position 577 of SEQ ID NO: 914324
gcuaucuauccuggaauca

SEQ ID NO: 995379 - RNA, 19 nt, Artificial Sequence
  Description of Artificial Sequence: Synthetic oligonucleotide
  Antisense strand to SEQ ID NO: 995378
ugauuccaggauagauagc

SEQ ID NO: 995380 - RNA, 19 nt, Artificial Sequence
  Description of Artificial Sequence: Synthetic oligonucleotide
  Sense strand starting at position 741 of SEQ ID NO: 914324
uuauuauaugagcaguaga

SEQ ID NO: 995381 - RNA, 19 nt, Artificial Sequence
  Description of Artificial Sequence: Synthetic oligonucleotide
  Antisense strand to SEQ ID NO: 995380
ucuacugcucauauaauaa

SEQ ID NO: 995382 - RNA, 19 nt, Artificial Sequence
  Description of Artificial Sequence: Synthetic oligonucleotide
  Sense strand starting at position 860 of SEQ ID NO: 914324
ugcaacaauccuggaaaga

SEQ ID NO: 995383 - RNA, 19 nt, Artificial Sequence
  Description of Artificial Sequence: Synthetic oligonucleotide
  Antisense strand to SEQ ID NO: 995382
ucuuuccaggauuguugca

SEQ ID NO: 995384 - RNA, 19 nt, Artificial Sequence
  Description of Artificial Sequence: Synthetic oligonucleotide
  Sense strand starting at position 1073 of SEQ ID NO: 914324
uauggauggagaugguuau

SEQ ID NO: 995385 - RNA, 19 nt, Artificial Sequence
  Description of Artificial Sequence: Synthetic oligonucleotide
  Antisense strand to SEQ ID NO: 995384
auaaccaucuccauccaua

SEQ ID NO: 995386 - RNA, 19 nt, Artificial Sequence
  Description of Artificial Sequence: Synthetic oligonucleotide
  Sense strand starting at position 1079 of SEQ ID NO: 914324
uggagaugguuauccuuac

SEQ ID NO: 995387 - RNA, 19 nt, Artificial Sequence
  Description of Artificial Sequence: Synthetic oligonucleotide
  Antisense strand to SEQ ID NO: 995386
guaaggauaaccaucucca

SEQ ID NO: 995388 - RNA, 19 nt, Artificial Sequence
  Description of Artificial Sequence: Synthetic oligonucleotide
  Sense strand starting at position 1176 of SEQ ID NO: 914324
ugaggagccucuuuacaca

SEQ ID NO: 995389 - RNA, 19 nt, Artificial Sequence
  Description of Artificial Sequence: Synthetic oligonucleotide
  Antisense strand to SEQ ID NO: 995388
uguguaaagaggcuccuca

SEQ ID NO: 995390 - RNA, 19 nt, Artificial Sequence
  Description of Artificial Sequence: Synthetic oligonucleotide
  Sense strand starting at position 1310 of SEQ ID NO: 914324
gaaauaaaggcagguucuu

SEQ ID NO: 995391 - RNA, 19 nt, Artificial Sequence
  Description of Artificial Sequence: Synthetic oligonucleotide
  Antisense strand to SEQ ID NO: 995390
aagaaccugccuuuauuuc

SEQ ID NO: 995392 - RNA, 19 nt, Artificial Sequence
  Description of Artificial Sequence: Synthetic oligonucleotide
  Sense strand starting at position 1543 of SEQ ID NO: 914324
ccauuuaccuaagagagca

SEQ ID NO: 995393 - RNA, 19 nt, Artificial Sequence
  Description of Artificial Sequence: Synthetic oligonucleotide
  Antisense strand to SEQ ID NO: 995392
ugcucucuuagguaaaugg

SEQ ID NO: 995394 - RNA, 19 nt, Artificial Sequence
  Description of Artificial Sequence: Synthetic oligonucleotide
  Sense strand starting at position 1567 of SEQ ID NO: 914324
gguaacaugugcccaaaua

SEQ ID NO: 995395 - RNA, 19 nt, Artificial Sequence
  Description of Artificial Sequence: Synthetic oligonucleotide
  Antisense strand to SEQ ID NO: 995394
uauuugggcacauguuacc

SEQ ID NO: 995396 - RNA, 19 nt, Artificial Sequence
  Description of Artificial Sequence: Synthetic oligonucleotide
  Sense strand starting at position 1568 of SEQ ID NO: 914324
guaacaugugcccaaauau

SEQ ID NO: 995397 - RNA, 19 nt, Artificial Sequence
  Description of Artificial Sequence: Synthetic oligonucleotide
  Antisense strand to SEQ ID NO: 995396
auauuugggcacauguuac

SEQ ID NO: 995398 - RNA, 19 nt, Artificial Sequence
  Description of Artificial Sequence: Synthetic oligonucleotide
  Sense strand starting at position 1716 of SEQ ID NO: 914324
gacuauauuuagcaguaga

SEQ ID NO: 995399 - RNA, 19 nt, Artificial Sequence
  Description of Artificial Sequence: Synthetic oligonucleotide
  Antisense strand to SEQ ID NO: 995398
ucuacugcuaaauauaguc

SEQ ID NO: 995400 - RNA, 19 nt, Artificial Sequence
  Description of Artificial Sequence: Synthetic oligonucleotide
  Sense strand starting at position 1753 of SEQ ID NO: 914324
cucugcauuccguacaaga

SEQ ID NO: 995401 - RNA, 19 nt, Artificial Sequence
  Description of Artificial Sequence: Synthetic oligonucleotide
  Antisense strand to SEQ ID NO: 995400
ucuuguacggaaugcagag

SEQ ID NO: 995402 - RNA, 19 nt, Artificial Sequence
  Description of Artificial Sequence: Synthetic oligonucleotide
  Sense strand starting at position 2089 of SEQ ID NO: 914324
agcacuuccugcucagaaa

SEQ ID NO: 995403 - RNA, 19 nt, Artificial Sequence
  Description of Artificial Sequence: Synthetic oligonucleotide
  Antisense strand to SEQ ID NO: 995402
uuucugagcaggaagugcu

SEQ ID NO: 995404 - RNA, 19 nt, Artificial Sequence
  Description of Artificial Sequence: Synthetic oligonucleotide
  Sense strand starting at position 2191 of SEQ ID NO: 914324
gagacaguguauccaauaa

SEQ ID NO: 995405 - RNA, 19 nt, Artificial Sequence
  Description of Artificial Sequence: Synthetic oligonucleotide
  Antisense strand to SEQ ID NO: 995404
uuauuggauacacugucuc

SEQ ID NO: 995406 - RNA, 19 nt, Artificial Sequence
  Description of Artificial Sequence: Synthetic oligonucleotide
  Sense strand starting at position 2336 of SEQ ID NO: 914324
ugcugauacugagcuaaga

SEQ ID NO: 995407 - RNA, 19 nt, Artificial Sequence
  Description of Artificial Sequence: Synthetic oligonucleotide
  Antisense strand to SEQ ID NO: 995406
ucuuagcucaguaucagca

SEQ ID NO: 995408 - RNA, 19 nt, Artificial Sequence
  Description of Artificial Sequence: Synthetic oligonucleotide
  Sense strand starting at position 2344 of SEQ ID NO: 914324
cugagcuaagauuguuauu

SEQ ID NO: 995409 - RNA, 19 nt, Artificial Sequence
  Description of Artificial Sequence: Synthetic oligonucleotide
  Antisense strand to SEQ ID NO: 995408
aauaacaaucuuagcucag

SEQ ID NO: 995410 - RNA, 19 nt, Artificial Sequence
  Description of Artificial Sequence: Synthetic oligonucleotide
  Sense strand starting at position 2346 of SEQ ID NO: 914324
gagcuaagauuguuauucu

SEQ ID NO: 995411 - RNA, 19 nt, Artificial Sequence
  Description of Artificial Sequence: Synthetic oligonucleotide
  Antisense strand to SEQ ID NO: 995410
agaauaacaaucuuagcuc

SEQ ID NO: 995412 - RNA, 19 nt, Artificial Sequence
  Description of Artificial Sequence: Synthetic oligonucleotide
  Sense strand starting at position 3100 of SEQ ID NO: 914324
ucuucugcuguugauugaa

SEQ ID NO: 995413 - RNA, 19 nt, Artificial Sequence
  Description of Artificial Sequence: Synthetic oligonucleotide
  Antisense strand to SEQ ID NO: 995412
uucaaucaacagcagaaga

SEQ ID NO: 995414 - RNA, 19 nt, Artificial Sequence
  Description of Artificial Sequence: Synthetic oligonucleotide
  Sense strand starting at position 3103 of SEQ ID NO: 914324
ucugcuguugauugaauuu

SEQ ID NO: 995415 - RNA, 19 nt, Artificial Sequence
  Description of Artificial Sequence: Synthetic oligonucleotide
  Antisense strand to SEQ ID NO: 995414
aaauucaaucaacagcaga

SEQ ID NO: 995416 - RNA, 19 nt, Artificial Sequence
  Description of Artificial Sequence: Synthetic oligonucleotide
  Sense strand starting at position 3167 of SEQ ID NO: 914324
gauaaaugguaguccacaa

SEQ ID NO: 995417 - RNA, 19 nt, Artificial Sequence
  Description of Artificial Sequence: Synthetic oligonucleotide
  Antisense strand to SEQ ID NO: 995416
uuguggacuaccauuuauc

SEQ ID NO: 995418 - RNA, 19 nt, Artificial Sequence
  Description of Artificial Sequence: Synthetic oligonucleotide
  Sense strand starting at position 3331 of SEQ ID NO: 914324
auuuacuccuauuggagaa

SEQ ID NO: 995419 - RNA, 19 nt, Artificial Sequence
  Description of Artificial Sequence: Synthetic oligonucleotide
  Antisense strand to SEQ ID NO: 995418
uucuccaauaggaguaaau

SEQ ID NO: 995420 - RNA, 19 nt, Artificial Sequence
  Description of Artificial Sequence: Synthetic oligonucleotide
  Sense strand starting at position 3719 of SEQ ID NO: 914324
acauguuauuacuugacau

SEQ ID NO: 995421 - RNA, 19 nt, Artificial Sequence
  Description of Artificial Sequence: Synthetic oligonucleotide
  Antisense strand to SEQ ID NO: 995420
augucaaguaauaacaugu

SEQ ID NO: 995422 - RNA, 19 nt, Artificial Sequence
  Description of Artificial Sequence: Synthetic oligonucleotide
  Sense strand starting at position 3931 of SEQ ID NO: 914324
ggaguaaggucugcaucua

SEQ ID NO: 995423 - RNA, 19 nt, Artificial Sequence
  Description of Artificial Sequence: Synthetic oligonucleotide
  Antisense strand to SEQ ID NO: 995422
uagaugcagaccuuacucc

SEQ ID NO: 995424 - RNA, 19 nt, Artificial Sequence
  Description of Artificial Sequence: Synthetic oligonucleotide
  Sense strand starting at position 3932 of SEQ ID NO: 914324
gaguaaggucugcaucuag

SEQ ID NO: 995425 - RNA, 19 nt, Artificial Sequence
  Description of Artificial Sequence: Synthetic oligonucleotide
  Antisense strand to SEQ ID NO: 995424
cuagaugcagaccuuacuc

SEQ ID NO: 995426 - RNA, 19 nt, Artificial Sequence
  Description of Artificial Sequence: Synthetic oligonucleotide
  Sense strand starting at position 365 of SEQ ID NO: 914325
gcgagacuuuaaccaggau

SEQ ID NO: 995427 - RNA, 19 nt, Artificial Sequence
  Description of Artificial Sequence: Synthetic oligonucleotide
  Antisense strand to SEQ ID NO: 995426
auccugguuaaagucucgc

SEQ ID NO: 995428 - RNA, 19 nt, Artificial Sequence
  Description of Artificial Sequence: Synthetic oligonucleotide
  Sense strand starting at position 510 of SEQ ID NO: 914325
aagugaauaugggcauaaa

SEQ ID NO: 995429 - RNA, 19 nt, Artificial Sequence
  Description of Artificial Sequence: Synthetic oligonucleotide
  Antisense strand to SEQ ID NO: 995428
uuuaugcccauauucacuu

SEQ ID NO: 995430 - RNA, 19 nt, Artificial Sequence
  Description of Artificial Sequence: Synthetic oligonucleotide
  Sense strand starting at position 538 of SEQ ID NO: 914325
cuuuaccuugguuaaguaa

SEQ ID NO: 995431 - RNA, 19 nt, Artificial Sequence
  Description of Artificial Sequence: Synthetic oligonucleotide
  Antisense strand to SEQ ID NO: 995430
uuacuuaaccaagguaaag

SEQ ID NO: 995432 - RNA, 19 nt, Artificial Sequence
  Description of Artificial Sequence: Synthetic oligonucleotide
  Sense strand starting at position 554 of SEQ ID NO: 914325
uaacacaagugguuaagua

SEQ ID NO: 995433 - RNA, 19 nt, Artificial Sequence
  Description of Artificial Sequence: Synthetic oligonucleotide
  Antisense strand to SEQ ID NO: 995432
uacuuaaccacuuguguua

SEQ ID NO: 995434 - RNA, 19 nt, Artificial Sequence
  Description of Artificial Sequence: Synthetic oligonucleotide
  Sense strand starting at position 578 of SEQ ID NO: 914325
uuuaacauuugggaugauu

SEQ ID NO: 995435 - RNA, 19 nt, Artificial Sequence
  Description of Artificial Sequence: Synthetic oligonucleotide
  Antisense strand to SEQ ID NO: 995434
aaucaucccaaauguuaaa

SEQ ID NO: 995436 - RNA, 19 nt, Artificial Sequence
  Description of Artificial Sequence: Synthetic oligonucleotide
  Sense strand starting at position 819 of SEQ ID NO: 914325
agcuuuaagugaccagaga

SEQ ID NO: 995437 - RNA, 19 nt, Artificial Sequence
  Description of Artificial Sequence: Synthetic oligonucleotide
  Antisense strand to SEQ ID NO: 995436
ucucuggucacuuaaagcu

SEQ ID NO: 995438 - RNA, 19 nt, Artificial Sequence
  Description of Artificial Sequence: Synthetic oligonucleotide
  Sense strand starting at position 820 of SEQ ID NO: 914325
gcuuuaagugaccagagau

SEQ ID NO: 995439 - RNA, 19 nt, Artificial Sequence
  Description of Artificial Sequence: Synthetic oligonucleotide
  Antisense strand to SEQ ID NO: 995438
aucucuggucacuuaaagc

SEQ ID NO: 995440 - RNA, 19 nt, Artificial Sequence
  Description of Artificial Sequence: Synthetic oligonucleotide
  Sense strand starting at position 868 of SEQ ID NO: 914325
uccagaagccucuauuaag

SEQ ID NO: 995441 - RNA, 19 nt, Artificial Sequence
  Description of Artificial Sequence: Synthetic oligonucleotide
  Antisense strand to SEQ ID NO: 995440
cuuaauagaggcuucugga

SEQ ID NO: 995442 - RNA, 19 nt, Artificial Sequence
  Description of Artificial Sequence: Synthetic oligonucleotide
  Sense strand starting at position 1115 of SEQ ID NO: 914325
ucaagagguguaugggaaa

SEQ ID NO: 995443 - RNA, 19 nt, Artificial Sequence
  Description of Artificial Sequence: Synthetic oligonucleotide
  Antisense strand to SEQ ID NO: 995442
uuucccauacaccucuuga

SEQ ID NO: 995444 - RNA, 19 nt, Artificial Sequence
  Description of Artificial Sequence: Synthetic oligonucleotide
  Sense strand starting at position 1376 of SEQ ID NO: 914325
acucaaugacuguguccaa

SEQ ID NO: 995445 - RNA, 19 nt, Artificial Sequence
  Description of Artificial Sequence: Synthetic oligonucleotide
  Antisense strand to SEQ ID NO: 995444
uuggacacagucauugagu

SEQ ID NO: 995446 - RNA, 19 nt, Artificial Sequence
  Description of Artificial Sequence: Synthetic oligonucleotide
  Sense strand starting at position 1377 of SEQ ID NO: 914325
cucaaugacuguguccaau

SEQ ID NO: 995447 - RNA, 19 nt, Artificial Sequence
  Description of Artificial Sequence: Synthetic oligonucleotide
  Antisense strand to SEQ ID NO: 995446
auuggacacagucauugag

SEQ ID NO: 995448 - RNA, 19 nt, Artificial Sequence
  Description of Artificial Sequence: Synthetic oligonucleotide
  Sense strand starting at position 1379 of SEQ ID NO: 914325
caaugacuguguccaauga

SEQ ID NO: 995449 - RNA, 19 nt, Artificial Sequence
  Description of Artificial Sequence: Synthetic oligonucleotide
  Antisense strand to SEQ ID NO: 995448
ucauuggacacagucauug

SEQ ID NO: 995450 - RNA, 19 nt, Artificial Sequence
  Description of Artificial Sequence: Synthetic oligonucleotide
  Sense strand starting at position 1383 of SEQ ID NO: 914325
gacuguguccaaugaagag

SEQ ID NO: 995451 - RNA, 19 nt, Artificial Sequence
  Description of Artificial Sequence: Synthetic oligonucleotide
  Antisense strand to SEQ ID NO: 995450
cucuucauuggacacaguc

SEQ ID NO: 995452 - RNA, 19 nt, Artificial Sequence
  Description of Artificial Sequence: Synthetic oligonucleotide
  Sense strand starting at position 1395 of SEQ ID NO: 914325
ugaagagccacugacguau

SEQ ID NO: 995453 - RNA, 19 nt, Artificial Sequence
  Description of Artificial Sequence: Synthetic oligonucleotide
  Antisense strand to SEQ ID NO: 995452
auacgucaguggcucuuca

SEQ ID NO: 995454 - RNA, 19 nt, Artificial Sequence
  Description of Artificial Sequence: Synthetic oligonucleotide
  Sense strand starting at position 1399 of SEQ ID NO: 914325
gagccacugacguaugaga

SEQ ID NO: 995455 - RNA, 19 nt, Artificial Sequence
  Description of Artificial Sequence: Synthetic oligonucleotide
  Antisense strand to SEQ ID NO: 995454
ucucauacgucaguggcuc

SEQ ID NO: 995456 - RNA, 19 nt, Artificial Sequence
  Description of Artificial Sequence: Synthetic oligonucleotide
  Sense strand starting at position 1401 of SEQ ID NO: 914325
gccacugacguaugagaga

SEQ ID NO: 995457 - RNA, 19 nt, Artificial Sequence
  Description of Artificial Sequence: Synthetic oligonucleotide
  Antisense strand to SEQ ID NO: 995456
ucucucauacgucaguggc

SEQ ID NO: 995458 - RNA, 19 nt, Artificial Sequence
  Description of Artificial Sequence: Synthetic oligonucleotide
  Sense strand starting at position 1584 of SEQ ID NO: 914325
acgagaugacuuugaacga

SEQ ID NO: 995459 - RNA, 19 nt, Artificial Sequence
  Description of Artificial Sequence: Synthetic oligonucleotide
  Antisense strand to SEQ ID NO: 995458
ucguucaaagucaucucgu

SEQ ID NO: 995460 - RNA, 19 nt, Artificial Sequence
  Description of Artificial Sequence: Synthetic oligonucleotide
  Sense strand starting at position 1588 of SEQ ID NO: 914325
gaugacuuugaacgacuuu

SEQ ID NO: 995461 - RNA, 19 nt, Artificial Sequence
  Description of Artificial Sequence: Synthetic oligonucleotide
  Antisense strand to SEQ ID NO: 995460
aaagucguucaaagucauc

SEQ ID NO: 995462 - RNA, 19 nt, Artificial Sequence
  Description of Artificial Sequence: Synthetic oligonucleotide
  Sense strand starting at position 1597 of SEQ ID NO: 914325
gaacgacuuuccucaggau

SEQ ID NO: 995463 - RNA, 19 nt, Artificial Sequence
  Description of Artificial Sequence: Synthetic oligonucleotide
  Antisense strand to SEQ ID NO: 995462
auccugaggaaagucguuc

SEQ ID NO: 995464 - RNA, 19 nt, Artificial Sequence
  Description of Artificial Sequence: Synthetic oligonucleotide
  Sense strand starting at position 1620 of SEQ ID NO: 914325
uccagugcccuguagagaa

SEQ ID NO: 995465 - RNA, 19 nt, Artificial Sequence
  Description of Artificial Sequence: Synthetic oligonucleotide
  Antisense strand to SEQ ID NO: 995464
uucucuacagggcacugga

SEQ ID NO: 995466 - RNA, 19 nt, Artificial Sequence
  Description of Artificial Sequence: Synthetic oligonucleotide
  Sense strand starting at position 1650 of SEQ ID NO: 914325
ccuguagacaugugaguaa

SEQ ID NO: 995467 - RNA, 19 nt, Artificial Sequence
  Description of Artificial Sequence: Synthetic oligonucleotide
  Antisense strand to SEQ ID NO: 995466
uuacucacaugucuacagg

SEQ ID NO: 995468 - RNA, 19 nt, Artificial Sequence
  Description of Artificial Sequence: Synthetic oligonucleotide
  Sense strand starting at position 1653 of SEQ ID NO: 914325
guagacaugugaguaagua

SEQ ID NO: 995469 - RNA, 19 nt, Artificial Sequence
  Description of Artificial Sequence: Synthetic oligonucleotide
  Antisense strand to SEQ ID NO: 995468
uacuuacucacaugucuac

SEQ ID NO: 995470 - RNA, 19 nt, Artificial Sequence
  Description of Artificial Sequence: Synthetic oligonucleotide
  Sense strand starting at position 1657 of SEQ ID NO: 914325
acaugugaguaaguaaaga

SEQ ID NO: 995471 - RNA, 19 nt, Artificial Sequence
  Description of Artificial Sequence: Synthetic oligonucleotide
  Antisense strand to SEQ ID NO: 995470
ucuuuacuuacucacaugu

SEQ ID NO: 995472 - RNA, 19 nt, Artificial Sequence
  Description of Artificial Sequence: Synthetic oligonucleotide
  Sense strand starting at position 2123 of SEQ ID NO: 914325
acugauugcgcggaggaaa

SEQ ID NO: 995473 - RNA, 19 nt, Artificial Sequence
  Description of Artificial Sequence: Synthetic oligonucleotide
  Antisense strand to SEQ ID NO: 995472
uuuccuccgcgcaaucagu

SEQ ID NO: 995474 - RNA, 19 nt, Artificial Sequence
  Description of Artificial Sequence: Synthetic oligonucleotide
  Sense strand starting at position 2457 of SEQ ID NO: 914325
ggcucagagcgcuugcaaa

SEQ ID NO: 995475 - RNA, 19 nt, Artificial Sequence
  Description of Artificial Sequence: Synthetic oligonucleotide
  Antisense strand to SEQ ID NO: 995474
uuugcaagcgcucugagcc

SEQ ID NO: 995476 - RNA, 19 nt, Artificial Sequence
  Description of Artificial Sequence: Synthetic oligonucleotide
  Sense strand starting at position 2765 of SEQ ID NO: 914325
ccuacaauucucugggaga

SEQ ID NO: 995477 - RNA, 19 nt, Artificial Sequence
  Description of Artificial Sequence: Synthetic oligonucleotide
  Antisense strand to SEQ ID NO: 995476
ucucccagagaauuguagg

SEQ ID NO: 995478 - RNA, 19 nt, Artificial Sequence
  Description of Artificial Sequence: Synthetic oligonucleotide
  Sense strand starting at position 2843 of SEQ ID NO: 914325
acugucuagcguucguuua

SEQ ID NO: 995479 - RNA, 19 nt, Artificial Sequence
  Description of Artificial Sequence: Synthetic oligonucleotide
  Antisense strand to SEQ ID NO: 995478
uaaacgaacgcuagacagu

SEQ ID NO: 995480 - RNA, 19 nt, Artificial Sequence
  Description of Artificial Sequence: Synthetic oligonucleotide
  Sense strand starting at position 2847 of SEQ ID NO: 914325
ucuagcguucguuuagauu

SEQ ID NO: 995481 - RNA, 19 nt, Artificial Sequence
  Description of Artificial Sequence: Synthetic oligonucleotide
  Antisense strand to SEQ ID NO: 995480
aaucuaaacgaacgcuaga

SEQ ID NO: 995482 - RNA, 19 nt, Artificial Sequence
  Description of Artificial Sequence: Synthetic oligonucleotide
  Sense strand starting at position 3064 of SEQ ID NO: 914325
uuugcaucacaauaguagu

SEQ ID NO: 995483 - RNA, 19 nt, Artificial Sequence
  Description of Artificial Sequence: Synthetic oligonucleotide
  Antisense strand to SEQ ID NO: 995482
acuacuauugugaugcaaa

SEQ ID NO: 995484 - RNA, 19 nt, Artificial Sequence
  Description of Artificial Sequence: Synthetic oligonucleotide
  Sense strand starting at position 3097 of SEQ ID NO: 914325
ccuggauggaauuguccua

SEQ ID NO: 995485 - RNA, 19 nt, Artificial Sequence
  Description of Artificial Sequence: Synthetic oligonucleotide
  Antisense strand to SEQ ID NO: 995484
uaggacaauuccauccagg

SEQ ID NO: 995486 - RNA, 19 nt, Artificial Sequence
  Description of Artificial Sequence: Synthetic oligonucleotide
  Sense strand starting at position 3202 of SEQ ID NO: 914325
gguggagguucaccuaaua

SEQ ID NO: 995487 - RNA, 19 nt, Artificial Sequence
  Description of Artificial Sequence: Synthetic oligonucleotide
  Antisense strand to SEQ ID NO: 995486
uauuaggugaaccuccacc

SEQ ID NO: 995488 - RNA, 19 nt, Artificial Sequence
  Description of Artificial Sequence: Synthetic oligonucleotide
  Sense strand starting at position 3253 of SEQ ID NO: 914325
agaaacgacugcuuuacau

SEQ ID NO: 995489 - RNA, 19 nt, Artificial Sequence
  Description of Artificial Sequence: Synthetic oligonucleotide
  Antisense strand to SEQ ID NO: 995488
auguaaagcagucguuucu

SEQ ID NO: 995490 - RNA, 19 nt, Artificial Sequence
  Description of Artificial Sequence: Synthetic oligonucleotide
  Sense strand starting at position 3273 of SEQ ID NO: 914325
ucguccugacaucaucuau

SEQ ID NO: 995491 - RNA, 19 nt, Artificial Sequence
  Description of Artificial Sequence: Synthetic oligonucleotide
  Antisense strand to SEQ ID NO: 995490
auagaugaugucaggacga

SEQ ID NO: 995492 - RNA, 19 nt, Artificial Sequence
  Description of Artificial Sequence: Synthetic oligonucleotide
  Sense strand starting at position 3297 of SEQ ID NO: 914325
uucugagaacucggauauu

SEQ ID NO: 995493 - RNA, 19 nt, Artificial Sequence
  Description of Artificial Sequence: Synthetic oligonucleotide
  Antisense strand to SEQ ID NO: 995492
aauauccgaguucucagaa

SEQ ID NO: 995494 - RNA, 19 nt, Artificial Sequence
  Description of Artificial Sequence: Synthetic oligonucleotide
  Sense strand starting at position 3300 of SEQ ID NO: 914325
ugagaacucggauauuguu

SEQ ID NO: 995495 - RNA, 19 nt, Artificial Sequence
  Description of Artificial Sequence: Synthetic oligonucleotide
  Antisense strand to SEQ ID NO: 995494
aacaauauccgaguucuca

SEQ ID NO: 995496 - RNA, 19 nt, Artificial Sequence
  Description of Artificial Sequence: Synthetic oligonucleotide
  Sense strand starting at position 3308 of SEQ ID NO: 914325
cggauauuguucuuaagga

SEQ ID NO: 995497 - RNA, 19 nt, Artificial Sequence
  Description of Artificial Sequence: Synthetic oligonucleotide
  Antisense strand to SEQ ID NO: 995496
uccuuaagaacaauauccg

SEQ ID NO: 995498 - RNA, 19 nt, Artificial Sequence
  Description of Artificial Sequence: Synthetic oligonucleotide
  Sense strand starting at position 3352 of SEQ ID NO: 914325
uugcuuuguccauaugaac

SEQ ID NO: 995499 - RNA, 19 nt, Artificial Sequence
  Description of Artificial Sequence: Synthetic oligonucleotide
  Antisense strand to SEQ ID NO: 995498
guucauauggacaaagcaa

SEQ ID NO: 995500 - RNA, 19 nt, Artificial Sequence
  Description of Artificial Sequence: Synthetic oligonucleotide
  Sense strand starting at position 3734 of SEQ ID NO: 914325
gcaggagagucacuggaau

SEQ ID NO: 995501 - RNA, 19 nt, Artificial Sequence
  Description of Artificial Sequence: Synthetic oligonucleotide
  Antisense strand to SEQ ID NO: 995500
auuccagugacucuccugc

SEQ ID NO: 995502 - RNA, 19 nt, Artificial Sequence
  Description of Artificial Sequence: Synthetic oligonucleotide
  Sense strand starting at position 3777 of SEQ ID NO: 914325
ccgagauuacgagauuacu

SEQ ID NO: 995503 - RNA, 19 nt, Artificial Sequence
  Description of Artificial Sequence: Synthetic oligonucleotide
  Antisense strand to SEQ ID NO: 995502
aguaaucucguaaucucgg

SEQ ID NO: 995504 - RNA, 19 nt, Artificial Sequence
  Description of Artificial Sequence: Synthetic oligonucleotide
  Sense strand starting at position 3785 of SEQ ID NO: 914325
acgagauuacuccaccgca

SEQ ID NO: 995505 - RNA, 19 nt, Artificial Sequence
  Description of Artificial Sequence: Synthetic oligonucleotide
  Antisense strand to SEQ ID NO: 995504
ugcgguggaguaaucucgu

SEQ ID NO: 995506 - RNA, 19 nt, Artificial Sequence
  Description of Artificial Sequence: Synthetic oligonucleotide
  Sense strand starting at position 198 of SEQ ID NO: 914326
gcgagaauugaaugaagca

SEQ ID NO: 995507 - RNA, 19 nt, Artificial Sequence
  Description of Artificial Sequence: Synthetic oligonucleotide
  Antisense strand to SEQ ID NO: 995506
ugcuucauucaauucucgc

SEQ ID NO: 995508 - RNA, 19 nt, Artificial Sequence
  Description of Artificial Sequence: Synthetic oligonucleotide
  Sense strand starting at position 245 of SEQ ID NO: 914326
agugauuucucagaagcaa

SEQ ID NO: 995509 - RNA, 19 nt, Artificial Sequence
  Description of Artificial Sequence: Synthetic oligonucleotide
  Antisense strand to SEQ ID NO: 995508
uugcuucugagaaaucacu

SEQ ID NO: 995510 - RNA, 19 nt, Artificial Sequence
  Description of Artificial Sequence: Synthetic oligonucleotide
  Sense strand starting at position 307 of SEQ ID NO: 914326
agauaagcauugucaauac

SEQ ID NO: 995511 - RNA, 19 nt, Artificial Sequence
  Description of Artificial Sequence: Synthetic oligonucleotide
  Antisense strand to SEQ ID NO: 995510
guauugacaaugcuuaucu

SEQ ID NO: 995512 - RNA, 19 nt, Artificial Sequence
  Description of Artificial Sequence: Synthetic oligonucleotide
  Sense strand starting at position 318 of SEQ ID NO: 914326
gucaauacuuaucuuaagu

SEQ ID NO: 995513 - RNA, 19 nt, Artificial Sequence
  Description of Artificial Sequence: Synthetic oligonucleotide
  Antisense strand to SEQ ID NO: 995512
acuuaagauaaguauugac

SEQ ID NO: 995514 - RNA, 19 nt, Artificial Sequence
  Description of Artificial Sequence: Synthetic oligonucleotide
  Sense strand starting at position 329 of SEQ ID NO: 914326
ucuuaaguguauucuugga

SEQ ID NO: 995515 - RNA, 19 nt, Artificial Sequence
  Description of Artificial Sequence: Synthetic oligonucleotide
  Antisense strand to SEQ ID NO: 995514
uccaagaauacacuuaaga

SEQ ID NO: 995516 - RNA, 19 nt, Artificial Sequence
  Description of Artificial Sequence: Synthetic oligonucleotide
  Sense strand starting at position 331 of SEQ ID NO: 914326
uuaaguguauucuuggaaa

SEQ ID NO: 995517 - RNA, 19 nt, Artificial Sequence
  Description of Artificial Sequence: Synthetic oligonucleotide
  Antisense strand to SEQ ID NO: 995516
uuuccaagaauacacuuaa

SEQ ID NO: 995518 - RNA, 19 nt, Artificial Sequence
  Description of Artificial Sequence: Synthetic oligonucleotide
  Sense strand starting at position 481 of SEQ ID NO: 914326
agaggaaguucuguuucug

SEQ ID NO: 995519 - RNA, 19 nt, Artificial Sequence
  Description of Artificial Sequence: Synthetic oligonucleotide
  Antisense strand to SEQ ID NO: 995518
cagaaacagaacuuccucu

SEQ ID NO: 995520 - RNA, 19 nt, Artificial Sequence
  Description of Artificial Sequence: Synthetic oligonucleotide
  Sense strand starting at position 591 of SEQ ID NO: 914326
agacuacuuugugcagaag

SEQ ID NO: 995521 - RNA, 19 nt, Artificial Sequence
  Description of Artificial Sequence: Synthetic oligonucleotide
  Antisense strand to SEQ ID NO: 995520
cuucugcacaaaguagucu

SEQ ID NO: 995522 - RNA, 19 nt, Artificial Sequence
  Description of Artificial Sequence: Synthetic oligonucleotide
  Sense strand starting at position 678 of SEQ ID NO: 914326
gguguaauaauucgaagac

SEQ ID NO: 995523 - RNA, 19 nt, Artificial Sequence
  Description of Artificial Sequence: Synthetic oligonucleotide
  Antisense strand to SEQ ID NO: 995522
gucuucgaauuauuacacc

SEQ ID NO: 995524 - RNA, 19 nt, Artificial Sequence
  Description of Artificial Sequence: Synthetic oligonucleotide
  Sense strand starting at position 765 of SEQ ID NO: 914326
aaauguggucaaggaauca

SEQ ID NO: 995525 - RNA, 19 nt, Artificial Sequence
  Description of Artificial Sequence: Synthetic oligonucleotide
  Antisense strand to SEQ ID NO: 995524
ugauuccuugaccacauuu

SEQ ID NO: 995526 - RNA, 19 nt, Artificial Sequence
  Description of Artificial Sequence: Synthetic oligonucleotide
  Sense strand starting at position 982 of SEQ ID NO: 914326
guguuucuggaagacgaaa

SEQ ID NO: 995527 - RNA, 19 nt, Artificial Sequence
  Description of Artificial Sequence: Synthetic oligonucleotide
  Antisense strand to SEQ ID NO: 995526
uuucgucuuccagaaacac

SEQ ID NO: 995528 - RNA, 19 nt, Artificial Sequence
  Description of Artificial Sequence: Synthetic oligonucleotide
  Sense strand starting at position 984 of SEQ ID NO: 914326
guuucuggaagacgaaaua

SEQ ID NO: 995529 - RNA, 19 nt, Artificial Sequence
  Description of Artificial Sequence: Synthetic oligonucleotide
  Antisense strand to SEQ ID NO: 995528
uauuucgucuuccagaaac

SEQ ID NO: 995530 - RNA, 19 nt, Artificial Sequence
  Description of Artificial Sequence: Synthetic oligonucleotide
  Sense strand starting at position 1100 of SEQ ID NO: 914326
gucaacauucuggaaaguu

SEQ ID NO: 995531 - RNA, 19 nt, Artificial Sequence
  Description of Artificial Sequence: Synthetic oligonucleotide
  Antisense strand to SEQ ID NO: 995530
aacuuuccagaauguugac

SEQ ID NO: 995532 - RNA, 19 nt, Artificial Sequence
  Description of Artificial Sequence: Synthetic oligonucleotide
  Sense strand starting at position 1108 of SEQ ID NO: 914326
ucuggaaaguuauuagaua

SEQ ID NO: 995533 - RNA, 19 nt, Artificial Sequence
  Description of Artificial Sequence: Synthetic oligonucleotide
  Antisense strand to SEQ ID NO: 995532
uaucuaauaacuuuccaga

SEQ ID NO: 995534 - RNA, 19 nt, Artificial Sequence
  Description of Artificial Sequence: Synthetic oligonucleotide
  Sense strand starting at position 1171 of SEQ ID NO: 914326
cccagaucaccaugcagua

SEQ ID NO: 995535 - RNA, 19 nt, Artificial Sequence
  Description of Artificial Sequence: Synthetic oligonucleotide
  Antisense strand to SEQ ID NO: 995534
uacugcauggugaucuggg

SEQ ID NO: 995536 - RNA, 19 nt, Artificial Sequence
  Description of Artificial Sequence: Synthetic oligonucleotide
  Sense strand starting at position 1224 of SEQ ID NO: 914326
aaauguaauugucuugaga

SEQ ID NO: 995537 - RNA, 19 nt, Artificial Sequence
  Description of Artificial Sequence: Synthetic oligonucleotide
  Antisense strand to SEQ ID NO: 995536
ucucaagacaauuacauuu

SEQ ID NO: 995538 - RNA, 19 nt, Artificial Sequence
  Description of Artificial Sequence: Synthetic oligonucleotide
  Sense strand starting at position 1227 of SEQ ID NO: 914326
uguaauugucuugagaauc

SEQ ID NO: 995539 - RNA, 19 nt, Artificial Sequence
  Description of Artificial Sequence: Synthetic oligonucleotide
  Antisense strand to SEQ ID NO: 995538
gauucucaagacaauuaca

SEQ ID NO: 995540 - RNA, 19 nt, Artificial Sequence
  Description of Artificial Sequence: Synthetic oligonucleotide
  Sense strand starting at position 1257 of SEQ ID NO: 914326
acggcuaaagcugauaaau

SEQ ID NO: 995541 - RNA, 19 nt, Artificial Sequence
  Description of Artificial Sequence: Synthetic oligonucleotide
  Antisense strand to SEQ ID NO: 995540
auuuaucagcuuuagccgu

SEQ ID NO: 995542 - RNA, 19 nt, Artificial Sequence
  Description of Artificial Sequence: Synthetic oligonucleotide
  Sense strand starting at position 1425 of SEQ ID NO: 914326
agggaaguuucucuccgga

SEQ ID NO: 995543 - RNA, 19 nt, Artificial Sequence
  Description of Artificial Sequence: Synthetic oligonucleotide
  Antisense strand to SEQ ID NO: 995542
uccggagagaaacuucccu

SEQ ID NO: 995544 - RNA, 19 nt, Artificial Sequence
  Description of Artificial Sequence: Synthetic oligonucleotide
  Sense strand starting at position 1427 of SEQ ID NO: 914326
ggaaguuucucuccggaaa

SEQ ID NO: 995545 - RNA, 19 nt, Artificial Sequence
  Description of Artificial Sequence: Synthetic oligonucleotide
  Antisense strand to SEQ ID NO: 995544
uuuccggagagaaacuucc

SEQ ID NO: 995546 - RNA, 19 nt, Artificial Sequence
  Description of Artificial Sequence: Synthetic oligonucleotide
  Sense strand starting at position 1471 of SEQ ID NO: 914326
cuggauaacucggcagcaa

SEQ ID NO: 995547 - RNA, 19 nt, Artificial Sequence
  Description of Artificial Sequence: Synthetic oligonucleotide
  Antisense strand to SEQ ID NO: 995546
uugcugccgaguuauccag

SEQ ID NO: 995548 - RNA, 19 nt, Artificial Sequence
  Description of Artificial Sequence: Synthetic oligonucleotide
  Sense strand starting at position 3003 of SEQ ID NO: 914326
uacuuaagggaauguauua

SEQ ID NO: 995549 - RNA, 19 nt, Artificial Sequence
  Description of Artificial Sequence: Synthetic oligonucleotide
  Antisense strand to SEQ ID NO: 995548
uaauacauucccuuaagua

SEQ ID NO: 995550 - RNA, 19 nt, Artificial Sequence
  Description of Artificial Sequence: Synthetic oligonucleotide
  Sense strand starting at position 3182 of SEQ ID NO: 914326
caggguuucucgguauaaa

SEQ ID NO: 995551 - RNA, 19 nt, Artificial Sequence
  Description of Artificial Sequence: Synthetic oligonucleotide
  Antisense strand to SEQ ID NO: 995550
uuuauaccgagaaacccug

SEQ ID NO: 995552 - RNA, 19 nt, Artificial Sequence
  Description of Artificial Sequence: Synthetic oligonucleotide
  Sense strand starting at position 3183 of SEQ ID NO: 914326
aggguuucucgguauaaau

SEQ ID NO: 995553 - RNA, 19 nt, Artificial Sequence
  Description of Artificial Sequence: Synthetic oligonucleotide
  Antisense strand to SEQ ID NO: 995552
auuuauaccgagaaacccu

SEQ ID NO: 995554 - RNA, 19 nt, Artificial Sequence
  Description of Artificial Sequence: Synthetic oligonucleotide
  Sense strand starting at position 3185 of SEQ ID NO: 914326
gguuucucgguauaaauau

SEQ ID NO: 995555 - RNA, 19 nt, Artificial Sequence
  Description of Artificial Sequence: Synthetic oligonucleotide
  Antisense strand to SEQ ID NO: 995554
auauuuauaccgagaaacc

SEQ ID NO: 995556 - RNA, 19 nt, Artificial Sequence
  Description of Artificial Sequence: Synthetic oligonucleotide
  Sense strand starting at position 3213 of SEQ ID NO: 914326
gcuguuucugccuuggcaa

SEQ ID NO: 995557 - RNA, 19 nt, Artificial Sequence
  Description of Artificial Sequence: Synthetic oligonucleotide
  Antisense strand to SEQ ID NO: 995556
uugccaaggcagaaacagc

SEQ ID NO: 995558 - RNA, 19 nt, Artificial Sequence
  Description of Artificial Sequence: Synthetic oligonucleotide
  Sense strand starting at position 3234 of SEQ ID NO: 914326
ugaaauguguuauuugcca

SEQ ID NO: 995559 - RNA, 19 nt, Artificial Sequence
  Description of Artificial Sequence: Synthetic oligonucleotide
  Antisense strand to SEQ ID NO: 995558
uggcaaauaacacauuuca

SEQ ID NO: 995560 - RNA, 19 nt, Artificial Sequence
  Description of Artificial Sequence: Synthetic oligonucleotide
  Sense strand starting at position 3238 of SEQ ID NO: 914326
auguguuauuugccaaauu

SEQ ID NO: 995561 - RNA, 19 nt, Artificial Sequence
  Description of Artificial Sequence: Synthetic oligonucleotide
  Antisense strand to SEQ ID NO: 995560
aauuuggcaaauaacacau

SEQ ID NO: 995562 - RNA, 19 nt, Artificial Sequence
  Description of Artificial Sequence: Synthetic oligonucleotide
  Sense strand starting at position 3290 of SEQ ID NO: 914326
aagcguguuguggaaagaa

SEQ ID NO: 995563 - RNA, 19 nt, Artificial Sequence
  Description of Artificial Sequence: Synthetic oligonucleotide
  Antisense strand to SEQ ID NO: 995562
uucuuuccacaacacgcuu

SEQ ID NO: 995564 - RNA, 19 nt, Artificial Sequence
  Description of Artificial Sequence: Synthetic oligonucleotide
  Sense strand starting at position 3339 of SEQ ID NO: 914326
aguaaauagcauuacgguu

SEQ ID NO: 995565 - RNA, 19 nt, Artificial Sequence
  Description of Artificial Sequence: Synthetic oligonucleotide
  Antisense strand to SEQ ID NO: 995564
aaccguaaugcuauuuacu

SEQ ID NO: 995566 - RNA, 19 nt, Artificial Sequence
  Description of Artificial Sequence: Synthetic oligonucleotide
  Sense strand starting at position 3351 of SEQ ID NO: 914326
uacgguucucucugaagga

SEQ ID NO: 995567 - RNA, 19 nt, Artificial Sequence
  Description of Artificial Sequence: Synthetic oligonucleotide
  Antisense strand to SEQ ID NO: 995566
uccuucagagagaaccgua

SEQ ID NO: 995568 - RNA, 19 nt, Artificial Sequence
  Description of Artificial Sequence: Synthetic oligonucleotide
  Sense strand starting at position 3558 of SEQ ID NO: 914326
aaaccuauguuggugacaa

SEQ ID NO: 995569 - RNA, 19 nt, Artificial Sequence
  Description of Artificial Sequence: Synthetic oligonucleotide
  Antisense strand to SEQ ID NO: 995568
uugucaccaacauagguuu

SEQ ID NO: 995570 - RNA, 19 nt, Artificial Sequence
  Description of Artificial Sequence: Synthetic oligonucleotide
  Sense strand starting at position 3594 of SEQ ID NO: 914326
guggaauccaaguagcaaa

SEQ ID NO: 995571 - RNA, 19 nt, Artificial Sequence
  Description of Artificial Sequence: Synthetic oligonucleotide
  Antisense strand to SEQ ID NO: 995570
uuugcuacuuggauuccac

SEQ ID NO: 995572 - RNA, 19 nt, Artificial Sequence
  Description of Artificial Sequence: Synthetic oligonucleotide
  Sense strand starting at position 3677 of SEQ ID NO: 914326
aaagucauuccgcaacagu

SEQ ID NO: 995573 - RNA, 19 nt, Artificial Sequence
  Description of Artificial Sequence: Synthetic oligonucleotide
  Antisense strand to SEQ ID NO: 995572
acuguugcggaaugacuuu

SEQ ID NO: 995574 - RNA, 19 nt, Artificial Sequence
  Description of Artificial Sequence: Synthetic oligonucleotide
  Sense strand starting at position 3797 of SEQ ID NO: 914326
acucuuuauugcucgauuu

SEQ ID NO: 995575 - RNA, 19 nt, Artificial Sequence
  Description of Artificial Sequence: Synthetic oligonucleotide
  Antisense strand to SEQ ID NO: 995574
aaaucgagcaauaaagagu

SEQ ID NO: 995576 - RNA, 19 nt, Artificial Sequence
  Description of Artificial Sequence: Synthetic oligonucleotide
  Sense strand starting at position 3932 of SEQ ID NO: 914326
uguauucuagcaugacaau

SEQ ID NO: 995577 - RNA, 19 nt, Artificial Sequence
  Description of Artificial Sequence: Synthetic oligonucleotide
  Antisense strand to SEQ ID NO: 995576
auugucaugcuagaauaca

SEQ ID NO: 995578 - RNA, 19 nt, Artificial Sequence
  Description of Artificial Sequence: Synthetic oligonucleotide
  Sense strand starting at position 3933 of SEQ ID NO: 914326
guauucuagcaugacaauu

SEQ ID NO: 995579 - RNA, 19 nt, Artificial Sequence
  Description of Artificial Sequence: Synthetic oligonucleotide
  Antisense strand to SEQ ID NO: 995578
aauugucaugcuagaauac

SEQ ID NO: 995580 - RNA, 19 nt, Artificial Sequence
  Description of Artificial Sequence: Synthetic oligonucleotide
  Sense strand starting at position 3964 of SEQ ID NO: 914326
cucuuaaauugaguguuua

SEQ ID NO: 995581 - RNA, 19 nt, Artificial Sequence
  Description of Artificial Sequence: Synthetic oligonucleotide
  Antisense strand to SEQ ID NO: 995580
uaaacacucaauuuaagag

SEQ ID NO: 995582 - RNA, 19 nt, Artificial Sequence
  Description of Artificial Sequence: Synthetic oligonucleotide
  Sense strand starting at position 3965 of SEQ ID NO: 914326
ucuuaaauugaguguuuac

SEQ ID NO: 995583 - RNA, 19 nt, Artificial Sequence
  Description of Artificial Sequence: Synthetic oligonucleotide
  Antisense strand to SEQ ID NO: 995582
guaaacacucaauuuaaga

SEQ ID NO: 995584 - RNA, 19 nt, Artificial Sequence
  Description of Artificial Sequence: Synthetic oligonucleotide
  Sense strand starting at position 3968 of SEQ ID NO: 914326
uaaauugaguguuuacaug

SEQ ID NO: 995585 - RNA, 19 nt, Artificial Sequence
  Description of Artificial Sequence: Synthetic oligonucleotide
  Antisense strand to SEQ ID NO: 995584
cauguaaacacucaauuua

SEQ ID NO: 995586 - RNA, 19 nt, Artificial Sequence
  Description of Artificial Sequence: Synthetic oligonucleotide
  Sense strand starting at position 129 of SEQ ID NO: 914327
ugagaauuguuuccauaga

SEQ ID NO: 995587 - RNA, 19 nt, Artificial Sequence
  Description of Artificial Sequence: Synthetic oligonucleotide
  Antisense strand to SEQ ID NO: 995586
ucuauggaaacaauucuca

SEQ ID NO: 995588 - RNA, 19 nt, Artificial Sequence
  Description of Artificial Sequence: Synthetic oligonucleotide
  Sense strand starting at position 212 of SEQ ID NO: 914327
cacuuuacagacgauguua

SEQ ID NO: 995589 - RNA, 19 nt, Artificial Sequence
  Description of Artificial Sequence: Synthetic oligonucleotide
  Antisense strand to SEQ ID NO: 995588
uaacaucgucuguaaagug

SEQ ID NO: 995590 - RNA, 19 nt, Artificial Sequence
  Description of Artificial Sequence: Synthetic oligonucleotide
  Sense strand starting at position 214 of SEQ ID NO: 914327
cuuuacagacgauguuaaa

SEQ ID NO: 995591 - RNA, 19 nt, Artificial Sequence
  Description of Artificial Sequence: Synthetic oligonucleotide
  Antisense strand to SEQ ID NO: 995590
uuuaacaucgucuguaaag

SEQ ID NO: 995592 - RNA, 19 nt, Artificial Sequence
  Description of Artificial Sequence: Synthetic oligonucleotide
  Sense strand starting at position 250 of SEQ ID NO: 914327
caguucuuggcauagauua

SEQ ID NO: 995593 - RNA, 19 nt, Artificial Sequence
  Description of Artificial Sequence: Synthetic oligonucleotide
  Antisense strand to SEQ ID NO: 995592
uaaucuaugccaagaacug

SEQ ID NO: 995594 - RNA, 19 nt, Artificial Sequence
  Description of Artificial Sequence: Synthetic oligonucleotide
  Sense strand starting at position 302 of SEQ ID NO: 914327
gcaucacuauuugugaugu

SEQ ID NO: 995595 - RNA, 19 nt, Artificial Sequence
  Description of Artificial Sequence: Synthetic oligonucleotide
  Antisense strand to SEQ ID NO: 995594
acaucacaaauagugaugc

SEQ ID NO: 995596 - RNA, 19 nt, Artificial Sequence
  Description of Artificial Sequence: Synthetic oligonucleotide
  Sense strand starting at position 588 of SEQ ID NO: 914327
accuacaugucaguacaua

SEQ ID NO: 995597 - RNA, 19 nt, Artificial Sequence
  Description of Artificial Sequence: Synthetic oligonucleotide
  Antisense strand to SEQ ID NO: 995596
uauguacugacauguaggu

SEQ ID NO: 995598 - RNA, 19 nt, Artificial Sequence
  Description of Artificial Sequence: Synthetic oligonucleotide
  Sense strand starting at position 589 of SEQ ID NO: 914327
ccuacaugucaguacauaa

SEQ ID NO: 995599 - RNA, 19 nt, Artificial Sequence
  Description of Artificial Sequence: Synthetic oligonucleotide
  Antisense strand to SEQ ID NO: 995598
uuauguacugacauguagg

SEQ ID NO: 995600 - RNA, 19 nt, Artificial Sequence
  Description of Artificial Sequence: Synthetic oligonucleotide
  Sense strand starting at position 723 of SEQ ID NO: 914327
aauguaaaugcucaguaag

SEQ ID NO: 995601 - RNA, 19 nt, Artificial Sequence
  Description of Artificial Sequence: Synthetic oligonucleotide
  Antisense strand to SEQ ID NO: 995600
cuuacugagcauuuacauu

SEQ ID NO: 995602 - RNA, 19 nt, Artificial Sequence
  Description of Artificial Sequence: Synthetic oligonucleotide
  Sense strand starting at position 726 of SEQ ID NO: 914327
guaaaugcucaguaagaau

SEQ ID NO: 995603 - RNA, 19 nt, Artificial Sequence
  Description of Artificial Sequence: Synthetic oligonucleotide
  Antisense strand to SEQ ID NO: 995602
auucuuacugagcauuuac

SEQ ID NO: 995604 - RNA, 19 nt, Artificial Sequence
  Description of Artificial Sequence: Synthetic oligonucleotide
  Sense strand starting at position 766 of SEQ ID NO: 914327
ugaggagucaaacagcuuu

SEQ ID NO: 995605 - RNA, 19 nt, Artificial Sequence
  Description of Artificial Sequence: Synthetic oligonucleotide
  Antisense strand to SEQ ID NO: 995604
aaagcuguuugacuccuca

SEQ ID NO: 995606 - RNA, 19 nt, Artificial Sequence
  Description of Artificial Sequence: Synthetic oligonucleotide
  Sense strand starting at position 790 of SEQ ID NO: 914327
uguggcaaacaguaugaua

SEQ ID NO: 995607 - RNA, 19 nt, Artificial Sequence
  Description of Artificial Sequence: Synthetic oligonucleotide
  Antisense strand to SEQ ID NO: 995606
uaucauacuguuugccaca

SEQ ID NO: 995608 - RNA, 19 nt, Artificial Sequence
  Description of Artificial Sequence: Synthetic oligonucleotide
  Sense strand starting at position 810 of SEQ ID NO: 914327
cucauaucaccaugaugga

SEQ ID NO: 995609 - RNA, 19 nt, Artificial Sequence
  Description of Artificial Sequence: Synthetic oligonucleotide
  Antisense strand to SEQ ID NO: 995608
uccaucauggugauaugag

SEQ ID NO: 995610 - RNA, 19 nt, Artificial Sequence
  Description of Artificial Sequence: Synthetic oligonucleotide
  Sense strand starting at position 892 of SEQ ID NO: 914327
aauagagaagucuguagca

SEQ ID NO: 995611 - RNA, 19 nt, Artificial Sequence
  Description of Artificial Sequence: Synthetic oligonucleotide
  Antisense strand to SEQ ID NO: 995610
ugcuacagacuucucuauu

SEQ ID NO: 995612 - RNA, 19 nt, Artificial Sequence
  Description of Artificial Sequence: Synthetic oligonucleotide
  Sense strand starting at position 894 of SEQ ID NO: 914327
uagagaagucuguagcacu

SEQ ID NO: 995613 - RNA, 19 nt, Artificial Sequence
  Description of Artificial Sequence: Synthetic oligonucleotide
  Antisense strand to SEQ ID NO: 995612
agugcuacagacuucucua

SEQ ID NO: 995614 - RNA, 19 nt, Artificial Sequence
  Description of Artificial Sequence: Synthetic oligonucleotide
  Sense strand starting at position 1285 of SEQ ID NO: 914327
acaggaagguuacucugua

SEQ ID NO: 995615 - RNA, 19 nt, Artificial Sequence
  Description of Artificial Sequence: Synthetic oligonucleotide
  Antisense strand to SEQ ID NO: 995614
uacagaguaaccuuccugu

SEQ ID NO: 995616 - RNA, 19 nt, Artificial Sequence
  Description of Artificial Sequence: Synthetic oligonucleotide
  Sense strand starting at position 1286 of SEQ ID NO: 914327
caggaagguuacucuguaa

SEQ ID NO: 995617 - RNA, 19 nt, Artificial Sequence
  Description of Artificial Sequence: Synthetic oligonucleotide
  Antisense strand to SEQ ID NO: 995616
uuacagaguaaccuuccug

SEQ ID NO: 995618 - RNA, 19 nt, Artificial Sequence
  Description of Artificial Sequence: Synthetic oligonucleotide
  Sense strand starting at position 1359 of SEQ ID NO: 914327
uggucucuuggguaucaaa

SEQ ID NO: 995619 - RNA, 19 nt, Artificial Sequence
  Description of Artificial Sequence: Synthetic oligonucleotide
  Antisense strand to SEQ ID NO: 995618
uuugauacccaagagacca

SEQ ID NO: 995620 - RNA, 19 nt, Artificial Sequence
  Description of Artificial Sequence: Synthetic oligonucleotide
  Sense strand starting at position 1424 of SEQ ID NO: 914327
agaauaauacgucaaaguc

SEQ ID NO: 995621 - RNA, 19 nt, Artificial Sequence
  Description of Artificial Sequence: Synthetic oligonucleotide
  Antisense strand to SEQ ID NO: 995620
gacuuugacguauuauucu

SEQ ID NO: 995622 - RNA, 19 nt, Artificial Sequence
  Description of Artificial Sequence: Synthetic oligonucleotide
  Sense strand starting at position 1433 of SEQ ID NO: 914327
cgucaaagucucuaagauu

SEQ ID NO: 995623 - RNA, 19 nt, Artificial Sequence
  Description of Artificial Sequence: Synthetic oligonucleotide
  Antisense strand to SEQ ID NO: 995622
aaucuuagagacuuugacg

SEQ ID NO: 995624 - RNA, 19 nt, Artificial Sequence
  Description of Artificial Sequence: Synthetic oligonucleotide
  Sense strand starting at position 1453 of SEQ ID NO: 914327
aagagagguuaugccaauu

SEQ ID NO: 995625 - RNA, 19 nt, Artificial Sequence
  Description of Artificial Sequence: Synthetic oligonucleotide
  Antisense strand to SEQ ID NO: 995624
aauuggcauaaccucucuu

SEQ ID NO: 995626 - RNA, 19 nt, Artificial Sequence
  Description of Artificial Sequence: Synthetic oligonucleotide
  Sense strand starting at position 1490 of SEQ ID NO: 914327
auaagaaugcugcauccua

SEQ ID NO: 995627 - RNA, 19 nt, Artificial Sequence
  Description of Artificial Sequence: Synthetic oligonucleotide
  Antisense strand to SEQ ID NO: 995626
uaggaugcagcauucuuau

SEQ ID NO: 995628 - RNA, 19 nt, Artificial Sequence
  Description of Artificial Sequence: Synthetic oligonucleotide
  Sense strand starting at position 1799 of SEQ ID NO: 914327
aguagauuaccuggaucac

SEQ ID NO: 995629 - RNA, 19 nt, Artificial Sequence
  Description of Artificial Sequence: Synthetic oligonucleotide
  Antisense strand to SEQ ID NO: 995628
gugauccagguaaucuacu

SEQ ID NO: 995630 - RNA, 19 nt, Artificial Sequence
  Description of Artificial Sequence: Synthetic oligonucleotide
  Sense strand starting at position 1986 of SEQ ID NO: 914327
gagggaugauaagaagaaa

SEQ ID NO: 995631 - RNA, 19 nt, Artificial Sequence
  Description of Artificial Sequence: Synthetic oligonucleotide
  Antisense strand to SEQ ID NO: 995630
uuucuucuuaucaucccuc

SEQ ID NO: 995632 - RNA, 19 nt, Artificial Sequence
  Description of Artificial Sequence: Synthetic oligonucleotide
  Sense strand starting at position 2033 of SEQ ID NO: 914327
cuaccaucaucauucgaag

SEQ ID NO: 995633 - RNA, 19 nt, Artificial Sequence
  Description of Artificial Sequence: Synthetic oligonucleotide
  Antisense strand to SEQ ID NO: 995632
cuucgaaugaugaugguag

SEQ ID NO: 995634 - RNA, 19 nt, Artificial Sequence
  Description of Artificial Sequence: Synthetic oligonucleotide
  Sense strand starting at position 2158 of SEQ ID NO: 914327
cugauaauucucuagcaga

SEQ ID NO: 995635 - RNA, 19 nt, Artificial Sequence
  Description of Artificial Sequence: Synthetic oligonucleotide
  Antisense strand to SEQ ID NO: 995634
ucugcuagagaauuaucag

SEQ ID NO: 995636 - RNA, 19 nt, Artificial Sequence
  Description of Artificial Sequence: Synthetic oligonucleotide
  Sense strand starting at position 2259 of SEQ ID NO: 914327
ucuugaguacagcaugauu

SEQ ID NO: 995637 - RNA, 19 nt, Artificial Sequence
  Description of Artificial Sequence: Synthetic oligonucleotide
  Antisense strand to SEQ ID NO: 995636
aaucaugcuguacucaaga

SEQ ID NO: 995638 - RNA, 19 nt, Artificial Sequence
  Description of Artificial Sequence: Synthetic oligonucleotide
  Sense strand starting at position 2284 of SEQ ID NO: 914327
uugggaauuucccaaauac

SEQ ID NO: 995639 - RNA, 19 nt, Artificial Sequence
  Description of Artificial Sequence: Synthetic oligonucleotide
  Antisense strand to SEQ ID NO: 995638
guauuugggaaauucccaa

SEQ ID NO: 995640 - RNA, 19 nt, Artificial Sequence
  Description of Artificial Sequence: Synthetic oligonucleotide
  Sense strand starting at position 2674 of SEQ ID NO: 914327
ggccucuuacaguagaaug

SEQ ID NO: 995641 - RNA, 19 nt, Artificial Sequence
  Description of Artificial Sequence: Synthetic oligonucleotide
  Antisense strand to SEQ ID NO: 995640
cauucuacuguaagaggcc

SEQ ID NO: 995642 - RNA, 19 nt, Artificial Sequence
  Description of Artificial Sequence: Synthetic oligonucleotide
  Sense strand starting at position 2718 of SEQ ID NO: 914327
gcaaucuaaucccuagaag

SEQ ID NO: 995643 - RNA, 19 nt, Artificial Sequence
  Description of Artificial Sequence: Synthetic oligonucleotide
  Antisense strand to SEQ ID NO: 995642
cuucuagggauuagauugc

SEQ ID NO: 995644 - RNA, 19 nt, Artificial Sequence
  Description of Artificial Sequence: Synthetic oligonucleotide
  Sense strand starting at position 2956 of SEQ ID NO: 914327
guuaaaucccaguaaucac

SEQ ID NO: 995645 - RNA, 19 nt, Artificial Sequence
  Description of Artificial Sequence: Synthetic oligonucleotide
  Antisense strand to SEQ ID NO: 995644
gugauuacugggauuuaac

SEQ ID NO: 995646 - RNA, 19 nt, Artificial Sequence
  Description of Artificial Sequence: Synthetic oligonucleotide
  Sense strand starting at position 3040 of SEQ ID NO: 914327
uacaguuagugaucuauga

SEQ ID NO: 995647 - RNA, 19 nt, Artificial Sequence
  Description of Artificial Sequence: Synthetic oligonucleotide
  Antisense strand to SEQ ID NO: 995646
ucauagaucacuaacugua

SEQ ID NO: 995648 - RNA, 19 nt, Artificial Sequence
  Description of Artificial Sequence: Synthetic oligonucleotide
  Sense strand starting at position 3044 of SEQ ID NO: 914327
guuagugaucuaugaagaa

SEQ ID NO: 995649 - RNA, 19 nt, Artificial Sequence
  Description of Artificial Sequence: Synthetic oligonucleotide
  Antisense strand to SEQ ID NO: 995648
uucuucauagaucacuaac

SEQ ID NO: 995650 - RNA, 19 nt, Artificial Sequence
  Description of Artificial Sequence: Synthetic oligonucleotide
  Sense strand starting at position 3094 of SEQ ID NO: 914327
ggcagucgccuuguaagua

SEQ ID NO: 995651 - RNA, 19 nt, Artificial Sequence
  Description of Artificial Sequence: Synthetic oligonucleotide
  Antisense strand to SEQ ID NO: 995650
uacuuacaaggcgacugcc

SEQ ID NO: 995652 - RNA, 19 nt, Artificial Sequence
  Description of Artificial Sequence: Synthetic oligonucleotide
  Sense strand starting at position 3124 of SEQ ID NO: 914327
aguaguuacugauuaagaa

SEQ ID NO: 995653 - RNA, 19 nt, Artificial Sequence
  Description of Artificial Sequence: Synthetic oligonucleotide
  Antisense strand to SEQ ID NO: 995652
uucuuaaucaguaacuacu

SEQ ID NO: 995654 - RNA, 19 nt, Artificial Sequence
  Description of Artificial Sequence: Synthetic oligonucleotide
  Sense strand starting at position 3181 of SEQ ID NO: 914327
acugacuguggcuaucauu

SEQ ID NO: 995655 - RNA, 19 nt, Artificial Sequence
  Description of Artificial Sequence: Synthetic oligonucleotide
  Antisense strand to SEQ ID NO: 995654
aaugauagccacagucagu

SEQ ID NO: 995656 - RNA, 19 nt, Artificial Sequence
  Description of Artificial Sequence: Synthetic oligonucleotide
  Sense strand starting at position 3187 of SEQ ID NO: 914327
uguggcuaucauuagacuu

SEQ ID NO: 995657 - RNA, 19 nt, Artificial Sequence
  Description of Artificial Sequence: Synthetic oligonucleotide
  Antisense strand to SEQ ID NO: 995656
aagucuaaugauagccaca

SEQ ID NO: 995658 - RNA, 19 nt, Artificial Sequence
  Description of Artificial Sequence: Synthetic oligonucleotide
  Sense strand starting at position 3479 of SEQ ID NO: 914327
cacuguguacucuaggaca

SEQ ID NO: 995659 - RNA, 19 nt, Artificial Sequence
  Description of Artificial Sequence: Synthetic oligonucleotide
  Antisense strand to SEQ ID NO: 995658
uguccuagaguacacagug

SEQ ID NO: 995660 - RNA, 19 nt, Artificial Sequence
  Description of Artificial Sequence: Synthetic oligonucleotide
  Sense strand starting at position 3521 of SEQ ID NO: 914327
agacaauacugguccauga

SEQ ID NO: 995661 - RNA, 19 nt, Artificial Sequence
  Description of Artificial Sequence: Synthetic oligonucleotide
  Antisense strand to SEQ ID NO: 995660
ucauggaccaguauugucu

SEQ ID NO: 995662 - RNA, 19 nt, Artificial Sequence
  Description of Artificial Sequence: Synthetic oligonucleotide
  Sense strand starting at position 3658 of SEQ ID NO: 914327
gcauuagaugcucagagga

SEQ ID NO: 995663 - RNA, 19 nt, Artificial Sequence
  Description of Artificial Sequence: Synthetic oligonucleotide
  Antisense strand to SEQ ID NO: 995662
uccucugagcaucuaaugc

SEQ ID NO: 995664 - RNA, 19 nt, Artificial Sequence
  Description of Artificial Sequence: Synthetic oligonucleotide
  Sense strand starting at position 3677 of SEQ ID NO: 914327
gcaggaacccuauagcgaa

SEQ ID NO: 995665 - RNA, 19 nt, Artificial Sequence
  Description of Artificial Sequence: Synthetic oligonucleotide
  Antisense strand to SEQ ID NO: 995664
uucgcuauaggguuccugc

SEQ ID NO: 995666 - RNA, 19 nt, Artificial Sequence
  Description of Artificial Sequence: Synthetic oligonucleotide
  Sense strand starting at position 2888 of SEQ ID NO: 914328
gcccucugcggcgaauuua

SEQ ID NO: 995667 - RNA, 19 nt, Artificial Sequence
  Description of Artificial Sequence: Synthetic oligonucleotide
  Antisense strand to SEQ ID NO: 995666
uaaauucgccgcagagggc

SEQ ID NO: 995668 - RNA, 19 nt, Artificial Sequence
  Description of Artificial Sequence: Synthetic oligonucleotide
  Sense strand starting at position 3137 of SEQ ID NO: 914328
uucuucuugcucuggagua

SEQ ID NO: 995669 - RNA, 19 nt, Artificial Sequence
  Description of Artificial Sequence: Synthetic oligonucleotide
  Antisense strand to SEQ ID NO: 995668
uacuccagagcaagaagaa

SEQ ID NO: 995670 - RNA, 19 nt, Artificial Sequence
  Description of Artificial Sequence: Synthetic oligonucleotide
  Sense strand starting at position 3196 of SEQ ID NO: 914328
cacggaguccuggacggau

SEQ ID NO: 995671 - RNA, 19 nt, Artificial Sequence
  Description of Artificial Sequence: Synthetic oligonucleotide
  Antisense strand to SEQ ID NO: 995670
auccguccaggacuccgug

SEQ ID NO: 995672 - RNA, 19 nt, Artificial Sequence
  Description of Artificial Sequence: Synthetic oligonucleotide
  Sense strand starting at position 3198 of SEQ ID NO: 914328
cggaguccuggacggauaa

SEQ ID NO: 995673 - RNA, 19 nt, Artificial Sequence
  Description of Artificial Sequence: Synthetic oligonucleotide
  Antisense strand to SEQ ID NO: 995672
uuauccguccaggacuccg

SEQ ID NO: 995674 - RNA, 19 nt, Artificial Sequence
  Description of Artificial Sequence: Synthetic oligonucleotide
  Sense strand starting at position 3199 of SEQ ID NO: 914328
ggaguccuggacggauaaa

SEQ ID NO: 995675 - RNA, 19 nt, Artificial Sequence
  Description of Artificial Sequence: Synthetic oligonucleotide
  Antisense strand to SEQ ID NO: 995674
uuuauccguccaggacucc

SEQ ID NO: 995676 - RNA, 19 nt, Artificial Sequence
  Description of Artificial Sequence: Synthetic oligonucleotide
  Sense strand starting at position 3362 of SEQ ID NO: 914328
ucgacuucccacugccaaa

SEQ ID NO: 995677 - RNA, 19 nt, Artificial Sequence
  Description of Artificial Sequence: Synthetic oligonucleotide
  Antisense strand to SEQ ID NO: 995676
uuuggcagugggaagucga

SEQ ID NO: 995678 - RNA, 19 nt, Artificial Sequence
  Description of Artificial Sequence: Synthetic oligonucleotide
  Sense strand starting at position 3498 of SEQ ID NO: 914328
cucacauuguucucgguau

SEQ ID NO: 995679 - RNA, 19 nt, Artificial Sequence
  Description of Artificial Sequence: Synthetic oligonucleotide
  Antisense strand to SEQ ID NO: 995678
auaccgagaacaaugugag

SEQ ID NO: 995680 - RNA, 19 nt, Artificial Sequence
  Description of Artificial Sequence: Synthetic oligonucleotide
  Sense strand starting at position 3499 of SEQ ID NO: 914328
ucacauuguucucgguauu

SEQ ID NO: 995681 - RNA, 19 nt, Artificial Sequence
  Description of Artificial Sequence: Synthetic oligonucleotide
  Antisense strand to SEQ ID NO: 995680
aauaccgagaacaauguga

SEQ ID NO: 995682 - RNA, 19 nt, Artificial Sequence
  Description of Artificial Sequence: Synthetic oligonucleotide
  Sense strand starting at position 3616 of SEQ ID NO: 914328
accuauaauguaugggcaa

SEQ ID NO: 995683 - RNA, 19 nt, Artificial Sequence
  Description of Artificial Sequence: Synthetic oligonucleotide
  Antisense strand to SEQ ID NO: 995682
uugcccauacauuauaggu

SEQ ID NO: 995684 - RNA, 19 nt, Artificial Sequence
  Description of Artificial Sequence: Synthetic oligonucleotide
  Sense strand starting at position 3617 of SEQ ID NO: 914328
ccuauaauguaugggcaau

SEQ ID NO: 995685 - RNA, 19 nt, Artificial Sequence
  Description of Artificial Sequence: Synthetic oligonucleotide
  Antisense strand to SEQ ID NO: 995684
auugcccauacauuauagg

SEQ ID NO: 995686 - RNA, 19 nt, Artificial Sequence
  Description of Artificial Sequence: Synthetic oligonucleotide
  Sense strand starting at position 3619 of SEQ ID NO: 914328
uauaauguaugggcaauau

SEQ ID NO: 995687 - RNA, 19 nt, Artificial Sequence
  Description of Artificial Sequence: Synthetic oligonucleotide
  Antisense strand to SEQ ID NO: 995686
auauugcccauacauuaua

SEQ ID NO: 995688 - RNA, 19 nt, Artificial Sequence
  Description of Artificial Sequence: Synthetic oligonucleotide
  Sense strand starting at position 3623 of SEQ ID NO: 914328
auguaugggcaauauuauu

SEQ ID NO: 995689 - RNA, 19 nt, Artificial Sequence
  Description of Artificial Sequence: Synthetic oligonucleotide
  Antisense strand to SEQ ID NO: 995688
aauaauauugcccauacau

SEQ ID NO: 995690 - RNA, 19 nt, Artificial Sequence
  Description of Artificial Sequence: Synthetic oligonucleotide
  Sense strand starting at position 3716 of SEQ ID NO: 914328
agaaguaacuuugaccacu

SEQ ID NO: 995691 - RNA, 19 nt, Artificial Sequence
  Description of Artificial Sequence: Synthetic oligonucleotide
  Antisense strand to SEQ ID NO: 995690
aguggucaaaguuacuucu

SEQ ID NO: 995692 - RNA, 19 nt, Artificial Sequence
  Description of Artificial Sequence: Synthetic oligonucleotide
  Sense strand starting at position 3733 of SEQ ID NO: 914328
cuaugcaagucaggaaaua

SEQ ID NO: 995693 - RNA, 19 nt, Artificial Sequence
  Description of Artificial Sequence: Synthetic oligonucleotide
  Antisense strand to SEQ ID NO: 995692
uauuuccugacuugcauag

SEQ ID NO: 995694 - RNA, 19 nt, Artificial Sequence
  Description of Artificial Sequence: Synthetic oligonucleotide
  Sense strand starting at position 3824 of SEQ ID NO: 914328
cccaaauccugaugaagaa

SEQ ID NO: 995695 - RNA, 19 nt, Artificial Sequence
  Description of Artificial Sequence: Synthetic oligonucleotide
  Antisense strand to SEQ ID NO: 995694
uucuucaucaggauuuggg

SEQ ID NO: 995696 - RNA, 19 nt, Artificial Sequence
  Description of Artificial Sequence: Synthetic oligonucleotide
  Sense strand starting at position 3897 of SEQ ID NO: 914328
agcucacucuccucaggaa

SEQ ID NO: 995697 - RNA, 19 nt, Artificial Sequence
  Description of Artificial Sequence: Synthetic oligonucleotide
  Antisense strand to SEQ ID NO: 995696
uuccugaggagagugagcu

SEQ ID NO: 995698 - RNA, 19 nt, Artificial Sequence
  Description of Artificial Sequence: Synthetic oligonucleotide
  Sense strand starting at position 143 of SEQ ID NO: 914329
cugccuuaggauugacauc

SEQ ID NO: 995699 - RNA, 19 nt, Artificial Sequence
  Description of Artificial Sequence: Synthetic oligonucleotide
  Antisense strand to SEQ ID NO: 995698
gaugucaauccuaaggcag

SEQ ID NO: 995700 - RNA, 19 nt, Artificial Sequence
  Description of Artificial Sequence: Synthetic oligonucleotide
  Sense strand starting at position 261 of SEQ ID NO: 914329
uguagaauacuuugauuag

SEQ ID NO: 995701 - RNA, 19 nt, Artificial Sequence
  Description of Artificial Sequence: Synthetic oligonucleotide
  Antisense strand to SEQ ID NO: 995700
cuaaucaaaguauucuaca

SEQ ID NO: 995702 - RNA, 19 nt, Artificial Sequence
  Description of Artificial Sequence: Synthetic oligonucleotide
  Sense strand starting at position 440 of SEQ ID NO: 914329
gguagauuagguugaggaa

SEQ ID NO: 995703 - RNA, 19 nt, Artificial Sequence
  Description of Artificial Sequence: Synthetic oligonucleotide
  Antisense strand to SEQ ID NO: 995702
uuccucaaccuaaucuacc

SEQ ID NO: 995704 - RNA, 19 nt, Artificial Sequence
  Description of Artificial Sequence: Synthetic oligonucleotide
  Sense strand starting at position 449 of SEQ ID NO: 914329
gguugaggaagcugagaaa

SEQ ID NO: 995705 - RNA, 19 nt, Artificial Sequence
  Description of Artificial Sequence: Synthetic oligonucleotide
  Antisense strand to SEQ ID NO: 995704
uuucucagcuuccucaacc

SEQ ID NO: 995706 - RNA, 19 nt, Artificial Sequence
  Description of Artificial Sequence: Synthetic oligonucleotide
  Sense strand starting at position 489 of SEQ ID NO: 914329
uugcaaggucuaggacauu

SEQ ID NO: 995707 - RNA, 19 nt, Artificial Sequence
  Description of Artificial Sequence: Synthetic oligonucleotide
  Antisense strand to SEQ ID NO: 995706
aauguccuagaccuugcaa

SEQ ID NO: 995708 - RNA, 19 nt, Artificial Sequence
  Description of Artificial Sequence: Synthetic oligonucleotide
  Sense strand starting at position 706 of SEQ ID NO: 914329
uuaccagucuccuuauuag

SEQ ID NO: 995709 - RNA, 19 nt, Artificial Sequence
  Description of Artificial Sequence: Synthetic oligonucleotide
  Antisense strand to SEQ ID NO: 995708
cuaauaaggagacugguaa

SEQ ID NO: 995710 - RNA, 19 nt, Artificial Sequence
  Description of Artificial Sequence: Synthetic oligonucleotide
  Sense strand starting at position 712 of SEQ ID NO: 914329
gucuccuuauuagugggaa

SEQ ID NO: 995711 - RNA, 19 nt, Artificial Sequence
  Description of Artificial Sequence: Synthetic oligonucleotide
  Antisense strand to SEQ ID NO: 995710
uucccacuaauaaggagac

SEQ ID NO: 995712 - RNA, 19 nt, Artificial Sequence
  Description of Artificial Sequence: Synthetic oligonucleotide
  Sense strand starting at position 953 of SEQ ID NO: 914329
aggagcuuuaguuaugggu

SEQ ID NO: 995713 - RNA, 19 nt, Artificial Sequence
  Description of Artificial Sequence: Synthetic oligonucleotide
  Antisense strand to SEQ ID NO: 995712
acccauaacuaaagcuccu

SEQ ID NO: 995714 - RNA, 19 nt, Artificial Sequence
  Description of Artificial Sequence: Synthetic oligonucleotide
  Sense strand starting at position 959 of SEQ ID NO: 914329
uuuaguuauggguacauac

SEQ ID NO: 995715 - RNA, 19 nt, Artificial Sequence
  Description of Artificial Sequence: Synthetic oligonucleotide
  Antisense strand to SEQ ID NO: 995714
guauguacccauaacuaaa

SEQ ID NO: 995716 - RNA, 19 nt, Artificial Sequence
  Description of Artificial Sequence: Synthetic oligonucleotide
  Sense strand starting at position 1080 of SEQ ID NO: 914329
gagucucaauccucaggaa

SEQ ID NO: 995717 - RNA, 19 nt, Artificial Sequence
  Description of Artificial Sequence: Synthetic oligonucleotide
  Antisense strand to SEQ ID NO: 995716
uuccugaggauugagacuc

SEQ ID NO: 995718 - RNA, 19 nt, Artificial Sequence
  Description of Artificial Sequence: Synthetic oligonucleotide
  Sense strand starting at position 1205 of SEQ ID NO: 914329
cagugcuuagggcaaacau

SEQ ID NO: 995719 - RNA, 19 nt, Artificial Sequence
  Description of Artificial Sequence: Synthetic oligonucleotide
  Antisense strand to SEQ ID NO: 995718
auguuugcccuaagcacug

SEQ ID NO: 995720 - RNA, 19 nt, Artificial Sequence
  Description of Artificial Sequence: Synthetic oligonucleotide
  Sense strand starting at position 1306 of SEQ ID NO: 914329
uguuaucaugccuaacaga

SEQ ID NO: 995721 - RNA, 19 nt, Artificial Sequence
  Description of Artificial Sequence: Synthetic oligonucleotide
  Antisense strand to SEQ ID NO: 995720
ucuguuaggcaugauaaca

SEQ ID NO: 995722 - RNA, 19 nt, Artificial Sequence
  Description of Artificial Sequence: Synthetic oligonucleotide
  Sense strand starting at position 2241 of SEQ ID NO: 914329
uuggaucguauuuguacau

SEQ ID NO: 995723 - RNA, 19 nt, Artificial Sequence
  Description of Artificial Sequence: Synthetic oligonucleotide
  Antisense strand to SEQ ID NO: 995722
auguacaaauacgauccaa

SEQ ID NO: 995724 - RNA, 19 nt, Artificial Sequence
  Description of Artificial Sequence: Synthetic oligonucleotide
  Sense strand starting at position 2463 of SEQ ID NO: 914329
ccaggaagaugcuuguaaa

SEQ ID NO: 995725 - RNA, 19 nt, Artificial Sequence
  Description of Artificial Sequence: Synthetic oligonucleotide
  Antisense strand to SEQ ID NO: 995724
uuuacaagcaucuuccugg

SEQ ID NO: 995726 - RNA, 19 nt, Artificial Sequence
  Description of Artificial Sequence: Synthetic oligonucleotide
  Sense strand starting at position 2464 of SEQ ID NO: 914329
caggaagaugcuuguaaau

SEQ ID NO: 995727 - RNA, 19 nt, Artificial Sequence
  Description of Artificial Sequence: Synthetic oligonucleotide
  Antisense strand to SEQ ID NO: 995726
auuuacaagcaucuuccug

SEQ ID NO: 995728 - RNA, 19 nt, Artificial Sequence
  Description of Artificial Sequence: Synthetic oligonucleotide
  Sense strand starting at position 2532 of SEQ ID NO: 914329
aguauaggugcucauuaau

SEQ ID NO: 995729 - RNA, 19 nt, Artificial Sequence
  Description of Artificial Sequence: Synthetic oligonucleotide
  Antisense strand to SEQ ID NO: 995728
auuaaugagcaccuauacu

SEQ ID NO: 995730 - RNA, 19 nt, Artificial Sequence
  Description of Artificial Sequence: Synthetic oligonucleotide
  Sense strand starting at position 2621 of SEQ ID NO: 914329
uuaucuuaaggucgggaua

SEQ ID NO: 995731 - RNA, 19 nt, Artificial Sequence
  Description of Artificial Sequence: Synthetic oligonucleotide
  Antisense strand to SEQ ID NO: 995730
uaucccgaccuuaagauaa

SEQ ID NO: 995732 - RNA, 19 nt, Artificial Sequence
  Description of Artificial Sequence: Synthetic oligonucleotide
  Sense strand starting at position 2713 of SEQ ID NO: 914329
ggcccaagcgugcuaguaa

SEQ ID NO: 995733 - RNA, 19 nt, Artificial Sequence
  Description of Artificial Sequence: Synthetic oligonucleotide
  Antisense strand to SEQ ID NO: 995732
uuacuagcacgcuugggcc

SEQ ID NO: 995734 - RNA, 19 nt, Artificial Sequence
  Description of Artificial Sequence: Synthetic oligonucleotide
  Sense strand starting at position 2814 of SEQ ID NO: 914329
gcgauuugaugccuagaac

SEQ ID NO: 995735 - RNA, 19 nt, Artificial Sequence
  Description of Artificial Sequence: Synthetic oligonucleotide
  Antisense strand to SEQ ID NO: 995734
guucuaggcaucaaaucgc

SEQ ID NO: 995736 - RNA, 19 nt, Artificial Sequence
  Description of Artificial Sequence: Synthetic oligonucleotide
  Sense strand starting at position 2935 of SEQ ID NO: 914329
uuuguuaagcaaugauuag

SEQ ID NO: 995737 - RNA, 19 nt, Artificial Sequence
  Description of Artificial Sequence: Synthetic oligonucleotide
  Antisense strand to SEQ ID NO: 995736
cuaaucauugcuuaacaaa

SEQ ID NO: 995738 - RNA, 19 nt, Artificial Sequence
  Description of Artificial Sequence: Synthetic oligonucleotide
  Sense strand starting at position 3099 of SEQ ID NO: 914329
gcguucugggaggagauua

SEQ ID NO: 995739 - RNA, 19 nt, Artificial Sequence
  Description of Artificial Sequence: Synthetic oligonucleotide
  Antisense strand to SEQ ID NO: 995738
uaaucuccucccagaacgc

SEQ ID NO: 995740 - RNA, 19 nt, Artificial Sequence
  Description of Artificial Sequence: Synthetic oligonucleotide
  Sense strand starting at position 3110 of SEQ ID NO: 914329
ggagauuaaugccugcaug

SEQ ID NO: 995741 - RNA, 19 nt, Artificial Sequence
  Description of Artificial Sequence: Synthetic oligonucleotide
  Antisense strand to SEQ ID NO: 995740
caugcaggcauuaaucucc

SEQ ID NO: 995742 - RNA, 19 nt, Artificial Sequence
  Description of Artificial Sequence: Synthetic oligonucleotide
  Sense strand starting at position 3113 of SEQ ID NO: 914329
gauuaaugccugcauggaa

SEQ ID NO: 995743 - RNA, 19 nt, Artificial Sequence
  Description of Artificial Sequence: Synthetic oligonucleotide
  Antisense strand to SEQ ID NO: 995742
uuccaugcaggcauuaauc

SEQ ID NO: 995744 - RNA, 19 nt, Artificial Sequence
  Description of Artificial Sequence: Synthetic oligonucleotide
  Sense strand starting at position 3128 of SEQ ID NO: 914329
ggaacuuaauuugaugcaa

SEQ ID NO: 995745 - RNA, 19 nt, Artificial Sequence
  Description of Artificial Sequence: Synthetic oligonucleotide
  Antisense strand to SEQ ID NO: 995744
uugcaucaaauuaaguucc

SEQ ID NO: 995746 - RNA, 19 nt, Artificial Sequence
  Description of Artificial Sequence: Synthetic oligonucleotide
  Sense strand starting at position 3265 of SEQ ID NO: 914329
aggugaaagaguuguggua

SEQ ID NO: 995747 - RNA, 19 nt, Artificial Sequence
  Description of Artificial Sequence: Synthetic oligonucleotide
  Antisense strand to SEQ ID NO: 995746
uaccacaacucuuucaccu

SEQ ID NO: 995748 - RNA, 19 nt, Artificial Sequence
  Description of Artificial Sequence: Synthetic oligonucleotide
  Sense strand starting at position 3323 of SEQ ID NO: 914329
acgccaucaccugaaucau

SEQ ID NO: 995749 - RNA, 19 nt, Artificial Sequence
  Description of Artificial Sequence: Synthetic oligonucleotide
  Antisense strand to SEQ ID NO: 995748
augauucaggugauggcgu

SEQ ID NO: 995750 - RNA, 19 nt, Artificial Sequence
  Description of Artificial Sequence: Synthetic oligonucleotide
  Sense strand starting at position 3331 of SEQ ID NO: 914329
accugaaucauggguuaag

SEQ ID NO: 995751 - RNA, 19 nt, Artificial Sequence
  Description of Artificial Sequence: Synthetic oligonucleotide
  Antisense strand to SEQ ID NO: 995750
cuuaacccaugauucaggu

SEQ ID NO: 995752 - RNA, 19 nt, Artificial Sequence
  Description of Artificial Sequence: Synthetic oligonucleotide
  Sense strand starting at position 3471 of SEQ ID NO: 914329
acaccugcuuuauuggaua

SEQ ID NO: 995753 - RNA, 19 nt, Artificial Sequence
  Description of Artificial Sequence: Synthetic oligonucleotide
  Antisense strand to SEQ ID NO: 995752
uauccaauaaagcaggugu

SEQ ID NO: 995754 - RNA, 19 nt, Artificial Sequence
  Description of Artificial Sequence: Synthetic oligonucleotide
  Sense strand starting at position 3495 of SEQ ID NO: 914329
agagaaguaugccugguca

SEQ ID NO: 995755 - RNA, 19 nt, Artificial Sequence
  Description of Artificial Sequence: Synthetic oligonucleotide
  Antisense strand to SEQ ID NO: 995754
ugaccaggcauacuucucu

SEQ ID NO: 995756 - RNA, 19 nt, Artificial Sequence
  Description of Artificial Sequence: Synthetic oligonucleotide
  Sense strand starting at position 3529 of SEQ ID NO: 914329
cgguaaguuguugaacaga

SEQ ID NO: 995757 - RNA, 19 nt, Artificial Sequence
  Description of Artificial Sequence: Synthetic oligonucleotide
  Antisense strand to SEQ ID NO: 995756
ucuguucaacaacuuaccg

SEQ ID NO: 995758 - RNA, 19 nt, Artificial Sequence
  Description of Artificial Sequence: Synthetic oligonucleotide
  Sense strand starting at position 3559 of SEQ ID NO: 914329
uuugcauuuccugggcaga

SEQ ID NO: 995759 - RNA, 19 nt, Artificial Sequence
  Description of Artificial Sequence: Synthetic oligonucleotide
  Antisense strand to SEQ ID NO: 995758
ucugcccaggaaaugcaaa

SEQ ID NO: 995760 - RNA, 19 nt, Artificial Sequence
  Description of Artificial Sequence: Synthetic oligonucleotide
  Sense strand starting at position 3582 of SEQ ID NO: 914329
auaugagacuauucuaagu

SEQ ID NO: 995761 - RNA, 19 nt, Artificial Sequence
  Description of Artificial Sequence: Synthetic oligonucleotide
  Antisense strand to SEQ ID NO: 995760
acuuagaauagucucauau

SEQ ID NO: 995762 - RNA, 19 nt, Artificial Sequence
  Description of Artificial Sequence: Synthetic oligonucleotide
  Sense strand starting at position 3587 of SEQ ID NO: 914329
agacuauucuaagugugac

SEQ ID NO: 995763 - RNA, 19 nt, Artificial Sequence
  Description of Artificial Sequence: Synthetic oligonucleotide
  Antisense strand to SEQ ID NO: 995762
gucacacuuagaauagucu

SEQ ID NO: 995764 - RNA, 19 nt, Artificial Sequence
  Description of Artificial Sequence: Synthetic oligonucleotide
  Sense strand starting at position 3590 of SEQ ID NO: 914329
cuauucuaagugugaccaa

SEQ ID NO: 995765 - RNA, 19 nt, Artificial Sequence
  Description of Artificial Sequence: Synthetic oligonucleotide
  Antisense strand to SEQ ID NO: 995764
uuggucacacuuagaauag

SEQ ID NO: 995766 - RNA, 19 nt, Artificial Sequence
  Description of Artificial Sequence: Synthetic oligonucleotide
  Sense strand starting at position 3633 of SEQ ID NO: 914329
uaguuaauagcccagagau

SEQ ID NO: 995767 - RNA, 19 nt, Artificial Sequence
  Description of Artificial Sequence: Synthetic oligonucleotide
  Antisense strand to SEQ ID NO: 995766
aucucugggcuauuaacua

SEQ ID NO: 995768 - RNA, 19 nt, Artificial Sequence
  Description of Artificial Sequence: Synthetic oligonucleotide
  Sense strand starting at position 3635 of SEQ ID NO: 914329
guuaauagcccagagaugu

SEQ ID NO: 995769 - RNA, 19 nt, Artificial Sequence
  Description of Artificial Sequence: Synthetic oligonucleotide
  Antisense strand to SEQ ID NO: 995768
acaucucugggcuauuaac

SEQ ID NO: 995770 - RNA, 19 nt, Artificial Sequence
  Description of Artificial Sequence: Synthetic oligonucleotide
  Sense strand starting at position 3645 of SEQ ID NO: 914329
cagagaugucaugauugcu

SEQ ID NO: 995771 - RNA, 19 nt, Artificial Sequence
  Description of Artificial Sequence: Synthetic oligonucleotide
  Antisense strand to SEQ ID NO: 995770
agcaaucaugacaucucug

SEQ ID NO: 995772 - RNA, 19 nt, Artificial Sequence
  Description of Artificial Sequence: Synthetic oligonucleotide
  Sense strand starting at position 3699 of SEQ ID NO: 914329
gugacucucuauuccauca

SEQ ID NO: 995773 - RNA, 19 nt, Artificial Sequence
  Description of Artificial Sequence: Synthetic oligonucleotide
  Antisense strand to SEQ ID NO: 995772
ugauggaauagagagucac

SEQ ID NO: 995774 - RNA, 19 nt, Artificial Sequence
  Description of Artificial Sequence: Synthetic oligonucleotide
  Sense strand starting at position 3739 of SEQ ID NO: 914329
ugucuuauaguuuacuaac

SEQ ID NO: 995775 - RNA, 19 nt, Artificial Sequence
  Description of Artificial Sequence: Synthetic oligonucleotide
  Antisense strand to SEQ ID NO: 995774
guuaguaaacuauaagaca

SEQ ID NO: 995776 - RNA, 19 nt, Artificial Sequence
  Description of Artificial Sequence: Synthetic oligonucleotide
  Sense strand starting at position 3872 of SEQ ID NO: 914329
aguuacugucuauaguuaa

SEQ ID NO: 995777 - RNA, 19 nt, Artificial Sequence
  Description of Artificial Sequence: Synthetic oligonucleotide
  Antisense strand to SEQ ID NO: 995776
uuaacuauagacaguaacu

SEQ ID NO: 995778 - RNA, 19 nt, Artificial Sequence
  Description of Artificial Sequence: Synthetic oligonucleotide
  Sense strand starting at position 491 of SEQ ID NO: 914330
acuuacuuccuguguuauc

SEQ ID NO: 995779 - RNA, 19 nt, Artificial Sequence
  Description of Artificial Sequence: Synthetic oligonucleotide
  Antisense strand to SEQ ID NO: 995778
gauaacacaggaaguaagu

SEQ ID NO: 995780 - RNA, 19 nt, Artificial Sequence
  Description of Artificial Sequence: Synthetic oligonucleotide
  Sense strand starting at position 492 of SEQ ID NO: 914330
cuuacuuccuguguuauca

SEQ ID NO: 995781 - RNA, 19 nt, Artificial Sequence
  Description of Artificial Sequence: Synthetic oligonucleotide
  Antisense strand to SEQ ID NO: 995780
ugauaacacaggaaguaag

SEQ ID NO: 995782 - RNA, 19 nt, Artificial Sequence
  Description of Artificial Sequence: Synthetic oligonucleotide
  Sense strand starting at position 496 of SEQ ID NO: 914330
cuuccuguguuaucaucuu

SEQ ID NO: 995783 - RNA, 19 nt, Artificial Sequence
  Description of Artificial Sequence: Synthetic oligonucleotide
  Antisense strand to SEQ ID NO: 995782
aagaugauaacacaggaag

SEQ ID NO: 995784 - RNA, 19 nt, Artificial Sequence
  Description of Artificial Sequence: Synthetic oligonucleotide
  Sense strand starting at position 502 of SEQ ID NO: 914330
guguuaucaucuuucuacc

SEQ ID NO: 995785 - RNA, 19 nt, Artificial Sequence
  Description of Artificial Sequence: Synthetic oligonucleotide
  Antisense strand to SEQ ID NO: 995784
gguagaaagaugauaacac

SEQ ID NO: 995786 - RNA, 19 nt, Artificial Sequence
  Description of Artificial Sequence: Synthetic oligonucleotide
  Sense strand starting at position 651 of SEQ ID NO: 914330
augagugaacuguaugcuu

SEQ ID NO: 995787 - RNA, 19 nt, Artificial Sequence
  Description of Artificial Sequence: Synthetic oligonucleotide
  Antisense strand to SEQ ID NO: 995786
aagcauacaguucacucau

SEQ ID NO: 995788 - RNA, 19 nt, Artificial Sequence
  Description of Artificial Sequence: Synthetic oligonucleotide
  Sense strand starting at position 672 of SEQ ID NO: 914330
cuuagagcucuuuaaagca

SEQ ID NO: 995789 - RNA, 19 nt, Artificial Sequence
  Description of Artificial Sequence: Synthetic oligonucleotide
  Antisense strand to SEQ ID NO: 995788
ugcuuuaaagagcucuaag

SEQ ID NO: 995790 - RNA, 19 nt, Artificial Sequence
  Description of Artificial Sequence: Synthetic oligonucleotide
  Sense strand starting at position 1028 of SEQ ID NO: 914330
augccuauauucccagagu

SEQ ID NO: 995791 - RNA, 19 nt, Artificial Sequence
  Description of Artificial Sequence: Synthetic oligonucleotide
  Antisense strand to SEQ ID NO: 995790
acucugggaauauaggcau

SEQ ID NO: 995792 - RNA, 19 nt, Artificial Sequence
  Description of Artificial Sequence: Synthetic oligonucleotide
  Sense strand starting at position 1186 of SEQ ID NO: 914330
uaaguuauaugugcacgua

SEQ ID NO: 995793 - RNA, 19 nt, Artificial Sequence
  Description of Artificial Sequence: Synthetic oligonucleotide
  Antisense strand to SEQ ID NO: 995792
uacgugcacauauaacuua

SEQ ID NO: 995794 - RNA, 19 nt, Artificial Sequence
  Description of Artificial Sequence: Synthetic oligonucleotide
  Sense strand starting at position 1187 of SEQ ID NO: 914330
aaguuauaugugcacguaa

SEQ ID NO: 995795 - RNA, 19 nt, Artificial Sequence
  Description of Artificial Sequence: Synthetic oligonucleotide
  Antisense strand to SEQ ID NO: 995794
uuacgugcacauauaacuu

SEQ ID NO: 995796 - RNA, 19 nt, Artificial Sequence
  Description of Artificial Sequence: Synthetic oligonucleotide
  Sense strand starting at position 1198 of SEQ ID NO: 914330
gcacguaagcgucuuaucu

SEQ ID NO: 995797 - RNA, 19 nt, Artificial Sequence
  Description of Artificial Sequence: Synthetic oligonucleotide
  Antisense strand to SEQ ID NO: 995796
agauaagacgcuuacgugc

SEQ ID NO: 995798 - RNA, 19 nt, Artificial Sequence
  Description of Artificial Sequence: Synthetic oligonucleotide
  Sense strand starting at position 1199 of SEQ ID NO: 914330
cacguaagcgucuuaucuc

SEQ ID NO: 995799 - RNA, 19 nt, Artificial Sequence
  Description of Artificial Sequence: Synthetic oligonucleotide
  Antisense strand to SEQ ID NO: 995798
gagauaagacgcuuacgug

SEQ ID NO: 995800 - RNA, 19 nt, Artificial Sequence
  Description of Artificial Sequence: Synthetic oligonucleotide
  Sense strand starting at position 1554 of SEQ ID NO: 914330
gguggcguccgaguuaucu

SEQ ID NO: 995801 - RNA, 19 nt, Artificial Sequence
  Description of Artificial Sequence: Synthetic oligonucleotide
  Antisense strand to SEQ ID NO: 995800
agauaacucggacgccacc

SEQ ID NO: 995802 - RNA, 19 nt, Artificial Sequence
  Description of Artificial Sequence: Synthetic oligonucleotide
  Sense strand starting at position 1564 of SEQ ID NO: 914330
gaguuaucuccgggaccca

SEQ ID NO: 995803 - RNA, 19 nt, Artificial Sequence
  Description of Artificial Sequence: Synthetic oligonucleotide
  Antisense strand to SEQ ID NO: 995802
ugggucccggagauaacuc

SEQ ID NO: 995804 - RNA, 19 nt, Artificial Sequence
  Description of Artificial Sequence: Synthetic oligonucleotide
  Sense strand starting at position 2217 of SEQ ID NO: 914330
ugaaguuccugaguugcau

SEQ ID NO: 995805 - RNA, 19 nt, Artificial Sequence
  Description of Artificial Sequence: Synthetic oligonucleotide
  Antisense strand to SEQ ID NO: 995804
augcaacucaggaacuuca

SEQ ID NO: 995806 - RNA, 19 nt, Artificial Sequence
  Description of Artificial Sequence: Synthetic oligonucleotide
  Sense strand starting at position 2241 of SEQ ID NO: 914330
cugcgucugaccugagagu

SEQ ID NO: 995807 - RNA, 19 nt, Artificial Sequence
  Description of Artificial Sequence: Synthetic oligonucleotide
  Antisense strand to SEQ ID NO: 995806
acucucaggucagacgcag

SEQ ID NO: 995808 - RNA, 19 nt, Artificial Sequence
  Description of Artificial Sequence: Synthetic oligonucleotide
  Sense strand starting at position 2357 of SEQ ID NO: 914330
ucggcaucauccucugaca

SEQ ID NO: 995809 - RNA, 19 nt, Artificial Sequence
  Description of Artificial Sequence: Synthetic oligonucleotide
  Antisense strand to SEQ ID NO: 995808
ugucagaggaugaugccga

SEQ ID NO: 995810 - RNA, 19 nt, Artificial Sequence
  Description of Artificial Sequence: Synthetic oligonucleotide
  Sense strand starting at position 2359 of SEQ ID NO: 914330
ggcaucauccucugacaga

SEQ ID NO: 995811 - RNA, 19 nt, Artificial Sequence
  Description of Artificial Sequence: Synthetic oligonucleotide
  Antisense strand to SEQ ID NO: 995810
ucugucagaggaugaugcc

SEQ ID NO: 995812 - RNA, 19 nt, Artificial Sequence
  Description of Artificial Sequence: Synthetic oligonucleotide
  Sense strand starting at position 2533 of SEQ ID NO: 914330
gcguuucccuguucagaag

SEQ ID NO: 995813 - RNA, 19 nt, Artificial Sequence
  Description of Artificial Sequence: Synthetic oligonucleotide
  Antisense strand to SEQ ID NO: 995812
cuucugaacagggaaacgc

SEQ ID NO: 995814 - RNA, 19 nt, Artificial Sequence
  Description of Artificial Sequence: Synthetic oligonucleotide
  Sense strand starting at position 2653 of SEQ ID NO: 914330
aauggcuuuguccaagagu

SEQ ID NO: 995815 - RNA, 19 nt, Artificial Sequence
  Description of Artificial Sequence: Synthetic oligonucleotide
  Antisense strand to SEQ ID NO: 995814
acucuuggacaaagccauu

SEQ ID NO: 995816 - RNA, 19 nt, Artificial Sequence
  Description of Artificial Sequence: Synthetic oligonucleotide
  Sense strand starting at position 2656 of SEQ ID NO: 914330
ggcuuuguccaagaguuuc

SEQ ID NO: 995817 - RNA, 19 nt, Artificial Sequence
  Description of Artificial Sequence: Synthetic oligonucleotide
  Antisense strand to SEQ ID NO: 995816
gaaacucuuggacaaagcc

SEQ ID NO: 995818 - RNA, 19 nt, Artificial Sequence
  Description of Artificial Sequence: Synthetic oligonucleotide
  Sense strand starting at position 2681 of SEQ ID NO: 914330
uacuuuagcgcucaagaag

SEQ ID NO: 995819 - RNA, 19 nt, Artificial Sequence
  Description of Artificial Sequence: Synthetic oligonucleotide
  Antisense strand to SEQ ID NO: 995818
cuucuugagcgcuaaagua

SEQ ID NO: 995820 - RNA, 19 nt, Artificial Sequence
  Description of Artificial Sequence: Synthetic oligonucleotide
  Sense strand starting at position 2739 of SEQ ID NO: 914330
uuuguaaacucaggagaca

SEQ ID NO: 995821 - RNA, 19 nt, Artificial Sequence
  Description of Artificial Sequence: Synthetic oligonucleotide
  Antisense strand to SEQ ID NO: 995820
ugucuccugaguuuacaaa

SEQ ID NO: 995822 - RNA, 19 nt, Artificial Sequence
  Description of Artificial Sequence: Synthetic oligonucleotide
  Sense strand starting at position 2750 of SEQ ID NO: 914330
aggagacagccuuauugcu

SEQ ID NO: 995823 - RNA, 19 nt, Artificial Sequence
  Description of Artificial Sequence: Synthetic oligonucleotide
  Antisense strand to SEQ ID NO: 995822
agcaauaaggcugucuccu

SEQ ID NO: 995824 - RNA, 19 nt, Artificial Sequence
  Description of Artificial Sequence: Synthetic oligonucleotide
  Sense strand starting at position 2758 of SEQ ID NO: 914330
gccuuauugcugcagguaa

SEQ ID NO: 995825 - RNA, 19 nt, Artificial Sequence
  Description of Artificial Sequence: Synthetic oligonucleotide
  Antisense strand to SEQ ID NO: 995824
uuaccugcagcaauaaggc

SEQ ID NO: 995826 - RNA, 19 nt, Artificial Sequence
  Description of Artificial Sequence: Synthetic oligonucleotide
  Sense strand starting at position 2760 of SEQ ID NO: 914330
cuuauugcugcagguaagu

SEQ ID NO: 995827 - RNA, 19 nt, Artificial Sequence
  Description of Artificial Sequence: Synthetic oligonucleotide
  Antisense strand to SEQ ID NO: 995826
acuuaccugcagcaauaag

SEQ ID NO: 995828 - RNA, 19 nt, Artificial Sequence
  Description of Artificial Sequence: Synthetic oligonucleotide
  Sense strand starting at position 2801 of SEQ ID NO: 914330
ccucucucaugcuugggaa

SEQ ID NO: 995829 - RNA, 19 nt, Artificial Sequence
  Description of Artificial Sequence: Synthetic oligonucleotide
  Antisense strand to SEQ ID NO: 995828
uucccaagcaugagagagg

SEQ ID NO: 995830 - RNA, 19 nt, Artificial Sequence
  Description of Artificial Sequence: Synthetic oligonucleotide
  Sense strand starting at position 2802 of SEQ ID NO: 914330
cucucucaugcuugggaaa

SEQ ID NO: 995831 - RNA, 19 nt, Artificial Sequence
  Description of Artificial Sequence: Synthetic oligonucleotide
  Antisense strand to SEQ ID NO: 995830
uuucccaagcaugagagag

SEQ ID NO: 995832 - RNA, 19 nt, Artificial Sequence
  Description of Artificial Sequence: Synthetic oligonucleotide
  Sense strand starting at position 2848 of SEQ ID NO: 914330
agcuaacuccuguguaacu

SEQ ID NO: 995833 - RNA, 19 nt, Artificial Sequence
  Description of Artificial Sequence: Synthetic oligonucleotide
  Antisense strand to SEQ ID NO: 995832
aguuacacaggaguuagcu

SEQ ID NO: 995834 - RNA, 19 nt, Artificial Sequence
  Description of Artificial Sequence: Synthetic oligonucleotide
  Sense strand starting at position 2857 of SEQ ID NO: 914330
cuguguaacuguuugcaac

SEQ ID NO: 995835 - RNA, 19 nt, Artificial Sequence
  Description of Artificial Sequence: Synthetic oligonucleotide
  Antisense strand to SEQ ID NO: 995834
guugcaaacaguuacacag

SEQ ID NO: 995836 - RNA, 19 nt, Artificial Sequence
  Description of Artificial Sequence: Synthetic oligonucleotide
  Sense strand starting at position 2906 of SEQ ID NO: 914330
gcaacccugagagguuuau

SEQ ID NO: 995837 - RNA, 19 nt, Artificial Sequence
  Description of Artificial Sequence: Synthetic oligonucleotide
  Antisense strand to SEQ ID NO: 995836
auaaaccucucaggguugc

SEQ ID NO: 995838 - RNA, 19 nt, Artificial Sequence
  Description of Artificial Sequence: Synthetic oligonucleotide
  Sense strand starting at position 2910 of SEQ ID NO: 914330
cccugagagguuuauauuc

SEQ ID NO: 995839 - RNA, 19 nt, Artificial Sequence
  Description of Artificial Sequence: Synthetic oligonucleotide
  Antisense strand to SEQ ID NO: 995838
gaauauaaaccucucaggg

SEQ ID NO: 995840 - RNA, 19 nt, Artificial Sequence
  Description of Artificial Sequence: Synthetic oligonucleotide
  Sense strand starting at position 2947 of SEQ ID NO: 914330
uggaauccagaguguuuaa

SEQ ID NO: 995841 - RNA, 19 nt, Artificial Sequence
  Description of Artificial Sequence: Synthetic oligonucleotide
  Antisense strand to SEQ ID NO: 995840
uuaaacacucuggauucca

SEQ ID NO: 995842 - RNA, 19 nt, Artificial Sequence
  Description of Artificial Sequence: Synthetic oligonucleotide
  Sense strand starting at position 2950 of SEQ ID NO: 914330
aauccagaguguuuaagga

SEQ ID NO: 995843 - RNA, 19 nt, Artificial Sequence
  Description of Artificial Sequence: Synthetic oligonucleotide
  Antisense strand to SEQ ID NO: 995842
uccuuaaacacucuggauu

SEQ ID NO: 995844 - RNA, 19 nt, Artificial Sequence
  Description of Artificial Sequence: Synthetic oligonucleotide
  Sense strand starting at position 2990 of SEQ ID NO: 914330
aggucuaguaaaugguaaa

SEQ ID NO: 995845 - RNA, 19 nt, Artificial Sequence
  Description of Artificial Sequence: Synthetic oligonucleotide
  Antisense strand to SEQ ID NO: 995844
uuuaccauuuacuagaccu

SEQ ID NO: 995846 - RNA, 19 nt, Artificial Sequence
  Description of Artificial Sequence: Synthetic oligonucleotide
  Sense strand starting at position 2991 of SEQ ID NO: 914330
ggucuaguaaaugguaaag

SEQ ID NO: 995847 - RNA, 19 nt, Artificial Sequence
  Description of Artificial Sequence: Synthetic oligonucleotide
  Antisense strand to SEQ ID NO: 995846
cuuuaccauuuacuagacc

SEQ ID NO: 995848 - RNA, 19 nt, Artificial Sequence
  Description of Artificial Sequence: Synthetic oligonucleotide
  Sense strand starting at position 3020 of SEQ ID NO: 914330
ucaugccuccaugaaguuu

SEQ ID NO: 995849 - RNA, 19 nt, Artificial Sequence
  Description of Artificial Sequence: Synthetic oligonucleotide
  Antisense strand to SEQ ID NO: 995848
aaacuucauggaggcauga

SEQ ID NO: 995850 - RNA, 19 nt, Artificial Sequence
  Description of Artificial Sequence: Synthetic oligonucleotide
  Sense strand starting at position 3029 of SEQ ID NO: 914330
caugaaguuugccuagaga

SEQ ID NO: 995851 - RNA, 19 nt, Artificial Sequence
  Description of Artificial Sequence: Synthetic oligonucleotide
  Antisense strand to SEQ ID NO: 995850
ucucuaggcaaacuucaug

SEQ ID NO: 995852 - RNA, 19 nt, Artificial Sequence
  Description of Artificial Sequence: Synthetic oligonucleotide
  Sense strand starting at position 3965 of SEQ ID NO: 914330
gggcgaaauugucugucuc

SEQ ID NO: 995853 - RNA, 19 nt, Artificial Sequence
  Description of Artificial Sequence: Synthetic oligonucleotide
  Antisense strand to SEQ ID NO: 995852
gagacagacaauuucgccc

SEQ ID NO: 995854 - RNA, 19 nt, Artificial Sequence
  Description of Artificial Sequence: Synthetic oligonucleotide
  Sense strand starting at position 3966 of SEQ ID NO: 914330
ggcgaaauugucugucuca

SEQ ID NO: 995855 - RNA, 19 nt, Artificial Sequence
  Description of Artificial Sequence: Synthetic oligonucleotide
  Antisense strand to SEQ ID NO: 995854
ugagacagacaauuucgcc

SEQ ID NO: 995856 - RNA, 19 nt, Artificial Sequence
  Description of Artificial Sequence: Synthetic oligonucleotide
  Sense strand starting at position 3967 of SEQ ID NO: 914330
gcgaaauugucugucucaa

SEQ ID NO: 995857 - RNA, 19 nt, Artificial Sequence
  Description of Artificial Sequence: Synthetic oligonucleotide
  Antisense strand to SEQ ID NO: 995856
uugagacagacaauuucgc

SEQ ID NO: 995858 - RNA, 19 nt, Artificial Sequence
  Description of Artificial Sequence: Synthetic oligonucleotide
  Sense strand starting at position 5 of SEQ ID NO: 914331
guucuauaagcugcguuaa

SEQ ID NO: 995859 - RNA, 19 nt, Artificial Sequence
  Description of Artificial Sequence: Synthetic oligonucleotide
  Antisense strand to SEQ ID NO: 995858
uuaacgcagcuuauagaac

SEQ ID NO: 995860 - RNA, 19 nt, Artificial Sequence
  Description of Artificial Sequence: Synthetic oligonucleotide
  Sense strand starting at position 17 of SEQ ID NO: 914331
gcguuaaagacuuaucagu

SEQ ID NO: 995861 - RNA, 19 nt, Artificial Sequence
  Description of Artificial Sequence: Synthetic oligonucleotide
  Antisense strand to SEQ ID NO: 995860
acugauaagucuuuaacgc

SEQ ID NO: 995862 - RNA, 19 nt, Artificial Sequence
  Description of Artificial Sequence: Synthetic oligonucleotide
  Sense strand starting at position 19 of SEQ ID NO: 914331
guuaaagacuuaucaguaa

SEQ ID NO: 995863 - RNA, 19 nt, Artificial Sequence
  Description of Artificial Sequence: Synthetic oligonucleotide
  Antisense strand to SEQ ID NO: 995862
uuacugauaagucuuuaac

SEQ ID NO: 995864 - RNA, 19 nt, Artificial Sequence
  Description of Artificial Sequence: Synthetic oligonucleotide
  Sense strand starting at position 191 of SEQ ID NO: 914331
aggagcagcaaugauuauu

SEQ ID NO: 995865 - RNA, 19 nt, Artificial Sequence
  Description of Artificial Sequence: Synthetic oligonucleotide
  Antisense strand to SEQ ID NO: 995864
aauaaucauugcugcuccu

SEQ ID NO: 995866 - RNA, 19 nt, Artificial Sequence
  Description of Artificial Sequence: Synthetic oligonucleotide
  Sense strand starting at position 272 of SEQ ID NO: 914331
ggauaucaaugagaccaga

SEQ ID NO: 995867 - RNA, 19 nt, Artificial Sequence
  Description of Artificial Sequence: Synthetic oligonucleotide
  Antisense strand to SEQ ID NO: 995866
ucuggucucauugauaucc

SEQ ID NO: 995868 - RNA, 19 nt, Artificial Sequence
  Description of Artificial Sequence: Synthetic oligonucleotide
  Sense strand starting at position 503 of SEQ ID NO: 914331
uuggaagcugggugagaaa

SEQ ID NO: 995869 - RNA, 19 nt, Artificial Sequence
  Description of Artificial Sequence: Synthetic oligonucleotide
  Antisense strand to SEQ ID NO: 995868
uuucucacccagcuuccaa

SEQ ID NO: 995870 - RNA, 19 nt, Artificial Sequence
  Description of Artificial Sequence: Synthetic oligonucleotide
  Sense strand starting at position 528 of SEQ ID NO: 914331
cuaauaauuccucgcugag

SEQ ID NO: 995871 - RNA, 19 nt, Artificial Sequence
  Description of Artificial Sequence: Synthetic oligonucleotide
  Antisense strand to SEQ ID NO: 995870
cucagcgaggaauuauuag

SEQ ID NO: 995872 - RNA, 19 nt, Artificial Sequence
  Description of Artificial Sequence: Synthetic oligonucleotide
  Sense strand starting at position 530 of SEQ ID NO: 914331
aauaauuccucgcugagga

SEQ ID NO: 995873 - RNA, 19 nt, Artificial Sequence
  Description of Artificial Sequence: Synthetic oligonucleotide
  Antisense strand to SEQ ID NO: 995872
uccucagcgaggaauuauu

SEQ ID NO: 995874 - RNA, 19 nt, Artificial Sequence
  Description of Artificial Sequence: Synthetic oligonucleotide
  Sense strand starting at position 531 of SEQ ID NO: 914331
auaauuccucgcugaggag

SEQ ID NO: 995875 - RNA, 19 nt, Artificial Sequence
  Description of Artificial Sequence: Synthetic oligonucleotide
  Antisense strand to SEQ ID NO: 995874
cuccucagcgaggaauuau

SEQ ID NO: 995876 - RNA, 19 nt, Artificial Sequence
  Description of Artificial Sequence: Synthetic oligonucleotide
  Sense strand starting at position 860 of SEQ ID NO: 914331
acgggaagcucucugggau

SEQ ID NO: 995877 - RNA, 19 nt, Artificial Sequence
  Description of Artificial Sequence: Synthetic oligonucleotide
  Antisense strand to SEQ ID NO: 995876
aucccagagagcuucccgu

SEQ ID NO: 995878 - RNA, 19 nt, Artificial Sequence
  Description of Artificial Sequence: Synthetic oligonucleotide
  Sense strand starting at position 1479 of SEQ ID NO: 914331
ggguacuccagcgaacacu

SEQ ID NO: 995879 - RNA, 19 nt, Artificial Sequence
  Description of Artificial Sequence: Synthetic oligonucleotide
  Antisense strand to SEQ ID NO: 995878
aguguucgcuggaguaccc

SEQ ID NO: 995880 - RNA, 19 nt, Artificial Sequence
  Description of Artificial Sequence: Synthetic oligonucleotide
  Sense strand starting at position 2154 of SEQ ID NO: 914331
guuguguggcggcuagaga

SEQ ID NO: 995881 - RNA, 19 nt, Artificial Sequence
  Description of Artificial Sequence: Synthetic oligonucleotide
  Antisense strand to SEQ ID NO: 995880
ucucuagccgccacacaac

SEQ ID NO: 995882 - RNA, 19 nt, Artificial Sequence
  Description of Artificial Sequence: Synthetic oligonucleotide
  Sense strand starting at position 2510 of SEQ ID NO: 914331
uccggcuccaucuaggaaa

SEQ ID NO: 995883 - RNA, 19 nt, Artificial Sequence
  Description of Artificial Sequence: Synthetic oligonucleotide
  Antisense strand to SEQ ID NO: 995882
uuuccuagauggagccgga

SEQ ID NO: 995884 - RNA, 19 nt, Artificial Sequence
  Description of Artificial Sequence: Synthetic oligonucleotide
  Sense strand starting at position 2594 of SEQ ID NO: 914331
gagaacggauacuuaguau

SEQ ID NO: 995885 - RNA, 19 nt, Artificial Sequence
  Description of Artificial Sequence: Synthetic oligonucleotide
  Antisense strand to SEQ ID NO: 995884
auacuaaguauccguucuc

SEQ ID NO: 995886 - RNA, 19 nt, Artificial Sequence
  Description of Artificial Sequence: Synthetic oligonucleotide
  Sense strand starting at position 2707 of SEQ ID NO: 914331
cguaguuccaaagagaaua

SEQ ID NO: 995887 - RNA, 19 nt, Artificial Sequence
  Description of Artificial Sequence: Synthetic oligonucleotide
  Antisense strand to SEQ ID NO: 995886
uauucucuuuggaacuacg

SEQ ID NO: 995888 - RNA, 19 nt, Artificial Sequence
  Description of Artificial Sequence: Synthetic oligonucleotide
  Sense strand starting at position 2736 of SEQ ID NO: 914331
gagcgauuccauugcauuu

SEQ ID NO: 995889 - RNA, 19 nt, Artificial Sequence
  Description of Artificial Sequence: Synthetic oligonucleotide
  Antisense strand to SEQ ID NO: 995888
aaaugcaauggaaucgcuc

SEQ ID NO: 995890 - RNA, 19 nt, Artificial Sequence
  Description of Artificial Sequence: Synthetic oligonucleotide
  Sense strand starting at position 2810 of SEQ ID NO: 914331
cagcgcucucugcugcaaa

SEQ ID NO: 995891 - RNA, 19 nt, Artificial Sequence
  Description of Artificial Sequence: Synthetic oligonucleotide
  Antisense strand to SEQ ID NO: 995890
uuugcagcagagagcgcug

SEQ ID NO: 995892 - RNA, 19 nt, Artificial Sequence
  Description of Artificial Sequence: Synthetic oligonucleotide
  Sense strand starting at position 2955 of SEQ ID NO: 914331
gggccuuuagcacaaagaa

SEQ ID NO: 995893 - RNA, 19 nt, Artificial Sequence
  Description of Artificial Sequence: Synthetic oligonucleotide
  Antisense strand to SEQ ID NO: 995892
uucuuugugcuaaaggccc

SEQ ID NO: 995894 - RNA, 19 nt, Artificial Sequence
  Description of Artificial Sequence: Synthetic oligonucleotide
  Sense strand starting at position 2977 of SEQ ID NO: 914331
ccggcucuuccagauguua

SEQ ID NO: 995895 - RNA, 19 nt, Artificial Sequence
  Description of Artificial Sequence: Synthetic oligonucleotide
  Antisense strand to SEQ ID NO: 995894
uaacaucuggaagagccgg

SEQ ID NO: 995896 - RNA, 19 nt, Artificial Sequence
  Description of Artificial Sequence: Synthetic oligonucleotide
  Sense strand starting at position 2991 of SEQ ID NO: 914331
uguuaaacucccugaauag

SEQ ID NO: 995897 - RNA, 19 nt, Artificial Sequence
  Description of Artificial Sequence: Synthetic oligonucleotide
  Antisense strand to SEQ ID NO: 995896
cuauucagggaguuuaaca

SEQ ID NO: 995898 - RNA, 19 nt, Artificial Sequence
  Description of Artificial Sequence: Synthetic oligonucleotide
  Sense strand starting at position 3028 of SEQ ID NO: 914331
uucguuauccaucauguca

SEQ ID NO: 995899 - RNA, 19 nt, Artificial Sequence
  Description of Artificial Sequence: Synthetic oligonucleotide
  Antisense strand to SEQ ID NO: 995898
ugacaugauggauaacgaa

SEQ ID NO: 995900 - RNA, 19 nt, Artificial Sequence
  Description of Artificial Sequence: Synthetic oligonucleotide
  Sense strand starting at position 3114 of SEQ ID NO: 914331
ccauaaauaucuguuggcu

SEQ ID NO: 995901 - RNA, 19 nt, Artificial Sequence
  Description of Artificial Sequence: Synthetic oligonucleotide
  Antisense strand to SEQ ID NO: 995900
agccaacagauauuuaugg

SEQ ID NO: 995902 - RNA, 19 nt, Artificial Sequence
  Description of Artificial Sequence: Synthetic oligonucleotide
  Sense strand starting at position 3117 of SEQ ID NO: 914331
uaaauaucuguuggcugga

SEQ ID NO: 995903 - RNA, 19 nt, Artificial Sequence
  Description of Artificial Sequence: Synthetic oligonucleotide
  Antisense strand to SEQ ID NO: 995902
uccagccaacagauauuua

SEQ ID NO: 995904 - RNA, 19 nt, Artificial Sequence
  Description of Artificial Sequence: Synthetic oligonucleotide
  Sense strand starting at position 3118 of SEQ ID NO: 914331
aaauaucuguuggcuggau

SEQ ID NO: 995905 - RNA, 19 nt, Artificial Sequence
  Description of Artificial Sequence: Synthetic oligonucleotide
  Antisense strand to SEQ ID NO: 995904
auccagccaacagauauuu

SEQ ID NO: 995906 - RNA, 19 nt, Artificial Sequence
  Description of Artificial Sequence: Synthetic oligonucleotide
  Sense strand starting at position 3119 of SEQ ID NO: 914331
aauaucuguuggcuggaua

SEQ ID NO: 995907 - RNA, 19 nt, Artificial Sequence
  Description of Artificial Sequence: Synthetic oligonucleotide
  Antisense strand to SEQ ID NO: 995906
uauccagccaacagauauu

SEQ ID NO: 995908 - RNA, 19 nt, Artificial Sequence
  Description of Artificial Sequence: Synthetic oligonucleotide
  Sense strand starting at position 3122 of SEQ ID NO: 914331
aucuguuggcuggauacau

SEQ ID NO: 995909 - RNA, 19 nt, Artificial Sequence
  Description of Artificial Sequence: Synthetic oligonucleotide
  Antisense strand to SEQ ID NO: 995908
auguauccagccaacagau

SEQ ID NO: 995910 - RNA, 19 nt, Artificial Sequence
  Description of Artificial Sequence: Synthetic oligonucleotide
  Sense strand starting at position 3200 of SEQ ID NO: 914331
cuagacuucuagccuggua

SEQ ID NO: 995911 - RNA, 19 nt, Artificial Sequence
  Description of Artificial Sequence: Synthetic oligonucleotide
  Antisense strand to SEQ ID NO: 995910
uaccaggcuagaagucuag

SEQ ID NO: 995912 - RNA, 19 nt, Artificial Sequence
  Description of Artificial Sequence: Synthetic oligonucleotide
  Sense strand starting at position 3202 of SEQ ID NO: 914331
agacuucuagccugguaag

SEQ ID NO: 995913 - RNA, 19 nt, Artificial Sequence
  Description of Artificial Sequence: Synthetic oligonucleotide
  Antisense strand to SEQ ID NO: 995912
cuuaccaggcuagaagucu

SEQ ID NO: 995914 - RNA, 19 nt, Artificial Sequence
  Description of Artificial Sequence: Synthetic oligonucleotide
  Sense strand starting at position 3203 of SEQ ID NO: 914331
gacuucuagccugguaagu

SEQ ID NO: 995915 - RNA, 19 nt, Artificial Sequence
  Description of Artificial Sequence: Synthetic oligonucleotide
  Antisense strand to SEQ ID NO: 995914
acuuaccaggcuagaaguc

SEQ ID NO: 995916 - RNA, 19 nt, Artificial Sequence
  Description of Artificial Sequence: Synthetic oligonucleotide
  Sense strand starting at position 3212 of SEQ ID NO: 914331
ccugguaaguuccuugaac

SEQ ID NO: 995917 - RNA, 19 nt, Artificial Sequence
  Description of Artificial Sequence: Synthetic oligonucleotide
  Antisense strand to SEQ ID NO: 995916
guucaaggaacuuaccagg

SEQ ID NO: 995918 - RNA, 19 nt, Artificial Sequence
  Description of Artificial Sequence: Synthetic oligonucleotide
  Sense strand starting at position 3213 of SEQ ID NO: 914331
cugguaaguuccuugaaca

SEQ ID NO: 995919 - RNA, 19 nt, Artificial Sequence
  Description of Artificial Sequence: Synthetic oligonucleotide
  Antisense strand to SEQ ID NO: 995918
uguucaaggaacuuaccag

SEQ ID NO: 995920 - RNA, 19 nt, Artificial Sequence
  Description of Artificial Sequence: Synthetic oligonucleotide
  Sense strand starting at position 3214 of SEQ ID NO: 914331
ugguaaguuccuugaacac

SEQ ID NO: 995921 - RNA, 19 nt, Artificial Sequence
  Description of Artificial Sequence: Synthetic oligonucleotide
  Antisense strand to SEQ ID NO: 995920
guguucaaggaacuuacca

SEQ ID NO: 995922 - RNA, 19 nt, Artificial Sequence
  Description of Artificial Sequence: Synthetic oligonucleotide
  Sense strand starting at position 3434 of SEQ ID NO: 914331
gagaucacucuagguaagu

SEQ ID NO: 995923 - RNA, 19 nt, Artificial Sequence
  Description of Artificial Sequence: Synthetic oligonucleotide
  Antisense strand to SEQ ID NO: 995922
acuuaccuagagugaucuc

SEQ ID NO: 995924 - RNA, 19 nt, Artificial Sequence
  Description of Artificial Sequence: Synthetic oligonucleotide
  Sense strand starting at position 3498 of SEQ ID NO: 914331
gaaauaugggcuggaugcu

SEQ ID NO: 995925 - RNA, 19 nt, Artificial Sequence
  Description of Artificial Sequence: Synthetic oligonucleotide
  Antisense strand to SEQ ID NO: 995924
agcauccagcccauauuuc

SEQ ID NO: 995926 - RNA, 19 nt, Artificial Sequence
  Description of Artificial Sequence: Synthetic oligonucleotide
  Sense strand starting at position 3512 of SEQ ID NO: 914331
augcuaguaucauuaauug

SEQ ID NO: 995927 - RNA, 19 nt, Artificial Sequence
  Description of Artificial Sequence: Synthetic oligonucleotide
  Antisense strand to SEQ ID NO: 995926
caauuaaugauacuagcau

SEQ ID NO: 995928 - RNA, 19 nt, Artificial Sequence
  Description of Artificial Sequence: Synthetic oligonucleotide
  Sense strand starting at position 3532 of SEQ ID NO: 914331
acuaauaacugguuaagua

SEQ ID NO: 995929 - RNA, 19 nt, Artificial Sequence
  Description of Artificial Sequence: Synthetic oligonucleotide
  Antisense strand to SEQ ID NO: 995928
uacuuaaccaguuauuagu

SEQ ID NO: 995930 - RNA, 19 nt, Artificial Sequence
  Description of Artificial Sequence: Synthetic oligonucleotide
  Sense strand starting at position 3560 of SEQ ID NO: 914331
uaaagaugcugauugauga

SEQ ID NO: 995931 - RNA, 19 nt, Artificial Sequence
  Description of Artificial Sequence: Synthetic oligonucleotide
  Antisense strand to SEQ ID NO: 995930
ucaucaaucagcaucuuua

SEQ ID NO: 995932 - RNA, 19 nt, Artificial Sequence
  Description of Artificial Sequence: Synthetic oligonucleotide
  Sense strand starting at position 3596 of SEQ ID NO: 914331
agaagauugcagggaguca

SEQ ID NO: 995933 - RNA, 19 nt, Artificial Sequence
  Description of Artificial Sequence: Synthetic oligonucleotide
  Antisense strand to SEQ ID NO: 995932
ugacucccugcaaucuucu

SEQ ID NO: 995934 - RNA, 19 nt, Artificial Sequence
  Description of Artificial Sequence: Synthetic oligonucleotide
  Sense strand starting at position 3924 of SEQ ID NO: 914331
gaagauucgcaucacaugu

SEQ ID NO: 995935 - RNA, 19 nt, Artificial Sequence
  Description of Artificial Sequence: Synthetic oligonucleotide
  Antisense strand to SEQ ID NO: 995934
acaugugaugcgaaucuuc

SEQ ID NO: 995936 - RNA, 19 nt, Artificial Sequence
  Description of Artificial Sequence: Synthetic oligonucleotide
  Sense strand starting at position 3932 of SEQ ID NO: 914331
gcaucacauguccagauga

SEQ ID NO: 995937 - RNA, 19 nt, Artificial Sequence
  Description of Artificial Sequence: Synthetic oligonucleotide
  Antisense strand to SEQ ID NO: 995936
ucaucuggacaugugaugc

SEQ ID NO: 995938 - RNA, 19 nt, Artificial Sequence
  Description of Artificial Sequence: Synthetic oligonucleotide
  Sense strand starting at position 238 of SEQ ID NO: 914332
gcuggaaaguaguuucuaa

SEQ ID NO: 995939 - RNA, 19 nt, Artificial Sequence
  Description of Artificial Sequence: Synthetic oligonucleotide
  Antisense strand to SEQ ID NO: 995938
uuagaaacuacuuuccagc

SEQ ID NO: 995940 - RNA, 19 nt, Artificial Sequence
  Description of Artificial Sequence: Synthetic oligonucleotide
  Sense strand starting at position 257 of SEQ ID NO: 914332
acauuaagagccugaguug

SEQ ID NO: 995941 - RNA, 19 nt, Artificial Sequence
  Description of Artificial Sequence: Synthetic oligonucleotide
  Antisense strand to SEQ ID NO: 995940
caacucaggcucuuaaugu

SEQ ID NO: 995942 - RNA, 19 nt, Artificial Sequence
  Description of Artificial Sequence: Synthetic oligonucleotide
  Sense strand starting at position 305 of SEQ ID NO: 914332
uggaaauaaucucugcaag

SEQ ID NO: 995943 - RNA, 19 nt, Artificial Sequence
  Description of Artificial Sequence: Synthetic oligonucleotide
  Antisense strand to SEQ ID NO: 995942
cuugcagagauuauuucca

SEQ ID NO: 995944 - RNA, 19 nt, Artificial Sequence
  Description of Artificial Sequence: Synthetic oligonucleotide
  Sense strand starting at position 306 of SEQ ID NO: 914332
ggaaauaaucucugcaagc

SEQ ID NO: 995945 - RNA, 19 nt, Artificial Sequence
  Description of Artificial Sequence: Synthetic oligonucleotide
  Antisense strand to SEQ ID NO: 995944
gcuugcagagauuauuucc

SEQ ID NO: 995946 - RNA, 19 nt, Artificial Sequence
  Description of Artificial Sequence: Synthetic oligonucleotide
  Sense strand starting at position 356 of SEQ ID NO: 914332
auggcagugggugagaaau

SEQ ID NO: 995947 - RNA, 19 nt, Artificial Sequence
  Description of Artificial Sequence: Synthetic oligonucleotide
  Antisense strand to SEQ ID NO: 995946
auuucucacccacugccau

SEQ ID NO: 995948 - RNA, 19 nt, Artificial Sequence
  Description of Artificial Sequence: Synthetic oligonucleotide
  Sense strand starting at position 362 of SEQ ID NO: 914332
gugggugagaaauagcuuu

SEQ ID NO: 995949 - RNA, 19 nt, Artificial Sequence
  Description of Artificial Sequence: Synthetic oligonucleotide
  Antisense strand to SEQ ID NO: 995948
aaagcuauuucucacccac

SEQ ID NO: 995950 - RNA, 19 nt, Artificial Sequence
  Description of Artificial Sequence: Synthetic oligonucleotide
  Sense strand starting at position 369 of SEQ ID NO: 914332
agaaauagcuuugucagug

SEQ ID NO: 995951 - RNA, 19 nt, Artificial Sequence
  Description of Artificial Sequence: Synthetic oligonucleotide
  Antisense strand to SEQ ID NO: 995950
cacugacaaagcuauuucu

SEQ ID NO: 995952 - RNA, 19 nt, Artificial Sequence
  Description of Artificial Sequence: Synthetic oligonucleotide
  Sense strand starting at position 454 of SEQ ID NO: 914332
gggccuugcgcaucuuuga

SEQ ID NO: 995953 - RNA, 19 nt, Artificial Sequence
  Description of Artificial Sequence: Synthetic oligonucleotide
  Antisense strand to SEQ ID NO: 995952
ucaaagaugcgcaaggccc

SEQ ID NO: 995954 - RNA, 19 nt, Artificial Sequence
  Description of Artificial Sequence: Synthetic oligonucleotide
  Sense strand starting at position 455 of SEQ ID NO: 914332
ggccuugcgcaucuuugau

SEQ ID NO: 995955 - RNA, 19 nt, Artificial Sequence
  Description of Artificial Sequence: Synthetic oligonucleotide
  Antisense strand to SEQ ID NO: 995954
aucaaagaugcgcaaggcc

SEQ ID NO: 995956 - RNA, 19 nt, Artificial Sequence
  Description of Artificial Sequence: Synthetic oligonucleotide
  Sense strand starting at position 477 of SEQ ID NO: 914332
ccacacuacgccuaguaua

SEQ ID NO: 995957 - RNA, 19 nt, Artificial Sequence
  Description of Artificial Sequence: Synthetic oligonucleotide
  Antisense strand to SEQ ID NO: 995956
uauacuaggcguagugugg

SEQ ID NO: 995958 - RNA, 19 nt, Artificial Sequence
  Description of Artificial Sequence: Synthetic oligonucleotide
  Sense strand starting at position 779 of SEQ ID NO: 914332
ggcagagacuguuucugag

SEQ ID NO: 995959 - RNA, 19 nt, Artificial Sequence
  Description of Artificial Sequence: Synthetic oligonucleotide
  Antisense strand to SEQ ID NO: 995958
cucagaaacagucucugcc

SEQ ID NO: 995960 - RNA, 19 nt, Artificial Sequence
  Description of Artificial Sequence: Synthetic oligonucleotide
  Sense strand starting at position 781 of SEQ ID NO: 914332
cagagacuguuucugagua

SEQ ID NO: 995961 - RNA, 19 nt, Artificial Sequence
  Description of Artificial Sequence: Synthetic oligonucleotide
  Antisense strand to SEQ ID NO: 995960
uacucagaaacagucucug

SEQ ID NO: 995962 - RNA, 19 nt, Artificial Sequence
  Description of Artificial Sequence: Synthetic oligonucleotide
  Sense strand starting at position 913 of SEQ ID NO: 914332
ugggaucuauuuggaugaa

SEQ ID NO: 995963 - RNA, 19 nt, Artificial Sequence
  Description of Artificial Sequence: Synthetic oligonucleotide
  Antisense strand to SEQ ID NO: 995962
uucauccaaauagauccca

SEQ ID NO: 995964 - RNA, 19 nt, Artificial Sequence
  Description of Artificial Sequence: Synthetic oligonucleotide
  Sense strand starting at position 914 of SEQ ID NO: 914332
gggaucuauuuggaugaaa

SEQ ID NO: 995965 - RNA, 19 nt, Artificial Sequence
  Description of Artificial Sequence: Synthetic oligonucleotide
  Antisense strand to SEQ ID NO: 995964
uuucauccaaauagauccc

SEQ ID NO: 995966 - RNA, 19 nt, Artificial Sequence
  Description of Artificial Sequence: Synthetic oligonucleotide
  Sense strand starting at position 969 of SEQ ID NO: 914332
gcgcucuacccugugugau

SEQ ID NO: 995967 - RNA, 19 nt, Artificial Sequence
  Description of Artificial Sequence: Synthetic oligonucleotide
  Antisense strand to SEQ ID NO: 995966
aucacacaggguagagcgc

SEQ ID NO: 995968 - RNA, 19 nt, Artificial Sequence
  Description of Artificial Sequence: Synthetic oligonucleotide
  Sense strand starting at position 1149 of SEQ ID NO: 914332
gagacaugccagcacaagu

SEQ ID NO: 995969 - RNA, 19 nt, Artificial Sequence
  Description of Artificial Sequence: Synthetic oligonucleotide
  Antisense strand to SEQ ID NO: 995968
acuugugcuggcaugucuc

SEQ ID NO: 995970 - RNA, 19 nt, Artificial Sequence
  Description of Artificial Sequence: Synthetic oligonucleotide
  Sense strand starting at position 1323 of SEQ ID NO: 914332
caaggcugucagcaagaau

SEQ ID NO: 995971 - RNA, 19 nt, Artificial Sequence
  Description of Artificial Sequence: Synthetic oligonucleotide
  Antisense strand to SEQ ID NO: 995970
auucuugcugacagccuug

SEQ ID NO: 995972 - RNA, 19 nt, Artificial Sequence
  Description of Artificial Sequence: Synthetic oligonucleotide
  Sense strand starting at position 2217 of SEQ ID NO: 914332
ggcccuauuagggagugua

SEQ ID NO: 995973 - RNA, 19 nt, Artificial Sequence
  Description of Artificial Sequence: Synthetic oligonucleotide
  Antisense strand to SEQ ID NO: 995972
uacacucccuaauagggcc

SEQ ID NO: 995974 - RNA, 19 nt, Artificial Sequence
  Description of Artificial Sequence: Synthetic oligonucleotide
  Sense strand starting at position 2247 of SEQ ID NO: 914332
ggaggagugugcacgucuu

SEQ ID NO: 995975 - RNA, 19 nt, Artificial Sequence
  Description of Artificial Sequence: Synthetic oligonucleotide
  Antisense strand to SEQ ID NO: 995974
aagacgugcacacuccucc

SEQ ID NO: 995976 - RNA, 19 nt, Artificial Sequence
  Description of Artificial Sequence: Synthetic oligonucleotide
  Sense strand starting at position 2771 of SEQ ID NO: 914332
ggaccuguaaagugaggau

SEQ ID NO: 995977 - RNA, 19 nt, Artificial Sequence
  Description of Artificial Sequence: Synthetic oligonucleotide
  Antisense strand to SEQ ID NO: 995976
auccucacuuuacaggucc

SEQ ID NO: 995978 - RNA, 19 nt, Artificial Sequence
  Description of Artificial Sequence: Synthetic oligonucleotide
  Sense strand starting at position 2793 of SEQ ID NO: 914332
cuaauaucagccugcagaa

SEQ ID NO: 995979 - RNA, 19 nt, Artificial Sequence
  Description of Artificial Sequence: Synthetic oligonucleotide
  Antisense strand to SEQ ID NO: 995978
uucugcaggcugauauuag

SEQ ID NO: 995980 - RNA, 19 nt, Artificial Sequence
  Description of Artificial Sequence: Synthetic oligonucleotide
  Sense strand starting at position 2803 of SEQ ID NO: 914332
ccugcagaauuguuaauag

SEQ ID NO: 995981 - RNA, 19 nt, Artificial Sequence
  Description of Artificial Sequence: Synthetic oligonucleotide
  Antisense strand to SEQ ID NO: 995980
cuauuaacaauucugcagg

SEQ ID NO: 995982 - RNA, 19 nt, Artificial Sequence
  Description of Artificial Sequence: Synthetic oligonucleotide
  Sense strand starting at position 2812 of SEQ ID NO: 914332
uuguuaauagguugaaaga

SEQ ID NO: 995983 - RNA, 19 nt, Artificial Sequence
  Description of Artificial Sequence: Synthetic oligonucleotide
  Antisense strand to SEQ ID NO: 995982
ucuuucaaccuauuaacaa

SEQ ID NO: 995984 - RNA, 19 nt, Artificial Sequence
  Description of Artificial Sequence: Synthetic oligonucleotide
  Sense strand starting at position 2924 of SEQ ID NO: 914332
ugugaaaucuuggcuggga

SEQ ID NO: 995985 - RNA, 19 nt, Artificial Sequence
  Description of Artificial Sequence: Synthetic oligonucleotide
  Antisense strand to SEQ ID NO: 995984
ucccagccaagauuucaca

SEQ ID NO: 995986 - RNA, 19 nt, Artificial Sequence
  Description of Artificial Sequence: Synthetic oligonucleotide
  Sense strand starting at position 2925 of SEQ ID NO: 914332
gugaaaucuuggcugggac

SEQ ID NO: 995987 - RNA, 19 nt, Artificial Sequence
  Description of Artificial Sequence: Synthetic oligonucleotide
  Antisense strand to SEQ ID NO: 995986
gucccagccaagauuucac

SEQ ID NO: 995988 - RNA, 19 nt, Artificial Sequence
  Description of Artificial Sequence: Synthetic oligonucleotide
  Sense strand starting at position 2989 of SEQ ID NO: 914332
cgguaaggucuuuaccaca

SEQ ID NO: 995989 - RNA, 19 nt, Artificial Sequence
  Description of Artificial Sequence: Synthetic oligonucleotide
  Antisense strand to SEQ ID NO: 995988
ugugguaaagaccuuaccg

SEQ ID NO: 995990 - RNA, 19 nt, Artificial Sequence
  Description of Artificial Sequence: Synthetic oligonucleotide
  Sense strand starting at position 3027 of SEQ ID NO: 914332
gcuaauuaucccggauagg

SEQ ID NO: 995991 - RNA, 19 nt, Artificial Sequence
  Description of Artificial Sequence: Synthetic oligonucleotide
  Antisense strand to SEQ ID NO: 995990
ccuauccgggauaauuagc

SEQ ID NO: 995992 - RNA, 19 nt, Artificial Sequence
  Description of Artificial Sequence: Synthetic oligonucleotide
  Sense strand starting at position 3028 of SEQ ID NO: 914332
cuaauuaucccggauaggu

SEQ ID NO: 995993 - RNA, 19 nt, Artificial Sequence
  Description of Artificial Sequence: Synthetic oligonucleotide
  Antisense strand to SEQ ID NO: 995992
accuauccgggauaauuag

SEQ ID NO: 995994 - RNA, 19 nt, Artificial Sequence
  Description of Artificial Sequence: Synthetic oligonucleotide
  Sense strand starting at position 3037 of SEQ ID NO: 914332
ccggauaggucccugauau

SEQ ID NO: 995995 - RNA, 19 nt, Artificial Sequence
  Description of Artificial Sequence: Synthetic oligonucleotide
  Antisense strand to SEQ ID NO: 995994
auaucagggaccuauccgg

SEQ ID NO: 995996 - RNA, 19 nt, Artificial Sequence
  Description of Artificial Sequence: Synthetic oligonucleotide
  Sense strand starting at position 3038 of SEQ ID NO: 914332
cggauaggucccugauauc

SEQ ID NO: 995997 - RNA, 19 nt, Artificial Sequence
  Description of Artificial Sequence: Synthetic oligonucleotide
  Antisense strand to SEQ ID NO: 995996
gauaucagggaccuauccg

SEQ ID NO: 995998 - RNA, 19 nt, Artificial Sequence
  Description of Artificial Sequence: Synthetic oligonucleotide
  Sense strand starting at position 3044 of SEQ ID NO: 914332
ggucccugauaucuaagua

SEQ ID NO: 995999 - RNA, 19 nt, Artificial Sequence
  Description of Artificial Sequence: Synthetic oligonucleotide
  Antisense strand to SEQ ID NO: 995998
uacuuagauaucagggacc

SEQ ID NO: 996000 - RNA, 19 nt, Artificial Sequence
  Description of Artificial Sequence: Synthetic oligonucleotide
  Sense strand starting at position 3108 of SEQ ID NO: 914332
auguaaacaucuccuguaa

SEQ ID NO: 996001 - RNA, 19 nt, Artificial Sequence
  Description of Artificial Sequence: Synthetic oligonucleotide
  Antisense strand to SEQ ID NO: 996000
uuacaggagauguuuacau

SEQ ID NO: 996002 - RNA, 19 nt, Artificial Sequence
  Description of Artificial Sequence: Synthetic oligonucleotide
  Sense strand starting at position 3121 of SEQ ID NO: 914332
cuguaauuaugcucagaag

SEQ ID NO: 996003 - RNA, 19 nt, Artificial Sequence
  Description of Artificial Sequence: Synthetic oligonucleotide
  Antisense strand to SEQ ID NO: 996002
cuucugagcauaauuacag

SEQ ID NO: 996004 - RNA, 19 nt, Artificial Sequence
  Description of Artificial Sequence: Synthetic oligonucleotide
  Sense strand starting at position 3122 of SEQ ID NO: 914332
uguaauuaugcucagaagc

SEQ ID NO: 996005 - RNA, 19 nt, Artificial Sequence
  Description of Artificial Sequence: Synthetic oligonucleotide
  Antisense strand to SEQ ID NO: 996004
gcuucugagcauaauuaca

SEQ ID NO: 996006 - RNA, 19 nt, Artificial Sequence
  Description of Artificial Sequence: Synthetic oligonucleotide
  Sense strand starting at position 3138 of SEQ ID NO: 914332
agcaguuaccuauacuguu

SEQ ID NO: 996007 - RNA, 19 nt, Artificial Sequence
  Description of Artificial Sequence: Synthetic oligonucleotide
  Antisense strand to SEQ ID NO: 996006
aacaguauagguaacugcu

SEQ ID NO: 996008 - RNA, 19 nt, Artificial Sequence
  Description of Artificial Sequence: Synthetic oligonucleotide
  Sense strand starting at position 3360 of SEQ ID NO: 914332
ggcucagagaucuggaaag

SEQ ID NO: 996009 - RNA, 19 nt, Artificial Sequence
  Description of Artificial Sequence: Synthetic oligonucleotide
  Antisense strand to SEQ ID NO: 996008
cuuuccagaucucugagcc

SEQ ID NO: 996010 - RNA, 19 nt, Artificial Sequence
  Description of Artificial Sequence: Synthetic oligonucleotide
  Sense strand starting at position 3385 of SEQ ID NO: 914332
acuagaaucuucuuugaug

SEQ ID NO: 996011 - RNA, 19 nt, Artificial Sequence
  Description of Artificial Sequence: Synthetic oligonucleotide
  Antisense strand to SEQ ID NO: 996010
caucaaagaagauucuagu

SEQ ID NO: 996012 - RNA, 19 nt, Artificial Sequence
  Description of Artificial Sequence: Synthetic oligonucleotide
  Sense strand starting at position 3386 of SEQ ID NO: 914332
cuagaaucuucuuugauga

SEQ ID NO: 996013 - RNA, 19 nt, Artificial Sequence
  Description of Artificial Sequence: Synthetic oligonucleotide
  Antisense strand to SEQ ID NO: 996012
ucaucaaagaagauucuag

SEQ ID NO: 996014 - RNA, 19 nt, Artificial Sequence
  Description of Artificial Sequence: Synthetic oligonucleotide
  Sense strand starting at position 3858 of SEQ ID NO: 914332
uuuaaauuccagugaggga

SEQ ID NO: 996015 - RNA, 19 nt, Artificial Sequence
  Description of Artificial Sequence: Synthetic oligonucleotide
  Antisense strand to SEQ ID NO: 996014
ucccucacuggaauuuaaa

SEQ ID NO: 996016 - RNA, 19 nt, Artificial Sequence
  Description of Artificial Sequence: Synthetic oligonucleotide
  Sense strand starting at position 3920 of SEQ ID NO: 914332
ccugccaggcucuaugaaa

SEQ ID NO: 996017 - RNA, 19 nt, Artificial Sequence
  Description of Artificial Sequence: Synthetic oligonucleotide
  Antisense strand to SEQ ID NO: 996016
uuucauagagccuggcagg

SEQ ID NO: 996018 - RNA, 19 nt, Artificial Sequence
  Description of Artificial Sequence: Synthetic oligonucleotide
  Sense strand starting at position 219 of SEQ ID NO: 914333
guuauaccagaguagacuu

SEQ ID NO: 996019 - RNA, 19 nt, Artificial Sequence
  Description of Artificial Sequence: Synthetic oligonucleotide
  Antisense strand to SEQ ID NO: 996018
aagucuacucugguauaac

SEQ ID NO: 996020 - RNA, 19 nt, Artificial Sequence
  Description of Artificial Sequence: Synthetic oligonucleotide
  Sense strand starting at position 302 of SEQ ID NO: 914333
gaaugaaugaucggguuug

SEQ ID NO: 996021 - RNA, 19 nt, Artificial Sequence
  Description of Artificial Sequence: Synthetic oligonucleotide
  Antisense strand to SEQ ID NO: 996020
caaacccgaucauucauuc

SEQ ID NO: 996022 - RNA, 19 nt, Artificial Sequence
  Description of Artificial Sequence: Synthetic oligonucleotide
  Sense strand starting at position 324 of SEQ ID NO: 914333
gggaaauggugaguucacu

SEQ ID NO: 996023 - RNA, 19 nt, Artificial Sequence
  Description of Artificial Sequence: Synthetic oligonucleotide
  Antisense strand to SEQ ID NO: 996022
agugaacucaccauuuccc

SEQ ID NO: 996024 - RNA, 19 nt, Artificial Sequence
  Description of Artificial Sequence: Synthetic oligonucleotide
  Sense strand starting at position 350 of SEQ ID NO: 914333
augugaacucccugaagca

SEQ ID NO: 996025 - RNA, 19 nt, Artificial Sequence
  Description of Artificial Sequence: Synthetic oligonucleotide
  Antisense strand to SEQ ID NO: 996024
ugcuucagggaguucacau

SEQ ID NO: 996026 - RNA, 19 nt, Artificial Sequence
  Description of Artificial Sequence: Synthetic oligonucleotide
  Sense strand starting at position 409 of SEQ ID NO: 914333
cugagagucacaggugauu

SEQ ID NO: 996027 - RNA, 19 nt, Artificial Sequence
  Description of Artificial Sequence: Synthetic oligonucleotide
  Antisense strand to SEQ ID NO: 996026
aaucaccugugacucucag

SEQ ID NO: 996028 - RNA, 19 nt, Artificial Sequence
  Description of Artificial Sequence: Synthetic oligonucleotide
  Sense strand starting at position 411 of SEQ ID NO: 914333
gagagucacaggugauuga

SEQ ID NO: 996029 - RNA, 19 nt, Artificial Sequence
  Description of Artificial Sequence: Synthetic oligonucleotide
  Antisense strand to SEQ ID NO: 996028
ucaaucaccugugacucuc

SEQ ID NO: 996030 - RNA, 19 nt, Artificial Sequence
  Description of Artificial Sequence: Synthetic oligonucleotide
  Sense strand starting at position 414 of SEQ ID NO: 914333
agucacaggugauugaaau

SEQ ID NO: 996031 - RNA, 19 nt, Artificial Sequence
  Description of Artificial Sequence: Synthetic oligonucleotide
  Antisense strand to SEQ ID NO: 996030
auuucaaucaccugugacu

SEQ ID NO: 996032 - RNA, 19 nt, Artificial Sequence
  Description of Artificial Sequence: Synthetic oligonucleotide
  Sense strand starting at position 415 of SEQ ID NO: 914333
gucacaggugauugaaauc

SEQ ID NO: 996033 - RNA, 19 nt, Artificial Sequence
  Description of Artificial Sequence: Synthetic oligonucleotide
  Antisense strand to SEQ ID NO: 996032
gauuucaaucaccugugac

SEQ ID NO: 996034 - RNA, 19 nt, Artificial Sequence
  Description of Artificial Sequence: Synthetic oligonucleotide
  Sense strand starting at position 489 of SEQ ID NO: 914333
ugagcugcuugauugauga

SEQ ID NO: 996035 - RNA, 19 nt, Artificial Sequence
  Description of Artificial Sequence: Synthetic oligonucleotide
  Antisense strand to SEQ ID NO: 996034
ucaucaaucaagcagcuca

SEQ ID NO: 996036 - RNA, 19 nt, Artificial Sequence
  Description of Artificial Sequence: Synthetic oligonucleotide
  Sense strand starting at position 646 of SEQ ID NO: 914333
guuaauuugccauggcaag

SEQ ID NO: 996037 - RNA, 19 nt, Artificial Sequence
  Description of Artificial Sequence: Synthetic oligonucleotide
  Antisense strand to SEQ ID NO: 996036
cuugccauggcaaauuaac

SEQ ID NO: 996038 - RNA, 19 nt, Artificial Sequence
  Description of Artificial Sequence: Synthetic oligonucleotide
  Sense strand starting at position 647 of SEQ ID NO: 914333
uuaauuugccauggcaagu

SEQ ID NO: 996039 - RNA, 19 nt, Artificial Sequence
  Description of Artificial Sequence: Synthetic oligonucleotide
  Antisense strand to SEQ ID NO: 996038
acuugccauggcaaauuaa

SEQ ID NO: 996040 - RNA, 19 nt, Artificial Sequence
  Description of Artificial Sequence: Synthetic oligonucleotide
  Sense strand starting at position 660 of SEQ ID NO: 914333
gcaagucucacgugauaaa

SEQ ID NO: 996041 - RNA, 19 nt, Artificial Sequence
  Description of Artificial Sequence: Synthetic oligonucleotide
  Antisense strand to SEQ ID NO: 996040
uuuaucacgugagacuugc

SEQ ID NO: 996042 - RNA, 19 nt, Artificial Sequence
  Description of Artificial Sequence: Synthetic oligonucleotide
  Sense strand starting at position 661 of SEQ ID NO: 914333
caagucucacgugauaaac

SEQ ID NO: 996043 - RNA, 19 nt, Artificial Sequence
  Description of Artificial Sequence: Synthetic oligonucleotide
  Antisense strand to SEQ ID NO: 996042
guuuaucacgugagacuug

SEQ ID NO: 996044 - RNA, 19 nt, Artificial Sequence
  Description of Artificial Sequence: Synthetic oligonucleotide
  Sense strand starting at position 731 of SEQ ID NO: 914333
agucaaucauucgucaaac

SEQ ID NO: 996045 - RNA, 19 nt, Artificial Sequence
  Description of Artificial Sequence: Synthetic oligonucleotide
  Antisense strand to SEQ ID NO: 996044
guuugacgaaugauugacu

SEQ ID NO: 996046 - RNA, 19 nt, Artificial Sequence
  Description of Artificial Sequence: Synthetic oligonucleotide
  Sense strand starting at position 732 of SEQ ID NO: 914333
gucaaucauucgucaaaca

SEQ ID NO: 996047 - RNA, 19 nt, Artificial Sequence
  Description of Artificial Sequence: Synthetic oligonucleotide
  Antisense strand to SEQ ID NO: 996046
uguuugacgaaugauugac

SEQ ID NO: 996048 - RNA, 19 nt, Artificial Sequence
  Description of Artificial Sequence: Synthetic oligonucleotide
  Sense strand starting at position 764 of SEQ ID NO: 914333
caacuaaugcugggugaga

SEQ ID NO: 996049 - RNA, 19 nt, Artificial Sequence
  Description of Artificial Sequence: Synthetic oligonucleotide
  Antisense strand to SEQ ID NO: 996048
ucucacccagcauuaguug

SEQ ID NO: 996050 - RNA, 19 nt, Artificial Sequence
  Description of Artificial Sequence: Synthetic oligonucleotide
  Sense strand starting at position 765 of SEQ ID NO: 914333
aacuaaugcugggugagau

SEQ ID NO: 996051 - RNA, 19 nt, Artificial Sequence
  Description of Artificial Sequence: Synthetic oligonucleotide
  Antisense strand to SEQ ID NO: 996050
aucucacccagcauuaguu

SEQ ID NO: 996052 - RNA, 19 nt, Artificial Sequence
  Description of Artificial Sequence: Synthetic oligonucleotide
  Sense strand starting at position 766 of SEQ ID NO: 914333
acuaaugcugggugagaua

SEQ ID NO: 996053 - RNA, 19 nt, Artificial Sequence
  Description of Artificial Sequence: Synthetic oligonucleotide
  Antisense strand to SEQ ID NO: 996052
uaucucacccagcauuagu

SEQ ID NO: 996054 - RNA, 19 nt, Artificial Sequence
  Description of Artificial Sequence: Synthetic oligonucleotide
  Sense strand starting at position 935 of SEQ ID NO: 914333
cuggucauguuccuuacau

SEQ ID NO: 996055 - RNA, 19 nt, Artificial Sequence
  Description of Artificial Sequence: Synthetic oligonucleotide
  Antisense strand to SEQ ID NO: 996054
auguaaggaacaugaccag

SEQ ID NO: 996056 - RNA, 19 nt, Artificial Sequence
  Description of Artificial Sequence: Synthetic oligonucleotide
  Sense strand starting at position 936 of SEQ ID NO: 914333
uggucauguuccuuacaug

SEQ ID NO: 996057 - RNA, 19 nt, Artificial Sequence
  Description of Artificial Sequence: Synthetic oligonucleotide
  Antisense strand to SEQ ID NO: 996056
cauguaaggaacaugacca

SEQ ID NO: 996058 - RNA, 19 nt, Artificial Sequence
  Description of Artificial Sequence: Synthetic oligonucleotide
  Sense strand starting at position 1175 of SEQ ID NO: 914333
gcuucuguagugcagaaca

SEQ ID NO: 996059 - RNA, 19 nt, Artificial Sequence
  Description of Artificial Sequence: Synthetic oligonucleotide
  Antisense strand to SEQ ID NO: 996058
uguucugcacuacagaagc

SEQ ID NO: 996060 - RNA, 19 nt, Artificial Sequence
  Description of Artificial Sequence: Synthetic oligonucleotide
  Sense strand starting at position 1366 of SEQ ID NO: 914333
ugucacuguccuuaucaca

SEQ ID NO: 996061 - RNA, 19 nt, Artificial Sequence
  Description of Artificial Sequence: Synthetic oligonucleotide
  Antisense strand to SEQ ID NO: 996060
ugugauaaggacagugaca

SEQ ID NO: 996062 - RNA, 19 nt, Artificial Sequence
  Description of Artificial Sequence: Synthetic oligonucleotide
  Sense strand starting at position 1699 of SEQ ID NO: 914333
cggagcaauucugucauca

SEQ ID NO: 996063 - RNA, 19 nt, Artificial Sequence
  Description of Artificial Sequence: Synthetic oligonucleotide
  Antisense strand to SEQ ID NO: 996062
ugaugacagaauugcuccg

SEQ ID NO: 996064 - RNA, 19 nt, Artificial Sequence
  Description of Artificial Sequence: Synthetic oligonucleotide
  Sense strand starting at position 1711 of SEQ ID NO: 914333
gucaucaguuucucaucca

SEQ ID NO: 996065 - RNA, 19 nt, Artificial Sequence
  Description of Artificial Sequence: Synthetic oligonucleotide
  Antisense strand to SEQ ID NO: 996064
uggaugagaaacugaugac

SEQ ID NO: 996066 - RNA, 19 nt, Artificial Sequence
  Description of Artificial Sequence: Synthetic oligonucleotide
  Sense strand starting at position 2162 of SEQ ID NO: 914333
uguucuucuaagggaggaa

SEQ ID NO: 996067 - RNA, 19 nt, Artificial Sequence
  Description of Artificial Sequence: Synthetic oligonucleotide
  Antisense strand to SEQ ID NO: 996066
uuccucccuuagaagaaca

SEQ ID NO: 996068 - RNA, 19 nt, Artificial Sequence
  Description of Artificial Sequence: Synthetic oligonucleotide
  Sense strand starting at position 2204 of SEQ ID NO: 914333
uccgauuucugccuccaaa

SEQ ID NO: 996069 - RNA, 19 nt, Artificial Sequence
  Description of Artificial Sequence: Synthetic oligonucleotide
  Antisense strand to SEQ ID NO: 996068
uuuggaggcagaaaucgga

SEQ ID NO: 996070 - RNA, 19 nt, Artificial Sequence
  Description of Artificial Sequence: Synthetic oligonucleotide
  Sense strand starting at position 2317 of SEQ ID NO: 914333
ccuaaucgguuauuuguau

SEQ ID NO: 996071 - RNA, 19 nt, Artificial Sequence
  Description of Artificial Sequence: Synthetic oligonucleotide
  Antisense strand to SEQ ID NO: 996070
auacaaauaaccgauuagg

SEQ ID NO: 996072 - RNA, 19 nt, Artificial Sequence
  Description of Artificial Sequence: Synthetic oligonucleotide
  Sense strand starting at position 2318 of SEQ ID NO: 914333
cuaaucgguuauuuguaua

SEQ ID NO: 996073 - RNA, 19 nt, Artificial Sequence
  Description of Artificial Sequence: Synthetic oligonucleotide
  Antisense strand to SEQ ID NO: 996072
uauacaaauaaccgauuag

SEQ ID NO: 996074 - RNA, 19 nt, Artificial Sequence
  Description of Artificial Sequence: Synthetic oligonucleotide
  Sense strand starting at position 2378 of SEQ ID NO: 914333
uaauuaccgguguaugcau

SEQ ID NO: 996075 - RNA, 19 nt, Artificial Sequence
  Description of Artificial Sequence: Synthetic oligonucleotide
  Antisense strand to SEQ ID NO: 996074
augcauacaccgguaauua

SEQ ID NO: 996076 - RNA, 19 nt, Artificial Sequence
  Description of Artificial Sequence: Synthetic oligonucleotide
  Sense strand starting at position 2764 of SEQ ID NO: 914333
cagagagcgucuccuuaga

SEQ ID NO: 996077 - RNA, 19 nt, Artificial Sequence
  Description of Artificial Sequence: Synthetic oligonucleotide
  Antisense strand to SEQ ID NO: 996076
ucuaaggagacgcucucug

SEQ ID NO: 996078 - RNA, 19 nt, Artificial Sequence
  Description of Artificial Sequence: Synthetic oligonucleotide
  Sense strand starting at position 2766 of SEQ ID NO: 914333
gagagcgucuccuuagauu

SEQ ID NO: 996079 - RNA, 19 nt, Artificial Sequence
  Description of Artificial Sequence: Synthetic oligonucleotide
  Antisense strand to SEQ ID NO: 996078
aaucuaaggagacgcucuc

SEQ ID NO: 996080 - RNA, 19 nt, Artificial Sequence
  Description of Artificial Sequence: Synthetic oligonucleotide
  Sense strand starting at position 2875 of SEQ ID NO: 914333
cugacuuaccagugaucuu

SEQ ID NO: 996081 - RNA, 19 nt, Artificial Sequence
  Description of Artificial Sequence: Synthetic oligonucleotide
  Antisense strand to SEQ ID NO: 996080
aagaucacugguaagucag

SEQ ID NO: 996082 - RNA, 19 nt, Artificial Sequence
  Description of Artificial Sequence: Synthetic oligonucleotide
  Sense strand starting at position 3444 of SEQ ID NO: 914333
gcaggauauauaggcaaau

SEQ ID NO: 996083 - RNA, 19 nt, Artificial Sequence
  Description of Artificial Sequence: Synthetic oligonucleotide
  Antisense strand to SEQ ID NO: 996082
auuugccuauauauccugc

SEQ ID NO: 996084 - RNA, 19 nt, Artificial Sequence
  Description of Artificial Sequence: Synthetic oligonucleotide
  Sense strand starting at position 3486 of SEQ ID NO: 914333
acgguaggaugauuccuua

SEQ ID NO: 996085 - RNA, 19 nt, Artificial Sequence
  Description of Artificial Sequence: Synthetic oligonucleotide
  Antisense strand to SEQ ID NO: 996084
uaaggaaucauccuaccgu

SEQ ID NO: 996086 - RNA, 19 nt, Artificial Sequence
  Description of Artificial Sequence: Synthetic oligonucleotide
  Sense strand starting at position 3520 of SEQ ID NO: 914333
gggcuuugggauggcuaga

SEQ ID NO: 996087 - RNA, 19 nt, Artificial Sequence
  Description of Artificial Sequence: Synthetic oligonucleotide
  Antisense strand to SEQ ID NO: 996086
ucuagccaucccaaagccc

SEQ ID NO: 996088 - RNA, 19 nt, Artificial Sequence
  Description of Artificial Sequence: Synthetic oligonucleotide
  Sense strand starting at position 3525 of SEQ ID NO: 914333
uugggauggcuagacucau

SEQ ID NO: 996089 - RNA, 19 nt, Artificial Sequence
  Description of Artificial Sequence: Synthetic oligonucleotide
  Antisense strand to SEQ ID NO: 996088
augagucuagccaucccaa

SEQ ID NO: 996090 - RNA, 19 nt, Artificial Sequence
  Description of Artificial Sequence: Synthetic oligonucleotide
  Sense strand starting at position 3936 of SEQ ID NO: 914333
guaugucuucccguuuggu

SEQ ID NO: 996091 - RNA, 19 nt, Artificial Sequence
  Description of Artificial Sequence: Synthetic oligonucleotide
  Antisense strand to SEQ ID NO: 996090
accaaacgggaagacauac

SEQ ID NO: 996092 - RNA, 19 nt, Artificial Sequence
  Description of Artificial Sequence: Synthetic oligonucleotide
  Sense strand starting at position 3944 of SEQ ID NO: 914333
ucccguuuggucuacagaa

SEQ ID NO: 996093 - RNA, 19 nt, Artificial Sequence
  Description of Artificial Sequence: Synthetic oligonucleotide
  Antisense strand to SEQ ID NO: 996092
uucuguagaccaaacggga

SEQ ID NO: 996094 - RNA, 19 nt, Artificial Sequence
  Description of Artificial Sequence: Synthetic oligonucleotide
  Sense strand starting at position 3946 of SEQ ID NO: 914333
ccguuuggucuacagaaag

SEQ ID NO: 996095 - RNA, 19 nt, Artificial Sequence
  Description of Artificial Sequence: Synthetic oligonucleotide
  Antisense strand to SEQ ID NO: 996094
cuuucuguagaccaaacgg

SEQ ID NO: 996096 - RNA, 19 nt, Artificial Sequence
  Description of Artificial Sequence: Synthetic oligonucleotide
  Sense strand starting at position 3961 of SEQ ID NO: 914333
aaaggauucugggagauag

SEQ ID NO: 996097 - RNA, 19 nt, Artificial Sequence
  Description of Artificial Sequence: Synthetic oligonucleotide
  Antisense strand to SEQ ID NO: 996096
cuaucucccagaauccuuu

SEQ ID NO: 996098 - RNA, 19 nt, Artificial Sequence
  Description of Artificial Sequence: Synthetic oligonucleotide
  Sense strand starting at position 436 of SEQ ID NO: 914334
guuucuuugagacgaaguc

SEQ ID NO: 996099 - RNA, 19 nt, Artificial Sequence
  Description of Artificial Sequence: Synthetic oligonucleotide
  Antisense strand to SEQ ID NO: 996098
gacuucgucucaaagaaac

SEQ ID NO: 996100 - RNA, 19 nt, Artificial Sequence
  Description of Artificial Sequence: Synthetic oligonucleotide
  Sense strand starting at position 724 of SEQ ID NO: 914334
ggcugaaaucuugacuuua

SEQ ID NO: 996101 - RNA, 19 nt, Artificial Sequence
  Description of Artificial Sequence: Synthetic oligonucleotide
  Antisense strand to SEQ ID NO: 996100
uaaagucaagauuucagcc

SEQ ID NO: 996102 - RNA, 19 nt, Artificial Sequence
  Description of Artificial Sequence: Synthetic oligonucleotide
  Sense strand starting at position 864 of SEQ ID NO: 914334
gggucauccugucauuaga

SEQ ID NO: 996103 - RNA, 19 nt, Artificial Sequence
  Description of Artificial Sequence: Synthetic oligonucleotide
  Antisense strand to SEQ ID NO: 996102
ucuaaugacaggaugaccc

SEQ ID NO: 996104 - RNA, 19 nt, Artificial Sequence
  Description of Artificial Sequence: Synthetic oligonucleotide
  Sense strand starting at position 878 of SEQ ID NO: 914334
uuagaaagguucuugcagu

SEQ ID NO: 996105 - RNA, 19 nt, Artificial Sequence
  Description of Artificial Sequence: Synthetic oligonucleotide
  Antisense strand to SEQ ID NO: 996104
acugcaagaaccuuucuaa

SEQ ID NO: 996106 - RNA, 19 nt, Artificial Sequence
  Description of Artificial Sequence: Synthetic oligonucleotide
  Sense strand starting at position 955 of SEQ ID NO: 914334
gcaggugaugugcaaauau

SEQ ID NO: 996107 - RNA, 19 nt, Artificial Sequence
  Description of Artificial Sequence: Synthetic oligonucleotide
  Antisense strand to SEQ ID NO: 996106
auauuugcacaucaccugc

SEQ ID NO: 996108 - RNA, 19 nt, Artificial Sequence
  Description of Artificial Sequence: Synthetic oligonucleotide
  Sense strand starting at position 1360 of SEQ ID NO: 914334
gagaguuaagaguggaauc

SEQ ID NO: 996109 - RNA, 19 nt, Artificial Sequence
  Description of Artificial Sequence: Synthetic oligonucleotide
  Antisense strand to SEQ ID NO: 996108
gauuccacucuuaacucuc

SEQ ID NO: 996110 - RNA, 19 nt, Artificial Sequence
  Description of Artificial Sequence: Synthetic oligonucleotide
  Sense strand starting at position 1371 of SEQ ID NO: 914334
guggaauccuagggaagag

SEQ ID NO: 996111 - RNA, 19 nt, Artificial Sequence
  Description of Artificial Sequence: Synthetic oligonucleotide
  Antisense strand to SEQ ID NO: 996110
cucuucccuaggauuccac

SEQ ID NO: 996112 - RNA, 19 nt, Artificial Sequence
  Description of Artificial Sequence: Synthetic oligonucleotide
  Sense strand starting at position 1435 of SEQ ID NO: 914334
cagggucugucccuuaaug

SEQ ID NO: 996113 - RNA, 19 nt, Artificial Sequence
  Description of Artificial Sequence: Synthetic oligonucleotide
  Antisense strand to SEQ ID NO: 996112
cauuaagggacagacccug

SEQ ID NO: 996114 - RNA, 19 nt, Artificial Sequence
  Description of Artificial Sequence: Synthetic oligonucleotide
  Sense strand starting at position 1437 of SEQ ID NO: 914334
gggucugucccuuaauguc

SEQ ID NO: 996115 - RNA, 19 nt, Artificial Sequence
  Description of Artificial Sequence: Synthetic oligonucleotide
  Antisense strand to SEQ ID NO: 996114
gacauuaagggacagaccc

SEQ ID NO: 996116 - RNA, 19 nt, Artificial Sequence
  Description of Artificial Sequence: Synthetic oligonucleotide
  Sense strand starting at position 1468 of SEQ ID NO: 914334
aggagaugguuccuggagu

SEQ ID NO: 996117 - RNA, 19 nt, Artificial Sequence
  Description of Artificial Sequence: Synthetic oligonucleotide
  Antisense strand to SEQ ID NO: 996116
acuccaggaaccaucuccu

SEQ ID NO: 996118 - RNA, 19 nt, Artificial Sequence
  Description of Artificial Sequence: Synthetic oligonucleotide
  Sense strand starting at position 1540 of SEQ ID NO: 914334
gcgccaucccuggaggaga

SEQ ID NO: 996119 - RNA, 19 nt, Artificial Sequence
  Description of Artificial Sequence: Synthetic oligonucleotide
  Antisense strand to SEQ ID NO: 996118
ucuccuccagggauggcgc

SEQ ID NO: 996120 - RNA, 19 nt, Artificial Sequence
  Description of Artificial Sequence: Synthetic oligonucleotide
  Sense strand starting at position 1784 of SEQ ID NO: 914334
ggaccuuuccgagacugua

SEQ ID NO: 996121 - RNA, 19 nt, Artificial Sequence
  Description of Artificial Sequence: Synthetic oligonucleotide
  Antisense strand to SEQ ID NO: 996120
uacagucucggaaaggucc

SEQ ID NO: 996122 - RNA, 19 nt, Artificial Sequence
  Description of Artificial Sequence: Synthetic oligonucleotide
  Sense strand starting at position 1956 of SEQ ID NO: 914334
aaagguucucgaggcuaac

SEQ ID NO: 996123 - RNA, 19 nt, Artificial Sequence
  Description of Artificial Sequence: Synthetic oligonucleotide
  Antisense strand to SEQ ID NO: 996122
guuagccucgagaaccuuu

SEQ ID NO: 996124 - RNA, 19 nt, Artificial Sequence
  Description of Artificial Sequence: Synthetic oligonucleotide
  Sense strand starting at position 2104 of SEQ ID NO: 914334
ccucuuuggcugugaguga

SEQ ID NO: 996125 - RNA, 19 nt, Artificial Sequence
  Description of Artificial Sequence: Synthetic oligonucleotide
  Antisense strand to SEQ ID NO: 996124
ucacucacagccaaagagg

SEQ ID NO: 996126 - RNA, 19 nt, Artificial Sequence
  Description of Artificial Sequence: Synthetic oligonucleotide
  Sense strand starting at position 2126 of SEQ ID NO: 914334
ggaggaaacuugugagacu

SEQ ID NO: 996127 - RNA, 19 nt, Artificial Sequence
  Description of Artificial Sequence: Synthetic oligonucleotide
  Antisense strand to SEQ ID NO: 996126
agucucacaaguuuccucc

SEQ ID NO: 996128 - RNA, 19 nt, Artificial Sequence
  Description of Artificial Sequence: Synthetic oligonucleotide
  Sense strand starting at position 2252 of SEQ ID NO: 914334
cugcgauuugcauacaguu

SEQ ID NO: 996129 - RNA, 19 nt, Artificial Sequence
  Description of Artificial Sequence: Synthetic oligonucleotide
  Antisense strand to SEQ ID NO: 996128
aacuguaugcaaaucgcag

SEQ ID NO: 996130 - RNA, 19 nt, Artificial Sequence
  Description of Artificial Sequence: Synthetic oligonucleotide
  Sense strand starting at position 2453 of SEQ ID NO: 914334
ucaggugacccauguuugu

SEQ ID NO: 996131 - RNA, 19 nt, Artificial Sequence
  Description of Artificial Sequence: Synthetic oligonucleotide
  Antisense strand to SEQ ID NO: 996130
acaaacaugggucaccuga

SEQ ID NO: 996132 - RNA, 19 nt, Artificial Sequence
  Description of Artificial Sequence: Synthetic oligonucleotide
  Sense strand starting at position 2456 of SEQ ID NO: 914334
ggugacccauguuuguaaa

SEQ ID NO: 996133 - RNA, 19 nt, Artificial Sequence
  Description of Artificial Sequence: Synthetic oligonucleotide
  Antisense strand to SEQ ID NO: 996132
uuuacaaacaugggucacc

SEQ ID NO: 996134 - RNA, 19 nt, Artificial Sequence
  Description of Artificial Sequence: Synthetic oligonucleotide
  Sense strand starting at position 2458 of SEQ ID NO: 914334
ugacccauguuuguaaaca

SEQ ID NO: 996135 - RNA, 19 nt, Artificial Sequence
  Description of Artificial Sequence: Synthetic oligonucleotide
  Antisense strand to SEQ ID NO: 996134
uguuuacaaacauggguca

SEQ ID NO: 996136 - RNA, 19 nt, Artificial Sequence
  Description of Artificial Sequence: Synthetic oligonucleotide
  Sense strand starting at position 2543 of SEQ ID NO: 914334
gucagaggucaugggagaa

SEQ ID NO: 996137 - RNA, 19 nt, Artificial Sequence
  Description of Artificial Sequence: Synthetic oligonucleotide
  Antisense strand to SEQ ID NO: 996136
uucucccaugaccucugac

SEQ ID NO: 996138 - RNA, 19 nt, Artificial Sequence
  Description of Artificial Sequence: Synthetic oligonucleotide
  Sense strand starting at position 2577 of SEQ ID NO: 914334
auugguaacucagggaaga

SEQ ID NO: 996139 - RNA, 19 nt, Artificial Sequence
  Description of Artificial Sequence: Synthetic oligonucleotide
  Antisense strand to SEQ ID NO: 996138
ucuucccugaguuaccaau

SEQ ID NO: 996140 - RNA, 19 nt, Artificial Sequence
  Description of Artificial Sequence: Synthetic oligonucleotide
  Sense strand starting at position 2665 of SEQ ID NO: 914334
gccgaaagcuaggauuuga

SEQ ID NO: 996141 - RNA, 19 nt, Artificial Sequence
  Description of Artificial Sequence: Synthetic oligonucleotide
  Antisense strand to SEQ ID NO: 996140
ucaaauccuagcuuucggc

SEQ ID NO: 996142 - RNA, 19 nt, Artificial Sequence
  Description of Artificial Sequence: Synthetic oligonucleotide
  Sense strand starting at position 2670 of SEQ ID NO: 914334
aagcuaggauuugagaaau

SEQ ID NO: 996143 - RNA, 19 nt, Artificial Sequence
  Description of Artificial Sequence: Synthetic oligonucleotide
  Antisense strand to SEQ ID NO: 996142
auuucucaaauccuagcuu

SEQ ID NO: 996144 - RNA, 19 nt, Artificial Sequence
  Description of Artificial Sequence: Synthetic oligonucleotide
  Sense strand starting at position 2704 of SEQ ID NO: 914334
ugaggugggcacgaaagau

SEQ ID NO: 996145 - RNA, 19 nt, Artificial Sequence
  Description of Artificial Sequence: Synthetic oligonucleotide
  Antisense strand to SEQ ID NO: 996144
aucuuucgugcccaccuca

SEQ ID NO: 996146 - RNA, 19 nt, Artificial Sequence
  Description of Artificial Sequence: Synthetic oligonucleotide
  Sense strand starting at position 2746 of SEQ ID NO: 914334
ccuggucuggcucauuaau

SEQ ID NO: 996147 - RNA, 19 nt, Artificial Sequence
  Description of Artificial Sequence: Synthetic oligonucleotide
  Antisense strand to SEQ ID NO: 996146
auuaaugagccagaccagg

SEQ ID NO: 996148 - RNA, 19 nt, Artificial Sequence
  Description of Artificial Sequence: Synthetic oligonucleotide
  Sense strand starting at position 2748 of SEQ ID NO: 914334
uggucuggcucauuaauuu

SEQ ID NO: 996149 - RNA, 19 nt, Artificial Sequence
  Description of Artificial Sequence: Synthetic oligonucleotide
  Antisense strand to SEQ ID NO: 996148
aaauuaaugagccagacca

SEQ ID NO: 996150 - RNA, 19 nt, Artificial Sequence
  Description of Artificial Sequence: Synthetic oligonucleotide
  Sense strand starting at position 2791 of SEQ ID NO: 914334
cucagagugucagccaaau

SEQ ID NO: 996151 - RNA, 19 nt, Artificial Sequence
  Description of Artificial Sequence: Synthetic oligonucleotide
  Antisense strand to SEQ ID NO: 996150
auuuggcugacacucugag

SEQ ID NO: 996152 - RNA, 19 nt, Artificial Sequence
  Description of Artificial Sequence: Synthetic oligonucleotide
  Sense strand starting at position 2844 of SEQ ID NO: 914334
ccagaauccuuucuguaga

SEQ ID NO: 996153 - RNA, 19 nt, Artificial Sequence
  Description of Artificial Sequence: Synthetic oligonucleotide
  Antisense strand to SEQ ID NO: 996152
ucuacagaaaggauucugg

SEQ ID NO: 996154 - RNA, 19 nt, Artificial Sequence
  Description of Artificial Sequence: Synthetic oligonucleotide
  Sense strand starting at position 2917 of SEQ ID NO: 914334
ugcuucugagugcuuguua

SEQ ID NO: 996155 - RNA, 19 nt, Artificial Sequence
  Description of Artificial Sequence: Synthetic oligonucleotide
  Antisense strand to SEQ ID NO: 996154
uaacaagcacucagaagca

SEQ ID NO: 996156 - RNA, 19 nt, Artificial Sequence
  Description of Artificial Sequence: Synthetic oligonucleotide
  Sense strand starting at position 3268 of SEQ ID NO: 914334
cuucuaugagucuagccau

SEQ ID NO: 996157 - RNA, 19 nt, Artificial Sequence
  Description of Artificial Sequence: Synthetic oligonucleotide
  Antisense strand to SEQ ID NO: 996156
auggcuagacucauagaag

SEQ ID NO: 996158 - RNA, 19 nt, Artificial Sequence
  Description of Artificial Sequence: Synthetic oligonucleotide
  Sense strand starting at position 3313 of SEQ ID NO: 914334
aaggaaucauccuaccguu

SEQ ID NO: 996159 - RNA, 19 nt, Artificial Sequence
  Description of Artificial Sequence: Synthetic oligonucleotide
  Antisense strand to SEQ ID NO: 996158
aacgguaggaugauuccuu

SEQ ID NO: 996160 - RNA, 19 nt, Artificial Sequence
  Description of Artificial Sequence: Synthetic oligonucleotide
  Sense strand starting at position 3329 of SEQ ID NO: 914334
guuucccaucauggugaaa

SEQ ID NO: 996161 - RNA, 19 nt, Artificial Sequence
  Description of Artificial Sequence: Synthetic oligonucleotide
  Antisense strand to SEQ ID NO: 996160
uuucaccaugaugggaaac

SEQ ID NO: 996162 - RNA, 19 nt, Artificial Sequence
  Description of Artificial Sequence: Synthetic oligonucleotide
  Sense strand starting at position 3390 of SEQ ID NO: 914334
gaaguugaguguuugcagu

SEQ ID NO: 996163 - RNA, 19 nt, Artificial Sequence
  Description of Artificial Sequence: Synthetic oligonucleotide
  Antisense strand to SEQ ID NO: 996162
acugcaaacacucaacuuc

SEQ ID NO: 996164 - RNA, 19 nt, Artificial Sequence
  Description of Artificial Sequence: Synthetic oligonucleotide
  Sense strand starting at position 3877 of SEQ ID NO: 914334
cuagucauugggcagggau

SEQ ID NO: 996165 - RNA, 19 nt, Artificial Sequence
  Description of Artificial Sequence: Synthetic oligonucleotide
  Antisense strand to SEQ ID NO: 996164
aucccugcccaaugacuag

SEQ ID NO: 996166 - RNA, 19 nt, Artificial Sequence
  Description of Artificial Sequence: Synthetic oligonucleotide
  Sense strand starting at position 3892 of SEQ ID NO: 914334
ggauccuaaguauagcauu

SEQ ID NO: 996167 - RNA, 19 nt, Artificial Sequence
  Description of Artificial Sequence: Synthetic oligonucleotide
  Antisense strand to SEQ ID NO: 996166
aaugcuauacuuaggaucc

SEQ ID NO: 996168 - RNA, 19 nt, Artificial Sequence
  Description of Artificial Sequence: Synthetic oligonucleotide
  Sense strand starting at position 3918 of SEQ ID NO: 914334
ccugcaagaucacugguaa

SEQ ID NO: 996169 - RNA, 19 nt, Artificial Sequence
  Description of Artificial Sequence: Synthetic oligonucleotide
  Antisense strand to SEQ ID NO: 996168
uuaccagugaucuugcagg

SEQ ID NO: 996170 - RNA, 19 nt, Artificial Sequence
  Description of Artificial Sequence: Synthetic oligonucleotide
  Sense strand starting at position 3919 of SEQ ID NO: 914334
cugcaagaucacugguaag

SEQ ID NO: 996171 - RNA, 19 nt, Artificial Sequence
  Description of Artificial Sequence: Synthetic oligonucleotide
  Antisense strand to SEQ ID NO: 996170
cuuaccagugaucuugcag

SEQ ID NO: 996172 - RNA, 19 nt, Artificial Sequence
  Description of Artificial Sequence: Synthetic oligonucleotide
  Sense strand starting at position 3922 of SEQ ID NO: 914334
caagaucacugguaaguca

SEQ ID NO: 996173 - RNA, 19 nt, Artificial Sequence
  Description of Artificial Sequence: Synthetic oligonucleotide
  Antisense strand to SEQ ID NO: 996172
ugacuuaccagugaucuug

SEQ ID NO: 996174 - RNA, 19 nt, Artificial Sequence
  Description of Artificial Sequence: Synthetic oligonucleotide
  Sense strand starting at position 3933 of SEQ ID NO: 914334
guaagucagagcuggaacu

SEQ ID NO: 996175 - RNA, 19 nt, Artificial Sequence
  Description of Artificial Sequence: Synthetic oligonucleotide
  Antisense strand to SEQ ID NO: 996174
aguuccagcucugacuuac

SEQ ID NO: 996176 - RNA, 19 nt, Artificial Sequence
  Description of Artificial Sequence: Synthetic oligonucleotide
  Sense strand starting at position 3976 of SEQ ID NO: 914334
guucgaaucucuccuggca

SEQ ID NO: 996177 - RNA, 19 nt, Artificial Sequence
  Description of Artificial Sequence: Synthetic oligonucleotide
  Antisense strand to SEQ ID NO: 996176
ugccaggagagauucgaac

SEQ ID NO: 996178 - RNA, 19 nt, Artificial Sequence
  Description of Artificial Sequence: Synthetic oligonucleotide
  Sense strand starting at position 325 of SEQ ID NO: 914335
gccgcgacucggucugaga

SEQ ID NO: 996179 - RNA, 19 nt, Artificial Sequence
  Description of Artificial Sequence: Synthetic oligonucleotide
  Antisense strand to SEQ ID NO: 996178
ucucagaccgagucgcggc

SEQ ID NO: 996180 - RNA, 19 nt, Artificial Sequence
  Description of Artificial Sequence: Synthetic oligonucleotide
  Sense strand starting at position 327 of SEQ ID NO: 914335
cgcgacucggucugagaca

SEQ ID NO: 996181 - RNA, 19 nt, Artificial Sequence
  Description of Artificial Sequence: Synthetic oligonucleotide
  Antisense strand to SEQ ID NO: 996180
ugucucagaccgagucgcg

SEQ ID NO: 996182 - RNA, 19 nt, Artificial Sequence
  Description of Artificial Sequence: Synthetic oligonucleotide
  Sense strand starting at position 431 of SEQ ID NO: 914335
cgcgauuugcaaugcaaag

SEQ ID NO: 996183 - RNA, 19 nt, Artificial Sequence
  Description of Artificial Sequence: Synthetic oligonucleotide
  Antisense strand to SEQ ID NO: 996182
cuuugcauugcaaaucgcg

SEQ ID NO: 996184 - RNA, 19 nt, Artificial Sequence
  Description of Artificial Sequence: Synthetic oligonucleotide
  Sense strand starting at position 635 of SEQ ID NO: 914335
aaugaagagugagcgaaau

SEQ ID NO: 996185 - RNA, 19 nt, Artificial Sequence
  Description of Artificial Sequence: Synthetic oligonucleotide
  Antisense strand to SEQ ID NO: 996184
auuucgcucacucuucauu

SEQ ID NO: 996186 - RNA, 19 nt, Artificial Sequence
  Description of Artificial Sequence: Synthetic oligonucleotide
  Sense strand starting at position 1083 of SEQ ID NO: 914335
ggauguacuccacggcuga

SEQ ID NO: 996187 - RNA, 19 nt, Artificial Sequence
  Description of Artificial Sequence: Synthetic oligonucleotide
  Antisense strand to SEQ ID NO: 996186
ucagccguggaguacaucc

SEQ ID NO: 996188 - RNA, 19 nt, Artificial Sequence
  Description of Artificial Sequence: Synthetic oligonucleotide
  Sense strand starting at position 1762 of SEQ ID NO: 914335
gcgcgaucacauucuguaa

SEQ ID NO: 996189 - RNA, 19 nt, Artificial Sequence
  Description of Artificial Sequence: Synthetic oligonucleotide
  Antisense strand to SEQ ID NO: 996188
uuacagaaugugaucgcgc

SEQ ID NO: 996190 - RNA, 19 nt, Artificial Sequence
  Description of Artificial Sequence: Synthetic oligonucleotide
  Sense strand starting at position 1852 of SEQ ID NO: 914335
uggcgaaaucugcgaguuc

SEQ ID NO: 996191 - RNA, 19 nt, Artificial Sequence
  Description of Artificial Sequence: Synthetic oligonucleotide
  Antisense strand to SEQ ID NO: 996190
gaacucgcagauuucgcca

SEQ ID NO: 996192 - RNA, 19 nt, Artificial Sequence
  Description of Artificial Sequence: Synthetic oligonucleotide
  Sense strand starting at position 2367 of SEQ ID NO: 914335
ccaccugugcguuaaucua

SEQ ID NO: 996193 - RNA, 19 nt, Artificial Sequence
  Description of Artificial Sequence: Synthetic oligonucleotide
  Antisense strand to SEQ ID NO: 996192
uagauuaacgcacaggugg

SEQ ID NO: 996194 - RNA, 19 nt, Artificial Sequence
  Description of Artificial Sequence: Synthetic oligonucleotide
  Sense strand starting at position 2375 of SEQ ID NO: 914335
gcguuaaucuacugggaau

SEQ ID NO: 996195 - RNA, 19 nt, Artificial Sequence
  Description of Artificial Sequence: Synthetic oligonucleotide
  Antisense strand to SEQ ID NO: 996194
auucccaguagauuaacgc

SEQ ID NO: 996196 - RNA, 19 nt, Artificial Sequence
  Description of Artificial Sequence: Synthetic oligonucleotide
  Sense strand starting at position 2376 of SEQ ID NO: 914335
cguuaaucuacugggaaug

SEQ ID NO: 996197 - RNA, 19 nt, Artificial Sequence
  Description of Artificial Sequence: Synthetic oligonucleotide
  Antisense strand to SEQ ID NO: 996196
cauucccaguagauuaacg

SEQ ID NO: 996198 - RNA, 19 nt, Artificial Sequence
  Description of Artificial Sequence: Synthetic oligonucleotide
  Sense strand starting at position 2427 of SEQ ID NO: 914335
gggcuuaaggaguggucga

SEQ ID NO: 996199 - RNA, 19 nt, Artificial Sequence
  Description of Artificial Sequence: Synthetic oligonucleotide
  Antisense strand to SEQ ID NO: 996198
ucgaccacuccuuaagccc

SEQ ID NO: 996200 - RNA, 19 nt, Artificial Sequence
  Description of Artificial Sequence: Synthetic oligonucleotide
  Sense strand starting at position 2794 of SEQ ID NO: 914335
cccugagggcacugagauu

SEQ ID NO: 996201 - RNA, 19 nt, Artificial Sequence
  Description of Artificial Sequence: Synthetic oligonucleotide
  Antisense strand to SEQ ID NO: 996200
aaucucagugcccucaggg

SEQ ID NO: 996202 - RNA, 19 nt, Artificial Sequence
  Description of Artificial Sequence: Synthetic oligonucleotide
  Sense strand starting at position 2813 of SEQ ID NO: 914335
gggccauuggccugaaggu

SEQ ID NO: 996203 - RNA, 19 nt, Artificial Sequence
  Description of Artificial Sequence: Synthetic oligonucleotide
  Antisense strand to SEQ ID NO: 996202
accuucaggccaauggccc

SEQ ID NO: 996204 - RNA, 19 nt, Artificial Sequence
  Description of Artificial Sequence: Synthetic oligonucleotide
  Sense strand starting at position 2868 of SEQ ID NO: 914335
ucgagaacuucucccuaag

SEQ ID NO: 996205 - RNA, 19 nt, Artificial Sequence
  Description of Artificial Sequence: Synthetic oligonucleotide
  Antisense strand to SEQ ID NO: 996204
cuuagggagaaguucucga

SEQ ID NO: 996206 - RNA, 19 nt, Artificial Sequence
  Description of Artificial Sequence: Synthetic oligonucleotide
  Sense strand starting at position 2915 of SEQ ID NO: 914335
gugcaaacacugcagaaau

SEQ ID NO: 996207 - RNA, 19 nt, Artificial Sequence
  Description of Artificial Sequence: Synthetic oligonucleotide
  Antisense strand to SEQ ID NO: 996206
auuucugcaguguuugcac

SEQ ID NO: 996208 - RNA, 19 nt, Artificial Sequence
  Description of Artificial Sequence: Synthetic oligonucleotide
  Sense strand starting at position 2942 of SEQ ID NO: 914335
uguaguguuaacggaagag

SEQ ID NO: 996209 - RNA, 19 nt, Artificial Sequence
  Description of Artificial Sequence: Synthetic oligonucleotide
  Antisense strand to SEQ ID NO: 996208
cucuuccguuaacacuaca

SEQ ID NO: 996210 - RNA, 19 nt, Artificial Sequence
  Description of Artificial Sequence: Synthetic oligonucleotide
  Sense strand starting at position 2946 of SEQ ID NO: 914335
guguuaacggaagaguuua

SEQ ID NO: 996211 - RNA, 19 nt, Artificial Sequence
  Description of Artificial Sequence: Synthetic oligonucleotide
  Antisense strand to SEQ ID NO: 996210
uaaacucuuccguuaacac

SEQ ID NO: 996212 - RNA, 19 nt, Artificial Sequence
  Description of Artificial Sequence: Synthetic oligonucleotide
  Sense strand starting at position 2958 of SEQ ID NO: 914335
gaguuuagguccugccuca

SEQ ID NO: 996213 - RNA, 19 nt, Artificial Sequence
  Description of Artificial Sequence: Synthetic oligonucleotide
  Antisense strand to SEQ ID NO: 996212
ugaggcaggaccuaaacuc

SEQ ID NO: 996214 - RNA, 19 nt, Artificial Sequence
  Description of Artificial Sequence: Synthetic oligonucleotide
  Sense strand starting at position 3168 of SEQ ID NO: 914335
gcagauagccaguguuuac

SEQ ID NO: 996215 - RNA, 19 nt, Artificial Sequence
  Description of Artificial Sequence: Synthetic oligonucleotide
  Antisense strand to SEQ ID NO: 996214
guaaacacuggcuaucugc

SEQ ID NO: 996216 - RNA, 19 nt, Artificial Sequence
  Description of Artificial Sequence: Synthetic oligonucleotide
  Sense strand starting at position 3334 of SEQ ID NO: 914335
gguggucugcggucucuau

SEQ ID NO: 996217 - RNA, 19 nt, Artificial Sequence
  Description of Artificial Sequence: Synthetic oligonucleotide
  Antisense strand to SEQ ID NO: 996216
auagagaccgcagaccacc

SEQ ID NO: 996218 - RNA, 19 nt, Artificial Sequence
  Description of Artificial Sequence: Synthetic oligonucleotide
  Sense strand starting at position 3342 of SEQ ID NO: 914335
gcggucucuauuuggcaga

SEQ ID NO: 996219 - RNA, 19 nt, Artificial Sequence
  Description of Artificial Sequence: Synthetic oligonucleotide
  Antisense strand to SEQ ID NO: 996218
ucugccaaauagagaccgc

SEQ ID NO: 996220 - RNA, 19 nt, Artificial Sequence
  Description of Artificial Sequence: Synthetic oligonucleotide
  Sense strand starting at position 3343 of SEQ ID NO: 914335
cggucucuauuuggcagau

SEQ ID NO: 996221 - RNA, 19 nt, Artificial Sequence
  Description of Artificial Sequence: Synthetic oligonucleotide
  Antisense strand to SEQ ID NO: 996220
aucugccaaauagagaccg

SEQ ID NO: 996222 - RNA, 19 nt, Artificial Sequence
  Description of Artificial Sequence: Synthetic oligonucleotide
  Sense strand starting at position 3345 of SEQ ID NO: 914335
gucucuauuuggcagauga

SEQ ID NO: 996223 - RNA, 19 nt, Artificial Sequence
  Description of Artificial Sequence: Synthetic oligonucleotide
  Antisense strand to SEQ ID NO: 996222
ucaucugccaaauagagac

SEQ ID NO: 996224 - RNA, 19 nt, Artificial Sequence
  Description of Artificial Sequence: Synthetic oligonucleotide
  Sense strand starting at position 3375 of SEQ ID NO: 914335
uggagagaacccuggaugu

SEQ ID NO: 996225 - RNA, 19 nt, Artificial Sequence
  Description of Artificial Sequence: Synthetic oligonucleotide
  Antisense strand to SEQ ID NO: 996224
acauccaggguucucucca

SEQ ID NO: 996226 - RNA, 19 nt, Artificial Sequence
  Description of Artificial Sequence: Synthetic oligonucleotide
  Sense strand starting at position 3420 of SEQ ID NO: 914335
gagcgauccaggcagaaau

SEQ ID NO: 996227 - RNA, 19 nt, Artificial Sequence
  Description of Artificial Sequence: Synthetic oligonucleotide
  Antisense strand to SEQ ID NO: 996226
auuucugccuggaucgcuc

SEQ ID NO: 996228 - RNA, 19 nt, Artificial Sequence
  Description of Artificial Sequence: Synthetic oligonucleotide
  Sense strand starting at position 3517 of SEQ ID NO: 914335
agcccauucuucccagaug

SEQ ID NO: 996229 - RNA, 19 nt, Artificial Sequence
  Description of Artificial Sequence: Synthetic oligonucleotide
  Antisense strand to SEQ ID NO: 996228
caucugggaagaaugggcu

SEQ ID NO: 996230 - RNA, 19 nt, Artificial Sequence
  Description of Artificial Sequence: Synthetic oligonucleotide
  Sense strand starting at position 3532 of SEQ ID NO: 914335
gauggucacuuggcaaauc

SEQ ID NO: 996231 - RNA, 19 nt, Artificial Sequence
  Description of Artificial Sequence: Synthetic oligonucleotide
  Antisense strand to SEQ ID NO: 996230
gauuugccaagugaccauc

SEQ ID NO: 996232 - RNA, 19 nt, Artificial Sequence
  Description of Artificial Sequence: Synthetic oligonucleotide
  Sense strand starting at position 3660 of SEQ ID NO: 914335
cuuggaaaucccugcugga

SEQ ID NO: 996233 - RNA, 19 nt, Artificial Sequence
  Description of Artificial Sequence: Synthetic oligonucleotide
  Antisense strand to SEQ ID NO: 996232
uccagcagggauuuccaag

SEQ ID NO: 996234 - RNA, 19 nt, Artificial Sequence
  Description of Artificial Sequence: Synthetic oligonucleotide
  Sense strand starting at position 3663 of SEQ ID NO: 914335
ggaaaucccugcuggauuu

SEQ ID NO: 996235 - RNA, 19 nt, Artificial Sequence
  Description of Artificial Sequence: Synthetic oligonucleotide
  Antisense strand to SEQ ID NO: 996234
aaauccagcagggauuucc

SEQ ID NO: 996236 - RNA, 19 nt, Artificial Sequence
  Description of Artificial Sequence: Synthetic oligonucleotide
  Sense strand starting at position 3707 of SEQ ID NO: 914335
ggucaucuguugcugugua

SEQ ID NO: 996237 - RNA, 19 nt, Artificial Sequence
  Description of Artificial Sequence: Synthetic oligonucleotide
  Antisense strand to SEQ ID NO: 996236
uacacagcaacagaugacc

SEQ ID NO: 996238 - RNA, 19 nt, Artificial Sequence
  Description of Artificial Sequence: Synthetic oligonucleotide
  Sense strand starting at position 3711 of SEQ ID NO: 914335
aucuguugcuguguaagga

SEQ ID NO: 996239 - RNA, 19 nt, Artificial Sequence
  Description of Artificial Sequence: Synthetic oligonucleotide
  Antisense strand to SEQ ID NO: 996238
uccuuacacagcaacagau

SEQ ID NO: 996240 - RNA, 19 nt, Artificial Sequence
  Description of Artificial Sequence: Synthetic oligonucleotide
  Sense strand starting at position 3749 of SEQ ID NO: 914335
ucugaacaacgauguauua

SEQ ID NO: 996241 - RNA, 19 nt, Artificial Sequence
  Description of Artificial Sequence: Synthetic oligonucleotide
  Antisense strand to SEQ ID NO: 996240
uaauacaucguuguucaga

SEQ ID NO: 996242 - RNA, 19 nt, Artificial Sequence
  Description of Artificial Sequence: Synthetic oligonucleotide
  Sense strand starting at position 3769 of SEQ ID NO: 914335
uucucaggauucugugacu

SEQ ID NO: 996243 - RNA, 19 nt, Artificial Sequence
  Description of Artificial Sequence: Synthetic oligonucleotide
  Antisense strand to SEQ ID NO: 996242
agucacagaauccugagaa

SEQ ID NO: 996244 - RNA, 19 nt, Artificial Sequence
  Description of Artificial Sequence: Synthetic oligonucleotide
  Sense strand starting at position 3772 of SEQ ID NO: 914335
ucaggauucugugacuuga

SEQ ID NO: 996245 - RNA, 19 nt, Artificial Sequence
  Description of Artificial Sequence: Synthetic oligonucleotide
  Antisense strand to SEQ ID NO: 996244
ucaagucacagaauccuga

SEQ ID NO: 996246 - RNA, 19 nt, Artificial Sequence
  Description of Artificial Sequence: Synthetic oligonucleotide
  Sense strand starting at position 3774 of SEQ ID NO: 914335
aggauucugugacuugaug

SEQ ID NO: 996247 - RNA, 19 nt, Artificial Sequence
  Description of Artificial Sequence: Synthetic oligonucleotide
  Antisense strand to SEQ ID NO: 996246
caucaagucacagaauccu

SEQ ID NO: 996248 - RNA, 19 nt, Artificial Sequence
  Description of Artificial Sequence: Synthetic oligonucleotide
  Sense strand starting at position 3908 of SEQ ID NO: 914335
ugguaagaucuccggagca

SEQ ID NO: 996249 - RNA, 19 nt, Artificial Sequence
  Description of Artificial Sequence: Synthetic oligonucleotide
  Antisense strand to SEQ ID NO: 996248
ugcuccggagaucuuacca

SEQ ID NO: 996250 - RNA, 19 nt, Artificial Sequence
  Description of Artificial Sequence: Synthetic oligonucleotide
  Sense strand starting at position 23 of SEQ ID NO: 914336
augaaugaauccuuaugua

SEQ ID NO: 996251 - RNA, 19 nt, Artificial Sequence
  Description of Artificial Sequence: Synthetic oligonucleotide
  Antisense strand to SEQ ID NO: 996250
uacauaaggauucauucau

SEQ ID NO: 996252 - RNA, 19 nt, Artificial Sequence
  Description of Artificial Sequence: Synthetic oligonucleotide
  Sense strand starting at position 102 of SEQ ID NO: 914336
gagucacagcacugaucua

SEQ ID NO: 996253 - RNA, 19 nt, Artificial Sequence
  Description of Artificial Sequence: Synthetic oligonucleotide
  Antisense strand to SEQ ID NO: 996252
uagaucagugcugugacuc

SEQ ID NO: 996254 - RNA, 19 nt, Artificial Sequence
  Description of Artificial Sequence: Synthetic oligonucleotide
  Sense strand starting at position 176 of SEQ ID NO: 914336
cagcuugaagucuaauugu

SEQ ID NO: 996255 - RNA, 19 nt, Artificial Sequence
  Description of Artificial Sequence: Synthetic oligonucleotide
  Antisense strand to SEQ ID NO: 996254
acaauuagacuucaagcug

SEQ ID NO: 996256 - RNA, 19 nt, Artificial Sequence
  Description of Artificial Sequence: Synthetic oligonucleotide
  Sense strand starting at position 219 of SEQ ID NO: 914336
ugguguuaauuucucagca

SEQ ID NO: 996257 - RNA, 19 nt, Artificial Sequence
  Description of Artificial Sequence: Synthetic oligonucleotide
  Antisense strand to SEQ ID NO: 996256
ugcugagaaauuaacacca

SEQ ID NO: 996258 - RNA, 19 nt, Artificial Sequence
  Description of Artificial Sequence: Synthetic oligonucleotide
  Sense strand starting at position 223 of SEQ ID NO: 914336
guuaauuucucagcagguu

SEQ ID NO: 996259 - RNA, 19 nt, Artificial Sequence
  Description of Artificial Sequence: Synthetic oligonucleotide
  Antisense strand to SEQ ID NO: 996258
aaccugcugagaaauuaac

SEQ ID NO: 996260 - RNA, 19 nt, Artificial Sequence
  Description of Artificial Sequence: Synthetic oligonucleotide
  Sense strand starting at position 342 of SEQ ID NO: 914336
uaauguuuagggcaagauu

SEQ ID NO: 996261 - RNA, 19 nt, Artificial Sequence
  Description of Artificial Sequence: Synthetic oligonucleotide
  Antisense strand to SEQ ID NO: 996260
aaucuugcccuaaacauua

SEQ ID NO: 996262 - RNA, 19 nt, Artificial Sequence
  Description of Artificial Sequence: Synthetic oligonucleotide
  Sense strand starting at position 519 of SEQ ID NO: 914336
aggaguggccaggguuaaa

SEQ ID NO: 996263 - RNA, 19 nt, Artificial Sequence
  Description of Artificial Sequence: Synthetic oligonucleotide
  Antisense strand to SEQ ID NO: 996262
uuuaacccuggccacuccu

SEQ ID NO: 996264 - RNA, 19 nt, Artificial Sequence
  Description of Artificial Sequence: Synthetic oligonucleotide
  Sense strand starting at position 529 of SEQ ID NO: 914336
aggguuaaaggcuauagua

SEQ ID NO: 996265 - RNA, 19 nt, Artificial Sequence
  Description of Artificial Sequence: Synthetic oligonucleotide
  Antisense strand to SEQ ID NO: 996264
uacuauagccuuuaacccu

SEQ ID NO: 996266 - RNA, 19 nt, Artificial Sequence
  Description of Artificial Sequence: Synthetic oligonucleotide
  Sense strand starting at position 531 of SEQ ID NO: 914336
gguuaaaggcuauaguaag

SEQ ID NO: 996267 - RNA, 19 nt, Artificial Sequence
  Description of Artificial Sequence: Synthetic oligonucleotide
  Antisense strand to SEQ ID NO: 996266
cuuacuauagccuuuaacc

SEQ ID NO: 996268 - RNA, 19 nt, Artificial Sequence
  Description of Artificial Sequence: Synthetic oligonucleotide
  Sense strand starting at position 542 of SEQ ID NO: 914336
auaguaagucauggugaaa

SEQ ID NO: 996269 - RNA, 19 nt, Artificial Sequence
  Description of Artificial Sequence: Synthetic oligonucleotide
  Antisense strand to SEQ ID NO: 996268
uuucaccaugacuuacuau

SEQ ID NO: 996270 - RNA, 19 nt, Artificial Sequence
  Description of Artificial Sequence: Synthetic oligonucleotide
  Sense strand starting at position 630 of SEQ ID NO: 914336
gugggauagcuccaauuaa

SEQ ID NO: 996271 - RNA, 19 nt, Artificial Sequence
  Description of Artificial Sequence: Synthetic oligonucleotide
  Antisense strand to SEQ ID NO: 996270
uuaauuggagcuaucccac

SEQ ID NO: 996272 - RNA, 19 nt, Artificial Sequence
  Description of Artificial Sequence: Synthetic oligonucleotide
  Sense strand starting at position 905 of SEQ ID NO: 914336
acagcagagccauauuguu

SEQ ID NO: 996273 - RNA, 19 nt, Artificial Sequence
  Description of Artificial Sequence: Synthetic oligonucleotide
  Antisense strand to SEQ ID NO: 996272
aacaauauggcucugcugu

SEQ ID NO: 996274 - RNA, 19 nt, Artificial Sequence
  Description of Artificial Sequence: Synthetic oligonucleotide
  Sense strand starting at position 930 of SEQ ID NO: 914336
aguuaacaagcuggaauua

SEQ ID NO: 996275 - RNA, 19 nt, Artificial Sequence
  Description of Artificial Sequence: Synthetic oligonucleotide
  Antisense strand to SEQ ID NO: 996274
uaauuccagcuuguuaacu

SEQ ID NO: 996276 - RNA, 19 nt, Artificial Sequence
  Description of Artificial Sequence: Synthetic oligonucleotide
  Sense strand starting at position 968 of SEQ ID NO: 914336
agcagaugucaucaaaccu

SEQ ID NO: 996277 - RNA, 19 nt, Artificial Sequence
  Description of Artificial Sequence: Synthetic oligonucleotide
  Antisense strand to SEQ ID NO: 996276
agguuugaugacaucugcu

SEQ ID NO: 996278 - RNA, 19 nt, Artificial Sequence
  Description of Artificial Sequence: Synthetic oligonucleotide
  Sense strand starting at position 1081 of SEQ ID NO: 914336
uuguauaugccacaaguaa

SEQ ID NO: 996279 - RNA, 19 nt, Artificial Sequence
  Description of Artificial Sequence: Synthetic oligonucleotide
  Antisense strand to SEQ ID NO: 996278
uuacuuguggcauauacaa

SEQ ID NO: 996280 - RNA, 19 nt, Artificial Sequence
  Description of Artificial Sequence: Synthetic oligonucleotide
  Sense strand starting at position 1349 of SEQ ID NO: 914336
guuuguaggaauugaguau

SEQ ID NO: 996281 - RNA, 19 nt, Artificial Sequence
  Description of Artificial Sequence: Synthetic oligonucleotide
  Antisense strand to SEQ ID NO: 996280
auacucaauuccuacaaac

SEQ ID NO: 996282 - RNA, 19 nt, Artificial Sequence
  Description of Artificial Sequence: Synthetic oligonucleotide
  Sense strand starting at position 1353 of SEQ ID NO: 914336
guaggaauugaguauaagu

SEQ ID NO: 996283 - RNA, 19 nt, Artificial Sequence
  Description of Artificial Sequence: Synthetic oligonucleotide
  Antisense strand to SEQ ID NO: 996282
acuuauacucaauuccuac

SEQ ID NO: 996284 - RNA, 19 nt, Artificial Sequence
  Description of Artificial Sequence: Synthetic oligonucleotide
  Sense strand starting at position 1463 of SEQ ID NO: 914336
cucagauucugccuuagag

SEQ ID NO: 996285 - RNA, 19 nt, Artificial Sequence
  Description of Artificial Sequence: Synthetic oligonucleotide
  Antisense strand to SEQ ID NO: 996284
cucuaaggcagaaucugag

SEQ ID NO: 996286 - RNA, 19 nt, Artificial Sequence
  Description of Artificial Sequence: Synthetic oligonucleotide
  Sense strand starting at position 1607 of SEQ ID NO: 914336
gcuacaacugccgauauaa

SEQ ID NO: 996287 - RNA, 19 nt, Artificial Sequence
  Description of Artificial Sequence: Synthetic oligonucleotide
  Antisense strand to SEQ ID NO: 996286
uuauaucggcaguuguagc

SEQ ID NO: 996288 - RNA, 19 nt, Artificial Sequence
  Description of Artificial Sequence: Synthetic oligonucleotide
  Sense strand starting at position 1760 of SEQ ID NO: 914336
ucugcucuucuagaugauu

SEQ ID NO: 996289 - RNA, 19 nt, Artificial Sequence
  Description of Artificial Sequence: Synthetic oligonucleotide
  Antisense strand to SEQ ID NO: 996288
aaucaucuagaagagcaga

SEQ ID NO: 996290 - RNA, 19 nt, Artificial Sequence
  Description of Artificial Sequence: Synthetic oligonucleotide
  Sense strand starting at position 1925 of SEQ ID NO: 914336
cgggccacucuggagaaua

SEQ ID NO: 996291 - RNA, 19 nt, Artificial Sequence
  Description of Artificial Sequence: Synthetic oligonucleotide
  Antisense strand to SEQ ID NO: 996290
uauucuccagaguggcccg

SEQ ID NO: 996292 - RNA, 19 nt, Artificial Sequence
  Description of Artificial Sequence: Synthetic oligonucleotide
  Sense strand starting at position 1927 of SEQ ID NO: 914336
ggccacucuggagaauagu

SEQ ID NO: 996293 - RNA, 19 nt, Artificial Sequence
  Description of Artificial Sequence: Synthetic oligonucleotide
  Antisense strand to SEQ ID NO: 996292
acuauucuccagaguggcc

SEQ ID NO: 996294 - RNA, 19 nt, Artificial Sequence
  Description of Artificial Sequence: Synthetic oligonucleotide
  Sense strand starting at position 1998 of SEQ ID NO: 914336
uaaccugauuuauagguga

SEQ ID NO: 996295 - RNA, 19 nt, Artificial Sequence
  Description of Artificial Sequence: Synthetic oligonucleotide
  Antisense strand to SEQ ID NO: 996294
ucaccuauaaaucagguua

SEQ ID NO: 996296 - RNA, 19 nt, Artificial Sequence
  Description of Artificial Sequence: Synthetic oligonucleotide
  Sense strand starting at position 2087 of SEQ ID NO: 914336
ccuauccaauguguagaua

SEQ ID NO: 996297 - RNA, 19 nt, Artificial Sequence
  Description of Artificial Sequence: Synthetic oligonucleotide
  Antisense strand to SEQ ID NO: 996296
uaucuacacauuggauagg

SEQ ID NO: 996298 - RNA, 19 nt, Artificial Sequence
  Description of Artificial Sequence: Synthetic oligonucleotide
  Sense strand starting at position 2088 of SEQ ID NO: 914336
cuauccaauguguagauau

SEQ ID NO: 996299 - RNA, 19 nt, Artificial Sequence
  Description of Artificial Sequence: Synthetic oligonucleotide
  Antisense strand to SEQ ID NO: 996298
auaucuacacauuggauag

SEQ ID NO: 996300 - RNA, 19 nt, Artificial Sequence
  Description of Artificial Sequence: Synthetic oligonucleotide
  Sense strand starting at position 2191 of SEQ ID NO: 914336
ccauucuucuggguuauau

SEQ ID NO: 996301 - RNA, 19 nt, Artificial Sequence
  Description of Artificial Sequence: Synthetic oligonucleotide
  Antisense strand to SEQ ID NO: 996300
auauaacccagaagaaugg

SEQ ID NO: 996302 - RNA, 19 nt, Artificial Sequence
  Description of Artificial Sequence: Synthetic oligonucleotide
  Sense strand starting at position 2193 of SEQ ID NO: 914336
auucuucuggguuauauga

SEQ ID NO: 996303 - RNA, 19 nt, Artificial Sequence
  Description of Artificial Sequence: Synthetic oligonucleotide
  Antisense strand to SEQ ID NO: 996302
ucauauaacccagaagaau

SEQ ID NO: 996304 - RNA, 19 nt, Artificial Sequence
  Description of Artificial Sequence: Synthetic oligonucleotide
  Sense strand starting at position 2254 of SEQ ID NO: 914336
gcaaauauuggccaguauu

SEQ ID NO: 996305 - RNA, 19 nt, Artificial Sequence
  Description of Artificial Sequence: Synthetic oligonucleotide
  Antisense strand to SEQ ID NO: 996304
aauacuggccaauauuugc

SEQ ID NO: 996306 - RNA, 19 nt, Artificial Sequence
  Description of Artificial Sequence: Synthetic oligonucleotide
  Sense strand starting at position 2352 of SEQ ID NO: 914336
gccaguuggauuuagcagu

SEQ ID NO: 996307 - RNA, 19 nt, Artificial Sequence
  Description of Artificial Sequence: Synthetic oligonucleotide
  Antisense strand to SEQ ID NO: 996306
acugcuaaauccaacuggc

SEQ ID NO: 996308 - RNA, 19 nt, Artificial Sequence
  Description of Artificial Sequence: Synthetic oligonucleotide
  Sense strand starting at position 2385 of SEQ ID NO: 914336
cacgaauguggauguuaaa

SEQ ID NO: 996309 - RNA, 19 nt, Artificial Sequence
  Description of Artificial Sequence: Synthetic oligonucleotide
  Antisense strand to SEQ ID NO: 996308
uuuaacauccacauucgug

SEQ ID NO: 996310 - RNA, 19 nt, Artificial Sequence
  Description of Artificial Sequence: Synthetic oligonucleotide
  Sense strand starting at position 2745 of SEQ ID NO: 914336
ggaauuauagacugcugca

SEQ ID NO: 996311 - RNA, 19 nt, Artificial Sequence
  Description of Artificial Sequence: Synthetic oligonucleotide
  Antisense strand to SEQ ID NO: 996310
ugcagcagucuauaauucc

SEQ ID NO: 996312 - RNA, 19 nt, Artificial Sequence
  Description of Artificial Sequence: Synthetic oligonucleotide
  Sense strand starting at position 3197 of SEQ ID NO: 914336
cuguguuagaacugaugaa

SEQ ID NO: 996313 - RNA, 19 nt, Artificial Sequence
  Description of Artificial Sequence: Synthetic oligonucleotide
  Antisense strand to SEQ ID NO: 996312
uucaucaguucuaacacag

SEQ ID NO: 996314 - RNA, 19 nt, Artificial Sequence
  Description of Artificial Sequence: Synthetic oligonucleotide
  Sense strand starting at position 3211 of SEQ ID NO: 914336
augaaccugcauugauaca

SEQ ID NO: 996315 - RNA, 19 nt, Artificial Sequence
  Description of Artificial Sequence: Synthetic oligonucleotide
  Antisense strand to SEQ ID NO: 996314
uguaucaaugcagguucau

SEQ ID NO: 996316 - RNA, 19 nt, Artificial Sequence
  Description of Artificial Sequence: Synthetic oligonucleotide
  Sense strand starting at position 3331 of SEQ ID NO: 914336
ugugguaucacagaauagu

SEQ ID NO: 996317 - RNA, 19 nt, Artificial Sequence
  Description of Artificial Sequence: Synthetic oligonucleotide
  Antisense strand to SEQ ID NO: 996316
acuauucugugauaccaca

SEQ ID NO: 996318 - RNA, 19 nt, Artificial Sequence
  Description of Artificial Sequence: Synthetic oligonucleotide
  Sense strand starting at position 3406 of SEQ ID NO: 914336
cuugcaaccgcugauauuu

SEQ ID NO: 996319 - RNA, 19 nt, Artificial Sequence
  Description of Artificial Sequence: Synthetic oligonucleotide
  Antisense strand to SEQ ID NO: 996318
aaauaucagcgguugcaag

SEQ ID NO: 996320 - RNA, 19 nt, Artificial Sequence
  Description of Artificial Sequence: Synthetic oligonucleotide
  Sense strand starting at position 3415 of SEQ ID NO: 914336
gcugauauuucugucucca

SEQ ID NO: 996321 - RNA, 19 nt, Artificial Sequence
  Description of Artificial Sequence: Synthetic oligonucleotide
  Antisense strand to SEQ ID NO: 996320
uggagacagaaauaucagc

SEQ ID NO: 996322 - RNA, 19 nt, Artificial Sequence
  Description of Artificial Sequence: Synthetic oligonucleotide
  Sense strand starting at position 3452 of SEQ ID NO: 914336
aaugucagauaguuguuaa

SEQ ID NO: 996323 - RNA, 19 nt, Artificial Sequence
  Description of Artificial Sequence: Synthetic oligonucleotide
  Antisense strand to SEQ ID NO: 996322
uuaacaacuaucugacauu

SEQ ID NO: 996324 - RNA, 19 nt, Artificial Sequence
  Description of Artificial Sequence: Synthetic oligonucleotide
  Sense strand starting at position 3867 of SEQ ID NO: 914336
cuucucauggcuugaaauc

SEQ ID NO: 996325 - RNA, 19 nt, Artificial Sequence
  Description of Artificial Sequence: Synthetic oligonucleotide
  Antisense strand to SEQ ID NO: 996324
gauuucaagccaugagaag

SEQ ID NO: 996326 - RNA, 19 nt, Artificial Sequence
  Description of Artificial Sequence: Synthetic oligonucleotide
  Sense strand starting at position 3868 of SEQ ID NO: 914336
uucucauggcuugaaaucu

SEQ ID NO: 996327 - RNA, 19 nt, Artificial Sequence
  Description of Artificial Sequence: Synthetic oligonucleotide
  Antisense strand to SEQ ID NO: 996326
agauuucaagccaugagaa

SEQ ID NO: 996328 - RNA, 19 nt, Artificial Sequence
  Description of Artificial Sequence: Synthetic oligonucleotide
  Sense strand starting at position 3956 of SEQ ID NO: 914336
aaggaaaucuuaguugccu

SEQ ID NO: 996329 - RNA, 19 nt, Artificial Sequence
  Description of Artificial Sequence: Synthetic oligonucleotide
  Antisense strand to SEQ ID NO: 996328
aggcaacuaagauuuccuu

SEQ ID NO: 996330 - RNA, 19 nt, Artificial Sequence
  Description of Artificial Sequence: Synthetic oligonucleotide
  Sense strand starting at position 63 of SEQ ID NO: 914337
gauagcaagcccugaaagu

SEQ ID NO: 996331 - RNA, 19 nt, Artificial Sequence
  Description of Artificial Sequence: Synthetic oligonucleotide
  Antisense strand to SEQ ID NO: 996330
acuuucagggcuugcuauc

SEQ ID NO: 996332 - RNA, 19 nt, Artificial Sequence
  Description of Artificial Sequence: Synthetic oligonucleotide
  Sense strand starting at position 110 of SEQ ID NO: 914337
ucgccauaucuugaaauag

SEQ ID NO: 996333 - RNA, 19 nt, Artificial Sequence
  Description of Artificial Sequence: Synthetic oligonucleotide
  Antisense strand to SEQ ID NO: 996332
cuauuucaagauauggcga

SEQ ID NO: 996334 - RNA, 19 nt, Artificial Sequence
  Description of Artificial Sequence: Synthetic oligonucleotide
  Sense strand starting at position 276 of SEQ ID NO: 914337
ggagacuuccucugccuaa

SEQ ID NO: 996335 - RNA, 19 nt, Artificial Sequence
  Description of Artificial Sequence: Synthetic oligonucleotide
  Antisense strand to SEQ ID NO: 996334
uuaggcagaggaagucucc

SEQ ID NO: 996336 - RNA, 19 nt, Artificial Sequence
  Description of Artificial Sequence: Synthetic oligonucleotide
  Sense strand starting at position 294 of SEQ ID NO: 914337
agggaaaucuuggucuccu

SEQ ID NO: 996337 - RNA, 19 nt, Artificial Sequence
  Description of Artificial Sequence: Synthetic oligonucleotide
  Antisense strand to SEQ ID NO: 996336
aggagaccaagauuucccu

SEQ ID NO: 996338 - RNA, 19 nt, Artificial Sequence
  Description of Artificial Sequence: Synthetic oligonucleotide
  Sense strand starting at position 295 of SEQ ID NO: 914337
gggaaaucuuggucuccuc

SEQ ID NO: 996339 - RNA, 19 nt, Artificial Sequence
  Description of Artificial Sequence: Synthetic oligonucleotide
  Antisense strand to SEQ ID NO: 996338
gaggagaccaagauuuccc

SEQ ID NO: 996340 - RNA, 19 nt, Artificial Sequence
  Description of Artificial Sequence: Synthetic oligonucleotide
  Sense strand starting at position 713 of SEQ ID NO: 914337
auuccagguguuuggacaa

SEQ ID NO: 996341 - RNA, 19 nt, Artificial Sequence
  Description of Artificial Sequence: Synthetic oligonucleotide
  Antisense strand to SEQ ID NO: 996340
uuguccaaacaccuggaau

SEQ ID NO: 996342 - RNA, 19 nt, Artificial Sequence
  Description of Artificial Sequence: Synthetic oligonucleotide
  Sense strand starting at position 836 of SEQ ID NO: 914337
augucuuguauguacugau

SEQ ID NO: 996343 - RNA, 19 nt, Artificial Sequence
  Description of Artificial Sequence: Synthetic oligonucleotide
  Antisense strand to SEQ ID NO: 996342
aucaguacauacaagacau

SEQ ID NO: 996344 - RNA, 19 nt, Artificial Sequence
  Description of Artificial Sequence: Synthetic oligonucleotide
  Sense strand starting at position 843 of SEQ ID NO: 914337
guauguacugauugacauc

SEQ ID NO: 996345 - RNA, 19 nt, Artificial Sequence
  Description of Artificial Sequence: Synthetic oligonucleotide
  Antisense strand to SEQ ID NO: 996344
gaugucaaucaguacauac

SEQ ID NO: 996346 - RNA, 19 nt, Artificial Sequence
  Description of Artificial Sequence: Synthetic oligonucleotide
  Sense strand starting at position 860 of SEQ ID NO: 914337
ucuuaugucucuccagaag

SEQ ID NO: 996347 - RNA, 19 nt, Artificial Sequence
  Description of Artificial Sequence: Synthetic oligonucleotide
  Antisense strand to SEQ ID NO: 996346
cuucuggagagacauaaga

SEQ ID NO: 996348 - RNA, 19 nt, Artificial Sequence
  Description of Artificial Sequence: Synthetic oligonucleotide
  Sense strand starting at position 896 of SEQ ID NO: 914337
ucccaagagcuguaucaga

SEQ ID NO: 996349 - RNA, 19 nt, Artificial Sequence
  Description of Artificial Sequence: Synthetic oligonucleotide
  Antisense strand to SEQ ID NO: 996348
ucugauacagcucuuggga

SEQ ID NO: 996350 - RNA, 19 nt, Artificial Sequence
  Description of Artificial Sequence: Synthetic oligonucleotide
  Sense strand starting at position 1070 of SEQ ID NO: 914337
ucuauuuauucugaagaag

SEQ ID NO: 996351 - RNA, 19 nt, Artificial Sequence
  Description of Artificial Sequence: Synthetic oligonucleotide
  Antisense strand to SEQ ID NO: 996350
cuucuucagaauaaauaga

SEQ ID NO: 996352 - RNA, 19 nt, Artificial Sequence
  Description of Artificial Sequence: Synthetic oligonucleotide
  Sense strand starting at position 1087 of SEQ ID NO: 914337
aggagcuugaccugacuca

SEQ ID NO: 996353 - RNA, 19 nt, Artificial Sequence
  Description of Artificial Sequence: Synthetic oligonucleotide
  Antisense strand to SEQ ID NO: 996352
ugagucaggucaagcuccu

SEQ ID NO: 996354 - RNA, 19 nt, Artificial Sequence
  Description of Artificial Sequence: Synthetic oligonucleotide
  Sense strand starting at position 1127 of SEQ ID NO: 914337
cacauuuaccugcguugaa

SEQ ID NO: 996355 - RNA, 19 nt, Artificial Sequence
  Description of Artificial Sequence: Synthetic oligonucleotide
  Antisense strand to SEQ ID NO: 996354
uucaacgcagguaaaugug

SEQ ID NO: 996356 - RNA, 19 nt, Artificial Sequence
  Description of Artificial Sequence: Synthetic oligonucleotide
  Sense strand starting at position 1128 of SEQ ID NO: 914337
acauuuaccugcguugaac

SEQ ID NO: 996357 - RNA, 19 nt, Artificial Sequence
  Description of Artificial Sequence: Synthetic oligonucleotide
  Antisense strand to SEQ ID NO: 996356
guucaacgcagguaaaugu

SEQ ID NO: 996358 - RNA, 19 nt, Artificial Sequence
  Description of Artificial Sequence: Synthetic oligonucleotide
  Sense strand starting at position 1623 of SEQ ID NO: 914337
gccgaaggaggaugucuau

SEQ ID NO: 996359 - RNA, 19 nt, Artificial Sequence
  Description of Artificial Sequence: Synthetic oligonucleotide
  Antisense strand to SEQ ID NO: 996358
auagacauccuccuucggc

SEQ ID NO: 996360 - RNA, 19 nt, Artificial Sequence
  Description of Artificial Sequence: Synthetic oligonucleotide
  Sense strand starting at position 1638 of SEQ ID NO: 914337
cuauuucgccuucgggaaa

SEQ ID NO: 996361 - RNA, 19 nt, Artificial Sequence
  Description of Artificial Sequence: Synthetic oligonucleotide
  Antisense strand to SEQ ID NO: 996360
uuucccgaaggcgaaauag

SEQ ID NO: 996362 - RNA, 19 nt, Artificial Sequence
  Description of Artificial Sequence: Synthetic oligonucleotide
  Sense strand starting at position 2075 of SEQ ID NO: 914337
uuuguaauugcagauugaa

SEQ ID NO: 996363 - RNA, 19 nt, Artificial Sequence
  Description of Artificial Sequence: Synthetic oligonucleotide
  Antisense strand to SEQ ID NO: 996362
uucaaucugcaauuacaaa

SEQ ID NO: 996364 - RNA, 19 nt, Artificial Sequence
  Description of Artificial Sequence: Synthetic oligonucleotide
  Sense strand starting at position 2437 of SEQ ID NO: 914337
ccaggcaaacugugauuga

SEQ ID NO: 996365 - RNA, 19 nt, Artificial Sequence
  Description of Artificial Sequence: Synthetic oligonucleotide
  Antisense strand to SEQ ID NO: 996364
ucaaucacaguuugccugg

SEQ ID NO: 996366 - RNA, 19 nt, Artificial Sequence
  Description of Artificial Sequence: Synthetic oligonucleotide
  Sense strand starting at position 2440 of SEQ ID NO: 914337
ggcaaacugugauugaucu

SEQ ID NO: 996367 - RNA, 19 nt, Artificial Sequence
  Description of Artificial Sequence: Synthetic oligonucleotide
  Antisense strand to SEQ ID NO: 996366
agaucaaucacaguuugcc

SEQ ID NO: 996368 - RNA, 19 nt, Artificial Sequence
  Description of Artificial Sequence: Synthetic oligonucleotide
  Sense strand starting at position 2451 of SEQ ID NO: 914337
auugaucuccuguggauag

SEQ ID NO: 996369 - RNA, 19 nt, Artificial Sequence
  Description of Artificial Sequence: Synthetic oligonucleotide
  Antisense strand to SEQ ID NO: 996368
cuauccacaggagaucaau

SEQ ID NO: 996370 - RNA, 19 nt, Artificial Sequence
  Description of Artificial Sequence: Synthetic oligonucleotide
  Sense strand starting at position 2513 of SEQ ID NO: 914337
uuuaccacucuugggaauu

SEQ ID NO: 996371 - RNA, 19 nt, Artificial Sequence
  Description of Artificial Sequence: Synthetic oligonucleotide
  Antisense strand to SEQ ID NO: 996370
aauucccaagagugguaaa

SEQ ID NO: 996372 - RNA, 19 nt, Artificial Sequence
  Description of Artificial Sequence: Synthetic oligonucleotide
  Sense strand starting at position 2525 of SEQ ID NO: 914337
gggaauucccuuuacuccu

SEQ ID NO: 996373 - RNA, 19 nt, Artificial Sequence
  Description of Artificial Sequence: Synthetic oligonucleotide
  Antisense strand to SEQ ID NO: 996372
aggaguaaagggaauuccc

SEQ ID NO: 996374 - RNA, 19 nt, Artificial Sequence
  Description of Artificial Sequence: Synthetic oligonucleotide
  Sense strand starting at position 2643 of SEQ ID NO: 914337
agugaccuauuguuagaga

SEQ ID NO: 996375 - RNA, 19 nt, Artificial Sequence
  Description of Artificial Sequence: Synthetic oligonucleotide
  Antisense strand to SEQ ID NO: 996374
ucucuaacaauaggucacu

SEQ ID NO: 996376 - RNA, 19 nt, Artificial Sequence
  Description of Artificial Sequence: Synthetic oligonucleotide
  Sense strand starting at position 2740 of SEQ ID NO: 914337
ggguugaguuccuucggga

SEQ ID NO: 996377 - RNA, 19 nt, Artificial Sequence
  Description of Artificial Sequence: Synthetic oligonucleotide
  Antisense strand to SEQ ID NO: 996376
ucccgaaggaacucaaccc

SEQ ID NO: 996378 - RNA, 19 nt, Artificial Sequence
  Description of Artificial Sequence: Synthetic oligonucleotide
  Sense strand starting at position 2965 of SEQ ID NO: 914337
aaggaagucccuugggaug

SEQ ID NO: 996379 - RNA, 19 nt, Artificial Sequence
  Description of Artificial Sequence: Synthetic oligonucleotide
  Antisense strand to SEQ ID NO: 996378
caucccaagggacuuccuu

SEQ ID NO: 996380 - RNA, 19 nt, Artificial Sequence
  Description of Artificial Sequence: Synthetic oligonucleotide
  Sense strand starting at position 2970 of SEQ ID NO: 914337
agucccuugggaugacauu

SEQ ID NO: 996381 - RNA, 19 nt, Artificial Sequence
  Description of Artificial Sequence: Synthetic oligonucleotide
  Antisense strand to SEQ ID NO: 996380
aaugucaucccaagggacu

SEQ ID NO: 996382 - RNA, 19 nt, Artificial Sequence
  Description of Artificial Sequence: Synthetic oligonucleotide
  Sense strand starting at position 3072 of SEQ ID NO: 914337
guguucacagguggagauu

SEQ ID NO: 996383 - RNA, 19 nt, Artificial Sequence
  Description of Artificial Sequence: Synthetic oligonucleotide
  Antisense strand to SEQ ID NO: 996382
aaucuccaccugugaacac

SEQ ID NO: 996384 - RNA, 19 nt, Artificial Sequence
  Description of Artificial Sequence: Synthetic oligonucleotide
  Sense strand starting at position 3083 of SEQ ID NO: 914337
uggagauucggaugugaca

SEQ ID NO: 996385 - RNA, 19 nt, Artificial Sequence
  Description of Artificial Sequence: Synthetic oligonucleotide
  Antisense strand to SEQ ID NO: 996384
ugucacauccgaaucucca

SEQ ID NO: 996386 - RNA, 19 nt, Artificial Sequence
  Description of Artificial Sequence: Synthetic oligonucleotide
  Sense strand starting at position 3290 of SEQ ID NO: 914337
uuuccugauugaucuggaa

SEQ ID NO: 996387 - RNA, 19 nt, Artificial Sequence
  Description of Artificial Sequence: Synthetic oligonucleotide
  Antisense strand to SEQ ID NO: 996386
uuccagaucaaucaggaaa

SEQ ID NO: 996388 - RNA, 19 nt, Artificial Sequence
  Description of Artificial Sequence: Synthetic oligonucleotide
  Sense strand starting at position 3305 of SEQ ID NO: 914337
ggaauucagugaucuggcu

SEQ ID NO: 996389 - RNA, 19 nt, Artificial Sequence
  Description of Artificial Sequence: Synthetic oligonucleotide
  Antisense strand to SEQ ID NO: 996388
agccagaucacugaauucc

SEQ ID NO: 996390 - RNA, 19 nt, Artificial Sequence
  Description of Artificial Sequence: Synthetic oligonucleotide
  Sense strand starting at position 3357 of SEQ ID NO: 914337
guagaauguugguuuccau

SEQ ID NO: 996391 - RNA, 19 nt, Artificial Sequence
  Description of Artificial Sequence: Synthetic oligonucleotide
  Antisense strand to SEQ ID NO: 996390
auggaaaccaacauucuac

SEQ ID NO: 996392 - RNA, 19 nt, Artificial Sequence
  Description of Artificial Sequence: Synthetic oligonucleotide
  Sense strand starting at position 3475 of SEQ ID NO: 914337
auaaacuucuggucuuuga

SEQ ID NO: 996393 - RNA, 19 nt, Artificial Sequence
  Description of Artificial Sequence: Synthetic oligonucleotide
  Antisense strand to SEQ ID NO: 996392
ucaaagaccagaaguuuau

SEQ ID NO: 996394 - RNA, 19 nt, Artificial Sequence
  Description of Artificial Sequence: Synthetic oligonucleotide
  Sense strand starting at position 3478 of SEQ ID NO: 914337
aacuucuggucuuugagga

SEQ ID NO: 996395 - RNA, 19 nt, Artificial Sequence
  Description of Artificial Sequence: Synthetic oligonucleotide
  Antisense strand to SEQ ID NO: 996394
uccucaaagaccagaaguu

SEQ ID NO: 996396 - RNA, 19 nt, Artificial Sequence
  Description of Artificial Sequence: Synthetic oligonucleotide
  Sense strand starting at position 3539 of SEQ ID NO: 914337
gaaggaaucuggcuaacuc

SEQ ID NO: 996397 - RNA, 19 nt, Artificial Sequence
  Description of Artificial Sequence: Synthetic oligonucleotide
  Antisense strand to SEQ ID NO: 996396
gaguuagccagauuccuuc

SEQ ID NO: 996398 - RNA, 19 nt, Artificial Sequence
  Description of Artificial Sequence: Synthetic oligonucleotide
  Sense strand starting at position 3549 of SEQ ID NO: 914337
ggcuaacuccucuguagac

SEQ ID NO: 996399 - RNA, 19 nt, Artificial Sequence
  Description of Artificial Sequence: Synthetic oligonucleotide
  Antisense strand to SEQ ID NO: 996398
gucuacagaggaguuagcc

SEQ ID NO: 996400 - RNA, 19 nt, Artificial Sequence
  Description of Artificial Sequence: Synthetic oligonucleotide
  Sense strand starting at position 3592 of SEQ ID NO: 914337
uggauuaaggauuguauuc

SEQ ID NO: 996401 - RNA, 19 nt, Artificial Sequence
  Description of Artificial Sequence: Synthetic oligonucleotide
  Antisense strand to SEQ ID NO: 996400
gaauacaauccuuaaucca

SEQ ID NO: 996402 - RNA, 19 nt, Artificial Sequence
  Description of Artificial Sequence: Synthetic oligonucleotide
  Sense strand starting at position 3609 of SEQ ID NO: 914337
ucaacugucccugacgaaa

SEQ ID NO: 996403 - RNA, 19 nt, Artificial Sequence
  Description of Artificial Sequence: Synthetic oligonucleotide
  Antisense strand to SEQ ID NO: 996402
uuucgucagggacaguuga

SEQ ID NO: 996404 - RNA, 19 nt, Artificial Sequence
  Description of Artificial Sequence: Synthetic oligonucleotide
  Sense strand starting at position 3638 of SEQ ID NO: 914337
gugguuuaaccagauaacu

SEQ ID NO: 996405 - RNA, 19 nt, Artificial Sequence
  Description of Artificial Sequence: Synthetic oligonucleotide
  Antisense strand to SEQ ID NO: 996404
aguuaucugguuaaaccac

SEQ ID NO: 996406 - RNA, 19 nt, Artificial Sequence
  Description of Artificial Sequence: Synthetic oligonucleotide
  Sense strand starting at position 3903 of SEQ ID NO: 914337
aggaaagcucucuagcuuu

SEQ ID NO: 996407 - RNA, 19 nt, Artificial Sequence
  Description of Artificial Sequence: Synthetic oligonucleotide
  Antisense strand to SEQ ID NO: 996406
aaagcuagagagcuuuccu

SEQ ID NO: 996408 - RNA, 19 nt, Artificial Sequence
  Description of Artificial Sequence: Synthetic oligonucleotide
  Sense strand starting at position 3911 of SEQ ID NO: 914337
ucucuagcuuuccuagaag

SEQ ID NO: 996409 - RNA, 19 nt, Artificial Sequence
  Description of Artificial Sequence: Synthetic oligonucleotide
  Antisense strand to SEQ ID NO: 996408
cuucuaggaaagcuagaga

SEQ ID NO: 996410 - RNA, 19 nt, Artificial Sequence
  Description of Artificial Sequence: Synthetic oligonucleotide
  Sense strand starting at position 113 of SEQ ID NO: 914338
uccacaauuugauaggaag

SEQ ID NO: 996411 - RNA, 19 nt, Artificial Sequence
  Description of Artificial Sequence: Synthetic oligonucleotide
  Antisense strand to SEQ ID NO: 996410
cuuccuaucaaauugugga

SEQ ID NO: 996412 - RNA, 19 nt, Artificial Sequence
  Description of Artificial Sequence: Synthetic oligonucleotide
  Sense strand starting at position 116 of SEQ ID NO: 914338
acaauuugauaggaagcaa

SEQ ID NO: 996413 - RNA, 19 nt, Artificial Sequence
  Description of Artificial Sequence: Synthetic oligonucleotide
  Antisense strand to SEQ ID NO: 996412
uugcuuccuaucaaauugu

SEQ ID NO: 996414 - RNA, 19 nt, Artificial Sequence
  Description of Artificial Sequence: Synthetic oligonucleotide
  Sense strand starting at position 234 of SEQ ID NO: 914338
guuacuuucgaauauucca

SEQ ID NO: 996415 - RNA, 19 nt, Artificial Sequence
  Description of Artificial Sequence: Synthetic oligonucleotide
  Antisense strand to SEQ ID NO: 996414
uggaauauucgaaaguaac

SEQ ID NO: 996416 - RNA, 19 nt, Artificial Sequence
  Description of Artificial Sequence: Synthetic oligonucleotide
  Sense strand starting at position 265 of SEQ ID NO: 914338
aaguaaacuuccuucgaga

SEQ ID NO: 996417 - RNA, 19 nt, Artificial Sequence
  Description of Artificial Sequence: Synthetic oligonucleotide
  Antisense strand to SEQ ID NO: 996416
ucucgaaggaaguuuacuu

SEQ ID NO: 996418 - RNA, 19 nt, Artificial Sequence
  Description of Artificial Sequence: Synthetic oligonucleotide
  Sense strand starting at position 376 of SEQ ID NO: 914338
agauuaaaguuagcuauga

SEQ ID NO: 996419 - RNA, 19 nt, Artificial Sequence
  Description of Artificial Sequence: Synthetic oligonucleotide
  Antisense strand to SEQ ID NO: 996418
ucauagcuaacuuuaaucu

SEQ ID NO: 996420 - RNA, 19 nt, Artificial Sequence
  Description of Artificial Sequence: Synthetic oligonucleotide
  Sense strand starting at position 377 of SEQ ID NO: 914338
gauuaaaguuagcuaugaa

SEQ ID NO: 996421 - RNA, 19 nt, Artificial Sequence
  Description of Artificial Sequence: Synthetic oligonucleotide
  Antisense strand to SEQ ID NO: 996420
uucauagcuaacuuuaauc

SEQ ID NO: 996422 - RNA, 19 nt, Artificial Sequence
  Description of Artificial Sequence: Synthetic oligonucleotide
  Sense strand starting at position 483 of SEQ ID NO: 914338
gacuucuccugagcugaua

SEQ ID NO: 996423 - RNA, 19 nt, Artificial Sequence
  Description of Artificial Sequence: Synthetic oligonucleotide
  Antisense strand to SEQ ID NO: 996422
uaucagcucaggagaaguc

SEQ ID NO: 996424 - RNA, 19 nt, Artificial Sequence
  Description of Artificial Sequence: Synthetic oligonucleotide
  Sense strand starting at position 486 of SEQ ID NO: 914338
uucuccugagcugauaaau

SEQ ID NO: 996425 - RNA, 19 nt, Artificial Sequence
  Description of Artificial Sequence: Synthetic oligonucleotide
  Antisense strand to SEQ ID NO: 996424
auuuaucagcucaggagaa

SEQ ID NO: 996426 - RNA, 19 nt, Artificial Sequence
  Description of Artificial Sequence: Synthetic oligonucleotide
  Sense strand starting at position 802 of SEQ ID NO: 914338
aaaugcuacgcugaauuga

SEQ ID NO: 996427 - RNA, 19 nt, Artificial Sequence
  Description of Artificial Sequence: Synthetic oligonucleotide
  Antisense strand to SEQ ID NO: 996426
ucaauucagcguagcauuu

SEQ ID NO: 996428 - RNA, 19 nt, Artificial Sequence
  Description of Artificial Sequence: Synthetic oligonucleotide
  Sense strand starting at position 943 of SEQ ID NO: 914338
ggucguuccacugccagua

SEQ ID NO: 996429 - RNA, 19 nt, Artificial Sequence
  Description of Artificial Sequence: Synthetic oligonucleotide
  Antisense strand to SEQ ID NO: 996428
uacuggcaguggaacgacc

SEQ ID NO: 996430 - RNA, 19 nt, Artificial Sequence
  Description of Artificial Sequence: Synthetic oligonucleotide
  Sense strand starting at position 963 of SEQ ID NO: 914338
gaagacagucgugaaccau

SEQ ID NO: 996431 - RNA, 19 nt, Artificial Sequence
  Description of Artificial Sequence: Synthetic oligonucleotide
  Antisense strand to SEQ ID NO: 996430
augguucacgacugucuuc

SEQ ID NO: 996432 - RNA, 19 nt, Artificial Sequence
  Description of Artificial Sequence: Synthetic oligonucleotide
  Sense strand starting at position 1046 of SEQ ID NO: 914338
agcaaaucuugauugaaug

SEQ ID NO: 996433 - RNA, 19 nt, Artificial Sequence
  Description of Artificial Sequence: Synthetic oligonucleotide
  Antisense strand to SEQ ID NO: 996432
cauucaaucaagauuugcu

SEQ ID NO: 996434 - RNA, 19 nt, Artificial Sequence
  Description of Artificial Sequence: Synthetic oligonucleotide
  Sense strand starting at position 1047 of SEQ ID NO: 914338
gcaaaucuugauugaauga

SEQ ID NO: 996435 - RNA, 19 nt, Artificial Sequence
  Description of Artificial Sequence: Synthetic oligonucleotide
  Antisense strand to SEQ ID NO: 996434
ucauucaaucaagauuugc

SEQ ID NO: 996436 - RNA, 19 nt, Artificial Sequence
  Description of Artificial Sequence: Synthetic oligonucleotide
  Sense strand starting at position 2189 of SEQ ID NO: 914338
gcaaucagacuuugacauc

SEQ ID NO: 996437 - RNA, 19 nt, Artificial Sequence
  Description of Artificial Sequence: Synthetic oligonucleotide
  Antisense strand to SEQ ID NO: 996436
gaugucaaagucugauugc

SEQ ID NO: 996438 - RNA, 19 nt, Artificial Sequence
  Description of Artificial Sequence: Synthetic oligonucleotide
  Sense strand starting at position 2290 of SEQ ID NO: 914338
augugucuggucuuccgua

SEQ ID NO: 996439 - RNA, 19 nt, Artificial Sequence
  Description of Artificial Sequence: Synthetic oligonucleotide
  Antisense strand to SEQ ID NO: 996438
uacggaagaccagacacau

SEQ ID NO: 996440 - RNA, 19 nt, Artificial Sequence
  Description of Artificial Sequence: Synthetic oligonucleotide
  Sense strand starting at position 2336 of SEQ ID NO: 914338
gaguucuuggagugaggga

SEQ ID NO: 996441 - RNA, 19 nt, Artificial Sequence
  Description of Artificial Sequence: Synthetic oligonucleotide
  Antisense strand to SEQ ID NO: 996440
ucccucacuccaagaacuc

SEQ ID NO: 996442 - RNA, 19 nt, Artificial Sequence
  Description of Artificial Sequence: Synthetic oligonucleotide
  Sense strand starting at position 2461 of SEQ ID NO: 914338
guuagacugguuugaacac

SEQ ID NO: 996443 - RNA, 19 nt, Artificial Sequence
  Description of Artificial Sequence: Synthetic oligonucleotide
  Antisense strand to SEQ ID NO: 996442
guguucaaaccagucuaac

SEQ ID NO: 996444 - RNA, 19 nt, Artificial Sequence
  Description of Artificial Sequence: Synthetic oligonucleotide
  Sense strand starting at position 2484 of SEQ ID NO: 914338
gcaucuguccuguauuugu

SEQ ID NO: 996445 - RNA, 19 nt, Artificial Sequence
  Description of Artificial Sequence: Synthetic oligonucleotide
  Antisense strand to SEQ ID NO: 996444
acaaauacaggacagaugc

SEQ ID NO: 996446 - RNA, 19 nt, Artificial Sequence
  Description of Artificial Sequence: Synthetic oligonucleotide
  Sense strand starting at position 2511 of SEQ ID NO: 914338
accagaagucuuuggauaa

SEQ ID NO: 996447 - RNA, 19 nt, Artificial Sequence
  Description of Artificial Sequence: Synthetic oligonucleotide
  Antisense strand to SEQ ID NO: 996446
uuauccaaagacuucuggu

SEQ ID NO: 996448 - RNA, 19 nt, Artificial Sequence
  Description of Artificial Sequence: Synthetic oligonucleotide
  Sense strand starting at position 2558 of SEQ ID NO: 914338
gugguuaugacauauguca

SEQ ID NO: 996449 - RNA, 19 nt, Artificial Sequence
  Description of Artificial Sequence: Synthetic oligonucleotide
  Antisense strand to SEQ ID NO: 996448
ugacauaugucauaaccac

SEQ ID NO: 996450 - RNA, 19 nt, Artificial Sequence
  Description of Artificial Sequence: Synthetic oligonucleotide
  Sense strand starting at position 2586 of SEQ ID NO: 914338
uggccuauauaguuagaag

SEQ ID NO: 996451 - RNA, 19 nt, Artificial Sequence
  Description of Artificial Sequence: Synthetic oligonucleotide
  Antisense strand to SEQ ID NO: 996450
cuucuaacuauauaggcca

SEQ ID NO: 996452 - RNA, 19 nt, Artificial Sequence
  Description of Artificial Sequence: Synthetic oligonucleotide
  Sense strand starting at position 2657 of SEQ ID NO: 914338
gguguucucaauugaaaug

SEQ ID NO: 996453 - RNA, 19 nt, Artificial Sequence
  Description of Artificial Sequence: Synthetic oligonucleotide
  Antisense strand to SEQ ID NO: 996452
cauuucaauugagaacacc

SEQ ID NO: 996454 - RNA, 19 nt, Artificial Sequence
  Description of Artificial Sequence: Synthetic oligonucleotide
  Sense strand starting at position 2743 of SEQ ID NO: 914338
agccaugaguuaguggaga

SEQ ID NO: 996455 - RNA, 19 nt, Artificial Sequence
  Description of Artificial Sequence: Synthetic oligonucleotide
  Antisense strand to SEQ ID NO: 996454
ucuccacuaacucauggcu

SEQ ID NO: 996456 - RNA, 19 nt, Artificial Sequence
  Description of Artificial Sequence: Synthetic oligonucleotide
  Sense strand starting at position 2745 of SEQ ID NO: 914338
ccaugaguuaguggagaaa

SEQ ID NO: 996457 - RNA, 19 nt, Artificial Sequence
  Description of Artificial Sequence: Synthetic oligonucleotide
  Antisense strand to SEQ ID NO: 996456
uuucuccacuaacucaugg

SEQ ID NO: 996458 - RNA, 19 nt, Artificial Sequence
  Description of Artificial Sequence: Synthetic oligonucleotide
  Sense strand starting at position 2845 of SEQ ID NO: 914338
acuuuaaagucuuugguag

SEQ ID NO: 996459 - RNA, 19 nt, Artificial Sequence
  Description of Artificial Sequence: Synthetic oligonucleotide
  Antisense strand to SEQ ID NO: 996458
cuaccaaagacuuuaaagu

SEQ ID NO: 996460 - RNA, 19 nt, Artificial Sequence
  Description of Artificial Sequence: Synthetic oligonucleotide
  Sense strand starting at position 2904 of SEQ ID NO: 914338
uuauaaauggcagagccau

SEQ ID NO: 996461 - RNA, 19 nt, Artificial Sequence
  Description of Artificial Sequence: Synthetic oligonucleotide
  Antisense strand to SEQ ID NO: 996460
auggcucugccauuuauaa

SEQ ID NO: 996462 - RNA, 19 nt, Artificial Sequence
  Description of Artificial Sequence: Synthetic oligonucleotide
  Sense strand starting at position 2918 of SEQ ID NO: 914338
gccauuuaacugugguuag

SEQ ID NO: 996463 - RNA, 19 nt, Artificial Sequence
  Description of Artificial Sequence: Synthetic oligonucleotide
  Antisense strand to SEQ ID NO: 996462
cuaaccacaguuaaauggc

SEQ ID NO: 996464 - RNA, 19 nt, Artificial Sequence
  Description of Artificial Sequence: Synthetic oligonucleotide
  Sense strand starting at position 2942 of SEQ ID NO: 914338
ggauucugauacuuucuua

SEQ ID NO: 996465 - RNA, 19 nt, Artificial Sequence
  Description of Artificial Sequence: Synthetic oligonucleotide
  Antisense strand to SEQ ID NO: 996464
uaagaaaguaucagaaucc

SEQ ID NO: 996466 - RNA, 19 nt, Artificial Sequence
  Description of Artificial Sequence: Synthetic oligonucleotide
  Sense strand starting at position 3041 of SEQ ID NO: 914338
uggcuauaccaauaacagu

SEQ ID NO: 996467 - RNA, 19 nt, Artificial Sequence
  Description of Artificial Sequence: Synthetic oligonucleotide
  Antisense strand to SEQ ID NO: 996466
acuguuauugguauagcca

SEQ ID NO: 996468 - RNA, 19 nt, Artificial Sequence
  Description of Artificial Sequence: Synthetic oligonucleotide
  Sense strand starting at position 3138 of SEQ ID NO: 914338
auacuugauguccauguau

SEQ ID NO: 996469 - RNA, 19 nt, Artificial Sequence
  Description of Artificial Sequence: Synthetic oligonucleotide
  Antisense strand to SEQ ID NO: 996468
auacauggacaucaaguau

SEQ ID NO: 996470 - RNA, 19 nt, Artificial Sequence
  Description of Artificial Sequence: Synthetic oligonucleotide
  Sense strand starting at position 3233 of SEQ ID NO: 914338
gggcuauuagcccagagac

SEQ ID NO: 996471 - RNA, 19 nt, Artificial Sequence
  Description of Artificial Sequence: Synthetic oligonucleotide
  Antisense strand to SEQ ID NO: 996470
gucucugggcuaauagccc

SEQ ID NO: 996472 - RNA, 19 nt, Artificial Sequence
  Description of Artificial Sequence: Synthetic oligonucleotide
  Sense strand starting at position 3306 of SEQ ID NO: 914338
gggagaugccauuggaauc

SEQ ID NO: 996473 - RNA, 19 nt, Artificial Sequence
  Description of Artificial Sequence: Synthetic oligonucleotide
  Antisense strand to SEQ ID NO: 996472
gauuccaauggcaucuccc

SEQ ID NO: 996474 - RNA, 19 nt, Artificial Sequence
  Description of Artificial Sequence: Synthetic oligonucleotide
  Sense strand starting at position 3307 of SEQ ID NO: 914338
ggagaugccauuggaauca

SEQ ID NO: 996475 - RNA, 19 nt, Artificial Sequence
  Description of Artificial Sequence: Synthetic oligonucleotide
  Antisense strand to SEQ ID NO: 996474
ugauuccaauggcaucucc

SEQ ID NO: 996476 - RNA, 19 nt, Artificial Sequence
  Description of Artificial Sequence: Synthetic oligonucleotide
  Sense strand starting at position 3332 of SEQ ID NO: 914338
cgucuaugagucguugugu

SEQ ID NO: 996477 - RNA, 19 nt, Artificial Sequence
  Description of Artificial Sequence: Synthetic oligonucleotide
  Antisense strand to SEQ ID NO: 996476
acacaacgacucauagacg

SEQ ID NO: 996478 - RNA, 19 nt, Artificial Sequence
  Description of Artificial Sequence: Synthetic oligonucleotide
  Sense strand starting at position 3338 of SEQ ID NO: 914338
ugagucguuguguugccaa

SEQ ID NO: 996479 - RNA, 19 nt, Artificial Sequence
  Description of Artificial Sequence: Synthetic oligonucleotide
  Antisense strand to SEQ ID NO: 996478
uuggcaacacaacgacuca

SEQ ID NO: 996480 - RNA, 19 nt, Artificial Sequence
  Description of Artificial Sequence: Synthetic oligonucleotide
  Sense strand starting at position 3435 of SEQ ID NO: 914338
ggaugaauucuauggguug

SEQ ID NO: 996481 - RNA, 19 nt, Artificial Sequence
  Description of Artificial Sequence: Synthetic oligonucleotide
  Antisense strand to SEQ ID NO: 996480
caacccauagaauucaucc

SEQ ID NO: 996482 - RNA, 19 nt, Artificial Sequence
  Description of Artificial Sequence: Synthetic oligonucleotide
  Sense strand starting at position 3477 of SEQ ID NO: 914338
ggugguugacuguauccau

SEQ ID NO: 996483 - RNA, 19 nt, Artificial Sequence
  Description of Artificial Sequence: Synthetic oligonucleotide
  Antisense strand to SEQ ID NO: 996482
auggauacagucaaccacc

SEQ ID NO: 996484 - RNA, 19 nt, Artificial Sequence
  Description of Artificial Sequence: Synthetic oligonucleotide
  Sense strand starting at position 3522 of SEQ ID NO: 914338
agaccucuccuaugugaac

SEQ ID NO: 996485 - RNA, 19 nt, Artificial Sequence
  Description of Artificial Sequence: Synthetic oligonucleotide
  Antisense strand to SEQ ID NO: 996484
guucacauaggagaggucu

SEQ ID NO: 996486 - RNA, 19 nt, Artificial Sequence
  Description of Artificial Sequence: Synthetic oligonucleotide
  Sense strand starting at position 3594 of SEQ ID NO: 914338
acuaaugaccguggagaca

SEQ ID NO: 996487 - RNA, 19 nt, Artificial Sequence
  Description of Artificial Sequence: Synthetic oligonucleotide
  Antisense strand to SEQ ID NO: 996486
ugucuccacggucauuagu

SEQ ID NO: 996488 - RNA, 19 nt, Artificial Sequence
  Description of Artificial Sequence: Synthetic oligonucleotide
  Sense strand starting at position 3736 of SEQ ID NO: 914338
uuuguuuggaggcauagaa

SEQ ID NO: 996489 - RNA, 19 nt, Artificial Sequence
  Description of Artificial Sequence: Synthetic oligonucleotide
  Antisense strand to SEQ ID NO: 996488
uucuaugccuccaaacaaa

SEQ ID NO: 996490 - RNA, 19 nt, Artificial Sequence
  Description of Artificial Sequence: Synthetic oligonucleotide
  Sense strand starting at position 317 of SEQ ID NO: 914339
gggagacaggcgugaacuu

SEQ ID NO: 996491 - RNA, 19 nt, Artificial Sequence
  Description of Artificial Sequence: Synthetic oligonucleotide
  Antisense strand to SEQ ID NO: 996490
aaguucacgccugucuccc

SEQ ID NO: 996492 - RNA, 19 nt, Artificial Sequence
  Description of Artificial Sequence: Synthetic oligonucleotide
  Sense strand starting at position 476 of SEQ ID NO: 914339
aauagaaaguccuugagca

SEQ ID NO: 996493 - RNA, 19 nt, Artificial Sequence
  Description of Artificial Sequence: Synthetic oligonucleotide
  Antisense strand to SEQ ID NO: 996492
ugcucaaggacuuucuauu

SEQ ID NO: 996494 - RNA, 19 nt, Artificial Sequence
  Description of Artificial Sequence: Synthetic oligonucleotide
  Sense strand starting at position 477 of SEQ ID NO: 914339
auagaaaguccuugagcaa

SEQ ID NO: 996495 - RNA, 19 nt, Artificial Sequence
  Description of Artificial Sequence: Synthetic oligonucleotide
  Antisense strand to SEQ ID NO: 996494
uugcucaaggacuuucuau

SEQ ID NO: 996496 - RNA, 19 nt, Artificial Sequence
  Description of Artificial Sequence: Synthetic oligonucleotide
  Sense strand starting at position 478 of SEQ ID NO: 914339
uagaaaguccuugagcaau

SEQ ID NO: 996497 - RNA, 19 nt, Artificial Sequence
  Description of Artificial Sequence: Synthetic oligonucleotide
  Antisense strand to SEQ ID NO: 996496
auugcucaaggacuuucua

SEQ ID NO: 996498 - RNA, 19 nt, Artificial Sequence
  Description of Artificial Sequence: Synthetic oligonucleotide
  Sense strand starting at position 480 of SEQ ID NO: 914339
gaaaguccuugagcaauua

SEQ ID NO: 996499 - RNA, 19 nt, Artificial Sequence
  Description of Artificial Sequence: Synthetic oligonucleotide
  Antisense strand to SEQ ID NO: 996498
uaauugcucaaggacuuuc

SEQ ID NO: 996500 - RNA, 19 nt, Artificial Sequence
  Description of Artificial Sequence: Synthetic oligonucleotide
  Sense strand starting at position 489 of SEQ ID NO: 914339
ugagcaauuauccagccga

SEQ ID NO: 996501 - RNA, 19 nt, Artificial Sequence
  Description of Artificial Sequence: Synthetic oligonucleotide
  Antisense strand to SEQ ID NO: 996500
ucggcuggauaauugcuca

SEQ ID NO: 996502 - RNA, 19 nt, Artificial Sequence
  Description of Artificial Sequence: Synthetic oligonucleotide
  Sense strand starting at position 522 of SEQ ID NO: 914339
gugguuugacccuggaaca

SEQ ID NO: 996503 - RNA, 19 nt, Artificial Sequence
  Description of Artificial Sequence: Synthetic oligonucleotide
  Antisense strand to SEQ ID NO: 996502
uguuccagggucaaaccac

SEQ ID NO: 996504 - RNA, 19 nt, Artificial Sequence
  Description of Artificial Sequence: Synthetic oligonucleotide
  Sense strand starting at position 679 of SEQ ID NO: 914339
cuggccuaguucucaugaa

SEQ ID NO: 996505 - RNA, 19 nt, Artificial Sequence
  Description of Artificial Sequence: Synthetic oligonucleotide
  Antisense strand to SEQ ID NO: 996504
uucaugagaacuaggccag

SEQ ID NO: 996506 - RNA, 19 nt, Artificial Sequence
  Description of Artificial Sequence: Synthetic oligonucleotide
  Sense strand starting at position 948 of SEQ ID NO: 914339
cugucugagcaguggagaa

SEQ ID NO: 996507 - RNA, 19 nt, Artificial Sequence
  Description of Artificial Sequence: Synthetic oligonucleotide
  Antisense strand to SEQ ID NO: 996506
uucuccacugcucagacag

SEQ ID NO: 996508 - RNA, 19 nt, Artificial Sequence
  Description of Artificial Sequence: Synthetic oligonucleotide
  Sense strand starting at position 1110 of SEQ ID NO: 914339
cagggauugugguuagacu

SEQ ID NO: 996509 - RNA, 19 nt, Artificial Sequence
  Description of Artificial Sequence: Synthetic oligonucleotide
  Antisense strand to SEQ ID NO: 996508
agucuaaccacaaucccug

SEQ ID NO: 996510 - RNA, 19 nt, Artificial Sequence
  Description of Artificial Sequence: Synthetic oligonucleotide
  Sense strand starting at position 1111 of SEQ ID NO: 914339
agggauugugguuagacuu

SEQ ID NO: 996511 - RNA, 19 nt, Artificial Sequence
  Description of Artificial Sequence: Synthetic oligonucleotide
  Antisense strand to SEQ ID NO: 996510
aagucuaaccacaaucccu

SEQ ID NO: 996512 - RNA, 19 nt, Artificial Sequence
  Description of Artificial Sequence: Synthetic oligonucleotide
  Sense strand starting at position 1328 of SEQ ID NO: 914339
ggagguguuccauaagccu

SEQ ID NO: 996513 - RNA, 19 nt, Artificial Sequence
  Description of Artificial Sequence: Synthetic oligonucleotide
  Antisense strand to SEQ ID NO: 996512
aggcuuauggaacaccucc

SEQ ID NO: 996514 - RNA, 19 nt, Artificial Sequence
  Description of Artificial Sequence: Synthetic oligonucleotide
  Sense strand starting at position 1439 of SEQ ID NO: 914339
guggcugcucuggacaagu

SEQ ID NO: 996515 - RNA, 19 nt, Artificial Sequence
  Description of Artificial Sequence: Synthetic oligonucleotide
  Antisense strand to SEQ ID NO: 996514
acuuguccagagcagccac

SEQ ID NO: 996516 - RNA, 19 nt, Artificial Sequence
  Description of Artificial Sequence: Synthetic oligonucleotide
  Sense strand starting at position 1484 of SEQ ID NO: 914339
gacuaagugcacugaucaa

SEQ ID NO: 996517 - RNA, 19 nt, Artificial Sequence
  Description of Artificial Sequence: Synthetic oligonucleotide
  Antisense strand to SEQ ID NO: 996516
uugaucagugcacuuaguc

SEQ ID NO: 996518 - RNA, 19 nt, Artificial Sequence
  Description of Artificial Sequence: Synthetic oligonucleotide
  Sense strand starting at position 2522 of SEQ ID NO: 914339
ugggucugugagggaugaa

SEQ ID NO: 996519 - RNA, 19 nt, Artificial Sequence
  Description of Artificial Sequence: Synthetic oligonucleotide
  Antisense strand to SEQ ID NO: 996518
uucaucccucacagaccca

SEQ ID NO: 996520 - RNA, 19 nt, Artificial Sequence
  Description of Artificial Sequence: Synthetic oligonucleotide
  Sense strand starting at position 2525 of SEQ ID NO: 914339
gucugugagggaugaaaua

SEQ ID NO: 996521 - RNA, 19 nt, Artificial Sequence
  Description of Artificial Sequence: Synthetic oligonucleotide
  Antisense strand to SEQ ID NO: 996520
uauuucaucccucacagac

SEQ ID NO: 996522 - RNA, 19 nt, Artificial Sequence
  Description of Artificial Sequence: Synthetic oligonucleotide
  Sense strand starting at position 2567 of SEQ ID NO: 914339
gacucuaggccucgagaag

SEQ ID NO: 996523 - RNA, 19 nt, Artificial Sequence
  Description of Artificial Sequence: Synthetic oligonucleotide
  Antisense strand to SEQ ID NO: 996522
cuucucgaggccuagaguc

SEQ ID NO: 996524 - RNA, 19 nt, Artificial Sequence
  Description of Artificial Sequence: Synthetic oligonucleotide
  Sense strand starting at position 2568 of SEQ ID NO: 914339
acucuaggccucgagaaga

SEQ ID NO: 996525 - RNA, 19 nt, Artificial Sequence
  Description of Artificial Sequence: Synthetic oligonucleotide
  Antisense strand to SEQ ID NO: 996524
ucuucucgaggccuagagu

SEQ ID NO: 996526 - RNA, 19 nt, Artificial Sequence
  Description of Artificial Sequence: Synthetic oligonucleotide
  Sense strand starting at position 2666 of SEQ ID NO: 914339
uccacauggucgccgaaau

SEQ ID NO: 996527 - RNA, 19 nt, Artificial Sequence
  Description of Artificial Sequence: Synthetic oligonucleotide
  Antisense strand to SEQ ID NO: 996526
auuucggcgaccaugugga

SEQ ID NO: 996528 - RNA, 19 nt, Artificial Sequence
  Description of Artificial Sequence: Synthetic oligonucleotide
  Sense strand starting at position 2891 of SEQ ID NO: 914339
aagugaaucaugggucgca

SEQ ID NO: 996529 - RNA, 19 nt, Artificial Sequence
  Description of Artificial Sequence: Synthetic oligonucleotide
  Antisense strand to SEQ ID NO: 996528
ugcgacccaugauucacuu

SEQ ID NO: 996530 - RNA, 19 nt, Artificial Sequence
  Description of Artificial Sequence: Synthetic oligonucleotide
  Sense strand starting at position 2969 of SEQ ID NO: 914339
gcuacugugagacacgaaa

SEQ ID NO: 996531 - RNA, 19 nt, Artificial Sequence
  Description of Artificial Sequence: Synthetic oligonucleotide
  Antisense strand to SEQ ID NO: 996530
uuucgugucucacaguagc

SEQ ID NO: 996532 - RNA, 19 nt, Artificial Sequence
  Description of Artificial Sequence: Synthetic oligonucleotide
  Sense strand starting at position 3041 of SEQ ID NO: 914339
cucugaguguuggcagacu

SEQ ID NO: 996533 - RNA, 19 nt, Artificial Sequence
  Description of Artificial Sequence: Synthetic oligonucleotide
  Antisense strand to SEQ ID NO: 996532
agucugccaacacucagag

SEQ ID NO: 996534 - RNA, 19 nt, Artificial Sequence
  Description of Artificial Sequence: Synthetic oligonucleotide
  Sense strand starting at position 3079 of SEQ ID NO: 914339
agagaaguugggcaacgau

SEQ ID NO: 996535 - RNA, 19 nt, Artificial Sequence
  Description of Artificial Sequence: Synthetic oligonucleotide
  Antisense strand to SEQ ID NO: 996534
aucguugcccaacuucucu

SEQ ID NO: 996536 - RNA, 19 nt, Artificial Sequence
  Description of Artificial Sequence: Synthetic oligonucleotide
  Sense strand starting at position 3121 of SEQ ID NO: 914339
ggugacgagucuguugaga

SEQ ID NO: 996537 - RNA, 19 nt, Artificial Sequence
  Description of Artificial Sequence: Synthetic oligonucleotide
  Antisense strand to SEQ ID NO: 996536
ucucaacagacucgucacc

SEQ ID NO: 996538 - RNA, 19 nt, Artificial Sequence
  Description of Artificial Sequence: Synthetic oligonucleotide
  Sense strand starting at position 3240 of SEQ ID NO: 914339
cccacaugucauugucuua

SEQ ID NO: 996539 - RNA, 19 nt, Artificial Sequence
  Description of Artificial Sequence: Synthetic oligonucleotide
  Antisense strand to SEQ ID NO: 996538
uaagacaaugacauguggg

SEQ ID NO: 996540 - RNA, 19 nt, Artificial Sequence
  Description of Artificial Sequence: Synthetic oligonucleotide
  Sense strand starting at position 3284 of SEQ ID NO: 914339
gagccugauguuuggaaca

SEQ ID NO: 996541 - RNA, 19 nt, Artificial Sequence
  Description of Artificial Sequence: Synthetic oligonucleotide
  Antisense strand to SEQ ID NO: 996540
uguuccaaacaucaggcuc

SEQ ID NO: 996542 - RNA, 19 nt, Artificial Sequence
  Description of Artificial Sequence: Synthetic oligonucleotide
  Sense strand starting at position 3400 of SEQ ID NO: 914339
cccaguugaguucgaguua

SEQ ID NO: 996543 - RNA, 19 nt, Artificial Sequence
  Description of Artificial Sequence: Synthetic oligonucleotide
  Antisense strand to SEQ ID NO: 996542
uaacucgaacucaacuggg

SEQ ID NO: 996544 - RNA, 19 nt, Artificial Sequence
  Description of Artificial Sequence: Synthetic oligonucleotide
  Sense strand starting at position 3405 of SEQ ID NO: 914339
uugaguucgaguuauaacc

SEQ ID NO: 996545 - RNA, 19 nt, Artificial Sequence
  Description of Artificial Sequence: Synthetic oligonucleotide
  Antisense strand to SEQ ID NO: 996544
gguuauaacucgaacucaa

SEQ ID NO: 996546 - RNA, 19 nt, Artificial Sequence
  Description of Artificial Sequence: Synthetic oligonucleotide
  Sense strand starting at position 3414 of SEQ ID NO: 914339
aguuauaaccgucaccagu

SEQ ID NO: 996547 - RNA, 19 nt, Artificial Sequence
  Description of Artificial Sequence: Synthetic oligonucleotide
  Antisense strand to SEQ ID NO: 996546
acuggugacgguuauaacu

SEQ ID NO: 996548 - RNA, 19 nt, Artificial Sequence
  Description of Artificial Sequence: Synthetic oligonucleotide
  Sense strand starting at position 3416 of SEQ ID NO: 914339
uuauaaccgucaccaguua

SEQ ID NO: 996549 - RNA, 19 nt, Artificial Sequence
  Description of Artificial Sequence: Synthetic oligonucleotide
  Antisense strand to SEQ ID NO: 996548
uaacuggugacgguuauaa

SEQ ID NO: 996550 - RNA, 19 nt, Artificial Sequence
  Description of Artificial Sequence: Synthetic oligonucleotide
  Sense strand starting at position 3481 of SEQ ID NO: 914339
gguccuagaugucucugua

SEQ ID NO: 996551 - RNA, 19 nt, Artificial Sequence
  Description of Artificial Sequence: Synthetic oligonucleotide
  Antisense strand to SEQ ID NO: 996550
uacagagacaucuaggacc

SEQ ID NO: 996552 - RNA, 19 nt, Artificial Sequence
  Description of Artificial Sequence: Synthetic oligonucleotide
  Sense strand starting at position 3525 of SEQ ID NO: 914339
cugucucuugaaggaguau

SEQ ID NO: 996553 - RNA, 19 nt, Artificial Sequence
  Description of Artificial Sequence: Synthetic oligonucleotide
  Antisense strand to SEQ ID NO: 996552
auacuccuucaagagacag

SEQ ID NO: 996554 - RNA, 19 nt, Artificial Sequence
  Description of Artificial Sequence: Synthetic oligonucleotide
  Sense strand starting at position 3526 of SEQ ID NO: 914339
ugucucuugaaggaguauu

SEQ ID NO: 996555 - RNA, 19 nt, Artificial Sequence
  Description of Artificial Sequence: Synthetic oligonucleotide
  Antisense strand to SEQ ID NO: 996554
aauacuccuucaagagaca

SEQ ID NO: 996556 - RNA, 19 nt, Artificial Sequence
  Description of Artificial Sequence: Synthetic oligonucleotide
  Sense strand starting at position 3547 of SEQ ID NO: 914339
uguugaagaugggugguaa

SEQ ID NO: 996557 - RNA, 19 nt, Artificial Sequence
  Description of Artificial Sequence: Synthetic oligonucleotide
  Antisense strand to SEQ ID NO: 996556
uuaccacccaucuucaaca

SEQ ID NO: 996558 - RNA, 19 nt, Artificial Sequence
  Description of Artificial Sequence: Synthetic oligonucleotide
  Sense strand starting at position 3558 of SEQ ID NO: 914339
ggugguaacguucagcaaa

SEQ ID NO: 996559 - RNA, 19 nt, Artificial Sequence
  Description of Artificial Sequence: Synthetic oligonucleotide
  Antisense strand to SEQ ID NO: 996558
uuugcugaacguuaccacc

SEQ ID NO: 996560 - RNA, 19 nt, Artificial Sequence
  Description of Artificial Sequence: Synthetic oligonucleotide
  Sense strand starting at position 3623 of SEQ ID NO: 914339
agcugaugacagugaugaa

SEQ ID NO: 996561 - RNA, 19 nt, Artificial Sequence
  Description of Artificial Sequence: Synthetic oligonucleotide
  Antisense strand to SEQ ID NO: 996560
uucaucacugucaucagcu

SEQ ID NO: 996562 - RNA, 19 nt, Artificial Sequence
  Description of Artificial Sequence: Synthetic oligonucleotide
  Sense strand starting at position 3668 of SEQ ID NO: 914339
ggugcuuggagacacuaua

SEQ ID NO: 996563 - RNA, 19 nt, Artificial Sequence
  Description of Artificial Sequence: Synthetic oligonucleotide
  Antisense strand to SEQ ID NO: 996562
uauagugucuccaagcacc

SEQ ID NO: 996564 - RNA, 19 nt, Artificial Sequence
  Description of Artificial Sequence: Synthetic oligonucleotide
  Sense strand starting at position 3701 of SEQ ID NO: 914339
uggcugugugcaugggaga

SEQ ID NO: 996565 - RNA, 19 nt, Artificial Sequence
  Description of Artificial Sequence: Synthetic oligonucleotide
  Antisense strand to SEQ ID NO: 996564
ucucccaugcacacagcca

SEQ ID NO: 996566 - RNA, 19 nt, Artificial Sequence
  Description of Artificial Sequence: Synthetic oligonucleotide
  Sense strand starting at position 3706 of SEQ ID NO: 914339
gugugcaugggagaguaua

SEQ ID NO: 996567 - RNA, 19 nt, Artificial Sequence
  Description of Artificial Sequence: Synthetic oligonucleotide
  Antisense strand to SEQ ID NO: 996566
uauacucucccaugcacac

SEQ ID NO: 996568 - RNA, 19 nt, Artificial Sequence
  Description of Artificial Sequence: Synthetic oligonucleotide
  Sense strand starting at position 3742 of SEQ ID NO: 914339
ggcugugaggugcagagau

SEQ ID NO: 996569 - RNA, 19 nt, Artificial Sequence
  Description of Artificial Sequence: Synthetic oligonucleotide
  Antisense strand to SEQ ID NO: 996568
aucucugcaccucacagcc

SEQ ID NO: 996570 - RNA, 19 nt, Artificial Sequence
  Description of Artificial Sequence: Synthetic oligonucleotide
  Sense strand starting at position 64 of SEQ ID NO: 914340
ucaguaaacugguuggauc

SEQ ID NO: 996571 - RNA, 19 nt, Artificial Sequence
  Description of Artificial Sequence: Synthetic oligonucleotide
  Antisense strand to SEQ ID NO: 996570
gauccaaccaguuuacuga

SEQ ID NO: 996572 - RNA, 19 nt, Artificial Sequence
  Description of Artificial Sequence: Synthetic oligonucleotide
  Sense strand starting at position 172 of SEQ ID NO: 914340
ggacuaaucuagucaccca

SEQ ID NO: 996573 - RNA, 19 nt, Artificial Sequence
  Description of Artificial Sequence: Synthetic oligonucleotide
  Antisense strand to SEQ ID NO: 996572
ugggugacuagauuagucc

SEQ ID NO: 996574 - RNA, 19 nt, Artificial Sequence
  Description of Artificial Sequence: Synthetic oligonucleotide
  Sense strand starting at position 180 of SEQ ID NO: 914340
cuagucacccaguauacaa

SEQ ID NO: 996575 - RNA, 19 nt, Artificial Sequence
  Description of Artificial Sequence: Synthetic oligonucleotide
  Antisense strand to SEQ ID NO: 996574
uuguauacugggugacuag

SEQ ID NO: 996576 - RNA, 19 nt, Artificial Sequence
  Description of Artificial Sequence: Synthetic oligonucleotide
  Sense strand starting at position 252 of SEQ ID NO: 914340
cccagauacucaguuucuu

SEQ ID NO: 996577 - RNA, 19 nt, Artificial Sequence
  Description of Artificial Sequence: Synthetic oligonucleotide
  Antisense strand to SEQ ID NO: 996576
aagaaacugaguaucuggg

SEQ ID NO: 996578 - RNA, 19 nt, Artificial Sequence
  Description of Artificial Sequence: Synthetic oligonucleotide
  Sense strand starting at position 627 of SEQ ID NO: 914340
ggcuuccuacaccagaauu

SEQ ID NO: 996579 - RNA, 19 nt, Artificial Sequence
  Description of Artificial Sequence: Synthetic oligonucleotide
  Antisense strand to SEQ ID NO: 996578
aauucugguguaggaagcc

SEQ ID NO: 996580 - RNA, 19 nt, Artificial Sequence
  Description of Artificial Sequence: Synthetic oligonucleotide
  Sense strand starting at position 743 of SEQ ID NO: 914340
agcucuucugcccagauua

SEQ ID NO: 996581 - RNA, 19 nt, Artificial Sequence
  Description of Artificial Sequence: Synthetic oligonucleotide
  Antisense strand to SEQ ID NO: 996580
uaaucugggcagaagagcu

SEQ ID NO: 996582 - RNA, 19 nt, Artificial Sequence
  Description of Artificial Sequence: Synthetic oligonucleotide
  Sense strand starting at position 1157 of SEQ ID NO: 914340
cgagguguugaucaacacu

SEQ ID NO: 996583 - RNA, 19 nt, Artificial Sequence
  Description of Artificial Sequence: Synthetic oligonucleotide
  Antisense strand to SEQ ID NO: 996582
aguguugaucaacaccucg

SEQ ID NO: 996584 - RNA, 19 nt, Artificial Sequence
  Description of Artificial Sequence: Synthetic oligonucleotide
  Sense strand starting at position 1440 of SEQ ID NO: 914340
cgaguuugucuugcauucu

SEQ ID NO: 996585 - RNA, 19 nt, Artificial Sequence
  Description of Artificial Sequence: Synthetic oligonucleotide
  Antisense strand to SEQ ID NO: 996584
agaaugcaagacaaacucg

SEQ ID NO: 996586 - RNA, 19 nt, Artificial Sequence
  Description of Artificial Sequence: Synthetic oligonucleotide
  Sense strand starting at position 1450 of SEQ ID NO: 914340
uugcauucuccagacaggu

SEQ ID NO: 996587 - RNA, 19 nt, Artificial Sequence
  Description of Artificial Sequence: Synthetic oligonucleotide
  Antisense strand to SEQ ID NO: 996586
accugucuggagaaugcaa

SEQ ID NO: 996588 - RNA, 19 nt, Artificial Sequence
  Description of Artificial Sequence: Synthetic oligonucleotide
  Sense strand starting at position 1452 of SEQ ID NO: 914340
gcauucuccagacagguga

SEQ ID NO: 996589 - RNA, 19 nt, Artificial Sequence
  Description of Artificial Sequence: Synthetic oligonucleotide
  Antisense strand to SEQ ID NO: 996588
ucaccugucuggagaaugc

SEQ ID NO: 996590 - RNA, 19 nt, Artificial Sequence
  Description of Artificial Sequence: Synthetic oligonucleotide
  Sense strand starting at position 1786 of SEQ ID NO: 914340
ugaggugcucuuggaagaa

SEQ ID NO: 996591 - RNA, 19 nt, Artificial Sequence
  Description of Artificial Sequence: Synthetic oligonucleotide
  Antisense strand to SEQ ID NO: 996590
uucuuccaagagcaccuca

SEQ ID NO: 996592 - RNA, 19 nt, Artificial Sequence
  Description of Artificial Sequence: Synthetic oligonucleotide
  Sense strand starting at position 1790 of SEQ ID NO: 914340
gugcucuuggaagaaguga

SEQ ID NO: 996593 - RNA, 19 nt, Artificial Sequence
  Description of Artificial Sequence: Synthetic oligonucleotide
  Antisense strand to SEQ ID NO: 996592
ucacuucuuccaagagcac

SEQ ID NO: 996594 - RNA, 19 nt, Artificial Sequence
  Description of Artificial Sequence: Synthetic oligonucleotide
  Sense strand starting at position 2114 of SEQ ID NO: 914340
cugggcucucugcaugaua

SEQ ID NO: 996595 - RNA, 19 nt, Artificial Sequence
  Description of Artificial Sequence: Synthetic oligonucleotide
  Antisense strand to SEQ ID NO: 996594
uaucaugcagagagcccag

SEQ ID NO: 996596 - RNA, 19 nt, Artificial Sequence
  Description of Artificial Sequence: Synthetic oligonucleotide
  Sense strand starting at position 2116 of SEQ ID NO: 914340
gggcucucugcaugauaua

SEQ ID NO: 996597 - RNA, 19 nt, Artificial Sequence
  Description of Artificial Sequence: Synthetic oligonucleotide
  Antisense strand to SEQ ID NO: 996596
uauaucaugcagagagccc

SEQ ID NO: 996598 - RNA, 19 nt, Artificial Sequence
  Description of Artificial Sequence: Synthetic oligonucleotide
  Sense strand starting at position 2117 of SEQ ID NO: 914340
ggcucucugcaugauauag

SEQ ID NO: 996599 - RNA, 19 nt, Artificial Sequence
  Description of Artificial Sequence: Synthetic oligonucleotide
  Antisense strand to SEQ ID NO: 996598
cuauaucaugcagagagcc

SEQ ID NO: 996600 - RNA, 19 nt, Artificial Sequence
  Description of Artificial Sequence: Synthetic oligonucleotide
  Sense strand starting at position 2136 of SEQ ID NO: 914340
ggcucucaaucaugauuua

SEQ ID NO: 996601 - RNA, 19 nt, Artificial Sequence
  Description of Artificial Sequence: Synthetic oligonucleotide
  Antisense strand to SEQ ID NO: 996600
uaaaucaugauugagagcc

SEQ ID NO: 996602 - RNA, 19 nt, Artificial Sequence
  Description of Artificial Sequence: Synthetic oligonucleotide
  Sense strand starting at position 2147 of SEQ ID NO: 914340
augauuuacgcuugcguaa

SEQ ID NO: 996603 - RNA, 19 nt, Artificial Sequence
  Description of Artificial Sequence: Synthetic oligonucleotide
  Antisense strand to SEQ ID NO: 996602
uuacgcaagcguaaaucau

SEQ ID NO: 996604 - RNA, 19 nt, Artificial Sequence
  Description of Artificial Sequence: Synthetic oligonucleotide
  Sense strand starting at position 2161 of SEQ ID NO: 914340
cguaaaguacuguguggga

SEQ ID NO: 996605 - RNA, 19 nt, Artificial Sequence
  Description of Artificial Sequence: Synthetic oligonucleotide
  Antisense strand to SEQ ID NO: 996604
ucccacacaguacuuuacg

SEQ ID NO: 996606 - RNA, 19 nt, Artificial Sequence
  Description of Artificial Sequence: Synthetic oligonucleotide
  Sense strand starting at position 2256 of SEQ ID NO: 914340
ugcugauucguccaaccac

SEQ ID NO: 996607 - RNA, 19 nt, Artificial Sequence
  Description of Artificial Sequence: Synthetic oligonucleotide
  Antisense strand to SEQ ID NO: 996606
gugguuggacgaaucagca

SEQ ID NO: 996608 - RNA, 19 nt, Artificial Sequence
  Description of Artificial Sequence: Synthetic oligonucleotide
  Sense strand starting at position 2310 of SEQ ID NO: 914340
cccaucaaacuucguagaa

SEQ ID NO: 996609 - RNA, 19 nt, Artificial Sequence
  Description of Artificial Sequence: Synthetic oligonucleotide
  Antisense strand to SEQ ID NO: 996608
uucuacgaaguuugauggg

SEQ ID NO: 996610 - RNA, 19 nt, Artificial Sequence
  Description of Artificial Sequence: Synthetic oligonucleotide
  Sense strand starting at position 2311 of SEQ ID NO: 914340
ccaucaaacuucguagaag

SEQ ID NO: 996611 - RNA, 19 nt, Artificial Sequence
  Description of Artificial Sequence: Synthetic oligonucleotide
  Antisense strand to SEQ ID NO: 996610
cuucuacgaaguuugaugg

SEQ ID NO: 996612 - RNA, 19 nt, Artificial Sequence
  Description of Artificial Sequence: Synthetic oligonucleotide
  Sense strand starting at position 2349 of SEQ ID NO: 914340
cucagugcgcgaucuuaag

SEQ ID NO: 996613 - RNA, 19 nt, Artificial Sequence
  Description of Artificial Sequence: Synthetic oligonucleotide
  Antisense strand to SEQ ID NO: 996612
cuuaagaucgcgcacugag

SEQ ID NO: 996614 - RNA, 19 nt, Artificial Sequence
  Description of Artificial Sequence: Synthetic oligonucleotide
  Sense strand starting at position 2368 of SEQ ID NO: 914340
cgcgcaucuguggaaacaa

SEQ ID NO: 996615 - RNA, 19 nt, Artificial Sequence
  Description of Artificial Sequence: Synthetic oligonucleotide
  Antisense strand to SEQ ID NO: 996614
uuguuuccacagaugcgcg

SEQ ID NO: 996616 - RNA, 19 nt, Artificial Sequence
  Description of Artificial Sequence: Synthetic oligonucleotide
  Sense strand starting at position 2450 of SEQ ID NO: 914340
uuaauaaucgcucaaggua

SEQ ID NO: 996617 - RNA, 19 nt, Artificial Sequence
  Description of Artificial Sequence: Synthetic oligonucleotide
  Antisense strand to SEQ ID NO: 996616
uaccuugagcgauuauuaa

SEQ ID NO: 996618 - RNA, 19 nt, Artificial Sequence
  Description of Artificial Sequence: Synthetic oligonucleotide
  Sense strand starting at position 2459 of SEQ ID NO: 914340
gcucaagguagggauuauu

SEQ ID NO: 996619 - RNA, 19 nt, Artificial Sequence
  Description of Artificial Sequence: Synthetic oligonucleotide
  Antisense strand to SEQ ID NO: 996618
aauaaucccuaccuugagc

SEQ ID NO: 996620 - RNA, 19 nt, Artificial Sequence
  Description of Artificial Sequence: Synthetic oligonucleotide
  Sense strand starting at position 2482 of SEQ ID NO: 914340
ccgcuuuacagguaagaaa

SEQ ID NO: 996621 - RNA, 19 nt, Artificial Sequence
  Description of Artificial Sequence: Synthetic oligonucleotide
  Antisense strand to SEQ ID NO: 996620
uuucuuaccuguaaagcgg

SEQ ID NO: 996622 - RNA, 19 nt, Artificial Sequence
  Description of Artificial Sequence: Synthetic oligonucleotide
  Sense strand starting at position 2503 of SEQ ID NO: 914340
agauuaagauacgagaaag

SEQ ID NO: 996623 - RNA, 19 nt, Artificial Sequence
  Description of Artificial Sequence: Synthetic oligonucleotide
  Antisense strand to SEQ ID NO: 996622
cuuucucguaucuuaaucu

SEQ ID NO: 996624 - RNA, 19 nt, Artificial Sequence
  Description of Artificial Sequence: Synthetic oligonucleotide
  Sense strand starting at position 2604 of SEQ ID NO: 914340
gaaugcucagagggagauu

SEQ ID NO: 996625 - RNA, 19 nt, Artificial Sequence
  Description of Artificial Sequence: Synthetic oligonucleotide
  Antisense strand to SEQ ID NO: 996624
aaucucccucugagcauuc

SEQ ID NO: 996626 - RNA, 19 nt, Artificial Sequence
  Description of Artificial Sequence: Synthetic oligonucleotide
  Sense strand starting at position 2659 of SEQ ID NO: 914340
uuaggcaccucucugaaau

SEQ ID NO: 996627 - RNA, 19 nt, Artificial Sequence
  Description of Artificial Sequence: Synthetic oligonucleotide
  Antisense strand to SEQ ID NO: 996626
auuucagagaggugccuaa

SEQ ID NO: 996628 - RNA, 19 nt, Artificial Sequence
  Description of Artificial Sequence: Synthetic oligonucleotide
  Sense strand starting at position 2759 of SEQ ID NO: 914340
cggccuuugagcuaaguau

SEQ ID NO: 996629 - RNA, 19 nt, Artificial Sequence
  Description of Artificial Sequence: Synthetic oligonucleotide
  Antisense strand to SEQ ID NO: 996628
auacuuagcucaaaggccg

SEQ ID NO: 996630 - RNA, 19 nt, Artificial Sequence
  Description of Artificial Sequence: Synthetic oligonucleotide
  Sense strand starting at position 2763 of SEQ ID NO: 914340
cuuugagcuaaguaugguu

SEQ ID NO: 996631 - RNA, 19 nt, Artificial Sequence
  Description of Artificial Sequence: Synthetic oligonucleotide
  Antisense strand to SEQ ID NO: 996630
aaccauacuuagcucaaag

SEQ ID NO: 996632 - RNA, 19 nt, Artificial Sequence
  Description of Artificial Sequence: Synthetic oligonucleotide
  Sense strand starting at position 2862 of SEQ ID NO: 914340
acauuccaguguuuauaca

SEQ ID NO: 996633 - RNA, 19 nt, Artificial Sequence
  Description of Artificial Sequence: Synthetic oligonucleotide
  Antisense strand to SEQ ID NO: 996632
uguauaaacacuggaaugu

SEQ ID NO: 996634 - RNA, 19 nt, Artificial Sequence
  Description of Artificial Sequence: Synthetic oligonucleotide
  Sense strand starting at position 2869 of SEQ ID NO: 914340
aguguuuauacauaacguu

SEQ ID NO: 996635 - RNA, 19 nt, Artificial Sequence
  Description of Artificial Sequence: Synthetic oligonucleotide
  Antisense strand to SEQ ID NO: 996634
aacguuauguauaaacacu

SEQ ID NO: 996636 - RNA, 19 nt, Artificial Sequence
  Description of Artificial Sequence: Synthetic oligonucleotide
  Sense strand starting at position 2904 of SEQ ID NO: 914340
uugcucauuugcuuaaguu

SEQ ID NO: 996637 - RNA, 19 nt, Artificial Sequence
  Description of Artificial Sequence: Synthetic oligonucleotide
  Antisense strand to SEQ ID NO: 996636
aacuuaagcaaaugagcaa

SEQ ID NO: 996638 - RNA, 19 nt, Artificial Sequence
  Description of Artificial Sequence: Synthetic oligonucleotide
  Sense strand starting at position 3087 of SEQ ID NO: 914340
ggaacagccauagguaauu

SEQ ID NO: 996639 - RNA, 19 nt, Artificial Sequence
  Description of Artificial Sequence: Synthetic oligonucleotide
  Antisense strand to SEQ ID NO: 996638
aauuaccuauggcuguucc

SEQ ID NO: 996640 - RNA, 19 nt, Artificial Sequence
  Description of Artificial Sequence: Synthetic oligonucleotide
  Sense strand starting at position 3487 of SEQ ID NO: 914340
caaggaauuccugaguagc

SEQ ID NO: 996641 - RNA, 19 nt, Artificial Sequence
  Description of Artificial Sequence: Synthetic oligonucleotide
  Antisense strand to SEQ ID NO: 996640
gcuacucaggaauuccuug

SEQ ID NO: 996642 - RNA, 19 nt, Artificial Sequence
  Description of Artificial Sequence: Synthetic oligonucleotide
  Sense strand starting at position 3715 of SEQ ID NO: 914340
uggguuaguaaguggagau

SEQ ID NO: 996643 - RNA, 19 nt, Artificial Sequence
  Description of Artificial Sequence: Synthetic oligonucleotide
  Antisense strand to SEQ ID NO: 996642
aucuccacuuacuaaccca

SEQ ID NO: 996644 - RNA, 19 nt, Artificial Sequence
  Description of Artificial Sequence: Synthetic oligonucleotide
  Sense strand starting at position 3716 of SEQ ID NO: 914340
ggguuaguaaguggagaua

SEQ ID NO: 996645 - RNA, 19 nt, Artificial Sequence
  Description of Artificial Sequence: Synthetic oligonucleotide
  Antisense strand to SEQ ID NO: 996644
uaucuccacuuacuaaccc

SEQ ID NO: 996646 - RNA, 19 nt, Artificial Sequence
  Description of Artificial Sequence: Synthetic oligonucleotide
  Sense strand starting at position 3718 of SEQ ID NO: 914340
guuaguaaguggagauagu

SEQ ID NO: 996647 - RNA, 19 nt, Artificial Sequence
  Description of Artificial Sequence: Synthetic oligonucleotide
  Antisense strand to SEQ ID NO: 996646
acuaucuccacuuacuaac

SEQ ID NO: 996648 - RNA, 19 nt, Artificial Sequence
  Description of Artificial Sequence: Synthetic oligonucleotide
  Sense strand starting at position 3719 of SEQ ID NO: 914340
uuaguaaguggagauaguu

SEQ ID NO: 996649 - RNA, 19 nt, Artificial Sequence
  Description of Artificial Sequence: Synthetic oligonucleotide
  Antisense strand to SEQ ID NO: 996648
aacuaucuccacuuacuaa

SEQ ID NO: 996650 - RNA, 19 nt, Artificial Sequence
  Description of Artificial Sequence: Synthetic oligonucleotide
  Sense strand starting at position 474 of SEQ ID NO: 914341
ggccaugccucagggauga

SEQ ID NO: 996651 - RNA, 19 nt, Artificial Sequence
  Description of Artificial Sequence: Synthetic oligonucleotide
  Antisense strand to SEQ ID NO: 996650
ucaucccugaggcauggcc

SEQ ID NO: 996652 - RNA, 19 nt, Artificial Sequence
  Description of Artificial Sequence: Synthetic oligonucleotide
  Sense strand starting at position 950 of SEQ ID NO: 914341
uagugagacuuccugugua

SEQ ID NO: 996653 - RNA, 19 nt, Artificial Sequence
  Description of Artificial Sequence: Synthetic oligonucleotide
  Antisense strand to SEQ ID NO: 996652
uacacaggaagucucacua

SEQ ID NO: 996654 - RNA, 19 nt, Artificial Sequence
  Description of Artificial Sequence: Synthetic oligonucleotide
  Sense strand starting at position 953 of SEQ ID NO: 914341
ugagacuuccuguguaaac

SEQ ID NO: 996655 - RNA, 19 nt, Artificial Sequence
  Description of Artificial Sequence: Synthetic oligonucleotide
  Antisense strand to SEQ ID NO: 996654
guuuacacaggaagucuca

SEQ ID NO: 996656 - RNA, 19 nt, Artificial Sequence
  Description of Artificial Sequence: Synthetic oligonucleotide
  Sense strand starting at position 954 of SEQ ID NO: 914341
gagacuuccuguguaaacu

SEQ ID NO: 996657 - RNA, 19 nt, Artificial Sequence
  Description of Artificial Sequence: Synthetic oligonucleotide
  Antisense strand to SEQ ID NO: 996656
aguuuacacaggaagucuc

SEQ ID NO: 996658 - RNA, 19 nt, Artificial Sequence
  Description of Artificial Sequence: Synthetic oligonucleotide
  Sense strand starting at position 955 of SEQ ID NO: 914341
agacuuccuguguaaacuc

SEQ ID NO: 996659 - RNA, 19 nt, Artificial Sequence
  Description of Artificial Sequence: Synthetic oligonucleotide
  Antisense strand to SEQ ID NO: 996658
gaguuuacacaggaagucu

SEQ ID NO: 996660 - RNA, 19 nt, Artificial Sequence
  Description of Artificial Sequence: Synthetic oligonucleotide
  Sense strand starting at position 1407 of SEQ ID NO: 914341
ccugaagccucccucagaa

SEQ ID NO: 996661 - RNA, 19 nt, Artificial Sequence
  Description of Artificial Sequence: Synthetic oligonucleotide
  Antisense strand to SEQ ID NO: 996660
uucugagggaggcuucagg

SEQ ID NO: 996662 - RNA, 19 nt, Artificial Sequence
  Description of Artificial Sequence: Synthetic oligonucleotide
  Sense strand starting at position 2528 of SEQ ID NO: 914341
gcggaaugaucuuuaggga

SEQ ID NO: 996663 - RNA, 19 nt, Artificial Sequence
  Description of Artificial Sequence: Synthetic oligonucleotide
  Antisense strand to SEQ ID NO: 996662
ucccuaaagaucauuccgc

SEQ ID NO: 996664 - RNA, 19 nt, Artificial Sequence
  Description of Artificial Sequence: Synthetic oligonucleotide
  Sense strand starting at position 2531 of SEQ ID NO: 914341
gaaugaucuuuagggauuc

SEQ ID NO: 996665 - RNA, 19 nt, Artificial Sequence
  Description of Artificial Sequence: Synthetic oligonucleotide
  Antisense strand to SEQ ID NO: 996664
gaaucccuaaagaucauuc

SEQ ID NO: 996666 - RNA, 19 nt, Artificial Sequence
  Description of Artificial Sequence: Synthetic oligonucleotide
  Sense strand starting at position 3117 of SEQ ID NO: 914341
cgccuuuguugagaacaga

SEQ ID NO: 996667 - RNA, 19 nt, Artificial Sequence
  Description of Artificial Sequence: Synthetic oligonucleotide
  Antisense strand to SEQ ID NO: 996666
ucuguucucaacaaaggcg

SEQ ID NO: 996668 - RNA, 19 nt, Artificial Sequence
  Description of Artificial Sequence: Synthetic oligonucleotide
  Sense strand starting at position 3851 of SEQ ID NO: 914341
uugcucuggcagcauaauu

SEQ ID NO: 996669 - RNA, 19 nt, Artificial Sequence
  Description of Artificial Sequence: Synthetic oligonucleotide
  Antisense strand to SEQ ID NO: 996668
aauuaugcugccagagcaa

SEQ ID NO: 996670 - RNA, 19 nt, Artificial Sequence
  Description of Artificial Sequence: Synthetic oligonucleotide
  Sense strand starting at position 3937 of SEQ ID NO: 914341
ccagucgucaguuagacuu

SEQ ID NO: 996671 - RNA, 19 nt, Artificial Sequence
  Description of Artificial Sequence: Synthetic oligonucleotide
  Antisense strand to SEQ ID NO: 996670
aagucuaacugacgacugg

SEQ ID NO: 996672 - RNA, 19 nt, Artificial Sequence
  Description of Artificial Sequence: Synthetic oligonucleotide
  Sense strand starting at position 156 of SEQ ID NO: 914342
gcuggacuacugcaauacu

SEQ ID NO: 996673 - RNA, 19 nt, Artificial Sequence
  Description of Artificial Sequence: Synthetic oligonucleotide
  Antisense strand to SEQ ID NO: 996672
aguauugcaguaguccagc

SEQ ID NO: 996674 - RNA, 19 nt, Artificial Sequence
  Description of Artificial Sequence: Synthetic oligonucleotide
  Sense strand starting at position 173 of SEQ ID NO: 914342
cugagauccuucucagcca

SEQ ID NO: 996675 - RNA, 19 nt, Artificial Sequence
  Description of Artificial Sequence: Synthetic oligonucleotide
  Antisense strand to SEQ ID NO: 996674
uggcugagaaggaucucag

SEQ ID NO: 996676 - RNA, 19 nt, Artificial Sequence
  Description of Artificial Sequence: Synthetic oligonucleotide
  Sense strand starting at position 217 of SEQ ID NO: 914342
acaggaauuucuggaguac

SEQ ID NO: 996677 - RNA, 19 nt, Artificial Sequence
  Description of Artificial Sequence: Synthetic oligonucleotide
  Antisense strand to SEQ ID NO: 996676
guacuccagaaauuccugu

SEQ ID NO: 996678 - RNA, 19 nt, Artificial Sequence
  Description of Artificial Sequence: Synthetic oligonucleotide
  Sense strand starting at position 235 of SEQ ID NO: 914342
caagcuaaucucuguggga

SEQ ID NO: 996679 - RNA, 19 nt, Artificial Sequence
  Description of Artificial Sequence: Synthetic oligonucleotide
  Antisense strand to SEQ ID NO: 996678
ucccacagagauuagcuug

SEQ ID NO: 996680 - RNA, 19 nt, Artificial Sequence
  Description of Artificial Sequence: Synthetic oligonucleotide
  Sense strand starting at position 236 of SEQ ID NO: 914342
aagcuaaucucugugggaa

SEQ ID NO: 996681 - RNA, 19 nt, Artificial Sequence
  Description of Artificial Sequence: Synthetic oligonucleotide
  Antisense strand to SEQ ID NO: 996680
uucccacagagauuagcuu

SEQ ID NO: 996682 - RNA, 19 nt, Artificial Sequence
  Description of Artificial Sequence: Synthetic oligonucleotide
  Sense strand starting at position 237 of SEQ ID NO: 914342
agcuaaucucugugggaau

SEQ ID NO: 996683 - RNA, 19 nt, Artificial Sequence
  Description of Artificial Sequence: Synthetic oligonucleotide
  Antisense strand to SEQ ID NO: 996682
auucccacagagauuagcu

SEQ ID NO: 996684 - RNA, 19 nt, Artificial Sequence
  Description of Artificial Sequence: Synthetic oligonucleotide
  Sense strand starting at position 320 of SEQ ID NO: 914342
auuaguacuccguagguua

SEQ ID NO: 996685 - RNA, 19 nt, Artificial Sequence
  Description of Artificial Sequence: Synthetic oligonucleotide
  Antisense strand to SEQ ID NO: 996684
uaaccuacggaguacuaau

SEQ ID NO: 996686 - RNA, 19 nt, Artificial Sequence
  Description of Artificial Sequence: Synthetic oligonucleotide
  Sense strand starting at position 356 of SEQ ID NO: 914342
aaaguaagccaauauguga

SEQ ID NO: 996687 - RNA, 19 nt, Artificial Sequence
  Description of Artificial Sequence: Synthetic oligonucleotide
  Antisense strand to SEQ ID NO: 996686
ucacauauuggcuuacuuu

SEQ ID NO: 996688 - RNA, 19 nt, Artificial Sequence
  Description of Artificial Sequence: Synthetic oligonucleotide
  Sense strand starting at position 359 of SEQ ID NO: 914342
guaagccaauaugugaaau

SEQ ID NO: 996689 - RNA, 19 nt, Artificial Sequence
  Description of Artificial Sequence: Synthetic oligonucleotide
  Antisense strand to SEQ ID NO: 996688
auuucacauauuggcuuac

SEQ ID NO: 996690 - RNA, 19 nt, Artificial Sequence
  Description of Artificial Sequence: Synthetic oligonucleotide
  Sense strand starting at position 415 of SEQ ID NO: 914342
cguuccauugcuucguauu

SEQ ID NO: 996691 - RNA, 19 nt, Artificial Sequence
  Description of Artificial Sequence: Synthetic oligonucleotide
  Antisense strand to SEQ ID NO: 996690
aauacgaagcaauggaacg

SEQ ID NO: 996692 - RNA, 19 nt, Artificial Sequence
  Description of Artificial Sequence: Synthetic oligonucleotide
  Sense strand starting at position 421 of SEQ ID NO: 914342
auugcuucguauuugaauu

SEQ ID NO: 996693 - RNA, 19 nt, Artificial Sequence
  Description of Artificial Sequence: Synthetic oligonucleotide
  Antisense strand to SEQ ID NO: 996692
aauucaaauacgaagcaau

SEQ ID NO: 996694 - RNA, 19 nt, Artificial Sequence
  Description of Artificial Sequence: Synthetic oligonucleotide
  Sense strand starting at position 494 of SEQ ID NO: 914342
cgauuucgcaagugaaacg

SEQ ID NO: 996695 - RNA, 19 nt, Artificial Sequence
  Description of Artificial Sequence: Synthetic oligonucleotide
  Antisense strand to SEQ ID NO: 996694
cguuucacuugcgaaaucg

SEQ ID NO: 996696 - RNA, 19 nt, Artificial Sequence
  Description of Artificial Sequence: Synthetic oligonucleotide
  Sense strand starting at position 568 of SEQ ID NO: 914342
uaaaucagauccgugaaua

SEQ ID NO: 996697 - RNA, 19 nt, Artificial Sequence
  Description of Artificial Sequence: Synthetic oligonucleotide
  Antisense strand to SEQ ID NO: 996696
uauucacggaucugauuua

SEQ ID NO: 996698 - RNA, 19 nt, Artificial Sequence
  Description of Artificial Sequence: Synthetic oligonucleotide
  Sense strand starting at position 569 of SEQ ID NO: 914342
aaaucagauccgugaauac

SEQ ID NO: 996699 - RNA, 19 nt, Artificial Sequence
  Description of Artificial Sequence: Synthetic oligonucleotide
  Antisense strand to SEQ ID NO: 996698
guauucacggaucugauuu

SEQ ID NO: 996700 - RNA, 19 nt, Artificial Sequence
  Description of Artificial Sequence: Synthetic oligonucleotide
  Sense strand starting at position 629 of SEQ ID NO: 914342
ucaugucuucgggaaagca

SEQ ID NO: 996701 - RNA, 19 nt, Artificial Sequence
  Description of Artificial Sequence: Synthetic oligonucleotide
  Antisense strand to SEQ ID NO: 996700
ugcuuucccgaagacauga

SEQ ID NO: 996702 - RNA, 19 nt, Artificial Sequence
  Description of Artificial Sequence: Synthetic oligonucleotide
  Sense strand starting at position 714 of SEQ ID NO: 914342
cguuaaguauggguugaaa

SEQ ID NO: 996703 - RNA, 19 nt, Artificial Sequence
  Description of Artificial Sequence: Synthetic oligonucleotide
  Antisense strand to SEQ ID NO: 996702
uuucaacccauacuuaacg

SEQ ID NO: 996704 - RNA, 19 nt, Artificial Sequence
  Description of Artificial Sequence: Synthetic oligonucleotide
  Sense strand starting at position 762 of SEQ ID NO: 914342
ccucaaggucguuaggaua

SEQ ID NO: 996705 - RNA, 19 nt, Artificial Sequence
  Description of Artificial Sequence: Synthetic oligonucleotide
  Antisense strand to SEQ ID NO: 996704
uauccuaacgaccuugagg

SEQ ID NO: 996706 - RNA, 19 nt, Artificial Sequence
  Description of Artificial Sequence: Synthetic oligonucleotide
  Sense strand starting at position 1890 of SEQ ID NO: 914342
aggcuuuauccuggaacca

SEQ ID NO: 996707 - RNA, 19 nt, Artificial Sequence
  Description of Artificial Sequence: Synthetic oligonucleotide
  Antisense strand to SEQ ID NO: 996706
ugguuccaggauaaagccu

SEQ ID NO: 996708 - RNA, 19 nt, Artificial Sequence
  Description of Artificial Sequence: Synthetic oligonucleotide
  Sense strand starting at position 1891 of SEQ ID NO: 914342
ggcuuuauccuggaaccac

SEQ ID NO: 996709 - RNA, 19 nt, Artificial Sequence
  Description of Artificial Sequence: Synthetic oligonucleotide
  Antisense strand to SEQ ID NO: 996708
gugguuccaggauaaagcc

SEQ ID NO: 996710 - RNA, 19 nt, Artificial Sequence
  Description of Artificial Sequence: Synthetic oligonucleotide
  Sense strand starting at position 1916 of SEQ ID NO: 914342
gagagacagcuuugguguu

SEQ ID NO: 996711 - RNA, 19 nt, Artificial Sequence
  Description of Artificial Sequence: Synthetic oligonucleotide
  Antisense strand to SEQ ID NO: 996710
aacaccaaagcugucucuc

SEQ ID NO: 996712 - RNA, 19 nt, Artificial Sequence
  Description of Artificial Sequence: Synthetic oligonucleotide
  Sense strand starting at position 1991 of SEQ ID NO: 914342
gaacgucacugggucuuua

SEQ ID NO: 996713 - RNA, 19 nt, Artificial Sequence
  Description of Artificial Sequence: Synthetic oligonucleotide
  Antisense strand to SEQ ID NO: 996712
uaaagacccagugacguuc

SEQ ID NO: 996714 - RNA, 19 nt, Artificial Sequence
  Description of Artificial Sequence: Synthetic oligonucleotide
  Sense strand starting at position 1995 of SEQ ID NO: 914342
gucacugggucuuuaauga

SEQ ID NO: 996715 - RNA, 19 nt, Artificial Sequence
  Description of Artificial Sequence: Synthetic oligonucleotide
  Antisense strand to SEQ ID NO: 996714
ucauuaaagacccagugac

SEQ ID NO: 996716 - RNA, 19 nt, Artificial Sequence
  Description of Artificial Sequence: Synthetic oligonucleotide
  Sense strand starting at position 2916 of SEQ ID NO: 914342
cuaaauacugcuggcagau

SEQ ID NO: 996717 - RNA, 19 nt, Artificial Sequence
  Description of Artificial Sequence: Synthetic oligonucleotide
  Antisense strand to SEQ ID NO: 996716
aucugccagcaguauuuag

SEQ ID NO: 996718 - RNA, 19 nt, Artificial Sequence
  Description of Artificial Sequence: Synthetic oligonucleotide
  Sense strand starting at position 3232 of SEQ ID NO: 914342
caaauuauagguggacuua

SEQ ID NO: 996719 - RNA, 19 nt, Artificial Sequence
  Description of Artificial Sequence: Synthetic oligonucleotide
  Antisense strand to SEQ ID NO: 996718
uaaguccaccuauaauuug

SEQ ID NO: 996720 - RNA, 19 nt, Artificial Sequence
  Description of Artificial Sequence: Synthetic oligonucleotide
  Sense strand starting at position 3300 of SEQ ID NO: 914342
uuguguuauuuccuucuca

SEQ ID NO: 996721 - RNA, 19 nt, Artificial Sequence
  Description of Artificial Sequence: Synthetic oligonucleotide
  Antisense strand to SEQ ID NO: 996720
ugagaaggaaauaacacaa

SEQ ID NO: 996722 - RNA, 19 nt, Artificial Sequence
  Description of Artificial Sequence: Synthetic oligonucleotide
  Sense strand starting at position 3301 of SEQ ID NO: 914342
uguguuauuuccuucucaa

SEQ ID NO: 996723 - RNA, 19 nt, Artificial Sequence
  Description of Artificial Sequence: Synthetic oligonucleotide
  Antisense strand to SEQ ID NO: 996722
uugagaaggaaauaacaca

SEQ ID NO: 996724 - RNA, 19 nt, Artificial Sequence
  Description of Artificial Sequence: Synthetic oligonucleotide
  Sense strand starting at position 3315 of SEQ ID NO: 914342
cucaaauauccagggucau

SEQ ID NO: 996725 - RNA, 19 nt, Artificial Sequence
  Description of Artificial Sequence: Synthetic oligonucleotide
  Antisense strand to SEQ ID NO: 996724
augacccuggauauuugag

SEQ ID NO: 996726 - RNA, 19 nt, Artificial Sequence
  Description of Artificial Sequence: Synthetic oligonucleotide
  Sense strand starting at position 3316 of SEQ ID NO: 914342
ucaaauauccagggucauc

SEQ ID NO: 996727 - RNA, 19 nt, Artificial Sequence
  Description of Artificial Sequence: Synthetic oligonucleotide
  Antisense strand to SEQ ID NO: 996726
gaugacccuggauauuuga

SEQ ID NO: 996728 - RNA, 19 nt, Artificial Sequence
  Description of Artificial Sequence: Synthetic oligonucleotide
  Sense strand starting at position 3343 of SEQ ID NO: 914342
ggacauugaaagugccaaa

SEQ ID NO: 996729 - RNA, 19 nt, Artificial Sequence
  Description of Artificial Sequence: Synthetic oligonucleotide
  Antisense strand to SEQ ID NO: 996728
uuuggcacuuucaaugucc

SEQ ID NO: 996730 - RNA, 19 nt, Artificial Sequence
  Description of Artificial Sequence: Synthetic oligonucleotide
  Sense strand starting at position 3393 of SEQ ID NO: 914342
gcuaucucacucugaauug

SEQ ID NO: 996731 - RNA, 19 nt, Artificial Sequence
  Description of Artificial Sequence: Synthetic oligonucleotide
  Antisense strand to SEQ ID NO: 996730
caauucagagugagauagc

SEQ ID NO: 996732 - RNA, 19 nt, Artificial Sequence
  Description of Artificial Sequence: Synthetic oligonucleotide
  Sense strand starting at position 3435 of SEQ ID NO: 914342
ugagcuucccuugagguuu

SEQ ID NO: 996733 - RNA, 19 nt, Artificial Sequence
  Description of Artificial Sequence: Synthetic oligonucleotide
  Antisense strand to SEQ ID NO: 996732
aaaccucaagggaagcuca

SEQ ID NO: 996734 - RNA, 19 nt, Artificial Sequence
  Description of Artificial Sequence: Synthetic oligonucleotide
  Sense strand starting at position 3461 of SEQ ID NO: 914342
guaggugacauguagacau

SEQ ID NO: 996735 - RNA, 19 nt, Artificial Sequence
  Description of Artificial Sequence: Synthetic oligonucleotide
  Antisense strand to SEQ ID NO: 996734
augucuacaugucaccuac

SEQ ID NO: 996736 - RNA, 19 nt, Artificial Sequence
  Description of Artificial Sequence: Synthetic oligonucleotide
  Sense strand starting at position 3512 of SEQ ID NO: 914342
agacuuaccuggcucugau

SEQ ID NO: 996737 - RNA, 19 nt, Artificial Sequence
  Description of Artificial Sequence: Synthetic oligonucleotide
  Antisense strand to SEQ ID NO: 996736
aucagagccagguaagucu

SEQ ID NO: 996738 - RNA, 19 nt, Artificial Sequence
  Description of Artificial Sequence: Synthetic oligonucleotide
  Sense strand starting at position 3617 of SEQ ID NO: 914342
guuguucuaggcuaaguga

SEQ ID NO: 996739 - RNA, 19 nt, Artificial Sequence
  Description of Artificial Sequence: Synthetic oligonucleotide
  Antisense strand to SEQ ID NO: 996738
ucacuuagccuagaacaac

SEQ ID NO: 996740 - RNA, 19 nt, Artificial Sequence
  Description of Artificial Sequence: Synthetic oligonucleotide
  Sense strand starting at position 3640 of SEQ ID NO: 914342
uguguuuggaaaugaugac

SEQ ID NO: 996741 - RNA, 19 nt, Artificial Sequence
  Description of Artificial Sequence: Synthetic oligonucleotide
  Antisense strand to SEQ ID NO: 996740
gucaucauuuccaaacaca

SEQ ID NO: 996742 - RNA, 19 nt, Artificial Sequence
  Description of Artificial Sequence: Synthetic oligonucleotide
  Sense strand starting at position 3641 of SEQ ID NO: 914342
guguuuggaaaugaugacu

SEQ ID NO: 996743 - RNA, 19 nt, Artificial Sequence
  Description of Artificial Sequence: Synthetic oligonucleotide
  Antisense strand to SEQ ID NO: 996742
agucaucauuuccaaacac

SEQ ID NO: 996744 - RNA, 19 nt, Artificial Sequence
  Description of Artificial Sequence: Synthetic oligonucleotide
  Sense strand starting at position 3734 of SEQ ID NO: 914342
auacucaagugguuuauga

SEQ ID NO: 996745 - RNA, 19 nt, Artificial Sequence
  Description of Artificial Sequence: Synthetic oligonucleotide
  Antisense strand to SEQ ID NO: 996744
ucauaaaccacuugaguau

SEQ ID NO: 996746 - RNA, 19 nt, Artificial Sequence
  Description of Artificial Sequence: Synthetic oligonucleotide
  Sense strand starting at position 3858 of SEQ ID NO: 914342
gccauaaugcugcauaaga

SEQ ID NO: 996747 - RNA, 19 nt, Artificial Sequence
  Description of Artificial Sequence: Synthetic oligonucleotide
  Antisense strand to SEQ ID NO: 996746
ucuuaugcagcauuauggc

SEQ ID NO: 996748 - RNA, 19 nt, Artificial Sequence
  Description of Artificial Sequence: Synthetic oligonucleotide
  Sense strand starting at position 3975 of SEQ ID NO: 914342
ccucuaugugcaggaucau

SEQ ID NO: 996749 - RNA, 19 nt, Artificial Sequence
  Description of Artificial Sequence: Synthetic oligonucleotide
  Antisense strand to SEQ ID NO: 996748
augauccugcacauagagg

SEQ ID NO: 996750 - RNA, 19 nt, Artificial Sequence
  Description of Artificial Sequence: Synthetic oligonucleotide
  Sense strand starting at position 3976 of SEQ ID NO: 914342
cucuaugugcaggaucauu

SEQ ID NO: 996751 - RNA, 19 nt, Artificial Sequence
  Description of Artificial Sequence: Synthetic oligonucleotide
  Antisense strand to SEQ ID NO: 996750
aaugauccugcacauagag

SEQ ID NO: 996752 - RNA, 19 nt, Artificial Sequence
  Description of Artificial Sequence: Synthetic oligonucleotide
  Sense strand starting at position 175 of SEQ ID NO: 914343
gccacuguacuccaguuua

SEQ ID NO: 996753 - RNA, 19 nt, Artificial Sequence
  Description of Artificial Sequence: Synthetic oligonucleotide
  Antisense strand to SEQ ID NO: 996752
uaaacuggaguacaguggc

SEQ ID NO: 996754 - RNA, 19 nt, Artificial Sequence
  Description of Artificial Sequence: Synthetic oligonucleotide
  Sense strand starting at position 400 of SEQ ID NO: 914343
gcuggacuacugcaauacu

SEQ ID NO: 996755 - RNA, 19 nt, Artificial Sequence
  Description of Artificial Sequence: Synthetic oligonucleotide
  Antisense strand to SEQ ID NO: 996754
aguauugcaguaguccagc

SEQ ID NO: 996756 - RNA, 19 nt, Artificial Sequence
  Description of Artificial Sequence: Synthetic oligonucleotide
  Sense strand starting at position 417 of SEQ ID NO: 914343
cugagauccuucucagcca

SEQ ID NO: 996757 - RNA, 19 nt, Artificial Sequence
  Description of Artificial Sequence: Synthetic oligonucleotide
  Antisense strand to SEQ ID NO: 996756
uggcugagaaggaucucag

SEQ ID NO: 996758 - RNA, 19 nt, Artificial Sequence
  Description of Artificial Sequence: Synthetic oligonucleotide
  Sense strand starting at position 461 of SEQ ID NO: 914343
acaggaauuucuggaguac

SEQ ID NO: 996759 - RNA, 19 nt, Artificial Sequence
  Description of Artificial Sequence: Synthetic oligonucleotide
  Antisense strand to SEQ ID NO: 996758
guacuccagaaauuccugu

SEQ ID NO: 996760 - RNA, 19 nt, Artificial Sequence
  Description of Artificial Sequence: Synthetic oligonucleotide
  Sense strand starting at position 479 of SEQ ID NO: 914343
caagcuaaucucuguggga

SEQ ID NO: 996761 - RNA, 19 nt, Artificial Sequence
  Description of Artificial Sequence: Synthetic oligonucleotide
  Antisense strand to SEQ ID NO: 996760
ucccacagagauuagcuug

SEQ ID NO: 996762 - RNA, 19 nt, Artificial Sequence
  Description of Artificial Sequence: Synthetic oligonucleotide
  Sense strand starting at position 480 of SEQ ID NO: 914343
aagcuaaucucugugggaa

SEQ ID NO: 996763 - RNA, 19 nt, Artificial Sequence
  Description of Artificial Sequence: Synthetic oligonucleotide
  Antisense strand to SEQ ID NO: 996762
uucccacagagauuagcuu

SEQ ID NO: 996764 - RNA, 19 nt, Artificial Sequence
  Description of Artificial Sequence: Synthetic oligonucleotide
  Sense strand starting at position 481 of SEQ ID NO: 914343
agcuaaucucugugggaau

SEQ ID NO: 996765 - RNA, 19 nt, Artificial Sequence
  Description of Artificial Sequence: Synthetic oligonucleotide
  Antisense strand to SEQ ID NO: 996764
auucccacagagauuagcu

SEQ ID NO: 996766 - RNA, 19 nt, Artificial Sequence
  Description of Artificial Sequence: Synthetic oligonucleotide
  Sense strand starting at position 564 of SEQ ID NO: 914343
auuaguacuccguagguua

SEQ ID NO: 996767 - RNA, 19 nt, Artificial Sequence
  Description of Artificial Sequence: Synthetic oligonucleotide
  Antisense strand to SEQ ID NO: 996766
uaaccuacggaguacuaau

SEQ ID NO: 996768 - RNA, 19 nt, Artificial Sequence
  Description of Artificial Sequence: Synthetic oligonucleotide
  Sense strand starting at position 600 of SEQ ID NO: 914343
aaaguaagccaauauguga

SEQ ID NO: 996769 - RNA, 19 nt, Artificial Sequence
  Description of Artificial Sequence: Synthetic oligonucleotide
  Antisense strand to SEQ ID NO: 996768
ucacauauuggcuuacuuu

SEQ ID NO: 996770 - RNA, 19 nt, Artificial Sequence
  Description of Artificial Sequence: Synthetic oligonucleotide
  Sense strand starting at position 603 of SEQ ID NO: 914343
guaagccaauaugugaaau

SEQ ID NO: 996771 - RNA, 19 nt, Artificial Sequence
  Description of Artificial Sequence: Synthetic oligonucleotide
  Antisense strand to SEQ ID NO: 996770
auuucacauauuggcuuac

SEQ ID NO: 996772 - RNA, 19 nt, Artificial Sequence
  Description of Artificial Sequence: Synthetic oligonucleotide
  Sense strand starting at position 659 of SEQ ID NO: 914343
cguuccauugcuucguauu

SEQ ID NO: 996773 - RNA, 19 nt, Artificial Sequence
  Description of Artificial Sequence: Synthetic oligonucleotide
  Antisense strand to SEQ ID NO: 996772
aauacgaagcaauggaacg

SEQ ID NO: 996774 - RNA, 19 nt, Artificial Sequence
  Description of Artificial Sequence: Synthetic oligonucleotide
  Sense strand starting at position 665 of SEQ ID NO: 914343
auugcuucguauuugaauu

SEQ ID NO: 996775 - RNA, 19 nt, Artificial Sequence
  Description of Artificial Sequence: Synthetic oligonucleotide
  Antisense strand to SEQ ID NO: 996774
aauucaaauacgaagcaau

SEQ ID NO: 996776 - RNA, 19 nt, Artificial Sequence
  Description of Artificial Sequence: Synthetic oligonucleotide
  Sense strand starting at position 738 of SEQ ID NO: 914343
cgauuucgcaagugaaacg

SEQ ID NO: 996777 - RNA, 19 nt, Artificial Sequence
  Description of Artificial Sequence: Synthetic oligonucleotide
  Antisense strand to SEQ ID NO: 996776
cguuucacuugcgaaaucg

SEQ ID NO: 996778 - RNA, 19 nt, Artificial Sequence
  Description of Artificial Sequence: Synthetic oligonucleotide
  Sense strand starting at position 812 of SEQ ID NO: 914343
uaaaucagauccgugaaua

SEQ ID NO: 996779 - RNA, 19 nt, Artificial Sequence
  Description of Artificial Sequence: Synthetic oligonucleotide
  Antisense strand to SEQ ID NO: 996778
uauucacggaucugauuua

SEQ ID NO: 996780 - RNA, 19 nt, Artificial Sequence
  Description of Artificial Sequence: Synthetic oligonucleotide
  Sense strand starting at position 813 of SEQ ID NO: 914343
aaaucagauccgugaauac

SEQ ID NO: 996781 - RNA, 19 nt, Artificial Sequence
  Description of Artificial Sequence: Synthetic oligonucleotide
  Antisense strand to SEQ ID NO: 996780
guauucacggaucugauuu

SEQ ID NO: 996782 - RNA, 19 nt, Artificial Sequence
  Description of Artificial Sequence: Synthetic oligonucleotide
  Sense strand starting at position 873 of SEQ ID NO: 914343
ucaugucuucgggaaagca

SEQ ID NO: 996783 - RNA, 19 nt, Artificial Sequence
  Description of Artificial Sequence: Synthetic oligonucleotide
  Antisense strand to SEQ ID NO: 996782
ugcuuucccgaagacauga

SEQ ID NO: 996784 - RNA, 19 nt, Artificial Sequence
  Description of Artificial Sequence: Synthetic oligonucleotide
  Sense strand starting at position 958 of SEQ ID NO: 914343
cguuaaguauggguugaaa

SEQ ID NO: 996785 - RNA, 19 nt, Artificial Sequence
  Description of Artificial Sequence: Synthetic oligonucleotide
  Antisense strand to SEQ ID NO: 996784
uuucaacccauacuuaacg

SEQ ID NO: 996786 - RNA, 19 nt, Artificial Sequence
  Description of Artificial Sequence: Synthetic oligonucleotide
  Sense strand starting at position 1006 of SEQ ID NO: 914343
ccucaaggucguuaggaua

SEQ ID NO: 996787 - RNA, 19 nt, Artificial Sequence
  Description of Artificial Sequence: Synthetic oligonucleotide
  Antisense strand to SEQ ID NO: 996786
uauccuaacgaccuugagg

SEQ ID NO: 996788 - RNA, 19 nt, Artificial Sequence
  Description of Artificial Sequence: Synthetic oligonucleotide
  Sense strand starting at position 2134 of SEQ ID NO: 914343
aggcuuuauccuggaacca

SEQ ID NO: 996789 - RNA, 19 nt, Artificial Sequence
  Description of Artificial Sequence: Synthetic oligonucleotide
  Antisense strand to SEQ ID NO: 996788
ugguuccaggauaaagccu

SEQ ID NO: 996790 - RNA, 19 nt, Artificial Sequence
  Description of Artificial Sequence: Synthetic oligonucleotide
  Sense strand starting at position 2135 of SEQ ID NO: 914343
ggcuuuauccuggaaccac

SEQ ID NO: 996791 - RNA, 19 nt, Artificial Sequence
  Description of Artificial Sequence: Synthetic oligonucleotide
  Antisense strand to SEQ ID NO: 996790
gugguuccaggauaaagcc

SEQ ID NO: 996792 - RNA, 19 nt, Artificial Sequence
  Description of Artificial Sequence: Synthetic oligonucleotide
  Sense strand starting at position 2160 of SEQ ID NO: 914343
gagagacagcuuugguguu

SEQ ID NO: 996793 - RNA, 19 nt, Artificial Sequence
  Description of Artificial Sequence: Synthetic oligonucleotide
  Antisense strand to SEQ ID NO: 996792
aacaccaaagcugucucuc

SEQ ID NO: 996794 - RNA, 19 nt, Artificial Sequence
  Description of Artificial Sequence: Synthetic oligonucleotide
  Sense strand starting at position 2162 of SEQ ID NO: 914343
gagacagcuuugguguuua

SEQ ID NO: 996795 - RNA, 19 nt, Artificial Sequence
  Description of Artificial Sequence: Synthetic oligonucleotide
  Antisense strand to SEQ ID NO: 996794
uaaacaccaaagcugucuc

SEQ ID NO: 996796 - RNA, 19 nt, Artificial Sequence
  Description of Artificial Sequence: Synthetic oligonucleotide
  Sense strand starting at position 2235 of SEQ ID NO: 914343
gaacgucacugggucuuua

SEQ ID NO: 996797 - RNA, 19 nt, Artificial Sequence
  Description of Artificial Sequence: Synthetic oligonucleotide
  Antisense strand to SEQ ID NO: 996796
uaaagacccagugacguuc

SEQ ID NO: 996798 - RNA, 19 nt, Artificial Sequence
  Description of Artificial Sequence: Synthetic oligonucleotide
  Sense strand starting at position 2239 of SEQ ID NO: 914343
gucacugggucuuuaauga

SEQ ID NO: 996799 - RNA, 19 nt, Artificial Sequence
  Description of Artificial Sequence: Synthetic oligonucleotide
  Antisense strand to SEQ ID NO: 996798
ucauuaaagacccagugac

SEQ ID NO: 996800 - RNA, 19 nt, Artificial Sequence
  Description of Artificial Sequence: Synthetic oligonucleotide
  Sense strand starting at position 3160 of SEQ ID NO: 914343
cuaaauacugcuggcagau

SEQ ID NO: 996801 - RNA, 19 nt, Artificial Sequence
  Description of Artificial Sequence: Synthetic oligonucleotide
  Antisense strand to SEQ ID NO: 996800
aucugccagcaguauuuag

SEQ ID NO: 996802 - RNA, 19 nt, Artificial Sequence
  Description of Artificial Sequence: Synthetic oligonucleotide
  Sense strand starting at position 3476 of SEQ ID NO: 914343
caaauuauagguggacuua

SEQ ID NO: 996803 - RNA, 19 nt, Artificial Sequence
  Description of Artificial Sequence: Synthetic oligonucleotide
  Antisense strand to SEQ ID NO: 996802
uaaguccaccuauaauuug

SEQ ID NO: 996804 - RNA, 19 nt, Artificial Sequence
  Description of Artificial Sequence: Synthetic oligonucleotide
  Sense strand starting at position 3544 of SEQ ID NO: 914343
uuguguuauuuccuucuca

SEQ ID NO: 996805 - RNA, 19 nt, Artificial Sequence
  Description of Artificial Sequence: Synthetic oligonucleotide
  Antisense strand to SEQ ID NO: 996804
ugagaaggaaauaacacaa

SEQ ID NO: 996806 - RNA, 19 nt, Artificial Sequence
  Description of Artificial Sequence: Synthetic oligonucleotide
  Sense strand starting at position 3545 of SEQ ID NO: 914343
uguguuauuuccuucucaa

SEQ ID NO: 996807 - RNA, 19 nt, Artificial Sequence
  Description of Artificial Sequence: Synthetic oligonucleotide
  Antisense strand to SEQ ID NO: 996806
uugagaaggaaauaacaca

SEQ ID NO: 996808 - RNA, 19 nt, Artificial Sequence
  Description of Artificial Sequence: Synthetic oligonucleotide
  Sense strand starting at position 3559 of SEQ ID NO: 914343
cucaaauauccagggucau

SEQ ID NO: 996809 - RNA, 19 nt, Artificial Sequence
  Description of Artificial Sequence: Synthetic oligonucleotide
  Antisense strand to SEQ ID NO: 996808
augacccuggauauuugag

SEQ ID NO: 996810 - RNA, 19 nt, Artificial Sequence
  Description of Artificial Sequence: Synthetic oligonucleotide
  Sense strand starting at position 3560 of SEQ ID NO: 914343
ucaaauauccagggucauc

SEQ ID NO: 996811 - RNA, 19 nt, Artificial Sequence
  Description of Artificial Sequence: Synthetic oligonucleotide
  Antisense strand to SEQ ID NO: 996810
gaugacccuggauauuuga

SEQ ID NO: 996812 - RNA, 19 nt, Artificial Sequence
  Description of Artificial Sequence: Synthetic oligonucleotide
  Sense strand starting at position 3587 of SEQ ID NO: 914343
ggacauugaaagugccaaa

SEQ ID NO: 996813 - RNA, 19 nt, Artificial Sequence
  Description of Artificial Sequence: Synthetic oligonucleotide
  Antisense strand to SEQ ID NO: 996812
uuuggcacuuucaaugucc

SEQ ID NO: 996814 - RNA, 19 nt, Artificial Sequence
  Description of Artificial Sequence: Synthetic oligonucleotide
  Sense strand starting at position 3637 of SEQ ID NO: 914343
gcuaucucacucugaauug

SEQ ID NO: 996815 - RNA, 19 nt, Artificial Sequence
  Description of Artificial Sequence: Synthetic oligonucleotide
  Antisense strand to SEQ ID NO: 996814
caauucagagugagauagc

SEQ ID NO: 996816 - RNA, 19 nt, Artificial Sequence
  Description of Artificial Sequence: Synthetic oligonucleotide
  Sense strand starting at position 3656 of SEQ ID NO: 914343
aguuaugugcuaugaucag

SEQ ID NO: 996817 - RNA, 19 nt, Artificial Sequence
  Description of Artificial Sequence: Synthetic oligonucleotide
  Antisense strand to SEQ ID NO: 996816
cugaucauagcacauaacu

SEQ ID NO: 996818 - RNA, 19 nt, Artificial Sequence
  Description of Artificial Sequence: Synthetic oligonucleotide
  Sense strand starting at position 3679 of SEQ ID NO: 914343
ugagcuucccuugagguuu

SEQ ID NO: 996819 - RNA, 19 nt, Artificial Sequence
  Description of Artificial Sequence: Synthetic oligonucleotide
  Antisense strand to SEQ ID NO: 996818
aaaccucaagggaagcuca

SEQ ID NO: 996820 - RNA, 19 nt, Artificial Sequence
  Description of Artificial Sequence: Synthetic oligonucleotide
  Sense strand starting at position 3705 of SEQ ID NO: 914343
guaggugacauguagacau

SEQ ID NO: 996821 - RNA, 19 nt, Artificial Sequence
  Description of Artificial Sequence: Synthetic oligonucleotide
  Antisense strand to SEQ ID NO: 996820
augucuacaugucaccuac

SEQ ID NO: 996822 - RNA, 19 nt, Artificial Sequence
  Description of Artificial Sequence: Synthetic oligonucleotide
  Sense strand starting at position 3756 of SEQ ID NO: 914343
agacuuaccuggcucugau

SEQ ID NO: 996823 - RNA, 19 nt, Artificial Sequence
  Description of Artificial Sequence: Synthetic oligonucleotide
  Antisense strand to SEQ ID NO: 996822
aucagagccagguaagucu

SEQ ID NO: 996824 - RNA, 19 nt, Artificial Sequence
  Description of Artificial Sequence: Synthetic oligonucleotide
  Sense strand starting at position 3861 of SEQ ID NO: 914343
guuguucuaggcuaaguga

SEQ ID NO: 996825 - RNA, 19 nt, Artificial Sequence
  Description of Artificial Sequence: Synthetic oligonucleotide
  Antisense strand to SEQ ID NO: 996824
ucacuuagccuagaacaac

SEQ ID NO: 996826 - RNA, 19 nt, Artificial Sequence
  Description of Artificial Sequence: Synthetic oligonucleotide
  Sense strand starting at position 3884 of SEQ ID NO: 914343
uguguuuggaaaugaugac

SEQ ID NO: 996827 - RNA, 19 nt, Artificial Sequence
  Description of Artificial Sequence: Synthetic oligonucleotide
  Antisense strand to SEQ ID NO: 996826
gucaucauuuccaaacaca

SEQ ID NO: 996828 - RNA, 19 nt, Artificial Sequence
  Description of Artificial Sequence: Synthetic oligonucleotide
  Sense strand starting at position 3885 of SEQ ID NO: 914343
guguuuggaaaugaugacu

SEQ ID NO: 996829 - RNA, 19 nt, Artificial Sequence
  Description of Artificial Sequence: Synthetic oligonucleotide
  Antisense strand to SEQ ID NO: 996828
agucaucauuuccaaacac

SEQ ID NO: 996830 - RNA, 19 nt, Artificial Sequence
  Description of Artificial Sequence: Synthetic oligonucleotide
  Sense strand starting at position 3978 of SEQ ID NO: 914343
auacucaagugguuuauga

SEQ ID NO: 996831 - RNA, 19 nt, Artificial Sequence
  Description of Artificial Sequence: Synthetic oligonucleotide
  Antisense strand to SEQ ID NO: 996830
ucauaaaccacuugaguau

SEQ ID NO: 996832 - RNA, 19 nt, Artificial Sequence
  Description of Artificial Sequence: Synthetic oligonucleotide
  Sense strand starting at position 39 of SEQ ID NO: 914344
gauguaugccucugaggaa

SEQ ID NO: 996833 - RNA, 19 nt, Artificial Sequence
  Description of Artificial Sequence: Synthetic oligonucleotide
  Antisense strand to SEQ ID NO: 996832
uuccucagaggcauacauc

SEQ ID NO: 996834 - RNA, 19 nt, Artificial Sequence
  Description of Artificial Sequence: Synthetic oligonucleotide
  Sense strand starting at position 229 of SEQ ID NO: 914344
aggguucuacaauguuaaa

SEQ ID NO: 996835 - RNA, 19 nt, Artificial Sequence
  Description of Artificial Sequence: Synthetic oligonucleotide
  Antisense strand to SEQ ID NO: 996834
uuuaacauuguagaacccu

SEQ ID NO: 996836 - RNA, 19 nt, Artificial Sequence
  Description of Artificial Sequence: Synthetic oligonucleotide
  Sense strand starting at position 287 of SEQ ID NO: 914344
acuauuagguagucaacua

SEQ ID NO: 996837 - RNA, 19 nt, Artificial Sequence
  Description of Artificial Sequence: Synthetic oligonucleotide
  Antisense strand to SEQ ID NO: 996836
uaguugacuaccuaauagu

SEQ ID NO: 996838 - RNA, 19 nt, Artificial Sequence
  Description of Artificial Sequence: Synthetic oligonucleotide
  Sense strand starting at position 294 of SEQ ID NO: 914344
gguagucaacuagaguaug

SEQ ID NO: 996839 - RNA, 19 nt, Artificial Sequence
  Description of Artificial Sequence: Synthetic oligonucleotide
  Antisense strand to SEQ ID NO: 996838
cauacucuaguugacuacc

SEQ ID NO: 996840 - RNA, 19 nt, Artificial Sequence
  Description of Artificial Sequence: Synthetic oligonucleotide
  Sense strand starting at position 297 of SEQ ID NO: 914344
agucaacuagaguaugagu

SEQ ID NO: 996841 - RNA, 19 nt, Artificial Sequence
  Description of Artificial Sequence: Synthetic oligonucleotide
  Antisense strand to SEQ ID NO: 996840
acucauacucuaguugacu

SEQ ID NO: 996842 - RNA, 19 nt, Artificial Sequence
  Description of Artificial Sequence: Synthetic oligonucleotide
  Sense strand starting at position 615 of SEQ ID NO: 914344
cuguauaaucuagagcaag

SEQ ID NO: 996843 - RNA, 19 nt, Artificial Sequence
  Description of Artificial Sequence: Synthetic oligonucleotide
  Antisense strand to SEQ ID NO: 996842
cuugcucuagauuauacag

SEQ ID NO: 996844 - RNA, 19 nt, Artificial Sequence
  Description of Artificial Sequence: Synthetic oligonucleotide
  Sense strand starting at position 688 of SEQ ID NO: 914344
aguaccuaccucuaugagu

SEQ ID NO: 996845 - RNA, 19 nt, Artificial Sequence
  Description of Artificial Sequence: Synthetic oligonucleotide
  Antisense strand to SEQ ID NO: 996844
acucauagagguagguacu

SEQ ID NO: 996846 - RNA, 19 nt, Artificial Sequence
  Description of Artificial Sequence: Synthetic oligonucleotide
  Sense strand starting at position 697 of SEQ ID NO: 914344
cucuaugagucccuuuaag

SEQ ID NO: 996847 - RNA, 19 nt, Artificial Sequence
  Description of Artificial Sequence: Synthetic oligonucleotide
  Antisense strand to SEQ ID NO: 996846
cuuaaagggacucauagag

SEQ ID NO: 996848 - RNA, 19 nt, Artificial Sequence
  Description of Artificial Sequence: Synthetic oligonucleotide
  Sense strand starting at position 748 of SEQ ID NO: 914344
cagcaaauguuagcaauga

SEQ ID NO: 996849 - RNA, 19 nt, Artificial Sequence
  Description of Artificial Sequence: Synthetic oligonucleotide
  Antisense strand to SEQ ID NO: 996848
ucauugcuaacauuugcug

SEQ ID NO: 996850 - RNA, 19 nt, Artificial Sequence
  Description of Artificial Sequence: Synthetic oligonucleotide
  Sense strand starting at position 756 of SEQ ID NO: 914344
guuagcaaugaucauauua

SEQ ID NO: 996851 - RNA, 19 nt, Artificial Sequence
  Description of Artificial Sequence: Synthetic oligonucleotide
  Antisense strand to SEQ ID NO: 996850
uaauaugaucauugcuaac

SEQ ID NO: 996852 - RNA, 19 nt, Artificial Sequence
  Description of Artificial Sequence: Synthetic oligonucleotide
  Sense strand starting at position 769 of SEQ ID NO: 914344
auauuaacuuccguuauga

SEQ ID NO: 996853 - RNA, 19 nt, Artificial Sequence
  Description of Artificial Sequence: Synthetic oligonucleotide
  Antisense strand to SEQ ID NO: 996852
ucauaacggaaguuaauau

SEQ ID NO: 996854 - RNA, 19 nt, Artificial Sequence
  Description of Artificial Sequence: Synthetic oligonucleotide
  Sense strand starting at position 771 of SEQ ID NO: 914344
auuaacuuccguuaugacu

SEQ ID NO: 996855 - RNA, 19 nt, Artificial Sequence
  Description of Artificial Sequence: Synthetic oligonucleotide
  Antisense strand to SEQ ID NO: 996854
agucauaacggaaguuaau

SEQ ID NO: 996856 - RNA, 19 nt, Artificial Sequence
  Description of Artificial Sequence: Synthetic oligonucleotide
  Sense strand starting at position 1077 of SEQ ID NO: 914344
cuccucuaccaucagagua

SEQ ID NO: 996857 - RNA, 19 nt, Artificial Sequence
  Description of Artificial Sequence: Synthetic oligonucleotide
  Antisense strand to SEQ ID NO: 996856
uacucugaugguagaggag

SEQ ID NO: 996858 - RNA, 19 nt, Artificial Sequence
  Description of Artificial Sequence: Synthetic oligonucleotide
  Sense strand starting at position 1187 of SEQ ID NO: 914344
aggucaagauuaucucacu

SEQ ID NO: 996859 - RNA, 19 nt, Artificial Sequence
  Description of Artificial Sequence: Synthetic oligonucleotide
  Antisense strand to SEQ ID NO: 996858
agugagauaaucuugaccu

SEQ ID NO: 996860 - RNA, 19 nt, Artificial Sequence
  Description of Artificial Sequence: Synthetic oligonucleotide
  Sense strand starting at position 1188 of SEQ ID NO: 914344
ggucaagauuaucucacuu

SEQ ID NO: 996861 - RNA, 19 nt, Artificial Sequence
  Description of Artificial Sequence: Synthetic oligonucleotide
  Antisense strand to SEQ ID NO: 996860
aagugagauaaucuugacc

SEQ ID NO: 996862 - RNA, 19 nt, Artificial Sequence
  Description of Artificial Sequence: Synthetic oligonucleotide
  Sense strand starting at position 1293 of SEQ ID NO: 914344
cgaggcugaaguugaaaua

SEQ ID NO: 996863 - RNA, 19 nt, Artificial Sequence
  Description of Artificial Sequence: Synthetic oligonucleotide
  Antisense strand to SEQ ID NO: 996862
uauuucaacuucagccucg

SEQ ID NO: 996864 - RNA, 19 nt, Artificial Sequence
  Description of Artificial Sequence: Synthetic oligonucleotide
  Sense strand starting at position 1360 of SEQ ID NO: 914344
aaagaugacuagucaaguc

SEQ ID NO: 996865 - RNA, 19 nt, Artificial Sequence
  Description of Artificial Sequence: Synthetic oligonucleotide
  Antisense strand to SEQ ID NO: 996864
gacuugacuagucaucuuu

SEQ ID NO: 996866 - RNA, 19 nt, Artificial Sequence
  Description of Artificial Sequence: Synthetic oligonucleotide
  Sense strand starting at position 1365 of SEQ ID NO: 914344
ugacuagucaagucgcgua

SEQ ID NO: 996867 - RNA, 19 nt, Artificial Sequence
  Description of Artificial Sequence: Synthetic oligonucleotide
  Antisense strand to SEQ ID NO: 996866
uacgcgacuugacuaguca

SEQ ID NO: 996868 - RNA, 19 nt, Artificial Sequence
  Description of Artificial Sequence: Synthetic oligonucleotide
  Sense strand starting at position 1369 of SEQ ID NO: 914344
uagucaagucgcguaguua

SEQ ID NO: 996869 - RNA, 19 nt, Artificial Sequence
  Description of Artificial Sequence: Synthetic oligonucleotide
  Antisense strand to SEQ ID NO: 996868
uaacuacgcgacuugacua

SEQ ID NO: 996870 - RNA, 19 nt, Artificial Sequence
  Description of Artificial Sequence: Synthetic oligonucleotide
  Sense strand starting at position 1372 of SEQ ID NO: 914344
ucaagucgcguaguuaaau

SEQ ID NO: 996871 - RNA, 19 nt, Artificial Sequence
  Description of Artificial Sequence: Synthetic oligonucleotide
  Antisense strand to SEQ ID NO: 996870
auuuaacuacgcgacuuga

SEQ ID NO: 996872 - RNA, 19 nt, Artificial Sequence
  Description of Artificial Sequence: Synthetic oligonucleotide
  Sense strand starting at position 1589 of SEQ ID NO: 914344
gucgcacacgacugaauuu

SEQ ID NO: 996873 - RNA, 19 nt, Artificial Sequence
  Description of Artificial Sequence: Synthetic oligonucleotide
  Antisense strand to SEQ ID NO: 996872
aaauucagucgugugcgac

SEQ ID NO: 996874 - RNA, 19 nt, Artificial Sequence
  Description of Artificial Sequence: Synthetic oligonucleotide
  Sense strand starting at position 1601 of SEQ ID NO: 914344
ugaauuucccagcgcagaa

SEQ ID NO: 996875 - RNA, 19 nt, Artificial Sequence
  Description of Artificial Sequence: Synthetic oligonucleotide
  Antisense strand to SEQ ID NO: 996874
uucugcgcugggaaauuca

SEQ ID NO: 996876 - RNA, 19 nt, Artificial Sequence
  Description of Artificial Sequence: Synthetic oligonucleotide
  Sense strand starting at position 2144 of SEQ ID NO: 914344
agcgauuggcugccgugaa

SEQ ID NO: 996877 - RNA, 19 nt, Artificial Sequence
  Description of Artificial Sequence: Synthetic oligonucleotide
  Antisense strand to SEQ ID NO: 996876
uucacggcagccaaucgcu

SEQ ID NO: 996878 - RNA, 19 nt, Artificial Sequence
  Description of Artificial Sequence: Synthetic oligonucleotide
  Sense strand starting at position 2368 of SEQ ID NO: 914344
ccggcuaugcuggacagaa

SEQ ID NO: 996879 - RNA, 19 nt, Artificial Sequence
  Description of Artificial Sequence: Synthetic oligonucleotide
  Antisense strand to SEQ ID NO: 996878
uucuguccagcauagccgg

SEQ ID NO: 996880 - RNA, 19 nt, Artificial Sequence
  Description of Artificial Sequence: Synthetic oligonucleotide
  Sense strand starting at position 2483 of SEQ ID NO: 914344
ggagguucugggcaguuua

SEQ ID NO: 996881 - RNA, 19 nt, Artificial Sequence
  Description of Artificial Sequence: Synthetic oligonucleotide
  Antisense strand to SEQ ID NO: 996880
uaaacugcccagaaccucc

SEQ ID NO: 996882 - RNA, 19 nt, Artificial Sequence
  Description of Artificial Sequence: Synthetic oligonucleotide
  Sense strand starting at position 2494 of SEQ ID NO: 914344
gcaguuuaagccucuuugu

SEQ ID NO: 996883 - RNA, 19 nt, Artificial Sequence
  Description of Artificial Sequence: Synthetic oligonucleotide
  Antisense strand to SEQ ID NO: 996882
acaaagaggcuuaaacugc

SEQ ID NO: 996884 - RNA, 19 nt, Artificial Sequence
  Description of Artificial Sequence: Synthetic oligonucleotide
  Sense strand starting at position 2638 of SEQ ID NO: 914344
agagcauuugucugcauga

SEQ ID NO: 996885 - RNA, 19 nt, Artificial Sequence
  Description of Artificial Sequence: Synthetic oligonucleotide
  Antisense strand to SEQ ID NO: 996884
ucaugcagacaaaugcucu

SEQ ID NO: 996886 - RNA, 19 nt, Artificial Sequence
  Description of Artificial Sequence: Synthetic oligonucleotide
  Sense strand starting at position 2639 of SEQ ID NO: 914344
gagcauuugucugcaugac

SEQ ID NO: 996887 - RNA, 19 nt, Artificial Sequence
  Description of Artificial Sequence: Synthetic oligonucleotide
  Antisense strand to SEQ ID NO: 996886
gucaugcagacaaaugcuc

SEQ ID NO: 996888 - RNA, 19 nt, Artificial Sequence
  Description of Artificial Sequence: Synthetic oligonucleotide
  Sense strand starting at position 2844 of SEQ ID NO: 914344
acgcaauacgucguccagu

SEQ ID NO: 996889 - RNA, 19 nt, Artificial Sequence
  Description of Artificial Sequence: Synthetic oligonucleotide
  Antisense strand to SEQ ID NO: 996888
acuggacgacguauugcgu

SEQ ID NO: 996890 - RNA, 19 nt, Artificial Sequence
  Description of Artificial Sequence: Synthetic oligonucleotide
  Sense strand starting at position 2846 of SEQ ID NO: 914344
gcaauacgucguccagugu

SEQ ID NO: 996891 - RNA, 19 nt, Artificial Sequence
  Description of Artificial Sequence: Synthetic oligonucleotide
  Antisense strand to SEQ ID NO: 996890
acacuggacgacguauugc

SEQ ID NO: 996892 - RNA, 19 nt, Artificial Sequence
  Description of Artificial Sequence: Synthetic oligonucleotide
  Sense strand starting at position 2860 of SEQ ID NO: 914344
aguguagaggugugaaaug

SEQ ID NO: 996893 - RNA, 19 nt, Artificial Sequence
  Description of Artificial Sequence: Synthetic oligonucleotide
  Antisense strand to SEQ ID NO: 996892
cauuucacaccucuacacu

SEQ ID NO: 996894 - RNA, 19 nt, Artificial Sequence
  Description of Artificial Sequence: Synthetic oligonucleotide
  Sense strand starting at position 2935 of SEQ ID NO: 914344
gaggguuaauugccuuaaa

SEQ ID NO: 996895 - RNA, 19 nt, Artificial Sequence
  Description of Artificial Sequence: Synthetic oligonucleotide
  Antisense strand to SEQ ID NO: 996894
uuuaaggcaauuaacccuc

SEQ ID NO: 996896 - RNA, 19 nt, Artificial Sequence
  Description of Artificial Sequence: Synthetic oligonucleotide
  Sense strand starting at position 2938 of SEQ ID NO: 914344
gguuaauugccuuaaauua

SEQ ID NO: 996897 - RNA, 19 nt, Artificial Sequence
  Description of Artificial Sequence: Synthetic oligonucleotide
  Antisense strand to SEQ ID NO: 996896
uaauuuaaggcaauuaacc

SEQ ID NO: 996898 - RNA, 19 nt, Artificial Sequence
  Description of Artificial Sequence: Synthetic oligonucleotide
  Sense strand starting at position 3336 of SEQ ID NO: 914344
ggaaacguuaaacggaaau

SEQ ID NO: 996899 - RNA, 19 nt, Artificial Sequence
  Description of Artificial Sequence: Synthetic oligonucleotide
  Antisense strand to SEQ ID NO: 996898
auuuccguuuaacguuucc

SEQ ID NO: 996900 - RNA, 19 nt, Artificial Sequence
  Description of Artificial Sequence: Synthetic oligonucleotide
  Sense strand starting at position 3472 of SEQ ID NO: 914344
cgguaacuauagucuuaaa

SEQ ID NO: 996901 - RNA, 19 nt, Artificial Sequence
  Description of Artificial Sequence: Synthetic oligonucleotide
  Antisense strand to SEQ ID NO: 996900
uuuaagacuauaguuaccg

SEQ ID NO: 996902 - RNA, 19 nt, Artificial Sequence
  Description of Artificial Sequence: Synthetic oligonucleotide
  Sense strand starting at position 3648 of SEQ ID NO: 914344
cccaguugugaucagugaa

SEQ ID NO: 996903 - RNA, 19 nt, Artificial Sequence
  Description of Artificial Sequence: Synthetic oligonucleotide
  Antisense strand to SEQ ID NO: 996902
uucacugaucacaacuggg

SEQ ID NO: 996904 - RNA, 19 nt, Artificial Sequence
  Description of Artificial Sequence: Synthetic oligonucleotide
  Sense strand starting at position 3730 of SEQ ID NO: 914344
cuaagaaagcaguaucauu

SEQ ID NO: 996905 - RNA, 19 nt, Artificial Sequence
  Description of Artificial Sequence: Synthetic oligonucleotide
  Antisense strand to SEQ ID NO: 996904
aaugauacugcuuucuuag

SEQ ID NO: 996906 - RNA, 19 nt, Artificial Sequence
  Description of Artificial Sequence: Synthetic oligonucleotide
  Sense strand starting at position 3778 of SEQ ID NO: 914344
ugaguauucuuucuccaca

SEQ ID NO: 996907 - RNA, 19 nt, Artificial Sequence
  Description of Artificial Sequence: Synthetic oligonucleotide
  Antisense strand to SEQ ID NO: 996906
uguggagaaagaauacuca

SEQ ID NO: 996908 - RNA, 19 nt, Artificial Sequence
  Description of Artificial Sequence: Synthetic oligonucleotide
  Sense strand starting at position 3913 of SEQ ID NO: 914344
cgcaaugugccugccauua

SEQ ID NO: 996909 - RNA, 19 nt, Artificial Sequence
  Description of Artificial Sequence: Synthetic oligonucleotide
  Antisense strand to SEQ ID NO: 996908
uaauggcaggcacauugcg

SEQ ID NO: 996910 - RNA, 19 nt, Artificial Sequence
  Description of Artificial Sequence: Synthetic oligonucleotide
  Sense strand starting at position 3952 of SEQ ID NO: 914344
cauggcuucccagacaguu

SEQ ID NO: 996911 - RNA, 19 nt, Artificial Sequence
  Description of Artificial Sequence: Synthetic oligonucleotide
  Antisense strand to SEQ ID NO: 996910
aacugucugggaagccaug

SEQ ID NO: 996912 - RNA, 19 nt, Artificial Sequence
  Description of Artificial Sequence: Synthetic oligonucleotide
  Sense strand starting at position 199 of SEQ ID NO: 914345
auuguagagcucuaugaca

SEQ ID NO: 996913 - RNA, 19 nt, Artificial Sequence
  Description of Artificial Sequence: Synthetic oligonucleotide
  Antisense strand to SEQ ID NO: 996912
ugucauagagcucuacaau

SEQ ID NO: 996914 - RNA, 19 nt, Artificial Sequence
  Description of Artificial Sequence: Synthetic oligonucleotide
  Sense strand starting at position 745 of SEQ ID NO: 914345
gcuagaaaguauuacauuu

SEQ ID NO: 996915 - RNA, 19 nt, Artificial Sequence
  Description of Artificial Sequence: Synthetic oligonucleotide
  Antisense strand to SEQ ID NO: 996914
aaauguaauacuuucuagc

SEQ ID NO: 996916 - RNA, 19 nt, Artificial Sequence
  Description of Artificial Sequence: Synthetic oligonucleotide
  Sense strand starting at position 810 of SEQ ID NO: 914345
aguuaagagauccgaccuu

SEQ ID NO: 996917 - RNA, 19 nt, Artificial Sequence
  Description of Artificial Sequence: Synthetic oligonucleotide
  Antisense strand to SEQ ID NO: 996916
aaggucggaucucuuaacu

SEQ ID NO: 996918 - RNA, 19 nt, Artificial Sequence
  Description of Artificial Sequence: Synthetic oligonucleotide
  Sense strand starting at position 906 of SEQ ID NO: 914345
auagcuugccacugagaag

SEQ ID NO: 996919 - RNA, 19 nt, Artificial Sequence
  Description of Artificial Sequence: Synthetic oligonucleotide
  Antisense strand to SEQ ID NO: 996918
cuucucaguggcaagcuau

SEQ ID NO: 996920 - RNA, 19 nt, Artificial Sequence
  Description of Artificial Sequence: Synthetic oligonucleotide
  Sense strand starting at position 957 of SEQ ID NO: 914345
guacucagaggcugugauu

SEQ ID NO: 996921 - RNA, 19 nt, Artificial Sequence
  Description of Artificial Sequence: Synthetic oligonucleotide
  Antisense strand to SEQ ID NO: 996920
aaucacagccucugaguac

SEQ ID NO: 996922 - RNA, 19 nt, Artificial Sequence
  Description of Artificial Sequence: Synthetic oligonucleotide
  Sense strand starting at position 966 of SEQ ID NO: 914345
ggcugugauuauucagggu

SEQ ID NO: 996923 - RNA, 19 nt, Artificial Sequence
  Description of Artificial Sequence: Synthetic oligonucleotide
  Antisense strand to SEQ ID NO: 996922
acccugaauaaucacagcc

SEQ ID NO: 996924 - RNA, 19 nt, Artificial Sequence
  Description of Artificial Sequence: Synthetic oligonucleotide
  Sense strand starting at position 1146 of SEQ ID NO: 914345
ucggauuaaagcggaagua

SEQ ID NO: 996925 - RNA, 19 nt, Artificial Sequence
  Description of Artificial Sequence: Synthetic oligonucleotide
  Antisense strand to SEQ ID NO: 996924
uacuuccgcuuuaauccga

SEQ ID NO: 996926 - RNA, 19 nt, Artificial Sequence
  Description of Artificial Sequence: Synthetic oligonucleotide
  Sense strand starting at position 1147 of SEQ ID NO: 914345
cggauuaaagcggaaguau

SEQ ID NO: 996927 - RNA, 19 nt, Artificial Sequence
  Description of Artificial Sequence: Synthetic oligonucleotide
  Antisense strand to SEQ ID NO: 996926
auacuuccgcuuuaauccg

SEQ ID NO: 996928 - RNA, 19 nt, Artificial Sequence
  Description of Artificial Sequence: Synthetic oligonucleotide
  Sense strand starting at position 1167 of SEQ ID NO: 914345
uuagaauccgucuaggaca

SEQ ID NO: 996929 - RNA, 19 nt, Artificial Sequence
  Description of Artificial Sequence: Synthetic oligonucleotide
  Antisense strand to SEQ ID NO: 996928
uguccuagacggauucuaa

SEQ ID NO: 996930 - RNA, 19 nt, Artificial Sequence
  Description of Artificial Sequence: Synthetic oligonucleotide
  Sense strand starting at position 1272 of SEQ ID NO: 914345
uguaaugaggccgaauuga

SEQ ID NO: 996931 - RNA, 19 nt, Artificial Sequence
  Description of Artificial Sequence: Synthetic oligonucleotide
  Antisense strand to SEQ ID NO: 996930
ucaauucggccucauuaca

SEQ ID NO: 996932 - RNA, 19 nt, Artificial Sequence
  Description of Artificial Sequence: Synthetic oligonucleotide
  Sense strand starting at position 1433 of SEQ ID NO: 914345
cccagucgugguuagaauu

SEQ ID NO: 996933 - RNA, 19 nt, Artificial Sequence
  Description of Artificial Sequence: Synthetic oligonucleotide
  Antisense strand to SEQ ID NO: 996932
aauucuaaccacgacuggg

SEQ ID NO: 996934 - RNA, 19 nt, Artificial Sequence
  Description of Artificial Sequence: Synthetic oligonucleotide
  Sense strand starting at position 1458 of SEQ ID NO: 914345
cuucuagguuguguagaga

SEQ ID NO: 996935 - RNA, 19 nt, Artificial Sequence
  Description of Artificial Sequence: Synthetic oligonucleotide
  Antisense strand to SEQ ID NO: 996934
ucucuacacaaccuagaag

SEQ ID NO: 996936 - RNA, 19 nt, Artificial Sequence
  Description of Artificial Sequence: Synthetic oligonucleotide
  Sense strand starting at position 1477 of SEQ ID NO: 914345
acccaaucugcaggucaga

SEQ ID NO: 996937 - RNA, 19 nt, Artificial Sequence
  Description of Artificial Sequence: Synthetic oligonucleotide
  Antisense strand to SEQ ID NO: 996936
ucugaccugcagauugggu

SEQ ID NO: 996938 - RNA, 19 nt, Artificial Sequence
  Description of Artificial Sequence: Synthetic oligonucleotide
  Sense strand starting at position 2121 of SEQ ID NO: 914345
cuuugaagucaguacugga

SEQ ID NO: 996939 - RNA, 19 nt, Artificial Sequence
  Description of Artificial Sequence: Synthetic oligonucleotide
  Antisense strand to SEQ ID NO: 996938
uccaguacugacuucaaag

SEQ ID NO: 996940 - RNA, 19 nt, Artificial Sequence
  Description of Artificial Sequence: Synthetic oligonucleotide
  Sense strand starting at position 2137 of SEQ ID NO: 914345
ggagaaggauucgcugaga

SEQ ID NO: 996941 - RNA, 19 nt, Artificial Sequence
  Description of Artificial Sequence: Synthetic oligonucleotide
  Antisense strand to SEQ ID NO: 996940
ucucagcgaauccuucucc

SEQ ID NO: 996942 - RNA, 19 nt, Artificial Sequence
  Description of Artificial Sequence: Synthetic oligonucleotide
  Sense strand starting at position 2140 of SEQ ID NO: 914345
gaaggauucgcugagauuc

SEQ ID NO: 996943 - RNA, 19 nt, Artificial Sequence
  Description of Artificial Sequence: Synthetic oligonucleotide
  Antisense strand to SEQ ID NO: 996942
gaaucucagcgaauccuuc

SEQ ID NO: 996944 - RNA, 19 nt, Artificial Sequence
  Description of Artificial Sequence: Synthetic oligonucleotide
  Sense strand starting at position 2362 of SEQ ID NO: 914345
gcgauuguugugccucagu

SEQ ID NO: 996945 - RNA, 19 nt, Artificial Sequence
  Description of Artificial Sequence: Synthetic oligonucleotide
  Antisense strand to SEQ ID NO: 996944
acugaggcacaacaaucgc

SEQ ID NO: 996946 - RNA, 19 nt, Artificial Sequence
  Description of Artificial Sequence: Synthetic oligonucleotide
  Sense strand starting at position 2601 of SEQ ID NO: 914345
cuguaucacgauuggaauc

SEQ ID NO: 996947 - RNA, 19 nt, Artificial Sequence
  Description of Artificial Sequence: Synthetic oligonucleotide
  Antisense strand to SEQ ID NO: 996946
gauuccaaucgugauacag

SEQ ID NO: 996948 - RNA, 19 nt, Artificial Sequence
  Description of Artificial Sequence: Synthetic oligonucleotide
  Sense strand starting at position 2747 of SEQ ID NO: 914345
cauugagacugggcuugaa

SEQ ID NO: 996949 - RNA, 19 nt, Artificial Sequence
  Description of Artificial Sequence: Synthetic oligonucleotide
  Antisense strand to SEQ ID NO: 996948
uucaagcccagucucaaug

SEQ ID NO: 996950 - RNA, 19 nt, Artificial Sequence
  Description of Artificial Sequence: Synthetic oligonucleotide
  Sense strand starting at position 2792 of SEQ ID NO: 914345
agaguugagaucugaaguu

SEQ ID NO: 996951 - RNA, 19 nt, Artificial Sequence
  Description of Artificial Sequence: Synthetic oligonucleotide
  Antisense strand to SEQ ID NO: 996950
aacuucagaucucaacucu

SEQ ID NO: 996952 - RNA, 19 nt, Artificial Sequence
  Description of Artificial Sequence: Synthetic oligonucleotide
  Sense strand starting at position 2810 of SEQ ID NO: 914345
ugcaauguauacucagaga

SEQ ID NO: 996953 - RNA, 19 nt, Artificial Sequence
  Description of Artificial Sequence: Synthetic oligonucleotide
  Antisense strand to SEQ ID NO: 996952
ucucugaguauacauugca

SEQ ID NO: 996954 - RNA, 19 nt, Artificial Sequence
  Description of Artificial Sequence: Synthetic oligonucleotide
  Sense strand starting at position 2835 of SEQ ID NO: 914345
auuccaucagauuaggcau

SEQ ID NO: 996955 - RNA, 19 nt, Artificial Sequence
  Description of Artificial Sequence: Synthetic oligonucleotide
  Antisense strand to SEQ ID NO: 996954
augccuaaucugauggaau

SEQ ID NO: 996956 - RNA, 19 nt, Artificial Sequence
  Description of Artificial Sequence: Synthetic oligonucleotide
  Sense strand starting at position 2890 of SEQ ID NO: 914345
ugagccgauguguaagaga

SEQ ID NO: 996957 - RNA, 19 nt, Artificial Sequence
  Description of Artificial Sequence: Synthetic oligonucleotide
  Antisense strand to SEQ ID NO: 996956
ucucuuacacaucggcuca

SEQ ID NO: 996958 - RNA, 19 nt, Artificial Sequence
  Description of Artificial Sequence: Synthetic oligonucleotide
  Sense strand starting at position 2980 of SEQ ID NO: 914345
ggcauuugaugagaggaac

SEQ ID NO: 996959 - RNA, 19 nt, Artificial Sequence
  Description of Artificial Sequence: Synthetic oligonucleotide
  Antisense strand to SEQ ID NO: 996958
guuccucucaucaaaugcc

SEQ ID NO: 996960 - RNA, 19 nt, Artificial Sequence
  Description of Artificial Sequence: Synthetic oligonucleotide
  Sense strand starting at position 3055 of SEQ ID NO: 914345
uggaaugguuagagagaug

SEQ ID NO: 996961 - RNA, 19 nt, Artificial Sequence
  Description of Artificial Sequence: Synthetic oligonucleotide
  Antisense strand to SEQ ID NO: 996960
caucucucuaaccauucca

SEQ ID NO: 996962 - RNA, 19 nt, Artificial Sequence
  Description of Artificial Sequence: Synthetic oligonucleotide
  Sense strand starting at position 3084 of SEQ ID NO: 914345
uuagaaguguaaucaagga

SEQ ID NO: 996963 - RNA, 19 nt, Artificial Sequence
  Description of Artificial Sequence: Synthetic oligonucleotide
  Antisense strand to SEQ ID NO: 996962
uccuugauuacacuucuaa

SEQ ID NO: 996964 - RNA, 19 nt, Artificial Sequence
  Description of Artificial Sequence: Synthetic oligonucleotide
  Sense strand starting at position 3088 of SEQ ID NO: 914345
aaguguaaucaaggaacua

SEQ ID NO: 996965 - RNA, 19 nt, Artificial Sequence
  Description of Artificial Sequence: Synthetic oligonucleotide
  Antisense strand to SEQ ID NO: 996964
uaguuccuugauuacacuu

SEQ ID NO: 996966 - RNA, 19 nt, Artificial Sequence
  Description of Artificial Sequence: Synthetic oligonucleotide
  Sense strand starting at position 3254 of SEQ ID NO: 914345
gaagaaauauggcuguaaa

SEQ ID NO: 996967 - RNA, 19 nt, Artificial Sequence
  Description of Artificial Sequence: Synthetic oligonucleotide
  Antisense strand to SEQ ID NO: 996966
uuuacagccauauuucuuc

SEQ ID NO: 996968 - RNA, 19 nt, Artificial Sequence
  Description of Artificial Sequence: Synthetic oligonucleotide
  Sense strand starting at position 3255 of SEQ ID NO: 914345
aagaaauauggcuguaaag

SEQ ID NO: 996969 - RNA, 19 nt, Artificial Sequence
  Description of Artificial Sequence: Synthetic oligonucleotide
  Antisense strand to SEQ ID NO: 996968
cuuuacagccauauuucuu

SEQ ID NO: 996970 - RNA, 19 nt, Artificial Sequence
  Description of Artificial Sequence: Synthetic oligonucleotide
  Sense strand starting at position 3265 of SEQ ID NO: 914345
gcuguaaaggauuacaagu

SEQ ID NO: 996971 - RNA, 19 nt, Artificial Sequence
  Description of Artificial Sequence: Synthetic oligonucleotide
  Antisense strand to SEQ ID NO: 996970
acuuguaauccuuuacagc

SEQ ID NO: 996972 - RNA, 19 nt, Artificial Sequence
  Description of Artificial Sequence: Synthetic oligonucleotide
  Sense strand starting at position 3458 of SEQ ID NO: 914345
aggccauccugccugauaa

SEQ ID NO: 996973 - RNA, 19 nt, Artificial Sequence
  Description of Artificial Sequence: Synthetic oligonucleotide
  Antisense strand to SEQ ID NO: 996972
uuaucaggcaggauggccu

SEQ ID NO: 996974 - RNA, 19 nt, Artificial Sequence
  Description of Artificial Sequence: Synthetic oligonucleotide
  Sense strand starting at position 3459 of SEQ ID NO: 914345
ggccauccugccugauaaa

SEQ ID NO: 996975 - RNA, 19 nt, Artificial Sequence
  Description of Artificial Sequence: Synthetic oligonucleotide
  Antisense strand to SEQ ID NO: 996974
uuuaucaggcaggauggcc

SEQ ID NO: 996976 - RNA, 19 nt, Artificial Sequence
  Description of Artificial Sequence: Synthetic oligonucleotide
  Sense strand starting at position 3516 of SEQ ID NO: 914345
agaacuagccagggaucua

SEQ ID NO: 996977 - RNA, 19 nt, Artificial Sequence
  Description of Artificial Sequence: Synthetic oligonucleotide
  Antisense strand to SEQ ID NO: 996976
uagaucccuggcuaguucu

SEQ ID NO: 996978 - RNA, 19 nt, Artificial Sequence
  Description of Artificial Sequence: Synthetic oligonucleotide
  Sense strand starting at position 3620 of SEQ ID NO: 914345
aaggcaaagucaucggacu

SEQ ID NO: 996979 - RNA, 19 nt, Artificial Sequence
  Description of Artificial Sequence: Synthetic oligonucleotide
  Antisense strand to SEQ ID NO: 996978
aguccgaugacuuugccuu

SEQ ID NO: 996980 - RNA, 19 nt, Artificial Sequence
  Description of Artificial Sequence: Synthetic oligonucleotide
  Sense strand starting at position 3684 of SEQ ID NO: 914345
gaggccaaaguuuggaaua

SEQ ID NO: 996981 - RNA, 19 nt, Artificial Sequence
  Description of Artificial Sequence: Synthetic oligonucleotide
  Antisense strand to SEQ ID NO: 996980
uauuccaaacuuuggccuc

SEQ ID NO: 996982 - RNA, 19 nt, Artificial Sequence
  Description of Artificial Sequence: Synthetic oligonucleotide
  Sense strand starting at position 3730 of SEQ ID NO: 914345
ggcaacguuagagauaagu

SEQ ID NO: 996983 - RNA, 19 nt, Artificial Sequence
  Description of Artificial Sequence: Synthetic oligonucleotide
  Antisense strand to SEQ ID NO: 996982
acuuaucucuaacguugcc

SEQ ID NO: 996984 - RNA, 19 nt, Artificial Sequence
  Description of Artificial Sequence: Synthetic oligonucleotide
  Sense strand starting at position 3738 of SEQ ID NO: 914345
uagagauaaguuugugguu

SEQ ID NO: 996985 - RNA, 19 nt, Artificial Sequence
  Description of Artificial Sequence: Synthetic oligonucleotide
  Antisense strand to SEQ ID NO: 996984
aaccacaaacuuaucucua

SEQ ID NO: 996986 - RNA, 19 nt, Artificial Sequence
  Description of Artificial Sequence: Synthetic oligonucleotide
  Sense strand starting at position 3821 of SEQ ID NO: 914345
gggaauggcugaguuaauc

SEQ ID NO: 996987 - RNA, 19 nt, Artificial Sequence
  Description of Artificial Sequence: Synthetic oligonucleotide
  Antisense strand to SEQ ID NO: 996986
gauuaacucagccauuccc

SEQ ID NO: 996988 - RNA, 19 nt, Artificial Sequence
  Description of Artificial Sequence: Synthetic oligonucleotide
  Sense strand starting at position 3831 of SEQ ID NO: 914345
gaguuaaucuaggcugaca

SEQ ID NO: 996989 - RNA, 19 nt, Artificial Sequence
  Description of Artificial Sequence: Synthetic oligonucleotide
  Antisense strand to SEQ ID NO: 996988
ugucagccuagauuaacuc

SEQ ID NO: 996990 - RNA, 19 nt, Artificial Sequence
  Description of Artificial Sequence: Synthetic oligonucleotide
  Sense strand starting at position 3833 of SEQ ID NO: 914345
guuaaucuaggcugacauc

SEQ ID NO: 996991 - RNA, 19 nt, Artificial Sequence
  Description of Artificial Sequence: Synthetic oligonucleotide
  Antisense strand to SEQ ID NO: 996990
gaugucagccuagauuaac

SEQ ID NO: 996992 - RNA, 19 nt, Artificial Sequence
  Description of Artificial Sequence: Synthetic oligonucleotide
  Sense strand starting at position 259 of SEQ ID NO: 914346
gagcuuaucuccucaguga

SEQ ID NO: 996993 - RNA, 19 nt, Artificial Sequence
  Description of Artificial Sequence: Synthetic oligonucleotide
  Antisense strand to SEQ ID NO: 996992
ucacugaggagauaagcuc

SEQ ID NO: 996994 - RNA, 19 nt, Artificial Sequence
  Description of Artificial Sequence: Synthetic oligonucleotide
  Sense strand starting at position 260 of SEQ ID NO: 914346
agcuuaucuccucagugau

SEQ ID NO: 996995 - RNA, 19 nt, Artificial Sequence
  Description of Artificial Sequence: Synthetic oligonucleotide
  Antisense strand to SEQ ID NO: 996994
aucacugaggagauaagcu

SEQ ID NO: 996996 - RNA, 19 nt, Artificial Sequence
  Description of Artificial Sequence: Synthetic oligonucleotide
  Sense strand starting at position 497 of SEQ ID NO: 914346
gcaaguauuucugcuucca

SEQ ID NO: 996997 - RNA, 19 nt, Artificial Sequence
  Description of Artificial Sequence: Synthetic oligonucleotide
  Antisense strand to SEQ ID NO: 996996
uggaagcagaaauacuugc

SEQ ID NO: 996998 - RNA, 19 nt, Artificial Sequence
  Description of Artificial Sequence: Synthetic oligonucleotide
  Sense strand starting at position 585 of SEQ ID NO: 914346
gagugagaagucugucuga

SEQ ID NO: 996999 - RNA, 19 nt, Artificial Sequence
  Description of Artificial Sequence: Synthetic oligonucleotide
  Antisense strand to SEQ ID NO: 996998
ucagacagacuucucacuc

SEQ ID NO: 997000 - RNA, 19 nt, Artificial Sequence
  Description of Artificial Sequence: Synthetic oligonucleotide
  Sense strand starting at position 588 of SEQ ID NO: 914346
ugagaagucugucugaaga

SEQ ID NO: 997001 - RNA, 19 nt, Artificial Sequence
  Description of Artificial Sequence: Synthetic oligonucleotide
  Antisense strand to SEQ ID NO: 997000
ucuucagacagacuucuca

SEQ ID NO: 997002 - RNA, 19 nt, Artificial Sequence
  Description of Artificial Sequence: Synthetic oligonucleotide
  Sense strand starting at position 639 of SEQ ID NO: 914346
aagggaaggcuugauguuu

SEQ ID NO: 997003 - RNA, 19 nt, Artificial Sequence
  Description of Artificial Sequence: Synthetic oligonucleotide
  Antisense strand to SEQ ID NO: 997002
aaacaucaagccuucccuu

SEQ ID NO: 997004 - RNA, 19 nt, Artificial Sequence
  Description of Artificial Sequence: Synthetic oligonucleotide
  Sense strand starting at position 647 of SEQ ID NO: 914346
gcuugauguuugguccagu

SEQ ID NO: 997005 - RNA, 19 nt, Artificial Sequence
  Description of Artificial Sequence: Synthetic oligonucleotide
  Antisense strand to SEQ ID NO: 997004
acuggaccaaacaucaagc

SEQ ID NO: 997006 - RNA, 19 nt, Artificial Sequence
  Description of Artificial Sequence: Synthetic oligonucleotide
  Sense strand starting at position 648 of SEQ ID NO: 914346
cuugauguuugguccagua

SEQ ID NO: 997007 - RNA, 19 nt, Artificial Sequence
  Description of Artificial Sequence: Synthetic oligonucleotide
  Antisense strand to SEQ ID NO: 997006
uacuggaccaaacaucaag

SEQ ID NO: 997008 - RNA, 19 nt, Artificial Sequence
  Description of Artificial Sequence: Synthetic oligonucleotide
  Sense strand starting at position 650 of SEQ ID NO: 914346
ugauguuugguccaguaag

SEQ ID NO: 997009 - RNA, 19 nt, Artificial Sequence
  Description of Artificial Sequence: Synthetic oligonucleotide
  Antisense strand to SEQ ID NO: 997008
cuuacuggaccaaacauca

SEQ ID NO: 997010 - RNA, 19 nt, Artificial Sequence
  Description of Artificial Sequence: Synthetic oligonucleotide
  Sense strand starting at position 662 of SEQ ID NO: 914346
caguaaggccauuaauggu

SEQ ID NO: 997011 - RNA, 19 nt, Artificial Sequence
  Description of Artificial Sequence: Synthetic oligonucleotide
  Antisense strand to SEQ ID NO: 997010
accauuaauggccuuacug

SEQ ID NO: 997012 - RNA, 19 nt, Artificial Sequence
  Description of Artificial Sequence: Synthetic oligonucleotide
  Sense strand starting at position 668 of SEQ ID NO: 914346
ggccauuaauggucaccaa

SEQ ID NO: 997013 - RNA, 19 nt, Artificial Sequence
  Description of Artificial Sequence: Synthetic oligonucleotide
  Antisense strand to SEQ ID NO: 997012
uuggugaccauuaauggcc

SEQ ID NO: 997014 - RNA, 19 nt, Artificial Sequence
  Description of Artificial Sequence: Synthetic oligonucleotide
  Sense strand starting at position 690 of SEQ ID NO: 914346
agcagacucugggaggaaa

SEQ ID NO: 997015 - RNA, 19 nt, Artificial Sequence
  Description of Artificial Sequence: Synthetic oligonucleotide
  Antisense strand to SEQ ID NO: 997014
uuuccucccagagucugcu

SEQ ID NO: 997016 - RNA, 19 nt, Artificial Sequence
  Description of Artificial Sequence: Synthetic oligonucleotide
  Sense strand starting at position 704 of SEQ ID NO: 914346
ggaaaugucucagucucug

SEQ ID NO: 997017 - RNA, 19 nt, Artificial Sequence
  Description of Artificial Sequence: Synthetic oligonucleotide
  Antisense strand to SEQ ID NO: 997016
cagagacugagacauuucc

SEQ ID NO: 997018 - RNA, 19 nt, Artificial Sequence
  Description of Artificial Sequence: Synthetic oligonucleotide
  Sense strand starting at position 746 of SEQ ID NO: 914346
gcgacauaagcacagaaga

SEQ ID NO: 997019 - RNA, 19 nt, Artificial Sequence
  Description of Artificial Sequence: Synthetic oligonucleotide
  Antisense strand to SEQ ID NO: 997018
ucuucugugcuuaugucgc

SEQ ID NO: 997020 - RNA, 19 nt, Artificial Sequence
  Description of Artificial Sequence: Synthetic oligonucleotide
  Sense strand starting at position 994 of SEQ ID NO: 914346
agcaacugucaguaaaggu

SEQ ID NO: 997021 - RNA, 19 nt, Artificial Sequence
  Description of Artificial Sequence: Synthetic oligonucleotide
  Antisense strand to SEQ ID NO: 997020
accuuuacugacaguugcu

SEQ ID NO: 997022 - RNA, 19 nt, Artificial Sequence
  Description of Artificial Sequence: Synthetic oligonucleotide
  Sense strand starting at position 1019 of SEQ ID NO: 914346
ccuguauguccagaguccu

SEQ ID NO: 997023 - RNA, 19 nt, Artificial Sequence
  Description of Artificial Sequence: Synthetic oligonucleotide
  Antisense strand to SEQ ID NO: 997022
aggacucuggacauacagg

SEQ ID NO: 997024 - RNA, 19 nt, Artificial Sequence
  Description of Artificial Sequence: Synthetic oligonucleotide
  Sense strand starting at position 1203 of SEQ ID NO: 914346
guggcuuccuucucuauuu

SEQ ID NO: 997025 - RNA, 19 nt, Artificial Sequence
  Description of Artificial Sequence: Synthetic oligonucleotide
  Antisense strand to SEQ ID NO: 997024
aaauagagaaggaagccac

SEQ ID NO: 997026 - RNA, 19 nt, Artificial Sequence
  Description of Artificial Sequence: Synthetic oligonucleotide
  Sense strand starting at position 1252 of SEQ ID NO: 914346
gaaguugugugcucugacu

SEQ ID NO: 997027 - RNA, 19 nt, Artificial Sequence
  Description of Artificial Sequence: Synthetic oligonucleotide
  Antisense strand to SEQ ID NO: 997026
agucagagcacacaacuuc

SEQ ID NO: 997028 - RNA, 19 nt, Artificial Sequence
  Description of Artificial Sequence: Synthetic oligonucleotide
  Sense strand starting at position 1435 of SEQ ID NO: 914346
gagaguuaacuuggcagug

SEQ ID NO: 997029 - RNA, 19 nt, Artificial Sequence
  Description of Artificial Sequence: Synthetic oligonucleotide
  Antisense strand to SEQ ID NO: 997028
cacugccaaguuaacucuc

SEQ ID NO: 997030 - RNA, 19 nt, Artificial Sequence
  Description of Artificial Sequence: Synthetic oligonucleotide
  Sense strand starting at position 2413 of SEQ ID NO: 914346
ugcuaauggucgguaccaa

SEQ ID NO: 997031 - RNA, 19 nt, Artificial Sequence
  Description of Artificial Sequence: Synthetic oligonucleotide
  Antisense strand to SEQ ID NO: 997030
uugguaccgaccauuagca

SEQ ID NO: 997032 - RNA, 19 nt, Artificial Sequence
  Description of Artificial Sequence: Synthetic oligonucleotide
  Sense strand starting at position 2414 of SEQ ID NO: 914346
gcuaauggucgguaccaac

SEQ ID NO: 997033 - RNA, 19 nt, Artificial Sequence
  Description of Artificial Sequence: Synthetic oligonucleotide
  Antisense strand to SEQ ID NO: 997032
guugguaccgaccauuagc

SEQ ID NO: 997034 - RNA, 19 nt, Artificial Sequence
  Description of Artificial Sequence: Synthetic oligonucleotide
  Sense strand starting at position 2609 of SEQ ID NO: 914346
cucggcucucgagaguuaa

SEQ ID NO: 997035 - RNA, 19 nt, Artificial Sequence
  Description of Artificial Sequence: Synthetic oligonucleotide
  Antisense strand to SEQ ID NO: 997034
uuaacucucgagagccgag

SEQ ID NO: 997036 - RNA, 19 nt, Artificial Sequence
  Description of Artificial Sequence: Synthetic oligonucleotide
  Sense strand starting at position 2613 of SEQ ID NO: 914346
gcucucgagaguuaaagcu

SEQ ID NO: 997037 - RNA, 19 nt, Artificial Sequence
  Description of Artificial Sequence: Synthetic oligonucleotide
  Antisense strand to SEQ ID NO: 997036
agcuuuaacucucgagagc

SEQ ID NO: 997038 - RNA, 19 nt, Artificial Sequence
  Description of Artificial Sequence: Synthetic oligonucleotide
  Sense strand starting at position 2699 of SEQ ID NO: 914346
gccucucucaaagggugau

SEQ ID NO: 997039 - RNA, 19 nt, Artificial Sequence
  Description of Artificial Sequence: Synthetic oligonucleotide
  Antisense strand to SEQ ID NO: 997038
aucacccuuugagagaggc

SEQ ID NO: 997040 - RNA, 19 nt, Artificial Sequence
  Description of Artificial Sequence: Synthetic oligonucleotide
  Sense strand starting at position 2703 of SEQ ID NO: 914346
cucucaaagggugauuguu

SEQ ID NO: 997041 - RNA, 19 nt, Artificial Sequence
  Description of Artificial Sequence: Synthetic oligonucleotide
  Antisense strand to SEQ ID NO: 997040
aacaaucacccuuugagag

SEQ ID NO: 997042 - RNA, 19 nt, Artificial Sequence
  Description of Artificial Sequence: Synthetic oligonucleotide
  Sense strand starting at position 3020 of SEQ ID NO: 914346
gcgggaucuccaggaguuu

SEQ ID NO: 997043 - RNA, 19 nt, Artificial Sequence
  Description of Artificial Sequence: Synthetic oligonucleotide
  Antisense strand to SEQ ID NO: 997042
aaacuccuggagaucccgc

SEQ ID NO: 997044 - RNA, 19 nt, Artificial Sequence
  Description of Artificial Sequence: Synthetic oligonucleotide
  Sense strand starting at position 3138 of SEQ ID NO: 914346
ggagcuguauauuccagau

SEQ ID NO: 997045 - RNA, 19 nt, Artificial Sequence
  Description of Artificial Sequence: Synthetic oligonucleotide
  Antisense strand to SEQ ID NO: 997044
aucuggaauauacagcucc

SEQ ID NO: 997046 - RNA, 19 nt, Artificial Sequence
  Description of Artificial Sequence: Synthetic oligonucleotide
  Sense strand starting at position 3142 of SEQ ID NO: 914346
cuguauauuccagauacuc

SEQ ID NO: 997047 - RNA, 19 nt, Artificial Sequence
  Description of Artificial Sequence: Synthetic oligonucleotide
  Antisense strand to SEQ ID NO: 997046
gaguaucuggaauauacag

SEQ ID NO: 997048 - RNA, 19 nt, Artificial Sequence
  Description of Artificial Sequence: Synthetic oligonucleotide
  Sense strand starting at position 3318 of SEQ ID NO: 914346
cagggacugucgguacuuu

SEQ ID NO: 997049 - RNA, 19 nt, Artificial Sequence
  Description of Artificial Sequence: Synthetic oligonucleotide
  Antisense strand to SEQ ID NO: 997048
aaaguaccgacagucccug

SEQ ID NO: 997050 - RNA, 19 nt, Artificial Sequence
  Description of Artificial Sequence: Synthetic oligonucleotide
  Sense strand starting at position 3491 of SEQ ID NO: 914346
ugcucuucccacugaggau

SEQ ID NO: 997051 - RNA, 19 nt, Artificial Sequence
  Description of Artificial Sequence: Synthetic oligonucleotide
  Antisense strand to SEQ ID NO: 997050
auccucagugggaagagca

SEQ ID NO: 997052 - RNA, 19 nt, Artificial Sequence
  Description of Artificial Sequence: Synthetic oligonucleotide
  Sense strand starting at position 3590 of SEQ ID NO: 914346
cguaucaugccacagacau

SEQ ID NO: 997053 - RNA, 19 nt, Artificial Sequence
  Description of Artificial Sequence: Synthetic oligonucleotide
  Antisense strand to SEQ ID NO: 997052
augucuguggcaugauacg

SEQ ID NO: 997054 - RNA, 19 nt, Artificial Sequence
  Description of Artificial Sequence: Synthetic oligonucleotide
  Sense strand starting at position 3598 of SEQ ID NO: 914346
gccacagacaugugaaagu

SEQ ID NO: 997055 - RNA, 19 nt, Artificial Sequence
  Description of Artificial Sequence: Synthetic oligonucleotide
  Antisense strand to SEQ ID NO: 997054
acuuucacaugucuguggc

SEQ ID NO: 997056 - RNA, 19 nt, Artificial Sequence
  Description of Artificial Sequence: Synthetic oligonucleotide
  Sense strand starting at position 3607 of SEQ ID NO: 914346
augugaaaguguccuuagu

SEQ ID NO: 997057 - RNA, 19 nt, Artificial Sequence
  Description of Artificial Sequence: Synthetic oligonucleotide
  Antisense strand to SEQ ID NO: 997056
acuaaggacacuuucacau

SEQ ID NO: 997058 - RNA, 19 nt, Artificial Sequence
  Description of Artificial Sequence: Synthetic oligonucleotide
  Sense strand starting at position 3609 of SEQ ID NO: 914346
gugaaaguguccuuaguga

SEQ ID NO: 997059 - RNA, 19 nt, Artificial Sequence
  Description of Artificial Sequence: Synthetic oligonucleotide
  Antisense strand to SEQ ID NO: 997058
ucacuaaggacacuuucac

SEQ ID NO: 997060 - RNA, 19 nt, Artificial Sequence
  Description of Artificial Sequence: Synthetic oligonucleotide
  Sense strand starting at position 3622 of SEQ ID NO: 914346
uagugacuaucucuaggga

SEQ ID NO: 997061 - RNA, 19 nt, Artificial Sequence
  Description of Artificial Sequence: Synthetic oligonucleotide
  Antisense strand to SEQ ID NO: 997060
ucccuagagauagucacua

SEQ ID NO: 997062 - RNA, 19 nt, Artificial Sequence
  Description of Artificial Sequence: Synthetic oligonucleotide
  Sense strand starting at position 3655 of SEQ ID NO: 914346
ugucgugcgcucuuucauu

SEQ ID NO: 997063 - RNA, 19 nt, Artificial Sequence
  Description of Artificial Sequence: Synthetic oligonucleotide
  Antisense strand to SEQ ID NO: 997062
aaugaaagagcgcacgaca

SEQ ID NO: 997064 - RNA, 19 nt, Artificial Sequence
  Description of Artificial Sequence: Synthetic oligonucleotide
  Sense strand starting at position 3700 of SEQ ID NO: 914346
gcaagaaacuuccucugaa

SEQ ID NO: 997065 - RNA, 19 nt, Artificial Sequence
  Description of Artificial Sequence: Synthetic oligonucleotide
  Antisense strand to SEQ ID NO: 997064
uucagaggaaguuucuugc

SEQ ID NO: 997066 - RNA, 19 nt, Artificial Sequence
  Description of Artificial Sequence: Synthetic oligonucleotide
  Sense strand starting at position 3763 of SEQ ID NO: 914346
uucucuuaaugaguggaau

SEQ ID NO: 997067 - RNA, 19 nt, Artificial Sequence
  Description of Artificial Sequence: Synthetic oligonucleotide
  Antisense strand to SEQ ID NO: 997066
auuccacucauuaagagaa

SEQ ID NO: 997068 - RNA, 19 nt, Artificial Sequence
  Description of Artificial Sequence: Synthetic oligonucleotide
  Sense strand starting at position 3764 of SEQ ID NO: 914346
ucucuuaaugaguggaauc

SEQ ID NO: 997069 - RNA, 19 nt, Artificial Sequence
  Description of Artificial Sequence: Synthetic oligonucleotide
  Antisense strand to SEQ ID NO: 997068
gauuccacucauuaagaga

SEQ ID NO: 997070 - RNA, 19 nt, Artificial Sequence
  Description of Artificial Sequence: Synthetic oligonucleotide
  Sense strand starting at position 3831 of SEQ ID NO: 914346
uuuagacucugcuaagaga

SEQ ID NO: 997071 - RNA, 19 nt, Artificial Sequence
  Description of Artificial Sequence: Synthetic oligonucleotide
  Antisense strand to SEQ ID NO: 997070
ucucuuagcagagucuaaa

SEQ ID NO: 997072 - RNA, 19 nt, Artificial Sequence
  Description of Artificial Sequence: Synthetic oligonucleotide
  Sense strand starting at position 212 of SEQ ID NO: 914347
caugcucuaguuugaggaa

SEQ ID NO: 997073 - RNA, 19 nt, Artificial Sequence
  Description of Artificial Sequence: Synthetic oligonucleotide
  Antisense strand to SEQ ID NO: 997072
uuccucaaacuagagcaug

SEQ ID NO: 997074 - RNA, 19 nt, Artificial Sequence
  Description of Artificial Sequence: Synthetic oligonucleotide
  Sense strand starting at position 409 of SEQ ID NO: 914347
uccgcuugcagcugggaaa

SEQ ID NO: 997075 - RNA, 19 nt, Artificial Sequence
  Description of Artificial Sequence: Synthetic oligonucleotide
  Antisense strand to SEQ ID NO: 997074
uuucccagcugcaagcgga

SEQ ID NO: 997076 - RNA, 19 nt, Artificial Sequence
  Description of Artificial Sequence: Synthetic oligonucleotide
  Sense strand starting at position 410 of SEQ ID NO: 914347
ccgcuugcagcugggaaau

SEQ ID NO: 997077 - RNA, 19 nt, Artificial Sequence
  Description of Artificial Sequence: Synthetic oligonucleotide
  Antisense strand to SEQ ID NO: 997076
auuucccagcugcaagcgg

SEQ ID NO: 997078 - RNA, 19 nt, Artificial Sequence
  Description of Artificial Sequence: Synthetic oligonucleotide
  Sense strand starting at position 422 of SEQ ID NO: 914347
gggaaauccucagauccuu

SEQ ID NO: 997079 - RNA, 19 nt, Artificial Sequence
  Description of Artificial Sequence: Synthetic oligonucleotide
  Antisense strand to SEQ ID NO: 997078
aaggaucugaggauuuccc

SEQ ID NO: 997080 - RNA, 19 nt, Artificial Sequence
  Description of Artificial Sequence: Synthetic oligonucleotide
  Sense strand starting at position 499 of SEQ ID NO: 914347
ggucccaggaagcauuaau

SEQ ID NO: 997081 - RNA, 19 nt, Artificial Sequence
  Description of Artificial Sequence: Synthetic oligonucleotide
  Antisense strand to SEQ ID NO: 997080
auuaaugcuuccugggacc

SEQ ID NO: 997082 - RNA, 19 nt, Artificial Sequence
  Description of Artificial Sequence: Synthetic oligonucleotide
  Sense strand starting at position 536 of SEQ ID NO: 914347
cagagaaccgcagaauguu

SEQ ID NO: 997083 - RNA, 19 nt, Artificial Sequence
  Description of Artificial Sequence: Synthetic oligonucleotide
  Antisense strand to SEQ ID NO: 997082
aacauucugcgguucucug

SEQ ID NO: 997084 - RNA, 19 nt, Artificial Sequence
  Description of Artificial Sequence: Synthetic oligonucleotide
  Sense strand starting at position 568 of SEQ ID NO: 914347
ggccguaaucgucucauua

SEQ ID NO: 997085 - RNA, 19 nt, Artificial Sequence
  Description of Artificial Sequence: Synthetic oligonucleotide
  Antisense strand to SEQ ID NO: 997084
uaaugagacgauuacggcc

SEQ ID NO: 997086 - RNA, 19 nt, Artificial Sequence
  Description of Artificial Sequence: Synthetic oligonucleotide
  Sense strand starting at position 572 of SEQ ID NO: 914347
guaaucgucucauuaauuc

SEQ ID NO: 997087 - RNA, 19 nt, Artificial Sequence
  Description of Artificial Sequence: Synthetic oligonucleotide
  Antisense strand to SEQ ID NO: 997086
gaauuaaugagacgauuac

SEQ ID NO: 997088 - RNA, 19 nt, Artificial Sequence
  Description of Artificial Sequence: Synthetic oligonucleotide
  Sense strand starting at position 610 of SEQ ID NO: 914347
ccuuaugacuucccuagua

SEQ ID NO: 997089 - RNA, 19 nt, Artificial Sequence
  Description of Artificial Sequence: Synthetic oligonucleotide
  Antisense strand to SEQ ID NO: 997088
uacuagggaagucauaagg

SEQ ID NO: 997090 - RNA, 19 nt, Artificial Sequence
  Description of Artificial Sequence: Synthetic oligonucleotide
  Sense strand starting at position 638 of SEQ ID NO: 914347
auaccucucgugugggaaa

SEQ ID NO: 997091 - RNA, 19 nt, Artificial Sequence
  Description of Artificial Sequence: Synthetic oligonucleotide
  Antisense strand to SEQ ID NO: 997090
uuucccacacgagagguau

SEQ ID NO: 997092 - RNA, 19 nt, Artificial Sequence
  Description of Artificial Sequence: Synthetic oligonucleotide
  Sense strand starting at position 718 of SEQ ID NO: 914347
guuggauauugagcugauu

SEQ ID NO: 997093 - RNA, 19 nt, Artificial Sequence
  Description of Artificial Sequence: Synthetic oligonucleotide
  Antisense strand to SEQ ID NO: 997092
aaucagcucaauauccaac

SEQ ID NO: 997094 - RNA, 19 nt, Artificial Sequence
  Description of Artificial Sequence: Synthetic oligonucleotide
  Sense strand starting at position 786 of SEQ ID NO: 914347
agcucauguccuuaaacag

SEQ ID NO: 997095 - RNA, 19 nt, Artificial Sequence
  Description of Artificial Sequence: Synthetic oligonucleotide
  Antisense strand to SEQ ID NO: 997094
cuguuuaaggacaugagcu

SEQ ID NO: 997096 - RNA, 19 nt, Artificial Sequence
  Description of Artificial Sequence: Synthetic oligonucleotide
  Sense strand starting at position 872 of SEQ ID NO: 914347
ucaaauaccugaggauaac

SEQ ID NO: 997097 - RNA, 19 nt, Artificial Sequence
  Description of Artificial Sequence: Synthetic oligonucleotide
  Antisense strand to SEQ ID NO: 997096
guuauccucagguauuuga

SEQ ID NO: 997098 - RNA, 19 nt, Artificial Sequence
  Description of Artificial Sequence: Synthetic oligonucleotide
  Sense strand starting at position 894 of SEQ ID NO: 914347
guggcacugucccuaaauc

SEQ ID NO: 997099 - RNA, 19 nt, Artificial Sequence
  Description of Artificial Sequence: Synthetic oligonucleotide
  Antisense strand to SEQ ID NO: 997098
gauuuagggacagugccac

SEQ ID NO: 997100 - RNA, 19 nt, Artificial Sequence
  Description of Artificial Sequence: Synthetic oligonucleotide
  Sense strand starting at position 895 of SEQ ID NO: 914347
uggcacugucccuaaaucu

SEQ ID NO: 997101 - RNA, 19 nt, Artificial Sequence
  Description of Artificial Sequence: Synthetic oligonucleotide
  Antisense strand to SEQ ID NO: 997100
agauuuagggacagugcca

SEQ ID NO: 997102 - RNA, 19 nt, Artificial Sequence
  Description of Artificial Sequence: Synthetic oligonucleotide
  Sense strand starting at position 978 of SEQ ID NO: 914347
cauugauuccaucguagga

SEQ ID NO: 997103 - RNA, 19 nt, Artificial Sequence
  Description of Artificial Sequence: Synthetic oligonucleotide
  Antisense strand to SEQ ID NO: 997102
uccuacgauggaaucaaug

SEQ ID NO: 997104 - RNA, 19 nt, Artificial Sequence
  Description of Artificial Sequence: Synthetic oligonucleotide
  Sense strand starting at position 982 of SEQ ID NO: 914347
gauuccaucguaggauaaa

SEQ ID NO: 997105 - RNA, 19 nt, Artificial Sequence
  Description of Artificial Sequence: Synthetic oligonucleotide
  Antisense strand to SEQ ID NO: 997104
uuuauccuacgauggaauc

SEQ ID NO: 997106 - RNA, 19 nt, Artificial Sequence
  Description of Artificial Sequence: Synthetic oligonucleotide
  Sense strand starting at position 985 of SEQ ID NO: 914347
uccaucguaggauaaauau

SEQ ID NO: 997107 - RNA, 19 nt, Artificial Sequence
  Description of Artificial Sequence: Synthetic oligonucleotide
  Antisense strand to SEQ ID NO: 997106
auauuuauccuacgaugga

SEQ ID NO: 997108 - RNA, 19 nt, Artificial Sequence
  Description of Artificial Sequence: Synthetic oligonucleotide
  Sense strand starting at position 1008 of SEQ ID NO: 914347
ugaauacucuuccuaggag

SEQ ID NO: 997109 - RNA, 19 nt, Artificial Sequence
  Description of Artificial Sequence: Synthetic oligonucleotide
  Antisense strand to SEQ ID NO: 997108
cuccuaggaagaguauuca

SEQ ID NO: 997110 - RNA, 19 nt, Artificial Sequence
  Description of Artificial Sequence: Synthetic oligonucleotide
  Sense strand starting at position 1089 of SEQ ID NO: 914347
gagcuuucuguuuagugga

SEQ ID NO: 997111 - RNA, 19 nt, Artificial Sequence
  Description of Artificial Sequence: Synthetic oligonucleotide
  Antisense strand to SEQ ID NO: 997110
uccacuaaacagaaagcuc

SEQ ID NO: 997112 - RNA, 19 nt, Artificial Sequence
  Description of Artificial Sequence: Synthetic oligonucleotide
  Sense strand starting at position 1225 of SEQ ID NO: 914347
uagcuaugguggucaggga

SEQ ID NO: 997113 - RNA, 19 nt, Artificial Sequence
  Description of Artificial Sequence: Synthetic oligonucleotide
  Antisense strand to SEQ ID NO: 997112
ucccugaccaccauagcua

SEQ ID NO: 997114 - RNA, 19 nt, Artificial Sequence
  Description of Artificial Sequence: Synthetic oligonucleotide
  Sense strand starting at position 1342 of SEQ ID NO: 914347
caaguuaagugcuugagag

SEQ ID NO: 997115 - RNA, 19 nt, Artificial Sequence
  Description of Artificial Sequence: Synthetic oligonucleotide
  Antisense strand to SEQ ID NO: 997114
cucucaagcacuuaacuug

SEQ ID NO: 997116 - RNA, 19 nt, Artificial Sequence
  Description of Artificial Sequence: Synthetic oligonucleotide
  Sense strand starting at position 1343 of SEQ ID NO: 914347
aaguuaagugcuugagaga

SEQ ID NO: 997117 - RNA, 19 nt, Artificial Sequence
  Description of Artificial Sequence: Synthetic oligonucleotide
  Antisense strand to SEQ ID NO: 997116
ucucucaagcacuuaacuu

SEQ ID NO: 997118 - RNA, 19 nt, Artificial Sequence
  Description of Artificial Sequence: Synthetic oligonucleotide
  Sense strand starting at position 1344 of SEQ ID NO: 914347
aguuaagugcuugagagag

SEQ ID NO: 997119 - RNA, 19 nt, Artificial Sequence
  Description of Artificial Sequence: Synthetic oligonucleotide
  Antisense strand to SEQ ID NO: 997118
cucucucaagcacuuaacu

SEQ ID NO: 997120 - RNA, 19 nt, Artificial Sequence
  Description of Artificial Sequence: Synthetic oligonucleotide
  Sense strand starting at position 1530 of SEQ ID NO: 914347
ccgcggugcguucuauaga

SEQ ID NO: 997121 - RNA, 19 nt, Artificial Sequence
  Description of Artificial Sequence: Synthetic oligonucleotide
  Antisense strand to SEQ ID NO: 997120
ucuauagaacgcaccgcgg

SEQ ID NO: 997122 - RNA, 19 nt, Artificial Sequence
  Description of Artificial Sequence: Synthetic oligonucleotide
  Sense strand starting at position 2141 of SEQ ID NO: 914347
cacggaauugccugagaaa

SEQ ID NO: 997123 - RNA, 19 nt, Artificial Sequence
  Description of Artificial Sequence: Synthetic oligonucleotide
  Antisense strand to SEQ ID NO: 997122
uuucucaggcaauuccgug

SEQ ID NO: 997124 - RNA, 19 nt, Artificial Sequence
  Description of Artificial Sequence: Synthetic oligonucleotide
  Sense strand starting at position 2219 of SEQ ID NO: 914347
auagcuguugcucaauacu

SEQ ID NO: 997125 - RNA, 19 nt, Artificial Sequence
  Description of Artificial Sequence: Synthetic oligonucleotide
  Antisense strand to SEQ ID NO: 997124
aguauugagcaacagcuau

SEQ ID NO: 997126 - RNA, 19 nt, Artificial Sequence
  Description of Artificial Sequence: Synthetic oligonucleotide
  Sense strand starting at position 2222 of SEQ ID NO: 914347
gcuguugcucaauacuuau

SEQ ID NO: 997127 - RNA, 19 nt, Artificial Sequence
  Description of Artificial Sequence: Synthetic oligonucleotide
  Antisense strand to SEQ ID NO: 997126
auaaguauugagcaacagc

SEQ ID NO: 997128 - RNA, 19 nt, Artificial Sequence
  Description of Artificial Sequence: Synthetic oligonucleotide
  Sense strand starting at position 2237 of SEQ ID NO: 914347
uuauuacacgaaugaaauc

SEQ ID NO: 997129 - RNA, 19 nt, Artificial Sequence
  Description of Artificial Sequence: Synthetic oligonucleotide
  Antisense strand to SEQ ID NO: 997128
gauuucauucguguaauaa

SEQ ID NO: 997130 - RNA, 19 nt, Artificial Sequence
  Description of Artificial Sequence: Synthetic oligonucleotide
  Sense strand starting at position 2277 of SEQ ID NO: 914347
cugggugucucuccuggaa

SEQ ID NO: 997131 - RNA, 19 nt, Artificial Sequence
  Description of Artificial Sequence: Synthetic oligonucleotide
  Antisense strand to SEQ ID NO: 997130
uuccaggagagacacccag

SEQ ID NO: 997132 - RNA, 19 nt, Artificial Sequence
  Description of Artificial Sequence: Synthetic oligonucleotide
  Sense strand starting at position 2475 of SEQ ID NO: 914347
ggaaauugauuggaaauag

SEQ ID NO: 997133 - RNA, 19 nt, Artificial Sequence
  Description of Artificial Sequence: Synthetic oligonucleotide
  Antisense strand to SEQ ID NO: 997132
cuauuuccaaucaauuucc

SEQ ID NO: 997134 - RNA, 19 nt, Artificial Sequence
  Description of Artificial Sequence: Synthetic oligonucleotide
  Sense strand starting at position 2485 of SEQ ID NO: 914347
uggaaauaguuccugagcu

SEQ ID NO: 997135 - RNA, 19 nt, Artificial Sequence
  Description of Artificial Sequence: Synthetic oligonucleotide
  Antisense strand to SEQ ID NO: 997134
agcucaggaacuauuucca

SEQ ID NO: 997136 - RNA, 19 nt, Artificial Sequence
  Description of Artificial Sequence: Synthetic oligonucleotide
  Sense strand starting at position 2622 of SEQ ID NO: 914347
uuuagaagcccaggaguuu

SEQ ID NO: 997137 - RNA, 19 nt, Artificial Sequence
  Description of Artificial Sequence: Synthetic oligonucleotide
  Antisense strand to SEQ ID NO: 997136
aaacuccugggcuucuaaa

SEQ ID NO: 997138 - RNA, 19 nt, Artificial Sequence
  Description of Artificial Sequence: Synthetic oligonucleotide
  Sense strand starting at position 2869 of SEQ ID NO: 914347
cugacuuguggucagucua

SEQ ID NO: 997139 - RNA, 19 nt, Artificial Sequence
  Description of Artificial Sequence: Synthetic oligonucleotide
  Antisense strand to SEQ ID NO: 997138
uagacugaccacaagucag

SEQ ID NO: 997140 - RNA, 19 nt, Artificial Sequence
  Description of Artificial Sequence: Synthetic oligonucleotide
  Sense strand starting at position 3306 of SEQ ID NO: 914347
agugaucgaugccuguaau

SEQ ID NO: 997141 - RNA, 19 nt, Artificial Sequence
  Description of Artificial Sequence: Synthetic oligonucleotide
  Antisense strand to SEQ ID NO: 997140
auuacaggcaucgaucacu

SEQ ID NO: 997142 - RNA, 19 nt, Artificial Sequence
  Description of Artificial Sequence: Synthetic oligonucleotide
  Sense strand starting at position 3307 of SEQ ID NO: 914347
gugaucgaugccuguaauc

SEQ ID NO: 997143 - RNA, 19 nt, Artificial Sequence
  Description of Artificial Sequence: Synthetic oligonucleotide
  Antisense strand to SEQ ID NO: 997142
gauuacaggcaucgaucac

SEQ ID NO: 997144 - RNA, 19 nt, Artificial Sequence
  Description of Artificial Sequence: Synthetic oligonucleotide
  Sense strand starting at position 3451 of SEQ ID NO: 914347
aguuuaguuugagaaacag

SEQ ID NO: 997145 - RNA, 19 nt, Artificial Sequence
  Description of Artificial Sequence: Synthetic oligonucleotide
  Antisense strand to SEQ ID NO: 997144
cuguuucucaaacuaaacu

SEQ ID NO: 997146 - RNA, 19 nt, Artificial Sequence
  Description of Artificial Sequence: Synthetic oligonucleotide
  Sense strand starting at position 3512 of SEQ ID NO: 914347
uggcucugaucaccacuua

SEQ ID NO: 997147 - RNA, 19 nt, Artificial Sequence
  Description of Artificial Sequence: Synthetic oligonucleotide
  Antisense strand to SEQ ID NO: 997146
uaaguggugaucagagcca

SEQ ID NO: 997148 - RNA, 19 nt, Artificial Sequence
  Description of Artificial Sequence: Synthetic oligonucleotide
  Sense strand starting at position 3620 of SEQ ID NO: 914347
ugcugaaaucaaggaugcu

SEQ ID NO: 997149 - RNA, 19 nt, Artificial Sequence
  Description of Artificial Sequence: Synthetic oligonucleotide
  Antisense strand to SEQ ID NO: 997148
agcauccuugauuucagca

SEQ ID NO: 997150 - RNA, 19 nt, Artificial Sequence
  Description of Artificial Sequence: Synthetic oligonucleotide
  Sense strand starting at position 3723 of SEQ ID NO: 914347
ucgagacaacauggugaaa

SEQ ID NO: 997151 - RNA, 19 nt, Artificial Sequence
  Description of Artificial Sequence: Synthetic oligonucleotide
  Antisense strand to SEQ ID NO: 997150
uuucaccauguugucucga

SEQ ID NO: 997152 - RNA, 19 nt, Artificial Sequence
  Description of Artificial Sequence: Synthetic oligonucleotide
  Sense strand starting at position 8 of SEQ ID NO: 914348
acaauaauacugcgauaau

SEQ ID NO: 997153 - RNA, 19 nt, Artificial Sequence
  Description of Artificial Sequence: Synthetic oligonucleotide
  Antisense strand to SEQ ID NO: 997152
auuaucgcaguauuauugu

SEQ ID NO: 997154 - RNA, 19 nt, Artificial Sequence
  Description of Artificial Sequence: Synthetic oligonucleotide
  Sense strand starting at position 93 of SEQ ID NO: 914348
ccaacaguuccgugaggua

SEQ ID NO: 997155 - RNA, 19 nt, Artificial Sequence
  Description of Artificial Sequence: Synthetic oligonucleotide
  Antisense strand to SEQ ID NO: 997154
uaccucacggaacuguugg

SEQ ID NO: 997156 - RNA, 19 nt, Artificial Sequence
  Description of Artificial Sequence: Synthetic oligonucleotide
  Sense strand starting at position 254 of SEQ ID NO: 914348
acagcuaccucuguaaagu

SEQ ID NO: 997157 - RNA, 19 nt, Artificial Sequence
  Description of Artificial Sequence: Synthetic oligonucleotide
  Antisense strand to SEQ ID NO: 997156
acuuuacagagguagcugu

SEQ ID NO: 997158 - RNA, 19 nt, Artificial Sequence
  Description of Artificial Sequence: Synthetic oligonucleotide
  Sense strand starting at position 255 of SEQ ID NO: 914348
cagcuaccucuguaaagug

SEQ ID NO: 997159 - RNA, 19 nt, Artificial Sequence
  Description of Artificial Sequence: Synthetic oligonucleotide
  Antisense strand to SEQ ID NO: 997158
cacuuuacagagguagcug

SEQ ID NO: 997160 - RNA, 19 nt, Artificial Sequence
  Description of Artificial Sequence: Synthetic oligonucleotide
  Sense strand starting at position 265 of SEQ ID NO: 914348
uguaaaguggagcgacauu

SEQ ID NO: 997161 - RNA, 19 nt, Artificial Sequence
  Description of Artificial Sequence: Synthetic oligonucleotide
  Antisense strand to SEQ ID NO: 997160
aaugucgcuccacuuuaca

SEQ ID NO: 997162 - RNA, 19 nt, Artificial Sequence
  Description of Artificial Sequence: Synthetic oligonucleotide
  Sense strand starting at position 325 of SEQ ID NO: 914348
gaggcugacuucucagauu

SEQ ID NO: 997163 - RNA, 19 nt, Artificial Sequence
  Description of Artificial Sequence: Synthetic oligonucleotide
  Antisense strand to SEQ ID NO: 997162
aaucugagaagucagccuc

SEQ ID NO: 997164 - RNA, 19 nt, Artificial Sequence
  Description of Artificial Sequence: Synthetic oligonucleotide
  Sense strand starting at position 399 of SEQ ID NO: 914348
uccuguuugaacuggcgau

SEQ ID NO: 997165 - RNA, 19 nt, Artificial Sequence
  Description of Artificial Sequence: Synthetic oligonucleotide
  Antisense strand to SEQ ID NO: 997164
aucgccaguucaaacagga

SEQ ID NO: 997166 - RNA, 19 nt, Artificial Sequence
  Description of Artificial Sequence: Synthetic oligonucleotide
  Sense strand starting at position 400 of SEQ ID NO: 914348
ccuguuugaacuggcgaua

SEQ ID NO: 997167 - RNA, 19 nt, Artificial Sequence
  Description of Artificial Sequence: Synthetic oligonucleotide
  Antisense strand to SEQ ID NO: 997166
uaucgccaguucaaacagg

SEQ ID NO: 997168 - RNA, 19 nt, Artificial Sequence
  Description of Artificial Sequence: Synthetic oligonucleotide
  Sense strand starting at position 403 of SEQ ID NO: 914348
guuugaacuggcgauauag

SEQ ID NO: 997169 - RNA, 19 nt, Artificial Sequence
  Description of Artificial Sequence: Synthetic oligonucleotide
  Antisense strand to SEQ ID NO: 997168
cuauaucgccaguucaaac

SEQ ID NO: 997170 - RNA, 19 nt, Artificial Sequence
  Description of Artificial Sequence: Synthetic oligonucleotide
  Sense strand starting at position 421 of SEQ ID NO: 914348
ggaucuuauugugcugauu

SEQ ID NO: 997171 - RNA, 19 nt, Artificial Sequence
  Description of Artificial Sequence: Synthetic oligonucleotide
  Antisense strand to SEQ ID NO: 997170
aaucagcacaauaagaucc

SEQ ID NO: 997172 - RNA, 19 nt, Artificial Sequence
  Description of Artificial Sequence: Synthetic oligonucleotide
  Sense strand starting at position 475 of SEQ ID NO: 914348
cuuugaagcccuuaugaac

SEQ ID NO: 997173 - RNA, 19 nt, Artificial Sequence
  Description of Artificial Sequence: Synthetic oligonucleotide
  Antisense strand to SEQ ID NO: 997172
guucauaagggcuucaaag

SEQ ID NO: 997174 - RNA, 19 nt, Artificial Sequence
  Description of Artificial Sequence: Synthetic oligonucleotide
  Sense strand starting at position 937 of SEQ ID NO: 914348
gguugacccagcgggaaua

SEQ ID NO: 997175 - RNA, 19 nt, Artificial Sequence
  Description of Artificial Sequence: Synthetic oligonucleotide
  Antisense strand to SEQ ID NO: 997174
uauucccgcugggucaacc

SEQ ID NO: 997176 - RNA, 19 nt, Artificial Sequence
  Description of Artificial Sequence: Synthetic oligonucleotide
  Sense strand starting at position 978 of SEQ ID NO: 914348
gugcacaacccauaauaga

SEQ ID NO: 997177 - RNA, 19 nt, Artificial Sequence
  Description of Artificial Sequence: Synthetic oligonucleotide
  Antisense strand to SEQ ID NO: 997176
ucuauuauggguugugcac

SEQ ID NO: 997178 - RNA, 19 nt, Artificial Sequence
  Description of Artificial Sequence: Synthetic oligonucleotide
  Sense strand starting at position 1162 of SEQ ID NO: 914348
gcaccauguccacaucgau

SEQ ID NO: 997179 - RNA, 19 nt, Artificial Sequence
  Description of Artificial Sequence: Synthetic oligonucleotide
  Antisense strand to SEQ ID NO: 997178
aucgauguggacauggugc

SEQ ID NO: 997180 - RNA, 19 nt, Artificial Sequence
  Description of Artificial Sequence: Synthetic oligonucleotide
  Sense strand starting at position 1174 of SEQ ID NO: 914348
caucgaucaccagggcaua

SEQ ID NO: 997181 - RNA, 19 nt, Artificial Sequence
  Description of Artificial Sequence: Synthetic oligonucleotide
  Antisense strand to SEQ ID NO: 997180
uaugcccuggugaucgaug

SEQ ID NO: 997182 - RNA, 19 nt, Artificial Sequence
  Description of Artificial Sequence: Synthetic oligonucleotide
  Sense strand starting at position 1210 of SEQ ID NO: 914348
ccagauuccucagcagguu

SEQ ID NO: 997183 - RNA, 19 nt, Artificial Sequence
  Description of Artificial Sequence: Synthetic oligonucleotide
  Antisense strand to SEQ ID NO: 997182
aaccugcugaggaaucugg

SEQ ID NO: 997184 - RNA, 19 nt, Artificial Sequence
  Description of Artificial Sequence: Synthetic oligonucleotide
  Sense strand starting at position 1211 of SEQ ID NO: 914348
cagauuccucagcagguua

SEQ ID NO: 997185 - RNA, 19 nt, Artificial Sequence
  Description of Artificial Sequence: Synthetic oligonucleotide
  Antisense strand to SEQ ID NO: 997184
uaaccugcugaggaaucug

SEQ ID NO: 997186 - RNA, 19 nt, Artificial Sequence
  Description of Artificial Sequence: Synthetic oligonucleotide
  Sense strand starting at position 1213 of SEQ ID NO: 914348
gauuccucagcagguuauu

SEQ ID NO: 997187 - RNA, 19 nt, Artificial Sequence
  Description of Artificial Sequence: Synthetic oligonucleotide
  Antisense strand to SEQ ID NO: 997186
aauaaccugcugaggaauc

SEQ ID NO: 997188 - RNA, 19 nt, Artificial Sequence
  Description of Artificial Sequence: Synthetic oligonucleotide
  Sense strand starting at position 1248 of SEQ ID NO: 914348
gugcccagcgcauaauuaa

SEQ ID NO: 997189 - RNA, 19 nt, Artificial Sequence
  Description of Artificial Sequence: Synthetic oligonucleotide
  Antisense strand to SEQ ID NO: 997188
uuaauuaugcgcugggcac

SEQ ID NO: 997190 - RNA, 19 nt, Artificial Sequence
  Description of Artificial Sequence: Synthetic oligonucleotide
  Sense strand starting at position 1284 of SEQ ID NO: 914348
cuggcuagcuugucaaaga

SEQ ID NO: 997191 - RNA, 19 nt, Artificial Sequence
  Description of Artificial Sequence: Synthetic oligonucleotide
  Antisense strand to SEQ ID NO: 997190
ucuuugacaagcuagccag

SEQ ID NO: 997192 - RNA, 19 nt, Artificial Sequence
  Description of Artificial Sequence: Synthetic oligonucleotide
  Sense strand starting at position 2384 of SEQ ID NO: 914348
cggaguagaugagagauaa

SEQ ID NO: 997193 - RNA, 19 nt, Artificial Sequence
  Description of Artificial Sequence: Synthetic oligonucleotide
  Antisense strand to SEQ ID NO: 997192
uuaucucucaucuacuccg

SEQ ID NO: 997194 - RNA, 19 nt, Artificial Sequence
  Description of Artificial Sequence: Synthetic oligonucleotide
  Sense strand starting at position 2691 of SEQ ID NO: 914348
gucuuuauccaccacgcau

SEQ ID NO: 997195 - RNA, 19 nt, Artificial Sequence
  Description of Artificial Sequence: Synthetic oligonucleotide
  Antisense strand to SEQ ID NO: 997194
augcgugguggauaaagac

SEQ ID NO: 997196 - RNA, 19 nt, Artificial Sequence
  Description of Artificial Sequence: Synthetic oligonucleotide
  Sense strand starting at position 2824 of SEQ ID NO: 914348
gauucuggccagugugaag

SEQ ID NO: 997197 - RNA, 19 nt, Artificial Sequence
  Description of Artificial Sequence: Synthetic oligonucleotide
  Antisense strand to SEQ ID NO: 997196
cuucacacuggccagaauc

SEQ ID NO: 997198 - RNA, 19 nt, Artificial Sequence
  Description of Artificial Sequence: Synthetic oligonucleotide
  Sense strand starting at position 2852 of SEQ ID NO: 914348
aacguaugaucugcaggaa

SEQ ID NO: 997199 - RNA, 19 nt, Artificial Sequence
  Description of Artificial Sequence: Synthetic oligonucleotide
  Antisense strand to SEQ ID NO: 997198
uuccugcagaucauacguu

SEQ ID NO: 997200 - RNA, 19 nt, Artificial Sequence
  Description of Artificial Sequence: Synthetic oligonucleotide
  Sense strand starting at position 2853 of SEQ ID NO: 914348
acguaugaucugcaggaau

SEQ ID NO: 997201 - RNA, 19 nt, Artificial Sequence
  Description of Artificial Sequence: Synthetic oligonucleotide
  Antisense strand to SEQ ID NO: 997200
auuccugcagaucauacgu

SEQ ID NO: 997202 - RNA, 19 nt, Artificial Sequence
  Description of Artificial Sequence: Synthetic oligonucleotide
  Sense strand starting at position 2855 of SEQ ID NO: 914348
guaugaucugcaggaauca

SEQ ID NO: 997203 - RNA, 19 nt, Artificial Sequence
  Description of Artificial Sequence: Synthetic oligonucleotide
  Antisense strand to SEQ ID NO: 997202
ugauuccugcagaucauac

SEQ ID NO: 997204 - RNA, 19 nt, Artificial Sequence
  Description of Artificial Sequence: Synthetic oligonucleotide
  Sense strand starting at position 2913 of SEQ ID NO: 914348
aguagugguacuuguccua

SEQ ID NO: 997205 - RNA, 19 nt, Artificial Sequence
  Description of Artificial Sequence: Synthetic oligonucleotide
  Antisense strand to SEQ ID NO: 997204
uaggacaaguaccacuacu

SEQ ID NO: 997206 - RNA, 19 nt, Artificial Sequence
  Description of Artificial Sequence: Synthetic oligonucleotide
  Sense strand starting at position 3428 of SEQ ID NO: 914348
agacacugccacugcuaaa

SEQ ID NO: 997207 - RNA, 19 nt, Artificial Sequence
  Description of Artificial Sequence: Synthetic oligonucleotide
  Antisense strand to SEQ ID NO: 997206
uuuagcaguggcagugucu

SEQ ID NO: 997208 - RNA, 19 nt, Artificial Sequence
  Description of Artificial Sequence: Synthetic oligonucleotide
  Sense strand starting at position 3501 of SEQ ID NO: 914348
ggcagagugcucugaaucu

SEQ ID NO: 997209 - RNA, 19 nt, Artificial Sequence
  Description of Artificial Sequence: Synthetic oligonucleotide
  Antisense strand to SEQ ID NO: 997208
agauucagagcacucugcc

SEQ ID NO: 997210 - RNA, 19 nt, Artificial Sequence
  Description of Artificial Sequence: Synthetic oligonucleotide
  Sense strand starting at position 3557 of SEQ ID NO: 914348
ggauaaaguguuuguccca

SEQ ID NO: 997211 - RNA, 19 nt, Artificial Sequence
  Description of Artificial Sequence: Synthetic oligonucleotide
  Antisense strand to SEQ ID NO: 997210
ugggacaaacacuuuaucc

SEQ ID NO: 997212 - RNA, 19 nt, Artificial Sequence
  Description of Artificial Sequence: Synthetic oligonucleotide
  Sense strand starting at position 3599 of SEQ ID NO: 914348
caagguuguugaguugaag

SEQ ID NO: 997213 - RNA, 19 nt, Artificial Sequence
  Description of Artificial Sequence: Synthetic oligonucleotide
  Antisense strand to SEQ ID NO: 997212
cuucaacucaacaaccuug

SEQ ID NO: 997214 - RNA, 19 nt, Artificial Sequence
  Description of Artificial Sequence: Synthetic oligonucleotide
  Sense strand starting at position 3602 of SEQ ID NO: 914348
gguuguugaguugaagagu

SEQ ID NO: 997215 - RNA, 19 nt, Artificial Sequence
  Description of Artificial Sequence: Synthetic oligonucleotide
  Antisense strand to SEQ ID NO: 997214
acucuucaacucaacaacc

SEQ ID NO: 997216 - RNA, 19 nt, Artificial Sequence
  Description of Artificial Sequence: Synthetic oligonucleotide
  Sense strand starting at position 3603 of SEQ ID NO: 914348
guuguugaguugaagagug

SEQ ID NO: 997217 - RNA, 19 nt, Artificial Sequence
  Description of Artificial Sequence: Synthetic oligonucleotide
  Antisense strand to SEQ ID NO: 997216
cacucuucaacucaacaac

SEQ ID NO: 997218 - RNA, 19 nt, Artificial Sequence
  Description of Artificial Sequence: Synthetic oligonucleotide
  Sense strand starting at position 3605 of SEQ ID NO: 914348
uguugaguugaagagugau

SEQ ID NO: 997219 - RNA, 19 nt, Artificial Sequence
  Description of Artificial Sequence: Synthetic oligonucleotide
  Antisense strand to SEQ ID NO: 997218
aucacucuucaacucaaca

SEQ ID NO: 997220 - RNA, 19 nt, Artificial Sequence
  Description of Artificial Sequence: Synthetic oligonucleotide
  Sense strand starting at position 3726 of SEQ ID NO: 914348
cagguauuguccuugagag

SEQ ID NO: 997221 - RNA, 19 nt, Artificial Sequence
  Description of Artificial Sequence: Synthetic oligonucleotide
  Antisense strand to SEQ ID NO: 997220
cucucaaggacaauaccug

SEQ ID NO: 997222 - RNA, 19 nt, Artificial Sequence
  Description of Artificial Sequence: Synthetic oligonucleotide
  Sense strand starting at position 3727 of SEQ ID NO: 914348
agguauuguccuugagagu

SEQ ID NO: 997223 - RNA, 19 nt, Artificial Sequence
  Description of Artificial Sequence: Synthetic oligonucleotide
  Antisense strand to SEQ ID NO: 997222
acucucaaggacaauaccu

SEQ ID NO: 997224 - RNA, 19 nt, Artificial Sequence
  Description of Artificial Sequence: Synthetic oligonucleotide
  Sense strand starting at position 3728 of SEQ ID NO: 914348
gguauuguccuugagaguu

SEQ ID NO: 997225 - RNA, 19 nt, Artificial Sequence
  Description of Artificial Sequence: Synthetic oligonucleotide
  Antisense strand to SEQ ID NO: 997224
aacucucaaggacaauacc

SEQ ID NO: 997226 - RNA, 19 nt, Artificial Sequence
  Description of Artificial Sequence: Synthetic oligonucleotide
  Sense strand starting at position 3740 of SEQ ID NO: 914348
gagaguuuccacuggugac

SEQ ID NO: 997227 - RNA, 19 nt, Artificial Sequence
  Description of Artificial Sequence: Synthetic oligonucleotide
  Antisense strand to SEQ ID NO: 997226
gucaccaguggaaacucuc

SEQ ID NO: 997228 - RNA, 19 nt, Artificial Sequence
  Description of Artificial Sequence: Synthetic oligonucleotide
  Sense strand starting at position 3752 of SEQ ID NO: 914348
uggugaccuuggcuguaaa

SEQ ID NO: 997229 - RNA, 19 nt, Artificial Sequence
  Description of Artificial Sequence: Synthetic oligonucleotide
  Antisense strand to SEQ ID NO: 997228
uuuacagccaaggucacca

SEQ ID NO: 997230 - RNA, 19 nt, Artificial Sequence
  Description of Artificial Sequence: Synthetic oligonucleotide
  Sense strand starting at position 3856 of SEQ ID NO: 914348
cuuugaccuccucaguguu

SEQ ID NO: 997231 - RNA, 19 nt, Artificial Sequence
  Description of Artificial Sequence: Synthetic oligonucleotide
  Antisense strand to SEQ ID NO: 997230
aacacugaggaggucaaag

SEQ ID NO: 997232 - RNA, 19 nt, Artificial Sequence
  Description of Artificial Sequence: Synthetic oligonucleotide
  Sense strand starting at position 97 of SEQ ID NO: 914349
gagauaagcuaugucucuu

SEQ ID NO: 997233 - RNA, 19 nt, Artificial Sequence
  Description of Artificial Sequence: Synthetic oligonucleotide
  Antisense strand to SEQ ID NO: 997232
aagagacauagcuuaucuc

SEQ ID NO: 997234 - RNA, 19 nt, Artificial Sequence
  Description of Artificial Sequence: Synthetic oligonucleotide
  Sense strand starting at position 228 of SEQ ID NO: 914349
gagucugaauaacugaguu

SEQ ID NO: 997235 - RNA, 19 nt, Artificial Sequence
  Description of Artificial Sequence: Synthetic oligonucleotide
  Antisense strand to SEQ ID NO: 997234
aacucaguuauucagacuc

SEQ ID NO: 997236 - RNA, 19 nt, Artificial Sequence
  Description of Artificial Sequence: Synthetic oligonucleotide
  Sense strand starting at position 255 of SEQ ID NO: 914349
agcuucuuuccugaguuaa

SEQ ID NO: 997237 - RNA, 19 nt, Artificial Sequence
  Description of Artificial Sequence: Synthetic oligonucleotide
  Antisense strand to SEQ ID NO: 997236
uuaacucaggaaagaagcu

SEQ ID NO: 997238 - RNA, 19 nt, Artificial Sequence
  Description of Artificial Sequence: Synthetic oligonucleotide
  Sense strand starting at position 265 of SEQ ID NO: 914349
cugaguuaaucuccuaggu

SEQ ID NO: 997239 - RNA, 19 nt, Artificial Sequence
  Description of Artificial Sequence: Synthetic oligonucleotide
  Antisense strand to SEQ ID NO: 997238
accuaggagauuaacucag

SEQ ID NO: 997240 - RNA, 19 nt, Artificial Sequence
  Description of Artificial Sequence: Synthetic oligonucleotide
  Sense strand starting at position 343 of SEQ ID NO: 914349
agagaauccuguuuauguu

SEQ ID NO: 997241 - RNA, 19 nt, Artificial Sequence
  Description of Artificial Sequence: Synthetic oligonucleotide
  Antisense strand to SEQ ID NO: 997240
aacauaaacaggauucucu

SEQ ID NO: 997242 - RNA, 19 nt, Artificial Sequence
  Description of Artificial Sequence: Synthetic oligonucleotide
  Sense strand starting at position 344 of SEQ ID NO: 914349
gagaauccuguuuauguua

SEQ ID NO: 997243 - RNA, 19 nt, Artificial Sequence
  Description of Artificial Sequence: Synthetic oligonucleotide
  Antisense strand to SEQ ID NO: 997242
uaacauaaacaggauucuc

SEQ ID NO: 997244 - RNA, 19 nt, Artificial Sequence
  Description of Artificial Sequence: Synthetic oligonucleotide
  Sense strand starting at position 359 of SEQ ID NO: 914349
guuaacgugcuacacaaau

SEQ ID NO: 997245 - RNA, 19 nt, Artificial Sequence
  Description of Artificial Sequence: Synthetic oligonucleotide
  Antisense strand to SEQ ID NO: 997244
auuuguguagcacguuaac

SEQ ID NO: 997246 - RNA, 19 nt, Artificial Sequence
  Description of Artificial Sequence: Synthetic oligonucleotide
  Sense strand starting at position 402 of SEQ ID NO: 914349
cccaucauuucuggaaaga

SEQ ID NO: 997247 - RNA, 19 nt, Artificial Sequence
  Description of Artificial Sequence: Synthetic oligonucleotide
  Antisense strand to SEQ ID NO: 997246
ucuuuccagaaaugauggg

SEQ ID NO: 997248 - RNA, 19 nt, Artificial Sequence
  Description of Artificial Sequence: Synthetic oligonucleotide
  Sense strand starting at position 638 of SEQ ID NO: 914349
gggcauuucucucuauggu

SEQ ID NO: 997249 - RNA, 19 nt, Artificial Sequence
  Description of Artificial Sequence: Synthetic oligonucleotide
  Antisense strand to SEQ ID NO: 997248
accauagagagaaaugccc

SEQ ID NO: 997250 - RNA, 19 nt, Artificial Sequence
  Description of Artificial Sequence: Synthetic oligonucleotide
  Sense strand starting at position 775 of SEQ ID NO: 914349
guaaguccaggucaacaua

SEQ ID NO: 997251 - RNA, 19 nt, Artificial Sequence
  Description of Artificial Sequence: Synthetic oligonucleotide
  Antisense strand to SEQ ID NO: 997250
uauguugaccuggacuuac

SEQ ID NO: 997252 - RNA, 19 nt, Artificial Sequence
  Description of Artificial Sequence: Synthetic oligonucleotide
  Sense strand starting at position 905 of SEQ ID NO: 914349
gggcaacuccuuuaucuca

SEQ ID NO: 997253 - RNA, 19 nt, Artificial Sequence
  Description of Artificial Sequence: Synthetic oligonucleotide
  Antisense strand to SEQ ID NO: 997252
ugagauaaaggaguugccc

SEQ ID NO: 997254 - RNA, 19 nt, Artificial Sequence
  Description of Artificial Sequence: Synthetic oligonucleotide
  Sense strand starting at position 916 of SEQ ID NO: 914349
uuaucucagugucucagaa

SEQ ID NO: 997255 - RNA, 19 nt, Artificial Sequence
  Description of Artificial Sequence: Synthetic oligonucleotide
  Antisense strand to SEQ ID NO: 997254
uucugagacacugagauaa

SEQ ID NO: 997256 - RNA, 19 nt, Artificial Sequence
  Description of Artificial Sequence: Synthetic oligonucleotide
  Sense strand starting at position 980 of SEQ ID NO: 914349
uguaguaggcaccagaaua

SEQ ID NO: 997257 - RNA, 19 nt, Artificial Sequence
  Description of Artificial Sequence: Synthetic oligonucleotide
  Antisense strand to SEQ ID NO: 997256
uauucuggugccuacuaca

SEQ ID NO: 997258 - RNA, 19 nt, Artificial Sequence
  Description of Artificial Sequence: Synthetic oligonucleotide
  Sense strand starting at position 991 of SEQ ID NO: 914349
ccagaauaacauuagcagu

SEQ ID NO: 997259 - RNA, 19 nt, Artificial Sequence
  Description of Artificial Sequence: Synthetic oligonucleotide
  Antisense strand to SEQ ID NO: 997258
acugcuaauguuauucugg

SEQ ID NO: 997260 - RNA, 19 nt, Artificial Sequence
  Description of Artificial Sequence: Synthetic oligonucleotide
  Sense strand starting at position 1059 of SEQ ID NO: 914349
cacaguaugguauaaaguu

SEQ ID NO: 997261 - RNA, 19 nt, Artificial Sequence
  Description of Artificial Sequence: Synthetic oligonucleotide
  Antisense strand to SEQ ID NO: 997260
aacuuuauaccauacugug

SEQ ID NO: 997262 - RNA, 19 nt, Artificial Sequence
  Description of Artificial Sequence: Synthetic oligonucleotide
  Sense strand starting at position 1067 of SEQ ID NO: 914349
gguauaaaguuccucuuua

SEQ ID NO: 997263 - RNA, 19 nt, Artificial Sequence
  Description of Artificial Sequence: Synthetic oligonucleotide
  Antisense strand to SEQ ID NO: 997262
uaaagaggaacuuuauacc

SEQ ID NO: 997264 - RNA, 19 nt, Artificial Sequence
  Description of Artificial Sequence: Synthetic oligonucleotide
  Sense strand starting at position 1092 of SEQ ID NO: 914349
uuauaaaguuccucuguga

SEQ ID NO: 997265 - RNA, 19 nt, Artificial Sequence
  Description of Artificial Sequence: Synthetic oligonucleotide
  Antisense strand to SEQ ID NO: 997264
ucacagaggaacuuuauaa

SEQ ID NO: 997266 - RNA, 19 nt, Artificial Sequence
  Description of Artificial Sequence: Synthetic oligonucleotide
  Sense strand starting at position 1123 of SEQ ID NO: 914349
aggcauuucucacucuguu

SEQ ID NO: 997267 - RNA, 19 nt, Artificial Sequence
  Description of Artificial Sequence: Synthetic oligonucleotide
  Antisense strand to SEQ ID NO: 997266
aacagagugagaaaugccu

SEQ ID NO: 997268 - RNA, 19 nt, Artificial Sequence
  Description of Artificial Sequence: Synthetic oligonucleotide
  Sense strand starting at position 1489 of SEQ ID NO: 914349
caggaacuacuuuggucau

SEQ ID NO: 997269 - RNA, 19 nt, Artificial Sequence
  Description of Artificial Sequence: Synthetic oligonucleotide
  Antisense strand to SEQ ID NO: 997268
augaccaaaguaguuccug

SEQ ID NO: 997270 - RNA, 19 nt, Artificial Sequence
  Description of Artificial Sequence: Synthetic oligonucleotide
  Sense strand starting at position 1517 of SEQ ID NO: 914349
ugguuugaugcugagauag

SEQ ID NO: 997271 - RNA, 19 nt, Artificial Sequence
  Description of Artificial Sequence: Synthetic oligonucleotide
  Antisense strand to SEQ ID NO: 997270
cuaucucagcaucaaacca

SEQ ID NO: 997272 - RNA, 19 nt, Artificial Sequence
  Description of Artificial Sequence: Synthetic oligonucleotide
  Sense strand starting at position 1584 of SEQ ID NO: 914349
caggguauuccuggaggaa

SEQ ID NO: 997273 - RNA, 19 nt, Artificial Sequence
  Description of Artificial Sequence: Synthetic oligonucleotide
  Antisense strand to SEQ ID NO: 997272
uuccuccaggaauacccug

SEQ ID NO: 997274 - RNA, 19 nt, Artificial Sequence
  Description of Artificial Sequence: Synthetic oligonucleotide
  Sense strand starting at position 1587 of SEQ ID NO: 914349
gguauuccuggaggaauau

SEQ ID NO: 997275 - RNA, 19 nt, Artificial Sequence
  Description of Artificial Sequence: Synthetic oligonucleotide
  Antisense strand to SEQ ID NO: 997274
auauuccuccaggaauacc

SEQ ID NO: 997276 - RNA, 19 nt, Artificial Sequence
  Description of Artificial Sequence: Synthetic oligonucleotide
  Sense strand starting at position 1596 of SEQ ID NO: 914349
ggaggaauauucguauagc

SEQ ID NO: 997277 - RNA, 19 nt, Artificial Sequence
  Description of Artificial Sequence: Synthetic oligonucleotide
  Antisense strand to SEQ ID NO: 997276
gcuauacgaauauuccucc

SEQ ID NO: 997278 - RNA, 19 nt, Artificial Sequence
  Description of Artificial Sequence: Synthetic oligonucleotide
  Sense strand starting at position 1599 of SEQ ID NO: 914349
ggaauauucguauagcaga

SEQ ID NO: 997279 - RNA, 19 nt, Artificial Sequence
  Description of Artificial Sequence: Synthetic oligonucleotide
  Antisense strand to SEQ ID NO: 997278
ucugcuauacgaauauucc

SEQ ID NO: 997280 - RNA, 19 nt, Artificial Sequence
  Description of Artificial Sequence: Synthetic oligonucleotide
  Sense strand starting at position 1604 of SEQ ID NO: 914349
auucguauagcagaauauu

SEQ ID NO: 997281 - RNA, 19 nt, Artificial Sequence
  Description of Artificial Sequence: Synthetic oligonucleotide
  Antisense strand to SEQ ID NO: 997280
aauauucugcuauacgaau

SEQ ID NO: 997282 - RNA, 19 nt, Artificial Sequence
  Description of Artificial Sequence: Synthetic oligonucleotide
  Sense strand starting at position 2089 of SEQ ID NO: 914349
cucaaauguccuuagagug

SEQ ID NO: 997283 - RNA, 19 nt, Artificial Sequence
  Description of Artificial Sequence: Synthetic oligonucleotide
  Antisense strand to SEQ ID NO: 997282
cacucuaaggacauuugag

SEQ ID NO: 997284 - RNA, 19 nt, Artificial Sequence
  Description of Artificial Sequence: Synthetic oligonucleotide
  Sense strand starting at position 2116 of SEQ ID NO: 914349
gugaauauccuuggaggag

SEQ ID NO: 997285 - RNA, 19 nt, Artificial Sequence
  Description of Artificial Sequence: Synthetic oligonucleotide
  Antisense strand to SEQ ID NO: 997284
cuccuccaaggauauucac

SEQ ID NO: 997286 - RNA, 19 nt, Artificial Sequence
  Description of Artificial Sequence: Synthetic oligonucleotide
  Sense strand starting at position 2267 of SEQ ID NO: 914349
gcaucuugucuguaaagac

SEQ ID NO: 997287 - RNA, 19 nt, Artificial Sequence
  Description of Artificial Sequence: Synthetic oligonucleotide
  Antisense strand to SEQ ID NO: 997286
gucuuuacagacaagaugc

SEQ ID NO: 997288 - RNA, 19 nt, Artificial Sequence
  Description of Artificial Sequence: Synthetic oligonucleotide
  Sense strand starting at position 2373 of SEQ ID NO: 914349
ccugaagggcuguggaaau

SEQ ID NO: 997289 - RNA, 19 nt, Artificial Sequence
  Description of Artificial Sequence: Synthetic oligonucleotide
  Antisense strand to SEQ ID NO: 997288
auuuccacagcccuucagg

SEQ ID NO: 997290 - RNA, 19 nt, Artificial Sequence
  Description of Artificial Sequence: Synthetic oligonucleotide
  Sense strand starting at position 2488 of SEQ ID NO: 914349
gcccuaauggaugggauca

SEQ ID NO: 997291 - RNA, 19 nt, Artificial Sequence
  Description of Artificial Sequence: Synthetic oligonucleotide
  Antisense strand to SEQ ID NO: 997290
ugaucccauccauuagggc

SEQ ID NO: 997292 - RNA, 19 nt, Artificial Sequence
  Description of Artificial Sequence: Synthetic oligonucleotide
  Sense strand starting at position 2512 of SEQ ID NO: 914349
uuaaguuguagugauccau

SEQ ID NO: 997293 - RNA, 19 nt, Artificial Sequence
  Description of Artificial Sequence: Synthetic oligonucleotide
  Antisense strand to SEQ ID NO: 997292
auggaucacuacaacuuaa

SEQ ID NO: 997294 - RNA, 19 nt, Artificial Sequence
  Description of Artificial Sequence: Synthetic oligonucleotide
  Sense strand starting at position 2516 of SEQ ID NO: 914349
guuguagugauccaucaca

SEQ ID NO: 997295 - RNA, 19 nt, Artificial Sequence
  Description of Artificial Sequence: Synthetic oligonucleotide
  Antisense strand to SEQ ID NO: 997294
ugugauggaucacuacaac

SEQ ID NO: 997296 - RNA, 19 nt, Artificial Sequence
  Description of Artificial Sequence: Synthetic oligonucleotide
  Sense strand starting at position 2791 of SEQ ID NO: 914349
cuuacauugggccauauua

SEQ ID NO: 997297 - RNA, 19 nt, Artificial Sequence
  Description of Artificial Sequence: Synthetic oligonucleotide
  Antisense strand to SEQ ID NO: 997296
uaauauggcccaauguaag

SEQ ID NO: 997298 - RNA, 19 nt, Artificial Sequence
  Description of Artificial Sequence: Synthetic oligonucleotide
  Sense strand starting at position 2799 of SEQ ID NO: 914349
gggccauauuaacuauaaa

SEQ ID NO: 997299 - RNA, 19 nt, Artificial Sequence
  Description of Artificial Sequence: Synthetic oligonucleotide
  Antisense strand to SEQ ID NO: 997298
uuuauaguuaauauggccc

SEQ ID NO: 997300 - RNA, 19 nt, Artificial Sequence
  Description of Artificial Sequence: Synthetic oligonucleotide
  Sense strand starting at position 3198 of SEQ ID NO: 914349
agcaucuauguccaauaga

SEQ ID NO: 997301 - RNA, 19 nt, Artificial Sequence
  Description of Artificial Sequence: Synthetic oligonucleotide
  Antisense strand to SEQ ID NO: 997300
ucuauuggacauagaugcu

SEQ ID NO: 997302 - RNA, 19 nt, Artificial Sequence
  Description of Artificial Sequence: Synthetic oligonucleotide
  Sense strand starting at position 3235 of SEQ ID NO: 914349
gguauaugagcaugggaaa

SEQ ID NO: 997303 - RNA, 19 nt, Artificial Sequence
  Description of Artificial Sequence: Synthetic oligonucleotide
  Antisense strand to SEQ ID NO: 997302
uuucccaugcucauauacc

SEQ ID NO: 997304 - RNA, 19 nt, Artificial Sequence
  Description of Artificial Sequence: Synthetic oligonucleotide
  Sense strand starting at position 3236 of SEQ ID NO: 914349
guauaugagcaugggaaau

SEQ ID NO: 997305 - RNA, 19 nt, Artificial Sequence
  Description of Artificial Sequence: Synthetic oligonucleotide
  Antisense strand to SEQ ID NO: 997304
auuucccaugcucauauac

SEQ ID NO: 997306 - RNA, 19 nt, Artificial Sequence
  Description of Artificial Sequence: Synthetic oligonucleotide
  Sense strand starting at position 3238 of SEQ ID NO: 914349
auaugagcaugggaaauuu

SEQ ID NO: 997307 - RNA, 19 nt, Artificial Sequence
  Description of Artificial Sequence: Synthetic oligonucleotide
  Antisense strand to SEQ ID NO: 997306
aaauuucccaugcucauau

SEQ ID NO: 997308 - RNA, 19 nt, Artificial Sequence
  Description of Artificial Sequence: Synthetic oligonucleotide
  Sense strand starting at position 3329 of SEQ ID NO: 914349
agggucagaguguguaaau

SEQ ID NO: 997309 - RNA, 19 nt, Artificial Sequence
  Description of Artificial Sequence: Synthetic oligonucleotide
  Antisense strand to SEQ ID NO: 997308
auuuacacacucugacccu

SEQ ID NO: 997310 - RNA, 19 nt, Artificial Sequence
  Description of Artificial Sequence: Synthetic oligonucleotide
  Sense strand starting at position 3436 of SEQ ID NO: 914349
guuagaaccuauguuguag

SEQ ID NO: 997311 - RNA, 19 nt, Artificial Sequence
  Description of Artificial Sequence: Synthetic oligonucleotide
  Antisense strand to SEQ ID NO: 997310
cuacaacauagguucuaac

SEQ ID NO: 997312 - RNA, 19 nt, Artificial Sequence
  Description of Artificial Sequence: Synthetic oligonucleotide
  Sense strand starting at position 92 of SEQ ID NO: 914350
gcuggaguguuccacgucu

SEQ ID NO: 997313 - RNA, 19 nt, Artificial Sequence
  Description of Artificial Sequence: Synthetic oligonucleotide
  Antisense strand to SEQ ID NO: 997312
agacguggaacacuccagc

SEQ ID NO: 997314 - RNA, 19 nt, Artificial Sequence
  Description of Artificial Sequence: Synthetic oligonucleotide
  Sense strand starting at position 96 of SEQ ID NO: 914350
gaguguuccacgucugccu

SEQ ID NO: 997315 - RNA, 19 nt, Artificial Sequence
  Description of Artificial Sequence: Synthetic oligonucleotide
  Antisense strand to SEQ ID NO: 997314
aggcagacguggaacacuc

SEQ ID NO: 997316 - RNA, 19 nt, Artificial Sequence
  Description of Artificial Sequence: Synthetic oligonucleotide
  Sense strand starting at position 127 of SEQ ID NO: 914350
cugagaacucaggguuagu

SEQ ID NO: 997317 - RNA, 19 nt, Artificial Sequence
  Description of Artificial Sequence: Synthetic oligonucleotide
  Antisense strand to SEQ ID NO: 997316
acuaacccugaguucucag

SEQ ID NO: 997318 - RNA, 19 nt, Artificial Sequence
  Description of Artificial Sequence: Synthetic oligonucleotide
  Sense strand starting at position 153 of SEQ ID NO: 914350
acuguagucucuccugaag

SEQ ID NO: 997319 - RNA, 19 nt, Artificial Sequence
  Description of Artificial Sequence: Synthetic oligonucleotide
  Antisense strand to SEQ ID NO: 997318
cuucaggagagacuacagu

SEQ ID NO: 997320 - RNA, 19 nt, Artificial Sequence
  Description of Artificial Sequence: Synthetic oligonucleotide
  Sense strand starting at position 155 of SEQ ID NO: 914350
uguagucucuccugaagga

SEQ ID NO: 997321 - RNA, 19 nt, Artificial Sequence
  Description of Artificial Sequence: Synthetic oligonucleotide
  Antisense strand to SEQ ID NO: 997320
uccuucaggagagacuaca

SEQ ID NO: 997322 - RNA, 19 nt, Artificial Sequence
  Description of Artificial Sequence: Synthetic oligonucleotide
  Sense strand starting at position 156 of SEQ ID NO: 914350
guagucucuccugaaggau

SEQ ID NO: 997323 - RNA, 19 nt, Artificial Sequence
  Description of Artificial Sequence: Synthetic oligonucleotide
  Antisense strand to SEQ ID NO: 997322
auccuucaggagagacuac

SEQ ID NO: 997324 - RNA, 19 nt, Artificial Sequence
  Description of Artificial Sequence: Synthetic oligonucleotide
  Sense strand starting at position 255 of SEQ ID NO: 914350
gauugaguguccuugggua

SEQ ID NO: 997325 - RNA, 19 nt, Artificial Sequence
  Description of Artificial Sequence: Synthetic oligonucleotide
  Antisense strand to SEQ ID NO: 997324
uacccaaggacacucaauc

SEQ ID NO: 997326 - RNA, 19 nt, Artificial Sequence
  Description of Artificial Sequence: Synthetic oligonucleotide
  Sense strand starting at position 368 of SEQ ID NO: 914350
ugucuagguccucagcuua

SEQ ID NO: 997327 - RNA, 19 nt, Artificial Sequence
  Description of Artificial Sequence: Synthetic oligonucleotide
  Antisense strand to SEQ ID NO: 997326
uaagcugaggaccuagaca

SEQ ID NO: 997328 - RNA, 19 nt, Artificial Sequence
  Description of Artificial Sequence: Synthetic oligonucleotide
  Sense strand starting at position 836 of SEQ ID NO: 914350
gucucuugaggguguggaa

SEQ ID NO: 997329 - RNA, 19 nt, Artificial Sequence
  Description of Artificial Sequence: Synthetic oligonucleotide
  Antisense strand to SEQ ID NO: 997328
uuccacacccucaagagac

SEQ ID NO: 997330 - RNA, 19 nt, Artificial Sequence
  Description of Artificial Sequence: Synthetic oligonucleotide
  Sense strand starting at position 847 of SEQ ID NO: 914350
guguggaagcugugaggua

SEQ ID NO: 997331 - RNA, 19 nt, Artificial Sequence
  Description of Artificial Sequence: Synthetic oligonucleotide
  Antisense strand to SEQ ID NO: 997330
uaccucacagcuuccacac

SEQ ID NO: 997332 - RNA, 19 nt, Artificial Sequence
  Description of Artificial Sequence: Synthetic oligonucleotide
  Sense strand starting at position 848 of SEQ ID NO: 914350
uguggaagcugugagguau

SEQ ID NO: 997333 - RNA, 19 nt, Artificial Sequence
  Description of Artificial Sequence: Synthetic oligonucleotide
  Antisense strand to SEQ ID NO: 997332
auaccucacagcuuccaca

SEQ ID NO: 997334 - RNA, 19 nt, Artificial Sequence
  Description of Artificial Sequence: Synthetic oligonucleotide
  Sense strand starting at position 1137 of SEQ ID NO: 914350
ugcgccuuccugucuggaa

SEQ ID NO: 997335 - RNA, 19 nt, Artificial Sequence
  Description of Artificial Sequence: Synthetic oligonucleotide
  Antisense strand to SEQ ID NO: 997334
uuccagacaggaaggcgca

SEQ ID NO: 997336 - RNA, 19 nt, Artificial Sequence
  Description of Artificial Sequence: Synthetic oligonucleotide
  Sense strand starting at position 1138 of SEQ ID NO: 914350
gcgccuuccugucuggaau

SEQ ID NO: 997337 - RNA, 19 nt, Artificial Sequence
  Description of Artificial Sequence: Synthetic oligonucleotide
  Antisense strand to SEQ ID NO: 997336
auuccagacaggaaggcgc

SEQ ID NO: 997338 - RNA, 19 nt, Artificial Sequence
  Description of Artificial Sequence: Synthetic oligonucleotide
  Sense strand starting at position 1166 of SEQ ID NO: 914350
cccaaagguguaugucaaa

SEQ ID NO: 997339 - RNA, 19 nt, Artificial Sequence
  Description of Artificial Sequence: Synthetic oligonucleotide
  Antisense strand to SEQ ID NO: 997338
uuugacauacaccuuuggg

SEQ ID NO: 997340 - RNA, 19 nt, Artificial Sequence
  Description of Artificial Sequence: Synthetic oligonucleotide
  Sense strand starting at position 1169 of SEQ ID NO: 914350
aaagguguaugucaaagau

SEQ ID NO: 997341 - RNA, 19 nt, Artificial Sequence
  Description of Artificial Sequence: Synthetic oligonucleotide
  Antisense strand to SEQ ID NO: 997340
aucuuugacauacaccuuu

SEQ ID NO: 997342 - RNA, 19 nt, Artificial Sequence
  Description of Artificial Sequence: Synthetic oligonucleotide
  Sense strand starting at position 2789 of SEQ ID NO: 914350
gugggagucguugcgggau

SEQ ID NO: 997343 - RNA, 19 nt, Artificial Sequence
  Description of Artificial Sequence: Synthetic oligonucleotide
  Antisense strand to SEQ ID NO: 997342
aucccgcaacgacucccac

SEQ ID NO: 997344 - RNA, 19 nt, Artificial Sequence
  Description of Artificial Sequence: Synthetic oligonucleotide
  Sense strand starting at position 3473 of SEQ ID NO: 914350
cccagaaguugccuucuua

SEQ ID NO: 997345 - RNA, 19 nt, Artificial Sequence
  Description of Artificial Sequence: Synthetic oligonucleotide
  Antisense strand to SEQ ID NO: 997344
uaagaaggcaacuucuggg

SEQ ID NO: 997346 - RNA, 19 nt, Artificial Sequence
  Description of Artificial Sequence: Synthetic oligonucleotide
  Sense strand starting at position 3477 of SEQ ID NO: 914350
gaaguugccuucuuaagac

SEQ ID NO: 997347 - RNA, 19 nt, Artificial Sequence
  Description of Artificial Sequence: Synthetic oligonucleotide
  Antisense strand to SEQ ID NO: 997346
gucuuaagaaggcaacuuc

SEQ ID NO: 997348 - RNA, 19 nt, Artificial Sequence
  Description of Artificial Sequence: Synthetic oligonucleotide
  Sense strand starting at position 3532 of SEQ ID NO: 914350
ccuaacuucugagcacaga

SEQ ID NO: 997349 - RNA, 19 nt, Artificial Sequence
  Description of Artificial Sequence: Synthetic oligonucleotide
  Antisense strand to SEQ ID NO: 997348
ucugugcucagaaguuagg

SEQ ID NO: 997350 - RNA, 19 nt, Artificial Sequence
  Description of Artificial Sequence: Synthetic oligonucleotide
  Sense strand starting at position 3549 of SEQ ID NO: 914350
gaagcaagcugguuacauc

SEQ ID NO: 997351 - RNA, 19 nt, Artificial Sequence
  Description of Artificial Sequence: Synthetic oligonucleotide
  Antisense strand to SEQ ID NO: 997350
gauguaaccagcuugcuuc

SEQ ID NO: 997352 - RNA, 19 nt, Artificial Sequence
  Description of Artificial Sequence: Synthetic oligonucleotide
  Sense strand starting at position 3664 of SEQ ID NO: 914350
auauuucuguuaucugcau

SEQ ID NO: 997353 - RNA, 19 nt, Artificial Sequence
  Description of Artificial Sequence: Synthetic oligonucleotide
  Antisense strand to SEQ ID NO: 997352
augcagauaacagaaauau

SEQ ID NO: 997354 - RNA, 19 nt, Artificial Sequence
  Description of Artificial Sequence: Synthetic oligonucleotide
  Sense strand starting at position 3668 of SEQ ID NO: 914350
uucuguuaucugcauauuc

SEQ ID NO: 997355 - RNA, 19 nt, Artificial Sequence
  Description of Artificial Sequence: Synthetic oligonucleotide
  Antisense strand to SEQ ID NO: 997354
gaauaugcagauaacagaa

SEQ ID NO: 997356 - RNA, 19 nt, Artificial Sequence
  Description of Artificial Sequence: Synthetic oligonucleotide
  Sense strand starting at position 3727 of SEQ ID NO: 914350
cacugugucucugaggcua

SEQ ID NO: 997357 - RNA, 19 nt, Artificial Sequence
  Description of Artificial Sequence: Synthetic oligonucleotide
  Antisense strand to SEQ ID NO: 997356
uagccucagagacacagug

SEQ ID NO: 997358 - RNA, 19 nt, Artificial Sequence
  Description of Artificial Sequence: Synthetic oligonucleotide
  Sense strand starting at position 3729 of SEQ ID NO: 914350
cugugucucugaggcuaga

SEQ ID NO: 997359 - RNA, 19 nt, Artificial Sequence
  Description of Artificial Sequence: Synthetic oligonucleotide
  Antisense strand to SEQ ID NO: 997358
ucuagccucagagacacag

SEQ ID NO: 997360 - RNA, 19 nt, Artificial Sequence
  Description of Artificial Sequence: Synthetic oligonucleotide
  Sense strand starting at position 10 of SEQ ID NO: 914351
cuugauuccuuucuggaau

SEQ ID NO: 997361 - RNA, 19 nt, Artificial Sequence
  Description of Artificial Sequence: Synthetic oligonucleotide
  Antisense strand to SEQ ID NO: 997360
auuccagaaaggaaucaag

SEQ ID NO: 997362 - RNA, 19 nt, Artificial Sequence
  Description of Artificial Sequence: Synthetic oligonucleotide
  Sense strand starting at position 12 of SEQ ID NO: 914351
ugauuccuuucuggaauaa

SEQ ID NO: 997363 - RNA, 19 nt, Artificial Sequence
  Description of Artificial Sequence: Synthetic oligonucleotide
  Antisense strand to SEQ ID NO: 997362
uuauuccagaaaggaauca

SEQ ID NO: 997364 - RNA, 19 nt, Artificial Sequence
  Description of Artificial Sequence: Synthetic oligonucleotide
  Sense strand starting at position 76 of SEQ ID NO: 914351
uaaagagguuccuccugau

SEQ ID NO: 997365 - RNA, 19 nt, Artificial Sequence
  Description of Artificial Sequence: Synthetic oligonucleotide
  Antisense strand to SEQ ID NO: 997364
aucaggaggaaccucuuua

SEQ ID NO: 997366 - RNA, 19 nt, Artificial Sequence
  Description of Artificial Sequence: Synthetic oligonucleotide
  Sense strand starting at position 80 of SEQ ID NO: 914351
gagguuccuccugauucua

SEQ ID NO: 997367 - RNA, 19 nt, Artificial Sequence
  Description of Artificial Sequence: Synthetic oligonucleotide
  Antisense strand to SEQ ID NO: 997366
uagaaucaggaggaaccuc

SEQ ID NO: 997368 - RNA, 19 nt, Artificial Sequence
  Description of Artificial Sequence: Synthetic oligonucleotide
  Sense strand starting at position 89 of SEQ ID NO: 914351
ccugauucuaaguaucgga

SEQ ID NO: 997369 - RNA, 19 nt, Artificial Sequence
  Description of Artificial Sequence: Synthetic oligonucleotide
  Antisense strand to SEQ ID NO: 997368
uccgauacuuagaaucagg

SEQ ID NO: 997370 - RNA, 19 nt, Artificial Sequence
  Description of Artificial Sequence: Synthetic oligonucleotide
  Sense strand starting at position 288 of SEQ ID NO: 914351
gugggucugcuuuaccaga

SEQ ID NO: 997371 - RNA, 19 nt, Artificial Sequence
  Description of Artificial Sequence: Synthetic oligonucleotide
  Antisense strand to SEQ ID NO: 997370
ucugguaaagcagacccac

SEQ ID NO: 997372 - RNA, 19 nt, Artificial Sequence
  Description of Artificial Sequence: Synthetic oligonucleotide
  Sense strand starting at position 290 of SEQ ID NO: 914351
gggucugcuuuaccagaga

SEQ ID NO: 997373 - RNA, 19 nt, Artificial Sequence
  Description of Artificial Sequence: Synthetic oligonucleotide
  Antisense strand to SEQ ID NO: 997372
ucucugguaaagcagaccc

SEQ ID NO: 997374 - RNA, 19 nt, Artificial Sequence
  Description of Artificial Sequence: Synthetic oligonucleotide
  Sense strand starting at position 435 of SEQ ID NO: 914351
ggaugcuccuugggaaaga

SEQ ID NO: 997375 - RNA, 19 nt, Artificial Sequence
  Description of Artificial Sequence: Synthetic oligonucleotide
  Antisense strand to SEQ ID NO: 997374
ucuuucccaaggagcaucc

SEQ ID NO: 997376 - RNA, 19 nt, Artificial Sequence
  Description of Artificial Sequence: Synthetic oligonucleotide
  Sense strand starting at position 456 of SEQ ID NO: 914351
aucuuaaggcacugagauu

SEQ ID NO: 997377 - RNA, 19 nt, Artificial Sequence
  Description of Artificial Sequence: Synthetic oligonucleotide
  Antisense strand to SEQ ID NO: 997376
aaucucagugccuuaagau

SEQ ID NO: 997378 - RNA, 19 nt, Artificial Sequence
  Description of Artificial Sequence: Synthetic oligonucleotide
  Sense strand starting at position 914 of SEQ ID NO: 914351
uauuaaagaucuuagagug

SEQ ID NO: 997379 - RNA, 19 nt, Artificial Sequence
  Description of Artificial Sequence: Synthetic oligonucleotide
  Antisense strand to SEQ ID NO: 997378
cacucuaagaucuuuaaua

SEQ ID NO: 997380 - RNA, 19 nt, Artificial Sequence
  Description of Artificial Sequence: Synthetic oligonucleotide
  Sense strand starting at position 1409 of SEQ ID NO: 914351
uguauagugcagugugcau

SEQ ID NO: 997381 - RNA, 19 nt, Artificial Sequence
  Description of Artificial Sequence: Synthetic oligonucleotide
  Antisense strand to SEQ ID NO: 997380
augcacacugcacuauaca

SEQ ID NO: 997382 - RNA, 19 nt, Artificial Sequence
  Description of Artificial Sequence: Synthetic oligonucleotide
  Sense strand starting at position 1514 of SEQ ID NO: 914351
ugaugaagaacuugucuga

SEQ ID NO: 997383 - RNA, 19 nt, Artificial Sequence
  Description of Artificial Sequence: Synthetic oligonucleotide
  Antisense strand to SEQ ID NO: 997382
ucagacaaguucuucauca

SEQ ID NO: 997384 - RNA, 19 nt, Artificial Sequence
  Description of Artificial Sequence: Synthetic oligonucleotide
  Sense strand starting at position 1517 of SEQ ID NO: 914351
ugaagaacuugucugauuc

SEQ ID NO: 997385 - RNA, 19 nt, Artificial Sequence
  Description of Artificial Sequence: Synthetic oligonucleotide
  Antisense strand to SEQ ID NO: 997384
gaaucagacaaguucuuca

SEQ ID NO: 997386 - RNA, 19 nt, Artificial Sequence
  Description of Artificial Sequence: Synthetic oligonucleotide
  Sense strand starting at position 1535 of SEQ ID NO: 914351
cagugauggcagcaauguu

SEQ ID NO: 997387 - RNA, 19 nt, Artificial Sequence
  Description of Artificial Sequence: Synthetic oligonucleotide
  Antisense strand to SEQ ID NO: 997386
aacauugcugccaucacug

SEQ ID NO: 997388 - RNA, 19 nt, Artificial Sequence
  Description of Artificial Sequence: Synthetic oligonucleotide
  Sense strand starting at position 1692 of SEQ ID NO: 914351
cagagaucuguggaugcau

SEQ ID NO: 997389 - RNA, 19 nt, Artificial Sequence
  Description of Artificial Sequence: Synthetic oligonucleotide
  Antisense strand to SEQ ID NO: 997388
augcauccacagaucucug

SEQ ID NO: 997390 - RNA, 19 nt, Artificial Sequence
  Description of Artificial Sequence: Synthetic oligonucleotide
  Sense strand starting at position 1694 of SEQ ID NO: 914351
gagaucuguggaugcauaa

SEQ ID NO: 997391 - RNA, 19 nt, Artificial Sequence
  Description of Artificial Sequence: Synthetic oligonucleotide
  Antisense strand to SEQ ID NO: 997390
uuaugcauccacagaucuc

SEQ ID NO: 997392 - RNA, 19 nt, Artificial Sequence
  Description of Artificial Sequence: Synthetic oligonucleotide
  Sense strand starting at position 2083 of SEQ ID NO: 914351
guaccauccgagugguaga

SEQ ID NO: 997393 - RNA, 19 nt, Artificial Sequence
  Description of Artificial Sequence: Synthetic oligonucleotide
  Antisense strand to SEQ ID NO: 997392
ucuaccacucggaugguac

SEQ ID NO: 997394 - RNA, 19 nt, Artificial Sequence
  Description of Artificial Sequence: Synthetic oligonucleotide
  Sense strand starting at position 2086 of SEQ ID NO: 914351
ccauccgagugguagagaa

SEQ ID NO: 997395 - RNA, 19 nt, Artificial Sequence
  Description of Artificial Sequence: Synthetic oligonucleotide
  Antisense strand to SEQ ID NO: 997394
uucucuaccacucggaugg

SEQ ID NO: 997396 - RNA, 19 nt, Artificial Sequence
  Description of Artificial Sequence: Synthetic oligonucleotide
  Sense strand starting at position 2134 of SEQ ID NO: 914351
uacagcaaguucuagagaa

SEQ ID NO: 997397 - RNA, 19 nt, Artificial Sequence
  Description of Artificial Sequence: Synthetic oligonucleotide
  Antisense strand to SEQ ID NO: 997396
uucucuagaacuugcugua

SEQ ID NO: 997398 - RNA, 19 nt, Artificial Sequence
  Description of Artificial Sequence: Synthetic oligonucleotide
  Sense strand starting at position 2204 of SEQ ID NO: 914351
ugugaaacgugcucaacau

SEQ ID NO: 997399 - RNA, 19 nt, Artificial Sequence
  Description of Artificial Sequence: Synthetic oligonucleotide
  Antisense strand to SEQ ID NO: 997398
auguugagcacguuucaca

SEQ ID NO: 997400 - RNA, 19 nt, Artificial Sequence
  Description of Artificial Sequence: Synthetic oligonucleotide
  Sense strand starting at position 2205 of SEQ ID NO: 914351
gugaaacgugcucaacaug

SEQ ID NO: 997401 - RNA, 19 nt, Artificial Sequence
  Description of Artificial Sequence: Synthetic oligonucleotide
  Antisense strand to SEQ ID NO: 997400
cauguugagcacguuucac

SEQ ID NO: 997402 - RNA, 19 nt, Artificial Sequence
  Description of Artificial Sequence: Synthetic oligonucleotide
  Sense strand starting at position 2418 of SEQ ID NO: 914351
guccaaggauaggauuuaa

SEQ ID NO: 997403 - RNA, 19 nt, Artificial Sequence
  Description of Artificial Sequence: Synthetic oligonucleotide
  Antisense strand to SEQ ID NO: 997402
uuaaauccuauccuuggac

SEQ ID NO: 997404 - RNA, 19 nt, Artificial Sequence
  Description of Artificial Sequence: Synthetic oligonucleotide
  Sense strand starting at position 2455 of SEQ ID NO: 914351
acacacugaugucucagau

SEQ ID NO: 997405 - RNA, 19 nt, Artificial Sequence
  Description of Artificial Sequence: Synthetic oligonucleotide
  Antisense strand to SEQ ID NO: 997404
aucugagacaucagugugu

SEQ ID NO: 997406 - RNA, 19 nt, Artificial Sequence
  Description of Artificial Sequence: Synthetic oligonucleotide
  Sense strand starting at position 2459 of SEQ ID NO: 914351
acugaugucucagauauug

SEQ ID NO: 997407 - RNA, 19 nt, Artificial Sequence
  Description of Artificial Sequence: Synthetic oligonucleotide
  Antisense strand to SEQ ID NO: 997406
caauaucugagacaucagu

SEQ ID NO: 997408 - RNA, 19 nt, Artificial Sequence
  Description of Artificial Sequence: Synthetic oligonucleotide
  Sense strand starting at position 2470 of SEQ ID NO: 914351
agauauugguguccucuca

SEQ ID NO: 997409 - RNA, 19 nt, Artificial Sequence
  Description of Artificial Sequence: Synthetic oligonucleotide
  Antisense strand to SEQ ID NO: 997408
ugagaggacaccaauaucu

SEQ ID NO: 997410 - RNA, 19 nt, Artificial Sequence
  Description of Artificial Sequence: Synthetic oligonucleotide
  Sense strand starting at position 2817 of SEQ ID NO: 914351
cuuagacuuagcugguguu

SEQ ID NO: 997411 - RNA, 19 nt, Artificial Sequence
  Description of Artificial Sequence: Synthetic oligonucleotide
  Antisense strand to SEQ ID NO: 997410
aacaccagcuaagucuaag

SEQ ID NO: 997412 - RNA, 19 nt, Artificial Sequence
  Description of Artificial Sequence: Synthetic oligonucleotide
  Sense strand starting at position 2818 of SEQ ID NO: 914351
uuagacuuagcugguguua

SEQ ID NO: 997413 - RNA, 19 nt, Artificial Sequence
  Description of Artificial Sequence: Synthetic oligonucleotide
  Antisense strand to SEQ ID NO: 997412
uaacaccagcuaagucuaa

SEQ ID NO: 997414 - RNA, 19 nt, Artificial Sequence
  Description of Artificial Sequence: Synthetic oligonucleotide
  Sense strand starting at position 2831 of SEQ ID NO: 914351
guguuagagaacugagaga

SEQ ID NO: 997415 - RNA, 19 nt, Artificial Sequence
  Description of Artificial Sequence: Synthetic oligonucleotide
  Antisense strand to SEQ ID NO: 997414
ucucucaguucucuaacac

SEQ ID NO: 997416 - RNA, 19 nt, Artificial Sequence
  Description of Artificial Sequence: Synthetic oligonucleotide
  Sense strand starting at position 2903 of SEQ ID NO: 914351
cccuaagauuguucuguga

SEQ ID NO: 997417 - RNA, 19 nt, Artificial Sequence
  Description of Artificial Sequence: Synthetic oligonucleotide
  Antisense strand to SEQ ID NO: 997416
ucacagaacaaucuuaggg

SEQ ID NO: 997418 - RNA, 19 nt, Artificial Sequence
  Description of Artificial Sequence: Synthetic oligonucleotide
  Sense strand starting at position 2906 of SEQ ID NO: 914351
uaagauuguucugugagcu

SEQ ID NO: 997419 - RNA, 19 nt, Artificial Sequence
  Description of Artificial Sequence: Synthetic oligonucleotide
  Antisense strand to SEQ ID NO: 997418
agcucacagaacaaucuua

SEQ ID NO: 997420 - RNA, 19 nt, Artificial Sequence
  Description of Artificial Sequence: Synthetic oligonucleotide
  Sense strand starting at position 2907 of SEQ ID NO: 914351
aagauuguucugugagcua

SEQ ID NO: 997421 - RNA, 19 nt, Artificial Sequence
  Description of Artificial Sequence: Synthetic oligonucleotide
  Antisense strand to SEQ ID NO: 997420
uagcucacagaacaaucuu

SEQ ID NO: 997422 - RNA, 19 nt, Artificial Sequence
  Description of Artificial Sequence: Synthetic oligonucleotide
  Sense strand starting at position 3151 of SEQ ID NO: 914351
agcccuggauccuuggaaa

SEQ ID NO: 997423 - RNA, 19 nt, Artificial Sequence
  Description of Artificial Sequence: Synthetic oligonucleotide
  Antisense strand to SEQ ID NO: 997422
uuuccaaggauccagggcu

SEQ ID NO: 997424 - RNA, 19 nt, Artificial Sequence
  Description of Artificial Sequence: Synthetic oligonucleotide
  Sense strand starting at position 3279 of SEQ ID NO: 914351
ccaggauguugagcuguca

SEQ ID NO: 997425 - RNA, 19 nt, Artificial Sequence
  Description of Artificial Sequence: Synthetic oligonucleotide
  Antisense strand to SEQ ID NO: 997424
ugacagcucaacauccugg

SEQ ID NO: 997426 - RNA, 19 nt, Artificial Sequence
  Description of Artificial Sequence: Synthetic oligonucleotide
  Sense strand starting at position 3383 of SEQ ID NO: 914351
cccuuagaauguccagagu

SEQ ID NO: 997427 - RNA, 19 nt, Artificial Sequence
  Description of Artificial Sequence: Synthetic oligonucleotide
  Antisense strand to SEQ ID NO: 997426
acucuggacauucuaaggg

SEQ ID NO: 997428 - RNA, 19 nt, Artificial Sequence
  Description of Artificial Sequence: Synthetic oligonucleotide
  Sense strand starting at position 3515 of SEQ ID NO: 914351
cucugcaggucugcugaaa

SEQ ID NO: 997429 - RNA, 19 nt, Artificial Sequence
  Description of Artificial Sequence: Synthetic oligonucleotide
  Antisense strand to SEQ ID NO: 997428
uuucagcagaccugcagag

SEQ ID NO: 997430 - RNA, 19 nt, Artificial Sequence
  Description of Artificial Sequence: Synthetic oligonucleotide
  Sense strand starting at position 3547 of SEQ ID NO: 914351
aaggcagauuaguagaaga

SEQ ID NO: 997431 - RNA, 19 nt, Artificial Sequence
  Description of Artificial Sequence: Synthetic oligonucleotide
  Antisense strand to SEQ ID NO: 997430
ucuucuacuaaucugccuu

SEQ ID NO: 997432 - RNA, 19 nt, Artificial Sequence
  Description of Artificial Sequence: Synthetic oligonucleotide
  Sense strand starting at position 3567 of SEQ ID NO: 914351
cuaauaugcaagggaguca

SEQ ID NO: 997433 - RNA, 19 nt, Artificial Sequence
  Description of Artificial Sequence: Synthetic oligonucleotide
  Antisense strand to SEQ ID NO: 997432
ugacucccuugcauauuag

SEQ ID NO: 997434 - RNA, 19 nt, Artificial Sequence
  Description of Artificial Sequence: Synthetic oligonucleotide
  Sense strand starting at position 3606 of SEQ ID NO: 914351
gagauagccagaugguuga

SEQ ID NO: 997435 - RNA, 19 nt, Artificial Sequence
  Description of Artificial Sequence: Synthetic oligonucleotide
  Antisense strand to SEQ ID NO: 997434
ucaaccaucuggcuaucuc

SEQ ID NO: 997436 - RNA, 19 nt, Artificial Sequence
  Description of Artificial Sequence: Synthetic oligonucleotide
  Sense strand starting at position 3610 of SEQ ID NO: 914351
uagccagaugguugaugau

SEQ ID NO: 997437 - RNA, 19 nt, Artificial Sequence
  Description of Artificial Sequence: Synthetic oligonucleotide
  Antisense strand to SEQ ID NO: 997436
aucaucaaccaucuggcua

SEQ ID NO: 997438 - RNA, 19 nt, Artificial Sequence
  Description of Artificial Sequence: Synthetic oligonucleotide
  Sense strand starting at position 3963 of SEQ ID NO: 914351
ggacuuggacuuuggcaaa

SEQ ID NO: 997439 - RNA, 19 nt, Artificial Sequence
  Description of Artificial Sequence: Synthetic oligonucleotide
  Antisense strand to SEQ ID NO: 997438
uuugccaaaguccaagucc

SEQ ID NO: 997440 - RNA, 19 nt, Artificial Sequence
  Description of Artificial Sequence: Synthetic oligonucleotide
  Sense strand starting at position 24 of SEQ ID NO: 914352
gaaguuauggugcacagga

SEQ ID NO: 997441 - RNA, 19 nt, Artificial Sequence
  Description of Artificial Sequence: Synthetic oligonucleotide
  Antisense strand to SEQ ID NO: 997440
uccugugcaccauaacuuc

SEQ ID NO: 997442 - RNA, 19 nt, Artificial Sequence
  Description of Artificial Sequence: Synthetic oligonucleotide
  Sense strand starting at position 26 of SEQ ID NO: 914352
aguuauggugcacaggaaa

SEQ ID NO: 997443 - RNA, 19 nt, Artificial Sequence
  Description of Artificial Sequence: Synthetic oligonucleotide
  Antisense strand to SEQ ID NO: 997442
uuuccugugcaccauaacu

SEQ ID NO: 997444 - RNA, 19 nt, Artificial Sequence
  Description of Artificial Sequence: Synthetic oligonucleotide
  Sense strand starting at position 68 of SEQ ID NO: 914352
caggcuuucgacuagcuga

SEQ ID NO: 997445 - RNA, 19 nt, Artificial Sequence
  Description of Artificial Sequence: Synthetic oligonucleotide
  Antisense strand to SEQ ID NO: 997444
ucagcuagucgaaagccug

SEQ ID NO: 997446 - RNA, 19 nt, Artificial Sequence
  Description of Artificial Sequence: Synthetic oligonucleotide
  Sense strand starting at position 166 of SEQ ID NO: 914352
agauccagcugucugagaa

SEQ ID NO: 997447 - RNA, 19 nt, Artificial Sequence
  Description of Artificial Sequence: Synthetic oligonucleotide
  Antisense strand to SEQ ID NO: 997446
uucucagacagcuggaucu

SEQ ID NO: 997448 - RNA, 19 nt, Artificial Sequence
  Description of Artificial Sequence: Synthetic oligonucleotide
  Sense strand starting at position 167 of SEQ ID NO: 914352
gauccagcugucugagaag

SEQ ID NO: 997449 - RNA, 19 nt, Artificial Sequence
  Description of Artificial Sequence: Synthetic oligonucleotide
  Antisense strand to SEQ ID NO: 997448
cuucucagacagcuggauc

SEQ ID NO: 997450 - RNA, 19 nt, Artificial Sequence
  Description of Artificial Sequence: Synthetic oligonucleotide
  Sense strand starting at position 796 of SEQ ID NO: 914352
ggagcaaggugcuuauuca

SEQ ID NO: 997451 - RNA, 19 nt, Artificial Sequence
  Description of Artificial Sequence: Synthetic oligonucleotide
  Antisense strand to SEQ ID NO: 997450
ugaauaagcaccuugcucc

SEQ ID NO: 997452 - RNA, 19 nt, Artificial Sequence
  Description of Artificial Sequence: Synthetic oligonucleotide
  Sense strand starting at position 828 of SEQ ID NO: 914352
uuccuugguccuggaggua

SEQ ID NO: 997453 - RNA, 19 nt, Artificial Sequence
  Description of Artificial Sequence: Synthetic oligonucleotide
  Antisense strand to SEQ ID NO: 997452
uaccuccaggaccaaggaa

SEQ ID NO: 997454 - RNA, 19 nt, Artificial Sequence
  Description of Artificial Sequence: Synthetic oligonucleotide
  Sense strand starting at position 1041 of SEQ ID NO: 914352
ggcguaugugucagaugag

SEQ ID NO: 997455 - RNA, 19 nt, Artificial Sequence
  Description of Artificial Sequence: Synthetic oligonucleotide
  Antisense strand to SEQ ID NO: 997454
cucaucugacacauacgcc

SEQ ID NO: 997456 - RNA, 19 nt, Artificial Sequence
  Description of Artificial Sequence: Synthetic oligonucleotide
  Sense strand starting at position 1044 of SEQ ID NO: 914352
guaugugucagaugaggag

SEQ ID NO: 997457 - RNA, 19 nt, Artificial Sequence
  Description of Artificial Sequence: Synthetic oligonucleotide
  Antisense strand to SEQ ID NO: 997456
cuccucaucugacacauac

SEQ ID NO: 997458 - RNA, 19 nt, Artificial Sequence
  Description of Artificial Sequence: Synthetic oligonucleotide
  Sense strand starting at position 1111 of SEQ ID NO: 914352
gggaacacuucugccaaca

SEQ ID NO: 997459 - RNA, 19 nt, Artificial Sequence
  Description of Artificial Sequence: Synthetic oligonucleotide
  Antisense strand to SEQ ID NO: 997458
uguuggcagaaguguuccc

SEQ ID NO: 997460 - RNA, 19 nt, Artificial Sequence
  Description of Artificial Sequence: Synthetic oligonucleotide
  Sense strand starting at position 2267 of SEQ ID NO: 914352
agaaauaaacggugauucu

SEQ ID NO: 997461 - RNA, 19 nt, Artificial Sequence
  Description of Artificial Sequence: Synthetic oligonucleotide
  Antisense strand to SEQ ID NO: 997460
agaaucaccguuuauuucu

SEQ ID NO: 997462 - RNA, 19 nt, Artificial Sequence
  Description of Artificial Sequence: Synthetic oligonucleotide
  Sense strand starting at position 2277 of SEQ ID NO: 914352
ggugauucuacacgggaca

SEQ ID NO: 997463 - RNA, 19 nt, Artificial Sequence
  Description of Artificial Sequence: Synthetic oligonucleotide
  Antisense strand to SEQ ID NO: 997462
ugucccguguagaaucacc

SEQ ID NO: 997464 - RNA, 19 nt, Artificial Sequence
  Description of Artificial Sequence: Synthetic oligonucleotide
  Sense strand starting at position 2279 of SEQ ID NO: 914352
ugauucuacacgggacagu

SEQ ID NO: 997465 - RNA, 19 nt, Artificial Sequence
  Description of Artificial Sequence: Synthetic oligonucleotide
  Antisense strand to SEQ ID NO: 997464
acugucccguguagaauca

SEQ ID NO: 997466 - RNA, 19 nt, Artificial Sequence
  Description of Artificial Sequence: Synthetic oligonucleotide
  Sense strand starting at position 2299 of SEQ ID NO: 914352
aagugauuccugccgcggu

SEQ ID NO: 997467 - RNA, 19 nt, Artificial Sequence
  Description of Artificial Sequence: Synthetic oligonucleotide
  Antisense strand to SEQ ID NO: 997466
accgcggcaggaaucacuu

SEQ ID NO: 997468 - RNA, 19 nt, Artificial Sequence
  Description of Artificial Sequence: Synthetic oligonucleotide
  Sense strand starting at position 2395 of SEQ ID NO: 914352
gggagaaggugguauuuaa

SEQ ID NO: 997469 - RNA, 19 nt, Artificial Sequence
  Description of Artificial Sequence: Synthetic oligonucleotide
  Antisense strand to SEQ ID NO: 997468
uuaaauaccaccuucuccc

SEQ ID NO: 997470 - RNA, 19 nt, Artificial Sequence
  Description of Artificial Sequence: Synthetic oligonucleotide
  Sense strand starting at position 2405 of SEQ ID NO: 914352
gguauuuaauuugagcguu

SEQ ID NO: 997471 - RNA, 19 nt, Artificial Sequence
  Description of Artificial Sequence: Synthetic oligonucleotide
  Antisense strand to SEQ ID NO: 997470
aacgcucaaauuaaauacc

SEQ ID NO: 997472 - RNA, 19 nt, Artificial Sequence
  Description of Artificial Sequence: Synthetic oligonucleotide
  Sense strand starting at position 2529 of SEQ ID NO: 914352
aagugcaguugucuuauuu

SEQ ID NO: 997473 - RNA, 19 nt, Artificial Sequence
  Description of Artificial Sequence: Synthetic oligonucleotide
  Antisense strand to SEQ ID NO: 997472
aaauaagacaacugcacuu

SEQ ID NO: 997474 - RNA, 19 nt, Artificial Sequence
  Description of Artificial Sequence: Synthetic oligonucleotide
  Sense strand starting at position 2637 of SEQ ID NO: 914352
ccuuauggcuccucugauu

SEQ ID NO: 997475 - RNA, 19 nt, Artificial Sequence
  Description of Artificial Sequence: Synthetic oligonucleotide
  Antisense strand to SEQ ID NO: 997474
aaucagaggagccauaagg

SEQ ID NO: 997476 - RNA, 19 nt, Artificial Sequence
  Description of Artificial Sequence: Synthetic oligonucleotide
  Sense strand starting at position 2678 of SEQ ID NO: 914352
aggagaaauggcuguugau

SEQ ID NO: 997477 - RNA, 19 nt, Artificial Sequence
  Description of Artificial Sequence: Synthetic oligonucleotide
  Antisense strand to SEQ ID NO: 997476
aucaacagccauuucuccu

SEQ ID NO: 997478 - RNA, 19 nt, Artificial Sequence
  Description of Artificial Sequence: Synthetic oligonucleotide
  Sense strand starting at position 2687 of SEQ ID NO: 914352
ggcuguugauagcuuuaaa

SEQ ID NO: 997479 - RNA, 19 nt, Artificial Sequence
  Description of Artificial Sequence: Synthetic oligonucleotide
  Antisense strand to SEQ ID NO: 997478
uuuaaagcuaucaacagcc

SEQ ID NO: 997480 - RNA, 19 nt, Artificial Sequence
  Description of Artificial Sequence: Synthetic oligonucleotide
  Sense strand starting at position 2690 of SEQ ID NO: 914352
uguugauagcuuuaaagug

SEQ ID NO: 997481 - RNA, 19 nt, Artificial Sequence
  Description of Artificial Sequence: Synthetic oligonucleotide
  Antisense strand to SEQ ID NO: 997480
cacuuuaaagcuaucaaca

SEQ ID NO: 997482 - RNA, 19 nt, Artificial Sequence
  Description of Artificial Sequence: Synthetic oligonucleotide
  Sense strand starting at position 2747 of SEQ ID NO: 914352
agcuuaaagccuugaacca

SEQ ID NO: 997483 - RNA, 19 nt, Artificial Sequence
  Description of Artificial Sequence: Synthetic oligonucleotide
  Antisense strand to SEQ ID NO: 997482
ugguucaaggcuuuaagcu

SEQ ID NO: 997484 - RNA, 19 nt, Artificial Sequence
  Description of Artificial Sequence: Synthetic oligonucleotide
  Sense strand starting at position 2748 of SEQ ID NO: 914352
gcuuaaagccuugaaccaa

SEQ ID NO: 997485 - RNA, 19 nt, Artificial Sequence
  Description of Artificial Sequence: Synthetic oligonucleotide
  Antisense strand to SEQ ID NO: 997484
uugguucaaggcuuuaagc

SEQ ID NO: 997486 - RNA, 19 nt, Artificial Sequence
  Description of Artificial Sequence: Synthetic oligonucleotide
  Sense strand starting at position 2775 of SEQ ID NO: 914352
gaguucuaauagcuuaaag

SEQ ID NO: 997487 - RNA, 19 nt, Artificial Sequence
  Description of Artificial Sequence: Synthetic oligonucleotide
  Antisense strand to SEQ ID NO: 997486
cuuuaagcuauuagaacuc

SEQ ID NO: 997488 - RNA, 19 nt, Artificial Sequence
  Description of Artificial Sequence: Synthetic oligonucleotide
  Sense strand starting at position 2777 of SEQ ID NO: 914352
guucuaauagcuuaaagga

SEQ ID NO: 997489 - RNA, 19 nt, Artificial Sequence
  Description of Artificial Sequence: Synthetic oligonucleotide
  Antisense strand to SEQ ID NO: 997488
uccuuuaagcuauuagaac

SEQ ID NO: 997490 - RNA, 19 nt, Artificial Sequence
  Description of Artificial Sequence: Synthetic oligonucleotide
  Sense strand starting at position 2837 of SEQ ID NO: 914352
guggaaagccauugauaaa

SEQ ID NO: 997491 - RNA, 19 nt, Artificial Sequence
  Description of Artificial Sequence: Synthetic oligonucleotide
  Antisense strand to SEQ ID NO: 997490
uuuaucaauggcuuuccac

SEQ ID NO: 997492 - RNA, 19 nt, Artificial Sequence
  Description of Artificial Sequence: Synthetic oligonucleotide
  Sense strand starting at position 2860 of SEQ ID NO: 914352
agcaguuacucugauuuaa

SEQ ID NO: 997493 - RNA, 19 nt, Artificial Sequence
  Description of Artificial Sequence: Synthetic oligonucleotide
  Antisense strand to SEQ ID NO: 997492
uuaaaucagaguaacugcu

SEQ ID NO: 997494 - RNA, 19 nt, Artificial Sequence
  Description of Artificial Sequence: Synthetic oligonucleotide
  Sense strand starting at position 3240 of SEQ ID NO: 914352
guaauaacaggcuacguua

SEQ ID NO: 997495 - RNA, 19 nt, Artificial Sequence
  Description of Artificial Sequence: Synthetic oligonucleotide
  Antisense strand to SEQ ID NO: 997494
uaacguagccuguuauuac

SEQ ID NO: 997496 - RNA, 19 nt, Artificial Sequence
  Description of Artificial Sequence: Synthetic oligonucleotide
  Sense strand starting at position 3323 of SEQ ID NO: 914352
ugagaaggcgucucgcuuu

SEQ ID NO: 997497 - RNA, 19 nt, Artificial Sequence
  Description of Artificial Sequence: Synthetic oligonucleotide
  Antisense strand to SEQ ID NO: 997496
aaagcgagacgccuucuca

SEQ ID NO: 997498 - RNA, 19 nt, Artificial Sequence
  Description of Artificial Sequence: Synthetic oligonucleotide
  Sense strand starting at position 3635 of SEQ ID NO: 914352
uucagaccggucugauuga

SEQ ID NO: 997499 - RNA, 19 nt, Artificial Sequence
  Description of Artificial Sequence: Synthetic oligonucleotide
  Antisense strand to SEQ ID NO: 997498
ucaaucagaccggucugaa

SEQ ID NO: 997500 - RNA, 19 nt, Artificial Sequence
  Description of Artificial Sequence: Synthetic oligonucleotide
  Sense strand starting at position 3678 of SEQ ID NO: 914352
aguguuauauauguuggaa

SEQ ID NO: 997501 - RNA, 19 nt, Artificial Sequence
  Description of Artificial Sequence: Synthetic oligonucleotide
  Antisense strand to SEQ ID NO: 997500
uuccaacauauauaacacu

SEQ ID NO: 997502 - RNA, 19 nt, Artificial Sequence
  Description of Artificial Sequence: Synthetic oligonucleotide
  Sense strand starting at position 3681 of SEQ ID NO: 914352
guuauauauguuggaaagc

SEQ ID NO: 997503 - RNA, 19 nt, Artificial Sequence
  Description of Artificial Sequence: Synthetic oligonucleotide
  Antisense strand to SEQ ID NO: 997502
gcuuuccaacauauauaac

SEQ ID NO: 997504 - RNA, 19 nt, Artificial Sequence
  Description of Artificial Sequence: Synthetic oligonucleotide
  Sense strand starting at position 3702 of SEQ ID NO: 914352
aggaaucauuaguugcaga

SEQ ID NO: 997505 - RNA, 19 nt, Artificial Sequence
  Description of Artificial Sequence: Synthetic oligonucleotide
  Antisense strand to SEQ ID NO: 997504
ucugcaacuaaugauuccu

SEQ ID NO: 997506 - RNA, 19 nt, Artificial Sequence
  Description of Artificial Sequence: Synthetic oligonucleotide
  Sense strand starting at position 3703 of SEQ ID NO: 914352
ggaaucauuaguugcagau

SEQ ID NO: 997507 - RNA, 19 nt, Artificial Sequence
  Description of Artificial Sequence: Synthetic oligonucleotide
  Antisense strand to SEQ ID NO: 997506
aucugcaacuaaugauucc

SEQ ID NO: 997508 - RNA, 19 nt, Artificial Sequence
  Description of Artificial Sequence: Synthetic oligonucleotide
  Sense strand starting at position 3707 of SEQ ID NO: 914352
ucauuaguugcagauuaua

SEQ ID NO: 997509 - RNA, 19 nt, Artificial Sequence
  Description of Artificial Sequence: Synthetic oligonucleotide
  Antisense strand to SEQ ID NO: 997508
uauaaucugcaacuaauga

SEQ ID NO: 997510 - RNA, 19 nt, Artificial Sequence
  Description of Artificial Sequence: Synthetic oligonucleotide
  Sense strand starting at position 3710 of SEQ ID NO: 914352
uuaguugcagauuauauga

SEQ ID NO: 997511 - RNA, 19 nt, Artificial Sequence
  Description of Artificial Sequence: Synthetic oligonucleotide
  Antisense strand to SEQ ID NO: 997510
ucauauaaucugcaacuaa

SEQ ID NO: 997512 - RNA, 19 nt, Artificial Sequence
  Description of Artificial Sequence: Synthetic oligonucleotide
  Sense strand starting at position 3717 of SEQ ID NO: 914352
cagauuauaugauauggau

SEQ ID NO: 997513 - RNA, 19 nt, Artificial Sequence
  Description of Artificial Sequence: Synthetic oligonucleotide
  Antisense strand to SEQ ID NO: 997512
auccauaucauauaaucug

SEQ ID NO: 997514 - RNA, 19 nt, Artificial Sequence
  Description of Artificial Sequence: Synthetic oligonucleotide
  Sense strand starting at position 3803 of SEQ ID NO: 914352
aucuaugggaauuguagau

SEQ ID NO: 997515 - RNA, 19 nt, Artificial Sequence
  Description of Artificial Sequence: Synthetic oligonucleotide
  Antisense strand to SEQ ID NO: 997514
aucuacaauucccauagau

SEQ ID NO: 997516 - RNA, 19 nt, Artificial Sequence
  Description of Artificial Sequence: Synthetic oligonucleotide
  Sense strand starting at position 3820 of SEQ ID NO: 914352
auaugauagagauggcauu

SEQ ID NO: 997517 - RNA, 19 nt, Artificial Sequence
  Description of Artificial Sequence: Synthetic oligonucleotide
  Antisense strand to SEQ ID NO: 997516
aaugccaucucuaucauau

SEQ ID NO: 997518 - RNA, 19 nt, Artificial Sequence
  Description of Artificial Sequence: Synthetic oligonucleotide
  Sense strand starting at position 3827 of SEQ ID NO: 914352
agagauggcauucguauua

SEQ ID NO: 997519 - RNA, 19 nt, Artificial Sequence
  Description of Artificial Sequence: Synthetic oligonucleotide
  Antisense strand to SEQ ID NO: 997518
uaauacgaaugccaucucu

SEQ ID NO: 997520 - RNA, 19 nt, Artificial Sequence
  Description of Artificial Sequence: Synthetic oligonucleotide
  Sense strand starting at position 393 of SEQ ID NO: 914353
gguccaaucugagagaauc

SEQ ID NO: 997521 - RNA, 19 nt, Artificial Sequence
  Description of Artificial Sequence: Synthetic oligonucleotide
  Antisense strand to SEQ ID NO: 997520
gauucucucagauuggacc

SEQ ID NO: 997522 - RNA, 19 nt, Artificial Sequence
  Description of Artificial Sequence: Synthetic oligonucleotide
  Sense strand starting at position 403 of SEQ ID NO: 914353
gagagaaucgagugugggu

SEQ ID NO: 997523 - RNA, 19 nt, Artificial Sequence
  Description of Artificial Sequence: Synthetic oligonucleotide
  Antisense strand to SEQ ID NO: 997522
acccacacucgauucucuc

SEQ ID NO: 997524 - RNA, 19 nt, Artificial Sequence
  Description of Artificial Sequence: Synthetic oligonucleotide
  Sense strand starting at position 408 of SEQ ID NO: 914353
aaucgaguguggguguuua

SEQ ID NO: 997525 - RNA, 19 nt, Artificial Sequence
  Description of Artificial Sequence: Synthetic oligonucleotide
  Antisense strand to SEQ ID NO: 997524
uaaacacccacacucgauu

SEQ ID NO: 997526 - RNA, 19 nt, Artificial Sequence
  Description of Artificial Sequence: Synthetic oligonucleotide
  Sense strand starting at position 416 of SEQ ID NO: 914353
guggguguuuauccguaag

SEQ ID NO: 997527 - RNA, 19 nt, Artificial Sequence
  Description of Artificial Sequence: Synthetic oligonucleotide
  Antisense strand to SEQ ID NO: 997526
cuuacggauaaacacccac

SEQ ID NO: 997528 - RNA, 19 nt, Artificial Sequence
  Description of Artificial Sequence: Synthetic oligonucleotide
  Sense strand starting at position 418 of SEQ ID NO: 914353
ggguguuuauccguaagag

SEQ ID NO: 997529 - RNA, 19 nt, Artificial Sequence
  Description of Artificial Sequence: Synthetic oligonucleotide
  Antisense strand to SEQ ID NO: 997528
cucuuacggauaaacaccc

SEQ ID NO: 997530 - RNA, 19 nt, Artificial Sequence
  Description of Artificial Sequence: Synthetic oligonucleotide
  Sense strand starting at position 419 of SEQ ID NO: 914353
gguguuuauccguaagaga

SEQ ID NO: 997531 - RNA, 19 nt, Artificial Sequence
  Description of Artificial Sequence: Synthetic oligonucleotide
  Antisense strand to SEQ ID NO: 997530
ucucuuacggauaaacacc

SEQ ID NO: 997532 - RNA, 19 nt, Artificial Sequence
  Description of Artificial Sequence: Synthetic oligonucleotide
  Sense strand starting at position 507 of SEQ ID NO: 914353
gccagagugacaugaccua

SEQ ID NO: 997533 - RNA, 19 nt, Artificial Sequence
  Description of Artificial Sequence: Synthetic oligonucleotide
  Antisense strand to SEQ ID NO: 997532
uaggucaugucacucuggc

SEQ ID NO: 997534 - RNA, 19 nt, Artificial Sequence
  Description of Artificial Sequence: Synthetic oligonucleotide
  Sense strand starting at position 663 of SEQ ID NO: 914353
gaagauaucuguuguuguu

SEQ ID NO: 997535 - RNA, 19 nt, Artificial Sequence
  Description of Artificial Sequence: Synthetic oligonucleotide
  Antisense strand to SEQ ID NO: 997534
aacaacaacagauaucuuc

SEQ ID NO: 997536 - RNA, 19 nt, Artificial Sequence
  Description of Artificial Sequence: Synthetic oligonucleotide
  Sense strand starting at position 666 of SEQ ID NO: 914353
gauaucuguuguuguucca

SEQ ID NO: 997537 - RNA, 19 nt, Artificial Sequence
  Description of Artificial Sequence: Synthetic oligonucleotide
  Antisense strand to SEQ ID NO: 997536
uggaacaacaacagauauc

SEQ ID NO: 997538 - RNA, 19 nt, Artificial Sequence
  Description of Artificial Sequence: Synthetic oligonucleotide
  Sense strand starting at position 916 of SEQ ID NO: 914353
ggccuaaucccagggaaag

SEQ ID NO: 997539 - RNA, 19 nt, Artificial Sequence
  Description of Artificial Sequence: Synthetic oligonucleotide
  Antisense strand to SEQ ID NO: 997538
cuuucccugggauuaggcc

SEQ ID NO: 997540 - RNA, 19 nt, Artificial Sequence
  Description of Artificial Sequence: Synthetic oligonucleotide
  Sense strand starting at position 974 of SEQ ID NO: 914353
cccacauucuaaggaaaga

SEQ ID NO: 997541 - RNA, 19 nt, Artificial Sequence
  Description of Artificial Sequence: Synthetic oligonucleotide
  Antisense strand to SEQ ID NO: 997540
ucuuuccuuagaauguggg

SEQ ID NO: 997542 - RNA, 19 nt, Artificial Sequence
  Description of Artificial Sequence: Synthetic oligonucleotide
  Sense strand starting at position 1045 of SEQ ID NO: 914353
gccugccugucacugauuu

SEQ ID NO: 997543 - RNA, 19 nt, Artificial Sequence
  Description of Artificial Sequence: Synthetic oligonucleotide
  Antisense strand to SEQ ID NO: 997542
aaaucagugacaggcaggc

SEQ ID NO: 997544 - RNA, 19 nt, Artificial Sequence
  Description of Artificial Sequence: Synthetic oligonucleotide
  Sense strand starting at position 1049 of SEQ ID NO: 914353
gccugucacugauuucugu

SEQ ID NO: 997545 - RNA, 19 nt, Artificial Sequence
  Description of Artificial Sequence: Synthetic oligonucleotide
  Antisense strand to SEQ ID NO: 997544
acagaaaucagugacaggc

SEQ ID NO: 997546 - RNA, 19 nt, Artificial Sequence
  Description of Artificial Sequence: Synthetic oligonucleotide
  Sense strand starting at position 1053 of SEQ ID NO: 914353
gucacugauuucuguccua

SEQ ID NO: 997547 - RNA, 19 nt, Artificial Sequence
  Description of Artificial Sequence: Synthetic oligonucleotide
  Antisense strand to SEQ ID NO: 997546
uaggacagaaaucagugac

SEQ ID NO: 997548 - RNA, 19 nt, Artificial Sequence
  Description of Artificial Sequence: Synthetic oligonucleotide
  Sense strand starting at position 1117 of SEQ ID NO: 914353
gcuggagucucccuaaguc

SEQ ID NO: 997549 - RNA, 19 nt, Artificial Sequence
  Description of Artificial Sequence: Synthetic oligonucleotide
  Antisense strand to SEQ ID NO: 997548
gacuuagggagacuccagc

SEQ ID NO: 997550 - RNA, 19 nt, Artificial Sequence
  Description of Artificial Sequence: Synthetic oligonucleotide
  Sense strand starting at position 1254 of SEQ ID NO: 914353
ugcaccagcucuguaauca

SEQ ID NO: 997551 - RNA, 19 nt, Artificial Sequence
  Description of Artificial Sequence: Synthetic oligonucleotide
  Antisense strand to SEQ ID NO: 997550
ugauuacagagcuggugca

SEQ ID NO: 997552 - RNA, 19 nt, Artificial Sequence
  Description of Artificial Sequence: Synthetic oligonucleotide
  Sense strand starting at position 1255 of SEQ ID NO: 914353
gcaccagcucuguaaucaa

SEQ ID NO: 997553 - RNA, 19 nt, Artificial Sequence
  Description of Artificial Sequence: Synthetic oligonucleotide
  Antisense strand to SEQ ID NO: 997552
uugauuacagagcuggugc

SEQ ID NO: 997554 - RNA, 19 nt, Artificial Sequence
  Description of Artificial Sequence: Synthetic oligonucleotide
  Sense strand starting at position 1270 of SEQ ID NO: 914353
ucaagugcauccuauaugu

SEQ ID NO: 997555 - RNA, 19 nt, Artificial Sequence
  Description of Artificial Sequence: Synthetic oligonucleotide
  Antisense strand to SEQ ID NO: 997554
acauauaggaugcacuuga

SEQ ID NO: 997556 - RNA, 19 nt, Artificial Sequence
  Description of Artificial Sequence: Synthetic oligonucleotide
  Sense strand starting at position 1309 of SEQ ID NO: 914353
guccuacaauggugguuau

SEQ ID NO: 997557 - RNA, 19 nt, Artificial Sequence
  Description of Artificial Sequence: Synthetic oligonucleotide
  Antisense strand to SEQ ID NO: 997556
auaaccaccauuguaggac

SEQ ID NO: 997558 - RNA, 19 nt, Artificial Sequence
  Description of Artificial Sequence: Synthetic oligonucleotide
  Sense strand starting at position 1312 of SEQ ID NO: 914353
cuacaauggugguuauuaa

SEQ ID NO: 997559 - RNA, 19 nt, Artificial Sequence
  Description of Artificial Sequence: Synthetic oligonucleotide
  Antisense strand to SEQ ID NO: 997558
uuaauaaccaccauuguag

SEQ ID NO: 997560 - RNA, 19 nt, Artificial Sequence
  Description of Artificial Sequence: Synthetic oligonucleotide
  Sense strand starting at position 1313 of SEQ ID NO: 914353
uacaauggugguuauuaau

SEQ ID NO: 997561 - RNA, 19 nt, Artificial Sequence
  Description of Artificial Sequence: Synthetic oligonucleotide
  Antisense strand to SEQ ID NO: 997560
auuaauaaccaccauugua

SEQ ID NO: 997562 - RNA, 19 nt, Artificial Sequence
  Description of Artificial Sequence: Synthetic oligonucleotide
  Sense strand starting at position 1469 of SEQ ID NO: 914353
gguacuuaccuccaugaug

SEQ ID NO: 997563 - RNA, 19 nt, Artificial Sequence
  Description of Artificial Sequence: Synthetic oligonucleotide
  Antisense strand to SEQ ID NO: 997562
caucauggagguaaguacc

SEQ ID NO: 997564 - RNA, 19 nt, Artificial Sequence
  Description of Artificial Sequence: Synthetic oligonucleotide
  Sense strand starting at position 1617 of SEQ ID NO: 914353
gcuggagucuuccugcuca

SEQ ID NO: 997565 - RNA, 19 nt, Artificial Sequence
  Description of Artificial Sequence: Synthetic oligonucleotide
  Antisense strand to SEQ ID NO: 997564
ugagcaggaagacuccagc

SEQ ID NO: 997566 - RNA, 19 nt, Artificial Sequence
  Description of Artificial Sequence: Synthetic oligonucleotide
  Sense strand starting at position 2777 of SEQ ID NO: 914353
uggcuaugggcggaaguuu

SEQ ID NO: 997567 - RNA, 19 nt, Artificial Sequence
  Description of Artificial Sequence: Synthetic oligonucleotide
  Antisense strand to SEQ ID NO: 997566
aaacuuccgcccauagcca

SEQ ID NO: 997568 - RNA, 19 nt, Artificial Sequence
  Description of Artificial Sequence: Synthetic oligonucleotide
  Sense strand starting at position 3027 of SEQ ID NO: 914353
gcgccaauucucguacggu

SEQ ID NO: 997569 - RNA, 19 nt, Artificial Sequence
  Description of Artificial Sequence: Synthetic oligonucleotide
  Antisense strand to SEQ ID NO: 997568
accguacgagaauuggcgc

SEQ ID NO: 997570 - RNA, 19 nt, Artificial Sequence
  Description of Artificial Sequence: Synthetic oligonucleotide
  Sense strand starting at position 3028 of SEQ ID NO: 914353
cgccaauucucguacgguu

SEQ ID NO: 997571 - RNA, 19 nt, Artificial Sequence
  Description of Artificial Sequence: Synthetic oligonucleotide
  Antisense strand to SEQ ID NO: 997570
aaccguacgagaauuggcg

SEQ ID NO: 997572 - RNA, 19 nt, Artificial Sequence
  Description of Artificial Sequence: Synthetic oligonucleotide
  Sense strand starting at position 3091 of SEQ ID NO: 914353
gcgcaauuugcguagcgaa

SEQ ID NO: 997573 - RNA, 19 nt, Artificial Sequence
  Description of Artificial Sequence: Synthetic oligonucleotide
  Antisense strand to SEQ ID NO: 997572
uucgcuacgcaaauugcgc

SEQ ID NO: 997574 - RNA, 19 nt, Artificial Sequence
  Description of Artificial Sequence: Synthetic oligonucleotide
  Sense strand starting at position 3092 of SEQ ID NO: 914353
cgcaauuugcguagcgaac

SEQ ID NO: 997575 - RNA, 19 nt, Artificial Sequence
  Description of Artificial Sequence: Synthetic oligonucleotide
  Antisense strand to SEQ ID NO: 997574
guucgcuacgcaaauugcg

SEQ ID NO: 997576 - RNA, 19 nt, Artificial Sequence
  Description of Artificial Sequence: Synthetic oligonucleotide
  Sense strand starting at position 3287 of SEQ ID NO: 914353
ggcagcuuucgagaauuac

SEQ ID NO: 997577 - RNA, 19 nt, Artificial Sequence
  Description of Artificial Sequence: Synthetic oligonucleotide
  Antisense strand to SEQ ID NO: 997576
guaauucucgaaagcugcc

SEQ ID NO: 997578 - RNA, 19 nt, Artificial Sequence
  Description of Artificial Sequence: Synthetic oligonucleotide
  Sense strand starting at position 3333 of SEQ ID NO: 914353
uccgcauuauuggaggaga

SEQ ID NO: 997579 - RNA, 19 nt, Artificial Sequence
  Description of Artificial Sequence: Synthetic oligonucleotide
  Antisense strand to SEQ ID NO: 997578
ucuccuccaauaaugcgga

SEQ ID NO: 997580 - RNA, 19 nt, Artificial Sequence
  Description of Artificial Sequence: Synthetic oligonucleotide
  Sense strand starting at position 3335 of SEQ ID NO: 914353
cgcauuauuggaggagaga

SEQ ID NO: 997581 - RNA, 19 nt, Artificial Sequence
  Description of Artificial Sequence: Synthetic oligonucleotide
  Antisense strand to SEQ ID NO: 997580
ucucuccuccaauaaugcg

SEQ ID NO: 997582 - RNA, 19 nt, Artificial Sequence
  Description of Artificial Sequence: Synthetic oligonucleotide
  Sense strand starting at position 875 of SEQ ID NO: 914354
ggcugaagaccuggaacuu

SEQ ID NO: 997583 - RNA, 19 nt, Artificial Sequence
  Description of Artificial Sequence: Synthetic oligonucleotide
  Antisense strand to SEQ ID NO: 997582
aaguuccaggucuucagcc

SEQ ID NO: 997584 - RNA, 19 nt, Artificial Sequence
  Description of Artificial Sequence: Synthetic oligonucleotide
  Sense strand starting at position 993 of SEQ ID NO: 914354
gggagacucuucccuacua

SEQ ID NO: 997585 - RNA, 19 nt, Artificial Sequence
  Description of Artificial Sequence: Synthetic oligonucleotide
  Antisense strand to SEQ ID NO: 997584
uaguagggaagagucuccc

SEQ ID NO: 997586 - RNA, 19 nt, Artificial Sequence
  Description of Artificial Sequence: Synthetic oligonucleotide
  Sense strand starting at position 994 of SEQ ID NO: 914354
ggagacucuucccuacuau

SEQ ID NO: 997587 - RNA, 19 nt, Artificial Sequence
  Description of Artificial Sequence: Synthetic oligonucleotide
  Antisense strand to SEQ ID NO: 997586
auaguagggaagagucucc

SEQ ID NO: 997588 - RNA, 19 nt, Artificial Sequence
  Description of Artificial Sequence: Synthetic oligonucleotide
  Sense strand starting at position 1018 of SEQ ID NO: 914354
agaggaguuucuuccugca

SEQ ID NO: 997589 - RNA, 19 nt, Artificial Sequence
  Description of Artificial Sequence: Synthetic oligonucleotide
  Antisense strand to SEQ ID NO: 997588
ugcaggaagaaacuccucu

SEQ ID NO: 997590 - RNA, 19 nt, Artificial Sequence
  Description of Artificial Sequence: Synthetic oligonucleotide
  Sense strand starting at position 1104 of SEQ ID NO: 914354
guggaaagaugcccagagu

SEQ ID NO: 997591 - RNA, 19 nt, Artificial Sequence
  Description of Artificial Sequence: Synthetic oligonucleotide
  Antisense strand to SEQ ID NO: 997590
acucugggcaucuuuccac

SEQ ID NO: 997592 - RNA, 19 nt, Artificial Sequence
  Description of Artificial Sequence: Synthetic oligonucleotide
  Sense strand starting at position 2002 of SEQ ID NO: 914354
agaccugauuucuaacuga

SEQ ID NO: 997593 - RNA, 19 nt, Artificial Sequence
  Description of Artificial Sequence: Synthetic oligonucleotide
  Antisense strand to SEQ ID NO: 997592
ucaguuagaaaucaggucu

SEQ ID NO: 997594 - RNA, 19 nt, Artificial Sequence
  Description of Artificial Sequence: Synthetic oligonucleotide
  Sense strand starting at position 2065 of SEQ ID NO: 914354
ugguucagccuugaaguga

SEQ ID NO: 997595 - RNA, 19 nt, Artificial Sequence
  Description of Artificial Sequence: Synthetic oligonucleotide
  Antisense strand to SEQ ID NO: 997594
ucacuucaaggcugaacca

SEQ ID NO: 997596 - RNA, 19 nt, Artificial Sequence
  Description of Artificial Sequence: Synthetic oligonucleotide
  Sense strand starting at position 2078 of SEQ ID NO: 914354
aagugagucguggacgauc

SEQ ID NO: 997597 - RNA, 19 nt, Artificial Sequence
  Description of Artificial Sequence: Synthetic oligonucleotide
  Antisense strand to SEQ ID NO: 997596
gaucguccacgacucacuu

SEQ ID NO: 997598 - RNA, 19 nt, Artificial Sequence
  Description of Artificial Sequence: Synthetic oligonucleotide
  Sense strand starting at position 2162 of SEQ ID NO: 914354
agacuaaguguggguguuu

SEQ ID NO: 997599 - RNA, 19 nt, Artificial Sequence
  Description of Artificial Sequence: Synthetic oligonucleotide
  Antisense strand to SEQ ID NO: 997598
aaacacccacacuuagucu

SEQ ID NO: 997600 - RNA, 19 nt, Artificial Sequence
  Description of Artificial Sequence: Synthetic oligonucleotide
  Sense strand starting at position 2253 of SEQ ID NO: 914354
uucggaaaccaucagucuu

SEQ ID NO: 997601 - RNA, 19 nt, Artificial Sequence
  Description of Artificial Sequence: Synthetic oligonucleotide
  Antisense strand to SEQ ID NO: 997600
aagacugaugguuuccgaa

SEQ ID NO: 997602 - RNA, 19 nt, Artificial Sequence
  Description of Artificial Sequence: Synthetic oligonucleotide
  Sense strand starting at position 2255 of SEQ ID NO: 914354
cggaaaccaucagucuuaa

SEQ ID NO: 997603 - RNA, 19 nt, Artificial Sequence
  Description of Artificial Sequence: Synthetic oligonucleotide
  Antisense strand to SEQ ID NO: 997602
uuaagacugaugguuuccg

SEQ ID NO: 997604 - RNA, 19 nt, Artificial Sequence
  Description of Artificial Sequence: Synthetic oligonucleotide
  Sense strand starting at position 2280 of SEQ ID NO: 914354
uggccuucgucuucuaagu

SEQ ID NO: 997605 - RNA, 19 nt, Artificial Sequence
  Description of Artificial Sequence: Synthetic oligonucleotide
  Antisense strand to SEQ ID NO: 997604
acuuagaagacgaaggcca

SEQ ID NO: 997606 - RNA, 19 nt, Artificial Sequence
  Description of Artificial Sequence: Synthetic oligonucleotide
  Sense strand starting at position 2286 of SEQ ID NO: 914354
ucgucuucuaaguacgcaa

SEQ ID NO: 997607 - RNA, 19 nt, Artificial Sequence
  Description of Artificial Sequence: Synthetic oligonucleotide
  Antisense strand to SEQ ID NO: 997606
uugcguacuuagaagacga

SEQ ID NO: 997608 - RNA, 19 nt, Artificial Sequence
  Description of Artificial Sequence: Synthetic oligonucleotide
  Sense strand starting at position 2356 of SEQ ID NO: 914354
uaacuaguuccuggcuuga

SEQ ID NO: 997609 - RNA, 19 nt, Artificial Sequence
  Description of Artificial Sequence: Synthetic oligonucleotide
  Antisense strand to SEQ ID NO: 997608
ucaagccaggaacuaguua

SEQ ID NO: 997610 - RNA, 19 nt, Artificial Sequence
  Description of Artificial Sequence: Synthetic oligonucleotide
  Sense strand starting at position 2358 of SEQ ID NO: 914354
acuaguuccuggcuugaac

SEQ ID NO: 997611 - RNA, 19 nt, Artificial Sequence
  Description of Artificial Sequence: Synthetic oligonucleotide
  Antisense strand to SEQ ID NO: 997610
guucaagccaggaacuagu

SEQ ID NO: 997612 - RNA, 19 nt, Artificial Sequence
  Description of Artificial Sequence: Synthetic oligonucleotide
  Sense strand starting at position 2408 of SEQ ID NO: 914354
uguaguguguugccagacu

SEQ ID NO: 997613 - RNA, 19 nt, Artificial Sequence
  Description of Artificial Sequence: Synthetic oligonucleotide
  Antisense strand to SEQ ID NO: 997612
agucuggcaacacacuaca

SEQ ID NO: 997614 - RNA, 19 nt, Artificial Sequence
  Description of Artificial Sequence: Synthetic oligonucleotide
  Sense strand starting at position 2423 of SEQ ID NO: 914354
gacugaacuucucuguugu

SEQ ID NO: 997615 - RNA, 19 nt, Artificial Sequence
  Description of Artificial Sequence: Synthetic oligonucleotide
  Antisense strand to SEQ ID NO: 997614
acaacagagaaguucaguc

SEQ ID NO: 997616 - RNA, 19 nt, Artificial Sequence
  Description of Artificial Sequence: Synthetic oligonucleotide
  Sense strand starting at position 2431 of SEQ ID NO: 914354
uucucuguugugugacuau

SEQ ID NO: 997617 - RNA, 19 nt, Artificial Sequence
  Description of Artificial Sequence: Synthetic oligonucleotide
  Antisense strand to SEQ ID NO: 997616
auagucacacaacagagaa

SEQ ID NO: 997618 - RNA, 19 nt, Artificial Sequence
  Description of Artificial Sequence: Synthetic oligonucleotide
  Sense strand starting at position 2473 of SEQ ID NO: 914354
uguugagaaagauacgguu

SEQ ID NO: 997619 - RNA, 19 nt, Artificial Sequence
  Description of Artificial Sequence: Synthetic oligonucleotide
  Antisense strand to SEQ ID NO: 997618
aaccguaucuuucucaaca

SEQ ID NO: 997620 - RNA, 19 nt, Artificial Sequence
  Description of Artificial Sequence: Synthetic oligonucleotide
  Sense strand starting at position 2475 of SEQ ID NO: 914354
uugagaaagauacgguuua

SEQ ID NO: 997621 - RNA, 19 nt, Artificial Sequence
  Description of Artificial Sequence: Synthetic oligonucleotide
  Antisense strand to SEQ ID NO: 997620
uaaaccguaucuuucucaa

SEQ ID NO: 997622 - RNA, 19 nt, Artificial Sequence
  Description of Artificial Sequence: Synthetic oligonucleotide
  Sense strand starting at position 2511 of SEQ ID NO: 914354
agagguugccaggaugacu

SEQ ID NO: 997623 - RNA, 19 nt, Artificial Sequence
  Description of Artificial Sequence: Synthetic oligonucleotide
  Antisense strand to SEQ ID NO: 997622
agucauccuggcaaccucu

SEQ ID NO: 997624 - RNA, 19 nt, Artificial Sequence
  Description of Artificial Sequence: Synthetic oligonucleotide
  Sense strand starting at position 2522 of SEQ ID NO: 914354
ggaugacuucucuggagca

SEQ ID NO: 997625 - RNA, 19 nt, Artificial Sequence
  Description of Artificial Sequence: Synthetic oligonucleotide
  Antisense strand to SEQ ID NO: 997624
ugcuccagagaagucaucc

SEQ ID NO: 997626 - RNA, 19 nt, Artificial Sequence
  Description of Artificial Sequence: Synthetic oligonucleotide
  Sense strand starting at position 2566 of SEQ ID NO: 914354
uacuuaagauuauaggagu

SEQ ID NO: 997627 - RNA, 19 nt, Artificial Sequence
  Description of Artificial Sequence: Synthetic oligonucleotide
  Antisense strand to SEQ ID NO: 997626
acuccuauaaucuuaagua

SEQ ID NO: 997628 - RNA, 19 nt, Artificial Sequence
  Description of Artificial Sequence: Synthetic oligonucleotide
  Sense strand starting at position 2909 of SEQ ID NO: 914354
ugcauuguauugucccauu

SEQ ID NO: 997629 - RNA, 19 nt, Artificial Sequence
  Description of Artificial Sequence: Synthetic oligonucleotide
  Antisense strand to SEQ ID NO: 997628
aaugggacaauacaaugca

SEQ ID NO: 997630 - RNA, 19 nt, Artificial Sequence
  Description of Artificial Sequence: Synthetic oligonucleotide
  Sense strand starting at position 2939 of SEQ ID NO: 914354
ggacgagucgcagacagaa

SEQ ID NO: 997631 - RNA, 19 nt, Artificial Sequence
  Description of Artificial Sequence: Synthetic oligonucleotide
  Antisense strand to SEQ ID NO: 997630
uucugucugcgacucgucc

SEQ ID NO: 997632 - RNA, 19 nt, Artificial Sequence
  Description of Artificial Sequence: Synthetic oligonucleotide
  Sense strand starting at position 3439 of SEQ ID NO: 914354
agugcugaguuagcuguua

SEQ ID NO: 997633 - RNA, 19 nt, Artificial Sequence
  Description of Artificial Sequence: Synthetic oligonucleotide
  Antisense strand to SEQ ID NO: 997632
uaacagcuaacucagcacu

SEQ ID NO: 997634 - RNA, 19 nt, Artificial Sequence
  Description of Artificial Sequence: Synthetic oligonucleotide
  Sense strand starting at position 3441 of SEQ ID NO: 914354
ugcugaguuagcuguuauu

SEQ ID NO: 997635 - RNA, 19 nt, Artificial Sequence
  Description of Artificial Sequence: Synthetic oligonucleotide
  Antisense strand to SEQ ID NO: 997634
aauaacagcuaacucagca

SEQ ID NO: 997636 - RNA, 19 nt, Artificial Sequence
  Description of Artificial Sequence: Synthetic oligonucleotide
  Sense strand starting at position 3650 of SEQ ID NO: 914354
gacagucucuucguuccua

SEQ ID NO: 997637 - RNA, 19 nt, Artificial Sequence
  Description of Artificial Sequence: Synthetic oligonucleotide
  Antisense strand to SEQ ID NO: 997636
uaggaacgaagagacuguc

SEQ ID NO: 997638 - RNA, 19 nt, Artificial Sequence
  Description of Artificial Sequence: Synthetic oligonucleotide
  Sense strand starting at position 3651 of SEQ ID NO: 914354
acagucucuucguuccuaa

SEQ ID NO: 997639 - RNA, 19 nt, Artificial Sequence
  Description of Artificial Sequence: Synthetic oligonucleotide
  Antisense strand to SEQ ID NO: 997638
uuaggaacgaagagacugu

SEQ ID NO: 997640 - RNA, 19 nt, Artificial Sequence
  Description of Artificial Sequence: Synthetic oligonucleotide
  Sense strand starting at position 3654 of SEQ ID NO: 914354
gucucuucguuccuaacca

SEQ ID NO: 997641 - RNA, 19 nt, Artificial Sequence
  Description of Artificial Sequence: Synthetic oligonucleotide
  Antisense strand to SEQ ID NO: 997640
ugguuaggaacgaagagac

SEQ ID NO: 997642 - RNA, 19 nt, Artificial Sequence
  Description of Artificial Sequence: Synthetic oligonucleotide
  Sense strand starting at position 3662 of SEQ ID NO: 914354
guuccuaaccaguguggga

SEQ ID NO: 997643 - RNA, 19 nt, Artificial Sequence
  Description of Artificial Sequence: Synthetic oligonucleotide
  Antisense strand to SEQ ID NO: 997642
ucccacacugguuaggaac

SEQ ID NO: 997644 - RNA, 19 nt, Artificial Sequence
  Description of Artificial Sequence: Synthetic oligonucleotide
  Sense strand starting at position 3707 of SEQ ID NO: 914354
agaggaagcauguggugaa

SEQ ID NO: 997645 - RNA, 19 nt, Artificial Sequence
  Description of Artificial Sequence: Synthetic oligonucleotide
  Antisense strand to SEQ ID NO: 997644
uucaccacaugcuuccucu

SEQ ID NO: 997646 - RNA, 19 nt, Artificial Sequence
  Description of Artificial Sequence: Synthetic oligonucleotide
  Sense strand starting at position 3765 of SEQ ID NO: 914354
gcagauugucagggugagu

SEQ ID NO: 997647 - RNA, 19 nt, Artificial Sequence
  Description of Artificial Sequence: Synthetic oligonucleotide
  Antisense strand to SEQ ID NO: 997646
acucacccugacaaucugc

SEQ ID NO: 997648 - RNA, 19 nt, Artificial Sequence
  Description of Artificial Sequence: Synthetic oligonucleotide
  Sense strand starting at position 3863 of SEQ ID NO: 914354
cugagaggguguuugaucu

SEQ ID NO: 997649 - RNA, 19 nt, Artificial Sequence
  Description of Artificial Sequence: Synthetic oligonucleotide
  Antisense strand to SEQ ID NO: 997648
agaucaaacacccucucag

SEQ ID NO: 997650 - RNA, 19 nt, Artificial Sequence
  Description of Artificial Sequence: Synthetic oligonucleotide
  Sense strand starting at position 3867 of SEQ ID NO: 914354
gaggguguuugaucugacu

SEQ ID NO: 997651 - RNA, 19 nt, Artificial Sequence
  Description of Artificial Sequence: Synthetic oligonucleotide
  Antisense strand to SEQ ID NO: 997650
agucagaucaaacacccuc

SEQ ID NO: 997652 - RNA, 19 nt, Artificial Sequence
  Description of Artificial Sequence: Synthetic oligonucleotide
  Sense strand starting at position 3869 of SEQ ID NO: 914354
ggguguuugaucugacuga

SEQ ID NO: 997653 - RNA, 19 nt, Artificial Sequence
  Description of Artificial Sequence: Synthetic oligonucleotide
  Antisense strand to SEQ ID NO: 997652
ucagucagaucaaacaccc

SEQ ID NO: 997654 - RNA, 19 nt, Artificial Sequence
  Description of Artificial Sequence: Synthetic oligonucleotide
  Sense strand starting at position 3873 of SEQ ID NO: 914354
guuugaucugacugaugag

SEQ ID NO: 997655 - RNA, 19 nt, Artificial Sequence
  Description of Artificial Sequence: Synthetic oligonucleotide
  Antisense strand to SEQ ID NO: 997654
cucaucagucagaucaaac

SEQ ID NO: 997656 - RNA, 19 nt, Artificial Sequence
  Description of Artificial Sequence: Synthetic oligonucleotide
  Sense strand starting at position 3876 of SEQ ID NO: 914354
ugaucugacugaugagacu

SEQ ID NO: 997657 - RNA, 19 nt, Artificial Sequence
  Description of Artificial Sequence: Synthetic oligonucleotide
  Antisense strand to SEQ ID NO: 997656
agucucaucagucagauca

SEQ ID NO: 997658 - RNA, 19 nt, Artificial Sequence
  Description of Artificial Sequence: Synthetic oligonucleotide
  Sense strand starting at position 3895 of SEQ ID NO: 914354
gauucuuggucucuccuga

SEQ ID NO: 997659 - RNA, 19 nt, Artificial Sequence
  Description of Artificial Sequence: Synthetic oligonucleotide
  Antisense strand to SEQ ID NO: 997658
ucaggagagaccaagaauc

SEQ ID NO: 997660 - RNA, 19 nt, Artificial Sequence
  Description of Artificial Sequence: Synthetic oligonucleotide
  Sense strand starting at position 3936 of SEQ ID NO: 914354
gaacaaucugcaugaggug

SEQ ID NO: 997661 - RNA, 19 nt, Artificial Sequence
  Description of Artificial Sequence: Synthetic oligonucleotide
  Antisense strand to SEQ ID NO: 997660
caccucaugcagauuguuc

SEQ ID NO: 997662 - RNA, 19 nt, Artificial Sequence
  Description of Artificial Sequence: Synthetic oligonucleotide
  Sense strand starting at position 21 of SEQ ID NO: 914355
gccaccucugacugaauga

SEQ ID NO: 997663 - RNA, 19 nt, Artificial Sequence
  Description of Artificial Sequence: Synthetic oligonucleotide
  Antisense strand to SEQ ID NO: 997662
ucauucagucagagguggc

SEQ ID NO: 997664 - RNA, 19 nt, Artificial Sequence
  Description of Artificial Sequence: Synthetic oligonucleotide
  Sense strand starting at position 99 of SEQ ID NO: 914355
cugugacuccuauaagcca

SEQ ID NO: 997665 - RNA, 19 nt, Artificial Sequence
  Description of Artificial Sequence: Synthetic oligonucleotide
  Antisense strand to SEQ ID NO: 997664
uggcuuauaggagucacag

SEQ ID NO: 997666 - RNA, 19 nt, Artificial Sequence
  Description of Artificial Sequence: Synthetic oligonucleotide
  Sense strand starting at position 181 of SEQ ID NO: 914355
uaccuaggugcuuagaagu

SEQ ID NO: 997667 - RNA, 19 nt, Artificial Sequence
  Description of Artificial Sequence: Synthetic oligonucleotide
  Antisense strand to SEQ ID NO: 997666
acuucuaagcaccuaggua

SEQ ID NO: 997668 - RNA, 19 nt, Artificial Sequence
  Description of Artificial Sequence: Synthetic oligonucleotide
  Sense strand starting at position 216 of SEQ ID NO: 914355
gggaaugucccauacgcaa

SEQ ID NO: 997669 - RNA, 19 nt, Artificial Sequence
  Description of Artificial Sequence: Synthetic oligonucleotide
  Antisense strand to SEQ ID NO: 997668
uugcguaugggacauuccc

SEQ ID NO: 997670 - RNA, 19 nt, Artificial Sequence
  Description of Artificial Sequence: Synthetic oligonucleotide
  Sense strand starting at position 230 of SEQ ID NO: 914355
cgcaauguuaaugacugaa

SEQ ID NO: 997671 - RNA, 19 nt, Artificial Sequence
  Description of Artificial Sequence: Synthetic oligonucleotide
  Antisense strand to SEQ ID NO: 997670
uucagucauuaacauugcg

SEQ ID NO: 997672 - RNA, 19 nt, Artificial Sequence
  Description of Artificial Sequence: Synthetic oligonucleotide
  Sense strand starting at position 267 of SEQ ID NO: 914355
cucgaagggaauugaguua

SEQ ID NO: 997673 - RNA, 19 nt, Artificial Sequence
  Description of Artificial Sequence: Synthetic oligonucleotide
  Antisense strand to SEQ ID NO: 997672
uaacucaauucccuucgag

SEQ ID NO: 997674 - RNA, 19 nt, Artificial Sequence
  Description of Artificial Sequence: Synthetic oligonucleotide
  Sense strand starting at position 274 of SEQ ID NO: 914355
ggaauugaguuauuauaac

SEQ ID NO: 997675 - RNA, 19 nt, Artificial Sequence
  Description of Artificial Sequence: Synthetic oligonucleotide
  Antisense strand to SEQ ID NO: 997674
guuauaauaacucaauucc

SEQ ID NO: 997676 - RNA, 19 nt, Artificial Sequence
  Description of Artificial Sequence: Synthetic oligonucleotide
  Sense strand starting at position 343 of SEQ ID NO: 914355
uauguauguguccaagggu

SEQ ID NO: 997677 - RNA, 19 nt, Artificial Sequence
  Description of Artificial Sequence: Synthetic oligonucleotide
  Antisense strand to SEQ ID NO: 997676
acccuuggacacauacaua

SEQ ID NO: 997678 - RNA, 19 nt, Artificial Sequence
  Description of Artificial Sequence: Synthetic oligonucleotide
  Sense strand starting at position 428 of SEQ ID NO: 914355
ucuuauuuguuccuuguuu

SEQ ID NO: 997679 - RNA, 19 nt, Artificial Sequence
  Description of Artificial Sequence: Synthetic oligonucleotide
  Antisense strand to SEQ ID NO: 997678
aaacaaggaacaaauaaga

SEQ ID NO: 997680 - RNA, 19 nt, Artificial Sequence
  Description of Artificial Sequence: Synthetic oligonucleotide
  Sense strand starting at position 494 of SEQ ID NO: 914355
ggacaucaggccuaauucu

SEQ ID NO: 997681 - RNA, 19 nt, Artificial Sequence
  Description of Artificial Sequence: Synthetic oligonucleotide
  Antisense strand to SEQ ID NO: 997680
agaauuaggccugaugucc

SEQ ID NO: 997682 - RNA, 19 nt, Artificial Sequence
  Description of Artificial Sequence: Synthetic oligonucleotide
  Sense strand starting at position 629 of SEQ ID NO: 914355
auguuuacugauugucaua

SEQ ID NO: 997683 - RNA, 19 nt, Artificial Sequence
  Description of Artificial Sequence: Synthetic oligonucleotide
  Antisense strand to SEQ ID NO: 997682
uaugacaaucaguaaacau

SEQ ID NO: 997684 - RNA, 19 nt, Artificial Sequence
  Description of Artificial Sequence: Synthetic oligonucleotide
  Sense strand starting at position 631 of SEQ ID NO: 914355
guuuacugauugucauaua

SEQ ID NO: 997685 - RNA, 19 nt, Artificial Sequence
  Description of Artificial Sequence: Synthetic oligonucleotide
  Antisense strand to SEQ ID NO: 997684
uauaugacaaucaguaaac

SEQ ID NO: 997686 - RNA, 19 nt, Artificial Sequence
  Description of Artificial Sequence: Synthetic oligonucleotide
  Sense strand starting at position 689 of SEQ ID NO: 914355
cgcauugagcauuaacaac

SEQ ID NO: 997687 - RNA, 19 nt, Artificial Sequence
  Description of Artificial Sequence: Synthetic oligonucleotide
  Antisense strand to SEQ ID NO: 997686
guuguuaaugcucaaugcg

SEQ ID NO: 997688 - RNA, 19 nt, Artificial Sequence
  Description of Artificial Sequence: Synthetic oligonucleotide
  Sense strand starting at position 825 of SEQ ID NO: 914355
uuggaaauacuuuaugcuu

SEQ ID NO: 997689 - RNA, 19 nt, Artificial Sequence
  Description of Artificial Sequence: Synthetic oligonucleotide
  Antisense strand to SEQ ID NO: 997688
aagcauaaaguauuuccaa

SEQ ID NO: 997690 - RNA, 19 nt, Artificial Sequence
  Description of Artificial Sequence: Synthetic oligonucleotide
  Sense strand starting at position 965 of SEQ ID NO: 914355
cuuggaucuucucuuaaug

SEQ ID NO: 997691 - RNA, 19 nt, Artificial Sequence
  Description of Artificial Sequence: Synthetic oligonucleotide
  Antisense strand to SEQ ID NO: 997690
cauuaagagaagauccaag

SEQ ID NO: 997692 - RNA, 19 nt, Artificial Sequence
  Description of Artificial Sequence: Synthetic oligonucleotide
  Sense strand starting at position 1050 of SEQ ID NO: 914355
guauuaaguucucuuuauc

SEQ ID NO: 997693 - RNA, 19 nt, Artificial Sequence
  Description of Artificial Sequence: Synthetic oligonucleotide
  Antisense strand to SEQ ID NO: 997692
gauaaagagaacuuaauac

SEQ ID NO: 997694 - RNA, 19 nt, Artificial Sequence
  Description of Artificial Sequence: Synthetic oligonucleotide
  Sense strand starting at position 1081 of SEQ ID NO: 914355
cuuaccucccgugaagaga

SEQ ID NO: 997695 - RNA, 19 nt, Artificial Sequence
  Description of Artificial Sequence: Synthetic oligonucleotide
  Antisense strand to SEQ ID NO: 997694
ucucuucacgggagguaag

SEQ ID NO: 997696 - RNA, 19 nt, Artificial Sequence
  Description of Artificial Sequence: Synthetic oligonucleotide
  Sense strand starting at position 1176 of SEQ ID NO: 914355
uucggcuugacuuaagaca

SEQ ID NO: 997697 - RNA, 19 nt, Artificial Sequence
  Description of Artificial Sequence: Synthetic oligonucleotide
  Antisense strand to SEQ ID NO: 997696
ugucuuaagucaagccgaa

SEQ ID NO: 997698 - RNA, 19 nt, Artificial Sequence
  Description of Artificial Sequence: Synthetic oligonucleotide
  Sense strand starting at position 1250 of SEQ ID NO: 914355
uucucagagggcgaucauu

SEQ ID NO: 997699 - RNA, 19 nt, Artificial Sequence
  Description of Artificial Sequence: Synthetic oligonucleotide
  Antisense strand to SEQ ID NO: 997698
aaugaucgcccucugagaa

SEQ ID NO: 997700 - RNA, 19 nt, Artificial Sequence
  Description of Artificial Sequence: Synthetic oligonucleotide
  Sense strand starting at position 1269 of SEQ ID NO: 914355
guaagcaaagcucagugaa

SEQ ID NO: 997701 - RNA, 19 nt, Artificial Sequence
  Description of Artificial Sequence: Synthetic oligonucleotide
  Antisense strand to SEQ ID NO: 997700
uucacugagcuuugcuuac

SEQ ID NO: 997702 - RNA, 19 nt, Artificial Sequence
  Description of Artificial Sequence: Synthetic oligonucleotide
  Sense strand starting at position 1272 of SEQ ID NO: 914355
agcaaagcucagugaauuc

SEQ ID NO: 997703 - RNA, 19 nt, Artificial Sequence
  Description of Artificial Sequence: Synthetic oligonucleotide
  Antisense strand to SEQ ID NO: 997702
gaauucacugagcuuugcu

SEQ ID NO: 997704 - RNA, 19 nt, Artificial Sequence
  Description of Artificial Sequence: Synthetic oligonucleotide
  Sense strand starting at position 1306 of SEQ ID NO: 914355
accucaggauacugauuua

SEQ ID NO: 997705 - RNA, 19 nt, Artificial Sequence
  Description of Artificial Sequence: Synthetic oligonucleotide
  Antisense strand to SEQ ID NO: 997704
uaaaucaguauccugaggu

SEQ ID NO: 997706 - RNA, 19 nt, Artificial Sequence
  Description of Artificial Sequence: Synthetic oligonucleotide
  Sense strand starting at position 1363 of SEQ ID NO: 914355
aaguuaacucaaggugaga

SEQ ID NO: 997707 - RNA, 19 nt, Artificial Sequence
  Description of Artificial Sequence: Synthetic oligonucleotide
  Antisense strand to SEQ ID NO: 997706
ucucaccuugaguuaacuu

SEQ ID NO: 997708 - RNA, 19 nt, Artificial Sequence
  Description of Artificial Sequence: Synthetic oligonucleotide
  Sense strand starting at position 1492 of SEQ ID NO: 914355
aagcguucuccuccgagca

SEQ ID NO: 997709 - RNA, 19 nt, Artificial Sequence
  Description of Artificial Sequence: Synthetic oligonucleotide
  Antisense strand to SEQ ID NO: 997708
ugcucggaggagaacgcuu

SEQ ID NO: 997710 - RNA, 19 nt, Artificial Sequence
  Description of Artificial Sequence: Synthetic oligonucleotide
  Sense strand starting at position 1608 of SEQ ID NO: 914355
gucgcagaugccuuugcaa

SEQ ID NO: 997711 - RNA, 19 nt, Artificial Sequence
  Description of Artificial Sequence: Synthetic oligonucleotide
  Antisense strand to SEQ ID NO: 997710
uugcaaaggcaucugcgac

SEQ ID NO: 997712 - RNA, 19 nt, Artificial Sequence
  Description of Artificial Sequence: Synthetic oligonucleotide
  Sense strand starting at position 1716 of SEQ ID NO: 914355
ggacgugaaagcuaccgaa

SEQ ID NO: 997713 - RNA, 19 nt, Artificial Sequence
  Description of Artificial Sequence: Synthetic oligonucleotide
  Antisense strand to SEQ ID NO: 997712
uucgguagcuuucacgucc

SEQ ID NO: 997714 - RNA, 19 nt, Artificial Sequence
  Description of Artificial Sequence: Synthetic oligonucleotide
  Sense strand starting at position 1758 of SEQ ID NO: 914355
gucuuacccguacaggaau

SEQ ID NO: 997715 - RNA, 19 nt, Artificial Sequence
  Description of Artificial Sequence: Synthetic oligonucleotide
  Antisense strand to SEQ ID NO: 997714
auuccuguacggguaagac

SEQ ID NO: 997716 - RNA, 19 nt, Artificial Sequence
  Description of Artificial Sequence: Synthetic oligonucleotide
  Sense strand starting at position 2585 of SEQ ID NO: 914355
ucaggucucuuacuagaaa

SEQ ID NO: 997717 - RNA, 19 nt, Artificial Sequence
  Description of Artificial Sequence: Synthetic oligonucleotide
  Antisense strand to SEQ ID NO: 997716
uuucuaguaagagaccuga

SEQ ID NO: 997718 - RNA, 19 nt, Artificial Sequence
  Description of Artificial Sequence: Synthetic oligonucleotide
  Sense strand starting at position 2969 of SEQ ID NO: 914355
agacgauagcuugagguca

SEQ ID NO: 997719 - RNA, 19 nt, Artificial Sequence
  Description of Artificial Sequence: Synthetic oligonucleotide
  Antisense strand to SEQ ID NO: 997718
ugaccucaagcuaucgucu

SEQ ID NO: 997720 - RNA, 19 nt, Artificial Sequence
  Description of Artificial Sequence: Synthetic oligonucleotide
  Sense strand starting at position 3119 of SEQ ID NO: 914355
ccagcuauuggagagguuu

SEQ ID NO: 997721 - RNA, 19 nt, Artificial Sequence
  Description of Artificial Sequence: Synthetic oligonucleotide
  Antisense strand to SEQ ID NO: 997720
aaaccucuccaauagcugg

SEQ ID NO: 997722 - RNA, 19 nt, Artificial Sequence
  Description of Artificial Sequence: Synthetic oligonucleotide
  Sense strand starting at position 3131 of SEQ ID NO: 914355
gagguuuaggcaggaggaa

SEQ ID NO: 997723 - RNA, 19 nt, Artificial Sequence
  Description of Artificial Sequence: Synthetic oligonucleotide
  Antisense strand to SEQ ID NO: 997722
uuccuccugccuaaaccuc

SEQ ID NO: 997724 - RNA, 19 nt, Artificial Sequence
  Description of Artificial Sequence: Synthetic oligonucleotide
  Sense strand starting at position 3301 of SEQ ID NO: 914355
gggucagagcugcacgauu

SEQ ID NO: 997725 - RNA, 19 nt, Artificial Sequence
  Description of Artificial Sequence: Synthetic oligonucleotide
  Antisense strand to SEQ ID NO: 997724
aaucgugcagcucugaccc

SEQ ID NO: 997726 - RNA, 19 nt, Artificial Sequence
  Description of Artificial Sequence: Synthetic oligonucleotide
  Sense strand starting at position 3450 of SEQ ID NO: 914355
ggcguuuauugggugauuu

SEQ ID NO: 997727 - RNA, 19 nt, Artificial Sequence
  Description of Artificial Sequence: Synthetic oligonucleotide
  Antisense strand to SEQ ID NO: 997726
aaaucacccaauaaacgcc

SEQ ID NO: 997728 - RNA, 19 nt, Artificial Sequence
  Description of Artificial Sequence: Synthetic oligonucleotide
  Sense strand starting at position 3451 of SEQ ID NO: 914355
gcguuuauugggugauuug

SEQ ID NO: 997729 - RNA, 19 nt, Artificial Sequence
  Description of Artificial Sequence: Synthetic oligonucleotide
  Antisense strand to SEQ ID NO: 997728
caaaucacccaauaaacgc

SEQ ID NO: 997730 - RNA, 19 nt, Artificial Sequence
  Description of Artificial Sequence: Synthetic oligonucleotide
  Sense strand starting at position 3650 of SEQ ID NO: 914355
ccacgacuuuauguuggaa

SEQ ID NO: 997731 - RNA, 19 nt, Artificial Sequence
  Description of Artificial Sequence: Synthetic oligonucleotide
  Antisense strand to SEQ ID NO: 997730
uuccaacauaaagucgugg

SEQ ID NO: 997732 - RNA, 19 nt, Artificial Sequence
  Description of Artificial Sequence: Synthetic oligonucleotide
  Sense strand starting at position 3653 of SEQ ID NO: 914355
cgacuuuauguuggaauga

SEQ ID NO: 997733 - RNA, 19 nt, Artificial Sequence
  Description of Artificial Sequence: Synthetic oligonucleotide
  Antisense strand to SEQ ID NO: 997732
ucauuccaacauaaagucg

SEQ ID NO: 997734 - RNA, 19 nt, Artificial Sequence
  Description of Artificial Sequence: Synthetic oligonucleotide
  Sense strand starting at position 3909 of SEQ ID NO: 914355
cgcccagaggacuaaucau

SEQ ID NO: 997735 - RNA, 19 nt, Artificial Sequence
  Description of Artificial Sequence: Synthetic oligonucleotide
  Antisense strand to SEQ ID NO: 997734
augauuaguccucugggcg

SEQ ID NO: 997736 - RNA, 19 nt, Artificial Sequence
  Description of Artificial Sequence: Synthetic oligonucleotide
  Sense strand starting at position 3915 of SEQ ID NO: 914355
gaggacuaaucauuaggcu

SEQ ID NO: 997737 - RNA, 19 nt, Artificial Sequence
  Description of Artificial Sequence: Synthetic oligonucleotide
  Antisense strand to SEQ ID NO: 997736
agccuaaugauuaguccuc

SEQ ID NO: 997738 - RNA, 19 nt, Artificial Sequence
  Description of Artificial Sequence: Synthetic oligonucleotide
  Sense strand starting at position 3919 of SEQ ID NO: 914355
acuaaucauuaggcuguua

SEQ ID NO: 997739 - RNA, 19 nt, Artificial Sequence
  Description of Artificial Sequence: Synthetic oligonucleotide
  Antisense strand to SEQ ID NO: 997738
uaacagccuaaugauuagu

SEQ ID NO: 997740 - RNA, 19 nt, Artificial Sequence
  Description of Artificial Sequence: Synthetic oligonucleotide
  Sense strand starting at position 3921 of SEQ ID NO: 914355
uaaucauuaggcuguuaga

SEQ ID NO: 997741 - RNA, 19 nt, Artificial Sequence
  Description of Artificial Sequence: Synthetic oligonucleotide
  Antisense strand to SEQ ID NO: 997740
ucuaacagccuaaugauua

SEQ ID NO: 997742 - RNA, 19 nt, Artificial Sequence
  Description of Artificial Sequence: Synthetic oligonucleotide
  Sense strand starting at position 149 of SEQ ID NO: 914356
gaaagcugacccugcagaa

SEQ ID NO: 997743 - RNA, 19 nt, Artificial Sequence
  Description of Artificial Sequence: Synthetic oligonucleotide
  Antisense strand to SEQ ID NO: 997742
uucugcagggucagcuuuc

SEQ ID NO: 997744 - RNA, 19 nt, Artificial Sequence
  Description of Artificial Sequence: Synthetic oligonucleotide
  Sense strand starting at position 196 of SEQ ID NO: 914356
guacccaggcuguagaaau

SEQ ID NO: 997745 - RNA, 19 nt, Artificial Sequence
  Description of Artificial Sequence: Synthetic oligonucleotide
  Antisense strand to SEQ ID NO: 997744
auuucuacagccuggguac

SEQ ID NO: 997746 - RNA, 19 nt, Artificial Sequence
  Description of Artificial Sequence: Synthetic oligonucleotide
  Sense strand starting at position 537 of SEQ ID NO: 914356
uguuucgggcuccaagaaa

SEQ ID NO: 997747 - RNA, 19 nt, Artificial Sequence
  Description of Artificial Sequence: Synthetic oligonucleotide
  Antisense strand to SEQ ID NO: 997746
uuucuuggagcccgaaaca

SEQ ID NO: 997748 - RNA, 19 nt, Artificial Sequence
  Description of Artificial Sequence: Synthetic oligonucleotide
  Sense strand starting at position 548 of SEQ ID NO: 914356
ccaagaaagucuucgugac

SEQ ID NO: 997749 - RNA, 19 nt, Artificial Sequence
  Description of Artificial Sequence: Synthetic oligonucleotide
  Antisense strand to SEQ ID NO: 997748
gucacgaagacuuucuugg

SEQ ID NO: 997750 - RNA, 19 nt, Artificial Sequence
  Description of Artificial Sequence: Synthetic oligonucleotide
  Sense strand starting at position 550 of SEQ ID NO: 914356
aagaaagucuucgugaccu

SEQ ID NO: 997751 - RNA, 19 nt, Artificial Sequence
  Description of Artificial Sequence: Synthetic oligonucleotide
  Antisense strand to SEQ ID NO: 997750
aggucacgaagacuuucuu

SEQ ID NO: 997752 - RNA, 19 nt, Artificial Sequence
  Description of Artificial Sequence: Synthetic oligonucleotide
  Sense strand starting at position 570 of SEQ ID NO: 914356
ggacuugucacuuggcuuc

SEQ ID NO: 997753 - RNA, 19 nt, Artificial Sequence
  Description of Artificial Sequence: Synthetic oligonucleotide
  Antisense strand to SEQ ID NO: 997752
gaagccaagugacaagucc

SEQ ID NO: 997754 - RNA, 19 nt, Artificial Sequence
  Description of Artificial Sequence: Synthetic oligonucleotide
  Sense strand starting at position 621 of SEQ ID NO: 914356
gagugauaaucucgauuuc

SEQ ID NO: 997755 - RNA, 19 nt, Artificial Sequence
  Description of Artificial Sequence: Synthetic oligonucleotide
  Antisense strand to SEQ ID NO: 997754
gaaaucgagauuaucacuc

SEQ ID NO: 997756 - RNA, 19 nt, Artificial Sequence
  Description of Artificial Sequence: Synthetic oligonucleotide
  Sense strand starting at position 631 of SEQ ID NO: 914356
cucgauuucucaggucaac

SEQ ID NO: 997757 - RNA, 19 nt, Artificial Sequence
  Description of Artificial Sequence: Synthetic oligonucleotide
  Antisense strand to SEQ ID NO: 997756
guugaccugagaaaucgag

SEQ ID NO: 997758 - RNA, 19 nt, Artificial Sequence
  Description of Artificial Sequence: Synthetic oligonucleotide
  Sense strand starting at position 640 of SEQ ID NO: 914356
ucaggucaacugugagguu

SEQ ID NO: 997759 - RNA, 19 nt, Artificial Sequence
  Description of Artificial Sequence: Synthetic oligonucleotide
  Antisense strand to SEQ ID NO: 997758
aaccucacaguugaccuga

SEQ ID NO: 997760 - RNA, 19 nt, Artificial Sequence
  Description of Artificial Sequence: Synthetic oligonucleotide
  Sense strand starting at position 659 of SEQ ID NO: 914356
gaaauaagauauugguggu

SEQ ID NO: 997761 - RNA, 19 nt, Artificial Sequence
  Description of Artificial Sequence: Synthetic oligonucleotide
  Antisense strand to SEQ ID NO: 997760
accaccaauaucuuauuuc

SEQ ID NO: 997762 - RNA, 19 nt, Artificial Sequence
  Description of Artificial Sequence: Synthetic oligonucleotide
  Sense strand starting at position 663 of SEQ ID NO: 914356
uaagauauugguggugaca

SEQ ID NO: 997763 - RNA, 19 nt, Artificial Sequence
  Description of Artificial Sequence: Synthetic oligonucleotide
  Antisense strand to SEQ ID NO: 997762
ugucaccaccaauaucuua

SEQ ID NO: 997764 - RNA, 19 nt, Artificial Sequence
  Description of Artificial Sequence: Synthetic oligonucleotide
  Sense strand starting at position 782 of SEQ ID NO: 914356
aggagaggcccgugugcua

SEQ ID NO: 997765 - RNA, 19 nt, Artificial Sequence
  Description of Artificial Sequence: Synthetic oligonucleotide
  Antisense strand to SEQ ID NO: 997764
uagcacacgggccucuccu

SEQ ID NO: 997766 - RNA, 19 nt, Artificial Sequence
  Description of Artificial Sequence: Synthetic oligonucleotide
  Sense strand starting at position 803 of SEQ ID NO: 914356
gcugcuuccugagcccaaa

SEQ ID NO: 997767 - RNA, 19 nt, Artificial Sequence
  Description of Artificial Sequence: Synthetic oligonucleotide
  Antisense strand to SEQ ID NO: 997766
uuugggcucaggaagcagc

SEQ ID NO: 997768 - RNA, 19 nt, Artificial Sequence
  Description of Artificial Sequence: Synthetic oligonucleotide
  Sense strand starting at position 806 of SEQ ID NO: 914356
gcuuccugagcccaaagaa

SEQ ID NO: 997769 - RNA, 19 nt, Artificial Sequence
  Description of Artificial Sequence: Synthetic oligonucleotide
  Antisense strand to SEQ ID NO: 997768
uucuuugggcucaggaagc

SEQ ID NO: 997770 - RNA, 19 nt, Artificial Sequence
  Description of Artificial Sequence: Synthetic oligonucleotide
  Sense strand starting at position 847 of SEQ ID NO: 914356
ccagguuagaaguggacuu

SEQ ID NO: 997771 - RNA, 19 nt, Artificial Sequence
  Description of Artificial Sequence: Synthetic oligonucleotide
  Antisense strand to SEQ ID NO: 997770
aaguccacuucuaaccugg

SEQ ID NO: 997772 - RNA, 19 nt, Artificial Sequence
  Description of Artificial Sequence: Synthetic oligonucleotide
  Sense strand starting at position 1869 of SEQ ID NO: 914356
gcaaccaugucauuaauug

SEQ ID NO: 997773 - RNA, 19 nt, Artificial Sequence
  Description of Artificial Sequence: Synthetic oligonucleotide
  Antisense strand to SEQ ID NO: 997772
caauuaaugacaugguugc

SEQ ID NO: 997774 - RNA, 19 nt, Artificial Sequence
  Description of Artificial Sequence: Synthetic oligonucleotide
  Sense strand starting at position 1878 of SEQ ID NO: 914356
ucauuaauugcagguuaaa

SEQ ID NO: 997775 - RNA, 19 nt, Artificial Sequence
  Description of Artificial Sequence: Synthetic oligonucleotide
  Antisense strand to SEQ ID NO: 997774
uuuaaccugcaauuaauga

SEQ ID NO: 997776 - RNA, 19 nt, Artificial Sequence
  Description of Artificial Sequence: Synthetic oligonucleotide
  Sense strand starting at position 1915 of SEQ ID NO: 914356
ccaaauucccugugguaga

SEQ ID NO: 997777 - RNA, 19 nt, Artificial Sequence
  Description of Artificial Sequence: Synthetic oligonucleotide
  Antisense strand to SEQ ID NO: 997776
ucuaccacagggaauuugg

SEQ ID NO: 997778 - RNA, 19 nt, Artificial Sequence
  Description of Artificial Sequence: Synthetic oligonucleotide
  Sense strand starting at position 1928 of SEQ ID NO: 914356
gguagaauuccaggccugu

SEQ ID NO: 997779 - RNA, 19 nt, Artificial Sequence
  Description of Artificial Sequence: Synthetic oligonucleotide
  Antisense strand to SEQ ID NO: 997778
acaggccuggaauucuacc

SEQ ID NO: 997780 - RNA, 19 nt, Artificial Sequence
  Description of Artificial Sequence: Synthetic oligonucleotide
  Sense strand starting at position 2078 of SEQ ID NO: 914356
ccgcccuucucugugcaaa

SEQ ID NO: 997781 - RNA, 19 nt, Artificial Sequence
  Description of Artificial Sequence: Synthetic oligonucleotide
  Antisense strand to SEQ ID NO: 997780
uuugcacagagaagggcgg

SEQ ID NO: 997782 - RNA, 19 nt, Artificial Sequence
  Description of Artificial Sequence: Synthetic oligonucleotide
  Sense strand starting at position 2079 of SEQ ID NO: 914356
cgcccuucucugugcaaau

SEQ ID NO: 997783 - RNA, 19 nt, Artificial Sequence
  Description of Artificial Sequence: Synthetic oligonucleotide
  Antisense strand to SEQ ID NO: 997782
auuugcacagagaagggcg

SEQ ID NO: 997784 - RNA, 19 nt, Artificial Sequence
  Description of Artificial Sequence: Synthetic oligonucleotide
  Sense strand starting at position 2127 of SEQ ID NO: 914356
augucauucuguccuagau

SEQ ID NO: 997785 - RNA, 19 nt, Artificial Sequence
  Description of Artificial Sequence: Synthetic oligonucleotide
  Antisense strand to SEQ ID NO: 997784
aucuaggacagaaugacau

SEQ ID NO: 997786 - RNA, 19 nt, Artificial Sequence
  Description of Artificial Sequence: Synthetic oligonucleotide
  Sense strand starting at position 2232 of SEQ ID NO: 914356
cagcaugaguguguucgau

SEQ ID NO: 997787 - RNA, 19 nt, Artificial Sequence
  Description of Artificial Sequence: Synthetic oligonucleotide
  Antisense strand to SEQ ID NO: 997786
aucgaacacacucaugcug

SEQ ID NO: 997788 - RNA, 19 nt, Artificial Sequence
  Description of Artificial Sequence: Synthetic oligonucleotide
  Sense strand starting at position 2234 of SEQ ID NO: 914356
gcaugaguguguucgauuc

SEQ ID NO: 997789 - RNA, 19 nt, Artificial Sequence
  Description of Artificial Sequence: Synthetic oligonucleotide
  Antisense strand to SEQ ID NO: 997788
gaaucgaacacacucaugc

SEQ ID NO: 997790 - RNA, 19 nt, Artificial Sequence
  Description of Artificial Sequence: Synthetic oligonucleotide
  Sense strand starting at position 2240 of SEQ ID NO: 914356
guguguucgauucugcauc

SEQ ID NO: 997791 - RNA, 19 nt, Artificial Sequence
  Description of Artificial Sequence: Synthetic oligonucleotide
  Antisense strand to SEQ ID NO: 997790
gaugcagaaucgaacacac

SEQ ID NO: 997792 - RNA, 19 nt, Artificial Sequence
  Description of Artificial Sequence: Synthetic oligonucleotide
  Sense strand starting at position 2352 of SEQ ID NO: 914356
ugaugacaguaaugguaaa

SEQ ID NO: 997793 - RNA, 19 nt, Artificial Sequence
  Description of Artificial Sequence: Synthetic oligonucleotide
  Antisense strand to SEQ ID NO: 997792
uuuaccauuacugucauca

SEQ ID NO: 997794 - RNA, 19 nt, Artificial Sequence
  Description of Artificial Sequence: Synthetic oligonucleotide
  Sense strand starting at position 2405 of SEQ ID NO: 914356
ggcugaauaaauugaacga

SEQ ID NO: 997795 - RNA, 19 nt, Artificial Sequence
  Description of Artificial Sequence: Synthetic oligonucleotide
  Antisense strand to SEQ ID NO: 997794
ucguucaauuuauucagcc

SEQ ID NO: 997796 - RNA, 19 nt, Artificial Sequence
  Description of Artificial Sequence: Synthetic oligonucleotide
  Sense strand starting at position 2449 of SEQ ID NO: 914356
ucuggacacuuugaaagaa

SEQ ID NO: 997797 - RNA, 19 nt, Artificial Sequence
  Description of Artificial Sequence: Synthetic oligonucleotide
  Antisense strand to SEQ ID NO: 997796
uucuuucaaaguguccaga

SEQ ID NO: 997798 - RNA, 19 nt, Artificial Sequence
  Description of Artificial Sequence: Synthetic oligonucleotide
  Sense strand starting at position 2851 of SEQ ID NO: 914356
cugguuucuacauguggaa

SEQ ID NO: 997799 - RNA, 19 nt, Artificial Sequence
  Description of Artificial Sequence: Synthetic oligonucleotide
  Antisense strand to SEQ ID NO: 997798
uuccacauguagaaaccag

SEQ ID NO: 997800 - RNA, 19 nt, Artificial Sequence
  Description of Artificial Sequence: Synthetic oligonucleotide
  Sense strand starting at position 2853 of SEQ ID NO: 914356
gguuucuacauguggaaug

SEQ ID NO: 997801 - RNA, 19 nt, Artificial Sequence
  Description of Artificial Sequence: Synthetic oligonucleotide
  Antisense strand to SEQ ID NO: 997800
cauuccacauguagaaacc

SEQ ID NO: 997802 - RNA, 19 nt, Artificial Sequence
  Description of Artificial Sequence: Synthetic oligonucleotide
  Sense strand starting at position 3439 of SEQ ID NO: 914356
gaauaugagcccugugggu

SEQ ID NO: 997803 - RNA, 19 nt, Artificial Sequence
  Description of Artificial Sequence: Synthetic oligonucleotide
  Antisense strand to SEQ ID NO: 997802
acccacagggcucauauuc

SEQ ID NO: 997804 - RNA, 19 nt, Artificial Sequence
  Description of Artificial Sequence: Synthetic oligonucleotide
  Sense strand starting at position 3469 of SEQ ID NO: 914356
gggcguuugucuacugugu

SEQ ID NO: 997805 - RNA, 19 nt, Artificial Sequence
  Description of Artificial Sequence: Synthetic oligonucleotide
  Antisense strand to SEQ ID NO: 997804
acacaguagacaaacgccc

SEQ ID NO: 997806 - RNA, 19 nt, Artificial Sequence
  Description of Artificial Sequence: Synthetic oligonucleotide
  Sense strand starting at position 3494 of SEQ ID NO: 914356
cucuauauccagugcuuag

SEQ ID NO: 997807 - RNA, 19 nt, Artificial Sequence
  Description of Artificial Sequence: Synthetic oligonucleotide
  Antisense strand to SEQ ID NO: 997806
cuaagcacuggauauagag

SEQ ID NO: 997808 - RNA, 19 nt, Artificial Sequence
  Description of Artificial Sequence: Synthetic oligonucleotide
  Sense strand starting at position 3531 of SEQ ID NO: 914356
ggagacgcucaauaagcau

SEQ ID NO: 997809 - RNA, 19 nt, Artificial Sequence
  Description of Artificial Sequence: Synthetic oligonucleotide
  Antisense strand to SEQ ID NO: 997808
augcuuauugagcgucucc

SEQ ID NO: 997810 - RNA, 19 nt, Artificial Sequence
  Description of Artificial Sequence: Synthetic oligonucleotide
  Sense strand starting at position 3661 of SEQ ID NO: 914356
cugugucauuuguccgcaa

SEQ ID NO: 997811 - RNA, 19 nt, Artificial Sequence
  Description of Artificial Sequence: Synthetic oligonucleotide
  Antisense strand to SEQ ID NO: 997810
uugcggacaaaugacacag

SEQ ID NO: 997812 - RNA, 19 nt, Artificial Sequence
  Description of Artificial Sequence: Synthetic oligonucleotide
  Sense strand starting at position 3662 of SEQ ID NO: 914356
ugugucauuuguccgcaau

SEQ ID NO: 997813 - RNA, 19 nt, Artificial Sequence
  Description of Artificial Sequence: Synthetic oligonucleotide
  Antisense strand to SEQ ID NO: 997812
auugcggacaaaugacaca

SEQ ID NO: 997814 - RNA, 19 nt, Artificial Sequence
  Description of Artificial Sequence: Synthetic oligonucleotide
  Sense strand starting at position 3663 of SEQ ID NO: 914356
gugucauuuguccgcaaug

SEQ ID NO: 997815 - RNA, 19 nt, Artificial Sequence
  Description of Artificial Sequence: Synthetic oligonucleotide
  Antisense strand to SEQ ID NO: 997814
cauugcggacaaaugacac

SEQ ID NO: 997816 - RNA, 19 nt, Artificial Sequence
  Description of Artificial Sequence: Synthetic oligonucleotide
  Sense strand starting at position 3712 of SEQ ID NO: 914356
gcccauuuguccuuaagcu

SEQ ID NO: 997817 - RNA, 19 nt, Artificial Sequence
  Description of Artificial Sequence: Synthetic oligonucleotide
  Antisense strand to SEQ ID NO: 997816
agcuuaaggacaaaugggc

SEQ ID NO: 997818 - RNA, 19 nt, Artificial Sequence
  Description of Artificial Sequence: Synthetic oligonucleotide
  Sense strand starting at position 3879 of SEQ ID NO: 914356
gggauuggcuaauuagcua

SEQ ID NO: 997819 - RNA, 19 nt, Artificial Sequence
  Description of Artificial Sequence: Synthetic oligonucleotide
  Antisense strand to SEQ ID NO: 997818
uagcuaauuagccaauccc

SEQ ID NO: 997820 - RNA, 19 nt, Artificial Sequence
  Description of Artificial Sequence: Synthetic oligonucleotide
  Sense strand starting at position 3937 of SEQ ID NO: 914356
agcuacaaugcuuggcuaa

SEQ ID NO: 997821 - RNA, 19 nt, Artificial Sequence
  Description of Artificial Sequence: Synthetic oligonucleotide
  Antisense strand to SEQ ID NO: 997820
uuagccaagcauuguagcu

SEQ ID NO: 997822 - RNA, 19 nt, Artificial Sequence
  Description of Artificial Sequence: Synthetic oligonucleotide
  Sense strand starting at position 19 of SEQ ID NO: 914357
aucucaaacuggucuugaa

SEQ ID NO: 997823 - RNA, 19 nt, Artificial Sequence
  Description of Artificial Sequence: Synthetic oligonucleotide
  Antisense strand to SEQ ID NO: 997822
uucaagaccaguuugagau

SEQ ID NO: 997824 - RNA, 19 nt, Artificial Sequence
  Description of Artificial Sequence: Synthetic oligonucleotide
  Sense strand starting at position 263 of SEQ ID NO: 914357
gugugaacuuuccuaacug

SEQ ID NO: 997825 - RNA, 19 nt, Artificial Sequence
  Description of Artificial Sequence: Synthetic oligonucleotide
  Antisense strand to SEQ ID NO: 997824
caguuaggaaaguucacac

SEQ ID NO: 997826 - RNA, 19 nt, Artificial Sequence
  Description of Artificial Sequence: Synthetic oligonucleotide
  Sense strand starting at position 465 of SEQ ID NO: 914357
ggugguagcgaaggaugaa

SEQ ID NO: 997827 - RNA, 19 nt, Artificial Sequence
  Description of Artificial Sequence: Synthetic oligonucleotide
  Antisense strand to SEQ ID NO: 997826
uucauccuucgcuaccacc

SEQ ID NO: 997828 - RNA, 19 nt, Artificial Sequence
  Description of Artificial Sequence: Synthetic oligonucleotide
  Sense strand starting at position 466 of SEQ ID NO: 914357
gugguagcgaaggaugaau

SEQ ID NO: 997829 - RNA, 19 nt, Artificial Sequence
  Description of Artificial Sequence: Synthetic oligonucleotide
  Antisense strand to SEQ ID NO: 997828
auucauccuucgcuaccac

SEQ ID NO: 997830 - RNA, 19 nt, Artificial Sequence
  Description of Artificial Sequence: Synthetic oligonucleotide
  Sense strand starting at position 494 of SEQ ID NO: 914357
guuuauuccgguggaagag

SEQ ID NO: 997831 - RNA, 19 nt, Artificial Sequence
  Description of Artificial Sequence: Synthetic oligonucleotide
  Antisense strand to SEQ ID NO: 997830
cucuuccaccggaauaaac

SEQ ID NO: 997832 - RNA, 19 nt, Artificial Sequence
  Description of Artificial Sequence: Synthetic oligonucleotide
  Sense strand starting at position 495 of SEQ ID NO: 914357
uuuauuccgguggaagagu

SEQ ID NO: 997833 - RNA, 19 nt, Artificial Sequence
  Description of Artificial Sequence: Synthetic oligonucleotide
  Antisense strand to SEQ ID NO: 997832
acucuuccaccggaauaaa

SEQ ID NO: 997834 - RNA, 19 nt, Artificial Sequence
  Description of Artificial Sequence: Synthetic oligonucleotide
  Sense strand starting at position 534 of SEQ ID NO: 914357
ccuuguacccugggaucaa

SEQ ID NO: 997835 - RNA, 19 nt, Artificial Sequence
  Description of Artificial Sequence: Synthetic oligonucleotide
  Antisense strand to SEQ ID NO: 997834
uugaucccaggguacaagg

SEQ ID NO: 997836 - RNA, 19 nt, Artificial Sequence
  Description of Artificial Sequence: Synthetic oligonucleotide
  Sense strand starting at position 875 of SEQ ID NO: 914357
aaccauggcccagggaauu

SEQ ID NO: 997837 - RNA, 19 nt, Artificial Sequence
  Description of Artificial Sequence: Synthetic oligonucleotide
  Antisense strand to SEQ ID NO: 997836
aauucccugggccaugguu

SEQ ID NO: 997838 - RNA, 19 nt, Artificial Sequence
  Description of Artificial Sequence: Synthetic oligonucleotide
  Sense strand starting at position 1268 of SEQ ID NO: 914357
gugacaugagcucagcuua

SEQ ID NO: 997839 - RNA, 19 nt, Artificial Sequence
  Description of Artificial Sequence: Synthetic oligonucleotide
  Antisense strand to SEQ ID NO: 997838
uaagcugagcucaugucac

SEQ ID NO: 997840 - RNA, 19 nt, Artificial Sequence
  Description of Artificial Sequence: Synthetic oligonucleotide
  Sense strand starting at position 1608 of SEQ ID NO: 914357
cuggaucugcaaugugaga

SEQ ID NO: 997841 - RNA, 19 nt, Artificial Sequence
  Description of Artificial Sequence: Synthetic oligonucleotide
  Antisense strand to SEQ ID NO: 997840
ucucacauugcagauccag

SEQ ID NO: 997842 - RNA, 19 nt, Artificial Sequence
  Description of Artificial Sequence: Synthetic oligonucleotide
  Sense strand starting at position 1706 of SEQ ID NO: 914357
ugucacacugcucagagua

SEQ ID NO: 997843 - RNA, 19 nt, Artificial Sequence
  Description of Artificial Sequence: Synthetic oligonucleotide
  Antisense strand to SEQ ID NO: 997842
uacucugagcagugugaca

SEQ ID NO: 997844 - RNA, 19 nt, Artificial Sequence
  Description of Artificial Sequence: Synthetic oligonucleotide
  Sense strand starting at position 1719 of SEQ ID NO: 914357
agaguauagagcugggacu

SEQ ID NO: 997845 - RNA, 19 nt, Artificial Sequence
  Description of Artificial Sequence: Synthetic oligonucleotide
  Antisense strand to SEQ ID NO: 997844
agucccagcucuauacucu

SEQ ID NO: 997846 - RNA, 19 nt, Artificial Sequence
  Description of Artificial Sequence: Synthetic oligonucleotide
  Sense strand starting at position 1720 of SEQ ID NO: 914357
gaguauagagcugggacua

SEQ ID NO: 997847 - RNA, 19 nt, Artificial Sequence
  Description of Artificial Sequence: Synthetic oligonucleotide
  Antisense strand to SEQ ID NO: 997846
uagucccagcucuauacuc

SEQ ID NO: 997848 - RNA, 19 nt, Artificial Sequence
  Description of Artificial Sequence: Synthetic oligonucleotide
  Sense strand starting at position 2051 of SEQ ID NO: 914357
gcuagaauuuccuaacaug

SEQ ID NO: 997849 - RNA, 19 nt, Artificial Sequence
  Description of Artificial Sequence: Synthetic oligonucleotide
  Antisense strand to SEQ ID NO: 997848
cauguuaggaaauucuagc

SEQ ID NO: 997850 - RNA, 19 nt, Artificial Sequence
  Description of Artificial Sequence: Synthetic oligonucleotide
  Sense strand starting at position 2146 of SEQ ID NO: 914357
guaugaggaggguguucua

SEQ ID NO: 997851 - RNA, 19 nt, Artificial Sequence
  Description of Artificial Sequence: Synthetic oligonucleotide
  Antisense strand to SEQ ID NO: 997850
uagaacacccuccucauac

SEQ ID NO: 997852 - RNA, 19 nt, Artificial Sequence
  Description of Artificial Sequence: Synthetic oligonucleotide
  Sense strand starting at position 2288 of SEQ ID NO: 914357
auuggagcuguccaacuuu

SEQ ID NO: 997853 - RNA, 19 nt, Artificial Sequence
  Description of Artificial Sequence: Synthetic oligonucleotide
  Antisense strand to SEQ ID NO: 997852
aaaguuggacagcuccaau

SEQ ID NO: 997854 - RNA, 19 nt, Artificial Sequence
  Description of Artificial Sequence: Synthetic oligonucleotide
  Sense strand starting at position 2375 of SEQ ID NO: 914357
aggcucauugcaggaacua

SEQ ID NO: 997855 - RNA, 19 nt, Artificial Sequence
  Description of Artificial Sequence: Synthetic oligonucleotide
  Antisense strand to SEQ ID NO: 997854
uaguuccugcaaugagccu

SEQ ID NO: 997856 - RNA, 19 nt, Artificial Sequence
  Description of Artificial Sequence: Synthetic oligonucleotide
  Sense strand starting at position 2376 of SEQ ID NO: 914357
ggcucauugcaggaacuaa

SEQ ID NO: 997857 - RNA, 19 nt, Artificial Sequence
  Description of Artificial Sequence: Synthetic oligonucleotide
  Antisense strand to SEQ ID NO: 997856
uuaguuccugcaaugagcc

SEQ ID NO: 997858 - RNA, 19 nt, Artificial Sequence
  Description of Artificial Sequence: Synthetic oligonucleotide
  Sense strand starting at position 2435 of SEQ ID NO: 914357
auggaagcaugucugcaaa

SEQ ID NO: 997859 - RNA, 19 nt, Artificial Sequence
  Description of Artificial Sequence: Synthetic oligonucleotide
  Antisense strand to SEQ ID NO: 997858
uuugcagacaugcuuccau

SEQ ID NO: 997860 - RNA, 19 nt, Artificial Sequence
  Description of Artificial Sequence: Synthetic oligonucleotide
  Sense strand starting at position 2570 of SEQ ID NO: 914357
ugacuuggguucguaauuu

SEQ ID NO: 997861 - RNA, 19 nt, Artificial Sequence
  Description of Artificial Sequence: Synthetic oligonucleotide
  Antisense strand to SEQ ID NO: 997860
aaauuacgaacccaaguca

SEQ ID NO: 997862 - RNA, 19 nt, Artificial Sequence
  Description of Artificial Sequence: Synthetic oligonucleotide
  Sense strand starting at position 2603 of SEQ ID NO: 914357
uuuccaaaucuguaaagug

SEQ ID NO: 997863 - RNA, 19 nt, Artificial Sequence
  Description of Artificial Sequence: Synthetic oligonucleotide
  Antisense strand to SEQ ID NO: 997862
cacuuuacagauuuggaaa

SEQ ID NO: 997864 - RNA, 19 nt, Artificial Sequence
  Description of Artificial Sequence: Synthetic oligonucleotide
  Sense strand starting at position 2997 of SEQ ID NO: 914357
cuuguuguaucucuaagag

SEQ ID NO: 997865 - RNA, 19 nt, Artificial Sequence
  Description of Artificial Sequence: Synthetic oligonucleotide
  Antisense strand to SEQ ID NO: 997864
cucuuagagauacaacaag

SEQ ID NO: 997866 - RNA, 19 nt, Artificial Sequence
  Description of Artificial Sequence: Synthetic oligonucleotide
  Sense strand starting at position 3057 of SEQ ID NO: 914357
aguaauuccuguccaagaa

SEQ ID NO: 997867 - RNA, 19 nt, Artificial Sequence
  Description of Artificial Sequence: Synthetic oligonucleotide
  Antisense strand to SEQ ID NO: 997866
uucuuggacaggaauuacu

SEQ ID NO: 997868 - RNA, 19 nt, Artificial Sequence
  Description of Artificial Sequence: Synthetic oligonucleotide
  Sense strand starting at position 3058 of SEQ ID NO: 914357
guaauuccuguccaagaac

SEQ ID NO: 997869 - RNA, 19 nt, Artificial Sequence
  Description of Artificial Sequence: Synthetic oligonucleotide
  Antisense strand to SEQ ID NO: 997868
guucuuggacaggaauuac

SEQ ID NO: 997870 - RNA, 19 nt, Artificial Sequence
  Description of Artificial Sequence: Synthetic oligonucleotide
  Sense strand starting at position 3126 of SEQ ID NO: 914357
uggaguuguaccugagacc

SEQ ID NO: 997871 - RNA, 19 nt, Artificial Sequence
  Description of Artificial Sequence: Synthetic oligonucleotide
  Antisense strand to SEQ ID NO: 997870
ggucucagguacaacucca

SEQ ID NO: 997872 - RNA, 19 nt, Artificial Sequence
  Description of Artificial Sequence: Synthetic oligonucleotide
  Sense strand starting at position 3127 of SEQ ID NO: 914357
ggaguuguaccugagaccu

SEQ ID NO: 997873 - RNA, 19 nt, Artificial Sequence
  Description of Artificial Sequence: Synthetic oligonucleotide
  Antisense strand to SEQ ID NO: 997872
aggucucagguacaacucc

SEQ ID NO: 997874 - RNA, 19 nt, Artificial Sequence
  Description of Artificial Sequence: Synthetic oligonucleotide
  Sense strand starting at position 3169 of SEQ ID NO: 914357
guaucacaagaauggcaaa

SEQ ID NO: 997875 - RNA, 19 nt, Artificial Sequence
  Description of Artificial Sequence: Synthetic oligonucleotide
  Antisense strand to SEQ ID NO: 997874
uuugccauucuugugauac

SEQ ID NO: 997876 - RNA, 19 nt, Artificial Sequence
  Description of Artificial Sequence: Synthetic oligonucleotide
  Sense strand starting at position 3275 of SEQ ID NO: 914357
acugcaguugauuagcaau

SEQ ID NO: 997877 - RNA, 19 nt, Artificial Sequence
  Description of Artificial Sequence: Synthetic oligonucleotide
  Antisense strand to SEQ ID NO: 997876
auugcuaaucaacugcagu

SEQ ID NO: 997878 - RNA, 19 nt, Artificial Sequence
  Description of Artificial Sequence: Synthetic oligonucleotide
  Sense strand starting at position 3298 of SEQ ID NO: 914357
gccacaccaugaucgauua

SEQ ID NO: 997879 - RNA, 19 nt, Artificial Sequence
  Description of Artificial Sequence: Synthetic oligonucleotide
  Antisense strand to SEQ ID NO: 997878
uaaucgaucaugguguggc

SEQ ID NO: 997880 - RNA, 19 nt, Artificial Sequence
  Description of Artificial Sequence: Synthetic oligonucleotide
  Sense strand starting at position 3471 of SEQ ID NO: 914357
caaagauaugcuggugauc

SEQ ID NO: 997881 - RNA, 19 nt, Artificial Sequence
  Description of Artificial Sequence: Synthetic oligonucleotide
  Antisense strand to SEQ ID NO: 997880
gaucaccagcauaucuuug

SEQ ID NO: 997882 - RNA, 19 nt, Artificial Sequence
  Description of Artificial Sequence: Synthetic oligonucleotide
  Sense strand starting at position 3474 of SEQ ID NO: 914357
agauaugcuggugaucaca

SEQ ID NO: 997883 - RNA, 19 nt, Artificial Sequence
  Description of Artificial Sequence: Synthetic oligonucleotide
  Antisense strand to SEQ ID NO: 997882
ugugaucaccagcauaucu

SEQ ID NO: 997884 - RNA, 19 nt, Artificial Sequence
  Description of Artificial Sequence: Synthetic oligonucleotide
  Sense strand starting at position 3476 of SEQ ID NO: 914357
auaugcuggugaucacaaa

SEQ ID NO: 997885 - RNA, 19 nt, Artificial Sequence
  Description of Artificial Sequence: Synthetic oligonucleotide
  Antisense strand to SEQ ID NO: 997884
uuugugaucaccagcauau

SEQ ID NO: 997886 - RNA, 19 nt, Artificial Sequence
  Description of Artificial Sequence: Synthetic oligonucleotide
  Sense strand starting at position 3529 of SEQ ID NO: 914357
gggaaagaaugagaugaga

SEQ ID NO: 997887 - RNA, 19 nt, Artificial Sequence
  Description of Artificial Sequence: Synthetic oligonucleotide
  Antisense strand to SEQ ID NO: 997886
ucucaucucauucuuuccc

SEQ ID NO: 997888 - RNA, 19 nt, Artificial Sequence
  Description of Artificial Sequence: Synthetic oligonucleotide
  Sense strand starting at position 3547 of SEQ ID NO: 914357
aagaaagcucuugggauau

SEQ ID NO: 997889 - RNA, 19 nt, Artificial Sequence
  Description of Artificial Sequence: Synthetic oligonucleotide
  Antisense strand to SEQ ID NO: 997888
auaucccaagagcuuucuu

SEQ ID NO: 997890 - RNA, 19 nt, Artificial Sequence
  Description of Artificial Sequence: Synthetic oligonucleotide
  Sense strand starting at position 3551 of SEQ ID NO: 914357
aagcucuugggauauugua

SEQ ID NO: 997891 - RNA, 19 nt, Artificial Sequence
  Description of Artificial Sequence: Synthetic oligonucleotide
  Antisense strand to SEQ ID NO: 997890
uacaauaucccaagagcuu

SEQ ID NO: 997892 - RNA, 19 nt, Artificial Sequence
  Description of Artificial Sequence: Synthetic oligonucleotide
  Sense strand starting at position 3611 of SEQ ID NO: 914357
ugucauauucuggauucua

SEQ ID NO: 997893 - RNA, 19 nt, Artificial Sequence
  Description of Artificial Sequence: Synthetic oligonucleotide
  Antisense strand to SEQ ID NO: 997892
uagaauccagaauaugaca

SEQ ID NO: 997894 - RNA, 19 nt, Artificial Sequence
  Description of Artificial Sequence: Synthetic oligonucleotide
  Sense strand starting at position 3667 of SEQ ID NO: 914357
gugggugagauugggcaua

SEQ ID NO: 997895 - RNA, 19 nt, Artificial Sequence
  Description of Artificial Sequence: Synthetic oligonucleotide
  Antisense strand to SEQ ID NO: 997894
uaugcccaaucucacccac

SEQ ID NO: 997896 - RNA, 19 nt, Artificial Sequence
  Description of Artificial Sequence: Synthetic oligonucleotide
  Sense strand starting at position 3669 of SEQ ID NO: 914357
gggugagauugggcauaag

SEQ ID NO: 997897 - RNA, 19 nt, Artificial Sequence
  Description of Artificial Sequence: Synthetic oligonucleotide
  Antisense strand to SEQ ID NO: 997896
cuuaugcccaaucucaccc

SEQ ID NO: 997898 - RNA, 19 nt, Artificial Sequence
  Description of Artificial Sequence: Synthetic oligonucleotide
  Sense strand starting at position 3778 of SEQ ID NO: 914357
gaauuauuguuuccuggaa

SEQ ID NO: 997899 - RNA, 19 nt, Artificial Sequence
  Description of Artificial Sequence: Synthetic oligonucleotide
  Antisense strand to SEQ ID NO: 997898
uuccaggaaacaauaauuc

SEQ ID NO: 997900 - RNA, 19 nt, Artificial Sequence
  Description of Artificial Sequence: Synthetic oligonucleotide
  Sense strand starting at position 3893 of SEQ ID NO: 914357
gcaugaugugacuacgaag

SEQ ID NO: 997901 - RNA, 19 nt, Artificial Sequence
  Description of Artificial Sequence: Synthetic oligonucleotide
  Antisense strand to SEQ ID NO: 997900
cuucguagucacaucaugc

SEQ ID NO: 997902 - RNA, 19 nt, Artificial Sequence
  Description of Artificial Sequence: Synthetic oligonucleotide
  Sense strand starting at position 129 of SEQ ID NO: 914358
uugacaucauuugaguaca

SEQ ID NO: 997903 - RNA, 19 nt, Artificial Sequence
  Description of Artificial Sequence: Synthetic oligonucleotide
  Antisense strand to SEQ ID NO: 997902
uguacucaaaugaugucaa

SEQ ID NO: 997904 - RNA, 19 nt, Artificial Sequence
  Description of Artificial Sequence: Synthetic oligonucleotide
  Sense strand starting at position 244 of SEQ ID NO: 914358
uuuaauaaguggcugagau

SEQ ID NO: 997905 - RNA, 19 nt, Artificial Sequence
  Description of Artificial Sequence: Synthetic oligonucleotide
  Antisense strand to SEQ ID NO: 997904
aucucagccacuuauuaaa

SEQ ID NO: 997906 - RNA, 19 nt, Artificial Sequence
  Description of Artificial Sequence: Synthetic oligonucleotide
  Sense strand starting at position 245 of SEQ ID NO: 914358
uuaauaaguggcugagaua

SEQ ID NO: 997907 - RNA, 19 nt, Artificial Sequence
  Description of Artificial Sequence: Synthetic oligonucleotide
  Antisense strand to SEQ ID NO: 997906
uaucucagccacuuauuaa

SEQ ID NO: 997908 - RNA, 19 nt, Artificial Sequence
  Description of Artificial Sequence: Synthetic oligonucleotide
  Sense strand starting at position 273 of SEQ ID NO: 914358
uugugaauauauucucaug

SEQ ID NO: 997909 - RNA, 19 nt, Artificial Sequence
  Description of Artificial Sequence: Synthetic oligonucleotide
  Antisense strand to SEQ ID NO: 997908
caugagaauauauucacaa

SEQ ID NO: 997910 - RNA, 19 nt, Artificial Sequence
  Description of Artificial Sequence: Synthetic oligonucleotide
  Sense strand starting at position 275 of SEQ ID NO: 914358
gugaauauauucucaugug

SEQ ID NO: 997911 - RNA, 19 nt, Artificial Sequence
  Description of Artificial Sequence: Synthetic oligonucleotide
  Antisense strand to SEQ ID NO: 997910
cacaugagaauauauucac

SEQ ID NO: 997912 - RNA, 19 nt, Artificial Sequence
  Description of Artificial Sequence: Synthetic oligonucleotide
  Sense strand starting at position 464 of SEQ ID NO: 914358
auacacauacucugaguua

SEQ ID NO: 997913 - RNA, 19 nt, Artificial Sequence
  Description of Artificial Sequence: Synthetic oligonucleotide
  Antisense strand to SEQ ID NO: 997912
uaacucagaguauguguau

SEQ ID NO: 997914 - RNA, 19 nt, Artificial Sequence
  Description of Artificial Sequence: Synthetic oligonucleotide
  Sense strand starting at position 513 of SEQ ID NO: 914358
aacccaagaguuugagauu

SEQ ID NO: 997915 - RNA, 19 nt, Artificial Sequence
  Description of Artificial Sequence: Synthetic oligonucleotide
  Antisense strand to SEQ ID NO: 997914
aaucucaaacucuuggguu

SEQ ID NO: 997916 - RNA, 19 nt, Artificial Sequence
  Description of Artificial Sequence: Synthetic oligonucleotide
  Sense strand starting at position 802 of SEQ ID NO: 914358
augcaaaguacuggguuua

SEQ ID NO: 997917 - RNA, 19 nt, Artificial Sequence
  Description of Artificial Sequence: Synthetic oligonucleotide
  Antisense strand to SEQ ID NO: 997916
uaaacccaguacuuugcau

SEQ ID NO: 997918 - RNA, 19 nt, Artificial Sequence
  Description of Artificial Sequence: Synthetic oligonucleotide
  Sense strand starting at position 943 of SEQ ID NO: 914358
aauugaagaugugcauagu

SEQ ID NO: 997919 - RNA, 19 nt, Artificial Sequence
  Description of Artificial Sequence: Synthetic oligonucleotide
  Antisense strand to SEQ ID NO: 997918
acuaugcacaucuucaauu

SEQ ID NO: 997920 - RNA, 19 nt, Artificial Sequence
  Description of Artificial Sequence: Synthetic oligonucleotide
  Sense strand starting at position 981 of SEQ ID NO: 914358
uuuaaagaggcauguuaua

SEQ ID NO: 997921 - RNA, 19 nt, Artificial Sequence
  Description of Artificial Sequence: Synthetic oligonucleotide
  Antisense strand to SEQ ID NO: 997920
uauaacaugccucuuuaaa

SEQ ID NO: 997922 - RNA, 19 nt, Artificial Sequence
  Description of Artificial Sequence: Synthetic oligonucleotide
  Sense strand starting at position 1168 of SEQ ID NO: 914358
ucuggaucagcuuagggau

SEQ ID NO: 997923 - RNA, 19 nt, Artificial Sequence
  Description of Artificial Sequence: Synthetic oligonucleotide
  Antisense strand to SEQ ID NO: 997922
aucccuaagcugauccaga

SEQ ID NO: 997924 - RNA, 19 nt, Artificial Sequence
  Description of Artificial Sequence: Synthetic oligonucleotide
  Sense strand starting at position 1196 of SEQ ID NO: 914358
auuugacuaucagacuaag

SEQ ID NO: 997925 - RNA, 19 nt, Artificial Sequence
  Description of Artificial Sequence: Synthetic oligonucleotide
  Antisense strand to SEQ ID NO: 997924
cuuagucugauagucaaau

SEQ ID NO: 997926 - RNA, 19 nt, Artificial Sequence
  Description of Artificial Sequence: Synthetic oligonucleotide
  Sense strand starting at position 1283 of SEQ ID NO: 914358
auucuaaaugcuugaugga

SEQ ID NO: 997927 - RNA, 19 nt, Artificial Sequence
  Description of Artificial Sequence: Synthetic oligonucleotide
  Antisense strand to SEQ ID NO: 997926
uccaucaagcauuuagaau

SEQ ID NO: 997928 - RNA, 19 nt, Artificial Sequence
  Description of Artificial Sequence: Synthetic oligonucleotide
  Sense strand starting at position 1317 of SEQ ID NO: 914358
cccacaugacugugagcua

SEQ ID NO: 997929 - RNA, 19 nt, Artificial Sequence
  Description of Artificial Sequence: Synthetic oligonucleotide
  Antisense strand to SEQ ID NO: 997928
uagcucacagucauguggg

SEQ ID NO: 997930 - RNA, 19 nt, Artificial Sequence
  Description of Artificial Sequence: Synthetic oligonucleotide
  Sense strand starting at position 1320 of SEQ ID NO: 914358
acaugacugugagcuacau

SEQ ID NO: 997931 - RNA, 19 nt, Artificial Sequence
  Description of Artificial Sequence: Synthetic oligonucleotide
  Antisense strand to SEQ ID NO: 997930
auguagcucacagucaugu

SEQ ID NO: 997932 - RNA, 19 nt, Artificial Sequence
  Description of Artificial Sequence: Synthetic oligonucleotide
  Sense strand starting at position 1324 of SEQ ID NO: 914358
gacugugagcuacauguga

SEQ ID NO: 997933 - RNA, 19 nt, Artificial Sequence
  Description of Artificial Sequence: Synthetic oligonucleotide
  Antisense strand to SEQ ID NO: 997932
ucacauguagcucacaguc

SEQ ID NO: 997934 - RNA, 19 nt, Artificial Sequence
  Description of Artificial Sequence: Synthetic oligonucleotide
  Sense strand starting at position 1435 of SEQ ID NO: 914358
ucauaccuguucucagaua

SEQ ID NO: 997935 - RNA, 19 nt, Artificial Sequence
  Description of Artificial Sequence: Synthetic oligonucleotide
  Antisense strand to SEQ ID NO: 997934
uaucugagaacagguauga

SEQ ID NO: 997936 - RNA, 19 nt, Artificial Sequence
  Description of Artificial Sequence: Synthetic oligonucleotide
  Sense strand starting at position 1447 of SEQ ID NO: 914358
ucagauaugcuuuacacag

SEQ ID NO: 997937 - RNA, 19 nt, Artificial Sequence
  Description of Artificial Sequence: Synthetic oligonucleotide
  Antisense strand to SEQ ID NO: 997936
cuguguaaagcauaucuga

SEQ ID NO: 997938 - RNA, 19 nt, Artificial Sequence
  Description of Artificial Sequence: Synthetic oligonucleotide
  Sense strand starting at position 1896 of SEQ ID NO: 914358
uuuggaaucuuucuugaua

SEQ ID NO: 997939 - RNA, 19 nt, Artificial Sequence
  Description of Artificial Sequence: Synthetic oligonucleotide
  Antisense strand to SEQ ID NO: 997938
uaucaagaaagauuccaaa

SEQ ID NO: 997940 - RNA, 19 nt, Artificial Sequence
  Description of Artificial Sequence: Synthetic oligonucleotide
  Sense strand starting at position 1897 of SEQ ID NO: 914358
uuggaaucuuucuugauag

SEQ ID NO: 997941 - RNA, 19 nt, Artificial Sequence
  Description of Artificial Sequence: Synthetic oligonucleotide
  Antisense strand to SEQ ID NO: 997940
cuaucaagaaagauuccaa

SEQ ID NO: 997942 - RNA, 19 nt, Artificial Sequence
  Description of Artificial Sequence: Synthetic oligonucleotide
  Sense strand starting at position 2053 of SEQ ID NO: 914358
gaggcauugagaugggcau

SEQ ID NO: 997943 - RNA, 19 nt, Artificial Sequence
  Description of Artificial Sequence: Synthetic oligonucleotide
  Antisense strand to SEQ ID NO: 997942
augcccaucucaaugccuc

SEQ ID NO: 997944 - RNA, 19 nt, Artificial Sequence
  Description of Artificial Sequence: Synthetic oligonucleotide
  Sense strand starting at position 2054 of SEQ ID NO: 914358
aggcauugagaugggcauu

SEQ ID NO: 997945 - RNA, 19 nt, Artificial Sequence
  Description of Artificial Sequence: Synthetic oligonucleotide
  Antisense strand to SEQ ID NO: 997944
aaugcccaucucaaugccu

SEQ ID NO: 997946 - RNA, 19 nt, Artificial Sequence
  Description of Artificial Sequence: Synthetic oligonucleotide
  Sense strand starting at position 2117 of SEQ ID NO: 914358
gguaucuacuugucaacag

SEQ ID NO: 997947 - RNA, 19 nt, Artificial Sequence
  Description of Artificial Sequence: Synthetic oligonucleotide
  Antisense strand to SEQ ID NO: 997946
cuguugacaaguagauacc

SEQ ID NO: 997948 - RNA, 19 nt, Artificial Sequence
  Description of Artificial Sequence: Synthetic oligonucleotide
  Sense strand starting at position 2121 of SEQ ID NO: 914358
ucuacuugucaacagagua

SEQ ID NO: 997949 - RNA, 19 nt, Artificial Sequence
  Description of Artificial Sequence: Synthetic oligonucleotide
  Antisense strand to SEQ ID NO: 997948
uacucuguugacaaguaga

SEQ ID NO: 997950 - RNA, 19 nt, Artificial Sequence
  Description of Artificial Sequence: Synthetic oligonucleotide
  Sense strand starting at position 2134 of SEQ ID NO: 914358
agaguauuccaauaugagc

SEQ ID NO: 997951 - RNA, 19 nt, Artificial Sequence
  Description of Artificial Sequence: Synthetic oligonucleotide
  Antisense strand to SEQ ID NO: 997950
gcucauauuggaauacucu

SEQ ID NO: 997952 - RNA, 19 nt, Artificial Sequence
  Description of Artificial Sequence: Synthetic oligonucleotide
  Sense strand starting at position 2160 of SEQ ID NO: 914358
aagggagcuugaguaguua

SEQ ID NO: 997953 - RNA, 19 nt, Artificial Sequence
  Description of Artificial Sequence: Synthetic oligonucleotide
  Antisense strand to SEQ ID NO: 997952
uaacuacucaagcucccuu

SEQ ID NO: 997954 - RNA, 19 nt, Artificial Sequence
  Description of Artificial Sequence: Synthetic oligonucleotide
  Sense strand starting at position 2172 of SEQ ID NO: 914358
guaguuaucagggacuggu

SEQ ID NO: 997955 - RNA, 19 nt, Artificial Sequence
  Description of Artificial Sequence: Synthetic oligonucleotide
  Antisense strand to SEQ ID NO: 997954
accagucccugauaacuac

SEQ ID NO: 997956 - RNA, 19 nt, Artificial Sequence
  Description of Artificial Sequence: Synthetic oligonucleotide
  Sense strand starting at position 2175 of SEQ ID NO: 914358
guuaucagggacugguaga

SEQ ID NO: 997957 - RNA, 19 nt, Artificial Sequence
  Description of Artificial Sequence: Synthetic oligonucleotide
  Antisense strand to SEQ ID NO: 997956
ucuaccagucccugauaac

SEQ ID NO: 997958 - RNA, 19 nt, Artificial Sequence
  Description of Artificial Sequence: Synthetic oligonucleotide
  Sense strand starting at position 2259 of SEQ ID NO: 914358
guaguuuccagagagcuug

SEQ ID NO: 997959 - RNA, 19 nt, Artificial Sequence
  Description of Artificial Sequence: Synthetic oligonucleotide
  Antisense strand to SEQ ID NO: 997958
caagcucucuggaaacuac

SEQ ID NO: 997960 - RNA, 19 nt, Artificial Sequence
  Description of Artificial Sequence: Synthetic oligonucleotide
  Sense strand starting at position 2300 of SEQ ID NO: 914358
guugcccagugauuugauu

SEQ ID NO: 997961 - RNA, 19 nt, Artificial Sequence
  Description of Artificial Sequence: Synthetic oligonucleotide
  Antisense strand to SEQ ID NO: 997960
aaucaaaucacugggcaac

SEQ ID NO: 997962 - RNA, 19 nt, Artificial Sequence
  Description of Artificial Sequence: Synthetic oligonucleotide
  Sense strand starting at position 2396 of SEQ ID NO: 914358
aggcauacucuuggagagu

SEQ ID NO: 997963 - RNA, 19 nt, Artificial Sequence
  Description of Artificial Sequence: Synthetic oligonucleotide
  Antisense strand to SEQ ID NO: 997962
acucuccaagaguaugccu

SEQ ID NO: 997964 - RNA, 19 nt, Artificial Sequence
  Description of Artificial Sequence: Synthetic oligonucleotide
  Sense strand starting at position 2564 of SEQ ID NO: 914358
uuccuaggcagauguagaa

SEQ ID NO: 997965 - RNA, 19 nt, Artificial Sequence
  Description of Artificial Sequence: Synthetic oligonucleotide
  Antisense strand to SEQ ID NO: 997964
uucuacaucugccuaggaa

SEQ ID NO: 997966 - RNA, 19 nt, Artificial Sequence
  Description of Artificial Sequence: Synthetic oligonucleotide
  Sense strand starting at position 2628 of SEQ ID NO: 914358
gugagugagacucagucaa

SEQ ID NO: 997967 - RNA, 19 nt, Artificial Sequence
  Description of Artificial Sequence: Synthetic oligonucleotide
  Antisense strand to SEQ ID NO: 997966
uugacugagucucacucac

SEQ ID NO: 997968 - RNA, 19 nt, Artificial Sequence
  Description of Artificial Sequence: Synthetic oligonucleotide
  Sense strand starting at position 2947 of SEQ ID NO: 914358
ucauaaaugugaccagcau

SEQ ID NO: 997969 - RNA, 19 nt, Artificial Sequence
  Description of Artificial Sequence: Synthetic oligonucleotide
  Antisense strand to SEQ ID NO: 997968
augcuggucacauuuauga

SEQ ID NO: 997970 - RNA, 19 nt, Artificial Sequence
  Description of Artificial Sequence: Synthetic oligonucleotide
  Sense strand starting at position 2977 of SEQ ID NO: 914358
gguaacugaaguuauaagu

SEQ ID NO: 997971 - RNA, 19 nt, Artificial Sequence
  Description of Artificial Sequence: Synthetic oligonucleotide
  Antisense strand to SEQ ID NO: 997970
acuuauaacuucaguuacc

SEQ ID NO: 997972 - RNA, 19 nt, Artificial Sequence
  Description of Artificial Sequence: Synthetic oligonucleotide
  Sense strand starting at position 3075 of SEQ ID NO: 914358
cuuuguacuuuaguaacaa

SEQ ID NO: 997973 - RNA, 19 nt, Artificial Sequence
  Description of Artificial Sequence: Synthetic oligonucleotide
  Antisense strand to SEQ ID NO: 997972
uuguuacuaaaguacaaag

SEQ ID NO: 997974 - RNA, 19 nt, Artificial Sequence
  Description of Artificial Sequence: Synthetic oligonucleotide
  Sense strand starting at position 3129 of SEQ ID NO: 914358
uuaagaaaguugcugacaa

SEQ ID NO: 997975 - RNA, 19 nt, Artificial Sequence
  Description of Artificial Sequence: Synthetic oligonucleotide
  Antisense strand to SEQ ID NO: 997974
uugucagcaacuuucuuaa

SEQ ID NO: 997976 - RNA, 19 nt, Artificial Sequence
  Description of Artificial Sequence: Synthetic oligonucleotide
  Sense strand starting at position 3142 of SEQ ID NO: 914358
ugacaagaaugugccagau

SEQ ID NO: 997977 - RNA, 19 nt, Artificial Sequence
  Description of Artificial Sequence: Synthetic oligonucleotide
  Antisense strand to SEQ ID NO: 997976
aucuggcacauucuuguca

SEQ ID NO: 997978 - RNA, 19 nt, Artificial Sequence
  Description of Artificial Sequence: Synthetic oligonucleotide
  Sense strand starting at position 3302 of SEQ ID NO: 914358
guaagaagcuucuuaaaug

SEQ ID NO: 997979 - RNA, 19 nt, Artificial Sequence
  Description of Artificial Sequence: Synthetic oligonucleotide
  Antisense strand to SEQ ID NO: 997978
cauuuaagaagcuucuuac

SEQ ID NO: 997980 - RNA, 19 nt, Artificial Sequence
  Description of Artificial Sequence: Synthetic oligonucleotide
  Sense strand starting at position 3773 of SEQ ID NO: 914358
agauccuucccuugacaug

SEQ ID NO: 997981 - RNA, 19 nt, Artificial Sequence
  Description of Artificial Sequence: Synthetic oligonucleotide
  Antisense strand to SEQ ID NO: 997980
caugucaagggaaggaucu

SEQ ID NO: 997982 - RNA, 19 nt, Artificial Sequence
  Description of Artificial Sequence: Synthetic oligonucleotide
  Sense strand starting at position 2 of SEQ ID NO: 914359
ucacuauuguaagcccaga

SEQ ID NO: 997983 - RNA, 19 nt, Artificial Sequence
  Description of Artificial Sequence: Synthetic oligonucleotide
  Antisense strand to SEQ ID NO: 997982
ucugggcuuacaauaguga

SEQ ID NO: 997984 - RNA, 19 nt, Artificial Sequence
  Description of Artificial Sequence: Synthetic oligonucleotide
  Sense strand starting at position 55 of SEQ ID NO: 914359
ggaauaauugucgacagug

SEQ ID NO: 997985 - RNA, 19 nt, Artificial Sequence
  Description of Artificial Sequence: Synthetic oligonucleotide
  Antisense strand to SEQ ID NO: 997984
cacugucgacaauuauucc

SEQ ID NO: 997986 - RNA, 19 nt, Artificial Sequence
  Description of Artificial Sequence: Synthetic oligonucleotide
  Sense strand starting at position 57 of SEQ ID NO: 914359
aauaauugucgacagugua

SEQ ID NO: 997987 - RNA, 19 nt, Artificial Sequence
  Description of Artificial Sequence: Synthetic oligonucleotide
  Antisense strand to SEQ ID NO: 997986
uacacugucgacaauuauu

SEQ ID NO: 997988 - RNA, 19 nt, Artificial Sequence
  Description of Artificial Sequence: Synthetic oligonucleotide
  Sense strand starting at position 95 of SEQ ID NO: 914359
ugaugcauuucugagugua

SEQ ID NO: 997989 - RNA, 19 nt, Artificial Sequence
  Description of Artificial Sequence: Synthetic oligonucleotide
  Antisense strand to SEQ ID NO: 997988
uacacucagaaaugcauca

SEQ ID NO: 997990 - RNA, 19 nt, Artificial Sequence
  Description of Artificial Sequence: Synthetic oligonucleotide
  Sense strand starting at position 97 of SEQ ID NO: 914359
augcauuucugaguguagu

SEQ ID NO: 997991 - RNA, 19 nt, Artificial Sequence
  Description of Artificial Sequence: Synthetic oligonucleotide
  Antisense strand to SEQ ID NO: 997990
acuacacucagaaaugcau

SEQ ID NO: 997992 - RNA, 19 nt, Artificial Sequence
  Description of Artificial Sequence: Synthetic oligonucleotide
  Sense strand starting at position 98 of SEQ ID NO: 914359
ugcauuucugaguguagug

SEQ ID NO: 997993 - RNA, 19 nt, Artificial Sequence
  Description of Artificial Sequence: Synthetic oligonucleotide
  Antisense strand to SEQ ID NO: 997992
cacuacacucagaaaugca

SEQ ID NO: 997994 - RNA, 19 nt, Artificial Sequence
  Description of Artificial Sequence: Synthetic oligonucleotide
  Sense strand starting at position 157 of SEQ ID NO: 914359
cuugcugaauuacugaaua

SEQ ID NO: 997995 - RNA, 19 nt, Artificial Sequence
  Description of Artificial Sequence: Synthetic oligonucleotide
  Antisense strand to SEQ ID NO: 997994
uauucaguaauucagcaag

SEQ ID NO: 997996 - RNA, 19 nt, Artificial Sequence
  Description of Artificial Sequence: Synthetic oligonucleotide
  Sense strand starting at position 270 of SEQ ID NO: 914359
ugauauauccauuguggug

SEQ ID NO: 997997 - RNA, 19 nt, Artificial Sequence
  Description of Artificial Sequence: Synthetic oligonucleotide
  Antisense strand to SEQ ID NO: 997996
caccacaauggauauauca

SEQ ID NO: 997998 - RNA, 19 nt, Artificial Sequence
  Description of Artificial Sequence: Synthetic oligonucleotide
  Sense strand starting at position 304 of SEQ ID NO: 914359
agggcugagcuuugguaga

SEQ ID NO: 997999 - RNA, 19 nt, Artificial Sequence
  Description of Artificial Sequence: Synthetic oligonucleotide
  Antisense strand to SEQ ID NO: 997998
ucuaccaaagcucagcccu

SEQ ID NO: 998000 - RNA, 19 nt, Artificial Sequence
  Description of Artificial Sequence: Synthetic oligonucleotide
  Sense strand starting at position 306 of SEQ ID NO: 914359
ggcugagcuuugguagaaa

SEQ ID NO: 998001 - RNA, 19 nt, Artificial Sequence
  Description of Artificial Sequence: Synthetic oligonucleotide
  Antisense strand to SEQ ID NO: 998000
uuucuaccaaagcucagcc

SEQ ID NO: 998002 - RNA, 19 nt, Artificial Sequence
  Description of Artificial Sequence: Synthetic oligonucleotide
  Sense strand starting at position 443 of SEQ ID NO: 914359
uggaaugucuaguccagaa

SEQ ID NO: 998003 - RNA, 19 nt, Artificial Sequence
  Description of Artificial Sequence: Synthetic oligonucleotide
  Antisense strand to SEQ ID NO: 998002
uucuggacuagacauucca

SEQ ID NO: 998004 - RNA, 19 nt, Artificial Sequence
  Description of Artificial Sequence: Synthetic oligonucleotide
  Sense strand starting at position 900 of SEQ ID NO: 914359
ugggauugcuggccuuaaa

SEQ ID NO: 998005 - RNA, 19 nt, Artificial Sequence
  Description of Artificial Sequence: Synthetic oligonucleotide
  Antisense strand to SEQ ID NO: 998004
uuuaaggccagcaauccca

SEQ ID NO: 998006 - RNA, 19 nt, Artificial Sequence
  Description of Artificial Sequence: Synthetic oligonucleotide
  Sense strand starting at position 1170 of SEQ ID NO: 914359
ggcuuugucuuaguagaau

SEQ ID NO: 998007 - RNA, 19 nt, Artificial Sequence
  Description of Artificial Sequence: Synthetic oligonucleotide
  Antisense strand to SEQ ID NO: 998006
auucuacuaagacaaagcc

SEQ ID NO: 998008 - RNA, 19 nt, Artificial Sequence
  Description of Artificial Sequence: Synthetic oligonucleotide
  Sense strand starting at position 1214 of SEQ ID NO: 914359
cuuucugcagucuguauua

SEQ ID NO: 998009 - RNA, 19 nt, Artificial Sequence
  Description of Artificial Sequence: Synthetic oligonucleotide
  Antisense strand to SEQ ID NO: 998008
uaauacagacugcagaaag

SEQ ID NO: 998010 - RNA, 19 nt, Artificial Sequence
  Description of Artificial Sequence: Synthetic oligonucleotide
  Sense strand starting at position 1303 of SEQ ID NO: 914359
auaugugaauuccagagua

SEQ ID NO: 998011 - RNA, 19 nt, Artificial Sequence
  Description of Artificial Sequence: Synthetic oligonucleotide
  Antisense strand to SEQ ID NO: 998010
uacucuggaauucacauau

SEQ ID NO: 998012 - RNA, 19 nt, Artificial Sequence
  Description of Artificial Sequence: Synthetic oligonucleotide
  Sense strand starting at position 1315 of SEQ ID NO: 914359
cagaguaugcugggccuau

SEQ ID NO: 998013 - RNA, 19 nt, Artificial Sequence
  Description of Artificial Sequence: Synthetic oligonucleotide
  Antisense strand to SEQ ID NO: 998012
auaggcccagcauacucug

SEQ ID NO: 998014 - RNA, 19 nt, Artificial Sequence
  Description of Artificial Sequence: Synthetic oligonucleotide
  Sense strand starting at position 1316 of SEQ ID NO: 914359
agaguaugcugggccuauu

SEQ ID NO: 998015 - RNA, 19 nt, Artificial Sequence
  Description of Artificial Sequence: Synthetic oligonucleotide
  Antisense strand to SEQ ID NO: 998014
aauaggcccagcauacucu

SEQ ID NO: 998016 - RNA, 19 nt, Artificial Sequence
  Description of Artificial Sequence: Synthetic oligonucleotide
  Sense strand starting at position 1395 of SEQ ID NO: 914359
gggugauaugcuuaccuug

SEQ ID NO: 998017 - RNA, 19 nt, Artificial Sequence
  Description of Artificial Sequence: Synthetic oligonucleotide
  Antisense strand to SEQ ID NO: 998016
caagguaagcauaucaccc

SEQ ID NO: 998018 - RNA, 19 nt, Artificial Sequence
  Description of Artificial Sequence: Synthetic oligonucleotide
  Sense strand starting at position 1397 of SEQ ID NO: 914359
gugauaugcuuaccuugua

SEQ ID NO: 998019 - RNA, 19 nt, Artificial Sequence
  Description of Artificial Sequence: Synthetic oligonucleotide
  Antisense strand to SEQ ID NO: 998018
uacaagguaagcauaucac

SEQ ID NO: 998020 - RNA, 19 nt, Artificial Sequence
  Description of Artificial Sequence: Synthetic oligonucleotide
  Sense strand starting at position 1398 of SEQ ID NO: 914359
ugauaugcuuaccuuguau

SEQ ID NO: 998021 - RNA, 19 nt, Artificial Sequence
  Description of Artificial Sequence: Synthetic oligonucleotide
  Antisense strand to SEQ ID NO: 998020
auacaagguaagcauauca

SEQ ID NO: 998022 - RNA, 19 nt, Artificial Sequence
  Description of Artificial Sequence: Synthetic oligonucleotide
  Sense strand starting at position 1474 of SEQ ID NO: 914359
cucagaaucccagaggcuu

SEQ ID NO: 998023 - RNA, 19 nt, Artificial Sequence
  Description of Artificial Sequence: Synthetic oligonucleotide
  Antisense strand to SEQ ID NO: 998022
aagccucugggauucugag

SEQ ID NO: 998024 - RNA, 19 nt, Artificial Sequence
  Description of Artificial Sequence: Synthetic oligonucleotide
  Sense strand starting at position 1661 of SEQ ID NO: 914359
gggagugagucccauggga

SEQ ID NO: 998025 - RNA, 19 nt, Artificial Sequence
  Description of Artificial Sequence: Synthetic oligonucleotide
  Antisense strand to SEQ ID NO: 998024
ucccaugggacucacuccc

SEQ ID NO: 998026 - RNA, 19 nt, Artificial Sequence
  Description of Artificial Sequence: Synthetic oligonucleotide
  Sense strand starting at position 1709 of SEQ ID NO: 914359
acaggucacucugaacaua

SEQ ID NO: 998027 - RNA, 19 nt, Artificial Sequence
  Description of Artificial Sequence: Synthetic oligonucleotide
  Antisense strand to SEQ ID NO: 998026
uauguucagagugaccugu

SEQ ID NO: 998028 - RNA, 19 nt, Artificial Sequence
  Description of Artificial Sequence: Synthetic oligonucleotide
  Sense strand starting at position 1832 of SEQ ID NO: 914359
ucuuaagaguccuuccaga

SEQ ID NO: 998029 - RNA, 19 nt, Artificial Sequence
  Description of Artificial Sequence: Synthetic oligonucleotide
  Antisense strand to SEQ ID NO: 998028
ucuggaaggacucuuaaga

SEQ ID NO: 998030 - RNA, 19 nt, Artificial Sequence
  Description of Artificial Sequence: Synthetic oligonucleotide
  Sense strand starting at position 1897 of SEQ ID NO: 914359
ucuuuacacgggugggaaa

SEQ ID NO: 998031 - RNA, 19 nt, Artificial Sequence
  Description of Artificial Sequence: Synthetic oligonucleotide
  Antisense strand to SEQ ID NO: 998030
uuucccacccguguaaaga

SEQ ID NO: 998032 - RNA, 19 nt, Artificial Sequence
  Description of Artificial Sequence: Synthetic oligonucleotide
  Sense strand starting at position 2132 of SEQ ID NO: 914359
gguugaggaaucugucuca

SEQ ID NO: 998033 - RNA, 19 nt, Artificial Sequence
  Description of Artificial Sequence: Synthetic oligonucleotide
  Antisense strand to SEQ ID NO: 998032
ugagacagauuccucaacc

SEQ ID NO: 998034 - RNA, 19 nt, Artificial Sequence
  Description of Artificial Sequence: Synthetic oligonucleotide
  Sense strand starting at position 2135 of SEQ ID NO: 914359
ugaggaaucugucucagau

SEQ ID NO: 998035 - RNA, 19 nt, Artificial Sequence
  Description of Artificial Sequence: Synthetic oligonucleotide
  Antisense strand to SEQ ID NO: 998034
aucugagacagauuccuca

SEQ ID NO: 998036 - RNA, 19 nt, Artificial Sequence
  Description of Artificial Sequence: Synthetic oligonucleotide
  Sense strand starting at position 2145 of SEQ ID NO: 914359
gucucagauuccucaaaga

SEQ ID NO: 998037 - RNA, 19 nt, Artificial Sequence
  Description of Artificial Sequence: Synthetic oligonucleotide
  Antisense strand to SEQ ID NO: 998036
ucuuugaggaaucugagac

SEQ ID NO: 998038 - RNA, 19 nt, Artificial Sequence
  Description of Artificial Sequence: Synthetic oligonucleotide
  Sense strand starting at position 2421 of SEQ ID NO: 914359
gaggauucugacugaaguu

SEQ ID NO: 998039 - RNA, 19 nt, Artificial Sequence
  Description of Artificial Sequence: Synthetic oligonucleotide
  Antisense strand to SEQ ID NO: 998038
aacuucagucagaauccuc

SEQ ID NO: 998040 - RNA, 19 nt, Artificial Sequence
  Description of Artificial Sequence: Synthetic oligonucleotide
  Sense strand starting at position 2430 of SEQ ID NO: 914359
gacugaaguugaguuugua

SEQ ID NO: 998041 - RNA, 19 nt, Artificial Sequence
  Description of Artificial Sequence: Synthetic oligonucleotide
  Antisense strand to SEQ ID NO: 998040
uacaaacucaacuucaguc

SEQ ID NO: 998042 - RNA, 19 nt, Artificial Sequence
  Description of Artificial Sequence: Synthetic oligonucleotide
  Sense strand starting at position 2434 of SEQ ID NO: 914359
gaaguugaguuuguagguu

SEQ ID NO: 998043 - RNA, 19 nt, Artificial Sequence
  Description of Artificial Sequence: Synthetic oligonucleotide
  Antisense strand to SEQ ID NO: 998042
aaccuacaaacucaacuuc

SEQ ID NO: 998044 - RNA, 19 nt, Artificial Sequence
  Description of Artificial Sequence: Synthetic oligonucleotide
  Sense strand starting at position 2831 of SEQ ID NO: 914359
gacugcguauccucaucua

SEQ ID NO: 998045 - RNA, 19 nt, Artificial Sequence
  Description of Artificial Sequence: Synthetic oligonucleotide
  Antisense strand to SEQ ID NO: 998044
uagaugaggauacgcaguc

SEQ ID NO: 998046 - RNA, 19 nt, Artificial Sequence
  Description of Artificial Sequence: Synthetic oligonucleotide
  Sense strand starting at position 2834 of SEQ ID NO: 914359
ugcguauccucaucuagag

SEQ ID NO: 998047 - RNA, 19 nt, Artificial Sequence
  Description of Artificial Sequence: Synthetic oligonucleotide
  Antisense strand to SEQ ID NO: 998046
cucuagaugaggauacgca

SEQ ID NO: 998048 - RNA, 19 nt, Artificial Sequence
  Description of Artificial Sequence: Synthetic oligonucleotide
  Sense strand starting at position 2925 of SEQ ID NO: 914359
caucacucugcugggagua

SEQ ID NO: 998049 - RNA, 19 nt, Artificial Sequence
  Description of Artificial Sequence: Synthetic oligonucleotide
  Antisense strand to SEQ ID NO: 998048
uacucccagcagagugaug

SEQ ID NO: 998050 - RNA, 19 nt, Artificial Sequence
  Description of Artificial Sequence: Synthetic oligonucleotide
  Sense strand starting at position 2926 of SEQ ID NO: 914359
aucacucugcugggaguaa

SEQ ID NO: 998051 - RNA, 19 nt, Artificial Sequence
  Description of Artificial Sequence: Synthetic oligonucleotide
  Antisense strand to SEQ ID NO: 998050
uuacucccagcagagugau

SEQ ID NO: 998052 - RNA, 19 nt, Artificial Sequence
  Description of Artificial Sequence: Synthetic oligonucleotide
  Sense strand starting at position 2937 of SEQ ID NO: 914359
gggaguaaaugagaagaca

SEQ ID NO: 998053 - RNA, 19 nt, Artificial Sequence
  Description of Artificial Sequence: Synthetic oligonucleotide
  Antisense strand to SEQ ID NO: 998052
ugucuucucauuuacuccc

SEQ ID NO: 998054 - RNA, 19 nt, Artificial Sequence
  Description of Artificial Sequence: Synthetic oligonucleotide
  Sense strand starting at position 3660 of SEQ ID NO: 914359
agcagcuguuucuuacuga

SEQ ID NO: 998055 - RNA, 19 nt, Artificial Sequence
  Description of Artificial Sequence: Synthetic oligonucleotide
  Antisense strand to SEQ ID NO: 998054
ucaguaagaaacagcugcu

SEQ ID NO: 998056 - RNA, 19 nt, Artificial Sequence
  Description of Artificial Sequence: Synthetic oligonucleotide
  Sense strand starting at position 3671 of SEQ ID NO: 914359
cuuacugagcucugccaaa

SEQ ID NO: 998057 - RNA, 19 nt, Artificial Sequence
  Description of Artificial Sequence: Synthetic oligonucleotide
  Antisense strand to SEQ ID NO: 998056
uuuggcagagcucaguaag

SEQ ID NO: 998058 - RNA, 19 nt, Artificial Sequence
  Description of Artificial Sequence: Synthetic oligonucleotide
  Sense strand starting at position 3736 of SEQ ID NO: 914359
acaguaacccugugaggaa

SEQ ID NO: 998059 - RNA, 19 nt, Artificial Sequence
  Description of Artificial Sequence: Synthetic oligonucleotide
  Antisense strand to SEQ ID NO: 998058
uuccucacaggguuacugu

SEQ ID NO: 998060 - RNA, 19 nt, Artificial Sequence
  Description of Artificial Sequence: Synthetic oligonucleotide
  Sense strand starting at position 3769 of SEQ ID NO: 914359
gggaguauuaaaugcauug

SEQ ID NO: 998061 - RNA, 19 nt, Artificial Sequence
  Description of Artificial Sequence: Synthetic oligonucleotide
  Antisense strand to SEQ ID NO: 998060
caaugcauuuaauacuccc

SEQ ID NO: 998062 - RNA, 19 nt, Artificial Sequence
  Description of Artificial Sequence: Synthetic oligonucleotide
  Sense strand starting at position 9 of SEQ ID NO: 914360
ggccuagaguuggcagaau

SEQ ID NO: 998063 - RNA, 19 nt, Artificial Sequence
  Description of Artificial Sequence: Synthetic oligonucleotide
  Antisense strand to SEQ ID NO: 998062
auucugccaacucuaggcc

SEQ ID NO: 998064 - RNA, 19 nt, Artificial Sequence
  Description of Artificial Sequence: Synthetic oligonucleotide
  Sense strand starting at position 79 of SEQ ID NO: 914360
cccuguccucuguaucaga

SEQ ID NO: 998065 - RNA, 19 nt, Artificial Sequence
  Description of Artificial Sequence: Synthetic oligonucleotide
  Antisense strand to SEQ ID NO: 998064
ucugauacagaggacaggg

SEQ ID NO: 998066 - RNA, 19 nt, Artificial Sequence
  Description of Artificial Sequence: Synthetic oligonucleotide
  Sense strand starting at position 82 of SEQ ID NO: 914360
uguccucuguaucagacuu

SEQ ID NO: 998067 - RNA, 19 nt, Artificial Sequence
  Description of Artificial Sequence: Synthetic oligonucleotide
  Antisense strand to SEQ ID NO: 998066
aagucugauacagaggaca

SEQ ID NO: 998068 - RNA, 19 nt, Artificial Sequence
  Description of Artificial Sequence: Synthetic oligonucleotide
  Sense strand starting at position 364 of SEQ ID NO: 914360
agcggugugucaagcagau

SEQ ID NO: 998069 - RNA, 19 nt, Artificial Sequence
  Description of Artificial Sequence: Synthetic oligonucleotide
  Antisense strand to SEQ ID NO: 998068
aucugcuugacacaccgcu

SEQ ID NO: 998070 - RNA, 19 nt, Artificial Sequence
  Description of Artificial Sequence: Synthetic oligonucleotide
  Sense strand starting at position 482 of SEQ ID NO: 914360
auuaauagccgcuggaaag

SEQ ID NO: 998071 - RNA, 19 nt, Artificial Sequence
  Description of Artificial Sequence: Synthetic oligonucleotide
  Antisense strand to SEQ ID NO: 998070
cuuuccagcggcuauuaau

SEQ ID NO: 998072 - RNA, 19 nt, Artificial Sequence
  Description of Artificial Sequence: Synthetic oligonucleotide
  Sense strand starting at position 1011 of SEQ ID NO: 914360
uugucuuguuagccaggau

SEQ ID NO: 998073 - RNA, 19 nt, Artificial Sequence
  Description of Artificial Sequence: Synthetic oligonucleotide
  Antisense strand to SEQ ID NO: 998072
auccuggcuaacaagacaa

SEQ ID NO: 998074 - RNA, 19 nt, Artificial Sequence
  Description of Artificial Sequence: Synthetic oligonucleotide
  Sense strand starting at position 1429 of SEQ ID NO: 914360
agggauuccugcucccaga

SEQ ID NO: 998075 - RNA, 19 nt, Artificial Sequence
  Description of Artificial Sequence: Synthetic oligonucleotide
  Antisense strand to SEQ ID NO: 998074
ucugggagcaggaaucccu

SEQ ID NO: 998076 - RNA, 19 nt, Artificial Sequence
  Description of Artificial Sequence: Synthetic oligonucleotide
  Sense strand starting at position 2169 of SEQ ID NO: 914360
gaaaguugagccugguagu

SEQ ID NO: 998077 - RNA, 19 nt, Artificial Sequence
  Description of Artificial Sequence: Synthetic oligonucleotide
  Antisense strand to SEQ ID NO: 998076
acuaccaggcucaacuuuc

SEQ ID NO: 998078 - RNA, 19 nt, Artificial Sequence
  Description of Artificial Sequence: Synthetic oligonucleotide
  Sense strand starting at position 2175 of SEQ ID NO: 914360
ugagccugguagucacaaa

SEQ ID NO: 998079 - RNA, 19 nt, Artificial Sequence
  Description of Artificial Sequence: Synthetic oligonucleotide
  Antisense strand to SEQ ID NO: 998078
uuugugacuaccaggcuca

SEQ ID NO: 998080 - RNA, 19 nt, Artificial Sequence
  Description of Artificial Sequence: Synthetic oligonucleotide
  Sense strand starting at position 2354 of SEQ ID NO: 914360
gagcuucgucccggugaca

SEQ ID NO: 998081 - RNA, 19 nt, Artificial Sequence
  Description of Artificial Sequence: Synthetic oligonucleotide
  Antisense strand to SEQ ID NO: 998080
ugucaccgggacgaagcuc

SEQ ID NO: 998082 - RNA, 19 nt, Artificial Sequence
  Description of Artificial Sequence: Synthetic oligonucleotide
  Sense strand starting at position 2641 of SEQ ID NO: 914360
gcuggagucacugagauac

SEQ ID NO: 998083 - RNA, 19 nt, Artificial Sequence
  Description of Artificial Sequence: Synthetic oligonucleotide
  Antisense strand to SEQ ID NO: 998082
guaucucagugacuccagc

SEQ ID NO: 998084 - RNA, 19 nt, Artificial Sequence
  Description of Artificial Sequence: Synthetic oligonucleotide
  Sense strand starting at position 2643 of SEQ ID NO: 914360
uggagucacugagauacca

SEQ ID NO: 998085 - RNA, 19 nt, Artificial Sequence
  Description of Artificial Sequence: Synthetic oligonucleotide
  Antisense strand to SEQ ID NO: 998084
ugguaucucagugacucca

SEQ ID NO: 998086 - RNA, 19 nt, Artificial Sequence
  Description of Artificial Sequence: Synthetic oligonucleotide
  Sense strand starting at position 2781 of SEQ ID NO: 914360
gcgugaccuugagucacau

SEQ ID NO: 998087 - RNA, 19 nt, Artificial Sequence
  Description of Artificial Sequence: Synthetic oligonucleotide
  Antisense strand to SEQ ID NO: 998086
augugacucaaggucacgc

SEQ ID NO: 998088 - RNA, 19 nt, Artificial Sequence
  Description of Artificial Sequence: Synthetic oligonucleotide
  Sense strand starting at position 2790 of SEQ ID NO: 914360
ugagucacauauccaguau

SEQ ID NO: 998089 - RNA, 19 nt, Artificial Sequence
  Description of Artificial Sequence: Synthetic oligonucleotide
  Antisense strand to SEQ ID NO: 998088
auacuggauaugugacuca

SEQ ID NO: 998090 - RNA, 19 nt, Artificial Sequence
  Description of Artificial Sequence: Synthetic oligonucleotide
  Sense strand starting at position 2887 of SEQ ID NO: 914360
gagccugcaucagauaguu

SEQ ID NO: 998091 - RNA, 19 nt, Artificial Sequence
  Description of Artificial Sequence: Synthetic oligonucleotide
  Antisense strand to SEQ ID NO: 998090
aacuaucugaugcaggcuc

SEQ ID NO: 998092 - RNA, 19 nt, Artificial Sequence
  Description of Artificial Sequence: Synthetic oligonucleotide
  Sense strand starting at position 2893 of SEQ ID NO: 914360
gcaucagauaguugggcuu

SEQ ID NO: 998093 - RNA, 19 nt, Artificial Sequence
  Description of Artificial Sequence: Synthetic oligonucleotide
  Antisense strand to SEQ ID NO: 998092
aagcccaacuaucugaugc

SEQ ID NO: 998094 - RNA, 19 nt, Artificial Sequence
  Description of Artificial Sequence: Synthetic oligonucleotide
  Sense strand starting at position 3081 of SEQ ID NO: 914360
ccagaagacucuuccaguc

SEQ ID NO: 998095 - RNA, 19 nt, Artificial Sequence
  Description of Artificial Sequence: Synthetic oligonucleotide
  Antisense strand to SEQ ID NO: 998094
gacuggaagagucuucugg

SEQ ID NO: 998096 - RNA, 19 nt, Artificial Sequence
  Description of Artificial Sequence: Synthetic oligonucleotide
  Sense strand starting at position 3150 of SEQ ID NO: 914360
agcugagucaagcguggau

SEQ ID NO: 998097 - RNA, 19 nt, Artificial Sequence
  Description of Artificial Sequence: Synthetic oligonucleotide
  Antisense strand to SEQ ID NO: 998096
auccacgcuugacucagcu

SEQ ID NO: 998098 - RNA, 19 nt, Artificial Sequence
  Description of Artificial Sequence: Synthetic oligonucleotide
  Sense strand starting at position 3152 of SEQ ID NO: 914360
cugagucaagcguggauga

SEQ ID NO: 998099 - RNA, 19 nt, Artificial Sequence
  Description of Artificial Sequence: Synthetic oligonucleotide
  Antisense strand to SEQ ID NO: 998098
ucauccacgcuugacucag

SEQ ID NO: 998100 - RNA, 19 nt, Artificial Sequence
  Description of Artificial Sequence: Synthetic oligonucleotide
  Sense strand starting at position 3154 of SEQ ID NO: 914360
gagucaagcguggaugagu

SEQ ID NO: 998101 - RNA, 19 nt, Artificial Sequence
  Description of Artificial Sequence: Synthetic oligonucleotide
  Antisense strand to SEQ ID NO: 998100
acucauccacgcuugacuc

SEQ ID NO: 998102 - RNA, 19 nt, Artificial Sequence
  Description of Artificial Sequence: Synthetic oligonucleotide
  Sense strand starting at position 3372 of SEQ ID NO: 914360
gcccuugagguacgagaaa

SEQ ID NO: 998103 - RNA, 19 nt, Artificial Sequence
  Description of Artificial Sequence: Synthetic oligonucleotide
  Antisense strand to SEQ ID NO: 998102
uuucucguaccucaagggc

SEQ ID NO: 998104 - RNA, 19 nt, Artificial Sequence
  Description of Artificial Sequence: Synthetic oligonucleotide
  Sense strand starting at position 3691 of SEQ ID NO: 914360
agagccuccagguaugaca

SEQ ID NO: 998105 - RNA, 19 nt, Artificial Sequence
  Description of Artificial Sequence: Synthetic oligonucleotide
  Antisense strand to SEQ ID NO: 998104
ugucauaccuggaggcucu

SEQ ID NO: 998106 - RNA, 19 nt, Artificial Sequence
  Description of Artificial Sequence: Synthetic oligonucleotide
  Sense strand starting at position 106 of SEQ ID NO: 914361
cugaaugucuuucccaaug

SEQ ID NO: 998107 - RNA, 19 nt, Artificial Sequence
  Description of Artificial Sequence: Synthetic oligonucleotide
  Antisense strand to SEQ ID NO: 998106
cauugggaaagacauucag

SEQ ID NO: 998108 - RNA, 19 nt, Artificial Sequence
  Description of Artificial Sequence: Synthetic oligonucleotide
  Sense strand starting at position 353 of SEQ ID NO: 914361
ucgcauugaacccaggaga

SEQ ID NO: 998109 - RNA, 19 nt, Artificial Sequence
  Description of Artificial Sequence: Synthetic oligonucleotide
  Antisense strand to SEQ ID NO: 998108
ucuccuggguucaaugcga

SEQ ID NO: 998110 - RNA, 19 nt, Artificial Sequence
  Description of Artificial Sequence: Synthetic oligonucleotide
  Sense strand starting at position 464 of SEQ ID NO: 914361
uccauuaauuggucaaggu

SEQ ID NO: 998111 - RNA, 19 nt, Artificial Sequence
  Description of Artificial Sequence: Synthetic oligonucleotide
  Antisense strand to SEQ ID NO: 998110
accuugaccaauuaaugga

SEQ ID NO: 998112 - RNA, 19 nt, Artificial Sequence
  Description of Artificial Sequence: Synthetic oligonucleotide
  Sense strand starting at position 465 of SEQ ID NO: 914361
ccauuaauuggucaagguc

SEQ ID NO: 998113 - RNA, 19 nt, Artificial Sequence
  Description of Artificial Sequence: Synthetic oligonucleotide
  Antisense strand to SEQ ID NO: 998112
gaccuugaccaauuaaugg

SEQ ID NO: 998114 - RNA, 19 nt, Artificial Sequence
  Description of Artificial Sequence: Synthetic oligonucleotide
  Sense strand starting at position 468 of SEQ ID NO: 914361
uuaauuggucaaggucuau

SEQ ID NO: 998115 - RNA, 19 nt, Artificial Sequence
  Description of Artificial Sequence: Synthetic oligonucleotide
  Antisense strand to SEQ ID NO: 998114
auagaccuugaccaauuaa

SEQ ID NO: 998116 - RNA, 19 nt, Artificial Sequence
  Description of Artificial Sequence: Synthetic oligonucleotide
  Sense strand starting at position 515 of SEQ ID NO: 914361
ggcagcacaguguaauauu

SEQ ID NO: 998117 - RNA, 19 nt, Artificial Sequence
  Description of Artificial Sequence: Synthetic oligonucleotide
  Antisense strand to SEQ ID NO: 998116
aauauuacacugugcugcc

SEQ ID NO: 998118 - RNA, 19 nt, Artificial Sequence
  Description of Artificial Sequence: Synthetic oligonucleotide
  Sense strand starting at position 607 of SEQ ID NO: 914361
gcuugagaaaggcacuuau

SEQ ID NO: 998119 - RNA, 19 nt, Artificial Sequence
  Description of Artificial Sequence: Synthetic oligonucleotide
  Antisense strand to SEQ ID NO: 998118
auaagugccuuucucaagc

SEQ ID NO: 998120 - RNA, 19 nt, Artificial Sequence
  Description of Artificial Sequence: Synthetic oligonucleotide
  Sense strand starting at position 684 of SEQ ID NO: 914361
cuucuaaggcuauaaguaa

SEQ ID NO: 998121 - RNA, 19 nt, Artificial Sequence
  Description of Artificial Sequence: Synthetic oligonucleotide
  Antisense strand to SEQ ID NO: 998120
uuacuuauagccuuagaag

SEQ ID NO: 998122 - RNA, 19 nt, Artificial Sequence
  Description of Artificial Sequence: Synthetic oligonucleotide
  Sense strand starting at position 787 of SEQ ID NO: 914361
uccaauaagguguaauauc

SEQ ID NO: 998123 - RNA, 19 nt, Artificial Sequence
  Description of Artificial Sequence: Synthetic oligonucleotide
  Antisense strand to SEQ ID NO: 998122
gauauuacaccuuauugga

SEQ ID NO: 998124 - RNA, 19 nt, Artificial Sequence
  Description of Artificial Sequence: Synthetic oligonucleotide
  Sense strand starting at position 834 of SEQ ID NO: 914361
cuugguacugcugagaaua

SEQ ID NO: 998125 - RNA, 19 nt, Artificial Sequence
  Description of Artificial Sequence: Synthetic oligonucleotide
  Antisense strand to SEQ ID NO: 998124
uauucucagcaguaccaag

SEQ ID NO: 998126 - RNA, 19 nt, Artificial Sequence
  Description of Artificial Sequence: Synthetic oligonucleotide
  Sense strand starting at position 878 of SEQ ID NO: 914361
agaacugacugccuaguaa

SEQ ID NO: 998127 - RNA, 19 nt, Artificial Sequence
  Description of Artificial Sequence: Synthetic oligonucleotide
  Antisense strand to SEQ ID NO: 998126
uuacuaggcagucaguucu

SEQ ID NO: 998128 - RNA, 19 nt, Artificial Sequence
  Description of Artificial Sequence: Synthetic oligonucleotide
  Sense strand starting at position 964 of SEQ ID NO: 914361
acagaaauaccugguguua

SEQ ID NO: 998129 - RNA, 19 nt, Artificial Sequence
  Description of Artificial Sequence: Synthetic oligonucleotide
  Antisense strand to SEQ ID NO: 998128
uaacaccagguauuucugu

SEQ ID NO: 998130 - RNA, 19 nt, Artificial Sequence
  Description of Artificial Sequence: Synthetic oligonucleotide
  Sense strand starting at position 1052 of SEQ ID NO: 914361
agguauucuuaagcauacu

SEQ ID NO: 998131 - RNA, 19 nt, Artificial Sequence
  Description of Artificial Sequence: Synthetic oligonucleotide
  Antisense strand to SEQ ID NO: 998130
aguaugcuuaagaauaccu

SEQ ID NO: 998132 - RNA, 19 nt, Artificial Sequence
  Description of Artificial Sequence: Synthetic oligonucleotide
  Sense strand starting at position 1212 of SEQ ID NO: 914361
uaaggucagguauguaauu

SEQ ID NO: 998133 - RNA, 19 nt, Artificial Sequence
  Description of Artificial Sequence: Synthetic oligonucleotide
  Antisense strand to SEQ ID NO: 998132
aauuacauaccugaccuua

SEQ ID NO: 998134 - RNA, 19 nt, Artificial Sequence
  Description of Artificial Sequence: Synthetic oligonucleotide
  Sense strand starting at position 1270 of SEQ ID NO: 914361
uugggcauuugucuaagua

SEQ ID NO: 998135 - RNA, 19 nt, Artificial Sequence
  Description of Artificial Sequence: Synthetic oligonucleotide
  Antisense strand to SEQ ID NO: 998134
uacuuagacaaaugcccaa

SEQ ID NO: 998136 - RNA, 19 nt, Artificial Sequence
  Description of Artificial Sequence: Synthetic oligonucleotide
  Sense strand starting at position 1338 of SEQ ID NO: 914361
cuauauguuguauacucua

SEQ ID NO: 998137 - RNA, 19 nt, Artificial Sequence
  Description of Artificial Sequence: Synthetic oligonucleotide
  Antisense strand to SEQ ID NO: 998136
uagaguauacaacauauag

SEQ ID NO: 998138 - RNA, 19 nt, Artificial Sequence
  Description of Artificial Sequence: Synthetic oligonucleotide
  Sense strand starting at position 1449 of SEQ ID NO: 914361
cugagacauuguccuauuc

SEQ ID NO: 998139 - RNA, 19 nt, Artificial Sequence
  Description of Artificial Sequence: Synthetic oligonucleotide
  Antisense strand to SEQ ID NO: 998138
gaauaggacaaugucucag

SEQ ID NO: 998140 - RNA, 19 nt, Artificial Sequence
  Description of Artificial Sequence: Synthetic oligonucleotide
  Sense strand starting at position 1645 of SEQ ID NO: 914361
gauaguggaugcuuuccaa

SEQ ID NO: 998141 - RNA, 19 nt, Artificial Sequence
  Description of Artificial Sequence: Synthetic oligonucleotide
  Antisense strand to SEQ ID NO: 998140
uuggaaagcauccacuauc

SEQ ID NO: 998142 - RNA, 19 nt, Artificial Sequence
  Description of Artificial Sequence: Synthetic oligonucleotide
  Sense strand starting at position 1648 of SEQ ID NO: 914361
aguggaugcuuuccaaaug

SEQ ID NO: 998143 - RNA, 19 nt, Artificial Sequence
  Description of Artificial Sequence: Synthetic oligonucleotide
  Antisense strand to SEQ ID NO: 998142
cauuuggaaagcauccacu

SEQ ID NO: 998144 - RNA, 19 nt, Artificial Sequence
  Description of Artificial Sequence: Synthetic oligonucleotide
  Sense strand starting at position 1705 of SEQ ID NO: 914361
ucaugaauguuccuaaggu

SEQ ID NO: 998145 - RNA, 19 nt, Artificial Sequence
  Description of Artificial Sequence: Synthetic oligonucleotide
  Antisense strand to SEQ ID NO: 998144
accuuaggaacauucauga

SEQ ID NO: 998146 - RNA, 19 nt, Artificial Sequence
  Description of Artificial Sequence: Synthetic oligonucleotide
  Sense strand starting at position 1986 of SEQ ID NO: 914361
ugauucuccuuagucugaa

SEQ ID NO: 998147 - RNA, 19 nt, Artificial Sequence
  Description of Artificial Sequence: Synthetic oligonucleotide
  Antisense strand to SEQ ID NO: 998146
uucagacuaaggagaauca

SEQ ID NO: 998148 - RNA, 19 nt, Artificial Sequence
  Description of Artificial Sequence: Synthetic oligonucleotide
  Sense strand starting at position 2046 of SEQ ID NO: 914361
aucugucuuguaugauaaa

SEQ ID NO: 998149 - RNA, 19 nt, Artificial Sequence
  Description of Artificial Sequence: Synthetic oligonucleotide
  Antisense strand to SEQ ID NO: 998148
uuuaucauacaagacagau

SEQ ID NO: 998150 - RNA, 19 nt, Artificial Sequence
  Description of Artificial Sequence: Synthetic oligonucleotide
  Sense strand starting at position 2072 of SEQ ID NO: 914361
accaguacuccuugaguac

SEQ ID NO: 998151 - RNA, 19 nt, Artificial Sequence
  Description of Artificial Sequence: Synthetic oligonucleotide
  Antisense strand to SEQ ID NO: 998150
guacucaaggaguacuggu

SEQ ID NO: 998152 - RNA, 19 nt, Artificial Sequence
  Description of Artificial Sequence: Synthetic oligonucleotide
  Sense strand starting at position 2073 of SEQ ID NO: 914361
ccaguacuccuugaguaca

SEQ ID NO: 998153 - RNA, 19 nt, Artificial Sequence
  Description of Artificial Sequence: Synthetic oligonucleotide
  Antisense strand to SEQ ID NO: 998152
uguacucaaggaguacugg

SEQ ID NO: 998154 - RNA, 19 nt, Artificial Sequence
  Description of Artificial Sequence: Synthetic oligonucleotide
  Sense strand starting at position 2208 of SEQ ID NO: 914361
uucugaaagcucuagauca

SEQ ID NO: 998155 - RNA, 19 nt, Artificial Sequence
  Description of Artificial Sequence: Synthetic oligonucleotide
  Antisense strand to SEQ ID NO: 998154
ugaucuagagcuuucagaa

SEQ ID NO: 998156 - RNA, 19 nt, Artificial Sequence
  Description of Artificial Sequence: Synthetic oligonucleotide
  Sense strand starting at position 2215 of SEQ ID NO: 914361
agcucuagaucagccaauu

SEQ ID NO: 998157 - RNA, 19 nt, Artificial Sequence
  Description of Artificial Sequence: Synthetic oligonucleotide
  Antisense strand to SEQ ID NO: 998156
aauuggcugaucuagagcu

SEQ ID NO: 998158 - RNA, 19 nt, Artificial Sequence
  Description of Artificial Sequence: Synthetic oligonucleotide
  Sense strand starting at position 2475 of SEQ ID NO: 914361
ggcuguuucccugaccaug

SEQ ID NO: 998159 - RNA, 19 nt, Artificial Sequence
  Description of Artificial Sequence: Synthetic oligonucleotide
  Antisense strand to SEQ ID NO: 998158
cauggucagggaaacagcc

SEQ ID NO: 998160 - RNA, 19 nt, Artificial Sequence
  Description of Artificial Sequence: Synthetic oligonucleotide
  Sense strand starting at position 2612 of SEQ ID NO: 914361
acagaauucuaagcgcaga

SEQ ID NO: 998161 - RNA, 19 nt, Artificial Sequence
  Description of Artificial Sequence: Synthetic oligonucleotide
  Antisense strand to SEQ ID NO: 998160
ucugcgcuuagaauucugu

SEQ ID NO: 998162 - RNA, 19 nt, Artificial Sequence
  Description of Artificial Sequence: Synthetic oligonucleotide
  Sense strand starting at position 3113 of SEQ ID NO: 914361
agaauaaaguccgaauuua

SEQ ID NO: 998163 - RNA, 19 nt, Artificial Sequence
  Description of Artificial Sequence: Synthetic oligonucleotide
  Antisense strand to SEQ ID NO: 998162
uaaauucggacuuuauucu

SEQ ID NO: 998164 - RNA, 19 nt, Artificial Sequence
  Description of Artificial Sequence: Synthetic oligonucleotide
  Sense strand starting at position 3252 of SEQ ID NO: 914361
gacaaucuagcaugaguga

SEQ ID NO: 998165 - RNA, 19 nt, Artificial Sequence
  Description of Artificial Sequence: Synthetic oligonucleotide
  Antisense strand to SEQ ID NO: 998164
ucacucaugcuagauuguc

SEQ ID NO: 998166 - RNA, 19 nt, Artificial Sequence
  Description of Artificial Sequence: Synthetic oligonucleotide
  Sense strand starting at position 3257 of SEQ ID NO: 914361
ucuagcaugagugaaagua

SEQ ID NO: 998167 - RNA, 19 nt, Artificial Sequence
  Description of Artificial Sequence: Synthetic oligonucleotide
  Antisense strand to SEQ ID NO: 998166
uacuuucacucaugcuaga

SEQ ID NO: 998168 - RNA, 19 nt, Artificial Sequence
  Description of Artificial Sequence: Synthetic oligonucleotide
  Sense strand starting at position 3265 of SEQ ID NO: 914361
gagugaaaguaugcccuua

SEQ ID NO: 998169 - RNA, 19 nt, Artificial Sequence
  Description of Artificial Sequence: Synthetic oligonucleotide
  Antisense strand to SEQ ID NO: 998168
uaagggcauacuuucacuc

SEQ ID NO: 998170 - RNA, 19 nt, Artificial Sequence
  Description of Artificial Sequence: Synthetic oligonucleotide
  Sense strand starting at position 3267 of SEQ ID NO: 914361
gugaaaguaugcccuuaaa

SEQ ID NO: 998171 - RNA, 19 nt, Artificial Sequence
  Description of Artificial Sequence: Synthetic oligonucleotide
  Antisense strand to SEQ ID NO: 998170
uuuaagggcauacuuucac

SEQ ID NO: 998172 - RNA, 19 nt, Artificial Sequence
  Description of Artificial Sequence: Synthetic oligonucleotide
  Sense strand starting at position 3323 of SEQ ID NO: 914361
agcaaauacugugcuacaa

SEQ ID NO: 998173 - RNA, 19 nt, Artificial Sequence
  Description of Artificial Sequence: Synthetic oligonucleotide
  Antisense strand to SEQ ID NO: 998172
uuguagcacaguauuugcu

SEQ ID NO: 998174 - RNA, 19 nt, Artificial Sequence
  Description of Artificial Sequence: Synthetic oligonucleotide
  Sense strand starting at position 3420 of SEQ ID NO: 914361
ccagcaaagugacuaacau

SEQ ID NO: 998175 - RNA, 19 nt, Artificial Sequence
  Description of Artificial Sequence: Synthetic oligonucleotide
  Antisense strand to SEQ ID NO: 998174
auguuagucacuuugcugg

SEQ ID NO: 998176 - RNA, 19 nt, Artificial Sequence
  Description of Artificial Sequence: Synthetic oligonucleotide
  Sense strand starting at position 3696 of SEQ ID NO: 914361
gaagauaguucgguauaua

SEQ ID NO: 998177 - RNA, 19 nt, Artificial Sequence
  Description of Artificial Sequence: Synthetic oligonucleotide
  Antisense strand to SEQ ID NO: 998176
uauauaccgaacuaucuuc

SEQ ID NO: 998178 - RNA, 19 nt, Artificial Sequence
  Description of Artificial Sequence: Synthetic oligonucleotide
  Sense strand starting at position 3697 of SEQ ID NO: 914361
aagauaguucgguauauau

SEQ ID NO: 998179 - RNA, 19 nt, Artificial Sequence
  Description of Artificial Sequence: Synthetic oligonucleotide
  Antisense strand to SEQ ID NO: 998178
auauauaccgaacuaucuu

SEQ ID NO: 998180 - RNA, 19 nt, Artificial Sequence
  Description of Artificial Sequence: Synthetic oligonucleotide
  Sense strand starting at position 3791 of SEQ ID NO: 914361
guguaaauuaaagggcaau

SEQ ID NO: 998181 - RNA, 19 nt, Artificial Sequence
  Description of Artificial Sequence: Synthetic oligonucleotide
  Antisense strand to SEQ ID NO: 998180
auugcccuuuaauuuacac

SEQ ID NO: 998182 - RNA, 19 nt, Artificial Sequence
  Description of Artificial Sequence: Synthetic oligonucleotide
  Sense strand starting at position 3808 of SEQ ID NO: 914361
auaguauuccugcaauagc

SEQ ID NO: 998183 - RNA, 19 nt, Artificial Sequence
  Description of Artificial Sequence: Synthetic oligonucleotide
  Antisense strand to SEQ ID NO: 998182
gcuauugcaggaauacuau

SEQ ID NO: 998184 - RNA, 19 nt, Artificial Sequence
  Description of Artificial Sequence: Synthetic oligonucleotide
  Sense strand starting at position 3819 of SEQ ID NO: 914361
gcaauagcauuucuccagu

SEQ ID NO: 998185 - RNA, 19 nt, Artificial Sequence
  Description of Artificial Sequence: Synthetic oligonucleotide
  Antisense strand to SEQ ID NO: 998184
acuggagaaaugcuauugc

SEQ ID NO: 998186 - RNA, 19 nt, Artificial Sequence
  Description of Artificial Sequence: Synthetic oligonucleotide
  Sense strand starting at position 42 of SEQ ID NO: 914362
ucagcauuguuucucagag

SEQ ID NO: 998187 - RNA, 19 nt, Artificial Sequence
  Description of Artificial Sequence: Synthetic oligonucleotide
  Antisense strand to SEQ ID NO: 998186
cucugagaaacaaugcuga

SEQ ID NO: 998188 - RNA, 19 nt, Artificial Sequence
  Description of Artificial Sequence: Synthetic oligonucleotide
  Sense strand starting at position 83 of SEQ ID NO: 914362
acagaaauaccugguguua

SEQ ID NO: 998189 - RNA, 19 nt, Artificial Sequence
  Description of Artificial Sequence: Synthetic oligonucleotide
  Antisense strand to SEQ ID NO: 998188
uaacaccagguauuucugu

SEQ ID NO: 998190 - RNA, 19 nt, Artificial Sequence
  Description of Artificial Sequence: Synthetic oligonucleotide
  Sense strand starting at position 171 of SEQ ID NO: 914362
agguauucuuaagcauacu

SEQ ID NO: 998191 - RNA, 19 nt, Artificial Sequence
  Description of Artificial Sequence: Synthetic oligonucleotide
  Antisense strand to SEQ ID NO: 998190
aguaugcuuaagaauaccu

SEQ ID NO: 998192 - RNA, 19 nt, Artificial Sequence
  Description of Artificial Sequence: Synthetic oligonucleotide
  Sense strand starting at position 247 of SEQ ID NO: 914362
aggaaacucucagguauuu

SEQ ID NO: 998193 - RNA, 19 nt, Artificial Sequence
  Description of Artificial Sequence: Synthetic oligonucleotide
  Antisense strand to SEQ ID NO: 998192
aaauaccugagaguuuccu

SEQ ID NO: 998194 - RNA, 19 nt, Artificial Sequence
  Description of Artificial Sequence: Synthetic oligonucleotide
  Sense strand starting at position 331 of SEQ ID NO: 914362
uaaggucagguauguaauu

SEQ ID NO: 998195 - RNA, 19 nt, Artificial Sequence
  Description of Artificial Sequence: Synthetic oligonucleotide
  Antisense strand to SEQ ID NO: 998194
aauuacauaccugaccuua

SEQ ID NO: 998196 - RNA, 19 nt, Artificial Sequence
  Description of Artificial Sequence: Synthetic oligonucleotide
  Sense strand starting at position 389 of SEQ ID NO: 914362
uugggcauuugucuaagua

SEQ ID NO: 998197 - RNA, 19 nt, Artificial Sequence
  Description of Artificial Sequence: Synthetic oligonucleotide
  Antisense strand to SEQ ID NO: 998196
uacuuagacaaaugcccaa

SEQ ID NO: 998198 - RNA, 19 nt, Artificial Sequence
  Description of Artificial Sequence: Synthetic oligonucleotide
  Sense strand starting at position 457 of SEQ ID NO: 914362
cuauauguuguauacucua

SEQ ID NO: 998199 - RNA, 19 nt, Artificial Sequence
  Description of Artificial Sequence: Synthetic oligonucleotide
  Antisense strand to SEQ ID NO: 998198
uagaguauacaacauauag

SEQ ID NO: 998200 - RNA, 19 nt, Artificial Sequence
  Description of Artificial Sequence: Synthetic oligonucleotide
  Sense strand starting at position 462 of SEQ ID NO: 914362
uguuguauacucuauugca

SEQ ID NO: 998201 - RNA, 19 nt, Artificial Sequence
  Description of Artificial Sequence: Synthetic oligonucleotide
  Antisense strand to SEQ ID NO: 998200
ugcaauagaguauacaaca

SEQ ID NO: 998202 - RNA, 19 nt, Artificial Sequence
  Description of Artificial Sequence: Synthetic oligonucleotide
  Sense strand starting at position 568 of SEQ ID NO: 914362
cugagacauuguccuauuc

SEQ ID NO: 998203 - RNA, 19 nt, Artificial Sequence
  Description of Artificial Sequence: Synthetic oligonucleotide
  Antisense strand to SEQ ID NO: 998202
gaauaggacaaugucucag

SEQ ID NO: 998204 - RNA, 19 nt, Artificial Sequence
  Description of Artificial Sequence: Synthetic oligonucleotide
  Sense strand starting at position 719 of SEQ ID NO: 914362
gguuaauacuuccuguuua

SEQ ID NO: 998205 - RNA, 19 nt, Artificial Sequence
  Description of Artificial Sequence: Synthetic oligonucleotide
  Antisense strand to SEQ ID NO: 998204
uaaacaggaaguauuaacc

SEQ ID NO: 998206 - RNA, 19 nt, Artificial Sequence
  Description of Artificial Sequence: Synthetic oligonucleotide
  Sense strand starting at position 764 of SEQ ID NO: 914362
gauaguggaugcuuuccaa

SEQ ID NO: 998207 - RNA, 19 nt, Artificial Sequence
  Description of Artificial Sequence: Synthetic oligonucleotide
  Antisense strand to SEQ ID NO: 998206
uuggaaagcauccacuauc

SEQ ID NO: 998208 - RNA, 19 nt, Artificial Sequence
  Description of Artificial Sequence: Synthetic oligonucleotide
  Sense strand starting at position 767 of SEQ ID NO: 914362
aguggaugcuuuccaaaug

SEQ ID NO: 998209 - RNA, 19 nt, Artificial Sequence
  Description of Artificial Sequence: Synthetic oligonucleotide
  Antisense strand to SEQ ID NO: 998208
cauuuggaaagcauccacu

SEQ ID NO: 998210 - RNA, 19 nt, Artificial Sequence
  Description of Artificial Sequence: Synthetic oligonucleotide
  Sense strand starting at position 824 of SEQ ID NO: 914362
ucaugaauguuccuaaggu

SEQ ID NO: 998211 - RNA, 19 nt, Artificial Sequence
  Description of Artificial Sequence: Synthetic oligonucleotide
  Antisense strand to SEQ ID NO: 998210
accuuaggaacauucauga

SEQ ID NO: 998212 - RNA, 19 nt, Artificial Sequence
  Description of Artificial Sequence: Synthetic oligonucleotide
  Sense strand starting at position 1105 of SEQ ID NO: 914362
ugauucuccuuagucugaa

SEQ ID NO: 998213 - RNA, 19 nt, Artificial Sequence
  Description of Artificial Sequence: Synthetic oligonucleotide
  Antisense strand to SEQ ID NO: 998212
uucagacuaaggagaauca

SEQ ID NO: 998214 - RNA, 19 nt, Artificial Sequence
  Description of Artificial Sequence: Synthetic oligonucleotide
  Sense strand starting at position 1124 of SEQ ID NO: 914362
cucacagcaucuguuuaua

SEQ ID NO: 998215 - RNA, 19 nt, Artificial Sequence
  Description of Artificial Sequence: Synthetic oligonucleotide
  Antisense strand to SEQ ID NO: 998214
uauaaacagaugcugugag

SEQ ID NO: 998216 - RNA, 19 nt, Artificial Sequence
  Description of Artificial Sequence: Synthetic oligonucleotide
  Sense strand starting at position 1165 of SEQ ID NO: 914362
aucugucuuguaugauaaa

SEQ ID NO: 998217 - RNA, 19 nt, Artificial Sequence
  Description of Artificial Sequence: Synthetic oligonucleotide
  Antisense strand to SEQ ID NO: 998216
uuuaucauacaagacagau

SEQ ID NO: 998218 - RNA, 19 nt, Artificial Sequence
  Description of Artificial Sequence: Synthetic oligonucleotide
  Sense strand starting at position 1191 of SEQ ID NO: 914362
accaguacuccuugaguac

SEQ ID NO: 998219 - RNA, 19 nt, Artificial Sequence
  Description of Artificial Sequence: Synthetic oligonucleotide
  Antisense strand to SEQ ID NO: 998218
guacucaaggaguacuggu

SEQ ID NO: 998220 - RNA, 19 nt, Artificial Sequence
  Description of Artificial Sequence: Synthetic oligonucleotide
  Sense strand starting at position 1192 of SEQ ID NO: 914362
ccaguacuccuugaguaca

SEQ ID NO: 998221 - RNA, 19 nt, Artificial Sequence
  Description of Artificial Sequence: Synthetic oligonucleotide
  Antisense strand to SEQ ID NO: 998220
uguacucaaggaguacugg

SEQ ID NO: 998222 - RNA, 19 nt, Artificial Sequence
  Description of Artificial Sequence: Synthetic oligonucleotide
  Sense strand starting at position 1231 of SEQ ID NO: 914362
cucuccuuccaguacguaa

SEQ ID NO: 998223 - RNA, 19 nt, Artificial Sequence
  Description of Artificial Sequence: Synthetic oligonucleotide
  Antisense strand to SEQ ID NO: 998222
uuacguacuggaaggagag

SEQ ID NO: 998224 - RNA, 19 nt, Artificial Sequence
  Description of Artificial Sequence: Synthetic oligonucleotide
  Sense strand starting at position 1327 of SEQ ID NO: 914362
uucugaaagcucuagauca

SEQ ID NO: 998225 - RNA, 19 nt, Artificial Sequence
  Description of Artificial Sequence: Synthetic oligonucleotide
  Antisense strand to SEQ ID NO: 998224
ugaucuagagcuuucagaa

SEQ ID NO: 998226 - RNA, 19 nt, Artificial Sequence
  Description of Artificial Sequence: Synthetic oligonucleotide
  Sense strand starting at position 1334 of SEQ ID NO: 914362
agcucuagaucagccaauu

SEQ ID NO: 998227 - RNA, 19 nt, Artificial Sequence
  Description of Artificial Sequence: Synthetic oligonucleotide
  Antisense strand to SEQ ID NO: 998226
aauuggcugaucuagagcu

SEQ ID NO: 998228 - RNA, 19 nt, Artificial Sequence
  Description of Artificial Sequence: Synthetic oligonucleotide
  Sense strand starting at position 1594 of SEQ ID NO: 914362
ggcuguuucccugaccaug

SEQ ID NO: 998229 - RNA, 19 nt, Artificial Sequence
  Description of Artificial Sequence: Synthetic oligonucleotide
  Antisense strand to SEQ ID NO: 998228
cauggucagggaaacagcc

SEQ ID NO: 998230 - RNA, 19 nt, Artificial Sequence
  Description of Artificial Sequence: Synthetic oligonucleotide
  Sense strand starting at position 1731 of SEQ ID NO: 914362
acagaauucuaagcgcaga

SEQ ID NO: 998231 - RNA, 19 nt, Artificial Sequence
  Description of Artificial Sequence: Synthetic oligonucleotide
  Antisense strand to SEQ ID NO: 998230
ucugcgcuuagaauucugu

SEQ ID NO: 998232 - RNA, 19 nt, Artificial Sequence
  Description of Artificial Sequence: Synthetic oligonucleotide
  Sense strand starting at position 2232 of SEQ ID NO: 914362
agaauaaaguccgaauuua

SEQ ID NO: 998233 - RNA, 19 nt, Artificial Sequence
  Description of Artificial Sequence: Synthetic oligonucleotide
  Antisense strand to SEQ ID NO: 998232
uaaauucggacuuuauucu

SEQ ID NO: 998234 - RNA, 19 nt, Artificial Sequence
  Description of Artificial Sequence: Synthetic oligonucleotide
  Sense strand starting at position 2371 of SEQ ID NO: 914362
gacaaucuagcaugaguga

SEQ ID NO: 998235 - RNA, 19 nt, Artificial Sequence
  Description of Artificial Sequence: Synthetic oligonucleotide
  Antisense strand to SEQ ID NO: 998234
ucacucaugcuagauuguc

SEQ ID NO: 998236 - RNA, 19 nt, Artificial Sequence
  Description of Artificial Sequence: Synthetic oligonucleotide
  Sense strand starting at position 2376 of SEQ ID NO: 914362
ucuagcaugagugaaagua

SEQ ID NO: 998237 - RNA, 19 nt, Artificial Sequence
  Description of Artificial Sequence: Synthetic oligonucleotide
  Antisense strand to SEQ ID NO: 998236
uacuuucacucaugcuaga

SEQ ID NO: 998238 - RNA, 19 nt, Artificial Sequence
  Description of Artificial Sequence: Synthetic oligonucleotide
  Sense strand starting at position 2384 of SEQ ID NO: 914362
gagugaaaguaugcccuua

SEQ ID NO: 998239 - RNA, 19 nt, Artificial Sequence
  Description of Artificial Sequence: Synthetic oligonucleotide
  Antisense strand to SEQ ID NO: 998238
uaagggcauacuuucacuc

SEQ ID NO: 998240 - RNA, 19 nt, Artificial Sequence
  Description of Artificial Sequence: Synthetic oligonucleotide
  Sense strand starting at position 2386 of SEQ ID NO: 914362
gugaaaguaugcccuuaaa

SEQ ID NO: 998241 - RNA, 19 nt, Artificial Sequence
  Description of Artificial Sequence: Synthetic oligonucleotide
  Antisense strand to SEQ ID NO: 998240
uuuaagggcauacuuucac

SEQ ID NO: 998242 - RNA, 19 nt, Artificial Sequence
  Description of Artificial Sequence: Synthetic oligonucleotide
  Sense strand starting at position 2442 of SEQ ID NO: 914362
agcaaauacugugcuacaa

SEQ ID NO: 998243 - RNA, 19 nt, Artificial Sequence
  Description of Artificial Sequence: Synthetic oligonucleotide
  Antisense strand to SEQ ID NO: 998242
uuguagcacaguauuugcu

SEQ ID NO: 998244 - RNA, 19 nt, Artificial Sequence
  Description of Artificial Sequence: Synthetic oligonucleotide
  Sense strand starting at position 2539 of SEQ ID NO: 914362
ccagcaaagugacuaacau

SEQ ID NO: 998245 - RNA, 19 nt, Artificial Sequence
  Description of Artificial Sequence: Synthetic oligonucleotide
  Antisense strand to SEQ ID NO: 998244
auguuagucacuuugcugg

SEQ ID NO: 998246 - RNA, 19 nt, Artificial Sequence
  Description of Artificial Sequence: Synthetic oligonucleotide
  Sense strand starting at position 2815 of SEQ ID NO: 914362
gaagauaguucgguauaua

SEQ ID NO: 998247 - RNA, 19 nt, Artificial Sequence
  Description of Artificial Sequence: Synthetic oligonucleotide
  Antisense strand to SEQ ID NO: 998246
uauauaccgaacuaucuuc

SEQ ID NO: 998248 - RNA, 19 nt, Artificial Sequence
  Description of Artificial Sequence: Synthetic oligonucleotide
  Sense strand starting at position 2816 of SEQ ID NO: 914362
aagauaguucgguauauau

SEQ ID NO: 998249 - RNA, 19 nt, Artificial Sequence
  Description of Artificial Sequence: Synthetic oligonucleotide
  Antisense strand to SEQ ID NO: 998248
auauauaccgaacuaucuu

SEQ ID NO: 998250 - RNA, 19 nt, Artificial Sequence
  Description of Artificial Sequence: Synthetic oligonucleotide
  Sense strand starting at position 2910 of SEQ ID NO: 914362
guguaaauuaaagggcaau

SEQ ID NO: 998251 - RNA, 19 nt, Artificial Sequence
  Description of Artificial Sequence: Synthetic oligonucleotide
  Antisense strand to SEQ ID NO: 998250
auugcccuuuaauuuacac

SEQ ID NO: 998252 - RNA, 19 nt, Artificial Sequence
  Description of Artificial Sequence: Synthetic oligonucleotide
  Sense strand starting at position 2927 of SEQ ID NO: 914362
auaguauuccugcaauagc

SEQ ID NO: 998253 - RNA, 19 nt, Artificial Sequence
  Description of Artificial Sequence: Synthetic oligonucleotide
  Antisense strand to SEQ ID NO: 998252
gcuauugcaggaauacuau

SEQ ID NO: 998254 - RNA, 19 nt, Artificial Sequence
  Description of Artificial Sequence: Synthetic oligonucleotide
  Sense strand starting at position 2930 of SEQ ID NO: 914362
guauuccugcaauagcauu

SEQ ID NO: 998255 - RNA, 19 nt, Artificial Sequence
  Description of Artificial Sequence: Synthetic oligonucleotide
  Antisense strand to SEQ ID NO: 998254
aaugcuauugcaggaauac

SEQ ID NO: 998256 - RNA, 19 nt, Artificial Sequence
  Description of Artificial Sequence: Synthetic oligonucleotide
  Sense strand starting at position 2938 of SEQ ID NO: 914362
gcaauagcauuucuccagu

SEQ ID NO: 998257 - RNA, 19 nt, Artificial Sequence
  Description of Artificial Sequence: Synthetic oligonucleotide
  Antisense strand to SEQ ID NO: 998256
acuggagaaaugcuauugc

SEQ ID NO: 998258 - RNA, 19 nt, Artificial Sequence
  Description of Artificial Sequence: Synthetic oligonucleotide
  Sense strand starting at position 3432 of SEQ ID NO: 914362
aacagugcugaacaguaaa

SEQ ID NO: 998259 - RNA, 19 nt, Artificial Sequence
  Description of Artificial Sequence: Synthetic oligonucleotide
  Antisense strand to SEQ ID NO: 998258
uuuacuguucagcacuguu

SEQ ID NO: 998260 - RNA, 19 nt, Artificial Sequence
  Description of Artificial Sequence: Synthetic oligonucleotide
  Sense strand starting at position 3541 of SEQ ID NO: 914362
gauguuaaacaauggugau

SEQ ID NO: 998261 - RNA, 19 nt, Artificial Sequence
  Description of Artificial Sequence: Synthetic oligonucleotide
  Antisense strand to SEQ ID NO: 998260
aucaccauuguuuaacauc

SEQ ID NO: 998262 - RNA, 19 nt, Artificial Sequence
  Description of Artificial Sequence: Synthetic oligonucleotide
  Sense strand starting at position 3661 of SEQ ID NO: 914362
uaaugaugguaggucgaaa

SEQ ID NO: 998263 - RNA, 19 nt, Artificial Sequence
  Description of Artificial Sequence: Synthetic oligonucleotide
  Antisense strand to SEQ ID NO: 998262
uuucgaccuaccaucauua

SEQ ID NO: 998264 - RNA, 19 nt, Artificial Sequence
  Description of Artificial Sequence: Synthetic oligonucleotide
  Sense strand starting at position 3674 of SEQ ID NO: 914362
ucgaaauccagaugacaug

SEQ ID NO: 998265 - RNA, 19 nt, Artificial Sequence
  Description of Artificial Sequence: Synthetic oligonucleotide
  Antisense strand to SEQ ID NO: 998264
caugucaucuggauuucga

SEQ ID NO: 998266 - RNA, 19 nt, Artificial Sequence
  Description of Artificial Sequence: Synthetic oligonucleotide
  Sense strand starting at position 26 of SEQ ID NO: 914363
ucuuucuuucguucguuaa

SEQ ID NO: 998267 - RNA, 19 nt, Artificial Sequence
  Description of Artificial Sequence: Synthetic oligonucleotide
  Antisense strand to SEQ ID NO: 998266
uuaacgaacgaaagaaaga

SEQ ID NO: 998268 - RNA, 19 nt, Artificial Sequence
  Description of Artificial Sequence: Synthetic oligonucleotide
  Sense strand starting at position 234 of SEQ ID NO: 914363
ggguuauaggaguguggag

SEQ ID NO: 998269 - RNA, 19 nt, Artificial Sequence
  Description of Artificial Sequence: Synthetic oligonucleotide
  Antisense strand to SEQ ID NO: 998268
cuccacacuccuauaaccc

SEQ ID NO: 998270 - RNA, 19 nt, Artificial Sequence
  Description of Artificial Sequence: Synthetic oligonucleotide
  Sense strand starting at position 1049 of SEQ ID NO: 914363
agcugaaauuaccuugauu

SEQ ID NO: 998271 - RNA, 19 nt, Artificial Sequence
  Description of Artificial Sequence: Synthetic oligonucleotide
  Antisense strand to SEQ ID NO: 998270
aaucaagguaauuucagcu

SEQ ID NO: 998272 - RNA, 19 nt, Artificial Sequence
  Description of Artificial Sequence: Synthetic oligonucleotide
  Sense strand starting at position 1332 of SEQ ID NO: 914363
gguccaaguuaacuaaacu

SEQ ID NO: 998273 - RNA, 19 nt, Artificial Sequence
  Description of Artificial Sequence: Synthetic oligonucleotide
  Antisense strand to SEQ ID NO: 998272
aguuuaguuaacuuggacc

SEQ ID NO: 998274 - RNA, 19 nt, Artificial Sequence
  Description of Artificial Sequence: Synthetic oligonucleotide
  Sense strand starting at position 1349 of SEQ ID NO: 914363
cucauuauauccgcaggaa

SEQ ID NO: 998275 - RNA, 19 nt, Artificial Sequence
  Description of Artificial Sequence: Synthetic oligonucleotide
  Antisense strand to SEQ ID NO: 998274
uuccugcggauauaaugag

SEQ ID NO: 998276 - RNA, 19 nt, Artificial Sequence
  Description of Artificial Sequence: Synthetic oligonucleotide
  Sense strand starting at position 1350 of SEQ ID NO: 914363
ucauuauauccgcaggaag

SEQ ID NO: 998277 - RNA, 19 nt, Artificial Sequence
  Description of Artificial Sequence: Synthetic oligonucleotide
  Antisense strand to SEQ ID NO: 998276
cuuccugcggauauaauga

SEQ ID NO: 998278 - RNA, 19 nt, Artificial Sequence
  Description of Artificial Sequence: Synthetic oligonucleotide
  Sense strand starting at position 1352 of SEQ ID NO: 914363
auuauauccgcaggaagac

SEQ ID NO: 998279 - RNA, 19 nt, Artificial Sequence
  Description of Artificial Sequence: Synthetic oligonucleotide
  Antisense strand to SEQ ID NO: 998278
gucuuccugcggauauaau

SEQ ID NO: 998280 - RNA, 19 nt, Artificial Sequence
  Description of Artificial Sequence: Synthetic oligonucleotide
  Sense strand starting at position 1362 of SEQ ID NO: 914363
caggaagacugaguuucuu

SEQ ID NO: 998281 - RNA, 19 nt, Artificial Sequence
  Description of Artificial Sequence: Synthetic oligonucleotide
  Antisense strand to SEQ ID NO: 998280
aagaaacucagucuuccug

SEQ ID NO: 998282 - RNA, 19 nt, Artificial Sequence
  Description of Artificial Sequence: Synthetic oligonucleotide
  Sense strand starting at position 1593 of SEQ ID NO: 914363
uggcuagauccuggagaua

SEQ ID NO: 998283 - RNA, 19 nt, Artificial Sequence
  Description of Artificial Sequence: Synthetic oligonucleotide
  Antisense strand to SEQ ID NO: 998282
uaucuccaggaucuagcca

SEQ ID NO: 998284 - RNA, 19 nt, Artificial Sequence
  Description of Artificial Sequence: Synthetic oligonucleotide
  Sense strand starting at position 1991 of SEQ ID NO: 914363
acuugauauugcucuagac

SEQ ID NO: 998285 - RNA, 19 nt, Artificial Sequence
  Description of Artificial Sequence: Synthetic oligonucleotide
  Antisense strand to SEQ ID NO: 998284
gucuagagcaauaucaagu

SEQ ID NO: 998286 - RNA, 19 nt, Artificial Sequence
  Description of Artificial Sequence: Synthetic oligonucleotide
  Sense strand starting at position 1995 of SEQ ID NO: 914363
gauauugcucuagacgguu

SEQ ID NO: 998287 - RNA, 19 nt, Artificial Sequence
  Description of Artificial Sequence: Synthetic oligonucleotide
  Antisense strand to SEQ ID NO: 998286
aaccgucuagagcaauauc

SEQ ID NO: 998288 - RNA, 19 nt, Artificial Sequence
  Description of Artificial Sequence: Synthetic oligonucleotide
  Sense strand starting at position 2064 of SEQ ID NO: 914363
uccuguuaauaguugauca

SEQ ID NO: 998289 - RNA, 19 nt, Artificial Sequence
  Description of Artificial Sequence: Synthetic oligonucleotide
  Antisense strand to SEQ ID NO: 998288
ugaucaacuauuaacagga

SEQ ID NO: 998290 - RNA, 19 nt, Artificial Sequence
  Description of Artificial Sequence: Synthetic oligonucleotide
  Sense strand starting at position 2066 of SEQ ID NO: 914363
cuguuaauaguugaucaca

SEQ ID NO: 998291 - RNA, 19 nt, Artificial Sequence
  Description of Artificial Sequence: Synthetic oligonucleotide
  Antisense strand to SEQ ID NO: 998290
ugugaucaacuauuaacag

SEQ ID NO: 998292 - RNA, 19 nt, Artificial Sequence
  Description of Artificial Sequence: Synthetic oligonucleotide
  Sense strand starting at position 2068 of SEQ ID NO: 914363
guuaauaguugaucacaug

SEQ ID NO: 998293 - RNA, 19 nt, Artificial Sequence
  Description of Artificial Sequence: Synthetic oligonucleotide
  Antisense strand to SEQ ID NO: 998292
caugugaucaacuauuaac

SEQ ID NO: 998294 - RNA, 19 nt, Artificial Sequence
  Description of Artificial Sequence: Synthetic oligonucleotide
  Sense strand starting at position 2069 of SEQ ID NO: 914363
uuaauaguugaucacaugu

SEQ ID NO: 998295 - RNA, 19 nt, Artificial Sequence
  Description of Artificial Sequence: Synthetic oligonucleotide
  Antisense strand to SEQ ID NO: 998294
acaugugaucaacuauuaa

SEQ ID NO: 998296 - RNA, 19 nt, Artificial Sequence
  Description of Artificial Sequence: Synthetic oligonucleotide
  Sense strand starting at position 2100 of SEQ ID NO: 914363
uuucuucuacgagaggauu

SEQ ID NO: 998297 - RNA, 19 nt, Artificial Sequence
  Description of Artificial Sequence: Synthetic oligonucleotide
  Antisense strand to SEQ ID NO: 998296
aauccucucguagaagaaa

SEQ ID NO: 998298 - RNA, 19 nt, Artificial Sequence
  Description of Artificial Sequence: Synthetic oligonucleotide
  Sense strand starting at position 2108 of SEQ ID NO: 914363
acgagaggauuacccauua

SEQ ID NO: 998299 - RNA, 19 nt, Artificial Sequence
  Description of Artificial Sequence: Synthetic oligonucleotide
  Antisense strand to SEQ ID NO: 998298
uaauggguaauccucucgu

SEQ ID NO: 998300 - RNA, 19 nt, Artificial Sequence
  Description of Artificial Sequence: Synthetic oligonucleotide
  Sense strand starting at position 2119 of SEQ ID NO: 914363
acccauuaccggugauaug

SEQ ID NO: 998301 - RNA, 19 nt, Artificial Sequence
  Description of Artificial Sequence: Synthetic oligonucleotide
  Antisense strand to SEQ ID NO: 998300
cauaucaccgguaaugggu

SEQ ID NO: 998302 - RNA, 19 nt, Artificial Sequence
  Description of Artificial Sequence: Synthetic oligonucleotide
  Sense strand starting at position 2530 of SEQ ID NO: 914363
cuguucuuuggcgugugaa

SEQ ID NO: 998303 - RNA, 19 nt, Artificial Sequence
  Description of Artificial Sequence: Synthetic oligonucleotide
  Antisense strand to SEQ ID NO: 998302
uucacacgccaaagaacag

SEQ ID NO: 998304 - RNA, 19 nt, Artificial Sequence
  Description of Artificial Sequence: Synthetic oligonucleotide
  Sense strand starting at position 2532 of SEQ ID NO: 914363
guucuuuggcgugugaagu

SEQ ID NO: 998305 - RNA, 19 nt, Artificial Sequence
  Description of Artificial Sequence: Synthetic oligonucleotide
  Antisense strand to SEQ ID NO: 998304
acuucacacgccaaagaac

SEQ ID NO: 998306 - RNA, 19 nt, Artificial Sequence
  Description of Artificial Sequence: Synthetic oligonucleotide
  Sense strand starting at position 2553 of SEQ ID NO: 914363
uaggaagagccgugauaug

SEQ ID NO: 998307 - RNA, 19 nt, Artificial Sequence
  Description of Artificial Sequence: Synthetic oligonucleotide
  Antisense strand to SEQ ID NO: 998306
cauaucacggcucuuccua

SEQ ID NO: 998308 - RNA, 19 nt, Artificial Sequence
  Description of Artificial Sequence: Synthetic oligonucleotide
  Sense strand starting at position 2563 of SEQ ID NO: 914363
cgugauaugcccguuguua

SEQ ID NO: 998309 - RNA, 19 nt, Artificial Sequence
  Description of Artificial Sequence: Synthetic oligonucleotide
  Antisense strand to SEQ ID NO: 998308
uaacaacgggcauaucacg

SEQ ID NO: 998310 - RNA, 19 nt, Artificial Sequence
  Description of Artificial Sequence: Synthetic oligonucleotide
  Sense strand starting at position 2652 of SEQ ID NO: 914363
uggagacucaagugucuua

SEQ ID NO: 998311 - RNA, 19 nt, Artificial Sequence
  Description of Artificial Sequence: Synthetic oligonucleotide
  Antisense strand to SEQ ID NO: 998310
uaagacacuugagucucca

SEQ ID NO: 998312 - RNA, 19 nt, Artificial Sequence
  Description of Artificial Sequence: Synthetic oligonucleotide
  Sense strand starting at position 2713 of SEQ ID NO: 914363
guuugaagucaucauguga

SEQ ID NO: 998313 - RNA, 19 nt, Artificial Sequence
  Description of Artificial Sequence: Synthetic oligonucleotide
  Antisense strand to SEQ ID NO: 998312
ucacaugaugacuucaaac

SEQ ID NO: 998314 - RNA, 19 nt, Artificial Sequence
  Description of Artificial Sequence: Synthetic oligonucleotide
  Sense strand starting at position 2923 of SEQ ID NO: 914363
gaguucuuacgugauucua

SEQ ID NO: 998315 - RNA, 19 nt, Artificial Sequence
  Description of Artificial Sequence: Synthetic oligonucleotide
  Antisense strand to SEQ ID NO: 998314
uagaaucacguaagaacuc

SEQ ID NO: 998316 - RNA, 19 nt, Artificial Sequence
  Description of Artificial Sequence: Synthetic oligonucleotide
  Sense strand starting at position 2935 of SEQ ID NO: 914363
gauucuaaugaaugagcga

SEQ ID NO: 998317 - RNA, 19 nt, Artificial Sequence
  Description of Artificial Sequence: Synthetic oligonucleotide
  Antisense strand to SEQ ID NO: 998316
ucgcucauucauuagaauc

SEQ ID NO: 998318 - RNA, 19 nt, Artificial Sequence
  Description of Artificial Sequence: Synthetic oligonucleotide
  Sense strand starting at position 2940 of SEQ ID NO: 914363
uaaugaaugagcgagguua

SEQ ID NO: 998319 - RNA, 19 nt, Artificial Sequence
  Description of Artificial Sequence: Synthetic oligonucleotide
  Antisense strand to SEQ ID NO: 998318
uaaccucgcucauucauua

SEQ ID NO: 998320 - RNA, 19 nt, Artificial Sequence
  Description of Artificial Sequence: Synthetic oligonucleotide
  Sense strand starting at position 3030 of SEQ ID NO: 914363
gguccuggcacugaaaguu

SEQ ID NO: 998321 - RNA, 19 nt, Artificial Sequence
  Description of Artificial Sequence: Synthetic oligonucleotide
  Antisense strand to SEQ ID NO: 998320
aacuuucagugccaggacc

SEQ ID NO: 998322 - RNA, 19 nt, Artificial Sequence
  Description of Artificial Sequence: Synthetic oligonucleotide
  Sense strand starting at position 3038 of SEQ ID NO: 914363
cacugaaaguucccagaga

SEQ ID NO: 998323 - RNA, 19 nt, Artificial Sequence
  Description of Artificial Sequence: Synthetic oligonucleotide
  Antisense strand to SEQ ID NO: 998322
ucucugggaacuuucagug

SEQ ID NO: 998324 - RNA, 19 nt, Artificial Sequence
  Description of Artificial Sequence: Synthetic oligonucleotide
  Sense strand starting at position 3178 of SEQ ID NO: 914363
ccugucgccagguaagaaa

SEQ ID NO: 998325 - RNA, 19 nt, Artificial Sequence
  Description of Artificial Sequence: Synthetic oligonucleotide
  Antisense strand to SEQ ID NO: 998324
uuucuuaccuggcgacagg

SEQ ID NO: 998326 - RNA, 19 nt, Artificial Sequence
  Description of Artificial Sequence: Synthetic oligonucleotide
  Sense strand starting at position 3234 of SEQ ID NO: 914363
gggaacuuguugcuuauca

SEQ ID NO: 998327 - RNA, 19 nt, Artificial Sequence
  Description of Artificial Sequence: Synthetic oligonucleotide
  Antisense strand to SEQ ID NO: 998326
ugauaagcaacaaguuccc

SEQ ID NO: 998328 - RNA, 19 nt, Artificial Sequence
  Description of Artificial Sequence: Synthetic oligonucleotide
  Sense strand starting at position 3261 of SEQ ID NO: 914363
agacuaccgcuuuaauaau

SEQ ID NO: 998329 - RNA, 19 nt, Artificial Sequence
  Description of Artificial Sequence: Synthetic oligonucleotide
  Antisense strand to SEQ ID NO: 998328
auuauuaaagcgguagucu

SEQ ID NO: 998330 - RNA, 19 nt, Artificial Sequence
  Description of Artificial Sequence: Synthetic oligonucleotide
  Sense strand starting at position 3447 of SEQ ID NO: 914363
augaggucgugagugauga

SEQ ID NO: 998331 - RNA, 19 nt, Artificial Sequence
  Description of Artificial Sequence: Synthetic oligonucleotide
  Antisense strand to SEQ ID NO: 998330
ucaucacucacgaccucau

SEQ ID NO: 998332 - RNA, 19 nt, Artificial Sequence
  Description of Artificial Sequence: Synthetic oligonucleotide
  Sense strand starting at position 3498 of SEQ ID NO: 914363
agugacuuguccuugggaa

SEQ ID NO: 998333 - RNA, 19 nt, Artificial Sequence
  Description of Artificial Sequence: Synthetic oligonucleotide
  Antisense strand to SEQ ID NO: 998332
uucccaaggacaagucacu

SEQ ID NO: 998334 - RNA, 19 nt, Artificial Sequence
  Description of Artificial Sequence: Synthetic oligonucleotide
  Sense strand starting at position 3499 of SEQ ID NO: 914363
gugacuuguccuugggaac

SEQ ID NO: 998335 - RNA, 19 nt, Artificial Sequence
  Description of Artificial Sequence: Synthetic oligonucleotide
  Antisense strand to SEQ ID NO: 998334
guucccaaggacaagucac

SEQ ID NO: 998336 - RNA, 19 nt, Artificial Sequence
  Description of Artificial Sequence: Synthetic oligonucleotide
  Sense strand starting at position 3500 of SEQ ID NO: 914363
ugacuuguccuugggaaca

SEQ ID NO: 998337 - RNA, 19 nt, Artificial Sequence
  Description of Artificial Sequence: Synthetic oligonucleotide
  Antisense strand to SEQ ID NO: 998336
uguucccaaggacaaguca

SEQ ID NO: 998338 - RNA, 19 nt, Artificial Sequence
  Description of Artificial Sequence: Synthetic oligonucleotide
  Sense strand starting at position 3573 of SEQ ID NO: 914363
uacugaugacuaggcgaga

SEQ ID NO: 998339 - RNA, 19 nt, Artificial Sequence
  Description of Artificial Sequence: Synthetic oligonucleotide
  Antisense strand to SEQ ID NO: 998338
ucucgccuagucaucagua

SEQ ID NO: 998340 - RNA, 19 nt, Artificial Sequence
  Description of Artificial Sequence: Synthetic oligonucleotide
  Sense strand starting at position 3650 of SEQ ID NO: 914363
ggcugaguugaaugaaguu

SEQ ID NO: 998341 - RNA, 19 nt, Artificial Sequence
  Description of Artificial Sequence: Synthetic oligonucleotide
  Antisense strand to SEQ ID NO: 998340
aacuucauucaacucagcc

SEQ ID NO: 998342 - RNA, 19 nt, Artificial Sequence
  Description of Artificial Sequence: Synthetic oligonucleotide
  Sense strand starting at position 3690 of SEQ ID NO: 914363
gguuauggcuucccaaaug

SEQ ID NO: 998343 - RNA, 19 nt, Artificial Sequence
  Description of Artificial Sequence: Synthetic oligonucleotide
  Antisense strand to SEQ ID NO: 998342
cauuugggaagccauaacc

SEQ ID NO: 998344 - RNA, 19 nt, Artificial Sequence
  Description of Artificial Sequence: Synthetic oligonucleotide
  Sense strand starting at position 3700 of SEQ ID NO: 914363
ucccaaaugugaguuaaca

SEQ ID NO: 998345 - RNA, 19 nt, Artificial Sequence
  Description of Artificial Sequence: Synthetic oligonucleotide
  Antisense strand to SEQ ID NO: 998344
uguuaacucacauuuggga

SEQ ID NO: 998346 - RNA, 19 nt, Artificial Sequence
  Description of Artificial Sequence: Synthetic oligonucleotide
  Sense strand starting at position 3 of SEQ ID NO: 914364
ugaagagcucuuuguaaau

SEQ ID NO: 998347 - RNA, 19 nt, Artificial Sequence
  Description of Artificial Sequence: Synthetic oligonucleotide
  Antisense strand to SEQ ID NO: 998346
auuuacaaagagcucuuca

SEQ ID NO: 998348 - RNA, 19 nt, Artificial Sequence
  Description of Artificial Sequence: Synthetic oligonucleotide
  Sense strand starting at position 182 of SEQ ID NO: 914364
uguuaaagaccucaagguu

SEQ ID NO: 998349 - RNA, 19 nt, Artificial Sequence
  Description of Artificial Sequence: Synthetic oligonucleotide
  Antisense strand to SEQ ID NO: 998348
aaccuugaggucuuuaaca

SEQ ID NO: 998350 - RNA, 19 nt, Artificial Sequence
  Description of Artificial Sequence: Synthetic oligonucleotide
  Sense strand starting at position 202 of SEQ ID NO: 914364
caagacuuagacuguuaag

SEQ ID NO: 998351 - RNA, 19 nt, Artificial Sequence
  Description of Artificial Sequence: Synthetic oligonucleotide
  Antisense strand to SEQ ID NO: 998350
cuuaacagucuaagucuug

SEQ ID NO: 998352 - RNA, 19 nt, Artificial Sequence
  Description of Artificial Sequence: Synthetic oligonucleotide
  Sense strand starting at position 297 of SEQ ID NO: 914364
ggauaauauucccuuaacg

SEQ ID NO: 998353 - RNA, 19 nt, Artificial Sequence
  Description of Artificial Sequence: Synthetic oligonucleotide
  Antisense strand to SEQ ID NO: 998352
cguuaagggaauauuaucc

SEQ ID NO: 998354 - RNA, 19 nt, Artificial Sequence
  Description of Artificial Sequence: Synthetic oligonucleotide
  Sense strand starting at position 357 of SEQ ID NO: 914364
cgaguauucgcuagcaagg

SEQ ID NO: 998355 - RNA, 19 nt, Artificial Sequence
  Description of Artificial Sequence: Synthetic oligonucleotide
  Antisense strand to SEQ ID NO: 998354
ccuugcuagcgaauacucg

SEQ ID NO: 998356 - RNA, 19 nt, Artificial Sequence
  Description of Artificial Sequence: Synthetic oligonucleotide
  Sense strand starting at position 402 of SEQ ID NO: 914364
aauuuagagugacagauga

SEQ ID NO: 998357 - RNA, 19 nt, Artificial Sequence
  Description of Artificial Sequence: Synthetic oligonucleotide
  Antisense strand to SEQ ID NO: 998356
ucaucugucacucuaaauu

SEQ ID NO: 998358 - RNA, 19 nt, Artificial Sequence
  Description of Artificial Sequence: Synthetic oligonucleotide
  Sense strand starting at position 467 of SEQ ID NO: 914364
accucuuucuuggugaauu

SEQ ID NO: 998359 - RNA, 19 nt, Artificial Sequence
  Description of Artificial Sequence: Synthetic oligonucleotide
  Antisense strand to SEQ ID NO: 998358
aauucaccaagaaagaggu

SEQ ID NO: 998360 - RNA, 19 nt, Artificial Sequence
  Description of Artificial Sequence: Synthetic oligonucleotide
  Sense strand starting at position 469 of SEQ ID NO: 914364
cucuuucuuggugaauuag

SEQ ID NO: 998361 - RNA, 19 nt, Artificial Sequence
  Description of Artificial Sequence: Synthetic oligonucleotide
  Antisense strand to SEQ ID NO: 998360
cuaauucaccaagaaagag

SEQ ID NO: 998362 - RNA, 19 nt, Artificial Sequence
  Description of Artificial Sequence: Synthetic oligonucleotide
  Sense strand starting at position 556 of SEQ ID NO: 914364
gcaagcguugcaccuuuaa

SEQ ID NO: 998363 - RNA, 19 nt, Artificial Sequence
  Description of Artificial Sequence: Synthetic oligonucleotide
  Antisense strand to SEQ ID NO: 998362
uuaaaggugcaacgcuugc

SEQ ID NO: 998364 - RNA, 19 nt, Artificial Sequence
  Description of Artificial Sequence: Synthetic oligonucleotide
  Sense strand starting at position 662 of SEQ ID NO: 914364
cccugcagauccguauuua

SEQ ID NO: 998365 - RNA, 19 nt, Artificial Sequence
  Description of Artificial Sequence: Synthetic oligonucleotide
  Antisense strand to SEQ ID NO: 998364
uaaauacggaucugcaggg

SEQ ID NO: 998366 - RNA, 19 nt, Artificial Sequence
  Description of Artificial Sequence: Synthetic oligonucleotide
  Sense strand starting at position 847 of SEQ ID NO: 914364
cguagaucugacugagaaa

SEQ ID NO: 998367 - RNA, 19 nt, Artificial Sequence
  Description of Artificial Sequence: Synthetic oligonucleotide
  Antisense strand to SEQ ID NO: 998366
uuucucagucagaucuacg

SEQ ID NO: 998368 - RNA, 19 nt, Artificial Sequence
  Description of Artificial Sequence: Synthetic oligonucleotide
  Sense strand starting at position 1058 of SEQ ID NO: 914364
ucuuucuuucguucguuaa

SEQ ID NO: 998369 - RNA, 19 nt, Artificial Sequence
  Description of Artificial Sequence: Synthetic oligonucleotide
  Antisense strand to SEQ ID NO: 998368
uuaacgaacgaaagaaaga

SEQ ID NO: 998370 - RNA, 19 nt, Artificial Sequence
  Description of Artificial Sequence: Synthetic oligonucleotide
  Sense strand starting at position 1266 of SEQ ID NO: 914364
ggguuauaggaguguggag

SEQ ID NO: 998371 - RNA, 19 nt, Artificial Sequence
  Description of Artificial Sequence: Synthetic oligonucleotide
  Antisense strand to SEQ ID NO: 998370
cuccacacuccuauaaccc

SEQ ID NO: 998372 - RNA, 19 nt, Artificial Sequence
  Description of Artificial Sequence: Synthetic oligonucleotide
  Sense strand starting at position 2081 of SEQ ID NO: 914364
agcugaaauuaccuugauu

SEQ ID NO: 998373 - RNA, 19 nt, Artificial Sequence
  Description of Artificial Sequence: Synthetic oligonucleotide
  Antisense strand to SEQ ID NO: 998372
aaucaagguaauuucagcu

SEQ ID NO: 998374 - RNA, 19 nt, Artificial Sequence
  Description of Artificial Sequence: Synthetic oligonucleotide
  Sense strand starting at position 2364 of SEQ ID NO: 914364
gguccaaguuaacuaaacu

SEQ ID NO: 998375 - RNA, 19 nt, Artificial Sequence
  Description of Artificial Sequence: Synthetic oligonucleotide
  Antisense strand to SEQ ID NO: 998374
aguuuaguuaacuuggacc

SEQ ID NO: 998376 - RNA, 19 nt, Artificial Sequence
  Description of Artificial Sequence: Synthetic oligonucleotide
  Sense strand starting at position 2381 of SEQ ID NO: 914364
cucauuauauccgcaggaa

SEQ ID NO: 998377 - RNA, 19 nt, Artificial Sequence
  Description of Artificial Sequence: Synthetic oligonucleotide
  Antisense strand to SEQ ID NO: 998376
uuccugcggauauaaugag

SEQ ID NO: 998378 - RNA, 19 nt, Artificial Sequence
  Description of Artificial Sequence: Synthetic oligonucleotide
  Sense strand starting at position 2382 of SEQ ID NO: 914364
ucauuauauccgcaggaag

SEQ ID NO: 998379 - RNA, 19 nt, Artificial Sequence
  Description of Artificial Sequence: Synthetic oligonucleotide
  Antisense strand to SEQ ID NO: 998378
cuuccugcggauauaauga

SEQ ID NO: 998380 - RNA, 19 nt, Artificial Sequence
  Description of Artificial Sequence: Synthetic oligonucleotide
  Sense strand starting at position 2384 of SEQ ID NO: 914364
auuauauccgcaggaagac

SEQ ID NO: 998381 - RNA, 19 nt, Artificial Sequence
  Description of Artificial Sequence: Synthetic oligonucleotide
  Antisense strand to SEQ ID NO: 998380
gucuuccugcggauauaau

SEQ ID NO: 998382 - RNA, 19 nt, Artificial Sequence
  Description of Artificial Sequence: Synthetic oligonucleotide
  Sense strand starting at position 2394 of SEQ ID NO: 914364
caggaagacugaguuucuu

SEQ ID NO: 998383 - RNA, 19 nt, Artificial Sequence
  Description of Artificial Sequence: Synthetic oligonucleotide
  Antisense strand to SEQ ID NO: 998382
aagaaacucagucuuccug

SEQ ID NO: 998384 - RNA, 19 nt, Artificial Sequence
  Description of Artificial Sequence: Synthetic oligonucleotide
  Sense strand starting at position 2625 of SEQ ID NO: 914364
uggcuagauccuggagaua

SEQ ID NO: 998385 - RNA, 19 nt, Artificial Sequence
  Description of Artificial Sequence: Synthetic oligonucleotide
  Antisense strand to SEQ ID NO: 998384
uaucuccaggaucuagcca

SEQ ID NO: 998386 - RNA, 19 nt, Artificial Sequence
  Description of Artificial Sequence: Synthetic oligonucleotide
  Sense strand starting at position 3023 of SEQ ID NO: 914364
acuugauauugcucuagac

SEQ ID NO: 998387 - RNA, 19 nt, Artificial Sequence
  Description of Artificial Sequence: Synthetic oligonucleotide
  Antisense strand to SEQ ID NO: 998386
gucuagagcaauaucaagu

SEQ ID NO: 998388 - RNA, 19 nt, Artificial Sequence
  Description of Artificial Sequence: Synthetic oligonucleotide
  Sense strand starting at position 3027 of SEQ ID NO: 914364
gauauugcucuagacgguu

SEQ ID NO: 998389 - RNA, 19 nt, Artificial Sequence
  Description of Artificial Sequence: Synthetic oligonucleotide
  Antisense strand to SEQ ID NO: 998388
aaccgucuagagcaauauc

SEQ ID NO: 998390 - RNA, 19 nt, Artificial Sequence
  Description of Artificial Sequence: Synthetic oligonucleotide
  Sense strand starting at position 3096 of SEQ ID NO: 914364
uccuguuaauaguugauca

SEQ ID NO: 998391 - RNA, 19 nt, Artificial Sequence
  Description of Artificial Sequence: Synthetic oligonucleotide
  Antisense strand to SEQ ID NO: 998390
ugaucaacuauuaacagga

SEQ ID NO: 998392 - RNA, 19 nt, Artificial Sequence
  Description of Artificial Sequence: Synthetic oligonucleotide
  Sense strand starting at position 3098 of SEQ ID NO: 914364
cuguuaauaguugaucaca

SEQ ID NO: 998393 - RNA, 19 nt, Artificial Sequence
  Description of Artificial Sequence: Synthetic oligonucleotide
  Antisense strand to SEQ ID NO: 998392
ugugaucaacuauuaacag

SEQ ID NO: 998394 - RNA, 19 nt, Artificial Sequence
  Description of Artificial Sequence: Synthetic oligonucleotide
  Sense strand starting at position 3100 of SEQ ID NO: 914364
guuaauaguugaucacaug

SEQ ID NO: 998395 - RNA, 19 nt, Artificial Sequence
  Description of Artificial Sequence: Synthetic oligonucleotide
  Antisense strand to SEQ ID NO: 998394
caugugaucaacuauuaac

SEQ ID NO: 998396 - RNA, 19 nt, Artificial Sequence
  Description of Artificial Sequence: Synthetic oligonucleotide
  Sense strand starting at position 3101 of SEQ ID NO: 914364
uuaauaguugaucacaugu

SEQ ID NO: 998397 - RNA, 19 nt, Artificial Sequence
  Description of Artificial Sequence: Synthetic oligonucleotide
  Antisense strand to SEQ ID NO: 998396
acaugugaucaacuauuaa

SEQ ID NO: 998398 - RNA, 19 nt, Artificial Sequence
  Description of Artificial Sequence: Synthetic oligonucleotide
  Sense strand starting at position 3132 of SEQ ID NO: 914364
uuucuucuacgagaggauu

SEQ ID NO: 998399 - RNA, 19 nt, Artificial Sequence
  Description of Artificial Sequence: Synthetic oligonucleotide
  Antisense strand to SEQ ID NO: 998398
aauccucucguagaagaaa

SEQ ID NO: 998400 - RNA, 19 nt, Artificial Sequence
  Description of Artificial Sequence: Synthetic oligonucleotide
  Sense strand starting at position 3140 of SEQ ID NO: 914364
acgagaggauuacccauua

SEQ ID NO: 998401 - RNA, 19 nt, Artificial Sequence
  Description of Artificial Sequence: Synthetic oligonucleotide
  Antisense strand to SEQ ID NO: 998400
uaauggguaauccucucgu

SEQ ID NO: 998402 - RNA, 19 nt, Artificial Sequence
  Description of Artificial Sequence: Synthetic oligonucleotide
  Sense strand starting at position 3151 of SEQ ID NO: 914364
acccauuaccggugauaug

SEQ ID NO: 998403 - RNA, 19 nt, Artificial Sequence
  Description of Artificial Sequence: Synthetic oligonucleotide
  Antisense strand to SEQ ID NO: 998402
cauaucaccgguaaugggu

SEQ ID NO: 998404 - RNA, 19 nt, Artificial Sequence
  Description of Artificial Sequence: Synthetic oligonucleotide
  Sense strand starting at position 3562 of SEQ ID NO: 914364
cuguucuuuggcgugugaa

SEQ ID NO: 998405 - RNA, 19 nt, Artificial Sequence
  Description of Artificial Sequence: Synthetic oligonucleotide
  Antisense strand to SEQ ID NO: 998404
uucacacgccaaagaacag

SEQ ID NO: 998406 - RNA, 19 nt, Artificial Sequence
  Description of Artificial Sequence: Synthetic oligonucleotide
  Sense strand starting at position 3564 of SEQ ID NO: 914364
guucuuuggcgugugaagu

SEQ ID NO: 998407 - RNA, 19 nt, Artificial Sequence
  Description of Artificial Sequence: Synthetic oligonucleotide
  Antisense strand to SEQ ID NO: 998406
acuucacacgccaaagaac

SEQ ID NO: 998408 - RNA, 19 nt, Artificial Sequence
  Description of Artificial Sequence: Synthetic oligonucleotide
  Sense strand starting at position 3585 of SEQ ID NO: 914364
uaggaagagccgugauaug

SEQ ID NO: 998409 - RNA, 19 nt, Artificial Sequence
  Description of Artificial Sequence: Synthetic oligonucleotide
  Antisense strand to SEQ ID NO: 998408
cauaucacggcucuuccua

SEQ ID NO: 998410 - RNA, 19 nt, Artificial Sequence
  Description of Artificial Sequence: Synthetic oligonucleotide
  Sense strand starting at position 3595 of SEQ ID NO: 914364
cgugauaugcccguuguua

SEQ ID NO: 998411 - RNA, 19 nt, Artificial Sequence
  Description of Artificial Sequence: Synthetic oligonucleotide
  Antisense strand to SEQ ID NO: 998410
uaacaacgggcauaucacg

SEQ ID NO: 998412 - RNA, 19 nt, Artificial Sequence
  Description of Artificial Sequence: Synthetic oligonucleotide
  Sense strand starting at position 3607 of SEQ ID NO: 914364
guuguuaagcaacauguca

SEQ ID NO: 998413 - RNA, 19 nt, Artificial Sequence
  Description of Artificial Sequence: Synthetic oligonucleotide
  Antisense strand to SEQ ID NO: 998412
ugacauguugcuuaacaac

SEQ ID NO: 998414 - RNA, 19 nt, Artificial Sequence
  Description of Artificial Sequence: Synthetic oligonucleotide
  Sense strand starting at position 3684 of SEQ ID NO: 914364
uggagacucaagugucuua

SEQ ID NO: 998415 - RNA, 19 nt, Artificial Sequence
  Description of Artificial Sequence: Synthetic oligonucleotide
  Antisense strand to SEQ ID NO: 998414
uaagacacuugagucucca

SEQ ID NO: 998416 - RNA, 19 nt, Artificial Sequence
  Description of Artificial Sequence: Synthetic oligonucleotide
  Sense strand starting at position 3745 of SEQ ID NO: 914364
guuugaagucaucauguga

SEQ ID NO: 998417 - RNA, 19 nt, Artificial Sequence
  Description of Artificial Sequence: Synthetic oligonucleotide
  Antisense strand to SEQ ID NO: 998416
ucacaugaugacuucaaac

SEQ ID NO: 998418 - RNA, 19 nt, Artificial Sequence
  Description of Artificial Sequence: Synthetic oligonucleotide
  Sense strand starting at position 3792 of SEQ ID NO: 914364
caccacuuggugugacuua

SEQ ID NO: 998419 - RNA, 19 nt, Artificial Sequence
  Description of Artificial Sequence: Synthetic oligonucleotide
  Antisense strand to SEQ ID NO: 998418
uaagucacaccaaguggug

SEQ ID NO: 998420 - RNA, 19 nt, Artificial Sequence
  Description of Artificial Sequence: Synthetic oligonucleotide
  Sense strand starting at position 3955 of SEQ ID NO: 914364
gaguucuuacgugauucua

SEQ ID NO: 998421 - RNA, 19 nt, Artificial Sequence
  Description of Artificial Sequence: Synthetic oligonucleotide
  Antisense strand to SEQ ID NO: 998420
uagaaucacguaagaacuc

SEQ ID NO: 998422 - RNA, 19 nt, Artificial Sequence
  Description of Artificial Sequence: Synthetic oligonucleotide
  Sense strand starting at position 3967 of SEQ ID NO: 914364
gauucuaaugaaugagcga

SEQ ID NO: 998423 - RNA, 19 nt, Artificial Sequence
  Description of Artificial Sequence: Synthetic oligonucleotide
  Antisense strand to SEQ ID NO: 998422
ucgcucauucauuagaauc

SEQ ID NO: 998424 - RNA, 19 nt, Artificial Sequence
  Description of Artificial Sequence: Synthetic oligonucleotide
  Sense strand starting at position 3972 of SEQ ID NO: 914364
uaaugaaugagcgagguua

SEQ ID NO: 998425 - RNA, 19 nt, Artificial Sequence
  Description of Artificial Sequence: Synthetic oligonucleotide
  Antisense strand to SEQ ID NO: 998424
uaaccucgcucauucauua

SEQ ID NO: 998426 - RNA, 19 nt, Artificial Sequence
  Description of Artificial Sequence: Synthetic oligonucleotide
  Sense strand starting at position 219 of SEQ ID NO: 914365
gaggcuucuuccuuaggga

SEQ ID NO: 998427 - RNA, 19 nt, Artificial Sequence
  Description of Artificial Sequence: Synthetic oligonucleotide
  Antisense strand to SEQ ID NO: 998426
ucccuaaggaagaagccuc

SEQ ID NO: 998428 - RNA, 19 nt, Artificial Sequence
  Description of Artificial Sequence: Synthetic oligonucleotide
  Sense strand starting at position 220 of SEQ ID NO: 914365
aggcuucuuccuuagggau

SEQ ID NO: 998429 - RNA, 19 nt, Artificial Sequence
  Description of Artificial Sequence: Synthetic oligonucleotide
  Antisense strand to SEQ ID NO: 998428
aucccuaaggaagaagccu

SEQ ID NO: 998430 - RNA, 19 nt, Artificial Sequence
  Description of Artificial Sequence: Synthetic oligonucleotide
  Sense strand starting at position 1425 of SEQ ID NO: 914365
uauuuagcucuucgguuga

SEQ ID NO: 998431 - RNA, 19 nt, Artificial Sequence
  Description of Artificial Sequence: Synthetic oligonucleotide
  Antisense strand to SEQ ID NO: 998430
ucaaccgaagagcuaaaua

SEQ ID NO: 998432 - RNA, 19 nt, Artificial Sequence
  Description of Artificial Sequence: Synthetic oligonucleotide
  Sense strand starting at position 1438 of SEQ ID NO: 914365
gguugagcuucgauugguc

SEQ ID NO: 998433 - RNA, 19 nt, Artificial Sequence
  Description of Artificial Sequence: Synthetic oligonucleotide
  Antisense strand to SEQ ID NO: 998432
gaccaaucgaagcucaacc

SEQ ID NO: 998434 - RNA, 19 nt, Artificial Sequence
  Description of Artificial Sequence: Synthetic oligonucleotide
  Sense strand starting at position 1441 of SEQ ID NO: 914365
ugagcuucgauuggucaaa

SEQ ID NO: 998435 - RNA, 19 nt, Artificial Sequence
  Description of Artificial Sequence: Synthetic oligonucleotide
  Antisense strand to SEQ ID NO: 998434
uuugaccaaucgaagcuca

SEQ ID NO: 998436 - RNA, 19 nt, Artificial Sequence
  Description of Artificial Sequence: Synthetic oligonucleotide
  Sense strand starting at position 1790 of SEQ ID NO: 914365
ggagggagcgagugagaau

SEQ ID NO: 998437 - RNA, 19 nt, Artificial Sequence
  Description of Artificial Sequence: Synthetic oligonucleotide
  Antisense strand to SEQ ID NO: 998436
auucucacucgcucccucc

SEQ ID NO: 998438 - RNA, 19 nt, Artificial Sequence
  Description of Artificial Sequence: Synthetic oligonucleotide
  Sense strand starting at position 1869 of SEQ ID NO: 914365
acccaaguucucugggaga

SEQ ID NO: 998439 - RNA, 19 nt, Artificial Sequence
  Description of Artificial Sequence: Synthetic oligonucleotide
  Antisense strand to SEQ ID NO: 998438
ucucccagagaacuugggu

SEQ ID NO: 998440 - RNA, 19 nt, Artificial Sequence
  Description of Artificial Sequence: Synthetic oligonucleotide
  Sense strand starting at position 2048 of SEQ ID NO: 914365
ucucuagaguuugccuaau

SEQ ID NO: 998441 - RNA, 19 nt, Artificial Sequence
  Description of Artificial Sequence: Synthetic oligonucleotide
  Antisense strand to SEQ ID NO: 998440
auuaggcaaacucuagaga

SEQ ID NO: 998442 - RNA, 19 nt, Artificial Sequence
  Description of Artificial Sequence: Synthetic oligonucleotide
  Sense strand starting at position 2050 of SEQ ID NO: 914365
ucuagaguuugccuaauag

SEQ ID NO: 998443 - RNA, 19 nt, Artificial Sequence
  Description of Artificial Sequence: Synthetic oligonucleotide
  Antisense strand to SEQ ID NO: 998442
cuauuaggcaaacucuaga

SEQ ID NO: 998444 - RNA, 19 nt, Artificial Sequence
  Description of Artificial Sequence: Synthetic oligonucleotide
  Sense strand starting at position 2113 of SEQ ID NO: 914365
cccagauaacguuacacca

SEQ ID NO: 998445 - RNA, 19 nt, Artificial Sequence
  Description of Artificial Sequence: Synthetic oligonucleotide
  Antisense strand to SEQ ID NO: 998444
ugguguaacguuaucuggg

SEQ ID NO: 998446 - RNA, 19 nt, Artificial Sequence
  Description of Artificial Sequence: Synthetic oligonucleotide
  Sense strand starting at position 2336 of SEQ ID NO: 914365
cguucccuucgcuuaauua

SEQ ID NO: 998447 - RNA, 19 nt, Artificial Sequence
  Description of Artificial Sequence: Synthetic oligonucleotide
  Antisense strand to SEQ ID NO: 998446
uaauuaagcgaagggaacg

SEQ ID NO: 998448 - RNA, 19 nt, Artificial Sequence
  Description of Artificial Sequence: Synthetic oligonucleotide
  Sense strand starting at position 2337 of SEQ ID NO: 914365
guucccuucgcuuaauuaa

SEQ ID NO: 998449 - RNA, 19 nt, Artificial Sequence
  Description of Artificial Sequence: Synthetic oligonucleotide
  Antisense strand to SEQ ID NO: 998448
uuaauuaagcgaagggaac

SEQ ID NO: 998450 - RNA, 19 nt, Artificial Sequence
  Description of Artificial Sequence: Synthetic oligonucleotide
  Sense strand starting at position 2372 of SEQ ID NO: 914365
gagucuuuggugcccggua

SEQ ID NO: 998451 - RNA, 19 nt, Artificial Sequence
  Description of Artificial Sequence: Synthetic oligonucleotide
  Antisense strand to SEQ ID NO: 998450
uaccgggcaccaaagacuc

SEQ ID NO: 998452 - RNA, 19 nt, Artificial Sequence
  Description of Artificial Sequence: Synthetic oligonucleotide
  Sense strand starting at position 2400 of SEQ ID NO: 914365
ucuguucugcagcaaagaa

SEQ ID NO: 998453 - RNA, 19 nt, Artificial Sequence
  Description of Artificial Sequence: Synthetic oligonucleotide
  Antisense strand to SEQ ID NO: 998452
uucuuugcugcagaacaga

SEQ ID NO: 998454 - RNA, 19 nt, Artificial Sequence
  Description of Artificial Sequence: Synthetic oligonucleotide
  Sense strand starting at position 2611 of SEQ ID NO: 914365
ugacgugcgcugucauaug

SEQ ID NO: 998455 - RNA, 19 nt, Artificial Sequence
  Description of Artificial Sequence: Synthetic oligonucleotide
  Antisense strand to SEQ ID NO: 998454
cauaugacagcgcacguca

SEQ ID NO: 998456 - RNA, 19 nt, Artificial Sequence
  Description of Artificial Sequence: Synthetic oligonucleotide
  Sense strand starting at position 2654 of SEQ ID NO: 914365
cacucuagugcacgaauua

SEQ ID NO: 998457 - RNA, 19 nt, Artificial Sequence
  Description of Artificial Sequence: Synthetic oligonucleotide
  Antisense strand to SEQ ID NO: 998456
uaauucgugcacuagagug

SEQ ID NO: 998458 - RNA, 19 nt, Artificial Sequence
  Description of Artificial Sequence: Synthetic oligonucleotide
  Sense strand starting at position 2884 of SEQ ID NO: 914365
gcagaacuggcucaguuaa

SEQ ID NO: 998459 - RNA, 19 nt, Artificial Sequence
  Description of Artificial Sequence: Synthetic oligonucleotide
  Antisense strand to SEQ ID NO: 998458
uuaacugagccaguucugc

SEQ ID NO: 998460 - RNA, 19 nt, Artificial Sequence
  Description of Artificial Sequence: Synthetic oligonucleotide
  Sense strand starting at position 2886 of SEQ ID NO: 914365
agaacuggcucaguuaauc

SEQ ID NO: 998461 - RNA, 19 nt, Artificial Sequence
  Description of Artificial Sequence: Synthetic oligonucleotide
  Antisense strand to SEQ ID NO: 998460
gauuaacugagccaguucu

SEQ ID NO: 998462 - RNA, 19 nt, Artificial Sequence
  Description of Artificial Sequence: Synthetic oligonucleotide
  Sense strand starting at position 2965 of SEQ ID NO: 914365
cucauuugccuguagccaa

SEQ ID NO: 998463 - RNA, 19 nt, Artificial Sequence
  Description of Artificial Sequence: Synthetic oligonucleotide
  Antisense strand to SEQ ID NO: 998462
uuggcuacaggcaaaugag

SEQ ID NO: 998464 - RNA, 19 nt, Artificial Sequence
  Description of Artificial Sequence: Synthetic oligonucleotide
  Sense strand starting at position 2996 of SEQ ID NO: 914365
gaacuuauauggcuagggu

SEQ ID NO: 998465 - RNA, 19 nt, Artificial Sequence
  Description of Artificial Sequence: Synthetic oligonucleotide
  Antisense strand to SEQ ID NO: 998464
acccuagccauauaaguuc

SEQ ID NO: 998466 - RNA, 19 nt, Artificial Sequence
  Description of Artificial Sequence: Synthetic oligonucleotide
  Sense strand starting at position 3039 of SEQ ID NO: 914365
uuugaugaacucugucaac

SEQ ID NO: 998467 - RNA, 19 nt, Artificial Sequence
  Description of Artificial Sequence: Synthetic oligonucleotide
  Antisense strand to SEQ ID NO: 998466
guugacagaguucaucaaa

SEQ ID NO: 998468 - RNA, 19 nt, Artificial Sequence
  Description of Artificial Sequence: Synthetic oligonucleotide
  Sense strand starting at position 3066 of SEQ ID NO: 914365
uguguuucugcuuuaaagc

SEQ ID NO: 998469 - RNA, 19 nt, Artificial Sequence
  Description of Artificial Sequence: Synthetic oligonucleotide
  Antisense strand to SEQ ID NO: 998468
gcuuuaaagcagaaacaca

SEQ ID NO: 998470 - RNA, 19 nt, Artificial Sequence
  Description of Artificial Sequence: Synthetic oligonucleotide
  Sense strand starting at position 3149 of SEQ ID NO: 914365
acagcaguaccguacuuaa

SEQ ID NO: 998471 - RNA, 19 nt, Artificial Sequence
  Description of Artificial Sequence: Synthetic oligonucleotide
  Antisense strand to SEQ ID NO: 998470
uuaaguacgguacugcugu

SEQ ID NO: 998472 - RNA, 19 nt, Artificial Sequence
  Description of Artificial Sequence: Synthetic oligonucleotide
  Sense strand starting at position 3236 of SEQ ID NO: 914365
uccugaaauugugauuuag

SEQ ID NO: 998473 - RNA, 19 nt, Artificial Sequence
  Description of Artificial Sequence: Synthetic oligonucleotide
  Antisense strand to SEQ ID NO: 998472
cuaaaucacaauuucagga

SEQ ID NO: 998474 - RNA, 19 nt, Artificial Sequence
  Description of Artificial Sequence: Synthetic oligonucleotide
  Sense strand starting at position 3268 of SEQ ID NO: 914365
gggcccaggaguuauaauu

SEQ ID NO: 998475 - RNA, 19 nt, Artificial Sequence
  Description of Artificial Sequence: Synthetic oligonucleotide
  Antisense strand to SEQ ID NO: 998474
aauuauaacuccugggccc

SEQ ID NO: 998476 - RNA, 19 nt, Artificial Sequence
  Description of Artificial Sequence: Synthetic oligonucleotide
  Sense strand starting at position 3365 of SEQ ID NO: 914365
cuggguaucagaggaaucu

SEQ ID NO: 998477 - RNA, 19 nt, Artificial Sequence
  Description of Artificial Sequence: Synthetic oligonucleotide
  Antisense strand to SEQ ID NO: 998476
agauuccucugauacccag

SEQ ID NO: 998478 - RNA, 19 nt, Artificial Sequence
  Description of Artificial Sequence: Synthetic oligonucleotide
  Sense strand starting at position 3472 of SEQ ID NO: 914365
cgaagacuauugcuguaag

SEQ ID NO: 998479 - RNA, 19 nt, Artificial Sequence
  Description of Artificial Sequence: Synthetic oligonucleotide
  Antisense strand to SEQ ID NO: 998478
cuuacagcaauagucuucg

SEQ ID NO: 998480 - RNA, 19 nt, Artificial Sequence
  Description of Artificial Sequence: Synthetic oligonucleotide
  Sense strand starting at position 3475 of SEQ ID NO: 914365
agacuauugcuguaagaau

SEQ ID NO: 998481 - RNA, 19 nt, Artificial Sequence
  Description of Artificial Sequence: Synthetic oligonucleotide
  Antisense strand to SEQ ID NO: 998480
auucuuacagcaauagucu

SEQ ID NO: 998482 - RNA, 19 nt, Artificial Sequence
  Description of Artificial Sequence: Synthetic oligonucleotide
  Sense strand starting at position 3559 of SEQ ID NO: 914365
acccucuugugguuaccaa

SEQ ID NO: 998483 - RNA, 19 nt, Artificial Sequence
  Description of Artificial Sequence: Synthetic oligonucleotide
  Antisense strand to SEQ ID NO: 998482
uugguaaccacaagagggu

SEQ ID NO: 998484 - RNA, 19 nt, Artificial Sequence
  Description of Artificial Sequence: Synthetic oligonucleotide
  Sense strand starting at position 3566 of SEQ ID NO: 914365
ugugguuaccaagaaugug

SEQ ID NO: 998485 - RNA, 19 nt, Artificial Sequence
  Description of Artificial Sequence: Synthetic oligonucleotide
  Antisense strand to SEQ ID NO: 998484
cacauucuugguaaccaca

SEQ ID NO: 998486 - RNA, 19 nt, Artificial Sequence
  Description of Artificial Sequence: Synthetic oligonucleotide
  Sense strand starting at position 3578 of SEQ ID NO: 914365
gaaugugcuguugaacuga

SEQ ID NO: 998487 - RNA, 19 nt, Artificial Sequence
  Description of Artificial Sequence: Synthetic oligonucleotide
  Antisense strand to SEQ ID NO: 998486
ucaguucaacagcacauuc

SEQ ID NO: 998488 - RNA, 19 nt, Artificial Sequence
  Description of Artificial Sequence: Synthetic oligonucleotide
  Sense strand starting at position 3635 of SEQ ID NO: 914365
aggguuuacaguuagcaaa

SEQ ID NO: 998489 - RNA, 19 nt, Artificial Sequence
  Description of Artificial Sequence: Synthetic oligonucleotide
  Antisense strand to SEQ ID NO: 998488
uuugcuaacuguaaacccu

SEQ ID NO: 998490 - RNA, 19 nt, Artificial Sequence
  Description of Artificial Sequence: Synthetic oligonucleotide
  Sense strand starting at position 3689 of SEQ ID NO: 914365
aaagacuagugacagaaau

SEQ ID NO: 998491 - RNA, 19 nt, Artificial Sequence
  Description of Artificial Sequence: Synthetic oligonucleotide
  Antisense strand to SEQ ID NO: 998490
auuucugucacuagucuuu

SEQ ID NO: 998492 - RNA, 19 nt, Artificial Sequence
  Description of Artificial Sequence: Synthetic oligonucleotide
  Sense strand starting at position 3861 of SEQ ID NO: 914365
agcuaucuguuccuuggaa

SEQ ID NO: 998493 - RNA, 19 nt, Artificial Sequence
  Description of Artificial Sequence: Synthetic oligonucleotide
  Antisense strand to SEQ ID NO: 998492
uuccaaggaacagauagcu

SEQ ID NO: 998494 - RNA, 19 nt, Artificial Sequence
  Description of Artificial Sequence: Synthetic oligonucleotide
  Sense strand starting at position 3862 of SEQ ID NO: 914365
gcuaucuguuccuuggaag

SEQ ID NO: 998495 - RNA, 19 nt, Artificial Sequence
  Description of Artificial Sequence: Synthetic oligonucleotide
  Antisense strand to SEQ ID NO: 998494
cuuccaaggaacagauagc

SEQ ID NO: 998496 - RNA, 19 nt, Artificial Sequence
  Description of Artificial Sequence: Synthetic oligonucleotide
  Sense strand starting at position 3863 of SEQ ID NO: 914365
cuaucuguuccuuggaagu

SEQ ID NO: 998497 - RNA, 19 nt, Artificial Sequence
  Description of Artificial Sequence: Synthetic oligonucleotide
  Antisense strand to SEQ ID NO: 998496
acuuccaaggaacagauag

SEQ ID NO: 998498 - RNA, 19 nt, Artificial Sequence
  Description of Artificial Sequence: Synthetic oligonucleotide
  Sense strand starting at position 3874 of SEQ ID NO: 914365
uuggaaguguuaucagaau

SEQ ID NO: 998499 - RNA, 19 nt, Artificial Sequence
  Description of Artificial Sequence: Synthetic oligonucleotide
  Antisense strand to SEQ ID NO: 998498
auucugauaacacuuccaa

SEQ ID NO: 998500 - RNA, 19 nt, Artificial Sequence
  Description of Artificial Sequence: Synthetic oligonucleotide
  Sense strand starting at position 3882 of SEQ ID NO: 914365
guuaucagaaugugugauc

SEQ ID NO: 998501 - RNA, 19 nt, Artificial Sequence
  Description of Artificial Sequence: Synthetic oligonucleotide
  Antisense strand to SEQ ID NO: 998500
gaucacacauucugauaac

SEQ ID NO: 998502 - RNA, 19 nt, Artificial Sequence
  Description of Artificial Sequence: Synthetic oligonucleotide
  Sense strand starting at position 3883 of SEQ ID NO: 914365
uuaucagaaugugugauca

SEQ ID NO: 998503 - RNA, 19 nt, Artificial Sequence
  Description of Artificial Sequence: Synthetic oligonucleotide
  Antisense strand to SEQ ID NO: 998502
ugaucacacauucugauaa

SEQ ID NO: 998504 - RNA, 19 nt, Artificial Sequence
  Description of Artificial Sequence: Synthetic oligonucleotide
  Sense strand starting at position 3914 of SEQ ID NO: 914365
uugcaaauuguuggacuaa

SEQ ID NO: 998505 - RNA, 19 nt, Artificial Sequence
  Description of Artificial Sequence: Synthetic oligonucleotide
  Antisense strand to SEQ ID NO: 998504
uuaguccaacaauuugcaa

SEQ ID NO: 998506 - RNA, 19 nt, Artificial Sequence
  Description of Artificial Sequence: Synthetic oligonucleotide
  Sense strand starting at position 137 of SEQ ID NO: 914366
cuaccagcucucuaaggga

SEQ ID NO: 998507 - RNA, 19 nt, Artificial Sequence
  Description of Artificial Sequence: Synthetic oligonucleotide
  Antisense strand to SEQ ID NO: 998506
ucccuuagagagcugguag

SEQ ID NO: 998508 - RNA, 19 nt, Artificial Sequence
  Description of Artificial Sequence: Synthetic oligonucleotide
  Sense strand starting at position 372 of SEQ ID NO: 914366
gaggcuucuuccuuaggga

SEQ ID NO: 998509 - RNA, 19 nt, Artificial Sequence
  Description of Artificial Sequence: Synthetic oligonucleotide
  Antisense strand to SEQ ID NO: 998508
ucccuaaggaagaagccuc

SEQ ID NO: 998510 - RNA, 19 nt, Artificial Sequence
  Description of Artificial Sequence: Synthetic oligonucleotide
  Sense strand starting at position 373 of SEQ ID NO: 914366
aggcuucuuccuuagggau

SEQ ID NO: 998511 - RNA, 19 nt, Artificial Sequence
  Description of Artificial Sequence: Synthetic oligonucleotide
  Antisense strand to SEQ ID NO: 998510
aucccuaaggaagaagccu

SEQ ID NO: 998512 - RNA, 19 nt, Artificial Sequence
  Description of Artificial Sequence: Synthetic oligonucleotide
  Sense strand starting at position 1578 of SEQ ID NO: 914366
uauuuagcucuucgguuga

SEQ ID NO: 998513 - RNA, 19 nt, Artificial Sequence
  Description of Artificial Sequence: Synthetic oligonucleotide
  Antisense strand to SEQ ID NO: 998512
ucaaccgaagagcuaaaua

SEQ ID NO: 998514 - RNA, 19 nt, Artificial Sequence
  Description of Artificial Sequence: Synthetic oligonucleotide
  Sense strand starting at position 1591 of SEQ ID NO: 914366
gguugagcuucgauugguc

SEQ ID NO: 998515 - RNA, 19 nt, Artificial Sequence
  Description of Artificial Sequence: Synthetic oligonucleotide
  Antisense strand to SEQ ID NO: 998514
gaccaaucgaagcucaacc

SEQ ID NO: 998516 - RNA, 19 nt, Artificial Sequence
  Description of Artificial Sequence: Synthetic oligonucleotide
  Sense strand starting at position 1593 of SEQ ID NO: 914366
uugagcuucgauuggucaa

SEQ ID NO: 998517 - RNA, 19 nt, Artificial Sequence
  Description of Artificial Sequence: Synthetic oligonucleotide
  Antisense strand to SEQ ID NO: 998516
uugaccaaucgaagcucaa

SEQ ID NO: 998518 - RNA, 19 nt, Artificial Sequence
  Description of Artificial Sequence: Synthetic oligonucleotide
  Sense strand starting at position 1594 of SEQ ID NO: 914366
ugagcuucgauuggucaaa

SEQ ID NO: 998519 - RNA, 19 nt, Artificial Sequence
  Description of Artificial Sequence: Synthetic oligonucleotide
  Antisense strand to SEQ ID NO: 998518
uuugaccaaucgaagcuca

SEQ ID NO: 998520 - RNA, 19 nt, Artificial Sequence
  Description of Artificial Sequence: Synthetic oligonucleotide
  Sense strand starting at position 1943 of SEQ ID NO: 914366
ggagggagcgagugagaau

SEQ ID NO: 998521 - RNA, 19 nt, Artificial Sequence
  Description of Artificial Sequence: Synthetic oligonucleotide
  Antisense strand to SEQ ID NO: 998520
auucucacucgcucccucc

SEQ ID NO: 998522 - RNA, 19 nt, Artificial Sequence
  Description of Artificial Sequence: Synthetic oligonucleotide
  Sense strand starting at position 2022 of SEQ ID NO: 914366
acccaaguucucugggaga

SEQ ID NO: 998523 - RNA, 19 nt, Artificial Sequence
  Description of Artificial Sequence: Synthetic oligonucleotide
  Antisense strand to SEQ ID NO: 998522
ucucccagagaacuugggu

SEQ ID NO: 998524 - RNA, 19 nt, Artificial Sequence
  Description of Artificial Sequence: Synthetic oligonucleotide
  Sense strand starting at position 2200 of SEQ ID NO: 914366
cucucuagaguuugccuaa

SEQ ID NO: 998525 - RNA, 19 nt, Artificial Sequence
  Description of Artificial Sequence: Synthetic oligonucleotide
  Antisense strand to SEQ ID NO: 998524
uuaggcaaacucuagagag

SEQ ID NO: 998526 - RNA, 19 nt, Artificial Sequence
  Description of Artificial Sequence: Synthetic oligonucleotide
  Sense strand starting at position 2201 of SEQ ID NO: 914366
ucucuagaguuugccuaau

SEQ ID NO: 998527 - RNA, 19 nt, Artificial Sequence
  Description of Artificial Sequence: Synthetic oligonucleotide
  Antisense strand to SEQ ID NO: 998526
auuaggcaaacucuagaga

SEQ ID NO: 998528 - RNA, 19 nt, Artificial Sequence
  Description of Artificial Sequence: Synthetic oligonucleotide
  Sense strand starting at position 2203 of SEQ ID NO: 914366
ucuagaguuugccuaauag

SEQ ID NO: 998529 - RNA, 19 nt, Artificial Sequence
  Description of Artificial Sequence: Synthetic oligonucleotide
  Antisense strand to SEQ ID NO: 998528
cuauuaggcaaacucuaga

SEQ ID NO: 998530 - RNA, 19 nt, Artificial Sequence
  Description of Artificial Sequence: Synthetic oligonucleotide
  Sense strand starting at position 2266 of SEQ ID NO: 914366
cccagauaacguuacacca

SEQ ID NO: 998531 - RNA, 19 nt, Artificial Sequence
  Description of Artificial Sequence: Synthetic oligonucleotide
  Antisense strand to SEQ ID NO: 998530
ugguguaacguuaucuggg

SEQ ID NO: 998532 - RNA, 19 nt, Artificial Sequence
  Description of Artificial Sequence: Synthetic oligonucleotide
  Sense strand starting at position 2340 of SEQ ID NO: 914366
cgcuuucuagccgaccaaa

SEQ ID NO: 998533 - RNA, 19 nt, Artificial Sequence
  Description of Artificial Sequence: Synthetic oligonucleotide
  Antisense strand to SEQ ID NO: 998532
uuuggucggcuagaaagcg

SEQ ID NO: 998534 - RNA, 19 nt, Artificial Sequence
  Description of Artificial Sequence: Synthetic oligonucleotide
  Sense strand starting at position 2489 of SEQ ID NO: 914366
cguucccuucgcuuaauua

SEQ ID NO: 998535 - RNA, 19 nt, Artificial Sequence
  Description of Artificial Sequence: Synthetic oligonucleotide
  Antisense strand to SEQ ID NO: 998534
uaauuaagcgaagggaacg

SEQ ID NO: 998536 - RNA, 19 nt, Artificial Sequence
  Description of Artificial Sequence: Synthetic oligonucleotide
  Sense strand starting at position 2490 of SEQ ID NO: 914366
guucccuucgcuuaauuaa

SEQ ID NO: 998537 - RNA, 19 nt, Artificial Sequence
  Description of Artificial Sequence: Synthetic oligonucleotide
  Antisense strand to SEQ ID NO: 998536
uuaauuaagcgaagggaac

SEQ ID NO: 998538 - RNA, 19 nt, Artificial Sequence
  Description of Artificial Sequence: Synthetic oligonucleotide
  Sense strand starting at position 2525 of SEQ ID NO: 914366
gagucuuuggugcccggua

SEQ ID NO: 998539 - RNA, 19 nt, Artificial Sequence
  Description of Artificial Sequence: Synthetic oligonucleotide
  Antisense strand to SEQ ID NO: 998538
uaccgggcaccaaagacuc

SEQ ID NO: 998540 - RNA, 19 nt, Artificial Sequence
  Description of Artificial Sequence: Synthetic oligonucleotide
  Sense strand starting at position 2550 of SEQ ID NO: 914366
ccuucuguucugcagcaaa

SEQ ID NO: 998541 - RNA, 19 nt, Artificial Sequence
  Description of Artificial Sequence: Synthetic oligonucleotide
  Antisense strand to SEQ ID NO: 998540
uuugcugcagaacagaagg

SEQ ID NO: 998542 - RNA, 19 nt, Artificial Sequence
  Description of Artificial Sequence: Synthetic oligonucleotide
  Sense strand starting at position 2553 of SEQ ID NO: 914366
ucuguucugcagcaaagaa

SEQ ID NO: 998543 - RNA, 19 nt, Artificial Sequence
  Description of Artificial Sequence: Synthetic oligonucleotide
  Antisense strand to SEQ ID NO: 998542
uucuuugcugcagaacaga

SEQ ID NO: 998544 - RNA, 19 nt, Artificial Sequence
  Description of Artificial Sequence: Synthetic oligonucleotide
  Sense strand starting at position 2594 of SEQ ID NO: 914366
uugcauggcggagguaaua

SEQ ID NO: 998545 - RNA, 19 nt, Artificial Sequence
  Description of Artificial Sequence: Synthetic oligonucleotide
  Antisense strand to SEQ ID NO: 998544
uauuaccuccgccaugcaa

SEQ ID NO: 998546 - RNA, 19 nt, Artificial Sequence
  Description of Artificial Sequence: Synthetic oligonucleotide
  Sense strand starting at position 2764 of SEQ ID NO: 914366
ugacgugcgcugucauaug

SEQ ID NO: 998547 - RNA, 19 nt, Artificial Sequence
  Description of Artificial Sequence: Synthetic oligonucleotide
  Antisense strand to SEQ ID NO: 998546
cauaugacagcgcacguca

SEQ ID NO: 998548 - RNA, 19 nt, Artificial Sequence
  Description of Artificial Sequence: Synthetic oligonucleotide
  Sense strand starting at position 2807 of SEQ ID NO: 914366
cacucuagugcacgaauua

SEQ ID NO: 998549 - RNA, 19 nt, Artificial Sequence
  Description of Artificial Sequence: Synthetic oligonucleotide
  Antisense strand to SEQ ID NO: 998548
uaauucgugcacuagagug

SEQ ID NO: 998550 - RNA, 19 nt, Artificial Sequence
  Description of Artificial Sequence: Synthetic oligonucleotide
  Sense strand starting at position 3037 of SEQ ID NO: 914366
gcagaacuggcucaguuaa

SEQ ID NO: 998551 - RNA, 19 nt, Artificial Sequence
  Description of Artificial Sequence: Synthetic oligonucleotide
  Antisense strand to SEQ ID NO: 998550
uuaacugagccaguucugc

SEQ ID NO: 998552 - RNA, 19 nt, Artificial Sequence
  Description of Artificial Sequence: Synthetic oligonucleotide
  Sense strand starting at position 3039 of SEQ ID NO: 914366
agaacuggcucaguuaauc

SEQ ID NO: 998553 - RNA, 19 nt, Artificial Sequence
  Description of Artificial Sequence: Synthetic oligonucleotide
  Antisense strand to SEQ ID NO: 998552
gauuaacugagccaguucu

SEQ ID NO: 998554 - RNA, 19 nt, Artificial Sequence
  Description of Artificial Sequence: Synthetic oligonucleotide
  Sense strand starting at position 3118 of SEQ ID NO: 914366
cucauuugccuguagccaa

SEQ ID NO: 998555 - RNA, 19 nt, Artificial Sequence
  Description of Artificial Sequence: Synthetic oligonucleotide
  Antisense strand to SEQ ID NO: 998554
uuggcuacaggcaaaugag

SEQ ID NO: 998556 - RNA, 19 nt, Artificial Sequence
  Description of Artificial Sequence: Synthetic oligonucleotide
  Sense strand starting at position 3149 of SEQ ID NO: 914366
gaacuuauauggcuagggu

SEQ ID NO: 998557 - RNA, 19 nt, Artificial Sequence
  Description of Artificial Sequence: Synthetic oligonucleotide
  Antisense strand to SEQ ID NO: 998556
acccuagccauauaaguuc

SEQ ID NO: 998558 - RNA, 19 nt, Artificial Sequence
  Description of Artificial Sequence: Synthetic oligonucleotide
  Sense strand starting at position 3192 of SEQ ID NO: 914366
uuugaugaacucugucaac

SEQ ID NO: 998559 - RNA, 19 nt, Artificial Sequence
  Description of Artificial Sequence: Synthetic oligonucleotide
  Antisense strand to SEQ ID NO: 998558
guugacagaguucaucaaa

SEQ ID NO: 998560 - RNA, 19 nt, Artificial Sequence
  Description of Artificial Sequence: Synthetic oligonucleotide
  Sense strand starting at position 3219 of SEQ ID NO: 914366
uguguuucugcuuuaaagc

SEQ ID NO: 998561 - RNA, 19 nt, Artificial Sequence
  Description of Artificial Sequence: Synthetic oligonucleotide
  Antisense strand to SEQ ID NO: 998560
gcuuuaaagcagaaacaca

SEQ ID NO: 998562 - RNA, 19 nt, Artificial Sequence
  Description of Artificial Sequence: Synthetic oligonucleotide
  Sense strand starting at position 3302 of SEQ ID NO: 914366
acagcaguaccguacuuaa

SEQ ID NO: 998563 - RNA, 19 nt, Artificial Sequence
  Description of Artificial Sequence: Synthetic oligonucleotide
  Antisense strand to SEQ ID NO: 998562
uuaaguacgguacugcugu

SEQ ID NO: 998564 - RNA, 19 nt, Artificial Sequence
  Description of Artificial Sequence: Synthetic oligonucleotide
  Sense strand starting at position 3389 of SEQ ID NO: 914366
uccugaaauugugauuuag

SEQ ID NO: 998565 - RNA, 19 nt, Artificial Sequence
  Description of Artificial Sequence: Synthetic oligonucleotide
  Antisense strand to SEQ ID NO: 998564
cuaaaucacaauuucagga

SEQ ID NO: 998566 - RNA, 19 nt, Artificial Sequence
  Description of Artificial Sequence: Synthetic oligonucleotide
  Sense strand starting at position 3421 of SEQ ID NO: 914366
gggcccaggaguuauaauu

SEQ ID NO: 998567 - RNA, 19 nt, Artificial Sequence
  Description of Artificial Sequence: Synthetic oligonucleotide
  Antisense strand to SEQ ID NO: 998566
aauuauaacuccugggccc

SEQ ID NO: 998568 - RNA, 19 nt, Artificial Sequence
  Description of Artificial Sequence: Synthetic oligonucleotide
  Sense strand starting at position 3518 of SEQ ID NO: 914366
cuggguaucagaggaaucu

SEQ ID NO: 998569 - RNA, 19 nt, Artificial Sequence
  Description of Artificial Sequence: Synthetic oligonucleotide
  Antisense strand to SEQ ID NO: 998568
agauuccucugauacccag

SEQ ID NO: 998570 - RNA, 19 nt, Artificial Sequence
  Description of Artificial Sequence: Synthetic oligonucleotide
  Sense strand starting at position 3527 of SEQ ID NO: 914366
agaggaaucucccaccaag

SEQ ID NO: 998571 - RNA, 19 nt, Artificial Sequence
  Description of Artificial Sequence: Synthetic oligonucleotide
  Antisense strand to SEQ ID NO: 998570
cuuggugggagauuccucu

SEQ ID NO: 998572 - RNA, 19 nt, Artificial Sequence
  Description of Artificial Sequence: Synthetic oligonucleotide
  Sense strand starting at position 3625 of SEQ ID NO: 914366
cgaagacuauugcuguaag

SEQ ID NO: 998573 - RNA, 19 nt, Artificial Sequence
  Description of Artificial Sequence: Synthetic oligonucleotide
  Antisense strand to SEQ ID NO: 998572
cuuacagcaauagucuucg

SEQ ID NO: 998574 - RNA, 19 nt, Artificial Sequence
  Description of Artificial Sequence: Synthetic oligonucleotide
  Sense strand starting at position 3628 of SEQ ID NO: 914366
agacuauugcuguaagaau

SEQ ID NO: 998575 - RNA, 19 nt, Artificial Sequence
  Description of Artificial Sequence: Synthetic oligonucleotide
  Antisense strand to SEQ ID NO: 998574
auucuuacagcaauagucu

SEQ ID NO: 998576 - RNA, 19 nt, Artificial Sequence
  Description of Artificial Sequence: Synthetic oligonucleotide
  Sense strand starting at position 3712 of SEQ ID NO: 914366
acccucuugugguuaccaa

SEQ ID NO: 998577 - RNA, 19 nt, Artificial Sequence
  Description of Artificial Sequence: Synthetic oligonucleotide
  Antisense strand to SEQ ID NO: 998576
uugguaaccacaagagggu

SEQ ID NO: 998578 - RNA, 19 nt, Artificial Sequence
  Description of Artificial Sequence: Synthetic oligonucleotide
  Sense strand starting at position 3719 of SEQ ID NO: 914366
ugugguuaccaagaaugug

SEQ ID NO: 998579 - RNA, 19 nt, Artificial Sequence
  Description of Artificial Sequence: Synthetic oligonucleotide
  Antisense strand to SEQ ID NO: 998578
cacauucuugguaaccaca

SEQ ID NO: 998580 - RNA, 19 nt, Artificial Sequence
  Description of Artificial Sequence: Synthetic oligonucleotide
  Sense strand starting at position 3731 of SEQ ID NO: 914366
gaaugugcuguugaacuga

SEQ ID NO: 998581 - RNA, 19 nt, Artificial Sequence
  Description of Artificial Sequence: Synthetic oligonucleotide
  Antisense strand to SEQ ID NO: 998580
ucaguucaacagcacauuc

SEQ ID NO: 998582 - RNA, 19 nt, Artificial Sequence
  Description of Artificial Sequence: Synthetic oligonucleotide
  Sense strand starting at position 3788 of SEQ ID NO: 914366
aggguuuacaguuagcaaa

SEQ ID NO: 998583 - RNA, 19 nt, Artificial Sequence
  Description of Artificial Sequence: Synthetic oligonucleotide
  Antisense strand to SEQ ID NO: 998582
uuugcuaacuguaaacccu

SEQ ID NO: 998584 - RNA, 19 nt, Artificial Sequence
  Description of Artificial Sequence: Synthetic oligonucleotide
  Sense strand starting at position 3842 of SEQ ID NO: 914366
aaagacuagugacagaaau

SEQ ID NO: 998585 - RNA, 19 nt, Artificial Sequence
  Description of Artificial Sequence: Synthetic oligonucleotide
  Antisense strand to SEQ ID NO: 998584
auuucugucacuagucuuu

SEQ ID NO: 998586 - RNA, 19 nt, Artificial Sequence
  Description of Artificial Sequence: Synthetic oligonucleotide
  Sense strand starting at position 3 of SEQ ID NO: 914367
guaauuaugccucaauaag

SEQ ID NO: 998587 - RNA, 19 nt, Artificial Sequence
  Description of Artificial Sequence: Synthetic oligonucleotide
  Antisense strand to SEQ ID NO: 998586
cuuauugaggcauaauuac

SEQ ID NO: 998588 - RNA, 19 nt, Artificial Sequence
  Description of Artificial Sequence: Synthetic oligonucleotide
  Sense strand starting at position 132 of SEQ ID NO: 914367
gcaggauauugagucagua

SEQ ID NO: 998589 - RNA, 19 nt, Artificial Sequence
  Description of Artificial Sequence: Synthetic oligonucleotide
  Antisense strand to SEQ ID NO: 998588
uacugacucaauauccugc

SEQ ID NO: 998590 - RNA, 19 nt, Artificial Sequence
  Description of Artificial Sequence: Synthetic oligonucleotide
  Sense strand starting at position 136 of SEQ ID NO: 914367
gauauugagucaguaggga

SEQ ID NO: 998591 - RNA, 19 nt, Artificial Sequence
  Description of Artificial Sequence: Synthetic oligonucleotide
  Antisense strand to SEQ ID NO: 998590
ucccuacugacucaauauc

SEQ ID NO: 998592 - RNA, 19 nt, Artificial Sequence
  Description of Artificial Sequence: Synthetic oligonucleotide
  Sense strand starting at position 278 of SEQ ID NO: 914367
cuuugcuucuggccaagaa

SEQ ID NO: 998593 - RNA, 19 nt, Artificial Sequence
  Description of Artificial Sequence: Synthetic oligonucleotide
  Antisense strand to SEQ ID NO: 998592
uucuuggccagaagcaaag

SEQ ID NO: 998594 - RNA, 19 nt, Artificial Sequence
  Description of Artificial Sequence: Synthetic oligonucleotide
  Sense strand starting at position 348 of SEQ ID NO: 914367
gaguaagugcaggauaacu

SEQ ID NO: 998595 - RNA, 19 nt, Artificial Sequence
  Description of Artificial Sequence: Synthetic oligonucleotide
  Antisense strand to SEQ ID NO: 998594
aguuauccugcacuuacuc

SEQ ID NO: 998596 - RNA, 19 nt, Artificial Sequence
  Description of Artificial Sequence: Synthetic oligonucleotide
  Sense strand starting at position 408 of SEQ ID NO: 914367
ccaaucgaggcuuaucaaa

SEQ ID NO: 998597 - RNA, 19 nt, Artificial Sequence
  Description of Artificial Sequence: Synthetic oligonucleotide
  Antisense strand to SEQ ID NO: 998596
uuugauaagccucgauugg

SEQ ID NO: 998598 - RNA, 19 nt, Artificial Sequence
  Description of Artificial Sequence: Synthetic oligonucleotide
  Sense strand starting at position 549 of SEQ ID NO: 914367
cuaccagcucucuaaggga

SEQ ID NO: 998599 - RNA, 19 nt, Artificial Sequence
  Description of Artificial Sequence: Synthetic oligonucleotide
  Antisense strand to SEQ ID NO: 998598
ucccuuagagagcugguag

SEQ ID NO: 998600 - RNA, 19 nt, Artificial Sequence
  Description of Artificial Sequence: Synthetic oligonucleotide
  Sense strand starting at position 784 of SEQ ID NO: 914367
gaggcuucuuccuuaggga

SEQ ID NO: 998601 - RNA, 19 nt, Artificial Sequence
  Description of Artificial Sequence: Synthetic oligonucleotide
  Antisense strand to SEQ ID NO: 998600
ucccuaaggaagaagccuc

SEQ ID NO: 998602 - RNA, 19 nt, Artificial Sequence
  Description of Artificial Sequence: Synthetic oligonucleotide
  Sense strand starting at position 785 of SEQ ID NO: 914367
aggcuucuuccuuagggau

SEQ ID NO: 998603 - RNA, 19 nt, Artificial Sequence
  Description of Artificial Sequence: Synthetic oligonucleotide
  Antisense strand to SEQ ID NO: 998602
aucccuaaggaagaagccu

SEQ ID NO: 998604 - RNA, 19 nt, Artificial Sequence
  Description of Artificial Sequence: Synthetic oligonucleotide
  Sense strand starting at position 1800 of SEQ ID NO: 914367
gugggugucucauuaaagc

SEQ ID NO: 998605 - RNA, 19 nt, Artificial Sequence
  Description of Artificial Sequence: Synthetic oligonucleotide
  Antisense strand to SEQ ID NO: 998604
gcuuuaaugagacacccac

SEQ ID NO: 998606 - RNA, 19 nt, Artificial Sequence
  Description of Artificial Sequence: Synthetic oligonucleotide
  Sense strand starting at position 1990 of SEQ ID NO: 914367
uauuuagcucuucgguuga

SEQ ID NO: 998607 - RNA, 19 nt, Artificial Sequence
  Description of Artificial Sequence: Synthetic oligonucleotide
  Antisense strand to SEQ ID NO: 998606
ucaaccgaagagcuaaaua

SEQ ID NO: 998608 - RNA, 19 nt, Artificial Sequence
  Description of Artificial Sequence: Synthetic oligonucleotide
  Sense strand starting at position 2003 of SEQ ID NO: 914367
gguugagcuucgauugguc

SEQ ID NO: 998609 - RNA, 19 nt, Artificial Sequence
  Description of Artificial Sequence: Synthetic oligonucleotide
  Antisense strand to SEQ ID NO: 998608
gaccaaucgaagcucaacc

SEQ ID NO: 998610 - RNA, 19 nt, Artificial Sequence
  Description of Artificial Sequence: Synthetic oligonucleotide
  Sense strand starting at position 2005 of SEQ ID NO: 914367
uugagcuucgauuggucaa

SEQ ID NO: 998611 - RNA, 19 nt, Artificial Sequence
  Description of Artificial Sequence: Synthetic oligonucleotide
  Antisense strand to SEQ ID NO: 998610
uugaccaaucgaagcucaa

SEQ ID NO: 998612 - RNA, 19 nt, Artificial Sequence
  Description of Artificial Sequence: Synthetic oligonucleotide
  Sense strand starting at position 2006 of SEQ ID NO: 914367
ugagcuucgauuggucaaa

SEQ ID NO: 998613 - RNA, 19 nt, Artificial Sequence
  Description of Artificial Sequence: Synthetic oligonucleotide
  Antisense strand to SEQ ID NO: 998612
uuugaccaaucgaagcuca

SEQ ID NO: 998614 - RNA, 19 nt, Artificial Sequence
  Description of Artificial Sequence: Synthetic oligonucleotide
  Sense strand starting at position 2355 of SEQ ID NO: 914367
ggagggagcgagugagaau

SEQ ID NO: 998615 - RNA, 19 nt, Artificial Sequence
  Description of Artificial Sequence: Synthetic oligonucleotide
  Antisense strand to SEQ ID NO: 998614
auucucacucgcucccucc

SEQ ID NO: 998616 - RNA, 19 nt, Artificial Sequence
  Description of Artificial Sequence: Synthetic oligonucleotide
  Sense strand starting at position 2434 of SEQ ID NO: 914367
acccaaguucucugggaga

SEQ ID NO: 998617 - RNA, 19 nt, Artificial Sequence
  Description of Artificial Sequence: Synthetic oligonucleotide
  Antisense strand to SEQ ID NO: 998616
ucucccagagaacuugggu

SEQ ID NO: 998618 - RNA, 19 nt, Artificial Sequence
  Description of Artificial Sequence: Synthetic oligonucleotide
  Sense strand starting at position 2612 of SEQ ID NO: 914367
cucucuagaguuugccuaa

SEQ ID NO: 998619 - RNA, 19 nt, Artificial Sequence
  Description of Artificial Sequence: Synthetic oligonucleotide
  Antisense strand to SEQ ID NO: 998618
uuaggcaaacucuagagag

SEQ ID NO: 998620 - RNA, 19 nt, Artificial Sequence
  Description of Artificial Sequence: Synthetic oligonucleotide
  Sense strand starting at position 2613 of SEQ ID NO: 914367
ucucuagaguuugccuaau

SEQ ID NO: 998621 - RNA, 19 nt, Artificial Sequence
  Description of Artificial Sequence: Synthetic oligonucleotide
  Antisense strand to SEQ ID NO: 998620
auuaggcaaacucuagaga

SEQ ID NO: 998622 - RNA, 19 nt, Artificial Sequence
  Description of Artificial Sequence: Synthetic oligonucleotide
  Sense strand starting at position 2615 of SEQ ID NO: 914367
ucuagaguuugccuaauag

SEQ ID NO: 998623 - RNA, 19 nt, Artificial Sequence
  Description of Artificial Sequence: Synthetic oligonucleotide
  Antisense strand to SEQ ID NO: 998622
cuauuaggcaaacucuaga

SEQ ID NO: 998624 - RNA, 19 nt, Artificial Sequence
  Description of Artificial Sequence: Synthetic oligonucleotide
  Sense strand starting at position 2678 of SEQ ID NO: 914367
cccagauaacguuacacca

SEQ ID NO: 998625 - RNA, 19 nt, Artificial Sequence
  Description of Artificial Sequence: Synthetic oligonucleotide
  Antisense strand to SEQ ID NO: 998624
ugguguaacguuaucuggg

SEQ ID NO: 998626 - RNA, 19 nt, Artificial Sequence
  Description of Artificial Sequence: Synthetic oligonucleotide
  Sense strand starting at position 2752 of SEQ ID NO: 914367
cgcuuucuagccgaccaaa

SEQ ID NO: 998627 - RNA, 19 nt, Artificial Sequence
  Description of Artificial Sequence: Synthetic oligonucleotide
  Antisense strand to SEQ ID NO: 998626
uuuggucggcuagaaagcg

SEQ ID NO: 998628 - RNA, 19 nt, Artificial Sequence
  Description of Artificial Sequence: Synthetic oligonucleotide
  Sense strand starting at position 2901 of SEQ ID NO: 914367
cguucccuucgcuuaauua

SEQ ID NO: 998629 - RNA, 19 nt, Artificial Sequence
  Description of Artificial Sequence: Synthetic oligonucleotide
  Antisense strand to SEQ ID NO: 998628
uaauuaagcgaagggaacg

SEQ ID NO: 998630 - RNA, 19 nt, Artificial Sequence
  Description of Artificial Sequence: Synthetic oligonucleotide
  Sense strand starting at position 2902 of SEQ ID NO: 914367
guucccuucgcuuaauuaa

SEQ ID NO: 998631 - RNA, 19 nt, Artificial Sequence
  Description of Artificial Sequence: Synthetic oligonucleotide
  Antisense strand to SEQ ID NO: 998630
uuaauuaagcgaagggaac

SEQ ID NO: 998632 - RNA, 19 nt, Artificial Sequence
  Description of Artificial Sequence: Synthetic oligonucleotide
  Sense strand starting at position 2937 of SEQ ID NO: 914367
gagucuuuggugcccggua

SEQ ID NO: 998633 - RNA, 19 nt, Artificial Sequence
  Description of Artificial Sequence: Synthetic oligonucleotide
  Antisense strand to SEQ ID NO: 998632
uaccgggcaccaaagacuc

SEQ ID NO: 998634 - RNA, 19 nt, Artificial Sequence
  Description of Artificial Sequence: Synthetic oligonucleotide
  Sense strand starting at position 2962 of SEQ ID NO: 914367
ccuucuguucugcagcaaa

SEQ ID NO: 998635 - RNA, 19 nt, Artificial Sequence
  Description of Artificial Sequence: Synthetic oligonucleotide
  Antisense strand to SEQ ID NO: 998634
uuugcugcagaacagaagg

SEQ ID NO: 998636 - RNA, 19 nt, Artificial Sequence
  Description of Artificial Sequence: Synthetic oligonucleotide
  Sense strand starting at position 2965 of SEQ ID NO: 914367
ucuguucugcagcaaagaa

SEQ ID NO: 998637 - RNA, 19 nt, Artificial Sequence
  Description of Artificial Sequence: Synthetic oligonucleotide
  Antisense strand to SEQ ID NO: 998636
uucuuugcugcagaacaga

SEQ ID NO: 998638 - RNA, 19 nt, Artificial Sequence
  Description of Artificial Sequence: Synthetic oligonucleotide
  Sense strand starting at position 3006 of SEQ ID NO: 914367
uugcauggcggagguaaua

SEQ ID NO: 998639 - RNA, 19 nt, Artificial Sequence
  Description of Artificial Sequence: Synthetic oligonucleotide
  Antisense strand to SEQ ID NO: 998638
uauuaccuccgccaugcaa

SEQ ID NO: 998640 - RNA, 19 nt, Artificial Sequence
  Description of Artificial Sequence: Synthetic oligonucleotide
  Sense strand starting at position 3176 of SEQ ID NO: 914367
ugacgugcgcugucauaug

SEQ ID NO: 998641 - RNA, 19 nt, Artificial Sequence
  Description of Artificial Sequence: Synthetic oligonucleotide
  Antisense strand to SEQ ID NO: 998640
cauaugacagcgcacguca

SEQ ID NO: 998642 - RNA, 19 nt, Artificial Sequence
  Description of Artificial Sequence: Synthetic oligonucleotide
  Sense strand starting at position 3219 of SEQ ID NO: 914367
cacucuagugcacgaauua

SEQ ID NO: 998643 - RNA, 19 nt, Artificial Sequence
  Description of Artificial Sequence: Synthetic oligonucleotide
  Antisense strand to SEQ ID NO: 998642
uaauucgugcacuagagug

SEQ ID NO: 998644 - RNA, 19 nt, Artificial Sequence
  Description of Artificial Sequence: Synthetic oligonucleotide
  Sense strand starting at position 3449 of SEQ ID NO: 914367
gcagaacuggcucaguuaa

SEQ ID NO: 998645 - RNA, 19 nt, Artificial Sequence
  Description of Artificial Sequence: Synthetic oligonucleotide
  Antisense strand to SEQ ID NO: 998644
uuaacugagccaguucugc

SEQ ID NO: 998646 - RNA, 19 nt, Artificial Sequence
  Description of Artificial Sequence: Synthetic oligonucleotide
  Sense strand starting at position 3451 of SEQ ID NO: 914367
agaacuggcucaguuaauc

SEQ ID NO: 998647 - RNA, 19 nt, Artificial Sequence
  Description of Artificial Sequence: Synthetic oligonucleotide
  Antisense strand to SEQ ID NO: 998646
gauuaacugagccaguucu

SEQ ID NO: 998648 - RNA, 19 nt, Artificial Sequence
  Description of Artificial Sequence: Synthetic oligonucleotide
  Sense strand starting at position 3530 of SEQ ID NO: 914367
cucauuugccuguagccaa

SEQ ID NO: 998649 - RNA, 19 nt, Artificial Sequence
  Description of Artificial Sequence: Synthetic oligonucleotide
  Antisense strand to SEQ ID NO: 998648
uuggcuacaggcaaaugag

SEQ ID NO: 998650 - RNA, 19 nt, Artificial Sequence
  Description of Artificial Sequence: Synthetic oligonucleotide
  Sense strand starting at position 3561 of SEQ ID NO: 914367
gaacuuauauggcuagggu

SEQ ID NO: 998651 - RNA, 19 nt, Artificial Sequence
  Description of Artificial Sequence: Synthetic oligonucleotide
  Antisense strand to SEQ ID NO: 998650
acccuagccauauaaguuc

SEQ ID NO: 998652 - RNA, 19 nt, Artificial Sequence
  Description of Artificial Sequence: Synthetic oligonucleotide
  Sense strand starting at position 3604 of SEQ ID NO: 914367
uuugaugaacucugucaac

SEQ ID NO: 998653 - RNA, 19 nt, Artificial Sequence
  Description of Artificial Sequence: Synthetic oligonucleotide
  Antisense strand to SEQ ID NO: 998652
guugacagaguucaucaaa

SEQ ID NO: 998654 - RNA, 19 nt, Artificial Sequence
  Description of Artificial Sequence: Synthetic oligonucleotide
  Sense strand starting at position 3631 of SEQ ID NO: 914367
uguguuucugcuuuaaagc

SEQ ID NO: 998655 - RNA, 19 nt, Artificial Sequence
  Description of Artificial Sequence: Synthetic oligonucleotide
  Antisense strand to SEQ ID NO: 998654
gcuuuaaagcagaaacaca

SEQ ID NO: 998656 - RNA, 19 nt, Artificial Sequence
  Description of Artificial Sequence: Synthetic oligonucleotide
  Sense strand starting at position 3714 of SEQ ID NO: 914367
acagcaguaccguacuuaa

SEQ ID NO: 998657 - RNA, 19 nt, Artificial Sequence
  Description of Artificial Sequence: Synthetic oligonucleotide
  Antisense strand to SEQ ID NO: 998656
uuaaguacgguacugcugu

SEQ ID NO: 998658 - RNA, 19 nt, Artificial Sequence
  Description of Artificial Sequence: Synthetic oligonucleotide
  Sense strand starting at position 3801 of SEQ ID NO: 914367
uccugaaauugugauuuag

SEQ ID NO: 998659 - RNA, 19 nt, Artificial Sequence
  Description of Artificial Sequence: Synthetic oligonucleotide
  Antisense strand to SEQ ID NO: 998658
cuaaaucacaauuucagga

SEQ ID NO: 998660 - RNA, 19 nt, Artificial Sequence
  Description of Artificial Sequence: Synthetic oligonucleotide
  Sense strand starting at position 3833 of SEQ ID NO: 914367
gggcccaggaguuauaauu

SEQ ID NO: 998661 - RNA, 19 nt, Artificial Sequence
  Description of Artificial Sequence: Synthetic oligonucleotide
  Antisense strand to SEQ ID NO: 998660
aauuauaacuccugggccc

SEQ ID NO: 998662 - RNA, 19 nt, Artificial Sequence
  Description of Artificial Sequence: Synthetic oligonucleotide
  Sense strand starting at position 3930 of SEQ ID NO: 914367
cuggguaucagaggaaucu

SEQ ID NO: 998663 - RNA, 19 nt, Artificial Sequence
  Description of Artificial Sequence: Synthetic oligonucleotide
  Antisense strand to SEQ ID NO: 998662
agauuccucugauacccag

SEQ ID NO: 998664 - RNA, 19 nt, Artificial Sequence
  Description of Artificial Sequence: Synthetic oligonucleotide
  Sense strand starting at position 3939 of SEQ ID NO: 914367
agaggaaucucccaccaag

SEQ ID NO: 998665 - RNA, 19 nt, Artificial Sequence
  Description of Artificial Sequence: Synthetic oligonucleotide
  Antisense strand to SEQ ID NO: 998664
cuuggugggagauuccucu

SEQ ID NO: 998666 - RNA, 19 nt, Artificial Sequence
  Description of Artificial Sequence: Synthetic oligonucleotide
  Sense strand starting at position 184 of SEQ ID NO: 914368
uuuaauggucaauguacau

SEQ ID NO: 998667 - RNA, 19 nt, Artificial Sequence
  Description of Artificial Sequence: Synthetic oligonucleotide
  Antisense strand to SEQ ID NO: 998666
auguacauugaccauuaaa

SEQ ID NO: 998668 - RNA, 19 nt, Artificial Sequence
  Description of Artificial Sequence: Synthetic oligonucleotide
  Sense strand starting at position 205 of SEQ ID NO: 914368
acaagaagugucuauccuu

SEQ ID NO: 998669 - RNA, 19 nt, Artificial Sequence
  Description of Artificial Sequence: Synthetic oligonucleotide
  Antisense strand to SEQ ID NO: 998668
aaggauagacacuucuugu

SEQ ID NO: 998670 - RNA, 19 nt, Artificial Sequence
  Description of Artificial Sequence: Synthetic oligonucleotide
  Sense strand starting at position 208 of SEQ ID NO: 914368
agaagugucuauccuuaug

SEQ ID NO: 998671 - RNA, 19 nt, Artificial Sequence
  Description of Artificial Sequence: Synthetic oligonucleotide
  Antisense strand to SEQ ID NO: 998670
cauaaggauagacacuucu

SEQ ID NO: 998672 - RNA, 19 nt, Artificial Sequence
  Description of Artificial Sequence: Synthetic oligonucleotide
  Sense strand starting at position 211 of SEQ ID NO: 914368
agugucuauccuuaugaau

SEQ ID NO: 998673 - RNA, 19 nt, Artificial Sequence
  Description of Artificial Sequence: Synthetic oligonucleotide
  Antisense strand to SEQ ID NO: 998672
auucauaaggauagacacu

SEQ ID NO: 998674 - RNA, 19 nt, Artificial Sequence
  Description of Artificial Sequence: Synthetic oligonucleotide
  Sense strand starting at position 556 of SEQ ID NO: 914368
ugcagcaucuagguaauuu

SEQ ID NO: 998675 - RNA, 19 nt, Artificial Sequence
  Description of Artificial Sequence: Synthetic oligonucleotide
  Antisense strand to SEQ ID NO: 998674
aaauuaccuagaugcugca

SEQ ID NO: 998676 - RNA, 19 nt, Artificial Sequence
  Description of Artificial Sequence: Synthetic oligonucleotide
  Sense strand starting at position 577 of SEQ ID NO: 914368
guauuccuccagcagaaag

SEQ ID NO: 998677 - RNA, 19 nt, Artificial Sequence
  Description of Artificial Sequence: Synthetic oligonucleotide
  Antisense strand to SEQ ID NO: 998676
cuuucugcuggaggaauac

SEQ ID NO: 998678 - RNA, 19 nt, Artificial Sequence
  Description of Artificial Sequence: Synthetic oligonucleotide
  Sense strand starting at position 871 of SEQ ID NO: 914368
gcaaccaaaguaugaaaua

SEQ ID NO: 998679 - RNA, 19 nt, Artificial Sequence
  Description of Artificial Sequence: Synthetic oligonucleotide
  Antisense strand to SEQ ID NO: 998678
uauuucauacuuugguugc

SEQ ID NO: 998680 - RNA, 19 nt, Artificial Sequence
  Description of Artificial Sequence: Synthetic oligonucleotide
  Sense strand starting at position 903 of SEQ ID NO: 914368
aaaggauggucaucacucu

SEQ ID NO: 998681 - RNA, 19 nt, Artificial Sequence
  Description of Artificial Sequence: Synthetic oligonucleotide
  Antisense strand to SEQ ID NO: 998680
agagugaugaccauccuuu

SEQ ID NO: 998682 - RNA, 19 nt, Artificial Sequence
  Description of Artificial Sequence: Synthetic oligonucleotide
  Sense strand starting at position 1051 of SEQ ID NO: 914368
uuaugucuuggugauaaac

SEQ ID NO: 998683 - RNA, 19 nt, Artificial Sequence
  Description of Artificial Sequence: Synthetic oligonucleotide
  Antisense strand to SEQ ID NO: 998682
guuuaucaccaagacauaa

SEQ ID NO: 998684 - RNA, 19 nt, Artificial Sequence
  Description of Artificial Sequence: Synthetic oligonucleotide
  Sense strand starting at position 1083 of SEQ ID NO: 914368
gacacaaaucagugucagu

SEQ ID NO: 998685 - RNA, 19 nt, Artificial Sequence
  Description of Artificial Sequence: Synthetic oligonucleotide
  Antisense strand to SEQ ID NO: 998684
acugacacugauuuguguc

SEQ ID NO: 998686 - RNA, 19 nt, Artificial Sequence
  Description of Artificial Sequence: Synthetic oligonucleotide
  Sense strand starting at position 1108 of SEQ ID NO: 914368
cuguaugugguuuaauaua

SEQ ID NO: 998687 - RNA, 19 nt, Artificial Sequence
  Description of Artificial Sequence: Synthetic oligonucleotide
  Antisense strand to SEQ ID NO: 998686
uauauuaaaccacauacag

SEQ ID NO: 998688 - RNA, 19 nt, Artificial Sequence
  Description of Artificial Sequence: Synthetic oligonucleotide
  Sense strand starting at position 1173 of SEQ ID NO: 914368
gagauuagauggcuucuaa

SEQ ID NO: 998689 - RNA, 19 nt, Artificial Sequence
  Description of Artificial Sequence: Synthetic oligonucleotide
  Antisense strand to SEQ ID NO: 998688
uuagaagccaucuaaucuc

SEQ ID NO: 998690 - RNA, 19 nt, Artificial Sequence
  Description of Artificial Sequence: Synthetic oligonucleotide
  Sense strand starting at position 1434 of SEQ ID NO: 914368
gaugucuaggcaugaauag

SEQ ID NO: 998691 - RNA, 19 nt, Artificial Sequence
  Description of Artificial Sequence: Synthetic oligonucleotide
  Antisense strand to SEQ ID NO: 998690
cuauucaugccuagacauc

SEQ ID NO: 998692 - RNA, 19 nt, Artificial Sequence
  Description of Artificial Sequence: Synthetic oligonucleotide
  Sense strand starting at position 1598 of SEQ ID NO: 914368
auagaagacuugccuuaug

SEQ ID NO: 998693 - RNA, 19 nt, Artificial Sequence
  Description of Artificial Sequence: Synthetic oligonucleotide
  Antisense strand to SEQ ID NO: 998692
cauaaggcaagucuucuau

SEQ ID NO: 998694 - RNA, 19 nt, Artificial Sequence
  Description of Artificial Sequence: Synthetic oligonucleotide
  Sense strand starting at position 1601 of SEQ ID NO: 914368
gaagacuugccuuauguca

SEQ ID NO: 998695 - RNA, 19 nt, Artificial Sequence
  Description of Artificial Sequence: Synthetic oligonucleotide
  Antisense strand to SEQ ID NO: 998694
ugacauaaggcaagucuuc

SEQ ID NO: 998696 - RNA, 19 nt, Artificial Sequence
  Description of Artificial Sequence: Synthetic oligonucleotide
  Sense strand starting at position 1609 of SEQ ID NO: 914368
gccuuaugucaugaagaaa

SEQ ID NO: 998697 - RNA, 19 nt, Artificial Sequence
  Description of Artificial Sequence: Synthetic oligonucleotide
  Antisense strand to SEQ ID NO: 998696
uuucuucaugacauaaggc

SEQ ID NO: 998698 - RNA, 19 nt, Artificial Sequence
  Description of Artificial Sequence: Synthetic oligonucleotide
  Sense strand starting at position 1781 of SEQ ID NO: 914368
aaacaaugugucugguaag

SEQ ID NO: 998699 - RNA, 19 nt, Artificial Sequence
  Description of Artificial Sequence: Synthetic oligonucleotide
  Antisense strand to SEQ ID NO: 998698
cuuaccagacacauuguuu

SEQ ID NO: 998700 - RNA, 19 nt, Artificial Sequence
  Description of Artificial Sequence: Synthetic oligonucleotide
  Sense strand starting at position 2104 of SEQ ID NO: 914368
ugaaguuuccugggaaguc

SEQ ID NO: 998701 - RNA, 19 nt, Artificial Sequence
  Description of Artificial Sequence: Synthetic oligonucleotide
  Antisense strand to SEQ ID NO: 998700
gacuucccaggaaacuuca

SEQ ID NO: 998702 - RNA, 19 nt, Artificial Sequence
  Description of Artificial Sequence: Synthetic oligonucleotide
  Sense strand starting at position 2420 of SEQ ID NO: 914368
ugcaauggccaucaugaua

SEQ ID NO: 998703 - RNA, 19 nt, Artificial Sequence
  Description of Artificial Sequence: Synthetic oligonucleotide
  Antisense strand to SEQ ID NO: 998702
uaucaugauggccauugca

SEQ ID NO: 998704 - RNA, 19 nt, Artificial Sequence
  Description of Artificial Sequence: Synthetic oligonucleotide
  Sense strand starting at position 2674 of SEQ ID NO: 914368
agcaaacaugcuuagaacu

SEQ ID NO: 998705 - RNA, 19 nt, Artificial Sequence
  Description of Artificial Sequence: Synthetic oligonucleotide
  Antisense strand to SEQ ID NO: 998704
aguucuaagcauguuugcu

SEQ ID NO: 998706 - RNA, 19 nt, Artificial Sequence
  Description of Artificial Sequence: Synthetic oligonucleotide
  Sense strand starting at position 2684 of SEQ ID NO: 914368
cuuagaacugcuuagauug

SEQ ID NO: 998707 - RNA, 19 nt, Artificial Sequence
  Description of Artificial Sequence: Synthetic oligonucleotide
  Antisense strand to SEQ ID NO: 998706
caaucuaagcaguucuaag

SEQ ID NO: 998708 - RNA, 19 nt, Artificial Sequence
  Description of Artificial Sequence: Synthetic oligonucleotide
  Sense strand starting at position 2788 of SEQ ID NO: 914368
uucugaguccuguaccauc

SEQ ID NO: 998709 - RNA, 19 nt, Artificial Sequence
  Description of Artificial Sequence: Synthetic oligonucleotide
  Antisense strand to SEQ ID NO: 998708
gaugguacaggacucagaa

SEQ ID NO: 998710 - RNA, 19 nt, Artificial Sequence
  Description of Artificial Sequence: Synthetic oligonucleotide
  Sense strand starting at position 2807 of SEQ ID NO: 914368
aaagaaauagaucguccau

SEQ ID NO: 998711 - RNA, 19 nt, Artificial Sequence
  Description of Artificial Sequence: Synthetic oligonucleotide
  Antisense strand to SEQ ID NO: 998710
auggacgaucuauuucuuu

SEQ ID NO: 998712 - RNA, 19 nt, Artificial Sequence
  Description of Artificial Sequence: Synthetic oligonucleotide
  Sense strand starting at position 2842 of SEQ ID NO: 914368
gguagauuguacuuacaca

SEQ ID NO: 998713 - RNA, 19 nt, Artificial Sequence
  Description of Artificial Sequence: Synthetic oligonucleotide
  Antisense strand to SEQ ID NO: 998712
uguguaaguacaaucuacc

SEQ ID NO: 998714 - RNA, 19 nt, Artificial Sequence
  Description of Artificial Sequence: Synthetic oligonucleotide
  Sense strand starting at position 2850 of SEQ ID NO: 914368
guacuuacacacugaauga

SEQ ID NO: 998715 - RNA, 19 nt, Artificial Sequence
  Description of Artificial Sequence: Synthetic oligonucleotide
  Antisense strand to SEQ ID NO: 998714
ucauucaguguguaaguac

SEQ ID NO: 998716 - RNA, 19 nt, Artificial Sequence
  Description of Artificial Sequence: Synthetic oligonucleotide
  Sense strand starting at position 2946 of SEQ ID NO: 914368
gcaaauguggaauacuuua

SEQ ID NO: 998717 - RNA, 19 nt, Artificial Sequence
  Description of Artificial Sequence: Synthetic oligonucleotide
  Antisense strand to SEQ ID NO: 998716
uaaaguauuccacauuugc

SEQ ID NO: 998718 - RNA, 19 nt, Artificial Sequence
  Description of Artificial Sequence: Synthetic oligonucleotide
  Sense strand starting at position 2951 of SEQ ID NO: 914368
uguggaauacuuuagccau

SEQ ID NO: 998719 - RNA, 19 nt, Artificial Sequence
  Description of Artificial Sequence: Synthetic oligonucleotide
  Antisense strand to SEQ ID NO: 998718
auggcuaaaguauuccaca

SEQ ID NO: 998720 - RNA, 19 nt, Artificial Sequence
  Description of Artificial Sequence: Synthetic oligonucleotide
  Sense strand starting at position 2954 of SEQ ID NO: 914368
ggaauacuuuagccaucua

SEQ ID NO: 998721 - RNA, 19 nt, Artificial Sequence
  Description of Artificial Sequence: Synthetic oligonucleotide
  Antisense strand to SEQ ID NO: 998720
uagauggcuaaaguauucc

SEQ ID NO: 998722 - RNA, 19 nt, Artificial Sequence
  Description of Artificial Sequence: Synthetic oligonucleotide
  Sense strand starting at position 2969 of SEQ ID NO: 914368
ucuacaucacacugguaga

SEQ ID NO: 998723 - RNA, 19 nt, Artificial Sequence
  Description of Artificial Sequence: Synthetic oligonucleotide
  Antisense strand to SEQ ID NO: 998722
ucuaccagugugauguaga

SEQ ID NO: 998724 - RNA, 19 nt, Artificial Sequence
  Description of Artificial Sequence: Synthetic oligonucleotide
  Sense strand starting at position 2982 of SEQ ID NO: 914368
gguagagacuuucugugau

SEQ ID NO: 998725 - RNA, 19 nt, Artificial Sequence
  Description of Artificial Sequence: Synthetic oligonucleotide
  Antisense strand to SEQ ID NO: 998724
aucacagaaagucucuacc

SEQ ID NO: 998726 - RNA, 19 nt, Artificial Sequence
  Description of Artificial Sequence: Synthetic oligonucleotide
  Sense strand starting at position 2984 of SEQ ID NO: 914368
uagagacuuucugugauca

SEQ ID NO: 998727 - RNA, 19 nt, Artificial Sequence
  Description of Artificial Sequence: Synthetic oligonucleotide
  Antisense strand to SEQ ID NO: 998726
ugaucacagaaagucucua

SEQ ID NO: 998728 - RNA, 19 nt, Artificial Sequence
  Description of Artificial Sequence: Synthetic oligonucleotide
  Sense strand starting at position 2985 of SEQ ID NO: 914368
agagacuuucugugaucag

SEQ ID NO: 998729 - RNA, 19 nt, Artificial Sequence
  Description of Artificial Sequence: Synthetic oligonucleotide
  Antisense strand to SEQ ID NO: 998728
cugaucacagaaagucucu

SEQ ID NO: 998730 - RNA, 19 nt, Artificial Sequence
  Description of Artificial Sequence: Synthetic oligonucleotide
  Sense strand starting at position 2989 of SEQ ID NO: 914368
acuuucugugaucagcuau

SEQ ID NO: 998731 - RNA, 19 nt, Artificial Sequence
  Description of Artificial Sequence: Synthetic oligonucleotide
  Antisense strand to SEQ ID NO: 998730
auagcugaucacagaaagu

SEQ ID NO: 998732 - RNA, 19 nt, Artificial Sequence
  Description of Artificial Sequence: Synthetic oligonucleotide
  Sense strand starting at position 3258 of SEQ ID NO: 914368
aguaaugagucuuugaaug

SEQ ID NO: 998733 - RNA, 19 nt, Artificial Sequence
  Description of Artificial Sequence: Synthetic oligonucleotide
  Antisense strand to SEQ ID NO: 998732
cauucaaagacucauuacu

SEQ ID NO: 998734 - RNA, 19 nt, Artificial Sequence
  Description of Artificial Sequence: Synthetic oligonucleotide
  Sense strand starting at position 3384 of SEQ ID NO: 914368
ucaguuccaugagcaaaua

SEQ ID NO: 998735 - RNA, 19 nt, Artificial Sequence
  Description of Artificial Sequence: Synthetic oligonucleotide
  Antisense strand to SEQ ID NO: 998734
uauuugcucauggaacuga

SEQ ID NO: 998736 - RNA, 19 nt, Artificial Sequence
  Description of Artificial Sequence: Synthetic oligonucleotide
  Sense strand starting at position 3416 of SEQ ID NO: 914368
auuggcaucugaguaaaua

SEQ ID NO: 998737 - RNA, 19 nt, Artificial Sequence
  Description of Artificial Sequence: Synthetic oligonucleotide
  Antisense strand to SEQ ID NO: 998736
uauuuacucagaugccaau

SEQ ID NO: 998738 - RNA, 19 nt, Artificial Sequence
  Description of Artificial Sequence: Synthetic oligonucleotide
  Sense strand starting at position 3417 of SEQ ID NO: 914368
uuggcaucugaguaaauau

SEQ ID NO: 998739 - RNA, 19 nt, Artificial Sequence
  Description of Artificial Sequence: Synthetic oligonucleotide
  Antisense strand to SEQ ID NO: 998738
auauuuacucagaugccaa

SEQ ID NO: 998740 - RNA, 19 nt, Artificial Sequence
  Description of Artificial Sequence: Synthetic oligonucleotide
  Sense strand starting at position 3481 of SEQ ID NO: 914368
ugagcaucugcauagaauu

SEQ ID NO: 998741 - RNA, 19 nt, Artificial Sequence
  Description of Artificial Sequence: Synthetic oligonucleotide
  Antisense strand to SEQ ID NO: 998740
aauucuaugcagaugcuca

SEQ ID NO: 998742 - RNA, 19 nt, Artificial Sequence
  Description of Artificial Sequence: Synthetic oligonucleotide
  Sense strand starting at position 3594 of SEQ ID NO: 914368
uuguaaggccuugaaguua

SEQ ID NO: 998743 - RNA, 19 nt, Artificial Sequence
  Description of Artificial Sequence: Synthetic oligonucleotide
  Antisense strand to SEQ ID NO: 998742
uaacuucaaggccuuacaa

SEQ ID NO: 998744 - RNA, 19 nt, Artificial Sequence
  Description of Artificial Sequence: Synthetic oligonucleotide
  Sense strand starting at position 3724 of SEQ ID NO: 914368
uggaaucaaguuugacaau

SEQ ID NO: 998745 - RNA, 19 nt, Artificial Sequence
  Description of Artificial Sequence: Synthetic oligonucleotide
  Antisense strand to SEQ ID NO: 998744
auugucaaacuugauucca

SEQ ID NO: 998746 - RNA, 19 nt, Artificial Sequence
  Description of Artificial Sequence: Synthetic oligonucleotide
  Sense strand starting at position 53 of SEQ ID NO: 914369
gguccaaguuaacuaaacu

SEQ ID NO: 998747 - RNA, 19 nt, Artificial Sequence
  Description of Artificial Sequence: Synthetic oligonucleotide
  Antisense strand to SEQ ID NO: 998746
aguuuaguuaacuuggacc

SEQ ID NO: 998748 - RNA, 19 nt, Artificial Sequence
  Description of Artificial Sequence: Synthetic oligonucleotide
  Sense strand starting at position 71 of SEQ ID NO: 914369
ucauuauauccgcaggaag

SEQ ID NO: 998749 - RNA, 19 nt, Artificial Sequence
  Description of Artificial Sequence: Synthetic oligonucleotide
  Antisense strand to SEQ ID NO: 998748
cuuccugcggauauaauga

SEQ ID NO: 998750 - RNA, 19 nt, Artificial Sequence
  Description of Artificial Sequence: Synthetic oligonucleotide
  Sense strand starting at position 73 of SEQ ID NO: 914369
auuauauccgcaggaagac

SEQ ID NO: 998751 - RNA, 19 nt, Artificial Sequence
  Description of Artificial Sequence: Synthetic oligonucleotide
  Antisense strand to SEQ ID NO: 998750
gucuuccugcggauauaau

SEQ ID NO: 998752 - RNA, 19 nt, Artificial Sequence
  Description of Artificial Sequence: Synthetic oligonucleotide
  Sense strand starting at position 83 of SEQ ID NO: 914369
caggaagacugaguuucuu

SEQ ID NO: 998753 - RNA, 19 nt, Artificial Sequence
  Description of Artificial Sequence: Synthetic oligonucleotide
  Antisense strand to SEQ ID NO: 998752
aagaaacucagucuuccug

SEQ ID NO: 998754 - RNA, 19 nt, Artificial Sequence
  Description of Artificial Sequence: Synthetic oligonucleotide
  Sense strand starting at position 314 of SEQ ID NO: 914369
uggcuagauccuggagaua

SEQ ID NO: 998755 - RNA, 19 nt, Artificial Sequence
  Description of Artificial Sequence: Synthetic oligonucleotide
  Antisense strand to SEQ ID NO: 998754
uaucuccaggaucuagcca

SEQ ID NO: 998756 - RNA, 19 nt, Artificial Sequence
  Description of Artificial Sequence: Synthetic oligonucleotide
  Sense strand starting at position 712 of SEQ ID NO: 914369
acuugauauugcucuagac

SEQ ID NO: 998757 - RNA, 19 nt, Artificial Sequence
  Description of Artificial Sequence: Synthetic oligonucleotide
  Antisense strand to SEQ ID NO: 998756
gucuagagcaauaucaagu

SEQ ID NO: 998758 - RNA, 19 nt, Artificial Sequence
  Description of Artificial Sequence: Synthetic oligonucleotide
  Sense strand starting at position 787 of SEQ ID NO: 914369
cuguuaauaguugaucaca

SEQ ID NO: 998759 - RNA, 19 nt, Artificial Sequence
  Description of Artificial Sequence: Synthetic oligonucleotide
  Antisense strand to SEQ ID NO: 998758
ugugaucaacuauuaacag

SEQ ID NO: 998760 - RNA, 19 nt, Artificial Sequence
  Description of Artificial Sequence: Synthetic oligonucleotide
  Sense strand starting at position 789 of SEQ ID NO: 914369
guuaauaguugaucacaug

SEQ ID NO: 998761 - RNA, 19 nt, Artificial Sequence
  Description of Artificial Sequence: Synthetic oligonucleotide
  Antisense strand to SEQ ID NO: 998760
caugugaucaacuauuaac

SEQ ID NO: 998762 - RNA, 19 nt, Artificial Sequence
  Description of Artificial Sequence: Synthetic oligonucleotide
  Sense strand starting at position 790 of SEQ ID NO: 914369
uuaauaguugaucacaugu

SEQ ID NO: 998763 - RNA, 19 nt, Artificial Sequence
  Description of Artificial Sequence: Synthetic oligonucleotide
  Antisense strand to SEQ ID NO: 998762
acaugugaucaacuauuaa

SEQ ID NO: 998764 - RNA, 19 nt, Artificial Sequence
  Description of Artificial Sequence: Synthetic oligonucleotide
  Sense strand starting at position 821 of SEQ ID NO: 914369
uuucuucuacgagaggauu

SEQ ID NO: 998765 - RNA, 19 nt, Artificial Sequence
  Description of Artificial Sequence: Synthetic oligonucleotide
  Antisense strand to SEQ ID NO: 998764
aauccucucguagaagaaa

SEQ ID NO: 998766 - RNA, 19 nt, Artificial Sequence
  Description of Artificial Sequence: Synthetic oligonucleotide
  Sense strand starting at position 829 of SEQ ID NO: 914369
acgagaggauuacccauua

SEQ ID NO: 998767 - RNA, 19 nt, Artificial Sequence
  Description of Artificial Sequence: Synthetic oligonucleotide
  Antisense strand to SEQ ID NO: 998766
uaauggguaauccucucgu

SEQ ID NO: 998768 - RNA, 19 nt, Artificial Sequence
  Description of Artificial Sequence: Synthetic oligonucleotide
  Sense strand starting at position 1251 of SEQ ID NO: 914369
cuguucuuuggcgugugaa

SEQ ID NO: 998769 - RNA, 19 nt, Artificial Sequence
  Description of Artificial Sequence: Synthetic oligonucleotide
  Antisense strand to SEQ ID NO: 998768
uucacacgccaaagaacag

SEQ ID NO: 998770 - RNA, 19 nt, Artificial Sequence
  Description of Artificial Sequence: Synthetic oligonucleotide
  Sense strand starting at position 1253 of SEQ ID NO: 914369
guucuuuggcgugugaagu

SEQ ID NO: 998771 - RNA, 19 nt, Artificial Sequence
  Description of Artificial Sequence: Synthetic oligonucleotide
  Antisense strand to SEQ ID NO: 998770
acuucacacgccaaagaac

SEQ ID NO: 998772 - RNA, 19 nt, Artificial Sequence
  Description of Artificial Sequence: Synthetic oligonucleotide
  Sense strand starting at position 1274 of SEQ ID NO: 914369
uaggaagagccgugauaug

SEQ ID NO: 998773 - RNA, 19 nt, Artificial Sequence
  Description of Artificial Sequence: Synthetic oligonucleotide
  Antisense strand to SEQ ID NO: 998772
cauaucacggcucuuccua

SEQ ID NO: 998774 - RNA, 19 nt, Artificial Sequence
  Description of Artificial Sequence: Synthetic oligonucleotide
  Sense strand starting at position 1284 of SEQ ID NO: 914369
cgugauaugcccguuguua

SEQ ID NO: 998775 - RNA, 19 nt, Artificial Sequence
  Description of Artificial Sequence: Synthetic oligonucleotide
  Antisense strand to SEQ ID NO: 998774
uaacaacgggcauaucacg

SEQ ID NO: 998776 - RNA, 19 nt, Artificial Sequence
  Description of Artificial Sequence: Synthetic oligonucleotide
  Sense strand starting at position 1373 of SEQ ID NO: 914369
uggagacucaagugucuua

SEQ ID NO: 998777 - RNA, 19 nt, Artificial Sequence
  Description of Artificial Sequence: Synthetic oligonucleotide
  Antisense strand to SEQ ID NO: 998776
uaagacacuugagucucca

SEQ ID NO: 998778 - RNA, 19 nt, Artificial Sequence
  Description of Artificial Sequence: Synthetic oligonucleotide
  Sense strand starting at position 1434 of SEQ ID NO: 914369
guuugaagucaucauguga

SEQ ID NO: 998779 - RNA, 19 nt, Artificial Sequence
  Description of Artificial Sequence: Synthetic oligonucleotide
  Antisense strand to SEQ ID NO: 998778
ucacaugaugacuucaaac

SEQ ID NO: 998780 - RNA, 19 nt, Artificial Sequence
  Description of Artificial Sequence: Synthetic oligonucleotide
  Sense strand starting at position 1656 of SEQ ID NO: 914369
gauucuaaugaaugagcga

SEQ ID NO: 998781 - RNA, 19 nt, Artificial Sequence
  Description of Artificial Sequence: Synthetic oligonucleotide
  Antisense strand to SEQ ID NO: 998780
ucgcucauucauuagaauc

SEQ ID NO: 998782 - RNA, 19 nt, Artificial Sequence
  Description of Artificial Sequence: Synthetic oligonucleotide
  Sense strand starting at position 1661 of SEQ ID NO: 914369
uaaugaaugagcgagguua

SEQ ID NO: 998783 - RNA, 19 nt, Artificial Sequence
  Description of Artificial Sequence: Synthetic oligonucleotide
  Antisense strand to SEQ ID NO: 998782
uaaccucgcucauucauua

SEQ ID NO: 998784 - RNA, 19 nt, Artificial Sequence
  Description of Artificial Sequence: Synthetic oligonucleotide
  Sense strand starting at position 1751 of SEQ ID NO: 914369
gguccuggcacugaaaguu

SEQ ID NO: 998785 - RNA, 19 nt, Artificial Sequence
  Description of Artificial Sequence: Synthetic oligonucleotide
  Antisense strand to SEQ ID NO: 998784
aacuuucagugccaggacc

SEQ ID NO: 998786 - RNA, 19 nt, Artificial Sequence
  Description of Artificial Sequence: Synthetic oligonucleotide
  Sense strand starting at position 1759 of SEQ ID NO: 914369
cacugaaaguucccagaga

SEQ ID NO: 998787 - RNA, 19 nt, Artificial Sequence
  Description of Artificial Sequence: Synthetic oligonucleotide
  Antisense strand to SEQ ID NO: 998786
ucucugggaacuuucagug

SEQ ID NO: 998788 - RNA, 19 nt, Artificial Sequence
  Description of Artificial Sequence: Synthetic oligonucleotide
  Sense strand starting at position 1982 of SEQ ID NO: 914369
agacuaccgcuuuaauaau

SEQ ID NO: 998789 - RNA, 19 nt, Artificial Sequence
  Description of Artificial Sequence: Synthetic oligonucleotide
  Antisense strand to SEQ ID NO: 998788
auuauuaaagcgguagucu

SEQ ID NO: 998790 - RNA, 19 nt, Artificial Sequence
  Description of Artificial Sequence: Synthetic oligonucleotide
  Sense strand starting at position 2219 of SEQ ID NO: 914369
agugacuuguccuugggaa

SEQ ID NO: 998791 - RNA, 19 nt, Artificial Sequence
  Description of Artificial Sequence: Synthetic oligonucleotide
  Antisense strand to SEQ ID NO: 998790
uucccaaggacaagucacu

SEQ ID NO: 998792 - RNA, 19 nt, Artificial Sequence
  Description of Artificial Sequence: Synthetic oligonucleotide
  Sense strand starting at position 2221 of SEQ ID NO: 914369
ugacuuguccuugggaaca

SEQ ID NO: 998793 - RNA, 19 nt, Artificial Sequence
  Description of Artificial Sequence: Synthetic oligonucleotide
  Antisense strand to SEQ ID NO: 998792
uguucccaaggacaaguca

SEQ ID NO: 998794 - RNA, 19 nt, Artificial Sequence
  Description of Artificial Sequence: Synthetic oligonucleotide
  Sense strand starting at position 2294 of SEQ ID NO: 914369
uacugaugacuaggcgaga

SEQ ID NO: 998795 - RNA, 19 nt, Artificial Sequence
  Description of Artificial Sequence: Synthetic oligonucleotide
  Antisense strand to SEQ ID NO: 998794
ucucgccuagucaucagua

SEQ ID NO: 998796 - RNA, 19 nt, Artificial Sequence
  Description of Artificial Sequence: Synthetic oligonucleotide
  Sense strand starting at position 2421 of SEQ ID NO: 914369
ucccaaaugugaguuaaca

SEQ ID NO: 998797 - RNA, 19 nt, Artificial Sequence
  Description of Artificial Sequence: Synthetic oligonucleotide
  Antisense strand to SEQ ID NO: 998796
uguuaacucacauuuggga

SEQ ID NO: 998798 - RNA, 19 nt, Artificial Sequence
  Description of Artificial Sequence: Synthetic oligonucleotide
  Sense strand starting at position 2889 of SEQ ID NO: 914369
uccggaaaucucgggaaau

SEQ ID NO: 998799 - RNA, 19 nt, Artificial Sequence
  Description of Artificial Sequence: Synthetic oligonucleotide
  Antisense strand to SEQ ID NO: 998798
auuucccgagauuuccgga

SEQ ID NO: 998800 - RNA, 19 nt, Artificial Sequence
  Description of Artificial Sequence: Synthetic oligonucleotide
  Sense strand starting at position 2908 of SEQ ID NO: 914369
aggcaauaacucgagcuuu

SEQ ID NO: 998801 - RNA, 19 nt, Artificial Sequence
  Description of Artificial Sequence: Synthetic oligonucleotide
  Antisense strand to SEQ ID NO: 998800
aaagcucgaguuauugccu

SEQ ID NO: 998802 - RNA, 19 nt, Artificial Sequence
  Description of Artificial Sequence: Synthetic oligonucleotide
  Sense strand starting at position 3047 of SEQ ID NO: 914369
ccaguuguuauggagaugu

SEQ ID NO: 998803 - RNA, 19 nt, Artificial Sequence
  Description of Artificial Sequence: Synthetic oligonucleotide
  Antisense strand to SEQ ID NO: 998802
acaucuccauaacaacugg

SEQ ID NO: 998804 - RNA, 19 nt, Artificial Sequence
  Description of Artificial Sequence: Synthetic oligonucleotide
  Sense strand starting at position 3057 of SEQ ID NO: 914369
uggagauguccgucgcucu

SEQ ID NO: 998805 - RNA, 19 nt, Artificial Sequence
  Description of Artificial Sequence: Synthetic oligonucleotide
  Antisense strand to SEQ ID NO: 998804
agagcgacggacaucucca

SEQ ID NO: 998806 - RNA, 19 nt, Artificial Sequence
  Description of Artificial Sequence: Synthetic oligonucleotide
  Sense strand starting at position 3130 of SEQ ID NO: 914369
uggcacugacaccaugauu

SEQ ID NO: 998807 - RNA, 19 nt, Artificial Sequence
  Description of Artificial Sequence: Synthetic oligonucleotide
  Antisense strand to SEQ ID NO: 998806
aaucauggugucagugcca

SEQ ID NO: 998808 - RNA, 19 nt, Artificial Sequence
  Description of Artificial Sequence: Synthetic oligonucleotide
  Sense strand starting at position 3252 of SEQ ID NO: 914369
gaugguggauagcucuuaa

SEQ ID NO: 998809 - RNA, 19 nt, Artificial Sequence
  Description of Artificial Sequence: Synthetic oligonucleotide
  Antisense strand to SEQ ID NO: 998808
uuaagagcuauccaccauc

SEQ ID NO: 998810 - RNA, 19 nt, Artificial Sequence
  Description of Artificial Sequence: Synthetic oligonucleotide
  Sense strand starting at position 3524 of SEQ ID NO: 914369
uugguacuggguuauuauu

SEQ ID NO: 998811 - RNA, 19 nt, Artificial Sequence
  Description of Artificial Sequence: Synthetic oligonucleotide
  Antisense strand to SEQ ID NO: 998810
aauaauaacccaguaccaa

SEQ ID NO: 998812 - RNA, 19 nt, Artificial Sequence
  Description of Artificial Sequence: Synthetic oligonucleotide
  Sense strand starting at position 3578 of SEQ ID NO: 914369
cuagaaauguuuccaaagu

SEQ ID NO: 998813 - RNA, 19 nt, Artificial Sequence
  Description of Artificial Sequence: Synthetic oligonucleotide
  Antisense strand to SEQ ID NO: 998812
acuuuggaaacauuucuag

SEQ ID NO: 998814 - RNA, 19 nt, Artificial Sequence
  Description of Artificial Sequence: Synthetic oligonucleotide
  Sense strand starting at position 3595 of SEQ ID NO: 914369
gucaaacaggcuuaucuua

SEQ ID NO: 998815 - RNA, 19 nt, Artificial Sequence
  Description of Artificial Sequence: Synthetic oligonucleotide
  Antisense strand to SEQ ID NO: 998814
uaagauaagccuguuugac

SEQ ID NO: 998816 - RNA, 19 nt, Artificial Sequence
  Description of Artificial Sequence: Synthetic oligonucleotide
  Sense strand starting at position 3647 of SEQ ID NO: 914369
ccugguucucauuaggagu

SEQ ID NO: 998817 - RNA, 19 nt, Artificial Sequence
  Description of Artificial Sequence: Synthetic oligonucleotide
  Antisense strand to SEQ ID NO: 998816
acuccuaaugagaaccagg

SEQ ID NO: 998818 - RNA, 19 nt, Artificial Sequence
  Description of Artificial Sequence: Synthetic oligonucleotide
  Sense strand starting at position 3653 of SEQ ID NO: 914369
ucucauuaggaguaguucu

SEQ ID NO: 998819 - RNA, 19 nt, Artificial Sequence
  Description of Artificial Sequence: Synthetic oligonucleotide
  Antisense strand to SEQ ID NO: 998818
agaacuacuccuaaugaga

SEQ ID NO: 998820 - RNA, 19 nt, Artificial Sequence
  Description of Artificial Sequence: Synthetic oligonucleotide
  Sense strand starting at position 3696 of SEQ ID NO: 914369
ugagauggguccuuaugaa

SEQ ID NO: 998821 - RNA, 19 nt, Artificial Sequence
  Description of Artificial Sequence: Synthetic oligonucleotide
  Antisense strand to SEQ ID NO: 998820
uucauaaggacccaucuca

SEQ ID NO: 998822 - RNA, 19 nt, Artificial Sequence
  Description of Artificial Sequence: Synthetic oligonucleotide
  Sense strand starting at position 3747 of SEQ ID NO: 914369
aacaguucucgccaaauga

SEQ ID NO: 998823 - RNA, 19 nt, Artificial Sequence
  Description of Artificial Sequence: Synthetic oligonucleotide
  Antisense strand to SEQ ID NO: 998822
ucauuuggcgagaacuguu

SEQ ID NO: 998824 - RNA, 19 nt, Artificial Sequence
  Description of Artificial Sequence: Synthetic oligonucleotide
  Sense strand starting at position 3971 of SEQ ID NO: 914369
agcacagaucugcaaucuu

SEQ ID NO: 998825 - RNA, 19 nt, Artificial Sequence
  Description of Artificial Sequence: Synthetic oligonucleotide
  Antisense strand to SEQ ID NO: 998824
aagauugcagaucugugcu

SEQ ID NO: 998826 - RNA, 19 nt, Artificial Sequence
  Description of Artificial Sequence: Synthetic oligonucleotide
  Sense strand starting at position 845 of SEQ ID NO: 914370
uauuuagcucuucgguuga

SEQ ID NO: 998827 - RNA, 19 nt, Artificial Sequence
  Description of Artificial Sequence: Synthetic oligonucleotide
  Antisense strand to SEQ ID NO: 998826
ucaaccgaagagcuaaaua

SEQ ID NO: 998828 - RNA, 19 nt, Artificial Sequence
  Description of Artificial Sequence: Synthetic oligonucleotide
  Sense strand starting at position 858 of SEQ ID NO: 914370
gguugagcuucgauugguc

SEQ ID NO: 998829 - RNA, 19 nt, Artificial Sequence
  Description of Artificial Sequence: Synthetic oligonucleotide
  Antisense strand to SEQ ID NO: 998828
gaccaaucgaagcucaacc

SEQ ID NO: 998830 - RNA, 19 nt, Artificial Sequence
  Description of Artificial Sequence: Synthetic oligonucleotide
  Sense strand starting at position 861 of SEQ ID NO: 914370
ugagcuucgauuggucaaa

SEQ ID NO: 998831 - RNA, 19 nt, Artificial Sequence
  Description of Artificial Sequence: Synthetic oligonucleotide
  Antisense strand to SEQ ID NO: 998830
uuugaccaaucgaagcuca

SEQ ID NO: 998832 - RNA, 19 nt, Artificial Sequence
  Description of Artificial Sequence: Synthetic oligonucleotide
  Sense strand starting at position 1210 of SEQ ID NO: 914370
ggagggagcgagugagaau

SEQ ID NO: 998833 - RNA, 19 nt, Artificial Sequence
  Description of Artificial Sequence: Synthetic oligonucleotide
  Antisense strand to SEQ ID NO: 998832
auucucacucgcucccucc

SEQ ID NO: 998834 - RNA, 19 nt, Artificial Sequence
  Description of Artificial Sequence: Synthetic oligonucleotide
  Sense strand starting at position 1289 of SEQ ID NO: 914370
acccaaguucucugggaga

SEQ ID NO: 998835 - RNA, 19 nt, Artificial Sequence
  Description of Artificial Sequence: Synthetic oligonucleotide
  Antisense strand to SEQ ID NO: 998834
ucucccagagaacuugggu

SEQ ID NO: 998836 - RNA, 19 nt, Artificial Sequence
  Description of Artificial Sequence: Synthetic oligonucleotide
  Sense strand starting at position 1470 of SEQ ID NO: 914370
ucuagaguuugccuaauag

SEQ ID NO: 998837 - RNA, 19 nt, Artificial Sequence
  Description of Artificial Sequence: Synthetic oligonucleotide
  Antisense strand to SEQ ID NO: 998836
cuauuaggcaaacucuaga

SEQ ID NO: 998838 - RNA, 19 nt, Artificial Sequence
  Description of Artificial Sequence: Synthetic oligonucleotide
  Sense strand starting at position 1533 of SEQ ID NO: 914370
cccagauaacguuacacca

SEQ ID NO: 998839 - RNA, 19 nt, Artificial Sequence
  Description of Artificial Sequence: Synthetic oligonucleotide
  Antisense strand to SEQ ID NO: 998838
ugguguaacguuaucuggg

SEQ ID NO: 998840 - RNA, 19 nt, Artificial Sequence
  Description of Artificial Sequence: Synthetic oligonucleotide
  Sense strand starting at position 1756 of SEQ ID NO: 914370
cguucccuucgcuuaauua

SEQ ID NO: 998841 - RNA, 19 nt, Artificial Sequence
  Description of Artificial Sequence: Synthetic oligonucleotide
  Antisense strand to SEQ ID NO: 998840
uaauuaagcgaagggaacg

SEQ ID NO: 998842 - RNA, 19 nt, Artificial Sequence
  Description of Artificial Sequence: Synthetic oligonucleotide
  Sense strand starting at position 1792 of SEQ ID NO: 914370
gagucuuuggugcccggua

SEQ ID NO: 998843 - RNA, 19 nt, Artificial Sequence
  Description of Artificial Sequence: Synthetic oligonucleotide
  Antisense strand to SEQ ID NO: 998842
uaccgggcaccaaagacuc

SEQ ID NO: 998844 - RNA, 19 nt, Artificial Sequence
  Description of Artificial Sequence: Synthetic oligonucleotide
  Sense strand starting at position 1820 of SEQ ID NO: 914370
ucuguucugcagcaaagaa

SEQ ID NO: 998845 - RNA, 19 nt, Artificial Sequence
  Description of Artificial Sequence: Synthetic oligonucleotide
  Antisense strand to SEQ ID NO: 998844
uucuuugcugcagaacaga

SEQ ID NO: 998846 - RNA, 19 nt, Artificial Sequence
  Description of Artificial Sequence: Synthetic oligonucleotide
  Sense strand starting at position 2031 of SEQ ID NO: 914370
ugacgugcgcugucauaug

SEQ ID NO: 998847 - RNA, 19 nt, Artificial Sequence
  Description of Artificial Sequence: Synthetic oligonucleotide
  Antisense strand to SEQ ID NO: 998846
cauaugacagcgcacguca

SEQ ID NO: 998848 - RNA, 19 nt, Artificial Sequence
  Description of Artificial Sequence: Synthetic oligonucleotide
  Sense strand starting at position 2304 of SEQ ID NO: 914370
gcagaacuggcucaguuaa

SEQ ID NO: 998849 - RNA, 19 nt, Artificial Sequence
  Description of Artificial Sequence: Synthetic oligonucleotide
  Antisense strand to SEQ ID NO: 998848
uuaacugagccaguucugc

SEQ ID NO: 998850 - RNA, 19 nt, Artificial Sequence
  Description of Artificial Sequence: Synthetic oligonucleotide
  Sense strand starting at position 2306 of SEQ ID NO: 914370
agaacuggcucaguuaauc

SEQ ID NO: 998851 - RNA, 19 nt, Artificial Sequence
  Description of Artificial Sequence: Synthetic oligonucleotide
  Antisense strand to SEQ ID NO: 998850
gauuaacugagccaguucu

SEQ ID NO: 998852 - RNA, 19 nt, Artificial Sequence
  Description of Artificial Sequence: Synthetic oligonucleotide
  Sense strand starting at position 2385 of SEQ ID NO: 914370
cucauuugccuguagccaa

SEQ ID NO: 998853 - RNA, 19 nt, Artificial Sequence
  Description of Artificial Sequence: Synthetic oligonucleotide
  Antisense strand to SEQ ID NO: 998852
uuggcuacaggcaaaugag

SEQ ID NO: 998854 - RNA, 19 nt, Artificial Sequence
  Description of Artificial Sequence: Synthetic oligonucleotide
  Sense strand starting at position 2416 of SEQ ID NO: 914370
gaacuuauauggcuagggu

SEQ ID NO: 998855 - RNA, 19 nt, Artificial Sequence
  Description of Artificial Sequence: Synthetic oligonucleotide
  Antisense strand to SEQ ID NO: 998854
acccuagccauauaaguuc

SEQ ID NO: 998856 - RNA, 19 nt, Artificial Sequence
  Description of Artificial Sequence: Synthetic oligonucleotide
  Sense strand starting at position 2459 of SEQ ID NO: 914370
uuugaugaacucugucaac

SEQ ID NO: 998857 - RNA, 19 nt, Artificial Sequence
  Description of Artificial Sequence: Synthetic oligonucleotide
  Antisense strand to SEQ ID NO: 998856
guugacagaguucaucaaa

SEQ ID NO: 998858 - RNA, 19 nt, Artificial Sequence
  Description of Artificial Sequence: Synthetic oligonucleotide
  Sense strand starting at position 2486 of SEQ ID NO: 914370
uguguuucugcuuuaaagc

SEQ ID NO: 998859 - RNA, 19 nt, Artificial Sequence
  Description of Artificial Sequence: Synthetic oligonucleotide
  Antisense strand to SEQ ID NO: 998858
gcuuuaaagcagaaacaca

SEQ ID NO: 998860 - RNA, 19 nt, Artificial Sequence
  Description of Artificial Sequence: Synthetic oligonucleotide
  Sense strand starting at position 2569 of SEQ ID NO: 914370
acagcaguaccguacuuaa

SEQ ID NO: 998861 - RNA, 19 nt, Artificial Sequence
  Description of Artificial Sequence: Synthetic oligonucleotide
  Antisense strand to SEQ ID NO: 998860
uuaaguacgguacugcugu

SEQ ID NO: 998862 - RNA, 19 nt, Artificial Sequence
  Description of Artificial Sequence: Synthetic oligonucleotide
  Sense strand starting at position 2656 of SEQ ID NO: 914370
uccugaaauugugauuuag

SEQ ID NO: 998863 - RNA, 19 nt, Artificial Sequence
  Description of Artificial Sequence: Synthetic oligonucleotide
  Antisense strand to SEQ ID NO: 998862
cuaaaucacaauuucagga

SEQ ID NO: 998864 - RNA, 19 nt, Artificial Sequence
  Description of Artificial Sequence: Synthetic oligonucleotide
  Sense strand starting at position 2688 of SEQ ID NO: 914370
gggcccaggaguuauaauu

SEQ ID NO: 998865 - RNA, 19 nt, Artificial Sequence
  Description of Artificial Sequence: Synthetic oligonucleotide
  Antisense strand to SEQ ID NO: 998864
aauuauaacuccugggccc

SEQ ID NO: 998866 - RNA, 19 nt, Artificial Sequence
  Description of Artificial Sequence: Synthetic oligonucleotide
  Sense strand starting at position 2785 of SEQ ID NO: 914370
cuggguaucagaggaaucu

SEQ ID NO: 998867 - RNA, 19 nt, Artificial Sequence
  Description of Artificial Sequence: Synthetic oligonucleotide
  Antisense strand to SEQ ID NO: 998866
agauuccucugauacccag

SEQ ID NO: 998868 - RNA, 19 nt, Artificial Sequence
  Description of Artificial Sequence: Synthetic oligonucleotide
  Sense strand starting at position 2892 of SEQ ID NO: 914370
cgaagacuauugcuguaag

SEQ ID NO: 998869 - RNA, 19 nt, Artificial Sequence
  Description of Artificial Sequence: Synthetic oligonucleotide
  Antisense strand to SEQ ID NO: 998868
cuuacagcaauagucuucg

SEQ ID NO: 998870 - RNA, 19 nt, Artificial Sequence
  Description of Artificial Sequence: Synthetic oligonucleotide
  Sense strand starting at position 2895 of SEQ ID NO: 914370
agacuauugcuguaagaau

SEQ ID NO: 998871 - RNA, 19 nt, Artificial Sequence
  Description of Artificial Sequence: Synthetic oligonucleotide
  Antisense strand to SEQ ID NO: 998870
auucuuacagcaauagucu

SEQ ID NO: 998872 - RNA, 19 nt, Artificial Sequence
  Description of Artificial Sequence: Synthetic oligonucleotide
  Sense strand starting at position 2979 of SEQ ID NO: 914370
acccucuugugguuaccaa

SEQ ID NO: 998873 - RNA, 19 nt, Artificial Sequence
  Description of Artificial Sequence: Synthetic oligonucleotide
  Antisense strand to SEQ ID NO: 998872
uugguaaccacaagagggu

SEQ ID NO: 998874 - RNA, 19 nt, Artificial Sequence
  Description of Artificial Sequence: Synthetic oligonucleotide
  Sense strand starting at position 2986 of SEQ ID NO: 914370
ugugguuaccaagaaugug

SEQ ID NO: 998875 - RNA, 19 nt, Artificial Sequence
  Description of Artificial Sequence: Synthetic oligonucleotide
  Antisense strand to SEQ ID NO: 998874
cacauucuugguaaccaca

SEQ ID NO: 998876 - RNA, 19 nt, Artificial Sequence
  Description of Artificial Sequence: Synthetic oligonucleotide
  Sense strand starting at position 2998 of SEQ ID NO: 914370
gaaugugcuguugaacuga

SEQ ID NO: 998877 - RNA, 19 nt, Artificial Sequence
  Description of Artificial Sequence: Synthetic oligonucleotide
  Antisense strand to SEQ ID NO: 998876
ucaguucaacagcacauuc

SEQ ID NO: 998878 - RNA, 19 nt, Artificial Sequence
  Description of Artificial Sequence: Synthetic oligonucleotide
  Sense strand starting at position 3055 of SEQ ID NO: 914370
aggguuuacaguuagcaaa

SEQ ID NO: 998879 - RNA, 19 nt, Artificial Sequence
  Description of Artificial Sequence: Synthetic oligonucleotide
  Antisense strand to SEQ ID NO: 998878
uuugcuaacuguaaacccu

SEQ ID NO: 998880 - RNA, 19 nt, Artificial Sequence
  Description of Artificial Sequence: Synthetic oligonucleotide
  Sense strand starting at position 3109 of SEQ ID NO: 914370
aaagacuagugacagaaau

SEQ ID NO: 998881 - RNA, 19 nt, Artificial Sequence
  Description of Artificial Sequence: Synthetic oligonucleotide
  Antisense strand to SEQ ID NO: 998880
auuucugucacuagucuuu

SEQ ID NO: 998882 - RNA, 19 nt, Artificial Sequence
  Description of Artificial Sequence: Synthetic oligonucleotide
  Sense strand starting at position 3281 of SEQ ID NO: 914370
agcuaucuguuccuuggaa

SEQ ID NO: 998883 - RNA, 19 nt, Artificial Sequence
  Description of Artificial Sequence: Synthetic oligonucleotide
  Antisense strand to SEQ ID NO: 998882
uuccaaggaacagauagcu

SEQ ID NO: 998884 - RNA, 19 nt, Artificial Sequence
  Description of Artificial Sequence: Synthetic oligonucleotide
  Sense strand starting at position 3282 of SEQ ID NO: 914370
gcuaucuguuccuuggaag

SEQ ID NO: 998885 - RNA, 19 nt, Artificial Sequence
  Description of Artificial Sequence: Synthetic oligonucleotide
  Antisense strand to SEQ ID NO: 998884
cuuccaaggaacagauagc

SEQ ID NO: 998886 - RNA, 19 nt, Artificial Sequence
  Description of Artificial Sequence: Synthetic oligonucleotide
  Sense strand starting at position 3283 of SEQ ID NO: 914370
cuaucuguuccuuggaagu

SEQ ID NO: 998887 - RNA, 19 nt, Artificial Sequence
  Description of Artificial Sequence: Synthetic oligonucleotide
  Antisense strand to SEQ ID NO: 998886
acuuccaaggaacagauag

SEQ ID NO: 998888 - RNA, 19 nt, Artificial Sequence
  Description of Artificial Sequence: Synthetic oligonucleotide
  Sense strand starting at position 3294 of SEQ ID NO: 914370
uuggaaguguuaucagaau

SEQ ID NO: 998889 - RNA, 19 nt, Artificial Sequence
  Description of Artificial Sequence: Synthetic oligonucleotide
  Antisense strand to SEQ ID NO: 998888
auucugauaacacuuccaa

SEQ ID NO: 998890 - RNA, 19 nt, Artificial Sequence
  Description of Artificial Sequence: Synthetic oligonucleotide
  Sense strand starting at position 3302 of SEQ ID NO: 914370
guuaucagaaugugugauc

SEQ ID NO: 998891 - RNA, 19 nt, Artificial Sequence
  Description of Artificial Sequence: Synthetic oligonucleotide
  Antisense strand to SEQ ID NO: 998890
gaucacacauucugauaac

SEQ ID NO: 998892 - RNA, 19 nt, Artificial Sequence
  Description of Artificial Sequence: Synthetic oligonucleotide
  Sense strand starting at position 3303 of SEQ ID NO: 914370
uuaucagaaugugugauca

SEQ ID NO: 998893 - RNA, 19 nt, Artificial Sequence
  Description of Artificial Sequence: Synthetic oligonucleotide
  Antisense strand to SEQ ID NO: 998892
ugaucacacauucugauaa

SEQ ID NO: 998894 - RNA, 19 nt, Artificial Sequence
  Description of Artificial Sequence: Synthetic oligonucleotide
  Sense strand starting at position 3334 of SEQ ID NO: 914370
uugcaaauuguuggacuaa

SEQ ID NO: 998895 - RNA, 19 nt, Artificial Sequence
  Description of Artificial Sequence: Synthetic oligonucleotide
  Antisense strand to SEQ ID NO: 998894
uuaguccaacaauuugcaa

SEQ ID NO: 998896 - RNA, 19 nt, Artificial Sequence
  Description of Artificial Sequence: Synthetic oligonucleotide
  Sense strand starting at position 3495 of SEQ ID NO: 914370
augugaaauacgcaggcua

SEQ ID NO: 998897 - RNA, 19 nt, Artificial Sequence
  Description of Artificial Sequence: Synthetic oligonucleotide
  Antisense strand to SEQ ID NO: 998896
uagccugcguauuucacau

SEQ ID NO: 998898 - RNA, 19 nt, Artificial Sequence
  Description of Artificial Sequence: Synthetic oligonucleotide
  Sense strand starting at position 3761 of SEQ ID NO: 914370
gaguucuacccucagguuu

SEQ ID NO: 998899 - RNA, 19 nt, Artificial Sequence
  Description of Artificial Sequence: Synthetic oligonucleotide
  Antisense strand to SEQ ID NO: 998898
aaaccugaggguagaacuc

SEQ ID NO: 998900 - RNA, 19 nt, Artificial Sequence
  Description of Artificial Sequence: Synthetic oligonucleotide
  Sense strand starting at position 3826 of SEQ ID NO: 914370
aguuaaugccaggaaucua

SEQ ID NO: 998901 - RNA, 19 nt, Artificial Sequence
  Description of Artificial Sequence: Synthetic oligonucleotide
  Antisense strand to SEQ ID NO: 998900
uagauuccuggcauuaacu

SEQ ID NO: 998902 - RNA, 19 nt, Artificial Sequence
  Description of Artificial Sequence: Synthetic oligonucleotide
  Sense strand starting at position 3857 of SEQ ID NO: 914370
gaaggcugcucacuuagaa

SEQ ID NO: 998903 - RNA, 19 nt, Artificial Sequence
  Description of Artificial Sequence: Synthetic oligonucleotide
  Antisense strand to SEQ ID NO: 998902
uucuaagugagcagccuuc

SEQ ID NO: 998904 - RNA, 19 nt, Artificial Sequence
  Description of Artificial Sequence: Synthetic oligonucleotide
  Sense strand starting at position 3959 of SEQ ID NO: 914370
cucugauugggugggucua

SEQ ID NO: 998905 - RNA, 19 nt, Artificial Sequence
  Description of Artificial Sequence: Synthetic oligonucleotide
  Antisense strand to SEQ ID NO: 998904
uagacccacccaaucagag

SEQ ID NO: 998906 - RNA, 19 nt, Artificial Sequence
  Description of Artificial Sequence: Synthetic oligonucleotide
  Sense strand starting at position 534 of SEQ ID NO: 914371
ccugcuaacccagagguaa

SEQ ID NO: 998907 - RNA, 19 nt, Artificial Sequence
  Description of Artificial Sequence: Synthetic oligonucleotide
  Antisense strand to SEQ ID NO: 998906
uuaccucuggguuagcagg

SEQ ID NO: 998908 - RNA, 19 nt, Artificial Sequence
  Description of Artificial Sequence: Synthetic oligonucleotide
  Sense strand starting at position 589 of SEQ ID NO: 914371
agucuuaagcaaggcauuu

SEQ ID NO: 998909 - RNA, 19 nt, Artificial Sequence
  Description of Artificial Sequence: Synthetic oligonucleotide
  Antisense strand to SEQ ID NO: 998908
aaaugccuugcuuaagacu

SEQ ID NO: 998910 - RNA, 19 nt, Artificial Sequence
  Description of Artificial Sequence: Synthetic oligonucleotide
  Sense strand starting at position 656 of SEQ ID NO: 914371
ugcuguucccagggucaaa

SEQ ID NO: 998911 - RNA, 19 nt, Artificial Sequence
  Description of Artificial Sequence: Synthetic oligonucleotide
  Antisense strand to SEQ ID NO: 998910
uuugacccugggaacagca

SEQ ID NO: 998912 - RNA, 19 nt, Artificial Sequence
  Description of Artificial Sequence: Synthetic oligonucleotide
  Sense strand starting at position 696 of SEQ ID NO: 914371
augcuauguuaccuauuau

SEQ ID NO: 998913 - RNA, 19 nt, Artificial Sequence
  Description of Artificial Sequence: Synthetic oligonucleotide
  Antisense strand to SEQ ID NO: 998912
auaauagguaacauagcau

SEQ ID NO: 998914 - RNA, 19 nt, Artificial Sequence
  Description of Artificial Sequence: Synthetic oligonucleotide
  Sense strand starting at position 703 of SEQ ID NO: 914371
guuaccuauuauguguaau

SEQ ID NO: 998915 - RNA, 19 nt, Artificial Sequence
  Description of Artificial Sequence: Synthetic oligonucleotide
  Antisense strand to SEQ ID NO: 998914
auuacacauaauagguaac

SEQ ID NO: 998916 - RNA, 19 nt, Artificial Sequence
  Description of Artificial Sequence: Synthetic oligonucleotide
  Sense strand starting at position 714 of SEQ ID NO: 914371
uguguaaugccuugaaacg

SEQ ID NO: 998917 - RNA, 19 nt, Artificial Sequence
  Description of Artificial Sequence: Synthetic oligonucleotide
  Antisense strand to SEQ ID NO: 998916
cguuucaaggcauuacaca

SEQ ID NO: 998918 - RNA, 19 nt, Artificial Sequence
  Description of Artificial Sequence: Synthetic oligonucleotide
  Sense strand starting at position 768 of SEQ ID NO: 914371
aauuauguugcaugagaua

SEQ ID NO: 998919 - RNA, 19 nt, Artificial Sequence
  Description of Artificial Sequence: Synthetic oligonucleotide
  Antisense strand to SEQ ID NO: 998918
uaucucaugcaacauaauu

SEQ ID NO: 998920 - RNA, 19 nt, Artificial Sequence
  Description of Artificial Sequence: Synthetic oligonucleotide
  Sense strand starting at position 773 of SEQ ID NO: 914371
uguugcaugagauaagcau

SEQ ID NO: 998921 - RNA, 19 nt, Artificial Sequence
  Description of Artificial Sequence: Synthetic oligonucleotide
  Antisense strand to SEQ ID NO: 998920
augcuuaucucaugcaaca

SEQ ID NO: 998922 - RNA, 19 nt, Artificial Sequence
  Description of Artificial Sequence: Synthetic oligonucleotide
  Sense strand starting at position 824 of SEQ ID NO: 914371
guaauuaugccucaauaag

SEQ ID NO: 998923 - RNA, 19 nt, Artificial Sequence
  Description of Artificial Sequence: Synthetic oligonucleotide
  Antisense strand to SEQ ID NO: 998922
cuuauugaggcauaauuac

SEQ ID NO: 998924 - RNA, 19 nt, Artificial Sequence
  Description of Artificial Sequence: Synthetic oligonucleotide
  Sense strand starting at position 953 of SEQ ID NO: 914371
gcaggauauugagucagua

SEQ ID NO: 998925 - RNA, 19 nt, Artificial Sequence
  Description of Artificial Sequence: Synthetic oligonucleotide
  Antisense strand to SEQ ID NO: 998924
uacugacucaauauccugc

SEQ ID NO: 998926 - RNA, 19 nt, Artificial Sequence
  Description of Artificial Sequence: Synthetic oligonucleotide
  Sense strand starting at position 957 of SEQ ID NO: 914371
gauauugagucaguaggga

SEQ ID NO: 998927 - RNA, 19 nt, Artificial Sequence
  Description of Artificial Sequence: Synthetic oligonucleotide
  Antisense strand to SEQ ID NO: 998926
ucccuacugacucaauauc

SEQ ID NO: 998928 - RNA, 19 nt, Artificial Sequence
  Description of Artificial Sequence: Synthetic oligonucleotide
  Sense strand starting at position 1099 of SEQ ID NO: 914371
cuuugcuucuggccaagaa

SEQ ID NO: 998929 - RNA, 19 nt, Artificial Sequence
  Description of Artificial Sequence: Synthetic oligonucleotide
  Antisense strand to SEQ ID NO: 998928
uucuuggccagaagcaaag

SEQ ID NO: 998930 - RNA, 19 nt, Artificial Sequence
  Description of Artificial Sequence: Synthetic oligonucleotide
  Sense strand starting at position 1143 of SEQ ID NO: 914371
guucuuugguugcuacuga

SEQ ID NO: 998931 - RNA, 19 nt, Artificial Sequence
  Description of Artificial Sequence: Synthetic oligonucleotide
  Antisense strand to SEQ ID NO: 998930
ucaguagcaaccaaagaac

SEQ ID NO: 998932 - RNA, 19 nt, Artificial Sequence
  Description of Artificial Sequence: Synthetic oligonucleotide
  Sense strand starting at position 1169 of SEQ ID NO: 914371
gaguaagugcaggauaacu

SEQ ID NO: 998933 - RNA, 19 nt, Artificial Sequence
  Description of Artificial Sequence: Synthetic oligonucleotide
  Antisense strand to SEQ ID NO: 998932
aguuauccugcacuuacuc

SEQ ID NO: 998934 - RNA, 19 nt, Artificial Sequence
  Description of Artificial Sequence: Synthetic oligonucleotide
  Sense strand starting at position 1229 of SEQ ID NO: 914371
ccaaucgaggcuuaucaaa

SEQ ID NO: 998935 - RNA, 19 nt, Artificial Sequence
  Description of Artificial Sequence: Synthetic oligonucleotide
  Antisense strand to SEQ ID NO: 998934
uuugauaagccucgauugg

SEQ ID NO: 998936 - RNA, 19 nt, Artificial Sequence
  Description of Artificial Sequence: Synthetic oligonucleotide
  Sense strand starting at position 1370 of SEQ ID NO: 914371
cuaccagcucucuaaggga

SEQ ID NO: 998937 - RNA, 19 nt, Artificial Sequence
  Description of Artificial Sequence: Synthetic oligonucleotide
  Antisense strand to SEQ ID NO: 998936
ucccuuagagagcugguag

SEQ ID NO: 998938 - RNA, 19 nt, Artificial Sequence
  Description of Artificial Sequence: Synthetic oligonucleotide
  Sense strand starting at position 1605 of SEQ ID NO: 914371
gaggcuucuuccuuaggga

SEQ ID NO: 998939 - RNA, 19 nt, Artificial Sequence
  Description of Artificial Sequence: Synthetic oligonucleotide
  Antisense strand to SEQ ID NO: 998938
ucccuaaggaagaagccuc

SEQ ID NO: 998940 - RNA, 19 nt, Artificial Sequence
  Description of Artificial Sequence: Synthetic oligonucleotide
  Sense strand starting at position 1606 of SEQ ID NO: 914371
aggcuucuuccuuagggau

SEQ ID NO: 998941 - RNA, 19 nt, Artificial Sequence
  Description of Artificial Sequence: Synthetic oligonucleotide
  Antisense strand to SEQ ID NO: 998940
aucccuaaggaagaagccu

SEQ ID NO: 998942 - RNA, 19 nt, Artificial Sequence
  Description of Artificial Sequence: Synthetic oligonucleotide
  Sense strand starting at position 1685 of SEQ ID NO: 914371
gcuauuucuuuccaggagu

SEQ ID NO: 998943 - RNA, 19 nt, Artificial Sequence
  Description of Artificial Sequence: Synthetic oligonucleotide
  Antisense strand to SEQ ID NO: 998942
acuccuggaaagaaauagc

SEQ ID NO: 998944 - RNA, 19 nt, Artificial Sequence
  Description of Artificial Sequence: Synthetic oligonucleotide
  Sense strand starting at position 1943 of SEQ ID NO: 914371
uggcuucggacuuguaagu

SEQ ID NO: 998945 - RNA, 19 nt, Artificial Sequence
  Description of Artificial Sequence: Synthetic oligonucleotide
  Antisense strand to SEQ ID NO: 998944
acuuacaaguccgaagcca

SEQ ID NO: 998946 - RNA, 19 nt, Artificial Sequence
  Description of Artificial Sequence: Synthetic oligonucleotide
  Sense strand starting at position 2621 of SEQ ID NO: 914371
gugggugucucauuaaagc

SEQ ID NO: 998947 - RNA, 19 nt, Artificial Sequence
  Description of Artificial Sequence: Synthetic oligonucleotide
  Antisense strand to SEQ ID NO: 998946
gcuuuaaugagacacccac

SEQ ID NO: 998948 - RNA, 19 nt, Artificial Sequence
  Description of Artificial Sequence: Synthetic oligonucleotide
  Sense strand starting at position 2811 of SEQ ID NO: 914371
uauuuagcucuucgguuga

SEQ ID NO: 998949 - RNA, 19 nt, Artificial Sequence
  Description of Artificial Sequence: Synthetic oligonucleotide
  Antisense strand to SEQ ID NO: 998948
ucaaccgaagagcuaaaua

SEQ ID NO: 998950 - RNA, 19 nt, Artificial Sequence
  Description of Artificial Sequence: Synthetic oligonucleotide
  Sense strand starting at position 2824 of SEQ ID NO: 914371
gguugagcuucgauugguc

SEQ ID NO: 998951 - RNA, 19 nt, Artificial Sequence
  Description of Artificial Sequence: Synthetic oligonucleotide
  Antisense strand to SEQ ID NO: 998950
gaccaaucgaagcucaacc

SEQ ID NO: 998952 - RNA, 19 nt, Artificial Sequence
  Description of Artificial Sequence: Synthetic oligonucleotide
  Sense strand starting at position 2826 of SEQ ID NO: 914371
uugagcuucgauuggucaa

SEQ ID NO: 998953 - RNA, 19 nt, Artificial Sequence
  Description of Artificial Sequence: Synthetic oligonucleotide
  Antisense strand to SEQ ID NO: 998952
uugaccaaucgaagcucaa

SEQ ID NO: 998954 - RNA, 19 nt, Artificial Sequence
  Description of Artificial Sequence: Synthetic oligonucleotide
  Sense strand starting at position 2827 of SEQ ID NO: 914371
ugagcuucgauuggucaaa

SEQ ID NO: 998955 - RNA, 19 nt, Artificial Sequence
  Description of Artificial Sequence: Synthetic oligonucleotide
  Antisense strand to SEQ ID NO: 998954
uuugaccaaucgaagcuca

SEQ ID NO: 998956 - RNA, 19 nt, Artificial Sequence
  Description of Artificial Sequence: Synthetic oligonucleotide
  Sense strand starting at position 3176 of SEQ ID NO: 914371
ggagggagcgagugagaau

SEQ ID NO: 998957 - RNA, 19 nt, Artificial Sequence
  Description of Artificial Sequence: Synthetic oligonucleotide
  Antisense strand to SEQ ID NO: 998956
auucucacucgcucccucc

SEQ ID NO: 998958 - RNA, 19 nt, Artificial Sequence
  Description of Artificial Sequence: Synthetic oligonucleotide
  Sense strand starting at position 3255 of SEQ ID NO: 914371
acccaaguucucugggaga

SEQ ID NO: 998959 - RNA, 19 nt, Artificial Sequence
  Description of Artificial Sequence: Synthetic oligonucleotide
  Antisense strand to SEQ ID NO: 998958
ucucccagagaacuugggu

SEQ ID NO: 998960 - RNA, 19 nt, Artificial Sequence
  Description of Artificial Sequence: Synthetic oligonucleotide
  Sense strand starting at position 3433 of SEQ ID NO: 914371
cucucuagaguuugccuaa

SEQ ID NO: 998961 - RNA, 19 nt, Artificial Sequence
  Description of Artificial Sequence: Synthetic oligonucleotide
  Antisense strand to SEQ ID NO: 998960
uuaggcaaacucuagagag

SEQ ID NO: 998962 - RNA, 19 nt, Artificial Sequence
  Description of Artificial Sequence: Synthetic oligonucleotide
  Sense strand starting at position 3434 of SEQ ID NO: 914371
ucucuagaguuugccuaau

SEQ ID NO: 998963 - RNA, 19 nt, Artificial Sequence
  Description of Artificial Sequence: Synthetic oligonucleotide
  Antisense strand to SEQ ID NO: 998962
auuaggcaaacucuagaga

SEQ ID NO: 998964 - RNA, 19 nt, Artificial Sequence
  Description of Artificial Sequence: Synthetic oligonucleotide
  Sense strand starting at position 3436 of SEQ ID NO: 914371
ucuagaguuugccuaauag

SEQ ID NO: 998965 - RNA, 19 nt, Artificial Sequence
  Description of Artificial Sequence: Synthetic oligonucleotide
  Antisense strand to SEQ ID NO: 998964
cuauuaggcaaacucuaga

SEQ ID NO: 998966 - RNA, 19 nt, Artificial Sequence
  Description of Artificial Sequence: Synthetic oligonucleotide
  Sense strand starting at position 3499 of SEQ ID NO: 914371
cccagauaacguuacacca

SEQ ID NO: 998967 - RNA, 19 nt, Artificial Sequence
  Description of Artificial Sequence: Synthetic oligonucleotide
  Antisense strand to SEQ ID NO: 998966
ugguguaacguuaucuggg

SEQ ID NO: 998968 - RNA, 19 nt, Artificial Sequence
  Description of Artificial Sequence: Synthetic oligonucleotide
  Sense strand starting at position 3572 of SEQ ID NO: 914371
acgcuuucuagccgaccaa

SEQ ID NO: 998969 - RNA, 19 nt, Artificial Sequence
  Description of Artificial Sequence: Synthetic oligonucleotide
  Antisense strand to SEQ ID NO: 998968
uuggucggcuagaaagcgu

SEQ ID NO: 998970 - RNA, 19 nt, Artificial Sequence
  Description of Artificial Sequence: Synthetic oligonucleotide
  Sense strand starting at position 3573 of SEQ ID NO: 914371
cgcuuucuagccgaccaaa

SEQ ID NO: 998971 - RNA, 19 nt, Artificial Sequence
  Description of Artificial Sequence: Synthetic oligonucleotide
  Antisense strand to SEQ ID NO: 998970
uuuggucggcuagaaagcg

SEQ ID NO: 998972 - RNA, 19 nt, Artificial Sequence
  Description of Artificial Sequence: Synthetic oligonucleotide
  Sense strand starting at position 3665 of SEQ ID NO: 914371
gcagcugcuccgggaaaga

SEQ ID NO: 998973 - RNA, 19 nt, Artificial Sequence
  Description of Artificial Sequence: Synthetic oligonucleotide
  Antisense strand to SEQ ID NO: 998972
ucuuucccggagcagcugc

SEQ ID NO: 998974 - RNA, 19 nt, Artificial Sequence
  Description of Artificial Sequence: Synthetic oligonucleotide
  Sense strand starting at position 3722 of SEQ ID NO: 914371
cguucccuucgcuuaauua

SEQ ID NO: 998975 - RNA, 19 nt, Artificial Sequence
  Description of Artificial Sequence: Synthetic oligonucleotide
  Antisense strand to SEQ ID NO: 998974
uaauuaagcgaagggaacg

SEQ ID NO: 998976 - RNA, 19 nt, Artificial Sequence
  Description of Artificial Sequence: Synthetic oligonucleotide
  Sense strand starting at position 3723 of SEQ ID NO: 914371
guucccuucgcuuaauuaa

SEQ ID NO: 998977 - RNA, 19 nt, Artificial Sequence
  Description of Artificial Sequence: Synthetic oligonucleotide
  Antisense strand to SEQ ID NO: 998976
uuaauuaagcgaagggaac

SEQ ID NO: 998978 - RNA, 19 nt, Artificial Sequence
  Description of Artificial Sequence: Synthetic oligonucleotide
  Sense strand starting at position 3758 of SEQ ID NO: 914371
gagucuuuggugcccggua

SEQ ID NO: 998979 - RNA, 19 nt, Artificial Sequence
  Description of Artificial Sequence: Synthetic oligonucleotide
  Antisense strand to SEQ ID NO: 998978
uaccgggcaccaaagacuc

SEQ ID NO: 998980 - RNA, 19 nt, Artificial Sequence
  Description of Artificial Sequence: Synthetic oligonucleotide
  Sense strand starting at position 3783 of SEQ ID NO: 914371
ccuucuguucugcagcaaa

SEQ ID NO: 998981 - RNA, 19 nt, Artificial Sequence
  Description of Artificial Sequence: Synthetic oligonucleotide
  Antisense strand to SEQ ID NO: 998980
uuugcugcagaacagaagg

SEQ ID NO: 998982 - RNA, 19 nt, Artificial Sequence
  Description of Artificial Sequence: Synthetic oligonucleotide
  Sense strand starting at position 3786 of SEQ ID NO: 914371
ucuguucugcagcaaagaa

SEQ ID NO: 998983 - RNA, 19 nt, Artificial Sequence
  Description of Artificial Sequence: Synthetic oligonucleotide
  Antisense strand to SEQ ID NO: 998982
uucuuugcugcagaacaga

SEQ ID NO: 998984 - RNA, 19 nt, Artificial Sequence
  Description of Artificial Sequence: Synthetic oligonucleotide
  Sense strand starting at position 3827 of SEQ ID NO: 914371
uugcauggcggagguaaua

SEQ ID NO: 998985 - RNA, 19 nt, Artificial Sequence
  Description of Artificial Sequence: Synthetic oligonucleotide
  Antisense strand to SEQ ID NO: 998984
uauuaccuccgccaugcaa

SEQ ID NO: 998986 - RNA, 19 nt, Artificial Sequence
  Description of Artificial Sequence: Synthetic oligonucleotide
  Sense strand starting at position 312 of SEQ ID NO: 914372
uuugcuuuggcagggaaga

SEQ ID NO: 998987 - RNA, 19 nt, Artificial Sequence
  Description of Artificial Sequence: Synthetic oligonucleotide
  Antisense strand to SEQ ID NO: 998986
ucuucccugccaaagcaaa

SEQ ID NO: 998988 - RNA, 19 nt, Artificial Sequence
  Description of Artificial Sequence: Synthetic oligonucleotide
  Sense strand starting at position 332 of SEQ ID NO: 914372
guagauaggcgugugcauu

SEQ ID NO: 998989 - RNA, 19 nt, Artificial Sequence
  Description of Artificial Sequence: Synthetic oligonucleotide
  Antisense strand to SEQ ID NO: 998988
aaugcacacgccuaucuac

SEQ ID NO: 998990 - RNA, 19 nt, Artificial Sequence
  Description of Artificial Sequence: Synthetic oligonucleotide
  Sense strand starting at position 889 of SEQ ID NO: 914372
cucaaaugauguuuacuga

SEQ ID NO: 998991 - RNA, 19 nt, Artificial Sequence
  Description of Artificial Sequence: Synthetic oligonucleotide
  Antisense strand to SEQ ID NO: 998990
ucaguaaacaucauuugag

SEQ ID NO: 998992 - RNA, 19 nt, Artificial Sequence
  Description of Artificial Sequence: Synthetic oligonucleotide
  Sense strand starting at position 937 of SEQ ID NO: 914372
gaucuuccugccuggagga

SEQ ID NO: 998993 - RNA, 19 nt, Artificial Sequence
  Description of Artificial Sequence: Synthetic oligonucleotide
  Antisense strand to SEQ ID NO: 998992
uccuccaggcaggaagauc

SEQ ID NO: 998994 - RNA, 19 nt, Artificial Sequence
  Description of Artificial Sequence: Synthetic oligonucleotide
  Sense strand starting at position 950 of SEQ ID NO: 914372
ggaggaagcucuuccugag

SEQ ID NO: 998995 - RNA, 19 nt, Artificial Sequence
  Description of Artificial Sequence: Synthetic oligonucleotide
  Antisense strand to SEQ ID NO: 998994
cucaggaagagcuuccucc

SEQ ID NO: 998996 - RNA, 19 nt, Artificial Sequence
  Description of Artificial Sequence: Synthetic oligonucleotide
  Sense strand starting at position 964 of SEQ ID NO: 914372
cugagauaccugcaugguu

SEQ ID NO: 998997 - RNA, 19 nt, Artificial Sequence
  Description of Artificial Sequence: Synthetic oligonucleotide
  Antisense strand to SEQ ID NO: 998996
aaccaugcagguaucucag

SEQ ID NO: 998998 - RNA, 19 nt, Artificial Sequence
  Description of Artificial Sequence: Synthetic oligonucleotide
  Sense strand starting at position 990 of SEQ ID NO: 914372
acuccagguucccuuuaga

SEQ ID NO: 998999 - RNA, 19 nt, Artificial Sequence
  Description of Artificial Sequence: Synthetic oligonucleotide
  Antisense strand to SEQ ID NO: 998998
ucuaaagggaaccuggagu

SEQ ID NO: 999000 - RNA, 19 nt, Artificial Sequence
  Description of Artificial Sequence: Synthetic oligonucleotide
  Sense strand starting at position 1080 of SEQ ID NO: 914372
gcuugauauuucuagagag

SEQ ID NO: 999001 - RNA, 19 nt, Artificial Sequence
  Description of Artificial Sequence: Synthetic oligonucleotide
  Antisense strand to SEQ ID NO: 999000
cucucuagaaauaucaagc

SEQ ID NO: 999002 - RNA, 19 nt, Artificial Sequence
  Description of Artificial Sequence: Synthetic oligonucleotide
  Sense strand starting at position 1146 of SEQ ID NO: 914372
cuguuuccuccucagaaug

SEQ ID NO: 999003 - RNA, 19 nt, Artificial Sequence
  Description of Artificial Sequence: Synthetic oligonucleotide
  Antisense strand to SEQ ID NO: 999002
cauucugaggaggaaacag

SEQ ID NO: 999004 - RNA, 19 nt, Artificial Sequence
  Description of Artificial Sequence: Synthetic oligonucleotide
  Sense strand starting at position 1185 of SEQ ID NO: 914372
guagaaggcgcucaauaaa

SEQ ID NO: 999005 - RNA, 19 nt, Artificial Sequence
  Description of Artificial Sequence: Synthetic oligonucleotide
  Antisense strand to SEQ ID NO: 999004
uuuauugagcgccuucuac

SEQ ID NO: 999006 - RNA, 19 nt, Artificial Sequence
  Description of Artificial Sequence: Synthetic oligonucleotide
  Sense strand starting at position 2070 of SEQ ID NO: 914372
ggaugguguugcuugggaa

SEQ ID NO: 999007 - RNA, 19 nt, Artificial Sequence
  Description of Artificial Sequence: Synthetic oligonucleotide
  Antisense strand to SEQ ID NO: 999006
uucccaagcaacaccaucc

SEQ ID NO: 999008 - RNA, 19 nt, Artificial Sequence
  Description of Artificial Sequence: Synthetic oligonucleotide
  Sense strand starting at position 2071 of SEQ ID NO: 914372
gaugguguugcuugggaau

SEQ ID NO: 999009 - RNA, 19 nt, Artificial Sequence
  Description of Artificial Sequence: Synthetic oligonucleotide
  Antisense strand to SEQ ID NO: 999008
auucccaagcaacaccauc

SEQ ID NO: 999010 - RNA, 19 nt, Artificial Sequence
  Description of Artificial Sequence: Synthetic oligonucleotide
  Sense strand starting at position 2153 of SEQ ID NO: 914372
ggugacaucauacguuauu

SEQ ID NO: 999011 - RNA, 19 nt, Artificial Sequence
  Description of Artificial Sequence: Synthetic oligonucleotide
  Antisense strand to SEQ ID NO: 999010
aauaacguaugaugucacc

SEQ ID NO: 999012 - RNA, 19 nt, Artificial Sequence
  Description of Artificial Sequence: Synthetic oligonucleotide
  Sense strand starting at position 2154 of SEQ ID NO: 914372
gugacaucauacguuauuc

SEQ ID NO: 999013 - RNA, 19 nt, Artificial Sequence
  Description of Artificial Sequence: Synthetic oligonucleotide
  Antisense strand to SEQ ID NO: 999012
gaauaacguaugaugucac

SEQ ID NO: 999014 - RNA, 19 nt, Artificial Sequence
  Description of Artificial Sequence: Synthetic oligonucleotide
  Sense strand starting at position 2277 of SEQ ID NO: 914372
agaacagcccuggaguuua

SEQ ID NO: 999015 - RNA, 19 nt, Artificial Sequence
  Description of Artificial Sequence: Synthetic oligonucleotide
  Antisense strand to SEQ ID NO: 999014
uaaacuccagggcuguucu

SEQ ID NO: 999016 - RNA, 19 nt, Artificial Sequence
  Description of Artificial Sequence: Synthetic oligonucleotide
  Sense strand starting at position 2315 of SEQ ID NO: 914372
gccagugcaauaugggaau

SEQ ID NO: 999017 - RNA, 19 nt, Artificial Sequence
  Description of Artificial Sequence: Synthetic oligonucleotide
  Antisense strand to SEQ ID NO: 999016
auucccauauugcacuggc

SEQ ID NO: 999018 - RNA, 19 nt, Artificial Sequence
  Description of Artificial Sequence: Synthetic oligonucleotide
  Sense strand starting at position 2328 of SEQ ID NO: 914372
gggaauaaaugcccagauc

SEQ ID NO: 999019 - RNA, 19 nt, Artificial Sequence
  Description of Artificial Sequence: Synthetic oligonucleotide
  Antisense strand to SEQ ID NO: 999018
gaucugggcauuuauuccc

SEQ ID NO: 999020 - RNA, 19 nt, Artificial Sequence
  Description of Artificial Sequence: Synthetic oligonucleotide
  Sense strand starting at position 2514 of SEQ ID NO: 914372
gucuuuagaggccguaaga

SEQ ID NO: 999021 - RNA, 19 nt, Artificial Sequence
  Description of Artificial Sequence: Synthetic oligonucleotide
  Antisense strand to SEQ ID NO: 999020
ucuuacggccucuaaagac

SEQ ID NO: 999022 - RNA, 19 nt, Artificial Sequence
  Description of Artificial Sequence: Synthetic oligonucleotide
  Sense strand starting at position 2525 of SEQ ID NO: 914372
ccguaagaaucgcccaaau

SEQ ID NO: 999023 - RNA, 19 nt, Artificial Sequence
  Description of Artificial Sequence: Synthetic oligonucleotide
  Antisense strand to SEQ ID NO: 999022
auuugggcgauucuuacgg

SEQ ID NO: 999024 - RNA, 19 nt, Artificial Sequence
  Description of Artificial Sequence: Synthetic oligonucleotide
  Sense strand starting at position 2527 of SEQ ID NO: 914372
guaagaaucgcccaaaugu

SEQ ID NO: 999025 - RNA, 19 nt, Artificial Sequence
  Description of Artificial Sequence: Synthetic oligonucleotide
  Antisense strand to SEQ ID NO: 999024
acauuugggcgauucuuac

SEQ ID NO: 999026 - RNA, 19 nt, Artificial Sequence
  Description of Artificial Sequence: Synthetic oligonucleotide
  Sense strand starting at position 2534 of SEQ ID NO: 914372
ucgcccaaauguuuauuaa

SEQ ID NO: 999027 - RNA, 19 nt, Artificial Sequence
  Description of Artificial Sequence: Synthetic oligonucleotide
  Antisense strand to SEQ ID NO: 999026
uuaauaaacauuugggcga

SEQ ID NO: 999028 - RNA, 19 nt, Artificial Sequence
  Description of Artificial Sequence: Synthetic oligonucleotide
  Sense strand starting at position 2535 of SEQ ID NO: 914372
cgcccaaauguuuauuaaa

SEQ ID NO: 999029 - RNA, 19 nt, Artificial Sequence
  Description of Artificial Sequence: Synthetic oligonucleotide
  Antisense strand to SEQ ID NO: 999028
uuuaauaaacauuugggcg

SEQ ID NO: 999030 - RNA, 19 nt, Artificial Sequence
  Description of Artificial Sequence: Synthetic oligonucleotide
  Sense strand starting at position 2565 of SEQ ID NO: 914372
cuggaucuuucuccagagu

SEQ ID NO: 999031 - RNA, 19 nt, Artificial Sequence
  Description of Artificial Sequence: Synthetic oligonucleotide
  Antisense strand to SEQ ID NO: 999030
acucuggagaaagauccag

SEQ ID NO: 999032 - RNA, 19 nt, Artificial Sequence
  Description of Artificial Sequence: Synthetic oligonucleotide
  Sense strand starting at position 2633 of SEQ ID NO: 914372
gauuaugagaugugugguu

SEQ ID NO: 999033 - RNA, 19 nt, Artificial Sequence
  Description of Artificial Sequence: Synthetic oligonucleotide
  Antisense strand to SEQ ID NO: 999032
aaccacacaucucauaauc

SEQ ID NO: 999034 - RNA, 19 nt, Artificial Sequence
  Description of Artificial Sequence: Synthetic oligonucleotide
  Sense strand starting at position 2683 of SEQ ID NO: 914372
auaauaugaccuugugucu

SEQ ID NO: 999035 - RNA, 19 nt, Artificial Sequence
  Description of Artificial Sequence: Synthetic oligonucleotide
  Antisense strand to SEQ ID NO: 999034
agacacaaggucauauuau

SEQ ID NO: 999036 - RNA, 19 nt, Artificial Sequence
  Description of Artificial Sequence: Synthetic oligonucleotide
  Sense strand starting at position 2686 of SEQ ID NO: 914372
auaugaccuugugucuuaa

SEQ ID NO: 999037 - RNA, 19 nt, Artificial Sequence
  Description of Artificial Sequence: Synthetic oligonucleotide
  Antisense strand to SEQ ID NO: 999036
uuaagacacaaggucauau

SEQ ID NO: 999038 - RNA, 19 nt, Artificial Sequence
  Description of Artificial Sequence: Synthetic oligonucleotide
  Sense strand starting at position 2749 of SEQ ID NO: 914372
uguacuaagcguuaacuau

SEQ ID NO: 999039 - RNA, 19 nt, Artificial Sequence
  Description of Artificial Sequence: Synthetic oligonucleotide
  Antisense strand to SEQ ID NO: 999038
auaguuaacgcuuaguaca

SEQ ID NO: 999040 - RNA, 19 nt, Artificial Sequence
  Description of Artificial Sequence: Synthetic oligonucleotide
  Sense strand starting at position 3057 of SEQ ID NO: 914372
ucgcaaugaccuugaauac

SEQ ID NO: 999041 - RNA, 19 nt, Artificial Sequence
  Description of Artificial Sequence: Synthetic oligonucleotide
  Antisense strand to SEQ ID NO: 999040
guauucaaggucauugcga

SEQ ID NO: 999042 - RNA, 19 nt, Artificial Sequence
  Description of Artificial Sequence: Synthetic oligonucleotide
  Sense strand starting at position 3058 of SEQ ID NO: 914372
cgcaaugaccuugaauacu

SEQ ID NO: 999043 - RNA, 19 nt, Artificial Sequence
  Description of Artificial Sequence: Synthetic oligonucleotide
  Antisense strand to SEQ ID NO: 999042
aguauucaaggucauugcg

SEQ ID NO: 999044 - RNA, 19 nt, Artificial Sequence
  Description of Artificial Sequence: Synthetic oligonucleotide
  Sense strand starting at position 3258 of SEQ ID NO: 914372
uuggcagccgaaugagaau

SEQ ID NO: 999045 - RNA, 19 nt, Artificial Sequence
  Description of Artificial Sequence: Synthetic oligonucleotide
  Antisense strand to SEQ ID NO: 999044
auucucauucggcugccaa

SEQ ID NO: 999046 - RNA, 19 nt, Artificial Sequence
  Description of Artificial Sequence: Synthetic oligonucleotide
  Sense strand starting at position 3264 of SEQ ID NO: 914372
gccgaaugagaaugaugga

SEQ ID NO: 999047 - RNA, 19 nt, Artificial Sequence
  Description of Artificial Sequence: Synthetic oligonucleotide
  Antisense strand to SEQ ID NO: 999046
uccaucauucucauucggc

SEQ ID NO: 999048 - RNA, 19 nt, Artificial Sequence
  Description of Artificial Sequence: Synthetic oligonucleotide
  Sense strand starting at position 3283 of SEQ ID NO: 914372
ugggacauguguccgucaa

SEQ ID NO: 999049 - RNA, 19 nt, Artificial Sequence
  Description of Artificial Sequence: Synthetic oligonucleotide
  Antisense strand to SEQ ID NO: 999048
uugacggacacauguccca

SEQ ID NO: 999050 - RNA, 19 nt, Artificial Sequence
  Description of Artificial Sequence: Synthetic oligonucleotide
  Sense strand starting at position 3287 of SEQ ID NO: 914372
acauguguccgucaacucu

SEQ ID NO: 999051 - RNA, 19 nt, Artificial Sequence
  Description of Artificial Sequence: Synthetic oligonucleotide
  Antisense strand to SEQ ID NO: 999050
agaguugacggacacaugu

SEQ ID NO: 999052 - RNA, 19 nt, Artificial Sequence
  Description of Artificial Sequence: Synthetic oligonucleotide
  Sense strand starting at position 3370 of SEQ ID NO: 914372
agguguugggauuguucaa

SEQ ID NO: 999053 - RNA, 19 nt, Artificial Sequence
  Description of Artificial Sequence: Synthetic oligonucleotide
  Antisense strand to SEQ ID NO: 999052
uugaacaaucccaacaccu

SEQ ID NO: 999054 - RNA, 19 nt, Artificial Sequence
  Description of Artificial Sequence: Synthetic oligonucleotide
  Sense strand starting at position 3385 of SEQ ID NO: 914372
ucaaguucuccaggugauu

SEQ ID NO: 999055 - RNA, 19 nt, Artificial Sequence
  Description of Artificial Sequence: Synthetic oligonucleotide
  Antisense strand to SEQ ID NO: 999054
aaucaccuggagaacuuga

SEQ ID NO: 999056 - RNA, 19 nt, Artificial Sequence
  Description of Artificial Sequence: Synthetic oligonucleotide
  Sense strand starting at position 3423 of SEQ ID NO: 914372
ugagucauugcuuaaugga

SEQ ID NO: 999057 - RNA, 19 nt, Artificial Sequence
  Description of Artificial Sequence: Synthetic oligonucleotide
  Antisense strand to SEQ ID NO: 999056
uccauuaagcaaugacuca

SEQ ID NO: 999058 - RNA, 19 nt, Artificial Sequence
  Description of Artificial Sequence: Synthetic oligonucleotide
  Sense strand starting at position 3481 of SEQ ID NO: 914372
ccugaaacucaagagcuuu

SEQ ID NO: 999059 - RNA, 19 nt, Artificial Sequence
  Description of Artificial Sequence: Synthetic oligonucleotide
  Antisense strand to SEQ ID NO: 999058
aaagcucuugaguuucagg

SEQ ID NO: 999060 - RNA, 19 nt, Artificial Sequence
  Description of Artificial Sequence: Synthetic oligonucleotide
  Sense strand starting at position 3489 of SEQ ID NO: 914372
ucaagagcuuuccauuuag

SEQ ID NO: 999061 - RNA, 19 nt, Artificial Sequence
  Description of Artificial Sequence: Synthetic oligonucleotide
  Antisense strand to SEQ ID NO: 999060
cuaaauggaaagcucuuga

SEQ ID NO: 999062 - RNA, 19 nt, Artificial Sequence
  Description of Artificial Sequence: Synthetic oligonucleotide
  Sense strand starting at position 3672 of SEQ ID NO: 914372
gagugcaaugggugugauu

SEQ ID NO: 999063 - RNA, 19 nt, Artificial Sequence
  Description of Artificial Sequence: Synthetic oligonucleotide
  Antisense strand to SEQ ID NO: 999062
aaucacacccauugcacuc

SEQ ID NO: 999064 - RNA, 19 nt, Artificial Sequence
  Description of Artificial Sequence: Synthetic oligonucleotide
  Sense strand starting at position 3837 of SEQ ID NO: 914372
gguauugagcucuaaguuc

SEQ ID NO: 999065 - RNA, 19 nt, Artificial Sequence
  Description of Artificial Sequence: Synthetic oligonucleotide
  Antisense strand to SEQ ID NO: 999064
gaacuuagagcucaauacc

SEQ ID NO: 999066 - RNA, 19 nt, Artificial Sequence
  Description of Artificial Sequence: Synthetic oligonucleotide
  Sense strand starting at position 21 of SEQ ID NO: 914373
gcuggucaugcuugugaaa

SEQ ID NO: 999067 - RNA, 19 nt, Artificial Sequence
  Description of Artificial Sequence: Synthetic oligonucleotide
  Antisense strand to SEQ ID NO: 999066
uuucacaagcaugaccagc

SEQ ID NO: 999068 - RNA, 19 nt, Artificial Sequence
  Description of Artificial Sequence: Synthetic oligonucleotide
  Sense strand starting at position 23 of SEQ ID NO: 914373
uggucaugcuugugaaauc

SEQ ID NO: 999069 - RNA, 19 nt, Artificial Sequence
  Description of Artificial Sequence: Synthetic oligonucleotide
  Antisense strand to SEQ ID NO: 999068
gauuucacaagcaugacca

SEQ ID NO: 999070 - RNA, 19 nt, Artificial Sequence
  Description of Artificial Sequence: Synthetic oligonucleotide
  Sense strand starting at position 37 of SEQ ID NO: 914373
aaauccgaguccuaaggga

SEQ ID NO: 999071 - RNA, 19 nt, Artificial Sequence
  Description of Artificial Sequence: Synthetic oligonucleotide
  Antisense strand to SEQ ID NO: 999070
ucccuuaggacucggauuu

SEQ ID NO: 999072 - RNA, 19 nt, Artificial Sequence
  Description of Artificial Sequence: Synthetic oligonucleotide
  Sense strand starting at position 239 of SEQ ID NO: 914373
gggcgagcuguucagcaga

SEQ ID NO: 999073 - RNA, 19 nt, Artificial Sequence
  Description of Artificial Sequence: Synthetic oligonucleotide
  Antisense strand to SEQ ID NO: 999072
ucugcugaacagcucgccc

SEQ ID NO: 999074 - RNA, 19 nt, Artificial Sequence
  Description of Artificial Sequence: Synthetic oligonucleotide
  Sense strand starting at position 241 of SEQ ID NO: 914373
gcgagcuguucagcagaca

SEQ ID NO: 999075 - RNA, 19 nt, Artificial Sequence
  Description of Artificial Sequence: Synthetic oligonucleotide
  Antisense strand to SEQ ID NO: 999074
ugucugcugaacagcucgc

SEQ ID NO: 999076 - RNA, 19 nt, Artificial Sequence
  Description of Artificial Sequence: Synthetic oligonucleotide
  Sense strand starting at position 367 of SEQ ID NO: 914373
cagaaagguccagguguca

SEQ ID NO: 999077 - RNA, 19 nt, Artificial Sequence
  Description of Artificial Sequence: Synthetic oligonucleotide
  Antisense strand to SEQ ID NO: 999076
ugacaccuggaccuuucug

SEQ ID NO: 999078 - RNA, 19 nt, Artificial Sequence
  Description of Artificial Sequence: Synthetic oligonucleotide
  Sense strand starting at position 530 of SEQ ID NO: 914373
cgauuugagccuggugacu

SEQ ID NO: 999079 - RNA, 19 nt, Artificial Sequence
  Description of Artificial Sequence: Synthetic oligonucleotide
  Antisense strand to SEQ ID NO: 999078
agucaccaggcucaaaucg

SEQ ID NO: 999080 - RNA, 19 nt, Artificial Sequence
  Description of Artificial Sequence: Synthetic oligonucleotide
  Sense strand starting at position 532 of SEQ ID NO: 914373
auuugagccuggugacuuu

SEQ ID NO: 999081 - RNA, 19 nt, Artificial Sequence
  Description of Artificial Sequence: Synthetic oligonucleotide
  Antisense strand to SEQ ID NO: 999080
aaagucaccaggcucaaau

SEQ ID NO: 999082 - RNA, 19 nt, Artificial Sequence
  Description of Artificial Sequence: Synthetic oligonucleotide
  Sense strand starting at position 611 of SEQ ID NO: 914373
cgggcucugagcugagaaa

SEQ ID NO: 999083 - RNA, 19 nt, Artificial Sequence
  Description of Artificial Sequence: Synthetic oligonucleotide
  Antisense strand to SEQ ID NO: 999082
uuucucagcucagagcccg

SEQ ID NO: 999084 - RNA, 19 nt, Artificial Sequence
  Description of Artificial Sequence: Synthetic oligonucleotide
  Sense strand starting at position 638 of SEQ ID NO: 914373
gcugaaggguugcauccau

SEQ ID NO: 999085 - RNA, 19 nt, Artificial Sequence
  Description of Artificial Sequence: Synthetic oligonucleotide
  Antisense strand to SEQ ID NO: 999084
auggaugcaacccuucagc

SEQ ID NO: 999086 - RNA, 19 nt, Artificial Sequence
  Description of Artificial Sequence: Synthetic oligonucleotide
  Sense strand starting at position 690 of SEQ ID NO: 914373
accacaucugggugaguca

SEQ ID NO: 999087 - RNA, 19 nt, Artificial Sequence
  Description of Artificial Sequence: Synthetic oligonucleotide
  Antisense strand to SEQ ID NO: 999086
ugacucacccagauguggu

SEQ ID NO: 999088 - RNA, 19 nt, Artificial Sequence
  Description of Artificial Sequence: Synthetic oligonucleotide
  Sense strand starting at position 697 of SEQ ID NO: 914373
cugggugagucagaaaucu

SEQ ID NO: 999089 - RNA, 19 nt, Artificial Sequence
  Description of Artificial Sequence: Synthetic oligonucleotide
  Antisense strand to SEQ ID NO: 999088
agauuucugacucacccag

SEQ ID NO: 999090 - RNA, 19 nt, Artificial Sequence
  Description of Artificial Sequence: Synthetic oligonucleotide
  Sense strand starting at position 730 of SEQ ID NO: 914373
aagguuccagcaggugaau

SEQ ID NO: 999091 - RNA, 19 nt, Artificial Sequence
  Description of Artificial Sequence: Synthetic oligonucleotide
  Antisense strand to SEQ ID NO: 999090
auucaccugcuggaaccuu

SEQ ID NO: 999092 - RNA, 19 nt, Artificial Sequence
  Description of Artificial Sequence: Synthetic oligonucleotide
  Sense strand starting at position 739 of SEQ ID NO: 914373
gcaggugaaucuugcacau

SEQ ID NO: 999093 - RNA, 19 nt, Artificial Sequence
  Description of Artificial Sequence: Synthetic oligonucleotide
  Antisense strand to SEQ ID NO: 999092
augugcaagauucaccugc

SEQ ID NO: 999094 - RNA, 19 nt, Artificial Sequence
  Description of Artificial Sequence: Synthetic oligonucleotide
  Sense strand starting at position 741 of SEQ ID NO: 914373
aggugaaucuugcacauga

SEQ ID NO: 999095 - RNA, 19 nt, Artificial Sequence
  Description of Artificial Sequence: Synthetic oligonucleotide
  Antisense strand to SEQ ID NO: 999094
ucaugugcaagauucaccu

SEQ ID NO: 999096 - RNA, 19 nt, Artificial Sequence
  Description of Artificial Sequence: Synthetic oligonucleotide
  Sense strand starting at position 743 of SEQ ID NO: 914373
gugaaucuugcacaugaga

SEQ ID NO: 999097 - RNA, 19 nt, Artificial Sequence
  Description of Artificial Sequence: Synthetic oligonucleotide
  Antisense strand to SEQ ID NO: 999096
ucucaugugcaagauucac

SEQ ID NO: 999098 - RNA, 19 nt, Artificial Sequence
  Description of Artificial Sequence: Synthetic oligonucleotide
  Sense strand starting at position 783 of SEQ ID NO: 914373
uguguaagggccugucaug

SEQ ID NO: 999099 - RNA, 19 nt, Artificial Sequence
  Description of Artificial Sequence: Synthetic oligonucleotide
  Antisense strand to SEQ ID NO: 999098
caugacaggcccuuacaca

SEQ ID NO: 999100 - RNA, 19 nt, Artificial Sequence
  Description of Artificial Sequence: Synthetic oligonucleotide
  Sense strand starting at position 790 of SEQ ID NO: 914373
gggccugucaugugaacac

SEQ ID NO: 999101 - RNA, 19 nt, Artificial Sequence
  Description of Artificial Sequence: Synthetic oligonucleotide
  Antisense strand to SEQ ID NO: 999100
guguucacaugacaggccc

SEQ ID NO: 999102 - RNA, 19 nt, Artificial Sequence
  Description of Artificial Sequence: Synthetic oligonucleotide
  Sense strand starting at position 805 of SEQ ID NO: 914373
acacauguccuguguacac

SEQ ID NO: 999103 - RNA, 19 nt, Artificial Sequence
  Description of Artificial Sequence: Synthetic oligonucleotide
  Antisense strand to SEQ ID NO: 999102
guguacacaggacaugugu

SEQ ID NO: 999104 - RNA, 19 nt, Artificial Sequence
  Description of Artificial Sequence: Synthetic oligonucleotide
  Sense strand starting at position 807 of SEQ ID NO: 914373
acauguccuguguacacau

SEQ ID NO: 999105 - RNA, 19 nt, Artificial Sequence
  Description of Artificial Sequence: Synthetic oligonucleotide
  Antisense strand to SEQ ID NO: 999104
auguguacacaggacaugu

SEQ ID NO: 999106 - RNA, 19 nt, Artificial Sequence
  Description of Artificial Sequence: Synthetic oligonucleotide
  Sense strand starting at position 876 of SEQ ID NO: 914373
uucugagacuguguagcaa

SEQ ID NO: 999107 - RNA, 19 nt, Artificial Sequence
  Description of Artificial Sequence: Synthetic oligonucleotide
  Antisense strand to SEQ ID NO: 999106
uugcuacacagucucagaa

SEQ ID NO: 999108 - RNA, 19 nt, Artificial Sequence
  Description of Artificial Sequence: Synthetic oligonucleotide
  Sense strand starting at position 913 of SEQ ID NO: 914373
gggugcuaguaugauguga

SEQ ID NO: 999109 - RNA, 19 nt, Artificial Sequence
  Description of Artificial Sequence: Synthetic oligonucleotide
  Antisense strand to SEQ ID NO: 999108
ucacaucauacuagcaccc

SEQ ID NO: 999110 - RNA, 19 nt, Artificial Sequence
  Description of Artificial Sequence: Synthetic oligonucleotide
  Sense strand starting at position 915 of SEQ ID NO: 914373
gugcuaguaugaugugaca

SEQ ID NO: 999111 - RNA, 19 nt, Artificial Sequence
  Description of Artificial Sequence: Synthetic oligonucleotide
  Antisense strand to SEQ ID NO: 999110
ugucacaucauacuagcac

SEQ ID NO: 999112 - RNA, 19 nt, Artificial Sequence
  Description of Artificial Sequence: Synthetic oligonucleotide
  Sense strand starting at position 917 of SEQ ID NO: 914373
gcuaguaugaugugacacu

SEQ ID NO: 999113 - RNA, 19 nt, Artificial Sequence
  Description of Artificial Sequence: Synthetic oligonucleotide
  Antisense strand to SEQ ID NO: 999112
agugucacaucauacuagc

SEQ ID NO: 999114 - RNA, 19 nt, Artificial Sequence
  Description of Artificial Sequence: Synthetic oligonucleotide
  Sense strand starting at position 918 of SEQ ID NO: 914373
cuaguaugaugugacacuu

SEQ ID NO: 999115 - RNA, 19 nt, Artificial Sequence
  Description of Artificial Sequence: Synthetic oligonucleotide
  Antisense strand to SEQ ID NO: 999114
aagugucacaucauacuag

SEQ ID NO: 999116 - RNA, 19 nt, Artificial Sequence
  Description of Artificial Sequence: Synthetic oligonucleotide
  Sense strand starting at position 967 of SEQ ID NO: 914373
ggagcccauucuuauagaa

SEQ ID NO: 999117 - RNA, 19 nt, Artificial Sequence
  Description of Artificial Sequence: Synthetic oligonucleotide
  Antisense strand to SEQ ID NO: 999116
uucuauaagaaugggcucc

SEQ ID NO: 999118 - RNA, 19 nt, Artificial Sequence
  Description of Artificial Sequence: Synthetic oligonucleotide
  Sense strand starting at position 988 of SEQ ID NO: 914373
agaguaaacucugcuaaga

SEQ ID NO: 999119 - RNA, 19 nt, Artificial Sequence
  Description of Artificial Sequence: Synthetic oligonucleotide
  Antisense strand to SEQ ID NO: 999118
ucuuagcagaguuuacucu

SEQ ID NO: 999120 - RNA, 19 nt, Artificial Sequence
  Description of Artificial Sequence: Synthetic oligonucleotide
  Sense strand starting at position 1060 of SEQ ID NO: 914373
agagacgaccuuugagcua

SEQ ID NO: 999121 - RNA, 19 nt, Artificial Sequence
  Description of Artificial Sequence: Synthetic oligonucleotide
  Antisense strand to SEQ ID NO: 999120
uagcucaaaggucgucucu

SEQ ID NO: 999122 - RNA, 19 nt, Artificial Sequence
  Description of Artificial Sequence: Synthetic oligonucleotide
  Sense strand starting at position 1072 of SEQ ID NO: 914373
ugagcuagguccugaagag

SEQ ID NO: 999123 - RNA, 19 nt, Artificial Sequence
  Description of Artificial Sequence: Synthetic oligonucleotide
  Antisense strand to SEQ ID NO: 999122
cucuucaggaccuagcuca

SEQ ID NO: 999124 - RNA, 19 nt, Artificial Sequence
  Description of Artificial Sequence: Synthetic oligonucleotide
  Sense strand starting at position 1122 of SEQ ID NO: 914373
ggcccuuuaccgcacagaa

SEQ ID NO: 999125 - RNA, 19 nt, Artificial Sequence
  Description of Artificial Sequence: Synthetic oligonucleotide
  Antisense strand to SEQ ID NO: 999124
uucugugcgguaaagggcc

SEQ ID NO: 999126 - RNA, 19 nt, Artificial Sequence
  Description of Artificial Sequence: Synthetic oligonucleotide
  Sense strand starting at position 1196 of SEQ ID NO: 914373
gcgggauccuuggucugca

SEQ ID NO: 999127 - RNA, 19 nt, Artificial Sequence
  Description of Artificial Sequence: Synthetic oligonucleotide
  Antisense strand to SEQ ID NO: 999126
ugcagaccaaggaucccgc

SEQ ID NO: 999128 - RNA, 19 nt, Artificial Sequence
  Description of Artificial Sequence: Synthetic oligonucleotide
  Sense strand starting at position 1292 of SEQ ID NO: 914373
uaaggaaguucugucacau

SEQ ID NO: 999129 - RNA, 19 nt, Artificial Sequence
  Description of Artificial Sequence: Synthetic oligonucleotide
  Antisense strand to SEQ ID NO: 999128
augugacagaacuuccuua

SEQ ID NO: 999130 - RNA, 19 nt, Artificial Sequence
  Description of Artificial Sequence: Synthetic oligonucleotide
  Sense strand starting at position 3752 of SEQ ID NO: 914373
guggcugcugccugaguua

SEQ ID NO: 999131 - RNA, 19 nt, Artificial Sequence
  Description of Artificial Sequence: Synthetic oligonucleotide
  Antisense strand to SEQ ID NO: 999130
uaacucaggcagcagccac

SEQ ID NO: 999132 - RNA, 19 nt, Artificial Sequence
  Description of Artificial Sequence: Synthetic oligonucleotide
  Sense strand starting at position 3761 of SEQ ID NO: 914373
gccugaguuagaggccaau

SEQ ID NO: 999133 - RNA, 19 nt, Artificial Sequence
  Description of Artificial Sequence: Synthetic oligonucleotide
  Antisense strand to SEQ ID NO: 999132
auuggccucuaacucaggc

SEQ ID NO: 999134 - RNA, 19 nt, Artificial Sequence
  Description of Artificial Sequence: Synthetic oligonucleotide
  Sense strand starting at position 3832 of SEQ ID NO: 914373
acuaguucucucugcagca

SEQ ID NO: 999135 - RNA, 19 nt, Artificial Sequence
  Description of Artificial Sequence: Synthetic oligonucleotide
  Antisense strand to SEQ ID NO: 999134
ugcugcagagagaacuagu

SEQ ID NO: 999136 - RNA, 19 nt, Artificial Sequence
  Description of Artificial Sequence: Synthetic oligonucleotide
  Sense strand starting at position 967 of SEQ ID NO: 914374
gcaguacagcaggaauuaa

SEQ ID NO: 999137 - RNA, 19 nt, Artificial Sequence
  Description of Artificial Sequence: Synthetic oligonucleotide
  Antisense strand to SEQ ID NO: 999136
uuaauuccugcuguacugc

SEQ ID NO: 999138 - RNA, 19 nt, Artificial Sequence
  Description of Artificial Sequence: Synthetic oligonucleotide
  Sense strand starting at position 979 of SEQ ID NO: 914374
gaauuaagacagcaacguu

SEQ ID NO: 999139 - RNA, 19 nt, Artificial Sequence
  Description of Artificial Sequence: Synthetic oligonucleotide
  Antisense strand to SEQ ID NO: 999138
aacguugcugucuuaauuc

SEQ ID NO: 999140 - RNA, 19 nt, Artificial Sequence
  Description of Artificial Sequence: Synthetic oligonucleotide
  Sense strand starting at position 991 of SEQ ID NO: 914374
caacguuaguuuguaauau

SEQ ID NO: 999141 - RNA, 19 nt, Artificial Sequence
  Description of Artificial Sequence: Synthetic oligonucleotide
  Antisense strand to SEQ ID NO: 999140
auauuacaaacuaacguug

SEQ ID NO: 999142 - RNA, 19 nt, Artificial Sequence
  Description of Artificial Sequence: Synthetic oligonucleotide
  Sense strand starting at position 1140 of SEQ ID NO: 914374
aacacaguggccugugaaa

SEQ ID NO: 999143 - RNA, 19 nt, Artificial Sequence
  Description of Artificial Sequence: Synthetic oligonucleotide
  Antisense strand to SEQ ID NO: 999142
uuucacaggccacuguguu

SEQ ID NO: 999144 - RNA, 19 nt, Artificial Sequence
  Description of Artificial Sequence: Synthetic oligonucleotide
  Sense strand starting at position 1142 of SEQ ID NO: 914374
cacaguggccugugaaaca

SEQ ID NO: 999145 - RNA, 19 nt, Artificial Sequence
  Description of Artificial Sequence: Synthetic oligonucleotide
  Antisense strand to SEQ ID NO: 999144
uguuucacaggccacugug

SEQ ID NO: 999146 - RNA, 19 nt, Artificial Sequence
  Description of Artificial Sequence: Synthetic oligonucleotide
  Sense strand starting at position 1182 of SEQ ID NO: 914374
cuggcaugauugcuuuaau

SEQ ID NO: 999147 - RNA, 19 nt, Artificial Sequence
  Description of Artificial Sequence: Synthetic oligonucleotide
  Antisense strand to SEQ ID NO: 999146
auuaaagcaaucaugccag

SEQ ID NO: 999148 - RNA, 19 nt, Artificial Sequence
  Description of Artificial Sequence: Synthetic oligonucleotide
  Sense strand starting at position 1183 of SEQ ID NO: 914374
uggcaugauugcuuuaauu

SEQ ID NO: 999149 - RNA, 19 nt, Artificial Sequence
  Description of Artificial Sequence: Synthetic oligonucleotide
  Antisense strand to SEQ ID NO: 999148
aauuaaagcaaucaugcca

SEQ ID NO: 999150 - RNA, 19 nt, Artificial Sequence
  Description of Artificial Sequence: Synthetic oligonucleotide
  Sense strand starting at position 1185 of SEQ ID NO: 914374
gcaugauugcuuuaauuac

SEQ ID NO: 999151 - RNA, 19 nt, Artificial Sequence
  Description of Artificial Sequence: Synthetic oligonucleotide
  Antisense strand to SEQ ID NO: 999150
guaauuaaagcaaucaugc

SEQ ID NO: 999152 - RNA, 19 nt, Artificial Sequence
  Description of Artificial Sequence: Synthetic oligonucleotide
  Sense strand starting at position 1196 of SEQ ID NO: 914374
uuaauuacacccggucuua

SEQ ID NO: 999153 - RNA, 19 nt, Artificial Sequence
  Description of Artificial Sequence: Synthetic oligonucleotide
  Antisense strand to SEQ ID NO: 999152
uaagaccggguguaauuaa

SEQ ID NO: 999154 - RNA, 19 nt, Artificial Sequence
  Description of Artificial Sequence: Synthetic oligonucleotide
  Sense strand starting at position 1261 of SEQ ID NO: 914374
cugcauucucuuuacgcaa

SEQ ID NO: 999155 - RNA, 19 nt, Artificial Sequence
  Description of Artificial Sequence: Synthetic oligonucleotide
  Antisense strand to SEQ ID NO: 999154
uugcguaaagagaaugcag

SEQ ID NO: 999156 - RNA, 19 nt, Artificial Sequence
  Description of Artificial Sequence: Synthetic oligonucleotide
  Sense strand starting at position 2349 of SEQ ID NO: 914374
gugucaccucaggguuaug

SEQ ID NO: 999157 - RNA, 19 nt, Artificial Sequence
  Description of Artificial Sequence: Synthetic oligonucleotide
  Antisense strand to SEQ ID NO: 999156
cauaacccugaggugacac

SEQ ID NO: 999158 - RNA, 19 nt, Artificial Sequence
  Description of Artificial Sequence: Synthetic oligonucleotide
  Sense strand starting at position 2546 of SEQ ID NO: 914374
uaggaagcaucagaugaau

SEQ ID NO: 999159 - RNA, 19 nt, Artificial Sequence
  Description of Artificial Sequence: Synthetic oligonucleotide
  Antisense strand to SEQ ID NO: 999158
auucaucugaugcuuccua

SEQ ID NO: 999160 - RNA, 19 nt, Artificial Sequence
  Description of Artificial Sequence: Synthetic oligonucleotide
  Sense strand starting at position 2559 of SEQ ID NO: 914374
augaauaauucugaagacu

SEQ ID NO: 999161 - RNA, 19 nt, Artificial Sequence
  Description of Artificial Sequence: Synthetic oligonucleotide
  Antisense strand to SEQ ID NO: 999160
agucuucagaauuauucau

SEQ ID NO: 999162 - RNA, 19 nt, Artificial Sequence
  Description of Artificial Sequence: Synthetic oligonucleotide
  Sense strand starting at position 2575 of SEQ ID NO: 914374
acuugaugucaacgggagu

SEQ ID NO: 999163 - RNA, 19 nt, Artificial Sequence
  Description of Artificial Sequence: Synthetic oligonucleotide
  Antisense strand to SEQ ID NO: 999162
acucccguugacaucaagu

SEQ ID NO: 999164 - RNA, 19 nt, Artificial Sequence
  Description of Artificial Sequence: Synthetic oligonucleotide
  Sense strand starting at position 2576 of SEQ ID NO: 914374
cuugaugucaacgggagua

SEQ ID NO: 999165 - RNA, 19 nt, Artificial Sequence
  Description of Artificial Sequence: Synthetic oligonucleotide
  Antisense strand to SEQ ID NO: 999164
uacucccguugacaucaag

SEQ ID NO: 999166 - RNA, 19 nt, Artificial Sequence
  Description of Artificial Sequence: Synthetic oligonucleotide
  Sense strand starting at position 2759 of SEQ ID NO: 914374
auacgucugccuguguauu

SEQ ID NO: 999167 - RNA, 19 nt, Artificial Sequence
  Description of Artificial Sequence: Synthetic oligonucleotide
  Antisense strand to SEQ ID NO: 999166
aauacacaggcagacguau

SEQ ID NO: 999168 - RNA, 19 nt, Artificial Sequence
  Description of Artificial Sequence: Synthetic oligonucleotide
  Sense strand starting at position 2778 of SEQ ID NO: 914374
gguguacaugcacauauaa

SEQ ID NO: 999169 - RNA, 19 nt, Artificial Sequence
  Description of Artificial Sequence: Synthetic oligonucleotide
  Antisense strand to SEQ ID NO: 999168
uuauaugugcauguacacc

SEQ ID NO: 999170 - RNA, 19 nt, Artificial Sequence
  Description of Artificial Sequence: Synthetic oligonucleotide
  Sense strand starting at position 2917 of SEQ ID NO: 914374
ccaauagugccauagacac

SEQ ID NO: 999171 - RNA, 19 nt, Artificial Sequence
  Description of Artificial Sequence: Synthetic oligonucleotide
  Antisense strand to SEQ ID NO: 999170
gugucuauggcacuauugg

SEQ ID NO: 999172 - RNA, 19 nt, Artificial Sequence
  Description of Artificial Sequence: Synthetic oligonucleotide
  Sense strand starting at position 2933 of SEQ ID NO: 914374
cacagugucgugcaguaaa

SEQ ID NO: 999173 - RNA, 19 nt, Artificial Sequence
  Description of Artificial Sequence: Synthetic oligonucleotide
  Antisense strand to SEQ ID NO: 999172
uuuacugcacgacacugug

SEQ ID NO: 999174 - RNA, 19 nt, Artificial Sequence
  Description of Artificial Sequence: Synthetic oligonucleotide
  Sense strand starting at position 2951 of SEQ ID NO: 914374
auguuugugguaugacaac

SEQ ID NO: 999175 - RNA, 19 nt, Artificial Sequence
  Description of Artificial Sequence: Synthetic oligonucleotide
  Antisense strand to SEQ ID NO: 999174
guugucauaccacaaacau

SEQ ID NO: 999176 - RNA, 19 nt, Artificial Sequence
  Description of Artificial Sequence: Synthetic oligonucleotide
  Sense strand starting at position 2993 of SEQ ID NO: 914374
cgcucuuugcccguugaau

SEQ ID NO: 999177 - RNA, 19 nt, Artificial Sequence
  Description of Artificial Sequence: Synthetic oligonucleotide
  Antisense strand to SEQ ID NO: 999176
auucaacgggcaaagagcg

SEQ ID NO: 999178 - RNA, 19 nt, Artificial Sequence
  Description of Artificial Sequence: Synthetic oligonucleotide
  Sense strand starting at position 2994 of SEQ ID NO: 914374
gcucuuugcccguugaauc

SEQ ID NO: 999179 - RNA, 19 nt, Artificial Sequence
  Description of Artificial Sequence: Synthetic oligonucleotide
  Antisense strand to SEQ ID NO: 999178
gauucaacgggcaaagagc

SEQ ID NO: 999180 - RNA, 19 nt, Artificial Sequence
  Description of Artificial Sequence: Synthetic oligonucleotide
  Sense strand starting at position 3126 of SEQ ID NO: 914374
auuuccugucugugucauu

SEQ ID NO: 999181 - RNA, 19 nt, Artificial Sequence
  Description of Artificial Sequence: Synthetic oligonucleotide
  Antisense strand to SEQ ID NO: 999180
aaugacacagacaggaaau

SEQ ID NO: 999182 - RNA, 19 nt, Artificial Sequence
  Description of Artificial Sequence: Synthetic oligonucleotide
  Sense strand starting at position 3127 of SEQ ID NO: 914374
uuuccugucugugucauuu

SEQ ID NO: 999183 - RNA, 19 nt, Artificial Sequence
  Description of Artificial Sequence: Synthetic oligonucleotide
  Antisense strand to SEQ ID NO: 999182
aaaugacacagacaggaaa

SEQ ID NO: 999184 - RNA, 19 nt, Artificial Sequence
  Description of Artificial Sequence: Synthetic oligonucleotide
  Sense strand starting at position 3139 of SEQ ID NO: 914374
gucauuucugccugccagu

SEQ ID NO: 999185 - RNA, 19 nt, Artificial Sequence
  Description of Artificial Sequence: Synthetic oligonucleotide
  Antisense strand to SEQ ID NO: 999184
acuggcaggcagaaaugac

SEQ ID NO: 999186 - RNA, 19 nt, Artificial Sequence
  Description of Artificial Sequence: Synthetic oligonucleotide
  Sense strand starting at position 3172 of SEQ ID NO: 914374
gaggucuacuguuccaaug

SEQ ID NO: 999187 - RNA, 19 nt, Artificial Sequence
  Description of Artificial Sequence: Synthetic oligonucleotide
  Antisense strand to SEQ ID NO: 999186
cauuggaacaguagaccuc

SEQ ID NO: 999188 - RNA, 19 nt, Artificial Sequence
  Description of Artificial Sequence: Synthetic oligonucleotide
  Sense strand starting at position 3200 of SEQ ID NO: 914374
aaagaaagugaguguaaca

SEQ ID NO: 999189 - RNA, 19 nt, Artificial Sequence
  Description of Artificial Sequence: Synthetic oligonucleotide
  Antisense strand to SEQ ID NO: 999188
uguuacacucacuuucuuu

SEQ ID NO: 999190 - RNA, 19 nt, Artificial Sequence
  Description of Artificial Sequence: Synthetic oligonucleotide
  Sense strand starting at position 3210 of SEQ ID NO: 914374
aguguaacaguuuguaaua

SEQ ID NO: 999191 - RNA, 19 nt, Artificial Sequence
  Description of Artificial Sequence: Synthetic oligonucleotide
  Antisense strand to SEQ ID NO: 999190
uauuacaaacuguuacacu

SEQ ID NO: 999192 - RNA, 19 nt, Artificial Sequence
  Description of Artificial Sequence: Synthetic oligonucleotide
  Sense strand starting at position 3211 of SEQ ID NO: 914374
guguaacaguuuguaauac

SEQ ID NO: 999193 - RNA, 19 nt, Artificial Sequence
  Description of Artificial Sequence: Synthetic oligonucleotide
  Antisense strand to SEQ ID NO: 999192
guauuacaaacuguuacac

SEQ ID NO: 999194 - RNA, 19 nt, Artificial Sequence
  Description of Artificial Sequence: Synthetic oligonucleotide
  Sense strand starting at position 3289 of SEQ ID NO: 914374
uugguaguaguuuaguauu

SEQ ID NO: 999195 - RNA, 19 nt, Artificial Sequence
  Description of Artificial Sequence: Synthetic oligonucleotide
  Antisense strand to SEQ ID NO: 999194
aauacuaaacuacuaccaa

SEQ ID NO: 999196 - RNA, 19 nt, Artificial Sequence
  Description of Artificial Sequence: Synthetic oligonucleotide
  Sense strand starting at position 3291 of SEQ ID NO: 914374
gguaguaguuuaguauuua

SEQ ID NO: 999197 - RNA, 19 nt, Artificial Sequence
  Description of Artificial Sequence: Synthetic oligonucleotide
  Antisense strand to SEQ ID NO: 999196
uaaauacuaaacuacuacc

SEQ ID NO: 999198 - RNA, 19 nt, Artificial Sequence
  Description of Artificial Sequence: Synthetic oligonucleotide
  Sense strand starting at position 3318 of SEQ ID NO: 914374
cacuauuucucggaagguu

SEQ ID NO: 999199 - RNA, 19 nt, Artificial Sequence
  Description of Artificial Sequence: Synthetic oligonucleotide
  Antisense strand to SEQ ID NO: 999198
aaccuuccgagaaauagug

SEQ ID NO: 999200 - RNA, 19 nt, Artificial Sequence
  Description of Artificial Sequence: Synthetic oligonucleotide
  Sense strand starting at position 3418 of SEQ ID NO: 914374
aguucuuguccugaccaaa

SEQ ID NO: 999201 - RNA, 19 nt, Artificial Sequence
  Description of Artificial Sequence: Synthetic oligonucleotide
  Antisense strand to SEQ ID NO: 999200
uuuggucaggacaagaacu

SEQ ID NO: 999202 - RNA, 19 nt, Artificial Sequence
  Description of Artificial Sequence: Synthetic oligonucleotide
  Sense strand starting at position 3575 of SEQ ID NO: 914374
aacuuuguagucuaguguu

SEQ ID NO: 999203 - RNA, 19 nt, Artificial Sequence
  Description of Artificial Sequence: Synthetic oligonucleotide
  Antisense strand to SEQ ID NO: 999202
aacacuagacuacaaaguu

SEQ ID NO: 999204 - RNA, 19 nt, Artificial Sequence
  Description of Artificial Sequence: Synthetic oligonucleotide
  Sense strand starting at position 3648 of SEQ ID NO: 914374
aguauaaaguugcuguuaa

SEQ ID NO: 999205 - RNA, 19 nt, Artificial Sequence
  Description of Artificial Sequence: Synthetic oligonucleotide
  Antisense strand to SEQ ID NO: 999204
uuaacagcaacuuuauacu

SEQ ID NO: 999206 - RNA, 19 nt, Artificial Sequence
  Description of Artificial Sequence: Synthetic oligonucleotide
  Sense strand starting at position 3655 of SEQ ID NO: 914374
aguugcuguuaaucuuaaa

SEQ ID NO: 999207 - RNA, 19 nt, Artificial Sequence
  Description of Artificial Sequence: Synthetic oligonucleotide
  Antisense strand to SEQ ID NO: 999206
uuuaagauuaacagcaacu

SEQ ID NO: 999208 - RNA, 19 nt, Artificial Sequence
  Description of Artificial Sequence: Synthetic oligonucleotide
  Sense strand starting at position 3683 of SEQ ID NO: 914374
uauguaugucugcugcagu

SEQ ID NO: 999209 - RNA, 19 nt, Artificial Sequence
  Description of Artificial Sequence: Synthetic oligonucleotide
  Antisense strand to SEQ ID NO: 999208
acugcagcagacauacaua

SEQ ID NO: 999210 - RNA, 19 nt, Artificial Sequence
  Description of Artificial Sequence: Synthetic oligonucleotide
  Sense strand starting at position 3911 of SEQ ID NO: 914374
aucuauguauuugggaauu

SEQ ID NO: 999211 - RNA, 19 nt, Artificial Sequence
  Description of Artificial Sequence: Synthetic oligonucleotide
  Antisense strand to SEQ ID NO: 999210
aauucccaaauacauagau

SEQ ID NO: 999212 - RNA, 19 nt, Artificial Sequence
  Description of Artificial Sequence: Synthetic oligonucleotide
  Sense strand starting at position 3921 of SEQ ID NO: 914374
uugggaauuugauauacug

SEQ ID NO: 999213 - RNA, 19 nt, Artificial Sequence
  Description of Artificial Sequence: Synthetic oligonucleotide
  Antisense strand to SEQ ID NO: 999212
caguauaucaaauucccaa

SEQ ID NO: 999214 - RNA, 19 nt, Artificial Sequence
  Description of Artificial Sequence: Synthetic oligonucleotide
  Sense strand starting at position 3932 of SEQ ID NO: 914374
auauacuggcauuauguau

SEQ ID NO: 999215 - RNA, 19 nt, Artificial Sequence
  Description of Artificial Sequence: Synthetic oligonucleotide
  Antisense strand to SEQ ID NO: 999214
auacauaaugccaguauau

SEQ ID NO: 999216 - RNA, 19 nt, Artificial Sequence
  Description of Artificial Sequence: Synthetic oligonucleotide
  Sense strand starting at position 810 of SEQ ID NO: 914375
acuguaugugcaugccaaa

SEQ ID NO: 999217 - RNA, 19 nt, Artificial Sequence
  Description of Artificial Sequence: Synthetic oligonucleotide
  Antisense strand to SEQ ID NO: 999216
uuuggcaugcacauacagu

SEQ ID NO: 999218 - RNA, 19 nt, Artificial Sequence
  Description of Artificial Sequence: Synthetic oligonucleotide
  Sense strand starting at position 1159 of SEQ ID NO: 914375
gcaguacagcaggaauuaa

SEQ ID NO: 999219 - RNA, 19 nt, Artificial Sequence
  Description of Artificial Sequence: Synthetic oligonucleotide
  Antisense strand to SEQ ID NO: 999218
uuaauuccugcuguacugc

SEQ ID NO: 999220 - RNA, 19 nt, Artificial Sequence
  Description of Artificial Sequence: Synthetic oligonucleotide
  Sense strand starting at position 1171 of SEQ ID NO: 914375
gaauuaagacagcaacguu

SEQ ID NO: 999221 - RNA, 19 nt, Artificial Sequence
  Description of Artificial Sequence: Synthetic oligonucleotide
  Antisense strand to SEQ ID NO: 999220
aacguugcugucuuaauuc

SEQ ID NO: 999222 - RNA, 19 nt, Artificial Sequence
  Description of Artificial Sequence: Synthetic oligonucleotide
  Sense strand starting at position 1183 of SEQ ID NO: 914375
caacguuaguuuguaauau

SEQ ID NO: 999223 - RNA, 19 nt, Artificial Sequence
  Description of Artificial Sequence: Synthetic oligonucleotide
  Antisense strand to SEQ ID NO: 999222
auauuacaaacuaacguug

SEQ ID NO: 999224 - RNA, 19 nt, Artificial Sequence
  Description of Artificial Sequence: Synthetic oligonucleotide
  Sense strand starting at position 1332 of SEQ ID NO: 914375
aacacaguggccugugaaa

SEQ ID NO: 999225 - RNA, 19 nt, Artificial Sequence
  Description of Artificial Sequence: Synthetic oligonucleotide
  Antisense strand to SEQ ID NO: 999224
uuucacaggccacuguguu

SEQ ID NO: 999226 - RNA, 19 nt, Artificial Sequence
  Description of Artificial Sequence: Synthetic oligonucleotide
  Sense strand starting at position 1334 of SEQ ID NO: 914375
cacaguggccugugaaaca

SEQ ID NO: 999227 - RNA, 19 nt, Artificial Sequence
  Description of Artificial Sequence: Synthetic oligonucleotide
  Antisense strand to SEQ ID NO: 999226
uguuucacaggccacugug

SEQ ID NO: 999228 - RNA, 19 nt, Artificial Sequence
  Description of Artificial Sequence: Synthetic oligonucleotide
  Sense strand starting at position 1374 of SEQ ID NO: 914375
cuggcaugauugcuuuaau

SEQ ID NO: 999229 - RNA, 19 nt, Artificial Sequence
  Description of Artificial Sequence: Synthetic oligonucleotide
  Antisense strand to SEQ ID NO: 999228
auuaaagcaaucaugccag

SEQ ID NO: 999230 - RNA, 19 nt, Artificial Sequence
  Description of Artificial Sequence: Synthetic oligonucleotide
  Sense strand starting at position 1375 of SEQ ID NO: 914375
uggcaugauugcuuuaauu

SEQ ID NO: 999231 - RNA, 19 nt, Artificial Sequence
  Description of Artificial Sequence: Synthetic oligonucleotide
  Antisense strand to SEQ ID NO: 999230
aauuaaagcaaucaugcca

SEQ ID NO: 999232 - RNA, 19 nt, Artificial Sequence
  Description of Artificial Sequence: Synthetic oligonucleotide
  Sense strand starting at position 1377 of SEQ ID NO: 914375
gcaugauugcuuuaauuac

SEQ ID NO: 999233 - RNA, 19 nt, Artificial Sequence
  Description of Artificial Sequence: Synthetic oligonucleotide
  Antisense strand to SEQ ID NO: 999232
guaauuaaagcaaucaugc

SEQ ID NO: 999234 - RNA, 19 nt, Artificial Sequence
  Description of Artificial Sequence: Synthetic oligonucleotide
  Sense strand starting at position 1388 of SEQ ID NO: 914375
uuaauuacacccggucuua

SEQ ID NO: 999235 - RNA, 19 nt, Artificial Sequence
  Description of Artificial Sequence: Synthetic oligonucleotide
  Antisense strand to SEQ ID NO: 999234
uaagaccggguguaauuaa

SEQ ID NO: 999236 - RNA, 19 nt, Artificial Sequence
  Description of Artificial Sequence: Synthetic oligonucleotide
  Sense strand starting at position 1453 of SEQ ID NO: 914375
cugcauucucuuuacgcaa

SEQ ID NO: 999237 - RNA, 19 nt, Artificial Sequence
  Description of Artificial Sequence: Synthetic oligonucleotide
  Antisense strand to SEQ ID NO: 999236
uugcguaaagagaaugcag

SEQ ID NO: 999238 - RNA, 19 nt, Artificial Sequence
  Description of Artificial Sequence: Synthetic oligonucleotide
  Sense strand starting at position 2541 of SEQ ID NO: 914375
gugucaccucaggguuaug

SEQ ID NO: 999239 - RNA, 19 nt, Artificial Sequence
  Description of Artificial Sequence: Synthetic oligonucleotide
  Antisense strand to SEQ ID NO: 999238
cauaacccugaggugacac

SEQ ID NO: 999240 - RNA, 19 nt, Artificial Sequence
  Description of Artificial Sequence: Synthetic oligonucleotide
  Sense strand starting at position 2695 of SEQ ID NO: 914375
aacagcugccugugcaaau

SEQ ID NO: 999241 - RNA, 19 nt, Artificial Sequence
  Description of Artificial Sequence: Synthetic oligonucleotide
  Antisense strand to SEQ ID NO: 999240
auuugcacaggcagcuguu

SEQ ID NO: 999242 - RNA, 19 nt, Artificial Sequence
  Description of Artificial Sequence: Synthetic oligonucleotide
  Sense strand starting at position 2738 of SEQ ID NO: 914375
uaggaagcaucagaugaau

SEQ ID NO: 999243 - RNA, 19 nt, Artificial Sequence
  Description of Artificial Sequence: Synthetic oligonucleotide
  Antisense strand to SEQ ID NO: 999242
auucaucugaugcuuccua

SEQ ID NO: 999244 - RNA, 19 nt, Artificial Sequence
  Description of Artificial Sequence: Synthetic oligonucleotide
  Sense strand starting at position 2751 of SEQ ID NO: 914375
augaauaauucugaagacu

SEQ ID NO: 999245 - RNA, 19 nt, Artificial Sequence
  Description of Artificial Sequence: Synthetic oligonucleotide
  Antisense strand to SEQ ID NO: 999244
agucuucagaauuauucau

SEQ ID NO: 999246 - RNA, 19 nt, Artificial Sequence
  Description of Artificial Sequence: Synthetic oligonucleotide
  Sense strand starting at position 2767 of SEQ ID NO: 914375
acuugaugucaacgggagu

SEQ ID NO: 999247 - RNA, 19 nt, Artificial Sequence
  Description of Artificial Sequence: Synthetic oligonucleotide
  Antisense strand to SEQ ID NO: 999246
acucccguugacaucaagu

SEQ ID NO: 999248 - RNA, 19 nt, Artificial Sequence
  Description of Artificial Sequence: Synthetic oligonucleotide
  Sense strand starting at position 2768 of SEQ ID NO: 914375
cuugaugucaacgggagua

SEQ ID NO: 999249 - RNA, 19 nt, Artificial Sequence
  Description of Artificial Sequence: Synthetic oligonucleotide
  Antisense strand to SEQ ID NO: 999248
uacucccguugacaucaag

SEQ ID NO: 999250 - RNA, 19 nt, Artificial Sequence
  Description of Artificial Sequence: Synthetic oligonucleotide
  Sense strand starting at position 2951 of SEQ ID NO: 914375
auacgucugccuguguauu

SEQ ID NO: 999251 - RNA, 19 nt, Artificial Sequence
  Description of Artificial Sequence: Synthetic oligonucleotide
  Antisense strand to SEQ ID NO: 999250
aauacacaggcagacguau

SEQ ID NO: 999252 - RNA, 19 nt, Artificial Sequence
  Description of Artificial Sequence: Synthetic oligonucleotide
  Sense strand starting at position 2970 of SEQ ID NO: 914375
gguguacaugcacauauaa

SEQ ID NO: 999253 - RNA, 19 nt, Artificial Sequence
  Description of Artificial Sequence: Synthetic oligonucleotide
  Antisense strand to SEQ ID NO: 999252
uuauaugugcauguacacc

SEQ ID NO: 999254 - RNA, 19 nt, Artificial Sequence
  Description of Artificial Sequence: Synthetic oligonucleotide
  Sense strand starting at position 3109 of SEQ ID NO: 914375
ccaauagugccauagacac

SEQ ID NO: 999255 - RNA, 19 nt, Artificial Sequence
  Description of Artificial Sequence: Synthetic oligonucleotide
  Antisense strand to SEQ ID NO: 999254
gugucuauggcacuauugg

SEQ ID NO: 999256 - RNA, 19 nt, Artificial Sequence
  Description of Artificial Sequence: Synthetic oligonucleotide
  Sense strand starting at position 3125 of SEQ ID NO: 914375
cacagugucgugcaguaaa

SEQ ID NO: 999257 - RNA, 19 nt, Artificial Sequence
  Description of Artificial Sequence: Synthetic oligonucleotide
  Antisense strand to SEQ ID NO: 999256
uuuacugcacgacacugug

SEQ ID NO: 999258 - RNA, 19 nt, Artificial Sequence
  Description of Artificial Sequence: Synthetic oligonucleotide
  Sense strand starting at position 3136 of SEQ ID NO: 914375
gcaguaaauguuuguggua

SEQ ID NO: 999259 - RNA, 19 nt, Artificial Sequence
  Description of Artificial Sequence: Synthetic oligonucleotide
  Antisense strand to SEQ ID NO: 999258
uaccacaaacauuuacugc

SEQ ID NO: 999260 - RNA, 19 nt, Artificial Sequence
  Description of Artificial Sequence: Synthetic oligonucleotide
  Sense strand starting at position 3143 of SEQ ID NO: 914375
auguuugugguaugacaac

SEQ ID NO: 999261 - RNA, 19 nt, Artificial Sequence
  Description of Artificial Sequence: Synthetic oligonucleotide
  Antisense strand to SEQ ID NO: 999260
guugucauaccacaaacau

SEQ ID NO: 999262 - RNA, 19 nt, Artificial Sequence
  Description of Artificial Sequence: Synthetic oligonucleotide
  Sense strand starting at position 3185 of SEQ ID NO: 914375
cgcucuuugcccguugaau

SEQ ID NO: 999263 - RNA, 19 nt, Artificial Sequence
  Description of Artificial Sequence: Synthetic oligonucleotide
  Antisense strand to SEQ ID NO: 999262
auucaacgggcaaagagcg

SEQ ID NO: 999264 - RNA, 19 nt, Artificial Sequence
  Description of Artificial Sequence: Synthetic oligonucleotide
  Sense strand starting at position 3186 of SEQ ID NO: 914375
gcucuuugcccguugaauc

SEQ ID NO: 999265 - RNA, 19 nt, Artificial Sequence
  Description of Artificial Sequence: Synthetic oligonucleotide
  Antisense strand to SEQ ID NO: 999264
gauucaacgggcaaagagc

SEQ ID NO: 999266 - RNA, 19 nt, Artificial Sequence
  Description of Artificial Sequence: Synthetic oligonucleotide
  Sense strand starting at position 3318 of SEQ ID NO: 914375
auuuccugucugugucauu

SEQ ID NO: 999267 - RNA, 19 nt, Artificial Sequence
  Description of Artificial Sequence: Synthetic oligonucleotide
  Antisense strand to SEQ ID NO: 999266
aaugacacagacaggaaau

SEQ ID NO: 999268 - RNA, 19 nt, Artificial Sequence
  Description of Artificial Sequence: Synthetic oligonucleotide
  Sense strand starting at position 3319 of SEQ ID NO: 914375
uuuccugucugugucauuu

SEQ ID NO: 999269 - RNA, 19 nt, Artificial Sequence
  Description of Artificial Sequence: Synthetic oligonucleotide
  Antisense strand to SEQ ID NO: 999268
aaaugacacagacaggaaa

SEQ ID NO: 999270 - RNA, 19 nt, Artificial Sequence
  Description of Artificial Sequence: Synthetic oligonucleotide
  Sense strand starting at position 3331 of SEQ ID NO: 914375
gucauuucugccugccagu

SEQ ID NO: 999271 - RNA, 19 nt, Artificial Sequence
  Description of Artificial Sequence: Synthetic oligonucleotide
  Antisense strand to SEQ ID NO: 999270
acuggcaggcagaaaugac

SEQ ID NO: 999272 - RNA, 19 nt, Artificial Sequence
  Description of Artificial Sequence: Synthetic oligonucleotide
  Sense strand starting at position 3364 of SEQ ID NO: 914375
gaggucuacuguuccaaug

SEQ ID NO: 999273 - RNA, 19 nt, Artificial Sequence
  Description of Artificial Sequence: Synthetic oligonucleotide
  Antisense strand to SEQ ID NO: 999272
cauuggaacaguagaccuc

SEQ ID NO: 999274 - RNA, 19 nt, Artificial Sequence
  Description of Artificial Sequence: Synthetic oligonucleotide
  Sense strand starting at position 3392 of SEQ ID NO: 914375
aaagaaagugaguguaaca

SEQ ID NO: 999275 - RNA, 19 nt, Artificial Sequence
  Description of Artificial Sequence: Synthetic oligonucleotide
  Antisense strand to SEQ ID NO: 999274
uguuacacucacuuucuuu

SEQ ID NO: 999276 - RNA, 19 nt, Artificial Sequence
  Description of Artificial Sequence: Synthetic oligonucleotide
  Sense strand starting at position 3402 of SEQ ID NO: 914375
aguguaacaguuuguaaua

SEQ ID NO: 999277 - RNA, 19 nt, Artificial Sequence
  Description of Artificial Sequence: Synthetic oligonucleotide
  Antisense strand to SEQ ID NO: 999276
uauuacaaacuguuacacu

SEQ ID NO: 999278 - RNA, 19 nt, Artificial Sequence
  Description of Artificial Sequence: Synthetic oligonucleotide
  Sense strand starting at position 3403 of SEQ ID NO: 914375
guguaacaguuuguaauac

SEQ ID NO: 999279 - RNA, 19 nt, Artificial Sequence
  Description of Artificial Sequence: Synthetic oligonucleotide
  Antisense strand to SEQ ID NO: 999278
guauuacaaacuguuacac

SEQ ID NO: 999280 - RNA, 19 nt, Artificial Sequence
  Description of Artificial Sequence: Synthetic oligonucleotide
  Sense strand starting at position 3481 of SEQ ID NO: 914375
uugguaguaguuuaguauu

SEQ ID NO: 999281 - RNA, 19 nt, Artificial Sequence
  Description of Artificial Sequence: Synthetic oligonucleotide
  Antisense strand to SEQ ID NO: 999280
aauacuaaacuacuaccaa

SEQ ID NO: 999282 - RNA, 19 nt, Artificial Sequence
  Description of Artificial Sequence: Synthetic oligonucleotide
  Sense strand starting at position 3483 of SEQ ID NO: 914375
gguaguaguuuaguauuua

SEQ ID NO: 999283 - RNA, 19 nt, Artificial Sequence
  Description of Artificial Sequence: Synthetic oligonucleotide
  Antisense strand to SEQ ID NO: 999282
uaaauacuaaacuacuacc

SEQ ID NO: 999284 - RNA, 19 nt, Artificial Sequence
  Description of Artificial Sequence: Synthetic oligonucleotide
  Sense strand starting at position 3510 of SEQ ID NO: 914375
cacuauuucucggaagguu

SEQ ID NO: 999285 - RNA, 19 nt, Artificial Sequence
  Description of Artificial Sequence: Synthetic oligonucleotide
  Antisense strand to SEQ ID NO: 999284
aaccuuccgagaaauagug

SEQ ID NO: 999286 - RNA, 19 nt, Artificial Sequence
  Description of Artificial Sequence: Synthetic oligonucleotide
  Sense strand starting at position 3610 of SEQ ID NO: 914375
aguucuuguccugaccaaa

SEQ ID NO: 999287 - RNA, 19 nt, Artificial Sequence
  Description of Artificial Sequence: Synthetic oligonucleotide
  Antisense strand to SEQ ID NO: 999286
uuuggucaggacaagaacu

SEQ ID NO: 999288 - RNA, 19 nt, Artificial Sequence
  Description of Artificial Sequence: Synthetic oligonucleotide
  Sense strand starting at position 3767 of SEQ ID NO: 914375
aacuuuguagucuaguguu

SEQ ID NO: 999289 - RNA, 19 nt, Artificial Sequence
  Description of Artificial Sequence: Synthetic oligonucleotide
  Antisense strand to SEQ ID NO: 999288
aacacuagacuacaaaguu

SEQ ID NO: 999290 - RNA, 19 nt, Artificial Sequence
  Description of Artificial Sequence: Synthetic oligonucleotide
  Sense strand starting at position 3840 of SEQ ID NO: 914375
aguauaaaguugcuguuaa

SEQ ID NO: 999291 - RNA, 19 nt, Artificial Sequence
  Description of Artificial Sequence: Synthetic oligonucleotide
  Antisense strand to SEQ ID NO: 999290
uuaacagcaacuuuauacu

SEQ ID NO: 999292 - RNA, 19 nt, Artificial Sequence
  Description of Artificial Sequence: Synthetic oligonucleotide
  Sense strand starting at position 3847 of SEQ ID NO: 914375
aguugcuguuaaucuuaaa

SEQ ID NO: 999293 - RNA, 19 nt, Artificial Sequence
  Description of Artificial Sequence: Synthetic oligonucleotide
  Antisense strand to SEQ ID NO: 999292
uuuaagauuaacagcaacu

SEQ ID NO: 999294 - RNA, 19 nt, Artificial Sequence
  Description of Artificial Sequence: Synthetic oligonucleotide
  Sense strand starting at position 3875 of SEQ ID NO: 914375
uauguaugucugcugcagu

SEQ ID NO: 999295 - RNA, 19 nt, Artificial Sequence
  Description of Artificial Sequence: Synthetic oligonucleotide
  Antisense strand to SEQ ID NO: 999294
acugcagcagacauacaua

SEQ ID NO: 999296 - RNA, 19 nt, Artificial Sequence
  Description of Artificial Sequence: Synthetic oligonucleotide
  Sense strand starting at position 479 of SEQ ID NO: 914376
uggacauguguguaugguu

SEQ ID NO: 999297 - RNA, 19 nt, Artificial Sequence
  Description of Artificial Sequence: Synthetic oligonucleotide
  Antisense strand to SEQ ID NO: 999296
aaccauacacacaugucca

SEQ ID NO: 999298 - RNA, 19 nt, Artificial Sequence
  Description of Artificial Sequence: Synthetic oligonucleotide
  Sense strand starting at position 595 of SEQ ID NO: 914376
aauggaaauguuugcaucu

SEQ ID NO: 999299 - RNA, 19 nt, Artificial Sequence
  Description of Artificial Sequence: Synthetic oligonucleotide
  Antisense strand to SEQ ID NO: 999298
agaugcaaacauuuccauu

SEQ ID NO: 999300 - RNA, 19 nt, Artificial Sequence
  Description of Artificial Sequence: Synthetic oligonucleotide
  Sense strand starting at position 621 of SEQ ID NO: 914376
ggacacacuuccucuuaga

SEQ ID NO: 999301 - RNA, 19 nt, Artificial Sequence
  Description of Artificial Sequence: Synthetic oligonucleotide
  Antisense strand to SEQ ID NO: 999300
ucuaagaggaagugugucc

SEQ ID NO: 999302 - RNA, 19 nt, Artificial Sequence
  Description of Artificial Sequence: Synthetic oligonucleotide
  Sense strand starting at position 699 of SEQ ID NO: 914376
agugguuccuucucagauu

SEQ ID NO: 999303 - RNA, 19 nt, Artificial Sequence
  Description of Artificial Sequence: Synthetic oligonucleotide
  Antisense strand to SEQ ID NO: 999302
aaucugagaaggaaccacu

SEQ ID NO: 999304 - RNA, 19 nt, Artificial Sequence
  Description of Artificial Sequence: Synthetic oligonucleotide
  Sense strand starting at position 985 of SEQ ID NO: 914376
aagacuucccguugaagaa

SEQ ID NO: 999305 - RNA, 19 nt, Artificial Sequence
  Description of Artificial Sequence: Synthetic oligonucleotide
  Antisense strand to SEQ ID NO: 999304
uucuucaacgggaagucuu

SEQ ID NO: 999306 - RNA, 19 nt, Artificial Sequence
  Description of Artificial Sequence: Synthetic oligonucleotide
  Sense strand starting at position 1063 of SEQ ID NO: 914376
agagucagcucagugauug

SEQ ID NO: 999307 - RNA, 19 nt, Artificial Sequence
  Description of Artificial Sequence: Synthetic oligonucleotide
  Antisense strand to SEQ ID NO: 999306
caaucacugagcugacucu

SEQ ID NO: 999308 - RNA, 19 nt, Artificial Sequence
  Description of Artificial Sequence: Synthetic oligonucleotide
  Sense strand starting at position 1064 of SEQ ID NO: 914376
gagucagcucagugauuga

SEQ ID NO: 999309 - RNA, 19 nt, Artificial Sequence
  Description of Artificial Sequence: Synthetic oligonucleotide
  Antisense strand to SEQ ID NO: 999308
ucaaucacugagcugacuc

SEQ ID NO: 999310 - RNA, 19 nt, Artificial Sequence
  Description of Artificial Sequence: Synthetic oligonucleotide
  Sense strand starting at position 1067 of SEQ ID NO: 914376
ucagcucagugauugauua

SEQ ID NO: 999311 - RNA, 19 nt, Artificial Sequence
  Description of Artificial Sequence: Synthetic oligonucleotide
  Antisense strand to SEQ ID NO: 999310
uaaucaaucacugagcuga

SEQ ID NO: 999312 - RNA, 19 nt, Artificial Sequence
  Description of Artificial Sequence: Synthetic oligonucleotide
  Sense strand starting at position 1069 of SEQ ID NO: 914376
agcucagugauugauuagu

SEQ ID NO: 999313 - RNA, 19 nt, Artificial Sequence
  Description of Artificial Sequence: Synthetic oligonucleotide
  Antisense strand to SEQ ID NO: 999312
acuaaucaaucacugagcu

SEQ ID NO: 999314 - RNA, 19 nt, Artificial Sequence
  Description of Artificial Sequence: Synthetic oligonucleotide
  Sense strand starting at position 1071 of SEQ ID NO: 914376
cucagugauugauuaguau

SEQ ID NO: 999315 - RNA, 19 nt, Artificial Sequence
  Description of Artificial Sequence: Synthetic oligonucleotide
  Antisense strand to SEQ ID NO: 999314
auacuaaucaaucacugag

SEQ ID NO: 999316 - RNA, 19 nt, Artificial Sequence
  Description of Artificial Sequence: Synthetic oligonucleotide
  Sense strand starting at position 1213 of SEQ ID NO: 914376
gguaccugcuucuuaagau

SEQ ID NO: 999317 - RNA, 19 nt, Artificial Sequence
  Description of Artificial Sequence: Synthetic oligonucleotide
  Antisense strand to SEQ ID NO: 999316
aucuuaagaagcagguacc

SEQ ID NO: 999318 - RNA, 19 nt, Artificial Sequence
  Description of Artificial Sequence: Synthetic oligonucleotide
  Sense strand starting at position 1220 of SEQ ID NO: 914376
gcuucuuaagauuaugaua

SEQ ID NO: 999319 - RNA, 19 nt, Artificial Sequence
  Description of Artificial Sequence: Synthetic oligonucleotide
  Antisense strand to SEQ ID NO: 999318
uaucauaaucuuaagaagc

SEQ ID NO: 999320 - RNA, 19 nt, Artificial Sequence
  Description of Artificial Sequence: Synthetic oligonucleotide
  Sense strand starting at position 1293 of SEQ ID NO: 914376
gguagcaguacuuaauguu

SEQ ID NO: 999321 - RNA, 19 nt, Artificial Sequence
  Description of Artificial Sequence: Synthetic oligonucleotide
  Antisense strand to SEQ ID NO: 999320
aacauuaaguacugcuacc

SEQ ID NO: 999322 - RNA, 19 nt, Artificial Sequence
  Description of Artificial Sequence: Synthetic oligonucleotide
  Sense strand starting at position 1372 of SEQ ID NO: 914376
acaugccuucgacaaugua

SEQ ID NO: 999323 - RNA, 19 nt, Artificial Sequence
  Description of Artificial Sequence: Synthetic oligonucleotide
  Antisense strand to SEQ ID NO: 999322
uacauugucgaaggcaugu

SEQ ID NO: 999324 - RNA, 19 nt, Artificial Sequence
  Description of Artificial Sequence: Synthetic oligonucleotide
  Sense strand starting at position 1482 of SEQ ID NO: 914376
gcguccauuugcucauuaa

SEQ ID NO: 999325 - RNA, 19 nt, Artificial Sequence
  Description of Artificial Sequence: Synthetic oligonucleotide
  Antisense strand to SEQ ID NO: 999324
uuaaugagcaaauggacgc

SEQ ID NO: 999326 - RNA, 19 nt, Artificial Sequence
  Description of Artificial Sequence: Synthetic oligonucleotide
  Sense strand starting at position 1689 of SEQ ID NO: 914376
gggcccugguguuugauaa

SEQ ID NO: 999327 - RNA, 19 nt, Artificial Sequence
  Description of Artificial Sequence: Synthetic oligonucleotide
  Antisense strand to SEQ ID NO: 999326
uuaucaaacaccagggccc

SEQ ID NO: 999328 - RNA, 19 nt, Artificial Sequence
  Description of Artificial Sequence: Synthetic oligonucleotide
  Sense strand starting at position 1994 of SEQ ID NO: 914376
uuaaaugcgucacccaaau

SEQ ID NO: 999329 - RNA, 19 nt, Artificial Sequence
  Description of Artificial Sequence: Synthetic oligonucleotide
  Antisense strand to SEQ ID NO: 999328
auuugggugacgcauuuaa

SEQ ID NO: 999330 - RNA, 19 nt, Artificial Sequence
  Description of Artificial Sequence: Synthetic oligonucleotide
  Sense strand starting at position 2094 of SEQ ID NO: 914376
gggaacuccagcgguaaua

SEQ ID NO: 999331 - RNA, 19 nt, Artificial Sequence
  Description of Artificial Sequence: Synthetic oligonucleotide
  Antisense strand to SEQ ID NO: 999330
uauuaccgcuggaguuccc

SEQ ID NO: 999332 - RNA, 19 nt, Artificial Sequence
  Description of Artificial Sequence: Synthetic oligonucleotide
  Sense strand starting at position 2131 of SEQ ID NO: 914376
uaaucaguggccuggcaaa

SEQ ID NO: 999333 - RNA, 19 nt, Artificial Sequence
  Description of Artificial Sequence: Synthetic oligonucleotide
  Antisense strand to SEQ ID NO: 999332
uuugccaggccacugauua

SEQ ID NO: 999334 - RNA, 19 nt, Artificial Sequence
  Description of Artificial Sequence: Synthetic oligonucleotide
  Sense strand starting at position 2250 of SEQ ID NO: 914376
aggaaaucuugauaacaac

SEQ ID NO: 999335 - RNA, 19 nt, Artificial Sequence
  Description of Artificial Sequence: Synthetic oligonucleotide
  Antisense strand to SEQ ID NO: 999334
guuguuaucaagauuuccu

SEQ ID NO: 999336 - RNA, 19 nt, Artificial Sequence
  Description of Artificial Sequence: Synthetic oligonucleotide
  Sense strand starting at position 2277 of SEQ ID NO: 914376
agaggacgaucauugcuua

SEQ ID NO: 999337 - RNA, 19 nt, Artificial Sequence
  Description of Artificial Sequence: Synthetic oligonucleotide
  Antisense strand to SEQ ID NO: 999336
uaagcaaugaucguccucu

SEQ ID NO: 999338 - RNA, 19 nt, Artificial Sequence
  Description of Artificial Sequence: Synthetic oligonucleotide
  Sense strand starting at position 2384 of SEQ ID NO: 914376
cuacuauagcugcagaagu

SEQ ID NO: 999339 - RNA, 19 nt, Artificial Sequence
  Description of Artificial Sequence: Synthetic oligonucleotide
  Antisense strand to SEQ ID NO: 999338
acuucugcagcuauaguag

SEQ ID NO: 999340 - RNA, 19 nt, Artificial Sequence
  Description of Artificial Sequence: Synthetic oligonucleotide
  Sense strand starting at position 2522 of SEQ ID NO: 914376
ugcaguucuccuuugcagu

SEQ ID NO: 999341 - RNA, 19 nt, Artificial Sequence
  Description of Artificial Sequence: Synthetic oligonucleotide
  Antisense strand to SEQ ID NO: 999340
acugcaaaggagaacugca

SEQ ID NO: 999342 - RNA, 19 nt, Artificial Sequence
  Description of Artificial Sequence: Synthetic oligonucleotide
  Sense strand starting at position 2560 of SEQ ID NO: 914376
auugaaauggcuugguaaa

SEQ ID NO: 999343 - RNA, 19 nt, Artificial Sequence
  Description of Artificial Sequence: Synthetic oligonucleotide
  Antisense strand to SEQ ID NO: 999342
uuuaccaagccauuucaau

SEQ ID NO: 999344 - RNA, 19 nt, Artificial Sequence
  Description of Artificial Sequence: Synthetic oligonucleotide
  Sense strand starting at position 2561 of SEQ ID NO: 914376
uugaaauggcuugguaaau

SEQ ID NO: 999345 - RNA, 19 nt, Artificial Sequence
  Description of Artificial Sequence: Synthetic oligonucleotide
  Antisense strand to SEQ ID NO: 999344
auuuaccaagccauuucaa

SEQ ID NO: 999346 - RNA, 19 nt, Artificial Sequence
  Description of Artificial Sequence: Synthetic oligonucleotide
  Sense strand starting at position 2562 of SEQ ID NO: 914376
ugaaauggcuugguaaauu

SEQ ID NO: 999347 - RNA, 19 nt, Artificial Sequence
  Description of Artificial Sequence: Synthetic oligonucleotide
  Antisense strand to SEQ ID NO: 999346
aauuuaccaagccauuuca

SEQ ID NO: 999348 - RNA, 19 nt, Artificial Sequence
  Description of Artificial Sequence: Synthetic oligonucleotide
  Sense strand starting at position 2602 of SEQ ID NO: 914376
uuugguuuggugaguuguu

SEQ ID NO: 999349 - RNA, 19 nt, Artificial Sequence
  Description of Artificial Sequence: Synthetic oligonucleotide
  Antisense strand to SEQ ID NO: 999348
aacaacucaccaaaccaaa

SEQ ID NO: 999350 - RNA, 19 nt, Artificial Sequence
  Description of Artificial Sequence: Synthetic oligonucleotide
  Sense strand starting at position 2634 of SEQ ID NO: 914376
uaauaaguaggguggaguu

SEQ ID NO: 999351 - RNA, 19 nt, Artificial Sequence
  Description of Artificial Sequence: Synthetic oligonucleotide
  Antisense strand to SEQ ID NO: 999350
aacuccacccuacuuauua

SEQ ID NO: 999352 - RNA, 19 nt, Artificial Sequence
  Description of Artificial Sequence: Synthetic oligonucleotide
  Sense strand starting at position 2644 of SEQ ID NO: 914376
gguggaguuggcuacuuaa

SEQ ID NO: 999353 - RNA, 19 nt, Artificial Sequence
  Description of Artificial Sequence: Synthetic oligonucleotide
  Antisense strand to SEQ ID NO: 999352
uuaaguagccaacuccacc

SEQ ID NO: 999354 - RNA, 19 nt, Artificial Sequence
  Description of Artificial Sequence: Synthetic oligonucleotide
  Sense strand starting at position 2733 of SEQ ID NO: 914376
accugacaucuuugagucu

SEQ ID NO: 999355 - RNA, 19 nt, Artificial Sequence
  Description of Artificial Sequence: Synthetic oligonucleotide
  Antisense strand to SEQ ID NO: 999354
agacucaaagaugucaggu

SEQ ID NO: 999356 - RNA, 19 nt, Artificial Sequence
  Description of Artificial Sequence: Synthetic oligonucleotide
  Sense strand starting at position 2736 of SEQ ID NO: 914376
ugacaucuuugagucuaau

SEQ ID NO: 999357 - RNA, 19 nt, Artificial Sequence
  Description of Artificial Sequence: Synthetic oligonucleotide
  Antisense strand to SEQ ID NO: 999356
auuagacucaaagauguca

SEQ ID NO: 999358 - RNA, 19 nt, Artificial Sequence
  Description of Artificial Sequence: Synthetic oligonucleotide
  Sense strand starting at position 2742 of SEQ ID NO: 914376
cuuugagucuaauugcacu

SEQ ID NO: 999359 - RNA, 19 nt, Artificial Sequence
  Description of Artificial Sequence: Synthetic oligonucleotide
  Antisense strand to SEQ ID NO: 999358
agugcaauuagacucaaag

SEQ ID NO: 999360 - RNA, 19 nt, Artificial Sequence
  Description of Artificial Sequence: Synthetic oligonucleotide
  Sense strand starting at position 2864 of SEQ ID NO: 914376
ucuaucuuccaguagauca

SEQ ID NO: 999361 - RNA, 19 nt, Artificial Sequence
  Description of Artificial Sequence: Synthetic oligonucleotide
  Antisense strand to SEQ ID NO: 999360
ugaucuacuggaagauaga

SEQ ID NO: 999362 - RNA, 19 nt, Artificial Sequence
  Description of Artificial Sequence: Synthetic oligonucleotide
  Sense strand starting at position 3029 of SEQ ID NO: 914376
ugaaguuccaguuggaauu

SEQ ID NO: 999363 - RNA, 19 nt, Artificial Sequence
  Description of Artificial Sequence: Synthetic oligonucleotide
  Antisense strand to SEQ ID NO: 999362
aauuccaacuggaacuuca

SEQ ID NO: 999364 - RNA, 19 nt, Artificial Sequence
  Description of Artificial Sequence: Synthetic oligonucleotide
  Sense strand starting at position 3030 of SEQ ID NO: 914376
gaaguuccaguuggaauua

SEQ ID NO: 999365 - RNA, 19 nt, Artificial Sequence
  Description of Artificial Sequence: Synthetic oligonucleotide
  Antisense strand to SEQ ID NO: 999364
uaauuccaacuggaacuuc

SEQ ID NO: 999366 - RNA, 19 nt, Artificial Sequence
  Description of Artificial Sequence: Synthetic oligonucleotide
  Sense strand starting at position 3052 of SEQ ID NO: 914376
cagaaagacuaaguguauu

SEQ ID NO: 999367 - RNA, 19 nt, Artificial Sequence
  Description of Artificial Sequence: Synthetic oligonucleotide
  Antisense strand to SEQ ID NO: 999366
aauacacuuagucuuucug

SEQ ID NO: 999368 - RNA, 19 nt, Artificial Sequence
  Description of Artificial Sequence: Synthetic oligonucleotide
  Sense strand starting at position 3064 of SEQ ID NO: 914376
guguauuuaucauauggag

SEQ ID NO: 999369 - RNA, 19 nt, Artificial Sequence
  Description of Artificial Sequence: Synthetic oligonucleotide
  Antisense strand to SEQ ID NO: 999368
cuccauaugauaaauacac

SEQ ID NO: 999370 - RNA, 19 nt, Artificial Sequence
  Description of Artificial Sequence: Synthetic oligonucleotide
  Sense strand starting at position 3267 of SEQ ID NO: 914376
uguacaugucaagaaucua

SEQ ID NO: 999371 - RNA, 19 nt, Artificial Sequence
  Description of Artificial Sequence: Synthetic oligonucleotide
  Antisense strand to SEQ ID NO: 999370
uagauucuugacauguaca

SEQ ID NO: 999372 - RNA, 19 nt, Artificial Sequence
  Description of Artificial Sequence: Synthetic oligonucleotide
  Sense strand starting at position 3476 of SEQ ID NO: 914376
guuaauacauguuuguacu

SEQ ID NO: 999373 - RNA, 19 nt, Artificial Sequence
  Description of Artificial Sequence: Synthetic oligonucleotide
  Antisense strand to SEQ ID NO: 999372
aguacaaacauguauuaac

SEQ ID NO: 999374 - RNA, 19 nt, Artificial Sequence
  Description of Artificial Sequence: Synthetic oligonucleotide
  Sense strand starting at position 3962 of SEQ ID NO: 914376
agcauaauuggucaauaca

SEQ ID NO: 999375 - RNA, 19 nt, Artificial Sequence
  Description of Artificial Sequence: Synthetic oligonucleotide
  Antisense strand to SEQ ID NO: 999374
uguauugaccaauuaugcu

SEQ ID NO: 999376 - RNA, 19 nt, Artificial Sequence
  Description of Artificial Sequence: Synthetic oligonucleotide
  Sense strand starting at position 40 of SEQ ID NO: 914377
acagcauauccaugaagga

SEQ ID NO: 999377 - RNA, 19 nt, Artificial Sequence
  Description of Artificial Sequence: Synthetic oligonucleotide
  Antisense strand to SEQ ID NO: 999376
uccuucauggauaugcugu

SEQ ID NO: 999378 - RNA, 19 nt, Artificial Sequence
  Description of Artificial Sequence: Synthetic oligonucleotide
  Sense strand starting at position 94 of SEQ ID NO: 914377
uucccaugguuucuagaca

SEQ ID NO: 999379 - RNA, 19 nt, Artificial Sequence
  Description of Artificial Sequence: Synthetic oligonucleotide
  Antisense strand to SEQ ID NO: 999378
ugucuagaaaccaugggaa

SEQ ID NO: 999380 - RNA, 19 nt, Artificial Sequence
  Description of Artificial Sequence: Synthetic oligonucleotide
  Sense strand starting at position 99 of SEQ ID NO: 914377
augguuucuagacagcaga

SEQ ID NO: 999381 - RNA, 19 nt, Artificial Sequence
  Description of Artificial Sequence: Synthetic oligonucleotide
  Antisense strand to SEQ ID NO: 999380
ucugcugucuagaaaccau

SEQ ID NO: 999382 - RNA, 19 nt, Artificial Sequence
  Description of Artificial Sequence: Synthetic oligonucleotide
  Sense strand starting at position 273 of SEQ ID NO: 914377
uaaggaaaguuuguuucuu

SEQ ID NO: 999383 - RNA, 19 nt, Artificial Sequence
  Description of Artificial Sequence: Synthetic oligonucleotide
  Antisense strand to SEQ ID NO: 999382
aagaaacaaacuuuccuua

SEQ ID NO: 999384 - RNA, 19 nt, Artificial Sequence
  Description of Artificial Sequence: Synthetic oligonucleotide
  Sense strand starting at position 313 of SEQ ID NO: 914377
agaucccaggcaugauuaa

SEQ ID NO: 999385 - RNA, 19 nt, Artificial Sequence
  Description of Artificial Sequence: Synthetic oligonucleotide
  Antisense strand to SEQ ID NO: 999384
uuaaucaugccugggaucu

SEQ ID NO: 999386 - RNA, 19 nt, Artificial Sequence
  Description of Artificial Sequence: Synthetic oligonucleotide
  Sense strand starting at position 581 of SEQ ID NO: 914377
guagguaugggucagggua

SEQ ID NO: 999387 - RNA, 19 nt, Artificial Sequence
  Description of Artificial Sequence: Synthetic oligonucleotide
  Antisense strand to SEQ ID NO: 999386
uacccugacccauaccuac

SEQ ID NO: 999388 - RNA, 19 nt, Artificial Sequence
  Description of Artificial Sequence: Synthetic oligonucleotide
  Sense strand starting at position 844 of SEQ ID NO: 914377
aauaaagacgccuagugaa

SEQ ID NO: 999389 - RNA, 19 nt, Artificial Sequence
  Description of Artificial Sequence: Synthetic oligonucleotide
  Antisense strand to SEQ ID NO: 999388
uucacuaggcgucuuuauu

SEQ ID NO: 999390 - RNA, 19 nt, Artificial Sequence
  Description of Artificial Sequence: Synthetic oligonucleotide
  Sense strand starting at position 857 of SEQ ID NO: 914377
agugaaauaaauggauugu

SEQ ID NO: 999391 - RNA, 19 nt, Artificial Sequence
  Description of Artificial Sequence: Synthetic oligonucleotide
  Antisense strand to SEQ ID NO: 999390
acaauccauuuauuucacu

SEQ ID NO: 999392 - RNA, 19 nt, Artificial Sequence
  Description of Artificial Sequence: Synthetic oligonucleotide
  Sense strand starting at position 996 of SEQ ID NO: 914377
aacuaaguagaguaauugu

SEQ ID NO: 999393 - RNA, 19 nt, Artificial Sequence
  Description of Artificial Sequence: Synthetic oligonucleotide
  Antisense strand to SEQ ID NO: 999392
acaauuacucuacuuaguu

SEQ ID NO: 999394 - RNA, 19 nt, Artificial Sequence
  Description of Artificial Sequence: Synthetic oligonucleotide
  Sense strand starting at position 1308 of SEQ ID NO: 914377
cuguguugugcagccugaa

SEQ ID NO: 999395 - RNA, 19 nt, Artificial Sequence
  Description of Artificial Sequence: Synthetic oligonucleotide
  Antisense strand to SEQ ID NO: 999394
uucaggcugcacaacacag

SEQ ID NO: 999396 - RNA, 19 nt, Artificial Sequence
  Description of Artificial Sequence: Synthetic oligonucleotide
  Sense strand starting at position 1309 of SEQ ID NO: 914377
uguguugugcagccugaau

SEQ ID NO: 999397 - RNA, 19 nt, Artificial Sequence
  Description of Artificial Sequence: Synthetic oligonucleotide
  Antisense strand to SEQ ID NO: 999396
auucaggcugcacaacaca

SEQ ID NO: 999398 - RNA, 19 nt, Artificial Sequence
  Description of Artificial Sequence: Synthetic oligonucleotide
  Sense strand starting at position 1321 of SEQ ID NO: 914377
ccugaauaaugggcgaaau

SEQ ID NO: 999399 - RNA, 19 nt, Artificial Sequence
  Description of Artificial Sequence: Synthetic oligonucleotide
  Antisense strand to SEQ ID NO: 999398
auuucgcccauuauucagg

SEQ ID NO: 999400 - RNA, 19 nt, Artificial Sequence
  Description of Artificial Sequence: Synthetic oligonucleotide
  Sense strand starting at position 1322 of SEQ ID NO: 914377
cugaauaaugggcgaaauc

SEQ ID NO: 999401 - RNA, 19 nt, Artificial Sequence
  Description of Artificial Sequence: Synthetic oligonucleotide
  Antisense strand to SEQ ID NO: 999400
gauuucgcccauuauucag

SEQ ID NO: 999402 - RNA, 19 nt, Artificial Sequence
  Description of Artificial Sequence: Synthetic oligonucleotide
  Sense strand starting at position 1420 of SEQ ID NO: 914377
uuguauccugguuaaauag

SEQ ID NO: 999403 - RNA, 19 nt, Artificial Sequence
  Description of Artificial Sequence: Synthetic oligonucleotide
  Antisense strand to SEQ ID NO: 999402
cuauuuaaccaggauacaa

SEQ ID NO: 999404 - RNA, 19 nt, Artificial Sequence
  Description of Artificial Sequence: Synthetic oligonucleotide
  Sense strand starting at position 1436 of SEQ ID NO: 914377
uaggaaggucucugaagca

SEQ ID NO: 999405 - RNA, 19 nt, Artificial Sequence
  Description of Artificial Sequence: Synthetic oligonucleotide
  Antisense strand to SEQ ID NO: 999404
ugcuucagagaccuuccua

SEQ ID NO: 999406 - RNA, 19 nt, Artificial Sequence
  Description of Artificial Sequence: Synthetic oligonucleotide
  Sense strand starting at position 1451 of SEQ ID NO: 914377
agcacauguccaggaacau

SEQ ID NO: 999407 - RNA, 19 nt, Artificial Sequence
  Description of Artificial Sequence: Synthetic oligonucleotide
  Antisense strand to SEQ ID NO: 999406
auguuccuggacaugugcu

SEQ ID NO: 999408 - RNA, 19 nt, Artificial Sequence
  Description of Artificial Sequence: Synthetic oligonucleotide
  Sense strand starting at position 1452 of SEQ ID NO: 914377
gcacauguccaggaacauu

SEQ ID NO: 999409 - RNA, 19 nt, Artificial Sequence
  Description of Artificial Sequence: Synthetic oligonucleotide
  Antisense strand to SEQ ID NO: 999408
aauguuccuggacaugugc

SEQ ID NO: 999410 - RNA, 19 nt, Artificial Sequence
  Description of Artificial Sequence: Synthetic oligonucleotide
  Sense strand starting at position 1813 of SEQ ID NO: 914377
cgguguuagaugggaagaa

SEQ ID NO: 999411 - RNA, 19 nt, Artificial Sequence
  Description of Artificial Sequence: Synthetic oligonucleotide
  Antisense strand to SEQ ID NO: 999410
uucuucccaucuaacaccg

SEQ ID NO: 999412 - RNA, 19 nt, Artificial Sequence
  Description of Artificial Sequence: Synthetic oligonucleotide
  Sense strand starting at position 2029 of SEQ ID NO: 914377
gcuaauuaacgauaagucu

SEQ ID NO: 999413 - RNA, 19 nt, Artificial Sequence
  Description of Artificial Sequence: Synthetic oligonucleotide
  Antisense strand to SEQ ID NO: 999412
agacuuaucguuaauuagc

SEQ ID NO: 999414 - RNA, 19 nt, Artificial Sequence
  Description of Artificial Sequence: Synthetic oligonucleotide
  Sense strand starting at position 2037 of SEQ ID NO: 914377
acgauaagucuccacgaug

SEQ ID NO: 999415 - RNA, 19 nt, Artificial Sequence
  Description of Artificial Sequence: Synthetic oligonucleotide
  Antisense strand to SEQ ID NO: 999414
caucguggagacuuaucgu

SEQ ID NO: 999416 - RNA, 19 nt, Artificial Sequence
  Description of Artificial Sequence: Synthetic oligonucleotide
  Sense strand starting at position 2116 of SEQ ID NO: 914377
uaggaaagaucuccacguu

SEQ ID NO: 999417 - RNA, 19 nt, Artificial Sequence
  Description of Artificial Sequence: Synthetic oligonucleotide
  Antisense strand to SEQ ID NO: 999416
aacguggagaucuuuccua

SEQ ID NO: 999418 - RNA, 19 nt, Artificial Sequence
  Description of Artificial Sequence: Synthetic oligonucleotide
  Sense strand starting at position 2119 of SEQ ID NO: 914377
gaaagaucuccacguugau

SEQ ID NO: 999419 - RNA, 19 nt, Artificial Sequence
  Description of Artificial Sequence: Synthetic oligonucleotide
  Antisense strand to SEQ ID NO: 999418
aucaacguggagaucuuuc

SEQ ID NO: 999420 - RNA, 19 nt, Artificial Sequence
  Description of Artificial Sequence: Synthetic oligonucleotide
  Sense strand starting at position 2359 of SEQ ID NO: 914377
gggaaugaucagugugaau

SEQ ID NO: 999421 - RNA, 19 nt, Artificial Sequence
  Description of Artificial Sequence: Synthetic oligonucleotide
  Antisense strand to SEQ ID NO: 999420
auucacacugaucauuccc

SEQ ID NO: 999422 - RNA, 19 nt, Artificial Sequence
  Description of Artificial Sequence: Synthetic oligonucleotide
  Sense strand starting at position 2429 of SEQ ID NO: 914377
acaaguuccugaccacagu

SEQ ID NO: 999423 - RNA, 19 nt, Artificial Sequence
  Description of Artificial Sequence: Synthetic oligonucleotide
  Antisense strand to SEQ ID NO: 999422
acuguggucaggaacuugu

SEQ ID NO: 999424 - RNA, 19 nt, Artificial Sequence
  Description of Artificial Sequence: Synthetic oligonucleotide
  Sense strand starting at position 2526 of SEQ ID NO: 914377
aauugaugggcuggaauua

SEQ ID NO: 999425 - RNA, 19 nt, Artificial Sequence
  Description of Artificial Sequence: Synthetic oligonucleotide
  Antisense strand to SEQ ID NO: 999424
uaauuccagcccaucaauu

SEQ ID NO: 999426 - RNA, 19 nt, Artificial Sequence
  Description of Artificial Sequence: Synthetic oligonucleotide
  Sense strand starting at position 2561 of SEQ ID NO: 914377
uugucuuuccuugcuaguu

SEQ ID NO: 999427 - RNA, 19 nt, Artificial Sequence
  Description of Artificial Sequence: Synthetic oligonucleotide
  Antisense strand to SEQ ID NO: 999426
aacuagcaaggaaagacaa

SEQ ID NO: 999428 - RNA, 19 nt, Artificial Sequence
  Description of Artificial Sequence: Synthetic oligonucleotide
  Sense strand starting at position 2656 of SEQ ID NO: 914377
cccagaucugggugacuua

SEQ ID NO: 999429 - RNA, 19 nt, Artificial Sequence
  Description of Artificial Sequence: Synthetic oligonucleotide
  Antisense strand to SEQ ID NO: 999428
uaagucacccagaucuggg

SEQ ID NO: 999430 - RNA, 19 nt, Artificial Sequence
  Description of Artificial Sequence: Synthetic oligonucleotide
  Sense strand starting at position 2665 of SEQ ID NO: 914377
gggugacuuacagaguauu

SEQ ID NO: 999431 - RNA, 19 nt, Artificial Sequence
  Description of Artificial Sequence: Synthetic oligonucleotide
  Antisense strand to SEQ ID NO: 999430
aauacucuguaagucaccc

SEQ ID NO: 999432 - RNA, 19 nt, Artificial Sequence
  Description of Artificial Sequence: Synthetic oligonucleotide
  Sense strand starting at position 2712 of SEQ ID NO: 914377
aguagaaguuucuuacuua

SEQ ID NO: 999433 - RNA, 19 nt, Artificial Sequence
  Description of Artificial Sequence: Synthetic oligonucleotide
  Antisense strand to SEQ ID NO: 999432
uaaguaagaaacuucuacu

SEQ ID NO: 999434 - RNA, 19 nt, Artificial Sequence
  Description of Artificial Sequence: Synthetic oligonucleotide
  Sense strand starting at position 2743 of SEQ ID NO: 914377
aggcuauaagauugaaucu

SEQ ID NO: 999435 - RNA, 19 nt, Artificial Sequence
  Description of Artificial Sequence: Synthetic oligonucleotide
  Antisense strand to SEQ ID NO: 999434
agauucaaucuuauagccu

SEQ ID NO: 999436 - RNA, 19 nt, Artificial Sequence
  Description of Artificial Sequence: Synthetic oligonucleotide
  Sense strand starting at position 2802 of SEQ ID NO: 914377
augugucuugcacaaauua

SEQ ID NO: 999437 - RNA, 19 nt, Artificial Sequence
  Description of Artificial Sequence: Synthetic oligonucleotide
  Antisense strand to SEQ ID NO: 999436
uaauuugugcaagacacau

SEQ ID NO: 999438 - RNA, 19 nt, Artificial Sequence
  Description of Artificial Sequence: Synthetic oligonucleotide
  Sense strand starting at position 2864 of SEQ ID NO: 914377
aaggcaagaucagcuguaa

SEQ ID NO: 999439 - RNA, 19 nt, Artificial Sequence
  Description of Artificial Sequence: Synthetic oligonucleotide
  Antisense strand to SEQ ID NO: 999438
uuacagcugaucuugccuu

SEQ ID NO: 999440 - RNA, 19 nt, Artificial Sequence
  Description of Artificial Sequence: Synthetic oligonucleotide
  Sense strand starting at position 2913 of SEQ ID NO: 914377
uggagacugcuugagucau

SEQ ID NO: 999441 - RNA, 19 nt, Artificial Sequence
  Description of Artificial Sequence: Synthetic oligonucleotide
  Antisense strand to SEQ ID NO: 999440
augacucaagcagucucca

SEQ ID NO: 999442 - RNA, 19 nt, Artificial Sequence
  Description of Artificial Sequence: Synthetic oligonucleotide
  Sense strand starting at position 2915 of SEQ ID NO: 914377
gagacugcuugagucauca

SEQ ID NO: 999443 - RNA, 19 nt, Artificial Sequence
  Description of Artificial Sequence: Synthetic oligonucleotide
  Antisense strand to SEQ ID NO: 999442
ugaugacucaagcagucuc

SEQ ID NO: 999444 - RNA, 19 nt, Artificial Sequence
  Description of Artificial Sequence: Synthetic oligonucleotide
  Sense strand starting at position 2953 of SEQ ID NO: 914377
ucccuuauguuauuugagu

SEQ ID NO: 999445 - RNA, 19 nt, Artificial Sequence
  Description of Artificial Sequence: Synthetic oligonucleotide
  Antisense strand to SEQ ID NO: 999444
acucaaauaacauaaggga

SEQ ID NO: 999446 - RNA, 19 nt, Artificial Sequence
  Description of Artificial Sequence: Synthetic oligonucleotide
  Sense strand starting at position 3018 of SEQ ID NO: 914377
gguagcauccaauaccauu

SEQ ID NO: 999447 - RNA, 19 nt, Artificial Sequence
  Description of Artificial Sequence: Synthetic oligonucleotide
  Antisense strand to SEQ ID NO: 999446
aaugguauuggaugcuacc

SEQ ID NO: 999448 - RNA, 19 nt, Artificial Sequence
  Description of Artificial Sequence: Synthetic oligonucleotide
  Sense strand starting at position 3069 of SEQ ID NO: 914377
gauguagaccaguggagaa

SEQ ID NO: 999449 - RNA, 19 nt, Artificial Sequence
  Description of Artificial Sequence: Synthetic oligonucleotide
  Antisense strand to SEQ ID NO: 999448
uucuccacuggucuacauc

SEQ ID NO: 999450 - RNA, 19 nt, Artificial Sequence
  Description of Artificial Sequence: Synthetic oligonucleotide
  Sense strand starting at position 3093 of SEQ ID NO: 914377
gagggaguuaugcagccua

SEQ ID NO: 999451 - RNA, 19 nt, Artificial Sequence
  Description of Artificial Sequence: Synthetic oligonucleotide
  Antisense strand to SEQ ID NO: 999450
uaggcugcauaacucccuc

SEQ ID NO: 999452 - RNA, 19 nt, Artificial Sequence
  Description of Artificial Sequence: Synthetic oligonucleotide
  Sense strand starting at position 3606 of SEQ ID NO: 914377
ucucuuugaguuuauagaa

SEQ ID NO: 999453 - RNA, 19 nt, Artificial Sequence
  Description of Artificial Sequence: Synthetic oligonucleotide
  Antisense strand to SEQ ID NO: 999452
uucuauaaacucaaagaga

SEQ ID NO: 999454 - RNA, 19 nt, Artificial Sequence
  Description of Artificial Sequence: Synthetic oligonucleotide
  Sense strand starting at position 3765 of SEQ ID NO: 914377
gaaacaugcugggucacua

SEQ ID NO: 999455 - RNA, 19 nt, Artificial Sequence
  Description of Artificial Sequence: Synthetic oligonucleotide
  Antisense strand to SEQ ID NO: 999454
uagugacccagcauguuuc

SEQ ID NO: 999456 - RNA, 19 nt, Artificial Sequence
  Description of Artificial Sequence: Synthetic oligonucleotide
  Sense strand starting at position 326 of SEQ ID NO: 914378
uuacaaguuccugggagac

SEQ ID NO: 999457 - RNA, 19 nt, Artificial Sequence
  Description of Artificial Sequence: Synthetic oligonucleotide
  Antisense strand to SEQ ID NO: 999456
gucucccaggaacuuguaa

SEQ ID NO: 999458 - RNA, 19 nt, Artificial Sequence
  Description of Artificial Sequence: Synthetic oligonucleotide
  Sense strand starting at position 479 of SEQ ID NO: 914378
gcugcacuuauugagggaa

SEQ ID NO: 999459 - RNA, 19 nt, Artificial Sequence
  Description of Artificial Sequence: Synthetic oligonucleotide
  Antisense strand to SEQ ID NO: 999458
uucccucaauaagugcagc

SEQ ID NO: 999460 - RNA, 19 nt, Artificial Sequence
  Description of Artificial Sequence: Synthetic oligonucleotide
  Sense strand starting at position 482 of SEQ ID NO: 914378
gcacuuauugagggaacau

SEQ ID NO: 999461 - RNA, 19 nt, Artificial Sequence
  Description of Artificial Sequence: Synthetic oligonucleotide
  Antisense strand to SEQ ID NO: 999460
auguucccucaauaagugc

SEQ ID NO: 999462 - RNA, 19 nt, Artificial Sequence
  Description of Artificial Sequence: Synthetic oligonucleotide
  Sense strand starting at position 503 of SEQ ID NO: 914378
cagguagagucaguagcaa

SEQ ID NO: 999463 - RNA, 19 nt, Artificial Sequence
  Description of Artificial Sequence: Synthetic oligonucleotide
  Antisense strand to SEQ ID NO: 999462
uugcuacugacucuaccug

SEQ ID NO: 999464 - RNA, 19 nt, Artificial Sequence
  Description of Artificial Sequence: Synthetic oligonucleotide
  Sense strand starting at position 555 of SEQ ID NO: 914378
ggaacaugggucuaagucu

SEQ ID NO: 999465 - RNA, 19 nt, Artificial Sequence
  Description of Artificial Sequence: Synthetic oligonucleotide
  Antisense strand to SEQ ID NO: 999464
agacuuagacccauguucc

SEQ ID NO: 999466 - RNA, 19 nt, Artificial Sequence
  Description of Artificial Sequence: Synthetic oligonucleotide
  Sense strand starting at position 564 of SEQ ID NO: 914378
gucuaagucucagugagaa

SEQ ID NO: 999467 - RNA, 19 nt, Artificial Sequence
  Description of Artificial Sequence: Synthetic oligonucleotide
  Antisense strand to SEQ ID NO: 999466
uucucacugagacuuagac

SEQ ID NO: 999468 - RNA, 19 nt, Artificial Sequence
  Description of Artificial Sequence: Synthetic oligonucleotide
  Sense strand starting at position 595 of SEQ ID NO: 914378
gggauuuggucgucagcau

SEQ ID NO: 999469 - RNA, 19 nt, Artificial Sequence
  Description of Artificial Sequence: Synthetic oligonucleotide
  Antisense strand to SEQ ID NO: 999468
augcugacgaccaaauccc

SEQ ID NO: 999470 - RNA, 19 nt, Artificial Sequence
  Description of Artificial Sequence: Synthetic oligonucleotide
  Sense strand starting at position 735 of SEQ ID NO: 914378
acccgaagugguggagaaa

SEQ ID NO: 999471 - RNA, 19 nt, Artificial Sequence
  Description of Artificial Sequence: Synthetic oligonucleotide
  Antisense strand to SEQ ID NO: 999470
uuucuccaccacuucgggu

SEQ ID NO: 999472 - RNA, 19 nt, Artificial Sequence
  Description of Artificial Sequence: Synthetic oligonucleotide
  Sense strand starting at position 772 of SEQ ID NO: 914378
aaguacugccaaggaguaa

SEQ ID NO: 999473 - RNA, 19 nt, Artificial Sequence
  Description of Artificial Sequence: Synthetic oligonucleotide
  Antisense strand to SEQ ID NO: 999472
uuacuccuuggcaguacuu

SEQ ID NO: 999474 - RNA, 19 nt, Artificial Sequence
  Description of Artificial Sequence: Synthetic oligonucleotide
  Sense strand starting at position 773 of SEQ ID NO: 914378
aguacugccaaggaguaau

SEQ ID NO: 999475 - RNA, 19 nt, Artificial Sequence
  Description of Artificial Sequence: Synthetic oligonucleotide
  Antisense strand to SEQ ID NO: 999474
auuacuccuuggcaguacu

SEQ ID NO: 999476 - RNA, 19 nt, Artificial Sequence
  Description of Artificial Sequence: Synthetic oligonucleotide
  Sense strand starting at position 786 of SEQ ID NO: 914378
aguaauugcacugauagug

SEQ ID NO: 999477 - RNA, 19 nt, Artificial Sequence
  Description of Artificial Sequence: Synthetic oligonucleotide
  Antisense strand to SEQ ID NO: 999476
cacuaucagugcaauuacu

SEQ ID NO: 999478 - RNA, 19 nt, Artificial Sequence
  Description of Artificial Sequence: Synthetic oligonucleotide
  Sense strand starting at position 841 of SEQ ID NO: 914378
acaguccucucagcagaua

SEQ ID NO: 999479 - RNA, 19 nt, Artificial Sequence
  Description of Artificial Sequence: Synthetic oligonucleotide
  Antisense strand to SEQ ID NO: 999478
uaucugcugagaggacugu

SEQ ID NO: 999480 - RNA, 19 nt, Artificial Sequence
  Description of Artificial Sequence: Synthetic oligonucleotide
  Sense strand starting at position 844 of SEQ ID NO: 914378
guccucucagcagauaauc

SEQ ID NO: 999481 - RNA, 19 nt, Artificial Sequence
  Description of Artificial Sequence: Synthetic oligonucleotide
  Antisense strand to SEQ ID NO: 999480
gauuaucugcugagaggac

SEQ ID NO: 999482 - RNA, 19 nt, Artificial Sequence
  Description of Artificial Sequence: Synthetic oligonucleotide
  Sense strand starting at position 921 of SEQ ID NO: 914378
uuuguaguccuuuagaaca

SEQ ID NO: 999483 - RNA, 19 nt, Artificial Sequence
  Description of Artificial Sequence: Synthetic oligonucleotide
  Antisense strand to SEQ ID NO: 999482
uguucuaaaggacuacaaa

SEQ ID NO: 999484 - RNA, 19 nt, Artificial Sequence
  Description of Artificial Sequence: Synthetic oligonucleotide
  Sense strand starting at position 958 of SEQ ID NO: 914378
ccaggaagcuuuguuuaua

SEQ ID NO: 999485 - RNA, 19 nt, Artificial Sequence
  Description of Artificial Sequence: Synthetic oligonucleotide
  Antisense strand to SEQ ID NO: 999484
uauaaacaaagcuuccugg

SEQ ID NO: 999486 - RNA, 19 nt, Artificial Sequence
  Description of Artificial Sequence: Synthetic oligonucleotide
  Sense strand starting at position 959 of SEQ ID NO: 914378
caggaagcuuuguuuauau

SEQ ID NO: 999487 - RNA, 19 nt, Artificial Sequence
  Description of Artificial Sequence: Synthetic oligonucleotide
  Antisense strand to SEQ ID NO: 999486
auauaaacaaagcuuccug

SEQ ID NO: 999488 - RNA, 19 nt, Artificial Sequence
  Description of Artificial Sequence: Synthetic oligonucleotide
  Sense strand starting at position 961 of SEQ ID NO: 914378
ggaagcuuuguuuauaucu

SEQ ID NO: 999489 - RNA, 19 nt, Artificial Sequence
  Description of Artificial Sequence: Synthetic oligonucleotide
  Antisense strand to SEQ ID NO: 999488
agauauaaacaaagcuucc

SEQ ID NO: 999490 - RNA, 19 nt, Artificial Sequence
  Description of Artificial Sequence: Synthetic oligonucleotide
  Sense strand starting at position 978 of SEQ ID NO: 914378
cuauuugccuguucucaua

SEQ ID NO: 999491 - RNA, 19 nt, Artificial Sequence
  Description of Artificial Sequence: Synthetic oligonucleotide
  Antisense strand to SEQ ID NO: 999490
uaugagaacaggcaaauag

SEQ ID NO: 999492 - RNA, 19 nt, Artificial Sequence
  Description of Artificial Sequence: Synthetic oligonucleotide
  Sense strand starting at position 1204 of SEQ ID NO: 914378
ucaaguuguguauaguaag

SEQ ID NO: 999493 - RNA, 19 nt, Artificial Sequence
  Description of Artificial Sequence: Synthetic oligonucleotide
  Antisense strand to SEQ ID NO: 999492
cuuacuauacacaacuuga

SEQ ID NO: 999494 - RNA, 19 nt, Artificial Sequence
  Description of Artificial Sequence: Synthetic oligonucleotide
  Sense strand starting at position 1313 of SEQ ID NO: 914378
ucaucuucccguuaucaag

SEQ ID NO: 999495 - RNA, 19 nt, Artificial Sequence
  Description of Artificial Sequence: Synthetic oligonucleotide
  Antisense strand to SEQ ID NO: 999494
cuugauaacgggaagauga

SEQ ID NO: 999496 - RNA, 19 nt, Artificial Sequence
  Description of Artificial Sequence: Synthetic oligonucleotide
  Sense strand starting at position 1432 of SEQ ID NO: 914378
ccugguucugauuaugagu

SEQ ID NO: 999497 - RNA, 19 nt, Artificial Sequence
  Description of Artificial Sequence: Synthetic oligonucleotide
  Antisense strand to SEQ ID NO: 999496
acucauaaucagaaccagg

SEQ ID NO: 999498 - RNA, 19 nt, Artificial Sequence
  Description of Artificial Sequence: Synthetic oligonucleotide
  Sense strand starting at position 1437 of SEQ ID NO: 914378
uucugauuaugagugaguu

SEQ ID NO: 999499 - RNA, 19 nt, Artificial Sequence
  Description of Artificial Sequence: Synthetic oligonucleotide
  Antisense strand to SEQ ID NO: 999498
aacucacucauaaucagaa

SEQ ID NO: 999500 - RNA, 19 nt, Artificial Sequence
  Description of Artificial Sequence: Synthetic oligonucleotide
  Sense strand starting at position 1438 of SEQ ID NO: 914378
ucugauuaugagugaguua

SEQ ID NO: 999501 - RNA, 19 nt, Artificial Sequence
  Description of Artificial Sequence: Synthetic oligonucleotide
  Antisense strand to SEQ ID NO: 999500
uaacucacucauaaucaga

SEQ ID NO: 999502 - RNA, 19 nt, Artificial Sequence
  Description of Artificial Sequence: Synthetic oligonucleotide
  Sense strand starting at position 1441 of SEQ ID NO: 914378
gauuaugagugaguuaagu

SEQ ID NO: 999503 - RNA, 19 nt, Artificial Sequence
  Description of Artificial Sequence: Synthetic oligonucleotide
  Antisense strand to SEQ ID NO: 999502
acuuaacucacucauaauc

SEQ ID NO: 999504 - RNA, 19 nt, Artificial Sequence
  Description of Artificial Sequence: Synthetic oligonucleotide
  Sense strand starting at position 1443 of SEQ ID NO: 914378
uuaugagugaguuaaguca

SEQ ID NO: 999505 - RNA, 19 nt, Artificial Sequence
  Description of Artificial Sequence: Synthetic oligonucleotide
  Antisense strand to SEQ ID NO: 999504
ugacuuaacucacucauaa

SEQ ID NO: 999506 - RNA, 19 nt, Artificial Sequence
  Description of Artificial Sequence: Synthetic oligonucleotide
  Sense strand starting at position 1752 of SEQ ID NO: 914378
cgcgucaggccgguuaaau

SEQ ID NO: 999507 - RNA, 19 nt, Artificial Sequence
  Description of Artificial Sequence: Synthetic oligonucleotide
  Antisense strand to SEQ ID NO: 999506
auuuaaccggccugacgcg

SEQ ID NO: 999508 - RNA, 19 nt, Artificial Sequence
  Description of Artificial Sequence: Synthetic oligonucleotide
  Sense strand starting at position 1753 of SEQ ID NO: 914378
gcgucaggccgguuaaauc

SEQ ID NO: 999509 - RNA, 19 nt, Artificial Sequence
  Description of Artificial Sequence: Synthetic oligonucleotide
  Antisense strand to SEQ ID NO: 999508
gauuuaaccggccugacgc

SEQ ID NO: 999510 - RNA, 19 nt, Artificial Sequence
  Description of Artificial Sequence: Synthetic oligonucleotide
  Sense strand starting at position 1760 of SEQ ID NO: 914378
gccgguuaaaucucugcuu

SEQ ID NO: 999511 - RNA, 19 nt, Artificial Sequence
  Description of Artificial Sequence: Synthetic oligonucleotide
  Antisense strand to SEQ ID NO: 999510
aagcagagauuuaaccggc

SEQ ID NO: 999512 - RNA, 19 nt, Artificial Sequence
  Description of Artificial Sequence: Synthetic oligonucleotide
  Sense strand starting at position 1890 of SEQ ID NO: 914378
cggagauucccugagagcu

SEQ ID NO: 999513 - RNA, 19 nt, Artificial Sequence
  Description of Artificial Sequence: Synthetic oligonucleotide
  Antisense strand to SEQ ID NO: 999512
agcucucagggaaucuccg

SEQ ID NO: 999514 - RNA, 19 nt, Artificial Sequence
  Description of Artificial Sequence: Synthetic oligonucleotide
  Sense strand starting at position 2393 of SEQ ID NO: 914378
aggcgaagcccugagagaa

SEQ ID NO: 999515 - RNA, 19 nt, Artificial Sequence
  Description of Artificial Sequence: Synthetic oligonucleotide
  Antisense strand to SEQ ID NO: 999514
uucucucagggcuucgccu

SEQ ID NO: 999516 - RNA, 19 nt, Artificial Sequence
  Description of Artificial Sequence: Synthetic oligonucleotide
  Sense strand starting at position 2587 of SEQ ID NO: 914378
acaauaauacugcgauaau

SEQ ID NO: 999517 - RNA, 19 nt, Artificial Sequence
  Description of Artificial Sequence: Synthetic oligonucleotide
  Antisense strand to SEQ ID NO: 999516
auuaucgcaguauuauugu

SEQ ID NO: 999518 - RNA, 19 nt, Artificial Sequence
  Description of Artificial Sequence: Synthetic oligonucleotide
  Sense strand starting at position 2834 of SEQ ID NO: 914378
cagcuaccucuguaaagug

SEQ ID NO: 999519 - RNA, 19 nt, Artificial Sequence
  Description of Artificial Sequence: Synthetic oligonucleotide
  Antisense strand to SEQ ID NO: 999518
cacuuuacagagguagcug

SEQ ID NO: 999520 - RNA, 19 nt, Artificial Sequence
  Description of Artificial Sequence: Synthetic oligonucleotide
  Sense strand starting at position 2904 of SEQ ID NO: 914378
gaggcugacuucucagauu

SEQ ID NO: 999521 - RNA, 19 nt, Artificial Sequence
  Description of Artificial Sequence: Synthetic oligonucleotide
  Antisense strand to SEQ ID NO: 999520
aaucugagaagucagccuc

SEQ ID NO: 999522 - RNA, 19 nt, Artificial Sequence
  Description of Artificial Sequence: Synthetic oligonucleotide
  Sense strand starting at position 2982 of SEQ ID NO: 914378
guuugaacuggcgauauag

SEQ ID NO: 999523 - RNA, 19 nt, Artificial Sequence
  Description of Artificial Sequence: Synthetic oligonucleotide
  Antisense strand to SEQ ID NO: 999522
cuauaucgccaguucaaac

SEQ ID NO: 999524 - RNA, 19 nt, Artificial Sequence
  Description of Artificial Sequence: Synthetic oligonucleotide
  Sense strand starting at position 3054 of SEQ ID NO: 914378
cuuugaagcccuuaugaac

SEQ ID NO: 999525 - RNA, 19 nt, Artificial Sequence
  Description of Artificial Sequence: Synthetic oligonucleotide
  Antisense strand to SEQ ID NO: 999524
guucauaagggcuucaaag

SEQ ID NO: 999526 - RNA, 19 nt, Artificial Sequence
  Description of Artificial Sequence: Synthetic oligonucleotide
  Sense strand starting at position 3516 of SEQ ID NO: 914378
gguugacccagcgggaaua

SEQ ID NO: 999527 - RNA, 19 nt, Artificial Sequence
  Description of Artificial Sequence: Synthetic oligonucleotide
  Antisense strand to SEQ ID NO: 999526
uauucccgcugggucaacc

SEQ ID NO: 999528 - RNA, 19 nt, Artificial Sequence
  Description of Artificial Sequence: Synthetic oligonucleotide
  Sense strand starting at position 3557 of SEQ ID NO: 914378
gugcacaacccauaauaga

SEQ ID NO: 999529 - RNA, 19 nt, Artificial Sequence
  Description of Artificial Sequence: Synthetic oligonucleotide
  Antisense strand to SEQ ID NO: 999528
ucuauuauggguugugcac

SEQ ID NO: 999530 - RNA, 19 nt, Artificial Sequence
  Description of Artificial Sequence: Synthetic oligonucleotide
  Sense strand starting at position 3741 of SEQ ID NO: 914378
gcaccauguccacaucgau

SEQ ID NO: 999531 - RNA, 19 nt, Artificial Sequence
  Description of Artificial Sequence: Synthetic oligonucleotide
  Antisense strand to SEQ ID NO: 999530
aucgauguggacauggugc

SEQ ID NO: 999532 - RNA, 19 nt, Artificial Sequence
  Description of Artificial Sequence: Synthetic oligonucleotide
  Sense strand starting at position 3753 of SEQ ID NO: 914378
caucgaucaccagggcaua

SEQ ID NO: 999533 - RNA, 19 nt, Artificial Sequence
  Description of Artificial Sequence: Synthetic oligonucleotide
  Antisense strand to SEQ ID NO: 999532
uaugcccuggugaucgaug

SEQ ID NO: 999534 - RNA, 19 nt, Artificial Sequence
  Description of Artificial Sequence: Synthetic oligonucleotide
  Sense strand starting at position 3790 of SEQ ID NO: 914378
cagauuccucagcagguua

SEQ ID NO: 999535 - RNA, 19 nt, Artificial Sequence
  Description of Artificial Sequence: Synthetic oligonucleotide
  Antisense strand to SEQ ID NO: 999534
uaaccugcugaggaaucug

SEQ ID NO: 999536 - RNA, 19 nt, Artificial Sequence
  Description of Artificial Sequence: Synthetic oligonucleotide
  Sense strand starting at position 71 of SEQ ID NO: 914379
cgcagauguuuccuuauaa

SEQ ID NO: 999537 - RNA, 19 nt, Artificial Sequence
  Description of Artificial Sequence: Synthetic oligonucleotide
  Antisense strand to SEQ ID NO: 999536
uuauaaggaaacaucugcg

SEQ ID NO: 999538 - RNA, 19 nt, Artificial Sequence
  Description of Artificial Sequence: Synthetic oligonucleotide
  Sense strand starting at position 72 of SEQ ID NO: 914379
gcagauguuuccuuauaau

SEQ ID NO: 999539 - RNA, 19 nt, Artificial Sequence
  Description of Artificial Sequence: Synthetic oligonucleotide
  Antisense strand to SEQ ID NO: 999538
auuauaaggaaacaucugc

SEQ ID NO: 999540 - RNA, 19 nt, Artificial Sequence
  Description of Artificial Sequence: Synthetic oligonucleotide
  Sense strand starting at position 106 of SEQ ID NO: 914379
ccguaauuggauuaucuca

SEQ ID NO: 999541 - RNA, 19 nt, Artificial Sequence
  Description of Artificial Sequence: Synthetic oligonucleotide
  Antisense strand to SEQ ID NO: 999540
ugagauaauccaauuacgg

SEQ ID NO: 999542 - RNA, 19 nt, Artificial Sequence
  Description of Artificial Sequence: Synthetic oligonucleotide
  Sense strand starting at position 108 of SEQ ID NO: 914379
guaauuggauuaucucacu

SEQ ID NO: 999543 - RNA, 19 nt, Artificial Sequence
  Description of Artificial Sequence: Synthetic oligonucleotide
  Antisense strand to SEQ ID NO: 999542
agugagauaauccaauuac

SEQ ID NO: 999544 - RNA, 19 nt, Artificial Sequence
  Description of Artificial Sequence: Synthetic oligonucleotide
  Sense strand starting at position 111 of SEQ ID NO: 914379
auuggauuaucucacugac

SEQ ID NO: 999545 - RNA, 19 nt, Artificial Sequence
  Description of Artificial Sequence: Synthetic oligonucleotide
  Antisense strand to SEQ ID NO: 999544
gucagugagauaauccaau

SEQ ID NO: 999546 - RNA, 19 nt, Artificial Sequence
  Description of Artificial Sequence: Synthetic oligonucleotide
  Sense strand starting at position 113 of SEQ ID NO: 914379
uggauuaucucacugacuc

SEQ ID NO: 999547 - RNA, 19 nt, Artificial Sequence
  Description of Artificial Sequence: Synthetic oligonucleotide
  Antisense strand to SEQ ID NO: 999546
gagucagugagauaaucca

SEQ ID NO: 999548 - RNA, 19 nt, Artificial Sequence
  Description of Artificial Sequence: Synthetic oligonucleotide
  Sense strand starting at position 209 of SEQ ID NO: 914379
uuugaacucaggugacaug

SEQ ID NO: 999549 - RNA, 19 nt, Artificial Sequence
  Description of Artificial Sequence: Synthetic oligonucleotide
  Antisense strand to SEQ ID NO: 999548
caugucaccugaguucaaa

SEQ ID NO: 999550 - RNA, 19 nt, Artificial Sequence
  Description of Artificial Sequence: Synthetic oligonucleotide
  Sense strand starting at position 386 of SEQ ID NO: 914379
ugcagcucugccguaguua

SEQ ID NO: 999551 - RNA, 19 nt, Artificial Sequence
  Description of Artificial Sequence: Synthetic oligonucleotide
  Antisense strand to SEQ ID NO: 999550
uaacuacggcagagcugca

SEQ ID NO: 999552 - RNA, 19 nt, Artificial Sequence
  Description of Artificial Sequence: Synthetic oligonucleotide
  Sense strand starting at position 564 of SEQ ID NO: 914379
uaaggaacuucucggauug

SEQ ID NO: 999553 - RNA, 19 nt, Artificial Sequence
  Description of Artificial Sequence: Synthetic oligonucleotide
  Antisense strand to SEQ ID NO: 999552
caauccgagaaguuccuua

SEQ ID NO: 999554 - RNA, 19 nt, Artificial Sequence
  Description of Artificial Sequence: Synthetic oligonucleotide
  Sense strand starting at position 687 of SEQ ID NO: 914379
gugaaugugccugaccaga

SEQ ID NO: 999555 - RNA, 19 nt, Artificial Sequence
  Description of Artificial Sequence: Synthetic oligonucleotide
  Antisense strand to SEQ ID NO: 999554
ucuggucaggcacauucac

SEQ ID NO: 999556 - RNA, 19 nt, Artificial Sequence
  Description of Artificial Sequence: Synthetic oligonucleotide
  Sense strand starting at position 736 of SEQ ID NO: 914379
gagaguuggccacaugcga

SEQ ID NO: 999557 - RNA, 19 nt, Artificial Sequence
  Description of Artificial Sequence: Synthetic oligonucleotide
  Antisense strand to SEQ ID NO: 999556
ucgcauguggccaacucuc

SEQ ID NO: 999558 - RNA, 19 nt, Artificial Sequence
  Description of Artificial Sequence: Synthetic oligonucleotide
  Sense strand starting at position 799 of SEQ ID NO: 914379
ccggccuguucccuagaau

SEQ ID NO: 999559 - RNA, 19 nt, Artificial Sequence
  Description of Artificial Sequence: Synthetic oligonucleotide
  Antisense strand to SEQ ID NO: 999558
auucuagggaacaggccgg

SEQ ID NO: 999560 - RNA, 19 nt, Artificial Sequence
  Description of Artificial Sequence: Synthetic oligonucleotide
  Sense strand starting at position 800 of SEQ ID NO: 914379
cggccuguucccuagaaug

SEQ ID NO: 999561 - RNA, 19 nt, Artificial Sequence
  Description of Artificial Sequence: Synthetic oligonucleotide
  Antisense strand to SEQ ID NO: 999560
cauucuagggaacaggccg

SEQ ID NO: 999562 - RNA, 19 nt, Artificial Sequence
  Description of Artificial Sequence: Synthetic oligonucleotide
  Sense strand starting at position 802 of SEQ ID NO: 914379
gccuguucccuagaaugac

SEQ ID NO: 999563 - RNA, 19 nt, Artificial Sequence
  Description of Artificial Sequence: Synthetic oligonucleotide
  Antisense strand to SEQ ID NO: 999562
gucauucuagggaacaggc

SEQ ID NO: 999564 - RNA, 19 nt, Artificial Sequence
  Description of Artificial Sequence: Synthetic oligonucleotide
  Sense strand starting at position 2833 of SEQ ID NO: 914379
gggcguuguccaagcagag

SEQ ID NO: 999565 - RNA, 19 nt, Artificial Sequence
  Description of Artificial Sequence: Synthetic oligonucleotide
  Antisense strand to SEQ ID NO: 999564
cucugcuuggacaacgccc

SEQ ID NO: 999566 - RNA, 19 nt, Artificial Sequence
  Description of Artificial Sequence: Synthetic oligonucleotide
  Sense strand starting at position 3053 of SEQ ID NO: 914379
gcagccuuuggaggucuaa

SEQ ID NO: 999567 - RNA, 19 nt, Artificial Sequence
  Description of Artificial Sequence: Synthetic oligonucleotide
  Antisense strand to SEQ ID NO: 999566
uuagaccuccaaaggcugc

SEQ ID NO: 999568 - RNA, 19 nt, Artificial Sequence
  Description of Artificial Sequence: Synthetic oligonucleotide
  Sense strand starting at position 3109 of SEQ ID NO: 914379
cccucuguuucuuugcaga

SEQ ID NO: 999569 - RNA, 19 nt, Artificial Sequence
  Description of Artificial Sequence: Synthetic oligonucleotide
  Antisense strand to SEQ ID NO: 999568
ucugcaaagaaacagaggg

SEQ ID NO: 999570 - RNA, 19 nt, Artificial Sequence
  Description of Artificial Sequence: Synthetic oligonucleotide
  Sense strand starting at position 3217 of SEQ ID NO: 914379
cccagaucuugcccgugua

SEQ ID NO: 999571 - RNA, 19 nt, Artificial Sequence
  Description of Artificial Sequence: Synthetic oligonucleotide
  Antisense strand to SEQ ID NO: 999570
uacacgggcaagaucuggg

SEQ ID NO: 999572 - RNA, 19 nt, Artificial Sequence
  Description of Artificial Sequence: Synthetic oligonucleotide
  Sense strand starting at position 3218 of SEQ ID NO: 914379
ccagaucuugcccguguau

SEQ ID NO: 999573 - RNA, 19 nt, Artificial Sequence
  Description of Artificial Sequence: Synthetic oligonucleotide
  Antisense strand to SEQ ID NO: 999572
auacacgggcaagaucugg

SEQ ID NO: 999574 - RNA, 19 nt, Artificial Sequence
  Description of Artificial Sequence: Synthetic oligonucleotide
  Sense strand starting at position 3231 of SEQ ID NO: 914379
guguauggucugcgggcaa

SEQ ID NO: 999575 - RNA, 19 nt, Artificial Sequence
  Description of Artificial Sequence: Synthetic oligonucleotide
  Antisense strand to SEQ ID NO: 999574
uugcccgcagaccauacac

SEQ ID NO: 999576 - RNA, 19 nt, Artificial Sequence
  Description of Artificial Sequence: Synthetic oligonucleotide
  Sense strand starting at position 3314 of SEQ ID NO: 914379
cccguaugagcucaggaaa

SEQ ID NO: 999577 - RNA, 19 nt, Artificial Sequence
  Description of Artificial Sequence: Synthetic oligonucleotide
  Antisense strand to SEQ ID NO: 999576
uuuccugagcucauacggg

SEQ ID NO: 999578 - RNA, 19 nt, Artificial Sequence
  Description of Artificial Sequence: Synthetic oligonucleotide
  Sense strand starting at position 3782 of SEQ ID NO: 914379
gggcacuugaccugagaug

SEQ ID NO: 999579 - RNA, 19 nt, Artificial Sequence
  Description of Artificial Sequence: Synthetic oligonucleotide
  Antisense strand to SEQ ID NO: 999578
caucucaggucaagugccc

SEQ ID NO: 999580 - RNA, 19 nt, Artificial Sequence
  Description of Artificial Sequence: Synthetic oligonucleotide
  Sense strand starting at position 3885 of SEQ ID NO: 914379
gcccuauugaccguuugca

SEQ ID NO: 999581 - RNA, 19 nt, Artificial Sequence
  Description of Artificial Sequence: Synthetic oligonucleotide
  Antisense strand to SEQ ID NO: 999580
ugcaaacggucaauagggc

SEQ ID NO: 999582 - RNA, 19 nt, Artificial Sequence
  Description of Artificial Sequence: Synthetic oligonucleotide
  Sense strand starting at position 1312 of SEQ ID NO: 914380
gcaggagccucuccacaua

SEQ ID NO: 999583 - RNA, 19 nt, Artificial Sequence
  Description of Artificial Sequence: Synthetic oligonucleotide
  Antisense strand to SEQ ID NO: 999582
uauguggagaggcuccugc

SEQ ID NO: 999584 - RNA, 19 nt, Artificial Sequence
  Description of Artificial Sequence: Synthetic oligonucleotide
  Sense strand starting at position 3432 of SEQ ID NO: 914380
aaagcacacgcgugugaaa

SEQ ID NO: 999585 - RNA, 19 nt, Artificial Sequence
  Description of Artificial Sequence: Synthetic oligonucleotide
  Antisense strand to SEQ ID NO: 999584
uuucacacgcgugugcuuu

SEQ ID NO: 999586 - RNA, 19 nt, Artificial Sequence
  Description of Artificial Sequence: Synthetic oligonucleotide
  Sense strand starting at position 3717 of SEQ ID NO: 914380
cugaccaguucguuacaaa

SEQ ID NO: 999587 - RNA, 19 nt, Artificial Sequence
  Description of Artificial Sequence: Synthetic oligonucleotide
  Antisense strand to SEQ ID NO: 999586
uuuguaacgaacuggucag

SEQ ID NO: 999588 - RNA, 19 nt, Artificial Sequence
  Description of Artificial Sequence: Synthetic oligonucleotide
  Sense strand starting at position 3772 of SEQ ID NO: 914380
acagguaaaucgcuaagga

SEQ ID NO: 999589 - RNA, 19 nt, Artificial Sequence
  Description of Artificial Sequence: Synthetic oligonucleotide
  Antisense strand to SEQ ID NO: 999588
uccuuagcgauuuaccugu

SEQ ID NO: 999590 - RNA, 19 nt, Artificial Sequence
  Description of Artificial Sequence: Synthetic oligonucleotide
  Sense strand starting at position 3773 of SEQ ID NO: 914380
cagguaaaucgcuaaggaa

SEQ ID NO: 999591 - RNA, 19 nt, Artificial Sequence
  Description of Artificial Sequence: Synthetic oligonucleotide
  Antisense strand to SEQ ID NO: 999590
uuccuuagcgauuuaccug

SEQ ID NO: 999592 - RNA, 19 nt, Artificial Sequence
  Description of Artificial Sequence: Synthetic oligonucleotide
  Sense strand starting at position 3776 of SEQ ID NO: 914380
guaaaucgcuaaggaaaca

SEQ ID NO: 999593 - RNA, 19 nt, Artificial Sequence
  Description of Artificial Sequence: Synthetic oligonucleotide
  Antisense strand to SEQ ID NO: 999592
uguuuccuuagcgauuuac

SEQ ID NO: 999594 - RNA, 19 nt, Artificial Sequence
  Description of Artificial Sequence: Synthetic oligonucleotide
  Sense strand starting at position 603 of SEQ ID NO: 914381
gcaggagccucuccacaua

SEQ ID NO: 999595 - RNA, 19 nt, Artificial Sequence
  Description of Artificial Sequence: Synthetic oligonucleotide
  Antisense strand to SEQ ID NO: 999594
uauguggagaggcuccugc

SEQ ID NO: 999596 - RNA, 19 nt, Artificial Sequence
  Description of Artificial Sequence: Synthetic oligonucleotide
  Sense strand starting at position 2723 of SEQ ID NO: 914381
aaagcacacgcgugugaaa

SEQ ID NO: 999597 - RNA, 19 nt, Artificial Sequence
  Description of Artificial Sequence: Synthetic oligonucleotide
  Antisense strand to SEQ ID NO: 999596
uuucacacgcgugugcuuu

SEQ ID NO: 999598 - RNA, 19 nt, Artificial Sequence
  Description of Artificial Sequence: Synthetic oligonucleotide
  Sense strand starting at position 3008 of SEQ ID NO: 914381
cugaccaguucguuacaaa

SEQ ID NO: 999599 - RNA, 19 nt, Artificial Sequence
  Description of Artificial Sequence: Synthetic oligonucleotide
  Antisense strand to SEQ ID NO: 999598
uuuguaacgaacuggucag

SEQ ID NO: 999600 - RNA, 19 nt, Artificial Sequence
  Description of Artificial Sequence: Synthetic oligonucleotide
  Sense strand starting at position 3063 of SEQ ID NO: 914381
acagguaaaucgcuaagga

SEQ ID NO: 999601 - RNA, 19 nt, Artificial Sequence
  Description of Artificial Sequence: Synthetic oligonucleotide
  Antisense strand to SEQ ID NO: 999600
uccuuagcgauuuaccugu

SEQ ID NO: 999602 - RNA, 19 nt, Artificial Sequence
  Description of Artificial Sequence: Synthetic oligonucleotide
  Sense strand starting at position 3064 of SEQ ID NO: 914381
cagguaaaucgcuaaggaa

SEQ ID NO: 999603 - RNA, 19 nt, Artificial Sequence
  Description of Artificial Sequence: Synthetic oligonucleotide
  Antisense strand to SEQ ID NO: 999602
uuccuuagcgauuuaccug

SEQ ID NO: 999604 - RNA, 19 nt, Artificial Sequence
  Description of Artificial Sequence: Synthetic oligonucleotide
  Sense strand starting at position 3067 of SEQ ID NO: 914381
guaaaucgcuaaggaaaca

SEQ ID NO: 999605 - RNA, 19 nt, Artificial Sequence
  Description of Artificial Sequence: Synthetic oligonucleotide
  Antisense strand to SEQ ID NO: 999604
uguuuccuuagcgauuuac

SEQ ID NO: 999606 - RNA, 19 nt, Artificial Sequence
  Description of Artificial Sequence: Synthetic oligonucleotide
  Sense strand starting at position 3781 of SEQ ID NO: 914381
ggaggguuccgacgugaac

SEQ ID NO: 999607 - RNA, 19 nt, Artificial Sequence
  Description of Artificial Sequence: Synthetic oligonucleotide
  Antisense strand to SEQ ID NO: 999606
guucacgucggaacccucc

SEQ ID NO: 999608 - RNA, 19 nt, Artificial Sequence
  Description of Artificial Sequence: Synthetic oligonucleotide
  Sense strand starting at position 3818 of SEQ ID NO: 914381
guugagggucugcgaugaa

SEQ ID NO: 999609 - RNA, 19 nt, Artificial Sequence
  Description of Artificial Sequence: Synthetic oligonucleotide
  Antisense strand to SEQ ID NO: 999608
uucaucgcagacccucaac

SEQ ID NO: 999610 - RNA, 19 nt, Artificial Sequence
  Description of Artificial Sequence: Synthetic oligonucleotide
  Sense strand starting at position 3821 of SEQ ID NO: 914381
gagggucugcgaugaauuc

SEQ ID NO: 999611 - RNA, 19 nt, Artificial Sequence
  Description of Artificial Sequence: Synthetic oligonucleotide
  Antisense strand to SEQ ID NO: 999610
gaauucaucgcagacccuc

SEQ ID NO: 999612 - RNA, 19 nt, Artificial Sequence
  Description of Artificial Sequence: Synthetic oligonucleotide
  Sense strand starting at position 3918 of SEQ ID NO: 914381
aggugucuccugggaagau

SEQ ID NO: 999613 - RNA, 19 nt, Artificial Sequence
  Description of Artificial Sequence: Synthetic oligonucleotide
  Antisense strand to SEQ ID NO: 999612
aucuucccaggagacaccu

SEQ ID NO: 999614 - RNA, 19 nt, Artificial Sequence
  Description of Artificial Sequence: Synthetic oligonucleotide
  Sense strand starting at position 3919 of SEQ ID NO: 914381
ggugucuccugggaagaug

SEQ ID NO: 999615 - RNA, 19 nt, Artificial Sequence
  Description of Artificial Sequence: Synthetic oligonucleotide
  Antisense strand to SEQ ID NO: 999614
caucuucccaggagacacc

SEQ ID NO: 999616 - RNA, 19 nt, Artificial Sequence
  Description of Artificial Sequence: Synthetic oligonucleotide
  Sense strand starting at position 35 of SEQ ID NO: 914382
auggccuuucuccaaauga

SEQ ID NO: 999617 - RNA, 19 nt, Artificial Sequence
  Description of Artificial Sequence: Synthetic oligonucleotide
  Antisense strand to SEQ ID NO: 999616
ucauuuggagaaaggccau

SEQ ID NO: 999618 - RNA, 19 nt, Artificial Sequence
  Description of Artificial Sequence: Synthetic oligonucleotide
  Sense strand starting at position 110 of SEQ ID NO: 914382
agugcuaaaucuccucagu

SEQ ID NO: 999619 - RNA, 19 nt, Artificial Sequence
  Description of Artificial Sequence: Synthetic oligonucleotide
  Antisense strand to SEQ ID NO: 999618
acugaggagauuuagcacu

SEQ ID NO: 999620 - RNA, 19 nt, Artificial Sequence
  Description of Artificial Sequence: Synthetic oligonucleotide
  Sense strand starting at position 113 of SEQ ID NO: 914382
gcuaaaucuccucagugga

SEQ ID NO: 999621 - RNA, 19 nt, Artificial Sequence
  Description of Artificial Sequence: Synthetic oligonucleotide
  Antisense strand to SEQ ID NO: 999620
uccacugaggagauuuagc

SEQ ID NO: 999622 - RNA, 19 nt, Artificial Sequence
  Description of Artificial Sequence: Synthetic oligonucleotide
  Sense strand starting at position 144 of SEQ ID NO: 914382
gucauuugaugcugggaca

SEQ ID NO: 999623 - RNA, 19 nt, Artificial Sequence
  Description of Artificial Sequence: Synthetic oligonucleotide
  Antisense strand to SEQ ID NO: 999622
ugucccagcaucaaaugac

SEQ ID NO: 999624 - RNA, 19 nt, Artificial Sequence
  Description of Artificial Sequence: Synthetic oligonucleotide
  Sense strand starting at position 207 of SEQ ID NO: 914382
accuuacgauucuuagaaa

SEQ ID NO: 999625 - RNA, 19 nt, Artificial Sequence
  Description of Artificial Sequence: Synthetic oligonucleotide
  Antisense strand to SEQ ID NO: 999624
uuucuaagaaucguaaggu

SEQ ID NO: 999626 - RNA, 19 nt, Artificial Sequence
  Description of Artificial Sequence: Synthetic oligonucleotide
  Sense strand starting at position 208 of SEQ ID NO: 914382
ccuuacgauucuuagaaag

SEQ ID NO: 999627 - RNA, 19 nt, Artificial Sequence
  Description of Artificial Sequence: Synthetic oligonucleotide
  Antisense strand to SEQ ID NO: 999626
cuuucuaagaaucguaagg

SEQ ID NO: 999628 - RNA, 19 nt, Artificial Sequence
  Description of Artificial Sequence: Synthetic oligonucleotide
  Sense strand starting at position 210 of SEQ ID NO: 914382
uuacgauucuuagaaagag

SEQ ID NO: 999629 - RNA, 19 nt, Artificial Sequence
  Description of Artificial Sequence: Synthetic oligonucleotide
  Antisense strand to SEQ ID NO: 999628
cucuuucuaagaaucguaa

SEQ ID NO: 999630 - RNA, 19 nt, Artificial Sequence
  Description of Artificial Sequence: Synthetic oligonucleotide
  Sense strand starting at position 328 of SEQ ID NO: 914382
gccuuagaguagccacaau

SEQ ID NO: 999631 - RNA, 19 nt, Artificial Sequence
  Description of Artificial Sequence: Synthetic oligonucleotide
  Antisense strand to SEQ ID NO: 999630
auuguggcuacucuaaggc

SEQ ID NO: 999632 - RNA, 19 nt, Artificial Sequence
  Description of Artificial Sequence: Synthetic oligonucleotide
  Sense strand starting at position 341 of SEQ ID NO: 914382
cacaauugcuucccgaguu

SEQ ID NO: 999633 - RNA, 19 nt, Artificial Sequence
  Description of Artificial Sequence: Synthetic oligonucleotide
  Antisense strand to SEQ ID NO: 999632
aacucgggaagcaauugug

SEQ ID NO: 999634 - RNA, 19 nt, Artificial Sequence
  Description of Artificial Sequence: Synthetic oligonucleotide
  Sense strand starting at position 774 of SEQ ID NO: 914382
uccgguuaccgugaccaaa

SEQ ID NO: 999635 - RNA, 19 nt, Artificial Sequence
  Description of Artificial Sequence: Synthetic oligonucleotide
  Antisense strand to SEQ ID NO: 999634
uuuggucacgguaaccgga

SEQ ID NO: 999636 - RNA, 19 nt, Artificial Sequence
  Description of Artificial Sequence: Synthetic oligonucleotide
  Sense strand starting at position 1198 of SEQ ID NO: 914382
uuuguagacgucuaaucac

SEQ ID NO: 999637 - RNA, 19 nt, Artificial Sequence
  Description of Artificial Sequence: Synthetic oligonucleotide
  Antisense strand to SEQ ID NO: 999636
gugauuagacgucuacaaa

SEQ ID NO: 999638 - RNA, 19 nt, Artificial Sequence
  Description of Artificial Sequence: Synthetic oligonucleotide
  Sense strand starting at position 1243 of SEQ ID NO: 914382
gccaguguuguguacaucu

SEQ ID NO: 999639 - RNA, 19 nt, Artificial Sequence
  Description of Artificial Sequence: Synthetic oligonucleotide
  Antisense strand to SEQ ID NO: 999638
agauguacacaacacuggc

SEQ ID NO: 999640 - RNA, 19 nt, Artificial Sequence
  Description of Artificial Sequence: Synthetic oligonucleotide
  Sense strand starting at position 1245 of SEQ ID NO: 914382
caguguuguguacaucuuu

SEQ ID NO: 999641 - RNA, 19 nt, Artificial Sequence
  Description of Artificial Sequence: Synthetic oligonucleotide
  Antisense strand to SEQ ID NO: 999640
aaagauguacacaacacug

SEQ ID NO: 999642 - RNA, 19 nt, Artificial Sequence
  Description of Artificial Sequence: Synthetic oligonucleotide
  Sense strand starting at position 1250 of SEQ ID NO: 914382
uuguguacaucuuugcaca

SEQ ID NO: 999643 - RNA, 19 nt, Artificial Sequence
  Description of Artificial Sequence: Synthetic oligonucleotide
  Antisense strand to SEQ ID NO: 999642
ugugcaaagauguacacaa

SEQ ID NO: 999644 - RNA, 19 nt, Artificial Sequence
  Description of Artificial Sequence: Synthetic oligonucleotide
  Sense strand starting at position 1276 of SEQ ID NO: 914382
gggcgugggaaguaaucua

SEQ ID NO: 999645 - RNA, 19 nt, Artificial Sequence
  Description of Artificial Sequence: Synthetic oligonucleotide
  Antisense strand to SEQ ID NO: 999644
uagauuacuucccacgccc

SEQ ID NO: 999646 - RNA, 19 nt, Artificial Sequence
  Description of Artificial Sequence: Synthetic oligonucleotide
  Sense strand starting at position 1361 of SEQ ID NO: 914382
uccaguauauuucugcuga

SEQ ID NO: 999647 - RNA, 19 nt, Artificial Sequence
  Description of Artificial Sequence: Synthetic oligonucleotide
  Antisense strand to SEQ ID NO: 999646
ucagcagaaauauacugga

SEQ ID NO: 999648 - RNA, 19 nt, Artificial Sequence
  Description of Artificial Sequence: Synthetic oligonucleotide
  Sense strand starting at position 1362 of SEQ ID NO: 914382
ccaguauauuucugcugac

SEQ ID NO: 999649 - RNA, 19 nt, Artificial Sequence
  Description of Artificial Sequence: Synthetic oligonucleotide
  Antisense strand to SEQ ID NO: 999648
gucagcagaaauauacugg

SEQ ID NO: 999650 - RNA, 19 nt, Artificial Sequence
  Description of Artificial Sequence: Synthetic oligonucleotide
  Sense strand starting at position 1481 of SEQ ID NO: 914382
guagacaucuuccugacga

SEQ ID NO: 999651 - RNA, 19 nt, Artificial Sequence
  Description of Artificial Sequence: Synthetic oligonucleotide
  Antisense strand to SEQ ID NO: 999650
ucgucaggaagaugucuac

SEQ ID NO: 999652 - RNA, 19 nt, Artificial Sequence
  Description of Artificial Sequence: Synthetic oligonucleotide
  Sense strand starting at position 1514 of SEQ ID NO: 914382
uggaucuuccacugaguca

SEQ ID NO: 999653 - RNA, 19 nt, Artificial Sequence
  Description of Artificial Sequence: Synthetic oligonucleotide
  Antisense strand to SEQ ID NO: 999652
ugacucaguggaagaucca

SEQ ID NO: 999654 - RNA, 19 nt, Artificial Sequence
  Description of Artificial Sequence: Synthetic oligonucleotide
  Sense strand starting at position 1642 of SEQ ID NO: 914382
ugcuaagugcugugucaga

SEQ ID NO: 999655 - RNA, 19 nt, Artificial Sequence
  Description of Artificial Sequence: Synthetic oligonucleotide
  Antisense strand to SEQ ID NO: 999654
ucugacacagcacuuagca

SEQ ID NO: 999656 - RNA, 19 nt, Artificial Sequence
  Description of Artificial Sequence: Synthetic oligonucleotide
  Sense strand starting at position 1693 of SEQ ID NO: 914382
cccagcugaugucagauuu

SEQ ID NO: 999657 - RNA, 19 nt, Artificial Sequence
  Description of Artificial Sequence: Synthetic oligonucleotide
  Antisense strand to SEQ ID NO: 999656
aaaucugacaucagcuggg

SEQ ID NO: 999658 - RNA, 19 nt, Artificial Sequence
  Description of Artificial Sequence: Synthetic oligonucleotide
  Sense strand starting at position 1839 of SEQ ID NO: 914382
gagucaggaugccugcaau

SEQ ID NO: 999659 - RNA, 19 nt, Artificial Sequence
  Description of Artificial Sequence: Synthetic oligonucleotide
  Antisense strand to SEQ ID NO: 999658
auugcaggcauccugacuc

SEQ ID NO: 999660 - RNA, 19 nt, Artificial Sequence
  Description of Artificial Sequence: Synthetic oligonucleotide
  Sense strand starting at position 2193 of SEQ ID NO: 914382
ccgcuuguggcuucaggua

SEQ ID NO: 999661 - RNA, 19 nt, Artificial Sequence
  Description of Artificial Sequence: Synthetic oligonucleotide
  Antisense strand to SEQ ID NO: 999660
uaccugaagccacaagcgg

SEQ ID NO: 999662 - RNA, 19 nt, Artificial Sequence
  Description of Artificial Sequence: Synthetic oligonucleotide
  Sense strand starting at position 2285 of SEQ ID NO: 914382
gguugaggucuucagagcu

SEQ ID NO: 999663 - RNA, 19 nt, Artificial Sequence
  Description of Artificial Sequence: Synthetic oligonucleotide
  Antisense strand to SEQ ID NO: 999662
agcucugaagaccucaacc

SEQ ID NO: 999664 - RNA, 19 nt, Artificial Sequence
  Description of Artificial Sequence: Synthetic oligonucleotide
  Sense strand starting at position 2333 of SEQ ID NO: 914382
agccuuaaaucauuugugu

SEQ ID NO: 999665 - RNA, 19 nt, Artificial Sequence
  Description of Artificial Sequence: Synthetic oligonucleotide
  Antisense strand to SEQ ID NO: 999664
acacaaaugauuuaaggcu

SEQ ID NO: 999666 - RNA, 19 nt, Artificial Sequence
  Description of Artificial Sequence: Synthetic oligonucleotide
  Sense strand starting at position 2342 of SEQ ID NO: 914382
ucauuuguguaagguuuaa

SEQ ID NO: 999667 - RNA, 19 nt, Artificial Sequence
  Description of Artificial Sequence: Synthetic oligonucleotide
  Antisense strand to SEQ ID NO: 999666
uuaaaccuuacacaaauga

SEQ ID NO: 999668 - RNA, 19 nt, Artificial Sequence
  Description of Artificial Sequence: Synthetic oligonucleotide
  Sense strand starting at position 2346 of SEQ ID NO: 914382
uuguguaagguuuaaugau

SEQ ID NO: 999669 - RNA, 19 nt, Artificial Sequence
  Description of Artificial Sequence: Synthetic oligonucleotide
  Antisense strand to SEQ ID NO: 999668
aucauuaaaccuuacacaa

SEQ ID NO: 999670 - RNA, 19 nt, Artificial Sequence
  Description of Artificial Sequence: Synthetic oligonucleotide
  Sense strand starting at position 2356 of SEQ ID NO: 914382
uuuaaugaucuguggccca

SEQ ID NO: 999671 - RNA, 19 nt, Artificial Sequence
  Description of Artificial Sequence: Synthetic oligonucleotide
  Antisense strand to SEQ ID NO: 999670
ugggccacagaucauuaaa

SEQ ID NO: 999672 - RNA, 19 nt, Artificial Sequence
  Description of Artificial Sequence: Synthetic oligonucleotide
  Sense strand starting at position 2497 of SEQ ID NO: 914382
ugaccacagccuuguaaag

SEQ ID NO: 999673 - RNA, 19 nt, Artificial Sequence
  Description of Artificial Sequence: Synthetic oligonucleotide
  Antisense strand to SEQ ID NO: 999672
cuuuacaaggcugugguca

SEQ ID NO: 999674 - RNA, 19 nt, Artificial Sequence
  Description of Artificial Sequence: Synthetic oligonucleotide
  Sense strand starting at position 2551 of SEQ ID NO: 914382
cugagacugugcucugaga

SEQ ID NO: 999675 - RNA, 19 nt, Artificial Sequence
  Description of Artificial Sequence: Synthetic oligonucleotide
  Antisense strand to SEQ ID NO: 999674
ucucagagcacagucucag

SEQ ID NO: 999676 - RNA, 19 nt, Artificial Sequence
  Description of Artificial Sequence: Synthetic oligonucleotide
  Sense strand starting at position 2743 of SEQ ID NO: 914382
guucccaaagcucaagaua

SEQ ID NO: 999677 - RNA, 19 nt, Artificial Sequence
  Description of Artificial Sequence: Synthetic oligonucleotide
  Antisense strand to SEQ ID NO: 999676
uaucuugagcuuugggaac

SEQ ID NO: 999678 - RNA, 19 nt, Artificial Sequence
  Description of Artificial Sequence: Synthetic oligonucleotide
  Sense strand starting at position 2757 of SEQ ID NO: 914382
agauaagagaugcguucuu

SEQ ID NO: 999679 - RNA, 19 nt, Artificial Sequence
  Description of Artificial Sequence: Synthetic oligonucleotide
  Antisense strand to SEQ ID NO: 999678
aagaacgcaucucuuaucu

SEQ ID NO: 999680 - RNA, 19 nt, Artificial Sequence
  Description of Artificial Sequence: Synthetic oligonucleotide
  Sense strand starting at position 2762 of SEQ ID NO: 914382
agagaugcguucuuuccuu

SEQ ID NO: 999681 - RNA, 19 nt, Artificial Sequence
  Description of Artificial Sequence: Synthetic oligonucleotide
  Antisense strand to SEQ ID NO: 999680
aaggaaagaacgcaucucu

SEQ ID NO: 999682 - RNA, 19 nt, Artificial Sequence
  Description of Artificial Sequence: Synthetic oligonucleotide
  Sense strand starting at position 2930 of SEQ ID NO: 914382
agagguccuggcuaacaau

SEQ ID NO: 999683 - RNA, 19 nt, Artificial Sequence
  Description of Artificial Sequence: Synthetic oligonucleotide
  Antisense strand to SEQ ID NO: 999682
auuguuagccaggaccucu

SEQ ID NO: 999684 - RNA, 19 nt, Artificial Sequence
  Description of Artificial Sequence: Synthetic oligonucleotide
  Sense strand starting at position 3496 of SEQ ID NO: 914382
gacagcuccuguguuagaa

SEQ ID NO: 999685 - RNA, 19 nt, Artificial Sequence
  Description of Artificial Sequence: Synthetic oligonucleotide
  Antisense strand to SEQ ID NO: 999684
uucuaacacaggagcuguc

SEQ ID NO: 999686 - RNA, 19 nt, Artificial Sequence
  Description of Artificial Sequence: Synthetic oligonucleotide
  Sense strand starting at position 3583 of SEQ ID NO: 914382
gcuagacaucgucaaggau

SEQ ID NO: 999687 - RNA, 19 nt, Artificial Sequence
  Description of Artificial Sequence: Synthetic oligonucleotide
  Antisense strand to SEQ ID NO: 999686
auccuugacgaugucuagc

SEQ ID NO: 999688 - RNA, 19 nt, Artificial Sequence
  Description of Artificial Sequence: Synthetic oligonucleotide
  Sense strand starting at position 3639 of SEQ ID NO: 914382
gagcguccacaguguaaga

SEQ ID NO: 999689 - RNA, 19 nt, Artificial Sequence
  Description of Artificial Sequence: Synthetic oligonucleotide
  Antisense strand to SEQ ID NO: 999688
ucuuacacuguggacgcuc

SEQ ID NO: 999690 - RNA, 19 nt, Artificial Sequence
  Description of Artificial Sequence: Synthetic oligonucleotide
  Sense strand starting at position 3641 of SEQ ID NO: 914382
gcguccacaguguaagaau

SEQ ID NO: 999691 - RNA, 19 nt, Artificial Sequence
  Description of Artificial Sequence: Synthetic oligonucleotide
  Antisense strand to SEQ ID NO: 999690
auucuuacacuguggacgc

SEQ ID NO: 999692 - RNA, 19 nt, Artificial Sequence
  Description of Artificial Sequence: Synthetic oligonucleotide
  Sense strand starting at position 3644 of SEQ ID NO: 914382
uccacaguguaagaauuaa

SEQ ID NO: 999693 - RNA, 19 nt, Artificial Sequence
  Description of Artificial Sequence: Synthetic oligonucleotide
  Antisense strand to SEQ ID NO: 999692
uuaauucuuacacugugga

SEQ ID NO: 999694 - RNA, 19 nt, Artificial Sequence
  Description of Artificial Sequence: Synthetic oligonucleotide
  Sense strand starting at position 3772 of SEQ ID NO: 914382
gcgggagugcagucguaca

SEQ ID NO: 999695 - RNA, 19 nt, Artificial Sequence
  Description of Artificial Sequence: Synthetic oligonucleotide
  Antisense strand to SEQ ID NO: 999694
uguacgacugcacucccgc

SEQ ID NO: 999696 - RNA, 19 nt, Artificial Sequence
  Description of Artificial Sequence: Synthetic oligonucleotide
  Sense strand starting at position 435 of SEQ ID NO: 914383
aagagagaauuuggcacuu

SEQ ID NO: 999697 - RNA, 19 nt, Artificial Sequence
  Description of Artificial Sequence: Synthetic oligonucleotide
  Antisense strand to SEQ ID NO: 999696
aagugccaaauucucucuu

SEQ ID NO: 999698 - RNA, 19 nt, Artificial Sequence
  Description of Artificial Sequence: Synthetic oligonucleotide
  Sense strand starting at position 498 of SEQ ID NO: 914383
acgcaagacucucugggaa

SEQ ID NO: 999699 - RNA, 19 nt, Artificial Sequence
  Description of Artificial Sequence: Synthetic oligonucleotide
  Antisense strand to SEQ ID NO: 999698
uucccagagagucuugcgu

SEQ ID NO: 999700 - RNA, 19 nt, Artificial Sequence
  Description of Artificial Sequence: Synthetic oligonucleotide
  Sense strand starting at position 502 of SEQ ID NO: 914383
aagacucucugggaagcaa

SEQ ID NO: 999701 - RNA, 19 nt, Artificial Sequence
  Description of Artificial Sequence: Synthetic oligonucleotide
  Antisense strand to SEQ ID NO: 999700
uugcuucccagagagucuu

SEQ ID NO: 999702 - RNA, 19 nt, Artificial Sequence
  Description of Artificial Sequence: Synthetic oligonucleotide
  Sense strand starting at position 520 of SEQ ID NO: 914383
aguuuaugcgccuacucau

SEQ ID NO: 999703 - RNA, 19 nt, Artificial Sequence
  Description of Artificial Sequence: Synthetic oligonucleotide
  Antisense strand to SEQ ID NO: 999702
augaguaggcgcauaaacu

SEQ ID NO: 999704 - RNA, 19 nt, Artificial Sequence
  Description of Artificial Sequence: Synthetic oligonucleotide
  Sense strand starting at position 527 of SEQ ID NO: 914383
gcgccuacucaucuuaugu

SEQ ID NO: 999705 - RNA, 19 nt, Artificial Sequence
  Description of Artificial Sequence: Synthetic oligonucleotide
  Antisense strand to SEQ ID NO: 999704
acauaagaugaguaggcgc

SEQ ID NO: 999706 - RNA, 19 nt, Artificial Sequence
  Description of Artificial Sequence: Synthetic oligonucleotide
  Sense strand starting at position 643 of SEQ ID NO: 914383
cagguugguucugcacuaa

SEQ ID NO: 999707 - RNA, 19 nt, Artificial Sequence
  Description of Artificial Sequence: Synthetic oligonucleotide
  Antisense strand to SEQ ID NO: 999706
uuagugcagaaccaaccug

SEQ ID NO: 999708 - RNA, 19 nt, Artificial Sequence
  Description of Artificial Sequence: Synthetic oligonucleotide
  Sense strand starting at position 662 of SEQ ID NO: 914383
aggguugaguuggcucaaa

SEQ ID NO: 999709 - RNA, 19 nt, Artificial Sequence
  Description of Artificial Sequence: Synthetic oligonucleotide
  Antisense strand to SEQ ID NO: 999708
uuugagccaacucaacccu

SEQ ID NO: 999710 - RNA, 19 nt, Artificial Sequence
  Description of Artificial Sequence: Synthetic oligonucleotide
  Sense strand starting at position 684 of SEQ ID NO: 914383
cuacauuggcccugagaga

SEQ ID NO: 999711 - RNA, 19 nt, Artificial Sequence
  Description of Artificial Sequence: Synthetic oligonucleotide
  Antisense strand to SEQ ID NO: 999710
ucucucagggccaauguag

SEQ ID NO: 999712 - RNA, 19 nt, Artificial Sequence
  Description of Artificial Sequence: Synthetic oligonucleotide
  Sense strand starting at position 789 of SEQ ID NO: 914383
ucaguaaucagagguagaa

SEQ ID NO: 999713 - RNA, 19 nt, Artificial Sequence
  Description of Artificial Sequence: Synthetic oligonucleotide
  Antisense strand to SEQ ID NO: 999712
uucuaccucugauuacuga

SEQ ID NO: 999714 - RNA, 19 nt, Artificial Sequence
  Description of Artificial Sequence: Synthetic oligonucleotide
  Sense strand starting at position 836 of SEQ ID NO: 914383
cuagccuugggcugugaaa

SEQ ID NO: 999715 - RNA, 19 nt, Artificial Sequence
  Description of Artificial Sequence: Synthetic oligonucleotide
  Antisense strand to SEQ ID NO: 999714
uuucacagcccaaggcuag

SEQ ID NO: 999716 - RNA, 19 nt, Artificial Sequence
  Description of Artificial Sequence: Synthetic oligonucleotide
  Sense strand starting at position 838 of SEQ ID NO: 914383
agccuugggcugugaaagu

SEQ ID NO: 999717 - RNA, 19 nt, Artificial Sequence
  Description of Artificial Sequence: Synthetic oligonucleotide
  Antisense strand to SEQ ID NO: 999716
acuuucacagcccaaggcu

SEQ ID NO: 999718 - RNA, 19 nt, Artificial Sequence
  Description of Artificial Sequence: Synthetic oligonucleotide
  Sense strand starting at position 927 of SEQ ID NO: 914383
cuccaagggccuuacaauu

SEQ ID NO: 999719 - RNA, 19 nt, Artificial Sequence
  Description of Artificial Sequence: Synthetic oligonucleotide
  Antisense strand to SEQ ID NO: 999718
aauuguaaggcccuuggag

SEQ ID NO: 999720 - RNA, 19 nt, Artificial Sequence
  Description of Artificial Sequence: Synthetic oligonucleotide
  Sense strand starting at position 977 of SEQ ID NO: 914383
cccucucaccuguaguaga

SEQ ID NO: 999721 - RNA, 19 nt, Artificial Sequence
  Description of Artificial Sequence: Synthetic oligonucleotide
  Antisense strand to SEQ ID NO: 999720
ucuacuacaggugagaggg

SEQ ID NO: 999722 - RNA, 19 nt, Artificial Sequence
  Description of Artificial Sequence: Synthetic oligonucleotide
  Sense strand starting at position 1014 of SEQ ID NO: 914383
ggcugacugucggcauaua

SEQ ID NO: 999723 - RNA, 19 nt, Artificial Sequence
  Description of Artificial Sequence: Synthetic oligonucleotide
  Antisense strand to SEQ ID NO: 999722
uauaugccgacagucagcc

SEQ ID NO: 999724 - RNA, 19 nt, Artificial Sequence
  Description of Artificial Sequence: Synthetic oligonucleotide
  Sense strand starting at position 1295 of SEQ ID NO: 914383
ggugguuccuggaaagaga

SEQ ID NO: 999725 - RNA, 19 nt, Artificial Sequence
  Description of Artificial Sequence: Synthetic oligonucleotide
  Antisense strand to SEQ ID NO: 999724
ucucuuuccaggaaccacc

SEQ ID NO: 999726 - RNA, 19 nt, Artificial Sequence
  Description of Artificial Sequence: Synthetic oligonucleotide
  Sense strand starting at position 1369 of SEQ ID NO: 914383
cuggacuggcuuugaggaa

SEQ ID NO: 999727 - RNA, 19 nt, Artificial Sequence
  Description of Artificial Sequence: Synthetic oligonucleotide
  Antisense strand to SEQ ID NO: 999726
uuccucaaagccaguccag

SEQ ID NO: 999728 - RNA, 19 nt, Artificial Sequence
  Description of Artificial Sequence: Synthetic oligonucleotide
  Sense strand starting at position 1427 of SEQ ID NO: 914383
auggccuuucuccaaauga

SEQ ID NO: 999729 - RNA, 19 nt, Artificial Sequence
  Description of Artificial Sequence: Synthetic oligonucleotide
  Antisense strand to SEQ ID NO: 999728
ucauuuggagaaaggccau

SEQ ID NO: 999730 - RNA, 19 nt, Artificial Sequence
  Description of Artificial Sequence: Synthetic oligonucleotide
  Sense strand starting at position 1502 of SEQ ID NO: 914383
agugcuaaaucuccucagu

SEQ ID NO: 999731 - RNA, 19 nt, Artificial Sequence
  Description of Artificial Sequence: Synthetic oligonucleotide
  Antisense strand to SEQ ID NO: 999730
acugaggagauuuagcacu

SEQ ID NO: 999732 - RNA, 19 nt, Artificial Sequence
  Description of Artificial Sequence: Synthetic oligonucleotide
  Sense strand starting at position 1505 of SEQ ID NO: 914383
gcuaaaucuccucagugga

SEQ ID NO: 999733 - RNA, 19 nt, Artificial Sequence
  Description of Artificial Sequence: Synthetic oligonucleotide
  Antisense strand to SEQ ID NO: 999732
uccacugaggagauuuagc

SEQ ID NO: 999734 - RNA, 19 nt, Artificial Sequence
  Description of Artificial Sequence: Synthetic oligonucleotide
  Sense strand starting at position 1599 of SEQ ID NO: 914383
accuuacgauucuuagaaa

SEQ ID NO: 999735 - RNA, 19 nt, Artificial Sequence
  Description of Artificial Sequence: Synthetic oligonucleotide
  Antisense strand to SEQ ID NO: 999734
uuucuaagaaucguaaggu

SEQ ID NO: 999736 - RNA, 19 nt, Artificial Sequence
  Description of Artificial Sequence: Synthetic oligonucleotide
  Sense strand starting at position 1602 of SEQ ID NO: 914383
uuacgauucuuagaaagag

SEQ ID NO: 999737 - RNA, 19 nt, Artificial Sequence
  Description of Artificial Sequence: Synthetic oligonucleotide
  Antisense strand to SEQ ID NO: 999736
cucuuucuaagaaucguaa

SEQ ID NO: 999738 - RNA, 19 nt, Artificial Sequence
  Description of Artificial Sequence: Synthetic oligonucleotide
  Sense strand starting at position 1720 of SEQ ID NO: 914383
gccuuagaguagccacaau

SEQ ID NO: 999739 - RNA, 19 nt, Artificial Sequence
  Description of Artificial Sequence: Synthetic oligonucleotide
  Antisense strand to SEQ ID NO: 999738
auuguggcuacucuaaggc

SEQ ID NO: 999740 - RNA, 19 nt, Artificial Sequence
  Description of Artificial Sequence: Synthetic oligonucleotide
  Sense strand starting at position 1733 of SEQ ID NO: 914383
cacaauugcuucccgaguu

SEQ ID NO: 999741 - RNA, 19 nt, Artificial Sequence
  Description of Artificial Sequence: Synthetic oligonucleotide
  Antisense strand to SEQ ID NO: 999740
aacucgggaagcaauugug

SEQ ID NO: 999742 - RNA, 19 nt, Artificial Sequence
  Description of Artificial Sequence: Synthetic oligonucleotide
  Sense strand starting at position 2166 of SEQ ID NO: 914383
uccgguuaccgugaccaaa

SEQ ID NO: 999743 - RNA, 19 nt, Artificial Sequence
  Description of Artificial Sequence: Synthetic oligonucleotide
  Antisense strand to SEQ ID NO: 999742
uuuggucacgguaaccgga

SEQ ID NO: 999744 - RNA, 19 nt, Artificial Sequence
  Description of Artificial Sequence: Synthetic oligonucleotide
  Sense strand starting at position 2590 of SEQ ID NO: 914383
uuuguagacgucuaaucac

SEQ ID NO: 999745 - RNA, 19 nt, Artificial Sequence
  Description of Artificial Sequence: Synthetic oligonucleotide
  Antisense strand to SEQ ID NO: 999744
gugauuagacgucuacaaa

SEQ ID NO: 999746 - RNA, 19 nt, Artificial Sequence
  Description of Artificial Sequence: Synthetic oligonucleotide
  Sense strand starting at position 2637 of SEQ ID NO: 914383
caguguuguguacaucuuu

SEQ ID NO: 999747 - RNA, 19 nt, Artificial Sequence
  Description of Artificial Sequence: Synthetic oligonucleotide
  Antisense strand to SEQ ID NO: 999746
aaagauguacacaacacug

SEQ ID NO: 999748 - RNA, 19 nt, Artificial Sequence
  Description of Artificial Sequence: Synthetic oligonucleotide
  Sense strand starting at position 2642 of SEQ ID NO: 914383
uuguguacaucuuugcaca

SEQ ID NO: 999749 - RNA, 19 nt, Artificial Sequence
  Description of Artificial Sequence: Synthetic oligonucleotide
  Antisense strand to SEQ ID NO: 999748
ugugcaaagauguacacaa

SEQ ID NO: 999750 - RNA, 19 nt, Artificial Sequence
  Description of Artificial Sequence: Synthetic oligonucleotide
  Sense strand starting at position 2668 of SEQ ID NO: 914383
gggcgugggaaguaaucua

SEQ ID NO: 999751 - RNA, 19 nt, Artificial Sequence
  Description of Artificial Sequence: Synthetic oligonucleotide
  Antisense strand to SEQ ID NO: 999750
uagauuacuucccacgccc

SEQ ID NO: 999752 - RNA, 19 nt, Artificial Sequence
  Description of Artificial Sequence: Synthetic oligonucleotide
  Sense strand starting at position 2753 of SEQ ID NO: 914383
uccaguauauuucugcuga

SEQ ID NO: 999753 - RNA, 19 nt, Artificial Sequence
  Description of Artificial Sequence: Synthetic oligonucleotide
  Antisense strand to SEQ ID NO: 999752
ucagcagaaauauacugga

SEQ ID NO: 999754 - RNA, 19 nt, Artificial Sequence
  Description of Artificial Sequence: Synthetic oligonucleotide
  Sense strand starting at position 2873 of SEQ ID NO: 914383
guagacaucuuccugacga

SEQ ID NO: 999755 - RNA, 19 nt, Artificial Sequence
  Description of Artificial Sequence: Synthetic oligonucleotide
  Antisense strand to SEQ ID NO: 999754
ucgucaggaagaugucuac

SEQ ID NO: 999756 - RNA, 19 nt, Artificial Sequence
  Description of Artificial Sequence: Synthetic oligonucleotide
  Sense strand starting at position 2906 of SEQ ID NO: 914383
uggaucuuccacugaguca

SEQ ID NO: 999757 - RNA, 19 nt, Artificial Sequence
  Description of Artificial Sequence: Synthetic oligonucleotide
  Antisense strand to SEQ ID NO: 999756
ugacucaguggaagaucca

SEQ ID NO: 999758 - RNA, 19 nt, Artificial Sequence
  Description of Artificial Sequence: Synthetic oligonucleotide
  Sense strand starting at position 3085 of SEQ ID NO: 914383
cccagcugaugucagauuu

SEQ ID NO: 999759 - RNA, 19 nt, Artificial Sequence
  Description of Artificial Sequence: Synthetic oligonucleotide
  Antisense strand to SEQ ID NO: 999758
aaaucugacaucagcuggg

SEQ ID NO: 999760 - RNA, 19 nt, Artificial Sequence
  Description of Artificial Sequence: Synthetic oligonucleotide
  Sense strand starting at position 3231 of SEQ ID NO: 914383
gagucaggaugccugcaau

SEQ ID NO: 999761 - RNA, 19 nt, Artificial Sequence
  Description of Artificial Sequence: Synthetic oligonucleotide
  Antisense strand to SEQ ID NO: 999760
auugcaggcauccugacuc

SEQ ID NO: 999762 - RNA, 19 nt, Artificial Sequence
  Description of Artificial Sequence: Synthetic oligonucleotide
  Sense strand starting at position 3585 of SEQ ID NO: 914383
ccgcuuguggcuucaggua

SEQ ID NO: 999763 - RNA, 19 nt, Artificial Sequence
  Description of Artificial Sequence: Synthetic oligonucleotide
  Antisense strand to SEQ ID NO: 999762
uaccugaagccacaagcgg

SEQ ID NO: 999764 - RNA, 19 nt, Artificial Sequence
  Description of Artificial Sequence: Synthetic oligonucleotide
  Sense strand starting at position 3677 of SEQ ID NO: 914383
gguugaggucuucagagcu

SEQ ID NO: 999765 - RNA, 19 nt, Artificial Sequence
  Description of Artificial Sequence: Synthetic oligonucleotide
  Antisense strand to SEQ ID NO: 999764
agcucugaagaccucaacc

SEQ ID NO: 999766 - RNA, 19 nt, Artificial Sequence
  Description of Artificial Sequence: Synthetic oligonucleotide
  Sense strand starting at position 3725 of SEQ ID NO: 914383
agccuuaaaucauuugugu

SEQ ID NO: 999767 - RNA, 19 nt, Artificial Sequence
  Description of Artificial Sequence: Synthetic oligonucleotide
  Antisense strand to SEQ ID NO: 999766
acacaaaugauuuaaggcu

SEQ ID NO: 999768 - RNA, 19 nt, Artificial Sequence
  Description of Artificial Sequence: Synthetic oligonucleotide
  Sense strand starting at position 3738 of SEQ ID NO: 914383
uuguguaagguuuaaugau

SEQ ID NO: 999769 - RNA, 19 nt, Artificial Sequence
  Description of Artificial Sequence: Synthetic oligonucleotide
  Antisense strand to SEQ ID NO: 999768
aucauuaaaccuuacacaa

SEQ ID NO: 999770 - RNA, 19 nt, Artificial Sequence
  Description of Artificial Sequence: Synthetic oligonucleotide
  Sense strand starting at position 3748 of SEQ ID NO: 914383
uuuaaugaucuguggccca

SEQ ID NO: 999771 - RNA, 19 nt, Artificial Sequence
  Description of Artificial Sequence: Synthetic oligonucleotide
  Antisense strand to SEQ ID NO: 999770
ugggccacagaucauuaaa

SEQ ID NO: 999772 - RNA, 19 nt, Artificial Sequence
  Description of Artificial Sequence: Synthetic oligonucleotide
  Sense strand starting at position 3889 of SEQ ID NO: 914383
ugaccacagccuuguaaag

SEQ ID NO: 999773 - RNA, 19 nt, Artificial Sequence
  Description of Artificial Sequence: Synthetic oligonucleotide
  Antisense strand to SEQ ID NO: 999772
cuuuacaaggcugugguca

SEQ ID NO: 999774 - RNA, 19 nt, Artificial Sequence
  Description of Artificial Sequence: Synthetic oligonucleotide
  Sense strand starting at position 3943 of SEQ ID NO: 914383
cugagacugugcucugaga

SEQ ID NO: 999775 - RNA, 19 nt, Artificial Sequence
  Description of Artificial Sequence: Synthetic oligonucleotide
  Antisense strand to SEQ ID NO: 999774
ucucagagcacagucucag

SEQ ID NO: 999776 - RNA, 19 nt, Artificial Sequence
  Description of Artificial Sequence: Synthetic oligonucleotide
  Sense strand starting at position 3 of SEQ ID NO: 914384
ucuggaaagucaucuagaa

SEQ ID NO: 999777 - RNA, 19 nt, Artificial Sequence
  Description of Artificial Sequence: Synthetic oligonucleotide
  Antisense strand to SEQ ID NO: 999776
uucuagaugacuuuccaga

SEQ ID NO: 999778 - RNA, 19 nt, Artificial Sequence
  Description of Artificial Sequence: Synthetic oligonucleotide
  Sense strand starting at position 88 of SEQ ID NO: 914384
aaaugucuucuuggagaga

SEQ ID NO: 999779 - RNA, 19 nt, Artificial Sequence
  Description of Artificial Sequence: Synthetic oligonucleotide
  Antisense strand to SEQ ID NO: 999778
ucucuccaagaagacauuu

SEQ ID NO: 999780 - RNA, 19 nt, Artificial Sequence
  Description of Artificial Sequence: Synthetic oligonucleotide
  Sense strand starting at position 91 of SEQ ID NO: 914384
ugucuucuuggagagacuu

SEQ ID NO: 999781 - RNA, 19 nt, Artificial Sequence
  Description of Artificial Sequence: Synthetic oligonucleotide
  Antisense strand to SEQ ID NO: 999780
aagucucuccaagaagaca

SEQ ID NO: 999782 - RNA, 19 nt, Artificial Sequence
  Description of Artificial Sequence: Synthetic oligonucleotide
  Sense strand starting at position 100 of SEQ ID NO: 914384
ggagagacuuccguagggu

SEQ ID NO: 999783 - RNA, 19 nt, Artificial Sequence
  Description of Artificial Sequence: Synthetic oligonucleotide
  Antisense strand to SEQ ID NO: 999782
acccuacggaagucucucc

SEQ ID NO: 999784 - RNA, 19 nt, Artificial Sequence
  Description of Artificial Sequence: Synthetic oligonucleotide
  Sense strand starting at position 101 of SEQ ID NO: 914384
gagagacuuccguaggguc

SEQ ID NO: 999785 - RNA, 19 nt, Artificial Sequence
  Description of Artificial Sequence: Synthetic oligonucleotide
  Antisense strand to SEQ ID NO: 999784
gacccuacggaagucucuc

SEQ ID NO: 999786 - RNA, 19 nt, Artificial Sequence
  Description of Artificial Sequence: Synthetic oligonucleotide
  Sense strand starting at position 249 of SEQ ID NO: 914384
cugguagaugcauggauau

SEQ ID NO: 999787 - RNA, 19 nt, Artificial Sequence
  Description of Artificial Sequence: Synthetic oligonucleotide
  Antisense strand to SEQ ID NO: 999786
auauccaugcaucuaccag

SEQ ID NO: 999788 - RNA, 19 nt, Artificial Sequence
  Description of Artificial Sequence: Synthetic oligonucleotide
  Sense strand starting at position 389 of SEQ ID NO: 914384
gagcauuucucgccucuca

SEQ ID NO: 999789 - RNA, 19 nt, Artificial Sequence
  Description of Artificial Sequence: Synthetic oligonucleotide
  Antisense strand to SEQ ID NO: 999788
ugagaggcgagaaaugcuc

SEQ ID NO: 999790 - RNA, 19 nt, Artificial Sequence
  Description of Artificial Sequence: Synthetic oligonucleotide
  Sense strand starting at position 547 of SEQ ID NO: 914384
ggagacuugucuuuccuga

SEQ ID NO: 999791 - RNA, 19 nt, Artificial Sequence
  Description of Artificial Sequence: Synthetic oligonucleotide
  Antisense strand to SEQ ID NO: 999790
ucaggaaagacaagucucc

SEQ ID NO: 999792 - RNA, 19 nt, Artificial Sequence
  Description of Artificial Sequence: Synthetic oligonucleotide
  Sense strand starting at position 794 of SEQ ID NO: 914384
agcuuuguucuggauucca

SEQ ID NO: 999793 - RNA, 19 nt, Artificial Sequence
  Description of Artificial Sequence: Synthetic oligonucleotide
  Antisense strand to SEQ ID NO: 999792
uggaauccagaacaaagcu

SEQ ID NO: 999794 - RNA, 19 nt, Artificial Sequence
  Description of Artificial Sequence: Synthetic oligonucleotide
  Sense strand starting at position 905 of SEQ ID NO: 914384
auucuauucuggcuagauu

SEQ ID NO: 999795 - RNA, 19 nt, Artificial Sequence
  Description of Artificial Sequence: Synthetic oligonucleotide
  Antisense strand to SEQ ID NO: 999794
aaucuagccagaauagaau

SEQ ID NO: 999796 - RNA, 19 nt, Artificial Sequence
  Description of Artificial Sequence: Synthetic oligonucleotide
  Sense strand starting at position 906 of SEQ ID NO: 914384
uucuauucuggcuagauug

SEQ ID NO: 999797 - RNA, 19 nt, Artificial Sequence
  Description of Artificial Sequence: Synthetic oligonucleotide
  Antisense strand to SEQ ID NO: 999796
caaucuagccagaauagaa

SEQ ID NO: 999798 - RNA, 19 nt, Artificial Sequence
  Description of Artificial Sequence: Synthetic oligonucleotide
  Sense strand starting at position 908 of SEQ ID NO: 914384
cuauucuggcuagauugaa

SEQ ID NO: 999799 - RNA, 19 nt, Artificial Sequence
  Description of Artificial Sequence: Synthetic oligonucleotide
  Antisense strand to SEQ ID NO: 999798
uucaaucuagccagaauag

SEQ ID NO: 999800 - RNA, 19 nt, Artificial Sequence
  Description of Artificial Sequence: Synthetic oligonucleotide
  Sense strand starting at position 953 of SEQ ID NO: 914384
ggccuuucagagggagaca

SEQ ID NO: 999801 - RNA, 19 nt, Artificial Sequence
  Description of Artificial Sequence: Synthetic oligonucleotide
  Antisense strand to SEQ ID NO: 999800
ugucucccucugaaaggcc

SEQ ID NO: 999802 - RNA, 19 nt, Artificial Sequence
  Description of Artificial Sequence: Synthetic oligonucleotide
  Sense strand starting at position 1106 of SEQ ID NO: 914384
gguagcccagacuaagauu

SEQ ID NO: 999803 - RNA, 19 nt, Artificial Sequence
  Description of Artificial Sequence: Synthetic oligonucleotide
  Antisense strand to SEQ ID NO: 999802
aaucuuagucugggcuacc

SEQ ID NO: 999804 - RNA, 19 nt, Artificial Sequence
  Description of Artificial Sequence: Synthetic oligonucleotide
  Sense strand starting at position 1112 of SEQ ID NO: 914384
ccagacuaagauugugagu

SEQ ID NO: 999805 - RNA, 19 nt, Artificial Sequence
  Description of Artificial Sequence: Synthetic oligonucleotide
  Antisense strand to SEQ ID NO: 999804
acucacaaucuuagucugg

SEQ ID NO: 999806 - RNA, 19 nt, Artificial Sequence
  Description of Artificial Sequence: Synthetic oligonucleotide
  Sense strand starting at position 1117 of SEQ ID NO: 914384
cuaagauugugaguuaaau

SEQ ID NO: 999807 - RNA, 19 nt, Artificial Sequence
  Description of Artificial Sequence: Synthetic oligonucleotide
  Antisense strand to SEQ ID NO: 999806
auuuaacucacaaucuuag

SEQ ID NO: 999808 - RNA, 19 nt, Artificial Sequence
  Description of Artificial Sequence: Synthetic oligonucleotide
  Sense strand starting at position 1123 of SEQ ID NO: 914384
uugugaguuaaauguuaga

SEQ ID NO: 999809 - RNA, 19 nt, Artificial Sequence
  Description of Artificial Sequence: Synthetic oligonucleotide
  Antisense strand to SEQ ID NO: 999808
ucuaacauuuaacucacaa

SEQ ID NO: 999810 - RNA, 19 nt, Artificial Sequence
  Description of Artificial Sequence: Synthetic oligonucleotide
  Sense strand starting at position 1130 of SEQ ID NO: 914384
uuaaauguuagauguugag

SEQ ID NO: 999811 - RNA, 19 nt, Artificial Sequence
  Description of Artificial Sequence: Synthetic oligonucleotide
  Antisense strand to SEQ ID NO: 999810
cucaacaucuaacauuuaa

SEQ ID NO: 999812 - RNA, 19 nt, Artificial Sequence
  Description of Artificial Sequence: Synthetic oligonucleotide
  Sense strand starting at position 1146 of SEQ ID NO: 914384
gaggaugcggaggguuaaa

SEQ ID NO: 999813 - RNA, 19 nt, Artificial Sequence
  Description of Artificial Sequence: Synthetic oligonucleotide
  Antisense strand to SEQ ID NO: 999812
uuuaacccuccgcauccuc

SEQ ID NO: 999814 - RNA, 19 nt, Artificial Sequence
  Description of Artificial Sequence: Synthetic oligonucleotide
  Sense strand starting at position 1287 of SEQ ID NO: 914384
gagaucuggccuggacaga

SEQ ID NO: 999815 - RNA, 19 nt, Artificial Sequence
  Description of Artificial Sequence: Synthetic oligonucleotide
  Antisense strand to SEQ ID NO: 999814
ucuguccaggccagaucuc

SEQ ID NO: 999816 - RNA, 19 nt, Artificial Sequence
  Description of Artificial Sequence: Synthetic oligonucleotide
  Sense strand starting at position 1923 of SEQ ID NO: 914384
caggauguccucgaugaag

SEQ ID NO: 999817 - RNA, 19 nt, Artificial Sequence
  Description of Artificial Sequence: Synthetic oligonucleotide
  Antisense strand to SEQ ID NO: 999816
cuucaucgaggacauccug

SEQ ID NO: 999818 - RNA, 19 nt, Artificial Sequence
  Description of Artificial Sequence: Synthetic oligonucleotide
  Sense strand starting at position 1925 of SEQ ID NO: 914384
ggauguccucgaugaagaa

SEQ ID NO: 999819 - RNA, 19 nt, Artificial Sequence
  Description of Artificial Sequence: Synthetic oligonucleotide
  Antisense strand to SEQ ID NO: 999818
uucuucaucgaggacaucc

SEQ ID NO: 999820 - RNA, 19 nt, Artificial Sequence
  Description of Artificial Sequence: Synthetic oligonucleotide
  Sense strand starting at position 2639 of SEQ ID NO: 914384
uaaguuuauggcugaggga

SEQ ID NO: 999821 - RNA, 19 nt, Artificial Sequence
  Description of Artificial Sequence: Synthetic oligonucleotide
  Antisense strand to SEQ ID NO: 999820
ucccucagccauaaacuua

SEQ ID NO: 999822 - RNA, 19 nt, Artificial Sequence
  Description of Artificial Sequence: Synthetic oligonucleotide
  Sense strand starting at position 2688 of SEQ ID NO: 914384
ugaugauggucaucacaac

SEQ ID NO: 999823 - RNA, 19 nt, Artificial Sequence
  Description of Artificial Sequence: Synthetic oligonucleotide
  Antisense strand to SEQ ID NO: 999822
guugugaugaccaucauca

SEQ ID NO: 999824 - RNA, 19 nt, Artificial Sequence
  Description of Artificial Sequence: Synthetic oligonucleotide
  Sense strand starting at position 2741 of SEQ ID NO: 914384
gaggguuaugucuacauua

SEQ ID NO: 999825 - RNA, 19 nt, Artificial Sequence
  Description of Artificial Sequence: Synthetic oligonucleotide
  Antisense strand to SEQ ID NO: 999824
uaauguagacauaacccuc

SEQ ID NO: 999826 - RNA, 19 nt, Artificial Sequence
  Description of Artificial Sequence: Synthetic oligonucleotide
  Sense strand starting at position 2743 of SEQ ID NO: 914384
ggguuaugucuacauuagu

SEQ ID NO: 999827 - RNA, 19 nt, Artificial Sequence
  Description of Artificial Sequence: Synthetic oligonucleotide
  Antisense strand to SEQ ID NO: 999826
acuaauguagacauaaccc

SEQ ID NO: 999828 - RNA, 19 nt, Artificial Sequence
  Description of Artificial Sequence: Synthetic oligonucleotide
  Sense strand starting at position 2746 of SEQ ID NO: 914384
uuaugucuacauuagucaa

SEQ ID NO: 999829 - RNA, 19 nt, Artificial Sequence
  Description of Artificial Sequence: Synthetic oligonucleotide
  Antisense strand to SEQ ID NO: 999828
uugacuaauguagacauaa

SEQ ID NO: 999830 - RNA, 19 nt, Artificial Sequence
  Description of Artificial Sequence: Synthetic oligonucleotide
  Sense strand starting at position 2762 of SEQ ID NO: 914384
caaguuauuuggucugugu

SEQ ID NO: 999831 - RNA, 19 nt, Artificial Sequence
  Description of Artificial Sequence: Synthetic oligonucleotide
  Antisense strand to SEQ ID NO: 999830
acacagaccaaauaacuug

SEQ ID NO: 999832 - RNA, 19 nt, Artificial Sequence
  Description of Artificial Sequence: Synthetic oligonucleotide
  Sense strand starting at position 2764 of SEQ ID NO: 914384
aguuauuuggucuguguaa

SEQ ID NO: 999833 - RNA, 19 nt, Artificial Sequence
  Description of Artificial Sequence: Synthetic oligonucleotide
  Antisense strand to SEQ ID NO: 999832
uuacacagaccaaauaacu

SEQ ID NO: 999834 - RNA, 19 nt, Artificial Sequence
  Description of Artificial Sequence: Synthetic oligonucleotide
  Sense strand starting at position 2765 of SEQ ID NO: 914384
guuauuuggucuguguaaa

SEQ ID NO: 999835 - RNA, 19 nt, Artificial Sequence
  Description of Artificial Sequence: Synthetic oligonucleotide
  Antisense strand to SEQ ID NO: 999834
uuuacacagaccaaauaac

SEQ ID NO: 999836 - RNA, 19 nt, Artificial Sequence
  Description of Artificial Sequence: Synthetic oligonucleotide
  Sense strand starting at position 2766 of SEQ ID NO: 914384
uuauuuggucuguguaaau

SEQ ID NO: 999837 - RNA, 19 nt, Artificial Sequence
  Description of Artificial Sequence: Synthetic oligonucleotide
  Antisense strand to SEQ ID NO: 999836
auuuacacagaccaaauaa

SEQ ID NO: 999838 - RNA, 19 nt, Artificial Sequence
  Description of Artificial Sequence: Synthetic oligonucleotide
  Sense strand starting at position 2778 of SEQ ID NO: 914384
uguaaauauguccagaguc

SEQ ID NO: 999839 - RNA, 19 nt, Artificial Sequence
  Description of Artificial Sequence: Synthetic oligonucleotide
  Antisense strand to SEQ ID NO: 999838
gacucuggacauauuuaca

SEQ ID NO: 999840 - RNA, 19 nt, Artificial Sequence
  Description of Artificial Sequence: Synthetic oligonucleotide
  Sense strand starting at position 3041 of SEQ ID NO: 914384
aaauuagggugaucaucua

SEQ ID NO: 999841 - RNA, 19 nt, Artificial Sequence
  Description of Artificial Sequence: Synthetic oligonucleotide
  Antisense strand to SEQ ID NO: 999840
uagaugaucacccuaauuu

SEQ ID NO: 999842 - RNA, 19 nt, Artificial Sequence
  Description of Artificial Sequence: Synthetic oligonucleotide
  Sense strand starting at position 3115 of SEQ ID NO: 914384
uguuaaacucagggaaauu

SEQ ID NO: 999843 - RNA, 19 nt, Artificial Sequence
  Description of Artificial Sequence: Synthetic oligonucleotide
  Antisense strand to SEQ ID NO: 999842
aauuucccugaguuuaaca

SEQ ID NO: 999844 - RNA, 19 nt, Artificial Sequence
  Description of Artificial Sequence: Synthetic oligonucleotide
  Sense strand starting at position 3243 of SEQ ID NO: 914384
gagacugaguccucacaac

SEQ ID NO: 999845 - RNA, 19 nt, Artificial Sequence
  Description of Artificial Sequence: Synthetic oligonucleotide
  Antisense strand to SEQ ID NO: 999844
guugugaggacucagucuc

SEQ ID NO: 999846 - RNA, 19 nt, Artificial Sequence
  Description of Artificial Sequence: Synthetic oligonucleotide
  Sense strand starting at position 3274 of SEQ ID NO: 914384
auaauuagaggagguguua

SEQ ID NO: 999847 - RNA, 19 nt, Artificial Sequence
  Description of Artificial Sequence: Synthetic oligonucleotide
  Antisense strand to SEQ ID NO: 999846
uaacaccuccucuaauuau

SEQ ID NO: 999848 - RNA, 19 nt, Artificial Sequence
  Description of Artificial Sequence: Synthetic oligonucleotide
  Sense strand starting at position 3336 of SEQ ID NO: 914384
ucugaucuagcagguagaa

SEQ ID NO: 999849 - RNA, 19 nt, Artificial Sequence
  Description of Artificial Sequence: Synthetic oligonucleotide
  Antisense strand to SEQ ID NO: 999848
uucuaccugcuagaucaga

SEQ ID NO: 999850 - RNA, 19 nt, Artificial Sequence
  Description of Artificial Sequence: Synthetic oligonucleotide
  Sense strand starting at position 3408 of SEQ ID NO: 914384
ggagcauucuauuccauga

SEQ ID NO: 999851 - RNA, 19 nt, Artificial Sequence
  Description of Artificial Sequence: Synthetic oligonucleotide
  Antisense strand to SEQ ID NO: 999850
ucauggaauagaaugcucc

SEQ ID NO: 999852 - RNA, 19 nt, Artificial Sequence
  Description of Artificial Sequence: Synthetic oligonucleotide
  Sense strand starting at position 3436 of SEQ ID NO: 914384
gguaaaugguaaguagaug

SEQ ID NO: 999853 - RNA, 19 nt, Artificial Sequence
  Description of Artificial Sequence: Synthetic oligonucleotide
  Antisense strand to SEQ ID NO: 999852
caucuacuuaccauuuacc

SEQ ID NO: 999854 - RNA, 19 nt, Artificial Sequence
  Description of Artificial Sequence: Synthetic oligonucleotide
  Sense strand starting at position 3532 of SEQ ID NO: 914384
aucagaaugcuuugaucug

SEQ ID NO: 999855 - RNA, 19 nt, Artificial Sequence
  Description of Artificial Sequence: Synthetic oligonucleotide
  Antisense strand to SEQ ID NO: 999854
cagaucaaagcauucugau

SEQ ID NO: 999856 - RNA, 19 nt, Artificial Sequence
  Description of Artificial Sequence: Synthetic oligonucleotide
  Sense strand starting at position 27 of SEQ ID NO: 914385
ccgaguucucuugagaaug

SEQ ID NO: 999857 - RNA, 19 nt, Artificial Sequence
  Description of Artificial Sequence: Synthetic oligonucleotide
  Antisense strand to SEQ ID NO: 999856
cauucucaagagaacucgg

SEQ ID NO: 999858 - RNA, 19 nt, Artificial Sequence
  Description of Artificial Sequence: Synthetic oligonucleotide
  Sense strand starting at position 32 of SEQ ID NO: 914385
uucucuugagaaugcugaa

SEQ ID NO: 999859 - RNA, 19 nt, Artificial Sequence
  Description of Artificial Sequence: Synthetic oligonucleotide
  Antisense strand to SEQ ID NO: 999858
uucagcauucucaagagaa

SEQ ID NO: 999860 - RNA, 19 nt, Artificial Sequence
  Description of Artificial Sequence: Synthetic oligonucleotide
  Sense strand starting at position 55 of SEQ ID NO: 914385
ggguccauauucuuauaua

SEQ ID NO: 999861 - RNA, 19 nt, Artificial Sequence
  Description of Artificial Sequence: Synthetic oligonucleotide
  Antisense strand to SEQ ID NO: 999860
uauauaagaauauggaccc

SEQ ID NO: 999862 - RNA, 19 nt, Artificial Sequence
  Description of Artificial Sequence: Synthetic oligonucleotide
  Sense strand starting at position 66 of SEQ ID NO: 914385
cuuauauagcacugauuag

SEQ ID NO: 999863 - RNA, 19 nt, Artificial Sequence
  Description of Artificial Sequence: Synthetic oligonucleotide
  Antisense strand to SEQ ID NO: 999862
cuaaucagugcuauauaag

SEQ ID NO: 999864 - RNA, 19 nt, Artificial Sequence
  Description of Artificial Sequence: Synthetic oligonucleotide
  Sense strand starting at position 87 of SEQ ID NO: 914385
ggaccugagacuuggaugu

SEQ ID NO: 999865 - RNA, 19 nt, Artificial Sequence
  Description of Artificial Sequence: Synthetic oligonucleotide
  Antisense strand to SEQ ID NO: 999864
acauccaagucucaggucc

SEQ ID NO: 999866 - RNA, 19 nt, Artificial Sequence
  Description of Artificial Sequence: Synthetic oligonucleotide
  Sense strand starting at position 98 of SEQ ID NO: 914385
uuggaugucucucugauaa

SEQ ID NO: 999867 - RNA, 19 nt, Artificial Sequence
  Description of Artificial Sequence: Synthetic oligonucleotide
  Antisense strand to SEQ ID NO: 999866
uuaucagagagacauccaa

SEQ ID NO: 999868 - RNA, 19 nt, Artificial Sequence
  Description of Artificial Sequence: Synthetic oligonucleotide
  Sense strand starting at position 192 of SEQ ID NO: 914385
cuuugaaaggugcacaaua

SEQ ID NO: 999869 - RNA, 19 nt, Artificial Sequence
  Description of Artificial Sequence: Synthetic oligonucleotide
  Antisense strand to SEQ ID NO: 999868
uauugugcaccuuucaaag

SEQ ID NO: 999870 - RNA, 19 nt, Artificial Sequence
  Description of Artificial Sequence: Synthetic oligonucleotide
  Sense strand starting at position 194 of SEQ ID NO: 914385
uugaaaggugcacaauauu

SEQ ID NO: 999871 - RNA, 19 nt, Artificial Sequence
  Description of Artificial Sequence: Synthetic oligonucleotide
  Antisense strand to SEQ ID NO: 999870
aauauugugcaccuuucaa

SEQ ID NO: 999872 - RNA, 19 nt, Artificial Sequence
  Description of Artificial Sequence: Synthetic oligonucleotide
  Sense strand starting at position 377 of SEQ ID NO: 914385
ggguuagaagucuaucuga

SEQ ID NO: 999873 - RNA, 19 nt, Artificial Sequence
  Description of Artificial Sequence: Synthetic oligonucleotide
  Antisense strand to SEQ ID NO: 999872
ucagauagacuucuaaccc

SEQ ID NO: 999874 - RNA, 19 nt, Artificial Sequence
  Description of Artificial Sequence: Synthetic oligonucleotide
  Sense strand starting at position 380 of SEQ ID NO: 914385
uuagaagucuaucugaaag

SEQ ID NO: 999875 - RNA, 19 nt, Artificial Sequence
  Description of Artificial Sequence: Synthetic oligonucleotide
  Antisense strand to SEQ ID NO: 999874
cuuucagauagacuucuaa

SEQ ID NO: 999876 - RNA, 19 nt, Artificial Sequence
  Description of Artificial Sequence: Synthetic oligonucleotide
  Sense strand starting at position 457 of SEQ ID NO: 914385
agcuuuccugauugaacac

SEQ ID NO: 999877 - RNA, 19 nt, Artificial Sequence
  Description of Artificial Sequence: Synthetic oligonucleotide
  Antisense strand to SEQ ID NO: 999876
guguucaaucaggaaagcu

SEQ ID NO: 999878 - RNA, 19 nt, Artificial Sequence
  Description of Artificial Sequence: Synthetic oligonucleotide
  Sense strand starting at position 464 of SEQ ID NO: 914385
cugauugaacacuguuacu

SEQ ID NO: 999879 - RNA, 19 nt, Artificial Sequence
  Description of Artificial Sequence: Synthetic oligonucleotide
  Antisense strand to SEQ ID NO: 999878
aguaacaguguucaaucag

SEQ ID NO: 999880 - RNA, 19 nt, Artificial Sequence
  Description of Artificial Sequence: Synthetic oligonucleotide
  Sense strand starting at position 560 of SEQ ID NO: 914385
ggucauacacgcugagaaa

SEQ ID NO: 999881 - RNA, 19 nt, Artificial Sequence
  Description of Artificial Sequence: Synthetic oligonucleotide
  Antisense strand to SEQ ID NO: 999880
uuucucagcguguaugacc

SEQ ID NO: 999882 - RNA, 19 nt, Artificial Sequence
  Description of Artificial Sequence: Synthetic oligonucleotide
  Sense strand starting at position 561 of SEQ ID NO: 914385
gucauacacgcugagaaau

SEQ ID NO: 999883 - RNA, 19 nt, Artificial Sequence
  Description of Artificial Sequence: Synthetic oligonucleotide
  Antisense strand to SEQ ID NO: 999882
auuucucagcguguaugac

SEQ ID NO: 999884 - RNA, 19 nt, Artificial Sequence
  Description of Artificial Sequence: Synthetic oligonucleotide
  Sense strand starting at position 697 of SEQ ID NO: 914385
cugcuuuccgcuuuauauu

SEQ ID NO: 999885 - RNA, 19 nt, Artificial Sequence
  Description of Artificial Sequence: Synthetic oligonucleotide
  Antisense strand to SEQ ID NO: 999884
aauauaaagcggaaagcag

SEQ ID NO: 999886 - RNA, 19 nt, Artificial Sequence
  Description of Artificial Sequence: Synthetic oligonucleotide
  Sense strand starting at position 736 of SEQ ID NO: 914385
ggguuucaggacugaacuu

SEQ ID NO: 999887 - RNA, 19 nt, Artificial Sequence
  Description of Artificial Sequence: Synthetic oligonucleotide
  Antisense strand to SEQ ID NO: 999886
aaguucaguccugaaaccc

SEQ ID NO: 999888 - RNA, 19 nt, Artificial Sequence
  Description of Artificial Sequence: Synthetic oligonucleotide
  Sense strand starting at position 801 of SEQ ID NO: 914385
ggcugcauucuuuauuaua

SEQ ID NO: 999889 - RNA, 19 nt, Artificial Sequence
  Description of Artificial Sequence: Synthetic oligonucleotide
  Antisense strand to SEQ ID NO: 999888
uauaauaaagaaugcagcc

SEQ ID NO: 999890 - RNA, 19 nt, Artificial Sequence
  Description of Artificial Sequence: Synthetic oligonucleotide
  Sense strand starting at position 934 of SEQ ID NO: 914385
ggaacucaguuguccaaau

SEQ ID NO: 999891 - RNA, 19 nt, Artificial Sequence
  Description of Artificial Sequence: Synthetic oligonucleotide
  Antisense strand to SEQ ID NO: 999890
auuuggacaacugaguucc

SEQ ID NO: 999892 - RNA, 19 nt, Artificial Sequence
  Description of Artificial Sequence: Synthetic oligonucleotide
  Sense strand starting at position 1091 of SEQ ID NO: 914385
ucagcaugucuggacuagu

SEQ ID NO: 999893 - RNA, 19 nt, Artificial Sequence
  Description of Artificial Sequence: Synthetic oligonucleotide
  Antisense strand to SEQ ID NO: 999892
acuaguccagacaugcuga

SEQ ID NO: 999894 - RNA, 19 nt, Artificial Sequence
  Description of Artificial Sequence: Synthetic oligonucleotide
  Sense strand starting at position 1127 of SEQ ID NO: 914385
ucagaauacugagaaagga

SEQ ID NO: 999895 - RNA, 19 nt, Artificial Sequence
  Description of Artificial Sequence: Synthetic oligonucleotide
  Antisense strand to SEQ ID NO: 999894
uccuuucucaguauucuga

SEQ ID NO: 999896 - RNA, 19 nt, Artificial Sequence
  Description of Artificial Sequence: Synthetic oligonucleotide
  Sense strand starting at position 1199 of SEQ ID NO: 914385
auuacuaaccgaugucuca

SEQ ID NO: 999897 - RNA, 19 nt, Artificial Sequence
  Description of Artificial Sequence: Synthetic oligonucleotide
  Antisense strand to SEQ ID NO: 999896
ugagacaucgguuaguaau

SEQ ID NO: 999898 - RNA, 19 nt, Artificial Sequence
  Description of Artificial Sequence: Synthetic oligonucleotide
  Sense strand starting at position 1422 of SEQ ID NO: 914385
uugugaugcgccuuccuca

SEQ ID NO: 999899 - RNA, 19 nt, Artificial Sequence
  Description of Artificial Sequence: Synthetic oligonucleotide
  Antisense strand to SEQ ID NO: 999898
ugaggaaggcgcaucacaa

SEQ ID NO: 999900 - RNA, 19 nt, Artificial Sequence
  Description of Artificial Sequence: Synthetic oligonucleotide
  Sense strand starting at position 1450 of SEQ ID NO: 914385
ugcguucgucugagaugac

SEQ ID NO: 999901 - RNA, 19 nt, Artificial Sequence
  Description of Artificial Sequence: Synthetic oligonucleotide
  Antisense strand to SEQ ID NO: 999900
gucaucucagacgaacgca

SEQ ID NO: 999902 - RNA, 19 nt, Artificial Sequence
  Description of Artificial Sequence: Synthetic oligonucleotide
  Sense strand starting at position 2009 of SEQ ID NO: 914385
agcagcguucucgcgagaa

SEQ ID NO: 999903 - RNA, 19 nt, Artificial Sequence
  Description of Artificial Sequence: Synthetic oligonucleotide
  Antisense strand to SEQ ID NO: 999902
uucucgcgagaacgcugcu

SEQ ID NO: 999904 - RNA, 19 nt, Artificial Sequence
  Description of Artificial Sequence: Synthetic oligonucleotide
  Sense strand starting at position 2238 of SEQ ID NO: 914385
uccugucaccguuagagaa

SEQ ID NO: 999905 - RNA, 19 nt, Artificial Sequence
  Description of Artificial Sequence: Synthetic oligonucleotide
  Antisense strand to SEQ ID NO: 999904
uucucuaacggugacagga

SEQ ID NO: 999906 - RNA, 19 nt, Artificial Sequence
  Description of Artificial Sequence: Synthetic oligonucleotide
  Sense strand starting at position 2495 of SEQ ID NO: 914385
caccgagagucaccuacau

SEQ ID NO: 999907 - RNA, 19 nt, Artificial Sequence
  Description of Artificial Sequence: Synthetic oligonucleotide
  Antisense strand to SEQ ID NO: 999906
auguaggugacucucggug

SEQ ID NO: 999908 - RNA, 19 nt, Artificial Sequence
  Description of Artificial Sequence: Synthetic oligonucleotide
  Sense strand starting at position 2713 of SEQ ID NO: 914385
gcugaaucuuaagcauaag

SEQ ID NO: 999909 - RNA, 19 nt, Artificial Sequence
  Description of Artificial Sequence: Synthetic oligonucleotide
  Antisense strand to SEQ ID NO: 999908
cuuaugcuuaagauucagc

SEQ ID NO: 999910 - RNA, 19 nt, Artificial Sequence
  Description of Artificial Sequence: Synthetic oligonucleotide
  Sense strand starting at position 2793 of SEQ ID NO: 914385
gaggaccugguuugaguaa

SEQ ID NO: 999911 - RNA, 19 nt, Artificial Sequence
  Description of Artificial Sequence: Synthetic oligonucleotide
  Antisense strand to SEQ ID NO: 999910
uuacucaaaccagguccuc

SEQ ID NO: 999912 - RNA, 19 nt, Artificial Sequence
  Description of Artificial Sequence: Synthetic oligonucleotide
  Sense strand starting at position 2800 of SEQ ID NO: 914385
ugguuugaguaauugggua

SEQ ID NO: 999913 - RNA, 19 nt, Artificial Sequence
  Description of Artificial Sequence: Synthetic oligonucleotide
  Antisense strand to SEQ ID NO: 999912
uacccaauuacucaaacca

SEQ ID NO: 999914 - RNA, 19 nt, Artificial Sequence
  Description of Artificial Sequence: Synthetic oligonucleotide
  Sense strand starting at position 2804 of SEQ ID NO: 914385
uugaguaauuggguaugaa

SEQ ID NO: 999915 - RNA, 19 nt, Artificial Sequence
  Description of Artificial Sequence: Synthetic oligonucleotide
  Antisense strand to SEQ ID NO: 999914
uucauacccaauuacucaa

SEQ ID NO: 999916 - RNA, 19 nt, Artificial Sequence
  Description of Artificial Sequence: Synthetic oligonucleotide
  Sense strand starting at position 2953 of SEQ ID NO: 914385
gcaguugagcuggacaauu

SEQ ID NO: 999917 - RNA, 19 nt, Artificial Sequence
  Description of Artificial Sequence: Synthetic oligonucleotide
  Antisense strand to SEQ ID NO: 999916
aauuguccagcucaacugc

SEQ ID NO: 999918 - RNA, 19 nt, Artificial Sequence
  Description of Artificial Sequence: Synthetic oligonucleotide
  Sense strand starting at position 2955 of SEQ ID NO: 914385
aguugagcuggacaauuau

SEQ ID NO: 999919 - RNA, 19 nt, Artificial Sequence
  Description of Artificial Sequence: Synthetic oligonucleotide
  Antisense strand to SEQ ID NO: 999918
auaauuguccagcucaacu

SEQ ID NO: 999920 - RNA, 19 nt, Artificial Sequence
  Description of Artificial Sequence: Synthetic oligonucleotide
  Sense strand starting at position 2985 of SEQ ID NO: 914385
aucuuucuccuguaaggac

SEQ ID NO: 999921 - RNA, 19 nt, Artificial Sequence
  Description of Artificial Sequence: Synthetic oligonucleotide
  Antisense strand to SEQ ID NO: 999920
guccuuacaggagaaagau

SEQ ID NO: 999922 - RNA, 19 nt, Artificial Sequence
  Description of Artificial Sequence: Synthetic oligonucleotide
  Sense strand starting at position 3021 of SEQ ID NO: 914385
cuaagagaaacggguuauu

SEQ ID NO: 999923 - RNA, 19 nt, Artificial Sequence
  Description of Artificial Sequence: Synthetic oligonucleotide
  Antisense strand to SEQ ID NO: 999922
aauaacccguuucucuuag

SEQ ID NO: 999924 - RNA, 19 nt, Artificial Sequence
  Description of Artificial Sequence: Synthetic oligonucleotide
  Sense strand starting at position 3100 of SEQ ID NO: 914385
ucaaguugucuacauaaga

SEQ ID NO: 999925 - RNA, 19 nt, Artificial Sequence
  Description of Artificial Sequence: Synthetic oligonucleotide
  Antisense strand to SEQ ID NO: 999924
ucuuauguagacaacuuga

SEQ ID NO: 999926 - RNA, 19 nt, Artificial Sequence
  Description of Artificial Sequence: Synthetic oligonucleotide
  Sense strand starting at position 3139 of SEQ ID NO: 914385
ugauacaguuucucagaga

SEQ ID NO: 999927 - RNA, 19 nt, Artificial Sequence
  Description of Artificial Sequence: Synthetic oligonucleotide
  Antisense strand to SEQ ID NO: 999926
ucucugagaaacuguauca

SEQ ID NO: 999928 - RNA, 19 nt, Artificial Sequence
  Description of Artificial Sequence: Synthetic oligonucleotide
  Sense strand starting at position 3229 of SEQ ID NO: 914385
auaagcucugcucagaaga

SEQ ID NO: 999929 - RNA, 19 nt, Artificial Sequence
  Description of Artificial Sequence: Synthetic oligonucleotide
  Antisense strand to SEQ ID NO: 999928
ucuucugagcagagcuuau

SEQ ID NO: 999930 - RNA, 19 nt, Artificial Sequence
  Description of Artificial Sequence: Synthetic oligonucleotide
  Sense strand starting at position 3246 of SEQ ID NO: 914385
gaagucauucuguagucca

SEQ ID NO: 999931 - RNA, 19 nt, Artificial Sequence
  Description of Artificial Sequence: Synthetic oligonucleotide
  Antisense strand to SEQ ID NO: 999930
uggacuacagaaugacuuc

SEQ ID NO: 999932 - RNA, 19 nt, Artificial Sequence
  Description of Artificial Sequence: Synthetic oligonucleotide
  Sense strand starting at position 3640 of SEQ ID NO: 914385
ggugaaaucuguucuuuaa

SEQ ID NO: 999933 - RNA, 19 nt, Artificial Sequence
  Description of Artificial Sequence: Synthetic oligonucleotide
  Antisense strand to SEQ ID NO: 999932
uuaaagaacagauuucacc

SEQ ID NO: 999934 - RNA, 19 nt, Artificial Sequence
  Description of Artificial Sequence: Synthetic oligonucleotide
  Sense strand starting at position 3975 of SEQ ID NO: 914385
auggaaacuuuguuccaug

SEQ ID NO: 999935 - RNA, 19 nt, Artificial Sequence
  Description of Artificial Sequence: Synthetic oligonucleotide
  Antisense strand to SEQ ID NO: 999934
cauggaacaaaguuuccau

SEQ ID NO: 999936 - RNA, 19 nt, Artificial Sequence
  Description of Artificial Sequence: Synthetic oligonucleotide
  Sense strand starting at position 38 of SEQ ID NO: 914386
guguaaucacacugaagau

SEQ ID NO: 999937 - RNA, 19 nt, Artificial Sequence
  Description of Artificial Sequence: Synthetic oligonucleotide
  Antisense strand to SEQ ID NO: 999936
aucuucagugugauuacac

SEQ ID NO: 999938 - RNA, 19 nt, Artificial Sequence
  Description of Artificial Sequence: Synthetic oligonucleotide
  Sense strand starting at position 53 of SEQ ID NO: 914386
agaucuuucucugucagaa

SEQ ID NO: 999939 - RNA, 19 nt, Artificial Sequence
  Description of Artificial Sequence: Synthetic oligonucleotide
  Antisense strand to SEQ ID NO: 999938
uucugacagagaaagaucu

SEQ ID NO: 999940 - RNA, 19 nt, Artificial Sequence
  Description of Artificial Sequence: Synthetic oligonucleotide
  Sense strand starting at position 140 of SEQ ID NO: 914386
ugaaaucaugcugaucuuu

SEQ ID NO: 999941 - RNA, 19 nt, Artificial Sequence
  Description of Artificial Sequence: Synthetic oligonucleotide
  Antisense strand to SEQ ID NO: 999940
aaagaucagcaugauuuca

SEQ ID NO: 999942 - RNA, 19 nt, Artificial Sequence
  Description of Artificial Sequence: Synthetic oligonucleotide
  Sense strand starting at position 161 of SEQ ID NO: 914386
ucugaucaguuaucagaaa

SEQ ID NO: 999943 - RNA, 19 nt, Artificial Sequence
  Description of Artificial Sequence: Synthetic oligonucleotide
  Antisense strand to SEQ ID NO: 999942
uuucugauaacugaucaga

SEQ ID NO: 999944 - RNA, 19 nt, Artificial Sequence
  Description of Artificial Sequence: Synthetic oligonucleotide
  Sense strand starting at position 179 of SEQ ID NO: 914386
aaaugcggauuggugaaau

SEQ ID NO: 999945 - RNA, 19 nt, Artificial Sequence
  Description of Artificial Sequence: Synthetic oligonucleotide
  Antisense strand to SEQ ID NO: 999944
auuucaccaauccgcauuu

SEQ ID NO: 999946 - RNA, 19 nt, Artificial Sequence
  Description of Artificial Sequence: Synthetic oligonucleotide
  Sense strand starting at position 345 of SEQ ID NO: 914386
aagugcauauguguuauuu

SEQ ID NO: 999947 - RNA, 19 nt, Artificial Sequence
  Description of Artificial Sequence: Synthetic oligonucleotide
  Antisense strand to SEQ ID NO: 999946
aaauaacacauaugcacuu

SEQ ID NO: 999948 - RNA, 19 nt, Artificial Sequence
  Description of Artificial Sequence: Synthetic oligonucleotide
  Sense strand starting at position 581 of SEQ ID NO: 914386
aaaggucuagcuugagauu

SEQ ID NO: 999949 - RNA, 19 nt, Artificial Sequence
  Description of Artificial Sequence: Synthetic oligonucleotide
  Antisense strand to SEQ ID NO: 999948
aaucucaagcuagaccuuu

SEQ ID NO: 999950 - RNA, 19 nt, Artificial Sequence
  Description of Artificial Sequence: Synthetic oligonucleotide
  Sense strand starting at position 944 of SEQ ID NO: 914386
cuaauaaagugagcaauau

SEQ ID NO: 999951 - RNA, 19 nt, Artificial Sequence
  Description of Artificial Sequence: Synthetic oligonucleotide
  Antisense strand to SEQ ID NO: 999950
auauugcucacuuuauuag

SEQ ID NO: 999952 - RNA, 19 nt, Artificial Sequence
  Description of Artificial Sequence: Synthetic oligonucleotide
  Sense strand starting at position 1090 of SEQ ID NO: 914386
uggguucuuugacuugaaa

SEQ ID NO: 999953 - RNA, 19 nt, Artificial Sequence
  Description of Artificial Sequence: Synthetic oligonucleotide
  Antisense strand to SEQ ID NO: 999952
uuucaagucaaagaaccca

SEQ ID NO: 999954 - RNA, 19 nt, Artificial Sequence
  Description of Artificial Sequence: Synthetic oligonucleotide
  Sense strand starting at position 1092 of SEQ ID NO: 914386
gguucuuugacuugaaaga

SEQ ID NO: 999955 - RNA, 19 nt, Artificial Sequence
  Description of Artificial Sequence: Synthetic oligonucleotide
  Antisense strand to SEQ ID NO: 999954
ucuuucaagucaaagaacc

SEQ ID NO: 999956 - RNA, 19 nt, Artificial Sequence
  Description of Artificial Sequence: Synthetic oligonucleotide
  Sense strand starting at position 1440 of SEQ ID NO: 914386
guaacuugccauuaaacug

SEQ ID NO: 999957 - RNA, 19 nt, Artificial Sequence
  Description of Artificial Sequence: Synthetic oligonucleotide
  Antisense strand to SEQ ID NO: 999956
caguuuaauggcaaguuac

SEQ ID NO: 999958 - RNA, 19 nt, Artificial Sequence
  Description of Artificial Sequence: Synthetic oligonucleotide
  Sense strand starting at position 1723 of SEQ ID NO: 914386
ugggcauuacuaggaaacu

SEQ ID NO: 999959 - RNA, 19 nt, Artificial Sequence
  Description of Artificial Sequence: Synthetic oligonucleotide
  Antisense strand to SEQ ID NO: 999958
aguuuccuaguaaugccca

SEQ ID NO: 999960 - RNA, 19 nt, Artificial Sequence
  Description of Artificial Sequence: Synthetic oligonucleotide
  Sense strand starting at position 1815 of SEQ ID NO: 914386
cucaccuguccauagacuu

SEQ ID NO: 999961 - RNA, 19 nt, Artificial Sequence
  Description of Artificial Sequence: Synthetic oligonucleotide
  Antisense strand to SEQ ID NO: 999960
aagucuauggacaggugag

SEQ ID NO: 999962 - RNA, 19 nt, Artificial Sequence
  Description of Artificial Sequence: Synthetic oligonucleotide
  Sense strand starting at position 1847 of SEQ ID NO: 914386
cccucuacuguguaauaau

SEQ ID NO: 999963 - RNA, 19 nt, Artificial Sequence
  Description of Artificial Sequence: Synthetic oligonucleotide
  Antisense strand to SEQ ID NO: 999962
auuauuacacaguagaggg

SEQ ID NO: 999964 - RNA, 19 nt, Artificial Sequence
  Description of Artificial Sequence: Synthetic oligonucleotide
  Sense strand starting at position 2022 of SEQ ID NO: 914386
uccaucucugagcagugau

SEQ ID NO: 999965 - RNA, 19 nt, Artificial Sequence
  Description of Artificial Sequence: Synthetic oligonucleotide
  Antisense strand to SEQ ID NO: 999964
aucacugcucagagaugga

SEQ ID NO: 999966 - RNA, 19 nt, Artificial Sequence
  Description of Artificial Sequence: Synthetic oligonucleotide
  Sense strand starting at position 2030 of SEQ ID NO: 914386
ugagcagugauuggauauu

SEQ ID NO: 999967 - RNA, 19 nt, Artificial Sequence
  Description of Artificial Sequence: Synthetic oligonucleotide
  Antisense strand to SEQ ID NO: 999966
aauauccaaucacugcuca

SEQ ID NO: 999968 - RNA, 19 nt, Artificial Sequence
  Description of Artificial Sequence: Synthetic oligonucleotide
  Sense strand starting at position 2041 of SEQ ID NO: 914386
uggauauuguaauugauag

SEQ ID NO: 999969 - RNA, 19 nt, Artificial Sequence
  Description of Artificial Sequence: Synthetic oligonucleotide
  Antisense strand to SEQ ID NO: 999968
cuaucaauuacaauaucca

SEQ ID NO: 999970 - RNA, 19 nt, Artificial Sequence
  Description of Artificial Sequence: Synthetic oligonucleotide
  Sense strand starting at position 2088 of SEQ ID NO: 914386
ggcuuagagauauguagau

SEQ ID NO: 999971 - RNA, 19 nt, Artificial Sequence
  Description of Artificial Sequence: Synthetic oligonucleotide
  Antisense strand to SEQ ID NO: 999970
aucuacauaucucuaagcc

SEQ ID NO: 999972 - RNA, 19 nt, Artificial Sequence
  Description of Artificial Sequence: Synthetic oligonucleotide
  Sense strand starting at position 2216 of SEQ ID NO: 914386
auccauucugggcaguaaa

SEQ ID NO: 999973 - RNA, 19 nt, Artificial Sequence
  Description of Artificial Sequence: Synthetic oligonucleotide
  Antisense strand to SEQ ID NO: 999972
uuuacugcccagaauggau

SEQ ID NO: 999974 - RNA, 19 nt, Artificial Sequence
  Description of Artificial Sequence: Synthetic oligonucleotide
  Sense strand starting at position 2337 of SEQ ID NO: 914386
agggcuaugaagugacuua

SEQ ID NO: 999975 - RNA, 19 nt, Artificial Sequence
  Description of Artificial Sequence: Synthetic oligonucleotide
  Antisense strand to SEQ ID NO: 999974
uaagucacuucauagcccu

SEQ ID NO: 999976 - RNA, 19 nt, Artificial Sequence
  Description of Artificial Sequence: Synthetic oligonucleotide
  Sense strand starting at position 2437 of SEQ ID NO: 914386
cggcauagucuauacugaa

SEQ ID NO: 999977 - RNA, 19 nt, Artificial Sequence
  Description of Artificial Sequence: Synthetic oligonucleotide
  Antisense strand to SEQ ID NO: 999976
uucaguauagacuaugccg

SEQ ID NO: 999978 - RNA, 19 nt, Artificial Sequence
  Description of Artificial Sequence: Synthetic oligonucleotide
  Sense strand starting at position 2444 of SEQ ID NO: 914386
gucuauacugaauguauga

SEQ ID NO: 999979 - RNA, 19 nt, Artificial Sequence
  Description of Artificial Sequence: Synthetic oligonucleotide
  Antisense strand to SEQ ID NO: 999978
ucauacauucaguauagac

SEQ ID NO: 999980 - RNA, 19 nt, Artificial Sequence
  Description of Artificial Sequence: Synthetic oligonucleotide
  Sense strand starting at position 2460 of SEQ ID NO: 914386
ugaugcauuuaucuuuagu

SEQ ID NO: 999981 - RNA, 19 nt, Artificial Sequence
  Description of Artificial Sequence: Synthetic oligonucleotide
  Antisense strand to SEQ ID NO: 999980
acuaaagauaaaugcauca

SEQ ID NO: 999982 - RNA, 19 nt, Artificial Sequence
  Description of Artificial Sequence: Synthetic oligonucleotide
  Sense strand starting at position 2931 of SEQ ID NO: 914386
agacuaguuucuuuaacug

SEQ ID NO: 999983 - RNA, 19 nt, Artificial Sequence
  Description of Artificial Sequence: Synthetic oligonucleotide
  Antisense strand to SEQ ID NO: 999982
caguuaaagaaacuagucu

SEQ ID NO: 999984 - RNA, 19 nt, Artificial Sequence
  Description of Artificial Sequence: Synthetic oligonucleotide
  Sense strand starting at position 3054 of SEQ ID NO: 914386
agaugauggacaugcuacu

SEQ ID NO: 999985 - RNA, 19 nt, Artificial Sequence
  Description of Artificial Sequence: Synthetic oligonucleotide
  Antisense strand to SEQ ID NO: 999984
aguagcauguccaucaucu

SEQ ID NO: 999986 - RNA, 19 nt, Artificial Sequence
  Description of Artificial Sequence: Synthetic oligonucleotide
  Sense strand starting at position 3077 of SEQ ID NO: 914386
cugauacgaucacuauaug

SEQ ID NO: 999987 - RNA, 19 nt, Artificial Sequence
  Description of Artificial Sequence: Synthetic oligonucleotide
  Antisense strand to SEQ ID NO: 999986
cauauagugaucguaucag

SEQ ID NO: 999988 - RNA, 19 nt, Artificial Sequence
  Description of Artificial Sequence: Synthetic oligonucleotide
  Sense strand starting at position 3096 of SEQ ID NO: 914386
auacacauaucacuaggua

SEQ ID NO: 999989 - RNA, 19 nt, Artificial Sequence
  Description of Artificial Sequence: Synthetic oligonucleotide
  Antisense strand to SEQ ID NO: 999988
uaccuagugauauguguau

SEQ ID NO: 999990 - RNA, 19 nt, Artificial Sequence
  Description of Artificial Sequence: Synthetic oligonucleotide
  Sense strand starting at position 3225 of SEQ ID NO: 914386
accuaaaguuguuuagaua

SEQ ID NO: 999991 - RNA, 19 nt, Artificial Sequence
  Description of Artificial Sequence: Synthetic oligonucleotide
  Antisense strand to SEQ ID NO: 999990
uaucuaaacaacuuuaggu

SEQ ID NO: 999992 - RNA, 19 nt, Artificial Sequence
  Description of Artificial Sequence: Synthetic oligonucleotide
  Sense strand starting at position 3226 of SEQ ID NO: 914386
ccuaaaguuguuuagauag

SEQ ID NO: 999993 - RNA, 19 nt, Artificial Sequence
  Description of Artificial Sequence: Synthetic oligonucleotide
  Antisense strand to SEQ ID NO: 999992
cuaucuaaacaacuuuagg

SEQ ID NO: 999994 - RNA, 19 nt, Artificial Sequence
  Description of Artificial Sequence: Synthetic oligonucleotide
  Sense strand starting at position 3501 of SEQ ID NO: 914386
augcuuauuuccuuacguu

SEQ ID NO: 999995 - RNA, 19 nt, Artificial Sequence
  Description of Artificial Sequence: Synthetic oligonucleotide
  Antisense strand to SEQ ID NO: 999994
aacguaaggaaauaagcau

SEQ ID NO: 999996 - RNA, 19 nt, Artificial Sequence
  Description of Artificial Sequence: Synthetic oligonucleotide
  Sense strand starting at position 3502 of SEQ ID NO: 914386
ugcuuauuuccuuacguuu

SEQ ID NO: 999997 - RNA, 19 nt, Artificial Sequence
  Description of Artificial Sequence: Synthetic oligonucleotide
  Antisense strand to SEQ ID NO: 999996
aaacguaaggaaauaagca

SEQ ID NO: 999998 - RNA, 19 nt, Artificial Sequence
  Description of Artificial Sequence: Synthetic oligonucleotide
  Sense strand starting at position 3548 of SEQ ID NO: 914386
gugacaaugugcccaauuu

SEQ ID NO: 999999 - RNA, 19 nt, Artificial Sequence
  Description of Artificial Sequence: Synthetic oligonucleotide
  Antisense strand to SEQ ID NO: 999998
aaauugggcacauugucac

SEQ ID NO: 1000000 - RNA, 19 nt, Artificial Sequence
  Description of Artificial Sequence: Synthetic oligonucleotide
  Sense strand starting at position 3604 of SEQ ID NO: 914386
gccauaugacaugauucua

SEQ ID NO: 1000001 - RNA, 19 nt, Artificial Sequence
  Description of Artificial Sequence: Synthetic oligonucleotide
  Antisense strand to SEQ ID NO: 1000000
uagaaucaugucauauggc

SEQ ID NO: 1000002 - RNA, 19 nt, Artificial Sequence
  Description of Artificial Sequence: Synthetic oligonucleotide
  Sense strand starting at position 3612 of SEQ ID NO: 914386
acaugauucuagccaauga

SEQ ID NO: 1000003 - RNA, 19 nt, Artificial Sequence
  Description of Artificial Sequence: Synthetic oligonucleotide
  Antisense strand to SEQ ID NO: 1000002
ucauuggcuagaaucaugu

SEQ ID NO: 1000004 - RNA, 19 nt, Artificial Sequence
  Description of Artificial Sequence: Synthetic oligonucleotide
  Sense strand starting at position 3630 of SEQ ID NO: 914386
acugguuuauaagcagaua

SEQ ID NO: 1000005 - RNA, 19 nt, Artificial Sequence
  Description of Artificial Sequence: Synthetic oligonucleotide
  Antisense strand to SEQ ID NO: 1000004
uaucugcuuauaaaccagu

SEQ ID NO: 1000006 - RNA, 19 nt, Artificial Sequence
  Description of Artificial Sequence: Synthetic oligonucleotide
  Sense strand starting at position 3633 of SEQ ID NO: 914386
gguuuauaagcagauaucu

SEQ ID NO: 1000007 - RNA, 19 nt, Artificial Sequence
  Description of Artificial Sequence: Synthetic oligonucleotide
  Antisense strand to SEQ ID NO: 1000006
agauaucugcuuauaaacc

SEQ ID NO: 1000008 - RNA, 19 nt, Artificial Sequence
  Description of Artificial Sequence: Synthetic oligonucleotide
  Sense strand starting at position 3653 of SEQ ID NO: 914386
cuggaaauuucugagaaau

SEQ ID NO: 1000009 - RNA, 19 nt, Artificial Sequence
  Description of Artificial Sequence: Synthetic oligonucleotide
  Antisense strand to SEQ ID NO: 1000008
auuucucagaaauuuccag

SEQ ID NO: 1000010 - RNA, 19 nt, Artificial Sequence
  Description of Artificial Sequence: Synthetic oligonucleotide
  Sense strand starting at position 3709 of SEQ ID NO: 914386
uuccuucuugucuagaaag

SEQ ID NO: 1000011 - RNA, 19 nt, Artificial Sequence
  Description of Artificial Sequence: Synthetic oligonucleotide
  Antisense strand to SEQ ID NO: 1000010
cuuucuagacaagaaggaa

SEQ ID NO: 1000012 - RNA, 19 nt, Artificial Sequence
  Description of Artificial Sequence: Synthetic oligonucleotide
  Sense strand starting at position 3711 of SEQ ID NO: 914386
ccuucuugucuagaaagug

SEQ ID NO: 1000013 - RNA, 19 nt, Artificial Sequence
  Description of Artificial Sequence: Synthetic oligonucleotide
  Antisense strand to SEQ ID NO: 1000012
cacuuucuagacaagaagg

SEQ ID NO: 1000014 - RNA, 19 nt, Artificial Sequence
  Description of Artificial Sequence: Synthetic oligonucleotide
  Sense strand starting at position 3966 of SEQ ID NO: 914386
guaggagaggcaugaugaa

SEQ ID NO: 1000015 - RNA, 19 nt, Artificial Sequence
  Description of Artificial Sequence: Synthetic oligonucleotide
  Antisense strand to SEQ ID NO: 1000014
uucaucaugccucuccuac

SEQ ID NO: 1000016 - RNA, 19 nt, Artificial Sequence
  Description of Artificial Sequence: Synthetic oligonucleotide
  Sense strand starting at position 12 of SEQ ID NO: 914387
guauguaauccacaaacug

SEQ ID NO: 1000017 - RNA, 19 nt, Artificial Sequence
  Description of Artificial Sequence: Synthetic oligonucleotide
  Antisense strand to SEQ ID NO: 1000016
caguuuguggauuacauac

SEQ ID NO: 1000018 - RNA, 19 nt, Artificial Sequence
  Description of Artificial Sequence: Synthetic oligonucleotide
  Sense strand starting at position 24 of SEQ ID NO: 914387
caaacuguagagugguaua

SEQ ID NO: 1000019 - RNA, 19 nt, Artificial Sequence
  Description of Artificial Sequence: Synthetic oligonucleotide
  Antisense strand to SEQ ID NO: 1000018
uauaccacucuacaguuug

SEQ ID NO: 1000020 - RNA, 19 nt, Artificial Sequence
  Description of Artificial Sequence: Synthetic oligonucleotide
  Sense strand starting at position 29 of SEQ ID NO: 914387
uguagagugguauacaaua

SEQ ID NO: 1000021 - RNA, 19 nt, Artificial Sequence
  Description of Artificial Sequence: Synthetic oligonucleotide
  Antisense strand to SEQ ID NO: 1000020
uauuguauaccacucuaca

SEQ ID NO: 1000022 - RNA, 19 nt, Artificial Sequence
  Description of Artificial Sequence: Synthetic oligonucleotide
  Sense strand starting at position 163 of SEQ ID NO: 914387
aaucuugggccuuguacau

SEQ ID NO: 1000023 - RNA, 19 nt, Artificial Sequence
  Description of Artificial Sequence: Synthetic oligonucleotide
  Antisense strand to SEQ ID NO: 1000022
auguacaaggcccaagauu

SEQ ID NO: 1000024 - RNA, 19 nt, Artificial Sequence
  Description of Artificial Sequence: Synthetic oligonucleotide
  Sense strand starting at position 170 of SEQ ID NO: 914387
ggccuuguacauuauauau

SEQ ID NO: 1000025 - RNA, 19 nt, Artificial Sequence
  Description of Artificial Sequence: Synthetic oligonucleotide
  Antisense strand to SEQ ID NO: 1000024
auauauaauguacaaggcc

SEQ ID NO: 1000026 - RNA, 19 nt, Artificial Sequence
  Description of Artificial Sequence: Synthetic oligonucleotide
  Sense strand starting at position 192 of SEQ ID NO: 914387
ggucuacuuuaugcugaau

SEQ ID NO: 1000027 - RNA, 19 nt, Artificial Sequence
  Description of Artificial Sequence: Synthetic oligonucleotide
  Antisense strand to SEQ ID NO: 1000026
auucagcauaaaguagacc

SEQ ID NO: 1000028 - RNA, 19 nt, Artificial Sequence
  Description of Artificial Sequence: Synthetic oligonucleotide
  Sense strand starting at position 282 of SEQ ID NO: 914387
agucaucaauuugaagauu

SEQ ID NO: 1000029 - RNA, 19 nt, Artificial Sequence
  Description of Artificial Sequence: Synthetic oligonucleotide
  Antisense strand to SEQ ID NO: 1000028
aaucuucaaauugaugacu

SEQ ID NO: 1000030 - RNA, 19 nt, Artificial Sequence
  Description of Artificial Sequence: Synthetic oligonucleotide
  Sense strand starting at position 940 of SEQ ID NO: 914387
cacauauugugguuaguau

SEQ ID NO: 1000031 - RNA, 19 nt, Artificial Sequence
  Description of Artificial Sequence: Synthetic oligonucleotide
  Antisense strand to SEQ ID NO: 1000030
auacuaaccacaauaugug

SEQ ID NO: 1000032 - RNA, 19 nt, Artificial Sequence
  Description of Artificial Sequence: Synthetic oligonucleotide
  Sense strand starting at position 1018 of SEQ ID NO: 914387
auuggaauauuauccaugu

SEQ ID NO: 1000033 - RNA, 19 nt, Artificial Sequence
  Description of Artificial Sequence: Synthetic oligonucleotide
  Antisense strand to SEQ ID NO: 1000032
acauggauaauauuccaau

SEQ ID NO: 1000034 - RNA, 19 nt, Artificial Sequence
  Description of Artificial Sequence: Synthetic oligonucleotide
  Sense strand starting at position 1019 of SEQ ID NO: 914387
uuggaauauuauccauguu

SEQ ID NO: 1000035 - RNA, 19 nt, Artificial Sequence
  Description of Artificial Sequence: Synthetic oligonucleotide
  Antisense strand to SEQ ID NO: 1000034
aacauggauaauauuccaa

SEQ ID NO: 1000036 - RNA, 19 nt, Artificial Sequence
  Description of Artificial Sequence: Synthetic oligonucleotide
  Sense strand starting at position 1125 of SEQ ID NO: 914387
aguaguaauuguccuagaa

SEQ ID NO: 1000037 - RNA, 19 nt, Artificial Sequence
  Description of Artificial Sequence: Synthetic oligonucleotide
  Antisense strand to SEQ ID NO: 1000036
uucuaggacaauuacuacu

SEQ ID NO: 1000038 - RNA, 19 nt, Artificial Sequence
  Description of Artificial Sequence: Synthetic oligonucleotide
  Sense strand starting at position 1162 of SEQ ID NO: 914387
aauaguuuacaguggucau

SEQ ID NO: 1000039 - RNA, 19 nt, Artificial Sequence
  Description of Artificial Sequence: Synthetic oligonucleotide
  Antisense strand to SEQ ID NO: 1000038
augaccacuguaaacuauu

SEQ ID NO: 1000040 - RNA, 19 nt, Artificial Sequence
  Description of Artificial Sequence: Synthetic oligonucleotide
  Sense strand starting at position 1163 of SEQ ID NO: 914387
auaguuuacaguggucaua

SEQ ID NO: 1000041 - RNA, 19 nt, Artificial Sequence
  Description of Artificial Sequence: Synthetic oligonucleotide
  Antisense strand to SEQ ID NO: 1000040
uaugaccacuguaaacuau

SEQ ID NO: 1000042 - RNA, 19 nt, Artificial Sequence
  Description of Artificial Sequence: Synthetic oligonucleotide
  Sense strand starting at position 1172 of SEQ ID NO: 914387
aguggucauaggcaguaau

SEQ ID NO: 1000043 - RNA, 19 nt, Artificial Sequence
  Description of Artificial Sequence: Synthetic oligonucleotide
  Antisense strand to SEQ ID NO: 1000042
auuacugccuaugaccacu

SEQ ID NO: 1000044 - RNA, 19 nt, Artificial Sequence
  Description of Artificial Sequence: Synthetic oligonucleotide
  Sense strand starting at position 1175 of SEQ ID NO: 914387
ggucauaggcaguaauauu

SEQ ID NO: 1000045 - RNA, 19 nt, Artificial Sequence
  Description of Artificial Sequence: Synthetic oligonucleotide
  Antisense strand to SEQ ID NO: 1000044
aauauuacugccuaugacc

SEQ ID NO: 1000046 - RNA, 19 nt, Artificial Sequence
  Description of Artificial Sequence: Synthetic oligonucleotide
  Sense strand starting at position 1447 of SEQ ID NO: 914387
aucagacuccuguagguga

SEQ ID NO: 1000047 - RNA, 19 nt, Artificial Sequence
  Description of Artificial Sequence: Synthetic oligonucleotide
  Antisense strand to SEQ ID NO: 1000046
ucaccuacaggagucugau

SEQ ID NO: 1000048 - RNA, 19 nt, Artificial Sequence
  Description of Artificial Sequence: Synthetic oligonucleotide
  Sense strand starting at position 1451 of SEQ ID NO: 914387
gacuccuguaggugagaua

SEQ ID NO: 1000049 - RNA, 19 nt, Artificial Sequence
  Description of Artificial Sequence: Synthetic oligonucleotide
  Antisense strand to SEQ ID NO: 1000048
uaucucaccuacaggaguc

SEQ ID NO: 1000050 - RNA, 19 nt, Artificial Sequence
  Description of Artificial Sequence: Synthetic oligonucleotide
  Sense strand starting at position 1542 of SEQ ID NO: 914387
gagauaauaguaugaguug

SEQ ID NO: 1000051 - RNA, 19 nt, Artificial Sequence
  Description of Artificial Sequence: Synthetic oligonucleotide
  Antisense strand to SEQ ID NO: 1000050
caacucauacuauuaucuc

SEQ ID NO: 1000052 - RNA, 19 nt, Artificial Sequence
  Description of Artificial Sequence: Synthetic oligonucleotide
  Sense strand starting at position 1584 of SEQ ID NO: 914387
ugccaaggauaucucaaga

SEQ ID NO: 1000053 - RNA, 19 nt, Artificial Sequence
  Description of Artificial Sequence: Synthetic oligonucleotide
  Antisense strand to SEQ ID NO: 1000052
ucuugagauauccuuggca

SEQ ID NO: 1000054 - RNA, 19 nt, Artificial Sequence
  Description of Artificial Sequence: Synthetic oligonucleotide
  Sense strand starting at position 1637 of SEQ ID NO: 914387
cagagauaagccuagguuu

SEQ ID NO: 1000055 - RNA, 19 nt, Artificial Sequence
  Description of Artificial Sequence: Synthetic oligonucleotide
  Antisense strand to SEQ ID NO: 1000054
aaaccuaggcuuaucucug

SEQ ID NO: 1000056 - RNA, 19 nt, Artificial Sequence
  Description of Artificial Sequence: Synthetic oligonucleotide
  Sense strand starting at position 1669 of SEQ ID NO: 914387
auuuauuagccuggcugua

SEQ ID NO: 1000057 - RNA, 19 nt, Artificial Sequence
  Description of Artificial Sequence: Synthetic oligonucleotide
  Antisense strand to SEQ ID NO: 1000056
uacagccaggcuaauaaau

SEQ ID NO: 1000058 - RNA, 19 nt, Artificial Sequence
  Description of Artificial Sequence: Synthetic oligonucleotide
  Sense strand starting at position 1702 of SEQ ID NO: 914387
ugaccuaacuucucugagu

SEQ ID NO: 1000059 - RNA, 19 nt, Artificial Sequence
  Description of Artificial Sequence: Synthetic oligonucleotide
  Antisense strand to SEQ ID NO: 1000058
acucagagaaguuagguca

SEQ ID NO: 1000060 - RNA, 19 nt, Artificial Sequence
  Description of Artificial Sequence: Synthetic oligonucleotide
  Sense strand starting at position 1798 of SEQ ID NO: 914387
gguaaaguugcuuagcaca

SEQ ID NO: 1000061 - RNA, 19 nt, Artificial Sequence
  Description of Artificial Sequence: Synthetic oligonucleotide
  Antisense strand to SEQ ID NO: 1000060
ugugcuaagcaacuuuacc

SEQ ID NO: 1000062 - RNA, 19 nt, Artificial Sequence
  Description of Artificial Sequence: Synthetic oligonucleotide
  Sense strand starting at position 2045 of SEQ ID NO: 914387
cugagcucacuguaucaca

SEQ ID NO: 1000063 - RNA, 19 nt, Artificial Sequence
  Description of Artificial Sequence: Synthetic oligonucleotide
  Antisense strand to SEQ ID NO: 1000062
ugugauacagugagcucag

SEQ ID NO: 1000064 - RNA, 19 nt, Artificial Sequence
  Description of Artificial Sequence: Synthetic oligonucleotide
  Sense strand starting at position 2153 of SEQ ID NO: 914387
cuggguguacuugaccaaa

SEQ ID NO: 1000065 - RNA, 19 nt, Artificial Sequence
  Description of Artificial Sequence: Synthetic oligonucleotide
  Antisense strand to SEQ ID NO: 1000064
uuuggucaaguacacccag

SEQ ID NO: 1000066 - RNA, 19 nt, Artificial Sequence
  Description of Artificial Sequence: Synthetic oligonucleotide
  Sense strand starting at position 2178 of SEQ ID NO: 914387
cugacugacccugguagua

SEQ ID NO: 1000067 - RNA, 19 nt, Artificial Sequence
  Description of Artificial Sequence: Synthetic oligonucleotide
  Antisense strand to SEQ ID NO: 1000066
uacuaccagggucagucag

SEQ ID NO: 1000068 - RNA, 19 nt, Artificial Sequence
  Description of Artificial Sequence: Synthetic oligonucleotide
  Sense strand starting at position 2187 of SEQ ID NO: 914387
ccugguaguaggcaaagaa

SEQ ID NO: 1000069 - RNA, 19 nt, Artificial Sequence
  Description of Artificial Sequence: Synthetic oligonucleotide
  Antisense strand to SEQ ID NO: 1000068
uucuuugccuacuaccagg

SEQ ID NO: 1000070 - RNA, 19 nt, Artificial Sequence
  Description of Artificial Sequence: Synthetic oligonucleotide
  Sense strand starting at position 2226 of SEQ ID NO: 914387
aguuaauuaccaggcuaac

SEQ ID NO: 1000071 - RNA, 19 nt, Artificial Sequence
  Description of Artificial Sequence: Synthetic oligonucleotide
  Antisense strand to SEQ ID NO: 1000070
guuagccugguaauuaacu

SEQ ID NO: 1000072 - RNA, 19 nt, Artificial Sequence
  Description of Artificial Sequence: Synthetic oligonucleotide
  Sense strand starting at position 2679 of SEQ ID NO: 914387
ggaggcagagguuguagau

SEQ ID NO: 1000073 - RNA, 19 nt, Artificial Sequence
  Description of Artificial Sequence: Synthetic oligonucleotide
  Antisense strand to SEQ ID NO: 1000072
aucuacaaccucugccucc

SEQ ID NO: 1000074 - RNA, 19 nt, Artificial Sequence
  Description of Artificial Sequence: Synthetic oligonucleotide
  Sense strand starting at position 2760 of SEQ ID NO: 914387
uucccaucccagugagaga

SEQ ID NO: 1000075 - RNA, 19 nt, Artificial Sequence
  Description of Artificial Sequence: Synthetic oligonucleotide
  Antisense strand to SEQ ID NO: 1000074
ucucucacugggaugggaa

SEQ ID NO: 1000076 - RNA, 19 nt, Artificial Sequence
  Description of Artificial Sequence: Synthetic oligonucleotide
  Sense strand starting at position 3110 of SEQ ID NO: 914387
gcccaacuccuuugaagaa

SEQ ID NO: 1000077 - RNA, 19 nt, Artificial Sequence
  Description of Artificial Sequence: Synthetic oligonucleotide
  Antisense strand to SEQ ID NO: 1000076
uucuucaaaggaguugggc

SEQ ID NO: 1000078 - RNA, 19 nt, Artificial Sequence
  Description of Artificial Sequence: Synthetic oligonucleotide
  Sense strand starting at position 3288 of SEQ ID NO: 914387
gguagugauagcgaggguu

SEQ ID NO: 1000079 - RNA, 19 nt, Artificial Sequence
  Description of Artificial Sequence: Synthetic oligonucleotide
  Antisense strand to SEQ ID NO: 1000078
aacccucgcuaucacuacc

SEQ ID NO: 1000080 - RNA, 19 nt, Artificial Sequence
  Description of Artificial Sequence: Synthetic oligonucleotide
  Sense strand starting at position 3591 of SEQ ID NO: 914387
gccucagcacuugaugaaa

SEQ ID NO: 1000081 - RNA, 19 nt, Artificial Sequence
  Description of Artificial Sequence: Synthetic oligonucleotide
  Antisense strand to SEQ ID NO: 1000080
uuucaucaagugcugaggc

SEQ ID NO: 1000082 - RNA, 19 nt, Artificial Sequence
  Description of Artificial Sequence: Synthetic oligonucleotide
  Sense strand starting at position 3675 of SEQ ID NO: 914387
ccgucuucccuuugaagag

SEQ ID NO: 1000083 - RNA, 19 nt, Artificial Sequence
  Description of Artificial Sequence: Synthetic oligonucleotide
  Antisense strand to SEQ ID NO: 1000082
cucuucaaagggaagacgg

SEQ ID NO: 1000084 - RNA, 19 nt, Artificial Sequence
  Description of Artificial Sequence: Synthetic oligonucleotide
  Sense strand starting at position 3748 of SEQ ID NO: 914387
ucuggauggcucugguaac

SEQ ID NO: 1000085 - RNA, 19 nt, Artificial Sequence
  Description of Artificial Sequence: Synthetic oligonucleotide
  Antisense strand to SEQ ID NO: 1000084
guuaccagagccauccaga

SEQ ID NO: 1000086 - RNA, 19 nt, Artificial Sequence
  Description of Artificial Sequence: Synthetic oligonucleotide
  Sense strand starting at position 3781 of SEQ ID NO: 914387
auggcuaauuuagaaaucu

SEQ ID NO: 1000087 - RNA, 19 nt, Artificial Sequence
  Description of Artificial Sequence: Synthetic oligonucleotide
  Antisense strand to SEQ ID NO: 1000086
agauuucuaaauuagccau

SEQ ID NO: 1000088 - RNA, 19 nt, Artificial Sequence
  Description of Artificial Sequence: Synthetic oligonucleotide
  Sense strand starting at position 3820 of SEQ ID NO: 914387
ggaauaagguccuugggca

SEQ ID NO: 1000089 - RNA, 19 nt, Artificial Sequence
  Description of Artificial Sequence: Synthetic oligonucleotide
  Antisense strand to SEQ ID NO: 1000088
ugcccaaggaccuuauucc

SEQ ID NO: 1000090 - RNA, 19 nt, Artificial Sequence
  Description of Artificial Sequence: Synthetic oligonucleotide
  Sense strand starting at position 3935 of SEQ ID NO: 914387
ccgcgaacggucuccauua

SEQ ID NO: 1000091 - RNA, 19 nt, Artificial Sequence
  Description of Artificial Sequence: Synthetic oligonucleotide
  Antisense strand to SEQ ID NO: 1000090
uaauggagaccguucgcgg

SEQ ID NO: 1000092 - RNA, 19 nt, Artificial Sequence
  Description of Artificial Sequence: Synthetic oligonucleotide
  Sense strand starting at position 3945 of SEQ ID NO: 914387
ucuccauuaucguuacaga

SEQ ID NO: 1000093 - RNA, 19 nt, Artificial Sequence
  Description of Artificial Sequence: Synthetic oligonucleotide
  Antisense strand to SEQ ID NO: 1000092
ucuguaacgauaauggaga

SEQ ID NO: 1000094 - RNA, 19 nt, Artificial Sequence
  Description of Artificial Sequence: Synthetic oligonucleotide
  Sense strand starting at position 3946 of SEQ ID NO: 914387
cuccauuaucguuacagag

SEQ ID NO: 1000095 - RNA, 19 nt, Artificial Sequence
  Description of Artificial Sequence: Synthetic oligonucleotide
  Antisense strand to SEQ ID NO: 1000094
cucuguaacgauaauggag

SEQ ID NO: 1000096 - RNA, 19 nt, Artificial Sequence
  Description of Artificial Sequence: Synthetic oligonucleotide
  Sense strand starting at position 186 of SEQ ID NO: 914388
caggcaugccuagacauga

SEQ ID NO: 1000097 - RNA, 19 nt, Artificial Sequence
  Description of Artificial Sequence: Synthetic oligonucleotide
  Antisense strand to SEQ ID NO: 1000096
ucaugucuaggcaugccug

SEQ ID NO: 1000098 - RNA, 19 nt, Artificial Sequence
  Description of Artificial Sequence: Synthetic oligonucleotide
  Sense strand starting at position 215 of SEQ ID NO: 914388
gaaugagauccuuggaguu

SEQ ID NO: 1000099 - RNA, 19 nt, Artificial Sequence
  Description of Artificial Sequence: Synthetic oligonucleotide
  Antisense strand to SEQ ID NO: 1000098
aacuccaaggaucucauuc

SEQ ID NO: 1000100 - RNA, 19 nt, Artificial Sequence
  Description of Artificial Sequence: Synthetic oligonucleotide
  Sense strand starting at position 340 of SEQ ID NO: 914388
uuaguuguacuacauagaa

SEQ ID NO: 1000101 - RNA, 19 nt, Artificial Sequence
  Description of Artificial Sequence: Synthetic oligonucleotide
  Antisense strand to SEQ ID NO: 1000100
uucuauguaguacaacuaa

SEQ ID NO: 1000102 - RNA, 19 nt, Artificial Sequence
  Description of Artificial Sequence: Synthetic oligonucleotide
  Sense strand starting at position 563 of SEQ ID NO: 914388
ggaagaaguguucgauaua

SEQ ID NO: 1000103 - RNA, 19 nt, Artificial Sequence
  Description of Artificial Sequence: Synthetic oligonucleotide
  Antisense strand to SEQ ID NO: 1000102
uauaucgaacacuucuucc

SEQ ID NO: 1000104 - RNA, 19 nt, Artificial Sequence
  Description of Artificial Sequence: Synthetic oligonucleotide
  Sense strand starting at position 566 of SEQ ID NO: 914388
agaaguguucgauauagua

SEQ ID NO: 1000105 - RNA, 19 nt, Artificial Sequence
  Description of Artificial Sequence: Synthetic oligonucleotide
  Antisense strand to SEQ ID NO: 1000104
uacuauaucgaacacuucu

SEQ ID NO: 1000106 - RNA, 19 nt, Artificial Sequence
  Description of Artificial Sequence: Synthetic oligonucleotide
  Sense strand starting at position 575 of SEQ ID NO: 914388
cgauauaguauuggguaaa

SEQ ID NO: 1000107 - RNA, 19 nt, Artificial Sequence
  Description of Artificial Sequence: Synthetic oligonucleotide
  Antisense strand to SEQ ID NO: 1000106
uuuacccaauacuauaucg

SEQ ID NO: 1000108 - RNA, 19 nt, Artificial Sequence
  Description of Artificial Sequence: Synthetic oligonucleotide
  Sense strand starting at position 599 of SEQ ID NO: 914388
cuaacaauuugguagaaga

SEQ ID NO: 1000109 - RNA, 19 nt, Artificial Sequence
  Description of Artificial Sequence: Synthetic oligonucleotide
  Antisense strand to SEQ ID NO: 1000108
ucuucuaccaaauuguuag

SEQ ID NO: 1000110 - RNA, 19 nt, Artificial Sequence
  Description of Artificial Sequence: Synthetic oligonucleotide
  Sense strand starting at position 734 of SEQ ID NO: 914388
auuuauguaaugugugcua

SEQ ID NO: 1000111 - RNA, 19 nt, Artificial Sequence
  Description of Artificial Sequence: Synthetic oligonucleotide
  Antisense strand to SEQ ID NO: 1000110
uagcacacauuacauaaau

SEQ ID NO: 1000112 - RNA, 19 nt, Artificial Sequence
  Description of Artificial Sequence: Synthetic oligonucleotide
  Sense strand starting at position 767 of SEQ ID NO: 914388
ucacaaagauaagaugaau

SEQ ID NO: 1000113 - RNA, 19 nt, Artificial Sequence
  Description of Artificial Sequence: Synthetic oligonucleotide
  Antisense strand to SEQ ID NO: 1000112
auucaucuuaucuuuguga

SEQ ID NO: 1000114 - RNA, 19 nt, Artificial Sequence
  Description of Artificial Sequence: Synthetic oligonucleotide
  Sense strand starting at position 1026 of SEQ ID NO: 914388
guaguuuguauugaaugau

SEQ ID NO: 1000115 - RNA, 19 nt, Artificial Sequence
  Description of Artificial Sequence: Synthetic oligonucleotide
  Antisense strand to SEQ ID NO: 1000114
aucauucaauacaaacuac

SEQ ID NO: 1000116 - RNA, 19 nt, Artificial Sequence
  Description of Artificial Sequence: Synthetic oligonucleotide
  Sense strand starting at position 1029 of SEQ ID NO: 914388
guuuguauugaaugaucca

SEQ ID NO: 1000117 - RNA, 19 nt, Artificial Sequence
  Description of Artificial Sequence: Synthetic oligonucleotide
  Antisense strand to SEQ ID NO: 1000116
uggaucauucaauacaaac

SEQ ID NO: 1000118 - RNA, 19 nt, Artificial Sequence
  Description of Artificial Sequence: Synthetic oligonucleotide
  Sense strand starting at position 1032 of SEQ ID NO: 914388
uguauugaaugauccagau

SEQ ID NO: 1000119 - RNA, 19 nt, Artificial Sequence
  Description of Artificial Sequence: Synthetic oligonucleotide
  Antisense strand to SEQ ID NO: 1000118
aucuggaucauucaauaca

SEQ ID NO: 1000120 - RNA, 19 nt, Artificial Sequence
  Description of Artificial Sequence: Synthetic oligonucleotide
  Sense strand starting at position 1071 of SEQ ID NO: 914388
acuuguggcaucuaugaga

SEQ ID NO: 1000121 - RNA, 19 nt, Artificial Sequence
  Description of Artificial Sequence: Synthetic oligonucleotide
  Antisense strand to SEQ ID NO: 1000120
ucucauagaugccacaagu

SEQ ID NO: 1000122 - RNA, 19 nt, Artificial Sequence
  Description of Artificial Sequence: Synthetic oligonucleotide
  Sense strand starting at position 1112 of SEQ ID NO: 914388
caaucuauaggugggaagu

SEQ ID NO: 1000123 - RNA, 19 nt, Artificial Sequence
  Description of Artificial Sequence: Synthetic oligonucleotide
  Antisense strand to SEQ ID NO: 1000122
acuucccaccuauagauug

SEQ ID NO: 1000124 - RNA, 19 nt, Artificial Sequence
  Description of Artificial Sequence: Synthetic oligonucleotide
  Sense strand starting at position 1113 of SEQ ID NO: 914388
aaucuauaggugggaaguu

SEQ ID NO: 1000125 - RNA, 19 nt, Artificial Sequence
  Description of Artificial Sequence: Synthetic oligonucleotide
  Antisense strand to SEQ ID NO: 1000124
aacuucccaccuauagauu

SEQ ID NO: 1000126 - RNA, 19 nt, Artificial Sequence
  Description of Artificial Sequence: Synthetic oligonucleotide
  Sense strand starting at position 1182 of SEQ ID NO: 914388
ugcucuauacuggaugcau

SEQ ID NO: 1000127 - RNA, 19 nt, Artificial Sequence
  Description of Artificial Sequence: Synthetic oligonucleotide
  Antisense strand to SEQ ID NO: 1000126
augcauccaguauagagca

SEQ ID NO: 1000128 - RNA, 19 nt, Artificial Sequence
  Description of Artificial Sequence: Synthetic oligonucleotide
  Sense strand starting at position 1184 of SEQ ID NO: 914388
cucuauacuggaugcauga

SEQ ID NO: 1000129 - RNA, 19 nt, Artificial Sequence
  Description of Artificial Sequence: Synthetic oligonucleotide
  Antisense strand to SEQ ID NO: 1000128
ucaugcauccaguauagag

SEQ ID NO: 1000130 - RNA, 19 nt, Artificial Sequence
  Description of Artificial Sequence: Synthetic oligonucleotide
  Sense strand starting at position 1315 of SEQ ID NO: 914388
aaguuauuagcagagaucu

SEQ ID NO: 1000131 - RNA, 19 nt, Artificial Sequence
  Description of Artificial Sequence: Synthetic oligonucleotide
  Antisense strand to SEQ ID NO: 1000130
agaucucugcuaauaacuu

SEQ ID NO: 1000132 - RNA, 19 nt, Artificial Sequence
  Description of Artificial Sequence: Synthetic oligonucleotide
  Sense strand starting at position 1337 of SEQ ID NO: 914388
agaaguccucuguaacugu

SEQ ID NO: 1000133 - RNA, 19 nt, Artificial Sequence
  Description of Artificial Sequence: Synthetic oligonucleotide
  Antisense strand to SEQ ID NO: 1000132
acaguuacagaggacuucu

SEQ ID NO: 1000134 - RNA, 19 nt, Artificial Sequence
  Description of Artificial Sequence: Synthetic oligonucleotide
  Sense strand starting at position 1466 of SEQ ID NO: 914388
gggaaccuucuuugaccua

SEQ ID NO: 1000135 - RNA, 19 nt, Artificial Sequence
  Description of Artificial Sequence: Synthetic oligonucleotide
  Antisense strand to SEQ ID NO: 1000134
uaggucaaagaagguuccc

SEQ ID NO: 1000136 - RNA, 19 nt, Artificial Sequence
  Description of Artificial Sequence: Synthetic oligonucleotide
  Sense strand starting at position 1542 of SEQ ID NO: 914388
cuaaauagucccuaguuua

SEQ ID NO: 1000137 - RNA, 19 nt, Artificial Sequence
  Description of Artificial Sequence: Synthetic oligonucleotide
  Antisense strand to SEQ ID NO: 1000136
uaaacuagggacuauuuag

SEQ ID NO: 1000138 - RNA, 19 nt, Artificial Sequence
  Description of Artificial Sequence: Synthetic oligonucleotide
  Sense strand starting at position 1549 of SEQ ID NO: 914388
gucccuaguuuaguaauuu

SEQ ID NO: 1000139 - RNA, 19 nt, Artificial Sequence
  Description of Artificial Sequence: Synthetic oligonucleotide
  Antisense strand to SEQ ID NO: 1000138
aaauuacuaaacuagggac

SEQ ID NO: 1000140 - RNA, 19 nt, Artificial Sequence
  Description of Artificial Sequence: Synthetic oligonucleotide
  Sense strand starting at position 1590 of SEQ ID NO: 914388
ugguauggccuugaucuca

SEQ ID NO: 1000141 - RNA, 19 nt, Artificial Sequence
  Description of Artificial Sequence: Synthetic oligonucleotide
  Antisense strand to SEQ ID NO: 1000140
ugagaucaaggccauacca

SEQ ID NO: 1000142 - RNA, 19 nt, Artificial Sequence
  Description of Artificial Sequence: Synthetic oligonucleotide
  Sense strand starting at position 1612 of SEQ ID NO: 914388
ggaccacgauuugauguaa

SEQ ID NO: 1000143 - RNA, 19 nt, Artificial Sequence
  Description of Artificial Sequence: Synthetic oligonucleotide
  Antisense strand to SEQ ID NO: 1000142
uuacaucaaaucguggucc

SEQ ID NO: 1000144 - RNA, 19 nt, Artificial Sequence
  Description of Artificial Sequence: Synthetic oligonucleotide
  Sense strand starting at position 1753 of SEQ ID NO: 914388
gccauccucccauauguca

SEQ ID NO: 1000145 - RNA, 19 nt, Artificial Sequence
  Description of Artificial Sequence: Synthetic oligonucleotide
  Antisense strand to SEQ ID NO: 1000144
ugacauaugggaggauggc

SEQ ID NO: 1000146 - RNA, 19 nt, Artificial Sequence
  Description of Artificial Sequence: Synthetic oligonucleotide
  Sense strand starting at position 1849 of SEQ ID NO: 914388
cggaauggucacggaaacu

SEQ ID NO: 1000147 - RNA, 19 nt, Artificial Sequence
  Description of Artificial Sequence: Synthetic oligonucleotide
  Antisense strand to SEQ ID NO: 1000146
aguuuccgugaccauuccg

SEQ ID NO: 1000148 - RNA, 19 nt, Artificial Sequence
  Description of Artificial Sequence: Synthetic oligonucleotide
  Sense strand starting at position 2811 of SEQ ID NO: 914388
gcgguuucuccagauacag

SEQ ID NO: 1000149 - RNA, 19 nt, Artificial Sequence
  Description of Artificial Sequence: Synthetic oligonucleotide
  Antisense strand to SEQ ID NO: 1000148
cuguaucuggagaaaccgc

SEQ ID NO: 1000150 - RNA, 19 nt, Artificial Sequence
  Description of Artificial Sequence: Synthetic oligonucleotide
  Sense strand starting at position 2872 of SEQ ID NO: 914388
gucucaugccaggaaagca

SEQ ID NO: 1000151 - RNA, 19 nt, Artificial Sequence
  Description of Artificial Sequence: Synthetic oligonucleotide
  Antisense strand to SEQ ID NO: 1000150
ugcuuuccuggcaugagac

SEQ ID NO: 1000152 - RNA, 19 nt, Artificial Sequence
  Description of Artificial Sequence: Synthetic oligonucleotide
  Sense strand starting at position 2918 of SEQ ID NO: 914388
ccauguaacgguuaauacu

SEQ ID NO: 1000153 - RNA, 19 nt, Artificial Sequence
  Description of Artificial Sequence: Synthetic oligonucleotide
  Antisense strand to SEQ ID NO: 1000152
aguauuaaccguuacaugg

SEQ ID NO: 1000154 - RNA, 19 nt, Artificial Sequence
  Description of Artificial Sequence: Synthetic oligonucleotide
  Sense strand starting at position 3057 of SEQ ID NO: 914388
ccaacuugagacugcaauu

SEQ ID NO: 1000155 - RNA, 19 nt, Artificial Sequence
  Description of Artificial Sequence: Synthetic oligonucleotide
  Antisense strand to SEQ ID NO: 1000154
aauugcagucucaaguugg

SEQ ID NO: 1000156 - RNA, 19 nt, Artificial Sequence
  Description of Artificial Sequence: Synthetic oligonucleotide
  Sense strand starting at position 3077 of SEQ ID NO: 914388
uuucuaugagucuaguuac

SEQ ID NO: 1000157 - RNA, 19 nt, Artificial Sequence
  Description of Artificial Sequence: Synthetic oligonucleotide
  Antisense strand to SEQ ID NO: 1000156
guaacuagacucauagaaa

SEQ ID NO: 1000158 - RNA, 19 nt, Artificial Sequence
  Description of Artificial Sequence: Synthetic oligonucleotide
  Sense strand starting at position 3080 of SEQ ID NO: 914388
cuaugagucuaguuacuag

SEQ ID NO: 1000159 - RNA, 19 nt, Artificial Sequence
  Description of Artificial Sequence: Synthetic oligonucleotide
  Antisense strand to SEQ ID NO: 1000158
cuaguaacuagacucauag

SEQ ID NO: 1000160 - RNA, 19 nt, Artificial Sequence
  Description of Artificial Sequence: Synthetic oligonucleotide
  Sense strand starting at position 3411 of SEQ ID NO: 914388
agcugacugauguauguua

SEQ ID NO: 1000161 - RNA, 19 nt, Artificial Sequence
  Description of Artificial Sequence: Synthetic oligonucleotide
  Antisense strand to SEQ ID NO: 1000160
uaacauacaucagucagcu

SEQ ID NO: 1000162 - RNA, 19 nt, Artificial Sequence
  Description of Artificial Sequence: Synthetic oligonucleotide
  Sense strand starting at position 3459 of SEQ ID NO: 914388
gagacuauauuguuaguaa

SEQ ID NO: 1000163 - RNA, 19 nt, Artificial Sequence
  Description of Artificial Sequence: Synthetic oligonucleotide
  Antisense strand to SEQ ID NO: 1000162
uuacuaacaauauagucuc

SEQ ID NO: 1000164 - RNA, 19 nt, Artificial Sequence
  Description of Artificial Sequence: Synthetic oligonucleotide
  Sense strand starting at position 3555 of SEQ ID NO: 914388
guguccauuuccuuugcua

SEQ ID NO: 1000165 - RNA, 19 nt, Artificial Sequence
  Description of Artificial Sequence: Synthetic oligonucleotide
  Antisense strand to SEQ ID NO: 1000164
uagcaaaggaaauggacac

SEQ ID NO: 1000166 - RNA, 19 nt, Artificial Sequence
  Description of Artificial Sequence: Synthetic oligonucleotide
  Sense strand starting at position 3580 of SEQ ID NO: 914388
cuuuaugauguccaucuca

SEQ ID NO: 1000167 - RNA, 19 nt, Artificial Sequence
  Description of Artificial Sequence: Synthetic oligonucleotide
  Antisense strand to SEQ ID NO: 1000166
ugagauggacaucauaaag

SEQ ID NO: 1000168 - RNA, 19 nt, Artificial Sequence
  Description of Artificial Sequence: Synthetic oligonucleotide
  Sense strand starting at position 3630 of SEQ ID NO: 914388
caaugaagugguuaaguug

SEQ ID NO: 1000169 - RNA, 19 nt, Artificial Sequence
  Description of Artificial Sequence: Synthetic oligonucleotide
  Antisense strand to SEQ ID NO: 1000168
caacuuaaccacuucauug

SEQ ID NO: 1000170 - RNA, 19 nt, Artificial Sequence
  Description of Artificial Sequence: Synthetic oligonucleotide
  Sense strand starting at position 3672 of SEQ ID NO: 914388
cgggaaagcuacucauaca

SEQ ID NO: 1000171 - RNA, 19 nt, Artificial Sequence
  Description of Artificial Sequence: Synthetic oligonucleotide
  Antisense strand to SEQ ID NO: 1000170
uguaugaguagcuuucccg

SEQ ID NO: 1000172 - RNA, 19 nt, Artificial Sequence
  Description of Artificial Sequence: Synthetic oligonucleotide
  Sense strand starting at position 3812 of SEQ ID NO: 914388
acuguuggagucuaugcaa

SEQ ID NO: 1000173 - RNA, 19 nt, Artificial Sequence
  Description of Artificial Sequence: Synthetic oligonucleotide
  Antisense strand to SEQ ID NO: 1000172
uugcauagacuccaacagu

SEQ ID NO: 1000174 - RNA, 19 nt, Artificial Sequence
  Description of Artificial Sequence: Synthetic oligonucleotide
  Sense strand starting at position 3833 of SEQ ID NO: 914388
uuuagugggagugauuagu

SEQ ID NO: 1000175 - RNA, 19 nt, Artificial Sequence
  Description of Artificial Sequence: Synthetic oligonucleotide
  Antisense strand to SEQ ID NO: 1000174
acuaaucacucccacuaaa

SEQ ID NO: 1000176 - RNA, 19 nt, Artificial Sequence
  Description of Artificial Sequence: Synthetic oligonucleotide
  Sense strand starting at position 54 of SEQ ID NO: 914389
cccaaagugcuaggaaacu

SEQ ID NO: 1000177 - RNA, 19 nt, Artificial Sequence
  Description of Artificial Sequence: Synthetic oligonucleotide
  Antisense strand to SEQ ID NO: 1000176
aguuuccuagcacuuuggg

SEQ ID NO: 1000178 - RNA, 19 nt, Artificial Sequence
  Description of Artificial Sequence: Synthetic oligonucleotide
  Sense strand starting at position 256 of SEQ ID NO: 914389
cgauuaguuguguaauuag

SEQ ID NO: 1000179 - RNA, 19 nt, Artificial Sequence
  Description of Artificial Sequence: Synthetic oligonucleotide
  Antisense strand to SEQ ID NO: 1000178
cuaauuacacaacuaaucg

SEQ ID NO: 1000180 - RNA, 19 nt, Artificial Sequence
  Description of Artificial Sequence: Synthetic oligonucleotide
  Sense strand starting at position 368 of SEQ ID NO: 914389
guaacuggaauacgaaaua

SEQ ID NO: 1000181 - RNA, 19 nt, Artificial Sequence
  Description of Artificial Sequence: Synthetic oligonucleotide
  Antisense strand to SEQ ID NO: 1000180
uauuucguauuccaguuac

SEQ ID NO: 1000182 - RNA, 19 nt, Artificial Sequence
  Description of Artificial Sequence: Synthetic oligonucleotide
  Sense strand starting at position 397 of SEQ ID NO: 914389
guuuguuacguggauaaac

SEQ ID NO: 1000183 - RNA, 19 nt, Artificial Sequence
  Description of Artificial Sequence: Synthetic oligonucleotide
  Antisense strand to SEQ ID NO: 1000182
guuuauccacguaacaaac

SEQ ID NO: 1000184 - RNA, 19 nt, Artificial Sequence
  Description of Artificial Sequence: Synthetic oligonucleotide
  Sense strand starting at position 399 of SEQ ID NO: 914389
uuguuacguggauaaacua

SEQ ID NO: 1000185 - RNA, 19 nt, Artificial Sequence
  Description of Artificial Sequence: Synthetic oligonucleotide
  Antisense strand to SEQ ID NO: 1000184
uaguuuauccacguaacaa

SEQ ID NO: 1000186 - RNA, 19 nt, Artificial Sequence
  Description of Artificial Sequence: Synthetic oligonucleotide
  Sense strand starting at position 415 of SEQ ID NO: 914389
cuauauagcugagcccaaa

SEQ ID NO: 1000187 - RNA, 19 nt, Artificial Sequence
  Description of Artificial Sequence: Synthetic oligonucleotide
  Antisense strand to SEQ ID NO: 1000186
uuugggcucagcuauauag

SEQ ID NO: 1000188 - RNA, 19 nt, Artificial Sequence
  Description of Artificial Sequence: Synthetic oligonucleotide
  Sense strand starting at position 763 of SEQ ID NO: 914389
uuggacuaguucuuuagaa

SEQ ID NO: 1000189 - RNA, 19 nt, Artificial Sequence
  Description of Artificial Sequence: Synthetic oligonucleotide
  Antisense strand to SEQ ID NO: 1000188
uucuaaagaacuaguccaa

SEQ ID NO: 1000190 - RNA, 19 nt, Artificial Sequence
  Description of Artificial Sequence: Synthetic oligonucleotide
  Sense strand starting at position 764 of SEQ ID NO: 914389
uggacuaguucuuuagaac

SEQ ID NO: 1000191 - RNA, 19 nt, Artificial Sequence
  Description of Artificial Sequence: Synthetic oligonucleotide
  Antisense strand to SEQ ID NO: 1000190
guucuaaagaacuagucca

SEQ ID NO: 1000192 - RNA, 19 nt, Artificial Sequence
  Description of Artificial Sequence: Synthetic oligonucleotide
  Sense strand starting at position 773 of SEQ ID NO: 914389
ucuuuagaacaaugugacu

SEQ ID NO: 1000193 - RNA, 19 nt, Artificial Sequence
  Description of Artificial Sequence: Synthetic oligonucleotide
  Antisense strand to SEQ ID NO: 1000192
agucacauuguucuaaaga

SEQ ID NO: 1000194 - RNA, 19 nt, Artificial Sequence
  Description of Artificial Sequence: Synthetic oligonucleotide
  Sense strand starting at position 891 of SEQ ID NO: 914389
aucugaaauccaggugucu

SEQ ID NO: 1000195 - RNA, 19 nt, Artificial Sequence
  Description of Artificial Sequence: Synthetic oligonucleotide
  Antisense strand to SEQ ID NO: 1000194
agacaccuggauuucagau

SEQ ID NO: 1000196 - RNA, 19 nt, Artificial Sequence
  Description of Artificial Sequence: Synthetic oligonucleotide
  Sense strand starting at position 913 of SEQ ID NO: 914389
aggccauccucccuggaaa

SEQ ID NO: 1000197 - RNA, 19 nt, Artificial Sequence
  Description of Artificial Sequence: Synthetic oligonucleotide
  Antisense strand to SEQ ID NO: 1000196
uuuccagggaggauggccu

SEQ ID NO: 1000198 - RNA, 19 nt, Artificial Sequence
  Description of Artificial Sequence: Synthetic oligonucleotide
  Sense strand starting at position 925 of SEQ ID NO: 914389
cuggaaagucucuagcaga

SEQ ID NO: 1000199 - RNA, 19 nt, Artificial Sequence
  Description of Artificial Sequence: Synthetic oligonucleotide
  Antisense strand to SEQ ID NO: 1000198
ucugcuagagacuuuccag

SEQ ID NO: 1000200 - RNA, 19 nt, Artificial Sequence
  Description of Artificial Sequence: Synthetic oligonucleotide
  Sense strand starting at position 1094 of SEQ ID NO: 914389
ggcaaacagucaucuugga

SEQ ID NO: 1000201 - RNA, 19 nt, Artificial Sequence
  Description of Artificial Sequence: Synthetic oligonucleotide
  Antisense strand to SEQ ID NO: 1000200
uccaagaugacuguuugcc

SEQ ID NO: 1000202 - RNA, 19 nt, Artificial Sequence
  Description of Artificial Sequence: Synthetic oligonucleotide
  Sense strand starting at position 1239 of SEQ ID NO: 914389
ccacaaaguugucccauau

SEQ ID NO: 1000203 - RNA, 19 nt, Artificial Sequence
  Description of Artificial Sequence: Synthetic oligonucleotide
  Antisense strand to SEQ ID NO: 1000202
auaugggacaacuuugugg

SEQ ID NO: 1000204 - RNA, 19 nt, Artificial Sequence
  Description of Artificial Sequence: Synthetic oligonucleotide
  Sense strand starting at position 1278 of SEQ ID NO: 914389
gguaguguggugaggcuua

SEQ ID NO: 1000205 - RNA, 19 nt, Artificial Sequence
  Description of Artificial Sequence: Synthetic oligonucleotide
  Antisense strand to SEQ ID NO: 1000204
uaagccucaccacacuacc

SEQ ID NO: 1000206 - RNA, 19 nt, Artificial Sequence
  Description of Artificial Sequence: Synthetic oligonucleotide
  Sense strand starting at position 1372 of SEQ ID NO: 914389
ucacguuaggacuauuacu

SEQ ID NO: 1000207 - RNA, 19 nt, Artificial Sequence
  Description of Artificial Sequence: Synthetic oligonucleotide
  Antisense strand to SEQ ID NO: 1000206
aguaauaguccuaacguga

SEQ ID NO: 1000208 - RNA, 19 nt, Artificial Sequence
  Description of Artificial Sequence: Synthetic oligonucleotide
  Sense strand starting at position 1427 of SEQ ID NO: 914389
gaaccaaguccuugggauc

SEQ ID NO: 1000209 - RNA, 19 nt, Artificial Sequence
  Description of Artificial Sequence: Synthetic oligonucleotide
  Antisense strand to SEQ ID NO: 1000208
gaucccaaggacuugguuc

SEQ ID NO: 1000210 - RNA, 19 nt, Artificial Sequence
  Description of Artificial Sequence: Synthetic oligonucleotide
  Sense strand starting at position 1434 of SEQ ID NO: 914389
guccuugggaucugggaau

SEQ ID NO: 1000211 - RNA, 19 nt, Artificial Sequence
  Description of Artificial Sequence: Synthetic oligonucleotide
  Antisense strand to SEQ ID NO: 1000210
auucccagaucccaaggac

SEQ ID NO: 1000212 - RNA, 19 nt, Artificial Sequence
  Description of Artificial Sequence: Synthetic oligonucleotide
  Sense strand starting at position 1498 of SEQ ID NO: 914389
uugaauccgcuccauuauu

SEQ ID NO: 1000213 - RNA, 19 nt, Artificial Sequence
  Description of Artificial Sequence: Synthetic oligonucleotide
  Antisense strand to SEQ ID NO: 1000212
aauaauggagcggauucaa

SEQ ID NO: 1000214 - RNA, 19 nt, Artificial Sequence
  Description of Artificial Sequence: Synthetic oligonucleotide
  Sense strand starting at position 2235 of SEQ ID NO: 914389
gcagcaagcgcuguucuau

SEQ ID NO: 1000215 - RNA, 19 nt, Artificial Sequence
  Description of Artificial Sequence: Synthetic oligonucleotide
  Antisense strand to SEQ ID NO: 1000214
auagaacagcgcuugcugc

SEQ ID NO: 1000216 - RNA, 19 nt, Artificial Sequence
  Description of Artificial Sequence: Synthetic oligonucleotide
  Sense strand starting at position 2341 of SEQ ID NO: 914389
cagcguagccgaguuugaa

SEQ ID NO: 1000217 - RNA, 19 nt, Artificial Sequence
  Description of Artificial Sequence: Synthetic oligonucleotide
  Antisense strand to SEQ ID NO: 1000216
uucaaacucggcuacgcug

SEQ ID NO: 1000218 - RNA, 19 nt, Artificial Sequence
  Description of Artificial Sequence: Synthetic oligonucleotide
  Sense strand starting at position 2342 of SEQ ID NO: 914389
agcguagccgaguuugaau

SEQ ID NO: 1000219 - RNA, 19 nt, Artificial Sequence
  Description of Artificial Sequence: Synthetic oligonucleotide
  Antisense strand to SEQ ID NO: 1000218
auucaaacucggcuacgcu

SEQ ID NO: 1000220 - RNA, 19 nt, Artificial Sequence
  Description of Artificial Sequence: Synthetic oligonucleotide
  Sense strand starting at position 2354 of SEQ ID NO: 914389
uuugaauacugguuccaua

SEQ ID NO: 1000221 - RNA, 19 nt, Artificial Sequence
  Description of Artificial Sequence: Synthetic oligonucleotide
  Antisense strand to SEQ ID NO: 1000220
uauggaaccaguauucaaa

SEQ ID NO: 1000222 - RNA, 19 nt, Artificial Sequence
  Description of Artificial Sequence: Synthetic oligonucleotide
  Sense strand starting at position 2392 of SEQ ID NO: 914389
ucgggcaaguuaucacaaa

SEQ ID NO: 1000223 - RNA, 19 nt, Artificial Sequence
  Description of Artificial Sequence: Synthetic oligonucleotide
  Antisense strand to SEQ ID NO: 1000222
uuugugauaacuugcccga

SEQ ID NO: 1000224 - RNA, 19 nt, Artificial Sequence
  Description of Artificial Sequence: Synthetic oligonucleotide
  Sense strand starting at position 2415 of SEQ ID NO: 914389
ggagaaucccggcaccuaa

SEQ ID NO: 1000225 - RNA, 19 nt, Artificial Sequence
  Description of Artificial Sequence: Synthetic oligonucleotide
  Antisense strand to SEQ ID NO: 1000224
uuaggugccgggauucucc

SEQ ID NO: 1000226 - RNA, 19 nt, Artificial Sequence
  Description of Artificial Sequence: Synthetic oligonucleotide
  Sense strand starting at position 2456 of SEQ ID NO: 914389
augauauuacugugugaag

SEQ ID NO: 1000227 - RNA, 19 nt, Artificial Sequence
  Description of Artificial Sequence: Synthetic oligonucleotide
  Antisense strand to SEQ ID NO: 1000226
cuucacacaguaauaucau

SEQ ID NO: 1000228 - RNA, 19 nt, Artificial Sequence
  Description of Artificial Sequence: Synthetic oligonucleotide
  Sense strand starting at position 2506 of SEQ ID NO: 914389
ggaacuauguucguuauuu

SEQ ID NO: 1000229 - RNA, 19 nt, Artificial Sequence
  Description of Artificial Sequence: Synthetic oligonucleotide
  Antisense strand to SEQ ID NO: 1000228
aaauaacgaacauaguucc

SEQ ID NO: 1000230 - RNA, 19 nt, Artificial Sequence
  Description of Artificial Sequence: Synthetic oligonucleotide
  Sense strand starting at position 2572 of SEQ ID NO: 914389
guaccuaccguccaagaaa

SEQ ID NO: 1000231 - RNA, 19 nt, Artificial Sequence
  Description of Artificial Sequence: Synthetic oligonucleotide
  Antisense strand to SEQ ID NO: 1000230
uuucuuggacgguagguac

SEQ ID NO: 1000232 - RNA, 19 nt, Artificial Sequence
  Description of Artificial Sequence: Synthetic oligonucleotide
  Sense strand starting at position 2638 of SEQ ID NO: 914389
uucuaagaccuguguaacu

SEQ ID NO: 1000233 - RNA, 19 nt, Artificial Sequence
  Description of Artificial Sequence: Synthetic oligonucleotide
  Antisense strand to SEQ ID NO: 1000232
aguuacacaggucuuagaa

SEQ ID NO: 1000234 - RNA, 19 nt, Artificial Sequence
  Description of Artificial Sequence: Synthetic oligonucleotide
  Sense strand starting at position 2688 of SEQ ID NO: 914389
uuaucucuugaaggaaacu

SEQ ID NO: 1000235 - RNA, 19 nt, Artificial Sequence
  Description of Artificial Sequence: Synthetic oligonucleotide
  Antisense strand to SEQ ID NO: 1000234
aguuuccuucaagagauaa

SEQ ID NO: 1000236 - RNA, 19 nt, Artificial Sequence
  Description of Artificial Sequence: Synthetic oligonucleotide
  Sense strand starting at position 2838 of SEQ ID NO: 914389
gguuuagagcuuuaccuga

SEQ ID NO: 1000237 - RNA, 19 nt, Artificial Sequence
  Description of Artificial Sequence: Synthetic oligonucleotide
  Antisense strand to SEQ ID NO: 1000236
ucagguaaagcucuaaacc

SEQ ID NO: 1000238 - RNA, 19 nt, Artificial Sequence
  Description of Artificial Sequence: Synthetic oligonucleotide
  Sense strand starting at position 2840 of SEQ ID NO: 914389
uuuagagcuuuaccugaau

SEQ ID NO: 1000239 - RNA, 19 nt, Artificial Sequence
  Description of Artificial Sequence: Synthetic oligonucleotide
  Antisense strand to SEQ ID NO: 1000238
auucagguaaagcucuaaa

SEQ ID NO: 1000240 - RNA, 19 nt, Artificial Sequence
  Description of Artificial Sequence: Synthetic oligonucleotide
  Sense strand starting at position 2843 of SEQ ID NO: 914389
agagcuuuaccugaauuau

SEQ ID NO: 1000241 - RNA, 19 nt, Artificial Sequence
  Description of Artificial Sequence: Synthetic oligonucleotide
  Antisense strand to SEQ ID NO: 1000240
auaauucagguaaagcucu

SEQ ID NO: 1000242 - RNA, 19 nt, Artificial Sequence
  Description of Artificial Sequence: Synthetic oligonucleotide
  Sense strand starting at position 3001 of SEQ ID NO: 914389
ggugcaagaggucauccaa

SEQ ID NO: 1000243 - RNA, 19 nt, Artificial Sequence
  Description of Artificial Sequence: Synthetic oligonucleotide
  Antisense strand to SEQ ID NO: 1000242
uuggaugaccucuugcacc

SEQ ID NO: 1000244 - RNA, 19 nt, Artificial Sequence
  Description of Artificial Sequence: Synthetic oligonucleotide
  Sense strand starting at position 3047 of SEQ ID NO: 914389
cucaucauauauguuagau

SEQ ID NO: 1000245 - RNA, 19 nt, Artificial Sequence
  Description of Artificial Sequence: Synthetic oligonucleotide
  Antisense strand to SEQ ID NO: 1000244
aucuaacauauaugaugag

SEQ ID NO: 1000246 - RNA, 19 nt, Artificial Sequence
  Description of Artificial Sequence: Synthetic oligonucleotide
  Sense strand starting at position 3274 of SEQ ID NO: 914389
acagaauuauuagcuauag

SEQ ID NO: 1000247 - RNA, 19 nt, Artificial Sequence
  Description of Artificial Sequence: Synthetic oligonucleotide
  Antisense strand to SEQ ID NO: 1000246
cuauagcuaauaauucugu

SEQ ID NO: 1000248 - RNA, 19 nt, Artificial Sequence
  Description of Artificial Sequence: Synthetic oligonucleotide
  Sense strand starting at position 3441 of SEQ ID NO: 914389
aguuucuuggaccaagagu

SEQ ID NO: 1000249 - RNA, 19 nt, Artificial Sequence
  Description of Artificial Sequence: Synthetic oligonucleotide
  Antisense strand to SEQ ID NO: 1000248
acucuugguccaagaaacu

SEQ ID NO: 1000250 - RNA, 19 nt, Artificial Sequence
  Description of Artificial Sequence: Synthetic oligonucleotide
  Sense strand starting at position 3583 of SEQ ID NO: 914389
gggaucagucuugaagcau

SEQ ID NO: 1000251 - RNA, 19 nt, Artificial Sequence
  Description of Artificial Sequence: Synthetic oligonucleotide
  Antisense strand to SEQ ID NO: 1000250
augcuucaagacugauccc

SEQ ID NO: 1000252 - RNA, 19 nt, Artificial Sequence
  Description of Artificial Sequence: Synthetic oligonucleotide
  Sense strand starting at position 3842 of SEQ ID NO: 914389
acacuucugcuccagugaa

SEQ ID NO: 1000253 - RNA, 19 nt, Artificial Sequence
  Description of Artificial Sequence: Synthetic oligonucleotide
  Antisense strand to SEQ ID NO: 1000252
uucacuggagcagaagugu

SEQ ID NO: 1000254 - RNA, 19 nt, Artificial Sequence
  Description of Artificial Sequence: Synthetic oligonucleotide
  Sense strand starting at position 3868 of SEQ ID NO: 914389
aggauagcccucugaacuu

SEQ ID NO: 1000255 - RNA, 19 nt, Artificial Sequence
  Description of Artificial Sequence: Synthetic oligonucleotide
  Antisense strand to SEQ ID NO: 1000254
aaguucagagggcuauccu

SEQ ID NO: 1000256 - RNA, 19 nt, Artificial Sequence
  Description of Artificial Sequence: Synthetic oligonucleotide
  Sense strand starting at position 186 of SEQ ID NO: 914390
cuuugucuccauuauugca

SEQ ID NO: 1000257 - RNA, 19 nt, Artificial Sequence
  Description of Artificial Sequence: Synthetic oligonucleotide
  Antisense strand to SEQ ID NO: 1000256
ugcaauaauggagacaaag

SEQ ID NO: 1000258 - RNA, 19 nt, Artificial Sequence
  Description of Artificial Sequence: Synthetic oligonucleotide
  Sense strand starting at position 287 of SEQ ID NO: 914390
gugaaaguauaauuguauc

SEQ ID NO: 1000259 - RNA, 19 nt, Artificial Sequence
  Description of Artificial Sequence: Synthetic oligonucleotide
  Antisense strand to SEQ ID NO: 1000258
gauacaauuauacuuucac

SEQ ID NO: 1000260 - RNA, 19 nt, Artificial Sequence
  Description of Artificial Sequence: Synthetic oligonucleotide
  Sense strand starting at position 634 of SEQ ID NO: 914390
uacgguaacuuccugacuu

SEQ ID NO: 1000261 - RNA, 19 nt, Artificial Sequence
  Description of Artificial Sequence: Synthetic oligonucleotide
  Antisense strand to SEQ ID NO: 1000260
aagucaggaaguuaccgua

SEQ ID NO: 1000262 - RNA, 19 nt, Artificial Sequence
  Description of Artificial Sequence: Synthetic oligonucleotide
  Sense strand starting at position 906 of SEQ ID NO: 914390
guugcucugguauaaauac

SEQ ID NO: 1000263 - RNA, 19 nt, Artificial Sequence
  Description of Artificial Sequence: Synthetic oligonucleotide
  Antisense strand to SEQ ID NO: 1000262
guauuuauaccagagcaac

SEQ ID NO: 1000264 - RNA, 19 nt, Artificial Sequence
  Description of Artificial Sequence: Synthetic oligonucleotide
  Sense strand starting at position 949 of SEQ ID NO: 914390
ggagcuaaacauugagcaa

SEQ ID NO: 1000265 - RNA, 19 nt, Artificial Sequence
  Description of Artificial Sequence: Synthetic oligonucleotide
  Antisense strand to SEQ ID NO: 1000264
uugcucaauguuuagcucc

SEQ ID NO: 1000266 - RNA, 19 nt, Artificial Sequence
  Description of Artificial Sequence: Synthetic oligonucleotide
  Sense strand starting at position 952 of SEQ ID NO: 914390
gcuaaacauugagcaaaca

SEQ ID NO: 1000267 - RNA, 19 nt, Artificial Sequence
  Description of Artificial Sequence: Synthetic oligonucleotide
  Antisense strand to SEQ ID NO: 1000266
uguuugcucaauguuuagc

SEQ ID NO: 1000268 - RNA, 19 nt, Artificial Sequence
  Description of Artificial Sequence: Synthetic oligonucleotide
  Sense strand starting at position 1027 of SEQ ID NO: 914390
cgggugguguggguugaaa

SEQ ID NO: 1000269 - RNA, 19 nt, Artificial Sequence
  Description of Artificial Sequence: Synthetic oligonucleotide
  Antisense strand to SEQ ID NO: 1000268
uuucaacccacaccacccg

SEQ ID NO: 1000270 - RNA, 19 nt, Artificial Sequence
  Description of Artificial Sequence: Synthetic oligonucleotide
  Sense strand starting at position 1310 of SEQ ID NO: 914390
ccucuugacucaguuaaga

SEQ ID NO: 1000271 - RNA, 19 nt, Artificial Sequence
  Description of Artificial Sequence: Synthetic oligonucleotide
  Antisense strand to SEQ ID NO: 1000270
ucuuaacugagucaagagg

SEQ ID NO: 1000272 - RNA, 19 nt, Artificial Sequence
  Description of Artificial Sequence: Synthetic oligonucleotide
  Sense strand starting at position 1447 of SEQ ID NO: 914390
auaucagaguugccuguuu

SEQ ID NO: 1000273 - RNA, 19 nt, Artificial Sequence
  Description of Artificial Sequence: Synthetic oligonucleotide
  Antisense strand to SEQ ID NO: 1000272
aaacaggcaacucugauau

SEQ ID NO: 1000274 - RNA, 19 nt, Artificial Sequence
  Description of Artificial Sequence: Synthetic oligonucleotide
  Sense strand starting at position 1488 of SEQ ID NO: 914390
acugcaggcucauugaaau

SEQ ID NO: 1000275 - RNA, 19 nt, Artificial Sequence
  Description of Artificial Sequence: Synthetic oligonucleotide
  Antisense strand to SEQ ID NO: 1000274
auuucaaugagccugcagu

SEQ ID NO: 1000276 - RNA, 19 nt, Artificial Sequence
  Description of Artificial Sequence: Synthetic oligonucleotide
  Sense strand starting at position 1581 of SEQ ID NO: 914390
cucuuucuugaacgaauag

SEQ ID NO: 1000277 - RNA, 19 nt, Artificial Sequence
  Description of Artificial Sequence: Synthetic oligonucleotide
  Antisense strand to SEQ ID NO: 1000276
cuauucguucaagaaagag

SEQ ID NO: 1000278 - RNA, 19 nt, Artificial Sequence
  Description of Artificial Sequence: Synthetic oligonucleotide
  Sense strand starting at position 2024 of SEQ ID NO: 914390
agagauccgugaaggaagu

SEQ ID NO: 1000279 - RNA, 19 nt, Artificial Sequence
  Description of Artificial Sequence: Synthetic oligonucleotide
  Antisense strand to SEQ ID NO: 1000278
acuuccuucacggaucucu

SEQ ID NO: 1000280 - RNA, 19 nt, Artificial Sequence
  Description of Artificial Sequence: Synthetic oligonucleotide
  Sense strand starting at position 2224 of SEQ ID NO: 914390
uccacuggccugggagaau

SEQ ID NO: 1000281 - RNA, 19 nt, Artificial Sequence
  Description of Artificial Sequence: Synthetic oligonucleotide
  Antisense strand to SEQ ID NO: 1000280
auucucccaggccagugga

SEQ ID NO: 1000282 - RNA, 19 nt, Artificial Sequence
  Description of Artificial Sequence: Synthetic oligonucleotide
  Sense strand starting at position 2351 of SEQ ID NO: 914390
cguggagauuguucuugau

SEQ ID NO: 1000283 - RNA, 19 nt, Artificial Sequence
  Description of Artificial Sequence: Synthetic oligonucleotide
  Antisense strand to SEQ ID NO: 1000282
aucaagaacaaucuccacg

SEQ ID NO: 1000284 - RNA, 19 nt, Artificial Sequence
  Description of Artificial Sequence: Synthetic oligonucleotide
  Sense strand starting at position 2355 of SEQ ID NO: 914390
gagauuguucuugaucguc

SEQ ID NO: 1000285 - RNA, 19 nt, Artificial Sequence
  Description of Artificial Sequence: Synthetic oligonucleotide
  Antisense strand to SEQ ID NO: 1000284
gacgaucaagaacaaucuc

SEQ ID NO: 1000286 - RNA, 19 nt, Artificial Sequence
  Description of Artificial Sequence: Synthetic oligonucleotide
  Sense strand starting at position 2365 of SEQ ID NO: 914390
uugaucgucccacggauau

SEQ ID NO: 1000287 - RNA, 19 nt, Artificial Sequence
  Description of Artificial Sequence: Synthetic oligonucleotide
  Antisense strand to SEQ ID NO: 1000286
auauccgugggacgaucaa

SEQ ID NO: 1000288 - RNA, 19 nt, Artificial Sequence
  Description of Artificial Sequence: Synthetic oligonucleotide
  Sense strand starting at position 2453 of SEQ ID NO: 914390
guuccaugucuugaggcau

SEQ ID NO: 1000289 - RNA, 19 nt, Artificial Sequence
  Description of Artificial Sequence: Synthetic oligonucleotide
  Antisense strand to SEQ ID NO: 1000288
augccucaagacauggaac

SEQ ID NO: 1000290 - RNA, 19 nt, Artificial Sequence
  Description of Artificial Sequence: Synthetic oligonucleotide
  Sense strand starting at position 2502 of SEQ ID NO: 914390
aucuuugccagguaucgau

SEQ ID NO: 1000291 - RNA, 19 nt, Artificial Sequence
  Description of Artificial Sequence: Synthetic oligonucleotide
  Antisense strand to SEQ ID NO: 1000290
aucgauaccuggcaaagau

SEQ ID NO: 1000292 - RNA, 19 nt, Artificial Sequence
  Description of Artificial Sequence: Synthetic oligonucleotide
  Sense strand starting at position 2510 of SEQ ID NO: 914390
cagguaucgauguacguuu

SEQ ID NO: 1000293 - RNA, 19 nt, Artificial Sequence
  Description of Artificial Sequence: Synthetic oligonucleotide
  Antisense strand to SEQ ID NO: 1000292
aaacguacaucgauaccug

SEQ ID NO: 1000294 - RNA, 19 nt, Artificial Sequence
  Description of Artificial Sequence: Synthetic oligonucleotide
  Sense strand starting at position 2521 of SEQ ID NO: 914390
guacguuucgguguggacu

SEQ ID NO: 1000295 - RNA, 19 nt, Artificial Sequence
  Description of Artificial Sequence: Synthetic oligonucleotide
  Antisense strand to SEQ ID NO: 1000294
aguccacaccgaaacguac

SEQ ID NO: 1000296 - RNA, 19 nt, Artificial Sequence
  Description of Artificial Sequence: Synthetic oligonucleotide
  Sense strand starting at position 2547 of SEQ ID NO: 914390
gcuggcagaugucuuugaa

SEQ ID NO: 1000297 - RNA, 19 nt, Artificial Sequence
  Description of Artificial Sequence: Synthetic oligonucleotide
  Antisense strand to SEQ ID NO: 1000296
uucaaagacaucugccagc

SEQ ID NO: 1000298 - RNA, 19 nt, Artificial Sequence
  Description of Artificial Sequence: Synthetic oligonucleotide
  Sense strand starting at position 2550 of SEQ ID NO: 914390
ggcagaugucuuugaacug

SEQ ID NO: 1000299 - RNA, 19 nt, Artificial Sequence
  Description of Artificial Sequence: Synthetic oligonucleotide
  Antisense strand to SEQ ID NO: 1000298
caguucaaagacaucugcc

SEQ ID NO: 1000300 - RNA, 19 nt, Artificial Sequence
  Description of Artificial Sequence: Synthetic oligonucleotide
  Sense strand starting at position 2557 of SEQ ID NO: 914390
gucuuugaacugcacgaga

SEQ ID NO: 1000301 - RNA, 19 nt, Artificial Sequence
  Description of Artificial Sequence: Synthetic oligonucleotide
  Antisense strand to SEQ ID NO: 1000300
ucucgugcaguucaaagac

SEQ ID NO: 1000302 - RNA, 19 nt, Artificial Sequence
  Description of Artificial Sequence: Synthetic oligonucleotide
  Sense strand starting at position 2559 of SEQ ID NO: 914390
cuuugaacugcacgagaga

SEQ ID NO: 1000303 - RNA, 19 nt, Artificial Sequence
  Description of Artificial Sequence: Synthetic oligonucleotide
  Antisense strand to SEQ ID NO: 1000302
ucucucgugcaguucaaag

SEQ ID NO: 1000304 - RNA, 19 nt, Artificial Sequence
  Description of Artificial Sequence: Synthetic oligonucleotide
  Sense strand starting at position 2640 of SEQ ID NO: 914390
cagggaacugcuugccaaa

SEQ ID NO: 1000305 - RNA, 19 nt, Artificial Sequence
  Description of Artificial Sequence: Synthetic oligonucleotide
  Antisense strand to SEQ ID NO: 1000304
uuuggcaagcaguucccug

SEQ ID NO: 1000306 - RNA, 19 nt, Artificial Sequence
  Description of Artificial Sequence: Synthetic oligonucleotide
  Sense strand starting at position 2642 of SEQ ID NO: 914390
gggaacugcuugccaaauu

SEQ ID NO: 1000307 - RNA, 19 nt, Artificial Sequence
  Description of Artificial Sequence: Synthetic oligonucleotide
  Antisense strand to SEQ ID NO: 1000306
aauuuggcaagcaguuccc

SEQ ID NO: 1000308 - RNA, 19 nt, Artificial Sequence
  Description of Artificial Sequence: Synthetic oligonucleotide
  Sense strand starting at position 2700 of SEQ ID NO: 914390
uguuuaagauguccauaac

SEQ ID NO: 1000309 - RNA, 19 nt, Artificial Sequence
  Description of Artificial Sequence: Synthetic oligonucleotide
  Antisense strand to SEQ ID NO: 1000308
guuauggacaucuuaaaca

SEQ ID NO: 1000310 - RNA, 19 nt, Artificial Sequence
  Description of Artificial Sequence: Synthetic oligonucleotide
  Sense strand starting at position 2701 of SEQ ID NO: 914390
guuuaagauguccauaaca

SEQ ID NO: 1000311 - RNA, 19 nt, Artificial Sequence
  Description of Artificial Sequence: Synthetic oligonucleotide
  Antisense strand to SEQ ID NO: 1000310
uguuauggacaucuuaaac

SEQ ID NO: 1000312 - RNA, 19 nt, Artificial Sequence
  Description of Artificial Sequence: Synthetic oligonucleotide
  Sense strand starting at position 2756 of SEQ ID NO: 914390
cuacuaugauauguuuaga

SEQ ID NO: 1000313 - RNA, 19 nt, Artificial Sequence
  Description of Artificial Sequence: Synthetic oligonucleotide
  Antisense strand to SEQ ID NO: 1000312
ucuaaacauaucauaguag

SEQ ID NO: 1000314 - RNA, 19 nt, Artificial Sequence
  Description of Artificial Sequence: Synthetic oligonucleotide
  Sense strand starting at position 2761 of SEQ ID NO: 914390
augauauguuuagaagaga

SEQ ID NO: 1000315 - RNA, 19 nt, Artificial Sequence
  Description of Artificial Sequence: Synthetic oligonucleotide
  Antisense strand to SEQ ID NO: 1000314
ucucuucuaaacauaucau

SEQ ID NO: 1000316 - RNA, 19 nt, Artificial Sequence
  Description of Artificial Sequence: Synthetic oligonucleotide
  Sense strand starting at position 2801 of SEQ ID NO: 914390
ccaaguuuaguuggaaaga

SEQ ID NO: 1000317 - RNA, 19 nt, Artificial Sequence
  Description of Artificial Sequence: Synthetic oligonucleotide
  Antisense strand to SEQ ID NO: 1000316
ucuuuccaacuaaacuugg

SEQ ID NO: 1000318 - RNA, 19 nt, Artificial Sequence
  Description of Artificial Sequence: Synthetic oligonucleotide
  Sense strand starting at position 2911 of SEQ ID NO: 914390
uaaugagagccauauaguc

SEQ ID NO: 1000319 - RNA, 19 nt, Artificial Sequence
  Description of Artificial Sequence: Synthetic oligonucleotide
  Antisense strand to SEQ ID NO: 1000318
gacuauauggcucucauua

SEQ ID NO: 1000320 - RNA, 19 nt, Artificial Sequence
  Description of Artificial Sequence: Synthetic oligonucleotide
  Sense strand starting at position 2924 of SEQ ID NO: 914390
auagucuaauggcuaagaa

SEQ ID NO: 1000321 - RNA, 19 nt, Artificial Sequence
  Description of Artificial Sequence: Synthetic oligonucleotide
  Antisense strand to SEQ ID NO: 1000320
uucuuagccauuagacuau

SEQ ID NO: 1000322 - RNA, 19 nt, Artificial Sequence
  Description of Artificial Sequence: Synthetic oligonucleotide
  Sense strand starting at position 3384 of SEQ ID NO: 914390
uagggauauuaauaguaac

SEQ ID NO: 1000323 - RNA, 19 nt, Artificial Sequence
  Description of Artificial Sequence: Synthetic oligonucleotide
  Antisense strand to SEQ ID NO: 1000322
guuacuauuaauaucccua

SEQ ID NO: 1000324 - RNA, 19 nt, Artificial Sequence
  Description of Artificial Sequence: Synthetic oligonucleotide
  Sense strand starting at position 3752 of SEQ ID NO: 914390
agugcuuuacaugauuaua

SEQ ID NO: 1000325 - RNA, 19 nt, Artificial Sequence
  Description of Artificial Sequence: Synthetic oligonucleotide
  Antisense strand to SEQ ID NO: 1000324
uauaaucauguaaagcacu

SEQ ID NO: 1000326 - RNA, 19 nt, Artificial Sequence
  Description of Artificial Sequence: Synthetic oligonucleotide
  Sense strand starting at position 3884 of SEQ ID NO: 914390
cuuucuaaaugggaagaaa

SEQ ID NO: 1000327 - RNA, 19 nt, Artificial Sequence
  Description of Artificial Sequence: Synthetic oligonucleotide
  Antisense strand to SEQ ID NO: 1000326
uuucuucccauuuagaaag

SEQ ID NO: 1000328 - RNA, 19 nt, Artificial Sequence
  Description of Artificial Sequence: Synthetic oligonucleotide
  Sense strand starting at position 3935 of SEQ ID NO: 914390
ugcagauauugaucuuucu

SEQ ID NO: 1000329 - RNA, 19 nt, Artificial Sequence
  Description of Artificial Sequence: Synthetic oligonucleotide
  Antisense strand to SEQ ID NO: 1000328
agaaagaucaauaucugca

SEQ ID NO: 1000330 - RNA, 19 nt, Artificial Sequence
  Description of Artificial Sequence: Synthetic oligonucleotide
  Sense strand starting at position 3942 of SEQ ID NO: 914390
auugaucuuucugugacau

SEQ ID NO: 1000331 - RNA, 19 nt, Artificial Sequence
  Description of Artificial Sequence: Synthetic oligonucleotide
  Antisense strand to SEQ ID NO: 1000330
augucacagaaagaucaau

SEQ ID NO: 1000332 - RNA, 19 nt, Artificial Sequence
  Description of Artificial Sequence: Synthetic oligonucleotide
  Sense strand starting at position 3943 of SEQ ID NO: 914390
uugaucuuucugugacaua

SEQ ID NO: 1000333 - RNA, 19 nt, Artificial Sequence
  Description of Artificial Sequence: Synthetic oligonucleotide
  Antisense strand to SEQ ID NO: 1000332
uaugucacagaaagaucaa

SEQ ID NO: 1000334 - RNA, 19 nt, Artificial Sequence
  Description of Artificial Sequence: Synthetic oligonucleotide
  Sense strand starting at position 3954 of SEQ ID NO: 914390
gugacauaugcaugaauga

SEQ ID NO: 1000335 - RNA, 19 nt, Artificial Sequence
  Description of Artificial Sequence: Synthetic oligonucleotide
  Antisense strand to SEQ ID NO: 1000334
ucauucaugcauaugucac

SEQ ID NO: 1000336 - RNA, 19 nt, Artificial Sequence
  Description of Artificial Sequence: Synthetic oligonucleotide
  Sense strand starting at position 2 of SEQ ID NO: 914391
augcgagucccuggagaug

SEQ ID NO: 1000337 - RNA, 19 nt, Artificial Sequence
  Description of Artificial Sequence: Synthetic oligonucleotide
  Antisense strand to SEQ ID NO: 1000336
caucuccagggacucgcau

SEQ ID NO: 1000338 - RNA, 19 nt, Artificial Sequence
  Description of Artificial Sequence: Synthetic oligonucleotide
  Sense strand starting at position 51 of SEQ ID NO: 914391
gugccuuuggccucuugua

SEQ ID NO: 1000339 - RNA, 19 nt, Artificial Sequence
  Description of Artificial Sequence: Synthetic oligonucleotide
  Antisense strand to SEQ ID NO: 1000338
uacaagaggccaaaggcac

SEQ ID NO: 1000340 - RNA, 19 nt, Artificial Sequence
  Description of Artificial Sequence: Synthetic oligonucleotide
  Sense strand starting at position 52 of SEQ ID NO: 914391
ugccuuuggccucuuguau

SEQ ID NO: 1000341 - RNA, 19 nt, Artificial Sequence
  Description of Artificial Sequence: Synthetic oligonucleotide
  Antisense strand to SEQ ID NO: 1000340
auacaagaggccaaaggca

SEQ ID NO: 1000342 - RNA, 19 nt, Artificial Sequence
  Description of Artificial Sequence: Synthetic oligonucleotide
  Sense strand starting at position 67 of SEQ ID NO: 914391
guauccacgcuuuagaaag

SEQ ID NO: 1000343 - RNA, 19 nt, Artificial Sequence
  Description of Artificial Sequence: Synthetic oligonucleotide
  Antisense strand to SEQ ID NO: 1000342
cuuucuaaagcguggauac

SEQ ID NO: 1000344 - RNA, 19 nt, Artificial Sequence
  Description of Artificial Sequence: Synthetic oligonucleotide
  Sense strand starting at position 180 of SEQ ID NO: 914391
ucauaugguggcugagcaa

SEQ ID NO: 1000345 - RNA, 19 nt, Artificial Sequence
  Description of Artificial Sequence: Synthetic oligonucleotide
  Antisense strand to SEQ ID NO: 1000344
uugcucagccaccauauga

SEQ ID NO: 1000346 - RNA, 19 nt, Artificial Sequence
  Description of Artificial Sequence: Synthetic oligonucleotide
  Sense strand starting at position 820 of SEQ ID NO: 914391
agccaagucucagcauuga

SEQ ID NO: 1000347 - RNA, 19 nt, Artificial Sequence
  Description of Artificial Sequence: Synthetic oligonucleotide
  Antisense strand to SEQ ID NO: 1000346
ucaaugcugagacuuggcu

SEQ ID NO: 1000348 - RNA, 19 nt, Artificial Sequence
  Description of Artificial Sequence: Synthetic oligonucleotide
  Sense strand starting at position 825 of SEQ ID NO: 914391
agucucagcauugauggua

SEQ ID NO: 1000349 - RNA, 19 nt, Artificial Sequence
  Description of Artificial Sequence: Synthetic oligonucleotide
  Antisense strand to SEQ ID NO: 1000348
uaccaucaaugcugagacu

SEQ ID NO: 1000350 - RNA, 19 nt, Artificial Sequence
  Description of Artificial Sequence: Synthetic oligonucleotide
  Sense strand starting at position 849 of SEQ ID NO: 914391
agcuauaaacuugguaacu

SEQ ID NO: 1000351 - RNA, 19 nt, Artificial Sequence
  Description of Artificial Sequence: Synthetic oligonucleotide
  Antisense strand to SEQ ID NO: 1000350
aguuaccaaguuuauagcu

SEQ ID NO: 1000352 - RNA, 19 nt, Artificial Sequence
  Description of Artificial Sequence: Synthetic oligonucleotide
  Sense strand starting at position 850 of SEQ ID NO: 914391
gcuauaaacuugguaacug

SEQ ID NO: 1000353 - RNA, 19 nt, Artificial Sequence
  Description of Artificial Sequence: Synthetic oligonucleotide
  Antisense strand to SEQ ID NO: 1000352
caguuaccaaguuuauagc

SEQ ID NO: 1000354 - RNA, 19 nt, Artificial Sequence
  Description of Artificial Sequence: Synthetic oligonucleotide
  Sense strand starting at position 1254 of SEQ ID NO: 914391
cgcugcaguauuugagcaa

SEQ ID NO: 1000355 - RNA, 19 nt, Artificial Sequence
  Description of Artificial Sequence: Synthetic oligonucleotide
  Antisense strand to SEQ ID NO: 1000354
uugcucaaauacugcagcg

SEQ ID NO: 1000356 - RNA, 19 nt, Artificial Sequence
  Description of Artificial Sequence: Synthetic oligonucleotide
  Sense strand starting at position 1291 of SEQ ID NO: 914391
ggaggauuccauggccuuc

SEQ ID NO: 1000357 - RNA, 19 nt, Artificial Sequence
  Description of Artificial Sequence: Synthetic oligonucleotide
  Antisense strand to SEQ ID NO: 1000356
gaaggccauggaauccucc

SEQ ID NO: 1000358 - RNA, 19 nt, Artificial Sequence
  Description of Artificial Sequence: Synthetic oligonucleotide
  Sense strand starting at position 1461 of SEQ ID NO: 914391
cucacaguuuccucuuuga

SEQ ID NO: 1000359 - RNA, 19 nt, Artificial Sequence
  Description of Artificial Sequence: Synthetic oligonucleotide
  Antisense strand to SEQ ID NO: 1000358
ucaaagaggaaacugugag

SEQ ID NO: 1000360 - RNA, 19 nt, Artificial Sequence
  Description of Artificial Sequence: Synthetic oligonucleotide
  Sense strand starting at position 1464 of SEQ ID NO: 914391
acaguuuccucuuugaguc

SEQ ID NO: 1000361 - RNA, 19 nt, Artificial Sequence
  Description of Artificial Sequence: Synthetic oligonucleotide
  Antisense strand to SEQ ID NO: 1000360
gacucaaagaggaaacugu

SEQ ID NO: 1000362 - RNA, 19 nt, Artificial Sequence
  Description of Artificial Sequence: Synthetic oligonucleotide
  Sense strand starting at position 1663 of SEQ ID NO: 914391
agcucaacuuauguuagua

SEQ ID NO: 1000363 - RNA, 19 nt, Artificial Sequence
  Description of Artificial Sequence: Synthetic oligonucleotide
  Antisense strand to SEQ ID NO: 1000362
uacuaacauaaguugagcu

SEQ ID NO: 1000364 - RNA, 19 nt, Artificial Sequence
  Description of Artificial Sequence: Synthetic oligonucleotide
  Sense strand starting at position 2122 of SEQ ID NO: 914391
cagguuucccuuuggagag

SEQ ID NO: 1000365 - RNA, 19 nt, Artificial Sequence
  Description of Artificial Sequence: Synthetic oligonucleotide
  Antisense strand to SEQ ID NO: 1000364
cucuccaaagggaaaccug

SEQ ID NO: 1000366 - RNA, 19 nt, Artificial Sequence
  Description of Artificial Sequence: Synthetic oligonucleotide
  Sense strand starting at position 2176 of SEQ ID NO: 914391
gccucaguucuccaaagcu

SEQ ID NO: 1000367 - RNA, 19 nt, Artificial Sequence
  Description of Artificial Sequence: Synthetic oligonucleotide
  Antisense strand to SEQ ID NO: 1000366
agcuuuggagaacugaggc

SEQ ID NO: 1000368 - RNA, 19 nt, Artificial Sequence
  Description of Artificial Sequence: Synthetic oligonucleotide
  Sense strand starting at position 2201 of SEQ ID NO: 914391
gcuccacugcuggaagagu

SEQ ID NO: 1000369 - RNA, 19 nt, Artificial Sequence
  Description of Artificial Sequence: Synthetic oligonucleotide
  Antisense strand to SEQ ID NO: 1000368
acucuuccagcaguggagc

SEQ ID NO: 1000370 - RNA, 19 nt, Artificial Sequence
  Description of Artificial Sequence: Synthetic oligonucleotide
  Sense strand starting at position 2228 of SEQ ID NO: 914391
gugggaagcccucacggau

SEQ ID NO: 1000371 - RNA, 19 nt, Artificial Sequence
  Description of Artificial Sequence: Synthetic oligonucleotide
  Antisense strand to SEQ ID NO: 1000370
auccgugagggcuucccac

SEQ ID NO: 1000372 - RNA, 19 nt, Artificial Sequence
  Description of Artificial Sequence: Synthetic oligonucleotide
  Sense strand starting at position 2501 of SEQ ID NO: 914391
ccagauucugcuuguggga

SEQ ID NO: 1000373 - RNA, 19 nt, Artificial Sequence
  Description of Artificial Sequence: Synthetic oligonucleotide
  Antisense strand to SEQ ID NO: 1000372
ucccacaagcagaaucugg

SEQ ID NO: 1000374 - RNA, 19 nt, Artificial Sequence
  Description of Artificial Sequence: Synthetic oligonucleotide
  Sense strand starting at position 2559 of SEQ ID NO: 914391
ugguuauaugccugguaug

SEQ ID NO: 1000375 - RNA, 19 nt, Artificial Sequence
  Description of Artificial Sequence: Synthetic oligonucleotide
  Antisense strand to SEQ ID NO: 1000374
cauaccaggcauauaacca

SEQ ID NO: 1000376 - RNA, 19 nt, Artificial Sequence
  Description of Artificial Sequence: Synthetic oligonucleotide
  Sense strand starting at position 2640 of SEQ ID NO: 914391
uuggcagauccauguggau

SEQ ID NO: 1000377 - RNA, 19 nt, Artificial Sequence
  Description of Artificial Sequence: Synthetic oligonucleotide
  Antisense strand to SEQ ID NO: 1000376
auccacauggaucugccaa

SEQ ID NO: 1000378 - RNA, 19 nt, Artificial Sequence
  Description of Artificial Sequence: Synthetic oligonucleotide
  Sense strand starting at position 2642 of SEQ ID NO: 914391
ggcagauccauguggauag

SEQ ID NO: 1000379 - RNA, 19 nt, Artificial Sequence
  Description of Artificial Sequence: Synthetic oligonucleotide
  Antisense strand to SEQ ID NO: 1000378
cuauccacauggaucugcc

SEQ ID NO: 1000380 - RNA, 19 nt, Artificial Sequence
  Description of Artificial Sequence: Synthetic oligonucleotide
  Sense strand starting at position 2783 of SEQ ID NO: 914391
uggagacuuugguugggaa

SEQ ID NO: 1000381 - RNA, 19 nt, Artificial Sequence
  Description of Artificial Sequence: Synthetic oligonucleotide
  Antisense strand to SEQ ID NO: 1000380
uucccaaccaaagucucca

SEQ ID NO: 1000382 - RNA, 19 nt, Artificial Sequence
  Description of Artificial Sequence: Synthetic oligonucleotide
  Sense strand starting at position 2784 of SEQ ID NO: 914391
ggagacuuugguugggaau

SEQ ID NO: 1000383 - RNA, 19 nt, Artificial Sequence
  Description of Artificial Sequence: Synthetic oligonucleotide
  Antisense strand to SEQ ID NO: 1000382
auucccaaccaaagucucc

SEQ ID NO: 1000384 - RNA, 19 nt, Artificial Sequence
  Description of Artificial Sequence: Synthetic oligonucleotide
  Sense strand starting at position 2785 of SEQ ID NO: 914391
gagacuuugguugggaauc

SEQ ID NO: 1000385 - RNA, 19 nt, Artificial Sequence
  Description of Artificial Sequence: Synthetic oligonucleotide
  Antisense strand to SEQ ID NO: 1000384
gauucccaaccaaagucuc

SEQ ID NO: 1000386 - RNA, 19 nt, Artificial Sequence
  Description of Artificial Sequence: Synthetic oligonucleotide
  Sense strand starting at position 2796 of SEQ ID NO: 914391
ugggaauccugggauauag

SEQ ID NO: 1000387 - RNA, 19 nt, Artificial Sequence
  Description of Artificial Sequence: Synthetic oligonucleotide
  Antisense strand to SEQ ID NO: 1000386
cuauaucccaggauuccca

SEQ ID NO: 1000388 - RNA, 19 nt, Artificial Sequence
  Description of Artificial Sequence: Synthetic oligonucleotide
  Sense strand starting at position 2826 of SEQ ID NO: 914391
cuuccuaugccugaauaag

SEQ ID NO: 1000389 - RNA, 19 nt, Artificial Sequence
  Description of Artificial Sequence: Synthetic oligonucleotide
  Antisense strand to SEQ ID NO: 1000388
cuuauucaggcauaggaag

SEQ ID NO: 1000390 - RNA, 19 nt, Artificial Sequence
  Description of Artificial Sequence: Synthetic oligonucleotide
  Sense strand starting at position 3067 of SEQ ID NO: 914391
auagguucucggugacagu

SEQ ID NO: 1000391 - RNA, 19 nt, Artificial Sequence
  Description of Artificial Sequence: Synthetic oligonucleotide
  Antisense strand to SEQ ID NO: 1000390
acugucaccgagaaccuau

SEQ ID NO: 1000392 - RNA, 19 nt, Artificial Sequence
  Description of Artificial Sequence: Synthetic oligonucleotide
  Sense strand starting at position 3068 of SEQ ID NO: 914391
uagguucucggugacagua

SEQ ID NO: 1000393 - RNA, 19 nt, Artificial Sequence
  Description of Artificial Sequence: Synthetic oligonucleotide
  Antisense strand to SEQ ID NO: 1000392
uacugucaccgagaaccua

SEQ ID NO: 1000394 - RNA, 19 nt, Artificial Sequence
  Description of Artificial Sequence: Synthetic oligonucleotide
  Sense strand starting at position 3280 of SEQ ID NO: 914391
ggcggaguuauuuggcaca

SEQ ID NO: 1000395 - RNA, 19 nt, Artificial Sequence
  Description of Artificial Sequence: Synthetic oligonucleotide
  Antisense strand to SEQ ID NO: 1000394
ugugccaaauaacuccgcc

SEQ ID NO: 1000396 - RNA, 19 nt, Artificial Sequence
  Description of Artificial Sequence: Synthetic oligonucleotide
  Sense strand starting at position 3283 of SEQ ID NO: 914391
ggaguuauuuggcacacag

SEQ ID NO: 1000397 - RNA, 19 nt, Artificial Sequence
  Description of Artificial Sequence: Synthetic oligonucleotide
  Antisense strand to SEQ ID NO: 1000396
cugugugccaaauaacucc

SEQ ID NO: 1000398 - RNA, 19 nt, Artificial Sequence
  Description of Artificial Sequence: Synthetic oligonucleotide
  Sense strand starting at position 3636 of SEQ ID NO: 914391
agucucuggcagugaaaga

SEQ ID NO: 1000399 - RNA, 19 nt, Artificial Sequence
  Description of Artificial Sequence: Synthetic oligonucleotide
  Antisense strand to SEQ ID NO: 1000398
ucuuucacugccagagacu

SEQ ID NO: 1000400 - RNA, 19 nt, Artificial Sequence
  Description of Artificial Sequence: Synthetic oligonucleotide
  Sense strand starting at position 3637 of SEQ ID NO: 914391
gucucuggcagugaaagaa

SEQ ID NO: 1000401 - RNA, 19 nt, Artificial Sequence
  Description of Artificial Sequence: Synthetic oligonucleotide
  Antisense strand to SEQ ID NO: 1000400
uucuuucacugccagagac

SEQ ID NO: 1000402 - RNA, 19 nt, Artificial Sequence
  Description of Artificial Sequence: Synthetic oligonucleotide
  Sense strand starting at position 3703 of SEQ ID NO: 914391
agaauauucuaguuuaggu

SEQ ID NO: 1000403 - RNA, 19 nt, Artificial Sequence
  Description of Artificial Sequence: Synthetic oligonucleotide
  Antisense strand to SEQ ID NO: 1000402
accuaaacuagaauauucu

SEQ ID NO: 1000404 - RNA, 19 nt, Artificial Sequence
  Description of Artificial Sequence: Synthetic oligonucleotide
  Sense strand starting at position 3711 of SEQ ID NO: 914391
cuaguuuagguaggaagua

SEQ ID NO: 1000405 - RNA, 19 nt, Artificial Sequence
  Description of Artificial Sequence: Synthetic oligonucleotide
  Antisense strand to SEQ ID NO: 1000404
uacuuccuaccuaaacuag

SEQ ID NO: 1000406 - RNA, 19 nt, Artificial Sequence
  Description of Artificial Sequence: Synthetic oligonucleotide
  Sense strand starting at position 3809 of SEQ ID NO: 914391
auugaacuugcuuaggagu

SEQ ID NO: 1000407 - RNA, 19 nt, Artificial Sequence
  Description of Artificial Sequence: Synthetic oligonucleotide
  Antisense strand to SEQ ID NO: 1000406
acuccuaagcaaguucaau

SEQ ID NO: 1000408 - RNA, 19 nt, Artificial Sequence
  Description of Artificial Sequence: Synthetic oligonucleotide
  Sense strand starting at position 3865 of SEQ ID NO: 914391
gaguaauccugcuuauaga

SEQ ID NO: 1000409 - RNA, 19 nt, Artificial Sequence
  Description of Artificial Sequence: Synthetic oligonucleotide
  Antisense strand to SEQ ID NO: 1000408
ucuauaagcaggauuacuc

SEQ ID NO: 1000410 - RNA, 19 nt, Artificial Sequence
  Description of Artificial Sequence: Synthetic oligonucleotide
  Sense strand starting at position 3866 of SEQ ID NO: 914391
aguaauccugcuuauagau

SEQ ID NO: 1000411 - RNA, 19 nt, Artificial Sequence
  Description of Artificial Sequence: Synthetic oligonucleotide
  Antisense strand to SEQ ID NO: 1000410
aucuauaagcaggauuacu

SEQ ID NO: 1000412 - RNA, 19 nt, Artificial Sequence
  Description of Artificial Sequence: Synthetic oligonucleotide
  Sense strand starting at position 3899 of SEQ ID NO: 914391
cgcuaaucccaucagaugu

SEQ ID NO: 1000413 - RNA, 19 nt, Artificial Sequence
  Description of Artificial Sequence: Synthetic oligonucleotide
  Antisense strand to SEQ ID NO: 1000412
acaucugaugggauuagcg

SEQ ID NO: 1000414 - RNA, 19 nt, Artificial Sequence
  Description of Artificial Sequence: Synthetic oligonucleotide
  Sense strand starting at position 3909 of SEQ ID NO: 914391
aucagauguuaucuuacau

SEQ ID NO: 1000415 - RNA, 19 nt, Artificial Sequence
  Description of Artificial Sequence: Synthetic oligonucleotide
  Antisense strand to SEQ ID NO: 1000414
auguaagauaacaucugau

SEQ ID NO: 1000416 - RNA, 19 nt, Artificial Sequence
  Description of Artificial Sequence: Synthetic oligonucleotide
  Sense strand starting at position 520 of SEQ ID NO: 914392
gaggguguggcucagcaaa

SEQ ID NO: 1000417 - RNA, 19 nt, Artificial Sequence
  Description of Artificial Sequence: Synthetic oligonucleotide
  Antisense strand to SEQ ID NO: 1000416
uuugcugagccacacccuc

SEQ ID NO: 1000418 - RNA, 19 nt, Artificial Sequence
  Description of Artificial Sequence: Synthetic oligonucleotide
  Sense strand starting at position 661 of SEQ ID NO: 914392
gccacuuugagaugacaag

SEQ ID NO: 1000419 - RNA, 19 nt, Artificial Sequence
  Description of Artificial Sequence: Synthetic oligonucleotide
  Antisense strand to SEQ ID NO: 1000418
cuugucaucucaaaguggc

SEQ ID NO: 1000420 - RNA, 19 nt, Artificial Sequence
  Description of Artificial Sequence: Synthetic oligonucleotide
  Sense strand starting at position 885 of SEQ ID NO: 914392
agcucaucuucccuggaga

SEQ ID NO: 1000421 - RNA, 19 nt, Artificial Sequence
  Description of Artificial Sequence: Synthetic oligonucleotide
  Antisense strand to SEQ ID NO: 1000420
ucuccagggaagaugagcu

SEQ ID NO: 1000422 - RNA, 19 nt, Artificial Sequence
  Description of Artificial Sequence: Synthetic oligonucleotide
  Sense strand starting at position 886 of SEQ ID NO: 914392
gcucaucuucccuggagag

SEQ ID NO: 1000423 - RNA, 19 nt, Artificial Sequence
  Description of Artificial Sequence: Synthetic oligonucleotide
  Antisense strand to SEQ ID NO: 1000422
cucuccagggaagaugagc

SEQ ID NO: 1000424 - RNA, 19 nt, Artificial Sequence
  Description of Artificial Sequence: Synthetic oligonucleotide
  Sense strand starting at position 1400 of SEQ ID NO: 914392
cggaguggucccugaauga

SEQ ID NO: 1000425 - RNA, 19 nt, Artificial Sequence
  Description of Artificial Sequence: Synthetic oligonucleotide
  Antisense strand to SEQ ID NO: 1000424
ucauucagggaccacuccg

SEQ ID NO: 1000426 - RNA, 19 nt, Artificial Sequence
  Description of Artificial Sequence: Synthetic oligonucleotide
  Sense strand starting at position 1526 of SEQ ID NO: 914392
uuacacggcucgguguaau

SEQ ID NO: 1000427 - RNA, 19 nt, Artificial Sequence
  Description of Artificial Sequence: Synthetic oligonucleotide
  Antisense strand to SEQ ID NO: 1000426
auuacaccgagccguguaa

SEQ ID NO: 1000428 - RNA, 19 nt, Artificial Sequence
  Description of Artificial Sequence: Synthetic oligonucleotide
  Sense strand starting at position 1544 of SEQ ID NO: 914392
uugcaaauucgagguuuac

SEQ ID NO: 1000429 - RNA, 19 nt, Artificial Sequence
  Description of Artificial Sequence: Synthetic oligonucleotide
  Antisense strand to SEQ ID NO: 1000428
guaaaccucgaauuugcaa

SEQ ID NO: 1000430 - RNA, 19 nt, Artificial Sequence
  Description of Artificial Sequence: Synthetic oligonucleotide
  Sense strand starting at position 1624 of SEQ ID NO: 914392
ccaagaaggcucugcgaca

SEQ ID NO: 1000431 - RNA, 19 nt, Artificial Sequence
  Description of Artificial Sequence: Synthetic oligonucleotide
  Antisense strand to SEQ ID NO: 1000430
ugucgcagagccuucuugg

SEQ ID NO: 1000432 - RNA, 19 nt, Artificial Sequence
  Description of Artificial Sequence: Synthetic oligonucleotide
  Sense strand starting at position 1625 of SEQ ID NO: 914392
caagaaggcucugcgacaa

SEQ ID NO: 1000433 - RNA, 19 nt, Artificial Sequence
  Description of Artificial Sequence: Synthetic oligonucleotide
  Antisense strand to SEQ ID NO: 1000432
uugucgcagagccuucuug

SEQ ID NO: 1000434 - RNA, 19 nt, Artificial Sequence
  Description of Artificial Sequence: Synthetic oligonucleotide
  Sense strand starting at position 1721 of SEQ ID NO: 914392
aaggguguuuccuaagaac

SEQ ID NO: 1000435 - RNA, 19 nt, Artificial Sequence
  Description of Artificial Sequence: Synthetic oligonucleotide
  Antisense strand to SEQ ID NO: 1000434
guucuuaggaaacacccuu

SEQ ID NO: 1000436 - RNA, 19 nt, Artificial Sequence
  Description of Artificial Sequence: Synthetic oligonucleotide
  Sense strand starting at position 1963 of SEQ ID NO: 914392
ggccucagaugucagcaaa

SEQ ID NO: 1000437 - RNA, 19 nt, Artificial Sequence
  Description of Artificial Sequence: Synthetic oligonucleotide
  Antisense strand to SEQ ID NO: 1000436
uuugcugacaucugaggcc

SEQ ID NO: 1000438 - RNA, 19 nt, Artificial Sequence
  Description of Artificial Sequence: Synthetic oligonucleotide
  Sense strand starting at position 2367 of SEQ ID NO: 914392
gccucagcacagggauuau

SEQ ID NO: 1000439 - RNA, 19 nt, Artificial Sequence
  Description of Artificial Sequence: Synthetic oligonucleotide
  Antisense strand to SEQ ID NO: 1000438
auaaucccugugcugaggc

SEQ ID NO: 1000440 - RNA, 19 nt, Artificial Sequence
  Description of Artificial Sequence: Synthetic oligonucleotide
  Sense strand starting at position 2707 of SEQ ID NO: 914392
gcguguaugcgucuaccau

SEQ ID NO: 1000441 - RNA, 19 nt, Artificial Sequence
  Description of Artificial Sequence: Synthetic oligonucleotide
  Antisense strand to SEQ ID NO: 1000440
augguagacgcauacacgc

SEQ ID NO: 1000442 - RNA, 19 nt, Artificial Sequence
  Description of Artificial Sequence: Synthetic oligonucleotide
  Sense strand starting at position 2708 of SEQ ID NO: 914392
cguguaugcgucuaccaug

SEQ ID NO: 1000443 - RNA, 19 nt, Artificial Sequence
  Description of Artificial Sequence: Synthetic oligonucleotide
  Antisense strand to SEQ ID NO: 1000442
caugguagacgcauacacg

SEQ ID NO: 1000444 - RNA, 19 nt, Artificial Sequence
  Description of Artificial Sequence: Synthetic oligonucleotide
  Sense strand starting at position 3497 of SEQ ID NO: 914392
ggacucagcagcgacuuau

SEQ ID NO: 1000445 - RNA, 19 nt, Artificial Sequence
  Description of Artificial Sequence: Synthetic oligonucleotide
  Antisense strand to SEQ ID NO: 1000444
auaagucgcugcugagucc

SEQ ID NO: 1000446 - RNA, 19 nt, Artificial Sequence
  Description of Artificial Sequence: Synthetic oligonucleotide
  Sense strand starting at position 3695 of SEQ ID NO: 914392
ccaggaggucagggauacu

SEQ ID NO: 1000447 - RNA, 19 nt, Artificial Sequence
  Description of Artificial Sequence: Synthetic oligonucleotide
  Antisense strand to SEQ ID NO: 1000446
aguaucccugaccuccugg

SEQ ID NO: 1000448 - RNA, 19 nt, Artificial Sequence
  Description of Artificial Sequence: Synthetic oligonucleotide
  Sense strand starting at position 3704 of SEQ ID NO: 914392
cagggauacugccuuagaa

SEQ ID NO: 1000449 - RNA, 19 nt, Artificial Sequence
  Description of Artificial Sequence: Synthetic oligonucleotide
  Antisense strand to SEQ ID NO: 1000448
uucuaaggcaguaucccug

SEQ ID NO: 1000450 - RNA, 19 nt, Artificial Sequence
  Description of Artificial Sequence: Synthetic oligonucleotide
  Sense strand starting at position 3824 of SEQ ID NO: 914392
gccacuugucacuaggaca

SEQ ID NO: 1000451 - RNA, 19 nt, Artificial Sequence
  Description of Artificial Sequence: Synthetic oligonucleotide
  Antisense strand to SEQ ID NO: 1000450
uguccuagugacaaguggc

SEQ ID NO: 1000452 - RNA, 19 nt, Artificial Sequence
  Description of Artificial Sequence: Synthetic oligonucleotide
  Sense strand starting at position 3867 of SEQ ID NO: 914392
gguccagguccagacugau

SEQ ID NO: 1000453 - RNA, 19 nt, Artificial Sequence
  Description of Artificial Sequence: Synthetic oligonucleotide
  Antisense strand to SEQ ID NO: 1000452
aucagucuggaccuggacc

SEQ ID NO: 1000454 - RNA, 19 nt, Artificial Sequence
  Description of Artificial Sequence: Synthetic oligonucleotide
  Sense strand starting at position 3873 of SEQ ID NO: 914392
gguccagacugauaagauu

SEQ ID NO: 1000455 - RNA, 19 nt, Artificial Sequence
  Description of Artificial Sequence: Synthetic oligonucleotide
  Antisense strand to SEQ ID NO: 1000454
aaucuuaucagucuggacc

SEQ ID NO: 1000456 - RNA, 19 nt, Artificial Sequence
  Description of Artificial Sequence: Synthetic oligonucleotide
  Sense strand starting at position 3876 of SEQ ID NO: 914392
ccagacugauaagauuaca

SEQ ID NO: 1000457 - RNA, 19 nt, Artificial Sequence
  Description of Artificial Sequence: Synthetic oligonucleotide
  Antisense strand to SEQ ID NO: 1000456
uguaaucuuaucagucugg

SEQ ID NO: 1000458 - RNA, 19 nt, Artificial Sequence
  Description of Artificial Sequence: Synthetic oligonucleotide
  Sense strand starting at position 3934 of SEQ ID NO: 914392
gcauguggcuuccaagaua

SEQ ID NO: 1000459 - RNA, 19 nt, Artificial Sequence
  Description of Artificial Sequence: Synthetic oligonucleotide
  Antisense strand to SEQ ID NO: 1000458
uaucuuggaagccacaugc

SEQ ID NO: 1000460 - RNA, 19 nt, Artificial Sequence
  Description of Artificial Sequence: Synthetic oligonucleotide
  Sense strand starting at position 166 of SEQ ID NO: 914393
uuuguauuaaguuggagac

SEQ ID NO: 1000461 - RNA, 19 nt, Artificial Sequence
  Description of Artificial Sequence: Synthetic oligonucleotide
  Antisense strand to SEQ ID NO: 1000460
gucuccaacuuaauacaaa

SEQ ID NO: 1000462 - RNA, 19 nt, Artificial Sequence
  Description of Artificial Sequence: Synthetic oligonucleotide
  Sense strand starting at position 278 of SEQ ID NO: 914393
aggauacucccuugagcca

SEQ ID NO: 1000463 - RNA, 19 nt, Artificial Sequence
  Description of Artificial Sequence: Synthetic oligonucleotide
  Antisense strand to SEQ ID NO: 1000462
uggcucaagggaguauccu

SEQ ID NO: 1000464 - RNA, 19 nt, Artificial Sequence
  Description of Artificial Sequence: Synthetic oligonucleotide
  Sense strand starting at position 279 of SEQ ID NO: 914393
ggauacucccuugagccau

SEQ ID NO: 1000465 - RNA, 19 nt, Artificial Sequence
  Description of Artificial Sequence: Synthetic oligonucleotide
  Antisense strand to SEQ ID NO: 1000464
auggcucaagggaguaucc

SEQ ID NO: 1000466 - RNA, 19 nt, Artificial Sequence
  Description of Artificial Sequence: Synthetic oligonucleotide
  Sense strand starting at position 297 of SEQ ID NO: 914393
ugugacacuccaugacaaa

SEQ ID NO: 1000467 - RNA, 19 nt, Artificial Sequence
  Description of Artificial Sequence: Synthetic oligonucleotide
  Antisense strand to SEQ ID NO: 1000466
uuugucauggagugucaca

SEQ ID NO: 1000468 - RNA, 19 nt, Artificial Sequence
  Description of Artificial Sequence: Synthetic oligonucleotide
  Sense strand starting at position 363 of SEQ ID NO: 914393
gguucaugaccucgagaug

SEQ ID NO: 1000469 - RNA, 19 nt, Artificial Sequence
  Description of Artificial Sequence: Synthetic oligonucleotide
  Antisense strand to SEQ ID NO: 1000468
caucucgaggucaugaacc

SEQ ID NO: 1000470 - RNA, 19 nt, Artificial Sequence
  Description of Artificial Sequence: Synthetic oligonucleotide
  Sense strand starting at position 387 of SEQ ID NO: 914393
caaggcaucuugucugaau

SEQ ID NO: 1000471 - RNA, 19 nt, Artificial Sequence
  Description of Artificial Sequence: Synthetic oligonucleotide
  Antisense strand to SEQ ID NO: 1000470
auucagacaagaugccuug

SEQ ID NO: 1000472 - RNA, 19 nt, Artificial Sequence
  Description of Artificial Sequence: Synthetic oligonucleotide
  Sense strand starting at position 388 of SEQ ID NO: 914393
aaggcaucuugucugaauu

SEQ ID NO: 1000473 - RNA, 19 nt, Artificial Sequence
  Description of Artificial Sequence: Synthetic oligonucleotide
  Antisense strand to SEQ ID NO: 1000472
aauucagacaagaugccuu

SEQ ID NO: 1000474 - RNA, 19 nt, Artificial Sequence
  Description of Artificial Sequence: Synthetic oligonucleotide
  Sense strand starting at position 418 of SEQ ID NO: 914393
aaccuuggcuuguuauaug

SEQ ID NO: 1000475 - RNA, 19 nt, Artificial Sequence
  Description of Artificial Sequence: Synthetic oligonucleotide
  Antisense strand to SEQ ID NO: 1000474
cauauaacaagccaagguu

SEQ ID NO: 1000476 - RNA, 19 nt, Artificial Sequence
  Description of Artificial Sequence: Synthetic oligonucleotide
  Sense strand starting at position 429 of SEQ ID NO: 914393
guuauauguggcgcacuuu

SEQ ID NO: 1000477 - RNA, 19 nt, Artificial Sequence
  Description of Artificial Sequence: Synthetic oligonucleotide
  Antisense strand to SEQ ID NO: 1000476
aaagugcgccacauauaac

SEQ ID NO: 1000478 - RNA, 19 nt, Artificial Sequence
  Description of Artificial Sequence: Synthetic oligonucleotide
  Sense strand starting at position 529 of SEQ ID NO: 914393
auuacaagcccagaaguuu

SEQ ID NO: 1000479 - RNA, 19 nt, Artificial Sequence
  Description of Artificial Sequence: Synthetic oligonucleotide
  Antisense strand to SEQ ID NO: 1000478
aaacuucugggcuuguaau

SEQ ID NO: 1000480 - RNA, 19 nt, Artificial Sequence
  Description of Artificial Sequence: Synthetic oligonucleotide
  Sense strand starting at position 695 of SEQ ID NO: 914393
auucuaucaggcuauuaag

SEQ ID NO: 1000481 - RNA, 19 nt, Artificial Sequence
  Description of Artificial Sequence: Synthetic oligonucleotide
  Antisense strand to SEQ ID NO: 1000480
cuuaauagccugauagaau

SEQ ID NO: 1000482 - RNA, 19 nt, Artificial Sequence
  Description of Artificial Sequence: Synthetic oligonucleotide
  Sense strand starting at position 815 of SEQ ID NO: 914393
guaccuaauccugacacgu

SEQ ID NO: 1000483 - RNA, 19 nt, Artificial Sequence
  Description of Artificial Sequence: Synthetic oligonucleotide
  Antisense strand to SEQ ID NO: 1000482
acgugucaggauuagguac

SEQ ID NO: 1000484 - RNA, 19 nt, Artificial Sequence
  Description of Artificial Sequence: Synthetic oligonucleotide
  Sense strand starting at position 880 of SEQ ID NO: 914393
uggcuuuguguauauagac

SEQ ID NO: 1000485 - RNA, 19 nt, Artificial Sequence
  Description of Artificial Sequence: Synthetic oligonucleotide
  Antisense strand to SEQ ID NO: 1000484
gucuauauacacaaagcca

SEQ ID NO: 1000486 - RNA, 19 nt, Artificial Sequence
  Description of Artificial Sequence: Synthetic oligonucleotide
  Sense strand starting at position 896 of SEQ ID NO: 914393
gacauuguccuguagucca

SEQ ID NO: 1000487 - RNA, 19 nt, Artificial Sequence
  Description of Artificial Sequence: Synthetic oligonucleotide
  Antisense strand to SEQ ID NO: 1000486
uggacuacaggacaauguc

SEQ ID NO: 1000488 - RNA, 19 nt, Artificial Sequence
  Description of Artificial Sequence: Synthetic oligonucleotide
  Sense strand starting at position 910 of SEQ ID NO: 914393
guccaaaggaugugacucu

SEQ ID NO: 1000489 - RNA, 19 nt, Artificial Sequence
  Description of Artificial Sequence: Synthetic oligonucleotide
  Antisense strand to SEQ ID NO: 1000488
agagucacauccuuuggac

SEQ ID NO: 1000490 - RNA, 19 nt, Artificial Sequence
  Description of Artificial Sequence: Synthetic oligonucleotide
  Sense strand starting at position 943 of SEQ ID NO: 914393
ccuagaacauuggacauuu

SEQ ID NO: 1000491 - RNA, 19 nt, Artificial Sequence
  Description of Artificial Sequence: Synthetic oligonucleotide
  Antisense strand to SEQ ID NO: 1000490
aaauguccaauguucuagg

SEQ ID NO: 1000492 - RNA, 19 nt, Artificial Sequence
  Description of Artificial Sequence: Synthetic oligonucleotide
  Sense strand starting at position 1064 of SEQ ID NO: 914393
ugacauuccuuuguccauu

SEQ ID NO: 1000493 - RNA, 19 nt, Artificial Sequence
  Description of Artificial Sequence: Synthetic oligonucleotide
  Antisense strand to SEQ ID NO: 1000492
aauggacaaaggaauguca

SEQ ID NO: 1000494 - RNA, 19 nt, Artificial Sequence
  Description of Artificial Sequence: Synthetic oligonucleotide
  Sense strand starting at position 1085 of SEQ ID NO: 914393
gcagauccacuguauaaau

SEQ ID NO: 1000495 - RNA, 19 nt, Artificial Sequence
  Description of Artificial Sequence: Synthetic oligonucleotide
  Antisense strand to SEQ ID NO: 1000494
auuuauacaguggaucugc

SEQ ID NO: 1000496 - RNA, 19 nt, Artificial Sequence
  Description of Artificial Sequence: Synthetic oligonucleotide
  Sense strand starting at position 1143 of SEQ ID NO: 914393
aucgaaauguuagagauuu

SEQ ID NO: 1000497 - RNA, 19 nt, Artificial Sequence
  Description of Artificial Sequence: Synthetic oligonucleotide
  Antisense strand to SEQ ID NO: 1000496
aaaucucuaacauuucgau

SEQ ID NO: 1000498 - RNA, 19 nt, Artificial Sequence
  Description of Artificial Sequence: Synthetic oligonucleotide
  Sense strand starting at position 1171 of SEQ ID NO: 914393
gagggauagcugcaaguua

SEQ ID NO: 1000499 - RNA, 19 nt, Artificial Sequence
  Description of Artificial Sequence: Synthetic oligonucleotide
  Antisense strand to SEQ ID NO: 1000498
uaacuugcagcuaucccuc

SEQ ID NO: 1000500 - RNA, 19 nt, Artificial Sequence
  Description of Artificial Sequence: Synthetic oligonucleotide
  Sense strand starting at position 1187 of SEQ ID NO: 914393
uuauuacagucagauuucu

SEQ ID NO: 1000501 - RNA, 19 nt, Artificial Sequence
  Description of Artificial Sequence: Synthetic oligonucleotide
  Antisense strand to SEQ ID NO: 1000500
agaaaucugacuguaauaa

SEQ ID NO: 1000502 - RNA, 19 nt, Artificial Sequence
  Description of Artificial Sequence: Synthetic oligonucleotide
  Sense strand starting at position 1202 of SEQ ID NO: 914393
uucuaagcacgaugauuau

SEQ ID NO: 1000503 - RNA, 19 nt, Artificial Sequence
  Description of Artificial Sequence: Synthetic oligonucleotide
  Antisense strand to SEQ ID NO: 1000502
auaaucaucgugcuuagaa

SEQ ID NO: 1000504 - RNA, 19 nt, Artificial Sequence
  Description of Artificial Sequence: Synthetic oligonucleotide
  Sense strand starting at position 1256 of SEQ ID NO: 914393
cuccuaucagccuaacgau

SEQ ID NO: 1000505 - RNA, 19 nt, Artificial Sequence
  Description of Artificial Sequence: Synthetic oligonucleotide
  Antisense strand to SEQ ID NO: 1000504
aucguuaggcugauaggag

SEQ ID NO: 1000506 - RNA, 19 nt, Artificial Sequence
  Description of Artificial Sequence: Synthetic oligonucleotide
  Sense strand starting at position 1263 of SEQ ID NO: 914393
cagccuaacgauuaaguca

SEQ ID NO: 1000507 - RNA, 19 nt, Artificial Sequence
  Description of Artificial Sequence: Synthetic oligonucleotide
  Antisense strand to SEQ ID NO: 1000506
ugacuuaaucguuaggcug

SEQ ID NO: 1000508 - RNA, 19 nt, Artificial Sequence
  Description of Artificial Sequence: Synthetic oligonucleotide
  Sense strand starting at position 1271 of SEQ ID NO: 914393
cgauuaagucaacaugcua

SEQ ID NO: 1000509 - RNA, 19 nt, Artificial Sequence
  Description of Artificial Sequence: Synthetic oligonucleotide
  Antisense strand to SEQ ID NO: 1000508
uagcauguugacuuaaucg

SEQ ID NO: 1000510 - RNA, 19 nt, Artificial Sequence
  Description of Artificial Sequence: Synthetic oligonucleotide
  Sense strand starting at position 1416 of SEQ ID NO: 914393
gucugugucacucaaguaa

SEQ ID NO: 1000511 - RNA, 19 nt, Artificial Sequence
  Description of Artificial Sequence: Synthetic oligonucleotide
  Antisense strand to SEQ ID NO: 1000510
uuacuugagugacacagac

SEQ ID NO: 1000512 - RNA, 19 nt, Artificial Sequence
  Description of Artificial Sequence: Synthetic oligonucleotide
  Sense strand starting at position 2490 of SEQ ID NO: 914393
gagccaguggcuuaauucu

SEQ ID NO: 1000513 - RNA, 19 nt, Artificial Sequence
  Description of Artificial Sequence: Synthetic oligonucleotide
  Antisense strand to SEQ ID NO: 1000512
agaauuaagccacuggcuc

SEQ ID NO: 1000514 - RNA, 19 nt, Artificial Sequence
  Description of Artificial Sequence: Synthetic oligonucleotide
  Sense strand starting at position 2497 of SEQ ID NO: 914393
uggcuuaauucugcaauag

SEQ ID NO: 1000515 - RNA, 19 nt, Artificial Sequence
  Description of Artificial Sequence: Synthetic oligonucleotide
  Antisense strand to SEQ ID NO: 1000514
cuauugcagaauuaagcca

SEQ ID NO: 1000516 - RNA, 19 nt, Artificial Sequence
  Description of Artificial Sequence: Synthetic oligonucleotide
  Sense strand starting at position 2509 of SEQ ID NO: 914393
gcaauagcacagugaagaa

SEQ ID NO: 1000517 - RNA, 19 nt, Artificial Sequence
  Description of Artificial Sequence: Synthetic oligonucleotide
  Antisense strand to SEQ ID NO: 1000516
uucuucacugugcuauugc

SEQ ID NO: 1000518 - RNA, 19 nt, Artificial Sequence
  Description of Artificial Sequence: Synthetic oligonucleotide
  Sense strand starting at position 2521 of SEQ ID NO: 914393
ugaagaacuucgccucauu

SEQ ID NO: 1000519 - RNA, 19 nt, Artificial Sequence
  Description of Artificial Sequence: Synthetic oligonucleotide
  Antisense strand to SEQ ID NO: 1000518
aaugaggcgaaguucuuca

SEQ ID NO: 1000520 - RNA, 19 nt, Artificial Sequence
  Description of Artificial Sequence: Synthetic oligonucleotide
  Sense strand starting at position 2608 of SEQ ID NO: 914393
acgcaauuuagaggcaagu

SEQ ID NO: 1000521 - RNA, 19 nt, Artificial Sequence
  Description of Artificial Sequence: Synthetic oligonucleotide
  Antisense strand to SEQ ID NO: 1000520
acuugccucuaaauugcgu

SEQ ID NO: 1000522 - RNA, 19 nt, Artificial Sequence
  Description of Artificial Sequence: Synthetic oligonucleotide
  Sense strand starting at position 2634 of SEQ ID NO: 914393
acuugacuuugguuagaaa

SEQ ID NO: 1000523 - RNA, 19 nt, Artificial Sequence
  Description of Artificial Sequence: Synthetic oligonucleotide
  Antisense strand to SEQ ID NO: 1000522
uuucuaaccaaagucaagu

SEQ ID NO: 1000524 - RNA, 19 nt, Artificial Sequence
  Description of Artificial Sequence: Synthetic oligonucleotide
  Sense strand starting at position 2966 of SEQ ID NO: 914393
agaaauaggcuuugcaagu

SEQ ID NO: 1000525 - RNA, 19 nt, Artificial Sequence
  Description of Artificial Sequence: Synthetic oligonucleotide
  Antisense strand to SEQ ID NO: 1000524
acuugcaaagccuauuucu

SEQ ID NO: 1000526 - RNA, 19 nt, Artificial Sequence
  Description of Artificial Sequence: Synthetic oligonucleotide
  Sense strand starting at position 2967 of SEQ ID NO: 914393
gaaauaggcuuugcaaguu

SEQ ID NO: 1000527 - RNA, 19 nt, Artificial Sequence
  Description of Artificial Sequence: Synthetic oligonucleotide
  Antisense strand to SEQ ID NO: 1000526
aacuugcaaagccuauuuc

SEQ ID NO: 1000528 - RNA, 19 nt, Artificial Sequence
  Description of Artificial Sequence: Synthetic oligonucleotide
  Sense strand starting at position 3000 of SEQ ID NO: 914393
ugaaucccagucuguauaa

SEQ ID NO: 1000529 - RNA, 19 nt, Artificial Sequence
  Description of Artificial Sequence: Synthetic oligonucleotide
  Antisense strand to SEQ ID NO: 1000528
uuauacagacugggauuca

SEQ ID NO: 1000530 - RNA, 19 nt, Artificial Sequence
  Description of Artificial Sequence: Synthetic oligonucleotide
  Sense strand starting at position 3013 of SEQ ID NO: 914393
guauaagacccucaggcau

SEQ ID NO: 1000531 - RNA, 19 nt, Artificial Sequence
  Description of Artificial Sequence: Synthetic oligonucleotide
  Antisense strand to SEQ ID NO: 1000530
augccugagggucuuauac

SEQ ID NO: 1000532 - RNA, 19 nt, Artificial Sequence
  Description of Artificial Sequence: Synthetic oligonucleotide
  Sense strand starting at position 3052 of SEQ ID NO: 914393
cugucugcgaaggaugauu

SEQ ID NO: 1000533 - RNA, 19 nt, Artificial Sequence
  Description of Artificial Sequence: Synthetic oligonucleotide
  Antisense strand to SEQ ID NO: 1000532
aaucauccuucgcagacag

SEQ ID NO: 1000534 - RNA, 19 nt, Artificial Sequence
  Description of Artificial Sequence: Synthetic oligonucleotide
  Sense strand starting at position 3152 of SEQ ID NO: 914393
agcugagauugggcaaaga

SEQ ID NO: 1000535 - RNA, 19 nt, Artificial Sequence
  Description of Artificial Sequence: Synthetic oligonucleotide
  Antisense strand to SEQ ID NO: 1000534
ucuuugcccaaucucagcu

SEQ ID NO: 1000536 - RNA, 19 nt, Artificial Sequence
  Description of Artificial Sequence: Synthetic oligonucleotide
  Sense strand starting at position 3367 of SEQ ID NO: 914393
ucggaucuaacaugaagua

SEQ ID NO: 1000537 - RNA, 19 nt, Artificial Sequence
  Description of Artificial Sequence: Synthetic oligonucleotide
  Antisense strand to SEQ ID NO: 1000536
uacuucauguuagauccga

SEQ ID NO: 1000538 - RNA, 19 nt, Artificial Sequence
  Description of Artificial Sequence: Synthetic oligonucleotide
  Sense strand starting at position 3394 of SEQ ID NO: 914393
aggcucacuccagaaguga

SEQ ID NO: 1000539 - RNA, 19 nt, Artificial Sequence
  Description of Artificial Sequence: Synthetic oligonucleotide
  Antisense strand to SEQ ID NO: 1000538
ucacuucuggagugagccu

SEQ ID NO: 1000540 - RNA, 19 nt, Artificial Sequence
  Description of Artificial Sequence: Synthetic oligonucleotide
  Sense strand starting at position 116 of SEQ ID NO: 914394
gcuuguccucccuaccaga

SEQ ID NO: 1000541 - RNA, 19 nt, Artificial Sequence
  Description of Artificial Sequence: Synthetic oligonucleotide
  Antisense strand to SEQ ID NO: 1000540
ucugguagggaggacaagc

SEQ ID NO: 1000542 - RNA, 19 nt, Artificial Sequence
  Description of Artificial Sequence: Synthetic oligonucleotide
  Sense strand starting at position 181 of SEQ ID NO: 914394
gggccacucaccuggagau

SEQ ID NO: 1000543 - RNA, 19 nt, Artificial Sequence
  Description of Artificial Sequence: Synthetic oligonucleotide
  Antisense strand to SEQ ID NO: 1000542
aucuccaggugaguggccc

SEQ ID NO: 1000544 - RNA, 19 nt, Artificial Sequence
  Description of Artificial Sequence: Synthetic oligonucleotide
  Sense strand starting at position 337 of SEQ ID NO: 914394
gccagacaccucuagguuu

SEQ ID NO: 1000545 - RNA, 19 nt, Artificial Sequence
  Description of Artificial Sequence: Synthetic oligonucleotide
  Antisense strand to SEQ ID NO: 1000544
aaaccuagaggugucuggc

SEQ ID NO: 1000546 - RNA, 19 nt, Artificial Sequence
  Description of Artificial Sequence: Synthetic oligonucleotide
  Sense strand starting at position 436 of SEQ ID NO: 914394
acgcguauuaaagaacacu

SEQ ID NO: 1000547 - RNA, 19 nt, Artificial Sequence
  Description of Artificial Sequence: Synthetic oligonucleotide
  Antisense strand to SEQ ID NO: 1000546
aguguucuuuaauacgcgu

SEQ ID NO: 1000548 - RNA, 19 nt, Artificial Sequence
  Description of Artificial Sequence: Synthetic oligonucleotide
  Sense strand starting at position 533 of SEQ ID NO: 914394
cugucagcuuccucauuua

SEQ ID NO: 1000549 - RNA, 19 nt, Artificial Sequence
  Description of Artificial Sequence: Synthetic oligonucleotide
  Antisense strand to SEQ ID NO: 1000548
uaaaugaggaagcugacag

SEQ ID NO: 1000550 - RNA, 19 nt, Artificial Sequence
  Description of Artificial Sequence: Synthetic oligonucleotide
  Sense strand starting at position 754 of SEQ ID NO: 914394
uugauccuguaguuauuaa

SEQ ID NO: 1000551 - RNA, 19 nt, Artificial Sequence
  Description of Artificial Sequence: Synthetic oligonucleotide
  Antisense strand to SEQ ID NO: 1000550
uuaauaacuacaggaucaa

SEQ ID NO: 1000552 - RNA, 19 nt, Artificial Sequence
  Description of Artificial Sequence: Synthetic oligonucleotide
  Sense strand starting at position 866 of SEQ ID NO: 914394
gcgcaauaccugcuuagca

SEQ ID NO: 1000553 - RNA, 19 nt, Artificial Sequence
  Description of Artificial Sequence: Synthetic oligonucleotide
  Antisense strand to SEQ ID NO: 1000552
ugcuaagcagguauugcgc

SEQ ID NO: 1000554 - RNA, 19 nt, Artificial Sequence
  Description of Artificial Sequence: Synthetic oligonucleotide
  Sense strand starting at position 875 of SEQ ID NO: 914394
cugcuuagcacagaguaga

SEQ ID NO: 1000555 - RNA, 19 nt, Artificial Sequence
  Description of Artificial Sequence: Synthetic oligonucleotide
  Antisense strand to SEQ ID NO: 1000554
ucuacucugugcuaagcag

SEQ ID NO: 1000556 - RNA, 19 nt, Artificial Sequence
  Description of Artificial Sequence: Synthetic oligonucleotide
  Sense strand starting at position 896 of SEQ ID NO: 914394
cgcucuaaguauuuguuaa

SEQ ID NO: 1000557 - RNA, 19 nt, Artificial Sequence
  Description of Artificial Sequence: Synthetic oligonucleotide
  Antisense strand to SEQ ID NO: 1000556
uuaacaaauacuuagagcg

SEQ ID NO: 1000558 - RNA, 19 nt, Artificial Sequence
  Description of Artificial Sequence: Synthetic oligonucleotide
  Sense strand starting at position 908 of SEQ ID NO: 914394
uuguuaaauggguaaguga

SEQ ID NO: 1000559 - RNA, 19 nt, Artificial Sequence
  Description of Artificial Sequence: Synthetic oligonucleotide
  Antisense strand to SEQ ID NO: 1000558
ucacuuacccauuuaacaa

SEQ ID NO: 1000560 - RNA, 19 nt, Artificial Sequence
  Description of Artificial Sequence: Synthetic oligonucleotide
  Sense strand starting at position 978 of SEQ ID NO: 914394
cucacugucuagccuagaa

SEQ ID NO: 1000561 - RNA, 19 nt, Artificial Sequence
  Description of Artificial Sequence: Synthetic oligonucleotide
  Antisense strand to SEQ ID NO: 1000560
uucuaggcuagacagugag

SEQ ID NO: 1000562 - RNA, 19 nt, Artificial Sequence
  Description of Artificial Sequence: Synthetic oligonucleotide
  Sense strand starting at position 980 of SEQ ID NO: 914394
cacugucuagccuagaagu

SEQ ID NO: 1000563 - RNA, 19 nt, Artificial Sequence
  Description of Artificial Sequence: Synthetic oligonucleotide
  Antisense strand to SEQ ID NO: 1000562
acuucuaggcuagacagug

SEQ ID NO: 1000564 - RNA, 19 nt, Artificial Sequence
  Description of Artificial Sequence: Synthetic oligonucleotide
  Sense strand starting at position 982 of SEQ ID NO: 914394
cugucuagccuagaaguca

SEQ ID NO: 1000565 - RNA, 19 nt, Artificial Sequence
  Description of Artificial Sequence: Synthetic oligonucleotide
  Antisense strand to SEQ ID NO: 1000564
ugacuucuaggcuagacag

SEQ ID NO: 1000566 - RNA, 19 nt, Artificial Sequence
  Description of Artificial Sequence: Synthetic oligonucleotide
  Sense strand starting at position 1687 of SEQ ID NO: 914394
gggagucucccagagcuaa

SEQ ID NO: 1000567 - RNA, 19 nt, Artificial Sequence
  Description of Artificial Sequence: Synthetic oligonucleotide
  Antisense strand to SEQ ID NO: 1000566
uuagcucugggagacuccc

SEQ ID NO: 1000568 - RNA, 19 nt, Artificial Sequence
  Description of Artificial Sequence: Synthetic oligonucleotide
  Sense strand starting at position 1765 of SEQ ID NO: 914394
ccacgaucccguuaggaaa

SEQ ID NO: 1000569 - RNA, 19 nt, Artificial Sequence
  Description of Artificial Sequence: Synthetic oligonucleotide
  Antisense strand to SEQ ID NO: 1000568
uuuccuaacgggaucgugg

SEQ ID NO: 1000570 - RNA, 19 nt, Artificial Sequence
  Description of Artificial Sequence: Synthetic oligonucleotide
  Sense strand starting at position 1989 of SEQ ID NO: 914394
gcaagauggcgacagguaa

SEQ ID NO: 1000571 - RNA, 19 nt, Artificial Sequence
  Description of Artificial Sequence: Synthetic oligonucleotide
  Antisense strand to SEQ ID NO: 1000570
uuaccugucgccaucuugc

SEQ ID NO: 1000572 - RNA, 19 nt, Artificial Sequence
  Description of Artificial Sequence: Synthetic oligonucleotide
  Sense strand starting at position 2061 of SEQ ID NO: 914394
ccgccuuucggagaacaaa

SEQ ID NO: 1000573 - RNA, 19 nt, Artificial Sequence
  Description of Artificial Sequence: Synthetic oligonucleotide
  Antisense strand to SEQ ID NO: 1000572
uuuguucuccgaaaggcgg

SEQ ID NO: 1000574 - RNA, 19 nt, Artificial Sequence
  Description of Artificial Sequence: Synthetic oligonucleotide
  Sense strand starting at position 2457 of SEQ ID NO: 914394
gaggauuaggaucgaguuu

SEQ ID NO: 1000575 - RNA, 19 nt, Artificial Sequence
  Description of Artificial Sequence: Synthetic oligonucleotide
  Antisense strand to SEQ ID NO: 1000574
aaacucgauccuaauccuc

SEQ ID NO: 1000576 - RNA, 19 nt, Artificial Sequence
  Description of Artificial Sequence: Synthetic oligonucleotide
  Sense strand starting at position 2469 of SEQ ID NO: 914394
cgaguuucuucgaucguga

SEQ ID NO: 1000577 - RNA, 19 nt, Artificial Sequence
  Description of Artificial Sequence: Synthetic oligonucleotide
  Antisense strand to SEQ ID NO: 1000576
ucacgaucgaagaaacucg

SEQ ID NO: 1000578 - RNA, 19 nt, Artificial Sequence
  Description of Artificial Sequence: Synthetic oligonucleotide
  Sense strand starting at position 2536 of SEQ ID NO: 914394
gagaauccacgcuacgaga

SEQ ID NO: 1000579 - RNA, 19 nt, Artificial Sequence
  Description of Artificial Sequence: Synthetic oligonucleotide
  Antisense strand to SEQ ID NO: 1000578
ucucguagcguggauucuc

SEQ ID NO: 1000580 - RNA, 19 nt, Artificial Sequence
  Description of Artificial Sequence: Synthetic oligonucleotide
  Sense strand starting at position 2634 of SEQ ID NO: 914394
gagcguucucgcguuggau

SEQ ID NO: 1000581 - RNA, 19 nt, Artificial Sequence
  Description of Artificial Sequence: Synthetic oligonucleotide
  Antisense strand to SEQ ID NO: 1000580
auccaacgcgagaacgcuc

SEQ ID NO: 1000582 - RNA, 19 nt, Artificial Sequence
  Description of Artificial Sequence: Synthetic oligonucleotide
  Sense strand starting at position 2649 of SEQ ID NO: 914394
ggauuuccuccacguguga

SEQ ID NO: 1000583 - RNA, 19 nt, Artificial Sequence
  Description of Artificial Sequence: Synthetic oligonucleotide
  Antisense strand to SEQ ID NO: 1000582
ucacacguggaggaaaucc

SEQ ID NO: 1000584 - RNA, 19 nt, Artificial Sequence
  Description of Artificial Sequence: Synthetic oligonucleotide
  Sense strand starting at position 2898 of SEQ ID NO: 914394
gaaaucuugugauugacuu

SEQ ID NO: 1000585 - RNA, 19 nt, Artificial Sequence
  Description of Artificial Sequence: Synthetic oligonucleotide
  Antisense strand to SEQ ID NO: 1000584
aagucaaucacaagauuuc

SEQ ID NO: 1000586 - RNA, 19 nt, Artificial Sequence
  Description of Artificial Sequence: Synthetic oligonucleotide
  Sense strand starting at position 2929 of SEQ ID NO: 914394
uuuguacuuuggguaacau

SEQ ID NO: 1000587 - RNA, 19 nt, Artificial Sequence
  Description of Artificial Sequence: Synthetic oligonucleotide
  Antisense strand to SEQ ID NO: 1000586
auguuacccaaaguacaaa

SEQ ID NO: 1000588 - RNA, 19 nt, Artificial Sequence
  Description of Artificial Sequence: Synthetic oligonucleotide
  Sense strand starting at position 3032 of SEQ ID NO: 914394
gguuaauacuacccuauag

SEQ ID NO: 1000589 - RNA, 19 nt, Artificial Sequence
  Description of Artificial Sequence: Synthetic oligonucleotide
  Antisense strand to SEQ ID NO: 1000588
cuauaggguaguauuaacc

SEQ ID NO: 1000590 - RNA, 19 nt, Artificial Sequence
  Description of Artificial Sequence: Synthetic oligonucleotide
  Sense strand starting at position 3095 of SEQ ID NO: 914394
uauacaaacguaugagacu

SEQ ID NO: 1000591 - RNA, 19 nt, Artificial Sequence
  Description of Artificial Sequence: Synthetic oligonucleotide
  Antisense strand to SEQ ID NO: 1000590
agucucauacguuuguaua

SEQ ID NO: 1000592 - RNA, 19 nt, Artificial Sequence
  Description of Artificial Sequence: Synthetic oligonucleotide
  Sense strand starting at position 3116 of SEQ ID NO: 914394
ucauguucuugaguggaac

SEQ ID NO: 1000593 - RNA, 19 nt, Artificial Sequence
  Description of Artificial Sequence: Synthetic oligonucleotide
  Antisense strand to SEQ ID NO: 1000592
guuccacucaagaacauga

SEQ ID NO: 1000594 - RNA, 19 nt, Artificial Sequence
  Description of Artificial Sequence: Synthetic oligonucleotide
  Sense strand starting at position 3117 of SEQ ID NO: 914394
cauguucuugaguggaacu

SEQ ID NO: 1000595 - RNA, 19 nt, Artificial Sequence
  Description of Artificial Sequence: Synthetic oligonucleotide
  Antisense strand to SEQ ID NO: 1000594
aguuccacucaagaacaug

SEQ ID NO: 1000596 - RNA, 19 nt, Artificial Sequence
  Description of Artificial Sequence: Synthetic oligonucleotide
  Sense strand starting at position 3207 of SEQ ID NO: 914394
cccuccgaggucuaggaaa

SEQ ID NO: 1000597 - RNA, 19 nt, Artificial Sequence
  Description of Artificial Sequence: Synthetic oligonucleotide
  Antisense strand to SEQ ID NO: 1000596
uuuccuagaccucggaggg

SEQ ID NO: 1000598 - RNA, 19 nt, Artificial Sequence
  Description of Artificial Sequence: Synthetic oligonucleotide
  Sense strand starting at position 3209 of SEQ ID NO: 914394
cuccgaggucuaggaaagu

SEQ ID NO: 1000599 - RNA, 19 nt, Artificial Sequence
  Description of Artificial Sequence: Synthetic oligonucleotide
  Antisense strand to SEQ ID NO: 1000598
acuuuccuagaccucggag

SEQ ID NO: 1000600 - RNA, 19 nt, Artificial Sequence
  Description of Artificial Sequence: Synthetic oligonucleotide
  Sense strand starting at position 3218 of SEQ ID NO: 914394
cuaggaaagucacuguugu

SEQ ID NO: 1000601 - RNA, 19 nt, Artificial Sequence
  Description of Artificial Sequence: Synthetic oligonucleotide
  Antisense strand to SEQ ID NO: 1000600
acaacagugacuuuccuag

SEQ ID NO: 1000602 - RNA, 19 nt, Artificial Sequence
  Description of Artificial Sequence: Synthetic oligonucleotide
  Sense strand starting at position 3265 of SEQ ID NO: 914394
cguaaaguggaacauauua

SEQ ID NO: 1000603 - RNA, 19 nt, Artificial Sequence
  Description of Artificial Sequence: Synthetic oligonucleotide
  Antisense strand to SEQ ID NO: 1000602
uaauauguuccacuuuacg

SEQ ID NO: 1000604 - RNA, 19 nt, Artificial Sequence
  Description of Artificial Sequence: Synthetic oligonucleotide
  Sense strand starting at position 3406 of SEQ ID NO: 914394
ugauuugagccucgcaaca

SEQ ID NO: 1000605 - RNA, 19 nt, Artificial Sequence
  Description of Artificial Sequence: Synthetic oligonucleotide
  Antisense strand to SEQ ID NO: 1000604
uguugcgaggcucaaauca

SEQ ID NO: 1000606 - RNA, 19 nt, Artificial Sequence
  Description of Artificial Sequence: Synthetic oligonucleotide
  Sense strand starting at position 3428 of SEQ ID NO: 914394
cagugugacagguacgauu

SEQ ID NO: 1000607 - RNA, 19 nt, Artificial Sequence
  Description of Artificial Sequence: Synthetic oligonucleotide
  Antisense strand to SEQ ID NO: 1000606
aaucguaccugucacacug

SEQ ID NO: 1000608 - RNA, 19 nt, Artificial Sequence
  Description of Artificial Sequence: Synthetic oligonucleotide
  Sense strand starting at position 3575 of SEQ ID NO: 914394
cucuacagugaaugucaaa

SEQ ID NO: 1000609 - RNA, 19 nt, Artificial Sequence
  Description of Artificial Sequence: Synthetic oligonucleotide
  Antisense strand to SEQ ID NO: 1000608
uuugacauucacuguagag

SEQ ID NO: 1000610 - RNA, 19 nt, Artificial Sequence
  Description of Artificial Sequence: Synthetic oligonucleotide
  Sense strand starting at position 3670 of SEQ ID NO: 914394
uaagaaguagcauaugagu

SEQ ID NO: 1000611 - RNA, 19 nt, Artificial Sequence
  Description of Artificial Sequence: Synthetic oligonucleotide
  Antisense strand to SEQ ID NO: 1000610
acucauaugcuacuucuua

SEQ ID NO: 1000612 - RNA, 19 nt, Artificial Sequence
  Description of Artificial Sequence: Synthetic oligonucleotide
  Sense strand starting at position 3672 of SEQ ID NO: 914394
agaaguagcauaugaguga

SEQ ID NO: 1000613 - RNA, 19 nt, Artificial Sequence
  Description of Artificial Sequence: Synthetic oligonucleotide
  Antisense strand to SEQ ID NO: 1000612
ucacucauaugcuacuucu

SEQ ID NO: 1000614 - RNA, 19 nt, Artificial Sequence
  Description of Artificial Sequence: Synthetic oligonucleotide
  Sense strand starting at position 3675 of SEQ ID NO: 914394
aguagcauaugagugauga

SEQ ID NO: 1000615 - RNA, 19 nt, Artificial Sequence
  Description of Artificial Sequence: Synthetic oligonucleotide
  Antisense strand to SEQ ID NO: 1000614
ucaucacucauaugcuacu

SEQ ID NO: 1000616 - RNA, 19 nt, Artificial Sequence
  Description of Artificial Sequence: Synthetic oligonucleotide
  Sense strand starting at position 3676 of SEQ ID NO: 914394
guagcauaugagugaugaa

SEQ ID NO: 1000617 - RNA, 19 nt, Artificial Sequence
  Description of Artificial Sequence: Synthetic oligonucleotide
  Antisense strand to SEQ ID NO: 1000616
uucaucacucauaugcuac

SEQ ID NO: 1000618 - RNA, 19 nt, Artificial Sequence
  Description of Artificial Sequence: Synthetic oligonucleotide
  Sense strand starting at position 3775 of SEQ ID NO: 914394
acuuuaugagguggaaacu

SEQ ID NO: 1000619 - RNA, 19 nt, Artificial Sequence
  Description of Artificial Sequence: Synthetic oligonucleotide
  Antisense strand to SEQ ID NO: 1000618
aguuuccaccucauaaagu

SEQ ID NO: 1000620 - RNA, 19 nt, Artificial Sequence
  Description of Artificial Sequence: Synthetic oligonucleotide
  Sense strand starting at position 406 of SEQ ID NO: 914395
gaaauaagguuagagaaag

SEQ ID NO: 1000621 - RNA, 19 nt, Artificial Sequence
  Description of Artificial Sequence: Synthetic oligonucleotide
  Antisense strand to SEQ ID NO: 1000620
cuuucucuaaccuuauuuc

SEQ ID NO: 1000622 - RNA, 19 nt, Artificial Sequence
  Description of Artificial Sequence: Synthetic oligonucleotide
  Sense strand starting at position 418 of SEQ ID NO: 914395
gagaaaggaucugggcaau

SEQ ID NO: 1000623 - RNA, 19 nt, Artificial Sequence
  Description of Artificial Sequence: Synthetic oligonucleotide
  Antisense strand to SEQ ID NO: 1000622
auugcccagauccuuucuc

SEQ ID NO: 1000624 - RNA, 19 nt, Artificial Sequence
  Description of Artificial Sequence: Synthetic oligonucleotide
  Sense strand starting at position 430 of SEQ ID NO: 914395
gggcaaucuuaaggacuga

SEQ ID NO: 1000625 - RNA, 19 nt, Artificial Sequence
  Description of Artificial Sequence: Synthetic oligonucleotide
  Antisense strand to SEQ ID NO: 1000624
ucaguccuuaagauugccc

SEQ ID NO: 1000626 - RNA, 19 nt, Artificial Sequence
  Description of Artificial Sequence: Synthetic oligonucleotide
  Sense strand starting at position 547 of SEQ ID NO: 914395
augccaaagcacuguauga

SEQ ID NO: 1000627 - RNA, 19 nt, Artificial Sequence
  Description of Artificial Sequence: Synthetic oligonucleotide
  Antisense strand to SEQ ID NO: 1000626
ucauacagugcuuuggcau

SEQ ID NO: 1000628 - RNA, 19 nt, Artificial Sequence
  Description of Artificial Sequence: Synthetic oligonucleotide
  Sense strand starting at position 614 of SEQ ID NO: 914395
gguauuguaaugcaguguu

SEQ ID NO: 1000629 - RNA, 19 nt, Artificial Sequence
  Description of Artificial Sequence: Synthetic oligonucleotide
  Antisense strand to SEQ ID NO: 1000628
aacacugcauuacaauacc

SEQ ID NO: 1000630 - RNA, 19 nt, Artificial Sequence
  Description of Artificial Sequence: Synthetic oligonucleotide
  Sense strand starting at position 617 of SEQ ID NO: 914395
auuguaaugcaguguuaac

SEQ ID NO: 1000631 - RNA, 19 nt, Artificial Sequence
  Description of Artificial Sequence: Synthetic oligonucleotide
  Antisense strand to SEQ ID NO: 1000630
guuaacacugcauuacaau

SEQ ID NO: 1000632 - RNA, 19 nt, Artificial Sequence
  Description of Artificial Sequence: Synthetic oligonucleotide
  Sense strand starting at position 1142 of SEQ ID NO: 914395
gccagaaugaagcgaaguu

SEQ ID NO: 1000633 - RNA, 19 nt, Artificial Sequence
  Description of Artificial Sequence: Synthetic oligonucleotide
  Antisense strand to SEQ ID NO: 1000632
aacuucgcuucauucuggc

SEQ ID NO: 1000634 - RNA, 19 nt, Artificial Sequence
  Description of Artificial Sequence: Synthetic oligonucleotide
  Sense strand starting at position 1143 of SEQ ID NO: 914395
ccagaaugaagcgaaguua

SEQ ID NO: 1000635 - RNA, 19 nt, Artificial Sequence
  Description of Artificial Sequence: Synthetic oligonucleotide
  Antisense strand to SEQ ID NO: 1000634
uaacuucgcuucauucugg

SEQ ID NO: 1000636 - RNA, 19 nt, Artificial Sequence
  Description of Artificial Sequence: Synthetic oligonucleotide
  Sense strand starting at position 1185 of SEQ ID NO: 914395
cgucucugaagucaugaga

SEQ ID NO: 1000637 - RNA, 19 nt, Artificial Sequence
  Description of Artificial Sequence: Synthetic oligonucleotide
  Antisense strand to SEQ ID NO: 1000636
ucucaugacuucagagacg

SEQ ID NO: 1000638 - RNA, 19 nt, Artificial Sequence
  Description of Artificial Sequence: Synthetic oligonucleotide
  Sense strand starting at position 1205 of SEQ ID NO: 914395
ugccgugguuucuaagaau

SEQ ID NO: 1000639 - RNA, 19 nt, Artificial Sequence
  Description of Artificial Sequence: Synthetic oligonucleotide
  Antisense strand to SEQ ID NO: 1000638
auucuuagaaaccacggca

SEQ ID NO: 1000640 - RNA, 19 nt, Artificial Sequence
  Description of Artificial Sequence: Synthetic oligonucleotide
  Sense strand starting at position 1208 of SEQ ID NO: 914395
cgugguuucuaagaauagc

SEQ ID NO: 1000641 - RNA, 19 nt, Artificial Sequence
  Description of Artificial Sequence: Synthetic oligonucleotide
  Antisense strand to SEQ ID NO: 1000640
gcuauucuuagaaaccacg

SEQ ID NO: 1000642 - RNA, 19 nt, Artificial Sequence
  Description of Artificial Sequence: Synthetic oligonucleotide
  Sense strand starting at position 1225 of SEQ ID NO: 914395
gcgcuuccugucuucggaa

SEQ ID NO: 1000643 - RNA, 19 nt, Artificial Sequence
  Description of Artificial Sequence: Synthetic oligonucleotide
  Antisense strand to SEQ ID NO: 1000642
uuccgaagacaggaagcgc

SEQ ID NO: 1000644 - RNA, 19 nt, Artificial Sequence
  Description of Artificial Sequence: Synthetic oligonucleotide
  Sense strand starting at position 1530 of SEQ ID NO: 914395
ucaccaaugcucgauaaca

SEQ ID NO: 1000645 - RNA, 19 nt, Artificial Sequence
  Description of Artificial Sequence: Synthetic oligonucleotide
  Antisense strand to SEQ ID NO: 1000644
uguuaucgagcauugguga

SEQ ID NO: 1000646 - RNA, 19 nt, Artificial Sequence
  Description of Artificial Sequence: Synthetic oligonucleotide
  Sense strand starting at position 1532 of SEQ ID NO: 914395
accaaugcucgauaacaac

SEQ ID NO: 1000647 - RNA, 19 nt, Artificial Sequence
  Description of Artificial Sequence: Synthetic oligonucleotide
  Antisense strand to SEQ ID NO: 1000646
guuguuaucgagcauuggu

SEQ ID NO: 1000648 - RNA, 19 nt, Artificial Sequence
  Description of Artificial Sequence: Synthetic oligonucleotide
  Sense strand starting at position 2009 of SEQ ID NO: 914395
uuugcauggcgcuaaaugu

SEQ ID NO: 1000649 - RNA, 19 nt, Artificial Sequence
  Description of Artificial Sequence: Synthetic oligonucleotide
  Antisense strand to SEQ ID NO: 1000648
acauuuagcgccaugcaaa

SEQ ID NO: 1000650 - RNA, 19 nt, Artificial Sequence
  Description of Artificial Sequence: Synthetic oligonucleotide
  Sense strand starting at position 2018 of SEQ ID NO: 914395
cgcuaaauguugugugcca

SEQ ID NO: 1000651 - RNA, 19 nt, Artificial Sequence
  Description of Artificial Sequence: Synthetic oligonucleotide
  Antisense strand to SEQ ID NO: 1000650
uggcacacaacauuuagcg

SEQ ID NO: 1000652 - RNA, 19 nt, Artificial Sequence
  Description of Artificial Sequence: Synthetic oligonucleotide
  Sense strand starting at position 2105 of SEQ ID NO: 914395
acauguggccgcuauucua

SEQ ID NO: 1000653 - RNA, 19 nt, Artificial Sequence
  Description of Artificial Sequence: Synthetic oligonucleotide
  Antisense strand to SEQ ID NO: 1000652
uagaauagcggccacaugu

SEQ ID NO: 1000654 - RNA, 19 nt, Artificial Sequence
  Description of Artificial Sequence: Synthetic oligonucleotide
  Sense strand starting at position 2112 of SEQ ID NO: 914395
gccgcuauucuagauuuau

SEQ ID NO: 1000655 - RNA, 19 nt, Artificial Sequence
  Description of Artificial Sequence: Synthetic oligonucleotide
  Antisense strand to SEQ ID NO: 1000654
auaaaucuagaauagcggc

SEQ ID NO: 1000656 - RNA, 19 nt, Artificial Sequence
  Description of Artificial Sequence: Synthetic oligonucleotide
  Sense strand starting at position 2118 of SEQ ID NO: 914395
auucuagauuuauggaaac

SEQ ID NO: 1000657 - RNA, 19 nt, Artificial Sequence
  Description of Artificial Sequence: Synthetic oligonucleotide
  Antisense strand to SEQ ID NO: 1000656
guuuccauaaaucuagaau

SEQ ID NO: 1000658 - RNA, 19 nt, Artificial Sequence
  Description of Artificial Sequence: Synthetic oligonucleotide
  Sense strand starting at position 2165 of SEQ ID NO: 914395
gggaucaaugcccggcauu

SEQ ID NO: 1000659 - RNA, 19 nt, Artificial Sequence
  Description of Artificial Sequence: Synthetic oligonucleotide
  Antisense strand to SEQ ID NO: 1000658
aaugccgggcauugauccc

SEQ ID NO: 1000660 - RNA, 19 nt, Artificial Sequence
  Description of Artificial Sequence: Synthetic oligonucleotide
  Sense strand starting at position 2166 of SEQ ID NO: 914395
ggaucaaugcccggcauuu

SEQ ID NO: 1000661 - RNA, 19 nt, Artificial Sequence
  Description of Artificial Sequence: Synthetic oligonucleotide
  Antisense strand to SEQ ID NO: 1000660
aaaugccgggcauugaucc

SEQ ID NO: 1000662 - RNA, 19 nt, Artificial Sequence
  Description of Artificial Sequence: Synthetic oligonucleotide
  Sense strand starting at position 2203 of SEQ ID NO: 914395
ggccuuugcccuuaagaug

SEQ ID NO: 1000663 - RNA, 19 nt, Artificial Sequence
  Description of Artificial Sequence: Synthetic oligonucleotide
  Antisense strand to SEQ ID NO: 1000662
caucuuaagggcaaaggcc

SEQ ID NO: 1000664 - RNA, 19 nt, Artificial Sequence
  Description of Artificial Sequence: Synthetic oligonucleotide
  Sense strand starting at position 2221 of SEQ ID NO: 914395
gggcaauuccucugcaguu

SEQ ID NO: 1000665 - RNA, 19 nt, Artificial Sequence
  Description of Artificial Sequence: Synthetic oligonucleotide
  Antisense strand to SEQ ID NO: 1000664
aacugcagaggaauugccc

SEQ ID NO: 1000666 - RNA, 19 nt, Artificial Sequence
  Description of Artificial Sequence: Synthetic oligonucleotide
  Sense strand starting at position 3419 of SEQ ID NO: 914395
ccaauuaacugacagggaa

SEQ ID NO: 1000667 - RNA, 19 nt, Artificial Sequence
  Description of Artificial Sequence: Synthetic oligonucleotide
  Antisense strand to SEQ ID NO: 1000666
uucccugucaguuaauugg

SEQ ID NO: 1000668 - RNA, 19 nt, Artificial Sequence
  Description of Artificial Sequence: Synthetic oligonucleotide
  Sense strand starting at position 3460 of SEQ ID NO: 914395
ugcaguggccuucgagaca

SEQ ID NO: 1000669 - RNA, 19 nt, Artificial Sequence
  Description of Artificial Sequence: Synthetic oligonucleotide
  Antisense strand to SEQ ID NO: 1000668
ugucucgaaggccacugca

SEQ ID NO: 1000670 - RNA, 19 nt, Artificial Sequence
  Description of Artificial Sequence: Synthetic oligonucleotide
  Sense strand starting at position 3467 of SEQ ID NO: 914395
gccuucgagacagaaucuu

SEQ ID NO: 1000671 - RNA, 19 nt, Artificial Sequence
  Description of Artificial Sequence: Synthetic oligonucleotide
  Antisense strand to SEQ ID NO: 1000670
aagauucugucucgaaggc

SEQ ID NO: 1000672 - RNA, 19 nt, Artificial Sequence
  Description of Artificial Sequence: Synthetic oligonucleotide
  Sense strand starting at position 3600 of SEQ ID NO: 914395
ccaaauagcuggcauuaua

SEQ ID NO: 1000673 - RNA, 19 nt, Artificial Sequence
  Description of Artificial Sequence: Synthetic oligonucleotide
  Antisense strand to SEQ ID NO: 1000672
uauaaugccagcuauuugg

SEQ ID NO: 1000674 - RNA, 19 nt, Artificial Sequence
  Description of Artificial Sequence: Synthetic oligonucleotide
  Sense strand starting at position 3901 of SEQ ID NO: 914395
guggcagagcugugaauca

SEQ ID NO: 1000675 - RNA, 19 nt, Artificial Sequence
  Description of Artificial Sequence: Synthetic oligonucleotide
  Antisense strand to SEQ ID NO: 1000674
ugauucacagcucugccac

SEQ ID NO: 1000676 - RNA, 19 nt, Artificial Sequence
  Description of Artificial Sequence: Synthetic oligonucleotide
  Sense strand starting at position 8 of SEQ ID NO: 914396
agccuucugcuauaaggga

SEQ ID NO: 1000677 - RNA, 19 nt, Artificial Sequence
  Description of Artificial Sequence: Synthetic oligonucleotide
  Antisense strand to SEQ ID NO: 1000676
ucccuuauagcagaaggcu

SEQ ID NO: 1000678 - RNA, 19 nt, Artificial Sequence
  Description of Artificial Sequence: Synthetic oligonucleotide
  Sense strand starting at position 58 of SEQ ID NO: 914396
uagggaaagcaggguuaau

SEQ ID NO: 1000679 - RNA, 19 nt, Artificial Sequence
  Description of Artificial Sequence: Synthetic oligonucleotide
  Antisense strand to SEQ ID NO: 1000678
auuaacccugcuuucccua

SEQ ID NO: 1000680 - RNA, 19 nt, Artificial Sequence
  Description of Artificial Sequence: Synthetic oligonucleotide
  Sense strand starting at position 186 of SEQ ID NO: 914396
ugagguuuaccggaacuga

SEQ ID NO: 1000681 - RNA, 19 nt, Artificial Sequence
  Description of Artificial Sequence: Synthetic oligonucleotide
  Antisense strand to SEQ ID NO: 1000680
ucaguuccgguaaaccuca

SEQ ID NO: 1000682 - RNA, 19 nt, Artificial Sequence
  Description of Artificial Sequence: Synthetic oligonucleotide
  Sense strand starting at position 215 of SEQ ID NO: 914396
cuaguauuccacuagccca

SEQ ID NO: 1000683 - RNA, 19 nt, Artificial Sequence
  Description of Artificial Sequence: Synthetic oligonucleotide
  Antisense strand to SEQ ID NO: 1000682
ugggcuaguggaauacuag

SEQ ID NO: 1000684 - RNA, 19 nt, Artificial Sequence
  Description of Artificial Sequence: Synthetic oligonucleotide
  Sense strand starting at position 424 of SEQ ID NO: 914396
cucuuaaaguaagcagaaa

SEQ ID NO: 1000685 - RNA, 19 nt, Artificial Sequence
  Description of Artificial Sequence: Synthetic oligonucleotide
  Antisense strand to SEQ ID NO: 1000684
uuucugcuuacuuuaagag

SEQ ID NO: 1000686 - RNA, 19 nt, Artificial Sequence
  Description of Artificial Sequence: Synthetic oligonucleotide
  Sense strand starting at position 601 of SEQ ID NO: 914396
aacgccauuggucagaauu

SEQ ID NO: 1000687 - RNA, 19 nt, Artificial Sequence
  Description of Artificial Sequence: Synthetic oligonucleotide
  Antisense strand to SEQ ID NO: 1000686
aauucugaccaauggcguu

SEQ ID NO: 1000688 - RNA, 19 nt, Artificial Sequence
  Description of Artificial Sequence: Synthetic oligonucleotide
  Sense strand starting at position 611 of SEQ ID NO: 914396
gucagaauucuugaagccu

SEQ ID NO: 1000689 - RNA, 19 nt, Artificial Sequence
  Description of Artificial Sequence: Synthetic oligonucleotide
  Antisense strand to SEQ ID NO: 1000688
aggcuucaagaauucugac

SEQ ID NO: 1000690 - RNA, 19 nt, Artificial Sequence
  Description of Artificial Sequence: Synthetic oligonucleotide
  Sense strand starting at position 738 of SEQ ID NO: 914396
cuguaacuacaguaucaua

SEQ ID NO: 1000691 - RNA, 19 nt, Artificial Sequence
  Description of Artificial Sequence: Synthetic oligonucleotide
  Antisense strand to SEQ ID NO: 1000690
uaugauacuguaguuacag

SEQ ID NO: 1000692 - RNA, 19 nt, Artificial Sequence
  Description of Artificial Sequence: Synthetic oligonucleotide
  Sense strand starting at position 852 of SEQ ID NO: 914396
ugaacucuacauugugaaa

SEQ ID NO: 1000693 - RNA, 19 nt, Artificial Sequence
  Description of Artificial Sequence: Synthetic oligonucleotide
  Antisense strand to SEQ ID NO: 1000692
uuucacaauguagaguuca

SEQ ID NO: 1000694 - RNA, 19 nt, Artificial Sequence
  Description of Artificial Sequence: Synthetic oligonucleotide
  Sense strand starting at position 1031 of SEQ ID NO: 914396
aggauucucuuguccuaau

SEQ ID NO: 1000695 - RNA, 19 nt, Artificial Sequence
  Description of Artificial Sequence: Synthetic oligonucleotide
  Antisense strand to SEQ ID NO: 1000694
auuaggacaagagaauccu

SEQ ID NO: 1000696 - RNA, 19 nt, Artificial Sequence
  Description of Artificial Sequence: Synthetic oligonucleotide
  Sense strand starting at position 1162 of SEQ ID NO: 914396
uaaguuggguuccuuagaa

SEQ ID NO: 1000697 - RNA, 19 nt, Artificial Sequence
  Description of Artificial Sequence: Synthetic oligonucleotide
  Antisense strand to SEQ ID NO: 1000696
uucuaaggaacccaacuua

SEQ ID NO: 1000698 - RNA, 19 nt, Artificial Sequence
  Description of Artificial Sequence: Synthetic oligonucleotide
  Sense strand starting at position 1282 of SEQ ID NO: 914396
ggugaauuacaacggaguu

SEQ ID NO: 1000699 - RNA, 19 nt, Artificial Sequence
  Description of Artificial Sequence: Synthetic oligonucleotide
  Antisense strand to SEQ ID NO: 1000698
aacuccguuguaauucacc

SEQ ID NO: 1000700 - RNA, 19 nt, Artificial Sequence
  Description of Artificial Sequence: Synthetic oligonucleotide
  Sense strand starting at position 1335 of SEQ ID NO: 914396
uggaguagagaugguccua

SEQ ID NO: 1000701 - RNA, 19 nt, Artificial Sequence
  Description of Artificial Sequence: Synthetic oligonucleotide
  Antisense strand to SEQ ID NO: 1000700
uaggaccaucucuacucca

SEQ ID NO: 1000702 - RNA, 19 nt, Artificial Sequence
  Description of Artificial Sequence: Synthetic oligonucleotide
  Sense strand starting at position 1354 of SEQ ID NO: 914396
cacacuuguccugaguuag

SEQ ID NO: 1000703 - RNA, 19 nt, Artificial Sequence
  Description of Artificial Sequence: Synthetic oligonucleotide
  Antisense strand to SEQ ID NO: 1000702
cuaacucaggacaagugug

SEQ ID NO: 1000704 - RNA, 19 nt, Artificial Sequence
  Description of Artificial Sequence: Synthetic oligonucleotide
  Sense strand starting at position 1379 of SEQ ID NO: 914396
gagucaggccuuuaaacuc

SEQ ID NO: 1000705 - RNA, 19 nt, Artificial Sequence
  Description of Artificial Sequence: Synthetic oligonucleotide
  Antisense strand to SEQ ID NO: 1000704
gaguuuaaaggccugacuc

SEQ ID NO: 1000706 - RNA, 19 nt, Artificial Sequence
  Description of Artificial Sequence: Synthetic oligonucleotide
  Sense strand starting at position 1445 of SEQ ID NO: 914396
aauuuaggguaauagaguu

SEQ ID NO: 1000707 - RNA, 19 nt, Artificial Sequence
  Description of Artificial Sequence: Synthetic oligonucleotide
  Antisense strand to SEQ ID NO: 1000706
aacucuauuacccuaaauu

SEQ ID NO: 1000708 - RNA, 19 nt, Artificial Sequence
  Description of Artificial Sequence: Synthetic oligonucleotide
  Sense strand starting at position 1483 of SEQ ID NO: 914396
uccugaaagaaauguaggu

SEQ ID NO: 1000709 - RNA, 19 nt, Artificial Sequence
  Description of Artificial Sequence: Synthetic oligonucleotide
  Antisense strand to SEQ ID NO: 1000708
accuacauuucuuucagga

SEQ ID NO: 1000710 - RNA, 19 nt, Artificial Sequence
  Description of Artificial Sequence: Synthetic oligonucleotide
  Sense strand starting at position 1502 of SEQ ID NO: 914396
gugaacuaucagcagcuga

SEQ ID NO: 1000711 - RNA, 19 nt, Artificial Sequence
  Description of Artificial Sequence: Synthetic oligonucleotide
  Antisense strand to SEQ ID NO: 1000710
ucagcugcugauaguucac

SEQ ID NO: 1000712 - RNA, 19 nt, Artificial Sequence
  Description of Artificial Sequence: Synthetic oligonucleotide
  Sense strand starting at position 1605 of SEQ ID NO: 914396
ucugauuagucuucugaga

SEQ ID NO: 1000713 - RNA, 19 nt, Artificial Sequence
  Description of Artificial Sequence: Synthetic oligonucleotide
  Antisense strand to SEQ ID NO: 1000712
ucucagaagacuaaucaga

SEQ ID NO: 1000714 - RNA, 19 nt, Artificial Sequence
  Description of Artificial Sequence: Synthetic oligonucleotide
  Sense strand starting at position 1624 of SEQ ID NO: 914396
ggacuugagauggguguca

SEQ ID NO: 1000715 - RNA, 19 nt, Artificial Sequence
  Description of Artificial Sequence: Synthetic oligonucleotide
  Antisense strand to SEQ ID NO: 1000714
ugacacccaucucaagucc

SEQ ID NO: 1000716 - RNA, 19 nt, Artificial Sequence
  Description of Artificial Sequence: Synthetic oligonucleotide
  Sense strand starting at position 1626 of SEQ ID NO: 914396
acuugagaugggugucaga

SEQ ID NO: 1000717 - RNA, 19 nt, Artificial Sequence
  Description of Artificial Sequence: Synthetic oligonucleotide
  Antisense strand to SEQ ID NO: 1000716
ucugacacccaucucaagu

SEQ ID NO: 1000718 - RNA, 19 nt, Artificial Sequence
  Description of Artificial Sequence: Synthetic oligonucleotide
  Sense strand starting at position 2202 of SEQ ID NO: 914396
auccauauacguuacaaug

SEQ ID NO: 1000719 - RNA, 19 nt, Artificial Sequence
  Description of Artificial Sequence: Synthetic oligonucleotide
  Antisense strand to SEQ ID NO: 1000718
cauuguaacguauauggau

SEQ ID NO: 1000720 - RNA, 19 nt, Artificial Sequence
  Description of Artificial Sequence: Synthetic oligonucleotide
  Sense strand starting at position 2208 of SEQ ID NO: 914396
auacguuacaaugggugaa

SEQ ID NO: 1000721 - RNA, 19 nt, Artificial Sequence
  Description of Artificial Sequence: Synthetic oligonucleotide
  Antisense strand to SEQ ID NO: 1000720
uucacccauuguaacguau

SEQ ID NO: 1000722 - RNA, 19 nt, Artificial Sequence
  Description of Artificial Sequence: Synthetic oligonucleotide
  Sense strand starting at position 2605 of SEQ ID NO: 914396
auaaauucuccuggcagga

SEQ ID NO: 1000723 - RNA, 19 nt, Artificial Sequence
  Description of Artificial Sequence: Synthetic oligonucleotide
  Antisense strand to SEQ ID NO: 1000722
uccugccaggagaauuuau

SEQ ID NO: 1000724 - RNA, 19 nt, Artificial Sequence
  Description of Artificial Sequence: Synthetic oligonucleotide
  Sense strand starting at position 2631 of SEQ ID NO: 914396
gaccuuaaguaauugaugu

SEQ ID NO: 1000725 - RNA, 19 nt, Artificial Sequence
  Description of Artificial Sequence: Synthetic oligonucleotide
  Antisense strand to SEQ ID NO: 1000724
acaucaauuacuuaagguc

SEQ ID NO: 1000726 - RNA, 19 nt, Artificial Sequence
  Description of Artificial Sequence: Synthetic oligonucleotide
  Sense strand starting at position 2671 of SEQ ID NO: 914396
ucaagagacucauuaagcu

SEQ ID NO: 1000727 - RNA, 19 nt, Artificial Sequence
  Description of Artificial Sequence: Synthetic oligonucleotide
  Antisense strand to SEQ ID NO: 1000726
agcuuaaugagucucuuga

SEQ ID NO: 1000728 - RNA, 19 nt, Artificial Sequence
  Description of Artificial Sequence: Synthetic oligonucleotide
  Sense strand starting at position 2687 of SEQ ID NO: 914396
gcugauccaucucuaagga

SEQ ID NO: 1000729 - RNA, 19 nt, Artificial Sequence
  Description of Artificial Sequence: Synthetic oligonucleotide
  Antisense strand to SEQ ID NO: 1000728
uccuuagagauggaucagc

SEQ ID NO: 1000730 - RNA, 19 nt, Artificial Sequence
  Description of Artificial Sequence: Synthetic oligonucleotide
  Sense strand starting at position 2898 of SEQ ID NO: 914396
aggacugugugauugacau

SEQ ID NO: 1000731 - RNA, 19 nt, Artificial Sequence
  Description of Artificial Sequence: Synthetic oligonucleotide
  Antisense strand to SEQ ID NO: 1000730
augucaaucacacaguccu

SEQ ID NO: 1000732 - RNA, 19 nt, Artificial Sequence
  Description of Artificial Sequence: Synthetic oligonucleotide
  Sense strand starting at position 2904 of SEQ ID NO: 914396
gugugauugacaugggacu

SEQ ID NO: 1000733 - RNA, 19 nt, Artificial Sequence
  Description of Artificial Sequence: Synthetic oligonucleotide
  Antisense strand to SEQ ID NO: 1000732
agucccaugucaaucacac

SEQ ID NO: 1000734 - RNA, 19 nt, Artificial Sequence
  Description of Artificial Sequence: Synthetic oligonucleotide
  Sense strand starting at position 2905 of SEQ ID NO: 914396
ugugauugacaugggacuu

SEQ ID NO: 1000735 - RNA, 19 nt, Artificial Sequence
  Description of Artificial Sequence: Synthetic oligonucleotide
  Antisense strand to SEQ ID NO: 1000734
aagucccaugucaaucaca

SEQ ID NO: 1000736 - RNA, 19 nt, Artificial Sequence
  Description of Artificial Sequence: Synthetic oligonucleotide
  Sense strand starting at position 2915 of SEQ ID NO: 914396
augggacuuguguaucaau

SEQ ID NO: 1000737 - RNA, 19 nt, Artificial Sequence
  Description of Artificial Sequence: Synthetic oligonucleotide
  Antisense strand to SEQ ID NO: 1000736
auugauacacaagucccau

SEQ ID NO: 1000738 - RNA, 19 nt, Artificial Sequence
  Description of Artificial Sequence: Synthetic oligonucleotide
  Sense strand starting at position 2982 of SEQ ID NO: 914396
gccggacauuugccuuuau

SEQ ID NO: 1000739 - RNA, 19 nt, Artificial Sequence
  Description of Artificial Sequence: Synthetic oligonucleotide
  Antisense strand to SEQ ID NO: 1000738
auaaaggcaaauguccggc

SEQ ID NO: 1000740 - RNA, 19 nt, Artificial Sequence
  Description of Artificial Sequence: Synthetic oligonucleotide
  Sense strand starting at position 3130 of SEQ ID NO: 914396
ccacuugucgacuauauca

SEQ ID NO: 1000741 - RNA, 19 nt, Artificial Sequence
  Description of Artificial Sequence: Synthetic oligonucleotide
  Antisense strand to SEQ ID NO: 1000740
ugauauagucgacaagugg

SEQ ID NO: 1000742 - RNA, 19 nt, Artificial Sequence
  Description of Artificial Sequence: Synthetic oligonucleotide
  Sense strand starting at position 3181 of SEQ ID NO: 914396
gccuaauguguguccuagu

SEQ ID NO: 1000743 - RNA, 19 nt, Artificial Sequence
  Description of Artificial Sequence: Synthetic oligonucleotide
  Antisense strand to SEQ ID NO: 1000742
acuaggacacacauuaggc

SEQ ID NO: 1000744 - RNA, 19 nt, Artificial Sequence
  Description of Artificial Sequence: Synthetic oligonucleotide
  Sense strand starting at position 3341 of SEQ ID NO: 914396
cagucuggagcuuaacaua

SEQ ID NO: 1000745 - RNA, 19 nt, Artificial Sequence
  Description of Artificial Sequence: Synthetic oligonucleotide
  Antisense strand to SEQ ID NO: 1000744
uauguuaagcuccagacug

SEQ ID NO: 1000746 - RNA, 19 nt, Artificial Sequence
  Description of Artificial Sequence: Synthetic oligonucleotide
  Sense strand starting at position 3406 of SEQ ID NO: 914396
uugagaagucccuauucua

SEQ ID NO: 1000747 - RNA, 19 nt, Artificial Sequence
  Description of Artificial Sequence: Synthetic oligonucleotide
  Antisense strand to SEQ ID NO: 1000746
uagaauagggacuucucaa

SEQ ID NO: 1000748 - RNA, 19 nt, Artificial Sequence
  Description of Artificial Sequence: Synthetic oligonucleotide
  Sense strand starting at position 3525 of SEQ ID NO: 914396
agccaucgacauuaaucau

SEQ ID NO: 1000749 - RNA, 19 nt, Artificial Sequence
  Description of Artificial Sequence: Synthetic oligonucleotide
  Antisense strand to SEQ ID NO: 1000748
augauuaaugucgauggcu

SEQ ID NO: 1000750 - RNA, 19 nt, Artificial Sequence
  Description of Artificial Sequence: Synthetic oligonucleotide
  Sense strand starting at position 3875 of SEQ ID NO: 914396
auguguguuccugaggaua

SEQ ID NO: 1000751 - RNA, 19 nt, Artificial Sequence
  Description of Artificial Sequence: Synthetic oligonucleotide
  Antisense strand to SEQ ID NO: 1000750
uauccucaggaacacacau

SEQ ID NO: 1000752 - RNA, 19 nt, Artificial Sequence
  Description of Artificial Sequence: Synthetic oligonucleotide
  Sense strand starting at position 3878 of SEQ ID NO: 914396
uguguuccugaggauagau

SEQ ID NO: 1000753 - RNA, 19 nt, Artificial Sequence
  Description of Artificial Sequence: Synthetic oligonucleotide
  Antisense strand to SEQ ID NO: 1000752
aucuauccucaggaacaca

SEQ ID NO: 1000754 - RNA, 19 nt, Artificial Sequence
  Description of Artificial Sequence: Synthetic oligonucleotide
  Sense strand starting at position 3887 of SEQ ID NO: 914396
gaggauagaucuuuaugua

SEQ ID NO: 1000755 - RNA, 19 nt, Artificial Sequence
  Description of Artificial Sequence: Synthetic oligonucleotide
  Antisense strand to SEQ ID NO: 1000754
uacauaaagaucuauccuc

SEQ ID NO: 1000756 - RNA, 19 nt, Artificial Sequence
  Description of Artificial Sequence: Synthetic oligonucleotide
  Sense strand starting at position 86 of SEQ ID NO: 914397
uuuggugucaaggauccua

SEQ ID NO: 1000757 - RNA, 19 nt, Artificial Sequence
  Description of Artificial Sequence: Synthetic oligonucleotide
  Antisense strand to SEQ ID NO: 1000756
uaggauccuugacaccaaa

SEQ ID NO: 1000758 - RNA, 19 nt, Artificial Sequence
  Description of Artificial Sequence: Synthetic oligonucleotide
  Sense strand starting at position 114 of SEQ ID NO: 914397
gacaaaugggagugucucu

SEQ ID NO: 1000759 - RNA, 19 nt, Artificial Sequence
  Description of Artificial Sequence: Synthetic oligonucleotide
  Antisense strand to SEQ ID NO: 1000758
agagacacucccauuuguc

SEQ ID NO: 1000760 - RNA, 19 nt, Artificial Sequence
  Description of Artificial Sequence: Synthetic oligonucleotide
  Sense strand starting at position 119 of SEQ ID NO: 914397
augggagugucucuagaag

SEQ ID NO: 1000761 - RNA, 19 nt, Artificial Sequence
  Description of Artificial Sequence: Synthetic oligonucleotide
  Antisense strand to SEQ ID NO: 1000760
cuucuagagacacucccau

SEQ ID NO: 1000762 - RNA, 19 nt, Artificial Sequence
  Description of Artificial Sequence: Synthetic oligonucleotide
  Sense strand starting at position 144 of SEQ ID NO: 914397
cucugauaggagugugaca

SEQ ID NO: 1000763 - RNA, 19 nt, Artificial Sequence
  Description of Artificial Sequence: Synthetic oligonucleotide
  Antisense strand to SEQ ID NO: 1000762
ugucacacuccuaucagag

SEQ ID NO: 1000764 - RNA, 19 nt, Artificial Sequence
  Description of Artificial Sequence: Synthetic oligonucleotide
  Sense strand starting at position 146 of SEQ ID NO: 914397
cugauaggagugugacauu

SEQ ID NO: 1000765 - RNA, 19 nt, Artificial Sequence
  Description of Artificial Sequence: Synthetic oligonucleotide
  Antisense strand to SEQ ID NO: 1000764
aaugucacacuccuaucag

SEQ ID NO: 1000766 - RNA, 19 nt, Artificial Sequence
  Description of Artificial Sequence: Synthetic oligonucleotide
  Sense strand starting at position 486 of SEQ ID NO: 914397
gaaagugaugguggaauau

SEQ ID NO: 1000767 - RNA, 19 nt, Artificial Sequence
  Description of Artificial Sequence: Synthetic oligonucleotide
  Antisense strand to SEQ ID NO: 1000766
auauuccaccaucacuuuc

SEQ ID NO: 1000768 - RNA, 19 nt, Artificial Sequence
  Description of Artificial Sequence: Synthetic oligonucleotide
  Sense strand starting at position 644 of SEQ ID NO: 914397
gugaccuaauccuugaauu

SEQ ID NO: 1000769 - RNA, 19 nt, Artificial Sequence
  Description of Artificial Sequence: Synthetic oligonucleotide
  Antisense strand to SEQ ID NO: 1000768
aauucaaggauuaggucac

SEQ ID NO: 1000770 - RNA, 19 nt, Artificial Sequence
  Description of Artificial Sequence: Synthetic oligonucleotide
  Sense strand starting at position 667 of SEQ ID NO: 914397
ccguaaugccagugauuua

SEQ ID NO: 1000771 - RNA, 19 nt, Artificial Sequence
  Description of Artificial Sequence: Synthetic oligonucleotide
  Antisense strand to SEQ ID NO: 1000770
uaaaucacuggcauuacgg

SEQ ID NO: 1000772 - RNA, 19 nt, Artificial Sequence
  Description of Artificial Sequence: Synthetic oligonucleotide
  Sense strand starting at position 674 of SEQ ID NO: 914397
gccagugauuuauccugca

SEQ ID NO: 1000773 - RNA, 19 nt, Artificial Sequence
  Description of Artificial Sequence: Synthetic oligonucleotide
  Antisense strand to SEQ ID NO: 1000772
ugcaggauaaaucacuggc

SEQ ID NO: 1000774 - RNA, 19 nt, Artificial Sequence
  Description of Artificial Sequence: Synthetic oligonucleotide
  Sense strand starting at position 772 of SEQ ID NO: 914397
uuucuaauagugggagacu

SEQ ID NO: 1000775 - RNA, 19 nt, Artificial Sequence
  Description of Artificial Sequence: Synthetic oligonucleotide
  Antisense strand to SEQ ID NO: 1000774
agucucccacuauuagaaa

SEQ ID NO: 1000776 - RNA, 19 nt, Artificial Sequence
  Description of Artificial Sequence: Synthetic oligonucleotide
  Sense strand starting at position 815 of SEQ ID NO: 914397
ugaucuaguccaggaccaa

SEQ ID NO: 1000777 - RNA, 19 nt, Artificial Sequence
  Description of Artificial Sequence: Synthetic oligonucleotide
  Antisense strand to SEQ ID NO: 1000776
uugguccuggacuagauca

SEQ ID NO: 1000778 - RNA, 19 nt, Artificial Sequence
  Description of Artificial Sequence: Synthetic oligonucleotide
  Sense strand starting at position 858 of SEQ ID NO: 914397
gcucuaauacuugggaaga

SEQ ID NO: 1000779 - RNA, 19 nt, Artificial Sequence
  Description of Artificial Sequence: Synthetic oligonucleotide
  Antisense strand to SEQ ID NO: 1000778
ucuucccaaguauuagagc

SEQ ID NO: 1000780 - RNA, 19 nt, Artificial Sequence
  Description of Artificial Sequence: Synthetic oligonucleotide
  Sense strand starting at position 961 of SEQ ID NO: 914397
auuaaaucuucuuugagug

SEQ ID NO: 1000781 - RNA, 19 nt, Artificial Sequence
  Description of Artificial Sequence: Synthetic oligonucleotide
  Antisense strand to SEQ ID NO: 1000780
cacucaaagaagauuuaau

SEQ ID NO: 1000782 - RNA, 19 nt, Artificial Sequence
  Description of Artificial Sequence: Synthetic oligonucleotide
  Sense strand starting at position 1123 of SEQ ID NO: 914397
gugauuugguaggauuugu

SEQ ID NO: 1000783 - RNA, 19 nt, Artificial Sequence
  Description of Artificial Sequence: Synthetic oligonucleotide
  Antisense strand to SEQ ID NO: 1000782
acaaauccuaccaaaucac

SEQ ID NO: 1000784 - RNA, 19 nt, Artificial Sequence
  Description of Artificial Sequence: Synthetic oligonucleotide
  Sense strand starting at position 1140 of SEQ ID NO: 914397
guuggauaucugcaaccca

SEQ ID NO: 1000785 - RNA, 19 nt, Artificial Sequence
  Description of Artificial Sequence: Synthetic oligonucleotide
  Antisense strand to SEQ ID NO: 1000784
uggguugcagauauccaac

SEQ ID NO: 1000786 - RNA, 19 nt, Artificial Sequence
  Description of Artificial Sequence: Synthetic oligonucleotide
  Sense strand starting at position 1283 of SEQ ID NO: 914397
auaggaagcugguucuaua

SEQ ID NO: 1000787 - RNA, 19 nt, Artificial Sequence
  Description of Artificial Sequence: Synthetic oligonucleotide
  Antisense strand to SEQ ID NO: 1000786
uauagaaccagcuuccuau

SEQ ID NO: 1000788 - RNA, 19 nt, Artificial Sequence
  Description of Artificial Sequence: Synthetic oligonucleotide
  Sense strand starting at position 1363 of SEQ ID NO: 914397
uuugaacucugcucuagaa

SEQ ID NO: 1000789 - RNA, 19 nt, Artificial Sequence
  Description of Artificial Sequence: Synthetic oligonucleotide
  Antisense strand to SEQ ID NO: 1000788
uucuagagcagaguucaaa

SEQ ID NO: 1000790 - RNA, 19 nt, Artificial Sequence
  Description of Artificial Sequence: Synthetic oligonucleotide
  Sense strand starting at position 1370 of SEQ ID NO: 914397
ucugcucuagaagauuauu

SEQ ID NO: 1000791 - RNA, 19 nt, Artificial Sequence
  Description of Artificial Sequence: Synthetic oligonucleotide
  Antisense strand to SEQ ID NO: 1000790
aauaaucuucuagagcaga

SEQ ID NO: 1000792 - RNA, 19 nt, Artificial Sequence
  Description of Artificial Sequence: Synthetic oligonucleotide
  Sense strand starting at position 1577 of SEQ ID NO: 914397
augucacucuuuccaggaa

SEQ ID NO: 1000793 - RNA, 19 nt, Artificial Sequence
  Description of Artificial Sequence: Synthetic oligonucleotide
  Antisense strand to SEQ ID NO: 1000792
uuccuggaaagagugacau

SEQ ID NO: 1000794 - RNA, 19 nt, Artificial Sequence
  Description of Artificial Sequence: Synthetic oligonucleotide
  Sense strand starting at position 1694 of SEQ ID NO: 914397
uguaguugucauuaaaugg

SEQ ID NO: 1000795 - RNA, 19 nt, Artificial Sequence
  Description of Artificial Sequence: Synthetic oligonucleotide
  Antisense strand to SEQ ID NO: 1000794
ccauuuaaugacaacuaca

SEQ ID NO: 1000796 - RNA, 19 nt, Artificial Sequence
  Description of Artificial Sequence: Synthetic oligonucleotide
  Sense strand starting at position 1878 of SEQ ID NO: 914397
cuaccuuauccuugaugag

SEQ ID NO: 1000797 - RNA, 19 nt, Artificial Sequence
  Description of Artificial Sequence: Synthetic oligonucleotide
  Antisense strand to SEQ ID NO: 1000796
cucaucaaggauaagguag

SEQ ID NO: 1000798 - RNA, 19 nt, Artificial Sequence
  Description of Artificial Sequence: Synthetic oligonucleotide
  Sense strand starting at position 2064 of SEQ ID NO: 914397
gagguccugcuagauaauu

SEQ ID NO: 1000799 - RNA, 19 nt, Artificial Sequence
  Description of Artificial Sequence: Synthetic oligonucleotide
  Antisense strand to SEQ ID NO: 1000798
aauuaucuagcaggaccuc

SEQ ID NO: 1000800 - RNA, 19 nt, Artificial Sequence
  Description of Artificial Sequence: Synthetic oligonucleotide
  Sense strand starting at position 2075 of SEQ ID NO: 914397
agauaauuguaccuuggau

SEQ ID NO: 1000801 - RNA, 19 nt, Artificial Sequence
  Description of Artificial Sequence: Synthetic oligonucleotide
  Antisense strand to SEQ ID NO: 1000800
auccaagguacaauuaucu

SEQ ID NO: 1000802 - RNA, 19 nt, Artificial Sequence
  Description of Artificial Sequence: Synthetic oligonucleotide
  Sense strand starting at position 2077 of SEQ ID NO: 914397
auaauuguaccuuggauag

SEQ ID NO: 1000803 - RNA, 19 nt, Artificial Sequence
  Description of Artificial Sequence: Synthetic oligonucleotide
  Antisense strand to SEQ ID NO: 1000802
cuauccaagguacaauuau

SEQ ID NO: 1000804 - RNA, 19 nt, Artificial Sequence
  Description of Artificial Sequence: Synthetic oligonucleotide
  Sense strand starting at position 2240 of SEQ ID NO: 914397
gucugaguucuuuaaggaa

SEQ ID NO: 1000805 - RNA, 19 nt, Artificial Sequence
  Description of Artificial Sequence: Synthetic oligonucleotide
  Antisense strand to SEQ ID NO: 1000804
uuccuuaaagaacucagac

SEQ ID NO: 1000806 - RNA, 19 nt, Artificial Sequence
  Description of Artificial Sequence: Synthetic oligonucleotide
  Sense strand starting at position 2404 of SEQ ID NO: 914397
augauaugugacugacagu

SEQ ID NO: 1000807 - RNA, 19 nt, Artificial Sequence
  Description of Artificial Sequence: Synthetic oligonucleotide
  Antisense strand to SEQ ID NO: 1000806
acugucagucacauaucau

SEQ ID NO: 1000808 - RNA, 19 nt, Artificial Sequence
  Description of Artificial Sequence: Synthetic oligonucleotide
  Sense strand starting at position 2429 of SEQ ID NO: 914397
acgccauaagaguauaaug

SEQ ID NO: 1000809 - RNA, 19 nt, Artificial Sequence
  Description of Artificial Sequence: Synthetic oligonucleotide
  Antisense strand to SEQ ID NO: 1000808
cauuauacucuuauggcgu

SEQ ID NO: 1000810 - RNA, 19 nt, Artificial Sequence
  Description of Artificial Sequence: Synthetic oligonucleotide
  Sense strand starting at position 2713 of SEQ ID NO: 914397
uauauagaucagggcuuau

SEQ ID NO: 1000811 - RNA, 19 nt, Artificial Sequence
  Description of Artificial Sequence: Synthetic oligonucleotide
  Antisense strand to SEQ ID NO: 1000810
auaagcccugaucuauaua

SEQ ID NO: 1000812 - RNA, 19 nt, Artificial Sequence
  Description of Artificial Sequence: Synthetic oligonucleotide
  Sense strand starting at position 2796 of SEQ ID NO: 914397
uacuguugccuggaucaau

SEQ ID NO: 1000813 - RNA, 19 nt, Artificial Sequence
  Description of Artificial Sequence: Synthetic oligonucleotide
  Antisense strand to SEQ ID NO: 1000812
auugauccaggcaacagua

SEQ ID NO: 1000814 - RNA, 19 nt, Artificial Sequence
  Description of Artificial Sequence: Synthetic oligonucleotide
  Sense strand starting at position 2920 of SEQ ID NO: 914397
auuauuaauggguggguua

SEQ ID NO: 1000815 - RNA, 19 nt, Artificial Sequence
  Description of Artificial Sequence: Synthetic oligonucleotide
  Antisense strand to SEQ ID NO: 1000814
uaacccacccauuaauaau

SEQ ID NO: 1000816 - RNA, 19 nt, Artificial Sequence
  Description of Artificial Sequence: Synthetic oligonucleotide
  Sense strand starting at position 2922 of SEQ ID NO: 914397
uauuaauggguggguuaca

SEQ ID NO: 1000817 - RNA, 19 nt, Artificial Sequence
  Description of Artificial Sequence: Synthetic oligonucleotide
  Antisense strand to SEQ ID NO: 1000816
uguaacccacccauuaaua

SEQ ID NO: 1000818 - RNA, 19 nt, Artificial Sequence
  Description of Artificial Sequence: Synthetic oligonucleotide
  Sense strand starting at position 2923 of SEQ ID NO: 914397
auuaauggguggguuacaa

SEQ ID NO: 1000819 - RNA, 19 nt, Artificial Sequence
  Description of Artificial Sequence: Synthetic oligonucleotide
  Antisense strand to SEQ ID NO: 1000818
uuguaacccacccauuaau

SEQ ID NO: 1000820 - RNA, 19 nt, Artificial Sequence
  Description of Artificial Sequence: Synthetic oligonucleotide
  Sense strand starting at position 3028 of SEQ ID NO: 914397
ugccuuaguaacgagagaa

SEQ ID NO: 1000821 - RNA, 19 nt, Artificial Sequence
  Description of Artificial Sequence: Synthetic oligonucleotide
  Antisense strand to SEQ ID NO: 1000820
uucucucguuacuaaggca

SEQ ID NO: 1000822 - RNA, 19 nt, Artificial Sequence
  Description of Artificial Sequence: Synthetic oligonucleotide
  Sense strand starting at position 3117 of SEQ ID NO: 914397
ucugauuugugccuaguag

SEQ ID NO: 1000823 - RNA, 19 nt, Artificial Sequence
  Description of Artificial Sequence: Synthetic oligonucleotide
  Antisense strand to SEQ ID NO: 1000822
cuacuaggcacaaaucaga

SEQ ID NO: 1000824 - RNA, 19 nt, Artificial Sequence
  Description of Artificial Sequence: Synthetic oligonucleotide
  Sense strand starting at position 3163 of SEQ ID NO: 914397
guguuaucuccuuugcguc

SEQ ID NO: 1000825 - RNA, 19 nt, Artificial Sequence
  Description of Artificial Sequence: Synthetic oligonucleotide
  Antisense strand to SEQ ID NO: 1000824
gacgcaaaggagauaacac

SEQ ID NO: 1000826 - RNA, 19 nt, Artificial Sequence
  Description of Artificial Sequence: Synthetic oligonucleotide
  Sense strand starting at position 3382 of SEQ ID NO: 914397
agagcagucccacaaaguu

SEQ ID NO: 1000827 - RNA, 19 nt, Artificial Sequence
  Description of Artificial Sequence: Synthetic oligonucleotide
  Antisense strand to SEQ ID NO: 1000826
aacuuugugggacugcucu

SEQ ID NO: 1000828 - RNA, 19 nt, Artificial Sequence
  Description of Artificial Sequence: Synthetic oligonucleotide
  Sense strand starting at position 3799 of SEQ ID NO: 914397
agcauauagagugaguuua

SEQ ID NO: 1000829 - RNA, 19 nt, Artificial Sequence
  Description of Artificial Sequence: Synthetic oligonucleotide
  Antisense strand to SEQ ID NO: 1000828
uaaacucacucuauaugcu

SEQ ID NO: 1000830 - RNA, 19 nt, Artificial Sequence
  Description of Artificial Sequence: Synthetic oligonucleotide
  Sense strand starting at position 3801 of SEQ ID NO: 914397
cauauagagugaguuuaua

SEQ ID NO: 1000831 - RNA, 19 nt, Artificial Sequence
  Description of Artificial Sequence: Synthetic oligonucleotide
  Antisense strand to SEQ ID NO: 1000830
uauaaacucacucuauaug

SEQ ID NO: 1000832 - RNA, 19 nt, Artificial Sequence
  Description of Artificial Sequence: Synthetic oligonucleotide
  Sense strand starting at position 3905 of SEQ ID NO: 914397
gagugucugccagauggaa

SEQ ID NO: 1000833 - RNA, 19 nt, Artificial Sequence
  Description of Artificial Sequence: Synthetic oligonucleotide
  Antisense strand to SEQ ID NO: 1000832
uuccaucuggcagacacuc

SEQ ID NO: 1000834 - RNA, 19 nt, Artificial Sequence
  Description of Artificial Sequence: Synthetic oligonucleotide
  Sense strand starting at position 3926 of SEQ ID NO: 914397
uaccaagugguuuagugaa

SEQ ID NO: 1000835 - RNA, 19 nt, Artificial Sequence
  Description of Artificial Sequence: Synthetic oligonucleotide
  Antisense strand to SEQ ID NO: 1000834
uucacuaaaccacuuggua

SEQ ID NO: 1000836 - RNA, 19 nt, Artificial Sequence
  Description of Artificial Sequence: Synthetic oligonucleotide
  Sense strand starting at position 26 of SEQ ID NO: 914398
gggcaucuuccagaaucug

SEQ ID NO: 1000837 - RNA, 19 nt, Artificial Sequence
  Description of Artificial Sequence: Synthetic oligonucleotide
  Antisense strand to SEQ ID NO: 1000836
cagauucuggaagaugccc

SEQ ID NO: 1000838 - RNA, 19 nt, Artificial Sequence
  Description of Artificial Sequence: Synthetic oligonucleotide
  Sense strand starting at position 35 of SEQ ID NO: 914398
ccagaaucuggugaaagcu

SEQ ID NO: 1000839 - RNA, 19 nt, Artificial Sequence
  Description of Artificial Sequence: Synthetic oligonucleotide
  Antisense strand to SEQ ID NO: 1000838
agcuuucaccagauucugg

SEQ ID NO: 1000840 - RNA, 19 nt, Artificial Sequence
  Description of Artificial Sequence: Synthetic oligonucleotide
  Sense strand starting at position 139 of SEQ ID NO: 914398
ucuggagcucccuaagcaa

SEQ ID NO: 1000841 - RNA, 19 nt, Artificial Sequence
  Description of Artificial Sequence: Synthetic oligonucleotide
  Antisense strand to SEQ ID NO: 1000840
uugcuuagggagcuccaga

SEQ ID NO: 1000842 - RNA, 19 nt, Artificial Sequence
  Description of Artificial Sequence: Synthetic oligonucleotide
  Sense strand starting at position 161 of SEQ ID NO: 914398
cacagaggucucuaaugcu

SEQ ID NO: 1000843 - RNA, 19 nt, Artificial Sequence
  Description of Artificial Sequence: Synthetic oligonucleotide
  Antisense strand to SEQ ID NO: 1000842
agcauuagagaccucugug

SEQ ID NO: 1000844 - RNA, 19 nt, Artificial Sequence
  Description of Artificial Sequence: Synthetic oligonucleotide
  Sense strand starting at position 169 of SEQ ID NO: 914398
ucucuaaugcuagguuaaa

SEQ ID NO: 1000845 - RNA, 19 nt, Artificial Sequence
  Description of Artificial Sequence: Synthetic oligonucleotide
  Antisense strand to SEQ ID NO: 1000844
uuuaaccuagcauuagaga

SEQ ID NO: 1000846 - RNA, 19 nt, Artificial Sequence
  Description of Artificial Sequence: Synthetic oligonucleotide
  Sense strand starting at position 170 of SEQ ID NO: 914398
cucuaaugcuagguuaaac

SEQ ID NO: 1000847 - RNA, 19 nt, Artificial Sequence
  Description of Artificial Sequence: Synthetic oligonucleotide
  Antisense strand to SEQ ID NO: 1000846
guuuaaccuagcauuagag

SEQ ID NO: 1000848 - RNA, 19 nt, Artificial Sequence
  Description of Artificial Sequence: Synthetic oligonucleotide
  Sense strand starting at position 203 of SEQ ID NO: 914398
auacaucgugcuggaacaa

SEQ ID NO: 1000849 - RNA, 19 nt, Artificial Sequence
  Description of Artificial Sequence: Synthetic oligonucleotide
  Antisense strand to SEQ ID NO: 1000848
uuguuccagcacgauguau

SEQ ID NO: 1000850 - RNA, 19 nt, Artificial Sequence
  Description of Artificial Sequence: Synthetic oligonucleotide
  Sense strand starting at position 348 of SEQ ID NO: 914398
agaauugaaccuugaugcu

SEQ ID NO: 1000851 - RNA, 19 nt, Artificial Sequence
  Description of Artificial Sequence: Synthetic oligonucleotide
  Antisense strand to SEQ ID NO: 1000850
agcaucaagguucaauucu

SEQ ID NO: 1000852 - RNA, 19 nt, Artificial Sequence
  Description of Artificial Sequence: Synthetic oligonucleotide
  Sense strand starting at position 470 of SEQ ID NO: 914398
cagacagagucuucuuaga

SEQ ID NO: 1000853 - RNA, 19 nt, Artificial Sequence
  Description of Artificial Sequence: Synthetic oligonucleotide
  Antisense strand to SEQ ID NO: 1000852
ucuaagaagacucugucug

SEQ ID NO: 1000854 - RNA, 19 nt, Artificial Sequence
  Description of Artificial Sequence: Synthetic oligonucleotide
  Sense strand starting at position 472 of SEQ ID NO: 914398
gacagagucuucuuagaua

SEQ ID NO: 1000855 - RNA, 19 nt, Artificial Sequence
  Description of Artificial Sequence: Synthetic oligonucleotide
  Antisense strand to SEQ ID NO: 1000854
uaucuaagaagacucuguc

SEQ ID NO: 1000856 - RNA, 19 nt, Artificial Sequence
  Description of Artificial Sequence: Synthetic oligonucleotide
  Sense strand starting at position 779 of SEQ ID NO: 914398
aaccaagagugugcuacau

SEQ ID NO: 1000857 - RNA, 19 nt, Artificial Sequence
  Description of Artificial Sequence: Synthetic oligonucleotide
  Antisense strand to SEQ ID NO: 1000856
auguagcacacucuugguu

SEQ ID NO: 1000858 - RNA, 19 nt, Artificial Sequence
  Description of Artificial Sequence: Synthetic oligonucleotide
  Sense strand starting at position 789 of SEQ ID NO: 914398
gugcuacauguacaauaua

SEQ ID NO: 1000859 - RNA, 19 nt, Artificial Sequence
  Description of Artificial Sequence: Synthetic oligonucleotide
  Antisense strand to SEQ ID NO: 1000858
uauauuguacauguagcac

SEQ ID NO: 1000860 - RNA, 19 nt, Artificial Sequence
  Description of Artificial Sequence: Synthetic oligonucleotide
  Sense strand starting at position 1109 of SEQ ID NO: 914398
gagagcaggccuuggacua

SEQ ID NO: 1000861 - RNA, 19 nt, Artificial Sequence
  Description of Artificial Sequence: Synthetic oligonucleotide
  Antisense strand to SEQ ID NO: 1000860
uaguccaaggccugcucuc

SEQ ID NO: 1000862 - RNA, 19 nt, Artificial Sequence
  Description of Artificial Sequence: Synthetic oligonucleotide
  Sense strand starting at position 1225 of SEQ ID NO: 914398
uucucugagccaggucaaa

SEQ ID NO: 1000863 - RNA, 19 nt, Artificial Sequence
  Description of Artificial Sequence: Synthetic oligonucleotide
  Antisense strand to SEQ ID NO: 1000862
uuugaccuggcucagagaa

SEQ ID NO: 1000864 - RNA, 19 nt, Artificial Sequence
  Description of Artificial Sequence: Synthetic oligonucleotide
  Sense strand starting at position 1292 of SEQ ID NO: 914398
uggacuggcucuccuagaa

SEQ ID NO: 1000865 - RNA, 19 nt, Artificial Sequence
  Description of Artificial Sequence: Synthetic oligonucleotide
  Antisense strand to SEQ ID NO: 1000864
uucuaggagagccagucca

SEQ ID NO: 1000866 - RNA, 19 nt, Artificial Sequence
  Description of Artificial Sequence: Synthetic oligonucleotide
  Sense strand starting at position 1296 of SEQ ID NO: 914398
cuggcucuccuagaaccau

SEQ ID NO: 1000867 - RNA, 19 nt, Artificial Sequence
  Description of Artificial Sequence: Synthetic oligonucleotide
  Antisense strand to SEQ ID NO: 1000866
augguucuaggagagccag

SEQ ID NO: 1000868 - RNA, 19 nt, Artificial Sequence
  Description of Artificial Sequence: Synthetic oligonucleotide
  Sense strand starting at position 2019 of SEQ ID NO: 914398
gcauaaugaguuuaauaac

SEQ ID NO: 1000869 - RNA, 19 nt, Artificial Sequence
  Description of Artificial Sequence: Synthetic oligonucleotide
  Antisense strand to SEQ ID NO: 1000868
guuauuaaacucauuaugc

SEQ ID NO: 1000870 - RNA, 19 nt, Artificial Sequence
  Description of Artificial Sequence: Synthetic oligonucleotide
  Sense strand starting at position 2038 of SEQ ID NO: 914398
cagggacagcccugaucau

SEQ ID NO: 1000871 - RNA, 19 nt, Artificial Sequence
  Description of Artificial Sequence: Synthetic oligonucleotide
  Antisense strand to SEQ ID NO: 1000870
augaucagggcugucccug

SEQ ID NO: 1000872 - RNA, 19 nt, Artificial Sequence
  Description of Artificial Sequence: Synthetic oligonucleotide
  Sense strand starting at position 2096 of SEQ ID NO: 914398
cauucuauggguggguuua

SEQ ID NO: 1000873 - RNA, 19 nt, Artificial Sequence
  Description of Artificial Sequence: Synthetic oligonucleotide
  Antisense strand to SEQ ID NO: 1000872
uaaacccacccauagaaug

SEQ ID NO: 1000874 - RNA, 19 nt, Artificial Sequence
  Description of Artificial Sequence: Synthetic oligonucleotide
  Sense strand starting at position 2097 of SEQ ID NO: 914398
auucuauggguggguuuaa

SEQ ID NO: 1000875 - RNA, 19 nt, Artificial Sequence
  Description of Artificial Sequence: Synthetic oligonucleotide
  Antisense strand to SEQ ID NO: 1000874
uuaaacccacccauagaau

SEQ ID NO: 1000876 - RNA, 19 nt, Artificial Sequence
  Description of Artificial Sequence: Synthetic oligonucleotide
  Sense strand starting at position 2450 of SEQ ID NO: 914398
ggaauuccucucugauccu

SEQ ID NO: 1000877 - RNA, 19 nt, Artificial Sequence
  Description of Artificial Sequence: Synthetic oligonucleotide
  Antisense strand to SEQ ID NO: 1000876
aggaucagagaggaauucc

SEQ ID NO: 1000878 - RNA, 19 nt, Artificial Sequence
  Description of Artificial Sequence: Synthetic oligonucleotide
  Sense strand starting at position 2502 of SEQ ID NO: 914398
cccuucugagguuagucau

SEQ ID NO: 1000879 - RNA, 19 nt, Artificial Sequence
  Description of Artificial Sequence: Synthetic oligonucleotide
  Antisense strand to SEQ ID NO: 1000878
augacuaaccucagaaggg

SEQ ID NO: 1000880 - RNA, 19 nt, Artificial Sequence
  Description of Artificial Sequence: Synthetic oligonucleotide
  Sense strand starting at position 2505 of SEQ ID NO: 914398
uucugagguuagucauaga

SEQ ID NO: 1000881 - RNA, 19 nt, Artificial Sequence
  Description of Artificial Sequence: Synthetic oligonucleotide
  Antisense strand to SEQ ID NO: 1000880
ucuaugacuaaccucagaa

SEQ ID NO: 1000882 - RNA, 19 nt, Artificial Sequence
  Description of Artificial Sequence: Synthetic oligonucleotide
  Sense strand starting at position 2556 of SEQ ID NO: 914398
ucacaauccucagcaguga

SEQ ID NO: 1000883 - RNA, 19 nt, Artificial Sequence
  Description of Artificial Sequence: Synthetic oligonucleotide
  Antisense strand to SEQ ID NO: 1000882
ucacugcugaggauuguga

SEQ ID NO: 1000884 - RNA, 19 nt, Artificial Sequence
  Description of Artificial Sequence: Synthetic oligonucleotide
  Sense strand starting at position 2569 of SEQ ID NO: 914398
cagugaguccugggaaugu

SEQ ID NO: 1000885 - RNA, 19 nt, Artificial Sequence
  Description of Artificial Sequence: Synthetic oligonucleotide
  Antisense strand to SEQ ID NO: 1000884
acauucccaggacucacug

SEQ ID NO: 1000886 - RNA, 19 nt, Artificial Sequence
  Description of Artificial Sequence: Synthetic oligonucleotide
  Sense strand starting at position 2887 of SEQ ID NO: 914398
ugcugauucucccucagaa

SEQ ID NO: 1000887 - RNA, 19 nt, Artificial Sequence
  Description of Artificial Sequence: Synthetic oligonucleotide
  Antisense strand to SEQ ID NO: 1000886
uucugagggagaaucagca

SEQ ID NO: 1000888 - RNA, 19 nt, Artificial Sequence
  Description of Artificial Sequence: Synthetic oligonucleotide
  Sense strand starting at position 3064 of SEQ ID NO: 914398
ggccaagaaccguauaaau

SEQ ID NO: 1000889 - RNA, 19 nt, Artificial Sequence
  Description of Artificial Sequence: Synthetic oligonucleotide
  Antisense strand to SEQ ID NO: 1000888
auuuauacgguucuuggcc

SEQ ID NO: 1000890 - RNA, 19 nt, Artificial Sequence
  Description of Artificial Sequence: Synthetic oligonucleotide
  Sense strand starting at position 3096 of SEQ ID NO: 914398
uggcaaaucacgugaacau

SEQ ID NO: 1000891 - RNA, 19 nt, Artificial Sequence
  Description of Artificial Sequence: Synthetic oligonucleotide
  Antisense strand to SEQ ID NO: 1000890
auguucacgugauuugcca

SEQ ID NO: 1000892 - RNA, 19 nt, Artificial Sequence
  Description of Artificial Sequence: Synthetic oligonucleotide
  Sense strand starting at position 3097 of SEQ ID NO: 914398
ggcaaaucacgugaacaua

SEQ ID NO: 1000893 - RNA, 19 nt, Artificial Sequence
  Description of Artificial Sequence: Synthetic oligonucleotide
  Antisense strand to SEQ ID NO: 1000892
uauguucacgugauuugcc

SEQ ID NO: 1000894 - RNA, 19 nt, Artificial Sequence
  Description of Artificial Sequence: Synthetic oligonucleotide
  Sense strand starting at position 3115 of SEQ ID NO: 914398
augcauauugaccaguauu

SEQ ID NO: 1000895 - RNA, 19 nt, Artificial Sequence
  Description of Artificial Sequence: Synthetic oligonucleotide
  Antisense strand to SEQ ID NO: 1000894
aauacuggucaauaugcau

SEQ ID NO: 1000896 - RNA, 19 nt, Artificial Sequence
  Description of Artificial Sequence: Synthetic oligonucleotide
  Sense strand starting at position 3130 of SEQ ID NO: 914398
uauuuaagccagugucuga

SEQ ID NO: 1000897 - RNA, 19 nt, Artificial Sequence
  Description of Artificial Sequence: Synthetic oligonucleotide
  Antisense strand to SEQ ID NO: 1000896
ucagacacuggcuuaaaua

SEQ ID NO: 1000898 - RNA, 19 nt, Artificial Sequence
  Description of Artificial Sequence: Synthetic oligonucleotide
  Sense strand starting at position 3221 of SEQ ID NO: 914398
gugguucccaccuagaagu

SEQ ID NO: 1000899 - RNA, 19 nt, Artificial Sequence
  Description of Artificial Sequence: Synthetic oligonucleotide
  Antisense strand to SEQ ID NO: 1000898
acuucuaggugggaaccac

SEQ ID NO: 1000900 - RNA, 19 nt, Artificial Sequence
  Description of Artificial Sequence: Synthetic oligonucleotide
  Sense strand starting at position 3285 of SEQ ID NO: 914398
aagggaugcuagucuaauu

SEQ ID NO: 1000901 - RNA, 19 nt, Artificial Sequence
  Description of Artificial Sequence: Synthetic oligonucleotide
  Antisense strand to SEQ ID NO: 1000900
aauuagacuagcaucccuu

SEQ ID NO: 1000902 - RNA, 19 nt, Artificial Sequence
  Description of Artificial Sequence: Synthetic oligonucleotide
  Sense strand starting at position 3402 of SEQ ID NO: 914398
ccaugaugcacuugguaga

SEQ ID NO: 1000903 - RNA, 19 nt, Artificial Sequence
  Description of Artificial Sequence: Synthetic oligonucleotide
  Antisense strand to SEQ ID NO: 1000902
ucuaccaagugcaucaugg

SEQ ID NO: 1000904 - RNA, 19 nt, Artificial Sequence
  Description of Artificial Sequence: Synthetic oligonucleotide
  Sense strand starting at position 3403 of SEQ ID NO: 914398
caugaugcacuugguagau

SEQ ID NO: 1000905 - RNA, 19 nt, Artificial Sequence
  Description of Artificial Sequence: Synthetic oligonucleotide
  Antisense strand to SEQ ID NO: 1000904
aucuaccaagugcaucaug

SEQ ID NO: 1000906 - RNA, 19 nt, Artificial Sequence
  Description of Artificial Sequence: Synthetic oligonucleotide
  Sense strand starting at position 3499 of SEQ ID NO: 914398
gagacagaguaaguuauau

SEQ ID NO: 1000907 - RNA, 19 nt, Artificial Sequence
  Description of Artificial Sequence: Synthetic oligonucleotide
  Antisense strand to SEQ ID NO: 1000906
auauaacuuacucugucuc

SEQ ID NO: 1000908 - RNA, 19 nt, Artificial Sequence
  Description of Artificial Sequence: Synthetic oligonucleotide
  Sense strand starting at position 3563 of SEQ ID NO: 914398
ccuagauuauuagcacuga

SEQ ID NO: 1000909 - RNA, 19 nt, Artificial Sequence
  Description of Artificial Sequence: Synthetic oligonucleotide
  Antisense strand to SEQ ID NO: 1000908
ucagugcuaauaaucuagg

SEQ ID NO: 1000910 - RNA, 19 nt, Artificial Sequence
  Description of Artificial Sequence: Synthetic oligonucleotide
  Sense strand starting at position 3567 of SEQ ID NO: 914398
gauuauuagcacugagcca

SEQ ID NO: 1000911 - RNA, 19 nt, Artificial Sequence
  Description of Artificial Sequence: Synthetic oligonucleotide
  Antisense strand to SEQ ID NO: 1000910
uggcucagugcuaauaauc

SEQ ID NO: 1000912 - RNA, 19 nt, Artificial Sequence
  Description of Artificial Sequence: Synthetic oligonucleotide
  Sense strand starting at position 3680 of SEQ ID NO: 914398
ugaucaguucugcagcaau

SEQ ID NO: 1000913 - RNA, 19 nt, Artificial Sequence
  Description of Artificial Sequence: Synthetic oligonucleotide
  Antisense strand to SEQ ID NO: 1000912
auugcugcagaacugauca

SEQ ID NO: 1000914 - RNA, 19 nt, Artificial Sequence
  Description of Artificial Sequence: Synthetic oligonucleotide
  Sense strand starting at position 3691 of SEQ ID NO: 914398
gcagcaaucccagaacuaa

SEQ ID NO: 1000915 - RNA, 19 nt, Artificial Sequence
  Description of Artificial Sequence: Synthetic oligonucleotide
  Antisense strand to SEQ ID NO: 1000914
uuaguucugggauugcugc

SEQ ID NO: 1000916 - RNA, 19 nt, Artificial Sequence
  Description of Artificial Sequence: Synthetic oligonucleotide
  Sense strand starting at position 347 of SEQ ID NO: 914399
cgucaaucucauuaccugu

SEQ ID NO: 1000917 - RNA, 19 nt, Artificial Sequence
  Description of Artificial Sequence: Synthetic oligonucleotide
  Antisense strand to SEQ ID NO: 1000916
acagguaaugagauugacg

SEQ ID NO: 1000918 - RNA, 19 nt, Artificial Sequence
  Description of Artificial Sequence: Synthetic oligonucleotide
  Sense strand starting at position 597 of SEQ ID NO: 914399
aacgaaugccagugaagug

SEQ ID NO: 1000919 - RNA, 19 nt, Artificial Sequence
  Description of Artificial Sequence: Synthetic oligonucleotide
  Antisense strand to SEQ ID NO: 1000918
cacuucacuggcauucguu

SEQ ID NO: 1000920 - RNA, 19 nt, Artificial Sequence
  Description of Artificial Sequence: Synthetic oligonucleotide
  Sense strand starting at position 602 of SEQ ID NO: 914399
augccagugaagugugagu

SEQ ID NO: 1000921 - RNA, 19 nt, Artificial Sequence
  Description of Artificial Sequence: Synthetic oligonucleotide
  Antisense strand to SEQ ID NO: 1000920
acucacacuucacuggcau

SEQ ID NO: 1000922 - RNA, 19 nt, Artificial Sequence
  Description of Artificial Sequence: Synthetic oligonucleotide
  Sense strand starting at position 680 of SEQ ID NO: 914399
ggguucgcugacuaauuga

SEQ ID NO: 1000923 - RNA, 19 nt, Artificial Sequence
  Description of Artificial Sequence: Synthetic oligonucleotide
  Antisense strand to SEQ ID NO: 1000922
ucaauuagucagcgaaccc

SEQ ID NO: 1000924 - RNA, 19 nt, Artificial Sequence
  Description of Artificial Sequence: Synthetic oligonucleotide
  Sense strand starting at position 688 of SEQ ID NO: 914399
ugacuaauugacugaguga

SEQ ID NO: 1000925 - RNA, 19 nt, Artificial Sequence
  Description of Artificial Sequence: Synthetic oligonucleotide
  Antisense strand to SEQ ID NO: 1000924
ucacucagucaauuaguca

SEQ ID NO: 1000926 - RNA, 19 nt, Artificial Sequence
  Description of Artificial Sequence: Synthetic oligonucleotide
  Sense strand starting at position 719 of SEQ ID NO: 914399
gucagcuuccacugggauu

SEQ ID NO: 1000927 - RNA, 19 nt, Artificial Sequence
  Description of Artificial Sequence: Synthetic oligonucleotide
  Antisense strand to SEQ ID NO: 1000926
aaucccaguggaagcugac

SEQ ID NO: 1000928 - RNA, 19 nt, Artificial Sequence
  Description of Artificial Sequence: Synthetic oligonucleotide
  Sense strand starting at position 823 of SEQ ID NO: 914399
gaccuaaguugauagaaca

SEQ ID NO: 1000929 - RNA, 19 nt, Artificial Sequence
  Description of Artificial Sequence: Synthetic oligonucleotide
  Antisense strand to SEQ ID NO: 1000928
uguucuaucaacuuagguc

SEQ ID NO: 1000930 - RNA, 19 nt, Artificial Sequence
  Description of Artificial Sequence: Synthetic oligonucleotide
  Sense strand starting at position 919 of SEQ ID NO: 914399
ccauuaaaccuccgaguac

SEQ ID NO: 1000931 - RNA, 19 nt, Artificial Sequence
  Description of Artificial Sequence: Synthetic oligonucleotide
  Antisense strand to SEQ ID NO: 1000930
guacucggagguuuaaugg

SEQ ID NO: 1000932 - RNA, 19 nt, Artificial Sequence
  Description of Artificial Sequence: Synthetic oligonucleotide
  Sense strand starting at position 963 of SEQ ID NO: 914399
uaagguugguaauugugaa

SEQ ID NO: 1000933 - RNA, 19 nt, Artificial Sequence
  Description of Artificial Sequence: Synthetic oligonucleotide
  Antisense strand to SEQ ID NO: 1000932
uucacaauuaccaaccuua

SEQ ID NO: 1000934 - RNA, 19 nt, Artificial Sequence
  Description of Artificial Sequence: Synthetic oligonucleotide
  Sense strand starting at position 964 of SEQ ID NO: 914399
aagguugguaauugugaaa

SEQ ID NO: 1000935 - RNA, 19 nt, Artificial Sequence
  Description of Artificial Sequence: Synthetic oligonucleotide
  Antisense strand to SEQ ID NO: 1000934
uuucacaauuaccaaccuu

SEQ ID NO: 1000936 - RNA, 19 nt, Artificial Sequence
  Description of Artificial Sequence: Synthetic oligonucleotide
  Sense strand starting at position 1496 of SEQ ID NO: 914399
gcacgauccggccaagaga

SEQ ID NO: 1000937 - RNA, 19 nt, Artificial Sequence
  Description of Artificial Sequence: Synthetic oligonucleotide
  Antisense strand to SEQ ID NO: 1000936
ucucuuggccggaucgugc

SEQ ID NO: 1000938 - RNA, 19 nt, Artificial Sequence
  Description of Artificial Sequence: Synthetic oligonucleotide
  Sense strand starting at position 2238 of SEQ ID NO: 914399
aacuguuuaugauccgacu

SEQ ID NO: 1000939 - RNA, 19 nt, Artificial Sequence
  Description of Artificial Sequence: Synthetic oligonucleotide
  Antisense strand to SEQ ID NO: 1000938
agucggaucauaaacaguu

SEQ ID NO: 1000940 - RNA, 19 nt, Artificial Sequence
  Description of Artificial Sequence: Synthetic oligonucleotide
  Sense strand starting at position 2303 of SEQ ID NO: 914399
cagacauaguggcuggaaa

SEQ ID NO: 1000941 - RNA, 19 nt, Artificial Sequence
  Description of Artificial Sequence: Synthetic oligonucleotide
  Antisense strand to SEQ ID NO: 1000940
uuuccagccacuaugucug

SEQ ID NO: 1000942 - RNA, 19 nt, Artificial Sequence
  Description of Artificial Sequence: Synthetic oligonucleotide
  Sense strand starting at position 2354 of SEQ ID NO: 914399
gucagaaguccaggcuuga

SEQ ID NO: 1000943 - RNA, 19 nt, Artificial Sequence
  Description of Artificial Sequence: Synthetic oligonucleotide
  Antisense strand to SEQ ID NO: 1000942
ucaagccuggacuucugac

SEQ ID NO: 1000944 - RNA, 19 nt, Artificial Sequence
  Description of Artificial Sequence: Synthetic oligonucleotide
  Sense strand starting at position 2471 of SEQ ID NO: 914399
gugguucuggcagaauuca

SEQ ID NO: 1000945 - RNA, 19 nt, Artificial Sequence
  Description of Artificial Sequence: Synthetic oligonucleotide
  Antisense strand to SEQ ID NO: 1000944
ugaauucugccagaaccac

SEQ ID NO: 1000946 - RNA, 19 nt, Artificial Sequence
  Description of Artificial Sequence: Synthetic oligonucleotide
  Sense strand starting at position 2690 of SEQ ID NO: 914399
gggcuugugauugggucaa

SEQ ID NO: 1000947 - RNA, 19 nt, Artificial Sequence
  Description of Artificial Sequence: Synthetic oligonucleotide
  Antisense strand to SEQ ID NO: 1000946
uugacccaaucacaagccc

SEQ ID NO: 1000948 - RNA, 19 nt, Artificial Sequence
  Description of Artificial Sequence: Synthetic oligonucleotide
  Sense strand starting at position 2740 of SEQ ID NO: 914399
ucagcucugccauaugaca

SEQ ID NO: 1000949 - RNA, 19 nt, Artificial Sequence
  Description of Artificial Sequence: Synthetic oligonucleotide
  Antisense strand to SEQ ID NO: 1000948
ugucauauggcagagcuga

SEQ ID NO: 1000950 - RNA, 19 nt, Artificial Sequence
  Description of Artificial Sequence: Synthetic oligonucleotide
  Sense strand starting at position 2764 of SEQ ID NO: 914399
cagucaugggagugaggau

SEQ ID NO: 1000951 - RNA, 19 nt, Artificial Sequence
  Description of Artificial Sequence: Synthetic oligonucleotide
  Antisense strand to SEQ ID NO: 1000950
auccucacucccaugacug

SEQ ID NO: 1000952 - RNA, 19 nt, Artificial Sequence
  Description of Artificial Sequence: Synthetic oligonucleotide
  Sense strand starting at position 2837 of SEQ ID NO: 914399
uuggaauucugccuacuua

SEQ ID NO: 1000953 - RNA, 19 nt, Artificial Sequence
  Description of Artificial Sequence: Synthetic oligonucleotide
  Antisense strand to SEQ ID NO: 1000952
uaaguaggcagaauuccaa

SEQ ID NO: 1000954 - RNA, 19 nt, Artificial Sequence
  Description of Artificial Sequence: Synthetic oligonucleotide
  Sense strand starting at position 2838 of SEQ ID NO: 914399
uggaauucugccuacuuac

SEQ ID NO: 1000955 - RNA, 19 nt, Artificial Sequence
  Description of Artificial Sequence: Synthetic oligonucleotide
  Antisense strand to SEQ ID NO: 1000954
guaaguaggcagaauucca

SEQ ID NO: 1000956 - RNA, 19 nt, Artificial Sequence
  Description of Artificial Sequence: Synthetic oligonucleotide
  Sense strand starting at position 2902 of SEQ ID NO: 914399
guguaacaccucgaaugcu

SEQ ID NO: 1000957 - RNA, 19 nt, Artificial Sequence
  Description of Artificial Sequence: Synthetic oligonucleotide
  Antisense strand to SEQ ID NO: 1000956
agcauucgagguguuacac

SEQ ID NO: 1000958 - RNA, 19 nt, Artificial Sequence
  Description of Artificial Sequence: Synthetic oligonucleotide
  Sense strand starting at position 2911 of SEQ ID NO: 914399
cucgaaugcuuccugcuaa

SEQ ID NO: 1000959 - RNA, 19 nt, Artificial Sequence
  Description of Artificial Sequence: Synthetic oligonucleotide
  Antisense strand to SEQ ID NO: 1000958
uuagcaggaagcauucgag

SEQ ID NO: 1000960 - RNA, 19 nt, Artificial Sequence
  Description of Artificial Sequence: Synthetic oligonucleotide
  Sense strand starting at position 2987 of SEQ ID NO: 914399
uuccuaugaguacagucau

SEQ ID NO: 1000961 - RNA, 19 nt, Artificial Sequence
  Description of Artificial Sequence: Synthetic oligonucleotide
  Antisense strand to SEQ ID NO: 1000960
augacuguacucauaggaa

SEQ ID NO: 1000962 - RNA, 19 nt, Artificial Sequence
  Description of Artificial Sequence: Synthetic oligonucleotide
  Sense strand starting at position 3101 of SEQ ID NO: 914399
agcucagagagugguacau

SEQ ID NO: 1000963 - RNA, 19 nt, Artificial Sequence
  Description of Artificial Sequence: Synthetic oligonucleotide
  Antisense strand to SEQ ID NO: 1000962
auguaccacucucugagcu

SEQ ID NO: 1000964 - RNA, 19 nt, Artificial Sequence
  Description of Artificial Sequence: Synthetic oligonucleotide
  Sense strand starting at position 3103 of SEQ ID NO: 914399
cucagagagugguacauuu

SEQ ID NO: 1000965 - RNA, 19 nt, Artificial Sequence
  Description of Artificial Sequence: Synthetic oligonucleotide
  Antisense strand to SEQ ID NO: 1000964
aaauguaccacucucugag

SEQ ID NO: 1000966 - RNA, 19 nt, Artificial Sequence
  Description of Artificial Sequence: Synthetic oligonucleotide
  Sense strand starting at position 3143 of SEQ ID NO: 914399
guaggaaauugauaaagau

SEQ ID NO: 1000967 - RNA, 19 nt, Artificial Sequence
  Description of Artificial Sequence: Synthetic oligonucleotide
  Antisense strand to SEQ ID NO: 1000966
aucuuuaucaauuuccuac

SEQ ID NO: 1000968 - RNA, 19 nt, Artificial Sequence
  Description of Artificial Sequence: Synthetic oligonucleotide
  Sense strand starting at position 3153 of SEQ ID NO: 914399
gauaaagaugcuugugauc

SEQ ID NO: 1000969 - RNA, 19 nt, Artificial Sequence
  Description of Artificial Sequence: Synthetic oligonucleotide
  Antisense strand to SEQ ID NO: 1000968
gaucacaagcaucuuuauc

SEQ ID NO: 1000970 - RNA, 19 nt, Artificial Sequence
  Description of Artificial Sequence: Synthetic oligonucleotide
  Sense strand starting at position 3158 of SEQ ID NO: 914399
agaugcuugugaucacaga

SEQ ID NO: 1000971 - RNA, 19 nt, Artificial Sequence
  Description of Artificial Sequence: Synthetic oligonucleotide
  Antisense strand to SEQ ID NO: 1000970
ucugugaucacaagcaucu

SEQ ID NO: 1000972 - RNA, 19 nt, Artificial Sequence
  Description of Artificial Sequence: Synthetic oligonucleotide
  Sense strand starting at position 3159 of SEQ ID NO: 914399
gaugcuugugaucacagau

SEQ ID NO: 1000973 - RNA, 19 nt, Artificial Sequence
  Description of Artificial Sequence: Synthetic oligonucleotide
  Antisense strand to SEQ ID NO: 1000972
aucugugaucacaagcauc

SEQ ID NO: 1000974 - RNA, 19 nt, Artificial Sequence
  Description of Artificial Sequence: Synthetic oligonucleotide
  Sense strand starting at position 3180 of SEQ ID NO: 914399
ggagacugagucugugaaa

SEQ ID NO: 1000975 - RNA, 19 nt, Artificial Sequence
  Description of Artificial Sequence: Synthetic oligonucleotide
  Antisense strand to SEQ ID NO: 1000974
uuucacagacucagucucc

SEQ ID NO: 1000976 - RNA, 19 nt, Artificial Sequence
  Description of Artificial Sequence: Synthetic oligonucleotide
  Sense strand starting at position 3357 of SEQ ID NO: 914399
gguccaucuaaauggaugu

SEQ ID NO: 1000977 - RNA, 19 nt, Artificial Sequence
  Description of Artificial Sequence: Synthetic oligonucleotide
  Antisense strand to SEQ ID NO: 1000976
acauccauuuagauggacc

SEQ ID NO: 1000978 - RNA, 19 nt, Artificial Sequence
  Description of Artificial Sequence: Synthetic oligonucleotide
  Sense strand starting at position 3383 of SEQ ID NO: 914399
acuaacgcaucaucugaaa

SEQ ID NO: 1000979 - RNA, 19 nt, Artificial Sequence
  Description of Artificial Sequence: Synthetic oligonucleotide
  Antisense strand to SEQ ID NO: 1000978
uuucagaugaugcguuagu

SEQ ID NO: 1000980 - RNA, 19 nt, Artificial Sequence
  Description of Artificial Sequence: Synthetic oligonucleotide
  Sense strand starting at position 3622 of SEQ ID NO: 914399
cugcguccugcagagagua

SEQ ID NO: 1000981 - RNA, 19 nt, Artificial Sequence
  Description of Artificial Sequence: Synthetic oligonucleotide
  Antisense strand to SEQ ID NO: 1000980
uacucucugcaggacgcag

SEQ ID NO: 1000982 - RNA, 19 nt, Artificial Sequence
  Description of Artificial Sequence: Synthetic oligonucleotide
  Sense strand starting at position 3822 of SEQ ID NO: 914399
auaguaguuccucaauuaa

SEQ ID NO: 1000983 - RNA, 19 nt, Artificial Sequence
  Description of Artificial Sequence: Synthetic oligonucleotide
  Antisense strand to SEQ ID NO: 1000982
uuaauugaggaacuacuau

SEQ ID NO: 1000984 - RNA, 19 nt, Artificial Sequence
  Description of Artificial Sequence: Synthetic oligonucleotide
  Sense strand starting at position 3832 of SEQ ID NO: 914399
cucaauuaaugugugcuua

SEQ ID NO: 1000985 - RNA, 19 nt, Artificial Sequence
  Description of Artificial Sequence: Synthetic oligonucleotide
  Antisense strand to SEQ ID NO: 1000984
uaagcacacauuaauugag

SEQ ID NO: 1000986 - RNA, 19 nt, Artificial Sequence
  Description of Artificial Sequence: Synthetic oligonucleotide
  Sense strand starting at position 3833 of SEQ ID NO: 914399
ucaauuaaugugugcuuaa

SEQ ID NO: 1000987 - RNA, 19 nt, Artificial Sequence
  Description of Artificial Sequence: Synthetic oligonucleotide
  Antisense strand to SEQ ID NO: 1000986
uuaagcacacauuaauuga

SEQ ID NO: 1000988 - RNA, 19 nt, Artificial Sequence
  Description of Artificial Sequence: Synthetic oligonucleotide
  Sense strand starting at position 3836 of SEQ ID NO: 914399
auuaaugugugcuuaauga

SEQ ID NO: 1000989 - RNA, 19 nt, Artificial Sequence
  Description of Artificial Sequence: Synthetic oligonucleotide
  Antisense strand to SEQ ID NO: 1000988
ucauuaagcacacauuaau

SEQ ID NO: 1000990 - RNA, 19 nt, Artificial Sequence
  Description of Artificial Sequence: Synthetic oligonucleotide
  Sense strand starting at position 3843 of SEQ ID NO: 914399
ugugcuuaaugagugcaua

SEQ ID NO: 1000991 - RNA, 19 nt, Artificial Sequence
  Description of Artificial Sequence: Synthetic oligonucleotide
  Antisense strand to SEQ ID NO: 1000990
uaugcacucauuaagcaca

SEQ ID NO: 1000992 - RNA, 19 nt, Artificial Sequence
  Description of Artificial Sequence: Synthetic oligonucleotide
  Sense strand starting at position 3844 of SEQ ID NO: 914399
gugcuuaaugagugcauaa

SEQ ID NO: 1000993 - RNA, 19 nt, Artificial Sequence
  Description of Artificial Sequence: Synthetic oligonucleotide
  Antisense strand to SEQ ID NO: 1000992
uuaugcacucauuaagcac

SEQ ID NO: 1000994 - RNA, 19 nt, Artificial Sequence
  Description of Artificial Sequence: Synthetic oligonucleotide
  Sense strand starting at position 3846 of SEQ ID NO: 914399
gcuuaaugagugcauaauu

SEQ ID NO: 1000995 - RNA, 19 nt, Artificial Sequence
  Description of Artificial Sequence: Synthetic oligonucleotide
  Antisense strand to SEQ ID NO: 1000994
aauuaugcacucauuaagc

SEQ ID NO: 1000996 - RNA, 19 nt, Artificial Sequence
  Description of Artificial Sequence: Synthetic oligonucleotide
  Sense strand starting at position 22 of SEQ ID NO: 914400
caaguauugugcuuagaaa

SEQ ID NO: 1000997 - RNA, 19 nt, Artificial Sequence
  Description of Artificial Sequence: Synthetic oligonucleotide
  Antisense strand to SEQ ID NO: 1000996
uuucuaagcacaauacuug

SEQ ID NO: 1000998 - RNA, 19 nt, Artificial Sequence
  Description of Artificial Sequence: Synthetic oligonucleotide
  Sense strand starting at position 23 of SEQ ID NO: 914400
aaguauugugcuuagaaac

SEQ ID NO: 1000999 - RNA, 19 nt, Artificial Sequence
  Description of Artificial Sequence: Synthetic oligonucleotide
  Antisense strand to SEQ ID NO: 1000998
guuucuaagcacaauacuu

SEQ ID NO: 1001000 - RNA, 19 nt, Artificial Sequence
  Description of Artificial Sequence: Synthetic oligonucleotide
  Sense strand starting at position 50 of SEQ ID NO: 914400
gcagcuguuagaugaguag

SEQ ID NO: 1001001 - RNA, 19 nt, Artificial Sequence
  Description of Artificial Sequence: Synthetic oligonucleotide
  Antisense strand to SEQ ID NO: 1001000
cuacucaucuaacagcugc

SEQ ID NO: 1001002 - RNA, 19 nt, Artificial Sequence
  Description of Artificial Sequence: Synthetic oligonucleotide
  Sense strand starting at position 53 of SEQ ID NO: 914400
gcuguuagaugaguaggga

SEQ ID NO: 1001003 - RNA, 19 nt, Artificial Sequence
  Description of Artificial Sequence: Synthetic oligonucleotide
  Antisense strand to SEQ ID NO: 1001002
ucccuacucaucuaacagc

SEQ ID NO: 1001004 - RNA, 19 nt, Artificial Sequence
  Description of Artificial Sequence: Synthetic oligonucleotide
  Sense strand starting at position 172 of SEQ ID NO: 914400
aggaaaucaugaguuccuu

SEQ ID NO: 1001005 - RNA, 19 nt, Artificial Sequence
  Description of Artificial Sequence: Synthetic oligonucleotide
  Antisense strand to SEQ ID NO: 1001004
aaggaacucaugauuuccu

SEQ ID NO: 1001006 - RNA, 19 nt, Artificial Sequence
  Description of Artificial Sequence: Synthetic oligonucleotide
  Sense strand starting at position 322 of SEQ ID NO: 914400
aacuguguggccugaagca

SEQ ID NO: 1001007 - RNA, 19 nt, Artificial Sequence
  Description of Artificial Sequence: Synthetic oligonucleotide
  Antisense strand to SEQ ID NO: 1001006
ugcuucaggccacacaguu

SEQ ID NO: 1001008 - RNA, 19 nt, Artificial Sequence
  Description of Artificial Sequence: Synthetic oligonucleotide
  Sense strand starting at position 707 of SEQ ID NO: 914400
cgcaucaagggucgucaau

SEQ ID NO: 1001009 - RNA, 19 nt, Artificial Sequence
  Description of Artificial Sequence: Synthetic oligonucleotide
  Antisense strand to SEQ ID NO: 1001008
auugacgacccuugaugcg

SEQ ID NO: 1001010 - RNA, 19 nt, Artificial Sequence
  Description of Artificial Sequence: Synthetic oligonucleotide
  Sense strand starting at position 719 of SEQ ID NO: 914400
cgucaaucucauuaccugu

SEQ ID NO: 1001011 - RNA, 19 nt, Artificial Sequence
  Description of Artificial Sequence: Synthetic oligonucleotide
  Antisense strand to SEQ ID NO: 1001010
acagguaaugagauugacg

SEQ ID NO: 1001012 - RNA, 19 nt, Artificial Sequence
  Description of Artificial Sequence: Synthetic oligonucleotide
  Sense strand starting at position 969 of SEQ ID NO: 914400
aacgaaugccagugaagug

SEQ ID NO: 1001013 - RNA, 19 nt, Artificial Sequence
  Description of Artificial Sequence: Synthetic oligonucleotide
  Antisense strand to SEQ ID NO: 1001012
cacuucacuggcauucguu

SEQ ID NO: 1001014 - RNA, 19 nt, Artificial Sequence
  Description of Artificial Sequence: Synthetic oligonucleotide
  Sense strand starting at position 974 of SEQ ID NO: 914400
augccagugaagugugagu

SEQ ID NO: 1001015 - RNA, 19 nt, Artificial Sequence
  Description of Artificial Sequence: Synthetic oligonucleotide
  Antisense strand to SEQ ID NO: 1001014
acucacacuucacuggcau

SEQ ID NO: 1001016 - RNA, 19 nt, Artificial Sequence
  Description of Artificial Sequence: Synthetic oligonucleotide
  Sense strand starting at position 1052 of SEQ ID NO: 914400
ggguucgcugacuaauuga

SEQ ID NO: 1001017 - RNA, 19 nt, Artificial Sequence
  Description of Artificial Sequence: Synthetic oligonucleotide
  Antisense strand to SEQ ID NO: 1001016
ucaauuagucagcgaaccc

SEQ ID NO: 1001018 - RNA, 19 nt, Artificial Sequence
  Description of Artificial Sequence: Synthetic oligonucleotide
  Sense strand starting at position 1060 of SEQ ID NO: 914400
ugacuaauugacugaguga

SEQ ID NO: 1001019 - RNA, 19 nt, Artificial Sequence
  Description of Artificial Sequence: Synthetic oligonucleotide
  Antisense strand to SEQ ID NO: 1001018
ucacucagucaauuaguca

SEQ ID NO: 1001020 - RNA, 19 nt, Artificial Sequence
  Description of Artificial Sequence: Synthetic oligonucleotide
  Sense strand starting at position 1091 of SEQ ID NO: 914400
gucagcuuccacugggauu

SEQ ID NO: 1001021 - RNA, 19 nt, Artificial Sequence
  Description of Artificial Sequence: Synthetic oligonucleotide
  Antisense strand to SEQ ID NO: 1001020
aaucccaguggaagcugac

SEQ ID NO: 1001022 - RNA, 19 nt, Artificial Sequence
  Description of Artificial Sequence: Synthetic oligonucleotide
  Sense strand starting at position 1195 of SEQ ID NO: 914400
gaccuaaguugauagaaca

SEQ ID NO: 1001023 - RNA, 19 nt, Artificial Sequence
  Description of Artificial Sequence: Synthetic oligonucleotide
  Antisense strand to SEQ ID NO: 1001022
uguucuaucaacuuagguc

SEQ ID NO: 1001024 - RNA, 19 nt, Artificial Sequence
  Description of Artificial Sequence: Synthetic oligonucleotide
  Sense strand starting at position 1291 of SEQ ID NO: 914400
ccauuaaaccuccgaguac

SEQ ID NO: 1001025 - RNA, 19 nt, Artificial Sequence
  Description of Artificial Sequence: Synthetic oligonucleotide
  Antisense strand to SEQ ID NO: 1001024
guacucggagguuuaaugg

SEQ ID NO: 1001026 - RNA, 19 nt, Artificial Sequence
  Description of Artificial Sequence: Synthetic oligonucleotide
  Sense strand starting at position 1335 of SEQ ID NO: 914400
uaagguugguaauugugaa

SEQ ID NO: 1001027 - RNA, 19 nt, Artificial Sequence
  Description of Artificial Sequence: Synthetic oligonucleotide
  Antisense strand to SEQ ID NO: 1001026
uucacaauuaccaaccuua

SEQ ID NO: 1001028 - RNA, 19 nt, Artificial Sequence
  Description of Artificial Sequence: Synthetic oligonucleotide
  Sense strand starting at position 1336 of SEQ ID NO: 914400
aagguugguaauugugaaa

SEQ ID NO: 1001029 - RNA, 19 nt, Artificial Sequence
  Description of Artificial Sequence: Synthetic oligonucleotide
  Antisense strand to SEQ ID NO: 1001028
uuucacaauuaccaaccuu

SEQ ID NO: 1001030 - RNA, 19 nt, Artificial Sequence
  Description of Artificial Sequence: Synthetic oligonucleotide
  Sense strand starting at position 1868 of SEQ ID NO: 914400
gcacgauccggccaagaga

SEQ ID NO: 1001031 - RNA, 19 nt, Artificial Sequence
  Description of Artificial Sequence: Synthetic oligonucleotide
  Antisense strand to SEQ ID NO: 1001030
ucucuuggccggaucgugc

SEQ ID NO: 1001032 - RNA, 19 nt, Artificial Sequence
  Description of Artificial Sequence: Synthetic oligonucleotide
  Sense strand starting at position 2610 of SEQ ID NO: 914400
aacuguuuaugauccgacu

SEQ ID NO: 1001033 - RNA, 19 nt, Artificial Sequence
  Description of Artificial Sequence: Synthetic oligonucleotide
  Antisense strand to SEQ ID NO: 1001032
agucggaucauaaacaguu

SEQ ID NO: 1001034 - RNA, 19 nt, Artificial Sequence
  Description of Artificial Sequence: Synthetic oligonucleotide
  Sense strand starting at position 2675 of SEQ ID NO: 914400
cagacauaguggcuggaaa

SEQ ID NO: 1001035 - RNA, 19 nt, Artificial Sequence
  Description of Artificial Sequence: Synthetic oligonucleotide
  Antisense strand to SEQ ID NO: 1001034
uuuccagccacuaugucug

SEQ ID NO: 1001036 - RNA, 19 nt, Artificial Sequence
  Description of Artificial Sequence: Synthetic oligonucleotide
  Sense strand starting at position 2726 of SEQ ID NO: 914400
gucagaaguccaggcuuga

SEQ ID NO: 1001037 - RNA, 19 nt, Artificial Sequence
  Description of Artificial Sequence: Synthetic oligonucleotide
  Antisense strand to SEQ ID NO: 1001036
ucaagccuggacuucugac

SEQ ID NO: 1001038 - RNA, 19 nt, Artificial Sequence
  Description of Artificial Sequence: Synthetic oligonucleotide
  Sense strand starting at position 2843 of SEQ ID NO: 914400
gugguucuggcagaauuca

SEQ ID NO: 1001039 - RNA, 19 nt, Artificial Sequence
  Description of Artificial Sequence: Synthetic oligonucleotide
  Antisense strand to SEQ ID NO: 1001038
ugaauucugccagaaccac

SEQ ID NO: 1001040 - RNA, 19 nt, Artificial Sequence
  Description of Artificial Sequence: Synthetic oligonucleotide
  Sense strand starting at position 3062 of SEQ ID NO: 914400
gggcuugugauugggucaa

SEQ ID NO: 1001041 - RNA, 19 nt, Artificial Sequence
  Description of Artificial Sequence: Synthetic oligonucleotide
  Antisense strand to SEQ ID NO: 1001040
uugacccaaucacaagccc

SEQ ID NO: 1001042 - RNA, 19 nt, Artificial Sequence
  Description of Artificial Sequence: Synthetic oligonucleotide
  Sense strand starting at position 3112 of SEQ ID NO: 914400
ucagcucugccauaugaca

SEQ ID NO: 1001043 - RNA, 19 nt, Artificial Sequence
  Description of Artificial Sequence: Synthetic oligonucleotide
  Antisense strand to SEQ ID NO: 1001042
ugucauauggcagagcuga

SEQ ID NO: 1001044 - RNA, 19 nt, Artificial Sequence
  Description of Artificial Sequence: Synthetic oligonucleotide
  Sense strand starting at position 3136 of SEQ ID NO: 914400
cagucaugggagugaggau

SEQ ID NO: 1001045 - RNA, 19 nt, Artificial Sequence
  Description of Artificial Sequence: Synthetic oligonucleotide
  Antisense strand to SEQ ID NO: 1001044
auccucacucccaugacug

SEQ ID NO: 1001046 - RNA, 19 nt, Artificial Sequence
  Description of Artificial Sequence: Synthetic oligonucleotide
  Sense strand starting at position 3209 of SEQ ID NO: 914400
uuggaauucugccuacuua

SEQ ID NO: 1001047 - RNA, 19 nt, Artificial Sequence
  Description of Artificial Sequence: Synthetic oligonucleotide
  Antisense strand to SEQ ID NO: 1001046
uaaguaggcagaauuccaa

SEQ ID NO: 1001048 - RNA, 19 nt, Artificial Sequence
  Description of Artificial Sequence: Synthetic oligonucleotide
  Sense strand starting at position 3210 of SEQ ID NO: 914400
uggaauucugccuacuuac

SEQ ID NO: 1001049 - RNA, 19 nt, Artificial Sequence
  Description of Artificial Sequence: Synthetic oligonucleotide
  Antisense strand to SEQ ID NO: 1001048
guaaguaggcagaauucca

SEQ ID NO: 1001050 - RNA, 19 nt, Artificial Sequence
  Description of Artificial Sequence: Synthetic oligonucleotide
  Sense strand starting at position 3274 of SEQ ID NO: 914400
guguaacaccucgaaugcu

SEQ ID NO: 1001051 - RNA, 19 nt, Artificial Sequence
  Description of Artificial Sequence: Synthetic oligonucleotide
  Antisense strand to SEQ ID NO: 1001050
agcauucgagguguuacac

SEQ ID NO: 1001052 - RNA, 19 nt, Artificial Sequence
  Description of Artificial Sequence: Synthetic oligonucleotide
  Sense strand starting at position 3283 of SEQ ID NO: 914400
cucgaaugcuuccugcuaa

SEQ ID NO: 1001053 - RNA, 19 nt, Artificial Sequence
  Description of Artificial Sequence: Synthetic oligonucleotide
  Antisense strand to SEQ ID NO: 1001052
uuagcaggaagcauucgag

SEQ ID NO: 1001054 - RNA, 19 nt, Artificial Sequence
  Description of Artificial Sequence: Synthetic oligonucleotide
  Sense strand starting at position 3359 of SEQ ID NO: 914400
uuccuaugaguacagucau

SEQ ID NO: 1001055 - RNA, 19 nt, Artificial Sequence
  Description of Artificial Sequence: Synthetic oligonucleotide
  Antisense strand to SEQ ID NO: 1001054
augacuguacucauaggaa

SEQ ID NO: 1001056 - RNA, 19 nt, Artificial Sequence
  Description of Artificial Sequence: Synthetic oligonucleotide
  Sense strand starting at position 3473 of SEQ ID NO: 914400
agcucagagagugguacau

SEQ ID NO: 1001057 - RNA, 19 nt, Artificial Sequence
  Description of Artificial Sequence: Synthetic oligonucleotide
  Antisense strand to SEQ ID NO: 1001056
auguaccacucucugagcu

SEQ ID NO: 1001058 - RNA, 19 nt, Artificial Sequence
  Description of Artificial Sequence: Synthetic oligonucleotide
  Sense strand starting at position 3475 of SEQ ID NO: 914400
cucagagagugguacauuu

SEQ ID NO: 1001059 - RNA, 19 nt, Artificial Sequence
  Description of Artificial Sequence: Synthetic oligonucleotide
  Antisense strand to SEQ ID NO: 1001058
aaauguaccacucucugag

SEQ ID NO: 1001060 - RNA, 19 nt, Artificial Sequence
  Description of Artificial Sequence: Synthetic oligonucleotide
  Sense strand starting at position 3497 of SEQ ID NO: 914400
uccagcauaucuuagaaag

SEQ ID NO: 1001061 - RNA, 19 nt, Artificial Sequence
  Description of Artificial Sequence: Synthetic oligonucleotide
  Antisense strand to SEQ ID NO: 1001060
cuuucuaagauaugcugga

SEQ ID NO: 1001062 - RNA, 19 nt, Artificial Sequence
  Description of Artificial Sequence: Synthetic oligonucleotide
  Sense strand starting at position 3515 of SEQ ID NO: 914400
guaggaaauugauaaagau

SEQ ID NO: 1001063 - RNA, 19 nt, Artificial Sequence
  Description of Artificial Sequence: Synthetic oligonucleotide
  Antisense strand to SEQ ID NO: 1001062
aucuuuaucaauuuccuac

SEQ ID NO: 1001064 - RNA, 19 nt, Artificial Sequence
  Description of Artificial Sequence: Synthetic oligonucleotide
  Sense strand starting at position 3525 of SEQ ID NO: 914400
gauaaagaugcuugugauc

SEQ ID NO: 1001065 - RNA, 19 nt, Artificial Sequence
  Description of Artificial Sequence: Synthetic oligonucleotide
  Antisense strand to SEQ ID NO: 1001064
gaucacaagcaucuuuauc

SEQ ID NO: 1001066 - RNA, 19 nt, Artificial Sequence
  Description of Artificial Sequence: Synthetic oligonucleotide
  Sense strand starting at position 3530 of SEQ ID NO: 914400
agaugcuugugaucacaga

SEQ ID NO: 1001067 - RNA, 19 nt, Artificial Sequence
  Description of Artificial Sequence: Synthetic oligonucleotide
  Antisense strand to SEQ ID NO: 1001066
ucugugaucacaagcaucu

SEQ ID NO: 1001068 - RNA, 19 nt, Artificial Sequence
  Description of Artificial Sequence: Synthetic oligonucleotide
  Sense strand starting at position 3531 of SEQ ID NO: 914400
gaugcuugugaucacagau

SEQ ID NO: 1001069 - RNA, 19 nt, Artificial Sequence
  Description of Artificial Sequence: Synthetic oligonucleotide
  Antisense strand to SEQ ID NO: 1001068
aucugugaucacaagcauc

SEQ ID NO: 1001070 - RNA, 19 nt, Artificial Sequence
  Description of Artificial Sequence: Synthetic oligonucleotide
  Sense strand starting at position 3552 of SEQ ID NO: 914400
ggagacugagucugugaaa

SEQ ID NO: 1001071 - RNA, 19 nt, Artificial Sequence
  Description of Artificial Sequence: Synthetic oligonucleotide
  Antisense strand to SEQ ID NO: 1001070
uuucacagacucagucucc

SEQ ID NO: 1001072 - RNA, 19 nt, Artificial Sequence
  Description of Artificial Sequence: Synthetic oligonucleotide
  Sense strand starting at position 3729 of SEQ ID NO: 914400
gguccaucuaaauggaugu

SEQ ID NO: 1001073 - RNA, 19 nt, Artificial Sequence
  Description of Artificial Sequence: Synthetic oligonucleotide
  Antisense strand to SEQ ID NO: 1001072
acauccauuuagauggacc

SEQ ID NO: 1001074 - RNA, 19 nt, Artificial Sequence
  Description of Artificial Sequence: Synthetic oligonucleotide
  Sense strand starting at position 3755 of SEQ ID NO: 914400
acuaacgcaucaucugaaa

SEQ ID NO: 1001075 - RNA, 19 nt, Artificial Sequence
  Description of Artificial Sequence: Synthetic oligonucleotide
  Antisense strand to SEQ ID NO: 1001074
uuucagaugaugcguuagu

SEQ ID NO: 1001076 - RNA, 19 nt, Artificial Sequence
  Description of Artificial Sequence: Synthetic oligonucleotide
  Sense strand starting at position 22 of SEQ ID NO: 914401
gcuuacugcuaaguuaaag

SEQ ID NO: 1001077 - RNA, 19 nt, Artificial Sequence
  Description of Artificial Sequence: Synthetic oligonucleotide
  Antisense strand to SEQ ID NO: 1001076
cuuuaacuuagcaguaagc

SEQ ID NO: 1001078 - RNA, 19 nt, Artificial Sequence
  Description of Artificial Sequence: Synthetic oligonucleotide
  Sense strand starting at position 118 of SEQ ID NO: 914401
uaagaucagugguuggcaa

SEQ ID NO: 1001079 - RNA, 19 nt, Artificial Sequence
  Description of Artificial Sequence: Synthetic oligonucleotide
  Antisense strand to SEQ ID NO: 1001078
uugccaaccacugaucuua

SEQ ID NO: 1001080 - RNA, 19 nt, Artificial Sequence
  Description of Artificial Sequence: Synthetic oligonucleotide
  Sense strand starting at position 381 of SEQ ID NO: 914401
auguuuauccauuguaaca

SEQ ID NO: 1001081 - RNA, 19 nt, Artificial Sequence
  Description of Artificial Sequence: Synthetic oligonucleotide
  Antisense strand to SEQ ID NO: 1001080
uguuacaauggauaaacau

SEQ ID NO: 1001082 - RNA, 19 nt, Artificial Sequence
  Description of Artificial Sequence: Synthetic oligonucleotide
  Sense strand starting at position 423 of SEQ ID NO: 914401
guaaauaauagcggaaacu

SEQ ID NO: 1001083 - RNA, 19 nt, Artificial Sequence
  Description of Artificial Sequence: Synthetic oligonucleotide
  Antisense strand to SEQ ID NO: 1001082
aguuuccgcuauuauuuac

SEQ ID NO: 1001084 - RNA, 19 nt, Artificial Sequence
  Description of Artificial Sequence: Synthetic oligonucleotide
  Sense strand starting at position 478 of SEQ ID NO: 914401
cguacuaucugcucaauuu

SEQ ID NO: 1001085 - RNA, 19 nt, Artificial Sequence
  Description of Artificial Sequence: Synthetic oligonucleotide
  Antisense strand to SEQ ID NO: 1001084
aaauugagcagauaguacg

SEQ ID NO: 1001086 - RNA, 19 nt, Artificial Sequence
  Description of Artificial Sequence: Synthetic oligonucleotide
  Sense strand starting at position 962 of SEQ ID NO: 914401
cgucucuauuaaguauaca

SEQ ID NO: 1001087 - RNA, 19 nt, Artificial Sequence
  Description of Artificial Sequence: Synthetic oligonucleotide
  Antisense strand to SEQ ID NO: 1001086
uguauacuuaauagagacg

SEQ ID NO: 1001088 - RNA, 19 nt, Artificial Sequence
  Description of Artificial Sequence: Synthetic oligonucleotide
  Sense strand starting at position 1236 of SEQ ID NO: 914401
gucuuagcucaagagccaa

SEQ ID NO: 1001089 - RNA, 19 nt, Artificial Sequence
  Description of Artificial Sequence: Synthetic oligonucleotide
  Antisense strand to SEQ ID NO: 1001088
uuggcucuugagcuaagac

SEQ ID NO: 1001090 - RNA, 19 nt, Artificial Sequence
  Description of Artificial Sequence: Synthetic oligonucleotide
  Sense strand starting at position 1269 of SEQ ID NO: 914401
uucuguuggagugggcaaa

SEQ ID NO: 1001091 - RNA, 19 nt, Artificial Sequence
  Description of Artificial Sequence: Synthetic oligonucleotide
  Antisense strand to SEQ ID NO: 1001090
uuugcccacuccaacagaa

SEQ ID NO: 1001092 - RNA, 19 nt, Artificial Sequence
  Description of Artificial Sequence: Synthetic oligonucleotide
  Sense strand starting at position 1319 of SEQ ID NO: 914401
agcuguguggccuaacuua

SEQ ID NO: 1001093 - RNA, 19 nt, Artificial Sequence
  Description of Artificial Sequence: Synthetic oligonucleotide
  Antisense strand to SEQ ID NO: 1001092
uaaguuaggccacacagcu

SEQ ID NO: 1001094 - RNA, 19 nt, Artificial Sequence
  Description of Artificial Sequence: Synthetic oligonucleotide
  Sense strand starting at position 1486 of SEQ ID NO: 914401
aauguucgcugacugauuu

SEQ ID NO: 1001095 - RNA, 19 nt, Artificial Sequence
  Description of Artificial Sequence: Synthetic oligonucleotide
  Antisense strand to SEQ ID NO: 1001094
aaaucagucagcgaacauu

SEQ ID NO: 1001096 - RNA, 19 nt, Artificial Sequence
  Description of Artificial Sequence: Synthetic oligonucleotide
  Sense strand starting at position 1521 of SEQ ID NO: 914401
agguuauucuuacuccacu

SEQ ID NO: 1001097 - RNA, 19 nt, Artificial Sequence
  Description of Artificial Sequence: Synthetic oligonucleotide
  Antisense strand to SEQ ID NO: 1001096
aguggaguaagaauaaccu

SEQ ID NO: 1001098 - RNA, 19 nt, Artificial Sequence
  Description of Artificial Sequence: Synthetic oligonucleotide
  Sense strand starting at position 1522 of SEQ ID NO: 914401
gguuauucuuacuccacua

SEQ ID NO: 1001099 - RNA, 19 nt, Artificial Sequence
  Description of Artificial Sequence: Synthetic oligonucleotide
  Antisense strand to SEQ ID NO: 1001098
uaguggaguaagaauaacc

SEQ ID NO: 1001100 - RNA, 19 nt, Artificial Sequence
  Description of Artificial Sequence: Synthetic oligonucleotide
  Sense strand starting at position 2011 of SEQ ID NO: 914401
acagucuccgugucgcaaa

SEQ ID NO: 1001101 - RNA, 19 nt, Artificial Sequence
  Description of Artificial Sequence: Synthetic oligonucleotide
  Antisense strand to SEQ ID NO: 1001100
uuugcgacacggagacugu

SEQ ID NO: 1001102 - RNA, 19 nt, Artificial Sequence
  Description of Artificial Sequence: Synthetic oligonucleotide
  Sense strand starting at position 2088 of SEQ ID NO: 914401
ggacucccauucuugaaga

SEQ ID NO: 1001103 - RNA, 19 nt, Artificial Sequence
  Description of Artificial Sequence: Synthetic oligonucleotide
  Antisense strand to SEQ ID NO: 1001102
ucuucaagaaugggagucc

SEQ ID NO: 1001104 - RNA, 19 nt, Artificial Sequence
  Description of Artificial Sequence: Synthetic oligonucleotide
  Sense strand starting at position 2116 of SEQ ID NO: 914401
agaggaaucugagaugaag

SEQ ID NO: 1001105 - RNA, 19 nt, Artificial Sequence
  Description of Artificial Sequence: Synthetic oligonucleotide
  Antisense strand to SEQ ID NO: 1001104
cuucaucucagauuccucu

SEQ ID NO: 1001106 - RNA, 19 nt, Artificial Sequence
  Description of Artificial Sequence: Synthetic oligonucleotide
  Sense strand starting at position 2156 of SEQ ID NO: 914401
uuucccagugucgaagaau

SEQ ID NO: 1001107 - RNA, 19 nt, Artificial Sequence
  Description of Artificial Sequence: Synthetic oligonucleotide
  Antisense strand to SEQ ID NO: 1001106
auucuucgacacugggaaa

SEQ ID NO: 1001108 - RNA, 19 nt, Artificial Sequence
  Description of Artificial Sequence: Synthetic oligonucleotide
  Sense strand starting at position 2159 of SEQ ID NO: 914401
cccagugucgaagaauuac

SEQ ID NO: 1001109 - RNA, 19 nt, Artificial Sequence
  Description of Artificial Sequence: Synthetic oligonucleotide
  Antisense strand to SEQ ID NO: 1001108
guaauucuucgacacuggg

SEQ ID NO: 1001110 - RNA, 19 nt, Artificial Sequence
  Description of Artificial Sequence: Synthetic oligonucleotide
  Sense strand starting at position 2236 of SEQ ID NO: 914401
uguuuauccuaacucagua

SEQ ID NO: 1001111 - RNA, 19 nt, Artificial Sequence
  Description of Artificial Sequence: Synthetic oligonucleotide
  Antisense strand to SEQ ID NO: 1001110
uacugaguuaggauaaaca

SEQ ID NO: 1001112 - RNA, 19 nt, Artificial Sequence
  Description of Artificial Sequence: Synthetic oligonucleotide
  Sense strand starting at position 2286 of SEQ ID NO: 914401
uuaguaucccauuagcuau

SEQ ID NO: 1001113 - RNA, 19 nt, Artificial Sequence
  Description of Artificial Sequence: Synthetic oligonucleotide
  Antisense strand to SEQ ID NO: 1001112
auagcuaaugggauacuaa

SEQ ID NO: 1001114 - RNA, 19 nt, Artificial Sequence
  Description of Artificial Sequence: Synthetic oligonucleotide
  Sense strand starting at position 2338 of SEQ ID NO: 914401
cuacaaagugcuuacguau

SEQ ID NO: 1001115 - RNA, 19 nt, Artificial Sequence
  Description of Artificial Sequence: Synthetic oligonucleotide
  Antisense strand to SEQ ID NO: 1001114
auacguaagcacuuuguag

SEQ ID NO: 1001116 - RNA, 19 nt, Artificial Sequence
  Description of Artificial Sequence: Synthetic oligonucleotide
  Sense strand starting at position 2357 of SEQ ID NO: 914401
gcauauacccuggaugcuu

SEQ ID NO: 1001117 - RNA, 19 nt, Artificial Sequence
  Description of Artificial Sequence: Synthetic oligonucleotide
  Antisense strand to SEQ ID NO: 1001116
aagcauccaggguauaugc

SEQ ID NO: 1001118 - RNA, 19 nt, Artificial Sequence
  Description of Artificial Sequence: Synthetic oligonucleotide
  Sense strand starting at position 2372 of SEQ ID NO: 914401
gcuucuagaggucagagau

SEQ ID NO: 1001119 - RNA, 19 nt, Artificial Sequence
  Description of Artificial Sequence: Synthetic oligonucleotide
  Antisense strand to SEQ ID NO: 1001118
aucucugaccucuagaagc

SEQ ID NO: 1001120 - RNA, 19 nt, Artificial Sequence
  Description of Artificial Sequence: Synthetic oligonucleotide
  Sense strand starting at position 2380 of SEQ ID NO: 914401
aggucagagaugugucuuu

SEQ ID NO: 1001121 - RNA, 19 nt, Artificial Sequence
  Description of Artificial Sequence: Synthetic oligonucleotide
  Antisense strand to SEQ ID NO: 1001120
aaagacacaucucugaccu

SEQ ID NO: 1001122 - RNA, 19 nt, Artificial Sequence
  Description of Artificial Sequence: Synthetic oligonucleotide
  Sense strand starting at position 2853 of SEQ ID NO: 914401
agacauugcucuucuugag

SEQ ID NO: 1001123 - RNA, 19 nt, Artificial Sequence
  Description of Artificial Sequence: Synthetic oligonucleotide
  Antisense strand to SEQ ID NO: 1001122
cucaagaagagcaaugucu

SEQ ID NO: 1001124 - RNA, 19 nt, Artificial Sequence
  Description of Artificial Sequence: Synthetic oligonucleotide
  Sense strand starting at position 3011 of SEQ ID NO: 914401
aggucagagaucuguagca

SEQ ID NO: 1001125 - RNA, 19 nt, Artificial Sequence
  Description of Artificial Sequence: Synthetic oligonucleotide
  Antisense strand to SEQ ID NO: 1001124
ugcuacagaucucugaccu

SEQ ID NO: 1001126 - RNA, 19 nt, Artificial Sequence
  Description of Artificial Sequence: Synthetic oligonucleotide
  Sense strand starting at position 3013 of SEQ ID NO: 914401
gucagagaucuguagcacu

SEQ ID NO: 1001127 - RNA, 19 nt, Artificial Sequence
  Description of Artificial Sequence: Synthetic oligonucleotide
  Antisense strand to SEQ ID NO: 1001126
agugcuacagaucucugac

SEQ ID NO: 1001128 - RNA, 19 nt, Artificial Sequence
  Description of Artificial Sequence: Synthetic oligonucleotide
  Sense strand starting at position 3099 of SEQ ID NO: 914401
caaggugagguuugugaaa

SEQ ID NO: 1001129 - RNA, 19 nt, Artificial Sequence
  Description of Artificial Sequence: Synthetic oligonucleotide
  Antisense strand to SEQ ID NO: 1001128
uuucacaaaccucaccuug

SEQ ID NO: 1001130 - RNA, 19 nt, Artificial Sequence
  Description of Artificial Sequence: Synthetic oligonucleotide
  Sense strand starting at position 3199 of SEQ ID NO: 914401
agaggagguucuucucuuu

SEQ ID NO: 1001131 - RNA, 19 nt, Artificial Sequence
  Description of Artificial Sequence: Synthetic oligonucleotide
  Antisense strand to SEQ ID NO: 1001130
aaagagaagaaccuccucu

SEQ ID NO: 1001132 - RNA, 19 nt, Artificial Sequence
  Description of Artificial Sequence: Synthetic oligonucleotide
  Sense strand starting at position 3221 of SEQ ID NO: 914401
uuccgaguggccuauucuu

SEQ ID NO: 1001133 - RNA, 19 nt, Artificial Sequence
  Description of Artificial Sequence: Synthetic oligonucleotide
  Antisense strand to SEQ ID NO: 1001132
aagaauaggccacucggaa

SEQ ID NO: 1001134 - RNA, 19 nt, Artificial Sequence
  Description of Artificial Sequence: Synthetic oligonucleotide
  Sense strand starting at position 3324 of SEQ ID NO: 914401
gagucacucuaaguuugga

SEQ ID NO: 1001135 - RNA, 19 nt, Artificial Sequence
  Description of Artificial Sequence: Synthetic oligonucleotide
  Antisense strand to SEQ ID NO: 1001134
uccaaacuuagagugacuc

SEQ ID NO: 1001136 - RNA, 19 nt, Artificial Sequence
  Description of Artificial Sequence: Synthetic oligonucleotide
  Sense strand starting at position 3337 of SEQ ID NO: 914401
uuuggauguggugagguua

SEQ ID NO: 1001137 - RNA, 19 nt, Artificial Sequence
  Description of Artificial Sequence: Synthetic oligonucleotide
  Antisense strand to SEQ ID NO: 1001136
uaaccucaccacauccaaa

SEQ ID NO: 1001138 - RNA, 19 nt, Artificial Sequence
  Description of Artificial Sequence: Synthetic oligonucleotide
  Sense strand starting at position 3413 of SEQ ID NO: 914401
ugguauuuggugugaaguc

SEQ ID NO: 1001139 - RNA, 19 nt, Artificial Sequence
  Description of Artificial Sequence: Synthetic oligonucleotide
  Antisense strand to SEQ ID NO: 1001138
gacuucacaccaaauacca

SEQ ID NO: 1001140 - RNA, 19 nt, Artificial Sequence
  Description of Artificial Sequence: Synthetic oligonucleotide
  Sense strand starting at position 3420 of SEQ ID NO: 914401
uggugugaaguccagcaaa

SEQ ID NO: 1001141 - RNA, 19 nt, Artificial Sequence
  Description of Artificial Sequence: Synthetic oligonucleotide
  Antisense strand to SEQ ID NO: 1001140
uuugcuggacuucacacca

SEQ ID NO: 1001142 - RNA, 19 nt, Artificial Sequence
  Description of Artificial Sequence: Synthetic oligonucleotide
  Sense strand starting at position 3423 of SEQ ID NO: 914401
ugugaaguccagcaaaucu

SEQ ID NO: 1001143 - RNA, 19 nt, Artificial Sequence
  Description of Artificial Sequence: Synthetic oligonucleotide
  Antisense strand to SEQ ID NO: 1001142
agauuugcuggacuucaca

SEQ ID NO: 1001144 - RNA, 19 nt, Artificial Sequence
  Description of Artificial Sequence: Synthetic oligonucleotide
  Sense strand starting at position 3475 of SEQ ID NO: 914401
cccaucuagcuugagguua

SEQ ID NO: 1001145 - RNA, 19 nt, Artificial Sequence
  Description of Artificial Sequence: Synthetic oligonucleotide
  Antisense strand to SEQ ID NO: 1001144
uaaccucaagcuagauggg

SEQ ID NO: 1001146 - RNA, 19 nt, Artificial Sequence
  Description of Artificial Sequence: Synthetic oligonucleotide
  Sense strand starting at position 3487 of SEQ ID NO: 914401
gagguuaugggagguucau

SEQ ID NO: 1001147 - RNA, 19 nt, Artificial Sequence
  Description of Artificial Sequence: Synthetic oligonucleotide
  Antisense strand to SEQ ID NO: 1001146
augaaccucccauaaccuc

SEQ ID NO: 1001148 - RNA, 19 nt, Artificial Sequence
  Description of Artificial Sequence: Synthetic oligonucleotide
  Sense strand starting at position 3502 of SEQ ID NO: 914401
ucauauguuccauaacugu

SEQ ID NO: 1001149 - RNA, 19 nt, Artificial Sequence
  Description of Artificial Sequence: Synthetic oligonucleotide
  Antisense strand to SEQ ID NO: 1001148
acaguuauggaacauauga

SEQ ID NO: 1001150 - RNA, 19 nt, Artificial Sequence
  Description of Artificial Sequence: Synthetic oligonucleotide
  Sense strand starting at position 3595 of SEQ ID NO: 914401
acuuguagcuauuugcaaa

SEQ ID NO: 1001151 - RNA, 19 nt, Artificial Sequence
  Description of Artificial Sequence: Synthetic oligonucleotide
  Antisense strand to SEQ ID NO: 1001150
uuugcaaauagcuacaagu

SEQ ID NO: 1001152 - RNA, 19 nt, Artificial Sequence
  Description of Artificial Sequence: Synthetic oligonucleotide
  Sense strand starting at position 3963 of SEQ ID NO: 914401
cagugacuugucuagugac

SEQ ID NO: 1001153 - RNA, 19 nt, Artificial Sequence
  Description of Artificial Sequence: Synthetic oligonucleotide
  Antisense strand to SEQ ID NO: 1001152
gucacuagacaagucacug

SEQ ID NO: 1001154 - RNA, 19 nt, Artificial Sequence
  Description of Artificial Sequence: Synthetic oligonucleotide
  Sense strand starting at position 3975 of SEQ ID NO: 914401
uagugacuugucuagcauc

SEQ ID NO: 1001155 - RNA, 19 nt, Artificial Sequence
  Description of Artificial Sequence: Synthetic oligonucleotide
  Antisense strand to SEQ ID NO: 1001154
gaugcuagacaagucacua

SEQ ID NO: 1001156 - RNA, 19 nt, Artificial Sequence
  Description of Artificial Sequence: Synthetic oligonucleotide
  Sense strand starting at position 3 of SEQ ID NO: 914402
gggacuuauuaccuauggu

SEQ ID NO: 1001157 - RNA, 19 nt, Artificial Sequence
  Description of Artificial Sequence: Synthetic oligonucleotide
  Antisense strand to SEQ ID NO: 1001156
accauagguaauaaguccc

SEQ ID NO: 1001158 - RNA, 19 nt, Artificial Sequence
  Description of Artificial Sequence: Synthetic oligonucleotide
  Sense strand starting at position 17 of SEQ ID NO: 914402
auggucacauaguaaauaa

SEQ ID NO: 1001159 - RNA, 19 nt, Artificial Sequence
  Description of Artificial Sequence: Synthetic oligonucleotide
  Antisense strand to SEQ ID NO: 1001158
uuauuuacuaugugaccau

SEQ ID NO: 1001160 - RNA, 19 nt, Artificial Sequence
  Description of Artificial Sequence: Synthetic oligonucleotide
  Sense strand starting at position 27 of SEQ ID NO: 914402
aguaaauaagugugaaagu

SEQ ID NO: 1001161 - RNA, 19 nt, Artificial Sequence
  Description of Artificial Sequence: Synthetic oligonucleotide
  Antisense strand to SEQ ID NO: 1001160
acuuucacacuuauuuacu

SEQ ID NO: 1001162 - RNA, 19 nt, Artificial Sequence
  Description of Artificial Sequence: Synthetic oligonucleotide
  Sense strand starting at position 51 of SEQ ID NO: 914402
ucagauauuccauggauau

SEQ ID NO: 1001163 - RNA, 19 nt, Artificial Sequence
  Description of Artificial Sequence: Synthetic oligonucleotide
  Antisense strand to SEQ ID NO: 1001162
auauccauggaauaucuga

SEQ ID NO: 1001164 - RNA, 19 nt, Artificial Sequence
  Description of Artificial Sequence: Synthetic oligonucleotide
  Sense strand starting at position 433 of SEQ ID NO: 914402
gugccuuagcuucucaagu

SEQ ID NO: 1001165 - RNA, 19 nt, Artificial Sequence
  Description of Artificial Sequence: Synthetic oligonucleotide
  Antisense strand to SEQ ID NO: 1001164
acuugagaagcuaaggcac

SEQ ID NO: 1001166 - RNA, 19 nt, Artificial Sequence
  Description of Artificial Sequence: Synthetic oligonucleotide
  Sense strand starting at position 996 of SEQ ID NO: 914402
aguugacuugcuugaucua

SEQ ID NO: 1001167 - RNA, 19 nt, Artificial Sequence
  Description of Artificial Sequence: Synthetic oligonucleotide
  Antisense strand to SEQ ID NO: 1001166
uagaucaagcaagucaacu

SEQ ID NO: 1001168 - RNA, 19 nt, Artificial Sequence
  Description of Artificial Sequence: Synthetic oligonucleotide
  Sense strand starting at position 997 of SEQ ID NO: 914402
guugacuugcuugaucuaa

SEQ ID NO: 1001169 - RNA, 19 nt, Artificial Sequence
  Description of Artificial Sequence: Synthetic oligonucleotide
  Antisense strand to SEQ ID NO: 1001168
uuagaucaagcaagucaac

SEQ ID NO: 1001170 - RNA, 19 nt, Artificial Sequence
  Description of Artificial Sequence: Synthetic oligonucleotide
  Sense strand starting at position 999 of SEQ ID NO: 914402
ugacuugcuugaucuaaga

SEQ ID NO: 1001171 - RNA, 19 nt, Artificial Sequence
  Description of Artificial Sequence: Synthetic oligonucleotide
  Antisense strand to SEQ ID NO: 1001170
ucuuagaucaagcaaguca

SEQ ID NO: 1001172 - RNA, 19 nt, Artificial Sequence
  Description of Artificial Sequence: Synthetic oligonucleotide
  Sense strand starting at position 1071 of SEQ ID NO: 914402
guuggaaucuugguuuacu

SEQ ID NO: 1001173 - RNA, 19 nt, Artificial Sequence
  Description of Artificial Sequence: Synthetic oligonucleotide
  Antisense strand to SEQ ID NO: 1001172
aguaaaccaagauuccaac

SEQ ID NO: 1001174 - RNA, 19 nt, Artificial Sequence
  Description of Artificial Sequence: Synthetic oligonucleotide
  Sense strand starting at position 1110 of SEQ ID NO: 914402
uuaggcaaguuaguuaauu

SEQ ID NO: 1001175 - RNA, 19 nt, Artificial Sequence
  Description of Artificial Sequence: Synthetic oligonucleotide
  Antisense strand to SEQ ID NO: 1001174
aauuaacuaacuugccuaa

SEQ ID NO: 1001176 - RNA, 19 nt, Artificial Sequence
  Description of Artificial Sequence: Synthetic oligonucleotide
  Sense strand starting at position 1143 of SEQ ID NO: 914402
uuucucagcugacuguaaa

SEQ ID NO: 1001177 - RNA, 19 nt, Artificial Sequence
  Description of Artificial Sequence: Synthetic oligonucleotide
  Antisense strand to SEQ ID NO: 1001176
uuuacagucagcugagaaa

SEQ ID NO: 1001178 - RNA, 19 nt, Artificial Sequence
  Description of Artificial Sequence: Synthetic oligonucleotide
  Sense strand starting at position 1725 of SEQ ID NO: 914402
ugcucugguguuggaacaa

SEQ ID NO: 1001179 - RNA, 19 nt, Artificial Sequence
  Description of Artificial Sequence: Synthetic oligonucleotide
  Antisense strand to SEQ ID NO: 1001178
uuguuccaacaccagagca

SEQ ID NO: 1001180 - RNA, 19 nt, Artificial Sequence
  Description of Artificial Sequence: Synthetic oligonucleotide
  Sense strand starting at position 2216 of SEQ ID NO: 914402
gcucuugguuuccuuacga

SEQ ID NO: 1001181 - RNA, 19 nt, Artificial Sequence
  Description of Artificial Sequence: Synthetic oligonucleotide
  Antisense strand to SEQ ID NO: 1001180
ucguaaggaaaccaagagc

SEQ ID NO: 1001182 - RNA, 19 nt, Artificial Sequence
  Description of Artificial Sequence: Synthetic oligonucleotide
  Sense strand starting at position 2231 of SEQ ID NO: 914402
acgaaaugcuucuccauua

SEQ ID NO: 1001183 - RNA, 19 nt, Artificial Sequence
  Description of Artificial Sequence: Synthetic oligonucleotide
  Antisense strand to SEQ ID NO: 1001182
uaauggagaagcauuucgu

SEQ ID NO: 1001184 - RNA, 19 nt, Artificial Sequence
  Description of Artificial Sequence: Synthetic oligonucleotide
  Sense strand starting at position 2232 of SEQ ID NO: 914402
cgaaaugcuucuccauuac

SEQ ID NO: 1001185 - RNA, 19 nt, Artificial Sequence
  Description of Artificial Sequence: Synthetic oligonucleotide
  Antisense strand to SEQ ID NO: 1001184
guaauggagaagcauuucg

SEQ ID NO: 1001186 - RNA, 19 nt, Artificial Sequence
  Description of Artificial Sequence: Synthetic oligonucleotide
  Sense strand starting at position 2279 of SEQ ID NO: 914402
auaauagaugagugccuaa

SEQ ID NO: 1001187 - RNA, 19 nt, Artificial Sequence
  Description of Artificial Sequence: Synthetic oligonucleotide
  Antisense strand to SEQ ID NO: 1001186
uuaggcacucaucuauuau

SEQ ID NO: 1001188 - RNA, 19 nt, Artificial Sequence
  Description of Artificial Sequence: Synthetic oligonucleotide
  Sense strand starting at position 2282 of SEQ ID NO: 914402
auagaugagugccuaaugu

SEQ ID NO: 1001189 - RNA, 19 nt, Artificial Sequence
  Description of Artificial Sequence: Synthetic oligonucleotide
  Antisense strand to SEQ ID NO: 1001188
acauuaggcacucaucuau

SEQ ID NO: 1001190 - RNA, 19 nt, Artificial Sequence
  Description of Artificial Sequence: Synthetic oligonucleotide
  Sense strand starting at position 2354 of SEQ ID NO: 914402
ugguaccaguuucuuauua

SEQ ID NO: 1001191 - RNA, 19 nt, Artificial Sequence
  Description of Artificial Sequence: Synthetic oligonucleotide
  Antisense strand to SEQ ID NO: 1001190
uaauaagaaacugguacca

SEQ ID NO: 1001192 - RNA, 19 nt, Artificial Sequence
  Description of Artificial Sequence: Synthetic oligonucleotide
  Sense strand starting at position 2355 of SEQ ID NO: 914402
gguaccaguuucuuauuau

SEQ ID NO: 1001193 - RNA, 19 nt, Artificial Sequence
  Description of Artificial Sequence: Synthetic oligonucleotide
  Antisense strand to SEQ ID NO: 1001192
auaauaagaaacugguacc

SEQ ID NO: 1001194 - RNA, 19 nt, Artificial Sequence
  Description of Artificial Sequence: Synthetic oligonucleotide
  Sense strand starting at position 2381 of SEQ ID NO: 914402
cagaaucuggguugggaua

SEQ ID NO: 1001195 - RNA, 19 nt, Artificial Sequence
  Description of Artificial Sequence: Synthetic oligonucleotide
  Antisense strand to SEQ ID NO: 1001194
uaucccaacccagauucug

SEQ ID NO: 1001196 - RNA, 19 nt, Artificial Sequence
  Description of Artificial Sequence: Synthetic oligonucleotide
  Sense strand starting at position 2428 of SEQ ID NO: 914402
ggaaauggguuccucauau

SEQ ID NO: 1001197 - RNA, 19 nt, Artificial Sequence
  Description of Artificial Sequence: Synthetic oligonucleotide
  Antisense strand to SEQ ID NO: 1001196
auaugaggaacccauuucc

SEQ ID NO: 1001198 - RNA, 19 nt, Artificial Sequence
  Description of Artificial Sequence: Synthetic oligonucleotide
  Sense strand starting at position 2462 of SEQ ID NO: 914402
uugaaaucgaugugggcaa

SEQ ID NO: 1001199 - RNA, 19 nt, Artificial Sequence
  Description of Artificial Sequence: Synthetic oligonucleotide
  Antisense strand to SEQ ID NO: 1001198
uugcccacaucgauuucaa

SEQ ID NO: 1001200 - RNA, 19 nt, Artificial Sequence
  Description of Artificial Sequence: Synthetic oligonucleotide
  Sense strand starting at position 2464 of SEQ ID NO: 914402
gaaaucgaugugggcaaau

SEQ ID NO: 1001201 - RNA, 19 nt, Artificial Sequence
  Description of Artificial Sequence: Synthetic oligonucleotide
  Antisense strand to SEQ ID NO: 1001200
auuugcccacaucgauuuc

SEQ ID NO: 1001202 - RNA, 19 nt, Artificial Sequence
  Description of Artificial Sequence: Synthetic oligonucleotide
  Sense strand starting at position 2466 of SEQ ID NO: 914402
aaucgaugugggcaaauca

SEQ ID NO: 1001203 - RNA, 19 nt, Artificial Sequence
  Description of Artificial Sequence: Synthetic oligonucleotide
  Antisense strand to SEQ ID NO: 1001202
ugauuugcccacaucgauu

SEQ ID NO: 1001204 - RNA, 19 nt, Artificial Sequence
  Description of Artificial Sequence: Synthetic oligonucleotide
  Sense strand starting at position 2491 of SEQ ID NO: 914402
cuuuauagggccuaaguuu

SEQ ID NO: 1001205 - RNA, 19 nt, Artificial Sequence
  Description of Artificial Sequence: Synthetic oligonucleotide
  Antisense strand to SEQ ID NO: 1001204
aaacuuaggcccuauaaag

SEQ ID NO: 1001206 - RNA, 19 nt, Artificial Sequence
  Description of Artificial Sequence: Synthetic oligonucleotide
  Sense strand starting at position 2505 of SEQ ID NO: 914402
aguuucuagggcugugaaa

SEQ ID NO: 1001207 - RNA, 19 nt, Artificial Sequence
  Description of Artificial Sequence: Synthetic oligonucleotide
  Antisense strand to SEQ ID NO: 1001206
uuucacagcccuagaaacu

SEQ ID NO: 1001208 - RNA, 19 nt, Artificial Sequence
  Description of Artificial Sequence: Synthetic oligonucleotide
  Sense strand starting at position 2507 of SEQ ID NO: 914402
uuucuagggcugugaaaug

SEQ ID NO: 1001209 - RNA, 19 nt, Artificial Sequence
  Description of Artificial Sequence: Synthetic oligonucleotide
  Antisense strand to SEQ ID NO: 1001208
cauuucacagcccuagaaa

SEQ ID NO: 1001210 - RNA, 19 nt, Artificial Sequence
  Description of Artificial Sequence: Synthetic oligonucleotide
  Sense strand starting at position 2561 of SEQ ID NO: 914402
aucagaugauucuaugauc

SEQ ID NO: 1001211 - RNA, 19 nt, Artificial Sequence
  Description of Artificial Sequence: Synthetic oligonucleotide
  Antisense strand to SEQ ID NO: 1001210
gaucauagaaucaucugau

SEQ ID NO: 1001212 - RNA, 19 nt, Artificial Sequence
  Description of Artificial Sequence: Synthetic oligonucleotide
  Sense strand starting at position 2564 of SEQ ID NO: 914402
agaugauucuaugaucagg

SEQ ID NO: 1001213 - RNA, 19 nt, Artificial Sequence
  Description of Artificial Sequence: Synthetic oligonucleotide
  Antisense strand to SEQ ID NO: 1001212
ccugaucauagaaucaucu

SEQ ID NO: 1001214 - RNA, 19 nt, Artificial Sequence
  Description of Artificial Sequence: Synthetic oligonucleotide
  Sense strand starting at position 2724 of SEQ ID NO: 914402
cuacgagaaucugugaaac

SEQ ID NO: 1001215 - RNA, 19 nt, Artificial Sequence
  Description of Artificial Sequence: Synthetic oligonucleotide
  Antisense strand to SEQ ID NO: 1001214
guuucacagauucucguag

SEQ ID NO: 1001216 - RNA, 19 nt, Artificial Sequence
  Description of Artificial Sequence: Synthetic oligonucleotide
  Sense strand starting at position 2797 of SEQ ID NO: 914402
ccugguuauuguccuuuaa

SEQ ID NO: 1001217 - RNA, 19 nt, Artificial Sequence
  Description of Artificial Sequence: Synthetic oligonucleotide
  Antisense strand to SEQ ID NO: 1001216
uuaaaggacaauaaccagg

SEQ ID NO: 1001218 - RNA, 19 nt, Artificial Sequence
  Description of Artificial Sequence: Synthetic oligonucleotide
  Sense strand starting at position 2799 of SEQ ID NO: 914402
ugguuauuguccuuuaagu

SEQ ID NO: 1001219 - RNA, 19 nt, Artificial Sequence
  Description of Artificial Sequence: Synthetic oligonucleotide
  Antisense strand to SEQ ID NO: 1001218
acuuaaaggacaauaacca

SEQ ID NO: 1001220 - RNA, 19 nt, Artificial Sequence
  Description of Artificial Sequence: Synthetic oligonucleotide
  Sense strand starting at position 2903 of SEQ ID NO: 914402
gagugacaaucuuacagga

SEQ ID NO: 1001221 - RNA, 19 nt, Artificial Sequence
  Description of Artificial Sequence: Synthetic oligonucleotide
  Antisense strand to SEQ ID NO: 1001220
uccuguaagauugucacuc

SEQ ID NO: 1001222 - RNA, 19 nt, Artificial Sequence
  Description of Artificial Sequence: Synthetic oligonucleotide
  Sense strand starting at position 2905 of SEQ ID NO: 914402
gugacaaucuuacaggauu

SEQ ID NO: 1001223 - RNA, 19 nt, Artificial Sequence
  Description of Artificial Sequence: Synthetic oligonucleotide
  Antisense strand to SEQ ID NO: 1001222
aauccuguaagauugucac

SEQ ID NO: 1001224 - RNA, 19 nt, Artificial Sequence
  Description of Artificial Sequence: Synthetic oligonucleotide
  Sense strand starting at position 2971 of SEQ ID NO: 914402
cucaguaagaguuaggcau

SEQ ID NO: 1001225 - RNA, 19 nt, Artificial Sequence
  Description of Artificial Sequence: Synthetic oligonucleotide
  Antisense strand to SEQ ID NO: 1001224
augccuaacucuuacugag

SEQ ID NO: 1001226 - RNA, 19 nt, Artificial Sequence
  Description of Artificial Sequence: Synthetic oligonucleotide
  Sense strand starting at position 2975 of SEQ ID NO: 914402
guaagaguuaggcauuguu

SEQ ID NO: 1001227 - RNA, 19 nt, Artificial Sequence
  Description of Artificial Sequence: Synthetic oligonucleotide
  Antisense strand to SEQ ID NO: 1001226
aacaaugccuaacucuuac

SEQ ID NO: 1001228 - RNA, 19 nt, Artificial Sequence
  Description of Artificial Sequence: Synthetic oligonucleotide
  Sense strand starting at position 2978 of SEQ ID NO: 914402
agaguuaggcauuguuguu

SEQ ID NO: 1001229 - RNA, 19 nt, Artificial Sequence
  Description of Artificial Sequence: Synthetic oligonucleotide
  Antisense strand to SEQ ID NO: 1001228
aacaacaaugccuaacucu

SEQ ID NO: 1001230 - RNA, 19 nt, Artificial Sequence
  Description of Artificial Sequence: Synthetic oligonucleotide
  Sense strand starting at position 2983 of SEQ ID NO: 914402
uaggcauuguuguuauuau

SEQ ID NO: 1001231 - RNA, 19 nt, Artificial Sequence
  Description of Artificial Sequence: Synthetic oligonucleotide
  Antisense strand to SEQ ID NO: 1001230
auaauaacaacaaugccua

SEQ ID NO: 1001232 - RNA, 19 nt, Artificial Sequence
  Description of Artificial Sequence: Synthetic oligonucleotide
  Sense strand starting at position 3249 of SEQ ID NO: 914402
ggucuuguuauguggacca

SEQ ID NO: 1001233 - RNA, 19 nt, Artificial Sequence
  Description of Artificial Sequence: Synthetic oligonucleotide
  Antisense strand to SEQ ID NO: 1001232
ugguccacauaacaagacc

SEQ ID NO: 1001234 - RNA, 19 nt, Artificial Sequence
  Description of Artificial Sequence: Synthetic oligonucleotide
  Sense strand starting at position 3915 of SEQ ID NO: 914402
aggguugagcaagaaaguu

SEQ ID NO: 1001235 - RNA, 19 nt, Artificial Sequence
  Description of Artificial Sequence: Synthetic oligonucleotide
  Antisense strand to SEQ ID NO: 1001234
aacuuucuugcucaacccu

SEQ ID NO: 1001236 - RNA, 19 nt, Artificial Sequence
  Description of Artificial Sequence: Synthetic oligonucleotide
  Sense strand starting at position 237 of SEQ ID NO: 914403
cagacuucucuguagcaga

SEQ ID NO: 1001237 - RNA, 19 nt, Artificial Sequence
  Description of Artificial Sequence: Synthetic oligonucleotide
  Antisense strand to SEQ ID NO: 1001236
ucugcuacagagaagucug

SEQ ID NO: 1001238 - RNA, 19 nt, Artificial Sequence
  Description of Artificial Sequence: Synthetic oligonucleotide
  Sense strand starting at position 278 of SEQ ID NO: 914403
aagagagguggugguuuaa

SEQ ID NO: 1001239 - RNA, 19 nt, Artificial Sequence
  Description of Artificial Sequence: Synthetic oligonucleotide
  Antisense strand to SEQ ID NO: 1001238
uuaaaccaccaccucucuu

SEQ ID NO: 1001240 - RNA, 19 nt, Artificial Sequence
  Description of Artificial Sequence: Synthetic oligonucleotide
  Sense strand starting at position 679 of SEQ ID NO: 914403
uuugaaauaugucucagga

SEQ ID NO: 1001241 - RNA, 19 nt, Artificial Sequence
  Description of Artificial Sequence: Synthetic oligonucleotide
  Antisense strand to SEQ ID NO: 1001240
uccugagacauauuucaaa

SEQ ID NO: 1001242 - RNA, 19 nt, Artificial Sequence
  Description of Artificial Sequence: Synthetic oligonucleotide
  Sense strand starting at position 740 of SEQ ID NO: 914403
agcauacaugcuggaagaa

SEQ ID NO: 1001243 - RNA, 19 nt, Artificial Sequence
  Description of Artificial Sequence: Synthetic oligonucleotide
  Antisense strand to SEQ ID NO: 1001242
uucuuccagcauguaugcu

SEQ ID NO: 1001244 - RNA, 19 nt, Artificial Sequence
  Description of Artificial Sequence: Synthetic oligonucleotide
  Sense strand starting at position 857 of SEQ ID NO: 914403
ccaacagaugccugacauu

SEQ ID NO: 1001245 - RNA, 19 nt, Artificial Sequence
  Description of Artificial Sequence: Synthetic oligonucleotide
  Antisense strand to SEQ ID NO: 1001244
aaugucaggcaucuguugg

SEQ ID NO: 1001246 - RNA, 19 nt, Artificial Sequence
  Description of Artificial Sequence: Synthetic oligonucleotide
  Sense strand starting at position 894 of SEQ ID NO: 914403
uugauagaauagguguuua

SEQ ID NO: 1001247 - RNA, 19 nt, Artificial Sequence
  Description of Artificial Sequence: Synthetic oligonucleotide
  Antisense strand to SEQ ID NO: 1001246
uaaacaccuauucuaucaa

SEQ ID NO: 1001248 - RNA, 19 nt, Artificial Sequence
  Description of Artificial Sequence: Synthetic oligonucleotide
  Sense strand starting at position 898 of SEQ ID NO: 914403
uagaauagguguuuauaug

SEQ ID NO: 1001249 - RNA, 19 nt, Artificial Sequence
  Description of Artificial Sequence: Synthetic oligonucleotide
  Antisense strand to SEQ ID NO: 1001248
cauauaaacaccuauucua

SEQ ID NO: 1001250 - RNA, 19 nt, Artificial Sequence
  Description of Artificial Sequence: Synthetic oligonucleotide
  Sense strand starting at position 969 of SEQ ID NO: 914403
uggugcaacuacuuaaaca

SEQ ID NO: 1001251 - RNA, 19 nt, Artificial Sequence
  Description of Artificial Sequence: Synthetic oligonucleotide
  Antisense strand to SEQ ID NO: 1001250
uguuuaaguaguugcacca

SEQ ID NO: 1001252 - RNA, 19 nt, Artificial Sequence
  Description of Artificial Sequence: Synthetic oligonucleotide
  Sense strand starting at position 1133 of SEQ ID NO: 914403
guaacaauuacguggauga

SEQ ID NO: 1001253 - RNA, 19 nt, Artificial Sequence
  Description of Artificial Sequence: Synthetic oligonucleotide
  Antisense strand to SEQ ID NO: 1001252
ucauccacguaauuguuac

SEQ ID NO: 1001254 - RNA, 19 nt, Artificial Sequence
  Description of Artificial Sequence: Synthetic oligonucleotide
  Sense strand starting at position 1134 of SEQ ID NO: 914403
uaacaauuacguggaugaa

SEQ ID NO: 1001255 - RNA, 19 nt, Artificial Sequence
  Description of Artificial Sequence: Synthetic oligonucleotide
  Antisense strand to SEQ ID NO: 1001254
uucauccacguaauuguua

SEQ ID NO: 1001256 - RNA, 19 nt, Artificial Sequence
  Description of Artificial Sequence: Synthetic oligonucleotide
  Sense strand starting at position 1144 of SEQ ID NO: 914403
guggaugaaggugaguauu

SEQ ID NO: 1001257 - RNA, 19 nt, Artificial Sequence
  Description of Artificial Sequence: Synthetic oligonucleotide
  Antisense strand to SEQ ID NO: 1001256
aauacucaccuucauccac

SEQ ID NO: 1001258 - RNA, 19 nt, Artificial Sequence
  Description of Artificial Sequence: Synthetic oligonucleotide
  Sense strand starting at position 1146 of SEQ ID NO: 914403
ggaugaaggugaguauuau

SEQ ID NO: 1001259 - RNA, 19 nt, Artificial Sequence
  Description of Artificial Sequence: Synthetic oligonucleotide
  Antisense strand to SEQ ID NO: 1001258
auaauacucaccuucaucc

SEQ ID NO: 1001260 - RNA, 19 nt, Artificial Sequence
  Description of Artificial Sequence: Synthetic oligonucleotide
  Sense strand starting at position 1304 of SEQ ID NO: 914403
acgugccaugauuagagau

SEQ ID NO: 1001261 - RNA, 19 nt, Artificial Sequence
  Description of Artificial Sequence: Synthetic oligonucleotide
  Antisense strand to SEQ ID NO: 1001260
aucucuaaucauggcacgu

SEQ ID NO: 1001262 - RNA, 19 nt, Artificial Sequence
  Description of Artificial Sequence: Synthetic oligonucleotide
  Sense strand starting at position 1508 of SEQ ID NO: 914403
ugugauuuaugugauuuac

SEQ ID NO: 1001263 - RNA, 19 nt, Artificial Sequence
  Description of Artificial Sequence: Synthetic oligonucleotide
  Antisense strand to SEQ ID NO: 1001262
guaaaucacauaaaucaca

SEQ ID NO: 1001264 - RNA, 19 nt, Artificial Sequence
  Description of Artificial Sequence: Synthetic oligonucleotide
  Sense strand starting at position 1569 of SEQ ID NO: 914403
gcauauagucaauagcaga

SEQ ID NO: 1001265 - RNA, 19 nt, Artificial Sequence
  Description of Artificial Sequence: Synthetic oligonucleotide
  Antisense strand to SEQ ID NO: 1001264
ucugcuauugacuauaugc

SEQ ID NO: 1001266 - RNA, 19 nt, Artificial Sequence
  Description of Artificial Sequence: Synthetic oligonucleotide
  Sense strand starting at position 1669 of SEQ ID NO: 914403
ggaugagauugaaguagag

SEQ ID NO: 1001267 - RNA, 19 nt, Artificial Sequence
  Description of Artificial Sequence: Synthetic oligonucleotide
  Antisense strand to SEQ ID NO: 1001266
cucuacuucaaucucaucc

SEQ ID NO: 1001268 - RNA, 19 nt, Artificial Sequence
  Description of Artificial Sequence: Synthetic oligonucleotide
  Sense strand starting at position 1728 of SEQ ID NO: 914403
agagaaagauugucuguca

SEQ ID NO: 1001269 - RNA, 19 nt, Artificial Sequence
  Description of Artificial Sequence: Synthetic oligonucleotide
  Antisense strand to SEQ ID NO: 1001268
ugacagacaaucuuucucu

SEQ ID NO: 1001270 - RNA, 19 nt, Artificial Sequence
  Description of Artificial Sequence: Synthetic oligonucleotide
  Sense strand starting at position 1729 of SEQ ID NO: 914403
gagaaagauugucugucac

SEQ ID NO: 1001271 - RNA, 19 nt, Artificial Sequence
  Description of Artificial Sequence: Synthetic oligonucleotide
  Antisense strand to SEQ ID NO: 1001270
gugacagacaaucuuucuc

SEQ ID NO: 1001272 - RNA, 19 nt, Artificial Sequence
  Description of Artificial Sequence: Synthetic oligonucleotide
  Sense strand starting at position 1731 of SEQ ID NO: 914403
gaaagauugucugucacag

SEQ ID NO: 1001273 - RNA, 19 nt, Artificial Sequence
  Description of Artificial Sequence: Synthetic oligonucleotide
  Antisense strand to SEQ ID NO: 1001272
cugugacagacaaucuuuc

SEQ ID NO: 1001274 - RNA, 19 nt, Artificial Sequence
  Description of Artificial Sequence: Synthetic oligonucleotide
  Sense strand starting at position 1757 of SEQ ID NO: 914403
cuauacugcgugccaguua

SEQ ID NO: 1001275 - RNA, 19 nt, Artificial Sequence
  Description of Artificial Sequence: Synthetic oligonucleotide
  Antisense strand to SEQ ID NO: 1001274
uaacuggcacgcaguauag

SEQ ID NO: 1001276 - RNA, 19 nt, Artificial Sequence
  Description of Artificial Sequence: Synthetic oligonucleotide
  Sense strand starting at position 1854 of SEQ ID NO: 914403
cugcaagcaccucagaaua

SEQ ID NO: 1001277 - RNA, 19 nt, Artificial Sequence
  Description of Artificial Sequence: Synthetic oligonucleotide
  Antisense strand to SEQ ID NO: 1001276
uauucugaggugcuugcag

SEQ ID NO: 1001278 - RNA, 19 nt, Artificial Sequence
  Description of Artificial Sequence: Synthetic oligonucleotide
  Sense strand starting at position 2037 of SEQ ID NO: 914403
gaaucauuagguuaagcuc

SEQ ID NO: 1001279 - RNA, 19 nt, Artificial Sequence
  Description of Artificial Sequence: Synthetic oligonucleotide
  Antisense strand to SEQ ID NO: 1001278
gagcuuaaccuaaugauuc

SEQ ID NO: 1001280 - RNA, 19 nt, Artificial Sequence
  Description of Artificial Sequence: Synthetic oligonucleotide
  Sense strand starting at position 2165 of SEQ ID NO: 914403
ucuccugaucuuugauaga

SEQ ID NO: 1001281 - RNA, 19 nt, Artificial Sequence
  Description of Artificial Sequence: Synthetic oligonucleotide
  Antisense strand to SEQ ID NO: 1001280
ucuaucaaagaucaggaga

SEQ ID NO: 1001282 - RNA, 19 nt, Artificial Sequence
  Description of Artificial Sequence: Synthetic oligonucleotide
  Sense strand starting at position 2284 of SEQ ID NO: 914403
ucuggcaagguuuacaaau

SEQ ID NO: 1001283 - RNA, 19 nt, Artificial Sequence
  Description of Artificial Sequence: Synthetic oligonucleotide
  Antisense strand to SEQ ID NO: 1001282
auuuguaaaccuugccaga

SEQ ID NO: 1001284 - RNA, 19 nt, Artificial Sequence
  Description of Artificial Sequence: Synthetic oligonucleotide
  Sense strand starting at position 2457 of SEQ ID NO: 914403
uaagaagauuacguuccua

SEQ ID NO: 1001285 - RNA, 19 nt, Artificial Sequence
  Description of Artificial Sequence: Synthetic oligonucleotide
  Antisense strand to SEQ ID NO: 1001284
uaggaacguaaucuucuua

SEQ ID NO: 1001286 - RNA, 19 nt, Artificial Sequence
  Description of Artificial Sequence: Synthetic oligonucleotide
  Sense strand starting at position 2476 of SEQ ID NO: 914403
agaagaaaguuguuuguua

SEQ ID NO: 1001287 - RNA, 19 nt, Artificial Sequence
  Description of Artificial Sequence: Synthetic oligonucleotide
  Antisense strand to SEQ ID NO: 1001286
uaacaaacaacuuucuucu

SEQ ID NO: 1001288 - RNA, 19 nt, Artificial Sequence
  Description of Artificial Sequence: Synthetic oligonucleotide
  Sense strand starting at position 2494 of SEQ ID NO: 914403
auugguuuacugcacuaaa

SEQ ID NO: 1001289 - RNA, 19 nt, Artificial Sequence
  Description of Artificial Sequence: Synthetic oligonucleotide
  Antisense strand to SEQ ID NO: 1001288
uuuagugcaguaaaccaau

SEQ ID NO: 1001290 - RNA, 19 nt, Artificial Sequence
  Description of Artificial Sequence: Synthetic oligonucleotide
  Sense strand starting at position 2497 of SEQ ID NO: 914403
gguuuacugcacuaaauaa

SEQ ID NO: 1001291 - RNA, 19 nt, Artificial Sequence
  Description of Artificial Sequence: Synthetic oligonucleotide
  Antisense strand to SEQ ID NO: 1001290
uuauuuagugcaguaaacc

SEQ ID NO: 1001292 - RNA, 19 nt, Artificial Sequence
  Description of Artificial Sequence: Synthetic oligonucleotide
  Sense strand starting at position 2713 of SEQ ID NO: 914403
gaggucugcgacuaaauua

SEQ ID NO: 1001293 - RNA, 19 nt, Artificial Sequence
  Description of Artificial Sequence: Synthetic oligonucleotide
  Antisense strand to SEQ ID NO: 1001292
uaauuuagucgcagaccuc

SEQ ID NO: 1001294 - RNA, 19 nt, Artificial Sequence
  Description of Artificial Sequence: Synthetic oligonucleotide
  Sense strand starting at position 2915 of SEQ ID NO: 914403
gugagaaccuuauuacuga

SEQ ID NO: 1001295 - RNA, 19 nt, Artificial Sequence
  Description of Artificial Sequence: Synthetic oligonucleotide
  Antisense strand to SEQ ID NO: 1001294
ucaguaauaagguucucac

SEQ ID NO: 1001296 - RNA, 19 nt, Artificial Sequence
  Description of Artificial Sequence: Synthetic oligonucleotide
  Sense strand starting at position 3003 of SEQ ID NO: 914403
gugguuccacuagaggaau

SEQ ID NO: 1001297 - RNA, 19 nt, Artificial Sequence
  Description of Artificial Sequence: Synthetic oligonucleotide
  Antisense strand to SEQ ID NO: 1001296
auuccucuaguggaaccac

SEQ ID NO: 1001298 - RNA, 19 nt, Artificial Sequence
  Description of Artificial Sequence: Synthetic oligonucleotide
  Sense strand starting at position 3061 of SEQ ID NO: 914403
ucuguaguagguuagacaa

SEQ ID NO: 1001299 - RNA, 19 nt, Artificial Sequence
  Description of Artificial Sequence: Synthetic oligonucleotide
  Antisense strand to SEQ ID NO: 1001298
uugucuaaccuacuacaga

SEQ ID NO: 1001300 - RNA, 19 nt, Artificial Sequence
  Description of Artificial Sequence: Synthetic oligonucleotide
  Sense strand starting at position 3165 of SEQ ID NO: 914403
guguguauggcagaauaua

SEQ ID NO: 1001301 - RNA, 19 nt, Artificial Sequence
  Description of Artificial Sequence: Synthetic oligonucleotide
  Antisense strand to SEQ ID NO: 1001300
uauauucugccauacacac

SEQ ID NO: 1001302 - RNA, 19 nt, Artificial Sequence
  Description of Artificial Sequence: Synthetic oligonucleotide
  Sense strand starting at position 3193 of SEQ ID NO: 914403
guacguaugaggcacauaa

SEQ ID NO: 1001303 - RNA, 19 nt, Artificial Sequence
  Description of Artificial Sequence: Synthetic oligonucleotide
  Antisense strand to SEQ ID NO: 1001302
uuaugugccucauacguac

SEQ ID NO: 1001304 - RNA, 19 nt, Artificial Sequence
  Description of Artificial Sequence: Synthetic oligonucleotide
  Sense strand starting at position 3222 of SEQ ID NO: 914403
ucucuaaucugguugaauu

SEQ ID NO: 1001305 - RNA, 19 nt, Artificial Sequence
  Description of Artificial Sequence: Synthetic oligonucleotide
  Antisense strand to SEQ ID NO: 1001304
aauucaaccagauuagaga

SEQ ID NO: 1001306 - RNA, 19 nt, Artificial Sequence
  Description of Artificial Sequence: Synthetic oligonucleotide
  Sense strand starting at position 3258 of SEQ ID NO: 914403
auauuugauuugugaguca

SEQ ID NO: 1001307 - RNA, 19 nt, Artificial Sequence
  Description of Artificial Sequence: Synthetic oligonucleotide
  Antisense strand to SEQ ID NO: 1001306
ugacucacaaaucaaauau

SEQ ID NO: 1001308 - RNA, 19 nt, Artificial Sequence
  Description of Artificial Sequence: Synthetic oligonucleotide
  Sense strand starting at position 3583 of SEQ ID NO: 914403
guuccaagacaauguauua

SEQ ID NO: 1001309 - RNA, 19 nt, Artificial Sequence
  Description of Artificial Sequence: Synthetic oligonucleotide
  Antisense strand to SEQ ID NO: 1001308
uaauacauugucuuggaac

SEQ ID NO: 1001310 - RNA, 19 nt, Artificial Sequence
  Description of Artificial Sequence: Synthetic oligonucleotide
  Sense strand starting at position 3759 of SEQ ID NO: 914403
ugaucuuaugauuguucca

SEQ ID NO: 1001311 - RNA, 19 nt, Artificial Sequence
  Description of Artificial Sequence: Synthetic oligonucleotide
  Antisense strand to SEQ ID NO: 1001310
uggaacaaucauaagauca

SEQ ID NO: 1001312 - RNA, 19 nt, Artificial Sequence
  Description of Artificial Sequence: Synthetic oligonucleotide
  Sense strand starting at position 3762 of SEQ ID NO: 914403
ucuuaugauuguuccaaag

SEQ ID NO: 1001313 - RNA, 19 nt, Artificial Sequence
  Description of Artificial Sequence: Synthetic oligonucleotide
  Antisense strand to SEQ ID NO: 1001312
cuuuggaacaaucauaaga

SEQ ID NO: 1001314 - RNA, 19 nt, Artificial Sequence
  Description of Artificial Sequence: Synthetic oligonucleotide
  Sense strand starting at position 3854 of SEQ ID NO: 914403
ugauuauugauugaguguu

SEQ ID NO: 1001315 - RNA, 19 nt, Artificial Sequence
  Description of Artificial Sequence: Synthetic oligonucleotide
  Antisense strand to SEQ ID NO: 1001314
aacacucaaucaauaauca

SEQ ID NO: 1001316 - RNA, 19 nt, Artificial Sequence
  Description of Artificial Sequence: Synthetic oligonucleotide
  Sense strand starting at position 629 of SEQ ID NO: 914404
augauucugcauuaggagu

SEQ ID NO: 1001317 - RNA, 19 nt, Artificial Sequence
  Description of Artificial Sequence: Synthetic oligonucleotide
  Antisense strand to SEQ ID NO: 1001316
acuccuaaugcagaaucau

SEQ ID NO: 1001318 - RNA, 19 nt, Artificial Sequence
  Description of Artificial Sequence: Synthetic oligonucleotide
  Sense strand starting at position 636 of SEQ ID NO: 914404
ugcauuaggaguuaaaugu

SEQ ID NO: 1001319 - RNA, 19 nt, Artificial Sequence
  Description of Artificial Sequence: Synthetic oligonucleotide
  Antisense strand to SEQ ID NO: 1001318
acauuuaacuccuaaugca

SEQ ID NO: 1001320 - RNA, 19 nt, Artificial Sequence
  Description of Artificial Sequence: Synthetic oligonucleotide
  Sense strand starting at position 716 of SEQ ID NO: 914404
ugcauugagccucacaaau

SEQ ID NO: 1001321 - RNA, 19 nt, Artificial Sequence
  Description of Artificial Sequence: Synthetic oligonucleotide
  Antisense strand to SEQ ID NO: 1001320
auuugugaggcucaaugca

SEQ ID NO: 1001322 - RNA, 19 nt, Artificial Sequence
  Description of Artificial Sequence: Synthetic oligonucleotide
  Sense strand starting at position 837 of SEQ ID NO: 914404
gccuaaaggaucggacuuu

SEQ ID NO: 1001323 - RNA, 19 nt, Artificial Sequence
  Description of Artificial Sequence: Synthetic oligonucleotide
  Antisense strand to SEQ ID NO: 1001322
aaaguccgauccuuuaggc

SEQ ID NO: 1001324 - RNA, 19 nt, Artificial Sequence
  Description of Artificial Sequence: Synthetic oligonucleotide
  Sense strand starting at position 861 of SEQ ID NO: 914404
cccggaauuguccaaacua

SEQ ID NO: 1001325 - RNA, 19 nt, Artificial Sequence
  Description of Artificial Sequence: Synthetic oligonucleotide
  Antisense strand to SEQ ID NO: 1001324
uaguuuggacaauuccggg

SEQ ID NO: 1001326 - RNA, 19 nt, Artificial Sequence
  Description of Artificial Sequence: Synthetic oligonucleotide
  Sense strand starting at position 954 of SEQ ID NO: 914404
acuagacagcuuuacugau

SEQ ID NO: 1001327 - RNA, 19 nt, Artificial Sequence
  Description of Artificial Sequence: Synthetic oligonucleotide
  Antisense strand to SEQ ID NO: 1001326
aucaguaaagcugucuagu

SEQ ID NO: 1001328 - RNA, 19 nt, Artificial Sequence
  Description of Artificial Sequence: Synthetic oligonucleotide
  Sense strand starting at position 1342 of SEQ ID NO: 914404
acuaguuuacacuguuuaa

SEQ ID NO: 1001329 - RNA, 19 nt, Artificial Sequence
  Description of Artificial Sequence: Synthetic oligonucleotide
  Antisense strand to SEQ ID NO: 1001328
uuaaacaguguaaacuagu

SEQ ID NO: 1001330 - RNA, 19 nt, Artificial Sequence
  Description of Artificial Sequence: Synthetic oligonucleotide
  Sense strand starting at position 1345 of SEQ ID NO: 914404
aguuuacacuguuuaaucu

SEQ ID NO: 1001331 - RNA, 19 nt, Artificial Sequence
  Description of Artificial Sequence: Synthetic oligonucleotide
  Antisense strand to SEQ ID NO: 1001330
agauuaaacaguguaaacu

SEQ ID NO: 1001332 - RNA, 19 nt, Artificial Sequence
  Description of Artificial Sequence: Synthetic oligonucleotide
  Sense strand starting at position 1355 of SEQ ID NO: 914404
guuuaaucuuaacucagga

SEQ ID NO: 1001333 - RNA, 19 nt, Artificial Sequence
  Description of Artificial Sequence: Synthetic oligonucleotide
  Antisense strand to SEQ ID NO: 1001332
uccugaguuaagauuaaac

SEQ ID NO: 1001334 - RNA, 19 nt, Artificial Sequence
  Description of Artificial Sequence: Synthetic oligonucleotide
  Sense strand starting at position 1481 of SEQ ID NO: 914404
ggcagaaagggugagcuua

SEQ ID NO: 1001335 - RNA, 19 nt, Artificial Sequence
  Description of Artificial Sequence: Synthetic oligonucleotide
  Antisense strand to SEQ ID NO: 1001334
uaagcucacccuuucugcc

SEQ ID NO: 1001336 - RNA, 19 nt, Artificial Sequence
  Description of Artificial Sequence: Synthetic oligonucleotide
  Sense strand starting at position 1626 of SEQ ID NO: 914404
aggguuucugaaggcagaa

SEQ ID NO: 1001337 - RNA, 19 nt, Artificial Sequence
  Description of Artificial Sequence: Synthetic oligonucleotide
  Antisense strand to SEQ ID NO: 1001336
uucugccuucagaaacccu

SEQ ID NO: 1001338 - RNA, 19 nt, Artificial Sequence
  Description of Artificial Sequence: Synthetic oligonucleotide
  Sense strand starting at position 1829 of SEQ ID NO: 914404
uuguuauuugccgaaaugu

SEQ ID NO: 1001339 - RNA, 19 nt, Artificial Sequence
  Description of Artificial Sequence: Synthetic oligonucleotide
  Antisense strand to SEQ ID NO: 1001338
acauuucggcaaauaacaa

SEQ ID NO: 1001340 - RNA, 19 nt, Artificial Sequence
  Description of Artificial Sequence: Synthetic oligonucleotide
  Sense strand starting at position 2074 of SEQ ID NO: 914404
uuacuugggccacggaaau

SEQ ID NO: 1001341 - RNA, 19 nt, Artificial Sequence
  Description of Artificial Sequence: Synthetic oligonucleotide
  Antisense strand to SEQ ID NO: 1001340
auuuccguggcccaaguaa

SEQ ID NO: 1001342 - RNA, 19 nt, Artificial Sequence
  Description of Artificial Sequence: Synthetic oligonucleotide
  Sense strand starting at position 2173 of SEQ ID NO: 914404
uguacagagcucuaggaca

SEQ ID NO: 1001343 - RNA, 19 nt, Artificial Sequence
  Description of Artificial Sequence: Synthetic oligonucleotide
  Antisense strand to SEQ ID NO: 1001342
uguccuagagcucuguaca

SEQ ID NO: 1001344 - RNA, 19 nt, Artificial Sequence
  Description of Artificial Sequence: Synthetic oligonucleotide
  Sense strand starting at position 2440 of SEQ ID NO: 914404
guaugagucccacacaaac

SEQ ID NO: 1001345 - RNA, 19 nt, Artificial Sequence
  Description of Artificial Sequence: Synthetic oligonucleotide
  Antisense strand to SEQ ID NO: 1001344
guuugugugggacucauac

SEQ ID NO: 1001346 - RNA, 19 nt, Artificial Sequence
  Description of Artificial Sequence: Synthetic oligonucleotide
  Sense strand starting at position 2470 of SEQ ID NO: 914404
guggacgggcuucauuaua

SEQ ID NO: 1001347 - RNA, 19 nt, Artificial Sequence
  Description of Artificial Sequence: Synthetic oligonucleotide
  Antisense strand to SEQ ID NO: 1001346
uauaaugaagcccguccac

SEQ ID NO: 1001348 - RNA, 19 nt, Artificial Sequence
  Description of Artificial Sequence: Synthetic oligonucleotide
  Sense strand starting at position 2489 of SEQ ID NO: 914404
ucuugagauggagguguua

SEQ ID NO: 1001349 - RNA, 19 nt, Artificial Sequence
  Description of Artificial Sequence: Synthetic oligonucleotide
  Antisense strand to SEQ ID NO: 1001348
uaacaccuccaucucaaga

SEQ ID NO: 1001350 - RNA, 19 nt, Artificial Sequence
  Description of Artificial Sequence: Synthetic oligonucleotide
  Sense strand starting at position 2491 of SEQ ID NO: 914404
uugagauggagguguuaaa

SEQ ID NO: 1001351 - RNA, 19 nt, Artificial Sequence
  Description of Artificial Sequence: Synthetic oligonucleotide
  Antisense strand to SEQ ID NO: 1001350
uuuaacaccuccaucucaa

SEQ ID NO: 1001352 - RNA, 19 nt, Artificial Sequence
  Description of Artificial Sequence: Synthetic oligonucleotide
  Sense strand starting at position 2503 of SEQ ID NO: 914404
uguuaaaucguguugcgga

SEQ ID NO: 1001353 - RNA, 19 nt, Artificial Sequence
  Description of Artificial Sequence: Synthetic oligonucleotide
  Antisense strand to SEQ ID NO: 1001352
uccgcaacacgauuuaaca

SEQ ID NO: 1001354 - RNA, 19 nt, Artificial Sequence
  Description of Artificial Sequence: Synthetic oligonucleotide
  Sense strand starting at position 2511 of SEQ ID NO: 914404
cguguugcggacaaguuua

SEQ ID NO: 1001355 - RNA, 19 nt, Artificial Sequence
  Description of Artificial Sequence: Synthetic oligonucleotide
  Antisense strand to SEQ ID NO: 1001354
uaaacuuguccgcaacacg

SEQ ID NO: 1001356 - RNA, 19 nt, Artificial Sequence
  Description of Artificial Sequence: Synthetic oligonucleotide
  Sense strand starting at position 2519 of SEQ ID NO: 914404
ggacaaguuuaaccuuauu

SEQ ID NO: 1001357 - RNA, 19 nt, Artificial Sequence
  Description of Artificial Sequence: Synthetic oligonucleotide
  Antisense strand to SEQ ID NO: 1001356
aauaagguuaaacuugucc

SEQ ID NO: 1001358 - RNA, 19 nt, Artificial Sequence
  Description of Artificial Sequence: Synthetic oligonucleotide
  Sense strand starting at position 2550 of SEQ ID NO: 914404
ugauuuaaccuucguaugu

SEQ ID NO: 1001359 - RNA, 19 nt, Artificial Sequence
  Description of Artificial Sequence: Synthetic oligonucleotide
  Antisense strand to SEQ ID NO: 1001358
acauacgaagguuaaauca

SEQ ID NO: 1001360 - RNA, 19 nt, Artificial Sequence
  Description of Artificial Sequence: Synthetic oligonucleotide
  Sense strand starting at position 2551 of SEQ ID NO: 914404
gauuuaaccuucguaugug

SEQ ID NO: 1001361 - RNA, 19 nt, Artificial Sequence
  Description of Artificial Sequence: Synthetic oligonucleotide
  Antisense strand to SEQ ID NO: 1001360
cacauacgaagguuaaauc

SEQ ID NO: 1001362 - RNA, 19 nt, Artificial Sequence
  Description of Artificial Sequence: Synthetic oligonucleotide
  Sense strand starting at position 2626 of SEQ ID NO: 914404
gcugguggucacagcguua

SEQ ID NO: 1001363 - RNA, 19 nt, Artificial Sequence
  Description of Artificial Sequence: Synthetic oligonucleotide
  Antisense strand to SEQ ID NO: 1001362
uaacgcugugaccaccagc

SEQ ID NO: 1001364 - RNA, 19 nt, Artificial Sequence
  Description of Artificial Sequence: Synthetic oligonucleotide
  Sense strand starting at position 2671 of SEQ ID NO: 914404
ccacguggccucuaagaau

SEQ ID NO: 1001365 - RNA, 19 nt, Artificial Sequence
  Description of Artificial Sequence: Synthetic oligonucleotide
  Antisense strand to SEQ ID NO: 1001364
auucuuagaggccacgugg

SEQ ID NO: 1001366 - RNA, 19 nt, Artificial Sequence
  Description of Artificial Sequence: Synthetic oligonucleotide
  Sense strand starting at position 2722 of SEQ ID NO: 914404
guaggagugucuucuaaac

SEQ ID NO: 1001367 - RNA, 19 nt, Artificial Sequence
  Description of Artificial Sequence: Synthetic oligonucleotide
  Antisense strand to SEQ ID NO: 1001366
guuuagaagacacuccuac

SEQ ID NO: 1001368 - RNA, 19 nt, Artificial Sequence
  Description of Artificial Sequence: Synthetic oligonucleotide
  Sense strand starting at position 2808 of SEQ ID NO: 914404
cagguauaccguuaaagca

SEQ ID NO: 1001369 - RNA, 19 nt, Artificial Sequence
  Description of Artificial Sequence: Synthetic oligonucleotide
  Antisense strand to SEQ ID NO: 1001368
ugcuuuaacgguauaccug

SEQ ID NO: 1001370 - RNA, 19 nt, Artificial Sequence
  Description of Artificial Sequence: Synthetic oligonucleotide
  Sense strand starting at position 2905 of SEQ ID NO: 914404
cuaguaagaccuuguacca

SEQ ID NO: 1001371 - RNA, 19 nt, Artificial Sequence
  Description of Artificial Sequence: Synthetic oligonucleotide
  Antisense strand to SEQ ID NO: 1001370
ugguacaaggucuuacuag

SEQ ID NO: 1001372 - RNA, 19 nt, Artificial Sequence
  Description of Artificial Sequence: Synthetic oligonucleotide
  Sense strand starting at position 2955 of SEQ ID NO: 914404
ugagcucuuggugaccuua

SEQ ID NO: 1001373 - RNA, 19 nt, Artificial Sequence
  Description of Artificial Sequence: Synthetic oligonucleotide
  Antisense strand to SEQ ID NO: 1001372
uaaggucaccaagagcuca

SEQ ID NO: 1001374 - RNA, 19 nt, Artificial Sequence
  Description of Artificial Sequence: Synthetic oligonucleotide
  Sense strand starting at position 3069 of SEQ ID NO: 914404
uugacuaaggcauguacaa

SEQ ID NO: 1001375 - RNA, 19 nt, Artificial Sequence
  Description of Artificial Sequence: Synthetic oligonucleotide
  Antisense strand to SEQ ID NO: 1001374
uuguacaugccuuagucaa

SEQ ID NO: 1001376 - RNA, 19 nt, Artificial Sequence
  Description of Artificial Sequence: Synthetic oligonucleotide
  Sense strand starting at position 3339 of SEQ ID NO: 914404
ugcugaggcucacuacaua

SEQ ID NO: 1001377 - RNA, 19 nt, Artificial Sequence
  Description of Artificial Sequence: Synthetic oligonucleotide
  Antisense strand to SEQ ID NO: 1001376
uauguagugagccucagca

SEQ ID NO: 1001378 - RNA, 19 nt, Artificial Sequence
  Description of Artificial Sequence: Synthetic oligonucleotide
  Sense strand starting at position 3639 of SEQ ID NO: 914404
guuguauacucucuaccau

SEQ ID NO: 1001379 - RNA, 19 nt, Artificial Sequence
  Description of Artificial Sequence: Synthetic oligonucleotide
  Antisense strand to SEQ ID NO: 1001378
augguagagaguauacaac

SEQ ID NO: 1001380 - RNA, 19 nt, Artificial Sequence
  Description of Artificial Sequence: Synthetic oligonucleotide
  Sense strand starting at position 3713 of SEQ ID NO: 914404
acuugucaguuuccaccaa

SEQ ID NO: 1001381 - RNA, 19 nt, Artificial Sequence
  Description of Artificial Sequence: Synthetic oligonucleotide
  Antisense strand to SEQ ID NO: 1001380
uugguggaaacugacaagu

SEQ ID NO: 1001382 - RNA, 19 nt, Artificial Sequence
  Description of Artificial Sequence: Synthetic oligonucleotide
  Sense strand starting at position 3717 of SEQ ID NO: 914404
gucaguuuccaccaauaau

SEQ ID NO: 1001383 - RNA, 19 nt, Artificial Sequence
  Description of Artificial Sequence: Synthetic oligonucleotide
  Antisense strand to SEQ ID NO: 1001382
auuauugguggaaacugac

SEQ ID NO: 1001384 - RNA, 19 nt, Artificial Sequence
  Description of Artificial Sequence: Synthetic oligonucleotide
  Sense strand starting at position 3785 of SEQ ID NO: 914404
ugaagaaucuaggaauuau

SEQ ID NO: 1001385 - RNA, 19 nt, Artificial Sequence
  Description of Artificial Sequence: Synthetic oligonucleotide
  Antisense strand to SEQ ID NO: 1001384
auaauuccuagauucuuca

SEQ ID NO: 1001386 - RNA, 19 nt, Artificial Sequence
  Description of Artificial Sequence: Synthetic oligonucleotide
  Sense strand starting at position 3830 of SEQ ID NO: 914404
augguuuauugauuggaga

SEQ ID NO: 1001387 - RNA, 19 nt, Artificial Sequence
  Description of Artificial Sequence: Synthetic oligonucleotide
  Antisense strand to SEQ ID NO: 1001386
ucuccaaucaauaaaccau

SEQ ID NO: 1001388 - RNA, 19 nt, Artificial Sequence
  Description of Artificial Sequence: Synthetic oligonucleotide
  Sense strand starting at position 3831 of SEQ ID NO: 914404
ugguuuauugauuggagau

SEQ ID NO: 1001389 - RNA, 19 nt, Artificial Sequence
  Description of Artificial Sequence: Synthetic oligonucleotide
  Antisense strand to SEQ ID NO: 1001388
aucuccaaucaauaaacca

SEQ ID NO: 1001390 - RNA, 19 nt, Artificial Sequence
  Description of Artificial Sequence: Synthetic oligonucleotide
  Sense strand starting at position 3832 of SEQ ID NO: 914404
gguuuauugauuggagauc

SEQ ID NO: 1001391 - RNA, 19 nt, Artificial Sequence
  Description of Artificial Sequence: Synthetic oligonucleotide
  Antisense strand to SEQ ID NO: 1001390
gaucuccaaucaauaaacc

SEQ ID NO: 1001392 - RNA, 19 nt, Artificial Sequence
  Description of Artificial Sequence: Synthetic oligonucleotide
  Sense strand starting at position 3870 of SEQ ID NO: 914404
ggcacacuuugcuuuagga

SEQ ID NO: 1001393 - RNA, 19 nt, Artificial Sequence
  Description of Artificial Sequence: Synthetic oligonucleotide
  Antisense strand to SEQ ID NO: 1001392
uccuaaagcaaagugugcc

SEQ ID NO: 1001394 - RNA, 19 nt, Artificial Sequence
  Description of Artificial Sequence: Synthetic oligonucleotide
  Sense strand starting at position 3926 of SEQ ID NO: 914404
acauuaauacuguauuggu

SEQ ID NO: 1001395 - RNA, 19 nt, Artificial Sequence
  Description of Artificial Sequence: Synthetic oligonucleotide
  Antisense strand to SEQ ID NO: 1001394
accaauacaguauuaaugu

SEQ ID NO: 1001396 - RNA, 19 nt, Artificial Sequence
  Description of Artificial Sequence: Synthetic oligonucleotide
  Sense strand starting at position 67 of SEQ ID NO: 914405
uucuuuauugccuagagga

SEQ ID NO: 1001397 - RNA, 19 nt, Artificial Sequence
  Description of Artificial Sequence: Synthetic oligonucleotide
  Antisense strand to SEQ ID NO: 1001396
uccucuaggcaauaaagaa

SEQ ID NO: 1001398 - RNA, 19 nt, Artificial Sequence
  Description of Artificial Sequence: Synthetic oligonucleotide
  Sense strand starting at position 164 of SEQ ID NO: 914405
cccugcuuucuggauaaau

SEQ ID NO: 1001399 - RNA, 19 nt, Artificial Sequence
  Description of Artificial Sequence: Synthetic oligonucleotide
  Antisense strand to SEQ ID NO: 1001398
auuuauccagaaagcaggg

SEQ ID NO: 1001400 - RNA, 19 nt, Artificial Sequence
  Description of Artificial Sequence: Synthetic oligonucleotide
  Sense strand starting at position 237 of SEQ ID NO: 914405
gaugcugucuauccagaau

SEQ ID NO: 1001401 - RNA, 19 nt, Artificial Sequence
  Description of Artificial Sequence: Synthetic oligonucleotide
  Antisense strand to SEQ ID NO: 1001400
auucuggauagacagcauc

SEQ ID NO: 1001402 - RNA, 19 nt, Artificial Sequence
  Description of Artificial Sequence: Synthetic oligonucleotide
  Sense strand starting at position 240 of SEQ ID NO: 914405
gcugucuauccagaaugau

SEQ ID NO: 1001403 - RNA, 19 nt, Artificial Sequence
  Description of Artificial Sequence: Synthetic oligonucleotide
  Antisense strand to SEQ ID NO: 1001402
aucauucuggauagacagc

SEQ ID NO: 1001404 - RNA, 19 nt, Artificial Sequence
  Description of Artificial Sequence: Synthetic oligonucleotide
  Sense strand starting at position 243 of SEQ ID NO: 914405
gucuauccagaaugauauu

SEQ ID NO: 1001405 - RNA, 19 nt, Artificial Sequence
  Description of Artificial Sequence: Synthetic oligonucleotide
  Antisense strand to SEQ ID NO: 1001404
aauaucauucuggauagac

SEQ ID NO: 1001406 - RNA, 19 nt, Artificial Sequence
  Description of Artificial Sequence: Synthetic oligonucleotide
  Sense strand starting at position 268 of SEQ ID NO: 914405
cugguaaacguauaccuau

SEQ ID NO: 1001407 - RNA, 19 nt, Artificial Sequence
  Description of Artificial Sequence: Synthetic oligonucleotide
  Antisense strand to SEQ ID NO: 1001406
auagguauacguuuaccag

SEQ ID NO: 1001408 - RNA, 19 nt, Artificial Sequence
  Description of Artificial Sequence: Synthetic oligonucleotide
  Sense strand starting at position 375 of SEQ ID NO: 914405
uccuuagugcuccaaagca

SEQ ID NO: 1001409 - RNA, 19 nt, Artificial Sequence
  Description of Artificial Sequence: Synthetic oligonucleotide
  Antisense strand to SEQ ID NO: 1001408
ugcuuuggagcacuaagga

SEQ ID NO: 1001410 - RNA, 19 nt, Artificial Sequence
  Description of Artificial Sequence: Synthetic oligonucleotide
  Sense strand starting at position 407 of SEQ ID NO: 914405
ucuguuauacaguacuuau

SEQ ID NO: 1001411 - RNA, 19 nt, Artificial Sequence
  Description of Artificial Sequence: Synthetic oligonucleotide
  Antisense strand to SEQ ID NO: 1001410
auaaguacuguauaacaga

SEQ ID NO: 1001412 - RNA, 19 nt, Artificial Sequence
  Description of Artificial Sequence: Synthetic oligonucleotide
  Sense strand starting at position 410 of SEQ ID NO: 914405
guuauacaguacuuaucaa

SEQ ID NO: 1001413 - RNA, 19 nt, Artificial Sequence
  Description of Artificial Sequence: Synthetic oligonucleotide
  Antisense strand to SEQ ID NO: 1001412
uugauaaguacuguauaac

SEQ ID NO: 1001414 - RNA, 19 nt, Artificial Sequence
  Description of Artificial Sequence: Synthetic oligonucleotide
  Sense strand starting at position 500 of SEQ ID NO: 914405
ugacaagaauauucuuugu

SEQ ID NO: 1001415 - RNA, 19 nt, Artificial Sequence
  Description of Artificial Sequence: Synthetic oligonucleotide
  Antisense strand to SEQ ID NO: 1001414
acaaagaauauucuuguca

SEQ ID NO: 1001416 - RNA, 19 nt, Artificial Sequence
  Description of Artificial Sequence: Synthetic oligonucleotide
  Sense strand starting at position 999 of SEQ ID NO: 914405
agaugaaguucccuuaaag

SEQ ID NO: 1001417 - RNA, 19 nt, Artificial Sequence
  Description of Artificial Sequence: Synthetic oligonucleotide
  Antisense strand to SEQ ID NO: 1001416
cuuuaagggaacuucaucu

SEQ ID NO: 1001418 - RNA, 19 nt, Artificial Sequence
  Description of Artificial Sequence: Synthetic oligonucleotide
  Sense strand starting at position 1045 of SEQ ID NO: 914405
aggcaaaugauguauguca

SEQ ID NO: 1001419 - RNA, 19 nt, Artificial Sequence
  Description of Artificial Sequence: Synthetic oligonucleotide
  Antisense strand to SEQ ID NO: 1001418
ugacauacaucauuugccu

SEQ ID NO: 1001420 - RNA, 19 nt, Artificial Sequence
  Description of Artificial Sequence: Synthetic oligonucleotide
  Sense strand starting at position 1094 of SEQ ID NO: 914405
ccaauauaguuugcacuga

SEQ ID NO: 1001421 - RNA, 19 nt, Artificial Sequence
  Description of Artificial Sequence: Synthetic oligonucleotide
  Antisense strand to SEQ ID NO: 1001420
ucagugcaaacuauauugg

SEQ ID NO: 1001422 - RNA, 19 nt, Artificial Sequence
  Description of Artificial Sequence: Synthetic oligonucleotide
  Sense strand starting at position 1148 of SEQ ID NO: 914405
gggugucaacaguaacaga

SEQ ID NO: 1001423 - RNA, 19 nt, Artificial Sequence
  Description of Artificial Sequence: Synthetic oligonucleotide
  Antisense strand to SEQ ID NO: 1001422
ucuguuacuguugacaccc

SEQ ID NO: 1001424 - RNA, 19 nt, Artificial Sequence
  Description of Artificial Sequence: Synthetic oligonucleotide
  Sense strand starting at position 1189 of SEQ ID NO: 914405
augcaaagauguccuaaau

SEQ ID NO: 1001425 - RNA, 19 nt, Artificial Sequence
  Description of Artificial Sequence: Synthetic oligonucleotide
  Antisense strand to SEQ ID NO: 1001424
auuuaggacaucuuugcau

SEQ ID NO: 1001426 - RNA, 19 nt, Artificial Sequence
  Description of Artificial Sequence: Synthetic oligonucleotide
  Sense strand starting at position 2049 of SEQ ID NO: 914405
gagguugacgggugcagaa

SEQ ID NO: 1001427 - RNA, 19 nt, Artificial Sequence
  Description of Artificial Sequence: Synthetic oligonucleotide
  Antisense strand to SEQ ID NO: 1001426
uucugcacccgucaaccuc

SEQ ID NO: 1001428 - RNA, 19 nt, Artificial Sequence
  Description of Artificial Sequence: Synthetic oligonucleotide
  Sense strand starting at position 2076 of SEQ ID NO: 914405
ggcgcuuuccuggaagaga

SEQ ID NO: 1001429 - RNA, 19 nt, Artificial Sequence
  Description of Artificial Sequence: Synthetic oligonucleotide
  Antisense strand to SEQ ID NO: 1001428
ucucuuccaggaaagcgcc

SEQ ID NO: 1001430 - RNA, 19 nt, Artificial Sequence
  Description of Artificial Sequence: Synthetic oligonucleotide
  Sense strand starting at position 2148 of SEQ ID NO: 914405
ggaacuagauaugaagaga

SEQ ID NO: 1001431 - RNA, 19 nt, Artificial Sequence
  Description of Artificial Sequence: Synthetic oligonucleotide
  Antisense strand to SEQ ID NO: 1001430
ucucuucauaucuaguucc

SEQ ID NO: 1001432 - RNA, 19 nt, Artificial Sequence
  Description of Artificial Sequence: Synthetic oligonucleotide
  Sense strand starting at position 2239 of SEQ ID NO: 914405
cgguuugucaaggaacuga

SEQ ID NO: 1001433 - RNA, 19 nt, Artificial Sequence
  Description of Artificial Sequence: Synthetic oligonucleotide
  Antisense strand to SEQ ID NO: 1001432
ucaguuccuugacaaaccg

SEQ ID NO: 1001434 - RNA, 19 nt, Artificial Sequence
  Description of Artificial Sequence: Synthetic oligonucleotide
  Sense strand starting at position 2282 of SEQ ID NO: 914405
auagaaugauuacccguua

SEQ ID NO: 1001435 - RNA, 19 nt, Artificial Sequence
  Description of Artificial Sequence: Synthetic oligonucleotide
  Antisense strand to SEQ ID NO: 1001434
uaacggguaaucauucuau

SEQ ID NO: 1001436 - RNA, 19 nt, Artificial Sequence
  Description of Artificial Sequence: Synthetic oligonucleotide
  Sense strand starting at position 2287 of SEQ ID NO: 914405
augauuacccguuagaacu

SEQ ID NO: 1001437 - RNA, 19 nt, Artificial Sequence
  Description of Artificial Sequence: Synthetic oligonucleotide
  Antisense strand to SEQ ID NO: 1001436
aguucuaacggguaaucau

SEQ ID NO: 1001438 - RNA, 19 nt, Artificial Sequence
  Description of Artificial Sequence: Synthetic oligonucleotide
  Sense strand starting at position 2293 of SEQ ID NO: 914405
acccguuagaacugagaga

SEQ ID NO: 1001439 - RNA, 19 nt, Artificial Sequence
  Description of Artificial Sequence: Synthetic oligonucleotide
  Antisense strand to SEQ ID NO: 1001438
ucucucaguucuaacgggu

SEQ ID NO: 1001440 - RNA, 19 nt, Artificial Sequence
  Description of Artificial Sequence: Synthetic oligonucleotide
  Sense strand starting at position 2332 of SEQ ID NO: 914405
auggaaugauuauccguua

SEQ ID NO: 1001441 - RNA, 19 nt, Artificial Sequence
  Description of Artificial Sequence: Synthetic oligonucleotide
  Antisense strand to SEQ ID NO: 1001440
uaacggauaaucauuccau

SEQ ID NO: 1001442 - RNA, 19 nt, Artificial Sequence
  Description of Artificial Sequence: Synthetic oligonucleotide
  Sense strand starting at position 2335 of SEQ ID NO: 914405
gaaugauuauccguuaguu

SEQ ID NO: 1001443 - RNA, 19 nt, Artificial Sequence
  Description of Artificial Sequence: Synthetic oligonucleotide
  Antisense strand to SEQ ID NO: 1001442
aacuaacggauaaucauuc

SEQ ID NO: 1001444 - RNA, 19 nt, Artificial Sequence
  Description of Artificial Sequence: Synthetic oligonucleotide
  Sense strand starting at position 2337 of SEQ ID NO: 914405
augauuauccguuaguuaa

SEQ ID NO: 1001445 - RNA, 19 nt, Artificial Sequence
  Description of Artificial Sequence: Synthetic oligonucleotide
  Antisense strand to SEQ ID NO: 1001444
uuaacuaacggauaaucau

SEQ ID NO: 1001446 - RNA, 19 nt, Artificial Sequence
  Description of Artificial Sequence: Synthetic oligonucleotide
  Sense strand starting at position 2461 of SEQ ID NO: 914405
ggagauuuaucugaagacg

SEQ ID NO: 1001447 - RNA, 19 nt, Artificial Sequence
  Description of Artificial Sequence: Synthetic oligonucleotide
  Antisense strand to SEQ ID NO: 1001446
cgucuucagauaaaucucc

SEQ ID NO: 1001448 - RNA, 19 nt, Artificial Sequence
  Description of Artificial Sequence: Synthetic oligonucleotide
  Sense strand starting at position 2521 of SEQ ID NO: 914405
gcaauaauccuaugguaga

SEQ ID NO: 1001449 - RNA, 19 nt, Artificial Sequence
  Description of Artificial Sequence: Synthetic oligonucleotide
  Antisense strand to SEQ ID NO: 1001448
ucuaccauaggauuauugc

SEQ ID NO: 1001450 - RNA, 19 nt, Artificial Sequence
  Description of Artificial Sequence: Synthetic oligonucleotide
  Sense strand starting at position 2528 of SEQ ID NO: 914405
uccuaugguagagguauua

SEQ ID NO: 1001451 - RNA, 19 nt, Artificial Sequence
  Description of Artificial Sequence: Synthetic oligonucleotide
  Antisense strand to SEQ ID NO: 1001450
uaauaccucuaccauagga

SEQ ID NO: 1001452 - RNA, 19 nt, Artificial Sequence
  Description of Artificial Sequence: Synthetic oligonucleotide
  Sense strand starting at position 2567 of SEQ ID NO: 914405
acauuaauugcucaagguc

SEQ ID NO: 1001453 - RNA, 19 nt, Artificial Sequence
  Description of Artificial Sequence: Synthetic oligonucleotide
  Antisense strand to SEQ ID NO: 1001452
gaccuugagcaauuaaugu

SEQ ID NO: 1001454 - RNA, 19 nt, Artificial Sequence
  Description of Artificial Sequence: Synthetic oligonucleotide
  Sense strand starting at position 2624 of SEQ ID NO: 914405
ggcauucuggcucacaagu

SEQ ID NO: 1001455 - RNA, 19 nt, Artificial Sequence
  Description of Artificial Sequence: Synthetic oligonucleotide
  Antisense strand to SEQ ID NO: 1001454
acuugugagccagaaugcc

SEQ ID NO: 1001456 - RNA, 19 nt, Artificial Sequence
  Description of Artificial Sequence: Synthetic oligonucleotide
  Sense strand starting at position 2637 of SEQ ID NO: 914405
acaaguccaugcuuugaaa

SEQ ID NO: 1001457 - RNA, 19 nt, Artificial Sequence
  Description of Artificial Sequence: Synthetic oligonucleotide
  Antisense strand to SEQ ID NO: 1001456
uuucaaagcauggacuugu

SEQ ID NO: 1001458 - RNA, 19 nt, Artificial Sequence
  Description of Artificial Sequence: Synthetic oligonucleotide
  Sense strand starting at position 2742 of SEQ ID NO: 914405
cagucagguguuggaacaa

SEQ ID NO: 1001459 - RNA, 19 nt, Artificial Sequence
  Description of Artificial Sequence: Synthetic oligonucleotide
  Antisense strand to SEQ ID NO: 1001458
uuguuccaacaccugacug

SEQ ID NO: 1001460 - RNA, 19 nt, Artificial Sequence
  Description of Artificial Sequence: Synthetic oligonucleotide
  Sense strand starting at position 2787 of SEQ ID NO: 914405
ugauuacucugacuuguca

SEQ ID NO: 1001461 - RNA, 19 nt, Artificial Sequence
  Description of Artificial Sequence: Synthetic oligonucleotide
  Antisense strand to SEQ ID NO: 1001460
ugacaagucagaguaauca

SEQ ID NO: 1001462 - RNA, 19 nt, Artificial Sequence
  Description of Artificial Sequence: Synthetic oligonucleotide
  Sense strand starting at position 2795 of SEQ ID NO: 914405
cugacuugucaggguccaa

SEQ ID NO: 1001463 - RNA, 19 nt, Artificial Sequence
  Description of Artificial Sequence: Synthetic oligonucleotide
  Antisense strand to SEQ ID NO: 1001462
uuggacccugacaagucag

SEQ ID NO: 1001464 - RNA, 19 nt, Artificial Sequence
  Description of Artificial Sequence: Synthetic oligonucleotide
  Sense strand starting at position 2817 of SEQ ID NO: 914405
gaaguaaggccuuaucuga

SEQ ID NO: 1001465 - RNA, 19 nt, Artificial Sequence
  Description of Artificial Sequence: Synthetic oligonucleotide
  Antisense strand to SEQ ID NO: 1001464
ucagauaaggccuuacuuc

SEQ ID NO: 1001466 - RNA, 19 nt, Artificial Sequence
  Description of Artificial Sequence: Synthetic oligonucleotide
  Sense strand starting at position 2837 of SEQ ID NO: 914405
aggacaaugugagaauuua

SEQ ID NO: 1001467 - RNA, 19 nt, Artificial Sequence
  Description of Artificial Sequence: Synthetic oligonucleotide
  Antisense strand to SEQ ID NO: 1001466
uaaauucucacauuguccu

SEQ ID NO: 1001468 - RNA, 19 nt, Artificial Sequence
  Description of Artificial Sequence: Synthetic oligonucleotide
  Sense strand starting at position 2899 of SEQ ID NO: 914405
ggugcugauccacaaccuu

SEQ ID NO: 1001469 - RNA, 19 nt, Artificial Sequence
  Description of Artificial Sequence: Synthetic oligonucleotide
  Antisense strand to SEQ ID NO: 1001468
aagguuguggaucagcacc

SEQ ID NO: 1001470 - RNA, 19 nt, Artificial Sequence
  Description of Artificial Sequence: Synthetic oligonucleotide
  Sense strand starting at position 3061 of SEQ ID NO: 914405
cucauaagucauggagaca

SEQ ID NO: 1001471 - RNA, 19 nt, Artificial Sequence
  Description of Artificial Sequence: Synthetic oligonucleotide
  Antisense strand to SEQ ID NO: 1001470
ugucuccaugacuuaugag

SEQ ID NO: 1001472 - RNA, 19 nt, Artificial Sequence
  Description of Artificial Sequence: Synthetic oligonucleotide
  Sense strand starting at position 3148 of SEQ ID NO: 914405
cccugagggcuaugagaag

SEQ ID NO: 1001473 - RNA, 19 nt, Artificial Sequence
  Description of Artificial Sequence: Synthetic oligonucleotide
  Antisense strand to SEQ ID NO: 1001472
cuucucauagcccucaggg

SEQ ID NO: 1001474 - RNA, 19 nt, Artificial Sequence
  Description of Artificial Sequence: Synthetic oligonucleotide
  Sense strand starting at position 3285 of SEQ ID NO: 914405
augaaaugaucccagaaua

SEQ ID NO: 1001475 - RNA, 19 nt, Artificial Sequence
  Description of Artificial Sequence: Synthetic oligonucleotide
  Antisense strand to SEQ ID NO: 1001474
uauucugggaucauuucau

SEQ ID NO: 1001476 - RNA, 19 nt, Artificial Sequence
  Description of Artificial Sequence: Synthetic oligonucleotide
  Sense strand starting at position 213 of SEQ ID NO: 914406
acuuaaagauacgcuuaua

SEQ ID NO: 1001477 - RNA, 19 nt, Artificial Sequence
  Description of Artificial Sequence: Synthetic oligonucleotide
  Antisense strand to SEQ ID NO: 1001476
uauaagcguaucuuuaagu

SEQ ID NO: 1001478 - RNA, 19 nt, Artificial Sequence
  Description of Artificial Sequence: Synthetic oligonucleotide
  Sense strand starting at position 223 of SEQ ID NO: 914406
acgcuuauaugauugggaa

SEQ ID NO: 1001479 - RNA, 19 nt, Artificial Sequence
  Description of Artificial Sequence: Synthetic oligonucleotide
  Antisense strand to SEQ ID NO: 1001478
uucccaaucauauaagcgu

SEQ ID NO: 1001480 - RNA, 19 nt, Artificial Sequence
  Description of Artificial Sequence: Synthetic oligonucleotide
  Sense strand starting at position 224 of SEQ ID NO: 914406
cgcuuauaugauugggaaa

SEQ ID NO: 1001481 - RNA, 19 nt, Artificial Sequence
  Description of Artificial Sequence: Synthetic oligonucleotide
  Antisense strand to SEQ ID NO: 1001480
uuucccaaucauauaagcg

SEQ ID NO: 1001482 - RNA, 19 nt, Artificial Sequence
  Description of Artificial Sequence: Synthetic oligonucleotide
  Sense strand starting at position 225 of SEQ ID NO: 914406
gcuuauaugauugggaaag

SEQ ID NO: 1001483 - RNA, 19 nt, Artificial Sequence
  Description of Artificial Sequence: Synthetic oligonucleotide
  Antisense strand to SEQ ID NO: 1001482
cuuucccaaucauauaagc

SEQ ID NO: 1001484 - RNA, 19 nt, Artificial Sequence
  Description of Artificial Sequence: Synthetic oligonucleotide
  Sense strand starting at position 236 of SEQ ID NO: 914406
ugggaaaggucuucaaggu

SEQ ID NO: 1001485 - RNA, 19 nt, Artificial Sequence
  Description of Artificial Sequence: Synthetic oligonucleotide
  Antisense strand to SEQ ID NO: 1001484
accuugaagaccuuuccca

SEQ ID NO: 1001486 - RNA, 19 nt, Artificial Sequence
  Description of Artificial Sequence: Synthetic oligonucleotide
  Sense strand starting at position 365 of SEQ ID NO: 914406
ccaaacaggugucugauau

SEQ ID NO: 1001487 - RNA, 19 nt, Artificial Sequence
  Description of Artificial Sequence: Synthetic oligonucleotide
  Antisense strand to SEQ ID NO: 1001486
auaucagacaccuguuugg

SEQ ID NO: 1001488 - RNA, 19 nt, Artificial Sequence
  Description of Artificial Sequence: Synthetic oligonucleotide
  Sense strand starting at position 366 of SEQ ID NO: 914406
caaacaggugucugauauc

SEQ ID NO: 1001489 - RNA, 19 nt, Artificial Sequence
  Description of Artificial Sequence: Synthetic oligonucleotide
  Antisense strand to SEQ ID NO: 1001488
gauaucagacaccuguuug

SEQ ID NO: 1001490 - RNA, 19 nt, Artificial Sequence
  Description of Artificial Sequence: Synthetic oligonucleotide
  Sense strand starting at position 401 of SEQ ID NO: 914406
auuuaaagaucaggaggaa

SEQ ID NO: 1001491 - RNA, 19 nt, Artificial Sequence
  Description of Artificial Sequence: Synthetic oligonucleotide
  Antisense strand to SEQ ID NO: 1001490
uuccuccugaucuuuaaau

SEQ ID NO: 1001492 - RNA, 19 nt, Artificial Sequence
  Description of Artificial Sequence: Synthetic oligonucleotide
  Sense strand starting at position 465 of SEQ ID NO: 914406
guggaucaauuccugacaa

SEQ ID NO: 1001493 - RNA, 19 nt, Artificial Sequence
  Description of Artificial Sequence: Synthetic oligonucleotide
  Antisense strand to SEQ ID NO: 1001492
uugucaggaauugauccac

SEQ ID NO: 1001494 - RNA, 19 nt, Artificial Sequence
  Description of Artificial Sequence: Synthetic oligonucleotide
  Sense strand starting at position 542 of SEQ ID NO: 914406
agaauaaacuucucuaggu

SEQ ID NO: 1001495 - RNA, 19 nt, Artificial Sequence
  Description of Artificial Sequence: Synthetic oligonucleotide
  Antisense strand to SEQ ID NO: 1001494
accuagagaaguuuauucu

SEQ ID NO: 1001496 - RNA, 19 nt, Artificial Sequence
  Description of Artificial Sequence: Synthetic oligonucleotide
  Sense strand starting at position 543 of SEQ ID NO: 914406
gaauaaacuucucuaggug

SEQ ID NO: 1001497 - RNA, 19 nt, Artificial Sequence
  Description of Artificial Sequence: Synthetic oligonucleotide
  Antisense strand to SEQ ID NO: 1001496
caccuagagaaguuuauuc

SEQ ID NO: 1001498 - RNA, 19 nt, Artificial Sequence
  Description of Artificial Sequence: Synthetic oligonucleotide
  Sense strand starting at position 609 of SEQ ID NO: 914406
ugaagucgauuccuuuaaa

SEQ ID NO: 1001499 - RNA, 19 nt, Artificial Sequence
  Description of Artificial Sequence: Synthetic oligonucleotide
  Antisense strand to SEQ ID NO: 1001498
uuuaaaggaaucgacuuca

SEQ ID NO: 1001500 - RNA, 19 nt, Artificial Sequence
  Description of Artificial Sequence: Synthetic oligonucleotide
  Sense strand starting at position 610 of SEQ ID NO: 914406
gaagucgauuccuuuaaag

SEQ ID NO: 1001501 - RNA, 19 nt, Artificial Sequence
  Description of Artificial Sequence: Synthetic oligonucleotide
  Antisense strand to SEQ ID NO: 1001500
cuuuaaaggaaucgacuuc

SEQ ID NO: 1001502 - RNA, 19 nt, Artificial Sequence
  Description of Artificial Sequence: Synthetic oligonucleotide
  Sense strand starting at position 612 of SEQ ID NO: 914406
agucgauuccuuuaaagau

SEQ ID NO: 1001503 - RNA, 19 nt, Artificial Sequence
  Description of Artificial Sequence: Synthetic oligonucleotide
  Antisense strand to SEQ ID NO: 1001502
aucuuuaaaggaaucgacu

SEQ ID NO: 1001504 - RNA, 19 nt, Artificial Sequence
  Description of Artificial Sequence: Synthetic oligonucleotide
  Sense strand starting at position 730 of SEQ ID NO: 914406
uaugaagagcguugaaaug

SEQ ID NO: 1001505 - RNA, 19 nt, Artificial Sequence
  Description of Artificial Sequence: Synthetic oligonucleotide
  Antisense strand to SEQ ID NO: 1001504
cauuucaacgcucuucaua

SEQ ID NO: 1001506 - RNA, 19 nt, Artificial Sequence
  Description of Artificial Sequence: Synthetic oligonucleotide
  Sense strand starting at position 740 of SEQ ID NO: 914406
guugaaaugcacuaucgaa

SEQ ID NO: 1001507 - RNA, 19 nt, Artificial Sequence
  Description of Artificial Sequence: Synthetic oligonucleotide
  Antisense strand to SEQ ID NO: 1001506
uucgauagugcauuucaac

SEQ ID NO: 1001508 - RNA, 19 nt, Artificial Sequence
  Description of Artificial Sequence: Synthetic oligonucleotide
  Sense strand starting at position 896 of SEQ ID NO: 914406
acacuuauccauuguauga

SEQ ID NO: 1001509 - RNA, 19 nt, Artificial Sequence
  Description of Artificial Sequence: Synthetic oligonucleotide
  Antisense strand to SEQ ID NO: 1001508
ucauacaauggauaagugu

SEQ ID NO: 1001510 - RNA, 19 nt, Artificial Sequence
  Description of Artificial Sequence: Synthetic oligonucleotide
  Sense strand starting at position 900 of SEQ ID NO: 914406
uuauccauuguaugaagga

SEQ ID NO: 1001511 - RNA, 19 nt, Artificial Sequence
  Description of Artificial Sequence: Synthetic oligonucleotide
  Antisense strand to SEQ ID NO: 1001510
uccuucauacaauggauaa

SEQ ID NO: 1001512 - RNA, 19 nt, Artificial Sequence
  Description of Artificial Sequence: Synthetic oligonucleotide
  Sense strand starting at position 1004 of SEQ ID NO: 914406
gcaucauauuucucuccga

SEQ ID NO: 1001513 - RNA, 19 nt, Artificial Sequence
  Description of Artificial Sequence: Synthetic oligonucleotide
  Antisense strand to SEQ ID NO: 1001512
ucggagagaaauaugaugc

SEQ ID NO: 1001514 - RNA, 19 nt, Artificial Sequence
  Description of Artificial Sequence: Synthetic oligonucleotide
  Sense strand starting at position 1156 of SEQ ID NO: 914406
agguauuaauauccgacau

SEQ ID NO: 1001515 - RNA, 19 nt, Artificial Sequence
  Description of Artificial Sequence: Synthetic oligonucleotide
  Antisense strand to SEQ ID NO: 1001514
augucggauauuaauaccu

SEQ ID NO: 1001516 - RNA, 19 nt, Artificial Sequence
  Description of Artificial Sequence: Synthetic oligonucleotide
  Sense strand starting at position 1568 of SEQ ID NO: 914406
gcgugugggccucuucaaa

SEQ ID NO: 1001517 - RNA, 19 nt, Artificial Sequence
  Description of Artificial Sequence: Synthetic oligonucleotide
  Antisense strand to SEQ ID NO: 1001516
uuugaagaggcccacacgc

SEQ ID NO: 1001518 - RNA, 19 nt, Artificial Sequence
  Description of Artificial Sequence: Synthetic oligonucleotide
  Sense strand starting at position 2027 of SEQ ID NO: 914406
gcauacuggcccgaauaaa

SEQ ID NO: 1001519 - RNA, 19 nt, Artificial Sequence
  Description of Artificial Sequence: Synthetic oligonucleotide
  Antisense strand to SEQ ID NO: 1001518
uuuauucgggccaguaugc

SEQ ID NO: 1001520 - RNA, 19 nt, Artificial Sequence
  Description of Artificial Sequence: Synthetic oligonucleotide
  Sense strand starting at position 2048 of SEQ ID NO: 914406
agauguguccgugacuaaa

SEQ ID NO: 1001521 - RNA, 19 nt, Artificial Sequence
  Description of Artificial Sequence: Synthetic oligonucleotide
  Antisense strand to SEQ ID NO: 1001520
uuuagucacggacacaucu

SEQ ID NO: 1001522 - RNA, 19 nt, Artificial Sequence
  Description of Artificial Sequence: Synthetic oligonucleotide
  Sense strand starting at position 2282 of SEQ ID NO: 914406
ggcaccuauguuuaaaugu

SEQ ID NO: 1001523 - RNA, 19 nt, Artificial Sequence
  Description of Artificial Sequence: Synthetic oligonucleotide
  Antisense strand to SEQ ID NO: 1001522
acauuuaaacauaggugcc

SEQ ID NO: 1001524 - RNA, 19 nt, Artificial Sequence
  Description of Artificial Sequence: Synthetic oligonucleotide
  Sense strand starting at position 2301 of SEQ ID NO: 914406
aauguuugaggcugacuga

SEQ ID NO: 1001525 - RNA, 19 nt, Artificial Sequence
  Description of Artificial Sequence: Synthetic oligonucleotide
  Antisense strand to SEQ ID NO: 1001524
ucagucagccucaaacauu

SEQ ID NO: 1001526 - RNA, 19 nt, Artificial Sequence
  Description of Artificial Sequence: Synthetic oligonucleotide
  Sense strand starting at position 2302 of SEQ ID NO: 914406
auguuugaggcugacugaa

SEQ ID NO: 1001527 - RNA, 19 nt, Artificial Sequence
  Description of Artificial Sequence: Synthetic oligonucleotide
  Antisense strand to SEQ ID NO: 1001526
uucagucagccucaaacau

SEQ ID NO: 1001528 - RNA, 19 nt, Artificial Sequence
  Description of Artificial Sequence: Synthetic oligonucleotide
  Sense strand starting at position 2312 of SEQ ID NO: 914406
cugacugaauccucacgaa

SEQ ID NO: 1001529 - RNA, 19 nt, Artificial Sequence
  Description of Artificial Sequence: Synthetic oligonucleotide
  Antisense strand to SEQ ID NO: 1001528
uucgugaggauucagucag

SEQ ID NO: 1001530 - RNA, 19 nt, Artificial Sequence
  Description of Artificial Sequence: Synthetic oligonucleotide
  Sense strand starting at position 2451 of SEQ ID NO: 914406
caugaauauuucgcuguuu

SEQ ID NO: 1001531 - RNA, 19 nt, Artificial Sequence
  Description of Artificial Sequence: Synthetic oligonucleotide
  Antisense strand to SEQ ID NO: 1001530
aaacagcgaaauauucaug

SEQ ID NO: 1001532 - RNA, 19 nt, Artificial Sequence
  Description of Artificial Sequence: Synthetic oligonucleotide
  Sense strand starting at position 2803 of SEQ ID NO: 914406
cucugauuccaagaaguuu

SEQ ID NO: 1001533 - RNA, 19 nt, Artificial Sequence
  Description of Artificial Sequence: Synthetic oligonucleotide
  Antisense strand to SEQ ID NO: 1001532
aaacuucuuggaaucagag

SEQ ID NO: 1001534 - RNA, 19 nt, Artificial Sequence
  Description of Artificial Sequence: Synthetic oligonucleotide
  Sense strand starting at position 2968 of SEQ ID NO: 914406
uuauuaaggugucugaauu

SEQ ID NO: 1001535 - RNA, 19 nt, Artificial Sequence
  Description of Artificial Sequence: Synthetic oligonucleotide
  Antisense strand to SEQ ID NO: 1001534
aauucagacaccuuaauaa

SEQ ID NO: 1001536 - RNA, 19 nt, Artificial Sequence
  Description of Artificial Sequence: Synthetic oligonucleotide
  Sense strand starting at position 3398 of SEQ ID NO: 914406
uaauaagugguauggauaa

SEQ ID NO: 1001537 - RNA, 19 nt, Artificial Sequence
  Description of Artificial Sequence: Synthetic oligonucleotide
  Antisense strand to SEQ ID NO: 1001536
uuauccauaccacuuauua

SEQ ID NO: 1001538 - RNA, 19 nt, Artificial Sequence
  Description of Artificial Sequence: Synthetic oligonucleotide
  Sense strand starting at position 3440 of SEQ ID NO: 914406
gagagcagucugugaaaca

SEQ ID NO: 1001539 - RNA, 19 nt, Artificial Sequence
  Description of Artificial Sequence: Synthetic oligonucleotide
  Antisense strand to SEQ ID NO: 1001538
uguuucacagacugcucuc

SEQ ID NO: 1001540 - RNA, 19 nt, Artificial Sequence
  Description of Artificial Sequence: Synthetic oligonucleotide
  Sense strand starting at position 3452 of SEQ ID NO: 914406
ugaaacaaugcuuagcuau

SEQ ID NO: 1001541 - RNA, 19 nt, Artificial Sequence
  Description of Artificial Sequence: Synthetic oligonucleotide
  Antisense strand to SEQ ID NO: 1001540
auagcuaagcauuguuuca

SEQ ID NO: 1001542 - RNA, 19 nt, Artificial Sequence
  Description of Artificial Sequence: Synthetic oligonucleotide
  Sense strand starting at position 3503 of SEQ ID NO: 914406
acugccuguguacaaauau

SEQ ID NO: 1001543 - RNA, 19 nt, Artificial Sequence
  Description of Artificial Sequence: Synthetic oligonucleotide
  Antisense strand to SEQ ID NO: 1001542
auauuuguacacaggcagu

SEQ ID NO: 1001544 - RNA, 19 nt, Artificial Sequence
  Description of Artificial Sequence: Synthetic oligonucleotide
  Sense strand starting at position 3631 of SEQ ID NO: 914406
gcauaauaguaaguacuau

SEQ ID NO: 1001545 - RNA, 19 nt, Artificial Sequence
  Description of Artificial Sequence: Synthetic oligonucleotide
  Antisense strand to SEQ ID NO: 1001544
auaguacuuacuauuaugc

SEQ ID NO: 1001546 - RNA, 19 nt, Artificial Sequence
  Description of Artificial Sequence: Synthetic oligonucleotide
  Sense strand starting at position 3658 of SEQ ID NO: 914406
aagagaugucaggguuaca

SEQ ID NO: 1001547 - RNA, 19 nt, Artificial Sequence
  Description of Artificial Sequence: Synthetic oligonucleotide
  Antisense strand to SEQ ID NO: 1001546
uguaacccugacaucucuu

SEQ ID NO: 1001548 - RNA, 19 nt, Artificial Sequence
  Description of Artificial Sequence: Synthetic oligonucleotide
  Sense strand starting at position 3846 of SEQ ID NO: 914406
agguucuauuaguuacaau

SEQ ID NO: 1001549 - RNA, 19 nt, Artificial Sequence
  Description of Artificial Sequence: Synthetic oligonucleotide
  Antisense strand to SEQ ID NO: 1001548
auuguaacuaauagaaccu

SEQ ID NO: 1001550 - RNA, 19 nt, Artificial Sequence
  Description of Artificial Sequence: Synthetic oligonucleotide
  Sense strand starting at position 3913 of SEQ ID NO: 914406
cucuaauggguuugacaaa

SEQ ID NO: 1001551 - RNA, 19 nt, Artificial Sequence
  Description of Artificial Sequence: Synthetic oligonucleotide
  Antisense strand to SEQ ID NO: 1001550
uuugucaaacccauuagag

SEQ ID NO: 1001552 - RNA, 19 nt, Artificial Sequence
  Description of Artificial Sequence: Synthetic oligonucleotide
  Sense strand starting at position 3920 of SEQ ID NO: 914406
ggguuugacaaauggugau

SEQ ID NO: 1001553 - RNA, 19 nt, Artificial Sequence
  Description of Artificial Sequence: Synthetic oligonucleotide
  Antisense strand to SEQ ID NO: 1001552
aucaccauuugucaaaccc

SEQ ID NO: 1001554 - RNA, 19 nt, Artificial Sequence
  Description of Artificial Sequence: Synthetic oligonucleotide
  Sense strand starting at position 3930 of SEQ ID NO: 914406
aauggugauuuagaacuau

SEQ ID NO: 1001555 - RNA, 19 nt, Artificial Sequence
  Description of Artificial Sequence: Synthetic oligonucleotide
  Antisense strand to SEQ ID NO: 1001554
auaguucuaaaucaccauu

SEQ ID NO: 1001556 - RNA, 19 nt, Artificial Sequence
  Description of Artificial Sequence: Synthetic oligonucleotide
  Sense strand starting at position 88 of SEQ ID NO: 914407
cugugagucagguaacaga

SEQ ID NO: 1001557 - RNA, 19 nt, Artificial Sequence
  Description of Artificial Sequence: Synthetic oligonucleotide
  Antisense strand to SEQ ID NO: 1001556
ucuguuaccugacucacag

SEQ ID NO: 1001558 - RNA, 19 nt, Artificial Sequence
  Description of Artificial Sequence: Synthetic oligonucleotide
  Sense strand starting at position 208 of SEQ ID NO: 914407
uuccuaggauugcuuauaa

SEQ ID NO: 1001559 - RNA, 19 nt, Artificial Sequence
  Description of Artificial Sequence: Synthetic oligonucleotide
  Antisense strand to SEQ ID NO: 1001558
uuauaagcaauccuaggaa

SEQ ID NO: 1001560 - RNA, 19 nt, Artificial Sequence
  Description of Artificial Sequence: Synthetic oligonucleotide
  Sense strand starting at position 568 of SEQ ID NO: 914407
gagcuaaggucacugaauu

SEQ ID NO: 1001561 - RNA, 19 nt, Artificial Sequence
  Description of Artificial Sequence: Synthetic oligonucleotide
  Antisense strand to SEQ ID NO: 1001560
aauucagugaccuuagcuc

SEQ ID NO: 1001562 - RNA, 19 nt, Artificial Sequence
  Description of Artificial Sequence: Synthetic oligonucleotide
  Sense strand starting at position 681 of SEQ ID NO: 914407
aggcuaagcuuucuuggaa

SEQ ID NO: 1001563 - RNA, 19 nt, Artificial Sequence
  Description of Artificial Sequence: Synthetic oligonucleotide
  Antisense strand to SEQ ID NO: 1001562
uuccaagaaagcuuagccu

SEQ ID NO: 1001564 - RNA, 19 nt, Artificial Sequence
  Description of Artificial Sequence: Synthetic oligonucleotide
  Sense strand starting at position 684 of SEQ ID NO: 914407
cuaagcuuucuuggaauga

SEQ ID NO: 1001565 - RNA, 19 nt, Artificial Sequence
  Description of Artificial Sequence: Synthetic oligonucleotide
  Antisense strand to SEQ ID NO: 1001564
ucauuccaagaaagcuuag

SEQ ID NO: 1001566 - RNA, 19 nt, Artificial Sequence
  Description of Artificial Sequence: Synthetic oligonucleotide
  Sense strand starting at position 688 of SEQ ID NO: 914407
gcuuucuuggaaugaauaa

SEQ ID NO: 1001567 - RNA, 19 nt, Artificial Sequence
  Description of Artificial Sequence: Synthetic oligonucleotide
  Antisense strand to SEQ ID NO: 1001566
uuauucauuccaagaaagc

SEQ ID NO: 1001568 - RNA, 19 nt, Artificial Sequence
  Description of Artificial Sequence: Synthetic oligonucleotide
  Sense strand starting at position 753 of SEQ ID NO: 914407
auuccugaaguuugcuaaa

SEQ ID NO: 1001569 - RNA, 19 nt, Artificial Sequence
  Description of Artificial Sequence: Synthetic oligonucleotide
  Antisense strand to SEQ ID NO: 1001568
uuuagcaaacuucaggaau

SEQ ID NO: 1001570 - RNA, 19 nt, Artificial Sequence
  Description of Artificial Sequence: Synthetic oligonucleotide
  Sense strand starting at position 764 of SEQ ID NO: 914407
uugcuaaaguaugcaaaga

SEQ ID NO: 1001571 - RNA, 19 nt, Artificial Sequence
  Description of Artificial Sequence: Synthetic oligonucleotide
  Antisense strand to SEQ ID NO: 1001570
ucuuugcauacuuuagcaa

SEQ ID NO: 1001572 - RNA, 19 nt, Artificial Sequence
  Description of Artificial Sequence: Synthetic oligonucleotide
  Sense strand starting at position 859 of SEQ ID NO: 914407
agcugacagcuugaauaag

SEQ ID NO: 1001573 - RNA, 19 nt, Artificial Sequence
  Description of Artificial Sequence: Synthetic oligonucleotide
  Antisense strand to SEQ ID NO: 1001572
cuuauucaagcugucagcu

SEQ ID NO: 1001574 - RNA, 19 nt, Artificial Sequence
  Description of Artificial Sequence: Synthetic oligonucleotide
  Sense strand starting at position 944 of SEQ ID NO: 914407
gguugugccgcugaaauuu

SEQ ID NO: 1001575 - RNA, 19 nt, Artificial Sequence
  Description of Artificial Sequence: Synthetic oligonucleotide
  Antisense strand to SEQ ID NO: 1001574
aaauuucagcggcacaacc

SEQ ID NO: 1001576 - RNA, 19 nt, Artificial Sequence
  Description of Artificial Sequence: Synthetic oligonucleotide
  Sense strand starting at position 953 of SEQ ID NO: 914407
gcugaaauuucugaccaag

SEQ ID NO: 1001577 - RNA, 19 nt, Artificial Sequence
  Description of Artificial Sequence: Synthetic oligonucleotide
  Antisense strand to SEQ ID NO: 1001576
cuuggucagaaauuucagc

SEQ ID NO: 1001578 - RNA, 19 nt, Artificial Sequence
  Description of Artificial Sequence: Synthetic oligonucleotide
  Sense strand starting at position 975 of SEQ ID NO: 914407
ggugacuagucuccugaau

SEQ ID NO: 1001579 - RNA, 19 nt, Artificial Sequence
  Description of Artificial Sequence: Synthetic oligonucleotide
  Antisense strand to SEQ ID NO: 1001578
auucaggagacuagucacc

SEQ ID NO: 1001580 - RNA, 19 nt, Artificial Sequence
  Description of Artificial Sequence: Synthetic oligonucleotide
  Sense strand starting at position 1161 of SEQ ID NO: 914407
aacgaacccugguuugaaa

SEQ ID NO: 1001581 - RNA, 19 nt, Artificial Sequence
  Description of Artificial Sequence: Synthetic oligonucleotide
  Antisense strand to SEQ ID NO: 1001580
uuucaaaccaggguucguu

SEQ ID NO: 1001582 - RNA, 19 nt, Artificial Sequence
  Description of Artificial Sequence: Synthetic oligonucleotide
  Sense strand starting at position 1222 of SEQ ID NO: 914407
uugcuuguuccugaggaac

SEQ ID NO: 1001583 - RNA, 19 nt, Artificial Sequence
  Description of Artificial Sequence: Synthetic oligonucleotide
  Antisense strand to SEQ ID NO: 1001582
guuccucaggaacaagcaa

SEQ ID NO: 1001584 - RNA, 19 nt, Artificial Sequence
  Description of Artificial Sequence: Synthetic oligonucleotide
  Sense strand starting at position 1309 of SEQ ID NO: 914407
gguccuaauugaccgggaa

SEQ ID NO: 1001585 - RNA, 19 nt, Artificial Sequence
  Description of Artificial Sequence: Synthetic oligonucleotide
  Antisense strand to SEQ ID NO: 1001584
uucccggucaauuaggacc

SEQ ID NO: 1001586 - RNA, 19 nt, Artificial Sequence
  Description of Artificial Sequence: Synthetic oligonucleotide
  Sense strand starting at position 2093 of SEQ ID NO: 914407
accauaaguugagucgaaa

SEQ ID NO: 1001587 - RNA, 19 nt, Artificial Sequence
  Description of Artificial Sequence: Synthetic oligonucleotide
  Antisense strand to SEQ ID NO: 1001586
uuucgacucaacuuauggu

SEQ ID NO: 1001588 - RNA, 19 nt, Artificial Sequence
  Description of Artificial Sequence: Synthetic oligonucleotide
  Sense strand starting at position 2227 of SEQ ID NO: 914407
guuugacauuagccaggau

SEQ ID NO: 1001589 - RNA, 19 nt, Artificial Sequence
  Description of Artificial Sequence: Synthetic oligonucleotide
  Antisense strand to SEQ ID NO: 1001588
auccuggcuaaugucaaac

SEQ ID NO: 1001590 - RNA, 19 nt, Artificial Sequence
  Description of Artificial Sequence: Synthetic oligonucleotide
  Sense strand starting at position 2230 of SEQ ID NO: 914407
ugacauuagccaggauaug

SEQ ID NO: 1001591 - RNA, 19 nt, Artificial Sequence
  Description of Artificial Sequence: Synthetic oligonucleotide
  Antisense strand to SEQ ID NO: 1001590
cauauccuggcuaauguca

SEQ ID NO: 1001592 - RNA, 19 nt, Artificial Sequence
  Description of Artificial Sequence: Synthetic oligonucleotide
  Sense strand starting at position 2231 of SEQ ID NO: 914407
gacauuagccaggauaugu

SEQ ID NO: 1001593 - RNA, 19 nt, Artificial Sequence
  Description of Artificial Sequence: Synthetic oligonucleotide
  Antisense strand to SEQ ID NO: 1001592
acauauccuggcuaauguc

SEQ ID NO: 1001594 - RNA, 19 nt, Artificial Sequence
  Description of Artificial Sequence: Synthetic oligonucleotide
  Sense strand starting at position 2242 of SEQ ID NO: 914407
ggauauguaugccuuggga

SEQ ID NO: 1001595 - RNA, 19 nt, Artificial Sequence
  Description of Artificial Sequence: Synthetic oligonucleotide
  Antisense strand to SEQ ID NO: 1001594
ucccaaggcauacauaucc

SEQ ID NO: 1001596 - RNA, 19 nt, Artificial Sequence
  Description of Artificial Sequence: Synthetic oligonucleotide
  Sense strand starting at position 2251 of SEQ ID NO: 914407
ugccuugggauccagcaau

SEQ ID NO: 1001597 - RNA, 19 nt, Artificial Sequence
  Description of Artificial Sequence: Synthetic oligonucleotide
  Antisense strand to SEQ ID NO: 1001596
auugcuggaucccaaggca

SEQ ID NO: 1001598 - RNA, 19 nt, Artificial Sequence
  Description of Artificial Sequence: Synthetic oligonucleotide
  Sense strand starting at position 2309 of SEQ ID NO: 914407
gugcaugcaaacuggaaau

SEQ ID NO: 1001599 - RNA, 19 nt, Artificial Sequence
  Description of Artificial Sequence: Synthetic oligonucleotide
  Antisense strand to SEQ ID NO: 1001598
auuuccaguuugcaugcac

SEQ ID NO: 1001600 - RNA, 19 nt, Artificial Sequence
  Description of Artificial Sequence: Synthetic oligonucleotide
  Sense strand starting at position 2352 of SEQ ID NO: 914407
gguuaauuagauuaugcua

SEQ ID NO: 1001601 - RNA, 19 nt, Artificial Sequence
  Description of Artificial Sequence: Synthetic oligonucleotide
  Antisense strand to SEQ ID NO: 1001600
uagcauaaucuaauuaacc

SEQ ID NO: 1001602 - RNA, 19 nt, Artificial Sequence
  Description of Artificial Sequence: Synthetic oligonucleotide
  Sense strand starting at position 2549 of SEQ ID NO: 914407
uccauacuuaguggaggaa

SEQ ID NO: 1001603 - RNA, 19 nt, Artificial Sequence
  Description of Artificial Sequence: Synthetic oligonucleotide
  Antisense strand to SEQ ID NO: 1001602
uuccuccacuaaguaugga

SEQ ID NO: 1001604 - RNA, 19 nt, Artificial Sequence
  Description of Artificial Sequence: Synthetic oligonucleotide
  Sense strand starting at position 2610 of SEQ ID NO: 914407
cccacuuagugauucccau

SEQ ID NO: 1001605 - RNA, 19 nt, Artificial Sequence
  Description of Artificial Sequence: Synthetic oligonucleotide
  Antisense strand to SEQ ID NO: 1001604
augggaaucacuaaguggg

SEQ ID NO: 1001606 - RNA, 19 nt, Artificial Sequence
  Description of Artificial Sequence: Synthetic oligonucleotide
  Sense strand starting at position 2617 of SEQ ID NO: 914407
agugauucccaucaaguua

SEQ ID NO: 1001607 - RNA, 19 nt, Artificial Sequence
  Description of Artificial Sequence: Synthetic oligonucleotide
  Antisense strand to SEQ ID NO: 1001606
uaacuugaugggaaucacu

SEQ ID NO: 1001608 - RNA, 19 nt, Artificial Sequence
  Description of Artificial Sequence: Synthetic oligonucleotide
  Sense strand starting at position 2693 of SEQ ID NO: 914407
gaccuuaaugaugguuaua

SEQ ID NO: 1001609 - RNA, 19 nt, Artificial Sequence
  Description of Artificial Sequence: Synthetic oligonucleotide
  Antisense strand to SEQ ID NO: 1001608
uauaaccaucauuaagguc

SEQ ID NO: 1001610 - RNA, 19 nt, Artificial Sequence
  Description of Artificial Sequence: Synthetic oligonucleotide
  Sense strand starting at position 2695 of SEQ ID NO: 914407
ccuuaaugaugguuauaua

SEQ ID NO: 1001611 - RNA, 19 nt, Artificial Sequence
  Description of Artificial Sequence: Synthetic oligonucleotide
  Antisense strand to SEQ ID NO: 1001610
uauauaaccaucauuaagg

SEQ ID NO: 1001612 - RNA, 19 nt, Artificial Sequence
  Description of Artificial Sequence: Synthetic oligonucleotide
  Sense strand starting at position 2840 of SEQ ID NO: 914407
acaaguagauuugaauaac

SEQ ID NO: 1001613 - RNA, 19 nt, Artificial Sequence
  Description of Artificial Sequence: Synthetic oligonucleotide
  Antisense strand to SEQ ID NO: 1001612
guuauucaaaucuacuugu

SEQ ID NO: 1001614 - RNA, 19 nt, Artificial Sequence
  Description of Artificial Sequence: Synthetic oligonucleotide
  Sense strand starting at position 3006 of SEQ ID NO: 914407
uaacaauuaguugagcgua

SEQ ID NO: 1001615 - RNA, 19 nt, Artificial Sequence
  Description of Artificial Sequence: Synthetic oligonucleotide
  Antisense strand to SEQ ID NO: 1001614
uacgcucaacuaauuguua

SEQ ID NO: 1001616 - RNA, 19 nt, Artificial Sequence
  Description of Artificial Sequence: Synthetic oligonucleotide
  Sense strand starting at position 3177 of SEQ ID NO: 914407
aagagaauucuucggccag

SEQ ID NO: 1001617 - RNA, 19 nt, Artificial Sequence
  Description of Artificial Sequence: Synthetic oligonucleotide
  Antisense strand to SEQ ID NO: 1001616
cuggccgaagaauucucuu

SEQ ID NO: 1001618 - RNA, 19 nt, Artificial Sequence
  Description of Artificial Sequence: Synthetic oligonucleotide
  Sense strand starting at position 3643 of SEQ ID NO: 914407
cagggaccuugucuuauga

SEQ ID NO: 1001619 - RNA, 19 nt, Artificial Sequence
  Description of Artificial Sequence: Synthetic oligonucleotide
  Antisense strand to SEQ ID NO: 1001618
ucauaagacaaggucccug

SEQ ID NO: 1001620 - RNA, 19 nt, Artificial Sequence
  Description of Artificial Sequence: Synthetic oligonucleotide
  Sense strand starting at position 3650 of SEQ ID NO: 914407
cuugucuuaugaguacaca

SEQ ID NO: 1001621 - RNA, 19 nt, Artificial Sequence
  Description of Artificial Sequence: Synthetic oligonucleotide
  Antisense strand to SEQ ID NO: 1001620
uguguacucauaagacaag

SEQ ID NO: 1001622 - RNA, 19 nt, Artificial Sequence
  Description of Artificial Sequence: Synthetic oligonucleotide
  Sense strand starting at position 3673 of SEQ ID NO: 914407
gaccucaaugucuguagaa

SEQ ID NO: 1001623 - RNA, 19 nt, Artificial Sequence
  Description of Artificial Sequence: Synthetic oligonucleotide
  Antisense strand to SEQ ID NO: 1001622
uucuacagacauugagguc

SEQ ID NO: 1001624 - RNA, 19 nt, Artificial Sequence
  Description of Artificial Sequence: Synthetic oligonucleotide
  Sense strand starting at position 3674 of SEQ ID NO: 914407
accucaaugucuguagaag

SEQ ID NO: 1001625 - RNA, 19 nt, Artificial Sequence
  Description of Artificial Sequence: Synthetic oligonucleotide
  Antisense strand to SEQ ID NO: 1001624
cuucuacagacauugaggu

SEQ ID NO: 1001626 - RNA, 19 nt, Artificial Sequence
  Description of Artificial Sequence: Synthetic oligonucleotide
  Sense strand starting at position 3675 of SEQ ID NO: 914407
ccucaaugucuguagaaga

SEQ ID NO: 1001627 - RNA, 19 nt, Artificial Sequence
  Description of Artificial Sequence: Synthetic oligonucleotide
  Antisense strand to SEQ ID NO: 1001626
ucuucuacagacauugagg

SEQ ID NO: 1001628 - RNA, 19 nt, Artificial Sequence
  Description of Artificial Sequence: Synthetic oligonucleotide
  Sense strand starting at position 3708 of SEQ ID NO: 914407
agcugaaaccauuaguguu

SEQ ID NO: 1001629 - RNA, 19 nt, Artificial Sequence
  Description of Artificial Sequence: Synthetic oligonucleotide
  Antisense strand to SEQ ID NO: 1001628
aacacuaaugguuucagcu

SEQ ID NO: 1001630 - RNA, 19 nt, Artificial Sequence
  Description of Artificial Sequence: Synthetic oligonucleotide
  Sense strand starting at position 3710 of SEQ ID NO: 914407
cugaaaccauuaguguuau

SEQ ID NO: 1001631 - RNA, 19 nt, Artificial Sequence
  Description of Artificial Sequence: Synthetic oligonucleotide
  Antisense strand to SEQ ID NO: 1001630
auaacacuaaugguuucag

SEQ ID NO: 1001632 - RNA, 19 nt, Artificial Sequence
  Description of Artificial Sequence: Synthetic oligonucleotide
  Sense strand starting at position 3814 of SEQ ID NO: 914407
uggcuuccagaauauguua

SEQ ID NO: 1001633 - RNA, 19 nt, Artificial Sequence
  Description of Artificial Sequence: Synthetic oligonucleotide
  Antisense strand to SEQ ID NO: 1001632
uaacauauucuggaagcca

SEQ ID NO: 1001634 - RNA, 19 nt, Artificial Sequence
  Description of Artificial Sequence: Synthetic oligonucleotide
  Sense strand starting at position 3834 of SEQ ID NO: 914407
agaaucaaugcugagucau

SEQ ID NO: 1001635 - RNA, 19 nt, Artificial Sequence
  Description of Artificial Sequence: Synthetic oligonucleotide
  Antisense strand to SEQ ID NO: 1001634
augacucagcauugauucu

SEQ ID NO: 1001636 - RNA, 19 nt, Artificial Sequence
  Description of Artificial Sequence: Synthetic oligonucleotide
  Sense strand starting at position 69 of SEQ ID NO: 914408
caguaaguacaguaguaau

SEQ ID NO: 1001637 - RNA, 19 nt, Artificial Sequence
  Description of Artificial Sequence: Synthetic oligonucleotide
  Antisense strand to SEQ ID NO: 1001636
auuacuacuguacuuacug

SEQ ID NO: 1001638 - RNA, 19 nt, Artificial Sequence
  Description of Artificial Sequence: Synthetic oligonucleotide
  Sense strand starting at position 79 of SEQ ID NO: 914408
aguaguaauucuuuggagu

SEQ ID NO: 1001639 - RNA, 19 nt, Artificial Sequence
  Description of Artificial Sequence: Synthetic oligonucleotide
  Antisense strand to SEQ ID NO: 1001638
acuccaaagaauuacuacu

SEQ ID NO: 1001640 - RNA, 19 nt, Artificial Sequence
  Description of Artificial Sequence: Synthetic oligonucleotide
  Sense strand starting at position 90 of SEQ ID NO: 914408
uuuggagugcuguaaggga

SEQ ID NO: 1001641 - RNA, 19 nt, Artificial Sequence
  Description of Artificial Sequence: Synthetic oligonucleotide
  Antisense strand to SEQ ID NO: 1001640
ucccuuacagcacuccaaa

SEQ ID NO: 1001642 - RNA, 19 nt, Artificial Sequence
  Description of Artificial Sequence: Synthetic oligonucleotide
  Sense strand starting at position 124 of SEQ ID NO: 914408
guagcuagagagugagaau

SEQ ID NO: 1001643 - RNA, 19 nt, Artificial Sequence
  Description of Artificial Sequence: Synthetic oligonucleotide
  Antisense strand to SEQ ID NO: 1001642
auucucacucucuagcuac

SEQ ID NO: 1001644 - RNA, 19 nt, Artificial Sequence
  Description of Artificial Sequence: Synthetic oligonucleotide
  Sense strand starting at position 590 of SEQ ID NO: 914408
aaccuuugaguagguguaa

SEQ ID NO: 1001645 - RNA, 19 nt, Artificial Sequence
  Description of Artificial Sequence: Synthetic oligonucleotide
  Antisense strand to SEQ ID NO: 1001644
uuacaccuacucaaagguu

SEQ ID NO: 1001646 - RNA, 19 nt, Artificial Sequence
  Description of Artificial Sequence: Synthetic oligonucleotide
  Sense strand starting at position 686 of SEQ ID NO: 914408
uuauuaugaugcuccagau

SEQ ID NO: 1001647 - RNA, 19 nt, Artificial Sequence
  Description of Artificial Sequence: Synthetic oligonucleotide
  Antisense strand to SEQ ID NO: 1001646
aucuggagcaucauaauaa

SEQ ID NO: 1001648 - RNA, 19 nt, Artificial Sequence
  Description of Artificial Sequence: Synthetic oligonucleotide
  Sense strand starting at position 1374 of SEQ ID NO: 914408
auucgcguggccuuuauaa

SEQ ID NO: 1001649 - RNA, 19 nt, Artificial Sequence
  Description of Artificial Sequence: Synthetic oligonucleotide
  Antisense strand to SEQ ID NO: 1001648
uuauaaaggccacgcgaau

SEQ ID NO: 1001650 - RNA, 19 nt, Artificial Sequence
  Description of Artificial Sequence: Synthetic oligonucleotide
  Sense strand starting at position 1563 of SEQ ID NO: 914408
ggaagauuaauguguacuu

SEQ ID NO: 1001651 - RNA, 19 nt, Artificial Sequence
  Description of Artificial Sequence: Synthetic oligonucleotide
  Antisense strand to SEQ ID NO: 1001650
aaguacacauuaaucuucc

SEQ ID NO: 1001652 - RNA, 19 nt, Artificial Sequence
  Description of Artificial Sequence: Synthetic oligonucleotide
  Sense strand starting at position 1564 of SEQ ID NO: 914408
gaagauuaauguguacuuc

SEQ ID NO: 1001653 - RNA, 19 nt, Artificial Sequence
  Description of Artificial Sequence: Synthetic oligonucleotide
  Antisense strand to SEQ ID NO: 1001652
gaaguacacauuaaucuuc

SEQ ID NO: 1001654 - RNA, 19 nt, Artificial Sequence
  Description of Artificial Sequence: Synthetic oligonucleotide
  Sense strand starting at position 1609 of SEQ ID NO: 914408
aauaucuuugcggaggauu

SEQ ID NO: 1001655 - RNA, 19 nt, Artificial Sequence
  Description of Artificial Sequence: Synthetic oligonucleotide
  Antisense strand to SEQ ID NO: 1001654
aauccuccgcaaagauauu

SEQ ID NO: 1001656 - RNA, 19 nt, Artificial Sequence
  Description of Artificial Sequence: Synthetic oligonucleotide
  Sense strand starting at position 1641 of SEQ ID NO: 914408
cugugaaggcgcaguauga

SEQ ID NO: 1001657 - RNA, 19 nt, Artificial Sequence
  Description of Artificial Sequence: Synthetic oligonucleotide
  Antisense strand to SEQ ID NO: 1001656
ucauacugcgccuucacag

SEQ ID NO: 1001658 - RNA, 19 nt, Artificial Sequence
  Description of Artificial Sequence: Synthetic oligonucleotide
  Sense strand starting at position 1782 of SEQ ID NO: 914408
agaggaaugaaacguccuu

SEQ ID NO: 1001659 - RNA, 19 nt, Artificial Sequence
  Description of Artificial Sequence: Synthetic oligonucleotide
  Antisense strand to SEQ ID NO: 1001658
aaggacguuucauuccucu

SEQ ID NO: 1001660 - RNA, 19 nt, Artificial Sequence
  Description of Artificial Sequence: Synthetic oligonucleotide
  Sense strand starting at position 1787 of SEQ ID NO: 914408
aaugaaacguccuuaagag

SEQ ID NO: 1001661 - RNA, 19 nt, Artificial Sequence
  Description of Artificial Sequence: Synthetic oligonucleotide
  Antisense strand to SEQ ID NO: 1001660
cucuuaaggacguuucauu

SEQ ID NO: 1001662 - RNA, 19 nt, Artificial Sequence
  Description of Artificial Sequence: Synthetic oligonucleotide
  Sense strand starting at position 1839 of SEQ ID NO: 914408
ucuuuagggccuugaaaca

SEQ ID NO: 1001663 - RNA, 19 nt, Artificial Sequence
  Description of Artificial Sequence: Synthetic oligonucleotide
  Antisense strand to SEQ ID NO: 1001662
uguuucaaggcccuaaaga

SEQ ID NO: 1001664 - RNA, 19 nt, Artificial Sequence
  Description of Artificial Sequence: Synthetic oligonucleotide
  Sense strand starting at position 1988 of SEQ ID NO: 914408
gcggaaaugacguaacuca

SEQ ID NO: 1001665 - RNA, 19 nt, Artificial Sequence
  Description of Artificial Sequence: Synthetic oligonucleotide
  Antisense strand to SEQ ID NO: 1001664
ugaguuacgucauuuccgc

SEQ ID NO: 1001666 - RNA, 19 nt, Artificial Sequence
  Description of Artificial Sequence: Synthetic oligonucleotide
  Sense strand starting at position 2064 of SEQ ID NO: 914408
cucuauucgcgcucugaca

SEQ ID NO: 1001667 - RNA, 19 nt, Artificial Sequence
  Description of Artificial Sequence: Synthetic oligonucleotide
  Antisense strand to SEQ ID NO: 1001666
ugucagagcgcgaauagag

SEQ ID NO: 1001668 - RNA, 19 nt, Artificial Sequence
  Description of Artificial Sequence: Synthetic oligonucleotide
  Sense strand starting at position 2129 of SEQ ID NO: 914408
guuagaagcccgcuuucga

SEQ ID NO: 1001669 - RNA, 19 nt, Artificial Sequence
  Description of Artificial Sequence: Synthetic oligonucleotide
  Antisense strand to SEQ ID NO: 1001668
ucgaaagcgggcuucuaac

SEQ ID NO: 1001670 - RNA, 19 nt, Artificial Sequence
  Description of Artificial Sequence: Synthetic oligonucleotide
  Sense strand starting at position 2154 of SEQ ID NO: 914408
guggcuuugaggcaaagga

SEQ ID NO: 1001671 - RNA, 19 nt, Artificial Sequence
  Description of Artificial Sequence: Synthetic oligonucleotide
  Antisense strand to SEQ ID NO: 1001670
uccuuugccucaaagccac

SEQ ID NO: 1001672 - RNA, 19 nt, Artificial Sequence
  Description of Artificial Sequence: Synthetic oligonucleotide
  Sense strand starting at position 2184 of SEQ ID NO: 914408
aaagcaaagugauugucua

SEQ ID NO: 1001673 - RNA, 19 nt, Artificial Sequence
  Description of Artificial Sequence: Synthetic oligonucleotide
  Antisense strand to SEQ ID NO: 1001672
uagacaaucacuuugcuuu

SEQ ID NO: 1001674 - RNA, 19 nt, Artificial Sequence
  Description of Artificial Sequence: Synthetic oligonucleotide
  Sense strand starting at position 2185 of SEQ ID NO: 914408
aagcaaagugauugucuac

SEQ ID NO: 1001675 - RNA, 19 nt, Artificial Sequence
  Description of Artificial Sequence: Synthetic oligonucleotide
  Antisense strand to SEQ ID NO: 1001674
guagacaaucacuuugcuu

SEQ ID NO: 1001676 - RNA, 19 nt, Artificial Sequence
  Description of Artificial Sequence: Synthetic oligonucleotide
  Sense strand starting at position 2188 of SEQ ID NO: 914408
caaagugauugucuacgaa

SEQ ID NO: 1001677 - RNA, 19 nt, Artificial Sequence
  Description of Artificial Sequence: Synthetic oligonucleotide
  Antisense strand to SEQ ID NO: 1001676
uucguagacaaucacuuug

SEQ ID NO: 1001678 - RNA, 19 nt, Artificial Sequence
  Description of Artificial Sequence: Synthetic oligonucleotide
  Sense strand starting at position 2203 of SEQ ID NO: 914408
cgaaguugggcuuaguaua

SEQ ID NO: 1001679 - RNA, 19 nt, Artificial Sequence
  Description of Artificial Sequence: Synthetic oligonucleotide
  Antisense strand to SEQ ID NO: 1001678
uauacuaagcccaacuucg

SEQ ID NO: 1001680 - RNA, 19 nt, Artificial Sequence
  Description of Artificial Sequence: Synthetic oligonucleotide
  Sense strand starting at position 2208 of SEQ ID NO: 914408
uugggcuuaguauauaaua

SEQ ID NO: 1001681 - RNA, 19 nt, Artificial Sequence
  Description of Artificial Sequence: Synthetic oligonucleotide
  Antisense strand to SEQ ID NO: 1001680
uauuauauacuaagcccaa

SEQ ID NO: 1001682 - RNA, 19 nt, Artificial Sequence
  Description of Artificial Sequence: Synthetic oligonucleotide
  Sense strand starting at position 2610 of SEQ ID NO: 914408
cggccuauuuaauuaguuu

SEQ ID NO: 1001683 - RNA, 19 nt, Artificial Sequence
  Description of Artificial Sequence: Synthetic oligonucleotide
  Antisense strand to SEQ ID NO: 1001682
aaacuaauuaaauaggccg

SEQ ID NO: 1001684 - RNA, 19 nt, Artificial Sequence
  Description of Artificial Sequence: Synthetic oligonucleotide
  Sense strand starting at position 2690 of SEQ ID NO: 914408
ggucaaagaauacgugacu

SEQ ID NO: 1001685 - RNA, 19 nt, Artificial Sequence
  Description of Artificial Sequence: Synthetic oligonucleotide
  Antisense strand to SEQ ID NO: 1001684
agucacguauucuuugacc

SEQ ID NO: 1001686 - RNA, 19 nt, Artificial Sequence
  Description of Artificial Sequence: Synthetic oligonucleotide
  Sense strand starting at position 2691 of SEQ ID NO: 914408
gucaaagaauacgugacuu

SEQ ID NO: 1001687 - RNA, 19 nt, Artificial Sequence
  Description of Artificial Sequence: Synthetic oligonucleotide
  Antisense strand to SEQ ID NO: 1001686
aagucacguauucuuugac

SEQ ID NO: 1001688 - RNA, 19 nt, Artificial Sequence
  Description of Artificial Sequence: Synthetic oligonucleotide
  Sense strand starting at position 2754 of SEQ ID NO: 914408
gcuaaacugcuuuaaguga

SEQ ID NO: 1001689 - RNA, 19 nt, Artificial Sequence
  Description of Artificial Sequence: Synthetic oligonucleotide
  Antisense strand to SEQ ID NO: 1001688
ucacuuaaagcaguuuagc

SEQ ID NO: 1001690 - RNA, 19 nt, Artificial Sequence
  Description of Artificial Sequence: Synthetic oligonucleotide
  Sense strand starting at position 2840 of SEQ ID NO: 914408
aagucugacuugcuugaau

SEQ ID NO: 1001691 - RNA, 19 nt, Artificial Sequence
  Description of Artificial Sequence: Synthetic oligonucleotide
  Antisense strand to SEQ ID NO: 1001690
auucaagcaagucagacuu

SEQ ID NO: 1001692 - RNA, 19 nt, Artificial Sequence
  Description of Artificial Sequence: Synthetic oligonucleotide
  Sense strand starting at position 2852 of SEQ ID NO: 914408
cuugaauucugagucugac

SEQ ID NO: 1001693 - RNA, 19 nt, Artificial Sequence
  Description of Artificial Sequence: Synthetic oligonucleotide
  Antisense strand to SEQ ID NO: 1001692
gucagacucagaauucaag

SEQ ID NO: 1001694 - RNA, 19 nt, Artificial Sequence
  Description of Artificial Sequence: Synthetic oligonucleotide
  Sense strand starting at position 2855 of SEQ ID NO: 914408
gaauucugagucugacacu

SEQ ID NO: 1001695 - RNA, 19 nt, Artificial Sequence
  Description of Artificial Sequence: Synthetic oligonucleotide
  Antisense strand to SEQ ID NO: 1001694
agugucagacucagaauuc

SEQ ID NO: 1001696 - RNA, 19 nt, Artificial Sequence
  Description of Artificial Sequence: Synthetic oligonucleotide
  Sense strand starting at position 2882 of SEQ ID NO: 914408
gcuuuaguuggucacagau

SEQ ID NO: 1001697 - RNA, 19 nt, Artificial Sequence
  Description of Artificial Sequence: Synthetic oligonucleotide
  Antisense strand to SEQ ID NO: 1001696
aucugugaccaacuaaagc

SEQ ID NO: 1001698 - RNA, 19 nt, Artificial Sequence
  Description of Artificial Sequence: Synthetic oligonucleotide
  Sense strand starting at position 2891 of SEQ ID NO: 914408
ggucacagauuauugcaau

SEQ ID NO: 1001699 - RNA, 19 nt, Artificial Sequence
  Description of Artificial Sequence: Synthetic oligonucleotide
  Antisense strand to SEQ ID NO: 1001698
auugcaauaaucugugacc

SEQ ID NO: 1001700 - RNA, 19 nt, Artificial Sequence
  Description of Artificial Sequence: Synthetic oligonucleotide
  Sense strand starting at position 2897 of SEQ ID NO: 914408
agauuauugcaaugugaaa

SEQ ID NO: 1001701 - RNA, 19 nt, Artificial Sequence
  Description of Artificial Sequence: Synthetic oligonucleotide
  Antisense strand to SEQ ID NO: 1001700
uuucacauugcaauaaucu

SEQ ID NO: 1001702 - RNA, 19 nt, Artificial Sequence
  Description of Artificial Sequence: Synthetic oligonucleotide
  Sense strand starting at position 2942 of SEQ ID NO: 914408
ugcuauguucguccuaugu

SEQ ID NO: 1001703 - RNA, 19 nt, Artificial Sequence
  Description of Artificial Sequence: Synthetic oligonucleotide
  Antisense strand to SEQ ID NO: 1001702
acauaggacgaacauagca

SEQ ID NO: 1001704 - RNA, 19 nt, Artificial Sequence
  Description of Artificial Sequence: Synthetic oligonucleotide
  Sense strand starting at position 3067 of SEQ ID NO: 914408
aaauucuugguagguuaau

SEQ ID NO: 1001705 - RNA, 19 nt, Artificial Sequence
  Description of Artificial Sequence: Synthetic oligonucleotide
  Antisense strand to SEQ ID NO: 1001704
auuaaccuaccaagaauuu

SEQ ID NO: 1001706 - RNA, 19 nt, Artificial Sequence
  Description of Artificial Sequence: Synthetic oligonucleotide
  Sense strand starting at position 3068 of SEQ ID NO: 914408
aauucuugguagguuaauu

SEQ ID NO: 1001707 - RNA, 19 nt, Artificial Sequence
  Description of Artificial Sequence: Synthetic oligonucleotide
  Antisense strand to SEQ ID NO: 1001706
aauuaaccuaccaagaauu

SEQ ID NO: 1001708 - RNA, 19 nt, Artificial Sequence
  Description of Artificial Sequence: Synthetic oligonucleotide
  Sense strand starting at position 3096 of SEQ ID NO: 914408
acugaacuuccagaguucu

SEQ ID NO: 1001709 - RNA, 19 nt, Artificial Sequence
  Description of Artificial Sequence: Synthetic oligonucleotide
  Antisense strand to SEQ ID NO: 1001708
agaacucuggaaguucagu

SEQ ID NO: 1001710 - RNA, 19 nt, Artificial Sequence
  Description of Artificial Sequence: Synthetic oligonucleotide
  Sense strand starting at position 3227 of SEQ ID NO: 914408
uggaaacauuauguauauc

SEQ ID NO: 1001711 - RNA, 19 nt, Artificial Sequence
  Description of Artificial Sequence: Synthetic oligonucleotide
  Antisense strand to SEQ ID NO: 1001710
gauauacauaauguuucca

SEQ ID NO: 1001712 - RNA, 19 nt, Artificial Sequence
  Description of Artificial Sequence: Synthetic oligonucleotide
  Sense strand starting at position 3720 of SEQ ID NO: 914408
augugaauguacuuaaguc

SEQ ID NO: 1001713 - RNA, 19 nt, Artificial Sequence
  Description of Artificial Sequence: Synthetic oligonucleotide
  Antisense strand to SEQ ID NO: 1001712
gacuuaaguacauucacau

SEQ ID NO: 1001714 - RNA, 19 nt, Artificial Sequence
  Description of Artificial Sequence: Synthetic oligonucleotide
  Sense strand starting at position 3730 of SEQ ID NO: 914408
acuuaaguccacugaauug

SEQ ID NO: 1001715 - RNA, 19 nt, Artificial Sequence
  Description of Artificial Sequence: Synthetic oligonucleotide
  Antisense strand to SEQ ID NO: 1001714
caauucaguggacuuaagu

SEQ ID NO: 1001716 - RNA, 19 nt, Artificial Sequence
  Description of Artificial Sequence: Synthetic oligonucleotide
  Sense strand starting at position 222 of SEQ ID NO: 914409
ugugucagcccugaacaga

SEQ ID NO: 1001717 - RNA, 19 nt, Artificial Sequence
  Description of Artificial Sequence: Synthetic oligonucleotide
  Antisense strand to SEQ ID NO: 1001716
ucuguucagggcugacaca

SEQ ID NO: 1001718 - RNA, 19 nt, Artificial Sequence
  Description of Artificial Sequence: Synthetic oligonucleotide
  Sense strand starting at position 268 of SEQ ID NO: 914409
gcagguaguucccaaguga

SEQ ID NO: 1001719 - RNA, 19 nt, Artificial Sequence
  Description of Artificial Sequence: Synthetic oligonucleotide
  Antisense strand to SEQ ID NO: 1001718
ucacuugggaacuaccugc

SEQ ID NO: 1001720 - RNA, 19 nt, Artificial Sequence
  Description of Artificial Sequence: Synthetic oligonucleotide
  Sense strand starting at position 272 of SEQ ID NO: 914409
guaguucccaagugaccua

SEQ ID NO: 1001721 - RNA, 19 nt, Artificial Sequence
  Description of Artificial Sequence: Synthetic oligonucleotide
  Antisense strand to SEQ ID NO: 1001720
uaggucacuugggaacuac

SEQ ID NO: 1001722 - RNA, 19 nt, Artificial Sequence
  Description of Artificial Sequence: Synthetic oligonucleotide
  Sense strand starting at position 277 of SEQ ID NO: 914409
ucccaagugaccuaggagu

SEQ ID NO: 1001723 - RNA, 19 nt, Artificial Sequence
  Description of Artificial Sequence: Synthetic oligonucleotide
  Antisense strand to SEQ ID NO: 1001722
acuccuaggucacuuggga

SEQ ID NO: 1001724 - RNA, 19 nt, Artificial Sequence
  Description of Artificial Sequence: Synthetic oligonucleotide
  Sense strand starting at position 309 of SEQ ID NO: 914409
ggguguggccuucauagga

SEQ ID NO: 1001725 - RNA, 19 nt, Artificial Sequence
  Description of Artificial Sequence: Synthetic oligonucleotide
  Antisense strand to SEQ ID NO: 1001724
uccuaugaaggccacaccc

SEQ ID NO: 1001726 - RNA, 19 nt, Artificial Sequence
  Description of Artificial Sequence: Synthetic oligonucleotide
  Sense strand starting at position 401 of SEQ ID NO: 914409
aggucaguuccacguuguu

SEQ ID NO: 1001727 - RNA, 19 nt, Artificial Sequence
  Description of Artificial Sequence: Synthetic oligonucleotide
  Antisense strand to SEQ ID NO: 1001726
aacaacguggaacugaccu

SEQ ID NO: 1001728 - RNA, 19 nt, Artificial Sequence
  Description of Artificial Sequence: Synthetic oligonucleotide
  Sense strand starting at position 488 of SEQ ID NO: 914409
ggcagaggugccagcgauu

SEQ ID NO: 1001729 - RNA, 19 nt, Artificial Sequence
  Description of Artificial Sequence: Synthetic oligonucleotide
  Antisense strand to SEQ ID NO: 1001728
aaucgcuggcaccucugcc

SEQ ID NO: 1001730 - RNA, 19 nt, Artificial Sequence
  Description of Artificial Sequence: Synthetic oligonucleotide
  Sense strand starting at position 499 of SEQ ID NO: 914409
cagcgauuggcccgguaga

SEQ ID NO: 1001731 - RNA, 19 nt, Artificial Sequence
  Description of Artificial Sequence: Synthetic oligonucleotide
  Antisense strand to SEQ ID NO: 1001730
ucuaccgggccaaucgcug

SEQ ID NO: 1001732 - RNA, 19 nt, Artificial Sequence
  Description of Artificial Sequence: Synthetic oligonucleotide
  Sense strand starting at position 500 of SEQ ID NO: 914409
agcgauuggcccgguagau

SEQ ID NO: 1001733 - RNA, 19 nt, Artificial Sequence
  Description of Artificial Sequence: Synthetic oligonucleotide
  Antisense strand to SEQ ID NO: 1001732
aucuaccgggccaaucgcu

SEQ ID NO: 1001734 - RNA, 19 nt, Artificial Sequence
  Description of Artificial Sequence: Synthetic oligonucleotide
  Sense strand starting at position 614 of SEQ ID NO: 914409
ccgugaagucguccgugua

SEQ ID NO: 1001735 - RNA, 19 nt, Artificial Sequence
  Description of Artificial Sequence: Synthetic oligonucleotide
  Antisense strand to SEQ ID NO: 1001734
uacacggacgacuucacgg

SEQ ID NO: 1001736 - RNA, 19 nt, Artificial Sequence
  Description of Artificial Sequence: Synthetic oligonucleotide
  Sense strand starting at position 615 of SEQ ID NO: 914409
cgugaagucguccguguaa

SEQ ID NO: 1001737 - RNA, 19 nt, Artificial Sequence
  Description of Artificial Sequence: Synthetic oligonucleotide
  Antisense strand to SEQ ID NO: 1001736
uuacacggacgacuucacg

SEQ ID NO: 1001738 - RNA, 19 nt, Artificial Sequence
  Description of Artificial Sequence: Synthetic oligonucleotide
  Sense strand starting at position 616 of SEQ ID NO: 914409
gugaagucguccguguaaa

SEQ ID NO: 1001739 - RNA, 19 nt, Artificial Sequence
  Description of Artificial Sequence: Synthetic oligonucleotide
  Antisense strand to SEQ ID NO: 1001738
uuuacacggacgacuucac

SEQ ID NO: 1001740 - RNA, 19 nt, Artificial Sequence
  Description of Artificial Sequence: Synthetic oligonucleotide
  Sense strand starting at position 617 of SEQ ID NO: 914409
ugaagucguccguguaaac

SEQ ID NO: 1001741 - RNA, 19 nt, Artificial Sequence
  Description of Artificial Sequence: Synthetic oligonucleotide
  Antisense strand to SEQ ID NO: 1001740
guuuacacggacgacuuca

SEQ ID NO: 1001742 - RNA, 19 nt, Artificial Sequence
  Description of Artificial Sequence: Synthetic oligonucleotide
  Sense strand starting at position 748 of SEQ ID NO: 914409
cccggugccagaugcauaa

SEQ ID NO: 1001743 - RNA, 19 nt, Artificial Sequence
  Description of Artificial Sequence: Synthetic oligonucleotide
  Antisense strand to SEQ ID NO: 1001742
uuaugcaucuggcaccggg

SEQ ID NO: 1001744 - RNA, 19 nt, Artificial Sequence
  Description of Artificial Sequence: Synthetic oligonucleotide
  Sense strand starting at position 1019 of SEQ ID NO: 914409
gcguugugcgggcaucaaa

SEQ ID NO: 1001745 - RNA, 19 nt, Artificial Sequence
  Description of Artificial Sequence: Synthetic oligonucleotide
  Antisense strand to SEQ ID NO: 1001744
uuugaugcccgcacaacgc

SEQ ID NO: 1001746 - RNA, 19 nt, Artificial Sequence
  Description of Artificial Sequence: Synthetic oligonucleotide
  Sense strand starting at position 1226 of SEQ ID NO: 914409
uguggccuugaguaagagu

SEQ ID NO: 1001747 - RNA, 19 nt, Artificial Sequence
  Description of Artificial Sequence: Synthetic oligonucleotide
  Antisense strand to SEQ ID NO: 1001746
acucuuacucaaggccaca

SEQ ID NO: 1001748 - RNA, 19 nt, Artificial Sequence
  Description of Artificial Sequence: Synthetic oligonucleotide
  Sense strand starting at position 1235 of SEQ ID NO: 914409
gaguaagaguuacugucga

SEQ ID NO: 1001749 - RNA, 19 nt, Artificial Sequence
  Description of Artificial Sequence: Synthetic oligonucleotide
  Antisense strand to SEQ ID NO: 1001748
ucgacaguaacucuuacuc

SEQ ID NO: 1001750 - RNA, 19 nt, Artificial Sequence
  Description of Artificial Sequence: Synthetic oligonucleotide
  Sense strand starting at position 1269 of SEQ ID NO: 914409
ucaucuuuacaaugggaua

SEQ ID NO: 1001751 - RNA, 19 nt, Artificial Sequence
  Description of Artificial Sequence: Synthetic oligonucleotide
  Antisense strand to SEQ ID NO: 1001750
uaucccauuguaaagauga

SEQ ID NO: 1001752 - RNA, 19 nt, Artificial Sequence
  Description of Artificial Sequence: Synthetic oligonucleotide
  Sense strand starting at position 1272 of SEQ ID NO: 914409
ucuuuacaaugggauaaca

SEQ ID NO: 1001753 - RNA, 19 nt, Artificial Sequence
  Description of Artificial Sequence: Synthetic oligonucleotide
  Antisense strand to SEQ ID NO: 1001752
uguuaucccauuguaaaga

SEQ ID NO: 1001754 - RNA, 19 nt, Artificial Sequence
  Description of Artificial Sequence: Synthetic oligonucleotide
  Sense strand starting at position 1292 of SEQ ID NO: 914409
cuguuccugucccguagau

SEQ ID NO: 1001755 - RNA, 19 nt, Artificial Sequence
  Description of Artificial Sequence: Synthetic oligonucleotide
  Antisense strand to SEQ ID NO: 1001754
aucuacgggacaggaacag

SEQ ID NO: 1001756 - RNA, 19 nt, Artificial Sequence
  Description of Artificial Sequence: Synthetic oligonucleotide
  Sense strand starting at position 1294 of SEQ ID NO: 914409
guuccugucccguagaucu

SEQ ID NO: 1001757 - RNA, 19 nt, Artificial Sequence
  Description of Artificial Sequence: Synthetic oligonucleotide
  Antisense strand to SEQ ID NO: 1001756
agaucuacgggacaggaac

SEQ ID NO: 1001758 - RNA, 19 nt, Artificial Sequence
  Description of Artificial Sequence: Synthetic oligonucleotide
  Sense strand starting at position 1301 of SEQ ID NO: 914409
ucccguagaucugcuauga

SEQ ID NO: 1001759 - RNA, 19 nt, Artificial Sequence
  Description of Artificial Sequence: Synthetic oligonucleotide
  Antisense strand to SEQ ID NO: 1001758
ucauagcagaucuacggga

SEQ ID NO: 1001760 - RNA, 19 nt, Artificial Sequence
  Description of Artificial Sequence: Synthetic oligonucleotide
  Sense strand starting at position 1354 of SEQ ID NO: 914409
gguugcugcaguuauuacu

SEQ ID NO: 1001761 - RNA, 19 nt, Artificial Sequence
  Description of Artificial Sequence: Synthetic oligonucleotide
  Antisense strand to SEQ ID NO: 1001760
aguaauaacugcagcaacc

SEQ ID NO: 1001762 - RNA, 19 nt, Artificial Sequence
  Description of Artificial Sequence: Synthetic oligonucleotide
  Sense strand starting at position 1542 of SEQ ID NO: 914409
ugcgcuggcauuuaauaga

SEQ ID NO: 1001763 - RNA, 19 nt, Artificial Sequence
  Description of Artificial Sequence: Synthetic oligonucleotide
  Antisense strand to SEQ ID NO: 1001762
ucuauuaaaugccagcgca

SEQ ID NO: 1001764 - RNA, 19 nt, Artificial Sequence
  Description of Artificial Sequence: Synthetic oligonucleotide
  Sense strand starting at position 1545 of SEQ ID NO: 914409
gcuggcauuuaauagagga

SEQ ID NO: 1001765 - RNA, 19 nt, Artificial Sequence
  Description of Artificial Sequence: Synthetic oligonucleotide
  Antisense strand to SEQ ID NO: 1001764
uccucuauuaaaugccagc

SEQ ID NO: 1001766 - RNA, 19 nt, Artificial Sequence
  Description of Artificial Sequence: Synthetic oligonucleotide
  Sense strand starting at position 1629 of SEQ ID NO: 914409
ggcguuaucgggcccacuu

SEQ ID NO: 1001767 - RNA, 19 nt, Artificial Sequence
  Description of Artificial Sequence: Synthetic oligonucleotide
  Antisense strand to SEQ ID NO: 1001766
aagugggcccgauaacgcc

SEQ ID NO: 1001768 - RNA, 19 nt, Artificial Sequence
  Description of Artificial Sequence: Synthetic oligonucleotide
  Sense strand starting at position 1630 of SEQ ID NO: 914409
gcguuaucgggcccacuua

SEQ ID NO: 1001769 - RNA, 19 nt, Artificial Sequence
  Description of Artificial Sequence: Synthetic oligonucleotide
  Antisense strand to SEQ ID NO: 1001768
uaagugggcccgauaacgc

SEQ ID NO: 1001770 - RNA, 19 nt, Artificial Sequence
  Description of Artificial Sequence: Synthetic oligonucleotide
  Sense strand starting at position 1717 of SEQ ID NO: 914409
cgaaccagggcuuguuaga

SEQ ID NO: 1001771 - RNA, 19 nt, Artificial Sequence
  Description of Artificial Sequence: Synthetic oligonucleotide
  Antisense strand to SEQ ID NO: 1001770
ucuaacaagcccugguucg

SEQ ID NO: 1001772 - RNA, 19 nt, Artificial Sequence
  Description of Artificial Sequence: Synthetic oligonucleotide
  Sense strand starting at position 2863 of SEQ ID NO: 914409
cggaguucuccuugacgcu

SEQ ID NO: 1001773 - RNA, 19 nt, Artificial Sequence
  Description of Artificial Sequence: Synthetic oligonucleotide
  Antisense strand to SEQ ID NO: 1001772
agcgucaaggagaacuccg

SEQ ID NO: 1001774 - RNA, 19 nt, Artificial Sequence
  Description of Artificial Sequence: Synthetic oligonucleotide
  Sense strand starting at position 3134 of SEQ ID NO: 914409
gagggagccaccugaguaa

SEQ ID NO: 1001775 - RNA, 19 nt, Artificial Sequence
  Description of Artificial Sequence: Synthetic oligonucleotide
  Antisense strand to SEQ ID NO: 1001774
uuacucagguggcucccuc

SEQ ID NO: 1001776 - RNA, 19 nt, Artificial Sequence
  Description of Artificial Sequence: Synthetic oligonucleotide
  Sense strand starting at position 3705 of SEQ ID NO: 914409
cuguuugcucacugguuua

SEQ ID NO: 1001777 - RNA, 19 nt, Artificial Sequence
  Description of Artificial Sequence: Synthetic oligonucleotide
  Antisense strand to SEQ ID NO: 1001776
uaaaccagugagcaaacag

SEQ ID NO: 1001778 - RNA, 19 nt, Artificial Sequence
  Description of Artificial Sequence: Synthetic oligonucleotide
  Sense strand starting at position 3716 of SEQ ID NO: 914409
cugguuuauuuguaaauug

SEQ ID NO: 1001779 - RNA, 19 nt, Artificial Sequence
  Description of Artificial Sequence: Synthetic oligonucleotide
  Antisense strand to SEQ ID NO: 1001778
caauuuacaaauaaaccag

SEQ ID NO: 1001780 - RNA, 19 nt, Artificial Sequence
  Description of Artificial Sequence: Synthetic oligonucleotide
  Sense strand starting at position 3770 of SEQ ID NO: 914409
cagugauggguucgugucu

SEQ ID NO: 1001781 - RNA, 19 nt, Artificial Sequence
  Description of Artificial Sequence: Synthetic oligonucleotide
  Antisense strand to SEQ ID NO: 1001780
agacacgaacccaucacug

SEQ ID NO: 1001782 - RNA, 19 nt, Artificial Sequence
  Description of Artificial Sequence: Synthetic oligonucleotide
  Sense strand starting at position 3812 of SEQ ID NO: 914409
cggugcucacaggaugaau

SEQ ID NO: 1001783 - RNA, 19 nt, Artificial Sequence
  Description of Artificial Sequence: Synthetic oligonucleotide
  Antisense strand to SEQ ID NO: 1001782
auucauccugugagcaccg

SEQ ID NO: 1001784 - RNA, 19 nt, Artificial Sequence
  Description of Artificial Sequence: Synthetic oligonucleotide
  Sense strand starting at position 445 of SEQ ID NO: 914410
ugucuuguuccuccucgua

SEQ ID NO: 1001785 - RNA, 19 nt, Artificial Sequence
  Description of Artificial Sequence: Synthetic oligonucleotide
  Antisense strand to SEQ ID NO: 1001784
uacgaggaggaacaagaca

SEQ ID NO: 1001786 - RNA, 19 nt, Artificial Sequence
  Description of Artificial Sequence: Synthetic oligonucleotide
  Sense strand starting at position 537 of SEQ ID NO: 914410
acagucaaugcaugaagga

SEQ ID NO: 1001787 - RNA, 19 nt, Artificial Sequence
  Description of Artificial Sequence: Synthetic oligonucleotide
  Antisense strand to SEQ ID NO: 1001786
uccuucaugcauugacugu

SEQ ID NO: 1001788 - RNA, 19 nt, Artificial Sequence
  Description of Artificial Sequence: Synthetic oligonucleotide
  Sense strand starting at position 605 of SEQ ID NO: 914410
ccauuugauugaggagaaa

SEQ ID NO: 1001789 - RNA, 19 nt, Artificial Sequence
  Description of Artificial Sequence: Synthetic oligonucleotide
  Antisense strand to SEQ ID NO: 1001788
uuucuccucaaucaaaugg

SEQ ID NO: 1001790 - RNA, 19 nt, Artificial Sequence
  Description of Artificial Sequence: Synthetic oligonucleotide
  Sense strand starting at position 919 of SEQ ID NO: 914410
augagaugugccuauugaa

SEQ ID NO: 1001791 - RNA, 19 nt, Artificial Sequence
  Description of Artificial Sequence: Synthetic oligonucleotide
  Antisense strand to SEQ ID NO: 1001790
uucaauaggcacaucucau

SEQ ID NO: 1001792 - RNA, 19 nt, Artificial Sequence
  Description of Artificial Sequence: Synthetic oligonucleotide
  Sense strand starting at position 1354 of SEQ ID NO: 914410
acaaauuuaugaugacuga

SEQ ID NO: 1001793 - RNA, 19 nt, Artificial Sequence
  Description of Artificial Sequence: Synthetic oligonucleotide
  Antisense strand to SEQ ID NO: 1001792
ucagucaucauaaauuugu

SEQ ID NO: 1001794 - RNA, 19 nt, Artificial Sequence
  Description of Artificial Sequence: Synthetic oligonucleotide
  Sense strand starting at position 1361 of SEQ ID NO: 914410
uaugaugacugauucgaaa

SEQ ID NO: 1001795 - RNA, 19 nt, Artificial Sequence
  Description of Artificial Sequence: Synthetic oligonucleotide
  Antisense strand to SEQ ID NO: 1001794
uuucgaaucagucaucaua

SEQ ID NO: 1001796 - RNA, 19 nt, Artificial Sequence
  Description of Artificial Sequence: Synthetic oligonucleotide
  Sense strand starting at position 1437 of SEQ ID NO: 914410
aaacgacgucaguaaggaa

SEQ ID NO: 1001797 - RNA, 19 nt, Artificial Sequence
  Description of Artificial Sequence: Synthetic oligonucleotide
  Antisense strand to SEQ ID NO: 1001796
uuccuuacugacgucguuu

SEQ ID NO: 1001798 - RNA, 19 nt, Artificial Sequence
  Description of Artificial Sequence: Synthetic oligonucleotide
  Sense strand starting at position 2209 of SEQ ID NO: 914410
aaucgauacuuguugacau

SEQ ID NO: 1001799 - RNA, 19 nt, Artificial Sequence
  Description of Artificial Sequence: Synthetic oligonucleotide
  Antisense strand to SEQ ID NO: 1001798
augucaacaaguaucgauu

SEQ ID NO: 1001800 - RNA, 19 nt, Artificial Sequence
  Description of Artificial Sequence: Synthetic oligonucleotide
  Sense strand starting at position 2211 of SEQ ID NO: 914410
ucgauacuuguugacauua

SEQ ID NO: 1001801 - RNA, 19 nt, Artificial Sequence
  Description of Artificial Sequence: Synthetic oligonucleotide
  Antisense strand to SEQ ID NO: 1001800
uaaugucaacaaguaucga

SEQ ID NO: 1001802 - RNA, 19 nt, Artificial Sequence
  Description of Artificial Sequence: Synthetic oligonucleotide
  Sense strand starting at position 2242 of SEQ ID NO: 914410
aauuacucagcauggguua

SEQ ID NO: 1001803 - RNA, 19 nt, Artificial Sequence
  Description of Artificial Sequence: Synthetic oligonucleotide
  Antisense strand to SEQ ID NO: 1001802
uaacccaugcugaguaauu

SEQ ID NO: 1001804 - RNA, 19 nt, Artificial Sequence
  Description of Artificial Sequence: Synthetic oligonucleotide
  Sense strand starting at position 2243 of SEQ ID NO: 914410
auuacucagcauggguuaa

SEQ ID NO: 1001805 - RNA, 19 nt, Artificial Sequence
  Description of Artificial Sequence: Synthetic oligonucleotide
  Antisense strand to SEQ ID NO: 1001804
uuaacccaugcugaguaau

SEQ ID NO: 1001806 - RNA, 19 nt, Artificial Sequence
  Description of Artificial Sequence: Synthetic oligonucleotide
  Sense strand starting at position 2245 of SEQ ID NO: 914410
uacucagcauggguuaaua

SEQ ID NO: 1001807 - RNA, 19 nt, Artificial Sequence
  Description of Artificial Sequence: Synthetic oligonucleotide
  Antisense strand to SEQ ID NO: 1001806
uauuaacccaugcugagua

SEQ ID NO: 1001808 - RNA, 19 nt, Artificial Sequence
  Description of Artificial Sequence: Synthetic oligonucleotide
  Sense strand starting at position 2247 of SEQ ID NO: 914410
cucagcauggguuaauauu

SEQ ID NO: 1001809 - RNA, 19 nt, Artificial Sequence
  Description of Artificial Sequence: Synthetic oligonucleotide
  Antisense strand to SEQ ID NO: 1001808
aauauuaacccaugcugag

SEQ ID NO: 1001810 - RNA, 19 nt, Artificial Sequence
  Description of Artificial Sequence: Synthetic oligonucleotide
  Sense strand starting at position 2290 of SEQ ID NO: 914410
gauuuacaguuaucuacgu

SEQ ID NO: 1001811 - RNA, 19 nt, Artificial Sequence
  Description of Artificial Sequence: Synthetic oligonucleotide
  Antisense strand to SEQ ID NO: 1001810
acguagauaacuguaaauc

SEQ ID NO: 1001812 - RNA, 19 nt, Artificial Sequence
  Description of Artificial Sequence: Synthetic oligonucleotide
  Sense strand starting at position 2304 of SEQ ID NO: 914410
uacguuugaugacucaaac

SEQ ID NO: 1001813 - RNA, 19 nt, Artificial Sequence
  Description of Artificial Sequence: Synthetic oligonucleotide
  Antisense strand to SEQ ID NO: 1001812
guuugagucaucaaacgua

SEQ ID NO: 1001814 - RNA, 19 nt, Artificial Sequence
  Description of Artificial Sequence: Synthetic oligonucleotide
  Sense strand starting at position 2315 of SEQ ID NO: 914410
acucaaacguuucugaaga

SEQ ID NO: 1001815 - RNA, 19 nt, Artificial Sequence
  Description of Artificial Sequence: Synthetic oligonucleotide
  Antisense strand to SEQ ID NO: 1001814
ucuucagaaacguuugagu

SEQ ID NO: 1001816 - RNA, 19 nt, Artificial Sequence
  Description of Artificial Sequence: Synthetic oligonucleotide
  Sense strand starting at position 2374 of SEQ ID NO: 914410
gacaaaugucuaugugacu

SEQ ID NO: 1001817 - RNA, 19 nt, Artificial Sequence
  Description of Artificial Sequence: Synthetic oligonucleotide
  Antisense strand to SEQ ID NO: 1001816
agucacauagacauuuguc

SEQ ID NO: 1001818 - RNA, 19 nt, Artificial Sequence
  Description of Artificial Sequence: Synthetic oligonucleotide
  Sense strand starting at position 2375 of SEQ ID NO: 914410
acaaaugucuaugugacua

SEQ ID NO: 1001819 - RNA, 19 nt, Artificial Sequence
  Description of Artificial Sequence: Synthetic oligonucleotide
  Antisense strand to SEQ ID NO: 1001818
uagucacauagacauuugu

SEQ ID NO: 1001820 - RNA, 19 nt, Artificial Sequence
  Description of Artificial Sequence: Synthetic oligonucleotide
  Sense strand starting at position 2380 of SEQ ID NO: 914410
ugucuaugugacuacuuag

SEQ ID NO: 1001821 - RNA, 19 nt, Artificial Sequence
  Description of Artificial Sequence: Synthetic oligonucleotide
  Antisense strand to SEQ ID NO: 1001820
cuaaguagucacauagaca

SEQ ID NO: 1001822 - RNA, 19 nt, Artificial Sequence
  Description of Artificial Sequence: Synthetic oligonucleotide
  Sense strand starting at position 2383 of SEQ ID NO: 914410
cuaugugacuacuuaggaa

SEQ ID NO: 1001823 - RNA, 19 nt, Artificial Sequence
  Description of Artificial Sequence: Synthetic oligonucleotide
  Antisense strand to SEQ ID NO: 1001822
uuccuaaguagucacauag

SEQ ID NO: 1001824 - RNA, 19 nt, Artificial Sequence
  Description of Artificial Sequence: Synthetic oligonucleotide
  Sense strand starting at position 2395 of SEQ ID NO: 914410
uuaggaaacuauucuguuu

SEQ ID NO: 1001825 - RNA, 19 nt, Artificial Sequence
  Description of Artificial Sequence: Synthetic oligonucleotide
  Antisense strand to SEQ ID NO: 1001824
aaacagaauaguuuccuaa

SEQ ID NO: 1001826 - RNA, 19 nt, Artificial Sequence
  Description of Artificial Sequence: Synthetic oligonucleotide
  Sense strand starting at position 2544 of SEQ ID NO: 914410
cugguaugcgugcuguuua

SEQ ID NO: 1001827 - RNA, 19 nt, Artificial Sequence
  Description of Artificial Sequence: Synthetic oligonucleotide
  Antisense strand to SEQ ID NO: 1001826
uaaacagcacgcauaccag

SEQ ID NO: 1001828 - RNA, 19 nt, Artificial Sequence
  Description of Artificial Sequence: Synthetic oligonucleotide
  Sense strand starting at position 2547 of SEQ ID NO: 914410
guaugcgugcuguuuaaua

SEQ ID NO: 1001829 - RNA, 19 nt, Artificial Sequence
  Description of Artificial Sequence: Synthetic oligonucleotide
  Antisense strand to SEQ ID NO: 1001828
uauuaaacagcacgcauac

SEQ ID NO: 1001830 - RNA, 19 nt, Artificial Sequence
  Description of Artificial Sequence: Synthetic oligonucleotide
  Sense strand starting at position 3115 of SEQ ID NO: 914410
cuguuacuugacuauacua

SEQ ID NO: 1001831 - RNA, 19 nt, Artificial Sequence
  Description of Artificial Sequence: Synthetic oligonucleotide
  Antisense strand to SEQ ID NO: 1001830
uaguauagucaaguaacag

SEQ ID NO: 1001832 - RNA, 19 nt, Artificial Sequence
  Description of Artificial Sequence: Synthetic oligonucleotide
  Sense strand starting at position 3201 of SEQ ID NO: 914410
augccuuuagauggacuua

SEQ ID NO: 1001833 - RNA, 19 nt, Artificial Sequence
  Description of Artificial Sequence: Synthetic oligonucleotide
  Antisense strand to SEQ ID NO: 1001832
uaaguccaucuaaaggcau

SEQ ID NO: 1001834 - RNA, 19 nt, Artificial Sequence
  Description of Artificial Sequence: Synthetic oligonucleotide
  Sense strand starting at position 3250 of SEQ ID NO: 914410
auuggaauugcucaguuac

SEQ ID NO: 1001835 - RNA, 19 nt, Artificial Sequence
  Description of Artificial Sequence: Synthetic oligonucleotide
  Antisense strand to SEQ ID NO: 1001834
guaacugagcaauuccaau

SEQ ID NO: 1001836 - RNA, 19 nt, Artificial Sequence
  Description of Artificial Sequence: Synthetic oligonucleotide
  Sense strand starting at position 3263 of SEQ ID NO: 914410
aguuacauggcauaaguau

SEQ ID NO: 1001837 - RNA, 19 nt, Artificial Sequence
  Description of Artificial Sequence: Synthetic oligonucleotide
  Antisense strand to SEQ ID NO: 1001836
auacuuaugccauguaacu

SEQ ID NO: 1001838 - RNA, 19 nt, Artificial Sequence
  Description of Artificial Sequence: Synthetic oligonucleotide
  Sense strand starting at position 3454 of SEQ ID NO: 914410
guuugcauuuccuugauag

SEQ ID NO: 1001839 - RNA, 19 nt, Artificial Sequence
  Description of Artificial Sequence: Synthetic oligonucleotide
  Antisense strand to SEQ ID NO: 1001838
cuaucaaggaaaugcaaac

SEQ ID NO: 1001840 - RNA, 19 nt, Artificial Sequence
  Description of Artificial Sequence: Synthetic oligonucleotide
  Sense strand starting at position 3494 of SEQ ID NO: 914410
gcaauaugcugggucauuu

SEQ ID NO: 1001841 - RNA, 19 nt, Artificial Sequence
  Description of Artificial Sequence: Synthetic oligonucleotide
  Antisense strand to SEQ ID NO: 1001840
aaaugacccagcauauugc

SEQ ID NO: 1001842 - RNA, 19 nt, Artificial Sequence
  Description of Artificial Sequence: Synthetic oligonucleotide
  Sense strand starting at position 3511 of SEQ ID NO: 914410
uuggauaucuucuuuagug

SEQ ID NO: 1001843 - RNA, 19 nt, Artificial Sequence
  Description of Artificial Sequence: Synthetic oligonucleotide
  Antisense strand to SEQ ID NO: 1001842
cacuaaagaagauauccaa

SEQ ID NO: 1001844 - RNA, 19 nt, Artificial Sequence
  Description of Artificial Sequence: Synthetic oligonucleotide
  Sense strand starting at position 3585 of SEQ ID NO: 914410
ucuuacuaauguuuaggaa

SEQ ID NO: 1001845 - RNA, 19 nt, Artificial Sequence
  Description of Artificial Sequence: Synthetic oligonucleotide
  Antisense strand to SEQ ID NO: 1001844
uuccuaaacauuaguaaga

SEQ ID NO: 1001846 - RNA, 19 nt, Artificial Sequence
  Description of Artificial Sequence: Synthetic oligonucleotide
  Sense strand starting at position 3626 of SEQ ID NO: 914410
agcccauugccagauauac

SEQ ID NO: 1001847 - RNA, 19 nt, Artificial Sequence
  Description of Artificial Sequence: Synthetic oligonucleotide
  Antisense strand to SEQ ID NO: 1001846
guauaucuggcaaugggcu

SEQ ID NO: 1001848 - RNA, 19 nt, Artificial Sequence
  Description of Artificial Sequence: Synthetic oligonucleotide
  Sense strand starting at position 3682 of SEQ ID NO: 914410
agcuuugaugcucagaaau

SEQ ID NO: 1001849 - RNA, 19 nt, Artificial Sequence
  Description of Artificial Sequence: Synthetic oligonucleotide
  Antisense strand to SEQ ID NO: 1001848
auuucugagcaucaaagcu

SEQ ID NO: 1001850 - RNA, 19 nt, Artificial Sequence
  Description of Artificial Sequence: Synthetic oligonucleotide
  Sense strand starting at position 3748 of SEQ ID NO: 914410
cagguuugauuucugccua

SEQ ID NO: 1001851 - RNA, 19 nt, Artificial Sequence
  Description of Artificial Sequence: Synthetic oligonucleotide
  Antisense strand to SEQ ID NO: 1001850
uaggcagaaaucaaaccug

SEQ ID NO: 1001852 - RNA, 19 nt, Artificial Sequence
  Description of Artificial Sequence: Synthetic oligonucleotide
  Sense strand starting at position 3786 of SEQ ID NO: 914410
ucucgcauuuauguccaua

SEQ ID NO: 1001853 - RNA, 19 nt, Artificial Sequence
  Description of Artificial Sequence: Synthetic oligonucleotide
  Antisense strand to SEQ ID NO: 1001852
uauggacauaaaugcgaga

SEQ ID NO: 1001854 - RNA, 19 nt, Artificial Sequence
  Description of Artificial Sequence: Synthetic oligonucleotide
  Sense strand starting at position 3788 of SEQ ID NO: 914410
ucgcauuuauguccauaau

SEQ ID NO: 1001855 - RNA, 19 nt, Artificial Sequence
  Description of Artificial Sequence: Synthetic oligonucleotide
  Antisense strand to SEQ ID NO: 1001854
auuauggacauaaaugcga

SEQ ID NO: 1001856 - RNA, 19 nt, Artificial Sequence
  Description of Artificial Sequence: Synthetic oligonucleotide
  Sense strand starting at position 3873 of SEQ ID NO: 914410
cucuauauauugguaagac

SEQ ID NO: 1001857 - RNA, 19 nt, Artificial Sequence
  Description of Artificial Sequence: Synthetic oligonucleotide
  Antisense strand to SEQ ID NO: 1001856
gucuuaccaauauauagag

SEQ ID NO: 1001858 - RNA, 19 nt, Artificial Sequence
  Description of Artificial Sequence: Synthetic oligonucleotide
  Sense strand starting at position 3894 of SEQ ID NO: 914410
uuucuaauccagugaauug

SEQ ID NO: 1001859 - RNA, 19 nt, Artificial Sequence
  Description of Artificial Sequence: Synthetic oligonucleotide
  Antisense strand to SEQ ID NO: 1001858
caauucacuggauuagaaa

SEQ ID NO: 1001860 - RNA, 19 nt, Artificial Sequence
  Description of Artificial Sequence: Synthetic oligonucleotide
  Sense strand starting at position 3968 of SEQ ID NO: 914410
auuggacuguccuuacaca

SEQ ID NO: 1001861 - RNA, 19 nt, Artificial Sequence
  Description of Artificial Sequence: Synthetic oligonucleotide
  Antisense strand to SEQ ID NO: 1001860
uguguaaggacaguccaau

SEQ ID NO: 1001862 - RNA, 19 nt, Artificial Sequence
  Description of Artificial Sequence: Synthetic oligonucleotide
  Sense strand starting at position 3969 of SEQ ID NO: 914410
uuggacuguccuuacacaa

SEQ ID NO: 1001863 - RNA, 19 nt, Artificial Sequence
  Description of Artificial Sequence: Synthetic oligonucleotide
  Antisense strand to SEQ ID NO: 1001862
uuguguaaggacaguccaa

SEQ ID NO: 1001864 - RNA, 19 nt, Artificial Sequence
  Description of Artificial Sequence: Synthetic oligonucleotide
  Sense strand starting at position 250 of SEQ ID NO: 914411
cuaugugguguauggagau

SEQ ID NO: 1001865 - RNA, 19 nt, Artificial Sequence
  Description of Artificial Sequence: Synthetic oligonucleotide
  Antisense strand to SEQ ID NO: 1001864
aucuccauacaccacauag

SEQ ID NO: 1001866 - RNA, 19 nt, Artificial Sequence
  Description of Artificial Sequence: Synthetic oligonucleotide
  Sense strand starting at position 409 of SEQ ID NO: 914411
uugggaaauguaugguuaa

SEQ ID NO: 1001867 - RNA, 19 nt, Artificial Sequence
  Description of Artificial Sequence: Synthetic oligonucleotide
  Antisense strand to SEQ ID NO: 1001866
uuaaccauacauuucccaa

SEQ ID NO: 1001868 - RNA, 19 nt, Artificial Sequence
  Description of Artificial Sequence: Synthetic oligonucleotide
  Sense strand starting at position 444 of SEQ ID NO: 914411
gcaaauaaggagugaucag

SEQ ID NO: 1001869 - RNA, 19 nt, Artificial Sequence
  Description of Artificial Sequence: Synthetic oligonucleotide
  Antisense strand to SEQ ID NO: 1001868
cugaucacuccuuauuugc

SEQ ID NO: 1001870 - RNA, 19 nt, Artificial Sequence
  Description of Artificial Sequence: Synthetic oligonucleotide
  Sense strand starting at position 454 of SEQ ID NO: 914411
agugaucagccagguaaga

SEQ ID NO: 1001871 - RNA, 19 nt, Artificial Sequence
  Description of Artificial Sequence: Synthetic oligonucleotide
  Antisense strand to SEQ ID NO: 1001870
ucuuaccuggcugaucacu

SEQ ID NO: 1001872 - RNA, 19 nt, Artificial Sequence
  Description of Artificial Sequence: Synthetic oligonucleotide
  Sense strand starting at position 481 of SEQ ID NO: 914411
aggauagugcaguauuaug

SEQ ID NO: 1001873 - RNA, 19 nt, Artificial Sequence
  Description of Artificial Sequence: Synthetic oligonucleotide
  Antisense strand to SEQ ID NO: 1001872
cauaauacugcacuauccu

SEQ ID NO: 1001874 - RNA, 19 nt, Artificial Sequence
  Description of Artificial Sequence: Synthetic oligonucleotide
  Sense strand starting at position 605 of SEQ ID NO: 914411
ucuagaauauacuccguga

SEQ ID NO: 1001875 - RNA, 19 nt, Artificial Sequence
  Description of Artificial Sequence: Synthetic oligonucleotide
  Antisense strand to SEQ ID NO: 1001874
ucacggaguauauucuaga

SEQ ID NO: 1001876 - RNA, 19 nt, Artificial Sequence
  Description of Artificial Sequence: Synthetic oligonucleotide
  Sense strand starting at position 607 of SEQ ID NO: 914411
uagaauauacuccgugauc

SEQ ID NO: 1001877 - RNA, 19 nt, Artificial Sequence
  Description of Artificial Sequence: Synthetic oligonucleotide
  Antisense strand to SEQ ID NO: 1001876
gaucacggaguauauucua

SEQ ID NO: 1001878 - RNA, 19 nt, Artificial Sequence
  Description of Artificial Sequence: Synthetic oligonucleotide
  Sense strand starting at position 608 of SEQ ID NO: 914411
agaauauacuccgugaucu

SEQ ID NO: 1001879 - RNA, 19 nt, Artificial Sequence
  Description of Artificial Sequence: Synthetic oligonucleotide
  Antisense strand to SEQ ID NO: 1001878
agaucacggaguauauucu

SEQ ID NO: 1001880 - RNA, 19 nt, Artificial Sequence
  Description of Artificial Sequence: Synthetic oligonucleotide
  Sense strand starting at position 609 of SEQ ID NO: 914411
gaauauacuccgugaucuu

SEQ ID NO: 1001881 - RNA, 19 nt, Artificial Sequence
  Description of Artificial Sequence: Synthetic oligonucleotide
  Antisense strand to SEQ ID NO: 1001880
aagaucacggaguauauuc

SEQ ID NO: 1001882 - RNA, 19 nt, Artificial Sequence
  Description of Artificial Sequence: Synthetic oligonucleotide
  Sense strand starting at position 658 of SEQ ID NO: 914411
caguguuuacuacagggau

SEQ ID NO: 1001883 - RNA, 19 nt, Artificial Sequence
  Description of Artificial Sequence: Synthetic oligonucleotide
  Antisense strand to SEQ ID NO: 1001882
aucccuguaguaaacacug

SEQ ID NO: 1001884 - RNA, 19 nt, Artificial Sequence
  Description of Artificial Sequence: Synthetic oligonucleotide
  Sense strand starting at position 686 of SEQ ID NO: 914411
uuguuaguugaaugaacaa

SEQ ID NO: 1001885 - RNA, 19 nt, Artificial Sequence
  Description of Artificial Sequence: Synthetic oligonucleotide
  Antisense strand to SEQ ID NO: 1001884
uuguucauucaacuaacaa

SEQ ID NO: 1001886 - RNA, 19 nt, Artificial Sequence
  Description of Artificial Sequence: Synthetic oligonucleotide
  Sense strand starting at position 1039 of SEQ ID NO: 914411
aggauaaaucaguguaaua

SEQ ID NO: 1001887 - RNA, 19 nt, Artificial Sequence
  Description of Artificial Sequence: Synthetic oligonucleotide
  Antisense strand to SEQ ID NO: 1001886
uauuacacugauuuauccu

SEQ ID NO: 1001888 - RNA, 19 nt, Artificial Sequence
  Description of Artificial Sequence: Synthetic oligonucleotide
  Sense strand starting at position 1103 of SEQ ID NO: 914411
aagugucugaguuaacgaa

SEQ ID NO: 1001889 - RNA, 19 nt, Artificial Sequence
  Description of Artificial Sequence: Synthetic oligonucleotide
  Antisense strand to SEQ ID NO: 1001888
uucguuaacucagacacuu

SEQ ID NO: 1001890 - RNA, 19 nt, Artificial Sequence
  Description of Artificial Sequence: Synthetic oligonucleotide
  Sense strand starting at position 1107 of SEQ ID NO: 914411
gucugaguuaacgaaugga

SEQ ID NO: 1001891 - RNA, 19 nt, Artificial Sequence
  Description of Artificial Sequence: Synthetic oligonucleotide
  Antisense strand to SEQ ID NO: 1001890
uccauucguuaacucagac

SEQ ID NO: 1001892 - RNA, 19 nt, Artificial Sequence
  Description of Artificial Sequence: Synthetic oligonucleotide
  Sense strand starting at position 1110 of SEQ ID NO: 914411
ugaguuaacgaauggauug

SEQ ID NO: 1001893 - RNA, 19 nt, Artificial Sequence
  Description of Artificial Sequence: Synthetic oligonucleotide
  Antisense strand to SEQ ID NO: 1001892
caauccauucguuaacuca

SEQ ID NO: 1001894 - RNA, 19 nt, Artificial Sequence
  Description of Artificial Sequence: Synthetic oligonucleotide
  Sense strand starting at position 1111 of SEQ ID NO: 914411
gaguuaacgaauggauugu

SEQ ID NO: 1001895 - RNA, 19 nt, Artificial Sequence
  Description of Artificial Sequence: Synthetic oligonucleotide
  Antisense strand to SEQ ID NO: 1001894
acaauccauucguuaacuc

SEQ ID NO: 1001896 - RNA, 19 nt, Artificial Sequence
  Description of Artificial Sequence: Synthetic oligonucleotide
  Sense strand starting at position 1160 of SEQ ID NO: 914411
cagcuuugugacgaccuaa

SEQ ID NO: 1001897 - RNA, 19 nt, Artificial Sequence
  Description of Artificial Sequence: Synthetic oligonucleotide
  Antisense strand to SEQ ID NO: 1001896
uuaggucgucacaaagcug

SEQ ID NO: 1001898 - RNA, 19 nt, Artificial Sequence
  Description of Artificial Sequence: Synthetic oligonucleotide
  Sense strand starting at position 1257 of SEQ ID NO: 914411
cccuuagugcuaggacaua

SEQ ID NO: 1001899 - RNA, 19 nt, Artificial Sequence
  Description of Artificial Sequence: Synthetic oligonucleotide
  Antisense strand to SEQ ID NO: 1001898
uauguccuagcacuaaggg

SEQ ID NO: 1001900 - RNA, 19 nt, Artificial Sequence
  Description of Artificial Sequence: Synthetic oligonucleotide
  Sense strand starting at position 1797 of SEQ ID NO: 914411
gcaguacuugcguuacguc

SEQ ID NO: 1001901 - RNA, 19 nt, Artificial Sequence
  Description of Artificial Sequence: Synthetic oligonucleotide
  Antisense strand to SEQ ID NO: 1001900
gacguaacgcaaguacugc

SEQ ID NO: 1001902 - RNA, 19 nt, Artificial Sequence
  Description of Artificial Sequence: Synthetic oligonucleotide
  Sense strand starting at position 1806 of SEQ ID NO: 914411
gcguuacgucccuuuguga

SEQ ID NO: 1001903 - RNA, 19 nt, Artificial Sequence
  Description of Artificial Sequence: Synthetic oligonucleotide
  Antisense strand to SEQ ID NO: 1001902
ucacaaagggacguaacgc

SEQ ID NO: 1001904 - RNA, 19 nt, Artificial Sequence
  Description of Artificial Sequence: Synthetic oligonucleotide
  Sense strand starting at position 1807 of SEQ ID NO: 914411
cguuacgucccuuugugaa

SEQ ID NO: 1001905 - RNA, 19 nt, Artificial Sequence
  Description of Artificial Sequence: Synthetic oligonucleotide
  Antisense strand to SEQ ID NO: 1001904
uucacaaagggacguaacg

SEQ ID NO: 1001906 - RNA, 19 nt, Artificial Sequence
  Description of Artificial Sequence: Synthetic oligonucleotide
  Sense strand starting at position 2406 of SEQ ID NO: 914411
gccgaaagugacgacuaaa

SEQ ID NO: 1001907 - RNA, 19 nt, Artificial Sequence
  Description of Artificial Sequence: Synthetic oligonucleotide
  Antisense strand to SEQ ID NO: 1001906
uuuagucgucacuuucggc

SEQ ID NO: 1001908 - RNA, 19 nt, Artificial Sequence
  Description of Artificial Sequence: Synthetic oligonucleotide
  Sense strand starting at position 2569 of SEQ ID NO: 914411
gguuuaucugacugggaac

SEQ ID NO: 1001909 - RNA, 19 nt, Artificial Sequence
  Description of Artificial Sequence: Synthetic oligonucleotide
  Antisense strand to SEQ ID NO: 1001908
guucccagucagauaaacc

SEQ ID NO: 1001910 - RNA, 19 nt, Artificial Sequence
  Description of Artificial Sequence: Synthetic oligonucleotide
  Sense strand starting at position 2570 of SEQ ID NO: 914411
guuuaucugacugggaacu

SEQ ID NO: 1001911 - RNA, 19 nt, Artificial Sequence
  Description of Artificial Sequence: Synthetic oligonucleotide
  Antisense strand to SEQ ID NO: 1001910
aguucccagucagauaaac

SEQ ID NO: 1001912 - RNA, 19 nt, Artificial Sequence
  Description of Artificial Sequence: Synthetic oligonucleotide
  Sense strand starting at position 2571 of SEQ ID NO: 914411
uuuaucugacugggaacuu

SEQ ID NO: 1001913 - RNA, 19 nt, Artificial Sequence
  Description of Artificial Sequence: Synthetic oligonucleotide
  Antisense strand to SEQ ID NO: 1001912
aaguucccagucagauaaa

SEQ ID NO: 1001914 - RNA, 19 nt, Artificial Sequence
  Description of Artificial Sequence: Synthetic oligonucleotide
  Sense strand starting at position 2771 of SEQ ID NO: 914411
acugguauuguuugauuaa

SEQ ID NO: 1001915 - RNA, 19 nt, Artificial Sequence
  Description of Artificial Sequence: Synthetic oligonucleotide
  Antisense strand to SEQ ID NO: 1001914
uuaaucaaacaauaccagu

SEQ ID NO: 1001916 - RNA, 19 nt, Artificial Sequence
  Description of Artificial Sequence: Synthetic oligonucleotide
  Sense strand starting at position 2774 of SEQ ID NO: 914411
gguauuguuugauuaauca

SEQ ID NO: 1001917 - RNA, 19 nt, Artificial Sequence
  Description of Artificial Sequence: Synthetic oligonucleotide
  Antisense strand to SEQ ID NO: 1001916
ugauuaaucaaacaauacc

SEQ ID NO: 1001918 - RNA, 19 nt, Artificial Sequence
  Description of Artificial Sequence: Synthetic oligonucleotide
  Sense strand starting at position 2975 of SEQ ID NO: 914411
cagucauaacuaggauguu

SEQ ID NO: 1001919 - RNA, 19 nt, Artificial Sequence
  Description of Artificial Sequence: Synthetic oligonucleotide
  Antisense strand to SEQ ID NO: 1001918
aacauccuaguuaugacug

SEQ ID NO: 1001920 - RNA, 19 nt, Artificial Sequence
  Description of Artificial Sequence: Synthetic oligonucleotide
  Sense strand starting at position 2987 of SEQ ID NO: 914411
ggauguuuacuguagccaa

SEQ ID NO: 1001921 - RNA, 19 nt, Artificial Sequence
  Description of Artificial Sequence: Synthetic oligonucleotide
  Antisense strand to SEQ ID NO: 1001920
uuggcuacaguaaacaucc

SEQ ID NO: 1001922 - RNA, 19 nt, Artificial Sequence
  Description of Artificial Sequence: Synthetic oligonucleotide
  Sense strand starting at position 3006 of SEQ ID NO: 914411
aauggaaauccgugcauca

SEQ ID NO: 1001923 - RNA, 19 nt, Artificial Sequence
  Description of Artificial Sequence: Synthetic oligonucleotide
  Antisense strand to SEQ ID NO: 1001922
ugaugcacggauuuccauu

SEQ ID NO: 1001924 - RNA, 19 nt, Artificial Sequence
  Description of Artificial Sequence: Synthetic oligonucleotide
  Sense strand starting at position 3008 of SEQ ID NO: 914411
uggaaauccgugcaucauu

SEQ ID NO: 1001925 - RNA, 19 nt, Artificial Sequence
  Description of Artificial Sequence: Synthetic oligonucleotide
  Antisense strand to SEQ ID NO: 1001924
aaugaugcacggauuucca

SEQ ID NO: 1001926 - RNA, 19 nt, Artificial Sequence
  Description of Artificial Sequence: Synthetic oligonucleotide
  Sense strand starting at position 3034 of SEQ ID NO: 914411
gaaguuucugauuacguuu

SEQ ID NO: 1001927 - RNA, 19 nt, Artificial Sequence
  Description of Artificial Sequence: Synthetic oligonucleotide
  Antisense strand to SEQ ID NO: 1001926
aaacguaaucagaaacuuc

SEQ ID NO: 1001928 - RNA, 19 nt, Artificial Sequence
  Description of Artificial Sequence: Synthetic oligonucleotide
  Sense strand starting at position 3381 of SEQ ID NO: 914411
accucuuauuuguagauga

SEQ ID NO: 1001929 - RNA, 19 nt, Artificial Sequence
  Description of Artificial Sequence: Synthetic oligonucleotide
  Antisense strand to SEQ ID NO: 1001928
ucaucuacaaauaagaggu

SEQ ID NO: 1001930 - RNA, 19 nt, Artificial Sequence
  Description of Artificial Sequence: Synthetic oligonucleotide
  Sense strand starting at position 3412 of SEQ ID NO: 914411
aagcauugugaauaguaaa

SEQ ID NO: 1001931 - RNA, 19 nt, Artificial Sequence
  Description of Artificial Sequence: Synthetic oligonucleotide
  Antisense strand to SEQ ID NO: 1001930
uuuacuauucacaaugcuu

SEQ ID NO: 1001932 - RNA, 19 nt, Artificial Sequence
  Description of Artificial Sequence: Synthetic oligonucleotide
  Sense strand starting at position 3568 of SEQ ID NO: 914411
gggcuuggguacucugaaa

SEQ ID NO: 1001933 - RNA, 19 nt, Artificial Sequence
  Description of Artificial Sequence: Synthetic oligonucleotide
  Antisense strand to SEQ ID NO: 1001932
uuucagaguacccaagccc

SEQ ID NO: 1001934 - RNA, 19 nt, Artificial Sequence
  Description of Artificial Sequence: Synthetic oligonucleotide
  Sense strand starting at position 3649 of SEQ ID NO: 914411
uugguucuugaucauguga

SEQ ID NO: 1001935 - RNA, 19 nt, Artificial Sequence
  Description of Artificial Sequence: Synthetic oligonucleotide
  Antisense strand to SEQ ID NO: 1001934
ucacaugaucaagaaccaa

SEQ ID NO: 1001936 - RNA, 19 nt, Artificial Sequence
  Description of Artificial Sequence: Synthetic oligonucleotide
  Sense strand starting at position 3665 of SEQ ID NO: 914411
ugaggaugaaacuguccau

SEQ ID NO: 1001937 - RNA, 19 nt, Artificial Sequence
  Description of Artificial Sequence: Synthetic oligonucleotide
  Antisense strand to SEQ ID NO: 1001936
auggacaguuucauccuca

SEQ ID NO: 1001938 - RNA, 19 nt, Artificial Sequence
  Description of Artificial Sequence: Synthetic oligonucleotide
  Sense strand starting at position 3668 of SEQ ID NO: 914411
ggaugaaacuguccaugua

SEQ ID NO: 1001939 - RNA, 19 nt, Artificial Sequence
  Description of Artificial Sequence: Synthetic oligonucleotide
  Antisense strand to SEQ ID NO: 1001938
uacauggacaguuucaucc

SEQ ID NO: 1001940 - RNA, 19 nt, Artificial Sequence
  Description of Artificial Sequence: Synthetic oligonucleotide
  Sense strand starting at position 3669 of SEQ ID NO: 914411
gaugaaacuguccauguau

SEQ ID NO: 1001941 - RNA, 19 nt, Artificial Sequence
  Description of Artificial Sequence: Synthetic oligonucleotide
  Antisense strand to SEQ ID NO: 1001940
auacauggacaguuucauc

SEQ ID NO: 1001942 - RNA, 19 nt, Artificial Sequence
  Description of Artificial Sequence: Synthetic oligonucleotide
  Sense strand starting at position 3723 of SEQ ID NO: 914411
auggucagauuggauauuu

SEQ ID NO: 1001943 - RNA, 19 nt, Artificial Sequence
  Description of Artificial Sequence: Synthetic oligonucleotide
  Antisense strand to SEQ ID NO: 1001942
aaauauccaaucugaccau

SEQ ID NO: 1001944 - RNA, 19 nt, Artificial Sequence
  Description of Artificial Sequence: Synthetic oligonucleotide
  Sense strand starting at position 123 of SEQ ID NO: 914412
auccuccagcuuuaguaua

SEQ ID NO: 1001945 - RNA, 19 nt, Artificial Sequence
  Description of Artificial Sequence: Synthetic oligonucleotide
  Antisense strand to SEQ ID NO: 1001944
uauacuaaagcuggaggau

SEQ ID NO: 1001946 - RNA, 19 nt, Artificial Sequence
  Description of Artificial Sequence: Synthetic oligonucleotide
  Sense strand starting at position 128 of SEQ ID NO: 914412
ccagcuuuaguauaaagaa

SEQ ID NO: 1001947 - RNA, 19 nt, Artificial Sequence
  Description of Artificial Sequence: Synthetic oligonucleotide
  Antisense strand to SEQ ID NO: 1001946
uucuuuauacuaaagcugg

SEQ ID NO: 1001948 - RNA, 19 nt, Artificial Sequence
  Description of Artificial Sequence: Synthetic oligonucleotide
  Sense strand starting at position 367 of SEQ ID NO: 914412
aaagguguaucucuuuaag

SEQ ID NO: 1001949 - RNA, 19 nt, Artificial Sequence
  Description of Artificial Sequence: Synthetic oligonucleotide
  Antisense strand to SEQ ID NO: 1001948
cuuaaagagauacaccuuu

SEQ ID NO: 1001950 - RNA, 19 nt, Artificial Sequence
  Description of Artificial Sequence: Synthetic oligonucleotide
  Sense strand starting at position 369 of SEQ ID NO: 914412
agguguaucucuuuaagaa

SEQ ID NO: 1001951 - RNA, 19 nt, Artificial Sequence
  Description of Artificial Sequence: Synthetic oligonucleotide
  Antisense strand to SEQ ID NO: 1001950
uucuuaaagagauacaccu

SEQ ID NO: 1001952 - RNA, 19 nt, Artificial Sequence
  Description of Artificial Sequence: Synthetic oligonucleotide
  Sense strand starting at position 370 of SEQ ID NO: 914412
gguguaucucuuuaagaaa

SEQ ID NO: 1001953 - RNA, 19 nt, Artificial Sequence
  Description of Artificial Sequence: Synthetic oligonucleotide
  Antisense strand to SEQ ID NO: 1001952
uuucuuaaagagauacacc

SEQ ID NO: 1001954 - RNA, 19 nt, Artificial Sequence
  Description of Artificial Sequence: Synthetic oligonucleotide
  Sense strand starting at position 548 of SEQ ID NO: 914412
uauauagaggcagguauua

SEQ ID NO: 1001955 - RNA, 19 nt, Artificial Sequence
  Description of Artificial Sequence: Synthetic oligonucleotide
  Antisense strand to SEQ ID NO: 1001954
uaauaccugccucuauaua

SEQ ID NO: 1001956 - RNA, 19 nt, Artificial Sequence
  Description of Artificial Sequence: Synthetic oligonucleotide
  Sense strand starting at position 589 of SEQ ID NO: 914412
auuaguugacaacgugaga

SEQ ID NO: 1001957 - RNA, 19 nt, Artificial Sequence
  Description of Artificial Sequence: Synthetic oligonucleotide
  Antisense strand to SEQ ID NO: 1001956
ucucacguugucaacuaau

SEQ ID NO: 1001958 - RNA, 19 nt, Artificial Sequence
  Description of Artificial Sequence: Synthetic oligonucleotide
  Sense strand starting at position 592 of SEQ ID NO: 914412
aguugacaacgugagagau

SEQ ID NO: 1001959 - RNA, 19 nt, Artificial Sequence
  Description of Artificial Sequence: Synthetic oligonucleotide
  Antisense strand to SEQ ID NO: 1001958
aucucucacguugucaacu

SEQ ID NO: 1001960 - RNA, 19 nt, Artificial Sequence
  Description of Artificial Sequence: Synthetic oligonucleotide
  Sense strand starting at position 847 of SEQ ID NO: 914412
uucuuagaacuguauaugu

SEQ ID NO: 1001961 - RNA, 19 nt, Artificial Sequence
  Description of Artificial Sequence: Synthetic oligonucleotide
  Antisense strand to SEQ ID NO: 1001960
acauauacaguucuaagaa

SEQ ID NO: 1001962 - RNA, 19 nt, Artificial Sequence
  Description of Artificial Sequence: Synthetic oligonucleotide
  Sense strand starting at position 852 of SEQ ID NO: 914412
agaacuguauauguacaga

SEQ ID NO: 1001963 - RNA, 19 nt, Artificial Sequence
  Description of Artificial Sequence: Synthetic oligonucleotide
  Antisense strand to SEQ ID NO: 1001962
ucuguacauauacaguucu

SEQ ID NO: 1001964 - RNA, 19 nt, Artificial Sequence
  Description of Artificial Sequence: Synthetic oligonucleotide
  Sense strand starting at position 1053 of SEQ ID NO: 914412
uaaagaauuccaggugcug

SEQ ID NO: 1001965 - RNA, 19 nt, Artificial Sequence
  Description of Artificial Sequence: Synthetic oligonucleotide
  Antisense strand to SEQ ID NO: 1001964
cagcaccuggaauucuuua

SEQ ID NO: 1001966 - RNA, 19 nt, Artificial Sequence
  Description of Artificial Sequence: Synthetic oligonucleotide
  Sense strand starting at position 1341 of SEQ ID NO: 914412
gguauuuauacuggcgauu

SEQ ID NO: 1001967 - RNA, 19 nt, Artificial Sequence
  Description of Artificial Sequence: Synthetic oligonucleotide
  Antisense strand to SEQ ID NO: 1001966
aaucgccaguauaaauacc

SEQ ID NO: 1001968 - RNA, 19 nt, Artificial Sequence
  Description of Artificial Sequence: Synthetic oligonucleotide
  Sense strand starting at position 1396 of SEQ ID NO: 914412
agaccaucucacgaguuau

SEQ ID NO: 1001969 - RNA, 19 nt, Artificial Sequence
  Description of Artificial Sequence: Synthetic oligonucleotide
  Antisense strand to SEQ ID NO: 1001968
auaacucgugagauggucu

SEQ ID NO: 1001970 - RNA, 19 nt, Artificial Sequence
  Description of Artificial Sequence: Synthetic oligonucleotide
  Sense strand starting at position 1528 of SEQ ID NO: 914412
cuuauacugugacuacuau

SEQ ID NO: 1001971 - RNA, 19 nt, Artificial Sequence
  Description of Artificial Sequence: Synthetic oligonucleotide
  Antisense strand to SEQ ID NO: 1001970
auaguagucacaguauaag

SEQ ID NO: 1001972 - RNA, 19 nt, Artificial Sequence
  Description of Artificial Sequence: Synthetic oligonucleotide
  Sense strand starting at position 1529 of SEQ ID NO: 914412
uuauacugugacuacuauu

SEQ ID NO: 1001973 - RNA, 19 nt, Artificial Sequence
  Description of Artificial Sequence: Synthetic oligonucleotide
  Antisense strand to SEQ ID NO: 1001972
aauaguagucacaguauaa

SEQ ID NO: 1001974 - RNA, 19 nt, Artificial Sequence
  Description of Artificial Sequence: Synthetic oligonucleotide
  Sense strand starting at position 1535 of SEQ ID NO: 914412
ugugacuacuauucgaaag

SEQ ID NO: 1001975 - RNA, 19 nt, Artificial Sequence
  Description of Artificial Sequence: Synthetic oligonucleotide
  Antisense strand to SEQ ID NO: 1001974
cuuucgaauaguagucaca

SEQ ID NO: 1001976 - RNA, 19 nt, Artificial Sequence
  Description of Artificial Sequence: Synthetic oligonucleotide
  Sense strand starting at position 1536 of SEQ ID NO: 914412
gugacuacuauucgaaaga

SEQ ID NO: 1001977 - RNA, 19 nt, Artificial Sequence
  Description of Artificial Sequence: Synthetic oligonucleotide
  Antisense strand to SEQ ID NO: 1001976
ucuuucgaauaguagucac

SEQ ID NO: 1001978 - RNA, 19 nt, Artificial Sequence
  Description of Artificial Sequence: Synthetic oligonucleotide
  Sense strand starting at position 1556 of SEQ ID NO: 914412
ucugaauagagcugggcaa

SEQ ID NO: 1001979 - RNA, 19 nt, Artificial Sequence
  Description of Artificial Sequence: Synthetic oligonucleotide
  Antisense strand to SEQ ID NO: 1001978
uugcccagcucuauucaga

SEQ ID NO: 1001980 - RNA, 19 nt, Artificial Sequence
  Description of Artificial Sequence: Synthetic oligonucleotide
  Sense strand starting at position 1557 of SEQ ID NO: 914412
cugaauagagcugggcaaa

SEQ ID NO: 1001981 - RNA, 19 nt, Artificial Sequence
  Description of Artificial Sequence: Synthetic oligonucleotide
  Antisense strand to SEQ ID NO: 1001980
uuugcccagcucuauucag

SEQ ID NO: 1001982 - RNA, 19 nt, Artificial Sequence
  Description of Artificial Sequence: Synthetic oligonucleotide
  Sense strand starting at position 2205 of SEQ ID NO: 914412
uucugugacaucugagaga

SEQ ID NO: 1001983 - RNA, 19 nt, Artificial Sequence
  Description of Artificial Sequence: Synthetic oligonucleotide
  Antisense strand to SEQ ID NO: 1001982
ucucucagaugucacagaa

SEQ ID NO: 1001984 - RNA, 19 nt, Artificial Sequence
  Description of Artificial Sequence: Synthetic oligonucleotide
  Sense strand starting at position 2309 of SEQ ID NO: 914412
agugaucagccucaaaucu

SEQ ID NO: 1001985 - RNA, 19 nt, Artificial Sequence
  Description of Artificial Sequence: Synthetic oligonucleotide
  Antisense strand to SEQ ID NO: 1001984
agauuugaggcugaucacu

SEQ ID NO: 1001986 - RNA, 19 nt, Artificial Sequence
  Description of Artificial Sequence: Synthetic oligonucleotide
  Sense strand starting at position 2684 of SEQ ID NO: 914412
cuauguggaucugcagaaa

SEQ ID NO: 1001987 - RNA, 19 nt, Artificial Sequence
  Description of Artificial Sequence: Synthetic oligonucleotide
  Antisense strand to SEQ ID NO: 1001986
uuucugcagauccacauag

SEQ ID NO: 1001988 - RNA, 19 nt, Artificial Sequence
  Description of Artificial Sequence: Synthetic oligonucleotide
  Sense strand starting at position 2918 of SEQ ID NO: 914412
gggaucaguguuuggaaca

SEQ ID NO: 1001989 - RNA, 19 nt, Artificial Sequence
  Description of Artificial Sequence: Synthetic oligonucleotide
  Antisense strand to SEQ ID NO: 1001988
uguuccaaacacugauccc

SEQ ID NO: 1001990 - RNA, 19 nt, Artificial Sequence
  Description of Artificial Sequence: Synthetic oligonucleotide
  Sense strand starting at position 2984 of SEQ ID NO: 914412
caccgauacuccuuugaga

SEQ ID NO: 1001991 - RNA, 19 nt, Artificial Sequence
  Description of Artificial Sequence: Synthetic oligonucleotide
  Antisense strand to SEQ ID NO: 1001990
ucucaaaggaguaucggug

SEQ ID NO: 1001992 - RNA, 19 nt, Artificial Sequence
  Description of Artificial Sequence: Synthetic oligonucleotide
  Sense strand starting at position 2986 of SEQ ID NO: 914412
ccgauacuccuuugagaua

SEQ ID NO: 1001993 - RNA, 19 nt, Artificial Sequence
  Description of Artificial Sequence: Synthetic oligonucleotide
  Antisense strand to SEQ ID NO: 1001992
uaucucaaaggaguaucgg

SEQ ID NO: 1001994 - RNA, 19 nt, Artificial Sequence
  Description of Artificial Sequence: Synthetic oligonucleotide
  Sense strand starting at position 3156 of SEQ ID NO: 914412
cucugccauuuauuaguua

SEQ ID NO: 1001995 - RNA, 19 nt, Artificial Sequence
  Description of Artificial Sequence: Synthetic oligonucleotide
  Antisense strand to SEQ ID NO: 1001994
uaacuaauaaauggcagag

SEQ ID NO: 1001996 - RNA, 19 nt, Artificial Sequence
  Description of Artificial Sequence: Synthetic oligonucleotide
  Sense strand starting at position 3281 of SEQ ID NO: 914412
cacguaaaguacucaauag

SEQ ID NO: 1001997 - RNA, 19 nt, Artificial Sequence
  Description of Artificial Sequence: Synthetic oligonucleotide
  Antisense strand to SEQ ID NO: 1001996
cuauugaguacuuuacgug

SEQ ID NO: 1001998 - RNA, 19 nt, Artificial Sequence
  Description of Artificial Sequence: Synthetic oligonucleotide
  Sense strand starting at position 3291 of SEQ ID NO: 914412
acucaauaguggccagaau

SEQ ID NO: 1001999 - RNA, 19 nt, Artificial Sequence
  Description of Artificial Sequence: Synthetic oligonucleotide
  Antisense strand to SEQ ID NO: 1001998
auucuggccacuauugagu

SEQ ID NO: 1002000 - RNA, 19 nt, Artificial Sequence
  Description of Artificial Sequence: Synthetic oligonucleotide
  Sense strand starting at position 3408 of SEQ ID NO: 914412
ugaauucucugagcaacuc

SEQ ID NO: 1002001 - RNA, 19 nt, Artificial Sequence
  Description of Artificial Sequence: Synthetic oligonucleotide
  Antisense strand to SEQ ID NO: 1002000
gaguugcucagagaauuca

SEQ ID NO: 1002002 - RNA, 19 nt, Artificial Sequence
  Description of Artificial Sequence: Synthetic oligonucleotide
  Sense strand starting at position 3445 of SEQ ID NO: 914412
gugcuuaugcaacuuguuu

SEQ ID NO: 1002003 - RNA, 19 nt, Artificial Sequence
  Description of Artificial Sequence: Synthetic oligonucleotide
  Antisense strand to SEQ ID NO: 1002002
aaacaaguugcauaagcac

SEQ ID NO: 1002004 - RNA, 19 nt, Artificial Sequence
  Description of Artificial Sequence: Synthetic oligonucleotide
  Sense strand starting at position 3589 of SEQ ID NO: 914412
agaacuagcuagcuuagaa

SEQ ID NO: 1002005 - RNA, 19 nt, Artificial Sequence
  Description of Artificial Sequence: Synthetic oligonucleotide
  Antisense strand to SEQ ID NO: 1002004
uucuaagcuagcuaguucu

SEQ ID NO: 1002006 - RNA, 19 nt, Artificial Sequence
  Description of Artificial Sequence: Synthetic oligonucleotide
  Sense strand starting at position 3698 of SEQ ID NO: 914412
gucuuaguuauagauugua

SEQ ID NO: 1002007 - RNA, 19 nt, Artificial Sequence
  Description of Artificial Sequence: Synthetic oligonucleotide
  Antisense strand to SEQ ID NO: 1002006
uacaaucuauaacuaagac

SEQ ID NO: 1002008 - RNA, 19 nt, Artificial Sequence
  Description of Artificial Sequence: Synthetic oligonucleotide
  Sense strand starting at position 3731 of SEQ ID NO: 914412
cagugaguacaguaucaua

SEQ ID NO: 1002009 - RNA, 19 nt, Artificial Sequence
  Description of Artificial Sequence: Synthetic oligonucleotide
  Antisense strand to SEQ ID NO: 1002008
uaugauacuguacucacug

SEQ ID NO: 1002010 - RNA, 19 nt, Artificial Sequence
  Description of Artificial Sequence: Synthetic oligonucleotide
  Sense strand starting at position 3739 of SEQ ID NO: 914412
acaguaucauaucucuaga

SEQ ID NO: 1002011 - RNA, 19 nt, Artificial Sequence
  Description of Artificial Sequence: Synthetic oligonucleotide
  Antisense strand to SEQ ID NO: 1002010
ucuagagauaugauacugu

SEQ ID NO: 1002012 - RNA, 19 nt, Artificial Sequence
  Description of Artificial Sequence: Synthetic oligonucleotide
  Sense strand starting at position 3741 of SEQ ID NO: 914412
aguaucauaucucuagagu

SEQ ID NO: 1002013 - RNA, 19 nt, Artificial Sequence
  Description of Artificial Sequence: Synthetic oligonucleotide
  Antisense strand to SEQ ID NO: 1002012
acucuagagauaugauacu

SEQ ID NO: 1002014 - RNA, 19 nt, Artificial Sequence
  Description of Artificial Sequence: Synthetic oligonucleotide
  Sense strand starting at position 3742 of SEQ ID NO: 914412
guaucauaucucuagagua

SEQ ID NO: 1002015 - RNA, 19 nt, Artificial Sequence
  Description of Artificial Sequence: Synthetic oligonucleotide
  Antisense strand to SEQ ID NO: 1002014
uacucuagagauaugauac

SEQ ID NO: 1002016 - RNA, 19 nt, Artificial Sequence
  Description of Artificial Sequence: Synthetic oligonucleotide
  Sense strand starting at position 3754 of SEQ ID NO: 914412
uagaguagccaguauucca

SEQ ID NO: 1002017 - RNA, 19 nt, Artificial Sequence
  Description of Artificial Sequence: Synthetic oligonucleotide
  Antisense strand to SEQ ID NO: 1002016
uggaauacuggcuacucua

SEQ ID NO: 1002018 - RNA, 19 nt, Artificial Sequence
  Description of Artificial Sequence: Synthetic oligonucleotide
  Sense strand starting at position 3831 of SEQ ID NO: 914412
cuagauacagugugaggaa

SEQ ID NO: 1002019 - RNA, 19 nt, Artificial Sequence
  Description of Artificial Sequence: Synthetic oligonucleotide
  Antisense strand to SEQ ID NO: 1002018
uuccucacacuguaucuag

SEQ ID NO: 1002020 - RNA, 19 nt, Artificial Sequence
  Description of Artificial Sequence: Synthetic oligonucleotide
  Sense strand starting at position 3887 of SEQ ID NO: 914412
aucagagcucucugaaaua

SEQ ID NO: 1002021 - RNA, 19 nt, Artificial Sequence
  Description of Artificial Sequence: Synthetic oligonucleotide
  Antisense strand to SEQ ID NO: 1002020
uauuucagagagcucugau

SEQ ID NO: 1002022 - RNA, 19 nt, Artificial Sequence
  Description of Artificial Sequence: Synthetic oligonucleotide
  Sense strand starting at position 3973 of SEQ ID NO: 914412
ccacuuacauuguugagga

SEQ ID NO: 1002023 - RNA, 19 nt, Artificial Sequence
  Description of Artificial Sequence: Synthetic oligonucleotide
  Antisense strand to SEQ ID NO: 1002022
uccucaacaauguaagugg

SEQ ID NO: 1002024 - RNA, 19 nt, Artificial Sequence
  Description of Artificial Sequence: Synthetic oligonucleotide
  Sense strand starting at position 228 of SEQ ID NO: 914413
acagcugaucuacagaagu

SEQ ID NO: 1002025 - RNA, 19 nt, Artificial Sequence
  Description of Artificial Sequence: Synthetic oligonucleotide
  Antisense strand to SEQ ID NO: 1002024
acuucuguagaucagcugu

SEQ ID NO: 1002026 - RNA, 19 nt, Artificial Sequence
  Description of Artificial Sequence: Synthetic oligonucleotide
  Sense strand starting at position 239 of SEQ ID NO: 914413
acagaaguucuuuaaagca

SEQ ID NO: 1002027 - RNA, 19 nt, Artificial Sequence
  Description of Artificial Sequence: Synthetic oligonucleotide
  Antisense strand to SEQ ID NO: 1002026
ugcuuuaaagaacuucugu

SEQ ID NO: 1002028 - RNA, 19 nt, Artificial Sequence
  Description of Artificial Sequence: Synthetic oligonucleotide
  Sense strand starting at position 284 of SEQ ID NO: 914413
acuaccaucucauuagagu

SEQ ID NO: 1002029 - RNA, 19 nt, Artificial Sequence
  Description of Artificial Sequence: Synthetic oligonucleotide
  Antisense strand to SEQ ID NO: 1002028
acucuaaugagaugguagu

SEQ ID NO: 1002030 - RNA, 19 nt, Artificial Sequence
  Description of Artificial Sequence: Synthetic oligonucleotide
  Sense strand starting at position 285 of SEQ ID NO: 914413
cuaccaucucauuagagug

SEQ ID NO: 1002031 - RNA, 19 nt, Artificial Sequence
  Description of Artificial Sequence: Synthetic oligonucleotide
  Antisense strand to SEQ ID NO: 1002030
cacucuaaugagaugguag

SEQ ID NO: 1002032 - RNA, 19 nt, Artificial Sequence
  Description of Artificial Sequence: Synthetic oligonucleotide
  Sense strand starting at position 324 of SEQ ID NO: 914413
caaggaaucuuugcaggag

SEQ ID NO: 1002033 - RNA, 19 nt, Artificial Sequence
  Description of Artificial Sequence: Synthetic oligonucleotide
  Antisense strand to SEQ ID NO: 1002032
cuccugcaaagauuccuug

SEQ ID NO: 1002034 - RNA, 19 nt, Artificial Sequence
  Description of Artificial Sequence: Synthetic oligonucleotide
  Sense strand starting at position 327 of SEQ ID NO: 914413
ggaaucuuugcaggaggaa

SEQ ID NO: 1002035 - RNA, 19 nt, Artificial Sequence
  Description of Artificial Sequence: Synthetic oligonucleotide
  Antisense strand to SEQ ID NO: 1002034
uuccuccugcaaagauucc

SEQ ID NO: 1002036 - RNA, 19 nt, Artificial Sequence
  Description of Artificial Sequence: Synthetic oligonucleotide
  Sense strand starting at position 330 of SEQ ID NO: 914413
aucuuugcaggaggaauaa

SEQ ID NO: 1002037 - RNA, 19 nt, Artificial Sequence
  Description of Artificial Sequence: Synthetic oligonucleotide
  Antisense strand to SEQ ID NO: 1002036
uuauuccuccugcaaagau

SEQ ID NO: 1002038 - RNA, 19 nt, Artificial Sequence
  Description of Artificial Sequence: Synthetic oligonucleotide
  Sense strand starting at position 416 of SEQ ID NO: 914413
augugauuuacacgugcua

SEQ ID NO: 1002039 - RNA, 19 nt, Artificial Sequence
  Description of Artificial Sequence: Synthetic oligonucleotide
  Antisense strand to SEQ ID NO: 1002038
uagcacguguaaaucacau

SEQ ID NO: 1002040 - RNA, 19 nt, Artificial Sequence
  Description of Artificial Sequence: Synthetic oligonucleotide
  Sense strand starting at position 418 of SEQ ID NO: 914413
gugauuuacacgugcuauc

SEQ ID NO: 1002041 - RNA, 19 nt, Artificial Sequence
  Description of Artificial Sequence: Synthetic oligonucleotide
  Antisense strand to SEQ ID NO: 1002040
gauagcacguguaaaucac

SEQ ID NO: 1002042 - RNA, 19 nt, Artificial Sequence
  Description of Artificial Sequence: Synthetic oligonucleotide
  Sense strand starting at position 808 of SEQ ID NO: 914413
aauauaugagguugguaaa

SEQ ID NO: 1002043 - RNA, 19 nt, Artificial Sequence
  Description of Artificial Sequence: Synthetic oligonucleotide
  Antisense strand to SEQ ID NO: 1002042
uuuaccaaccucauauauu

SEQ ID NO: 1002044 - RNA, 19 nt, Artificial Sequence
  Description of Artificial Sequence: Synthetic oligonucleotide
  Sense strand starting at position 920 of SEQ ID NO: 914413
gaauccagccaguaagcau

SEQ ID NO: 1002045 - RNA, 19 nt, Artificial Sequence
  Description of Artificial Sequence: Synthetic oligonucleotide
  Antisense strand to SEQ ID NO: 1002044
augcuuacuggcuggauuc

SEQ ID NO: 1002046 - RNA, 19 nt, Artificial Sequence
  Description of Artificial Sequence: Synthetic oligonucleotide
  Sense strand starting at position 1005 of SEQ ID NO: 914413
ucaagaaaucugugcuaug

SEQ ID NO: 1002047 - RNA, 19 nt, Artificial Sequence
  Description of Artificial Sequence: Synthetic oligonucleotide
  Antisense strand to SEQ ID NO: 1002046
cauagcacagauuucuuga

SEQ ID NO: 1002048 - RNA, 19 nt, Artificial Sequence
  Description of Artificial Sequence: Synthetic oligonucleotide
  Sense strand starting at position 1159 of SEQ ID NO: 914413
guaacacaaguaugaaauu

SEQ ID NO: 1002049 - RNA, 19 nt, Artificial Sequence
  Description of Artificial Sequence: Synthetic oligonucleotide
  Antisense strand to SEQ ID NO: 1002048
aauuucauacuuguguuac

SEQ ID NO: 1002050 - RNA, 19 nt, Artificial Sequence
  Description of Artificial Sequence: Synthetic oligonucleotide
  Sense strand starting at position 1451 of SEQ ID NO: 914413
ugguaaacaucuuuaacag

SEQ ID NO: 1002051 - RNA, 19 nt, Artificial Sequence
  Description of Artificial Sequence: Synthetic oligonucleotide
  Antisense strand to SEQ ID NO: 1002050
cuguuaaagauguuuacca

SEQ ID NO: 1002052 - RNA, 19 nt, Artificial Sequence
  Description of Artificial Sequence: Synthetic oligonucleotide
  Sense strand starting at position 2064 of SEQ ID NO: 914413
ccagaaauccuagggagca

SEQ ID NO: 1002053 - RNA, 19 nt, Artificial Sequence
  Description of Artificial Sequence: Synthetic oligonucleotide
  Antisense strand to SEQ ID NO: 1002052
ugcucccuaggauuucugg

SEQ ID NO: 1002054 - RNA, 19 nt, Artificial Sequence
  Description of Artificial Sequence: Synthetic oligonucleotide
  Sense strand starting at position 2153 of SEQ ID NO: 914413
ugaccuaacuccuuggauu

SEQ ID NO: 1002055 - RNA, 19 nt, Artificial Sequence
  Description of Artificial Sequence: Synthetic oligonucleotide
  Antisense strand to SEQ ID NO: 1002054
aauccaaggaguuagguca

SEQ ID NO: 1002056 - RNA, 19 nt, Artificial Sequence
  Description of Artificial Sequence: Synthetic oligonucleotide
  Sense strand starting at position 2258 of SEQ ID NO: 914413
ugaagcgaucucuaaguca

SEQ ID NO: 1002057 - RNA, 19 nt, Artificial Sequence
  Description of Artificial Sequence: Synthetic oligonucleotide
  Antisense strand to SEQ ID NO: 1002056
ugacuuagagaucgcuuca

SEQ ID NO: 1002058 - RNA, 19 nt, Artificial Sequence
  Description of Artificial Sequence: Synthetic oligonucleotide
  Sense strand starting at position 2261 of SEQ ID NO: 914413
agcgaucucuaagucauuu

SEQ ID NO: 1002059 - RNA, 19 nt, Artificial Sequence
  Description of Artificial Sequence: Synthetic oligonucleotide
  Antisense strand to SEQ ID NO: 1002058
aaaugacuuagagaucgcu

SEQ ID NO: 1002060 - RNA, 19 nt, Artificial Sequence
  Description of Artificial Sequence: Synthetic oligonucleotide
  Sense strand starting at position 2320 of SEQ ID NO: 914413
gaaacuaugucucugcaga

SEQ ID NO: 1002061 - RNA, 19 nt, Artificial Sequence
  Description of Artificial Sequence: Synthetic oligonucleotide
  Antisense strand to SEQ ID NO: 1002060
ucugcagagacauaguuuc

SEQ ID NO: 1002062 - RNA, 19 nt, Artificial Sequence
  Description of Artificial Sequence: Synthetic oligonucleotide
  Sense strand starting at position 2339 of SEQ ID NO: 914413
ugguaacagucaguaauaa

SEQ ID NO: 1002063 - RNA, 19 nt, Artificial Sequence
  Description of Artificial Sequence: Synthetic oligonucleotide
  Antisense strand to SEQ ID NO: 1002062
uuauuacugacuguuacca

SEQ ID NO: 1002064 - RNA, 19 nt, Artificial Sequence
  Description of Artificial Sequence: Synthetic oligonucleotide
  Sense strand starting at position 2340 of SEQ ID NO: 914413
gguaacagucaguaauaac

SEQ ID NO: 1002065 - RNA, 19 nt, Artificial Sequence
  Description of Artificial Sequence: Synthetic oligonucleotide
  Antisense strand to SEQ ID NO: 1002064
guuauuacugacuguuacc

SEQ ID NO: 1002066 - RNA, 19 nt, Artificial Sequence
  Description of Artificial Sequence: Synthetic oligonucleotide
  Sense strand starting at position 2374 of SEQ ID NO: 914413
ccaggcuucucacugauga

SEQ ID NO: 1002067 - RNA, 19 nt, Artificial Sequence
  Description of Artificial Sequence: Synthetic oligonucleotide
  Antisense strand to SEQ ID NO: 1002066
ucaucagugagaagccugg

SEQ ID NO: 1002068 - RNA, 19 nt, Artificial Sequence
  Description of Artificial Sequence: Synthetic oligonucleotide
  Sense strand starting at position 2460 of SEQ ID NO: 914413
uuuccaucuggauguaaag

SEQ ID NO: 1002069 - RNA, 19 nt, Artificial Sequence
  Description of Artificial Sequence: Synthetic oligonucleotide
  Antisense strand to SEQ ID NO: 1002068
cuuuacauccagauggaaa

SEQ ID NO: 1002070 - RNA, 19 nt, Artificial Sequence
  Description of Artificial Sequence: Synthetic oligonucleotide
  Sense strand starting at position 2716 of SEQ ID NO: 914413
ggagauguuccugaagcca

SEQ ID NO: 1002071 - RNA, 19 nt, Artificial Sequence
  Description of Artificial Sequence: Synthetic oligonucleotide
  Antisense strand to SEQ ID NO: 1002070
uggcuucaggaacaucucc

SEQ ID NO: 1002072 - RNA, 19 nt, Artificial Sequence
  Description of Artificial Sequence: Synthetic oligonucleotide
  Sense strand starting at position 2731 of SEQ ID NO: 914413
gccagauauggucauucca

SEQ ID NO: 1002073 - RNA, 19 nt, Artificial Sequence
  Description of Artificial Sequence: Synthetic oligonucleotide
  Antisense strand to SEQ ID NO: 1002072
uggaaugaccauaucuggc

SEQ ID NO: 1002074 - RNA, 19 nt, Artificial Sequence
  Description of Artificial Sequence: Synthetic oligonucleotide
  Sense strand starting at position 2739 of SEQ ID NO: 914413
uggucauuccauuaaugug

SEQ ID NO: 1002075 - RNA, 19 nt, Artificial Sequence
  Description of Artificial Sequence: Synthetic oligonucleotide
  Antisense strand to SEQ ID NO: 1002074
cacauuaauggaaugacca

SEQ ID NO: 1002076 - RNA, 19 nt, Artificial Sequence
  Description of Artificial Sequence: Synthetic oligonucleotide
  Sense strand starting at position 2884 of SEQ ID NO: 914413
uuugaauuugggugugcua

SEQ ID NO: 1002077 - RNA, 19 nt, Artificial Sequence
  Description of Artificial Sequence: Synthetic oligonucleotide
  Antisense strand to SEQ ID NO: 1002076
uagcacacccaaauucaaa

SEQ ID NO: 1002078 - RNA, 19 nt, Artificial Sequence
  Description of Artificial Sequence: Synthetic oligonucleotide
  Sense strand starting at position 2886 of SEQ ID NO: 914413
ugaauuugggugugcuaca

SEQ ID NO: 1002079 - RNA, 19 nt, Artificial Sequence
  Description of Artificial Sequence: Synthetic oligonucleotide
  Antisense strand to SEQ ID NO: 1002078
uguagcacacccaaauuca

SEQ ID NO: 1002080 - RNA, 19 nt, Artificial Sequence
  Description of Artificial Sequence: Synthetic oligonucleotide
  Sense strand starting at position 3015 of SEQ ID NO: 914413
ugccaaccuguacagaaua

SEQ ID NO: 1002081 - RNA, 19 nt, Artificial Sequence
  Description of Artificial Sequence: Synthetic oligonucleotide
  Antisense strand to SEQ ID NO: 1002080
uauucuguacagguuggca

SEQ ID NO: 1002082 - RNA, 19 nt, Artificial Sequence
  Description of Artificial Sequence: Synthetic oligonucleotide
  Sense strand starting at position 3027 of SEQ ID NO: 914413
cagaauaaggguugaucuu

SEQ ID NO: 1002083 - RNA, 19 nt, Artificial Sequence
  Description of Artificial Sequence: Synthetic oligonucleotide
  Antisense strand to SEQ ID NO: 1002082
aagaucaacccuuauucug

SEQ ID NO: 1002084 - RNA, 19 nt, Artificial Sequence
  Description of Artificial Sequence: Synthetic oligonucleotide
  Sense strand starting at position 3073 of SEQ ID NO: 914413
acagucuugccaggaggaa

SEQ ID NO: 1002085 - RNA, 19 nt, Artificial Sequence
  Description of Artificial Sequence: Synthetic oligonucleotide
  Antisense strand to SEQ ID NO: 1002084
uuccuccuggcaagacugu

SEQ ID NO: 1002086 - RNA, 19 nt, Artificial Sequence
  Description of Artificial Sequence: Synthetic oligonucleotide
  Sense strand starting at position 3074 of SEQ ID NO: 914413
cagucuugccaggaggaau

SEQ ID NO: 1002087 - RNA, 19 nt, Artificial Sequence
  Description of Artificial Sequence: Synthetic oligonucleotide
  Antisense strand to SEQ ID NO: 1002086
auuccuccuggcaagacug

SEQ ID NO: 1002088 - RNA, 19 nt, Artificial Sequence
  Description of Artificial Sequence: Synthetic oligonucleotide
  Sense strand starting at position 3085 of SEQ ID NO: 914413
ggaggaaucucugucucca

SEQ ID NO: 1002089 - RNA, 19 nt, Artificial Sequence
  Description of Artificial Sequence: Synthetic oligonucleotide
  Antisense strand to SEQ ID NO: 1002088
uggagacagagauuccucc

SEQ ID NO: 1002090 - RNA, 19 nt, Artificial Sequence
  Description of Artificial Sequence: Synthetic oligonucleotide
  Sense strand starting at position 3343 of SEQ ID NO: 914413
ucagaaggauucuauuucu

SEQ ID NO: 1002091 - RNA, 19 nt, Artificial Sequence
  Description of Artificial Sequence: Synthetic oligonucleotide
  Antisense strand to SEQ ID NO: 1002090
agaaauagaauccuucuga

SEQ ID NO: 1002092 - RNA, 19 nt, Artificial Sequence
  Description of Artificial Sequence: Synthetic oligonucleotide
  Sense strand starting at position 3444 of SEQ ID NO: 914413
ggauuccacucccuuugaa

SEQ ID NO: 1002093 - RNA, 19 nt, Artificial Sequence
  Description of Artificial Sequence: Synthetic oligonucleotide
  Antisense strand to SEQ ID NO: 1002092
uucaaagggaguggaaucc

SEQ ID NO: 1002094 - RNA, 19 nt, Artificial Sequence
  Description of Artificial Sequence: Synthetic oligonucleotide
  Sense strand starting at position 3513 of SEQ ID NO: 914413
ugaugaauuugacaccuau

SEQ ID NO: 1002095 - RNA, 19 nt, Artificial Sequence
  Description of Artificial Sequence: Synthetic oligonucleotide
  Antisense strand to SEQ ID NO: 1002094
auaggugucaaauucauca

SEQ ID NO: 1002096 - RNA, 19 nt, Artificial Sequence
  Description of Artificial Sequence: Synthetic oligonucleotide
  Sense strand starting at position 3589 of SEQ ID NO: 914413
acuugugauguggauauca

SEQ ID NO: 1002097 - RNA, 19 nt, Artificial Sequence
  Description of Artificial Sequence: Synthetic oligonucleotide
  Antisense strand to SEQ ID NO: 1002096
ugauauccacaucacaagu

SEQ ID NO: 1002098 - RNA, 19 nt, Artificial Sequence
  Description of Artificial Sequence: Synthetic oligonucleotide
  Sense strand starting at position 3591 of SEQ ID NO: 914413
uugugauguggauaucaac

SEQ ID NO: 1002099 - RNA, 19 nt, Artificial Sequence
  Description of Artificial Sequence: Synthetic oligonucleotide
  Antisense strand to SEQ ID NO: 1002098
guugauauccacaucacaa

SEQ ID NO: 1002100 - RNA, 19 nt, Artificial Sequence
  Description of Artificial Sequence: Synthetic oligonucleotide
  Sense strand starting at position 3747 of SEQ ID NO: 914413
caaguauuacugcaaugag

SEQ ID NO: 1002101 - RNA, 19 nt, Artificial Sequence
  Description of Artificial Sequence: Synthetic oligonucleotide
  Antisense strand to SEQ ID NO: 1002100
cucauugcaguaauacuug

SEQ ID NO: 1002102 - RNA, 19 nt, Artificial Sequence
  Description of Artificial Sequence: Synthetic oligonucleotide
  Sense strand starting at position 3890 of SEQ ID NO: 914413
uuagaagguuguuugauua

SEQ ID NO: 1002103 - RNA, 19 nt, Artificial Sequence
  Description of Artificial Sequence: Synthetic oligonucleotide
  Antisense strand to SEQ ID NO: 1002102
uaaucaaacaaccuucuaa

SEQ ID NO: 1002104 - RNA, 19 nt, Artificial Sequence
  Description of Artificial Sequence: Synthetic oligonucleotide
  Sense strand starting at position 52 of SEQ ID NO: 914414
cuuguaucucaauaacagu

SEQ ID NO: 1002105 - RNA, 19 nt, Artificial Sequence
  Description of Artificial Sequence: Synthetic oligonucleotide
  Antisense strand to SEQ ID NO: 1002104
acuguuauugagauacaag

SEQ ID NO: 1002106 - RNA, 19 nt, Artificial Sequence
  Description of Artificial Sequence: Synthetic oligonucleotide
  Sense strand starting at position 72 of SEQ ID NO: 914414
aucacagguguuugaaaca

SEQ ID NO: 1002107 - RNA, 19 nt, Artificial Sequence
  Description of Artificial Sequence: Synthetic oligonucleotide
  Antisense strand to SEQ ID NO: 1002106
uguuucaaacaccugugau

SEQ ID NO: 1002108 - RNA, 19 nt, Artificial Sequence
  Description of Artificial Sequence: Synthetic oligonucleotide
  Sense strand starting at position 127 of SEQ ID NO: 914414
ugggacaacucucugauca

SEQ ID NO: 1002109 - RNA, 19 nt, Artificial Sequence
  Description of Artificial Sequence: Synthetic oligonucleotide
  Antisense strand to SEQ ID NO: 1002108
ugaucagagaguuguccca

SEQ ID NO: 1002110 - RNA, 19 nt, Artificial Sequence
  Description of Artificial Sequence: Synthetic oligonucleotide
  Sense strand starting at position 128 of SEQ ID NO: 914414
gggacaacucucugaucau

SEQ ID NO: 1002111 - RNA, 19 nt, Artificial Sequence
  Description of Artificial Sequence: Synthetic oligonucleotide
  Antisense strand to SEQ ID NO: 1002110
augaucagagaguuguccc

SEQ ID NO: 1002112 - RNA, 19 nt, Artificial Sequence
  Description of Artificial Sequence: Synthetic oligonucleotide
  Sense strand starting at position 180 of SEQ ID NO: 914414
uucugaagugagggucaau

SEQ ID NO: 1002113 - RNA, 19 nt, Artificial Sequence
  Description of Artificial Sequence: Synthetic oligonucleotide
  Antisense strand to SEQ ID NO: 1002112
auugacccucacuucagaa

SEQ ID NO: 1002114 - RNA, 19 nt, Artificial Sequence
  Description of Artificial Sequence: Synthetic oligonucleotide
  Sense strand starting at position 212 of SEQ ID NO: 914414
aguuucuaugaauagcauu

SEQ ID NO: 1002115 - RNA, 19 nt, Artificial Sequence
  Description of Artificial Sequence: Synthetic oligonucleotide
  Antisense strand to SEQ ID NO: 1002114
aaugcuauucauagaaacu

SEQ ID NO: 1002116 - RNA, 19 nt, Artificial Sequence
  Description of Artificial Sequence: Synthetic oligonucleotide
  Sense strand starting at position 507 of SEQ ID NO: 914414
acagcugaucuacagaagu

SEQ ID NO: 1002117 - RNA, 19 nt, Artificial Sequence
  Description of Artificial Sequence: Synthetic oligonucleotide
  Antisense strand to SEQ ID NO: 1002116
acuucuguagaucagcugu

SEQ ID NO: 1002118 - RNA, 19 nt, Artificial Sequence
  Description of Artificial Sequence: Synthetic oligonucleotide
  Sense strand starting at position 518 of SEQ ID NO: 914414
acagaaguucuuuaaagca

SEQ ID NO: 1002119 - RNA, 19 nt, Artificial Sequence
  Description of Artificial Sequence: Synthetic oligonucleotide
  Antisense strand to SEQ ID NO: 1002118
ugcuuuaaagaacuucugu

SEQ ID NO: 1002120 - RNA, 19 nt, Artificial Sequence
  Description of Artificial Sequence: Synthetic oligonucleotide
  Sense strand starting at position 563 of SEQ ID NO: 914414
acuaccaucucauuagagu

SEQ ID NO: 1002121 - RNA, 19 nt, Artificial Sequence
  Description of Artificial Sequence: Synthetic oligonucleotide
  Antisense strand to SEQ ID NO: 1002120
acucuaaugagaugguagu

SEQ ID NO: 1002122 - RNA, 19 nt, Artificial Sequence
  Description of Artificial Sequence: Synthetic oligonucleotide
  Sense strand starting at position 564 of SEQ ID NO: 914414
cuaccaucucauuagagug

SEQ ID NO: 1002123 - RNA, 19 nt, Artificial Sequence
  Description of Artificial Sequence: Synthetic oligonucleotide
  Antisense strand to SEQ ID NO: 1002122
cacucuaaugagaugguag

SEQ ID NO: 1002124 - RNA, 19 nt, Artificial Sequence
  Description of Artificial Sequence: Synthetic oligonucleotide
  Sense strand starting at position 603 of SEQ ID NO: 914414
caaggaaucuuugcaggag

SEQ ID NO: 1002125 - RNA, 19 nt, Artificial Sequence
  Description of Artificial Sequence: Synthetic oligonucleotide
  Antisense strand to SEQ ID NO: 1002124
cuccugcaaagauuccuug

SEQ ID NO: 1002126 - RNA, 19 nt, Artificial Sequence
  Description of Artificial Sequence: Synthetic oligonucleotide
  Sense strand starting at position 606 of SEQ ID NO: 914414
ggaaucuuugcaggaggaa

SEQ ID NO: 1002127 - RNA, 19 nt, Artificial Sequence
  Description of Artificial Sequence: Synthetic oligonucleotide
  Antisense strand to SEQ ID NO: 1002126
uuccuccugcaaagauucc

SEQ ID NO: 1002128 - RNA, 19 nt, Artificial Sequence
  Description of Artificial Sequence: Synthetic oligonucleotide
  Sense strand starting at position 609 of SEQ ID NO: 914414
aucuuugcaggaggaauaa

SEQ ID NO: 1002129 - RNA, 19 nt, Artificial Sequence
  Description of Artificial Sequence: Synthetic oligonucleotide
  Antisense strand to SEQ ID NO: 1002128
uuauuccuccugcaaagau

SEQ ID NO: 1002130 - RNA, 19 nt, Artificial Sequence
  Description of Artificial Sequence: Synthetic oligonucleotide
  Sense strand starting at position 695 of SEQ ID NO: 914414
augugauuuacacgugcua

SEQ ID NO: 1002131 - RNA, 19 nt, Artificial Sequence
  Description of Artificial Sequence: Synthetic oligonucleotide
  Antisense strand to SEQ ID NO: 1002130
uagcacguguaaaucacau

SEQ ID NO: 1002132 - RNA, 19 nt, Artificial Sequence
  Description of Artificial Sequence: Synthetic oligonucleotide
  Sense strand starting at position 1087 of SEQ ID NO: 914414
aauauaugagguugguaaa

SEQ ID NO: 1002133 - RNA, 19 nt, Artificial Sequence
  Description of Artificial Sequence: Synthetic oligonucleotide
  Antisense strand to SEQ ID NO: 1002132
uuuaccaaccucauauauu

SEQ ID NO: 1002134 - RNA, 19 nt, Artificial Sequence
  Description of Artificial Sequence: Synthetic oligonucleotide
  Sense strand starting at position 1199 of SEQ ID NO: 914414
gaauccagccaguaagcau

SEQ ID NO: 1002135 - RNA, 19 nt, Artificial Sequence
  Description of Artificial Sequence: Synthetic oligonucleotide
  Antisense strand to SEQ ID NO: 1002134
augcuuacuggcuggauuc

SEQ ID NO: 1002136 - RNA, 19 nt, Artificial Sequence
  Description of Artificial Sequence: Synthetic oligonucleotide
  Sense strand starting at position 1438 of SEQ ID NO: 914414
guaacacaaguaugaaauu

SEQ ID NO: 1002137 - RNA, 19 nt, Artificial Sequence
  Description of Artificial Sequence: Synthetic oligonucleotide
  Antisense strand to SEQ ID NO: 1002136
aauuucauacuuguguuac

SEQ ID NO: 1002138 - RNA, 19 nt, Artificial Sequence
  Description of Artificial Sequence: Synthetic oligonucleotide
  Sense strand starting at position 1730 of SEQ ID NO: 914414
ugguaaacaucuuuaacag

SEQ ID NO: 1002139 - RNA, 19 nt, Artificial Sequence
  Description of Artificial Sequence: Synthetic oligonucleotide
  Antisense strand to SEQ ID NO: 1002138
cuguuaaagauguuuacca

SEQ ID NO: 1002140 - RNA, 19 nt, Artificial Sequence
  Description of Artificial Sequence: Synthetic oligonucleotide
  Sense strand starting at position 2343 of SEQ ID NO: 914414
ccagaaauccuagggagca

SEQ ID NO: 1002141 - RNA, 19 nt, Artificial Sequence
  Description of Artificial Sequence: Synthetic oligonucleotide
  Antisense strand to SEQ ID NO: 1002140
ugcucccuaggauuucugg

SEQ ID NO: 1002142 - RNA, 19 nt, Artificial Sequence
  Description of Artificial Sequence: Synthetic oligonucleotide
  Sense strand starting at position 2432 of SEQ ID NO: 914414
ugaccuaacuccuuggauu

SEQ ID NO: 1002143 - RNA, 19 nt, Artificial Sequence
  Description of Artificial Sequence: Synthetic oligonucleotide
  Antisense strand to SEQ ID NO: 1002142
aauccaaggaguuagguca

SEQ ID NO: 1002144 - RNA, 19 nt, Artificial Sequence
  Description of Artificial Sequence: Synthetic oligonucleotide
  Sense strand starting at position 2537 of SEQ ID NO: 914414
ugaagcgaucucuaaguca

SEQ ID NO: 1002145 - RNA, 19 nt, Artificial Sequence
  Description of Artificial Sequence: Synthetic oligonucleotide
  Antisense strand to SEQ ID NO: 1002144
ugacuuagagaucgcuuca

SEQ ID NO: 1002146 - RNA, 19 nt, Artificial Sequence
  Description of Artificial Sequence: Synthetic oligonucleotide
  Sense strand starting at position 2540 of SEQ ID NO: 914414
agcgaucucuaagucauuu

SEQ ID NO: 1002147 - RNA, 19 nt, Artificial Sequence
  Description of Artificial Sequence: Synthetic oligonucleotide
  Antisense strand to SEQ ID NO: 1002146
aaaugacuuagagaucgcu

SEQ ID NO: 1002148 - RNA, 19 nt, Artificial Sequence
  Description of Artificial Sequence: Synthetic oligonucleotide
  Sense strand starting at position 2618 of SEQ ID NO: 914414
ugguaacagucaguaauaa

SEQ ID NO: 1002149 - RNA, 19 nt, Artificial Sequence
  Description of Artificial Sequence: Synthetic oligonucleotide
  Antisense strand to SEQ ID NO: 1002148
uuauuacugacuguuacca

SEQ ID NO: 1002150 - RNA, 19 nt, Artificial Sequence
  Description of Artificial Sequence: Synthetic oligonucleotide
  Sense strand starting at position 2619 of SEQ ID NO: 914414
gguaacagucaguaauaac

SEQ ID NO: 1002151 - RNA, 19 nt, Artificial Sequence
  Description of Artificial Sequence: Synthetic oligonucleotide
  Antisense strand to SEQ ID NO: 1002150
guuauuacugacuguuacc

SEQ ID NO: 1002152 - RNA, 19 nt, Artificial Sequence
  Description of Artificial Sequence: Synthetic oligonucleotide
  Sense strand starting at position 2739 of SEQ ID NO: 914414
uuuccaucuggauguaaag

SEQ ID NO: 1002153 - RNA, 19 nt, Artificial Sequence
  Description of Artificial Sequence: Synthetic oligonucleotide
  Antisense strand to SEQ ID NO: 1002152
cuuuacauccagauggaaa

SEQ ID NO: 1002154 - RNA, 19 nt, Artificial Sequence
  Description of Artificial Sequence: Synthetic oligonucleotide
  Sense strand starting at position 2995 of SEQ ID NO: 914414
ggagauguuccugaagcca

SEQ ID NO: 1002155 - RNA, 19 nt, Artificial Sequence
  Description of Artificial Sequence: Synthetic oligonucleotide
  Antisense strand to SEQ ID NO: 1002154
uggcuucaggaacaucucc

SEQ ID NO: 1002156 - RNA, 19 nt, Artificial Sequence
  Description of Artificial Sequence: Synthetic oligonucleotide
  Sense strand starting at position 3010 of SEQ ID NO: 914414
gccagauauggucauucca

SEQ ID NO: 1002157 - RNA, 19 nt, Artificial Sequence
  Description of Artificial Sequence: Synthetic oligonucleotide
  Antisense strand to SEQ ID NO: 1002156
uggaaugaccauaucuggc

SEQ ID NO: 1002158 - RNA, 19 nt, Artificial Sequence
  Description of Artificial Sequence: Synthetic oligonucleotide
  Sense strand starting at position 3018 of SEQ ID NO: 914414
uggucauuccauuaaugug

SEQ ID NO: 1002159 - RNA, 19 nt, Artificial Sequence
  Description of Artificial Sequence: Synthetic oligonucleotide
  Antisense strand to SEQ ID NO: 1002158
cacauuaauggaaugacca

SEQ ID NO: 1002160 - RNA, 19 nt, Artificial Sequence
  Description of Artificial Sequence: Synthetic oligonucleotide
  Sense strand starting at position 3163 of SEQ ID NO: 914414
uuugaauuugggugugcua

SEQ ID NO: 1002161 - RNA, 19 nt, Artificial Sequence
  Description of Artificial Sequence: Synthetic oligonucleotide
  Antisense strand to SEQ ID NO: 1002160
uagcacacccaaauucaaa

SEQ ID NO: 1002162 - RNA, 19 nt, Artificial Sequence
  Description of Artificial Sequence: Synthetic oligonucleotide
  Sense strand starting at position 3165 of SEQ ID NO: 914414
ugaauuugggugugcuaca

SEQ ID NO: 1002163 - RNA, 19 nt, Artificial Sequence
  Description of Artificial Sequence: Synthetic oligonucleotide
  Antisense strand to SEQ ID NO: 1002162
uguagcacacccaaauuca

SEQ ID NO: 1002164 - RNA, 19 nt, Artificial Sequence
  Description of Artificial Sequence: Synthetic oligonucleotide
  Sense strand starting at position 3294 of SEQ ID NO: 914414
ugccaaccuguacagaaua

SEQ ID NO: 1002165 - RNA, 19 nt, Artificial Sequence
  Description of Artificial Sequence: Synthetic oligonucleotide
  Antisense strand to SEQ ID NO: 1002164
uauucuguacagguuggca

SEQ ID NO: 1002166 - RNA, 19 nt, Artificial Sequence
  Description of Artificial Sequence: Synthetic oligonucleotide
  Sense strand starting at position 3306 of SEQ ID NO: 914414
cagaauaaggguugaucuu

SEQ ID NO: 1002167 - RNA, 19 nt, Artificial Sequence
  Description of Artificial Sequence: Synthetic oligonucleotide
  Antisense strand to SEQ ID NO: 1002166
aagaucaacccuuauucug

SEQ ID NO: 1002168 - RNA, 19 nt, Artificial Sequence
  Description of Artificial Sequence: Synthetic oligonucleotide
  Sense strand starting at position 3352 of SEQ ID NO: 914414
acagucuugccaggaggaa

SEQ ID NO: 1002169 - RNA, 19 nt, Artificial Sequence
  Description of Artificial Sequence: Synthetic oligonucleotide
  Antisense strand to SEQ ID NO: 1002168
uuccuccuggcaagacugu

SEQ ID NO: 1002170 - RNA, 19 nt, Artificial Sequence
  Description of Artificial Sequence: Synthetic oligonucleotide
  Sense strand starting at position 3353 of SEQ ID NO: 914414
cagucuugccaggaggaau

SEQ ID NO: 1002171 - RNA, 19 nt, Artificial Sequence
  Description of Artificial Sequence: Synthetic oligonucleotide
  Antisense strand to SEQ ID NO: 1002170
auuccuccuggcaagacug

SEQ ID NO: 1002172 - RNA, 19 nt, Artificial Sequence
  Description of Artificial Sequence: Synthetic oligonucleotide
  Sense strand starting at position 3364 of SEQ ID NO: 914414
ggaggaaucucugucucca

SEQ ID NO: 1002173 - RNA, 19 nt, Artificial Sequence
  Description of Artificial Sequence: Synthetic oligonucleotide
  Antisense strand to SEQ ID NO: 1002172
uggagacagagauuccucc

SEQ ID NO: 1002174 - RNA, 19 nt, Artificial Sequence
  Description of Artificial Sequence: Synthetic oligonucleotide
  Sense strand starting at position 3622 of SEQ ID NO: 914414
ucagaaggauucuauuucu

SEQ ID NO: 1002175 - RNA, 19 nt, Artificial Sequence
  Description of Artificial Sequence: Synthetic oligonucleotide
  Antisense strand to SEQ ID NO: 1002174
agaaauagaauccuucuga

SEQ ID NO: 1002176 - RNA, 19 nt, Artificial Sequence
  Description of Artificial Sequence: Synthetic oligonucleotide
  Sense strand starting at position 3723 of SEQ ID NO: 914414
ggauuccacucccuuugaa

SEQ ID NO: 1002177 - RNA, 19 nt, Artificial Sequence
  Description of Artificial Sequence: Synthetic oligonucleotide
  Antisense strand to SEQ ID NO: 1002176
uucaaagggaguggaaucc

SEQ ID NO: 1002178 - RNA, 19 nt, Artificial Sequence
  Description of Artificial Sequence: Synthetic oligonucleotide
  Sense strand starting at position 3792 of SEQ ID NO: 914414
ugaugaauuugacaccuau

SEQ ID NO: 1002179 - RNA, 19 nt, Artificial Sequence
  Description of Artificial Sequence: Synthetic oligonucleotide
  Antisense strand to SEQ ID NO: 1002178
auaggugucaaauucauca

SEQ ID NO: 1002180 - RNA, 19 nt, Artificial Sequence
  Description of Artificial Sequence: Synthetic oligonucleotide
  Sense strand starting at position 3868 of SEQ ID NO: 914414
acuugugauguggauauca

SEQ ID NO: 1002181 - RNA, 19 nt, Artificial Sequence
  Description of Artificial Sequence: Synthetic oligonucleotide
  Antisense strand to SEQ ID NO: 1002180
ugauauccacaucacaagu

SEQ ID NO: 1002182 - RNA, 19 nt, Artificial Sequence
  Description of Artificial Sequence: Synthetic oligonucleotide
  Sense strand starting at position 3870 of SEQ ID NO: 914414
uugugauguggauaucaac

SEQ ID NO: 1002183 - RNA, 19 nt, Artificial Sequence
  Description of Artificial Sequence: Synthetic oligonucleotide
  Antisense strand to SEQ ID NO: 1002182
guugauauccacaucacaa

SEQ ID NO: 1002184 - RNA, 19 nt, Artificial Sequence
  Description of Artificial Sequence: Synthetic oligonucleotide
  Sense strand starting at position 283 of SEQ ID NO: 914415
gcgugagccaccgcuaauu

SEQ ID NO: 1002185 - RNA, 19 nt, Artificial Sequence
  Description of Artificial Sequence: Synthetic oligonucleotide
  Antisense strand to SEQ ID NO: 1002184
aauuagcgguggcucacgc

SEQ ID NO: 1002186 - RNA, 19 nt, Artificial Sequence
  Description of Artificial Sequence: Synthetic oligonucleotide
  Sense strand starting at position 537 of SEQ ID NO: 914415
ccucauuuguaccaguuaa

SEQ ID NO: 1002187 - RNA, 19 nt, Artificial Sequence
  Description of Artificial Sequence: Synthetic oligonucleotide
  Antisense strand to SEQ ID NO: 1002186
uuaacugguacaaaugagg

SEQ ID NO: 1002188 - RNA, 19 nt, Artificial Sequence
  Description of Artificial Sequence: Synthetic oligonucleotide
  Sense strand starting at position 544 of SEQ ID NO: 914415
uguaccaguuaacaagaau

SEQ ID NO: 1002189 - RNA, 19 nt, Artificial Sequence
  Description of Artificial Sequence: Synthetic oligonucleotide
  Antisense strand to SEQ ID NO: 1002188
auucuuguuaacugguaca

SEQ ID NO: 1002190 - RNA, 19 nt, Artificial Sequence
  Description of Artificial Sequence: Synthetic oligonucleotide
  Sense strand starting at position 556 of SEQ ID NO: 914415
caagaaugguuuccaggua

SEQ ID NO: 1002191 - RNA, 19 nt, Artificial Sequence
  Description of Artificial Sequence: Synthetic oligonucleotide
  Antisense strand to SEQ ID NO: 1002190
uaccuggaaaccauucuug

SEQ ID NO: 1002192 - RNA, 19 nt, Artificial Sequence
  Description of Artificial Sequence: Synthetic oligonucleotide
  Sense strand starting at position 574 of SEQ ID NO: 914415
acguguagagucuaacuau

SEQ ID NO: 1002193 - RNA, 19 nt, Artificial Sequence
  Description of Artificial Sequence: Synthetic oligonucleotide
  Antisense strand to SEQ ID NO: 1002192
auaguuagacucuacacgu

SEQ ID NO: 1002194 - RNA, 19 nt, Artificial Sequence
  Description of Artificial Sequence: Synthetic oligonucleotide
  Sense strand starting at position 608 of SEQ ID NO: 914415
cuguuacgauauucccaua

SEQ ID NO: 1002195 - RNA, 19 nt, Artificial Sequence
  Description of Artificial Sequence: Synthetic oligonucleotide
  Antisense strand to SEQ ID NO: 1002194
uaugggaauaucguaacag

SEQ ID NO: 1002196 - RNA, 19 nt, Artificial Sequence
  Description of Artificial Sequence: Synthetic oligonucleotide
  Sense strand starting at position 952 of SEQ ID NO: 914415
uauucucaugucgguauga

SEQ ID NO: 1002197 - RNA, 19 nt, Artificial Sequence
  Description of Artificial Sequence: Synthetic oligonucleotide
  Antisense strand to SEQ ID NO: 1002196
ucauaccgacaugagaaua

SEQ ID NO: 1002198 - RNA, 19 nt, Artificial Sequence
  Description of Artificial Sequence: Synthetic oligonucleotide
  Sense strand starting at position 954 of SEQ ID NO: 914415
uucucaugucgguaugaca

SEQ ID NO: 1002199 - RNA, 19 nt, Artificial Sequence
  Description of Artificial Sequence: Synthetic oligonucleotide
  Antisense strand to SEQ ID NO: 1002198
ugucauaccgacaugagaa

SEQ ID NO: 1002200 - RNA, 19 nt, Artificial Sequence
  Description of Artificial Sequence: Synthetic oligonucleotide
  Sense strand starting at position 987 of SEQ ID NO: 914415
agaacacuggccuaugagu

SEQ ID NO: 1002201 - RNA, 19 nt, Artificial Sequence
  Description of Artificial Sequence: Synthetic oligonucleotide
  Antisense strand to SEQ ID NO: 1002200
acucauaggccaguguucu

SEQ ID NO: 1002202 - RNA, 19 nt, Artificial Sequence
  Description of Artificial Sequence: Synthetic oligonucleotide
  Sense strand starting at position 1022 of SEQ ID NO: 914415
agccuagguucgguuauuu

SEQ ID NO: 1002203 - RNA, 19 nt, Artificial Sequence
  Description of Artificial Sequence: Synthetic oligonucleotide
  Antisense strand to SEQ ID NO: 1002202
aaauaaccgaaccuaggcu

SEQ ID NO: 1002204 - RNA, 19 nt, Artificial Sequence
  Description of Artificial Sequence: Synthetic oligonucleotide
  Sense strand starting at position 1026 of SEQ ID NO: 914415
uagguucgguuauuuguaa

SEQ ID NO: 1002205 - RNA, 19 nt, Artificial Sequence
  Description of Artificial Sequence: Synthetic oligonucleotide
  Antisense strand to SEQ ID NO: 1002204
uuacaaauaaccgaaccua

SEQ ID NO: 1002206 - RNA, 19 nt, Artificial Sequence
  Description of Artificial Sequence: Synthetic oligonucleotide
  Sense strand starting at position 1027 of SEQ ID NO: 914415
agguucgguuauuuguaaa

SEQ ID NO: 1002207 - RNA, 19 nt, Artificial Sequence
  Description of Artificial Sequence: Synthetic oligonucleotide
  Antisense strand to SEQ ID NO: 1002206
uuuacaaauaaccgaaccu

SEQ ID NO: 1002208 - RNA, 19 nt, Artificial Sequence
  Description of Artificial Sequence: Synthetic oligonucleotide
  Sense strand starting at position 1059 of SEQ ID NO: 914415
gccuucuuugaugacaaca

SEQ ID NO: 1002209 - RNA, 19 nt, Artificial Sequence
  Description of Artificial Sequence: Synthetic oligonucleotide
  Antisense strand to SEQ ID NO: 1002208
uguugucaucaaagaaggc

SEQ ID NO: 1002210 - RNA, 19 nt, Artificial Sequence
  Description of Artificial Sequence: Synthetic oligonucleotide
  Sense strand starting at position 1186 of SEQ ID NO: 914415
ggccgugaaaguggguaau

SEQ ID NO: 1002211 - RNA, 19 nt, Artificial Sequence
  Description of Artificial Sequence: Synthetic oligonucleotide
  Antisense strand to SEQ ID NO: 1002210
auuacccacuuucacggcc

SEQ ID NO: 1002212 - RNA, 19 nt, Artificial Sequence
  Description of Artificial Sequence: Synthetic oligonucleotide
  Sense strand starting at position 1188 of SEQ ID NO: 914415
ccgugaaaguggguaauga

SEQ ID NO: 1002213 - RNA, 19 nt, Artificial Sequence
  Description of Artificial Sequence: Synthetic oligonucleotide
  Antisense strand to SEQ ID NO: 1002212
ucauuacccacuuucacgg

SEQ ID NO: 1002214 - RNA, 19 nt, Artificial Sequence
  Description of Artificial Sequence: Synthetic oligonucleotide
  Sense strand starting at position 1189 of SEQ ID NO: 914415
cgugaaaguggguaaugaa

SEQ ID NO: 1002215 - RNA, 19 nt, Artificial Sequence
  Description of Artificial Sequence: Synthetic oligonucleotide
  Antisense strand to SEQ ID NO: 1002214
uucauuacccacuuucacg

SEQ ID NO: 1002216 - RNA, 19 nt, Artificial Sequence
  Description of Artificial Sequence: Synthetic oligonucleotide
  Sense strand starting at position 1192 of SEQ ID NO: 914415
gaaaguggguaaugaaaug

SEQ ID NO: 1002217 - RNA, 19 nt, Artificial Sequence
  Description of Artificial Sequence: Synthetic oligonucleotide
  Antisense strand to SEQ ID NO: 1002216
cauuucauuacccacuuuc

SEQ ID NO: 1002218 - RNA, 19 nt, Artificial Sequence
  Description of Artificial Sequence: Synthetic oligonucleotide
  Sense strand starting at position 1765 of SEQ ID NO: 914415
aagcccgucuccucagaaa

SEQ ID NO: 1002219 - RNA, 19 nt, Artificial Sequence
  Description of Artificial Sequence: Synthetic oligonucleotide
  Antisense strand to SEQ ID NO: 1002218
uuucugaggagacgggcuu

SEQ ID NO: 1002220 - RNA, 19 nt, Artificial Sequence
  Description of Artificial Sequence: Synthetic oligonucleotide
  Sense strand starting at position 1778 of SEQ ID NO: 914415
cagaaaguguccuccgcuu

SEQ ID NO: 1002221 - RNA, 19 nt, Artificial Sequence
  Description of Artificial Sequence: Synthetic oligonucleotide
  Antisense strand to SEQ ID NO: 1002220
aagcggaggacacuuucug

SEQ ID NO: 1002222 - RNA, 19 nt, Artificial Sequence
  Description of Artificial Sequence: Synthetic oligonucleotide
  Sense strand starting at position 2428 of SEQ ID NO: 914415
gggucccagacuuagcaaa

SEQ ID NO: 1002223 - RNA, 19 nt, Artificial Sequence
  Description of Artificial Sequence: Synthetic oligonucleotide
  Antisense strand to SEQ ID NO: 1002222
uuugcuaagucugggaccc

SEQ ID NO: 1002224 - RNA, 19 nt, Artificial Sequence
  Description of Artificial Sequence: Synthetic oligonucleotide
  Sense strand starting at position 2430 of SEQ ID NO: 914415
gucccagacuuagcaaaga

SEQ ID NO: 1002225 - RNA, 19 nt, Artificial Sequence
  Description of Artificial Sequence: Synthetic oligonucleotide
  Antisense strand to SEQ ID NO: 1002224
ucuuugcuaagucugggac

SEQ ID NO: 1002226 - RNA, 19 nt, Artificial Sequence
  Description of Artificial Sequence: Synthetic oligonucleotide
  Sense strand starting at position 2995 of SEQ ID NO: 914415
cacguuugacugcacugaa

SEQ ID NO: 1002227 - RNA, 19 nt, Artificial Sequence
  Description of Artificial Sequence: Synthetic oligonucleotide
  Antisense strand to SEQ ID NO: 1002226
uucagugcagucaaacgug

SEQ ID NO: 1002228 - RNA, 19 nt, Artificial Sequence
  Description of Artificial Sequence: Synthetic oligonucleotide
  Sense strand starting at position 2998 of SEQ ID NO: 914415
guuugacugcacugaaugu

SEQ ID NO: 1002229 - RNA, 19 nt, Artificial Sequence
  Description of Artificial Sequence: Synthetic oligonucleotide
  Antisense strand to SEQ ID NO: 1002228
acauucagugcagucaaac

SEQ ID NO: 1002230 - RNA, 19 nt, Artificial Sequence
  Description of Artificial Sequence: Synthetic oligonucleotide
  Sense strand starting at position 3080 of SEQ ID NO: 914415
gugcauuccuggcuggaau

SEQ ID NO: 1002231 - RNA, 19 nt, Artificial Sequence
  Description of Artificial Sequence: Synthetic oligonucleotide
  Antisense strand to SEQ ID NO: 1002230
auuccagccaggaaugcac

SEQ ID NO: 1002232 - RNA, 19 nt, Artificial Sequence
  Description of Artificial Sequence: Synthetic oligonucleotide
  Sense strand starting at position 3081 of SEQ ID NO: 914415
ugcauuccuggcuggaaua

SEQ ID NO: 1002233 - RNA, 19 nt, Artificial Sequence
  Description of Artificial Sequence: Synthetic oligonucleotide
  Antisense strand to SEQ ID NO: 1002232
uauuccagccaggaaugca

SEQ ID NO: 1002234 - RNA, 19 nt, Artificial Sequence
  Description of Artificial Sequence: Synthetic oligonucleotide
  Sense strand starting at position 3082 of SEQ ID NO: 914415
gcauuccuggcuggaauaa

SEQ ID NO: 1002235 - RNA, 19 nt, Artificial Sequence
  Description of Artificial Sequence: Synthetic oligonucleotide
  Antisense strand to SEQ ID NO: 1002234
uuauuccagccaggaaugc

SEQ ID NO: 1002236 - RNA, 19 nt, Artificial Sequence
  Description of Artificial Sequence: Synthetic oligonucleotide
  Sense strand starting at position 3172 of SEQ ID NO: 914415
ccuauaacugcuggugauc

SEQ ID NO: 1002237 - RNA, 19 nt, Artificial Sequence
  Description of Artificial Sequence: Synthetic oligonucleotide
  Antisense strand to SEQ ID NO: 1002236
gaucaccagcaguuauagg

SEQ ID NO: 1002238 - RNA, 19 nt, Artificial Sequence
  Description of Artificial Sequence: Synthetic oligonucleotide
  Sense strand starting at position 3177 of SEQ ID NO: 914415
aacugcuggugaucugaca

SEQ ID NO: 1002239 - RNA, 19 nt, Artificial Sequence
  Description of Artificial Sequence: Synthetic oligonucleotide
  Antisense strand to SEQ ID NO: 1002238
ugucagaucaccagcaguu

SEQ ID NO: 1002240 - RNA, 19 nt, Artificial Sequence
  Description of Artificial Sequence: Synthetic oligonucleotide
  Sense strand starting at position 3216 of SEQ ID NO: 914415
agagauuccugccuggcaa

SEQ ID NO: 1002241 - RNA, 19 nt, Artificial Sequence
  Description of Artificial Sequence: Synthetic oligonucleotide
  Antisense strand to SEQ ID NO: 1002240
uugccaggcaggaaucucu

SEQ ID NO: 1002242 - RNA, 19 nt, Artificial Sequence
  Description of Artificial Sequence: Synthetic oligonucleotide
  Sense strand starting at position 3217 of SEQ ID NO: 914415
gagauuccugccuggcaaa

SEQ ID NO: 1002243 - RNA, 19 nt, Artificial Sequence
  Description of Artificial Sequence: Synthetic oligonucleotide
  Antisense strand to SEQ ID NO: 1002242
uuugccaggcaggaaucuc

SEQ ID NO: 1002244 - RNA, 19 nt, Artificial Sequence
  Description of Artificial Sequence: Synthetic oligonucleotide
  Sense strand starting at position 3386 of SEQ ID NO: 914415
aaagaacauugucuaucga

SEQ ID NO: 1002245 - RNA, 19 nt, Artificial Sequence
  Description of Artificial Sequence: Synthetic oligonucleotide
  Antisense strand to SEQ ID NO: 1002244
ucgauagacaauguucuuu

SEQ ID NO: 1002246 - RNA, 19 nt, Artificial Sequence
  Description of Artificial Sequence: Synthetic oligonucleotide
  Sense strand starting at position 3393 of SEQ ID NO: 914415
auugucuaucgagaccuga

SEQ ID NO: 1002247 - RNA, 19 nt, Artificial Sequence
  Description of Artificial Sequence: Synthetic oligonucleotide
  Antisense strand to SEQ ID NO: 1002246
ucaggucucgauagacaau

SEQ ID NO: 1002248 - RNA, 19 nt, Artificial Sequence
  Description of Artificial Sequence: Synthetic oligonucleotide
  Sense strand starting at position 3477 of SEQ ID NO: 914415
gguagaccuauuggagcaa

SEQ ID NO: 1002249 - RNA, 19 nt, Artificial Sequence
  Description of Artificial Sequence: Synthetic oligonucleotide
  Antisense strand to SEQ ID NO: 1002248
uugcuccaauaggucuacc

SEQ ID NO: 1002250 - RNA, 19 nt, Artificial Sequence
  Description of Artificial Sequence: Synthetic oligonucleotide
  Sense strand starting at position 3547 of SEQ ID NO: 914415
gcuggcauuugaggaauca

SEQ ID NO: 1002251 - RNA, 19 nt, Artificial Sequence
  Description of Artificial Sequence: Synthetic oligonucleotide
  Antisense strand to SEQ ID NO: 1002250
ugauuccucaaaugccagc

SEQ ID NO: 1002252 - RNA, 19 nt, Artificial Sequence
  Description of Artificial Sequence: Synthetic oligonucleotide
  Sense strand starting at position 3556 of SEQ ID NO: 914415
ugaggaaucauuggagucu

SEQ ID NO: 1002253 - RNA, 19 nt, Artificial Sequence
  Description of Artificial Sequence: Synthetic oligonucleotide
  Antisense strand to SEQ ID NO: 1002252
agacuccaaugauuccuca

SEQ ID NO: 1002254 - RNA, 19 nt, Artificial Sequence
  Description of Artificial Sequence: Synthetic oligonucleotide
  Sense strand starting at position 3557 of SEQ ID NO: 914415
gaggaaucauuggagucuu

SEQ ID NO: 1002255 - RNA, 19 nt, Artificial Sequence
  Description of Artificial Sequence: Synthetic oligonucleotide
  Antisense strand to SEQ ID NO: 1002254
aagacuccaaugauuccuc

SEQ ID NO: 1002256 - RNA, 19 nt, Artificial Sequence
  Description of Artificial Sequence: Synthetic oligonucleotide
  Sense strand starting at position 3779 of SEQ ID NO: 914415
gugagaaaccaagguauug

SEQ ID NO: 1002257 - RNA, 19 nt, Artificial Sequence
  Description of Artificial Sequence: Synthetic oligonucleotide
  Antisense strand to SEQ ID NO: 1002256
caauaccuugguuucucac

SEQ ID NO: 1002258 - RNA, 19 nt, Artificial Sequence
  Description of Artificial Sequence: Synthetic oligonucleotide
  Sense strand starting at position 3784 of SEQ ID NO: 914415
aaaccaagguauugaggau

SEQ ID NO: 1002259 - RNA, 19 nt, Artificial Sequence
  Description of Artificial Sequence: Synthetic oligonucleotide
  Antisense strand to SEQ ID NO: 1002258
auccucaauaccuugguuu

SEQ ID NO: 1002260 - RNA, 19 nt, Artificial Sequence
  Description of Artificial Sequence: Synthetic oligonucleotide
  Sense strand starting at position 3791 of SEQ ID NO: 914415
gguauugaggaugguucuu

SEQ ID NO: 1002261 - RNA, 19 nt, Artificial Sequence
  Description of Artificial Sequence: Synthetic oligonucleotide
  Antisense strand to SEQ ID NO: 1002260
aagaaccauccucaauacc

SEQ ID NO: 1002262 - RNA, 19 nt, Artificial Sequence
  Description of Artificial Sequence: Synthetic oligonucleotide
  Sense strand starting at position 3793 of SEQ ID NO: 914415
uauugaggaugguucuuua

SEQ ID NO: 1002263 - RNA, 19 nt, Artificial Sequence
  Description of Artificial Sequence: Synthetic oligonucleotide
  Antisense strand to SEQ ID NO: 1002262
uaaagaaccauccucaaua

SEQ ID NO: 1002264 - RNA, 19 nt, Artificial Sequence
  Description of Artificial Sequence: Synthetic oligonucleotide
  Sense strand starting at position 122 of SEQ ID NO: 914416
accgaaaucuuuccagaag

SEQ ID NO: 1002265 - RNA, 19 nt, Artificial Sequence
  Description of Artificial Sequence: Synthetic oligonucleotide
  Antisense strand to SEQ ID NO: 1002264
cuucuggaaagauuucggu

SEQ ID NO: 1002266 - RNA, 19 nt, Artificial Sequence
  Description of Artificial Sequence: Synthetic oligonucleotide
  Sense strand starting at position 162 of SEQ ID NO: 914416
acuugcuauucggccugaa

SEQ ID NO: 1002267 - RNA, 19 nt, Artificial Sequence
  Description of Artificial Sequence: Synthetic oligonucleotide
  Antisense strand to SEQ ID NO: 1002266
uucaggccgaauagcaagu

SEQ ID NO: 1002268 - RNA, 19 nt, Artificial Sequence
  Description of Artificial Sequence: Synthetic oligonucleotide
  Sense strand starting at position 165 of SEQ ID NO: 914416
ugcuauucggccugaaaug

SEQ ID NO: 1002269 - RNA, 19 nt, Artificial Sequence
  Description of Artificial Sequence: Synthetic oligonucleotide
  Antisense strand to SEQ ID NO: 1002268
cauuucaggccgaauagca

SEQ ID NO: 1002270 - RNA, 19 nt, Artificial Sequence
  Description of Artificial Sequence: Synthetic oligonucleotide
  Sense strand starting at position 176 of SEQ ID NO: 914416
cugaaaugcucuuccugca

SEQ ID NO: 1002271 - RNA, 19 nt, Artificial Sequence
  Description of Artificial Sequence: Synthetic oligonucleotide
  Antisense strand to SEQ ID NO: 1002270
ugcaggaagagcauuucag

SEQ ID NO: 1002272 - RNA, 19 nt, Artificial Sequence
  Description of Artificial Sequence: Synthetic oligonucleotide
  Sense strand starting at position 183 of SEQ ID NO: 914416
gcucuuccugcagauaucu

SEQ ID NO: 1002273 - RNA, 19 nt, Artificial Sequence
  Description of Artificial Sequence: Synthetic oligonucleotide
  Antisense strand to SEQ ID NO: 1002272
agauaucugcaggaagagc

SEQ ID NO: 1002274 - RNA, 19 nt, Artificial Sequence
  Description of Artificial Sequence: Synthetic oligonucleotide
  Sense strand starting at position 321 of SEQ ID NO: 914416
cugcuuuagugaucucuga

SEQ ID NO: 1002275 - RNA, 19 nt, Artificial Sequence
  Description of Artificial Sequence: Synthetic oligonucleotide
  Antisense strand to SEQ ID NO: 1002274
ucagagaucacuaaagcag

SEQ ID NO: 1002276 - RNA, 19 nt, Artificial Sequence
  Description of Artificial Sequence: Synthetic oligonucleotide
  Sense strand starting at position 325 of SEQ ID NO: 914416
uuuagugaucucugaacca

SEQ ID NO: 1002277 - RNA, 19 nt, Artificial Sequence
  Description of Artificial Sequence: Synthetic oligonucleotide
  Antisense strand to SEQ ID NO: 1002276
ugguucagagaucacuaaa

SEQ ID NO: 1002278 - RNA, 19 nt, Artificial Sequence
  Description of Artificial Sequence: Synthetic oligonucleotide
  Sense strand starting at position 385 of SEQ ID NO: 914416
gucuuuagccauugguaua

SEQ ID NO: 1002279 - RNA, 19 nt, Artificial Sequence
  Description of Artificial Sequence: Synthetic oligonucleotide
  Antisense strand to SEQ ID NO: 1002278
uauaccaauggcuaaagac

SEQ ID NO: 1002280 - RNA, 19 nt, Artificial Sequence
  Description of Artificial Sequence: Synthetic oligonucleotide
  Sense strand starting at position 428 of SEQ ID NO: 914416
ucgguugcucuguuuacua

SEQ ID NO: 1002281 - RNA, 19 nt, Artificial Sequence
  Description of Artificial Sequence: Synthetic oligonucleotide
  Antisense strand to SEQ ID NO: 1002280
uaguaaacagagcaaccga

SEQ ID NO: 1002282 - RNA, 19 nt, Artificial Sequence
  Description of Artificial Sequence: Synthetic oligonucleotide
  Sense strand starting at position 484 of SEQ ID NO: 914416
aaaguagacguccagugaa

SEQ ID NO: 1002283 - RNA, 19 nt, Artificial Sequence
  Description of Artificial Sequence: Synthetic oligonucleotide
  Antisense strand to SEQ ID NO: 1002282
uucacuggacgucuacuuu

SEQ ID NO: 1002284 - RNA, 19 nt, Artificial Sequence
  Description of Artificial Sequence: Synthetic oligonucleotide
  Sense strand starting at position 487 of SEQ ID NO: 914416
guagacguccagugaauau

SEQ ID NO: 1002285 - RNA, 19 nt, Artificial Sequence
  Description of Artificial Sequence: Synthetic oligonucleotide
  Antisense strand to SEQ ID NO: 1002284
auauucacuggacgucuac

SEQ ID NO: 1002286 - RNA, 19 nt, Artificial Sequence
  Description of Artificial Sequence: Synthetic oligonucleotide
  Sense strand starting at position 498 of SEQ ID NO: 914416
gugaauauugguugaauga

SEQ ID NO: 1002287 - RNA, 19 nt, Artificial Sequence
  Description of Artificial Sequence: Synthetic oligonucleotide
  Antisense strand to SEQ ID NO: 1002286
ucauucaaccaauauucac

SEQ ID NO: 1002288 - RNA, 19 nt, Artificial Sequence
  Description of Artificial Sequence: Synthetic oligonucleotide
  Sense strand starting at position 584 of SEQ ID NO: 914416
ugagacagccucugacaau

SEQ ID NO: 1002289 - RNA, 19 nt, Artificial Sequence
  Description of Artificial Sequence: Synthetic oligonucleotide
  Antisense strand to SEQ ID NO: 1002288
auugucagaggcugucuca

SEQ ID NO: 1002290 - RNA, 19 nt, Artificial Sequence
  Description of Artificial Sequence: Synthetic oligonucleotide
  Sense strand starting at position 656 of SEQ ID NO: 914416
uggacuaaaugcuccgaga

SEQ ID NO: 1002291 - RNA, 19 nt, Artificial Sequence
  Description of Artificial Sequence: Synthetic oligonucleotide
  Antisense strand to SEQ ID NO: 1002290
ucucggagcauuuagucca

SEQ ID NO: 1002292 - RNA, 19 nt, Artificial Sequence
  Description of Artificial Sequence: Synthetic oligonucleotide
  Sense strand starting at position 658 of SEQ ID NO: 914416
gacuaaaugcuccgagaag

SEQ ID NO: 1002293 - RNA, 19 nt, Artificial Sequence
  Description of Artificial Sequence: Synthetic oligonucleotide
  Antisense strand to SEQ ID NO: 1002292
cuucucggagcauuuaguc

SEQ ID NO: 1002294 - RNA, 19 nt, Artificial Sequence
  Description of Artificial Sequence: Synthetic oligonucleotide
  Sense strand starting at position 928 of SEQ ID NO: 914416
ggacuagaaaucggugaag

SEQ ID NO: 1002295 - RNA, 19 nt, Artificial Sequence
  Description of Artificial Sequence: Synthetic oligonucleotide
  Antisense strand to SEQ ID NO: 1002294
cuucaccgauuucuagucc

SEQ ID NO: 1002296 - RNA, 19 nt, Artificial Sequence
  Description of Artificial Sequence: Synthetic oligonucleotide
  Sense strand starting at position 955 of SEQ ID NO: 914416
gagagcgaguguucugaga

SEQ ID NO: 1002297 - RNA, 19 nt, Artificial Sequence
  Description of Artificial Sequence: Synthetic oligonucleotide
  Antisense strand to SEQ ID NO: 1002296
ucucagaacacucgcucuc

SEQ ID NO: 1002298 - RNA, 19 nt, Artificial Sequence
  Description of Artificial Sequence: Synthetic oligonucleotide
  Sense strand starting at position 959 of SEQ ID NO: 914416
gcgaguguucugagauugu

SEQ ID NO: 1002299 - RNA, 19 nt, Artificial Sequence
  Description of Artificial Sequence: Synthetic oligonucleotide
  Antisense strand to SEQ ID NO: 1002298
acaaucucagaacacucgc

SEQ ID NO: 1002300 - RNA, 19 nt, Artificial Sequence
  Description of Artificial Sequence: Synthetic oligonucleotide
  Sense strand starting at position 963 of SEQ ID NO: 914416
guguucugagauuguuccu

SEQ ID NO: 1002301 - RNA, 19 nt, Artificial Sequence
  Description of Artificial Sequence: Synthetic oligonucleotide
  Antisense strand to SEQ ID NO: 1002300
aggaacaaucucagaacac

SEQ ID NO: 1002302 - RNA, 19 nt, Artificial Sequence
  Description of Artificial Sequence: Synthetic oligonucleotide
  Sense strand starting at position 968 of SEQ ID NO: 914416
cugagauuguuccucccau

SEQ ID NO: 1002303 - RNA, 19 nt, Artificial Sequence
  Description of Artificial Sequence: Synthetic oligonucleotide
  Antisense strand to SEQ ID NO: 1002302
augggaggaacaaucucag

SEQ ID NO: 1002304 - RNA, 19 nt, Artificial Sequence
  Description of Artificial Sequence: Synthetic oligonucleotide
  Sense strand starting at position 969 of SEQ ID NO: 914416
ugagauuguuccucccauc

SEQ ID NO: 1002305 - RNA, 19 nt, Artificial Sequence
  Description of Artificial Sequence: Synthetic oligonucleotide
  Antisense strand to SEQ ID NO: 1002304
gaugggaggaacaaucuca

SEQ ID NO: 1002306 - RNA, 19 nt, Artificial Sequence
  Description of Artificial Sequence: Synthetic oligonucleotide
  Sense strand starting at position 1143 of SEQ ID NO: 914416
aagcguuaugcucggagag

SEQ ID NO: 1002307 - RNA, 19 nt, Artificial Sequence
  Description of Artificial Sequence: Synthetic oligonucleotide
  Antisense strand to SEQ ID NO: 1002306
cucuccgagcauaacgcuu

SEQ ID NO: 1002308 - RNA, 19 nt, Artificial Sequence
  Description of Artificial Sequence: Synthetic oligonucleotide
  Sense strand starting at position 2255 of SEQ ID NO: 914416
guuucccuccauuaagaag

SEQ ID NO: 1002309 - RNA, 19 nt, Artificial Sequence
  Description of Artificial Sequence: Synthetic oligonucleotide
  Antisense strand to SEQ ID NO: 1002308
cuucuuaauggagggaaac

SEQ ID NO: 1002310 - RNA, 19 nt, Artificial Sequence
  Description of Artificial Sequence: Synthetic oligonucleotide
  Sense strand starting at position 2568 of SEQ ID NO: 914416
uggacugugagcggacaua

SEQ ID NO: 1002311 - RNA, 19 nt, Artificial Sequence
  Description of Artificial Sequence: Synthetic oligonucleotide
  Antisense strand to SEQ ID NO: 1002310
uauguccgcucacagucca

SEQ ID NO: 1002312 - RNA, 19 nt, Artificial Sequence
  Description of Artificial Sequence: Synthetic oligonucleotide
  Sense strand starting at position 2703 of SEQ ID NO: 914416
ugacauugcugcccuauaa

SEQ ID NO: 1002313 - RNA, 19 nt, Artificial Sequence
  Description of Artificial Sequence: Synthetic oligonucleotide
  Antisense strand to SEQ ID NO: 1002312
uuauagggcagcaauguca

SEQ ID NO: 1002314 - RNA, 19 nt, Artificial Sequence
  Description of Artificial Sequence: Synthetic oligonucleotide
  Sense strand starting at position 2743 of SEQ ID NO: 914416
acuucugugacauggaaug

SEQ ID NO: 1002315 - RNA, 19 nt, Artificial Sequence
  Description of Artificial Sequence: Synthetic oligonucleotide
  Antisense strand to SEQ ID NO: 1002314
cauuccaugucacagaagu

SEQ ID NO: 1002316 - RNA, 19 nt, Artificial Sequence
  Description of Artificial Sequence: Synthetic oligonucleotide
  Sense strand starting at position 2839 of SEQ ID NO: 914416
cuucgaaugucguuauauc

SEQ ID NO: 1002317 - RNA, 19 nt, Artificial Sequence
  Description of Artificial Sequence: Synthetic oligonucleotide
  Antisense strand to SEQ ID NO: 1002316
gauauaacgacauucgaag

SEQ ID NO: 1002318 - RNA, 19 nt, Artificial Sequence
  Description of Artificial Sequence: Synthetic oligonucleotide
  Sense strand starting at position 2840 of SEQ ID NO: 914416
uucgaaugucguuauauca

SEQ ID NO: 1002319 - RNA, 19 nt, Artificial Sequence
  Description of Artificial Sequence: Synthetic oligonucleotide
  Antisense strand to SEQ ID NO: 1002318
ugauauaacgacauucgaa

SEQ ID NO: 1002320 - RNA, 19 nt, Artificial Sequence
  Description of Artificial Sequence: Synthetic oligonucleotide
  Sense strand starting at position 2877 of SEQ ID NO: 914416
ucagaaucgcguaguagga

SEQ ID NO: 1002321 - RNA, 19 nt, Artificial Sequence
  Description of Artificial Sequence: Synthetic oligonucleotide
  Antisense strand to SEQ ID NO: 1002320
uccuacuacgcgauucuga

SEQ ID NO: 1002322 - RNA, 19 nt, Artificial Sequence
  Description of Artificial Sequence: Synthetic oligonucleotide
  Sense strand starting at position 2904 of SEQ ID NO: 914416
ugagaagaggugugaacua

SEQ ID NO: 1002323 - RNA, 19 nt, Artificial Sequence
  Description of Artificial Sequence: Synthetic oligonucleotide
  Antisense strand to SEQ ID NO: 1002322
uaguucacaccucuucuca

SEQ ID NO: 1002324 - RNA, 19 nt, Artificial Sequence
  Description of Artificial Sequence: Synthetic oligonucleotide
  Sense strand starting at position 2909 of SEQ ID NO: 914416
agaggugugaacuagucua

SEQ ID NO: 1002325 - RNA, 19 nt, Artificial Sequence
  Description of Artificial Sequence: Synthetic oligonucleotide
  Antisense strand to SEQ ID NO: 1002324
uagacuaguucacaccucu

SEQ ID NO: 1002326 - RNA, 19 nt, Artificial Sequence
  Description of Artificial Sequence: Synthetic oligonucleotide
  Sense strand starting at position 3275 of SEQ ID NO: 914416
gugcaaguguaucugauau

SEQ ID NO: 1002327 - RNA, 19 nt, Artificial Sequence
  Description of Artificial Sequence: Synthetic oligonucleotide
  Antisense strand to SEQ ID NO: 1002326
auaucagauacacuugcac

SEQ ID NO: 1002328 - RNA, 19 nt, Artificial Sequence
  Description of Artificial Sequence: Synthetic oligonucleotide
  Sense strand starting at position 3277 of SEQ ID NO: 914416
gcaaguguaucugauauuu

SEQ ID NO: 1002329 - RNA, 19 nt, Artificial Sequence
  Description of Artificial Sequence: Synthetic oligonucleotide
  Antisense strand to SEQ ID NO: 1002328
aaauaucagauacacuugc

SEQ ID NO: 1002330 - RNA, 19 nt, Artificial Sequence
  Description of Artificial Sequence: Synthetic oligonucleotide
  Sense strand starting at position 3343 of SEQ ID NO: 914416
gcugaauggucauucucua

SEQ ID NO: 1002331 - RNA, 19 nt, Artificial Sequence
  Description of Artificial Sequence: Synthetic oligonucleotide
  Antisense strand to SEQ ID NO: 1002330
uagagaaugaccauucagc

SEQ ID NO: 1002332 - RNA, 19 nt, Artificial Sequence
  Description of Artificial Sequence: Synthetic oligonucleotide
  Sense strand starting at position 3348 of SEQ ID NO: 914416
auggucauucucuaccauu

SEQ ID NO: 1002333 - RNA, 19 nt, Artificial Sequence
  Description of Artificial Sequence: Synthetic oligonucleotide
  Antisense strand to SEQ ID NO: 1002332
aaugguagagaaugaccau

SEQ ID NO: 1002334 - RNA, 19 nt, Artificial Sequence
  Description of Artificial Sequence: Synthetic oligonucleotide
  Sense strand starting at position 3520 of SEQ ID NO: 914416
aagaaagagccaugguauu

SEQ ID NO: 1002335 - RNA, 19 nt, Artificial Sequence
  Description of Artificial Sequence: Synthetic oligonucleotide
  Antisense strand to SEQ ID NO: 1002334
aauaccauggcucuuucuu

SEQ ID NO: 1002336 - RNA, 19 nt, Artificial Sequence
  Description of Artificial Sequence: Synthetic oligonucleotide
  Sense strand starting at position 3571 of SEQ ID NO: 914416
ugacaucuccagcagcaga

SEQ ID NO: 1002337 - RNA, 19 nt, Artificial Sequence
  Description of Artificial Sequence: Synthetic oligonucleotide
  Antisense strand to SEQ ID NO: 1002336
ucugcugcuggagauguca

SEQ ID NO: 1002338 - RNA, 19 nt, Artificial Sequence
  Description of Artificial Sequence: Synthetic oligonucleotide
  Sense strand starting at position 3632 of SEQ ID NO: 914416
gucccaacaucuguaggau

SEQ ID NO: 1002339 - RNA, 19 nt, Artificial Sequence
  Description of Artificial Sequence: Synthetic oligonucleotide
  Antisense strand to SEQ ID NO: 1002338
auccuacagauguugggac

SEQ ID NO: 1002340 - RNA, 19 nt, Artificial Sequence
  Description of Artificial Sequence: Synthetic oligonucleotide
  Sense strand starting at position 3635 of SEQ ID NO: 914416
ccaacaucuguaggaugau

SEQ ID NO: 1002341 - RNA, 19 nt, Artificial Sequence
  Description of Artificial Sequence: Synthetic oligonucleotide
  Antisense strand to SEQ ID NO: 1002340
aucauccuacagauguugg

SEQ ID NO: 1002342 - RNA, 19 nt, Artificial Sequence
  Description of Artificial Sequence: Synthetic oligonucleotide
  Sense strand starting at position 3820 of SEQ ID NO: 914416
gcauuacauucucucuguu

SEQ ID NO: 1002343 - RNA, 19 nt, Artificial Sequence
  Description of Artificial Sequence: Synthetic oligonucleotide
  Antisense strand to SEQ ID NO: 1002342
aacagagagaauguaaugc

SEQ ID NO: 1002344 - RNA, 19 nt, Artificial Sequence
  Description of Artificial Sequence: Synthetic oligonucleotide
  Sense strand starting at position 616 of SEQ ID NO: 914417
aaaggauguucggcaaagu

SEQ ID NO: 1002345 - RNA, 19 nt, Artificial Sequence
  Description of Artificial Sequence: Synthetic oligonucleotide
  Antisense strand to SEQ ID NO: 1002344
acuuugccgaacauccuuu

SEQ ID NO: 1002346 - RNA, 19 nt, Artificial Sequence
  Description of Artificial Sequence: Synthetic oligonucleotide
  Sense strand starting at position 617 of SEQ ID NO: 914417
aaggauguucggcaaagua

SEQ ID NO: 1002347 - RNA, 19 nt, Artificial Sequence
  Description of Artificial Sequence: Synthetic oligonucleotide
  Antisense strand to SEQ ID NO: 1002346
uacuuugccgaacauccuu

SEQ ID NO: 1002348 - RNA, 19 nt, Artificial Sequence
  Description of Artificial Sequence: Synthetic oligonucleotide
  Sense strand starting at position 704 of SEQ ID NO: 914417
cagagaucucagugccaug

SEQ ID NO: 1002349 - RNA, 19 nt, Artificial Sequence
  Description of Artificial Sequence: Synthetic oligonucleotide
  Antisense strand to SEQ ID NO: 1002348
cauggcacugagaucucug

SEQ ID NO: 1002350 - RNA, 19 nt, Artificial Sequence
  Description of Artificial Sequence: Synthetic oligonucleotide
  Sense strand starting at position 892 of SEQ ID NO: 914417
gggaaagucugugguaaga

SEQ ID NO: 1002351 - RNA, 19 nt, Artificial Sequence
  Description of Artificial Sequence: Synthetic oligonucleotide
  Antisense strand to SEQ ID NO: 1002350
ucuuaccacagacuuuccc

SEQ ID NO: 1002352 - RNA, 19 nt, Artificial Sequence
  Description of Artificial Sequence: Synthetic oligonucleotide
  Sense strand starting at position 973 of SEQ ID NO: 914417
gcggguggauauccugaaa

SEQ ID NO: 1002353 - RNA, 19 nt, Artificial Sequence
  Description of Artificial Sequence: Synthetic oligonucleotide
  Antisense strand to SEQ ID NO: 1002352
uuucaggauauccacccgc

SEQ ID NO: 1002354 - RNA, 19 nt, Artificial Sequence
  Description of Artificial Sequence: Synthetic oligonucleotide
  Sense strand starting at position 1710 of SEQ ID NO: 914417
cccggaaacuucccucaga

SEQ ID NO: 1002355 - RNA, 19 nt, Artificial Sequence
  Description of Artificial Sequence: Synthetic oligonucleotide
  Antisense strand to SEQ ID NO: 1002354
ucugagggaaguuuccggg

SEQ ID NO: 1002356 - RNA, 19 nt, Artificial Sequence
  Description of Artificial Sequence: Synthetic oligonucleotide
  Sense strand starting at position 1711 of SEQ ID NO: 914417
ccggaaacuucccucagaa

SEQ ID NO: 1002357 - RNA, 19 nt, Artificial Sequence
  Description of Artificial Sequence: Synthetic oligonucleotide
  Antisense strand to SEQ ID NO: 1002356
uucugagggaaguuuccgg

SEQ ID NO: 1002358 - RNA, 19 nt, Artificial Sequence
  Description of Artificial Sequence: Synthetic oligonucleotide
  Sense strand starting at position 2070 of SEQ ID NO: 914417
gugcgcauuucauugucga

SEQ ID NO: 1002359 - RNA, 19 nt, Artificial Sequence
  Description of Artificial Sequence: Synthetic oligonucleotide
  Antisense strand to SEQ ID NO: 1002358
ucgacaaugaaaugcgcac

SEQ ID NO: 1002360 - RNA, 19 nt, Artificial Sequence
  Description of Artificial Sequence: Synthetic oligonucleotide
  Sense strand starting at position 2130 of SEQ ID NO: 914417
uuaccagcccauuguuuau

SEQ ID NO: 1002361 - RNA, 19 nt, Artificial Sequence
  Description of Artificial Sequence: Synthetic oligonucleotide
  Antisense strand to SEQ ID NO: 1002360
auaaacaaugggcugguaa

SEQ ID NO: 1002362 - RNA, 19 nt, Artificial Sequence
  Description of Artificial Sequence: Synthetic oligonucleotide
  Sense strand starting at position 2143 of SEQ ID NO: 914417
guuuauuucgcgccugcuu

SEQ ID NO: 1002363 - RNA, 19 nt, Artificial Sequence
  Description of Artificial Sequence: Synthetic oligonucleotide
  Antisense strand to SEQ ID NO: 1002362
aagcaggcgcgaaauaaac

SEQ ID NO: 1002364 - RNA, 19 nt, Artificial Sequence
  Description of Artificial Sequence: Synthetic oligonucleotide
  Sense strand starting at position 2145 of SEQ ID NO: 914417
uuauuucgcgccugcuuua

SEQ ID NO: 1002365 - RNA, 19 nt, Artificial Sequence
  Description of Artificial Sequence: Synthetic oligonucleotide
  Antisense strand to SEQ ID NO: 1002364
uaaagcaggcgcgaaauaa

SEQ ID NO: 1002366 - RNA, 19 nt, Artificial Sequence
  Description of Artificial Sequence: Synthetic oligonucleotide
  Sense strand starting at position 2165 of SEQ ID NO: 914417
cguggugucgucgggaacu

SEQ ID NO: 1002367 - RNA, 19 nt, Artificial Sequence
  Description of Artificial Sequence: Synthetic oligonucleotide
  Antisense strand to SEQ ID NO: 1002366
aguucccgacgacaccacg

SEQ ID NO: 1002368 - RNA, 19 nt, Artificial Sequence
  Description of Artificial Sequence: Synthetic oligonucleotide
  Sense strand starting at position 2201 of SEQ ID NO: 914417
uacugugugcuaggcguua

SEQ ID NO: 1002369 - RNA, 19 nt, Artificial Sequence
  Description of Artificial Sequence: Synthetic oligonucleotide
  Antisense strand to SEQ ID NO: 1002368
uaacgccuagcacacagua

SEQ ID NO: 1002370 - RNA, 19 nt, Artificial Sequence
  Description of Artificial Sequence: Synthetic oligonucleotide
  Sense strand starting at position 2205 of SEQ ID NO: 914417
gugugcuaggcguuaugca

SEQ ID NO: 1002371 - RNA, 19 nt, Artificial Sequence
  Description of Artificial Sequence: Synthetic oligonucleotide
  Antisense strand to SEQ ID NO: 1002370
ugcauaacgccuagcacac

SEQ ID NO: 1002372 - RNA, 19 nt, Artificial Sequence
  Description of Artificial Sequence: Synthetic oligonucleotide
  Sense strand starting at position 2214 of SEQ ID NO: 914417
gcguuaugcaggguaccuu

SEQ ID NO: 1002373 - RNA, 19 nt, Artificial Sequence
  Description of Artificial Sequence: Synthetic oligonucleotide
  Antisense strand to SEQ ID NO: 1002372
aagguacccugcauaacgc

SEQ ID NO: 1002374 - RNA, 19 nt, Artificial Sequence
  Description of Artificial Sequence: Synthetic oligonucleotide
  Sense strand starting at position 2231 of SEQ ID NO: 914417
uuccuuuauuccucggcga

SEQ ID NO: 1002375 - RNA, 19 nt, Artificial Sequence
  Description of Artificial Sequence: Synthetic oligonucleotide
  Antisense strand to SEQ ID NO: 1002374
ucgccgaggaauaaaggaa

SEQ ID NO: 1002376 - RNA, 19 nt, Artificial Sequence
  Description of Artificial Sequence: Synthetic oligonucleotide
  Sense strand starting at position 2232 of SEQ ID NO: 914417
uccuuuauuccucggcgau

SEQ ID NO: 1002377 - RNA, 19 nt, Artificial Sequence
  Description of Artificial Sequence: Synthetic oligonucleotide
  Antisense strand to SEQ ID NO: 1002376
aucgccgaggaauaaagga

SEQ ID NO: 1002378 - RNA, 19 nt, Artificial Sequence
  Description of Artificial Sequence: Synthetic oligonucleotide
  Sense strand starting at position 2233 of SEQ ID NO: 914417
ccuuuauuccucggcgaua

SEQ ID NO: 1002379 - RNA, 19 nt, Artificial Sequence
  Description of Artificial Sequence: Synthetic oligonucleotide
  Antisense strand to SEQ ID NO: 1002378
uaucgccgaggaauaaagg

SEQ ID NO: 1002380 - RNA, 19 nt, Artificial Sequence
  Description of Artificial Sequence: Synthetic oligonucleotide
  Sense strand starting at position 2234 of SEQ ID NO: 914417
cuuuauuccucggcgauau

SEQ ID NO: 1002381 - RNA, 19 nt, Artificial Sequence
  Description of Artificial Sequence: Synthetic oligonucleotide
  Antisense strand to SEQ ID NO: 1002380
auaucgccgaggaauaaag

SEQ ID NO: 1002382 - RNA, 19 nt, Artificial Sequence
  Description of Artificial Sequence: Synthetic oligonucleotide
  Sense strand starting at position 2235 of SEQ ID NO: 914417
uuuauuccucggcgauaug

SEQ ID NO: 1002383 - RNA, 19 nt, Artificial Sequence
  Description of Artificial Sequence: Synthetic oligonucleotide
  Antisense strand to SEQ ID NO: 1002382
cauaucgccgaggaauaaa

SEQ ID NO: 1002384 - RNA, 19 nt, Artificial Sequence
  Description of Artificial Sequence: Synthetic oligonucleotide
  Sense strand starting at position 2356 of SEQ ID NO: 914417
ccaagcgagaccuguuaca

SEQ ID NO: 1002385 - RNA, 19 nt, Artificial Sequence
  Description of Artificial Sequence: Synthetic oligonucleotide
  Antisense strand to SEQ ID NO: 1002384
uguaacaggucucgcuugg

SEQ ID NO: 1002386 - RNA, 19 nt, Artificial Sequence
  Description of Artificial Sequence: Synthetic oligonucleotide
  Sense strand starting at position 3434 of SEQ ID NO: 914417
gucagcagagugugagaau

SEQ ID NO: 1002387 - RNA, 19 nt, Artificial Sequence
  Description of Artificial Sequence: Synthetic oligonucleotide
  Antisense strand to SEQ ID NO: 1002386
auucucacacucugcugac

SEQ ID NO: 1002388 - RNA, 19 nt, Artificial Sequence
  Description of Artificial Sequence: Synthetic oligonucleotide
  Sense strand starting at position 3435 of SEQ ID NO: 914417
ucagcagagugugagaauu

SEQ ID NO: 1002389 - RNA, 19 nt, Artificial Sequence
  Description of Artificial Sequence: Synthetic oligonucleotide
  Antisense strand to SEQ ID NO: 1002388
aauucucacacucugcuga

SEQ ID NO: 1002390 - RNA, 19 nt, Artificial Sequence
  Description of Artificial Sequence: Synthetic oligonucleotide
  Sense strand starting at position 3443 of SEQ ID NO: 914417
gugugagaauugcucugca

SEQ ID NO: 1002391 - RNA, 19 nt, Artificial Sequence
  Description of Artificial Sequence: Synthetic oligonucleotide
  Antisense strand to SEQ ID NO: 1002390
ugcagagcaauucucacac

SEQ ID NO: 1002392 - RNA, 19 nt, Artificial Sequence
  Description of Artificial Sequence: Synthetic oligonucleotide
  Sense strand starting at position 3446 of SEQ ID NO: 914417
ugagaauugcucugcaucc

SEQ ID NO: 1002393 - RNA, 19 nt, Artificial Sequence
  Description of Artificial Sequence: Synthetic oligonucleotide
  Antisense strand to SEQ ID NO: 1002392
ggaugcagagcaauucuca

SEQ ID NO: 1002394 - RNA, 19 nt, Artificial Sequence
  Description of Artificial Sequence: Synthetic oligonucleotide
  Sense strand starting at position 3448 of SEQ ID NO: 914417
agaauugcucugcauccuu

SEQ ID NO: 1002395 - RNA, 19 nt, Artificial Sequence
  Description of Artificial Sequence: Synthetic oligonucleotide
  Antisense strand to SEQ ID NO: 1002394
aaggaugcagagcaauucu

SEQ ID NO: 1002396 - RNA, 19 nt, Artificial Sequence
  Description of Artificial Sequence: Synthetic oligonucleotide
  Sense strand starting at position 3517 of SEQ ID NO: 914417
uguagugguaucuaguuau

SEQ ID NO: 1002397 - RNA, 19 nt, Artificial Sequence
  Description of Artificial Sequence: Synthetic oligonucleotide
  Antisense strand to SEQ ID NO: 1002396
auaacuagauaccacuaca

SEQ ID NO: 1002398 - RNA, 19 nt, Artificial Sequence
  Description of Artificial Sequence: Synthetic oligonucleotide
  Sense strand starting at position 3520 of SEQ ID NO: 914417
agugguaucuaguuauaga

SEQ ID NO: 1002399 - RNA, 19 nt, Artificial Sequence
  Description of Artificial Sequence: Synthetic oligonucleotide
  Antisense strand to SEQ ID NO: 1002398
ucuauaacuagauaccacu

SEQ ID NO: 1002400 - RNA, 19 nt, Artificial Sequence
  Description of Artificial Sequence: Synthetic oligonucleotide
  Sense strand starting at position 3521 of SEQ ID NO: 914417
gugguaucuaguuauagau

SEQ ID NO: 1002401 - RNA, 19 nt, Artificial Sequence
  Description of Artificial Sequence: Synthetic oligonucleotide
  Antisense strand to SEQ ID NO: 1002400
aucuauaacuagauaccac

SEQ ID NO: 1002402 - RNA, 19 nt, Artificial Sequence
  Description of Artificial Sequence: Synthetic oligonucleotide
  Sense strand starting at position 3523 of SEQ ID NO: 914417
gguaucuaguuauagauuu

SEQ ID NO: 1002403 - RNA, 19 nt, Artificial Sequence
  Description of Artificial Sequence: Synthetic oligonucleotide
  Antisense strand to SEQ ID NO: 1002402
aaaucuauaacuagauacc

SEQ ID NO: 1002404 - RNA, 19 nt, Artificial Sequence
  Description of Artificial Sequence: Synthetic oligonucleotide
  Sense strand starting at position 3560 of SEQ ID NO: 914417
gacuaauaacguugagcac

SEQ ID NO: 1002405 - RNA, 19 nt, Artificial Sequence
  Description of Artificial Sequence: Synthetic oligonucleotide
  Antisense strand to SEQ ID NO: 1002404
gugcucaacguuauuaguc

SEQ ID NO: 1002406 - RNA, 19 nt, Artificial Sequence
  Description of Artificial Sequence: Synthetic oligonucleotide
  Sense strand starting at position 3594 of SEQ ID NO: 914417
ugggauucuugagaauuaa

SEQ ID NO: 1002407 - RNA, 19 nt, Artificial Sequence
  Description of Artificial Sequence: Synthetic oligonucleotide
  Antisense strand to SEQ ID NO: 1002406
uuaauucucaagaauccca

SEQ ID NO: 1002408 - RNA, 19 nt, Artificial Sequence
  Description of Artificial Sequence: Synthetic oligonucleotide
  Sense strand starting at position 3638 of SEQ ID NO: 914417
aauuuacagugcuaaagag

SEQ ID NO: 1002409 - RNA, 19 nt, Artificial Sequence
  Description of Artificial Sequence: Synthetic oligonucleotide
  Antisense strand to SEQ ID NO: 1002408
cucuuuagcacuguaaauu

SEQ ID NO: 1002410 - RNA, 19 nt, Artificial Sequence
  Description of Artificial Sequence: Synthetic oligonucleotide
  Sense strand starting at position 3650 of SEQ ID NO: 914417
uaaagagacucguauggau

SEQ ID NO: 1002411 - RNA, 19 nt, Artificial Sequence
  Description of Artificial Sequence: Synthetic oligonucleotide
  Antisense strand to SEQ ID NO: 1002410
auccauacgagucucuuua

SEQ ID NO: 1002412 - RNA, 19 nt, Artificial Sequence
  Description of Artificial Sequence: Synthetic oligonucleotide
  Sense strand starting at position 3652 of SEQ ID NO: 914417
aagagacucguauggauuc

SEQ ID NO: 1002413 - RNA, 19 nt, Artificial Sequence
  Description of Artificial Sequence: Synthetic oligonucleotide
  Antisense strand to SEQ ID NO: 1002412
gaauccauacgagucucuu

SEQ ID NO: 1002414 - RNA, 19 nt, Artificial Sequence
  Description of Artificial Sequence: Synthetic oligonucleotide
  Sense strand starting at position 3669 of SEQ ID NO: 914417
ucagacuuagccugccaua

SEQ ID NO: 1002415 - RNA, 19 nt, Artificial Sequence
  Description of Artificial Sequence: Synthetic oligonucleotide
  Antisense strand to SEQ ID NO: 1002414
uauggcaggcuaagucuga

SEQ ID NO: 1002416 - RNA, 19 nt, Artificial Sequence
  Description of Artificial Sequence: Synthetic oligonucleotide
  Sense strand starting at position 3735 of SEQ ID NO: 914417
gcacauauaccagaucugu

SEQ ID NO: 1002417 - RNA, 19 nt, Artificial Sequence
  Description of Artificial Sequence: Synthetic oligonucleotide
  Antisense strand to SEQ ID NO: 1002416
acagaucugguauaugugc

SEQ ID NO: 1002418 - RNA, 19 nt, Artificial Sequence
  Description of Artificial Sequence: Synthetic oligonucleotide
  Sense strand starting at position 3807 of SEQ ID NO: 914417
gugugucugucuccaagaa

SEQ ID NO: 1002419 - RNA, 19 nt, Artificial Sequence
  Description of Artificial Sequence: Synthetic oligonucleotide
  Antisense strand to SEQ ID NO: 1002418
uucuuggagacagacacac

SEQ ID NO: 1002420 - RNA, 19 nt, Artificial Sequence
  Description of Artificial Sequence: Synthetic oligonucleotide
  Sense strand starting at position 3811 of SEQ ID NO: 914417
gucugucuccaagaaguuc

SEQ ID NO: 1002421 - RNA, 19 nt, Artificial Sequence
  Description of Artificial Sequence: Synthetic oligonucleotide
  Antisense strand to SEQ ID NO: 1002420
gaacuucuuggagacagac

SEQ ID NO: 1002422 - RNA, 19 nt, Artificial Sequence
  Description of Artificial Sequence: Synthetic oligonucleotide
  Sense strand starting at position 3830 of SEQ ID NO: 914417
aguguuacuuaacuauaag

SEQ ID NO: 1002423 - RNA, 19 nt, Artificial Sequence
  Description of Artificial Sequence: Synthetic oligonucleotide
  Antisense strand to SEQ ID NO: 1002422
cuuauaguuaaguaacacu

SEQ ID NO: 1002424 - RNA, 19 nt, Artificial Sequence
  Description of Artificial Sequence: Synthetic oligonucleotide
  Sense strand starting at position 175 of SEQ ID NO: 914418
caagcauucugggaugcuu

SEQ ID NO: 1002425 - RNA, 19 nt, Artificial Sequence
  Description of Artificial Sequence: Synthetic oligonucleotide
  Antisense strand to SEQ ID NO: 1002424
aagcaucccagaaugcuug

SEQ ID NO: 1002426 - RNA, 19 nt, Artificial Sequence
  Description of Artificial Sequence: Synthetic oligonucleotide
  Sense strand starting at position 251 of SEQ ID NO: 914418
gcgaguuagucaccaggca

SEQ ID NO: 1002427 - RNA, 19 nt, Artificial Sequence
  Description of Artificial Sequence: Synthetic oligonucleotide
  Antisense strand to SEQ ID NO: 1002426
ugccuggugacuaacucgc

SEQ ID NO: 1002428 - RNA, 19 nt, Artificial Sequence
  Description of Artificial Sequence: Synthetic oligonucleotide
  Sense strand starting at position 252 of SEQ ID NO: 914418
cgaguuagucaccaggcaa

SEQ ID NO: 1002429 - RNA, 19 nt, Artificial Sequence
  Description of Artificial Sequence: Synthetic oligonucleotide
  Antisense strand to SEQ ID NO: 1002428
uugccuggugacuaacucg

SEQ ID NO: 1002430 - RNA, 19 nt, Artificial Sequence
  Description of Artificial Sequence: Synthetic oligonucleotide
  Sense strand starting at position 263 of SEQ ID NO: 914418
ccaggcaaaucguugacuu

SEQ ID NO: 1002431 - RNA, 19 nt, Artificial Sequence
  Description of Artificial Sequence: Synthetic oligonucleotide
  Antisense strand to SEQ ID NO: 1002430
aagucaacgauuugccugg

SEQ ID NO: 1002432 - RNA, 19 nt, Artificial Sequence
  Description of Artificial Sequence: Synthetic oligonucleotide
  Sense strand starting at position 264 of SEQ ID NO: 914418
caggcaaaucguugacuuu

SEQ ID NO: 1002433 - RNA, 19 nt, Artificial Sequence
  Description of Artificial Sequence: Synthetic oligonucleotide
  Antisense strand to SEQ ID NO: 1002432
aaagucaacgauuugccug

SEQ ID NO: 1002434 - RNA, 19 nt, Artificial Sequence
  Description of Artificial Sequence: Synthetic oligonucleotide
  Sense strand starting at position 1097 of SEQ ID NO: 914418
cuucuuaccugcuggaaga

SEQ ID NO: 1002435 - RNA, 19 nt, Artificial Sequence
  Description of Artificial Sequence: Synthetic oligonucleotide
  Antisense strand to SEQ ID NO: 1002434
ucuuccagcagguaagaag

SEQ ID NO: 1002436 - RNA, 19 nt, Artificial Sequence
  Description of Artificial Sequence: Synthetic oligonucleotide
  Sense strand starting at position 1139 of SEQ ID NO: 914418
gcugaguggugggcuuaga

SEQ ID NO: 1002437 - RNA, 19 nt, Artificial Sequence
  Description of Artificial Sequence: Synthetic oligonucleotide
  Antisense strand to SEQ ID NO: 1002436
ucuaagcccaccacucagc

SEQ ID NO: 1002438 - RNA, 19 nt, Artificial Sequence
  Description of Artificial Sequence: Synthetic oligonucleotide
  Sense strand starting at position 1143 of SEQ ID NO: 914418
aguggugggcuuagauguu

SEQ ID NO: 1002439 - RNA, 19 nt, Artificial Sequence
  Description of Artificial Sequence: Synthetic oligonucleotide
  Antisense strand to SEQ ID NO: 1002438
aacaucuaagcccaccacu

SEQ ID NO: 1002440 - RNA, 19 nt, Artificial Sequence
  Description of Artificial Sequence: Synthetic oligonucleotide
  Sense strand starting at position 1205 of SEQ ID NO: 914418
aagcacugcucauuggaga

SEQ ID NO: 1002441 - RNA, 19 nt, Artificial Sequence
  Description of Artificial Sequence: Synthetic oligonucleotide
  Antisense strand to SEQ ID NO: 1002440
ucuccaaugagcagugcuu

SEQ ID NO: 1002442 - RNA, 19 nt, Artificial Sequence
  Description of Artificial Sequence: Synthetic oligonucleotide
  Sense strand starting at position 1222 of SEQ ID NO: 914418
gacccugucucuuagagga

SEQ ID NO: 1002443 - RNA, 19 nt, Artificial Sequence
  Description of Artificial Sequence: Synthetic oligonucleotide
  Antisense strand to SEQ ID NO: 1002442
uccucuaagagacaggguc

SEQ ID NO: 1002444 - RNA, 19 nt, Artificial Sequence
  Description of Artificial Sequence: Synthetic oligonucleotide
  Sense strand starting at position 1307 of SEQ ID NO: 914418
caguguacuucccaggaag

SEQ ID NO: 1002445 - RNA, 19 nt, Artificial Sequence
  Description of Artificial Sequence: Synthetic oligonucleotide
  Antisense strand to SEQ ID NO: 1002444
cuuccugggaaguacacug

SEQ ID NO: 1002446 - RNA, 19 nt, Artificial Sequence
  Description of Artificial Sequence: Synthetic oligonucleotide
  Sense strand starting at position 1309 of SEQ ID NO: 914418
guguacuucccaggaaguu

SEQ ID NO: 1002447 - RNA, 19 nt, Artificial Sequence
  Description of Artificial Sequence: Synthetic oligonucleotide
  Antisense strand to SEQ ID NO: 1002446
aacuuccugggaaguacac

SEQ ID NO: 1002448 - RNA, 19 nt, Artificial Sequence
  Description of Artificial Sequence: Synthetic oligonucleotide
  Sense strand starting at position 1442 of SEQ ID NO: 914418
cagugccugugggauaaau

SEQ ID NO: 1002449 - RNA, 19 nt, Artificial Sequence
  Description of Artificial Sequence: Synthetic oligonucleotide
  Antisense strand to SEQ ID NO: 1002448
auuuaucccacaggcacug

SEQ ID NO: 1002450 - RNA, 19 nt, Artificial Sequence
  Description of Artificial Sequence: Synthetic oligonucleotide
  Sense strand starting at position 1525 of SEQ ID NO: 914418
caggcagcucgguugucau

SEQ ID NO: 1002451 - RNA, 19 nt, Artificial Sequence
  Description of Artificial Sequence: Synthetic oligonucleotide
  Antisense strand to SEQ ID NO: 1002450
augacaaccgagcugccug

SEQ ID NO: 1002452 - RNA, 19 nt, Artificial Sequence
  Description of Artificial Sequence: Synthetic oligonucleotide
  Sense strand starting at position 1536 of SEQ ID NO: 914418
guugucaucuugguacaca

SEQ ID NO: 1002453 - RNA, 19 nt, Artificial Sequence
  Description of Artificial Sequence: Synthetic oligonucleotide
  Antisense strand to SEQ ID NO: 1002452
uguguaccaagaugacaac

SEQ ID NO: 1002454 - RNA, 19 nt, Artificial Sequence
  Description of Artificial Sequence: Synthetic oligonucleotide
  Sense strand starting at position 1998 of SEQ ID NO: 914418
ccacccaucugacaagaga

SEQ ID NO: 1002455 - RNA, 19 nt, Artificial Sequence
  Description of Artificial Sequence: Synthetic oligonucleotide
  Antisense strand to SEQ ID NO: 1002454
ucucuugucagaugggugg

SEQ ID NO: 1002456 - RNA, 19 nt, Artificial Sequence
  Description of Artificial Sequence: Synthetic oligonucleotide
  Sense strand starting at position 2347 of SEQ ID NO: 914418
ugaagaguuuguucuccuc

SEQ ID NO: 1002457 - RNA, 19 nt, Artificial Sequence
  Description of Artificial Sequence: Synthetic oligonucleotide
  Antisense strand to SEQ ID NO: 1002456
gaggagaacaaacucuuca

SEQ ID NO: 1002458 - RNA, 19 nt, Artificial Sequence
  Description of Artificial Sequence: Synthetic oligonucleotide
  Sense strand starting at position 2350 of SEQ ID NO: 914418
agaguuuguucuccucuga

SEQ ID NO: 1002459 - RNA, 19 nt, Artificial Sequence
  Description of Artificial Sequence: Synthetic oligonucleotide
  Antisense strand to SEQ ID NO: 1002458
ucagaggagaacaaacucu

SEQ ID NO: 1002460 - RNA, 19 nt, Artificial Sequence
  Description of Artificial Sequence: Synthetic oligonucleotide
  Sense strand starting at position 2756 of SEQ ID NO: 914418
ucaguauggcuccaagcua

SEQ ID NO: 1002461 - RNA, 19 nt, Artificial Sequence
  Description of Artificial Sequence: Synthetic oligonucleotide
  Antisense strand to SEQ ID NO: 1002460
uagcuuggagccauacuga

SEQ ID NO: 1002462 - RNA, 19 nt, Artificial Sequence
  Description of Artificial Sequence: Synthetic oligonucleotide
  Sense strand starting at position 2763 of SEQ ID NO: 914418
ggcuccaagcuagaacaau

SEQ ID NO: 1002463 - RNA, 19 nt, Artificial Sequence
  Description of Artificial Sequence: Synthetic oligonucleotide
  Antisense strand to SEQ ID NO: 1002462
auuguucuagcuuggagcc

SEQ ID NO: 1002464 - RNA, 19 nt, Artificial Sequence
  Description of Artificial Sequence: Synthetic oligonucleotide
  Sense strand starting at position 2840 of SEQ ID NO: 914418
ugaagaauuuaauggcugu

SEQ ID NO: 1002465 - RNA, 19 nt, Artificial Sequence
  Description of Artificial Sequence: Synthetic oligonucleotide
  Antisense strand to SEQ ID NO: 1002464
acagccauuaaauucuuca

SEQ ID NO: 1002466 - RNA, 19 nt, Artificial Sequence
  Description of Artificial Sequence: Synthetic oligonucleotide
  Sense strand starting at position 2902 of SEQ ID NO: 914418
gcacaacaaugguugaaau

SEQ ID NO: 1002467 - RNA, 19 nt, Artificial Sequence
  Description of Artificial Sequence: Synthetic oligonucleotide
  Antisense strand to SEQ ID NO: 1002466
auuucaaccauuguugugc

SEQ ID NO: 1002468 - RNA, 19 nt, Artificial Sequence
  Description of Artificial Sequence: Synthetic oligonucleotide
  Sense strand starting at position 2920 of SEQ ID NO: 914418
ugguaaacuuuaugguaua

SEQ ID NO: 1002469 - RNA, 19 nt, Artificial Sequence
  Description of Artificial Sequence: Synthetic oligonucleotide
  Antisense strand to SEQ ID NO: 1002468
uauaccauaaaguuuacca

SEQ ID NO: 1002470 - RNA, 19 nt, Artificial Sequence
  Description of Artificial Sequence: Synthetic oligonucleotide
  Sense strand starting at position 2927 of SEQ ID NO: 914418
cuuuaugguauauguguua

SEQ ID NO: 1002471 - RNA, 19 nt, Artificial Sequence
  Description of Artificial Sequence: Synthetic oligonucleotide
  Antisense strand to SEQ ID NO: 1002470
uaacacauauaccauaaag

SEQ ID NO: 1002472 - RNA, 19 nt, Artificial Sequence
  Description of Artificial Sequence: Synthetic oligonucleotide
  Sense strand starting at position 2932 of SEQ ID NO: 914418
ugguauauguguuauacaa

SEQ ID NO: 1002473 - RNA, 19 nt, Artificial Sequence
  Description of Artificial Sequence: Synthetic oligonucleotide
  Antisense strand to SEQ ID NO: 1002472
uuguauaacacauauacca

SEQ ID NO: 1002474 - RNA, 19 nt, Artificial Sequence
  Description of Artificial Sequence: Synthetic oligonucleotide
  Sense strand starting at position 2939 of SEQ ID NO: 914418
uguguuauacaauacugga

SEQ ID NO: 1002475 - RNA, 19 nt, Artificial Sequence
  Description of Artificial Sequence: Synthetic oligonucleotide
  Antisense strand to SEQ ID NO: 1002474
uccaguauuguauaacaca

SEQ ID NO: 1002476 - RNA, 19 nt, Artificial Sequence
  Description of Artificial Sequence: Synthetic oligonucleotide
  Sense strand starting at position 2942 of SEQ ID NO: 914418
guuauacaauacuggagaa

SEQ ID NO: 1002477 - RNA, 19 nt, Artificial Sequence
  Description of Artificial Sequence: Synthetic oligonucleotide
  Antisense strand to SEQ ID NO: 1002476
uucuccaguauuguauaac

SEQ ID NO: 1002478 - RNA, 19 nt, Artificial Sequence
  Description of Artificial Sequence: Synthetic oligonucleotide
  Sense strand starting at position 3080 of SEQ ID NO: 914418
agcacuauccuugagcacu

SEQ ID NO: 1002479 - RNA, 19 nt, Artificial Sequence
  Description of Artificial Sequence: Synthetic oligonucleotide
  Antisense strand to SEQ ID NO: 1002478
agugcucaaggauagugcu

SEQ ID NO: 1002480 - RNA, 19 nt, Artificial Sequence
  Description of Artificial Sequence: Synthetic oligonucleotide
  Sense strand starting at position 3112 of SEQ ID NO: 914418
ccaacugccucuggguaaa

SEQ ID NO: 1002481 - RNA, 19 nt, Artificial Sequence
  Description of Artificial Sequence: Synthetic oligonucleotide
  Antisense strand to SEQ ID NO: 1002480
uuuacccagaggcaguugg

SEQ ID NO: 1002482 - RNA, 19 nt, Artificial Sequence
  Description of Artificial Sequence: Synthetic oligonucleotide
  Sense strand starting at position 3196 of SEQ ID NO: 914418
acaaauaacuuggguaauu

SEQ ID NO: 1002483 - RNA, 19 nt, Artificial Sequence
  Description of Artificial Sequence: Synthetic oligonucleotide
  Antisense strand to SEQ ID NO: 1002482
aauuacccaaguuauuugu

SEQ ID NO: 1002484 - RNA, 19 nt, Artificial Sequence
  Description of Artificial Sequence: Synthetic oligonucleotide
  Sense strand starting at position 3206 of SEQ ID NO: 914418
uggguaauuguugugcgua

SEQ ID NO: 1002485 - RNA, 19 nt, Artificial Sequence
  Description of Artificial Sequence: Synthetic oligonucleotide
  Antisense strand to SEQ ID NO: 1002484
uacgcacaacaauuaccca

SEQ ID NO: 1002486 - RNA, 19 nt, Artificial Sequence
  Description of Artificial Sequence: Synthetic oligonucleotide
  Sense strand starting at position 3208 of SEQ ID NO: 914418
gguaauuguugugcguauu

SEQ ID NO: 1002487 - RNA, 19 nt, Artificial Sequence
  Description of Artificial Sequence: Synthetic oligonucleotide
  Antisense strand to SEQ ID NO: 1002486
aauacgcacaacaauuacc

SEQ ID NO: 1002488 - RNA, 19 nt, Artificial Sequence
  Description of Artificial Sequence: Synthetic oligonucleotide
  Sense strand starting at position 3209 of SEQ ID NO: 914418
guaauuguugugcguauua

SEQ ID NO: 1002489 - RNA, 19 nt, Artificial Sequence
  Description of Artificial Sequence: Synthetic oligonucleotide
  Antisense strand to SEQ ID NO: 1002488
uaauacgcacaacaauuac

SEQ ID NO: 1002490 - RNA, 19 nt, Artificial Sequence
  Description of Artificial Sequence: Synthetic oligonucleotide
  Sense strand starting at position 3211 of SEQ ID NO: 914418
aauuguugugcguauuaaa

SEQ ID NO: 1002491 - RNA, 19 nt, Artificial Sequence
  Description of Artificial Sequence: Synthetic oligonucleotide
  Antisense strand to SEQ ID NO: 1002490
uuuaauacgcacaacaauu

SEQ ID NO: 1002492 - RNA, 19 nt, Artificial Sequence
  Description of Artificial Sequence: Synthetic oligonucleotide
  Sense strand starting at position 3220 of SEQ ID NO: 914418
gcguauuaaauguggucca

SEQ ID NO: 1002493 - RNA, 19 nt, Artificial Sequence
  Description of Artificial Sequence: Synthetic oligonucleotide
  Antisense strand to SEQ ID NO: 1002492
uggaccacauuuaauacgc

SEQ ID NO: 1002494 - RNA, 19 nt, Artificial Sequence
  Description of Artificial Sequence: Synthetic oligonucleotide
  Sense strand starting at position 3223 of SEQ ID NO: 914418
uauuaaaugugguccacag

SEQ ID NO: 1002495 - RNA, 19 nt, Artificial Sequence
  Description of Artificial Sequence: Synthetic oligonucleotide
  Antisense strand to SEQ ID NO: 1002494
cuguggaccacauuuaaua

SEQ ID NO: 1002496 - RNA, 19 nt, Artificial Sequence
  Description of Artificial Sequence: Synthetic oligonucleotide
  Sense strand starting at position 3270 of SEQ ID NO: 914418
aagugaguuggugguugua

SEQ ID NO: 1002497 - RNA, 19 nt, Artificial Sequence
  Description of Artificial Sequence: Synthetic oligonucleotide
  Antisense strand to SEQ ID NO: 1002496
uacaaccaccaacucacuu

SEQ ID NO: 1002498 - RNA, 19 nt, Artificial Sequence
  Description of Artificial Sequence: Synthetic oligonucleotide
  Sense strand starting at position 3272 of SEQ ID NO: 914418
gugaguuggugguuguauu

SEQ ID NO: 1002499 - RNA, 19 nt, Artificial Sequence
  Description of Artificial Sequence: Synthetic oligonucleotide
  Antisense strand to SEQ ID NO: 1002498
aauacaaccaccaacucac

SEQ ID NO: 1002500 - RNA, 19 nt, Artificial Sequence
  Description of Artificial Sequence: Synthetic oligonucleotide
  Sense strand starting at position 3273 of SEQ ID NO: 914418
ugaguuggugguuguauuu

SEQ ID NO: 1002501 - RNA, 19 nt, Artificial Sequence
  Description of Artificial Sequence: Synthetic oligonucleotide
  Antisense strand to SEQ ID NO: 1002500
aaauacaaccaccaacuca

SEQ ID NO: 1002502 - RNA, 19 nt, Artificial Sequence
  Description of Artificial Sequence: Synthetic oligonucleotide
  Sense strand starting at position 3282 of SEQ ID NO: 914418
gguuguauuuguccguucu

SEQ ID NO: 1002503 - RNA, 19 nt, Artificial Sequence
  Description of Artificial Sequence: Synthetic oligonucleotide
  Antisense strand to SEQ ID NO: 1002502
agaacggacaaauacaacc

SEQ ID NO: 1002504 - RNA, 19 nt, Artificial Sequence
  Description of Artificial Sequence: Synthetic oligonucleotide
  Sense strand starting at position 755 of SEQ ID NO: 914419
acacaaagcuuaguuagaa

SEQ ID NO: 1002505 - RNA, 19 nt, Artificial Sequence
  Description of Artificial Sequence: Synthetic oligonucleotide
  Antisense strand to SEQ ID NO: 1002504
uucuaacuaagcuuugugu

SEQ ID NO: 1002506 - RNA, 19 nt, Artificial Sequence
  Description of Artificial Sequence: Synthetic oligonucleotide
  Sense strand starting at position 791 of SEQ ID NO: 914419
gggagugcugucgggaaag

SEQ ID NO: 1002507 - RNA, 19 nt, Artificial Sequence
  Description of Artificial Sequence: Synthetic oligonucleotide
  Antisense strand to SEQ ID NO: 1002506
cuuucccgacagcacuccc

SEQ ID NO: 1002508 - RNA, 19 nt, Artificial Sequence
  Description of Artificial Sequence: Synthetic oligonucleotide
  Sense strand starting at position 793 of SEQ ID NO: 914419
gagugcugucgggaaagau

SEQ ID NO: 1002509 - RNA, 19 nt, Artificial Sequence
  Description of Artificial Sequence: Synthetic oligonucleotide
  Antisense strand to SEQ ID NO: 1002508
aucuuucccgacagcacuc

SEQ ID NO: 1002510 - RNA, 19 nt, Artificial Sequence
  Description of Artificial Sequence: Synthetic oligonucleotide
  Sense strand starting at position 979 of SEQ ID NO: 914419
gcagauuacucagcagaua

SEQ ID NO: 1002511 - RNA, 19 nt, Artificial Sequence
  Description of Artificial Sequence: Synthetic oligonucleotide
  Antisense strand to SEQ ID NO: 1002510
uaucugcugaguaaucugc

SEQ ID NO: 1002512 - RNA, 19 nt, Artificial Sequence
  Description of Artificial Sequence: Synthetic oligonucleotide
  Sense strand starting at position 1408 of SEQ ID NO: 914419
gcaucuuucucagcugaca

SEQ ID NO: 1002513 - RNA, 19 nt, Artificial Sequence
  Description of Artificial Sequence: Synthetic oligonucleotide
  Antisense strand to SEQ ID NO: 1002512
ugucagcugagaaagaugc

SEQ ID NO: 1002514 - RNA, 19 nt, Artificial Sequence
  Description of Artificial Sequence: Synthetic oligonucleotide
  Sense strand starting at position 2262 of SEQ ID NO: 914419
ccagcugucugauuucguu

SEQ ID NO: 1002515 - RNA, 19 nt, Artificial Sequence
  Description of Artificial Sequence: Synthetic oligonucleotide
  Antisense strand to SEQ ID NO: 1002514
aacgaaaucagacagcugg

SEQ ID NO: 1002516 - RNA, 19 nt, Artificial Sequence
  Description of Artificial Sequence: Synthetic oligonucleotide
  Sense strand starting at position 2395 of SEQ ID NO: 914419
ugugcugcccguuucugaa

SEQ ID NO: 1002517 - RNA, 19 nt, Artificial Sequence
  Description of Artificial Sequence: Synthetic oligonucleotide
  Antisense strand to SEQ ID NO: 1002516
uucagaaacgggcagcaca

SEQ ID NO: 1002518 - RNA, 19 nt, Artificial Sequence
  Description of Artificial Sequence: Synthetic oligonucleotide
  Sense strand starting at position 2415 of SEQ ID NO: 914419
auaaacugcgugcauuaga

SEQ ID NO: 1002519 - RNA, 19 nt, Artificial Sequence
  Description of Artificial Sequence: Synthetic oligonucleotide
  Antisense strand to SEQ ID NO: 1002518
ucuaaugcacgcaguuuau

SEQ ID NO: 1002520 - RNA, 19 nt, Artificial Sequence
  Description of Artificial Sequence: Synthetic oligonucleotide
  Sense strand starting at position 2424 of SEQ ID NO: 914419
gugcauuagagagauggca

SEQ ID NO: 1002521 - RNA, 19 nt, Artificial Sequence
  Description of Artificial Sequence: Synthetic oligonucleotide
  Antisense strand to SEQ ID NO: 1002520
ugccaucucucuaaugcac

SEQ ID NO: 1002522 - RNA, 19 nt, Artificial Sequence
  Description of Artificial Sequence: Synthetic oligonucleotide
  Sense strand starting at position 2441 of SEQ ID NO: 914419
cagggacguuucucaacau

SEQ ID NO: 1002523 - RNA, 19 nt, Artificial Sequence
  Description of Artificial Sequence: Synthetic oligonucleotide
  Antisense strand to SEQ ID NO: 1002522
auguugagaaacgucccug

SEQ ID NO: 1002524 - RNA, 19 nt, Artificial Sequence
  Description of Artificial Sequence: Synthetic oligonucleotide
  Sense strand starting at position 2445 of SEQ ID NO: 914419
gacguuucucaacauaagu

SEQ ID NO: 1002525 - RNA, 19 nt, Artificial Sequence
  Description of Artificial Sequence: Synthetic oligonucleotide
  Antisense strand to SEQ ID NO: 1002524
acuuauguugagaaacguc

SEQ ID NO: 1002526 - RNA, 19 nt, Artificial Sequence
  Description of Artificial Sequence: Synthetic oligonucleotide
  Sense strand starting at position 2453 of SEQ ID NO: 914419
ucaacauaagugugacaga

SEQ ID NO: 1002527 - RNA, 19 nt, Artificial Sequence
  Description of Artificial Sequence: Synthetic oligonucleotide
  Antisense strand to SEQ ID NO: 1002526
ucugucacacuuauguuga

SEQ ID NO: 1002528 - RNA, 19 nt, Artificial Sequence
  Description of Artificial Sequence: Synthetic oligonucleotide
  Sense strand starting at position 2748 of SEQ ID NO: 914419
guauuuguagcuugcacaa

SEQ ID NO: 1002529 - RNA, 19 nt, Artificial Sequence
  Description of Artificial Sequence: Synthetic oligonucleotide
  Antisense strand to SEQ ID NO: 1002528
uugugcaagcuacaaauac

SEQ ID NO: 1002530 - RNA, 19 nt, Artificial Sequence
  Description of Artificial Sequence: Synthetic oligonucleotide
  Sense strand starting at position 2780 of SEQ ID NO: 914419
ugacccuaauucuugguaa

SEQ ID NO: 1002531 - RNA, 19 nt, Artificial Sequence
  Description of Artificial Sequence: Synthetic oligonucleotide
  Antisense strand to SEQ ID NO: 1002530
uuaccaagaauuaggguca

SEQ ID NO: 1002532 - RNA, 19 nt, Artificial Sequence
  Description of Artificial Sequence: Synthetic oligonucleotide
  Sense strand starting at position 2782 of SEQ ID NO: 914419
acccuaauucuugguaaag

SEQ ID NO: 1002533 - RNA, 19 nt, Artificial Sequence
  Description of Artificial Sequence: Synthetic oligonucleotide
  Antisense strand to SEQ ID NO: 1002532
cuuuaccaagaauuagggu

SEQ ID NO: 1002534 - RNA, 19 nt, Artificial Sequence
  Description of Artificial Sequence: Synthetic oligonucleotide
  Sense strand starting at position 2783 of SEQ ID NO: 914419
cccuaauucuugguaaagu

SEQ ID NO: 1002535 - RNA, 19 nt, Artificial Sequence
  Description of Artificial Sequence: Synthetic oligonucleotide
  Antisense strand to SEQ ID NO: 1002534
acuuuaccaagaauuaggg

SEQ ID NO: 1002536 - RNA, 19 nt, Artificial Sequence
  Description of Artificial Sequence: Synthetic oligonucleotide
  Sense strand starting at position 2793 of SEQ ID NO: 914419
ugguaaaguguuuggagca

SEQ ID NO: 1002537 - RNA, 19 nt, Artificial Sequence
  Description of Artificial Sequence: Synthetic oligonucleotide
  Antisense strand to SEQ ID NO: 1002536
ugcuccaaacacuuuacca

SEQ ID NO: 1002538 - RNA, 19 nt, Artificial Sequence
  Description of Artificial Sequence: Synthetic oligonucleotide
  Sense strand starting at position 2798 of SEQ ID NO: 914419
aaguguuuggagcacaacu

SEQ ID NO: 1002539 - RNA, 19 nt, Artificial Sequence
  Description of Artificial Sequence: Synthetic oligonucleotide
  Antisense strand to SEQ ID NO: 1002538
aguugugcuccaaacacuu

SEQ ID NO: 1002540 - RNA, 19 nt, Artificial Sequence
  Description of Artificial Sequence: Synthetic oligonucleotide
  Sense strand starting at position 2861 of SEQ ID NO: 914419
cccuaaaucuuggaagaga

SEQ ID NO: 1002541 - RNA, 19 nt, Artificial Sequence
  Description of Artificial Sequence: Synthetic oligonucleotide
  Antisense strand to SEQ ID NO: 1002540
ucucuuccaagauuuaggg

SEQ ID NO: 1002542 - RNA, 19 nt, Artificial Sequence
  Description of Artificial Sequence: Synthetic oligonucleotide
  Sense strand starting at position 2883 of SEQ ID NO: 914419
guuaacuauugguuuagga

SEQ ID NO: 1002543 - RNA, 19 nt, Artificial Sequence
  Description of Artificial Sequence: Synthetic oligonucleotide
  Antisense strand to SEQ ID NO: 1002542
uccuaaaccaauaguuaac

SEQ ID NO: 1002544 - RNA, 19 nt, Artificial Sequence
  Description of Artificial Sequence: Synthetic oligonucleotide
  Sense strand starting at position 2923 of SEQ ID NO: 914419
ugcauuugguuacagaauc

SEQ ID NO: 1002545 - RNA, 19 nt, Artificial Sequence
  Description of Artificial Sequence: Synthetic oligonucleotide
  Antisense strand to SEQ ID NO: 1002544
gauucuguaaccaaaugca

SEQ ID NO: 1002546 - RNA, 19 nt, Artificial Sequence
  Description of Artificial Sequence: Synthetic oligonucleotide
  Sense strand starting at position 2936 of SEQ ID NO: 914419
agaauccagcuuugaaaug

SEQ ID NO: 1002547 - RNA, 19 nt, Artificial Sequence
  Description of Artificial Sequence: Synthetic oligonucleotide
  Antisense strand to SEQ ID NO: 1002546
cauuucaaagcuggauucu

SEQ ID NO: 1002548 - RNA, 19 nt, Artificial Sequence
  Description of Artificial Sequence: Synthetic oligonucleotide
  Sense strand starting at position 2941 of SEQ ID NO: 914419
ccagcuuugaaauggagua

SEQ ID NO: 1002549 - RNA, 19 nt, Artificial Sequence
  Description of Artificial Sequence: Synthetic oligonucleotide
  Antisense strand to SEQ ID NO: 1002548
uacuccauuucaaagcugg

SEQ ID NO: 1002550 - RNA, 19 nt, Artificial Sequence
  Description of Artificial Sequence: Synthetic oligonucleotide
  Sense strand starting at position 2948 of SEQ ID NO: 914419
ugaaauggaguaugcucau

SEQ ID NO: 1002551 - RNA, 19 nt, Artificial Sequence
  Description of Artificial Sequence: Synthetic oligonucleotide
  Antisense strand to SEQ ID NO: 1002550
augagcauacuccauuuca

SEQ ID NO: 1002552 - RNA, 19 nt, Artificial Sequence
  Description of Artificial Sequence: Synthetic oligonucleotide
  Sense strand starting at position 3002 of SEQ ID NO: 914419
aaagacauugcauggucuu

SEQ ID NO: 1002553 - RNA, 19 nt, Artificial Sequence
  Description of Artificial Sequence: Synthetic oligonucleotide
  Antisense strand to SEQ ID NO: 1002552
aagaccaugcaaugucuuu

SEQ ID NO: 1002554 - RNA, 19 nt, Artificial Sequence
  Description of Artificial Sequence: Synthetic oligonucleotide
  Sense strand starting at position 3003 of SEQ ID NO: 914419
aagacauugcauggucuuu

SEQ ID NO: 1002555 - RNA, 19 nt, Artificial Sequence
  Description of Artificial Sequence: Synthetic oligonucleotide
  Antisense strand to SEQ ID NO: 1002554
aaagaccaugcaaugucuu

SEQ ID NO: 1002556 - RNA, 19 nt, Artificial Sequence
  Description of Artificial Sequence: Synthetic oligonucleotide
  Sense strand starting at position 3005 of SEQ ID NO: 914419
gacauugcauggucuuuga

SEQ ID NO: 1002557 - RNA, 19 nt, Artificial Sequence
  Description of Artificial Sequence: Synthetic oligonucleotide
  Antisense strand to SEQ ID NO: 1002556
ucaaagaccaugcaauguc

SEQ ID NO: 1002558 - RNA, 19 nt, Artificial Sequence
  Description of Artificial Sequence: Synthetic oligonucleotide
  Sense strand starting at position 3026 of SEQ ID NO: 914419
gcacucaggugucuuacua

SEQ ID NO: 1002559 - RNA, 19 nt, Artificial Sequence
  Description of Artificial Sequence: Synthetic oligonucleotide
  Antisense strand to SEQ ID NO: 1002558
uaguaagacaccugagugc

SEQ ID NO: 1002560 - RNA, 19 nt, Artificial Sequence
  Description of Artificial Sequence: Synthetic oligonucleotide
  Sense strand starting at position 3104 of SEQ ID NO: 914419
ccuguaguuuacuugauaa

SEQ ID NO: 1002561 - RNA, 19 nt, Artificial Sequence
  Description of Artificial Sequence: Synthetic oligonucleotide
  Antisense strand to SEQ ID NO: 1002560
uuaucaaguaaacuacagg

SEQ ID NO: 1002562 - RNA, 19 nt, Artificial Sequence
  Description of Artificial Sequence: Synthetic oligonucleotide
  Sense strand starting at position 3155 of SEQ ID NO: 914419
ccugcaaugcaucagaaau

SEQ ID NO: 1002563 - RNA, 19 nt, Artificial Sequence
  Description of Artificial Sequence: Synthetic oligonucleotide
  Antisense strand to SEQ ID NO: 1002562
auuucugaugcauugcagg

SEQ ID NO: 1002564 - RNA, 19 nt, Artificial Sequence
  Description of Artificial Sequence: Synthetic oligonucleotide
  Sense strand starting at position 3171 of SEQ ID NO: 914419
aaugacugaugcccaguua

SEQ ID NO: 1002565 - RNA, 19 nt, Artificial Sequence
  Description of Artificial Sequence: Synthetic oligonucleotide
  Antisense strand to SEQ ID NO: 1002564
uaacugggcaucagucauu

SEQ ID NO: 1002566 - RNA, 19 nt, Artificial Sequence
  Description of Artificial Sequence: Synthetic oligonucleotide
  Sense strand starting at position 3172 of SEQ ID NO: 914419
augacugaugcccaguuau

SEQ ID NO: 1002567 - RNA, 19 nt, Artificial Sequence
  Description of Artificial Sequence: Synthetic oligonucleotide
  Antisense strand to SEQ ID NO: 1002566
auaacugggcaucagucau

SEQ ID NO: 1002568 - RNA, 19 nt, Artificial Sequence
  Description of Artificial Sequence: Synthetic oligonucleotide
  Sense strand starting at position 3200 of SEQ ID NO: 914419
uuugcuguauuuguaaaga

SEQ ID NO: 1002569 - RNA, 19 nt, Artificial Sequence
  Description of Artificial Sequence: Synthetic oligonucleotide
  Antisense strand to SEQ ID NO: 1002568
ucuuuacaaauacagcaaa

SEQ ID NO: 1002570 - RNA, 19 nt, Artificial Sequence
  Description of Artificial Sequence: Synthetic oligonucleotide
  Sense strand starting at position 3223 of SEQ ID NO: 914419
gggucugauauguggagga

SEQ ID NO: 1002571 - RNA, 19 nt, Artificial Sequence
  Description of Artificial Sequence: Synthetic oligonucleotide
  Antisense strand to SEQ ID NO: 1002570
uccuccacauaucagaccc

SEQ ID NO: 1002572 - RNA, 19 nt, Artificial Sequence
  Description of Artificial Sequence: Synthetic oligonucleotide
  Sense strand starting at position 3238 of SEQ ID NO: 914419
aggaaaggcugucuguaau

SEQ ID NO: 1002573 - RNA, 19 nt, Artificial Sequence
  Description of Artificial Sequence: Synthetic oligonucleotide
  Antisense strand to SEQ ID NO: 1002572
auuacagacagccuuuccu

SEQ ID NO: 1002574 - RNA, 19 nt, Artificial Sequence
  Description of Artificial Sequence: Synthetic oligonucleotide
  Sense strand starting at position 3288 of SEQ ID NO: 914419
gggucauacaguuacugau

SEQ ID NO: 1002575 - RNA, 19 nt, Artificial Sequence
  Description of Artificial Sequence: Synthetic oligonucleotide
  Antisense strand to SEQ ID NO: 1002574
aucaguaacuguaugaccc

SEQ ID NO: 1002576 - RNA, 19 nt, Artificial Sequence
  Description of Artificial Sequence: Synthetic oligonucleotide
  Sense strand starting at position 3339 of SEQ ID NO: 914419
ucaccuuccugacuggaau

SEQ ID NO: 1002577 - RNA, 19 nt, Artificial Sequence
  Description of Artificial Sequence: Synthetic oligonucleotide
  Antisense strand to SEQ ID NO: 1002576
auuccagucaggaagguga

SEQ ID NO: 1002578 - RNA, 19 nt, Artificial Sequence
  Description of Artificial Sequence: Synthetic oligonucleotide
  Sense strand starting at position 3362 of SEQ ID NO: 914419
gcaccagaugccugcaaua

SEQ ID NO: 1002579 - RNA, 19 nt, Artificial Sequence
  Description of Artificial Sequence: Synthetic oligonucleotide
  Antisense strand to SEQ ID NO: 1002578
uauugcaggcaucuggugc

SEQ ID NO: 1002580 - RNA, 19 nt, Artificial Sequence
  Description of Artificial Sequence: Synthetic oligonucleotide
  Sense strand starting at position 3386 of SEQ ID NO: 914419
cugccacauuuggacaauu

SEQ ID NO: 1002581 - RNA, 19 nt, Artificial Sequence
  Description of Artificial Sequence: Synthetic oligonucleotide
  Antisense strand to SEQ ID NO: 1002580
aauuguccaaauguggcag

SEQ ID NO: 1002582 - RNA, 19 nt, Artificial Sequence
  Description of Artificial Sequence: Synthetic oligonucleotide
  Sense strand starting at position 3614 of SEQ ID NO: 914419
ucaagagacucuuuagcaa

SEQ ID NO: 1002583 - RNA, 19 nt, Artificial Sequence
  Description of Artificial Sequence: Synthetic oligonucleotide
  Antisense strand to SEQ ID NO: 1002582
uugcuaaagagucucuuga

SEQ ID NO: 1002584 - RNA, 19 nt, Artificial Sequence
  Description of Artificial Sequence: Synthetic oligonucleotide
  Sense strand starting at position 239 of SEQ ID NO: 914420
uguagaguuagaggucuua

SEQ ID NO: 1002585 - RNA, 19 nt, Artificial Sequence
  Description of Artificial Sequence: Synthetic oligonucleotide
  Antisense strand to SEQ ID NO: 1002584
uaagaccucuaacucuaca

SEQ ID NO: 1002586 - RNA, 19 nt, Artificial Sequence
  Description of Artificial Sequence: Synthetic oligonucleotide
  Sense strand starting at position 365 of SEQ ID NO: 914420
ugcuauuucuguucuuaga

SEQ ID NO: 1002587 - RNA, 19 nt, Artificial Sequence
  Description of Artificial Sequence: Synthetic oligonucleotide
  Antisense strand to SEQ ID NO: 1002586
ucuaagaacagaaauagca

SEQ ID NO: 1002588 - RNA, 19 nt, Artificial Sequence
  Description of Artificial Sequence: Synthetic oligonucleotide
  Sense strand starting at position 490 of SEQ ID NO: 914420
gauugauaauagccaaugu

SEQ ID NO: 1002589 - RNA, 19 nt, Artificial Sequence
  Description of Artificial Sequence: Synthetic oligonucleotide
  Antisense strand to SEQ ID NO: 1002588
acauuggcuauuaucaauc

SEQ ID NO: 1002590 - RNA, 19 nt, Artificial Sequence
  Description of Artificial Sequence: Synthetic oligonucleotide
  Sense strand starting at position 501 of SEQ ID NO: 914420
gccaauguugaauagaauu

SEQ ID NO: 1002591 - RNA, 19 nt, Artificial Sequence
  Description of Artificial Sequence: Synthetic oligonucleotide
  Antisense strand to SEQ ID NO: 1002590
aauucuauucaacauuggc

SEQ ID NO: 1002592 - RNA, 19 nt, Artificial Sequence
  Description of Artificial Sequence: Synthetic oligonucleotide
  Sense strand starting at position 659 of SEQ ID NO: 914420
cugaaauauuggccuaccu

SEQ ID NO: 1002593 - RNA, 19 nt, Artificial Sequence
  Description of Artificial Sequence: Synthetic oligonucleotide
  Antisense strand to SEQ ID NO: 1002592
agguaggccaauauuucag

SEQ ID NO: 1002594 - RNA, 19 nt, Artificial Sequence
  Description of Artificial Sequence: Synthetic oligonucleotide
  Sense strand starting at position 865 of SEQ ID NO: 914420
auacaugugguguauugga

SEQ ID NO: 1002595 - RNA, 19 nt, Artificial Sequence
  Description of Artificial Sequence: Synthetic oligonucleotide
  Antisense strand to SEQ ID NO: 1002594
uccaauacaccacauguau

SEQ ID NO: 1002596 - RNA, 19 nt, Artificial Sequence
  Description of Artificial Sequence: Synthetic oligonucleotide
  Sense strand starting at position 909 of SEQ ID NO: 914420
acuggagacugaguuaauu

SEQ ID NO: 1002597 - RNA, 19 nt, Artificial Sequence
  Description of Artificial Sequence: Synthetic oligonucleotide
  Antisense strand to SEQ ID NO: 1002596
aauuaacucagucuccagu

SEQ ID NO: 1002598 - RNA, 19 nt, Artificial Sequence
  Description of Artificial Sequence: Synthetic oligonucleotide
  Sense strand starting at position 965 of SEQ ID NO: 914420
augaguaagcucgagucca

SEQ ID NO: 1002599 - RNA, 19 nt, Artificial Sequence
  Description of Artificial Sequence: Synthetic oligonucleotide
  Antisense strand to SEQ ID NO: 1002598
uggacucgagcuuacucau

SEQ ID NO: 1002600 - RNA, 19 nt, Artificial Sequence
  Description of Artificial Sequence: Synthetic oligonucleotide
  Sense strand starting at position 1006 of SEQ ID NO: 914420
gagagcauaucugcaggau

SEQ ID NO: 1002601 - RNA, 19 nt, Artificial Sequence
  Description of Artificial Sequence: Synthetic oligonucleotide
  Antisense strand to SEQ ID NO: 1002600
auccugcagauaugcucuc

SEQ ID NO: 1002602 - RNA, 19 nt, Artificial Sequence
  Description of Artificial Sequence: Synthetic oligonucleotide
  Sense strand starting at position 1071 of SEQ ID NO: 914420
uaggcauuguccucuggau

SEQ ID NO: 1002603 - RNA, 19 nt, Artificial Sequence
  Description of Artificial Sequence: Synthetic oligonucleotide
  Antisense strand to SEQ ID NO: 1002602
auccagaggacaaugccua

SEQ ID NO: 1002604 - RNA, 19 nt, Artificial Sequence
  Description of Artificial Sequence: Synthetic oligonucleotide
  Sense strand starting at position 1073 of SEQ ID NO: 914420
ggcauuguccucuggauaa

SEQ ID NO: 1002605 - RNA, 19 nt, Artificial Sequence
  Description of Artificial Sequence: Synthetic oligonucleotide
  Antisense strand to SEQ ID NO: 1002604
uuauccagaggacaaugcc

SEQ ID NO: 1002606 - RNA, 19 nt, Artificial Sequence
  Description of Artificial Sequence: Synthetic oligonucleotide
  Sense strand starting at position 1136 of SEQ ID NO: 914420
guuauaccacaguguaaag

SEQ ID NO: 1002607 - RNA, 19 nt, Artificial Sequence
  Description of Artificial Sequence: Synthetic oligonucleotide
  Antisense strand to SEQ ID NO: 1002606
cuuuacacugugguauaac

SEQ ID NO: 1002608 - RNA, 19 nt, Artificial Sequence
  Description of Artificial Sequence: Synthetic oligonucleotide
  Sense strand starting at position 1409 of SEQ ID NO: 914420
ggaaguucauugguaaugu

SEQ ID NO: 1002609 - RNA, 19 nt, Artificial Sequence
  Description of Artificial Sequence: Synthetic oligonucleotide
  Antisense strand to SEQ ID NO: 1002608
acauuaccaaugaacuucc

SEQ ID NO: 1002610 - RNA, 19 nt, Artificial Sequence
  Description of Artificial Sequence: Synthetic oligonucleotide
  Sense strand starting at position 1546 of SEQ ID NO: 914420
gccauaauuuaagggaaac

SEQ ID NO: 1002611 - RNA, 19 nt, Artificial Sequence
  Description of Artificial Sequence: Synthetic oligonucleotide
  Antisense strand to SEQ ID NO: 1002610
guuucccuuaaauuauggc

SEQ ID NO: 1002612 - RNA, 19 nt, Artificial Sequence
  Description of Artificial Sequence: Synthetic oligonucleotide
  Sense strand starting at position 1649 of SEQ ID NO: 914420
augcauuuguauguacuua

SEQ ID NO: 1002613 - RNA, 19 nt, Artificial Sequence
  Description of Artificial Sequence: Synthetic oligonucleotide
  Antisense strand to SEQ ID NO: 1002612
uaaguacauacaaaugcau

SEQ ID NO: 1002614 - RNA, 19 nt, Artificial Sequence
  Description of Artificial Sequence: Synthetic oligonucleotide
  Sense strand starting at position 1686 of SEQ ID NO: 914420
auugcaguuucuccuggaa

SEQ ID NO: 1002615 - RNA, 19 nt, Artificial Sequence
  Description of Artificial Sequence: Synthetic oligonucleotide
  Antisense strand to SEQ ID NO: 1002614
uuccaggagaaacugcaau

SEQ ID NO: 1002616 - RNA, 19 nt, Artificial Sequence
  Description of Artificial Sequence: Synthetic oligonucleotide
  Sense strand starting at position 1689 of SEQ ID NO: 914420
gcaguuucuccuggaaagg

SEQ ID NO: 1002617 - RNA, 19 nt, Artificial Sequence
  Description of Artificial Sequence: Synthetic oligonucleotide
  Antisense strand to SEQ ID NO: 1002616
ccuuuccaggagaaacugc

SEQ ID NO: 1002618 - RNA, 19 nt, Artificial Sequence
  Description of Artificial Sequence: Synthetic oligonucleotide
  Sense strand starting at position 1732 of SEQ ID NO: 914420
cggugaggcagauaugacu

SEQ ID NO: 1002619 - RNA, 19 nt, Artificial Sequence
  Description of Artificial Sequence: Synthetic oligonucleotide
  Antisense strand to SEQ ID NO: 1002618
agucauaucugccucaccg

SEQ ID NO: 1002620 - RNA, 19 nt, Artificial Sequence
  Description of Artificial Sequence: Synthetic oligonucleotide
  Sense strand starting at position 1752 of SEQ ID NO: 914420
acaggaggccgcuauucua

SEQ ID NO: 1002621 - RNA, 19 nt, Artificial Sequence
  Description of Artificial Sequence: Synthetic oligonucleotide
  Antisense strand to SEQ ID NO: 1002620
uagaauagcggccuccugu

SEQ ID NO: 1002622 - RNA, 19 nt, Artificial Sequence
  Description of Artificial Sequence: Synthetic oligonucleotide
  Sense strand starting at position 2193 of SEQ ID NO: 914420
aguccaaaucuuggauaug

SEQ ID NO: 1002623 - RNA, 19 nt, Artificial Sequence
  Description of Artificial Sequence: Synthetic oligonucleotide
  Antisense strand to SEQ ID NO: 1002622
cauauccaagauuuggacu

SEQ ID NO: 1002624 - RNA, 19 nt, Artificial Sequence
  Description of Artificial Sequence: Synthetic oligonucleotide
  Sense strand starting at position 2235 of SEQ ID NO: 914420
gguuguguccugucggagu

SEQ ID NO: 1002625 - RNA, 19 nt, Artificial Sequence
  Description of Artificial Sequence: Synthetic oligonucleotide
  Antisense strand to SEQ ID NO: 1002624
acuccgacaggacacaacc

SEQ ID NO: 1002626 - RNA, 19 nt, Artificial Sequence
  Description of Artificial Sequence: Synthetic oligonucleotide
  Sense strand starting at position 2239 of SEQ ID NO: 914420
guguccugucggagucagu

SEQ ID NO: 1002627 - RNA, 19 nt, Artificial Sequence
  Description of Artificial Sequence: Synthetic oligonucleotide
  Antisense strand to SEQ ID NO: 1002626
acugacuccgacaggacac

SEQ ID NO: 1002628 - RNA, 19 nt, Artificial Sequence
  Description of Artificial Sequence: Synthetic oligonucleotide
  Sense strand starting at position 2502 of SEQ ID NO: 914420
uguacaguuucugugauuu

SEQ ID NO: 1002629 - RNA, 19 nt, Artificial Sequence
  Description of Artificial Sequence: Synthetic oligonucleotide
  Antisense strand to SEQ ID NO: 1002628
aaaucacagaaacuguaca

SEQ ID NO: 1002630 - RNA, 19 nt, Artificial Sequence
  Description of Artificial Sequence: Synthetic oligonucleotide
  Sense strand starting at position 2642 of SEQ ID NO: 914420
agggauacaucuuaaugag

SEQ ID NO: 1002631 - RNA, 19 nt, Artificial Sequence
  Description of Artificial Sequence: Synthetic oligonucleotide
  Antisense strand to SEQ ID NO: 1002630
cucauuaagauguaucccu

SEQ ID NO: 1002632 - RNA, 19 nt, Artificial Sequence
  Description of Artificial Sequence: Synthetic oligonucleotide
  Sense strand starting at position 2649 of SEQ ID NO: 914420
caucuuaaugagugaacag

SEQ ID NO: 1002633 - RNA, 19 nt, Artificial Sequence
  Description of Artificial Sequence: Synthetic oligonucleotide
  Antisense strand to SEQ ID NO: 1002632
cuguucacucauuaagaug

SEQ ID NO: 1002634 - RNA, 19 nt, Artificial Sequence
  Description of Artificial Sequence: Synthetic oligonucleotide
  Sense strand starting at position 2768 of SEQ ID NO: 914420
uuugucauggcaggaacaa

SEQ ID NO: 1002635 - RNA, 19 nt, Artificial Sequence
  Description of Artificial Sequence: Synthetic oligonucleotide
  Antisense strand to SEQ ID NO: 1002634
uuguuccugccaugacaaa

SEQ ID NO: 1002636 - RNA, 19 nt, Artificial Sequence
  Description of Artificial Sequence: Synthetic oligonucleotide
  Sense strand starting at position 2907 of SEQ ID NO: 914420
ggcacuuuauucuuucgaa

SEQ ID NO: 1002637 - RNA, 19 nt, Artificial Sequence
  Description of Artificial Sequence: Synthetic oligonucleotide
  Antisense strand to SEQ ID NO: 1002636
uucgaaagaauaaagugcc

SEQ ID NO: 1002638 - RNA, 19 nt, Artificial Sequence
  Description of Artificial Sequence: Synthetic oligonucleotide
  Sense strand starting at position 2908 of SEQ ID NO: 914420
gcacuuuauucuuucgaaa

SEQ ID NO: 1002639 - RNA, 19 nt, Artificial Sequence
  Description of Artificial Sequence: Synthetic oligonucleotide
  Antisense strand to SEQ ID NO: 1002638
uuucgaaagaauaaagugc

SEQ ID NO: 1002640 - RNA, 19 nt, Artificial Sequence
  Description of Artificial Sequence: Synthetic oligonucleotide
  Sense strand starting at position 3007 of SEQ ID NO: 914420
auacaucagucagcuaaga

SEQ ID NO: 1002641 - RNA, 19 nt, Artificial Sequence
  Description of Artificial Sequence: Synthetic oligonucleotide
  Antisense strand to SEQ ID NO: 1002640
ucuuagcugacugauguau

SEQ ID NO: 1002642 - RNA, 19 nt, Artificial Sequence
  Description of Artificial Sequence: Synthetic oligonucleotide
  Sense strand starting at position 3059 of SEQ ID NO: 914420
ugguuaagagccugaagga

SEQ ID NO: 1002643 - RNA, 19 nt, Artificial Sequence
  Description of Artificial Sequence: Synthetic oligonucleotide
  Antisense strand to SEQ ID NO: 1002642
uccuucaggcucuuaacca

SEQ ID NO: 1002644 - RNA, 19 nt, Artificial Sequence
  Description of Artificial Sequence: Synthetic oligonucleotide
  Sense strand starting at position 3134 of SEQ ID NO: 914420
aacuuaguagcugaaaugu

SEQ ID NO: 1002645 - RNA, 19 nt, Artificial Sequence
  Description of Artificial Sequence: Synthetic oligonucleotide
  Antisense strand to SEQ ID NO: 1002644
acauuucagcuacuaaguu

SEQ ID NO: 1002646 - RNA, 19 nt, Artificial Sequence
  Description of Artificial Sequence: Synthetic oligonucleotide
  Sense strand starting at position 3400 of SEQ ID NO: 914420
ggcaauucauugguugagu

SEQ ID NO: 1002647 - RNA, 19 nt, Artificial Sequence
  Description of Artificial Sequence: Synthetic oligonucleotide
  Antisense strand to SEQ ID NO: 1002646
acucaaccaaugaauugcc

SEQ ID NO: 1002648 - RNA, 19 nt, Artificial Sequence
  Description of Artificial Sequence: Synthetic oligonucleotide
  Sense strand starting at position 3414 of SEQ ID NO: 914420
ugaguuggagcucaacuga

SEQ ID NO: 1002649 - RNA, 19 nt, Artificial Sequence
  Description of Artificial Sequence: Synthetic oligonucleotide
  Antisense strand to SEQ ID NO: 1002648
ucaguugagcuccaacuca

SEQ ID NO: 1002650 - RNA, 19 nt, Artificial Sequence
  Description of Artificial Sequence: Synthetic oligonucleotide
  Sense strand starting at position 3438 of SEQ ID NO: 914420
uagcuuggugaauacucua

SEQ ID NO: 1002651 - RNA, 19 nt, Artificial Sequence
  Description of Artificial Sequence: Synthetic oligonucleotide
  Antisense strand to SEQ ID NO: 1002650
uagaguauucaccaagcua

SEQ ID NO: 1002652 - RNA, 19 nt, Artificial Sequence
  Description of Artificial Sequence: Synthetic oligonucleotide
  Sense strand starting at position 3441 of SEQ ID NO: 914420
cuuggugaauacucuacua

SEQ ID NO: 1002653 - RNA, 19 nt, Artificial Sequence
  Description of Artificial Sequence: Synthetic oligonucleotide
  Antisense strand to SEQ ID NO: 1002652
uaguagaguauucaccaag

SEQ ID NO: 1002654 - RNA, 19 nt, Artificial Sequence
  Description of Artificial Sequence: Synthetic oligonucleotide
  Sense strand starting at position 3454 of SEQ ID NO: 914420
cuacuagacgauggcaaau

SEQ ID NO: 1002655 - RNA, 19 nt, Artificial Sequence
  Description of Artificial Sequence: Synthetic oligonucleotide
  Antisense strand to SEQ ID NO: 1002654
auuugccaucgucuaguag

SEQ ID NO: 1002656 - RNA, 19 nt, Artificial Sequence
  Description of Artificial Sequence: Synthetic oligonucleotide
  Sense strand starting at position 3588 of SEQ ID NO: 914420
gagcuaacaguuuaacugu

SEQ ID NO: 1002657 - RNA, 19 nt, Artificial Sequence
  Description of Artificial Sequence: Synthetic oligonucleotide
  Antisense strand to SEQ ID NO: 1002656
acaguuaaacuguuagcuc

SEQ ID NO: 1002658 - RNA, 19 nt, Artificial Sequence
  Description of Artificial Sequence: Synthetic oligonucleotide
  Sense strand starting at position 3597 of SEQ ID NO: 914420
guuuaacuguaucuggaga

SEQ ID NO: 1002659 - RNA, 19 nt, Artificial Sequence
  Description of Artificial Sequence: Synthetic oligonucleotide
  Antisense strand to SEQ ID NO: 1002658
ucuccagauacaguuaaac

SEQ ID NO: 1002660 - RNA, 19 nt, Artificial Sequence
  Description of Artificial Sequence: Synthetic oligonucleotide
  Sense strand starting at position 3692 of SEQ ID NO: 914420
ucaggcaucuucucucgaa

SEQ ID NO: 1002661 - RNA, 19 nt, Artificial Sequence
  Description of Artificial Sequence: Synthetic oligonucleotide
  Antisense strand to SEQ ID NO: 1002660
uucgagagaagaugccuga

SEQ ID NO: 1002662 - RNA, 19 nt, Artificial Sequence
  Description of Artificial Sequence: Synthetic oligonucleotide
  Sense strand starting at position 3693 of SEQ ID NO: 914420
caggcaucuucucucgaag

SEQ ID NO: 1002663 - RNA, 19 nt, Artificial Sequence
  Description of Artificial Sequence: Synthetic oligonucleotide
  Antisense strand to SEQ ID NO: 1002662
cuucgagagaagaugccug

SEQ ID NO: 1002664 - RNA, 19 nt, Artificial Sequence
  Description of Artificial Sequence: Synthetic oligonucleotide
  Sense strand starting at position 4 of SEQ ID NO: 914421
uugcuaaguccuggauuuc

SEQ ID NO: 1002665 - RNA, 19 nt, Artificial Sequence
  Description of Artificial Sequence: Synthetic oligonucleotide
  Antisense strand to SEQ ID NO: 1002664
gaaauccaggacuuagcaa

SEQ ID NO: 1002666 - RNA, 19 nt, Artificial Sequence
  Description of Artificial Sequence: Synthetic oligonucleotide
  Sense strand starting at position 247 of SEQ ID NO: 914421
ucaggcugguccucaauga

SEQ ID NO: 1002667 - RNA, 19 nt, Artificial Sequence
  Description of Artificial Sequence: Synthetic oligonucleotide
  Antisense strand to SEQ ID NO: 1002666
ucauugaggaccagccuga

SEQ ID NO: 1002668 - RNA, 19 nt, Artificial Sequence
  Description of Artificial Sequence: Synthetic oligonucleotide
  Sense strand starting at position 248 of SEQ ID NO: 914421
caggcugguccucaaugau

SEQ ID NO: 1002669 - RNA, 19 nt, Artificial Sequence
  Description of Artificial Sequence: Synthetic oligonucleotide
  Antisense strand to SEQ ID NO: 1002668
aucauugaggaccagccug

SEQ ID NO: 1002670 - RNA, 19 nt, Artificial Sequence
  Description of Artificial Sequence: Synthetic oligonucleotide
  Sense strand starting at position 376 of SEQ ID NO: 914421
uauguauucgguuaagauu

SEQ ID NO: 1002671 - RNA, 19 nt, Artificial Sequence
  Description of Artificial Sequence: Synthetic oligonucleotide
  Antisense strand to SEQ ID NO: 1002670
aaucuuaaccgaauacaua

SEQ ID NO: 1002672 - RNA, 19 nt, Artificial Sequence
  Description of Artificial Sequence: Synthetic oligonucleotide
  Sense strand starting at position 473 of SEQ ID NO: 914421
gggacugucuuccuuccau

SEQ ID NO: 1002673 - RNA, 19 nt, Artificial Sequence
  Description of Artificial Sequence: Synthetic oligonucleotide
  Antisense strand to SEQ ID NO: 1002672
auggaaggaagacaguccc

SEQ ID NO: 1002674 - RNA, 19 nt, Artificial Sequence
  Description of Artificial Sequence: Synthetic oligonucleotide
  Sense strand starting at position 485 of SEQ ID NO: 914421
cuuccauggcuaugagaaa

SEQ ID NO: 1002675 - RNA, 19 nt, Artificial Sequence
  Description of Artificial Sequence: Synthetic oligonucleotide
  Antisense strand to SEQ ID NO: 1002674
uuucucauagccauggaag

SEQ ID NO: 1002676 - RNA, 19 nt, Artificial Sequence
  Description of Artificial Sequence: Synthetic oligonucleotide
  Sense strand starting at position 510 of SEQ ID NO: 914421
auuacagugugucugauga

SEQ ID NO: 1002677 - RNA, 19 nt, Artificial Sequence
  Description of Artificial Sequence: Synthetic oligonucleotide
  Antisense strand to SEQ ID NO: 1002676
ucaucagacacacuguaau

SEQ ID NO: 1002678 - RNA, 19 nt, Artificial Sequence
  Description of Artificial Sequence: Synthetic oligonucleotide
  Sense strand starting at position 623 of SEQ ID NO: 914421
uauauacgauaguuggaau

SEQ ID NO: 1002679 - RNA, 19 nt, Artificial Sequence
  Description of Artificial Sequence: Synthetic oligonucleotide
  Antisense strand to SEQ ID NO: 1002678
auuccaacuaucguauaua

SEQ ID NO: 1002680 - RNA, 19 nt, Artificial Sequence
  Description of Artificial Sequence: Synthetic oligonucleotide
  Sense strand starting at position 864 of SEQ ID NO: 914421
gguccagagcccuaagacu

SEQ ID NO: 1002681 - RNA, 19 nt, Artificial Sequence
  Description of Artificial Sequence: Synthetic oligonucleotide
  Antisense strand to SEQ ID NO: 1002680
agucuuagggcucuggacc

SEQ ID NO: 1002682 - RNA, 19 nt, Artificial Sequence
  Description of Artificial Sequence: Synthetic oligonucleotide
  Sense strand starting at position 1102 of SEQ ID NO: 914421
cgguuuaggaccgaacauu

SEQ ID NO: 1002683 - RNA, 19 nt, Artificial Sequence
  Description of Artificial Sequence: Synthetic oligonucleotide
  Antisense strand to SEQ ID NO: 1002682
aauguucgguccuaaaccg

SEQ ID NO: 1002684 - RNA, 19 nt, Artificial Sequence
  Description of Artificial Sequence: Synthetic oligonucleotide
  Sense strand starting at position 1145 of SEQ ID NO: 914421
gguggagcuccagaguaca

SEQ ID NO: 1002685 - RNA, 19 nt, Artificial Sequence
  Description of Artificial Sequence: Synthetic oligonucleotide
  Antisense strand to SEQ ID NO: 1002684
uguacucuggagcuccacc

SEQ ID NO: 1002686 - RNA, 19 nt, Artificial Sequence
  Description of Artificial Sequence: Synthetic oligonucleotide
  Sense strand starting at position 1174 of SEQ ID NO: 914421
augacugugcaggaggauu

SEQ ID NO: 1002687 - RNA, 19 nt, Artificial Sequence
  Description of Artificial Sequence: Synthetic oligonucleotide
  Antisense strand to SEQ ID NO: 1002686
aauccuccugcacagucau

SEQ ID NO: 1002688 - RNA, 19 nt, Artificial Sequence
  Description of Artificial Sequence: Synthetic oligonucleotide
  Sense strand starting at position 1176 of SEQ ID NO: 914421
gacugugcaggaggauuaa

SEQ ID NO: 1002689 - RNA, 19 nt, Artificial Sequence
  Description of Artificial Sequence: Synthetic oligonucleotide
  Antisense strand to SEQ ID NO: 1002688
uuaauccuccugcacaguc

SEQ ID NO: 1002690 - RNA, 19 nt, Artificial Sequence
  Description of Artificial Sequence: Synthetic oligonucleotide
  Sense strand starting at position 1335 of SEQ ID NO: 914421
gucgguuaaguccaggaua

SEQ ID NO: 1002691 - RNA, 19 nt, Artificial Sequence
  Description of Artificial Sequence: Synthetic oligonucleotide
  Antisense strand to SEQ ID NO: 1002690
uauccuggacuuaaccgac

SEQ ID NO: 1002692 - RNA, 19 nt, Artificial Sequence
  Description of Artificial Sequence: Synthetic oligonucleotide
  Sense strand starting at position 1337 of SEQ ID NO: 914421
cgguuaaguccaggauaag

SEQ ID NO: 1002693 - RNA, 19 nt, Artificial Sequence
  Description of Artificial Sequence: Synthetic oligonucleotide
  Antisense strand to SEQ ID NO: 1002692
cuuauccuggacuuaaccg

SEQ ID NO: 1002694 - RNA, 19 nt, Artificial Sequence
  Description of Artificial Sequence: Synthetic oligonucleotide
  Sense strand starting at position 1862 of SEQ ID NO: 914421
cgaagagcuucuuccagau

SEQ ID NO: 1002695 - RNA, 19 nt, Artificial Sequence
  Description of Artificial Sequence: Synthetic oligonucleotide
  Antisense strand to SEQ ID NO: 1002694
aucuggaagaagcucuucg

SEQ ID NO: 1002696 - RNA, 19 nt, Artificial Sequence
  Description of Artificial Sequence: Synthetic oligonucleotide
  Sense strand starting at position 1866 of SEQ ID NO: 914421
gagcuucuuccagauguug

SEQ ID NO: 1002697 - RNA, 19 nt, Artificial Sequence
  Description of Artificial Sequence: Synthetic oligonucleotide
  Antisense strand to SEQ ID NO: 1002696
caacaucuggaagaagcuc

SEQ ID NO: 1002698 - RNA, 19 nt, Artificial Sequence
  Description of Artificial Sequence: Synthetic oligonucleotide
  Sense strand starting at position 2304 of SEQ ID NO: 914421
cuggcuuccguugucauau

SEQ ID NO: 1002699 - RNA, 19 nt, Artificial Sequence
  Description of Artificial Sequence: Synthetic oligonucleotide
  Antisense strand to SEQ ID NO: 1002698
auaugacaacggaagccag

SEQ ID NO: 1002700 - RNA, 19 nt, Artificial Sequence
  Description of Artificial Sequence: Synthetic oligonucleotide
  Sense strand starting at position 2392 of SEQ ID NO: 914421
cucuuucucccaugaggga

SEQ ID NO: 1002701 - RNA, 19 nt, Artificial Sequence
  Description of Artificial Sequence: Synthetic oligonucleotide
  Antisense strand to SEQ ID NO: 1002700
ucccucaugggagaaagag

SEQ ID NO: 1002702 - RNA, 19 nt, Artificial Sequence
  Description of Artificial Sequence: Synthetic oligonucleotide
  Sense strand starting at position 2568 of SEQ ID NO: 914421
ggcuguuagagccaaccua

SEQ ID NO: 1002703 - RNA, 19 nt, Artificial Sequence
  Description of Artificial Sequence: Synthetic oligonucleotide
  Antisense strand to SEQ ID NO: 1002702
uagguuggcucuaacagcc

SEQ ID NO: 1002704 - RNA, 19 nt, Artificial Sequence
  Description of Artificial Sequence: Synthetic oligonucleotide
  Sense strand starting at position 2604 of SEQ ID NO: 914421
agcaguguugaggaagauu

SEQ ID NO: 1002705 - RNA, 19 nt, Artificial Sequence
  Description of Artificial Sequence: Synthetic oligonucleotide
  Antisense strand to SEQ ID NO: 1002704
aaucuuccucaacacugcu

SEQ ID NO: 1002706 - RNA, 19 nt, Artificial Sequence
  Description of Artificial Sequence: Synthetic oligonucleotide
  Sense strand starting at position 2644 of SEQ ID NO: 914421
ugguuuguaauagaccuga

SEQ ID NO: 1002707 - RNA, 19 nt, Artificial Sequence
  Description of Artificial Sequence: Synthetic oligonucleotide
  Antisense strand to SEQ ID NO: 1002706
ucaggucuauuacaaacca

SEQ ID NO: 1002708 - RNA, 19 nt, Artificial Sequence
  Description of Artificial Sequence: Synthetic oligonucleotide
  Sense strand starting at position 2706 of SEQ ID NO: 914421
cagauaucaccaggagcua

SEQ ID NO: 1002709 - RNA, 19 nt, Artificial Sequence
  Description of Artificial Sequence: Synthetic oligonucleotide
  Antisense strand to SEQ ID NO: 1002708
uagcuccuggugauaucug

SEQ ID NO: 1002710 - RNA, 19 nt, Artificial Sequence
  Description of Artificial Sequence: Synthetic oligonucleotide
  Sense strand starting at position 2785 of SEQ ID NO: 914421
cauugcuuaugagcgauuu

SEQ ID NO: 1002711 - RNA, 19 nt, Artificial Sequence
  Description of Artificial Sequence: Synthetic oligonucleotide
  Antisense strand to SEQ ID NO: 1002710
aaaucgcucauaagcaaug

SEQ ID NO: 1002712 - RNA, 19 nt, Artificial Sequence
  Description of Artificial Sequence: Synthetic oligonucleotide
  Sense strand starting at position 2838 of SEQ ID NO: 914421
augugaguaaccuguauua

SEQ ID NO: 1002713 - RNA, 19 nt, Artificial Sequence
  Description of Artificial Sequence: Synthetic oligonucleotide
  Antisense strand to SEQ ID NO: 1002712
uaauacagguuacucacau

SEQ ID NO: 1002714 - RNA, 19 nt, Artificial Sequence
  Description of Artificial Sequence: Synthetic oligonucleotide
  Sense strand starting at position 2849 of SEQ ID NO: 914421
cuguauuagccauagacug

SEQ ID NO: 1002715 - RNA, 19 nt, Artificial Sequence
  Description of Artificial Sequence: Synthetic oligonucleotide
  Antisense strand to SEQ ID NO: 1002714
cagucuauggcuaauacag

SEQ ID NO: 1002716 - RNA, 19 nt, Artificial Sequence
  Description of Artificial Sequence: Synthetic oligonucleotide
  Sense strand starting at position 2894 of SEQ ID NO: 914421
gagagccucugccuaauga

SEQ ID NO: 1002717 - RNA, 19 nt, Artificial Sequence
  Description of Artificial Sequence: Synthetic oligonucleotide
  Antisense strand to SEQ ID NO: 1002716
ucauuaggcagaggcucuc

SEQ ID NO: 1002718 - RNA, 19 nt, Artificial Sequence
  Description of Artificial Sequence: Synthetic oligonucleotide
  Sense strand starting at position 2895 of SEQ ID NO: 914421
agagccucugccuaaugau

SEQ ID NO: 1002719 - RNA, 19 nt, Artificial Sequence
  Description of Artificial Sequence: Synthetic oligonucleotide
  Antisense strand to SEQ ID NO: 1002718
aucauuaggcagaggcucu

SEQ ID NO: 1002720 - RNA, 19 nt, Artificial Sequence
  Description of Artificial Sequence: Synthetic oligonucleotide
  Sense strand starting at position 2904 of SEQ ID NO: 914421
gccuaaugaucacugguau

SEQ ID NO: 1002721 - RNA, 19 nt, Artificial Sequence
  Description of Artificial Sequence: Synthetic oligonucleotide
  Antisense strand to SEQ ID NO: 1002720
auaccagugaucauuaggc

SEQ ID NO: 1002722 - RNA, 19 nt, Artificial Sequence
  Description of Artificial Sequence: Synthetic oligonucleotide
  Sense strand starting at position 2905 of SEQ ID NO: 914421
ccuaaugaucacugguaug

SEQ ID NO: 1002723 - RNA, 19 nt, Artificial Sequence
  Description of Artificial Sequence: Synthetic oligonucleotide
  Antisense strand to SEQ ID NO: 1002722
cauaccagugaucauuagg

SEQ ID NO: 1002724 - RNA, 19 nt, Artificial Sequence
  Description of Artificial Sequence: Synthetic oligonucleotide
  Sense strand starting at position 2945 of SEQ ID NO: 914421
guuaaagagucaguaucag

SEQ ID NO: 1002725 - RNA, 19 nt, Artificial Sequence
  Description of Artificial Sequence: Synthetic oligonucleotide
  Antisense strand to SEQ ID NO: 1002724
cugauacugacucuuuaac

SEQ ID NO: 1002726 - RNA, 19 nt, Artificial Sequence
  Description of Artificial Sequence: Synthetic oligonucleotide
  Sense strand starting at position 3087 of SEQ ID NO: 914421
ggacaaguugcuugacuuu

SEQ ID NO: 1002727 - RNA, 19 nt, Artificial Sequence
  Description of Artificial Sequence: Synthetic oligonucleotide
  Antisense strand to SEQ ID NO: 1002726
aaagucaagcaacuugucc

SEQ ID NO: 1002728 - RNA, 19 nt, Artificial Sequence
  Description of Artificial Sequence: Synthetic oligonucleotide
  Sense strand starting at position 3205 of SEQ ID NO: 914421
cuuggacacuuuguccaaa

SEQ ID NO: 1002729 - RNA, 19 nt, Artificial Sequence
  Description of Artificial Sequence: Synthetic oligonucleotide
  Antisense strand to SEQ ID NO: 1002728
uuuggacaaaguguccaag

SEQ ID NO: 1002730 - RNA, 19 nt, Artificial Sequence
  Description of Artificial Sequence: Synthetic oligonucleotide
  Sense strand starting at position 3207 of SEQ ID NO: 914421
uggacacuuuguccaaaca

SEQ ID NO: 1002731 - RNA, 19 nt, Artificial Sequence
  Description of Artificial Sequence: Synthetic oligonucleotide
  Antisense strand to SEQ ID NO: 1002730
uguuuggacaaagugucca

SEQ ID NO: 1002732 - RNA, 19 nt, Artificial Sequence
  Description of Artificial Sequence: Synthetic oligonucleotide
  Sense strand starting at position 3314 of SEQ ID NO: 914421
cgcaguauuugcucucuga

SEQ ID NO: 1002733 - RNA, 19 nt, Artificial Sequence
  Description of Artificial Sequence: Synthetic oligonucleotide
  Antisense strand to SEQ ID NO: 1002732
ucagagagcaaauacugcg

SEQ ID NO: 1002734 - RNA, 19 nt, Artificial Sequence
  Description of Artificial Sequence: Synthetic oligonucleotide
  Sense strand starting at position 3317 of SEQ ID NO: 914421
aguauuugcucucugacuu

SEQ ID NO: 1002735 - RNA, 19 nt, Artificial Sequence
  Description of Artificial Sequence: Synthetic oligonucleotide
  Antisense strand to SEQ ID NO: 1002734
aagucagagagcaaauacu

SEQ ID NO: 1002736 - RNA, 19 nt, Artificial Sequence
  Description of Artificial Sequence: Synthetic oligonucleotide
  Sense strand starting at position 3318 of SEQ ID NO: 914421
guauuugcucucugacuuu

SEQ ID NO: 1002737 - RNA, 19 nt, Artificial Sequence
  Description of Artificial Sequence: Synthetic oligonucleotide
  Antisense strand to SEQ ID NO: 1002736
aaagucagagagcaaauac

SEQ ID NO: 1002738 - RNA, 19 nt, Artificial Sequence
  Description of Artificial Sequence: Synthetic oligonucleotide
  Sense strand starting at position 3485 of SEQ ID NO: 914421
gugggaucucuugaggcca

SEQ ID NO: 1002739 - RNA, 19 nt, Artificial Sequence
  Description of Artificial Sequence: Synthetic oligonucleotide
  Antisense strand to SEQ ID NO: 1002738
uggccucaagagaucccac

SEQ ID NO: 1002740 - RNA, 19 nt, Artificial Sequence
  Description of Artificial Sequence: Synthetic oligonucleotide
  Sense strand starting at position 3921 of SEQ ID NO: 914421
cauguaccugcguaauaaa

SEQ ID NO: 1002741 - RNA, 19 nt, Artificial Sequence
  Description of Artificial Sequence: Synthetic oligonucleotide
  Antisense strand to SEQ ID NO: 1002740
uuuauuacgcagguacaug

SEQ ID NO: 1002742 - RNA, 19 nt, Artificial Sequence
  Description of Artificial Sequence: Synthetic oligonucleotide
  Sense strand starting at position 3932 of SEQ ID NO: 914421
guaauaaacuuugucuucu

SEQ ID NO: 1002743 - RNA, 19 nt, Artificial Sequence
  Description of Artificial Sequence: Synthetic oligonucleotide
  Antisense strand to SEQ ID NO: 1002742
agaagacaaaguuuauuac

SEQ ID NO: 1002744 - RNA, 19 nt, Artificial Sequence
  Description of Artificial Sequence: Synthetic oligonucleotide
  Sense strand starting at position 68 of SEQ ID NO: 914422
cgcagcucuggagaacuau

SEQ ID NO: 1002745 - RNA, 19 nt, Artificial Sequence
  Description of Artificial Sequence: Synthetic oligonucleotide
  Antisense strand to SEQ ID NO: 1002744
auaguucuccagagcugcg

SEQ ID NO: 1002746 - RNA, 19 nt, Artificial Sequence
  Description of Artificial Sequence: Synthetic oligonucleotide
  Sense strand starting at position 187 of SEQ ID NO: 914422
cugacaucuuacugggaaa

SEQ ID NO: 1002747 - RNA, 19 nt, Artificial Sequence
  Description of Artificial Sequence: Synthetic oligonucleotide
  Antisense strand to SEQ ID NO: 1002746
uuucccaguaagaugucag

SEQ ID NO: 1002748 - RNA, 19 nt, Artificial Sequence
  Description of Artificial Sequence: Synthetic oligonucleotide
  Sense strand starting at position 209 of SEQ ID NO: 914422
gauggcaauucuguagaga

SEQ ID NO: 1002749 - RNA, 19 nt, Artificial Sequence
  Description of Artificial Sequence: Synthetic oligonucleotide
  Antisense strand to SEQ ID NO: 1002748
ucucuacagaauugccauc

SEQ ID NO: 1002750 - RNA, 19 nt, Artificial Sequence
  Description of Artificial Sequence: Synthetic oligonucleotide
  Sense strand starting at position 357 of SEQ ID NO: 914422
uggcuucuaggagagcauu

SEQ ID NO: 1002751 - RNA, 19 nt, Artificial Sequence
  Description of Artificial Sequence: Synthetic oligonucleotide
  Antisense strand to SEQ ID NO: 1002750
aaugcucuccuagaagcca

SEQ ID NO: 1002752 - RNA, 19 nt, Artificial Sequence
  Description of Artificial Sequence: Synthetic oligonucleotide
  Sense strand starting at position 1167 of SEQ ID NO: 914422
gccauuuccugucuggacu

SEQ ID NO: 1002753 - RNA, 19 nt, Artificial Sequence
  Description of Artificial Sequence: Synthetic oligonucleotide
  Antisense strand to SEQ ID NO: 1002752
aguccagacaggaaauggc

SEQ ID NO: 1002754 - RNA, 19 nt, Artificial Sequence
  Description of Artificial Sequence: Synthetic oligonucleotide
  Sense strand starting at position 1284 of SEQ ID NO: 914422
gggucauaggugugcauca

SEQ ID NO: 1002755 - RNA, 19 nt, Artificial Sequence
  Description of Artificial Sequence: Synthetic oligonucleotide
  Antisense strand to SEQ ID NO: 1002754
ugaugcacaccuaugaccc

SEQ ID NO: 1002756 - RNA, 19 nt, Artificial Sequence
  Description of Artificial Sequence: Synthetic oligonucleotide
  Sense strand starting at position 1285 of SEQ ID NO: 914422
ggucauaggugugcaucau

SEQ ID NO: 1002757 - RNA, 19 nt, Artificial Sequence
  Description of Artificial Sequence: Synthetic oligonucleotide
  Antisense strand to SEQ ID NO: 1002756
augaugcacaccuaugacc

SEQ ID NO: 1002758 - RNA, 19 nt, Artificial Sequence
  Description of Artificial Sequence: Synthetic oligonucleotide
  Sense strand starting at position 1286 of SEQ ID NO: 914422
gucauaggugugcaucaua

SEQ ID NO: 1002759 - RNA, 19 nt, Artificial Sequence
  Description of Artificial Sequence: Synthetic oligonucleotide
  Antisense strand to SEQ ID NO: 1002758
uaugaugcacaccuaugac

SEQ ID NO: 1002760 - RNA, 19 nt, Artificial Sequence
  Description of Artificial Sequence: Synthetic oligonucleotide
  Sense strand starting at position 1289 of SEQ ID NO: 914422
auaggugugcaucauagua

SEQ ID NO: 1002761 - RNA, 19 nt, Artificial Sequence
  Description of Artificial Sequence: Synthetic oligonucleotide
  Antisense strand to SEQ ID NO: 1002760
uacuaugaugcacaccuau

SEQ ID NO: 1002762 - RNA, 19 nt, Artificial Sequence
  Description of Artificial Sequence: Synthetic oligonucleotide
  Sense strand starting at position 1291 of SEQ ID NO: 914422
aggugugcaucauaguaau

SEQ ID NO: 1002763 - RNA, 19 nt, Artificial Sequence
  Description of Artificial Sequence: Synthetic oligonucleotide
  Antisense strand to SEQ ID NO: 1002762
auuacuaugaugcacaccu

SEQ ID NO: 1002764 - RNA, 19 nt, Artificial Sequence
  Description of Artificial Sequence: Synthetic oligonucleotide
  Sense strand starting at position 1294 of SEQ ID NO: 914422
ugugcaucauaguaauacu

SEQ ID NO: 1002765 - RNA, 19 nt, Artificial Sequence
  Description of Artificial Sequence: Synthetic oligonucleotide
  Antisense strand to SEQ ID NO: 1002764
aguauuacuaugaugcaca

SEQ ID NO: 1002766 - RNA, 19 nt, Artificial Sequence
  Description of Artificial Sequence: Synthetic oligonucleotide
  Sense strand starting at position 1303 of SEQ ID NO: 914422
uaguaauacucggcaaggu

SEQ ID NO: 1002767 - RNA, 19 nt, Artificial Sequence
  Description of Artificial Sequence: Synthetic oligonucleotide
  Antisense strand to SEQ ID NO: 1002766
accuugccgaguauuacua

SEQ ID NO: 1002768 - RNA, 19 nt, Artificial Sequence
  Description of Artificial Sequence: Synthetic oligonucleotide
  Sense strand starting at position 1443 of SEQ ID NO: 914422
gcagcuggcucugauggaa

SEQ ID NO: 1002769 - RNA, 19 nt, Artificial Sequence
  Description of Artificial Sequence: Synthetic oligonucleotide
  Antisense strand to SEQ ID NO: 1002768
uuccaucagagccagcugc

SEQ ID NO: 1002770 - RNA, 19 nt, Artificial Sequence
  Description of Artificial Sequence: Synthetic oligonucleotide
  Sense strand starting at position 1483 of SEQ ID NO: 914422
ugugguuugggaugacaag

SEQ ID NO: 1002771 - RNA, 19 nt, Artificial Sequence
  Description of Artificial Sequence: Synthetic oligonucleotide
  Antisense strand to SEQ ID NO: 1002770
cuugucaucccaaaccaca

SEQ ID NO: 1002772 - RNA, 19 nt, Artificial Sequence
  Description of Artificial Sequence: Synthetic oligonucleotide
  Sense strand starting at position 1601 of SEQ ID NO: 914422
gaaaguggcugcgagaguu

SEQ ID NO: 1002773 - RNA, 19 nt, Artificial Sequence
  Description of Artificial Sequence: Synthetic oligonucleotide
  Antisense strand to SEQ ID NO: 1002772
aacucucgcagccacuuuc

SEQ ID NO: 1002774 - RNA, 19 nt, Artificial Sequence
  Description of Artificial Sequence: Synthetic oligonucleotide
  Sense strand starting at position 1652 of SEQ ID NO: 914422
cgcugagaccugugggaga

SEQ ID NO: 1002775 - RNA, 19 nt, Artificial Sequence
  Description of Artificial Sequence: Synthetic oligonucleotide
  Antisense strand to SEQ ID NO: 1002774
ucucccacaggucucagcg

SEQ ID NO: 1002776 - RNA, 19 nt, Artificial Sequence
  Description of Artificial Sequence: Synthetic oligonucleotide
  Sense strand starting at position 1704 of SEQ ID NO: 914422
ccgccaccuccuugugaau

SEQ ID NO: 1002777 - RNA, 19 nt, Artificial Sequence
  Description of Artificial Sequence: Synthetic oligonucleotide
  Antisense strand to SEQ ID NO: 1002776
auucacaaggagguggcgg

SEQ ID NO: 1002778 - RNA, 19 nt, Artificial Sequence
  Description of Artificial Sequence: Synthetic oligonucleotide
  Sense strand starting at position 2123 of SEQ ID NO: 914422
uauugaugcuguuggcuaa

SEQ ID NO: 1002779 - RNA, 19 nt, Artificial Sequence
  Description of Artificial Sequence: Synthetic oligonucleotide
  Antisense strand to SEQ ID NO: 1002778
uuagccaacagcaucaaua

SEQ ID NO: 1002780 - RNA, 19 nt, Artificial Sequence
  Description of Artificial Sequence: Synthetic oligonucleotide
  Sense strand starting at position 2134 of SEQ ID NO: 914422
uuggcuaauaggugccaaa

SEQ ID NO: 1002781 - RNA, 19 nt, Artificial Sequence
  Description of Artificial Sequence: Synthetic oligonucleotide
  Antisense strand to SEQ ID NO: 1002780
uuuggcaccuauuagccaa

SEQ ID NO: 1002782 - RNA, 19 nt, Artificial Sequence
  Description of Artificial Sequence: Synthetic oligonucleotide
  Sense strand starting at position 2154 of SEQ ID NO: 914422
ccgaucuuguucuaguguu

SEQ ID NO: 1002783 - RNA, 19 nt, Artificial Sequence
  Description of Artificial Sequence: Synthetic oligonucleotide
  Antisense strand to SEQ ID NO: 1002782
aacacuagaacaagaucgg

SEQ ID NO: 1002784 - RNA, 19 nt, Artificial Sequence
  Description of Artificial Sequence: Synthetic oligonucleotide
  Sense strand starting at position 2166 of SEQ ID NO: 914422
uaguguugcuguccaagga

SEQ ID NO: 1002785 - RNA, 19 nt, Artificial Sequence
  Description of Artificial Sequence: Synthetic oligonucleotide
  Antisense strand to SEQ ID NO: 1002784
uccuuggacagcaacacua

SEQ ID NO: 1002786 - RNA, 19 nt, Artificial Sequence
  Description of Artificial Sequence: Synthetic oligonucleotide
  Sense strand starting at position 2167 of SEQ ID NO: 914422
aguguugcuguccaaggaa

SEQ ID NO: 1002787 - RNA, 19 nt, Artificial Sequence
  Description of Artificial Sequence: Synthetic oligonucleotide
  Antisense strand to SEQ ID NO: 1002786
uuccuuggacagcaacacu

SEQ ID NO: 1002788 - RNA, 19 nt, Artificial Sequence
  Description of Artificial Sequence: Synthetic oligonucleotide
  Sense strand starting at position 2170 of SEQ ID NO: 914422
guugcuguccaaggaauaa

SEQ ID NO: 1002789 - RNA, 19 nt, Artificial Sequence
  Description of Artificial Sequence: Synthetic oligonucleotide
  Antisense strand to SEQ ID NO: 1002788
uuauuccuuggacagcaac

SEQ ID NO: 1002790 - RNA, 19 nt, Artificial Sequence
  Description of Artificial Sequence: Synthetic oligonucleotide
  Sense strand starting at position 2202 of SEQ ID NO: 914422
ggagucagaucucaguuga

SEQ ID NO: 1002791 - RNA, 19 nt, Artificial Sequence
  Description of Artificial Sequence: Synthetic oligonucleotide
  Antisense strand to SEQ ID NO: 1002790
ucaacugagaucugacucc

SEQ ID NO: 1002792 - RNA, 19 nt, Artificial Sequence
  Description of Artificial Sequence: Synthetic oligonucleotide
  Sense strand starting at position 2278 of SEQ ID NO: 914422
uuuccucaucugugacgua

SEQ ID NO: 1002793 - RNA, 19 nt, Artificial Sequence
  Description of Artificial Sequence: Synthetic oligonucleotide
  Antisense strand to SEQ ID NO: 1002792
uacgucacagaugaggaaa

SEQ ID NO: 1002794 - RNA, 19 nt, Artificial Sequence
  Description of Artificial Sequence: Synthetic oligonucleotide
  Sense strand starting at position 2643 of SEQ ID NO: 914422
gggcuuuguucacuggaau

SEQ ID NO: 1002795 - RNA, 19 nt, Artificial Sequence
  Description of Artificial Sequence: Synthetic oligonucleotide
  Antisense strand to SEQ ID NO: 1002794
auuccagugaacaaagccc

SEQ ID NO: 1002796 - RNA, 19 nt, Artificial Sequence
  Description of Artificial Sequence: Synthetic oligonucleotide
  Sense strand starting at position 2890 of SEQ ID NO: 914422
ccagaucuguaguaucaga

SEQ ID NO: 1002797 - RNA, 19 nt, Artificial Sequence
  Description of Artificial Sequence: Synthetic oligonucleotide
  Antisense strand to SEQ ID NO: 1002796
ucugauacuacagaucugg

SEQ ID NO: 1002798 - RNA, 19 nt, Artificial Sequence
  Description of Artificial Sequence: Synthetic oligonucleotide
  Sense strand starting at position 2935 of SEQ ID NO: 914422
gagcuuugguaauccaguu

SEQ ID NO: 1002799 - RNA, 19 nt, Artificial Sequence
  Description of Artificial Sequence: Synthetic oligonucleotide
  Antisense strand to SEQ ID NO: 1002798
aacuggauuaccaaagcuc

SEQ ID NO: 1002800 - RNA, 19 nt, Artificial Sequence
  Description of Artificial Sequence: Synthetic oligonucleotide
  Sense strand starting at position 2941 of SEQ ID NO: 914422
ugguaauccaguugcuuga

SEQ ID NO: 1002801 - RNA, 19 nt, Artificial Sequence
  Description of Artificial Sequence: Synthetic oligonucleotide
  Antisense strand to SEQ ID NO: 1002800
ucaagcaacuggauuacca

SEQ ID NO: 1002802 - RNA, 19 nt, Artificial Sequence
  Description of Artificial Sequence: Synthetic oligonucleotide
  Sense strand starting at position 2943 of SEQ ID NO: 914422
guaauccaguugcuugaga

SEQ ID NO: 1002803 - RNA, 19 nt, Artificial Sequence
  Description of Artificial Sequence: Synthetic oligonucleotide
  Antisense strand to SEQ ID NO: 1002802
ucucaagcaacuggauuac

SEQ ID NO: 1002804 - RNA, 19 nt, Artificial Sequence
  Description of Artificial Sequence: Synthetic oligonucleotide
  Sense strand starting at position 2944 of SEQ ID NO: 914422
uaauccaguugcuugagau

SEQ ID NO: 1002805 - RNA, 19 nt, Artificial Sequence
  Description of Artificial Sequence: Synthetic oligonucleotide
  Antisense strand to SEQ ID NO: 1002804
aucucaagcaacuggauua

SEQ ID NO: 1002806 - RNA, 19 nt, Artificial Sequence
  Description of Artificial Sequence: Synthetic oligonucleotide
  Sense strand starting at position 2945 of SEQ ID NO: 914422
aauccaguugcuugagaug

SEQ ID NO: 1002807 - RNA, 19 nt, Artificial Sequence
  Description of Artificial Sequence: Synthetic oligonucleotide
  Antisense strand to SEQ ID NO: 1002806
caucucaagcaacuggauu

SEQ ID NO: 1002808 - RNA, 19 nt, Artificial Sequence
  Description of Artificial Sequence: Synthetic oligonucleotide
  Sense strand starting at position 3020 of SEQ ID NO: 914422
ggaagucccuuguuuccaa

SEQ ID NO: 1002809 - RNA, 19 nt, Artificial Sequence
  Description of Artificial Sequence: Synthetic oligonucleotide
  Antisense strand to SEQ ID NO: 1002808
uuggaaacaagggacuucc

SEQ ID NO: 1002810 - RNA, 19 nt, Artificial Sequence
  Description of Artificial Sequence: Synthetic oligonucleotide
  Sense strand starting at position 3158 of SEQ ID NO: 914422
guggccaccucccuuuaua

SEQ ID NO: 1002811 - RNA, 19 nt, Artificial Sequence
  Description of Artificial Sequence: Synthetic oligonucleotide
  Antisense strand to SEQ ID NO: 1002810
uauaaagggagguggccac

SEQ ID NO: 1002812 - RNA, 19 nt, Artificial Sequence
  Description of Artificial Sequence: Synthetic oligonucleotide
  Sense strand starting at position 3170 of SEQ ID NO: 914422
cuuuauaaguccuggagac

SEQ ID NO: 1002813 - RNA, 19 nt, Artificial Sequence
  Description of Artificial Sequence: Synthetic oligonucleotide
  Antisense strand to SEQ ID NO: 1002812
gucuccaggacuuauaaag

SEQ ID NO: 1002814 - RNA, 19 nt, Artificial Sequence
  Description of Artificial Sequence: Synthetic oligonucleotide
  Sense strand starting at position 3171 of SEQ ID NO: 914422
uuuauaaguccuggagaca

SEQ ID NO: 1002815 - RNA, 19 nt, Artificial Sequence
  Description of Artificial Sequence: Synthetic oligonucleotide
  Antisense strand to SEQ ID NO: 1002814
ugucuccaggacuuauaaa

SEQ ID NO: 1002816 - RNA, 19 nt, Artificial Sequence
  Description of Artificial Sequence: Synthetic oligonucleotide
  Sense strand starting at position 3547 of SEQ ID NO: 914422
cuggauaugugaugcuaug

SEQ ID NO: 1002817 - RNA, 19 nt, Artificial Sequence
  Description of Artificial Sequence: Synthetic oligonucleotide
  Antisense strand to SEQ ID NO: 1002816
cauagcaucacauauccag

SEQ ID NO: 1002818 - RNA, 19 nt, Artificial Sequence
  Description of Artificial Sequence: Synthetic oligonucleotide
  Sense strand starting at position 3708 of SEQ ID NO: 914422
gagucaaggcuuggccaau

SEQ ID NO: 1002819 - RNA, 19 nt, Artificial Sequence
  Description of Artificial Sequence: Synthetic oligonucleotide
  Antisense strand to SEQ ID NO: 1002818
auuggccaagccuugacuc

SEQ ID NO: 1002820 - RNA, 19 nt, Artificial Sequence
  Description of Artificial Sequence: Synthetic oligonucleotide
  Sense strand starting at position 3866 of SEQ ID NO: 914422
guuuccuccguuggugaga

SEQ ID NO: 1002821 - RNA, 19 nt, Artificial Sequence
  Description of Artificial Sequence: Synthetic oligonucleotide
  Antisense strand to SEQ ID NO: 1002820
ucucaccaacggaggaaac

SEQ ID NO: 1002822 - RNA, 19 nt, Artificial Sequence
  Description of Artificial Sequence: Synthetic oligonucleotide
  Sense strand starting at position 3928 of SEQ ID NO: 914422
ccaggcaugugcccagaaa

SEQ ID NO: 1002823 - RNA, 19 nt, Artificial Sequence
  Description of Artificial Sequence: Synthetic oligonucleotide
  Antisense strand to SEQ ID NO: 1002822
uuucugggcacaugccugg

SEQ ID NO: 1002824 - RNA, 19 nt, Artificial Sequence
  Description of Artificial Sequence: Synthetic oligonucleotide
  Sense strand starting at position 282 of SEQ ID NO: 914423
aaaggaguuucugagacug

SEQ ID NO: 1002825 - RNA, 19 nt, Artificial Sequence
  Description of Artificial Sequence: Synthetic oligonucleotide
  Antisense strand to SEQ ID NO: 1002824
cagucucagaaacuccuuu

SEQ ID NO: 1002826 - RNA, 19 nt, Artificial Sequence
  Description of Artificial Sequence: Synthetic oligonucleotide
  Sense strand starting at position 284 of SEQ ID NO: 914423
aggaguuucugagacugaa

SEQ ID NO: 1002827 - RNA, 19 nt, Artificial Sequence
  Description of Artificial Sequence: Synthetic oligonucleotide
  Antisense strand to SEQ ID NO: 1002826
uucagucucagaaacuccu

SEQ ID NO: 1002828 - RNA, 19 nt, Artificial Sequence
  Description of Artificial Sequence: Synthetic oligonucleotide
  Sense strand starting at position 287 of SEQ ID NO: 914423
aguuucugagacugaaacu

SEQ ID NO: 1002829 - RNA, 19 nt, Artificial Sequence
  Description of Artificial Sequence: Synthetic oligonucleotide
  Antisense strand to SEQ ID NO: 1002828
aguuucagucucagaaacu

SEQ ID NO: 1002830 - RNA, 19 nt, Artificial Sequence
  Description of Artificial Sequence: Synthetic oligonucleotide
  Sense strand starting at position 323 of SEQ ID NO: 914423
agccaaugacccuguaaag

SEQ ID NO: 1002831 - RNA, 19 nt, Artificial Sequence
  Description of Artificial Sequence: Synthetic oligonucleotide
  Antisense strand to SEQ ID NO: 1002830
cuuuacagggucauuggcu

SEQ ID NO: 1002832 - RNA, 19 nt, Artificial Sequence
  Description of Artificial Sequence: Synthetic oligonucleotide
  Sense strand starting at position 501 of SEQ ID NO: 914423
ccacuaacccaaugguguu

SEQ ID NO: 1002833 - RNA, 19 nt, Artificial Sequence
  Description of Artificial Sequence: Synthetic oligonucleotide
  Antisense strand to SEQ ID NO: 1002832
aacaccauuggguuagugg

SEQ ID NO: 1002834 - RNA, 19 nt, Artificial Sequence
  Description of Artificial Sequence: Synthetic oligonucleotide
  Sense strand starting at position 609 of SEQ ID NO: 914423
caggcagguucuggucauu

SEQ ID NO: 1002835 - RNA, 19 nt, Artificial Sequence
  Description of Artificial Sequence: Synthetic oligonucleotide
  Antisense strand to SEQ ID NO: 1002834
aaugaccagaaccugccug

SEQ ID NO: 1002836 - RNA, 19 nt, Artificial Sequence
  Description of Artificial Sequence: Synthetic oligonucleotide
  Sense strand starting at position 620 of SEQ ID NO: 914423
uggucauucucccagugga

SEQ ID NO: 1002837 - RNA, 19 nt, Artificial Sequence
  Description of Artificial Sequence: Synthetic oligonucleotide
  Antisense strand to SEQ ID NO: 1002836
uccacugggagaaugacca

SEQ ID NO: 1002838 - RNA, 19 nt, Artificial Sequence
  Description of Artificial Sequence: Synthetic oligonucleotide
  Sense strand starting at position 623 of SEQ ID NO: 914423
ucauucucccaguggagaa

SEQ ID NO: 1002839 - RNA, 19 nt, Artificial Sequence
  Description of Artificial Sequence: Synthetic oligonucleotide
  Antisense strand to SEQ ID NO: 1002838
uucuccacugggagaauga

SEQ ID NO: 1002840 - RNA, 19 nt, Artificial Sequence
  Description of Artificial Sequence: Synthetic oligonucleotide
  Sense strand starting at position 682 of SEQ ID NO: 914423
uccugucacccuuguggaa

SEQ ID NO: 1002841 - RNA, 19 nt, Artificial Sequence
  Description of Artificial Sequence: Synthetic oligonucleotide
  Antisense strand to SEQ ID NO: 1002840
uuccacaagggugacagga

SEQ ID NO: 1002842 - RNA, 19 nt, Artificial Sequence
  Description of Artificial Sequence: Synthetic oligonucleotide
  Sense strand starting at position 754 of SEQ ID NO: 914423
gagucauaggccuggguuc

SEQ ID NO: 1002843 - RNA, 19 nt, Artificial Sequence
  Description of Artificial Sequence: Synthetic oligonucleotide
  Antisense strand to SEQ ID NO: 1002842
gaacccaggccuaugacuc

SEQ ID NO: 1002844 - RNA, 19 nt, Artificial Sequence
  Description of Artificial Sequence: Synthetic oligonucleotide
  Sense strand starting at position 756 of SEQ ID NO: 914423
gucauaggccuggguucaa

SEQ ID NO: 1002845 - RNA, 19 nt, Artificial Sequence
  Description of Artificial Sequence: Synthetic oligonucleotide
  Antisense strand to SEQ ID NO: 1002844
uugaacccaggccuaugac

SEQ ID NO: 1002846 - RNA, 19 nt, Artificial Sequence
  Description of Artificial Sequence: Synthetic oligonucleotide
  Sense strand starting at position 787 of SEQ ID NO: 914423
cugguaacuugcucuguga

SEQ ID NO: 1002847 - RNA, 19 nt, Artificial Sequence
  Description of Artificial Sequence: Synthetic oligonucleotide
  Antisense strand to SEQ ID NO: 1002846
ucacagagcaaguuaccag

SEQ ID NO: 1002848 - RNA, 19 nt, Artificial Sequence
  Description of Artificial Sequence: Synthetic oligonucleotide
  Sense strand starting at position 804 of SEQ ID NO: 914423
gaccuuugauaggucaugu

SEQ ID NO: 1002849 - RNA, 19 nt, Artificial Sequence
  Description of Artificial Sequence: Synthetic oligonucleotide
  Antisense strand to SEQ ID NO: 1002848
acaugaccuaucaaagguc

SEQ ID NO: 1002850 - RNA, 19 nt, Artificial Sequence
  Description of Artificial Sequence: Synthetic oligonucleotide
  Sense strand starting at position 837 of SEQ ID NO: 914423
ugagcuucuuugucugcaa

SEQ ID NO: 1002851 - RNA, 19 nt, Artificial Sequence
  Description of Artificial Sequence: Synthetic oligonucleotide
  Antisense strand to SEQ ID NO: 1002850
uugcagacaaagaagcuca

SEQ ID NO: 1002852 - RNA, 19 nt, Artificial Sequence
  Description of Artificial Sequence: Synthetic oligonucleotide
  Sense strand starting at position 840 of SEQ ID NO: 914423
gcuucuuugucugcaacga

SEQ ID NO: 1002853 - RNA, 19 nt, Artificial Sequence
  Description of Artificial Sequence: Synthetic oligonucleotide
  Antisense strand to SEQ ID NO: 1002852
ucguugcagacaaagaagc

SEQ ID NO: 1002854 - RNA, 19 nt, Artificial Sequence
  Description of Artificial Sequence: Synthetic oligonucleotide
  Sense strand starting at position 869 of SEQ ID NO: 914423
cuggcuggucucuaagcau

SEQ ID NO: 1002855 - RNA, 19 nt, Artificial Sequence
  Description of Artificial Sequence: Synthetic oligonucleotide
  Antisense strand to SEQ ID NO: 1002854
augcuuagagaccagccag

SEQ ID NO: 1002856 - RNA, 19 nt, Artificial Sequence
  Description of Artificial Sequence: Synthetic oligonucleotide
  Sense strand starting at position 906 of SEQ ID NO: 914423
aggcuagucuaagguggau

SEQ ID NO: 1002857 - RNA, 19 nt, Artificial Sequence
  Description of Artificial Sequence: Synthetic oligonucleotide
  Antisense strand to SEQ ID NO: 1002856
auccaccuuagacuagccu

SEQ ID NO: 1002858 - RNA, 19 nt, Artificial Sequence
  Description of Artificial Sequence: Synthetic oligonucleotide
  Sense strand starting at position 1092 of SEQ ID NO: 914423
cgggaaaugagucaacagu

SEQ ID NO: 1002859 - RNA, 19 nt, Artificial Sequence
  Description of Artificial Sequence: Synthetic oligonucleotide
  Antisense strand to SEQ ID NO: 1002858
acuguugacucauuucccg

SEQ ID NO: 1002860 - RNA, 19 nt, Artificial Sequence
  Description of Artificial Sequence: Synthetic oligonucleotide
  Sense strand starting at position 1103 of SEQ ID NO: 914423
ucaacagucuccuuugaga

SEQ ID NO: 1002861 - RNA, 19 nt, Artificial Sequence
  Description of Artificial Sequence: Synthetic oligonucleotide
  Antisense strand to SEQ ID NO: 1002860
ucucaaaggagacuguuga

SEQ ID NO: 1002862 - RNA, 19 nt, Artificial Sequence
  Description of Artificial Sequence: Synthetic oligonucleotide
  Sense strand starting at position 1135 of SEQ ID NO: 914423
acugguugguuccgcuaga

SEQ ID NO: 1002863 - RNA, 19 nt, Artificial Sequence
  Description of Artificial Sequence: Synthetic oligonucleotide
  Antisense strand to SEQ ID NO: 1002862
ucuagcggaaccaaccagu

SEQ ID NO: 1002864 - RNA, 19 nt, Artificial Sequence
  Description of Artificial Sequence: Synthetic oligonucleotide
  Sense strand starting at position 1144 of SEQ ID NO: 914423
uuccgcuagagcugacaaa

SEQ ID NO: 1002865 - RNA, 19 nt, Artificial Sequence
  Description of Artificial Sequence: Synthetic oligonucleotide
  Antisense strand to SEQ ID NO: 1002864
uuugucagcucuagcggaa

SEQ ID NO: 1002866 - RNA, 19 nt, Artificial Sequence
  Description of Artificial Sequence: Synthetic oligonucleotide
  Sense strand starting at position 1145 of SEQ ID NO: 914423
uccgcuagagcugacaaau

SEQ ID NO: 1002867 - RNA, 19 nt, Artificial Sequence
  Description of Artificial Sequence: Synthetic oligonucleotide
  Antisense strand to SEQ ID NO: 1002866
auuugucagcucuagcgga

SEQ ID NO: 1002868 - RNA, 19 nt, Artificial Sequence
  Description of Artificial Sequence: Synthetic oligonucleotide
  Sense strand starting at position 1233 of SEQ ID NO: 914423
gggcgaacccaucgcuuua

SEQ ID NO: 1002869 - RNA, 19 nt, Artificial Sequence
  Description of Artificial Sequence: Synthetic oligonucleotide
  Antisense strand to SEQ ID NO: 1002868
uaaagcgauggguucgccc

SEQ ID NO: 1002870 - RNA, 19 nt, Artificial Sequence
  Description of Artificial Sequence: Synthetic oligonucleotide
  Sense strand starting at position 1235 of SEQ ID NO: 914423
gcgaacccaucgcuuuaaa

SEQ ID NO: 1002871 - RNA, 19 nt, Artificial Sequence
  Description of Artificial Sequence: Synthetic oligonucleotide
  Antisense strand to SEQ ID NO: 1002870
uuuaaagcgauggguucgc

SEQ ID NO: 1002872 - RNA, 19 nt, Artificial Sequence
  Description of Artificial Sequence: Synthetic oligonucleotide
  Sense strand starting at position 1304 of SEQ ID NO: 914423
gcacuuuccuagggagaau

SEQ ID NO: 1002873 - RNA, 19 nt, Artificial Sequence
  Description of Artificial Sequence: Synthetic oligonucleotide
  Antisense strand to SEQ ID NO: 1002872
auucucccuaggaaagugc

SEQ ID NO: 1002874 - RNA, 19 nt, Artificial Sequence
  Description of Artificial Sequence: Synthetic oligonucleotide
  Sense strand starting at position 1340 of SEQ ID NO: 914423
gggugcaugucucucacaa

SEQ ID NO: 1002875 - RNA, 19 nt, Artificial Sequence
  Description of Artificial Sequence: Synthetic oligonucleotide
  Antisense strand to SEQ ID NO: 1002874
uugugagagacaugcaccc

SEQ ID NO: 1002876 - RNA, 19 nt, Artificial Sequence
  Description of Artificial Sequence: Synthetic oligonucleotide
  Sense strand starting at position 3167 of SEQ ID NO: 914423
gcucgcuuugccugagguu

SEQ ID NO: 1002877 - RNA, 19 nt, Artificial Sequence
  Description of Artificial Sequence: Synthetic oligonucleotide
  Antisense strand to SEQ ID NO: 1002876
aaccucaggcaaagcgagc

SEQ ID NO: 1002878 - RNA, 19 nt, Artificial Sequence
  Description of Artificial Sequence: Synthetic oligonucleotide
  Sense strand starting at position 3199 of SEQ ID NO: 914423
aaaggcgauuccuggagau

SEQ ID NO: 1002879 - RNA, 19 nt, Artificial Sequence
  Description of Artificial Sequence: Synthetic oligonucleotide
  Antisense strand to SEQ ID NO: 1002878
aucuccaggaaucgccuuu

SEQ ID NO: 1002880 - RNA, 19 nt, Artificial Sequence
  Description of Artificial Sequence: Synthetic oligonucleotide
  Sense strand starting at position 3203 of SEQ ID NO: 914423
gcgauuccuggagauccaa

SEQ ID NO: 1002881 - RNA, 19 nt, Artificial Sequence
  Description of Artificial Sequence: Synthetic oligonucleotide
  Antisense strand to SEQ ID NO: 1002880
uuggaucuccaggaaucgc

SEQ ID NO: 1002882 - RNA, 19 nt, Artificial Sequence
  Description of Artificial Sequence: Synthetic oligonucleotide
  Sense strand starting at position 3396 of SEQ ID NO: 914423
cgauacugccugugacuuu

SEQ ID NO: 1002883 - RNA, 19 nt, Artificial Sequence
  Description of Artificial Sequence: Synthetic oligonucleotide
  Antisense strand to SEQ ID NO: 1002882
aaagucacaggcaguaucg

SEQ ID NO: 1002884 - RNA, 19 nt, Artificial Sequence
  Description of Artificial Sequence: Synthetic oligonucleotide
  Sense strand starting at position 3464 of SEQ ID NO: 914423
ucgggagccaugggaauua

SEQ ID NO: 1002885 - RNA, 19 nt, Artificial Sequence
  Description of Artificial Sequence: Synthetic oligonucleotide
  Antisense strand to SEQ ID NO: 1002884
uaauucccauggcucccga

SEQ ID NO: 1002886 - RNA, 19 nt, Artificial Sequence
  Description of Artificial Sequence: Synthetic oligonucleotide
  Sense strand starting at position 3607 of SEQ ID NO: 914423
uguugacgugcuugagacu

SEQ ID NO: 1002887 - RNA, 19 nt, Artificial Sequence
  Description of Artificial Sequence: Synthetic oligonucleotide
  Antisense strand to SEQ ID NO: 1002886
agucucaagcacgucaaca

SEQ ID NO: 1002888 - RNA, 19 nt, Artificial Sequence
  Description of Artificial Sequence: Synthetic oligonucleotide
  Sense strand starting at position 3620 of SEQ ID NO: 914423
gagacuccaccuuggguaa

SEQ ID NO: 1002889 - RNA, 19 nt, Artificial Sequence
  Description of Artificial Sequence: Synthetic oligonucleotide
  Antisense strand to SEQ ID NO: 1002888
uuacccaagguggagucuc

SEQ ID NO: 1002890 - RNA, 19 nt, Artificial Sequence
  Description of Artificial Sequence: Synthetic oligonucleotide
  Sense strand starting at position 3763 of SEQ ID NO: 914423
ggcccugagaugggagauu

SEQ ID NO: 1002891 - RNA, 19 nt, Artificial Sequence
  Description of Artificial Sequence: Synthetic oligonucleotide
  Antisense strand to SEQ ID NO: 1002890
aaucucccaucucagggcc

SEQ ID NO: 1002892 - RNA, 19 nt, Artificial Sequence
  Description of Artificial Sequence: Synthetic oligonucleotide
  Sense strand starting at position 3772 of SEQ ID NO: 914423
augggagauuccuuaauuc

SEQ ID NO: 1002893 - RNA, 19 nt, Artificial Sequence
  Description of Artificial Sequence: Synthetic oligonucleotide
  Antisense strand to SEQ ID NO: 1002892
gaauuaaggaaucucccau

SEQ ID NO: 1002894 - RNA, 19 nt, Artificial Sequence
  Description of Artificial Sequence: Synthetic oligonucleotide
  Sense strand starting at position 3857 of SEQ ID NO: 914423
acgcacuucuaaguaguau

SEQ ID NO: 1002895 - RNA, 19 nt, Artificial Sequence
  Description of Artificial Sequence: Synthetic oligonucleotide
  Antisense strand to SEQ ID NO: 1002894
auacuacuuagaagugcgu

SEQ ID NO: 1002896 - RNA, 19 nt, Artificial Sequence
  Description of Artificial Sequence: Synthetic oligonucleotide
  Sense strand starting at position 3863 of SEQ ID NO: 914423
uucuaaguaguaugguuua

SEQ ID NO: 1002897 - RNA, 19 nt, Artificial Sequence
  Description of Artificial Sequence: Synthetic oligonucleotide
  Antisense strand to SEQ ID NO: 1002896
uaaaccauacuacuuagaa

SEQ ID NO: 1002898 - RNA, 19 nt, Artificial Sequence
  Description of Artificial Sequence: Synthetic oligonucleotide
  Sense strand starting at position 3953 of SEQ ID NO: 914423
augaaagaagccuguucuu

SEQ ID NO: 1002899 - RNA, 19 nt, Artificial Sequence
  Description of Artificial Sequence: Synthetic oligonucleotide
  Antisense strand to SEQ ID NO: 1002898
aagaacaggcuucuuucau

SEQ ID NO: 1002900 - RNA, 19 nt, Artificial Sequence
  Description of Artificial Sequence: Synthetic oligonucleotide
  Sense strand starting at position 2310 of SEQ ID NO: 914424
acuugaggcgcugguuauu

SEQ ID NO: 1002901 - RNA, 19 nt, Artificial Sequence
  Description of Artificial Sequence: Synthetic oligonucleotide
  Antisense strand to SEQ ID NO: 1002900
aauaaccagcgccucaagu

SEQ ID NO: 1002902 - RNA, 19 nt, Artificial Sequence
  Description of Artificial Sequence: Synthetic oligonucleotide
  Sense strand starting at position 2408 of SEQ ID NO: 914424
agagcugagcucggaagaa

SEQ ID NO: 1002903 - RNA, 19 nt, Artificial Sequence
  Description of Artificial Sequence: Synthetic oligonucleotide
  Antisense strand to SEQ ID NO: 1002902
uucuuccgagcucagcucu

SEQ ID NO: 1002904 - RNA, 19 nt, Artificial Sequence
  Description of Artificial Sequence: Synthetic oligonucleotide
  Sense strand starting at position 2530 of SEQ ID NO: 914424
gcaaacacaucucgauuau

SEQ ID NO: 1002905 - RNA, 19 nt, Artificial Sequence
  Description of Artificial Sequence: Synthetic oligonucleotide
  Antisense strand to SEQ ID NO: 1002904
auaaucgagauguguuugc

SEQ ID NO: 1002906 - RNA, 19 nt, Artificial Sequence
  Description of Artificial Sequence: Synthetic oligonucleotide
  Sense strand starting at position 2571 of SEQ ID NO: 914424
cuagaugucuucuuuaugu

SEQ ID NO: 1002907 - RNA, 19 nt, Artificial Sequence
  Description of Artificial Sequence: Synthetic oligonucleotide
  Antisense strand to SEQ ID NO: 1002906
acauaaagaagacaucuag

SEQ ID NO: 1002908 - RNA, 19 nt, Artificial Sequence
  Description of Artificial Sequence: Synthetic oligonucleotide
  Sense strand starting at position 2584 of SEQ ID NO: 914424
uuauguuugucuccucacu

SEQ ID NO: 1002909 - RNA, 19 nt, Artificial Sequence
  Description of Artificial Sequence: Synthetic oligonucleotide
  Antisense strand to SEQ ID NO: 1002908
agugaggagacaaacauaa

SEQ ID NO: 1002910 - RNA, 19 nt, Artificial Sequence
  Description of Artificial Sequence: Synthetic oligonucleotide
  Sense strand starting at position 2702 of SEQ ID NO: 914424
agagcuuuacuccaagcca

SEQ ID NO: 1002911 - RNA, 19 nt, Artificial Sequence
  Description of Artificial Sequence: Synthetic oligonucleotide
  Antisense strand to SEQ ID NO: 1002910
uggcuuggaguaaagcucu

SEQ ID NO: 1002912 - RNA, 19 nt, Artificial Sequence
  Description of Artificial Sequence: Synthetic oligonucleotide
  Sense strand starting at position 2739 of SEQ ID NO: 914424
cguauauuauccuguuuaa

SEQ ID NO: 1002913 - RNA, 19 nt, Artificial Sequence
  Description of Artificial Sequence: Synthetic oligonucleotide
  Antisense strand to SEQ ID NO: 1002912
uuaaacaggauaauauacg

SEQ ID NO: 1002914 - RNA, 19 nt, Artificial Sequence
  Description of Artificial Sequence: Synthetic oligonucleotide
  Sense strand starting at position 2775 of SEQ ID NO: 914424
cuaugagguaauugguauu

SEQ ID NO: 1002915 - RNA, 19 nt, Artificial Sequence
  Description of Artificial Sequence: Synthetic oligonucleotide
  Antisense strand to SEQ ID NO: 1002914
aauaccaauuaccucauag

SEQ ID NO: 1002916 - RNA, 19 nt, Artificial Sequence
  Description of Artificial Sequence: Synthetic oligonucleotide
  Sense strand starting at position 2781 of SEQ ID NO: 914424
gguaauugguauucucuca

SEQ ID NO: 1002917 - RNA, 19 nt, Artificial Sequence
  Description of Artificial Sequence: Synthetic oligonucleotide
  Antisense strand to SEQ ID NO: 1002916
ugagagaauaccaauuacc

SEQ ID NO: 1002918 - RNA, 19 nt, Artificial Sequence
  Description of Artificial Sequence: Synthetic oligonucleotide
  Sense strand starting at position 2830 of SEQ ID NO: 914424
gggauaaguaacuggucca

SEQ ID NO: 1002919 - RNA, 19 nt, Artificial Sequence
  Description of Artificial Sequence: Synthetic oligonucleotide
  Antisense strand to SEQ ID NO: 1002918
uggaccaguuacuuauccc

SEQ ID NO: 1002920 - RNA, 19 nt, Artificial Sequence
  Description of Artificial Sequence: Synthetic oligonucleotide
  Sense strand starting at position 2833 of SEQ ID NO: 914424
auaaguaacugguccacua

SEQ ID NO: 1002921 - RNA, 19 nt, Artificial Sequence
  Description of Artificial Sequence: Synthetic oligonucleotide
  Antisense strand to SEQ ID NO: 1002920
uaguggaccaguuacuuau

SEQ ID NO: 1002922 - RNA, 19 nt, Artificial Sequence
  Description of Artificial Sequence: Synthetic oligonucleotide
  Sense strand starting at position 2846 of SEQ ID NO: 914424
ccacuaguaucugauggaa

SEQ ID NO: 1002923 - RNA, 19 nt, Artificial Sequence
  Description of Artificial Sequence: Synthetic oligonucleotide
  Antisense strand to SEQ ID NO: 1002922
uuccaucagauacuagugg

SEQ ID NO: 1002924 - RNA, 19 nt, Artificial Sequence
  Description of Artificial Sequence: Synthetic oligonucleotide
  Sense strand starting at position 2848 of SEQ ID NO: 914424
acuaguaucugauggaaac

SEQ ID NO: 1002925 - RNA, 19 nt, Artificial Sequence
  Description of Artificial Sequence: Synthetic oligonucleotide
  Antisense strand to SEQ ID NO: 1002924
guuuccaucagauacuagu

SEQ ID NO: 1002926 - RNA, 19 nt, Artificial Sequence
  Description of Artificial Sequence: Synthetic oligonucleotide
  Sense strand starting at position 2849 of SEQ ID NO: 914424
cuaguaucugauggaaaca

SEQ ID NO: 1002927 - RNA, 19 nt, Artificial Sequence
  Description of Artificial Sequence: Synthetic oligonucleotide
  Antisense strand to SEQ ID NO: 1002926
uguuuccaucagauacuag

SEQ ID NO: 1002928 - RNA, 19 nt, Artificial Sequence
  Description of Artificial Sequence: Synthetic oligonucleotide
  Sense strand starting at position 2912 of SEQ ID NO: 914424
gggugaguacccugagcua

SEQ ID NO: 1002929 - RNA, 19 nt, Artificial Sequence
  Description of Artificial Sequence: Synthetic oligonucleotide
  Antisense strand to SEQ ID NO: 1002928
uagcucaggguacucaccc

SEQ ID NO: 1002930 - RNA, 19 nt, Artificial Sequence
  Description of Artificial Sequence: Synthetic oligonucleotide
  Sense strand starting at position 2915 of SEQ ID NO: 914424
ugaguacccugagcuaaau

SEQ ID NO: 1002931 - RNA, 19 nt, Artificial Sequence
  Description of Artificial Sequence: Synthetic oligonucleotide
  Antisense strand to SEQ ID NO: 1002930
auuuagcucaggguacuca

SEQ ID NO: 1002932 - RNA, 19 nt, Artificial Sequence
  Description of Artificial Sequence: Synthetic oligonucleotide
  Sense strand starting at position 2924 of SEQ ID NO: 914424
ugagcuaaaucucaccagu

SEQ ID NO: 1002933 - RNA, 19 nt, Artificial Sequence
  Description of Artificial Sequence: Synthetic oligonucleotide
  Antisense strand to SEQ ID NO: 1002932
acuggugagauuuagcuca

SEQ ID NO: 1002934 - RNA, 19 nt, Artificial Sequence
  Description of Artificial Sequence: Synthetic oligonucleotide
  Sense strand starting at position 2926 of SEQ ID NO: 914424
agcuaaaucucaccagugu

SEQ ID NO: 1002935 - RNA, 19 nt, Artificial Sequence
  Description of Artificial Sequence: Synthetic oligonucleotide
  Antisense strand to SEQ ID NO: 1002934
acacuggugagauuuagcu

SEQ ID NO: 1002936 - RNA, 19 nt, Artificial Sequence
  Description of Artificial Sequence: Synthetic oligonucleotide
  Sense strand starting at position 2927 of SEQ ID NO: 914424
gcuaaaucucaccaguguu

SEQ ID NO: 1002937 - RNA, 19 nt, Artificial Sequence
  Description of Artificial Sequence: Synthetic oligonucleotide
  Antisense strand to SEQ ID NO: 1002936
aacacuggugagauuuagc

SEQ ID NO: 1002938 - RNA, 19 nt, Artificial Sequence
  Description of Artificial Sequence: Synthetic oligonucleotide
  Sense strand starting at position 3163 of SEQ ID NO: 914424
uuacuuuccugcucaggaa

SEQ ID NO: 1002939 - RNA, 19 nt, Artificial Sequence
  Description of Artificial Sequence: Synthetic oligonucleotide
  Antisense strand to SEQ ID NO: 1002938
uuccugagcaggaaaguaa

SEQ ID NO: 1002940 - RNA, 19 nt, Artificial Sequence
  Description of Artificial Sequence: Synthetic oligonucleotide
  Sense strand starting at position 3209 of SEQ ID NO: 914424
aguccuggcccucaugaaa

SEQ ID NO: 1002941 - RNA, 19 nt, Artificial Sequence
  Description of Artificial Sequence: Synthetic oligonucleotide
  Antisense strand to SEQ ID NO: 1002940
uuucaugagggccaggacu

SEQ ID NO: 1002942 - RNA, 19 nt, Artificial Sequence
  Description of Artificial Sequence: Synthetic oligonucleotide
  Sense strand starting at position 3228 of SEQ ID NO: 914424
guuacauucuaaugggagu

SEQ ID NO: 1002943 - RNA, 19 nt, Artificial Sequence
  Description of Artificial Sequence: Synthetic oligonucleotide
  Antisense strand to SEQ ID NO: 1002942
acucccauuagaauguaac

SEQ ID NO: 1002944 - RNA, 19 nt, Artificial Sequence
  Description of Artificial Sequence: Synthetic oligonucleotide
  Sense strand starting at position 3338 of SEQ ID NO: 914424
uggugagaugcuuagagca

SEQ ID NO: 1002945 - RNA, 19 nt, Artificial Sequence
  Description of Artificial Sequence: Synthetic oligonucleotide
  Antisense strand to SEQ ID NO: 1002944
ugcucuaagcaucucacca

SEQ ID NO: 1002946 - RNA, 19 nt, Artificial Sequence
  Description of Artificial Sequence: Synthetic oligonucleotide
  Sense strand starting at position 3372 of SEQ ID NO: 914424
cugcucagagccuggauau

SEQ ID NO: 1002947 - RNA, 19 nt, Artificial Sequence
  Description of Artificial Sequence: Synthetic oligonucleotide
  Antisense strand to SEQ ID NO: 1002946
auauccaggcucugagcag

SEQ ID NO: 1002948 - RNA, 19 nt, Artificial Sequence
  Description of Artificial Sequence: Synthetic oligonucleotide
  Sense strand starting at position 3373 of SEQ ID NO: 914424
ugcucagagccuggauauu

SEQ ID NO: 1002949 - RNA, 19 nt, Artificial Sequence
  Description of Artificial Sequence: Synthetic oligonucleotide
  Antisense strand to SEQ ID NO: 1002948
aauauccaggcucugagca

SEQ ID NO: 1002950 - RNA, 19 nt, Artificial Sequence
  Description of Artificial Sequence: Synthetic oligonucleotide
  Sense strand starting at position 3463 of SEQ ID NO: 914424
gcgugaacucaauguguuc

SEQ ID NO: 1002951 - RNA, 19 nt, Artificial Sequence
  Description of Artificial Sequence: Synthetic oligonucleotide
  Antisense strand to SEQ ID NO: 1002950
gaacacauugaguucacgc

SEQ ID NO: 1002952 - RNA, 19 nt, Artificial Sequence
  Description of Artificial Sequence: Synthetic oligonucleotide
  Sense strand starting at position 3610 of SEQ ID NO: 914424
aguagcaagagcugagauu

SEQ ID NO: 1002953 - RNA, 19 nt, Artificial Sequence
  Description of Artificial Sequence: Synthetic oligonucleotide
  Antisense strand to SEQ ID NO: 1002952
aaucucagcucuugcuacu

SEQ ID NO: 1002954 - RNA, 19 nt, Artificial Sequence
  Description of Artificial Sequence: Synthetic oligonucleotide
  Sense strand starting at position 3667 of SEQ ID NO: 914424
agcgguuugcccugcaaug

SEQ ID NO: 1002955 - RNA, 19 nt, Artificial Sequence
  Description of Artificial Sequence: Synthetic oligonucleotide
  Antisense strand to SEQ ID NO: 1002954
cauugcagggcaaaccgcu

SEQ ID NO: 1002956 - RNA, 19 nt, Artificial Sequence
  Description of Artificial Sequence: Synthetic oligonucleotide
  Sense strand starting at position 3694 of SEQ ID NO: 914424
uggaaccagucaugugaca

SEQ ID NO: 1002957 - RNA, 19 nt, Artificial Sequence
  Description of Artificial Sequence: Synthetic oligonucleotide
  Antisense strand to SEQ ID NO: 1002956
ugucacaugacugguucca

SEQ ID NO: 1002958 - RNA, 19 nt, Artificial Sequence
  Description of Artificial Sequence: Synthetic oligonucleotide
  Sense strand starting at position 3737 of SEQ ID NO: 914424
gagggagucuuagugcaaa

SEQ ID NO: 1002959 - RNA, 19 nt, Artificial Sequence
  Description of Artificial Sequence: Synthetic oligonucleotide
  Antisense strand to SEQ ID NO: 1002958
uuugcacuaagacucccuc

SEQ ID NO: 1002960 - RNA, 19 nt, Artificial Sequence
  Description of Artificial Sequence: Synthetic oligonucleotide
  Sense strand starting at position 3740 of SEQ ID NO: 914424
ggagucuuagugcaaagac

SEQ ID NO: 1002961 - RNA, 19 nt, Artificial Sequence
  Description of Artificial Sequence: Synthetic oligonucleotide
  Antisense strand to SEQ ID NO: 1002960
gucuuugcacuaagacucc

SEQ ID NO: 1002962 - RNA, 19 nt, Artificial Sequence
  Description of Artificial Sequence: Synthetic oligonucleotide
  Sense strand starting at position 3767 of SEQ ID NO: 914424
aagaauacacuugguguau

SEQ ID NO: 1002963 - RNA, 19 nt, Artificial Sequence
  Description of Artificial Sequence: Synthetic oligonucleotide
  Antisense strand to SEQ ID NO: 1002962
auacaccaaguguauucuu

SEQ ID NO: 1002964 - RNA, 19 nt, Artificial Sequence
  Description of Artificial Sequence: Synthetic oligonucleotide
  Sense strand starting at position 3768 of SEQ ID NO: 914424
agaauacacuugguguauu

SEQ ID NO: 1002965 - RNA, 19 nt, Artificial Sequence
  Description of Artificial Sequence: Synthetic oligonucleotide
  Antisense strand to SEQ ID NO: 1002964
aauacaccaaguguauucu

SEQ ID NO: 1002966 - RNA, 19 nt, Artificial Sequence
  Description of Artificial Sequence: Synthetic oligonucleotide
  Sense strand starting at position 3776 of SEQ ID NO: 914424
cuugguguauucgaagaac

SEQ ID NO: 1002967 - RNA, 19 nt, Artificial Sequence
  Description of Artificial Sequence: Synthetic oligonucleotide
  Antisense strand to SEQ ID NO: 1002966
guucuucgaauacaccaag

SEQ ID NO: 1002968 - RNA, 19 nt, Artificial Sequence
  Description of Artificial Sequence: Synthetic oligonucleotide
  Sense strand starting at position 3806 of SEQ ID NO: 914424
aggcuuguuggcuaaagca

SEQ ID NO: 1002969 - RNA, 19 nt, Artificial Sequence
  Description of Artificial Sequence: Synthetic oligonucleotide
  Antisense strand to SEQ ID NO: 1002968
ugcuuuagccaacaagccu

SEQ ID NO: 1002970 - RNA, 19 nt, Artificial Sequence
  Description of Artificial Sequence: Synthetic oligonucleotide
  Sense strand starting at position 3887 of SEQ ID NO: 914424
guuagaauuucagccgggu

SEQ ID NO: 1002971 - RNA, 19 nt, Artificial Sequence
  Description of Artificial Sequence: Synthetic oligonucleotide
  Antisense strand to SEQ ID NO: 1002970
acccggcugaaauucuaac

SEQ ID NO: 1002972 - RNA, 19 nt, Artificial Sequence
  Description of Artificial Sequence: Synthetic oligonucleotide
  Sense strand starting at position 14 of SEQ ID NO: 914425
gcaggacugugauuaggga

SEQ ID NO: 1002973 - RNA, 19 nt, Artificial Sequence
  Description of Artificial Sequence: Synthetic oligonucleotide
  Antisense strand to SEQ ID NO: 1002972
ucccuaaucacaguccugc

SEQ ID NO: 1002974 - RNA, 19 nt, Artificial Sequence
  Description of Artificial Sequence: Synthetic oligonucleotide
  Sense strand starting at position 106 of SEQ ID NO: 914425
uacuuugugcuugugcgaa

SEQ ID NO: 1002975 - RNA, 19 nt, Artificial Sequence
  Description of Artificial Sequence: Synthetic oligonucleotide
  Antisense strand to SEQ ID NO: 1002974
uucgcacaagcacaaagua

SEQ ID NO: 1002976 - RNA, 19 nt, Artificial Sequence
  Description of Artificial Sequence: Synthetic oligonucleotide
  Sense strand starting at position 307 of SEQ ID NO: 914425
uaaauugaugagugaaugu

SEQ ID NO: 1002977 - RNA, 19 nt, Artificial Sequence
  Description of Artificial Sequence: Synthetic oligonucleotide
  Antisense strand to SEQ ID NO: 1002976
acauucacucaucaauuua

SEQ ID NO: 1002978 - RNA, 19 nt, Artificial Sequence
  Description of Artificial Sequence: Synthetic oligonucleotide
  Sense strand starting at position 678 of SEQ ID NO: 914425
uggcaacagaguugucuaa

SEQ ID NO: 1002979 - RNA, 19 nt, Artificial Sequence
  Description of Artificial Sequence: Synthetic oligonucleotide
  Antisense strand to SEQ ID NO: 1002978
uuagacaacucuguugcca

SEQ ID NO: 1002980 - RNA, 19 nt, Artificial Sequence
  Description of Artificial Sequence: Synthetic oligonucleotide
  Sense strand starting at position 759 of SEQ ID NO: 914425
gaauuuaugugcucuaagc

SEQ ID NO: 1002981 - RNA, 19 nt, Artificial Sequence
  Description of Artificial Sequence: Synthetic oligonucleotide
  Antisense strand to SEQ ID NO: 1002980
gcuuagagcacauaaauuc

SEQ ID NO: 1002982 - RNA, 19 nt, Artificial Sequence
  Description of Artificial Sequence: Synthetic oligonucleotide
  Sense strand starting at position 839 of SEQ ID NO: 914425
agcugaugcccagggaaga

SEQ ID NO: 1002983 - RNA, 19 nt, Artificial Sequence
  Description of Artificial Sequence: Synthetic oligonucleotide
  Antisense strand to SEQ ID NO: 1002982
ucuucccugggcaucagcu

SEQ ID NO: 1002984 - RNA, 19 nt, Artificial Sequence
  Description of Artificial Sequence: Synthetic oligonucleotide
  Sense strand starting at position 883 of SEQ ID NO: 914425
uucuguaacuucuugauga

SEQ ID NO: 1002985 - RNA, 19 nt, Artificial Sequence
  Description of Artificial Sequence: Synthetic oligonucleotide
  Antisense strand to SEQ ID NO: 1002984
ucaucaagaaguuacagaa

SEQ ID NO: 1002986 - RNA, 19 nt, Artificial Sequence
  Description of Artificial Sequence: Synthetic oligonucleotide
  Sense strand starting at position 1009 of SEQ ID NO: 914425
cagucugcucuccagagau

SEQ ID NO: 1002987 - RNA, 19 nt, Artificial Sequence
  Description of Artificial Sequence: Synthetic oligonucleotide
  Antisense strand to SEQ ID NO: 1002986
aucucuggagagcagacug

SEQ ID NO: 1002988 - RNA, 19 nt, Artificial Sequence
  Description of Artificial Sequence: Synthetic oligonucleotide
  Sense strand starting at position 1157 of SEQ ID NO: 914425
ugaaacaguaugggugaau

SEQ ID NO: 1002989 - RNA, 19 nt, Artificial Sequence
  Description of Artificial Sequence: Synthetic oligonucleotide
  Antisense strand to SEQ ID NO: 1002988
auucacccauacuguuuca

SEQ ID NO: 1002990 - RNA, 19 nt, Artificial Sequence
  Description of Artificial Sequence: Synthetic oligonucleotide
  Sense strand starting at position 1277 of SEQ ID NO: 914425
caaagaacagugcguuaaa

SEQ ID NO: 1002991 - RNA, 19 nt, Artificial Sequence
  Description of Artificial Sequence: Synthetic oligonucleotide
  Antisense strand to SEQ ID NO: 1002990
uuuaacgcacuguucuuug

SEQ ID NO: 1002992 - RNA, 19 nt, Artificial Sequence
  Description of Artificial Sequence: Synthetic oligonucleotide
  Sense strand starting at position 1324 of SEQ ID NO: 914425
aggauuggguaauuguaga

SEQ ID NO: 1002993 - RNA, 19 nt, Artificial Sequence
  Description of Artificial Sequence: Synthetic oligonucleotide
  Antisense strand to SEQ ID NO: 1002992
ucuacaauuacccaauccu

SEQ ID NO: 1002994 - RNA, 19 nt, Artificial Sequence
  Description of Artificial Sequence: Synthetic oligonucleotide
  Sense strand starting at position 1332 of SEQ ID NO: 914425
guaauuguagacugagagu

SEQ ID NO: 1002995 - RNA, 19 nt, Artificial Sequence
  Description of Artificial Sequence: Synthetic oligonucleotide
  Antisense strand to SEQ ID NO: 1002994
acucucagucuacaauuac

SEQ ID NO: 1002996 - RNA, 19 nt, Artificial Sequence
  Description of Artificial Sequence: Synthetic oligonucleotide
  Sense strand starting at position 1471 of SEQ ID NO: 914425
augagcugcguguuucuaa

SEQ ID NO: 1002997 - RNA, 19 nt, Artificial Sequence
  Description of Artificial Sequence: Synthetic oligonucleotide
  Antisense strand to SEQ ID NO: 1002996
uuagaaacacgcagcucau

SEQ ID NO: 1002998 - RNA, 19 nt, Artificial Sequence
  Description of Artificial Sequence: Synthetic oligonucleotide
  Sense strand starting at position 1491 of SEQ ID NO: 914425
gguguauacgcauacauac

SEQ ID NO: 1002999 - RNA, 19 nt, Artificial Sequence
  Description of Artificial Sequence: Synthetic oligonucleotide
  Antisense strand to SEQ ID NO: 1002998
guauguaugcguauacacc

SEQ ID NO: 1003000 - RNA, 19 nt, Artificial Sequence
  Description of Artificial Sequence: Synthetic oligonucleotide
  Sense strand starting at position 1603 of SEQ ID NO: 914425
acgccacuaugauuaaauu

SEQ ID NO: 1003001 - RNA, 19 nt, Artificial Sequence
  Description of Artificial Sequence: Synthetic oligonucleotide
  Antisense strand to SEQ ID NO: 1003000
aauuuaaucauaguggcgu

SEQ ID NO: 1003002 - RNA, 19 nt, Artificial Sequence
  Description of Artificial Sequence: Synthetic oligonucleotide
  Sense strand starting at position 2137 of SEQ ID NO: 914425
uagguauuccgcgcaccaa

SEQ ID NO: 1003003 - RNA, 19 nt, Artificial Sequence
  Description of Artificial Sequence: Synthetic oligonucleotide
  Antisense strand to SEQ ID NO: 1003002
uuggugcgcggaauaccua

SEQ ID NO: 1003004 - RNA, 19 nt, Artificial Sequence
  Description of Artificial Sequence: Synthetic oligonucleotide
  Sense strand starting at position 2181 of SEQ ID NO: 914425
ggguuauuauuaucauuga

SEQ ID NO: 1003005 - RNA, 19 nt, Artificial Sequence
  Description of Artificial Sequence: Synthetic oligonucleotide
  Antisense strand to SEQ ID NO: 1003004
ucaaugauaauaauaaccc

SEQ ID NO: 1003006 - RNA, 19 nt, Artificial Sequence
  Description of Artificial Sequence: Synthetic oligonucleotide
  Sense strand starting at position 2270 of SEQ ID NO: 914425
aggcuuuacuauucccaga

SEQ ID NO: 1003007 - RNA, 19 nt, Artificial Sequence
  Description of Artificial Sequence: Synthetic oligonucleotide
  Antisense strand to SEQ ID NO: 1003006
ucugggaauaguaaagccu

SEQ ID NO: 1003008 - RNA, 19 nt, Artificial Sequence
  Description of Artificial Sequence: Synthetic oligonucleotide
  Sense strand starting at position 2272 of SEQ ID NO: 914425
gcuuuacuauucccagaga

SEQ ID NO: 1003009 - RNA, 19 nt, Artificial Sequence
  Description of Artificial Sequence: Synthetic oligonucleotide
  Antisense strand to SEQ ID NO: 1003008
ucucugggaauaguaaagc

SEQ ID NO: 1003010 - RNA, 19 nt, Artificial Sequence
  Description of Artificial Sequence: Synthetic oligonucleotide
  Sense strand starting at position 2366 of SEQ ID NO: 914425
ucagaagucuggucccaag

SEQ ID NO: 1003011 - RNA, 19 nt, Artificial Sequence
  Description of Artificial Sequence: Synthetic oligonucleotide
  Antisense strand to SEQ ID NO: 1003010
cuugggaccagacuucuga

SEQ ID NO: 1003012 - RNA, 19 nt, Artificial Sequence
  Description of Artificial Sequence: Synthetic oligonucleotide
  Sense strand starting at position 2806 of SEQ ID NO: 914425
aguauuaaaucguucuaca

SEQ ID NO: 1003013 - RNA, 19 nt, Artificial Sequence
  Description of Artificial Sequence: Synthetic oligonucleotide
  Antisense strand to SEQ ID NO: 1003012
uguagaacgauuuaauacu

SEQ ID NO: 1003014 - RNA, 19 nt, Artificial Sequence
  Description of Artificial Sequence: Synthetic oligonucleotide
  Sense strand starting at position 2943 of SEQ ID NO: 914425
uugauuuccuacgaugaaa

SEQ ID NO: 1003015 - RNA, 19 nt, Artificial Sequence
  Description of Artificial Sequence: Synthetic oligonucleotide
  Antisense strand to SEQ ID NO: 1003014
uuucaucguaggaaaucaa

SEQ ID NO: 1003016 - RNA, 19 nt, Artificial Sequence
  Description of Artificial Sequence: Synthetic oligonucleotide
  Sense strand starting at position 3092 of SEQ ID NO: 914425
gcuagucuugcauugcuau

SEQ ID NO: 1003017 - RNA, 19 nt, Artificial Sequence
  Description of Artificial Sequence: Synthetic oligonucleotide
  Antisense strand to SEQ ID NO: 1003016
auagcaaugcaagacuagc

SEQ ID NO: 1003018 - RNA, 19 nt, Artificial Sequence
  Description of Artificial Sequence: Synthetic oligonucleotide
  Sense strand starting at position 3105 of SEQ ID NO: 914425
ugcuauauaccugaaacug

SEQ ID NO: 1003019 - RNA, 19 nt, Artificial Sequence
  Description of Artificial Sequence: Synthetic oligonucleotide
  Antisense strand to SEQ ID NO: 1003018
caguuucagguauauagca

SEQ ID NO: 1003020 - RNA, 19 nt, Artificial Sequence
  Description of Artificial Sequence: Synthetic oligonucleotide
  Sense strand starting at position 3298 of SEQ ID NO: 914425
uucuuucucucuguagaga

SEQ ID NO: 1003021 - RNA, 19 nt, Artificial Sequence
  Description of Artificial Sequence: Synthetic oligonucleotide
  Antisense strand to SEQ ID NO: 1003020
ucucuacagagagaaagaa

SEQ ID NO: 1003022 - RNA, 19 nt, Artificial Sequence
  Description of Artificial Sequence: Synthetic oligonucleotide
  Sense strand starting at position 3301 of SEQ ID NO: 914425
uuucucucuguagagagau

SEQ ID NO: 1003023 - RNA, 19 nt, Artificial Sequence
  Description of Artificial Sequence: Synthetic oligonucleotide
  Antisense strand to SEQ ID NO: 1003022
aucucucuacagagagaaa

SEQ ID NO: 1003024 - RNA, 19 nt, Artificial Sequence
  Description of Artificial Sequence: Synthetic oligonucleotide
  Sense strand starting at position 3369 of SEQ ID NO: 914425
aaagguuguguggaaaggu

SEQ ID NO: 1003025 - RNA, 19 nt, Artificial Sequence
  Description of Artificial Sequence: Synthetic oligonucleotide
  Antisense strand to SEQ ID NO: 1003024
accuuuccacacaaccuuu

SEQ ID NO: 1003026 - RNA, 19 nt, Artificial Sequence
  Description of Artificial Sequence: Synthetic oligonucleotide
  Sense strand starting at position 3439 of SEQ ID NO: 914425
uucuuaacaugaguuugaa

SEQ ID NO: 1003027 - RNA, 19 nt, Artificial Sequence
  Description of Artificial Sequence: Synthetic oligonucleotide
  Antisense strand to SEQ ID NO: 1003026
uucaaacucauguuaagaa

SEQ ID NO: 1003028 - RNA, 19 nt, Artificial Sequence
  Description of Artificial Sequence: Synthetic oligonucleotide
  Sense strand starting at position 3548 of SEQ ID NO: 914425
ugugucaggagcuauuaua

SEQ ID NO: 1003029 - RNA, 19 nt, Artificial Sequence
  Description of Artificial Sequence: Synthetic oligonucleotide
  Antisense strand to SEQ ID NO: 1003028
uauaauagcuccugacaca

SEQ ID NO: 1003030 - RNA, 19 nt, Artificial Sequence
  Description of Artificial Sequence: Synthetic oligonucleotide
  Sense strand starting at position 3652 of SEQ ID NO: 914425
ugaacagaguuguugacau

SEQ ID NO: 1003031 - RNA, 19 nt, Artificial Sequence
  Description of Artificial Sequence: Synthetic oligonucleotide
  Antisense strand to SEQ ID NO: 1003030
augucaacaacucuguuca

SEQ ID NO: 1003032 - RNA, 19 nt, Artificial Sequence
  Description of Artificial Sequence: Synthetic oligonucleotide
  Sense strand starting at position 3654 of SEQ ID NO: 914425
aacagaguuguugacaugu

SEQ ID NO: 1003033 - RNA, 19 nt, Artificial Sequence
  Description of Artificial Sequence: Synthetic oligonucleotide
  Antisense strand to SEQ ID NO: 1003032
acaugucaacaacucuguu

SEQ ID NO: 1003034 - RNA, 19 nt, Artificial Sequence
  Description of Artificial Sequence: Synthetic oligonucleotide
  Sense strand starting at position 3701 of SEQ ID NO: 914425
acauguuuggagugaauuc

SEQ ID NO: 1003035 - RNA, 19 nt, Artificial Sequence
  Description of Artificial Sequence: Synthetic oligonucleotide
  Antisense strand to SEQ ID NO: 1003034
gaauucacuccaaacaugu

SEQ ID NO: 1003036 - RNA, 19 nt, Artificial Sequence
  Description of Artificial Sequence: Synthetic oligonucleotide
  Sense strand starting at position 3771 of SEQ ID NO: 914425
aagcccuucggcuaucaga

SEQ ID NO: 1003037 - RNA, 19 nt, Artificial Sequence
  Description of Artificial Sequence: Synthetic oligonucleotide
  Antisense strand to SEQ ID NO: 1003036
ucugauagccgaagggcuu

SEQ ID NO: 1003038 - RNA, 19 nt, Artificial Sequence
  Description of Artificial Sequence: Synthetic oligonucleotide
  Sense strand starting at position 3784 of SEQ ID NO: 914425
aucagaaguccauauggcu

SEQ ID NO: 1003039 - RNA, 19 nt, Artificial Sequence
  Description of Artificial Sequence: Synthetic oligonucleotide
  Antisense strand to SEQ ID NO: 1003038
agccauauggacuucugau

SEQ ID NO: 1003040 - RNA, 19 nt, Artificial Sequence
  Description of Artificial Sequence: Synthetic oligonucleotide
  Sense strand starting at position 3789 of SEQ ID NO: 914425
aaguccauauggcugaaau

SEQ ID NO: 1003041 - RNA, 19 nt, Artificial Sequence
  Description of Artificial Sequence: Synthetic oligonucleotide
  Antisense strand to SEQ ID NO: 1003040
auuucagccauauggacuu

SEQ ID NO: 1003042 - RNA, 19 nt, Artificial Sequence
  Description of Artificial Sequence: Synthetic oligonucleotide
  Sense strand starting at position 3790 of SEQ ID NO: 914425
aguccauauggcugaaaua

SEQ ID NO: 1003043 - RNA, 19 nt, Artificial Sequence
  Description of Artificial Sequence: Synthetic oligonucleotide
  Antisense strand to SEQ ID NO: 1003042
uauuucagccauauggacu

SEQ ID NO: 1003044 - RNA, 19 nt, Artificial Sequence
  Description of Artificial Sequence: Synthetic oligonucleotide
  Sense strand starting at position 3791 of SEQ ID NO: 914425
guccauauggcugaaauaa

SEQ ID NO: 1003045 - RNA, 19 nt, Artificial Sequence
  Description of Artificial Sequence: Synthetic oligonucleotide
  Antisense strand to SEQ ID NO: 1003044
uuauuucagccauauggac

SEQ ID NO: 1003046 - RNA, 19 nt, Artificial Sequence
  Description of Artificial Sequence: Synthetic oligonucleotide
  Sense strand starting at position 3839 of SEQ ID NO: 914425
ugaguucugauaggugaau

SEQ ID NO: 1003047 - RNA, 19 nt, Artificial Sequence
  Description of Artificial Sequence: Synthetic oligonucleotide
  Antisense strand to SEQ ID NO: 1003046
auucaccuaucagaacuca

SEQ ID NO: 1003048 - RNA, 19 nt, Artificial Sequence
  Description of Artificial Sequence: Synthetic oligonucleotide
  Sense strand starting at position 3840 of SEQ ID NO: 914425
gaguucugauaggugaauu

SEQ ID NO: 1003049 - RNA, 19 nt, Artificial Sequence
  Description of Artificial Sequence: Synthetic oligonucleotide
  Antisense strand to SEQ ID NO: 1003048
aauucaccuaucagaacuc

SEQ ID NO: 1003050 - RNA, 19 nt, Artificial Sequence
  Description of Artificial Sequence: Synthetic oligonucleotide
  Sense strand starting at position 3841 of SEQ ID NO: 914425
aguucugauaggugaauua

SEQ ID NO: 1003051 - RNA, 19 nt, Artificial Sequence
  Description of Artificial Sequence: Synthetic oligonucleotide
  Antisense strand to SEQ ID NO: 1003050
uaauucaccuaucagaacu

SEQ ID NO: 1003052 - RNA, 19 nt, Artificial Sequence
  Description of Artificial Sequence: Synthetic oligonucleotide
  Sense strand starting at position 31 of SEQ ID NO: 914426
gucuucucuuucugggcaa

SEQ ID NO: 1003053 - RNA, 19 nt, Artificial Sequence
  Description of Artificial Sequence: Synthetic oligonucleotide
  Antisense strand to SEQ ID NO: 1003052
uugcccagaaagagaagac

SEQ ID NO: 1003054 - RNA, 19 nt, Artificial Sequence
  Description of Artificial Sequence: Synthetic oligonucleotide
  Sense strand starting at position 53 of SEQ ID NO: 914426
ggaucugcuggaggaguuu

SEQ ID NO: 1003055 - RNA, 19 nt, Artificial Sequence
  Description of Artificial Sequence: Synthetic oligonucleotide
  Antisense strand to SEQ ID NO: 1003054
aaacuccuccagcagaucc

SEQ ID NO: 1003056 - RNA, 19 nt, Artificial Sequence
  Description of Artificial Sequence: Synthetic oligonucleotide
  Sense strand starting at position 73 of SEQ ID NO: 914426
cugcgcuucuucccugaca

SEQ ID NO: 1003057 - RNA, 19 nt, Artificial Sequence
  Description of Artificial Sequence: Synthetic oligonucleotide
  Antisense strand to SEQ ID NO: 1003056
ugucagggaagaagcgcag

SEQ ID NO: 1003058 - RNA, 19 nt, Artificial Sequence
  Description of Artificial Sequence: Synthetic oligonucleotide
  Sense strand starting at position 75 of SEQ ID NO: 914426
gcgcuucuucccugacagu

SEQ ID NO: 1003059 - RNA, 19 nt, Artificial Sequence
  Description of Artificial Sequence: Synthetic oligonucleotide
  Antisense strand to SEQ ID NO: 1003058
acugucagggaagaagcgc

SEQ ID NO: 1003060 - RNA, 19 nt, Artificial Sequence
  Description of Artificial Sequence: Synthetic oligonucleotide
  Sense strand starting at position 174 of SEQ ID NO: 914426
acaaauaguucuggcuaua

SEQ ID NO: 1003061 - RNA, 19 nt, Artificial Sequence
  Description of Artificial Sequence: Synthetic oligonucleotide
  Antisense strand to SEQ ID NO: 1003060
uauagccagaacuauuugu

SEQ ID NO: 1003062 - RNA, 19 nt, Artificial Sequence
  Description of Artificial Sequence: Synthetic oligonucleotide
  Sense strand starting at position 177 of SEQ ID NO: 914426
aauaguucuggcuauagaa

SEQ ID NO: 1003063 - RNA, 19 nt, Artificial Sequence
  Description of Artificial Sequence: Synthetic oligonucleotide
  Antisense strand to SEQ ID NO: 1003062
uucuauagccagaacuauu

SEQ ID NO: 1003064 - RNA, 19 nt, Artificial Sequence
  Description of Artificial Sequence: Synthetic oligonucleotide
  Sense strand starting at position 897 of SEQ ID NO: 914426
gaaaguaauuaaugggaug

SEQ ID NO: 1003065 - RNA, 19 nt, Artificial Sequence
  Description of Artificial Sequence: Synthetic oligonucleotide
  Antisense strand to SEQ ID NO: 1003064
caucccauuaauuacuuuc

SEQ ID NO: 1003066 - RNA, 19 nt, Artificial Sequence
  Description of Artificial Sequence: Synthetic oligonucleotide
  Sense strand starting at position 900 of SEQ ID NO: 914426
aguaauuaaugggauggga

SEQ ID NO: 1003067 - RNA, 19 nt, Artificial Sequence
  Description of Artificial Sequence: Synthetic oligonucleotide
  Antisense strand to SEQ ID NO: 1003066
ucccaucccauuaauuacu

SEQ ID NO: 1003068 - RNA, 19 nt, Artificial Sequence
  Description of Artificial Sequence: Synthetic oligonucleotide
  Sense strand starting at position 914 of SEQ ID NO: 914426
ugggaacucuuccucaaga

SEQ ID NO: 1003069 - RNA, 19 nt, Artificial Sequence
  Description of Artificial Sequence: Synthetic oligonucleotide
  Antisense strand to SEQ ID NO: 1003068
ucuugaggaagaguuccca

SEQ ID NO: 1003070 - RNA, 19 nt, Artificial Sequence
  Description of Artificial Sequence: Synthetic oligonucleotide
  Sense strand starting at position 915 of SEQ ID NO: 914426
gggaacucuuccucaagac

SEQ ID NO: 1003071 - RNA, 19 nt, Artificial Sequence
  Description of Artificial Sequence: Synthetic oligonucleotide
  Antisense strand to SEQ ID NO: 1003070
gucuugaggaagaguuccc

SEQ ID NO: 1003072 - RNA, 19 nt, Artificial Sequence
  Description of Artificial Sequence: Synthetic oligonucleotide
  Sense strand starting at position 942 of SEQ ID NO: 914426
ccuugaaacuuacaaguga

SEQ ID NO: 1003073 - RNA, 19 nt, Artificial Sequence
  Description of Artificial Sequence: Synthetic oligonucleotide
  Antisense strand to SEQ ID NO: 1003072
ucacuuguaaguuucaagg

SEQ ID NO: 1003074 - RNA, 19 nt, Artificial Sequence
  Description of Artificial Sequence: Synthetic oligonucleotide
  Sense strand starting at position 1057 of SEQ ID NO: 914426
gugaauguauaacauuacu

SEQ ID NO: 1003075 - RNA, 19 nt, Artificial Sequence
  Description of Artificial Sequence: Synthetic oligonucleotide
  Antisense strand to SEQ ID NO: 1003074
aguaauguuauacauucac

SEQ ID NO: 1003076 - RNA, 19 nt, Artificial Sequence
  Description of Artificial Sequence: Synthetic oligonucleotide
  Sense strand starting at position 1063 of SEQ ID NO: 914426
guauaacauuacuuggaga

SEQ ID NO: 1003077 - RNA, 19 nt, Artificial Sequence
  Description of Artificial Sequence: Synthetic oligonucleotide
  Antisense strand to SEQ ID NO: 1003076
ucuccaaguaauguuauac

SEQ ID NO: 1003078 - RNA, 19 nt, Artificial Sequence
  Description of Artificial Sequence: Synthetic oligonucleotide
  Sense strand starting at position 1410 of SEQ ID NO: 914426
cggcuuuccugagauucuu

SEQ ID NO: 1003079 - RNA, 19 nt, Artificial Sequence
  Description of Artificial Sequence: Synthetic oligonucleotide
  Antisense strand to SEQ ID NO: 1003078
aagaaucucaggaaagccg

SEQ ID NO: 1003080 - RNA, 19 nt, Artificial Sequence
  Description of Artificial Sequence: Synthetic oligonucleotide
  Sense strand starting at position 1416 of SEQ ID NO: 914426
uccugagauucuuaacaga

SEQ ID NO: 1003081 - RNA, 19 nt, Artificial Sequence
  Description of Artificial Sequence: Synthetic oligonucleotide
  Antisense strand to SEQ ID NO: 1003080
ucuguuaagaaucucagga

SEQ ID NO: 1003082 - RNA, 19 nt, Artificial Sequence
  Description of Artificial Sequence: Synthetic oligonucleotide
  Sense strand starting at position 1419 of SEQ ID NO: 914426
ugagauucuuaacagaauc

SEQ ID NO: 1003083 - RNA, 19 nt, Artificial Sequence
  Description of Artificial Sequence: Synthetic oligonucleotide
  Antisense strand to SEQ ID NO: 1003082
gauucuguuaagaaucuca

SEQ ID NO: 1003084 - RNA, 19 nt, Artificial Sequence
  Description of Artificial Sequence: Synthetic oligonucleotide
  Sense strand starting at position 1446 of SEQ ID NO: 914426
aaagaaagguugucugcua

SEQ ID NO: 1003085 - RNA, 19 nt, Artificial Sequence
  Description of Artificial Sequence: Synthetic oligonucleotide
  Antisense strand to SEQ ID NO: 1003084
uagcagacaaccuuucuuu

SEQ ID NO: 1003086 - RNA, 19 nt, Artificial Sequence
  Description of Artificial Sequence: Synthetic oligonucleotide
  Sense strand starting at position 1453 of SEQ ID NO: 914426
gguugucugcuacagguau

SEQ ID NO: 1003087 - RNA, 19 nt, Artificial Sequence
  Description of Artificial Sequence: Synthetic oligonucleotide
  Antisense strand to SEQ ID NO: 1003086
auaccuguagcagacaacc

SEQ ID NO: 1003088 - RNA, 19 nt, Artificial Sequence
  Description of Artificial Sequence: Synthetic oligonucleotide
  Sense strand starting at position 1460 of SEQ ID NO: 914426
ugcuacagguauugugaga

SEQ ID NO: 1003089 - RNA, 19 nt, Artificial Sequence
  Description of Artificial Sequence: Synthetic oligonucleotide
  Antisense strand to SEQ ID NO: 1003088
ucucacaauaccuguagca

SEQ ID NO: 1003090 - RNA, 19 nt, Artificial Sequence
  Description of Artificial Sequence: Synthetic oligonucleotide
  Sense strand starting at position 1465 of SEQ ID NO: 914426
cagguauugugagaggcua

SEQ ID NO: 1003091 - RNA, 19 nt, Artificial Sequence
  Description of Artificial Sequence: Synthetic oligonucleotide
  Antisense strand to SEQ ID NO: 1003090
uagccucucacaauaccug

SEQ ID NO: 1003092 - RNA, 19 nt, Artificial Sequence
  Description of Artificial Sequence: Synthetic oligonucleotide
  Sense strand starting at position 1467 of SEQ ID NO: 914426
gguauugugagaggcuauc

SEQ ID NO: 1003093 - RNA, 19 nt, Artificial Sequence
  Description of Artificial Sequence: Synthetic oligonucleotide
  Antisense strand to SEQ ID NO: 1003092
gauagccucucacaauacc

SEQ ID NO: 1003094 - RNA, 19 nt, Artificial Sequence
  Description of Artificial Sequence: Synthetic oligonucleotide
  Sense strand starting at position 1657 of SEQ ID NO: 914426
gugaucagcccuuggucua

SEQ ID NO: 1003095 - RNA, 19 nt, Artificial Sequence
  Description of Artificial Sequence: Synthetic oligonucleotide
  Antisense strand to SEQ ID NO: 1003094
uagaccaagggcugaucac

SEQ ID NO: 1003096 - RNA, 19 nt, Artificial Sequence
  Description of Artificial Sequence: Synthetic oligonucleotide
  Sense strand starting at position 1658 of SEQ ID NO: 914426
ugaucagcccuuggucuau

SEQ ID NO: 1003097 - RNA, 19 nt, Artificial Sequence
  Description of Artificial Sequence: Synthetic oligonucleotide
  Antisense strand to SEQ ID NO: 1003096
auagaccaagggcugauca

SEQ ID NO: 1003098 - RNA, 19 nt, Artificial Sequence
  Description of Artificial Sequence: Synthetic oligonucleotide
  Sense strand starting at position 1842 of SEQ ID NO: 914426
gaucccaucucgugcgaga

SEQ ID NO: 1003099 - RNA, 19 nt, Artificial Sequence
  Description of Artificial Sequence: Synthetic oligonucleotide
  Antisense strand to SEQ ID NO: 1003098
ucucgcacgagaugggauc

SEQ ID NO: 1003100 - RNA, 19 nt, Artificial Sequence
  Description of Artificial Sequence: Synthetic oligonucleotide
  Sense strand starting at position 1844 of SEQ ID NO: 914426
ucccaucucgugcgagaua

SEQ ID NO: 1003101 - RNA, 19 nt, Artificial Sequence
  Description of Artificial Sequence: Synthetic oligonucleotide
  Antisense strand to SEQ ID NO: 1003100
uaucucgcacgagauggga

SEQ ID NO: 1003102 - RNA, 19 nt, Artificial Sequence
  Description of Artificial Sequence: Synthetic oligonucleotide
  Sense strand starting at position 1845 of SEQ ID NO: 914426
cccaucucgugcgagauaa

SEQ ID NO: 1003103 - RNA, 19 nt, Artificial Sequence
  Description of Artificial Sequence: Synthetic oligonucleotide
  Antisense strand to SEQ ID NO: 1003102
uuaucucgcacgagauggg

SEQ ID NO: 1003104 - RNA, 19 nt, Artificial Sequence
  Description of Artificial Sequence: Synthetic oligonucleotide
  Sense strand starting at position 2051 of SEQ ID NO: 914426
ggcggguccucgggcuaua

SEQ ID NO: 1003105 - RNA, 19 nt, Artificial Sequence
  Description of Artificial Sequence: Synthetic oligonucleotide
  Antisense strand to SEQ ID NO: 1003104
uauagcccgaggacccgcc

SEQ ID NO: 1003106 - RNA, 19 nt, Artificial Sequence
  Description of Artificial Sequence: Synthetic oligonucleotide
  Sense strand starting at position 2052 of SEQ ID NO: 914426
gcggguccucgggcuauau

SEQ ID NO: 1003107 - RNA, 19 nt, Artificial Sequence
  Description of Artificial Sequence: Synthetic oligonucleotide
  Antisense strand to SEQ ID NO: 1003106
auauagcccgaggacccgc

SEQ ID NO: 1003108 - RNA, 19 nt, Artificial Sequence
  Description of Artificial Sequence: Synthetic oligonucleotide
  Sense strand starting at position 2054 of SEQ ID NO: 914426
ggguccucgggcuauauaa

SEQ ID NO: 1003109 - RNA, 19 nt, Artificial Sequence
  Description of Artificial Sequence: Synthetic oligonucleotide
  Antisense strand to SEQ ID NO: 1003108
uuauauagcccgaggaccc

SEQ ID NO: 1003110 - RNA, 19 nt, Artificial Sequence
  Description of Artificial Sequence: Synthetic oligonucleotide
  Sense strand starting at position 2106 of SEQ ID NO: 914426
guggugagcuaguaagugu

SEQ ID NO: 1003111 - RNA, 19 nt, Artificial Sequence
  Description of Artificial Sequence: Synthetic oligonucleotide
  Antisense strand to SEQ ID NO: 1003110
acacuuacuagcucaccac

SEQ ID NO: 1003112 - RNA, 19 nt, Artificial Sequence
  Description of Artificial Sequence: Synthetic oligonucleotide
  Sense strand starting at position 2787 of SEQ ID NO: 914426
agguggguuccucgugagu

SEQ ID NO: 1003113 - RNA, 19 nt, Artificial Sequence
  Description of Artificial Sequence: Synthetic oligonucleotide
  Antisense strand to SEQ ID NO: 1003112
acucacgaggaacccaccu

SEQ ID NO: 1003114 - RNA, 19 nt, Artificial Sequence
  Description of Artificial Sequence: Synthetic oligonucleotide
  Sense strand starting at position 2789 of SEQ ID NO: 914426
guggguuccucgugaguca

SEQ ID NO: 1003115 - RNA, 19 nt, Artificial Sequence
  Description of Artificial Sequence: Synthetic oligonucleotide
  Antisense strand to SEQ ID NO: 1003114
ugacucacgaggaacccac

SEQ ID NO: 1003116 - RNA, 19 nt, Artificial Sequence
  Description of Artificial Sequence: Synthetic oligonucleotide
  Sense strand starting at position 2809 of SEQ ID NO: 914426
gaguguagucccugaaauu

SEQ ID NO: 1003117 - RNA, 19 nt, Artificial Sequence
  Description of Artificial Sequence: Synthetic oligonucleotide
  Antisense strand to SEQ ID NO: 1003116
aauuucagggacuacacuc

SEQ ID NO: 1003118 - RNA, 19 nt, Artificial Sequence
  Description of Artificial Sequence: Synthetic oligonucleotide
  Sense strand starting at position 2810 of SEQ ID NO: 914426
aguguagucccugaaauug

SEQ ID NO: 1003119 - RNA, 19 nt, Artificial Sequence
  Description of Artificial Sequence: Synthetic oligonucleotide
  Antisense strand to SEQ ID NO: 1003118
caauuucagggacuacacu

SEQ ID NO: 1003120 - RNA, 19 nt, Artificial Sequence
  Description of Artificial Sequence: Synthetic oligonucleotide
  Sense strand starting at position 2820 of SEQ ID NO: 914426
cugaaauugugauucucaa

SEQ ID NO: 1003121 - RNA, 19 nt, Artificial Sequence
  Description of Artificial Sequence: Synthetic oligonucleotide
  Antisense strand to SEQ ID NO: 1003120
uugagaaucacaauuucag

SEQ ID NO: 1003122 - RNA, 19 nt, Artificial Sequence
  Description of Artificial Sequence: Synthetic oligonucleotide
  Sense strand starting at position 2983 of SEQ ID NO: 914426
gcacgauggcgccuauagu

SEQ ID NO: 1003123 - RNA, 19 nt, Artificial Sequence
  Description of Artificial Sequence: Synthetic oligonucleotide
  Antisense strand to SEQ ID NO: 1003122
acuauaggcgccaucgugc

SEQ ID NO: 1003124 - RNA, 19 nt, Artificial Sequence
  Description of Artificial Sequence: Synthetic oligonucleotide
  Sense strand starting at position 3041 of SEQ ID NO: 914426
ccaucauugugcuacugua

SEQ ID NO: 1003125 - RNA, 19 nt, Artificial Sequence
  Description of Artificial Sequence: Synthetic oligonucleotide
  Antisense strand to SEQ ID NO: 1003124
uacaguagcacaaugaugg

SEQ ID NO: 1003126 - RNA, 19 nt, Artificial Sequence
  Description of Artificial Sequence: Synthetic oligonucleotide
  Sense strand starting at position 79 of SEQ ID NO: 914427
caguucuugacguaagggu

SEQ ID NO: 1003127 - RNA, 19 nt, Artificial Sequence
  Description of Artificial Sequence: Synthetic oligonucleotide
  Antisense strand to SEQ ID NO: 1003126
acccuuacgucaagaacug

SEQ ID NO: 1003128 - RNA, 19 nt, Artificial Sequence
  Description of Artificial Sequence: Synthetic oligonucleotide
  Sense strand starting at position 120 of SEQ ID NO: 914427
cccugagagcuuggugaag

SEQ ID NO: 1003129 - RNA, 19 nt, Artificial Sequence
  Description of Artificial Sequence: Synthetic oligonucleotide
  Antisense strand to SEQ ID NO: 1003128
cuucaccaagcucucaggg

SEQ ID NO: 1003130 - RNA, 19 nt, Artificial Sequence
  Description of Artificial Sequence: Synthetic oligonucleotide
  Sense strand starting at position 131 of SEQ ID NO: 914427
uggugaaggcacugcuuaa

SEQ ID NO: 1003131 - RNA, 19 nt, Artificial Sequence
  Description of Artificial Sequence: Synthetic oligonucleotide
  Antisense strand to SEQ ID NO: 1003130
uuaagcagugccuucacca

SEQ ID NO: 1003132 - RNA, 19 nt, Artificial Sequence
  Description of Artificial Sequence: Synthetic oligonucleotide
  Sense strand starting at position 155 of SEQ ID NO: 914427
aggagucacucucugaugu

SEQ ID NO: 1003133 - RNA, 19 nt, Artificial Sequence
  Description of Artificial Sequence: Synthetic oligonucleotide
  Antisense strand to SEQ ID NO: 1003132
acaucagagagugacuccu

SEQ ID NO: 1003134 - RNA, 19 nt, Artificial Sequence
  Description of Artificial Sequence: Synthetic oligonucleotide
  Sense strand starting at position 156 of SEQ ID NO: 914427
ggagucacucucugaugua

SEQ ID NO: 1003135 - RNA, 19 nt, Artificial Sequence
  Description of Artificial Sequence: Synthetic oligonucleotide
  Antisense strand to SEQ ID NO: 1003134
uacaucagagagugacucc

SEQ ID NO: 1003136 - RNA, 19 nt, Artificial Sequence
  Description of Artificial Sequence: Synthetic oligonucleotide
  Sense strand starting at position 278 of SEQ ID NO: 914427
ugggaugugggcugcuuua

SEQ ID NO: 1003137 - RNA, 19 nt, Artificial Sequence
  Description of Artificial Sequence: Synthetic oligonucleotide
  Antisense strand to SEQ ID NO: 1003136
uaaagcagcccacauccca

SEQ ID NO: 1003138 - RNA, 19 nt, Artificial Sequence
  Description of Artificial Sequence: Synthetic oligonucleotide
  Sense strand starting at position 313 of SEQ ID NO: 914427
uguagcucugugucucuua

SEQ ID NO: 1003139 - RNA, 19 nt, Artificial Sequence
  Description of Artificial Sequence: Synthetic oligonucleotide
  Antisense strand to SEQ ID NO: 1003138
uaagagacacagagcuaca

SEQ ID NO: 1003140 - RNA, 19 nt, Artificial Sequence
  Description of Artificial Sequence: Synthetic oligonucleotide
  Sense strand starting at position 355 of SEQ ID NO: 914427
aggguugucagguguagau

SEQ ID NO: 1003141 - RNA, 19 nt, Artificial Sequence
  Description of Artificial Sequence: Synthetic oligonucleotide
  Antisense strand to SEQ ID NO: 1003140
aucuacaccugacaacccu

SEQ ID NO: 1003142 - RNA, 19 nt, Artificial Sequence
  Description of Artificial Sequence: Synthetic oligonucleotide
  Sense strand starting at position 357 of SEQ ID NO: 914427
gguugucagguguagaugu

SEQ ID NO: 1003143 - RNA, 19 nt, Artificial Sequence
  Description of Artificial Sequence: Synthetic oligonucleotide
  Antisense strand to SEQ ID NO: 1003142
acaucuacaccugacaacc

SEQ ID NO: 1003144 - RNA, 19 nt, Artificial Sequence
  Description of Artificial Sequence: Synthetic oligonucleotide
  Sense strand starting at position 389 of SEQ ID NO: 914427
gcuagaaucuagcucacac

SEQ ID NO: 1003145 - RNA, 19 nt, Artificial Sequence
  Description of Artificial Sequence: Synthetic oligonucleotide
  Antisense strand to SEQ ID NO: 1003144
gugugagcuagauucuagc

SEQ ID NO: 1003146 - RNA, 19 nt, Artificial Sequence
  Description of Artificial Sequence: Synthetic oligonucleotide
  Sense strand starting at position 400 of SEQ ID NO: 914427
gcucacacuccacauguua

SEQ ID NO: 1003147 - RNA, 19 nt, Artificial Sequence
  Description of Artificial Sequence: Synthetic oligonucleotide
  Antisense strand to SEQ ID NO: 1003146
uaacauguggagugugagc

SEQ ID NO: 1003148 - RNA, 19 nt, Artificial Sequence
  Description of Artificial Sequence: Synthetic oligonucleotide
  Sense strand starting at position 431 of SEQ ID NO: 914427
gcguaaaguaugccaccuu

SEQ ID NO: 1003149 - RNA, 19 nt, Artificial Sequence
  Description of Artificial Sequence: Synthetic oligonucleotide
  Antisense strand to SEQ ID NO: 1003148
aagguggcauacuuuacgc

SEQ ID NO: 1003150 - RNA, 19 nt, Artificial Sequence
  Description of Artificial Sequence: Synthetic oligonucleotide
  Sense strand starting at position 533 of SEQ ID NO: 914427
aaagguguccuauggauua

SEQ ID NO: 1003151 - RNA, 19 nt, Artificial Sequence
  Description of Artificial Sequence: Synthetic oligonucleotide
  Antisense strand to SEQ ID NO: 1003150
uaauccauaggacaccuuu

SEQ ID NO: 1003152 - RNA, 19 nt, Artificial Sequence
  Description of Artificial Sequence: Synthetic oligonucleotide
  Sense strand starting at position 535 of SEQ ID NO: 914427
agguguccuauggauuagu

SEQ ID NO: 1003153 - RNA, 19 nt, Artificial Sequence
  Description of Artificial Sequence: Synthetic oligonucleotide
  Antisense strand to SEQ ID NO: 1003152
acuaauccauaggacaccu

SEQ ID NO: 1003154 - RNA, 19 nt, Artificial Sequence
  Description of Artificial Sequence: Synthetic oligonucleotide
  Sense strand starting at position 546 of SEQ ID NO: 914427
ggauuaguuaggugucccu

SEQ ID NO: 1003155 - RNA, 19 nt, Artificial Sequence
  Description of Artificial Sequence: Synthetic oligonucleotide
  Antisense strand to SEQ ID NO: 1003154
agggacaccuaacuaaucc

SEQ ID NO: 1003156 - RNA, 19 nt, Artificial Sequence
  Description of Artificial Sequence: Synthetic oligonucleotide
  Sense strand starting at position 847 of SEQ ID NO: 914427
uuguucugugccucaguuu

SEQ ID NO: 1003157 - RNA, 19 nt, Artificial Sequence
  Description of Artificial Sequence: Synthetic oligonucleotide
  Antisense strand to SEQ ID NO: 1003156
aaacugaggcacagaacaa

SEQ ID NO: 1003158 - RNA, 19 nt, Artificial Sequence
  Description of Artificial Sequence: Synthetic oligonucleotide
  Sense strand starting at position 848 of SEQ ID NO: 914427
uguucugugccucaguuua

SEQ ID NO: 1003159 - RNA, 19 nt, Artificial Sequence
  Description of Artificial Sequence: Synthetic oligonucleotide
  Antisense strand to SEQ ID NO: 1003158
uaaacugaggcacagaaca

SEQ ID NO: 1003160 - RNA, 19 nt, Artificial Sequence
  Description of Artificial Sequence: Synthetic oligonucleotide
  Sense strand starting at position 1251 of SEQ ID NO: 914427
gaaggaaauggcuguuccu

SEQ ID NO: 1003161 - RNA, 19 nt, Artificial Sequence
  Description of Artificial Sequence: Synthetic oligonucleotide
  Antisense strand to SEQ ID NO: 1003160
aggaacagccauuuccuuc

SEQ ID NO: 1003162 - RNA, 19 nt, Artificial Sequence
  Description of Artificial Sequence: Synthetic oligonucleotide
  Sense strand starting at position 2115 of SEQ ID NO: 914427
cugugaccuccuuagagcu

SEQ ID NO: 1003163 - RNA, 19 nt, Artificial Sequence
  Description of Artificial Sequence: Synthetic oligonucleotide
  Antisense strand to SEQ ID NO: 1003162
agcucuaaggaggucacag

SEQ ID NO: 1003164 - RNA, 19 nt, Artificial Sequence
  Description of Artificial Sequence: Synthetic oligonucleotide
  Sense strand starting at position 2150 of SEQ ID NO: 914427
gagagcaggcaucauuaau

SEQ ID NO: 1003165 - RNA, 19 nt, Artificial Sequence
  Description of Artificial Sequence: Synthetic oligonucleotide
  Antisense strand to SEQ ID NO: 1003164
auuaaugaugccugcucuc

SEQ ID NO: 1003166 - RNA, 19 nt, Artificial Sequence
  Description of Artificial Sequence: Synthetic oligonucleotide
  Sense strand starting at position 2161 of SEQ ID NO: 914427
ucauuaaucugagcaguug

SEQ ID NO: 1003167 - RNA, 19 nt, Artificial Sequence
  Description of Artificial Sequence: Synthetic oligonucleotide
  Antisense strand to SEQ ID NO: 1003166
caacugcucagauuaauga

SEQ ID NO: 1003168 - RNA, 19 nt, Artificial Sequence
  Description of Artificial Sequence: Synthetic oligonucleotide
  Sense strand starting at position 2311 of SEQ ID NO: 914427
gacaguggaaggugagauu

SEQ ID NO: 1003169 - RNA, 19 nt, Artificial Sequence
  Description of Artificial Sequence: Synthetic oligonucleotide
  Antisense strand to SEQ ID NO: 1003168
aaucucaccuuccacuguc

SEQ ID NO: 1003170 - RNA, 19 nt, Artificial Sequence
  Description of Artificial Sequence: Synthetic oligonucleotide
  Sense strand starting at position 2397 of SEQ ID NO: 914427
gggucaauguugccaguaa

SEQ ID NO: 1003171 - RNA, 19 nt, Artificial Sequence
  Description of Artificial Sequence: Synthetic oligonucleotide
  Antisense strand to SEQ ID NO: 1003170
uuacuggcaacauugaccc

SEQ ID NO: 1003172 - RNA, 19 nt, Artificial Sequence
  Description of Artificial Sequence: Synthetic oligonucleotide
  Sense strand starting at position 2401 of SEQ ID NO: 914427
caauguugccaguaaagga

SEQ ID NO: 1003173 - RNA, 19 nt, Artificial Sequence
  Description of Artificial Sequence: Synthetic oligonucleotide
  Antisense strand to SEQ ID NO: 1003172
uccuuuacuggcaacauug

SEQ ID NO: 1003174 - RNA, 19 nt, Artificial Sequence
  Description of Artificial Sequence: Synthetic oligonucleotide
  Sense strand starting at position 2732 of SEQ ID NO: 914427
cggucuucccaugguaaua

SEQ ID NO: 1003175 - RNA, 19 nt, Artificial Sequence
  Description of Artificial Sequence: Synthetic oligonucleotide
  Antisense strand to SEQ ID NO: 1003174
uauuaccaugggaagaccg

SEQ ID NO: 1003176 - RNA, 19 nt, Artificial Sequence
  Description of Artificial Sequence: Synthetic oligonucleotide
  Sense strand starting at position 2908 of SEQ ID NO: 914427
uuugaagagcucuacuuuc

SEQ ID NO: 1003177 - RNA, 19 nt, Artificial Sequence
  Description of Artificial Sequence: Synthetic oligonucleotide
  Antisense strand to SEQ ID NO: 1003176
gaaaguagagcucuucaaa

SEQ ID NO: 1003178 - RNA, 19 nt, Artificial Sequence
  Description of Artificial Sequence: Synthetic oligonucleotide
  Sense strand starting at position 3107 of SEQ ID NO: 914427
auuugucucuaggaagaug

SEQ ID NO: 1003179 - RNA, 19 nt, Artificial Sequence
  Description of Artificial Sequence: Synthetic oligonucleotide
  Antisense strand to SEQ ID NO: 1003178
caucuuccuagagacaaau

SEQ ID NO: 1003180 - RNA, 19 nt, Artificial Sequence
  Description of Artificial Sequence: Synthetic oligonucleotide
  Sense strand starting at position 3121 of SEQ ID NO: 914427
agauguugguagaggugau

SEQ ID NO: 1003181 - RNA, 19 nt, Artificial Sequence
  Description of Artificial Sequence: Synthetic oligonucleotide
  Antisense strand to SEQ ID NO: 1003180
aucaccucuaccaacaucu

SEQ ID NO: 1003182 - RNA, 19 nt, Artificial Sequence
  Description of Artificial Sequence: Synthetic oligonucleotide
  Sense strand starting at position 3122 of SEQ ID NO: 914427
gauguugguagaggugauu

SEQ ID NO: 1003183 - RNA, 19 nt, Artificial Sequence
  Description of Artificial Sequence: Synthetic oligonucleotide
  Antisense strand to SEQ ID NO: 1003182
aaucaccucuaccaacauc

SEQ ID NO: 1003184 - RNA, 19 nt, Artificial Sequence
  Description of Artificial Sequence: Synthetic oligonucleotide
  Sense strand starting at position 3152 of SEQ ID NO: 914427
aaggguguuaggugaauga

SEQ ID NO: 1003185 - RNA, 19 nt, Artificial Sequence
  Description of Artificial Sequence: Synthetic oligonucleotide
  Antisense strand to SEQ ID NO: 1003184
ucauucaccuaacacccuu

SEQ ID NO: 1003186 - RNA, 19 nt, Artificial Sequence
  Description of Artificial Sequence: Synthetic oligonucleotide
  Sense strand starting at position 3156 of SEQ ID NO: 914427
guguuaggugaaugaugga

SEQ ID NO: 1003187 - RNA, 19 nt, Artificial Sequence
  Description of Artificial Sequence: Synthetic oligonucleotide
  Antisense strand to SEQ ID NO: 1003186
uccaucauucaccuaacac

SEQ ID NO: 1003188 - RNA, 19 nt, Artificial Sequence
  Description of Artificial Sequence: Synthetic oligonucleotide
  Sense strand starting at position 3181 of SEQ ID NO: 914427
uaacgaauaugugccagaa

SEQ ID NO: 1003189 - RNA, 19 nt, Artificial Sequence
  Description of Artificial Sequence: Synthetic oligonucleotide
  Antisense strand to SEQ ID NO: 1003188
uucuggcacauauucguua

SEQ ID NO: 1003190 - RNA, 19 nt, Artificial Sequence
  Description of Artificial Sequence: Synthetic oligonucleotide
  Sense strand starting at position 3238 of SEQ ID NO: 914427
gaggguauuuggugacaga

SEQ ID NO: 1003191 - RNA, 19 nt, Artificial Sequence
  Description of Artificial Sequence: Synthetic oligonucleotide
  Antisense strand to SEQ ID NO: 1003190
ucugucaccaaauacccuc

SEQ ID NO: 1003192 - RNA, 19 nt, Artificial Sequence
  Description of Artificial Sequence: Synthetic oligonucleotide
  Sense strand starting at position 3268 of SEQ ID NO: 914427
cugucuagcccuugucaga

SEQ ID NO: 1003193 - RNA, 19 nt, Artificial Sequence
  Description of Artificial Sequence: Synthetic oligonucleotide
  Antisense strand to SEQ ID NO: 1003192
ucugacaagggcuagacag

SEQ ID NO: 1003194 - RNA, 19 nt, Artificial Sequence
  Description of Artificial Sequence: Synthetic oligonucleotide
  Sense strand starting at position 3478 of SEQ ID NO: 914427
ugcucuccugagggugauu

SEQ ID NO: 1003195 - RNA, 19 nt, Artificial Sequence
  Description of Artificial Sequence: Synthetic oligonucleotide
  Antisense strand to SEQ ID NO: 1003194
aaucacccucaggagagca

SEQ ID NO: 1003196 - RNA, 19 nt, Artificial Sequence
  Description of Artificial Sequence: Synthetic oligonucleotide
  Sense strand starting at position 3483 of SEQ ID NO: 914427
uccugagggugauuccaau

SEQ ID NO: 1003197 - RNA, 19 nt, Artificial Sequence
  Description of Artificial Sequence: Synthetic oligonucleotide
  Antisense strand to SEQ ID NO: 1003196
auuggaaucacccucagga

SEQ ID NO: 1003198 - RNA, 19 nt, Artificial Sequence
  Description of Artificial Sequence: Synthetic oligonucleotide
  Sense strand starting at position 3490 of SEQ ID NO: 914427
ggugauuccaaugguggga

SEQ ID NO: 1003199 - RNA, 19 nt, Artificial Sequence
  Description of Artificial Sequence: Synthetic oligonucleotide
  Antisense strand to SEQ ID NO: 1003198
ucccaccauuggaaucacc

SEQ ID NO: 1003200 - RNA, 19 nt, Artificial Sequence
  Description of Artificial Sequence: Synthetic oligonucleotide
  Sense strand starting at position 3524 of SEQ ID NO: 914427
gaagguauauuauaggaua

SEQ ID NO: 1003201 - RNA, 19 nt, Artificial Sequence
  Description of Artificial Sequence: Synthetic oligonucleotide
  Antisense strand to SEQ ID NO: 1003200
uauccuauaauauaccuuc

SEQ ID NO: 1003202 - RNA, 19 nt, Artificial Sequence
  Description of Artificial Sequence: Synthetic oligonucleotide
  Sense strand starting at position 3614 of SEQ ID NO: 914427
agaagugaggguugaggua

SEQ ID NO: 1003203 - RNA, 19 nt, Artificial Sequence
  Description of Artificial Sequence: Synthetic oligonucleotide
  Antisense strand to SEQ ID NO: 1003202
uaccucaacccucacuucu

SEQ ID NO: 1003204 - RNA, 19 nt, Artificial Sequence
  Description of Artificial Sequence: Synthetic oligonucleotide
  Sense strand starting at position 3807 of SEQ ID NO: 914427
aagcccuaggcugguuaua

SEQ ID NO: 1003205 - RNA, 19 nt, Artificial Sequence
  Description of Artificial Sequence: Synthetic oligonucleotide
  Antisense strand to SEQ ID NO: 1003204
uauaaccagccuagggcuu

SEQ ID NO: 1003206 - RNA, 19 nt, Artificial Sequence
  Description of Artificial Sequence: Synthetic oligonucleotide
  Sense strand starting at position 55 of SEQ ID NO: 914428
guaggaggguucuuagguu

SEQ ID NO: 1003207 - RNA, 19 nt, Artificial Sequence
  Description of Artificial Sequence: Synthetic oligonucleotide
  Antisense strand to SEQ ID NO: 1003206
aaccuaagaacccuccuac

SEQ ID NO: 1003208 - RNA, 19 nt, Artificial Sequence
  Description of Artificial Sequence: Synthetic oligonucleotide
  Sense strand starting at position 59 of SEQ ID NO: 914428
gaggguucuuagguuuauu

SEQ ID NO: 1003209 - RNA, 19 nt, Artificial Sequence
  Description of Artificial Sequence: Synthetic oligonucleotide
  Antisense strand to SEQ ID NO: 1003208
aauaaaccuaagaacccuc

SEQ ID NO: 1003210 - RNA, 19 nt, Artificial Sequence
  Description of Artificial Sequence: Synthetic oligonucleotide
  Sense strand starting at position 68 of SEQ ID NO: 914428
uagguuuauugagugaucu

SEQ ID NO: 1003211 - RNA, 19 nt, Artificial Sequence
  Description of Artificial Sequence: Synthetic oligonucleotide
  Antisense strand to SEQ ID NO: 1003210
agaucacucaauaaaccua

SEQ ID NO: 1003212 - RNA, 19 nt, Artificial Sequence
  Description of Artificial Sequence: Synthetic oligonucleotide
  Sense strand starting at position 69 of SEQ ID NO: 914428
agguuuauugagugaucuc

SEQ ID NO: 1003213 - RNA, 19 nt, Artificial Sequence
  Description of Artificial Sequence: Synthetic oligonucleotide
  Antisense strand to SEQ ID NO: 1003212
gagaucacucaauaaaccu

SEQ ID NO: 1003214 - RNA, 19 nt, Artificial Sequence
  Description of Artificial Sequence: Synthetic oligonucleotide
  Sense strand starting at position 70 of SEQ ID NO: 914428
gguuuauugagugaucucu

SEQ ID NO: 1003215 - RNA, 19 nt, Artificial Sequence
  Description of Artificial Sequence: Synthetic oligonucleotide
  Antisense strand to SEQ ID NO: 1003214
agagaucacucaauaaacc

SEQ ID NO: 1003216 - RNA, 19 nt, Artificial Sequence
  Description of Artificial Sequence: Synthetic oligonucleotide
  Sense strand starting at position 72 of SEQ ID NO: 914428
uuuauugagugaucucuga

SEQ ID NO: 1003217 - RNA, 19 nt, Artificial Sequence
  Description of Artificial Sequence: Synthetic oligonucleotide
  Antisense strand to SEQ ID NO: 1003216
ucagagaucacucaauaaa

SEQ ID NO: 1003218 - RNA, 19 nt, Artificial Sequence
  Description of Artificial Sequence: Synthetic oligonucleotide
  Sense strand starting at position 76 of SEQ ID NO: 914428
uugagugaucucugagaaa

SEQ ID NO: 1003219 - RNA, 19 nt, Artificial Sequence
  Description of Artificial Sequence: Synthetic oligonucleotide
  Antisense strand to SEQ ID NO: 1003218
uuucucagagaucacucaa

SEQ ID NO: 1003220 - RNA, 19 nt, Artificial Sequence
  Description of Artificial Sequence: Synthetic oligonucleotide
  Sense strand starting at position 226 of SEQ ID NO: 914428
ucuggucuugggcagaaau

SEQ ID NO: 1003221 - RNA, 19 nt, Artificial Sequence
  Description of Artificial Sequence: Synthetic oligonucleotide
  Antisense strand to SEQ ID NO: 1003220
auuucugcccaagaccaga

SEQ ID NO: 1003222 - RNA, 19 nt, Artificial Sequence
  Description of Artificial Sequence: Synthetic oligonucleotide
  Sense strand starting at position 475 of SEQ ID NO: 914428
gucggaguacaccagaaau

SEQ ID NO: 1003223 - RNA, 19 nt, Artificial Sequence
  Description of Artificial Sequence: Synthetic oligonucleotide
  Antisense strand to SEQ ID NO: 1003222
auuucugguguacuccgac

SEQ ID NO: 1003224 - RNA, 19 nt, Artificial Sequence
  Description of Artificial Sequence: Synthetic oligonucleotide
  Sense strand starting at position 510 of SEQ ID NO: 914428
cugucuugaugcuggcaua

SEQ ID NO: 1003225 - RNA, 19 nt, Artificial Sequence
  Description of Artificial Sequence: Synthetic oligonucleotide
  Antisense strand to SEQ ID NO: 1003224
uaugccagcaucaagacag

SEQ ID NO: 1003226 - RNA, 19 nt, Artificial Sequence
  Description of Artificial Sequence: Synthetic oligonucleotide
  Sense strand starting at position 513 of SEQ ID NO: 914428
ucuugaugcuggcauagau

SEQ ID NO: 1003227 - RNA, 19 nt, Artificial Sequence
  Description of Artificial Sequence: Synthetic oligonucleotide
  Antisense strand to SEQ ID NO: 1003226
aucuaugccagcaucaaga

SEQ ID NO: 1003228 - RNA, 19 nt, Artificial Sequence
  Description of Artificial Sequence: Synthetic oligonucleotide
  Sense strand starting at position 522 of SEQ ID NO: 914428
uggcauagaugccaaugua

SEQ ID NO: 1003229 - RNA, 19 nt, Artificial Sequence
  Description of Artificial Sequence: Synthetic oligonucleotide
  Antisense strand to SEQ ID NO: 1003228
uacauuggcaucuaugcca

SEQ ID NO: 1003230 - RNA, 19 nt, Artificial Sequence
  Description of Artificial Sequence: Synthetic oligonucleotide
  Sense strand starting at position 525 of SEQ ID NO: 914428
cauagaugccaauguaguc

SEQ ID NO: 1003231 - RNA, 19 nt, Artificial Sequence
  Description of Artificial Sequence: Synthetic oligonucleotide
  Antisense strand to SEQ ID NO: 1003230
gacuacauuggcaucuaug

SEQ ID NO: 1003232 - RNA, 19 nt, Artificial Sequence
  Description of Artificial Sequence: Synthetic oligonucleotide
  Sense strand starting at position 651 of SEQ ID NO: 914428
aggcaauggauucgccauu

SEQ ID NO: 1003233 - RNA, 19 nt, Artificial Sequence
  Description of Artificial Sequence: Synthetic oligonucleotide
  Antisense strand to SEQ ID NO: 1003232
aauggcgaauccauugccu

SEQ ID NO: 1003234 - RNA, 19 nt, Artificial Sequence
  Description of Artificial Sequence: Synthetic oligonucleotide
  Sense strand starting at position 758 of SEQ ID NO: 914428
ccggugacggcgucguaau

SEQ ID NO: 1003235 - RNA, 19 nt, Artificial Sequence
  Description of Artificial Sequence: Synthetic oligonucleotide
  Antisense strand to SEQ ID NO: 1003234
auuacgacgccgucaccgg

SEQ ID NO: 1003236 - RNA, 19 nt, Artificial Sequence
  Description of Artificial Sequence: Synthetic oligonucleotide
  Sense strand starting at position 770 of SEQ ID NO: 914428
ucguaaugucccugcucgu

SEQ ID NO: 1003237 - RNA, 19 nt, Artificial Sequence
  Description of Artificial Sequence: Synthetic oligonucleotide
  Antisense strand to SEQ ID NO: 1003236
acgagcagggacauuacga

SEQ ID NO: 1003238 - RNA, 19 nt, Artificial Sequence
  Description of Artificial Sequence: Synthetic oligonucleotide
  Sense strand starting at position 771 of SEQ ID NO: 914428
cguaaugucccugcucguu

SEQ ID NO: 1003239 - RNA, 19 nt, Artificial Sequence
  Description of Artificial Sequence: Synthetic oligonucleotide
  Antisense strand to SEQ ID NO: 1003238
aacgagcagggacauuacg

SEQ ID NO: 1003240 - RNA, 19 nt, Artificial Sequence
  Description of Artificial Sequence: Synthetic oligonucleotide
  Sense strand starting at position 1959 of SEQ ID NO: 914428
ccgcuuuccuccucccaga

SEQ ID NO: 1003241 - RNA, 19 nt, Artificial Sequence
  Description of Artificial Sequence: Synthetic oligonucleotide
  Antisense strand to SEQ ID NO: 1003240
ucugggaggaggaaagcgg

SEQ ID NO: 1003242 - RNA, 19 nt, Artificial Sequence
  Description of Artificial Sequence: Synthetic oligonucleotide
  Sense strand starting at position 2021 of SEQ ID NO: 914428
ccgggaaauagcugggaaa

SEQ ID NO: 1003243 - RNA, 19 nt, Artificial Sequence
  Description of Artificial Sequence: Synthetic oligonucleotide
  Antisense strand to SEQ ID NO: 1003242
uuucccagcuauuucccgg

SEQ ID NO: 1003244 - RNA, 19 nt, Artificial Sequence
  Description of Artificial Sequence: Synthetic oligonucleotide
  Sense strand starting at position 2022 of SEQ ID NO: 914428
cgggaaauagcugggaaau

SEQ ID NO: 1003245 - RNA, 19 nt, Artificial Sequence
  Description of Artificial Sequence: Synthetic oligonucleotide
  Antisense strand to SEQ ID NO: 1003244
auuucccagcuauuucccg

SEQ ID NO: 1003246 - RNA, 19 nt, Artificial Sequence
  Description of Artificial Sequence: Synthetic oligonucleotide
  Sense strand starting at position 2024 of SEQ ID NO: 914428
ggaaauagcugggaaauaa

SEQ ID NO: 1003247 - RNA, 19 nt, Artificial Sequence
  Description of Artificial Sequence: Synthetic oligonucleotide
  Antisense strand to SEQ ID NO: 1003246
uuauuucccagcuauuucc

SEQ ID NO: 1003248 - RNA, 19 nt, Artificial Sequence
  Description of Artificial Sequence: Synthetic oligonucleotide
  Sense strand starting at position 2035 of SEQ ID NO: 914428
ggaaauaacucgugguguc

SEQ ID NO: 1003249 - RNA, 19 nt, Artificial Sequence
  Description of Artificial Sequence: Synthetic oligonucleotide
  Antisense strand to SEQ ID NO: 1003248
gacaccacgaguuauuucc

SEQ ID NO: 1003250 - RNA, 19 nt, Artificial Sequence
  Description of Artificial Sequence: Synthetic oligonucleotide
  Sense strand starting at position 2119 of SEQ ID NO: 914428
gaggcagaacuucgagaga

SEQ ID NO: 1003251 - RNA, 19 nt, Artificial Sequence
  Description of Artificial Sequence: Synthetic oligonucleotide
  Antisense strand to SEQ ID NO: 1003250
ucucucgaaguucugccuc

SEQ ID NO: 1003252 - RNA, 19 nt, Artificial Sequence
  Description of Artificial Sequence: Synthetic oligonucleotide
  Sense strand starting at position 2248 of SEQ ID NO: 914428
gagaguucuagaggcagac

SEQ ID NO: 1003253 - RNA, 19 nt, Artificial Sequence
  Description of Artificial Sequence: Synthetic oligonucleotide
  Antisense strand to SEQ ID NO: 1003252
gucugccucuagaacucuc

SEQ ID NO: 1003254 - RNA, 19 nt, Artificial Sequence
  Description of Artificial Sequence: Synthetic oligonucleotide
  Sense strand starting at position 2309 of SEQ ID NO: 914428
ugaauagaugcucaguaca

SEQ ID NO: 1003255 - RNA, 19 nt, Artificial Sequence
  Description of Artificial Sequence: Synthetic oligonucleotide
  Antisense strand to SEQ ID NO: 1003254
uguacugagcaucuauuca

SEQ ID NO: 1003256 - RNA, 19 nt, Artificial Sequence
  Description of Artificial Sequence: Synthetic oligonucleotide
  Sense strand starting at position 2410 of SEQ ID NO: 914428
gggaaguggucucgauugu

SEQ ID NO: 1003257 - RNA, 19 nt, Artificial Sequence
  Description of Artificial Sequence: Synthetic oligonucleotide
  Antisense strand to SEQ ID NO: 1003256
acaaucgagaccacuuccc

SEQ ID NO: 1003258 - RNA, 19 nt, Artificial Sequence
  Description of Artificial Sequence: Synthetic oligonucleotide
  Sense strand starting at position 2411 of SEQ ID NO: 914428
ggaaguggucucgauuguc

SEQ ID NO: 1003259 - RNA, 19 nt, Artificial Sequence
  Description of Artificial Sequence: Synthetic oligonucleotide
  Antisense strand to SEQ ID NO: 1003258
gacaaucgagaccacuucc

SEQ ID NO: 1003260 - RNA, 19 nt, Artificial Sequence
  Description of Artificial Sequence: Synthetic oligonucleotide
  Sense strand starting at position 2419 of SEQ ID NO: 914428
ucucgauuguccgguggca

SEQ ID NO: 1003261 - RNA, 19 nt, Artificial Sequence
  Description of Artificial Sequence: Synthetic oligonucleotide
  Antisense strand to SEQ ID NO: 1003260
ugccaccggacaaucgaga

SEQ ID NO: 1003262 - RNA, 19 nt, Artificial Sequence
  Description of Artificial Sequence: Synthetic oligonucleotide
  Sense strand starting at position 2421 of SEQ ID NO: 914428
ucgauuguccgguggcaca

SEQ ID NO: 1003263 - RNA, 19 nt, Artificial Sequence
  Description of Artificial Sequence: Synthetic oligonucleotide
  Antisense strand to SEQ ID NO: 1003262
ugugccaccggacaaucga

SEQ ID NO: 1003264 - RNA, 19 nt, Artificial Sequence
  Description of Artificial Sequence: Synthetic oligonucleotide
  Sense strand starting at position 3185 of SEQ ID NO: 914428
guguguacauggguccaau

SEQ ID NO: 1003265 - RNA, 19 nt, Artificial Sequence
  Description of Artificial Sequence: Synthetic oligonucleotide
  Antisense strand to SEQ ID NO: 1003264
auuggacccauguacacac

SEQ ID NO: 1003266 - RNA, 19 nt, Artificial Sequence
  Description of Artificial Sequence: Synthetic oligonucleotide
  Sense strand starting at position 3319 of SEQ ID NO: 914428
gcaggcacgucuuuaaucu

SEQ ID NO: 1003267 - RNA, 19 nt, Artificial Sequence
  Description of Artificial Sequence: Synthetic oligonucleotide
  Antisense strand to SEQ ID NO: 1003266
agauuaaagacgugccugc

SEQ ID NO: 1003268 - RNA, 19 nt, Artificial Sequence
  Description of Artificial Sequence: Synthetic oligonucleotide
  Sense strand starting at position 3326 of SEQ ID NO: 914428
cgucuuuaaucucagggaa

SEQ ID NO: 1003269 - RNA, 19 nt, Artificial Sequence
  Description of Artificial Sequence: Synthetic oligonucleotide
  Antisense strand to SEQ ID NO: 1003268
uucccugagauuaaagacg

SEQ ID NO: 1003270 - RNA, 19 nt, Artificial Sequence
  Description of Artificial Sequence: Synthetic oligonucleotide
  Sense strand starting at position 3328 of SEQ ID NO: 914428
ucuuuaaucucagggaaca

SEQ ID NO: 1003271 - RNA, 19 nt, Artificial Sequence
  Description of Artificial Sequence: Synthetic oligonucleotide
  Antisense strand to SEQ ID NO: 1003270
uguucccugagauuaaaga

SEQ ID NO: 1003272 - RNA, 19 nt, Artificial Sequence
  Description of Artificial Sequence: Synthetic oligonucleotide
  Sense strand starting at position 3329 of SEQ ID NO: 914428
cuuuaaucucagggaacau

SEQ ID NO: 1003273 - RNA, 19 nt, Artificial Sequence
  Description of Artificial Sequence: Synthetic oligonucleotide
  Antisense strand to SEQ ID NO: 1003272
auguucccugagauuaaag

SEQ ID NO: 1003274 - RNA, 19 nt, Artificial Sequence
  Description of Artificial Sequence: Synthetic oligonucleotide
  Sense strand starting at position 3515 of SEQ ID NO: 914428
gggugacacucaguacuau

SEQ ID NO: 1003275 - RNA, 19 nt, Artificial Sequence
  Description of Artificial Sequence: Synthetic oligonucleotide
  Antisense strand to SEQ ID NO: 1003274
auaguacugagugucaccc

SEQ ID NO: 1003276 - RNA, 19 nt, Artificial Sequence
  Description of Artificial Sequence: Synthetic oligonucleotide
  Sense strand starting at position 3516 of SEQ ID NO: 914428
ggugacacucaguacuauu

SEQ ID NO: 1003277 - RNA, 19 nt, Artificial Sequence
  Description of Artificial Sequence: Synthetic oligonucleotide
  Antisense strand to SEQ ID NO: 1003276
aauaguacugagugucacc

SEQ ID NO: 1003278 - RNA, 19 nt, Artificial Sequence
  Description of Artificial Sequence: Synthetic oligonucleotide
  Sense strand starting at position 3548 of SEQ ID NO: 914428
gacugucuuccaggacucu

SEQ ID NO: 1003279 - RNA, 19 nt, Artificial Sequence
  Description of Artificial Sequence: Synthetic oligonucleotide
  Antisense strand to SEQ ID NO: 1003278
agaguccuggaagacaguc

SEQ ID NO: 1003280 - RNA, 19 nt, Artificial Sequence
  Description of Artificial Sequence: Synthetic oligonucleotide
  Sense strand starting at position 3738 of SEQ ID NO: 914428
gcaguugucaucgcugcca

SEQ ID NO: 1003281 - RNA, 19 nt, Artificial Sequence
  Description of Artificial Sequence: Synthetic oligonucleotide
  Antisense strand to SEQ ID NO: 1003280
uggcagcgaugacaacugc

SEQ ID NO: 1003282 - RNA, 19 nt, Artificial Sequence
  Description of Artificial Sequence: Synthetic oligonucleotide
  Sense strand starting at position 3762 of SEQ ID NO: 914428
gcagucucuccacauguca

SEQ ID NO: 1003283 - RNA, 19 nt, Artificial Sequence
  Description of Artificial Sequence: Synthetic oligonucleotide
  Antisense strand to SEQ ID NO: 1003282
ugacauguggagagacugc

SEQ ID NO: 1003284 - RNA, 19 nt, Artificial Sequence
  Description of Artificial Sequence: Synthetic oligonucleotide
  Sense strand starting at position 40 of SEQ ID NO: 914429
ggcagaugagcuggucaca

SEQ ID NO: 1003285 - RNA, 19 nt, Artificial Sequence
  Description of Artificial Sequence: Synthetic oligonucleotide
  Antisense strand to SEQ ID NO: 1003284
ugugaccagcucaucugcc

SEQ ID NO: 1003286 - RNA, 19 nt, Artificial Sequence
  Description of Artificial Sequence: Synthetic oligonucleotide
  Sense strand starting at position 495 of SEQ ID NO: 914429
cugcacauuuauccuugua

SEQ ID NO: 1003287 - RNA, 19 nt, Artificial Sequence
  Description of Artificial Sequence: Synthetic oligonucleotide
  Antisense strand to SEQ ID NO: 1003286
uacaaggauaaaugugcag

SEQ ID NO: 1003288 - RNA, 19 nt, Artificial Sequence
  Description of Artificial Sequence: Synthetic oligonucleotide
  Sense strand starting at position 536 of SEQ ID NO: 914429
gcaggagauccauguuaca

SEQ ID NO: 1003289 - RNA, 19 nt, Artificial Sequence
  Description of Artificial Sequence: Synthetic oligonucleotide
  Antisense strand to SEQ ID NO: 1003288
uguaacauggaucuccugc

SEQ ID NO: 1003290 - RNA, 19 nt, Artificial Sequence
  Description of Artificial Sequence: Synthetic oligonucleotide
  Sense strand starting at position 630 of SEQ ID NO: 914429
gaggucuagucucucaauu

SEQ ID NO: 1003291 - RNA, 19 nt, Artificial Sequence
  Description of Artificial Sequence: Synthetic oligonucleotide
  Antisense strand to SEQ ID NO: 1003290
aauugagagacuagaccuc

SEQ ID NO: 1003292 - RNA, 19 nt, Artificial Sequence
  Description of Artificial Sequence: Synthetic oligonucleotide
  Sense strand starting at position 643 of SEQ ID NO: 914429
ucaauuucuuccucgguua

SEQ ID NO: 1003293 - RNA, 19 nt, Artificial Sequence
  Description of Artificial Sequence: Synthetic oligonucleotide
  Antisense strand to SEQ ID NO: 1003292
uaaccgaggaagaaauuga

SEQ ID NO: 1003294 - RNA, 19 nt, Artificial Sequence
  Description of Artificial Sequence: Synthetic oligonucleotide
  Sense strand starting at position 683 of SEQ ID NO: 914429
ugauucugcucuuuagaua

SEQ ID NO: 1003295 - RNA, 19 nt, Artificial Sequence
  Description of Artificial Sequence: Synthetic oligonucleotide
  Antisense strand to SEQ ID NO: 1003294
uaucuaaagagcagaauca

SEQ ID NO: 1003296 - RNA, 19 nt, Artificial Sequence
  Description of Artificial Sequence: Synthetic oligonucleotide
  Sense strand starting at position 684 of SEQ ID NO: 914429
gauucugcucuuuagauag

SEQ ID NO: 1003297 - RNA, 19 nt, Artificial Sequence
  Description of Artificial Sequence: Synthetic oligonucleotide
  Antisense strand to SEQ ID NO: 1003296
cuaucuaaagagcagaauc

SEQ ID NO: 1003298 - RNA, 19 nt, Artificial Sequence
  Description of Artificial Sequence: Synthetic oligonucleotide
  Sense strand starting at position 694 of SEQ ID NO: 914429
uuuagauagugguucagga

SEQ ID NO: 1003299 - RNA, 19 nt, Artificial Sequence
  Description of Artificial Sequence: Synthetic oligonucleotide
  Antisense strand to SEQ ID NO: 1003298
uccugaaccacuaucuaaa

SEQ ID NO: 1003300 - RNA, 19 nt, Artificial Sequence
  Description of Artificial Sequence: Synthetic oligonucleotide
  Sense strand starting at position 775 of SEQ ID NO: 914429
agaguuccaagcgaucaaa

SEQ ID NO: 1003301 - RNA, 19 nt, Artificial Sequence
  Description of Artificial Sequence: Synthetic oligonucleotide
  Antisense strand to SEQ ID NO: 1003300
uuugaucgcuuggaacucu

SEQ ID NO: 1003302 - RNA, 19 nt, Artificial Sequence
  Description of Artificial Sequence: Synthetic oligonucleotide
  Sense strand starting at position 830 of SEQ ID NO: 914429
gaucuugagcuguauugca

SEQ ID NO: 1003303 - RNA, 19 nt, Artificial Sequence
  Description of Artificial Sequence: Synthetic oligonucleotide
  Antisense strand to SEQ ID NO: 1003302
ugcaauacagcucaagauc

SEQ ID NO: 1003304 - RNA, 19 nt, Artificial Sequence
  Description of Artificial Sequence: Synthetic oligonucleotide
  Sense strand starting at position 962 of SEQ ID NO: 914429
ugcagagauggagguuaga

SEQ ID NO: 1003305 - RNA, 19 nt, Artificial Sequence
  Description of Artificial Sequence: Synthetic oligonucleotide
  Antisense strand to SEQ ID NO: 1003304
ucuaaccuccaucucugca

SEQ ID NO: 1003306 - RNA, 19 nt, Artificial Sequence
  Description of Artificial Sequence: Synthetic oligonucleotide
  Sense strand starting at position 1000 of SEQ ID NO: 914429
ugagguccuuuauucucaa

SEQ ID NO: 1003307 - RNA, 19 nt, Artificial Sequence
  Description of Artificial Sequence: Synthetic oligonucleotide
  Antisense strand to SEQ ID NO: 1003306
uugagaauaaaggaccuca

SEQ ID NO: 1003308 - RNA, 19 nt, Artificial Sequence
  Description of Artificial Sequence: Synthetic oligonucleotide
  Sense strand starting at position 1003 of SEQ ID NO: 914429
gguccuuuauucucaaggu

SEQ ID NO: 1003309 - RNA, 19 nt, Artificial Sequence
  Description of Artificial Sequence: Synthetic oligonucleotide
  Antisense strand to SEQ ID NO: 1003308
accuugagaauaaaggacc

SEQ ID NO: 1003310 - RNA, 19 nt, Artificial Sequence
  Description of Artificial Sequence: Synthetic oligonucleotide
  Sense strand starting at position 1064 of SEQ ID NO: 914429
ggcccuucucccggaagau

SEQ ID NO: 1003311 - RNA, 19 nt, Artificial Sequence
  Description of Artificial Sequence: Synthetic oligonucleotide
  Antisense strand to SEQ ID NO: 1003310
aucuuccgggagaagggcc

SEQ ID NO: 1003312 - RNA, 19 nt, Artificial Sequence
  Description of Artificial Sequence: Synthetic oligonucleotide
  Sense strand starting at position 1065 of SEQ ID NO: 914429
gcccuucucccggaagauc

SEQ ID NO: 1003313 - RNA, 19 nt, Artificial Sequence
  Description of Artificial Sequence: Synthetic oligonucleotide
  Antisense strand to SEQ ID NO: 1003312
gaucuuccgggagaagggc

SEQ ID NO: 1003314 - RNA, 19 nt, Artificial Sequence
  Description of Artificial Sequence: Synthetic oligonucleotide
  Sense strand starting at position 1624 of SEQ ID NO: 914429
gcuggcauccucugggaaa

SEQ ID NO: 1003315 - RNA, 19 nt, Artificial Sequence
  Description of Artificial Sequence: Synthetic oligonucleotide
  Antisense strand to SEQ ID NO: 1003314
uuucccagaggaugccagc

SEQ ID NO: 1003316 - RNA, 19 nt, Artificial Sequence
  Description of Artificial Sequence: Synthetic oligonucleotide
  Sense strand starting at position 1753 of SEQ ID NO: 914429
gggucuuaggagcacgauu

SEQ ID NO: 1003317 - RNA, 19 nt, Artificial Sequence
  Description of Artificial Sequence: Synthetic oligonucleotide
  Antisense strand to SEQ ID NO: 1003316
aaucgugcuccuaagaccc

SEQ ID NO: 1003318 - RNA, 19 nt, Artificial Sequence
  Description of Artificial Sequence: Synthetic oligonucleotide
  Sense strand starting at position 2071 of SEQ ID NO: 914429
acgaaauggucccuuaauc

SEQ ID NO: 1003319 - RNA, 19 nt, Artificial Sequence
  Description of Artificial Sequence: Synthetic oligonucleotide
  Antisense strand to SEQ ID NO: 1003318
gauuaagggaccauuucgu

SEQ ID NO: 1003320 - RNA, 19 nt, Artificial Sequence
  Description of Artificial Sequence: Synthetic oligonucleotide
  Sense strand starting at position 2274 of SEQ ID NO: 914429
agagaaguugcaggcagaa

SEQ ID NO: 1003321 - RNA, 19 nt, Artificial Sequence
  Description of Artificial Sequence: Synthetic oligonucleotide
  Antisense strand to SEQ ID NO: 1003320
uucugccugcaacuucucu

SEQ ID NO: 1003322 - RNA, 19 nt, Artificial Sequence
  Description of Artificial Sequence: Synthetic oligonucleotide
  Sense strand starting at position 2296 of SEQ ID NO: 914429
agccuuagguggucugaga

SEQ ID NO: 1003323 - RNA, 19 nt, Artificial Sequence
  Description of Artificial Sequence: Synthetic oligonucleotide
  Antisense strand to SEQ ID NO: 1003322
ucucagaccaccuaaggcu

SEQ ID NO: 1003324 - RNA, 19 nt, Artificial Sequence
  Description of Artificial Sequence: Synthetic oligonucleotide
  Sense strand starting at position 2425 of SEQ ID NO: 914429
cggugugaccaggacaaga

SEQ ID NO: 1003325 - RNA, 19 nt, Artificial Sequence
  Description of Artificial Sequence: Synthetic oligonucleotide
  Antisense strand to SEQ ID NO: 1003324
ucuuguccuggucacaccg

SEQ ID NO: 1003326 - RNA, 19 nt, Artificial Sequence
  Description of Artificial Sequence: Synthetic oligonucleotide
  Sense strand starting at position 2579 of SEQ ID NO: 914429
gcuguugcacaguaggaaa

SEQ ID NO: 1003327 - RNA, 19 nt, Artificial Sequence
  Description of Artificial Sequence: Synthetic oligonucleotide
  Antisense strand to SEQ ID NO: 1003326
uuuccuacugugcaacagc

SEQ ID NO: 1003328 - RNA, 19 nt, Artificial Sequence
  Description of Artificial Sequence: Synthetic oligonucleotide
  Sense strand starting at position 2676 of SEQ ID NO: 914429
ugcuguccucagggagaaa

SEQ ID NO: 1003329 - RNA, 19 nt, Artificial Sequence
  Description of Artificial Sequence: Synthetic oligonucleotide
  Antisense strand to SEQ ID NO: 1003328
uuucucccugaggacagca

SEQ ID NO: 1003330 - RNA, 19 nt, Artificial Sequence
  Description of Artificial Sequence: Synthetic oligonucleotide
  Sense strand starting at position 2699 of SEQ ID NO: 914429
agggauugguaaucuguuu

SEQ ID NO: 1003331 - RNA, 19 nt, Artificial Sequence
  Description of Artificial Sequence: Synthetic oligonucleotide
  Antisense strand to SEQ ID NO: 1003330
aaacagauuaccaaucccu

SEQ ID NO: 1003332 - RNA, 19 nt, Artificial Sequence
  Description of Artificial Sequence: Synthetic oligonucleotide
  Sense strand starting at position 2727 of SEQ ID NO: 914429
caugcuuaggcugagaguu

SEQ ID NO: 1003333 - RNA, 19 nt, Artificial Sequence
  Description of Artificial Sequence: Synthetic oligonucleotide
  Antisense strand to SEQ ID NO: 1003332
aacucucagccuaagcaug

SEQ ID NO: 1003334 - RNA, 19 nt, Artificial Sequence
  Description of Artificial Sequence: Synthetic oligonucleotide
  Sense strand starting at position 2765 of SEQ ID NO: 914429
gagagagccucauauuucu

SEQ ID NO: 1003335 - RNA, 19 nt, Artificial Sequence
  Description of Artificial Sequence: Synthetic oligonucleotide
  Antisense strand to SEQ ID NO: 1003334
agaaauaugaggcucucuc

SEQ ID NO: 1003336 - RNA, 19 nt, Artificial Sequence
  Description of Artificial Sequence: Synthetic oligonucleotide
  Sense strand starting at position 2795 of SEQ ID NO: 914429
guagaaugucugggcaaga

SEQ ID NO: 1003337 - RNA, 19 nt, Artificial Sequence
  Description of Artificial Sequence: Synthetic oligonucleotide
  Antisense strand to SEQ ID NO: 1003336
ucuugcccagacauucuac

SEQ ID NO: 1003338 - RNA, 19 nt, Artificial Sequence
  Description of Artificial Sequence: Synthetic oligonucleotide
  Sense strand starting at position 2796 of SEQ ID NO: 914429
uagaaugucugggcaagag

SEQ ID NO: 1003339 - RNA, 19 nt, Artificial Sequence
  Description of Artificial Sequence: Synthetic oligonucleotide
  Antisense strand to SEQ ID NO: 1003338
cucuugcccagacauucua

SEQ ID NO: 1003340 - RNA, 19 nt, Artificial Sequence
  Description of Artificial Sequence: Synthetic oligonucleotide
  Sense strand starting at position 3198 of SEQ ID NO: 914429
agcuguuuccuagacccuu

SEQ ID NO: 1003341 - RNA, 19 nt, Artificial Sequence
  Description of Artificial Sequence: Synthetic oligonucleotide
  Antisense strand to SEQ ID NO: 1003340
aagggucuaggaaacagcu

SEQ ID NO: 1003342 - RNA, 19 nt, Artificial Sequence
  Description of Artificial Sequence: Synthetic oligonucleotide
  Sense strand starting at position 3204 of SEQ ID NO: 914429
uuccuagacccuuggaagu

SEQ ID NO: 1003343 - RNA, 19 nt, Artificial Sequence
  Description of Artificial Sequence: Synthetic oligonucleotide
  Antisense strand to SEQ ID NO: 1003342
acuuccaagggucuaggaa

SEQ ID NO: 1003344 - RNA, 19 nt, Artificial Sequence
  Description of Artificial Sequence: Synthetic oligonucleotide
  Sense strand starting at position 3228 of SEQ ID NO: 914429
gguacauggucuuuaggga

SEQ ID NO: 1003345 - RNA, 19 nt, Artificial Sequence
  Description of Artificial Sequence: Synthetic oligonucleotide
  Antisense strand to SEQ ID NO: 1003344
ucccuaaagaccauguacc

SEQ ID NO: 1003346 - RNA, 19 nt, Artificial Sequence
  Description of Artificial Sequence: Synthetic oligonucleotide
  Sense strand starting at position 3229 of SEQ ID NO: 914429
guacauggucuuuagggaa

SEQ ID NO: 1003347 - RNA, 19 nt, Artificial Sequence
  Description of Artificial Sequence: Synthetic oligonucleotide
  Antisense strand to SEQ ID NO: 1003346
uucccuaaagaccauguac

SEQ ID NO: 1003348 - RNA, 19 nt, Artificial Sequence
  Description of Artificial Sequence: Synthetic oligonucleotide
  Sense strand starting at position 3316 of SEQ ID NO: 914429
cuucucauucuggguggau

SEQ ID NO: 1003349 - RNA, 19 nt, Artificial Sequence
  Description of Artificial Sequence: Synthetic oligonucleotide
  Antisense strand to SEQ ID NO: 1003348
auccacccagaaugagaag

SEQ ID NO: 1003350 - RNA, 19 nt, Artificial Sequence
  Description of Artificial Sequence: Synthetic oligonucleotide
  Sense strand starting at position 3318 of SEQ ID NO: 914429
ucucauucuggguggauca

SEQ ID NO: 1003351 - RNA, 19 nt, Artificial Sequence
  Description of Artificial Sequence: Synthetic oligonucleotide
  Antisense strand to SEQ ID NO: 1003350
ugauccacccagaaugaga

SEQ ID NO: 1003352 - RNA, 19 nt, Artificial Sequence
  Description of Artificial Sequence: Synthetic oligonucleotide
  Sense strand starting at position 3319 of SEQ ID NO: 914429
cucauucuggguggaucaa

SEQ ID NO: 1003353 - RNA, 19 nt, Artificial Sequence
  Description of Artificial Sequence: Synthetic oligonucleotide
  Antisense strand to SEQ ID NO: 1003352
uugauccacccagaaugag

SEQ ID NO: 1003354 - RNA, 19 nt, Artificial Sequence
  Description of Artificial Sequence: Synthetic oligonucleotide
  Sense strand starting at position 3418 of SEQ ID NO: 914429
gagcuuugagaaugaugag

SEQ ID NO: 1003355 - RNA, 19 nt, Artificial Sequence
  Description of Artificial Sequence: Synthetic oligonucleotide
  Antisense strand to SEQ ID NO: 1003354
cucaucauucucaaagcuc

SEQ ID NO: 1003356 - RNA, 19 nt, Artificial Sequence
  Description of Artificial Sequence: Synthetic oligonucleotide
  Sense strand starting at position 3483 of SEQ ID NO: 914429
cgcugugaucauugagaga

SEQ ID NO: 1003357 - RNA, 19 nt, Artificial Sequence
  Description of Artificial Sequence: Synthetic oligonucleotide
  Antisense strand to SEQ ID NO: 1003356
ucucucaaugaucacagcg

SEQ ID NO: 1003358 - RNA, 19 nt, Artificial Sequence
  Description of Artificial Sequence: Synthetic oligonucleotide
  Sense strand starting at position 3714 of SEQ ID NO: 914429
cuccgugacaugugauaug

SEQ ID NO: 1003359 - RNA, 19 nt, Artificial Sequence
  Description of Artificial Sequence: Synthetic oligonucleotide
  Antisense strand to SEQ ID NO: 1003358
cauaucacaugucacggag

SEQ ID NO: 1003360 - RNA, 19 nt, Artificial Sequence
  Description of Artificial Sequence: Synthetic oligonucleotide
  Sense strand starting at position 3771 of SEQ ID NO: 914429
gccuucuauuaagccagau

SEQ ID NO: 1003361 - RNA, 19 nt, Artificial Sequence
  Description of Artificial Sequence: Synthetic oligonucleotide
  Antisense strand to SEQ ID NO: 1003360
aucuggcuuaauagaaggc

SEQ ID NO: 1003362 - RNA, 19 nt, Artificial Sequence
  Description of Artificial Sequence: Synthetic oligonucleotide
  Sense strand starting at position 3775 of SEQ ID NO: 914429
ucuauuaagccagaugcua

SEQ ID NO: 1003363 - RNA, 19 nt, Artificial Sequence
  Description of Artificial Sequence: Synthetic oligonucleotide
  Antisense strand to SEQ ID NO: 1003362
uagcaucuggcuuaauaga

SEQ ID NO: 1003364 - RNA, 19 nt, Artificial Sequence
  Description of Artificial Sequence: Synthetic oligonucleotide
  Sense strand starting at position 45 of SEQ ID NO: 914430
acagaauuggcuggcaacu

SEQ ID NO: 1003365 - RNA, 19 nt, Artificial Sequence
  Description of Artificial Sequence: Synthetic oligonucleotide
  Antisense strand to SEQ ID NO: 1003364
aguugccagccaauucugu

SEQ ID NO: 1003366 - RNA, 19 nt, Artificial Sequence
  Description of Artificial Sequence: Synthetic oligonucleotide
  Sense strand starting at position 101 of SEQ ID NO: 914430
ggguucauuugcuuggcaa

SEQ ID NO: 1003367 - RNA, 19 nt, Artificial Sequence
  Description of Artificial Sequence: Synthetic oligonucleotide
  Antisense strand to SEQ ID NO: 1003366
uugccaagcaaaugaaccc

SEQ ID NO: 1003368 - RNA, 19 nt, Artificial Sequence
  Description of Artificial Sequence: Synthetic oligonucleotide
  Sense strand starting at position 269 of SEQ ID NO: 914430
gcuucugaccgagggacaa

SEQ ID NO: 1003369 - RNA, 19 nt, Artificial Sequence
  Description of Artificial Sequence: Synthetic oligonucleotide
  Antisense strand to SEQ ID NO: 1003368
uugucccucggucagaagc

SEQ ID NO: 1003370 - RNA, 19 nt, Artificial Sequence
  Description of Artificial Sequence: Synthetic oligonucleotide
  Sense strand starting at position 304 of SEQ ID NO: 914430
gaugaagagguggguucaa

SEQ ID NO: 1003371 - RNA, 19 nt, Artificial Sequence
  Description of Artificial Sequence: Synthetic oligonucleotide
  Antisense strand to SEQ ID NO: 1003370
uugaacccaccucuucauc

SEQ ID NO: 1003372 - RNA, 19 nt, Artificial Sequence
  Description of Artificial Sequence: Synthetic oligonucleotide
  Sense strand starting at position 443 of SEQ ID NO: 914430
aacucauaguggcuggaaa

SEQ ID NO: 1003373 - RNA, 19 nt, Artificial Sequence
  Description of Artificial Sequence: Synthetic oligonucleotide
  Antisense strand to SEQ ID NO: 1003372
uuuccagccacuaugaguu

SEQ ID NO: 1003374 - RNA, 19 nt, Artificial Sequence
  Description of Artificial Sequence: Synthetic oligonucleotide
  Sense strand starting at position 444 of SEQ ID NO: 914430
acucauaguggcuggaaau

SEQ ID NO: 1003375 - RNA, 19 nt, Artificial Sequence
  Description of Artificial Sequence: Synthetic oligonucleotide
  Antisense strand to SEQ ID NO: 1003374
auuuccagccacuaugagu

SEQ ID NO: 1003376 - RNA, 19 nt, Artificial Sequence
  Description of Artificial Sequence: Synthetic oligonucleotide
  Sense strand starting at position 445 of SEQ ID NO: 914430
cucauaguggcuggaaaua

SEQ ID NO: 1003377 - RNA, 19 nt, Artificial Sequence
  Description of Artificial Sequence: Synthetic oligonucleotide
  Antisense strand to SEQ ID NO: 1003376
uauuuccagccacuaugag

SEQ ID NO: 1003378 - RNA, 19 nt, Artificial Sequence
  Description of Artificial Sequence: Synthetic oligonucleotide
  Sense strand starting at position 507 of SEQ ID NO: 914430
agagauugcugggucagga

SEQ ID NO: 1003379 - RNA, 19 nt, Artificial Sequence
  Description of Artificial Sequence: Synthetic oligonucleotide
  Antisense strand to SEQ ID NO: 1003378
uccugacccagcaaucucu

SEQ ID NO: 1003380 - RNA, 19 nt, Artificial Sequence
  Description of Artificial Sequence: Synthetic oligonucleotide
  Sense strand starting at position 654 of SEQ ID NO: 914430
guuugugacugacccucaa

SEQ ID NO: 1003381 - RNA, 19 nt, Artificial Sequence
  Description of Artificial Sequence: Synthetic oligonucleotide
  Antisense strand to SEQ ID NO: 1003380
uugagggucagucacaaac

SEQ ID NO: 1003382 - RNA, 19 nt, Artificial Sequence
  Description of Artificial Sequence: Synthetic oligonucleotide
  Sense strand starting at position 766 of SEQ ID NO: 914430
ggaggagaaggauguguuu

SEQ ID NO: 1003383 - RNA, 19 nt, Artificial Sequence
  Description of Artificial Sequence: Synthetic oligonucleotide
  Antisense strand to SEQ ID NO: 1003382
aaacacauccuucuccucc

SEQ ID NO: 1003384 - RNA, 19 nt, Artificial Sequence
  Description of Artificial Sequence: Synthetic oligonucleotide
  Sense strand starting at position 768 of SEQ ID NO: 914430
aggagaaggauguguuuga

SEQ ID NO: 1003385 - RNA, 19 nt, Artificial Sequence
  Description of Artificial Sequence: Synthetic oligonucleotide
  Antisense strand to SEQ ID NO: 1003384
ucaaacacauccuucuccu

SEQ ID NO: 1003386 - RNA, 19 nt, Artificial Sequence
  Description of Artificial Sequence: Synthetic oligonucleotide
  Sense strand starting at position 769 of SEQ ID NO: 914430
ggagaaggauguguuugac

SEQ ID NO: 1003387 - RNA, 19 nt, Artificial Sequence
  Description of Artificial Sequence: Synthetic oligonucleotide
  Antisense strand to SEQ ID NO: 1003386
gucaaacacauccuucucc

SEQ ID NO: 1003388 - RNA, 19 nt, Artificial Sequence
  Description of Artificial Sequence: Synthetic oligonucleotide
  Sense strand starting at position 772 of SEQ ID NO: 914430
gaaggauguguuugacugu

SEQ ID NO: 1003389 - RNA, 19 nt, Artificial Sequence
  Description of Artificial Sequence: Synthetic oligonucleotide
  Antisense strand to SEQ ID NO: 1003388
acagucaaacacauccuuc

SEQ ID NO: 1003390 - RNA, 19 nt, Artificial Sequence
  Description of Artificial Sequence: Synthetic oligonucleotide
  Sense strand starting at position 893 of SEQ ID NO: 914430
gcaugagaagcaggcaaau

SEQ ID NO: 1003391 - RNA, 19 nt, Artificial Sequence
  Description of Artificial Sequence: Synthetic oligonucleotide
  Antisense strand to SEQ ID NO: 1003390
auuugccugcuucucaugc

SEQ ID NO: 1003392 - RNA, 19 nt, Artificial Sequence
  Description of Artificial Sequence: Synthetic oligonucleotide
  Sense strand starting at position 1041 of SEQ ID NO: 914430
guaccuugcccacagaaau

SEQ ID NO: 1003393 - RNA, 19 nt, Artificial Sequence
  Description of Artificial Sequence: Synthetic oligonucleotide
  Antisense strand to SEQ ID NO: 1003392
auuucugugggcaagguac

SEQ ID NO: 1003394 - RNA, 19 nt, Artificial Sequence
  Description of Artificial Sequence: Synthetic oligonucleotide
  Sense strand starting at position 2408 of SEQ ID NO: 914430
gcgucccucccagauagaa

SEQ ID NO: 1003395 - RNA, 19 nt, Artificial Sequence
  Description of Artificial Sequence: Synthetic oligonucleotide
  Antisense strand to SEQ ID NO: 1003394
uucuaucugggagggacgc

SEQ ID NO: 1003396 - RNA, 19 nt, Artificial Sequence
  Description of Artificial Sequence: Synthetic oligonucleotide
  Sense strand starting at position 2420 of SEQ ID NO: 914430
gauagaagugucuggcaga

SEQ ID NO: 1003397 - RNA, 19 nt, Artificial Sequence
  Description of Artificial Sequence: Synthetic oligonucleotide
  Antisense strand to SEQ ID NO: 1003396
ucugccagacacuucuauc

SEQ ID NO: 1003398 - RNA, 19 nt, Artificial Sequence
  Description of Artificial Sequence: Synthetic oligonucleotide
  Sense strand starting at position 2591 of SEQ ID NO: 914430
agguuuguucuggagauuc

SEQ ID NO: 1003399 - RNA, 19 nt, Artificial Sequence
  Description of Artificial Sequence: Synthetic oligonucleotide
  Antisense strand to SEQ ID NO: 1003398
gaaucuccagaacaaaccu

SEQ ID NO: 1003400 - RNA, 19 nt, Artificial Sequence
  Description of Artificial Sequence: Synthetic oligonucleotide
  Sense strand starting at position 2719 of SEQ ID NO: 914430
guagcacuggacuaucaau

SEQ ID NO: 1003401 - RNA, 19 nt, Artificial Sequence
  Description of Artificial Sequence: Synthetic oligonucleotide
  Antisense strand to SEQ ID NO: 1003400
auugauaguccagugcuac

SEQ ID NO: 1003402 - RNA, 19 nt, Artificial Sequence
  Description of Artificial Sequence: Synthetic oligonucleotide
  Sense strand starting at position 2759 of SEQ ID NO: 914430
ccacucuaaguaugugaua

SEQ ID NO: 1003403 - RNA, 19 nt, Artificial Sequence
  Description of Artificial Sequence: Synthetic oligonucleotide
  Antisense strand to SEQ ID NO: 1003402
uaucacauacuuagagugg

SEQ ID NO: 1003404 - RNA, 19 nt, Artificial Sequence
  Description of Artificial Sequence: Synthetic oligonucleotide
  Sense strand starting at position 2772 of SEQ ID NO: 914430
gugauaucccaacaagcuc

SEQ ID NO: 1003405 - RNA, 19 nt, Artificial Sequence
  Description of Artificial Sequence: Synthetic oligonucleotide
  Antisense strand to SEQ ID NO: 1003404
gagcuuguugggauaucac

SEQ ID NO: 1003406 - RNA, 19 nt, Artificial Sequence
  Description of Artificial Sequence: Synthetic oligonucleotide
  Sense strand starting at position 2891 of SEQ ID NO: 914430
caucaaugcuugcugagga

SEQ ID NO: 1003407 - RNA, 19 nt, Artificial Sequence
  Description of Artificial Sequence: Synthetic oligonucleotide
  Antisense strand to SEQ ID NO: 1003406
uccucagcaagcauugaug

SEQ ID NO: 1003408 - RNA, 19 nt, Artificial Sequence
  Description of Artificial Sequence: Synthetic oligonucleotide
  Sense strand starting at position 3018 of SEQ ID NO: 914430
cuuucuuaaagagguagga

SEQ ID NO: 1003409 - RNA, 19 nt, Artificial Sequence
  Description of Artificial Sequence: Synthetic oligonucleotide
  Antisense strand to SEQ ID NO: 1003408
uccuaccucuuuaagaaag

SEQ ID NO: 1003410 - RNA, 19 nt, Artificial Sequence
  Description of Artificial Sequence: Synthetic oligonucleotide
  Sense strand starting at position 3031 of SEQ ID NO: 914430
guaggauggaaagguguua

SEQ ID NO: 1003411 - RNA, 19 nt, Artificial Sequence
  Description of Artificial Sequence: Synthetic oligonucleotide
  Antisense strand to SEQ ID NO: 1003410
uaacaccuuuccauccuac

SEQ ID NO: 1003412 - RNA, 19 nt, Artificial Sequence
  Description of Artificial Sequence: Synthetic oligonucleotide
  Sense strand starting at position 3068 of SEQ ID NO: 914430
ccaaguaguugucugagga

SEQ ID NO: 1003413 - RNA, 19 nt, Artificial Sequence
  Description of Artificial Sequence: Synthetic oligonucleotide
  Antisense strand to SEQ ID NO: 1003412
uccucagacaacuacuugg

SEQ ID NO: 1003414 - RNA, 19 nt, Artificial Sequence
  Description of Artificial Sequence: Synthetic oligonucleotide
  Sense strand starting at position 3069 of SEQ ID NO: 914430
caaguaguugucugaggaa

SEQ ID NO: 1003415 - RNA, 19 nt, Artificial Sequence
  Description of Artificial Sequence: Synthetic oligonucleotide
  Antisense strand to SEQ ID NO: 1003414
uuccucagacaacuacuug

SEQ ID NO: 1003416 - RNA, 19 nt, Artificial Sequence
  Description of Artificial Sequence: Synthetic oligonucleotide
  Sense strand starting at position 3093 of SEQ ID NO: 914430
acaugagaauaagagaaua

SEQ ID NO: 1003417 - RNA, 19 nt, Artificial Sequence
  Description of Artificial Sequence: Synthetic oligonucleotide
  Antisense strand to SEQ ID NO: 1003416
uauucucuuauucucaugu

SEQ ID NO: 1003418 - RNA, 19 nt, Artificial Sequence
  Description of Artificial Sequence: Synthetic oligonucleotide
  Sense strand starting at position 3173 of SEQ ID NO: 914430
guuugucugagccagagga

SEQ ID NO: 1003419 - RNA, 19 nt, Artificial Sequence
  Description of Artificial Sequence: Synthetic oligonucleotide
  Antisense strand to SEQ ID NO: 1003418
uccucuggcucagacaaac

SEQ ID NO: 1003420 - RNA, 19 nt, Artificial Sequence
  Description of Artificial Sequence: Synthetic oligonucleotide
  Sense strand starting at position 3301 of SEQ ID NO: 914430
cugccaaaucaguggagau

SEQ ID NO: 1003421 - RNA, 19 nt, Artificial Sequence
  Description of Artificial Sequence: Synthetic oligonucleotide
  Antisense strand to SEQ ID NO: 1003420
aucuccacugauuuggcag

SEQ ID NO: 1003422 - RNA, 19 nt, Artificial Sequence
  Description of Artificial Sequence: Synthetic oligonucleotide
  Sense strand starting at position 3302 of SEQ ID NO: 914430
ugccaaaucaguggagauu

SEQ ID NO: 1003423 - RNA, 19 nt, Artificial Sequence
  Description of Artificial Sequence: Synthetic oligonucleotide
  Antisense strand to SEQ ID NO: 1003422
aaucuccacugauuuggca

SEQ ID NO: 1003424 - RNA, 19 nt, Artificial Sequence
  Description of Artificial Sequence: Synthetic oligonucleotide
  Sense strand starting at position 3303 of SEQ ID NO: 914430
gccaaaucaguggagauuc

SEQ ID NO: 1003425 - RNA, 19 nt, Artificial Sequence
  Description of Artificial Sequence: Synthetic oligonucleotide
  Antisense strand to SEQ ID NO: 1003424
gaaucuccacugauuuggc

SEQ ID NO: 1003426 - RNA, 19 nt, Artificial Sequence
  Description of Artificial Sequence: Synthetic oligonucleotide
  Sense strand starting at position 3321 of SEQ ID NO: 914430
ccuagagucuggguuucua

SEQ ID NO: 1003427 - RNA, 19 nt, Artificial Sequence
  Description of Artificial Sequence: Synthetic oligonucleotide
  Antisense strand to SEQ ID NO: 1003426
uagaaacccagacucuagg

SEQ ID NO: 1003428 - RNA, 19 nt, Artificial Sequence
  Description of Artificial Sequence: Synthetic oligonucleotide
  Sense strand starting at position 3325 of SEQ ID NO: 914430
gagucuggguuucuaaucu

SEQ ID NO: 1003429 - RNA, 19 nt, Artificial Sequence
  Description of Artificial Sequence: Synthetic oligonucleotide
  Antisense strand to SEQ ID NO: 1003428
agauuagaaacccagacuc

SEQ ID NO: 1003430 - RNA, 19 nt, Artificial Sequence
  Description of Artificial Sequence: Synthetic oligonucleotide
  Sense strand starting at position 3329 of SEQ ID NO: 914430
cuggguuucuaaucucaaa

SEQ ID NO: 1003431 - RNA, 19 nt, Artificial Sequence
  Description of Artificial Sequence: Synthetic oligonucleotide
  Antisense strand to SEQ ID NO: 1003430
uuugagauuagaaacccag

SEQ ID NO: 1003432 - RNA, 19 nt, Artificial Sequence
  Description of Artificial Sequence: Synthetic oligonucleotide
  Sense strand starting at position 3473 of SEQ ID NO: 914430
gguagaagcuuucccuaug

SEQ ID NO: 1003433 - RNA, 19 nt, Artificial Sequence
  Description of Artificial Sequence: Synthetic oligonucleotide
  Antisense strand to SEQ ID NO: 1003432
cauagggaaagcuucuacc

SEQ ID NO: 1003434 - RNA, 19 nt, Artificial Sequence
  Description of Artificial Sequence: Synthetic oligonucleotide
  Sense strand starting at position 3474 of SEQ ID NO: 914430
guagaagcuuucccuauga

SEQ ID NO: 1003435 - RNA, 19 nt, Artificial Sequence
  Description of Artificial Sequence: Synthetic oligonucleotide
  Antisense strand to SEQ ID NO: 1003434
ucauagggaaagcuucuac

SEQ ID NO: 1003436 - RNA, 19 nt, Artificial Sequence
  Description of Artificial Sequence: Synthetic oligonucleotide
  Sense strand starting at position 3644 of SEQ ID NO: 914430
gagucuaccuaguuacaug

SEQ ID NO: 1003437 - RNA, 19 nt, Artificial Sequence
  Description of Artificial Sequence: Synthetic oligonucleotide
  Antisense strand to SEQ ID NO: 1003436
cauguaacuagguagacuc

SEQ ID NO: 1003438 - RNA, 19 nt, Artificial Sequence
  Description of Artificial Sequence: Synthetic oligonucleotide
  Sense strand starting at position 3656 of SEQ ID NO: 914430
uuacaugagucucccuagu

SEQ ID NO: 1003439 - RNA, 19 nt, Artificial Sequence
  Description of Artificial Sequence: Synthetic oligonucleotide
  Antisense strand to SEQ ID NO: 1003438
acuagggagacucauguaa

SEQ ID NO: 1003440 - RNA, 19 nt, Artificial Sequence
  Description of Artificial Sequence: Synthetic oligonucleotide
  Sense strand starting at position 3658 of SEQ ID NO: 914430
acaugagucucccuaguua

SEQ ID NO: 1003441 - RNA, 19 nt, Artificial Sequence
  Description of Artificial Sequence: Synthetic oligonucleotide
  Antisense strand to SEQ ID NO: 1003440
uaacuagggagacucaugu

SEQ ID NO: 1003442 - RNA, 19 nt, Artificial Sequence
  Description of Artificial Sequence: Synthetic oligonucleotide
  Sense strand starting at position 3744 of SEQ ID NO: 914430
ggugcaguagcgagaucuu

SEQ ID NO: 1003443 - RNA, 19 nt, Artificial Sequence
  Description of Artificial Sequence: Synthetic oligonucleotide
  Antisense strand to SEQ ID NO: 1003442
aagaucucgcuacugcacc

SEQ ID NO: 1003444 - RNA, 19 nt, Artificial Sequence
  Description of Artificial Sequence: Synthetic oligonucleotide
  Sense strand starting at position 88 of SEQ ID NO: 914431
acaaacgauuuagacuaua

SEQ ID NO: 1003445 - RNA, 19 nt, Artificial Sequence
  Description of Artificial Sequence: Synthetic oligonucleotide
  Antisense strand to SEQ ID NO: 1003444
uauagucuaaaucguuugu

SEQ ID NO: 1003446 - RNA, 19 nt, Artificial Sequence
  Description of Artificial Sequence: Synthetic oligonucleotide
  Sense strand starting at position 332 of SEQ ID NO: 914431
cuuuaaugacccugauugu

SEQ ID NO: 1003447 - RNA, 19 nt, Artificial Sequence
  Description of Artificial Sequence: Synthetic oligonucleotide
  Antisense strand to SEQ ID NO: 1003446
acaaucagggucauuaaag

SEQ ID NO: 1003448 - RNA, 19 nt, Artificial Sequence
  Description of Artificial Sequence: Synthetic oligonucleotide
  Sense strand starting at position 451 of SEQ ID NO: 914431
gugguuaugccucaaagaa

SEQ ID NO: 1003449 - RNA, 19 nt, Artificial Sequence
  Description of Artificial Sequence: Synthetic oligonucleotide
  Antisense strand to SEQ ID NO: 1003448
uucuuugaggcauaaccac

SEQ ID NO: 1003450 - RNA, 19 nt, Artificial Sequence
  Description of Artificial Sequence: Synthetic oligonucleotide
  Sense strand starting at position 535 of SEQ ID NO: 914431
gcccucuauaguggagaaa

SEQ ID NO: 1003451 - RNA, 19 nt, Artificial Sequence
  Description of Artificial Sequence: Synthetic oligonucleotide
  Antisense strand to SEQ ID NO: 1003450
uuucuccacuauagagggc

SEQ ID NO: 1003452 - RNA, 19 nt, Artificial Sequence
  Description of Artificial Sequence: Synthetic oligonucleotide
  Sense strand starting at position 597 of SEQ ID NO: 914431
uacacaguuguguauacau

SEQ ID NO: 1003453 - RNA, 19 nt, Artificial Sequence
  Description of Artificial Sequence: Synthetic oligonucleotide
  Antisense strand to SEQ ID NO: 1003452
auguauacacaacugugua

SEQ ID NO: 1003454 - RNA, 19 nt, Artificial Sequence
  Description of Artificial Sequence: Synthetic oligonucleotide
  Sense strand starting at position 645 of SEQ ID NO: 914431
guguauucuguucuaugcu

SEQ ID NO: 1003455 - RNA, 19 nt, Artificial Sequence
  Description of Artificial Sequence: Synthetic oligonucleotide
  Antisense strand to SEQ ID NO: 1003454
agcauagaacagaauacac

SEQ ID NO: 1003456 - RNA, 19 nt, Artificial Sequence
  Description of Artificial Sequence: Synthetic oligonucleotide
  Sense strand starting at position 684 of SEQ ID NO: 914431
ugacuuuccgauuaucaac

SEQ ID NO: 1003457 - RNA, 19 nt, Artificial Sequence
  Description of Artificial Sequence: Synthetic oligonucleotide
  Antisense strand to SEQ ID NO: 1003456
guugauaaucggaaaguca

SEQ ID NO: 1003458 - RNA, 19 nt, Artificial Sequence
  Description of Artificial Sequence: Synthetic oligonucleotide
  Sense strand starting at position 810 of SEQ ID NO: 914431
cuuuaaacagcuuggauaa

SEQ ID NO: 1003459 - RNA, 19 nt, Artificial Sequence
  Description of Artificial Sequence: Synthetic oligonucleotide
  Antisense strand to SEQ ID NO: 1003458
uuauccaagcuguuuaaag

SEQ ID NO: 1003460 - RNA, 19 nt, Artificial Sequence
  Description of Artificial Sequence: Synthetic oligonucleotide
  Sense strand starting at position 829 of SEQ ID NO: 914431
gaguaauucccagauugua

SEQ ID NO: 1003461 - RNA, 19 nt, Artificial Sequence
  Description of Artificial Sequence: Synthetic oligonucleotide
  Antisense strand to SEQ ID NO: 1003460
uacaaucugggaauuacuc

SEQ ID NO: 1003462 - RNA, 19 nt, Artificial Sequence
  Description of Artificial Sequence: Synthetic oligonucleotide
  Sense strand starting at position 965 of SEQ ID NO: 914431
ggcagucuuguagagauuc

SEQ ID NO: 1003463 - RNA, 19 nt, Artificial Sequence
  Description of Artificial Sequence: Synthetic oligonucleotide
  Antisense strand to SEQ ID NO: 1003462
gaaucucuacaagacugcc

SEQ ID NO: 1003464 - RNA, 19 nt, Artificial Sequence
  Description of Artificial Sequence: Synthetic oligonucleotide
  Sense strand starting at position 1277 of SEQ ID NO: 914431
ccgaguccugcuuuguacu

SEQ ID NO: 1003465 - RNA, 19 nt, Artificial Sequence
  Description of Artificial Sequence: Synthetic oligonucleotide
  Antisense strand to SEQ ID NO: 1003464
aguacaaagcaggacucgg

SEQ ID NO: 1003466 - RNA, 19 nt, Artificial Sequence
  Description of Artificial Sequence: Synthetic oligonucleotide
  Sense strand starting at position 1326 of SEQ ID NO: 914431
gugauucuugcccacaauc

SEQ ID NO: 1003467 - RNA, 19 nt, Artificial Sequence
  Description of Artificial Sequence: Synthetic oligonucleotide
  Antisense strand to SEQ ID NO: 1003466
gauugugggcaagaaucac

SEQ ID NO: 1003468 - RNA, 19 nt, Artificial Sequence
  Description of Artificial Sequence: Synthetic oligonucleotide
  Sense strand starting at position 1909 of SEQ ID NO: 914431
cgacucuuccucuaacagu

SEQ ID NO: 1003469 - RNA, 19 nt, Artificial Sequence
  Description of Artificial Sequence: Synthetic oligonucleotide
  Antisense strand to SEQ ID NO: 1003468
acuguuagaggaagagucg

SEQ ID NO: 1003470 - RNA, 19 nt, Artificial Sequence
  Description of Artificial Sequence: Synthetic oligonucleotide
  Sense strand starting at position 1918 of SEQ ID NO: 914431
cucuaacagucuccggaaa

SEQ ID NO: 1003471 - RNA, 19 nt, Artificial Sequence
  Description of Artificial Sequence: Synthetic oligonucleotide
  Antisense strand to SEQ ID NO: 1003470
uuuccggagacuguuagag

SEQ ID NO: 1003472 - RNA, 19 nt, Artificial Sequence
  Description of Artificial Sequence: Synthetic oligonucleotide
  Sense strand starting at position 2671 of SEQ ID NO: 914431
gcgccaagucaauagaaau

SEQ ID NO: 1003473 - RNA, 19 nt, Artificial Sequence
  Description of Artificial Sequence: Synthetic oligonucleotide
  Antisense strand to SEQ ID NO: 1003472
auuucuauugacuuggcgc

SEQ ID NO: 1003474 - RNA, 19 nt, Artificial Sequence
  Description of Artificial Sequence: Synthetic oligonucleotide
  Sense strand starting at position 2806 of SEQ ID NO: 914431
ggaguagaacggugacaaa

SEQ ID NO: 1003475 - RNA, 19 nt, Artificial Sequence
  Description of Artificial Sequence: Synthetic oligonucleotide
  Antisense strand to SEQ ID NO: 1003474
uuugucaccguucuacucc

SEQ ID NO: 1003476 - RNA, 19 nt, Artificial Sequence
  Description of Artificial Sequence: Synthetic oligonucleotide
  Sense strand starting at position 2945 of SEQ ID NO: 914431
uaauaucugcacugugaga

SEQ ID NO: 1003477 - RNA, 19 nt, Artificial Sequence
  Description of Artificial Sequence: Synthetic oligonucleotide
  Antisense strand to SEQ ID NO: 1003476
ucucacagugcagauauua

SEQ ID NO: 1003478 - RNA, 19 nt, Artificial Sequence
  Description of Artificial Sequence: Synthetic oligonucleotide
  Sense strand starting at position 3054 of SEQ ID NO: 914431
agaauucccagagguguaa

SEQ ID NO: 1003479 - RNA, 19 nt, Artificial Sequence
  Description of Artificial Sequence: Synthetic oligonucleotide
  Antisense strand to SEQ ID NO: 1003478
uuacaccucugggaauucu

SEQ ID NO: 1003480 - RNA, 19 nt, Artificial Sequence
  Description of Artificial Sequence: Synthetic oligonucleotide
  Sense strand starting at position 3084 of SEQ ID NO: 914431
gcgaaugagaggugagauu

SEQ ID NO: 1003481 - RNA, 19 nt, Artificial Sequence
  Description of Artificial Sequence: Synthetic oligonucleotide
  Antisense strand to SEQ ID NO: 1003480
aaucucaccucucauucgc

SEQ ID NO: 1003482 - RNA, 19 nt, Artificial Sequence
  Description of Artificial Sequence: Synthetic oligonucleotide
  Sense strand starting at position 3093 of SEQ ID NO: 914431
aggugagauuaggucucuu

SEQ ID NO: 1003483 - RNA, 19 nt, Artificial Sequence
  Description of Artificial Sequence: Synthetic oligonucleotide
  Antisense strand to SEQ ID NO: 1003482
aagagaccuaaucucaccu

SEQ ID NO: 1003484 - RNA, 19 nt, Artificial Sequence
  Description of Artificial Sequence: Synthetic oligonucleotide
  Sense strand starting at position 3097 of SEQ ID NO: 914431
gagauuaggucucuuaagg

SEQ ID NO: 1003485 - RNA, 19 nt, Artificial Sequence
  Description of Artificial Sequence: Synthetic oligonucleotide
  Antisense strand to SEQ ID NO: 1003484
ccuuaagagaccuaaucuc

SEQ ID NO: 1003486 - RNA, 19 nt, Artificial Sequence
  Description of Artificial Sequence: Synthetic oligonucleotide
  Sense strand starting at position 3157 of SEQ ID NO: 914431
agaacauagccacgaagau

SEQ ID NO: 1003487 - RNA, 19 nt, Artificial Sequence
  Description of Artificial Sequence: Synthetic oligonucleotide
  Antisense strand to SEQ ID NO: 1003486
aucuucguggcuauguucu

SEQ ID NO: 1003488 - RNA, 19 nt, Artificial Sequence
  Description of Artificial Sequence: Synthetic oligonucleotide
  Sense strand starting at position 3171 of SEQ ID NO: 914431
aagauuguuaaggguagua

SEQ ID NO: 1003489 - RNA, 19 nt, Artificial Sequence
  Description of Artificial Sequence: Synthetic oligonucleotide
  Antisense strand to SEQ ID NO: 1003488
uacuacccuuaacaaucuu

SEQ ID NO: 1003490 - RNA, 19 nt, Artificial Sequence
  Description of Artificial Sequence: Synthetic oligonucleotide
  Sense strand starting at position 3349 of SEQ ID NO: 914431
auaaauacgguuuggugaa

SEQ ID NO: 1003491 - RNA, 19 nt, Artificial Sequence
  Description of Artificial Sequence: Synthetic oligonucleotide
  Antisense strand to SEQ ID NO: 1003490
uucaccaaaccguauuuau

SEQ ID NO: 1003492 - RNA, 19 nt, Artificial Sequence
  Description of Artificial Sequence: Synthetic oligonucleotide
  Sense strand starting at position 3380 of SEQ ID NO: 914431
aguuguaaggucugggaag

SEQ ID NO: 1003493 - RNA, 19 nt, Artificial Sequence
  Description of Artificial Sequence: Synthetic oligonucleotide
  Antisense strand to SEQ ID NO: 1003492
cuucccagaccuuacaacu

SEQ ID NO: 1003494 - RNA, 19 nt, Artificial Sequence
  Description of Artificial Sequence: Synthetic oligonucleotide
  Sense strand starting at position 3402 of SEQ ID NO: 914431
agaggaagauuugggcaau

SEQ ID NO: 1003495 - RNA, 19 nt, Artificial Sequence
  Description of Artificial Sequence: Synthetic oligonucleotide
  Antisense strand to SEQ ID NO: 1003494
auugcccaaaucuuccucu

SEQ ID NO: 1003496 - RNA, 19 nt, Artificial Sequence
  Description of Artificial Sequence: Synthetic oligonucleotide
  Sense strand starting at position 3455 of SEQ ID NO: 914431
gacguacuggccuaagacu

SEQ ID NO: 1003497 - RNA, 19 nt, Artificial Sequence
  Description of Artificial Sequence: Synthetic oligonucleotide
  Antisense strand to SEQ ID NO: 1003496
agucuuaggccaguacguc

SEQ ID NO: 1003498 - RNA, 19 nt, Artificial Sequence
  Description of Artificial Sequence: Synthetic oligonucleotide
  Sense strand starting at position 3463 of SEQ ID NO: 914431
ggccuaagacuuugaauua

SEQ ID NO: 1003499 - RNA, 19 nt, Artificial Sequence
  Description of Artificial Sequence: Synthetic oligonucleotide
  Antisense strand to SEQ ID NO: 1003498
uaauucaaagucuuaggcc

SEQ ID NO: 1003500 - RNA, 19 nt, Artificial Sequence
  Description of Artificial Sequence: Synthetic oligonucleotide
  Sense strand starting at position 3500 of SEQ ID NO: 914431
gagaaauaguuugcuggaa

SEQ ID NO: 1003501 - RNA, 19 nt, Artificial Sequence
  Description of Artificial Sequence: Synthetic oligonucleotide
  Antisense strand to SEQ ID NO: 1003500
uuccagcaaacuauuucuc

SEQ ID NO: 1003502 - RNA, 19 nt, Artificial Sequence
  Description of Artificial Sequence: Synthetic oligonucleotide
  Sense strand starting at position 3501 of SEQ ID NO: 914431
agaaauaguuugcuggaaa

SEQ ID NO: 1003503 - RNA, 19 nt, Artificial Sequence
  Description of Artificial Sequence: Synthetic oligonucleotide
  Antisense strand to SEQ ID NO: 1003502
uuuccagcaaacuauuucu

SEQ ID NO: 1003504 - RNA, 19 nt, Artificial Sequence
  Description of Artificial Sequence: Synthetic oligonucleotide
  Sense strand starting at position 3627 of SEQ ID NO: 914431
gggagaaguaauugcugga

SEQ ID NO: 1003505 - RNA, 19 nt, Artificial Sequence
  Description of Artificial Sequence: Synthetic oligonucleotide
  Antisense strand to SEQ ID NO: 1003504
uccagcaauuacuucuccc

SEQ ID NO: 1003506 - RNA, 19 nt, Artificial Sequence
  Description of Artificial Sequence: Synthetic oligonucleotide
  Sense strand starting at position 3631 of SEQ ID NO: 914431
gaaguaauugcuggaaagu

SEQ ID NO: 1003507 - RNA, 19 nt, Artificial Sequence
  Description of Artificial Sequence: Synthetic oligonucleotide
  Antisense strand to SEQ ID NO: 1003506
acuuuccagcaauuacuuc

SEQ ID NO: 1003508 - RNA, 19 nt, Artificial Sequence
  Description of Artificial Sequence: Synthetic oligonucleotide
  Sense strand starting at position 3632 of SEQ ID NO: 914431
aaguaauugcuggaaagug

SEQ ID NO: 1003509 - RNA, 19 nt, Artificial Sequence
  Description of Artificial Sequence: Synthetic oligonucleotide
  Antisense strand to SEQ ID NO: 1003508
cacuuuccagcaauuacuu

SEQ ID NO: 1003510 - RNA, 19 nt, Artificial Sequence
  Description of Artificial Sequence: Synthetic oligonucleotide
  Sense strand starting at position 3708 of SEQ ID NO: 914431
cugggaauuagugacugua

SEQ ID NO: 1003511 - RNA, 19 nt, Artificial Sequence
  Description of Artificial Sequence: Synthetic oligonucleotide
  Antisense strand to SEQ ID NO: 1003510
uacagucacuaauucccag

SEQ ID NO: 1003512 - RNA, 19 nt, Artificial Sequence
  Description of Artificial Sequence: Synthetic oligonucleotide
  Sense strand starting at position 3710 of SEQ ID NO: 914431
gggaauuagugacuguaaa

SEQ ID NO: 1003513 - RNA, 19 nt, Artificial Sequence
  Description of Artificial Sequence: Synthetic oligonucleotide
  Antisense strand to SEQ ID NO: 1003512
uuuacagucacuaauuccc

SEQ ID NO: 1003514 - RNA, 19 nt, Artificial Sequence
  Description of Artificial Sequence: Synthetic oligonucleotide
  Sense strand starting at position 3711 of SEQ ID NO: 914431
ggaauuagugacuguaaag

SEQ ID NO: 1003515 - RNA, 19 nt, Artificial Sequence
  Description of Artificial Sequence: Synthetic oligonucleotide
  Antisense strand to SEQ ID NO: 1003514
cuuuacagucacuaauucc

SEQ ID NO: 1003516 - RNA, 19 nt, Artificial Sequence
  Description of Artificial Sequence: Synthetic oligonucleotide
  Sense strand starting at position 3756 of SEQ ID NO: 914431
guaugagggcuccagagua

SEQ ID NO: 1003517 - RNA, 19 nt, Artificial Sequence
  Description of Artificial Sequence: Synthetic oligonucleotide
  Antisense strand to SEQ ID NO: 1003516
uacucuggagcccucauac

SEQ ID NO: 1003518 - RNA, 19 nt, Artificial Sequence
  Description of Artificial Sequence: Synthetic oligonucleotide
  Sense strand starting at position 3796 of SEQ ID NO: 914431
auugguagauauucuuuga

SEQ ID NO: 1003519 - RNA, 19 nt, Artificial Sequence
  Description of Artificial Sequence: Synthetic oligonucleotide
  Antisense strand to SEQ ID NO: 1003518
ucaaagaauaucuaccaau

SEQ ID NO: 1003520 - RNA, 19 nt, Artificial Sequence
  Description of Artificial Sequence: Synthetic oligonucleotide
  Sense strand starting at position 3830 of SEQ ID NO: 914431
gagaaaccuuagguucuga

SEQ ID NO: 1003521 - RNA, 19 nt, Artificial Sequence
  Description of Artificial Sequence: Synthetic oligonucleotide
  Antisense strand to SEQ ID NO: 1003520
ucagaaccuaagguuucuc

SEQ ID NO: 1003522 - RNA, 19 nt, Artificial Sequence
  Description of Artificial Sequence: Synthetic oligonucleotide
  Sense strand starting at position 3911 of SEQ ID NO: 914431
caguaaguccuagggauga

SEQ ID NO: 1003523 - RNA, 19 nt, Artificial Sequence
  Description of Artificial Sequence: Synthetic oligonucleotide
  Antisense strand to SEQ ID NO: 1003522
ucaucccuaggacuuacug

SEQ ID NO: 1003524 - RNA, 19 nt, Artificial Sequence
  Description of Artificial Sequence: Synthetic oligonucleotide
  Sense strand starting at position 4 of SEQ ID NO: 914432
uucugaccucuuggagauu

SEQ ID NO: 1003525 - RNA, 19 nt, Artificial Sequence
  Description of Artificial Sequence: Synthetic oligonucleotide
  Antisense strand to SEQ ID NO: 1003524
aaucuccaagaggucagaa

SEQ ID NO: 1003526 - RNA, 19 nt, Artificial Sequence
  Description of Artificial Sequence: Synthetic oligonucleotide
  Sense strand starting at position 5 of SEQ ID NO: 914432
ucugaccucuuggagauuu

SEQ ID NO: 1003527 - RNA, 19 nt, Artificial Sequence
  Description of Artificial Sequence: Synthetic oligonucleotide
  Antisense strand to SEQ ID NO: 1003526
aaaucuccaagaggucaga

SEQ ID NO: 1003528 - RNA, 19 nt, Artificial Sequence
  Description of Artificial Sequence: Synthetic oligonucleotide
  Sense strand starting at position 40 of SEQ ID NO: 914432
ccucuuugguccuauguca

SEQ ID NO: 1003529 - RNA, 19 nt, Artificial Sequence
  Description of Artificial Sequence: Synthetic oligonucleotide
  Antisense strand to SEQ ID NO: 1003528
ugacauaggaccaaagagg

SEQ ID NO: 1003530 - RNA, 19 nt, Artificial Sequence
  Description of Artificial Sequence: Synthetic oligonucleotide
  Sense strand starting at position 47 of SEQ ID NO: 914432
gguccuaugucaccuacua

SEQ ID NO: 1003531 - RNA, 19 nt, Artificial Sequence
  Description of Artificial Sequence: Synthetic oligonucleotide
  Antisense strand to SEQ ID NO: 1003530
uaguaggugacauaggacc

SEQ ID NO: 1003532 - RNA, 19 nt, Artificial Sequence
  Description of Artificial Sequence: Synthetic oligonucleotide
  Sense strand starting at position 108 of SEQ ID NO: 914432
gucccuuuccuggagagca

SEQ ID NO: 1003533 - RNA, 19 nt, Artificial Sequence
  Description of Artificial Sequence: Synthetic oligonucleotide
  Antisense strand to SEQ ID NO: 1003532
ugcucuccaggaaagggac

SEQ ID NO: 1003534 - RNA, 19 nt, Artificial Sequence
  Description of Artificial Sequence: Synthetic oligonucleotide
  Sense strand starting at position 139 of SEQ ID NO: 914432
guacuuguagcugacuaau

SEQ ID NO: 1003535 - RNA, 19 nt, Artificial Sequence
  Description of Artificial Sequence: Synthetic oligonucleotide
  Antisense strand to SEQ ID NO: 1003534
auuagucagcuacaaguac

SEQ ID NO: 1003536 - RNA, 19 nt, Artificial Sequence
  Description of Artificial Sequence: Synthetic oligonucleotide
  Sense strand starting at position 142 of SEQ ID NO: 914432
cuuguagcugacuaauuga

SEQ ID NO: 1003537 - RNA, 19 nt, Artificial Sequence
  Description of Artificial Sequence: Synthetic oligonucleotide
  Antisense strand to SEQ ID NO: 1003536
ucaauuagucagcuacaag

SEQ ID NO: 1003538 - RNA, 19 nt, Artificial Sequence
  Description of Artificial Sequence: Synthetic oligonucleotide
  Sense strand starting at position 254 of SEQ ID NO: 914432
gugucagcugaaugaacaa

SEQ ID NO: 1003539 - RNA, 19 nt, Artificial Sequence
  Description of Artificial Sequence: Synthetic oligonucleotide
  Antisense strand to SEQ ID NO: 1003538
uuguucauucagcugacac

SEQ ID NO: 1003540 - RNA, 19 nt, Artificial Sequence
  Description of Artificial Sequence: Synthetic oligonucleotide
  Sense strand starting at position 573 of SEQ ID NO: 914432
uuaggaauucccugcuccu

SEQ ID NO: 1003541 - RNA, 19 nt, Artificial Sequence
  Description of Artificial Sequence: Synthetic oligonucleotide
  Antisense strand to SEQ ID NO: 1003540
aggagcagggaauuccuaa

SEQ ID NO: 1003542 - RNA, 19 nt, Artificial Sequence
  Description of Artificial Sequence: Synthetic oligonucleotide
  Sense strand starting at position 665 of SEQ ID NO: 914432
gggccugugucugucugau

SEQ ID NO: 1003543 - RNA, 19 nt, Artificial Sequence
  Description of Artificial Sequence: Synthetic oligonucleotide
  Antisense strand to SEQ ID NO: 1003542
aucagacagacacaggccc

SEQ ID NO: 1003544 - RNA, 19 nt, Artificial Sequence
  Description of Artificial Sequence: Synthetic oligonucleotide
  Sense strand starting at position 873 of SEQ ID NO: 914432
gccucaaugucacuguuga

SEQ ID NO: 1003545 - RNA, 19 nt, Artificial Sequence
  Description of Artificial Sequence: Synthetic oligonucleotide
  Antisense strand to SEQ ID NO: 1003544
ucaacagugacauugaggc

SEQ ID NO: 1003546 - RNA, 19 nt, Artificial Sequence
  Description of Artificial Sequence: Synthetic oligonucleotide
  Sense strand starting at position 874 of SEQ ID NO: 914432
ccucaaugucacuguugau

SEQ ID NO: 1003547 - RNA, 19 nt, Artificial Sequence
  Description of Artificial Sequence: Synthetic oligonucleotide
  Antisense strand to SEQ ID NO: 1003546
aucaacagugacauugagg

SEQ ID NO: 1003548 - RNA, 19 nt, Artificial Sequence
  Description of Artificial Sequence: Synthetic oligonucleotide
  Sense strand starting at position 903 of SEQ ID NO: 914432
uuucuagagucauugcucu

SEQ ID NO: 1003549 - RNA, 19 nt, Artificial Sequence
  Description of Artificial Sequence: Synthetic oligonucleotide
  Antisense strand to SEQ ID NO: 1003548
agagcaaugacucuagaaa

SEQ ID NO: 1003550 - RNA, 19 nt, Artificial Sequence
  Description of Artificial Sequence: Synthetic oligonucleotide
  Sense strand starting at position 943 of SEQ ID NO: 914432
cccagaucuguguaccuuu

SEQ ID NO: 1003551 - RNA, 19 nt, Artificial Sequence
  Description of Artificial Sequence: Synthetic oligonucleotide
  Antisense strand to SEQ ID NO: 1003550
aaagguacacagaucuggg

SEQ ID NO: 1003552 - RNA, 19 nt, Artificial Sequence
  Description of Artificial Sequence: Synthetic oligonucleotide
  Sense strand starting at position 1440 of SEQ ID NO: 914432
gugaacucuuuaggcagaa

SEQ ID NO: 1003553 - RNA, 19 nt, Artificial Sequence
  Description of Artificial Sequence: Synthetic oligonucleotide
  Antisense strand to SEQ ID NO: 1003552
uucugccuaaagaguucac

SEQ ID NO: 1003554 - RNA, 19 nt, Artificial Sequence
  Description of Artificial Sequence: Synthetic oligonucleotide
  Sense strand starting at position 1441 of SEQ ID NO: 914432
ugaacucuuuaggcagaaa

SEQ ID NO: 1003555 - RNA, 19 nt, Artificial Sequence
  Description of Artificial Sequence: Synthetic oligonucleotide
  Antisense strand to SEQ ID NO: 1003554
uuucugccuaaagaguuca

SEQ ID NO: 1003556 - RNA, 19 nt, Artificial Sequence
  Description of Artificial Sequence: Synthetic oligonucleotide
  Sense strand starting at position 1460 of SEQ ID NO: 914432
gggucaauccucuaacugu

SEQ ID NO: 1003557 - RNA, 19 nt, Artificial Sequence
  Description of Artificial Sequence: Synthetic oligonucleotide
  Antisense strand to SEQ ID NO: 1003556
acaguuagaggauugaccc

SEQ ID NO: 1003558 - RNA, 19 nt, Artificial Sequence
  Description of Artificial Sequence: Synthetic oligonucleotide
  Sense strand starting at position 1473 of SEQ ID NO: 914432
aacuguucuguugggcaaa

SEQ ID NO: 1003559 - RNA, 19 nt, Artificial Sequence
  Description of Artificial Sequence: Synthetic oligonucleotide
  Antisense strand to SEQ ID NO: 1003558
uuugcccaacagaacaguu

SEQ ID NO: 1003560 - RNA, 19 nt, Artificial Sequence
  Description of Artificial Sequence: Synthetic oligonucleotide
  Sense strand starting at position 1564 of SEQ ID NO: 914432
ccagcucugucuccuagau

SEQ ID NO: 1003561 - RNA, 19 nt, Artificial Sequence
  Description of Artificial Sequence: Synthetic oligonucleotide
  Antisense strand to SEQ ID NO: 1003560
aucuaggagacagagcugg

SEQ ID NO: 1003562 - RNA, 19 nt, Artificial Sequence
  Description of Artificial Sequence: Synthetic oligonucleotide
  Sense strand starting at position 1709 of SEQ ID NO: 914432
ggcuguggcuuccaggaaa

SEQ ID NO: 1003563 - RNA, 19 nt, Artificial Sequence
  Description of Artificial Sequence: Synthetic oligonucleotide
  Antisense strand to SEQ ID NO: 1003562
uuuccuggaagccacagcc

SEQ ID NO: 1003564 - RNA, 19 nt, Artificial Sequence
  Description of Artificial Sequence: Synthetic oligonucleotide
  Sense strand starting at position 1987 of SEQ ID NO: 914432
ccagcugcucccgaugaga

SEQ ID NO: 1003565 - RNA, 19 nt, Artificial Sequence
  Description of Artificial Sequence: Synthetic oligonucleotide
  Antisense strand to SEQ ID NO: 1003564
ucucaucgggagcagcugg

SEQ ID NO: 1003566 - RNA, 19 nt, Artificial Sequence
  Description of Artificial Sequence: Synthetic oligonucleotide
  Sense strand starting at position 1998 of SEQ ID NO: 914432
cgaugagagccugggagua

SEQ ID NO: 1003567 - RNA, 19 nt, Artificial Sequence
  Description of Artificial Sequence: Synthetic oligonucleotide
  Antisense strand to SEQ ID NO: 1003566
uacucccaggcucucaucg

SEQ ID NO: 1003568 - RNA, 19 nt, Artificial Sequence
  Description of Artificial Sequence: Synthetic oligonucleotide
  Sense strand starting at position 2094 of SEQ ID NO: 914432
ggguccuaauccgggauua

SEQ ID NO: 1003569 - RNA, 19 nt, Artificial Sequence
  Description of Artificial Sequence: Synthetic oligonucleotide
  Antisense strand to SEQ ID NO: 1003568
uaaucccggauuaggaccc

SEQ ID NO: 1003570 - RNA, 19 nt, Artificial Sequence
  Description of Artificial Sequence: Synthetic oligonucleotide
  Sense strand starting at position 2095 of SEQ ID NO: 914432
gguccuaauccgggauuau

SEQ ID NO: 1003571 - RNA, 19 nt, Artificial Sequence
  Description of Artificial Sequence: Synthetic oligonucleotide
  Antisense strand to SEQ ID NO: 1003570
auaaucccggauuaggacc

SEQ ID NO: 1003572 - RNA, 19 nt, Artificial Sequence
  Description of Artificial Sequence: Synthetic oligonucleotide
  Sense strand starting at position 2096 of SEQ ID NO: 914432
guccuaauccgggauuauc

SEQ ID NO: 1003573 - RNA, 19 nt, Artificial Sequence
  Description of Artificial Sequence: Synthetic oligonucleotide
  Antisense strand to SEQ ID NO: 1003572
gauaaucccggauuaggac

SEQ ID NO: 1003574 - RNA, 19 nt, Artificial Sequence
  Description of Artificial Sequence: Synthetic oligonucleotide
  Sense strand starting at position 2105 of SEQ ID NO: 914432
cgggauuaucuuugagcgu

SEQ ID NO: 1003575 - RNA, 19 nt, Artificial Sequence
  Description of Artificial Sequence: Synthetic oligonucleotide
  Antisense strand to SEQ ID NO: 1003574
acgcucaaagauaaucccg

SEQ ID NO: 1003576 - RNA, 19 nt, Artificial Sequence
  Description of Artificial Sequence: Synthetic oligonucleotide
  Sense strand starting at position 2106 of SEQ ID NO: 914432
gggauuaucuuugagcguc

SEQ ID NO: 1003577 - RNA, 19 nt, Artificial Sequence
  Description of Artificial Sequence: Synthetic oligonucleotide
  Antisense strand to SEQ ID NO: 1003576
gacgcucaaagauaauccc

SEQ ID NO: 1003578 - RNA, 19 nt, Artificial Sequence
  Description of Artificial Sequence: Synthetic oligonucleotide
  Sense strand starting at position 2356 of SEQ ID NO: 914432
acagauuccgguugguaug

SEQ ID NO: 1003579 - RNA, 19 nt, Artificial Sequence
  Description of Artificial Sequence: Synthetic oligonucleotide
  Antisense strand to SEQ ID NO: 1003578
cauaccaaccggaaucugu

SEQ ID NO: 1003580 - RNA, 19 nt, Artificial Sequence
  Description of Artificial Sequence: Synthetic oligonucleotide
  Sense strand starting at position 2647 of SEQ ID NO: 914432
cagagagucucccauugga

SEQ ID NO: 1003581 - RNA, 19 nt, Artificial Sequence
  Description of Artificial Sequence: Synthetic oligonucleotide
  Antisense strand to SEQ ID NO: 1003580
uccaaugggagacucucug

SEQ ID NO: 1003582 - RNA, 19 nt, Artificial Sequence
  Description of Artificial Sequence: Synthetic oligonucleotide
  Sense strand starting at position 3177 of SEQ ID NO: 914432
cccucaugcuggucacaga

SEQ ID NO: 1003583 - RNA, 19 nt, Artificial Sequence
  Description of Artificial Sequence: Synthetic oligonucleotide
  Antisense strand to SEQ ID NO: 1003582
ucugugaccagcaugaggg

SEQ ID NO: 1003584 - RNA, 19 nt, Artificial Sequence
  Description of Artificial Sequence: Synthetic oligonucleotide
  Sense strand starting at position 3272 of SEQ ID NO: 914432
cgcaguguucugccugcau

SEQ ID NO: 1003585 - RNA, 19 nt, Artificial Sequence
  Description of Artificial Sequence: Synthetic oligonucleotide
  Antisense strand to SEQ ID NO: 1003584
augcaggcagaacacugcg

SEQ ID NO: 1003586 - RNA, 19 nt, Artificial Sequence
  Description of Artificial Sequence: Synthetic oligonucleotide
  Sense strand starting at position 3274 of SEQ ID NO: 914432
caguguucugccugcaucu

SEQ ID NO: 1003587 - RNA, 19 nt, Artificial Sequence
  Description of Artificial Sequence: Synthetic oligonucleotide
  Antisense strand to SEQ ID NO: 1003586
agaugcaggcagaacacug

SEQ ID NO: 1003588 - RNA, 19 nt, Artificial Sequence
  Description of Artificial Sequence: Synthetic oligonucleotide
  Sense strand starting at position 3596 of SEQ ID NO: 914432
gcuccagaauucuggaaag

SEQ ID NO: 1003589 - RNA, 19 nt, Artificial Sequence
  Description of Artificial Sequence: Synthetic oligonucleotide
  Antisense strand to SEQ ID NO: 1003588
cuuuccagaauucuggagc

SEQ ID NO: 1003590 - RNA, 19 nt, Artificial Sequence
  Description of Artificial Sequence: Synthetic oligonucleotide
  Sense strand starting at position 3878 of SEQ ID NO: 914432
accucuugcuucucaagga

SEQ ID NO: 1003591 - RNA, 19 nt, Artificial Sequence
  Description of Artificial Sequence: Synthetic oligonucleotide
  Antisense strand to SEQ ID NO: 1003590
uccuugagaagcaagaggu

SEQ ID NO: 1003592 - RNA, 19 nt, Artificial Sequence
  Description of Artificial Sequence: Synthetic oligonucleotide
  Sense strand starting at position 3879 of SEQ ID NO: 914432
ccucuugcuucucaaggaa

SEQ ID NO: 1003593 - RNA, 19 nt, Artificial Sequence
  Description of Artificial Sequence: Synthetic oligonucleotide
  Antisense strand to SEQ ID NO: 1003592
uuccuugagaagcaagagg

SEQ ID NO: 1003594 - RNA, 19 nt, Artificial Sequence
  Description of Artificial Sequence: Synthetic oligonucleotide
  Sense strand starting at position 46 of SEQ ID NO: 914433
ugcugaugugcguggcauu

SEQ ID NO: 1003595 - RNA, 19 nt, Artificial Sequence
  Description of Artificial Sequence: Synthetic oligonucleotide
  Antisense strand to SEQ ID NO: 1003594
aaugccacgcacaucagca

SEQ ID NO: 1003596 - RNA, 19 nt, Artificial Sequence
  Description of Artificial Sequence: Synthetic oligonucleotide
  Sense strand starting at position 56 of SEQ ID NO: 914433
cguggcauuggcugacuua

SEQ ID NO: 1003597 - RNA, 19 nt, Artificial Sequence
  Description of Artificial Sequence: Synthetic oligonucleotide
  Antisense strand to SEQ ID NO: 1003596
uaagucagccaaugccacg

SEQ ID NO: 1003598 - RNA, 19 nt, Artificial Sequence
  Description of Artificial Sequence: Synthetic oligonucleotide
  Sense strand starting at position 131 of SEQ ID NO: 914433
gguucauggccaugaagua

SEQ ID NO: 1003599 - RNA, 19 nt, Artificial Sequence
  Description of Artificial Sequence: Synthetic oligonucleotide
  Antisense strand to SEQ ID NO: 1003598
uacuucauggccaugaacc

SEQ ID NO: 1003600 - RNA, 19 nt, Artificial Sequence
  Description of Artificial Sequence: Synthetic oligonucleotide
  Sense strand starting at position 156 of SEQ ID NO: 914433
cccagugggcagcaauaaa

SEQ ID NO: 1003601 - RNA, 19 nt, Artificial Sequence
  Description of Artificial Sequence: Synthetic oligonucleotide
  Antisense strand to SEQ ID NO: 1003600
uuuauugcugcccacuggg

SEQ ID NO: 1003602 - RNA, 19 nt, Artificial Sequence
  Description of Artificial Sequence: Synthetic oligonucleotide
  Sense strand starting at position 200 of SEQ ID NO: 914433
guccgugccucaguucuaa

SEQ ID NO: 1003603 - RNA, 19 nt, Artificial Sequence
  Description of Artificial Sequence: Synthetic oligonucleotide
  Antisense strand to SEQ ID NO: 1003602
uuagaacugaggcacggac

SEQ ID NO: 1003604 - RNA, 19 nt, Artificial Sequence
  Description of Artificial Sequence: Synthetic oligonucleotide
  Sense strand starting at position 204 of SEQ ID NO: 914433
gugccucaguucuaagaug

SEQ ID NO: 1003605 - RNA, 19 nt, Artificial Sequence
  Description of Artificial Sequence: Synthetic oligonucleotide
  Antisense strand to SEQ ID NO: 1003604
caucuuagaacugaggcac

SEQ ID NO: 1003606 - RNA, 19 nt, Artificial Sequence
  Description of Artificial Sequence: Synthetic oligonucleotide
  Sense strand starting at position 212 of SEQ ID NO: 914433
guucuaagaugccaucagu

SEQ ID NO: 1003607 - RNA, 19 nt, Artificial Sequence
  Description of Artificial Sequence: Synthetic oligonucleotide
  Antisense strand to SEQ ID NO: 1003606
acugauggcaucuuagaac

SEQ ID NO: 1003608 - RNA, 19 nt, Artificial Sequence
  Description of Artificial Sequence: Synthetic oligonucleotide
  Sense strand starting at position 358 of SEQ ID NO: 914433
ugaagugaauaugagauuu

SEQ ID NO: 1003609 - RNA, 19 nt, Artificial Sequence
  Description of Artificial Sequence: Synthetic oligonucleotide
  Antisense strand to SEQ ID NO: 1003608
aaaucucauauucacuuca

SEQ ID NO: 1003610 - RNA, 19 nt, Artificial Sequence
  Description of Artificial Sequence: Synthetic oligonucleotide
  Sense strand starting at position 360 of SEQ ID NO: 914433
aagugaauaugagauuugu

SEQ ID NO: 1003611 - RNA, 19 nt, Artificial Sequence
  Description of Artificial Sequence: Synthetic oligonucleotide
  Antisense strand to SEQ ID NO: 1003610
acaaaucucauauucacuu

SEQ ID NO: 1003612 - RNA, 19 nt, Artificial Sequence
  Description of Artificial Sequence: Synthetic oligonucleotide
  Sense strand starting at position 369 of SEQ ID NO: 914433
ugagauuugucugaggaca

SEQ ID NO: 1003613 - RNA, 19 nt, Artificial Sequence
  Description of Artificial Sequence: Synthetic oligonucleotide
  Antisense strand to SEQ ID NO: 1003612
uguccucagacaaaucuca

SEQ ID NO: 1003614 - RNA, 19 nt, Artificial Sequence
  Description of Artificial Sequence: Synthetic oligonucleotide
  Sense strand starting at position 371 of SEQ ID NO: 914433
agauuugucugaggacaaa

SEQ ID NO: 1003615 - RNA, 19 nt, Artificial Sequence
  Description of Artificial Sequence: Synthetic oligonucleotide
  Antisense strand to SEQ ID NO: 1003614
uuuguccucagacaaaucu

SEQ ID NO: 1003616 - RNA, 19 nt, Artificial Sequence
  Description of Artificial Sequence: Synthetic oligonucleotide
  Sense strand starting at position 551 of SEQ ID NO: 914433
ugacuaguaucagcggaca

SEQ ID NO: 1003617 - RNA, 19 nt, Artificial Sequence
  Description of Artificial Sequence: Synthetic oligonucleotide
  Antisense strand to SEQ ID NO: 1003616
uguccgcugauacuaguca

SEQ ID NO: 1003618 - RNA, 19 nt, Artificial Sequence
  Description of Artificial Sequence: Synthetic oligonucleotide
  Sense strand starting at position 570 of SEQ ID NO: 914433
gcacuuuaucacugaguca

SEQ ID NO: 1003619 - RNA, 19 nt, Artificial Sequence
  Description of Artificial Sequence: Synthetic oligonucleotide
  Antisense strand to SEQ ID NO: 1003618
ugacucagugauaaagugc

SEQ ID NO: 1003620 - RNA, 19 nt, Artificial Sequence
  Description of Artificial Sequence: Synthetic oligonucleotide
  Sense strand starting at position 630 of SEQ ID NO: 914433
ggagcaaauguguauagug

SEQ ID NO: 1003621 - RNA, 19 nt, Artificial Sequence
  Description of Artificial Sequence: Synthetic oligonucleotide
  Antisense strand to SEQ ID NO: 1003620
cacuauacacauuugcucc

SEQ ID NO: 1003622 - RNA, 19 nt, Artificial Sequence
  Description of Artificial Sequence: Synthetic oligonucleotide
  Sense strand starting at position 1985 of SEQ ID NO: 914433
ccauaaagcugcuuaugca

SEQ ID NO: 1003623 - RNA, 19 nt, Artificial Sequence
  Description of Artificial Sequence: Synthetic oligonucleotide
  Antisense strand to SEQ ID NO: 1003622
ugcauaagcagcuuuaugg

SEQ ID NO: 1003624 - RNA, 19 nt, Artificial Sequence
  Description of Artificial Sequence: Synthetic oligonucleotide
  Sense strand starting at position 2127 of SEQ ID NO: 914433
gguccagagaacuguccuu

SEQ ID NO: 1003625 - RNA, 19 nt, Artificial Sequence
  Description of Artificial Sequence: Synthetic oligonucleotide
  Antisense strand to SEQ ID NO: 1003624
aaggacaguucucuggacc

SEQ ID NO: 1003626 - RNA, 19 nt, Artificial Sequence
  Description of Artificial Sequence: Synthetic oligonucleotide
  Sense strand starting at position 2132 of SEQ ID NO: 914433
agagaacuguccuugguca

SEQ ID NO: 1003627 - RNA, 19 nt, Artificial Sequence
  Description of Artificial Sequence: Synthetic oligonucleotide
  Antisense strand to SEQ ID NO: 1003626
ugaccaaggacaguucucu

SEQ ID NO: 1003628 - RNA, 19 nt, Artificial Sequence
  Description of Artificial Sequence: Synthetic oligonucleotide
  Sense strand starting at position 2134 of SEQ ID NO: 914433
agaacuguccuuggucaga

SEQ ID NO: 1003629 - RNA, 19 nt, Artificial Sequence
  Description of Artificial Sequence: Synthetic oligonucleotide
  Antisense strand to SEQ ID NO: 1003628
ucugaccaaggacaguucu

SEQ ID NO: 1003630 - RNA, 19 nt, Artificial Sequence
  Description of Artificial Sequence: Synthetic oligonucleotide
  Sense strand starting at position 2139 of SEQ ID NO: 914433
uguccuuggucagaagcaa

SEQ ID NO: 1003631 - RNA, 19 nt, Artificial Sequence
  Description of Artificial Sequence: Synthetic oligonucleotide
  Antisense strand to SEQ ID NO: 1003630
uugcuucugaccaaggaca

SEQ ID NO: 1003632 - RNA, 19 nt, Artificial Sequence
  Description of Artificial Sequence: Synthetic oligonucleotide
  Sense strand starting at position 2274 of SEQ ID NO: 914433
ggaauaaugcuagagcgca

SEQ ID NO: 1003633 - RNA, 19 nt, Artificial Sequence
  Description of Artificial Sequence: Synthetic oligonucleotide
  Antisense strand to SEQ ID NO: 1003632
ugcgcucuagcauuauucc

SEQ ID NO: 1003634 - RNA, 19 nt, Artificial Sequence
  Description of Artificial Sequence: Synthetic oligonucleotide
  Sense strand starting at position 2290 of SEQ ID NO: 914433
gcagaagacucagcucaug

SEQ ID NO: 1003635 - RNA, 19 nt, Artificial Sequence
  Description of Artificial Sequence: Synthetic oligonucleotide
  Antisense strand to SEQ ID NO: 1003634
caugagcugagucuucugc

SEQ ID NO: 1003636 - RNA, 19 nt, Artificial Sequence
  Description of Artificial Sequence: Synthetic oligonucleotide
  Sense strand starting at position 2295 of SEQ ID NO: 914433
agacucagcucauguguga

SEQ ID NO: 1003637 - RNA, 19 nt, Artificial Sequence
  Description of Artificial Sequence: Synthetic oligonucleotide
  Antisense strand to SEQ ID NO: 1003636
ucacacaugagcugagucu

SEQ ID NO: 1003638 - RNA, 19 nt, Artificial Sequence
  Description of Artificial Sequence: Synthetic oligonucleotide
  Sense strand starting at position 2324 of SEQ ID NO: 914433
ggccuucguuaggcagaga

SEQ ID NO: 1003639 - RNA, 19 nt, Artificial Sequence
  Description of Artificial Sequence: Synthetic oligonucleotide
  Antisense strand to SEQ ID NO: 1003638
ucucugccuaacgaaggcc

SEQ ID NO: 1003640 - RNA, 19 nt, Artificial Sequence
  Description of Artificial Sequence: Synthetic oligonucleotide
  Sense strand starting at position 2437 of SEQ ID NO: 914433
gggugacauccuggccaga

SEQ ID NO: 1003641 - RNA, 19 nt, Artificial Sequence
  Description of Artificial Sequence: Synthetic oligonucleotide
  Antisense strand to SEQ ID NO: 1003640
ucuggccaggaugucaccc

SEQ ID NO: 1003642 - RNA, 19 nt, Artificial Sequence
  Description of Artificial Sequence: Synthetic oligonucleotide
  Sense strand starting at position 2455 of SEQ ID NO: 914433
agcagagggugugugaaau

SEQ ID NO: 1003643 - RNA, 19 nt, Artificial Sequence
  Description of Artificial Sequence: Synthetic oligonucleotide
  Antisense strand to SEQ ID NO: 1003642
auuucacacacccucugcu

SEQ ID NO: 1003644 - RNA, 19 nt, Artificial Sequence
  Description of Artificial Sequence: Synthetic oligonucleotide
  Sense strand starting at position 2488 of SEQ ID NO: 914433
gaucacagaugccucgaau

SEQ ID NO: 1003645 - RNA, 19 nt, Artificial Sequence
  Description of Artificial Sequence: Synthetic oligonucleotide
  Antisense strand to SEQ ID NO: 1003644
auucgaggcaucugugauc

SEQ ID NO: 1003646 - RNA, 19 nt, Artificial Sequence
  Description of Artificial Sequence: Synthetic oligonucleotide
  Sense strand starting at position 2560 of SEQ ID NO: 914433
uagagucugcucugggcua

SEQ ID NO: 1003647 - RNA, 19 nt, Artificial Sequence
  Description of Artificial Sequence: Synthetic oligonucleotide
  Antisense strand to SEQ ID NO: 1003646
uagcccagagcagacucua

SEQ ID NO: 1003648 - RNA, 19 nt, Artificial Sequence
  Description of Artificial Sequence: Synthetic oligonucleotide
  Sense strand starting at position 2562 of SEQ ID NO: 914433
gagucugcucugggcuaga

SEQ ID NO: 1003649 - RNA, 19 nt, Artificial Sequence
  Description of Artificial Sequence: Synthetic oligonucleotide
  Antisense strand to SEQ ID NO: 1003648
ucuagcccagagcagacuc

SEQ ID NO: 1003650 - RNA, 19 nt, Artificial Sequence
  Description of Artificial Sequence: Synthetic oligonucleotide
  Sense strand starting at position 3544 of SEQ ID NO: 914433
uugugaugagcggaccaaa

SEQ ID NO: 1003651 - RNA, 19 nt, Artificial Sequence
  Description of Artificial Sequence: Synthetic oligonucleotide
  Antisense strand to SEQ ID NO: 1003650
uuugguccgcucaucacaa

SEQ ID NO: 1003652 - RNA, 19 nt, Artificial Sequence
  Description of Artificial Sequence: Synthetic oligonucleotide
  Sense strand starting at position 3570 of SEQ ID NO: 914433
caaacuguguucccuggaa

SEQ ID NO: 1003653 - RNA, 19 nt, Artificial Sequence
  Description of Artificial Sequence: Synthetic oligonucleotide
  Antisense strand to SEQ ID NO: 1003652
uuccagggaacacaguuug

SEQ ID NO: 1003654 - RNA, 19 nt, Artificial Sequence
  Description of Artificial Sequence: Synthetic oligonucleotide
  Sense strand starting at position 3932 of SEQ ID NO: 914433
cgugcccggccuuagaaua

SEQ ID NO: 1003655 - RNA, 19 nt, Artificial Sequence
  Description of Artificial Sequence: Synthetic oligonucleotide
  Antisense strand to SEQ ID NO: 1003654
uauucuaaggccgggcacg

SEQ ID NO: 1003656 - RNA, 19 nt, Artificial Sequence
  Description of Artificial Sequence: Synthetic oligonucleotide
  Sense strand starting at position 3977 of SEQ ID NO: 914433
cuuuaacaauguuugaaag

SEQ ID NO: 1003657 - RNA, 19 nt, Artificial Sequence
  Description of Artificial Sequence: Synthetic oligonucleotide
  Antisense strand to SEQ ID NO: 1003656
cuuucaaacauuguuaaag

SEQ ID NO: 1003658 - RNA, 19 nt, Artificial Sequence
  Description of Artificial Sequence: Synthetic oligonucleotide
  Sense strand starting at position 612 of SEQ ID NO: 914434
uugugaugagcggaccaaa

SEQ ID NO: 1003659 - RNA, 19 nt, Artificial Sequence
  Description of Artificial Sequence: Synthetic oligonucleotide
  Antisense strand to SEQ ID NO: 1003658
uuugguccgcucaucacaa

SEQ ID NO: 1003660 - RNA, 19 nt, Artificial Sequence
  Description of Artificial Sequence: Synthetic oligonucleotide
  Sense strand starting at position 638 of SEQ ID NO: 914434
caaacuguguucccuggaa

SEQ ID NO: 1003661 - RNA, 19 nt, Artificial Sequence
  Description of Artificial Sequence: Synthetic oligonucleotide
  Antisense strand to SEQ ID NO: 1003660
uuccagggaacacaguuug

SEQ ID NO: 1003662 - RNA, 19 nt, Artificial Sequence
  Description of Artificial Sequence: Synthetic oligonucleotide
  Sense strand starting at position 1000 of SEQ ID NO: 914434
cgugcccggccuuagaaua

SEQ ID NO: 1003663 - RNA, 19 nt, Artificial Sequence
  Description of Artificial Sequence: Synthetic oligonucleotide
  Antisense strand to SEQ ID NO: 1003662
uauucuaaggccgggcacg

SEQ ID NO: 1003664 - RNA, 19 nt, Artificial Sequence
  Description of Artificial Sequence: Synthetic oligonucleotide
  Sense strand starting at position 1045 of SEQ ID NO: 914434
cuuuaacaauguuugaaag

SEQ ID NO: 1003665 - RNA, 19 nt, Artificial Sequence
  Description of Artificial Sequence: Synthetic oligonucleotide
  Antisense strand to SEQ ID NO: 1003664
cuuucaaacauuguuaaag

SEQ ID NO: 1003666 - RNA, 19 nt, Artificial Sequence
  Description of Artificial Sequence: Synthetic oligonucleotide
  Sense strand starting at position 1056 of SEQ ID NO: 914434
uuugaaagccuccggguua

SEQ ID NO: 1003667 - RNA, 19 nt, Artificial Sequence
  Description of Artificial Sequence: Synthetic oligonucleotide
  Antisense strand to SEQ ID NO: 1003666
uaacccggaggcuuucaaa

SEQ ID NO: 1003668 - RNA, 19 nt, Artificial Sequence
  Description of Artificial Sequence: Synthetic oligonucleotide
  Sense strand starting at position 1067 of SEQ ID NO: 914434
ccggguuagucuauccgga

SEQ ID NO: 1003669 - RNA, 19 nt, Artificial Sequence
  Description of Artificial Sequence: Synthetic oligonucleotide
  Antisense strand to SEQ ID NO: 1003668
uccggauagacuaacccgg

SEQ ID NO: 1003670 - RNA, 19 nt, Artificial Sequence
  Description of Artificial Sequence: Synthetic oligonucleotide
  Sense strand starting at position 1091 of SEQ ID NO: 914434
ugggauucuacauggcaga

SEQ ID NO: 1003671 - RNA, 19 nt, Artificial Sequence
  Description of Artificial Sequence: Synthetic oligonucleotide
  Antisense strand to SEQ ID NO: 1003670
ucugccauguagaauccca

SEQ ID NO: 1003672 - RNA, 19 nt, Artificial Sequence
  Description of Artificial Sequence: Synthetic oligonucleotide
  Sense strand starting at position 1092 of SEQ ID NO: 914434
gggauucuacauggcagaa

SEQ ID NO: 1003673 - RNA, 19 nt, Artificial Sequence
  Description of Artificial Sequence: Synthetic oligonucleotide
  Antisense strand to SEQ ID NO: 1003672
uucugccauguagaauccc

SEQ ID NO: 1003674 - RNA, 19 nt, Artificial Sequence
  Description of Artificial Sequence: Synthetic oligonucleotide
  Sense strand starting at position 1094 of SEQ ID NO: 914434
gauucuacauggcagaaga

SEQ ID NO: 1003675 - RNA, 19 nt, Artificial Sequence
  Description of Artificial Sequence: Synthetic oligonucleotide
  Antisense strand to SEQ ID NO: 1003674
ucuucugccauguagaauc

SEQ ID NO: 1003676 - RNA, 19 nt, Artificial Sequence
  Description of Artificial Sequence: Synthetic oligonucleotide
  Sense strand starting at position 1109 of SEQ ID NO: 914434
aagauuaagucugucugga

SEQ ID NO: 1003677 - RNA, 19 nt, Artificial Sequence
  Description of Artificial Sequence: Synthetic oligonucleotide
  Antisense strand to SEQ ID NO: 1003676
uccagacagacuuaaucuu

SEQ ID NO: 1003678 - RNA, 19 nt, Artificial Sequence
  Description of Artificial Sequence: Synthetic oligonucleotide
  Sense strand starting at position 1111 of SEQ ID NO: 914434
gauuaagucugucuggaca

SEQ ID NO: 1003679 - RNA, 19 nt, Artificial Sequence
  Description of Artificial Sequence: Synthetic oligonucleotide
  Antisense strand to SEQ ID NO: 1003678
uguccagacagacuuaauc

SEQ ID NO: 1003680 - RNA, 19 nt, Artificial Sequence
  Description of Artificial Sequence: Synthetic oligonucleotide
  Sense strand starting at position 1113 of SEQ ID NO: 914434
uuaagucugucuggacagu

SEQ ID NO: 1003681 - RNA, 19 nt, Artificial Sequence
  Description of Artificial Sequence: Synthetic oligonucleotide
  Antisense strand to SEQ ID NO: 1003680
acuguccagacagacuuaa

SEQ ID NO: 1003682 - RNA, 19 nt, Artificial Sequence
  Description of Artificial Sequence: Synthetic oligonucleotide
  Sense strand starting at position 1347 of SEQ ID NO: 914434
ugcacucauccugggcaau

SEQ ID NO: 1003683 - RNA, 19 nt, Artificial Sequence
  Description of Artificial Sequence: Synthetic oligonucleotide
  Antisense strand to SEQ ID NO: 1003682
auugcccaggaugagugca

SEQ ID NO: 1003684 - RNA, 19 nt, Artificial Sequence
  Description of Artificial Sequence: Synthetic oligonucleotide
  Sense strand starting at position 1348 of SEQ ID NO: 914434
gcacucauccugggcaaua

SEQ ID NO: 1003685 - RNA, 19 nt, Artificial Sequence
  Description of Artificial Sequence: Synthetic oligonucleotide
  Antisense strand to SEQ ID NO: 1003684
uauugcccaggaugagugc

SEQ ID NO: 1003686 - RNA, 19 nt, Artificial Sequence
  Description of Artificial Sequence: Synthetic oligonucleotide
  Sense strand starting at position 1470 of SEQ ID NO: 914434
cuguccucgccuguaaagu

SEQ ID NO: 1003687 - RNA, 19 nt, Artificial Sequence
  Description of Artificial Sequence: Synthetic oligonucleotide
  Antisense strand to SEQ ID NO: 1003686
acuuuacaggcgaggacag

SEQ ID NO: 1003688 - RNA, 19 nt, Artificial Sequence
  Description of Artificial Sequence: Synthetic oligonucleotide
  Sense strand starting at position 1471 of SEQ ID NO: 914434
uguccucgccuguaaagua

SEQ ID NO: 1003689 - RNA, 19 nt, Artificial Sequence
  Description of Artificial Sequence: Synthetic oligonucleotide
  Antisense strand to SEQ ID NO: 1003688
uacuuuacaggcgaggaca

SEQ ID NO: 1003690 - RNA, 19 nt, Artificial Sequence
  Description of Artificial Sequence: Synthetic oligonucleotide
  Sense strand starting at position 1478 of SEQ ID NO: 914434
gccuguaaaguagauugua

SEQ ID NO: 1003691 - RNA, 19 nt, Artificial Sequence
  Description of Artificial Sequence: Synthetic oligonucleotide
  Antisense strand to SEQ ID NO: 1003690
uacaaucuacuuuacaggc

SEQ ID NO: 1003692 - RNA, 19 nt, Artificial Sequence
  Description of Artificial Sequence: Synthetic oligonucleotide
  Sense strand starting at position 1486 of SEQ ID NO: 914434
aguagauuguaugaggacu

SEQ ID NO: 1003693 - RNA, 19 nt, Artificial Sequence
  Description of Artificial Sequence: Synthetic oligonucleotide
  Antisense strand to SEQ ID NO: 1003692
aguccucauacaaucuacu

SEQ ID NO: 1003694 - RNA, 19 nt, Artificial Sequence
  Description of Artificial Sequence: Synthetic oligonucleotide
  Sense strand starting at position 1524 of SEQ ID NO: 914434
aaguccuuggcauaggaua

SEQ ID NO: 1003695 - RNA, 19 nt, Artificial Sequence
  Description of Artificial Sequence: Synthetic oligonucleotide
  Antisense strand to SEQ ID NO: 1003694
uauccuaugccaaggacuu

SEQ ID NO: 1003696 - RNA, 19 nt, Artificial Sequence
  Description of Artificial Sequence: Synthetic oligonucleotide
  Sense strand starting at position 1526 of SEQ ID NO: 914434
guccuuggcauaggauaau

SEQ ID NO: 1003697 - RNA, 19 nt, Artificial Sequence
  Description of Artificial Sequence: Synthetic oligonucleotide
  Antisense strand to SEQ ID NO: 1003696
auuauccuaugccaaggac

SEQ ID NO: 1003698 - RNA, 19 nt, Artificial Sequence
  Description of Artificial Sequence: Synthetic oligonucleotide
  Sense strand starting at position 1580 of SEQ ID NO: 914434
uggugacuugccuggagau

SEQ ID NO: 1003699 - RNA, 19 nt, Artificial Sequence
  Description of Artificial Sequence: Synthetic oligonucleotide
  Antisense strand to SEQ ID NO: 1003698
aucuccaggcaagucacca

SEQ ID NO: 1003700 - RNA, 19 nt, Artificial Sequence
  Description of Artificial Sequence: Synthetic oligonucleotide
  Sense strand starting at position 1581 of SEQ ID NO: 914434
ggugacuugccuggagaug

SEQ ID NO: 1003701 - RNA, 19 nt, Artificial Sequence
  Description of Artificial Sequence: Synthetic oligonucleotide
  Antisense strand to SEQ ID NO: 1003700
caucuccaggcaagucacc

SEQ ID NO: 1003702 - RNA, 19 nt, Artificial Sequence
  Description of Artificial Sequence: Synthetic oligonucleotide
  Sense strand starting at position 1739 of SEQ ID NO: 914434
ccgcacagagcuugaugau

SEQ ID NO: 1003703 - RNA, 19 nt, Artificial Sequence
  Description of Artificial Sequence: Synthetic oligonucleotide
  Antisense strand to SEQ ID NO: 1003702
aucaucaagcucugugcgg

SEQ ID NO: 1003704 - RNA, 19 nt, Artificial Sequence
  Description of Artificial Sequence: Synthetic oligonucleotide
  Sense strand starting at position 2215 of SEQ ID NO: 914434
ggugguacgaccuggucau

SEQ ID NO: 1003705 - RNA, 19 nt, Artificial Sequence
  Description of Artificial Sequence: Synthetic oligonucleotide
  Antisense strand to SEQ ID NO: 1003704
augaccaggucguaccacc

SEQ ID NO: 1003706 - RNA, 19 nt, Artificial Sequence
  Description of Artificial Sequence: Synthetic oligonucleotide
  Sense strand starting at position 2227 of SEQ ID NO: 914434
uggucaucugccuggacuu

SEQ ID NO: 1003707 - RNA, 19 nt, Artificial Sequence
  Description of Artificial Sequence: Synthetic oligonucleotide
  Antisense strand to SEQ ID NO: 1003706
aaguccaggcagaugacca

SEQ ID NO: 1003708 - RNA, 19 nt, Artificial Sequence
  Description of Artificial Sequence: Synthetic oligonucleotide
  Sense strand starting at position 2257 of SEQ ID NO: 914434
aggagcugucgcugaggau

SEQ ID NO: 1003709 - RNA, 19 nt, Artificial Sequence
  Description of Artificial Sequence: Synthetic oligonucleotide
  Antisense strand to SEQ ID NO: 1003708
auccucagcgacagcuccu

SEQ ID NO: 1003710 - RNA, 19 nt, Artificial Sequence
  Description of Artificial Sequence: Synthetic oligonucleotide
  Sense strand starting at position 2410 of SEQ ID NO: 914434
ggaccauucugucagccua

SEQ ID NO: 1003711 - RNA, 19 nt, Artificial Sequence
  Description of Artificial Sequence: Synthetic oligonucleotide
  Antisense strand to SEQ ID NO: 1003710
uaggcugacagaauggucc

SEQ ID NO: 1003712 - RNA, 19 nt, Artificial Sequence
  Description of Artificial Sequence: Synthetic oligonucleotide
  Sense strand starting at position 2690 of SEQ ID NO: 914434
gcuagauucugagggucca

SEQ ID NO: 1003713 - RNA, 19 nt, Artificial Sequence
  Description of Artificial Sequence: Synthetic oligonucleotide
  Antisense strand to SEQ ID NO: 1003712
uggacccucagaaucuagc

SEQ ID NO: 1003714 - RNA, 19 nt, Artificial Sequence
  Description of Artificial Sequence: Synthetic oligonucleotide
  Sense strand starting at position 2691 of SEQ ID NO: 914434
cuagauucugaggguccaa

SEQ ID NO: 1003715 - RNA, 19 nt, Artificial Sequence
  Description of Artificial Sequence: Synthetic oligonucleotide
  Antisense strand to SEQ ID NO: 1003714
uuggacccucagaaucuag

SEQ ID NO: 1003716 - RNA, 19 nt, Artificial Sequence
  Description of Artificial Sequence: Synthetic oligonucleotide
  Sense strand starting at position 2732 of SEQ ID NO: 914434
ggcccagucacagauggau

SEQ ID NO: 1003717 - RNA, 19 nt, Artificial Sequence
  Description of Artificial Sequence: Synthetic oligonucleotide
  Antisense strand to SEQ ID NO: 1003716
auccaucugugacugggcc

SEQ ID NO: 1003718 - RNA, 19 nt, Artificial Sequence
  Description of Artificial Sequence: Synthetic oligonucleotide
  Sense strand starting at position 3191 of SEQ ID NO: 914434
ccgacagcuuuguccuuaa

SEQ ID NO: 1003719 - RNA, 19 nt, Artificial Sequence
  Description of Artificial Sequence: Synthetic oligonucleotide
  Antisense strand to SEQ ID NO: 1003718
uuaaggacaaagcugucgg

SEQ ID NO: 1003720 - RNA, 19 nt, Artificial Sequence
  Description of Artificial Sequence: Synthetic oligonucleotide
  Sense strand starting at position 3269 of SEQ ID NO: 914434
ccagaagucucaggcaguu

SEQ ID NO: 1003721 - RNA, 19 nt, Artificial Sequence
  Description of Artificial Sequence: Synthetic oligonucleotide
  Antisense strand to SEQ ID NO: 1003720
aacugccugagacuucugg

SEQ ID NO: 1003722 - RNA, 19 nt, Artificial Sequence
  Description of Artificial Sequence: Synthetic oligonucleotide
  Sense strand starting at position 3327 of SEQ ID NO: 914434
ugugguugcucccaacaca

SEQ ID NO: 1003723 - RNA, 19 nt, Artificial Sequence
  Description of Artificial Sequence: Synthetic oligonucleotide
  Antisense strand to SEQ ID NO: 1003722
uguguugggagcaaccaca

SEQ ID NO: 1003724 - RNA, 19 nt, Artificial Sequence
  Description of Artificial Sequence: Synthetic oligonucleotide
  Sense strand starting at position 3444 of SEQ ID NO: 914434
cucaguccugcuggaggaa

SEQ ID NO: 1003725 - RNA, 19 nt, Artificial Sequence
  Description of Artificial Sequence: Synthetic oligonucleotide
  Antisense strand to SEQ ID NO: 1003724
uuccuccagcaggacugag

SEQ ID NO: 1003726 - RNA, 19 nt, Artificial Sequence
  Description of Artificial Sequence: Synthetic oligonucleotide
  Sense strand starting at position 3809 of SEQ ID NO: 914434
uuccgagcucccgugucau

SEQ ID NO: 1003727 - RNA, 19 nt, Artificial Sequence
  Description of Artificial Sequence: Synthetic oligonucleotide
  Antisense strand to SEQ ID NO: 1003726
augacacgggagcucggaa

SEQ ID NO: 1003728 - RNA, 19 nt, Artificial Sequence
  Description of Artificial Sequence: Synthetic oligonucleotide
  Sense strand starting at position 3819 of SEQ ID NO: 914434
ccgugucaucagcuguuga

SEQ ID NO: 1003729 - RNA, 19 nt, Artificial Sequence
  Description of Artificial Sequence: Synthetic oligonucleotide
  Antisense strand to SEQ ID NO: 1003728
ucaacagcugaugacacgg

SEQ ID NO: 1003730 - RNA, 19 nt, Artificial Sequence
  Description of Artificial Sequence: Synthetic oligonucleotide
  Sense strand starting at position 3844 of SEQ ID NO: 914434
gcaauaagaaaguguguaa

SEQ ID NO: 1003731 - RNA, 19 nt, Artificial Sequence
  Description of Artificial Sequence: Synthetic oligonucleotide
  Antisense strand to SEQ ID NO: 1003730
uuacacacuuucuuauugc

SEQ ID NO: 1003732 - RNA, 19 nt, Artificial Sequence
  Description of Artificial Sequence: Synthetic oligonucleotide
  Sense strand starting at position 3851 of SEQ ID NO: 914434
gaaaguguguaaggcauua

SEQ ID NO: 1003733 - RNA, 19 nt, Artificial Sequence
  Description of Artificial Sequence: Synthetic oligonucleotide
  Antisense strand to SEQ ID NO: 1003732
uaaugccuuacacacuuuc

SEQ ID NO: 1003734 - RNA, 19 nt, Artificial Sequence
  Description of Artificial Sequence: Synthetic oligonucleotide
  Sense strand starting at position 3856 of SEQ ID NO: 914434
uguguaaggcauuacaaga

SEQ ID NO: 1003735 - RNA, 19 nt, Artificial Sequence
  Description of Artificial Sequence: Synthetic oligonucleotide
  Antisense strand to SEQ ID NO: 1003734
ucuuguaaugccuuacaca

SEQ ID NO: 1003736 - RNA, 19 nt, Artificial Sequence
  Description of Artificial Sequence: Synthetic oligonucleotide
  Sense strand starting at position 114 of SEQ ID NO: 914435
aacccucagcgcuggaauu

SEQ ID NO: 1003737 - RNA, 19 nt, Artificial Sequence
  Description of Artificial Sequence: Synthetic oligonucleotide
  Antisense strand to SEQ ID NO: 1003736
aauuccagcgcugaggguu

SEQ ID NO: 1003738 - RNA, 19 nt, Artificial Sequence
  Description of Artificial Sequence: Synthetic oligonucleotide
  Sense strand starting at position 295 of SEQ ID NO: 914435
guguguccucuagcgugua

SEQ ID NO: 1003739 - RNA, 19 nt, Artificial Sequence
  Description of Artificial Sequence: Synthetic oligonucleotide
  Antisense strand to SEQ ID NO: 1003738
uacacgcuagaggacacac

SEQ ID NO: 1003740 - RNA, 19 nt, Artificial Sequence
  Description of Artificial Sequence: Synthetic oligonucleotide
  Sense strand starting at position 297 of SEQ ID NO: 914435
guguccucuagcguguaaa

SEQ ID NO: 1003741 - RNA, 19 nt, Artificial Sequence
  Description of Artificial Sequence: Synthetic oligonucleotide
  Antisense strand to SEQ ID NO: 1003740
uuuacacgcuagaggacac

SEQ ID NO: 1003742 - RNA, 19 nt, Artificial Sequence
  Description of Artificial Sequence: Synthetic oligonucleotide
  Sense strand starting at position 300 of SEQ ID NO: 914435
uccucuagcguguaaacaa

SEQ ID NO: 1003743 - RNA, 19 nt, Artificial Sequence
  Description of Artificial Sequence: Synthetic oligonucleotide
  Antisense strand to SEQ ID NO: 1003742
uuguuuacacgcuagagga

SEQ ID NO: 1003744 - RNA, 19 nt, Artificial Sequence
  Description of Artificial Sequence: Synthetic oligonucleotide
  Sense strand starting at position 649 of SEQ ID NO: 914435
cggccucuccgcugaggaa

SEQ ID NO: 1003745 - RNA, 19 nt, Artificial Sequence
  Description of Artificial Sequence: Synthetic oligonucleotide
  Antisense strand to SEQ ID NO: 1003744
uuccucagcggagaggccg

SEQ ID NO: 1003746 - RNA, 19 nt, Artificial Sequence
  Description of Artificial Sequence: Synthetic oligonucleotide
  Sense strand starting at position 819 of SEQ ID NO: 914435
ugggcaaauucccaagacu

SEQ ID NO: 1003747 - RNA, 19 nt, Artificial Sequence
  Description of Artificial Sequence: Synthetic oligonucleotide
  Antisense strand to SEQ ID NO: 1003746
agucuugggaauuugccca

SEQ ID NO: 1003748 - RNA, 19 nt, Artificial Sequence
  Description of Artificial Sequence: Synthetic oligonucleotide
  Sense strand starting at position 1407 of SEQ ID NO: 914435
gguugagguugucuuugaa

SEQ ID NO: 1003749 - RNA, 19 nt, Artificial Sequence
  Description of Artificial Sequence: Synthetic oligonucleotide
  Antisense strand to SEQ ID NO: 1003748
uucaaagacaaccucaacc

SEQ ID NO: 1003750 - RNA, 19 nt, Artificial Sequence
  Description of Artificial Sequence: Synthetic oligonucleotide
  Sense strand starting at position 1410 of SEQ ID NO: 914435
ugagguugucuuugaacca

SEQ ID NO: 1003751 - RNA, 19 nt, Artificial Sequence
  Description of Artificial Sequence: Synthetic oligonucleotide
  Antisense strand to SEQ ID NO: 1003750
ugguucaaagacaaccuca

SEQ ID NO: 1003752 - RNA, 19 nt, Artificial Sequence
  Description of Artificial Sequence: Synthetic oligonucleotide
  Sense strand starting at position 1594 of SEQ ID NO: 914435
cccucucagcccugaguuu

SEQ ID NO: 1003753 - RNA, 19 nt, Artificial Sequence
  Description of Artificial Sequence: Synthetic oligonucleotide
  Antisense strand to SEQ ID NO: 1003752
aaacucagggcugagaggg

SEQ ID NO: 1003754 - RNA, 19 nt, Artificial Sequence
  Description of Artificial Sequence: Synthetic oligonucleotide
  Sense strand starting at position 1606 of SEQ ID NO: 914435
ugaguuuccucuccacacu

SEQ ID NO: 1003755 - RNA, 19 nt, Artificial Sequence
  Description of Artificial Sequence: Synthetic oligonucleotide
  Antisense strand to SEQ ID NO: 1003754
aguguggagaggaaacuca

SEQ ID NO: 1003756 - RNA, 19 nt, Artificial Sequence
  Description of Artificial Sequence: Synthetic oligonucleotide
  Sense strand starting at position 1654 of SEQ ID NO: 914435
gagguugucauggaaacgu

SEQ ID NO: 1003757 - RNA, 19 nt, Artificial Sequence
  Description of Artificial Sequence: Synthetic oligonucleotide
  Antisense strand to SEQ ID NO: 1003756
acguuuccaugacaaccuc

SEQ ID NO: 1003758 - RNA, 19 nt, Artificial Sequence
  Description of Artificial Sequence: Synthetic oligonucleotide
  Sense strand starting at position 2098 of SEQ ID NO: 914435
ggcguaugcaaauauguuu

SEQ ID NO: 1003759 - RNA, 19 nt, Artificial Sequence
  Description of Artificial Sequence: Synthetic oligonucleotide
  Antisense strand to SEQ ID NO: 1003758
aaacauauuugcauacgcc

SEQ ID NO: 1003760 - RNA, 19 nt, Artificial Sequence
  Description of Artificial Sequence: Synthetic oligonucleotide
  Sense strand starting at position 2204 of SEQ ID NO: 914435
gcgggucuagcuucuugua

SEQ ID NO: 1003761 - RNA, 19 nt, Artificial Sequence
  Description of Artificial Sequence: Synthetic oligonucleotide
  Antisense strand to SEQ ID NO: 1003760
uacaagaagcuagacccgc

SEQ ID NO: 1003762 - RNA, 19 nt, Artificial Sequence
  Description of Artificial Sequence: Synthetic oligonucleotide
  Sense strand starting at position 2206 of SEQ ID NO: 914435
gggucuagcuucuuguaca

SEQ ID NO: 1003763 - RNA, 19 nt, Artificial Sequence
  Description of Artificial Sequence: Synthetic oligonucleotide
  Antisense strand to SEQ ID NO: 1003762
uguacaagaagcuagaccc

SEQ ID NO: 1003764 - RNA, 19 nt, Artificial Sequence
  Description of Artificial Sequence: Synthetic oligonucleotide
  Sense strand starting at position 2219 of SEQ ID NO: 914435
uguacaccuuuauuaggaa

SEQ ID NO: 1003765 - RNA, 19 nt, Artificial Sequence
  Description of Artificial Sequence: Synthetic oligonucleotide
  Antisense strand to SEQ ID NO: 1003764
uuccuaauaaagguguaca

SEQ ID NO: 1003766 - RNA, 19 nt, Artificial Sequence
  Description of Artificial Sequence: Synthetic oligonucleotide
  Sense strand starting at position 2220 of SEQ ID NO: 914435
guacaccuuuauuaggaau

SEQ ID NO: 1003767 - RNA, 19 nt, Artificial Sequence
  Description of Artificial Sequence: Synthetic oligonucleotide
  Antisense strand to SEQ ID NO: 1003766
auuccuaauaaagguguac

SEQ ID NO: 1003768 - RNA, 19 nt, Artificial Sequence
  Description of Artificial Sequence: Synthetic oligonucleotide
  Sense strand starting at position 2239 of SEQ ID NO: 914435
guuuauagcaaucgcugua

SEQ ID NO: 1003769 - RNA, 19 nt, Artificial Sequence
  Description of Artificial Sequence: Synthetic oligonucleotide
  Antisense strand to SEQ ID NO: 1003768
uacagcgauugcuauaaac

SEQ ID NO: 1003770 - RNA, 19 nt, Artificial Sequence
  Description of Artificial Sequence: Synthetic oligonucleotide
  Sense strand starting at position 2242 of SEQ ID NO: 914435
uauagcaaucgcuguauca

SEQ ID NO: 1003771 - RNA, 19 nt, Artificial Sequence
  Description of Artificial Sequence: Synthetic oligonucleotide
  Antisense strand to SEQ ID NO: 1003770
ugauacagcgauugcuaua

SEQ ID NO: 1003772 - RNA, 19 nt, Artificial Sequence
  Description of Artificial Sequence: Synthetic oligonucleotide
  Sense strand starting at position 2244 of SEQ ID NO: 914435
uagcaaucgcuguaucaga

SEQ ID NO: 1003773 - RNA, 19 nt, Artificial Sequence
  Description of Artificial Sequence: Synthetic oligonucleotide
  Antisense strand to SEQ ID NO: 1003772
ucugauacagcgauugcua

SEQ ID NO: 1003774 - RNA, 19 nt, Artificial Sequence
  Description of Artificial Sequence: Synthetic oligonucleotide
  Sense strand starting at position 2313 of SEQ ID NO: 914435
gugcaucuggccuagcgaa

SEQ ID NO: 1003775 - RNA, 19 nt, Artificial Sequence
  Description of Artificial Sequence: Synthetic oligonucleotide
  Antisense strand to SEQ ID NO: 1003774
uucgcuaggccagaugcac

SEQ ID NO: 1003776 - RNA, 19 nt, Artificial Sequence
  Description of Artificial Sequence: Synthetic oligonucleotide
  Sense strand starting at position 2328 of SEQ ID NO: 914435
cgaaccagacguugcaaau

SEQ ID NO: 1003777 - RNA, 19 nt, Artificial Sequence
  Description of Artificial Sequence: Synthetic oligonucleotide
  Antisense strand to SEQ ID NO: 1003776
auuugcaacgucugguucg

SEQ ID NO: 1003778 - RNA, 19 nt, Artificial Sequence
  Description of Artificial Sequence: Synthetic oligonucleotide
  Sense strand starting at position 2584 of SEQ ID NO: 914435
gcagaaucucgggaaaggu

SEQ ID NO: 1003779 - RNA, 19 nt, Artificial Sequence
  Description of Artificial Sequence: Synthetic oligonucleotide
  Antisense strand to SEQ ID NO: 1003778
accuuucccgagauucugc

SEQ ID NO: 1003780 - RNA, 19 nt, Artificial Sequence
  Description of Artificial Sequence: Synthetic oligonucleotide
  Sense strand starting at position 2675 of SEQ ID NO: 914435
uguugaauauaugugugaa

SEQ ID NO: 1003781 - RNA, 19 nt, Artificial Sequence
  Description of Artificial Sequence: Synthetic oligonucleotide
  Antisense strand to SEQ ID NO: 1003780
uucacacauauauucaaca

SEQ ID NO: 1003782 - RNA, 19 nt, Artificial Sequence
  Description of Artificial Sequence: Synthetic oligonucleotide
  Sense strand starting at position 2676 of SEQ ID NO: 914435
guugaauauaugugugaaa

SEQ ID NO: 1003783 - RNA, 19 nt, Artificial Sequence
  Description of Artificial Sequence: Synthetic oligonucleotide
  Antisense strand to SEQ ID NO: 1003782
uuucacacauauauucaac

SEQ ID NO: 1003784 - RNA, 19 nt, Artificial Sequence
  Description of Artificial Sequence: Synthetic oligonucleotide
  Sense strand starting at position 2919 of SEQ ID NO: 914435
gggagagccucuccugcua

SEQ ID NO: 1003785 - RNA, 19 nt, Artificial Sequence
  Description of Artificial Sequence: Synthetic oligonucleotide
  Antisense strand to SEQ ID NO: 1003784
uagcaggagaggcucuccc

SEQ ID NO: 1003786 - RNA, 19 nt, Artificial Sequence
  Description of Artificial Sequence: Synthetic oligonucleotide
  Sense strand starting at position 2972 of SEQ ID NO: 914435
ccgaaauucucuuugcuuu

SEQ ID NO: 1003787 - RNA, 19 nt, Artificial Sequence
  Description of Artificial Sequence: Synthetic oligonucleotide
  Antisense strand to SEQ ID NO: 1003786
aaagcaaagagaauuucgg

SEQ ID NO: 1003788 - RNA, 19 nt, Artificial Sequence
  Description of Artificial Sequence: Synthetic oligonucleotide
  Sense strand starting at position 3077 of SEQ ID NO: 914435
cccucuguugcucaagcau

SEQ ID NO: 1003789 - RNA, 19 nt, Artificial Sequence
  Description of Artificial Sequence: Synthetic oligonucleotide
  Antisense strand to SEQ ID NO: 1003788
augcuugagcaacagaggg

SEQ ID NO: 1003790 - RNA, 19 nt, Artificial Sequence
  Description of Artificial Sequence: Synthetic oligonucleotide
  Sense strand starting at position 3109 of SEQ ID NO: 914435
gagccauauuaaguguaaa

SEQ ID NO: 1003791 - RNA, 19 nt, Artificial Sequence
  Description of Artificial Sequence: Synthetic oligonucleotide
  Antisense strand to SEQ ID NO: 1003790
uuuacacuuaauauggcuc

SEQ ID NO: 1003792 - RNA, 19 nt, Artificial Sequence
  Description of Artificial Sequence: Synthetic oligonucleotide
  Sense strand starting at position 3230 of SEQ ID NO: 914435
gacaaauuaucuguggcua

SEQ ID NO: 1003793 - RNA, 19 nt, Artificial Sequence
  Description of Artificial Sequence: Synthetic oligonucleotide
  Antisense strand to SEQ ID NO: 1003792
uagccacagauaauuuguc

SEQ ID NO: 1003794 - RNA, 19 nt, Artificial Sequence
  Description of Artificial Sequence: Synthetic oligonucleotide
  Sense strand starting at position 3231 of SEQ ID NO: 914435
acaaauuaucuguggcuaa

SEQ ID NO: 1003795 - RNA, 19 nt, Artificial Sequence
  Description of Artificial Sequence: Synthetic oligonucleotide
  Antisense strand to SEQ ID NO: 1003794
uuagccacagauaauuugu

SEQ ID NO: 1003796 - RNA, 19 nt, Artificial Sequence
  Description of Artificial Sequence: Synthetic oligonucleotide
  Sense strand starting at position 3234 of SEQ ID NO: 914435
aauuaucuguggcuaaaug

SEQ ID NO: 1003797 - RNA, 19 nt, Artificial Sequence
  Description of Artificial Sequence: Synthetic oligonucleotide
  Antisense strand to SEQ ID NO: 1003796
cauuuagccacagauaauu

SEQ ID NO: 1003798 - RNA, 19 nt, Artificial Sequence
  Description of Artificial Sequence: Synthetic oligonucleotide
  Sense strand starting at position 3235 of SEQ ID NO: 914435
auuaucuguggcuaaauga

SEQ ID NO: 1003799 - RNA, 19 nt, Artificial Sequence
  Description of Artificial Sequence: Synthetic oligonucleotide
  Antisense strand to SEQ ID NO: 1003798
ucauuuagccacagauaau

SEQ ID NO: 1003800 - RNA, 19 nt, Artificial Sequence
  Description of Artificial Sequence: Synthetic oligonucleotide
  Sense strand starting at position 3274 of SEQ ID NO: 914435
aauugcuaagucugagcua

SEQ ID NO: 1003801 - RNA, 19 nt, Artificial Sequence
  Description of Artificial Sequence: Synthetic oligonucleotide
  Antisense strand to SEQ ID NO: 1003800
uagcucagacuuagcaauu

SEQ ID NO: 1003802 - RNA, 19 nt, Artificial Sequence
  Description of Artificial Sequence: Synthetic oligonucleotide
  Sense strand starting at position 3277 of SEQ ID NO: 914435
ugcuaagucugagcuauag

SEQ ID NO: 1003803 - RNA, 19 nt, Artificial Sequence
  Description of Artificial Sequence: Synthetic oligonucleotide
  Antisense strand to SEQ ID NO: 1003802
cuauagcucagacuuagca

SEQ ID NO: 1003804 - RNA, 19 nt, Artificial Sequence
  Description of Artificial Sequence: Synthetic oligonucleotide
  Sense strand starting at position 3281 of SEQ ID NO: 914435
aagucugagcuauagucua

SEQ ID NO: 1003805 - RNA, 19 nt, Artificial Sequence
  Description of Artificial Sequence: Synthetic oligonucleotide
  Antisense strand to SEQ ID NO: 1003804
uagacuauagcucagacuu

SEQ ID NO: 1003806 - RNA, 19 nt, Artificial Sequence
  Description of Artificial Sequence: Synthetic oligonucleotide
  Sense strand starting at position 3446 of SEQ ID NO: 914435
auaaacuaauuucgagacu

SEQ ID NO: 1003807 - RNA, 19 nt, Artificial Sequence
  Description of Artificial Sequence: Synthetic oligonucleotide
  Antisense strand to SEQ ID NO: 1003806
agucucgaaauuaguuuau

SEQ ID NO: 1003808 - RNA, 19 nt, Artificial Sequence
  Description of Artificial Sequence: Synthetic oligonucleotide
  Sense strand starting at position 3481 of SEQ ID NO: 914435
ccuggauauucugcucugu

SEQ ID NO: 1003809 - RNA, 19 nt, Artificial Sequence
  Description of Artificial Sequence: Synthetic oligonucleotide
  Antisense strand to SEQ ID NO: 1003808
acagagcagaauauccagg

SEQ ID NO: 1003810 - RNA, 19 nt, Artificial Sequence
  Description of Artificial Sequence: Synthetic oligonucleotide
  Sense strand starting at position 3483 of SEQ ID NO: 914435
uggauauucugcucuguaa

SEQ ID NO: 1003811 - RNA, 19 nt, Artificial Sequence
  Description of Artificial Sequence: Synthetic oligonucleotide
  Antisense strand to SEQ ID NO: 1003810
uuacagagcagaauaucca

SEQ ID NO: 1003812 - RNA, 19 nt, Artificial Sequence
  Description of Artificial Sequence: Synthetic oligonucleotide
  Sense strand starting at position 3685 of SEQ ID NO: 914435
agagcaaaguuccaccaaa

SEQ ID NO: 1003813 - RNA, 19 nt, Artificial Sequence
  Description of Artificial Sequence: Synthetic oligonucleotide
  Antisense strand to SEQ ID NO: 1003812
uuugguggaacuuugcucu

SEQ ID NO: 1003814 - RNA, 19 nt, Artificial Sequence
  Description of Artificial Sequence: Synthetic oligonucleotide
  Sense strand starting at position 3737 of SEQ ID NO: 914435
gcugacugaugccuguaau

SEQ ID NO: 1003815 - RNA, 19 nt, Artificial Sequence
  Description of Artificial Sequence: Synthetic oligonucleotide
  Antisense strand to SEQ ID NO: 1003814
auuacaggcaucagucagc

SEQ ID NO: 1003816 - RNA, 19 nt, Artificial Sequence
  Description of Artificial Sequence: Synthetic oligonucleotide
  Sense strand starting at position 4 of SEQ ID NO: 914436
gugaaagcuaaugguuaaa

SEQ ID NO: 1003817 - RNA, 19 nt, Artificial Sequence
  Description of Artificial Sequence: Synthetic oligonucleotide
  Antisense strand to SEQ ID NO: 1003816
uuuaaccauuagcuuucac

SEQ ID NO: 1003818 - RNA, 19 nt, Artificial Sequence
  Description of Artificial Sequence: Synthetic oligonucleotide
  Sense strand starting at position 44 of SEQ ID NO: 914436
gagugcagccauuauuaaa

SEQ ID NO: 1003819 - RNA, 19 nt, Artificial Sequence
  Description of Artificial Sequence: Synthetic oligonucleotide
  Antisense strand to SEQ ID NO: 1003818
uuuaauaauggcugcacuc

SEQ ID NO: 1003820 - RNA, 19 nt, Artificial Sequence
  Description of Artificial Sequence: Synthetic oligonucleotide
  Sense strand starting at position 122 of SEQ ID NO: 914436
uuuauaugugggugagaaa

SEQ ID NO: 1003821 - RNA, 19 nt, Artificial Sequence
  Description of Artificial Sequence: Synthetic oligonucleotide
  Antisense strand to SEQ ID NO: 1003820
uuucucacccacauauaaa

SEQ ID NO: 1003822 - RNA, 19 nt, Artificial Sequence
  Description of Artificial Sequence: Synthetic oligonucleotide
  Sense strand starting at position 223 of SEQ ID NO: 914436
ucaaaucauggcugaauag

SEQ ID NO: 1003823 - RNA, 19 nt, Artificial Sequence
  Description of Artificial Sequence: Synthetic oligonucleotide
  Antisense strand to SEQ ID NO: 1003822
cuauucagccaugauuuga

SEQ ID NO: 1003824 - RNA, 19 nt, Artificial Sequence
  Description of Artificial Sequence: Synthetic oligonucleotide
  Sense strand starting at position 300 of SEQ ID NO: 914436
gagacucagugggcuauau

SEQ ID NO: 1003825 - RNA, 19 nt, Artificial Sequence
  Description of Artificial Sequence: Synthetic oligonucleotide
  Antisense strand to SEQ ID NO: 1003824
auauagcccacugagucuc

SEQ ID NO: 1003826 - RNA, 19 nt, Artificial Sequence
  Description of Artificial Sequence: Synthetic oligonucleotide
  Sense strand starting at position 302 of SEQ ID NO: 914436
gacucagugggcuauauaa

SEQ ID NO: 1003827 - RNA, 19 nt, Artificial Sequence
  Description of Artificial Sequence: Synthetic oligonucleotide
  Antisense strand to SEQ ID NO: 1003826
uuauauagcccacugaguc

SEQ ID NO: 1003828 - RNA, 19 nt, Artificial Sequence
  Description of Artificial Sequence: Synthetic oligonucleotide
  Sense strand starting at position 658 of SEQ ID NO: 914436
uuauaaauuguguaccaca

SEQ ID NO: 1003829 - RNA, 19 nt, Artificial Sequence
  Description of Artificial Sequence: Synthetic oligonucleotide
  Antisense strand to SEQ ID NO: 1003828
ugugguacacaauuuauaa

SEQ ID NO: 1003830 - RNA, 19 nt, Artificial Sequence
  Description of Artificial Sequence: Synthetic oligonucleotide
  Sense strand starting at position 694 of SEQ ID NO: 914436
auuauauaugugcaugagu

SEQ ID NO: 1003831 - RNA, 19 nt, Artificial Sequence
  Description of Artificial Sequence: Synthetic oligonucleotide
  Antisense strand to SEQ ID NO: 1003830
acucaugcacauauauaau

SEQ ID NO: 1003832 - RNA, 19 nt, Artificial Sequence
  Description of Artificial Sequence: Synthetic oligonucleotide
  Sense strand starting at position 697 of SEQ ID NO: 914436
auauaugugcaugaguaca

SEQ ID NO: 1003833 - RNA, 19 nt, Artificial Sequence
  Description of Artificial Sequence: Synthetic oligonucleotide
  Antisense strand to SEQ ID NO: 1003832
uguacucaugcacauauau

SEQ ID NO: 1003834 - RNA, 19 nt, Artificial Sequence
  Description of Artificial Sequence: Synthetic oligonucleotide
  Sense strand starting at position 699 of SEQ ID NO: 914436
auaugugcaugaguacaua

SEQ ID NO: 1003835 - RNA, 19 nt, Artificial Sequence
  Description of Artificial Sequence: Synthetic oligonucleotide
  Antisense strand to SEQ ID NO: 1003834
uauguacucaugcacauau

SEQ ID NO: 1003836 - RNA, 19 nt, Artificial Sequence
  Description of Artificial Sequence: Synthetic oligonucleotide
  Sense strand starting at position 763 of SEQ ID NO: 914436
acuuaagaggcauggaauu

SEQ ID NO: 1003837 - RNA, 19 nt, Artificial Sequence
  Description of Artificial Sequence: Synthetic oligonucleotide
  Antisense strand to SEQ ID NO: 1003836
aauuccaugccucuuaagu

SEQ ID NO: 1003838 - RNA, 19 nt, Artificial Sequence
  Description of Artificial Sequence: Synthetic oligonucleotide
  Sense strand starting at position 769 of SEQ ID NO: 914436
gaggcauggaauugucuga

SEQ ID NO: 1003839 - RNA, 19 nt, Artificial Sequence
  Description of Artificial Sequence: Synthetic oligonucleotide
  Antisense strand to SEQ ID NO: 1003838
ucagacaauuccaugccuc

SEQ ID NO: 1003840 - RNA, 19 nt, Artificial Sequence
  Description of Artificial Sequence: Synthetic oligonucleotide
  Sense strand starting at position 773 of SEQ ID NO: 914436
cauggaauugucugauacc

SEQ ID NO: 1003841 - RNA, 19 nt, Artificial Sequence
  Description of Artificial Sequence: Synthetic oligonucleotide
  Antisense strand to SEQ ID NO: 1003840
gguaucagacaauuccaug

SEQ ID NO: 1003842 - RNA, 19 nt, Artificial Sequence
  Description of Artificial Sequence: Synthetic oligonucleotide
  Sense strand starting at position 808 of SEQ ID NO: 914436
caggcugucuuaccugaau

SEQ ID NO: 1003843 - RNA, 19 nt, Artificial Sequence
  Description of Artificial Sequence: Synthetic oligonucleotide
  Antisense strand to SEQ ID NO: 1003842
auucagguaagacagccug

SEQ ID NO: 1003844 - RNA, 19 nt, Artificial Sequence
  Description of Artificial Sequence: Synthetic oligonucleotide
  Sense strand starting at position 811 of SEQ ID NO: 914436
gcugucuuaccugaauggu

SEQ ID NO: 1003845 - RNA, 19 nt, Artificial Sequence
  Description of Artificial Sequence: Synthetic oligonucleotide
  Antisense strand to SEQ ID NO: 1003844
accauucagguaagacagc

SEQ ID NO: 1003846 - RNA, 19 nt, Artificial Sequence
  Description of Artificial Sequence: Synthetic oligonucleotide
  Sense strand starting at position 1031 of SEQ ID NO: 914436
ucagacuggucauuauauu

SEQ ID NO: 1003847 - RNA, 19 nt, Artificial Sequence
  Description of Artificial Sequence: Synthetic oligonucleotide
  Antisense strand to SEQ ID NO: 1003846
aauauaaugaccagucuga

SEQ ID NO: 1003848 - RNA, 19 nt, Artificial Sequence
  Description of Artificial Sequence: Synthetic oligonucleotide
  Sense strand starting at position 1079 of SEQ ID NO: 914436
aguggacuucugggagguu

SEQ ID NO: 1003849 - RNA, 19 nt, Artificial Sequence
  Description of Artificial Sequence: Synthetic oligonucleotide
  Antisense strand to SEQ ID NO: 1003848
aaccucccagaaguccacu

SEQ ID NO: 1003850 - RNA, 19 nt, Artificial Sequence
  Description of Artificial Sequence: Synthetic oligonucleotide
  Sense strand starting at position 1120 of SEQ ID NO: 914436
gucugauagagcuggagga

SEQ ID NO: 1003851 - RNA, 19 nt, Artificial Sequence
  Description of Artificial Sequence: Synthetic oligonucleotide
  Antisense strand to SEQ ID NO: 1003850
uccuccagcucuaucagac

SEQ ID NO: 1003852 - RNA, 19 nt, Artificial Sequence
  Description of Artificial Sequence: Synthetic oligonucleotide
  Sense strand starting at position 1353 of SEQ ID NO: 914436
agagauuaucucugcaauu

SEQ ID NO: 1003853 - RNA, 19 nt, Artificial Sequence
  Description of Artificial Sequence: Synthetic oligonucleotide
  Antisense strand to SEQ ID NO: 1003852
aauugcagagauaaucucu

SEQ ID NO: 1003854 - RNA, 19 nt, Artificial Sequence
  Description of Artificial Sequence: Synthetic oligonucleotide
  Sense strand starting at position 1369 of SEQ ID NO: 914436
auuggaaucugagaaauaa

SEQ ID NO: 1003855 - RNA, 19 nt, Artificial Sequence
  Description of Artificial Sequence: Synthetic oligonucleotide
  Antisense strand to SEQ ID NO: 1003854
uuauuucucagauuccaau

SEQ ID NO: 1003856 - RNA, 19 nt, Artificial Sequence
  Description of Artificial Sequence: Synthetic oligonucleotide
  Sense strand starting at position 1818 of SEQ ID NO: 914436
guauaaaucgcggacuaac

SEQ ID NO: 1003857 - RNA, 19 nt, Artificial Sequence
  Description of Artificial Sequence: Synthetic oligonucleotide
  Antisense strand to SEQ ID NO: 1003856
guuaguccgcgauuuauac

SEQ ID NO: 1003858 - RNA, 19 nt, Artificial Sequence
  Description of Artificial Sequence: Synthetic oligonucleotide
  Sense strand starting at position 2227 of SEQ ID NO: 914436
uugcauugaggucauugau

SEQ ID NO: 1003859 - RNA, 19 nt, Artificial Sequence
  Description of Artificial Sequence: Synthetic oligonucleotide
  Antisense strand to SEQ ID NO: 1003858
aucaaugaccucaaugcaa

SEQ ID NO: 1003860 - RNA, 19 nt, Artificial Sequence
  Description of Artificial Sequence: Synthetic oligonucleotide
  Sense strand starting at position 2230 of SEQ ID NO: 914436
cauugaggucauugaugga

SEQ ID NO: 1003861 - RNA, 19 nt, Artificial Sequence
  Description of Artificial Sequence: Synthetic oligonucleotide
  Antisense strand to SEQ ID NO: 1003860
uccaucaaugaccucaaug

SEQ ID NO: 1003862 - RNA, 19 nt, Artificial Sequence
  Description of Artificial Sequence: Synthetic oligonucleotide
  Sense strand starting at position 2286 of SEQ ID NO: 914436
ccuuaaagugagcgggaau

SEQ ID NO: 1003863 - RNA, 19 nt, Artificial Sequence
  Description of Artificial Sequence: Synthetic oligonucleotide
  Antisense strand to SEQ ID NO: 1003862
auucccgcucacuuuaagg

SEQ ID NO: 1003864 - RNA, 19 nt, Artificial Sequence
  Description of Artificial Sequence: Synthetic oligonucleotide
  Sense strand starting at position 2287 of SEQ ID NO: 914436
cuuaaagugagcgggaauu

SEQ ID NO: 1003865 - RNA, 19 nt, Artificial Sequence
  Description of Artificial Sequence: Synthetic oligonucleotide
  Antisense strand to SEQ ID NO: 1003864
aauucccgcucacuuuaag

SEQ ID NO: 1003866 - RNA, 19 nt, Artificial Sequence
  Description of Artificial Sequence: Synthetic oligonucleotide
  Sense strand starting at position 2397 of SEQ ID NO: 914436
gcggaaaggguccaggauu

SEQ ID NO: 1003867 - RNA, 19 nt, Artificial Sequence
  Description of Artificial Sequence: Synthetic oligonucleotide
  Antisense strand to SEQ ID NO: 1003866
aauccuggacccuuuccgc

SEQ ID NO: 1003868 - RNA, 19 nt, Artificial Sequence
  Description of Artificial Sequence: Synthetic oligonucleotide
  Sense strand starting at position 2488 of SEQ ID NO: 914436
ggguucugggcccaagaaa

SEQ ID NO: 1003869 - RNA, 19 nt, Artificial Sequence
  Description of Artificial Sequence: Synthetic oligonucleotide
  Antisense strand to SEQ ID NO: 1003868
uuucuugggcccagaaccc

SEQ ID NO: 1003870 - RNA, 19 nt, Artificial Sequence
  Description of Artificial Sequence: Synthetic oligonucleotide
  Sense strand starting at position 2574 of SEQ ID NO: 914436
gagcaagaacuuuguuaga

SEQ ID NO: 1003871 - RNA, 19 nt, Artificial Sequence
  Description of Artificial Sequence: Synthetic oligonucleotide
  Antisense strand to SEQ ID NO: 1003870
ucuaacaaaguucuugcuc

SEQ ID NO: 1003872 - RNA, 19 nt, Artificial Sequence
  Description of Artificial Sequence: Synthetic oligonucleotide
  Sense strand starting at position 2576 of SEQ ID NO: 914436
gcaagaacuuuguuagaca

SEQ ID NO: 1003873 - RNA, 19 nt, Artificial Sequence
  Description of Artificial Sequence: Synthetic oligonucleotide
  Antisense strand to SEQ ID NO: 1003872
ugucuaacaaaguucuugc

SEQ ID NO: 1003874 - RNA, 19 nt, Artificial Sequence
  Description of Artificial Sequence: Synthetic oligonucleotide
  Sense strand starting at position 2583 of SEQ ID NO: 914436
cuuuguuagacaggaguuc

SEQ ID NO: 1003875 - RNA, 19 nt, Artificial Sequence
  Description of Artificial Sequence: Synthetic oligonucleotide
  Antisense strand to SEQ ID NO: 1003874
gaacuccugucuaacaaag

SEQ ID NO: 1003876 - RNA, 19 nt, Artificial Sequence
  Description of Artificial Sequence: Synthetic oligonucleotide
  Sense strand starting at position 2663 of SEQ ID NO: 914436
guguacucaucuuugaaau

SEQ ID NO: 1003877 - RNA, 19 nt, Artificial Sequence
  Description of Artificial Sequence: Synthetic oligonucleotide
  Antisense strand to SEQ ID NO: 1003876
auuucaaagaugaguacac

SEQ ID NO: 1003878 - RNA, 19 nt, Artificial Sequence
  Description of Artificial Sequence: Synthetic oligonucleotide
  Sense strand starting at position 2664 of SEQ ID NO: 914436
uguacucaucuuugaaaug

SEQ ID NO: 1003879 - RNA, 19 nt, Artificial Sequence
  Description of Artificial Sequence: Synthetic oligonucleotide
  Antisense strand to SEQ ID NO: 1003878
cauuucaaagaugaguaca

SEQ ID NO: 1003880 - RNA, 19 nt, Artificial Sequence
  Description of Artificial Sequence: Synthetic oligonucleotide
  Sense strand starting at position 2693 of SEQ ID NO: 914436
ucucaucuugaaggaauau

SEQ ID NO: 1003881 - RNA, 19 nt, Artificial Sequence
  Description of Artificial Sequence: Synthetic oligonucleotide
  Antisense strand to SEQ ID NO: 1003880
auauuccuucaagaugaga

SEQ ID NO: 1003882 - RNA, 19 nt, Artificial Sequence
  Description of Artificial Sequence: Synthetic oligonucleotide
  Sense strand starting at position 2786 of SEQ ID NO: 914436
ucuguaagaucuccaugga

SEQ ID NO: 1003883 - RNA, 19 nt, Artificial Sequence
  Description of Artificial Sequence: Synthetic oligonucleotide
  Antisense strand to SEQ ID NO: 1003882
uccauggagaucuuacaga

SEQ ID NO: 1003884 - RNA, 19 nt, Artificial Sequence
  Description of Artificial Sequence: Synthetic oligonucleotide
  Sense strand starting at position 2789 of SEQ ID NO: 914436
guaagaucuccauggauac

SEQ ID NO: 1003885 - RNA, 19 nt, Artificial Sequence
  Description of Artificial Sequence: Synthetic oligonucleotide
  Antisense strand to SEQ ID NO: 1003884
guauccauggagaucuuac

SEQ ID NO: 1003886 - RNA, 19 nt, Artificial Sequence
  Description of Artificial Sequence: Synthetic oligonucleotide
  Sense strand starting at position 2854 of SEQ ID NO: 914436
uccauuacaugugugagga

SEQ ID NO: 1003887 - RNA, 19 nt, Artificial Sequence
  Description of Artificial Sequence: Synthetic oligonucleotide
  Antisense strand to SEQ ID NO: 1003886
uccucacacauguaaugga

SEQ ID NO: 1003888 - RNA, 19 nt, Artificial Sequence
  Description of Artificial Sequence: Synthetic oligonucleotide
  Sense strand starting at position 2855 of SEQ ID NO: 914436
ccauuacaugugugaggag

SEQ ID NO: 1003889 - RNA, 19 nt, Artificial Sequence
  Description of Artificial Sequence: Synthetic oligonucleotide
  Antisense strand to SEQ ID NO: 1003888
cuccucacacauguaaugg

SEQ ID NO: 1003890 - RNA, 19 nt, Artificial Sequence
  Description of Artificial Sequence: Synthetic oligonucleotide
  Sense strand starting at position 2903 of SEQ ID NO: 914436
ugaguugcaagguacagau

SEQ ID NO: 1003891 - RNA, 19 nt, Artificial Sequence
  Description of Artificial Sequence: Synthetic oligonucleotide
  Antisense strand to SEQ ID NO: 1003890
aucuguaccuugcaacuca

SEQ ID NO: 1003892 - RNA, 19 nt, Artificial Sequence
  Description of Artificial Sequence: Synthetic oligonucleotide
  Sense strand starting at position 3778 of SEQ ID NO: 914436
cgucgaaauuucuuagcac

SEQ ID NO: 1003893 - RNA, 19 nt, Artificial Sequence
  Description of Artificial Sequence: Synthetic oligonucleotide
  Antisense strand to SEQ ID NO: 1003892
gugcuaagaaauuucgacg

SEQ ID NO: 1003894 - RNA, 19 nt, Artificial Sequence
  Description of Artificial Sequence: Synthetic oligonucleotide
  Sense strand starting at position 3882 of SEQ ID NO: 914436
cuaagaugcccuuaauuga

SEQ ID NO: 1003895 - RNA, 19 nt, Artificial Sequence
  Description of Artificial Sequence: Synthetic oligonucleotide
  Antisense strand to SEQ ID NO: 1003894
ucaauuaagggcaucuuag

SEQ ID NO: 1003896 - RNA, 19 nt, Artificial Sequence
  Description of Artificial Sequence: Synthetic oligonucleotide
  Sense strand starting at position 52 of SEQ ID NO: 914437
gagaucucccaguacugca

SEQ ID NO: 1003897 - RNA, 19 nt, Artificial Sequence
  Description of Artificial Sequence: Synthetic oligonucleotide
  Antisense strand to SEQ ID NO: 1003896
ugcaguacugggagaucuc

SEQ ID NO: 1003898 - RNA, 19 nt, Artificial Sequence
  Description of Artificial Sequence: Synthetic oligonucleotide
  Sense strand starting at position 60 of SEQ ID NO: 914437
ccaguacugcaagagcaau

SEQ ID NO: 1003899 - RNA, 19 nt, Artificial Sequence
  Description of Artificial Sequence: Synthetic oligonucleotide
  Antisense strand to SEQ ID NO: 1003898
auugcucuugcaguacugg

SEQ ID NO: 1003900 - RNA, 19 nt, Artificial Sequence
  Description of Artificial Sequence: Synthetic oligonucleotide
  Sense strand starting at position 274 of SEQ ID NO: 914437
gggagccugcuggacaaau

SEQ ID NO: 1003901 - RNA, 19 nt, Artificial Sequence
  Description of Artificial Sequence: Synthetic oligonucleotide
  Antisense strand to SEQ ID NO: 1003900
auuuguccagcaggcuccc

SEQ ID NO: 1003902 - RNA, 19 nt, Artificial Sequence
  Description of Artificial Sequence: Synthetic oligonucleotide
  Sense strand starting at position 286 of SEQ ID NO: 914437
gacaaaucagcuugcugga

SEQ ID NO: 1003903 - RNA, 19 nt, Artificial Sequence
  Description of Artificial Sequence: Synthetic oligonucleotide
  Antisense strand to SEQ ID NO: 1003902
uccagcaagcugauuuguc

SEQ ID NO: 1003904 - RNA, 19 nt, Artificial Sequence
  Description of Artificial Sequence: Synthetic oligonucleotide
  Sense strand starting at position 784 of SEQ ID NO: 914437
caggcugucucaccugaau

SEQ ID NO: 1003905 - RNA, 19 nt, Artificial Sequence
  Description of Artificial Sequence: Synthetic oligonucleotide
  Antisense strand to SEQ ID NO: 1003904
auucaggugagacagccug

SEQ ID NO: 1003906 - RNA, 19 nt, Artificial Sequence
  Description of Artificial Sequence: Synthetic oligonucleotide
  Sense strand starting at position 883 of SEQ ID NO: 914437
gccgccucucuguaaagga

SEQ ID NO: 1003907 - RNA, 19 nt, Artificial Sequence
  Description of Artificial Sequence: Synthetic oligonucleotide
  Antisense strand to SEQ ID NO: 1003906
uccuuuacagagaggcggc

SEQ ID NO: 1003908 - RNA, 19 nt, Artificial Sequence
  Description of Artificial Sequence: Synthetic oligonucleotide
  Sense strand starting at position 1030 of SEQ ID NO: 914437
ugcugugaaucucaagaga

SEQ ID NO: 1003909 - RNA, 19 nt, Artificial Sequence
  Description of Artificial Sequence: Synthetic oligonucleotide
  Antisense strand to SEQ ID NO: 1003908
ucucuugagauucacagca

SEQ ID NO: 1003910 - RNA, 19 nt, Artificial Sequence
  Description of Artificial Sequence: Synthetic oligonucleotide
  Sense strand starting at position 1047 of SEQ ID NO: 914437
gacacauugcagugaguga

SEQ ID NO: 1003911 - RNA, 19 nt, Artificial Sequence
  Description of Artificial Sequence: Synthetic oligonucleotide
  Antisense strand to SEQ ID NO: 1003910
ucacucacugcaauguguc

SEQ ID NO: 1003912 - RNA, 19 nt, Artificial Sequence
  Description of Artificial Sequence: Synthetic oligonucleotide
  Sense strand starting at position 1048 of SEQ ID NO: 914437
acacauugcagugagugaa

SEQ ID NO: 1003913 - RNA, 19 nt, Artificial Sequence
  Description of Artificial Sequence: Synthetic oligonucleotide
  Antisense strand to SEQ ID NO: 1003912
uucacucacugcaaugugu

SEQ ID NO: 1003914 - RNA, 19 nt, Artificial Sequence
  Description of Artificial Sequence: Synthetic oligonucleotide
  Sense strand starting at position 1058 of SEQ ID NO: 914437
gugagugaauggcuugaua

SEQ ID NO: 1003915 - RNA, 19 nt, Artificial Sequence
  Description of Artificial Sequence: Synthetic oligonucleotide
  Antisense strand to SEQ ID NO: 1003914
uaucaagccauucacucac

SEQ ID NO: 1003916 - RNA, 19 nt, Artificial Sequence
  Description of Artificial Sequence: Synthetic oligonucleotide
  Sense strand starting at position 1060 of SEQ ID NO: 914437
gagugaauggcuugauaga

SEQ ID NO: 1003917 - RNA, 19 nt, Artificial Sequence
  Description of Artificial Sequence: Synthetic oligonucleotide
  Antisense strand to SEQ ID NO: 1003916
ucuaucaagccauucacuc

SEQ ID NO: 1003918 - RNA, 19 nt, Artificial Sequence
  Description of Artificial Sequence: Synthetic oligonucleotide
  Sense strand starting at position 1181 of SEQ ID NO: 914437
agacacuucugcccugauu

SEQ ID NO: 1003919 - RNA, 19 nt, Artificial Sequence
  Description of Artificial Sequence: Synthetic oligonucleotide
  Antisense strand to SEQ ID NO: 1003918
aaucagggcagaagugucu

SEQ ID NO: 1003920 - RNA, 19 nt, Artificial Sequence
  Description of Artificial Sequence: Synthetic oligonucleotide
  Sense strand starting at position 1190 of SEQ ID NO: 914437
ugcccugauuuaugccuaa

SEQ ID NO: 1003921 - RNA, 19 nt, Artificial Sequence
  Description of Artificial Sequence: Synthetic oligonucleotide
  Antisense strand to SEQ ID NO: 1003920
uuaggcauaaaucagggca

SEQ ID NO: 1003922 - RNA, 19 nt, Artificial Sequence
  Description of Artificial Sequence: Synthetic oligonucleotide
  Sense strand starting at position 1323 of SEQ ID NO: 914437
gcgcucauuucucagucuu

SEQ ID NO: 1003923 - RNA, 19 nt, Artificial Sequence
  Description of Artificial Sequence: Synthetic oligonucleotide
  Antisense strand to SEQ ID NO: 1003922
aagacugagaaaugagcgc

SEQ ID NO: 1003924 - RNA, 19 nt, Artificial Sequence
  Description of Artificial Sequence: Synthetic oligonucleotide
  Sense strand starting at position 1329 of SEQ ID NO: 914437
auuucucagucuuggaacu

SEQ ID NO: 1003925 - RNA, 19 nt, Artificial Sequence
  Description of Artificial Sequence: Synthetic oligonucleotide
  Antisense strand to SEQ ID NO: 1003924
aguuccaagacugagaaau

SEQ ID NO: 1003926 - RNA, 19 nt, Artificial Sequence
  Description of Artificial Sequence: Synthetic oligonucleotide
  Sense strand starting at position 1366 of SEQ ID NO: 914437
gccaguuacgggugucuca

SEQ ID NO: 1003927 - RNA, 19 nt, Artificial Sequence
  Description of Artificial Sequence: Synthetic oligonucleotide
  Antisense strand to SEQ ID NO: 1003926
ugagacacccguaacuggc

SEQ ID NO: 1003928 - RNA, 19 nt, Artificial Sequence
  Description of Artificial Sequence: Synthetic oligonucleotide
  Sense strand starting at position 1468 of SEQ ID NO: 914437
ggguucuaguccgcuaaca

SEQ ID NO: 1003929 - RNA, 19 nt, Artificial Sequence
  Description of Artificial Sequence: Synthetic oligonucleotide
  Antisense strand to SEQ ID NO: 1003928
uguuagcggacuagaaccc

SEQ ID NO: 1003930 - RNA, 19 nt, Artificial Sequence
  Description of Artificial Sequence: Synthetic oligonucleotide
  Sense strand starting at position 1470 of SEQ ID NO: 914437
guucuaguccgcuaacaac

SEQ ID NO: 1003931 - RNA, 19 nt, Artificial Sequence
  Description of Artificial Sequence: Synthetic oligonucleotide
  Antisense strand to SEQ ID NO: 1003930
guuguuagcggacuagaac

SEQ ID NO: 1003932 - RNA, 19 nt, Artificial Sequence
  Description of Artificial Sequence: Synthetic oligonucleotide
  Sense strand starting at position 1576 of SEQ ID NO: 914437
gaaacaugcucccgaagga

SEQ ID NO: 1003933 - RNA, 19 nt, Artificial Sequence
  Description of Artificial Sequence: Synthetic oligonucleotide
  Antisense strand to SEQ ID NO: 1003932
uccuucgggagcauguuuc

SEQ ID NO: 1003934 - RNA, 19 nt, Artificial Sequence
  Description of Artificial Sequence: Synthetic oligonucleotide
  Sense strand starting at position 1618 of SEQ ID NO: 914437
ggacccaacucugcagaau

SEQ ID NO: 1003935 - RNA, 19 nt, Artificial Sequence
  Description of Artificial Sequence: Synthetic oligonucleotide
  Antisense strand to SEQ ID NO: 1003934
auucugcagaguugggucc

SEQ ID NO: 1003936 - RNA, 19 nt, Artificial Sequence
  Description of Artificial Sequence: Synthetic oligonucleotide
  Sense strand starting at position 1884 of SEQ ID NO: 914437
gucgaagaagcagguuauu

SEQ ID NO: 1003937 - RNA, 19 nt, Artificial Sequence
  Description of Artificial Sequence: Synthetic oligonucleotide
  Antisense strand to SEQ ID NO: 1003936
aauaaccugcuucuucgac

SEQ ID NO: 1003938 - RNA, 19 nt, Artificial Sequence
  Description of Artificial Sequence: Synthetic oligonucleotide
  Sense strand starting at position 1893 of SEQ ID NO: 914437
gcagguuauucgagugagc

SEQ ID NO: 1003939 - RNA, 19 nt, Artificial Sequence
  Description of Artificial Sequence: Synthetic oligonucleotide
  Antisense strand to SEQ ID NO: 1003938
gcucacucgaauaaccugc

SEQ ID NO: 1003940 - RNA, 19 nt, Artificial Sequence
  Description of Artificial Sequence: Synthetic oligonucleotide
  Sense strand starting at position 1896 of SEQ ID NO: 914437
gguuauucgagugagcgga

SEQ ID NO: 1003941 - RNA, 19 nt, Artificial Sequence
  Description of Artificial Sequence: Synthetic oligonucleotide
  Antisense strand to SEQ ID NO: 1003940
uccgcucacucgaauaacc

SEQ ID NO: 1003942 - RNA, 19 nt, Artificial Sequence
  Description of Artificial Sequence: Synthetic oligonucleotide
  Sense strand starting at position 1897 of SEQ ID NO: 914437
guuauucgagugagcggaa

SEQ ID NO: 1003943 - RNA, 19 nt, Artificial Sequence
  Description of Artificial Sequence: Synthetic oligonucleotide
  Antisense strand to SEQ ID NO: 1003942
uuccgcucacucgaauaac

SEQ ID NO: 1003944 - RNA, 19 nt, Artificial Sequence
  Description of Artificial Sequence: Synthetic oligonucleotide
  Sense strand starting at position 2027 of SEQ ID NO: 914437
ccgcucuuauuacagagau

SEQ ID NO: 1003945 - RNA, 19 nt, Artificial Sequence
  Description of Artificial Sequence: Synthetic oligonucleotide
  Antisense strand to SEQ ID NO: 1003944
aucucuguaauaagagcgg

SEQ ID NO: 1003946 - RNA, 19 nt, Artificial Sequence
  Description of Artificial Sequence: Synthetic oligonucleotide
  Sense strand starting at position 2126 of SEQ ID NO: 914437
cuccgauugcgucauagcu

SEQ ID NO: 1003947 - RNA, 19 nt, Artificial Sequence
  Description of Artificial Sequence: Synthetic oligonucleotide
  Antisense strand to SEQ ID NO: 1003946
agcuaugacgcaaucggag

SEQ ID NO: 1003948 - RNA, 19 nt, Artificial Sequence
  Description of Artificial Sequence: Synthetic oligonucleotide
  Sense strand starting at position 2206 of SEQ ID NO: 914437
ugaggucauugcuugggaa

SEQ ID NO: 1003949 - RNA, 19 nt, Artificial Sequence
  Description of Artificial Sequence: Synthetic oligonucleotide
  Antisense strand to SEQ ID NO: 1003948
uucccaagcaaugaccuca

SEQ ID NO: 1003950 - RNA, 19 nt, Artificial Sequence
  Description of Artificial Sequence: Synthetic oligonucleotide
  Sense strand starting at position 2270 of SEQ ID NO: 914437
gggcaagucgaggagaguu

SEQ ID NO: 1003951 - RNA, 19 nt, Artificial Sequence
  Description of Artificial Sequence: Synthetic oligonucleotide
  Antisense strand to SEQ ID NO: 1003950
aacucuccucgacuugccc

SEQ ID NO: 1003952 - RNA, 19 nt, Artificial Sequence
  Description of Artificial Sequence: Synthetic oligonucleotide
  Sense strand starting at position 2410 of SEQ ID NO: 914437
gagguugagcaguaguagu

SEQ ID NO: 1003953 - RNA, 19 nt, Artificial Sequence
  Description of Artificial Sequence: Synthetic oligonucleotide
  Antisense strand to SEQ ID NO: 1003952
acuacuacugcucaaccuc

SEQ ID NO: 1003954 - RNA, 19 nt, Artificial Sequence
  Description of Artificial Sequence: Synthetic oligonucleotide
  Sense strand starting at position 2421 of SEQ ID NO: 914437
guaguaguccuggguucua

SEQ ID NO: 1003955 - RNA, 19 nt, Artificial Sequence
  Description of Artificial Sequence: Synthetic oligonucleotide
  Antisense strand to SEQ ID NO: 1003954
uagaacccaggacuacuac

SEQ ID NO: 1003956 - RNA, 19 nt, Artificial Sequence
  Description of Artificial Sequence: Synthetic oligonucleotide
  Sense strand starting at position 2539 of SEQ ID NO: 914437
gggugcuucccuggauauc

SEQ ID NO: 1003957 - RNA, 19 nt, Artificial Sequence
  Description of Artificial Sequence: Synthetic oligonucleotide
  Antisense strand to SEQ ID NO: 1003956
gauauccagggaagcaccc

SEQ ID NO: 1003958 - RNA, 19 nt, Artificial Sequence
  Description of Artificial Sequence: Synthetic oligonucleotide
  Sense strand starting at position 2693 of SEQ ID NO: 914437
ugacauagccugcauacaa

SEQ ID NO: 1003959 - RNA, 19 nt, Artificial Sequence
  Description of Artificial Sequence: Synthetic oligonucleotide
  Antisense strand to SEQ ID NO: 1003958
uuguaugcaggcuauguca

SEQ ID NO: 1003960 - RNA, 19 nt, Artificial Sequence
  Description of Artificial Sequence: Synthetic oligonucleotide
  Sense strand starting at position 3057 of SEQ ID NO: 914437
cgcgcaucaucacucacau

SEQ ID NO: 1003961 - RNA, 19 nt, Artificial Sequence
  Description of Artificial Sequence: Synthetic oligonucleotide
  Antisense strand to SEQ ID NO: 1003960
augugagugaugaugcgcg

SEQ ID NO: 1003962 - RNA, 19 nt, Artificial Sequence
  Description of Artificial Sequence: Synthetic oligonucleotide
  Sense strand starting at position 3230 of SEQ ID NO: 914437
ccguguguuucuguuucca

SEQ ID NO: 1003963 - RNA, 19 nt, Artificial Sequence
  Description of Artificial Sequence: Synthetic oligonucleotide
  Antisense strand to SEQ ID NO: 1003962
uggaaacagaaacacacgg

SEQ ID NO: 1003964 - RNA, 19 nt, Artificial Sequence
  Description of Artificial Sequence: Synthetic oligonucleotide
  Sense strand starting at position 3232 of SEQ ID NO: 914437
guguguuucuguuuccaaa

SEQ ID NO: 1003965 - RNA, 19 nt, Artificial Sequence
  Description of Artificial Sequence: Synthetic oligonucleotide
  Antisense strand to SEQ ID NO: 1003964
uuuggaaacagaaacacac

SEQ ID NO: 1003966 - RNA, 19 nt, Artificial Sequence
  Description of Artificial Sequence: Synthetic oligonucleotide
  Sense strand starting at position 3410 of SEQ ID NO: 914437
aggagaagaucccagcuuu

SEQ ID NO: 1003967 - RNA, 19 nt, Artificial Sequence
  Description of Artificial Sequence: Synthetic oligonucleotide
  Antisense strand to SEQ ID NO: 1003966
aaagcugggaucuucuccu

SEQ ID NO: 1003968 - RNA, 19 nt, Artificial Sequence
  Description of Artificial Sequence: Synthetic oligonucleotide
  Sense strand starting at position 3418 of SEQ ID NO: 914437
aucccagcuuuggcagaau

SEQ ID NO: 1003969 - RNA, 19 nt, Artificial Sequence
  Description of Artificial Sequence: Synthetic oligonucleotide
  Antisense strand to SEQ ID NO: 1003968
auucugccaaagcugggau

SEQ ID NO: 1003970 - RNA, 19 nt, Artificial Sequence
  Description of Artificial Sequence: Synthetic oligonucleotide
  Sense strand starting at position 3654 of SEQ ID NO: 914437
gcaggugaugcucacuguu

SEQ ID NO: 1003971 - RNA, 19 nt, Artificial Sequence
  Description of Artificial Sequence: Synthetic oligonucleotide
  Antisense strand to SEQ ID NO: 1003970
aacagugagcaucaccugc

SEQ ID NO: 1003972 - RNA, 19 nt, Artificial Sequence
  Description of Artificial Sequence: Synthetic oligonucleotide
  Sense strand starting at position 3667 of SEQ ID NO: 914437
acuguuucugcgggucaga

SEQ ID NO: 1003973 - RNA, 19 nt, Artificial Sequence
  Description of Artificial Sequence: Synthetic oligonucleotide
  Antisense strand to SEQ ID NO: 1003972
ucugacccgcagaaacagu

SEQ ID NO: 1003974 - RNA, 19 nt, Artificial Sequence
  Description of Artificial Sequence: Synthetic oligonucleotide
  Sense strand starting at position 3915 of SEQ ID NO: 914437
ggcagucagaacuguucua

SEQ ID NO: 1003975 - RNA, 19 nt, Artificial Sequence
  Description of Artificial Sequence: Synthetic oligonucleotide
  Antisense strand to SEQ ID NO: 1003974
uagaacaguucugacugcc

SEQ ID NO: 1003976 - RNA, 19 nt, Artificial Sequence
  Description of Artificial Sequence: Synthetic oligonucleotide
  Sense strand starting at position 78 of SEQ ID NO: 914438
gacagcaguuccuacgaga

SEQ ID NO: 1003977 - RNA, 19 nt, Artificial Sequence
  Description of Artificial Sequence: Synthetic oligonucleotide
  Antisense strand to SEQ ID NO: 1003976
ucucguaggaacugcuguc

SEQ ID NO: 1003978 - RNA, 19 nt, Artificial Sequence
  Description of Artificial Sequence: Synthetic oligonucleotide
  Sense strand starting at position 765 of SEQ ID NO: 914438
gcuugcagcucuguaguga

SEQ ID NO: 1003979 - RNA, 19 nt, Artificial Sequence
  Description of Artificial Sequence: Synthetic oligonucleotide
  Antisense strand to SEQ ID NO: 1003978
ucacuacagagcugcaagc

SEQ ID NO: 1003980 - RNA, 19 nt, Artificial Sequence
  Description of Artificial Sequence: Synthetic oligonucleotide
  Sense strand starting at position 2092 of SEQ ID NO: 914438
uuucuugaaccuggaaacu

SEQ ID NO: 1003981 - RNA, 19 nt, Artificial Sequence
  Description of Artificial Sequence: Synthetic oligonucleotide
  Antisense strand to SEQ ID NO: 1003980
aguuuccagguucaagaaa

SEQ ID NO: 1003982 - RNA, 19 nt, Artificial Sequence
  Description of Artificial Sequence: Synthetic oligonucleotide
  Sense strand starting at position 2434 of SEQ ID NO: 914438
gaggaaacugcauagcguu

SEQ ID NO: 1003983 - RNA, 19 nt, Artificial Sequence
  Description of Artificial Sequence: Synthetic oligonucleotide
  Antisense strand to SEQ ID NO: 1003982
aacgcuaugcaguuuccuc

SEQ ID NO: 1003984 - RNA, 19 nt, Artificial Sequence
  Description of Artificial Sequence: Synthetic oligonucleotide
  Sense strand starting at position 2446 of SEQ ID NO: 914438
uagcguucccaggacucua

SEQ ID NO: 1003985 - RNA, 19 nt, Artificial Sequence
  Description of Artificial Sequence: Synthetic oligonucleotide
  Antisense strand to SEQ ID NO: 1003984
uagaguccugggaacgcua

SEQ ID NO: 1003986 - RNA, 19 nt, Artificial Sequence
  Description of Artificial Sequence: Synthetic oligonucleotide
  Sense strand starting at position 2486 of SEQ ID NO: 914438
uuaagagccgcugaucuaa

SEQ ID NO: 1003987 - RNA, 19 nt, Artificial Sequence
  Description of Artificial Sequence: Synthetic oligonucleotide
  Antisense strand to SEQ ID NO: 1003986
uuagaucagcggcucuuaa

SEQ ID NO: 1003988 - RNA, 19 nt, Artificial Sequence
  Description of Artificial Sequence: Synthetic oligonucleotide
  Sense strand starting at position 2556 of SEQ ID NO: 914438
gagggugugacuugccuga

SEQ ID NO: 1003989 - RNA, 19 nt, Artificial Sequence
  Description of Artificial Sequence: Synthetic oligonucleotide
  Antisense strand to SEQ ID NO: 1003988
ucaggcaagucacacccuc

SEQ ID NO: 1003990 - RNA, 19 nt, Artificial Sequence
  Description of Artificial Sequence: Synthetic oligonucleotide
  Sense strand starting at position 2558 of SEQ ID NO: 914438
gggugugacuugccugaaa

SEQ ID NO: 1003991 - RNA, 19 nt, Artificial Sequence
  Description of Artificial Sequence: Synthetic oligonucleotide
  Antisense strand to SEQ ID NO: 1003990
uuucaggcaagucacaccc

SEQ ID NO: 1003992 - RNA, 19 nt, Artificial Sequence
  Description of Artificial Sequence: Synthetic oligonucleotide
  Sense strand starting at position 2560 of SEQ ID NO: 914438
gugugacuugccugaaaua

SEQ ID NO: 1003993 - RNA, 19 nt, Artificial Sequence
  Description of Artificial Sequence: Synthetic oligonucleotide
  Antisense strand to SEQ ID NO: 1003992
uauuucaggcaagucacac

SEQ ID NO: 1003994 - RNA, 19 nt, Artificial Sequence
  Description of Artificial Sequence: Synthetic oligonucleotide
  Sense strand starting at position 2561 of SEQ ID NO: 914438
ugugacuugccugaaauac

SEQ ID NO: 1003995 - RNA, 19 nt, Artificial Sequence
  Description of Artificial Sequence: Synthetic oligonucleotide
  Antisense strand to SEQ ID NO: 1003994
guauuucaggcaagucaca

SEQ ID NO: 1003996 - RNA, 19 nt, Artificial Sequence
  Description of Artificial Sequence: Synthetic oligonucleotide
  Sense strand starting at position 2577 of SEQ ID NO: 914438
uaccuaaccuggugaguga

SEQ ID NO: 1003997 - RNA, 19 nt, Artificial Sequence
  Description of Artificial Sequence: Synthetic oligonucleotide
  Antisense strand to SEQ ID NO: 1003996
ucacucaccagguuaggua

SEQ ID NO: 1003998 - RNA, 19 nt, Artificial Sequence
  Description of Artificial Sequence: Synthetic oligonucleotide
  Sense strand starting at position 2586 of SEQ ID NO: 914438
uggugagugauggguggaa

SEQ ID NO: 1003999 - RNA, 19 nt, Artificial Sequence
  Description of Artificial Sequence: Synthetic oligonucleotide
  Antisense strand to SEQ ID NO: 1003998
uuccacccaucacucacca

SEQ ID NO: 1004000 - RNA, 19 nt, Artificial Sequence
  Description of Artificial Sequence: Synthetic oligonucleotide
  Sense strand starting at position 2625 of SEQ ID NO: 914438
gcagguguccagggacaga

SEQ ID NO: 1004001 - RNA, 19 nt, Artificial Sequence
  Description of Artificial Sequence: Synthetic oligonucleotide
  Antisense strand to SEQ ID NO: 1004000
ucugucccuggacaccugc

SEQ ID NO: 1004002 - RNA, 19 nt, Artificial Sequence
  Description of Artificial Sequence: Synthetic oligonucleotide
  Sense strand starting at position 2638 of SEQ ID NO: 914438
gacagagaagggugguuua

SEQ ID NO: 1004003 - RNA, 19 nt, Artificial Sequence
  Description of Artificial Sequence: Synthetic oligonucleotide
  Antisense strand to SEQ ID NO: 1004002
uaaaccacccuucucuguc

SEQ ID NO: 1004004 - RNA, 19 nt, Artificial Sequence
  Description of Artificial Sequence: Synthetic oligonucleotide
  Sense strand starting at position 2680 of SEQ ID NO: 914438
guagauggauuugauaacu

SEQ ID NO: 1004005 - RNA, 19 nt, Artificial Sequence
  Description of Artificial Sequence: Synthetic oligonucleotide
  Antisense strand to SEQ ID NO: 1004004
aguuaucaaauccaucuac

SEQ ID NO: 1004006 - RNA, 19 nt, Artificial Sequence
  Description of Artificial Sequence: Synthetic oligonucleotide
  Sense strand starting at position 2787 of SEQ ID NO: 914438
uggagacaaucuuaacaau

SEQ ID NO: 1004007 - RNA, 19 nt, Artificial Sequence
  Description of Artificial Sequence: Synthetic oligonucleotide
  Antisense strand to SEQ ID NO: 1004006
auuguuaagauugucucca

SEQ ID NO: 1004008 - RNA, 19 nt, Artificial Sequence
  Description of Artificial Sequence: Synthetic oligonucleotide
  Sense strand starting at position 2798 of SEQ ID NO: 914438
uuaacaauauuggguuuga

SEQ ID NO: 1004009 - RNA, 19 nt, Artificial Sequence
  Description of Artificial Sequence: Synthetic oligonucleotide
  Antisense strand to SEQ ID NO: 1004008
ucaaacccaauauuguuaa

SEQ ID NO: 1004010 - RNA, 19 nt, Artificial Sequence
  Description of Artificial Sequence: Synthetic oligonucleotide
  Sense strand starting at position 3146 of SEQ ID NO: 914438
aaguguaaaugauagaaga

SEQ ID NO: 1004011 - RNA, 19 nt, Artificial Sequence
  Description of Artificial Sequence: Synthetic oligonucleotide
  Antisense strand to SEQ ID NO: 1004010
ucuucuaucauuuacacuu

SEQ ID NO: 1004012 - RNA, 19 nt, Artificial Sequence
  Description of Artificial Sequence: Synthetic oligonucleotide
  Sense strand starting at position 3244 of SEQ ID NO: 914438
gccauagacuaggacgaau

SEQ ID NO: 1004013 - RNA, 19 nt, Artificial Sequence
  Description of Artificial Sequence: Synthetic oligonucleotide
  Antisense strand to SEQ ID NO: 1004012
auucguccuagucuauggc

SEQ ID NO: 1004014 - RNA, 19 nt, Artificial Sequence
  Description of Artificial Sequence: Synthetic oligonucleotide
  Sense strand starting at position 3272 of SEQ ID NO: 914438
aauucuaucugauguagga

SEQ ID NO: 1004015 - RNA, 19 nt, Artificial Sequence
  Description of Artificial Sequence: Synthetic oligonucleotide
  Antisense strand to SEQ ID NO: 1004014
uccuacaucagauagaauu

SEQ ID NO: 1004016 - RNA, 19 nt, Artificial Sequence
  Description of Artificial Sequence: Synthetic oligonucleotide
  Sense strand starting at position 3281 of SEQ ID NO: 914438
ugauguaggacuuguauaa

SEQ ID NO: 1004017 - RNA, 19 nt, Artificial Sequence
  Description of Artificial Sequence: Synthetic oligonucleotide
  Antisense strand to SEQ ID NO: 1004016
uuauacaaguccuacauca

SEQ ID NO: 1004018 - RNA, 19 nt, Artificial Sequence
  Description of Artificial Sequence: Synthetic oligonucleotide
  Sense strand starting at position 3699 of SEQ ID NO: 914438
aagaucucuggauggcaaa

SEQ ID NO: 1004019 - RNA, 19 nt, Artificial Sequence
  Description of Artificial Sequence: Synthetic oligonucleotide
  Antisense strand to SEQ ID NO: 1004018
uuugccauccagagaucuu

SEQ ID NO: 1004020 - RNA, 19 nt, Artificial Sequence
  Description of Artificial Sequence: Synthetic oligonucleotide
  Sense strand starting at position 3700 of SEQ ID NO: 914438
agaucucuggauggcaaau

SEQ ID NO: 1004021 - RNA, 19 nt, Artificial Sequence
  Description of Artificial Sequence: Synthetic oligonucleotide
  Antisense strand to SEQ ID NO: 1004020
auuugccauccagagaucu

SEQ ID NO: 1004022 - RNA, 19 nt, Artificial Sequence
  Description of Artificial Sequence: Synthetic oligonucleotide
  Sense strand starting at position 3740 of SEQ ID NO: 914438
gugcauuacucuuagggaa

SEQ ID NO: 1004023 - RNA, 19 nt, Artificial Sequence
  Description of Artificial Sequence: Synthetic oligonucleotide
  Antisense strand to SEQ ID NO: 1004022
uucccuaagaguaaugcac

SEQ ID NO: 1004024 - RNA, 19 nt, Artificial Sequence
  Description of Artificial Sequence: Synthetic oligonucleotide
  Sense strand starting at position 3742 of SEQ ID NO: 914438
gcauuacucuuagggaaau

SEQ ID NO: 1004025 - RNA, 19 nt, Artificial Sequence
  Description of Artificial Sequence: Synthetic oligonucleotide
  Antisense strand to SEQ ID NO: 1004024
auuucccuaagaguaaugc

SEQ ID NO: 1004026 - RNA, 19 nt, Artificial Sequence
  Description of Artificial Sequence: Synthetic oligonucleotide
  Sense strand starting at position 3834 of SEQ ID NO: 914438
uaccaaguguuguuauguu

SEQ ID NO: 1004027 - RNA, 19 nt, Artificial Sequence
  Description of Artificial Sequence: Synthetic oligonucleotide
  Antisense strand to SEQ ID NO: 1004026
aacauaacaacacuuggua

SEQ ID NO: 1004028 - RNA, 19 nt, Artificial Sequence
  Description of Artificial Sequence: Synthetic oligonucleotide
  Sense strand starting at position 3838 of SEQ ID NO: 914438
aaguguuguuauguuguca

SEQ ID NO: 1004029 - RNA, 19 nt, Artificial Sequence
  Description of Artificial Sequence: Synthetic oligonucleotide
  Antisense strand to SEQ ID NO: 1004028
ugacaacauaacaacacuu

SEQ ID NO: 1004030 - RNA, 19 nt, Artificial Sequence
  Description of Artificial Sequence: Synthetic oligonucleotide
  Sense strand starting at position 3842 of SEQ ID NO: 914438
guuguuauguugucaagga

SEQ ID NO: 1004031 - RNA, 19 nt, Artificial Sequence
  Description of Artificial Sequence: Synthetic oligonucleotide
  Antisense strand to SEQ ID NO: 1004030
uccuugacaacauaacaac

SEQ ID NO: 1004032 - RNA, 19 nt, Artificial Sequence
  Description of Artificial Sequence: Synthetic oligonucleotide
  Sense strand starting at position 3843 of SEQ ID NO: 914438
uuguuauguugucaaggau

SEQ ID NO: 1004033 - RNA, 19 nt, Artificial Sequence
  Description of Artificial Sequence: Synthetic oligonucleotide
  Antisense strand to SEQ ID NO: 1004032
auccuugacaacauaacaa

SEQ ID NO: 1004034 - RNA, 19 nt, Artificial Sequence
  Description of Artificial Sequence: Synthetic oligonucleotide
  Sense strand starting at position 3846 of SEQ ID NO: 914438
uuauguugucaaggauaua

SEQ ID NO: 1004035 - RNA, 19 nt, Artificial Sequence
  Description of Artificial Sequence: Synthetic oligonucleotide
  Antisense strand to SEQ ID NO: 1004034
uauauccuugacaacauaa

SEQ ID NO: 1004036 - RNA, 19 nt, Artificial Sequence
  Description of Artificial Sequence: Synthetic oligonucleotide
  Sense strand starting at position 3876 of SEQ ID NO: 914438
gcugucauacaccaagaga

SEQ ID NO: 1004037 - RNA, 19 nt, Artificial Sequence
  Description of Artificial Sequence: Synthetic oligonucleotide
  Antisense strand to SEQ ID NO: 1004036
ucucuugguguaugacagc

SEQ ID NO: 1004038 - RNA, 19 nt, Artificial Sequence
  Description of Artificial Sequence: Synthetic oligonucleotide
  Sense strand starting at position 16 of SEQ ID NO: 914439
gcagguauugugggucauc

SEQ ID NO: 1004039 - RNA, 19 nt, Artificial Sequence
  Description of Artificial Sequence: Synthetic oligonucleotide
  Antisense strand to SEQ ID NO: 1004038
gaugacccacaauaccugc

SEQ ID NO: 1004040 - RNA, 19 nt, Artificial Sequence
  Description of Artificial Sequence: Synthetic oligonucleotide
  Sense strand starting at position 19 of SEQ ID NO: 914439
gguauugugggucauccuu

SEQ ID NO: 1004041 - RNA, 19 nt, Artificial Sequence
  Description of Artificial Sequence: Synthetic oligonucleotide
  Antisense strand to SEQ ID NO: 1004040
aaggaugacccacaauacc

SEQ ID NO: 1004042 - RNA, 19 nt, Artificial Sequence
  Description of Artificial Sequence: Synthetic oligonucleotide
  Sense strand starting at position 77 of SEQ ID NO: 914439
ggagcccucaccuggaaau

SEQ ID NO: 1004043 - RNA, 19 nt, Artificial Sequence
  Description of Artificial Sequence: Synthetic oligonucleotide
  Antisense strand to SEQ ID NO: 1004042
auuuccaggugagggcucc

SEQ ID NO: 1004044 - RNA, 19 nt, Artificial Sequence
  Description of Artificial Sequence: Synthetic oligonucleotide
  Sense strand starting at position 542 of SEQ ID NO: 914439
gacagcaguuccuacgaga

SEQ ID NO: 1004045 - RNA, 19 nt, Artificial Sequence
  Description of Artificial Sequence: Synthetic oligonucleotide
  Antisense strand to SEQ ID NO: 1004044
ucucguaggaacugcuguc

SEQ ID NO: 1004046 - RNA, 19 nt, Artificial Sequence
  Description of Artificial Sequence: Synthetic oligonucleotide
  Sense strand starting at position 1229 of SEQ ID NO: 914439
gcuugcagcucuguaguga

SEQ ID NO: 1004047 - RNA, 19 nt, Artificial Sequence
  Description of Artificial Sequence: Synthetic oligonucleotide
  Antisense strand to SEQ ID NO: 1004046
ucacuacagagcugcaagc

SEQ ID NO: 1004048 - RNA, 19 nt, Artificial Sequence
  Description of Artificial Sequence: Synthetic oligonucleotide
  Sense strand starting at position 2556 of SEQ ID NO: 914439
uuucuugaaccuggaaacu

SEQ ID NO: 1004049 - RNA, 19 nt, Artificial Sequence
  Description of Artificial Sequence: Synthetic oligonucleotide
  Antisense strand to SEQ ID NO: 1004048
aguuuccagguucaagaaa

SEQ ID NO: 1004050 - RNA, 19 nt, Artificial Sequence
  Description of Artificial Sequence: Synthetic oligonucleotide
  Sense strand starting at position 2898 of SEQ ID NO: 914439
gaggaaacugcauagcguu

SEQ ID NO: 1004051 - RNA, 19 nt, Artificial Sequence
  Description of Artificial Sequence: Synthetic oligonucleotide
  Antisense strand to SEQ ID NO: 1004050
aacgcuaugcaguuuccuc

SEQ ID NO: 1004052 - RNA, 19 nt, Artificial Sequence
  Description of Artificial Sequence: Synthetic oligonucleotide
  Sense strand starting at position 2910 of SEQ ID NO: 914439
uagcguucccaggacucua

SEQ ID NO: 1004053 - RNA, 19 nt, Artificial Sequence
  Description of Artificial Sequence: Synthetic oligonucleotide
  Antisense strand to SEQ ID NO: 1004052
uagaguccugggaacgcua

SEQ ID NO: 1004054 - RNA, 19 nt, Artificial Sequence
  Description of Artificial Sequence: Synthetic oligonucleotide
  Sense strand starting at position 2950 of SEQ ID NO: 914439
uuaagagccgcugaucuaa

SEQ ID NO: 1004055 - RNA, 19 nt, Artificial Sequence
  Description of Artificial Sequence: Synthetic oligonucleotide
  Antisense strand to SEQ ID NO: 1004054
uuagaucagcggcucuuaa

SEQ ID NO: 1004056 - RNA, 19 nt, Artificial Sequence
  Description of Artificial Sequence: Synthetic oligonucleotide
  Sense strand starting at position 3020 of SEQ ID NO: 914439
gagggugugacuugccuga

SEQ ID NO: 1004057 - RNA, 19 nt, Artificial Sequence
  Description of Artificial Sequence: Synthetic oligonucleotide
  Antisense strand to SEQ ID NO: 1004056
ucaggcaagucacacccuc

SEQ ID NO: 1004058 - RNA, 19 nt, Artificial Sequence
  Description of Artificial Sequence: Synthetic oligonucleotide
  Sense strand starting at position 3022 of SEQ ID NO: 914439
gggugugacuugccugaaa

SEQ ID NO: 1004059 - RNA, 19 nt, Artificial Sequence
  Description of Artificial Sequence: Synthetic oligonucleotide
  Antisense strand to SEQ ID NO: 1004058
uuucaggcaagucacaccc

SEQ ID NO: 1004060 - RNA, 19 nt, Artificial Sequence
  Description of Artificial Sequence: Synthetic oligonucleotide
  Sense strand starting at position 3024 of SEQ ID NO: 914439
gugugacuugccugaaaua

SEQ ID NO: 1004061 - RNA, 19 nt, Artificial Sequence
  Description of Artificial Sequence: Synthetic oligonucleotide
  Antisense strand to SEQ ID NO: 1004060
uauuucaggcaagucacac

SEQ ID NO: 1004062 - RNA, 19 nt, Artificial Sequence
  Description of Artificial Sequence: Synthetic oligonucleotide
  Sense strand starting at position 3025 of SEQ ID NO: 914439
ugugacuugccugaaauac

SEQ ID NO: 1004063 - RNA, 19 nt, Artificial Sequence
  Description of Artificial Sequence: Synthetic oligonucleotide
  Antisense strand to SEQ ID NO: 1004062
guauuucaggcaagucaca

SEQ ID NO: 1004064 - RNA, 19 nt, Artificial Sequence
  Description of Artificial Sequence: Synthetic oligonucleotide
  Sense strand starting at position 3041 of SEQ ID NO: 914439
uaccuaaccuggugaguga

SEQ ID NO: 1004065 - RNA, 19 nt, Artificial Sequence
  Description of Artificial Sequence: Synthetic oligonucleotide
  Antisense strand to SEQ ID NO: 1004064
ucacucaccagguuaggua

SEQ ID NO: 1004066 - RNA, 19 nt, Artificial Sequence
  Description of Artificial Sequence: Synthetic oligonucleotide
  Sense strand starting at position 3050 of SEQ ID NO: 914439
uggugagugauggguggaa

SEQ ID NO: 1004067 - RNA, 19 nt, Artificial Sequence
  Description of Artificial Sequence: Synthetic oligonucleotide
  Antisense strand to SEQ ID NO: 1004066
uuccacccaucacucacca

SEQ ID NO: 1004068 - RNA, 19 nt, Artificial Sequence
  Description of Artificial Sequence: Synthetic oligonucleotide
  Sense strand starting at position 3089 of SEQ ID NO: 914439
gcagguguccagggacaga

SEQ ID NO: 1004069 - RNA, 19 nt, Artificial Sequence
  Description of Artificial Sequence: Synthetic oligonucleotide
  Antisense strand to SEQ ID NO: 1004068
ucugucccuggacaccugc

SEQ ID NO: 1004070 - RNA, 19 nt, Artificial Sequence
  Description of Artificial Sequence: Synthetic oligonucleotide
  Sense strand starting at position 3102 of SEQ ID NO: 914439
gacagagaagggugguuua

SEQ ID NO: 1004071 - RNA, 19 nt, Artificial Sequence
  Description of Artificial Sequence: Synthetic oligonucleotide
  Antisense strand to SEQ ID NO: 1004070
uaaaccacccuucucuguc

SEQ ID NO: 1004072 - RNA, 19 nt, Artificial Sequence
  Description of Artificial Sequence: Synthetic oligonucleotide
  Sense strand starting at position 3144 of SEQ ID NO: 914439
guagauggauuugauaacu

SEQ ID NO: 1004073 - RNA, 19 nt, Artificial Sequence
  Description of Artificial Sequence: Synthetic oligonucleotide
  Antisense strand to SEQ ID NO: 1004072
aguuaucaaauccaucuac

SEQ ID NO: 1004074 - RNA, 19 nt, Artificial Sequence
  Description of Artificial Sequence: Synthetic oligonucleotide
  Sense strand starting at position 3251 of SEQ ID NO: 914439
uggagacaaucuuaacaau

SEQ ID NO: 1004075 - RNA, 19 nt, Artificial Sequence
  Description of Artificial Sequence: Synthetic oligonucleotide
  Antisense strand to SEQ ID NO: 1004074
auuguuaagauugucucca

SEQ ID NO: 1004076 - RNA, 19 nt, Artificial Sequence
  Description of Artificial Sequence: Synthetic oligonucleotide
  Sense strand starting at position 3262 of SEQ ID NO: 914439
uuaacaauauuggguuuga

SEQ ID NO: 1004077 - RNA, 19 nt, Artificial Sequence
  Description of Artificial Sequence: Synthetic oligonucleotide
  Antisense strand to SEQ ID NO: 1004076
ucaaacccaauauuguuaa

SEQ ID NO: 1004078 - RNA, 19 nt, Artificial Sequence
  Description of Artificial Sequence: Synthetic oligonucleotide
  Sense strand starting at position 3610 of SEQ ID NO: 914439
aaguguaaaugauagaaga

SEQ ID NO: 1004079 - RNA, 19 nt, Artificial Sequence
  Description of Artificial Sequence: Synthetic oligonucleotide
  Antisense strand to SEQ ID NO: 1004078
ucuucuaucauuuacacuu

SEQ ID NO: 1004080 - RNA, 19 nt, Artificial Sequence
  Description of Artificial Sequence: Synthetic oligonucleotide
  Sense strand starting at position 3708 of SEQ ID NO: 914439
gccauagacuaggacgaau

SEQ ID NO: 1004081 - RNA, 19 nt, Artificial Sequence
  Description of Artificial Sequence: Synthetic oligonucleotide
  Antisense strand to SEQ ID NO: 1004080
auucguccuagucuauggc

SEQ ID NO: 1004082 - RNA, 19 nt, Artificial Sequence
  Description of Artificial Sequence: Synthetic oligonucleotide
  Sense strand starting at position 3736 of SEQ ID NO: 914439
aauucuaucugauguagga

SEQ ID NO: 1004083 - RNA, 19 nt, Artificial Sequence
  Description of Artificial Sequence: Synthetic oligonucleotide
  Antisense strand to SEQ ID NO: 1004082
uccuacaucagauagaauu

SEQ ID NO: 1004084 - RNA, 19 nt, Artificial Sequence
  Description of Artificial Sequence: Synthetic oligonucleotide
  Sense strand starting at position 3745 of SEQ ID NO: 914439
ugauguaggacuuguauaa

SEQ ID NO: 1004085 - RNA, 19 nt, Artificial Sequence
  Description of Artificial Sequence: Synthetic oligonucleotide
  Antisense strand to SEQ ID NO: 1004084
uuauacaaguccuacauca

SEQ ID NO: 1004086 - RNA, 19 nt, Artificial Sequence
  Description of Artificial Sequence: Synthetic oligonucleotide
  Sense strand starting at position 106 of SEQ ID NO: 914440
auggcacugagaggucaaa

SEQ ID NO: 1004087 - RNA, 19 nt, Artificial Sequence
  Description of Artificial Sequence: Synthetic oligonucleotide
  Antisense strand to SEQ ID NO: 1004086
uuugaccucucagugccau

SEQ ID NO: 1004088 - RNA, 19 nt, Artificial Sequence
  Description of Artificial Sequence: Synthetic oligonucleotide
  Sense strand starting at position 170 of SEQ ID NO: 914440
gcagguauugugggucauc

SEQ ID NO: 1004089 - RNA, 19 nt, Artificial Sequence
  Description of Artificial Sequence: Synthetic oligonucleotide
  Antisense strand to SEQ ID NO: 1004088
gaugacccacaauaccugc

SEQ ID NO: 1004090 - RNA, 19 nt, Artificial Sequence
  Description of Artificial Sequence: Synthetic oligonucleotide
  Sense strand starting at position 173 of SEQ ID NO: 914440
gguauugugggucauccuu

SEQ ID NO: 1004091 - RNA, 19 nt, Artificial Sequence
  Description of Artificial Sequence: Synthetic oligonucleotide
  Antisense strand to SEQ ID NO: 1004090
aaggaugacccacaauacc

SEQ ID NO: 1004092 - RNA, 19 nt, Artificial Sequence
  Description of Artificial Sequence: Synthetic oligonucleotide
  Sense strand starting at position 231 of SEQ ID NO: 914440
ggagcccucaccuggaaau

SEQ ID NO: 1004093 - RNA, 19 nt, Artificial Sequence
  Description of Artificial Sequence: Synthetic oligonucleotide
  Antisense strand to SEQ ID NO: 1004092
auuuccaggugagggcucc

SEQ ID NO: 1004094 - RNA, 19 nt, Artificial Sequence
  Description of Artificial Sequence: Synthetic oligonucleotide
  Sense strand starting at position 696 of SEQ ID NO: 914440
gacagcaguuccuacgaga

SEQ ID NO: 1004095 - RNA, 19 nt, Artificial Sequence
  Description of Artificial Sequence: Synthetic oligonucleotide
  Antisense strand to SEQ ID NO: 1004094
ucucguaggaacugcuguc

SEQ ID NO: 1004096 - RNA, 19 nt, Artificial Sequence
  Description of Artificial Sequence: Synthetic oligonucleotide
  Sense strand starting at position 1383 of SEQ ID NO: 914440
gcuugcagcucuguaguga

SEQ ID NO: 1004097 - RNA, 19 nt, Artificial Sequence
  Description of Artificial Sequence: Synthetic oligonucleotide
  Antisense strand to SEQ ID NO: 1004096
ucacuacagagcugcaagc

SEQ ID NO: 1004098 - RNA, 19 nt, Artificial Sequence
  Description of Artificial Sequence: Synthetic oligonucleotide
  Sense strand starting at position 2710 of SEQ ID NO: 914440
uuucuugaaccuggaaacu

SEQ ID NO: 1004099 - RNA, 19 nt, Artificial Sequence
  Description of Artificial Sequence: Synthetic oligonucleotide
  Antisense strand to SEQ ID NO: 1004098
aguuuccagguucaagaaa

SEQ ID NO: 1004100 - RNA, 19 nt, Artificial Sequence
  Description of Artificial Sequence: Synthetic oligonucleotide
  Sense strand starting at position 3052 of SEQ ID NO: 914440
gaggaaacugcauagcguu

SEQ ID NO: 1004101 - RNA, 19 nt, Artificial Sequence
  Description of Artificial Sequence: Synthetic oligonucleotide
  Antisense strand to SEQ ID NO: 1004100
aacgcuaugcaguuuccuc

SEQ ID NO: 1004102 - RNA, 19 nt, Artificial Sequence
  Description of Artificial Sequence: Synthetic oligonucleotide
  Sense strand starting at position 3064 of SEQ ID NO: 914440
uagcguucccaggacucua

SEQ ID NO: 1004103 - RNA, 19 nt, Artificial Sequence
  Description of Artificial Sequence: Synthetic oligonucleotide
  Antisense strand to SEQ ID NO: 1004102
uagaguccugggaacgcua

SEQ ID NO: 1004104 - RNA, 19 nt, Artificial Sequence
  Description of Artificial Sequence: Synthetic oligonucleotide
  Sense strand starting at position 3104 of SEQ ID NO: 914440
uuaagagccgcugaucuaa

SEQ ID NO: 1004105 - RNA, 19 nt, Artificial Sequence
  Description of Artificial Sequence: Synthetic oligonucleotide
  Antisense strand to SEQ ID NO: 1004104
uuagaucagcggcucuuaa

SEQ ID NO: 1004106 - RNA, 19 nt, Artificial Sequence
  Description of Artificial Sequence: Synthetic oligonucleotide
  Sense strand starting at position 3174 of SEQ ID NO: 914440
gagggugugacuugccuga

SEQ ID NO: 1004107 - RNA, 19 nt, Artificial Sequence
  Description of Artificial Sequence: Synthetic oligonucleotide
  Antisense strand to SEQ ID NO: 1004106
ucaggcaagucacacccuc

SEQ ID NO: 1004108 - RNA, 19 nt, Artificial Sequence
  Description of Artificial Sequence: Synthetic oligonucleotide
  Sense strand starting at position 3176 of SEQ ID NO: 914440
gggugugacuugccugaaa

SEQ ID NO: 1004109 - RNA, 19 nt, Artificial Sequence
  Description of Artificial Sequence: Synthetic oligonucleotide
  Antisense strand to SEQ ID NO: 1004108
uuucaggcaagucacaccc

SEQ ID NO: 1004110 - RNA, 19 nt, Artificial Sequence
  Description of Artificial Sequence: Synthetic oligonucleotide
  Sense strand starting at position 3178 of SEQ ID NO: 914440
gugugacuugccugaaaua

SEQ ID NO: 1004111 - RNA, 19 nt, Artificial Sequence
  Description of Artificial Sequence: Synthetic oligonucleotide
  Antisense strand to SEQ ID NO: 1004110
uauuucaggcaagucacac

SEQ ID NO: 1004112 - RNA, 19 nt, Artificial Sequence
  Description of Artificial Sequence: Synthetic oligonucleotide
  Sense strand starting at position 3179 of SEQ ID NO: 914440
ugugacuugccugaaauac

SEQ ID NO: 1004113 - RNA, 19 nt, Artificial Sequence
  Description of Artificial Sequence: Synthetic oligonucleotide
  Antisense strand to SEQ ID NO: 1004112
guauuucaggcaagucaca

SEQ ID NO: 1004114 - RNA, 19 nt, Artificial Sequence
  Description of Artificial Sequence: Synthetic oligonucleotide
  Sense strand starting at position 3195 of SEQ ID NO: 914440
uaccuaaccuggugaguga

SEQ ID NO: 1004115 - RNA, 19 nt, Artificial Sequence
  Description of Artificial Sequence: Synthetic oligonucleotide
  Antisense strand to SEQ ID NO: 1004114
ucacucaccagguuaggua

SEQ ID NO: 1004116 - RNA, 19 nt, Artificial Sequence
  Description of Artificial Sequence: Synthetic oligonucleotide
  Sense strand starting at position 3204 of SEQ ID NO: 914440
uggugagugauggguggaa

SEQ ID NO: 1004117 - RNA, 19 nt, Artificial Sequence
  Description of Artificial Sequence: Synthetic oligonucleotide
  Antisense strand to SEQ ID NO: 1004116
uuccacccaucacucacca

SEQ ID NO: 1004118 - RNA, 19 nt, Artificial Sequence
  Description of Artificial Sequence: Synthetic oligonucleotide
  Sense strand starting at position 3243 of SEQ ID NO: 914440
gcagguguccagggacaga

SEQ ID NO: 1004119 - RNA, 19 nt, Artificial Sequence
  Description of Artificial Sequence: Synthetic oligonucleotide
  Antisense strand to SEQ ID NO: 1004118
ucugucccuggacaccugc

SEQ ID NO: 1004120 - RNA, 19 nt, Artificial Sequence
  Description of Artificial Sequence: Synthetic oligonucleotide
  Sense strand starting at position 3256 of SEQ ID NO: 914440
gacagagaagggugguuua

SEQ ID NO: 1004121 - RNA, 19 nt, Artificial Sequence
  Description of Artificial Sequence: Synthetic oligonucleotide
  Antisense strand to SEQ ID NO: 1004120
uaaaccacccuucucuguc

SEQ ID NO: 1004122 - RNA, 19 nt, Artificial Sequence
  Description of Artificial Sequence: Synthetic oligonucleotide
  Sense strand starting at position 3298 of SEQ ID NO: 914440
guagauggauuugauaacu

SEQ ID NO: 1004123 - RNA, 19 nt, Artificial Sequence
  Description of Artificial Sequence: Synthetic oligonucleotide
  Antisense strand to SEQ ID NO: 1004122
aguuaucaaauccaucuac

SEQ ID NO: 1004124 - RNA, 19 nt, Artificial Sequence
  Description of Artificial Sequence: Synthetic oligonucleotide
  Sense strand starting at position 3405 of SEQ ID NO: 914440
uggagacaaucuuaacaau

SEQ ID NO: 1004125 - RNA, 19 nt, Artificial Sequence
  Description of Artificial Sequence: Synthetic oligonucleotide
  Antisense strand to SEQ ID NO: 1004124
auuguuaagauugucucca

SEQ ID NO: 1004126 - RNA, 19 nt, Artificial Sequence
  Description of Artificial Sequence: Synthetic oligonucleotide
  Sense strand starting at position 3416 of SEQ ID NO: 914440
uuaacaauauuggguuuga

SEQ ID NO: 1004127 - RNA, 19 nt, Artificial Sequence
  Description of Artificial Sequence: Synthetic oligonucleotide
  Antisense strand to SEQ ID NO: 1004126
ucaaacccaauauuguuaa

SEQ ID NO: 1004128 - RNA, 19 nt, Artificial Sequence
  Description of Artificial Sequence: Synthetic oligonucleotide
  Sense strand starting at position 3764 of SEQ ID NO: 914440
aaguguaaaugauagaaga

SEQ ID NO: 1004129 - RNA, 19 nt, Artificial Sequence
  Description of Artificial Sequence: Synthetic oligonucleotide
  Antisense strand to SEQ ID NO: 1004128
ucuucuaucauuuacacuu

SEQ ID NO: 1004130 - RNA, 19 nt, Artificial Sequence
  Description of Artificial Sequence: Synthetic oligonucleotide
  Sense strand starting at position 3862 of SEQ ID NO: 914440
gccauagacuaggacgaau

SEQ ID NO: 1004131 - RNA, 19 nt, Artificial Sequence
  Description of Artificial Sequence: Synthetic oligonucleotide
  Antisense strand to SEQ ID NO: 1004130
auucguccuagucuauggc

SEQ ID NO: 1004132 - RNA, 19 nt, Artificial Sequence
  Description of Artificial Sequence: Synthetic oligonucleotide
  Sense strand starting at position 3890 of SEQ ID NO: 914440
aauucuaucugauguagga

SEQ ID NO: 1004133 - RNA, 19 nt, Artificial Sequence
  Description of Artificial Sequence: Synthetic oligonucleotide
  Antisense strand to SEQ ID NO: 1004132
uccuacaucagauagaauu

SEQ ID NO: 1004134 - RNA, 19 nt, Artificial Sequence
  Description of Artificial Sequence: Synthetic oligonucleotide
  Sense strand starting at position 3899 of SEQ ID NO: 914440
ugauguaggacuuguauaa

SEQ ID NO: 1004135 - RNA, 19 nt, Artificial Sequence
  Description of Artificial Sequence: Synthetic oligonucleotide
  Antisense strand to SEQ ID NO: 1004134
uuauacaaguccuacauca

SEQ ID NO: 1004136 - RNA, 19 nt, Artificial Sequence
  Description of Artificial Sequence: Synthetic oligonucleotide
  Sense strand starting at position 188 of SEQ ID NO: 914441
ugggaaacuuuaucagggu

SEQ ID NO: 1004137 - RNA, 19 nt, Artificial Sequence
  Description of Artificial Sequence: Synthetic oligonucleotide
  Antisense strand to SEQ ID NO: 1004136
acccugauaaaguuuccca

SEQ ID NO: 1004138 - RNA, 19 nt, Artificial Sequence
  Description of Artificial Sequence: Synthetic oligonucleotide
  Sense strand starting at position 356 of SEQ ID NO: 914441
ugaccuaucuaauccgcaa

SEQ ID NO: 1004139 - RNA, 19 nt, Artificial Sequence
  Description of Artificial Sequence: Synthetic oligonucleotide
  Antisense strand to SEQ ID NO: 1004138
uugcggauuagauagguca

SEQ ID NO: 1004140 - RNA, 19 nt, Artificial Sequence
  Description of Artificial Sequence: Synthetic oligonucleotide
  Sense strand starting at position 782 of SEQ ID NO: 914441
gacccugggaggugucaau

SEQ ID NO: 1004141 - RNA, 19 nt, Artificial Sequence
  Description of Artificial Sequence: Synthetic oligonucleotide
  Antisense strand to SEQ ID NO: 1004140
auugacaccucccaggguc

SEQ ID NO: 1004142 - RNA, 19 nt, Artificial Sequence
  Description of Artificial Sequence: Synthetic oligonucleotide
  Sense strand starting at position 791 of SEQ ID NO: 914441
aggugucaauccuugcaaa

SEQ ID NO: 1004143 - RNA, 19 nt, Artificial Sequence
  Description of Artificial Sequence: Synthetic oligonucleotide
  Antisense strand to SEQ ID NO: 1004142
uuugcaaggauugacaccu

SEQ ID NO: 1004144 - RNA, 19 nt, Artificial Sequence
  Description of Artificial Sequence: Synthetic oligonucleotide
  Sense strand starting at position 831 of SEQ ID NO: 914441
gccucagacucauugaguu

SEQ ID NO: 1004145 - RNA, 19 nt, Artificial Sequence
  Description of Artificial Sequence: Synthetic oligonucleotide
  Antisense strand to SEQ ID NO: 1004144
aacucaaugagucugaggc

SEQ ID NO: 1004146 - RNA, 19 nt, Artificial Sequence
  Description of Artificial Sequence: Synthetic oligonucleotide
  Sense strand starting at position 881 of SEQ ID NO: 914441
caagaagucugcccagauc

SEQ ID NO: 1004147 - RNA, 19 nt, Artificial Sequence
  Description of Artificial Sequence: Synthetic oligonucleotide
  Antisense strand to SEQ ID NO: 1004146
gaucugggcagacuucuug

SEQ ID NO: 1004148 - RNA, 19 nt, Artificial Sequence
  Description of Artificial Sequence: Synthetic oligonucleotide
  Sense strand starting at position 908 of SEQ ID NO: 914441
cccugaguccugggauagu

SEQ ID NO: 1004149 - RNA, 19 nt, Artificial Sequence
  Description of Artificial Sequence: Synthetic oligonucleotide
  Antisense strand to SEQ ID NO: 1004148
acuaucccaggacucaggg

SEQ ID NO: 1004150 - RNA, 19 nt, Artificial Sequence
  Description of Artificial Sequence: Synthetic oligonucleotide
  Sense strand starting at position 966 of SEQ ID NO: 914441
agaagauucugggaugaga

SEQ ID NO: 1004151 - RNA, 19 nt, Artificial Sequence
  Description of Artificial Sequence: Synthetic oligonucleotide
  Antisense strand to SEQ ID NO: 1004150
ucucaucccagaaucuucu

SEQ ID NO: 1004152 - RNA, 19 nt, Artificial Sequence
  Description of Artificial Sequence: Synthetic oligonucleotide
  Sense strand starting at position 1056 of SEQ ID NO: 914441
ccacucuucugaucuguau

SEQ ID NO: 1004153 - RNA, 19 nt, Artificial Sequence
  Description of Artificial Sequence: Synthetic oligonucleotide
  Antisense strand to SEQ ID NO: 1004152
auacagaucagaagagugg

SEQ ID NO: 1004154 - RNA, 19 nt, Artificial Sequence
  Description of Artificial Sequence: Synthetic oligonucleotide
  Sense strand starting at position 1059 of SEQ ID NO: 914441
cucuucugaucuguaugga

SEQ ID NO: 1004155 - RNA, 19 nt, Artificial Sequence
  Description of Artificial Sequence: Synthetic oligonucleotide
  Antisense strand to SEQ ID NO: 1004154
uccauacagaucagaagag

SEQ ID NO: 1004156 - RNA, 19 nt, Artificial Sequence
  Description of Artificial Sequence: Synthetic oligonucleotide
  Sense strand starting at position 1060 of SEQ ID NO: 914441
ucuucugaucuguauggaa

SEQ ID NO: 1004157 - RNA, 19 nt, Artificial Sequence
  Description of Artificial Sequence: Synthetic oligonucleotide
  Antisense strand to SEQ ID NO: 1004156
uuccauacagaucagaaga

SEQ ID NO: 1004158 - RNA, 19 nt, Artificial Sequence
  Description of Artificial Sequence: Synthetic oligonucleotide
  Sense strand starting at position 1062 of SEQ ID NO: 914441
uucugaucuguauggaacu

SEQ ID NO: 1004159 - RNA, 19 nt, Artificial Sequence
  Description of Artificial Sequence: Synthetic oligonucleotide
  Antisense strand to SEQ ID NO: 1004158
aguuccauacagaucagaa

SEQ ID NO: 1004160 - RNA, 19 nt, Artificial Sequence
  Description of Artificial Sequence: Synthetic oligonucleotide
  Sense strand starting at position 1323 of SEQ ID NO: 914441
cccugcagucaaggagaaa

SEQ ID NO: 1004161 - RNA, 19 nt, Artificial Sequence
  Description of Artificial Sequence: Synthetic oligonucleotide
  Antisense strand to SEQ ID NO: 1004160
uuucuccuugacugcaggg

SEQ ID NO: 1004162 - RNA, 19 nt, Artificial Sequence
  Description of Artificial Sequence: Synthetic oligonucleotide
  Sense strand starting at position 1453 of SEQ ID NO: 914441
gguggauugcagggaugaa

SEQ ID NO: 1004163 - RNA, 19 nt, Artificial Sequence
  Description of Artificial Sequence: Synthetic oligonucleotide
  Antisense strand to SEQ ID NO: 1004162
uucaucccugcaauccacc

SEQ ID NO: 1004164 - RNA, 19 nt, Artificial Sequence
  Description of Artificial Sequence: Synthetic oligonucleotide
  Sense strand starting at position 2505 of SEQ ID NO: 914441
aaguguucggauggagaag

SEQ ID NO: 1004165 - RNA, 19 nt, Artificial Sequence
  Description of Artificial Sequence: Synthetic oligonucleotide
  Antisense strand to SEQ ID NO: 1004164
cuucuccauccgaacacuu

SEQ ID NO: 1004166 - RNA, 19 nt, Artificial Sequence
  Description of Artificial Sequence: Synthetic oligonucleotide
  Sense strand starting at position 2506 of SEQ ID NO: 914441
aguguucggauggagaagu

SEQ ID NO: 1004167 - RNA, 19 nt, Artificial Sequence
  Description of Artificial Sequence: Synthetic oligonucleotide
  Antisense strand to SEQ ID NO: 1004166
acuucuccauccgaacacu

SEQ ID NO: 1004168 - RNA, 19 nt, Artificial Sequence
  Description of Artificial Sequence: Synthetic oligonucleotide
  Sense strand starting at position 2555 of SEQ ID NO: 914441
gccucugucagaugggaaa

SEQ ID NO: 1004169 - RNA, 19 nt, Artificial Sequence
  Description of Artificial Sequence: Synthetic oligonucleotide
  Antisense strand to SEQ ID NO: 1004168
uuucccaucugacagaggc

SEQ ID NO: 1004170 - RNA, 19 nt, Artificial Sequence
  Description of Artificial Sequence: Synthetic oligonucleotide
  Sense strand starting at position 2584 of SEQ ID NO: 914441
gcccguguugaggacuuaa

SEQ ID NO: 1004171 - RNA, 19 nt, Artificial Sequence
  Description of Artificial Sequence: Synthetic oligonucleotide
  Antisense strand to SEQ ID NO: 1004170
uuaaguccucaacacgggc

SEQ ID NO: 1004172 - RNA, 19 nt, Artificial Sequence
  Description of Artificial Sequence: Synthetic oligonucleotide
  Sense strand starting at position 2767 of SEQ ID NO: 914441
agguuuaggagugacuagu

SEQ ID NO: 1004173 - RNA, 19 nt, Artificial Sequence
  Description of Artificial Sequence: Synthetic oligonucleotide
  Antisense strand to SEQ ID NO: 1004172
acuagucacuccuaaaccu

SEQ ID NO: 1004174 - RNA, 19 nt, Artificial Sequence
  Description of Artificial Sequence: Synthetic oligonucleotide
  Sense strand starting at position 2776 of SEQ ID NO: 914441
agugacuaguucuugccua

SEQ ID NO: 1004175 - RNA, 19 nt, Artificial Sequence
  Description of Artificial Sequence: Synthetic oligonucleotide
  Antisense strand to SEQ ID NO: 1004174
uaggcaagaacuagucacu

SEQ ID NO: 1004176 - RNA, 19 nt, Artificial Sequence
  Description of Artificial Sequence: Synthetic oligonucleotide
  Sense strand starting at position 2781 of SEQ ID NO: 914441
cuaguucuugccuacagua

SEQ ID NO: 1004177 - RNA, 19 nt, Artificial Sequence
  Description of Artificial Sequence: Synthetic oligonucleotide
  Antisense strand to SEQ ID NO: 1004176
uacuguaggcaagaacuag

SEQ ID NO: 1004178 - RNA, 19 nt, Artificial Sequence
  Description of Artificial Sequence: Synthetic oligonucleotide
  Sense strand starting at position 2915 of SEQ ID NO: 914441
gccuccaauuuguuucgaa

SEQ ID NO: 1004179 - RNA, 19 nt, Artificial Sequence
  Description of Artificial Sequence: Synthetic oligonucleotide
  Antisense strand to SEQ ID NO: 1004178
uucgaaacaaauuggaggc

SEQ ID NO: 1004180 - RNA, 19 nt, Artificial Sequence
  Description of Artificial Sequence: Synthetic oligonucleotide
  Sense strand starting at position 2928 of SEQ ID NO: 914441
uucgaagucucaguuaaug

SEQ ID NO: 1004181 - RNA, 19 nt, Artificial Sequence
  Description of Artificial Sequence: Synthetic oligonucleotide
  Antisense strand to SEQ ID NO: 1004180
cauuaacugagacuucgaa

SEQ ID NO: 1004182 - RNA, 19 nt, Artificial Sequence
  Description of Artificial Sequence: Synthetic oligonucleotide
  Sense strand starting at position 2930 of SEQ ID NO: 914441
cgaagucucaguuaaugau

SEQ ID NO: 1004183 - RNA, 19 nt, Artificial Sequence
  Description of Artificial Sequence: Synthetic oligonucleotide
  Antisense strand to SEQ ID NO: 1004182
aucauuaacugagacuucg

SEQ ID NO: 1004184 - RNA, 19 nt, Artificial Sequence
  Description of Artificial Sequence: Synthetic oligonucleotide
  Sense strand starting at position 2957 of SEQ ID NO: 914441
ccucuuguguuaccgaaac

SEQ ID NO: 1004185 - RNA, 19 nt, Artificial Sequence
  Description of Artificial Sequence: Synthetic oligonucleotide
  Antisense strand to SEQ ID NO: 1004184
guuucgguaacacaagagg

SEQ ID NO: 1004186 - RNA, 19 nt, Artificial Sequence
  Description of Artificial Sequence: Synthetic oligonucleotide
  Sense strand starting at position 3022 of SEQ ID NO: 914441
caggauuugcagcggcaga

SEQ ID NO: 1004187 - RNA, 19 nt, Artificial Sequence
  Description of Artificial Sequence: Synthetic oligonucleotide
  Antisense strand to SEQ ID NO: 1004186
ucugccgcugcaaauccug

SEQ ID NO: 1004188 - RNA, 19 nt, Artificial Sequence
  Description of Artificial Sequence: Synthetic oligonucleotide
  Sense strand starting at position 3023 of SEQ ID NO: 914441
aggauuugcagcggcagaa

SEQ ID NO: 1004189 - RNA, 19 nt, Artificial Sequence
  Description of Artificial Sequence: Synthetic oligonucleotide
  Antisense strand to SEQ ID NO: 1004188
uucugccgcugcaaauccu

SEQ ID NO: 1004190 - RNA, 19 nt, Artificial Sequence
  Description of Artificial Sequence: Synthetic oligonucleotide
  Sense strand starting at position 3072 of SEQ ID NO: 914441
aggagaauaggucggcuaa

SEQ ID NO: 1004191 - RNA, 19 nt, Artificial Sequence
  Description of Artificial Sequence: Synthetic oligonucleotide
  Antisense strand to SEQ ID NO: 1004190
uuagccgaccuauucuccu

SEQ ID NO: 1004192 - RNA, 19 nt, Artificial Sequence
  Description of Artificial Sequence: Synthetic oligonucleotide
  Sense strand starting at position 3073 of SEQ ID NO: 914441
ggagaauaggucggcuaau

SEQ ID NO: 1004193 - RNA, 19 nt, Artificial Sequence
  Description of Artificial Sequence: Synthetic oligonucleotide
  Antisense strand to SEQ ID NO: 1004192
auuagccgaccuauucucc

SEQ ID NO: 1004194 - RNA, 19 nt, Artificial Sequence
  Description of Artificial Sequence: Synthetic oligonucleotide
  Sense strand starting at position 3074 of SEQ ID NO: 914441
gagaauaggucggcuaaug

SEQ ID NO: 1004195 - RNA, 19 nt, Artificial Sequence
  Description of Artificial Sequence: Synthetic oligonucleotide
  Antisense strand to SEQ ID NO: 1004194
cauuagccgaccuauucuc

SEQ ID NO: 1004196 - RNA, 19 nt, Artificial Sequence
  Description of Artificial Sequence: Synthetic oligonucleotide
  Sense strand starting at position 3257 of SEQ ID NO: 914441
gugauuugcaauuggcuua

SEQ ID NO: 1004197 - RNA, 19 nt, Artificial Sequence
  Description of Artificial Sequence: Synthetic oligonucleotide
  Antisense strand to SEQ ID NO: 1004196
uaagccaauugcaaaucac

SEQ ID NO: 1004198 - RNA, 19 nt, Artificial Sequence
  Description of Artificial Sequence: Synthetic oligonucleotide
  Sense strand starting at position 3316 of SEQ ID NO: 914441
agaguuaagcauuggcuua

SEQ ID NO: 1004199 - RNA, 19 nt, Artificial Sequence
  Description of Artificial Sequence: Synthetic oligonucleotide
  Antisense strand to SEQ ID NO: 1004198
uaagccaaugcuuaacucu

SEQ ID NO: 1004200 - RNA, 19 nt, Artificial Sequence
  Description of Artificial Sequence: Synthetic oligonucleotide
  Sense strand starting at position 3329 of SEQ ID NO: 914441
ggcuuaugggugugacucu

SEQ ID NO: 1004201 - RNA, 19 nt, Artificial Sequence
  Description of Artificial Sequence: Synthetic oligonucleotide
  Antisense strand to SEQ ID NO: 1004200
agagucacacccauaagcc

SEQ ID NO: 1004202 - RNA, 19 nt, Artificial Sequence
  Description of Artificial Sequence: Synthetic oligonucleotide
  Sense strand starting at position 3336 of SEQ ID NO: 914441
gggugugacucuuuacaga

SEQ ID NO: 1004203 - RNA, 19 nt, Artificial Sequence
  Description of Artificial Sequence: Synthetic oligonucleotide
  Antisense strand to SEQ ID NO: 1004202
ucuguaaagagucacaccc

SEQ ID NO: 1004204 - RNA, 19 nt, Artificial Sequence
  Description of Artificial Sequence: Synthetic oligonucleotide
  Sense strand starting at position 3396 of SEQ ID NO: 914441
uuaucugaggccuaaguga

SEQ ID NO: 1004205 - RNA, 19 nt, Artificial Sequence
  Description of Artificial Sequence: Synthetic oligonucleotide
  Antisense strand to SEQ ID NO: 1004204
ucacuuaggccucagauaa

SEQ ID NO: 1004206 - RNA, 19 nt, Artificial Sequence
  Description of Artificial Sequence: Synthetic oligonucleotide
  Sense strand starting at position 3407 of SEQ ID NO: 914441
cuaagugacagcugugaaa

SEQ ID NO: 1004207 - RNA, 19 nt, Artificial Sequence
  Description of Artificial Sequence: Synthetic oligonucleotide
  Antisense strand to SEQ ID NO: 1004206
uuucacagcugucacuuag

SEQ ID NO: 1004208 - RNA, 19 nt, Artificial Sequence
  Description of Artificial Sequence: Synthetic oligonucleotide
  Sense strand starting at position 3541 of SEQ ID NO: 914441
uugucaaggugcucauuua

SEQ ID NO: 1004209 - RNA, 19 nt, Artificial Sequence
  Description of Artificial Sequence: Synthetic oligonucleotide
  Antisense strand to SEQ ID NO: 1004208
uaaaugagcaccuugacaa

SEQ ID NO: 1004210 - RNA, 19 nt, Artificial Sequence
  Description of Artificial Sequence: Synthetic oligonucleotide
  Sense strand starting at position 3717 of SEQ ID NO: 914441
augcuucucccuuaagagu

SEQ ID NO: 1004211 - RNA, 19 nt, Artificial Sequence
  Description of Artificial Sequence: Synthetic oligonucleotide
  Antisense strand to SEQ ID NO: 1004210
acucuuaagggagaagcau

SEQ ID NO: 1004212 - RNA, 19 nt, Artificial Sequence
  Description of Artificial Sequence: Synthetic oligonucleotide
  Sense strand starting at position 3806 of SEQ ID NO: 914441
cccauagaagaguguucua

SEQ ID NO: 1004213 - RNA, 19 nt, Artificial Sequence
  Description of Artificial Sequence: Synthetic oligonucleotide
  Antisense strand to SEQ ID NO: 1004212
uagaacacucuucuauggg

SEQ ID NO: 1004214 - RNA, 19 nt, Artificial Sequence
  Description of Artificial Sequence: Synthetic oligonucleotide
  Sense strand starting at position 3809 of SEQ ID NO: 914441
auagaagaguguucuaaga

SEQ ID NO: 1004215 - RNA, 19 nt, Artificial Sequence
  Description of Artificial Sequence: Synthetic oligonucleotide
  Antisense strand to SEQ ID NO: 1004214
ucuuagaacacucuucuau

SEQ ID NO: 1004216 - RNA, 19 nt, Artificial Sequence
  Description of Artificial Sequence: Synthetic oligonucleotide
  Sense strand starting at position 5 of SEQ ID NO: 914442
agauauaccucaguaguuu

SEQ ID NO: 1004217 - RNA, 19 nt, Artificial Sequence
  Description of Artificial Sequence: Synthetic oligonucleotide
  Antisense strand to SEQ ID NO: 1004216
aaacuacugagguauaucu

SEQ ID NO: 1004218 - RNA, 19 nt, Artificial Sequence
  Description of Artificial Sequence: Synthetic oligonucleotide
  Sense strand starting at position 6 of SEQ ID NO: 914442
gauauaccucaguaguuug

SEQ ID NO: 1004219 - RNA, 19 nt, Artificial Sequence
  Description of Artificial Sequence: Synthetic oligonucleotide
  Antisense strand to SEQ ID NO: 1004218
caaacuacugagguauauc

SEQ ID NO: 1004220 - RNA, 19 nt, Artificial Sequence
  Description of Artificial Sequence: Synthetic oligonucleotide
  Sense strand starting at position 11 of SEQ ID NO: 914442
accucaguaguuugaucua

SEQ ID NO: 1004221 - RNA, 19 nt, Artificial Sequence
  Description of Artificial Sequence: Synthetic oligonucleotide
  Antisense strand to SEQ ID NO: 1004220
uagaucaaacuacugaggu

SEQ ID NO: 1004222 - RNA, 19 nt, Artificial Sequence
  Description of Artificial Sequence: Synthetic oligonucleotide
  Sense strand starting at position 14 of SEQ ID NO: 914442
ucaguaguuugaucuacaa

SEQ ID NO: 1004223 - RNA, 19 nt, Artificial Sequence
  Description of Artificial Sequence: Synthetic oligonucleotide
  Antisense strand to SEQ ID NO: 1004222
uuguagaucaaacuacuga

SEQ ID NO: 1004224 - RNA, 19 nt, Artificial Sequence
  Description of Artificial Sequence: Synthetic oligonucleotide
  Sense strand starting at position 149 of SEQ ID NO: 914442
uucgcuuugugcucacaau

SEQ ID NO: 1004225 - RNA, 19 nt, Artificial Sequence
  Description of Artificial Sequence: Synthetic oligonucleotide
  Antisense strand to SEQ ID NO: 1004224
auugugagcacaaagcgaa

SEQ ID NO: 1004226 - RNA, 19 nt, Artificial Sequence
  Description of Artificial Sequence: Synthetic oligonucleotide
  Sense strand starting at position 150 of SEQ ID NO: 914442
ucgcuuugugcucacaaug

SEQ ID NO: 1004227 - RNA, 19 nt, Artificial Sequence
  Description of Artificial Sequence: Synthetic oligonucleotide
  Antisense strand to SEQ ID NO: 1004226
cauugugagcacaaagcga

SEQ ID NO: 1004228 - RNA, 19 nt, Artificial Sequence
  Description of Artificial Sequence: Synthetic oligonucleotide
  Sense strand starting at position 347 of SEQ ID NO: 914442
aaaucaucucgcgauugag

SEQ ID NO: 1004229 - RNA, 19 nt, Artificial Sequence
  Description of Artificial Sequence: Synthetic oligonucleotide
  Antisense strand to SEQ ID NO: 1004228
cucaaucgcgagaugauuu

SEQ ID NO: 1004230 - RNA, 19 nt, Artificial Sequence
  Description of Artificial Sequence: Synthetic oligonucleotide
  Sense strand starting at position 489 of SEQ ID NO: 914442
gcaguucuaccuuaagauu

SEQ ID NO: 1004231 - RNA, 19 nt, Artificial Sequence
  Description of Artificial Sequence: Synthetic oligonucleotide
  Antisense strand to SEQ ID NO: 1004230
aaucuuaagguagaacugc

SEQ ID NO: 1004232 - RNA, 19 nt, Artificial Sequence
  Description of Artificial Sequence: Synthetic oligonucleotide
  Sense strand starting at position 516 of SEQ ID NO: 914442
acuucucuccuacggaaga

SEQ ID NO: 1004233 - RNA, 19 nt, Artificial Sequence
  Description of Artificial Sequence: Synthetic oligonucleotide
  Antisense strand to SEQ ID NO: 1004232
ucuuccguaggagagaagu

SEQ ID NO: 1004234 - RNA, 19 nt, Artificial Sequence
  Description of Artificial Sequence: Synthetic oligonucleotide
  Sense strand starting at position 722 of SEQ ID NO: 914442
cagugaaguccugacgaca

SEQ ID NO: 1004235 - RNA, 19 nt, Artificial Sequence
  Description of Artificial Sequence: Synthetic oligonucleotide
  Antisense strand to SEQ ID NO: 1004234
ugucgucaggacuucacug

SEQ ID NO: 1004236 - RNA, 19 nt, Artificial Sequence
  Description of Artificial Sequence: Synthetic oligonucleotide
  Sense strand starting at position 845 of SEQ ID NO: 914442
acaagugccucuuccaaga

SEQ ID NO: 1004237 - RNA, 19 nt, Artificial Sequence
  Description of Artificial Sequence: Synthetic oligonucleotide
  Antisense strand to SEQ ID NO: 1004236
ucuuggaagaggcacuugu

SEQ ID NO: 1004238 - RNA, 19 nt, Artificial Sequence
  Description of Artificial Sequence: Synthetic oligonucleotide
  Sense strand starting at position 943 of SEQ ID NO: 914442
uaacgcucccgagacgaaa

SEQ ID NO: 1004239 - RNA, 19 nt, Artificial Sequence
  Description of Artificial Sequence: Synthetic oligonucleotide
  Antisense strand to SEQ ID NO: 1004238
uuucgucucgggagcguua

SEQ ID NO: 1004240 - RNA, 19 nt, Artificial Sequence
  Description of Artificial Sequence: Synthetic oligonucleotide
  Sense strand starting at position 2388 of SEQ ID NO: 914442
agaauuccuucuguaugca

SEQ ID NO: 1004241 - RNA, 19 nt, Artificial Sequence
  Description of Artificial Sequence: Synthetic oligonucleotide
  Antisense strand to SEQ ID NO: 1004240
ugcauacagaaggaauucu

SEQ ID NO: 1004242 - RNA, 19 nt, Artificial Sequence
  Description of Artificial Sequence: Synthetic oligonucleotide
  Sense strand starting at position 2489 of SEQ ID NO: 914442
cuaggaguucucuguagaa

SEQ ID NO: 1004243 - RNA, 19 nt, Artificial Sequence
  Description of Artificial Sequence: Synthetic oligonucleotide
  Antisense strand to SEQ ID NO: 1004242
uucuacagagaacuccuag

SEQ ID NO: 1004244 - RNA, 19 nt, Artificial Sequence
  Description of Artificial Sequence: Synthetic oligonucleotide
  Sense strand starting at position 2491 of SEQ ID NO: 914442
aggaguucucuguagaacg

SEQ ID NO: 1004245 - RNA, 19 nt, Artificial Sequence
  Description of Artificial Sequence: Synthetic oligonucleotide
  Antisense strand to SEQ ID NO: 1004244
cguucuacagagaacuccu

SEQ ID NO: 1004246 - RNA, 19 nt, Artificial Sequence
  Description of Artificial Sequence: Synthetic oligonucleotide
  Sense strand starting at position 2573 of SEQ ID NO: 914442
ucagcuacccuaugauguu

SEQ ID NO: 1004247 - RNA, 19 nt, Artificial Sequence
  Description of Artificial Sequence: Synthetic oligonucleotide
  Antisense strand to SEQ ID NO: 1004246
aacaucauaggguagcuga

SEQ ID NO: 1004248 - RNA, 19 nt, Artificial Sequence
  Description of Artificial Sequence: Synthetic oligonucleotide
  Sense strand starting at position 2579 of SEQ ID NO: 914442
acccuaugauguuauacau

SEQ ID NO: 1004249 - RNA, 19 nt, Artificial Sequence
  Description of Artificial Sequence: Synthetic oligonucleotide
  Antisense strand to SEQ ID NO: 1004248
auguauaacaucauagggu

SEQ ID NO: 1004250 - RNA, 19 nt, Artificial Sequence
  Description of Artificial Sequence: Synthetic oligonucleotide
  Sense strand starting at position 2717 of SEQ ID NO: 914442
agagaauuauuccagccuu

SEQ ID NO: 1004251 - RNA, 19 nt, Artificial Sequence
  Description of Artificial Sequence: Synthetic oligonucleotide
  Antisense strand to SEQ ID NO: 1004250
aaggcuggaauaauucucu

SEQ ID NO: 1004252 - RNA, 19 nt, Artificial Sequence
  Description of Artificial Sequence: Synthetic oligonucleotide
  Sense strand starting at position 2827 of SEQ ID NO: 914442
acgcaauauugugugacaa

SEQ ID NO: 1004253 - RNA, 19 nt, Artificial Sequence
  Description of Artificial Sequence: Synthetic oligonucleotide
  Antisense strand to SEQ ID NO: 1004252
uugucacacaauauugcgu

SEQ ID NO: 1004254 - RNA, 19 nt, Artificial Sequence
  Description of Artificial Sequence: Synthetic oligonucleotide
  Sense strand starting at position 2828 of SEQ ID NO: 914442
cgcaauauugugugacaac

SEQ ID NO: 1004255 - RNA, 19 nt, Artificial Sequence
  Description of Artificial Sequence: Synthetic oligonucleotide
  Antisense strand to SEQ ID NO: 1004254
guugucacacaauauugcg

SEQ ID NO: 1004256 - RNA, 19 nt, Artificial Sequence
  Description of Artificial Sequence: Synthetic oligonucleotide
  Sense strand starting at position 2911 of SEQ ID NO: 914442
cccacuguucccuagggaa

SEQ ID NO: 1004257 - RNA, 19 nt, Artificial Sequence
  Description of Artificial Sequence: Synthetic oligonucleotide
  Antisense strand to SEQ ID NO: 1004256
uucccuagggaacaguggg

SEQ ID NO: 1004258 - RNA, 19 nt, Artificial Sequence
  Description of Artificial Sequence: Synthetic oligonucleotide
  Sense strand starting at position 2913 of SEQ ID NO: 914442
cacuguucccuagggaaua

SEQ ID NO: 1004259 - RNA, 19 nt, Artificial Sequence
  Description of Artificial Sequence: Synthetic oligonucleotide
  Antisense strand to SEQ ID NO: 1004258
uauucccuagggaacagug

SEQ ID NO: 1004260 - RNA, 19 nt, Artificial Sequence
  Description of Artificial Sequence: Synthetic oligonucleotide
  Sense strand starting at position 3001 of SEQ ID NO: 914442
ucaagauauccugguuagc

SEQ ID NO: 1004261 - RNA, 19 nt, Artificial Sequence
  Description of Artificial Sequence: Synthetic oligonucleotide
  Antisense strand to SEQ ID NO: 1004260
gcuaaccaggauaucuuga

SEQ ID NO: 1004262 - RNA, 19 nt, Artificial Sequence
  Description of Artificial Sequence: Synthetic oligonucleotide
  Sense strand starting at position 3003 of SEQ ID NO: 914442
aagauauccugguuagcug

SEQ ID NO: 1004263 - RNA, 19 nt, Artificial Sequence
  Description of Artificial Sequence: Synthetic oligonucleotide
  Antisense strand to SEQ ID NO: 1004262
cagcuaaccaggauaucuu

SEQ ID NO: 1004264 - RNA, 19 nt, Artificial Sequence
  Description of Artificial Sequence: Synthetic oligonucleotide
  Sense strand starting at position 3017 of SEQ ID NO: 914442
agcugcaaagucuguuaua

SEQ ID NO: 1004265 - RNA, 19 nt, Artificial Sequence
  Description of Artificial Sequence: Synthetic oligonucleotide
  Antisense strand to SEQ ID NO: 1004264
uauaacagacuuugcagcu

SEQ ID NO: 1004266 - RNA, 19 nt, Artificial Sequence
  Description of Artificial Sequence: Synthetic oligonucleotide
  Sense strand starting at position 3018 of SEQ ID NO: 914442
gcugcaaagucuguuauau

SEQ ID NO: 1004267 - RNA, 19 nt, Artificial Sequence
  Description of Artificial Sequence: Synthetic oligonucleotide
  Antisense strand to SEQ ID NO: 1004266
auauaacagacuuugcagc

SEQ ID NO: 1004268 - RNA, 19 nt, Artificial Sequence
  Description of Artificial Sequence: Synthetic oligonucleotide
  Sense strand starting at position 3081 of SEQ ID NO: 914442
ucuuaagugcuagggauua

SEQ ID NO: 1004269 - RNA, 19 nt, Artificial Sequence
  Description of Artificial Sequence: Synthetic oligonucleotide
  Antisense strand to SEQ ID NO: 1004268
uaaucccuagcacuuaaga

SEQ ID NO: 1004270 - RNA, 19 nt, Artificial Sequence
  Description of Artificial Sequence: Synthetic oligonucleotide
  Sense strand starting at position 3151 of SEQ ID NO: 914442
guaaauacaugucagauag

SEQ ID NO: 1004271 - RNA, 19 nt, Artificial Sequence
  Description of Artificial Sequence: Synthetic oligonucleotide
  Antisense strand to SEQ ID NO: 1004270
cuaucugacauguauuuac

SEQ ID NO: 1004272 - RNA, 19 nt, Artificial Sequence
  Description of Artificial Sequence: Synthetic oligonucleotide
  Sense strand starting at position 3153 of SEQ ID NO: 914442
aaauacaugucagauagug

SEQ ID NO: 1004273 - RNA, 19 nt, Artificial Sequence
  Description of Artificial Sequence: Synthetic oligonucleotide
  Antisense strand to SEQ ID NO: 1004272
cacuaucugacauguauuu

SEQ ID NO: 1004274 - RNA, 19 nt, Artificial Sequence
  Description of Artificial Sequence: Synthetic oligonucleotide
  Sense strand starting at position 3203 of SEQ ID NO: 914442
gggaaagccuuacugacau

SEQ ID NO: 1004275 - RNA, 19 nt, Artificial Sequence
  Description of Artificial Sequence: Synthetic oligonucleotide
  Antisense strand to SEQ ID NO: 1004274
augucaguaaggcuuuccc

SEQ ID NO: 1004276 - RNA, 19 nt, Artificial Sequence
  Description of Artificial Sequence: Synthetic oligonucleotide
  Sense strand starting at position 3415 of SEQ ID NO: 914442
ucuuguagggccugaaaga

SEQ ID NO: 1004277 - RNA, 19 nt, Artificial Sequence
  Description of Artificial Sequence: Synthetic oligonucleotide
  Antisense strand to SEQ ID NO: 1004276
ucuuucaggcccuacaaga

SEQ ID NO: 1004278 - RNA, 19 nt, Artificial Sequence
  Description of Artificial Sequence: Synthetic oligonucleotide
  Sense strand starting at position 3512 of SEQ ID NO: 914442
gcacuacgcugagcaauua

SEQ ID NO: 1004279 - RNA, 19 nt, Artificial Sequence
  Description of Artificial Sequence: Synthetic oligonucleotide
  Antisense strand to SEQ ID NO: 1004278
uaauugcucagcguagugc

SEQ ID NO: 1004280 - RNA, 19 nt, Artificial Sequence
  Description of Artificial Sequence: Synthetic oligonucleotide
  Sense strand starting at position 3553 of SEQ ID NO: 914442
cggagaugauaauccuuua

SEQ ID NO: 1004281 - RNA, 19 nt, Artificial Sequence
  Description of Artificial Sequence: Synthetic oligonucleotide
  Antisense strand to SEQ ID NO: 1004280
uaaaggauuaucaucuccg

SEQ ID NO: 1004282 - RNA, 19 nt, Artificial Sequence
  Description of Artificial Sequence: Synthetic oligonucleotide
  Sense strand starting at position 3556 of SEQ ID NO: 914442
agaugauaauccuuuagcu

SEQ ID NO: 1004283 - RNA, 19 nt, Artificial Sequence
  Description of Artificial Sequence: Synthetic oligonucleotide
  Antisense strand to SEQ ID NO: 1004282
agcuaaaggauuaucaucu

SEQ ID NO: 1004284 - RNA, 19 nt, Artificial Sequence
  Description of Artificial Sequence: Synthetic oligonucleotide
  Sense strand starting at position 3680 of SEQ ID NO: 914442
ucaggagauuuguguguac

SEQ ID NO: 1004285 - RNA, 19 nt, Artificial Sequence
  Description of Artificial Sequence: Synthetic oligonucleotide
  Antisense strand to SEQ ID NO: 1004284
guacacacaaaucuccuga

SEQ ID NO: 1004286 - RNA, 19 nt, Artificial Sequence
  Description of Artificial Sequence: Synthetic oligonucleotide
  Sense strand starting at position 3689 of SEQ ID NO: 914442
uuguguguacauuaaaguu

SEQ ID NO: 1004287 - RNA, 19 nt, Artificial Sequence
  Description of Artificial Sequence: Synthetic oligonucleotide
  Antisense strand to SEQ ID NO: 1004286
aacuuuaauguacacacaa

SEQ ID NO: 1004288 - RNA, 19 nt, Artificial Sequence
  Description of Artificial Sequence: Synthetic oligonucleotide
  Sense strand starting at position 3732 of SEQ ID NO: 914442
ggaauugaccaaugucuaa

SEQ ID NO: 1004289 - RNA, 19 nt, Artificial Sequence
  Description of Artificial Sequence: Synthetic oligonucleotide
  Antisense strand to SEQ ID NO: 1004288
uuagacauuggucaauucc

SEQ ID NO: 1004290 - RNA, 19 nt, Artificial Sequence
  Description of Artificial Sequence: Synthetic oligonucleotide
  Sense strand starting at position 3736 of SEQ ID NO: 914442
uugaccaaugucuaaaguu

SEQ ID NO: 1004291 - RNA, 19 nt, Artificial Sequence
  Description of Artificial Sequence: Synthetic oligonucleotide
  Antisense strand to SEQ ID NO: 1004290
aacuuuagacauuggucaa

SEQ ID NO: 1004292 - RNA, 19 nt, Artificial Sequence
  Description of Artificial Sequence: Synthetic oligonucleotide
  Sense strand starting at position 3827 of SEQ ID NO: 914442
ugaguacuugggugugcaa

SEQ ID NO: 1004293 - RNA, 19 nt, Artificial Sequence
  Description of Artificial Sequence: Synthetic oligonucleotide
  Antisense strand to SEQ ID NO: 1004292
uugcacacccaaguacuca

SEQ ID NO: 1004294 - RNA, 19 nt, Artificial Sequence
  Description of Artificial Sequence: Synthetic oligonucleotide
  Sense strand starting at position 3829 of SEQ ID NO: 914442
aguacuugggugugcaaca

SEQ ID NO: 1004295 - RNA, 19 nt, Artificial Sequence
  Description of Artificial Sequence: Synthetic oligonucleotide
  Antisense strand to SEQ ID NO: 1004294
uguugcacacccaaguacu

SEQ ID NO: 1004296 - RNA, 19 nt, Artificial Sequence
  Description of Artificial Sequence: Synthetic oligonucleotide
  Sense strand starting at position 46 of SEQ ID NO: 914443
augaucagucuaugggaau

SEQ ID NO: 1004297 - RNA, 19 nt, Artificial Sequence
  Description of Artificial Sequence: Synthetic oligonucleotide
  Antisense strand to SEQ ID NO: 1004296
auucccauagacugaucau

SEQ ID NO: 1004298 - RNA, 19 nt, Artificial Sequence
  Description of Artificial Sequence: Synthetic oligonucleotide
  Sense strand starting at position 183 of SEQ ID NO: 914443
gggagucuuguguacuaag

SEQ ID NO: 1004299 - RNA, 19 nt, Artificial Sequence
  Description of Artificial Sequence: Synthetic oligonucleotide
  Antisense strand to SEQ ID NO: 1004298
cuuaguacacaagacuccc

SEQ ID NO: 1004300 - RNA, 19 nt, Artificial Sequence
  Description of Artificial Sequence: Synthetic oligonucleotide
  Sense strand starting at position 544 of SEQ ID NO: 914443
aggaaagagcccuguugaa

SEQ ID NO: 1004301 - RNA, 19 nt, Artificial Sequence
  Description of Artificial Sequence: Synthetic oligonucleotide
  Antisense strand to SEQ ID NO: 1004300
uucaacagggcucuuuccu

SEQ ID NO: 1004302 - RNA, 19 nt, Artificial Sequence
  Description of Artificial Sequence: Synthetic oligonucleotide
  Sense strand starting at position 590 of SEQ ID NO: 914443
guauuuccugaacguauca

SEQ ID NO: 1004303 - RNA, 19 nt, Artificial Sequence
  Description of Artificial Sequence: Synthetic oligonucleotide
  Antisense strand to SEQ ID NO: 1004302
ugauacguucaggaaauac

SEQ ID NO: 1004304 - RNA, 19 nt, Artificial Sequence
  Description of Artificial Sequence: Synthetic oligonucleotide
  Sense strand starting at position 786 of SEQ ID NO: 914443
gaacauauuguaugaagcu

SEQ ID NO: 1004305 - RNA, 19 nt, Artificial Sequence
  Description of Artificial Sequence: Synthetic oligonucleotide
  Antisense strand to SEQ ID NO: 1004304
agcuucauacaauauguuc

SEQ ID NO: 1004306 - RNA, 19 nt, Artificial Sequence
  Description of Artificial Sequence: Synthetic oligonucleotide
  Sense strand starting at position 795 of SEQ ID NO: 914443
guaugaagcuuucuagaua

SEQ ID NO: 1004307 - RNA, 19 nt, Artificial Sequence
  Description of Artificial Sequence: Synthetic oligonucleotide
  Antisense strand to SEQ ID NO: 1004306
uaucuagaaagcuucauac

SEQ ID NO: 1004308 - RNA, 19 nt, Artificial Sequence
  Description of Artificial Sequence: Synthetic oligonucleotide
  Sense strand starting at position 798 of SEQ ID NO: 914443
ugaagcuuucuagauaguu

SEQ ID NO: 1004309 - RNA, 19 nt, Artificial Sequence
  Description of Artificial Sequence: Synthetic oligonucleotide
  Antisense strand to SEQ ID NO: 1004308
aacuaucuagaaagcuuca

SEQ ID NO: 1004310 - RNA, 19 nt, Artificial Sequence
  Description of Artificial Sequence: Synthetic oligonucleotide
  Sense strand starting at position 806 of SEQ ID NO: 914443
ucuagauaguucucaugac

SEQ ID NO: 1004311 - RNA, 19 nt, Artificial Sequence
  Description of Artificial Sequence: Synthetic oligonucleotide
  Antisense strand to SEQ ID NO: 1004310
gucaugagaacuaucuaga

SEQ ID NO: 1004312 - RNA, 19 nt, Artificial Sequence
  Description of Artificial Sequence: Synthetic oligonucleotide
  Sense strand starting at position 930 of SEQ ID NO: 914443
gggccucugcuacagaaau

SEQ ID NO: 1004313 - RNA, 19 nt, Artificial Sequence
  Description of Artificial Sequence: Synthetic oligonucleotide
  Antisense strand to SEQ ID NO: 1004312
auuucuguagcagaggccc

SEQ ID NO: 1004314 - RNA, 19 nt, Artificial Sequence
  Description of Artificial Sequence: Synthetic oligonucleotide
  Sense strand starting at position 969 of SEQ ID NO: 914443
agaagauauucugcagauu

SEQ ID NO: 1004315 - RNA, 19 nt, Artificial Sequence
  Description of Artificial Sequence: Synthetic oligonucleotide
  Antisense strand to SEQ ID NO: 1004314
aaucugcagaauaucuucu

SEQ ID NO: 1004316 - RNA, 19 nt, Artificial Sequence
  Description of Artificial Sequence: Synthetic oligonucleotide
  Sense strand starting at position 981 of SEQ ID NO: 914443
gcagauuaacaugacuagu

SEQ ID NO: 1004317 - RNA, 19 nt, Artificial Sequence
  Description of Artificial Sequence: Synthetic oligonucleotide
  Antisense strand to SEQ ID NO: 1004316
acuagucauguuaaucugc

SEQ ID NO: 1004318 - RNA, 19 nt, Artificial Sequence
  Description of Artificial Sequence: Synthetic oligonucleotide
  Sense strand starting at position 1571 of SEQ ID NO: 914443
cagagaucauccucuugug

SEQ ID NO: 1004319 - RNA, 19 nt, Artificial Sequence
  Description of Artificial Sequence: Synthetic oligonucleotide
  Antisense strand to SEQ ID NO: 1004318
cacaagaggaugaucucug

SEQ ID NO: 1004320 - RNA, 19 nt, Artificial Sequence
  Description of Artificial Sequence: Synthetic oligonucleotide
  Sense strand starting at position 1586 of SEQ ID NO: 914443
ugugucccauguuuauuua

SEQ ID NO: 1004321 - RNA, 19 nt, Artificial Sequence
  Description of Artificial Sequence: Synthetic oligonucleotide
  Antisense strand to SEQ ID NO: 1004320
uaaauaaacaugggacaca

SEQ ID NO: 1004322 - RNA, 19 nt, Artificial Sequence
  Description of Artificial Sequence: Synthetic oligonucleotide
  Sense strand starting at position 1710 of SEQ ID NO: 914443
acagguaagcaaggguuua

SEQ ID NO: 1004323 - RNA, 19 nt, Artificial Sequence
  Description of Artificial Sequence: Synthetic oligonucleotide
  Antisense strand to SEQ ID NO: 1004322
uaaacccuugcuuaccugu

SEQ ID NO: 1004324 - RNA, 19 nt, Artificial Sequence
  Description of Artificial Sequence: Synthetic oligonucleotide
  Sense strand starting at position 2016 of SEQ ID NO: 914443
guauguuucgccuuccuuu

SEQ ID NO: 1004325 - RNA, 19 nt, Artificial Sequence
  Description of Artificial Sequence: Synthetic oligonucleotide
  Antisense strand to SEQ ID NO: 1004324
aaaggaaggcgaaacauac

SEQ ID NO: 1004326 - RNA, 19 nt, Artificial Sequence
  Description of Artificial Sequence: Synthetic oligonucleotide
  Sense strand starting at position 2120 of SEQ ID NO: 914443
aacuguagccugcaucaga

SEQ ID NO: 1004327 - RNA, 19 nt, Artificial Sequence
  Description of Artificial Sequence: Synthetic oligonucleotide
  Antisense strand to SEQ ID NO: 1004326
ucugaugcaggcuacaguu

SEQ ID NO: 1004328 - RNA, 19 nt, Artificial Sequence
  Description of Artificial Sequence: Synthetic oligonucleotide
  Sense strand starting at position 2139 of SEQ ID NO: 914443
gaguguauccaagggaauu

SEQ ID NO: 1004329 - RNA, 19 nt, Artificial Sequence
  Description of Artificial Sequence: Synthetic oligonucleotide
  Antisense strand to SEQ ID NO: 1004328
aauucccuuggauacacuc

SEQ ID NO: 1004330 - RNA, 19 nt, Artificial Sequence
  Description of Artificial Sequence: Synthetic oligonucleotide
  Sense strand starting at position 2140 of SEQ ID NO: 914443
aguguauccaagggaauuc

SEQ ID NO: 1004331 - RNA, 19 nt, Artificial Sequence
  Description of Artificial Sequence: Synthetic oligonucleotide
  Antisense strand to SEQ ID NO: 1004330
gaauucccuuggauacacu

SEQ ID NO: 1004332 - RNA, 19 nt, Artificial Sequence
  Description of Artificial Sequence: Synthetic oligonucleotide
  Sense strand starting at position 2226 of SEQ ID NO: 914443
uugagaaaguauguguaca

SEQ ID NO: 1004333 - RNA, 19 nt, Artificial Sequence
  Description of Artificial Sequence: Synthetic oligonucleotide
  Antisense strand to SEQ ID NO: 1004332
uguacacauacuuucucaa

SEQ ID NO: 1004334 - RNA, 19 nt, Artificial Sequence
  Description of Artificial Sequence: Synthetic oligonucleotide
  Sense strand starting at position 2227 of SEQ ID NO: 914443
ugagaaaguauguguacag

SEQ ID NO: 1004335 - RNA, 19 nt, Artificial Sequence
  Description of Artificial Sequence: Synthetic oligonucleotide
  Antisense strand to SEQ ID NO: 1004334
cuguacacauacuuucuca

SEQ ID NO: 1004336 - RNA, 19 nt, Artificial Sequence
  Description of Artificial Sequence: Synthetic oligonucleotide
  Sense strand starting at position 2231 of SEQ ID NO: 914443
aaaguauguguacaguuaa

SEQ ID NO: 1004337 - RNA, 19 nt, Artificial Sequence
  Description of Artificial Sequence: Synthetic oligonucleotide
  Antisense strand to SEQ ID NO: 1004336
uuaacuguacacauacuuu

SEQ ID NO: 1004338 - RNA, 19 nt, Artificial Sequence
  Description of Artificial Sequence: Synthetic oligonucleotide
  Sense strand starting at position 2365 of SEQ ID NO: 914443
guuugugggaaauauaugu

SEQ ID NO: 1004339 - RNA, 19 nt, Artificial Sequence
  Description of Artificial Sequence: Synthetic oligonucleotide
  Antisense strand to SEQ ID NO: 1004338
acauauauuucccacaaac

SEQ ID NO: 1004340 - RNA, 19 nt, Artificial Sequence
  Description of Artificial Sequence: Synthetic oligonucleotide
  Sense strand starting at position 2369 of SEQ ID NO: 914443
gugggaaauauaugucccu

SEQ ID NO: 1004341 - RNA, 19 nt, Artificial Sequence
  Description of Artificial Sequence: Synthetic oligonucleotide
  Antisense strand to SEQ ID NO: 1004340
agggacauauauuucccac

SEQ ID NO: 1004342 - RNA, 19 nt, Artificial Sequence
  Description of Artificial Sequence: Synthetic oligonucleotide
  Sense strand starting at position 2375 of SEQ ID NO: 914443
aauauaugucccugugaag

SEQ ID NO: 1004343 - RNA, 19 nt, Artificial Sequence
  Description of Artificial Sequence: Synthetic oligonucleotide
  Antisense strand to SEQ ID NO: 1004342
cuucacagggacauauauu

SEQ ID NO: 1004344 - RNA, 19 nt, Artificial Sequence
  Description of Artificial Sequence: Synthetic oligonucleotide
  Sense strand starting at position 2576 of SEQ ID NO: 914443
cugagaugauucucccacu

SEQ ID NO: 1004345 - RNA, 19 nt, Artificial Sequence
  Description of Artificial Sequence: Synthetic oligonucleotide
  Antisense strand to SEQ ID NO: 1004344
agugggagaaucaucucag

SEQ ID NO: 1004346 - RNA, 19 nt, Artificial Sequence
  Description of Artificial Sequence: Synthetic oligonucleotide
  Sense strand starting at position 2577 of SEQ ID NO: 914443
ugagaugauucucccacuu

SEQ ID NO: 1004347 - RNA, 19 nt, Artificial Sequence
  Description of Artificial Sequence: Synthetic oligonucleotide
  Antisense strand to SEQ ID NO: 1004346
aagugggagaaucaucuca

SEQ ID NO: 1004348 - RNA, 19 nt, Artificial Sequence
  Description of Artificial Sequence: Synthetic oligonucleotide
  Sense strand starting at position 2596 of SEQ ID NO: 914443
caguuuccugaguaguuaa

SEQ ID NO: 1004349 - RNA, 19 nt, Artificial Sequence
  Description of Artificial Sequence: Synthetic oligonucleotide
  Antisense strand to SEQ ID NO: 1004348
uuaacuacucaggaaacug

SEQ ID NO: 1004350 - RNA, 19 nt, Artificial Sequence
  Description of Artificial Sequence: Synthetic oligonucleotide
  Sense strand starting at position 2839 of SEQ ID NO: 914443
cugaacucagaauguugaa

SEQ ID NO: 1004351 - RNA, 19 nt, Artificial Sequence
  Description of Artificial Sequence: Synthetic oligonucleotide
  Antisense strand to SEQ ID NO: 1004350
uucaacauucugaguucag

SEQ ID NO: 1004352 - RNA, 19 nt, Artificial Sequence
  Description of Artificial Sequence: Synthetic oligonucleotide
  Sense strand starting at position 2873 of SEQ ID NO: 914443
ucaccuuccugggcaagau

SEQ ID NO: 1004353 - RNA, 19 nt, Artificial Sequence
  Description of Artificial Sequence: Synthetic oligonucleotide
  Antisense strand to SEQ ID NO: 1004352
aucuugcccaggaagguga

SEQ ID NO: 1004354 - RNA, 19 nt, Artificial Sequence
  Description of Artificial Sequence: Synthetic oligonucleotide
  Sense strand starting at position 2877 of SEQ ID NO: 914443
cuuccugggcaagauauua

SEQ ID NO: 1004355 - RNA, 19 nt, Artificial Sequence
  Description of Artificial Sequence: Synthetic oligonucleotide
  Antisense strand to SEQ ID NO: 1004354
uaauaucuugcccaggaag

SEQ ID NO: 1004356 - RNA, 19 nt, Artificial Sequence
  Description of Artificial Sequence: Synthetic oligonucleotide
  Sense strand starting at position 3002 of SEQ ID NO: 914443
uggaacauugccuggcaaa

SEQ ID NO: 1004357 - RNA, 19 nt, Artificial Sequence
  Description of Artificial Sequence: Synthetic oligonucleotide
  Antisense strand to SEQ ID NO: 1004356
uuugccaggcaauguucca

SEQ ID NO: 1004358 - RNA, 19 nt, Artificial Sequence
  Description of Artificial Sequence: Synthetic oligonucleotide
  Sense strand starting at position 3003 of SEQ ID NO: 914443
ggaacauugccuggcaaau

SEQ ID NO: 1004359 - RNA, 19 nt, Artificial Sequence
  Description of Artificial Sequence: Synthetic oligonucleotide
  Antisense strand to SEQ ID NO: 1004358
auuugccaggcaauguucc

SEQ ID NO: 1004360 - RNA, 19 nt, Artificial Sequence
  Description of Artificial Sequence: Synthetic oligonucleotide
  Sense strand starting at position 3271 of SEQ ID NO: 914443
ugaaaccugguauguaaua

SEQ ID NO: 1004361 - RNA, 19 nt, Artificial Sequence
  Description of Artificial Sequence: Synthetic oligonucleotide
  Antisense strand to SEQ ID NO: 1004360
uauuacauaccagguuuca

SEQ ID NO: 1004362 - RNA, 19 nt, Artificial Sequence
  Description of Artificial Sequence: Synthetic oligonucleotide
  Sense strand starting at position 3272 of SEQ ID NO: 914443
gaaaccugguauguaauau

SEQ ID NO: 1004363 - RNA, 19 nt, Artificial Sequence
  Description of Artificial Sequence: Synthetic oligonucleotide
  Antisense strand to SEQ ID NO: 1004362
auauuacauaccagguuuc

SEQ ID NO: 1004364 - RNA, 19 nt, Artificial Sequence
  Description of Artificial Sequence: Synthetic oligonucleotide
  Sense strand starting at position 3366 of SEQ ID NO: 914443
caaaguauugcaggacuca

SEQ ID NO: 1004365 - RNA, 19 nt, Artificial Sequence
  Description of Artificial Sequence: Synthetic oligonucleotide
  Antisense strand to SEQ ID NO: 1004364
ugaguccugcaauacuuug

SEQ ID NO: 1004366 - RNA, 19 nt, Artificial Sequence
  Description of Artificial Sequence: Synthetic oligonucleotide
  Sense strand starting at position 3367 of SEQ ID NO: 914443
aaaguauugcaggacucau

SEQ ID NO: 1004367 - RNA, 19 nt, Artificial Sequence
  Description of Artificial Sequence: Synthetic oligonucleotide
  Antisense strand to SEQ ID NO: 1004366
augaguccugcaauacuuu

SEQ ID NO: 1004368 - RNA, 19 nt, Artificial Sequence
  Description of Artificial Sequence: Synthetic oligonucleotide
  Sense strand starting at position 3446 of SEQ ID NO: 914443
ugcugaauugauuauccca

SEQ ID NO: 1004369 - RNA, 19 nt, Artificial Sequence
  Description of Artificial Sequence: Synthetic oligonucleotide
  Antisense strand to SEQ ID NO: 1004368
ugggauaaucaauucagca

SEQ ID NO: 1004370 - RNA, 19 nt, Artificial Sequence
  Description of Artificial Sequence: Synthetic oligonucleotide
  Sense strand starting at position 3695 of SEQ ID NO: 914443
aaaugucauugguuaagua

SEQ ID NO: 1004371 - RNA, 19 nt, Artificial Sequence
  Description of Artificial Sequence: Synthetic oligonucleotide
  Antisense strand to SEQ ID NO: 1004370
uacuuaaccaaugacauuu

SEQ ID NO: 1004372 - RNA, 19 nt, Artificial Sequence
  Description of Artificial Sequence: Synthetic oligonucleotide
  Sense strand starting at position 3719 of SEQ ID NO: 914443
gacuguguaggaggacaau

SEQ ID NO: 1004373 - RNA, 19 nt, Artificial Sequence
  Description of Artificial Sequence: Synthetic oligonucleotide
  Antisense strand to SEQ ID NO: 1004372
auuguccuccuacacaguc

SEQ ID NO: 1004374 - RNA, 19 nt, Artificial Sequence
  Description of Artificial Sequence: Synthetic oligonucleotide
  Sense strand starting at position 3839 of SEQ ID NO: 914443
aaggauuuguagcauggaa

SEQ ID NO: 1004375 - RNA, 19 nt, Artificial Sequence
  Description of Artificial Sequence: Synthetic oligonucleotide
  Antisense strand to SEQ ID NO: 1004374
uuccaugcuacaaauccuu

SEQ ID NO: 1004376 - RNA, 19 nt, Artificial Sequence
  Description of Artificial Sequence: Synthetic oligonucleotide
  Sense strand starting at position 216 of SEQ ID NO: 914444
ucucccaugucugcuuaga

SEQ ID NO: 1004377 - RNA, 19 nt, Artificial Sequence
  Description of Artificial Sequence: Synthetic oligonucleotide
  Antisense strand to SEQ ID NO: 1004376
ucuaagcagacaugggaga

SEQ ID NO: 1004378 - RNA, 19 nt, Artificial Sequence
  Description of Artificial Sequence: Synthetic oligonucleotide
  Sense strand starting at position 237 of SEQ ID NO: 914444
ggcguaagcuuccucuaac

SEQ ID NO: 1004379 - RNA, 19 nt, Artificial Sequence
  Description of Artificial Sequence: Synthetic oligonucleotide
  Antisense strand to SEQ ID NO: 1004378
guuagaggaagcuuacgcc

SEQ ID NO: 1004380 - RNA, 19 nt, Artificial Sequence
  Description of Artificial Sequence: Synthetic oligonucleotide
  Sense strand starting at position 238 of SEQ ID NO: 914444
gcguaagcuuccucuaacc

SEQ ID NO: 1004381 - RNA, 19 nt, Artificial Sequence
  Description of Artificial Sequence: Synthetic oligonucleotide
  Antisense strand to SEQ ID NO: 1004380
gguuagaggaagcuuacgc

SEQ ID NO: 1004382 - RNA, 19 nt, Artificial Sequence
  Description of Artificial Sequence: Synthetic oligonucleotide
  Sense strand starting at position 381 of SEQ ID NO: 914444
ugugguagguccaagggau

SEQ ID NO: 1004383 - RNA, 19 nt, Artificial Sequence
  Description of Artificial Sequence: Synthetic oligonucleotide
  Antisense strand to SEQ ID NO: 1004382
aucccuuggaccuaccaca

SEQ ID NO: 1004384 - RNA, 19 nt, Artificial Sequence
  Description of Artificial Sequence: Synthetic oligonucleotide
  Sense strand starting at position 597 of SEQ ID NO: 914444
guauucucugaguauauca

SEQ ID NO: 1004385 - RNA, 19 nt, Artificial Sequence
  Description of Artificial Sequence: Synthetic oligonucleotide
  Antisense strand to SEQ ID NO: 1004384
ugauauacucagagaauac

SEQ ID NO: 1004386 - RNA, 19 nt, Artificial Sequence
  Description of Artificial Sequence: Synthetic oligonucleotide
  Sense strand starting at position 604 of SEQ ID NO: 914444
cugaguauaucaccacuuu

SEQ ID NO: 1004387 - RNA, 19 nt, Artificial Sequence
  Description of Artificial Sequence: Synthetic oligonucleotide
  Antisense strand to SEQ ID NO: 1004386
aaaguggugauauacucag

SEQ ID NO: 1004388 - RNA, 19 nt, Artificial Sequence
  Description of Artificial Sequence: Synthetic oligonucleotide
  Sense strand starting at position 636 of SEQ ID NO: 914444
auucuucuuggagggcaau

SEQ ID NO: 1004389 - RNA, 19 nt, Artificial Sequence
  Description of Artificial Sequence: Synthetic oligonucleotide
  Antisense strand to SEQ ID NO: 1004388
auugcccuccaagaagaau

SEQ ID NO: 1004390 - RNA, 19 nt, Artificial Sequence
  Description of Artificial Sequence: Synthetic oligonucleotide
  Sense strand starting at position 637 of SEQ ID NO: 914444
uucuucuuggagggcaaua

SEQ ID NO: 1004391 - RNA, 19 nt, Artificial Sequence
  Description of Artificial Sequence: Synthetic oligonucleotide
  Antisense strand to SEQ ID NO: 1004390
uauugcccuccaagaagaa

SEQ ID NO: 1004392 - RNA, 19 nt, Artificial Sequence
  Description of Artificial Sequence: Synthetic oligonucleotide
  Sense strand starting at position 639 of SEQ ID NO: 914444
cuucuuggagggcaauauu

SEQ ID NO: 1004393 - RNA, 19 nt, Artificial Sequence
  Description of Artificial Sequence: Synthetic oligonucleotide
  Antisense strand to SEQ ID NO: 1004392
aauauugcccuccaagaag

SEQ ID NO: 1004394 - RNA, 19 nt, Artificial Sequence
  Description of Artificial Sequence: Synthetic oligonucleotide
  Sense strand starting at position 795 of SEQ ID NO: 914444
gaacauauagugugaagcu

SEQ ID NO: 1004395 - RNA, 19 nt, Artificial Sequence
  Description of Artificial Sequence: Synthetic oligonucleotide
  Antisense strand to SEQ ID NO: 1004394
agcuucacacuauauguuc

SEQ ID NO: 1004396 - RNA, 19 nt, Artificial Sequence
  Description of Artificial Sequence: Synthetic oligonucleotide
  Sense strand starting at position 865 of SEQ ID NO: 914444
caggaaaugugcuuuaauc

SEQ ID NO: 1004397 - RNA, 19 nt, Artificial Sequence
  Description of Artificial Sequence: Synthetic oligonucleotide
  Antisense strand to SEQ ID NO: 1004396
gauuaaagcacauuuccug

SEQ ID NO: 1004398 - RNA, 19 nt, Artificial Sequence
  Description of Artificial Sequence: Synthetic oligonucleotide
  Sense strand starting at position 867 of SEQ ID NO: 914444
ggaaaugugcuuuaaucag

SEQ ID NO: 1004399 - RNA, 19 nt, Artificial Sequence
  Description of Artificial Sequence: Synthetic oligonucleotide
  Antisense strand to SEQ ID NO: 1004398
cugauuaaagcacauuucc

SEQ ID NO: 1004400 - RNA, 19 nt, Artificial Sequence
  Description of Artificial Sequence: Synthetic oligonucleotide
  Sense strand starting at position 873 of SEQ ID NO: 914444
gugcuuuaaucagaagagg

SEQ ID NO: 1004401 - RNA, 19 nt, Artificial Sequence
  Description of Artificial Sequence: Synthetic oligonucleotide
  Antisense strand to SEQ ID NO: 1004400
ccucuucugauuaaagcac

SEQ ID NO: 1004402 - RNA, 19 nt, Artificial Sequence
  Description of Artificial Sequence: Synthetic oligonucleotide
  Sense strand starting at position 891 of SEQ ID NO: 914444
ggccacugaggaugaguaa

SEQ ID NO: 1004403 - RNA, 19 nt, Artificial Sequence
  Description of Artificial Sequence: Synthetic oligonucleotide
  Antisense strand to SEQ ID NO: 1004402
uuacucauccucaguggcc

SEQ ID NO: 1004404 - RNA, 19 nt, Artificial Sequence
  Description of Artificial Sequence: Synthetic oligonucleotide
  Sense strand starting at position 946 of SEQ ID NO: 914444
gcccguguuacagaaauau

SEQ ID NO: 1004405 - RNA, 19 nt, Artificial Sequence
  Description of Artificial Sequence: Synthetic oligonucleotide
  Antisense strand to SEQ ID NO: 1004404
auauuucuguaacacgggc

SEQ ID NO: 1004406 - RNA, 19 nt, Artificial Sequence
  Description of Artificial Sequence: Synthetic oligonucleotide
  Sense strand starting at position 995 of SEQ ID NO: 914444
gcaacuuaacaugacuagu

SEQ ID NO: 1004407 - RNA, 19 nt, Artificial Sequence
  Description of Artificial Sequence: Synthetic oligonucleotide
  Antisense strand to SEQ ID NO: 1004406
acuagucauguuaaguugc

SEQ ID NO: 1004408 - RNA, 19 nt, Artificial Sequence
  Description of Artificial Sequence: Synthetic oligonucleotide
  Sense strand starting at position 1050 of SEQ ID NO: 914444
ggcgaacuugaguaugagu

SEQ ID NO: 1004409 - RNA, 19 nt, Artificial Sequence
  Description of Artificial Sequence: Synthetic oligonucleotide
  Antisense strand to SEQ ID NO: 1004408
acucauacucaaguucgcc

SEQ ID NO: 1004410 - RNA, 19 nt, Artificial Sequence
  Description of Artificial Sequence: Synthetic oligonucleotide
  Sense strand starting at position 1052 of SEQ ID NO: 914444
cgaacuugaguaugaguca

SEQ ID NO: 1004411 - RNA, 19 nt, Artificial Sequence
  Description of Artificial Sequence: Synthetic oligonucleotide
  Antisense strand to SEQ ID NO: 1004410
ugacucauacucaaguucg

SEQ ID NO: 1004412 - RNA, 19 nt, Artificial Sequence
  Description of Artificial Sequence: Synthetic oligonucleotide
  Sense strand starting at position 1140 of SEQ ID NO: 914444
gcaaauuuggcaugcugga

SEQ ID NO: 1004413 - RNA, 19 nt, Artificial Sequence
  Description of Artificial Sequence: Synthetic oligonucleotide
  Antisense strand to SEQ ID NO: 1004412
uccagcaugccaaauuugc

SEQ ID NO: 1004414 - RNA, 19 nt, Artificial Sequence
  Description of Artificial Sequence: Synthetic oligonucleotide
  Sense strand starting at position 1193 of SEQ ID NO: 914444
gggccuuauccauaacugu

SEQ ID NO: 1004415 - RNA, 19 nt, Artificial Sequence
  Description of Artificial Sequence: Synthetic oligonucleotide
  Antisense strand to SEQ ID NO: 1004414
acaguuauggauaaggccc

SEQ ID NO: 1004416 - RNA, 19 nt, Artificial Sequence
  Description of Artificial Sequence: Synthetic oligonucleotide
  Sense strand starting at position 1312 of SEQ ID NO: 914444
cggauaaacugcuuucucu

SEQ ID NO: 1004417 - RNA, 19 nt, Artificial Sequence
  Description of Artificial Sequence: Synthetic oligonucleotide
  Antisense strand to SEQ ID NO: 1004416
agagaaagcaguuuauccg

SEQ ID NO: 1004418 - RNA, 19 nt, Artificial Sequence
  Description of Artificial Sequence: Synthetic oligonucleotide
  Sense strand starting at position 1398 of SEQ ID NO: 914444
cucucaugucaucaccaga

SEQ ID NO: 1004419 - RNA, 19 nt, Artificial Sequence
  Description of Artificial Sequence: Synthetic oligonucleotide
  Antisense strand to SEQ ID NO: 1004418
ucuggugaugacaugagag

SEQ ID NO: 1004420 - RNA, 19 nt, Artificial Sequence
  Description of Artificial Sequence: Synthetic oligonucleotide
  Sense strand starting at position 1403 of SEQ ID NO: 914444
augucaucaccagaaggca

SEQ ID NO: 1004421 - RNA, 19 nt, Artificial Sequence
  Description of Artificial Sequence: Synthetic oligonucleotide
  Antisense strand to SEQ ID NO: 1004420
ugccuucuggugaugacau

SEQ ID NO: 1004422 - RNA, 19 nt, Artificial Sequence
  Description of Artificial Sequence: Synthetic oligonucleotide
  Sense strand starting at position 1482 of SEQ ID NO: 914444
uuacuuuaucgcuguacua

SEQ ID NO: 1004423 - RNA, 19 nt, Artificial Sequence
  Description of Artificial Sequence: Synthetic oligonucleotide
  Antisense strand to SEQ ID NO: 1004422
uaguacagcgauaaaguaa

SEQ ID NO: 1004424 - RNA, 19 nt, Artificial Sequence
  Description of Artificial Sequence: Synthetic oligonucleotide
  Sense strand starting at position 1484 of SEQ ID NO: 914444
acuuuaucgcuguacuacu

SEQ ID NO: 1004425 - RNA, 19 nt, Artificial Sequence
  Description of Artificial Sequence: Synthetic oligonucleotide
  Antisense strand to SEQ ID NO: 1004424
aguaguacagcgauaaagu

SEQ ID NO: 1004426 - RNA, 19 nt, Artificial Sequence
  Description of Artificial Sequence: Synthetic oligonucleotide
  Sense strand starting at position 1565 of SEQ ID NO: 914444
ccacauuagucccuggaaa

SEQ ID NO: 1004427 - RNA, 19 nt, Artificial Sequence
  Description of Artificial Sequence: Synthetic oligonucleotide
  Antisense strand to SEQ ID NO: 1004426
uuuccagggacuaaugugg

SEQ ID NO: 1004428 - RNA, 19 nt, Artificial Sequence
  Description of Artificial Sequence: Synthetic oligonucleotide
  Sense strand starting at position 1566 of SEQ ID NO: 914444
cacauuagucccuggaaag

SEQ ID NO: 1004429 - RNA, 19 nt, Artificial Sequence
  Description of Artificial Sequence: Synthetic oligonucleotide
  Antisense strand to SEQ ID NO: 1004428
cuuuccagggacuaaugug

SEQ ID NO: 1004430 - RNA, 19 nt, Artificial Sequence
  Description of Artificial Sequence: Synthetic oligonucleotide
  Sense strand starting at position 1567 of SEQ ID NO: 914444
acauuagucccuggaaagc

SEQ ID NO: 1004431 - RNA, 19 nt, Artificial Sequence
  Description of Artificial Sequence: Synthetic oligonucleotide
  Antisense strand to SEQ ID NO: 1004430
gcuuuccagggacuaaugu

SEQ ID NO: 1004432 - RNA, 19 nt, Artificial Sequence
  Description of Artificial Sequence: Synthetic oligonucleotide
  Sense strand starting at position 1813 of SEQ ID NO: 914444
ggcugcaagagucaucuaa

SEQ ID NO: 1004433 - RNA, 19 nt, Artificial Sequence
  Description of Artificial Sequence: Synthetic oligonucleotide
  Antisense strand to SEQ ID NO: 1004432
uuagaugacucuugcagcc

SEQ ID NO: 1004434 - RNA, 19 nt, Artificial Sequence
  Description of Artificial Sequence: Synthetic oligonucleotide
  Sense strand starting at position 1815 of SEQ ID NO: 914444
cugcaagagucaucuaauu

SEQ ID NO: 1004435 - RNA, 19 nt, Artificial Sequence
  Description of Artificial Sequence: Synthetic oligonucleotide
  Antisense strand to SEQ ID NO: 1004434
aauuagaugacucuugcag

SEQ ID NO: 1004436 - RNA, 19 nt, Artificial Sequence
  Description of Artificial Sequence: Synthetic oligonucleotide
  Sense strand starting at position 1896 of SEQ ID NO: 914444
gaugauagcuuccagaaga

SEQ ID NO: 1004437 - RNA, 19 nt, Artificial Sequence
  Description of Artificial Sequence: Synthetic oligonucleotide
  Antisense strand to SEQ ID NO: 1004436
ucuucuggaagcuaucauc

SEQ ID NO: 1004438 - RNA, 19 nt, Artificial Sequence
  Description of Artificial Sequence: Synthetic oligonucleotide
  Sense strand starting at position 2000 of SEQ ID NO: 914444
cuucuuguguaagcugaaa

SEQ ID NO: 1004439 - RNA, 19 nt, Artificial Sequence
  Description of Artificial Sequence: Synthetic oligonucleotide
  Antisense strand to SEQ ID NO: 1004438
uuucagcuuacacaagaag

SEQ ID NO: 1004440 - RNA, 19 nt, Artificial Sequence
  Description of Artificial Sequence: Synthetic oligonucleotide
  Sense strand starting at position 2074 of SEQ ID NO: 914444
auguacacauauugggaaa

SEQ ID NO: 1004441 - RNA, 19 nt, Artificial Sequence
  Description of Artificial Sequence: Synthetic oligonucleotide
  Antisense strand to SEQ ID NO: 1004440
uuucccaauauguguacau

SEQ ID NO: 1004442 - RNA, 19 nt, Artificial Sequence
  Description of Artificial Sequence: Synthetic oligonucleotide
  Sense strand starting at position 2288 of SEQ ID NO: 914444
uuaaacucauagugaagaa

SEQ ID NO: 1004443 - RNA, 19 nt, Artificial Sequence
  Description of Artificial Sequence: Synthetic oligonucleotide
  Antisense strand to SEQ ID NO: 1004442
uucuucacuaugaguuuaa

SEQ ID NO: 1004444 - RNA, 19 nt, Artificial Sequence
  Description of Artificial Sequence: Synthetic oligonucleotide
  Sense strand starting at position 2300 of SEQ ID NO: 914444
ugaagaauuucucauucgu

SEQ ID NO: 1004445 - RNA, 19 nt, Artificial Sequence
  Description of Artificial Sequence: Synthetic oligonucleotide
  Antisense strand to SEQ ID NO: 1004444
acgaaugagaaauucuuca

SEQ ID NO: 1004446 - RNA, 19 nt, Artificial Sequence
  Description of Artificial Sequence: Synthetic oligonucleotide
  Sense strand starting at position 2307 of SEQ ID NO: 914444
uuucucauucguuagaaag

SEQ ID NO: 1004447 - RNA, 19 nt, Artificial Sequence
  Description of Artificial Sequence: Synthetic oligonucleotide
  Antisense strand to SEQ ID NO: 1004446
cuuucuaacgaaugagaaa

SEQ ID NO: 1004448 - RNA, 19 nt, Artificial Sequence
  Description of Artificial Sequence: Synthetic oligonucleotide
  Sense strand starting at position 2319 of SEQ ID NO: 914444
uagaaagcuugauggagaa

SEQ ID NO: 1004449 - RNA, 19 nt, Artificial Sequence
  Description of Artificial Sequence: Synthetic oligonucleotide
  Antisense strand to SEQ ID NO: 1004448
uucuccaucaagcuuucua

SEQ ID NO: 1004450 - RNA, 19 nt, Artificial Sequence
  Description of Artificial Sequence: Synthetic oligonucleotide
  Sense strand starting at position 2926 of SEQ ID NO: 914444
aguuccucugccugugaaa

SEQ ID NO: 1004451 - RNA, 19 nt, Artificial Sequence
  Description of Artificial Sequence: Synthetic oligonucleotide
  Antisense strand to SEQ ID NO: 1004450
uuucacaggcagaggaacu

SEQ ID NO: 1004452 - RNA, 19 nt, Artificial Sequence
  Description of Artificial Sequence: Synthetic oligonucleotide
  Sense strand starting at position 3343 of SEQ ID NO: 914444
agaaauuaguuggagaaau

SEQ ID NO: 1004453 - RNA, 19 nt, Artificial Sequence
  Description of Artificial Sequence: Synthetic oligonucleotide
  Antisense strand to SEQ ID NO: 1004452
auuucuccaacuaauuucu

SEQ ID NO: 1004454 - RNA, 19 nt, Artificial Sequence
  Description of Artificial Sequence: Synthetic oligonucleotide
  Sense strand starting at position 3908 of SEQ ID NO: 914444
acauuuauguacugauucu

SEQ ID NO: 1004455 - RNA, 19 nt, Artificial Sequence
  Description of Artificial Sequence: Synthetic oligonucleotide
  Antisense strand to SEQ ID NO: 1004454
agaaucaguacauaaaugu

SEQ ID NO: 1004456 - RNA, 19 nt, Artificial Sequence
  Description of Artificial Sequence: Synthetic oligonucleotide
  Sense strand starting at position 45 of SEQ ID NO: 914445
caaaguaagcuguacaugu

SEQ ID NO: 1004457 - RNA, 19 nt, Artificial Sequence
  Description of Artificial Sequence: Synthetic oligonucleotide
  Antisense strand to SEQ ID NO: 1004456
acauguacagcuuacuuug

SEQ ID NO: 1004458 - RNA, 19 nt, Artificial Sequence
  Description of Artificial Sequence: Synthetic oligonucleotide
  Sense strand starting at position 55 of SEQ ID NO: 914445
uguacaugucucuacagga

SEQ ID NO: 1004459 - RNA, 19 nt, Artificial Sequence
  Description of Artificial Sequence: Synthetic oligonucleotide
  Antisense strand to SEQ ID NO: 1004458
uccuguagagacauguaca

SEQ ID NO: 1004460 - RNA, 19 nt, Artificial Sequence
  Description of Artificial Sequence: Synthetic oligonucleotide
  Sense strand starting at position 157 of SEQ ID NO: 914445
gaugaauuauccucuguug

SEQ ID NO: 1004461 - RNA, 19 nt, Artificial Sequence
  Description of Artificial Sequence: Synthetic oligonucleotide
  Antisense strand to SEQ ID NO: 1004460
caacagaggauaauucauc

SEQ ID NO: 1004462 - RNA, 19 nt, Artificial Sequence
  Description of Artificial Sequence: Synthetic oligonucleotide
  Sense strand starting at position 196 of SEQ ID NO: 914445
agaagaaaguaauaugaga

SEQ ID NO: 1004463 - RNA, 19 nt, Artificial Sequence
  Description of Artificial Sequence: Synthetic oligonucleotide
  Antisense strand to SEQ ID NO: 1004462
ucucauauuacuuucuucu

SEQ ID NO: 1004464 - RNA, 19 nt, Artificial Sequence
  Description of Artificial Sequence: Synthetic oligonucleotide
  Sense strand starting at position 237 of SEQ ID NO: 914445
ugaugaaauuaaucagguu

SEQ ID NO: 1004465 - RNA, 19 nt, Artificial Sequence
  Description of Artificial Sequence: Synthetic oligonucleotide
  Antisense strand to SEQ ID NO: 1004464
aaccugauuaauuucauca

SEQ ID NO: 1004466 - RNA, 19 nt, Artificial Sequence
  Description of Artificial Sequence: Synthetic oligonucleotide
  Sense strand starting at position 295 of SEQ ID NO: 914445
acgagaauaucuucucccu

SEQ ID NO: 1004467 - RNA, 19 nt, Artificial Sequence
  Description of Artificial Sequence: Synthetic oligonucleotide
  Antisense strand to SEQ ID NO: 1004466
agggagaagauauucucgu

SEQ ID NO: 1004468 - RNA, 19 nt, Artificial Sequence
  Description of Artificial Sequence: Synthetic oligonucleotide
  Sense strand starting at position 303 of SEQ ID NO: 914445
aucuucucccuuggaagaa

SEQ ID NO: 1004469 - RNA, 19 nt, Artificial Sequence
  Description of Artificial Sequence: Synthetic oligonucleotide
  Antisense strand to SEQ ID NO: 1004468
uucuuccaagggagaagau

SEQ ID NO: 1004470 - RNA, 19 nt, Artificial Sequence
  Description of Artificial Sequence: Synthetic oligonucleotide
  Sense strand starting at position 325 of SEQ ID NO: 914445
cugggaagucucugaagug

SEQ ID NO: 1004471 - RNA, 19 nt, Artificial Sequence
  Description of Artificial Sequence: Synthetic oligonucleotide
  Antisense strand to SEQ ID NO: 1004470
cacuucagagacuucccag

SEQ ID NO: 1004472 - RNA, 19 nt, Artificial Sequence
  Description of Artificial Sequence: Synthetic oligonucleotide
  Sense strand starting at position 335 of SEQ ID NO: 914445
ucugaagugcuccagaguu

SEQ ID NO: 1004473 - RNA, 19 nt, Artificial Sequence
  Description of Artificial Sequence: Synthetic oligonucleotide
  Antisense strand to SEQ ID NO: 1004472
aacucuggagcacuucaga

SEQ ID NO: 1004474 - RNA, 19 nt, Artificial Sequence
  Description of Artificial Sequence: Synthetic oligonucleotide
  Sense strand starting at position 463 of SEQ ID NO: 914445
cagagaauggucuguagac

SEQ ID NO: 1004475 - RNA, 19 nt, Artificial Sequence
  Description of Artificial Sequence: Synthetic oligonucleotide
  Antisense strand to SEQ ID NO: 1004474
gucuacagaccauucucug

SEQ ID NO: 1004476 - RNA, 19 nt, Artificial Sequence
  Description of Artificial Sequence: Synthetic oligonucleotide
  Sense strand starting at position 464 of SEQ ID NO: 914445
agagaauggucuguagacu

SEQ ID NO: 1004477 - RNA, 19 nt, Artificial Sequence
  Description of Artificial Sequence: Synthetic oligonucleotide
  Antisense strand to SEQ ID NO: 1004476
agucuacagaccauucucu

SEQ ID NO: 1004478 - RNA, 19 nt, Artificial Sequence
  Description of Artificial Sequence: Synthetic oligonucleotide
  Sense strand starting at position 489 of SEQ ID NO: 914445
augcaaguagaccauauua

SEQ ID NO: 1004479 - RNA, 19 nt, Artificial Sequence
  Description of Artificial Sequence: Synthetic oligonucleotide
  Antisense strand to SEQ ID NO: 1004478
uaauauggucuacuugcau

SEQ ID NO: 1004480 - RNA, 19 nt, Artificial Sequence
  Description of Artificial Sequence: Synthetic oligonucleotide
  Sense strand starting at position 491 of SEQ ID NO: 914445
gcaaguagaccauauuaca

SEQ ID NO: 1004481 - RNA, 19 nt, Artificial Sequence
  Description of Artificial Sequence: Synthetic oligonucleotide
  Antisense strand to SEQ ID NO: 1004480
uguaauauggucuacuugc

SEQ ID NO: 1004482 - RNA, 19 nt, Artificial Sequence
  Description of Artificial Sequence: Synthetic oligonucleotide
  Sense strand starting at position 529 of SEQ ID NO: 914445
gaugacuuccaacgagaau

SEQ ID NO: 1004483 - RNA, 19 nt, Artificial Sequence
  Description of Artificial Sequence: Synthetic oligonucleotide
  Antisense strand to SEQ ID NO: 1004482
auucucguuggaagucauc

SEQ ID NO: 1004484 - RNA, 19 nt, Artificial Sequence
  Description of Artificial Sequence: Synthetic oligonucleotide
  Sense strand starting at position 934 of SEQ ID NO: 914445
gcuagagccaugcauaaag

SEQ ID NO: 1004485 - RNA, 19 nt, Artificial Sequence
  Description of Artificial Sequence: Synthetic oligonucleotide
  Antisense strand to SEQ ID NO: 1004484
cuuuaugcauggcucuagc

SEQ ID NO: 1004486 - RNA, 19 nt, Artificial Sequence
  Description of Artificial Sequence: Synthetic oligonucleotide
  Sense strand starting at position 1046 of SEQ ID NO: 914445
uuuggacauuagguugaau

SEQ ID NO: 1004487 - RNA, 19 nt, Artificial Sequence
  Description of Artificial Sequence: Synthetic oligonucleotide
  Antisense strand to SEQ ID NO: 1004486
auucaaccuaauguccaaa

SEQ ID NO: 1004488 - RNA, 19 nt, Artificial Sequence
  Description of Artificial Sequence: Synthetic oligonucleotide
  Sense strand starting at position 1048 of SEQ ID NO: 914445
uggacauuagguugaauca

SEQ ID NO: 1004489 - RNA, 19 nt, Artificial Sequence
  Description of Artificial Sequence: Synthetic oligonucleotide
  Antisense strand to SEQ ID NO: 1004488
ugauucaaccuaaugucca

SEQ ID NO: 1004490 - RNA, 19 nt, Artificial Sequence
  Description of Artificial Sequence: Synthetic oligonucleotide
  Sense strand starting at position 1123 of SEQ ID NO: 914445
agagaugcuugauaaauuu

SEQ ID NO: 1004491 - RNA, 19 nt, Artificial Sequence
  Description of Artificial Sequence: Synthetic oligonucleotide
  Antisense strand to SEQ ID NO: 1004490
aaauuuaucaagcaucucu

SEQ ID NO: 1004492 - RNA, 19 nt, Artificial Sequence
  Description of Artificial Sequence: Synthetic oligonucleotide
  Sense strand starting at position 1183 of SEQ ID NO: 914445
agacucgagccuuauccau

SEQ ID NO: 1004493 - RNA, 19 nt, Artificial Sequence
  Description of Artificial Sequence: Synthetic oligonucleotide
  Antisense strand to SEQ ID NO: 1004492
auggauaaggcucgagucu

SEQ ID NO: 1004494 - RNA, 19 nt, Artificial Sequence
  Description of Artificial Sequence: Synthetic oligonucleotide
  Sense strand starting at position 1190 of SEQ ID NO: 914445
agccuuauccaugacagug

SEQ ID NO: 1004495 - RNA, 19 nt, Artificial Sequence
  Description of Artificial Sequence: Synthetic oligonucleotide
  Antisense strand to SEQ ID NO: 1004494
cacugucauggauaaggcu

SEQ ID NO: 1004496 - RNA, 19 nt, Artificial Sequence
  Description of Artificial Sequence: Synthetic oligonucleotide
  Sense strand starting at position 1234 of SEQ ID NO: 914445
ugucuuccuggcuaauaac

SEQ ID NO: 1004497 - RNA, 19 nt, Artificial Sequence
  Description of Artificial Sequence: Synthetic oligonucleotide
  Antisense strand to SEQ ID NO: 1004496
guuauuagccaggaagaca

SEQ ID NO: 1004498 - RNA, 19 nt, Artificial Sequence
  Description of Artificial Sequence: Synthetic oligonucleotide
  Sense strand starting at position 1335 of SEQ ID NO: 914445
aagaguuggucuguuggaa

SEQ ID NO: 1004499 - RNA, 19 nt, Artificial Sequence
  Description of Artificial Sequence: Synthetic oligonucleotide
  Antisense strand to SEQ ID NO: 1004498
uuccaacagaccaacucuu

SEQ ID NO: 1004500 - RNA, 19 nt, Artificial Sequence
  Description of Artificial Sequence: Synthetic oligonucleotide
  Sense strand starting at position 1465 of SEQ ID NO: 914445
gucuuauaccuuugcauuu

SEQ ID NO: 1004501 - RNA, 19 nt, Artificial Sequence
  Description of Artificial Sequence: Synthetic oligonucleotide
  Antisense strand to SEQ ID NO: 1004500
aaaugcaaagguauaagac

SEQ ID NO: 1004502 - RNA, 19 nt, Artificial Sequence
  Description of Artificial Sequence: Synthetic oligonucleotide
  Sense strand starting at position 1478 of SEQ ID NO: 914445
gcauuuacuccacguacuu

SEQ ID NO: 1004503 - RNA, 19 nt, Artificial Sequence
  Description of Artificial Sequence: Synthetic oligonucleotide
  Antisense strand to SEQ ID NO: 1004502
aaguacguggaguaaaugc

SEQ ID NO: 1004504 - RNA, 19 nt, Artificial Sequence
  Description of Artificial Sequence: Synthetic oligonucleotide
  Sense strand starting at position 1519 of SEQ ID NO: 914445
acauaugcucacugaguga

SEQ ID NO: 1004505 - RNA, 19 nt, Artificial Sequence
  Description of Artificial Sequence: Synthetic oligonucleotide
  Antisense strand to SEQ ID NO: 1004504
ucacucagugagcauaugu

SEQ ID NO: 1004506 - RNA, 19 nt, Artificial Sequence
  Description of Artificial Sequence: Synthetic oligonucleotide
  Sense strand starting at position 1530 of SEQ ID NO: 914445
cugagugaccugggaaacu

SEQ ID NO: 1004507 - RNA, 19 nt, Artificial Sequence
  Description of Artificial Sequence: Synthetic oligonucleotide
  Antisense strand to SEQ ID NO: 1004506
aguuucccaggucacucag

SEQ ID NO: 1004508 - RNA, 19 nt, Artificial Sequence
  Description of Artificial Sequence: Synthetic oligonucleotide
  Sense strand starting at position 1659 of SEQ ID NO: 914445
ggaauugacuguuuccuuu

SEQ ID NO: 1004509 - RNA, 19 nt, Artificial Sequence
  Description of Artificial Sequence: Synthetic oligonucleotide
  Antisense strand to SEQ ID NO: 1004508
aaaggaaacagucaauucc

SEQ ID NO: 1004510 - RNA, 19 nt, Artificial Sequence
  Description of Artificial Sequence: Synthetic oligonucleotide
  Sense strand starting at position 1663 of SEQ ID NO: 914445
uugacuguuuccuuugaga

SEQ ID NO: 1004511 - RNA, 19 nt, Artificial Sequence
  Description of Artificial Sequence: Synthetic oligonucleotide
  Antisense strand to SEQ ID NO: 1004510
ucucaaaggaaacagucaa

SEQ ID NO: 1004512 - RNA, 19 nt, Artificial Sequence
  Description of Artificial Sequence: Synthetic oligonucleotide
  Sense strand starting at position 1665 of SEQ ID NO: 914445
gacuguuuccuuugagaac

SEQ ID NO: 1004513 - RNA, 19 nt, Artificial Sequence
  Description of Artificial Sequence: Synthetic oligonucleotide
  Antisense strand to SEQ ID NO: 1004512
guucucaaaggaaacaguc

SEQ ID NO: 1004514 - RNA, 19 nt, Artificial Sequence
  Description of Artificial Sequence: Synthetic oligonucleotide
  Sense strand starting at position 2177 of SEQ ID NO: 914445
ugaaucucagauuguagca

SEQ ID NO: 1004515 - RNA, 19 nt, Artificial Sequence
  Description of Artificial Sequence: Synthetic oligonucleotide
  Antisense strand to SEQ ID NO: 1004514
ugcuacaaucugagauuca

SEQ ID NO: 1004516 - RNA, 19 nt, Artificial Sequence
  Description of Artificial Sequence: Synthetic oligonucleotide
  Sense strand starting at position 2227 of SEQ ID NO: 914445
auuccuuggugggugagaa

SEQ ID NO: 1004517 - RNA, 19 nt, Artificial Sequence
  Description of Artificial Sequence: Synthetic oligonucleotide
  Antisense strand to SEQ ID NO: 1004516
uucucacccaccaaggaau

SEQ ID NO: 1004518 - RNA, 19 nt, Artificial Sequence
  Description of Artificial Sequence: Synthetic oligonucleotide
  Sense strand starting at position 2228 of SEQ ID NO: 914445
uuccuuggugggugagaaa

SEQ ID NO: 1004519 - RNA, 19 nt, Artificial Sequence
  Description of Artificial Sequence: Synthetic oligonucleotide
  Antisense strand to SEQ ID NO: 1004518
uuucucacccaccaaggaa

SEQ ID NO: 1004520 - RNA, 19 nt, Artificial Sequence
  Description of Artificial Sequence: Synthetic oligonucleotide
  Sense strand starting at position 2725 of SEQ ID NO: 914445
uguggcaugggucacaauu

SEQ ID NO: 1004521 - RNA, 19 nt, Artificial Sequence
  Description of Artificial Sequence: Synthetic oligonucleotide
  Antisense strand to SEQ ID NO: 1004520
aauugugacccaugccaca

SEQ ID NO: 1004522 - RNA, 19 nt, Artificial Sequence
  Description of Artificial Sequence: Synthetic oligonucleotide
  Sense strand starting at position 3102 of SEQ ID NO: 914445
augggugugagauggacua

SEQ ID NO: 1004523 - RNA, 19 nt, Artificial Sequence
  Description of Artificial Sequence: Synthetic oligonucleotide
  Antisense strand to SEQ ID NO: 1004522
uaguccaucucacacccau

SEQ ID NO: 1004524 - RNA, 19 nt, Artificial Sequence
  Description of Artificial Sequence: Synthetic oligonucleotide
  Sense strand starting at position 3179 of SEQ ID NO: 914445
agaaaugguguaugaagca

SEQ ID NO: 1004525 - RNA, 19 nt, Artificial Sequence
  Description of Artificial Sequence: Synthetic oligonucleotide
  Antisense strand to SEQ ID NO: 1004524
ugcuucauacaccauuucu

SEQ ID NO: 1004526 - RNA, 19 nt, Artificial Sequence
  Description of Artificial Sequence: Synthetic oligonucleotide
  Sense strand starting at position 3306 of SEQ ID NO: 914445
gccagaaugguuggaucca

SEQ ID NO: 1004527 - RNA, 19 nt, Artificial Sequence
  Description of Artificial Sequence: Synthetic oligonucleotide
  Antisense strand to SEQ ID NO: 1004526
uggauccaaccauucuggc

SEQ ID NO: 1004528 - RNA, 19 nt, Artificial Sequence
  Description of Artificial Sequence: Synthetic oligonucleotide
  Sense strand starting at position 3381 of SEQ ID NO: 914445
gccagauagguuugaugau

SEQ ID NO: 1004529 - RNA, 19 nt, Artificial Sequence
  Description of Artificial Sequence: Synthetic oligonucleotide
  Antisense strand to SEQ ID NO: 1004528
aucaucaaaccuaucuggc

SEQ ID NO: 1004530 - RNA, 19 nt, Artificial Sequence
  Description of Artificial Sequence: Synthetic oligonucleotide
  Sense strand starting at position 3580 of SEQ ID NO: 914445
ugugccauacauuauuaua

SEQ ID NO: 1004531 - RNA, 19 nt, Artificial Sequence
  Description of Artificial Sequence: Synthetic oligonucleotide
  Antisense strand to SEQ ID NO: 1004530
uauaauaauguauggcaca

SEQ ID NO: 1004532 - RNA, 19 nt, Artificial Sequence
  Description of Artificial Sequence: Synthetic oligonucleotide
  Sense strand starting at position 3649 of SEQ ID NO: 914445
uuagaaguuguaugauagu

SEQ ID NO: 1004533 - RNA, 19 nt, Artificial Sequence
  Description of Artificial Sequence: Synthetic oligonucleotide
  Antisense strand to SEQ ID NO: 1004532
acuaucauacaacuucuaa

SEQ ID NO: 1004534 - RNA, 19 nt, Artificial Sequence
  Description of Artificial Sequence: Synthetic oligonucleotide
  Sense strand starting at position 3748 of SEQ ID NO: 914445
ggaaucacaucuuugguaa

SEQ ID NO: 1004535 - RNA, 19 nt, Artificial Sequence
  Description of Artificial Sequence: Synthetic oligonucleotide
  Antisense strand to SEQ ID NO: 1004534
uuaccaaagaugugauucc

SEQ ID NO: 1004536 - RNA, 19 nt, Artificial Sequence
  Description of Artificial Sequence: Synthetic oligonucleotide
  Sense strand starting at position 364 of SEQ ID NO: 914446
gggcuauguucagggcuga

SEQ ID NO: 1004537 - RNA, 19 nt, Artificial Sequence
  Description of Artificial Sequence: Synthetic oligonucleotide
  Antisense strand to SEQ ID NO: 1004536
ucagcccugaacauagccc

SEQ ID NO: 1004538 - RNA, 19 nt, Artificial Sequence
  Description of Artificial Sequence: Synthetic oligonucleotide
  Sense strand starting at position 430 of SEQ ID NO: 914446
gcuuguuaaugggaacgca

SEQ ID NO: 1004539 - RNA, 19 nt, Artificial Sequence
  Description of Artificial Sequence: Synthetic oligonucleotide
  Antisense strand to SEQ ID NO: 1004538
ugcguucccauuaacaagc

SEQ ID NO: 1004540 - RNA, 19 nt, Artificial Sequence
  Description of Artificial Sequence: Synthetic oligonucleotide
  Sense strand starting at position 454 of SEQ ID NO: 914446
gggagugcuuuguaaacug

SEQ ID NO: 1004541 - RNA, 19 nt, Artificial Sequence
  Description of Artificial Sequence: Synthetic oligonucleotide
  Antisense strand to SEQ ID NO: 1004540
caguuuacaaagcacuccc

SEQ ID NO: 1004542 - RNA, 19 nt, Artificial Sequence
  Description of Artificial Sequence: Synthetic oligonucleotide
  Sense strand starting at position 462 of SEQ ID NO: 914446
uuuguaaacuguucugugu

SEQ ID NO: 1004543 - RNA, 19 nt, Artificial Sequence
  Description of Artificial Sequence: Synthetic oligonucleotide
  Antisense strand to SEQ ID NO: 1004542
acacagaacaguuuacaaa

SEQ ID NO: 1004544 - RNA, 19 nt, Artificial Sequence
  Description of Artificial Sequence: Synthetic oligonucleotide
  Sense strand starting at position 654 of SEQ ID NO: 914446
aguguuuguugacugaaga

SEQ ID NO: 1004545 - RNA, 19 nt, Artificial Sequence
  Description of Artificial Sequence: Synthetic oligonucleotide
  Antisense strand to SEQ ID NO: 1004544
ucuucagucaacaaacacu

SEQ ID NO: 1004546 - RNA, 19 nt, Artificial Sequence
  Description of Artificial Sequence: Synthetic oligonucleotide
  Sense strand starting at position 708 of SEQ ID NO: 914446
guggcuuauuucugucuca

SEQ ID NO: 1004547 - RNA, 19 nt, Artificial Sequence
  Description of Artificial Sequence: Synthetic oligonucleotide
  Antisense strand to SEQ ID NO: 1004546
ugagacagaaauaagccac

SEQ ID NO: 1004548 - RNA, 19 nt, Artificial Sequence
  Description of Artificial Sequence: Synthetic oligonucleotide
  Sense strand starting at position 709 of SEQ ID NO: 914446
uggcuuauuucugucucau

SEQ ID NO: 1004549 - RNA, 19 nt, Artificial Sequence
  Description of Artificial Sequence: Synthetic oligonucleotide
  Antisense strand to SEQ ID NO: 1004548
augagacagaaauaagcca

SEQ ID NO: 1004550 - RNA, 19 nt, Artificial Sequence
  Description of Artificial Sequence: Synthetic oligonucleotide
  Sense strand starting at position 711 of SEQ ID NO: 914446
gcuuauuucugucucauga

SEQ ID NO: 1004551 - RNA, 19 nt, Artificial Sequence
  Description of Artificial Sequence: Synthetic oligonucleotide
  Antisense strand to SEQ ID NO: 1004550
ucaugagacagaaauaagc

SEQ ID NO: 1004552 - RNA, 19 nt, Artificial Sequence
  Description of Artificial Sequence: Synthetic oligonucleotide
  Sense strand starting at position 757 of SEQ ID NO: 914446
augugauuccacugucauc

SEQ ID NO: 1004553 - RNA, 19 nt, Artificial Sequence
  Description of Artificial Sequence: Synthetic oligonucleotide
  Antisense strand to SEQ ID NO: 1004552
gaugacaguggaaucacau

SEQ ID NO: 1004554 - RNA, 19 nt, Artificial Sequence
  Description of Artificial Sequence: Synthetic oligonucleotide
  Sense strand starting at position 868 of SEQ ID NO: 914446
cggaaaugcuuucuuugga

SEQ ID NO: 1004555 - RNA, 19 nt, Artificial Sequence
  Description of Artificial Sequence: Synthetic oligonucleotide
  Antisense strand to SEQ ID NO: 1004554
uccaaagaaagcauuuccg

SEQ ID NO: 1004556 - RNA, 19 nt, Artificial Sequence
  Description of Artificial Sequence: Synthetic oligonucleotide
  Sense strand starting at position 869 of SEQ ID NO: 914446
ggaaaugcuuucuuuggau

SEQ ID NO: 1004557 - RNA, 19 nt, Artificial Sequence
  Description of Artificial Sequence: Synthetic oligonucleotide
  Antisense strand to SEQ ID NO: 1004556
auccaaagaaagcauuucc

SEQ ID NO: 1004558 - RNA, 19 nt, Artificial Sequence
  Description of Artificial Sequence: Synthetic oligonucleotide
  Sense strand starting at position 873 of SEQ ID NO: 914446
augcuuucuuuggaugaaa

SEQ ID NO: 1004559 - RNA, 19 nt, Artificial Sequence
  Description of Artificial Sequence: Synthetic oligonucleotide
  Antisense strand to SEQ ID NO: 1004558
uuucauccaaagaaagcau

SEQ ID NO: 1004560 - RNA, 19 nt, Artificial Sequence
  Description of Artificial Sequence: Synthetic oligonucleotide
  Sense strand starting at position 942 of SEQ ID NO: 914446
cugggaggcuucgugugaa

SEQ ID NO: 1004561 - RNA, 19 nt, Artificial Sequence
  Description of Artificial Sequence: Synthetic oligonucleotide
  Antisense strand to SEQ ID NO: 1004560
uucacacgaagccucccag

SEQ ID NO: 1004562 - RNA, 19 nt, Artificial Sequence
  Description of Artificial Sequence: Synthetic oligonucleotide
  Sense strand starting at position 943 of SEQ ID NO: 914446
ugggaggcuucgugugaau

SEQ ID NO: 1004563 - RNA, 19 nt, Artificial Sequence
  Description of Artificial Sequence: Synthetic oligonucleotide
  Antisense strand to SEQ ID NO: 1004562
auucacacgaagccuccca

SEQ ID NO: 1004564 - RNA, 19 nt, Artificial Sequence
  Description of Artificial Sequence: Synthetic oligonucleotide
  Sense strand starting at position 946 of SEQ ID NO: 914446
gaggcuucgugugaaugga

SEQ ID NO: 1004565 - RNA, 19 nt, Artificial Sequence
  Description of Artificial Sequence: Synthetic oligonucleotide
  Antisense strand to SEQ ID NO: 1004564
uccauucacacgaagccuc

SEQ ID NO: 1004566 - RNA, 19 nt, Artificial Sequence
  Description of Artificial Sequence: Synthetic oligonucleotide
  Sense strand starting at position 1055 of SEQ ID NO: 914446
ugaggucucuuuggaccuu

SEQ ID NO: 1004567 - RNA, 19 nt, Artificial Sequence
  Description of Artificial Sequence: Synthetic oligonucleotide
  Antisense strand to SEQ ID NO: 1004566
aagguccaaagagaccuca

SEQ ID NO: 1004568 - RNA, 19 nt, Artificial Sequence
  Description of Artificial Sequence: Synthetic oligonucleotide
  Sense strand starting at position 1125 of SEQ ID NO: 914446
cgaagagaaucucuugguu

SEQ ID NO: 1004569 - RNA, 19 nt, Artificial Sequence
  Description of Artificial Sequence: Synthetic oligonucleotide
  Antisense strand to SEQ ID NO: 1004568
aaccaagagauucucuucg

SEQ ID NO: 1004570 - RNA, 19 nt, Artificial Sequence
  Description of Artificial Sequence: Synthetic oligonucleotide
  Sense strand starting at position 1127 of SEQ ID NO: 914446
aagagaaucucuugguugu

SEQ ID NO: 1004571 - RNA, 19 nt, Artificial Sequence
  Description of Artificial Sequence: Synthetic oligonucleotide
  Antisense strand to SEQ ID NO: 1004570
acaaccaagagauucucuu

SEQ ID NO: 1004572 - RNA, 19 nt, Artificial Sequence
  Description of Artificial Sequence: Synthetic oligonucleotide
  Sense strand starting at position 1128 of SEQ ID NO: 914446
agagaaucucuugguuguu

SEQ ID NO: 1004573 - RNA, 19 nt, Artificial Sequence
  Description of Artificial Sequence: Synthetic oligonucleotide
  Antisense strand to SEQ ID NO: 1004572
aacaaccaagagauucucu

SEQ ID NO: 1004574 - RNA, 19 nt, Artificial Sequence
  Description of Artificial Sequence: Synthetic oligonucleotide
  Sense strand starting at position 1134 of SEQ ID NO: 914446
ucucuugguuguugggaga

SEQ ID NO: 1004575 - RNA, 19 nt, Artificial Sequence
  Description of Artificial Sequence: Synthetic oligonucleotide
  Antisense strand to SEQ ID NO: 1004574
ucucccaacaaccaagaga

SEQ ID NO: 1004576 - RNA, 19 nt, Artificial Sequence
  Description of Artificial Sequence: Synthetic oligonucleotide
  Sense strand starting at position 1276 of SEQ ID NO: 914446
gaaugaaugucacagggca

SEQ ID NO: 1004577 - RNA, 19 nt, Artificial Sequence
  Description of Artificial Sequence: Synthetic oligonucleotide
  Antisense strand to SEQ ID NO: 1004576
ugcccugugacauucauuc

SEQ ID NO: 1004578 - RNA, 19 nt, Artificial Sequence
  Description of Artificial Sequence: Synthetic oligonucleotide
  Sense strand starting at position 2012 of SEQ ID NO: 914446
agcggcgccgcuuuauaua

SEQ ID NO: 1004579 - RNA, 19 nt, Artificial Sequence
  Description of Artificial Sequence: Synthetic oligonucleotide
  Antisense strand to SEQ ID NO: 1004578
uauauaaagcggcgccgcu

SEQ ID NO: 1004580 - RNA, 19 nt, Artificial Sequence
  Description of Artificial Sequence: Synthetic oligonucleotide
  Sense strand starting at position 2015 of SEQ ID NO: 914446
ggcgccgcuuuauauagaa

SEQ ID NO: 1004581 - RNA, 19 nt, Artificial Sequence
  Description of Artificial Sequence: Synthetic oligonucleotide
  Antisense strand to SEQ ID NO: 1004580
uucuauauaaagcggcgcc

SEQ ID NO: 1004582 - RNA, 19 nt, Artificial Sequence
  Description of Artificial Sequence: Synthetic oligonucleotide
  Sense strand starting at position 2515 of SEQ ID NO: 914446
agcgcuuugcccuauugca

SEQ ID NO: 1004583 - RNA, 19 nt, Artificial Sequence
  Description of Artificial Sequence: Synthetic oligonucleotide
  Antisense strand to SEQ ID NO: 1004582
ugcaauagggcaaagcgcu

SEQ ID NO: 1004584 - RNA, 19 nt, Artificial Sequence
  Description of Artificial Sequence: Synthetic oligonucleotide
  Sense strand starting at position 2659 of SEQ ID NO: 914446
ugcgguggcugccuauaau

SEQ ID NO: 1004585 - RNA, 19 nt, Artificial Sequence
  Description of Artificial Sequence: Synthetic oligonucleotide
  Antisense strand to SEQ ID NO: 1004584
auuauaggcagccaccgca

SEQ ID NO: 1004586 - RNA, 19 nt, Artificial Sequence
  Description of Artificial Sequence: Synthetic oligonucleotide
  Sense strand starting at position 2873 of SEQ ID NO: 914446
ugcagugaguccugguugu

SEQ ID NO: 1004587 - RNA, 19 nt, Artificial Sequence
  Description of Artificial Sequence: Synthetic oligonucleotide
  Antisense strand to SEQ ID NO: 1004586
acaaccaggacucacugca

SEQ ID NO: 1004588 - RNA, 19 nt, Artificial Sequence
  Description of Artificial Sequence: Synthetic oligonucleotide
  Sense strand starting at position 3213 of SEQ ID NO: 914446
cucccaauguccugagaau

SEQ ID NO: 1004589 - RNA, 19 nt, Artificial Sequence
  Description of Artificial Sequence: Synthetic oligonucleotide
  Antisense strand to SEQ ID NO: 1004588
auucucaggacauugggag

SEQ ID NO: 1004590 - RNA, 19 nt, Artificial Sequence
  Description of Artificial Sequence: Synthetic oligonucleotide
  Sense strand starting at position 3913 of SEQ ID NO: 914446
agaaaucugcucugcuuau

SEQ ID NO: 1004591 - RNA, 19 nt, Artificial Sequence
  Description of Artificial Sequence: Synthetic oligonucleotide
  Antisense strand to SEQ ID NO: 1004590
auaagcagagcagauuucu

SEQ ID NO: 1004592 - RNA, 19 nt, Artificial Sequence
  Description of Artificial Sequence: Synthetic oligonucleotide
  Sense strand starting at position 3960 of SEQ ID NO: 914446
cggaguugaagcuauaauc

SEQ ID NO: 1004593 - RNA, 19 nt, Artificial Sequence
  Description of Artificial Sequence: Synthetic oligonucleotide
  Antisense strand to SEQ ID NO: 1004592
gauuauagcuucaacuccg

SEQ ID NO: 1004594 - RNA, 19 nt, Artificial Sequence
  Description of Artificial Sequence: Synthetic oligonucleotide
  Sense strand starting at position 9 of SEQ ID NO: 914447
cuguucucaucuuugagag

SEQ ID NO: 1004595 - RNA, 19 nt, Artificial Sequence
  Description of Artificial Sequence: Synthetic oligonucleotide
  Antisense strand to SEQ ID NO: 1004594
cucucaaagaugagaacag

SEQ ID NO: 1004596 - RNA, 19 nt, Artificial Sequence
  Description of Artificial Sequence: Synthetic oligonucleotide
  Sense strand starting at position 10 of SEQ ID NO: 914447
uguucucaucuuugagagu

SEQ ID NO: 1004597 - RNA, 19 nt, Artificial Sequence
  Description of Artificial Sequence: Synthetic oligonucleotide
  Antisense strand to SEQ ID NO: 1004596
acucucaaagaugagaaca

SEQ ID NO: 1004598 - RNA, 19 nt, Artificial Sequence
  Description of Artificial Sequence: Synthetic oligonucleotide
  Sense strand starting at position 265 of SEQ ID NO: 914447
acuaauacgucauuuacgu

SEQ ID NO: 1004599 - RNA, 19 nt, Artificial Sequence
  Description of Artificial Sequence: Synthetic oligonucleotide
  Antisense strand to SEQ ID NO: 1004598
acguaaaugacguauuagu

SEQ ID NO: 1004600 - RNA, 19 nt, Artificial Sequence
  Description of Artificial Sequence: Synthetic oligonucleotide
  Sense strand starting at position 427 of SEQ ID NO: 914447
ggagccauuacgcaugguu

SEQ ID NO: 1004601 - RNA, 19 nt, Artificial Sequence
  Description of Artificial Sequence: Synthetic oligonucleotide
  Antisense strand to SEQ ID NO: 1004600
aaccaugcguaauggcucc

SEQ ID NO: 1004602 - RNA, 19 nt, Artificial Sequence
  Description of Artificial Sequence: Synthetic oligonucleotide
  Sense strand starting at position 506 of SEQ ID NO: 914447
ggcuguuaacuaugaugcu

SEQ ID NO: 1004603 - RNA, 19 nt, Artificial Sequence
  Description of Artificial Sequence: Synthetic oligonucleotide
  Antisense strand to SEQ ID NO: 1004602
agcaucauaguuaacagcc

SEQ ID NO: 1004604 - RNA, 19 nt, Artificial Sequence
  Description of Artificial Sequence: Synthetic oligonucleotide
  Sense strand starting at position 530 of SEQ ID NO: 914447
acaggaaucugggugacuu

SEQ ID NO: 1004605 - RNA, 19 nt, Artificial Sequence
  Description of Artificial Sequence: Synthetic oligonucleotide
  Antisense strand to SEQ ID NO: 1004604
aagucacccagauuccugu

SEQ ID NO: 1004606 - RNA, 19 nt, Artificial Sequence
  Description of Artificial Sequence: Synthetic oligonucleotide
  Sense strand starting at position 531 of SEQ ID NO: 914447
caggaaucugggugacuuc

SEQ ID NO: 1004607 - RNA, 19 nt, Artificial Sequence
  Description of Artificial Sequence: Synthetic oligonucleotide
  Antisense strand to SEQ ID NO: 1004606
gaagucacccagauuccug

SEQ ID NO: 1004608 - RNA, 19 nt, Artificial Sequence
  Description of Artificial Sequence: Synthetic oligonucleotide
  Sense strand starting at position 534 of SEQ ID NO: 914447
gaaucugggugacuucuga

SEQ ID NO: 1004609 - RNA, 19 nt, Artificial Sequence
  Description of Artificial Sequence: Synthetic oligonucleotide
  Antisense strand to SEQ ID NO: 1004608
ucagaagucacccagauuc

SEQ ID NO: 1004610 - RNA, 19 nt, Artificial Sequence
  Description of Artificial Sequence: Synthetic oligonucleotide
  Sense strand starting at position 699 of SEQ ID NO: 914447
gauuacucggguugucaua

SEQ ID NO: 1004611 - RNA, 19 nt, Artificial Sequence
  Description of Artificial Sequence: Synthetic oligonucleotide
  Antisense strand to SEQ ID NO: 1004610
uaugacaacccgaguaauc

SEQ ID NO: 1004612 - RNA, 19 nt, Artificial Sequence
  Description of Artificial Sequence: Synthetic oligonucleotide
  Sense strand starting at position 772 of SEQ ID NO: 914447
uaaggaaaucuugguacga

SEQ ID NO: 1004613 - RNA, 19 nt, Artificial Sequence
  Description of Artificial Sequence: Synthetic oligonucleotide
  Antisense strand to SEQ ID NO: 1004612
ucguaccaagauuuccuua

SEQ ID NO: 1004614 - RNA, 19 nt, Artificial Sequence
  Description of Artificial Sequence: Synthetic oligonucleotide
  Sense strand starting at position 773 of SEQ ID NO: 914447
aaggaaaucuugguacgau

SEQ ID NO: 1004615 - RNA, 19 nt, Artificial Sequence
  Description of Artificial Sequence: Synthetic oligonucleotide
  Antisense strand to SEQ ID NO: 1004614
aucguaccaagauuuccuu

SEQ ID NO: 1004616 - RNA, 19 nt, Artificial Sequence
  Description of Artificial Sequence: Synthetic oligonucleotide
  Sense strand starting at position 776 of SEQ ID NO: 914447
gaaaucuugguacgaucua

SEQ ID NO: 1004617 - RNA, 19 nt, Artificial Sequence
  Description of Artificial Sequence: Synthetic oligonucleotide
  Antisense strand to SEQ ID NO: 1004616
uagaucguaccaagauuuc

SEQ ID NO: 1004618 - RNA, 19 nt, Artificial Sequence
  Description of Artificial Sequence: Synthetic oligonucleotide
  Sense strand starting at position 875 of SEQ ID NO: 914447
ugagaauguuuccuuugga

SEQ ID NO: 1004619 - RNA, 19 nt, Artificial Sequence
  Description of Artificial Sequence: Synthetic oligonucleotide
  Antisense strand to SEQ ID NO: 1004618
uccaaaggaaacauucuca

SEQ ID NO: 1004620 - RNA, 19 nt, Artificial Sequence
  Description of Artificial Sequence: Synthetic oligonucleotide
  Sense strand starting at position 876 of SEQ ID NO: 914447
gagaauguuuccuuuggaa

SEQ ID NO: 1004621 - RNA, 19 nt, Artificial Sequence
  Description of Artificial Sequence: Synthetic oligonucleotide
  Antisense strand to SEQ ID NO: 1004620
uuccaaaggaaacauucuc

SEQ ID NO: 1004622 - RNA, 19 nt, Artificial Sequence
  Description of Artificial Sequence: Synthetic oligonucleotide
  Sense strand starting at position 878 of SEQ ID NO: 914447
gaauguuuccuuuggaaag

SEQ ID NO: 1004623 - RNA, 19 nt, Artificial Sequence
  Description of Artificial Sequence: Synthetic oligonucleotide
  Antisense strand to SEQ ID NO: 1004622
cuuuccaaaggaaacauuc

SEQ ID NO: 1004624 - RNA, 19 nt, Artificial Sequence
  Description of Artificial Sequence: Synthetic oligonucleotide
  Sense strand starting at position 911 of SEQ ID NO: 914447
uuaggaaucugggcuuucu

SEQ ID NO: 1004625 - RNA, 19 nt, Artificial Sequence
  Description of Artificial Sequence: Synthetic oligonucleotide
  Antisense strand to SEQ ID NO: 1004624
agaaagcccagauuccuaa

SEQ ID NO: 1004626 - RNA, 19 nt, Artificial Sequence
  Description of Artificial Sequence: Synthetic oligonucleotide
  Sense strand starting at position 1091 of SEQ ID NO: 914447
gcaguaaugcucugacaau

SEQ ID NO: 1004627 - RNA, 19 nt, Artificial Sequence
  Description of Artificial Sequence: Synthetic oligonucleotide
  Antisense strand to SEQ ID NO: 1004626
auugucagagcauuacugc

SEQ ID NO: 1004628 - RNA, 19 nt, Artificial Sequence
  Description of Artificial Sequence: Synthetic oligonucleotide
  Sense strand starting at position 1141 of SEQ ID NO: 914447
gaugaaagccuucguaaag

SEQ ID NO: 1004629 - RNA, 19 nt, Artificial Sequence
  Description of Artificial Sequence: Synthetic oligonucleotide
  Antisense strand to SEQ ID NO: 1004628
cuuuacgaaggcuuucauc

SEQ ID NO: 1004630 - RNA, 19 nt, Artificial Sequence
  Description of Artificial Sequence: Synthetic oligonucleotide
  Sense strand starting at position 1362 of SEQ ID NO: 914447
gggaaaggcuguuugaugu

SEQ ID NO: 1004631 - RNA, 19 nt, Artificial Sequence
  Description of Artificial Sequence: Synthetic oligonucleotide
  Antisense strand to SEQ ID NO: 1004630
acaucaaacagccuuuccc

SEQ ID NO: 1004632 - RNA, 19 nt, Artificial Sequence
  Description of Artificial Sequence: Synthetic oligonucleotide
  Sense strand starting at position 2204 of SEQ ID NO: 914447
uguaauagguguuuaaguc

SEQ ID NO: 1004633 - RNA, 19 nt, Artificial Sequence
  Description of Artificial Sequence: Synthetic oligonucleotide
  Antisense strand to SEQ ID NO: 1004632
gacuuaaacaccuauuaca

SEQ ID NO: 1004634 - RNA, 19 nt, Artificial Sequence
  Description of Artificial Sequence: Synthetic oligonucleotide
  Sense strand starting at position 2205 of SEQ ID NO: 914447
guaauagguguuuaaguca

SEQ ID NO: 1004635 - RNA, 19 nt, Artificial Sequence
  Description of Artificial Sequence: Synthetic oligonucleotide
  Antisense strand to SEQ ID NO: 1004634
ugacuuaaacaccuauuac

SEQ ID NO: 1004636 - RNA, 19 nt, Artificial Sequence
  Description of Artificial Sequence: Synthetic oligonucleotide
  Sense strand starting at position 2208 of SEQ ID NO: 914447
auagguguuuaagucauga

SEQ ID NO: 1004637 - RNA, 19 nt, Artificial Sequence
  Description of Artificial Sequence: Synthetic oligonucleotide
  Antisense strand to SEQ ID NO: 1004636
ucaugacuuaaacaccuau

SEQ ID NO: 1004638 - RNA, 19 nt, Artificial Sequence
  Description of Artificial Sequence: Synthetic oligonucleotide
  Sense strand starting at position 2210 of SEQ ID NO: 914447
agguguuuaagucaugauu

SEQ ID NO: 1004639 - RNA, 19 nt, Artificial Sequence
  Description of Artificial Sequence: Synthetic oligonucleotide
  Antisense strand to SEQ ID NO: 1004638
aaucaugacuuaaacaccu

SEQ ID NO: 1004640 - RNA, 19 nt, Artificial Sequence
  Description of Artificial Sequence: Synthetic oligonucleotide
  Sense strand starting at position 2606 of SEQ ID NO: 914447
auuauuagccaggauuagu

SEQ ID NO: 1004641 - RNA, 19 nt, Artificial Sequence
  Description of Artificial Sequence: Synthetic oligonucleotide
  Antisense strand to SEQ ID NO: 1004640
acuaauccuggcuaauaau

SEQ ID NO: 1004642 - RNA, 19 nt, Artificial Sequence
  Description of Artificial Sequence: Synthetic oligonucleotide
  Sense strand starting at position 3189 of SEQ ID NO: 914447
gaagaaagaguuuguuuac

SEQ ID NO: 1004643 - RNA, 19 nt, Artificial Sequence
  Description of Artificial Sequence: Synthetic oligonucleotide
  Antisense strand to SEQ ID NO: 1004642
guaaacaaacucuuucuuc

SEQ ID NO: 1004644 - RNA, 19 nt, Artificial Sequence
  Description of Artificial Sequence: Synthetic oligonucleotide
  Sense strand starting at position 3190 of SEQ ID NO: 914447
aagaaagaguuuguuuaca

SEQ ID NO: 1004645 - RNA, 19 nt, Artificial Sequence
  Description of Artificial Sequence: Synthetic oligonucleotide
  Antisense strand to SEQ ID NO: 1004644
uguaaacaaacucuuucuu

SEQ ID NO: 1004646 - RNA, 19 nt, Artificial Sequence
  Description of Artificial Sequence: Synthetic oligonucleotide
  Sense strand starting at position 3192 of SEQ ID NO: 914447
gaaagaguuuguuuacauu

SEQ ID NO: 1004647 - RNA, 19 nt, Artificial Sequence
  Description of Artificial Sequence: Synthetic oligonucleotide
  Antisense strand to SEQ ID NO: 1004646
aauguaaacaaacucuuuc

SEQ ID NO: 1004648 - RNA, 19 nt, Artificial Sequence
  Description of Artificial Sequence: Synthetic oligonucleotide
  Sense strand starting at position 3225 of SEQ ID NO: 914447
guagcaugugcuguaacuu

SEQ ID NO: 1004649 - RNA, 19 nt, Artificial Sequence
  Description of Artificial Sequence: Synthetic oligonucleotide
  Antisense strand to SEQ ID NO: 1004648
aaguuacagcacaugcuac

SEQ ID NO: 1004650 - RNA, 19 nt, Artificial Sequence
  Description of Artificial Sequence: Synthetic oligonucleotide
  Sense strand starting at position 3234 of SEQ ID NO: 914447
gcuguaacuugcccaggau

SEQ ID NO: 1004651 - RNA, 19 nt, Artificial Sequence
  Description of Artificial Sequence: Synthetic oligonucleotide
  Antisense strand to SEQ ID NO: 1004650
auccugggcaaguuacagc

SEQ ID NO: 1004652 - RNA, 19 nt, Artificial Sequence
  Description of Artificial Sequence: Synthetic oligonucleotide
  Sense strand starting at position 3292 of SEQ ID NO: 914447
ggaccaaguccaggacuua

SEQ ID NO: 1004653 - RNA, 19 nt, Artificial Sequence
  Description of Artificial Sequence: Synthetic oligonucleotide
  Antisense strand to SEQ ID NO: 1004652
uaaguccuggacuuggucc

SEQ ID NO: 1004654 - RNA, 19 nt, Artificial Sequence
  Description of Artificial Sequence: Synthetic oligonucleotide
  Sense strand starting at position 3353 of SEQ ID NO: 914447
gccuguuucucacucauca

SEQ ID NO: 1004655 - RNA, 19 nt, Artificial Sequence
  Description of Artificial Sequence: Synthetic oligonucleotide
  Antisense strand to SEQ ID NO: 1004654
ugaugagugagaaacaggc

SEQ ID NO: 1004656 - RNA, 19 nt, Artificial Sequence
  Description of Artificial Sequence: Synthetic oligonucleotide
  Sense strand starting at position 3408 of SEQ ID NO: 914447
acaugccuuccugggagaa

SEQ ID NO: 1004657 - RNA, 19 nt, Artificial Sequence
  Description of Artificial Sequence: Synthetic oligonucleotide
  Antisense strand to SEQ ID NO: 1004656
uucucccaggaaggcaugu

SEQ ID NO: 1004658 - RNA, 19 nt, Artificial Sequence
  Description of Artificial Sequence: Synthetic oligonucleotide
  Sense strand starting at position 3452 of SEQ ID NO: 914447
agaagccucuuagagauaa

SEQ ID NO: 1004659 - RNA, 19 nt, Artificial Sequence
  Description of Artificial Sequence: Synthetic oligonucleotide
  Antisense strand to SEQ ID NO: 1004658
uuaucucuaagaggcuucu

SEQ ID NO: 1004660 - RNA, 19 nt, Artificial Sequence
  Description of Artificial Sequence: Synthetic oligonucleotide
  Sense strand starting at position 3468 of SEQ ID NO: 914447
uaaacauucggcuaaggcu

SEQ ID NO: 1004661 - RNA, 19 nt, Artificial Sequence
  Description of Artificial Sequence: Synthetic oligonucleotide
  Antisense strand to SEQ ID NO: 1004660
agccuuagccgaauguuua

SEQ ID NO: 1004662 - RNA, 19 nt, Artificial Sequence
  Description of Artificial Sequence: Synthetic oligonucleotide
  Sense strand starting at position 3542 of SEQ ID NO: 914447
gccagaguuuggcuguaag

SEQ ID NO: 1004663 - RNA, 19 nt, Artificial Sequence
  Description of Artificial Sequence: Synthetic oligonucleotide
  Antisense strand to SEQ ID NO: 1004662
cuuacagccaaacucuggc

SEQ ID NO: 1004664 - RNA, 19 nt, Artificial Sequence
  Description of Artificial Sequence: Synthetic oligonucleotide
  Sense strand starting at position 3566 of SEQ ID NO: 914447
gggugaguuuaacuucucu

SEQ ID NO: 1004665 - RNA, 19 nt, Artificial Sequence
  Description of Artificial Sequence: Synthetic oligonucleotide
  Antisense strand to SEQ ID NO: 1004664
agagaaguuaaacucaccc

SEQ ID NO: 1004666 - RNA, 19 nt, Artificial Sequence
  Description of Artificial Sequence: Synthetic oligonucleotide
  Sense strand starting at position 3570 of SEQ ID NO: 914447
gaguuuaacuucucugagc

SEQ ID NO: 1004667 - RNA, 19 nt, Artificial Sequence
  Description of Artificial Sequence: Synthetic oligonucleotide
  Antisense strand to SEQ ID NO: 1004666
gcucagagaaguuaaacuc

SEQ ID NO: 1004668 - RNA, 19 nt, Artificial Sequence
  Description of Artificial Sequence: Synthetic oligonucleotide
  Sense strand starting at position 3571 of SEQ ID NO: 914447
aguuuaacuucucugagcu

SEQ ID NO: 1004669 - RNA, 19 nt, Artificial Sequence
  Description of Artificial Sequence: Synthetic oligonucleotide
  Antisense strand to SEQ ID NO: 1004668
agcucagagaaguuaaacu

SEQ ID NO: 1004670 - RNA, 19 nt, Artificial Sequence
  Description of Artificial Sequence: Synthetic oligonucleotide
  Sense strand starting at position 3801 of SEQ ID NO: 914447
ccgagcugugucuaagagu

SEQ ID NO: 1004671 - RNA, 19 nt, Artificial Sequence
  Description of Artificial Sequence: Synthetic oligonucleotide
  Antisense strand to SEQ ID NO: 1004670
acucuuagacacagcucgg

SEQ ID NO: 1004672 - RNA, 19 nt, Artificial Sequence
  Description of Artificial Sequence: Synthetic oligonucleotide
  Sense strand starting at position 3923 of SEQ ID NO: 914447
guuguaguucuuugggaca

SEQ ID NO: 1004673 - RNA, 19 nt, Artificial Sequence
  Description of Artificial Sequence: Synthetic oligonucleotide
  Antisense strand to SEQ ID NO: 1004672
ugucccaaagaacuacaac

SEQ ID NO: 1004674 - RNA, 19 nt, Artificial Sequence
  Description of Artificial Sequence: Synthetic oligonucleotide
  Sense strand starting at position 190 of SEQ ID NO: 914448
acagaaacaucugcaaugu

SEQ ID NO: 1004675 - RNA, 19 nt, Artificial Sequence
  Description of Artificial Sequence: Synthetic oligonucleotide
  Antisense strand to SEQ ID NO: 1004674
acauugcagauguuucugu

SEQ ID NO: 1004676 - RNA, 19 nt, Artificial Sequence
  Description of Artificial Sequence: Synthetic oligonucleotide
  Sense strand starting at position 356 of SEQ ID NO: 914448
gguccaaguggucaugaga

SEQ ID NO: 1004677 - RNA, 19 nt, Artificial Sequence
  Description of Artificial Sequence: Synthetic oligonucleotide
  Antisense strand to SEQ ID NO: 1004676
ucucaugaccacuuggacc

SEQ ID NO: 1004678 - RNA, 19 nt, Artificial Sequence
  Description of Artificial Sequence: Synthetic oligonucleotide
  Sense strand starting at position 479 of SEQ ID NO: 914448
aggugaucuuacucaaaga

SEQ ID NO: 1004679 - RNA, 19 nt, Artificial Sequence
  Description of Artificial Sequence: Synthetic oligonucleotide
  Antisense strand to SEQ ID NO: 1004678
ucuuugaguaagaucaccu

SEQ ID NO: 1004680 - RNA, 19 nt, Artificial Sequence
  Description of Artificial Sequence: Synthetic oligonucleotide
  Sense strand starting at position 684 of SEQ ID NO: 914448
cuacauaagugccuacaga

SEQ ID NO: 1004681 - RNA, 19 nt, Artificial Sequence
  Description of Artificial Sequence: Synthetic oligonucleotide
  Antisense strand to SEQ ID NO: 1004680
ucuguaggcacuuauguag

SEQ ID NO: 1004682 - RNA, 19 nt, Artificial Sequence
  Description of Artificial Sequence: Synthetic oligonucleotide
  Sense strand starting at position 1016 of SEQ ID NO: 914448
cuaggugaacuugagugua

SEQ ID NO: 1004683 - RNA, 19 nt, Artificial Sequence
  Description of Artificial Sequence: Synthetic oligonucleotide
  Antisense strand to SEQ ID NO: 1004682
uacacucaaguucaccuag

SEQ ID NO: 1004684 - RNA, 19 nt, Artificial Sequence
  Description of Artificial Sequence: Synthetic oligonucleotide
  Sense strand starting at position 1021 of SEQ ID NO: 914448
ugaacuugaguguaaguca

SEQ ID NO: 1004685 - RNA, 19 nt, Artificial Sequence
  Description of Artificial Sequence: Synthetic oligonucleotide
  Antisense strand to SEQ ID NO: 1004684
ugacuuacacucaaguuca

SEQ ID NO: 1004686 - RNA, 19 nt, Artificial Sequence
  Description of Artificial Sequence: Synthetic oligonucleotide
  Sense strand starting at position 1318 of SEQ ID NO: 914448
cuguuuagagcacaaggau

SEQ ID NO: 1004687 - RNA, 19 nt, Artificial Sequence
  Description of Artificial Sequence: Synthetic oligonucleotide
  Antisense strand to SEQ ID NO: 1004686
auccuugugcucuaaacag

SEQ ID NO: 1004688 - RNA, 19 nt, Artificial Sequence
  Description of Artificial Sequence: Synthetic oligonucleotide
  Sense strand starting at position 1569 of SEQ ID NO: 914448
uaugucgcauguuuauuua

SEQ ID NO: 1004689 - RNA, 19 nt, Artificial Sequence
  Description of Artificial Sequence: Synthetic oligonucleotide
  Antisense strand to SEQ ID NO: 1004688
uaaauaaacaugcgacaua

SEQ ID NO: 1004690 - RNA, 19 nt, Artificial Sequence
  Description of Artificial Sequence: Synthetic oligonucleotide
  Sense strand starting at position 1572 of SEQ ID NO: 914448
gucgcauguuuauuuaacu

SEQ ID NO: 1004691 - RNA, 19 nt, Artificial Sequence
  Description of Artificial Sequence: Synthetic oligonucleotide
  Antisense strand to SEQ ID NO: 1004690
aguuaaauaaacaugcgac

SEQ ID NO: 1004692 - RNA, 19 nt, Artificial Sequence
  Description of Artificial Sequence: Synthetic oligonucleotide
  Sense strand starting at position 1778 of SEQ ID NO: 914448
uuucuaaagucugcaagaa

SEQ ID NO: 1004693 - RNA, 19 nt, Artificial Sequence
  Description of Artificial Sequence: Synthetic oligonucleotide
  Antisense strand to SEQ ID NO: 1004692
uucuugcagacuuuagaaa

SEQ ID NO: 1004694 - RNA, 19 nt, Artificial Sequence
  Description of Artificial Sequence: Synthetic oligonucleotide
  Sense strand starting at position 1779 of SEQ ID NO: 914448
uucuaaagucugcaagaau

SEQ ID NO: 1004695 - RNA, 19 nt, Artificial Sequence
  Description of Artificial Sequence: Synthetic oligonucleotide
  Antisense strand to SEQ ID NO: 1004694
auucuugcagacuuuagaa

SEQ ID NO: 1004696 - RNA, 19 nt, Artificial Sequence
  Description of Artificial Sequence: Synthetic oligonucleotide
  Sense strand starting at position 2027 of SEQ ID NO: 914448
uguacauguauugggaaau

SEQ ID NO: 1004697 - RNA, 19 nt, Artificial Sequence
  Description of Artificial Sequence: Synthetic oligonucleotide
  Antisense strand to SEQ ID NO: 1004696
auuucccaauacauguaca

SEQ ID NO: 1004698 - RNA, 19 nt, Artificial Sequence
  Description of Artificial Sequence: Synthetic oligonucleotide
  Sense strand starting at position 2039 of SEQ ID NO: 914448
gggaaauacucacugugca

SEQ ID NO: 1004699 - RNA, 19 nt, Artificial Sequence
  Description of Artificial Sequence: Synthetic oligonucleotide
  Antisense strand to SEQ ID NO: 1004698
ugcacagugaguauuuccc

SEQ ID NO: 1004700 - RNA, 19 nt, Artificial Sequence
  Description of Artificial Sequence: Synthetic oligonucleotide
  Sense strand starting at position 2119 of SEQ ID NO: 914448
uaguguauccaugggaaau

SEQ ID NO: 1004701 - RNA, 19 nt, Artificial Sequence
  Description of Artificial Sequence: Synthetic oligonucleotide
  Antisense strand to SEQ ID NO: 1004700
auuucccauggauacacua

SEQ ID NO: 1004702 - RNA, 19 nt, Artificial Sequence
  Description of Artificial Sequence: Synthetic oligonucleotide
  Sense strand starting at position 2120 of SEQ ID NO: 914448
aguguauccaugggaaauu

SEQ ID NO: 1004703 - RNA, 19 nt, Artificial Sequence
  Description of Artificial Sequence: Synthetic oligonucleotide
  Antisense strand to SEQ ID NO: 1004702
aauuucccauggauacacu

SEQ ID NO: 1004704 - RNA, 19 nt, Artificial Sequence
  Description of Artificial Sequence: Synthetic oligonucleotide
  Sense strand starting at position 2283 of SEQ ID NO: 914448
caaccuuuggaguauguga

SEQ ID NO: 1004705 - RNA, 19 nt, Artificial Sequence
  Description of Artificial Sequence: Synthetic oligonucleotide
  Antisense strand to SEQ ID NO: 1004704
ucacauacuccaaagguug

SEQ ID NO: 1004706 - RNA, 19 nt, Artificial Sequence
  Description of Artificial Sequence: Synthetic oligonucleotide
  Sense strand starting at position 2324 of SEQ ID NO: 914448
cucauagcucuugggaaag

SEQ ID NO: 1004707 - RNA, 19 nt, Artificial Sequence
  Description of Artificial Sequence: Synthetic oligonucleotide
  Antisense strand to SEQ ID NO: 1004706
cuuucccaagagcuaugag

SEQ ID NO: 1004708 - RNA, 19 nt, Artificial Sequence
  Description of Artificial Sequence: Synthetic oligonucleotide
  Sense strand starting at position 2336 of SEQ ID NO: 914448
gggaaaguuguggguaaug

SEQ ID NO: 1004709 - RNA, 19 nt, Artificial Sequence
  Description of Artificial Sequence: Synthetic oligonucleotide
  Antisense strand to SEQ ID NO: 1004708
cauuacccacaacuuuccc

SEQ ID NO: 1004710 - RNA, 19 nt, Artificial Sequence
  Description of Artificial Sequence: Synthetic oligonucleotide
  Sense strand starting at position 2338 of SEQ ID NO: 914448
gaaaguuguggguaaugua

SEQ ID NO: 1004711 - RNA, 19 nt, Artificial Sequence
  Description of Artificial Sequence: Synthetic oligonucleotide
  Antisense strand to SEQ ID NO: 1004710
uacauuacccacaacuuuc

SEQ ID NO: 1004712 - RNA, 19 nt, Artificial Sequence
  Description of Artificial Sequence: Synthetic oligonucleotide
  Sense strand starting at position 2484 of SEQ ID NO: 914448
gguaucauucugucgugca

SEQ ID NO: 1004713 - RNA, 19 nt, Artificial Sequence
  Description of Artificial Sequence: Synthetic oligonucleotide
  Antisense strand to SEQ ID NO: 1004712
ugcacgacagaaugauacc

SEQ ID NO: 1004714 - RNA, 19 nt, Artificial Sequence
  Description of Artificial Sequence: Synthetic oligonucleotide
  Sense strand starting at position 2515 of SEQ ID NO: 914448
guuauuugaccuuggcuca

SEQ ID NO: 1004715 - RNA, 19 nt, Artificial Sequence
  Description of Artificial Sequence: Synthetic oligonucleotide
  Antisense strand to SEQ ID NO: 1004714
ugagccaaggucaaauaac

SEQ ID NO: 1004716 - RNA, 19 nt, Artificial Sequence
  Description of Artificial Sequence: Synthetic oligonucleotide
  Sense strand starting at position 2776 of SEQ ID NO: 914448
gggaaauugcauuguagag

SEQ ID NO: 1004717 - RNA, 19 nt, Artificial Sequence
  Description of Artificial Sequence: Synthetic oligonucleotide
  Antisense strand to SEQ ID NO: 1004716
cucuacaaugcaauuuccc

SEQ ID NO: 1004718 - RNA, 19 nt, Artificial Sequence
  Description of Artificial Sequence: Synthetic oligonucleotide
  Sense strand starting at position 2800 of SEQ ID NO: 914448
gagcauaggcucuggaaug

SEQ ID NO: 1004719 - RNA, 19 nt, Artificial Sequence
  Description of Artificial Sequence: Synthetic oligonucleotide
  Antisense strand to SEQ ID NO: 1004718
cauuccagagccuaugcuc

SEQ ID NO: 1004720 - RNA, 19 nt, Artificial Sequence
  Description of Artificial Sequence: Synthetic oligonucleotide
  Sense strand starting at position 2805 of SEQ ID NO: 914448
uaggcucuggaaugagaau

SEQ ID NO: 1004721 - RNA, 19 nt, Artificial Sequence
  Description of Artificial Sequence: Synthetic oligonucleotide
  Antisense strand to SEQ ID NO: 1004720
auucucauuccagagccua

SEQ ID NO: 1004722 - RNA, 19 nt, Artificial Sequence
  Description of Artificial Sequence: Synthetic oligonucleotide
  Sense strand starting at position 2811 of SEQ ID NO: 914448
cuggaaugagaaugucgaa

SEQ ID NO: 1004723 - RNA, 19 nt, Artificial Sequence
  Description of Artificial Sequence: Synthetic oligonucleotide
  Antisense strand to SEQ ID NO: 1004722
uucgacauucucauuccag

SEQ ID NO: 1004724 - RNA, 19 nt, Artificial Sequence
  Description of Artificial Sequence: Synthetic oligonucleotide
  Sense strand starting at position 2935 of SEQ ID NO: 914448
uugagcauuaagugagaga

SEQ ID NO: 1004725 - RNA, 19 nt, Artificial Sequence
  Description of Artificial Sequence: Synthetic oligonucleotide
  Antisense strand to SEQ ID NO: 1004724
ucucucacuuaaugcucaa

SEQ ID NO: 1004726 - RNA, 19 nt, Artificial Sequence
  Description of Artificial Sequence: Synthetic oligonucleotide
  Sense strand starting at position 2971 of SEQ ID NO: 914448
ggaacauagccuggcaaau

SEQ ID NO: 1004727 - RNA, 19 nt, Artificial Sequence
  Description of Artificial Sequence: Synthetic oligonucleotide
  Antisense strand to SEQ ID NO: 1004726
auuugccaggcuauguucc

SEQ ID NO: 1004728 - RNA, 19 nt, Artificial Sequence
  Description of Artificial Sequence: Synthetic oligonucleotide
  Sense strand starting at position 2983 of SEQ ID NO: 914448
ggcaaaugguaagcaaaua

SEQ ID NO: 1004729 - RNA, 19 nt, Artificial Sequence
  Description of Artificial Sequence: Synthetic oligonucleotide
  Antisense strand to SEQ ID NO: 1004728
uauuugcuuaccauuugcc

SEQ ID NO: 1004730 - RNA, 19 nt, Artificial Sequence
  Description of Artificial Sequence: Synthetic oligonucleotide
  Sense strand starting at position 2994 of SEQ ID NO: 914448
agcaaauaaugagugauau

SEQ ID NO: 1004731 - RNA, 19 nt, Artificial Sequence
  Description of Artificial Sequence: Synthetic oligonucleotide
  Antisense strand to SEQ ID NO: 1004730
auaucacucauuauuugcu

SEQ ID NO: 1004732 - RNA, 19 nt, Artificial Sequence
  Description of Artificial Sequence: Synthetic oligonucleotide
  Sense strand starting at position 3068 of SEQ ID NO: 914448
gcagauuauuuagcuaagu

SEQ ID NO: 1004733 - RNA, 19 nt, Artificial Sequence
  Description of Artificial Sequence: Synthetic oligonucleotide
  Antisense strand to SEQ ID NO: 1004732
acuuagcuaaauaaucugc

SEQ ID NO: 1004734 - RNA, 19 nt, Artificial Sequence
  Description of Artificial Sequence: Synthetic oligonucleotide
  Sense strand starting at position 3137 of SEQ ID NO: 914448
aacauauacggacgacauu

SEQ ID NO: 1004735 - RNA, 19 nt, Artificial Sequence
  Description of Artificial Sequence: Synthetic oligonucleotide
  Antisense strand to SEQ ID NO: 1004734
aaugucguccguauauguu

SEQ ID NO: 1004736 - RNA, 19 nt, Artificial Sequence
  Description of Artificial Sequence: Synthetic oligonucleotide
  Sense strand starting at position 3322 of SEQ ID NO: 914448
ucuggugggauguaauuga

SEQ ID NO: 1004737 - RNA, 19 nt, Artificial Sequence
  Description of Artificial Sequence: Synthetic oligonucleotide
  Antisense strand to SEQ ID NO: 1004736
ucaauuacaucccaccaga

SEQ ID NO: 1004738 - RNA, 19 nt, Artificial Sequence
  Description of Artificial Sequence: Synthetic oligonucleotide
  Sense strand starting at position 3374 of SEQ ID NO: 914448
cuugauaaugaaugucuca

SEQ ID NO: 1004739 - RNA, 19 nt, Artificial Sequence
  Description of Artificial Sequence: Synthetic oligonucleotide
  Antisense strand to SEQ ID NO: 1004738
ugagacauucauuaucaag

SEQ ID NO: 1004740 - RNA, 19 nt, Artificial Sequence
  Description of Artificial Sequence: Synthetic oligonucleotide
  Sense strand starting at position 3377 of SEQ ID NO: 914448
gauaaugaaugucucauga

SEQ ID NO: 1004741 - RNA, 19 nt, Artificial Sequence
  Description of Artificial Sequence: Synthetic oligonucleotide
  Antisense strand to SEQ ID NO: 1004740
ucaugagacauucauuauc

SEQ ID NO: 1004742 - RNA, 19 nt, Artificial Sequence
  Description of Artificial Sequence: Synthetic oligonucleotide
  Sense strand starting at position 3415 of SEQ ID NO: 914448
agggaauuccucugcucau

SEQ ID NO: 1004743 - RNA, 19 nt, Artificial Sequence
  Description of Artificial Sequence: Synthetic oligonucleotide
  Antisense strand to SEQ ID NO: 1004742
augagcagaggaauucccu

SEQ ID NO: 1004744 - RNA, 19 nt, Artificial Sequence
  Description of Artificial Sequence: Synthetic oligonucleotide
  Sense strand starting at position 3416 of SEQ ID NO: 914448
gggaauuccucugcucaua

SEQ ID NO: 1004745 - RNA, 19 nt, Artificial Sequence
  Description of Artificial Sequence: Synthetic oligonucleotide
  Antisense strand to SEQ ID NO: 1004744
uaugagcagaggaauuccc

SEQ ID NO: 1004746 - RNA, 19 nt, Artificial Sequence
  Description of Artificial Sequence: Synthetic oligonucleotide
  Sense strand starting at position 3667 of SEQ ID NO: 914448
gauguuggaacuggguaaa

SEQ ID NO: 1004747 - RNA, 19 nt, Artificial Sequence
  Description of Artificial Sequence: Synthetic oligonucleotide
  Antisense strand to SEQ ID NO: 1004746
uuuacccaguuccaacauc

SEQ ID NO: 1004748 - RNA, 19 nt, Artificial Sequence
  Description of Artificial Sequence: Synthetic oligonucleotide
  Sense strand starting at position 3703 of SEQ ID NO: 914448
guucuuagggcuuagagaa

SEQ ID NO: 1004749 - RNA, 19 nt, Artificial Sequence
  Description of Artificial Sequence: Synthetic oligonucleotide
  Antisense strand to SEQ ID NO: 1004748
uucucuaagcccuaagaac

SEQ ID NO: 1004750 - RNA, 19 nt, Artificial Sequence
  Description of Artificial Sequence: Synthetic oligonucleotide
  Sense strand starting at position 3783 of SEQ ID NO: 914448
gcucaucucgaaugaagau

SEQ ID NO: 1004751 - RNA, 19 nt, Artificial Sequence
  Description of Artificial Sequence: Synthetic oligonucleotide
  Antisense strand to SEQ ID NO: 1004750
aucuucauucgagaugagc

SEQ ID NO: 1004752 - RNA, 19 nt, Artificial Sequence
  Description of Artificial Sequence: Synthetic oligonucleotide
  Sense strand starting at position 3807 of SEQ ID NO: 914448
cuuguugggaaguggaaua

SEQ ID NO: 1004753 - RNA, 19 nt, Artificial Sequence
  Description of Artificial Sequence: Synthetic oligonucleotide
  Antisense strand to SEQ ID NO: 1004752
uauuccacuucccaacaag

SEQ ID NO: 1004754 - RNA, 19 nt, Artificial Sequence
  Description of Artificial Sequence: Synthetic oligonucleotide
  Sense strand starting at position 304 of SEQ ID NO: 914449
uggagauugcaaugaguua

SEQ ID NO: 1004755 - RNA, 19 nt, Artificial Sequence
  Description of Artificial Sequence: Synthetic oligonucleotide
  Antisense strand to SEQ ID NO: 1004754
uaacucauugcaaucucca

SEQ ID NO: 1004756 - RNA, 19 nt, Artificial Sequence
  Description of Artificial Sequence: Synthetic oligonucleotide
  Sense strand starting at position 423 of SEQ ID NO: 914449
uccuaagaugggcauaguu

SEQ ID NO: 1004757 - RNA, 19 nt, Artificial Sequence
  Description of Artificial Sequence: Synthetic oligonucleotide
  Antisense strand to SEQ ID NO: 1004756
aacuaugcccaucuuagga

SEQ ID NO: 1004758 - RNA, 19 nt, Artificial Sequence
  Description of Artificial Sequence: Synthetic oligonucleotide
  Sense strand starting at position 425 of SEQ ID NO: 914449
cuaagaugggcauaguuua

SEQ ID NO: 1004759 - RNA, 19 nt, Artificial Sequence
  Description of Artificial Sequence: Synthetic oligonucleotide
  Antisense strand to SEQ ID NO: 1004758
uaaacuaugcccaucuuag

SEQ ID NO: 1004760 - RNA, 19 nt, Artificial Sequence
  Description of Artificial Sequence: Synthetic oligonucleotide
  Sense strand starting at position 563 of SEQ ID NO: 914449
uuuggaauuccacaggugu

SEQ ID NO: 1004761 - RNA, 19 nt, Artificial Sequence
  Description of Artificial Sequence: Synthetic oligonucleotide
  Antisense strand to SEQ ID NO: 1004760
acaccuguggaauuccaaa

SEQ ID NO: 1004762 - RNA, 19 nt, Artificial Sequence
  Description of Artificial Sequence: Synthetic oligonucleotide
  Sense strand starting at position 671 of SEQ ID NO: 914449
uccuauaagguguaucuca

SEQ ID NO: 1004763 - RNA, 19 nt, Artificial Sequence
  Description of Artificial Sequence: Synthetic oligonucleotide
  Antisense strand to SEQ ID NO: 1004762
ugagauacaccuuauagga

SEQ ID NO: 1004764 - RNA, 19 nt, Artificial Sequence
  Description of Artificial Sequence: Synthetic oligonucleotide
  Sense strand starting at position 742 of SEQ ID NO: 914449
aggucuugaucagcaacuu

SEQ ID NO: 1004765 - RNA, 19 nt, Artificial Sequence
  Description of Artificial Sequence: Synthetic oligonucleotide
  Antisense strand to SEQ ID NO: 1004764
aaguugcugaucaagaccu

SEQ ID NO: 1004766 - RNA, 19 nt, Artificial Sequence
  Description of Artificial Sequence: Synthetic oligonucleotide
  Sense strand starting at position 786 of SEQ ID NO: 914449
gaugguuucucaucuguga

SEQ ID NO: 1004767 - RNA, 19 nt, Artificial Sequence
  Description of Artificial Sequence: Synthetic oligonucleotide
  Antisense strand to SEQ ID NO: 1004766
ucacagaugagaaaccauc

SEQ ID NO: 1004768 - RNA, 19 nt, Artificial Sequence
  Description of Artificial Sequence: Synthetic oligonucleotide
  Sense strand starting at position 891 of SEQ ID NO: 914449
cuagaaagcuuaguaagca

SEQ ID NO: 1004769 - RNA, 19 nt, Artificial Sequence
  Description of Artificial Sequence: Synthetic oligonucleotide
  Antisense strand to SEQ ID NO: 1004768
ugcuuacuaagcuuucuag

SEQ ID NO: 1004770 - RNA, 19 nt, Artificial Sequence
  Description of Artificial Sequence: Synthetic oligonucleotide
  Sense strand starting at position 979 of SEQ ID NO: 914449
auaacaauuucucagguga

SEQ ID NO: 1004771 - RNA, 19 nt, Artificial Sequence
  Description of Artificial Sequence: Synthetic oligonucleotide
  Antisense strand to SEQ ID NO: 1004770
ucaccugagaaauuguuau

SEQ ID NO: 1004772 - RNA, 19 nt, Artificial Sequence
  Description of Artificial Sequence: Synthetic oligonucleotide
  Sense strand starting at position 1126 of SEQ ID NO: 914449
ugacucaguuuagucuuua

SEQ ID NO: 1004773 - RNA, 19 nt, Artificial Sequence
  Description of Artificial Sequence: Synthetic oligonucleotide
  Antisense strand to SEQ ID NO: 1004772
uaaagacuaaacugaguca

SEQ ID NO: 1004774 - RNA, 19 nt, Artificial Sequence
  Description of Artificial Sequence: Synthetic oligonucleotide
  Sense strand starting at position 1287 of SEQ ID NO: 914449
cucgguaugcgcagauuga

SEQ ID NO: 1004775 - RNA, 19 nt, Artificial Sequence
  Description of Artificial Sequence: Synthetic oligonucleotide
  Antisense strand to SEQ ID NO: 1004774
ucaaucugcgcauaccgag

SEQ ID NO: 1004776 - RNA, 19 nt, Artificial Sequence
  Description of Artificial Sequence: Synthetic oligonucleotide
  Sense strand starting at position 1297 of SEQ ID NO: 914449
gcagauugagcacacaugu

SEQ ID NO: 1004777 - RNA, 19 nt, Artificial Sequence
  Description of Artificial Sequence: Synthetic oligonucleotide
  Antisense strand to SEQ ID NO: 1004776
acaugugugcucaaucugc

SEQ ID NO: 1004778 - RNA, 19 nt, Artificial Sequence
  Description of Artificial Sequence: Synthetic oligonucleotide
  Sense strand starting at position 1504 of SEQ ID NO: 914449
aacagaaauccagguguuu

SEQ ID NO: 1004779 - RNA, 19 nt, Artificial Sequence
  Description of Artificial Sequence: Synthetic oligonucleotide
  Antisense strand to SEQ ID NO: 1004778
aaacaccuggauuucuguu

SEQ ID NO: 1004780 - RNA, 19 nt, Artificial Sequence
  Description of Artificial Sequence: Synthetic oligonucleotide
  Sense strand starting at position 1563 of SEQ ID NO: 914449
gaagacacuugguuugcau

SEQ ID NO: 1004781 - RNA, 19 nt, Artificial Sequence
  Description of Artificial Sequence: Synthetic oligonucleotide
  Antisense strand to SEQ ID NO: 1004780
augcaaaccaagugucuuc

SEQ ID NO: 1004782 - RNA, 19 nt, Artificial Sequence
  Description of Artificial Sequence: Synthetic oligonucleotide
  Sense strand starting at position 1819 of SEQ ID NO: 914449
uggaccagcuuguugauau

SEQ ID NO: 1004783 - RNA, 19 nt, Artificial Sequence
  Description of Artificial Sequence: Synthetic oligonucleotide
  Antisense strand to SEQ ID NO: 1004782
auaucaacaagcuggucca

SEQ ID NO: 1004784 - RNA, 19 nt, Artificial Sequence
  Description of Artificial Sequence: Synthetic oligonucleotide
  Sense strand starting at position 1829 of SEQ ID NO: 914449
uguugauauuacccugaau

SEQ ID NO: 1004785 - RNA, 19 nt, Artificial Sequence
  Description of Artificial Sequence: Synthetic oligonucleotide
  Antisense strand to SEQ ID NO: 1004784
auucaggguaauaucaaca

SEQ ID NO: 1004786 - RNA, 19 nt, Artificial Sequence
  Description of Artificial Sequence: Synthetic oligonucleotide
  Sense strand starting at position 1831 of SEQ ID NO: 914449
uugauauuacccugaaugg

SEQ ID NO: 1004787 - RNA, 19 nt, Artificial Sequence
  Description of Artificial Sequence: Synthetic oligonucleotide
  Antisense strand to SEQ ID NO: 1004786
ccauucaggguaauaucaa

SEQ ID NO: 1004788 - RNA, 19 nt, Artificial Sequence
  Description of Artificial Sequence: Synthetic oligonucleotide
  Sense strand starting at position 1901 of SEQ ID NO: 914449
ucugaucucguguauaacu

SEQ ID NO: 1004789 - RNA, 19 nt, Artificial Sequence
  Description of Artificial Sequence: Synthetic oligonucleotide
  Antisense strand to SEQ ID NO: 1004788
aguuauacacgagaucaga

SEQ ID NO: 1004790 - RNA, 19 nt, Artificial Sequence
  Description of Artificial Sequence: Synthetic oligonucleotide
  Sense strand starting at position 1994 of SEQ ID NO: 914449
uguacacuugcaugagaac

SEQ ID NO: 1004791 - RNA, 19 nt, Artificial Sequence
  Description of Artificial Sequence: Synthetic oligonucleotide
  Antisense strand to SEQ ID NO: 1004790
guucucaugcaaguguaca

SEQ ID NO: 1004792 - RNA, 19 nt, Artificial Sequence
  Description of Artificial Sequence: Synthetic oligonucleotide
  Sense strand starting at position 2099 of SEQ ID NO: 914449
ccucuaaauggucaggagu

SEQ ID NO: 1004793 - RNA, 19 nt, Artificial Sequence
  Description of Artificial Sequence: Synthetic oligonucleotide
  Antisense strand to SEQ ID NO: 1004792
acuccugaccauuuagagg

SEQ ID NO: 1004794 - RNA, 19 nt, Artificial Sequence
  Description of Artificial Sequence: Synthetic oligonucleotide
  Sense strand starting at position 2102 of SEQ ID NO: 914449
cuaaauggucaggagucuu

SEQ ID NO: 1004795 - RNA, 19 nt, Artificial Sequence
  Description of Artificial Sequence: Synthetic oligonucleotide
  Antisense strand to SEQ ID NO: 1004794
aagacuccugaccauuuag

SEQ ID NO: 1004796 - RNA, 19 nt, Artificial Sequence
  Description of Artificial Sequence: Synthetic oligonucleotide
  Sense strand starting at position 2273 of SEQ ID NO: 914449
uuuaaauugggauguuguu

SEQ ID NO: 1004797 - RNA, 19 nt, Artificial Sequence
  Description of Artificial Sequence: Synthetic oligonucleotide
  Antisense strand to SEQ ID NO: 1004796
aacaacaucccaauuuaaa

SEQ ID NO: 1004798 - RNA, 19 nt, Artificial Sequence
  Description of Artificial Sequence: Synthetic oligonucleotide
  Sense strand starting at position 2359 of SEQ ID NO: 914449
agauauaugugugccauua

SEQ ID NO: 1004799 - RNA, 19 nt, Artificial Sequence
  Description of Artificial Sequence: Synthetic oligonucleotide
  Antisense strand to SEQ ID NO: 1004798
uaauggcacacauauaucu

SEQ ID NO: 1004800 - RNA, 19 nt, Artificial Sequence
  Description of Artificial Sequence: Synthetic oligonucleotide
  Sense strand starting at position 2441 of SEQ ID NO: 914449
gguaaucacaacgauacgu

SEQ ID NO: 1004801 - RNA, 19 nt, Artificial Sequence
  Description of Artificial Sequence: Synthetic oligonucleotide
  Antisense strand to SEQ ID NO: 1004800
acguaucguugugauuacc

SEQ ID NO: 1004802 - RNA, 19 nt, Artificial Sequence
  Description of Artificial Sequence: Synthetic oligonucleotide
  Sense strand starting at position 2443 of SEQ ID NO: 914449
uaaucacaacgauacguuu

SEQ ID NO: 1004803 - RNA, 19 nt, Artificial Sequence
  Description of Artificial Sequence: Synthetic oligonucleotide
  Antisense strand to SEQ ID NO: 1004802
aaacguaucguugugauua

SEQ ID NO: 1004804 - RNA, 19 nt, Artificial Sequence
  Description of Artificial Sequence: Synthetic oligonucleotide
  Sense strand starting at position 2518 of SEQ ID NO: 914449
ugaucuuauccauggcucu

SEQ ID NO: 1004805 - RNA, 19 nt, Artificial Sequence
  Description of Artificial Sequence: Synthetic oligonucleotide
  Antisense strand to SEQ ID NO: 1004804
agagccauggauaagauca

SEQ ID NO: 1004806 - RNA, 19 nt, Artificial Sequence
  Description of Artificial Sequence: Synthetic oligonucleotide
  Sense strand starting at position 2698 of SEQ ID NO: 914449
ugaggauaagccugggcua

SEQ ID NO: 1004807 - RNA, 19 nt, Artificial Sequence
  Description of Artificial Sequence: Synthetic oligonucleotide
  Antisense strand to SEQ ID NO: 1004806
uagcccaggcuuauccuca

SEQ ID NO: 1004808 - RNA, 19 nt, Artificial Sequence
  Description of Artificial Sequence: Synthetic oligonucleotide
  Sense strand starting at position 2700 of SEQ ID NO: 914449
aggauaagccugggcuaga

SEQ ID NO: 1004809 - RNA, 19 nt, Artificial Sequence
  Description of Artificial Sequence: Synthetic oligonucleotide
  Antisense strand to SEQ ID NO: 1004808
ucuagcccaggcuuauccu

SEQ ID NO: 1004810 - RNA, 19 nt, Artificial Sequence
  Description of Artificial Sequence: Synthetic oligonucleotide
  Sense strand starting at position 2701 of SEQ ID NO: 914449
ggauaagccugggcuagau

SEQ ID NO: 1004811 - RNA, 19 nt, Artificial Sequence
  Description of Artificial Sequence: Synthetic oligonucleotide
  Antisense strand to SEQ ID NO: 1004810
aucuagcccaggcuuaucc

SEQ ID NO: 1004812 - RNA, 19 nt, Artificial Sequence
  Description of Artificial Sequence: Synthetic oligonucleotide
  Sense strand starting at position 2714 of SEQ ID NO: 914449
cuagauugcuagcugaaua

SEQ ID NO: 1004813 - RNA, 19 nt, Artificial Sequence
  Description of Artificial Sequence: Synthetic oligonucleotide
  Antisense strand to SEQ ID NO: 1004812
uauucagcuagcaaucuag

SEQ ID NO: 1004814 - RNA, 19 nt, Artificial Sequence
  Description of Artificial Sequence: Synthetic oligonucleotide
  Sense strand starting at position 2825 of SEQ ID NO: 914449
cagccuugucagcagagau

SEQ ID NO: 1004815 - RNA, 19 nt, Artificial Sequence
  Description of Artificial Sequence: Synthetic oligonucleotide
  Antisense strand to SEQ ID NO: 1004814
aucucugcugacaaggcug

SEQ ID NO: 1004816 - RNA, 19 nt, Artificial Sequence
  Description of Artificial Sequence: Synthetic oligonucleotide
  Sense strand starting at position 2835 of SEQ ID NO: 914449
agcagagaugccuacccua

SEQ ID NO: 1004817 - RNA, 19 nt, Artificial Sequence
  Description of Artificial Sequence: Synthetic oligonucleotide
  Antisense strand to SEQ ID NO: 1004816
uaggguaggcaucucugcu

SEQ ID NO: 1004818 - RNA, 19 nt, Artificial Sequence
  Description of Artificial Sequence: Synthetic oligonucleotide
  Sense strand starting at position 2943 of SEQ ID NO: 914449
gugugaagccacuguauuu

SEQ ID NO: 1004819 - RNA, 19 nt, Artificial Sequence
  Description of Artificial Sequence: Synthetic oligonucleotide
  Antisense strand to SEQ ID NO: 1004818
aaauacaguggcuucacac

SEQ ID NO: 1004820 - RNA, 19 nt, Artificial Sequence
  Description of Artificial Sequence: Synthetic oligonucleotide
  Sense strand starting at position 3255 of SEQ ID NO: 914449
cccacaaacuagguguaau

SEQ ID NO: 1004821 - RNA, 19 nt, Artificial Sequence
  Description of Artificial Sequence: Synthetic oligonucleotide
  Antisense strand to SEQ ID NO: 1004820
auuacaccuaguuuguggg

SEQ ID NO: 1004822 - RNA, 19 nt, Artificial Sequence
  Description of Artificial Sequence: Synthetic oligonucleotide
  Sense strand starting at position 3265 of SEQ ID NO: 914449
agguguaauuucucuguua

SEQ ID NO: 1004823 - RNA, 19 nt, Artificial Sequence
  Description of Artificial Sequence: Synthetic oligonucleotide
  Antisense strand to SEQ ID NO: 1004822
uaacagagaaauuacaccu

SEQ ID NO: 1004824 - RNA, 19 nt, Artificial Sequence
  Description of Artificial Sequence: Synthetic oligonucleotide
  Sense strand starting at position 3266 of SEQ ID NO: 914449
gguguaauuucucuguuau

SEQ ID NO: 1004825 - RNA, 19 nt, Artificial Sequence
  Description of Artificial Sequence: Synthetic oligonucleotide
  Antisense strand to SEQ ID NO: 1004824
auaacagagaaauuacacc

SEQ ID NO: 1004826 - RNA, 19 nt, Artificial Sequence
  Description of Artificial Sequence: Synthetic oligonucleotide
  Sense strand starting at position 3267 of SEQ ID NO: 914449
guguaauuucucuguuauu

SEQ ID NO: 1004827 - RNA, 19 nt, Artificial Sequence
  Description of Artificial Sequence: Synthetic oligonucleotide
  Antisense strand to SEQ ID NO: 1004826
aauaacagagaaauuacac

SEQ ID NO: 1004828 - RNA, 19 nt, Artificial Sequence
  Description of Artificial Sequence: Synthetic oligonucleotide
  Sense strand starting at position 3276 of SEQ ID NO: 914449
cucuguuauuugcuuuauu

SEQ ID NO: 1004829 - RNA, 19 nt, Artificial Sequence
  Description of Artificial Sequence: Synthetic oligonucleotide
  Antisense strand to SEQ ID NO: 1004828
aauaaagcaaauaacagag

SEQ ID NO: 1004830 - RNA, 19 nt, Artificial Sequence
  Description of Artificial Sequence: Synthetic oligonucleotide
  Sense strand starting at position 3299 of SEQ ID NO: 914449
gcuaacaaucuuuggaaca

SEQ ID NO: 1004831 - RNA, 19 nt, Artificial Sequence
  Description of Artificial Sequence: Synthetic oligonucleotide
  Antisense strand to SEQ ID NO: 1004830
uguuccaaagauuguuagc

SEQ ID NO: 1004832 - RNA, 19 nt, Artificial Sequence
  Description of Artificial Sequence: Synthetic oligonucleotide
  Sense strand starting at position 3886 of SEQ ID NO: 914449
gugagauugggccacugua

SEQ ID NO: 1004833 - RNA, 19 nt, Artificial Sequence
  Description of Artificial Sequence: Synthetic oligonucleotide
  Antisense strand to SEQ ID NO: 1004832
uacaguggcccaaucucac

SEQ ID NO: 1004834 - RNA, 19 nt, Artificial Sequence
  Description of Artificial Sequence: Synthetic oligonucleotide
  Sense strand starting at position 183 of SEQ ID NO: 914450
gaguuugagagucaugcca

SEQ ID NO: 1004835 - RNA, 19 nt, Artificial Sequence
  Description of Artificial Sequence: Synthetic oligonucleotide
  Antisense strand to SEQ ID NO: 1004834
uggcaugacucucaaacuc

SEQ ID NO: 1004836 - RNA, 19 nt, Artificial Sequence
  Description of Artificial Sequence: Synthetic oligonucleotide
  Sense strand starting at position 249 of SEQ ID NO: 914450
ggaggcauucucuaaguau

SEQ ID NO: 1004837 - RNA, 19 nt, Artificial Sequence
  Description of Artificial Sequence: Synthetic oligonucleotide
  Antisense strand to SEQ ID NO: 1004836
auacuuagagaaugccucc

SEQ ID NO: 1004838 - RNA, 19 nt, Artificial Sequence
  Description of Artificial Sequence: Synthetic oligonucleotide
  Sense strand starting at position 300 of SEQ ID NO: 914450
aacuguauugauugauguu

SEQ ID NO: 1004839 - RNA, 19 nt, Artificial Sequence
  Description of Artificial Sequence: Synthetic oligonucleotide
  Antisense strand to SEQ ID NO: 1004838
aacaucaaucaauacaguu

SEQ ID NO: 1004840 - RNA, 19 nt, Artificial Sequence
  Description of Artificial Sequence: Synthetic oligonucleotide
  Sense strand starting at position 542 of SEQ ID NO: 914450
uccucaagaguuuaaggua

SEQ ID NO: 1004841 - RNA, 19 nt, Artificial Sequence
  Description of Artificial Sequence: Synthetic oligonucleotide
  Antisense strand to SEQ ID NO: 1004840
uaccuuaaacucuugagga

SEQ ID NO: 1004842 - RNA, 19 nt, Artificial Sequence
  Description of Artificial Sequence: Synthetic oligonucleotide
  Sense strand starting at position 570 of SEQ ID NO: 914450
gucuacauuugguuguuua

SEQ ID NO: 1004843 - RNA, 19 nt, Artificial Sequence
  Description of Artificial Sequence: Synthetic oligonucleotide
  Antisense strand to SEQ ID NO: 1004842
uaaacaaccaaauguagac

SEQ ID NO: 1004844 - RNA, 19 nt, Artificial Sequence
  Description of Artificial Sequence: Synthetic oligonucleotide
  Sense strand starting at position 571 of SEQ ID NO: 914450
ucuacauuugguuguuuau

SEQ ID NO: 1004845 - RNA, 19 nt, Artificial Sequence
  Description of Artificial Sequence: Synthetic oligonucleotide
  Antisense strand to SEQ ID NO: 1004844
auaaacaaccaaauguaga

SEQ ID NO: 1004846 - RNA, 19 nt, Artificial Sequence
  Description of Artificial Sequence: Synthetic oligonucleotide
  Sense strand starting at position 660 of SEQ ID NO: 914450
gauuccagagcuuaaguua

SEQ ID NO: 1004847 - RNA, 19 nt, Artificial Sequence
  Description of Artificial Sequence: Synthetic oligonucleotide
  Antisense strand to SEQ ID NO: 1004846
uaacuuaagcucuggaauc

SEQ ID NO: 1004848 - RNA, 19 nt, Artificial Sequence
  Description of Artificial Sequence: Synthetic oligonucleotide
  Sense strand starting at position 663 of SEQ ID NO: 914450
uccagagcuuaaguuaaau

SEQ ID NO: 1004849 - RNA, 19 nt, Artificial Sequence
  Description of Artificial Sequence: Synthetic oligonucleotide
  Antisense strand to SEQ ID NO: 1004848
auuuaacuuaagcucugga

SEQ ID NO: 1004850 - RNA, 19 nt, Artificial Sequence
  Description of Artificial Sequence: Synthetic oligonucleotide
  Sense strand starting at position 703 of SEQ ID NO: 914450
cccggagagaauuguucua

SEQ ID NO: 1004851 - RNA, 19 nt, Artificial Sequence
  Description of Artificial Sequence: Synthetic oligonucleotide
  Antisense strand to SEQ ID NO: 1004850
uagaacaauucucuccggg

SEQ ID NO: 1004852 - RNA, 19 nt, Artificial Sequence
  Description of Artificial Sequence: Synthetic oligonucleotide
  Sense strand starting at position 705 of SEQ ID NO: 914450
cggagagaauuguucuaua

SEQ ID NO: 1004853 - RNA, 19 nt, Artificial Sequence
  Description of Artificial Sequence: Synthetic oligonucleotide
  Antisense strand to SEQ ID NO: 1004852
uauagaacaauucucuccg

SEQ ID NO: 1004854 - RNA, 19 nt, Artificial Sequence
  Description of Artificial Sequence: Synthetic oligonucleotide
  Sense strand starting at position 755 of SEQ ID NO: 914450
aagguaauaugagugaagu

SEQ ID NO: 1004855 - RNA, 19 nt, Artificial Sequence
  Description of Artificial Sequence: Synthetic oligonucleotide
  Antisense strand to SEQ ID NO: 1004854
acuucacucauauuaccuu

SEQ ID NO: 1004856 - RNA, 19 nt, Artificial Sequence
  Description of Artificial Sequence: Synthetic oligonucleotide
  Sense strand starting at position 756 of SEQ ID NO: 914450
agguaauaugagugaagua

SEQ ID NO: 1004857 - RNA, 19 nt, Artificial Sequence
  Description of Artificial Sequence: Synthetic oligonucleotide
  Antisense strand to SEQ ID NO: 1004856
uacuucacucauauuaccu

SEQ ID NO: 1004858 - RNA, 19 nt, Artificial Sequence
  Description of Artificial Sequence: Synthetic oligonucleotide
  Sense strand starting at position 912 of SEQ ID NO: 914450
cuguaugucccugagcaaa

SEQ ID NO: 1004859 - RNA, 19 nt, Artificial Sequence
  Description of Artificial Sequence: Synthetic oligonucleotide
  Antisense strand to SEQ ID NO: 1004858
uuugcucagggacauacag

SEQ ID NO: 1004860 - RNA, 19 nt, Artificial Sequence
  Description of Artificial Sequence: Synthetic oligonucleotide
  Sense strand starting at position 982 of SEQ ID NO: 914450
uggucaacuuuccuaauag

SEQ ID NO: 1004861 - RNA, 19 nt, Artificial Sequence
  Description of Artificial Sequence: Synthetic oligonucleotide
  Antisense strand to SEQ ID NO: 1004860
cuauuaggaaaguugacca

SEQ ID NO: 1004862 - RNA, 19 nt, Artificial Sequence
  Description of Artificial Sequence: Synthetic oligonucleotide
  Sense strand starting at position 1026 of SEQ ID NO: 914450
auaagaauuaugugacgau

SEQ ID NO: 1004863 - RNA, 19 nt, Artificial Sequence
  Description of Artificial Sequence: Synthetic oligonucleotide
  Antisense strand to SEQ ID NO: 1004862
aucgucacauaauucuuau

SEQ ID NO: 1004864 - RNA, 19 nt, Artificial Sequence
  Description of Artificial Sequence: Synthetic oligonucleotide
  Sense strand starting at position 1030 of SEQ ID NO: 914450
gaauuaugugacgaucuuc

SEQ ID NO: 1004865 - RNA, 19 nt, Artificial Sequence
  Description of Artificial Sequence: Synthetic oligonucleotide
  Antisense strand to SEQ ID NO: 1004864
gaagaucgucacauaauuc

SEQ ID NO: 1004866 - RNA, 19 nt, Artificial Sequence
  Description of Artificial Sequence: Synthetic oligonucleotide
  Sense strand starting at position 1055 of SEQ ID NO: 914450
aauaaaugccugcagggua

SEQ ID NO: 1004867 - RNA, 19 nt, Artificial Sequence
  Description of Artificial Sequence: Synthetic oligonucleotide
  Antisense strand to SEQ ID NO: 1004866
uacccugcaggcauuuauu

SEQ ID NO: 1004868 - RNA, 19 nt, Artificial Sequence
  Description of Artificial Sequence: Synthetic oligonucleotide
  Sense strand starting at position 1280 of SEQ ID NO: 914450
ucagcuucuguguauaaga

SEQ ID NO: 1004869 - RNA, 19 nt, Artificial Sequence
  Description of Artificial Sequence: Synthetic oligonucleotide
  Antisense strand to SEQ ID NO: 1004868
ucuuauacacagaagcuga

SEQ ID NO: 1004870 - RNA, 19 nt, Artificial Sequence
  Description of Artificial Sequence: Synthetic oligonucleotide
  Sense strand starting at position 1291 of SEQ ID NO: 914450
guauaagacaggugaccua

SEQ ID NO: 1004871 - RNA, 19 nt, Artificial Sequence
  Description of Artificial Sequence: Synthetic oligonucleotide
  Antisense strand to SEQ ID NO: 1004870
uaggucaccugucuuauac

SEQ ID NO: 1004872 - RNA, 19 nt, Artificial Sequence
  Description of Artificial Sequence: Synthetic oligonucleotide
  Sense strand starting at position 1320 of SEQ ID NO: 914450
gcagaauggauuggagagu

SEQ ID NO: 1004873 - RNA, 19 nt, Artificial Sequence
  Description of Artificial Sequence: Synthetic oligonucleotide
  Antisense strand to SEQ ID NO: 1004872
acucuccaauccauucugc

SEQ ID NO: 1004874 - RNA, 19 nt, Artificial Sequence
  Description of Artificial Sequence: Synthetic oligonucleotide
  Sense strand starting at position 1335 of SEQ ID NO: 914450
gaguuaaguccuggaggga

SEQ ID NO: 1004875 - RNA, 19 nt, Artificial Sequence
  Description of Artificial Sequence: Synthetic oligonucleotide
  Antisense strand to SEQ ID NO: 1004874
ucccuccaggacuuaacuc

SEQ ID NO: 1004876 - RNA, 19 nt, Artificial Sequence
  Description of Artificial Sequence: Synthetic oligonucleotide
  Sense strand starting at position 1396 of SEQ ID NO: 914450
cugugauauuaacccauga

SEQ ID NO: 1004877 - RNA, 19 nt, Artificial Sequence
  Description of Artificial Sequence: Synthetic oligonucleotide
  Antisense strand to SEQ ID NO: 1004876
ucauggguuaauaucacag

SEQ ID NO: 1004878 - RNA, 19 nt, Artificial Sequence
  Description of Artificial Sequence: Synthetic oligonucleotide
  Sense strand starting at position 1565 of SEQ ID NO: 914450
uugugaucugggcaauuaa

SEQ ID NO: 1004879 - RNA, 19 nt, Artificial Sequence
  Description of Artificial Sequence: Synthetic oligonucleotide
  Antisense strand to SEQ ID NO: 1004878
uuaauugcccagaucacaa

SEQ ID NO: 1004880 - RNA, 19 nt, Artificial Sequence
  Description of Artificial Sequence: Synthetic oligonucleotide
  Sense strand starting at position 1617 of SEQ ID NO: 914450
ucgaaacuucuagaauugu

SEQ ID NO: 1004881 - RNA, 19 nt, Artificial Sequence
  Description of Artificial Sequence: Synthetic oligonucleotide
  Antisense strand to SEQ ID NO: 1004880
acaauucuagaaguuucga

SEQ ID NO: 1004882 - RNA, 19 nt, Artificial Sequence
  Description of Artificial Sequence: Synthetic oligonucleotide
  Sense strand starting at position 1819 of SEQ ID NO: 914450
gugugcuaucggcucacuu

SEQ ID NO: 1004883 - RNA, 19 nt, Artificial Sequence
  Description of Artificial Sequence: Synthetic oligonucleotide
  Antisense strand to SEQ ID NO: 1004882
aagugagccgauagcacac

SEQ ID NO: 1004884 - RNA, 19 nt, Artificial Sequence
  Description of Artificial Sequence: Synthetic oligonucleotide
  Sense strand starting at position 2019 of SEQ ID NO: 914450
ggaaacguguaauuacaga

SEQ ID NO: 1004885 - RNA, 19 nt, Artificial Sequence
  Description of Artificial Sequence: Synthetic oligonucleotide
  Antisense strand to SEQ ID NO: 1004884
ucuguaauuacacguuucc

SEQ ID NO: 1004886 - RNA, 19 nt, Artificial Sequence
  Description of Artificial Sequence: Synthetic oligonucleotide
  Sense strand starting at position 2027 of SEQ ID NO: 914450
guaauuacagauugugaaa

SEQ ID NO: 1004887 - RNA, 19 nt, Artificial Sequence
  Description of Artificial Sequence: Synthetic oligonucleotide
  Antisense strand to SEQ ID NO: 1004886
uuucacaaucuguaauuac

SEQ ID NO: 1004888 - RNA, 19 nt, Artificial Sequence
  Description of Artificial Sequence: Synthetic oligonucleotide
  Sense strand starting at position 2526 of SEQ ID NO: 914450
uuagauccgcuggauuaga

SEQ ID NO: 1004889 - RNA, 19 nt, Artificial Sequence
  Description of Artificial Sequence: Synthetic oligonucleotide
  Antisense strand to SEQ ID NO: 1004888
ucuaauccagcggaucuaa

SEQ ID NO: 1004890 - RNA, 19 nt, Artificial Sequence
  Description of Artificial Sequence: Synthetic oligonucleotide
  Sense strand starting at position 2568 of SEQ ID NO: 914450
ccuggaguacgccagagau

SEQ ID NO: 1004891 - RNA, 19 nt, Artificial Sequence
  Description of Artificial Sequence: Synthetic oligonucleotide
  Antisense strand to SEQ ID NO: 1004890
aucucuggcguacuccagg

SEQ ID NO: 1004892 - RNA, 19 nt, Artificial Sequence
  Description of Artificial Sequence: Synthetic oligonucleotide
  Sense strand starting at position 2570 of SEQ ID NO: 914450
uggaguacgccagagauga

SEQ ID NO: 1004893 - RNA, 19 nt, Artificial Sequence
  Description of Artificial Sequence: Synthetic oligonucleotide
  Antisense strand to SEQ ID NO: 1004892
ucaucucuggcguacucca

SEQ ID NO: 1004894 - RNA, 19 nt, Artificial Sequence
  Description of Artificial Sequence: Synthetic oligonucleotide
  Sense strand starting at position 2765 of SEQ ID NO: 914450
cuccucucccggcaagaaa

SEQ ID NO: 1004895 - RNA, 19 nt, Artificial Sequence
  Description of Artificial Sequence: Synthetic oligonucleotide
  Antisense strand to SEQ ID NO: 1004894
uuucuugccgggagaggag

SEQ ID NO: 1004896 - RNA, 19 nt, Artificial Sequence
  Description of Artificial Sequence: Synthetic oligonucleotide
  Sense strand starting at position 2924 of SEQ ID NO: 914450
guaucagcgauccagacaa

SEQ ID NO: 1004897 - RNA, 19 nt, Artificial Sequence
  Description of Artificial Sequence: Synthetic oligonucleotide
  Antisense strand to SEQ ID NO: 1004896
uugucuggaucgcugauac

SEQ ID NO: 1004898 - RNA, 19 nt, Artificial Sequence
  Description of Artificial Sequence: Synthetic oligonucleotide
  Sense strand starting at position 2989 of SEQ ID NO: 914450
agacucuuuccuuaaguga

SEQ ID NO: 1004899 - RNA, 19 nt, Artificial Sequence
  Description of Artificial Sequence: Synthetic oligonucleotide
  Antisense strand to SEQ ID NO: 1004898
ucacuuaaggaaagagucu

SEQ ID NO: 1004900 - RNA, 19 nt, Artificial Sequence
  Description of Artificial Sequence: Synthetic oligonucleotide
  Sense strand starting at position 3002 of SEQ ID NO: 914450
aagugaguuccugauccug

SEQ ID NO: 1004901 - RNA, 19 nt, Artificial Sequence
  Description of Artificial Sequence: Synthetic oligonucleotide
  Antisense strand to SEQ ID NO: 1004900
caggaucaggaacucacuu

SEQ ID NO: 1004902 - RNA, 19 nt, Artificial Sequence
  Description of Artificial Sequence: Synthetic oligonucleotide
  Sense strand starting at position 3161 of SEQ ID NO: 914450
gccuccauuggugauacau

SEQ ID NO: 1004903 - RNA, 19 nt, Artificial Sequence
  Description of Artificial Sequence: Synthetic oligonucleotide
  Antisense strand to SEQ ID NO: 1004902
auguaucaccaauggaggc

SEQ ID NO: 1004904 - RNA, 19 nt, Artificial Sequence
  Description of Artificial Sequence: Synthetic oligonucleotide
  Sense strand starting at position 3169 of SEQ ID NO: 914450
uggugauacauaggugaac

SEQ ID NO: 1004905 - RNA, 19 nt, Artificial Sequence
  Description of Artificial Sequence: Synthetic oligonucleotide
  Antisense strand to SEQ ID NO: 1004904
guucaccuauguaucacca

SEQ ID NO: 1004906 - RNA, 19 nt, Artificial Sequence
  Description of Artificial Sequence: Synthetic oligonucleotide
  Sense strand starting at position 3170 of SEQ ID NO: 914450
ggugauacauaggugaaca

SEQ ID NO: 1004907 - RNA, 19 nt, Artificial Sequence
  Description of Artificial Sequence: Synthetic oligonucleotide
  Antisense strand to SEQ ID NO: 1004906
uguucaccuauguaucacc

SEQ ID NO: 1004908 - RNA, 19 nt, Artificial Sequence
  Description of Artificial Sequence: Synthetic oligonucleotide
  Sense strand starting at position 3171 of SEQ ID NO: 914450
gugauacauaggugaacag

SEQ ID NO: 1004909 - RNA, 19 nt, Artificial Sequence
  Description of Artificial Sequence: Synthetic oligonucleotide
  Antisense strand to SEQ ID NO: 1004908
cuguucaccuauguaucac

SEQ ID NO: 1004910 - RNA, 19 nt, Artificial Sequence
  Description of Artificial Sequence: Synthetic oligonucleotide
  Sense strand starting at position 3195 of SEQ ID NO: 914450
ggaguagauccucagcaca

SEQ ID NO: 1004911 - RNA, 19 nt, Artificial Sequence
  Description of Artificial Sequence: Synthetic oligonucleotide
  Antisense strand to SEQ ID NO: 1004910
ugugcugaggaucuacucc

SEQ ID NO: 1004912 - RNA, 19 nt, Artificial Sequence
  Description of Artificial Sequence: Synthetic oligonucleotide
  Sense strand starting at position 3325 of SEQ ID NO: 914450
ggucaacagcuuuaaagau

SEQ ID NO: 1004913 - RNA, 19 nt, Artificial Sequence
  Description of Artificial Sequence: Synthetic oligonucleotide
  Antisense strand to SEQ ID NO: 1004912
aucuuuaaagcuguugacc

SEQ ID NO: 1004914 - RNA, 19 nt, Artificial Sequence
  Description of Artificial Sequence: Synthetic oligonucleotide
  Sense strand starting at position 250 of SEQ ID NO: 914451
ggaaaucuuugcccaggga

SEQ ID NO: 1004915 - RNA, 19 nt, Artificial Sequence
  Description of Artificial Sequence: Synthetic oligonucleotide
  Antisense strand to SEQ ID NO: 1004914
ucccugggcaaagauuucc

SEQ ID NO: 1004916 - RNA, 19 nt, Artificial Sequence
  Description of Artificial Sequence: Synthetic oligonucleotide
  Sense strand starting at position 371 of SEQ ID NO: 914451
gauauaguucuauaaugug

SEQ ID NO: 1004917 - RNA, 19 nt, Artificial Sequence
  Description of Artificial Sequence: Synthetic oligonucleotide
  Antisense strand to SEQ ID NO: 1004916
cacauuauagaacuauauc

SEQ ID NO: 1004918 - RNA, 19 nt, Artificial Sequence
  Description of Artificial Sequence: Synthetic oligonucleotide
  Sense strand starting at position 398 of SEQ ID NO: 914451
cugaaaguauguccuacuu

SEQ ID NO: 1004919 - RNA, 19 nt, Artificial Sequence
  Description of Artificial Sequence: Synthetic oligonucleotide
  Antisense strand to SEQ ID NO: 1004918
aaguaggacauacuuucag

SEQ ID NO: 1004920 - RNA, 19 nt, Artificial Sequence
  Description of Artificial Sequence: Synthetic oligonucleotide
  Sense strand starting at position 425 of SEQ ID NO: 914451
gucuucuuguaccuauaga

SEQ ID NO: 1004921 - RNA, 19 nt, Artificial Sequence
  Description of Artificial Sequence: Synthetic oligonucleotide
  Antisense strand to SEQ ID NO: 1004920
ucuauagguacaagaagac

SEQ ID NO: 1004922 - RNA, 19 nt, Artificial Sequence
  Description of Artificial Sequence: Synthetic oligonucleotide
  Sense strand starting at position 465 of SEQ ID NO: 914451
cuaccagguuguuuaacaa

SEQ ID NO: 1004923 - RNA, 19 nt, Artificial Sequence
  Description of Artificial Sequence: Synthetic oligonucleotide
  Antisense strand to SEQ ID NO: 1004922
uuguuaaacaaccugguag

SEQ ID NO: 1004924 - RNA, 19 nt, Artificial Sequence
  Description of Artificial Sequence: Synthetic oligonucleotide
  Sense strand starting at position 564 of SEQ ID NO: 914451
uggcauuggaccuaaugca

SEQ ID NO: 1004925 - RNA, 19 nt, Artificial Sequence
  Description of Artificial Sequence: Synthetic oligonucleotide
  Antisense strand to SEQ ID NO: 1004924
ugcauuagguccaaugcca

SEQ ID NO: 1004926 - RNA, 19 nt, Artificial Sequence
  Description of Artificial Sequence: Synthetic oligonucleotide
  Sense strand starting at position 637 of SEQ ID NO: 914451
uagugauaaugaucugccu

SEQ ID NO: 1004927 - RNA, 19 nt, Artificial Sequence
  Description of Artificial Sequence: Synthetic oligonucleotide
  Antisense strand to SEQ ID NO: 1004926
aggcagaucauuaucacua

SEQ ID NO: 1004928 - RNA, 19 nt, Artificial Sequence
  Description of Artificial Sequence: Synthetic oligonucleotide
  Sense strand starting at position 640 of SEQ ID NO: 914451
ugauaaugaucugccuaaa

SEQ ID NO: 1004929 - RNA, 19 nt, Artificial Sequence
  Description of Artificial Sequence: Synthetic oligonucleotide
  Antisense strand to SEQ ID NO: 1004928
uuuaggcagaucauuauca

SEQ ID NO: 1004930 - RNA, 19 nt, Artificial Sequence
  Description of Artificial Sequence: Synthetic oligonucleotide
  Sense strand starting at position 660 of SEQ ID NO: 914451
uauauauucccgggaaagu

SEQ ID NO: 1004931 - RNA, 19 nt, Artificial Sequence
  Description of Artificial Sequence: Synthetic oligonucleotide
  Antisense strand to SEQ ID NO: 1004930
acuuucccgggaauauaua

SEQ ID NO: 1004932 - RNA, 19 nt, Artificial Sequence
  Description of Artificial Sequence: Synthetic oligonucleotide
  Sense strand starting at position 661 of SEQ ID NO: 914451
auauauucccgggaaaguc

SEQ ID NO: 1004933 - RNA, 19 nt, Artificial Sequence
  Description of Artificial Sequence: Synthetic oligonucleotide
  Antisense strand to SEQ ID NO: 1004932
gacuuucccgggaauauau

SEQ ID NO: 1004934 - RNA, 19 nt, Artificial Sequence
  Description of Artificial Sequence: Synthetic oligonucleotide
  Sense strand starting at position 682 of SEQ ID NO: 914451
ugcucuugucuagaauaua

SEQ ID NO: 1004935 - RNA, 19 nt, Artificial Sequence
  Description of Artificial Sequence: Synthetic oligonucleotide
  Antisense strand to SEQ ID NO: 1004934
uauauucuagacaagagca

SEQ ID NO: 1004936 - RNA, 19 nt, Artificial Sequence
  Description of Artificial Sequence: Synthetic oligonucleotide
  Sense strand starting at position 972 of SEQ ID NO: 914451
uccagugugguggauuagu

SEQ ID NO: 1004937 - RNA, 19 nt, Artificial Sequence
  Description of Artificial Sequence: Synthetic oligonucleotide
  Antisense strand to SEQ ID NO: 1004936
acuaauccaccacacugga

SEQ ID NO: 1004938 - RNA, 19 nt, Artificial Sequence
  Description of Artificial Sequence: Synthetic oligonucleotide
  Sense strand starting at position 977 of SEQ ID NO: 914451
ugugguggauuaguuuaau

SEQ ID NO: 1004939 - RNA, 19 nt, Artificial Sequence
  Description of Artificial Sequence: Synthetic oligonucleotide
  Antisense strand to SEQ ID NO: 1004938
auuaaacuaauccaccaca

SEQ ID NO: 1004940 - RNA, 19 nt, Artificial Sequence
  Description of Artificial Sequence: Synthetic oligonucleotide
  Sense strand starting at position 1006 of SEQ ID NO: 914451
guuaauguauuacuccuua

SEQ ID NO: 1004941 - RNA, 19 nt, Artificial Sequence
  Description of Artificial Sequence: Synthetic oligonucleotide
  Antisense strand to SEQ ID NO: 1004940
uaaggaguaauacauuaac

SEQ ID NO: 1004942 - RNA, 19 nt, Artificial Sequence
  Description of Artificial Sequence: Synthetic oligonucleotide
  Sense strand starting at position 1010 of SEQ ID NO: 914451
auguauuacuccuuagagu

SEQ ID NO: 1004943 - RNA, 19 nt, Artificial Sequence
  Description of Artificial Sequence: Synthetic oligonucleotide
  Antisense strand to SEQ ID NO: 1004942
acucuaaggaguaauacau

SEQ ID NO: 1004944 - RNA, 19 nt, Artificial Sequence
  Description of Artificial Sequence: Synthetic oligonucleotide
  Sense strand starting at position 1011 of SEQ ID NO: 914451
uguauuacuccuuagagua

SEQ ID NO: 1004945 - RNA, 19 nt, Artificial Sequence
  Description of Artificial Sequence: Synthetic oligonucleotide
  Antisense strand to SEQ ID NO: 1004944
uacucuaaggaguaauaca

SEQ ID NO: 1004946 - RNA, 19 nt, Artificial Sequence
  Description of Artificial Sequence: Synthetic oligonucleotide
  Sense strand starting at position 1063 of SEQ ID NO: 914451
aguaauacauccuuuguuu

SEQ ID NO: 1004947 - RNA, 19 nt, Artificial Sequence
  Description of Artificial Sequence: Synthetic oligonucleotide
  Antisense strand to SEQ ID NO: 1004946
aaacaaaggauguauuacu

SEQ ID NO: 1004948 - RNA, 19 nt, Artificial Sequence
  Description of Artificial Sequence: Synthetic oligonucleotide
  Sense strand starting at position 1271 of SEQ ID NO: 914451
uugucuggguuaucuugaa

SEQ ID NO: 1004949 - RNA, 19 nt, Artificial Sequence
  Description of Artificial Sequence: Synthetic oligonucleotide
  Antisense strand to SEQ ID NO: 1004948
uucaagauaacccagacaa

SEQ ID NO: 1004950 - RNA, 19 nt, Artificial Sequence
  Description of Artificial Sequence: Synthetic oligonucleotide
  Sense strand starting at position 1389 of SEQ ID NO: 914451
aggguaauaucucccaugu

SEQ ID NO: 1004951 - RNA, 19 nt, Artificial Sequence
  Description of Artificial Sequence: Synthetic oligonucleotide
  Antisense strand to SEQ ID NO: 1004950
acaugggagauauuacccu

SEQ ID NO: 1004952 - RNA, 19 nt, Artificial Sequence
  Description of Artificial Sequence: Synthetic oligonucleotide
  Sense strand starting at position 1702 of SEQ ID NO: 914451
ugccaagugcauuacugaa

SEQ ID NO: 1004953 - RNA, 19 nt, Artificial Sequence
  Description of Artificial Sequence: Synthetic oligonucleotide
  Antisense strand to SEQ ID NO: 1004952
uucaguaaugcacuuggca

SEQ ID NO: 1004954 - RNA, 19 nt, Artificial Sequence
  Description of Artificial Sequence: Synthetic oligonucleotide
  Sense strand starting at position 1704 of SEQ ID NO: 914451
ccaagugcauuacugaaau

SEQ ID NO: 1004955 - RNA, 19 nt, Artificial Sequence
  Description of Artificial Sequence: Synthetic oligonucleotide
  Antisense strand to SEQ ID NO: 1004954
auuucaguaaugcacuugg

SEQ ID NO: 1004956 - RNA, 19 nt, Artificial Sequence
  Description of Artificial Sequence: Synthetic oligonucleotide
  Sense strand starting at position 1818 of SEQ ID NO: 914451
aguauauaguaacugggaa

SEQ ID NO: 1004957 - RNA, 19 nt, Artificial Sequence
  Description of Artificial Sequence: Synthetic oligonucleotide
  Antisense strand to SEQ ID NO: 1004956
uucccaguuacuauauacu

SEQ ID NO: 1004958 - RNA, 19 nt, Artificial Sequence
  Description of Artificial Sequence: Synthetic oligonucleotide
  Sense strand starting at position 1819 of SEQ ID NO: 914451
guauauaguaacugggaac

SEQ ID NO: 1004959 - RNA, 19 nt, Artificial Sequence
  Description of Artificial Sequence: Synthetic oligonucleotide
  Antisense strand to SEQ ID NO: 1004958
guucccaguuacuauauac

SEQ ID NO: 1004960 - RNA, 19 nt, Artificial Sequence
  Description of Artificial Sequence: Synthetic oligonucleotide
  Sense strand starting at position 1898 of SEQ ID NO: 914451
uuaccugacaguuggugaa

SEQ ID NO: 1004961 - RNA, 19 nt, Artificial Sequence
  Description of Artificial Sequence: Synthetic oligonucleotide
  Antisense strand to SEQ ID NO: 1004960
uucaccaacugucagguaa

SEQ ID NO: 1004962 - RNA, 19 nt, Artificial Sequence
  Description of Artificial Sequence: Synthetic oligonucleotide
  Sense strand starting at position 1968 of SEQ ID NO: 914451
agugcauuccaacagguga

SEQ ID NO: 1004963 - RNA, 19 nt, Artificial Sequence
  Description of Artificial Sequence: Synthetic oligonucleotide
  Antisense strand to SEQ ID NO: 1004962
ucaccuguuggaaugcacu

SEQ ID NO: 1004964 - RNA, 19 nt, Artificial Sequence
  Description of Artificial Sequence: Synthetic oligonucleotide
  Sense strand starting at position 2079 of SEQ ID NO: 914451
cacagauuaguguguggga

SEQ ID NO: 1004965 - RNA, 19 nt, Artificial Sequence
  Description of Artificial Sequence: Synthetic oligonucleotide
  Antisense strand to SEQ ID NO: 1004964
ucccacacacuaaucugug

SEQ ID NO: 1004966 - RNA, 19 nt, Artificial Sequence
  Description of Artificial Sequence: Synthetic oligonucleotide
  Sense strand starting at position 2080 of SEQ ID NO: 914451
acagauuagugugugggau

SEQ ID NO: 1004967 - RNA, 19 nt, Artificial Sequence
  Description of Artificial Sequence: Synthetic oligonucleotide
  Antisense strand to SEQ ID NO: 1004966
aucccacacacuaaucugu

SEQ ID NO: 1004968 - RNA, 19 nt, Artificial Sequence
  Description of Artificial Sequence: Synthetic oligonucleotide
  Sense strand starting at position 2081 of SEQ ID NO: 914451
cagauuagugugugggaua

SEQ ID NO: 1004969 - RNA, 19 nt, Artificial Sequence
  Description of Artificial Sequence: Synthetic oligonucleotide
  Antisense strand to SEQ ID NO: 1004968
uaucccacacacuaaucug

SEQ ID NO: 1004970 - RNA, 19 nt, Artificial Sequence
  Description of Artificial Sequence: Synthetic oligonucleotide
  Sense strand starting at position 2086 of SEQ ID NO: 914451
uagugugugggauauccaa

SEQ ID NO: 1004971 - RNA, 19 nt, Artificial Sequence
  Description of Artificial Sequence: Synthetic oligonucleotide
  Antisense strand to SEQ ID NO: 1004970
uuggauaucccacacacua

SEQ ID NO: 1004972 - RNA, 19 nt, Artificial Sequence
  Description of Artificial Sequence: Synthetic oligonucleotide
  Sense strand starting at position 2158 of SEQ ID NO: 914451
uauaguguugacugaauaa

SEQ ID NO: 1004973 - RNA, 19 nt, Artificial Sequence
  Description of Artificial Sequence: Synthetic oligonucleotide
  Antisense strand to SEQ ID NO: 1004972
uuauucagucaacacuaua

SEQ ID NO: 1004974 - RNA, 19 nt, Artificial Sequence
  Description of Artificial Sequence: Synthetic oligonucleotide
  Sense strand starting at position 2346 of SEQ ID NO: 914451
cguaguucugaccagagca

SEQ ID NO: 1004975 - RNA, 19 nt, Artificial Sequence
  Description of Artificial Sequence: Synthetic oligonucleotide
  Antisense strand to SEQ ID NO: 1004974
ugcucuggucagaacuacg

SEQ ID NO: 1004976 - RNA, 19 nt, Artificial Sequence
  Description of Artificial Sequence: Synthetic oligonucleotide
  Sense strand starting at position 2348 of SEQ ID NO: 914451
uaguucugaccagagcaau

SEQ ID NO: 1004977 - RNA, 19 nt, Artificial Sequence
  Description of Artificial Sequence: Synthetic oligonucleotide
  Antisense strand to SEQ ID NO: 1004976
auugcucuggucagaacua

SEQ ID NO: 1004978 - RNA, 19 nt, Artificial Sequence
  Description of Artificial Sequence: Synthetic oligonucleotide
  Sense strand starting at position 2359 of SEQ ID NO: 914451
agagcaauucgccaacaaa

SEQ ID NO: 1004979 - RNA, 19 nt, Artificial Sequence
  Description of Artificial Sequence: Synthetic oligonucleotide
  Antisense strand to SEQ ID NO: 1004978
uuuguuggcgaauugcucu

SEQ ID NO: 1004980 - RNA, 19 nt, Artificial Sequence
  Description of Artificial Sequence: Synthetic oligonucleotide
  Sense strand starting at position 2417 of SEQ ID NO: 914451
aauugugccuguuuaaaga

SEQ ID NO: 1004981 - RNA, 19 nt, Artificial Sequence
  Description of Artificial Sequence: Synthetic oligonucleotide
  Antisense strand to SEQ ID NO: 1004980
ucuuuaaacaggcacaauu

SEQ ID NO: 1004982 - RNA, 19 nt, Artificial Sequence
  Description of Artificial Sequence: Synthetic oligonucleotide
  Sense strand starting at position 2549 of SEQ ID NO: 914451
aguguuucuguauaacaau

SEQ ID NO: 1004983 - RNA, 19 nt, Artificial Sequence
  Description of Artificial Sequence: Synthetic oligonucleotide
  Antisense strand to SEQ ID NO: 1004982
auuguuauacagaaacacu

SEQ ID NO: 1004984 - RNA, 19 nt, Artificial Sequence
  Description of Artificial Sequence: Synthetic oligonucleotide
  Sense strand starting at position 2811 of SEQ ID NO: 914451
agauuauagugagcuauaa

SEQ ID NO: 1004985 - RNA, 19 nt, Artificial Sequence
  Description of Artificial Sequence: Synthetic oligonucleotide
  Antisense strand to SEQ ID NO: 1004984
uuauagcucacuauaaucu

SEQ ID NO: 1004986 - RNA, 19 nt, Artificial Sequence
  Description of Artificial Sequence: Synthetic oligonucleotide
  Sense strand starting at position 2844 of SEQ ID NO: 914451
uccagucuuggcuacagaa

SEQ ID NO: 1004987 - RNA, 19 nt, Artificial Sequence
  Description of Artificial Sequence: Synthetic oligonucleotide
  Antisense strand to SEQ ID NO: 1004986
uucuguagccaagacugga

SEQ ID NO: 1004988 - RNA, 19 nt, Artificial Sequence
  Description of Artificial Sequence: Synthetic oligonucleotide
  Sense strand starting at position 2846 of SEQ ID NO: 914451
cagucuuggcuacagaaug

SEQ ID NO: 1004989 - RNA, 19 nt, Artificial Sequence
  Description of Artificial Sequence: Synthetic oligonucleotide
  Antisense strand to SEQ ID NO: 1004988
cauucuguagccaagacug

SEQ ID NO: 1004990 - RNA, 19 nt, Artificial Sequence
  Description of Artificial Sequence: Synthetic oligonucleotide
  Sense strand starting at position 3511 of SEQ ID NO: 914451
ucauaacauuggucuagac

SEQ ID NO: 1004991 - RNA, 19 nt, Artificial Sequence
  Description of Artificial Sequence: Synthetic oligonucleotide
  Antisense strand to SEQ ID NO: 1004990
gucuagaccaauguuauga

SEQ ID NO: 1004992 - RNA, 19 nt, Artificial Sequence
  Description of Artificial Sequence: Synthetic oligonucleotide
  Sense strand starting at position 3648 of SEQ ID NO: 914451
uaaucaacaguaugguaga

SEQ ID NO: 1004993 - RNA, 19 nt, Artificial Sequence
  Description of Artificial Sequence: Synthetic oligonucleotide
  Antisense strand to SEQ ID NO: 1004992
ucuaccauacuguugauua

SEQ ID NO: 1004994 - RNA, 19 nt, Artificial Sequence
  Description of Artificial Sequence: Synthetic oligonucleotide
  Sense strand starting at position 1268 of SEQ ID NO: 914452
cgcaauaugaccugcugga

SEQ ID NO: 1004995 - RNA, 19 nt, Artificial Sequence
  Description of Artificial Sequence: Synthetic oligonucleotide
  Antisense strand to SEQ ID NO: 1004994
uccagcaggucauauugcg

SEQ ID NO: 1004996 - RNA, 19 nt, Artificial Sequence
  Description of Artificial Sequence: Synthetic oligonucleotide
  Sense strand starting at position 1283 of SEQ ID NO: 914452
uggaauacgagcugcuuaa

SEQ ID NO: 1004997 - RNA, 19 nt, Artificial Sequence
  Description of Artificial Sequence: Synthetic oligonucleotide
  Antisense strand to SEQ ID NO: 1004996
uuaagcagcucguauucca

SEQ ID NO: 1004998 - RNA, 19 nt, Artificial Sequence
  Description of Artificial Sequence: Synthetic oligonucleotide
  Sense strand starting at position 1346 of SEQ ID NO: 914452
uaagacaguuggccugaaa

SEQ ID NO: 1004999 - RNA, 19 nt, Artificial Sequence
  Description of Artificial Sequence: Synthetic oligonucleotide
  Antisense strand to SEQ ID NO: 1004998
uuucaggccaacugucuua

SEQ ID NO: 1005000 - RNA, 19 nt, Artificial Sequence
  Description of Artificial Sequence: Synthetic oligonucleotide
  Sense strand starting at position 1349 of SEQ ID NO: 914452
gacaguuggccugaaagua

SEQ ID NO: 1005001 - RNA, 19 nt, Artificial Sequence
  Description of Artificial Sequence: Synthetic oligonucleotide
  Antisense strand to SEQ ID NO: 1005000
uacuuucaggccaacuguc

SEQ ID NO: 1005002 - RNA, 19 nt, Artificial Sequence
  Description of Artificial Sequence: Synthetic oligonucleotide
  Sense strand starting at position 1458 of SEQ ID NO: 914452
gaguuaguaccaggacuac

SEQ ID NO: 1005003 - RNA, 19 nt, Artificial Sequence
  Description of Artificial Sequence: Synthetic oligonucleotide
  Antisense strand to SEQ ID NO: 1005002
guaguccugguacuaacuc

SEQ ID NO: 1005004 - RNA, 19 nt, Artificial Sequence
  Description of Artificial Sequence: Synthetic oligonucleotide
  Sense strand starting at position 1562 of SEQ ID NO: 914452
ggcucucagaucugauugu

SEQ ID NO: 1005005 - RNA, 19 nt, Artificial Sequence
  Description of Artificial Sequence: Synthetic oligonucleotide
  Antisense strand to SEQ ID NO: 1005004
acaaucagaucugagagcc

SEQ ID NO: 1005006 - RNA, 19 nt, Artificial Sequence
  Description of Artificial Sequence: Synthetic oligonucleotide
  Sense strand starting at position 1590 of SEQ ID NO: 914452
guucauagucuggaggauu

SEQ ID NO: 1005007 - RNA, 19 nt, Artificial Sequence
  Description of Artificial Sequence: Synthetic oligonucleotide
  Antisense strand to SEQ ID NO: 1005006
aauccuccagacuaugaac

SEQ ID NO: 1005008 - RNA, 19 nt, Artificial Sequence
  Description of Artificial Sequence: Synthetic oligonucleotide
  Sense strand starting at position 1602 of SEQ ID NO: 914452
gaggauuaauuuggaauca

SEQ ID NO: 1005009 - RNA, 19 nt, Artificial Sequence
  Description of Artificial Sequence: Synthetic oligonucleotide
  Antisense strand to SEQ ID NO: 1005008
ugauuccaaauuaauccuc

SEQ ID NO: 1005010 - RNA, 19 nt, Artificial Sequence
  Description of Artificial Sequence: Synthetic oligonucleotide
  Sense strand starting at position 1706 of SEQ ID NO: 914452
ucucuuugauuaccagaag

SEQ ID NO: 1005011 - RNA, 19 nt, Artificial Sequence
  Description of Artificial Sequence: Synthetic oligonucleotide
  Antisense strand to SEQ ID NO: 1005010
cuucugguaaucaaagaga

SEQ ID NO: 1005012 - RNA, 19 nt, Artificial Sequence
  Description of Artificial Sequence: Synthetic oligonucleotide
  Sense strand starting at position 1874 of SEQ ID NO: 914452
gguauuucugccugucaca

SEQ ID NO: 1005013 - RNA, 19 nt, Artificial Sequence
  Description of Artificial Sequence: Synthetic oligonucleotide
  Antisense strand to SEQ ID NO: 1005012
ugugacaggcagaaauacc

SEQ ID NO: 1005014 - RNA, 19 nt, Artificial Sequence
  Description of Artificial Sequence: Synthetic oligonucleotide
  Sense strand starting at position 1928 of SEQ ID NO: 914452
cccagcugcuagucagaaa

SEQ ID NO: 1005015 - RNA, 19 nt, Artificial Sequence
  Description of Artificial Sequence: Synthetic oligonucleotide
  Antisense strand to SEQ ID NO: 1005014
uuucugacuagcagcuggg

SEQ ID NO: 1005016 - RNA, 19 nt, Artificial Sequence
  Description of Artificial Sequence: Synthetic oligonucleotide
  Sense strand starting at position 2006 of SEQ ID NO: 914452
gugccucagacucagagau

SEQ ID NO: 1005017 - RNA, 19 nt, Artificial Sequence
  Description of Artificial Sequence: Synthetic oligonucleotide
  Antisense strand to SEQ ID NO: 1005016
aucucugagucugaggcac

SEQ ID NO: 1005018 - RNA, 19 nt, Artificial Sequence
  Description of Artificial Sequence: Synthetic oligonucleotide
  Sense strand starting at position 2117 of SEQ ID NO: 914452
ugggaagugcccuguagua

SEQ ID NO: 1005019 - RNA, 19 nt, Artificial Sequence
  Description of Artificial Sequence: Synthetic oligonucleotide
  Antisense strand to SEQ ID NO: 1005018
uacuacagggcacuuccca

SEQ ID NO: 1005020 - RNA, 19 nt, Artificial Sequence
  Description of Artificial Sequence: Synthetic oligonucleotide
  Sense strand starting at position 2119 of SEQ ID NO: 914452
ggaagugcccuguaguaag

SEQ ID NO: 1005021 - RNA, 19 nt, Artificial Sequence
  Description of Artificial Sequence: Synthetic oligonucleotide
  Antisense strand to SEQ ID NO: 1005020
cuuacuacagggcacuucc

SEQ ID NO: 1005022 - RNA, 19 nt, Artificial Sequence
  Description of Artificial Sequence: Synthetic oligonucleotide
  Sense strand starting at position 2142 of SEQ ID NO: 914452
uuggcuuucuauucuugaa

SEQ ID NO: 1005023 - RNA, 19 nt, Artificial Sequence
  Description of Artificial Sequence: Synthetic oligonucleotide
  Antisense strand to SEQ ID NO: 1005022
uucaagaauagaaagccaa

SEQ ID NO: 1005024 - RNA, 19 nt, Artificial Sequence
  Description of Artificial Sequence: Synthetic oligonucleotide
  Sense strand starting at position 2144 of SEQ ID NO: 914452
ggcuuucuauucuugaacu

SEQ ID NO: 1005025 - RNA, 19 nt, Artificial Sequence
  Description of Artificial Sequence: Synthetic oligonucleotide
  Antisense strand to SEQ ID NO: 1005024
aguucaagaauagaaagcc

SEQ ID NO: 1005026 - RNA, 19 nt, Artificial Sequence
  Description of Artificial Sequence: Synthetic oligonucleotide
  Sense strand starting at position 2285 of SEQ ID NO: 914452
ccucucuucugaucuguca

SEQ ID NO: 1005027 - RNA, 19 nt, Artificial Sequence
  Description of Artificial Sequence: Synthetic oligonucleotide
  Antisense strand to SEQ ID NO: 1005026
ugacagaucagaagagagg

SEQ ID NO: 1005028 - RNA, 19 nt, Artificial Sequence
  Description of Artificial Sequence: Synthetic oligonucleotide
  Sense strand starting at position 2400 of SEQ ID NO: 914452
uguauaucuuggguuucuu

SEQ ID NO: 1005029 - RNA, 19 nt, Artificial Sequence
  Description of Artificial Sequence: Synthetic oligonucleotide
  Antisense strand to SEQ ID NO: 1005028
aagaaacccaagauauaca

SEQ ID NO: 1005030 - RNA, 19 nt, Artificial Sequence
  Description of Artificial Sequence: Synthetic oligonucleotide
  Sense strand starting at position 2477 of SEQ ID NO: 914452
gaguauauuaggugaugca

SEQ ID NO: 1005031 - RNA, 19 nt, Artificial Sequence
  Description of Artificial Sequence: Synthetic oligonucleotide
  Antisense strand to SEQ ID NO: 1005030
ugcaucaccuaauauacuc

SEQ ID NO: 1005032 - RNA, 19 nt, Artificial Sequence
  Description of Artificial Sequence: Synthetic oligonucleotide
  Sense strand starting at position 2484 of SEQ ID NO: 914452
uuaggugaugcagagguuu

SEQ ID NO: 1005033 - RNA, 19 nt, Artificial Sequence
  Description of Artificial Sequence: Synthetic oligonucleotide
  Antisense strand to SEQ ID NO: 1005032
aaaccucugcaucaccuaa

SEQ ID NO: 1005034 - RNA, 19 nt, Artificial Sequence
  Description of Artificial Sequence: Synthetic oligonucleotide
  Sense strand starting at position 2486 of SEQ ID NO: 914452
aggugaugcagagguuugu

SEQ ID NO: 1005035 - RNA, 19 nt, Artificial Sequence
  Description of Artificial Sequence: Synthetic oligonucleotide
  Antisense strand to SEQ ID NO: 1005034
acaaaccucugcaucaccu

SEQ ID NO: 1005036 - RNA, 19 nt, Artificial Sequence
  Description of Artificial Sequence: Synthetic oligonucleotide
  Sense strand starting at position 2490 of SEQ ID NO: 914452
gaugcagagguuuguagua

SEQ ID NO: 1005037 - RNA, 19 nt, Artificial Sequence
  Description of Artificial Sequence: Synthetic oligonucleotide
  Antisense strand to SEQ ID NO: 1005036
uacuacaaaccucugcauc

SEQ ID NO: 1005038 - RNA, 19 nt, Artificial Sequence
  Description of Artificial Sequence: Synthetic oligonucleotide
  Sense strand starting at position 2517 of SEQ ID NO: 914452
ccuauuaccuagguaguga

SEQ ID NO: 1005039 - RNA, 19 nt, Artificial Sequence
  Description of Artificial Sequence: Synthetic oligonucleotide
  Antisense strand to SEQ ID NO: 1005038
ucacuaccuagguaauagg

SEQ ID NO: 1005040 - RNA, 19 nt, Artificial Sequence
  Description of Artificial Sequence: Synthetic oligonucleotide
  Sense strand starting at position 2592 of SEQ ID NO: 914452
cugguauuucccugugucu

SEQ ID NO: 1005041 - RNA, 19 nt, Artificial Sequence
  Description of Artificial Sequence: Synthetic oligonucleotide
  Antisense strand to SEQ ID NO: 1005040
agacacagggaaauaccag

SEQ ID NO: 1005042 - RNA, 19 nt, Artificial Sequence
  Description of Artificial Sequence: Synthetic oligonucleotide
  Sense strand starting at position 2594 of SEQ ID NO: 914452
gguauuucccugugucugu

SEQ ID NO: 1005043 - RNA, 19 nt, Artificial Sequence
  Description of Artificial Sequence: Synthetic oligonucleotide
  Antisense strand to SEQ ID NO: 1005042
acagacacagggaaauacc

SEQ ID NO: 1005044 - RNA, 19 nt, Artificial Sequence
  Description of Artificial Sequence: Synthetic oligonucleotide
  Sense strand starting at position 3043 of SEQ ID NO: 914452
caagcuaugcuagaagucu

SEQ ID NO: 1005045 - RNA, 19 nt, Artificial Sequence
  Description of Artificial Sequence: Synthetic oligonucleotide
  Antisense strand to SEQ ID NO: 1005044
agacuucuagcauagcuug

SEQ ID NO: 1005046 - RNA, 19 nt, Artificial Sequence
  Description of Artificial Sequence: Synthetic oligonucleotide
  Sense strand starting at position 3049 of SEQ ID NO: 914452
augcuagaagucuacagua

SEQ ID NO: 1005047 - RNA, 19 nt, Artificial Sequence
  Description of Artificial Sequence: Synthetic oligonucleotide
  Antisense strand to SEQ ID NO: 1005046
uacuguagacuucuagcau

SEQ ID NO: 1005048 - RNA, 19 nt, Artificial Sequence
  Description of Artificial Sequence: Synthetic oligonucleotide
  Sense strand starting at position 3051 of SEQ ID NO: 914452
gcuagaagucuacaguaac

SEQ ID NO: 1005049 - RNA, 19 nt, Artificial Sequence
  Description of Artificial Sequence: Synthetic oligonucleotide
  Antisense strand to SEQ ID NO: 1005048
guuacuguagacuucuagc

SEQ ID NO: 1005050 - RNA, 19 nt, Artificial Sequence
  Description of Artificial Sequence: Synthetic oligonucleotide
  Sense strand starting at position 3074 of SEQ ID NO: 914452
acagcaagguauucguaca

SEQ ID NO: 1005051 - RNA, 19 nt, Artificial Sequence
  Description of Artificial Sequence: Synthetic oligonucleotide
  Antisense strand to SEQ ID NO: 1005050
uguacgaauaccuugcugu

SEQ ID NO: 1005052 - RNA, 19 nt, Artificial Sequence
  Description of Artificial Sequence: Synthetic oligonucleotide
  Sense strand starting at position 3205 of SEQ ID NO: 914452
aggaaaggauuguuuauuc

SEQ ID NO: 1005053 - RNA, 19 nt, Artificial Sequence
  Description of Artificial Sequence: Synthetic oligonucleotide
  Antisense strand to SEQ ID NO: 1005052
gaauaaacaauccuuuccu

SEQ ID NO: 1005054 - RNA, 19 nt, Artificial Sequence
  Description of Artificial Sequence: Synthetic oligonucleotide
  Sense strand starting at position 3311 of SEQ ID NO: 914452
ggagacaguucugaaggaa

SEQ ID NO: 1005055 - RNA, 19 nt, Artificial Sequence
  Description of Artificial Sequence: Synthetic oligonucleotide
  Antisense strand to SEQ ID NO: 1005054
uuccuucagaacugucucc

SEQ ID NO: 1005056 - RNA, 19 nt, Artificial Sequence
  Description of Artificial Sequence: Synthetic oligonucleotide
  Sense strand starting at position 3423 of SEQ ID NO: 914452
uuugauauucucugagcaa

SEQ ID NO: 1005057 - RNA, 19 nt, Artificial Sequence
  Description of Artificial Sequence: Synthetic oligonucleotide
  Antisense strand to SEQ ID NO: 1005056
uugcucagagaauaucaaa

SEQ ID NO: 1005058 - RNA, 19 nt, Artificial Sequence
  Description of Artificial Sequence: Synthetic oligonucleotide
  Sense strand starting at position 3467 of SEQ ID NO: 914452
guuguaguagaguaugcau

SEQ ID NO: 1005059 - RNA, 19 nt, Artificial Sequence
  Description of Artificial Sequence: Synthetic oligonucleotide
  Antisense strand to SEQ ID NO: 1005058
augcauacucuacuacaac

SEQ ID NO: 1005060 - RNA, 19 nt, Artificial Sequence
  Description of Artificial Sequence: Synthetic oligonucleotide
  Sense strand starting at position 3469 of SEQ ID NO: 914452
uguaguagaguaugcauga

SEQ ID NO: 1005061 - RNA, 19 nt, Artificial Sequence
  Description of Artificial Sequence: Synthetic oligonucleotide
  Antisense strand to SEQ ID NO: 1005060
ucaugcauacucuacuaca

SEQ ID NO: 1005062 - RNA, 19 nt, Artificial Sequence
  Description of Artificial Sequence: Synthetic oligonucleotide
  Sense strand starting at position 3470 of SEQ ID NO: 914452
guaguagaguaugcaugau

SEQ ID NO: 1005063 - RNA, 19 nt, Artificial Sequence
  Description of Artificial Sequence: Synthetic oligonucleotide
  Antisense strand to SEQ ID NO: 1005062
aucaugcauacucuacuac

SEQ ID NO: 1005064 - RNA, 19 nt, Artificial Sequence
  Description of Artificial Sequence: Synthetic oligonucleotide
  Sense strand starting at position 3577 of SEQ ID NO: 914452
cuaugaagguguuuaagaa

SEQ ID NO: 1005065 - RNA, 19 nt, Artificial Sequence
  Description of Artificial Sequence: Synthetic oligonucleotide
  Antisense strand to SEQ ID NO: 1005064
uucuuaaacaccuucauag

SEQ ID NO: 1005066 - RNA, 19 nt, Artificial Sequence
  Description of Artificial Sequence: Synthetic oligonucleotide
  Sense strand starting at position 3844 of SEQ ID NO: 914452
cugugaacuacugaggguu

SEQ ID NO: 1005067 - RNA, 19 nt, Artificial Sequence
  Description of Artificial Sequence: Synthetic oligonucleotide
  Antisense strand to SEQ ID NO: 1005066
aacccucaguaguucacag

SEQ ID NO: 1005068 - RNA, 19 nt, Artificial Sequence
  Description of Artificial Sequence: Synthetic oligonucleotide
  Sense strand starting at position 3847 of SEQ ID NO: 914452
ugaacuacugaggguugau

SEQ ID NO: 1005069 - RNA, 19 nt, Artificial Sequence
  Description of Artificial Sequence: Synthetic oligonucleotide
  Antisense strand to SEQ ID NO: 1005068
aucaacccucaguaguuca

SEQ ID NO: 1005070 - RNA, 19 nt, Artificial Sequence
  Description of Artificial Sequence: Synthetic oligonucleotide
  Sense strand starting at position 3931 of SEQ ID NO: 914452
aguagcaaacugugggauu

SEQ ID NO: 1005071 - RNA, 19 nt, Artificial Sequence
  Description of Artificial Sequence: Synthetic oligonucleotide
  Antisense strand to SEQ ID NO: 1005070
aaucccacaguuugcuacu

SEQ ID NO: 1005072 - RNA, 19 nt, Artificial Sequence
  Description of Artificial Sequence: Synthetic oligonucleotide
  Sense strand starting at position 3983 of SEQ ID NO: 914452
ugucauaacuagcugucuu

SEQ ID NO: 1005073 - RNA, 19 nt, Artificial Sequence
  Description of Artificial Sequence: Synthetic oligonucleotide
  Antisense strand to SEQ ID NO: 1005072
aagacagcuaguuaugaca

SEQ ID NO: 1005074 - RNA, 19 nt, Artificial Sequence
  Description of Artificial Sequence: Synthetic oligonucleotide
  Sense strand starting at position 513 of SEQ ID NO: 914453
gcugaauucuaaccuuguc

SEQ ID NO: 1005075 - RNA, 19 nt, Artificial Sequence
  Description of Artificial Sequence: Synthetic oligonucleotide
  Antisense strand to SEQ ID NO: 1005074
gacaagguuagaauucagc

SEQ ID NO: 1005076 - RNA, 19 nt, Artificial Sequence
  Description of Artificial Sequence: Synthetic oligonucleotide
  Sense strand starting at position 545 of SEQ ID NO: 914453
aguggcacauccuuuacua

SEQ ID NO: 1005077 - RNA, 19 nt, Artificial Sequence
  Description of Artificial Sequence: Synthetic oligonucleotide
  Antisense strand to SEQ ID NO: 1005076
uaguaaaggaugugccacu

SEQ ID NO: 1005078 - RNA, 19 nt, Artificial Sequence
  Description of Artificial Sequence: Synthetic oligonucleotide
  Sense strand starting at position 788 of SEQ ID NO: 914453
ggcugcaguccucugucua

SEQ ID NO: 1005079 - RNA, 19 nt, Artificial Sequence
  Description of Artificial Sequence: Synthetic oligonucleotide
  Antisense strand to SEQ ID NO: 1005078
uagacagaggacugcagcc

SEQ ID NO: 1005080 - RNA, 19 nt, Artificial Sequence
  Description of Artificial Sequence: Synthetic oligonucleotide
  Sense strand starting at position 913 of SEQ ID NO: 914453
auagaugcccucugagacu

SEQ ID NO: 1005081 - RNA, 19 nt, Artificial Sequence
  Description of Artificial Sequence: Synthetic oligonucleotide
  Antisense strand to SEQ ID NO: 1005080
agucucagagggcaucuau

SEQ ID NO: 1005082 - RNA, 19 nt, Artificial Sequence
  Description of Artificial Sequence: Synthetic oligonucleotide
  Sense strand starting at position 1087 of SEQ ID NO: 914453
cacgcuggaguguaaucau

SEQ ID NO: 1005083 - RNA, 19 nt, Artificial Sequence
  Description of Artificial Sequence: Synthetic oligonucleotide
  Antisense strand to SEQ ID NO: 1005082
augauuacacuccagcgug

SEQ ID NO: 1005084 - RNA, 19 nt, Artificial Sequence
  Description of Artificial Sequence: Synthetic oligonucleotide
  Sense strand starting at position 1090 of SEQ ID NO: 914453
gcuggaguguaaucaucug

SEQ ID NO: 1005085 - RNA, 19 nt, Artificial Sequence
  Description of Artificial Sequence: Synthetic oligonucleotide
  Antisense strand to SEQ ID NO: 1005084
cagaugauuacacuccagc

SEQ ID NO: 1005086 - RNA, 19 nt, Artificial Sequence
  Description of Artificial Sequence: Synthetic oligonucleotide
  Sense strand starting at position 1117 of SEQ ID NO: 914453
ucucgucucccagacuaga

SEQ ID NO: 1005087 - RNA, 19 nt, Artificial Sequence
  Description of Artificial Sequence: Synthetic oligonucleotide
  Antisense strand to SEQ ID NO: 1005086
ucuagucugggagacgaga

SEQ ID NO: 1005088 - RNA, 19 nt, Artificial Sequence
  Description of Artificial Sequence: Synthetic oligonucleotide
  Sense strand starting at position 1208 of SEQ ID NO: 914453
ccuacaggugcucaaagaa

SEQ ID NO: 1005089 - RNA, 19 nt, Artificial Sequence
  Description of Artificial Sequence: Synthetic oligonucleotide
  Antisense strand to SEQ ID NO: 1005088
uucuuugagcaccuguagg

SEQ ID NO: 1005090 - RNA, 19 nt, Artificial Sequence
  Description of Artificial Sequence: Synthetic oligonucleotide
  Sense strand starting at position 2399 of SEQ ID NO: 914453
gucagcaauccuggguuaa

SEQ ID NO: 1005091 - RNA, 19 nt, Artificial Sequence
  Description of Artificial Sequence: Synthetic oligonucleotide
  Antisense strand to SEQ ID NO: 1005090
uuaacccaggauugcugac

SEQ ID NO: 1005092 - RNA, 19 nt, Artificial Sequence
  Description of Artificial Sequence: Synthetic oligonucleotide
  Sense strand starting at position 2400 of SEQ ID NO: 914453
ucagcaauccuggguuaaa

SEQ ID NO: 1005093 - RNA, 19 nt, Artificial Sequence
  Description of Artificial Sequence: Synthetic oligonucleotide
  Antisense strand to SEQ ID NO: 1005092
uuuaacccaggauugcuga

SEQ ID NO: 1005094 - RNA, 19 nt, Artificial Sequence
  Description of Artificial Sequence: Synthetic oligonucleotide
  Sense strand starting at position 2401 of SEQ ID NO: 914453
cagcaauccuggguuaaau

SEQ ID NO: 1005095 - RNA, 19 nt, Artificial Sequence
  Description of Artificial Sequence: Synthetic oligonucleotide
  Antisense strand to SEQ ID NO: 1005094
auuuaacccaggauugcug

SEQ ID NO: 1005096 - RNA, 19 nt, Artificial Sequence
  Description of Artificial Sequence: Synthetic oligonucleotide
  Sense strand starting at position 2403 of SEQ ID NO: 914453
gcaauccuggguuaaauua

SEQ ID NO: 1005097 - RNA, 19 nt, Artificial Sequence
  Description of Artificial Sequence: Synthetic oligonucleotide
  Antisense strand to SEQ ID NO: 1005096
uaauuuaacccaggauugc

SEQ ID NO: 1005098 - RNA, 19 nt, Artificial Sequence
  Description of Artificial Sequence: Synthetic oligonucleotide
  Sense strand starting at position 2410 of SEQ ID NO: 914453
uggguuaaauuacucugua

SEQ ID NO: 1005099 - RNA, 19 nt, Artificial Sequence
  Description of Artificial Sequence: Synthetic oligonucleotide
  Antisense strand to SEQ ID NO: 1005098
uacagaguaauuuaaccca

SEQ ID NO: 1005100 - RNA, 19 nt, Artificial Sequence
  Description of Artificial Sequence: Synthetic oligonucleotide
  Sense strand starting at position 2411 of SEQ ID NO: 914453
ggguuaaauuacucuguac

SEQ ID NO: 1005101 - RNA, 19 nt, Artificial Sequence
  Description of Artificial Sequence: Synthetic oligonucleotide
  Antisense strand to SEQ ID NO: 1005100
guacagaguaauuuaaccc

SEQ ID NO: 1005102 - RNA, 19 nt, Artificial Sequence
  Description of Artificial Sequence: Synthetic oligonucleotide
  Sense strand starting at position 2413 of SEQ ID NO: 914453
guuaaauuacucuguacaa

SEQ ID NO: 1005103 - RNA, 19 nt, Artificial Sequence
  Description of Artificial Sequence: Synthetic oligonucleotide
  Antisense strand to SEQ ID NO: 1005102
uuguacagaguaauuuaac

SEQ ID NO: 1005104 - RNA, 19 nt, Artificial Sequence
  Description of Artificial Sequence: Synthetic oligonucleotide
  Sense strand starting at position 2516 of SEQ ID NO: 914453
cuuaacuuauucguggauu

SEQ ID NO: 1005105 - RNA, 19 nt, Artificial Sequence
  Description of Artificial Sequence: Synthetic oligonucleotide
  Antisense strand to SEQ ID NO: 1005104
aauccacgaauaaguuaag

SEQ ID NO: 1005106 - RNA, 19 nt, Artificial Sequence
  Description of Artificial Sequence: Synthetic oligonucleotide
  Sense strand starting at position 2518 of SEQ ID NO: 914453
uaacuuauucguggauuau

SEQ ID NO: 1005107 - RNA, 19 nt, Artificial Sequence
  Description of Artificial Sequence: Synthetic oligonucleotide
  Antisense strand to SEQ ID NO: 1005106
auaauccacgaauaaguua

SEQ ID NO: 1005108 - RNA, 19 nt, Artificial Sequence
  Description of Artificial Sequence: Synthetic oligonucleotide
  Sense strand starting at position 2519 of SEQ ID NO: 914453
aacuuauucguggauuauc

SEQ ID NO: 1005109 - RNA, 19 nt, Artificial Sequence
  Description of Artificial Sequence: Synthetic oligonucleotide
  Antisense strand to SEQ ID NO: 1005108
gauaauccacgaauaaguu

SEQ ID NO: 1005110 - RNA, 19 nt, Artificial Sequence
  Description of Artificial Sequence: Synthetic oligonucleotide
  Sense strand starting at position 2524 of SEQ ID NO: 914453
auucguggauuaucacuua

SEQ ID NO: 1005111 - RNA, 19 nt, Artificial Sequence
  Description of Artificial Sequence: Synthetic oligonucleotide
  Antisense strand to SEQ ID NO: 1005110
uaagugauaauccacgaau

SEQ ID NO: 1005112 - RNA, 19 nt, Artificial Sequence
  Description of Artificial Sequence: Synthetic oligonucleotide
  Sense strand starting at position 2527 of SEQ ID NO: 914453
cguggauuaucacuuacua

SEQ ID NO: 1005113 - RNA, 19 nt, Artificial Sequence
  Description of Artificial Sequence: Synthetic oligonucleotide
  Antisense strand to SEQ ID NO: 1005112
uaguaagugauaauccacg

SEQ ID NO: 1005114 - RNA, 19 nt, Artificial Sequence
  Description of Artificial Sequence: Synthetic oligonucleotide
  Sense strand starting at position 2658 of SEQ ID NO: 914453
aauguauucccuugugaug

SEQ ID NO: 1005115 - RNA, 19 nt, Artificial Sequence
  Description of Artificial Sequence: Synthetic oligonucleotide
  Antisense strand to SEQ ID NO: 1005114
caucacaagggaauacauu

SEQ ID NO: 1005116 - RNA, 19 nt, Artificial Sequence
  Description of Artificial Sequence: Synthetic oligonucleotide
  Sense strand starting at position 2799 of SEQ ID NO: 914453
agcuauguugaagaguaaa

SEQ ID NO: 1005117 - RNA, 19 nt, Artificial Sequence
  Description of Artificial Sequence: Synthetic oligonucleotide
  Antisense strand to SEQ ID NO: 1005116
uuuacucuucaacauagcu

SEQ ID NO: 1005118 - RNA, 19 nt, Artificial Sequence
  Description of Artificial Sequence: Synthetic oligonucleotide
  Sense strand starting at position 2843 of SEQ ID NO: 914453
uuuaguaaguuacugacua

SEQ ID NO: 1005119 - RNA, 19 nt, Artificial Sequence
  Description of Artificial Sequence: Synthetic oligonucleotide
  Antisense strand to SEQ ID NO: 1005118
uagucaguaacuuacuaaa

SEQ ID NO: 1005120 - RNA, 19 nt, Artificial Sequence
  Description of Artificial Sequence: Synthetic oligonucleotide
  Sense strand starting at position 2847 of SEQ ID NO: 914453
guaaguuacugacuaguuu

SEQ ID NO: 1005121 - RNA, 19 nt, Artificial Sequence
  Description of Artificial Sequence: Synthetic oligonucleotide
  Antisense strand to SEQ ID NO: 1005120
aaacuagucaguaacuuac

SEQ ID NO: 1005122 - RNA, 19 nt, Artificial Sequence
  Description of Artificial Sequence: Synthetic oligonucleotide
  Sense strand starting at position 2851 of SEQ ID NO: 914453
guuacugacuaguuuguca

SEQ ID NO: 1005123 - RNA, 19 nt, Artificial Sequence
  Description of Artificial Sequence: Synthetic oligonucleotide
  Antisense strand to SEQ ID NO: 1005122
ugacaaacuagucaguaac

SEQ ID NO: 1005124 - RNA, 19 nt, Artificial Sequence
  Description of Artificial Sequence: Synthetic oligonucleotide
  Sense strand starting at position 2858 of SEQ ID NO: 914453
acuaguuugucauuguaau

SEQ ID NO: 1005125 - RNA, 19 nt, Artificial Sequence
  Description of Artificial Sequence: Synthetic oligonucleotide
  Antisense strand to SEQ ID NO: 1005124
auuacaaugacaaacuagu

SEQ ID NO: 1005126 - RNA, 19 nt, Artificial Sequence
  Description of Artificial Sequence: Synthetic oligonucleotide
  Sense strand starting at position 2864 of SEQ ID NO: 914453
uugucauuguaaucaaaga

SEQ ID NO: 1005127 - RNA, 19 nt, Artificial Sequence
  Description of Artificial Sequence: Synthetic oligonucleotide
  Antisense strand to SEQ ID NO: 1005126
ucuuugauuacaaugacaa

SEQ ID NO: 1005128 - RNA, 19 nt, Artificial Sequence
  Description of Artificial Sequence: Synthetic oligonucleotide
  Sense strand starting at position 3049 of SEQ ID NO: 914453
uguuguucuugaucuuaca

SEQ ID NO: 1005129 - RNA, 19 nt, Artificial Sequence
  Description of Artificial Sequence: Synthetic oligonucleotide
  Antisense strand to SEQ ID NO: 1005128
uguaagaucaagaacaaca

SEQ ID NO: 1005130 - RNA, 19 nt, Artificial Sequence
  Description of Artificial Sequence: Synthetic oligonucleotide
  Sense strand starting at position 3128 of SEQ ID NO: 914453
gccacaaauugaucuuuag

SEQ ID NO: 1005131 - RNA, 19 nt, Artificial Sequence
  Description of Artificial Sequence: Synthetic oligonucleotide
  Antisense strand to SEQ ID NO: 1005130
cuaaagaucaauuuguggc

SEQ ID NO: 1005132 - RNA, 19 nt, Artificial Sequence
  Description of Artificial Sequence: Synthetic oligonucleotide
  Sense strand starting at position 3187 of SEQ ID NO: 914453
gcuguuggcuguguaauuu

SEQ ID NO: 1005133 - RNA, 19 nt, Artificial Sequence
  Description of Artificial Sequence: Synthetic oligonucleotide
  Antisense strand to SEQ ID NO: 1005132
aaauuacacagccaacagc

SEQ ID NO: 1005134 - RNA, 19 nt, Artificial Sequence
  Description of Artificial Sequence: Synthetic oligonucleotide
  Sense strand starting at position 3195 of SEQ ID NO: 914453
cuguguaauuuggugucuu

SEQ ID NO: 1005135 - RNA, 19 nt, Artificial Sequence
  Description of Artificial Sequence: Synthetic oligonucleotide
  Antisense strand to SEQ ID NO: 1005134
aagacaccaaauuacacag

SEQ ID NO: 1005136 - RNA, 19 nt, Artificial Sequence
  Description of Artificial Sequence: Synthetic oligonucleotide
  Sense strand starting at position 3244 of SEQ ID NO: 914453
cuguaaacuccaugugggu

SEQ ID NO: 1005137 - RNA, 19 nt, Artificial Sequence
  Description of Artificial Sequence: Synthetic oligonucleotide
  Antisense strand to SEQ ID NO: 1005136
acccacauggaguuuacag

SEQ ID NO: 1005138 - RNA, 19 nt, Artificial Sequence
  Description of Artificial Sequence: Synthetic oligonucleotide
  Sense strand starting at position 3306 of SEQ ID NO: 914453
cagggacuauucucagcuu

SEQ ID NO: 1005139 - RNA, 19 nt, Artificial Sequence
  Description of Artificial Sequence: Synthetic oligonucleotide
  Antisense strand to SEQ ID NO: 1005138
aagcugagaauagucccug

SEQ ID NO: 1005140 - RNA, 19 nt, Artificial Sequence
  Description of Artificial Sequence: Synthetic oligonucleotide
  Sense strand starting at position 3445 of SEQ ID NO: 914453
acagcuauuaagggauagu

SEQ ID NO: 1005141 - RNA, 19 nt, Artificial Sequence
  Description of Artificial Sequence: Synthetic oligonucleotide
  Antisense strand to SEQ ID NO: 1005140
acuaucccuuaauagcugu

SEQ ID NO: 1005142 - RNA, 19 nt, Artificial Sequence
  Description of Artificial Sequence: Synthetic oligonucleotide
  Sense strand starting at position 3495 of SEQ ID NO: 914453
aguccacaguuuguugaau

SEQ ID NO: 1005143 - RNA, 19 nt, Artificial Sequence
  Description of Artificial Sequence: Synthetic oligonucleotide
  Antisense strand to SEQ ID NO: 1005142
auucaacaaacuguggacu

SEQ ID NO: 1005144 - RNA, 19 nt, Artificial Sequence
  Description of Artificial Sequence: Synthetic oligonucleotide
  Sense strand starting at position 3496 of SEQ ID NO: 914453
guccacaguuuguugaaua

SEQ ID NO: 1005145 - RNA, 19 nt, Artificial Sequence
  Description of Artificial Sequence: Synthetic oligonucleotide
  Antisense strand to SEQ ID NO: 1005144
uauucaacaaacuguggac

SEQ ID NO: 1005146 - RNA, 19 nt, Artificial Sequence
  Description of Artificial Sequence: Synthetic oligonucleotide
  Sense strand starting at position 3521 of SEQ ID NO: 914453
uguugaaauaaucgagcaa

SEQ ID NO: 1005147 - RNA, 19 nt, Artificial Sequence
  Description of Artificial Sequence: Synthetic oligonucleotide
  Antisense strand to SEQ ID NO: 1005146
uugcucgauuauuucaaca

SEQ ID NO: 1005148 - RNA, 19 nt, Artificial Sequence
  Description of Artificial Sequence: Synthetic oligonucleotide
  Sense strand starting at position 3522 of SEQ ID NO: 914453
guugaaauaaucgagcaaa

SEQ ID NO: 1005149 - RNA, 19 nt, Artificial Sequence
  Description of Artificial Sequence: Synthetic oligonucleotide
  Antisense strand to SEQ ID NO: 1005148
uuugcucgauuauuucaac

SEQ ID NO: 1005150 - RNA, 19 nt, Artificial Sequence
  Description of Artificial Sequence: Synthetic oligonucleotide
  Sense strand starting at position 3592 of SEQ ID NO: 914453
ggagucauuucuuaaccuu

SEQ ID NO: 1005151 - RNA, 19 nt, Artificial Sequence
  Description of Artificial Sequence: Synthetic oligonucleotide
  Antisense strand to SEQ ID NO: 1005150
aagguuaagaaaugacucc

SEQ ID NO: 1005152 - RNA, 19 nt, Artificial Sequence
  Description of Artificial Sequence: Synthetic oligonucleotide
  Sense strand starting at position 3708 of SEQ ID NO: 914453
aaacaagacugguuucuga

SEQ ID NO: 1005153 - RNA, 19 nt, Artificial Sequence
  Description of Artificial Sequence: Synthetic oligonucleotide
  Antisense strand to SEQ ID NO: 1005152
ucagaaaccagucuuguuu

SEQ ID NO: 1005154 - RNA, 19 nt, Artificial Sequence
  Description of Artificial Sequence: Synthetic oligonucleotide
  Sense strand starting at position 60 of SEQ ID NO: 914454
gccuguugucauguuuauu

SEQ ID NO: 1005155 - RNA, 19 nt, Artificial Sequence
  Description of Artificial Sequence: Synthetic oligonucleotide
  Antisense strand to SEQ ID NO: 1005154
aauaaacaugacaacaggc

SEQ ID NO: 1005156 - RNA, 19 nt, Artificial Sequence
  Description of Artificial Sequence: Synthetic oligonucleotide
  Sense strand starting at position 63 of SEQ ID NO: 914454
uguugucauguuuauugaa

SEQ ID NO: 1005157 - RNA, 19 nt, Artificial Sequence
  Description of Artificial Sequence: Synthetic oligonucleotide
  Antisense strand to SEQ ID NO: 1005156
uucaauaaacaugacaaca

SEQ ID NO: 1005158 - RNA, 19 nt, Artificial Sequence
  Description of Artificial Sequence: Synthetic oligonucleotide
  Sense strand starting at position 65 of SEQ ID NO: 914454
uugucauguuuauugaacu

SEQ ID NO: 1005159 - RNA, 19 nt, Artificial Sequence
  Description of Artificial Sequence: Synthetic oligonucleotide
  Antisense strand to SEQ ID NO: 1005158
aguucaauaaacaugacaa

SEQ ID NO: 1005160 - RNA, 19 nt, Artificial Sequence
  Description of Artificial Sequence: Synthetic oligonucleotide
  Sense strand starting at position 77 of SEQ ID NO: 914454
uugaacuacuaggaagaaa

SEQ ID NO: 1005161 - RNA, 19 nt, Artificial Sequence
  Description of Artificial Sequence: Synthetic oligonucleotide
  Antisense strand to SEQ ID NO: 1005160
uuucuuccuaguaguucaa

SEQ ID NO: 1005162 - RNA, 19 nt, Artificial Sequence
  Description of Artificial Sequence: Synthetic oligonucleotide
  Sense strand starting at position 264 of SEQ ID NO: 914454
acaggaugaucugugguca

SEQ ID NO: 1005163 - RNA, 19 nt, Artificial Sequence
  Description of Artificial Sequence: Synthetic oligonucleotide
  Antisense strand to SEQ ID NO: 1005162
ugaccacagaucauccugu

SEQ ID NO: 1005164 - RNA, 19 nt, Artificial Sequence
  Description of Artificial Sequence: Synthetic oligonucleotide
  Sense strand starting at position 268 of SEQ ID NO: 914454
gaugaucuguggucagcua

SEQ ID NO: 1005165 - RNA, 19 nt, Artificial Sequence
  Description of Artificial Sequence: Synthetic oligonucleotide
  Antisense strand to SEQ ID NO: 1005164
uagcugaccacagaucauc

SEQ ID NO: 1005166 - RNA, 19 nt, Artificial Sequence
  Description of Artificial Sequence: Synthetic oligonucleotide
  Sense strand starting at position 269 of SEQ ID NO: 914454
augaucuguggucagcuaa

SEQ ID NO: 1005167 - RNA, 19 nt, Artificial Sequence
  Description of Artificial Sequence: Synthetic oligonucleotide
  Antisense strand to SEQ ID NO: 1005166
uuagcugaccacagaucau

SEQ ID NO: 1005168 - RNA, 19 nt, Artificial Sequence
  Description of Artificial Sequence: Synthetic oligonucleotide
  Sense strand starting at position 373 of SEQ ID NO: 914454
acccacauuggaugaguau

SEQ ID NO: 1005169 - RNA, 19 nt, Artificial Sequence
  Description of Artificial Sequence: Synthetic oligonucleotide
  Antisense strand to SEQ ID NO: 1005168
auacucauccaaugugggu

SEQ ID NO: 1005170 - RNA, 19 nt, Artificial Sequence
  Description of Artificial Sequence: Synthetic oligonucleotide
  Sense strand starting at position 376 of SEQ ID NO: 914454
cacauuggaugaguaucaa

SEQ ID NO: 1005171 - RNA, 19 nt, Artificial Sequence
  Description of Artificial Sequence: Synthetic oligonucleotide
  Antisense strand to SEQ ID NO: 1005170
uugauacucauccaaugug

SEQ ID NO: 1005172 - RNA, 19 nt, Artificial Sequence
  Description of Artificial Sequence: Synthetic oligonucleotide
  Sense strand starting at position 396 of SEQ ID NO: 914454
guuugacugguagacauau

SEQ ID NO: 1005173 - RNA, 19 nt, Artificial Sequence
  Description of Artificial Sequence: Synthetic oligonucleotide
  Antisense strand to SEQ ID NO: 1005172
auaugucuaccagucaaac

SEQ ID NO: 1005174 - RNA, 19 nt, Artificial Sequence
  Description of Artificial Sequence: Synthetic oligonucleotide
  Sense strand starting at position 688 of SEQ ID NO: 914454
ucugaauguuugguggaga

SEQ ID NO: 1005175 - RNA, 19 nt, Artificial Sequence
  Description of Artificial Sequence: Synthetic oligonucleotide
  Antisense strand to SEQ ID NO: 1005174
ucuccaccaaacauucaga

SEQ ID NO: 1005176 - RNA, 19 nt, Artificial Sequence
  Description of Artificial Sequence: Synthetic oligonucleotide
  Sense strand starting at position 701 of SEQ ID NO: 914454
uggagauauccuggguaug

SEQ ID NO: 1005177 - RNA, 19 nt, Artificial Sequence
  Description of Artificial Sequence: Synthetic oligonucleotide
  Antisense strand to SEQ ID NO: 1005176
cauacccaggauaucucca

SEQ ID NO: 1005178 - RNA, 19 nt, Artificial Sequence
  Description of Artificial Sequence: Synthetic oligonucleotide
  Sense strand starting at position 702 of SEQ ID NO: 914454
ggagauauccuggguaugg

SEQ ID NO: 1005179 - RNA, 19 nt, Artificial Sequence
  Description of Artificial Sequence: Synthetic oligonucleotide
  Antisense strand to SEQ ID NO: 1005178
ccauacccaggauaucucc

SEQ ID NO: 1005180 - RNA, 19 nt, Artificial Sequence
  Description of Artificial Sequence: Synthetic oligonucleotide
  Sense strand starting at position 726 of SEQ ID NO: 914454
uuuggacaucugggugaca

SEQ ID NO: 1005181 - RNA, 19 nt, Artificial Sequence
  Description of Artificial Sequence: Synthetic oligonucleotide
  Antisense strand to SEQ ID NO: 1005180
ugucacccagauguccaaa

SEQ ID NO: 1005182 - RNA, 19 nt, Artificial Sequence
  Description of Artificial Sequence: Synthetic oligonucleotide
  Sense strand starting at position 1046 of SEQ ID NO: 914454
ggugaucaccuugguggua

SEQ ID NO: 1005183 - RNA, 19 nt, Artificial Sequence
  Description of Artificial Sequence: Synthetic oligonucleotide
  Antisense strand to SEQ ID NO: 1005182
uaccaccaaggugaucacc

SEQ ID NO: 1005184 - RNA, 19 nt, Artificial Sequence
  Description of Artificial Sequence: Synthetic oligonucleotide
  Sense strand starting at position 1067 of SEQ ID NO: 914454
cgcugugauagucagauau

SEQ ID NO: 1005185 - RNA, 19 nt, Artificial Sequence
  Description of Artificial Sequence: Synthetic oligonucleotide
  Antisense strand to SEQ ID NO: 1005184
auaucugacuaucacagcg

SEQ ID NO: 1005186 - RNA, 19 nt, Artificial Sequence
  Description of Artificial Sequence: Synthetic oligonucleotide
  Sense strand starting at position 1118 of SEQ ID NO: 914454
gggaaauggucucuccgug

SEQ ID NO: 1005187 - RNA, 19 nt, Artificial Sequence
  Description of Artificial Sequence: Synthetic oligonucleotide
  Antisense strand to SEQ ID NO: 1005186
cacggagagaccauuuccc

SEQ ID NO: 1005188 - RNA, 19 nt, Artificial Sequence
  Description of Artificial Sequence: Synthetic oligonucleotide
  Sense strand starting at position 1122 of SEQ ID NO: 914454
aauggucucuccgugauga

SEQ ID NO: 1005189 - RNA, 19 nt, Artificial Sequence
  Description of Artificial Sequence: Synthetic oligonucleotide
  Antisense strand to SEQ ID NO: 1005188
ucaucacggagagaccauu

SEQ ID NO: 1005190 - RNA, 19 nt, Artificial Sequence
  Description of Artificial Sequence: Synthetic oligonucleotide
  Sense strand starting at position 1141 of SEQ ID NO: 914454
ggagacuuuccaugcuggu

SEQ ID NO: 1005191 - RNA, 19 nt, Artificial Sequence
  Description of Artificial Sequence: Synthetic oligonucleotide
  Antisense strand to SEQ ID NO: 1005190
accagcauggaaagucucc

SEQ ID NO: 1005192 - RNA, 19 nt, Artificial Sequence
  Description of Artificial Sequence: Synthetic oligonucleotide
  Sense strand starting at position 1372 of SEQ ID NO: 914454
gaggaauagugggauaaau

SEQ ID NO: 1005193 - RNA, 19 nt, Artificial Sequence
  Description of Artificial Sequence: Synthetic oligonucleotide
  Antisense strand to SEQ ID NO: 1005192
auuuaucccacuauuccuc

SEQ ID NO: 1005194 - RNA, 19 nt, Artificial Sequence
  Description of Artificial Sequence: Synthetic oligonucleotide
  Sense strand starting at position 1381 of SEQ ID NO: 914454
ugggauaaauucucaccga

SEQ ID NO: 1005195 - RNA, 19 nt, Artificial Sequence
  Description of Artificial Sequence: Synthetic oligonucleotide
  Antisense strand to SEQ ID NO: 1005194
ucggugagaauuuauccca

SEQ ID NO: 1005196 - RNA, 19 nt, Artificial Sequence
  Description of Artificial Sequence: Synthetic oligonucleotide
  Sense strand starting at position 1385 of SEQ ID NO: 914454
auaaauucucaccgagaua

SEQ ID NO: 1005197 - RNA, 19 nt, Artificial Sequence
  Description of Artificial Sequence: Synthetic oligonucleotide
  Antisense strand to SEQ ID NO: 1005196
uaucucggugagaauuuau

SEQ ID NO: 1005198 - RNA, 19 nt, Artificial Sequence
  Description of Artificial Sequence: Synthetic oligonucleotide
  Sense strand starting at position 1502 of SEQ ID NO: 914454
guuggagcucaucauggua

SEQ ID NO: 1005199 - RNA, 19 nt, Artificial Sequence
  Description of Artificial Sequence: Synthetic oligonucleotide
  Antisense strand to SEQ ID NO: 1005198
uaccaugaugagcuccaac

SEQ ID NO: 1005200 - RNA, 19 nt, Artificial Sequence
  Description of Artificial Sequence: Synthetic oligonucleotide
  Sense strand starting at position 1514 of SEQ ID NO: 914454
caugguaguccucaccgua

SEQ ID NO: 1005201 - RNA, 19 nt, Artificial Sequence
  Description of Artificial Sequence: Synthetic oligonucleotide
  Antisense strand to SEQ ID NO: 1005200
uacggugaggacuaccaug

SEQ ID NO: 1005202 - RNA, 19 nt, Artificial Sequence
  Description of Artificial Sequence: Synthetic oligonucleotide
  Sense strand starting at position 1625 of SEQ ID NO: 914454
ggugagauugguggacaug

SEQ ID NO: 1005203 - RNA, 19 nt, Artificial Sequence
  Description of Artificial Sequence: Synthetic oligonucleotide
  Antisense strand to SEQ ID NO: 1005202
cauguccaccaaucucacc

SEQ ID NO: 1005204 - RNA, 19 nt, Artificial Sequence
  Description of Artificial Sequence: Synthetic oligonucleotide
  Sense strand starting at position 1687 of SEQ ID NO: 914454
uggugagauucaccacguu

SEQ ID NO: 1005205 - RNA, 19 nt, Artificial Sequence
  Description of Artificial Sequence: Synthetic oligonucleotide
  Antisense strand to SEQ ID NO: 1005204
aacguggugaaucucacca

SEQ ID NO: 1005206 - RNA, 19 nt, Artificial Sequence
  Description of Artificial Sequence: Synthetic oligonucleotide
  Sense strand starting at position 1793 of SEQ ID NO: 914454
gaaagaaccuaucugcguu

SEQ ID NO: 1005207 - RNA, 19 nt, Artificial Sequence
  Description of Artificial Sequence: Synthetic oligonucleotide
  Antisense strand to SEQ ID NO: 1005206
aacgcagauagguucuuuc

SEQ ID NO: 1005208 - RNA, 19 nt, Artificial Sequence
  Description of Artificial Sequence: Synthetic oligonucleotide
  Sense strand starting at position 1807 of SEQ ID NO: 914454
gcguuauuggugucugccu

SEQ ID NO: 1005209 - RNA, 19 nt, Artificial Sequence
  Description of Artificial Sequence: Synthetic oligonucleotide
  Antisense strand to SEQ ID NO: 1005208
aggcagacaccaauaacgc

SEQ ID NO: 1005210 - RNA, 19 nt, Artificial Sequence
  Description of Artificial Sequence: Synthetic oligonucleotide
  Sense strand starting at position 1976 of SEQ ID NO: 914454
uccagaaaggccugacuau

SEQ ID NO: 1005211 - RNA, 19 nt, Artificial Sequence
  Description of Artificial Sequence: Synthetic oligonucleotide
  Antisense strand to SEQ ID NO: 1005210
auagucaggccuuucugga

SEQ ID NO: 1005212 - RNA, 19 nt, Artificial Sequence
  Description of Artificial Sequence: Synthetic oligonucleotide
  Sense strand starting at position 1989 of SEQ ID NO: 914454
gacuauucucguggaacuc

SEQ ID NO: 1005213 - RNA, 19 nt, Artificial Sequence
  Description of Artificial Sequence: Synthetic oligonucleotide
  Antisense strand to SEQ ID NO: 1005212
gaguuccacgagaauaguc

SEQ ID NO: 1005214 - RNA, 19 nt, Artificial Sequence
  Description of Artificial Sequence: Synthetic oligonucleotide
  Sense strand starting at position 2227 of SEQ ID NO: 914454
agcccuguuguuggaaaga

SEQ ID NO: 1005215 - RNA, 19 nt, Artificial Sequence
  Description of Artificial Sequence: Synthetic oligonucleotide
  Antisense strand to SEQ ID NO: 1005214
ucuuuccaacaacagggcu

SEQ ID NO: 1005216 - RNA, 19 nt, Artificial Sequence
  Description of Artificial Sequence: Synthetic oligonucleotide
  Sense strand starting at position 2251 of SEQ ID NO: 914454
guccaagugguccagucuu

SEQ ID NO: 1005217 - RNA, 19 nt, Artificial Sequence
  Description of Artificial Sequence: Synthetic oligonucleotide
  Antisense strand to SEQ ID NO: 1005216
aagacuggaccacuuggac

SEQ ID NO: 1005218 - RNA, 19 nt, Artificial Sequence
  Description of Artificial Sequence: Synthetic oligonucleotide
  Sense strand starting at position 2310 of SEQ ID NO: 914454
gccugacucccucauaagu

SEQ ID NO: 1005219 - RNA, 19 nt, Artificial Sequence
  Description of Artificial Sequence: Synthetic oligonucleotide
  Antisense strand to SEQ ID NO: 1005218
acuuaugagggagucaggc

SEQ ID NO: 1005220 - RNA, 19 nt, Artificial Sequence
  Description of Artificial Sequence: Synthetic oligonucleotide
  Sense strand starting at position 2343 of SEQ ID NO: 914454
gggcuuguugcugaacuuu

SEQ ID NO: 1005221 - RNA, 19 nt, Artificial Sequence
  Description of Artificial Sequence: Synthetic oligonucleotide
  Antisense strand to SEQ ID NO: 1005220
aaaguucagcaacaagccc

SEQ ID NO: 1005222 - RNA, 19 nt, Artificial Sequence
  Description of Artificial Sequence: Synthetic oligonucleotide
  Sense strand starting at position 2856 of SEQ ID NO: 914454
cggcaugaucuccacucau

SEQ ID NO: 1005223 - RNA, 19 nt, Artificial Sequence
  Description of Artificial Sequence: Synthetic oligonucleotide
  Antisense strand to SEQ ID NO: 1005222
augaguggagaucaugccg

SEQ ID NO: 1005224 - RNA, 19 nt, Artificial Sequence
  Description of Artificial Sequence: Synthetic oligonucleotide
  Sense strand starting at position 3272 of SEQ ID NO: 914454
acauguuaauuggcauuau

SEQ ID NO: 1005225 - RNA, 19 nt, Artificial Sequence
  Description of Artificial Sequence: Synthetic oligonucleotide
  Antisense strand to SEQ ID NO: 1005224
auaaugccaauuaacaugu

SEQ ID NO: 1005226 - RNA, 19 nt, Artificial Sequence
  Description of Artificial Sequence: Synthetic oligonucleotide
  Sense strand starting at position 3317 of SEQ ID NO: 914454
ccuuuaggguuauuaccaa

SEQ ID NO: 1005227 - RNA, 19 nt, Artificial Sequence
  Description of Artificial Sequence: Synthetic oligonucleotide
  Antisense strand to SEQ ID NO: 1005226
uugguaauaacccuaaagg

SEQ ID NO: 1005228 - RNA, 19 nt, Artificial Sequence
  Description of Artificial Sequence: Synthetic oligonucleotide
  Sense strand starting at position 3768 of SEQ ID NO: 914454
ggugcuauggcucagagaa

SEQ ID NO: 1005229 - RNA, 19 nt, Artificial Sequence
  Description of Artificial Sequence: Synthetic oligonucleotide
  Antisense strand to SEQ ID NO: 1005228
uucucugagccauagcacc

SEQ ID NO: 1005230 - RNA, 19 nt, Artificial Sequence
  Description of Artificial Sequence: Synthetic oligonucleotide
  Sense strand starting at position 3784 of SEQ ID NO: 914454
gaauauaaaugaguugcuu

SEQ ID NO: 1005231 - RNA, 19 nt, Artificial Sequence
  Description of Artificial Sequence: Synthetic oligonucleotide
  Antisense strand to SEQ ID NO: 1005230
aagcaacucauuuauauuc

SEQ ID NO: 1005232 - RNA, 19 nt, Artificial Sequence
  Description of Artificial Sequence: Synthetic oligonucleotide
  Sense strand starting at position 3790 of SEQ ID NO: 914454
aaaugaguugcuugaugaa

SEQ ID NO: 1005233 - RNA, 19 nt, Artificial Sequence
  Description of Artificial Sequence: Synthetic oligonucleotide
  Antisense strand to SEQ ID NO: 1005232
uucaucaagcaacucauuu

SEQ ID NO: 1005234 - RNA, 19 nt, Artificial Sequence
  Description of Artificial Sequence: Synthetic oligonucleotide
  Sense strand starting at position 79 of SEQ ID NO: 914455
uuugaauaucuucgaugug

SEQ ID NO: 1005235 - RNA, 19 nt, Artificial Sequence
  Description of Artificial Sequence: Synthetic oligonucleotide
  Antisense strand to SEQ ID NO: 1005234
cacaucgaagauauucaaa

SEQ ID NO: 1005236 - RNA, 19 nt, Artificial Sequence
  Description of Artificial Sequence: Synthetic oligonucleotide
  Sense strand starting at position 82 of SEQ ID NO: 914455
gaauaucuucgauguguuu

SEQ ID NO: 1005237 - RNA, 19 nt, Artificial Sequence
  Description of Artificial Sequence: Synthetic oligonucleotide
  Antisense strand to SEQ ID NO: 1005236
aaacacaucgaagauauuc

SEQ ID NO: 1005238 - RNA, 19 nt, Artificial Sequence
  Description of Artificial Sequence: Synthetic oligonucleotide
  Sense strand starting at position 141 of SEQ ID NO: 914455
ccuaaacuuucuguaagga

SEQ ID NO: 1005239 - RNA, 19 nt, Artificial Sequence
  Description of Artificial Sequence: Synthetic oligonucleotide
  Antisense strand to SEQ ID NO: 1005238
uccuuacagaaaguuuagg

SEQ ID NO: 1005240 - RNA, 19 nt, Artificial Sequence
  Description of Artificial Sequence: Synthetic oligonucleotide
  Sense strand starting at position 216 of SEQ ID NO: 914455
acgaauacuugugucauua

SEQ ID NO: 1005241 - RNA, 19 nt, Artificial Sequence
  Description of Artificial Sequence: Synthetic oligonucleotide
  Antisense strand to SEQ ID NO: 1005240
uaaugacacaaguauucgu

SEQ ID NO: 1005242 - RNA, 19 nt, Artificial Sequence
  Description of Artificial Sequence: Synthetic oligonucleotide
  Sense strand starting at position 303 of SEQ ID NO: 914455
gcacuacuggaguguuaau

SEQ ID NO: 1005243 - RNA, 19 nt, Artificial Sequence
  Description of Artificial Sequence: Synthetic oligonucleotide
  Antisense strand to SEQ ID NO: 1005242
auuaacacuccaguagugc

SEQ ID NO: 1005244 - RNA, 19 nt, Artificial Sequence
  Description of Artificial Sequence: Synthetic oligonucleotide
  Sense strand starting at position 394 of SEQ ID NO: 914455
cgguuucuaguccaaagca

SEQ ID NO: 1005245 - RNA, 19 nt, Artificial Sequence
  Description of Artificial Sequence: Synthetic oligonucleotide
  Antisense strand to SEQ ID NO: 1005244
ugcuuuggacuagaaaccg

SEQ ID NO: 1005246 - RNA, 19 nt, Artificial Sequence
  Description of Artificial Sequence: Synthetic oligonucleotide
  Sense strand starting at position 418 of SEQ ID NO: 914455
ugaagaacuuuacagaaga

SEQ ID NO: 1005247 - RNA, 19 nt, Artificial Sequence
  Description of Artificial Sequence: Synthetic oligonucleotide
  Antisense strand to SEQ ID NO: 1005246
ucuucuguaaaguucuuca

SEQ ID NO: 1005248 - RNA, 19 nt, Artificial Sequence
  Description of Artificial Sequence: Synthetic oligonucleotide
  Sense strand starting at position 510 of SEQ ID NO: 914455
cgugccagauacuucuaau

SEQ ID NO: 1005249 - RNA, 19 nt, Artificial Sequence
  Description of Artificial Sequence: Synthetic oligonucleotide
  Antisense strand to SEQ ID NO: 1005248
auuagaaguaucuggcacg

SEQ ID NO: 1005250 - RNA, 19 nt, Artificial Sequence
  Description of Artificial Sequence: Synthetic oligonucleotide
  Sense strand starting at position 830 of SEQ ID NO: 914455
ucagaaccguuaccagaaa

SEQ ID NO: 1005251 - RNA, 19 nt, Artificial Sequence
  Description of Artificial Sequence: Synthetic oligonucleotide
  Antisense strand to SEQ ID NO: 1005250
uuucugguaacgguucuga

SEQ ID NO: 1005252 - RNA, 19 nt, Artificial Sequence
  Description of Artificial Sequence: Synthetic oligonucleotide
  Sense strand starting at position 878 of SEQ ID NO: 914455
ggaggaaguuauuaagaag

SEQ ID NO: 1005253 - RNA, 19 nt, Artificial Sequence
  Description of Artificial Sequence: Synthetic oligonucleotide
  Antisense strand to SEQ ID NO: 1005252
cuucuuaauaacuuccucc

SEQ ID NO: 1005254 - RNA, 19 nt, Artificial Sequence
  Description of Artificial Sequence: Synthetic oligonucleotide
  Sense strand starting at position 960 of SEQ ID NO: 914455
cagaacuugugguuuaauc

SEQ ID NO: 1005255 - RNA, 19 nt, Artificial Sequence
  Description of Artificial Sequence: Synthetic oligonucleotide
  Antisense strand to SEQ ID NO: 1005254
gauuaaaccacaaguucug

SEQ ID NO: 1005256 - RNA, 19 nt, Artificial Sequence
  Description of Artificial Sequence: Synthetic oligonucleotide
  Sense strand starting at position 962 of SEQ ID NO: 914455
gaacuugugguuuaaucag

SEQ ID NO: 1005257 - RNA, 19 nt, Artificial Sequence
  Description of Artificial Sequence: Synthetic oligonucleotide
  Antisense strand to SEQ ID NO: 1005256
cugauuaaaccacaaguuc

SEQ ID NO: 1005258 - RNA, 19 nt, Artificial Sequence
  Description of Artificial Sequence: Synthetic oligonucleotide
  Sense strand starting at position 969 of SEQ ID NO: 914455
ugguuuaaucagugcauau

SEQ ID NO: 1005259 - RNA, 19 nt, Artificial Sequence
  Description of Artificial Sequence: Synthetic oligonucleotide
  Antisense strand to SEQ ID NO: 1005258
auaugcacugauuaaacca

SEQ ID NO: 1005260 - RNA, 19 nt, Artificial Sequence
  Description of Artificial Sequence: Synthetic oligonucleotide
  Sense strand starting at position 971 of SEQ ID NO: 914455
guuuaaucagugcauaucu

SEQ ID NO: 1005261 - RNA, 19 nt, Artificial Sequence
  Description of Artificial Sequence: Synthetic oligonucleotide
  Antisense strand to SEQ ID NO: 1005260
agauaugcacugauuaaac

SEQ ID NO: 1005262 - RNA, 19 nt, Artificial Sequence
  Description of Artificial Sequence: Synthetic oligonucleotide
  Sense strand starting at position 1014 of SEQ ID NO: 914455
aguguuucugaggguaaca

SEQ ID NO: 1005263 - RNA, 19 nt, Artificial Sequence
  Description of Artificial Sequence: Synthetic oligonucleotide
  Antisense strand to SEQ ID NO: 1005262
uguuacccucagaaacacu

SEQ ID NO: 1005264 - RNA, 19 nt, Artificial Sequence
  Description of Artificial Sequence: Synthetic oligonucleotide
  Sense strand starting at position 1058 of SEQ ID NO: 914455
ggaggaaaguucuuuccuu

SEQ ID NO: 1005265 - RNA, 19 nt, Artificial Sequence
  Description of Artificial Sequence: Synthetic oligonucleotide
  Antisense strand to SEQ ID NO: 1005264
aaggaaagaacuuuccucc

SEQ ID NO: 1005266 - RNA, 19 nt, Artificial Sequence
  Description of Artificial Sequence: Synthetic oligonucleotide
  Sense strand starting at position 1059 of SEQ ID NO: 914455
gaggaaaguucuuuccuug

SEQ ID NO: 1005267 - RNA, 19 nt, Artificial Sequence
  Description of Artificial Sequence: Synthetic oligonucleotide
  Antisense strand to SEQ ID NO: 1005266
caaggaaagaacuuuccuc

SEQ ID NO: 1005268 - RNA, 19 nt, Artificial Sequence
  Description of Artificial Sequence: Synthetic oligonucleotide
  Sense strand starting at position 1116 of SEQ ID NO: 914455
acaucuuaaugagaaagga

SEQ ID NO: 1005269 - RNA, 19 nt, Artificial Sequence
  Description of Artificial Sequence: Synthetic oligonucleotide
  Antisense strand to SEQ ID NO: 1005268
uccuuucucauuaagaugu

SEQ ID NO: 1005270 - RNA, 19 nt, Artificial Sequence
  Description of Artificial Sequence: Synthetic oligonucleotide
  Sense strand starting at position 1295 of SEQ ID NO: 914455
aggccaauuccgugaccua

SEQ ID NO: 1005271 - RNA, 19 nt, Artificial Sequence
  Description of Artificial Sequence: Synthetic oligonucleotide
  Antisense strand to SEQ ID NO: 1005270
uaggucacggaauuggccu

SEQ ID NO: 1005272 - RNA, 19 nt, Artificial Sequence
  Description of Artificial Sequence: Synthetic oligonucleotide
  Sense strand starting at position 1298 of SEQ ID NO: 914455
ccaauuccgugaccuacau

SEQ ID NO: 1005273 - RNA, 19 nt, Artificial Sequence
  Description of Artificial Sequence: Synthetic oligonucleotide
  Antisense strand to SEQ ID NO: 1005272
auguaggucacggaauugg

SEQ ID NO: 1005274 - RNA, 19 nt, Artificial Sequence
  Description of Artificial Sequence: Synthetic oligonucleotide
  Sense strand starting at position 1369 of SEQ ID NO: 914455
cccacugacuucccaguua

SEQ ID NO: 1005275 - RNA, 19 nt, Artificial Sequence
  Description of Artificial Sequence: Synthetic oligonucleotide
  Antisense strand to SEQ ID NO: 1005274
uaacugggaagucaguggg

SEQ ID NO: 1005276 - RNA, 19 nt, Artificial Sequence
  Description of Artificial Sequence: Synthetic oligonucleotide
  Sense strand starting at position 2442 of SEQ ID NO: 914455
gggucaugggaauguuuaa

SEQ ID NO: 1005277 - RNA, 19 nt, Artificial Sequence
  Description of Artificial Sequence: Synthetic oligonucleotide
  Antisense strand to SEQ ID NO: 1005276
uuaaacauucccaugaccc

SEQ ID NO: 1005278 - RNA, 19 nt, Artificial Sequence
  Description of Artificial Sequence: Synthetic oligonucleotide
  Sense strand starting at position 2528 of SEQ ID NO: 914455
ggaaaucgagcuuagaguu

SEQ ID NO: 1005279 - RNA, 19 nt, Artificial Sequence
  Description of Artificial Sequence: Synthetic oligonucleotide
  Antisense strand to SEQ ID NO: 1005278
aacucuaagcucgauuucc

SEQ ID NO: 1005280 - RNA, 19 nt, Artificial Sequence
  Description of Artificial Sequence: Synthetic oligonucleotide
  Sense strand starting at position 2534 of SEQ ID NO: 914455
cgagcuuagaguuauuugu

SEQ ID NO: 1005281 - RNA, 19 nt, Artificial Sequence
  Description of Artificial Sequence: Synthetic oligonucleotide
  Antisense strand to SEQ ID NO: 1005280
acaaauaacucuaagcucg

SEQ ID NO: 1005282 - RNA, 19 nt, Artificial Sequence
  Description of Artificial Sequence: Synthetic oligonucleotide
  Sense strand starting at position 2536 of SEQ ID NO: 914455
agcuuagaguuauuuguuu

SEQ ID NO: 1005283 - RNA, 19 nt, Artificial Sequence
  Description of Artificial Sequence: Synthetic oligonucleotide
  Antisense strand to SEQ ID NO: 1005282
aaacaaauaacucuaagcu

SEQ ID NO: 1005284 - RNA, 19 nt, Artificial Sequence
  Description of Artificial Sequence: Synthetic oligonucleotide
  Sense strand starting at position 2789 of SEQ ID NO: 914455
uuggcuugugaagacuagu

SEQ ID NO: 1005285 - RNA, 19 nt, Artificial Sequence
  Description of Artificial Sequence: Synthetic oligonucleotide
  Antisense strand to SEQ ID NO: 1005284
acuagucuucacaagccaa

SEQ ID NO: 1005286 - RNA, 19 nt, Artificial Sequence
  Description of Artificial Sequence: Synthetic oligonucleotide
  Sense strand starting at position 2795 of SEQ ID NO: 914455
ugugaagacuaguuacguu

SEQ ID NO: 1005287 - RNA, 19 nt, Artificial Sequence
  Description of Artificial Sequence: Synthetic oligonucleotide
  Antisense strand to SEQ ID NO: 1005286
aacguaacuagucuucaca

SEQ ID NO: 1005288 - RNA, 19 nt, Artificial Sequence
  Description of Artificial Sequence: Synthetic oligonucleotide
  Sense strand starting at position 2803 of SEQ ID NO: 914455
cuaguuacguuucugggaa

SEQ ID NO: 1005289 - RNA, 19 nt, Artificial Sequence
  Description of Artificial Sequence: Synthetic oligonucleotide
  Antisense strand to SEQ ID NO: 1005288
uucccagaaacguaacuag

SEQ ID NO: 1005290 - RNA, 19 nt, Artificial Sequence
  Description of Artificial Sequence: Synthetic oligonucleotide
  Sense strand starting at position 2811 of SEQ ID NO: 914455
guuucugggaauugaaucu

SEQ ID NO: 1005291 - RNA, 19 nt, Artificial Sequence
  Description of Artificial Sequence: Synthetic oligonucleotide
  Antisense strand to SEQ ID NO: 1005290
agauucaauucccagaaac

SEQ ID NO: 1005292 - RNA, 19 nt, Artificial Sequence
  Description of Artificial Sequence: Synthetic oligonucleotide
  Sense strand starting at position 2818 of SEQ ID NO: 914455
ggaauugaaucucaaacau

SEQ ID NO: 1005293 - RNA, 19 nt, Artificial Sequence
  Description of Artificial Sequence: Synthetic oligonucleotide
  Antisense strand to SEQ ID NO: 1005292
auguuugagauucaauucc

SEQ ID NO: 1005294 - RNA, 19 nt, Artificial Sequence
  Description of Artificial Sequence: Synthetic oligonucleotide
  Sense strand starting at position 3135 of SEQ ID NO: 914455
guaucaguuccgccuucga

SEQ ID NO: 1005295 - RNA, 19 nt, Artificial Sequence
  Description of Artificial Sequence: Synthetic oligonucleotide
  Antisense strand to SEQ ID NO: 1005294
ucgaaggcggaacugauac

SEQ ID NO: 1005296 - RNA, 19 nt, Artificial Sequence
  Description of Artificial Sequence: Synthetic oligonucleotide
  Sense strand starting at position 3171 of SEQ ID NO: 914455
ccacaaagcccuugacaga

SEQ ID NO: 1005297 - RNA, 19 nt, Artificial Sequence
  Description of Artificial Sequence: Synthetic oligonucleotide
  Antisense strand to SEQ ID NO: 1005296
ucugucaagggcuuugugg

SEQ ID NO: 1005298 - RNA, 19 nt, Artificial Sequence
  Description of Artificial Sequence: Synthetic oligonucleotide
  Sense strand starting at position 3197 of SEQ ID NO: 914455
guuaaauuuauccggugcu

SEQ ID NO: 1005299 - RNA, 19 nt, Artificial Sequence
  Description of Artificial Sequence: Synthetic oligonucleotide
  Antisense strand to SEQ ID NO: 1005298
agcaccggauaaauuuaac

SEQ ID NO: 1005300 - RNA, 19 nt, Artificial Sequence
  Description of Artificial Sequence: Synthetic oligonucleotide
  Sense strand starting at position 3275 of SEQ ID NO: 914455
gcaauuuaaucgccuuuau

SEQ ID NO: 1005301 - RNA, 19 nt, Artificial Sequence
  Description of Artificial Sequence: Synthetic oligonucleotide
  Antisense strand to SEQ ID NO: 1005300
auaaaggcgauuaaauugc

SEQ ID NO: 1005302 - RNA, 19 nt, Artificial Sequence
  Description of Artificial Sequence: Synthetic oligonucleotide
  Sense strand starting at position 3285 of SEQ ID NO: 914455
cgccuuuaucuagaauuga

SEQ ID NO: 1005303 - RNA, 19 nt, Artificial Sequence
  Description of Artificial Sequence: Synthetic oligonucleotide
  Antisense strand to SEQ ID NO: 1005302
ucaauucuagauaaaggcg

SEQ ID NO: 1005304 - RNA, 19 nt, Artificial Sequence
  Description of Artificial Sequence: Synthetic oligonucleotide
  Sense strand starting at position 3503 of SEQ ID NO: 914455
accauaggcuuccuaaagu

SEQ ID NO: 1005305 - RNA, 19 nt, Artificial Sequence
  Description of Artificial Sequence: Synthetic oligonucleotide
  Antisense strand to SEQ ID NO: 1005304
acuuuaggaagccuauggu

SEQ ID NO: 1005306 - RNA, 19 nt, Artificial Sequence
  Description of Artificial Sequence: Synthetic oligonucleotide
  Sense strand starting at position 3558 of SEQ ID NO: 914455
cucccauugccucgggaau

SEQ ID NO: 1005307 - RNA, 19 nt, Artificial Sequence
  Description of Artificial Sequence: Synthetic oligonucleotide
  Antisense strand to SEQ ID NO: 1005306
auucccgaggcaaugggag

SEQ ID NO: 1005308 - RNA, 19 nt, Artificial Sequence
  Description of Artificial Sequence: Synthetic oligonucleotide
  Sense strand starting at position 3559 of SEQ ID NO: 914455
ucccauugccucgggaaua

SEQ ID NO: 1005309 - RNA, 19 nt, Artificial Sequence
  Description of Artificial Sequence: Synthetic oligonucleotide
  Antisense strand to SEQ ID NO: 1005308
uauucccgaggcaauggga

SEQ ID NO: 1005310 - RNA, 19 nt, Artificial Sequence
  Description of Artificial Sequence: Synthetic oligonucleotide
  Sense strand starting at position 3581 of SEQ ID NO: 914455
uugacaaguugcucuaacu

SEQ ID NO: 1005311 - RNA, 19 nt, Artificial Sequence
  Description of Artificial Sequence: Synthetic oligonucleotide
  Antisense strand to SEQ ID NO: 1005310
aguuagagcaacuugucaa

SEQ ID NO: 1005312 - RNA, 19 nt, Artificial Sequence
  Description of Artificial Sequence: Synthetic oligonucleotide
  Sense strand starting at position 3604 of SEQ ID NO: 914455
gcuaaacaaccuuguaguu

SEQ ID NO: 1005313 - RNA, 19 nt, Artificial Sequence
  Description of Artificial Sequence: Synthetic oligonucleotide
  Antisense strand to SEQ ID NO: 1005312
aacuacaagguuguuuagc

SEQ ID NO: 1005314 - RNA, 19 nt, Artificial Sequence
  Description of Artificial Sequence: Synthetic oligonucleotide
  Sense strand starting at position 177 of SEQ ID NO: 914456
acacuuuccugggucacau

SEQ ID NO: 1005315 - RNA, 19 nt, Artificial Sequence
  Description of Artificial Sequence: Synthetic oligonucleotide
  Antisense strand to SEQ ID NO: 1005314
augugacccaggaaagugu

SEQ ID NO: 1005316 - RNA, 19 nt, Artificial Sequence
  Description of Artificial Sequence: Synthetic oligonucleotide
  Sense strand starting at position 216 of SEQ ID NO: 914456
uugauugagcauuauauuc

SEQ ID NO: 1005317 - RNA, 19 nt, Artificial Sequence
  Description of Artificial Sequence: Synthetic oligonucleotide
  Antisense strand to SEQ ID NO: 1005316
gaauauaaugcucaaucaa

SEQ ID NO: 1005318 - RNA, 19 nt, Artificial Sequence
  Description of Artificial Sequence: Synthetic oligonucleotide
  Sense strand starting at position 221 of SEQ ID NO: 914456
ugagcauuauauucuuaga

SEQ ID NO: 1005319 - RNA, 19 nt, Artificial Sequence
  Description of Artificial Sequence: Synthetic oligonucleotide
  Antisense strand to SEQ ID NO: 1005318
ucuaagaauauaaugcuca

SEQ ID NO: 1005320 - RNA, 19 nt, Artificial Sequence
  Description of Artificial Sequence: Synthetic oligonucleotide
  Sense strand starting at position 550 of SEQ ID NO: 914456
gaugauaaaugacauuugu

SEQ ID NO: 1005321 - RNA, 19 nt, Artificial Sequence
  Description of Artificial Sequence: Synthetic oligonucleotide
  Antisense strand to SEQ ID NO: 1005320
acaaaugucauuuaucauc

SEQ ID NO: 1005322 - RNA, 19 nt, Artificial Sequence
  Description of Artificial Sequence: Synthetic oligonucleotide
  Sense strand starting at position 563 of SEQ ID NO: 914456
auuuguucucuacgcucaa

SEQ ID NO: 1005323 - RNA, 19 nt, Artificial Sequence
  Description of Artificial Sequence: Synthetic oligonucleotide
  Antisense strand to SEQ ID NO: 1005322
uugagcguagagaacaaau

SEQ ID NO: 1005324 - RNA, 19 nt, Artificial Sequence
  Description of Artificial Sequence: Synthetic oligonucleotide
  Sense strand starting at position 724 of SEQ ID NO: 914456
uuucucagauuaucagagu

SEQ ID NO: 1005325 - RNA, 19 nt, Artificial Sequence
  Description of Artificial Sequence: Synthetic oligonucleotide
  Antisense strand to SEQ ID NO: 1005324
acucugauaaucugagaaa

SEQ ID NO: 1005326 - RNA, 19 nt, Artificial Sequence
  Description of Artificial Sequence: Synthetic oligonucleotide
  Sense strand starting at position 894 of SEQ ID NO: 914456
uuaugucuugggcauaaca

SEQ ID NO: 1005327 - RNA, 19 nt, Artificial Sequence
  Description of Artificial Sequence: Synthetic oligonucleotide
  Antisense strand to SEQ ID NO: 1005326
uguuaugcccaagacauaa

SEQ ID NO: 1005328 - RNA, 19 nt, Artificial Sequence
  Description of Artificial Sequence: Synthetic oligonucleotide
  Sense strand starting at position 915 of SEQ ID NO: 914456
caaucaagagucugaagua

SEQ ID NO: 1005329 - RNA, 19 nt, Artificial Sequence
  Description of Artificial Sequence: Synthetic oligonucleotide
  Antisense strand to SEQ ID NO: 1005328
uacuucagacucuugauug

SEQ ID NO: 1005330 - RNA, 19 nt, Artificial Sequence
  Description of Artificial Sequence: Synthetic oligonucleotide
  Sense strand starting at position 989 of SEQ ID NO: 914456
auauuauaguaggugagua

SEQ ID NO: 1005331 - RNA, 19 nt, Artificial Sequence
  Description of Artificial Sequence: Synthetic oligonucleotide
  Antisense strand to SEQ ID NO: 1005330
uacucaccuacuauaauau

SEQ ID NO: 1005332 - RNA, 19 nt, Artificial Sequence
  Description of Artificial Sequence: Synthetic oligonucleotide
  Sense strand starting at position 991 of SEQ ID NO: 914456
auuauaguaggugaguaau

SEQ ID NO: 1005333 - RNA, 19 nt, Artificial Sequence
  Description of Artificial Sequence: Synthetic oligonucleotide
  Antisense strand to SEQ ID NO: 1005332
auuacucaccuacuauaau

SEQ ID NO: 1005334 - RNA, 19 nt, Artificial Sequence
  Description of Artificial Sequence: Synthetic oligonucleotide
  Sense strand starting at position 993 of SEQ ID NO: 914456
uauaguaggugaguaauaa

SEQ ID NO: 1005335 - RNA, 19 nt, Artificial Sequence
  Description of Artificial Sequence: Synthetic oligonucleotide
  Antisense strand to SEQ ID NO: 1005334
uuauuacucaccuacuaua

SEQ ID NO: 1005336 - RNA, 19 nt, Artificial Sequence
  Description of Artificial Sequence: Synthetic oligonucleotide
  Sense strand starting at position 1069 of SEQ ID NO: 914456
auccuaaugcaagagcaua

SEQ ID NO: 1005337 - RNA, 19 nt, Artificial Sequence
  Description of Artificial Sequence: Synthetic oligonucleotide
  Antisense strand to SEQ ID NO: 1005336
uaugcucuugcauuaggau

SEQ ID NO: 1005338 - RNA, 19 nt, Artificial Sequence
  Description of Artificial Sequence: Synthetic oligonucleotide
  Sense strand starting at position 1608 of SEQ ID NO: 914456
aguugccuucuagaagaaa

SEQ ID NO: 1005339 - RNA, 19 nt, Artificial Sequence
  Description of Artificial Sequence: Synthetic oligonucleotide
  Antisense strand to SEQ ID NO: 1005338
uuucuucuagaaggcaacu

SEQ ID NO: 1005340 - RNA, 19 nt, Artificial Sequence
  Description of Artificial Sequence: Synthetic oligonucleotide
  Sense strand starting at position 2073 of SEQ ID NO: 914456
gagguaucgucauuuccuc

SEQ ID NO: 1005341 - RNA, 19 nt, Artificial Sequence
  Description of Artificial Sequence: Synthetic oligonucleotide
  Antisense strand to SEQ ID NO: 1005340
gaggaaaugacgauaccuc

SEQ ID NO: 1005342 - RNA, 19 nt, Artificial Sequence
  Description of Artificial Sequence: Synthetic oligonucleotide
  Sense strand starting at position 2199 of SEQ ID NO: 914456
ccuaaaucccuccggaaag

SEQ ID NO: 1005343 - RNA, 19 nt, Artificial Sequence
  Description of Artificial Sequence: Synthetic oligonucleotide
  Antisense strand to SEQ ID NO: 1005342
cuuuccggagggauuuagg

SEQ ID NO: 1005344 - RNA, 19 nt, Artificial Sequence
  Description of Artificial Sequence: Synthetic oligonucleotide
  Sense strand starting at position 2314 of SEQ ID NO: 914456
cggcuuccuggagaaacaa

SEQ ID NO: 1005345 - RNA, 19 nt, Artificial Sequence
  Description of Artificial Sequence: Synthetic oligonucleotide
  Antisense strand to SEQ ID NO: 1005344
uuguuucuccaggaagccg

SEQ ID NO: 1005346 - RNA, 19 nt, Artificial Sequence
  Description of Artificial Sequence: Synthetic oligonucleotide
  Sense strand starting at position 2452 of SEQ ID NO: 914456
ugcuguaauccagagacac

SEQ ID NO: 1005347 - RNA, 19 nt, Artificial Sequence
  Description of Artificial Sequence: Synthetic oligonucleotide
  Antisense strand to SEQ ID NO: 1005346
gugucucuggauuacagca

SEQ ID NO: 1005348 - RNA, 19 nt, Artificial Sequence
  Description of Artificial Sequence: Synthetic oligonucleotide
  Sense strand starting at position 2470 of SEQ ID NO: 914456
cucaauuaucucuguagga

SEQ ID NO: 1005349 - RNA, 19 nt, Artificial Sequence
  Description of Artificial Sequence: Synthetic oligonucleotide
  Antisense strand to SEQ ID NO: 1005348
uccuacagagauaauugag

SEQ ID NO: 1005350 - RNA, 19 nt, Artificial Sequence
  Description of Artificial Sequence: Synthetic oligonucleotide
  Sense strand starting at position 2471 of SEQ ID NO: 914456
ucaauuaucucuguaggau

SEQ ID NO: 1005351 - RNA, 19 nt, Artificial Sequence
  Description of Artificial Sequence: Synthetic oligonucleotide
  Antisense strand to SEQ ID NO: 1005350
auccuacagagauaauuga

SEQ ID NO: 1005352 - RNA, 19 nt, Artificial Sequence
  Description of Artificial Sequence: Synthetic oligonucleotide
  Sense strand starting at position 2474 of SEQ ID NO: 914456
auuaucucuguaggauaau

SEQ ID NO: 1005353 - RNA, 19 nt, Artificial Sequence
  Description of Artificial Sequence: Synthetic oligonucleotide
  Antisense strand to SEQ ID NO: 1005352
auuauccuacagagauaau

SEQ ID NO: 1005354 - RNA, 19 nt, Artificial Sequence
  Description of Artificial Sequence: Synthetic oligonucleotide
  Sense strand starting at position 2528 of SEQ ID NO: 914456
uuuauaaaccaguacuguu

SEQ ID NO: 1005355 - RNA, 19 nt, Artificial Sequence
  Description of Artificial Sequence: Synthetic oligonucleotide
  Antisense strand to SEQ ID NO: 1005354
aacaguacugguuuauaaa

SEQ ID NO: 1005356 - RNA, 19 nt, Artificial Sequence
  Description of Artificial Sequence: Synthetic oligonucleotide
  Sense strand starting at position 2553 of SEQ ID NO: 914456
accggagauacauagcuau

SEQ ID NO: 1005357 - RNA, 19 nt, Artificial Sequence
  Description of Artificial Sequence: Synthetic oligonucleotide
  Antisense strand to SEQ ID NO: 1005356
auagcuauguaucuccggu

SEQ ID NO: 1005358 - RNA, 19 nt, Artificial Sequence
  Description of Artificial Sequence: Synthetic oligonucleotide
  Sense strand starting at position 2559 of SEQ ID NO: 914456
gauacauagcuaugaacga

SEQ ID NO: 1005359 - RNA, 19 nt, Artificial Sequence
  Description of Artificial Sequence: Synthetic oligonucleotide
  Antisense strand to SEQ ID NO: 1005358
ucguucauagcuauguauc

SEQ ID NO: 1005360 - RNA, 19 nt, Artificial Sequence
  Description of Artificial Sequence: Synthetic oligonucleotide
  Sense strand starting at position 2626 of SEQ ID NO: 914456
gcgaauaaacaaugaguaa

SEQ ID NO: 1005361 - RNA, 19 nt, Artificial Sequence
  Description of Artificial Sequence: Synthetic oligonucleotide
  Antisense strand to SEQ ID NO: 1005360
uuacucauuguuuauucgc

SEQ ID NO: 1005362 - RNA, 19 nt, Artificial Sequence
  Description of Artificial Sequence: Synthetic oligonucleotide
  Sense strand starting at position 2956 of SEQ ID NO: 914456
aggcaauccgaucaaacau

SEQ ID NO: 1005363 - RNA, 19 nt, Artificial Sequence
  Description of Artificial Sequence: Synthetic oligonucleotide
  Antisense strand to SEQ ID NO: 1005362
auguuugaucggauugccu

SEQ ID NO: 1005364 - RNA, 19 nt, Artificial Sequence
  Description of Artificial Sequence: Synthetic oligonucleotide
  Sense strand starting at position 3131 of SEQ ID NO: 914456
caguuaagggauugugaug

SEQ ID NO: 1005365 - RNA, 19 nt, Artificial Sequence
  Description of Artificial Sequence: Synthetic oligonucleotide
  Antisense strand to SEQ ID NO: 1005364
caucacaaucccuuaacug

SEQ ID NO: 1005366 - RNA, 19 nt, Artificial Sequence
  Description of Artificial Sequence: Synthetic oligonucleotide
  Sense strand starting at position 3224 of SEQ ID NO: 914456
ucaggaucuguugaagguu

SEQ ID NO: 1005367 - RNA, 19 nt, Artificial Sequence
  Description of Artificial Sequence: Synthetic oligonucleotide
  Antisense strand to SEQ ID NO: 1005366
aaccuucaacagauccuga

SEQ ID NO: 1005368 - RNA, 19 nt, Artificial Sequence
  Description of Artificial Sequence: Synthetic oligonucleotide
  Sense strand starting at position 3242 of SEQ ID NO: 914456
uuggauauggauuguguga

SEQ ID NO: 1005369 - RNA, 19 nt, Artificial Sequence
  Description of Artificial Sequence: Synthetic oligonucleotide
  Antisense strand to SEQ ID NO: 1005368
ucacacaauccauauccaa

SEQ ID NO: 1005370 - RNA, 19 nt, Artificial Sequence
  Description of Artificial Sequence: Synthetic oligonucleotide
  Sense strand starting at position 3250 of SEQ ID NO: 914456
ggauugugugagggagaga

SEQ ID NO: 1005371 - RNA, 19 nt, Artificial Sequence
  Description of Artificial Sequence: Synthetic oligonucleotide
  Antisense strand to SEQ ID NO: 1005370
ucucucccucacacaaucc

SEQ ID NO: 1005372 - RNA, 19 nt, Artificial Sequence
  Description of Artificial Sequence: Synthetic oligonucleotide
  Sense strand starting at position 3309 of SEQ ID NO: 914456
ggaugaaauuacuauuuac

SEQ ID NO: 1005373 - RNA, 19 nt, Artificial Sequence
  Description of Artificial Sequence: Synthetic oligonucleotide
  Antisense strand to SEQ ID NO: 1005372
guaaauaguaauuucaucc

SEQ ID NO: 1005374 - RNA, 19 nt, Artificial Sequence
  Description of Artificial Sequence: Synthetic oligonucleotide
  Sense strand starting at position 3319 of SEQ ID NO: 914456
acuauuuacugagauagug

SEQ ID NO: 1005375 - RNA, 19 nt, Artificial Sequence
  Description of Artificial Sequence: Synthetic oligonucleotide
  Antisense strand to SEQ ID NO: 1005374
cacuaucucaguaaauagu

SEQ ID NO: 1005376 - RNA, 19 nt, Artificial Sequence
  Description of Artificial Sequence: Synthetic oligonucleotide
  Sense strand starting at position 3460 of SEQ ID NO: 914456
aggguucugggcuacaaau

SEQ ID NO: 1005377 - RNA, 19 nt, Artificial Sequence
  Description of Artificial Sequence: Synthetic oligonucleotide
  Antisense strand to SEQ ID NO: 1005376
auuuguagcccagaacccu

SEQ ID NO: 1005378 - RNA, 19 nt, Artificial Sequence
  Description of Artificial Sequence: Synthetic oligonucleotide
  Sense strand starting at position 3462 of SEQ ID NO: 914456
gguucugggcuacaaauau

SEQ ID NO: 1005379 - RNA, 19 nt, Artificial Sequence
  Description of Artificial Sequence: Synthetic oligonucleotide
  Antisense strand to SEQ ID NO: 1005378
auauuuguagcccagaacc

SEQ ID NO: 1005380 - RNA, 19 nt, Artificial Sequence
  Description of Artificial Sequence: Synthetic oligonucleotide
  Sense strand starting at position 3491 of SEQ ID NO: 914456
gucguuagccuguagauuu

SEQ ID NO: 1005381 - RNA, 19 nt, Artificial Sequence
  Description of Artificial Sequence: Synthetic oligonucleotide
  Antisense strand to SEQ ID NO: 1005380
aaaucuacaggcuaacgac

SEQ ID NO: 1005382 - RNA, 19 nt, Artificial Sequence
  Description of Artificial Sequence: Synthetic oligonucleotide
  Sense strand starting at position 3585 of SEQ ID NO: 914456
aggguaugucaguauuaca

SEQ ID NO: 1005383 - RNA, 19 nt, Artificial Sequence
  Description of Artificial Sequence: Synthetic oligonucleotide
  Antisense strand to SEQ ID NO: 1005382
uguaauacugacauacccu

SEQ ID NO: 1005384 - RNA, 19 nt, Artificial Sequence
  Description of Artificial Sequence: Synthetic oligonucleotide
  Sense strand starting at position 3671 of SEQ ID NO: 914456
aaacuaugagggugugaua

SEQ ID NO: 1005385 - RNA, 19 nt, Artificial Sequence
  Description of Artificial Sequence: Synthetic oligonucleotide
  Antisense strand to SEQ ID NO: 1005384
uaucacacccucauaguuu

SEQ ID NO: 1005386 - RNA, 19 nt, Artificial Sequence
  Description of Artificial Sequence: Synthetic oligonucleotide
  Sense strand starting at position 3690 of SEQ ID NO: 914456
ccuugaaagccaggugaaa

SEQ ID NO: 1005387 - RNA, 19 nt, Artificial Sequence
  Description of Artificial Sequence: Synthetic oligonucleotide
  Antisense strand to SEQ ID NO: 1005386
uuucaccuggcuuucaagg

SEQ ID NO: 1005388 - RNA, 19 nt, Artificial Sequence
  Description of Artificial Sequence: Synthetic oligonucleotide
  Sense strand starting at position 3800 of SEQ ID NO: 914456
ccauguggaagugauugau

SEQ ID NO: 1005389 - RNA, 19 nt, Artificial Sequence
  Description of Artificial Sequence: Synthetic oligonucleotide
  Antisense strand to SEQ ID NO: 1005388
aucaaucacuuccacaugg

SEQ ID NO: 1005390 - RNA, 19 nt, Artificial Sequence
  Description of Artificial Sequence: Synthetic oligonucleotide
  Sense strand starting at position 3803 of SEQ ID NO: 914456
uguggaagugauugauaac

SEQ ID NO: 1005391 - RNA, 19 nt, Artificial Sequence
  Description of Artificial Sequence: Synthetic oligonucleotide
  Antisense strand to SEQ ID NO: 1005390
guuaucaaucacuuccaca

SEQ ID NO: 1005392 - RNA, 19 nt, Artificial Sequence
  Description of Artificial Sequence: Synthetic oligonucleotide
  Sense strand starting at position 3838 of SEQ ID NO: 914456
ucuuuagaguaguuggaga

SEQ ID NO: 1005393 - RNA, 19 nt, Artificial Sequence
  Description of Artificial Sequence: Synthetic oligonucleotide
  Antisense strand to SEQ ID NO: 1005392
ucuccaacuacucuaaaga

SEQ ID NO: 1005394 - RNA, 19 nt, Artificial Sequence
  Description of Artificial Sequence: Synthetic oligonucleotide
  Sense strand starting at position 180 of SEQ ID NO: 914457
ggcuccucauuauuaagaa

SEQ ID NO: 1005395 - RNA, 19 nt, Artificial Sequence
  Description of Artificial Sequence: Synthetic oligonucleotide
  Antisense strand to SEQ ID NO: 1005394
uucuuaauaaugaggagcc

SEQ ID NO: 1005396 - RNA, 19 nt, Artificial Sequence
  Description of Artificial Sequence: Synthetic oligonucleotide
  Sense strand starting at position 930 of SEQ ID NO: 914457
gaugguuagggucaacuua

SEQ ID NO: 1005397 - RNA, 19 nt, Artificial Sequence
  Description of Artificial Sequence: Synthetic oligonucleotide
  Antisense strand to SEQ ID NO: 1005396
uaaguugacccuaaccauc

SEQ ID NO: 1005398 - RNA, 19 nt, Artificial Sequence
  Description of Artificial Sequence: Synthetic oligonucleotide
  Sense strand starting at position 1465 of SEQ ID NO: 914457
gcugaauucucucuggagg

SEQ ID NO: 1005399 - RNA, 19 nt, Artificial Sequence
  Description of Artificial Sequence: Synthetic oligonucleotide
  Antisense strand to SEQ ID NO: 1005398
ccuccagagagaauucagc

SEQ ID NO: 1005400 - RNA, 19 nt, Artificial Sequence
  Description of Artificial Sequence: Synthetic oligonucleotide
  Sense strand starting at position 1466 of SEQ ID NO: 914457
cugaauucucucuggagga

SEQ ID NO: 1005401 - RNA, 19 nt, Artificial Sequence
  Description of Artificial Sequence: Synthetic oligonucleotide
  Antisense strand to SEQ ID NO: 1005400
uccuccagagagaauucag

SEQ ID NO: 1005402 - RNA, 19 nt, Artificial Sequence
  Description of Artificial Sequence: Synthetic oligonucleotide
  Sense strand starting at position 1616 of SEQ ID NO: 914457
ccuugcuguccugggagaa

SEQ ID NO: 1005403 - RNA, 19 nt, Artificial Sequence
  Description of Artificial Sequence: Synthetic oligonucleotide
  Antisense strand to SEQ ID NO: 1005402
uucucccaggacagcaagg

SEQ ID NO: 1005404 - RNA, 19 nt, Artificial Sequence
  Description of Artificial Sequence: Synthetic oligonucleotide
  Sense strand starting at position 1617 of SEQ ID NO: 914457
cuugcuguccugggagaag

SEQ ID NO: 1005405 - RNA, 19 nt, Artificial Sequence
  Description of Artificial Sequence: Synthetic oligonucleotide
  Antisense strand to SEQ ID NO: 1005404
cuucucccaggacagcaag

SEQ ID NO: 1005406 - RNA, 19 nt, Artificial Sequence
  Description of Artificial Sequence: Synthetic oligonucleotide
  Sense strand starting at position 1667 of SEQ ID NO: 914457
ggaugcuuuccugagcuuu

SEQ ID NO: 1005407 - RNA, 19 nt, Artificial Sequence
  Description of Artificial Sequence: Synthetic oligonucleotide
  Antisense strand to SEQ ID NO: 1005406
aaagcucaggaaagcaucc

SEQ ID NO: 1005408 - RNA, 19 nt, Artificial Sequence
  Description of Artificial Sequence: Synthetic oligonucleotide
  Sense strand starting at position 1678 of SEQ ID NO: 914457
ugagcuuuagacugaacca

SEQ ID NO: 1005409 - RNA, 19 nt, Artificial Sequence
  Description of Artificial Sequence: Synthetic oligonucleotide
  Antisense strand to SEQ ID NO: 1005408
ugguucagucuaaagcuca

SEQ ID NO: 1005410 - RNA, 19 nt, Artificial Sequence
  Description of Artificial Sequence: Synthetic oligonucleotide
  Sense strand starting at position 1694 of SEQ ID NO: 914457
ccaggagacucuccugagu

SEQ ID NO: 1005411 - RNA, 19 nt, Artificial Sequence
  Description of Artificial Sequence: Synthetic oligonucleotide
  Antisense strand to SEQ ID NO: 1005410
acucaggagagucuccugg

SEQ ID NO: 1005412 - RNA, 19 nt, Artificial Sequence
  Description of Artificial Sequence: Synthetic oligonucleotide
  Sense strand starting at position 1699 of SEQ ID NO: 914457
agacucuccugaguccaaa

SEQ ID NO: 1005413 - RNA, 19 nt, Artificial Sequence
  Description of Artificial Sequence: Synthetic oligonucleotide
  Antisense strand to SEQ ID NO: 1005412
uuuggacucaggagagucu

SEQ ID NO: 1005414 - RNA, 19 nt, Artificial Sequence
  Description of Artificial Sequence: Synthetic oligonucleotide
  Sense strand starting at position 1819 of SEQ ID NO: 914457
gcugacucuguacagaagu

SEQ ID NO: 1005415 - RNA, 19 nt, Artificial Sequence
  Description of Artificial Sequence: Synthetic oligonucleotide
  Antisense strand to SEQ ID NO: 1005414
acuucuguacagagucagc

SEQ ID NO: 1005416 - RNA, 19 nt, Artificial Sequence
  Description of Artificial Sequence: Synthetic oligonucleotide
  Sense strand starting at position 1832 of SEQ ID NO: 914457
agaagucauuccuugcaac

SEQ ID NO: 1005417 - RNA, 19 nt, Artificial Sequence
  Description of Artificial Sequence: Synthetic oligonucleotide
  Antisense strand to SEQ ID NO: 1005416
guugcaaggaaugacuucu

SEQ ID NO: 1005418 - RNA, 19 nt, Artificial Sequence
  Description of Artificial Sequence: Synthetic oligonucleotide
  Sense strand starting at position 2202 of SEQ ID NO: 914457
agggucaguucuuuccuua

SEQ ID NO: 1005419 - RNA, 19 nt, Artificial Sequence
  Description of Artificial Sequence: Synthetic oligonucleotide
  Antisense strand to SEQ ID NO: 1005418
uaaggaaagaacugacccu

SEQ ID NO: 1005420 - RNA, 19 nt, Artificial Sequence
  Description of Artificial Sequence: Synthetic oligonucleotide
  Sense strand starting at position 2229 of SEQ ID NO: 914457
uccuaaguauaguuugaaa

SEQ ID NO: 1005421 - RNA, 19 nt, Artificial Sequence
  Description of Artificial Sequence: Synthetic oligonucleotide
  Antisense strand to SEQ ID NO: 1005420
uuucaaacuauacuuagga

SEQ ID NO: 1005422 - RNA, 19 nt, Artificial Sequence
  Description of Artificial Sequence: Synthetic oligonucleotide
  Sense strand starting at position 2260 of SEQ ID NO: 914457
ggaggucgauuaguuauga

SEQ ID NO: 1005423 - RNA, 19 nt, Artificial Sequence
  Description of Artificial Sequence: Synthetic oligonucleotide
  Antisense strand to SEQ ID NO: 1005422
ucauaacuaaucgaccucc

SEQ ID NO: 1005424 - RNA, 19 nt, Artificial Sequence
  Description of Artificial Sequence: Synthetic oligonucleotide
  Sense strand starting at position 2261 of SEQ ID NO: 914457
gaggucgauuaguuaugau

SEQ ID NO: 1005425 - RNA, 19 nt, Artificial Sequence
  Description of Artificial Sequence: Synthetic oligonucleotide
  Antisense strand to SEQ ID NO: 1005424
aucauaacuaaucgaccuc

SEQ ID NO: 1005426 - RNA, 19 nt, Artificial Sequence
  Description of Artificial Sequence: Synthetic oligonucleotide
  Sense strand starting at position 2425 of SEQ ID NO: 914457
augacauuaguaggcuuaa

SEQ ID NO: 1005427 - RNA, 19 nt, Artificial Sequence
  Description of Artificial Sequence: Synthetic oligonucleotide
  Antisense strand to SEQ ID NO: 1005426
uuaagccuacuaaugucau

SEQ ID NO: 1005428 - RNA, 19 nt, Artificial Sequence
  Description of Artificial Sequence: Synthetic oligonucleotide
  Sense strand starting at position 2426 of SEQ ID NO: 914457
ugacauuaguaggcuuaaa

SEQ ID NO: 1005429 - RNA, 19 nt, Artificial Sequence
  Description of Artificial Sequence: Synthetic oligonucleotide
  Antisense strand to SEQ ID NO: 1005428
uuuaagccuacuaauguca

SEQ ID NO: 1005430 - RNA, 19 nt, Artificial Sequence
  Description of Artificial Sequence: Synthetic oligonucleotide
  Sense strand starting at position 2794 of SEQ ID NO: 914457
ggguaauaagugcaggaau

SEQ ID NO: 1005431 - RNA, 19 nt, Artificial Sequence
  Description of Artificial Sequence: Synthetic oligonucleotide
  Antisense strand to SEQ ID NO: 1005430
auuccugcacuuauuaccc

SEQ ID NO: 1005432 - RNA, 19 nt, Artificial Sequence
  Description of Artificial Sequence: Synthetic oligonucleotide
  Sense strand starting at position 2796 of SEQ ID NO: 914457
guaauaagugcaggaauag

SEQ ID NO: 1005433 - RNA, 19 nt, Artificial Sequence
  Description of Artificial Sequence: Synthetic oligonucleotide
  Antisense strand to SEQ ID NO: 1005432
cuauuccugcacuuauuac

SEQ ID NO: 1005434 - RNA, 19 nt, Artificial Sequence
  Description of Artificial Sequence: Synthetic oligonucleotide
  Sense strand starting at position 2811 of SEQ ID NO: 914457
auagguaguccagggaguu

SEQ ID NO: 1005435 - RNA, 19 nt, Artificial Sequence
  Description of Artificial Sequence: Synthetic oligonucleotide
  Antisense strand to SEQ ID NO: 1005434
aacucccuggacuaccuau

SEQ ID NO: 1005436 - RNA, 19 nt, Artificial Sequence
  Description of Artificial Sequence: Synthetic oligonucleotide
  Sense strand starting at position 2812 of SEQ ID NO: 914457
uagguaguccagggaguuu

SEQ ID NO: 1005437 - RNA, 19 nt, Artificial Sequence
  Description of Artificial Sequence: Synthetic oligonucleotide
  Antisense strand to SEQ ID NO: 1005436
aaacucccuggacuaccua

SEQ ID NO: 1005438 - RNA, 19 nt, Artificial Sequence
  Description of Artificial Sequence: Synthetic oligonucleotide
  Sense strand starting at position 2930 of SEQ ID NO: 914457
agacaagacaugugaguuu

SEQ ID NO: 1005439 - RNA, 19 nt, Artificial Sequence
  Description of Artificial Sequence: Synthetic oligonucleotide
  Antisense strand to SEQ ID NO: 1005438
aaacucacaugucuugucu

SEQ ID NO: 1005440 - RNA, 19 nt, Artificial Sequence
  Description of Artificial Sequence: Synthetic oligonucleotide
  Sense strand starting at position 2939 of SEQ ID NO: 914457
augugaguuugagucccaa

SEQ ID NO: 1005441 - RNA, 19 nt, Artificial Sequence
  Description of Artificial Sequence: Synthetic oligonucleotide
  Antisense strand to SEQ ID NO: 1005440
uugggacucaaacucacau

SEQ ID NO: 1005442 - RNA, 19 nt, Artificial Sequence
  Description of Artificial Sequence: Synthetic oligonucleotide
  Sense strand starting at position 2953 of SEQ ID NO: 914457
cccaacuguggauauguaa

SEQ ID NO: 1005443 - RNA, 19 nt, Artificial Sequence
  Description of Artificial Sequence: Synthetic oligonucleotide
  Antisense strand to SEQ ID NO: 1005442
uuacauauccacaguuggg

SEQ ID NO: 1005444 - RNA, 19 nt, Artificial Sequence
  Description of Artificial Sequence: Synthetic oligonucleotide
  Sense strand starting at position 2976 of SEQ ID NO: 914457
aggcgagccauuugacuuu

SEQ ID NO: 1005445 - RNA, 19 nt, Artificial Sequence
  Description of Artificial Sequence: Synthetic oligonucleotide
  Antisense strand to SEQ ID NO: 1005444
aaagucaaauggcucgccu

SEQ ID NO: 1005446 - RNA, 19 nt, Artificial Sequence
  Description of Artificial Sequence: Synthetic oligonucleotide
  Sense strand starting at position 2985 of SEQ ID NO: 914457
auuugacuuugcucagcau

SEQ ID NO: 1005447 - RNA, 19 nt, Artificial Sequence
  Description of Artificial Sequence: Synthetic oligonucleotide
  Antisense strand to SEQ ID NO: 1005446
augcugagcaaagucaaau

SEQ ID NO: 1005448 - RNA, 19 nt, Artificial Sequence
  Description of Artificial Sequence: Synthetic oligonucleotide
  Sense strand starting at position 3006 of SEQ ID NO: 914457
guuuccugaucuuuaauug

SEQ ID NO: 1005449 - RNA, 19 nt, Artificial Sequence
  Description of Artificial Sequence: Synthetic oligonucleotide
  Antisense strand to SEQ ID NO: 1005448
caauuaaagaucaggaaac

SEQ ID NO: 1005450 - RNA, 19 nt, Artificial Sequence
  Description of Artificial Sequence: Synthetic oligonucleotide
  Sense strand starting at position 3056 of SEQ ID NO: 914457
uuuagcugcguguuuacau

SEQ ID NO: 1005451 - RNA, 19 nt, Artificial Sequence
  Description of Artificial Sequence: Synthetic oligonucleotide
  Antisense strand to SEQ ID NO: 1005450
auguaaacacgcagcuaaa

SEQ ID NO: 1005452 - RNA, 19 nt, Artificial Sequence
  Description of Artificial Sequence: Synthetic oligonucleotide
  Sense strand starting at position 3122 of SEQ ID NO: 914457
ucccuugugugguugauuu

SEQ ID NO: 1005453 - RNA, 19 nt, Artificial Sequence
  Description of Artificial Sequence: Synthetic oligonucleotide
  Antisense strand to SEQ ID NO: 1005452
aaaucaaccacacaaggga

SEQ ID NO: 1005454 - RNA, 19 nt, Artificial Sequence
  Description of Artificial Sequence: Synthetic oligonucleotide
  Sense strand starting at position 3152 of SEQ ID NO: 914457
uugagacauugcuuuguga

SEQ ID NO: 1005455 - RNA, 19 nt, Artificial Sequence
  Description of Artificial Sequence: Synthetic oligonucleotide
  Antisense strand to SEQ ID NO: 1005454
ucacaaagcaaugucucaa

SEQ ID NO: 1005456 - RNA, 19 nt, Artificial Sequence
  Description of Artificial Sequence: Synthetic oligonucleotide
  Sense strand starting at position 3154 of SEQ ID NO: 914457
gagacauugcuuugugagg

SEQ ID NO: 1005457 - RNA, 19 nt, Artificial Sequence
  Description of Artificial Sequence: Synthetic oligonucleotide
  Antisense strand to SEQ ID NO: 1005456
ccucacaaagcaaugucuc

SEQ ID NO: 1005458 - RNA, 19 nt, Artificial Sequence
  Description of Artificial Sequence: Synthetic oligonucleotide
  Sense strand starting at position 3168 of SEQ ID NO: 914457
ugaggcucccuguagcaua

SEQ ID NO: 1005459 - RNA, 19 nt, Artificial Sequence
  Description of Artificial Sequence: Synthetic oligonucleotide
  Antisense strand to SEQ ID NO: 1005458
uaugcuacagggagccuca

SEQ ID NO: 1005460 - RNA, 19 nt, Artificial Sequence
  Description of Artificial Sequence: Synthetic oligonucleotide
  Sense strand starting at position 3173 of SEQ ID NO: 914457
cucccuguagcauagaguu

SEQ ID NO: 1005461 - RNA, 19 nt, Artificial Sequence
  Description of Artificial Sequence: Synthetic oligonucleotide
  Antisense strand to SEQ ID NO: 1005460
aacucuaugcuacagggag

SEQ ID NO: 1005462 - RNA, 19 nt, Artificial Sequence
  Description of Artificial Sequence: Synthetic oligonucleotide
  Sense strand starting at position 3208 of SEQ ID NO: 914457
aguggacuuguuugaccuu

SEQ ID NO: 1005463 - RNA, 19 nt, Artificial Sequence
  Description of Artificial Sequence: Synthetic oligonucleotide
  Antisense strand to SEQ ID NO: 1005462
aaggucaaacaaguccacu

SEQ ID NO: 1005464 - RNA, 19 nt, Artificial Sequence
  Description of Artificial Sequence: Synthetic oligonucleotide
  Sense strand starting at position 3226 of SEQ ID NO: 914457
ucuccugaguuuccuacau

SEQ ID NO: 1005465 - RNA, 19 nt, Artificial Sequence
  Description of Artificial Sequence: Synthetic oligonucleotide
  Antisense strand to SEQ ID NO: 1005464
auguaggaaacucaggaga

SEQ ID NO: 1005466 - RNA, 19 nt, Artificial Sequence
  Description of Artificial Sequence: Synthetic oligonucleotide
  Sense strand starting at position 3310 of SEQ ID NO: 914457
uccuguuugagccaggagu

SEQ ID NO: 1005467 - RNA, 19 nt, Artificial Sequence
  Description of Artificial Sequence: Synthetic oligonucleotide
  Antisense strand to SEQ ID NO: 1005466
acuccuggcucaaacagga

SEQ ID NO: 1005468 - RNA, 19 nt, Artificial Sequence
  Description of Artificial Sequence: Synthetic oligonucleotide
  Sense strand starting at position 3321 of SEQ ID NO: 914457
ccaggaguggcuggaagaa

SEQ ID NO: 1005469 - RNA, 19 nt, Artificial Sequence
  Description of Artificial Sequence: Synthetic oligonucleotide
  Antisense strand to SEQ ID NO: 1005468
uucuuccagccacuccugg

SEQ ID NO: 1005470 - RNA, 19 nt, Artificial Sequence
  Description of Artificial Sequence: Synthetic oligonucleotide
  Sense strand starting at position 3417 of SEQ ID NO: 914457
ccuggaggcuugccauuua

SEQ ID NO: 1005471 - RNA, 19 nt, Artificial Sequence
  Description of Artificial Sequence: Synthetic oligonucleotide
  Antisense strand to SEQ ID NO: 1005470
uaaauggcaagccuccagg

SEQ ID NO: 1005472 - RNA, 19 nt, Artificial Sequence
  Description of Artificial Sequence: Synthetic oligonucleotide
  Sense strand starting at position 3445 of SEQ ID NO: 914457
uggaucucugggcaccaua

SEQ ID NO: 1005473 - RNA, 19 nt, Artificial Sequence
  Description of Artificial Sequence: Synthetic oligonucleotide
  Antisense strand to SEQ ID NO: 1005472
uauggugcccagagaucca

SEQ ID NO: 1005474 - RNA, 19 nt, Artificial Sequence
  Description of Artificial Sequence: Synthetic oligonucleotide
  Sense strand starting at position 33 of SEQ ID NO: 914458
agcagauaccuaggagauc

SEQ ID NO: 1005475 - RNA, 19 nt, Artificial Sequence
  Description of Artificial Sequence: Synthetic oligonucleotide
  Antisense strand to SEQ ID NO: 1005474
gaucuccuagguaucugcu

SEQ ID NO: 1005476 - RNA, 19 nt, Artificial Sequence
  Description of Artificial Sequence: Synthetic oligonucleotide
  Sense strand starting at position 206 of SEQ ID NO: 914458
cuugaacaauugcuuugaa

SEQ ID NO: 1005477 - RNA, 19 nt, Artificial Sequence
  Description of Artificial Sequence: Synthetic oligonucleotide
  Antisense strand to SEQ ID NO: 1005476
uucaaagcaauuguucaag

SEQ ID NO: 1005478 - RNA, 19 nt, Artificial Sequence
  Description of Artificial Sequence: Synthetic oligonucleotide
  Sense strand starting at position 332 of SEQ ID NO: 914458
agauguguacuagaauguu

SEQ ID NO: 1005479 - RNA, 19 nt, Artificial Sequence
  Description of Artificial Sequence: Synthetic oligonucleotide
  Antisense strand to SEQ ID NO: 1005478
aacauucuaguacacaucu

SEQ ID NO: 1005480 - RNA, 19 nt, Artificial Sequence
  Description of Artificial Sequence: Synthetic oligonucleotide
  Sense strand starting at position 340 of SEQ ID NO: 914458
acuagaauguuugcaauag

SEQ ID NO: 1005481 - RNA, 19 nt, Artificial Sequence
  Description of Artificial Sequence: Synthetic oligonucleotide
  Antisense strand to SEQ ID NO: 1005480
cuauugcaaacauucuagu

SEQ ID NO: 1005482 - RNA, 19 nt, Artificial Sequence
  Description of Artificial Sequence: Synthetic oligonucleotide
  Sense strand starting at position 344 of SEQ ID NO: 914458
gaauguuugcaauaguacu

SEQ ID NO: 1005483 - RNA, 19 nt, Artificial Sequence
  Description of Artificial Sequence: Synthetic oligonucleotide
  Antisense strand to SEQ ID NO: 1005482
aguacuauugcaaacauuc

SEQ ID NO: 1005484 - RNA, 19 nt, Artificial Sequence
  Description of Artificial Sequence: Synthetic oligonucleotide
  Sense strand starting at position 416 of SEQ ID NO: 914458
auuaaugaacugugauaug

SEQ ID NO: 1005485 - RNA, 19 nt, Artificial Sequence
  Description of Artificial Sequence: Synthetic oligonucleotide
  Antisense strand to SEQ ID NO: 1005484
cauaucacaguucauuaau

SEQ ID NO: 1005486 - RNA, 19 nt, Artificial Sequence
  Description of Artificial Sequence: Synthetic oligonucleotide
  Sense strand starting at position 428 of SEQ ID NO: 914458
ugauauguuccaugacaaa

SEQ ID NO: 1005487 - RNA, 19 nt, Artificial Sequence
  Description of Artificial Sequence: Synthetic oligonucleotide
  Antisense strand to SEQ ID NO: 1005486
uuugucauggaacauauca

SEQ ID NO: 1005488 - RNA, 19 nt, Artificial Sequence
  Description of Artificial Sequence: Synthetic oligonucleotide
  Sense strand starting at position 667 of SEQ ID NO: 914458
ggaggucaccucugggaga

SEQ ID NO: 1005489 - RNA, 19 nt, Artificial Sequence
  Description of Artificial Sequence: Synthetic oligonucleotide
  Antisense strand to SEQ ID NO: 1005488
ucucccagaggugaccucc

SEQ ID NO: 1005490 - RNA, 19 nt, Artificial Sequence
  Description of Artificial Sequence: Synthetic oligonucleotide
  Sense strand starting at position 669 of SEQ ID NO: 914458
aggucaccucugggagaga

SEQ ID NO: 1005491 - RNA, 19 nt, Artificial Sequence
  Description of Artificial Sequence: Synthetic oligonucleotide
  Antisense strand to SEQ ID NO: 1005490
ucucucccagaggugaccu

SEQ ID NO: 1005492 - RNA, 19 nt, Artificial Sequence
  Description of Artificial Sequence: Synthetic oligonucleotide
  Sense strand starting at position 750 of SEQ ID NO: 914458
ccuuaaaugggaggcauau

SEQ ID NO: 1005493 - RNA, 19 nt, Artificial Sequence
  Description of Artificial Sequence: Synthetic oligonucleotide
  Antisense strand to SEQ ID NO: 1005492
auaugccucccauuuaagg

SEQ ID NO: 1005494 - RNA, 19 nt, Artificial Sequence
  Description of Artificial Sequence: Synthetic oligonucleotide
  Sense strand starting at position 846 of SEQ ID NO: 914458
uuuaguuuacccuaguuaa

SEQ ID NO: 1005495 - RNA, 19 nt, Artificial Sequence
  Description of Artificial Sequence: Synthetic oligonucleotide
  Antisense strand to SEQ ID NO: 1005494
uuaacuaggguaaacuaaa

SEQ ID NO: 1005496 - RNA, 19 nt, Artificial Sequence
  Description of Artificial Sequence: Synthetic oligonucleotide
  Sense strand starting at position 914 of SEQ ID NO: 914458
ugaagugucuacuuaauac

SEQ ID NO: 1005497 - RNA, 19 nt, Artificial Sequence
  Description of Artificial Sequence: Synthetic oligonucleotide
  Antisense strand to SEQ ID NO: 1005496
guauuaaguagacacuuca

SEQ ID NO: 1005498 - RNA, 19 nt, Artificial Sequence
  Description of Artificial Sequence: Synthetic oligonucleotide
  Sense strand starting at position 1032 of SEQ ID NO: 914458
cucagugaccucugaagga

SEQ ID NO: 1005499 - RNA, 19 nt, Artificial Sequence
  Description of Artificial Sequence: Synthetic oligonucleotide
  Antisense strand to SEQ ID NO: 1005498
uccuucagaggucacugag

SEQ ID NO: 1005500 - RNA, 19 nt, Artificial Sequence
  Description of Artificial Sequence: Synthetic oligonucleotide
  Sense strand starting at position 1036 of SEQ ID NO: 914458
gugaccucugaaggaugau

SEQ ID NO: 1005501 - RNA, 19 nt, Artificial Sequence
  Description of Artificial Sequence: Synthetic oligonucleotide
  Antisense strand to SEQ ID NO: 1005500
aucauccuucagaggucac

SEQ ID NO: 1005502 - RNA, 19 nt, Artificial Sequence
  Description of Artificial Sequence: Synthetic oligonucleotide
  Sense strand starting at position 1192 of SEQ ID NO: 914458
cuauaagaagcagguuaaa

SEQ ID NO: 1005503 - RNA, 19 nt, Artificial Sequence
  Description of Artificial Sequence: Synthetic oligonucleotide
  Antisense strand to SEQ ID NO: 1005502
uuuaaccugcuucuuauag

SEQ ID NO: 1005504 - RNA, 19 nt, Artificial Sequence
  Description of Artificial Sequence: Synthetic oligonucleotide
  Sense strand starting at position 1444 of SEQ ID NO: 914458
gguuucaaagccuaggagu

SEQ ID NO: 1005505 - RNA, 19 nt, Artificial Sequence
  Description of Artificial Sequence: Synthetic oligonucleotide
  Antisense strand to SEQ ID NO: 1005504
acuccuaggcuuugaaacc

SEQ ID NO: 1005506 - RNA, 19 nt, Artificial Sequence
  Description of Artificial Sequence: Synthetic oligonucleotide
  Sense strand starting at position 1455 of SEQ ID NO: 914458
cuaggaguaauuggugaug

SEQ ID NO: 1005507 - RNA, 19 nt, Artificial Sequence
  Description of Artificial Sequence: Synthetic oligonucleotide
  Antisense strand to SEQ ID NO: 1005506
caucaccaauuacuccuag

SEQ ID NO: 1005508 - RNA, 19 nt, Artificial Sequence
  Description of Artificial Sequence: Synthetic oligonucleotide
  Sense strand starting at position 1458 of SEQ ID NO: 914458
ggaguaauuggugauguga

SEQ ID NO: 1005509 - RNA, 19 nt, Artificial Sequence
  Description of Artificial Sequence: Synthetic oligonucleotide
  Antisense strand to SEQ ID NO: 1005508
ucacaucaccaauuacucc

SEQ ID NO: 1005510 - RNA, 19 nt, Artificial Sequence
  Description of Artificial Sequence: Synthetic oligonucleotide
  Sense strand starting at position 1466 of SEQ ID NO: 914458
uggugaugugauugagauc

SEQ ID NO: 1005511 - RNA, 19 nt, Artificial Sequence
  Description of Artificial Sequence: Synthetic oligonucleotide
  Antisense strand to SEQ ID NO: 1005510
gaucucaaucacaucacca

SEQ ID NO: 1005512 - RNA, 19 nt, Artificial Sequence
  Description of Artificial Sequence: Synthetic oligonucleotide
  Sense strand starting at position 2029 of SEQ ID NO: 914458
cugccuguccuggaccaaa

SEQ ID NO: 1005513 - RNA, 19 nt, Artificial Sequence
  Description of Artificial Sequence: Synthetic oligonucleotide
  Antisense strand to SEQ ID NO: 1005512
uuugguccaggacaggcag

SEQ ID NO: 1005514 - RNA, 19 nt, Artificial Sequence
  Description of Artificial Sequence: Synthetic oligonucleotide
  Sense strand starting at position 2193 of SEQ ID NO: 914458
gucugcagugucuuugagu

SEQ ID NO: 1005515 - RNA, 19 nt, Artificial Sequence
  Description of Artificial Sequence: Synthetic oligonucleotide
  Antisense strand to SEQ ID NO: 1005514
acucaaagacacugcagac

SEQ ID NO: 1005516 - RNA, 19 nt, Artificial Sequence
  Description of Artificial Sequence: Synthetic oligonucleotide
  Sense strand starting at position 2200 of SEQ ID NO: 914458
gugucuuugaguuauggaa

SEQ ID NO: 1005517 - RNA, 19 nt, Artificial Sequence
  Description of Artificial Sequence: Synthetic oligonucleotide
  Antisense strand to SEQ ID NO: 1005516
uuccauaacucaaagacac

SEQ ID NO: 1005518 - RNA, 19 nt, Artificial Sequence
  Description of Artificial Sequence: Synthetic oligonucleotide
  Sense strand starting at position 2204 of SEQ ID NO: 914458
cuuugaguuauggaaguca

SEQ ID NO: 1005519 - RNA, 19 nt, Artificial Sequence
  Description of Artificial Sequence: Synthetic oligonucleotide
  Antisense strand to SEQ ID NO: 1005518
ugacuuccauaacucaaag

SEQ ID NO: 1005520 - RNA, 19 nt, Artificial Sequence
  Description of Artificial Sequence: Synthetic oligonucleotide
  Sense strand starting at position 2209 of SEQ ID NO: 914458
aguuauggaagucaguuua

SEQ ID NO: 1005521 - RNA, 19 nt, Artificial Sequence
  Description of Artificial Sequence: Synthetic oligonucleotide
  Antisense strand to SEQ ID NO: 1005520
uaaacugacuuccauaacu

SEQ ID NO: 1005522 - RNA, 19 nt, Artificial Sequence
  Description of Artificial Sequence: Synthetic oligonucleotide
  Sense strand starting at position 2508 of SEQ ID NO: 914458
gcuugaagauggcuggaau

SEQ ID NO: 1005523 - RNA, 19 nt, Artificial Sequence
  Description of Artificial Sequence: Synthetic oligonucleotide
  Antisense strand to SEQ ID NO: 1005522
auuccagccaucuucaagc

SEQ ID NO: 1005524 - RNA, 19 nt, Artificial Sequence
  Description of Artificial Sequence: Synthetic oligonucleotide
  Sense strand starting at position 2509 of SEQ ID NO: 914458
cuugaagauggcuggaaua

SEQ ID NO: 1005525 - RNA, 19 nt, Artificial Sequence
  Description of Artificial Sequence: Synthetic oligonucleotide
  Antisense strand to SEQ ID NO: 1005524
uauuccagccaucuucaag

SEQ ID NO: 1005526 - RNA, 19 nt, Artificial Sequence
  Description of Artificial Sequence: Synthetic oligonucleotide
  Sense strand starting at position 2904 of SEQ ID NO: 914458
cucaaagcugcuuaagacu

SEQ ID NO: 1005527 - RNA, 19 nt, Artificial Sequence
  Description of Artificial Sequence: Synthetic oligonucleotide
  Antisense strand to SEQ ID NO: 1005526
agucuuaagcagcuuugag

SEQ ID NO: 1005528 - RNA, 19 nt, Artificial Sequence
  Description of Artificial Sequence: Synthetic oligonucleotide
  Sense strand starting at position 3007 of SEQ ID NO: 914458
aggcacuuccaguagaagu

SEQ ID NO: 1005529 - RNA, 19 nt, Artificial Sequence
  Description of Artificial Sequence: Synthetic oligonucleotide
  Antisense strand to SEQ ID NO: 1005528
acuucuacuggaagugccu

SEQ ID NO: 1005530 - RNA, 19 nt, Artificial Sequence
  Description of Artificial Sequence: Synthetic oligonucleotide
  Sense strand starting at position 3015 of SEQ ID NO: 914458
ccaguagaagugggacaau

SEQ ID NO: 1005531 - RNA, 19 nt, Artificial Sequence
  Description of Artificial Sequence: Synthetic oligonucleotide
  Antisense strand to SEQ ID NO: 1005530
auugucccacuucuacugg

SEQ ID NO: 1005532 - RNA, 19 nt, Artificial Sequence
  Description of Artificial Sequence: Synthetic oligonucleotide
  Sense strand starting at position 3108 of SEQ ID NO: 914458
guguuaacugaucaagucu

SEQ ID NO: 1005533 - RNA, 19 nt, Artificial Sequence
  Description of Artificial Sequence: Synthetic oligonucleotide
  Antisense strand to SEQ ID NO: 1005532
agacuugaucaguuaacac

SEQ ID NO: 1005534 - RNA, 19 nt, Artificial Sequence
  Description of Artificial Sequence: Synthetic oligonucleotide
  Sense strand starting at position 3140 of SEQ ID NO: 914458
gguggguaagggcaugauu

SEQ ID NO: 1005535 - RNA, 19 nt, Artificial Sequence
  Description of Artificial Sequence: Synthetic oligonucleotide
  Antisense strand to SEQ ID NO: 1005534
aaucaugcccuuacccacc

SEQ ID NO: 1005536 - RNA, 19 nt, Artificial Sequence
  Description of Artificial Sequence: Synthetic oligonucleotide
  Sense strand starting at position 3142 of SEQ ID NO: 914458
uggguaagggcaugauuau

SEQ ID NO: 1005537 - RNA, 19 nt, Artificial Sequence
  Description of Artificial Sequence: Synthetic oligonucleotide
  Antisense strand to SEQ ID NO: 1005536
auaaucaugcccuuaccca

SEQ ID NO: 1005538 - RNA, 19 nt, Artificial Sequence
  Description of Artificial Sequence: Synthetic oligonucleotide
  Sense strand starting at position 3177 of SEQ ID NO: 914458
ggcgcuagcauguuaaauu

SEQ ID NO: 1005539 - RNA, 19 nt, Artificial Sequence
  Description of Artificial Sequence: Synthetic oligonucleotide
  Antisense strand to SEQ ID NO: 1005538
aauuuaacaugcuagcgcc

SEQ ID NO: 1005540 - RNA, 19 nt, Artificial Sequence
  Description of Artificial Sequence: Synthetic oligonucleotide
  Sense strand starting at position 3189 of SEQ ID NO: 914458
uuaaauugcuuucuugaag

SEQ ID NO: 1005541 - RNA, 19 nt, Artificial Sequence
  Description of Artificial Sequence: Synthetic oligonucleotide
  Antisense strand to SEQ ID NO: 1005540
cuucaagaaagcaauuuaa

SEQ ID NO: 1005542 - RNA, 19 nt, Artificial Sequence
  Description of Artificial Sequence: Synthetic oligonucleotide
  Sense strand starting at position 3247 of SEQ ID NO: 914458
aggguuggcccuuagauca

SEQ ID NO: 1005543 - RNA, 19 nt, Artificial Sequence
  Description of Artificial Sequence: Synthetic oligonucleotide
  Antisense strand to SEQ ID NO: 1005542
ugaucuaagggccaacccu

SEQ ID NO: 1005544 - RNA, 19 nt, Artificial Sequence
  Description of Artificial Sequence: Synthetic oligonucleotide
  Sense strand starting at position 3483 of SEQ ID NO: 914458
gaucuagcucuacagauug

SEQ ID NO: 1005545 - RNA, 19 nt, Artificial Sequence
  Description of Artificial Sequence: Synthetic oligonucleotide
  Antisense strand to SEQ ID NO: 1005544
caaucuguagagcuagauc

SEQ ID NO: 1005546 - RNA, 19 nt, Artificial Sequence
  Description of Artificial Sequence: Synthetic oligonucleotide
  Sense strand starting at position 3698 of SEQ ID NO: 914458
guguaagauuuggcuuacu

SEQ ID NO: 1005547 - RNA, 19 nt, Artificial Sequence
  Description of Artificial Sequence: Synthetic oligonucleotide
  Antisense strand to SEQ ID NO: 1005546
aguaagccaaaucuuacac

SEQ ID NO: 1005548 - RNA, 19 nt, Artificial Sequence
  Description of Artificial Sequence: Synthetic oligonucleotide
  Sense strand starting at position 3819 of SEQ ID NO: 914458
uuuguaucacguuagaaac

SEQ ID NO: 1005549 - RNA, 19 nt, Artificial Sequence
  Description of Artificial Sequence: Synthetic oligonucleotide
  Antisense strand to SEQ ID NO: 1005548
guuucuaacgugauacaaa

SEQ ID NO: 1005550 - RNA, 19 nt, Artificial Sequence
  Description of Artificial Sequence: Synthetic oligonucleotide
  Sense strand starting at position 3846 of SEQ ID NO: 914458
agucuuucugaugaguuag

SEQ ID NO: 1005551 - RNA, 19 nt, Artificial Sequence
  Description of Artificial Sequence: Synthetic oligonucleotide
  Antisense strand to SEQ ID NO: 1005550
cuaacucaucagaaagacu

SEQ ID NO: 1005552 - RNA, 19 nt, Artificial Sequence
  Description of Artificial Sequence: Synthetic oligonucleotide
  Sense strand starting at position 3943 of SEQ ID NO: 914458
ggagcaauaaguuguagaa

SEQ ID NO: 1005553 - RNA, 19 nt, Artificial Sequence
  Description of Artificial Sequence: Synthetic oligonucleotide
  Antisense strand to SEQ ID NO: 1005552
uucuacaacuuauugcucc

SEQ ID NO: 1005554 - RNA, 19 nt, Artificial Sequence
  Description of Artificial Sequence: Synthetic oligonucleotide
  Sense strand starting at position 95 of SEQ ID NO: 914459
uaguuccgauggucauuua

SEQ ID NO: 1005555 - RNA, 19 nt, Artificial Sequence
  Description of Artificial Sequence: Synthetic oligonucleotide
  Antisense strand to SEQ ID NO: 1005554
uaaaugaccaucggaacua

SEQ ID NO: 1005556 - RNA, 19 nt, Artificial Sequence
  Description of Artificial Sequence: Synthetic oligonucleotide
  Sense strand starting at position 98 of SEQ ID NO: 914459
uuccgauggucauuuauuc

SEQ ID NO: 1005557 - RNA, 19 nt, Artificial Sequence
  Description of Artificial Sequence: Synthetic oligonucleotide
  Antisense strand to SEQ ID NO: 1005556
gaauaaaugaccaucggaa

SEQ ID NO: 1005558 - RNA, 19 nt, Artificial Sequence
  Description of Artificial Sequence: Synthetic oligonucleotide
  Sense strand starting at position 109 of SEQ ID NO: 914459
auuuauuccgcaggucacu

SEQ ID NO: 1005559 - RNA, 19 nt, Artificial Sequence
  Description of Artificial Sequence: Synthetic oligonucleotide
  Antisense strand to SEQ ID NO: 1005558
agugaccugcggaauaaau

SEQ ID NO: 1005560 - RNA, 19 nt, Artificial Sequence
  Description of Artificial Sequence: Synthetic oligonucleotide
  Sense strand starting at position 153 of SEQ ID NO: 914459
aguugauuaugcucagaaa

SEQ ID NO: 1005561 - RNA, 19 nt, Artificial Sequence
  Description of Artificial Sequence: Synthetic oligonucleotide
  Antisense strand to SEQ ID NO: 1005560
uuucugagcauaaucaacu

SEQ ID NO: 1005562 - RNA, 19 nt, Artificial Sequence
  Description of Artificial Sequence: Synthetic oligonucleotide
  Sense strand starting at position 154 of SEQ ID NO: 914459
guugauuaugcucagaaag

SEQ ID NO: 1005563 - RNA, 19 nt, Artificial Sequence
  Description of Artificial Sequence: Synthetic oligonucleotide
  Antisense strand to SEQ ID NO: 1005562
cuuucugagcauaaucaac

SEQ ID NO: 1005564 - RNA, 19 nt, Artificial Sequence
  Description of Artificial Sequence: Synthetic oligonucleotide
  Sense strand starting at position 543 of SEQ ID NO: 914459
aguucucuggccuguauuu

SEQ ID NO: 1005565 - RNA, 19 nt, Artificial Sequence
  Description of Artificial Sequence: Synthetic oligonucleotide
  Antisense strand to SEQ ID NO: 1005564
aaauacaggccagagaacu

SEQ ID NO: 1005566 - RNA, 19 nt, Artificial Sequence
  Description of Artificial Sequence: Synthetic oligonucleotide
  Sense strand starting at position 630 of SEQ ID NO: 914459
acguaaugagucuauccca

SEQ ID NO: 1005567 - RNA, 19 nt, Artificial Sequence
  Description of Artificial Sequence: Synthetic oligonucleotide
  Antisense strand to SEQ ID NO: 1005566
ugggauagacucauuacgu

SEQ ID NO: 1005568 - RNA, 19 nt, Artificial Sequence
  Description of Artificial Sequence: Synthetic oligonucleotide
  Sense strand starting at position 733 of SEQ ID NO: 914459
aggcaugcaguuuaggaaa

SEQ ID NO: 1005569 - RNA, 19 nt, Artificial Sequence
  Description of Artificial Sequence: Synthetic oligonucleotide
  Antisense strand to SEQ ID NO: 1005568
uuuccuaaacugcaugccu

SEQ ID NO: 1005570 - RNA, 19 nt, Artificial Sequence
  Description of Artificial Sequence: Synthetic oligonucleotide
  Sense strand starting at position 750 of SEQ ID NO: 914459
aagagaacaugaucugucu

SEQ ID NO: 1005571 - RNA, 19 nt, Artificial Sequence
  Description of Artificial Sequence: Synthetic oligonucleotide
  Antisense strand to SEQ ID NO: 1005570
agacagaucauguucucuu

SEQ ID NO: 1005572 - RNA, 19 nt, Artificial Sequence
  Description of Artificial Sequence: Synthetic oligonucleotide
  Sense strand starting at position 753 of SEQ ID NO: 914459
agaacaugaucugucuauc

SEQ ID NO: 1005573 - RNA, 19 nt, Artificial Sequence
  Description of Artificial Sequence: Synthetic oligonucleotide
  Antisense strand to SEQ ID NO: 1005572
gauagacagaucauguucu

SEQ ID NO: 1005574 - RNA, 19 nt, Artificial Sequence
  Description of Artificial Sequence: Synthetic oligonucleotide
  Sense strand starting at position 756 of SEQ ID NO: 914459
acaugaucugucuaucuuc

SEQ ID NO: 1005575 - RNA, 19 nt, Artificial Sequence
  Description of Artificial Sequence: Synthetic oligonucleotide
  Antisense strand to SEQ ID NO: 1005574
gaagauagacagaucaugu

SEQ ID NO: 1005576 - RNA, 19 nt, Artificial Sequence
  Description of Artificial Sequence: Synthetic oligonucleotide
  Sense strand starting at position 780 of SEQ ID NO: 914459
agacccaggucugcuaaua

SEQ ID NO: 1005577 - RNA, 19 nt, Artificial Sequence
  Description of Artificial Sequence: Synthetic oligonucleotide
  Antisense strand to SEQ ID NO: 1005576
uauuagcagaccugggucu

SEQ ID NO: 1005578 - RNA, 19 nt, Artificial Sequence
  Description of Artificial Sequence: Synthetic oligonucleotide
  Sense strand starting at position 1011 of SEQ ID NO: 914459
ugguccuaacauugauaca

SEQ ID NO: 1005579 - RNA, 19 nt, Artificial Sequence
  Description of Artificial Sequence: Synthetic oligonucleotide
  Antisense strand to SEQ ID NO: 1005578
uguaucaauguuaggacca

SEQ ID NO: 1005580 - RNA, 19 nt, Artificial Sequence
  Description of Artificial Sequence: Synthetic oligonucleotide
  Sense strand starting at position 1086 of SEQ ID NO: 914459
ugagguugacauugcuaau

SEQ ID NO: 1005581 - RNA, 19 nt, Artificial Sequence
  Description of Artificial Sequence: Synthetic oligonucleotide
  Antisense strand to SEQ ID NO: 1005580
auuagcaaugucaaccuca

SEQ ID NO: 1005582 - RNA, 19 nt, Artificial Sequence
  Description of Artificial Sequence: Synthetic oligonucleotide
  Sense strand starting at position 1162 of SEQ ID NO: 914459
acuagcaaucaguauguuu

SEQ ID NO: 1005583 - RNA, 19 nt, Artificial Sequence
  Description of Artificial Sequence: Synthetic oligonucleotide
  Antisense strand to SEQ ID NO: 1005582
aaacauacugauugcuagu

SEQ ID NO: 1005584 - RNA, 19 nt, Artificial Sequence
  Description of Artificial Sequence: Synthetic oligonucleotide
  Sense strand starting at position 1317 of SEQ ID NO: 914459
uguguuugagacuauguac

SEQ ID NO: 1005585 - RNA, 19 nt, Artificial Sequence
  Description of Artificial Sequence: Synthetic oligonucleotide
  Antisense strand to SEQ ID NO: 1005584
guacauagucucaaacaca

SEQ ID NO: 1005586 - RNA, 19 nt, Artificial Sequence
  Description of Artificial Sequence: Synthetic oligonucleotide
  Sense strand starting at position 1320 of SEQ ID NO: 914459
guuugagacuauguacauu

SEQ ID NO: 1005587 - RNA, 19 nt, Artificial Sequence
  Description of Artificial Sequence: Synthetic oligonucleotide
  Antisense strand to SEQ ID NO: 1005586
aauguacauagucucaaac

SEQ ID NO: 1005588 - RNA, 19 nt, Artificial Sequence
  Description of Artificial Sequence: Synthetic oligonucleotide
  Sense strand starting at position 1397 of SEQ ID NO: 914459
auaggaaaucuauggucau

SEQ ID NO: 1005589 - RNA, 19 nt, Artificial Sequence
  Description of Artificial Sequence: Synthetic oligonucleotide
  Antisense strand to SEQ ID NO: 1005588
augaccauagauuuccuau

SEQ ID NO: 1005590 - RNA, 19 nt, Artificial Sequence
  Description of Artificial Sequence: Synthetic oligonucleotide
  Sense strand starting at position 1524 of SEQ ID NO: 914459
gguacuuaagagggucuaa

SEQ ID NO: 1005591 - RNA, 19 nt, Artificial Sequence
  Description of Artificial Sequence: Synthetic oligonucleotide
  Antisense strand to SEQ ID NO: 1005590
uuagacccucuuaaguacc

SEQ ID NO: 1005592 - RNA, 19 nt, Artificial Sequence
  Description of Artificial Sequence: Synthetic oligonucleotide
  Sense strand starting at position 1636 of SEQ ID NO: 914459
ucugaaucaugggcaucuu

SEQ ID NO: 1005593 - RNA, 19 nt, Artificial Sequence
  Description of Artificial Sequence: Synthetic oligonucleotide
  Antisense strand to SEQ ID NO: 1005592
aagaugcccaugauucaga

SEQ ID NO: 1005594 - RNA, 19 nt, Artificial Sequence
  Description of Artificial Sequence: Synthetic oligonucleotide
  Sense strand starting at position 2169 of SEQ ID NO: 914459
guuugcaagcuuguuuagu

SEQ ID NO: 1005595 - RNA, 19 nt, Artificial Sequence
  Description of Artificial Sequence: Synthetic oligonucleotide
  Antisense strand to SEQ ID NO: 1005594
acuaaacaagcuugcaaac

SEQ ID NO: 1005596 - RNA, 19 nt, Artificial Sequence
  Description of Artificial Sequence: Synthetic oligonucleotide
  Sense strand starting at position 2261 of SEQ ID NO: 914459
cgugguguugcaguucauu

SEQ ID NO: 1005597 - RNA, 19 nt, Artificial Sequence
  Description of Artificial Sequence: Synthetic oligonucleotide
  Antisense strand to SEQ ID NO: 1005596
aaugaacugcaacaccacg

SEQ ID NO: 1005598 - RNA, 19 nt, Artificial Sequence
  Description of Artificial Sequence: Synthetic oligonucleotide
  Sense strand starting at position 2345 of SEQ ID NO: 914459
auauaauuacgaggucaga

SEQ ID NO: 1005599 - RNA, 19 nt, Artificial Sequence
  Description of Artificial Sequence: Synthetic oligonucleotide
  Antisense strand to SEQ ID NO: 1005598
ucugaccucguaauuauau

SEQ ID NO: 1005600 - RNA, 19 nt, Artificial Sequence
  Description of Artificial Sequence: Synthetic oligonucleotide
  Sense strand starting at position 2390 of SEQ ID NO: 914459
ucagcacaagucgauauau

SEQ ID NO: 1005601 - RNA, 19 nt, Artificial Sequence
  Description of Artificial Sequence: Synthetic oligonucleotide
  Antisense strand to SEQ ID NO: 1005600
auauaucgacuugugcuga

SEQ ID NO: 1005602 - RNA, 19 nt, Artificial Sequence
  Description of Artificial Sequence: Synthetic oligonucleotide
  Sense strand starting at position 2659 of SEQ ID NO: 914459
cucaguaaauaugcugaua

SEQ ID NO: 1005603 - RNA, 19 nt, Artificial Sequence
  Description of Artificial Sequence: Synthetic oligonucleotide
  Antisense strand to SEQ ID NO: 1005602
uaucagcauauuuacugag

SEQ ID NO: 1005604 - RNA, 19 nt, Artificial Sequence
  Description of Artificial Sequence: Synthetic oligonucleotide
  Sense strand starting at position 2733 of SEQ ID NO: 914459
aggaaagguagaugcuuua

SEQ ID NO: 1005605 - RNA, 19 nt, Artificial Sequence
  Description of Artificial Sequence: Synthetic oligonucleotide
  Antisense strand to SEQ ID NO: 1005604
uaaagcaucuaccuuuccu

SEQ ID NO: 1005606 - RNA, 19 nt, Artificial Sequence
  Description of Artificial Sequence: Synthetic oligonucleotide
  Sense strand starting at position 2808 of SEQ ID NO: 914459
auguauauuaccgguagaa

SEQ ID NO: 1005607 - RNA, 19 nt, Artificial Sequence
  Description of Artificial Sequence: Synthetic oligonucleotide
  Antisense strand to SEQ ID NO: 1005606
uucuaccgguaauauacau

SEQ ID NO: 1005608 - RNA, 19 nt, Artificial Sequence
  Description of Artificial Sequence: Synthetic oligonucleotide
  Sense strand starting at position 2810 of SEQ ID NO: 914459
guauauuaccgguagaaau

SEQ ID NO: 1005609 - RNA, 19 nt, Artificial Sequence
  Description of Artificial Sequence: Synthetic oligonucleotide
  Antisense strand to SEQ ID NO: 1005608
auuucuaccgguaauauac

SEQ ID NO: 1005610 - RNA, 19 nt, Artificial Sequence
  Description of Artificial Sequence: Synthetic oligonucleotide
  Sense strand starting at position 2876 of SEQ ID NO: 914459
uagugaccagagugauaca

SEQ ID NO: 1005611 - RNA, 19 nt, Artificial Sequence
  Description of Artificial Sequence: Synthetic oligonucleotide
  Antisense strand to SEQ ID NO: 1005610
uguaucacucuggucacua

SEQ ID NO: 1005612 - RNA, 19 nt, Artificial Sequence
  Description of Artificial Sequence: Synthetic oligonucleotide
  Sense strand starting at position 2935 of SEQ ID NO: 914459
gagaauuagcuaugguaga

SEQ ID NO: 1005613 - RNA, 19 nt, Artificial Sequence
  Description of Artificial Sequence: Synthetic oligonucleotide
  Antisense strand to SEQ ID NO: 1005612
ucuaccauagcuaauucuc

SEQ ID NO: 1005614 - RNA, 19 nt, Artificial Sequence
  Description of Artificial Sequence: Synthetic oligonucleotide
  Sense strand starting at position 2940 of SEQ ID NO: 914459
uuagcuaugguagaaguaa

SEQ ID NO: 1005615 - RNA, 19 nt, Artificial Sequence
  Description of Artificial Sequence: Synthetic oligonucleotide
  Antisense strand to SEQ ID NO: 1005614
uuacuucuaccauagcuaa

SEQ ID NO: 1005616 - RNA, 19 nt, Artificial Sequence
  Description of Artificial Sequence: Synthetic oligonucleotide
  Sense strand starting at position 3226 of SEQ ID NO: 914459
gccuuagggccucauaaag

SEQ ID NO: 1005617 - RNA, 19 nt, Artificial Sequence
  Description of Artificial Sequence: Synthetic oligonucleotide
  Antisense strand to SEQ ID NO: 1005616
cuuuaugaggcccuaaggc

SEQ ID NO: 1005618 - RNA, 19 nt, Artificial Sequence
  Description of Artificial Sequence: Synthetic oligonucleotide
  Sense strand starting at position 3406 of SEQ ID NO: 914459
agggucauauuaucucauu

SEQ ID NO: 1005619 - RNA, 19 nt, Artificial Sequence
  Description of Artificial Sequence: Synthetic oligonucleotide
  Antisense strand to SEQ ID NO: 1005618
aaugagauaauaugacccu

SEQ ID NO: 1005620 - RNA, 19 nt, Artificial Sequence
  Description of Artificial Sequence: Synthetic oligonucleotide
  Sense strand starting at position 3407 of SEQ ID NO: 914459
gggucauauuaucucauua

SEQ ID NO: 1005621 - RNA, 19 nt, Artificial Sequence
  Description of Artificial Sequence: Synthetic oligonucleotide
  Antisense strand to SEQ ID NO: 1005620
uaaugagauaauaugaccc

SEQ ID NO: 1005622 - RNA, 19 nt, Artificial Sequence
  Description of Artificial Sequence: Synthetic oligonucleotide
  Sense strand starting at position 3503 of SEQ ID NO: 914459
aaccucuacgcaugggaau

SEQ ID NO: 1005623 - RNA, 19 nt, Artificial Sequence
  Description of Artificial Sequence: Synthetic oligonucleotide
  Antisense strand to SEQ ID NO: 1005622
auucccaugcguagagguu

SEQ ID NO: 1005624 - RNA, 19 nt, Artificial Sequence
  Description of Artificial Sequence: Synthetic oligonucleotide
  Sense strand starting at position 3710 of SEQ ID NO: 914459
cggccucauuucuuacagu

SEQ ID NO: 1005625 - RNA, 19 nt, Artificial Sequence
  Description of Artificial Sequence: Synthetic oligonucleotide
  Antisense strand to SEQ ID NO: 1005624
acuguaagaaaugaggccg

SEQ ID NO: 1005626 - RNA, 19 nt, Artificial Sequence
  Description of Artificial Sequence: Synthetic oligonucleotide
  Sense strand starting at position 3753 of SEQ ID NO: 914459
agccauaaucgagaugggu

SEQ ID NO: 1005627 - RNA, 19 nt, Artificial Sequence
  Description of Artificial Sequence: Synthetic oligonucleotide
  Antisense strand to SEQ ID NO: 1005626
acccaucucgauuauggcu

SEQ ID NO: 1005628 - RNA, 19 nt, Artificial Sequence
  Description of Artificial Sequence: Synthetic oligonucleotide
  Sense strand starting at position 3755 of SEQ ID NO: 914459
ccauaaucgagauggguag

SEQ ID NO: 1005629 - RNA, 19 nt, Artificial Sequence
  Description of Artificial Sequence: Synthetic oligonucleotide
  Antisense strand to SEQ ID NO: 1005628
cuacccaucucgauuaugg

SEQ ID NO: 1005630 - RNA, 19 nt, Artificial Sequence
  Description of Artificial Sequence: Synthetic oligonucleotide
  Sense strand starting at position 3827 of SEQ ID NO: 914459
aggguauugacuuagugac

SEQ ID NO: 1005631 - RNA, 19 nt, Artificial Sequence
  Description of Artificial Sequence: Synthetic oligonucleotide
  Antisense strand to SEQ ID NO: 1005630
gucacuaagucaauacccu

SEQ ID NO: 1005632 - RNA, 19 nt, Artificial Sequence
  Description of Artificial Sequence: Synthetic oligonucleotide
  Sense strand starting at position 3829 of SEQ ID NO: 914459
gguauugacuuagugacau

SEQ ID NO: 1005633 - RNA, 19 nt, Artificial Sequence
  Description of Artificial Sequence: Synthetic oligonucleotide
  Antisense strand to SEQ ID NO: 1005632
augucacuaagucaauacc

SEQ ID NO: 1005634 - RNA, 19 nt, Artificial Sequence
  Description of Artificial Sequence: Synthetic oligonucleotide
  Sense strand starting at position 361 of SEQ ID NO: 914460
auguguucucaggaaguuu

SEQ ID NO: 1005635 - RNA, 19 nt, Artificial Sequence
  Description of Artificial Sequence: Synthetic oligonucleotide
  Antisense strand to SEQ ID NO: 1005634
aaacuuccugagaacacau

SEQ ID NO: 1005636 - RNA, 19 nt, Artificial Sequence
  Description of Artificial Sequence: Synthetic oligonucleotide
  Sense strand starting at position 610 of SEQ ID NO: 914460
guaguagcucuugauccua

SEQ ID NO: 1005637 - RNA, 19 nt, Artificial Sequence
  Description of Artificial Sequence: Synthetic oligonucleotide
  Antisense strand to SEQ ID NO: 1005636
uaggaucaagagcuacuac

SEQ ID NO: 1005638 - RNA, 19 nt, Artificial Sequence
  Description of Artificial Sequence: Synthetic oligonucleotide
  Sense strand starting at position 951 of SEQ ID NO: 914460
acgauauugacuuagugau

SEQ ID NO: 1005639 - RNA, 19 nt, Artificial Sequence
  Description of Artificial Sequence: Synthetic oligonucleotide
  Antisense strand to SEQ ID NO: 1005638
aucacuaagucaauaucgu

SEQ ID NO: 1005640 - RNA, 19 nt, Artificial Sequence
  Description of Artificial Sequence: Synthetic oligonucleotide
  Sense strand starting at position 976 of SEQ ID NO: 914460
aaauaugugguacggacua

SEQ ID NO: 1005641 - RNA, 19 nt, Artificial Sequence
  Description of Artificial Sequence: Synthetic oligonucleotide
  Antisense strand to SEQ ID NO: 1005640
uaguccguaccacauauuu

SEQ ID NO: 1005642 - RNA, 19 nt, Artificial Sequence
  Description of Artificial Sequence: Synthetic oligonucleotide
  Sense strand starting at position 978 of SEQ ID NO: 914460
auaugugguacggacuaaa

SEQ ID NO: 1005643 - RNA, 19 nt, Artificial Sequence
  Description of Artificial Sequence: Synthetic oligonucleotide
  Antisense strand to SEQ ID NO: 1005642
uuuaguccguaccacauau

SEQ ID NO: 1005644 - RNA, 19 nt, Artificial Sequence
  Description of Artificial Sequence: Synthetic oligonucleotide
  Sense strand starting at position 1020 of SEQ ID NO: 914460
ugaauaauagcuuguacua

SEQ ID NO: 1005645 - RNA, 19 nt, Artificial Sequence
  Description of Artificial Sequence: Synthetic oligonucleotide
  Antisense strand to SEQ ID NO: 1005644
uaguacaagcuauuauuca

SEQ ID NO: 1005646 - RNA, 19 nt, Artificial Sequence
  Description of Artificial Sequence: Synthetic oligonucleotide
  Sense strand starting at position 1052 of SEQ ID NO: 914460
cggcucaguacaugagaau

SEQ ID NO: 1005647 - RNA, 19 nt, Artificial Sequence
  Description of Artificial Sequence: Synthetic oligonucleotide
  Antisense strand to SEQ ID NO: 1005646
auucucauguacugagccg

SEQ ID NO: 1005648 - RNA, 19 nt, Artificial Sequence
  Description of Artificial Sequence: Synthetic oligonucleotide
  Sense strand starting at position 1096 of SEQ ID NO: 914460
gagaaauucuagccagaug

SEQ ID NO: 1005649 - RNA, 19 nt, Artificial Sequence
  Description of Artificial Sequence: Synthetic oligonucleotide
  Antisense strand to SEQ ID NO: 1005648
caucuggcuagaauuucuc

SEQ ID NO: 1005650 - RNA, 19 nt, Artificial Sequence
  Description of Artificial Sequence: Synthetic oligonucleotide
  Sense strand starting at position 1104 of SEQ ID NO: 914460
cuagccagauguucucaaa

SEQ ID NO: 1005651 - RNA, 19 nt, Artificial Sequence
  Description of Artificial Sequence: Synthetic oligonucleotide
  Antisense strand to SEQ ID NO: 1005650
uuugagaacaucuggcuag

SEQ ID NO: 1005652 - RNA, 19 nt, Artificial Sequence
  Description of Artificial Sequence: Synthetic oligonucleotide
  Sense strand starting at position 1154 of SEQ ID NO: 914460
gccuuuauuugaguacauu

SEQ ID NO: 1005653 - RNA, 19 nt, Artificial Sequence
  Description of Artificial Sequence: Synthetic oligonucleotide
  Antisense strand to SEQ ID NO: 1005652
aauguacucaaauaaaggc

SEQ ID NO: 1005654 - RNA, 19 nt, Artificial Sequence
  Description of Artificial Sequence: Synthetic oligonucleotide
  Sense strand starting at position 1208 of SEQ ID NO: 914460
cuauaacuaugagauuuag

SEQ ID NO: 1005655 - RNA, 19 nt, Artificial Sequence
  Description of Artificial Sequence: Synthetic oligonucleotide
  Antisense strand to SEQ ID NO: 1005654
cuaaaucucauaguuauag

SEQ ID NO: 1005656 - RNA, 19 nt, Artificial Sequence
  Description of Artificial Sequence: Synthetic oligonucleotide
  Sense strand starting at position 1214 of SEQ ID NO: 914460
cuaugagauuuaggacaaa

SEQ ID NO: 1005657 - RNA, 19 nt, Artificial Sequence
  Description of Artificial Sequence: Synthetic oligonucleotide
  Antisense strand to SEQ ID NO: 1005656
uuuguccuaaaucucauag

SEQ ID NO: 1005658 - RNA, 19 nt, Artificial Sequence
  Description of Artificial Sequence: Synthetic oligonucleotide
  Sense strand starting at position 1235 of SEQ ID NO: 914460
ggcuaagaaugccuuuaaa

SEQ ID NO: 1005659 - RNA, 19 nt, Artificial Sequence
  Description of Artificial Sequence: Synthetic oligonucleotide
  Antisense strand to SEQ ID NO: 1005658
uuuaaaggcauucuuagcc

SEQ ID NO: 1005660 - RNA, 19 nt, Artificial Sequence
  Description of Artificial Sequence: Synthetic oligonucleotide
  Sense strand starting at position 1643 of SEQ ID NO: 914460
cuuaaacgucagggaaacu

SEQ ID NO: 1005661 - RNA, 19 nt, Artificial Sequence
  Description of Artificial Sequence: Synthetic oligonucleotide
  Antisense strand to SEQ ID NO: 1005660
aguuucccugacguuuaag

SEQ ID NO: 1005662 - RNA, 19 nt, Artificial Sequence
  Description of Artificial Sequence: Synthetic oligonucleotide
  Sense strand starting at position 1731 of SEQ ID NO: 914460
gcagcucugcucuggauuu

SEQ ID NO: 1005663 - RNA, 19 nt, Artificial Sequence
  Description of Artificial Sequence: Synthetic oligonucleotide
  Antisense strand to SEQ ID NO: 1005662
aaauccagagcagagcugc

SEQ ID NO: 1005664 - RNA, 19 nt, Artificial Sequence
  Description of Artificial Sequence: Synthetic oligonucleotide
  Sense strand starting at position 2274 of SEQ ID NO: 914460
cgcaguuauacguccagug

SEQ ID NO: 1005665 - RNA, 19 nt, Artificial Sequence
  Description of Artificial Sequence: Synthetic oligonucleotide
  Antisense strand to SEQ ID NO: 1005664
cacuggacguauaacugcg

SEQ ID NO: 1005666 - RNA, 19 nt, Artificial Sequence
  Description of Artificial Sequence: Synthetic oligonucleotide
  Sense strand starting at position 2367 of SEQ ID NO: 914460
cggaaauacuuguugaaug

SEQ ID NO: 1005667 - RNA, 19 nt, Artificial Sequence
  Description of Artificial Sequence: Synthetic oligonucleotide
  Antisense strand to SEQ ID NO: 1005666
cauucaacaaguauuuccg

SEQ ID NO: 1005668 - RNA, 19 nt, Artificial Sequence
  Description of Artificial Sequence: Synthetic oligonucleotide
  Sense strand starting at position 2425 of SEQ ID NO: 914460
gggaguucaucauccaggu

SEQ ID NO: 1005669 - RNA, 19 nt, Artificial Sequence
  Description of Artificial Sequence: Synthetic oligonucleotide
  Antisense strand to SEQ ID NO: 1005668
accuggaugaugaacuccc

SEQ ID NO: 1005670 - RNA, 19 nt, Artificial Sequence
  Description of Artificial Sequence: Synthetic oligonucleotide
  Sense strand starting at position 2500 of SEQ ID NO: 914460
agaaauaaacuucggguaa

SEQ ID NO: 1005671 - RNA, 19 nt, Artificial Sequence
  Description of Artificial Sequence: Synthetic oligonucleotide
  Antisense strand to SEQ ID NO: 1005670
uuacccgaaguuuauuucu

SEQ ID NO: 1005672 - RNA, 19 nt, Artificial Sequence
  Description of Artificial Sequence: Synthetic oligonucleotide
  Sense strand starting at position 2593 of SEQ ID NO: 914460
gguuccuguggugauaaca

SEQ ID NO: 1005673 - RNA, 19 nt, Artificial Sequence
  Description of Artificial Sequence: Synthetic oligonucleotide
  Antisense strand to SEQ ID NO: 1005672
uguuaucaccacaggaacc

SEQ ID NO: 1005674 - RNA, 19 nt, Artificial Sequence
  Description of Artificial Sequence: Synthetic oligonucleotide
  Sense strand starting at position 2785 of SEQ ID NO: 914460
uuccaagagucauugauga

SEQ ID NO: 1005675 - RNA, 19 nt, Artificial Sequence
  Description of Artificial Sequence: Synthetic oligonucleotide
  Antisense strand to SEQ ID NO: 1005674
ucaucaaugacucuuggaa

SEQ ID NO: 1005676 - RNA, 19 nt, Artificial Sequence
  Description of Artificial Sequence: Synthetic oligonucleotide
  Sense strand starting at position 2792 of SEQ ID NO: 914460
agucauugaugacagauuu

SEQ ID NO: 1005677 - RNA, 19 nt, Artificial Sequence
  Description of Artificial Sequence: Synthetic oligonucleotide
  Antisense strand to SEQ ID NO: 1005676
aaaucugucaucaaugacu

SEQ ID NO: 1005678 - RNA, 19 nt, Artificial Sequence
  Description of Artificial Sequence: Synthetic oligonucleotide
  Sense strand starting at position 2940 of SEQ ID NO: 914460
cauggagucgacuacuuaa

SEQ ID NO: 1005679 - RNA, 19 nt, Artificial Sequence
  Description of Artificial Sequence: Synthetic oligonucleotide
  Antisense strand to SEQ ID NO: 1005678
uuaaguagucgacuccaug

SEQ ID NO: 1005680 - RNA, 19 nt, Artificial Sequence
  Description of Artificial Sequence: Synthetic oligonucleotide
  Sense strand starting at position 2943 of SEQ ID NO: 914460
ggagucgacuacuuaauuc

SEQ ID NO: 1005681 - RNA, 19 nt, Artificial Sequence
  Description of Artificial Sequence: Synthetic oligonucleotide
  Antisense strand to SEQ ID NO: 1005680
gaauuaaguagucgacucc

SEQ ID NO: 1005682 - RNA, 19 nt, Artificial Sequence
  Description of Artificial Sequence: Synthetic oligonucleotide
  Sense strand starting at position 3132 of SEQ ID NO: 914460
ggucaccugggauaucagu

SEQ ID NO: 1005683 - RNA, 19 nt, Artificial Sequence
  Description of Artificial Sequence: Synthetic oligonucleotide
  Antisense strand to SEQ ID NO: 1005682
acugauaucccaggugacc

SEQ ID NO: 1005684 - RNA, 19 nt, Artificial Sequence
  Description of Artificial Sequence: Synthetic oligonucleotide
  Sense strand starting at position 3173 of SEQ ID NO: 914460
ucauguuugcaugaagaga

SEQ ID NO: 1005685 - RNA, 19 nt, Artificial Sequence
  Description of Artificial Sequence: Synthetic oligonucleotide
  Antisense strand to SEQ ID NO: 1005684
ucucuucaugcaaacauga

SEQ ID NO: 1005686 - RNA, 19 nt, Artificial Sequence
  Description of Artificial Sequence: Synthetic oligonucleotide
  Sense strand starting at position 3198 of SEQ ID NO: 914460
guguuaucuuaacuugaaa

SEQ ID NO: 1005687 - RNA, 19 nt, Artificial Sequence
  Description of Artificial Sequence: Synthetic oligonucleotide
  Antisense strand to SEQ ID NO: 1005686
uuucaaguuaagauaacac

SEQ ID NO: 1005688 - RNA, 19 nt, Artificial Sequence
  Description of Artificial Sequence: Synthetic oligonucleotide
  Sense strand starting at position 3256 of SEQ ID NO: 914460
aucugaauugaauggguca

SEQ ID NO: 1005689 - RNA, 19 nt, Artificial Sequence
  Description of Artificial Sequence: Synthetic oligonucleotide
  Antisense strand to SEQ ID NO: 1005688
ugacccauucaauucagau

SEQ ID NO: 1005690 - RNA, 19 nt, Artificial Sequence
  Description of Artificial Sequence: Synthetic oligonucleotide
  Sense strand starting at position 3257 of SEQ ID NO: 914460
ucugaauugaaugggucaa

SEQ ID NO: 1005691 - RNA, 19 nt, Artificial Sequence
  Description of Artificial Sequence: Synthetic oligonucleotide
  Antisense strand to SEQ ID NO: 1005690
uugacccauucaauucaga

SEQ ID NO: 1005692 - RNA, 19 nt, Artificial Sequence
  Description of Artificial Sequence: Synthetic oligonucleotide
  Sense strand starting at position 3258 of SEQ ID NO: 914460
cugaauugaaugggucaau

SEQ ID NO: 1005693 - RNA, 19 nt, Artificial Sequence
  Description of Artificial Sequence: Synthetic oligonucleotide
  Antisense strand to SEQ ID NO: 1005692
auugacccauucaauucag

SEQ ID NO: 1005694 - RNA, 19 nt, Artificial Sequence
  Description of Artificial Sequence: Synthetic oligonucleotide
  Sense strand starting at position 3348 of SEQ ID NO: 914460
gaucacuaaggcuauguaa

SEQ ID NO: 1005695 - RNA, 19 nt, Artificial Sequence
  Description of Artificial Sequence: Synthetic oligonucleotide
  Antisense strand to SEQ ID NO: 1005694
uuacauagccuuagugauc

SEQ ID NO: 1005696 - RNA, 19 nt, Artificial Sequence
  Description of Artificial Sequence: Synthetic oligonucleotide
  Sense strand starting at position 3350 of SEQ ID NO: 914460
ucacuaaggcuauguaaca

SEQ ID NO: 1005697 - RNA, 19 nt, Artificial Sequence
  Description of Artificial Sequence: Synthetic oligonucleotide
  Antisense strand to SEQ ID NO: 1005696
uguuacauagccuuaguga

SEQ ID NO: 1005698 - RNA, 19 nt, Artificial Sequence
  Description of Artificial Sequence: Synthetic oligonucleotide
  Sense strand starting at position 3369 of SEQ ID NO: 914460
uugcuaagugcuuccaugu

SEQ ID NO: 1005699 - RNA, 19 nt, Artificial Sequence
  Description of Artificial Sequence: Synthetic oligonucleotide
  Antisense strand to SEQ ID NO: 1005698
acauggaagcacuuagcaa

SEQ ID NO: 1005700 - RNA, 19 nt, Artificial Sequence
  Description of Artificial Sequence: Synthetic oligonucleotide
  Sense strand starting at position 3370 of SEQ ID NO: 914460
ugcuaagugcuuccauguu

SEQ ID NO: 1005701 - RNA, 19 nt, Artificial Sequence
  Description of Artificial Sequence: Synthetic oligonucleotide
  Antisense strand to SEQ ID NO: 1005700
aacauggaagcacuuagca

SEQ ID NO: 1005702 - RNA, 19 nt, Artificial Sequence
  Description of Artificial Sequence: Synthetic oligonucleotide
  Sense strand starting at position 3520 of SEQ ID NO: 914460
ugcacuugaaauggaugau

SEQ ID NO: 1005703 - RNA, 19 nt, Artificial Sequence
  Description of Artificial Sequence: Synthetic oligonucleotide
  Antisense strand to SEQ ID NO: 1005702
aucauccauuucaagugca

SEQ ID NO: 1005704 - RNA, 19 nt, Artificial Sequence
  Description of Artificial Sequence: Synthetic oligonucleotide
  Sense strand starting at position 3575 of SEQ ID NO: 914460
uccaguguucuccaaacau

SEQ ID NO: 1005705 - RNA, 19 nt, Artificial Sequence
  Description of Artificial Sequence: Synthetic oligonucleotide
  Antisense strand to SEQ ID NO: 1005704
auguuuggagaacacugga

SEQ ID NO: 1005706 - RNA, 19 nt, Artificial Sequence
  Description of Artificial Sequence: Synthetic oligonucleotide
  Sense strand starting at position 3620 of SEQ ID NO: 914460
ucaggaucuuccuuagcaa

SEQ ID NO: 1005707 - RNA, 19 nt, Artificial Sequence
  Description of Artificial Sequence: Synthetic oligonucleotide
  Antisense strand to SEQ ID NO: 1005706
uugcuaaggaagauccuga

SEQ ID NO: 1005708 - RNA, 19 nt, Artificial Sequence
  Description of Artificial Sequence: Synthetic oligonucleotide
  Sense strand starting at position 3623 of SEQ ID NO: 914460
ggaucuuccuuagcaaacu

SEQ ID NO: 1005709 - RNA, 19 nt, Artificial Sequence
  Description of Artificial Sequence: Synthetic oligonucleotide
  Antisense strand to SEQ ID NO: 1005708
aguuugcuaaggaagaucc

SEQ ID NO: 1005710 - RNA, 19 nt, Artificial Sequence
  Description of Artificial Sequence: Synthetic oligonucleotide
  Sense strand starting at position 3633 of SEQ ID NO: 914460
uagcaaacuguagguuuaa

SEQ ID NO: 1005711 - RNA, 19 nt, Artificial Sequence
  Description of Artificial Sequence: Synthetic oligonucleotide
  Antisense strand to SEQ ID NO: 1005710
uuaaaccuacaguuugcua

SEQ ID NO: 1005712 - RNA, 19 nt, Artificial Sequence
  Description of Artificial Sequence: Synthetic oligonucleotide
  Sense strand starting at position 3634 of SEQ ID NO: 914460
agcaaacuguagguuuaau

SEQ ID NO: 1005713 - RNA, 19 nt, Artificial Sequence
  Description of Artificial Sequence: Synthetic oligonucleotide
  Antisense strand to SEQ ID NO: 1005712
auuaaaccuacaguuugcu

SEQ ID NO: 1005714 - RNA, 19 nt, Artificial Sequence
  Description of Artificial Sequence: Synthetic oligonucleotide
  Sense strand starting at position 89 of SEQ ID NO: 914461
ugaaguagugguuaagcau

SEQ ID NO: 1005715 - RNA, 19 nt, Artificial Sequence
  Description of Artificial Sequence: Synthetic oligonucleotide
  Antisense strand to SEQ ID NO: 1005714
augcuuaaccacuacuuca

SEQ ID NO: 1005716 - RNA, 19 nt, Artificial Sequence
  Description of Artificial Sequence: Synthetic oligonucleotide
  Sense strand starting at position 129 of SEQ ID NO: 914461
accacuugucggcugugua

SEQ ID NO: 1005717 - RNA, 19 nt, Artificial Sequence
  Description of Artificial Sequence: Synthetic oligonucleotide
  Antisense strand to SEQ ID NO: 1005716
uacacagccgacaaguggu

SEQ ID NO: 1005718 - RNA, 19 nt, Artificial Sequence
  Description of Artificial Sequence: Synthetic oligonucleotide
  Sense strand starting at position 151 of SEQ ID NO: 914461
agccuugcauuguuauuua

SEQ ID NO: 1005719 - RNA, 19 nt, Artificial Sequence
  Description of Artificial Sequence: Synthetic oligonucleotide
  Antisense strand to SEQ ID NO: 1005718
uaaauaacaaugcaaggcu

SEQ ID NO: 1005720 - RNA, 19 nt, Artificial Sequence
  Description of Artificial Sequence: Synthetic oligonucleotide
  Sense strand starting at position 212 of SEQ ID NO: 914461
ugggaauaccuacgguaca

SEQ ID NO: 1005721 - RNA, 19 nt, Artificial Sequence
  Description of Artificial Sequence: Synthetic oligonucleotide
  Antisense strand to SEQ ID NO: 1005720
uguaccguagguauuccca

SEQ ID NO: 1005722 - RNA, 19 nt, Artificial Sequence
  Description of Artificial Sequence: Synthetic oligonucleotide
  Sense strand starting at position 347 of SEQ ID NO: 914461
acaguuauuacgggauaca

SEQ ID NO: 1005723 - RNA, 19 nt, Artificial Sequence
  Description of Artificial Sequence: Synthetic oligonucleotide
  Antisense strand to SEQ ID NO: 1005722
uguaucccguaauaacugu

SEQ ID NO: 1005724 - RNA, 19 nt, Artificial Sequence
  Description of Artificial Sequence: Synthetic oligonucleotide
  Sense strand starting at position 348 of SEQ ID NO: 914461
caguuauuacgggauacac

SEQ ID NO: 1005725 - RNA, 19 nt, Artificial Sequence
  Description of Artificial Sequence: Synthetic oligonucleotide
  Antisense strand to SEQ ID NO: 1005724
guguaucccguaauaacug

SEQ ID NO: 1005726 - RNA, 19 nt, Artificial Sequence
  Description of Artificial Sequence: Synthetic oligonucleotide
  Sense strand starting at position 407 of SEQ ID NO: 914461
gguggacacucggaauuua

SEQ ID NO: 1005727 - RNA, 19 nt, Artificial Sequence
  Description of Artificial Sequence: Synthetic oligonucleotide
  Antisense strand to SEQ ID NO: 1005726
uaaauuccgaguguccacc

SEQ ID NO: 1005728 - RNA, 19 nt, Artificial Sequence
  Description of Artificial Sequence: Synthetic oligonucleotide
  Sense strand starting at position 461 of SEQ ID NO: 914461
uaugaagccguauggaaau

SEQ ID NO: 1005729 - RNA, 19 nt, Artificial Sequence
  Description of Artificial Sequence: Synthetic oligonucleotide
  Antisense strand to SEQ ID NO: 1005728
auuuccauacggcuucaua

SEQ ID NO: 1005730 - RNA, 19 nt, Artificial Sequence
  Description of Artificial Sequence: Synthetic oligonucleotide
  Sense strand starting at position 598 of SEQ ID NO: 914461
gacucaaauuggccgaaga

SEQ ID NO: 1005731 - RNA, 19 nt, Artificial Sequence
  Description of Artificial Sequence: Synthetic oligonucleotide
  Antisense strand to SEQ ID NO: 1005730
ucuucggccaauuugaguc

SEQ ID NO: 1005732 - RNA, 19 nt, Artificial Sequence
  Description of Artificial Sequence: Synthetic oligonucleotide
  Sense strand starting at position 599 of SEQ ID NO: 914461
acucaaauuggccgaagaa

SEQ ID NO: 1005733 - RNA, 19 nt, Artificial Sequence
  Description of Artificial Sequence: Synthetic oligonucleotide
  Antisense strand to SEQ ID NO: 1005732
uucuucggccaauuugagu

SEQ ID NO: 1005734 - RNA, 19 nt, Artificial Sequence
  Description of Artificial Sequence: Synthetic oligonucleotide
  Sense strand starting at position 679 of SEQ ID NO: 914461
ugauucucagguugggaua

SEQ ID NO: 1005735 - RNA, 19 nt, Artificial Sequence
  Description of Artificial Sequence: Synthetic oligonucleotide
  Antisense strand to SEQ ID NO: 1005734
uaucccaaccugagaauca

SEQ ID NO: 1005736 - RNA, 19 nt, Artificial Sequence
  Description of Artificial Sequence: Synthetic oligonucleotide
  Sense strand starting at position 680 of SEQ ID NO: 914461
gauucucagguugggauau

SEQ ID NO: 1005737 - RNA, 19 nt, Artificial Sequence
  Description of Artificial Sequence: Synthetic oligonucleotide
  Antisense strand to SEQ ID NO: 1005736
auaucccaaccugagaauc

SEQ ID NO: 1005738 - RNA, 19 nt, Artificial Sequence
  Description of Artificial Sequence: Synthetic oligonucleotide
  Sense strand starting at position 789 of SEQ ID NO: 914461
cgaggaucucaauauaagc

SEQ ID NO: 1005739 - RNA, 19 nt, Artificial Sequence
  Description of Artificial Sequence: Synthetic oligonucleotide
  Antisense strand to SEQ ID NO: 1005738
gcuuauauugagauccucg

SEQ ID NO: 1005740 - RNA, 19 nt, Artificial Sequence
  Description of Artificial Sequence: Synthetic oligonucleotide
  Sense strand starting at position 805 of SEQ ID NO: 914461
agcagaagacuccguggaa

SEQ ID NO: 1005741 - RNA, 19 nt, Artificial Sequence
  Description of Artificial Sequence: Synthetic oligonucleotide
  Antisense strand to SEQ ID NO: 1005740
uuccacggagucuucugcu

SEQ ID NO: 1005742 - RNA, 19 nt, Artificial Sequence
  Description of Artificial Sequence: Synthetic oligonucleotide
  Sense strand starting at position 806 of SEQ ID NO: 914461
gcagaagacuccguggaau

SEQ ID NO: 1005743 - RNA, 19 nt, Artificial Sequence
  Description of Artificial Sequence: Synthetic oligonucleotide
  Antisense strand to SEQ ID NO: 1005742
auuccacggagucuucugc

SEQ ID NO: 1005744 - RNA, 19 nt, Artificial Sequence
  Description of Artificial Sequence: Synthetic oligonucleotide
  Sense strand starting at position 808 of SEQ ID NO: 914461
agaagacuccguggaaucu

SEQ ID NO: 1005745 - RNA, 19 nt, Artificial Sequence
  Description of Artificial Sequence: Synthetic oligonucleotide
  Antisense strand to SEQ ID NO: 1005744
agauuccacggagucuucu

SEQ ID NO: 1005746 - RNA, 19 nt, Artificial Sequence
  Description of Artificial Sequence: Synthetic oligonucleotide
  Sense strand starting at position 809 of SEQ ID NO: 914461
gaagacuccguggaaucuu

SEQ ID NO: 1005747 - RNA, 19 nt, Artificial Sequence
  Description of Artificial Sequence: Synthetic oligonucleotide
  Antisense strand to SEQ ID NO: 1005746
aagauuccacggagucuuc

SEQ ID NO: 1005748 - RNA, 19 nt, Artificial Sequence
  Description of Artificial Sequence: Synthetic oligonucleotide
  Sense strand starting at position 843 of SEQ ID NO: 914461
aaagaagugcacugaucau

SEQ ID NO: 1005749 - RNA, 19 nt, Artificial Sequence
  Description of Artificial Sequence: Synthetic oligonucleotide
  Antisense strand to SEQ ID NO: 1005748
augaucagugcacuucuuu

SEQ ID NO: 1005750 - RNA, 19 nt, Artificial Sequence
  Description of Artificial Sequence: Synthetic oligonucleotide
  Sense strand starting at position 877 of SEQ ID NO: 914461
ugacuuaaggguugucacu

SEQ ID NO: 1005751 - RNA, 19 nt, Artificial Sequence
  Description of Artificial Sequence: Synthetic oligonucleotide
  Antisense strand to SEQ ID NO: 1005750
agugacaacccuuaaguca

SEQ ID NO: 1005752 - RNA, 19 nt, Artificial Sequence
  Description of Artificial Sequence: Synthetic oligonucleotide
  Sense strand starting at position 879 of SEQ ID NO: 914461
acuuaaggguugucacuua

SEQ ID NO: 1005753 - RNA, 19 nt, Artificial Sequence
  Description of Artificial Sequence: Synthetic oligonucleotide
  Antisense strand to SEQ ID NO: 1005752
uaagugacaacccuuaagu

SEQ ID NO: 1005754 - RNA, 19 nt, Artificial Sequence
  Description of Artificial Sequence: Synthetic oligonucleotide
  Sense strand starting at position 1284 of SEQ ID NO: 914461
ggauuagcagggcagucau

SEQ ID NO: 1005755 - RNA, 19 nt, Artificial Sequence
  Description of Artificial Sequence: Synthetic oligonucleotide
  Antisense strand to SEQ ID NO: 1005754
augacugcccugcuaaucc

SEQ ID NO: 1005756 - RNA, 19 nt, Artificial Sequence
  Description of Artificial Sequence: Synthetic oligonucleotide
  Sense strand starting at position 1324 of SEQ ID NO: 914461
uuuaaauuugcucgugcaa

SEQ ID NO: 1005757 - RNA, 19 nt, Artificial Sequence
  Description of Artificial Sequence: Synthetic oligonucleotide
  Antisense strand to SEQ ID NO: 1005756
uugcacgagcaaauuuaaa

SEQ ID NO: 1005758 - RNA, 19 nt, Artificial Sequence
  Description of Artificial Sequence: Synthetic oligonucleotide
  Sense strand starting at position 1390 of SEQ ID NO: 914461
agaaaugucccugggaauu

SEQ ID NO: 1005759 - RNA, 19 nt, Artificial Sequence
  Description of Artificial Sequence: Synthetic oligonucleotide
  Antisense strand to SEQ ID NO: 1005758
aauucccagggacauuucu

SEQ ID NO: 1005760 - RNA, 19 nt, Artificial Sequence
  Description of Artificial Sequence: Synthetic oligonucleotide
  Sense strand starting at position 1426 of SEQ ID NO: 914461
gcgcuagaacuuucgcacu

SEQ ID NO: 1005761 - RNA, 19 nt, Artificial Sequence
  Description of Artificial Sequence: Synthetic oligonucleotide
  Antisense strand to SEQ ID NO: 1005760
agugcgaaaguucuagcgc

SEQ ID NO: 1005762 - RNA, 19 nt, Artificial Sequence
  Description of Artificial Sequence: Synthetic oligonucleotide
  Sense strand starting at position 2029 of SEQ ID NO: 914461
gaaggucauuagccuaaga

SEQ ID NO: 1005763 - RNA, 19 nt, Artificial Sequence
  Description of Artificial Sequence: Synthetic oligonucleotide
  Antisense strand to SEQ ID NO: 1005762
ucuuaggcuaaugaccuuc

SEQ ID NO: 1005764 - RNA, 19 nt, Artificial Sequence
  Description of Artificial Sequence: Synthetic oligonucleotide
  Sense strand starting at position 2031 of SEQ ID NO: 914461
aggucauuagccuaagaua

SEQ ID NO: 1005765 - RNA, 19 nt, Artificial Sequence
  Description of Artificial Sequence: Synthetic oligonucleotide
  Antisense strand to SEQ ID NO: 1005764
uaucuuaggcuaaugaccu

SEQ ID NO: 1005766 - RNA, 19 nt, Artificial Sequence
  Description of Artificial Sequence: Synthetic oligonucleotide
  Sense strand starting at position 2042 of SEQ ID NO: 914461
cuaagauacguggguaauc

SEQ ID NO: 1005767 - RNA, 19 nt, Artificial Sequence
  Description of Artificial Sequence: Synthetic oligonucleotide
  Antisense strand to SEQ ID NO: 1005766
gauuacccacguaucuuag

SEQ ID NO: 1005768 - RNA, 19 nt, Artificial Sequence
  Description of Artificial Sequence: Synthetic oligonucleotide
  Sense strand starting at position 2043 of SEQ ID NO: 914461
uaagauacguggguaaucu

SEQ ID NO: 1005769 - RNA, 19 nt, Artificial Sequence
  Description of Artificial Sequence: Synthetic oligonucleotide
  Antisense strand to SEQ ID NO: 1005768
agauuacccacguaucuua

SEQ ID NO: 1005770 - RNA, 19 nt, Artificial Sequence
  Description of Artificial Sequence: Synthetic oligonucleotide
  Sense strand starting at position 2044 of SEQ ID NO: 914461
aagauacguggguaaucuu

SEQ ID NO: 1005771 - RNA, 19 nt, Artificial Sequence
  Description of Artificial Sequence: Synthetic oligonucleotide
  Antisense strand to SEQ ID NO: 1005770
aagauuacccacguaucuu

SEQ ID NO: 1005772 - RNA, 19 nt, Artificial Sequence
  Description of Artificial Sequence: Synthetic oligonucleotide
  Sense strand starting at position 2051 of SEQ ID NO: 914461
guggguaaucuugagcauc

SEQ ID NO: 1005773 - RNA, 19 nt, Artificial Sequence
  Description of Artificial Sequence: Synthetic oligonucleotide
  Antisense strand to SEQ ID NO: 1005772
gaugcucaagauuacccac

SEQ ID NO: 1005774 - RNA, 19 nt, Artificial Sequence
  Description of Artificial Sequence: Synthetic oligonucleotide
  Sense strand starting at position 2053 of SEQ ID NO: 914461
ggguaaucuugagcaucug

SEQ ID NO: 1005775 - RNA, 19 nt, Artificial Sequence
  Description of Artificial Sequence: Synthetic oligonucleotide
  Antisense strand to SEQ ID NO: 1005774
cagaugcucaagauuaccc

SEQ ID NO: 1005776 - RNA, 19 nt, Artificial Sequence
  Description of Artificial Sequence: Synthetic oligonucleotide
  Sense strand starting at position 2929 of SEQ ID NO: 914461
guauguuauguugaauagu

SEQ ID NO: 1005777 - RNA, 19 nt, Artificial Sequence
  Description of Artificial Sequence: Synthetic oligonucleotide
  Antisense strand to SEQ ID NO: 1005776
acuauucaacauaacauac

SEQ ID NO: 1005778 - RNA, 19 nt, Artificial Sequence
  Description of Artificial Sequence: Synthetic oligonucleotide
  Sense strand starting at position 2932 of SEQ ID NO: 914461
uguuauguugaauagucau

SEQ ID NO: 1005779 - RNA, 19 nt, Artificial Sequence
  Description of Artificial Sequence: Synthetic oligonucleotide
  Antisense strand to SEQ ID NO: 1005778
augacuauucaacauaaca

SEQ ID NO: 1005780 - RNA, 19 nt, Artificial Sequence
  Description of Artificial Sequence: Synthetic oligonucleotide
  Sense strand starting at position 3435 of SEQ ID NO: 914461
gggaaagcauuccuaacua

SEQ ID NO: 1005781 - RNA, 19 nt, Artificial Sequence
  Description of Artificial Sequence: Synthetic oligonucleotide
  Antisense strand to SEQ ID NO: 1005780
uaguuaggaaugcuuuccc

SEQ ID NO: 1005782 - RNA, 19 nt, Artificial Sequence
  Description of Artificial Sequence: Synthetic oligonucleotide
  Sense strand starting at position 3558 of SEQ ID NO: 914461
ggacacaagcuucgugaaa

SEQ ID NO: 1005783 - RNA, 19 nt, Artificial Sequence
  Description of Artificial Sequence: Synthetic oligonucleotide
  Antisense strand to SEQ ID NO: 1005782
uuucacgaagcuugugucc

SEQ ID NO: 1005784 - RNA, 19 nt, Artificial Sequence
  Description of Artificial Sequence: Synthetic oligonucleotide
  Sense strand starting at position 3853 of SEQ ID NO: 914461
agaggcuaaugaguugaau

SEQ ID NO: 1005785 - RNA, 19 nt, Artificial Sequence
  Description of Artificial Sequence: Synthetic oligonucleotide
  Antisense strand to SEQ ID NO: 1005784
auucaacucauuagccucu

SEQ ID NO: 1005786 - RNA, 19 nt, Artificial Sequence
  Description of Artificial Sequence: Synthetic oligonucleotide
  Sense strand starting at position 3855 of SEQ ID NO: 914461
aggcuaaugaguugaaugu

SEQ ID NO: 1005787 - RNA, 19 nt, Artificial Sequence
  Description of Artificial Sequence: Synthetic oligonucleotide
  Antisense strand to SEQ ID NO: 1005786
acauucaacucauuagccu

SEQ ID NO: 1005788 - RNA, 19 nt, Artificial Sequence
  Description of Artificial Sequence: Synthetic oligonucleotide
  Sense strand starting at position 3856 of SEQ ID NO: 914461
ggcuaaugaguugaaugua

SEQ ID NO: 1005789 - RNA, 19 nt, Artificial Sequence
  Description of Artificial Sequence: Synthetic oligonucleotide
  Antisense strand to SEQ ID NO: 1005788
uacauucaacucauuagcc

SEQ ID NO: 1005790 - RNA, 19 nt, Artificial Sequence
  Description of Artificial Sequence: Synthetic oligonucleotide
  Sense strand starting at position 3859 of SEQ ID NO: 914461
uaaugaguugaauguaauc

SEQ ID NO: 1005791 - RNA, 19 nt, Artificial Sequence
  Description of Artificial Sequence: Synthetic oligonucleotide
  Antisense strand to SEQ ID NO: 1005790
gauuacauucaacucauua

SEQ ID NO: 1005792 - RNA, 19 nt, Artificial Sequence
  Description of Artificial Sequence: Synthetic oligonucleotide
  Sense strand starting at position 3912 of SEQ ID NO: 914461
cccaaugaucagugcuaug

SEQ ID NO: 1005793 - RNA, 19 nt, Artificial Sequence
  Description of Artificial Sequence: Synthetic oligonucleotide
  Antisense strand to SEQ ID NO: 1005792
cauagcacugaucauuggg

SEQ ID NO: 1005794 - RNA, 19 nt, Artificial Sequence
  Description of Artificial Sequence: Synthetic oligonucleotide
  Sense strand starting at position 31 of SEQ ID NO: 914462
ugggacaucucugucugau

SEQ ID NO: 1005795 - RNA, 19 nt, Artificial Sequence
  Description of Artificial Sequence: Synthetic oligonucleotide
  Antisense strand to SEQ ID NO: 1005794
aucagacagagauguccca

SEQ ID NO: 1005796 - RNA, 19 nt, Artificial Sequence
  Description of Artificial Sequence: Synthetic oligonucleotide
  Sense strand starting at position 33 of SEQ ID NO: 914462
ggacaucucugucugauau

SEQ ID NO: 1005797 - RNA, 19 nt, Artificial Sequence
  Description of Artificial Sequence: Synthetic oligonucleotide
  Antisense strand to SEQ ID NO: 1005796
auaucagacagagaugucc

SEQ ID NO: 1005798 - RNA, 19 nt, Artificial Sequence
  Description of Artificial Sequence: Synthetic oligonucleotide
  Sense strand starting at position 34 of SEQ ID NO: 914462
gacaucucugucugauaug

SEQ ID NO: 1005799 - RNA, 19 nt, Artificial Sequence
  Description of Artificial Sequence: Synthetic oligonucleotide
  Antisense strand to SEQ ID NO: 1005798
cauaucagacagagauguc

SEQ ID NO: 1005800 - RNA, 19 nt, Artificial Sequence
  Description of Artificial Sequence: Synthetic oligonucleotide
  Sense strand starting at position 536 of SEQ ID NO: 914462
uuugcauugauuuguguga

SEQ ID NO: 1005801 - RNA, 19 nt, Artificial Sequence
  Description of Artificial Sequence: Synthetic oligonucleotide
  Antisense strand to SEQ ID NO: 1005800
ucacacaaaucaaugcaaa

SEQ ID NO: 1005802 - RNA, 19 nt, Artificial Sequence
  Description of Artificial Sequence: Synthetic oligonucleotide
  Sense strand starting at position 537 of SEQ ID NO: 914462
uugcauugauuugugugau

SEQ ID NO: 1005803 - RNA, 19 nt, Artificial Sequence
  Description of Artificial Sequence: Synthetic oligonucleotide
  Antisense strand to SEQ ID NO: 1005802
aucacacaaaucaaugcaa

SEQ ID NO: 1005804 - RNA, 19 nt, Artificial Sequence
  Description of Artificial Sequence: Synthetic oligonucleotide
  Sense strand starting at position 808 of SEQ ID NO: 914462
ugcggucauuugguuaaag

SEQ ID NO: 1005805 - RNA, 19 nt, Artificial Sequence
  Description of Artificial Sequence: Synthetic oligonucleotide
  Antisense strand to SEQ ID NO: 1005804
cuuuaaccaaaugaccgca

SEQ ID NO: 1005806 - RNA, 19 nt, Artificial Sequence
  Description of Artificial Sequence: Synthetic oligonucleotide
  Sense strand starting at position 817 of SEQ ID NO: 914462
uugguuaaagccuaagcaa

SEQ ID NO: 1005807 - RNA, 19 nt, Artificial Sequence
  Description of Artificial Sequence: Synthetic oligonucleotide
  Antisense strand to SEQ ID NO: 1005806
uugcuuaggcuuuaaccaa

SEQ ID NO: 1005808 - RNA, 19 nt, Artificial Sequence
  Description of Artificial Sequence: Synthetic oligonucleotide
  Sense strand starting at position 843 of SEQ ID NO: 914462
aaguuacaaugguuugaua

SEQ ID NO: 1005809 - RNA, 19 nt, Artificial Sequence
  Description of Artificial Sequence: Synthetic oligonucleotide
  Antisense strand to SEQ ID NO: 1005808
uaucaaaccauuguaacuu

SEQ ID NO: 1005810 - RNA, 19 nt, Artificial Sequence
  Description of Artificial Sequence: Synthetic oligonucleotide
  Sense strand starting at position 845 of SEQ ID NO: 914462
guuacaaugguuugauaau

SEQ ID NO: 1005811 - RNA, 19 nt, Artificial Sequence
  Description of Artificial Sequence: Synthetic oligonucleotide
  Antisense strand to SEQ ID NO: 1005810
auuaucaaaccauuguaac

SEQ ID NO: 1005812 - RNA, 19 nt, Artificial Sequence
  Description of Artificial Sequence: Synthetic oligonucleotide
  Sense strand starting at position 857 of SEQ ID NO: 914462
ugauaauaaugaguuugca

SEQ ID NO: 1005813 - RNA, 19 nt, Artificial Sequence
  Description of Artificial Sequence: Synthetic oligonucleotide
  Antisense strand to SEQ ID NO: 1005812
ugcaaacucauuauuauca

SEQ ID NO: 1005814 - RNA, 19 nt, Artificial Sequence
  Description of Artificial Sequence: Synthetic oligonucleotide
  Sense strand starting at position 900 of SEQ ID NO: 914462
gugguuugcagacagaucu

SEQ ID NO: 1005815 - RNA, 19 nt, Artificial Sequence
  Description of Artificial Sequence: Synthetic oligonucleotide
  Antisense strand to SEQ ID NO: 1005814
agaucugucugcaaaccac

SEQ ID NO: 1005816 - RNA, 19 nt, Artificial Sequence
  Description of Artificial Sequence: Synthetic oligonucleotide
  Sense strand starting at position 934 of SEQ ID NO: 914462
gugacucuucuacaaacga

SEQ ID NO: 1005817 - RNA, 19 nt, Artificial Sequence
  Description of Artificial Sequence: Synthetic oligonucleotide
  Antisense strand to SEQ ID NO: 1005816
ucguuuguagaagagucac

SEQ ID NO: 1005818 - RNA, 19 nt, Artificial Sequence
  Description of Artificial Sequence: Synthetic oligonucleotide
  Sense strand starting at position 1176 of SEQ ID NO: 914462
aggguugugauccauccca

SEQ ID NO: 1005819 - RNA, 19 nt, Artificial Sequence
  Description of Artificial Sequence: Synthetic oligonucleotide
  Antisense strand to SEQ ID NO: 1005818
ugggauggaucacaacccu

SEQ ID NO: 1005820 - RNA, 19 nt, Artificial Sequence
  Description of Artificial Sequence: Synthetic oligonucleotide
  Sense strand starting at position 1245 of SEQ ID NO: 914462
cuuugugcuaguccguuua

SEQ ID NO: 1005821 - RNA, 19 nt, Artificial Sequence
  Description of Artificial Sequence: Synthetic oligonucleotide
  Antisense strand to SEQ ID NO: 1005820
uaaacggacuagcacaaag

SEQ ID NO: 1005822 - RNA, 19 nt, Artificial Sequence
  Description of Artificial Sequence: Synthetic oligonucleotide
  Sense strand starting at position 1248 of SEQ ID NO: 914462
ugugcuaguccguuuauug

SEQ ID NO: 1005823 - RNA, 19 nt, Artificial Sequence
  Description of Artificial Sequence: Synthetic oligonucleotide
  Antisense strand to SEQ ID NO: 1005822
caauaaacggacuagcaca

SEQ ID NO: 1005824 - RNA, 19 nt, Artificial Sequence
  Description of Artificial Sequence: Synthetic oligonucleotide
  Sense strand starting at position 1249 of SEQ ID NO: 914462
gugcuaguccguuuauuga

SEQ ID NO: 1005825 - RNA, 19 nt, Artificial Sequence
  Description of Artificial Sequence: Synthetic oligonucleotide
  Antisense strand to SEQ ID NO: 1005824
ucaauaaacggacuagcac

SEQ ID NO: 1005826 - RNA, 19 nt, Artificial Sequence
  Description of Artificial Sequence: Synthetic oligonucleotide
  Sense strand starting at position 1394 of SEQ ID NO: 914462
aggccugagccagggaauu

SEQ ID NO: 1005827 - RNA, 19 nt, Artificial Sequence
  Description of Artificial Sequence: Synthetic oligonucleotide
  Antisense strand to SEQ ID NO: 1005826
aauucccuggcucaggccu

SEQ ID NO: 1005828 - RNA, 19 nt, Artificial Sequence
  Description of Artificial Sequence: Synthetic oligonucleotide
  Sense strand starting at position 2084 of SEQ ID NO: 914462
cgagguuggaaguaacuua

SEQ ID NO: 1005829 - RNA, 19 nt, Artificial Sequence
  Description of Artificial Sequence: Synthetic oligonucleotide
  Antisense strand to SEQ ID NO: 1005828
uaaguuacuuccaaccucg

SEQ ID NO: 1005830 - RNA, 19 nt, Artificial Sequence
  Description of Artificial Sequence: Synthetic oligonucleotide
  Sense strand starting at position 2148 of SEQ ID NO: 914462
gaagaaacgugguuagagu

SEQ ID NO: 1005831 - RNA, 19 nt, Artificial Sequence
  Description of Artificial Sequence: Synthetic oligonucleotide
  Antisense strand to SEQ ID NO: 1005830
acucuaaccacguuucuuc

SEQ ID NO: 1005832 - RNA, 19 nt, Artificial Sequence
  Description of Artificial Sequence: Synthetic oligonucleotide
  Sense strand starting at position 2295 of SEQ ID NO: 914462
gcucucuuccuaggaaaug

SEQ ID NO: 1005833 - RNA, 19 nt, Artificial Sequence
  Description of Artificial Sequence: Synthetic oligonucleotide
  Antisense strand to SEQ ID NO: 1005832
cauuuccuaggaagagagc

SEQ ID NO: 1005834 - RNA, 19 nt, Artificial Sequence
  Description of Artificial Sequence: Synthetic oligonucleotide
  Sense strand starting at position 2567 of SEQ ID NO: 914462
ccuguugaaucuuuggaau

SEQ ID NO: 1005835 - RNA, 19 nt, Artificial Sequence
  Description of Artificial Sequence: Synthetic oligonucleotide
  Antisense strand to SEQ ID NO: 1005834
auuccaaagauucaacagg

SEQ ID NO: 1005836 - RNA, 19 nt, Artificial Sequence
  Description of Artificial Sequence: Synthetic oligonucleotide
  Sense strand starting at position 2834 of SEQ ID NO: 914462
uucugauguguauauaacu

SEQ ID NO: 1005837 - RNA, 19 nt, Artificial Sequence
  Description of Artificial Sequence: Synthetic oligonucleotide
  Antisense strand to SEQ ID NO: 1005836
aguuauauacacaucagaa

SEQ ID NO: 1005838 - RNA, 19 nt, Artificial Sequence
  Description of Artificial Sequence: Synthetic oligonucleotide
  Sense strand starting at position 2857 of SEQ ID NO: 914462
guagauucaugggucauga

SEQ ID NO: 1005839 - RNA, 19 nt, Artificial Sequence
  Description of Artificial Sequence: Synthetic oligonucleotide
  Antisense strand to SEQ ID NO: 1005838
ucaugacccaugaaucuac

SEQ ID NO: 1005840 - RNA, 19 nt, Artificial Sequence
  Description of Artificial Sequence: Synthetic oligonucleotide
  Sense strand starting at position 2868 of SEQ ID NO: 914462
ggucaugagaaaugcauau

SEQ ID NO: 1005841 - RNA, 19 nt, Artificial Sequence
  Description of Artificial Sequence: Synthetic oligonucleotide
  Antisense strand to SEQ ID NO: 1005840
auaugcauuucucaugacc

SEQ ID NO: 1005842 - RNA, 19 nt, Artificial Sequence
  Description of Artificial Sequence: Synthetic oligonucleotide
  Sense strand starting at position 2923 of SEQ ID NO: 914462
uggcaauaucagcauuauu

SEQ ID NO: 1005843 - RNA, 19 nt, Artificial Sequence
  Description of Artificial Sequence: Synthetic oligonucleotide
  Antisense strand to SEQ ID NO: 1005842
aauaaugcugauauugcca

SEQ ID NO: 1005844 - RNA, 19 nt, Artificial Sequence
  Description of Artificial Sequence: Synthetic oligonucleotide
  Sense strand starting at position 3061 of SEQ ID NO: 914462
gguggaugcuaauuauuag

SEQ ID NO: 1005845 - RNA, 19 nt, Artificial Sequence
  Description of Artificial Sequence: Synthetic oligonucleotide
  Antisense strand to SEQ ID NO: 1005844
cuaauaauuagcauccacc

SEQ ID NO: 1005846 - RNA, 19 nt, Artificial Sequence
  Description of Artificial Sequence: Synthetic oligonucleotide
  Sense strand starting at position 3062 of SEQ ID NO: 914462
guggaugcuaauuauuagu

SEQ ID NO: 1005847 - RNA, 19 nt, Artificial Sequence
  Description of Artificial Sequence: Synthetic oligonucleotide
  Antisense strand to SEQ ID NO: 1005846
acuaauaauuagcauccac

SEQ ID NO: 1005848 - RNA, 19 nt, Artificial Sequence
  Description of Artificial Sequence: Synthetic oligonucleotide
  Sense strand starting at position 3064 of SEQ ID NO: 914462
ggaugcuaauuauuaguga

SEQ ID NO: 1005849 - RNA, 19 nt, Artificial Sequence
  Description of Artificial Sequence: Synthetic oligonucleotide
  Antisense strand to SEQ ID NO: 1005848
ucacuaauaauuagcaucc

SEQ ID NO: 1005850 - RNA, 19 nt, Artificial Sequence
  Description of Artificial Sequence: Synthetic oligonucleotide
  Sense strand starting at position 3080 of SEQ ID NO: 914462
ugaauuguagauggcuaaa

SEQ ID NO: 1005851 - RNA, 19 nt, Artificial Sequence
  Description of Artificial Sequence: Synthetic oligonucleotide
  Antisense strand to SEQ ID NO: 1005850
uuuagccaucuacaauuca

SEQ ID NO: 1005852 - RNA, 19 nt, Artificial Sequence
  Description of Artificial Sequence: Synthetic oligonucleotide
  Sense strand starting at position 3156 of SEQ ID NO: 914462
ugucaaaggucucuugaca

SEQ ID NO: 1005853 - RNA, 19 nt, Artificial Sequence
  Description of Artificial Sequence: Synthetic oligonucleotide
  Antisense strand to SEQ ID NO: 1005852
ugucaagagaccuuugaca

SEQ ID NO: 1005854 - RNA, 19 nt, Artificial Sequence
  Description of Artificial Sequence: Synthetic oligonucleotide
  Sense strand starting at position 3200 of SEQ ID NO: 914462
cccuguguugacuagaaac

SEQ ID NO: 1005855 - RNA, 19 nt, Artificial Sequence
  Description of Artificial Sequence: Synthetic oligonucleotide
  Antisense strand to SEQ ID NO: 1005854
guuucuagucaacacaggg

SEQ ID NO: 1005856 - RNA, 19 nt, Artificial Sequence
  Description of Artificial Sequence: Synthetic oligonucleotide
  Sense strand starting at position 3202 of SEQ ID NO: 914462
cuguguugacuagaaacuu

SEQ ID NO: 1005857 - RNA, 19 nt, Artificial Sequence
  Description of Artificial Sequence: Synthetic oligonucleotide
  Antisense strand to SEQ ID NO: 1005856
aaguuucuagucaacacag

SEQ ID NO: 1005858 - RNA, 19 nt, Artificial Sequence
  Description of Artificial Sequence: Synthetic oligonucleotide
  Sense strand starting at position 3305 of SEQ ID NO: 914462
gcuacaaauuuggauauau

SEQ ID NO: 1005859 - RNA, 19 nt, Artificial Sequence
  Description of Artificial Sequence: Synthetic oligonucleotide
  Antisense strand to SEQ ID NO: 1005858
auauauccaaauuuguagc

SEQ ID NO: 1005860 - RNA, 19 nt, Artificial Sequence
  Description of Artificial Sequence: Synthetic oligonucleotide
  Sense strand starting at position 3336 of SEQ ID NO: 914462
uuggauguauuagcaugau

SEQ ID NO: 1005861 - RNA, 19 nt, Artificial Sequence
  Description of Artificial Sequence: Synthetic oligonucleotide
  Antisense strand to SEQ ID NO: 1005860
aucaugcuaauacauccaa

SEQ ID NO: 1005862 - RNA, 19 nt, Artificial Sequence
  Description of Artificial Sequence: Synthetic oligonucleotide
  Sense strand starting at position 3339 of SEQ ID NO: 914462
gauguauuagcaugauaca

SEQ ID NO: 1005863 - RNA, 19 nt, Artificial Sequence
  Description of Artificial Sequence: Synthetic oligonucleotide
  Antisense strand to SEQ ID NO: 1005862
uguaucaugcuaauacauc

SEQ ID NO: 1005864 - RNA, 19 nt, Artificial Sequence
  Description of Artificial Sequence: Synthetic oligonucleotide
  Sense strand starting at position 3340 of SEQ ID NO: 914462
auguauuagcaugauacau

SEQ ID NO: 1005865 - RNA, 19 nt, Artificial Sequence
  Description of Artificial Sequence: Synthetic oligonucleotide
  Antisense strand to SEQ ID NO: 1005864
auguaucaugcuaauacau

SEQ ID NO: 1005866 - RNA, 19 nt, Artificial Sequence
  Description of Artificial Sequence: Synthetic oligonucleotide
  Sense strand starting at position 3637 of SEQ ID NO: 914462
guaaacauaugggauauuu

SEQ ID NO: 1005867 - RNA, 19 nt, Artificial Sequence
  Description of Artificial Sequence: Synthetic oligonucleotide
  Antisense strand to SEQ ID NO: 1005866
aaauaucccauauguuuac

SEQ ID NO: 1005868 - RNA, 19 nt, Artificial Sequence
  Description of Artificial Sequence: Synthetic oligonucleotide
  Sense strand starting at position 3646 of SEQ ID NO: 914462
ugggauauuugaggaaaga

SEQ ID NO: 1005869 - RNA, 19 nt, Artificial Sequence
  Description of Artificial Sequence: Synthetic oligonucleotide
  Antisense strand to SEQ ID NO: 1005868
ucuuuccucaaauauccca

SEQ ID NO: 1005870 - RNA, 19 nt, Artificial Sequence
  Description of Artificial Sequence: Synthetic oligonucleotide
  Sense strand starting at position 3773 of SEQ ID NO: 914462
uuaacaagggcaugaauua

SEQ ID NO: 1005871 - RNA, 19 nt, Artificial Sequence
  Description of Artificial Sequence: Synthetic oligonucleotide
  Antisense strand to SEQ ID NO: 1005870
uaauucaugcccuuguuaa

SEQ ID NO: 1005872 - RNA, 19 nt, Artificial Sequence
  Description of Artificial Sequence: Synthetic oligonucleotide
  Sense strand starting at position 3780 of SEQ ID NO: 914462
gggcaugaauuacuuuaua

SEQ ID NO: 1005873 - RNA, 19 nt, Artificial Sequence
  Description of Artificial Sequence: Synthetic oligonucleotide
  Antisense strand to SEQ ID NO: 1005872
uauaaaguaauucaugccc

SEQ ID NO: 1005874 - RNA, 19 nt, Artificial Sequence
  Description of Artificial Sequence: Synthetic oligonucleotide
  Sense strand starting at position 6 of SEQ ID NO: 914463
aaggcagucucugaugaga

SEQ ID NO: 1005875 - RNA, 19 nt, Artificial Sequence
  Description of Artificial Sequence: Synthetic oligonucleotide
  Antisense strand to SEQ ID NO: 1005874
ucucaucagagacugccuu

SEQ ID NO: 1005876 - RNA, 19 nt, Artificial Sequence
  Description of Artificial Sequence: Synthetic oligonucleotide
  Sense strand starting at position 11 of SEQ ID NO: 914463
agucucugaugagaaacau

SEQ ID NO: 1005877 - RNA, 19 nt, Artificial Sequence
  Description of Artificial Sequence: Synthetic oligonucleotide
  Antisense strand to SEQ ID NO: 1005876
auguuucucaucagagacu

SEQ ID NO: 1005878 - RNA, 19 nt, Artificial Sequence
  Description of Artificial Sequence: Synthetic oligonucleotide
  Sense strand starting at position 118 of SEQ ID NO: 914463
uugccagggucucucauau

SEQ ID NO: 1005879 - RNA, 19 nt, Artificial Sequence
  Description of Artificial Sequence: Synthetic oligonucleotide
  Antisense strand to SEQ ID NO: 1005878
auaugagagacccuggcaa

SEQ ID NO: 1005880 - RNA, 19 nt, Artificial Sequence
  Description of Artificial Sequence: Synthetic oligonucleotide
  Sense strand starting at position 238 of SEQ ID NO: 914463
uuacuauauuagcugggaa

SEQ ID NO: 1005881 - RNA, 19 nt, Artificial Sequence
  Description of Artificial Sequence: Synthetic oligonucleotide
  Antisense strand to SEQ ID NO: 1005880
uucccagcuaauauaguaa

SEQ ID NO: 1005882 - RNA, 19 nt, Artificial Sequence
  Description of Artificial Sequence: Synthetic oligonucleotide
  Sense strand starting at position 283 of SEQ ID NO: 914463
gugagugaaccucggaaga

SEQ ID NO: 1005883 - RNA, 19 nt, Artificial Sequence
  Description of Artificial Sequence: Synthetic oligonucleotide
  Antisense strand to SEQ ID NO: 1005882
ucuuccgagguucacucac

SEQ ID NO: 1005884 - RNA, 19 nt, Artificial Sequence
  Description of Artificial Sequence: Synthetic oligonucleotide
  Sense strand starting at position 285 of SEQ ID NO: 914463
gagugaaccucggaagaga

SEQ ID NO: 1005885 - RNA, 19 nt, Artificial Sequence
  Description of Artificial Sequence: Synthetic oligonucleotide
  Antisense strand to SEQ ID NO: 1005884
ucucuuccgagguucacuc

SEQ ID NO: 1005886 - RNA, 19 nt, Artificial Sequence
  Description of Artificial Sequence: Synthetic oligonucleotide
  Sense strand starting at position 310 of SEQ ID NO: 914463
aaggaaagcuaguuugaug

SEQ ID NO: 1005887 - RNA, 19 nt, Artificial Sequence
  Description of Artificial Sequence: Synthetic oligonucleotide
  Antisense strand to SEQ ID NO: 1005886
caucaaacuagcuuuccuu

SEQ ID NO: 1005888 - RNA, 19 nt, Artificial Sequence
  Description of Artificial Sequence: Synthetic oligonucleotide
  Sense strand starting at position 318 of SEQ ID NO: 914463
cuaguuugauggguaagau

SEQ ID NO: 1005889 - RNA, 19 nt, Artificial Sequence
  Description of Artificial Sequence: Synthetic oligonucleotide
  Antisense strand to SEQ ID NO: 1005888
aucuuacccaucaaacuag

SEQ ID NO: 1005890 - RNA, 19 nt, Artificial Sequence
  Description of Artificial Sequence: Synthetic oligonucleotide
  Sense strand starting at position 384 of SEQ ID NO: 914463
auguuacuucuguauaugu

SEQ ID NO: 1005891 - RNA, 19 nt, Artificial Sequence
  Description of Artificial Sequence: Synthetic oligonucleotide
  Antisense strand to SEQ ID NO: 1005890
acauauacagaaguaacau

SEQ ID NO: 1005892 - RNA, 19 nt, Artificial Sequence
  Description of Artificial Sequence: Synthetic oligonucleotide
  Sense strand starting at position 437 of SEQ ID NO: 914463
uaucgagcuucuguaauga

SEQ ID NO: 1005893 - RNA, 19 nt, Artificial Sequence
  Description of Artificial Sequence: Synthetic oligonucleotide
  Antisense strand to SEQ ID NO: 1005892
ucauuacagaagcucgaua

SEQ ID NO: 1005894 - RNA, 19 nt, Artificial Sequence
  Description of Artificial Sequence: Synthetic oligonucleotide
  Sense strand starting at position 532 of SEQ ID NO: 914463
acuaucacaucuuuguguu

SEQ ID NO: 1005895 - RNA, 19 nt, Artificial Sequence
  Description of Artificial Sequence: Synthetic oligonucleotide
  Antisense strand to SEQ ID NO: 1005894
aacacaaagaugugauagu

SEQ ID NO: 1005896 - RNA, 19 nt, Artificial Sequence
  Description of Artificial Sequence: Synthetic oligonucleotide
  Sense strand starting at position 533 of SEQ ID NO: 914463
cuaucacaucuuuguguuu

SEQ ID NO: 1005897 - RNA, 19 nt, Artificial Sequence
  Description of Artificial Sequence: Synthetic oligonucleotide
  Antisense strand to SEQ ID NO: 1005896
aaacacaaagaugugauag

SEQ ID NO: 1005898 - RNA, 19 nt, Artificial Sequence
  Description of Artificial Sequence: Synthetic oligonucleotide
  Sense strand starting at position 630 of SEQ ID NO: 914463
uuguguucuuucucuaaca

SEQ ID NO: 1005899 - RNA, 19 nt, Artificial Sequence
  Description of Artificial Sequence: Synthetic oligonucleotide
  Antisense strand to SEQ ID NO: 1005898
uguuagagaaagaacacaa

SEQ ID NO: 1005900 - RNA, 19 nt, Artificial Sequence
  Description of Artificial Sequence: Synthetic oligonucleotide
  Sense strand starting at position 631 of SEQ ID NO: 914463
uguguucuuucucuaacac

SEQ ID NO: 1005901 - RNA, 19 nt, Artificial Sequence
  Description of Artificial Sequence: Synthetic oligonucleotide
  Antisense strand to SEQ ID NO: 1005900
guguuagagaaagaacaca

SEQ ID NO: 1005902 - RNA, 19 nt, Artificial Sequence
  Description of Artificial Sequence: Synthetic oligonucleotide
  Sense strand starting at position 687 of SEQ ID NO: 914463
uugacuuucucaucagaag

SEQ ID NO: 1005903 - RNA, 19 nt, Artificial Sequence
  Description of Artificial Sequence: Synthetic oligonucleotide
  Antisense strand to SEQ ID NO: 1005902
cuucugaugagaaagucaa

SEQ ID NO: 1005904 - RNA, 19 nt, Artificial Sequence
  Description of Artificial Sequence: Synthetic oligonucleotide
  Sense strand starting at position 716 of SEQ ID NO: 914463
ccuucuaaacuuugagguu

SEQ ID NO: 1005905 - RNA, 19 nt, Artificial Sequence
  Description of Artificial Sequence: Synthetic oligonucleotide
  Antisense strand to SEQ ID NO: 1005904
aaccucaaaguuuagaagg

SEQ ID NO: 1005906 - RNA, 19 nt, Artificial Sequence
  Description of Artificial Sequence: Synthetic oligonucleotide
  Sense strand starting at position 717 of SEQ ID NO: 914463
cuucuaaacuuugagguua

SEQ ID NO: 1005907 - RNA, 19 nt, Artificial Sequence
  Description of Artificial Sequence: Synthetic oligonucleotide
  Antisense strand to SEQ ID NO: 1005906
uaaccucaaaguuuagaag

SEQ ID NO: 1005908 - RNA, 19 nt, Artificial Sequence
  Description of Artificial Sequence: Synthetic oligonucleotide
  Sense strand starting at position 719 of SEQ ID NO: 914463
ucuaaacuuugagguuaau

SEQ ID NO: 1005909 - RNA, 19 nt, Artificial Sequence
  Description of Artificial Sequence: Synthetic oligonucleotide
  Antisense strand to SEQ ID NO: 1005908
auuaaccucaaaguuuaga

SEQ ID NO: 1005910 - RNA, 19 nt, Artificial Sequence
  Description of Artificial Sequence: Synthetic oligonucleotide
  Sense strand starting at position 792 of SEQ ID NO: 914463
gcaggugguaguuaacacu

SEQ ID NO: 1005911 - RNA, 19 nt, Artificial Sequence
  Description of Artificial Sequence: Synthetic oligonucleotide
  Antisense strand to SEQ ID NO: 1005910
aguguuaacuaccaccugc

SEQ ID NO: 1005912 - RNA, 19 nt, Artificial Sequence
  Description of Artificial Sequence: Synthetic oligonucleotide
  Sense strand starting at position 839 of SEQ ID NO: 914463
aggucauuauuugaaauuc

SEQ ID NO: 1005913 - RNA, 19 nt, Artificial Sequence
  Description of Artificial Sequence: Synthetic oligonucleotide
  Antisense strand to SEQ ID NO: 1005912
gaauuucaaauaaugaccu

SEQ ID NO: 1005914 - RNA, 19 nt, Artificial Sequence
  Description of Artificial Sequence: Synthetic oligonucleotide
  Sense strand starting at position 867 of SEQ ID NO: 914463
ggauccauucuugggugua

SEQ ID NO: 1005915 - RNA, 19 nt, Artificial Sequence
  Description of Artificial Sequence: Synthetic oligonucleotide
  Antisense strand to SEQ ID NO: 1005914
uacacccaagaauggaucc

SEQ ID NO: 1005916 - RNA, 19 nt, Artificial Sequence
  Description of Artificial Sequence: Synthetic oligonucleotide
  Sense strand starting at position 869 of SEQ ID NO: 914463
auccauucuuggguguaaa

SEQ ID NO: 1005917 - RNA, 19 nt, Artificial Sequence
  Description of Artificial Sequence: Synthetic oligonucleotide
  Antisense strand to SEQ ID NO: 1005916
uuuacacccaagaauggau

SEQ ID NO: 1005918 - RNA, 19 nt, Artificial Sequence
  Description of Artificial Sequence: Synthetic oligonucleotide
  Sense strand starting at position 1043 of SEQ ID NO: 914463
agcucacaaucugaugaaa

SEQ ID NO: 1005919 - RNA, 19 nt, Artificial Sequence
  Description of Artificial Sequence: Synthetic oligonucleotide
  Antisense strand to SEQ ID NO: 1005918
uuucaucagauugugagcu

SEQ ID NO: 1005920 - RNA, 19 nt, Artificial Sequence
  Description of Artificial Sequence: Synthetic oligonucleotide
  Sense strand starting at position 1105 of SEQ ID NO: 914463
agggcuacaguguaugauu

SEQ ID NO: 1005921 - RNA, 19 nt, Artificial Sequence
  Description of Artificial Sequence: Synthetic oligonucleotide
  Antisense strand to SEQ ID NO: 1005920
aaucauacacuguagcccu

SEQ ID NO: 1005922 - RNA, 19 nt, Artificial Sequence
  Description of Artificial Sequence: Synthetic oligonucleotide
  Sense strand starting at position 1107 of SEQ ID NO: 914463
ggcuacaguguaugauuaa

SEQ ID NO: 1005923 - RNA, 19 nt, Artificial Sequence
  Description of Artificial Sequence: Synthetic oligonucleotide
  Antisense strand to SEQ ID NO: 1005922
uuaaucauacacuguagcc

SEQ ID NO: 1005924 - RNA, 19 nt, Artificial Sequence
  Description of Artificial Sequence: Synthetic oligonucleotide
  Sense strand starting at position 1108 of SEQ ID NO: 914463
gcuacaguguaugauuaag

SEQ ID NO: 1005925 - RNA, 19 nt, Artificial Sequence
  Description of Artificial Sequence: Synthetic oligonucleotide
  Antisense strand to SEQ ID NO: 1005924
cuuaaucauacacuguagc

SEQ ID NO: 1005926 - RNA, 19 nt, Artificial Sequence
  Description of Artificial Sequence: Synthetic oligonucleotide
  Sense strand starting at position 1110 of SEQ ID NO: 914463
uacaguguaugauuaagau

SEQ ID NO: 1005927 - RNA, 19 nt, Artificial Sequence
  Description of Artificial Sequence: Synthetic oligonucleotide
  Antisense strand to SEQ ID NO: 1005926
aucuuaaucauacacugua

SEQ ID NO: 1005928 - RNA, 19 nt, Artificial Sequence
  Description of Artificial Sequence: Synthetic oligonucleotide
  Sense strand starting at position 1114 of SEQ ID NO: 914463
guguaugauuaagaucaag

SEQ ID NO: 1005929 - RNA, 19 nt, Artificial Sequence
  Description of Artificial Sequence: Synthetic oligonucleotide
  Antisense strand to SEQ ID NO: 1005928
cuugaucuuaaucauacac

SEQ ID NO: 1005930 - RNA, 19 nt, Artificial Sequence
  Description of Artificial Sequence: Synthetic oligonucleotide
  Sense strand starting at position 1167 of SEQ ID NO: 914463
guucuucuauuggcaggaa

SEQ ID NO: 1005931 - RNA, 19 nt, Artificial Sequence
  Description of Artificial Sequence: Synthetic oligonucleotide
  Antisense strand to SEQ ID NO: 1005930
uuccugccaauagaagaac

SEQ ID NO: 1005932 - RNA, 19 nt, Artificial Sequence
  Description of Artificial Sequence: Synthetic oligonucleotide
  Sense strand starting at position 1168 of SEQ ID NO: 914463
uucuucuauuggcaggaaa

SEQ ID NO: 1005933 - RNA, 19 nt, Artificial Sequence
  Description of Artificial Sequence: Synthetic oligonucleotide
  Antisense strand to SEQ ID NO: 1005932
uuuccugccaauagaagaa

SEQ ID NO: 1005934 - RNA, 19 nt, Artificial Sequence
  Description of Artificial Sequence: Synthetic oligonucleotide
  Sense strand starting at position 1305 of SEQ ID NO: 914463
cagcaugguauccgggaua

SEQ ID NO: 1005935 - RNA, 19 nt, Artificial Sequence
  Description of Artificial Sequence: Synthetic oligonucleotide
  Antisense strand to SEQ ID NO: 1005934
uaucccggauaccaugcug

SEQ ID NO: 1005936 - RNA, 19 nt, Artificial Sequence
  Description of Artificial Sequence: Synthetic oligonucleotide
  Sense strand starting at position 1308 of SEQ ID NO: 914463
caugguauccgggauaacu

SEQ ID NO: 1005937 - RNA, 19 nt, Artificial Sequence
  Description of Artificial Sequence: Synthetic oligonucleotide
  Antisense strand to SEQ ID NO: 1005936
aguuaucccggauaccaug

SEQ ID NO: 1005938 - RNA, 19 nt, Artificial Sequence
  Description of Artificial Sequence: Synthetic oligonucleotide
  Sense strand starting at position 1310 of SEQ ID NO: 914463
ugguauccgggauaacuau

SEQ ID NO: 1005939 - RNA, 19 nt, Artificial Sequence
  Description of Artificial Sequence: Synthetic oligonucleotide
  Antisense strand to SEQ ID NO: 1005938
auaguuaucccggauacca

SEQ ID NO: 1005940 - RNA, 19 nt, Artificial Sequence
  Description of Artificial Sequence: Synthetic oligonucleotide
  Sense strand starting at position 1346 of SEQ ID NO: 914463
guuaacaaugaagguuaau

SEQ ID NO: 1005941 - RNA, 19 nt, Artificial Sequence
  Description of Artificial Sequence: Synthetic oligonucleotide
  Antisense strand to SEQ ID NO: 1005940
auuaaccuucauuguuaac

SEQ ID NO: 1005942 - RNA, 19 nt, Artificial Sequence
  Description of Artificial Sequence: Synthetic oligonucleotide
  Sense strand starting at position 1357 of SEQ ID NO: 914463
agguuaaugcagcaggaau

SEQ ID NO: 1005943 - RNA, 19 nt, Artificial Sequence
  Description of Artificial Sequence: Synthetic oligonucleotide
  Antisense strand to SEQ ID NO: 1005942
auuccugcugcauuaaccu

SEQ ID NO: 1005944 - RNA, 19 nt, Artificial Sequence
  Description of Artificial Sequence: Synthetic oligonucleotide
  Sense strand starting at position 1377 of SEQ ID NO: 914463
agugguagacaguggaaua

SEQ ID NO: 1005945 - RNA, 19 nt, Artificial Sequence
  Description of Artificial Sequence: Synthetic oligonucleotide
  Antisense strand to SEQ ID NO: 1005944
uauuccacugucuaccacu

SEQ ID NO: 1005946 - RNA, 19 nt, Artificial Sequence
  Description of Artificial Sequence: Synthetic oligonucleotide
  Sense strand starting at position 1417 of SEQ ID NO: 914463
ccggaagggugacuuucau

SEQ ID NO: 1005947 - RNA, 19 nt, Artificial Sequence
  Description of Artificial Sequence: Synthetic oligonucleotide
  Antisense strand to SEQ ID NO: 1005946
augaaagucacccuuccgg

SEQ ID NO: 1005948 - RNA, 19 nt, Artificial Sequence
  Description of Artificial Sequence: Synthetic oligonucleotide
  Sense strand starting at position 1599 of SEQ ID NO: 914463
agagcucugcaccgagaaa

SEQ ID NO: 1005949 - RNA, 19 nt, Artificial Sequence
  Description of Artificial Sequence: Synthetic oligonucleotide
  Antisense strand to SEQ ID NO: 1005948
uuucucggugcagagcucu

SEQ ID NO: 1005950 - RNA, 19 nt, Artificial Sequence
  Description of Artificial Sequence: Synthetic oligonucleotide
  Sense strand starting at position 1809 of SEQ ID NO: 914463
uucucuuaguccgcgagga

SEQ ID NO: 1005951 - RNA, 19 nt, Artificial Sequence
  Description of Artificial Sequence: Synthetic oligonucleotide
  Antisense strand to SEQ ID NO: 1005950
uccucgcggacuaagagaa

SEQ ID NO: 1005952 - RNA, 19 nt, Artificial Sequence
  Description of Artificial Sequence: Synthetic oligonucleotide
  Sense strand starting at position 2067 of SEQ ID NO: 914463
gagggaucaucuuccggga

SEQ ID NO: 1005953 - RNA, 19 nt, Artificial Sequence
  Description of Artificial Sequence: Synthetic oligonucleotide
  Antisense strand to SEQ ID NO: 1005952
ucccggaagaugaucccuc

SEQ ID NO: 1005954 - RNA, 19 nt, Artificial Sequence
  Description of Artificial Sequence: Synthetic oligonucleotide
  Sense strand starting at position 28 of SEQ ID NO: 914464
uugugauagacauggcuga

SEQ ID NO: 1005955 - RNA, 19 nt, Artificial Sequence
  Description of Artificial Sequence: Synthetic oligonucleotide
  Antisense strand to SEQ ID NO: 1005954
ucagccaugucuaucacaa

SEQ ID NO: 1005956 - RNA, 19 nt, Artificial Sequence
  Description of Artificial Sequence: Synthetic oligonucleotide
  Sense strand starting at position 29 of SEQ ID NO: 914464
ugugauagacauggcugaa

SEQ ID NO: 1005957 - RNA, 19 nt, Artificial Sequence
  Description of Artificial Sequence: Synthetic oligonucleotide
  Antisense strand to SEQ ID NO: 1005956
uucagccaugucuaucaca

SEQ ID NO: 1005958 - RNA, 19 nt, Artificial Sequence
  Description of Artificial Sequence: Synthetic oligonucleotide
  Sense strand starting at position 129 of SEQ ID NO: 914464
ggcuacugcaaaugagauu

SEQ ID NO: 1005959 - RNA, 19 nt, Artificial Sequence
  Description of Artificial Sequence: Synthetic oligonucleotide
  Antisense strand to SEQ ID NO: 1005958
aaucucauuugcaguagcc

SEQ ID NO: 1005960 - RNA, 19 nt, Artificial Sequence
  Description of Artificial Sequence: Synthetic oligonucleotide
  Sense strand starting at position 173 of SEQ ID NO: 914464
uagaaauggucuccaguaa

SEQ ID NO: 1005961 - RNA, 19 nt, Artificial Sequence
  Description of Artificial Sequence: Synthetic oligonucleotide
  Antisense strand to SEQ ID NO: 1005960
uuacuggagaccauuucua

SEQ ID NO: 1005962 - RNA, 19 nt, Artificial Sequence
  Description of Artificial Sequence: Synthetic oligonucleotide
  Sense strand starting at position 177 of SEQ ID NO: 914464
aauggucuccaguaaaugu

SEQ ID NO: 1005963 - RNA, 19 nt, Artificial Sequence
  Description of Artificial Sequence: Synthetic oligonucleotide
  Antisense strand to SEQ ID NO: 1005962
acauuuacuggagaccauu

SEQ ID NO: 1005964 - RNA, 19 nt, Artificial Sequence
  Description of Artificial Sequence: Synthetic oligonucleotide
  Sense strand starting at position 342 of SEQ ID NO: 914464
ccgguuuggaaauauguua

SEQ ID NO: 1005965 - RNA, 19 nt, Artificial Sequence
  Description of Artificial Sequence: Synthetic oligonucleotide
  Antisense strand to SEQ ID NO: 1005964
uaacauauuuccaaaccgg

SEQ ID NO: 1005966 - RNA, 19 nt, Artificial Sequence
  Description of Artificial Sequence: Synthetic oligonucleotide
  Sense strand starting at position 392 of SEQ ID NO: 914464
auaucuagaugagugacau

SEQ ID NO: 1005967 - RNA, 19 nt, Artificial Sequence
  Description of Artificial Sequence: Synthetic oligonucleotide
  Antisense strand to SEQ ID NO: 1005966
augucacucaucuagauau

SEQ ID NO: 1005968 - RNA, 19 nt, Artificial Sequence
  Description of Artificial Sequence: Synthetic oligonucleotide
  Sense strand starting at position 393 of SEQ ID NO: 914464
uaucuagaugagugacauu

SEQ ID NO: 1005969 - RNA, 19 nt, Artificial Sequence
  Description of Artificial Sequence: Synthetic oligonucleotide
  Antisense strand to SEQ ID NO: 1005968
aaugucacucaucuagaua

SEQ ID NO: 1005970 - RNA, 19 nt, Artificial Sequence
  Description of Artificial Sequence: Synthetic oligonucleotide
  Sense strand starting at position 516 of SEQ ID NO: 914464
auuggagucuuagcuuuaa

SEQ ID NO: 1005971 - RNA, 19 nt, Artificial Sequence
  Description of Artificial Sequence: Synthetic oligonucleotide
  Antisense strand to SEQ ID NO: 1005970
uuaaagcuaagacuccaau

SEQ ID NO: 1005972 - RNA, 19 nt, Artificial Sequence
  Description of Artificial Sequence: Synthetic oligonucleotide
  Sense strand starting at position 543 of SEQ ID NO: 914464
cgucuucugauccagaguu

SEQ ID NO: 1005973 - RNA, 19 nt, Artificial Sequence
  Description of Artificial Sequence: Synthetic oligonucleotide
  Antisense strand to SEQ ID NO: 1005972
aacucuggaucagaagacg

SEQ ID NO: 1005974 - RNA, 19 nt, Artificial Sequence
  Description of Artificial Sequence: Synthetic oligonucleotide
  Sense strand starting at position 551 of SEQ ID NO: 914464
gauccagaguugcuaauau

SEQ ID NO: 1005975 - RNA, 19 nt, Artificial Sequence
  Description of Artificial Sequence: Synthetic oligonucleotide
  Antisense strand to SEQ ID NO: 1005974
auauuagcaacucuggauc

SEQ ID NO: 1005976 - RNA, 19 nt, Artificial Sequence
  Description of Artificial Sequence: Synthetic oligonucleotide
  Sense strand starting at position 574 of SEQ ID NO: 914464
uaguuugaacugcaguaua

SEQ ID NO: 1005977 - RNA, 19 nt, Artificial Sequence
  Description of Artificial Sequence: Synthetic oligonucleotide
  Antisense strand to SEQ ID NO: 1005976
uauacugcaguucaaacua

SEQ ID NO: 1005978 - RNA, 19 nt, Artificial Sequence
  Description of Artificial Sequence: Synthetic oligonucleotide
  Sense strand starting at position 577 of SEQ ID NO: 914464
uuugaacugcaguauauua

SEQ ID NO: 1005979 - RNA, 19 nt, Artificial Sequence
  Description of Artificial Sequence: Synthetic oligonucleotide
  Antisense strand to SEQ ID NO: 1005978
uaauauacugcaguucaaa

SEQ ID NO: 1005980 - RNA, 19 nt, Artificial Sequence
  Description of Artificial Sequence: Synthetic oligonucleotide
  Sense strand starting at position 813 of SEQ ID NO: 914464
ggcaauccaugagcaauua

SEQ ID NO: 1005981 - RNA, 19 nt, Artificial Sequence
  Description of Artificial Sequence: Synthetic oligonucleotide
  Antisense strand to SEQ ID NO: 1005980
uaauugcucauggauugcc

SEQ ID NO: 1005982 - RNA, 19 nt, Artificial Sequence
  Description of Artificial Sequence: Synthetic oligonucleotide
  Sense strand starting at position 814 of SEQ ID NO: 914464
gcaauccaugagcaauuau

SEQ ID NO: 1005983 - RNA, 19 nt, Artificial Sequence
  Description of Artificial Sequence: Synthetic oligonucleotide
  Antisense strand to SEQ ID NO: 1005982
auaauugcucauggauugc

SEQ ID NO: 1005984 - RNA, 19 nt, Artificial Sequence
  Description of Artificial Sequence: Synthetic oligonucleotide
  Sense strand starting at position 872 of SEQ ID NO: 914464
cugucaucacaggaaucuu

SEQ ID NO: 1005985 - RNA, 19 nt, Artificial Sequence
  Description of Artificial Sequence: Synthetic oligonucleotide
  Antisense strand to SEQ ID NO: 1005984
aagauuccugugaugacag

SEQ ID NO: 1005986 - RNA, 19 nt, Artificial Sequence
  Description of Artificial Sequence: Synthetic oligonucleotide
  Sense strand starting at position 1066 of SEQ ID NO: 914464
ucuuuagaagaauguugua

SEQ ID NO: 1005987 - RNA, 19 nt, Artificial Sequence
  Description of Artificial Sequence: Synthetic oligonucleotide
  Antisense strand to SEQ ID NO: 1005986
uacaacauucuucuaaaga

SEQ ID NO: 1005988 - RNA, 19 nt, Artificial Sequence
  Description of Artificial Sequence: Synthetic oligonucleotide
  Sense strand starting at position 1078 of SEQ ID NO: 914464
uguuguaguauccagagca

SEQ ID NO: 1005989 - RNA, 19 nt, Artificial Sequence
  Description of Artificial Sequence: Synthetic oligonucleotide
  Antisense strand to SEQ ID NO: 1005988
ugcucuggauacuacaaca

SEQ ID NO: 1005990 - RNA, 19 nt, Artificial Sequence
  Description of Artificial Sequence: Synthetic oligonucleotide
  Sense strand starting at position 1195 of SEQ ID NO: 914464
ugguauugagaaggaugca

SEQ ID NO: 1005991 - RNA, 19 nt, Artificial Sequence
  Description of Artificial Sequence: Synthetic oligonucleotide
  Antisense strand to SEQ ID NO: 1005990
ugcauccuucucaauacca

SEQ ID NO: 1005992 - RNA, 19 nt, Artificial Sequence
  Description of Artificial Sequence: Synthetic oligonucleotide
  Sense strand starting at position 1241 of SEQ ID NO: 914464
ucacuagacucagaauuug

SEQ ID NO: 1005993 - RNA, 19 nt, Artificial Sequence
  Description of Artificial Sequence: Synthetic oligonucleotide
  Antisense strand to SEQ ID NO: 1005992
caaauucugagucuaguga

SEQ ID NO: 1005994 - RNA, 19 nt, Artificial Sequence
  Description of Artificial Sequence: Synthetic oligonucleotide
  Sense strand starting at position 1247 of SEQ ID NO: 914464
gacucagaauuuggugaga

SEQ ID NO: 1005995 - RNA, 19 nt, Artificial Sequence
  Description of Artificial Sequence: Synthetic oligonucleotide
  Antisense strand to SEQ ID NO: 1005994
ucucaccaaauucugaguc

SEQ ID NO: 1005996 - RNA, 19 nt, Artificial Sequence
  Description of Artificial Sequence: Synthetic oligonucleotide
  Sense strand starting at position 1249 of SEQ ID NO: 914464
cucagaauuuggugagaga

SEQ ID NO: 1005997 - RNA, 19 nt, Artificial Sequence
  Description of Artificial Sequence: Synthetic oligonucleotide
  Antisense strand to SEQ ID NO: 1005996
ucucucaccaaauucugag

SEQ ID NO: 1005998 - RNA, 19 nt, Artificial Sequence
  Description of Artificial Sequence: Synthetic oligonucleotide
  Sense strand starting at position 1396 of SEQ ID NO: 914464
cuccaaacgcuuugggaaa

SEQ ID NO: 1005999 - RNA, 19 nt, Artificial Sequence
  Description of Artificial Sequence: Synthetic oligonucleotide
  Antisense strand to SEQ ID NO: 1005998
uuucccaaagcguuuggag

SEQ ID NO: 1006000 - RNA, 19 nt, Artificial Sequence
  Description of Artificial Sequence: Synthetic oligonucleotide
  Sense strand starting at position 2244 of SEQ ID NO: 914464
ggaaguuggugacuguaga

SEQ ID NO: 1006001 - RNA, 19 nt, Artificial Sequence
  Description of Artificial Sequence: Synthetic oligonucleotide
  Antisense strand to SEQ ID NO: 1006000
ucuacagucaccaacuucc

SEQ ID NO: 1006002 - RNA, 19 nt, Artificial Sequence
  Description of Artificial Sequence: Synthetic oligonucleotide
  Sense strand starting at position 2320 of SEQ ID NO: 914464
uugugucuuccgcuguaaa

SEQ ID NO: 1006003 - RNA, 19 nt, Artificial Sequence
  Description of Artificial Sequence: Synthetic oligonucleotide
  Antisense strand to SEQ ID NO: 1006002
uuuacagcggaagacacaa

SEQ ID NO: 1006004 - RNA, 19 nt, Artificial Sequence
  Description of Artificial Sequence: Synthetic oligonucleotide
  Sense strand starting at position 2453 of SEQ ID NO: 914464
gcggcuugucuucuuucua

SEQ ID NO: 1006005 - RNA, 19 nt, Artificial Sequence
  Description of Artificial Sequence: Synthetic oligonucleotide
  Antisense strand to SEQ ID NO: 1006004
uagaaagaagacaagccgc

SEQ ID NO: 1006006 - RNA, 19 nt, Artificial Sequence
  Description of Artificial Sequence: Synthetic oligonucleotide
  Sense strand starting at position 2554 of SEQ ID NO: 914464
cuguauaaguccuugauuc

SEQ ID NO: 1006007 - RNA, 19 nt, Artificial Sequence
  Description of Artificial Sequence: Synthetic oligonucleotide
  Antisense strand to SEQ ID NO: 1006006
gaaucaaggacuuauacag

SEQ ID NO: 1006008 - RNA, 19 nt, Artificial Sequence
  Description of Artificial Sequence: Synthetic oligonucleotide
  Sense strand starting at position 2556 of SEQ ID NO: 914464
guauaaguccuugauucug

SEQ ID NO: 1006009 - RNA, 19 nt, Artificial Sequence
  Description of Artificial Sequence: Synthetic oligonucleotide
  Antisense strand to SEQ ID NO: 1006008
cagaaucaaggacuuauac

SEQ ID NO: 1006010 - RNA, 19 nt, Artificial Sequence
  Description of Artificial Sequence: Synthetic oligonucleotide
  Sense strand starting at position 2901 of SEQ ID NO: 914464
augaauugcagguguuuaa

SEQ ID NO: 1006011 - RNA, 19 nt, Artificial Sequence
  Description of Artificial Sequence: Synthetic oligonucleotide
  Antisense strand to SEQ ID NO: 1006010
uuaaacaccugcaauucau

SEQ ID NO: 1006012 - RNA, 19 nt, Artificial Sequence
  Description of Artificial Sequence: Synthetic oligonucleotide
  Sense strand starting at position 2904 of SEQ ID NO: 914464
aauugcagguguuuaagaa

SEQ ID NO: 1006013 - RNA, 19 nt, Artificial Sequence
  Description of Artificial Sequence: Synthetic oligonucleotide
  Antisense strand to SEQ ID NO: 1006012
uucuuaaacaccugcaauu

SEQ ID NO: 1006014 - RNA, 19 nt, Artificial Sequence
  Description of Artificial Sequence: Synthetic oligonucleotide
  Sense strand starting at position 2905 of SEQ ID NO: 914464
auugcagguguuuaagaaa

SEQ ID NO: 1006015 - RNA, 19 nt, Artificial Sequence
  Description of Artificial Sequence: Synthetic oligonucleotide
  Antisense strand to SEQ ID NO: 1006014
uuucuuaaacaccugcaau

SEQ ID NO: 1006016 - RNA, 19 nt, Artificial Sequence
  Description of Artificial Sequence: Synthetic oligonucleotide
  Sense strand starting at position 3239 of SEQ ID NO: 914464
aagaguauguaccuggaua

SEQ ID NO: 1006017 - RNA, 19 nt, Artificial Sequence
  Description of Artificial Sequence: Synthetic oligonucleotide
  Antisense strand to SEQ ID NO: 1006016
uauccagguacauacucuu

SEQ ID NO: 1006018 - RNA, 19 nt, Artificial Sequence
  Description of Artificial Sequence: Synthetic oligonucleotide
  Sense strand starting at position 3240 of SEQ ID NO: 914464
agaguauguaccuggauau

SEQ ID NO: 1006019 - RNA, 19 nt, Artificial Sequence
  Description of Artificial Sequence: Synthetic oligonucleotide
  Antisense strand to SEQ ID NO: 1006018
auauccagguacauacucu

SEQ ID NO: 1006020 - RNA, 19 nt, Artificial Sequence
  Description of Artificial Sequence: Synthetic oligonucleotide
  Sense strand starting at position 3241 of SEQ ID NO: 914464
gaguauguaccuggauaug

SEQ ID NO: 1006021 - RNA, 19 nt, Artificial Sequence
  Description of Artificial Sequence: Synthetic oligonucleotide
  Antisense strand to SEQ ID NO: 1006020
cauauccagguacauacuc

SEQ ID NO: 1006022 - RNA, 19 nt, Artificial Sequence
  Description of Artificial Sequence: Synthetic oligonucleotide
  Sense strand starting at position 3244 of SEQ ID NO: 914464
uauguaccuggauauguau

SEQ ID NO: 1006023 - RNA, 19 nt, Artificial Sequence
  Description of Artificial Sequence: Synthetic oligonucleotide
  Antisense strand to SEQ ID NO: 1006022
auacauauccagguacaua

SEQ ID NO: 1006024 - RNA, 19 nt, Artificial Sequence
  Description of Artificial Sequence: Synthetic oligonucleotide
  Sense strand starting at position 3325 of SEQ ID NO: 914464
uuuggagaauuagucagua

SEQ ID NO: 1006025 - RNA, 19 nt, Artificial Sequence
  Description of Artificial Sequence: Synthetic oligonucleotide
  Antisense strand to SEQ ID NO: 1006024
uacugacuaauucuccaaa

SEQ ID NO: 1006026 - RNA, 19 nt, Artificial Sequence
  Description of Artificial Sequence: Synthetic oligonucleotide
  Sense strand starting at position 3327 of SEQ ID NO: 914464
uggagaauuagucaguagu

SEQ ID NO: 1006027 - RNA, 19 nt, Artificial Sequence
  Description of Artificial Sequence: Synthetic oligonucleotide
  Antisense strand to SEQ ID NO: 1006026
acuacugacuaauucucca

SEQ ID NO: 1006028 - RNA, 19 nt, Artificial Sequence
  Description of Artificial Sequence: Synthetic oligonucleotide
  Sense strand starting at position 3329 of SEQ ID NO: 914464
gagaauuagucaguaguua

SEQ ID NO: 1006029 - RNA, 19 nt, Artificial Sequence
  Description of Artificial Sequence: Synthetic oligonucleotide
  Antisense strand to SEQ ID NO: 1006028
uaacuacugacuaauucuc

SEQ ID NO: 1006030 - RNA, 19 nt, Artificial Sequence
  Description of Artificial Sequence: Synthetic oligonucleotide
  Sense strand starting at position 3330 of SEQ ID NO: 914464
agaauuagucaguaguuaa

SEQ ID NO: 1006031 - RNA, 19 nt, Artificial Sequence
  Description of Artificial Sequence: Synthetic oligonucleotide
  Antisense strand to SEQ ID NO: 1006030
uuaacuacugacuaauucu

SEQ ID NO: 1006032 - RNA, 19 nt, Artificial Sequence
  Description of Artificial Sequence: Synthetic oligonucleotide
  Sense strand starting at position 3341 of SEQ ID NO: 914464
guaguuaaggucuaucuug

SEQ ID NO: 1006033 - RNA, 19 nt, Artificial Sequence
  Description of Artificial Sequence: Synthetic oligonucleotide
  Antisense strand to SEQ ID NO: 1006032
caagauagaccuuaacuac

SEQ ID NO: 1006034 - RNA, 19 nt, Artificial Sequence
  Description of Artificial Sequence: Synthetic oligonucleotide
  Sense strand starting at position 130 of SEQ ID NO: 914465
aggaguuagugaccaacuu

SEQ ID NO: 1006035 - RNA, 19 nt, Artificial Sequence
  Description of Artificial Sequence: Synthetic oligonucleotide
  Antisense strand to SEQ ID NO: 1006034
aaguuggucacuaacuccu

SEQ ID NO: 1006036 - RNA, 19 nt, Artificial Sequence
  Description of Artificial Sequence: Synthetic oligonucleotide
  Sense strand starting at position 715 of SEQ ID NO: 914465
agcagcaguuucuuacaaa

SEQ ID NO: 1006037 - RNA, 19 nt, Artificial Sequence
  Description of Artificial Sequence: Synthetic oligonucleotide
  Antisense strand to SEQ ID NO: 1006036
uuuguaagaaacugcugcu

SEQ ID NO: 1006038 - RNA, 19 nt, Artificial Sequence
  Description of Artificial Sequence: Synthetic oligonucleotide
  Sense strand starting at position 745 of SEQ ID NO: 914465
cucuucuaacguuaguauu

SEQ ID NO: 1006039 - RNA, 19 nt, Artificial Sequence
  Description of Artificial Sequence: Synthetic oligonucleotide
  Antisense strand to SEQ ID NO: 1006038
aauacuaacguuagaagag

SEQ ID NO: 1006040 - RNA, 19 nt, Artificial Sequence
  Description of Artificial Sequence: Synthetic oligonucleotide
  Sense strand starting at position 767 of SEQ ID NO: 914465
ggugccucauauuuaagua

SEQ ID NO: 1006041 - RNA, 19 nt, Artificial Sequence
  Description of Artificial Sequence: Synthetic oligonucleotide
  Antisense strand to SEQ ID NO: 1006040
uacuuaaauaugaggcacc

SEQ ID NO: 1006042 - RNA, 19 nt, Artificial Sequence
  Description of Artificial Sequence: Synthetic oligonucleotide
  Sense strand starting at position 891 of SEQ ID NO: 914465
uaagaagugcuaugaagac

SEQ ID NO: 1006043 - RNA, 19 nt, Artificial Sequence
  Description of Artificial Sequence: Synthetic oligonucleotide
  Antisense strand to SEQ ID NO: 1006042
gucuucauagcacuucuua

SEQ ID NO: 1006044 - RNA, 19 nt, Artificial Sequence
  Description of Artificial Sequence: Synthetic oligonucleotide
  Sense strand starting at position 907 of SEQ ID NO: 914465
gacagcagauucuucguaa

SEQ ID NO: 1006045 - RNA, 19 nt, Artificial Sequence
  Description of Artificial Sequence: Synthetic oligonucleotide
  Antisense strand to SEQ ID NO: 1006044
uuacgaagaaucugcuguc

SEQ ID NO: 1006046 - RNA, 19 nt, Artificial Sequence
  Description of Artificial Sequence: Synthetic oligonucleotide
  Sense strand starting at position 908 of SEQ ID NO: 914465
acagcagauucuucguaag

SEQ ID NO: 1006047 - RNA, 19 nt, Artificial Sequence
  Description of Artificial Sequence: Synthetic oligonucleotide
  Antisense strand to SEQ ID NO: 1006046
cuuacgaagaaucugcugu

SEQ ID NO: 1006048 - RNA, 19 nt, Artificial Sequence
  Description of Artificial Sequence: Synthetic oligonucleotide
  Sense strand starting at position 910 of SEQ ID NO: 914465
agcagauucuucguaaguc

SEQ ID NO: 1006049 - RNA, 19 nt, Artificial Sequence
  Description of Artificial Sequence: Synthetic oligonucleotide
  Antisense strand to SEQ ID NO: 1006048
gacuuacgaagaaucugcu

SEQ ID NO: 1006050 - RNA, 19 nt, Artificial Sequence
  Description of Artificial Sequence: Synthetic oligonucleotide
  Sense strand starting at position 1005 of SEQ ID NO: 914465
guuccauaccagugacuca

SEQ ID NO: 1006051 - RNA, 19 nt, Artificial Sequence
  Description of Artificial Sequence: Synthetic oligonucleotide
  Antisense strand to SEQ ID NO: 1006050
ugagucacugguauggaac

SEQ ID NO: 1006052 - RNA, 19 nt, Artificial Sequence
  Description of Artificial Sequence: Synthetic oligonucleotide
  Sense strand starting at position 1016 of SEQ ID NO: 914465
gugacucaccgcgcauaau

SEQ ID NO: 1006053 - RNA, 19 nt, Artificial Sequence
  Description of Artificial Sequence: Synthetic oligonucleotide
  Antisense strand to SEQ ID NO: 1006052
auuaugcgcggugagucac

SEQ ID NO: 1006054 - RNA, 19 nt, Artificial Sequence
  Description of Artificial Sequence: Synthetic oligonucleotide
  Sense strand starting at position 1110 of SEQ ID NO: 914465
ucuugugcucugggcugaa

SEQ ID NO: 1006055 - RNA, 19 nt, Artificial Sequence
  Description of Artificial Sequence: Synthetic oligonucleotide
  Antisense strand to SEQ ID NO: 1006054
uucagcccagagcacaaga

SEQ ID NO: 1006056 - RNA, 19 nt, Artificial Sequence
  Description of Artificial Sequence: Synthetic oligonucleotide
  Sense strand starting at position 1177 of SEQ ID NO: 914465
gauauuaagcauuagguuu

SEQ ID NO: 1006057 - RNA, 19 nt, Artificial Sequence
  Description of Artificial Sequence: Synthetic oligonucleotide
  Antisense strand to SEQ ID NO: 1006056
aaaccuaaugcuuaauauc

SEQ ID NO: 1006058 - RNA, 19 nt, Artificial Sequence
  Description of Artificial Sequence: Synthetic oligonucleotide
  Sense strand starting at position 1183 of SEQ ID NO: 914465
aagcauuagguuuguaaug

SEQ ID NO: 1006059 - RNA, 19 nt, Artificial Sequence
  Description of Artificial Sequence: Synthetic oligonucleotide
  Antisense strand to SEQ ID NO: 1006058
cauuacaaaccuaaugcuu

SEQ ID NO: 1006060 - RNA, 19 nt, Artificial Sequence
  Description of Artificial Sequence: Synthetic oligonucleotide
  Sense strand starting at position 1242 of SEQ ID NO: 914465
gaggaacacuguuaccauc

SEQ ID NO: 1006061 - RNA, 19 nt, Artificial Sequence
  Description of Artificial Sequence: Synthetic oligonucleotide
  Antisense strand to SEQ ID NO: 1006060
gaugguaacaguguuccuc

SEQ ID NO: 1006062 - RNA, 19 nt, Artificial Sequence
  Description of Artificial Sequence: Synthetic oligonucleotide
  Sense strand starting at position 2297 of SEQ ID NO: 914465
uguccagagcuuuacguua

SEQ ID NO: 1006063 - RNA, 19 nt, Artificial Sequence
  Description of Artificial Sequence: Synthetic oligonucleotide
  Antisense strand to SEQ ID NO: 1006062
uaacguaaagcucuggaca

SEQ ID NO: 1006064 - RNA, 19 nt, Artificial Sequence
  Description of Artificial Sequence: Synthetic oligonucleotide
  Sense strand starting at position 2340 of SEQ ID NO: 914465
gagguugugugguuuacua

SEQ ID NO: 1006065 - RNA, 19 nt, Artificial Sequence
  Description of Artificial Sequence: Synthetic oligonucleotide
  Antisense strand to SEQ ID NO: 1006064
uaguaaaccacacaaccuc

SEQ ID NO: 1006066 - RNA, 19 nt, Artificial Sequence
  Description of Artificial Sequence: Synthetic oligonucleotide
  Sense strand starting at position 2342 of SEQ ID NO: 914465
gguugugugguuuacuauu

SEQ ID NO: 1006067 - RNA, 19 nt, Artificial Sequence
  Description of Artificial Sequence: Synthetic oligonucleotide
  Antisense strand to SEQ ID NO: 1006066
aauaguaaaccacacaacc

SEQ ID NO: 1006068 - RNA, 19 nt, Artificial Sequence
  Description of Artificial Sequence: Synthetic oligonucleotide
  Sense strand starting at position 2350 of SEQ ID NO: 914465
gguuuacuauuacugcuau

SEQ ID NO: 1006069 - RNA, 19 nt, Artificial Sequence
  Description of Artificial Sequence: Synthetic oligonucleotide
  Antisense strand to SEQ ID NO: 1006068
auagcaguaauaguaaacc

SEQ ID NO: 1006070 - RNA, 19 nt, Artificial Sequence
  Description of Artificial Sequence: Synthetic oligonucleotide
  Sense strand starting at position 2422 of SEQ ID NO: 914465
gaggguugcacggguguua

SEQ ID NO: 1006071 - RNA, 19 nt, Artificial Sequence
  Description of Artificial Sequence: Synthetic oligonucleotide
  Antisense strand to SEQ ID NO: 1006070
uaacacccgugcaacccuc

SEQ ID NO: 1006072 - RNA, 19 nt, Artificial Sequence
  Description of Artificial Sequence: Synthetic oligonucleotide
  Sense strand starting at position 2426 of SEQ ID NO: 914465
guugcacggguguuaagua

SEQ ID NO: 1006073 - RNA, 19 nt, Artificial Sequence
  Description of Artificial Sequence: Synthetic oligonucleotide
  Antisense strand to SEQ ID NO: 1006072
uacuuaacacccgugcaac

SEQ ID NO: 1006074 - RNA, 19 nt, Artificial Sequence
  Description of Artificial Sequence: Synthetic oligonucleotide
  Sense strand starting at position 2595 of SEQ ID NO: 914465
agcguuguugcugagggau

SEQ ID NO: 1006075 - RNA, 19 nt, Artificial Sequence
  Description of Artificial Sequence: Synthetic oligonucleotide
  Antisense strand to SEQ ID NO: 1006074
aucccucagcaacaacgcu

SEQ ID NO: 1006076 - RNA, 19 nt, Artificial Sequence
  Description of Artificial Sequence: Synthetic oligonucleotide
  Sense strand starting at position 2694 of SEQ ID NO: 914465
cggucagcgcuacagaauu

SEQ ID NO: 1006077 - RNA, 19 nt, Artificial Sequence
  Description of Artificial Sequence: Synthetic oligonucleotide
  Antisense strand to SEQ ID NO: 1006076
aauucuguagcgcugaccg

SEQ ID NO: 1006078 - RNA, 19 nt, Artificial Sequence
  Description of Artificial Sequence: Synthetic oligonucleotide
  Sense strand starting at position 2759 of SEQ ID NO: 914465
uuggaacuguccucuagac

SEQ ID NO: 1006079 - RNA, 19 nt, Artificial Sequence
  Description of Artificial Sequence: Synthetic oligonucleotide
  Antisense strand to SEQ ID NO: 1006078
gucuagaggacaguuccaa

SEQ ID NO: 1006080 - RNA, 19 nt, Artificial Sequence
  Description of Artificial Sequence: Synthetic oligonucleotide
  Sense strand starting at position 2775 of SEQ ID NO: 914465
gacuguagccucugccaga

SEQ ID NO: 1006081 - RNA, 19 nt, Artificial Sequence
  Description of Artificial Sequence: Synthetic oligonucleotide
  Antisense strand to SEQ ID NO: 1006080
ucuggcagaggcuacaguc

SEQ ID NO: 1006082 - RNA, 19 nt, Artificial Sequence
  Description of Artificial Sequence: Synthetic oligonucleotide
  Sense strand starting at position 2882 of SEQ ID NO: 914465
caaauugcuucgucucuga

SEQ ID NO: 1006083 - RNA, 19 nt, Artificial Sequence
  Description of Artificial Sequence: Synthetic oligonucleotide
  Antisense strand to SEQ ID NO: 1006082
ucagagacgaagcaauuug

SEQ ID NO: 1006084 - RNA, 19 nt, Artificial Sequence
  Description of Artificial Sequence: Synthetic oligonucleotide
  Sense strand starting at position 2932 of SEQ ID NO: 914465
accuuaaguuauccgaugu

SEQ ID NO: 1006085 - RNA, 19 nt, Artificial Sequence
  Description of Artificial Sequence: Synthetic oligonucleotide
  Antisense strand to SEQ ID NO: 1006084
acaucggauaacuuaaggu

SEQ ID NO: 1006086 - RNA, 19 nt, Artificial Sequence
  Description of Artificial Sequence: Synthetic oligonucleotide
  Sense strand starting at position 2933 of SEQ ID NO: 914465
ccuuaaguuauccgaugug

SEQ ID NO: 1006087 - RNA, 19 nt, Artificial Sequence
  Description of Artificial Sequence: Synthetic oligonucleotide
  Antisense strand to SEQ ID NO: 1006086
cacaucggauaacuuaagg

SEQ ID NO: 1006088 - RNA, 19 nt, Artificial Sequence
  Description of Artificial Sequence: Synthetic oligonucleotide
  Sense strand starting at position 2961 of SEQ ID NO: 914465
ucagccuagucuuugacua

SEQ ID NO: 1006089 - RNA, 19 nt, Artificial Sequence
  Description of Artificial Sequence: Synthetic oligonucleotide
  Antisense strand to SEQ ID NO: 1006088
uagucaaagacuaggcuga

SEQ ID NO: 1006090 - RNA, 19 nt, Artificial Sequence
  Description of Artificial Sequence: Synthetic oligonucleotide
  Sense strand starting at position 2985 of SEQ ID NO: 914465
agaccucucuuccugaaga

SEQ ID NO: 1006091 - RNA, 19 nt, Artificial Sequence
  Description of Artificial Sequence: Synthetic oligonucleotide
  Antisense strand to SEQ ID NO: 1006090
ucuucaggaagagaggucu

SEQ ID NO: 1006092 - RNA, 19 nt, Artificial Sequence
  Description of Artificial Sequence: Synthetic oligonucleotide
  Sense strand starting at position 3133 of SEQ ID NO: 914465
ggaacuugucaguaacgca

SEQ ID NO: 1006093 - RNA, 19 nt, Artificial Sequence
  Description of Artificial Sequence: Synthetic oligonucleotide
  Antisense strand to SEQ ID NO: 1006092
ugcguuacugacaaguucc

SEQ ID NO: 1006094 - RNA, 19 nt, Artificial Sequence
  Description of Artificial Sequence: Synthetic oligonucleotide
  Sense strand starting at position 3545 of SEQ ID NO: 914465
gauacugaugcgggaucaa

SEQ ID NO: 1006095 - RNA, 19 nt, Artificial Sequence
  Description of Artificial Sequence: Synthetic oligonucleotide
  Antisense strand to SEQ ID NO: 1006094
uugaucccgcaucaguauc

SEQ ID NO: 1006096 - RNA, 19 nt, Artificial Sequence
  Description of Artificial Sequence: Synthetic oligonucleotide
  Sense strand starting at position 3572 of SEQ ID NO: 914465
agcacuggucuaggucuua

SEQ ID NO: 1006097 - RNA, 19 nt, Artificial Sequence
  Description of Artificial Sequence: Synthetic oligonucleotide
  Antisense strand to SEQ ID NO: 1006096
uaagaccuagaccagugcu

SEQ ID NO: 1006098 - RNA, 19 nt, Artificial Sequence
  Description of Artificial Sequence: Synthetic oligonucleotide
  Sense strand starting at position 3584 of SEQ ID NO: 914465
ggucuuagauccucuugcu

SEQ ID NO: 1006099 - RNA, 19 nt, Artificial Sequence
  Description of Artificial Sequence: Synthetic oligonucleotide
  Antisense strand to SEQ ID NO: 1006098
agcaagaggaucuaagacc

SEQ ID NO: 1006100 - RNA, 19 nt, Artificial Sequence
  Description of Artificial Sequence: Synthetic oligonucleotide
  Sense strand starting at position 3603 of SEQ ID NO: 914465
ucaguuucgucauuggauc

SEQ ID NO: 1006101 - RNA, 19 nt, Artificial Sequence
  Description of Artificial Sequence: Synthetic oligonucleotide
  Antisense strand to SEQ ID NO: 1006100
gauccaaugacgaaacuga

SEQ ID NO: 1006102 - RNA, 19 nt, Artificial Sequence
  Description of Artificial Sequence: Synthetic oligonucleotide
  Sense strand starting at position 3719 of SEQ ID NO: 914465
gcaugcuucccucaugugu

SEQ ID NO: 1006103 - RNA, 19 nt, Artificial Sequence
  Description of Artificial Sequence: Synthetic oligonucleotide
  Antisense strand to SEQ ID NO: 1006102
acacaugagggaagcaugc

SEQ ID NO: 1006104 - RNA, 19 nt, Artificial Sequence
  Description of Artificial Sequence: Synthetic oligonucleotide
  Sense strand starting at position 3737 of SEQ ID NO: 914465
uuccaaagcuggucagagu

SEQ ID NO: 1006105 - RNA, 19 nt, Artificial Sequence
  Description of Artificial Sequence: Synthetic oligonucleotide
  Antisense strand to SEQ ID NO: 1006104
acucugaccagcuuuggaa

SEQ ID NO: 1006106 - RNA, 19 nt, Artificial Sequence
  Description of Artificial Sequence: Synthetic oligonucleotide
  Sense strand starting at position 3738 of SEQ ID NO: 914465
uccaaagcuggucagagua

SEQ ID NO: 1006107 - RNA, 19 nt, Artificial Sequence
  Description of Artificial Sequence: Synthetic oligonucleotide
  Antisense strand to SEQ ID NO: 1006106
uacucugaccagcuuugga

SEQ ID NO: 1006108 - RNA, 19 nt, Artificial Sequence
  Description of Artificial Sequence: Synthetic oligonucleotide
  Sense strand starting at position 3748 of SEQ ID NO: 914465
gucagaguagucuacacca

SEQ ID NO: 1006109 - RNA, 19 nt, Artificial Sequence
  Description of Artificial Sequence: Synthetic oligonucleotide
  Antisense strand to SEQ ID NO: 1006108
ugguguagacuacucugac

SEQ ID NO: 1006110 - RNA, 19 nt, Artificial Sequence
  Description of Artificial Sequence: Synthetic oligonucleotide
  Sense strand starting at position 3853 of SEQ ID NO: 914465
gucagcuggcaucggaauu

SEQ ID NO: 1006111 - RNA, 19 nt, Artificial Sequence
  Description of Artificial Sequence: Synthetic oligonucleotide
  Antisense strand to SEQ ID NO: 1006110
aauuccgaugccagcugac

SEQ ID NO: 1006112 - RNA, 19 nt, Artificial Sequence
  Description of Artificial Sequence: Synthetic oligonucleotide
  Sense strand starting at position 3925 of SEQ ID NO: 914465
ucauccucccagugaauga

SEQ ID NO: 1006113 - RNA, 19 nt, Artificial Sequence
  Description of Artificial Sequence: Synthetic oligonucleotide
  Antisense strand to SEQ ID NO: 1006112
ucauucacugggaggauga

SEQ ID NO: 1006114 - RNA, 19 nt, Artificial Sequence
  Description of Artificial Sequence: Synthetic oligonucleotide
  Sense strand starting at position 52 of SEQ ID NO: 914466
ggaucucagcuuugagaag

SEQ ID NO: 1006115 - RNA, 19 nt, Artificial Sequence
  Description of Artificial Sequence: Synthetic oligonucleotide
  Antisense strand to SEQ ID NO: 1006114
cuucucaaagcugagaucc

SEQ ID NO: 1006116 - RNA, 19 nt, Artificial Sequence
  Description of Artificial Sequence: Synthetic oligonucleotide
  Sense strand starting at position 277 of SEQ ID NO: 914466
ggacaaauucuuugauauu

SEQ ID NO: 1006117 - RNA, 19 nt, Artificial Sequence
  Description of Artificial Sequence: Synthetic oligonucleotide
  Antisense strand to SEQ ID NO: 1006116
aauaucaaagaauuugucc

SEQ ID NO: 1006118 - RNA, 19 nt, Artificial Sequence
  Description of Artificial Sequence: Synthetic oligonucleotide
  Sense strand starting at position 339 of SEQ ID NO: 914466
gccucaucuccgggacuga

SEQ ID NO: 1006119 - RNA, 19 nt, Artificial Sequence
  Description of Artificial Sequence: Synthetic oligonucleotide
  Antisense strand to SEQ ID NO: 1006118
ucagucccggagaugaggc

SEQ ID NO: 1006120 - RNA, 19 nt, Artificial Sequence
  Description of Artificial Sequence: Synthetic oligonucleotide
  Sense strand starting at position 607 of SEQ ID NO: 914466
ggaagucugguuuaccacu

SEQ ID NO: 1006121 - RNA, 19 nt, Artificial Sequence
  Description of Artificial Sequence: Synthetic oligonucleotide
  Antisense strand to SEQ ID NO: 1006120
agugguaaaccagacuucc

SEQ ID NO: 1006122 - RNA, 19 nt, Artificial Sequence
  Description of Artificial Sequence: Synthetic oligonucleotide
  Sense strand starting at position 659 of SEQ ID NO: 914466
gggaaucauuaguucugca

SEQ ID NO: 1006123 - RNA, 19 nt, Artificial Sequence
  Description of Artificial Sequence: Synthetic oligonucleotide
  Antisense strand to SEQ ID NO: 1006122
ugcagaacuaaugauuccc

SEQ ID NO: 1006124 - RNA, 19 nt, Artificial Sequence
  Description of Artificial Sequence: Synthetic oligonucleotide
  Sense strand starting at position 677 of SEQ ID NO: 914466
aguccuucuggaugggaau

SEQ ID NO: 1006125 - RNA, 19 nt, Artificial Sequence
  Description of Artificial Sequence: Synthetic oligonucleotide
  Antisense strand to SEQ ID NO: 1006124
auucccauccagaaggacu

SEQ ID NO: 1006126 - RNA, 19 nt, Artificial Sequence
  Description of Artificial Sequence: Synthetic oligonucleotide
  Sense strand starting at position 678 of SEQ ID NO: 914466
guccuucuggaugggaauu

SEQ ID NO: 1006127 - RNA, 19 nt, Artificial Sequence
  Description of Artificial Sequence: Synthetic oligonucleotide
  Antisense strand to SEQ ID NO: 1006126
aauucccauccagaaggac

SEQ ID NO: 1006128 - RNA, 19 nt, Artificial Sequence
  Description of Artificial Sequence: Synthetic oligonucleotide
  Sense strand starting at position 689 of SEQ ID NO: 914466
ugggaauuguacccuguau

SEQ ID NO: 1006129 - RNA, 19 nt, Artificial Sequence
  Description of Artificial Sequence: Synthetic oligonucleotide
  Antisense strand to SEQ ID NO: 1006128
auacaggguacaauuccca

SEQ ID NO: 1006130 - RNA, 19 nt, Artificial Sequence
  Description of Artificial Sequence: Synthetic oligonucleotide
  Sense strand starting at position 691 of SEQ ID NO: 914466
ggaauuguacccuguauca

SEQ ID NO: 1006131 - RNA, 19 nt, Artificial Sequence
  Description of Artificial Sequence: Synthetic oligonucleotide
  Antisense strand to SEQ ID NO: 1006130
ugauacaggguacaauucc

SEQ ID NO: 1006132 - RNA, 19 nt, Artificial Sequence
  Description of Artificial Sequence: Synthetic oligonucleotide
  Sense strand starting at position 2190 of SEQ ID NO: 914466
guccuagcucaccaauaga

SEQ ID NO: 1006133 - RNA, 19 nt, Artificial Sequence
  Description of Artificial Sequence: Synthetic oligonucleotide
  Antisense strand to SEQ ID NO: 1006132
ucuauuggugagcuaggac

SEQ ID NO: 1006134 - RNA, 19 nt, Artificial Sequence
  Description of Artificial Sequence: Synthetic oligonucleotide
  Sense strand starting at position 2349 of SEQ ID NO: 914466
cagucuguccgggaaguca

SEQ ID NO: 1006135 - RNA, 19 nt, Artificial Sequence
  Description of Artificial Sequence: Synthetic oligonucleotide
  Antisense strand to SEQ ID NO: 1006134
ugacuucccggacagacug

SEQ ID NO: 1006136 - RNA, 19 nt, Artificial Sequence
  Description of Artificial Sequence: Synthetic oligonucleotide
  Sense strand starting at position 2361 of SEQ ID NO: 914466
gaagucaagcuguguuaag

SEQ ID NO: 1006137 - RNA, 19 nt, Artificial Sequence
  Description of Artificial Sequence: Synthetic oligonucleotide
  Antisense strand to SEQ ID NO: 1006136
cuuaacacagcuugacuuc

SEQ ID NO: 1006138 - RNA, 19 nt, Artificial Sequence
  Description of Artificial Sequence: Synthetic oligonucleotide
  Sense strand starting at position 2368 of SEQ ID NO: 914466
agcuguguuaagcaagaaa

SEQ ID NO: 1006139 - RNA, 19 nt, Artificial Sequence
  Description of Artificial Sequence: Synthetic oligonucleotide
  Antisense strand to SEQ ID NO: 1006138
uuucuugcuuaacacagcu

SEQ ID NO: 1006140 - RNA, 19 nt, Artificial Sequence
  Description of Artificial Sequence: Synthetic oligonucleotide
  Sense strand starting at position 2371 of SEQ ID NO: 914466
uguguuaagcaagaaauaa

SEQ ID NO: 1006141 - RNA, 19 nt, Artificial Sequence
  Description of Artificial Sequence: Synthetic oligonucleotide
  Antisense strand to SEQ ID NO: 1006140
uuauuucuugcuuaacaca

SEQ ID NO: 1006142 - RNA, 19 nt, Artificial Sequence
  Description of Artificial Sequence: Synthetic oligonucleotide
  Sense strand starting at position 2382 of SEQ ID NO: 914466
agaaauaaauccgggagga

SEQ ID NO: 1006143 - RNA, 19 nt, Artificial Sequence
  Description of Artificial Sequence: Synthetic oligonucleotide
  Antisense strand to SEQ ID NO: 1006142
uccucccggauuuauuucu

SEQ ID NO: 1006144 - RNA, 19 nt, Artificial Sequence
  Description of Artificial Sequence: Synthetic oligonucleotide
  Sense strand starting at position 2397 of SEQ ID NO: 914466
aggaguauggucugagggu

SEQ ID NO: 1006145 - RNA, 19 nt, Artificial Sequence
  Description of Artificial Sequence: Synthetic oligonucleotide
  Antisense strand to SEQ ID NO: 1006144
acccucagaccauacuccu

SEQ ID NO: 1006146 - RNA, 19 nt, Artificial Sequence
  Description of Artificial Sequence: Synthetic oligonucleotide
  Sense strand starting at position 2406 of SEQ ID NO: 914466
gucugaggguccuuaagag

SEQ ID NO: 1006147 - RNA, 19 nt, Artificial Sequence
  Description of Artificial Sequence: Synthetic oligonucleotide
  Antisense strand to SEQ ID NO: 1006146
cucuuaaggacccucagac

SEQ ID NO: 1006148 - RNA, 19 nt, Artificial Sequence
  Description of Artificial Sequence: Synthetic oligonucleotide
  Sense strand starting at position 2458 of SEQ ID NO: 914466
gguagauccauaggacuuu

SEQ ID NO: 1006149 - RNA, 19 nt, Artificial Sequence
  Description of Artificial Sequence: Synthetic oligonucleotide
  Antisense strand to SEQ ID NO: 1006148
aaaguccuauggaucuacc

SEQ ID NO: 1006150 - RNA, 19 nt, Artificial Sequence
  Description of Artificial Sequence: Synthetic oligonucleotide
  Sense strand starting at position 2486 of SEQ ID NO: 914466
agagcuauuucagggagag

SEQ ID NO: 1006151 - RNA, 19 nt, Artificial Sequence
  Description of Artificial Sequence: Synthetic oligonucleotide
  Antisense strand to SEQ ID NO: 1006150
cucucccugaaauagcucu

SEQ ID NO: 1006152 - RNA, 19 nt, Artificial Sequence
  Description of Artificial Sequence: Synthetic oligonucleotide
  Sense strand starting at position 2505 of SEQ ID NO: 914466
agaauaacauagugaaaga

SEQ ID NO: 1006153 - RNA, 19 nt, Artificial Sequence
  Description of Artificial Sequence: Synthetic oligonucleotide
  Antisense strand to SEQ ID NO: 1006152
ucuuucacuauguuauucu

SEQ ID NO: 1006154 - RNA, 19 nt, Artificial Sequence
  Description of Artificial Sequence: Synthetic oligonucleotide
  Sense strand starting at position 2522 of SEQ ID NO: 914466
gacacuggugcccgaaaga

SEQ ID NO: 1006155 - RNA, 19 nt, Artificial Sequence
  Description of Artificial Sequence: Synthetic oligonucleotide
  Antisense strand to SEQ ID NO: 1006154
ucuuucgggcaccaguguc

SEQ ID NO: 1006156 - RNA, 19 nt, Artificial Sequence
  Description of Artificial Sequence: Synthetic oligonucleotide
  Sense strand starting at position 2708 of SEQ ID NO: 914466
gcaagagaguaacauuugu

SEQ ID NO: 1006157 - RNA, 19 nt, Artificial Sequence
  Description of Artificial Sequence: Synthetic oligonucleotide
  Antisense strand to SEQ ID NO: 1006156
acaaauguuacucucuugc

SEQ ID NO: 1006158 - RNA, 19 nt, Artificial Sequence
  Description of Artificial Sequence: Synthetic oligonucleotide
  Sense strand starting at position 2714 of SEQ ID NO: 914466
gaguaacauuuguaaggau

SEQ ID NO: 1006159 - RNA, 19 nt, Artificial Sequence
  Description of Artificial Sequence: Synthetic oligonucleotide
  Antisense strand to SEQ ID NO: 1006158
auccuuacaaauguuacuc

SEQ ID NO: 1006160 - RNA, 19 nt, Artificial Sequence
  Description of Artificial Sequence: Synthetic oligonucleotide
  Sense strand starting at position 2717 of SEQ ID NO: 914466
uaacauuuguaaggauguu

SEQ ID NO: 1006161 - RNA, 19 nt, Artificial Sequence
  Description of Artificial Sequence: Synthetic oligonucleotide
  Antisense strand to SEQ ID NO: 1006160
aacauccuuacaaauguua

SEQ ID NO: 1006162 - RNA, 19 nt, Artificial Sequence
  Description of Artificial Sequence: Synthetic oligonucleotide
  Sense strand starting at position 2730 of SEQ ID NO: 914466
gauguuaagcaagggagua

SEQ ID NO: 1006163 - RNA, 19 nt, Artificial Sequence
  Description of Artificial Sequence: Synthetic oligonucleotide
  Antisense strand to SEQ ID NO: 1006162
uacucccuugcuuaacauc

SEQ ID NO: 1006164 - RNA, 19 nt, Artificial Sequence
  Description of Artificial Sequence: Synthetic oligonucleotide
  Sense strand starting at position 2763 of SEQ ID NO: 914466
gccuuuaacuggccaagau

SEQ ID NO: 1006165 - RNA, 19 nt, Artificial Sequence
  Description of Artificial Sequence: Synthetic oligonucleotide
  Antisense strand to SEQ ID NO: 1006164
aucuuggccaguuaaaggc

SEQ ID NO: 1006166 - RNA, 19 nt, Artificial Sequence
  Description of Artificial Sequence: Synthetic oligonucleotide
  Sense strand starting at position 3038 of SEQ ID NO: 914466
gagauuaguaacgguguca

SEQ ID NO: 1006167 - RNA, 19 nt, Artificial Sequence
  Description of Artificial Sequence: Synthetic oligonucleotide
  Antisense strand to SEQ ID NO: 1006166
ugacaccguuacuaaucuc

SEQ ID NO: 1006168 - RNA, 19 nt, Artificial Sequence
  Description of Artificial Sequence: Synthetic oligonucleotide
  Sense strand starting at position 3137 of SEQ ID NO: 914466
aaauauucgggaggcaaau

SEQ ID NO: 1006169 - RNA, 19 nt, Artificial Sequence
  Description of Artificial Sequence: Synthetic oligonucleotide
  Antisense strand to SEQ ID NO: 1006168
auuugccucccgaauauuu

SEQ ID NO: 1006170 - RNA, 19 nt, Artificial Sequence
  Description of Artificial Sequence: Synthetic oligonucleotide
  Sense strand starting at position 3200 of SEQ ID NO: 914466
agguuucucguaugagaac

SEQ ID NO: 1006171 - RNA, 19 nt, Artificial Sequence
  Description of Artificial Sequence: Synthetic oligonucleotide
  Antisense strand to SEQ ID NO: 1006170
guucucauacgagaaaccu

SEQ ID NO: 1006172 - RNA, 19 nt, Artificial Sequence
  Description of Artificial Sequence: Synthetic oligonucleotide
  Sense strand starting at position 3207 of SEQ ID NO: 914466
ucguaugagaacuggugga

SEQ ID NO: 1006173 - RNA, 19 nt, Artificial Sequence
  Description of Artificial Sequence: Synthetic oligonucleotide
  Antisense strand to SEQ ID NO: 1006172
uccaccaguucucauacga

SEQ ID NO: 1006174 - RNA, 19 nt, Artificial Sequence
  Description of Artificial Sequence: Synthetic oligonucleotide
  Sense strand starting at position 3211 of SEQ ID NO: 914466
augagaacugguggauguu

SEQ ID NO: 1006175 - RNA, 19 nt, Artificial Sequence
  Description of Artificial Sequence: Synthetic oligonucleotide
  Antisense strand to SEQ ID NO: 1006174
aacauccaccaguucucau

SEQ ID NO: 1006176 - RNA, 19 nt, Artificial Sequence
  Description of Artificial Sequence: Synthetic oligonucleotide
  Sense strand starting at position 3223 of SEQ ID NO: 914466
ggauguuagggcugucacu

SEQ ID NO: 1006177 - RNA, 19 nt, Artificial Sequence
  Description of Artificial Sequence: Synthetic oligonucleotide
  Antisense strand to SEQ ID NO: 1006176
agugacagcccuaacaucc

SEQ ID NO: 1006178 - RNA, 19 nt, Artificial Sequence
  Description of Artificial Sequence: Synthetic oligonucleotide
  Sense strand starting at position 3229 of SEQ ID NO: 914466
uagggcugucacugagaua

SEQ ID NO: 1006179 - RNA, 19 nt, Artificial Sequence
  Description of Artificial Sequence: Synthetic oligonucleotide
  Antisense strand to SEQ ID NO: 1006178
uaucucagugacagcccua

SEQ ID NO: 1006180 - RNA, 19 nt, Artificial Sequence
  Description of Artificial Sequence: Synthetic oligonucleotide
  Sense strand starting at position 3230 of SEQ ID NO: 914466
agggcugucacugagauag

SEQ ID NO: 1006181 - RNA, 19 nt, Artificial Sequence
  Description of Artificial Sequence: Synthetic oligonucleotide
  Antisense strand to SEQ ID NO: 1006180
cuaucucagugacagcccu

SEQ ID NO: 1006182 - RNA, 19 nt, Artificial Sequence
  Description of Artificial Sequence: Synthetic oligonucleotide
  Sense strand starting at position 3281 of SEQ ID NO: 914466
gaggucugucuagaauaug

SEQ ID NO: 1006183 - RNA, 19 nt, Artificial Sequence
  Description of Artificial Sequence: Synthetic oligonucleotide
  Antisense strand to SEQ ID NO: 1006182
cauauucuagacagaccuc

SEQ ID NO: 1006184 - RNA, 19 nt, Artificial Sequence
  Description of Artificial Sequence: Synthetic oligonucleotide
  Sense strand starting at position 3290 of SEQ ID NO: 914466
cuagaauauguugagcuuu

SEQ ID NO: 1006185 - RNA, 19 nt, Artificial Sequence
  Description of Artificial Sequence: Synthetic oligonucleotide
  Antisense strand to SEQ ID NO: 1006184
aaagcucaacauauucuag

SEQ ID NO: 1006186 - RNA, 19 nt, Artificial Sequence
  Description of Artificial Sequence: Synthetic oligonucleotide
  Sense strand starting at position 3331 of SEQ ID NO: 914466
uggauagacuuggccgaua

SEQ ID NO: 1006187 - RNA, 19 nt, Artificial Sequence
  Description of Artificial Sequence: Synthetic oligonucleotide
  Antisense strand to SEQ ID NO: 1006186
uaucggccaagucuaucca

SEQ ID NO: 1006188 - RNA, 19 nt, Artificial Sequence
  Description of Artificial Sequence: Synthetic oligonucleotide
  Sense strand starting at position 3392 of SEQ ID NO: 914466
ggcagaauuagagacguca

SEQ ID NO: 1006189 - RNA, 19 nt, Artificial Sequence
  Description of Artificial Sequence: Synthetic oligonucleotide
  Antisense strand to SEQ ID NO: 1006188
ugacgucucuaauucugcc

SEQ ID NO: 1006190 - RNA, 19 nt, Artificial Sequence
  Description of Artificial Sequence: Synthetic oligonucleotide
  Sense strand starting at position 3547 of SEQ ID NO: 914466
ugcggagauuuaggauaga

SEQ ID NO: 1006191 - RNA, 19 nt, Artificial Sequence
  Description of Artificial Sequence: Synthetic oligonucleotide
  Antisense strand to SEQ ID NO: 1006190
ucuauccuaaaucuccgca

SEQ ID NO: 1006192 - RNA, 19 nt, Artificial Sequence
  Description of Artificial Sequence: Synthetic oligonucleotide
  Sense strand starting at position 3558 of SEQ ID NO: 914466
aggauagagcccugugaaa

SEQ ID NO: 1006193 - RNA, 19 nt, Artificial Sequence
  Description of Artificial Sequence: Synthetic oligonucleotide
  Antisense strand to SEQ ID NO: 1006192
uuucacagggcucuauccu

SEQ ID NO: 1006194 - RNA, 19 nt, Artificial Sequence
  Description of Artificial Sequence: Synthetic oligonucleotide
  Sense strand starting at position 17 of SEQ ID NO: 914467
ugcaguaaauuacucugua

SEQ ID NO: 1006195 - RNA, 19 nt, Artificial Sequence
  Description of Artificial Sequence: Synthetic oligonucleotide
  Antisense strand to SEQ ID NO: 1006194
uacagaguaauuuacugca

SEQ ID NO: 1006196 - RNA, 19 nt, Artificial Sequence
  Description of Artificial Sequence: Synthetic oligonucleotide
  Sense strand starting at position 18 of SEQ ID NO: 914467
gcaguaaauuacucuguaa

SEQ ID NO: 1006197 - RNA, 19 nt, Artificial Sequence
  Description of Artificial Sequence: Synthetic oligonucleotide
  Antisense strand to SEQ ID NO: 1006196
uuacagaguaauuuacugc

SEQ ID NO: 1006198 - RNA, 19 nt, Artificial Sequence
  Description of Artificial Sequence: Synthetic oligonucleotide
  Sense strand starting at position 20 of SEQ ID NO: 914467
aguaaauuacucuguaagc

SEQ ID NO: 1006199 - RNA, 19 nt, Artificial Sequence
  Description of Artificial Sequence: Synthetic oligonucleotide
  Antisense strand to SEQ ID NO: 1006198
gcuuacagaguaauuuacu

SEQ ID NO: 1006200 - RNA, 19 nt, Artificial Sequence
  Description of Artificial Sequence: Synthetic oligonucleotide
  Sense strand starting at position 184 of SEQ ID NO: 914467
ggcauacaucccugacucu

SEQ ID NO: 1006201 - RNA, 19 nt, Artificial Sequence
  Description of Artificial Sequence: Synthetic oligonucleotide
  Antisense strand to SEQ ID NO: 1006200
agagucagggauguaugcc

SEQ ID NO: 1006202 - RNA, 19 nt, Artificial Sequence
  Description of Artificial Sequence: Synthetic oligonucleotide
  Sense strand starting at position 328 of SEQ ID NO: 914467
uuacuaugcccuuggcaca

SEQ ID NO: 1006203 - RNA, 19 nt, Artificial Sequence
  Description of Artificial Sequence: Synthetic oligonucleotide
  Antisense strand to SEQ ID NO: 1006202
ugugccaagggcauaguaa

SEQ ID NO: 1006204 - RNA, 19 nt, Artificial Sequence
  Description of Artificial Sequence: Synthetic oligonucleotide
  Sense strand starting at position 450 of SEQ ID NO: 914467
ggaaucagaucugugcuca

SEQ ID NO: 1006205 - RNA, 19 nt, Artificial Sequence
  Description of Artificial Sequence: Synthetic oligonucleotide
  Antisense strand to SEQ ID NO: 1006204
ugagcacagaucugauucc

SEQ ID NO: 1006206 - RNA, 19 nt, Artificial Sequence
  Description of Artificial Sequence: Synthetic oligonucleotide
  Sense strand starting at position 451 of SEQ ID NO: 914467
gaaucagaucugugcucag

SEQ ID NO: 1006207 - RNA, 19 nt, Artificial Sequence
  Description of Artificial Sequence: Synthetic oligonucleotide
  Antisense strand to SEQ ID NO: 1006206
cugagcacagaucugauuc

SEQ ID NO: 1006208 - RNA, 19 nt, Artificial Sequence
  Description of Artificial Sequence: Synthetic oligonucleotide
  Sense strand starting at position 555 of SEQ ID NO: 914467
gcagauuaagcgugaugac

SEQ ID NO: 1006209 - RNA, 19 nt, Artificial Sequence
  Description of Artificial Sequence: Synthetic oligonucleotide
  Antisense strand to SEQ ID NO: 1006208
gucaucacgcuuaaucugc

SEQ ID NO: 1006210 - RNA, 19 nt, Artificial Sequence
  Description of Artificial Sequence: Synthetic oligonucleotide
  Sense strand starting at position 556 of SEQ ID NO: 914467
cagauuaagcgugaugaca

SEQ ID NO: 1006211 - RNA, 19 nt, Artificial Sequence
  Description of Artificial Sequence: Synthetic oligonucleotide
  Antisense strand to SEQ ID NO: 1006210
ugucaucacgcuuaaucug

SEQ ID NO: 1006212 - RNA, 19 nt, Artificial Sequence
  Description of Artificial Sequence: Synthetic oligonucleotide
  Sense strand starting at position 578 of SEQ ID NO: 914467
gcuguuccauguuugaaag

SEQ ID NO: 1006213 - RNA, 19 nt, Artificial Sequence
  Description of Artificial Sequence: Synthetic oligonucleotide
  Antisense strand to SEQ ID NO: 1006212
cuuucaaacauggaacagc

SEQ ID NO: 1006214 - RNA, 19 nt, Artificial Sequence
  Description of Artificial Sequence: Synthetic oligonucleotide
  Sense strand starting at position 607 of SEQ ID NO: 914467
gguaaauccuuauuaaggc

SEQ ID NO: 1006215 - RNA, 19 nt, Artificial Sequence
  Description of Artificial Sequence: Synthetic oligonucleotide
  Antisense strand to SEQ ID NO: 1006214
gccuuaauaaggauuuacc

SEQ ID NO: 1006216 - RNA, 19 nt, Artificial Sequence
  Description of Artificial Sequence: Synthetic oligonucleotide
  Sense strand starting at position 621 of SEQ ID NO: 914467
aaggcuguugacugguaaa

SEQ ID NO: 1006217 - RNA, 19 nt, Artificial Sequence
  Description of Artificial Sequence: Synthetic oligonucleotide
  Antisense strand to SEQ ID NO: 1006216
uuuaccagucaacagccuu

SEQ ID NO: 1006218 - RNA, 19 nt, Artificial Sequence
  Description of Artificial Sequence: Synthetic oligonucleotide
  Sense strand starting at position 650 of SEQ ID NO: 914467
aucagugcucaguaauacu

SEQ ID NO: 1006219 - RNA, 19 nt, Artificial Sequence
  Description of Artificial Sequence: Synthetic oligonucleotide
  Antisense strand to SEQ ID NO: 1006218
aguauuacugagcacugau

SEQ ID NO: 1006220 - RNA, 19 nt, Artificial Sequence
  Description of Artificial Sequence: Synthetic oligonucleotide
  Sense strand starting at position 730 of SEQ ID NO: 914467
ucaaguaauggcugguuua

SEQ ID NO: 1006221 - RNA, 19 nt, Artificial Sequence
  Description of Artificial Sequence: Synthetic oligonucleotide
  Antisense strand to SEQ ID NO: 1006220
uaaaccagccauuacuuga

SEQ ID NO: 1006222 - RNA, 19 nt, Artificial Sequence
  Description of Artificial Sequence: Synthetic oligonucleotide
  Sense strand starting at position 731 of SEQ ID NO: 914467
caaguaauggcugguuuac

SEQ ID NO: 1006223 - RNA, 19 nt, Artificial Sequence
  Description of Artificial Sequence: Synthetic oligonucleotide
  Antisense strand to SEQ ID NO: 1006222
guaaaccagccauuacuug

SEQ ID NO: 1006224 - RNA, 19 nt, Artificial Sequence
  Description of Artificial Sequence: Synthetic oligonucleotide
  Sense strand starting at position 733 of SEQ ID NO: 914467
aguaauggcugguuuacuu

SEQ ID NO: 1006225 - RNA, 19 nt, Artificial Sequence
  Description of Artificial Sequence: Synthetic oligonucleotide
  Antisense strand to SEQ ID NO: 1006224
aaguaaaccagccauuacu

SEQ ID NO: 1006226 - RNA, 19 nt, Artificial Sequence
  Description of Artificial Sequence: Synthetic oligonucleotide
  Sense strand starting at position 756 of SEQ ID NO: 914467
cugcuucucucacuagaga

SEQ ID NO: 1006227 - RNA, 19 nt, Artificial Sequence
  Description of Artificial Sequence: Synthetic oligonucleotide
  Antisense strand to SEQ ID NO: 1006226
ucucuagugagagaagcag

SEQ ID NO: 1006228 - RNA, 19 nt, Artificial Sequence
  Description of Artificial Sequence: Synthetic oligonucleotide
  Sense strand starting at position 776 of SEQ ID NO: 914467
ggcagacaacgguaaaugu

SEQ ID NO: 1006229 - RNA, 19 nt, Artificial Sequence
  Description of Artificial Sequence: Synthetic oligonucleotide
  Antisense strand to SEQ ID NO: 1006228
acauuuaccguugucugcc

SEQ ID NO: 1006230 - RNA, 19 nt, Artificial Sequence
  Description of Artificial Sequence: Synthetic oligonucleotide
  Sense strand starting at position 783 of SEQ ID NO: 914467
aacgguaaaugucuguuga

SEQ ID NO: 1006231 - RNA, 19 nt, Artificial Sequence
  Description of Artificial Sequence: Synthetic oligonucleotide
  Antisense strand to SEQ ID NO: 1006230
ucaacagacauuuaccguu

SEQ ID NO: 1006232 - RNA, 19 nt, Artificial Sequence
  Description of Artificial Sequence: Synthetic oligonucleotide
  Sense strand starting at position 784 of SEQ ID NO: 914467
acgguaaaugucuguugaa

SEQ ID NO: 1006233 - RNA, 19 nt, Artificial Sequence
  Description of Artificial Sequence: Synthetic oligonucleotide
  Antisense strand to SEQ ID NO: 1006232
uucaacagacauuuaccgu

SEQ ID NO: 1006234 - RNA, 19 nt, Artificial Sequence
  Description of Artificial Sequence: Synthetic oligonucleotide
  Sense strand starting at position 785 of SEQ ID NO: 914467
cgguaaaugucuguugaac

SEQ ID NO: 1006235 - RNA, 19 nt, Artificial Sequence
  Description of Artificial Sequence: Synthetic oligonucleotide
  Antisense strand to SEQ ID NO: 1006234
guucaacagacauuuaccg

SEQ ID NO: 1006236 - RNA, 19 nt, Artificial Sequence
  Description of Artificial Sequence: Synthetic oligonucleotide
  Sense strand starting at position 935 of SEQ ID NO: 914467
guaauuaccuguuugcuaa

SEQ ID NO: 1006237 - RNA, 19 nt, Artificial Sequence
  Description of Artificial Sequence: Synthetic oligonucleotide
  Antisense strand to SEQ ID NO: 1006236
uuagcaaacagguaauuac

SEQ ID NO: 1006238 - RNA, 19 nt, Artificial Sequence
  Description of Artificial Sequence: Synthetic oligonucleotide
  Sense strand starting at position 2029 of SEQ ID NO: 914467
gcgcgagcgcagucaacau

SEQ ID NO: 1006239 - RNA, 19 nt, Artificial Sequence
  Description of Artificial Sequence: Synthetic oligonucleotide
  Antisense strand to SEQ ID NO: 1006238
auguugacugcgcucgcgc

SEQ ID NO: 1006240 - RNA, 19 nt, Artificial Sequence
  Description of Artificial Sequence: Synthetic oligonucleotide
  Sense strand starting at position 2037 of SEQ ID NO: 914467
gcagucaacaugugauuga

SEQ ID NO: 1006241 - RNA, 19 nt, Artificial Sequence
  Description of Artificial Sequence: Synthetic oligonucleotide
  Antisense strand to SEQ ID NO: 1006240
ucaaucacauguugacugc

SEQ ID NO: 1006242 - RNA, 19 nt, Artificial Sequence
  Description of Artificial Sequence: Synthetic oligonucleotide
  Sense strand starting at position 2040 of SEQ ID NO: 914467
gucaacaugugauugauga

SEQ ID NO: 1006243 - RNA, 19 nt, Artificial Sequence
  Description of Artificial Sequence: Synthetic oligonucleotide
  Antisense strand to SEQ ID NO: 1006242
ucaucaaucacauguugac

SEQ ID NO: 1006244 - RNA, 19 nt, Artificial Sequence
  Description of Artificial Sequence: Synthetic oligonucleotide
  Sense strand starting at position 2431 of SEQ ID NO: 914467
cguccugugcuuccguaua

SEQ ID NO: 1006245 - RNA, 19 nt, Artificial Sequence
  Description of Artificial Sequence: Synthetic oligonucleotide
  Antisense strand to SEQ ID NO: 1006244
uauacggaagcacaggacg

SEQ ID NO: 1006246 - RNA, 19 nt, Artificial Sequence
  Description of Artificial Sequence: Synthetic oligonucleotide
  Sense strand starting at position 2485 of SEQ ID NO: 914467
aacguuugugagggaaguu

SEQ ID NO: 1006247 - RNA, 19 nt, Artificial Sequence
  Description of Artificial Sequence: Synthetic oligonucleotide
  Antisense strand to SEQ ID NO: 1006246
aacuucccucacaaacguu

SEQ ID NO: 1006248 - RNA, 19 nt, Artificial Sequence
  Description of Artificial Sequence: Synthetic oligonucleotide
  Sense strand starting at position 2610 of SEQ ID NO: 914467
guuggaucaucuccgaucu

SEQ ID NO: 1006249 - RNA, 19 nt, Artificial Sequence
  Description of Artificial Sequence: Synthetic oligonucleotide
  Antisense strand to SEQ ID NO: 1006248
agaucggagaugauccaac

SEQ ID NO: 1006250 - RNA, 19 nt, Artificial Sequence
  Description of Artificial Sequence: Synthetic oligonucleotide
  Sense strand starting at position 2827 of SEQ ID NO: 914467
gagacuuucgugugagacc

SEQ ID NO: 1006251 - RNA, 19 nt, Artificial Sequence
  Description of Artificial Sequence: Synthetic oligonucleotide
  Antisense strand to SEQ ID NO: 1006250
ggucucacacgaaagucuc

SEQ ID NO: 1006252 - RNA, 19 nt, Artificial Sequence
  Description of Artificial Sequence: Synthetic oligonucleotide
  Sense strand starting at position 2834 of SEQ ID NO: 914467
ucgugugagaccuaggagu

SEQ ID NO: 1006253 - RNA, 19 nt, Artificial Sequence
  Description of Artificial Sequence: Synthetic oligonucleotide
  Antisense strand to SEQ ID NO: 1006252
acuccuaggucucacacga

SEQ ID NO: 1006254 - RNA, 19 nt, Artificial Sequence
  Description of Artificial Sequence: Synthetic oligonucleotide
  Sense strand starting at position 2870 of SEQ ID NO: 914467
acagcaugcuucuuaggaa

SEQ ID NO: 1006255 - RNA, 19 nt, Artificial Sequence
  Description of Artificial Sequence: Synthetic oligonucleotide
  Antisense strand to SEQ ID NO: 1006254
uuccuaagaagcaugcugu

SEQ ID NO: 1006256 - RNA, 19 nt, Artificial Sequence
  Description of Artificial Sequence: Synthetic oligonucleotide
  Sense strand starting at position 2904 of SEQ ID NO: 914467
ggcccaguuguguaauucu

SEQ ID NO: 1006257 - RNA, 19 nt, Artificial Sequence
  Description of Artificial Sequence: Synthetic oligonucleotide
  Antisense strand to SEQ ID NO: 1006256
agaauuacacaacugggcc

SEQ ID NO: 1006258 - RNA, 19 nt, Artificial Sequence
  Description of Artificial Sequence: Synthetic oligonucleotide
  Sense strand starting at position 2912 of SEQ ID NO: 914467
uguguaauucuuggaacug

SEQ ID NO: 1006259 - RNA, 19 nt, Artificial Sequence
  Description of Artificial Sequence: Synthetic oligonucleotide
  Antisense strand to SEQ ID NO: 1006258
caguuccaagaauuacaca

SEQ ID NO: 1006260 - RNA, 19 nt, Artificial Sequence
  Description of Artificial Sequence: Synthetic oligonucleotide
  Sense strand starting at position 3019 of SEQ ID NO: 914467
gugagagggccugggaaau

SEQ ID NO: 1006261 - RNA, 19 nt, Artificial Sequence
  Description of Artificial Sequence: Synthetic oligonucleotide
  Antisense strand to SEQ ID NO: 1006260
auuucccaggcccucucac

SEQ ID NO: 1006262 - RNA, 19 nt, Artificial Sequence
  Description of Artificial Sequence: Synthetic oligonucleotide
  Sense strand starting at position 3054 of SEQ ID NO: 914467
ggaucagaguguccucauc

SEQ ID NO: 1006263 - RNA, 19 nt, Artificial Sequence
  Description of Artificial Sequence: Synthetic oligonucleotide
  Antisense strand to SEQ ID NO: 1006262
gaugaggacacucugaucc

SEQ ID NO: 1006264 - RNA, 19 nt, Artificial Sequence
  Description of Artificial Sequence: Synthetic oligonucleotide
  Sense strand starting at position 3075 of SEQ ID NO: 914467
ccucauguuccugagucaa

SEQ ID NO: 1006265 - RNA, 19 nt, Artificial Sequence
  Description of Artificial Sequence: Synthetic oligonucleotide
  Antisense strand to SEQ ID NO: 1006264
uugacucaggaacaugagg

SEQ ID NO: 1006266 - RNA, 19 nt, Artificial Sequence
  Description of Artificial Sequence: Synthetic oligonucleotide
  Sense strand starting at position 3201 of SEQ ID NO: 914467
ccaacugucagaggaguga

SEQ ID NO: 1006267 - RNA, 19 nt, Artificial Sequence
  Description of Artificial Sequence: Synthetic oligonucleotide
  Antisense strand to SEQ ID NO: 1006266
ucacuccucugacaguugg

SEQ ID NO: 1006268 - RNA, 19 nt, Artificial Sequence
  Description of Artificial Sequence: Synthetic oligonucleotide
  Sense strand starting at position 3423 of SEQ ID NO: 914467
auccuagucuagccugaaa

SEQ ID NO: 1006269 - RNA, 19 nt, Artificial Sequence
  Description of Artificial Sequence: Synthetic oligonucleotide
  Antisense strand to SEQ ID NO: 1006268
uuucaggcuagacuaggau

SEQ ID NO: 1006270 - RNA, 19 nt, Artificial Sequence
  Description of Artificial Sequence: Synthetic oligonucleotide
  Sense strand starting at position 3425 of SEQ ID NO: 914467
ccuagucuagccugaaaua

SEQ ID NO: 1006271 - RNA, 19 nt, Artificial Sequence
  Description of Artificial Sequence: Synthetic oligonucleotide
  Antisense strand to SEQ ID NO: 1006270
uauuucaggcuagacuagg

SEQ ID NO: 1006272 - RNA, 19 nt, Artificial Sequence
  Description of Artificial Sequence: Synthetic oligonucleotide
  Sense strand starting at position 3426 of SEQ ID NO: 914467
cuagucuagccugaaauac

SEQ ID NO: 1006273 - RNA, 19 nt, Artificial Sequence
  Description of Artificial Sequence: Synthetic oligonucleotide
  Antisense strand to SEQ ID NO: 1006272
guauuucaggcuagacuag

SEQ ID NO: 1006274 - RNA, 19 nt, Artificial Sequence
  Description of Artificial Sequence: Synthetic oligonucleotide
  Sense strand starting at position 24 of SEQ ID NO: 914468
ggugcugaaucucuaggga

SEQ ID NO: 1006275 - RNA, 19 nt, Artificial Sequence
  Description of Artificial Sequence: Synthetic oligonucleotide
  Antisense strand to SEQ ID NO: 1006274
ucccuagagauucagcacc

SEQ ID NO: 1006276 - RNA, 19 nt, Artificial Sequence
  Description of Artificial Sequence: Synthetic oligonucleotide
  Sense strand starting at position 113 of SEQ ID NO: 914468
ucuguuucaugguugguga

SEQ ID NO: 1006277 - RNA, 19 nt, Artificial Sequence
  Description of Artificial Sequence: Synthetic oligonucleotide
  Antisense strand to SEQ ID NO: 1006276
ucaccaaccaugaaacaga

SEQ ID NO: 1006278 - RNA, 19 nt, Artificial Sequence
  Description of Artificial Sequence: Synthetic oligonucleotide
  Sense strand starting at position 126 of SEQ ID NO: 914468
uggugagguacuugaagua

SEQ ID NO: 1006279 - RNA, 19 nt, Artificial Sequence
  Description of Artificial Sequence: Synthetic oligonucleotide
  Antisense strand to SEQ ID NO: 1006278
uacuucaaguaccucacca

SEQ ID NO: 1006280 - RNA, 19 nt, Artificial Sequence
  Description of Artificial Sequence: Synthetic oligonucleotide
  Sense strand starting at position 131 of SEQ ID NO: 914468
agguacuugaaguagucau

SEQ ID NO: 1006281 - RNA, 19 nt, Artificial Sequence
  Description of Artificial Sequence: Synthetic oligonucleotide
  Antisense strand to SEQ ID NO: 1006280
augacuacuucaaguaccu

SEQ ID NO: 1006282 - RNA, 19 nt, Artificial Sequence
  Description of Artificial Sequence: Synthetic oligonucleotide
  Sense strand starting at position 239 of SEQ ID NO: 914468
gagggcaucuucuuaguau

SEQ ID NO: 1006283 - RNA, 19 nt, Artificial Sequence
  Description of Artificial Sequence: Synthetic oligonucleotide
  Antisense strand to SEQ ID NO: 1006282
auacuaagaagaugcccuc

SEQ ID NO: 1006284 - RNA, 19 nt, Artificial Sequence
  Description of Artificial Sequence: Synthetic oligonucleotide
  Sense strand starting at position 251 of SEQ ID NO: 914468
uuaguauuggacuguaaag

SEQ ID NO: 1006285 - RNA, 19 nt, Artificial Sequence
  Description of Artificial Sequence: Synthetic oligonucleotide
  Antisense strand to SEQ ID NO: 1006284
cuuuacaguccaauacuaa

SEQ ID NO: 1006286 - RNA, 19 nt, Artificial Sequence
  Description of Artificial Sequence: Synthetic oligonucleotide
  Sense strand starting at position 253 of SEQ ID NO: 914468
aguauuggacuguaaagug

SEQ ID NO: 1006287 - RNA, 19 nt, Artificial Sequence
  Description of Artificial Sequence: Synthetic oligonucleotide
  Antisense strand to SEQ ID NO: 1006286
cacuuuacaguccaauacu

SEQ ID NO: 1006288 - RNA, 19 nt, Artificial Sequence
  Description of Artificial Sequence: Synthetic oligonucleotide
  Sense strand starting at position 407 of SEQ ID NO: 914468
aaauguaaguggucagaag

SEQ ID NO: 1006289 - RNA, 19 nt, Artificial Sequence
  Description of Artificial Sequence: Synthetic oligonucleotide
  Antisense strand to SEQ ID NO: 1006288
cuucugaccacuuacauuu

SEQ ID NO: 1006290 - RNA, 19 nt, Artificial Sequence
  Description of Artificial Sequence: Synthetic oligonucleotide
  Sense strand starting at position 447 of SEQ ID NO: 914468
uguagaccucccugguagu

SEQ ID NO: 1006291 - RNA, 19 nt, Artificial Sequence
  Description of Artificial Sequence: Synthetic oligonucleotide
  Antisense strand to SEQ ID NO: 1006290
acuaccagggaggucuaca

SEQ ID NO: 1006292 - RNA, 19 nt, Artificial Sequence
  Description of Artificial Sequence: Synthetic oligonucleotide
  Sense strand starting at position 448 of SEQ ID NO: 914468
guagaccucccugguagua

SEQ ID NO: 1006293 - RNA, 19 nt, Artificial Sequence
  Description of Artificial Sequence: Synthetic oligonucleotide
  Antisense strand to SEQ ID NO: 1006292
uacuaccagggaggucuac

SEQ ID NO: 1006294 - RNA, 19 nt, Artificial Sequence
  Description of Artificial Sequence: Synthetic oligonucleotide
  Sense strand starting at position 521 of SEQ ID NO: 914468
ccagccagaugguuauaca

SEQ ID NO: 1006295 - RNA, 19 nt, Artificial Sequence
  Description of Artificial Sequence: Synthetic oligonucleotide
  Antisense strand to SEQ ID NO: 1006294
uguauaaccaucuggcugg

SEQ ID NO: 1006296 - RNA, 19 nt, Artificial Sequence
  Description of Artificial Sequence: Synthetic oligonucleotide
  Sense strand starting at position 714 of SEQ ID NO: 914468
ccuggagguuccucaacau

SEQ ID NO: 1006297 - RNA, 19 nt, Artificial Sequence
  Description of Artificial Sequence: Synthetic oligonucleotide
  Antisense strand to SEQ ID NO: 1006296
auguugaggaaccuccagg

SEQ ID NO: 1006298 - RNA, 19 nt, Artificial Sequence
  Description of Artificial Sequence: Synthetic oligonucleotide
  Sense strand starting at position 1078 of SEQ ID NO: 914468
cgacaccaucugugaggaa

SEQ ID NO: 1006299 - RNA, 19 nt, Artificial Sequence
  Description of Artificial Sequence: Synthetic oligonucleotide
  Antisense strand to SEQ ID NO: 1006298
uuccucacagauggugucg

SEQ ID NO: 1006300 - RNA, 19 nt, Artificial Sequence
  Description of Artificial Sequence: Synthetic oligonucleotide
  Sense strand starting at position 1199 of SEQ ID NO: 914468
cuuccuggcucauugagaa

SEQ ID NO: 1006301 - RNA, 19 nt, Artificial Sequence
  Description of Artificial Sequence: Synthetic oligonucleotide
  Antisense strand to SEQ ID NO: 1006300
uucucaaugagccaggaag

SEQ ID NO: 1006302 - RNA, 19 nt, Artificial Sequence
  Description of Artificial Sequence: Synthetic oligonucleotide
  Sense strand starting at position 1230 of SEQ ID NO: 914468
ggcugaguuggaugaggua

SEQ ID NO: 1006303 - RNA, 19 nt, Artificial Sequence
  Description of Artificial Sequence: Synthetic oligonucleotide
  Antisense strand to SEQ ID NO: 1006302
uaccucauccaacucagcc

SEQ ID NO: 1006304 - RNA, 19 nt, Artificial Sequence
  Description of Artificial Sequence: Synthetic oligonucleotide
  Sense strand starting at position 1484 of SEQ ID NO: 914468
guggcugauucagugaaga

SEQ ID NO: 1006305 - RNA, 19 nt, Artificial Sequence
  Description of Artificial Sequence: Synthetic oligonucleotide
  Antisense strand to SEQ ID NO: 1006304
ucuucacugaaucagccac

SEQ ID NO: 1006306 - RNA, 19 nt, Artificial Sequence
  Description of Artificial Sequence: Synthetic oligonucleotide
  Sense strand starting at position 2076 of SEQ ID NO: 914468
ggaguuaaggguggcuuua

SEQ ID NO: 1006307 - RNA, 19 nt, Artificial Sequence
  Description of Artificial Sequence: Synthetic oligonucleotide
  Antisense strand to SEQ ID NO: 1006306
uaaagccacccuuaacucc

SEQ ID NO: 1006308 - RNA, 19 nt, Artificial Sequence
  Description of Artificial Sequence: Synthetic oligonucleotide
  Sense strand starting at position 2078 of SEQ ID NO: 914468
aguuaaggguggcuuuaga

SEQ ID NO: 1006309 - RNA, 19 nt, Artificial Sequence
  Description of Artificial Sequence: Synthetic oligonucleotide
  Antisense strand to SEQ ID NO: 1006308
ucuaaagccacccuuaacu

SEQ ID NO: 1006310 - RNA, 19 nt, Artificial Sequence
  Description of Artificial Sequence: Synthetic oligonucleotide
  Sense strand starting at position 2269 of SEQ ID NO: 914468
cugggaugaucguuaccuu

SEQ ID NO: 1006311 - RNA, 19 nt, Artificial Sequence
  Description of Artificial Sequence: Synthetic oligonucleotide
  Antisense strand to SEQ ID NO: 1006310
aagguaacgaucaucccag

SEQ ID NO: 1006312 - RNA, 19 nt, Artificial Sequence
  Description of Artificial Sequence: Synthetic oligonucleotide
  Sense strand starting at position 2276 of SEQ ID NO: 914468
gaucguuaccuugggaaga

SEQ ID NO: 1006313 - RNA, 19 nt, Artificial Sequence
  Description of Artificial Sequence: Synthetic oligonucleotide
  Antisense strand to SEQ ID NO: 1006312
ucuucccaagguaacgauc

SEQ ID NO: 1006314 - RNA, 19 nt, Artificial Sequence
  Description of Artificial Sequence: Synthetic oligonucleotide
  Sense strand starting at position 2423 of SEQ ID NO: 914468
ugaagaaggugcuugaaga

SEQ ID NO: 1006315 - RNA, 19 nt, Artificial Sequence
  Description of Artificial Sequence: Synthetic oligonucleotide
  Antisense strand to SEQ ID NO: 1006314
ucuucaagcaccuucuuca

SEQ ID NO: 1006316 - RNA, 19 nt, Artificial Sequence
  Description of Artificial Sequence: Synthetic oligonucleotide
  Sense strand starting at position 2746 of SEQ ID NO: 914468
gagugaaaggcauguucuc

SEQ ID NO: 1006317 - RNA, 19 nt, Artificial Sequence
  Description of Artificial Sequence: Synthetic oligonucleotide
  Antisense strand to SEQ ID NO: 1006316
gagaacaugccuuucacuc

SEQ ID NO: 1006318 - RNA, 19 nt, Artificial Sequence
  Description of Artificial Sequence: Synthetic oligonucleotide
  Sense strand starting at position 2751 of SEQ ID NO: 914468
aaaggcauguucucagagu

SEQ ID NO: 1006319 - RNA, 19 nt, Artificial Sequence
  Description of Artificial Sequence: Synthetic oligonucleotide
  Antisense strand to SEQ ID NO: 1006318
acucugagaacaugccuuu

SEQ ID NO: 1006320 - RNA, 19 nt, Artificial Sequence
  Description of Artificial Sequence: Synthetic oligonucleotide
  Sense strand starting at position 2808 of SEQ ID NO: 914468
uccagcuugcccugacaga

SEQ ID NO: 1006321 - RNA, 19 nt, Artificial Sequence
  Description of Artificial Sequence: Synthetic oligonucleotide
  Antisense strand to SEQ ID NO: 1006320
ucugucagggcaagcugga

SEQ ID NO: 1006322 - RNA, 19 nt, Artificial Sequence
  Description of Artificial Sequence: Synthetic oligonucleotide
  Sense strand starting at position 2809 of SEQ ID NO: 914468
ccagcuugcccugacagau

SEQ ID NO: 1006323 - RNA, 19 nt, Artificial Sequence
  Description of Artificial Sequence: Synthetic oligonucleotide
  Antisense strand to SEQ ID NO: 1006322
aucugucagggcaagcugg

SEQ ID NO: 1006324 - RNA, 19 nt, Artificial Sequence
  Description of Artificial Sequence: Synthetic oligonucleotide
  Sense strand starting at position 2979 of SEQ ID NO: 914468
gguagcuuucuauaccacu

SEQ ID NO: 1006325 - RNA, 19 nt, Artificial Sequence
  Description of Artificial Sequence: Synthetic oligonucleotide
  Antisense strand to SEQ ID NO: 1006324
agugguauagaaagcuacc

SEQ ID NO: 1006326 - RNA, 19 nt, Artificial Sequence
  Description of Artificial Sequence: Synthetic oligonucleotide
  Sense strand starting at position 3373 of SEQ ID NO: 914468
ggaacuggcuuccuuugau

SEQ ID NO: 1006327 - RNA, 19 nt, Artificial Sequence
  Description of Artificial Sequence: Synthetic oligonucleotide
  Antisense strand to SEQ ID NO: 1006326
aucaaaggaagccaguucc

SEQ ID NO: 1006328 - RNA, 19 nt, Artificial Sequence
  Description of Artificial Sequence: Synthetic oligonucleotide
  Sense strand starting at position 3383 of SEQ ID NO: 914468
uccuuugauucuguuaagu

SEQ ID NO: 1006329 - RNA, 19 nt, Artificial Sequence
  Description of Artificial Sequence: Synthetic oligonucleotide
  Antisense strand to SEQ ID NO: 1006328
acuuaacagaaucaaagga

SEQ ID NO: 1006330 - RNA, 19 nt, Artificial Sequence
  Description of Artificial Sequence: Synthetic oligonucleotide
  Sense strand starting at position 3388 of SEQ ID NO: 914468
ugauucuguuaaguguuua

SEQ ID NO: 1006331 - RNA, 19 nt, Artificial Sequence
  Description of Artificial Sequence: Synthetic oligonucleotide
  Antisense strand to SEQ ID NO: 1006330
uaaacacuuaacagaauca

SEQ ID NO: 1006332 - RNA, 19 nt, Artificial Sequence
  Description of Artificial Sequence: Synthetic oligonucleotide
  Sense strand starting at position 3392 of SEQ ID NO: 914468
ucuguuaaguguuuaucca

SEQ ID NO: 1006333 - RNA, 19 nt, Artificial Sequence
  Description of Artificial Sequence: Synthetic oligonucleotide
  Antisense strand to SEQ ID NO: 1006332
uggauaaacacuuaacaga

SEQ ID NO: 1006334 - RNA, 19 nt, Artificial Sequence
  Description of Artificial Sequence: Synthetic oligonucleotide
  Sense strand starting at position 3393 of SEQ ID NO: 914468
cuguuaaguguuuauccag

SEQ ID NO: 1006335 - RNA, 19 nt, Artificial Sequence
  Description of Artificial Sequence: Synthetic oligonucleotide
  Antisense strand to SEQ ID NO: 1006334
cuggauaaacacuuaacag

SEQ ID NO: 1006336 - RNA, 19 nt, Artificial Sequence
  Description of Artificial Sequence: Synthetic oligonucleotide
  Sense strand starting at position 3462 of SEQ ID NO: 914468
guagguagauugcucaagu

SEQ ID NO: 1006337 - RNA, 19 nt, Artificial Sequence
  Description of Artificial Sequence: Synthetic oligonucleotide
  Antisense strand to SEQ ID NO: 1006336
acuugagcaaucuaccuac

SEQ ID NO: 1006338 - RNA, 19 nt, Artificial Sequence
  Description of Artificial Sequence: Synthetic oligonucleotide
  Sense strand starting at position 3463 of SEQ ID NO: 914468
uagguagauugcucaaguc

SEQ ID NO: 1006339 - RNA, 19 nt, Artificial Sequence
  Description of Artificial Sequence: Synthetic oligonucleotide
  Antisense strand to SEQ ID NO: 1006338
gacuugagcaaucuaccua

SEQ ID NO: 1006340 - RNA, 19 nt, Artificial Sequence
  Description of Artificial Sequence: Synthetic oligonucleotide
  Sense strand starting at position 3721 of SEQ ID NO: 914468
ccagucauucggcagguau

SEQ ID NO: 1006341 - RNA, 19 nt, Artificial Sequence
  Description of Artificial Sequence: Synthetic oligonucleotide
  Antisense strand to SEQ ID NO: 1006340
auaccugccgaaugacugg

SEQ ID NO: 1006342 - RNA, 19 nt, Artificial Sequence
  Description of Artificial Sequence: Synthetic oligonucleotide
  Sense strand starting at position 3797 of SEQ ID NO: 914468
ccugcacucagguggaaau

SEQ ID NO: 1006343 - RNA, 19 nt, Artificial Sequence
  Description of Artificial Sequence: Synthetic oligonucleotide
  Antisense strand to SEQ ID NO: 1006342
auuuccaccugagugcagg

SEQ ID NO: 1006344 - RNA, 19 nt, Artificial Sequence
  Description of Artificial Sequence: Synthetic oligonucleotide
  Sense strand starting at position 3833 of SEQ ID NO: 914468
cuggauggcauucgcagaa

SEQ ID NO: 1006345 - RNA, 19 nt, Artificial Sequence
  Description of Artificial Sequence: Synthetic oligonucleotide
  Antisense strand to SEQ ID NO: 1006344
uucugcgaaugccauccag

SEQ ID NO: 1006346 - RNA, 19 nt, Artificial Sequence
  Description of Artificial Sequence: Synthetic oligonucleotide
  Sense strand starting at position 3837 of SEQ ID NO: 914468
auggcauucgcagaaugcu

SEQ ID NO: 1006347 - RNA, 19 nt, Artificial Sequence
  Description of Artificial Sequence: Synthetic oligonucleotide
  Antisense strand to SEQ ID NO: 1006346
agcauucugcgaaugccau

SEQ ID NO: 1006348 - RNA, 19 nt, Artificial Sequence
  Description of Artificial Sequence: Synthetic oligonucleotide
  Sense strand starting at position 3846 of SEQ ID NO: 914468
gcagaaugcuucguggaaa

SEQ ID NO: 1006349 - RNA, 19 nt, Artificial Sequence
  Description of Artificial Sequence: Synthetic oligonucleotide
  Antisense strand to SEQ ID NO: 1006348
uuuccacgaagcauucugc

SEQ ID NO: 1006350 - RNA, 19 nt, Artificial Sequence
  Description of Artificial Sequence: Synthetic oligonucleotide
  Sense strand starting at position 3919 of SEQ ID NO: 914468
agugguggacucuguaaag

SEQ ID NO: 1006351 - RNA, 19 nt, Artificial Sequence
  Description of Artificial Sequence: Synthetic oligonucleotide
  Antisense strand to SEQ ID NO: 1006350
cuuuacagaguccaccacu

SEQ ID NO: 1006352 - RNA, 19 nt, Artificial Sequence
  Description of Artificial Sequence: Synthetic oligonucleotide
  Sense strand starting at position 3945 of SEQ ID NO: 914468
ggguaugagcucuagaguu

SEQ ID NO: 1006353 - RNA, 19 nt, Artificial Sequence
  Description of Artificial Sequence: Synthetic oligonucleotide
  Antisense strand to SEQ ID NO: 1006352
aacucuagagcucauaccc

SEQ ID NO: 1006354 - RNA, 19 nt, Artificial Sequence
  Description of Artificial Sequence: Synthetic oligonucleotide
  Sense strand starting at position 326 of SEQ ID NO: 914469
gggccaucugguugugaca

SEQ ID NO: 1006355 - RNA, 19 nt, Artificial Sequence
  Description of Artificial Sequence: Synthetic oligonucleotide
  Antisense strand to SEQ ID NO: 1006354
ugucacaaccagauggccc

SEQ ID NO: 1006356 - RNA, 19 nt, Artificial Sequence
  Description of Artificial Sequence: Synthetic oligonucleotide
  Sense strand starting at position 2309 of SEQ ID NO: 914469
ggccuugcguggugaguuu

SEQ ID NO: 1006357 - RNA, 19 nt, Artificial Sequence
  Description of Artificial Sequence: Synthetic oligonucleotide
  Antisense strand to SEQ ID NO: 1006356
aaacucaccacgcaaggcc

SEQ ID NO: 1006358 - RNA, 19 nt, Artificial Sequence
  Description of Artificial Sequence: Synthetic oligonucleotide
  Sense strand starting at position 2318 of SEQ ID NO: 914469
uggugaguuuggucaccca

SEQ ID NO: 1006359 - RNA, 19 nt, Artificial Sequence
  Description of Artificial Sequence: Synthetic oligonucleotide
  Antisense strand to SEQ ID NO: 1006358
ugggugaccaaacucacca

SEQ ID NO: 1006360 - RNA, 19 nt, Artificial Sequence
  Description of Artificial Sequence: Synthetic oligonucleotide
  Sense strand starting at position 2429 of SEQ ID NO: 914469
ugggaagccugguucagau

SEQ ID NO: 1006361 - RNA, 19 nt, Artificial Sequence
  Description of Artificial Sequence: Synthetic oligonucleotide
  Antisense strand to SEQ ID NO: 1006360
aucugaaccaggcuuccca

SEQ ID NO: 1006362 - RNA, 19 nt, Artificial Sequence
  Description of Artificial Sequence: Synthetic oligonucleotide
  Sense strand starting at position 2489 of SEQ ID NO: 914469
gcaucauuccugugaccuc

SEQ ID NO: 1006363 - RNA, 19 nt, Artificial Sequence
  Description of Artificial Sequence: Synthetic oligonucleotide
  Antisense strand to SEQ ID NO: 1006362
gaggucacaggaaugaugc

SEQ ID NO: 1006364 - RNA, 19 nt, Artificial Sequence
  Description of Artificial Sequence: Synthetic oligonucleotide
  Sense strand starting at position 2531 of SEQ ID NO: 914469
ucgagacuguuguagccau

SEQ ID NO: 1006365 - RNA, 19 nt, Artificial Sequence
  Description of Artificial Sequence: Synthetic oligonucleotide
  Antisense strand to SEQ ID NO: 1006364
auggcuacaacagucucga

SEQ ID NO: 1006366 - RNA, 19 nt, Artificial Sequence
  Description of Artificial Sequence: Synthetic oligonucleotide
  Sense strand starting at position 2609 of SEQ ID NO: 914469
uggaguacgcaugagauca

SEQ ID NO: 1006367 - RNA, 19 nt, Artificial Sequence
  Description of Artificial Sequence: Synthetic oligonucleotide
  Antisense strand to SEQ ID NO: 1006366
ugaucucaugcguacucca

SEQ ID NO: 1006368 - RNA, 19 nt, Artificial Sequence
  Description of Artificial Sequence: Synthetic oligonucleotide
  Sense strand starting at position 2627 of SEQ ID NO: 914469
agggauggcuggguuaaca

SEQ ID NO: 1006369 - RNA, 19 nt, Artificial Sequence
  Description of Artificial Sequence: Synthetic oligonucleotide
  Antisense strand to SEQ ID NO: 1006368
uguuaacccagccaucccu

SEQ ID NO: 1006370 - RNA, 19 nt, Artificial Sequence
  Description of Artificial Sequence: Synthetic oligonucleotide
  Sense strand starting at position 2738 of SEQ ID NO: 914469
auuggaaauuaugcauguu

SEQ ID NO: 1006371 - RNA, 19 nt, Artificial Sequence
  Description of Artificial Sequence: Synthetic oligonucleotide
  Antisense strand to SEQ ID NO: 1006370
aacaugcauaauuuccaau

SEQ ID NO: 1006372 - RNA, 19 nt, Artificial Sequence
  Description of Artificial Sequence: Synthetic oligonucleotide
  Sense strand starting at position 2764 of SEQ ID NO: 914469
uuccaagaugcuuaauguu

SEQ ID NO: 1006373 - RNA, 19 nt, Artificial Sequence
  Description of Artificial Sequence: Synthetic oligonucleotide
  Antisense strand to SEQ ID NO: 1006372
aacauuaagcaucuuggaa

SEQ ID NO: 1006374 - RNA, 19 nt, Artificial Sequence
  Description of Artificial Sequence: Synthetic oligonucleotide
  Sense strand starting at position 2824 of SEQ ID NO: 914469
gucugaaucugugaccuag

SEQ ID NO: 1006375 - RNA, 19 nt, Artificial Sequence
  Description of Artificial Sequence: Synthetic oligonucleotide
  Antisense strand to SEQ ID NO: 1006374
cuaggucacagauucagac

SEQ ID NO: 1006376 - RNA, 19 nt, Artificial Sequence
  Description of Artificial Sequence: Synthetic oligonucleotide
  Sense strand starting at position 3120 of SEQ ID NO: 914469
gugaguuuacaugguacag

SEQ ID NO: 1006377 - RNA, 19 nt, Artificial Sequence
  Description of Artificial Sequence: Synthetic oligonucleotide
  Antisense strand to SEQ ID NO: 1006376
cuguaccauguaaacucac

SEQ ID NO: 1006378 - RNA, 19 nt, Artificial Sequence
  Description of Artificial Sequence: Synthetic oligonucleotide
  Sense strand starting at position 3214 of SEQ ID NO: 914469
agaagagugucagcagcuu

SEQ ID NO: 1006379 - RNA, 19 nt, Artificial Sequence
  Description of Artificial Sequence: Synthetic oligonucleotide
  Antisense strand to SEQ ID NO: 1006378
aagcugcugacacucuucu

SEQ ID NO: 1006380 - RNA, 19 nt, Artificial Sequence
  Description of Artificial Sequence: Synthetic oligonucleotide
  Sense strand starting at position 3274 of SEQ ID NO: 914469
ggacucaaauggugggaaa

SEQ ID NO: 1006381 - RNA, 19 nt, Artificial Sequence
  Description of Artificial Sequence: Synthetic oligonucleotide
  Antisense strand to SEQ ID NO: 1006380
uuucccaccauuugagucc

SEQ ID NO: 1006382 - RNA, 19 nt, Artificial Sequence
  Description of Artificial Sequence: Synthetic oligonucleotide
  Sense strand starting at position 3306 of SEQ ID NO: 914469
gaaccaggcuugucaguga

SEQ ID NO: 1006383 - RNA, 19 nt, Artificial Sequence
  Description of Artificial Sequence: Synthetic oligonucleotide
  Antisense strand to SEQ ID NO: 1006382
ucacugacaagccugguuc

SEQ ID NO: 1006384 - RNA, 19 nt, Artificial Sequence
  Description of Artificial Sequence: Synthetic oligonucleotide
  Sense strand starting at position 3310 of SEQ ID NO: 914469
caggcuugucagugacacu

SEQ ID NO: 1006385 - RNA, 19 nt, Artificial Sequence
  Description of Artificial Sequence: Synthetic oligonucleotide
  Antisense strand to SEQ ID NO: 1006384
agugucacugacaagccug

SEQ ID NO: 1006386 - RNA, 19 nt, Artificial Sequence
  Description of Artificial Sequence: Synthetic oligonucleotide
  Sense strand starting at position 3648 of SEQ ID NO: 914469
cagugacacuccuagagca

SEQ ID NO: 1006387 - RNA, 19 nt, Artificial Sequence
  Description of Artificial Sequence: Synthetic oligonucleotide
  Antisense strand to SEQ ID NO: 1006386
ugcucuaggagugucacug

SEQ ID NO: 1006388 - RNA, 19 nt, Artificial Sequence
  Description of Artificial Sequence: Synthetic oligonucleotide
  Sense strand starting at position 3650 of SEQ ID NO: 914469
gugacacuccuagagcaga

SEQ ID NO: 1006389 - RNA, 19 nt, Artificial Sequence
  Description of Artificial Sequence: Synthetic oligonucleotide
  Antisense strand to SEQ ID NO: 1006388
ucugcucuaggagugucac

SEQ ID NO: 1006390 - RNA, 19 nt, Artificial Sequence
  Description of Artificial Sequence: Synthetic oligonucleotide
  Sense strand starting at position 3700 of SEQ ID NO: 914469
uuguaaagcuggcuuaaga

SEQ ID NO: 1006391 - RNA, 19 nt, Artificial Sequence
  Description of Artificial Sequence: Synthetic oligonucleotide
  Antisense strand to SEQ ID NO: 1006390
ucuuaagccagcuuuacaa

SEQ ID NO: 1006392 - RNA, 19 nt, Artificial Sequence
  Description of Artificial Sequence: Synthetic oligonucleotide
  Sense strand starting at position 3734 of SEQ ID NO: 914469
auggaauguuuggagcagu

SEQ ID NO: 1006393 - RNA, 19 nt, Artificial Sequence
  Description of Artificial Sequence: Synthetic oligonucleotide
  Antisense strand to SEQ ID NO: 1006392
acugcuccaaacauuccau

SEQ ID NO: 1006394 - RNA, 19 nt, Artificial Sequence
  Description of Artificial Sequence: Synthetic oligonucleotide
  Sense strand starting at position 3737 of SEQ ID NO: 914469
gaauguuuggagcaguacu

SEQ ID NO: 1006395 - RNA, 19 nt, Artificial Sequence
  Description of Artificial Sequence: Synthetic oligonucleotide
  Antisense strand to SEQ ID NO: 1006394
aguacugcuccaaacauuc

SEQ ID NO: 1006396 - RNA, 19 nt, Artificial Sequence
  Description of Artificial Sequence: Synthetic oligonucleotide
  Sense strand starting at position 3747 of SEQ ID NO: 914469
agcaguacugcucuccgua

SEQ ID NO: 1006397 - RNA, 19 nt, Artificial Sequence
  Description of Artificial Sequence: Synthetic oligonucleotide
  Antisense strand to SEQ ID NO: 1006396
uacggagagcaguacugcu

SEQ ID NO: 1006398 - RNA, 19 nt, Artificial Sequence
  Description of Artificial Sequence: Synthetic oligonucleotide
  Sense strand starting at position 3749 of SEQ ID NO: 914469
caguacugcucuccguaga

SEQ ID NO: 1006399 - RNA, 19 nt, Artificial Sequence
  Description of Artificial Sequence: Synthetic oligonucleotide
  Antisense strand to SEQ ID NO: 1006398
ucuacggagagcaguacug

SEQ ID NO: 1006400 - RNA, 19 nt, Artificial Sequence
  Description of Artificial Sequence: Synthetic oligonucleotide
  Sense strand starting at position 3750 of SEQ ID NO: 914469
aguacugcucuccguagaa

SEQ ID NO: 1006401 - RNA, 19 nt, Artificial Sequence
  Description of Artificial Sequence: Synthetic oligonucleotide
  Antisense strand to SEQ ID NO: 1006400
uucuacggagagcaguacu

SEQ ID NO: 1006402 - RNA, 19 nt, Artificial Sequence
  Description of Artificial Sequence: Synthetic oligonucleotide
  Sense strand starting at position 3752 of SEQ ID NO: 914469
uacugcucuccguagaacu

SEQ ID NO: 1006403 - RNA, 19 nt, Artificial Sequence
  Description of Artificial Sequence: Synthetic oligonucleotide
  Antisense strand to SEQ ID NO: 1006402
aguucuacggagagcagua

SEQ ID NO: 1006404 - RNA, 19 nt, Artificial Sequence
  Description of Artificial Sequence: Synthetic oligonucleotide
  Sense strand starting at position 3812 of SEQ ID NO: 914469
ucacgacucucagaccaaa

SEQ ID NO: 1006405 - RNA, 19 nt, Artificial Sequence
  Description of Artificial Sequence: Synthetic oligonucleotide
  Antisense strand to SEQ ID NO: 1006404
uuuggucugagagucguga

SEQ ID NO: 1006406 - RNA, 19 nt, Artificial Sequence
  Description of Artificial Sequence: Synthetic oligonucleotide
  Sense strand starting at position 3842 of SEQ ID NO: 914469
caaguuggacucuaaaugu

SEQ ID NO: 1006407 - RNA, 19 nt, Artificial Sequence
  Description of Artificial Sequence: Synthetic oligonucleotide
  Antisense strand to SEQ ID NO: 1006406
acauuuagaguccaacuug

SEQ ID NO: 1006408 - RNA, 19 nt, Artificial Sequence
  Description of Artificial Sequence: Synthetic oligonucleotide
  Sense strand starting at position 3852 of SEQ ID NO: 914469
ucuaaaugugaaggaguuu

SEQ ID NO: 1006409 - RNA, 19 nt, Artificial Sequence
  Description of Artificial Sequence: Synthetic oligonucleotide
  Antisense strand to SEQ ID NO: 1006408
aaacuccuucacauuuaga

SEQ ID NO: 1006410 - RNA, 19 nt, Artificial Sequence
  Description of Artificial Sequence: Synthetic oligonucleotide
  Sense strand starting at position 3915 of SEQ ID NO: 914469
augugugcaugagaauuau

SEQ ID NO: 1006411 - RNA, 19 nt, Artificial Sequence
  Description of Artificial Sequence: Synthetic oligonucleotide
  Antisense strand to SEQ ID NO: 1006410
auaauucucaugcacacau

SEQ ID NO: 1006412 - RNA, 19 nt, Artificial Sequence
  Description of Artificial Sequence: Synthetic oligonucleotide
  Sense strand starting at position 3921 of SEQ ID NO: 914469
gcaugagaauuauauauga

SEQ ID NO: 1006413 - RNA, 19 nt, Artificial Sequence
  Description of Artificial Sequence: Synthetic oligonucleotide
  Antisense strand to SEQ ID NO: 1006412
ucauauauaauucucaugc

SEQ ID NO: 1006414 - RNA, 19 nt, Artificial Sequence
  Description of Artificial Sequence: Synthetic oligonucleotide
  Sense strand starting at position 3963 of SEQ ID NO: 914469
cagagcucuuucgagaaau

SEQ ID NO: 1006415 - RNA, 19 nt, Artificial Sequence
  Description of Artificial Sequence: Synthetic oligonucleotide
  Antisense strand to SEQ ID NO: 1006414
auuucucgaaagagcucug

SEQ ID NO: 1006416 - RNA, 19 nt, Artificial Sequence
  Description of Artificial Sequence: Synthetic oligonucleotide
  Sense strand starting at position 3965 of SEQ ID NO: 914469
gagcucuuucgagaaauac

SEQ ID NO: 1006417 - RNA, 19 nt, Artificial Sequence
  Description of Artificial Sequence: Synthetic oligonucleotide
  Antisense strand to SEQ ID NO: 1006416
guauuucucgaaagagcuc

SEQ ID NO: 1006418 - RNA, 19 nt, Artificial Sequence
  Description of Artificial Sequence: Synthetic oligonucleotide
  Sense strand starting at position 84 of SEQ ID NO: 914470
auggaauauuaucuaagcu

SEQ ID NO: 1006419 - RNA, 19 nt, Artificial Sequence
  Description of Artificial Sequence: Synthetic oligonucleotide
  Antisense strand to SEQ ID NO: 1006418
agcuuagauaauauuccau

SEQ ID NO: 1006420 - RNA, 19 nt, Artificial Sequence
  Description of Artificial Sequence: Synthetic oligonucleotide
  Sense strand starting at position 91 of SEQ ID NO: 914470
auuaucuaagcuugcagaa

SEQ ID NO: 1006421 - RNA, 19 nt, Artificial Sequence
  Description of Artificial Sequence: Synthetic oligonucleotide
  Antisense strand to SEQ ID NO: 1006420
uucugcaagcuuagauaau

SEQ ID NO: 1006422 - RNA, 19 nt, Artificial Sequence
  Description of Artificial Sequence: Synthetic oligonucleotide
  Sense strand starting at position 168 of SEQ ID NO: 914470
ugaccuucuuuguuaaaga

SEQ ID NO: 1006423 - RNA, 19 nt, Artificial Sequence
  Description of Artificial Sequence: Synthetic oligonucleotide
  Antisense strand to SEQ ID NO: 1006422
ucuuuaacaaagaagguca

SEQ ID NO: 1006424 - RNA, 19 nt, Artificial Sequence
  Description of Artificial Sequence: Synthetic oligonucleotide
  Sense strand starting at position 261 of SEQ ID NO: 914470
ucaugcuauuaugcugaua

SEQ ID NO: 1006425 - RNA, 19 nt, Artificial Sequence
  Description of Artificial Sequence: Synthetic oligonucleotide
  Antisense strand to SEQ ID NO: 1006424
uaucagcauaauagcauga

SEQ ID NO: 1006426 - RNA, 19 nt, Artificial Sequence
  Description of Artificial Sequence: Synthetic oligonucleotide
  Sense strand starting at position 264 of SEQ ID NO: 914470
ugcuauuaugcugauacau

SEQ ID NO: 1006427 - RNA, 19 nt, Artificial Sequence
  Description of Artificial Sequence: Synthetic oligonucleotide
  Antisense strand to SEQ ID NO: 1006426
auguaucagcauaauagca

SEQ ID NO: 1006428 - RNA, 19 nt, Artificial Sequence
  Description of Artificial Sequence: Synthetic oligonucleotide
  Sense strand starting at position 275 of SEQ ID NO: 914470
ugauacauguuugcuuaca

SEQ ID NO: 1006429 - RNA, 19 nt, Artificial Sequence
  Description of Artificial Sequence: Synthetic oligonucleotide
  Antisense strand to SEQ ID NO: 1006428
uguaagcaaacauguauca

SEQ ID NO: 1006430 - RNA, 19 nt, Artificial Sequence
  Description of Artificial Sequence: Synthetic oligonucleotide
  Sense strand starting at position 321 of SEQ ID NO: 914470
aacuaucuacaguggguaa

SEQ ID NO: 1006431 - RNA, 19 nt, Artificial Sequence
  Description of Artificial Sequence: Synthetic oligonucleotide
  Antisense strand to SEQ ID NO: 1006430
uuacccacuguagauaguu

SEQ ID NO: 1006432 - RNA, 19 nt, Artificial Sequence
  Description of Artificial Sequence: Synthetic oligonucleotide
  Sense strand starting at position 323 of SEQ ID NO: 914470
cuaucuacaguggguaauu

SEQ ID NO: 1006433 - RNA, 19 nt, Artificial Sequence
  Description of Artificial Sequence: Synthetic oligonucleotide
  Antisense strand to SEQ ID NO: 1006432
aauuacccacuguagauag

SEQ ID NO: 1006434 - RNA, 19 nt, Artificial Sequence
  Description of Artificial Sequence: Synthetic oligonucleotide
  Sense strand starting at position 374 of SEQ ID NO: 914470
cugcacuuagauugacuua

SEQ ID NO: 1006435 - RNA, 19 nt, Artificial Sequence
  Description of Artificial Sequence: Synthetic oligonucleotide
  Antisense strand to SEQ ID NO: 1006434
uaagucaaucuaagugcag

SEQ ID NO: 1006436 - RNA, 19 nt, Artificial Sequence
  Description of Artificial Sequence: Synthetic oligonucleotide
  Sense strand starting at position 471 of SEQ ID NO: 914470
agaagauacuacuaguaaa

SEQ ID NO: 1006437 - RNA, 19 nt, Artificial Sequence
  Description of Artificial Sequence: Synthetic oligonucleotide
  Antisense strand to SEQ ID NO: 1006436
uuuacuaguaguaucuucu

SEQ ID NO: 1006438 - RNA, 19 nt, Artificial Sequence
  Description of Artificial Sequence: Synthetic oligonucleotide
  Sense strand starting at position 522 of SEQ ID NO: 914470
gcaaaucuuguguauucua

SEQ ID NO: 1006439 - RNA, 19 nt, Artificial Sequence
  Description of Artificial Sequence: Synthetic oligonucleotide
  Antisense strand to SEQ ID NO: 1006438
uagaauacacaagauuugc

SEQ ID NO: 1006440 - RNA, 19 nt, Artificial Sequence
  Description of Artificial Sequence: Synthetic oligonucleotide
  Sense strand starting at position 530 of SEQ ID NO: 914470
uguguauucuagguguaga

SEQ ID NO: 1006441 - RNA, 19 nt, Artificial Sequence
  Description of Artificial Sequence: Synthetic oligonucleotide
  Antisense strand to SEQ ID NO: 1006440
ucuacaccuagaauacaca

SEQ ID NO: 1006442 - RNA, 19 nt, Artificial Sequence
  Description of Artificial Sequence: Synthetic oligonucleotide
  Sense strand starting at position 531 of SEQ ID NO: 914470
guguauucuagguguagaa

SEQ ID NO: 1006443 - RNA, 19 nt, Artificial Sequence
  Description of Artificial Sequence: Synthetic oligonucleotide
  Antisense strand to SEQ ID NO: 1006442
uucuacaccuagaauacac

SEQ ID NO: 1006444 - RNA, 19 nt, Artificial Sequence
  Description of Artificial Sequence: Synthetic oligonucleotide
  Sense strand starting at position 533 of SEQ ID NO: 914470
guauucuagguguagaaau

SEQ ID NO: 1006445 - RNA, 19 nt, Artificial Sequence
  Description of Artificial Sequence: Synthetic oligonucleotide
  Antisense strand to SEQ ID NO: 1006444
auuucuacaccuagaauac

SEQ ID NO: 1006446 - RNA, 19 nt, Artificial Sequence
  Description of Artificial Sequence: Synthetic oligonucleotide
  Sense strand starting at position 645 of SEQ ID NO: 914470
gggauaucaucuuuacucu

SEQ ID NO: 1006447 - RNA, 19 nt, Artificial Sequence
  Description of Artificial Sequence: Synthetic oligonucleotide
  Antisense strand to SEQ ID NO: 1006446
agaguaaagaugauauccc

SEQ ID NO: 1006448 - RNA, 19 nt, Artificial Sequence
  Description of Artificial Sequence: Synthetic oligonucleotide
  Sense strand starting at position 717 of SEQ ID NO: 914470
gcagaaacuucccuaugga

SEQ ID NO: 1006449 - RNA, 19 nt, Artificial Sequence
  Description of Artificial Sequence: Synthetic oligonucleotide
  Antisense strand to SEQ ID NO: 1006448
uccauagggaaguuucugc

SEQ ID NO: 1006450 - RNA, 19 nt, Artificial Sequence
  Description of Artificial Sequence: Synthetic oligonucleotide
  Sense strand starting at position 1033 of SEQ ID NO: 914470
uccucuuucucucuaguga

SEQ ID NO: 1006451 - RNA, 19 nt, Artificial Sequence
  Description of Artificial Sequence: Synthetic oligonucleotide
  Antisense strand to SEQ ID NO: 1006450
ucacuagagagaaagagga

SEQ ID NO: 1006452 - RNA, 19 nt, Artificial Sequence
  Description of Artificial Sequence: Synthetic oligonucleotide
  Sense strand starting at position 1311 of SEQ ID NO: 914470
gacugugagcuguaauacu

SEQ ID NO: 1006453 - RNA, 19 nt, Artificial Sequence
  Description of Artificial Sequence: Synthetic oligonucleotide
  Antisense strand to SEQ ID NO: 1006452
aguauuacagcucacaguc

SEQ ID NO: 1006454 - RNA, 19 nt, Artificial Sequence
  Description of Artificial Sequence: Synthetic oligonucleotide
  Sense strand starting at position 1969 of SEQ ID NO: 914470
guggacaggucuucagaau

SEQ ID NO: 1006455 - RNA, 19 nt, Artificial Sequence
  Description of Artificial Sequence: Synthetic oligonucleotide
  Antisense strand to SEQ ID NO: 1006454
auucugaagaccuguccac

SEQ ID NO: 1006456 - RNA, 19 nt, Artificial Sequence
  Description of Artificial Sequence: Synthetic oligonucleotide
  Sense strand starting at position 2172 of SEQ ID NO: 914470
aauuucugguaguaguaaa

SEQ ID NO: 1006457 - RNA, 19 nt, Artificial Sequence
  Description of Artificial Sequence: Synthetic oligonucleotide
  Antisense strand to SEQ ID NO: 1006456
uuuacuacuaccagaaauu

SEQ ID NO: 1006458 - RNA, 19 nt, Artificial Sequence
  Description of Artificial Sequence: Synthetic oligonucleotide
  Sense strand starting at position 2195 of SEQ ID NO: 914470
ugaagcaggcaaugauaua

SEQ ID NO: 1006459 - RNA, 19 nt, Artificial Sequence
  Description of Artificial Sequence: Synthetic oligonucleotide
  Antisense strand to SEQ ID NO: 1006458
uauaucauugccugcuuca

SEQ ID NO: 1006460 - RNA, 19 nt, Artificial Sequence
  Description of Artificial Sequence: Synthetic oligonucleotide
  Sense strand starting at position 2235 of SEQ ID NO: 914470
ucaguuaucguuugaauaa

SEQ ID NO: 1006461 - RNA, 19 nt, Artificial Sequence
  Description of Artificial Sequence: Synthetic oligonucleotide
  Antisense strand to SEQ ID NO: 1006460
uuauucaaacgauaacuga

SEQ ID NO: 1006462 - RNA, 19 nt, Artificial Sequence
  Description of Artificial Sequence: Synthetic oligonucleotide
  Sense strand starting at position 2250 of SEQ ID NO: 914470
auaaauuacuguuugugga

SEQ ID NO: 1006463 - RNA, 19 nt, Artificial Sequence
  Description of Artificial Sequence: Synthetic oligonucleotide
  Antisense strand to SEQ ID NO: 1006462
uccacaaacaguaauuuau

SEQ ID NO: 1006464 - RNA, 19 nt, Artificial Sequence
  Description of Artificial Sequence: Synthetic oligonucleotide
  Sense strand starting at position 2251 of SEQ ID NO: 914470
uaaauuacuguuuguggaa

SEQ ID NO: 1006465 - RNA, 19 nt, Artificial Sequence
  Description of Artificial Sequence: Synthetic oligonucleotide
  Antisense strand to SEQ ID NO: 1006464
uuccacaaacaguaauuua

SEQ ID NO: 1006466 - RNA, 19 nt, Artificial Sequence
  Description of Artificial Sequence: Synthetic oligonucleotide
  Sense strand starting at position 2252 of SEQ ID NO: 914470
aaauuacuguuuguggaaa

SEQ ID NO: 1006467 - RNA, 19 nt, Artificial Sequence
  Description of Artificial Sequence: Synthetic oligonucleotide
  Antisense strand to SEQ ID NO: 1006466
uuuccacaaacaguaauuu

SEQ ID NO: 1006468 - RNA, 19 nt, Artificial Sequence
  Description of Artificial Sequence: Synthetic oligonucleotide
  Sense strand starting at position 2459 of SEQ ID NO: 914470
gggcauaaauacucuuuau

SEQ ID NO: 1006469 - RNA, 19 nt, Artificial Sequence
  Description of Artificial Sequence: Synthetic oligonucleotide
  Antisense strand to SEQ ID NO: 1006468
auaaagaguauuuaugccc

SEQ ID NO: 1006470 - RNA, 19 nt, Artificial Sequence
  Description of Artificial Sequence: Synthetic oligonucleotide
  Sense strand starting at position 2580 of SEQ ID NO: 914470
ucaaaugaagcuugccauu

SEQ ID NO: 1006471 - RNA, 19 nt, Artificial Sequence
  Description of Artificial Sequence: Synthetic oligonucleotide
  Antisense strand to SEQ ID NO: 1006470
aauggcaagcuucauuuga

SEQ ID NO: 1006472 - RNA, 19 nt, Artificial Sequence
  Description of Artificial Sequence: Synthetic oligonucleotide
  Sense strand starting at position 2616 of SEQ ID NO: 914470
ccugauagauuaguuaaau

SEQ ID NO: 1006473 - RNA, 19 nt, Artificial Sequence
  Description of Artificial Sequence: Synthetic oligonucleotide
  Antisense strand to SEQ ID NO: 1006472
auuuaacuaaucuaucagg

SEQ ID NO: 1006474 - RNA, 19 nt, Artificial Sequence
  Description of Artificial Sequence: Synthetic oligonucleotide
  Sense strand starting at position 2617 of SEQ ID NO: 914470
cugauagauuaguuaaaug

SEQ ID NO: 1006475 - RNA, 19 nt, Artificial Sequence
  Description of Artificial Sequence: Synthetic oligonucleotide
  Antisense strand to SEQ ID NO: 1006474
cauuuaacuaaucuaucag

SEQ ID NO: 1006476 - RNA, 19 nt, Artificial Sequence
  Description of Artificial Sequence: Synthetic oligonucleotide
  Sense strand starting at position 2886 of SEQ ID NO: 914470
aucuuuagguguuccucua

SEQ ID NO: 1006477 - RNA, 19 nt, Artificial Sequence
  Description of Artificial Sequence: Synthetic oligonucleotide
  Antisense strand to SEQ ID NO: 1006476
uagaggaacaccuaaagau

SEQ ID NO: 1006478 - RNA, 19 nt, Artificial Sequence
  Description of Artificial Sequence: Synthetic oligonucleotide
  Sense strand starting at position 2894 of SEQ ID NO: 914470
guguuccucuacuuggaau

SEQ ID NO: 1006479 - RNA, 19 nt, Artificial Sequence
  Description of Artificial Sequence: Synthetic oligonucleotide
  Antisense strand to SEQ ID NO: 1006478
auuccaaguagaggaacac

SEQ ID NO: 1006480 - RNA, 19 nt, Artificial Sequence
  Description of Artificial Sequence: Synthetic oligonucleotide
  Sense strand starting at position 2961 of SEQ ID NO: 914470
aguuaagaaucgucucuga

SEQ ID NO: 1006481 - RNA, 19 nt, Artificial Sequence
  Description of Artificial Sequence: Synthetic oligonucleotide
  Antisense strand to SEQ ID NO: 1006480
ucagagacgauucuuaacu

SEQ ID NO: 1006482 - RNA, 19 nt, Artificial Sequence
  Description of Artificial Sequence: Synthetic oligonucleotide
  Sense strand starting at position 2964 of SEQ ID NO: 914470
uaagaaucgucucugaagc

SEQ ID NO: 1006483 - RNA, 19 nt, Artificial Sequence
  Description of Artificial Sequence: Synthetic oligonucleotide
  Antisense strand to SEQ ID NO: 1006482
gcuucagagacgauucuua

SEQ ID NO: 1006484 - RNA, 19 nt, Artificial Sequence
  Description of Artificial Sequence: Synthetic oligonucleotide
  Sense strand starting at position 3035 of SEQ ID NO: 914470
cgcuauagcuauuuguacu

SEQ ID NO: 1006485 - RNA, 19 nt, Artificial Sequence
  Description of Artificial Sequence: Synthetic oligonucleotide
  Antisense strand to SEQ ID NO: 1006484
aguacaaauagcuauagcg

SEQ ID NO: 1006486 - RNA, 19 nt, Artificial Sequence
  Description of Artificial Sequence: Synthetic oligonucleotide
  Sense strand starting at position 3048 of SEQ ID NO: 914470
uguacuucugguggaggau

SEQ ID NO: 1006487 - RNA, 19 nt, Artificial Sequence
  Description of Artificial Sequence: Synthetic oligonucleotide
  Antisense strand to SEQ ID NO: 1006486
auccuccaccagaaguaca

SEQ ID NO: 1006488 - RNA, 19 nt, Artificial Sequence
  Description of Artificial Sequence: Synthetic oligonucleotide
  Sense strand starting at position 3204 of SEQ ID NO: 914470
auguguauuaaguggaugu

SEQ ID NO: 1006489 - RNA, 19 nt, Artificial Sequence
  Description of Artificial Sequence: Synthetic oligonucleotide
  Antisense strand to SEQ ID NO: 1006488
acauccacuuaauacacau

SEQ ID NO: 1006490 - RNA, 19 nt, Artificial Sequence
  Description of Artificial Sequence: Synthetic oligonucleotide
  Sense strand starting at position 3208 of SEQ ID NO: 914470
guauuaaguggauguugaa

SEQ ID NO: 1006491 - RNA, 19 nt, Artificial Sequence
  Description of Artificial Sequence: Synthetic oligonucleotide
  Antisense strand to SEQ ID NO: 1006490
uucaacauccacuuaauac

SEQ ID NO: 1006492 - RNA, 19 nt, Artificial Sequence
  Description of Artificial Sequence: Synthetic oligonucleotide
  Sense strand starting at position 3677 of SEQ ID NO: 914470
acugaacgucuacagugau

SEQ ID NO: 1006493 - RNA, 19 nt, Artificial Sequence
  Description of Artificial Sequence: Synthetic oligonucleotide
  Antisense strand to SEQ ID NO: 1006492
aucacuguagacguucagu

SEQ ID NO: 1006494 - RNA, 19 nt, Artificial Sequence
  Description of Artificial Sequence: Synthetic oligonucleotide
  Sense strand starting at position 3680 of SEQ ID NO: 914470
gaacgucuacagugaucca

SEQ ID NO: 1006495 - RNA, 19 nt, Artificial Sequence
  Description of Artificial Sequence: Synthetic oligonucleotide
  Antisense strand to SEQ ID NO: 1006494
uggaucacuguagacguuc

SEQ ID NO: 1006496 - RNA, 19 nt, Artificial Sequence
  Description of Artificial Sequence: Synthetic oligonucleotide
  Sense strand starting at position 3683 of SEQ ID NO: 914470
cgucuacagugauccaaua

SEQ ID NO: 1006497 - RNA, 19 nt, Artificial Sequence
  Description of Artificial Sequence: Synthetic oligonucleotide
  Antisense strand to SEQ ID NO: 1006496
uauuggaucacuguagacg

SEQ ID NO: 1006498 - RNA, 19 nt, Artificial Sequence
  Description of Artificial Sequence: Synthetic oligonucleotide
  Sense strand starting at position 52 of SEQ ID NO: 914471
aggcauuaacagcauauau

SEQ ID NO: 1006499 - RNA, 19 nt, Artificial Sequence
  Description of Artificial Sequence: Synthetic oligonucleotide
  Antisense strand to SEQ ID NO: 1006498
auauaugcuguuaaugccu

SEQ ID NO: 1006500 - RNA, 19 nt, Artificial Sequence
  Description of Artificial Sequence: Synthetic oligonucleotide
  Sense strand starting at position 72 of SEQ ID NO: 914471
cuuacaugcuggucuacua

SEQ ID NO: 1006501 - RNA, 19 nt, Artificial Sequence
  Description of Artificial Sequence: Synthetic oligonucleotide
  Antisense strand to SEQ ID NO: 1006500
uaguagaccagcauguaag

SEQ ID NO: 1006502 - RNA, 19 nt, Artificial Sequence
  Description of Artificial Sequence: Synthetic oligonucleotide
  Sense strand starting at position 104 of SEQ ID NO: 914471
guugcacuagaauaacuaa

SEQ ID NO: 1006503 - RNA, 19 nt, Artificial Sequence
  Description of Artificial Sequence: Synthetic oligonucleotide
  Antisense strand to SEQ ID NO: 1006502
uuaguuauucuagugcaac

SEQ ID NO: 1006504 - RNA, 19 nt, Artificial Sequence
  Description of Artificial Sequence: Synthetic oligonucleotide
  Sense strand starting at position 123 of SEQ ID NO: 914471
gguccuuccauuggucaga

SEQ ID NO: 1006505 - RNA, 19 nt, Artificial Sequence
  Description of Artificial Sequence: Synthetic oligonucleotide
  Antisense strand to SEQ ID NO: 1006504
ucugaccaauggaaggacc

SEQ ID NO: 1006506 - RNA, 19 nt, Artificial Sequence
  Description of Artificial Sequence: Synthetic oligonucleotide
  Sense strand starting at position 170 of SEQ ID NO: 914471
ugacauuauuaggcaaguu

SEQ ID NO: 1006507 - RNA, 19 nt, Artificial Sequence
  Description of Artificial Sequence: Synthetic oligonucleotide
  Antisense strand to SEQ ID NO: 1006506
aacuugccuaauaauguca

SEQ ID NO: 1006508 - RNA, 19 nt, Artificial Sequence
  Description of Artificial Sequence: Synthetic oligonucleotide
  Sense strand starting at position 341 of SEQ ID NO: 914471
ucauuuauuucccaguaug

SEQ ID NO: 1006509 - RNA, 19 nt, Artificial Sequence
  Description of Artificial Sequence: Synthetic oligonucleotide
  Antisense strand to SEQ ID NO: 1006508
cauacugggaaauaaauga

SEQ ID NO: 1006510 - RNA, 19 nt, Artificial Sequence
  Description of Artificial Sequence: Synthetic oligonucleotide
  Sense strand starting at position 442 of SEQ ID NO: 914471
ggaugacuuccuggaguuc

SEQ ID NO: 1006511 - RNA, 19 nt, Artificial Sequence
  Description of Artificial Sequence: Synthetic oligonucleotide
  Antisense strand to SEQ ID NO: 1006510
gaacuccaggaagucaucc

SEQ ID NO: 1006512 - RNA, 19 nt, Artificial Sequence
  Description of Artificial Sequence: Synthetic oligonucleotide
  Sense strand starting at position 488 of SEQ ID NO: 914471
ccaucauaauguguaugua

SEQ ID NO: 1006513 - RNA, 19 nt, Artificial Sequence
  Description of Artificial Sequence: Synthetic oligonucleotide
  Antisense strand to SEQ ID NO: 1006512
uacauacacauuaugaugg

SEQ ID NO: 1006514 - RNA, 19 nt, Artificial Sequence
  Description of Artificial Sequence: Synthetic oligonucleotide
  Sense strand starting at position 611 of SEQ ID NO: 914471
cuguuacugguguggauua

SEQ ID NO: 1006515 - RNA, 19 nt, Artificial Sequence
  Description of Artificial Sequence: Synthetic oligonucleotide
  Antisense strand to SEQ ID NO: 1006514
uaauccacaccaguaacag

SEQ ID NO: 1006516 - RNA, 19 nt, Artificial Sequence
  Description of Artificial Sequence: Synthetic oligonucleotide
  Sense strand starting at position 613 of SEQ ID NO: 914471
guuacugguguggauuaaa

SEQ ID NO: 1006517 - RNA, 19 nt, Artificial Sequence
  Description of Artificial Sequence: Synthetic oligonucleotide
  Antisense strand to SEQ ID NO: 1006516
uuuaauccacaccaguaac

SEQ ID NO: 1006518 - RNA, 19 nt, Artificial Sequence
  Description of Artificial Sequence: Synthetic oligonucleotide
  Sense strand starting at position 674 of SEQ ID NO: 914471
uaaauaacagcguagaagu

SEQ ID NO: 1006519 - RNA, 19 nt, Artificial Sequence
  Description of Artificial Sequence: Synthetic oligonucleotide
  Antisense strand to SEQ ID NO: 1006518
acuucuacgcuguuauuua

SEQ ID NO: 1006520 - RNA, 19 nt, Artificial Sequence
  Description of Artificial Sequence: Synthetic oligonucleotide
  Sense strand starting at position 687 of SEQ ID NO: 914471
agaaguguuuggguaccga

SEQ ID NO: 1006521 - RNA, 19 nt, Artificial Sequence
  Description of Artificial Sequence: Synthetic oligonucleotide
  Antisense strand to SEQ ID NO: 1006520
ucgguacccaaacacuucu

SEQ ID NO: 1006522 - RNA, 19 nt, Artificial Sequence
  Description of Artificial Sequence: Synthetic oligonucleotide
  Sense strand starting at position 716 of SEQ ID NO: 914471
guaccuggcacugaagauu

SEQ ID NO: 1006523 - RNA, 19 nt, Artificial Sequence
  Description of Artificial Sequence: Synthetic oligonucleotide
  Antisense strand to SEQ ID NO: 1006522
aaucuucagugccagguac

SEQ ID NO: 1006524 - RNA, 19 nt, Artificial Sequence
  Description of Artificial Sequence: Synthetic oligonucleotide
  Sense strand starting at position 748 of SEQ ID NO: 914471
agagauaagaggugccuau

SEQ ID NO: 1006525 - RNA, 19 nt, Artificial Sequence
  Description of Artificial Sequence: Synthetic oligonucleotide
  Antisense strand to SEQ ID NO: 1006524
auaggcaccucuuaucucu

SEQ ID NO: 1006526 - RNA, 19 nt, Artificial Sequence
  Description of Artificial Sequence: Synthetic oligonucleotide
  Sense strand starting at position 973 of SEQ ID NO: 914471
ucuacaaugugacugaaau

SEQ ID NO: 1006527 - RNA, 19 nt, Artificial Sequence
  Description of Artificial Sequence: Synthetic oligonucleotide
  Antisense strand to SEQ ID NO: 1006526
auuucagucacauuguaga

SEQ ID NO: 1006528 - RNA, 19 nt, Artificial Sequence
  Description of Artificial Sequence: Synthetic oligonucleotide
  Sense strand starting at position 974 of SEQ ID NO: 914471
cuacaaugugacugaaaug

SEQ ID NO: 1006529 - RNA, 19 nt, Artificial Sequence
  Description of Artificial Sequence: Synthetic oligonucleotide
  Antisense strand to SEQ ID NO: 1006528
cauuucagucacauuguag

SEQ ID NO: 1006530 - RNA, 19 nt, Artificial Sequence
  Description of Artificial Sequence: Synthetic oligonucleotide
  Sense strand starting at position 999 of SEQ ID NO: 914471
gaauuccagugagaauaag

SEQ ID NO: 1006531 - RNA, 19 nt, Artificial Sequence
  Description of Artificial Sequence: Synthetic oligonucleotide
  Antisense strand to SEQ ID NO: 1006530
cuuauucucacuggaauuc

SEQ ID NO: 1006532 - RNA, 19 nt, Artificial Sequence
  Description of Artificial Sequence: Synthetic oligonucleotide
  Sense strand starting at position 1036 of SEQ ID NO: 914471
uuaugaugcugucuaccaa

SEQ ID NO: 1006533 - RNA, 19 nt, Artificial Sequence
  Description of Artificial Sequence: Synthetic oligonucleotide
  Antisense strand to SEQ ID NO: 1006532
uugguagacagcaucauaa

SEQ ID NO: 1006534 - RNA, 19 nt, Artificial Sequence
  Description of Artificial Sequence: Synthetic oligonucleotide
  Sense strand starting at position 1152 of SEQ ID NO: 914471
uuggcuccugacgagauua

SEQ ID NO: 1006535 - RNA, 19 nt, Artificial Sequence
  Description of Artificial Sequence: Synthetic oligonucleotide
  Antisense strand to SEQ ID NO: 1006534
uaaucucgucaggagccaa

SEQ ID NO: 1006536 - RNA, 19 nt, Artificial Sequence
  Description of Artificial Sequence: Synthetic oligonucleotide
  Sense strand starting at position 1154 of SEQ ID NO: 914471
ggcuccugacgagauuacu

SEQ ID NO: 1006537 - RNA, 19 nt, Artificial Sequence
  Description of Artificial Sequence: Synthetic oligonucleotide
  Antisense strand to SEQ ID NO: 1006536
aguaaucucgucaggagcc

SEQ ID NO: 1006538 - RNA, 19 nt, Artificial Sequence
  Description of Artificial Sequence: Synthetic oligonucleotide
  Sense strand starting at position 1240 of SEQ ID NO: 914471
aaagguucgcuuuaagaac

SEQ ID NO: 1006539 - RNA, 19 nt, Artificial Sequence
  Description of Artificial Sequence: Synthetic oligonucleotide
  Antisense strand to SEQ ID NO: 1006538
guucuuaaagcgaaccuuu

SEQ ID NO: 1006540 - RNA, 19 nt, Artificial Sequence
  Description of Artificial Sequence: Synthetic oligonucleotide
  Sense strand starting at position 1411 of SEQ ID NO: 914471
ggcaucgucucccuagaga

SEQ ID NO: 1006541 - RNA, 19 nt, Artificial Sequence
  Description of Artificial Sequence: Synthetic oligonucleotide
  Antisense strand to SEQ ID NO: 1006540
ucucuagggagacgaugcc

SEQ ID NO: 1006542 - RNA, 19 nt, Artificial Sequence
  Description of Artificial Sequence: Synthetic oligonucleotide
  Sense strand starting at position 1516 of SEQ ID NO: 914471
ucuccucugccuugggaga

SEQ ID NO: 1006543 - RNA, 19 nt, Artificial Sequence
  Description of Artificial Sequence: Synthetic oligonucleotide
  Antisense strand to SEQ ID NO: 1006542
ucucccaaggcagaggaga

SEQ ID NO: 1006544 - RNA, 19 nt, Artificial Sequence
  Description of Artificial Sequence: Synthetic oligonucleotide
  Sense strand starting at position 1618 of SEQ ID NO: 914471
caggcuuucgggcaaggua

SEQ ID NO: 1006545 - RNA, 19 nt, Artificial Sequence
  Description of Artificial Sequence: Synthetic oligonucleotide
  Antisense strand to SEQ ID NO: 1006544
uaccuugcccgaaagccug

SEQ ID NO: 1006546 - RNA, 19 nt, Artificial Sequence
  Description of Artificial Sequence: Synthetic oligonucleotide
  Sense strand starting at position 2009 of SEQ ID NO: 914471
gggugauugcguagugcga

SEQ ID NO: 1006547 - RNA, 19 nt, Artificial Sequence
  Description of Artificial Sequence: Synthetic oligonucleotide
  Antisense strand to SEQ ID NO: 1006546
ucgcacuacgcaaucaccc

SEQ ID NO: 1006548 - RNA, 19 nt, Artificial Sequence
  Description of Artificial Sequence: Synthetic oligonucleotide
  Sense strand starting at position 2128 of SEQ ID NO: 914471
acuauuucagucgguaugu

SEQ ID NO: 1006549 - RNA, 19 nt, Artificial Sequence
  Description of Artificial Sequence: Synthetic oligonucleotide
  Antisense strand to SEQ ID NO: 1006548
acauaccgacugaaauagu

SEQ ID NO: 1006550 - RNA, 19 nt, Artificial Sequence
  Description of Artificial Sequence: Synthetic oligonucleotide
  Sense strand starting at position 2143 of SEQ ID NO: 914471
auguccuuucuuuagggaa

SEQ ID NO: 1006551 - RNA, 19 nt, Artificial Sequence
  Description of Artificial Sequence: Synthetic oligonucleotide
  Antisense strand to SEQ ID NO: 1006550
uucccuaaagaaaggacau

SEQ ID NO: 1006552 - RNA, 19 nt, Artificial Sequence
  Description of Artificial Sequence: Synthetic oligonucleotide
  Sense strand starting at position 2173 of SEQ ID NO: 914471
ccguuucuaggagaaauuc

SEQ ID NO: 1006553 - RNA, 19 nt, Artificial Sequence
  Description of Artificial Sequence: Synthetic oligonucleotide
  Antisense strand to SEQ ID NO: 1006552
gaauuucuccuagaaacgg

SEQ ID NO: 1006554 - RNA, 19 nt, Artificial Sequence
  Description of Artificial Sequence: Synthetic oligonucleotide
  Sense strand starting at position 2234 of SEQ ID NO: 914471
aagacugcuccgcauagua

SEQ ID NO: 1006555 - RNA, 19 nt, Artificial Sequence
  Description of Artificial Sequence: Synthetic oligonucleotide
  Antisense strand to SEQ ID NO: 1006554
uacuaugcggagcagucuu

SEQ ID NO: 1006556 - RNA, 19 nt, Artificial Sequence
  Description of Artificial Sequence: Synthetic oligonucleotide
  Sense strand starting at position 2236 of SEQ ID NO: 914471
gacugcuccgcauaguaaa

SEQ ID NO: 1006557 - RNA, 19 nt, Artificial Sequence
  Description of Artificial Sequence: Synthetic oligonucleotide
  Antisense strand to SEQ ID NO: 1006556
uuuacuaugcggagcaguc

SEQ ID NO: 1006558 - RNA, 19 nt, Artificial Sequence
  Description of Artificial Sequence: Synthetic oligonucleotide
  Sense strand starting at position 2305 of SEQ ID NO: 914471
augaauauucucuguaagu

SEQ ID NO: 1006559 - RNA, 19 nt, Artificial Sequence
  Description of Artificial Sequence: Synthetic oligonucleotide
  Antisense strand to SEQ ID NO: 1006558
acuuacagagaauauucau

SEQ ID NO: 1006560 - RNA, 19 nt, Artificial Sequence
  Description of Artificial Sequence: Synthetic oligonucleotide
  Sense strand starting at position 2306 of SEQ ID NO: 914471
ugaauauucucuguaaguu

SEQ ID NO: 1006561 - RNA, 19 nt, Artificial Sequence
  Description of Artificial Sequence: Synthetic oligonucleotide
  Antisense strand to SEQ ID NO: 1006560
aacuuacagagaauauuca

SEQ ID NO: 1006562 - RNA, 19 nt, Artificial Sequence
  Description of Artificial Sequence: Synthetic oligonucleotide
  Sense strand starting at position 2307 of SEQ ID NO: 914471
gaauauucucuguaaguug

SEQ ID NO: 1006563 - RNA, 19 nt, Artificial Sequence
  Description of Artificial Sequence: Synthetic oligonucleotide
  Antisense strand to SEQ ID NO: 1006562
caacuuacagagaauauuc

SEQ ID NO: 1006564 - RNA, 19 nt, Artificial Sequence
  Description of Artificial Sequence: Synthetic oligonucleotide
  Sense strand starting at position 2354 of SEQ ID NO: 914471
guggcuuacucucucaaga

SEQ ID NO: 1006565 - RNA, 19 nt, Artificial Sequence
  Description of Artificial Sequence: Synthetic oligonucleotide
  Antisense strand to SEQ ID NO: 1006564
ucuugagagaguaagccac

SEQ ID NO: 1006566 - RNA, 19 nt, Artificial Sequence
  Description of Artificial Sequence: Synthetic oligonucleotide
  Sense strand starting at position 2389 of SEQ ID NO: 914471
cuagguuucuaucuauaug

SEQ ID NO: 1006567 - RNA, 19 nt, Artificial Sequence
  Description of Artificial Sequence: Synthetic oligonucleotide
  Antisense strand to SEQ ID NO: 1006566
cauauagauagaaaccuag

SEQ ID NO: 1006568 - RNA, 19 nt, Artificial Sequence
  Description of Artificial Sequence: Synthetic oligonucleotide
  Sense strand starting at position 2392 of SEQ ID NO: 914471
gguuucuaucuauauguau

SEQ ID NO: 1006569 - RNA, 19 nt, Artificial Sequence
  Description of Artificial Sequence: Synthetic oligonucleotide
  Antisense strand to SEQ ID NO: 1006568
auacauauagauagaaacc

SEQ ID NO: 1006570 - RNA, 19 nt, Artificial Sequence
  Description of Artificial Sequence: Synthetic oligonucleotide
  Sense strand starting at position 2945 of SEQ ID NO: 914471
acaggauguaagcauagua

SEQ ID NO: 1006571 - RNA, 19 nt, Artificial Sequence
  Description of Artificial Sequence: Synthetic oligonucleotide
  Antisense strand to SEQ ID NO: 1006570
uacuaugcuuacauccugu

SEQ ID NO: 1006572 - RNA, 19 nt, Artificial Sequence
  Description of Artificial Sequence: Synthetic oligonucleotide
  Sense strand starting at position 3125 of SEQ ID NO: 914471
uuagguugcauaggauaau

SEQ ID NO: 1006573 - RNA, 19 nt, Artificial Sequence
  Description of Artificial Sequence: Synthetic oligonucleotide
  Antisense strand to SEQ ID NO: 1006572
auuauccuaugcaaccuaa

SEQ ID NO: 1006574 - RNA, 19 nt, Artificial Sequence
  Description of Artificial Sequence: Synthetic oligonucleotide
  Sense strand starting at position 3164 of SEQ ID NO: 914471
ugcuacaaagaguauaauu

SEQ ID NO: 1006575 - RNA, 19 nt, Artificial Sequence
  Description of Artificial Sequence: Synthetic oligonucleotide
  Antisense strand to SEQ ID NO: 1006574
aauuauacucuuuguagca

SEQ ID NO: 1006576 - RNA, 19 nt, Artificial Sequence
  Description of Artificial Sequence: Synthetic oligonucleotide
  Sense strand starting at position 3907 of SEQ ID NO: 914471
aucagugguguugaggauu

SEQ ID NO: 1006577 - RNA, 19 nt, Artificial Sequence
  Description of Artificial Sequence: Synthetic oligonucleotide
  Antisense strand to SEQ ID NO: 1006576
aauccucaacaccacugau

SEQ ID NO: 1006578 - RNA, 19 nt, Artificial Sequence
  Description of Artificial Sequence: Synthetic oligonucleotide
  Sense strand starting at position 156 of SEQ ID NO: 914472
cuggcucucccauauguau

SEQ ID NO: 1006579 - RNA, 19 nt, Artificial Sequence
  Description of Artificial Sequence: Synthetic oligonucleotide
  Antisense strand to SEQ ID NO: 1006578
auacauaugggagagccag

SEQ ID NO: 1006580 - RNA, 19 nt, Artificial Sequence
  Description of Artificial Sequence: Synthetic oligonucleotide
  Sense strand starting at position 354 of SEQ ID NO: 914472
uuguguucccacuaucuuu

SEQ ID NO: 1006581 - RNA, 19 nt, Artificial Sequence
  Description of Artificial Sequence: Synthetic oligonucleotide
  Antisense strand to SEQ ID NO: 1006580
aaagauagugggaacacaa

SEQ ID NO: 1006582 - RNA, 19 nt, Artificial Sequence
  Description of Artificial Sequence: Synthetic oligonucleotide
  Sense strand starting at position 416 of SEQ ID NO: 914472
uucugucucgcccauuaaa

SEQ ID NO: 1006583 - RNA, 19 nt, Artificial Sequence
  Description of Artificial Sequence: Synthetic oligonucleotide
  Antisense strand to SEQ ID NO: 1006582
uuuaaugggcgagacagaa

SEQ ID NO: 1006584 - RNA, 19 nt, Artificial Sequence
  Description of Artificial Sequence: Synthetic oligonucleotide
  Sense strand starting at position 419 of SEQ ID NO: 914472
ugucucgcccauuaaacuu

SEQ ID NO: 1006585 - RNA, 19 nt, Artificial Sequence
  Description of Artificial Sequence: Synthetic oligonucleotide
  Antisense strand to SEQ ID NO: 1006584
aaguuuaaugggcgagaca

SEQ ID NO: 1006586 - RNA, 19 nt, Artificial Sequence
  Description of Artificial Sequence: Synthetic oligonucleotide
  Sense strand starting at position 433 of SEQ ID NO: 914472
aacuuugagcucugugaag

SEQ ID NO: 1006587 - RNA, 19 nt, Artificial Sequence
  Description of Artificial Sequence: Synthetic oligonucleotide
  Antisense strand to SEQ ID NO: 1006586
cuucacagagcucaaaguu

SEQ ID NO: 1006588 - RNA, 19 nt, Artificial Sequence
  Description of Artificial Sequence: Synthetic oligonucleotide
  Sense strand starting at position 440 of SEQ ID NO: 914472
agcucugugaaguaggaau

SEQ ID NO: 1006589 - RNA, 19 nt, Artificial Sequence
  Description of Artificial Sequence: Synthetic oligonucleotide
  Antisense strand to SEQ ID NO: 1006588
auuccuacuucacagagcu

SEQ ID NO: 1006590 - RNA, 19 nt, Artificial Sequence
  Description of Artificial Sequence: Synthetic oligonucleotide
  Sense strand starting at position 531 of SEQ ID NO: 914472
acagaauccaagugugagu

SEQ ID NO: 1006591 - RNA, 19 nt, Artificial Sequence
  Description of Artificial Sequence: Synthetic oligonucleotide
  Antisense strand to SEQ ID NO: 1006590
acucacacuuggauucugu

SEQ ID NO: 1006592 - RNA, 19 nt, Artificial Sequence
  Description of Artificial Sequence: Synthetic oligonucleotide
  Sense strand starting at position 540 of SEQ ID NO: 914472
aagugugaguguguaacaa

SEQ ID NO: 1006593 - RNA, 19 nt, Artificial Sequence
  Description of Artificial Sequence: Synthetic oligonucleotide
  Antisense strand to SEQ ID NO: 1006592
uuguuacacacucacacuu

SEQ ID NO: 1006594 - RNA, 19 nt, Artificial Sequence
  Description of Artificial Sequence: Synthetic oligonucleotide
  Sense strand starting at position 551 of SEQ ID NO: 914472
uguaacaacucggcugaga

SEQ ID NO: 1006595 - RNA, 19 nt, Artificial Sequence
  Description of Artificial Sequence: Synthetic oligonucleotide
  Antisense strand to SEQ ID NO: 1006594
ucucagccgaguuguuaca

SEQ ID NO: 1006596 - RNA, 19 nt, Artificial Sequence
  Description of Artificial Sequence: Synthetic oligonucleotide
  Sense strand starting at position 553 of SEQ ID NO: 914472
uaacaacucggcugagaaa

SEQ ID NO: 1006597 - RNA, 19 nt, Artificial Sequence
  Description of Artificial Sequence: Synthetic oligonucleotide
  Antisense strand to SEQ ID NO: 1006596
uuucucagccgaguuguua

SEQ ID NO: 1006598 - RNA, 19 nt, Artificial Sequence
  Description of Artificial Sequence: Synthetic oligonucleotide
  Sense strand starting at position 790 of SEQ ID NO: 914472
uccauugugucugugauuu

SEQ ID NO: 1006599 - RNA, 19 nt, Artificial Sequence
  Description of Artificial Sequence: Synthetic oligonucleotide
  Antisense strand to SEQ ID NO: 1006598
aaaucacagacacaaugga

SEQ ID NO: 1006600 - RNA, 19 nt, Artificial Sequence
  Description of Artificial Sequence: Synthetic oligonucleotide
  Sense strand starting at position 929 of SEQ ID NO: 914472
uggagacauuacuugcaga

SEQ ID NO: 1006601 - RNA, 19 nt, Artificial Sequence
  Description of Artificial Sequence: Synthetic oligonucleotide
  Antisense strand to SEQ ID NO: 1006600
ucugcaaguaaugucucca

SEQ ID NO: 1006602 - RNA, 19 nt, Artificial Sequence
  Description of Artificial Sequence: Synthetic oligonucleotide
  Sense strand starting at position 930 of SEQ ID NO: 914472
ggagacauuacuugcagac

SEQ ID NO: 1006603 - RNA, 19 nt, Artificial Sequence
  Description of Artificial Sequence: Synthetic oligonucleotide
  Antisense strand to SEQ ID NO: 1006602
gucugcaaguaaugucucc

SEQ ID NO: 1006604 - RNA, 19 nt, Artificial Sequence
  Description of Artificial Sequence: Synthetic oligonucleotide
  Sense strand starting at position 1101 of SEQ ID NO: 914472
gggugucagaugugaucac

SEQ ID NO: 1006605 - RNA, 19 nt, Artificial Sequence
  Description of Artificial Sequence: Synthetic oligonucleotide
  Antisense strand to SEQ ID NO: 1006604
gugaucacaucugacaccc

SEQ ID NO: 1006606 - RNA, 19 nt, Artificial Sequence
  Description of Artificial Sequence: Synthetic oligonucleotide
  Sense strand starting at position 1105 of SEQ ID NO: 914472
gucagaugugaucacaacu

SEQ ID NO: 1006607 - RNA, 19 nt, Artificial Sequence
  Description of Artificial Sequence: Synthetic oligonucleotide
  Antisense strand to SEQ ID NO: 1006606
aguugugaucacaucugac

SEQ ID NO: 1006608 - RNA, 19 nt, Artificial Sequence
  Description of Artificial Sequence: Synthetic oligonucleotide
  Sense strand starting at position 1226 of SEQ ID NO: 914472
cugugaacuggauguaaga

SEQ ID NO: 1006609 - RNA, 19 nt, Artificial Sequence
  Description of Artificial Sequence: Synthetic oligonucleotide
  Antisense strand to SEQ ID NO: 1006608
ucuuacauccaguucacag

SEQ ID NO: 1006610 - RNA, 19 nt, Artificial Sequence
  Description of Artificial Sequence: Synthetic oligonucleotide
  Sense strand starting at position 1489 of SEQ ID NO: 914472
gguguggacguuugagaag

SEQ ID NO: 1006611 - RNA, 19 nt, Artificial Sequence
  Description of Artificial Sequence: Synthetic oligonucleotide
  Antisense strand to SEQ ID NO: 1006610
cuucucaaacguccacacc

SEQ ID NO: 1006612 - RNA, 19 nt, Artificial Sequence
  Description of Artificial Sequence: Synthetic oligonucleotide
  Sense strand starting at position 2488 of SEQ ID NO: 914472
cugucugaggcuuaacacu

SEQ ID NO: 1006613 - RNA, 19 nt, Artificial Sequence
  Description of Artificial Sequence: Synthetic oligonucleotide
  Antisense strand to SEQ ID NO: 1006612
aguguuaagccucagacag

SEQ ID NO: 1006614 - RNA, 19 nt, Artificial Sequence
  Description of Artificial Sequence: Synthetic oligonucleotide
  Sense strand starting at position 2622 of SEQ ID NO: 914472
ggaagcuucugacuugagu

SEQ ID NO: 1006615 - RNA, 19 nt, Artificial Sequence
  Description of Artificial Sequence: Synthetic oligonucleotide
  Antisense strand to SEQ ID NO: 1006614
acucaagucagaagcuucc
